United States Patent Application Publication US 2017/0335317 A1 - sequence listing, part 3

SEQ ID NO: 4869 - DNA, 1600 bp, mus musculus
tataatgccataaatggaataaataatattataggaatatatgccagagcatctataattagtgattcaataataatatgtaaaaaattattttaacataaatttaatattttgttctaaatgataaattactatttaaaaaccatatgtaataaaaacagtaatgacatacagtgaaagatgttaatctgttcttctcccttctttataaacttatgctcctcttctggtacaactctctatttcagttatgtaaccttcacagtttttgtcatattcatataaaacacatagctaatcacagacatttaatttttgaaagtaaaatttagctcttatttacaactcatagacaagagagtatgctgcagacatacattaagaaaatacaatattctaaacatggtggcacagctttaatctaagcacttgtgtagaagagcaaggttgttcttggtgagtttaaggtcagcctgatctacatggagagttccagaccaaagtcacaaaattaaacatcttctataaaagaaaccaagagaaaggagatagggatgataggacagaggaggaggagggaaggaaaaattaatcagcagaagctacatgccttggtgattaagagatttctgctgggttagtcccagggagctctgggagtactggttagttcatattgttgttcctcctatagggctgcaaaccccttcagctccttgagtaccttctctagctccttcattggggaccctgtgctctgtccaatggatgaatgtgagaatccacttctgtatttgccaggcactgggagagcatctcaggagacagctatatcaggttcctgtcagcaaataggtagcagaggatggcctagtctgttatcaatgggagaagaggcctttggtgttgtgaaggttctatgccccaatataggggaatgccagggccaggaagcaagagtgggtgggctggggagaagggggggtggggaagggataggagatttttagagaggaaactaggaaaggggataacattggaaatgtaaataaagaaaatagctaataaaataaaaagagagatttctgcttttatatggcaccttgattttgttcttagcacccatatcatcaggcagttccccatctcctaaacttgtgtcccatgcgtgtctgagagtccctggattctgcagatatgtgcatataaactcaggcaaacataaaaacatatatgagaaagtaataaatacctgtaaaagttaagaaaagaacatacggtgactatatgatacatatagcatggaatgtaaagcaaattaaaggatgtgaaattcagtgtgcctgtctatatttaaatagggaatttgacatctgtacctctacatgtactttctaataattatcttcaggaacttactacatattgcagcagacaagaatctgcctatatgggaagcaatgaatgaaaagagacagaacaaaaagccatgttatctgtttcaaataagaaatacctggagagtaatagtggtcatagggagttgatgattcagttgtgtttatacgtaggcatgcaattgtatagattccttataaca

SEQ ID NO: 4870 - DNA, 1200 bp, mus musculus
aatattttctgaaccttggagctaggactcttcgccttcttctattcctattattcgaaggtttatgtcttttatggtatatcagacttcctggatattttctgtcaagatgctttatttgcattaacattttgtttgactgatatatcaatttcttttattatatcatctgtcgcatccaccccgaccagcaggaaagacgcaacaccacattgtccttcttcaagcaggtttattcaggaacactacacattgcaatgtaggaacaggaatcccctgaacaaccccggagcatgccttaaataccctactgtctcctcccaatcaccccagtcacgtaacggcagtccattggttcacaacaagtgatgacacttcaggcgagctgacgaagcatggcatctgtgcagtgcatgcagctgggatgtggctaagtctgaggtagtgaggaagtcaggcgcaggtcataagacctggcagctgtcccgggtgccatcttggggcggcggctgcacccgctcctcacatctcctcattatttattatttaggcagagagaatgcctgtcttaggttgtcccctgcgataatgctccttacctgtcatcgggaggacagacagcagtggatctggtccctgtcttaggttggtaacacctccagggagtcttaccagtcattgactacttctctagcatgccaagccacacttgagaagattgtcccaggtctagtgctgcaaaagcctgaatcaacagtgcctgtgcacgggtatgcctttttttgcatatggcaaatgcaccacagggccattactcctgtggcaatgcagatgaatgccagccctcctatgccagcccattccttgaggtgcaatattgctgtgactatggcagcggtaatctcaaaatctcttttaggtctaaacagtgtcatcacagatggagcttgcactggccagggtacaaatctaggcataggggttatcacagccaaggaacatacagatgaattccaatacatactataaaagcaattaccactacaacgtttctcagagccaaaacactcacagaattttcaaacaaatcaaacccgttccaataacaactagcattttcccaagcccctcccatcagtatacttagaggtgacaaatcagtacagtttccatttaccctacataacaaccatacattaa

SEQ ID NO: 4871 - DNA, 1000 bp, mus musculus
tctttttcaatcttttattctgagatagtatctatctctgtcacttatatgtcttatctattcagtttctgttgttatgtctcccttttcatttctgattttgttaattaggatactgtccctgtgccctctagttagtctggctaagggtttatctattgaatttctcaaagaaccagctcctggtttggttgattctttgtatagttctttctgtttccacttcattggtttcagcactgagtttgtttatatcttggcatctacacctcttgggtaaatttgcttctttttgttgtagagctttcaacaggtatgctgtcaagctgctagtgtatgctttttccagtctctttttgaggcactcggagctatgagttttcttcttaggactgctttcattgtgtcccataagtttggaaatgttgtgggtttattttcattgaactctaaaatgtctttaatttctttatttttcttgaccaaattatcattgagtagagtgttgttcagattctacctgtatgtgggtgtagtggctattcctggttgtcaacttgacaatatttggaatgaactacaatccggaattggaaggctcaccagtgacccttatctggaggcttggagatccttatctggatcttggtatggagatcttgagccatagtggctatggattccagaagattgaatccgagtttaaggaacacacctttaatctgggctacacctttcatctgggattaaaggtgtggtggaacacacctttaatctgggctacaccttctgctggagacaatataaggacattggaagaagggagtctagctcttcttcttgctccttcgcctgcttgctgcgtgagactgagtaactgctagatccttggacttccattcacagctgcgactgaacaattgctgggaattgggctgccgactgtaagtcatcaataaattcctttactatctagagactatccataagttctgtgact

SEQ ID NO: 4872 - DNA, 1600 bp, mus musculus
cctgtgggatcctgtaaaaacatactgtagcttttacataatagcaggtattagttactgacagaatgatacatgcattcaggagtgggattagttcaaatgattcactataaatatgaaatcatagttactgtctttcacatcatttcctctttttcttctcctaatgggggttaaggtcattgttattgtttgttgttgctgttgttactattattaaacatctctctcatactacttctccatcactgattttaaggtgtctctaacctcaaggcaatgttttccagtaactatgattattatttctattttcagagatctgccctagaatatttttctgaagaaaattctaagcatgtttccagacaccaccgcaaggtaggtattccacatgggtggactttaagaagctaccatgcatactgtgttttcaacttctttctgtaagatgtggtctattctgcctaattttttttcctttgtaagacttaattgtctgaataaacactcaaacatcataaagtgtaagaaagaattattacatagtataaatgagtatcataatgatttcactctatacatgacagtaatctttgtaactcaagaattttatttgtttgtttgttgtggtaaatctccaaatatgcccaggcaataaaaacacaactcagttaatatgaatacatgctgtgcacctagattgggcagatctactgctacactaccatcttccacatcttatgagaccccttagaacttgcagtttctccaggtcatgtgcctttgctctgctcttctacttcttctcatctgcgtcctctccctcttccattttctccttcttctctccctcccccttccgctccaccttccccatatctgcccaatcatcagctctcctttattttacaatttaaggtgggaagcagatttacaggaaataacctgagtgctgactcattccttgtttatagcccctcacagaaggatggaattaacaccaaatataattacccccagtgctatccacaactatatcatgaaactgttgctagtttcatgatataactctgtgtctccatgtttattctataaaattcactacttctaatgcatcacatttaagcaacccttctgttttgtgataggaaattaaaagaaaaactcactggaattcacaagtgaaactcatcgtgcaccacttacatcaataaataaaaaattacctgtgggtgacaattacaggaatctataggttgtaatagcagcattttagaaaagtctagaacatatcctaataatatttagagttagatattccctgaactacttcaactcacaaatagaaataggatatagacaactagacttgttgaaattatctgtcattacatgaagaggttgttctctggtattttgagttggtgtacaactatgagggcataggttcatatctaggttaatgttcaggaaatgtaatcaatgcagacatatactgtgcttgtataaatacaatcataatgcaagaactcatgttttccttggtagtttttgaggcattttatttttatgaatgctttgcccttttatttacatt

SEQ ID NO: 4873 - DNA, 1200 bp, mus musculus
ggattgtatcactctgaaatgctcttgcctcagactctggattcctgaaattgactcatttttgagacactactcagcaaaagtaacacttaatggaatagtgtagccttaatgttaacttgtttctagttcaggaagatggttcagtcagttcatgaagccctttcctttggtatgtgaaggcctgaattgagtctccagaagtcagaaaataagaactatgtagggtatcaaacaactgttactcatacataacagtggaacgccataaagttccatggggttactggaccagtaagcctagaatattcagtgtttcgggtgagttaaagacgttctctaaaaattattataataatattgtcagaatgtaaaatgtgtcagaagaaaaatgagaaagtattaactttcactcccagtggatgctccccttactcaagatcatcaccagcatgtactattccttgaatttttaatcttagccattctaatgggtgtgaggtagagtctcgaagtcatttaaatttgcattttctgataaccaagaatattgaacatttctttaagtactcctcagcaattcaagatccaaatgatgagaattctccatttagctctgtactccatttttaattgggctatttggtttgttgtctcagttcttgagttctttatatattttgggtattaaccctctgtctgatatagggttggtgaagattttccccaatctatacactgtccatttgtcctattgacagtattctttgacttaacataatttttttcagttttatgcagttccatttgttaattttttatcttagaacctgagccaccggtgttctgttcatggattttccccctgtgccaatatgcttgtggctatttcccactttctcttctattagttcagtgtatctggttttatgttgaggtctttgaatcctttggccttgagtttcatacagtatggtgaatatggatctatttgcattcttctacatggagacatcaagtcagatgagcaccatttattgaagattctttcccttttcactgtatgttttgcttctttatgaaaaatcaaatatccagcagtgtgtgaatttgagggtccttgattccattacattgaacaacaaatctgtttctataacaataccatacagttttttattcctattgctttgaaataca

SEQ ID NO: 4874 - DNA, 1200 bp, mus musculus
ggagctatcaattttttatgtatgttttaagggttttcaggagtatgtccattgtcaccatctgcctcttgagtgtcttccagaccatcactatcatcccaagaaactcctgttggaagaatattagagtcaaatctccaaagaatattagtctctgcatttctctctgctgggtcttgtacatcttcataaatgttattttccctttgtacatgtccataacatttactgggaaaaacaaaacaaaggatacaaatttcaaactctatactattgtaggatatgacaaaaacacagtttccttatatataactttctttgtgtttcctgaaattctgttctctggtctcatcacctggtcaggtagctcagtgattgtcattctgtataggcacaaacagcaagttcaatacgtccgcagtactcatgcttcccctagcagcacccctgaatccagagccattcagagcatcctggtcctagtttccatctttatggctttttatacactctctgccatcttacatgcttacaatgctctatttcacagttcaaattggtggctaatgactttcgcaaacattatatctttatgtattcccacttcaatcccttttgtacttatgagtcaatcatcccctctctccaaactctgcttcctctaggaaaagtatacaaaacatgttaatactttgaatgcttttgaagagtccagtttaaaaaaaaacagccatgctttggagaagacattatacaggcaaatgcctttataagttaaatcataatggttatttaggttacttcagctagtgggacttttttccaagattagcaaaattgtgttgatctggggattttgacactttaattgacacatttcccagcattttttttttgtccaggctttcttgatgagaacagtctcaatatgttttagcaaatcatctccacttttgctaacaggtgggtggatacatagcatactaaatgctctgtacattttctatgtgttctaactaagctttactccataggcccaagactaagtaaccacaaatactggttaaatgctggtaaatttttaccatagaaagccttgttcagttcacatatactccaggacatgaaggatccaaacacttcttgagcctgtgctccatatgaccttgcctgcagctgctctagatgtatgcatccctg

SEQ ID NO: 4875 - DNA, 1000 bp, mus musculus
gacagaacataaggcattaaatcttaagaaacaggccactgtaagaataagctgggcacagtccacagaagtaagcttaccctgacctgcatcatctggctctgatcttatccagtcatcctgaggagccttgggaactacaaaacacaaaaaacaaccaacatggaacactgccacaccaattccctgccaatagggtccatttgaggtacagctagcagaggtgagttggtctggtcccctgacctccattttctggctctggtctcatattgccatctgtatggctattgggggacccaaagagcaatctgcttccttgtcaggtctgtaggaccccaaaaccacccagcctggaacaatgcaccactaatcccttcccattttggtccacctggggcatagcaagcagatgtgagttgcttatgtgaggtcccctgaagactattatctaggtctggaattcctcttaataaaaaaagagccgtgtgaggccccaagaccatcatgcttctcagtggactcccacgggtatcctaaagacaatcatattggaaaactgccagaacaatctcttgtcagtaggtccacctgaggagcagccaggagagttgagttgcatttagtcccttgacctccattttctggttgtaggctcatcctaccttcccaatgagacatggagcaacccaagagcgttatgcttcccattagaggcctgtgggaaccagtcaggtgcacctgagtcacagctagcagagacaggtaacctgacctccattttctggtctatagctccctctgtctactcaaggagtcctgctggcaccagaatcatccagccaacaccagaaaaaaaaaaaagaaaagaaaacagatgtctaaagggaagtgtaagaacccaatttataagatcctggtcaatgtggtactacaagatcccagaaacgctcctacagcaagacctggatatcctatcaaaactgaagcacaataagat

SEQ ID NO: 4876 - DNA, 1000 bp, mus musculus
gtgctgtaaagtgtgaatttttatcatatttcacttctgcaaagggggagacagagtttaaccctggatataccccagggcctgccttgatgggcagtctggagaaccatgacttctggggaaaggctctgtcataggctgcctctctgagtcccaggatgtctggaaggctctgaacactatccagtattgaactctatatattaatggaagctgagccttctcccctatagaacctaccactcctatatcacagatcagagcagcccatctcattagaattcaaggggtgctgggaacctgactggatagtccattttctgctgtcaagtaaatgtcctttgcttccatgtggccaactgggagaagggattgagagaggcaaggggatgaagccctgcaaatatctacttggtgctataaaagagattggtttctgactggcatgatgtttgaggtacactgagaaaaaaaaaggcacctcagcatggttagtagctactctcaggactgtgtagcagtgttggtacaatggggcaaggtccctggtacaggtgcaaagaggtggaattttagatctgaatcttgcttttcaggtatgttggggtatccagggcttgctgtggtggaagaactgggttctgatgttgcctagtaacattggtttctgttgcttatattcttgcacttgcctctcaatatctgtttatctctggtgttagttgatattgctgtctctgactggatcctgttcccactgtgagcctgtgatacagggtgtgtcagaactcctgggggtcaatctgcatctgggtgtgggctgagtgggtggggattcagagcacaggctccactcccagatgcaggtgcaaactggaaggaacacgtgtctctggctcagcaggattcctgtgtctcctggttcttggaggttcccagttaggccaggtattgtggtgggggttggggcctcacctatgatccaggatgtgtcagaact

SEQ ID NO: 4877 - DNA, 1200 bp, mus musculus
aagaaggtccaggggccattaagcaggtacagataatgagctctgggaaggtataggtacagttctctttccatggagccctcaggattctttaatgcctaaggtacaaagaagtacttgatgccagtttacttggacaagaggaggcttgtatgccactgcttgtcacagattcttggtagttgtgccaaacttgcacccattggtaggagggccacatctggactccctttaacatttgtcagagtggtgctcaagactggctggctgggtgtggaagcctcttctcatctaggccttctgtgttatactcatctcagtcagaactggtggttttgggatagtcagccaggatttcagctagtgcaaggattcaaactggggcgctggttgagttgagggttctgttccctggacaaggtgatacagaacaaactgggaactgtagaaaggcaaaggaaccaaccccccatgcctggctcaagctgcaagaccaaaagatcagtgttcctcattggtacaaaatgatgtgaacctgtcctgactgagaggcataatatattccattagaaaacctttgtaaaaaaaaaaaaacaaaaacaaaaaccctggtgttacgtgtggtctgtagcaattgtggtggctctgctagtggcagcactggtgtcaggacatgtcccacccacacaggcaaacatgcagttccatatacagataccacaaacacacacacacacacacacacacacacacacaatcacactcacacatacaaacacactcatacaccacattcgtacacaaatgtagacattcactgattagtatgttggaagtctaccatgggcatgtgtccagcatgcatatgttcctgaagagtgtgagcctcaccacatatgttcctgaagagtgtgagccagggctagtccctcccctcgctgaggcccgtatcctgtaagctcatgtaaggtcactttgctcctccttattcttgcctggcctcaagcatgtcatctggccctggggttcacaagtgatcccaatgaagaaagtcgtcaatgtccccagttttacatggctgcacatagtgttgacacccagcagaactcaagtgtggacaggtgcttggcaagggtctaggtccttggatttgtcagtgtcttcaccaccacagagctcctgtgggaccaaagcactcca

SEQ ID NO: 4878 - DNA, 1200 bp, mus musculus
ggggccattaagcaggtacagataatgagctcgggaaggtataggtacagttctctttccatggagccctcaggattctttaatgcctaaggtacaaagaagtacttgatgccagtttacttggacaagaggaggcttgtatgccactgcttgtcacagattcttggtagttgtgccaaacttgcacccattggtaggagggccacatctggactccctttaacatttgtcagagtggtgctcaagactggctggctgggtgtggaagcctcttctcatctaggccttctgtgttatactcatctcagtcagaactggtggttttgggatagtcagccaggatttcagctagtgcaaggattcaaactggggcgctggttgagttgagggttctgttccctggacaaggtgatacagaacaaactgggaactgtagaaaggcaaaggaaccaaccccccatgcctggctcaagctgcaagaccaaaagatcagtgttcctcattggtacaaaatgatgtgaacctgtcctgactgagaggcataatatattccattagaaaacctttgtaaaaaaaaaaaaaaaaaaaaaaccctggtgttacgtgtggtctgtagcaattgtggtggctctgctagtggcagcactggtgtcaggacatgtcccacccacacaggcaaacatgcagttccatatacagataccacaaacacacacacacacacacacacacacacacacatacacacaaacacacacacacacaatcacactcacacatacaaacacactcatacaccacattcgtacacaaatgtagacattcactgattagtatgttggaagtctaccatgggcatgtgtccagcatgcatatgttcctgaagagtgtgagcctcaccacatatgttcctgaagagtgtgagccagggctagtccctcccctcgctgaggcccgtatcctgtaagctcatgtaaggtcactttgctcctccttattcttgcctggcctcaagcatgtcatctggccctggggttcacaagtgatcccaatgaagaaagtcgtcaatgtccccagttttacatggctgcacatagtgttgacacccagcagaactcaagtgtggacaggtgcttggcaagggtctaggtccttggatttgtcagtgtcttcaccaccacagagctcctgtgggaccaa

SEQ ID NO: 4879 - DNA, 1200 bp, mus musculus
gccacatctggactccctttaacatttgtcagagtggtgctcaagactggctggctgggtgtggtagcctcttctcatctaggccttctgtgttatactcatctcagtcagaactggtggttttgggatagtcagccaggatttcagctagtgcaaggattcaaactggggtgctggttgagttgagggttctgttcccctcaactgggtagcatagctaagtatgcctgtgaggaacagataggcccgcaacgcaacagtacatccttctcttggcctggatatgcctgtctgcccttcccaccagagcatggctggctgttacagctgctcttcattatctttgggaatagagcagtaagaacccagctggggcttctgttcctcagggagcaggcaggggtcttgtgctcagttgtcccccactagatccaggaattgcctagaattttggtttacaatactctctggagcagcagaggccagcttagctcatccttagtgtgtgtgcagcagttaaggctatatggaggtcaggatttgtgtcctgtgtcttcacagacaagaaggaaccaagaccattggctgacccttagaagtcatgtgggtcccctaaaaactcctatttctgtccttcctctgggcctgtggagaggcatggggaactatgccaagtttctctggccgtgagactttggagagctgcagactgtggtcatggtccttagggattggagaggaatattagagaccaggctctcctcaagcctcttctcaatagggtgcaatgggggcacagtgtgggcataagatgggcacaagcagaatcccagagtctccttactatatttgtctatgagacgggtgagagcaagccatcactcacaggccctctgttccctgaacagaggcttgaactctgttaactgtctctcatactgactggcctgctggtcctatgatagaatcaggctgaaggtacagctaggtgtccagccaagagacatctcctgggaacacagttatccagctacagccatggggtatttctgcatgattcacagggcctggagccccaaagcctgctgttaggccctggtacccactgggtacgggtgatgaggaactctggatggggtgtgcaggcaatggtagctatttttgtgacatggtcatcagagaagagtgactacacagaag

SEQ ID NO: 4880 - DNA, 1000 bp, mus musculus
cccactcttcataagaacaaaatctctgggctttttccaagaattcctttgttgatgcaattgctattaatctctttaccttagcttcaagtagactctttaagacaagaacagcctgctcttctgctttctgatgggatagactgcttgccaatctgctcccctgaggacaccatatcctgagtcatccaagaagatcagctgccctcagagaagttggtaagaaccccctgtccccatcccaagttccagagctgccactgggagcccagtggactttggactcatcacccaccaaaaccccaaccgaataccactacctttcctcccagtcctttctgctgggacagactgttcccctgaagacaccatatcctgattcatcccaaagatctcctacactttgagaagtctggccactgacatcacagcctgaggcatgccagaagatctgctacactcagtgcaactgagcaacaggccccacagtctgaagatttcctgggggttctgtggcatgcagggcaactgacagactgaaagcctccagggagttctgctgaacacagggaaacagaaaccacagttcttaggcccctttggagaacaccttcacacaggacagcagcttgactgctcttctgaagaccaaacagtctgaaggcatcccaggagatctactgcagccagggcaacagatcagcagtttctctgcctctctgaagagcaccgagttgaaaggccccacagatggtttgctacagccagggccatagataggcctaccgtgaaacctgaagaaattcagggacaattccagagtcacacagaccagcaaacaccagggataaccaaatggtgagaggcaagtgcaagaccataggcaacagaagccaatatatgtgggcatcatcaaaacccagttctcccaccacagcaagccctgaatacaccaacacacctgaaactcagaaagcagacctaaaatcctatctcatga

SEQ ID NO: 4881 - DNA, 1000 bp, mus musculus
atccacataagatgggggtggggaggaggtatgggatgtggaacagtcaaagggtggttcagcgttgagggaataaatcatggaatgtaaaaaatgaattaattttaaaaattatgattttccttcccagatcccgccaagactagtctgcacgggtgagagtgtggactacagatgttaacagcttctgggacatgtgggagccacagagtttctgtggcagaccccatttcccactccagacatctgggcaccttccctgtcctaggagagttgtccatctggcctgggaagccattgccagagcatctgccaaagaccttttggttcccggatcttgtcaagcctagtctgcacaggtgagagtgtgaattacagaatctaacagcttgtggcagacgtcttttcaggctccagaaatctgggcaccttccctgccagaggagaggtgtcctccccacccgggagggttttcctggagcatctgtgggaaccatctttgttcctggatcctgccaagactagtctgcacaggtgagaatggactacagaacctaacagcttctaggacaggccctgcttagggccttcatattcttccaggaggcaaatctgaataaaagatatctgtgcaccttctcttcaagaagatagcttgcctgcagagagtgctctaaccactgaaactcaggagagagctattctcccaggtctgctggtagaggctaacagaatcatgaaaggaacaagctctaaccagagacaactataaaaattaactccagagattaccagatggccaaaggcagatgtaagaatcttactaacaaaaagcaagaccactcaccatcatcagaacccagcactcccaatgcagccagtcctgggtaccgcaacacacccgaaaagctagacccggatttaaaggcatatctcatgatgatggtagaggacatcaagaaggactgtaacaacacacttaaagaaatacaggagaaca

SEQ ID NO: 4882 - DNA, 1200 bp, mus musculus
catctgaaactcctgacgaatttcctagcttttccatctccagggttgtgtccctttgtgatttctatatatattatatttccatctttagatcctggatgctttttttttcaatcaaacctgtttgactgtttggattttgttttgttttgttttgttttgttttgttttgttttgtttttttcctttttaaggtcttctacttatttacctgtgttctcttatatttctttaagggagttatttatttccttcttaaggtcgtctatcatcttcatgagataggagtttagatctaaatcttgcttttttagttattagggtatccgtggtttgttgtggaagaacttgcttctaatgtttccaaggggtattggtttctattgcttgtgttctcgtgcttgcctctccccatctggttatctctggtgttaaatgtcctttctgtttcttagtggagcctgtccctcctatgagcctagttatgctgtacctccttgggtcagattacctctggatgtgagtgtggctgtggcacacctcccaggagtctaactgactctggatgtgggtggagttgggtgagctagagcaccagatctcttcacagtcacagatgtggacctgaaagatgtgtctctagcagggtgggaggacctgtgtcctctgggcctcagggtgggggtggggtgttccagttaggccaagtactggggaagtaggggggaactcacctgtgagcctagtaatgtcagaacacctgggagtcaagctttaggtgtggaagggttagagtcagttctgaggtacatgatctgctgctcccaggcccagttgtgaaccagaaagtaggtgaataggtaaactatttaaacagtcgcaaacccctaattagaagtagtcatttaaatctcccatccaaaaaaaaaaaaaaaagtgactagggccagatggtttaggtgcagatttctaccagtgtttcagggaagacctaattgctatactcctcaaactattctataaaatagaaacaggagaaacatcacccaataattctatgagtccatagtcaccctgatatcaaaccacacaaagactcaacaaagaaagagaagttcagatcaatttctcttatgaaaaattgatacaaaagtattcaacaaaatacaacctgaatccaggaacacaacaaagacatca

SEQ ID NO: 4883 - DNA, 1000 bp, mus musculus
ggtttctctgtgtagctctggctgtcctggaactcactttgaagaccaggctggcctcgaactcagaaattcgcctccctctgcctcccaagtgctgggaataaaattgtgtgccaccacacccggctgttttctttcttttattttaagtttatttacatttcaagtgttgtcccctcacctggatccccccttccacatacagcatatcccatctgccatacctttccttctatgagggtgttcctccaccaacccacctattcccacctcctgcccttgattcccctacactggggaatctattgagccttcataggaccaagaacttctcctcccattgatgcctgacaaggccatcctctgctacatatgcagcttgagccatgtgtactctttgttgatgacttagtccctgggaactcagggaggtctggttgtttgatattgttgttcttcctttgaggttgtgaaccccttcagctctttcagtcctttctctaacttttccattggggaccccacactcagtgaaatggttagctgtgagcatccgaatctatatttgtaagactctggcagggtctctcaggagacagccatataagactcctttcagcaagcatttcttatcatccacaatagtgttggaatttgctgactttatctacaatgaatctccaggtgggacagtctctggatggcttttccttcagtctctgctctgcactttgtttccatatttgcttctgtgaatattttgttcccatttcaaagaaggtctgaagcatcaacattttatgttttctttccagagttcactttagtggtaccacattttccacacagtcatacaaacaagcaagcatctagaatataaaacttgagacacaaatgacgtctaactaggggaatgtaagaagattgactgcactttgagaggaccaaagttcacttcccagcacccacatggcagctaaaagtcatctcaaatatatgt

SEQ ID NO: 4884 - DNA, 1000 bp, mus musculus
tagtggcagatgccttttatctctgtatgtgggagacaaagcaggaggttatatgcaaaactgaggctagccttatgtacagaactggttccagaaagccaatgcttcacaaagaaatcccttttcattaaacaaaaaagggggtagggggaaggtcataatacataaaaatatggagtgacttcacaatatttattcaagagtacacagtaagcttctagaataataagaaataatcacatccaggagcagtacacagaaagtcataatcaaacagtaggattaaatcattaaaaataacatacagttataaatacaaagactagcccttccggtccactacagcactagggtccctggccaagggagtctctgggcacccgcaaggacccacacaggatccaccacgggatcctaagacctctggtgagtggaacacagctcctgctccaatgcaatctcgcaggaactgagactgcattaattagggaagcagaaaacccagcctaatcagggtcagaagtcccttccagtcaatgccagcaccagggttccttacccgcagagtctctggacacacgcaaggacccccacaggaccctccacaggatcttaaaacctatggtgagtggtacacaacttctgccaggaggcaggttcaaataccagatatctgggcaccttccctgcaagaggagagcttgcctgcagagagtattctgaccactgaaactaaggatagagctagtctcccaggtctgctgatagacgataacataatcacctggggaaaaagctctaaccagagacaactataacaactagctccagagaataccagatggcgaaaggcaaaggtaagaatcctactaacagaaatcaagaccactcaccatcatcagaacgcagcactcccaccccacctagtcctgggcaccccaacacaaccgaaaatctagacccagatttaaaagcatatctcatgatgatggtagaggac

SEQ ID NO: 4885 - DNA, 1200 bp, mus musculus
tgtccgcctccgggacctgggaggggccatcctgcggcacgcccggcggcaggcagagaacatcggctatgatcctgagaggggcacccacttgcccgaatcacccagattggaagacttttaccgattctcctgggaggatggtgaggagcctggatgggtagagaggagaaggaccaggaagagaggcacaaggacagggcccagacagcccaggatcagggtgggccttgggggtacaaaagctgtggctgggagcacactcagtgctgtgagacaggtgtttctgtgtatttggaaagccaaggcctctccaggcatcttctggatccctgcagtgtggctctggagcctcgggtgggaggaccaggaagtagagaacttcagagcaccgcactctgcctgtcccctcttgctgcataatcactcaggccagggattgataagtctctacgtggccgcaggcataactgggacttgcttcctgcacgtttcccaaattctgctctgtcccttctaggcagcagtgttgtagggccaaggcccatactgacactgctggaagtcactggcctagcccttccaggagcgtagtttacatccaaaagatgtcagcccttttcgctcaccctgtgctgggccggtccttcagcctctttgtcctccattctccctggcagtggacaacatccttatcccagagaaccgggcccatctgtccccagaggcacagctgaaggaactgctggagaaactggatctggtgagcaccatgcggtccagcggggcccgcacccgtcgtgtccgcatgctgcgcagggagatcaatgcccttcggcaaaagctagcacagccaccgccaccacagctcctgtcactgaacaagactgtgcccaacggggagctgccagcaggatctcggggggatacagctgtcctggagcaggctcagcaggaggagccagaagaggaaggggacagaggtgagagagtctcaggcaggcaggtgcggggtggtagggagtcaggaggaggaagaggctgaaatctctttagagtatcctccctgagggtaggcaaagccctcggaagtggtggtggtaggggtgtccctgtgttcccagggctgtggagaggttcagagaggttagggtgcccagcagctccccagtacacagttacacctgaagcatctttgcc

SEQ ID NO: 4886 - DNA, 1000 bp, mus musculus
caacaataattctctctgggtaatttttctagatttctcaacttgtgcagaattacatgttattttttttccttttcatttccatatgtgtgtccatgtgtatgtgtgttcacatgggtgtagggacacacgtgttcaaatacacacacttatgtgcttgagtgtgtagagaggttgatgttgggaagctttccctatcactcaccatcttattctctggggcaggtgtcaatcaaacctagagctggctaatgtggctatggttgctagcttgcttgctccctggggggtggggggtggtccacatcccccttcagaggctgctattacagggttaccgtgcccagtaagcatccgcgtggatccttaggacgtgaactgtggctctcttgcttgtacagtgagcactttaccactgagccatctcccaatggctaatatggttaacctaattgcgcatgcacacatatatttaagcatcagagatagtctttttgttttgttttgtttgtatttaactagggaaaattatttctgagactaagaaattatatgctgtgttttagggaggattctcatgtctgtctgagcaccgacaacactctttccctacccttcatgatgccggcatgcagctgcgtgtcggaggacctgtgctccatagccactttaccacccggtttcctcttgtctccctccttccctctaatgactgttctctcccaaagtctgcagcaaggagaaacaccaccctcaagtctcccgaatccccctgctgggaggtctcacaaaatccagctagccataatgatgcacacttttgatcaagcatttgggaggcagaggcaggaagaggagctctgagtttaaggccagcctggtctgcaaagtaaattccaggactgccagggttacatatagaaaccctatcttgaaccccacttaccatgtacctgcttttccacatgggcctctgcctctctctgcctctctccctctc

SEQ ID NO: 4887 - DNA, 1000 bp, mus musculus
tgtcattgggggtgggctttgaggtctcagatgctcaccagaccagtggctcaggatctcttcctgctgccattggctccagatgtggacctttccctggtccttctcctgcaccatgtctgcctacatgccactgcgcttcccaccatgacaataatggactaaacctctgaactgtaagccagccccagtgaaatgctttcctttgtaagagttgctgaggtcatagcgtctcttcacagcaatgcaaacaaaatgtccctggatttggaaatgagtagaggcgatgttccatatgtgtaaggtgggttgtgaggcagccttggtaatcctcactctggcaatgtacctagatatctattctccacatggaagagcccaaaatgcaggtcacggaatggcttgaactaactcatgatttatgcaaacacacatgctcgttcgatctgctgcaaatgcgccattgggatgagctcaggaaagagctatagggggagacaagagatgcaggctcagctctgccgcagagcttacatacaaggtgtatgcctggtgagagcaccccacttcctagcataatgagacatcacaagcaagtgtcggtcaccgagagttctcgaatgagtgtgcgccaagtaagctgactgctgcttagctattgccatacagagattttcccatgtgaatttttttgcctatgcttcttgctcttcttgtcttgaggtagaattattcatttaagacactgagtgctttcctctgcaagtgctggcagattgcactaagcaatggtcgcacagctacaacctgtggccttgctgtactttcgacacaatagagaacaacatcgaagctttgaaataaatgcctatcttaacttgacccataagagaaattgtgtctcttccattttcatttgttttgtgatgaactcgtatttggcgctatacgtcaatctttcttgtatttagagtggttttcttagctgggtgtggtggct

SEQ ID NO: 4888 - DNA, 1000 bp, mus musculus
tcagagccttagcaggactcagacatctgcgctactcaagccttcctgaatccatgtgccggatttctctcgccttgctttactgccatacatgtacttgaaccagtgcacaaccccagcacctgagcagagcaatcctggggatccgagacaaccaggagagcacaagctatagccagtcctgggcctgctaaggtggggcacagccagccacaggcactcagaagtctctgcttgtagactgtccttgctgccagggtctcaccctcctcagccctaatggctgggaagtgtagggcagaagggctatacttcagtttccaaaactgacccattttcttttcacaggcttgtacacaggcctaatatttaaagcagatataggccattaagcaccatgtctgaaatatcacttattttgcaagccatgtttctagcacttagtatagtattatcggcaataaggaagggcatgtgtggccttgtgtttggaattgggggcccaggtggcaactgtaggctcctgtcagccttggggtcactttgccttcatgcattgtgtcatggcagctctcaaattaagacaatcccctgtttggactaagatgatcctggctgtttagcttcttcaggcctggagaggcctgaatacctgtggacagtggcctgtgactcaccaggagagtcacctgggacactcgggtctctggaatattgaagatgtgggagctcctgaggtgtggactcacagggctccctctctgaattcagttcgaccattaggaacaccttgttgcaccctttggtctgcacgcccttgaggtcactaggcatgcacactctcaaggcccgcagtctttgtaaaacggtgctcagaccctgcttgcctccctaaagaacctccaaccctgctttggagtctgtgccttccgatgcctctcttcccttctgattttctctgggtccctcctgctcatacatacagtctccatgcccagcc

SEQ ID NO: 4889 - DNA, 1000 bp, mus musculus
acagagtgagttccaggacagccagggctacacagagagagatcctgttccaaataaatacttttttaaaaagcaaacaccttaagtttgggagcgggagagacaggtaagagcagcaggtaagagcaatggccgctctccctaggatgctttatctgcacgcacacaaatccacatatgcacacacgcctacacatgacccagaataaaaatccttaaaaaagaaattcaagaaccaagtatggtggcttctgtctataacctcagcactggggaggcagaagcaggtggatctcagtaagttcaaggccagcctggtctacataacgagagaccatatttcaataaaaggcccggagactgtgggagtgagaagaaagcaggctaggagtgagtcctggccagggaagcaagccctagccaaacagggcgacaaggtgatacagcaggaacagaagagctgggttagcaggtgtggggagtgggagtgcgggactccagctctggctataaaactctgggctcagcggttaagagcactggctgctcttccagaggtcctgagttccattcccagcaaccacatggcggctcacaatcatgtgtaatgagatcagatgccctctcttctgtcgtgcaggtgacatgcagatagagcactcataaaataactaaatcttaaagctaatgcccatcatcctgtgtaaaagtgctccccctcgtggaggggaagggaaacgctatggacagtctgctcttaccaattgctaatgcaagcgtaggcaagcctgagagtccctgtcccatgggtcctgataaggccagtgactaccgcccccaagtgagctaggtaagggaggggctagtgagatggctcagcacctagtgctctttcagaggatgcaaattccattcccatacccacaaaggtggtgggggatgggagtagtgctcacagctgcaggtaactccagctccaggggatctgacaccttcttct

SEQ ID NO: 4890 - DNA, 1000 bp, mus musculus; identical to SEQ ID NO: 4889

SEQ ID NO: 4891 - DNA, 1000 bp, mus musculus
cgaatggaactgctgcagggagacaacggggacttaactgctaatcaagcccctagggtggctctatctgtggagttgccttacatagaaggcaccaaacatgccctgagcagcctgggagagacagagcaaaggccctggggctggaggctcaccccgctgccccggattatagataggctgatcggtctgcacaaagatgtggcctcgtcgggaagagaagagcaagttgacaccctgagtctctgtggctttgaaagctgtgttccttagccacggagactgagctaccagctggatgtggggggctctgcgcaggtcaaagaggccacagctcctcacatcttccagtgggacctatcaagacagaaggagactatcagacagagcaaaaggaacccaatacagagcctaaggtagggacagcaaggccattgtgccagaggagagagaggcaggaagtcattgagggggatgggaaggaaaaggcaacagaagtgccaggcacaatggctcccggctgtaatcccaacacttgagaggcccacagtagggtcactgagcaatttcaaccaatctaggttacaccctgaaatcccatctcaaaagcaaaactaaacaataaaacaaaaggcaacaggcaaaccaggtgtacttgtaaatcttagcactttgggggctgaggcaagaggacagctgtgagttcaaagccagcctatgtcacataacaagctcctgtctgctgctaaataagcagacaatggggtgcagcagagagacctgagaaacagcaggggtgctggtactggttacctcaaggctgagcagcacaaagtcatctcccgagctcagcttaaagtccttctttggggagcaggaaccaccctttgggtttctgaggaacactgatccttttacctcctgtcctggaggggcatccaggagctgtacccccaccgacaggggggtccccaaattaaccacagaaggggaaaacagg

SEQ ID NO: 4892 - DNA, 1000 bp, mus musculus
ctggtcagtcttagaattgcaacagaaaacagagacacacctgtcaagccaagcagaaaactgaatatcccatgggaatcctttccacaggaaatcaaactgtcactgagtttgtacttcttggtttccatgaagtccctgggctgcacctcctgtttttttctgtgttcaccatcctctatgcctccatcatcacagggaacatgctcattgcagtggtggtggtgagctcccagaggcttcacacacccatgtatttctttctggtgaatctgtccttcatagagattgtctatacctccacagtggtgcccaaaatgctggaaggcttcttacaggaggccaccatatctgtggctggctgcttgctccagttctttgtttttggctctctggccacagatgagtgttttctgctggctgtgatggcatatgatcgatatctcgcaatttgtcaccctctacgatacccacacctcatggggcctcaatggtgcctggggttggtgctcacagtctggctgtctggcttcatggtagatggactagttgttgctctgatggcccagttgagattctgtggccccaacttagttgatcacttttactgtgatttttcacctttgatggtcctggcttgctcagatacccaagtggcccaggtgactacatttgttctctctgtggtcttcctgactgtcccctttgggctggttctgatctcctatgctcagattgtagtgactgtgctgagagttccttctgggaccagaagaaccaaggccttctccacatgctcctctcacctggctgtggtgtccacgttctatggaacactcatggtattgtacattgtgccctctgctgttcattctcagctcctctccaaggtcattgccctgctctacacagtggtcactcccatcttcaaccctgtcatctacaccttgaggaaccaggaggtgcagcaggcactaagaaggcttctctactgcaaacc

SEQ ID NO: 4893 - DNA, 1200 bp, mus musculus
aaataaattctatgattaaatcaccacaaattaactttcccctgcattaaaagatcaatacaattagatatatttgacattattcaatttgttcagtaatatatgtgtacatctactatacataagaacatatcttaattttagaaatatatattgcctggttatttacaccaaagcagagttatttagatttcttcaaatcagagccatcttctcacctttctattcaatgcactcctcacttccttgtttctcaaggtgtagatgagtggattgagagcaggggtgaccacactgtacatgatggcaatgattctgtcctgatccagagagctgcctgaggcaggacggatgtaggtgaagagaactggaacatagagcagaatcacaaccatgaagtgggaggcacaggtagacagagctttgtggagcatgctgcaagaacgagtcttgaggaaaagataggtgatgatgtagaaataggagagaaatgtcagaaaaaagggagtgagggcaatggtgcctgtgactgtattgagcagccaaaggttgagctcagtgtttccacaggccagatccaacaatggcttaatatcacagaagaaatgatggacatgattgggaccacagaagctcaaacgagatgtcattacagagtgaagtaaggcatggaaaaagcccagggtccagatagtaacagtcatgtgaatacagagctggtgattcatgatcacagaatagtggagtggtctgcagatagccacaaagcggtcaaatgccatcactggcagcagcatggcctcagtgctacccaggaagtggaagaaatggagctgagttatgcatcccaagaaggaaattgctttgcttgtggagaggaggttctgcagcatctttggcagtgtcacagtggagaagcagatatctagacatgctaggtttcccaggaagaaatacataggtgagtggagtcttgggtccaagatgacaatcatcaggatggctccattcccagttatattgacaaagtagattgtgaagaaaaccacaaagagaatagggtttaattcttgtatatctgttactcccaggaggagaaattcagtgactgaggtttgattagacatcacctataagaaaggacaattagtatataatactaccctgcatgttaaccagtcgttctagccatagattttc

SEQ ID NO: 4894 - DNA, 1200 bp, mus musculus; identical to SEQ ID NO: 4893

SEQ ID NO: 4895 - DNA, 1000 bp, mus musculus
aggaattagggaaacaacacccttctcaatagtcacaaataatataaaataccttggtgtgactctaacaaaagaagtaacagaattgtatgataagaatttcaagtctcgcccttccactcccctcgagccccgggctaccttgccaggggaatcgcccgacacccgcaagggcccacataggactccccacaggatcctaagacctctggtgagtggaacacagcgcctgccccaatccaatctcgcggaacctgagactgcattacatagggaagcagactacccggggctgacctggggcacaagccccttctgcttcactcgagccctgagctaccttgccagcggagtcgcctgacacccgcaagggcccacacagaattccacacgggatcctaagacctctagtgagtggaacacaacttctgccaggagtccggttcgaacaccagatatctgggtaccttccctgccagaagagagcttgcctgcagagaatactctgcccactgaaactaaggagagtgctaccctcccaggtctgcttatagaggctaacagagtcacctgaagaacaagctcttaacagagacaactataacagctagcttcagagattaccagatggcaaaaggcaaacataagaatcctactaacagaaatcaagaccactcaccatcatcagaacgcagcactcccacccaacctagtcctgggcaccccaacacaaccgaaaatttagacccagatttaaaaacatttctcatgatgatgatagaggacatcaagaaggactttcataagtcacttaaagaattacaggagagcactgctaaagagttacaggcccttaaagaaaagcaggaaaacacagccaaacaggtagaagtcattaaagaaaaacaggaaaacacatccaaacaggtaatggaaatgaacaaaatcatactagaactaaaaagggaagtagacacaataaagaaaacccaagcgaggc

SEQ ID NO: 4896 - DNA, 1400 bp, mus musculus
ttatgcatttctctcctcttcctgctgcccaatgcaaaaaccaaccaaaatcaaaaccaaaccaccagaagctggaaagaacccagatgtaaggaccaagggcctctccccccattgatgactgaataggctatcctctgctacatatgcagctagagccatgagtcctaccatgggtttctttgattggtcatttagacccagggagctctggggctactggttatcataaaggttttttttttttttttttttttttttttttttttttttttttttttttttttatggggctgaaaaccccttcagcaccttgggtaattgcggatgccaataagagcttgctgacaggagccggataaagctgtctcctgagaggatctgccagtgcctgacaaatacagaagtggatgctcatagccattcattggatggagcatggatcctctgcttttcaaatccgatgttccaaatccacatttgtccaaacaaaatcatggtcaggtctatcacaacaattccccactctcagtaccaacttcggtcttagggttttacttctgtaaacaaacactatgaagaaggcaactcttataagaataacatttaattggttctggcttttaggttcagaggttcagtccatctccaatatactgggatcttctgctggaaccaggcttcaccaatagccatttgtaggctctcttcatggtgccaaacctcaaaccttttgcatgacccctccagtcctggttcatcaactactactgaggctgcactttcaccaatggccttctacagcctcccaaagtgccaagcctcagctgctcttcatgaccccttcacgccatcaaaaccagtcccacctgggtgactcttacacattaccaagtacagctgtagtatgagataaaaccttgactatctctggaacataagcttctttgtactctcagaaaacacatcccagatttcacctcaatgatgctctttttgttttttgtttttattttttaattggattttttatttacattacaaatgatatcccctttcctactttcccctctaaaacacaccttccctctatccccttccccctccccctgctcaccaacatacccactcccaattcctggccctggcattcctccacactggggcatagagccttcataggacaaagggcaggaacatggcagcatccaggcaggcatggtgcaggaaaagctgagagttctacatcttcatctgaaagttgctagtagaatactgacttccaggcagctaggatgagggtcttatagcccacacccatagtgatattccgactccaacagggccacaccttctctaataaggccacatctcccaatagtgccacttcctgggcagag

SEQ ID NO: 4897 - DNA, 1000 bp, mus musculus
tgtgctttagagggacttgataggcagggacttgggagggagtggttttacctggttgtttctggtgtctgcaggcctcagagaatgcaggcagagttgagcaacagaaaataagagtgcagggaatagggcacaagtcatatcggctgggtatgcttcagcaaagaagcaacaggcaggggattggggtagggtcaagggtcttatcaggatgaccctggtgctgcaggcccccagggatgttgggagagctgtgggacagaacatggtgtgcagggaccaaggctcaacaatgctgtgacaagtaggagatgggagttgtagaggtctcacctggatgcctctggtgcctatatgtgaggagcgggtgtggccgcagtcccaaaagcgccagggactgcagctaagtcgtatgacttacacctgacttcctcatataagccacaaacatcttgagagctgcacaggtgtaccaggataccggtgaacccattttgatggagatatgcccctgctgccctgattagctgaagctgcgtgcctggtgaagtggcgtggcctgctgtgcgtggatgggaactgagagtataaaagattgagaggcccagggttcgggggagatataaacaagggagatataaacaagaagaaacaggactgaataaacgtgtgcagaaggatcctgttgcagcgtcgttcttcctggccagctgggtgtgcacaacacctatagacctccaggaacacagccagagctatgggttagaagatggatctcaggggatagggcactgcacacttttgctaggtgttctcctggtggatcttggaagacaggataatatggagagaggccccacttgcttgtccctgatgacattaggtctttggggatgcaggcagagctggatgttcctggtgctagcagggcctcaggaatgtaagggggattgtgggtcagaaaatggtgtgcaagggacaggtcacatgttactaatgc

SEQ ID NO: 4898 - DNA, 1000 bp, mus musculus
atcttaatctcttcagaacttaaggaaagaatatttgggggttgaagtttttgtatctgaattattgttccccaaagccatttgctattcttggctgggtacatgggttagtcacttaagtctccacacatcctattatagattctcagctggactcaccatcagagattcctggaattctccccagtcctaggcttccagctagatcaagagatgtttcccactggttgcctttctgtcttccagccttttcctgccacccttttacccatagcaagaaatatgaaagtgtgacaaaaatagaaaaatatttagaaatatagttaatctgagcacaaacaaatcaaaccaaaacaaacctgtaaactagcatggtaaaccgatactgtgaaaatagatgtgaatctcccctccctgtctctcatttgaaaaaggaacaaatggaaaaatccatgagtaaagagaagcagtagattgttgatccaacaacacatgaacagaaagtacttatggctaagatccaatgtcactgtcttatagtctgatgttcaagaatcagaagccaagagtaactcttcaatcaaaccactttgcttggaatagcaggctgtgtatcacatctgcatctgagttcaaacttctaaagtcaccacttcacaaggaaaggaggaatcccaaagaattagagaagcaaaggagagtgaagcagaaactgaaatcctgtgaaacaatcaatcgaggtaagactgcaaagcaaaaaaataagtttcaagatgataatttttacagtgaaaaatttgcagtggctagaggcacatcagtgcctcatatttagaaatatatataaagtaatgggactgccaagtaatcttcgagcatgcacctcatcaagtaggaagtagtatatagaaacaaacctcaaagatgactagaaaactcaatttttatgcatttcttcatttgtacaggataatagcaagaaaatcgtttccttaagttt

SEQ ID NO: 4899 - DNA, 1000 bp, mus musculus
tgtgagttataaatatctttcttgaaggaaactagtatcttaatgaggaagaattttaggtcattatgataattttcaggcatgttggggtatgcagggcttgctgtggtggaaaaactggattctgatttgtcagagtattggcttctgttgattaatgggtttcactggtctttgtccatctggttatctctggtgttaagaggcctgggtgtatctgtctggatgctaccttctgtgcctctgggttgtttcaggtatcctgggagacctgtggtcctggatgcagtaggtatctagggagactttcaggctgcagggtctcaaaaagtgcatatatgccaatcatctatggctcaggttgcaacaggtctctcagtaggcattcacactgtgtgatctattgcaatgtctgcagaattacacctggaaacttttcagactgtggtatcttcaaaggtgcagacacattgcatatctgccccagaggaagccacaggctatacaggaggtggaattccagcagaggggatgagtcctgagtctgttacttccacaggtgttgcaactgctgtggttatttgggatggtccttcacctgttgcactgggtgctgcagatctgctggaaggcttttagaagaaggcctgtggggtctgctgagggacagaaacactgattacctgccctggcagaaagtacaggcaggaaggcagtagagtttgagtggagtggatggatcccaattatgctggccacctaaggctattgtagctgctgcacttattgggaatgctcctttcctgttgcattgggcagagatctaacaggcctttagacttttgcatctgttgaactgggtgcaccagatctcctgagaggccttcaaactatagggtctacaaaggggcagaccccatatcattttcatacaccctacatttaattgaccatgtttcttccctttcttcaactcaatttttttcctgattgtactttt

SEQ ID NO: 4900 - DNA, 1200 bp, mus musculus
ccatatatgaattgaattaagtatatcctaagaagacttcaaaccttaactgattggtcaaataactctgctctcaaactactatgttcttcaacagccattttctattaactacacactggcatcagaggttacattttacatatatatatcatcccagtttctaacctaagtaaaggataaaaagagatggtgaatggcagcttgttttctagttgagctggttttaaacactggagacccagcaggtgttcctgcaagggatggaaagcatgtgccatgctcaaagacacaaggctcctgacatgaagccttagctctccataattctgtggccatcagtcacataggccaatgccccaagcccctccacaggtaaaggatatgactacagatcatatagcctcaagagagatctccatttcaatgaggtacctaaaggcctgaagggcttagccaattaggtactccttccaagacactcctccctgctaaagatatttaacctcaggccttccctgagaaagtggggtaacatttcactcatcacaactctctgtcatgacaataaatgtcttaaaactatgtactgcctcttgtcattgggacccactgtgagtaacaatggagcaggtcattctttaaagagcagcacctctaatatcctgcatgtggcctctctgtgctctcagccatgttcttcatcaagccaagcagcaaaaacaagtttaggacactctccctcctccccaccagaagcagctggggcttgcctgctacccttttccctttagcccagggtcagaacaagctccctggtcacctactccattctaagctcttctgggacaccaagcagcatctgtggtgtccaagagctacaatctgccctccctggtctttttgttgcctgaggacccacaagccagaccttagactgcaccttcccatccctggagtggtttttacagccagaggcctgcccagtggtggcatgggatgagcacagtcaaacttcccacttccaaccttgcccaatggcctgagccctgggctggaagtgggccaccattttaatccacagagggcccctttctttatgaaaaaaatgcaattgccatatgatatctgtatagaattagaacatccaaagacagagtagcactgtaatgttgtttaggttttttgtaccaggtatga

SEQ ID NO: 4901 - DNA, 1400 bp, mus musculus
ctcctaacagcaagaatataaaaattgaaagagaagtttgcagtaacttttccctgtgaaacttgaaaataattcacacagaattcttacacataaatcgtgaattatcataaagattatttcactgtgtgggctggacacttctagtacagattttctttaatcacatggtgtgtttttgttttgatatacttgcaaaatatctcaaaaatgacataatattttatgtaattttgtttaagaatttaaaaatagttaaagtctttgagatgtctttgtaaaatatttgtgccttggaataaagtatagaacaaagtattcagaattagagaaaaactattaatgtatattgtataatatattttgctcaaagagatcattatcatagttaactttttagcattacactttagtggtaaggtccatagtagtaacaacaacaacaacaacaacagcaacaacaataataataataatagctatccttattattattactattattataaaaagattacattttaaaagtacaaattgttgcatcccactcgaccagcaagaaagatgcaaccactggttcttctttaagcagtttactcaggcaactacttacttcaaatcccccagcctctctagttacgagtgtttttctccactccagccacaaccacgcccccaccaatcaccacaggtcacatcacctcaccaggcaggcttgctcagccaatcagggattaaggtgctatccacaaaacatgggcttgtttactaccttgagcagacttccgtcctgctgatcaggaagtccagaatggctccctacaacaaatgatttttctttctagacattcattagttttacaattattttacttacctgtgtgattattcttctcaatacaacaaatatccagcaaaaaattcattgttaaaaagttggataaaatactgagctctgatattcttttgcaagcttgcctttctttattccttccttcctctctctctctctctctctctctctctctctctctctctctccctctctctctctctccctccctccctcccctcttctctcttgctctctctatctctctctctctctttctttctttctttctttctttctttctttctttctttctttctttgttgttgtggtgtttgtttgtttgtttgttttcagttttaatttaaaagtcagtatttccctcagtaagcataactgttctgaaatttactctgtagtcttagcaagcatcaaacacccagtgatccatcagctcttttcaccaatgcactataattgaagcgatgcatgaacacccaaaatacctgtgtttcccagaaccctagagtacatatgtcagggtaagtacttgggcttaagaagggaa

SEQ ID NO: 4902 - DNA, 1400 bp, mus musculus
aaacataaagaaaaattaagttgcatgatcttcagaaaaatggaagaaccctgaataaattatcctgaatgatgtttcccagaaacagaaaagtaacaaaaatcacttctgatgaatgctgtttccttccttgtgtatggtgccacatttacccattatttgtgttaaaattagactaaaaatgaaggaagcaagtttaatgcaaaatgttaaggtatgtagtatttaatctgggacagtagaacaaacgtaaaatgaatttggagagggtgcatctcactgcagaaaggtacaatcgggaaaagatgtagttaaacaattggaagaatcatgaccagttaaatgtagggtgtatgaaattgattcaagttctgaaggactcccaggagatctgccccacccaggtcaacagaacttaaagtctaaaagttctgttaggggatctgctgtgcccagtgcaacatgtaaaggaacttcataagtaactggagcagcttggaacccctgaggtggccagcaggattatgatccatcccctcccttggaattccacctccttcctgcctgtgccttctgccaggacaaatcatcagtttttctgaaccttagaagaaaccacactctgaaggtcttccaggagttatgttgcatcagagcaacagataagggacccttccttataaccacaacagttggaacacttgaggagcccagcagactcatgacccatcccctctgctgggactctacctcccttacagcttgaggcttcctctgtggaagatatacaatgtgtctgaccctctgaagataccacagtctgaaaacttcctaggagtaatgctgcacacagagcaatagaccacacagtgtaaatggctcctgagagacaacctacagccagggcaatagatcattggcatacatggagctctgaagacccggcagcctgaaagtctcccaagatatctgcagtgtccagtgctacaggtctctcaggatacctgaaacaacctagggacagagtagacagcctctagacagacacacaaaggccagttaacaccggagataaacagatggccaaagacaagtgaaagcgaataatcaacagaagctaataccctttgacacaatcagaacccagttagaattgtgaaaaactttgataaaatactaagctctgatgttgttttgtttgcttgctggctggcttctctctctctttccttctctcttacttcctttatttctttgttcttgtatattttgtttgtttgtttgtttgttttgtattatgcaagacaggatttccatatgtaggcataactatgctactctgtggtctataggatcatcaaaatcacaaagatacatctgcacttaccccaagggatggt

SEQ ID NO: 4903 - DNA, 1000 bp, mus musculus
aacttgagacacattccataggcaatcaccagtccctgacactattaatgatattctctgatcatgtttgccttctgagtggttccacatatcagctgactcaaatagacgccaacttccacaaccactaatcaaagagcataaactatctgaacctaaatctccctgcaaatgtgcagcatggtcttcatataagcatgaacaattgtagcatgggttatccaaaaaatattgtttgcctgtagcatatgttcctatatctggactaccttttctggcctcagtgggagaggatgccaatagcatcccagagaattgatgtccaaaggttggggaatgccgaaggagaccaccctgtaataggagaatgacagtggggctgggggaagggttgtgggagagggtgacctggaggaaagcagtgagtggaatgtaaactaaataaaaataaaaataattaaaaataacaatggtgtggatattgctggtgaaagagtaaatcagtatagccacttcagaaatcaatgtagcaatttctcagaaaatttggaatttgcctacttcaagacctagctatataccactccttgtcatatacacagaggatgcacctaacataccaaaggacacttgctcatttatgttcatagcagctttattaataaaaaagaaactcaaaacaacctagatgtcggtcaactaaagaatggataaaatatctggttcatttacccaataaagtattactcagttattaaaaacaataatatcataaaattggcaaagaaatagatggaacaataaaagataattctgtattgtaacccaacctagaaagtaagacatggtatgtgctcagttatatgtgaataatattagtaaatttaggatggacatgcaccaatatatagaaacaaagaagctaagaacaggtaggtcacaagtaggggacataaatatctcacttagatggggaaacagagtagaaatgatgggtgaa

SEQ ID NO: 4904 - DNA, 1000 bp, mus musculus
catctattcattgactatatattacacagtgatggcttttaatcttctacttggttaaccaatgtcaactgctaaatccactccagtagtgacaaacacaacaggccccgaaaacctgggtgctgtcccaaggcaaaatgttcatggaaacttagtctcctggaattgtggcatcctgtataaagaatgctccaatgtccttgctttagttggtaaaaggatctgtgtgctttcccttaatattgctttattataagtgctcctaaggattgatatgttgacatatagctgttagattctaggcagtccttgatctcaccttgggcctggatagctaagtcactgccctacacagaaatttaccattatctaggaagaagcaagtttgtgacctaaagaggaaccagagtagatacttagaactgtagatagctgagttacacctataaacaaacaagtatttacaatggcctagcgggaaggtggactatacaatagactagagtaggaactatggcaagggcacgaagcccttgcccctggcttctaagactaagtggaccttaggtggagctgctttgatcccagttgttaacattgagttttatccgatttggttcctgccagttcttccagtttgcagtcctctgttttgtgtaagaatccagtaaactctttgtactttgccatcctgtctgtctgtcaattcccaccgactcctttcccacctgcaccagagactcgttccaggcagacaagggaccaagagggtctgcagcagtcaacgtcttgtgcatagggctcccaagggtagagtttcctcaatcaggcctcagggaaagcacagcaacagtgagccagggcacagtctattgaatgtttcaacatcttttatagacaagcagaataaatatttcccacattttctaattttcaacagcttctgtttctcaaataataatttatctagattcaaggtgacccatacatccttgaagac

SEQ ID NO: 4905 - DNA, 1000 bp, mus musculus
tactaccttaataaggaaaaattttaggtcactatcataatgttcaggcatgttggtgtatgcagggcttgctgtgttgggaaaactgggttctgattgtgtcaaagtgtataggcttttgacggttattgggtttcactagcctttggcaatctgggtatcatggagttaagaggcctgggcttatctgactagaggctacctcctctgcccctgggttgtttcaggtatcctaggagacctgtggcactggatgcaggaaatatctagggagaccttcaggctgcagggtatcgaaaggtggatatatgccaatgatctactgctctggttgcagcaggtctctcaggaggcattcacactgtgtggtctattgcactgtgtgcagaattacacatgggaagttttcagattgtggtatcttcagaggtgcagacacattgtatatttgccccagaggaagccacaggctgtaaaggaggtggaattccagcagaggggatgagtccttagtctgttggccccacaggagttccaactactgtggttatttggcatggtcctttacctgttgccctgggtacagcatatctgctggaaggcctttagactgtggggttttctggggggcagaaacattgattacctgccctggcagaatgtacaggcaggaagtggctagagtttgaatggcgtgaatggattccaattcttctggccacctaaggtgattctagctgctgcacttatttggaatgctcctttacctgtggccttgggcagagcagatcaaacaggcttttagatttttgcgtctcttgaactgggtgcagcagattttctgggaggccttcaaactatagggtctactaaggggcagatcccatatcattttcatacattgtacatttaactgaccatgtttcttccatttcttcaactctattttttcctgattctacttttctgaagtgagatataccctctccaaattcacttt

SEQ ID NO: 4906 - DNA, 1000 bp, mus musculus
ttcattaattttttcattttaacctctgattgaagcactcctcctcccagtcctgctcatagagctccttaatccatcttccctccccttctcctgtgattaagggaaggtggccctggataccaacccaccctagcacatcaagtcactaggccagacaaggtagcccagttagggaaacaggatccacaggcaggcaacagaatcagggacagccctgattccagttgtgggggaccctcagaaagaccaagctgcatttatgtttttaacagctgagtaatagtaccttttataaatctaccgtgttttatctgttcattcattgttgagcatctacactgtttgaaatttctgaatattatgaattgagcagtaatgaatgtaggtaaaaatgtatttgtagttgtagaatctaggagcagcacaacacgaggaactgtagtaaagatttgtagcattaggaagtttgggaactactgacttaaggaaagaaagagtgtgataataattttaaagtgatgctaatacctttgttcatggtacatccacagattgctgagaacagttttcttgctctaagtggagacactaaatatcatagtttataaaatttatttacactccattcctcttgtgtttatgtggttaaataaatatgacataggcttgacagagagtataataagcaggacaatatttaggacactagaaagatcccagtctattgacttaatattcatttatttcaagaatttgtcaaaagtgtttttaaaggagagattagaacagtttttggtgtctaatactagtctcttgaattggacatgctagtaaagatttctgtgtcaattccttatattaaaaacatagtcttagcttatttcatgtatgaaatcaaatctcaaaagaaatcattgaatgtgccttgaaactgtatttctacttccttggagctttgtagcatctggtcagcatcttttaagttacatcttatatt

SEQ ID NO: 4907 - DNA, 1200 bp, mus musculus
ttttgtaaaagaaaaaaacattttacatcttattgggaagatattgaaaatttgctttcagaaaaaaaaatgttttaatttaagatcaccataagaagtgatgatactatgttccaactctgcaacatttatctacagcatacagcaattgtggagagccatgccacgagcaatcgccattataagaaggcgctggcctccactgtgcctaactagtaaacaagccttgtatgcaggtgcgagagtgaactcactgccctagtcactgcccatcccggggcttagtaatgggctgatgggcgagcaaagaatcaggtgctgtcaggacacatcaggtgctgaaacatcacactgcgggctatataagcagcaccattttccggggtcggggtcttccttatgttgaagcaataaaagctttgccgtagaaggatccagttgtccgagtgaattcttgctggtgagatactagctcgggcaagaagcaatgtaactaattaactgtattcagcaatgtgatgtttgtgaagtattataaggcactttctctagtgtactttatttaagagtttaaataactattgggtcactgttaatatacatgagccagaaaagaaatgtttgaaaatccccacattgcatattttgcctattgcttccataatttatttaaatattaagtaacttaaatccattttgttattttattttccctgattatacagtattggctttaatattggaacacttgatttttaaggatattactattttatttttaaagaactgtgccattaaaatataactctcatatcctataattagtgtatgtccatgatatagttagatttttttattaaaaattttactctgtctctgtctctctgtctctctgtctctctgtctctcctctgtctctctctctctccctctctctctctccctctctctctctgtgtgtgtgtgtgtgtgtgcgtgcgtgctgggtgtgaacggggatagaggccagcagagagtattacactccatagagttgcagtctcaggtggtatgagtcatatatcttgatagatgtggactctataagagcagcaaattctctttatccttgagatatacctctgtcccccagatagctggaatctttccatattttaaaaaaatataggttttcgagattatctagtaatggtgatagtg

SEQ ID NO: 4908 - DNA, 1000 bp, mus musculus
tgtcatagtattttatcacaacagcagagaagttaagaaagataggtaggaaaactgtaaaatggaggataataacatatattttcaaactacttttttcatatttcctaaaatattgactacagtatatagttttctagttttttaaaatttagcatgtttttgaacatgggagatagactgcaaataaaataggaaggagagaacgcacttatttctacattaagctgggaggttttgtaaatcaatgcatcagatgctacagaaaattgagataaccgatgtatatcagccttcctggcagaagattatttctttttcttcattttttacctcataaaatctatttttattagatattttcttcatttacatttcaaatggtatccctaaagccccctataccctacccccatcctgctccccaacccacccactcccacttcctggccctggcattctcctgtcctggggcatatgatcttcacaataccaagggtctctcctcccatttaaattatttcttcttcttcttttttaaattttatttattatatgtaactacactgtagctgtcttcagacactccagaagagggagtcagatctccttaccgatggttgtgagccaccatgtcgttgctgggatttgaactctgaactttggacctttggaagagcagtcgggtgctcttacccactgagccatctcaccagcccaaaattatttcttcttatctcagcattccttagtgtaattctctgggtaggattgaagtctcccggacctcctgttgtctactttgtcatgtctcttgttcttattcagctcatacttaggaagtcactactttataggtgtagtttctgacatttttaggagacaataaattcccctatcctcttgctcttccaaactttctgctctctcttctacagtgtccactgagccttaagggtgagagttgtttggaagatgtattcattggaactgggctcca

SEQ ID NO: 4909 - DNA, 1000 bp, mus musculus
atttttttattaattctttgtgaatttcgaatcatgcaccccaatcccactcattcccctaatccctctatatttgccctctgctttggcaatctctcagtccaagaaaaaaataaaaacaacaaaacaagaggaaaaaaaattaaaaatttcttgctctgagagctgcagtgtgtcacacagtacatccttttgttcaaacagctttacttgcaaaaatgttcattgcaatgagtcattggtctggctccagatccctggcttctgctacaccatcaattctggatcttcacaggtacttgaatatcttattgttgccctgtattgtggaggtccttctgctttggttctgcaggaccagctccttcgtgaactccagcagttcatagatgaggttgatgttggagtgggccaacaaataaccctgcatatgaccctggatggttcttgagttttttagcctgacagttgcaggggagggtcaaggtgggggcaactctcctgttttatccaaagggtgggccagctctcccttattcaacagtgcctgttagcaatagaagcactctcccaaatgttgcagtcaaagaacagggacagctcacctgctctctcaccctagatccagctatcctatactgctgagataaagggtgggaagctggaaggttttaatttgtcctgtttcaagagagtcacagaataagaacttgggagtaggggaaacgcctttgcttctgaaagctaagagccagtaagagattggtaatctcagattaaaatgacaaaatctgccacagccatcaagctttgagtggacatctttaactacagatgataaaccacattcctggtcaattgttgaactatagtctcatgagaccatgagcagagagctttgctaaattgtgcccaggcatcaaacccaggaaaacagttatgacagtttgcgatatagaaattcaaaaacaatgtgacttgatctagaactggcaggtta

SEQ ID NO: 4910 - DNA, 1400 bp, mus musculus
tctatttacattttgcagttagtacacaaatatggaagggacctcccactgctgacttaataactttctgggcatttttgatacttttggaaaatcacaagtatgagcaaaatggcacttaatgctataaaataccacattgattgcttttcctcaacagatttaacattaatcctttctaaatcttttgttgatcttacaacttacagaaagtagacttactcttcatcacttctgtccagaactcataagaaaagaacaacttaccgattgactaaactttacattttttttctattttgctccactatatgtgtgcatgtggcactgggcatgtgttttatgttgtggcatatgtatagacaattggaattcagaaatggatgtggggtgccttttcttgactcctcttgacatgatggctctgactcaaactgaaaatgaagattgtgaattcagctaagcagtgctgacaggagcctgatatagctgtctcctgagatgccctgccagagcctgacaaatacagaggtggatgcttgcagccaaccattggactaagcacagggtccccagtggagaagttagagaaaggactaaaggagctgaaggggtttgcaacccataggaagaacaacaatatcaaccaaccagacacctacccagatctcccagggactaaaccaccaaccaaggagtacacatggaggagcctgtggattaaaaatggagtccagtgtctgccggggggggggggttgctagggctgctggatgaggcaggactcaactgtgcacaccccaaggccaccattgggctgtgggatgccgaaggaccctgttcagggcatggggaaggcacagacctgaagaagtcgggttcagactctggggcaacacagacgccactgggtgccgtggcagagccagttctggagcccttgggctgcacagaggccagggacgtcgggttctcagtcttggacacctcagatacttgatggatgtccctgaaagcaggctgactctgtccctggccaaaaggaaaagggcaggagaagggctctggctggttactgcaggttcaagagtccttggattgctcagtccatggcttgggttagcagaagccatggctggagaccagggaggcctccgcacaggaagctccttaggggcagacctgctccattgctccagcatggcagatcccaaagagaagaggctccatggtttttaggcgtttattgtagaaaggcagagggggttagggggagagtagcaaaatagaggctgatcagggccatggagaggggagaaggtagggggagcaagagagtgagagcaaaagagtaagagagtaagagagagagaggaggagccggccatggtggcacacac

SEQ ID NO: 4911 - DNA, 1000 bp, mus musculus
tacatagaagaacacacacacacacacacacacacacacacacacacacactaaaaagaattataaatacatgggcataaggtggcaggaccttgagaggaagggggacatcacagagttcaggttcaagaaagggtgagaggtggcattagggtgtgggtgttgacaggtgggcatttcctgccacagcggatgtggtgttgtattatttggagtcaggatggaaaccttgtatacgttatcattctgggcaggcaggtatcaagaatagactgtggtttaaaactcagaggtcattgtctacagcaaataaagggatatttagtaaattagccttttgtttatgatttgattcaaagttatttggagttgaacatgcatgcctccactccagcttcttgtgggctacttgctggaggaagtagttcagagttcaagggatgtgactcattattttttcccatggttcacttcaaaccagtcatggggaattttcaacaacacttgctataaacatattcctattccataaagtcatttagaaagtcccacgggaataattttctttaaaacccaacacagagaccactgcttctttcttatagtgaacctgtatcatagattattttcttttctgtgccttttctgtcattgaactctgagatgaacctgagatccaatcccagtgactattccattcaaaatctgaaaaggtgtgatgatgtatgcttggcatcctactgcttagggtgtggaggcaggaggattgctattatttcatgactgaccgagagtgcaacatgaatacaagggtagcctgggttacccaggcagaccttgtctcaaaacaaaataaatgatcggtaggaaaatagtagagaagcagtatggggacgggacattaaggcaagagcaccaagagtttgcacttggcttccaaagttctcattctcccaatcttgcttctctttgtgtctcgattcctcttgtttaaattgaa

SEQ ID NO: 4912 - DNA, 1000 bp, mus musculus
ctgctggaaccggaattactaggaactctggtcaagtggatgaaatctataatgtttcccacctaacacgccattttgcaggaagtcttttgtttagtgcgctcccccgccctccattctacacaccccctcttccacccagagagtcccctcacagtgtctctttcaggcaatccccacctgattttggtttttcccacttaatccctctttgcgtgccatcacactgggctgcccactgagaacgcccctacagcgcttgaagtactgaggagcaaccagtgacctgactgggagaggctacttcacctctcagttgagagcagacaaaggcccctctgcatttgtccttcctcttaacatctgtcccctgtctcaagagtacccctttaaaacaagctccatccaaggaaacgccattcccattactccctttctcagcttatacacctgcagtggcccacacaggtcccagccccgtggagccaccgagcacaggacacaccacgcaagctctgttcgcagccttgtacatgactgccccagagctgcaggttcgcgggctacctaatcttccgagtcatcatagctaccttttacccccatcatcccacagcacgcgaccaagtttactcagcttcctctgcttgtcccatgagaggaacacataggttagtgattcatagaaacaccctgcaaagctcccaagagtccatgaaaaaacctgcttaatgtttgatgagtgaatgaaggaacgaacaatcgggtgcccctgtgccaccctagtgaaggctctctctgtcctgactggatctctacttagccatcgatcactgaatcatcccctaagctgcatgtaccccaaagtgcgctctcgagtgctgtgcacagaatgagttcttagtatctgatgggggaagaggggctcgtgaggcggttctggggtaaaggcacctgtctccaagcctgataacttgaattcaatccctaggattcaaat

SEQ ID NO: 4913 - DNA, 1000 bp, mus musculus
gcctgggggttgggaaggctcccggggtcttcgagggcatctgcagagattactgagttctctggctgatgaatgttaggaagacatttaggaagggagtaagaaattggaagcagggcctgtttggaggaagtaggcactgtatcttttccttgccccatgctgtaaggcctttcctctccttcatgtctgccttactccaggcccagagatatggagtcaagagaccatagcccaagccccctcaactgctcaccacaaccaaccttcccttcttgttcctctcaagtagtcagtctctcatagcatcatgttaaagaaaaagaggatttgtgaagagatgcttctggggaaagctgggcatctcaccccagttccctgcaaggaggaaaggctgagctcagacaaggaagaaacccagtggcttgaatgacaagaacccattcagctaacaagtctgggctagcactctaggtcacatgtcaagggcagggcagtagattagtcatgctggtcctaacttgatgctcctggatatggaatggagctgactggattttcctggtgctgtctctcatcataggctgggcttctatataccatggtagcctaggctcatgcagcaagcagccacatacaggactttgcaggactgagattgttgaaggcatgcccatctgtctgaagcttcttgctggtcaaagctagtcactataccagccctgattcagggaccagtcctcctttatcccagcgggaacagcactgaaaacatactggataggagtgtggctattggagggatgaggatccaagctgattctctaagaatctacggaaagctgaaatggtgcagttcctggcctcagtggatttcataacctgataatttaataatgttgtgttgaaagactagggctattagaataacacacacacacaagctttagagtatgaaaaaaactccaaactcataggccagtctcttcctttgtgaccc

SEQ ID NO: 4914 - DNA, 1600 bp, mus musculus
ctcattgggaaagtcaagaaatccaagttaaatacataaacactgtgcagcatatgtaataaccgattgatactacctataataggctatactaacctctgaaaacacaagctctcaaaatcatcttactgccaaaaggagttcccaggtgcccgtgcttgagtagcggtacatacatgtgtaatgtcaaaggaattagcagtacatacatgtgtaatgtcaaaggaattagcggtacatacatgtgtaatgtcaaaggaattagcggtacatacatgtgtaatgtcaaaggaattagcggtacatacatgtgtaatgtcaaaggaattagcggtacatacatgtgtaatgtcaaaggaatgcccacttgtataattcagttagtgttctatcaataggtgtgaataatagtgtaccctcagtagactatcatgactgataatatatactttattcagcaatagagaaagcaatttttttcttcaaaggaccacacaaatatattcaagaacatttcaaaatagaatttcatacctaacagtgtatcaagatttttatctctagagtacaaaagtcacttctaatctatgttacataaatcactgtagaacatttttcatgacaagattagaagatattactggaacattttaattaaatattaacatattcaatagttcaaaataggaagtttgcatgtatgtgcaaattgacagttctgttacagaatctctctatagaagtcacagcatctcaatttgagatatacaacgcagctactatcccagtgttgagactgtaaagcacacagtgtaaggatggggatgaggccctgctgcacacatcgcatgcctttgttcacacgactgtctattcataagtcactcaagcaaagccctgctgctttccaaatgcccacataataagactttaaacaaaaaaagaatccaaatctaagttgcaattcaattccataaactttcctaaaagcattccggtggtaaaacagacttgccactataatcaaataactccaccatttattctaaaacaatatgcagacctgcctttagagagacataaaataatgtggagttaggtttaacaagttccatttttgtttacacatgaaacactgtatcattaatcagcacacaactcacaatgaccacatacacaatgccctgacacttgatcacattctggtaacctagaagggtaaatgtaatgctgtacagcaaagcatagctaaaatcttaccactgtcataaattacccacaaactaaaaataaaagacgtctatggcactgggatgaatatactctctgccttagagctaatactttaatttttaagaaccacaaagaaaaagatcaaaactagtcagtaacaatgcagcgtctaaaagcaataaactcaaaattaagttataaataatttaaagcatgtcatgaagatatattaataattcatcagataaataatttactaaataatcaaataaataaataatgaaatacataaataaatcagcaaataaataattctgtaaaataacctaaacaataagccacccaaacaaatcacaacctataaaat

SEQ ID NO: 4915 - DNA, 1000 bp, mus musculus
ccaggcacaaacactgtaaaaaatccaggtactgcttaaggacagaacctgacttctggcagaaagagaccagactcttgctcattcccctcttctgtcttgggaaagttgggttctctggcctccaaggatacaaacatggaaccccagccaatcaatcgggagcagaaaaggttctctccagggaattgggtgtcttccggtccctatggacaagtgaaatccacgtcttaaccctgggaatcctacatgcctcagagaaagttctcccagaaagggtgcagaggtcaaagttgtcaaccggacattttaagagatgagcctgtggttgacatcttgttaagtaaaacctggccctggtggaggccagggtcaaaacctctaccctgagctctaagctgctgtcctcttggtcttctgggatcatcccagaagggacctgtttagcgccttttgctgggccaagcacacgcacgtgtcaccatctggacctgccgcttgccccctcagtcccttgcattcgagctgcccaaccccagttcggccaccctgggagctctgcaatggaggaacactgtagaaggccgccgctctcgggtgtgtactgtcgcagggaaatgaggagttgccccctgggctgcacctgtggggccacagtcccagctaagacaccatgtacctccctcggcttcccgcccaagcccaaacccgaatcaccctccaggaccgacccgcgatcgccggcgtgggctgcacgagcgctgttcttcggctctcaaactctgggctccaacttgagcgcccagcgcccgagtggctctcgggatagagaagttgccacaaacttcccaggcccctctccacctccgctcgccaccagcaaagtagggctggccgggaaagaacagggggagatgagatgggagaggatgctaagtgaactccagatctggcgcgcgacctttccaactccaccccgcacctcgcctccttccccgca

SEQ ID NO: 4916 - DNA, 1000 bp, mus musculus; identical to SEQ ID NO: 4915

SEQ ID NO: 4917 - DNA, 1400 bp, mus musculus
acacacacacacacacagagagagagagagagagagagagagagagagagagagagagagagagagagagaagccttctatgtccctttttagctgtgagtctagctcatcaacaccatggatagctttcttgcccttcatcattagtagggacatgggtcatggacttacaatttctgcaagagcatagaccatggacatccacatgaactcctgcatcagcacagacctcagaaaggttcccaatgataatacagactgtggacataaacatagccctctgtgcccacacaaatcatggaccatcctcagcagcacaggccaatgacatctgtatggtcttcatcattaactctggccaggaacatcaacactactcctggatactgtaggaccatggacatcctcatgaactcagggcttcaacacagcccaagacagcaaaccatggataccaaaatggtctccagggacagcacaggccgtaaatgcctttagagttagtccattccagaaaatgtcctattcttcatcttggacatcctgttgtttctcagagacagggcaatcctgtgctgggcagaatattgggggtgcagtttccatctgtacccagagctgaccttgtgccacagctctccatacccaggtcctgccagggcttgtctcccaggagtgttgacacacctgtgagcacagataggaccaccacttctgctctgagggacccacccagagtccctagaacacaggaactgaggagcagccaggaacaggatccttccagtttccatctatacccagagctgaccctgtgccatagctccccatatccaaattcctcccagagagaactggtctctcaggagtgctgacacatgggcttacaggagggacaagctacactcagagacagcaagaacagctaacaccagagataaccaaatgtcgactgacaagggcaagagcataagcaacagaaaccaaggctacttggcatcatcagaacccagttcttccaccacaccaagccctggataccccaggacacaagaaaggctagactctgatttaaaatcacatctcatgatgatgatagaggactttaagaatgaaataaataatacccttaaagaaatacaggagaacacaagtaaacaggtagaacccttacagaggaaatgtaaaaattcgataaagaattacaagaaaacaaaaccaaacaggtgaagtaattgaacaaaaccattcagaatctaaaaatggaaatagaaacaataaagaaatcacaaagggagacaactctggagataggaaacctaggaaatagatcaggagtcatagatgcaagcatcaccaacagaatacaagagatagaagagagaatctcaagtgcagaa

SEQ ID NO: 4918 - DNA, 1000 bp, mus musculus
tgtgatagctaaagaaataatatggagtaaagtatacctttagggccattgaccttcactcaagaatgacagggagagcctagtggcctgcagctgagataagaatagaaaaataacttcccatttccatctgtgcccgagttgatcctgtgccacagctctcaataactgaatcctgctgggaaagagctggtctccagaaagtgctgacacacctgagaggacaggtgagaccatcacttctgctctaattcatggccgaaaggggacctgcccagagccctcagacacagtaccctgggtcaggatacttccggtttccatctgtacccactgagctgacgttgtgccaagctctccatacacaaatccggccaggagagagctagtctctcaggagtgctgacatacctgagagcataggtaagacttctgctccaatgaacacacctagagtgctcaggtcacagaaacaaaggagccggctgagacaggatgcttcaggattctatcagggcctgaagctgaccatgtgccacagttctccatactcaaatcctgcctggaaaaagctggtctcccaggagggctaacacacctgagagcacagatgagaccatcacctctattcaaattcctggcccaagggggccagaaccatcaggacacaggaaccaaggaaaagcaagggacaggaactttccagtttctgtctgcaccctgaagctgaacatgtgccacagctctctgcccaaatagcaccagcagagggctagtggcccagcagtgctgacatacaagcctacagtagggaaaagccataatcagagaaagcaagaccagctaacaccagagataatcagatggcaagaagcaagggtaagaacacaagcaacagaaaccaagactgcttggcatcatcataatccagttctcccaccacagcaagctatggataccccaacacaccagaaaagcaagactgatttaaaatcacatc

SEQ ID NO: 4919 - DNA, 1200 bp, mus musculus
agtcagaagaggggatctgcagatgtcctggatatggagacatagtcagttgtgagccacctgactgactaggtgctgggaactgaactcaggtcctctggaactacccttaaacactgagctgcatttccagccctatcttaacattcttcactgaaaacatccaaatacactgggcacccagtgtatctgcacccaggagctgatgaagttccaaagccatctgtgcataggacctgccaggagagaggtgttctcccaggagtgctctcactcctaggctcagaggtaagatagccactttcactccaataactgtccggagtagggccggctaggagaatgcaggacacagaaagaatggagaagctgggacaggatccttcctgtcaccatctgcatgtagaacctggactgttccacagccctgtgtacataagttccctcaggtgggagatggcctcccaggagtgctgacatagacttacagacccacgggagggaccagctccagccagagacagcaagaccatgtaacaccaaagataaccagatgatgaaaggcaagcccaagaactttaccaacagaaaccaaggctacatggcatcatcagaacccagttctcccaccacagcaagtcctgaatatcctaacacactggaaaagcaagatttgtatataaaatcacaactcatggtgctgataaaggattttaaggacataaataactctcttaaagaaatacaggagaacataggtaaacagataaaagcatttaaagaggaaacacagaaatctcttaaagaattccaaatgctgacaccattgcatacactagcaagacttagctgaaaggaccctgatatagctgtctcttctgagactatgacagggcctagcaaatacagaagtggatgctcacggtcagctattggatggatcatagggcccccaatggaggagctagagaaagtacccaaggagctgggggaatctgcaaccctataggtagaacaacaatatgaactaaccagtacccccagagctgtgtctctagctgtatatgtatcagaagatagcctagtcagccatcagtggaaagagaggcccattggtcctgcaaactttatgtgcctcagtacatgagaacgccagggccaagaagtgggagtgggggactccgcggtgggcggtctgcg

SEQ ID NO: 4920 - DNA, 1400 bp, mus musculus
acactttgctgtggattagtgttgcttctttggttggtctgtaagcttaaggcccaaactaggagagacaaggtggttattgcccaggcgcttgcagctctagaacatggtgcttcccctgatttatggttatctatgcttaagcaataggtcgctggccactcagctcttgcacaccacgaggctagtctcattgcacgggacagagtgagtgtgcttcagcagcccgagagagttgcacggctaagcactgcagtagaagggctctgcggcatatatgagcctattctagggagacatgtcatctttcaagaaggttgagtgttcaagtgtccttcctccaggaaaaacaacacgggaccagaccaggacccctctaggtgatgagcctgggaggaggttatgtgtacggctcctttacctgcacactggggatttgacctctatctccactctcattaatatgggtggcctattgctcttattaatagaaaagggggaactgtgggaagccgcccccacattcgccgttacaagatggcgctgacagctgtgttctaagtggtaaacaaataatctgcgcatgtgccaaaggtagttctccaccccatgtgctctgccttccccgtgactacaactcggccatgggctgcagccaatcagggagtgatacgtcctaggcgaaggataactctccttaagagggacggggtttcgctttcgctttgggcttggggcttgctctcttgctcctaaagatgtaaacaatagagctcttgctctgcgctctgcgctctggcgctctggcgctctggcgctctggctcctaaagatataagcaatggggggcttgcactcttactcctgaagatgtaagcaataaagttttgccgcagaagattctggtttgctgcgtctttcctggccggtcgcgagaacgcgtgtaagaatgggtaattcaggtagcatagtaacttggtgtcctattgtcaaacgttcagtttccactaaggcccaatagcaggccaagagctgtttttcaaagggagaatagttgtctgcagatgatggtagagctttgctccaaaatcccaaaggtcttttctgtgattcacctacaggggcctgccagaggctccaaacagcatctctatcagccacagacacctcaagtaccatcgggtctgctgggtcatatggtccaagtggtagagcagcctgcacagcagcctggacctgttgaagggccttctcctgttccaggccccacacaaagctagcagctttccgagtcacttggtaaataggcctaagtaacacacccaagtgagggatgtgttgtctccagaatccaaatagacccactaaacgttgtgcttctttcttggttgtaggagggg

SEQ ID NO: 4921 - DNA, 1000 bp, mus musculus
acacttacatttgtagttcatggagccaatgtaaagctttagccatggtgcgcccatcattaaagtgaggtgttgggattccatacaagttaaacctatggaagcttgccgggttatattttcgattctttgcttctcctgtgggtggtaggagcatggaagaagacttctgagttaagccacacagagagagagagagaaaagtttattttagggaaagcacactgttttctcattggcacagaactcgtggggcaaaggctggaacatacccatgcaggcagctgttcatacgcagctacagatggcaaaagcccttccctgcacatgctgggacaccacagaatgttacatacagagctccttgtgttcatgtttgtaagatgtggtggtttatgtctgtaatctcagtatatgggaagctgagaggaggatggggagttccaggcctgcctgagccacatagtgagacgaagtttcaggaaaaaactctaagcaaaacaaaacaaccattgacatcacccaaaactgataagattaataaatgaattcaagaaagctgaatgatacaaaaaaaatcaatattaaaaaaataactggagaggagaccatctgtgactaccagagctgacagaatgactgtccacatgaggcaaggagatctggttcacaatgcctcagtagtcagtgctggttcaaactttgacagtctgacactgggcagtttattgtaggcacatttaaatatagtacaagttagaaaaagtatcttagtatgcttcagaaatttatattccaaaaggctagaaaacttagaagaaatggagaagtagcattatttgcagataatatgattttatgaataaaagaccctaaaatctccaccaggaaacttctacaaatgataaacacttttggcaatgtagtaagatacaaagttaacacacacacaaaaagaaaaatcagtgaccttcctatttacccaaaacagactgagaaa

SEQ ID NO: 4922 - DNA, 1000 bp, mus musculus
gtgttttgtctgcacatatggatgtacaagaagtcatcaggcttttataagtaaccccacatggatgaaaggtttggattcttgaattctctttcctcccctagtactggggattgagtctagagtctctcatatactaggcaagtgctctaccactgagctgcatctccccttgtaaaatgtcttatcttgagggaaccttactactaaactacccaggatggccttgaatttcctctgcagctctgttgagcttgaattgacaaccctcttgctctgtctgcttcctgagaagctgacgactcaggcatgtgcaaccaagcccaacctggtgcttcagctcccttttttgttgttgtcaaataaatcttgtgtgtgtgtgtttgtgctctgtgtatgcatatgcacacttatgtaagaaagccagagggttttatcactttcagcctttattctcttgagacagcctatcactgaccctggagtaggctggtgactcgaaagatctaactgtcctttatttccactccacctcaacatctgactttgacatgggtgctgagaatttgaattcaggtcccatgtttacacaacaaagggtcttacttgctaaatcatcccccagttcctggatccttgaattctgtttggggtgtgtgtgtgtgtgtgtgtgtgtgtgtgtgtgtgtgcttgtttgagacagtgtctctctttgtagccctgagacatgctgtatagaccaggctggcttcggagttagaaatctacccactcctctgccttttaaatgctgggattaaacagagacatatgccatcacgcccagctttgaatcctgaaatttggtgcttgacagtgatacagcctcttattctgcactgtcagcaggatgacagctgctagtaaaggttggctttgttctcttccatccagaatttccaccagtttgctctctgccctgagcagccatccaaggaagaggatctaggctatgtatggc

SEQ ID NO: 4923 - DNA, 1000 bp, mus musculus; identical to SEQ ID NO: 4922

SEQ ID NO: 4924 - DNA, 1000 bp, mus musculus
agagggggaaacaaaatagtcatcagtggagggagggaaggaactgggtaggagaagaagtgaggaggtgaatggggatggagatcttgtgtaaggagggaggcagaaaaggactatggaaatgggtgggaggcatctcagggactagctgtagtcctagaatagcagagtctataaagatatccctagctgagattcttaccagcaagtaatatggagactgaggtggccacctcctctagccaggcaaggcttcgggtgggacatcaacccattcacaaaccttcaacccaacatttgtcttgcctacaagatattcaggaataagatggaacaaagataagaaaagggccaaccaatgactggcccaacttgagacccatgctatgggagagagtcaacccttgacattattaatgatactctgctatgtttacagatggaaacacagcataactgtctcctgagatgcttcattcagcagctgatggaaacagatgcagaaacctacagccaaacatcaagtggaaaatgaaggataaaattgaataagccagaggggtcaaggacagcacaggaaggttttagagtcaattaatcttggcctgtgaggacttgcagagattggactacaaactgggaagcatgtaaggacttgttctagctccccccactgccaccctgcacatttgtagctgatgtgatggttggtctttatgtaagtaccctaaaatattgtagcaggggatgtctgactctgttcccctagatagactacatggatgggcctcagagggagacggacgatgtttattcatgctgcgactagatgttcccaggcaagatgacacccaatgcttccccttctctgaggagaaggagattggtaatggcaggagggatttgtaagggtgggatggggagaaaaggacctgaggtggggctgtgatctgtgtggtctgaatataaataaatgaatgaaaaacaaaacaacaacaaa

SEQ ID NO: 4925 - DNA, 1000 bp, mus musculus
tctggctattataaataaggctgctatgaacatagtggagcatgtgtccttcttacctgttggggcatcttgatgttcataagggaaattggtctgaagttttctttctttgttgggtctttgtgtggtttatgtaccagcataactgtagagaccatatccagaggctagccatggcccctggttgagggatggggccacccacccatctccaaaattttaatccagaatagatcctgtctaaaggcaatacagggacaaagagtggagcagagactgaaggaaaggacatccggaggctggctcacatggagatccataccatatgcagtcaccaaatccagacactattgctgatgccaagaagtgcttgctgacagaagcctgatatagctgtcttctgagaggatctctcagagtctgaacaatatagatgtggatgcttgtagtcaacatcagactgagcacggagaccctaatggaggagttaggggaacaactgcaggagctgaaagggattacaactccatagaaagaacaacaatatcaacctaccagacccccacccagaactcccagggactaaaccaccaaccaaatagtacatatgtagggacccatgactccagctgcatatgtagcagaggttgcccttatcatacagcagtgggacccttggtcctatgaagactcaattctccagtgcaggggaatgctaggatggcaagagggtaatgcatgggtagatgagggagcaccctcatagaagcagggggaggatgatgggaaaagggctatcagagggggaacctggcaaggggaacctggcaaggggattttattttattttatttccaacatttgaaatgtaaggaaataaaatatccagtaagaaagaaagatggcatattttggttaacttttctaaaaaaacaaacaacaacaacaaaaataaaaaaacaaaaataaaaatcaaacaaacaaacaaaaaaaacaagat

SEQ ID NO: 4926 - DNA, 1000 bp, mus musculus
ttaatctatatcctcaagaagaaaagaggaaagtaacttacacaaaaatgaatagatggccaacaaaagacttggaattttcttatttattttcactttctgtcacttctgctctcagaaaaatcaacataaatgtgttctatattagtaatgctatttatcatttttatgctacttatcatatatttattatctaatcagttcatgttatttctgtcatcaatgcctgttgcagctggctttttgttaacaaatgggaggagatgtagcctccccacccccagcctggaacctgctggctcaggggtggagtttcctgctcattcgttctgccatgcccactgctggactgtgccgctttgctgcttggagccacacacgtgttcaccctgctactggacccggagaccagttggcgggaatcgggttccctcccccttcctttataactgaatgtcggaactagtaaaattgagctttgaacaggatgaacttgtcttggctccgtttcttctttctccccgtctagttcctcccttagctcgagtggccatctcagtcgaaccattcacgttgcgagctactggccggccgcaacaaatgcccatgaataatcagcatttttgtatttctgtcttctacttaaactgtgtcttagttagggttttacaactgtgaacagataccatgaacaatgcaaatgttataaaggacagccctttttttaggctggcttacgggttcagaggttcagtctattatcatcaaggtgggaacatgtcagcatccatgcaggcatggtacagacagagctgagagttctacatattcatttgaaggctgctgacagaatactcgcttccaggcagctagaatgagggtcttaatgcccacacccacagtgacacatctactccaacagggccataccttctaatagtgccactccctggcccaagcatatacaaatcataacgaactatatgtttattttttatta

SEQ ID NO: 4927 - DNA, 1000 bp, mus musculus
cacagtacacagaacgaagactcaagactcagaaggttgtggggtgaagtctccgggatgcttgcctctgcccttagttcaggctgggggcgccatggccgtgggcgcaggtagggtgcaggcgctgtgtagcgggttttccaatctctgtgtagccagcagttctgtcggtgtgagcagggccgcagcgcccgagccgcagttgtgattgctttatttccctggtgattaaaccttgtgccattctattcctgttaaatccgtagaaaatgagaaaatactcgacattttgggggaaacttgtaaatctgagccagtaaaagaagaaggttcggagctggagcagccctttgcccaggccacgagtagcgtggggccagacaggaagctggcggaggaagaggacctatttgagagctgcggccacccggaagaggaagaggaagaggaggaagaagatcaggaagaggagcaggaggaggagggagatttagctttggccagcagcagcaagtctgagtctccaagcactcggtgtcagtggagcgaggcagatgccccgttagcagtagtgaaaagggagccggcagatgcgcctggcggaggcactgggatggaccgcgagcctgtagggctagaggagccagttgaacagagtagcacggctgcccagctcccggaggccaccagccaggagctggtgcgagcgcccacggcagccctgagccctgagccccaagatagcaaagaagacgtgaagaagtttgcttttgacgcttgtaatgacgtccctgcgcctcctaaagagtcctcagccagtgagggcgctgatcagaaaatgaggtttgttgattctcagtcctagaccagacgctatctcctttcattgtcactaggatacatatgagctgttagagcctgcagtcggcagccactctgcccagctagctccttcaggcagcttcttatttattttgcactggttctgtaacctttcccc

SEQ ID NO: 4928 - DNA, 1000 bp, mus musculus
agcctcgagtctctacaatgtcagataacctccctcgcaggaggtgatctccaaaacccgagagccccggacttactgactactgaccaggaagggacttgagttttgatgggggaggaatgttgcttctatgtcaataaatctgggctggtagaacaagatgtgcagacctcaagtagcttcagggtaacctccaggaatgttatgctaccagcactgataccccgtggtactctaacccattggtagcttggctttttcccctctgtggccctaaatgagccatcagagccttgtttcctttggcaccttgcccaattcagtttctaaagcagcagataagtagcattgcaaagatcactattaatcaggtcttggttcaatatcaaactgttcccaaattaggagacagttattgtgatgacacctctcttttataaaaagaaaaggggtagttgtgcggcagaggaccgtgagaggaagtctgctaaggtcaatctaacgtttgaagctccaggtaccctgaaaagatggtaggaacttctcttgctcccagccggaggtccctgtcatgtagccacagccccctatagagagaattgtgaccatcagtcatgtagaggcagtgctcccaagcctctcctcgtgcagatgaggcttctcaggtcaagccaatgggaagcatctgctgtcagactcaacccactcccaaactgtaaataaatccagaaggaataaaggagtatgagcattactctgtcttctgagagcatctgtcacaagagctggaacagtgcccaggaagagaatgttctgaagctttcgccataagaagcccccgtgcaccctgctcacaaaccagatgactgctggctcagctctgttcagctcaactcagtggcagcagcagcaacagtggtagaggggacccctccctgctcatgccctttccccttagcttgaactctcctgtcaggctgatctcaaaagtctttgcagt

SEQ ID NO: 4929 - DNA, 1200 bp, mus musculus
cccgtctctacatagaagctatcttttctgtggtatcagtaagattaggaattcctttaagaaacagctatcttttcatctttacattttaagatgtgtctaacacttgtcgtatcctacacagtatgtcaggttgtaagggaaaaaagaggaagggggaggaaggggaggggaatttaataggtaccttgttaaggggtagtagacagggcccagggctcaatgcttaaaggtgcttgctgccaaggctgatgacctgaatttaatccttaggattcacgtgttggaagagaagaacctatttctaccagttgggcttttacctttacatatgcactgtgtcatgtatactctctaccccccaaaaaggaacatacttaacaagaaatataatataggcatttactggtagaagtgtgatttttaatctacatctttgtggttcttgcatgatcaatggtaaatattccaggaaggaaacttcattaattacttaccagtactaatcgttatgtaaatatttctttctcttggcttaaaaaattctttttgtattgacagcttcattgtcgttatttaaaaatagtatttttctctcatcatacacttctgtgctctacccagctccttggccaacagtttatgtatatagatccaggctgttctcagtcctggttaaagaggcttgctcttgtgatgggccacagttagtagagggaagcaaaattggtccaaatgccaagaaaaaggaactgagttctctgtcttaagtgaggcccagacattcagtccctctcccggggctcaaggagcactacagaggaggaggctggaagagtggaagagctggagagtgggaaggaatggtgtgaaatgctttcttctcaacatgacatgggtatcaaatacagggactagctttagtaacctgcacaggacctacacattgtcaagtcggtctccttgcccctcccccacacctgctgaggacatattgtcagcatatagttgctggatgagagaaaattattattgatgatgatgatgatgatatggccactagtagcccatggtctagcgatggcctcatactcatgaaaatacctgctgtactagctggccttataggctatgaaaataatacatgaaactgggagaaaggaatgttgtgtatggagttatgtgaagagatggaggtgg

SEQ ID NO: 4930 - DNA, 1200 bp, mus musculus
ctttctccccttctcctcccctcccctcccctcccctcccctcccctctcctcccctcccctccccttttctcttctcttttctcttcttttcttttgtcattttccatggcagggtttctctgtgtggtcctggctgttcttgtacttgctctgtaggttaatctggtctcaaatttagagatcaacccaccactgcctctcaagctctgggaataaaagtatcctccaccatgcccagtattttccaccacacccaacatttctgctcttttgttcagtgtttacttgtttttcatttggccttttcttttcttttttttttctccataaaaagacattttaccttgaaatgttatgattgacatattttttgatattttctttatatacatttcaaatgctatcctgaaagttccctatacactccctctgccctgctcccctacctacccactcccgcttcttggccctggcattcccctgtactggggcatataaagtttgcaataccaagtggcctctcttcctagtgatggccaactaggccatcttctgctacatatgcagctagagatacgagctctggagttactggttagttcatattgttgttccactaataggtttgcagaccccttcagctccttgggtgctttctctagcttctccaatgggggccctgtgttccatccagtagatgactgtgagcatccacttctgtatttgccaggcactggcatagcctcataggagaccgctataacagggtcccttcagcaaaatctttctggcctaagaagttccaactgagaacatatgctccactatgttcatagcagccttatttataatagccagaagctggagagaacccagatgtccctcaacagaagaatggatacagaaaatgtggtacatttacataatggagtactattcagctattaaaaccaatggatttatgaaattcttggacaaatggatgtatctggaggatatcatccttagtgaagtaacccaatcacaaaagaagtcattagatatgcacttactgataagtggatattagcccagaaacatagagcacccaagttacaatttgcaaaacacaagaaaatcaagaagagggaagaccaatgggtggatacctcattcatccttagaatagggaacaaaatacccatgaaaggagttacag

SEQ ID NO: 4931 - DNA, 1000 bp, mus musculus
tattattcaggcagctgagagatttcatgtgttcaggatgcctgttactcatgaatgaatgtcatagcacagttcctgtttctccagctcttacaatgttcccaccccgtcatctgtgataatcctttgaacatgaactacagtggttgtattttatatgcatcaattggagctgagactgccccccccccagtgacttttcctctgtattgtgatcaggtgtgaccttctgaaatgatacatcttccattaaaaaaaataaagttttttttttgctgagagctaagagctgagagctacccttacctgtgggtataagaatgacaagagacaactcatgctggccaggatatacattattcgtgagagtgcaaattcacatatttatatttctggtggaagtcaacatgattgtttctcagaaagatcagaatgtatctacctcaagatccaggtctatcaatctttggcatgtacccaagggatgcttcatttttaccacaaagtcacatgctcaggcaagtgtgttgttgctctaatcaaaatagccagaaagtagaaaatatctaaatatctaaatatcccccagaaaaagaataaatttaaaaatgtgataaatgaactgtcccctgacctccattgtcttccaaggtgctatctctaccttcctgaggaggcctgtggggcctcaggtagatagaggttagacccgttcccaccaatcccctgcctgctagatgaacttggggcacaaccaaaaaaagtgaccagcatgttgttctgtagatctattgtcagacccatggcattgactgcttccctgaggagtgttgctggcattaagaacaccaagccattaccacggatagccatatgaataaaggatagcataaaaatacaattaacaagagccagggcaatatcacagcactagagtccagatatcctgctagagcaaacccttgatattctaacacacctgaaacacaagaagatgacc

SEQ ID NO: 4932 - DNA, 1200 bp, mus musculus
gtcgatccaataatgatgaattaatatgcattgatgaattaattagaaaaaattttaaattaggcatttagaaatatatactcagagattaaaatcaactattgaaaaatatcactaaataaatatgtagacatctcagcagttcatagaactgactgacccccagaggaagtataaaatgcaaaataatggttatcaaatattcagtcaattagtaaattgttaaatataaaccattctctgttcatacatgtgtgtggtgggctagagaaaagcaagaatttgacaatacttagtcatactatcacaaatacaggaggattttcacattcaaaccaaggatgatgaaagccatttgggattattattgacagttttatggtcataaatttaagtatttgcataaactatgaaggagctagagaaagtacccaaggagctaaagggatctgcaatcctataggtggaacaacaatatgaactaaccagtaccccccggagctcgtgtctctagctgcatagctatcagaagatggcctagtcagccatcagtggaaagagaggcccattggtcttgcaaactttatctgcctcaatacaggggaacaccagggccaagaagtgggagtgggtgggtagggaagtggggttgggggaggacatgggggactttttgggatagcactggaaatgtaaatgaagaaaatacctaattaaaaaatgctcaaatcaaaaagaagaaatgaaatgcatataagacattctaaaaataacaattctagttgcaacgatccattcttaagttatgggaagcatttaagtttgaacaaatagcagtagtgaaatcattagggaaactggacaaaagggtgtccatataatccatttcatgcatgaaagtgattaaagcatcgaggaaaaagtttcctttgatgccccagaatatgggaatttgagggcagggaggcaggagtgggtgggtgggtaggggaacaccttcatataagcagggggaaaggggatgggatagggagcttccatggggtggggaactggaaaaggggataacatttgaaatgtaaataaggaaaatatcaaattaaaaaaaaagtttcctgtgaagatcctccacaaacacagaattaaaagtttcaaaagaatacaagttcctgaaaaaataaatcgaggaagacctcagaa

SEQ ID NO: 4933 - DNA, 1000 bp, mus musculus
ggagtgcccacaggaggattcttgaatctcattcagaagaggaaataaaatagacatcatagacatcggaagtggaaagagggagggaacaggtgggagaggggctaaggagaggaacagggatttggatgaggtgtgagggaggaagggacaggtgagaaacataacagaaagcctggatagggacatttctaggacgagtccaagaccacagactgggagggtcccaggagtgtatggggtgatgactctagctgaatctcctagaagctgggaatatggagattgaagtgatcacctcctgtatcaaggcaggacttccagttgtgaaagggggacatcaacatatacacaaaaccttcaacccataatttgttctggctacagaatgcaccatgataaatgtgaaaagagattgagggaattgtcagtcaaccaatcactagcccaaattgagacccactcgattggagagagcaaatccctggcactattaatgatattctgctatgcttgcagacaagagcttagctagcataactatctcctgataggctccatctagcaactgatggaaacagatgcagagacccacagacaaatttcaggttgagctcagggggtcttatggaagagtaggggagaggattgagggagccagaggggtgaaggacaccagaaaaagaactatagagttaactaactttgtcccatggggctcacagagactaaaccaccaaccaaagagtgtgcagaggctacacctaaaccctctacatgctgataccatacatgcagcttggtcttcatttgggttccttaacaattagagagggagctgtcgatgactctgttgcctgccattggatatctttcctcagcattgtgaagcctcggtgggagagaaagtgttaaatcctgctgcaacttgataggccatgatgggttggtacccatgggggacttctttttctcatagaaaagtaagagaaaaggagag

SEQ ID NO: 4934 - DNA, 1200 bp, mus musculus
gacacaaggagaatggttgggtcaggctttttctagggctgccagggtaaaacatatgaagttattatagccaaggtctacacgaagtcataaagaagcagagtttagaaaaatgaaaggcgcctgtgcaacttcttgtcctatttgttcactgggaagaggttggaggatgatcactgacctctgagcaactggggagagagcgcatcctcagagcccatccttcacttctgaatgagctccttgctgtaattgatggcatctcctcaaatggctgcaatcattagggctccggtgactgaattaaaagaaaatgaaggatgcagatggctgtaataaagcaggagaatgcatttcttcctgctgacagatacaactgatcattttacaaggaagtgctttactaaaagtgtttcggcgatgtagttctcagggaaaatgaagagtaatgtaaaaattggacaagatgaaactagctgtttcatttcagatattgactgcgccagtcacttttaataaatcagctgcttattgtacctaagacagcagggtgttaatatcagggaagcactgtaaagtgttcccttccctaaggttttctgtctatggcttaacatcattttattcaatttctcttttctgtatgctttctaattggtaatgtctgaactgcaaggcataataatttgaaaatatctttatttaaaacaaccaagatacaccaggctttttctaaggatcaaatactatgtgttgtacatctttgcaggacaaatacttcctctctaatcaatgtccaattttgtattgttaagaggaaacattatagatgacaaatggtcaagcttggtgaataaatgaatatataaatacaaggtgtagctggattaatcgtcattatgtaatttacatatttcaaatcttaaaacatatattcatatcacttgaggatattgtaaatacatataatcagaaatcttaatatgctacattatataaaatgataggattgaatatataatttatcagaaaatgaacatttatgcaacaatgttcttaaaaatctattaagccaatggcaacatatatttcatacatacagaggtcaaaacatcaaattaaagttatcacaatgtaaccttaatgaacattttattaaacatgttgaatagtactgcatctttaattttgtcttctaca

SEQ ID NO: 4935 - DNA, 1400 bp, mus musculus
ctctaaggaaatccacatatttacattgccaaagcttgggcattgtttacaaataatattgtctctctgttaatggtcattcccaaattttctctccattagctatatcattttatggagtatctaccactcatcaaatagggaaacactttgttctatttttataactttaattctttatttatttcatcaaagaaaaaatacaatctaattaaatgacttaaatagactctaaaggcccttaaggtctttctctgctctccaaagtctttctctaacactcattcctagatttgggttcattcatttatttattttcccttttaaaagaaatgcaataaaattgtttaaacaaagaattttacatcccggtctcccttttgtacccctgagccaagactgatccacagactgctgtgcactggtcctgccaggacagcgctgttctcccaggagtgcttttactcccaggcttgaaggttagctagccactttctctccaataactgtgtggacctgggggatggggcaggtgaggaacacacggggcacaagattcttggagcagcgggaacagattgcttctgtccaccatctgtagctgcaagctgaggctgtgcatggttcccaccaggagagacccgttctcccaggagtgtttcactctgagaatcagaggtgagatagctactttctctccaataagtgtttgaaattaggaggcaaggagaacacagggctcaagaacagtggaatagctggtacagggtgcttccagtcgccatctgcacttaaagcttggggtgttgcagagccctctctacacaaattctgccagggcagagctggtcttacagacccacaggaggaacaagttccagccagaaagagcaataacatctaacaccagagataatgagatgggaaaggcaaatgcaacaatcttaccaacagaaacccaaactacttggctccatcaggaacttctcccaccacagcaaatcctggattaccgaacacaccagaaaagcaagatgtggatttaaaatcaatcctcatgatgctgatagaggattaaaagaagaacataaataactccattaaagaggtacacgagagcataggtaaacaggtagaagcacttaaaggggaaacaaaaaaaaaatcccttaaagagttataggaaaacacaaacaaatagctgaaggaattgaacaaaaccatctatgatctaaaaacagtagaaacaataaagaaatcacaaagaaagacaactctgaagatagaaaacctaggaaagagatcataagccatagatgcaaaaagtcaccaatagaataaaaggcacagaagagagaatctcaggcacaaaagatactatgcaaaacattgacacaaca

SEQ ID NO: 4936 - DNA, 1000 bp, mus musculus
ctgggattgagaagtcctgcaccattctaaatgcattctccactttaatactctgtttctagtattttgatacatttatgtaggcaatgcagaggatgattttttcttccttttatactccactttctgagaacagatctcattgttttgttttgtgttgtgctgttttatgttgtggtgttgtgttgctttgctttggtttgttttgccttgtgagacagggtttctctgtgtagttttgcctatcctggaacttacaatgagactgggctggtctcaaactgagaaattcacctgattcggcctcccatgtgctggggttaaaggcatgtgccaccaccacctggaacttccaaaacctagttaaaagagaagtaggaagaaagggtgattaattagttgttgttgaaaatacttgtaaattaatttgtttcccattatttaaaaatcacaaatatatatttttatatttttacataaatatataaagtgaacgtttaatctatgataattgtaactctccaatgtatgaaaatatgagattagagtctaacttgtgtaattaggatatgggcaaaactacagtaagaaaatgaatacaaagcaggtttatctcagaaaaactggaagtgtgttaatctcaacactgtgttttgaacaggcagctattagtttacgacccacatgcataagaagcctggaatttaatcttttgtgttatccatgcaattgtaataaccttccaaataaagtacatttgtattttctccactattatatttacctattgatagcctgctgggtgtctaaatcaagaatcttctctctgaagcaaatcgaaattgctacctgtgaatttttaattttccagttccaatgcttagaagaaccaataagcatgcaatcaattttaatttaaattgaaatccacagctgtatttactgtagatggcctttcagggaaatgaatttcatataatttcttcacttatctgatcat

SEQ ID NO: 4937 - DNA, 1200 bp, mus musculus
cacgcaaatgaaacttgaattttcctatgtcaataaggagaattactgaggccagagcagttaagaccctcagagagaagtaggttctgataggttatctcaagaagtcatgaaagaggagcctctattgaaatggagagcccaagacttagaaataacagggaagtatttcccaaggagtgctgcacacagagaaaggaatgaccacagagacagagacatatgttgcagaaatttagcctgtgaggaaggaatgttatatgacctttggcattagacgtgatgctataatgtttggagatatctcttgcttgtttttcagtcttgctttcgtccatatccctcccttttggaatggttgcatattctgttctcttgtatgttggaaatatgtaggttgctttttgagcattacagaggtttagagttaagcgatttccttgagttttagaaaagaatgacatcttgagtcccaggtccctcagagactagtctacacaggtgagagtgcagactatagaagcaacacagtttctgggacaggcagaagcaacacagcttctgggacagaccctgttttggcctccagacatccaggcactttccccaccaaaggagaggtgtctgcctgggagggctctgccagagcaggtgagggagccattttgagtcctaggtccctcagagacaagtctgtgcaagtcatctcgctgactgtgaagaggcaacacatcttctgtgacaggccctgttccgggccggccttcatcttcagccaggaggcaggtcttaatgccagacctctgtgcaccttctctgcaagaggagagcttgcctgcacagagtactctgaccactgagactcaggagagatctagactcccaggtctgcagacagaggctaacagaatcataggaggaataagttccaaccagagacaattataacaactaactccagagattaccagatggcgaaaggcaaatgtaagaatcttacattcataaaccaagaccactcaccatcatcagaacccagcatgcccacctcagccagtcctggataccctaacacacctgaaaagcaagactcagatttaaaatcatatctcatgatgctggtagaggacatcaaaaaaaggcattaaaaactcacttaaagaaatacaggagaacactgctaaagaggtagaaatcctt

SEQ ID NO: 4938 - DNA, 1000 bp, mus musculus
cagtacaatcagagctcacatatgccccaaggtccctccttgcattcaaaattccaaatgtcttcaagtggacccatagaaatcagttttcaaatgcatcagaagcctgcaaggaatttgtctttccaaatgttccagagtcctctagtgatcccaagaagtccaatgaaatcaagtctttcagtccctgaaagggacctatgtccgcaagagtcccaaggtccatcaggaaaatcaagtatacaaatgcagctaggtcttgtaatggacccaggtttaccaattctgagaagcctcttaatgcattcaagtcatcagataccttcaagatcctcagtgagatctggtttccagggttctctaggacctatggtgtggtcacctagttatggtgaccaacgaatcagccttgtgactccaaggaagcaacggaaaatacgcactgtatacgccgaggaacaaaagtgtgtgctgcaaaaacattttgataagtgcacatacccaaaccgggagcaacgcatggcactggcagttttggttggtgtcacagcaaatgagatccagatctggttcaagaaccaccgggctaagtccaagtgggagagtctccagaatgttccagcagcactgccagagacaaatgaaagctctgaagctgtttcttagtcagtccattttcctgattcctcacctgttgttgcttctgccaatggagagtccatgtggtcaggcccatttggtgaggattccagtcgcaacctcaactggagccaggaatcttctctgccttataatcaggcctgtgatagtgccaggtgttgtccacaagaatacctgcttaatggccatgcccgtgttacagcttggaactctggtcaatcagtagcagttgaagtccagattggcctagcagtagctgaagctccagtcgtcatggtagcttccacacaaggtccagagtatgctgaagattcaggtccatctacagaggagctctggc

SEQ ID NO: 4939 - DNA, 1000 bp, mus musculus
gacagagtgagttaggctgaagcttggtgggaatgttgatctcagaacaaaattcaacctagctagctattgtttgtgcttacaaaggcaagctgatctctgaattcatttgccttgttaaaaaaaaaaaaatgcttgctctcttttctaagaatctaggggctaaggtcataaaatactaattcatgggataatctgaaggaaacccctggtggacaactcatttgatatgcaaataaaagactaggctttgttctgaaataggtcagctctctagagatctctggagagctatttcaagcagaacacagatctgtcaacttgtacccaatttgaattgttcttttgaggctcccaaatactcatgcctcaggacccccctctccaatctggtccttggtgtagggggcctaggttcagcccatgcatgttctttggttgatgtttagtctctgtgcaccaccataggcccaggttagatgactctgtaggccttcttattgcatccttggcccctcagactccctcagtccttgcttctactcttccaaaagactctgcacactccacctactgttttgctctggatctctgcatctgtttctaacagatgctggatgaaactcagaagacagttattctaggctcctgtctgcaagcatagcagagtgtcattaatcctgtcaggagttgacactcttgaatgggataagtcaagttgggtcagtcattgaaagaagtcccccgcccagttccaggtccccgaattgtcccagagatgcccctcaccctcacacctatttccactctctcccccagccctctctccccacacacttttctcacaactgttcccctccagatcccctctcccacccagtttctttcctctatccagctctgatgtctattgagtgagattcaagaatccttccttgggctctccttgtttcttagcttcttttggtctgttgattatagcctgtttatcatgcacttt

SEQ ID NO: 4940 - DNA, 1000 bp, mus musculus
gctattataaataagtctgctataaacatagtggaacatgtgtctttgttatattttggagcatctattgggtatatgtccagtagtggtacagttgggtcatctggtagaatgaattccaattttctcaggaacagccagatatttttctaagatagttttacaagcttggaatcccaccagctgtctaaaggaaattcaaggtcaaaaaaatggagcaaactgacagaaaggttatccagagaccacctcatccagggtctatcccatctggagacacgaacctcctccctcccctgacactatttctgatgccaagaagcacttgctgacaggagcctagtatggctttctcctgagaggctctgccatcaccttactaacagatgtagatactcacagccaggacccaaatggaatagctagggggaggtctgaaggagctgaaggggattgcaactccataggaagaacagtatcaactaactggaacacccagatctcccagggactaaaccaccaaccaaagagtatacatggaggaatccatggctccagctacatatgtagaggaaaatgctcttatctggcatcaatataaggggaggcccttggtccagagaaggcttaatgccccagcatagcgggatgtttgaacggtgaggcaggagtgggtgaatgggtggaggaataccctcatagaggcaaagggaaggggattggctgtaggctttgcaaaggtgaaatcaggaaggggaccaatgtttgagatgtaaataaataaaataaccaataaaaaatataaatttgtgtttttccataaagtattctaatcacactctgcctttcctttaattccttccttacccccataaactcctaacaagccatctctccctctctctctctctcgcacacacacacacacacacacacacacacacacacacacacacacacctcacaaacacaaaaacataacattgcaaaccaaaatata

SEQ ID NO: 4941 - DNA, 1400 bp, mus musculus
aaatattttagaaaaattcaggaaaatactacaagtatctccattgacatttgctcaaataaggaaatgctgtaataataaattaatgaaaatacaatcaactttctcttctagtctatatattttatgacaatttgtgttctttcattcagcactttactacattatattgatataccatatacatacacacacacatatatatgtatatatataaacattttacatataacatactactttgatatttgagtttagttttaaaagtaatcatatttttcttaaaaagacttttaacgttctcttttcgataattgtttcaaaattatatgaactctaacttttaaacttggcttttggtccactagatgcattaacctgtctttctccataggaccattatttggtgtgaaggatttttgtttgtttgtttgtttgttttaagtttctttttttcttttttcttagatattttctttatttacatttcaaacattatcccctttcctggtttcccctctgaaaaccccttgtcccctcccactccccctgctcaccaacccacccactcctgtttccctgtcctggcattcccctatactgggacatcccatatatggttaccaaacccagacactgttgtggatgccaacaagtgcttgctgataggagcctgatatagctgtctcctgagaggctttatcagtgcctgacaaatacagaagtagatgttcgaagccaaccattgcactgagtatagagtccccagtggaggagctgaaggggttttcagcatcataggaggaacaacaatatcaaccaatcagaccctgccctgcgcagagctcccagggactaaaccaccaaccaaaaagtatatatggaaagactcatggctgcacccgcacatgtagcagaggatggccttattggacatcaatgggaagggaggcccttcgttggtgtgaagtcttgaacatggtaattattaataaatgttttaaaccatagctgcaaattgctttaattaattgttttaataaaactatcttgaatatttatagatcacttatttacatcactgcaattgcaataccaaagttttatttaattttcaattggcaagtttgaaattaattgcttcctcaaataaacaatcatactaatatagaaaatactattacacaccaacacactaaatgttccattttattaatacatagaatttaagaatatcttaccattatttttaaatctgaaagataaaaaaatccttcactatctctaattgcagaacttgggatattactcagaatcatgaaataaattctattataaaatggcattgagtgtaaacacaaatttctatgctttcaggtctttgattttataagtgcttt

SEQ ID NO: 4942 - DNA, 1000 bp, mus musculus
gaattctttagtacatgcctttaattccagacaatgatatctaattgagaggcagacagaccaagtgataaatcagagaaagatttgacagaatgagttagagatagaatatgcccaacactaagaataaaaagtatttaagagcagtgcaaggagagggaaccaatttagacaattcagttgacagggcttgtgttgagtcagtcagttgggagtcagtatagcgagtgcagcacaatagggttgagtttgttcctgggttcatgcatttcagtgcaggtcagcagaggcagatgaagccatagaataggaagaagctagaagattcgaacaaattgacagagttagtttgtggccaagcagacctttcagtgaaggtgacaacccagaatcaatcagtcagcttgaagagaagtttgaaccagaatagctgagttgaactagtaagtcagagttcagagagagctaagagggagctttttcagcagtaagccttcaatatgacaattactgcaagtgaataaaagtctattttacagtaaagttatcattatacttaagttttagaagcaataaaagagaatacatagtattatgtaacataatctgtaggaatattcatattattcagacataagtacatgtaaagtcattgtttatcataatgattctgtaccaatagatatcatttgacaaataagttgtttacattttaaaagagaattataaaatcaaagctcaatgccaggcagtggtggtgaatgcctttaatcccaacacttgtgaggcaggggtggcagatttctgagttcgaggccagcctggtctatacaaggagttccaggacacagagaaaccctgtctcgggaaaacaaaaacaaacaaacaaacaaacaaacaaacaaaatcagagctcaattattttaatatcaactattaccaaacattactttataccatttagagtaacatttagctgatatttttattaagaaaagaa

SEQ ID NO: 4943 - DNA, 1200 bp, mus musculus
gcacagagtacctccacacaaccatgaattgcacaatatatacctagaagggggcaaatattaactgtactcataaggccaaatgattttgatagaaaatgattttaaaatctctaattattttatgctttttatgaaagacttttcaagtggaaaaatgacattttacaataaaaattagttttaagtattcctctaaagatttcttgctgtggctgcctctgtgaactggttccctgcacatgcactctgcacatcccagctcacagatcatacatgcactgcttaaatgcattatttttgtttgtttttttgagacaaggtttctctgtataactctggctgtcctggaactcactttgtagaccaggctggccttcaactcagaaatctgcctgaatctgcctcctgagtgctgggattaaagccgtgtgccaccatgcccggctttaaatgcatttttatattagtcccccaataacttgtaaggcaaatttgggagctattaattcatatttggaattggagatcatgaaaatttatgttattaacaaaaccaataaaaattaacaggaagaaaaactcatagagccttgttgagaaaatgacagcagacaagcccctcaatgttcaaagttttgtggcaatccataggaatccagggattgcgaaatgacaacaagccccaaggttttaatggattatgtgtgccacagaaacacctgaaagaatacttttcttttttatgtctgtccccactacaaagagcagagcatgagatagacctcaggaaactaaggtcccacttgccatacttcacaaacattgcattaagagtgctagggttccttcctagcactcttgacttactaagaggtacaataaatgtcttttcatacttcacatcactgtggcttcaagtatgtttatatacaataatgatgtatgccacactgtcttctaatattaattactttaaggaggctaatttcaacacatagtaatttctatttgtcaacaagatatttatctctttcatactgtactcttgccctgcaaaaaaaatagatttatatcatcttatgtctgtctatatgtggcttatacctaccaatataaatgtgatggcctatatacagcttaggcaggaaatagatggtggaacttcctggaagcagaaaggattctggaataatgcca

SEQ ID NO: 4944 - DNA, 1000 bp, mus musculus
gttggagtatctttgacttgcttttgtgggaggacttggtcctgatggtgccatgtaactttgatttctgttggtaaggttcttgcacttgcctttcaccatctggttatctccattgttagttggtcttgctgtctcttccttgagcttgtccctcctgtgggtaatataagcctgtgtcagcactcctgggagaccagctttctcctggcaataccagtgtacagagagctgtggaacagcctcacctcctgggtgcggatgatagcagaaaggaccctgcctcagctgctctgctgcctctctggcctcctggctggtcctgcctaaggccaacttaatttcttattattttatattatagctatagaggtaagatgagttgtgctactttgtgctcccaggtaatgtgcttccagctacctgcccaggaactcttttgatctgcaaatgaaagacacagacacacacacacaaagaggcagacagacagacacagagacagacacacagacagacagacagacagacagacacacacacaaatacacacacacacacacacacacacacacacactagtttatttttgaaacactttggctagttcagaggctgggcactcctaaaccttcccctgaaaccccaggcccaatctaggaagtggccagtggtcacctacccgaattctcataaagctgatttgctttctctcctgtatcacctatgtcctatccttcttcccccacccccgagtcacagattctgttctctctctttcccctgatattagctgctgacatatttattaatttatcaaaaaccaattggggattaagaccttcagtgtttggacattcggattcctgattaaatcaaagcattagaatcaattcctaacatatacttataagatcttttaataaaatttacaatggacatatcattctacactaaattttctataaagttagcatatatttagttttattattaaatg

SEQ ID NO: 4945 - DNA, 1200 bp, mus musculus
atatttataacttaagaaatgacagacttgaattcttaaattgctttctcagtaagaaatcaattatttttatgtttgctataagagggaacttttaaaatcttccattgttctttccatattttatttgcttttaatggatttttttttaaaaagcgacttattacaacagaaagaaaaatgttggcagcggcacatggaaagcaaaggaaagacttgcatctggtgaacaactgcttcgtggcactgcatgcttatccctataattttctattatttgaatattccctgatgtcttattttgtgtgatgaataagataatccctttccttgtctatgactgaacacataaacacgggctgcaataccacagtcacaaaacttggcagaaatgactggtccatcatcagtaccctaggagtgaataaagagggaaagcttgataggaagaaggctaagcttccaagtgaatttcttaacgtaaggcatgtgaaggccattttgttaatgcctgcagctagcaggccagagtgactgaaagatgacgcatgacacccaggggttactggtgtcaccagaactgcaagattcccacatttctgatctatgcctggaaaacttaagattgttacaacaattgtcttttgcgtttgagcaactttgaatcttgttttgcttcactctccaattattccattaaaactaaccagatgccccagaactcccaaggactaaaccaccaacgaaaaaatacacatggagggacccatggctccagctgcatgtgtaacagaggatgaccttatcttgcatcaatgggcaaggaggcccttggtcctgtgaaggcttgatgttccagcttaggggtatagaggaatgctagagcagtgaggtgggagtggttgggtgggtggaagagcacctcagaagcaggaagagggaggtgggatagggtgtttgcggaggagaaaccaagaagaaggataacacttgaaatataaataaataaaataaccaataaaaaataaaatctaaaagaaaataataaaatcatttcatggcaaatacctacacatagctttctttcttctgtgctaaagatgaagataaagtgtaaaaccagcgaggctttaaacggtgtcacaaggcacaaggagaaacttctcaattcagagaagagctgagcttaagaatcaagtc

SEQ ID NO: 4946 - DNA, 1000 bp, mus musculus
ttgctatgtagaatcatgacacacgtgaacttccaaaggcatgctacatttaataccattataaatttgcatgctttctaccacattgtctatattgagtctgaacaaggctgagaatgtgactagtccatttgagtcaaacagtgaaaaggatgatggcagtgctactcacataaaacatagataaatttatgtctcaagaaatttaaaaggtctgtgttgttagatgacagacacttcagaatggtgcgatggtgggggttaaaggtgcttaatgccttgaattcaattctccagacaaggtgttagaagtagagaactaactccttcaagctgtgttctgacctctgcttatattctgttttacaagagtaccagcagagacatatgcacacacacaaagagacagacgcatatgtgtgacctacacatacaatcatgcacacataaacagacaggcatactcgtgtgacacacatctacaaccatgcacaaacacagatgtgcacaaacacagatacagaggcacaacagtgacacacacacatacagatatgcacacacaaagagacacatgcacaactataacatacatatacagacatgtacacacaaaaaggcacaggtacatatgtgttgaacacacatggatatatgtgacataaaagaacttaaaacatgattacctgtaaccacagtcacttttacttatgccccagtttctgagtaatgactctgagatgtaatcattttgaataaatgcttgggccataagcttgggcttgctccctgactagctcataacttatatgacctgtttattctattctatgtgtgccacggggctgattcctgctcctcagttgcatctcctgagttctggtggcaaatttttgatcacgtggctagctccccgagtaccaatctctcaactggatgtctagttagatatccaataacaggtggtcatacctaaaacttatacattccaaaaacacca

SEQ ID NO: 4947 - DNA, 1200 bp, mus musculus
ccatcttctcccatgtccctacctgagccattctcaagtttataaccagcttttctttaattattattgtcataaacacacatgcaaataaacatataaaataactttctgagtccatttggtgtttttggaatgtataagttttaggtatgaccacctgttattggatatctaactagacatccagttgagagattggtactcggggagctagccacgtgatcaaaaatttgccaccagaactcaggagatgcaactgaggagcaggaatcagccccgtggcacacatagaatagaataaacaggtcatataagttatgagctagtcagggagcaagcccaagcttatggcccaagcatttattcaaaatgattacatctcagagtcattactcagaaactggggcataagtaaaagtgactgtggttacaggtaatcatgttttaagttcttttatgtcacatatatccatgtgtgttcaacacatatgtacctgtgcctttttgtgtgtacatgtctgtatatgtatgttatagttgtgcatgtgtctctttgtgtgtgcatatctgtatgtgtgtgtgtcactgttgtgcctctgtatctgtgtttgtgcacatctgtgtttgtgcatggttgtagatgtgtgtcacacgagtatgcctgtctgtttatgtgtgcatgattgtatgtgtaggtcacacatatgcgtctgtctctttgtgtgtgtgcatatgtctctgctggtactcttgtaaaacagaatataagcagaggtcagaacacagcttgaaggagttagttctctacttctaacaccttgtctggagaattgaattcaaggcattaagcacctttaacccccaccatcgcaccattctgaagtgtctgtcatctaacaacacagaccttttaaatttcttgagacataaatttatctatgttttatgtgagtagcactgccatcatccttttcactgtttgactcaaatggactagtcacattctcagccttgttcagactcaatatagacaatgtggtagaaagcatgcaaatttataatggtattaaatgtagcatgcctttggaagttcacgtgtgtcatgattctacatagcaactattgagacacacacacaaatgccttcatgttattttgtctgtcttttgatatttgatattaattttctttctcaacttt

SEQ ID NO: 4948 - DNA, 1200 bp, mus musculus
ttttacactttatcttcatctttagcacagaagaaagaaagctatgtgtaggtatttgccatgaaatgattttattattttcttttagattttattttttattggttattttatttatttatatttcaagtgttatccttcttcttggtttctcctccgcaaacaccctatcccacctccctcttcctgcttctgaggtgctcttccacccacccaaccactcccacctcactgctctagcattcctctatacccctaagctggaacatcaagccttcacaggaccaagggcctccttgcccattgatgcaagataaggtcatcctctgttacacatgcagctggagccatgggtccctccatgtgtattttttcgttggtggtttagtccttgggagttctggggcatctggttagttttaatggaataattggagagtgaagcaaaacaagattcaaagttgctcaaacgcaaaagacaattgttgtaacaatcttaagttttccaggcatagatcagaaatgtgggaatcttgcagttctggtgacaccagtaacccctgggtgtcatgcgtcatctttcagtcactctggcctgctagctgcaggcattaacaaaatggccttcacatgccttacgttaagaaattcacttggaagcttagccttcttcctatcaagctttccctctttattcactcctagggtactgatgatggaccagtcatttctgccaagttttgtgactgtggtattgcagcccgtgtttatgtgttcagtcatagacaaggaaagggattatcttattcatcacacaaaataagacatcagggaatattcaaataatagaaaattatagggataagcatgcagtgccacgaagcagttgttcaccagatgcaagtctttcctttgctttccatgtgccgctgccaacatttttctttctgttgtaataagtcgctttttaaaaaaaaatccattaaaagcaaataaaatatggaaagaacaatggaagattttaaaagttccctcttatagcaaacataaaaataattgatttcttactgagaaagcaatttaagaattcaagtctgtcatttcttaagttataaatattatgtgaccatttctctacaattcaattttgaaatgaaaaagcagttgatcaccgtctcacagggtttatctcaagttctg

SEQ ID NO: 4949 - DNA, 1800 bp, mus musculus
ttcagataagactattctagaaggagtaggatagtcctagacttttaagtgaaatatatcataaacaaaaagagaaatggaacgtgtcataaacaagaactttcataagccatgggttaaggcagaaagagacagcatgaacatatgtaaatggaccttgccagacttacaagaactgtagtgttgtgagagcattctaagaccaagtgaagaaaatagacaacttcagacatgtgactatgggattaataccagtccttgagttgactttttaaaagtatttaatttactgtaaattaaattatttttaaagtattgataaaagaaatacattagaatacaaagggtacaagtaatcacctagaaggaattgtagtagtcccaggtaataaaaataaataaatgtatcatgaaattgaatatcttatactcaactatgatatgattgcatatttattttaacatgcagagcgctgcctcaaaataaaggataccatctacagatttaatgtctggtgtgtctagattggaaactaagatcagaaatagccactggttaatgttttctattccctaatcaccagaggactatgttcaatacaaagtactaactccacaattggcaactgaggcagtgcaattagtcaccacaaagtcctatctgtcttccatggactccaaagtaagtgtgtgcctgatttttatggttattagatgtaacctccccctagcctgaagcagactgagccagaccttgaccttgctgccactaaggatattacctagggtggagccttcctccctagatcactctattgttcagccactgccactattccccttcaagatactgttacctgctgggaggccaaggagctatttcggagactacaccctatcctgcacatcctcacctgcagctggttccaggctccaaggatgaattggcaggaatgggcctccccccaccacctttataagtgcatttgccattaaacatttgagctttgatcaggaaccttgacttagctccatttttctctcgaccgcctaattcccctctctttcagctcccgtctgccacttgggtgtaccctgtccatgtgagccactggccggttgcaacaatctggcgccccgaacagggacctgaggaatggcagaaaaaagctggaggaacgctgcttggtatggagctccacgggaagaaaaagaaaagaatcgaatcgggttcacgttgagaataaaaggctttgcaattagatatcatcattccggtcttaagtcaaatatcatctcccctaacaggtcttactaaatcattactctaagaaattatcccacgtattattcattttgaatgtcttccccccaaaattctaagttccacatggtcaggaacatagtcaaagacttttttttttctgtacttagaaattaaatttttaacagctattcaatataagagtgaataatttcaaatggatattcaaagggaataaagttgataaaaagtttttacttctctaggtcccctagaagggaaaataaaaacagaggaaaaaaccctaatagtatctttcaatatgcttatggattcttcttgcaaagaagcctagaattatattcagagatgtcaaacttattacgtattaaacatcaatatgtatgttggcatgcagtatgggaattccttatttgtgcagttcatctcataagttccagtgtcattctttgcaattaataaatatttactactaacattgtctacttcaaatgctgagatgcatatttaaggtt

SEQ ID NO: 4950 - DNA, 1000 bp, mus musculus
agcactgtactggccagttttgtgtgtcaaattgacacgagttagtgtcgtcagagataaaggatcctcaattgagaaaatacctccataagatacagctgtaaggcattttctcaattagtgatcagtgaagaaaggctcatcccattgtgtttggtgccatccccaggctggtcatcctgtgttctataagagcaggctgaacaagccatgggaagcaacccagtaagtagcaccctccatggtctttgcatcagctcctgccttcaggttcctgccctgcttgagttcctgtcctgactttctccaccgatggacaatgatctagatatgtagctgaataaaccctttcctccccaatgtgctttttggtcgtggtattttgttgcagcaatagaaaccctaaataaggctcataccatcaaaaaaactacatgaaagtttcaacacacagctgcctggtaccctgaagtttcatccaccactcttcaccaggaagcaataaatctgctactcataagcaagacatatgtaaaagtattccaggcatctttatttataaaaccccaaagctatgtctaatatgtattaacaaatatattgtgttctagtcgaacaacatactactagccagcaacgatatttgcaactacatagtgcgtaggctacatgatcccaggtgtgagaagccttagaactgcaaactaaaccatggcatctttcatgataaattgtcgttgtcaaatacactgcatttaagttcaccagggaagcacagatctgaggaagagggtgttcccgataaagtaaaaagggaaaatacaccctggattcagatgataccatcttatagttctcaagtccacgactgagcaaaatggagggagcaatctaggcacaggcttttgcctttctacttgcttgcagtggctgcaatgtgaccagctgcttcctgttgctgtttaccacaattagaaccatgctcttggcattgccttcc

SEQ ID NO: 4951 - DNA, 1000 bp, mus musculus
gtcctatccagtgtaagccaaagatgacttcatagtcacggctgagacttgagacaaggcattgttttacaggttcctggtttggggctgcccaactgcaactttcagtcatgttcctttttcaatgtccaagtggcagtcctccaaaaggaagtttacctgccatcaggcatgccgccagcctttccaaagctctttccttcggccctacgtccagatgaagctgccctgtcatctattttagcctcttcgttggaggcacttggagaacagggaatttctcatagcaatcgcttgatccccaggggcccgtgctatctacaaggaggctgaatcacaggcttctgggttgagagaccttgaacaacactgtgaccttcccaacacccgcacggccactcacaagacaaattcgcaaatgctgtaggtgctattacactttaaatctctctctcaattccttccctcgggaacagttccctaaataacaccggctcagagtctaaatggaacaactttgttaagacactttttgctctccctggcttttactgaagtaaaatcgggaagaatgttctttgttatagtgattttcttacaatattttaaatgttacctatgctttgaggagttcatacacttgtacactaagttgtggtcataactcctccctcctcacccctcatccaaatcctaccaatcactgcctacttcacctctcaacttcataccctcttttcatttctcccctgtgtaacctactgagtccagttattgctgcctgtatgtgcatggaaataagatagtttactggaacatagaccacctacaagaggacacaatgactgccagaggacagagaattaggtttggaaggacattgctaaccataaatttccatcttgggttggagaggtggctcagcggttaaaagcactgactgctcttcctgaggtcctcagttcaattcccagcaaccacatggtggctcacaaccatc

SEQ ID NO: 4952 - DNA, 1200 bp, mus musculus
tattattaagtgttattaaagtaaactggaggcaaagcatgtaataaaattgtccctgtggcaacaactgaggtatgagtacagttccacagtgcttatgtcatgtttaactgtgaaagcacctatattaacatggaaaatgctctagtgaggtttttcaatcagcgacggatatgtttgatatggcattcagtttttaattgcatagcatatttcatagaaggtattgaaatcgtatactataattctgtgtattaattactaggtgtcaaagctacaataaacggaaggaaggaaggaaggaaggaaggaaggaaggaaggaaggaaggaaggaaggaaggggaagagagagaatattttactcattgaggctacaagaaaaagcttactgggcaatggtcctatcaaggacatattgatgaaaactagattttcaaattgccagtcacccttggcagcccaggtttcaagttctattccgatcagctccgacctgttctcatccatgatgagggagagagagcacctgccagtctgactttcatgttttcatatcagaacaatcagagatcggctagtgatgtgcaaatctggaggaaatcatggtgtctaaataacagagaagacacagaagaggaaactaccctggggtggtgatatcacatgtgatattcagtaacaggctcagcatggccagagaagagttgggcttcagaaaccctacctgtcctaagggctccaggtgctctgaagctgcatgcaggtatctgagttagttcttgactgtattcgttggctggacactttttcctaaatgtgattatcacgacaggtgtgagggttacaaaggaaagtaatcaacataaaagtagatgacttaagcacaatggcgttttctgattctagaaacatagctcaatggcacagtaacttgtcttcatgaggcttggagttcaacacctagtgccataaataaataaataaataaataaataaataaataaataaataaataaagtggtgaatgtctttttcttttcattacacaatgtgaaggaaaaataatcccatatgtaagagataaattctgacatcagcttataaaactatatgtacccaattggattaattgctagactcagtaaatactcactgggtacgtatagttgagcacgcagctagacagccaattttcaca

SEQ ID NO: 4953 - DNA, 1000 bp, mus musculus
aggctgaaagaagcactgctgcttagaggggagatagccaaagaagcaaatgcaagacggcagcatgcgcactgggcctcgtaactgatgaagtaaagtcttagagagcacactcagtaacacaacagccctttgtatctctacacgctgtctggagctgtggaacggggatgaggtggaggagaatcagcctgacagcctccctagctctgtctcttcagtctgttgtttaaaacacagctttctccatatgaccataaaattttctcatgtataatttagtattttacatggtttcatggtaagcagaaatgggtactatatgcttagtagcactgcagtaaacacattgggtttaatataagtgaatagtccgtctctcaaaatacttttaagatgataagctaaaataacactaggatttatctcacaactcagaattttatccacataaggcagtatttccttattatctctttcatgtgtgatataaccagaaccggtattttctctttattatgaactacatgaaaacatttgttaagtaataaaacatcagccaatcactgacttaacttcactatcagtcagtctcataaaaagccaaaaaattccctgaacttatgctgggtggcctatatcatttaataattcaattaggatataaaccaaacgttttacagatgcaaagaatattgagactatttaaggatccgagaacatgtcataaatcttaattactccagaagtgatggtgggaagcatcatcctttaactggacaatagactccatccccacaccctcagtgggcaagagtgctgctggagagtaactgcgtcgctgcccgccacgctgcccgagatgctgcctgggcagcagaaactgctcaggaggctgtctcgggctccatcagcctgagcagctacataatgtctgctcagactgcttttgaactatgtgtatgtcaaaaataagtaagaggtaaaatcgaatgaaacg

SEQ ID NO: 4954 - DNA, 1000 bp, mus musculus
agagaccagcatcactgaggcaacatcttctggtaagtgtttcctgagcgtcatcacacagaatctctggtgacagcacagcctcaatggtagttgaaggcccaggactgaaggggtcgtgcagagaagtcgaggcttggcaccatgaggagagcctctgagaggctattggtgaaggtgcagcccagttgcagaagaccctgtcattttggagatgccagtactaggggatggccaccaagaacggcagcagcagtggaatgaagccagctggagcctagaagaaagctgcgtgtgctatagagggaagagtgacccaagctctctggaggggtccagaaaatggtgagtgaatcccagacgttgaatggtgaggtacttataatgttggagtttggttttgcgttgttcaaaaccatgccctggttcttccctctcgaaatgagaaggcactttaatttaattttgatttttataggagccacagctgaattgcttggaatatttaaaagagatttggggattttttttaaaaaagagattggatattttcaaaagacttgagttttaatgtattggagtttgtaagaactatgggactttaaaaagttatttatatttataatgcgatatcactattcacgtgccatcttgagataaatgagaagggaaaggttctcattgaaaagtgaaggatttgggtgtcatgttgacaaggggtccactgtcttggctcattttatattgatgtgacacaagataagagtcatcagagaggagggagtctctgctgagaaaatctctccataagattgggctgtgggcaagcccgtggggctttggaaatgcgttgctccaggctcttccagctttcaaagtttccattgagaaatgagctcttaatctgaggagttttcctttgtatgtgacttgcattcttttcttacagctttcaatacactttcattgctttgcatgcataatgttttaaccacgatat

SEQ ID NO: 4955 - DNA, 1200 bp, mus musculus
tagagtcagaatgcacacagcagaatatgcttgtgtttggcttctctcatccagcatgttttgagttgtattcatgttatcttgtattgcagccagctgtggaatgtgctacctcgaggcaggtggccatagatgctggtaagaacatgaggtgagcaaaacatgaggagtaagctagtcagcagatctcctcctggtcctgccttcaggccctgccctgctttcctcatgatggatcataactgtatgctgggtggtagagtctatctcagcagaagccagggaaaacagttaggtttagtgctgttgctctagaaccctccaggcactttgtgaatctcttcccctcaagcttggcgcttggctctccagaactcccattctttattgcctacttggtttcattaaggcatgcccaccagggagaggcctctttctatcgtggccactggctagtctgtttgacttgtggtgagacaaaacagacaggtgtttctgccactcttctggtcttgccttgacatctcataaggtatctgatgtcatcatcttcttaggagtctccaacagaggcccttggagaggagctagcatgtttgtgaagaccccctccccccatcttgtgtttgaaacttccagttcaaattgttatgctttggtcatacataagaatttgttcgccttctggttggcgccagcgctggtccaccttgggcccgaactcagcggacagtcccacggtctctagaggactgtccacctcacaggtgccctagcacacccaggatcttagggtcactggcgagtggaacgcaacatctgttctaatagaactgggggtgcctggggccagctggagcacagacacaggaatcccgcccaaccagtggctcaggttccttctggtcggcgccagtctacttggttttgaactcagcagacagccccatggtccccagaggaggtaccacttccagctgctctaacacgcccaggatcaccaggatctcagggtctcagaggaagcttgaccaccaagaactctgacagatccaaaatctcagcatcacagggtcccagaatcacaggatcacaaagaaagctggactccgaggagttatgactcaactgggattacaggaaggacaggctccaatcagatatatcgaggccagggagcacttgagataatcagatggc

SEQ ID NO: 4956 - DNA, 1200 bp, mus musculus
gtttgtgtgtataacttcatggaaagggaaagaaataagaaaaaagaggaggagagggaggaaggggaaggagagagagcaagagggttggtacattagttcacacaaagataatcacaattcaaagatgtttagtgaatgcccttctttaaagcacctccatcttttttaaataacattttaaaaaatgtgtttggctatttgcctacacatgtctgtgcatatatgcagtgaccactgaggtgggaagagggcgttgggtcccctggaactggaattccccacagtactatgccaccatgtgggttctgggaacagaacatggatcctttggaagagcagccagtattcttaagcatggtgccatcttgcctggcccggacactcacatcttaaaatgaagcagcattcccccttaacttaaaggaatgagtcagatcctgcagagccaggctctgaggattatccagtgcctagcaggctacaggctaaaggatgggaagtcagacagttaagagtgatcagtgggctgcggggcaggggagagagcacgcttgcctagcaagtgaggcctgggttccaaccaaacactaaaacaaagaaagacagatccacactgctttgtcaacctccatgcctctagatactcatgcaaagccccatgcaggcaagcatggaagtatgggatctggctgtgggcaaagctgggctacctatggaagaggatgaggatggtcaggaattaggcagagacttctcctgtgcttattctcttagtggtaaatgtcagaggacgtttagaaattcaagttgtggaataccaggctcagtgtggagcccagctagatgggttggcttactccctgagcacaggcgggggtgacccaggctgagggtgcaggtgctttcttaatgccatgatggggcggttgatgggtacctccttgtggagagcaaacagcagaaggcaggggctctctgtgccctttagtacggttgttttacatctggggccatgtcaccaggcaacaatttgacacctaggcggatcttgtccaaaggcaggcatggcagtgttactgataatggctaggaagaagacacaaccttccttaactctttgtcttttgggaataattttcatagcaatgtaaatagtcacatatgcctgtatatgcttttggtctttgttcaaaatgt

SEQ ID NO: 4957 - DNA, 1200 bp, mus musculus
cctgctcactaccccctcccacaatccttcccccatttccctctccttctcctctgagcaggtgggagtcccctttgtctctccccacccaggtccttcaaatctctgtgagactaggcacttctcctactgagaccagaccattccacatgcaggcaacagctttgcggatagcccctttccagttgttcctaacccacacgaagaccaagctatacatctgttatatatgtgcagtgaggcctaggtagtctgtatatgttctttggttggtggatccgtctctgagagccccaagggtccaggttagttgattctgttggtcttgctatggagtccctatcctcttaggagctgcaatccttcctcctattctttcataagagttcccaagctctaaccactgtggaactatggatgttggcaactgagtcaattggtcagtggagcctctcagaggacagccatgtctgcaagcataacagagtatcattaatactgtcagggattggtacttgcccatgggatgggtctcaagttgggctggttattgattggccgttctctcagtctctgctccatcccccgttcctgcatttcatgtagttagaataagttttgggttgaaagtattgtgggtggcttagtgtccctatccctccaccacagttcctgcctggctgcaggaggcagcctcgctaggctccatatcaccagtgctgcgagtcacatctaaggacacccccactgattcttgggtgcctccccaatcccaagtttccatctcatcctggagatgcccattaccttccccccatcagttgcatatttacattcattctcatggccatctggccatcccacagcccctatccctctccatacctaaccccaaactgacctcagcttccctcctgatcccccttccacccaggtccctccctccatctgtctcctgtgaccattccacatgccattcccccttccaaatgagactcaaacatccttgcttgtgccctttttcctgtccaatttccttgggtctgtggagtgtagcatggccatcctgtatcttatggctaatgtccacgtataagtgaataaatactatgcatgtccttttgggactatgttacctcatttaggatgacattccaaaaatctatccatttgcctgcaatattcatgatgcctttgttt

SEQ ID NO: 4958 - DNA, 1800 bp, mus musculus
ctttgtgtgaccccttcatgccttcaaaaccagtaccacctgggtgacccttacatattaccaagtcccgctgcagcaggagtacaaccttggccatctctggaacacagcctctttgtgctttcagaaaacacttcccagaagatgtcacctcaatgatgctggtcttttcttaatcaccgctaatttcttagctccagctaaccagcatcaatagtcccagtaatgtaaagtttttgctttagtagttctggtatcttgttaatcacagctgattctttagccccagctaaccagaactacagaatcttcacaatcaaaacagcaatggccctgaaaagagtctttaattttccctccgaaatttcacaaaccagacctccatcttctgcagtgttctcaacattatctcccaagctcctacacaacatccgacagagctcttaacaacgaatggatcttcaagcccaaagttccaaagtccttccacagtcctccccaaaacagggtcaggttgtcacaagaataccccactatgctggtaccaatttctgtattagtcagggttctctagagtcacagaacttatggatagtctctagatagtaaaggaatttattgatgacttacaatcggcagcccaattcccaacaatggttcagtctcagctgtgaatggaagtccaaggatctagcagttactcagtctcacgcagcaagcaggcaaaggagcaagagcaagagctagactcccttcttccaatgtccttatattgtctccagcagaaggtgtagctcttagaccatagtgagacaggttagttttaccctactgatgatgtgttgttgccatggtaatcctgctcagtacgagaggaaccaaaggttcagacatttggtgtatgtgcttggctgaggagccaatggggcgaagctactatctgtgggattatgactgaacgcctctaagtcagaatcctgcccaggcggaacgatacggcagcgccgaaggagcctcggttggccccggatagccatccaaccgaggatgggaatatggaggcttgcgtgcagctggaaagaggaaacaggtcacattccaagcaggaagtttctagtaagtccttaaaggcaatgcaagccttctgaatggtcaaaacctaaacagagatagttatcacaaccaagctgtgatttggagcaagccgatgaaccatgtgaggtcagccaggagatccgaggcccaggcttctgtctcccatggtgtctgtcttagtcatggtttctattcctgcacaaaacatcatgactaagatgccaagagatgaagccaactgaagcactcatcaactgataagtgaattttaaaaaaaatgtagtttaggatgatagttcaggtgataaagtgctcaccccagaacccacataaaaaagttgtgtgtggtgagagcacatgtgatcttggagctggggcagagacgggcgcatctctgggacttctactgaccagtcagcctaagaagtaagctcagacaatggaagaaactgccttaagaatcaagatgatggcatttgaggaatggcatctgaggttcactgttaggagcgggtgtggcggcagtcccaaaggcgccagggactgtagctaagtcgtatgacttgcacctgacttcctcatataagccacaaacatcttgagagctgcgcaggtgcaccaggataccggtgaatccagtttgatggagatatgccccttctgccctgattagctgaagctgcgtgcctggtgaggcggcgtggc

SEQ ID NO: 4959 - DNA, 1400 bp, mus musculus
cactacccaattctttctatgaagccacagtgacatatgatacctaaaccacataaagacccaacaaagaaagagaacttcagaccaatttcccatatgaatatcgactcaaaatttttcagtaaaatttttgcaaactgaatccaagaacacatcaaaacaatcatccatcatgttcaagtaggcttcaccccaggggagcagggttggttcaatatactgaaatccatcaatgtaatccaatataaaacaaactcaaagaaaaaaactacatgataatctcattaggcgtcaaaaaacatttgacaaaataccaacacccattcatgttaaaagtattggagagatcaagaattcaaggtgcatacctaaatataataaaggaagaacagggacaaaaaaaatggaacatagactgaaggaagagccaactggggaatagcctcacctggggatacatcatgtctgcagacacctaacccaatactgttgccgtggtcaagaggtgcttgtggacaggaactaagaattgcagctcctgaggaggtccggccagcaactgaccaaagcagatgtggttgtttggagccaaccatcaggctgagctcagggaacttgttgggggagctgcagaaggacaagaggagcagaggggaattgcaaccccattggaagaacaacataggctggctgaaccacccagttctcccagagactagacctccaaccaagggttgtacctaaagggatctttggctccagatacatatgtagcagaggatgggccttgcccaagagcaacgggagtggaggcccttggttccggggaggttttatgtcccagaagggatatgctggagcagtggggcaggagagtatgggtgggtgggggagcactctcatacagacaagaggagaggggagggtagatgtgggatgggggttggtggaggaggtgaccgtgaagtaagatatcatttgagatgtaaacgaatggaatggttaataataataaaataaaaataaaaataaagttcatgaagaaataatggatcccctttcttaattgaatccagcaaaagaaattgaggaagacacctgatgctatgttagcctctggccttcacatgcacctgcacttttacatatatgtgaacactcacagaaacacacacaatacagagacttaaaataatattcacatttaaaatatttgtatttatattttctttaccagcaaccgagacagagagagagagagagagggagagagagagagggagagagagagagggagagagagagagagagagagagagagagagagagagagagagagaggagagagagatatgtttactccttctactgtttgtgaagcttcccacaaattgacctcc

SEQ ID NO: 4960 - DNA, 1000 bp, mus musculus
tagaaccacagtggtttatacacatctaggcatgtgtgtgaagtttctagagtagaaactgagtgtggagagccgtgcagctagcaatcgcaagccgcgagcaaccaccattataagatggcgctggcctccgctgtgcctaactagtaaacaagccttgtacgcaagtgcaagagtgaattcacacccagtcactgcccatctcggggcgtagcagtggggtaatgggcgagcaacaaatcaggagctgacacgccatatcaggtgctgaaacgccatggctgagggctatataagcgactccattttctggggtcggggtcttcctgagaagtaagcaaagttctgctgcagaagattctggttgtcctgagtgtgttcttgccggtggggacaaaagctcgggataggtggtgccaaaatccgggaactaccatcacaccggtgcaagggagataccccccttaacggggcggaaccagaactgcgggacatgtaaggctctgcaaggtacatacagtcttgaaatttctccagagttagacgcccttttcattgtttgcactgcgattgtactttccctttcggtttcattttgcttccacccctggaactgctgactggttcccagtcgcagtcaggcctggacagcgcctggacagcgaccagttttagtcgcggtcaggcctggacagcagcagtatgggaatctcccactctgtagaaacggcctgaaaatcgccactaagactatagagggatttgtcagggagatagaccatgtggcaccatggtataacctgcctcataagtcatcaacacttcttaggggtacatactgtctatgcttggcttatctaacttgtattagggactactttcagtatacatacaagtgttcatgcatcagaagccagtttcctttaacagtacgttcaattttggtgagctaataaacacttcaacttaaataatggcattgttaaggatcaaattccac

SEQ ID NO: 4961 - DNA, 1000 bp, mus musculus
ctcccccgaaatctggctatctatgctcaagaattatttaacattgatggctggcctcttttgtagagtttgccctaggtcatttagtagttactgtcacatagcactgcagtatccagggacgggcaactttcctcatgcacagatcaacctaagacacggggcctggtggggcctggtggcgatagggttaccctatgacaggaaaggctgtgacattggaggaatgacctaagacaagagccacagcagatgggcataattacacagacctagtccagcctcattttaataaaataaaaagggggagatgtggagagccgtgcctcgagcaatcgcgagccacgagcaatcaccattataagatggcgctggcctccgctgtgcctaactagtaaacaagccttgtaagcaagtgcaagagtgaattcacggccagtcactgcccatcttggggcgtagtagtggggtgatgggcgagcaacaaatcaggagctgacacgccatatcaggtgctgaaacgccatggctgagggctatataagtgactccattttctggggttggggtcttcctgagaagtaagcaataaaagttttgccacagaagattctggttgtcctgagtgtgttcttgctggcagggacaaaagctcgggataactgaggtggaaatattcatgttaattttatttggcattatttgatggtctgaagcatgggactgggtaagaaaaagaaagtgatctgaccagcaacagtcctctctctctctctctctctctctctctctctctctctctctctctctctgcttccctactgtgcatatgttgcgagcaaccgaataatgttcctgctgccatatgttccctggtatgatggactgctatcttgaaattggagccaatttttctttaagttattttttattagatattttattgcagtaatcaataaaaattttatttgttgttctaatgaattttaaaacagcaaat

SEQ ID NO: 4962 - DNA, 1000 bp, mus musculus
ttaccaccatatactaaacagttcttattaatgttctgattagttgtgcctcaaatctttatcatgttttgacatttaatgatgtttattattttgcatttaggttacttctttctcatatattgcatgccaacaataatttcacctccatcttctcctcccataccttacctgtctcttctttatcccagatccactcatctatttcacttcagaaaactgcaggcctcccaaagaaatcaaccaatcatggcatatcaagttgtaatgagactaggctcctccttttttggtaaagcaagaagagttaacccattaggagaaaagaaaccccaaagcaggcaatggagtcagagacaaccttgttttccactatgagaagtctcatataaagacaaagctacacaaccataacatatatggagaggacctagattatagactctctgatcattggttcaatgtctttgagcccctatgggcccaggtgagttgattctatgggttttcttgtggtgtccttgattcctctggctcctacaacccttcttcccgctattctacaggattcaatgaactccccctaatgagtggctttgggtctatgcatctgcagttgctggatgaatcctttctgaggattttcatattaggctctggctaacaaaatagagcagattagtattactatcagtaattgttacattgacttttctttggcagttgtgtttggttctatgataggtgtctgggctactcagcctctggttctcagtactccaggaagtgtcaggagttagcttattcttgtagcatgggtctcaagctgacccagtcattggttggccactcccacatggtctttgaaataaaatgatggtagcaaataatagattactttctgaaaaccttgggttcacttaaatacaaaatgtagtctatctagaatttttatataaaatatgaaagtaattcaatttgctttcaagcccacataatt

SEQ ID NO: 4963 - DNA, 1200 bp, mus musculus
actcttgatctctttcctaggttttccttctccagggttctgcacctttgtgatttctttattgtttctatttccatttaaagatcctgtaccacttgttaatttccttctcctgtttgattgtgttttcctatatatctttaggagatttctgtttcctctttaagagcttctgttttcctgtgttctcaggtatttcattaaggttgttacctatgtaacaacctccttatgattctctgccatcttcctaggtcagaatcttgctttccaggtatgttggggtgttcaggccttgctgtggtggaagaactgcgttctgatgatgccaagtttctgttgtttatgttcttgtgcttgcctctcaccatctggttatctttgctgttacctggccttactgtctctgattagtttttctctcctgtaagtctagttatgatgggcctccttgggtcaggctgtccctggatatggaagggggtctggagtacctgatctgtgagcatagttgtgacagatctcctgtgagaccacttgtgtcataattcctgggagtcaaggtgtctctgggtgggggtgggggtgggggtggagctgagggctggagcacacaatctgatcccaggtacaattgtagacagaaaagatgtattttcagcaggccaggaaattatgtgttctctgtgccctgggggttcccagttaggccaggtattggtgcagtgggttacaactgtgagtttgatggtgtcagagcttctggggttaaagctttccctgggtgtggaaagggtttggaggtgctggaacacaggacctgctaataggcacagttgtggacaggaaggaagatgtgtctgtccttaagtcttattcctggaattttggcgaaatattaatatagcaataaaatccttgacaatatttgctttgctgtgctgtgaaattcatatatttatttttcaatagtgaatggaactcagccactaaatattttgttgtttataaatgtttttatggtaatttattctttgaccactttgaatgatagactcattttgaaaacgtctttgtggcttcctgattctcctgaaattcccttgggatctgcaaataatttttagttaatttagtaaaatttcttgttcttctagatgcattgggttaccatcttatcagtatgaaattcatgagcca

SEQ ID NO: 4964 - DNA, 1400 bp, mus musculus
catcccatttaacatttgtatgaataagagctactgaattttttaaagtcaattttctatccaggactttgaaggtgtttattggttgcaggagttctttagtaaaatttataggtttgattatgaatactatatcacctacacatagcaacactttgacttcttctccaatttgtaaccccttggcccccttattcgtcttattgctctagctagaacttcaaggactatagtaatcccttccgtgattcctacccacagggtaaacagaaactgtaatacctaccccctctagccagacaggacttcagttgaggaaagggaaaatgaaccaatctacaaaccttcaacccaaatttaacctgactacaagatgtgcagaggaaaaagacaggtcagagactgaggtaacagtcaactaatggctgttacaacttgagacatatcccatgtgagagggccacctctgacactattaatgatactctgttatgcttgcaggcaggaacctagcatgctcttctgagatgcttcatcttgaggctgatgaaaacagatacagagactgacagcaaacattaggcagagggatggagtcttgtggaagagtaggggatagaattgagtaaaccaaagacataagaagacctactgagtcaaataatctgggttcaggatggctaacagcgattcaaccagcagccaaaaacgcaagcgggtgttggtcgtagagcccttaaacatttatagcagatgtgcagcttggtcttcatgtgggtcccttaacaactggagcagtggagtctctgcctctgttgcctgccattagatccacaccactacctggaatgactggatgagtctcatttgaatagggtatgcctagtcctgctggtaatagctatcactggatggggtggtgcccaatgggatctatccctactctgaggagaaggggagggagtaatgggggaggaatctctaaggatgggactgggaagagaggagggagtgagcactgactgagatgtaaagtgaatgaaaaataaataattgggaagaaaaaaatgaaaaaaagaaaaaaagacttgctgtgatcatatttctttattgatggaaactgtatgacaatttatttcactataatctgtcatttatttatttatatattcatttatttatttatgtcaatttccctttaaaaaagtgacactcagagttcagtatactgctagttgagagtttgactagaagactggcacagaatacaaaggtaatgattctgcattctgttctctttacttgtgttcatgaaaggcaaatgcacatggttttagtgatatatcagagcgcaaatatgtggtttgttttttaacattgtatttaaatgtcattaagac

SEQ ID NO: 4965 - DNA, 1600 bp, mus musculus
cagtttcagggtgtttgtttgtttgtttcctgaactctattgcctaatctgtcaagcctaaaatttcaggaattttgtttggccttcctaaagaaagtgatatagtataatggagattccttttaatatgggaatggatctcaaagttattcattattatatttaatttcatattgtgaccacttccacactaatgttaatgcttcctcacatgcaacttgcaatttagttaatgactccagtatttaatttctttcatctgctaagtgtgtctctgagtgtaatatgacttttccttagatttctgaagccatccctgaagtttatgtgaagcacaaaatttatccattttgacatgtgcacttttgacatgtgtacctctaaaatgtaaaatttgatgccataaaagagagtctgaagtaaaaaagtctcaatgtaaaagtaaataaataaaaaggtctcattgttaataattgaagagtaacatgcagatttcttttttctctttctttaatttattatttaattaagtttatatcctgattggagctcctcttccctcctcttctcccatgcctttcctctcctttcctcttcccctatgacccctgctacctttcacctcagtaaaggggagacttccatggatatcaacttccctaggcatatcaagttgtagtaggactgggtgcttcttctattgagattagaaaaggccattcagacaagagaaagggatttaaaggcaggcaacagatttaaaaacagtccttgctcctgctgttagaggtcttatatgaggatcaacctatacagctgttacatatgtgtagggggtctaggttgccccatgcctactctttggtgggtggttcagtctctgtgaggcactatgagctcaagttaattgattctgtaggctttcatgtggtgtcctgatctaggtttttcaagctttcctccccctccctaacttccacaagattccttgagttctgcttaatatttggctgtgcatctctgcatctgctttcatagctgattcatgaagccattcaaatgattgttatcctagcctcctgttgacaagcatatcacaatattatttaatagtgtcaggggtggactttatctcatcgcatgggactcaagttgggccaatcactggttggttattaactcaatttctgctccattgtttgtgtgagagtaaacaattataatcactttggaaataaatttggtggtttctcagaaagttggaaattgttctacttcaagacatacccatatcactcttagatatatgcccaaaaagtggacaaccataccacaagaatccttgcttgactatattcatagtatttgtaatagtcaatgacaaagaacaacctagatgtgccttaactaaagagtgatattgaaaagatgatatatttaatcaatggatattatttagctattgaaaattctgacatcataaaatctgtacgccaatggatggaactataaaagatcatcctaaatgaagtaactgagacccagaaagaaaaccatgatatgtaatcatttataagtacagaaatatatggatattagc

SEQ ID NO: 4966 - DNA, 1400 bp, mus musculus
cattgatttcatttacatgctattttctccagaaataaatagataaatcaaataatcgaatgtaccaatccctgttgcgcaatagcaaagaattcagctggttgattgccctctaggccaccaaaacaatcaaaatactatctaaaactagcattaaaagaaaaatcacatttgctaaaaatgtagggcttataaatatgttttagtttgaggtggggttttttcattatatttaatctttaagaatggaaatatctgctactatgtggctgaaagtgtaatagtaaattaatattagcaaaattggaattgcccattaatttatagacttaaccatttataggcttaaccattcagcatagaaattgggctctgtctaaagccatctgggctactgagggagagaggaatggcatggggaactatgggaagggggtgtatgcagctgctgagaacctgcttctacttcaccctgattggtaaataaagatgttagcacacaatagctggggagggagacaggcaggatttcatgattcctgggcttggaaccagaatgagaaagaggagaagaaaaggatccactatgcctgggaattgtggaggagagctgagatgccagagaagagtgcaggagagaagcatggatggcatatgaaggagccaggaaagcacaacccagttggtgagccctctaggtccagaacaactgagatggaacacagcattagtaagtaataactttgggttaacttcgtggtagttaggctgttgaccagctattgtgctgtttaagacaaatttaaatataaaggctgcttgtttctttcatttcaaagcatatactattggggcaggtagtgaacccactgccaagatttcatagtaagaatataacttcttcttctcagcacctaatagtgcctcttccaaaactgaccatatagtcagtcacaaagcaaaactcaacagaaacaagaaaatcgaagtaacacattgtatctcatcagttcaccgtggactggagtagagttcaacaatagaaacaccagaaaccctacacactcatggaaactgaacagctctctactcaatgaactctggggcaaggaagaaagacagaaaggcattaaagactttctagaattcaatgaaaatgaaggcttaatatacccaaatttctggaataatatgaaagtggtgctaagaagatagttcatagcacaaaatgtctcaataaaaaatttagaaagttctcataccagcacacctttaaaagtacacctgtaaggtctagaaaaaagaaagaaagaagcaaacctatcaaagaggagtagaaagcaggaaacattcaaaatgagggctgaaatcaattagttagaaacaaaaaatacaataaa

SEQ ID NO: 4967 - DNA, 1200 bp, mus musculus
aaaagggaaaactacaccatagaaaaagcaagaaagtaatcttctttaaataaacccaaaagaagatagccacacaagcataattccacctgtaacaacaaaaataacagaagacaacactcacttttccataatatctcttgacatcaatgaactcaattccccagtaaagagacagagactaatggaatagatacataaacaggacacagaattttgtcctgtttaggtgcatacaggaaatgcacctaagtgacaaaaatagatactaccacagagtaaatgactggaaaaatattttctaagcaaacggtctcaagaaacaagctgaagtagtcattctaattttgaataaaattgactttcaaccaaatgtgaccaaataaataaggaaggacacttcatactagtcaaaggaagaaaatataccaagatgaactctcctttctactggggcagactcttggctggtctgcttcagtgaagacaccatatcctgaactatcctagagaactcactgcactcagagaagttgaggatccactgcactcagtgtagctgaggatcagctggactcaaggcagttggacaacagattgattgctccactgaagtcctgaaagtctgaagacctctcaggagatctactacagcaggggcaatatatcagcaacttctctgcccctgtgaagaacccccagttggaaggccctagaggtggtctgctacatccaaggctgcaggcctatcagaagacctgaagcaacccaaggacaaaagaagcagactccagagagtcacccagaccaacaaacattaaggacatccggatggcaaaaggcaatcacaagactataagcaacagaagccaatatacttgggtattatcagaaactacttcttccaccagagcaagccctaaatacaacaacacacctgaaaatctggaagctgaactaaaatcctatctcataacagagtcctttaagaaggatttaaataactcactaaaagaaatacaagaaaatagaggtaaacaggtgacaggattgaaataagcaatccaagaccaaaaagtagaagtagaaacaaaaaagaaaacacaaatggaggaaaatctggaaatgaaaaacctaggaaagaggtcaggaattacagctgtaagtatcaccaacagaatacaagagatagaagagaga

SEQ ID NO: 4968 - DNA, 1200 bp, mus musculus
aaaaatgctaccacattttcctaaaggtacagagataatatgtgcatggttgacttcaaggcacacaaataaaatatacacaaggtaatacattaccttagatttacatctcaaaatagaaaatacatttgtctctttaagtaaagttagatgacttgaggttgtaatgccacccctcccaaagaataaaaggcaatctagcaaaaaccccaatgctaagcacaggaaacctgtcctcaagttgttgggcaggaaggatcccaagagactttcaaaaccacttaggatattgcttttgcccttggttgccttcaagcgcttgaaggtaagactctattaatgaagacacttgagacacagagcttgggaggcttggagagcttggaggacttgcaggacttggaggacttgagccacaatcctctcccttgaggactagttctcgtagtatccaaacgtgacgtgtaaggtgacgaggagaaaagcacacatctcagctatgaagcctgcaaaacaccacagtgaccagcctttcaagacacccccaaaggtgggacagtgacacatattttgggggtaagtgacatctgtcttattgtctttgttgtagttgctaacttgacacaagctagagtcatctgaaaagaggaatataaattgaaaaaataaatgcctcctaaacattggtctgaaggtaaccttgtatgggattgtcttagttagtgattggcatggtagggtccagcctactgtggctggtgtcaccctgagcaagccatagggagaaactggtagtagacagtgttgctccatgacttctgcttcagttcctgcctctgcactcctaacttgagttccttcctgacttcctttgaagatggaactagaagatgaaataaactctttcctcctcaaattattttggtaaagcacagggatagaaactctaactaagacaccaagtagactcaagttctgctcaatatgagagaattcatccttatattgtaaatgtagcaaacttaaccatggctgaggaggtcatggaccctcaaggagaatctgctaatgccattttcctaaaccactatgagttctaataccataagcaaggtctaaatatttgctcgtatatacagagaagtgtagctctcaccattcatcaagtatgcttcttttaacagcagatatagattacta

SEQ ID NO: 4969 - DNA, 1000 bp, mus musculus
aaaaaaaaaaaaaaaaacaaagcaaaacaaaacaaaactactctctgtgtgtatgtacatgtataaatacaaatacttcatttccataggagagtgtgagcgcccgactcgccagcaaagcagacgccacaacaggatccttctacacacgtttattgggaaagcttgattgcagaggtgaaaagaccccgagcccagaactggtgctgcttatataggcctaggagaggcatgtctcacaaccggattcattatgcatttactacctcatttacatatctacatccgattggttatgctctcagaacctcacagaacctcattaacatgcctcatttacatatctacacctgattggttatgctctcagtacctcacagagcctcattaacatgcccgggccaggcagtgactcggcaaaaaactttactgcacattggttgtttacccaaacttatatgtggtggccagcggtagccagcgccaccttgtaatggcatatgtggcttcccacatctccccctttttgttttaataaaatgaagctggactaggcctgtgcaattatgtccatctgccgtggctcctgttttaggtcgttcctctagtgtcacagccttacccgtcatagggtaaccctatcgccacaggggcctcgtgtcttaggttggtctgtgcatgaggaaagttgcccgtctatggaaaccacagcactgtgtgacggtaactgctaactggcctagggtgaactctacaaaggaggccagccaagttttagataaacaaacttgaggggaggagccgttttcaatggctaagagtgcctgagttataatcaccttgtcacgttttttgtggggttctgaatttgcaaaccaaccaaagcatgaacaccagtccacagcatatggcagcaccaaacaaaatcactcccacccattccttaaagtaagaaaatgcagaggtaagccaaaaggtaagcaatgcctcagatgttttt

SEQ ID NO: 4970 - DNA, 1000 bp, mus musculus
ttgtgatacttgcctgcctttgcccctgttgagcatcttccgacctcaggagcctcctacatctttggcgttttacagccccttattgagatttgaaagagctcttagtcatcaacagttgccagccaccctgttgcatataccccctcctctttcatgagctgactggagatgccaccaaaacggacatatccaacaaagtcactcagaagtcatggctttggcgggaggttgaccaaacaaagggatccaaacggtcacatctctctcgccaccgagggtctgctcacccggaccaccagagacatcagttccccagcaaccgcctggctgttaacatttttccacacccaaggaaacacttgcttatccccgctctttagttcttatctcagagtggtttccctatttgtcaccagacattctccccatccccatggcgacagctctgtggaccgggcttttggcgcggagctctctaaggattctgggatgtgtaaatagattgtgcctaccacttccccttatccacactcttgtctgacccttcaaagggctctggtagattatggagccctggtttccccttagcacagccaggctgccttgccacaggaggtggggttcgctcaagtgcgctttaatcctgcccttagcgatccctggcctactccctggctttcacgctggtgggcggtttcccagacaggccgctggtgtctcgggttcttcgcaaaggagtcaaccacaagaaaagcatctaactttgtcgtgcctcatcgtgagagcggtctcttcgtttatgggtcacgaggagtcgttgggtacaagaaaggcaaataaataaaatcccaccatgtggttggctttccacggcttagggatttaaagtgctgcgttcatctgaacttgtgcaggaggcagtgcaaggctatctgtatcccatttcatttaatggtacactgctttgtttacaccattctccgggctgtatatagga

SEQ ID NO: 4971 - DNA, 1000 bp, mus musculus
cttacagccagggagcggagcggggggcagtactcccctatctacatacctcctcagcatgaaaaaactccaggtttgtacgttatctgactgacggccaaggtctgctcagagggtgtcacggttctgtgctccagagcaggtagaggtaggcagggagtggccccattccttctgttctggattctgaggttggccgggtttgggctccctcagtcttggcaggtcagttctcctgttgtacagcccacttgccacaagagttacttttgtttttgttatttgaaagagtttctctgtgcagccctggctgttctggaactcactcagtagaccaggctggccctgaatgctcatggatccgcctgcctctgcctcccaagcgctaggattaaaggtgtgcgccaccacagcccagcatctaacaattattcttaacacctggccacatggcatttctttgctcttgttttcacccttaaatacttacacacatctcaaaatttaaggacactggcttataaatgataactttataatcataattaacaaattcattagtatagtatgttgatggaaagtataaaatgtgcgtgtgtgcctgcatgcccgggctctggccgtggccctgtggatactcacctttactcttctttagtttgcagttagacaacaacgtcttctcagtaacgtcctctcctgctgagcgtgaggatggactcagggaaggtctgtcatctccaaaccacaactttaaaacaaaattactcagttcaacaaaaatggttaaacccagcaacctttgaagtataaaactgagctaagctaagtcctggaagtcttttaggctcacgctaatgacaagttacctccggaacgtcgaaaggaacttcctggttgctggttttcaagatctcggctaagagccgcagtgtccgctctcgagggataatgttctcttcttgcattttggtccacgcagcatccgctctttgccagt

SEQ ID NO: 4972 - DNA, 1000 bp, mus musculus
tgaaaaacaacaaaatgcttagaatccttagccatcaaggaaatgtaagacaaaactgctttgatatttcatattccctctatcagaatggctaggaccaataaaacctccttgagctcatgctgccgaggaagtggtggcatgccaatgtgtgcagccagggtggggatcagtgtgcttgttcctcaggtagatggaaatctggccaccttgagttcaactacacccctctgggacattggactgactgagtcgttttaggtcactttggtataaactaatgtcacctgcgaacaggaggcctcaataaaggaaatgtcttcatatggtagggtagtaggcctgtcgggtattttcttaattcgtgattgatagatcgcccagaccatcataggtggtacagttgttgggctgatagttctacgttctataaaaaaagtaggctgagtaagccatgagtaccaagtcactaagcagtacctcttcatggcctctgcccctgctcctgcctccaggtttctgcccaggcagaattcctgttctggattctttcaacaatggattgctattttgaagagtaaggccttttaaaaaaaatcaaaggagagtactaataatttttgccatgtaataattctgtaaatgtgaatggaataatctatgtcattactaaatggtaatgcacaatatacagcagattcctcatatagagtcacccacaatcacctttccaactcactgtcgtgaaattaaaggatttgacaaatgtctgggacttggggtgagctctgttcccgcttcacctcgatgcagttcaatactatttttaagtctatttaacttagtggatgtaaccttctaaggaaacttcatttccgtaaagcacaggcattttctaactgtgaccattttgcctcttttcagccaagtcacctgtgcatttttaaaagcttcacttgtttgtttttattctaaccatagaatgtactattttctaaat

SEQ ID NO: 4973 - DNA, 1200 bp, mus musculus
atgggaacattttttggagatcttaatctttaatggtagaagctagcttgtctcttacctgaatgctgagaaatactaggaaatgctagattctgaaccactttcctgcttcaacaagataagctatacttgcatggattttccacactggctctatatgatttgggcttccgtttttgtttttgtttttgtttttgtttttgttttttggttttctttgttttgtttgtttgtttgtttgtttgtttgtgtgtttgtttgcaggaggactggagaaggccttcctgctgtttaaaccatgaaaatgcacacaggaacctagaaacagcccaggacaggatcattctggtttccatctgtgtccagagctgatcctgtgcaacagtgcccagagttgattccatgttgcagcgctccatatccaaatactgctgggatagagctgatctctcaggattccagacatgcttgtgagcacaggttaggcaccacttcttctcagaggccttgtctggagcccttaggacacaggaactgagtgaggaggagcctgggacaagttttttttccagtttctgtctgtgcccgtgttgatcctgtttcacattgctccatacccaaataccaactggagacagctggtctcccaggagtgccaacacccctgtgagcacatttctggtcaaatttctggcccaagagggccttgcccacagtgttcaggacacaggaaacaaggaaaagccggagacaggatccttctagtttcagtctgtacaccggggctgaacctgtgccacagctcttcatacccaaattcctcctggagataactggtctctgaggagtgctgacaggaaggcttgcaggagggacaagccacagtcagagacagcaagaccaactaacaccagatataaccagatggcaagaggcaagggcaagaacataagggacagaaaccaatgttacttggcatcagaacccagttctcctaccacagtgaaccctggataccccaacacactggaaaagcaagactctgatttaaaatcatatctcatggagatgatagaggactttaagaaggacataaatctctcccttaaagaaatacaggagaacacagctaaacaggtagaagcccttaaagaggaaacaaaaaaatcccttaaagaattacaggagaacacaaccagg

SEQ ID NO: 4974 - DNA, 1400 bp, mus musculus
aaaaaagattatgaccctgaggtgaaaaatgacagaaaatcgactatagccctacctgcaacttgtacattactgataagccatcttataaatgctaggtagaatgatctggtaacaaagcattaaagtcaactgtgcgtggaggtctacagaactatgatctttttgtttgttttaggagctcaggataagagagaagagcttcctgtttttctttccttttctttccttttctttccttttctttccttttcttttcttttcttttcttttcttttcttttcttttcttttcttttcttttcttttcttttcttttcttttcttttctttcctttcctttcctttcctttcctttcctttcctttcctttccttttcttttcttttcttttcttttcttttcttttcttggatattttctttatttacatttcaaatgttatcccctttccagatctccctatcccatcctcccatccctgcctctatgaaggtgttaccccacccacacactcctgccttccagccctgtcattcactacactagggcatcgaccccctcaggcctaagggctgctccttccactgatgtccaacaaggccatcctttgccacatatatggcaggatccatgggtctctccatgtgtactctttggttggtagtccagtccacaggagctctgggggagggggtgtctggcccattgtcactgttgtctcccccaggggcatgaaaaccccctaagatcctccagtcccttctccaactcatccatcagggatcctgtgctcagtccaatggttggctgtgagaatccacctttgtatttgtcaggctctgccacagcctctcaggagacagccatatcaggctcctatccttccaggtttggtaactgtatatggcatggattccccaggtagggcagtctctggatggcctttccttcagtcactgctccacactttttctctatatatccttccatgaatattttgttccgccatctaagaagcactgaagcatctacactttgatcttcctttttcttgaacttcatatggtctgtgaattgcatcttgggtattctaaatttttgggctaatatccacttaacagtgagtgttcttttgtgattgggtttcactcaggtatcactcaggatatcctccagattcatccatctaagaatttcataaattcattgtttttaatagctgaatagtgttccattgtgtagatgtaccatattttctgcatccattcctctttgaggaacatctacattcctaagagagcaagacgagtttctctatgttatgttaggtaagccttataacttgaagaatatccatgagcttaaattaattaattttactcttaattcatttaactt

SEQ ID NO: 4975 - DNA, 1000 bp, mus musculus
actttgacgttttcaacatttctgggtttccaacacaacccaggattcactgtcatagtttcatgcaacagcctttccagggcctccatgcaggactgtagaggaaggttccacaactcttttattatacttcttgactctaaagccagaactatgtggctaagctttgccactgggacttgggcctctccttgacttgcatttgtataaactttccattgttgatggtttccttaaagccttaagttttcctttcttttcacaagttggaagcttaactgggtgggatactgccctggggtaccattcacttaattacattttcaatcaggtcttttcaaaaatctccctaagcacaacacttggctccaatatcatatttcctggtgatattttatttctaaaattgtacattctgtatttctctgtgccctgcttgctgcttttcaatttctgatccatgtaagagtggtcactgataaccacatgacacagatttttatgttaggcagatgtttacatgaggtcagaaggccattcatcagaatatcacaggaacaatctccaggattcttgctaatattcttcccctctgaacgctacttagcagtgcccacattgtccaagttgtttttaacattgtcttccatgatttttctaggatggcacagtaagctcaacttaaaatgttcaaagatttttctagtccaaagtcctaaagtcttccaaagtcctacaaagaaaatatggtcaggcctatcttaacccatagcatcaatttctgccttagttactgttctactgctatgaggagatgccatgatcaagacagctcttataaatgaaagaatttaatgggaagtttgcttagagtgttatacttttagcccattatcatcatggtgcgaagcatggcagcacgttggcatggtgctggatcctcaaagcccaaacccaagagacacactttctccaacaaggacttgcctactccaataag

SEQ ID NO: 4976 - DNA, 1200 bp, mus musculus
caaaatatttactgaccatttaatttttttcaaagaattttatctttagataatttgtttatttttaaactgattgcttttattaaggtttaaaagttctttatgtatttgcactttctggttatcaaggctatggtagctgtggaattaagatgcatctctttcttttctgtagacctacatgaacaagatgcatctcttttttttctgtagacccacatggaacactgtctgtgaatgaagaggatcatgtgactcccacagacactcccagctttgtgattggaagacgcatcatccaacagaggcaaagggaagagatgcaacatggactcaaggacggccagcatggctaccttggatttaccttggacactaaatgatggtagataacttattgataaagtaaaatgaagaatgaatgagccacgttgttcagaattacatcctttcaatttttgactattattcatattttaacataaactattatgttacaatattttctgatgaaagcagagattaagaaaaaagcttagacggtatatttatgaatatgggctctagaaaaaggggttagggtgaagagtcatgatcatggatgttggaaaagttcctacagccagctgcatcatgtaattcactgctacatctgtagtcacacacaatgattactgagagaagttaagagatacatctaaaacctgcccaattgcttggtactctcaatgactaaggctggtatgcctatgggtgatatccaataaaatgttccctgatatgagcagcttccagtgaagttagagaaactaactagaatgaggatataaagttgtagatagaggttagactgactgcagcatcagctcacagctgcttagttcccgtgcctacttctaaatggcctctgtgaatctgaggaaatgttacagcacaccagtactctgcttgcaaaatctacttcaccctctgactaactaaggatgtgcacagcctgcgatgattaacaacaacacttaatctgtcaactgtttactcatcctaagatagcacacattccaagagagtcataaataatcacatcctgtgaggcaaagacaaaagtcagatgtaaattgagatatgtgtcaccttttgtctttgcttttatacaaagagcataattctgccatgaaaaggaatcagaacagtccaatataa

SEQ ID NO: 4977 - DNA, 1000 bp, mus musculus
aatctaattggtcctaatatgagaagaacaaactatcagttaaaaagtaaatattagaccttgggcacaaacttggcagcaagctccacacccccctgaggaggctccactcgaacatgctctagcacacccaggatcttaggatcaggggtgagtagaatacaatatctgttccaacaccaccaagagtaactgggaccggcaggatccagggacacaggaaccacacccaagcagtggctcaggttccttctggtctgccctggtttatcttgggcacaagcatggcagtccaggatcccaggatcccaggagcttggtcacaccaggatttcagggtttcagaggcagcttgacttccaggaactctggacacacccagaatctcaggatcacagacagctagactgaggagttctgactcaaaaaggattacagaatctacaggctctaatcagatatagtgagggcagggagcactagaaataatcagatggtaggaggtaagcataagatcataagcaacagaaaccaaggttacttgattcttgcgcatgtccgactcgccagcaagaacaacgctgcaacagggtccttctgcacatgtttattgggagagcttgattgcagaggcgaagtgaccccaagcccagaactggtgctgcttatataggtctaggagaggcgtgtctcacacccggattggttatgcatgggttatgcttaccaactcatttgcatgcctacatctgattggttaacttctctctcatctgattggttaattctcaaaacctcatcgtggcaaaaaaaaccctttaccgcatatgtatgcatggtggccagaggtagccagtgccaccctgcaacggcacatgtggcttcccacacttgatatcatcagaacccaattctcccaccatgacaagtcttggatacaccatcacactggaaaagcaagactcatatctaaagtcacttctagtgacaatgatagaag

SEQ ID NO: 4978 - DNA, 1800 bp, mus musculus
ctattacgaattagtcataaaaatagaaagaaaaatactttacctctcttaatccaagaagaatttacattaagtatagaacctggtttacatatctccttggccttccatttttttctgggtatttttccatttagtaatatcttatatttgaagcctctttgcaaaaatactgtactttataaaatgtttattcttcatgagtctcttacttatttactttaataattctcaaattcacaattttgtgttaagaatacttagtgtttaataagacagatgttgcttaccactatggtatgtgcaacactactagacttttagcgttattaagccatgttggtcattgttgtggttcatagattccatatccaggtagtcatattggtcttcctttttctggaagtttgtatggcttctcctgttattatgagactttattcttccttcttacctagaagtctatcagaatgtaacagtgtttagagctatattttccatcaggattctaatataaactgctacctgtaaggtttttgtttgtttgcttctttgcagcatgcatagctaatgttcagatgtgaatatactataatttctccaacttaaccatcttataaatatatgtatctcaaaacatgtcacacatcattaaaacatatattattttagtaggattgggagacaaagtaatgggacagagttagtcaaaatgaagaagatacgagtaaaccatgtaaaaaacttactatcatgagatcagcatgcctgcacaccaaaccccatagcctgcctatttctcaggaggtctactcaaacctagatcactggtgagatgcctggtcccatacctacacaggcagtggcccccattgaatgaagtagaggtgggaacaacccctttctgcccaagccccatcaccctttggactgcacctctacctgcatccatggcagattagcattcctggtcccttgaccccaccggctgcctgtctcccaggagttcttaccctaaccaggaacagaggaggtcttctctaaccagggaaacaggagacctgctctaaccagaaacagcactacttgcctcccagaatggcagctctaacacaagtcactctgcctgcctcttaggaggcctgctccaatttgagaaacagccagttaacaatagagataaccagatagtaaaaggtatggtcaagaaaataagctgcagaagccaatataatttggcaccatcagaactcagttctaccacactatagatattggaacacacctgaggagcaagattttgacctaaaatcccatctcatgaagattatagatccctttagggaggattcaaataaccttcttaaagaagtacagactaacaggagaataataaaaccatccatgatgtaaaaattgaaatagaaacaataaagaaatcacaaatgtgggcaactatggacatggagaacataggaaaaagaacagaaactacagattcaaatattaccaacagagtacaagcgatggaattgagaatcacatgtgtagaagataccatggaagatattgataaaatggtcaaagaaaatgcaaaagtgaaaaagttcctaacacaaaacatccattgattttgtgacccagtgaacaacatgagaataataacaataaaagagagtagagttagaaggactagaaaatgtctccaatagaattatagatgaattctaaccaaaagacagaggtggctataaacatacaagaatgctacagaataccaaatatattggaccagaaaag

SEQ ID NO: 4979 - DNA, 1000 bp, mus musculus
aagtactgtctaaaaagagccctgtgtaagcaaataaatatgttgtcatgcagtaatttaagttatattaattgattagagttttgatgtatagaaagaaattttaacaagtgtaaggcacatttacataattgaagagatgatatttacacaggcttccatatgataactaaggcagaaaacactacctatgtctattgtgacaattgttcaagatgatataaaaattaatgttaattccaaacttagaaatatttgcagcaagtgctactacacaaacctacaatgaatcaaaatacagagttgtaggaacaaggcccagtagatatatcttcaaaacactcctgcaactaaagctcagggaatgttgcagaaaaaaatcttttaagagccagattagggtgtttgctctaaaggtattgggggcaggggaacaggactgaagccctgagggacagaagaaagaatggaaatagttcacctcgggaggtaggatctggagggaccatctcaaatgtactgaagacctgaaaggtgagagactctcaggactcaaagggagcgacctgcgataaagtgctctacagtgggagaggggacttgtagagtccacctctagtggagggtcagaacatcaagtggagggaaggggtattgccatcccatagtcaaaaagagaactgttcccgtctagcagaactgcagggacaaaaatggagaagagcatgaaagaaaggaggtccagtgacagggccaaattgggatccagctcaaggggaggaaaccgggcctgacactgttactgatggtgtggtgtgcttgcagacaggaacctagcatggctgctcactgagagaccaaacaagatgctgaaagggtcagatgcagattctagcacccaaccaaaaggattgaagctggggacccttgtggtttaactggcagaaagctggaagaagcttaggaggagggcggccccatgggaagaccagcagcctaa

SEQ ID NO: 4980 - DNA, 1600 bp, mus musculus
actgcaaattgtaaaagagtttttaggtatcagactgtgtgttaagttgatataacagataaatgtccctgctcttgtgagggtgggtttgagtcatttgaaagaatggattaagttatttgtgcttatctgatatttaaccaaaattatgcaaaaggacatttcctataatcttaacagggtggtttttttttgcataactgttttatttcctaattcaactgacatggtaatatgcttgtcaatgactatagctctgttttataggggtagtttctgtatattatcagagaaagctaaaacaacaacaacaacaaaaaaaaaaaaaaacaacaaaaaaaaaaaccaaatttcatatgcgaaggcagcacagggatgatacacgagccttagtgcaggctatggcagccttggaagcaggaacatccccctaatgttggctcaacatgttggatcagtaatcaatgatgggtaagaccctcttgtgcacataccaacctaagacaggatggcaaaagtgaatttgtcactcccatgacaggtaaggatgtggcagggatgggggaaacctaagactgatgctgatcccagagctactaataaaactaaaagggggagatgtgggaagcaggtgtggctgcaggcccagtgaaacccacttgtttattgccttgcctgagcatgcgcagtgagactgcctgccaggctggactgttccttgtgatcgggacctgtcagcctatctgtgaacgacctgagcttgttccttggagcatgtgttagttccgattgaatgggtggggtggagctagaaggaggtcagtcggctgagtagtgaggagtagagttgttttttagcccttgccctaggtagaagccagaagtagaataagagtagttttagcccttgccatgagtagaagcagagtaagagaagctgttgtaattgtagtttagcccttaccctgagaaaaagctgctggggaagagagctataaaagaaaaagcccaaagtaaagttgctgcatgaacccgacttgttatccctgtcgctcatgtcaccgcgggccggagactgtggagaccagagacctggacagttattatcattgttatgactttcactgactttatttttcatctgaaatgcaactttaccattctgatgatgttttctttcctacataagtaaatgtaaaatcaaattatataatatatgttttattttgcagtaatttcatttttaatatcattcatatcagtatcaatgtttctccaatatagcagtattgttcatttctatcatttggttttaagttaccataactgactcatactttgaaggaatcttgagaaaactatattcgatttagataagtaattttacagaattaattacctaatgaaaactgaaatgtctaaggatgaatagtgttgtggctctcccttccaattccagtatgagaaaactgaggcagaagaattcatgtccattctaagctatatttcaagatccatgccatatattttacactatataaatgtctcaaaacaaaactaaacaaagcagatacatgaaaaagcaaaatgaaaattaaat

SEQ ID NO: 4981 - DNA, 1000 bp, mus musculus
tatcatatcaatcttttttactggtttcacttcctcaaacttcctgttcagtaactaaaaaaaatttgagtaaaccagtttatttaattttccttatatacttctttttttgtcaatcaaagcatcttgctatctcaattttcttattggtcgtacatttttccagtttaaaacctagagaagtcagcagcgaaggctattgctgtcagaatataattttttcatgaacatatacatttcttcactacatactctctatgtatttgcatcatgatgagttactacactttcctccttattaacattttggataggacagaagacaatttaaaagttttgatgagtaccttcatcagttttttattatcaaatagaaaaaacttctgagctagattcttagggaaagtccatgtctcctaaatctggagaagactaggggatttgagaagatcagatatagacagcatgttaaaaattacttttttaatggcagtttttattagatattttcttcatttacatttcaaatgctatccccaaagccccttataacctccccacaccctgctccccagcccacccacttccacagatatcagcaactcacctgttgctttttactatttaagatacatttaaggaaacctgaaactaaacttggtttgcatgagttctggtgtgagtttgtgtgaaaaacttaagtttttacataactttactagtgatgtctatgtaacctccctttaaaaagacaaaactaagccaatacaattgctattctaagaaagacttttgaagcagtattatttatcctaactttcgatgttacttgcagagtttgagcctctgaaaaaatagttgaaagtagaagtttgtcaccaaatgagacaggagggctatccaaatgtactaaatatgcctgtatgtgacattaagtgttgctatttgtcatccctacctgagtggtaaggacttcttaattagggcctaaaaagtaatg

SEQ ID NO: 4982 - DNA, 1200 bp, mus musculus
gaggtcatcatttaaaatcctactaatacacagggattcccaaggccatttgcaatcatctttaaaattgttggtttggttttaataatcttccttccttccttccttccttccttccttccttccttccttccttccttccttccttccttccttcctccctccctccctccctccctccctccctccctcccttccttccttccttccttcctttcttcctttctttcttttttaaagataatttctaactttacatttcagatgctatccccaaagtcccctataccatccctggcccttttccccaacccacccactcccacttcctggccctgtcattcccctgtactggggcatatgatcttcgcaacaccaagggcctctcttccccttgatggccaactaggccattctctgctacatatgcaactagagacacagttctggggggtactggttagttcatattgtcgatcctcctatggaatacagggcccttaatgatggagctagggaaagtacccaaggaactaaaggggtctgcaaccctataggaggaacaacaatatgaataatgtttcttataaatactttaatactaattaaagatgaaattttattttgtacctgcgggaagcgggtgtggccacatgggcctaaatggcgccctagcccattgccaggcccggtggaccccacatgtttactgccttgcccaagcatgcgcagtgaggctgcatgtgtgggctgcctgccaggctggactgttcctcatgatccagactggtgaccaacctgagctcttgcctggagcatgtgtgatttctgagtggatgaggtggggtggggtgaaatgaggtcagtcagcttgaatataggagggttgttgttgttgtccttgctgcaagaggagaaagggtaagaagctgttggggaagagagctgtaaaggaaaaagccacaagtaaagaagctgctgcatgaacccaccttggtgaccatgtcgttcttgtctctgtgggtcagagatggcggcatgtaccatgttttaatattatttgaaaatgaaattaatgaagtaaaacacaagctaatgtgacagctattttcatttacctcctttatttctgataaaaaggacaataataagcccatatgtaaaaatagacatatatcatgtatgaaaattcattggctt

SEQ ID NO: 4983 - DNA, 1400 bp, mus musculus
ctattactgttgtgtttacaaataaattgaaattttgcggtaagaaagccctatataaacagggttgtcagattttatattaagacactgtttgatagaattctgaatcttcagagagtgagtaccaagagatgaaaaattatcaacaaacaagtattctgagtgtcttcattgagaggtattcatattaaagcagtgaaaatatgttcacagagatagcgcttctatcaaattcacagaaaaaaaaatctaagaatatgggaagggatctgggagggaaagaggatggggaatggggaagaggggaacatgatctggtattgggtgaggaaaaaggatctttagagccagctgagagaatggaaaccggcaacctcaggagatagagggttgggggaccctccagaatgcaacagagacctgggaggtgagagactctcaggactcaaaagtagggacagtagtatgggacagggaacttgtagagctgatctccagcaggaagcatcaagtgagggagggggttgctataccacagtcaaaactgtcacccataattgttcctgtctgaaatacctgtagggatggaaataggaccctgaggaaaacaaggtccagcaaccggcacaaagagggatctaggtcaagaagaggtcccaaggcctgacactattactgaggttatggagagctcaaaaaaaggagctatcatgactgccctcctaaaaacccagcaggtagctgaatcagatgcagatatttgcacccaaccaatgaacagaagctgctgacccctgtggttgaattagggaaaagctggaagaagctgaggaagaggactgccctaaagggaggaccagcagtcttaatcaacctggaccccaagatctctcaaatactgaaccaccaaccaggaagcaaacacaagctgatatgaggcccccaacacatatacagcagagaactgccgtgtcttagttcagtcagagaagatgcacctaaccctcaaaagactggaagccccatggagttgaaaattctggttgtgtttgtggtgggtggtgggtggtggggacatcctcatggaaacagtggggtggggaggagttatgggatatggaacaatcaatcagagggtaggctagggtaggggactaaaatctggaatatatatatatatatatatatatatatatatatatatatatatatatatatgataaaacgaatatcttacagatcaactccctttcagaaagatttttaaaatattcaattaatttttacaaaacttacataaatgctgatgtaattgtattctatatgacgaatagatggagattttcaattaaaacaaaaaactacttccctttacatttttggcagtttgtgaaataagg

SEQ ID NO: 4984 - DNA, 1000 bp, mus musculus
cattttcaatgatatctcatttcccagtttcccttccagaaaccctgtatcccaaacccctccccctgcttctatgatggtgttcccccatccactcctgcctccctgccacggtattaccctagtcttgggtatcaagtattaacaggaccaagggcctcttctttcactgaagccctacaagccatcctctgttacatatgtggctggagccatgggttcctctatgtgtactatttggttggtggtttagtctctgggagcccgagttggggagggggtacgtttagttgatattgttgattttcttattgagattcaaacccctttagttccttcagtcctttctccaactcctccattggggaccccatgctcagtacaatgtttggctgtgagcatccacatctgtatttgtcaggttctggcagagtctcttgggtgacagctatatcaggcttctgtcaacaagcacttcatgacatccacaatagtgtctgggtttggtgtctatatatgggatggatccccaggtggagaagtctctgggtggcctttccttcagtctctgctacacattttgtcaatgtattttctcctgtattttgttctaagaaggactgaagcatccacactctggactttcttctacttgaacttcatgtggtctgtgaattgtatctttggtattctgagcttattcttttcaataaaattaagctttccaataaaatgaagaacaagctttgggatattcggagagtatggacaaataagcacctggagcaattcaataggtagagttttcccagctacacatgaccattttatgaaaagtcaaagaaagttttcttagcaaaaatctgtgaaaattttagcaaaattctgagttagtaaaataatgaaagtagccaaatgatgccccagtcttaacattatggaaattactagttcactcactaaatctatatctgtaaaagatctgaagaaactattaaat

SEQ ID NO: 4985 - DNA, 1000 bp, mus musculus
catcacaaaaggaaaccaggtcagaaactcacacagggaaggaacttaaaggcaagaactgattcagaggccatggagagatgctgcttactgctcagcttgttttcttatagaacccaggactaccaacccaggcatggcaccacccacaatggtctgggtcttcccacccttaatcactaaatgagaaaatgccttagccctggatctcatggggcatttcctcaacagaagctcctttctctgtgataactccagtttttgtcaagttggcacactaaatcagtcagtacaccttgtcaacttgacacacaaacacataactattaagcctcaacttttactttcttattcatccccaacatgtaaataactttaaaagttccagagtctttaaaaattcttacatattataatttcgatccctttaaaatacccaatctctttttaaaatcaaagtctttttacaattccaagtctcttaacagtgagttacactaaaatactttgttatttcaaaagggaaaaatatcagggcacagtcacaataaaaaacaaaaccaaactctgtttcaatgtctgggattcactcatgatcttctgggatcctccaaggacttggatcacttctccagctctgcactttgttgcacacagcttgtcttctaggctccagctccctgtactccactcctgctgttcttggtggtcatctcatagtactggcatctccaaaacactgttgtcttcttctgaaactggactacacttttacaaaaatcctctcacaggctcttttcatggtgctaatcctcaatttttttccatgaccccttcagtccttggtcttcagctgccactgtggctgtaccttcaccaattgcatctccttgcctctcatagtgccaagcatcagctgataccccttcgtgtttcaaaaccagttccacctaggagactcttatacattaccaagtctggctgtccacacagtgtacat

SEQ ID NO: 4986 - DNA, 1400 bp, mus musculus
gcatgaaacacagctgtcatcagaagagttaaatttgaaatgtaaaaaagagcaaggagatctaaaggtggagaaagcctaaggaaacataccacagatagcaaatgaaaaattttaatttaaagcatagcctttaaagtgtcaggctgggctaaggtcatattctaatacgaactgctccaaggatggctcagggcaaaggtaatcactggaatgtacaaagtcttcagcaatatttatctttactattcatttccttactacttaaacacatgaattcttagctctttatttccaaagagatgattttgtttagtggggtttgctcaatatatatttctctcgcaatgctggcactggctgtaaacccaatctattatttcatcaaaattgttagcatcagagcacagtactttttcaggaataatttttgacttaacattaaatacaaaacaaaatcaatagttcaggtggtatatacaggaacttgttggcaagcagattcaattctggaacccacatagtggaacaagagaactgctcccacatgggtatatctgttctttcaatagatgtgtactttaaagaatttacacttgaagaaaattgaatctggcaggtctcccaggagatctgttgtaactaggaacatgggtgagaccccctcctcaaataatcatccagctggaacccacacagagcacagtggatgcaggacctctcccctctgtgcgactccatctcccttcctgtctgcacctccaagcggggtgttgttgttggggcagatccatgtgcctactctttctccacttcccatagcctgtccttctcccagaagatctgccataatcagggacacaggaggccccctctaaccagagaacgcactgcctgtctcccaggaggcccactctaacccatgtcacagagctctatttggcttcaaggatgcaggctccagacagagacacccaggccagttaacactagagataaccagatggcaagaggcaagtgcaagaatataagcaacagaagttaatgaattttggcaccatcagagaacccagatctcccaacacagcaagccctggatatcctaacacacctgaaaaacatgatgctgacctaagatcctatctcatgaagataatagaggcttttaaggatgatatgaataaccattaaagaaatacaggaaaacacaatcaaatagctgaaggaattgaacaaagtagtccaagacctaaaaataaaagtagaaacaataaggaaatcacaaatggaggcaaccctggagatggaaaacctaggaaagaagtccggagccatagatgaaagcatcacaaacagaatacaagagatagaagagagaatcacaggcatagaagatacta

SEQ ID NO: 4987 - DNA, 1200 bp, mus musculus
gagtagatggttactctcagaaaagttcagtcatgataaatgtcaccttcttgacttaacaccttagtagaaaacttacagctgaaatgtgaggaaacatttaatgattcactcaaaggagaattaaaacatctctaaaggggctaccgaaatgctcagcatttaaaagcattcactgcctgcttttctagagtacctgcgtttgatttccagcaccacacagcagctcacaactatctgtaactccagatccaggggatccaaagccctctctgactttggcaggcggtgcatgtatatggtgtactgtcatatatacaggcaaaataacaacacacatacaatcaaaaaaagaatccttaaagttgtactgaaagcattggtaaatatgtgatgggtgattattgagttattactttttgtatcttgctttcatatagggcaaggtgcatttacacttgacttaccaattgatttgtgcatatctgtagttcttagcttagcagtcaatactcttaaaagcatagcagtggtgctttgatgtggatagttctgtttgtgtcatgtgatgcacacctgtgatgttttgctcaagcagactcatatgatgttttgctgaaacaaggggattcttgaagttgagagagaatataagtaggacccaacagacagtgactaggtgctggcatagctagtgttggtcttgcttctttgctaatcctcacttcattggaagaggcacagcagaaaacttctcaaggcattccagctgagcctgctcactcccattgactcctgacaattcagtggaggcctgaatttttctgctgggtcatgctgccactttgattatgcttggtgaaacttttgaactggattgttgatagcctgacaatgaagattctagttgctgcaaagaacaacttctaaacaggtctacatctttttgtcctatttaccatcttttctcccatatctttgtatagtggattagaaggggaattgaagtgtttgagaaatcttactaaagtaggttttgaaaaatctaagcttagaatgctttatattatttactttacagtggttctttagagtattattagtcttaaaatgcctttgaaataaagtttatacaataacctattttcctcattgttagttatttaagaacagaaagtgataaaaaatattttataactc

SEQ ID NO: 4988 - DNA, 1000 bp, mus musculus
ataaaatactgacactgtcactcgtcgtcccccccccccccccacgcacacaagcacacagagactctccttatccttctctccttctacttctgcgaggatagtaccacccctgagattccccccacactggtgcatcaaatttctgccaggataggagcatcttccctcactgaggccagacaaggcagacagataccaaaatcaggctacagttttagggggagccatcggtacagttgggggggcccacatggagagtgagctggacatctgctacatatgtgccaggggtcccttgttcaagcccatatgtgttctttcatgggtggcacaatctctgagaactcccataagttcaggttagttgactcagttggtcttcctgtggggttaccattcccttcagagccttcattccttccctgaactcttccacaagagtccctgacctctgtccgatgtttggctgtgggtatctgcaactatttcaatcagctgcttggtggaccctcttaaaggccagttatgctaggctcctgtctgcaagcaaaacagactatcattattaatgtcagggactggtgtttgcccatgggatgtgtctcaagttgtgccagttatttgttggccactccttcagcctctgctccatctttgtccctacatttcttttagaaagaacaaatttttggttgaaagttttgttggtgggttggtgtccttatcgttccatgggtgtgtctgggggtgggtgggtgtcctgcctggctataggaagtggcctcttcagtttccaaatccctatttttaggcatcttgactaagttgaccagcgttgactcctaaaatcttcacccatctcaagcttctgggacattctaaagatttccctccaccccactagcagctgcagatttccacttattctcttagttctctgggtcttcctcctgtctctccacatacatgatcctgccccctcgtcctactctcctct

SEQ ID NO: 4989 - DNA, 1200 bp, mus musculus
cataattatgtttgcatgatattacatttttgtcaatatccaccttagtgccaaggatcagccttggcttagagagtggttcaacaactacaagtgaaattattatttaaaacaaaatggcttaagtaaaggaatcttaaagagtatgttattagtcagaaaagacagtcttgaaaagctcacatctcacatgacttgactttctaaggaaggagtgcttgagagtggtgagacaaatgactcaaagtcaaatagtgggttataatctgatggcctatgttctgcttgagacagctttccagattgctctctctgtgctctgctctaagacagctttctcttgctattttaaaatctcttggacagctcatctcttgcagatcaaaagcccaatcttttatttacacatcaattcaatcatccaccccaggttcccttttgaatagcccatgaatcagcattccctagctccttgtttcttagacagaaaacacattgtttgtttaccattataaaagaattcataggtctgcctgcctttgttaagcacagacaatgagctagctgggtgggaccctgccctgaaattcctactacttccatgcttgggcctggacctaaacttgctctatctcaagctgaccttgaactcaggaatctgcctgcttttgtgagcacaaacagaaaaatttagctgggtgggatcttgcccttcaatcaccactccttaaatctatttatcttcttccttagtatctttctgtcaagctggctcacagttcatctgtttctgttcttttagatctgtaaagctccttatacaattcatattgcattcttatagtttgcatagttgagaaattaattttgaggtcatatttccagagttactttccatagccttaaaggctgttctgaaagtctcagcttttatgattttgtggagacatagacacacccttgccacctagagtcatgctacttctaattatcatggagtcattaaccttgggagggagaatatttcctgaatgagaaacaagaggttaaaaaaattattttcatacaaacatgtcttacattagccattgacacttgtggaggcccatgctccactggctctgttcagatacttcataaatggaaatcattaataataatggaactaccagaaaggaaattcttacaagttgcacactg

SEQ ID NO: 4990 - DNA, 1200 bp, mus musculus
cccggtgagaacaatcaaaatattgccttcccatgagaggcatacagttgtttctaaggtttggttaaagatcagtgtccctctcctcacagtattacactaaaatctatgtttttccaatgtatttttgctattttaaaaatgggatatagttcttgtagaatttaaactgaatttcagcagtttttgttgcttttgttctgacaccaagtaaccatacatttggttcttctaatgtctcctctgcacagttataaattcagctggcaataaaatgggtcagagtctccagtgacgatctaaggcaggaacagccaggagctcacagaccatagaagtagaagaccagcagagacaggtccttcctgcctccatctgtacccagagggtgagacagttctgcagccctctctgcactggtcttgccaggagagagatggtcttccaggagtgctgacacaggtttacagacctacaggaggaacaagcttcagccagaaactgcaagaacatctaacataagagattaccagatgccaaaaggcacatgcaagacttttaccaacagaaaccaagactatttggcatcatcagaatccagtactcccaccatagccagtcccaacacacgagagaagcaagatttcgatttaaaatcatatctcatgatgctgatagaggattttaagaaagacaaaaatatcccacttaaggaattacaggagaacactgctagacaggtagaaacccattaagaggacacacaaaaaaatctcttaaaaattacagaaaacacaggtaaacatttagaagcccttagagaaaaaaacaaacaaacaaaaatcccttaaataatttcaggaaaacataaacaaacaggtgaaggaattgaacaaaatcatccaggatctaaaaatggaagtagaaacaataaagagatcacaaagggagatgactctggagatagaaatactaggaagtaagttaggagccatagatgaaagcatcaccaacagaactcaagagatagaagagaaaatcttaggtgcagaagattccatagaaaacatggatacacaatcaaagaaagtgcagaatgcaaaaagatcctaatgtaaaacatccaggagttgtacagacactaagagaacacaaatgccagcccaggctactatacccagccaaactctcaattaccat

SEQ ID NO: 4991 - DNA, 1400 bp, mus musculus
tggtgatctcataggatgcacgggacaatttcaatattttttatctgttgaggcttgttttgtgaccaattatgtggtcaattttggtgagggtaccatgaggtgctgagaagaaggtatagccttttgttttcagataaaatgttctgtaaatatctgttagatccatttgtttcataacttctgttagtttaacttcatccctatttagtttctgtttccacagtttgtccattgatgaaagtggtgttttgaagtctcccactattattgtgtaaggtacaatgtgtgctttgagctttacgaaagtttctttagtgaatgtggctgcccttgtatttggagcatagatattcagaattgagagttcctcttggaagattttacctttgacgagtatgaagtgcccctccttttttttttttttttttttttatgactttgggttggaagttgattttactcgatattagagtggctactccatcttggttccgggaccctgccgagtgtattctacacaggccccagacatccatccactttccctgccagaggaaaggggtccgcccggcccgggagtgctttgcctgagcatcggcagcagacatcttggttccgggacactgctgagtgtattctgcacaggtgagactacggaatacagaagctaaaagcttctattacaggcaggagccacagagcttctaaggcagcccccttttcgggccccagacagctggtgactttcccggccagaggataggtgtcagcccgggccgggattgcttggcctgagctttgactgcagacatcttggttccggactcctccaagactattctgcacaggtgagagtgtagaatacagaagctaacagcttctgggacaggccaaagcaactcagctttgggacaggtcctgttttggtccttcgtcttcggccaggagggaggtcctaaggccagatatctgtgcacctttcctgtaagaggagagcttgcctgcagagagtgctctgaccactgaaactcagaggagagagctagtctcacaggtctgctgatagaggataacagaatcacctgaggaacaagctctaaccagagacaaatataacaactagctccaaagattaccagatgatgaaaggcaaacataagaatcctactaacagaaatcaagaccactcaccaccatcaaaacgcagcactaccaccccacctagtcctgggcaccccaacacaactgaaaagctagacctggatttaaaagcatatgtcctgatgatggtagaggacatcaagaaagacattaataactcacttaaagaaatacaggagaacactgctaaagagttacaagtccttaaagaaaaacaggaaaacacatccaaacag

SEQ ID NO: 4992 - DNA, 1000 bp, mus musculus
actaggaccctgaagccgacagtctggaggcccagcagcaagctggctttcgccagccacttttggcctttttctggactgagtagcttgcattttatcttgctggtacctttctcccttataacgaactgcttcctcctccaagtccgtttcttcagaggagctaagtccttcatctgattctgagctactaagagctagccgcttaaactctagtggcaggtataggctccttctcctagagacctccgctgattgatcttttttcttctctttttcttctccttccttccaaactctccccaggtattcatccctgacatgattttttcctcgagttcagacccgtggaaaggcctgtatacttatttggtgcaccatgtttcctctttgttcctgctctctctccccgctttacctctgatagactgtcttgaatttcatccagaattctctgctctgccttaaccacttgttgacatgtgaaaaggaacagaaaggcttctaacgctggagaaagttcaaggccagacatacctcgtaaagctgtaacatgtcccgcagtactggttccgccccgcaaacgagggatctcccttgcgccggtgtgatggtagttccccgggtctttggcgctacttattccgagcttttgtccccgccggcaagaacacactcgggacaaccggaatcttctgcagcaaaagctttattgcttacttctcaggaggaagaccccgaacccggaaaatggcactgcttatatagcctgcagcgtgacgtttcagcacctgatgtggcgtgacagcacctgattagttgctcgctcatgaccccattactacgccccgagatgggcaatgactgggcgtgaatttactcttgcacttgtgcataaggcttgtttactagttagacgcagtggaagccagggccatcttataatggcgattgctcacggcacagctctccacagttccctagccatggtttttctttt

SEQ ID NO: 4993 - DNA, 1000 bp, mus musculus
ctttggctggttttattccttgaaagcagttttcctgagcaggactccacagttctggcatcacaaagatcttggggtctctgaggcaatctcagtgttacagtttcttgttccagggtctaggatccacacatgatcttctgcgttcctccaaagagatcgggccacttctccagctctgccctctgtatcactctaagctctggttgactccactctacttctgctgctgttcgtcctgctcatcccatgggactggcatcttcaaaatgctgggttcttctgttgcaactaggcttcactgatagcctcatttatgctcccttcatggtgccaagcctctgcaggacaccttcatgccttcaaaaccagtaccacctgggtgattcttacatgtgaccaagttcagctgcaacacaaggtacaatgtggctatctctggaacacagcttctttgtcctctcagaaaacacttcctagaagatttcatctcagtgatgctggtctcttcttcatcacttctaatctcttagctacagctaacaagcatcaatttttccagtagccccttctatttttgcttctaaagccagagccacatggacaaagctgctgggttctgctgcttgctgggcctgggacatggccccttctattacattatcaccagttttctcttctccaactcctttactgcctcagcttggctgtcctgaactcagagatctggaggctctgtatccacaggcctagacctaagcttttcttcatctgcaacttgttctgtatcaggatggacttgaactcagatgcttgatgctcatctcctagggtttaaaggcatgtaccaccatgcctggacctatgctttccattttatatcttatattgaaaaccaagagtagcaatcacaatccattccttgtcaattttaaacatacttgtatctccttatgtcaatatgtaaacaataaccaggtttctttcctctgtgttcttt

SEQ ID NO: 4994 - DNA, 1600 bp, mus musculus
tttttcgttttttctgagatatggtttctctagccctagctgacttgtaagccagggtgaccttgaacgcagaaatctgcctgaggttaaaggtgtgttccacaattgccccagctctactctaattctctttttaaaaatgtgtgtgtgtatatatgtatatatgtatatatagaagtaatattaatccattaatatctgtttcctaaaattcatgtctctctctctctctctctctctctctctctctctctctctctctctttcttaaatttattcttttcatacatagtttcataatgtaagcagccctggccgtcttgaagacactttgtaggcctcaatcctgtaagagccttcctctgcttatcaaatgctgccatgaatgttgtacctcactatgactggctgagattctcaccttttcttccccccccctttctttttatgattctatctttggccacgcagtggtggtggtggtggcagagggaggtggatcactgtaactttgcagctagcttagtcttcagtctgatttactcgaaaggagttccaagaagactggttatatttttcatttattatgcattttaattaaaatttaattaaacccaaagaatttagactgaccaattcagagtctgccatttaaaagcataaggaaaaagtaggagaaaacgtgaggctgtctgtggatggtcgaggctgctttagggaacctcctcaccattctgcacttgcaaaccgggccactagaacctggtgaagggagaaaccaaagtgacctgaaacaataggtcacatgaaggccagccaccatcttgttgtgcaggtggtcagttagcagacaagatagctgacatgcacatgttgtctttcatcttggtgaggtcaatgtgcaaccgagtgacaggacaaggaagtagacatgcagacaacagacatgcaggtgcaccacctcccttctgtgtttgtataaaacacacacaaaaattttcattatttacagtaagccttaaaaagcactctgacagcctcgcatatatctacattctatgtgattagaatttcctttttttgttgttttttaatttattctcaagagctgcatggtggtttctcctaggttctgttgctctctcctggcatgcaggtatatacacagcagataaagcacaaacacacatttacattgaaaaataattgtaataagaatgaaagaaagaaagaaagaaagaaagaaagaaagaaagaaagaaagaaagaaagaaagaaagaaagaaagaaagaaaggaaggaaggaaggaaggaagaaacaaagatcctaactttggcccggctgtgtgggtggcagaaggaggcaggcaggtaggcagagaggacctctctgagtttgaggttaccaaagcctacaaaggaagttccaggcagggatgccagggctacaccgagagaaaccctatcttggggaaaaagaaaacaaaagcagaaaaagttctggcttttactttcagacatatgattcttctagtactattgactatctaattttgatcatgaaggcacattggattttatgacagtgtgtgtgtgtgtg

SEQ ID NO: 4995 - DNA, 1000 bp, mus musculus
aatctgaatcttacttttcacatttgttggggtatccaggacttgctgtggtgggagtactgggttcagatggtgccaaatagtcttgctttctgttgataagattctagcatttgccttttgccatctggtgatctctggtgttagatgttcttgttgtctctggctggagcttgttcctcctgtctgtctgtaagcctatgtcagcactccctggaggcaagcactcccctggcaagaccagtgcacagaaagctacagaacagccccacctcctgggtgcagatatagtccacaggaccctgtcccagctcctctgctgcttctagagcctatgacctcctgagcacacgcaccctagagaattggggtctcttcacctctgcaatcaagctctcccaataaacgtgtgcagaaggatcctgctgcagcgtcgttcttgctggcgagccagggcgcgagcaagagaacagattttgcacatggcctgacccctgtgagaacttttcttccccttccatggtctcacttcatattgggtggtgactatacctttttatttgcaaggggacaatagctgactcatggtcaaggtgccagagattcccaggtgaccaagggtggcttaagagtgtgagttatgatttttcattacagccgccttccttctctgccaaccaagggcctatatactcagtcttactctccagtccagtgagctctgggagttatattagctgttttcattgaaataccatctgggcttttgcagagaagggagaattccgggcaaacagagggctgaactttgcctccctaggtaccagggtcagatgccagacatggcctgctcatgaccgccatctttgctgaaaccatttctgtgtttataaattcattatatctgagaattttcatatagatgttttattttgtcttattttttttctccaccttgtcctctggccatggccttttaattttcttttgccttttaatt

SEQ ID NO: 4996 - DNA, 1200 bp, mus musculus
ttattcataaagctagttcataaaatcatagctaggctagatggcaatgtggaaatcacactttgtagataaacatggaaagcactggatttacataagaggtaagtaggttcttgacttaagatgctttaagattagagtcattaagactgagagcaggcagggtctgagcactcaccagtgtatacttgaagttcaggactcaacattgggggacaccttcccttaataagtacttccctttcttttccttctctactctgtgatttcattgttatcatgggtacattgtgccagatctaaagtacatggttgctgctctgggacagggctagcaggtgtggccttctacaagtgtcaatgactgctgtgggtgtaaggcttgtttgtgtaataatgtacaaattttatgttcctccttcaaggaatgtcctccctccctgcttacgttaatgactccatgacagcagaagtctgggaggtgaggtgtggctaatgtttcagcaaaatggtaaatgttaggacagccctctttaagctgaggctggcccttgacaagtcctgaacaaggacttgaataccatcttcagctaggagaggtgttctgagagaaggggtgtctgggagtggcaaaaacaaagggctcaaagtcaattggtgagtccaagctgacacccgtgttctggtcaagacagattcctagagtgctttctatctgttctgctttttcctgcctgagacagtctaggggaagtctagattgccagtcctgtagggtacggaatactgcctgtcaacatgcctactcactggatgtttgctctgtgcctcctcgtgtgaaaaaggaggaggtgtgttacctgcacagatcagatttgctcctttggtcatagatacagccctagatatcagagaatgccaatttcttgaaagaacagaattagtataaatgaagagaccagctggttctgaataaagcaaataaagtatagttcagaaaacagaaaataattttaaacatgttcttagtcagattgcacaggtctgccatcccagcagggctgaggcagaaggattgcaagtttgatgccatcttggggtacacagctagatcctacctcaaaacaaatgagcaagtaaactaaacaagcaaggtggtggagaatcccaaaatttccttttggaattttcagaaaaaaa

SEQ ID NO: 4997 - DNA, 1800 bp, mus musculus
acagagaagaagtacattcttttgttttaggatgaaatgttctatagatatctgttaaatccatttggtccataacttctgttagtttcaatgtgtctctgtttagtttgtgtttccatgatctgtccactgatgagagtggggtgttgaagtttaccagtaatattgtgtgaggtacactgtgtgctttgagctttagtaaagttacttttattgttgtgtccaactcgaccagcaaggaaaacgcaaccaccagttcttctgaatgcagtttacttaggcagcttctctcttcaactccccccgagcctcggggtacaagcattttttatgcactcaagccacaaccatgcctcaaccaatcaccacaggtcacatcacctcaccaggcaggcttgctcagccaatcagggattaagggcaagccattcaccaaatatgggcttgtttactgcctggcacagatttccacccgggctagccagggagtccggaatggcttcccacaattcccccttttatattcttttgaagaaagctccatgggtgaagatagaggtctgatacccagtgtgcagaaataggggccatgtacaggattgactcttaggctcacaggtttttacccagagcaaccctgacctgctcctgtgccgtttttcctgggggaaggacactaggacactcaaccctcatgcaatcagacatacctcccagagattgtcaaacagcttccagactaacctctgtgtagtgcttagccttacaaccctatggagtgatggcttcattgttcattcttcatggcagcaagccaaatctgaggtgactgccctgcttccactgcggcaaaagcttgtgccactgtggcggcagtgcgaacctgggcattccacaagcgacacatacaccatacacacaatatgcatgccaaaacaagggccacagtgagggcacctatcccagcccattctttcccagtgccaactcaggatccacatgggtagaattcacagtgacaatcgccgagtgtagctcattcatcttgccatcaaaatttctaatccaatttcttaacaggaatttcttaacaggaagcatcatgacgaagaggcatcggcttgggaaacactgacagtatcccccatctgggttccgcacccatcaggggcagacacatgctcatcaccagcaagatcagcttcttcattttgacaatgtcgcagtagccgctctggaacccacactgtgttgcgcgcactcaactggccaggaagaacgacgctgcaacaggatctttctgcacacgtttattcagtcctgtttcttcttgtttatatctcccttgtttatatctcccttgtttatatctcccctgtttatatctcccttgtttttatatctcccttgtttatatctcccccgaaccctgggcctctcactcttttatactctcagttcccatccacgcacagcaggccacgccacctcaccaggcaagcagcttcagctaatcagggcagcaggggcaaatttccatcaaattggattcacctgtatcctggtacacctgcgcagcactcaagatgtttgtgtcttatatgaggaagtcaggtgcaagtcatatgacttagctgcagtccctggcgcctttgggactgccgccacacctgctcctaacatctcccccttttttcttttctggcagagagaatgtctgtagatagccccccgcagccatgccccttacccgtccttgggtgacaaacagcattggtttgatccctgtcttaggttggt

SEQ ID NO: 4998 - DNA, 1000 bp, mus musculus
gctcacctctattttatcgaggtccttcccaaactcctggggtcccaagtttcactcaccgtgaacttaccctgccagcaaccactgactgctgaaagttctgaactcggtgggggagtcggttccccgtacgggccaccaattgtcgcgtccgctctcgaccagcaagaacgacacgaccaccagtccttctaacagcagtttattcagtcctcatctctctcttcatcagtaccgttccccagctgaagagttctgaatccacaccagatccttctcaacagtctgttttacgggaacactttattaaccactccttccccgtgatgcagttctgaatcctccctgtagcagggggtcttcgcttgtgcctgaagatgtttcttgtcccgggttttctcgtctcgggatttctcgtcccgggtcttctcgtcccgtcccgggtctcagcaccaactgttgcgcgcactcaactggccaggaagaacgacgctgcaacaggatctttctgcacacgtttattcagtcctgtttcttcttgtttatatctcccttgtttatatctcccctgtttatatctcccttgtttttatatctcccttgtttatatctcccccgaaccccgggcctctcactcttttatactctcagttcccatccacgcacagcaggccacaccacctcaccaggcaagcagcttcagctaatcagggcagcaggggcaaatttccatcaaattggattcacctgtatcctggtacacctgagcagcactcaagatgtttgtgtcttatatgaggaagtcaggtgcaagtcatatgacttagctgcagtccctggcgcctttgggactgccgccacacctgctcctaacaacactggctctgtgcgattctgtggaaacatgcaaacagaccctctcgcctaggccaacacgggatccgggccattccatgatcctgtaagcacatccttccatttagcataccccagtttactg

SEQ ID NO: 4999 - DNA, 1000 bp, mus musculus
cttagcccatatcttctccggtatgaatttcctttatcctttaattattccatggagctccaaaccagcagtgcctcttccaaaaatcctttgccgtttctcagtcccctgttggttcgccaaatgttgtgtctggccagtagatcacaacctgggttctagcctggaaaggcattttggaaacctggaagagaagaggggctgggctgctcaagataaggaaggaaccaagacaaagctctctgctcaaggttcaatttttactatttcggcactccattataaaggaagggaaaggggcccaattcccgccaaataatcttggagtccagtagcagggtgatcatgtggcagcgtcgagaacagcaaagcggcaggttccagcagtaggcgtggcagaaagattgagcgggcagctccacccctgagcaagcaggtttcaggctgggggaggggagactacaattcttaccattgtagcttgtatttatgagatgtatctacgttgtagttgtatctatatattcatcatgaatacatctacatattcagtacagccttccttgtctgttgtcttcagctctctgctgggatgatttggctcttctgtgactactgcttgggaggattctattctttcagaggctaccttctgagttagtgaagtctctcctcgggcatccttgctgcctccttatacagcacacagacctgccagcgctttactttctatccccgagactctctccacttaaaaactccctttagatgtcctgctatagttgactggaaaatgtcccacaggctcctagatttgggtgtggcccctacttggtgctactgacttgggggattgtagaatctctgggtcctagcgcctggctaggggatgatgtaactaccaggcttgggacttgagagctccaggccattcctctaccccagatcatctgtttctggtttattacaatgtaaggaaacacccgaccccctgcccccc

SEQ ID NO: 5000 - DNA, 1000 bp, mus musculus
tttttttttggctttttaaaaaaatgtattttatttttttcttactcactttacatcccactcactgcccccctcctggttaccccctcccacaatccttccctcattccttctccccttctcctctgagtgggttggcccccctgggtaaccctttatacacaccttggcacttcaagtctctgagaggctagacacttcctctcccattgagaccagacaaggcagcccaggaagaagaacatatcccacatacaggctacagcttttgggatagccctcggtccagttgttagggacccacatgaagaccaagctgcacatctgttacatatgtgcagggaggcctaggtccagcctgtgtatgctctttggttggtagttcagactctgagagtcccaagggtccagattagttgactctgttggccttcctgtggagtttctatctgttcggggtcacaatccttcctattgttcttccataagagtccctaagctccatccactgtttggctgtgggtatctgtatctgtctgagtcagctgctgggtagagcctctctatttgcaagcataacagagtatcattaatagtgagagggattggagcttgcccatgggatgggtctccatttgggccagttattggttggccatttcctcagtctgatccatctcccatccctgcatttcttgtagacgggataagttttgtgggtgggttggtgtctttatcactccactggggtttctgcttggctacaggaggtagcctcttcaggttccgtatccccagtgcagtgagtcacagctaaggtcacccccattgattcttgggcgcctcccttatcccaggtctctgtctcgtcctggagttgaccccccccccagctcctcacctccatcagttgcagatttctattcattttcaccccactctcaccaattggcaggacatccagataaaaactaagcagagaaataatgaaactgacaga

SEQ ID NO: 5001 - DNA, 1200 bp, mus musculus
tgaacagcctctagtgagcaggagccctaagcatgcctcagatgctgggacaatcctgaaagtgagaccaatactcttaggaaaaaaagtggaaaatcggtagtgctcaaacaagcaaacaaaaactaccaaaaactacgacattaacaagacagtttctcccagccccatcatcattactcccgttagttcttttgacattaacaaacatggttacagcaaataataagacgtatcttataaattaatgtcttaaattaatgtttccaaggaaagttcaaagttaaataggaacaaagtgtgttttcttttatgctaagctccaagcttcccttatcattaacaaattgcaataattttggaaataatcactgtaacaatccaaatcttcattaggttaagtgtaagtaacatctatcgagggccaggacatgcatggcctctgaaagacagaagaaccctggcaccaggtggacacatttcaagcctgaactctgcagttggaccccctagtactctgatgtgatagagatgtggaaaaaggtgggtggtgaaggtcaaggtgagagcaggaggccaagcagagggcagaggaagggaaccatatcttaagactaggaagggactgaaatggggcagtgggcccgttggtggaaggcaggaaatccctaggccaactcggggcagaaggaaagtgcttgaaggcaggaacccagggggtggaagagaagtggggaggagacagctgaaggactggagctgctgggaagagggtgagaggcaccacagtggagaccaagagggatgggagagagatgagactaggggggacccaaggacagaaaggcccgaagaaaatccagactgtgagcccgacctcagcgcacgccacggagactactcacctgcagtgtcgcctggcacccaggtgcccgcgtgcttcgttgctaggacaccagtaaacacccgcccgccgcgctggaagccccagcctgggaggaaacactgagtgactccagcctctagtcgctgctgctcagaacccagagccctgcatcttgaaaacaccaggattcttccagcagcctgcagagccctagggctcatgccagctcagtctaggtacttgggagcagctttggaaatggaagagagggcactcagaaaagagacattagaatatcctgtgatgtttcacgg

SEQ ID NO: 5002 - DNA, 1000 bp, mus musculus
caaaaaaataagctacagaatactcaggatacagtccacagaactcaaaaaggttaacaagccgaagggcccaagtgaggctgccttaatcccacttgggaagaagaaagcaatcacaagaggaagaaggaagggagggacctgggtgggaaaggggacaaagaagaggggaaaatgatcagatattgggtgggggaaaaagactgaagccttgagggccagcagaaagaatggaaacaggcaacctcaggaggtaggaggtggggggagcctccagagatctgggaggtgagagactctcaggactcaaagggaggaaccttagatgaaacgccctacagcggggagagggaacttgtagagtccacctccagcagacagacagggcatcaagtgagggatggggttgccatcccagagttaaaaactatgaaccagaattgttcttgtttgaaagaactgcagggacaaaactggaggaagagcctgaggaaaaggaggtccagcaccaagcccaaattgggatctagctcaaggggaggctcccaggtctgacactattactgaggctatgaagtgctcacaaaaaggggcctatcatgattgataaggggccctcagaaagacccaacaaacagctgaaagagtcagatgcagatatttacatgtaaccaatggacagaagctgctgaccagtctggttgaattaggaatggctgaaagctgaggaggctgaccctgcaggaggaccagcagtctcaattaacctggacccctgagatcgctcaggcactgggccaccaaccaggaagcatacacagctgatatgaggcccacaacacatatacagcagaggactattgggcctgggttcagtcagagaagatgcacttaaccctcaagagcctggaggccccagggtatggggaggtctggtggggtggggggtaggggaggtggggacatcctcatggagataggggtggtgggaggtatggga

SEQ ID NO: 5003 - DNA, 1200 bp, mus musculus
aaaagttaaaaacagcaacaaaaacatcgaagcaaacaaaagaattaccatagtcttggtgtctctttacaacaatagaactgctagggcagtatgcatatgagtatttatgtgcatgtacatgtatgtatgtatgtatgtgcatgtacatgtatgtatgtgcatgtacatgtatgaattactgaagctttatctatgctcatagtgaggacattcatgttattggttctgctttcaagttttcatgaccattgtttgtgtttgtattatgtatctgtttctctttgtgagtgtgtttatgtgtacatatgcatgtgtgtgtataatctactcaagcctcatacatgtttatcagtgagtatacatgcttccttgtgaggagcgggtgcggctgctgccccaagatggtgcccaggacggctgccaggtcttatgacctgcacctgacttcctcattatctcagacttagccacatcccagctgcctgcactgcgcagatgtcagctcgcctgaggtgttgtcacttgctgtgaacctatggctgtgtgactggggtgattgggaggagtcagtagggtatttaaggtgctccccggggttgttcaggggattcctgttcctgcattgcaatgctaagtgttactgaataaacctgcttgaagaaggacaacgtggtgttgcgtctttcctgctggtcggggtggatgcgacacttcctttccttgctttttgatcactatgccctgtgatggttccagctacccgaagtgtgatgtgggtcacacaggaatttgcagcttccttacatcaatgcctatgctatctaatctaactctcttagaagaaaacccctgagtgcacaagacatgaacagagtcagtgtcctttattataaagcactgtagattcctccatgtggtttactgtcaattccttctgcaattcagagcccagcctgtggaacacagtgtttagcatgttattttaagcagatcagtataggaaacatgctgaaaactcattctgaacactgcttttgtgaaagacactcaagcagcgggagagtgaaaacttgttggcttttagtgccttcaagggcctgcaccaaaccctgtgaacctggccaagtttccatctgaagaggcttctacctttaaccctaagtattgatatcttgggagatgacctaactattctgg

SEQ ID NO: 5004 - DNA, 1400 bp, mus musculus
actttggatccatagtgacagagataataagaaataaccaagaatctaatataaaacaacaggacatagtacatgatctaaaaaaaaaaaacctgaacgggttagaaacctgattttgacacaagaatcacaaccatacactggaaacaggagtagcaataaatggtgctggtatagcaagacatcactcgcagaggaatgaaatagatccgtatctttcaccctgcaggaaaccagttcaaaacagatgaaagacttggatttaaaacttgaaacaataaagttgctagaggaagagaatgggaaaacatttcacacaaaagcactgaaggaactctctgacaagaacttcaatggcagggtccatctggggacacagctagcagaggtgagctgtgatctgtctcctgacctccatcatctggcccacaactctctctgccttcccagggtggcctgtggtggtattccatgaacatcaaggttagatcccctccccaagaaagtctctgcctgctggatccacctgggacactgccagcagaggtgaacagcttgcctttccctaagatccattgttaggtccatggctctgtatgttgacatcagaaacatcctgccaatagcaaggacaaccagagagttaacagacagtataagaaaataatcaacaagagcctggaaaatatgtcatcaccagagccaagctctcttgcttttagcaaacccttaatatcttaatacagccagaggacaaaatgatgatcttttttgtttgttttatacgtcatttatattctttttttttttttttttggtatttatttcatttacatttccaatgctatcccaaaagtcccgcacacgctcccccacccactcccccacccacccactcccacttcttggccctggccttcccctgtactgagtcatataaagtttgcacgaccaatgggcctctctttccactgatggctgactaggccatcttctgattcatattcagctagagacacgagctccggggtgggggggggggagggggaggtactggttggttcatattgttgttccacctataggattgcagatccctttagctccttgggtactttctctagctcctccattgggggcactgtgatccatccaatagctgactgtgagcaaccacttctgtgtttgctaggccctggcatagtctcacaagagacagctatatctgggttctttcagcaaaatcttgctagtgtatgcaatggtgtcagcgtttggaggctgattatgggatggattcctgggtatggcagtctctctagatggtccatccttttgtctcagctccaaactttgtctctgtaactctttccatgtgtgttttgttcccaattctaaga

SEQ ID NO: 5005 - DNA, 1000 bp, mus musculus
tcctggtaaagttgacagcatttttaaaatgtagttcacctccttggccctgaagataggaagtcagtgctttttagtacatccggtagtcctgcccggacctgcaaagcccagcgtgctgccttttctggagacctaatttcattggagaagcctgtgcttgttcttagaaatctctgggtcactcctccacagggtccaagcttctgaagaggcttgacaatgtgtgtgctgtagagaacattgtcccatgtcactgctaccctaagctacacagtgtgcctacattttgtactggaaatagttgagaagtgttaatcactctcatacgagcaaagctcctagggagatattgtggtacatacctataatcttattagcatttggaaggtggtggcaagaggattagccatttaaaaccagttttagcaacatagcaagtttgaggctagcctggtctacatgaaaccctgtcttaagaacaaaaaaaaaaaaaaggaaaaaaaaggcaaagtcattttatgtatgttcactcctgtcctagacaaaggttgccttaaggaaagcagatggcccaggtgcatccacgaacatccttaatcccagcatctgggagacagaggcaggaggtcgatatgtgccccaggctgactagggctgcaggcaaggccctgtgtctcaaagaccaacaaaaggcagcagacctcagtgtctcctgcacttacctttctgtttaatgatggtaaaaggcccttgggtcaggatcaacattttgttgagccacttttgtatacatttattagagaagtggcctttggaaggaaacaggagctctacggctatttgtcattcacctccaacatgcagcagtcatcttggggaggtgttgcttagtccctggagcctcactacctgttggctgcagtgtcgagcttcctggtaccatggtgcagcagggtgccatggtgcttacactgttctgtgcagcctcacagcagcc

SEQ ID NO: 5006 - DNA, 1000 bp, mus musculus
ctaaagacgaccatgactccatggacagactgcatttctgagttggtttggacacaggacaggtctgagaaagtcatttgtcctatgctcagacacttgcttttgtttgtgttgaactgatgtgaagcaggtgatgagaccaagtgcctcagatcagggcttgagtgctctctggttcgaggaagcagatatcacctgacagccaagaggcagctgcagagttcagcctcaggtagaaacttgggtaggagccttgggtctaaggaacattgactaaggacatccctggaaagtgtagcatagatagctcttcctgctgttttcccaacaaggacaaaaggaaatatgtttatacatggtgtgaatgagtcaaggatggatgagatagagctccctgggaaatgcggatttcatgttatccatgagcacagagggtaggcagcttgtctaccagagaggaagaagggacctcagctcatttatcctgtttccaacagggaggtggtgaagaaggggcagaacaagccctggacgaaacctgctactgtaaaaggtaggcttctgctttcctgtggaaagaaattccacctggcttgccccttagcgatgaggttcatgatgagagccatgattctgaggacatgagatgcaggaaggaaaatagtatcaaggaatccccaggttttgtgatagaaggaatctatggttggctggggatgagtgctgcccatgggagtgttgttcaaggcagtggagtgttgctgtgctgtgtctgggggactccgaggtccacctgacagaaggtggaattctcccatctacatttcgctttcagatgactgatcctgtgctcctcacagtgtggtatggggaatgacaggggctgagggaggagcaaggaaagtgtaaatggagaaatgaggtccctcaattcccctcgctcactttcagtgttctgtgtccttggagaatggtgcttgagattacaatcatagcatgg

SEQ ID NO: 5007 - DNA, 1000 bp, mus musculus
gttagaaagttcaaggccagacgtaccttgtaaagctatacttacgggtaccttgttccccagctgaagagttctgaattcacgcagttgaatccttctcaacagtctgttttacgggaacatttcattaccaccgttccccagctgaggagttctgaatccaggctggatccttctcaacagtctgttttacgggaacctttatgaccgtgacccgcagttctggttccagaatgaaggatcttccttgcaccggtgatggttaactcccgtcccgagttttcttgtcccgggttttttcgtcccgggttctttcttcccgggtttcggcaccaactcttacacgcgttcgcgaccggccaggaaagacgcagcaaaccagaatcttctgcggcaaaactttattgcttacatcttcaggagcaagagtgcaaaaacaaaagcaaaagcgaaaccccgtccctattaaggagagttatccttcgcctaggacgtatcactccctgattggctgcagcccatggccgagttgtcgtcatggggaaggcagagcacatggggtgaagaactacccttggcacatgcgcagattatttgtttaccacttagaacacagctgtcagcgccatcttgtaacggcgaatgtgggcgcggcttcccacatttcctaattgctttactcggctgagtgcttgtcttgaagtgttctaatgtcactgggacatcaggggtgttctgtaccacttctcctccctccttctggttcagtgattgggactgtaacccagagtcgtacgtatgctagagccccagtccaccccgtcctcatctctgggccttcagctatgaaaactcacatctcagacctctcaaataccaactttaaagaattattttttctttgttaacttttctcatttcatttcagttgcttgataaaatatgatagcaaaatcaagggaggagtaaggagaaacagatgcacccatgctgcctgttt

SEQ ID NO: 5008 - DNA, 1400 bp, mus musculus
ctttttggtttttagagacagtttctctgcatagatagccctggctgtcctagaactcactctgtagaccaggctggccttgaactcagaaattcgactgcctctgtctctcaagtgcagggattaaagatagcgccaccacgcccagcctgtatttctttaaggaaggtactattccctccttaaagtcctatcatcatcatgagaagtgattttagatccgaatcttgcttttttggtgtgatggtgtatccaggacttgttatggtgggagaattgagctctgatgatgccaagtaaccttggtttctgttgcttatgttcttatgcttgcctcctgccatctgaatatctctagtgctacctgcccttgatatctgactagagcctattcttcctattattctgcttctgtcagaactcctcatagtctatctgtctttgggatcctgtgattctgtgatcctgtgatcctgagatcctgggtgtgtcagagttcctggaagtcaagctgcctctgggaccctgagatcctgggattctggcatcctaggatcctgtgaacctggctgtgttagagctcctgggatttgagcatcctcagagtgctgtggtattggcttcagagtttgagcccaaggtaaaccagcacagaccattaggaacctgagccactggtcagacagtggttcctgcatccctggatcctattggtcccaattattcccggtggtattagaacaaattttgtgtcctattcacccctgatcctacgatcctaggcgtgttagagcacctaggagtggagcttcctctgggtgctgtgggactggcagcagagtttacaccccaatgcagtcttttattatggcatgtttttctggtgtcttcatcaaaaatcaggtgtccagaagtttaaggatttatgtcacagttttcaatttgattctattgaatgatgtgtctgtttttatgttgaaaccatgaggcttttattactatatttctgtagtacagctcaaaatcagggttgtaagacctttagaagttctttcattggtcaggatgttttagctatcctggagtttgtttgttttcatttgttttgtttttgtttttctatatgaatttgagagttgtcctctcaaagaattatgttggaattttgatagggattgcattgtatctgtaggtaggatggccacttttacatgagcatgggagatctttccatcttctgatattttctttgatttctctcttcaaagatttaaagattttctcacaattaggagttgtgtccttgttggattaggtgtagtcttgttggacaaagtgtgtgactgggggttagttttggggtttcagatgctcaagtcaggcccactgcctctcttttc

SEQ ID NO: 5009 - DNA, 1200 bp, mus musculus
tttatatgagaaagagataaaaccatttctctctattaaccaggaaaccataaaggaaacacatctcttctgacagaaaaactattaaaagaaaaaaaaaagtcttgctttgtttatgaagacatgtaccagctaggtcctaagagccaaggggaaaaaaatcataaagagatttcccaaagaaatccctgagccaaaatcctttcttaggtaaaaataccatctcaggcacattcctcccctgttgtgcttgcatgagcagatttcttccttgttgaaatcaccttcagaaaatgaatgcagtctccatgaaaagaaaagcttcccatgggggcaagacaaaggaaacaaactaatcctcactttcaactacatttctttgttttagttaggatctagaatgttctggaacaggagtctttgagaaatttcagacctttgaaatataactacaccagttaatattaacaaaaagttttaaaattatgcttttgaatttttactgggaaagtttttatagttcaggagttttccttaaactgtcaagtaattattctttgtaaattccccaacctaactaacattcatgcaaaacatgttctttcctccttcaattcaaaggcatccctgatccagtataattggtcaagccacaagcccatgacaccgctcccacaacttgcacactttggtggtttgaatgaaaatgggttccatagactcatagagagtgacacaattaggaggtgtagacttattgaagaaaacgtgtcactggggctggacttggaggtttcagaaactcaagccaggcctataagctcctctcttttcctgctgcctgctgatctagatgcagaactctcagctacctctccagcatcatgcttctcaccatgataagaatggactaaacctctgaatcattagccagccccaattaaagagttgctatggtcatgatttttcttctcaacaatagaaaccctaacaaagacagatactaatcctaaactctttgtttttattatcttaggggagaatcctacatcctgatatgcaatgtggactcttattttcttttggagttttaagaagatgaaattgctagttataaacccatttagacctacaaaaacagaaattttaccttgctcaactcaagcatggttttgacttgtctcttctagacctgtctct

SEQ ID NO: 5010 - DNA, 1200 bp, mus musculus
actttacagatgagagaaccaaagctcaaaaaggcaaatgacttctgtgtgtattcatgactagtaaacagcgtgaccattaatcaaacctgtatcttctgacggaaaaatgtctgttctttccactatgcaacactgtcttgtcccaagatatgttaaaaaaaaaggttgtttgtttgtttgttttctctaatgtggtctgacaagtttcagagtagaaatagggcttacttagtagacccacttgtgctgactagtcacacattaccttgacacaggttagagtcatttgggaagcagaaactttagttgagaaagtagtaccctcatacaagcctgagggacattttcttgattaatgattgatgtgggaaagctcagactattatagatgatgctacacttatagataatggtcctggatagcaaacagaagcagactgagcaagtgatgaagagcaagccacgaagcagcacttacttacatggtctcacatccaatttcatgcttctggttcctgctttgagttcccttcattgtgttactgggctatgtaaactgaaagaaaccctttcctcctccccaagttgcttttcatcatgatgggttttttgtttggtttgttttggttttgcttttttgagacagggtttctttgtctgtagccttggctgtcctggaattagtaatgtagaccaggctggcttcaaactcacagagatccacctgcctctgcctcccaagttctgggatgtgccaccatgcctggccttgatcatggtgttttatcacagcaatagaaagcctaagtaagataccacttgtgtaaagttatgttgtttttatttagagatttttgttggttagcatttcaagttttgaagtggagacttgggttttactacatttgttatccaagtggctttgaaattgtgagatcaagcatttgtcctaccagttagctaggacaacaggcacaccaaatgactgcctcctgtaatttttttaaacttttggattcagagtagtactcatagtattacagaattcttaaatatgctgttgtatttaaataagcatctgcaaaaactcaagactatgaggatgtcatacaattttggtgtcttagtggttatgtcttagaggtgaaactatttttaacagtatacttagctaatggatatccaatagagttttgc

SEQ ID NO: 5011 - DNA, 1400 bp, mus musculus
tagatggtatctctccatgaaagaaaaccaacattaggagctcattttcagggagattagcctacatattttattgcatgtggcttcattaaatattacaaaaatttctgcaaaactcaataatgtagtgtctccaagtcatagtttgtataaattagagggaatgaaaaatacatgttgggaatacatcacaggctctagaaaacaaatataaaccacctctttcaacaaaggccactgcataaattaaacaaatccaaactatcttcaaagataaaccaatgaagatatttaaaaatgaaaatgactgctatacttggtcatactggaggctccacactgttgtttaccagatattataaggactttttatagagaatatacttaaagtaggtcacaattggaaacaattaagaaatcactctgcatgtgctatctccacacccacctccttccttcttctggctccattgtaaagctaccactccactccagtggcctccaacagacctacctaacaaggagcatccaagttaaatcccttcctattgctttgcctgtctctgggagcacacacagctgctctgagctagctgcatgctgttcctcaagctccattgtctggctaccactcctacagcctccaataggccccatacaagaaacatccaggcctgctacaccaataacatccagaccaaggctgcccacaggagtcctgcttcatggggaacacctgggtcagaactccttccggatacttgttacactggaaacatcaggggacaaccaaatggacaaaagctagaataagaacacagagaagacccagggcaacattggaccttcagaacaaaggtataccactacagcaagccctgtatatcctaatacaaatgaagcacaaaaaatgagcttaaatcctcccttataaagattataaatgcctttaaagaggaaataaattaatccctcaataaatacagaaaatacaattaaacaggttaaggaaatgaataaaactgttgaatacctgaaaatgaaaatagaagcaataaaaacaatctgaggttatcctggagatagaaaatataggaaagagaacagcaacatcataggcagccatcaccaacagaatacaagagatggaagagagaatcttaggtatggagaacatgatagaagaaaatgttttactttattttatttttttaaaatgttaaatcttagaaattcctgaaacttccaggaaatctaggatactatgaaatgacctaacataaaaataataggaacagaaagtgagaatccaagccccgaggaccaaaaaaaatattttcagcaaaatcatagaagaaaattcccccaacctaaagaaagagatacctataaacatacag

SEQ ID NO: 5012 - DNA, 1000 bp, mus musculus
tctttattagacttattctttttttaaaagatttatttatttattatacgtaagaacacactgtagctatcttcagacacttacaagagggtgtcagatcttgctatggatgtttgtgagccaccatgtggttgctgggatttgaactcaggatcttcagaagagcagacaatgctctaaccgtattagacttattcttaaataattaccattggaatgtgcaatttttaatttttattggatattttctttatttacacttcaaatgttttccccattccaggtctcgccttatggaatcccctatcccatccccctctccccctgcctctatgagggtgctcccccatccacccccacactcccatgttccagctcttgcattcccctacactgggccatagaacacccccagacccaaaagctgctcctcccactaatgtccatcaaggccatcctctgccacaaatgcagccagagccatgggtccctccatatactctttggttggtggtctagtccccggtagttctgggggtctggccggtagagattgttgctccaaccatggggttacaaaccctctcagctccttcagtctcttcttcaactcctccatcagggactgttctcagtccaatagttggctgagagcatcagcctttgcacttgtcaggctctgtcagaacctctcaagagatagccatatcaggctcctgtcagcaagtacttcctggcatccacaatagcatctgggtttgatgactgtatatgggatggattcccaggagggacagtctggatgggctttccttcagtctctgctccacactttgtctccatatttttattttcctgagtattctgttcctccatctaggaagcatccacactttctgtcttcttgaacttcatttggtctgtgaattgtatcttgggtattttgaacttttggggtaatgtccacttatcagtgagtacataccatgcgtattctttt

SEQ ID NO: 5013 - DNA, 1000 bp, mus musculus
atcattttcatagccacatttataatttagagatctatctcgatgagttcctggacagacatatatacctccagtgtgtaaggccagggcagtatgatgtatatcactgctgcaacctggatcaatctttttatcacctgtgttaactgctgttaattgaggcatataataatcaggggtgccccaggcggcatctgcacccaatgtgaggacacagatgtctacttctaactcggaccaatggggctcagcaccaatcttggagctggaattaactatgtctccagtctgattttgaataatccaagcatagttaaaaacctgataggtctgggcttgcctggctgtcactgtcatgaccagcatcatcaatattgtgagagatctatccatggcgatcctacaagagaaaacataaaacatctcaggcgccaccctgggtggtattaaatggcttaattagtctttcagggagccatctggctcccccttccttggaattatagatgcaggctgagccttttgcccagatgatgatggggtctggcccattccaaatccctgtaaggggatctttccacagtgcttgagcatactctagactggtcttaggatgccaaagtcggtcagctgctgagcgaccacttatgtctagagttaaaaagttaagcacaaaaagcacatgagacagtagctgttttgactttcctttgagggtgtagatagtctcttgggccccgagcttagtcagggtattctttaaagtctgatgggccctttcaacaattccctacccttgagggttatagggaattccagtaatgtgcttgatctgtaattgtgcacaaaactgtttaaacttaagactgttatatccaggaccgttgtctgttttgataattttgggctgtcccatgacagaaaaggcatacaatgaatgatttataacatctttggtagcttctccagtgtgggcggaagcacacaaaaacccactgaa

SEQ ID NO: 5014 - DNA, 1200 bp, mus musculus
gatttttgtgctgatgctctcttatggaatcttctgcatctgagattctctcttccatctcttgtattctgttgctgatgcttgcttctatggttccagatttctttcctaggttttctatctcctgcgttgcctcactttgcgttttctttattgtgtctacttccctttttagggatagtatgcttttgttcatttccatcacctgtttggatgtgttttcctgtttttctttaaggacttctacctgtttgtttgtgttttcctgtttttctttatggacttataactttattagcagtgttctcctgtatttctttaagtgagttattaaagtccttcttgatgttctctaccatcatcatgagatatgcttttaaatccaggtctagcttctcgggtgtgttggggtgcccaggactgggcgaagtgggagtgctgcgttctgatgatggtgagtggtcttggtttctgttagtaagattcttatgtttgcctttagccatctggtaatctctggggttagttgttatagttgtctctggttagagcttgttcctctcgtgattctgttagcctctatcagcagacttgggagactagctctctcctccgagtttcagtgctcagaacactctttgcaggcaagctctcctcttacagggaaggtgcacagatatctggcattcggacctgcctcctggcagaagatgaaggcccgaaacagggcctgtccctgaagctgttagcttctgtagtccacactctcacctgcgcagactagtctcagagggatccgagaaccaagatggtgcacccaggtgctctgacaaaccctcctggttggggaggccacctctcctctggcagggaaggtgccaggatctctggagcccgaaatgggatctgcctcagaagctatcctgtagggaccttgggggtgtctgctgaatccatgcccaggtgacccggtgctgatgccgacctgaaggaattttgaccctagccaggcgggcttttctgcttccctaatgctgtctcaggtccgggataattggattggaacagaagttatgttccactcaccagtggtcctaagattgtgtggagagtcctctaggatatcttgggagcgttcaccaactccgtgcccaaggtgacccagtgctggtgctaactggaagggattctgcacatttc

SEQ ID NO: 5015 - DNA, 1000 bp, mus musculus
tgaccaacagagttgcctgtcacccaggaagtaaatataccaagtgacaggcagtaagggtctcttggtgtccactcataccaagcctagtaaacgaggaatattacaatgatatacttgagggagcacgtcattagcaagaagcagtcctgtaatgaggtctattgggttatgccacaccacagctcagccatcgcagctgaccatgatggtggcccatctccagggaacacacttccccactgtggttttgctgaatggcatctgccaaggtccaaagtatggtgggccatgcttttaacgccaaaattcaagagacaggtatgcagatctctgagcttaaggtgagtttatagagcaagatctaggacagcaaaacctagacagtgaaggatgaaatagaacaagggagcaatgttccagccctagaaagctgcagaacttgacagctttgtacatatgactctggctttagagtcaagagtagaaggcattactgggagagttaatgctggttagccggagctaagattaagagaccagtatcattgaggtgaaatcttctggaaaatgtttttttgagaacacaaagcagctgtgttccagaggtagaatttctgctggcagccagacttgataatatatgtaagcatgcctcaggttatattggttttgaaggcatggagggatcatggacagcagttgaggctggatgctgtgagacagcaggaaaggtcattggtgaaggtcttgtccctgttacagatggtgaccccaggactgaaatggtcatgcaaagaaggttacatttgatatcatgaagacagcctatgagaggctattggtgaagcctccttgcagaagaatatcccgcaaattcgagatgccagtatcatgggataatcatcaataagagcagcaacaatggagtagagtcagtccaagcctagagtgctacagagggcagagctggagaagtgaccaaatccttttggagaag

SEQ ID NO: 5016 - DNA, 1400 bp, mus musculus
gctttggtttatttgtttgtttgtttgtttcatggtacatcttgttttctgtatctgtgatgattgaaagttcttcttagtagtctaggctggcatcttctgggtctggaagacatctctccagcccatcctctggtcctatgattgtttccaaaacttttgtgttaaaacctttttagatttagcaatttctcctatcatctcttccgtctcttgcattcggttggtgatgcttgaatctgtagttcctgttctttttccggtgttttctccaagcagtctccaggattgcttcattttgtgctttctttattgcttctatttctattttcaggttttgaacaattttcttcatttttttcacttctttgattatattttcctgtatttctttacccaatttattcatatcctctctaaaggcctttatcagcttcatactataagatttaaggtcatttactagtgtttcatgtgcagtaggatattcagggcttactgtagtaagatagctgagctttggtgttgccatactaccctggcttttgttgattgtgttcttaagctggcctttacctacctggttatccctggtgtggcagaccttgtagtccctgatgagagcaggtctctgggattaaggatagagttagatatcctgtgtggcaacaggacttcaatgatgcaggcagtgttggtagtcctgggtgggagtcccttttgggattttggcaaagctttcccctaatagcaacaggcttatggttgtctctggtggcagcttacctcaagggatgcaagcagaagtggtggtctccagtgtctgcagacctcccagattgtgtgtggatccaaagatggaatgaagaggggatgggcagaactcatgctactgagcctgcacagagaccttgcaggcaggtgaaggaattgtgggaatctcacttgtttgtccttggtggcagaagctctctagggatgcaagcagaggtgtagcctaggtttttgaaagcagataggacagggcagagctttctgctgctgggttttcccagaaggtccaccctgcaggaaataaggctaggagtttcacctggtgggtggcacaggtttccaggatttcaggaagagagatgtggagcagaagatgtgctgaagagtggatcactgagacctcatggctgctctgtaatttttttctagctacatgtttttctagaaaatatttggcacacattttatatttaattacactgtttgaactcaaaatttccagtttttctaatttttaacatttctcaaatatttacaccagttttgttcttaagtaattttccttactacttcaccctttcttctctatatatcataataagagctatgtgtttgaagtgtcacat

SEQ ID NO: 5017 - DNA, 1200 bp, mus musculus
tcatattttatttaatgtattttgataatatgtaattttaagcttacaaccaaactaattaacaatcatgcttgaacagtattaactaacagttaagtttctctatcagacaaattgtatccatctcgaacttacaaacactagatagcatttcatgactgtatttaatggttatgttaaacagaaaataatgattagaaaggtgttggaaccgggtttcacctgggaggcaagccagggctgaaaagagaggggaactaggcggttgagagaaaaatggagctaagtcaagattcctgatcaaagctcaaatgtttaatggcaaatgcacttacttataaagggggtgggggtggggaggcccattcccgccaattcttccttggagcctggaaccagctgcaggtgatgtgcaggatagggtgtagtctcctgaatagctcaggggcctcttagcaggtagcagtggctgaacaatagagtgatctagggaggaaggctccacccaaggtaatctccttagtggtagcaaagtcaaggtctggctcagcctgcttcaaggctggaggagtctacagaaaggaacatatgtttgagcacataatctgaatcatatgatagaaagggcttttgttcataccatgagagttaaaaccagtaaatagagcattacattgttcagcctctgacagagcagttatcctatttgtctgtgtgtccctggataactggcaacaaaccaccatactgaatttgggtttagaaataaatttagtaattgaaagtccatgcaaatgaataacccacctacagaaaggatcaaaagtatttctctcattcttcatacctctgaccagtaaatgtgacaaagtccttgctataaatatctttcatctgatcagtgaaatgaaaatataaaagaaaaaagtggctattaaattccatgatcattttcagttaatttaaatatatattggcatatagtattgatctgatttatagtttgtttcaactatttagaactggatagataaccccattaccagctgaaacctgatactgcatcttttctctaccactctactctgcacctaaaacaggcattgataatcaactttacttatctagctctttctctacaattttatcatcgtctacataccccagtttccagtttcagttattttggaagacatatac

SEQ ID NO: 5018 - DNA, 1200 bp, mus musculus
cacatatatatttaagataagtatttaaaatgaaaataattccttaatatttatatttattgatctatagggttgctttattatggtttataaatagccactttaaaatactaattttttgtgtacctataaggtataaaaatataaaactctttatcattcaagatagtttcaagtttccactcggaacctgcacctggagcagacctggggcattggttctgtacctactcctataccaaccagagggatccagactctcaggtgctctgaaatgcccagaatcacagattagtagaccacaacatcttccccaacactcagagtaactggcaccccaggatgcagggacacagaaacctccacccagccagtggcacaggttccttccagtctaaaacctgcactgggagcagacttaggattctggatctgcacccactcttacaatacccagagcgagcctgtctcccagttctctgaaatgtccaggatcccaggatctcaggatcagaaggtcacagaggaagcttgactctcaggagttcagaaataccaaggaacactggagctctgacacattcaaaatcacagctgaggccacatcttttccaacacccacaggaactagggaaacacaaactcccacccagccagaggcatgagttccttccagcttacacctgtacctggaacaaaccagggtctctggcttcccaccaacccctgcaacatgcagagaaagcttgattcccaggagttttgacacaacaggatctcaagagcttggtcacaccaggatttcaggataccagagggaggttggctcccaggaactctgacacacccagaatctcaggatcacagaatctgacatgcacaggatcacagacgcagctggactgtgagaagttctgacacaaccaggatcacaggagggacaggctccaatcagagacagtaagagcaagtagaactagagataaccaaatggtaaaaggcaatcacaggaacataagcaacagaaaccaaggctacttggtgtcattagaacccagatctcgggggttggcgagatggctcagtgggtaagagcaccgactgctcttctgaaggtccagagttcaaatcccagcaaccacatggtggctcacaaccatccataacaagatgatgccctcttctggagtgtctgaagat

SEQ ID NO: 5019 - DNA, 1000 bp, mus musculus
ttaatgtctccagtccattttgatttaagaggacaaagtcaagatactttcatttatctattaaaaacttgtctatctctctacttgtttatgtatgtatgtattcatgtatctatcatctatctgcttatttaatgtagtatattttatccccaatcacaatcccccccttatctcttcacagtccctttcttagaaatccctctgcccattgctgtctcccttcctcctcagagaagggaaacccctgtggttaccacccctacataggacaatctaggtacatcctctcccactgagttccaaccaggtagtccaagtgtgtatatgtgagagaaatccaatggcagggaacagagactgagacaacctatattccatttgttacgggaactacatgaacaccagttgcacattttctaaaaatgtgtaggggatctaggtctagtatctgcatgttctcaggttagtagactctgcacttttctcgtgttcttgactcttcagaatttcttatctctacaccccattcttctaaaagactccccaggatctacctgatgtttggctgtgggtctctgcatctaccaccatccactgctggatgaagcctctcaggagacagttatgctagattcctatctgcaagcacctaaaagtctcattaataatgtcagaggttggctctctcatgtgaaaggggcagtcattggttggttgcttccagagtctctgctccatctttaccctgcatatattgtaggcaagacaagttttaagttgaagtttttgtgcatggattaaagttcccctcctctcctgtatattcttcctggctaaaggaggtagccaattcattctctatatcaccctgtggtaaaattccaagctagagataccacctcctagtagtctctttcatcccaggcctgaagtaatatttatctatatagcttaggtgtgtttcttataaggatgccattttgcatccattatgtta

SEQ ID NO: 5020 - DNA, 1200 bp, mus musculus
gaatactttaattcttgtcaatttcaagctgaatgttgaaataagaagtgagtgtgtggcttatacaggtgtccaaacacctcagaaataggaataactttttaatctgccaaattgacctgtgcttgcattagtttgtgccagtataagggattaatttacattgagctgaattgttatttattgagttagaattcaaaaaaacaattatctgtgtgctgatagtttagataaaatcccaaaattcccctataccctcccccaaccctgttcccctacccacccactcctacttcttggtcctggtgctcccctgtactggggcatataaagtttgcaataccaagggtccgactagtgatggccgactaggccatctgctacatatgcagctagagacacaagctctgggggtactggttagttcatattgtggttccacctatagggttgcctaccccttcaactccttcggtattttctctagctcctccattgggagccctgtgttccatccaatagataactgtgagcatccacttctgtgtttgctaggccctggcatagtctcacaagagacagctatatcagggtcctttcagcaaaatcttgctggcatatgcaatggtgtctgcatttggtgtctgattatgggatggatctctgtgtgaggcaggctctagatggcccatcctttcgtctcagctccaaacttcgtctctgtaacaccttccattagtgtttttttcccaattgtaaggaggtgcaaagtgtccacactttgttcttttttcttcttgagtttcatgtgttttgcaaattgtaacttgggtattctaagtttctgggctaatattcacttatcagtgagtgcatatcatgtgagttcttttgtgactgggttatctcactaaggatgataccctccagatccatccatttgcctaggaatttcataaattaattgtttttaatagctgagtagtactccattgtgtaaatataccacattttctgtatccattcctttgttgaggggcatctgggttctttccagcttctggctattataaataaggctgcaatgaaaatagtggagcatgtcttattacaatttggaacagacctctctttctttttctcttcctctcagccctaaagctaaataatatctaattctttcctactaaaaaatgatgt

SEQ ID NO: 5021 - DNA, 1400 bp, mus musculus
atattagatattttcattctacatcaaaagtgttctattcctattgaaacacattaattcaattgtagaaaacaatcttttaatacttgtctaaccttatccctcagcttataagtatcaaattagaatgtctttggatcaaattgttttggattaaattagattgtgttagagtgtatgttttacaaaaagcagtgtttgactgactgacttgaatttttaggaaagatcaatcaatgacacttgaattgagattgggacagaatccacaaacacttctgaaaggagcataaacttctgccatgtggaaaatatactcatgtgaagcagtattctcagcattgatgattattaaacaaagctgtcaataaattttgaaagagttgagagagggctatgtcctgcactattaagtattcattcaagatttacttcttcatgtggtaggtgagttgcattgtgggtattccatgttctttgcctaatgtccacttatcaatgagtacataccatgtgtgtccttttgtgactgagttacctcactcaagaggaaggaagaccaaagagtgactgcttcagtcctacttagaagggggaacaatataatacagggacaaggaacaaaacagaggctgaaggaaaggccatacagagattgccttacctggagatccatcccacatgcagacaccaaacccagacactatcactgttgccaagacgttcttgcagacaggagcctgatacagctgtcccctgaaaggatctaccagattcttaccaatacagatatggatgcttgcaaataaccatcagactgagcccagggaagccaaaggaagagaggaagaactgaaggagataaaggggccttatctgacatcaatgagagggaaggccattggtcctgtgaaggcttgatgcctcagtgtagaggaatactagggcagtgagtcaggagtgggtggttgggttggggagcacccttatagaagcagggtaaggggtgtggggtagggggtttgcagaggggaaactgggaaggagataacatatataatataaacaaataaaatatccaattaaaagaagatttacttcttcatttctttgaattatctctctcattagtatgtagattcactttcaacactagtaaattgttaattaataaggctagtaaagaactgcttttaaaataaatttattatgtacaaattttgagttttgaaattattatatatacatatttaaatagagtataaaagtttctttggtgaaaagtgttcaatataggacattttctgaggacccatacaactaggtgtgatatttgtctaagttatctaataagtacttcctaactatgttgtttgattcattgctttctaattaaaact

SEQ ID NO: 5022 - DNA, 1000 bp, mus musculus
aagtcccctatattctccactggccctactctcctacctacccactcccacttcttggtcctggcattcccctttactggggcaaataaagtttgcaagatgaaagggcctctcttgccaatgatggccaactaggccaacttctgctgcatgagctctgggggtactggttagttcatattattgttccacctataggggttgcagaccccttcagttccttgggtactttctctagctcctccataggagtgcctgtgttccatgcaatagatgaatatgagcatccacttctgtatctgccaggtactggcatagcctcacaagagacagctctatcagggtcctttcagcaaaatcttgctggcatgtgcaatagtgtctgcatttggtggctgattatgggatggatccctggatggggaggtctctggatggtccatcctttcatctcagctccaaattttgtctctgtaactccttccatgggtattttgtcccccatcctaaggaggaatgaaatatctatgctttggtcttccttcttgattttcatgtgttttgcaaattgtatcttggatattctaaggttctgggctaatatccacttatcagtgagtgcatatcaagtgagttcttttgttattgggttacctcactcaggatgatatcctccagatgcatccatttgcctaagaatttcaggaattcattgtttttaattgctgagcagtactctgggtcttgatgttttaatcacttaatattttaaatgtcagtctactggagaaaaccagtggaaaaactttaaggcctaagcattaccacatccagttttttcgcttgttgttttttttttttttaatgtgcacttggggcgggggtaggggtgggggtgggcactcttactcaggtctttgtccttgcaagacagacagtttgttgactgagccatcccttcagctttcaggagaacttttgtcaatgatccaaggacttg

SEQ ID NO: 5023 - DNA, 1800 bp, mus musculus
tggaggtggctcagtgggaaagaacacttaataatctttcatttgacctggatttggctcctatcacccatatgatcctcacaactatccctaccttcatttctataggatttatgtcctcttctgcattctggtaggcataaataaaacatggtatgcatacatacatacatacatacatacatacatacaccaaagcactcatatataaactatacttaaaagataaatttagggaataatttaaacaaaacagaaatagtatatttctttgattaagaaagtaattaaaatgtaatcaaaaactaaaatttatcaaagcaaagttcactttatcatgaaattgaccacctcaagtgtagaaattcaaaagtcctatgaaagtataaatattaatcaaaagaagaaaaattgagaagtttatatttaattagcaaaggaaaccagcttttatagcattagatataccttaaaaacttttatccaaactaaattgacataacttgttgccctgtcaattaaggtcaaagactaccagagtgaaaaagcagaaaacttcattggtagggcttcctcttctttgaccttgactagggacttaaaaacaaagctacatgcagactgttaggtagccatagttaaattacaggttcaacttactttctctggataagaaccagttcagctagaacctgagattcctgaaatgtttcgccatactaatgaggcatttttgtatcctcagtcttcttccaataacagttgcctaacctggatgattatatcccatcccacaaattacatgagctctgaatcatctcaagtaaagttcattgtgcctccctcaagctggtcctgggagtcttctttactgtacagactcacaagacttccaggtgccatttctgccatctctgctctcttggcacttaggaacccatataggctgacacccataagggcaagcagagtcccagaactaaataattctcctgtttgaattgtattaaactctcttcctcacagttcattgtcttaacaaaaagtcttaagatttactttcaattttgttatttcaaaattatagtaattgtgcttaggcataacatcatgaaataaatggttgaattgaattgtgcataattttagaaaagtattatctctgatgaacacctaagtagattccatactgtgaacacagtgaaacaagatactatcttgacataatgaatctcttgaatttggatatattttcaaaatctgtattagtggttcatgtagtgatatagttttaaaagagtatgaatacatatgatgcaaaatcaatgtgaaattccacataaagataaaaaacacagttattgtgagcaaaaagaagtaagccagtggctgaaaaagctcaccataggatgacttaagcctctgttatctgatttcatctcaaagtaaaattgtaacactctcttatgaaattattgctgtgttaataccgaattgtagagtagaatcatgaaagtattttgggaagaatgtcttaagaacctgatgaaagatttattccttatttcaaacagcaattaaattggtttttgcaaaatactgatatttggcctattgcgtggcaaacattttaggcaaaattgatattcattatgcaaaagacaagttgctacaatttgtctctatgcatacttttgtatttcctgtaaatttatgcatgcattccataaataatgcatctactgtatgtataaacaactcatctataggagagaaacatatgtaattgtatcgcatgtt

SEQ ID NO: 5024 - DNA, 1200 bp, mus musculus
gatttacataaaatgccaataatttaaagacgcttagtaaatagaaatatttcaaatgtcaaataatagaattacatcaattattaggatattagtaggaccaccaaaggcagcctggtttctggttgagctaaggttgcaaaccctggtgacactgaagaatggcaatcattttgcctggtttccagacactaggctcctgacacgaggctgcagccctccaaagacttgtggccatcagtcgtttaagggcaatgccccaagctcctccacaggtagaagatgtgaccacagataaccttaagacagatctccattttaatgaggtacctaaagacctggaggcttatccaataaactcctctttccctacatgcctccctgcaaaatgtatataaccttatcctgcccctgagaagttggatacagacccattcactttcctccatgacaataaatgtgttaaaactatggacttcctcttttcattgggatccattctggggagcaatggaagaggtcttcgcctaagaacctgctgtctaatctctcagagaaggcctctcatcgctcccagccacagtctctaacaagccaattcaaggactctatcccatggaatccagccagaggaccccctttccccttcaccccggggctagatccagccttttgggtgaccccactctgttctcagctctcctgctgcatccagcggagtctgcgtgccctgtgagcctgagaaccagatgttccaggtctccttgaagacccggggacacccaagccagcttcggctggctgcagttaagtgcaaactcctgtgtttcacctccctgagctgcctagcccattggcagagcagacgcaggaaaccacaaaccctacattactacttctatatgtcattgagtacaaaggttaattaatcaaaataatttgaaaaaagtaaatgtgagttagtttgggaaagaaaaatataaaacaacatgcaaagcctgaggtacaaacagaatgtgtgtgtgtgtgtgtgtgtgtgtgtgtgtgtgtgtgtgtgtgtgtgatttcaaggagttttaaatatagaaacgagcttaatagttactttagactctacatacattgtcttagtttggattattattcttgtgatgaaatgccacgactaaaagcaagtaagttaaggaaatatttatttta

SEQ ID NO: 5025 - DNA, 1000 bp, mus musculus
caaacgcagacactattgcatatgccagcaagattttgttgaaaggaccttgatatagctgtctcctgtgaggctatgccagtgcctcacagtggatgcttacagtcatctatagaatggaacacagaacccccaatggaggagctagagaaagtaaccaaggagctgaaggggtctgcagccctataggtagaacataatatgaactaatcagtaaccccagagcttgtgtctctagctgcatttgtagcagaagatggcctagtcggccatcattgggaagagaggccccttggtcttgcaaactttatatgccccagtacaggggaatgccagggccaagaagtgggagtgagtgagtaggggagcaaggaggggagagtttataggggacttttaggataacatttgaaatgtaaatgaagaaaatatctaataaaaaaggaaaaaaagaagaaatgttttatggactattaattttcagattatatctattatgacatttttatttagtttggatttgtatatgtgtatagagacaatgaaggtcagaagttaacttaggaaaattggttcattccttttaccatttggggcccagggatcaaaccccagtctttaggctttggagcaagcaccactatctgctgagccaagaaacagcccatagaaagtcttcaataagttgtaaatagataacttacatacattgaggattttgtaagttattatctaatttaagaaataactttatattaaaatttagtttttaaaagatgtatttattcattttatgtatatgagcacactgtacctgtcttcagacatatcagaagagtgcacctgttcccattagagatggttgtgaaccaccatattgttgctgggcattgaactcagaaccccaggaagagctgccaatgttcttaaccactgaacaatctttctaggccatcaatgtcatttttaaatctcagaattttgagaataatctttcaag

SEQ ID NO: 5026 - DNA, 1400 bp, mus musculus
caggcattatatgaagtgctaaagagaggcttctctctctgtaagttcatttaatcaagatgacttcaaagcccctgctaatctaagtatttgagcagaatgatctcagcttaatcagttatcccatctgggttttggttcaggactttgaagtgagagattttatcttatgtctttatttcttatgacagtgatgattctttcagagttttctaataaaataagtataagtaaagtactatataaaacatacatatggttgtcttcctagtggaatcatttgatgagaataattgccatttttttctttttattctattcatatcaacgtcagatcactttcttattagagaaattgattcttagtcaaatttgaaatataatttcttatgacttattcattttacatggatgcaaatatatctattgcacaaaagttcataactcaaaatcatggatggtgatattttaaaatagtaaaacaagcaaacaaacaaacaaaacaaaacaaaacaaaaaacttcagtactatcagagaaacaaatagccaaaaagtttacttgaaataaatgtatttgcacttccaatctgccatccgtacccatgagctgaggttgatagacagcctgctctccacggtcccgataggagagcactgttctcccaggagtgcttttactcctgggcttgaaggtgagatagtaactttctctccaataactgtgtgaaatgtggcagtccaggtgtatagggggcacaagatcagtggaacagctgggacaggatctttccagttgccatctgcacccagaacttgtgctgttccatagccctctgtacacaagttctaccaggaaagagctcatcacccaggagtgctgacacagacttacagaccactggccagagacagcaagaacatctaataccagaaataacaagatggcgaaaggcaaatggaagaatcttaccaacaaaaaccaagactacttggcaccatcagaacccaattctcccatcacagcaagttctggattccccaacacaccagaaaagcatgatattgatttaaaatcatatcacatgatgctgatagaggattttaagaaggatataaatgactcccttaaataaatacaagagaaaacagataactggtagaagactttaagaggaaacacaaaaatcccttaaacaactacaggagaacacaggttaacatgtagaagcccttaaagaagaaacacaaaaacccttaaagaattacaggaaaacacaatgaaacaggtgaaggatttgaacaaaattgcatctgtgtctcctgatttcttgtcaaggttttctatcaccagagttgtctccctttgtaatttccttattgtttctactttcatttttag

SEQ ID NO: 5027 - DNA, 1200 bp, mus musculus
cctccatttgtgttttctttatcgtttctacttccacttttaggtcttggactgctttattcaattcctttacctgtttgactgtgttttcctgtatttctttaaaggattcatttgcttcctctttaagggcttctatctgttttcctgtgttttcctatatttctttcagtgagttatttatatcctttttaaaggactgtattaccttcatgagataagattttaggtcagcgtcctgattttcaggtctgttgatgtatgcaaggcttgctgtggtgggagaactggcttctgataatgcccatgtacattggattctagtccttatgttcttgcacttgcctcttgccatctggttattcctggtgtttgctggtctgggtgattctctctggagtctgcctcttttgtccctgggttgcttcaggtctctcagtaggcctgcatccctggctgtagtagagatcacctatagggccttccaactgggggctctgcagtggagcagagaagctgccgatatgttgctctggctgcagtagatctcctgtgaggccttgagactatttgatcttcagaggagcagtcaagctgctgtcctgtgtgaggatgctctctaggtgggcttacagactgtggtttctgtttccctgtgtgcagcagaatgcccgggaggctttcagtctgtcaggtcagttaccatgcatgccacagagctcccaggaggtcttcaaactgtggtgtctgttgccaagttgctgtgtatacagaggagttccaagtatgccttcaagctgtgatgtcttcaagctggtgatatgttgctcagttggactgtatgtagcagatctcctggtatgcctcaggctgtggtgtcagttgccaaactgctttgagtgcagtagatcttctaggatggctcaggatatggtgccttcagaggagcagattggctagcagtctgccccagcaaaaataacctggcagaaggggaatggtattgggggaggagggttggtgagtgatggatcctgagttcactgggacttcaggggttggggatgggggttcttatcaactgctctgagtgcagcagatcctctagaatggctctggatattgtgggccagtattacattttggctaactagacaaagtattatcagctgacctttaagctgattctaagtgaagtaa

SEQ ID NO: 5028 - DNA, 1200 bp, mus musculus
acatgtcagccagatccaaagtcactcacagttttgtctagaatttgaagatctcttttacaggtagctcatcacatgataaaataatgttggctggtagcaaaagtttcttaaaagcacccatgagactcattaaaacatggcagcctgctcaccatggaattatgaatgagtttcaagatagaattcacaatgtatgagaaatcatatagttacttccacagcaatgtagtcctcaaaccagcattcataagtgtagcctggcaattctggctcttcatctggaagacaggaatgtcagtgtatgtgtgcatacatgtgtacattattttcttaaggttctgaagctcaaacacaagtgatcaactactggactatatccttaccttttatgtatattttaaactctttaaattttctatttaactcaagagttgcagttcgcaaagaagattggttttttttttttttttttttttttttggaccgagtgactagtacactagtatagttgtagtgattagtataaattggtgtagcctcccataagcctgaagcaggctaaaggagaactttaccttgttgccactaaggagattatctagggtggagccttcctccctagatcactctactgttctgccactgccactgttcctcttcaagatactgctacctgctgagaagccccagagctattctggagactacatcctatcctgcatgtcatcacctgcagctggttccaggctccaaggatgaattggtgggaatgaacttcccccactcttttataaagcatgtccaccattaaaaatttgcaccttgagcagactagttgtcttggttccattatttctcaatctgcctaggctccctctttccttccagattcaaagatgccttccaggctcgaacccggacatgtgagccgctggcgggccccaacaattgggagctgaattatcttctgttatcattagtccccttaatggttatttgttgccaatctgtgtgataacaatgaaaaaaaaaagccttctacatagtaagtaaatcattttggagtgggcacagaccactagtatctacatatccaaataataagaacctcattgtatcaaatcagggaactataaaagagatcaccctgtttttctgtatcctacctacctgatgttttcaccaatataattttga

SEQ ID NO: 5029 - DNA, 1000 bp, mus musculus
atttagccccagggcacagcccacttagccccaaggcccagcgtatttagccccagggcacagcccacttagccccagggcacagcccatttagcctcagggcccagcccgtttagccccagggcacagcccatttagccccagggcccagcccatttagccacagggcccagcgtatttagccccagggcccagcccgtttagccccaggccacagcccgtttagccccagggcccagcccgtttagccccagggcccagccgtttagccccagggcctagcacatttagccccagggcccagcacatttagccccaggccacagcccatttagccccagggcccagcgtatttagccccagggcccagcccatttagccccagggcacagcccatttagccccagagcccagcgtatttagccccaggccccagcccacttagccccaggccccagcccacagagccccagggcccagcccatttagccccaggccacagcccgtttagccccagggcccagcccgtttagccccaggccacagcccatttagccacagggcccagcccatttaaccccaggccacagcccatttagccccagggcccagcccatttaaccccaggccacaggccatttagccccagggcccagcacatttagccccagggcccagcccatttaaccccaggccacagcccgtttagccccaggccccagcccacttagccccagggtacagcccatttagcccctgggcccatgccatttagccccagggcacagcccatttagccccagagcccagcgtatttagccccaggccccagcccacttagccccaggccccagcccatttagccccaggccccagcccatttagccccaggccccagcccatttagtcccaggccccagcccattgagccccagggcacagcccatttagccccagggcacagcccatttagccccagggcccagcccgtttagcccca

SEQ ID NO: 5030 - DNA, 1000 bp, mus musculus
attcttaaaaaattggggagtgatggccttttgagcactcctgctgactgttgtgtgtggaggaatgctttggtggatggcacatatgcgaaggcagcacagggctgataaacaaaccttagtggaggctatggcagccttggaagcagaaaccccccccccccaatgttgactcaacatgctggatcagtaatcaatgacaggtaagaccctcacgtgcgcataccaacctaagacaggatggcaaaagtgagttcgtcactcccatgacgggttaggatgtgacacagatgggagcaacctaagacagatgctgatcccagagctactaataaaacaaaaagggggaaaagcaggaagcaggtgcagccgcatgggccaagatgtttcctgccttgcctgagcatgcgcagtgaggctgcatgcatgggctgcctgccaggatagactatccctcatgatcctgacctgtcagcctattggtgaccgacctgagctcgtgcctggtgtgtgtgtgtgtgtgtgtgtgtgtgtgtgtgtgtgtgtgtgaattctgattggatgaggtggggtggagctagatgaggtcagttggcatgagtataggagtttttgttgtttagcccttgccctaagtagaagccagttgtagtaagagaagctgttgtaaggggagttgttgtaagaaaaggtgcaagaaggagaacaagtaaagaagctgttgtgtgaacccgacttggtgtccatgtcattcttgtctccgcgggtcggagactgcagagactgtggcaaccaacttctgtcttagttagggttttacagctgtgaacagacaccatgaccaagtaaagtctttaactgtgctaacttacaggttcagaagttcagtccatcatcaacaaggtgggagcatggcagcatctaggtgggcatgatgcaggcagagtggagagttctacatcttcatctgaaggctgctagtggaaggctggcttccagg

SEQ ID NO: 5031 - DNA, 1200 bp, mus musculus
ttcatccctcagttgacagaagctctgaggaaaattattagatatagatacctaagatatggcatgctcaaattagttgagaaggtgggtgctacttgactgtggcaagaacttcctagatatgatagttacaccttttgaggatttattttgtttgacttgttagactatctctaattttaacatgattacccgagaaatataatttatgttccatagcttatatatctgttatacatgcagagcaccttttaagctttttttattacactgtatgtatgtgcatgcatgggtgcacatgtgtgcctgagaatgcctgtacagaaaacacttgcaagtggtgatcgagaccacctctggggagttggttctctccttttaccctgtgttcctgtggtcaaatttgcgttgtcaggattggtggactgtgcttgtattgctaaggctcaccagccccagtttttggctttattggaaaggagagctgtagaacctgtaaggtcttcaaataatatcttgatttatatgtgcccttcccactctatgacgttgcttatgaatccctgtttataaattcacgttaatgttctaaattggagttaaagaaaacaatattgctagtggttttatttttttctttttctctttataagacagggtgtttcactagctcatgaagatgaggctggccttagatggacgatccttcagcctcagcatacaacattccattagtgacttttttttttttccgagacagggtttctctgtacagccctggctgtcctggaactcactctgtagaccaggctggccttgtactcagaaattcgcctgcctctggctcccaagtgctgggattaaaggcgtgtgccaccacacccggctagtgactttctatttgaaagagcatgcttcttactattcaatggaaaaactggtactggaagtcagaaattgattattggtctattcagtagaatatacatacacaaagttacccttttacttagctcttttgacttgaaactttgagtatttgtgttaaattaataacaataaaaaaatcacacttcctttagaaacctccatattttaaaaaaagattgggtagttcttttaactattctttttgattggtcttaaaaactacaactatccacacctttgtggaactgatataatttaaatcagttattt

SEQ ID NO: 5032 - DNA, 1000 bp, mus musculus
tgcgtccctcctcagcacccacaatctgtgtgaactgcattaaaaatctgttgtatgaaatgctggcatgccgaggtctgctggcgtttagtgcattctgcactcacggcaccattgtgtgctttagagtcagagatgagtggaatccagactggtgagcacctgaggaaggtggggcaggatgtgataagaaatctgtgttgtgactgtgcctaagcaattcacagagactggagacagtgattgtctatggaggttcagaggtcaaaaccagggcttgtgggtagaaagaattcagactgactccaacgatcctgactccacgtaagggaatccctatctctgtccagatcagaaagaggcctggcttttctctggttcatgtgggcctggcgtggtgagtggagacttgtgatatttgtctgggtctggagttggggggcagctgagtggctgaagtggggcctctagaggacctttccatggtggacaacaaaaatgatggttaggccaacatgaggaaagcctagccccaggtagatcagacctaacaaataacttaaaatgagctagttttctattatgtcgtttttctatctatttaatcttaagaaaattaaactgaacaagatgacttgcattgtaaaatatacgttccagggaattaagtaagccatggggattttagggtggtgggttttcgtgaagtctctcaggatgaaaagtggtgttagatcatagtaggtgcctcctcagagaggccaggctctgatgtggccataggggtgaagccttgaacatctgggagaggccccgaggatccagtgggttcccggctacccctggcttcaggttgcctgcatttaaatcataacccctttcattatgttgttccagcaaatgtgctttctgcagatcaaagcaggttccttgatgacacttgtcaaaactgtgggtgtggggtggcgtgggcgggaagcattcagcagctttgtagggc

SEQ ID NO: 5033 - DNA, 1000 bp, mus musculus
agtttctgcttggatatcataaagatctcacatacaaaggtctctgccgactgccctacctggggttccatcccataatcagccaccaaacacaagcactattgcatacaccagcaagattttgctgaaaggacccttatatagctgtctcttgtgaggctatgcaagtgcctggcaaacacagaagtggatgctccagtcagctattggatggaacacagggcccccaatggaggagctagagaaagtacacaaggagcttaaggggtctgcaaccctataggtggaacaacaatatgaactaaccagtacccccagagctcctgtctctagctgcatatatagcagaagatggcctagtctgccatcattgggaagagagaggccccttggtcttgcaaacattatatgccccagtacaggggaaacaccagggccaagaagtgggagtgggtgggtaggggagcaggggagggagggtataggggactttcgggatagcatttgaaatgtaaatgaagtaaatacctaataaaaaattgggggaaaaaaaaaaaggtctctgccacacctggcagtggtggcacatgcctttaatcccagtacttgggaggcagaggcaggtggatttctgagtgtgaggacagccagggctacacagagaaaccctgtcttgaagaacaaaaaaacaaaacaaaacaaacaaacaaaaaagcaaaacagaaaaccccacaaaggtctctgccatagcaccacactcctatcccttccttttcccaatactttgaccatatatacctcatgaagcaagaccatctcagcacttcctctctactctttcctacaaacctgttcaagaatgcttataattttttttgaaatttttaaacttattcatatacatttttaattaaatagaattccaacatgccttccctttgtgtttctttctccaggccctcttatgcccctcccccatcaaattatagtctctttttct

SEQ ID NO: 5034 - DNA, 1600 bp, mus musculus
atgccctccaggtccaactatttgcctaggaatttcataaattcattctttttaatagttgagttgtactccattgtataaatgtaccattttctagtttggtgaagaaatctttctctggcattccagccatctcattttcattattctccaatactaaggagctatgagcttgttgcaatctcacaagaactctcccacccccaaatacacacactgattgagtggctgcaaaggaaaatctatcttaaaagcctattccacggagaaataatttgaaacaacaacaacaaaaaataaaataaaataaatcctcaggtaaagcacaaaattctaagtaaaataaaaaaattgatactataatcatagtcaatatttcttactgatatatatatatatatatatatatatatatatatatgcctccttactcagtgtcttacagggaagaagtgggattctagtatgattcaaacaacctaatgatgttttgttttgaggctttgaggtaaagatttaagccctcttttatgctgcttaataatctcttgatctctgcctggctgttgaattcattctgatcctgggaaagactgttcaacacatatgtcatggcccagggtatgtgtgatatcttttcaagatattcccttcagatgctgtctagccttgggttcccatgttatgattctgcttatgtctgcacagcctggtcaccctgctgcatctccagccacagtttatctaccccccagatgcacgtcttagcccaggcagtatctctctgctagtcttactatgctagtacatggaggggagtacctccctggctactgctgtgatcctaggccagtgacagcaatgtgggactgttgctccaggctgctttcttactgtggcttaattctgtccttagtgtttccaactataacaatagagtttaatattgatattatcaattttttttaaagatagggtctcatgtaactcaggctggcttatatcctagtgtgtagctaaagatgatcttaaacttgctaatctctatctacctcccaaatgctgggattgcaggtaagactaccacagcagctcagtctatactctttttgtgctcattcattcattgtgtaagaggcagctttttgtttgccatcagacttagaagccctgtcatttgtccttactgtaatgagttggcctggtctacaatgttgaatagaaacacaaaaacatgcttcactaatttactctagcattaatgaaatttaatctaaaccttcataacttaagttatttgcaagtggtatgcctttgataaacaatatttatcaagttaaggacagctctcattaacccagttagccataagtgttttcccaaatgaataaactcatggattttctattgggacttggttagacttttttttttcattaaactatgaatatattaatactttcacatttaagatttgaagataatttttaaccttttacatattactggctaatgatataacattttaaaattcacatcaaattcgaagttttaaaaatttgtgttgttgatgctttatatccattctaataaagaagtt

SEQ ID NO: 5035 - DNA, 1000 bp, mus musculus
tataggtcctgaaattaaaccacactgcttgggattgaaccagggccatcataggccaacatagggtatcaattcagctctttcttgagacttttactcagtgtagtctgcctctccagtttcagtttgagcatcgcaggtggagaagcaaaggagtaactgaacaaagaataactgaacctagctcatgcagtgtcttgtgagtgcaaggtattctatggaaactgatttcctaaactgcctggcttgaatctagaccattctatctacaagcaatttacatgaccttaactctagtttcatctcctgtaagaacagagtggatgcttaactcttgaagaaatccttgctcccactatctttctgggatgtatcagtttaagagcccaacctctgccaaatgctcctttaatcatgttgcaacaagggagatatgggcaccattgccttagagaaggttcttgcatttaactacagctagatactttctcccctctttctttattccagaagctttttagctgaaaagacaggaagaaggacaaggaccacacgatcacataaacagaacactgcagaatgaatgtcagagctctctctgtctaacacagcagcaataaaccttcttccctccttgtcagttgccctgcctggggacttaggcttctccagcagtcctgaagcttggtctgtccattctggcttcattaagcatgttaagtgagatgttctgccatgttgcgagagtctgtcacattgatagtttacaacagcatcatctcttcctgttggcctggtgctcccttccacactttgatttattaccttgctcttctgttcccacacgaccctttcatcactgtcgcacatgggcctgttgatgagatatgcttggtggtggctggagggagaggagagatcagtgcaagccaagaaatgagggagttggcaactggctttttcgatttctaaagctggtctttgtttttacttggaagat

SEQ ID NO: 5036 - DNA, 1000 bp, mus musculus
agggctgagcttcgaaacaaccgacgagagtctgaggagccattttgagcaatggggaacactaacagactgtgtggtaatgagagatccaaacaccaagagatccaggggctttgggtttgtcacatatgccactatggaagaagtggatgctgccatgaatgcaagaccacacaaggtggatggaagagttgtggaacctaagagagctgtctcaagagaagattctcagcgaccaggtgcccacttaactgtgaaaaagatctttgttggtggtattaaagaagacactgaagaacatcacctacgagattattttgagcagtatgggaagattgaagtgatagaaattatgactgacagaggcagtgggaaaaagaggggctttgcttttgttacctttgatgaccatgactctgtggataagattgttattcagaaataccatactgtgaatggccacaactgtgaagtaagaaaggctctgtcgaagcaagagatggctagtgcttcatccagccagagaggtcgcagtggttctggaaactttggtggtggtcgtggaggcggttttggtggcaatgacaattttggtcgaggagggaacttcagtggtcgtggtggctttggtggcagccgtggtggtggtggatatggtggcagtggggatggctataatggatttggcaatgatggtggttatggaggaggcggccctggttactctggaggaagcagaggctatggaaggggtggacagggttatggaaaccagggcagtggctatggtgggagtggcagctatgacagctataacaacggaggaggcagagacggctttggcggtggaagcaattttggaggtggtggaagctacaatgattttggcaattacaacaatcagtcttccaattttgggccgatgaagggaggaatctttggaggcaggagctctggcccttatggtggtggaggccagtactttgctaaaccacggaac

SEQ ID NO: 5037 - DNA, 1200 bp, mus musculus
gtatttctttaagtgagttattaaagtccttcttgatgtcctctaccatcatcttgagatatgcttttaaatccgggtctaggtttttgggtgtgttggggttcgcaggtctgggtgaggtgggattgctacgttctgatgacagtgagtggtcttggtttctcttagtaagattcttatgtttgctttttgccatttgataatctccggagttagttgttatagttttctctggttagagcttgttcctctcatgattcttttagcctctgccagcagacctgggagactatatatctcccaagtttcagtggtctgagcactctctgcagcaggctctcctcttgaacggaatgtacacagatatctggtgtttggacctgcctcctggcagaagatgaaggcctgaaacagggcctgtcccagaagctgttagcttctgtagtccacactctcacctgagcagactagtctcaaagggatccgggatccaagatggcttccccaggtgttctggcaaagccctcctgggcagggaggacacctgtcctctggcaagaaaggtgcccagatgtctggagcctgaaacagggtctgcctcagaaactgtcctctaggcatcttgggggtgtcctctgactgctctcccaggtgaccaggtgctggtgcagacaggaagggacttgtgaccctagtcaggctgggtttacggtttccctaatgctgtctcaggtcttgtgcaattggaatggaacagaagttgttttccactcactggtggtcctaagatcaagttggagagtcctctagggaccttgggggagtctgcagactccgtgcccaaggtgacctggtgctggcactgaccggaagggacttgtgatcctggtaaggccgggttttctgcttctctaatgctggtcctacgagattggaatagaaaagaagatgtgttccactcactggtggtcctaagattgcgtggagagtcctctcgggaccttggggggtgtccgctgactccgtgcccaaggtgatccagtcctggcaccaccagtagtaaacattgtaaatgacatttatagcctatttagcattaaattatatatacgtataaaatacatatatgtgtatttttccttagtgattttttagtgtattagggattaataagaaggcatgactctcttgtcactgatt

SEQ ID NO: 5038 - DNA, 1200 bp, mus musculus
aatgttcttccttcatatagtctttaaagctttaggaatgctagtctgtccatgtcattgttgcaataccattcttcaccatatatttatggttatattaggcatatgtagccttaatttttgtatttaacattctggttcatgtatataatccatttttaaatttgttttatctgagtcaatgtcccaatttctaagagctgtgtttatactgtttgatatggctaatcttgattccaggactctcatgatattacagttacatttgctgctttatccactaatccatggatctcaatttcatctaactctaattttaactttggtctcttttcatttatagtattttgccaaaatacgtgggttttctctctctctctctttttttttttttgtattttaagattctcttgttatatccatagaaaattctcacccacatcttccttctgagggacccagagtactctccacactgcaggacatctggatcacctctggatcacgagtgagtggaactcaacatcaactccaaataatcatggagggtcttgtgccagcagaaacagggacagaggagccccacctaaccagaggctgggatcctttccagtcagggccaccctgccatcttccttctgagcccagaggaggccactaagggttcgagagtgctctccacacctcagaacttcgtgatcacctcgggatcacctgtgaatgaaacgcaacatcagctcaaaggaatctcggaggtggatcagagccgcagactgctggacatctgccctgcaagaggagagcttgcctgcagagggtgatctgatcactggaactcaggtgagacttggactcccaggagtgctgacagaggctaacagaatcacaggaggatcaagctcccacaagagatagcttgatcattaacaccagagatttccaaatggcaaaaggcaaacataagaaacttattaacagaaacaagaacactgggcatcatcagaacccagaacacttaccacaacgagtcctggataacccagcgtacccgaaaagcaagacacagatttaaaatcatatctcatgatggtggtagaagatttaaagaagggcattaataactcacttaaagaaacacaggagaacagtgctaaagaggtagaaggccttaaagaagaagcacaaaaatccctcaaggaa

SEQ ID NO: 5039 - DNA, 1200 bp, mus musculus
gcgccagtcccgagttttttctcgtcccggaattcggcaccaattgttattagacgcgttctcacgcccggccaggaagaacaccacagaccagaatcttctgcggcaaaactttattgcttacatcttcaggagcaagagtgtaagaagcaagagagagagaaaacgaaaccccgtccctattaaggagaattctccttcgcctaggacgtgtcactccctgattggctgcagcccatcggccgagttgacgtcacggggaaggcagagcacatggagtgaagaaccaccctcggcacatgcgcagattatttgtttaccacttagaacacagctgtcagcgccatcttgtaacggcgaatgtgggcgcggctcccaacagattatgctggggtgcttggctctaaatgaaagatctagttcaactcttacaatgtttgaagaacatcaccaaaagaaggagtggaaagaaagtaagagccagataatagggagatatatagcaaaagtgatgtcttctagcaagacatagccagtgcaccaatgaattctctacagctatggtacaagacccatacatgattagattcaacaatatgcagcagcattccatccatgggatggattcctcccctctctgagagaccattgactgctaactgttgtagccctgtgaagcatcattttcttcagtggtgactgttgctcctctaaataacctcctacccacactctggcaagaaattgttaattaaaggcagtgtattatttaaaaagtgaagacataaataaagcagaaaacttgttgggaaaagggatggggacagccagagatggggtggaagttgggaatcctgaattcctagtccttgaatggacttctttctaccataagatttaattccagaacccaaagcttgaggaagaaccgcaacactagatcatggtagctactgcaacttaaaagttttctgagttctttccatcttctggctattataaataaggctactatgaacatagtggagcatgtgtccttcttatcggatgcccctcaacagaggaatggatacaaaaaatgtggtacatttacacaatggagtactactcagctattaaaaagaatgaatttatgaaattcctaggcaaatggatggacctggagggcatcatcctgagtgaagtaacacaatcacaaaa

SEQ ID NO: 5040 - DNA, 1000 bp, mus musculus
ctcttttcataattcaactttcaatttgtattatagtcactattattttaagtatctttcaggttgtgttataattctgggttatttgaattctaacatactagcttgcaacatagactgagttccggactgatgtgtggatagacatgttagttgcctgctacgttcttgttcttagggtgcattgagctcaactaagtgaccagctccttttacaggagcttcacccgaagtgctatactcgagttgcttaatggtgctgaagttcctctcccaaaagatactgtctactaggacatttctcatattatttaggtatttccgattttatgtataataatgagaatcaagagcatgtgttccttacacagccccatactgctgttgtcacagtgaggaagcatcttcacaacattaatatcaattttaagtaaacatagaactttacttatcatacaaccaagctactgccatggcgttcagctgcagtgtcctttgttcttgataaatatcattgtgtctgttgctgagctctgccactaaaacccaaaatcctggaaagcagaaatgtgttttcagttatttttttttaaacctcatccatattgtttgggagaaagcccaaaaatttatggaatcttagacctgatagaagctcaaaggatgcagagaggtgagaggaggatgccaaagcaacaggaagccaggctcactggcaagcagtttggcatcatctcagcccaggaaacagcaggatccagtagggagtgatggtttgactcaggtggacttgggttttcatcccagcactgctgtgtaatcactctgtaaccttgggcaagtgttccaaacttctcaacctgaggctctgcacctgatacatgcagttaataaagataacccgactcacaagagtagtgtgcatagtaaatgccacaaaaaattaaataatcttttagtattctgaaagaattaggcactgtaaaaacagaatgtgaga

SEQ ID NO: 5041 - DNA, 1000 bp, mus musculus
ctttctatcataatcccagagaactctcagagtagaagagtgttgtagcccttaggcacactgaatcgagttcctacccacatccaggcctccttagggctctgactttccaacaagtgtttcatgatctttgcagtcattgttcaaccacacctagcaaaccccatgctagcagtgttcacatagagcatattttgaagacgtatgtgagtggcagggttagaaagctgtagaaatcaggcagtggtttgccatcgatccacatagtctgagcccctggaatgagcagaatgaattagtgcatctgtgaagtgatgacacattgaagactctgagaaaaggatggatagtactgtgccactggaaaagctaccaataccagcccaaagccatggtatggaacagccatgtgtggaagacagacaacagtcatgtgaggaagcaacatacccagtcacatgagctaggtaccctaaagactaagaggtctacccttcactagagtgtgcatgaaacactagatttgagagcctcctctggtctcagtttttctttgtgttgattattcggttctctttcctgtctctcccttttagagtggaaatattttctctgtacctagaacaccattgtatgactatacttattttattttgcaccagttcgttagtaggaagtttcccttgagatgagaattttcacttggaattttgaatgatacggcaacaggttttagggccattcaggttgtagctaaagcccagtttgcattgtgagaaagacataaaacacagtccacatatggttgactatttaccccaaagggttccatattgaagatttggttctgcgaggggtaacaaaaagtatggaaccttaaaaggtgagttctgttgggagttgcttgaatcatatgtggttgttgaccatggatggattagagtaatgttgtggagcccctgatttagttttcaaggggattcggtatgaaacccagaat

SEQ ID NO: 5042 - DNA, 1400 bp, mus musculus
aggaaatgatcaatctcagggctaaaatcagtcaaatagaaacaaaaagaactacacaaagaattaaccaaaccaggagctggttctttgagaaaaacaacaagatagataaacccttagccagactaaccagagggcacagagacagtatccaaattaataaaatcagaagtgaaaagggagacataacaatgaaatatgtcttaaaataattattccgttgttgaatattaacagttgaaaatattaaaattatgtcctcaaaataaataaataaataaacaaacaaacttcaggacaaaaaaaattaaattgtttatcctattacttgtttttctgtcactgatttctcttttataaggagagtatccatgggattactggctatttttacatttggagggtgtatagggttattttttcagttcctgagagagacatagaatcctgcaaggaggattctatgaagtgaggatcacaagcaggcctcagatttcatgtttgtttgtttaaacttaaaggccagggaagcaggctcctgaggtgagatgctgagtaaggctgggatacactgtgtgatcatctgatgctgtgacaagccagcacctgggacacacaggaaacgggagcctcttctgagatcagaaaacctctttcgaaagaatagatgggaacgggctggaactaaaatcaggccatcgagccgagacttttttttctctgtgttttaagacctgcccatccatgtacacattctggtatgggaaatctgggtcaccttcctggcctgaatagaaactaatccctttcatttcttctctacaaacaaccttgccttcggttccactcccttggaggctacccatgcagaaacatactgtcagaaacactctgttgaacgcatataaacacttgcctgaattccaaccatctgcctatagtgcctcttctgaagtgagcccattcatcttcccaggcaaacgacaaactgtacagaacgcttcttcaggcagaaatggtcacagctgcgtgctacattctttgaacagacaggcacaatagactacattcatggagatccctaccaccttaaaatgaatctcaaaacgtggatatttaacatgagacaggtatctcttcttcactgcttctacagaagaattttataaactaaaacaatacaggcctatattaaagctttcaatctatcacaacatacgtatgctgtgttggtacacttaccttgtttgtaaggtataaataactgtaatttacgaggctcaactgagtagcacatgtcagtgtgttggaaacaagaaagcataaatcaaattcaagaaacactatgatgtaaagttgtagccaaactctatgaaacttaaatcacatgtgctatttct

SEQ ID NO: 5043 - DNA, 1000 bp, mus musculus
gatgtcacctagtgcggtgaccccggagagagcacaaatcgcgtgccgaggaggctcctttcagggcagaggacgaaaggagggcagagggtgtggtagcgtgtgcaaggaccaaggcgggccttgcgcgcgcttccggagtccgccggcccacccgcccggccgggccccgcacccctcaccgctgctcggtcccggccgcgggccctcgccgccgccgggaaagggctcctccgcggaaccctcgagcgtcgggggcgcggacggcacgccgtaggaagggctcttttcgccccagtgcaggttgcggctgcccgggatgtccgggggcgtcgtcacccagtggcccagttccgtccctgaaccgaaggagcgcgcatggaaagggccgccgaaagccggatcatcccgaacgcctccccggtagcccaggccatcgaagccctcagggcgccgcggatgcatctcggacaggcggacgaggacgagagaggccggcccacggagcccaggcctccaccgcgtccccgccgcagccgctgcgcgtccggagactgacaaccggaagtcacggctagaacccggaagtcctaggagcacgtgactccgccctggcgcgtcttccctgagttggttgctagggagatgcggcttaggatggaaggggaaggatgcttgttgggcctggtcccaggagatgcaaggtgtgtcccctgctagcagggatgctctgagctgtgcagcagccacgagtgaccgcggactgttgcaacatgctgactcccctcacccaggtgctcacccttttcaagggaaccctgtgtgagggcaagagtagccttcagcctagctttgtctccggctgtgtggaccaccacagcagacattaacaatgttcaaatcaaaaacatcctcgtgtgtgaatacatactgccctcaaccacataggaatcaactgtttaacttttctaaggcaactgtatacagttttcttttttct

SEQ ID NO: 5044 - DNA, 1600 bp, mus musculus
tgtctttttgtgatttgtatcctctgataattcgttgtaatataagtctgaagctcaaccagaacattacattcagattcaacacctctcttgtgtgtgcctgattgtcacttcatccgactcttttgcccatctgcctaagaaatcccgttcctcgcagaccagggacccagagggtctgcggcattgtttggtttagctttggttttttttttcaagacagggtttctctgtgtacccctggctgtcttggagcttgctttatagaccaggctggcctcaaaatcagagatctgcctgcctctgcctcccaaatactgagattaaagtcacgtgccacactacctagcatgctggctagtttttatgtcaacttgacacaagctagagtcattggagaggaggaagcctcaattgagaaaatgtctccataagatccaactggagagcattttcttaatttgtgattgatggcacagcccattgtgggtggtaccacatgtggactggtggtcctgggttctataacaaagcaggctgagcaagcatggggagcaagccagtaagcagcacccctctatcaactcctgcctccatgttcctgccttgctgaagtccctgtccggacttcatctgatgatcaactgtgatgtgaaagcggagaccagtaataccctttcctccccaaatttctttggttatggtgtattgttacggcgatgccctaagatgcatgcccttccctgaccatgcccatttctatccataccagccttcacctggacccctcaagcagcactgcttctctcacgccagcaggggtcctaggtgatggtctcctctcacctgccaaggactgtcaccctgcttcgtcagcgttccgttgactatccttggatctggttccagttcatcttctaagtctgtgtctcgtttgaggatcttgcgtttcttctctatccacctccccagtttcccacatggaaaattcactaaaagtcaaagagaggtggtaaaggccctctatgcacgactcccacagcacccccgcctcctgtttgtaggctaggctgccatcctggacgcttcaagaagtgcagtgtgggactcaaaatcaaatagtgccacctactagcaagagttggccaagcgccgttactacctgagtgtctctaaagataaagatatcctggattcaccccagggctataggtgatcatcctcaagatatataaggaaaggctccttgtttggatgccaccaagctcctagggatactgttcaggaggatgtaactcagttggtagaatgcttgtgcagcacacataaggccctgggttagatcccagtattgcataaaccaggcatagtaacacatgtctgtaatcatagcactgggaaatagggcagaaggtcatcctaagctacatagtaagttttaggtcagcctgagcaaaatgagcttctatctcaaagtagggggacagattagagaggagcttcttcttcttcttcttcttcttcttcttcttcttcttcttcttcttcttcttcttcttcttcttcttcttcttcttttcttcttcttcttcttcttctt

SEQ ID NO: 5045 - DNA, 1600 bp, mus musculus; identical to SEQ ID NO: 5044

SEQ ID NO: 5046 - DNA, 3000 bp, mus musculus
accaccactccatgtgccttactgccccatccaggtggccataattaagcactaatgagcatactggatatcattttcctttcgtcatcagaagagcactagtcccaggtccccttggtgtctttccccttgcactgctgttgatagtgccaccgcaacagacaaggctttgggggcagggaggtatgtttaagctcaatgactagctaccaagtatttctagccaagaataaattcctcgaggcactaggctgggtgtggtagtacatgccattacttccagcactcagaaggcacaagtaggcaaatctctgcttgaggccagcctggtccatataataagttctaggccagttggagttacatagtcaaacagacagtgagatgctctctaaaaataataaaacaacaaatgaaataacacagagcttagattgttgtatagccaaaagttttcaaaatatgttgctgtttttacatgtatgtatgatacgtgtacagtatgcatatgcatgtgagggcttggggaaagggcacccatgtgtcatggaaagcatgcagaggtcaggaaacaactttgagtgtcggaccgcatcttccaccttgtctgaggatgttcatttgctcacagctgtatatgtcaggctagctgggtcacaaggctctggggctgtccttatctcccatcttgctattggctcttgaagatcacagacctgcacaatggcgtgtggcattacttgggtgctggggatattgatttctgccctcacactgtcttgggagctgctgtggtgttccactgagctatctcgcccagccccaaatattcaaatctgaagaaggtactttgtgcaatttttttgtttgtttgttttgttttgtttttgtttttttgatactgggtttctctgtgtagccctggctgtcctgaaactcactttgtagaccaggctggcctcgaactcagaaatccgcctgcctctgcctcccaagtgctgagattaaaggcgtgtgccaccatgctcggctgtgcaatttttagttggttggttaagtttacatattttcaaatgctgtaatttaaagaacattataattgcttctgtttttaaatggctgttataattacttgtacaaatgtatataatggaatcaaaacatcatgttattgggtaagataccatcattctgctttcagaaacaaatacttctctatctttcagaagtgagcattttcttcccttgtgaactattttttttatttttacccaagacctttatcttaatgttgtactattttgatcaaaaacactcttttaacaccctatttcactcacctgcaattaaaatgcacctaaactttcagttttatttcctttgaccagaaatatctaagtattaaaagtaatctttgcgaagagaataatttttagaagcagtacactacaaatgaaaacaggaacaccttccacttagtaagaacaaatgcaaaatcacaccccagtgcaaggattaatgagatggtaaactttactctttagttcacgtatctgccaatgaggaattatttattgctcgcataaaacagatcaacataaattctatttgttttgtatgtgtatataaacacacacacacacacacacacacattatactacagtaccaaaattcagttctttgaatttctgatgccatgtggcaaaattcatgtaataatctgtaatcaaaaatacttttgcttttctgtcacctgacaagttggtaatgatcttctgcatttttaaagtactgcactggaaattctgagtagcagagccttattctccagttattttgaataatttactttcccagtttctgggaagcacaccaagacacattcactctgacttctcaaatgattcttaattatgctgtaacacacacatttaggggcaccttttaaaaaaactatctctttagaaatggcaggaataaaaacccatgttttttttttttctaaaactgattaaacatttgataaaacaatggtttctgatgaaatacttccatcttaatttttgctttaagtgtatttttccacttttgagctgtagattttacttgattatggaaaatgtctttcaaaaatgctcatcaatgggggcaacattcactatcaagtggctaaggtgcaagttctgtcagagaaaagttggctttatttttctactcaaaaaactatttttattctacaaaacactgtaaaattgatcactaaaaatacaaatcagggtgatacagatagagctgttgcatatttaaatgtgttacagagcaagatgatcaacatgctctgacataaagcaaaattgtgcccggcaagtttatgccaacttgacacacagtagcctcattcaggaagaggaaacctcaactgggaaaatttcagcagcagattggcctgtaggcaagcctgtgggacattttcttgattgatgattgatgggagggaggagttcactgaaggaggtgccacccctgggctggctgagtaagccatggatagcagaccagtaagcagcatccgtccagacctctgaattggttcctccctccagcttctgctctcacttcctgacctgacttccctcaatgataagctgatcctagaaaatgttaagtgaaataaaccgtttacttcctgatttacatccgggcatggtgttttatcagagcaaaaccctaacaaagacaaacgtgttatgatttaaatatgcaatgtcctttaaaggcttgatttcaaaggccattaagcctgttggacatggggcctggctagcagagtttgtgccctgggtttacaggttagagctggaccctggctttttgctcccggccatgtgcacctgtcaccatgggctcccacatgccttcttcactatgatagactgcaacttctcaaaccatgagccagaatatgtcatccctcttctaagtctttgcttgtcaggct

SEQ ID NO: 5047 - DNA, 1000 bp, mus musculus
gttcaggcaggtgggtggcgaaagctcccgcctaatctcagccccactatcgagtataatgacggaaggcccacaaaacggcatgatattgcacgctcccattctgaaagtccttccagactaccaatcaaccgggcgggaacctggaagcgtgaacacagcaaacattcctcgtcccttcctcgagtgagtacttggagaagaactggaagctcatcttctattctttctgcttcatcagagtccagtgaaaaagcaaaaagtgaggatgaaaggcatgtgagctccatgccagcacccagacagatgaaggaaaaccaggtgcccaccaaaggaacatggaggaaaatcaaggaaagtgacatttctcccacaggcatggcttctcagagcgcttcctcaggtgctgccagtggtgctgaatccaagcctctgatctatcagatggcacctcctgtctctaaaacagaggatgtttgggtgagaattgaggactgccccattaacaaccctagatctggacggtcccccacaggcaacacccccccagtgattgacagtgtttcagagaagggaagttcaagcattaaagattcaaaagacacccatgggaaacagagtgtgggcagtggcagtcctgtgcaaaccgtgggtctggaaacccgcctcaactcctttgttcaggtagaggccccagaacagaaaggaactgaggcaaaaccaggacagagtaacccagtctctatagcagagactgctgagacgtgtatagcagagcgtacccctttcagttccagtagctccagcaagcacagctcacctagcgggactgttgctgccagagtgacaccttttaattacaaccctagccctaggaagagcagcgcagacagcacttcagcccggccgtctcagatccctacgccagtgagcaccaacacgaagaagagagattcgaagactgacagcacagaatccagtggagcccaaagtcctaaac

SEQ ID NO: 5048 - DNA, 1000 bp, mus musculus
acaagaagatagaaataatcccacgcatcctatcagatcaccacaaactaaggctggtcttcaacaacaataaaaacaacagaaagcccacatacacatggaagctgaacaacagtcttctcaatgataacgtggtcaaggaagaaataaataaagaaattaaagaccttatagaattgaatgaaaatgaatgcacaacatacctaaacttataggacacaatgaaagcagtgctaagatgcgggaagcaggtgcagccgcaggccccatgaaacccacttgtttactgccttgcccgagcatgcacagtgaggctgcatgcgtgggttgcctgtcagactgaacagttcctcatgatccagacctgttagcctatctgtgaacgacctaagttcgtgcctggagcgtgtgtgaattctgattggatgaggtgggctggagctagaaggaggagtcggcgcgagtagtgactccctagtgtttagcccttgctgcaagaaagatggagtagtaaaagctgctgatgtaagtggtagaagctagctgttgtaaaagaagccagtagtagtgaagagagttttttagcccttgccctaggtagaagccagaagtagaataagagtagttttttagcccttgccctaggtagaagccagaagtagtgaataagagtagttttagcccttgacgtgagtagtagtagagtagtgagtagtttagcccttgccctaagaagaagctgctggggaagagagctgtaaaagaaaaagcccgaagtaaagacgttgctgcgtgaacccgacttggtgtctgtgtcattcttgtctccaccggcccggagtggagacgacgacactaaatggaaaactcggtccttcgtgcctccaaaaagaaactggagagtgcatacactaccagcttaatagcacacctgagagctctagaacaaaaagaagcaaatacatccaagaggagtaaactgcaagaaataatcaaactc

SEQ ID NO: 5049 - DNA, 1400 bp, mus musculus
gagtggagaaccaccctcggcatatgcgcagtttatttgtttaccacttagaacacagctgtcagcgccatcttgtaacggcgaatgtgggcgcggctcccaacagtgtcctactcactggtggagcggagggtgggcgagcgcttgctgtcgagctatatgtctgtgcacgcggagagcggcaaggtgttcgcgctgcagcctctggaccatgaggagctggagctgctgcagttccaggtgagcgcgcgggatgctggtgtgcctgccctgggcagcaatgtgactctgcaggtgtttgtactcgatgagaatgataatgctccttccattcttttggctggtactgaaggcttgggaagtttgaccactgatctcatacacaggtctgtgagcgtgggtcaggtggtcgcaaaagtgcgggcggtggactcagattctggctacaatgcatggttgtcctatgaactgcaaccctcagtgggccctcgcagcccatttcgtgttgggctgtacacgggtgagatcagtacaacacgcgctcttgatgagtccgatccacccagacagcgcctgttggtattggtgaaagaccatggtgagccagctctgacttccacagccaccattctcctgtccctggttgagagtagccaggcaccaaaggcctcttctcaggcttctagtcgtgcttcagtctcagaggcgtcgctggtagatgtcaacgtgtacctgatcattgccatttgcgcggtgtccagcctgttggtgctcaccttactgctgtatacagcgctgcgctgctccgcgacgcccaccgatggagcctgtgctccggggaagcccatgctggtgtgctccagtgcagtggggagctggtcatactcacagcaaaggcggcaaagggtgtgctctggagaaggcccacccaagaccgacctcatggctttcagtcctagtcttccaccgcgtccagtatcagaggtcattggggaagggcaagattcaaatgtcgatcatggctttcaagtaagtccttttatatttagaaatatttaattcgaagaaattcgtatctcctttcatggtatttcatatttgcacatgctattgtcaaaattcaacattattttagttacaatttttacttggtttgttacttttgtgttgtcgtacatttatttatttatttatcatctgagattctacatactcaggttggcctgatactcttgaggtcaagggacatgtcacatactggctattcatatagcacaatctttgttgttccaagttatcaaaagcaatttcatattagcctttgtatgttgcttatagcctttgtatgatttcagtcttccagaacagaacttagatgacatccatgggaatgccttctt

SEQ ID NO: 5050 - DNA, 1400 bp, mus musculus; identical to SEQ ID NO: 5049

SEQ ID NO: 5051 - DNA, 1400 bp, mus musculus; identical to SEQ ID NO: 5049

SEQ ID NO: 5052 - DNA, 1400 bp, mus musculus; identical to SEQ ID NO: 5049

SEQ ID NO: 5053 - DNA, 1400 bp, mus musculus; identical to SEQ ID NO: 5049

SEQ ID NO: 5054 - DNA, 1400 bp, mus musculus; identical to SEQ ID NO: 5049

SEQ ID NO: 5055 - DNA, 1400 bp, mus musculus; identical to SEQ ID NO: 5049

SEQ ID NO: 5056 - DNA, 1400 bp, mus musculus; identical to SEQ ID NO: 5049

SEQ ID NO: 5057 - DNA, 1400 bp, mus musculus; identical to SEQ ID NO: 5049

SEQ ID NO: 5058 - DNA, 1200 bp, mus musculus
atacccacctatggttgctcactgcaccgtactcgtggaaatcttggatgaaaatgataacgcaccggagatagtccttacttctttgtctttgccggtgaaagaagatgctcctttgggctctgtaatcgccctgatcagcgtgtcagacaaagactctggtgtcaatggacaggtgacctgctccttgactaaccatgtccccttcaagttggtgtccaccttcaagaattactattccctcgtgctggacagcgccctggaccgagagaccacagctgactataaggtggtggtgacagcccgcgacgggggctcgccctctctgtgggccacggccagcgtgtccgtggaggtggctgacgtgaacgacaatgctcctgcattcgcacatcccgaatacacggtgttcgtgaaggagaacaacccgcctggagtgcacatcttcacagtattggcggtggatgctgacgcacaggagaacgcgctggtgtcctactcgctggtggagcggagggtgggcgagcgcttgctgtcgagctatgtgtctgtgcacgcggagagcggcaaggtgttcgcgctgcagcctctggaccatgaggagctggagctgctgcagttccaggtgagcgcgcgggatgctggtgtgcctgccctgggcagcaatgtgactctgcaggtgtttgtgcaggatgagaatgacaatccgcccacgctgctcggacatcagtcaggtggacctgctggcgaatttagccagcttgtttcgcggtcagtgggtgcgggacacgtggtgtcaaaggtgcgcgcggtggatgcggactccggttacaacgcgtggctgtcttatgagctccacccaactgtgggcgctcgcagccctttccgtgtcggtctctacacgggtgagatcagcatgacccgagccctggatgaatctgatttaccgcgccagcgcctattggtgttggtgaaggaccacggcgaacctatgttgatcgccactgccaccgttttggtgtccctggtggagaacggccaggtgccaaaagcttcttcccaggggttgcccaactcctcccgcagggaggcgtcgctgatggatgtcaatgtatacctgatcattgccatttgcgcagtgtccagcctgttggtgctcacgctgctgctatacacagccctgcgctgctcagctgtgcc

SEQ ID NO: 5059 - DNA, 1200 bp, mus musculus; identical to SEQ ID NO: 5058

SEQ ID NO: 5060 - DNA, 1200 bp, mus musculus; identical to SEQ ID NO: 5058

SEQ ID NO: 5061 - DNA, 1200 bp, mus musculus; identical to SEQ ID NO: 5058

SEQ ID NO: 5062 - DNA, 1200 bp, mus musculus; identical to SEQ ID NO: 5058

SEQ ID NO: 5063 - DNA, 1200 bp, mus musculus; identical to SEQ ID NO: 5058

SEQ ID NO: 5064 - DNA, 1200 bp, mus musculus; identical to SEQ ID NO: 5058

SEQ ID NO: 5065 - DNA, 1200 bp, mus musculus; identical to SEQ ID NO: 5058

SEQ ID NO: 5066 - DNA, 1200 bp, mus musculus; identical to SEQ ID NO: 5058

SEQ ID NO: 5067 - DNA, 1200 bp, mus musculus; identical to SEQ ID NO: 5058

SEQ ID NO: 5068 - DNA, 1800 bp, mus musculus
cagcaactttgcagacaaagatcattatccaaaaacgaaacgaaaaaaaaaaatccagacctcactaaagaagtatgcgatgtcatagcaagcactggagggcaatcctgaaagaagtttaaaaaggtttaagtaattacaacatattcatggactggaagatttaattctgcacagatggttgtatgttcaatgatcaacactcactacaaaattctagttaactttttacggaaattgccaggccaaccctaaaactcatatgaaaattaaaggagtcctgaaatacagaaacaaagttgaaagagtcataactcctgatttagagaacattctaacttaaggattagacatttgaatatgtgacttgttccacatgtatgtaatatattttatctagcatatactggtatttagtaaaactattaaaagacctttatatttttccagttatgcttaaggctcttgcatatataatactagagagtgggtaaggtgccatttaattccatgaatactagttcatctctctttgtatatttacattacaaaaatatctcaagtagcctcttttatttaatcacttatgatgtaattgacaataaaaagtctttcactgtagcaatcaatctaccttacccgactgagaaataattttaggtgatttatatttattgtctcagtttctattgtttctattgttgtgacaaaactacgatccaaaacaagttggatggggaaaagtttatttacctccacatcactgttcatcattaaaggaagtcaggacaggagctcaggcagggcaggaccctgtcagcaggagcggatgcagaggccatggaggggtgctgcttactgccctgctcccatggtttgccttgactgcttccttataaggcagaggacgatcatctcaggagtggcatcacccaaaacgggctccacccctatcaatcactaattaagaaaaggccagtttttgtctataaacagatcttacggaggcattttctcaattgaggcttccttctctttgaatgactatagtttgtatcaagctgacatacaaagcagctgacatgcatcatatcaactcccagaaatacatatttcctgataaatttagagaaacaatccagagcataatatgtcaggaaacctttcttgatgcttaattgtaatttggaacacttattggctctaatattattttaaaatacctacacatagatgttttatataccaagactgagaataattaactgtatgtgtcttacctacaaaccactgatttctaagttggtcactattccttctggctgatgattgcttctgatgacagataaagaatttttttttgtttttttgagacagggtttctctgtacagccctggctgtcctggaactcactttgtagaccaggttggcctcgatctccaaaatccgcctgcctctgcctcctgagtgctgggattaaaggtgtgcgccaccacgcccggcagaattttttaaaaatctaataatagttgaaaactggagtacagattacatgccacccctgatatgtatgtacacaaatacacaaaccaaggctgaaattttgatttactgacaactttgtacaaattatttgcctaattctacttgggcatataagagattgtgtgacttcaatgtaacttcaaactctacttttctgattcacatagcatgtgacatcgaggaaatcatttaagccaaatctcaatttctacatctataaaacatggacaatacaaagaagaatttcacagagt

SEQ ID NO: 5069 - DNA, 1800 bp, mus musculus; identical to SEQ ID NO: 5068

SEQ ID NO: 5070 - DNA, 1000 bp, mus musculus
atggtacaagataagatagttgaatcctcctctgaaggtgaaataaaatagatattaaagatggatggagggaagtaaaggggtgggagagaggaggatgaggatgagaaggagggggcatcagatgtaggaagagcaggggagacaacagaaatcagtattgggcaggggtgggcttctctaggtcatgccagagactgggatgaggaggaaggccccaaggtgttataagggtactataggtgctgagactcctaacagtgggggatatggattctgaaatggtcacttcctgtttccatccaggactcctagaggagggataaggacagcaatccacccacaaacgctttgacccaaaatatgtccagcctataagatgtgcaaggacaaagagcagtctgaaggaatggccaaccaatgactggccaaaattgagacccatcccatggccaagaaccaattcctgacactattaatgatactctgttatgcttacagataggagcctagcaaggctgtcctctgagaggctccatgcagcagccagtggaaacagatacagaaactgacagtcaaacactaggtggaggtaggggaatcttgtggaagagctggaaaaaaggattgaagaacctgaatagggaagagactccatacaaagacgagagagtcaactaacctggacccttatgggttcccagagactgaaacaccaaccaaagagtgacctgtggcccgtcccccagcacatgcgtagcagaagtgcagcttggtcttcatgcagatccccccaacaactgaagtgcagggccgttcctgaatctattgcctgcctatggatcccattcccctagatgggctgcctcatctagcctcaggagagaggatgtgcctaggcttgcagtgatttgatatgttggggggattgtgcagggtgactcctcctcagaggaaaagcagaggtgggaacaagaataggatctgtgtgaggggatac

SEQ ID NO: 5071 - DNA, 1000 bp, mus musculus
tagaaggaggaataaaatagtcataagagatagatggagtgagggggctgggtggggaggggatggggtcagaatcaggtatggggagggacaggagagatggccatcagaatgaatggaaatctgcaactggtaggggtgaggaggtagaacacacatccagaactagacagagacctggggtaaggaaggtacccaagaatcagtgagggtcaccttagctgtgactcacagcattggggataggaaacctcaagaggccaccctctgtagctagacaggaaccccagtggaatgatagagacaccaatccaatcacaaaacttttgacccaaaatgtatcctgtgtgcaagaaatgcaggcacaggggatggagcagagactgagggaatggctaaccaataattagcccaacttaaaacccatctcatgtgcaagcaacaatccctgacactattaatgatgctctgttatgcttgcagatagaagcacgttgtcctgagaggctccacccagcagctaatgcagaaagatgtagacagccacagccaaacactggatggagctcagggactcttatgaaagaataagagaaaggattgcaggccctgaagtcaataggaacttcacaggaagaccaacagagccaactaacctggacccttggggctcttagagactgaaccaccaaccaaaaaacatatatgagctggacctaggtcccctcacatatttagtagatgtgcagcttggtcttcatgtgggtcctaaactggaacaggagctatcccaaaagctgttgcccatatgtgggatttgttgtctggccccagtgggagagaatgtgcctagacttgaggtaccagggttgaggggatacctgggggagggtacacagaggagaggaggtgttgggtgaagggttgtgggaggtggtgaccaggagggagcagtgagcaagatgcaaagtgaataagtaaaaataataataaataataa

SEQ ID NO: 5072 - DNA, 1400 bp, mus musculus
ggtttggtcttctcaatgtgtcctggatttcctggatgtattgagttaggatctttttgcattttgtattttctttgattgttttgcagatgttctctacggaatcttctgcacctgagattctctcttccatctcttgtattctgttgccaattcttgcatctatgtttccagatttctttcctaggtttactatctccagtgttgcctcactttgcatgttctttattgtatctacttccctttttaggtcttggatgattttattcaattccatcacctgtttggtcttgttttcctgcaattctttaagggatttttgtgcttcttctttaaggtcttctacctgtttagcagtgttctcctgtatttctttaagtgagttattaaattccttcttgatgtcctctaccatcatcatgagatatgcttttaaatccaggtctagctttttgggtgtgttggggtgcccaggactgggtgggataggagtgctgcattctgatgatggtgagtggtcttggtttctgttagtaagattcttacatttgcctttcaccatctggtaatctctggagttagttgttatagttgtctctggttagagcctgttcctcaggtgattatattagcctctatcagcagaccttggagactagatctctcctgagtttcagtggtcagagtactctctgcaggcaagctctcctcttgcagggaagttgcccagatatctggcgttcgaacctgcctcctggcagaagttgtgttccactcaccagaggtcttaacatcccgtggagagtcctgtggagaccttgggggtgtccacagactctgtgcccaaggtgccctggtgctggttgctgaccggaagggtgacatttcaattcttaacatctatgcccaaacactcaagggcataaaattttataacagaatcactcaggactgaaagggaggtaccttagatgaaatgcccaacaaacagtggagagagggaattcatagagtacaacgtatctacaaggcgaagcaagaacttgaaaatcagcaaaaatgaaaaggggatataataatagatattgaagaaatccaaagaatcataatgtcatacctgtacattgccatatcagaaagtctaaaagaaatgtataatttccatcatgcatgttacttatcaaagtgaaatcaatatgaggtaatcaatttaaaagaactataatactcagtgaaagaagaacccctcccctccccaaataaaaaacctcaggcccagacagttttagtatagaattatatcagactttcaaagaagaagtggcatcaagatttctcaaatattacataaaacagaaacataaaggaccttatccagttcattatatgaggttactgtt

SEQ ID NO: 5073 - DNA, 1000 bp, mus musculus
ctacttggtagaacatcttgagcaggattaggaggcatggccttgttggaaatattttgttagatattccaagctaagtctttccttgactccttatagatagaatttgagctctgagctcctagtccagggactatttgcctgcctaacagcagccatgctcccttccccacccctaaggtggtcatggacacactctttgaaactatatgtaagcaaccaatgaaatatgtcgtttgtaacttaatttggtcatgggatctcctcagaacaatagaacaggaactgagagaaatgaaaagtttagacagcagtgcctttgaaggctgaccctgtttccttcagatgtattggttttaaaatgctaattcccaatttcattttctctaatttccaactctgaaagtttaggttaaataactataaagtgattatgaaagttcaccaaatacatatgtggcaaattaatttttaaacattaaatctcagagagatttccaagcagacatagacttaggaaaaataaagtttaattgagttaggatagaattttacttcaaccaaagaaaacatatattttaatcactaacaaaaattgtagaaccacaaagacccgtaaaaagacaaatggttctcttctacccacatgggaaaatagcacagatatatatatagcactgacctttcaactaaccctgcaaaatgaaattctcatctgcaagtctttatagaacacaaaggctagtttagctgtaattttcagcatctgttccagtatattgttttagttaacatcatgaccaaaaataactcatgatagaaagggcttctttggctcatacttccacatttgtagtccactgctgaagacagtcagggctagaactcaaatagagtgataacctcgagacaggagctgatgcagaggtcacagagggctgctccttactgacttgctcctcataggctgctcagacagctttcttatagaacccaggac

SEQ ID NO: 5074 - DNA, 1200 bp, mus musculus
gctattaaaaacaaggataccatgtaatttataggtaaatggatggaacaaaacaatatcctgagtgaggtaatccagatccaaaatgatatgcatggcatgtattcacctgtaagtggatattaattataaagtacaggattatcatgctacaatccacagacccaacagagctaagtgacaaggagggtccaagagaggatgcttgaatctcactccgaaggggatgtggatggagtgagggaactaataggaaaaaagatgggggtggagtgtgtgtatgtgggggtgtgggggatcatatgtaggaagaaccaggaagagatggccagaagagtgaacaaaacgtggtggatgagggctgcatctctaggatgtgcaagagatctggaatggggaggctccaggaagtttttgagggtggctctagctgaaactctttgcagtaggggatatggaacctgaagttactacctcctatagccaagcaggactaccaatggagtgataagaacactaaccacccagacaaacttcgaagcaaaatttgtcctgtctacaagaagttcagggacaaagagcagagactgagggaatggccaaccaatgactggtccaacttgagatccatcccattggaaagaaccaatctctgatactattagtaatactcggtatgtttgaagatgggagcataactgttctctgaaaggttccacccaccaactgattcaaacagacacagagacccacagccactagacagagttcaggaagaattgtggaagagtttggggaaagattgaggaagccagaggggatagggattctacaagaagaccaacaaaatcaactaaactgggccattgggagtttccagagactgaaccaccaaccacagagcatacaatggctgggactaagccccctgtagatatgtagcagatattcagctcagtctttatgcaggttcccccaagaaatggagcaggggcatattatggctctgttgcctggctgtggatcctattcctctaactaggctgtcttgtctagcctcagtgggagaggatgtacccagtcctgcagtggtttgaggtgccagagtgggatggtaccatgggacacctcccccttctcagagatgaaggggggataagaacaagggaccatataatggggggaatgggagaagaggaa

SEQ ID NO: 5075 - DNA, 1200 bp, mus musculus
atgcttaacaggtaatatataccttaagtaaattgtccatacacaatacagcaccatatataaagagtatacattctgaaaacatttaaaaatttaacattgagcccttccggtcggcgccagcaccgggtctccttgggcgcagagttggtggacactcccccccccccaggtccctagaggactctccacatgatcttaggaccacgggtgagtagaacacaacttctgttccattccaatcgcgtgggacctgagacagcattagggaagcactttgggcttggagtcggcagatacctcccctcctccccaaggtctctagaggactctccacgtgatcttaggaccatggtgagtggaactcaacttctgttccattccaatcgcatgggaccagcattagggaaacagaaaacctggcctgaccagggtcacaagtcccttctggtcggcaccagcaccgggtcaactgggcgaagagtcagaagacacccccaaggtccctagaggacagcttctgaggcagaccccatttcaggctccagatatccaggcaccttccctgccacaggacaggtgtcttccctgccacaggacaggtgtcctccctgcctgggagggctttgctggagcacctggggaatccatcttggatcccagatccctccaagactagtctgctcagatgagagtgtggattacagaagctaacagtttctgggacaggccctgtttcaggccttcatcttctgccaggagacacgtccgaacaccagatatctgtgcaccttccctgcaagaggagagcttgcctgaagagagtgctcagaccactgaaacttaggagagatctagtctcccaggtctgctgatagaggctaacagaatcactggaggaacaagctctaaccagagacaactataacaactaactccagagagtaccagatgtcaaaaggcaaacgtaagaatcttactaacagaaaccaagaccactcaccatcatcagaacgcagcactcccacctcacccagtcctgggcaccccaacacacctgaaaacttagacacggatttaaaggcatatctcatgatgatggtagaggacatcaaaaaggactttaataactcacttaaagaaatacatgagaacactgctaaagtgttacaagtccttaaagaaaaacaggaaaacaca

SEQ ID NO: 5076 - DNA, 1600 bp, mus musculus
ttgcttttggtcattctgtttatcacagcagtgtttgctatttatcacatgaagacagaaatagggccgatccagatggaggagaagatgggaaggaacttagaggattaggcggaggagaaaccataatcaggatatattgtgtgagaaaataatgtattttctttctttttttttttccttaccctcaagcctttgtttttttctttctcacttccacacaacagaaatggtgtggtacagaactgaggggaaaaaattggcagtctttgacttttttttttagtggggaaggaggacacaaaagacaacagagttggggcctaaaccctatgccttttgctgctagcattctctcatggagctacatccccagtgtctgctggatctttgatcaagtctcacctgtggcttggggtaacacagaaaaacaatttcactccagtccccaagaattaaatctttttggcatcggacaaccagtcgtattgcacagttcagcagttacagggaaaacaccacctattatacagacatgtggcaggggacaggccaaatcttgctcagggcttctggttaaaaccgcagcaagttttctgggagttggcaactgaaagtaacttctagaaatgaacaggcacccaggggactctggaaagcacttaaatttctggtcttcacaggaatctttatccgggggcctctttcttggccactgaaaagcgtctttttctggaccaaaggagagggatgtgttgatcactggtcaggctggagggtgtcaggagggtcaagagaacaccactagaggaagtcaagtcaatcgcagaccaatggttcaaaggtctagaaaggaaggttgcttgggctggatcctttcccctccttttctccgattaaatacgaaagccaacaaagacgaagatacgaagatacagttgttggctttcgtatttaatcggggggaaaaaaagatgaagatacgggaaaaggacgacaaagaaagtggcatctcgtgtatcgtcccagcggagccccttgttggcctggttctcctgctttttgcgaagggcttccctccgcagaagccattctctctctagctgctctccatagagcgcctagtagaaggcatcaaagtcgaacatggtgcgactgtcgctggaagaagcccgagagccacctggagcccgaggggtgtagggaggagggcgaggaggagtgggattggccatgggagtcttagagggcttgatgccaggttcacgcaggtcctggtcgctgagcaaacctcggtcatacttgcgcaggaggatgatgctgcccaagaccaggtaagcttcggatacacgcgtgaagcgctcggcggccttggcgctcccggggttgagatccggatggtagaggaagctctgccggaagtacgccgctttgatctgtgcctgcgtggccatggaggggacgcccagcagctcatagagggcagtgcaggagtaagtcctccctcgcgagcacaaacccgtggcggaactcggaggcaacccgcggacctgccaccatctccatagcggtgacagggtcatgtattttcaatagaaaa

SEQ ID NO: 5077 - DNA, 1000 bp, mus musculus
catgggggaaagcaaaaagacctggttgtgactggtaaggagagcttaagacaaggtagggaatgacttacacatgagcacaagagttgtggagacatagtaaacattgcaagaagttcagtatttgtgctgaggctgtggagaacatagaactggaaggttaaaatagtttggcttctccatcctgccaaacagaaagtagcctggcagggccagacccggagcaagcagctagggtagcatgtgctcccaggctctgggtgagttaatgtgtctgggatgaaatggaatggagctgaagagaaacgcaggtatgaagataaccaatcagaatgaagggactcagaacatgatgtgttaggcagagagagaggcatggttacggcgattaaggctcatctcccatctccccacttggtgaactaggaacgtggatggaggagcaactgtggtggagaaacggtgtatgcttttgagatggactgagattgaattggaaggcatgtttagaactcagggcttgaaacacttgtatcctccatgtcttccctccctctgagagcagccctggatgtcctctgtgctcctcagtgatcagtgagaacttgttctgatgattgatgccatgagggagtggaagccagaagacaggtactggagaagaagtgttcaggagagaaaggatatcgagagggaccgccagtgagaaagaacgtcagagccacctaaacaaagtcagaacacgcctttcacatctcactgctgaaccctgggagaactaacacctcacgagtaggattaagaacttgtccgggcagtggtggtacatgcctttaatcccagcacttgggaggcagaggcaggtggatttcccagttcgaggccagcctggtctacagagtgagttccaggacagccagggctatacagagaaaccctgtctcagaaaacaaaaacaaaaacaaaagaactgtaatattctagcatccttgaaacaggc

SEQ ID NO: 5078 - DNA, 1000 bp, mus musculus
tacagagaaaccctgccttgaaaaaccaaagagagagagagagagagagagagagagagagagagagagagagagagagagagagagagagagagagcaggctgaggcaagccagggcaggcaagccaataaagaacatcctttcatggcctctgtatcagctcctgcttcctcacctgtttgagttccagtcctgacttccttggtgataaacaacagtatggaaatgtaagctgaataaaccctttcctcccaacttgcttcttggtcatgatgtttgtgcaggaatagaaaccctgactaagacagcaagcaaacctgatgatccaagatgcatccccaaaactcacaatgagaggagagaggccacttctgatagttgtcaactgactccctcatgtgtgcgtgccttggtaccacacacacatacatacaccacatgcataatacataagataacatttataacattaaactgcatagacatttttccattctttctttttcacggggtctcttgtatcgcaggctggtcctgaacttgctttataaccaaggatgacgttgaaagtcttatccttcagcctccccttcccgagtgctgttacaggcatgcaacaccatgtccatgtgatattgggaactcggggctttgtacatcaagacaagcacactagcaactgagctaacctagctaaggatccaggaacttagaggttcctgttatttgctaataaacctcatgtgtgccctctgacttggaacactctgcatctgaagagaacaggagaagcgcgataggaggcaaaggaaatggttttccaagacagctctcgctaatggcagacaggatggaggtgtgaaagagtgtggatgtgggagcagtcgtgaagcctgtgtgcttcaaaggaaaggagagagcggcaatctgttcttgtgcttccacaagttaacctgttggggttaagttgagtgactttcatgacccacgatattaatt

SEQ ID NO: 5079 - DNA, 1000 bp, mus musculus
tcatgcttggcccctcatcatgtcacatctgtctgtccttgctgataccttctgagttcctagcttctcagttcactacttacatactatgccacttccatcatctctcttctggccttttgtcttagctattagcctttatttcccttgagttccgctatgactttgacattgtaacaatacaagtcctagctatcaactctctcacattattttgggtgcttaaaaaactagatttacttcccaagaaatctttattctgatttgcaatgatctccttaggtttgaaccacctgatccccttctctgtatctctttttcagacccagaatggcttgatccactagcctcacctctcactagacatagaatgccctgcctgttgtctttgccagcccataacagtgctccccaccgttcctcctttgtcctgtgctacctgtctctcccctttcagtcagacatgaccgttggtgctcttctcaagggtttctctcttgaggctttctctgactttccctgtcttcctggtgtttttgctttgggaactttattttcacatagtcattaccctttctgagaggttgtccccagtttcctgggtaccagctgagctctgcactgaggctcttagctataggcgactgcaaagtcctacactgccttctttgcccaccagctgctggcagagcagtaggctggggatgctaatgactgatacctgttggatggaatttatatggctgtgagaacacataataagcactcatagtctgttactcaacatttgccctgaggttttctacagcttctaatgtagatgcctgagtgaaccaaatggacatggaagcctggcggcattggttgagttccctgttagagctttgaggggacagtggccacccttctgcttggcttgctttcatgtgttgttgaagttagacattaagaaatagagcagacctggtaatagagaaaatccttgagcaggtcgtgtttt

SEQ ID NO: 5080 - DNA, 1200 bp, mus musculus
agagtcacatgctagtctaatgagtcatattggagagtcacatgctagtctaatgagtcatattggagagtcacatgctagtctaatgagtcatattggagagtcacatgctagtctaatgagtcagtctttatatgtgacttggtctttttcccttgcagctttaaaattttaaaaataattttctgagactttaatataatttcatcattttcccttttccttccccctctccacaccctgccatagactcttgctctctttcaagtttttggccgtttttaaaattaatttttacataatacacacacacacacacacattcctaaatacacaagtgcagcctgctcagtttgtataatattacttacatgcatttgttttcagggatggccctttggtattagacaaccagctggtgtgctcttggctgggaatactgttgccccagctctctgcagtcctcagttgcctgtagtcctttgtgtggagttaagacctcacagggtttcctcaccacatcaacctttgttattttgtttttcctgcttgcagctttgttttttaataatattttttattagatattttctttatatacatttcaaatgctatcctgaaagttccctataccctcccccaaccctgatcccctacccacccattcccacttcttggccctggtgttcccctgtactggggcatataaagtttgcaagacctaggggcctctcttcccaatgatggctgactaggccatcttttgatatatatgcagctagagacaagagctccgggaggtactggttagttcatattgttccacctataggttgcagatccccccagctccttgggtactttctctagctcctccattgggggccctgtgatctatccaatagctgactgtgagcatccacttctgtgtttgccaggtactggcatagcctcatacaagacagctataccagggtcccttcagcaaaatcttgctggcatatgcaatagtgactgggtttggtggctgattatgggatggatccccgggtggggtagtctctggatagtccatcctttcgtcttagctccaaactttgtctctgtaactccttttatgggtattttgttccctattctaaggaggaatgaagtatccacccgttggtcttccctcttcttgattgtcttgtgttttgt

SEQ ID NO: 5081 - DNA, 1000 bp, mus musculus
ttagattttgttagtaaacagctcattgttctgagagagctgtgccacccatctggccctacagttttaatagaaaataaagagtgtgagtggaatgatcaccgccatctagttaaaaaagtggcattggatcaatacatctttgaaagttgacagaggacaaggttggctgatgacggcactgatgtacagtcagaaacaccccagggttggaggcatcgccagtgcaatagcacagcatctggagaaccttgtgatcgcttagcccactgaagctcagttccccagctggaaatttggacagaatggccacctcacaggcttccctgaggactcagaatatagtacaaagcctcttgaagcctaggtccaatactgcgactccattgcccatcaaattgagttggctaaagcaacctccaaggttgtcttacactcacagttgtctggactgtcatttgatggcagctgctgtgatgatgagagctgatgtgaagtcacttaggagaagagagctgctttgcagttgggcgaccacagtgtatctgccatttatatgctgtagttagcattttaatagccctagcacaagtaccaaaatgaacaaattaaaagagaaaggataggttttttttctcatgatttcaaaagtttcagttcctagtcctcatctccatcagttctgagagcatagagaggcagaaaagatggcactgggagtatacaacagaagtttcccacgtcatggtgaccaggaagcagatgagaggaggggacctgcaaacccctcaaaagccatgcccctagtgacctgcttcctctcgacctggtaacgtaggtctcacctcctaaactttccaaccccctcccccgaatgctattagtgacagaggatgtgttcagcacatgagcgcgtgtgtgcatgcgtgtgtgcatgtgtgttgggtggggtgggcagatatctcatgtcatgccgtaacagctgcagatatttacatcg

SEQ ID NO: 5082 - DNA, 1200 bp, mus musculus
gttcaaacctggtcatcagaaaatggtagagagcgaattgggagattaaacttaggctgatggtgggacccatcgtctgtattgctgtgctcaggcatagcgtggcaaccatttgtatggatgtctcctgctcatggagattgcattcctgaaagggtttccatgttggatcagatgatcagactcccataggaacacttcacggaaagaaggacccacttgaaatttccgtggtgtcagtgtgtccagagacatgattttaagttatagacaaggatgatgggatggagcagctgaactcctcataaaatctaagtcaccgtaaagagttctagtgtgtggagcgatgctctcgagaccacgagagccagtctacctaatgaggtctgcgcatgaagtaatgagagtctgcacagtgtttggatgccaagtaatgggaatctgcacaaagtttattcagcagtttgggcagaggtatttgatttaaacgatgctcgaatgcatcctattctcactttctggatgtctgggtcaaatctaacccacctgagtctggaagaggtctaatttgagtgtgtgcactcaacatttcagacccaagcatggagcccccagtatttaactgtagaaataaaattgtcagttcaagtgtctctttcctattaaaatcattccgcatgcaatttaggtttctattcttgtactcgttggctttgtcctcgaggagcaggatggaggcacatcgtgcttttgttgcagagtgaagcagaggtagtgctgtcatctccctgaagggtgacagttcctggttcctccacacctgcagagccctagacaacacatcacattcacctagtgtgcctgggaaagcatagtgtttatagtgtttgttcttcttttttcttgctgagggcttttactccaagcttggtctcagatccaacacaggagtcccagccttgtctactaaggagagagcaagggagtggacctgaagctttgtcacgtttaatcgggtggcctttcctaggattgactgattgacttgcagccttcaataggttttccaagacatttaggaaatacagtgttttcttttctctgtcgctgacattagtggcactaaatatttaatcacggatgagggctgcagacgctgtcccagagtgataaataatgagcccctgtacatttgtgact

SEQ ID NO: 5083 - DNA, 1000 bp, mus musculus
aaacagctttactcacaaatgttaagtgtaatgggtccttggtctggtttgaggcctctggcttctgctacactaccaatcctggatcctcattggaactccttctacatattgggttgttgcttatgtcatggagatccttcagctctacatataccggaccagccctttcacatattccatcagtagttcacagatggcgtggatctgggtctggttggtagctcagtcagttagccaaccagtgcttctgtgaccacaccaccagggccagctctcctgctcttttgcccttgggtggactgtgccacacccacacaaccagggccagctatgttatccaggctagatatgagtccagatttgcttagtgtaggagctgtccaggggtcaggccagatcagcacagtgccctatgggtggcagtccagatcattgatgcccacatggtctttggtggtaacctgttcacagacatcaaaggcctccgcatggccctcagcagcagcctgagccaggacatcaccatgatctcaggtagttacacaaactactcagatcaaattttcttccaataacccccatctgccaacctccccaccctagtcctcagcaccctaccatcacattagtgcggctcctacccctatccccagacattaacatgtcagtggcagctcagaccagtgacattcagatgcccctctatggcaacacagaccaagtcaccatcacagatcctggttgcagtagtgcctcagacacagaaagggcccttattggtagcccagcctgggacatcaccatgaccctaggtgattacacaggctcattatatctgtctgttcatcacttccagttctatgtctcttcacattaaatacgtaaattcgctttctctctcatctcttcactatgtatttactccctctttctgatctctccatcacgtatttgttcagcatagtggcatcacccataggccccctaggtgggaacc

SEQ ID NO: 5084 - DNA, 1000 bp, mus musculus
acctggttccacatgtagtgaaggaagctgggtgtgtactgttcttgttctttgggtgtgagcatcatgctctattaccaagatatgctgcttgctcttccagtgtgcctgcatcatgtcctctgtcactgttggcatgaagaacagagagctcctctccaaggaagatgtctgacgtgtttacccactcagagacattctgtcctgcagtgctccttgagcagctgatgtgaacagattgactccctggggtttcctttcctatgtagctccaggctgctgtagtcaattgaagacactggcaagagaagaaagggcaagagaataaagggcaagagaagacactattgagacaatacccatacctacccaactcccttacagtgccagtatctctttggcaagaggctgtagccattataatcacagttccctaaactgtccctagttttcatcagtattccttatcttctttgctccttttagcttgtaattgattctgggtatctcaattttatttttgaagtttgatttttttatatgcctctaccactctatgttgtttcattaaaatctttctagtggacccatctgatttggattgtatattattagggctgattaatataaagaaaacatttgtgtactgagtagtagaactgcctctacctccttcatgaagacttttgtcaaatgtcctttctagttcagggaaaaatgaagtccagcttatttgaactgctcagccatcactgtgatctgacattgttttcctgcttagcagaccgtgtgcactactggagaccaatctgtagccttgatacgctgattcactatgcgctgcctgctctgccctggcagcagattgattgacttctgggcaaggaggctcctggctgagctctcgagttgcccactatacttgccaaggcttcaagtggctctaatgagttttcccatgcacaagctgtagcctaacatgcctgtttgcagtaagcaa

SEQ ID NO: 5085 - DNA, 1400 bp, mus musculus
tgagttgtcttaagagaaagaaaacaccttctctaatgagaggcagtaattctttttttaatttaatttaatatacatcctgctcactgccccctccagtcactcttcctacaatccttcctcaacctcccttccttctcctccaagtggcagggtcccctgagtaacacccactcttgtacttcaagtctctggaaggccaggtgctttctctccaactgaggccagacagggcagtccagctagaagaacatattccccttaggggattaggcagcagcttttggaatagcccctgttcaagttgttcaggacccacatgaagaccaagctgcacatctgctacatatgtgcaggaaggcctaggtccagaccatatatgttctttgattggtgtttaaaactctgagcatccaggttagttaactgtgttggtcttcctgtggagttcctatgaccttcaggctgcaatacttcctcctactcttccgtaaatgtccccaagctccatccactgtttggctgtgggtatctgcatgagtcagcttctgggtggagcctctcagaggacaacttgctgctatctgcaagcataacagagtatccttaatagagatagggattagtgcttgcccctgggatgggtctcaagttgggtctgttatcagttggccattctttcagtctctgcttcatcttccttacccgcatttcttttagacatgatacattttgggttgaaaattttgtgggtaggttggtgtctctatcgcttcactgggttgcatctacaggagatgacttcttcaggttccatatgcccagtgtagtgcgtcacgggtaaggtcatcccaattcattcttgagtgtctcccttaacccaggtctctgtctcatccttgagatgcctctctttactcactcttgtcagtttcaaatttccatccatttccatggccatctagctatctctcctgtatttccccatacatgatcctaaaaaccccccttcccttctccatctcccctctttcccatttccctccctccatctaaaatgtagtaattattattgccaatgataaatctagacaaatacaattataaaagttaacattaatcaaattccctaaatttctaggtaagaattgtgaagctaaaataatataaaaaaaaaaaacaaaatgtataaagtaagtgggaaatttgtttggaattgataggatcttacagccttgaagagttagaaagaaaattgaaatattatttactgttactatgcatacctactaatacagtagcagggaagaaaaatcatatacaatatgaagatgtaagctaactaaaaacataaaaatgaatgacaaagataaagccaaatacaaatgctatatatatat

SEQ ID NO: 5086 - DNA, 1000 bp, mus musculus
gagaagagaagagaagagaagagaagagaagagaagagaagagaaaagaaaagaaaagaaaagaaaagaaaagaaaagaaaagaaaagaaaaggtgtgtcatacctaggtttctattgccatgacaaaacaccatgaccaaaagcaacttggaaaggaaaagatttatttcagtttacagttagttccacatcacagcatgtcatccaggcaaatcggagcagaaatctagaagcaggacctgttgcagaagctatggaggattgctgcttactggcttgctcctcatggctttggtatggcacccaggatcaccaccccatatccacagtgacctgggacaccccacatcaatcatcagtccagatgattgataccacaggctttcccacagtcaaaactaatgggagttctttctcaattgagactccatatcccaaaatgattctagcttgagtcaagttgaaataaaactagtcagcacagaatgacttaaagatcctctttctctgtagtgacttaagaacaatgggaaattggaaggggaagtttcctctaggactagcatcttgtgattaatagacgtatcattatgattagcaagaaggataaagaatagtatcctcatgaggaattgtgatgaatctcaataataccaagaaggttgccataaaccgaatccagaatgctatggtttgatacctcggtgttgtggtctcatacagaacttgatccaggtgtctgtgctgctgacacacacagaggatttcactctgcggcagttgtgtgctttgacagagacacacaatggatccctgtgtgtacgttttgtttgcattgctcaatttctttctgcagcttaaaggagacaaatcaaactctgtcaggggaatgcgcttggccacagcatggtacgaattttagttagaccaacaatggtcatctgtcaagatcctcccactaagactttgactgtctaggtttaccaaaatgcaactgga

SEQ ID NO: 5087 - DNA, 1800 bp, mus musculus
tgagagaagagaacagattactacagtttgtccacagtgtgtgtgtgtgtgtgtgtgtgtgtgtgtgtgtgtgtgtgtgtgtgtgtgtgtgtgtgtgtgtgtatttaattaattacaggagtccatgctgtatcacattattttttccttctaaaataccttttgctgctttcgaactattctgaaatagaactggctttaatttggtttcattgttggcgcattgtttgttttggtttgagctaacttggctagtgtcggaactcattcattcattcttccctggtgggcaactagatgattgtaggacaactttatttattttcttgtggttgacaagatttgaatatatgtgtctcatctttaatcagccagcaggcaagcccagtgcattaaactggtctctccagagaagtagaagtgataggatgtaggaaacgtggtggaataggaaaggaagaagagaggaaaaatttgtttataagtaatttgcatgtgtgactctcttaattattattcttttgttgtgcagagacaccctgaccaaggcagcttatgaaagaaaagcattatattgggtgcttgcttaaagtttcaaaggagtgttagtccatgatcattatggcaggaagtatggtggcaggcagacatggtgctggagcaatagctgtaagcttatatccttacctataggcaggagcaaaaagagagagggagataatgtgctttatatgagcctttcaaacctcaaaggccaccacaattgcaaacctcctccaacaaggccatacttcctacttcttcttaaacagtccaccaagtgggacccagacatcccagtatattagtctgtctgagccattctcccttaaaccaacgcagttactgtgaagtctgagttgctcaaggatttgcacatggtaagctagtgaatagaagaactgacagtatagttttagtctaggttcaaagcttaggaagttagttttattttaaattattattattattaatttttcttctttacactccagattttattcccctcctgttcctattcccaccctccaactgttccacgtcccatacctcctcctcctgtccccctccacaaggatgtccccatcccaccacacccccaccagacctctaaactccccggggcctccagtctcttgagggctaggtacatcttttctgactgaatgcagacccggcagtcctctgctgtatatgtgttgggggcctgttatcagctggtgttttctgcctgattggtgatccagtgtcagagatcttgggtccaggttcattgagactgctggtcctcctacagggttgccttcctcctcagcttcttccagcttttccctaatttaaccctaggggtcagcagcttctgtccactagttgggcgcaaatatctgcatcagactcagctgcttgttgggtctttccaagggcagtcatgataggtccctttttgtgaatgctccatagtctcagtaatagagtcaggccttggggcctctccttgagctggatcccactttggacctgtcgctggaccttcttttcctcaggctcctctccatttccatccctgcagttttttcataccagaacaattatgggtcagagttttgattaaaagagctcatatatcagttacattctgtaggtagggaaggaaggatgatgaccaaaaaaaaaatgtatgtatgtatgtgtatatatgtatgtgtatatgtatgtgtgtgtgtgtgtgtgtatatatatatatatatatatatatatata

SEQ ID NO: 5088 - DNA, 1200 bp, mus musculus
aagtttaaaggaatgaaatttaaaagaaatgggagtggttagcctttctttagagacttgtttcctgaactatttaccattcacagtgagacagtaagtcagaaatgaaaaaacacatcatcatcactaacaggagtccatcaaatatgcaagccattctatccatcagcaaatattctgtcttcagaagatacacagatatgtccttcagttgagaaagccccaagatcacaaatcattatccaccttggaaacagaaaatatcaaatataaatttctaaattaattatatttgaaatacttaatatgtaatgcagaaaatgtgaggattaaaaaatagatcaaatataattcaggcaaattttcagtattgtgattagaatctgaaactctctcctacaggctcaggatttgactttttgctcctgaacttatcaaagtatttggaactcatttcataagtaggtcattgggagtgggctttcaaagctcttgacagctcttgattcctacttcagccactgcttcctggtatgtggtcactgaataaaccaccaccctcatgttcctgccaccatgcctcccctgtcataacagactctttttttaaattaggtattttcttcatttacatttccaatgctattccaaaagtcccccatgcccttccccccctccgactccccctacccacccactctcacttcttggccctggcatccccctgtacagaggcagataaagtttgcaagaccaatgggcctctctttccactgatggccgactaggccatcttctgattcatatgcagctagagacacgagctccagaggatactggttagttcgtattgttgttccacctatagggttgcaggtccctttagctccttgggtactttctttagctcctctattgggggccctgtgatccatccaatagctgactgtgagcatccacttctgtgtttgctatgcccaggcatagcctcacaagagacagctatatcagggtggtgagcccaggtacatatttgctttcttccagtgttttaattggatattttggttgcactgatgcagcagtaactaatcaattcagatgtcaattatcaaagttaataatatagattatatttggccttttgcctttaaatgtccaatttcttagtaaagtgggaatactgtgggatcaggtatt

SEQ ID NO: 5089 - DNA, 1000 bp, mus musculus
tttaatgatttttaaattacttcatgggtatgagtattttatgtgtatgtacatctgggcaccacatgcttgtctaataactatggaagccagaagagggtgttgtagccactgaaacttgaaggacaggtgattgtgagccatcaaacggaaatctggtcttttggaatagtagcaaatgctcctagcctctcaatcatttctcctgttcccctgattattttcctaagacttgtttttagacttgccatctatagaagtataaaccttcaaaggtttatatgtcacttggtagatctgtgagaacacagaggtctttactgtcacctgagactgtttttatcttgtttccagccagataatcaggtaataacatagctacacattgttaaatgatagtttgtaacggactaaataaggactaaataaggatctctagtgattaaatagctagctaatccttgaatccacatgccagtaacttccattgtatacacactagattctgtgaatctttgtaatagctgcaattctttttttattagatattttctttatttacatttcaaatgttcatctttcctggtttcccctctgaaaactccctactccttccccttcccctgctcactaatctacttactcccacttccctgtcctggcattccccgacattggggcaccaagccttctcaggatcaagtgcctttcctcccattgatgtccaacaaggccatcttctgctacatatgcagctggagccatgggtccctccatgtgtactctttggttggtgatttagttcctgaggtctctgggggtactggttagttcatattgttttccctcctatggggctgcaagctccttgagatccttcagtcctttctctagctcctccattggggaccttgtgcttagtccaatgattggctgagaacattcacctctatatttgtcaggcacaggcagagcctctaagggaacagatatatcaggc

SEQ ID NO: 5090 - DNA, 1000 bp, mus musculus
ttgttctgaagagataccacaaccaagtcaactcttttaaaggacaacatataattggggcttgcttacagttttagaggttcagtccatttttatcaaggcagaaagcatggcagcatccaggcagacatggtgctggagaaggagctgagagttcaagatcttgatccaactgcagccagaaaatgactgaaatcctcaggcagctaggaggaggatctcaaagcccacccacaaagtcacaacaaggccacacctcaagtagtgccactccctggttcaagcatattcaaaccagtacaaaaaccttctcctgagactagctaagcccttctctctgtgtcatacactatagacccccgaggctctggtgtgtttgagtagttggtagtaggggcttcattagacagccccttgacccctgatttttctggatgtgtgtctgtgagtctgtcctttttctcatttgcttgctgctttagtgaagtttccaggacagagctatgctggatgcagcttgttactttattttccagtgatggacggattatgtgctagctttttgttataatcattatatttcttactttaggtagtggcctagctttttccttctttttagttctcagattttcaccttttaagatctattttcttatgcattgtgtatttgtgatactttgttcttctatattaatttttagttgaaattacagtttattctcagttcctatcatgccgtttcaaatgcttctgtttctgatctgtgtgggtttattcatcactctgtcattttgtgagatatttttttgctttgaatagatgagagttgagttttcatctctagcatatccttctctactgggcttttactcccagatataattttatgtcctattattctttttattcataatgactttctatttgagttctctcttttggtgggaaattagtttcactgaacttttagaagaaagggggagttcagagataacat

SEQ ID NO: 5091 - DNA, 1800 bp, mus musculus
taaaaacatgctcacattaatgcctgtgcacacacataattgcttcatttgagattatactatctaggatgagaatatctttgatttttctgctgacattcaggatataaactcttgcaattaagaacttaacagttctttttatgatggggatggcagggaaatcaacacagcactgggctctgcttttatggaagttctaactaaaacgcactagaattttcaaagtgtgacacagttgttagagaatcatttgattatctcatttataaccacatgcttttaattcataactatccactctggagaaagatcatttgaatttaactattaagatttacttcaagcttaaattggttctaaagtcagaggaggaagatggaagagaaaaagagacagcaatttacatatttatattcattgaactgtttgatagcttcgatgatattgtgcattgtcctaagctcagtaaaaagaataaaaaataaaaattcttgacattcaatgatttctgtgtaatagcaatgtatggataggagagttgccaggtaagtttaataaaatggtatgaaatgcaaaatgtttttaataaaaacacagagaagttctcatacagactacatttgaccctaagggtcttctcagagaactgtgtgatttaatagatttgggacaaaataaaccaacaagcaagcaaacaaacaaacaaaatcaaacaaaacacagaaataaatctgagaacagttaggacaggattgctgcttaaagacaaagtcatgttaggaagaaatggagacagtgatggactatcctgttgtgtgagacgtattgtatttatcatcgagtagcagattcaccagcttcagagctcgggagaaagtaatccatgactaactgtgcacaggggccctgactcgctttgcatactcgtcccctgtgctactttgtctctagatgaggcttcctcttttcctttattgttcttaagcatttcccatttttacatttctcactcagccttggcaccgtaatacttcctactactcttgccctttaagcttccaaactaatgatattcgtaaggatccatctttggattaataaaactatatatactagcaactccctatatacatttaatttaaaagtggtattaaacatttagaaacttttagacactgtaaaaaggccaaccctacaaatacatcgttggtatagatggaagagaaacaaaaacaaacaaacaaacaaaaaaaaaaaaaaaacaggtgaaaccaacagaaagtactttaacaaaaattatagaagacaagttcccaaatgaaaagaaagaagtgcctatcaaggttacaactacaacatccagtgtatctgaccacaaggagtaaggcttgatgtcaacaacagacacaatgtcagaagctataactcatagaaagctaggaacacactgttgaaggaaaatctgatgaagggaaatatcaagaaaggaattgaatgaaagcaaaaatacaatttaccaaaatctctcaatgaagaccggatgtttacagcactgcacttacatgagcaagctgaagagatctcctgataataacttaaagttttgcccaaaagccttggaaaatcaagggaaaaacacagaaaacagaatatgggaagggaaaataaaagtcagacctacaattaatgaaagagaaaaacagaacaacaatacaaataattaatgaaacaaagagtagaacctttgtagggaatagcaataatgaggaaaatttagccaaattaaccaaaagaaag

SEQ ID NO: 5092 - DNA, 1000 bp, mus musculus
cacggaacatgtgaactttgcatcagaaacattttgtgccacccagttttgagactacctgatgatactttctagttccatccatttacctaaaaatttcatgaattcatcatttttaatagctgagtagtactccattgtgtaaatgtaccacattttctgtatccattcctctgttgaggaacatctgggttctttccagcttctggctattataaataagactgctatgaacatattagagcatgtgaccttattacatgttggagtatcttctgggtatatgctagaaaaatcatcctaagtgaggtaaaacaatcacaaaagaacacaaatgtgcactcatggataagtgaatgttatcccaggagctccaaatacccaagataaaactcacaggccacataaagctcaagaaggaggaagaccaaagtgtggatatttcagtccttcttagaaggggggacaaaatgccaatgggaggagatagagagacaaagtgtggagcagagactgaaggaacagccatccagagacagccccatctggggatacatcccatatacacttgccaaacccagacactaatgtggatgccaacaagtgcttgctgacaggagcctaatatagctgtctcctgagaggttctgccaatgcctgacaaatacagagatggatgctctcagccatttactaagcacaaggtccacaatggaggtgctagagaaagtacctgaggagctgaaggggtttgcagccccataggaggaacaacaatatgaaccaaccagtactcccagagcttccaggggctaaaccaccaacaaaagagtacacatggaggaacccatggctccagctgcatatgtagcagaggaaggccttgttggacatcaatgggaggagaggcccttgattctaggaaggcttgatgccccagtgtaggtgaatgccaggacagggacatgggagtagcagggggaaaaaggatgggataggg

SEQ ID NO: 5093 - DNA, 1200 bp, mus musculus
cattgttgaaaggatatactttttttaagtcgatgtccctcagtgtagccccaaccagccaaatactcactaattagaccagtgtaacactgaactcacagagatcctccagcctcccccttctgagtgctttaagtcatacaccactacttctgcctacacagagaatttttaaggcaaagagaattttctgtgggatactgtaatagtgatggacacatggtatcatgtttttgtccaaacacacagaatacacacatcttgagtgaatcttaatgtcatttatgaactctcagtagattgtgtgtcaatgtaggttgattgaatataaaaaaaatgtaaacaagtccactttgcattatctatatactcactggagcatagtcatatttttagtggcctgccccttacacagaacttgagtcctttccctctcacacctctgccagaggccttcagttatggacgttacaagtgagggacctgggaaggattgtgaatggagtacaggaagtgaaacttccagagaatgaatattaatgttaggtggaacgaagtaaacaaaagtaggtatgttcatgatggtatatctgcttgcttatatcataagaaaggcagacgttgagctggtagccaacatgagcttcacccataatgaccagcattcatggtgctgaatggtgttcttcacaccactggagaagaaaggcaatcatcaaactcaccaccttcaaaccctgggatcaacaactgtgacctgcctgtaaaacatactggtacaatggtgtcaggaatgtaatggaaaaaccaaccatttttatttgtttgtttgtttgattgattgattgattgattgattgattggattgactgatttttttaaagacatctgtataacattgctaaaatgttcaagatcttaagactacataggtaataggcatataggaaaacctattaatttcattaatttaaataaacatcgcaataaactgactcctaatgatgtaatactaaagccatagattagtttttcactgaatcttcatcagagaaacttcttgtagtaaactggaattaacagaaagacacaaatggacaatgtccagaaagtaaaagacgttgaagcatttagttctaattgagatgtgttcatcaaacccctcccctcaaggctcaaggatttataatgaaaatgta

SEQ ID NO: 5094 - DNA, 1000 bp, mus musculus
accagcactgggtcaccttgggcgcgaaattggtggacacccccaaagtcccctagagaactctccacgcgattttaagaccaccagtgagtggaaaacaacttcagttccaatccaatcgcacgggacctgagacagcattaggaaagcaggaaacccagaatggccagggtcacaagtcccttctggtgggcgccagcactgggtcacctaggcacggagtcagcagacacccccaaggtcccctagaggacagcttctaagacagaccccatttggggctccagacatccgcgcactttccctgccagaggagaggggtccaccctgcctaggagggctttgctgaagcacctgggggagccatcttggttcccgaatccctcagagactagtctgtgcagatgagagtgtggagtacagaagctaacagcttctgtgacaggccaaagcaacacagcttttgggacagatccttttttcggaccttcatcttctgccaggaggcaggtccaagcaccagataactgtgcaccttccctgtaagaggagagcttgccagcagagagtgctctgaccactgaaactcagaggagagagctagtctcctaggtatgctgagagaagctaacagaatctcgagaggaacagtctctaaccagagacaactataacaactaaatccagagattaccagatggcgaaaggcaaacataagaatcttactaacaaaaaccaagaccactcaccatcatcacaatgcagcactcccacctcgcccaggctaggcacccaaacacacccgaaagcctagacccagatttaaaagcatatctcaaaatgatgatagaggacatcaagaaggacattaataactcacttaaagaaatacagaagaacactgctaaagagttacaagtccttaaagaaaaacaggaaaacacatccaaactcgtgatgaaaatgaacaaaacaatactagacctaaaaagggaagtag

SEQ ID NO: 5095 - DNA, 1000 bp, mus musculus
cctggagttcctgcttctatctcctgagtcttaggataatagcctgcgccaccatggccagcactaagtgatttattaatctcttcaacgtgaagagaaaattatatttgagtgtctaagtaggtaagatgcttcaaaaactgctatttttgctctttaaagtcagaatagttcaaaaggaagggggaaaaaaaaagggaaggaataaaggtgggaaggccgtcggtggggtgtggcctcttttgaaggtaccctggcactttctttcaaacctgaatacaatcaggacaccatgcttgactctatgatactccttcttgttttgtttgtttgtttgtttggctggttgattttgtttatgagatagggtttctctgtgtagccctggctgtcctagaactcactctgcagaccagcctggcctcagcctcacagagatccacttgcctctgcctcccaagtctgggattaaaggcatacactgctggcattgccacagccacagccaccaccacaatcactaccagcaccacctggtgtatggttttaaaaatctgtattgagaacttacatccaagcaaaaccttccttctatatgaatggtgatgacagctttacccagagttgctaaaacgtggggacaccaaagtgtccctcaacaggtgactgagtgcataaaccaactctggcatagcccaccagggacatagcaagtttgaaaagacttgagggaaccttaaatcttatcacttaaatttgtatcttcagtgcacattcgagaaggctacagtgaaagggtctatggccaccagggtttgatgtaagatggcagtttactcttcattgtcagcttcacggactctagaatcaccatggaactacacctgtaagtatgcctatagggatatttctagaaagatgtgactagcatgatggaaaggcctatacgaagtgtcaggacaccacccatggctggggaattctgtgcagaggtccagag

SEQ ID NO: 5096 - DNA, 1600 bp, mus musculus
tatcatgtatgttttttaatttcctctgttacattagcagcgtgttttgttcttcccaaatggttctggggttgagttcaaaataggctgttcattaaaaacaagctgaaatgctctcatgtaagagctaaccagcagtcacaaaactcacaagacagaaacatgaaaaggcatggtatatccaggagagcatgagctagtgcaacagttgaaatgtcaggcaaagaatccagaagtctacttctgaagacagccagtgattcctagatggccacgtccacagtaagaaaattcattcagggtacagaaccacaactcagcaatgtagaagagaaagtgaaccccaaaggttatgtttatacactctgggatgtctaatgttctaaccagagatgtctccatagtgtattccaagttggagaagcaagccccgcattcagacctgtacagccagaccagtcttgtgtggtttgttttcttttcgagacatggtctctttatgtgcccctagcttcctggacctgctatattaactagtctgtccctccaacctacagagaatcagcctgccactgcccctgtgtgctgcaataaaaagcatgcaccaccacgcctgccagtttttacacctttaaaacctgcgcaaccttgaatatgctggaggctgcagatgtcaagcagtccagtggcacgtgagagttctcaatcctgtgacagtgaaccttgtggcagatacctggtttcagaggctggcttgtcagctgatgactggtttggactttatggaattcacaatgattcttaagtgataggtcaaactcttagtgattaaggtgggttactaactaccgtaccctgtgctgctcaggctgaggctgctgactctctctttatgactgcctgctataattatctctcacttaacgcttcgtggggttggttccaggctcttggacctgtgattgctcctcattatcaggctctcagggtaatttagtgttaaacactaggctccgtcttaagtagctaccttcacagcacttggaggcatggggagtggacctcttccacactgatgactggttccagcagaggagtcactatctaaccacaactatgaactatcttcagagtttctctaaactgtgtgctggttctttgggtaggattgctgatttcttttcatcaaggactccttgcttaactttagatggtgcttctgtgcgtgcagaagctgtgtcgtccttccctggactatgcaggagctttattaataataataatgattattattattttatttttcatttttaattacattcgtgtttttccactgtgtctctttggaatggaatctacactttgttttcttgactctccttcagggtgttatagagaagcagtttcagtctgtcattttaccctggaagcttaaagattactttgataaaggcttgattaaggggagaggagtacgagtcagagtctataaaaagtctgtgcctgaagctgggtgtgttagcttgtgcctgtaatcacaacacataggaggcaacgggaggattgcttccaacttcaaggctcttagtctgagttacga

SEQ ID NO: 5097 - DNA, 1000 bp, mus musculus
aattattgtatcctagcttcatggggacatcttctcatttgtccccgccaccccccacccccaatcccaaacccaaaatgaagaagataacattttgaatgtaatacttgacagcttctattatggtttctgtcaccttttcatatatttcctaactgtgcctactccagaaaagggcaaggaattaatcaggttgccaagagttgggttacccagcatgcagcaagcacttcagctacggtatttgctcagtttctgtagggagttgtgtgatagcagctttgaattgaatatgcctggccctcttccacctggactcagttcaaactcattgcctgctggtccctgcatccagagtgggaaatcagtcattatattaggaacgaatggcaaatgattctgatccacacttttcagctggtatgttttttaacctggagccataccaaattggaaaattctgcaattttgcaagctgggcattagaacagtatcgcagtctaaatacatttctggtttgaggaagttgacaagatgattttttttccttcgacttttctttgctactgtgccactgacagacatctccaagtcaaccgcatcatcacctcccttctgatgctttttctgtttcacagggtgtgggaagatgatgtcagttgagtttagctgtcaggatctatgtaaatattgacctgaattcattctatggacatatgtaaatggaaagactatattcagtaaagatgaaagaatatcccttggagatttttctttcttttaaggaatgcaatgaaaagtgtgcaacggcgaagcaactgctagcaggaaaatatgcctactagcctgactgtggaagaacactgccagtgaggacagtggcaggagatttgcagtgagttccaaatgagagcacactttctatgtgtgacaccgagtactagcatccagtacgagttgggcctggctttgctgatagaacaaagattttctacaactt

SEQ ID NO: 5098 - DNA, 1600 bp, mus musculus
tgagttccaggacagtcagtgttatgaagagagaccttatgtaataataataattttaataataatagttttaataataataattttaataaaaatatttacaactttggcccaaagaaccatgatattaactctctgtgatatagagagaaggtggtagttaattgtgtaccagacatgtaactgtgtcacctaaacttccacgctttcttcagaaaagcctcctgctgacttcatccccaatgtttccagagtttcacagaaaagggccacttatcaagacctgaggtttctgcctgtgacaggcagcaaagacagcactgttgacatgctgagttcaatgatgactttgttcactgtgattctgtagctggcagatccagcagtgtcgggccagcaacaattccatgtggtcccatccctcaacccagtgcctgcagataccccatacatgtggaacgctgagcctgatagtcaggatgctgttgctgccttccctcactccctcaccagctcccatcattccatgctctttttttttttttttttttcaaaattggcgccagaagcgagagcccctcggggctcgccccccccccccccgcctcattgggttagtgaaaaaatgatgagagtagtggtatttcaccggcggcccgcgaggccacgtaccccgaccccgacacgaggaccgggctgggcgccgggggggggggggctcccacttattctacacctctcatgtctcttcaccgtgccagactagagtcaagctcaacagggtcttcttttcccgctgattccgccaagcccgttcccttggcagtggtttcgctggatagtaggtagggacagtgggaatctcgttcatccattcatgcgcgtcactaattagatgacgaggcatttggctaccttaagacagtcatagttactcccaccgtttacccgcgcttcattgaatttcttcactttgacattcagagcactgggcagaaatcacatcgcgtcaacacccgccgcgggcctttgggatattccatgctcttatacttctgtcaatacactcatgggataattaacaaagggtgagtgtgtgtgtgtgtgtgtgtgtgtgtgtgtgtgtgtgtgtgtgtgtgtaagaggaatagtgcaacagcttctgcataaatgtcaggggctgcacagctgcaaaagcatctcctgcaggaggacctaattgaggactgcctgagagaccaaggacttctgacttagacaatgccggtcaatagggaacttctgttttgaagagatgctttcttgggaccaaagttgcgtgggcagaaggtactaaaagagctcgcagcagtgctcagatgagctttctggggcatttctcagcggctccgagagtctgtgtcgtggagtctgtgtcgttgacttcacgcgtgtcgtggagtctgtgtcgttgacttcacgccacctcacctccaacccccaagggcagttagggtcaggaggcaattagtccagggcacaggtagtgtgtgtgtgtgtgtgtgtgtgtgtgtgtgtgtgttcaccacctgagaaactagaggtcacgcagggaaaccac

SEQ ID NO: 5099 - DNA, 1000 bp, mus musculus
actttccaggagtcatttttttttttttaaagtaagaatgaagtaagcatttctctttcccagtaactatccgatgccagtagcttctcagtaaggggtgttgccatctgccccatccatcgaagggctttgactggctcgatcttacagagatcttacacgggtatccacagcacctggactcaacgattgggataggcatgtccagagggagcatttcgcagctttccccccacctactctctttcacacattccttctcactcttcttcaatgttccctgagccatagtagtggagggattaatatgatgtctcacttcgagctgagcatctgatctcctattctcagtgcttttgctagaatgcatctctcaccgaccactgcccacagcaaaaggaagcttctatgactaaggttgaaagcagccacatttgtcagtgctgtgagctgggtggagggtgaagtctaggtgccagtatattttttaaaatagggattataagcattatttgatttagtaaacaaattaatatttacatatataagacataaaacactttcaggaaagcattttcactttatacaaaatagcaatgacatgtaaaatctttctgggggagacatgcgaacagcaactgcagttgtatctgtcatttctgtctcagaagaatgaattttgtaagagtattaatttttctgaaactatttgctcaaataatgcaagtatgtatacgtcagctgatatgattcacagatgactaaggtgtgcccaaaagtcatgtcttttgagcattatcccaagggcagcagtttcaagaagttctgggacctttaacgagtgggggcctagtggaaggttacagagtggtccctccctcccaatgtttgcttttccattttctggctattatttctcatcctagccaaagccaatctctaaaaccataagctaactaaaccagtatgtatgtacatatgtacgtatgtatatgtgtat

SEQ ID NO: 5100 - DNA, 1000 bp, mus musculus
cccaaaacatcacgaccaagaattaagtttgagaggaaagggtttattcagcttacacttccacactgctttcatcaccaaagaaagtcaggattggaactctagcaggtaaggaagcaggagctgatgcagaggccatggaaggatgttgcttactggcttgcttccccggcttgctcagcttgctctctggtaactccagactaccagcccagggatggcaccacccacaatgtccccaaccctactcttgatcaccaattcagaaaatgccttacagctggatcccatggaggcatttcctcaagggaggctcctttctctgtgataactcaaacttgtgtcaaggtgacacacaaaaccagccagtacaaatgatttatctatgtagaactcattgaaaacatacagaatcaccacagcttttcatttctacttgatttccagaaaactattaaggagatagacttggaggactcacattttagaattaactgtactttctctttaagaacaataggtgcttgtgcattttcattgtaatcagaattataatacaaagttgacatgtctggtcacttaggagcaaagaaatatgaatgttcaagttccaaataacaaaaggaggaaaagaagacaaactatgccacagccactagggagatggctctttcagaacatttctacacaagcatgaggatttgagtcaggacttcacatttaaaaaccagatacattggcacaattattgctatcaatgctatggaagcagggatggaggatattggactttgctggccaaatagtagagatgaattggtgagaccaaggttcagcaaaagaccaggtcttagttaattttcctgttgttgtgataaattaaatccagggtttgctgggttttatagctcaagtgaggcaatcaaggcagcaggacatgaagcagcttgttatattgccatatcagtcaggaaggcatcaatggtgaagatatgtgctc

SEQ ID NO: 5101 - DNA, 1800 bp, mus musculus
acattcctgcacactacaaatgctcaccacacacacacacacacacacacacacacacacacacacacacacacacacttttccactgttgctctgagattacaattacatttctccccttcctattctcctccacactcctacatatacccctccctgctcaccttcaaattcattttccactcctttaacaattgttgttacaggcatatgtgtgtgtgtgtgtgtgtctgtgtgtgtaacacacacatatatattcccaagcacactctgttcctattgcacaatgcttcttatatgtatgctttcccaggctgaccgtttggcactgggcaaccagttggtgtactcttaccaggggaattccacctttcccacccccacctcttctccttgcctatttactgttctccgtgcaggattgaggcctcgtaggattttcctcatccagtgttgtatgctcattggtgctagccttggtcagcttacattaaggagctcaaaagtagaattgcaaaacttaaatcaagtacagcataccattgctgtgctttgtaaggccaactgtcataactgtaaagagacactgggtttagaaattattaaattacaaacagcccagacctaagtataagatcaagtaagcagtgatgtgttagtttccttctccgtcacagcaatagaacaccaacaaaaagcaactcgagtaagaaagggtttatttcattttactgctcttactttatggagagcagccaaggcaagaactccaggaatcaagagctgaatcggagatcatagacggacacaacttaccgacttgtcatccatggtgctcagtgtgctttcttctgtaagccgtgaccacctgttcaagggtgatgctgctcacaggaatggactgtctttatatcaatcgttaatcaagaaactgtttcataggggccctcaggccactttgatggaggcaattattgaactgggctaccgttgtctcccagatcaccctagtttctgtcaagttgaaaaaaaagaattcaaacaattgaacccataacaacatgactattaagttataaccttttctttcttgtttgtccccacaacttcatgtcaatatcacaatatgaaacatagcataactttaaaagtatcacttttttaaaaagatttatttatttattatgtatacagcattcggcctgcatgtgtgcctgcaggccagaggagggcactgtatctcattacagatggttatgagccaccatgtggttgctgagaattgaactcaggacctttggaagagcaggcagtgctcttaacctctgagccatgctcattggggagtatggtggcatggagacagtcctggtattggagaggtagctggacagatagctgggagttctacatctggatccacgggcagtggcaagagagagacactgggcctgacgagcatttagaacccccaaatctcacccccaatgacacacttaataaagactacacttactccaacaaggccacacctcctaattccattgtgtgtagtgtgattgtatggtgtgtacatgtatgaaaaatgcacttgattatgcttttagggtccacctgttttgtctctccaatgctggtattacaggcaagcagagccatgccaggcttcctgtgtgggtgctgggtattcatcctcaggtctccatgcattcagtgcatgtgctcttacctgctgagccatctcaccagcctccttgacatttcatgtgggtatagcagacttctttgtcatccttgtga

SEQ ID NO: 5102 - DNA, 1200 bp, mus musculus
tcagaatacccatgaaacaactcacagaccatgtgaagctcaagaaggatgaccaaaatgtggatgcttcagttctacttagaaggaggaagaaaataatcaagggatgtagagggagggagggaagagggagagggaatttgggggcaggatcagttgtggaaggagacagggaagaagtacagagggtcaggaaattgaaaggatgtgtgtagcagtggggggtggggaactagggctaaccacttaaaaagtcccaaatgccagggaagcaagaggttaccaggacccaacatgaatggcagtagccaaaatacacaacaaagaggaaataagacctgtagagaccatatccattggatggcacggccccccagttgagggatggggtcacccacccttctcaaaaagtttaacccagaatagttcctgtctaaaggaaatatagggacaaagagtgggatggagattgaaggaaaggccatccatagactgcccctcctagggatctatcctatctgcagataccaaacctaaacactatggctgaagccaagaagagcttgctgaaaggaacctggtatagctgtccccagagaggctctgccaaagcctaatacacatgtaatgttcaattgccatctgactgagcatgggatccccagtggaagacttagggaaagaactgaaggagctgaagaggattgcaactccataggaagaacaacaatcaaccaaacaccgcaccccccaccccacccccgcccccaccgtcagagctcccagggactaaaccaccaaccaaagagtacacatgcagggacccaggctccagctacttgtgtagcagaggattgctttggggaggcttttggtcctgtggaggctttatgtcccagtatatggggacgataggatggtgaggcaggtgggtgtgggagcaccctcatagaagcagggggtggagggatgggatgggggattgtggaggggaaaccaagaagagggacaacacttgaagtgtaaataaatattctttctatctatctatctatctatctatctatctatctatctatctatctatctatgaaaaggtatagaaccaagtactggatatgtcaccaggagagaataaggctctccagtttttaacatgtcttactaattctccatctaaaaagtagcgaatattcagaa

SEQ ID NO: 5103 - DNA, 1000 bp, mus musculus
tttacttacaggttatttcggcagttatgaagctctgaagaaatctctgtctgatataaggaaagactggcacgtctctcatctgcaggcacttgaacaacacaaaggaggattgaggcctctatccagagacctgcaagcagaaggtacacaaaactgtttggatattcaatattttgaacactcctgtagcctcccctagccttgggtaggctggttttgaacttgctgccactgagaatgagaccacctggggtggaaccttcagacttagatggctctatttttctgtcacctgctgcttctcttctccaagacactgctacctgctgagaggcccttgagatattctagagacagcatccagcagatccacctacaggctggcaacaggcatcaagaacggattggcaggggatgggcctccccctttataagcacagactcttagtaaacttgggggccttgaacagaaacatgtcttggcctccattatttctctcgtcgttctctcccatacagctccggcctcccactcaggaacccagttagtgtggccgcaggcggcttacacactccttgctgacctccaccattaatggcattaagagagtcctgaggatgcacaaaggtgactgtgtaatggcatatgtccccggtctagagcacctaccacttccttcactgtttgaagcagtacagtgggaatgaggcctttctgaagcagcaagctcagaagcagaccgagcactgtgggcaggacagggaactgaccttactgaatactgccaggtgctgtgacatttcagccagatctcagagtagcttattaaaattgctgagggtttgttgcagcctataatcatttctgtcatggtagaaaatggacatttccagaggctctcttatgggaaaactgcaagaagaaaagagagagaaagacagagggaaagagagagagagagagagagagagagagagagagagagagagaggaaga

SEQ ID NO: 5104 - DNA, 1200 bp, mus musculus
ttctcacatcccccgctgcatgcttctctacatgttacaccagcagcagtgtgttgaattcttctcatgactcaaacatctaacctccctggcctctactgatagattcagattctaaaggtttctagtattagactaggtccatccgggcaatttctcatttgaaaatcaaatgtgctatattctgtaaacactggagtaaccttcgtttccaaaggctggaaataatgaagtactctgaagtatggagatgctgcggactgatttttgtctattacaaacaccaaaatcaaagccttcttaggaaaataaaactggagacctaatgctttcaaaaaaaacataagcgttgggctggagcgatggctcaggtatgaagaagagctcctgcttgccgctctaacagaggagtcaagctcagtacccagcaccttcatgatggctcacaaccacaaccacccagagaatctgatgccactctttggcctgaacaggacttaagcacacaagtggtacaaacacatgtattcaggaaaccattggaacacataaaaataaattttaaaataaactactttagatgaatgaaaaaaattctttaagtcttagctcacaaaattcaacaatatccaaaaataatattacatgaaataagaaacttaaaaataaaaaacattttagaaataattagttgctaactatcttcttaattttttaattttacctgcatgggtattttgcccgcagcatgtatgtgtgtggtgcacatgaaggctagaagaaagcatcaaaagccctggaactggagttccaggaagctgtgagctgcctattgttgctgagaatcaaacccaagatgctctggaagagcagccagtgttctcaactgccgaggcatctctccaagtccataaaataaaaattttaagaggaattaaataacagtaaattcctgataatccttctgactataagtgatagagactagaaaattcaaagaaagggaatagaaaagttcttatcaggccaggcgttggtggtgcacacctttaatcccagcactcgggaggcagaggcaggtgggtttctgagttcaaggccagcctgatctacaaagtgagttccaggacagccagggctattcagagaaactctctctcgaaaaaccaaaaaaaaaaaaaaaaaagaaagagaaagaaa

SEQ ID NO: 5105 - DNA, 1000 bp, mus musculus
catgatggagagaagggaaataaggactatgtggtagatggaagagaaagcaaaactgagcaacttgggcactgtggagagatgaagaacaaatggatatgaagagcctataaaaccacctggagccatgctgccatgaaaggccattcatgtctgggtccatggtcctaccacagacagggtatgtgctgaagtctgtggcccaagtgaccaccaaaagccatgcagctgtcagttgtctaggatgccaccaagaccatgtagatgtctgtgggccatgccactgctggggaacacactgatctgagaggcctgtgctgcctcataaggtcatggtgaagtccttgcctgaactgtgctgggagccatgtctgggtctgtggtcctgctttagctgctgtctgggtcaatatccatggcctgagttactgccaaaagccatgcagatgtcagtggtatgggatgtcacctgagaccatatggatgtctgagggctttgctgccaacaagggacatactgatctgagtggcctgtgctgccacctgaggaggcaatggtgacatctgggcccatgctgctgcccaaggccatgtctgggtccacggtcctatttgcagccagggtctgtgttgatatctgaagcccatattactaccaaaggcaatgtggctgtccctggtctgggctgtttgggttgatgaccaagcaccatgctgagctgtccctgtccctcccctgaagcaggaaaactgtccctgctcctcatcagagcatcacaggagagctagctctggcgatatgaatacaggagagctgaccctaatggagtgagtgtgggagagctggccccacccctcactggctgcagcattcagaagagtggccctttacctcatctgagcagcacagtagagctggccctggtggaaggagtatgggtaaattgaaagcaagggtgtgagcacaggagatctggccccatgcctcgactagacaaag

SEQ ID NO: 5106 - DNA, 1600 bp, mus musculus
agagtaccaaaactcaacagcaatcatcatacacactttgataataactaaatattaacatctttgtttctctaatgaaaagacacagaatgcctgaatggagacaaaatccatgttatctgttgcctacaagaaatacatcttatctttaaagataggaacagttttagagtgaaacgattcacaaaagaattccaatcaaatagaaccagggagcaagcaggtattgctaccctaatatctaacaaagtaggtttaaaattaaaacatatcagaggagataaagcggtaaagaggacttaccttcaccttcatcaaggggaaatttaatctatatgacattactaccatgaacataaaaagtggaaacttctagtttctttggaaagttatgtcaaaagatcttttgctgggcacacaggtgaaaggatgtcttgctaaagcagacatgggaaagaatgttttcctgaagcagacacaggtgaaagaatgttttgatatagcaaatacatgaaagaacctattataaaggagtataaatatgaccccacagacagtgggaaaggagcactgagcattgatttggtttgttccacctcgctattcttcgctaacaacacatatgtattggttcaccttacatagcattgttgagctcaacttgtggtaacacagccattgagaaaaatttaccaagctcctgctgcagcttatcacttccctgatctcactgcaggctggtcggtgacccttgcagtttctgcaggattgaaatacagttgctggttcgtgcctggtgtctgcctgccaaaaggactggactgtagctgagggtttgtgtgactggtctgcagctgctgaatcctatttgttgtttgctacaggactgaactgctgagaaagaagattgagcttgcccccaaaaaactattgctaaacaggttcacttcccccatatcctaataacttttctcttctactacctctagtaggtgatgggctagaggagaagttgaactcttattaaaagtagattgcaaaaattgtatgcctacaaacacatatgaattaaactctgattaaaaactagtttcatagaagagaaaggaggacacggtacaggaggaagggatgtactataagaaatgaaggcatagatcaacctacttataacaagtgatttcaatagaccattctttccaatagcccagtcctctagggaaaaaataaacagaactattaaaattaaattacaccatccagaattgtcttaacagatatctgtagaatatgcctcccagaaatttatcgaaaatagatcacatcctaggacagaaaacaaatcttaaccaagtcagaattactgaaacaacttaatatatcctatatgaccataatgcaatttaacctaaaattaaccacaaacaaatctatagaaagcacacaaatttatggagaataaacacattactgaatgataactgattcaaaaaaatgaagaaaggagtcaaaattttcttggatctgggactaaatgaaaatggcaatacaacacaatcaaacctctgggacatgacaggagcagacctatggataggac

SEQ ID NO: 5107 - DNA, 1000 bp, mus musculus
tatttcaaccaatgggtacacatcatcacaatgtatccaatagccactagaaaagagaataaaattgtcattttgcattctgtttctggcctgctgtcaccataagttcttgtagaaatgatgtaatatgatgacgtggacagatacaggaggctgaaatgcctcaagggcgggattcccggctctggtttcctccactcagccccactgctctgaagtgctctcccaccttagctgatgtgggttaatgatgtaagcattttatggcttcatgctgctaaggtactggggaaacaactcgccttgtcttgagacgcccttcaaaggttcctgctgctctcccacacattaggaatctgattcccggagacagacaggaccataaggaacagcacatcttccatttacagcatcttctcctctagcagcgacttggcagcagcaccttccagacaggagattcctcaaagggctcaaagccaagtctgcatttctccctccagcatggatccactaagtcttcgtccctctcgccagcatggattctgcgtccctctctgcagcatgggtccactatgacattatactaagttatgtcagcacctcaccctgattttccatggactcttctgtaaaatgctaatggtaataccatgtactctcttatgttcctgatgaaaaagattcatgagttcaaagctttggaaatgctcatggttaccacagagccaacaaacaggatgtattacctaggcagagggcacaaagcttcagctccataggaccacaacatgcccaccctctgctgtggctgctgatggtgaatgccttatgtcccagagatcatgtaagcaatgacatgggcttctttacaaacatacatgtaagtgacacacatgaccccatggatctcaagcctcctcttcattctctgcttacactctcttctgcgtatctcacagtacacgtacatacatctcacactacatgtgcacttgta

SEQ ID NO: 5108 - DNA, 1200 bp, mus musculus
cggttgtacaaatctagaaatgtctccaggtgaggtgataaggcactgttttgtgccctatggccaacctaaagcaccctgggtttgcagggttctgttttggtggcagggatgtggcaagggggtccttgtttgtttttctggttttgttgttaccaaaaccccaggcagtacatgcattttgtctgtgagtcatgggaagtgaaaacacatcccttgagatcacaccacgggatatgatcatttcgtagcttggtaggtactttaggggaaaaaatattgattatgcgaaacttgaagtttaaaaaatatatatttatatccccctggcaatgggcaaagggacaccctgtgggtggtgttgctcttctatcagtcaggggcaaagcacatggcagtcctcagttcaccctagcttgatgcctggcttggtggccatagctgtactatacctagtacacaaaaaagtcaaatcaaatccaggcaacaccagaggaggaagacctgagacagagacctgcattccaccatgccacgtggtgctggcagggaaaggcacacagacctgccctctacctcatgatatggatggaccacagacacatggagcctacctactaccagaaaacacaatgagggaggaagaagaccaagacctgtggaccacagaccttccctccagtgcccagcacaggtaggctgtagacacctgctcagcaccatgtcccccaacacagacagagaatgtcatccaggacccaccagccttgtggacagcctacagtgggagccaccacaatgtgccagtatgaagtggtcgaaggggaaagaaagaaaactggagcagtttgggcattatggagactggagggcagagaggagtagcctgttgtgacaggctagcctcatcacctggaatgtagtgaggtcctagtctaagctgccacgcctgaatccacagctactcagtggcaggggttggtacctgatgagggcagccaccagggaccaaatggatgtccaggggctatacagaattggccccacccctcaccggttatgattctctggagagctgtccttacctcgcacctgtgacagcccttggcaaagctgaccctgagccttgcccagatagcagtgagctgaccccaaggatgagagtgtcggagagctgactccgccatccctcagtcatgt

SEQ ID NO: 5109 - DNA, 1000 bp, mus musculus
atcagagagtttgaggattttagagaagatggtactcaacagcttaatgaacgtaaaggggatagctgtaatgactgagctatgttaagaaaagaggagttcatggttgaaaaaaatgacaaagacagcacaggatagtcaaaggagaagagtgccaaggcagtagccttgatgtgatcttcaaggtcagagcagaaaatctcctcaaattaaagaaagacttacaggcaagtcaggattgactgacgccatgcatcagatggacatcacagatagtctacagaatattccgaccaaacctcaaaaggtatgatactctgttatgcttgcagacaggagcatgttgtcctctgagaggctgcatccatagctgactcagatacagacaccctcagccaagtagaggatggagcttgggaactcttatggaagaatagaaggaaggattgaaggccctgaaggggataggaactccataggaagaccaacagagtcaactaacctggacccttggggctctcagagtctgaaccaccaacacaaggacatacaggggttggacctaggcttctccattcctatgtagcagatgtgcaacttgaccttcgtacatgtcttgaacaaccggaatgggagctgtcctaaaagctgttgcctatatgtgggatatgttcttctagctgccttgtctggcctcagtgggagaggaagcgcctagccttgcagagccttgatggatgcgggttgggggttgggggttggggagctactcactcagaagagaaggggaggagggaggagggaaagattgtgggatggggtgaccgggggtgggggcagtgagcgggatgtaaagtaaacaagcacacaaaaattaagaaaagagagagtccatttctacccagtggccaatggaagcttctcaggaatgagctgcatgcatggacagaaaacagatcctaaccaagtcagaaagattgaaatagctctggtggcctat

SEQ ID NO: 5110 - DNA, 1000 bp, mus musculus
ggtagttcataacatttcaaagaacattctgaaagactactctgagacttattttagtctgaaacagcgacttgtgaaattagaaaataggatttgcaaaatcttataagaattaaaaaaaatatgaaaaatttctcataaatttaaatctttacttaaaaaaagaagctagttttataatcaaactagccattttcagttatttatttaaccatccccctggcccaccacacagaaattgtgaagcacactgtaaagttagggcgcatgacagaaagtactgacagcgatcttctgtgcatgttcagcagaggtcatgcgtaacaggctctacccattacacagaagctggttctgcccgccaaggctctcagggttccagagaaaggagcgctttaattctgtttctatacagtttttttctgttcccttataggaaaggcctgacctggtgagagctaccattcactgggcggccttctgggaggctgggaggctgcacactcacggtggttgtacttacatgcactgctttgaaataggtaggctattttattttaagctgaccacagcttagaagaaaacttttcaattttcctttctggcatgtttaaacaagcagacaaatgaatgtgattcacagagaccacacaaccacgtcaggtgtgaaagtgctttttttttttttttttacctgacaagtcaaaactgtgagacatgctaagtggccgcactgctgcaaaaaagaaaacaaacaataaagagaaagaaattcagctgttaggatccaaaggcagacagggctgtcgctggctctccttggggtctatatagaagctcctggatacaggtctgacatggaaaacaactacaagagtcttaatttcagctttaggacaacgacaggataacaataaaaagaaaaggtaacactttaaatacactgaaaatgaaaacaagatacagagagaagaacctactctccccacaagtgatggca

SEQ ID NO: 5111 - DNA, 1000 bp, mus musculus; identical to SEQ ID NO: 5110

SEQ ID NO: 5112 - DNA, 1400 bp, mus musculus
caaaatgccacatagcttatcaagcgagccttgtttccatagcttatcaaaacccggaacatgttcgaggttgctacgttttctactattaatggttctataaatattttattcacatctactgtctgtactctatattaccggggatctgtctatcttctgtggtgtacattgtatacatctcagggtctgtcttctaaaatgtatactctctatatccccagagtctgtcttctaaagtgtatactctatatccccagggtctgtcttctaaagtgtatactctctatatccccagggtctgtcttctaaagtgtatactctttatatccccagggtctgtcttctaaagtgtatactctctatatccccaggatctgtgttctgcagtgtcagtagttgtaggaagtgagaggcaaacattatctcttcaatatggccatggaaaactaatactgaaaggtccttcaagtagattttataaacagtgtgcccaaaggcattactttatcaagaaggtatccattggctttttgaatggctgttagaattctgacccataacaaatcatgaatggacccttaagcaggtgtctagctgctcacagccctatcttgctgctggtgaaccaaaggagagagcacaataaggttgaagcaaccttgactactccacagtcaagttgtgtgctttctcctattatacatcaatgcttcagagcaatcagcattatgatccccaattctggccttttgagaagtaagtctggaagaaagttgtcaagccacacccttaggggttgtgtgcccagtcagcagtggctctatgtgtcaccacagccatgatcattccatgtttcccaattattccctactatgctgagtattttatttgaaagaacaatgtttaaaagtatggatgacattctcatctaaggttgtatgtaaaaaccagtgagcattttaggagtctatacaacttttagctcccttcacatgccccacgttatcataatttctatgtgatccttataggttttattcattggaaagtttgttagaatgccttatattctgataaggtacaggctgtactgaagtcatgtcactttcgatacatttcaacctaaatgtatttactatatttgagtcaagtttctgtttattttgtcaatttaaaaaggcagggtgttggattgttaaaattggtttcctgaccttgatagtttgaagtttttccttactgttgtgaagccaaatggatccacattctgttgtttccacttaaaggcttttttcctcaatatggaagaaagatgtgtttgtctatttataaacaaattccatgagttttcttcatttcctattgcattgttgtgaaggtgtgtttagtgtaaaaaa

SEQ ID NO: 5113 - DNA, 1400 bp, mus musculus; identical to SEQ ID NO: 5112

SEQ ID NO: 5114 - DNA, 1000 bp, mus musculus
caatataagaaactacttagatagcccccttcccatgttcgtgtgtgctgtgtatgcatgtgcaagtatgtatacgtatctactgtgtatatttaagtgtgtttgcaggtaactgttctttttgtagaggccaagggaaggcctcgtggctcgtcatctgtcactgtctgccttgttctcattgactctagtgtcctatgtttttggctacaccggtgctgggatcccaaccccaaccccatgctctatccatcaggccatctctctggcccctcactcacccttccttacaaacggtgaggcaaacattgcatcattggctttataaacttcactgttttgaaaaagattattattagagggtaaaggcaatgtatgcagaaaatcaggaccaaataaattttaagaagagcctgaaacagcattccctatgatgaatcaattaagtttgctttcaggctattaattagatacacaaaacatttgatctcacttgacagttcacaacattctctaccatgttagtgtggcaatgccagatgtcattttgttcaccgtaattaataaggcacaaatttgtcattaaggaaaggcaactgttgcctctttgtcatgtctcaatttttaatccttcattctgtgcaaggcgtctgtttgtctaggctagcggcctataaattgaattgaatggtgcactggcttctatttctaaaggaagcaaagggtaacaaatagaggtcaaaaatcactctcagagcactacaaaactcccgaagcagagtcagccaagagcctttttactgtattggccatttgctttgcgactgtgtgcctgcttggaaagcctactggtatttatcagtctacctcttgttttagtagttggctgaggttggctctgaaacattcgctattcttgacagaatacatgactgcctggccagtgactgctctttcagcctacaggatacctgcaacaccgaccggctcctgacggatt

SEQ ID NO: 5115 - DNA, 1000 bp, mus musculus; identical to SEQ ID NO: 5114

SEQ ID NO: 5116 - DNA, 1000 bp, mus musculus
agagctgttcagtctgcagattaggaaaggaatggaaaccagaaacagcagggttcgtgctggaaaactggcatccttgagactcagtagggccttgactcgtttgctcatcctttaactggctgtctatgtaataggaacagtcctttccgcacgatggatgggaggtgctcccggggctcagtcctgacgttcccggctcacagggagatgcagctgatacccgcttgctagggagcgcagtatctctggggcttaagcgactggcttgcatttgctttgtagaaaagaaagacaatactcctctagaggcatgcagcggacaacttaaacttcctttcccttttagattttctctagattttccagaaaggatttcttcttgaatatctgctggaagttgcttaaagacttcttgatcaacaccctctggcagtgcctggaggggcaagtcacttgtgtctttttctttaggaaaacaggtggcatccaacggagactcccccgttcctgtgctttcgattcttctacttggtagacaatcccagtttgcttctttctccttgtgagagtcttccgtgtgggtgtccttcactttctacaacacaaggggaagagcagagctcaggagtctgcacgccttgcgcatcactgctgcagttctcctggagctagtgtctcacacacctgcaaacctgcccggcacctctgaccttgacagagagcaatccatcccgtgtctcacactactgtgtggcctatcatcatactcatgcagtccctactagctagcagactaggggacaagacacgcaggaggaaagatcccagccaccatgggctgcacatctaactcagtagataatgtgatctaatgctggtaaaaatagaagcacaaagcaggaagggatgatttcccaaaaactgcttgtctaaaaggtaacatttaacagtaacaaaagagcacaatgaaagtatatcatgagagaaccagacagct

SEQ ID NO: 5117 - DNA, 1000 bp, mus musculus; identical to SEQ ID NO: 5116

SEQ ID NO: 5118 - DNA, 1000 bp, mus musculus
tctgaaagagacagatgcagatatttgtacctaaccaatggacagaagctgctaacccctgtggttgaattagggggaagctggaagaagctgaggaggagggcgaccctgtcagaggaccagcagtcccaattaaccttgacacagagatctctcaaacactggaccaccaaccaggcagcataagcatacaccagctgatatgagaccccaaatacaaatacagcagaggactacccggtctggattcagtcagagaagatgcacctaacactcaagagatggaaggccccagacagtttagaggtctggtatggttggggtgcagggacagggacacccttgtggagacagggggtggggtggaggtatgggatgtggaacagttggagggtggaccgggaggggaataaaatctggagtattaaatagatagatagatagatagatagatagatagatagatagatagatagataaaagattgaaaaaatacaccatgaccaaaacaacttgtgcaggaatgggtttattttagattataattctcatggtacactccatcctgagtgtactcagaaggtagagggcataaagaataatcattactggtagtacttgtcagtttggtttcttgtaaatcctaggaccacttgcccagggatggcactgcctgcaatgagcatggatgcccccacatcaatcattaatcaataaaatgccctacagccataagccttatggactagactttatgtgtagccccccccaccccccccagcctgaagcaggctgatccagaccttgaccttgctgccactaaggagattacctagggtggagccttcctgcctagatgactccattattgttcagcctctgctgctgttccccttcaggatactgctacctgctgagagactcctgacaggagactacaccctatcctgcacattgtcacctgcagctggttccaggctccaagaatggattagcgggg

SEQ ID NO: 5119 - DNA, 1000 bp, mus musculus
aaataggcatgctcacttttcaatgtcatcaacactacaatgctcactatgcctgtgtcttagcatcaggacaacctgtactccagagctaggctgacacctgtcataaccaattagttaaatagaaaacatggtgtaaaacatgacttgtagattgggagcagttctcacccttacaaatgctccctggggaaatgaagctgtgctctttccctctgccatttctgaacggctgagcatcatttcttcccaagcaaggcaagcaatgagaacaaataaatgtaagacaagcacagtggagaaaaacaagatactatatccagctaaaagcagcatgcagttagaggaagaagaatcctaatgtatccacacaagaagaaggaagagggggaggggggaaaacaggggaggaggaggagaaggaggagggatcaaaacttattctcaatacagaaaaattataatccctgcacccatagatcatattgtacaaacaacatacagacatgctcatcctctgacacaaacaacaatagatggaaattttttgataagatctgacttatctaaaagctctattactaatagttttaatagtttctattcctttctcattagcttcaggctgagaagtgacatcatgattgaaaggacattttggtattcttttctgcctcaattctattatttagttctactaattgaaccaagccccaggaattaagagaacagcagaaatgttcgtcactttcattccaatagccaagttggaaagtataagggcgtgtcaggctaatagatagatcagcaagtcaatcacagaaatgaagccttagcaaataaatactgaataaaatgacatggaaattctagttttatgatacgcactttttttcaagaaatactgcctgttcacaggaaactttgaatatcttttgacacatccatgcataagtaaattcacaaagtcagtcattagaaggaaccagcactccatcaa

SEQ ID NO: 5120 - DNA, 1000 bp, mus musculus
ggaagttgtaaatattcctaaaaaggacaataggttaacagagaaactaggatttatatgattggtttaatttctaaactcttatgttaagtattcttcacatataattctgtgaataatatctttaaaaaaataaaagctccttaatcccactaccaacaaattcttccgttacttattccctcagacgtgcccagttattgttgccaaggaaacagccaggaagcaggcgtgaggcagactctttcatctggagaaagggtgatgggaatggatgagagttgagcaaggtcaggcgcttgctgctgaatacaaatctgtcatgcctaatagatgaactctttagcttctgggccgttcaggctactcccagcagccaaggagaaaataaaaaagacactcaagcatgaatgccaatcagcccatgtggccaacagtgatgtatttatgtgtgccacagcagctgtgctaggctttggaaggaatgaaaagataaattaaatatgtgtcaataattataggaggtcagaattcaagtccagaaggtatactcatgagatcagagggatgtcatttggttgatctagcccgttaacatcccatatgcttttctgaggtcagagttcaaaacctgtcgtagagtcaagtgtattgagctgagaaaaccctcaatcagccctctgttgtttgtttaccagggacaacaatcatataaagtacatggggaaatagtatacatctggtctcttttgattagtagatgtgtggttcatcactcgttcaaattaacatcaggggggacaagataccttccctctagtgatacctcatggcacatctatctcaattatgcctgcatagttcaaagttttgagccattctccagtatctccaatacttcttctaactattagagtgtaaaagaatgcaataccgttatgtgatggtatttagagctctacttatatacagttgatgacttcctcaaatatattttttt

SEQ ID NO: 5121 - DNA, 1000 bp, mus musculus
aaacttgagtcttaagaaagaaacagggctgaggaaacacagttacattagaagaaatcaactgaaaatacatacaccagcaatttcactgaaacattttttttgcctctttgttctcaaagataagatgatgcatggttgactctgtgtagataaacactggaaactgaaatagataagcaagttgtatttatatatttattcatacatgtgtgtgtgtatgtgtatgcatgtgtgtttgtgtgtgtgtgtgtgtgtgtgtgtgtgtgtgtgtgtgtgtgtttgtaacaataacaaagagaaagaggttttggactgagattggaagggcatgaaggttcaagggatggtaactgagaactgagcagaagaaagaaatataatcctagtttctctctgtctcctctctgtctgtctgtctgtctgtctgtctgtctgtctgtctctttctctctcaatgttctatgaaggaccctttcccggtttctcttcctcaatcaccctatcctattccccttcccctgcttctgtgaaggtgctccctacccactcacccactcctgcctctgcaccctagcattaccctacactggggcattgagcctccacaggaccaaggggctcttcacccactgatgccagataaggcaatcctttgctatatatgtagctggagccatgggtccctccatgtaaactctgtggttgatagtttagattctgggagctccgaggggttctagttggtcgatattgttgttcttcctgtgggttttcaaaccccttgagctccttccatccttcccatagttttatgaaaaaaatgtttcaaaccctttactatgaaagcaatgaaagaaacattttgttagagtggagacaactgtttacattcacctgcacctaaatttatgccaccaccaccttcagtaaatatatatggggtttaggaaaagagtttaggctttgatgtatcagtaatccttcagtgtccttggct

SEQ ID NO: 5122 - DNA, 1000 bp, mus musculus
ctaccataatctgcatgtggagattagagggcaacttcatggagttagttctctacataaattccatggatctacagattacattcaaattggcagaatgcatgacaaacaactttacctgcagaatcatctctctagcccagcttacatttggatgggtaaatagaagtaagaacagaatgacacttcctggacagtttcaggaaattgagatatcttttgaagggaaattggaataatccactgagaagcaaacactaaaatgtgtcttgtggtcaacaatagtcagaattccagaaggaaaaataattgattactgggcaccagactgcaacagatatatccataacacaaatcctgtacctaaggctcagaaccattccagaagacgggacaggaagagtataagaaccagaagaccaagaaagttgttatgagatttttgtttcctacaaatgacagtgacagttgataccacaactatttggctgcctaaaaatgaagaagtgcatagccaattgacattctagcatgggtaaatgttagggggtggtcctgaccatagacagaaagctacaaaatcaaggaaacctgagagctggagaaataacacctcccagaaatgagattctaattcattaactactactgagtggtcagccatgaaattacataatacaagtaacactaaatggaataaagagcttgcaattataatctagcagtgtgcgtgtgtgcataacactaataaccaaaagataatattttatcaaaaatataaagaaaaggcacagaaaggaagaaataatagcaataaagactatctttaacatttattgatgcttaaaattcttgaaattattccaataaagcttgtaggtagtacttctgaaaaactgcactaatccttcccaggaagtgacatgatctcaagagctggcccatccccataggttaagtagctacttctaatatcctcaacacagccagcaactggcag

SEQ ID NO: 5123 - DNA, 1000 bp, mus musculus
taaaatagcgcaaacataatagacatgcatatgtagttctacacaaccatactgcaaggccaaagaccctggggtgtggctctccgccatgcagtcattcaaggaaccatgttgatgaggggcagacctttagtccatggctgtctttccttccagtcagagaaaaaagaaaaccataaataagtgtatgtgggaagcttttaggagacaccatctatggtttgaatatccaataatgtcctcagaaaattaatgttcagatcctagccgttgttgtgatggtgtcagagagtggagacttgagaggtaagtgagcttggtcttctttcacgaaagaccccagagatccctggccctttgcttctgaagacacagcaatgagttgccatctacaaagtagggaatgtgctcttggatgctattgttttgagcatcctggcgctgagaactaaagagataaattttggttgaatttgtcctcagatttggattttttcccaaagacatgtttactttaacaacaacaaaatgcaatgttaagccaaaaggtatttcagtgggattctagctgtccatcactcggtgggcagcactcacagagagccaagagattttgcttagttctcctttgaattcccagtgctggcaatgtctgccaaggtacagggctaaccagcactgtctccccaggcatttgagcacacaaagaaagacaactgtgccagaacaaagccatgtgagtctatagtctgactccagaatgtgttcctgacatctgaaggtaattgcccacttcatactttctgcaactctgtctctagtttatggaatgatgaataagccagaataaagagccaactttacccttagaagaagtcttgaatactacagtcacgccactgagagctgcctgtgggattggactttgatatgtgccttgggtccagaatggtagatggtacccatccagctcagtagcaaaccctcactagatgcccag

SEQ ID NO: 5124 - DNA, 1600 bp, mus musculus
cacttcatactcatcaaaggaaaaatctatcaagatgaaatatcaattttgaacatctagaccccaaacacaagggtacccacatttgtaaaaacaaaacaaaacaaaaacaaaaaaatgtcaaagcttaaattaacccccacaaattaatagtgggagactttaacaccccactctcaccaatcagcaggtcatgcagataaaaatctaaacagagaaataataaaaataacatattatgaatcaaatggatctaacagacatctgtagaatatttcacccaaacccacacacaaaaaatatcttcttctcagcacctagtggattcttttcccaaactgaccatatagtccatcataaagcaagcagcaaaagataaaagaaaactgaaataatgccatgtatcttatcagaccaccatgtattaaagctagacttcaacaacaacagaaataccaaatatcctacacactcatgcaaattgaacaactctctactaaatggtctctgggtcagggaagaaataaagaaatgaaaaaatttcaggaattcaatgaaaattaaggcacaacataccaaatttatggaacacaatgaaagcagtgataagaggaaagttcatagcatcaagaacctccataaagaaattataaagttctcattgtaaccttccctcggcctaaagctggctgagccagaacttgactttggtgccactaagattatctagggtggagccttcctccctagatcactctattcttcagccactgtcactgttccttttcaagatattgctacctgctgagaggcccctattctggagactacaacctgcacattgtcacctgcagctggttctaggctccaaggatgaattggcgggaatgggcctccccctctttttataagtgcattcgccattaaacatttgagctttgatcagaatgttgtcttggctccatttctctcccgtttccctagtttccctttctttcagcacatctcataacagcaatttaaaagaacacttgaaatctctagaggaaaaagaaaagaagcaagcacaccaaagataaataggaggcaggaaataatcaaaatcagcactgaaatcaatcagttagaaaaaaagaagacaatacaaagaatcaatgaaaccaagagctggttctttgagaaaatcaacaagatagacaaacccttagccaaactatccaaaagacagagagacagtatccaaattaaaacaatcagaaatggaaaggaagacatagcaatagaccctgagaaaattcaaagaaccattagattatacttcaaaagtcctctacaaaattggaaaatcttaatgaaattgatgactttctagatagataccacttaccaaaattaaatcaaaatcaagcaagctatttaaacagctttataacccctcaagaaatagaagcagtcattaaaatctcccaaccaaaatttaaaagaaagaaagaagagaagagaagagaagagaagagaagagaagagaagagaagagaagagaagagaagagaagagaagagaagagaagaggaaggaagaagacaggcccagatggttt

SEQ ID NO: 5125 - DNA, 1000 bp, mus musculus
ggaactcaggctcagtgtatattacacaaccgccagcgagatgctcccaagtagtgagcaaggagtaaagagcaaggaggtgctgagcactgaccaccttagacagggtgaaaaccagaggggcgggtgcttatttctcaggtaaagtcagagctggaattccaccctgaagttagggactgagacccagagttgttgggaaaccaagaaggaagacagcatcagtgtgacttggggatcaggaaaagacacgtgggaggagccttacactgagcggacttgtcccaaaaagaatactttggtaggttctttggctgcttcagcaaagctgcacaagctattggcttaaaacatcagaagaatttatattgtcatggttatagaagctcaagttcaaaactgaggttccggaggcccatggtacttctgaagtctgtgaggaagactggccttttcccagctcccgggatttctggcaactcttgatgctgcttaggtggattctgcctcctatctcatccctgtcatcacgtgtccaccatcttcctctgtgtctctctgtatcttcatgtggcattctctcttcgaaggacaagagtcacatgggattaagagccaacagtactccagaatgaccaccttaatgtattgcacctgaaatagtcccatgataagtctcgtgtgtctgagaaaatagtggttaagacttcaacatatttgagtccatatcaaatggaagggacttttcctttcatgttacttcttttagtctggcttccctcccactatcaccccaggtagccagggtccagatctcaatgtcttcctccaggagcttctgaaaaccccactcacccagcctcaccacgcagcaccacgtaccacccagaacttctgcaagatgccagactctgccatgctctggtctaagctgtgtcccatccttccttgttatctgttccctccctaatcctcccaagacctagtatctgcggctctt

SEQ ID NO: 5126 - DNA, 1200 bp, mus musculus
caaagagactgtgtaagttagataactcttctctaaccaagaataacagacccagaattacccagaaatatgaacaaatcgggggatttgagtgttgctatatcagagatggcttggaaattctatcatatccgaaagacactgttctacaacagtctttcccaaaccctagctctaacaatccttctcttcctgcttctacactgtgtcttgagggatagggatatgatacagaagtcacaacagactgagcagcccacaggtgcttactctctgcactctgacaagctcagtatgagtctcagagttaactgccgtccactgcaaagagaagtttctcctatgagggttgagaattggaccaagtttaggtataaagataggtatttagaagacggttcatttagtaagatagtcgtcggttctcccctggggcttaactgtgggaaacacggtagccaatgtatgatctctcctcacccatgaattcttggctgaactgacagtatactggcatgaatttccttctttggaacaggcctgaaattcagcctttaaaagtggttggttacatccataacacccatgctgctattgcaccagtgaacatttcttgtcaaagctagctactatcgctgctcaaagtcacagctggataagactattgatttcttgtcttccccagaagcctacacagcactttgcgacattacaaaagctacctacagggttttaatgatttccacatgatgaagaatggaacctgagagacaattgctggtcaatccatagacaaagatctcatggtgaggggggaggacctctgtgagccaccctaaagaacaggaatcttgtcctcgtggcaattggcttccgtttaaagatggaggtaaggttagaaatgacaaaatcagaactggtttggaaaaaaaaataacccagaagcaattgtgaagggagaagggagtatccagaggacaaatgtaatatgagataaaatatggacatggaaaataaattgagagaaaggggtcatggtcaagagattaaaactgactccatgatatggagtctgcaggaggagacatcaaaccaggtgaacgaatggtgttggcattcacaagactgagaaccaaggccaatgtgagttcaggatataaagatgcctgacaacccaagttcagtccctggaacctgcat

SEQ ID NO: 5127 - DNA, 1200 bp, mus musculus
gtcacagagagattagaaaacagactcaagaagagacaggagcttatctgctggctccatcggttctcactggtgaaaggtacacccccactgccaagccttcccacctactgggaaaggcaaatgccctgtgaccggctgcttctgtaaatctgggaatgagccagattgccacaggtcctgttgagtcaggcctgggaactggtgctggatgggaggcaagcctgccactcaggatggaagacggacaggtgggctggtgcctgtggcaaagctgctcagggctctccatgagcaatcagcccagagtctgagatacagacgagaccaagagtctgaggggacaccatctactggggaaatgtaaaggggaacagaatacacggtggagacgttccaggagacagagcttatcgatgaacggaaaggggagaaagtatacccaagagacaaggcaggacagaaagtatctgtgagtgggtagaggggacagtacggaccagaacaagcagacagagcatgcccatcagagcatcccgggaacagagtggactcatgtaagggaagaggggtcagtgtgtacccaggacaggaacaaggtcccagcagagatgtggagagagctcatagaggagaggatacggagcacactagaagaggatgatgcacagcacaggaccatgcttgtgacccctcaggatattgaattccccgtttcctcgaaggagaaatgtcttacataataatcaacttcttcaaaacctagaactgtcagaatgtaacaggcatgcttgggctatttgttaatactccaccctcgtacagcagaatgactccgtgcagataacccctggggaaagcccttgccgattagcacagcccctcctggggcagaaaataagcagtgaccgatcgatggcttgtgtttgtcgtgtgtgccagtggagttggggtaaataaccactctactgcaaaccccgcctggtttctgtttgttatttttgttttgttttgttttgtttttaacctagaaaaacaggctctctagggctggagagatggctctgtcgttaagggcactgactactctttcagaggtcctgagttcaattcccagcaaccacatggtgactcacaaccatctgtaattgggtccgatgcctacttctggtatgtactcacatataaaataaatcttat

SEQ ID NO: 5128 - DNA, 1400 bp, mus musculus
tcagctagtgtatgcaatggtggggacaagtagttttaacagctaagaattcttaaagagccagttgactagcaatcggagcccctttaaagggccagacacctgagataattacactacagttgaacactagaatttacacttagtactcacgcaggaacgtcactgaattcatccatagttataaattgcatttccttgataatcctctgctctctggggggcttcttcggcagtccaggctcctcagctttgtctgactctttaggatccggctctggcttgtgaactctacagaggagagatgaacatgcagacaggcaagtgccagagggaagtagcagagtgaacatgttttttaaactggggggtgggggggggggatttgtaaatgtgtgacatatccttgtttaataattttatagccaacttttctttgtatccctaaccccttggttatgaagatctcagttgtaagaggaattttgaaaatcaagttagtaaatcttcagagtatggctgttttcatgtatatagccaaccatgtctgtcacccacagaacggacaccacacacctccccagtattcctgtttgcttctcagagtcaaacgtgtaaggctgggcttaactccagcgtctcttcttcatccccctagctcggagcctggaaacaccagtcatcttccctgtaccctagtgtcgtctgttagtcgctactattgtgtcactaagctatcgcagactcagcaagaaccaagggcggcccttgaactcactctatagcaaatggagtctagcaatgcactgtagtgagtgaagtccagggacaggctatagctctcaggctgtttaactgcccagacagaagagacattggctgccataatgcatgaactattccaagaaaaaaaataccagaccgggaaaataagagatccaacacagaaggaagcagagaaactccccagagaccagacccagagtgcaacaaacataacaggttattgtgggcggtcaataaaatctggactactctatcctagctgtgcggcagaattaaagcaggaatcacagttaaaacaaagtgatggttgccaggcgtggtggcgcatgcctttaatcccagcactcgggaggcagaggcaggcggatttctgagtttgaggccagcctggtctacaaagtgagttccaggacagtcagggctatagagagaaaccctgtctcgaaaaaccaaaccaaacaaacaaacaaacaaagtgatggcaccatactttctttggtgaacgcccacatgacctccatcattaaactggctgaatcttccctgaactttctcttcttgaccatgtactaaggacacgcctggtaacccccactgaatccacttcaagctat

SEQ ID NO: 5129 - DNA, 1000 bp, mus musculus
agagatggctctcatttgtggaatcaaggcccacagagcatggcaaaacagagggtagatttaggagggagaccccgacttgggagactggctgggaggatcttcgaagaagagaacctaaaggcagatccggaagagcaaagaaggctgtgaatgactttagataaaggcttggtggtagcgagacttggccctttctccattaccaccgggaatgttccaaggcccctctgaacctggaactcgagtgtactcaagtagaacaaggtagaaaagacaaacgacttatttagcgattcacataaggcttgtactgcctatttccatgcctgacttcacttgatacctggaacagaatggcctgcgaaactgaagcaatgggttacatttgtcagctataacacgtgcctcttaaaagcgcctccccaccccaagctgagtgctcgcttgctcgcttgcgccaccttgtggttttagagtataaaatgagaatgcaaactggattggaaattgcagacttccagggagctatcctggtggtacctcctcttttccacgcttattggtgttggaggcttattctaaagatattcctgaaacagtactaccgacaggccttttgaggctatgtctgagagagtagtgcagccagaccatgttacagaacatgagacattttagcttaaaagagtcttttagaccccaaggcaatagattttttggtgtttgtttgtttgttttgttttattttaggagaaatgccacaggaaagcctttggtttacagcagtggttctcaatcttcctaatgctgtgaccctttaatacagttcctcatgttagggtgaccccctggcacaagccctataggaaaggttacagcaagcaagtgacttttctggagatggctcaccattttgcatggttgtgatggatgggctctgagaagcatggaccccagagacattgttccaggattactccttgctgctgatatacca

SEQ ID NO: 5130 - DNA, 1000 bp, mus musculus
aggcttcaggctagttttccagtgaaaggttgctgctactgtctgcagtgatgcccctgtcctgtgtcattcctgcggctactagggtagactgttgtacagaagtgggcgaggaaggacgactccagaggatgtgtggtcctgatgtaacagcaggggagatagcatgaggaagtggctctgagcctgttctctaactgttcctctgcagcttgcagtgcagccccacaggcatccaagcctccctccagcagggaagtgctcctcctctgctgggagaaatggttgtctggctgggcattgcacatctactacagactgagatagccccgacgggcagggcacccagcacccagcagccagcgcactcggctgtagttgtggacagagctgtctcaaggcatctgtggcatgatgaaggcagctggtgccggtactggggtagtctttctaactgttagggcagcatccttttctcatggccgctccagcagcaggagaaggcccagtagctgtcagtggggtgccaggtttccctgtgcaaacagtgtccttgcttaagtgcaggagtgaacgtcagaaggatgtttctgtttgtgtttgattttcctctcaccccattccttctgtaacagcgtttaaacttaccagtgctgtgagaagaacatctaatctgtggctttagaagttgctcaatgtatccatgcacctgctgcgtttattaaaccagtttctccgcagttcacatccaaactaggcagactacagcttagctcccagcggatgaccctgtctgtatatcatgtctctgttctgtgtaggactgctcctacttgggcagtgtgtgcgcctgtagtctcagtacttgaggggttgaggcaggaggattactgtgaatttgagaacggcctgggatacagagtgagtttgcggttgacctaggttacataatgaaccctagtcttaaagaaagaaagcccaacaaaaatttttttgaatg

SEQ ID NO: 5131 - DNA, 1000 bp, mus musculus
ctctctacaagcttctgcaggcactgttgaggaccctgccaactccgtacgatgtagggctcagatataacttctcgggatttggaacctgtcagtgcaaacaccagaacatgcatctaacagtattttgggtcaccaagagtttcacactaaacagtgcttgtgtgattttcttttcaaactgatagactgtacattagtgatgttatctgtcccccaaaaggagataagaagcccattgacaagaagctgaggcaggaggattgagaatgggctcccccactccctctctgccagctaagcaatccaccagcgggccattcccatcaagctgaggaggggcatttcctgcgcggtgatttgtgtcggttaaaagcagaaacattgagcggtgacttgaggtttggttggtttggtttgcttgttttccgtcagctgggactcttacagaacaacaggtgggagggacagacagtcaaaccaaagatgaggaaatccacagactctccagaactttcttcctatgtcaaggagacgccaaagccaccctctccccactccaggttcctagtcaccaacagggtgcggaacggcttgagggagcacagcataccagagaggctaggacctgagttcaagttcttgctctcagagacagccagcagtcactcggtctctctggacttcagttttctacttactgtgtttgatccctttccactccacatataaacactgacaggactgatgttgaaccttggcgattccgcgtggctggcttcactgacccaccaggtatgaaaaggggttggtaaaattgtatgaaagagtgagggcaggcatacctgcaagctgccactgaatgaggtggttcacaagcagcacccagctcagaacgtgccgttggggaagatgtagcagccgagactggaataacctcctgtacacaacagaaagagtcccctcatcttccacctgcctaagatcttcacttgatctt

SEQ ID NO: 5132 - DNA, 1600 bp, mus musculus
tagagttgtgatgtgatgaagattccatggcagttgaggaggctgccttatggacaagcagactcaggctgtccctccccttagccagcttgccataaagagagcaaggaaccttccgctgtgtatgtattcctcaggcctctctgcccagagttaagaacttgttgggtttgtttttctaaaacaagcagagacctgacctccatctaatcaaacatctgaacatctctggaaggggtaaagagctttcctctgaatcctcaaaatacaccaggatgttcccgttccatagtcgctgcccgatatgtttattatgtgacagcatgttcttccccactgcctacgaatgctgctttcatccccaggccagactggcccctgccctgactgctcatgctgcccttggctctggttgctctacattctcttgtccctgagtgtcccacatattcggctaagcacccatctgcctctgcagctattattaggcaccactgcaacccaatcaagccaaaggatttggtttttattagcaagtgtcataaggctagcatttatatgtctgtttaggaaacatcctagcaagactgagataaatattaatgaagataatctcttttaaggaccagcactctggcccaagcttgcattcagatgtctttgggactctaggtaattctgaatcccgtccttggtcttgtcacctctgggtcacactcaacagcaccagagctccaaaacagcttccaacctgtcatgactagggtttgagaccagactaaccatccctccctcgtgggaatcacagaggcaacctgtgaaccaaactcagtgacttcccatacagggatttagaggtcctcagagcatgtatgggaaagttcactggctactccctgtcctgtggttccccaggactgtgcttagagacccatagggagataatacatcttatcagaccttcaaaactagtgagtgggagaggcgagagagacttttggaggtaggacccaaaggacatgctctttccactgtgtgtttcctgaggtggcccagggtgtaccacagaagacacggggcccggaagagtagcagagatgaaagagttcaatatggcacctgagcctggaggaagacgaggggccgcaggtgctgggcggtttctctccttcattgtttttcttacatggtcatcttcatgctgtgattattaacagagagccgcacatcaggattgatttgatgtcctctttggagcatatgttctactttttacaaaggttacaaagaaaagaatcattgagtcctattgtaattttgaacatcatgcgattattgagtcctaatgtattttaaatttgctctcaaattcatgcggctcttgtttgcatctatgcaaatgatatctgctaagaatctgaagatattcaggtaaaattccaaagttcctcaagtctagtgttaactgattgatacagacagccagtccgtggcagcaccaggcttggcacttgagcctgcgtcctgcccaccgcccatatgccccagcaggcttctgacctggccgagaaggtgggatggcgagacccatggcagcaag

SEQ ID NO: 5133 - DNA, 1000 bp, mus musculus
aagtgggaacaaaacacccatggaaggagttacagaaacaaagtttggagctgagatgaaaggatggaccatgtagagactgccatatccagggatccaccccataatcagcatccaaacgctgacaccattgcatatactagcaagattttatcgaaaggacccagatgtagctgtctcttgtgagactatgccggggcctagcaaacacagaagtggatgctcacagtcagctaatggatggatcacagggctcccaatggaggagctagagaaagtacccaaggagctaaagggatcttcaaccctataggtggaacaacattatgaactaaccagtacccctgagctcttgactctagctgcatatgtatcaaaagatggcctagtcggccatcactggaaagagaggcccattggacacgcagactttgtgtgccccggtacaggggaacgccagggccaaagggggggagtgggtgggtaggggagtgggggtgggtgggtaaggggcacttttggtatagcattggaaatgtaaatgagctaaatacctaataaaaaatggaaaaaaaaaaaaaaaagaaagttaaactaacatgacgcctcacaagagcctggacttgatgatctgtattatagaaacaacgtaggtctatttaaacaacaggtcagtgttgacgttggggctgattgtgtctgtcaatctccactgccctgcttccttcccataacaccatgagagctgtcgcactcatttaccctggcttgcccactcccagaatctaggttagactgttatctcgcattagccagtagaacgaagaagaggcggtgctgtgatagccctgggacggcgtgtgtgcctgggtgtgatgccgctaaagtcccagcattcaaaaattaaatgattttgcaaattggtttattttctgatggtgctagggaatgaacccagggcctgcacatgataggccaatactcgatctctgagctatgt

SEQ ID NO: 5134 - DNA, 1000 bp, mus musculus
tttggcaccacttcttgcacgtgccctggcttgccagcaagaacgatgctgcaacaggatccttccgcacacgtttattgggagagcttgattgcagaggcgaagtgaccccaagcccagaactggtgctgcttatataggcctaggagaggcgtgtctcacacccggattggttgtgcttgggttatgcttaccacctcatttgcatgcctacatctgattggttaacttctctctcatctgattggttaacttgtctctcatctgattggttaattttggttaattctcaaaacctcatcttggcaaaaaaaactttactgcctatgtatgtgtggtggccagcggtagccagcaccactctgcaacggcacatgtggcttcccacagaggggtcacagccaagaagcacatgggaagagaaagttccatggccaggagctagtgagatgatggggccatgaccaagaaaggggtggggtcacgaccaagaagaggatgatggtccatgaccaagaagaggatgggccatgaccaagaagcagatgaggtcatgaccaagaagaagatgtgtccatgatcaagaagggggtggggccatgaccaagaagaggactggccatgaccaagaagggactggactatgatgaagaagaggatggggccatggccaagacaagtatgggcatgaccaagaagcagatgagaccatggccaagaagcaaatgagatcatgaccaagaagaggatgggaccatgaccaagaagcaatgggtaagaggaaggcaagtttacttcagagaaatctcccagcagtacctgtttgcccctctcaaagttcctatctcttctaacagagtccacatattcagctcccaggcctctgacattcacccaatgctgccccctgcaccccgttgcctggatcacatgaactcccatcctcttgtggtttgcacagtggcgactcagtaaagaagtacttggtctgaagtcacat

SEQ ID NO: 5135 - DNA, 1000 bp, mus musculus
ctctgggtcctgtgagtacagaacaaggggtatacgtagtgaacaaagtggttttacatgttagaggttgagaggtcagtaatcagggtgcagagaagtagtggaaatgcctgtgccatttcctcttggaaatcaaggcattgacaatctcagaaacatgtgtggggctggggagatggtccagggggtgtagtgcttgctatgcaaacatggagatctgaattcagtccccagcccaggtgtaaaatgcgggtatgattgtacacacttgcaatctcagggctgggtggcagaaggcggcaggattcctggagctcacaggccagctcgtctatttgaaatgtgagatccaggttcaatgagagatgcaatcttgacgattaagggggaagtgaatgagagttacacatcaggtcagcctccagccttcactgcacatgcatagatgcacatagatgcacatgcccagttcccacaacacatgcaccttacatacacatatagtttaaaatatatgtgtaagacagccatggctgcccatatctgtgttccaagcatttgggaggctgagacaggagggttatcatgggatcaaagctgttctggactatatacctcccagatttctggaaaatttgttccttcagatttaggcttgttattatcactgctgtctgtaattcagtcctgagctagacaatcccatgtaattccctgaatctctcaaggaaaacaaaggtacaggctgttagaccctaaattcagatttagactgttagggcatgataacagctaaagagatagctcaacacttcaagggtcctgacattccgaggaccagttatcccagatcctcacaccaagcagtttcaaccaaatgacagtgcctccaactctaggggattccatgccctctctgcccaccacctatggcaccgtcacatatgtactcacacaggcatggacacacacatgtgcatcttttaaaaatacacattag

SEQ ID NO: 5136 - DNA, 1000 bp, mus musculus
aaacaccaagtgagggcagggcatgagagagagaggtgattgtgggtaaatggttgaagagttgttgaggtggtaaaagtaatacttaagaatatctgacaggttggcattgtgttttactgtatgaagcttatttttaaagctaaaaggtaagtgcagaaaaatcagtttcctcagcagacagggacacagtaaggcagtttctagtctgaggacatcaaatttaaaaaagaatttgtggaaagcttaaggccacatggagacactgcaggttatcgtccttctccaacctaacctccccctgctttttcacgtttcctaccaatctggacgggtctgaaaagagccctgtgctcacctgttgtaaaatgactccccttcccctgggaaggccacctgcttgtcatgttcacccagttaccagtgactcaccgtcttccaaatcacaccgccagctttcctgtttgtataacgattccatctcatttatgaacacttttgtgctcctaacaattctggaagatgctgtgaaggagccaggatcacctgagtgtgcctgctgcggagcacagtatccagggcagtcctcctgaaggggaagtgcgctcccatttcacctctgcctcttagaacccacaggctaagggacgtgttagagagactggggactggatcccatagaataaatactgcatggtgacagcagcaagcaggaggaaggtgagtacggtgacaatgatagtcacagcagtctggcagagactgtctatcagaccccgtctatcaggcacccccagagcagccatcttcccgggagacctaaaggaacaaccttgagctgtggggaggcaaaaaccttctttctggtggcctgactgcttatatgacccttgcacggaccttcagctgattccttgtccactttcacatcctatcttctaagaattttgattctgttcatcacagcgtggaaaatgacacaacagcatttcttcagaat

SEQ ID NO: 5137 - DNA, 1000 bp, mus musculus
attgggtattgggtgggggaaaaggactaacgtccttgagggccagcagaaagaatggaaacatgcaaccttagatggtatgaggttgaggggaccctccagaatgtatcagaaacatgggagatgagagactctcaggactcaaagagagagaccttagatgaaatgccctacattgggaagaggaaacttgtagattccacctccagcagaaagactggagggatcaagtgagggatgaagttgccatcccacagtcaaaactctgacccataattgttcctgtctgaaagtactccatgcatggaaatggaaaagagcctgaggaaaagaaggtccagcaacaggcccaaagtggaatccagctcaaggggaggccccaagacctgacactattacagtctatggagcgctcacaaaaagggacctatcatgactgccctccaaaagacctaacaagcagctgaaagagtcagatgcagatatttttacccaaataatgaacagaagcagctgacccctgtggttgaattaggggaaagctggaagaaactgaggaggagggtaaccctgtaggaggaccagcagtctcatttaacctggacccctgagatctctcagatactggaacaccaaccaggcagcatacaccagctgatatgagacttcgacacatatacagcagaggactgccaggtttgagttcagacagagaagatgcacctaactctcaagagactggaggccccagggagtttagaggtctggtgggatgggggatgtggacatcctcgtggagacaggtggctggggaggaggtatgggatgtggaacagctggagagtgaaccaggaggggaataaaatctggagtgtaatgtaaaaaaatcccaaatactgtaaaaaattatattttcacagaaagaactgaatttatactttgttacgttgggttgattttgtctttggtatcagtggagagcattatcccacatatttat

SEQ ID NO: 5138 - DNA, 1000 bp, mus musculus
aggggtccgccctgcccgggagcactttgcctgagcatctgcggcagacatcttggttccgggaacccgccggagtattctgcacaggtgagagtgtagaatacagaagctaacagcttctgggacaggccaaagcaactcagccacgggacaggtcctgttttgggccttcatctttggccaggagggaggtcctaacgccagatatctgtgcaccttccctgtaagaggagagcttgcctgcagagagtgctctaaccactgaaactcagaggagagatctagtctccgaggtctgctgatagaggctaacagaatcacctgagaaacaagctctaaccagagacaactaaatcaactaactccagagattatcagatggcgaaaggtaaacataagaatcttactaacagaaactaagaccactcaccagaacacagcactccgacctcgcccagtccagggcaccccaacacacccgaaaagctagacctggatctaaaagaatatctcatgatgatggtagaggacataaagaaggaccttaataactcactcaaagaaatacaggagaacactgctaaactggtagaagatcttaaagaggaagcacaaaaatcccttaaagaattacaggaaaacacgaccaaacaggtgatggaattgaataaaaccatccaagacctaaaaagggaagtagacacaataaagaaaaaccaaagtgaggcaacactggagatagaaaccctaggaaagaaatctggaaccatagatgccaggatcagcaagagaatacaagagatggaagagagaatctcaggtgcagaagattccatagagaacatcagcacaaaaatcaaagaaaatacaaaacgcaaaaagatcctaactcaaaacatccaggaaatccaggacacaatgagaagaccaaacctacggataatagaagtagatgagaatgaagattttcaactcaaaggaccggcaaatatcttcaaca

SEQ ID NO: 5139 - DNA, 1000 bp, mus musculus
ctctctttctctctctctctctctttctctctctctctctctcccctttcctctgtcctccctccccaaaataaactgttttttttgtatgagttacatttggttatgatataacaacaacaacaacaacaactaatgtaagactcatgtgtagattataaaaactaaaccagtttcaacttaaggtgagcatattaattatcattctacatatgtcaagtgttgtgatcataaaaagagaaagagctgtaaaaatatgttttgtgggatgtgaggaaaggggctgcctcagtgggcccatgccaaggcatcccttccccctgagggaccagacacacacaggtataatatagagtagagtttatttagggcatggggaggggaattaaaacagtagtagaggcagagagaaaggcagagagaagaagaaagtagagaagtagaggacggccatgaccatgtggagagaggggggaagagaatggggagagaggggaagcaagggtgcaagaggcaagagagaaaagctggagtaagggagagagcaggggccaagcagctcctttcatactgggcctagcttgcctgactgcctctaggtaaccgcaggaaggaggatacctggctgctgccaggcactgtgggggtagagtttagacagaatacctacatcaagaggtaagaaaagataagcatcttaatttgaaatggtcaccacagagaaagcacctagagtcagagtgatactagaaacgttacaggttttgtctgtgatccacaagaccatctcctcacagaccagcctgtttttgctgcaagggctaggtattttcagttatgatacaactataagacaattgcttttaattgtaagtttggaatttcctaccatgaagtaattgctttaaactccaatgtaaaatatgcagtaaaacgttaaattagttgggttgctatttcgctatctctggtaatatgttcccattgaaattcccataat

SEQ ID NO: 5140 - DNA, 1200 bp, mus musculus
ttaccacaacattcataacattgtgttataagtcttagataaagttttgcatgaatatattatatgaacatacataagtaaatatgtacacatgttcgttttcaaagtagggatatgagcaatggaatggttacttttaaggatggaaaatagagccatgtgaaaacagaatcttaattttgaagatttgttttgtgataatttaaggctgggaaaattttatgctcagcccattttgctttaaagttttgaatttgcattttgaaggtgatattaacacatggtgggttgtttctcctcttgtctgttgttttcactctctcctacctacagaaaagaggaaaaccagcctgctggatcagctgaccaacaccagtgggacggtcattggcgtgacttcctgcattgtgatcatccttattatcgtttctgtcattgtacagatcaaacagcctcgtaaaaaatacgtccaaaggaagtcagactttgaccagaccgttttccaggaggtgtttgagcctccccactatgagttatgtacgctcagaggaactggagcaacagccgactttgcagacgtggcggaagactttgaaaattaccataaactgaggagatcatcttccaaatgcatccatgaccatcactgtggatcccaactgtccagcgcgaaaggcagtcgcagtaacctcagcacaagggacgcttccattttggcagagatacccacacagccagtcaagcccctcatcccacccgtgaacagaaggaacatcctggtcatgaaacacaactactcacaagatgccgccgatgcctgtgacatcgacgagattgaggaggtgcccaccacaagccacaggctatccagacacgaaaaatctgtccagcggtcagtatccatagatatttaaatgatggcaactgtaactgaaaacggaaatgctgctatggcattgagttctagtctgtcttcatgctcacttgccctgtgaatgatagtgtgctagtcagctttttatatcctacacatgagcatgaaatatacacgtgtgcaatgacacatgtacacacagaccaaagatttttacttctgtatatgtgaaaactatttctacacaaacagggcatctcatttatgataaagatttaggcaaccaatctgacttcacagtcatagttgttgctcttatcaatatt

SEQ ID NO: 5141 - DNA, 1600 bp, mus musculus
ttctataattttgttgaagatatttactggccctttaagttgggaatctttgctctcttctatatatattacccttagtttggtcttttctttgtgtcctggatttcctggatgttttgggttaggggctttttgctttttgcattttctttgattgttctgtttatgttttctatgatatcttctgcacctgaaattttcgcttctacctcttgtatttgtttgtgatgcttgtatctatggctcctgatctctttcctaggttttctatcttcagggttattagctcaaaagctcagaatacccaagacccaattcacagaccacatgaagctcaagaagaaggaagaccaaagtgtgggttctttgttccttcttggaacggggaacaaaatactcaatgggaagaaatacaaagtgtggaccagagactgaaggaaaggccattcagagacggccctacctgggcatccatctcatagatacagtcaccaaacccagacattattgggaatgccaaaagtgcatcctacaaaaccctgatatagctgtctactgaaaggctctgccagagcctgacaaattcagaggtagatgctcacagcctgacattggactgagcacacagtccctgtgatggtttgtgtattcttagaccagggagtggcaccatttggaggtgtggccttgttggaattgatgtgacctggttggaataggtatgtcactgtgggtgtgggcataagaccctcaccctagttgactggaagtcagtcttccactagcagcctttggatgaagacgtagaactctcagctcctcctgcaccatgcctttctggatgctgccatgctccaaccttgatggtaatggattgaacctctgaacctgtaagccagccccaattaattgttggtttttataagacttgccttagtcatggtgtctgttcatagcagtaaaaccctaattaatatggtcctcaatggaggagttagagaaaggactgaaggagatgaaggaagggctttgcaaccccataggaagaacaacactatcaaacaaccagaatctccagagctcctagggactaaaccacccaccaagtagtatgcctggaaggacccatggtcccagctgtatatgtatcagagaatggccttgttggacatcagtgggaggagaggcccttgttcctgttaagactcgatgccccagtgtaggagaattcaagggcagtgatgaatgtgtggttggatgggtaggggagcacagtcatagaagcagaaagggggaatgtgataggaatttccaggggagaaatcaggaaaggagataacatttgaaatgtaaatatagaaaatatctaataaaaactatcaaaaataataaataaataaaatggtactcttcatatatgcagagaagcatgtgacaaatttcaatattctttcatgataaaattactaaggaaataggaatcaaaggaaaatactttagataataaaagttatgcatgccaaaactatagccaacattatattgagttgtagaagatgaaagctattccctctaacatttttaatgtcacagtggtacc

SEQ ID NO: 5142 - DNA, 1000 bp, mus musculus
tgtaattttcattaatggtcaaaaaaaatcatagctaaacataaaggacaattagcttacagctaaggactttccattagattaaaaacaagtctaatttttatcatgatttggaagaatgtacagtagatagagaggtctgctctgtaatcagcttaactaacatctctaaagtcaaagtgtaagatgacacaataagttcaaaggagctctgggggtactggttagttcatattgatgttcctcctatggggcttcaaaccccttcaactctttgggtactttctctagctccttcattaggaacctgtgctccgtctaatggatgattgtgaacatccacttctgtatttgccaggcactggcagagcctctcaggagactgctataacaggctcctgtcagcaagctcttgttggcatctgccatgaaggttctatgccccttcagtataggggaatgtcaggactaggaatgggagtgggtgggttggggagcaaggggaggtgggaggggataggggattttcagaagggaaactaggaaagagaataacatttgaaatgtaaataaagaaatttctaataaaaattttagaaaaagatgacacaattaaaagttatatgaggtgtacataaagcataaactagaaatgtgtcactgtgactattaatgctagggacatgacaagttacttgtgatgcaattactcagctgtacttggaacaggatagagttcatgaggagccatagagagattgtaatgcaactttgtcattctcggataagtttatccctttcatgtagaaagtgtgcacaccttgcacacagactgaagaacaacagtaaagcaatagaatagagtacagcatagaggtggccagctcactatttgggattcaggagaactaaccacagaccagatatccagattacatcctgatgtgcaagtacagcatcccaattcagtaggtgctcacaatatatttagagcttatag

SEQ ID NO: 5143 - DNA, 1000 bp, mus musculus
acacttggcagccaccctcttcaccttcggagctacctcaccagccctgtttctcctttaaaactccacctaggtatctactgtctacctttacctcatctctttctctgatccaagcctctcacttgtctctgataagatctcttttataattgagtttttctttttttacttagaaacattactttaacacttcatatattttatctttctactaatattttagttgctttatatgataatatttaagatatccatacacatatacagtgtacatatattacaaatatatagtgactaaatcagtgtagttcttgtgtatttttccattaatttattcattttacatccgaaatctgctcccttcttctcccagtcctccttccctcaattcctctacctattcctctggcccctcctcctttgacaagggagagaaaccctcaggtaccattctacactgacacacaaagaggatgcaggatgaggagcatcctctcccactgaggccagacagaacatcccagttagggaaacaggatccacaggcaggcaacaaattcaggggcagctcttgctgcagttgttgaggatctccaagaagaccaagctgcatatgtgcagaaggcctacgtctatcccatgcccactctttggttggtggttcattctctggaagccctcaagggtccaggggagttgactctgttggtcttcttgtggagtctctgtcctctgttctcttagtccttccccaagctctttcacaagactccttgagctccatctaatgtttggttttgggtctctgcatctgttcccactatctggtgggtgggacccatcagaggacatttagtttaggatcatgtctacaagcataacagaatattattaatagtgttagggttggttttggcatgagatttgtctcaatttgggccacttctccttaaaggatatttgatctcattcttcacttgctccttcaaacatcaca

SEQ ID NO: 5144 - DNA, 3200 bp, mus musculus
atttaaatcttattctgttatgacctagtgttccctatgaataccaatcaatatatgacagaatctctctagccctgagctagtaaacatatccaatgttgacttaccctaggtctgcctatgtcttaagcctttcctggtattacattactgcatatatcatttcctatatagaccatggaaagtaatttcttggtattcttcctacatttgcttttaactttaacaaagatgtataaaaatgtgcgtgtttcacagtatgtgccatgccagacttctatagtgatttttctttattttttcaaaaatatttccatggtctgttcctgatgatagcatctgaatgtttgtgtcttcccaaaattcttgtaataaagcttgactattaagatggttggatcagaaaggtctttggaaggtaaactataagagtagaccctctttgaccagagacttggcccatgagccaccatgctggatcacccaagttgatgcccgaatacctacaactgtgtaagaaaggaacaaatccctgcacttccttttgagctctccctgtatagcatagtaaatgcccttttcccacagaaaataaaattgaaaatttaaacataagataaaaaggaatgcagtctaatataaataatacagattattttttatttctatctcttttttgaaaatattttagctattttctttatttacattttaaatgttatcctctttcctaccttcccttcagaaagccccctgtcacatcctcctccccctgcttctatgagggtgttcccctacccatctacccactcccacctctccatcctggcattctcctacactggggcattgagtcttcacaggatcaagggcctcttctcccattgatgtccaacaaggtcatcctctgctacatatgtggctagagccatgagtcactctttgctttcagaacctttatgaaaaagtgactaggagctgccttgagccctctactgtgagggggcacaaagtggagaaactatctatgaatcagaaaaagaattctgactaaaatatgcatctttcagtgtttcaatttttacattctgggaataaaaactgtgaaagttagatttttgttttctgtaagcagatcagactatgttattttgtatagcagcataaatgaccaaaatactaggcaaccattacaaccagcttttataggaaatgggatcaacaagaacaatcttagtgcatttgtatttgatggaaatggaataaggtagtttttattgttgttgttgttttttttttaacagtataaatcagatattaccatggtcttgttcagactctaaaaattatccacagccaattactctactgtttatcttacttgtttcaaatcagttcttactgagtgaaaagaatgataatcattgctatagaaatatgaagccaagaatagattatcttgcattaaacagaaaacatttgagattattaatataatgaaatattatatcctatgctatgatgataataataacagttatagagttttagactttaaaggatttagaaaaggtataatataattacttcacattagggatctaatgttaattttaggaagatagaacttagtttttagattactgttatgtatatagacaactaagaagatgagccaaatattttccatgtatcccattgattgataagctctatgcacactataataaaatacttgaagcagactataggaaaagttatataactgcttactacagatgttcaaaatctgaatcctgatgggctctgtgaatttgtcctctgtttatagtaaaatgatcaatgtattgtagcatgttggaaagggtgatagagaagaaggcagaaagcatagaaacatattgtgttttgtcatgattatggatctctgagcttgcgtgcaaagggtattcctgaagacttctaagatgcctattatacaagactggggaggttagagaagcatggcaacaaacatgcatagacaaagccttcttaatagttactcaacatgactgagttgtatcagttaatgagcattttcaaactacatagatacgctttcactcaatgcctggagatgtttcaatagatacttactcactattttcccttatcactagttttctagcatttggaccaagctaaccagctagccaaaccatttttcttgatcataaatgaagataatctattttctgtttctctctgtttttttttttttttttttttccagaagaaaattgacagcctaggttctggccattgggagcaattttttttccactgcctgtcagagccctgtgagttgaacttcagaatcaaaaatgttcactgtcagatattcccatgttctacaatgatatttcagattgagttttatatctttcttgtttaataagctgctgttgggaactctttttgaagaaatttcattatatgtgataaatttcattatatatatgataaaagaagattccagaatattagtttcaatttttaactaattttatgctaaaatttctggatattcaggatctccattagccaaatgtggtatatgctattttttaaataaaataataatacatattatatatttttatgtattacatatatcattagatataatttaatatatattatatgattcatataatgctccttgacactacatcacagtatgccctattttattttgaataccaaatttcaggtagaatactacacactatcatttggcttccattcatcagagttcatataggttgtaataatttcattactcgaaaagataaggtagaatttggtataaggacatgcttgaacacaggaatttgaatgaaaaaagaagatttgcataagagagatcaaacagggcacattctgtaatagcagagaggtaagatgaagggagctcaaagcagctgctcgcactgcagttgtatttgaaagttgctcatcacactttcacctcagttcaagactcagcccaagaagtgatgtaacccacatttgggcgactctaccaaccataactgatctaaccagggaaattcttcatagacatgcctagagtcttgttttcatgttaattctatttttttcaagtaatattcaagattagctttcaaaactctcaaatgatgtatgtaaatcat

SEQ ID NO: 5145 - DNA, 1200 bp, mus musculus
atcatttgatgaaggtaaagcaccaaaaatttgatgacctgggaaaattagtaggtaatgaatagagactattagcattaaaaattgaaaataagatgaaagaggagaccccgagtagtctgctatgctggaggagatagcagactactcctgctgcatttacttcacctccatcagactcatgagccatgcagacaagaacttcttgtcttctgagaggttccaaccagcaacttactcagacaggtacagacacccacagctaagcagtgaatggagcctgaagactcttatggaagaatagaaagaaggattgcaggcccaaaaggggtaagaaatccacagaaagaccagcagtcaactaacctggacccttaagtctctcagagtctaaactaccagccaaagagagtacacaggctggatgaggcctccccactcatgtgtagcagatgggtaatgtgaccttcctgttgagtcctgaacaactggagcaggggtaatcccaaaagcagttgcctggatatggcatatgtactactagctgagctgctttgtttggcctcactgggagagtaagcccctagcctagcaaagacttgaagtgcaggggaggagaagaaggagatactcaagggaggggggcagctgctcagagaagaggagtggaaaaggggaaatgtgagcaggtgtggatagtgagtgcgatgtaaagtaaatgagtaaaagaataaaattaaattaaaaaaatagatgggtgacactactaaaagcagttgaaatcaaaatactatgaacactaacatgaacgtgtgaaatggtataaaatacagaagtaaaggagaaacaatacaatggaaatctcactaggaaagttaggaactggaaacaaatgcatgagcagaaagacattcatcacagcgccaagaacacaccaagaaacttaaattctgagtctatctatttggaatgttggtctaagttcagttatgcgtcaaaacgttgcctcagcttgtgtgtgatgatactcctcttttttttttttaaacctaaatctaactttttttttccattttttattaggtttttagctcatttacatttccaatgctataccaaaagtcccccatatccacccacccccactcccttgcccacccacttcccctttttggccctggtgttcccctgtactggggc

SEQ ID NO: 5146 - DNA, 1200 bp, mus musculus
tctacatatctttatttttaatttcatttaatcttttttatactccagatattatcctccttccagtctaccctctgactgttccccatctcatacctccttcccacacctctgtctccatgaggatgttcccaccccacaccccacctgacatctaaactccctagggcctccagtctctctctctctttttattgtttgtttgtttgcttgtttgtttgttttttgagacagggtttctctgtgtagttctggctgtcctggaactcaccctgtggatgaggctagccttgaacttagaaatcagcctgcctctgcctcctgagtgctgggattaaagatgtttgctaccactgcccagcagcctccagtctcttgagggttagatgcctcttctctgactgaactcagacccagaagtcctatgctgtatatatgtgttgggggtgggggggctcatatctgctgatgtatgcagcctggttggtggtccagagtttgagggatcttgtgggtaagggtaattgagactgctggtcctcctacctcagctactttcagcttttccctaattcaaccacagcgatcagcagcttctgttcattggttgggtacgaacatctgcatttgactcgttcagctgcttgttgggtctttctgagggcagtcatgataggtcccttcttttgagcacttcatggcctctgtaatagtgtcaggccttggggcctccccttgagctgaatcccagttttggcttgtcactggacctccttttccttaggttcttctccattttttctccctgcagttctttccgacaggaaaaattctgggtcagagttttgactgtgggatagcaaccccaaccctcacttgatgtcatatctttctgctggaggtgggttctaaaaattccctctctccactgtagggcatttcatctacatatctttaacagaagtgaaacaccattaaaatttcctaactcaaattatatctttgatttagtatttttccaaggtctgcaccatctgcatccttcaattgggagttgtttagtaccatagatactaacagttaaaattagtattgtctttccaagctcaatacaatcatgaaccatattctacatccctgttttagtttcttttccatttactgcaatgaaatatcctggcaaaattaatttaatggaga

SEQ ID NO: 5147 - DNA, 1200 bp, mus musculus
aataaaacctgctcaatctattcaatgttacttagttttttattattttatttatttacatttcaacccctgccctcccccgtacaagccccctatcacatctcccttctgtttgccctaagaaggtgctcccacacccacccacctaacccctctagcatcccccttccctggggcatcaagcttccacagcaggctaagggtagtcctttgctacatatgcatcaggagggccaaaggatcagcccatgtataatccctgggggctctgagggctttggttagttaatactgttgttcttcctatggggttgcaatgcccttcagctccttcagttcttcccctagctcttctataagagtccctgagctcagtccaatagttggttgtaagtatctgcatctgcctcagtcaggtgttggtaaagcctctcagagaacagccattccaggctcctatctacaagcatatcttggcaccagcagtagtgtcagagttttgtgtctgctcatggggttgatcccaaggtgggacagtatctgaatggccttttcttcaatctctgttccattttttgaccttgaatttcctttagacaggaacaattctgagtcaaaatttttgagattggtgagtggccccatctctcaattgggatcaagtctatgtctggaggtcatcccttcaggttccatctccccactgttggagctttcagctaatatcatccccattgcgtcctgggagcctctcacatccctggtgtctgagattttctagtggttccccactccccaacacacacacacacacacacacacacaccactacactgctccatatttctattcattctcctggtcctctgggcttctctcctctctcccccatacctgttcctgaccctctttccccgctctgcttctctccaaacctacttaattataaggtaacctctaacagaaaaaaataaagctctatttcctcttaaccttgaatttcttataagatcctgaactatggcacatgttgcatgccctgtcctataaccgtgctgcagcaggtgatgctgtctcctgtcataaacgtttatatcaggagtggactcagaactcggaactagctaagaatacagaggctacagtcataactttgattagctaaggttgaatataaagtcacaaggactttgggccatt

SEQ ID NO: 5148 - DNA, 1200 bp, mus musculus
tgctcacatctatgattccagatttctttcctagggtttctatctccagtgttgcttcactttctgttttctttattgtgtctacttccctctttagatctagtatggttttgttcattttcatcacctagttggatgtgttttcttctcttcctttaaggacttgcaactctttagcagtgttctcctgtatttctttaagtgagttattaaagtccttcttgatttattctaccataatcatgagatatgcctttaaatccgggtctagtttttcaggtgtgttgaagtgcccaggactggctgaggttggagtgctgttttctgatgatggtgagtggtcttgttttcttttagcaataatctcaagtctgccttttgccatgtggtaatctctggagtcagttgttatagttgtctctggttagagcttgtttctttcatgattctgttattctctatcagcagagttgggagactagctctcccctgagattcagtggtcagagcactctctgcaggcaggttctcctcttccagggaaggtgcacagatacctggtgttcggacttgcctcctggcagaagatgaaggccccaaacaggacctgtcccagaagctgttagcttctgtaatccacactctcacctatgcagacttgtctcagtgggatccagggaccaaggtggctccctcaggtactcaggcaaagcccacccaggtagggttgacacctctcctctggcagggaaggtgcctgaatgtcaggagctcgaaacagggtctgcctcagaagctctgtggctcctgcctgtcctcgaagctgttagcttttgtagtccacactctcacctgtgcagactagtcttggtgtaatccaggaaccaagatttctcccccagatgctctggcaactcccattactatggcattgctggatgatttctctcctgctgctcttaaacctgatctctctgcttctgtgtcatggcgattctcgagaaagtgctttttttgttacattggtcagagactctgaatttccaatacattttacattacttaacttccctggatttatacatctgatataaactgataatacaatttcaattctattgttctgttttcatgtagtaattcttgcttcctgtaattgatataaacatttgtactaatatatccaaattaaaagcacat

SEQ ID NO: 5149 - DNA, 1200 bp, mus musculus
acattaattatgttgagaatgtcaaaaaatattgcttgttgcctagaagtatttccttttacataatcaataaaatttaaaagaaattaatatgatgaggcaatcccataaaattgaaatatgacacagtagttgagggcatgttatcaatttcaacactacatcattaaagctcttcttgtaaaaaaaaaaaaaaagttcaaggggcacaagtcccctctggtccggccagcaccaaggttgctagggctcagagtcggctgacactctggtgagtggaacacagctgctgctccaatccaattgcacaggacctgagactgcattaattatagaagcagaaaacccggcctgataaggggcacaagtcccttccagtccagccagcaccgggttagctagggcacagagtcggctgacacccgccagctacccacaagacctgccacgggatcttaagacctctggtgagtggaacacagctgctgctccaatccaattgcacaggacctgagactgcattaattagggaagcagaaaacccggcctgatcagtggcacaattcccttccggtccacaccagtacaggggtaccttgggcgtggagtctgtggacacccataaggtatacacaggaccctcgatgggatcttaagacctctgtgagtggatcacaaattctgccaggaggcaggttcaaataccagatatctgggcaccttccctgaaagaggagagcctacctgcagagagtactctgaacactgaaactcaggagagagctagtctcccaggtctgctgatagaggctaacataaacacctgaggaacaagatctaaccagagacaactacaacaactaactccagagattaccagatggcgaaaggcaaacataagaatcttactaacagaaaccaagaccactcaccatcatcagaacacagcactcccaccccaccaggtcctgggcaccccaacacacccgaaaaactagacctggatttaaaagcatatctcatgatgatggtagaggacatcaagaaggactataataactcacttaaagaaatacaggagaacactgctaaacaggtagaagaccttaaagaggaagcacaaaaatcccttaaagtattgcaagaaaacacgaccaaacaggtgatggaattgaataaaaccatccaagacataaaaag

SEQ ID NO: 5150 - DNA, 1000 bp, mus musculus
ttacattacttttttattaaatattttctttatttacatttcaaatgctatcccttttcctagtttcccctatgaaaatcccctgtcccctaaccctgccccctgctcaccaacccacccactcctgcttcttggcattcccctaaactagggcatagaaccttcacaggaccaagggcctctcctcccattgatgactgactgttgtctccctttccagtctccctccacaatcccccaagctattgccctctcatttgcttctatgaggatgctcctccacctatctattcattcctgcatcactgcccaagcatcaccctttgctggggcattgagtatccacaggaccaaggtaccaaggtccatccctcttattgatgccagataaggccatccactgctacaattatagttgaagccatgattcccttcatgtgcactctttggtggtttagtctctgggagctctggggtccagttaattgatattattgtttttcctatggggttacttcaagttttaattgaattggctcattttcttcatggtttctcccctctctttctttgagtcttttgtgtttcctgggcaccaatgctctgtcagatgtataactggtgaagatgtttccatcttgtaagctgcacagaagccttctagtttcccaaactctcttatgtcaattattggtctttactcctggtctcactttcagaaatttcttcctatgcctgtcattgaagtatttcccatactttctctttagacatcttcaaagttttagaactttgttgaagtgcttgatccatttgtatttgacttttgaggagcgtagggaaaggatctagtttcatctttctacatgaagctatctagtttgagcaacaatccatgttgaagatcatatcttttctccaatgcttgtgattgacttttagtaaaaacaaaacaaaacaacccacaaaaaaacaaatccaaaatgaaaaaaaactacca

SEQ ID NO: 5151 - DNA, 1000 bp, mus musculus
tgtactcctttataagtagatattagccaaaataatgtacagaatacccaggataaaatccacagaacccaagaaggtaaataatcagaaggacccaagtgaggatgtttcaatcccatttgagagggagaagaaagcaattgcagggagcagcgggagtgagggacttggatgggagaggggaggggggaatgggaacacaatcaagtactggggtgtgggaacagtagggaagccctgagggtcagcagaaagaatggaaacaggcaaccttgggaggtgggaggtcaagggactggcaagaatgtaccagagatctgggaggtgagaaactttcagtaccgaaagggagacaccttagatgaaatgcccaacaatgggaagagggaactggaagagtccacatcctatagaaagacaaggcatcaagtagaggggtagggttgccatctcacagtcaaaaatactgatccagaattgttcttgtctaaaagaactgcagggacaaaaacagaggagatgctgaggggaaagaagagtagtgactggcccattttgggatccacctcaaggggaggctccaatgcctattaatgatgctatggtgtgcttacaaagaggggcctagcatggctcttctctgagaggcccaacaagcagctgactgagacatatgcagatatttacacccaaccaatggactgaccctggggagctctgtggttgaattggggaaagactggaaaaaggcaatgaggaaggtgacccaagaagaagaccagcagtcttaactaacctagaagcctgatatgtctcagacactgagacaccaaccaggcagcatacatcagctggtctgaagccccatacacatataaagcagaggattgtctggtctggcctcagtgagagaatatgcatctaacccagagagccttgtgaccccagggagtagggaagcctggcagagtggggtgggaggacattctcttggagatgg

SEQ ID NO: 5152 - DNA, 1000 bp, mus musculus
gtaggaggtgtgtgtgtgtgtgtgtgtgtgtgtgtgtgtgtgtgtgtgtttgtgtgtcagttttacaattttattcggacgtatttacagaaatgggttacagggaaaacaagctagacacagatggagacagaatgagtcagaaatgagaagaagtcagaagattacaacatattgccaaagttagtatgaggccaggtagagcaattcagtcagaagctaagagaaactggattgaatcagtcagcctggaagattagattgtatagaggctagaggcttccaggtttccaggctggttttgtgtgtcaacttgaaacaagctggaattatcagaggaaggggcttcccttgaggaaatgcctccatgagatccagctgtaaggcattttctcaattagtgatcaagggtgggagagcccattgtgggtggtcccatccccaggcttgtagcctataagaaagcaagctgatcaagccaggagaagcaatacagtaatcagcactcctccatggtctctgcaacagctcctgcctccaagtccttcccctgtctgaattcctgttctgacttcctttggtgatgaatagcaatgtggtagtgtaagctgaataaaccctttcttccccaacttgcttcttggtcatggtgttttgtgcagaaaccctgactaagacacaggcctagggcaagggacagttagaacacataaggaaatgttcttggctcagcccaagccagatattcacatagcttgggcacagctcttatctcatcacttcatctgaggaaataaaagtgacatttacagagaagtggcagcagtagattatcttctaggttacatggcctaaccaaccatgtgtagtgggccatgttaccagtgtcacacaagaattccctcattctgagcaggccatatgtccaatttgattatatttcaatagaatttgaaatatttattggaagtgggggattggtttttgtcaaagaaaggac

SEQ ID NO: 5153 - DNA, 1200 bp, mus musculus
aactagaagagcccttccctggcaggttggagagatagtgggttttaggagttaaaggtgaagcaaagagaaacaacctggtctgtgagcttggccctcatgatgaagatgctcatgggatcagatggaacgagggagctgggtgcagaggtggggtgttcaggatcagagcattgctggtatgccccaggggcagagtaacggcaggagacttaagccacctcctcttcagcctcctattcgaactggacctctgcagcgttggtactcagacaccaagtttatattgctctctgcttccataaactccatctggtccataccttcgcccgtgtaccagtgcaggaaggccttgcacctgaacatggtggtgaactgctccaagatgtgattgaactgctcctggatggctttgctgtggctgatgaaagtggctgccattttcagattccggggtagaatgtcacacagggctgtattgacattgttggggatccactcaaccaagtagctgctgttcttgctctgcacacttagcatctgctcgtccacctcctgcatggacatccatccctagaagacagtagccttggtcaggtagcaaccatgtcaggtcaccatgttctagccatcatgttcttagcatcaaacatctgttgggttagctcaggaatggtgagggcctggtactgctggatgcccctgctggtcaagagtgggaatcctagcatgaagaagtggagacagggagactggggggaggtgggggaatggcaccatgttcacagccagtttgcatagatctacattgagcttgcctggtcacctcactcatggtggctggtggctgaggtccccgtagatgggtgtggtcattgccaaacagtaggtctcatcagtattctctaccagctgatgcacagacagagtggcattgtagggcaccaccaccatgtcagataccttggctggtggcaccacgctgaacatattcatgaccttgtctgagaactccaggatcttgctgatgagcaaggttcccatgcctgtgccggtaccacctctgagcgagtgggtgagctggtagacctggagacagtcatagctttctgcctctttgtgcaccacatccagggctacatccactaactctgcaccctcggtgttagtaacccttggctcagttgttgcctgctccgg

SEQ ID NO: 5154 - DNA, 1200 bp, mus musculus
tcaatgatccttgtagtctcaaaatatttaatcaaactaatgatatgttatatacaatacacagaccatatgatgctcaagaagaaggaagaccaaagtatgaatgcttcagtctttcttagaagggggaacaaaatactcacaggaggtagatgatgggagggacttaggaggaagagagaagggggataagaaaagggggacaggatcaggtatgggaagaacctgagatgataaacagaggttcagaaaattgaacagaggtgtgtaacaatgggggatggagaacaggaggtagccaccagaaagtcccagatgccagaaaatcaagaggttcccaggacccaacagggatgagattagctgaaatgctcaacaaaggggagggagaacctatagagaccatatccagaggttaggaaagactcccagttgggggatggggccaaccactcatctccaaatttttaacccagaattgtttctgtctaaaggaaatactgggacaaagtgtcgaacagagactgaaggaaaggccatccagagactgccccacctgggaatccatcccatatacagcctccaaacccagacactattgctgatgcaaagaaatgcttgctgacaggagcctgatatggatgtctcctgagagactctgccagagcctcgcaaatacagatgcagatgcttgcagccaagcattggactgagcacagggacccaaatggaagggttaggagaaggactgaagaagctgaaggggtttgcaacctcttagaaagaacaacaatatcaaccaaccagacccccagagctcccaggaactaaccaccaaccaaagagtacatgtggagggactcatggctccagatgcatatgtagcagaagatggcctcatctggcaccgatgggaggaggtaccattggtcctgtgaaggttcaatgcccaagtgtaggggaatgtcaggatggtgaggtgggagtgtctcatggaagcagaggaaggggtataggatagggggtttgtggaaggaaaaggggataacatttgaaatgtaaataaagaaaatatccaattaataaaaaaagaaaaagaaacagcacgatccaataaaatttcttgaagaagaaaaaggagagatggttcagcagttaagagcactaactgctcttccagaggacctaggttcgattccc

SEQ ID NO: 5155 - DNA, 1200 bp, mus musculus
aagcccacttattaatttggaagaggagatttcgacacagcctaatgttaagtattatgcacatctacaatgaaaaggagcaagcaggacaaagagaaatacaaaatgtacagtttgaagagaaaaagaatgccaaaaaatgtaattttggaaccaagtcctgtgtttaggagataaaaacttaaaagaaaatactgactcaaaaaacagaattaaagaagaggcaacctcaggacaagacctactcagctcatcttgaaacctgtgaaaggaaaaacctttgggagtttcttagccagaaataccattaacaagtcaaagcttgagcaggggcacaagtcccttccggcccactccagcaccggggtgccttgcccgtggagtctccggacacccgcaaggaaccacacaggattccccacgggatcctaagacctctggcgagtggaacaccacaagtcccttctggttcactccagcagcggagttccttgcgcacggagtttctggacacccccaaggtcctcacaggaacctccatgtgatcttaagacctctggtgagtggaacacaacttctgccaggaggcaggttcaaaaactagatatctggacaccttccctgcaagaggagagcttacctgcagagagtactctgaccactgaaactaaggatagagctagtctcccaggtctgctgatagaggctaaaataatcacctgaggaacaagctctagccactataacaactagctccagagaataccagatggcaaaagggaaatgtaagaatcctactaacagaaatcaagaccactcaccatcttcagaacgcagcactcccaccccacctagtactgggcaccccaacacaaaagctagacctggatttaaaagcatatctcatgatgatggtagaggacatcaagaaggactttaataactcacttaaagaaatacaggagaacactgctaaagagttacaagtccttaaagaaaaacaggaaaacacaaccaaacaggtagaagtccttaaagaaaaacaagaaaacacatccaaacaagagatggaaatgaacaaaaccatactagacctaaaaagggaagtagacacaataaagaaaacccaaagtgaggcaacgctggagatagaaaccctaggaaagaaatctgcaaccatggatgcgagaatcagcaaca

SEQ ID NO: 5156 - DNA, 1000 bp, mus musculus
ccatgctctacaaagtgagttccaggaagtcaaggctacacagtgagatcctgtcttggaaaagaaatcctggtgcaataaagtgtttaatcagggacagcaaggtggctcagctaaagtcaccaagtctgatgacctgagttcaatttctgggacacatatggtggaaagagaaaactaacttccttgagttgtcttctagttttaatatgcacttctgaggtttacataaacacacacacacacacacagagagagagagagagagagagagtcacacaagtacaattaaaatggagcatagatccatagaaatataaaatgcaaaacaaaacataaaataaagagaagattaaacataaaaagagaatagcgggctggtgagacggctcagtgtttctatactcaaattcaccctatatcacacacacatgcactcacacacactcatacacactcacagaaacacatatatactcacacacacaaactcaagcacactcacaagtgtatacaccttcttgattctgtgagacttgtgtccagccagctctaagatctctctgtctccctcatactccacagaactgagattaaaaacacattggcaccatgtctagttttcaggtgagttctgggcatttgaactcaggtcctcatgcttgcacaaaaatcatttcaccactgagccatctcttgtgtccctctaatttgttgaccttagacaaaagcctagcagcttaaagcgaaggttttgtagaactcattctttcaccagcagtctttcaaggttttttcagccttttaattctttaattggtagagagattgaacctgatcaagactcctaaatggtattatgagtgtgctccttactgccttgttcactgtggcctgcttagcctgctttcttatagcacaaggtcttatatccacagtggtctgggccttcccatatcaatgactgatgaagaaaatgtcttaaaggcttgcctataac

SEQ ID NO: 5157 - DNA, 1000 bp, mus musculus
tactaataagctcagtgtgaagcctacctcacaaaggataggagacagatccgcttgcgaaggttaggtgtacggaacaagtccagtggggagggttttgtctgtgctgcctccaactcctccttcatgatagttttcacaaccttcaacaacattgacaaactgttgtcacaaaatggtaaacattgtgatgcatgttggcaacatatagaggactacctctctctctctgtctctgtctctctctctctctcacacacgcacacacagacagagtctcctaaatatatgaatctaatctgcttatggataaccatagaaatatgcaacctcggggggtgggtggaggtcgggggccctctagaatgtaccagagatctgggaggtgagagactttcaggactcaaagggagggaccttagatgaaatgccctacagtggggagagggaacttggagaacacacctccagtagacagggcatcagttggagggagggtgttgccatcccacagcaaaagactctgacccaaaattgtctttgtctaaaagaactgcagggacaaaaatggagaagagactgagggaaaggaggtccagtgactggcccaacttgggatccatctcaagccgggggcagggggagggtctccaaagtctggcgcactgttactgatgctgtggtgtgcttacagacaggaccctagcatggctgctccccaagaggcccaacaagcacctgacacagatgcttacacccaatcaatggactgaagtctgggaatcctgtggttgaattagtgaaaggctggaagaagttgaggaggaggggagcaaccccataggaagaccagcagtctcaactaacctgagtccccgagatctctcagatactgaaccaccaaccaggcagcatacactagcttgtacgagaacccctacacatatacagcagaggactgcctggtctagccacagtgagagaagatgaatttaactct

SEQ ID NO: 5158 - DNA, 1000 bp, mus musculus
gataatgatgtttctttttttttttaatcaaagtacctgtttaataaaactactattaattaactaattaattagggtattttgtggtacaatggatttactgtagggccttagacatgtcttctttttgttcatttatttaaatttgttgtcgtcgttgttggaagtcttactaaattgcccaggctggcacatttgaacacatgatcctcctgcctaagcctccaagcagctggaattacaggtctgagccacaggacctggctctgcagatgaacccaaacaagatttcatcaagctaatgttcatctttactgcacgttaaagcagtcaatctgcctgccttgaaagctgctatgcagcccaggctagcacaacctcctgagtcttctgctgaaggctcctgagtgccgagttacagatgcgggctgggctgtatgcctggcctcaacaagcaaagcttggccaggaaaagattatgtggacttagagatcatgacgtcaaaaaagcacaatggatgtgtgagtgtgtgtgtgtgagtgtgtgtgtgtgagtgtgtaaatcatgcgacacctaagcagcttcttaagaaaagttgctcactttggttatttgcccaagtaatatccctatttaagagttacatcaataattttggggtatatgatttagaataaacacagcttaatcatcttgaatataacatatatgaaatataataatgggcctggtatttactctaaatgtaagtaaaatgtccgaattcaatttgtttaaatgcactgctatcttaggatagttaaggaaaccagtccacttcaaagctctgaagcaagctgcccgttagcttctgacagggttacagttacgggagtgagagagagggaacgtctctgaataagcaggctccagatcttccagattctgcccccattgtcagtcatttcatagtctgtctacacgccctctataagcccttcagtttatacttgcttgtat

SEQ ID NO: 5159 - DNA, 1000 bp, mus musculus
atttctttaagtgagttattaaagtccttcttgatgtcctctaccatcatcatgagatatgcttttaaatccgggtctagcttgtcaggtgtgttggggtgccctggcatgggctggattctgatgatggtgagtggtcttggttttgttagtaagattcttacatctgcctttcaccatctggtaatctctggagttagttgttatagttgtctctggttagagattgttcctctcgtgattctgttaacctctgtcagcagacctgggagactagatatctcctatgagtttcaatgatcagagtactctctgcaggcaagctctcctcttacagggaaggtgcacagatatctggcgttcgaacctccctcctggcccaagatgaaggcccaaatcaggacctgtcccagaagctgtgttgcttcggcctgtcacagaagctgttagcttctgtagtccacattctcacctgcacagattagtctcagagtgatctgagaaccaagatggctcccccaggtactcctgcaaagccctcctgggcagggtggacacctatcctctgggagggattgtggctggatgtctggagcctgaaaagggggctgcctcagaagctctgtggctcctgcctgtcccagaagctgttagcttcggtagtctacactctcacctgtgcagactagtctcagtggagtcccagaacctttctcaacgtcttctatcatcatcatgagatgtgattttaagtcagagtcttgctttcctcttgctttcctggtgtgatggggctcactgtggtaggagaactatgttctgatgttgccaagtagccttggttcctaatgcttatgttcttagccttgcctcttgccatcttcttatctctggtgttagcttgtcttactatctctgactatagattgtgtctcctgtaagcctgtgtgtcagtactcctgggagaccagttctctccaggtggaatttgggtatggag

SEQ ID NO: 5160 - DNA, 1200 bp, mus musculus
gaacacaggatgtcagcgccatcttgcaacggcgaatgtgagggcggctccccacaactgtaattcttcctttctaatccctgttctcctgtctaaactttgttcatagtgtttattgggcttttgtttctcagaaactttcagtttatgtacacctagccattgtcttaacccaaggactgctacagatgctcttgaacaaggaggaagaagaaggtcacatagggagaagaaagtcacatacatgggagaagaaaatagccaggaagtagatcagataagctccttcaaagtttatataagaagctaatgtaacctagcaacggctccctagaattgaggaatgctgttcctgctgtcctctagtgtgttaacccacaaaagcagtgacccatgcacatgttttgcttgagtatgtacatcttctgcatcctactgctggtacatgcatcttgattgtgaaggttagaatatatttccatgtgtcatgatgtgtctgccattttggaccactgtcttatgtgcagaacttcactcagtgccaccatgtcaaggtctgaatgtgcagctgtcaacgggagcaagctaatttggaaaaatgctactgtcattatctgtgacagtttggttcaaataagtcatttacatagaagactgatgctctaagatgcagctgcaatgaccagctactgagctgccacagaaagggtatcctaggtttgcaacacctcatgatcctgaagtggcccagacaccactcagtgcgatgtttgattcaacttagtagccacagtatagacattaataaaagtaacactataggacatagaaatggaaacactgactatactgggtgactcaatgacattttgatttattccacaggttcttgtagtgctaccatcaaatcctgctgtgactgtgatggcaccccctgtgacgcttcaaccattgccaccatcagaacaccaagggaaaaatgttccagaaaatgtatataagaaccactcagaagaaatagtctaattttcttgtgtgtatgtgaatgtgtgtgtgtgtgtgtgtgtgtgtgtgtatgcatttccctgggaaattaacacttcattgccctggcttttggggggaatatcagacatgccataactttgtaaatctaacatctactagtacaacaacactttaacatcctccattaattgt

SEQ ID NO: 5161 - DNA, 1400 bp, mus musculus
gcagtctgctgccaggacagcaaaggaagtagagcgtgtgcaccgtgaatcgcagtatgtacatcttagagaagacatttaaaaagatttcaaagtgaaaatttgtgaagtgcttgaacaacaggaaagtaatgtttgtcctaaggaagaaggactatatcatatttttaaaggaaaaacaagaataatgaaagtatcccaagaacaagacatggagaaggaataaagtgttgaatatgcatctttccggtcacagccttgtatgagaacaaatgaggcaacagtaggcgagcagaatgcacagcagtacaaacatcggaaggaatagttccgaaaagatttaaaggagatggctcatgaacaatttgaaaattctgaagttattctttattctaaggaagagttgccacctgatgactctagaagagtaaagcacataaaggttgaagaaaagaagacagggtatttgtatgcacccaattttagctctttcgagcatagaattgctgccttgagggctactgcacacgttgagccagctcctgctgcctgcactggtggtgcaggtgacatgggtgccatggacaaagctcagaagactgacctggctctcccacctgctttagctcttcaaactgagcaccccaggggccaacaacactttaaccctgagcctgctcctgtgcactgctctcatgagaccactgaccctgatcacaatgctgactttgctcttgactcttgtcttcttgctcaaggcaagggtgacaggctcagtattgatcctgaatctgctcctctttgtggcccctgtgacatagaggacccttcaactgaccactccagccaaggcataaacaccaacaccaggcctgctcctgttcgtggcagaggtgataccactgatcatgataatggcacagatctggcttctacccttcctgttgttgttgattaaggagatggttgatacaccaaattctacaagggtggtctgaggaatctaaccaagaagatttttaccagtaagaaaactgatgatcaggttaagttaccagacaaagaatggtttaaaatagaagataatttctgtcctagaaaactaaattttcttttggtggtaatacttatggttaataaattccatgcttcatatagggctatttaaactttgtctggtaccagaaaaaagtctctgttccccaataatattgaaaatacaccatataaaaataaaaagtcaattatcccccaaaacataatcaagtaatgttggttggctcatgattgtctcctattctggaatgaggatattgttgtctttccccatgatttctgagttttcagagtagctaagcatatgcagtgatttattactgttaaatatcaatcgatgtcta

SEQ ID NO: 5162 - DNA, 1000 bp, mus musculus
acatttcaaattatatcccccttctaggttacccctccacaaactacccatcccatccctcctcccctctcccctttgccctctataagggtgctcctctacccactcaccccctcagcgctctagcatcctcctatactagggcatcaagcctccacaggactaagggcctcccctcccattgatgtcagataagaccatcttttgctatatatgtatctagagccatggctccctccacgtatagtctttggatggtggtttagtcccggggagctctgggtggtccagttagctgatattgttcttcctagggggttgcaatccccttcagctcctttagttattcccttagctcttccattggggtccttgggctcagtccaatggctgactgtatctgcatttgtattggtcaggtgctggtagaacctttcagggaacagccataccaggcttttgttagcaagcacttgttggtgtcagcaatagtgtgggggtttggtgcctgcagatgggatagatccctaggttgggtggtctctggttggcctttccttcagtctctgttccactttttgtccctgtcttttctttgaacaggaacatttctggattaaaatttttttttttttttttaaagatttatttatttattatatgtaagtacactgtagctgtcttcagacactccagaagagggagtcagatcttgttacggatggttgtgagccaccatgtggttgctgggatttgaactctggaccttcggaagagcagtcgggtgctctaacccactgagccatctcaccagcccatggattaaaatttttgagatgtgtgggtggccccatctctcaactggatggggaggggcatgcctatctactggaagtggtctctacaggttgtagtttcccttttttgtgtttttaggctaaagtcatccctcttgggtcctgggagcctcttgcttccctggagtctggaactttctagt

SEQ ID NO: 5163 - DNA, 1200 bp, mus musculus
caaataaagacattaggcaattatgatataaaataagggatacctttgttatagaaagttagaaggaattttgaaattttccggtgagtaacttatctaagaatttcatgttgactttgttttaggcctaaattcagccataggtaaagttactagattgagatacatcatctcttctaagcgtagtatgatctatttctaatttaagcttgaattttgctgcctcagtctgcttggatcagaatgctgggaaggagcattggcatcctgaaggaaagcatggggaagacagacagacaggaccagcagcactctctccattttcattctcatcttctttctctttgctacagggcagccacataatccccaatggagaatagtacagaggtgactgagttcattctcacagggttaacagataacccagagctccagataccactcttcattgtcttccttctcatctatctcagcactgtgcttgggaacctgggaatggtagggttgatcctgctggactcacatctccacactcccatgtaccttttcctcagtcatctatctctggtggactttggttattcttcagctgtcactcccaaagtaatgccaggtctcctttcaatagacaaaaccataacacacaatgcttgtggcacccaattcttcttctttgtaagctttataactacagaaagcttcctcttggctgccatggcttatgaccgctatgcagcagtatgtaagccactgcagtacaccaccaccatgactacaaacacttgtgcttgtctgaccataggttcctatgtctgtggcgtcctgaattcctctatccacactgggaacattttcaggctttctttctgcaagttcaatgtgatagaccactttttctgtgatgcaccacctctcctggccctatcatgttcagacacttctgtcagtgagatggtgattttatttgtggtgggtttcaatgatatcttctctattgtggtcatcccgatatcctatctgtttatattcatcactattctgaggatgcgttcatctgaaggacgccagaaggccttttccacatgtgcttcccacctcacagtagtcttcatcttttatggatcaggcatcttcatgtacttgcagcctagttccagtcacaccatgggcactgacaagatggcatctgtgttctat

SEQ ID NO: 5164 - DNA, 1000 bp, mus musculus
atggtgtgactggaactgggctgtaagtacatgaagatgacagtcccatagaagatggagactgcagtgaggtgggaagcacaggtagaaaaggccttgtggcgtccttcagatgaacgcatcctcagaatagtgatgaaaataagcagataggagatcgtaatgactacaatagagaaaagagcattaaaacccacaacaaagaaaatcacagtctcactgatataggtgtctgagcacgatagggccaggagaggtggtgcatcacagaaaaagtggtctatcacattgaacttgcagaaggaaagcctgaaaatgttcccagtgtggatagaggaattcaggaagccacagacataggaacctatggtcagacaagcacaagtatttgtagtcatggtggtggtgtaatgcagtggcttacatactgctgcatagcggtcataagccatggcagccaagagaaagctttctgtggttataaagcccacgaagaagaagaattgggtgccacaagtgttatgggatatggttttgtctattgaaaggagacctgacattactttgggagtgacagctgaagaataaccaaagtccaccagagatagatgactgaggaaaaggtacatgggagtgtggagatgtgagtccagcaggatcaaccctaccattcccaggttcccaagcacagtgctgagatagatgagaaggaagacaatgaagagtggtatctggagctttgggtcatctgttaatcctgcgagaatgaactcagtcacctctgtactattctccattggggattatggggctgccctgtatcaaagagaaaggagatgagaatgaggatggaaagagtgctgctggtcctgtctgtctgtcctctgcatgctttccttcaggatgcaatgttcctttccagcattctgatccaagcaggctgaggcagcaaaattcaagcttaaattagaagtagatcatactttgcttagaagagatg

SEQ ID NO: 5165 - DNA, 1200 bp, mus musculus
attgaattgtttctaatgtgcctttctccaggtcacagagttattaccttgatcctggtattgaacactcacaatatcaatgtagaagacaatcctatgtggtttattagttgactgaaaacatcaggaacaattggtgacaatatgggtcagtgtggatatctataaaaacaccaatcagttcaagggcttacaggacaggtggcttgtttgttaagatttgctttttgaaggtttcttattgaccagatgtgttatttacttatctagagatgttaacaaataaaaacaccaaagatctatgttgagctaaaattgagagatgcaattgggagaattggatgcgggatctttctttttattggttattttatttatttacatttcaaatgttgttgtccttccatctgtaacaccccatccaattccccctcccctttgcctctataagagtcctgccccccaataaccccatttccacatcactggtctagtgtccccttatgctggggtagcaagtctccacaggaccaagggtctctcttcctattaatgccagataaggcagtcctctgctacaaatgcaggtggagccattgatacctccatgtatacaacttgtttggtggtttagtccatgggagttttggatagtcaggttagtcgatattgttgttcttccaatggggttgtaatcccattcagtttttttagtttttctcctaattcttccattgggctccctgggatgagtctgatggttggctgttagtgtatacatctgtattggtcagctgctggcattgcctctcaggagacagctataacagtcttctgtcagcaagcacgtcttggggtttgatgtctgcaggtgggatggatcccaaagtggggcagtctctggatggtcttttcttcagtctctgctccacttttttgtccctgtcttttctttggacaggaacaattctgggtcaaaaattttagataagtggatggttctatcactcaactaggagctatgcatatctaccaggggtagtctcctcaggttctatatcccctttgttgtgtatttccacaaaattcatacctgttgggttctgggagcctctttcttgaggagataggaatacttaacctaattttaacattttataatatgtattatgtagagaaactttgcaattgtacctcttg

SEQ ID NO: 5166 - DNA, 1600 bp, mus musculus
agacaaactaacatgaagataaaagatccctacaagcaggaacaagaataaagcaccaaattattcacatactcaggatttccataagggctttccataattgaaaactgtagaatcaacacagaggacataatagaggccttttgattactgcttcagtctctgtgagttaagcaaagcttgatttgctcagttggtgtagaggatattgctctggtgttcttgttcaacctctgtgcttttaactccttttgcatatccattcaagggtttcttgaactgagtgaaggaatttgatggagacatctcatttagagttataggctccacagtctctctgtgtgtataatgtatatctatgggcctctgtttttgtccctaactgttgctgtagaaagcctctcttgtaatggctgaataaggtgtatctttatgaatatttcagaatattactgtattattaagagttgttttatgattactttagtttttagatgtgtactatctgcttttaccttaggtctctgggatatctagtttcttgttattggtaaacaaagcagtgttcattaggggttcaccagtataggggaatggcagggtgaggaggcaggtgtgggagggtgggtgggtgagtgagcaccctcataggaacagaggaagggatagggggttaccagaggggaaatcaggagggagataacatatgaaatgtaaataaataaaatatccaataaaaattcagacattagttgtgtatgtttgtgagttgtgcatttctatgttgatagttttatttaatagctgaaatttcatatactgatataatttatgatgtgcatatccatctaccactacctcactccacctatctaactcttcccagtgcttctcatcttgtctctcaacttcatgtcctccctgtcattacccacccccccgagttcaattagaaattcccataggcacatgattgcccacagttgtaattgattgctactttctgagaaaaaagaagaggagctacaggtattcgcatgaatgaaatctccaggggtatctatgtcatttttattttctggttcttcatgcattagctttttaaataataacatgattttaaattatgtttcagaagcattcatccatgaactgagtggtgttcactgttatcacttttatgaatacaatttggctgaagaccttctttcaggtttcatgcatggttcagaaaaatcacttaaaggtaaaatgctatattttaatttgtatgatgtcatgaagacctttcttatttttctcaggatgcaagggataaaatttgtgagatgtacaatcttctcaattttttttgaaggtaaggtaaatatgtggcccatccttgaacaagaaaaatgggtacaggttcagaagtcaaagcttattacctctatttcctctgttttccatatttaggaaacatgacattgtcagtccactccccgacaaagaactgtgtaaccagcattctgaggctgacttgattatgtcacattcacactacaggatttactgtcctcttcaaaatatctggtggctttatatgtatatgaaataaaca

SEQ ID NO: 5167 - DNA, 1200 bp, mus musculus
attttttcagaaatatcatggaaaatgacttatttgactttatttcaatgacaatgaaattgttcaaattatttaaaacaataaagcgatgtttcttagaaagaatcatcttgttaaagacatgcatttttgtctcaagagacagactcagaagaaaaattttgggttttctgtgctggttgacaaatttttccaacatgactatacacatttcctacataaataggcaataggtatttaattataaagtatgtatatacccagcctgctccttctgccaaaggagatcatcagcttgtctgctcctctgaagaccccacagtctgaaggccttccaggacatcttctgcaggcctggcaacaggtaagggaccctccaaaataattgcagcacatgggaaacacaaggagccaaatggacttcagaccaatccccacaccctcttctcctcaaactccacccctttcaagcctgggccttcctccagggaagattctcaccttctatgctactctaaagaccacacagtctgaaggccacccaacagatctgctgcatgcaggacaacaaatcagcaacttgtctgaatacacgacattctgaaacctcctaggaaagctgctgtagctaaaccaacagatcaccatcatgcatgccccactgaagacatcagagtttgaagatctcctaagaggtctgctacagtcagggacacaggccttccaggagacctgcagcaactcagggacacaggaggcaggtgtcagtcagagacacccaagccagttaactaagagataactagaaattgagatagaagctcaagaccataagaagcagcagaagccaatatacattgacatcatcagaaactagttctccaaccacaagaagccctgtatacaccaacacaactgaaaaccaggatactgacctaaaattctatctcatgaagatgatagatatctttatgcaggatataaataactcactgaaagaaacacaggaaaacgctggtaaacagctagaaacacttaaagaggaaacaaattaatcccttaaagaaaaaaaaacaggaaaacacaatcaattgaaggaattgaacaaatcagtctaatacctaaatatgggagtagaagcaataaaggaaaaagaaatggaggcaaccctggaaaccaaaaccctagaaaagatgtcag

SEQ ID NO: 5168 - DNA, 1000 bp, mus musculus
accatggatctgggcctatgtagtagttgagctgattaacttgccagctctcctatactcataccaccagggtgtgaaccagcccttctctgctcatgccattggtgctagatcacacaagtgccagctctactgtgcaaggcccgctctcctgaatattgctactgttgagtggtggggccagatctcctattatgccaggttaacggtggggaccagttctacatagttctcacacatcaagatggcctttagaggaagataagatcaagaacttatctggactttggtggtaacaaactcttgcatggccataaactaagacatggccctcagcatctggacaggacaggaactcaccttggccttaggtggaatcacctgttcctcacatcaagttgttcctcactacccttgagtgttcagttctgcttatcttcattgggcatacacccttctgcttctctttctctcccatttctccaccacttatttgttcctcttaatggagcccagagacccttcagcagttggctcaagagtgctacaccctgcccatgcagtatagcactggcaggggtcatctctgtcatggtttagtatggtctaatcaccaaagcttgcactgtgctggacctttcctcaactccggctctgggtcattgtagtaagccggcccgcggcctgcttgaaccaggtattcctggaaggcaggctggggctgaaagagacttagactgcaagacaagaatgatgaagccaagacaaatttttctctattcaaggcccacaagtttactaagagactgtgcttataagggagaaggcccatcctgctgccagtccatcctacttggtcaccaggctgttgcttgttcaggaatgtctcaagaagacaggttcagcctctctcctcaggtagcagtatctcagtgcagttgacacttcaaaggaagccagccaagtcggaaagctgcaaggcaggtggccccacctcagt

SEQ ID NO: 5169 - DNA, 1600 bp, mus musculus
caattttcccgattttgttagccttttcatgctgtcatttacaactattgcagacttgcaccatatccttaagtacccttctcctgttgatattttttcatattttgctccattccactgaaaattatagcaaatttttctatatatactttatagacagatgatttgaaaaatgaaattcctcaagacaatattcctgatcaaagggtatgcttttcttacagtccttcactgtacagtatcatgatgtactacaataaaattatatgacaattgcactcagtgtggatatttgagaatagacctgtctctcaaattcaaatgcaacaagcagttatcattcattcattatagtcaatttggtttcagaaagttgtttctcattcgtctgtttatttgaatactaatgaaaatggattttatgtgtttgtttacctttaagattcttaaaatctttaaatatttctcaataattttttttgctatttatttatttactcatttattttgcactttagattttaccctacccctggtctaccctctgactgttctacatcccatatctcctaatcacgcccttgtttccatgaggatgttcccaccactcagcctccacccaatcagacctctaaattccctggggccttcagtctcttaagggttaggtgcatgttctctgattgaacccagaactggcagtcctctgctgtatatgtgttgggggcctcatatcagctgctgtgtgctggctggttggtgaccccgtgtttgagagatcttgggggtccagtctaattgagactgctggtactcctgcagggtcaccctcctcttcagcttctttcagccttccctgattcaaccacagggggcagcagcttctgtccatttattgggtgcaaatatatgcatctgactctttcagctgcttgttgggtcttttggagaaaagtcatgataggtcccattttatgaggactccatagcctcagcaatagtgttaggccttgggacctcccattgagctggatcccactttgggcctgtcgctggacttcttttccttgggctcttctccttttccatcactgcagttctttcagataagaacaattatgggtcagagttttgactgtgggatggcaaccccctccctcacttgatgccctgtctccctactgtcaggcatttcatctaagatccctccctttgagtgctaagagtctctcacttccaaggtctctgttatttttgctgaattataaaatgtcattgttactaagtttgcataatgtgttctttaatcaaagaaattttacattttctgtctcactaccccccccaaaaaaaccataaattctaccagtatattatttggttaaatacatctatgtaccatgagatcttaaaaattatgtgaaccagattttagcttttctttattttcaacttaaattttcccataaggatgaatttttatgtatatgatttgagaataactacaaatgttaggatctcaagcctttgtaattgtgttgaaatagtaatggctggtaattgatatgaaattattggctgttctgcagtgctgttctaa

SEQ ID NO: 5170 - DNA, 1000 bp, mus musculus
acagaactgagggtgggaaaaagaagcagcagtttaccctgaaaggatggctcaggaataaatgaagttccttggcctactctagagctgtgattgtgggtatgcagatggtggtgagcattggggaaaggctacccccctcaaaaaaaagcaacttattctgcaaaggtgactcatgaacaaatagagttcactgaccagatctggagctatgattccctagcccggtccttattcctaacttttctctttttttaattggatattttatttatttatatttcaaatgttattccccttcctggtttcccttccaaaaagcctttatcacaccccctttcacctgcttctatgagggtcctcacccacccacccactcccacctcactgccctagcatttccctacactggggcatcaagccttcacagaatctagagcctccccttccatcgatgccagataagtctatcctctgctacatatgcagctggagccataggaccctcttgtgtacttgtggttggtggtttagtccctgggagctctgggtgcagtggggggaggggggcctggttggttgatatcatagttcttcctatggggttgcaaaccccttcagctccttcagtccttcccctaattcctcagttggggttcccctgcttaatttgatgattggctgcaagctttcatatctgtaaggctctgacagagcctgtcaggacacatccgtatcaggctcctgtcagcaagcacttcttggtatcagcagtagtgactgggtttggtgactgtatatgggataaatccccaggtgaggcagtctctgaatggcctttccttcagtctctgttccactctttgtccctgtatttcctttagaggggaacaatttttgagaagggtgggtggccccatccctcaaccaggggccatgcttaacctctggatatggtctctacagctttttgctcccctttgttgggtatttccactaa

SEQ ID NO: 5171 - DNA, 1000 bp, mus musculus
gctattaggaatcaaggaggaagaaacaattttaagaaaatacttcaaggcatgtagtttcctattgagttatggctttcccagataaataattcttttgaccaagttctcaagtgtaagcctgacacaaataaacattacctctcaagcatctggctcagataaatatacatattccctcatttctactctaattccatgttgatcacatgtacaaacagtcgtcacataataagcctgggggacatgccaagaccgaaagggccaacagctagcatggaaggatgagtcgacaacagttggagatgaggaaaaaaggaactactcagtgaaggctgatctgcttctccgcatgaagaatggccagtgtgcccaggatgacaagaagaatcaaatcctaagaagcttttaaaactgaagcaagacttggcagtcattgaattcaattatcatctacttcagcagagggaaaatctcaactctgaagaagtcatggagctcagccaaaattacacaactgctaaatgggaaagccaaaaggttctgcttccattgaagttatcctactgttctcccaacttcttcacaaagaggattgaaactgatccaatccattcaggtttagcatggagactgatggtaatagttagggaaggaggagaaacgtggaagacagcatctacctgggaaactgatttgtgcagaagcatttgatgacattaagtaccctatgatacttaggatggaaaaatggacaagacaagagctaaacaaacactcaaacagaaacaaaacagagggctggcgctcaggaagggatgacctgtttgtggagaaagtacaaatgtggcctagaggcacgagcactgaatgtctactgtctgtgtgtaggaactacaggctgttggctaagacatgaatgtcattgacagggttcattgaaggttgtcatgtgggcagagggacttcacaaacattttaacctggatgtttcctgtac

SEQ ID NO: 5172 - DNA, 1000 bp, mus musculus
tagctctactatagtttctctttcctagatacttgtctttcagaacaaggttgcttctctctgggtagcttcaattggactcttgacagtttatgtaatattcctatttgatatttgttgggcagtgggcgtaggggaataaagggagtgggagaaaacccacattctgccagagttccggtgctctgctgcacgcaccccgggtgggtttggcagtgggaagccacagaatcccagctgggaggtgggagtggggtgtgtgtggacaaggggcagtcctaggttacagattctcagtctagggtatcccagacattgctggtcactgtggaagagctgagaacaaaatgggggcccaagggccaaagggaagagatggcagggagagagggggcgctgggtggttcccacacaggcaagagtccttggtctggtctgtggttggagcccaagaaggccttctggtgggaggttaggcatggctcgttaggggaaagcctatcccattgttcaatcacagagggccttgatgagcagagacagtctggttttagagctttattgtagaaaggcagagagaaagagaaggtagaaagagggagagaggccagccatgccacatggagagaagggggaagggagagagagagaaggagggttagagatgagagtaagaaaggtaagagcttaaagagagagaggaggggccaagcagcccctttatagtgggctctgctatcttggggttcccaggtagctgtggggaggagcacacctggctatagtcaggtaactgtggtggtggggtctagccagaataccagaagcttggggcattgtcttatagtcacaggattacggagttgggggctctggtgtcaggcacctgtctctgggaacatggctcactgttccatcccttgtagagttttctactgggtcgccgaatcaagcctcattcaaccaaaataggctgcttttcacggccccacagatattg

SEQ ID NO: 5173 - DNA, 1000 bp, mus musculus
gttgctgcccagtacaggcagtgatctgcacacatataaataaaactacctccttagaaagtgctaggcagaaaaatcacagaacacagaagaaagctgaggttcagagacggctaagacccagggcaagctatttaacccctctatctatcctcagcgatcgctgttaaatggagcagaaaattcttgccacacaatgactttgaagaatatagagttggtagcagggttactttctgtctttgtaactttgaagaaggtcatctgacctctgtaaccgtcagtttcttcactccccccccacccccagactggtaagcacactactatctttgccactgtgctgtggggccatgttgtaactggcaaccatgtagaaaacaccccgagtatttagaaagaaagacttcacgttcattataggtcatatctactcatttaaaaccccaggcagtttgaagagacagacagacagacagatgacagacagacagacagacagacagacagacagacagacagggacagagaatgtttttgtttattccatcctgtttggagttccgacaagtcctgggctatgtacgaacccatgataggatcaaagtgtccttctctctttcatagtcacctcctttttctcttgagaaactggtggttacaaaagacatttaagaagataccagactctctctgtctcggcccaagcagtcaccaaaatggaaatcacaacggtggctcgccagggatccagagaggaccggctcaatatgaatgcaaataatccacgtttcaagcaggattatggatataaatgaaagacgaaaagcacatcagggtaccaatttgtcacacattttcacacaaaagctcagccctgtctctctcctccttttggctcaccctgcttcccactgcactttgtagatgaatgtgtgtaatactgagaaagataaagaaggacagcgagacagacaagcaggcaggcaggcaggcagac

SEQ ID NO: 5174 - DNA, 1400 bp, mus musculus
tctatctcatcagttccaaagcaagaatctggagaggtgattgctcacaatagaaaccaaggccttctgcatactaggcaggcactttacctaagccataccaccgacgctgccataccctttttaaagcaatagaaatactccttaaaaagtgcacatgtgctggatgatagtgacacgggcctttaatcccagaaaaaccaatagataaatagatagatagatagatagatagatagatagatagatagatagataaaaattaaatacacatgtatacaaaatatatgcacacatctatataaccatatgggcatgccgagaaggccccacatctcactgcagcaggaaacacagtttaaatctctccagttagcatctcgtcccaggcagtaccctcatgctcagtctctctcagggactgctgtgacatgagcaggataccaactcctgtgtgtaatggcaagccattcacgtgtcttaggatcatgattgcagtgagaagcccaaagtgtgcacttcacccattagtgggcggtgttctctcctctccttacctcggcacaatccctgaaaggcagagccatgaacaccagcagagagtgaagctgcctttgctgcacacacagtttgcaggaaagatgaagcagtccccaggggatgcgcagaagagagggcctgggtgggtagaacagaattccaactggtttcaccaatcacaggtgacttgaatctcaccaggagggagggttgaggtctgatgagaaaaggcattcattccttcatgttatgtctgctcaggaaggagagacctcaggcaagcgacacaggaaggaagtagagtctggtgcacagtcagccaacaggaaggtgagtaagaggtaatgcagtttatcctcatgttgtgcaacttggcttgcttctcagcacactggctgcatgtagtagaaggatgacaaatggtctccctctgtgtctctgtctgtctctctgtctctctgtctctctctctctctctctcacacacacacacacacacacacacacacacacacacacacacacacacacacactaaatccttactaaacatgcacacctgagaagcaggctgcagtttgtaactctgctctgccccaggctcctccaggctcccttacctataaaatgaggaatggctgctgggcccacatttacctttaatcccagcacagaagaggccgaggcaggaggatgtctgtgaattcaaggcctgtctggtctacacagaccattccagtaataatggaagtgttcagaccttttcctaaatggaaggatattaaggaagaatgaagacactactctgaaaattttctttccaagcagcaagttcagagaaaccataaaataaactttgt

SEQ ID NO: 5175 - DNA, 1400 bp, mus musculus; identical to SEQ ID NO: 5174

SEQ ID NO: 5176 - DNA, 1400 bp, mus musculus; identical to SEQ ID NO: 5174

SEQ ID NO: 5177 - DNA, 1000 bp, mus musculus
gttggaattttgatggggattgcattgaatctgtagattgcttttggcaagatagccatttttacaatgttgatcctgccaatccatgagcatgggagatctttccatcttctgagatcttctttaatttctttcttcagagacttgaagtttttatcatacagatctttcacttcctgttgggagccgccctcacattcgccgttgcaagatggcgctgacatcctctgttctaagtggtaaacaaataatctgcgcatgtgccaagggtagttctccactccatgtgctctgccttccccgtgacgacaactcggccgatgggctgcagccaatcagggagtgacacgtcctaggcgtaggataattctccttaaaagggacggggttttgccattttctctctcttgcattcttgcgctctggctcctaaagatgtaagcaataaagctctctgactcctaaagatgtaagcaatagagctcttgctctcttgctctctggctcctaaagatgtaagcaataaagctcttgctcttgcactcttgcactcttgcactcttgcactcttgcactcttgcactcttgcactcttgcactcttgcactcttgctctcttgctctcttgctctcttgctctcttgctctctggctcctgaagatgtaagcaataaagctttgccgcagaagattccggtttgttgcgtctttcctggccggtcgcgaaagagtgtaagaacttccttacttagagtcacgacaagatattttatattatttgtgactattgagaagggtgttgttttcctaatttctttctcagcctgtttattctttgtgtagagaaaggccattgacttgtttgagttaattttatatccagctacttcaccgaagctgtttatcaggtttaggagttctctggtagaatttttagggtcacttatatatactattaaatcattgcaaaaagtgatattttgacttcctcttttccaat

SEQ ID NO: 5178 - DNA, 1200 bp, mus musculus
aatgtttatatttatagtggtattataataataatttcatcataaaatattcttgttcacataaaatagactgtgaataattttattagaatgattatggaactgcataattataggctttatgctctgctttggctccaggccttgaggacattttgttggtgtatcaattttgattaatttcaatggtctttagtcacaggacacctttctcagtctcaagcatagatgtgattttacttagggttgtatgtgaatctgttgtctgtaatgttggttggcactcctcaggtaaggcttgagaatgttaatgactggttgtgtcctaaaggaaaaagagctatggtacaatccagccttctagggtgaagagagcatttaggatgatggcaaccctaaaatgcttgaagaaaaaaaaagacgtagcggttctttatatttggtacttggttagtctataagcagagagtgtttatatagttagacattttggagggatgctggcaatactggcatctgtactggggatgagtgaaagatttcttctacttagcatagctaaagaggctgtgtcactagaaagtttatagcagagatatatagataccttggaatattataaaggcaagggaacaaaaagaaaacttcaaacttgagtctattgagtatgggaaaatcagtactgatgttcaagcttatgaatgcactgaagaaatggatgggcaggtctgatgaagatgcgtgggcagagaattctgttctaggttgggcattctctggaatgtctctaaagagcctttggggttccaggcctgcactgctctagctgtggcatctgagtagtgatctgctttctacctgggaaggcgacccctcaaggtacaggagcaaggattttcctgtagtcaaggagtgcttctgagatgccacaggtcctgggcaattacagcatcctctcttccagtggatgctgagagcaaatggacagaagaattccttgtattttaaactccttaaaatttgggggaagaaaatataaaggttgagattgctcacatgactataaaagtaaatctacctacttttatattcattactagatttattttactcacagaatcttatataatctgtttgtattttcaattctactttcttttaaacatagtttgacaactatgcacattaaaggaaagaaag

SEQ ID NO: 5179 - DNA, 1200 bp, mus musculus
tattccttcatctatgagatgtagcctacatgattttttctatgaattcatggatttagtttggaatcattttattaagtatttttacattatgcccatatgggaacttggtctgtaattctctttatttgttgaattttatattgcttgcatatcaggattaactgatatgcatatcagttatatgcataaaacgaattgggaaatgttcctttgtttttattttgtgaaataatttgaggagtattggcagtaactcttttttgaaagtctggtagaggctggggcagactcctagctggtctgcttctgtgaagacaccatatcctgacccatcctagagaatccactgtactcagagaagttgacactataccctgagccattccagaagatcctctccagtaagagcagttgggcaactgacaccacagtctgaggcaggccaggagatctgctgcacacagggcaactgagcaactgatcaccagcttgtctgtttccctgaagacaccacagcttgaaggcatcccaggagctcttctgtacacagggcagacaccacaatctaaagacctctcaggggctttgtggcatgctgggcaactgactggagagcctgaaagcctgctgggagttctcttgcacaagaaaacataaaccacagtttatagggcccctggagaatatcttcacacaggacaacagcttaatggctcttcttaagacccaacagtttgaaagcctcccaggagatctactgcagccagaataacagatcagtagcttctctgcccttcttaagagaccccagttggaaggctccacaggtggtctgatacagccagggtctacagggctatcaggagacccgaagcaacccaaggaaaaaagagtcatgctccagacacagtctcctagaccagagtcatctaaaacccacatgagggacaagctccagttaagagagagcaagaccaactaacaccagagataaccatatggtgagaggcaagtgcaagacgataagcaacagaagccaatatatatgggcatcatccgaatccagttctcccactacagcaagccccaaatacaccaacaaacctgaaaatcaggaagctgacctaaaatcctatctcatgatgataataaagtccaataccagttcatgttctcctccccccaactccctcccac

SEQ ID NO: 5180 - DNA, 1600 bp, mus musculus
gttcacattcctaaatttttcatttccagaattcccttagtttgtgttttctttattgtttctatttgtgttttcagaccttaaacagttttgtatgtttccttcaacagtttgttgttcttggtttgccttcatggatttattaatttctttccattgtttttgtgtcttcctgtctttctttgaaagccttatttcccctagttgctggagatttcctggatttcattatatgatcgtttgcttcctttttaataatctttatcatcttcatacagttaattttaatatctttttcttgtattgcaactattttaaaatattcagggcctgctgtagtaggctaggtaggctctggaggaaaaggtggcctcatgtgctattgattttgtttttatgttgctgtttagggatcttaatttaaggtcattataggtctaggtgttgatttctgattttatctttgttcggccagtgttttgttctttgttttctgatttctccttagatttttcagacagtgtgatagcagtctattgcctattttattgacattaacagtgttcatgagtatagcttttggtttagaagctggggaaaatggaagccagatggagatgatccatttagcattaagggcagccctgagaattgagtctgtggaaacagaaagagtagagactatctgccatcaacctacctggtcattgtcctctgtggttgaacaaggggagcctgcccaagttggggactggcaaacagtgatggaggagaaggggaattcaggtgaaaatggtctgtgggatccatatgacagaagtgaggggaggctgttgttcacatactgttgcagtgctatgggtgactatcttagtcaatgctctattcctgtgaagagacaccatgaccatggcaatttttataaattaagacatttacttaggacttgctaacagtcagtttcagaggtttaatttaccgtgtcaagataaggaacatggtggcatgcaggcagctatgggacaggagattagcaaagagttctatatccagacccataagaagcaggaagagagagctattgggattggtttgggcttttgaaacctcagagcccattcccagtgacactcttcctccaacaaggccaaacctcccatttttttcaaatcctgccattataagtgattaaacattcaaataaatgagcgtatgaaagccactcttaatcaaaccatcacaatggcatttttaatgtttcaaaaaaaaatcttgtcaacatagatttccatgtacaagaaaaatgcagtaaaacatagtagcaaataaaaggcttatcaggaagaggacaacttcttgtatttaagttagacaccttcttttctacattagccattaagaaaatgaaaagataatcccaacactggcaatatactgcctcatgcttatactgacagaggatttatatttacacagacacacacacacacacacacacagacacacagacacacacacagatatatatatatatatatatatacacatccctggctgctcaattatgaggaggttaatcacttgatagtataatcaacaa

SEQ ID NO: 5181 - DNA, 1000 bp, mus musculus
ggccatcactgcaaaaagaggcccattggacacgcaaactgtatatcccccagtacaggggaacgccagggccaaaaaaaatgggaatgggtgggtagggaagtggggggagggtatgggggacttttgggatagcattggaaatgtaaatgacctaaatacctaataaaaaatgaaaaaaaaagaacaagtgctccattatgttcatagcagctctattagtaatagccagaaactggaaacaacccaaatgcccctcaactgaagaatggatacagaaaatgtggttcatttacacaatggaatactattcagctactaaaaacaaggatatcatgaattttgtaggcaaatggatggaactacgaaatatcatcctgagtgaggtaactcagacccaaaaggatattcatgacaggaacctagcataactgtcctctgagaggctccacccagtagctgactgaatcagacacagagactcacagccaaacattggatagagctcagggactctaatggaagagttgggagaaggagtgaggggccccaaggggataggaattccacaagaaaccaacagagtcaactaacctggacccttagtggctctcagagactgaaccaccaactaaagaacatacacaggctggacctacccccactccaatcccctgcccccgcacatatatagcagaagtgcagctagatgatcatgtgggttccccaacaaccagagtggaggttgctcctaaagctgttgtttgtctgtggaatccattctcctaactggactgctttgtctggcctcagtgggagaggatgtgcctagccctgaataaactttatgtaacagggtgtgtgggggagtactcagggggcctccacctgctcagagaagaaagcagagggggggggatggggagagagactgtgtgagtgggagataggagtggcaatcactttgtaaagtgaataataaatgaatggaaataagtag

SEQ ID NO: 5182 - DNA, 1200 bp, mus musculus
aagtttctacaatagctcaatgtgtaggatggccatttttaacatgggataaagttatgaaccacagccatgtcagtgctagttgatagcattctagctaaggtttatattatttatggctttcataaatttctcacaagaataggacagtttgtagcctttttgatttccttcagtgtctctcacctcacagtgcatagtagttcaaacagagtagatgcatgtcccctgagatgctatggccacagcctaagtaatacagatgcagatgctcaaagccaactaacagagtgagcatggggaccccaatggaggagttaggggaaggacggaaggagctgaacggtttgcaatcccataggaagaacaacagtatcaaccaattagaaccccagagctccagggactaaacaccaaccatagcatatacatggagggacccatggctgcagctgcatatgtagcagaggatggccttatttggcatcaatagtatggaaggcccttggtcctctggaggctccatgcccctgtgtgggggaatgatacggtggtgaggcaagagtgggtaggtgggtgagggagcactctcatagaagcagggggagggggagaggttagggggtgtttataaggggaaaccatgaaggaagataacatataaaatgtaaataaataaaataaccaataataaaaaaactctatcaaaaagagaacatatgattttttgataatttagtttcaattagtagtatttattacatggaaagaaggcagtgtattgccttttcctctgagatcatgagcttgtaagaacaagaaatagatatacagaaaagcaatgatgcataacgaggcaatgcagtcctagatccaagatcagccagagaatatgtgcttgtgctacatagataaagggcatgtgaatacccagcacttacacacatccagctgaagccagcaatgcccaaggagatgccagagatggcctctgaaattcaaaatggttgaagatttagaaatgctataatttgtatgtggtgctctgctgcatcaagatctaccagcacataggataatcttgactcacctgtagtgtttgaactacaacttctgatcacacttgaaataaatctaagctaggcagatataaggatgatctctatagcttaactccaaatggactgaagacttcactgg

SEQ ID NO: 5183 - DNA, 1400 bp, mus musculus
aggaagaacaggacaggacaagacaggacaggctaggctaggcaaggcaaagataggctaggttaggcaaggctaggctagaacagaaaagggccagagagagaagggtactactgaaaagaaccagagtagaacagaatatctgagaacagtgaagcatcattctgagttggaatgtgtgtgtgtgtgtataatttggaaaaattaatagagatgataattctaacaactgcatgtaaatttaaaattaaattcaaatatcagtataggtcatggatgcccacaaaagataaaagaaataaagaaataaatacacaaaatattacatatgggcagatcttacttaatctttagacaaaaaaaaaaaaaaccaccaaaattattttcattaatatttaaatttcttaaagtcattgtttaaagaatgcttgcatgattactgtgtttataccatccttaccctccgctcttccatctccagttcattctgtactactccttcaaaagtcataatgtctttttaaacattactgttgtgcacacgcacacacaacctgctcagtctacatatggttgttcctaggatagtgtttaggactgtctactggggatttgataatctatcaggcaaccaaagactgaagaacactaatttaactgattctcctctcagcagccattatctggaattcttccttaaagtctaggatcatgttaaagttccctcgtctgtgctggcatgactgctggcattttcagtaggcaagtcttattgagattccatgggaaccgcagtccctctctgtctagaagactctgtctcacaacaggcttcatagcccctggcctcttataatctttcaagtccttcttccatgattctccttaaatgtagaagatgtgtttcttcatactggatgggccttaagtccaactaaacatcatgttaacatagatgaacttgcaccactaatgcactataaagatattttgccacactggttattgttgtgttttgcccttttagctatgtaggattattgattcttttcccttttttggtaacttgcattggagctttcaatactatggatacagtcctcagaaaacagccttccaggtccattccatttcaaatttacccaagttctgtgtcaaagtgtaaagtgtcttcaataataagttcttatcttcaagttctggaagacatccaagggtaatgtcaatattccatattgttttgcagtttcttagagccctgtgaccaaaaaaatcaaagggaagcccagcattggggtttttgttaggtattgcatgactcttgagaggaacattatcacccctttatgtgacacatgtcatacaattaaatgtgacacaactgcatttgaacatatgtg

SEQ ID NO: 5184 - DNA, 1000 bp, mus musculus
actgcatactatgttaaataaagctatccagtcatagtactgcatgctgttgtgtgtatgaaatacttatgatttatgagtacccagcatatgggatagtgactgccacagactggaggtcatgggaagtacaaagttatccacaattggcatgaagctccaattaagcaaagcaaagcagaccgtgtccctgctgtatggcatggggcctttagtccagaaaactgtattacaaaaatctcaaactctttaagaggctggttcacattttaccacagacaacaaagtatcaaagtacagctacttttgtttgtgcttctgtgtagactagcctgcttatggtgtgggacctggtggcaggtgtccattctcttcttttagacaggaaacagtgtagcaaactagttgacactcagaataagctacaagtgctcaaagggagcttggaatgtcgtgtctgttgattaaaaaataaaagtgccagtgttgggtttcagttaaataggtcccttggattcaaaatgcaagagggaaagatagaaaatgcagtcactggctcggaagatgaggggaaacgagtggcagtggaagtatgcagctgattgtagggtgttagaggaacatcagcacagacgttgatgctttttcctatgaaaaggattctctcatgatgctctgctcccaccacagacccatggatagcactcagctgcctatggtggagaaggcaaagcacttgaagagaaaattcaaaccaatgctgaagtaaggaagccctggaaacagtacactgggcatccttgaaccttgaaccttggttactgtagtaggaccacaaggcaacagctattagcgcatgtcaactcagatcataaggaatcacttccaaaaatattacaaattgttcttattgtttagtctcctccctcttatccaagtggtctcttcttctaaaggacatgaaagagactaatctcagcgagctccttagggaatttaa

SEQ ID NO: 5185 - DNA, 1000 bp, mus musculus
gtgttaacagtacattttaaagttatgaatgtcttctcgttcattttctgagtttcttccatttttaaaatttcaacaaacatgcagtatgtttgataaaatgggccattttaaagcatgtctaccctctagtctctttcacaacaaaccatgaaatcacagcaaacctgccagaatcaggcaggacacaggaaactgcaagtgttccctgggctggggccaaataggtcacaggatttgagctggttcttccttcaccttcttctccgaagaaacagctattctaggacagaagagtctaagggaccatggtgactgatgggaaatgactgatgggccgggctgggctagaggcaaaatctgatcattgaattctcaatttttatttcttttgaattgctgaatagtctctgtcttctcacagaaattgcagaaatataaactcagtggactccagccaatgtgaaagttgatgatcaattatagaggagagttttctttctttttttattaggtattttcctcatttacatttccactgctatcccaaaagtcccccataccctcccccccactcccccacccacccactcccacttcttggccctggtgttcccctgtactgaggcatataaagtttgcaagaccaatgggcatctctttccactgatggccgactaggccatcttctgatacatatgcagctagagacacgagctctggggtactggttagttcatattgttgttccacctatagggttgcagatccttttagctccttgggtactttctctagctcctccattgggagccctgtgatccatccaatagctgactgtgagcatccacttctgtgtttgctaggccccagcatagtctcacaagagacagctatatcagggtcctttcagcaaaatcttgcttgtgtatgcaatggtgtcagcatttggaggctgattatatagaggagagttttctaaggagatgattgtaacatc

SEQ ID NO: 5186 - DNA, 1000 bp, mus musculus; identical to SEQ ID NO: 5185

SEQ ID NO: 5187 - DNA, 1000 bp, mus musculus
gcttttacctgtttgcctgtgttttcctgtatttctttgatgcagttatttgtatcctcctcaaagatatctatcatctccattagatgggattttaggtcattatcttgcttttcaggcatgttagggtatctagagctgctgtggtgggagaactgggttctggtggtgccaaattgcattgggttctgtggtttatgatcttgcacttgttgcttgccatctggctatctctggagttagctggcctgggtttctctgactggagctggtttccttggaggcaggtagagctctgtgacatgggttagagctagtctcctgggagacaggcagtgctgtctctggttagggtgagccttctgtgtccctggttactgcacatctcctaggaggcagacaggctgtgttcctgtttactgtggccctcctgggtagcaaacaggctgtagagtgtgggagggtatcacacctgctgatctggcctgggtggggcaggagactggaaggaagatggttctcgggtgggtgggtaggtctcgtagcagctgggctctgtgggtgtcccatctggcatgaatatttgggtgagattctcatatgtgtccctggttactatggacctcctgagaagaacattggctgtagggtttgggagggtattgggcccactgatctggcctgggtggggaagcagactggaagcttgctgctgctttaaatgtttcttacatcagtacaaagtatcttttttttttttccattttttattaggtatttagctcatttacatttccaatgctataccaaaagacccccttacccacccacccccactcccctacccacccactccccccctttggccctggcgttcccctgtaccggggcacacaaacagtacaaagtatcttaaagatgtggagtaatcagagactgtctggcagggaaaagagaatatgagctaacactaaagagcctttaatatatgccagacaaa

SEQ ID NO: 5188 - DNA, 1000 bp, mus musculus; identical to SEQ ID NO: 5187

SEQ ID NO: 5189 - DNA, 1000 bp, mus musculus; identical to SEQ ID NO: 5187

SEQ ID NO: 5190 - DNA, 1200 bp, mus musculus
agcctgttactgggcagaacacagttcctccaatagggccacacccactccaacagggccacacctcttttttcttttcattaattattttactttatatctgatctaaacttcccctcccttttctccttccagccccccactctcctctcccctccccataccccctcttctcttcagagaaagggagtcctcccatggattttaaccttccttggcatatcatcaagttgcagtaggaccaggtgcatcttctattgaggctagacaaggcagttaggggaaaagtacccgaaggcagatggctgagtcagagacagctcctgttcctgctgtcaggggatctacatgaagaccaagctgcatgtctgttacatatgtgtagggggcataggtctgtcctgtgcatgctctctggttggtggttcagtctctgtgagcccctgtgggcccaggttagttgagtcttcaggttttcttgtgatgttcataacctctctggctccttcaatccttcttcctcctcttccgtaagattccctgagctccacctaatgtttggctgttgtcctttgcatccgtttccatcagttgctgggtaaagcctctctgatgatggctatgctagactcctgtctgcaagtacagcagagtactattaatagtaccagggatgggctctctttcatggcatgagtctcaagcttgaccagtcattggttggtcattccctcaatttctgcatctttatccctgcacatcttgtaggcaggacaaattctgtggctgggttggtgtactaactcctcccacttctgcctccattggaagccttgccaggttataggagggagtcatttcaggttccatattctccatttctaggagtgttatctagggtcaccctcatagattcctgggagtttccattgtcctaggtttctatctcatcccagagatgcccccaccccccaccaccaccaccatgccctgactgcactgattccggttctctagagggttcaagtctagggaagacagagagggagtggtggtgagagaggaccacacctcttaatagtgccactcactcatataggccaagtattcaaactcattaatttatggatgctattcctattcaaaccatcacaatcactataacaaaataaagcagactgctttaaaaagaaaggcatg

SEQ ID NO: 5191 - DNA, 1000 bp, mus musculus
taagtggtaacagggctgttgggaaatcaatagtattctaactgccctcattaaagagcagcttgcttaggacaaagaaataaccatctttaagggataaatcagctttttggtgggttcaaggcaaaggtgtgggcagtccacttggcatcagcgagccccgcccatcagtcatacagatcgtgcagtgctagatccagtgcactatagagcaggtggttttgcttgcgtggtagcaatgaccagaatgtaagtctctgcctacaaagacctgactgctgaccactcacaagcctaggtaaaggcagaaagaaaagtaagtgaaatgggtctgcttctagcaggacagcaggcaaagtccaatcagagttataaaaactggttaaaccttttctatcttttttttctttagtatcatgagatcattgagatcaaaagaaagaaaaggagactggagagataattcagtggttacgtgcactggctgtcctcatagaggacccagatttgatttctgacacctacacaacagctcataaccactggtaactccagcaccaaggcatcatctgatgccctttaatggttccaggcatgaacatggggcatagacaggcatgcagtcaaaacacccatacatataaaaataaagaaaacaggaagtcagtgggtagaagaaaggaagaggaagctcagaggagccagggaagacaagccatggtagcagctgggggctgctagctctagagacagacacccacctggattccgatatattcaagggcagtagtcaggacttgacctgtgtgtgcagagaaatgtaagtcttatatgtacaatatcaaccctatgagctaagcacctcacggttcttttccttcttctatgaactgatgagggagtccacacctctcctcccaggacagatgtctgaggttctgaggtcggcttctaaaagaagggatcataaggctgtagacatcccataagggatggacat

SEQ ID NO: 5192 - DNA, 1000 bp, mus musculus
catgttatcaggaatacatcattccgatgaccagtgcaatgtgtgcctgttcaaatcaagatgctaacacgtttcccatagtgcagtaaggtacctcacaccttaatcaataaaagcttccccctccttttttttttttttaatatgctgcctcttatcatctagagggggaaaaattgagctttctggcattctagactcagtgaacagcatcactaaattttgtgctacgacttttaacatgtcatataaattgttgataaaatctagctgcacagggctagaggacggcatattgttccactgaggatacattggataccacagtctatcttgagcagtcgcaaacaccccttactccagccaaggtgcctcaggcctccaagggcacctgcactcatatgctcatactccccactccaacccccatatacacgggattaagagtcacgtaaaactctagaggtggaagaagttccaacttgagaagctgagatcttccttttgcgcctgtccattggctcatatggaagccatctgtaataccgactttggtatcaggagtcgggttgctgtagccagactcgtcaggctcatgacctagtttttttccctgagaatcctagtaatcatcaaaagctactttctttctttttttttaaaatatttttattaggtattttcctcaattacatttccaatgctatcccaaaagtcccccataccctcgcccccactcccctacccacccactcccactttttggccctggtgttcccctgtactggggcatataaagtttgcaagtccaatgggcctctctttccagtgatggtcgattaggccatcttttgatacatatgcagctagagtcaagagctccagggtactggttagttcataatgttgttccacctatagggttgcaaaagctactttctataaagaaaaaggttaataaaagttgtaaacttgtggtagttaaaattttctgtcattt

SEQ ID NO: 5193 - DNA, 1000 bp, mus musculus; identical to SEQ ID NO: 5192

SEQ ID NO: 5194 - DNA, 1000 bp, mus musculus
ctagcctgtgtgaagccttaggttttctctctaggatgatggggggagggggataagggaggggagcctcgtttaataaactacggctctgttttgaatagactcattctgagatcgttttctgcagttttacctgggaggagagaggcctctgaacactactgcccaggctacagaaagcaggagtgtggacctgccgccgctcacagtgaattacgtcaggttagcacagacctgaagtgaaggacgccgtgtgaagagaatgcagtggagagcacgtgctcatattttattaagggaaatgaaaaatggtacaatacacagagagggagatttgacaatatttaagtacgatttcatagatacctatctgttaatacagaaatcccatttctaagactctcttctcaaagatattctagcgatctcagcacgctggtacaggtttgtaactagcactcgggtgactgaagcaagaagactgagagctcaaggctagcctgggctacatagagagtatgtatgtagcctgtttctgaaagaaaagaatcttggaaaaaacaaaaaacaaaataaaacaacaacaacaaaagcatctttaaaacaaaagaattcaatgaacaatgcttgagacaatgggagaattggggagggggtggggggagaacccccaaatctattcatcgtagatggctctgagtaactgtgacagtttgcgtatgcttggcccagggcatggcactattagacagtgtagccttgttggaataggtgtatcactgtgggcaaaggtttaagaccctcatcgtagcttcctggaatccggtattctgctagcagccttcagatgaagatgtagaactctcagctcctcctgcaccatgcctgcctggaggctgccctgctcccaccttgatgacaatggactgaacctctgaacctgtaggccagccccaattaaatgttgtccttatttaagagttgccttggtcatggtgtc

SEQ ID NO: 5195 - DNA, 1000 bp, mus musculus
aaggaggggtatatctgtctcagtctgagagtgcgtcatggcagcaagagctgaagtggcttgtttcttgtaccatcaggagagggatgaggccacaggtcacgtccctttctcttgtttgttcagtccagggtcccctccatacttaggatgagcctttccatctcaattaccctactacagaaaattccttacagatacccctttccacagcatttcaaagttccaccaggtcaacaacagcattagcccatcacagactccatagtaaaacatttagtcaaaaatttccaatcacttcttgtcatgtatgatactacaagctactctccttctaatttttttttttttttgggggggataactactacactataactagtccaactgctttcatctttacagttaattcaacagcagctagagcaactgctttaaaacttaatgtcaggtagttgcggagatggttcatatgggtaaaggtgcctgctaccaagattcacatggtaggaaggaaacaatcaactccttgcgcattgttctctgatctccacatgtacaccacggcaaacactagtgtattttaggccacagcctatacccaaccttcacacacacaaaatcaatcaaccaaccaactaaccaatcaatgtaaaaacaaaaacctaaccaaaccaaaacaacttaaggttagaaatacagctcagtggtgtttgcttagccatgtgcaaagatctagattcaagtttcagcattgctagcaagcaagcaagcccaacagagaggataacagccggtctctgttaaaaacctttggaaaacgtttcatcttggttaacagaaactcttcaattcctgacctggctacctttaccttttgtgtccaaccacaatcttattcatcacttttctttggctataactgactttgtgcttcctgcatataccaaatgtttctatatttagagattgtgccccttctactctggttttctctcta

SEQ ID NO: 5196 - DNA, 1000 bp, mus musculus
aatatttatatatacatatatagagatcagaaccattgtgtgtatgtgtgtatgtgtgcatgtgcatgtgcgtgtgcgtgtgtgttctctcctgtctctgccttccatctccctgatagaacactgtaacgcaaaccttcaagcattatgtctagctttttacataggtaggtcctgggaatttgaactgaggtcatcattgcttgtgtggaaagcacttttacacatttgagccatctccccagcccagaaccactgttaagggtacaaatataattagaaattgtcacaagtaccaaatcttgtaattggtaggattttttagatttctttctttctactctctatattctcttcagtgaacttaaacttcttccagtgaacacagttgcaagaaaagctttattcttatttatttatttttaaaagattcatttactttatttatatgaatacactgtagctgtcttcagacacaccagaagagggcgtcagatcccattacagatgggtgtgagccaccatgtggttgctgggaattgaactcaggacctctggaagagcagtcagtgctcttaactgctgagccatctctccagccccaagctttatttttaagatgagtttctttccctctgtttgtaatccaaagtccaagtagcaggcttttgattgtatagcagctagtccgcttgctaggggttttgacctgattccagatcttctgcaacttataagaacctgtgctgtggtcccccagactctggaggcaagatatagatgagccttgggcttttgttctgccaccaatatccccaggtgacgctttataggtttagatattggtcctttaaaatccaaggcagtaagaacagtaagaagagccgggcgtggtggcacacgcctttaatcccagcactcgggaggcagaggcaggcgaatttctgagttcgaggccagcctggtctacagagtgagttccaggagagccagggctaca

SEQ ID NO: 5197 - DNA, 1000 bp, mus musculus
gaccaccaggccagggaaggaaggcaccacccaccatgggctgggtcctctcccactgatcactgattgagaaaatgccttacagctggatctcatggaggcatttcctcaatggagcctcctttccctctagtactccagcttgcgacaagcgacacaaaaccagctaatacccaccccagcacacaaaacagcatccagactgagtgtcctacactaagcccgatgtatatgagaagtaacattcaactacctcatccagtctccaaatcagccaactaacaacccctgctgccagccatcagtggtgtgtgccagactaggacaccaattgagtaagttggtcacaggagactctacagaaacatcctcctaattggctgcaggccagactcaggaccttcaggctggcatagcacactgtcaggatggtgtggcaacacgagggagaagctctcttctgacctggggctccaacctgtgctccctcagttaccatgagttccaacgcaacctgacactgcgtgaagcctactaaagacccttgataaatctacgcagggacaacttacagggtaactgctgaaggtcatctaccgctagccccagccattcaacagtctcacggccacctcagacacccaaaggtgctggtgagagaacactctagttaaaacgacagtcagtggatccttgaagtttgagaggttttggttttgaaaggaaaaacaaaaaaaaacaaacaaacaaaaaaaaccaaacaaaaaacccataccgacatatcaaggcatggccctgcaggacgctgactcctctgcactctgtggtgacctcaagctgcccttccctgctctggtccaccttaccaagtggtgacttcccctttctcctgtgtgaccccacaatgactcatgacaggcacatgcataggcccttggttaatgatcagcaattgtttgtttactcaactgagctgcctactgaacagaaataagatcaa

SEQ ID NO: 5198 - DNA, 1000 bp, mus musculus; identical to SEQ ID NO: 5197

SEQ ID NO: 5199 - DNA, 1400 bp, mus musculus
agaaagcagacagcaacatcttcccacaatatcccattgagagttaacattaaaggttcatgttttctgactatgaaaccatctatctggaaaaagctcacagagtaaatactttgtatctaattgtatagtacaacatttctctcggtatatctatgagcaggtattctatagtagactgccaaaataaatgtcaattaaaaaaaaaatctgtggccatgagaatgggtgtcattcactttttttttctaagttatagggaacctgggttttatttttagcactcatacagtttctcatagaagtttatagttgaggagccatcttgggttttgggtccctcagagaccagtctgggaaggtcatctcatgaattgcgaagggtgagcaagtggacatagcttctgggacaggcagaagtaacacagcttctgggacaaaccccttttgggctcctcccctgccagaggagaggtgtccaccctggagggctcctccagagcaggtaagggagccatcttgggtcccagatccctaagagactagtctgctcaagcctactagtgagagtgcggactacagaagcaacacagcttctgagcaggcaaagcaacacagtttctgggacagaccccattttgggctccagacatttgggcaccttccccaccagaggagtggtgttgcccaggatggctctttcagagcatgtgagggagaaattcttgggtctcagatccctcagaaactcctctgtgcaggtgagagtgcagactacagaagttacacagcttctgtgacagacagaagcaacacagcttctgggacagaccctgtttcgggctccagtcatctgggcaccttccccgcaagagaagaggtgtctgcccgggaggaatctgaccaccagagcaggtaagagagccatcttttgtcccatgtccctcagagaccagtctgtgcaggtgagcgtgcagactgcagaggcaacacatcttctggacaggccctgttttggccttcatcttccgccagggggcagatctcaatgccagatatctgtgcaccttccgtgcaagaggagagcttgcctgcagagagtactctgaccactgagactgaggacagagctagactcccaagtttgctgacagaggctaacagaatcacaggaggaagaagttccaaccagagacaaccatgacaactaactcaattgccagatggcaaaaggcaaatgtaagaatcagtctggcggttcctcagaaaattggacatagtactaccggaggaccagcaatacctctcctgggcatatatccagaagatgtcccaacaggtaagaaggacacatgctccactatgttcatagcagccttatttataatagccagaatctg

SEQ ID NO: 5200 - DNA, 1000 bp, mus musculus
acccgggttttatttttagcactcatacagtttctcatagaagtttatagttgaggagccatcttgggtcttgggtccctcagagacttgtctgggaaggtcatctcatggatttcgaagggtgagcaagtggacatagcttctgggacaggcagaagtaacacagcttctgggacaaacccctttcgggctcctcccctgccagaggagaggtgtccaccctggagggctcctccagagcaggtaagggagtcatcttgggtcccagatccctaagagactagtctgctcaggcctactagtgagagtgcggactacagaagcaacacagcttctgggcaggcaaagcaacacagtttctgggagagaccccattttgggctccagacatttgggcaccttccccatcagaggagtggtgttgcccgggagggctctttcagagcatgtgagggagccattcttgggtctcagatcccttagagactcctctgtgcaggtgagagtgcagactacagaaattacgcagcttctgtgacagacagaagcaacacagcttctgggacagaccctgtttcaggctccagacatctgggccccttccctgccagaggagaggtgtctgcccgggaggattctgaccaccagagcaggtgagagagccatttttgtcccatgtccctcggagaccagtctctgcaggtgagcatgcagactgcagaggcaacacatcttctggacaggccctgttttgggccttcatcttcagccagggggcagatctgaatgccagatatctgtgcaccttccctgcaagaggagagcttacctgcagagagtactctgaccactgagactgaggacagagctagactcccaagtctgctgacagaggctaacagaatcacatgaggaacaagttccaaccagagacaaccatgacaactaactccagagattgccagatggcgaaaggcaaatgtaagaatcttactaacag

SEQ ID NO: 5201 - DNA, 1000 bp, mus musculus
cataacagcttttatcttgagttaaaggagaatgccaccatctacaactgataaaaaatgaattaggaagagagaaaatgaccatagaggaagagatcaatttgtacatgctgagcctcagagttattgcaaatgtttataaggaactttgtttctaggacctccaaacaacaaagtgctgcaagcattgatttgtaaggctttgtcacattttaaggcataatcattaatgtaacattcaaaagaaaagatagcaatacaggaaacaaagtcagtaaaatcagaagagcaagttgtagaaaaagttttaaagaatagtttaagttgctagacaacaaaattatttcgcaaaaaaaatggaggtgatattgaaagtgtaggaaagagaaaagagaggtaagagaaaactgttccagaagagatgtaagacatcgatgccactgaggggaagagagggagagaaccctgtcctctggatgtagaggaacgaatccagtcctctggatgtagaaggaagttactcttggcaatggatgggcttttcctgtagggcaagctatgcttcaaagctttcaggaaagcttcgctatccaccttctgagagtgaggagtattcggttggatttgagttttgagcagagtgatgagagcttcagataatttttgaagcatttcgaaggagaagagaattgaagaaatattaaatgggtcagtctaggtgtacaagttctcctggatgctcttgagagcctcagcaggatgtcaaaggcatgccgcagtgtggatctcagggcaaagtgctgtcgtaagtaatatagtagcacatggcatcatggagctcagttcccgatgagacagctgactggaaaagccacaaggctctggacaaatgaaaaaataaggtcatatagatcctaaaggtgcagaagaaagagaagcaaaacaaagtttgattgtctctgtgatttaaaacaatgtaggagagatataaaataataga

SEQ ID NO: 5202 - DNA, 1200 bp, mus musculus
cctaccccaaccaggtcacacctattccaacaaggccacacctccaaatggtgccactccctggtccaagaatatacaaaccatcacagtaataaaaaattttttttaaagtgtagacaatgccagtttaaagagccacacattcaaataaattccaggctatgggagctgagttggttctcaaaggctaaatgtttgcacataatattgaacaagtcgtttctcactttaagcttagaataagaaacgacatcgcagtctgcgttactggggtgtttccaaaatgtgctgacccactggaagttcccaaatggcttcttggtgtactgttaacgaccatctggctagctatagataaacaagtctcaacatatgggctatagcgcatgcacagctctgctccaccagtgcagaaaattgagaaaaggtcgctctcttgatacgagtatgtcacgcgaaacaagtgggccccggcattggaggccctgccctgagaggaacagagacgcattaaccacggtcccttccctgctcctcactggacaagtcacaacatgtctcctcacttcttgcaaaaaaatattttaaagtgccaaattgactctggttctcctctccttcctttctctttctcctcccccccttccttctctcttcccattcagaaacacatgtgacacaccaaccatagatctgttcccagcatgttgctcaatattggttgtcttagtcggtgttctattgctgtggaatgacaccatgaccatgccaaccctcataaaggaaagcatgtaactgcagctggcctacagtccagaggtttaatccattatcgccatggcaggaagtatggcagcaggcaggcagatgtggtgctggagaggtagctaagagttctacatctgagccaacaggcaacaggaatagaaagagacactcagcctgtcttgagcacttgaaacctcaagacccacccccaggaacacacttcctctaacaaggccacaagttctaatagcaccactccctataagcttatgggagccactttctttttttttccattcttaattaggtatttagctcatttacatttccagtgctatgccaaaagtcccccatacccacccacccccactcccctacccacccactccccctttttggccctggcgttcccctgtactggggcatataaag

SEQ ID NO: 5203 - DNA, 1800 bp, mus musculus
ccatcctggtccatctagtcccagcaagactagacacaccctctttcactgaggcacaaccagacagtccatgtagggggaagggaatccaatgacaggaaacagagaccaaaacaccccatactccacttgttaagggccccatatgaaggctaacttgtaaatttctacaaatatatgggagggggtctaagtcaactcttgcatactttctggctggtagtaggacacagattttatgtagtaatgaatatttaaccaataaatacaacacagttgcccttttggactcagggaaattagtttatatttaatacatctaccaaatatgaaactcctattcccacatgaagaagaattaaatttctccaatgatagataagaatgaagtagtcattccacataattataaatttcaggagaaattgttggaatgtggccatatttggaaactacacgcagacattcacacaacaccattgaaatttattttaaaatgtattgcattgtttttgtataaatataatatttgtttaatagttttcttctgtaagagctgttttctttactcaatattcttctgtttattatttgaaatcaatactgatattgatttttacatatgctaatttatatgtaagggctctatattgttacacctaatagataggatattagtatgcatatcacagcaactgtcacttcattagcaaatattatgctttcagaatactgtcaagcatcttcatcttgctacaagtgaccccgagttggggccagtgtgccaattcattccatttctgtcatttcccactgtgttaaaacagccaaagtccaggcagagatcgactgtgtgattggcagacacaggagcccctgcatgcaggacaggcatagcatgccctacactgatgctgtgttgcatgagatccagagatacattgatctccttcccaccagccttccccatgccgtgacccgtgacgtgaaattcagagagtatctcattcccaaggtaagcgtccttcttctacactgtgccttaatgctcttgatctcaaattagagtgagtgaaactagatcacttgcccaagatactgagtcttgcaatttccagattaccaatattaaagagaaagttatgcaaaaccttcagagaaattaggagattaagccaaccaaaccacacacagtatattcaaaaccaggctgtactagaatttttgttttagaagtaattagaggtctttattgaaaattattgaaaattcttcataactttccagcaatactaaacatgtctttatctgagtaatttacttttcctttatttcaaataacatagagatactcagtgtatattgtttaccttcttttttttatatattccttctctttatttaaattttttttaccttcttaagaatttactgagtggttggtggcaatttttttgtccctacaatataagaaaaatgtaaacactttaaatatggaacctggatacattttatgctatttccaataaaagcttataaatttttagatcacatcttggtttgtgacactgtagacctttcacattttctcttggctgtttttactttcaaataaaattaaaagttcatattgttagtctttgaaaaggcccttctagtattttaccagaatgctaagaagtacattggcacatttatcataattcatatattaacctattaaatattccagttcatataatgttctctgtttcagggttggtttatatgtcagtgtcctctaatagtttgctcccagtt

SEQ ID NO: 5204 - DNA, 1000 bp, mus musculus
agtgcttgctgtcctcaatatatccaattggagccggtccttcctagaattccagtttattcaggactccttagagtccaactttctctgtgattctgtgattccaggttcttgtgtacctgagattctgggtatgtcagagttcttggcagtcaagtttcttctgagaccctgagatcctggtgtgaccaaggtcctgttatcctgggatcctggaatcctaagatcctgggaatgttatattgcctggaagtggtatatcctctgaggactggggggctctctggtgtgttcgaaaccaaagtataccagtactgatcaagaggaacacaaactgctggtcaggcatggctcctgtgtccttgctcctgctgtcacaggcccgtcacaattggatttgaaccgatgttgtgttccactcaacaattatcctacgatcccgtggagtgtactctggggccgtgggaccaggagctggtgcccactggaagggatttgtgcccctggtctggcaggatttcagattccctgcccctgggtcaggcccggcctgactggattggaactgatgttgtgttcccctcaccaatgatcctaagattgcatgaagagtcctctgtggactatgggacagaccgcagagttcgtgccccaattagtgattctcatgtgaggcctacagaattaaattcaggatcacctttgatataaagagtaccaatcactttatcgaagcaaattcactctagagagaacaacagaagaaagttttctgagagctgtagagatggcttatcatctgagagagtatagtatgtttctctagaggagcagtttggagggttcccagcaaccatatcatgtagctccatgagagctgacatggtctcctggacttcccaggtattcagacacacacacacacacacaaatctgagcctgaatggacacatgtaaaatgaaatttaaaaaatttccttgtgatatttaaacatgtaag

SEQ ID NO: 5205 - DNA, 1000 bp, mus musculus
tttctgttagtaagattcttgcttttggctttcgccatctggtaatctctggagatagattttatagttgtctctggttagagtttgttcctctcctgattctgttagcctctatcagccaacctggggggctagatctctcctgagtttcagtggttagagtactctctgcaggcaagctctcctcttgcagagaaggtgcacagatatctggcattctggcctgcctcctggcagaaaatgaaggtctgaaacagggcctgtcccagaagctgttagcttctgtagtccacactcttacctgcacagactagtctcggcaggatctggtaaccaaggttgctcccccacgtgctacagaaaagccctcccagtgtgtggcagaacctctcctcttgcagggaaggtgcccggatgtctggagcccaaaacgtgtctgcctcagtagatctgtggcttctgcctgtcccagaagctgttagcttctgtagtccacactctcacctgagcagactagtctcagcaggattcgggaaccaaggtggctccccaaggtgccaaacaaagccctcctgggtggggcagacacctctcctctgaaagggaaagtgcccagctatctggtgcctgaaatgggatctgcctcaggagctctgtgatttatttagattgagatttcaacaaatgtttgatttccactctcacctattgttgcaaattatgaactaaccagtaccccagagctcttgactatagctgcatatgtatcaaaagatggcctagttggccatcactggaaagagaggcccattggacaggcaaactttatatgccccagtacaggggaacgccagggccaaaaaaaaaaatggcatgggtggttaggggcgtggggggggggaggatgtgggggacttttgggctagcattggaaatgtaattgaggaaaatatgtaataaaaaaaagctacgtttaaaaaaaaagtgcaccatagcttgc

SEQ ID NO: 5206 - DNA, 1200 bp, mus musculus
agatccaaatcttgcttttcgggtgtgttggggtatccagggctcactgtggtgtgtgtaaaggtttctgatgatgcccggtggtgttggtttctgtttgtaagatatttttcatttgcctttcaccatctggtaatctctagtgttggctgttctagctgtctctggctggaagttgttcctccagagattctctagcttctgtcagcactcctgtgagaacaactcctcctgtgtcccagtcacagaacactctctgcaggcaagctctcctctttcagggaaggtacacaaaattctggagctcagatccacctcctgatttctaaggtcagagcgctccctggaggccgacactcctttgtcagggaatgtgtccaattgtctgggtttctgctctgtctcctaactgaggatgaaggcccaaatggaccctgtccaagaagctttgttgcttctgctgcccatgtgttctcctgaatagactggtctcagtgatctcaagtttctgggtgtgctagggcctgcctttttcctttgaccctattgctgctatcagagaccctctgggttttttgaactgatgctgtgttccactcaccagtgatctcaagatcccgggtatgctagagtgcctgcagtgtggagactcctctggggaccttggggccctctgccgagattgcacccaagatggcacaggggtggcacggaccaaaacgaacgccagccactggccaggcaggtgttctttgtccctgttcctgctagcacaaaaccctctgggtgttttggaacagatgttgcattccactcaccagtgatctcaagaaccagggtgctagggtgtctgcagtgtgcagagccctctggggaccttgggagcctccactgagatcatgcccaagatggcatgggctcatcagacattctacagaacatgataaaactctctatcctctaaatttgacaccataaccttgacatcaagggcaatccaattataatgaaaaaaaaaatgtaaaatgcttcacagaataaaaaaattccgaagaaattgctttaaatattggaccttattttatgctttagtgagctgagttttcttttatgtaccccagaattagatttgtcacaatgaagaaagcaactgcaagaattcctctgctatgaattggaggaattggaggaagaagcatt

SEQ ID NO: 5207 - DNA, 1000 bp, mus musculus
aacataccatcaagtaatgtctgcacagatataaataggtaaataactaagagagctctaaggtagaaataatgcaaggatatatgaatgatatgcaagtgcattgtactttccatgcttgtaaactgaagtttgttgtatcaaaaaaaaagatagtacagaaagaagttggcaggtgaagggtaatctctaaagattaccagcttgtctgctcctctgaatgcaccttagtttgcaggcctcccaggagttctactgcacacagggcagccaataggggatggtcccaaatagctgcagcagatggaaatcttgatgaggtacagtggacttgggactcatcactcctcacacccctgttccactccccttcaagcctgaaccttctacaggagcagactctcagcttgcctgctcctctgaagaaatcattctcaaggcttcccaggaattccactgctagcaggataatagacaacatagcctgaaggccagataagagttccactgcatgcacaacaacagaccacatagactgaaggtctcccaagagaacagggcacaacagctgaactgctcttttgaggacccatcagtctgaaggcatcctaggacatctgcagccgccaggaaaacaaatcagcagcttgaatgcctcttgaagacaccacattctgaagacctccctgaagagccactgtagccaggccaacaggtcaatggcatacattccccctctgaagaccccacagtccaaaagcctcacaggaggtctgctgcagccagagccataagtctgccaggagacctgcagcaaccaaaggacacaggaggcagcctccagacagagatatccagaccagctaacaccaggaataacaagatggtgagagttaagcacgagaccataagcagcagaagccaatatcctttagaacaatctaaacccacttctcctaccatggcaaatcctggatacaccaaaacacctgattatcag

SEQ ID NO: 5208 - DNA, 1000 bp, mus musculus
tatttctttaagtgatttattaaagtccttcttgatgttctctactatcatcatgagatatgcttttaaatcctggtctagcttctcaggtgtgtcggggtgcccaggacaggctgaggtgggagtgcagggttctgataatggtgagtggtcttgttttctgttagtaagattcttgcttttggctttcgccatctggtaatctctggagttagattttatagttgtctctggttagagtttgtttctctcctgattctgttagcctctatcagccaacctggggggctagatctctcctgagtttcagtggttagagtactctctgcaggcaagctctcctcttgcagagaaggtgcacagatatctggcattctggcctgcctcctggcagaaaatgaaggtctgaaacagggcctgtcccagaagctgttagcttctgtagtctacattcttacctgcacagactagtctcggtaggatctggcaacggaggttgctcccccaagtgctacagcaaagccctcccggtgtgtggcagaacctctcctcttgcaggaaaggtgcccggatgtctggagcccaacatgtgtctgcctcagtagatctgtggcttctgcctgtcccagaagctgttagcttctgtagtccacactctcacctgagcagactagtctcagcaggattcaggaaccaaggtggctccccaaggtgccaaagcaaagccctcctgggtggggtagacacctctcctctgaaagggaaagtgcccagctatctggtgcctgaaatgggatctgcctcaggacctctgtgatttatttagattgagatttcaacaaatgtttgatttccactctcacctattgttgcaaattatgaactaaccagtaccccagatgtcttgactctacctgtatgtgtatcaaaagatggcctagtcggccatcactggaaagagaggcccattggacaggcaaactttatatgccccagtaca

SEQ ID NO: 5209 - DNA, 1000 bp, mus musculus
ctctggaagagcaggaagtgctcttaggtgctaagccatctctccagcctcttagcaacatggaaccattcttcagtacctgcaaaagtattcacggttctcatactattcatctgacaactccctagcacagcttggctgcctgaccagggccagttggatggtctcacacccatctcttaaatagcagagctagtttttcactgagttcagcaggcctggtatggagtaggcttccggcctcctccgttcgacatctaggataccaaccaaagtcaacacagtccataaacataggtcctagatgggccactctggtctgtgacatgtactgtgggtgtgtccaggccacctggtagagagccagtgtcctgaatatgcctcttccttttgccatcttctatcagagaactctaaaaccctttttgctaatggagagctggagccttccttgatgctgcatccctggcccagaagcttgtccatgatagatgttcgataaacagcaaattaaaagacaaatctgtccatccaggctcatctcacacaatccagtccccagttggcaaagtcggttccatggtggcttcaggttgtggtaccattgccacaagatcagagcctctgagactgaatgtccttctgacccagaaattggccctccgcaggcattcctctcagagacatctgtgcccacgtcttgcttgcccttgctctttcctcactgaatcttgttttggatgtggtattcatagcccttgctttgcaatgcacggcgacttagacagggtagtcaccatcacacctttctgagacgcagacccattcaccgtttgcagccaccctttcttaatttcttaagatttgcatcacatacacttaatgtgtttgtgtgtatatatgtgtgtgtgcccatgtgcacgtgtgtatacaactcacaagagtaaattctctccttctaccatctgggtccccaggactgaactcaagttgtcagatt

SEQ ID NO: 5210 - DNA, 1000 bp, mus musculus
ccccaagtgaggtgactcagacccaaaggacatgcatgatatgtactcactaataagtggatattagccaaaaaaaaaaaaaaaaaaaaaagtacagaatacccaggatacaatccacagaattcaagaaagttaacaagctgaagggcccaaatgaggatacctcaatcccacttgggagagagaagaaagcaatcacagaggggtgggggcagaaggagggaggcatctgggtgggaaaggggacaaggaggaaaaagggggaacatgatcaggtatagggggagggaacaggactgaagccctgaggggcagcagaaagaatggaaacaggcaacctcaggaggtaggaggtggggggccctcaagaatgtaccagaaacctgggaggtgagagactctcaggactcaaagggagggaccttagataaaagggaccttagatgccctatagtggggagagggaacttgtagagcccacctccagtagaaagacagggcatcaaatggagggatggagttgacatcctacagtcgaaaactctaacccatatttgttcctgtctgaaagaacttcagggacagaaatggagaggagtctgatgaaaagaaggtccagtgacaagcccaaagtgggatccagctcaaggggaggccccaaggcctgacactattgctaattctatgatgtgctcacaaaaagggacctatcatgactgccctctgaaagacccaacaagcagctgaaagagtcagatgtagatatttataccaaaccaatgaacagaagctgttgacccttgtggttgaattagggaaaagctggaagaatctgaggattagggtgaccctataggaagaccagcagtctcaactaacctggactccaaagatctctcagacactgagccaccaaccaggcagcatacagcagctgatatgaggccaccaacacatatacagcagaggactgctgggactggactcagtcaaagatgca

SEQ ID NO: 5211 - DNA, 1200 bp, mus musculus
aataggctatggccataccccaaagataagaaattttttacaattggataaggaaggtcgctctgctgctgaacgacatgctaataccagccccagtaaactggggtatgctaaatggaaggatgtgcttacaggatcatggaatggtccggatcctgtgttagcctgggggagagggtctgtttgcatgtttccacagaatcgtgcagagccagtgtgggttccagagtggctagggcgacgctgtcaaaatgaagaagctgatcttgctggtgatgagcacgtgtctgcccctgatgggtgcagaacccagatggggaatactgtcggtgtttaaattggactgtaaaaattttgatggcaagatgaatgagctttgctcagcgattgtcaccatgaattatacctgagtggatcctggattgacatcgggaaagaatggactgggataggtgccctcgctgtggcccttgttttggcatgcatgttgtgtgtatggtgtatgcgtcggttgtggaatgcccaggtccacactgccgccatggtggtacaagcttttgccacagtggaagcagggcagtcacctcagatttggcttgctgccatgaagaatgaacaatgaagccatcgctccgtagggttgttcggctaagcactgcacagaggttagtctggaagctgtttgacaatctctgggaggtatgtctgattgcatgagtgttgagtgtcctactgtccttcccccaggaaaaacagcacgggagcaggtcagggttgctctgggtcactgtgagcctaagagtcaatcctgtacatggcccctatttctgcacactggggatcagacctctatcttcacccacggagcttgttcaaaaaaatataaaagggggaattgtggggagccattctggacatcctggccagctggatggaaatctactccaggcagtaaacaagcccatgtttggtggatggcacgcccctaatccctgattggctgagcaagcctgcctggtgaggtgatgttacctgtggtgattggttggggcgtggttgtggctggagtggagaaaaacacttgtaaccagagaggctgggggattttaagaaagaagctgcctgagtaaaactgctttaagaagaaccggtggttacgtctttcttgctggtcgagtgggatgtgacacttagtctatc

SEQ ID NO: 5212 - DNA, 1000 bp, mus musculus
tcagctaaaaagactctagatgctgtgcactgtgaggcagagggctagcgcagtggacctaggttatctctcagaagcccattacaacctcctatgctctcctcggctcccttgttggttgactcatctttctgtgaggtgagttcctgtctcagtcatcaatatagcaattgacaaagtatgtcaactgtcaaataccaggaaggcctggataaaaatggtgtcccctttcccacagtatccctaacttaagatctgggaggttctttttcatacagttgattagctagctaggtaggtaaacgtctcgtaagtgagaaagaataattaaccagtactctctctatcaggataggcgctggtctaagggattctctcgggtcagtgttgtccttcaggaacatggagtaggaggatgcgagcggctggcttttgttttcacagactcggatcttggttacacatggcattcacttccttccccaagtggatgagattgtcgttctggggaaaggcaccatcttagagaagggatcctatagtgacctgatggacaagaaaggagtgttcgctaagaactggaagacattcatgaagcattcgggacctgaaggagaggctacaggtgtgtaagcagggttggaacagggtggaacttggggtcttaatgggatggtaaaccaggatctatatcctgagctatttagtgtccagtgaattacatttggagctgaactgcccagagattcaaactccgttcctctgtgttctgggtctctgtaaaggaacatagaaatcaaaattctgtgtctgcatcaaataagtgggactttctattctgctgcctctgacatgcaatcaaaacaaacttcagcatgtacaactgaatgtttgaatgagaggcccctattggccggggggtgggagggagggcaatggtacaaagcatccacttatagggatgacacactcctttttattcaagtcacacaccctaccc

SEQ ID NO: 5213 - DNA, 1400 bp, mus musculus
tgggagcaccttacccagctcagttgacccaagcctccccactctccaggggttcaaactcaaagagtactgggaaatgtagtgaattaattaccatcagacctcggccgctgttcatctctgtaaacaaacattttaatatgctgtaattaattacatctgccatagcgaccctcctctcgttcatccttcttcagcttttcttctgcataccctggaccacccttctccttccaccgggagcctgaaaacctggcaggccccctcctgaccctctccctcgccttctcgacccccagcaggtgctcgcatctgccacaactgctctgcagctttttgtccctttttggtctttctgaaagtcctttgtctctaatcctgtcctggcctgggttttcttcctcaaccaagtttgatgttaagaacacatcctggagagaggaggaaatggaagagaaggggatcttccccaggagcctgagcacactccttagtgagctaggaccaggctaatttacaaggattatctaaaagtgggaaggatccctgacccgttttctgtcttcatccctcccctgagtccctccctgcctccacagcacctcagtttgaaaaacacaggggcagtccagctgcccgggtgagcccacctggctaggccacaattacttcccttcaaacacagaaggaccacggcaggatgatgcccgttagggtagatcgtttagtactaccacagggctgctgccccagctagcacggtggaccgtatcctttttctgtgtaggttcaccttgacctgtgaagagcttgagccagggcagggaagggatcaccctgaccagaggtggaaaccttagatgaaaatgaggagagtcacacgcccagatcgccaggaaggacagggtgagggctggccgcccgaggggttgttggccagccaagtcgtgctgggggagccgggagctgggtgggcggggtagggcgggcgccaccaggcgtggcgcagggaacagagcagaatgaaatgcagatgcaaaacgtgctcgtaagagtttcctctctctctccatctgccaaagccgagattttaatctttaatccatgagcaatcagcgagcagcggcgaatggcacattacagatgttttactgtcgcgggcgttcgcagcttccgtgctctgcacaggcgcggagcgcgggcgcctctaaccttcccccctcctctccttccttcctccccaaccccacttaacaataccccccccccccaacctgcactctgcaggctggttaataaaggaagagccgggaagcggggccttttaaccctttcctacaagaactggggattctgttcctggggctacactggtggcacaggcatgggctgcataaagg

SEQ ID NO: 5214 - DNA, 1000 bp, mus musculus
taatggtgccaaagtacatttgcttctgttgcttattattgttgttcttgccatctagttatgtctagtgttaactggtctgggtatctctgtctaaaacctgccttctgtgtctctggttctagcagatctcctgggagacctgtagactatgggggtggggagaatggcagacatgcctatctgccccagcagaggtgcagactggaagggaaatatggttaacgtggaggggaaggattccacatcttctgggttgcttgggggtcccagctggtgcagttacttgggtaggagttctcacctgtgtccctggttctagcagatctcctgggagacctgcagactacacctgctgctcgtgagagaggcagacacagagatctgcccaagcagaggtgcaaaccagaagggagtaaatgttttcattagtctgagataaatactgtaaactatatttgctgaatcatgtaataagtgcatatttaatttattaaaacttacatgcctggatttaaaatgagtttgttgctttgcttcctgtttgtttgtttgtttttgtaaaaccctttgcacattttatgcacattttagttgccttccaacctttgcagtgctgagttgttttaactttgagctgttccagaggtcctcaagtataatctcagtgaaattttgctttctattttcctaactacttgcatatttggtcctttatatgtcttcatgattcctctgcataactaacttagtgaagcctcacttatcaccaccagccccgtttaaatcgactatttgccttaactttgagtttttaagagttctattaatccacatgttatttttttctgataattaaaatatttcctcttatattacttctggtttacagtttacaattccattttgttacttttttgccccgagagctgggaaagtttttatttccttcacattgtcttttggaaagttagcctgattctctttaactgtcaacttg

SEQ ID NO: 5215 - DNA, 1400 bp, mus musculus
attattcctcaccaaatgaattatatttttttctaagatatcatgtcttaataataatataatattaaaccagtaatttcatttttcctatgctaaatttgcaccataatgttaagcttcatctcacaaatttgccaggatttaacaaaataatgtaaataagacatttaaacttcttacctgagtcttcatcactcacaaactttctttgagaataacaacagtggttcctgttattgctcggatcttctcttctacacaacttaaagttatagtaacacctgtcaataatagacatggtcctgaaacagataaagacatactcgcaaagggcatctttgcttttcagagttacacaggggtgactcttaactaagtttcacaaactacttatttggcattctggtatcggtcatttcatctctctttagcatctgttaggattagccttttgggaatcaagcaaaaagaattttttttttttttttttttttttttttttttttttttttgggaagccacatgttgtctgactttaaattacaggtgaaacatagcgtgctatggcagtcatccaaaatttgggggctacaccaactttctgtttaaattcattttctgtgaagtcaaaactcatctttcaagtttgaaagcatgggaggtaattagctgagacggcagagagcagaaatgaggaggaggcccctggtggccaaaatgaggcctctccctctcaggctgtgtgaaaggcattaatccacactttcatatcctattaggcgaatagaaatgtctggaggtaatgtgaatactttagtgtgtaagtgacatctccaagcatctcattggaactctctagctgtgtaaattaggcagcatcagggtttgacagccaagcacagatcctttaagactgagagctgggagccgcacacacaaaagtactaccagggaaacctcaggaggacatgatagttggttcatttcttctaccttgctgcctgtcatgtcagatgctggcgacttcttggcagtggctttatgtaacgatgaaaccagatttcctagatgcccctcaagcacaattagaacaaatcagactgctgtgagtagaagtcaggattaggctgcagaagactaggagaaaaatcttccccctcagggagtcttcattgtgcttctgagaatggcagcacaggtttcaaggactgtgtatttgattcacagtagctaaatcatagaaccaactaaggtgtccatcaacaaagggatgcatacaaatgaggattgtcttgtcagccataaggagaacaagctcataccatttgcaaaaaaaaaaaaaaaaaaaaaagaatagttgagataatcatattgaataaattatgtctatgaaaaaaaga

SEQ ID NO: 5216 - DNA, 1600 bp, mus musculus
aattcaaagtgtattccaataagagtttgttttcaaatctaatttctagatatcataccacaagagactcaacaaatgtgtatttctgtttatgttatataaaacggtgtgtaacacagaaaatagtcactccagcaatgccactttttagatctccctacaaggcaacatgcatttttattaagggacagtttacaagtagaaggaaagaaaattacaagtagtaggaaaggaaattacagtgtataatcttcaatgttaaatgcatgtactgtcaaaatataaaagcttatcatactatcaaaaacattattagcatggctgttgtgttttcattgctacagtaacacatctgtccacttactggaataaggaacacccactcatcctcaaatttctatgaattagacttctgatcagagctagctgttcagtgaagggcctcgcaaatgctagggtggctcttaattgcaggttctgaaggagattgctgttctttttattttaattttaattaatttatttattcactttaaatttcaatatcagccgctcctctcctcctagtaagccctcacccaagtcctctctccactcctccttgcccttctcttttgagaaggggaagtcccactgtgtgtcaccctccacatccccactccccaccttcctacatcaagaggctgtgggactaggtgcacactctcccattgaggccagacaaggcactcagtccatttaggggcatgggatccacagttagggaaacaggcaacaggctcaggacagcccctaatccagttgcaggcaggaactgcatgaaaacctagctgctcatctgctacacatgtacaggtgcctaggtccagcctgagctcgctctttgggtggggattcagtctttgggaacccccaaggttccaagttacttgactctgttggtcttcctgtggagtccctcagtccctcttccaactcttctgtaaaatactctgagctcaatctaatgtttgggtgtgagtctccgcatctctttccatggctcctgagtggagcctctcagaggacagtaacgttagggtcctgtctgcaagtggaatagagtatcattaatagtgtcagggattttgttcttgtccattggatgggtctcaatttggggcagtcattggttgactattctattagtctctgctctgtctttgtccctgcacatattattggagaaatttagtttcttacagttgcatcacagcgtacccttccatctttaagcaaacaagggtatgttgaatgagcattttagtaatgtctgattttttttttcccaaaggagaatcttgtaggaggtcatgttattatattaagcctacttacatgagttcatctttcattgtaaacattgtgtagccagttatcttaattgcatctgtaaagtttcatttgtgtatgtattcatggtgctcaccaagaagtaaagttgaatcatgccaaaagtcttcctactgtaaagtcacattacgaaatgaaaataagaaattatattgagcataataccctcctcccatcatttttaaaaatgattgccccagcaggatga

SEQ ID NO: 5217 - DNA, 1000 bp, mus musculus
agacacctcagagtagagtgtatgtactacccagtgtcaaaaacataccagcatctgagaaggccaatagaaggagagagaagtaaaacgaggcatctctgatggattcactctcactccaaaaaaatttaacaataattgcatataacaatgaattcaatcaggtttctaacttttcatacttgtgactcttaattttaacagaaatattttaaacaaccctagacatataggcatttaattttttcccattttaatagatattttcttcatttacactttaaatgctatcctgaaagtcccctatcccctccgcccaccctgtttctctactcaccgactcccacttcttgtccttggtgttcccctgtactggggcatataaagtttgcaataccaaggggcctatcttcccaatgatggctgactaggccatcttctgctacatatgcagctagagatatgatctctgggggtactggttagttcatattgttgttccatctatcgggttgcagaccccttcagctccttggtactttctctagttcctccattgggcatcccgtgttccagccaatagctgactgtgaacatccacttctgcatttgccaggcactgcatagcctcacaagagacagctatatcagggtccttttagcaaaatcttgctggcatgtgcaatagtatctgcgtttggtggctgattatgggatggatccccgagtggggtagtctctggatggtccattctttcgtctcagctccaaactttgtctctgtaaccccttccatgggtattttgttcgctattctaaggaggaatgaagtatccatatgttggtcttccttcttgattttcttgtgtttttcaaattgtatcttgggtatcctaagcttctgggctaatatctacttatttgtgagtgcatatcaagtgaattcttttgttattgggttacctcactcaggatgatatccttcagatacatctatttg

SEQ ID NO: 5218 - DNA, 1400 bp, mus musculus
gaagcagttacccaaaggcctcctcctttggagttttgtaaagaacgttcattacagcggagttgctcagaggcttcttccgtgcagttttacagttgaaggagtggtgaggtgtggattttgttgcctggtttgtagagatgttctataagaggatgaaaatcaagacttgaccatggggaaatggcctaccgttcaacaccagttggacacactcagttcaaagttgtaatgggttatctgagttatttaaaatttttaaaggtatgatcaataattagattccttttgtatgggccaccaaaaccatctgagacattgtatcttgttgtgtaatatgttgtcatggtaattggctcacagattgtatcttgatttgatttcttttagaacattatttctgtatcagaacaaaggcaagttttgtctggcttcatcttaaagagcatgttttgattgacctaggctaagtcaaagccactatgactgctcaatctttaggtgaacaatttactatctgtgatagacttgctttctgtatccttttaatggcaacatggttgtcaaaatttacattcccctaccctagttcagaacttgccatgtggctgattttcagtgatggaatactgacagtcataatagagtagattattgatgtggttttgttggttttattttaatgtgtgttctcatgttcctatgagatgaaatatactccgagtattatgattcagaaggtgagtaaaaaatatccccggagtaaatatgataagtggttttaaactgatgtcatcaaactgtaataaagttacaatacattgagtagaaacacacacacttacatacatggatgcatgcatgcgttcccacacacgcgcgcgcgcacacacacacacacactgatgtaaaattgactttccttgttgtgtaatatgttgtcatggtaattggctcacaaagaactcagtactgaaggtacagtgctgccagggcaaaataaaaattgtgatctgaaattgagaaataaaaaaaatcaagctggtaatataaggtgtaagaaagtcaatacatgtacacaaatgagaaagaacaaagtatacatttctgaatgtaaagacttgtatttggaaatttcaaagtagaatattgaaaagaaatataaggagcttaagacatagaatatcattgtcttttttttcatctaattaactggcccaacatactgtaatactataaatgttttatatatagacctgaggtcaaaggttttcagctatctcaactgccctcacatagctttatgttactccattgttctcttcctgatcctgatttatgagacagtttgccatgttacaatatactttatcaaatctttttctgcatctctcagaagg

SEQ ID NO: 5219 - DNA, 1000 bp, mus musculus
tatattcactacctacacacaattcttttgaaatataacatgttttcctatccatgtgttaaaataaatctttccttgatattattttttttttactggatattttatttatttacattttaaatgttatccccattcctggtttcccctctgaaaaataccctccccatttttccctcctgctcaccaacaaacccactccagcttcatggccctggcattctcccacactggggcatagagccctcacaggaccaagggcttctcctccattgatgtcccacaaggccatcctctgctacaaatgtggctggagccatgggtccctccatgtgtactctttggttggtgatttagtccctgggaactctggggagcggttctggttggttgatattgttgttcttcctatggtgttgaaaactcctacagctccttgggttctttcttgaactctccattggggacagtgtgctcaggccaatggtttgctgcaagcatccacttctgtatttgtcagcgctggcagagactctcaggagaaagctatatcagactcctgtcagcaagcacttcctggcctctgaaatagtgtctgggtttggtgtctgtatatgggatggatccccatgtggggcagtctctggttggcctttcctttagtctctctccacactttgtctctatatttcctctcttgagtgttttgttcctctttagaaggactgaagtatccacacttcgttattccttcttcttgagtttcatgtggtctgtgaattgtatcttgggcattccgagcttttggacaaatctccacttatcagtgagtgcatatcatgtgtgttcttttgggactgtgttacctcactcaggatgatatttttgtattccatccatttgcctaataatttgataaattcattactttttcttatttttattatttaaatgcattttaaaaataaacttaataacattgagtattttgaaaatcata

SEQ ID NO: 5220 - DNA, 1600 bp, mus musculus
cacacacacgaacacaaggatcctgaattttgacaagctgtaaagcaatctactggcatgcagggaagggaccgcaaataactcacagacaaggagagtcttgctgatctaagaaagaggaatttctcactggaaaatggtggtcatggtcctggaaagactgaatttcaaaatacatatttttcctaaagtgggtttattttctccttaaatgctggtcattaggtgctataagagataaatattttaaatttattgtaatcattattcaactatatggctgtgtatgtctctgcaaatgagtacaggtgcctgcagaagccacaactggagttagttagtgatgatttttgagatgcccaatatatacagaggcttgggaaacttaaattctctggaggaacagtccgtactctgttaaggaaagccatctctttagcccagaggtttagtttttaattataaactatcacaaacaagaatcatcaaagaatagagctacaggagaggattatccagatcatgttgtcctgtgggtacatctgtggtgaatttttctcgattgttatttgatgtgggaagttgtggagagctgcgccgtgagcaatcgccattataagatggcgctggcttccattgcgtctaactagtaaacaagcctcatgtgcaagtgcaagagtgaactcacgcctagtcactgctcatctcgggagtagtaatggggtgatgggcgagcaacgaatcagaagctgtcacgctacatcaggtgctgaaacgtcacactgcgggctatataaacagtgccattttctgggttcggggtcttcctcctgagaagtaagcaataaagctttttgccacagaagattccggttgtcctgagtgtgttcttgccagcagggacaaaagctcgggataggaagtcccaactcactgtgtgtgggggagggtacaatctctaagcattggtcaggaactgtacaagataaagcgaggtgaaagctagcagcgcccatacgttcttacactgtgcgcttagctgcagatacgatacggtgtgagcatttatctcaagcctctatttttgtgccttgctctcactggtgagcccatcatatatacagccccatataagctgaattgtcagacagatacttcctgttgctcctggcatttttttcacagtgacagaaatgaaactagaatgagtgtcctacaaaattctttgaagatgctaaacgccgtgaagatcccaaccttcttgcactttactcttcattaatttgtaagaacagaaatatgactttgtccatgccattaggatatttcatgaatttcagagatgatgataaaattgtgaaattacattttaaacatatgtgctactatatatatacatatatatatatttacatatgtgtaatatatattatatacatatataaataacatatgcatgttatttttcttgcttttatctgtaaaataataatataatagttgctatgagatgtggcatattataaacaatcctaagttttagacctacctaaacagcgtcatagaccatagttgaaaatgttgtcatctttagatagtg

SEQ ID NO: 5221 - DNA, 1400 bp, mus musculus
acactccatattccagtccctgctcccctgcccaccctctgactgctccacatcccacacttcctcccgacccctatctccacgtggatgcctccacccccacccctcctgacctctaaactccctggggcctccagtctcttgagggttaggtgcatcatctctgaatgaacacagacttggaagtcctctacagtatgtgtgttgggggcctcatatcagctggtgtatgctgtctgttttggtggtccagtgtttgatagatctccaaggtccagattgagactgctggtcctcctagaggattgcccttctcctcagcttctttcagccttccataattcaacaacaatgtgactgatgtttctgtccattgattgggtgcaaataactgcatctgagtctttcagctacttgttgggtctttcagggggcagtcatgataggtccctttttgtgagtgttccatagtctcagtaagcgtgtcagaccttgggacttccccttgagctggatcccactttgggcctgtcactggaccttcttttcctcaggctcttctccatttccatccctgtaattttttcacacaggaacaattatgtgtcagagatgtgactgtgggatggcaacctcatccctcacttgatgccctgtcttcctgctagaggtgggctctataagttccctctccttactgtcaggaattccatctaagttccctccctttgagtcttgagagtctctcatgtcccatgtctctagtgcattctagggagttcccccaacctcctatttcctgaggttgcctgtttccattctttgtgctggccctcagggcctcagtctttttccctcacccaataccagatcaggtacccctctccccccaactcccacacattcactttccctcccaattcctcccctccctctccacttgtgattactttcttctccctcccaagtgggactgaggtgttctcacttgggcacttcagcttgttgaccttttttagttctgtggactatatcttgggtgttctgtactgttcaagggaacagcatcttctagacaaaaatgcaatgataaacacgagacagcagacacaagacctacacaggataaaattctagaactgagacgtttcactcctaaccaagatgttatatggaattgaatattgctatggaaagaaaatcagttttctccagagcaatgtgattaggtaggtcaacttaaaaagggactctatggtttttgtgaaatttttgttagtttaggttttattttattgttgttgatgttgctatgattgttgcttttttgttttgtcttatttctttttagagggtaggatgatttgttttgattttttagatatatagaaggaacatgt

SEQ ID NO: 5222 - DNA, 1000 bp, mus musculus
cctgcagagtaacggtgtctgcctctttttgcatacagacttcacatacacacctacacctccgggggaaatgcatatttgaattccagccacttctaagttcaggggtttcttgttttgtcctctttgtttttgcttctgttcagttttcggcacacatacactaactgcgtcactgttctgtgatccatctttagatgtctgagttcacagttacactttcgacaaacgtgggccaagtctgggtcttattcaaacccacatcctctcctcttgggcccggtgcgcctacgatggtgcctggcaagtgcctgggtgattgggcacccagccttggacacacgggcttggacacctggtcttggacacccagccttggacacccaggctgtccaacccagccttgaacacataggcttagacacccaggcttggacacctggccttgggcacccagccttggacacacaggcttgggcacccagccttggacacacaggcttgggcacccaggcttggacacctggccttgggcacccagccttggacacacagccttgggcacccaggcttggacacccggccttgggcactcagctttggacagcgtctttgtgttttcttctaaggcctttctaagcacccatgtttccaacttacctctgtgtggaggcaggcccatggtggggttaaggggactttgctatgaagtggagtctgagcacaaaagtctgtattctggaacattctggcatgttacctaaggagaccttctgtgcctttaccctccctccaggtctcaggcttcctctctcgtctttgtcggggttgtggaaagtaggaatggttgttttccagccaaggcgaatacagctccagaaggatgagtgccaaaaatattgttgccctccaagtacatgaccaccaccttccacacagctaccaatggctgccaggtgacccagaaggtacagctaaacctgcccttcctccatcttgt

SEQ ID NO: 5223 - DNA, 1000 bp, mus musculus
gtcaagagctgcagcggaagtacagtgtatccatagggaagagatagagtcacgtgggaaagaggagcaggagcataatggttgggggtctggtttgaactgtttgagccctggccacaaggtggggttcagagctcctcaggaatatggggtctgagggtgtgacacacctcagagggttgtcttcctcttatccatcttaagtggagcagtgtgacccactgaaaccaacagtgggaggccttgcctgtaggcctgtgcttgattctctctagagtgctatgggttttcccggggttatgaaccagagaaccctattgattactgtttgttaatcaaagaagacacaggaaactggccttgtctcccattctgtggtaattttcaacaggtggcacttgttcccgtgttcattgatgaatagatgtgctaccgatcccatagggtgctttctgcagagtggcacactgtatgcttgcctttatagtgcttccttctctgactgagctattcggatcagacatcagcagagtaatcacttcaagaaataatgtcctttctaacaatggataatggcaggttggacaatatatttgcttatggactctgcccatcttatcagtatctcacagaatctgatggaggaaatactggattggggtgcatgtcggcacagttggtgtgatcggggtccatgccggcacagttggtgtttttctggagagaggacatgcacctctcacctgcctcttggctgtgcgacatccatgacgtctgtcctgactgacttgggcagactccatgactctcagcctaagtttttgacagctctctcctagaatactgaccactcctgggtggtttggtagccttccttgcctctgtttgtatctatgcttctcaacactatgcatttagtagctgcagcacccactgcagctcttggtctgttgtgtctgtgtgtgctggctgttggcagaatgaatgcataaatgagcag

SEQ ID NO: 5224 - DNA, 1000 bp, mus musculus
ttctattgtcaaatgtcttatccaaacataatttacagaatatttctctcccctgcagtcttctcacagggtgcctctgtggtgcaggtgtttgcttccattcttaaagatttatctttttatatgtataaatgtttagtctacaggtatgtaagttcatcacgtgtaagttcaccatgtgtgtgcaggatcccaaggaagccagagagggcattagatcccctggagctagagtgacaagtgcctgtgggccaccatgtgtgtgggtgcttggagctgaacccaggtcatcttaagagccacaagcatggctctgcgccatctctccaggccttgtttgcattctttatttttgagcctgtcttcctgggagttacctcctttgtgttacctcctaggttaatggttacccagtgatgctcaaaattcacgatcaaaatcttctgcgtaggaaggatcccaccctctgccaaatggtcttaatgtggcctgggggcagtggggtgtccagccagctcccaaccccgccatggctctggctcctcattagcctttctctggtgtccccacgtgcatcctatcttctcgtcattggatatgtggagaccctttgtggcacttacacaggctctcatctccagtcactttaggttggcctgccactcacaagaactaatactaaggctagcggggcttcgagcttccctgttcattctcccagagttcgccgcacgcagtgctgctggctgcggggtttcccctaagctcctcatcagatctgccagtggaagcttcatcccagacacccaccatgctagcccactaaccaggagggcaagatggacatgttcttacccggttctgccaagccttccattttcagtttgcatttcaccttgagtcttccccagagccctaagggagtgtcaagtgccgagtccttgtctgtcataagcggagtaagtttgccacgtgtctcttcaggcataactaaatgtgt

SEQ ID NO: 5225 - DNA, 3000 bp, mus musculus
tggtgtgctggcctgggactgactggtgtgctggcctggcactgatgctggtgtgctgtcctggcactgactggtgtgctgtcctgggactgactggtgtgttctcctggcactgttgctgagttgttctgtcctgggactgactggtgtgctgtcctggcattgacactgagttgtgctgtcttggcactgaggctgggttgtgctgtcctggcactgatgctgggttgtgctgtcctgggactgactggtgtgctgtcctggcactgacgctgtgcgctgccctctggttcatgtgctcttgtcctctgtgtcctctgcttcccctaccagggagcatcagatggaggccgggatggtggttggtgtttctttttcactgagtcaccgtgctgtggctctgtgcttctcagctgccctgtcattcctctgtccctcggtgacgtcctgtgttctttatcctgcttcgattcttcaccgtcctggctctgctcctgctgcgtgtcacacggggcagcgtttcatccgccatattactgccagtgctctgcccattttacaggctgtgtgctctgtaatagtggttcaggttcaaggtctgaggcacggttctcagccttcccaaccctgtgaccctttaatactgcctcacggtgtgctgaccccaaccataagattattccattgctacttcataactgtaatttttctactgttgtggattgtcatgtaaatgtctgacatgcagcccatctgatatgtgacccctgtgaaagagtcctttgaccccaaaagggccacaacctacaggttgagaacctctggtctaagatgacaatttaagaataaaataagattcttcattctattttatatataatatatatatatatatctcacaggagagcctgcaaaataaactaatatatctggaggcaagagcagttccctggagttacatcatcttcatctctactcctccgagcatgctaggctgtgtcatgagggggcagccagggttaaaattgccgagcagatgatttaataagattacctggagtttccaggagagcccagtgagcatccttagacgtggaagaggcacaagaaagccaggacatgtggaagtgctggctgcagggatgtgattgccggcttgggaggtggaagggaccacaagccaagaatgtgggcagcgggtccctgagagctggaaaaggcaagatccccttagcttagcttggggatgcgtttagctgagcttctccccctggggctacagaaggaacacagccacgccaggccctacagttcttttaaaattgctgtgaatcatggccgtagctcatggtagcctgctttagatttctgacctgagaactgtctgtcaggggtggtggggtgtctttaaaggaaagtttgtcacaatagctataggagaacttaaaaaaaaagaaaagcctatgtcaggtcccaccaggacactagtttctaggtataaggggtctgcacatggcgcccacaggcgagggcactgtgctgcctgccgtacacagcttccacacttgggagctcttgctggggtttatttaagtctctaacaccctgagctagcggtgccactacagttggaggaatctccttagtaatgcaaagcacccgagaggccgactgggaaggatgctcttagagatgtcagccttctgaacagagctctggtaaagacctccgtgggcctcagctggagaaccaatcagagctctggtaacgacctccgtggctcagctggagaaccaatcagagctctggtaactacctccgtggcctcagctggagaaccaatcacaccatcgtatttttactgccacaaagataagaaaaagataatgtgtacaacatgttttcaaagtatcgtagttttaaaactatcatgaaaactacttctgttaagtgtaaaccggagcaggaaaccacgcgcagagctcagttttggaacaacaggcctggagagaggtagagacgcggctctgtgcctgggcacggctttgcggttaagagctccgactgctcttccagaggactggggttcagttcccggcacccacgtggcaggttataaccaaccataaccctaatctccaggggatccaacactctcctctggcatcactcagcgacaccaaataaagtaaaaaataagcgagaccacaactaagagatacagcagacagagttaagaatggtcatttggtagaagtagcaatcgtaaataattatttatcggctatgtttgcaatacttctgaaagttttcaccgtgcttttttataacctgtaaagttaaacgtatctagttaaagtgataagaagaaacttggtttccatcttaaggggctgatgtaagattgccagttagtctcctagatgccactgttacacccgcgttctccaaattctactttcactaaccaccccacctctggccttgtttcttcttgaatacacaatgagagggtttttctgggtggctctcagtgtgtccttgacagttcctcactctggaccgcctcgctaggctggaagccacctccctgtgcagcatgccgctgagttagaatcccatgtcagcctgcttgtcacgttgatgaacccactgcccccactctggtccggagactgtgtgcagatgttccctgagggcgcgagtttcttcttcatgtgtgtcctcaccaacttactgcatttgcagtgctgatggacggagcctcctttggcctcagacttcggaatgctcctctcacgacctctcccagttgctcctccccctgggcacatggacacttctgtgcactgtcacatgacatgtagcagcattcacccattagctgggccaacagttttgagcactttgatttcttcctatctatcatctgcttccccctgagaatatttaagcttcaaagcaggaaacagttctccagccctgtgtcgtcctctcagg

SEQ ID NO: 5226 - DNA, 3000 bp, mus musculus; identical to SEQ ID NO: 5225

SEQ ID NO: 5227 - DNA, 1000 bp, mus musculus
agcgttagtactgtcagctccaacagactcactcctggagttagccaacctaaactgtcagtgccacaacctcccggtggttctgtgcttgttttgcaggtcattgtgttgcgtattgtatcatcagcagggttaaataacaatatccaggctgctttaggagggaactacctgttgtccttagctctgaattatgccatctgcgaattatttatctgacttctaaaggcctggttcctaatgtggttcttttaaagttttctaaaaacaagacaaaggaaaaaaaaatcccatttaactatgagaatctacacagaagtaactgtaaactttcaagacaagaaggaagaagtttgaattaagagcccaggagagacaaagattattaactttaaaaataaaaagacctttccactcaaaagaataagcaagccattggcttttagagcctctttcaactctctggagttggtctgcccaggtgtgaggcccagacctatgggtagtgtttcccatgtgggtggtggagggtaccttcccttcctggggacatttgacctgggtttcagtcctctgtgcctctttgtcatctttctgattgctactgagtgtcccactgaagcaggcttgtcagctgaatttgtgtgtgtattgccctagttaactgtgatgctacatacgtagcattttctatttcctacttagcaggttatagggaactctagtttatattcacaagattggcccttttgttacacatgccacctgtgagttgaacactgagtagcatcacactgagacccagactcctcctctgatccacctcaaacctcctctcctgctcacttaccgttctgcctgtttcaccactgcccctcttctgctttctaacattatggaaacagtgctgtgccacggggcctcttggctctgcttttaaaattgagcatagtacatttgccattcatctgtagtattgcattgcgagagatcgtagcaa

SEQ ID NO: 5228 - DNA, 1000 bp, mus musculus
agacatgtccttgtacccctatgtatgtgtgcatgagtttcttttgtctgccactaatattatgaacagagctgagtttactctgccccgtagttggttttctctcccaagaaacttggagtggcgactgagagaagggagcaggagcctccaggatggaggaaatgaatcaggaagggatacattgtttcacttctcttcagattagtctcaattaagtagcttggcttgaggaggggctgggcttgagcagagttgggggcaacctgacaccgaaactaggatctcagtctatcagtgtactaaattgatggcaatgaaaaagatcctccagagacacaaaagtacacttgttttcagattaatgtaccctgaatgtaagcttttcaggcctggcctgaaggagttaacatgtgcctgctccagggtagcttcggagcctggtggtattactttgtgaagtattcacttgcaggggtgacctggccacttgctcatgaatacactgaagggttgttctttcctaacatctcacagtgcacactcacagggacactaaagggtttgtttaagtcagtgtcgacagagggacaacccagaatgtgtgctgggtggaccttacacgcttccccaggccaagtccaagtcacgttgacagagctctatttcctccttccctggcagcacggcatctcagttacctgctgttaagcatcttggccttatcttcatgtaaccaatgcctgtttctcttttcaaaaatgacttaacaggaattcagggtattgtgttgaatcttaatggcttattttgtctcttgtgtgctggtttctaaaggccccacagttgcttcctctctctctctcctgctcctttaaaaataagaacaggaatcttgctgtctggtgatggtctgagtcagtatcttcttaactgctagggaggctcagtggtttaagactctgggctaaaatcatattgtaatcagtactttaggttc

SEQ ID NO: 5229 - DNA, 1200 bp, mus musculus
ttaattgcagctttaaaaacaaaaatcctagtggctgcagtccccttcccagcacctagagtatccattaacctccaaggaaaaaaatgatttctgcctctccatcctaggcttgcccaaccttcctcaaatggctgtcagtattgcactttgttcaattgaatctcaaaaggatcctgcttcacggaagtctgttctatggtgttgtgagtcagccttgggatgtgctggcccagcatgggggccacttgcagaggagtctggtccccagcccctccttcccttcctcctacacaaagggcagcttcacttaggaagctgagtgctctcaattggtttctaactgcagcagcaggtactagcgctgttgcatgctgcttctggttactcacttggaatcagatcagccaagaagctgaaattagcttcatcttaccagcatgaaatcgaaacacacagcgtgccctgggcttaggagaggcaggcatctgcgatttttctcttctctgtcaacaccagtgcttagggtgacacaggagtctctgttgcacagtaatctggaagtctgagtattgaacactgtggtgtcaccaacctcctgtaaaagaaaagcaggcagagggagaaggcttccaggaggacaaagggacagccagccactaaaagtaaccacattcacttcagctggcaagggacatggtgttcatgaccctgagccatgcataccaccaccttgaccacatttttttatcctctgggttttattatattttgacatcctgggatttgccaatgccagagagcctgtccttttgagggaacaaattcctacagatagttaaggctgtcctacaaatacatgggtcttagttagggcttctattggtgtgataaaacaccttagctaaagaaacataggggcaaaagggcttatttcagcttatagcttggagtccatcatccagggatgtcagagaaggaacttagagcaggaacctggaggttctgatgcagaggccttggaggagtgcttatgacctgctcagactgttttctcaggccattcaggaccacctatccaagggtgtcaccacccacatcaataaaccaatccaaaaaaatcaccataggccaatcctattaaggcattttcttaattaatattccctcttcccagatatgtataagtttgtgttaact

SEQ ID NO: 5230 - DNA, 600 bp, mus musculus
ctttatctttagtgctgaagacaaatcatagcacataatagatattcaataaatatattttagatgcgtatagatgttgtagactcataccattcactccaagattcaagtctcctcatgttgtcaagcaaatatctgaaactagcttgagctacgtattctttgagttgagattatctttagatgtttcaacaaaggtgtgacattattgcctctttagccttcatctggctatcttctgattgctctctcgtgtccattttttcacacctttcctagagatacttccataaatcaactccagcaccatcaacaataaaatctggtacagatatcctacctgtgcattttcattacaactgatatttaccccaacataaatttcaattaaattaattaaaacttaaacatctgaataataaagcacattaatgcctgaacatgaaaatatattaatgtctgaatattaaagtataaagaatctgggctcaagtatagttgtttccccgcacttagcatagtgtctagcttgtagcaagtatcaataaatggtttttcatgaacaaatgaatgaatgaatgaaatattttggaatataca

SEQ ID NO: 5231 - DNA, 1451 bp, mus musculus
gccatcggtcagtgcctcgccaccctgtctttgaggagatgccttatggagtggtggttgggccttggagtcagacagattcaagcccaaatcccagctctgtcccttggtggccatgagctcttatgcaagttacctgcttttattctggaaaatgggcagagtaatgcctgcctataagaaatacttcaaggcaaggaattattattctcctaggtagcataatgcacataaaatggctagcacaggtctggcatgtagtaagcacttgataaatgaatgttgtcattatgttctcttccccaaataaaggatttctctctatttgccccagagcttttaaaccctgtggatcttatagtaattctacctataaacattgctagcagttttcactcttaacaaactacagaatgaaaatataatctcgattatatttttgcatttatttgagtaatatgctatcaactttataaagcactttcacatatactgttctatttatctcccacatcacacctgagaggtttagaccgtaatgaaaaaaagacttgaagcagacatgtgtcttaaccagtttatctgagtgtgtctgagtgtaccaacagatgtggatgagcgcacgagagatgtgtgagcccatgtctccacgtgtctgtgactatgagtgttggagccctacaatatattcaatgattttatactctggggggctatagatcttctgcctctattctgttcccaccaaaatgtccttctccatttatttgtgtgctgttgaactgctgcataggctttgatggtgctgagagggaggattgcctgaaaatatctgggccgggcgcgatggctcacgcctgtaatcccagcactttgggaggccgaggtgggcagatcacgaggtcaggagttcgagaccagcctgggcaacatggcgaaaccttgtctctactaaaaatacaaaaattagctgggtgtggtggcaggtgcctgtaatcccagctactcaggaggctgaggcaggagaatcgcttgaacccgggaggcagaggttgcaatgagccaagatcatgccactgcactccagcctgctcgacagagcaagactccatctcaaaataaataaataaaataaaataaaataaaaataaaagaaaatatctgagaagcctactgtgggctcagtccattactctcatgggacttttgtattgactgacttattgattgatgtaatcttcatggttacacataccaatgtggtttatttagaatgaccactgtaaaataaagtatccacaactctttctgataaatacacacaggaaggtacacacacacacacacacacacacacacacacacacacacacacacacggctggtcacttgcctgttgtctttagatcctttcctctgctcagcaaactacatttcccaagctcccctga

SEQ ID NO: 5232 - DNA, 934 bp, mus musculus
agtcttcccttctatctgattcagtggaccaagtaaatgactctctggtaacagaatttgtattacttggacttgcacaatccttggaaatgcagtttttcctttttctcttcttctctttattctatgtgggaattatcctgggaaaactcttcattgtgttcacagtgatctttgatcctcacttacactcccccatgtatattctgctggccaacctatcgctcattgacttgagcctttcatctaccacagttcctaggttgatctacgatctttttactgattgtaaagttatttccttccataattgcatgatacaaaagttctttatccatgttatgggaggagttgaaatggtgctgctgatagtcatggcatatgataggtacactgcgatctgcaagcctctccactatccaactattatgaatcccaaaatgtgcatgtttttggtagcagcagcttgggtcattggggtgattcatgctatgtctcagtttgtttttgtcataaatttacccttctgtggccctaataatgtggggagcttttattgtgattttcctcgggttattaaacttgcatgcatggacacttatgggctagaatttgtggtcactgccaacagtggattcatatcgatgggcaccttctttttcttaattgtatcatacatttttattctggtcactgtccaacgacattcctcaaatgatttatccaaagcattcttcacttcgtcggctcacatcaccgtagtggttttgttttttgctccatgcatgtttctctacgtgtggcctttccctactaagtcattggataaattttttgccatcatgaactttgttgtcacccctgtcgtaaatcctgccatctatactttaaggaacaaagatatgaagtttgcaatgagaaggctgaatcaaca

SEQ ID NO: 5233 - DNA, 1342 bp, mus musculus
cagcgtcctcctgttccctggccagcccagccctgcccgatgcctggcccagcagcccttgtcccacctcccgctcacgggctgcctgagcacactcttcctgcaggcggccgagatcttcgtggagtcagaactgcctctgagctgggcagaccggctgagtggctgcctgcgggggccctgggcctggctggtggtgctgctggccatgctggtggaggtcgcactgtgcacctggtacctggtggccttcccgccggaggtggtgacggactggcacatgctgcccacggaggcgctggtgcactgccgcacacgctcctgggtcagcttcggcctagcgcacgccaccaatgccacgctggcctttctctgcttcctgggcactttcctggtgcggagccagccgggctgctacaaccgtgcccgtggcctcacctttgccatgctggcctacttcatcacctgggtctcctttgtgcccctcctggccaatgtgcaggtggtcctcaggcccgccgtgcagatgggcgccctcctgctctgtgtcctgggcatcctggctgccttccacctgcccaggtgttacctgctcatgcggcagccagggctcaacacccccgagttcttcctgggagggggccctggggatgcccaaggccagaatgacgggaacacaggaaatcaggggaaacatgagtgacccaaccctgtgatctcagccccggtgaacccagacttagctgcgatcccccccaagccagcaatgacccgtgtctcgctacagagaccctcccgctctaggttctgaccccaggttgtctcctgaccctgaccccacagtgagccctaggcctggagcacgtggacacccctgtgaccatctgggccccagagccaagctgtgtccctgtccctctgtgcccagaccaggcctgcccaggtaacccagacccactgttctggaaagaggcccggagggctcccagggtacccgcaacccacaccgtgagctcaggaaaaggacgcagggaggccccggccagatggctggaagcccaaatcaggccctgccgacctgaccatgtcccaccagggcccccatcctgcaccctgccaggcaccacagcagtgggaggccaggtgggggcacacaggcatatgcccagggcagagcccgccgaggtaggggtggcacccagcttcctactctgccctttgcccagtgggtagacagcatcatgactgtcaccagtaccagggacagagcccaggtggggtgggggcggggtccagcaccacggccagcaccgaccaccaggaccccggagccagcaccatg

SEQ ID NO: 5234 - DNA, 2466 bp, mus musculus
tccagttctttccaaatggcaatgcatttgccactggctcagacgacgccacctgcaggctgtttgaccttcgtgctgaccaggagctcatgacttactcccatgacaacatcatctgcgggatcacctctgtctccttctccaagagcgggcgcctcctccttgctgggtacgacgacttcaactgcaacgtctgggatgcactcaaagccgaccgggcaggtacgtggccatggggcctttctgtgtcttgtggacatttacgtggtatctttagagcaaacacagagtggttgcataagctgcagtgttttagtatcggtgggactgtggcatggcgtagcaggagtgacagtcgcaaactgatggcccagctctgaccctccaggcaagtggactccgaggagtaccagcagatcttcccacatgcgtcggggagggctctggggagagtcagtgggcaggagagggtcagctgtgcaggctccagggcccagccccgtgctttcccctctgaactctgcttcagggggaggagttccatgcagggacacctctgggtgccgttacagttaacatatcaaaggcaagcgtgttattgccaggtgtacaaaagatgagacttccttactaaaaatggtcatttgggcatttgaatttgagaactgttgacacttacagacttagattcatttgtctcagtacctgggaggacagaagggagcatggctccaggtcttggcccttaccggggcttcctgcttccggatgggtgccactcccacctcctggttaaacacatttctttttctccccagcctggggggaccagagtggagccatttccagccaagtctcacagtcacagtgctgttgaagggcggtggaagccagcccaggccttggcagagcacacgccggcccctgtactcagctgtgtggtggctgcaggaggtggaggagggtggctgaaatgggccttcggatccccctgggaggaagtggagcttctggctggtgatgatccaagccaaggttattgggagtgttgacagaaggccccctcatcacatgacagtgacagtgcagtgccagtggtctcagccaccatcgctactcctgtgttctgtgccttgtgctgggctctagggatcacagacaaaggaaaaacggctcatgcctctaagctcctgtgttacagattgctttgagattggggcggttttgattttttttttttttttttgagatggagtctcgctctgtcgcccaggctggagagcactggcacgatcttggctcactgcaagctccacctcctgggttccaatgattctcctaccctagcctcctgagtagctgggactacggcccgcaccaccacgccctgctggtttttgtatttttagtagaaatggggtttcaccatattggccaggctggtctcaaagtcctgacctcatgatctgcctgcctcggccttccaacgtgctgggattacaggcctaagccactgcgtctgatgatagttttgatttttttgatagtggcctttgcttctttttttaagttttataagtgagtgctgagaagtcaatgccaggggctctggatttatcgattgcgtgtgtgtgcgtgtctttgaattttaacaaggctggccatatgctgcaggttaattccccacgtggatgcaactttccctcccttcctggccgtgggagactctgggtcttgtcccatgagagatgcaccatccgtcctcgtcacaacatggcacacaggtgagatcgatgcctctgggctttggtgtgattctgctgttgtttgctcccaggtgtcttggctgggcatgacaaccgcgtcagctgcctgggcgtgactgacgatggcatggctgtggcgacagggtcctgggatagcttcctcaagatctggaactaacgccagtaggtaatgcagcagcccaaatgcccttctctgaggagaactgtgcgtgtttctcatagaacatttgaagttgtcattaacggtttctagataaatgttgatgtagcattgatttggaattgtgttgtgggaaacgtttacagaaagctgaagtcacgtgccctcagctgcagacactcatgcagtgatgggaagagcagtgacctggctgtgcgtctgcacttagattctctgcctcttttcacatttctttaaactctgtttaaaacagcatgtggatgccatggagactggaagaccattccaacttggacgcgttaccatgagagcatatcctatccaaccgtactaacgtggacaccctacacctcccctcagaacttcaaaagggcaagatcttttttccttcacttattgctgaaaccaagagcacaattcccattgagagaaagatctctgtgctgtaaactaaaacaaattgtgcattccttccggggccatcgtctttgttttctt

SEQ ID NO: 5235 - DNA, 1326 bp, mus musculus
ggggccccttgtgctgtgagggctggcaagtacctcctgtacccagcacagcaggaggggctgggggggccggcctcagagacaccccaggcacctcttgctttgcaaatgtgctcctgggagactggctggtttctgtaaagcgactcctgttttgcctttaaatttcatcaagctgtggggaaagtgtcaacacagagaaacagctggagcatggaggaagctgtggcctcgggtccctggtcttctggcttcctctgtgactgccccagagacttggggtttcagggcagggtcctgtggctctcctcccctgccctttggttcttcccacctgactcttcagacacagctacccagccccactgcgctggcctatttacctatgaggggcagtgaagctgggctgcaatgcagcgcctgccagcaggggtcactgggcacacactgtgctccctcccccgagttatgcacctgcctggacagacctcacccaccaactccctctggccttcttgctctctctaggtgtgtgatgcgctgctggcccaggctacaccccgacaagggacaccgggggccccgggagcagagagacctcagagcagcctcctcctgcctcctgtggacggccggccccagctggtgatcccagccagtcccagctttcagttgctgcccccaccgacagtcctcagtccctccatgatggctcccccgacagccggcccccttcctggcccagctcttccgcctgaggacccagggccggatccggagagcaggtggcttttcttgagcgccaacattctgcccgtgggtgagtgaggccctggctacccacaccaagccagagaacattgttcttctcctgctgagtgcgtctctgtttcctggagcccagggacaatacggttcagggttcagttcagtgaccctgatgtcccgtgatgtcacctggggagaactggggctctgctagcaccccagggcaggtggggccgccacgtgcagaggagcctggcgtgcaattcaagagctctcagtgtgtgtcccttcgtgtgggcagagagggggtgggttcattcttgggggatggctctctgcccacctgctgcactgggggggtctgggagaggtgcccctgcagctcacgatgcttccttcttggtcgtgttgtcactgtcagaagggcgaaggcctcccgatgtggcggacagctctggggtctagtgtggagactttggggtgtggagctggtcccctgagctcctgagcttctgctgggatgccctggagtggcaggcctgtggctggctgccctgc

SEQ ID NO: 5236 - DNA, 2061 bp, mus musculus
cctatgtgggggctggggagggggctgttggcagccatgccccagcaagcagggggcttgctgagggctgggccactgaccacctccccggcatcccctcaggcgtgttcaaccccaactcggaggaccccctgcccgggcagctcaagaagcagctggtgctccggatcatcagtggccagcagcttcccaagccgcgcgactccatgctgggggaccgtggggaggtgggggccagccccacacaggcgggaggggtgggagttgggggcgggccgggcatcgcgatgggccctgatgccacccccactcctgtgtcccagatcatcgacccctttgtggaggtggagatcattgggctccctgtggactgcagcagggagcagacccgcgtggtggacgacaacggtgaggctgggccgtggctccgtcacacctgtgatggaagtctgaggggggagggttggggctacctggtgtgcccgggtgccctgcccaggcctccctcagtgacagtcctgggcgccctcccctctaggtgggcagtcccggaagcagcaccgggagtggcactgggagtggtgtgggccgggggctccaggctggagcggtgctgggccgggccctccccatgggacactcctcctggcgctgcttccccagggttcaaccccacctgggaggagaccctggttttcatggtgcacatgccggagatcgcgctggtccgcttcctcgtctgggaccacgatcccatcgggcgtgacttcattggccagaggacgctggccttcagcagcatgatgccaggtgggcaggagtggacacggtgccccccacactggccgagggccccagggcagggcaggtactctttcccctgtgagtcagtgcctgtgtaggtgggcctgcacctggcaccaaagagacaggagctgaggacgggaggagagccagcctggggatctgcgggtcaggcaggggcatggcctgtgggggaggggccacccccaggaagaggtccctgcaggctggtgcaatgccaatgggcttcctggaggaggtggggtagtgctgggcccacaggaggcagaggccccaggcctgggcttgttgggtgtatctggggtcttgggacctttaagtagaatggggggcagagcaggtgggggccctgggaggctgtgacctcatgaccctgctgacccacactgctccaggctacagacacgtgtacctagaagggatggaagaggcctccatcttcgtgcatgtggctgtcagtgacatcagcggtaaggtgagtgtcaccccctgccaccagccatcatggggaggggccacaccagccccttgtcccatgcccccccatgtgtccccagtgctgggtcctgaactcaggcagtgaggcctagggtcccctccccgggcctctgctcctctatctcaagaggggctgctgtgggggcctggctcctgagccaccagtgcccacctctgatctcagggctggctttgggcatctcgggcaggacaggtcctgagtgctccgggccttgccccgccctgtgtcacccatgcctgtctcagactcttgggggccttgcagcctccacccctacagtgctgccatctggcttctcagcagggaccgagtgatgcccctctcccctctactaccccccacccctctacttcctggtgtcacgtggaaggcagctgcccgggtttgcctgtgactccacacccagcatgtctgtcccctgccccaggtcagggtggggcctcggcttccgcaggaagtggtcttggtgccagccctgctgccctggctttgagctggggcccagtgccctctgggtcctgctggctgcagctggccctcggggaacccgcacacacagcaggaggggcctgcccaggcccagtgctgactctctcctgccatgctctcgggcccagaggtgccatccagcccctgccgtctatccacccatctgttcctcgtcccccaggctgcagggctccccacgccactgctgtggccgcctcacctgctcc

SEQ ID NO: 5237 - DNA, 575 bp, mus musculus
cacagaccctccacctccaccatatatgaccccaccatctctaccacacacggaacctccacctctaccacacacagaccttccacctccaccacacacagaccttccgcttccaccttacatgaccacaccatctccaccacagatgaactctccaccttttctacaaacagaccttccacttctaccacacacagaccctccaactccaccacacatgaccccaccatctccaccacacacagaccctccacctacaccacacatgaaccctccacctccaccatacatgaccccaccatctctaccacacatagaccctccacctccaccatacacggaccctccacctccaccacagacagaccctctacctccattacaaacagaccctccatctccaccacacatagaccctccacctccaccatacatgaccccaccatctctaccacacacagaacctccacttccaccatacacggaccctccacctccaccacagacagaccctctacctccattacaaacagaccctccatctccaccacacgcagaccctccacctccaccat

SEQ ID NO: 5238 - DNA, 2014 bp, mus musculus
tggtggttgtggttgtggtaatggtgatactgataatggttgtgatgatggtagtggtgatgatgatggtggtgatggtagctaatatctattccggactttcaggacttgctctttgtcacctgctgctgaaccttttccatggctaacttcatccaccccatgagacaaataccatggctagccacctttaatagctaaggcactcagtggttagaaaatttctcaaggtcgtgcagccaatactgagatcccttctagctctaaaatgttttagctctatggatgaaagtaaacgcctgagtgcccttctaagaattcttgggacttgggtaaaaacacctgcccctggcagcatccacaggaagttccatgagaggtcacaggaaggaagggaagaacaagaggacaggggctggagggatggcgggggagacgtgaggtaaatactgtagtaagcaggtgcaaagggaaagagacagagaccagaccagctgccaaaggaggcagaggggacccccagcctccctagggaggattaggcctttgtcaaacgtttgatgcaaacccgtgctctggcagcattcagcgggtaatgtatgctgctaacaagtatcaaagcctcgtggaggggtcctctgaggagatgctgtgtgaacaggtcatttcgttttgtgccattagccactgtacttcactggaataagtgcaccctgcaaagcccagaacttcacactccagctgagaaacttgcacacccacaactagaagacaaaacataatgacattccaccgctctgagcaggcttccacacccctagtcaatggagccccggtccctggcacccctaagtggctttaagcacttgacgatagactgctggccctattgctcaaaaataatacccgatgcactcgggagacaggctgcaatccaataaaccaacagccccaaagtcagcaagatcataatttggaaattgttctccccctgccccagtctattccacagacttcaaattgatctgtctaatctcttatctgtagctatgaaattgtatttccctcttaataggcctacaaatgttatagatgaatagttcaatagcaggcaaagagggaagcagcaggcatactaaaaagggacattagctcctcgcacccttgttttttgagtcttgctctgtcacccaggctggagtgcaaaggcgtgatctcagctcactgcaacctccacctcccgggttcaagcaattctcctgcctcagtctcccaagtagctgggattacaggcatgtgccaccccacccagctaatttttgtatttttagtagaaacggggtttcaccatgttggccaggctggtctcgaactcttgacctgtgatcttcccacctcggcttcccaaagtgctgggattaccaggcgagagacaccatgcccggccaaattcccattgttttaagccacccagtttgtagtcctttgttatggcaaccccagaaaactcttacacactccaagctgggttaagtccctgcacacacactgcgtgccccagaaccaagcctcgccagcactgtgttgatgccatttcctccggcatgttgacgtcaccaccaccacccctccccatgcgtcatattgacgtcacttcctccaccatgttgatgtcacttcctccaccgtgttgacgtcacttccttcctcagtaaggtgtgagttccttggcagagggtctgcttgtcgtcttcgttggactgccccacccagagcctgggacacttcagggacacatctactcttgtcctgtgggttgaataaaatggaacagactggaatttctagggctgctggaaggacctcctgttctcagatgccaaaaggaaacttctgttccccgtgtcctctcttctcatgggtcaggagcccaggcctccctcccgaagctggcagggtgaccccccactccttttgacaagctctcagtttttagcccccgccctccacagcc

SEQ ID NO: 5239 - DNA, 1201 bp, mus musculus
ggctggctccatgtatccagaatcaacgacgggctccccggctcggctctcgctgcggcagacgggctcccccgggatgatctacaggtgaccccctgccccctcacccaggccccctcccagggtcagtcctgcttcgaggacgggttcccaaggccactgtcctcccctctggaggtggaagggcccaagcagggcccacaggcttctgccttccacggggttttgaggtgcacgctggtgagcgttttctccaagaaaggagcaggggctttaaaaacccaagtgggaaagaaaaaccaaaacttttccagggcgtttgagccagagtagactcctttcttgtccctgacccttccgaaatatctcgtttgaggttaacagagcggccggacagtgagtgcacggccaaccccggcatcctgttcctcccactttatacatcgcagcccctgtggccctgccagtttctcctgagcgaggatgacgaccttgcaggcctttggggaaccacgtctgccggtttcccaacactggagggagtgggggcggccaaatgctcctggggcatcctgaccccctccttgtggaactcacttccgcttgcagccctgggtgtttctgtctgcaccataaacagcgctgaacatcagcgacagctgcggagggcgttcagtgagagctgagcctctggggacagagcatagaacccacgaaagacgcaggcacaggcagtaccccagcagcccatcagtcttgggaagccagacctttccggataatcactggggcctgagccagagcccgtgtctgtgacagccacagggaaaggcagtgtctgtcctaagaagagccaggcgggcaggtgcgggtttgccagcacgcgggtgctctgcacgtctgggttggagggttttcagccattgcccacaagcatattgcaaagcaagtcctgaagcacattcaatccaaaccaaccctcactcggaggttcaccacggaaaacagggcctggcatggaaggagcccttggtgtccaggaaactggctccgggtctctgccccgtggccaccgggtggcgctgctgcagagcacttggcaccggctgcgcttcctcagagactgccctgagcaggcgactggtgggggcccgggggcatgggacattggtggttctttctgacctgcacctgctggggt

SEQ ID NO: 5240 - DNA, 1201 bp, mus musculus; identical to SEQ ID NO: 5239

SEQ ID NO: 5241 - DNA, 1201 bp, mus musculus; identical to SEQ ID NO: 5239

SEQ ID NO: 5242 - DNA, 636 bp, mus musculus
tgaactccagtaagatcacagactgtttgctgggctcgggtccagcacgggaggggctgtgttggctggaagctgggcagcgccgcgctaacgtggggcttgtgttcctctcgcgtaagggaattggagaagcagagggaaagcgccgccaccgatgtgctgcagaagaagcaagaggcggagtccgctgtgagtgctgccccaccgttcccaagcgagggctgtaggggacacactccacaccccacatgttggtctcagggccttagaggtcagacttctcttctccaacaacttggctctccacttagtctttattgtgggatgcgacactgggctctgcagtccctgccctgaagataattaccctccaaaggcctaacaagggcttttttaaagtggtgagtattggcctctttttcttccctctgagtgttctgccttttactgagcaggagggagcaggcttcctgggtatgtggcgagcatactgccaggtggccatgggccgtgtgcgcggcctggcgagcacatgcctgtctgagggggcggcacagctatgcccagcagaatggcaccacaggagaacacaggtcctttctcaagaggagctgggattccagcttctcctgtgaa

SEQ ID NO: 5243 - DNA, 1210 bp, mus musculus
gtcaggtgcctctgcccagcagtggcagcccaacactctgtgtcattgggagtgtacttaaatcgcaaggaaagttataacaagggggctggtgaggtgccaggtgcagtgctcgcccttctggaagtttcctggaagagggatggagacgtctgtgcaatcccgagcaggtcgggggtgccagcaacacagcctggccctgggaccattgcttccaagaaggtcactttggtttttacttgaccatggtttgttgcaaaattcctggcaccagctcagctcggccacgtctcggctccctggcgcctctagagagaacgaatatgctaaagatagtgaggcgtcttctctgggtgacctcgtgtgaccttgcaatcccgtcaagtctttggttctgcagaaacaactgtcagatcgggagttagtcacctccaaagacagaaaccaaaaaccaaaacagtgaccttgttctttctgttcatgaccctggaggtatggggggaggaggaggaagcggagattggttttgctcgttaactcattatcagtgactgagcggctactcatggctgggaacttgttgggtgccctccattacacttcccttaatcctctcaatggcttttgatatcctcaggtagatgggaggatccccattttacctgggagggatacaaggccaagaggggttaagtaacttgcccaagatcacacagcgtttgaagtggccaaggtgaaatttgatctaacttccacttggatgtgtgattccactccacatccaagttctttccatcatctggctgcaggcaagataacagattggtgtattctttctatcttatttgaattccaaagttagtatccgctattgaaaacagctgacttcattataacccatcattgactcctttctttaacaaataaccagcaaaacagagcgttctttcggagtaagccttccaccacctgaactttgacaactttctccctaatgggtttctccctgtgagtatttgatcttggccaccagcatgagcctatcctggtgatctcaaaatgctgaggtttttcttctgttaagagattgaatcttctgttccatgtggaggcttattcaacattaaagcgttcctgaaccatttcatttattcaacaaatattttccaagcccagctctgggccagatgccaggctcaaggcttagcaa

SEQ ID NO: 5244 - DNA, 799 bp, mus musculus
gatggtgtttgaaggtagactcctgaggacttgagggaaggaaggggttaaacaaggcactgggcaagcgtggggcagacttctcgtcaggaaatctggtatttcaggttggactggactttggagatggctgctcctttgttcaagtgaaaaaatgctttagatctggctgcgctctcagatgtgacttgtacaaaatgaattctagacttttctcgcatcaagaaagtgaagtggggccttccggtaacttgaacagactttaccccgggaatcccagacagcagcatctccgattccctaaagtgtgcacaattacagctgtggcaaccgaccctaggaaggctcagcaccacagcgaacccgagaatattgggaataaacttggaaatgtggagataggttcaacaaacctttgggtgttcagctgtttttttacacaaagccgtttatttagtattagattactgtgagatttcacattttctgtgagaggaattcttaagtaacagtgatagtgaagttgccaggtttacctccacatgattttgttttcttagtctctatattttgggattcatttatttatatttctccaatgaccagcacctatcctgtagattacttcttgcagaaactttttttttttagttgcttcatttaacctgtgactaattggttaaataaaaacaacatgtactcctcgtatttacaagtacatttcgttctgggccagataaaaaggagtaaattacactgttcattcctgtcgttttttatccctccctttccttcaaaa

SEQ ID NO: 5245 - DNA, 829 bp, mus musculus
gaggtgctcatgtgggcagggccgccctgtcttctgtgtggtgggggttccacctgtccagagagaattttgaacacatgttcctggtggccaccttgaaataagtcgttcccagtcttcttttacaaaaaagaaaggacttcctaggcgtgtggatctgaactgacccatgttttttcatttcaaatgtattttgcattttgcaaagtcttatctcactccctgtggcacagatagtgtcctgtggccacactgtgggcacacctgaaatggaattctagccttagctgctccggggcctcggaaacaatgccctgaatttgttcctctgaggttggcgtcgacacggggctcatgccgtcagataagaagacagacccttgcagcctccgtgcggtgtttccgagagcgcattcccctgagcagagcagggtctgcgctgtgtgatgggggtgcggggctctgatgaggggtttgtgggctcttcccaggtggccaatatcctgctcaacggcgtgaagtatgagagcgagctgacgggctccagcgagcgcgcggagcagcctctgtccgtggggcgcctctgctccaccatctgcaacatgcccaaggcgctacgcaccctctgcgtcaaccacttcctgggtgagctcccggccaagcctccccgtgagtcctggtcctgctcagggctctcgccccactggcctcccaggatgcccctgagcctcccttcccagaacctttctgagttcaccagcccccaacaacagcaccaagggcaggcctggggtgtggtggctgccctggagggcttttctccagggtg

SEQ ID NO: 5246 - DNA, 6047 bp, mus musculus
cctcacacatacctcctgccggcagaccccctgctgctccagggaggctcgcaggagaaaggtgccgtaccatagccagccttcttcttcttcttcttctttttttttttttttgagacgaagtctctcgcttctctcccaggctggagtgcaatggcacggtcttggcacactgcaacctctgcctcctgggttcaagcgattctcctgcctcagcctcctgagtagctggtattacagttgcctgccaccacgcccggctaatttttgtaattttttttttttagtacagacggggttttaccatgttggccaggctggtctcgaactcctgacctcaggtgatccacccgccttggcctcccaaagtgctaagattacaggcgtgagccaccgcatccggccccttattctcttcttagccagtctcttgtttcagagcagcctatggacggggggagaagacggatttcaaagacacttttatttttggtctttatggtctgggtttgatttcatattaagtccctctgtaatctaaccttccataacttaaccttttccagactgatgtcttttgacctgttggtttcgtgcgttgtctctagattttctagctctcttgctcagaacatccacctggagaaacaaacaaaaataaaaaaaaacaccttcgcagtatcttttgaattcccagctccaaagctatcttctccatgagagaattcataaatcagggcaactgatctgatttgcgcatttgaggtttcttatatactcatttcccaaatagttcctgcatgtgtgctaagcataattccaggtactgggaattagagaatgaaaaggccactttctcacagtctgcgtgtgtgtgtgtgtgtgtgtgtgtgtgtgtgtgtgtgtgtgtgtgttggggaggagaaataacaccaccaccttttgatacttactgagtgccagacactcttctgaacattttatatgtaatgaactgtgattgcatgtttaatcacacaacgacctatgagatggggactattattgtccccattttctagatgaggaagcgaaggccctgaggtcgcgggccctttggagcccaggcaggtcccacccaggcctttgggcactgggctccagtgccctcccctgccgtcttctccccaggtgttggaacagagggacagagcgaggttggtgagagcagcaggaaggaccttttcaacagagcccgagtgagatactgagtccctgaaaccctggcaggatgcgagagggcagaactgtaacaatattaagacattatttgccgttttctcatcctcttaggctgcactgtggcattttctagagactatgttaaggggagcaaggcagcaggctgagtgcagggggagcgggggtagagacgagaactcaggtgtcttctgtgaaggtggacaacaaagatttgcaaaaacaaaactgttgccactcttcttagtaagctttgttttcaaaaagttattttcataaaaatattgtttatgtgaatgtattatataatgtgtttgttttttaaatgagttaataagtattaaaattatcttttttgttgtcgtcgttgttttttgagacatagtctcgctctgttgtccaggctggagtgcagtggcgagatcttggctcactgcaacctttacctcccggtttcaagtgattctcctgcctcagcctcctgagtagctgggactacaggtgtgtgccaccacgcccagctaatttttgtatttatagtaaagacaggaggattttaccatattggtcaggctggccttgaactcctgacttcaagtgatccgcctgccttggcctcccaaagtgccaggatcacaggcttgagccaccactcccaggcttttttttttttttttttttgagacagtctcgctctgtcgcccaggctggagtgcagtggtacaatcttggctcactgcaacctgcacctcccaggttcaagcaattctcctgcctcagccgcccgagaagctgggtctacaggtgcgtgtcaccacacccggctaatttttgtatttttagtaaagacaggagggtttcaccatgttggccaggctggtctcaaactcctgacctcaagtgatctgtgtggccagcctcccaacacgctgggattacaggcatgagacactgctcctggactggttttaattttcagtgtagtaaatgctgatagatagatagatagatagatagatagatagatagatagataaatgctgatagatgatagataaatgctgatagatgatagataaatgctgatagatagatagatagatagatagagataggtgggtggatggatggataatcaactgactgaccaatccatttaaacaaaagctatttgggtccctcagtaactttttggtgtacaggggttctgagaccccaaagttgaagacccattgttgtagaagcttccctctggctgccgagtaagtgccgggataaggacagggaggcttgttacttggcttttgtgacctttcaggaaggaggtaagaaatggctgtgtctgagtttgtgtgtatgtggatttttttttttaaatgtaaactacagcaaaattttcctgtctaccattttgaagcgttcagttcagtagcatcaagtacattcacactattgtgcaaccaacctccaaattcctttcatctcacaaaaccgaaattttatacccattaaacaacaactccccggggtctgggtttatttaggaagtgaagccagaaggatttgctcttggcttggatgtagtgtgtacaaatgtctggtaaatgtttcattaattagagaggaggcagcggcttggcgcagtggctcacgcctgtaatcccagcactttgggaggcgaggtgggcggaacacgaggtcaggagttggtagaccagcctggccagcatggtgaaatcccgtctctactaaaaatacagaaactgagcgtggtggtgagcgcctgtagtcccagctactcgggaggctgaggcaggagaattgcttgaacctgagaggcgaaggttgcagtgagctgagatcgcgccattgcactccagcctgggcgacagagcaaggctccatctcaaaaaaaaaaaaaagagaggaggcagctttgttctggtctgtcttccttccagatgcaagccttcacacgcctactctgagccttacacgtgagcgtgacccccctccctgggtgccactctggggaaagtgcaggtacagcagaggtagcatcacatcctggaatgttgcacgaagatccttctggattgactcacacttaacagaacctgagtggttcattcaataagtaggccccgtctacttggaaacaacgttttcaagccatttctttccatcttttcagatcagcttaatcgaggagtcccctggttcattcatagtctgaggttataatggaagctgttaaccctcttaaggtgaacataaaaggaaaatggaaatatttgagctgtggaacagggcccccagtgtgcgtgtggagatactgctggctcagggagggattcatggctaccaggaggacgtctgacatcgacacttaggagccgagccccaggcaaagcaaagcagacaggggctaaatgatcatcttctcagggaagtgaggtcagcagcggccagaaaagcaaaagtagcagttctggtagagtcccaatcaagaagggacaagatagcacttctccagtgatccgggccatcaccgagaggagggtgggggtgtccctggtttacgaacgaggaacttgagatcagtttgtcagaggcatttgaaccagagcgactccatcttgaatagggtctgggtgaaataaggttgagatctattgggctgcattcctaggaggttaaggcattctaagtcacaggatgaggtaggaggtcagtacaagacacaggtcacaaagaccttgcttataaaacaggttgccataaagaagcccgccgaaacccaccaaaaccaagatggggacaaaagtgacttctggtcgtcctcactgctcattatacactaattaaaatacattagcatgctaagagacccaccagcaccatgacagtttacaaatgccatggcaacgtgaggaagttactgtatgtgctctaaaatggggaggagtcctcagtttccgggaatttcccatatctttccgggaaaactcatgaataatccacccttcgtttagcgtgtaatcaagaaataaccataaaaatagccgaccagcagccctcagggctgctctgcctgtggagtagccattctttcttccttcactttcttaataaagttgctttcacttgactctgtggacttgccccgaattcttactgcatgaagttcagtaacactgtctcgggggctggattgggacccttttccggcagtaagttaatgtacttaattaaggtcacacagctcataatagagggaggctggaattggaccccaagcctaactcaaaagtggattatttttttttttttgaggcggagtctcactctgtcgcccagtctggagtgcggtggcgtgatcttggctcactgcaacctccacctcccaggttcaggcgattcttctgcctcagcctcccgagtagctgggattacaggtgtgtgccaccacacctggctcatttttgtatttttagtaaagacagggtttcaacatattggccaggctggtcacaaactcctgacctcaggtgatccgccctcgtcagcctcccaaagtgctgggattataggcgtgagccaccacgcccggatggattattcttaaacactcttgttttcagtcaagtggtgggtttttctgaaattctgcagagttttattttaatactttattgtgttttgcatctttgctttacattattatttgtaatacaaatttaaaattaatattgggcagctgggtgcggtggtttaatgagtgagtgagctgagatcctaccactacattccagccttggcaacagagaaaaaagaaaaaataataataatactggggccaggtgccgtggctcacgcctgtaatcccaacactttgggaggccaaggcaggcggatcacttgagcccgggggttcaagaccagcctgggcaacatggtgaaaccctgtctgtacaaagagtaaaaaaaaaaaaaaaataagtcaagtatggtggtgcacacacatagtcccagctacctgggaggctgagtgggaggatcacctgaacctgggaggttgaggctgcagtgagtcatgattacaccattgtgctccagcctgggtgacagagcaagactctgtctcaaaaaatcataaagaagtgaaaatacctttctttgtaacttttcagtgataggctgaaaacagagatagtcttcccgtagccatcagtctttttttttcccttgatttctagagcaatttatttcttatttctggttgcttcatggattcagataatttcaacattacttattctggaatttagaatttcatctcatttgggtcttgataccaaattttgcgacagaactgtgagcactgtcttcaagcctaatgagagttttattattttaatagcaggtgtgtgtcttcaaaagtagtggagttgaaaataatatttctaaccttgtctatttttttctcttgttttaaacacagttaacaagcacaagccctggctggagcccacctaccacggcatagtcacagagaacgacaacaccgtgctcctcgaccccccactgatcgcgctggataaagatgcgcctctgcgatttgcaggtaggaacggggctttcattgactcttgatgaatcgggcctggtcaggaagcattctgcacatcccatttgggtaatgctgagcgtttctgaaaatgtctccatagctgagggttatttgtagcgtcctttgtagcatgtttttttttccttttaatagttggggtagctgacaaaaaggc

SEQ ID NO: 5247 - DNA, 1056 bp, mus musculus
aggacgtcctgtgcaattaattttttaatggtgtgctagagctgctttttgagacaatctgtcttaaattacatttgcctatttttagctcatattgtaaattgagaggaagaaacatccttagcttagcctgacttaaagccagataacaaccctgaagattctaagggcagggctgcctttgcaagtggggattcacattttcaaagaattcccagaagtcctaagacaaagaattccagcctgccgtcctcgccacggagcctgtggggcctgctgctgggtctgtcccaggctttcttctctgttccctccccccagcagtagctgacaaagaagcgccttccccttacaaaaggcaatgtatatgcctttattgaaggctgatttccttctaaacctgggggcctcacaggggccctttgattgctgttcctttggatagatttttcgctggtagaacgggctttgttttctttttcagtcgtgggctctcagtagattagagtttgctttgctttgtccccgcagaccctctgatggacaccctcatgacagaccccgtgcggctgccctctggcaccatcatggaccgctccatcatcctgcggcacctgctcaactcccccacggaccccttcaaccggcagacgctgacagagagcatgctggaaccaggtagaggagggtgcagtttgaggtgcagcgctggcgtcagtaccaagagataaagcccaagtcacatattggagatgaagcagaagggaaatttatcaaatgcagaaactacctactttatgacactctgtagcaaagacccaaaacactcttggccctttttccctgcagacatccagtccctccctctcatgtcccagtccttctggagtcttcggctcaatgagggaaagaatggccttttcttcccatttatacagagcgacaagcatcctctctcaggaagagccctcccatctggggcattaatcctcctttttttcttttctcagtgccagaactgaaagagcagattcaggcgtggatgagagagaaaca

SEQ ID NO: 5248 - DNA, 1102 bp, mus musculus
gctggctggcttctctgtgaccccacgtctccccgacagctgcagttgaactacctgggcaactacatcccgcgcttctggaccttcgaaacaggctgcaccgtgtgtgacgaaggcttgcgcagcctcaagggcattggggtgaggctgcgcccaggcctgtgcctgagggacacggggggctcagtcccctgagatggcgagatgggtgattctggaatagactccattgtctttggtggaaagtgaaggggtcacctccctgcctggggttctatcccggttgccacccaagtgcctcctcctggaagccctctcagattgcatgtctctagcttcccccgagatgtccaggttctggtttcttctgcctggtccttcaggctctcctgcagccccctccccatcccatgaacctcatcctcatttatgactcacctcgaacaccacgccagccacgatctcctgacagcaggccctcaaccgagtccttgttccaggcctgggctcctgctgctctctccccggggcaccctcctgctgcttccctgcccccccgtaccccctgactggagttccccggcccgggcacctttcttgggaagtctacatgcttctgattctggctctgactcccttgggccaccctggggtggagtggcagtgctgtgactggacactgctggactcttgtgccgccctccctggtgcaggatgaagctctgcccacggtcctggtcggcgtgttcatcgaacagcccacgccgtttgtgtccctgttcttccagcggctcctgcggctccactacccccagaaacacatgcgacttttcatccacaaccacgtgagtaacaggcgctctgtggggtcgtcatgtggcttagatccagggcccagcttcacaaggtagcccgagacctctgagggtctcaccgaatctagcttatctgggccaaatgacaatcaccagtggactgtgtccccaaatcactgagttaactttggagtcagactgggtgagtttgaatcccagcgccgctattttattggctgtgtgaccttgggcacattactcaacctctctgtgctttagtttctcat

SEQ ID NO: 5249 - DNA, 592 bp, mus musculus
gtcatctaactatagccataacatttcaccatggtcaactagaaaaagcagttgaggtattgtgatttgtcaagccatgtgggatataagaaacaattcataagaaggcctattgctaattttaatcatgtcagaagaaggaaagtttaacaacattgtccagggagtgcggcttcctctggcgttggtttctctctctgaaagtagacataatcctgactggcataagagaatgttaatgaggcttcagtcttgctagtaaatttttttgacatttgctctcagagtagcatgcataaaaagagtattattaatatttagctttccatagtgccatcattatgcattgcatcatgaaatcaatctaggagacaaggtccccctccagtctgcatgaagcatgagtttgttgatatttttagatcaggtacccgcagtaagcggaaatgaagctctggttttctcattgtaagggggttttagttggttgtcgggcatgctgcctctttgcctctactaagcacagtcttcacggattttataatgaggagccaggtggcatgaagaacattcattattaagaataatgaga

SEQ ID NO: 5250 - DNA, 1142 bp, mus musculus
catcattgcagaaagttctaccagacagtgctgccccaccacttggtaaccctctcacaggaccatgaaggatgttctggaaggaaataaattagaggcaaggaggcgtcacggccaaaggtgctcagggcctagcctcagaccatgtgtattagtccgttttcacaccgctgttaaagacacacccgaaactgggaagaaaaagaggtttaattggacttacagttccacatggctagggaggcctcagaatcatggcgggaggcgaaaggcacttcttacatggcggtggcaagggaaaaataaggaagaaacaaaagtggaaacccctgataaacccgtcaatttcgtgagacttattcaccatcaggagaacagcacgggaaagtccggcccccatgattcagttacctccccctgggtcccgcccacaacacttaggaattctgggagatacaattgaagttgagatttgggtggacacacagccaaaccctatcaccatgcacagaggaggagctcaataaataaatctctgacagctggtgccaaaggcctgctgtgtggcagtgatatgaagaacaggactgccagagctggggctgggggcggggaggccagtcattgagaggaggagccagaacagagcccaggacagcctctgctttcgcagcatttgaaaaacgtccgccgaaacagaagctggggtatgtttacacctgagaggatgtaagtgaggaaactgaggcccagcgagcttagccggccttcccgggaaacagctcactggggactggctgcaccctgccactcagaagaaagctttacaggttgctctgggtgttttacatgaaatctgtgtgacccctctctagccccctaataaaccacttgtgaggctgtttcagaacaaaatcctctcatctaggagagtttgtctcatttcctgcaagtgcctgagccctggctcagcagatgcccaaaatgttcatggttcagacatgaactgagcagctgcagggtcctgtaatggccagcagagggcagcaccgaacacgcccaagctcacctcgagttgcccattactcgagcaagcgggggaaaatgggcaagtttccccactttaaacgccttcttttgca

SEQ ID NO: 5251 - DNA, 2127 bp, mus musculus
tgctctgtgatcctgggcaggctcctgcccctctctgggcctcagtcatctcatttgcacaagggagagaggcctgaatgttcccaagagctcttcctcctctgagctctctgcctcctcttccagccaccctgtttcttctccttccctcctccatgccctggggcagagtgggggcacttccctataacactaagcttggtgcttcctccccatcccaccccatccctcagcagcctgcctccaccctgaggcctccctggaagagggggtgtgggcaggaagggtctaagacactttctctggagaccctcagctgccagaagcagcacctactatggtgttacggtgtttggtgcttcacacctgtgtcatgtagttctcagtggccctttagtctttaacgtctttagtcttcaatgagcctgtgaggaagagcccatcacgagcccacttggcagatggggaaactgaggctcagagaggctgagtggcttgcccaaggtcactcagctaggcagtggtaaacctgggatatggacccagggtcgtactcctgcctcttcttgggggtctgcacctcactgtgtggcctggtcctcccctcttcgtgactccatttcctggtcagtaagtgggcaccacagcgtctggccccgagggctgcagaggctgtgggtgcctccctgatacccggctgtccccagcgcaccagtggctgtacagggagattggggacagccacctgctccggtatctctcctggactgtgtaccctgtggccctcgtctctttctcttcaggcttctctcagagcatcacaccctcctctggaggtgagtccacagtcgctacgccagtccccactggccaaaaccttctcagatcccaggggggagtcgggaaggggcagcctcatttcacagacaaaggcccaggaagagtcatgtggcttgcccaaagggacacagcaagaaggccagatcttgacttttgggtcactgctggccctacctgctttccaggggctccgctgggacttgatgggaggcctggtgggaggatcttctgcgaagcctgttccagtggccagtgccagggaggggccagtggaggaggcacagctcccccaggccgctcagccctgcctcctgctccaggccagcagaggggagctcaaagctcactcagtggtggcctgagatttcatccgggcttcccctatcctgccacagccttctgccaggcctggcgggaggaacgtgaacaactcacattccctctgtgatgctcggtgtccaaatctgctaaatgagtttaaggaccttaccctaggctgggtgcagtgactcatgcctgtaatcccagcactttaggaggctgaggcaggaggatcacttgtgcctagagtttgagaccagcctgggcaacacagggagaccctgtctctacaacaaatagaaaaaaatcagctgggcatgattgcatgtgcccgtggtccgagctactcaggaggctgaggcgggaggactgcttgacctggggaatttgatcctgcactgagcagtgtttgcaccactgtactccagtctgggggatagagtgagacccctgtctgaaacaaacaaacaaacaaacaaacaaacaaacaaaggaatcctaacccagctgggcacactggctcatacctataatcccagcactttgggaggcggaagtggacagatcgtttgaggtcaggagttctagagcagcccgggcaacatagctagactccatctctttagaaaaataaggtgggcgaagtggtctccacctatagtcccagctattcaggaggctgacgcaggaggataacttgagccctggcaactgaggctgctgtaagctatgatcctaccactgtactccagcctggccaacagagcaagatcttgtccccaaaggaaaataatcctaacttcagagggttctgctgatctggcgagatcgtaatgtgaaaacatcacacaggtagagtgttgagatttttaacctagagattgtccccctcctggccctgcccacccccgccaaggttctggaatcccggaggtgaagaccatgttggcgggtgtggtcttggag

SEQ ID NO: 5252 - DNA, 787 bp, mus musculus
tttgtttgaatctcgatccatagacatttacaaaacgtaaatgtttgctttgtcttttttttctttttttttgagatggagtcttgctttgttgcccaggctggagtgaagtggcacgatcttggctcaccacaacctctccctcctgggttcagcaatcctatggcttcagccccctgcgtagctgggattacaggagtgcgccaccacgcccagctaacttttgtatttttagtagagatgggggcttcaccatgttggccaggctggtcttgacctcaggtgatccacctaccttggtctcccaaagtgctgggattacaggcccaagccactgtgcccggcccctgctttgtcttttaagtcccttttaacttatttgttcaggaaactgggctagttgtccttggagattctcatggtctggattttgctggttgcatccttatggtgtcaattaacatgtttctttatcccatgtatttcctgtaaattggatgttggatctaaagctaggtcagattcaggttcttctgcttgcttttttgtttgatcaagactccataagtagaatgtgttcttccagcaggatgcccctatgccagctgtctctcttttcaagatccaacccactcatcaaaggctgcaaaactgtgagcttctcatttagtcactcctgtgtatattaattagaattctggaatgaggcactttctctccttactattagataaccagtggtactgttcattcaggaaaggaaaggatttaacctgtattatggact

SEQ ID NO: 5253 - DNA, 1090 bp, mus musculus
aggagggcttgtacctcaccttccatctgttctcccctcctctgggccgaagccccacacaagcagctccccaggtccagggatgtcccagcctcatgggttcctggtctgtgccctttggttccatgctgggtgggtcccaagcaggggaaggtctcagctgttgtctagtgtgtaccccgggccagacccagtgctacccatgctgagatggaaagaagcccagtgcccccagagaggtcacaggctcttggggagggcaacagttataatggggctgtgtctgcaggcatgtacctgtcccagcaccacccatgctctttgaaaacagcctgttggccccctatcagctgcacctctgagccactgaatcagaatctctgggtgtgggcctgggacataaatatttttaaaaagcttcacaactggaaaccactgtgtgaaatgggtctaaggaagctttgcagaggagaaatggggtctggttttgatgactgaacaggaatttgcttgctggttgtgagagagaattccatgtggagggaacagacagcttaagcaaaggcctggagatgtcaaacaggtcaggtggcatggtcatggggctgaaagccattcgtgagagccagagcagagttccaggccaggcccggagccgatgagatccgagaggtcggtggagggggcgaatcttggagggccttgcttaggacccaggctccattctgacagtgatggggaagggtttgaagcaataaggtgatgtgacaggtgtgtttgcggagtgtctctgtggcagcggaggtggcaggtgggttggcctagcgtgtgtctaatgagagttgaaagccagagagacctctcagagaacacaggtacgtggaggagttctggtcctgaccagcccaagcacctggtctttccccccattccccaccttctttctgcttcaggaggtgggccctgcagagggcctctgaggccagagcttgacaagcgtgcttgggccagaaccgattccttgcttctctctgggcagggctgggtggccgctgcccagctcatcccagcagtccagctgctgcttccc

SEQ ID NO: 5254 - DNA, 976 bp, mus musculus
gcgatggagctaagacaggggccagccttcctcatgtccagctaagagctatagttttctttccagctcacaacttaggtcctttctctgtgcatcatggcttcttgccacctgagtttcttctacacccacccagcagccagagtgagctttctaaagtgaaatcaggtcacctgctgcttgaagccctccatgggcttcccactcacttgggatagaacccagtctcccatcaggcctaggataccctgtatgctcggccccatccacctggccagcctcatctcctaccctctccctcttcagcttcctaaacatcagcttccggacaccttggccttctcgccaagcttgttcttacctcaggacatttactcatgctttttctctgccagatacattcttcttctaccctggtgtcagatcaaatgtccctctgcagagatgctttccctgactgcctcacctccacccagaatttcccacccctgtgtcccatcattcttaacccattgatccgatttgtttgcttgttttttaaagcattgattactacccagtaagactcatttatttatctgaatatacattttcctttttccctctcatatcaagcaccccgaggataaagacttggtccccctgcccctcctctgtccccctagctttcagaatggcaccaggcagcccctccctagtcaggggccaatgtagatttcatatacggataagcgaattcctgatcagagggcctggctgttgggccatcagctggcattgagcagagaggcctgggttctagtcctgatcctgtgacagagccatagggtgagctggccagtcacacaatgtgtctgagcctcagtttcctttttgtccaatgcacaaatgtgtttgtgctggatgatgggaagccccctcagcttcacttatcggccccttcctcggtgcacgattgagagaaacaggcaataga

SEQ ID NO: 5255 - DNA, 534 bp, mus musculus
ggagacgacgtgcagaaatggcacctggaaaggggaaggaaaagaaggaagaacaggtcatcaacctcggacctcaggtggctgaaggggagaatgtatttggtgtctgccatatctttgcatccttcaatgacacttttgtccatgtcacggatctttctggcaaacaaaccatctgccgtgtgactggtgggatgaaggtgaaggcagaccgagatgaatcctcgccatatgctgctatgttgaccacccaggatgtggcccagaggtgcaaggagctgggtatcattgccctacacatccaactccgggccacaggaggaaataggaccaagacccttggacctggggcccagtcggccctcagagcccttgcctgctcgggtatgaagatcgggaggattgaggacgtcacccccatcccctctgacagcactctcaggaagggggtcaccgtggtcgccgtctgtgaacaagattcctcaaaatattttctgttaataaattgccttcatgtaaaaaataaataaaaaa

SEQ ID NO: 5256 - DNA, 534 bp, mus musculus; identical to SEQ ID NO: 5255

SEQ ID NO: 5257 - DNA, 3698 bp, mus musculus
aaatcacatatttggagtcagaatagcagaactgttaagagcatgggctttgaccttaaaaaattctagaggggagagtatggaggcaggagggggccagttaggaggccaacggagtcatccaggggaatgaggacaatgaccgagtggtggacagaggacacagatgggacagacttttctcagggagaatggagttgacttgggaagaggttgagtgttgcgggtgaggcagaggcaggagctcactatggctccaaaggttcagagggggaagagagcgtaggagcactgagataccgttactaggacagggagcacaagacttgggccaggagatggtgagaagctcttgcatctgcagtgttttcaagacacggcccccacatacactcagtggtcccccatgagtaaacttccttcatgccttgggtcttagctgtttggggtttttgtttttctgtctttgtctgtccactggactgaacagttgaacatactcaactccttgggggttaccgccaggaagccttcccttatctgtcctccagaccagggcattgttccacctgtatgcccagcgacccatctctgcaaccaccacactgtgcaggaactctccatacctgctacccctccagtctgagctcgggagggcaggggctaccttgttcatctcagagttcccagtgccttgcacacagctcagtatagcaaagatacctggtaaaggttcgtgaaaagaagaggtaggttaatgctggctttgtcaacaaggagatggtccataggctctggactcagatctgggttcaaatcttaactctgccactttccagtctcatgtgacctcgagcagtttatttaacttccctaagcctcagtttatttatctgtagaatggggctaatgatacccatgctgcagggtgattgcaggaattaaatgagatgatgtagccgggtgcagtggctcacgcctgtaatcctaccacttttggcaggtggatcgcctgtgctcaggagtttgagaccagcctggtcaacatggtgaaaccccatctctactaaaaatacaaaaattagccaggcatggtggtgcacacctgtggtcccagccactcaggaggctgaggcaggagaatcgcttgaacccgggaggcagaggttgcaatgagccaagatcgtgctactgcactccagcctgggcaacagagcaagactctgtctcaaaaataaataaataaataaataaataaataaataaataaataaatataaataatgagatgatgtagacaaagcacacagcacagtgcctagcacatagtaggcactcaataaatggtagtggttgcttgctgaatctctgagttactttctttgccctagttgtttcttcatccagaaaatgaagataataccacacttactcctaccacttaggatatttttgtggttttttggttgtttaatttttgttttttagagatggggtctcagtcacccaggctggagtacagtgatacagacatagctcactgtaacctcaaactcctgggcccaagtggtcttcccccaccccagccttctgagtagctgggactacagatgcatgccaccatgcctggctaactttttattcttctagagacagagtctcacaatgctgcctgggctggcctcaagcagtcctcccatctcagcctcccaagtagctgagattacaggttcaagccactatgcccagcagtcaggctacaagtaatagaacacagtactaagagagatttaaacaacaggagatttgtttttttcacttaacaagaaatcccaaggttccagggttgattcagtgcctcaagaggtttttggcgctgggcgcagtggcttacgctgtaatcccaacactttgggaggccgaggcatgtagatcacatgaggccaagagttcaagaccagcctggccaacatggcagaaccccgaatctattaaaaatataaaaattagccagacgtgagtggtacacactgacaatcccagctactaggtaggatgaggcacaagaatcacttgaacctgggaagcagaggttgcagtgagctgtgatcgtgccactgcactcctgcctgggtgacagggtgagactctgtctcaaaaaaaaaaaaaaaaaaggcctttgggttggcttctgaacagttctgttggccttcccctcctgatcacaaaatagctgctgcagctccatacatcacaccctcacaggacaaggcccaaggcaggaaggaagagggcagagggcagggattctccccaagtctcccgtcagggaggacatctttcccaaaataccccgagaagccaagaagccttcctttggtgtcattggctagatcctgtcacgtgcccaacctgcaggtacaggtacagggaagcctgggaacaaatagaggcttttgctgttttcttttctttttttttttttttttttttttgagacagtgtctcgttctgtggcccaggctggagtgcagtggtgtgatcttggctcactgcaacctctgcctcctggattcaagcaattctcttgcctcagcttcttgaatagctgggattacaggcgcacgccaccatgcctggctaattttcgtatttttagtacagacggggtttcaccgtgttggccaggctagtcttgaactcctgacttcaagtgatctgcccaccttggcctccaaagtgctgggattacaggcgtgagccaccgcggccgcctggcttttgctgttttcaacctccatcatgggagatgagttctgccagccaggaagaaggggctggggaattactgtttcagagaagctgttggcaacaccatccaagagggtgattgtaaggagggtatgtgttgatggcccttgcagaacctgacaccaaactactaccaagcaaatattggttggtcttgttgttaataatgaaactcctacctgataaaccagtacctagccaaggaagagctttgtgtactttgtttccatgaacaaatgtttatgaatctggactgtgtgccaggcccatactaggcgctacttaggagggcacataaggcagcgagttactgtcctgtgtctcccacccccactccacaatatccaagcgttgttataaacacaggtggctgttgcctggccataagcatttgccgtggagtgtttccttctcgaatgtttcccgttcagtatgccggttgtttccacatggttgctctgttttctgatgcacaaaacatgttttttaaaaacctcaatattggccgagtgtggtggttcatgcctgtaatcccagcactctgggatgctgaggcgggcagatcacttgaggttaggagtttgagaccagcctggccaacatggtgaaaccctgtctctactaaaaatacaaagattagccggatgtggtggtatatgcctgtaatcctagctacttgggtggctgaggtagaagaatcgcttgaatccgggaggtgggggttgcagtgagtcgagatcatgccacagcctgggcgacagagcgatactccatctcaaaaaataaaactaataaacaaaataaataaatacctcaatatttttaaagcccagatatgctcttggttttagtaatctttagaaaacactgtgtggccgttcttgatc

SEQ ID NO: 5258 - DNA, 376 bp, mus musculus
acttgtcacgtcctctgacagcaactcagtgtatattatctcatttaaacctttcatcctggggaggaagatattggtattatctcctgcagtgccccctctgggggtcttctttggctcaaccagatgttagactcacaagacccaaataggacataaatggcactggctttgcctagaaggatgcagggacaggaaagagtgcgtctgcgggagggcctccagcatttctctacagagagttcccataggagaccgcacggcagtctagagctcttctctggcccacccaggcaacagcctaggtgcggggaaacaagaccacagcgggtataagcctcacatcccgaatcttgtaacagtcccaaagacaaag

SEQ ID NO: 5259 - DNA, 570 bp, mus musculus
tctgtgactaccctctgatcacaggaatctggccaggaatggtggtgcttaaaagacacacattgaaacggactgctagagccatggaccctttaaactgtaggctcagtaatgatttttccctgctcagctccctggcacaagacctcagtcatgaagcagcttctgggactgcagtcccatctcagtctgggtcccagtcttgttcactcctgtctttggctgagctcagaccagagccccggtcagagaattagtgtgcagctggtggtggccggagtgtgctgcccagaggccctttctgccttcccttgcagagtaaacataaagttaatgagcagccaggctccctgccctcagggcacacagtagttgagccatcaagggaagaaatggccatgaattatttaaggaaactcagagcacttgattttgtaggagagaactttgaatagaagaggctttgctctctgcatttgatcttcccagtgaagagcctggagcatctttgaccctgggtgaaggctgggcctctggcaagtttggggttttgaagaattttctggtggt

SEQ ID NO: 5260 - DNA, 912 bp, mus musculus
acaaaacagtgccccaccctcaccccgtcaaccgtcagtgcagcagtgggctgggtgcttgcgtcccacagtgaggaaggcagaaggggtccctgccctcaaagggggagacacagtgcaaaggcagacaccaaatgagtcagtacaagcacggtgagtgttctacaggggacagtccagagtggcaccagagtgtataactgggggtcagggaaggctttgtgaagacagtgatatttacgctgagactttgaaggatgagtaggagtttctcaagtgaccggatggagtgttccaggtagaggaacagcctgtgtgaaggccctgggacacagagcgttcattggatttaagaagctgtcactgtctgcaagtccccagggccaggtagaacccctaaccctaatctcagcccaggatgctggtatattattgatgttaattccaactatcatttattcagcacctactctacctcaggctctttgaatctgttatttcacttgggtgcagagactgtcctgcagcccgtgaggtctccccaaagcaagattgcaccccagcaagatgtgggggcgcctcacccttctgtcttcctgaacaggttcagggcggactctccgggagactgtcctggaaagttcgcccatcctcaccctgctcaacgagagcttcatcagcacctggtccctggtgaaggagctggaggaactgcaggtgagcgggcaggtggcaggaacaggagcgtccggaacagtggtgggggccgcggcatcaggagtgtgcaactgtccccacagaacaaccaggagaactcgtcccaccagaagctggctggcctgcacctggagaagtacagcttccccgtggagatgatgatctgcctgcccaatggcaccgtggtaggcaccc

SEQ ID NO: 5261 - DNA, 582 bp, mus musculus
cgcggtgttctcgcgagacttggttctagctgatcatgtgacaatccaagatggcggtgcccggcgaggcggaggaggaggcgacagtttacctggtagtgagcggtatcccctccgtgttgcgctcggcccatttacggagctattttagccagttccgagaagagcgcggcggtggcttcctctgtttccactaccggcatcggcctgagcgggcccctccgcaggccgctcctaactctgccctaattcctaccgacccagccgctgagggccagcttctctctcagacttcggccaccgatgtccggcctctctccactcgagactctactccaatccagacccgcacctgctgctgcgtcatctcggtaagggggttggctcaagctcagaggcttattcgcatgtactcgggccgccggtggctggattctcacgggacttggctaccgggtcgctgtctcatccgcagacttcggctacctacggaggcatcaggtaagagtgagaaagttaatagactgggcctacgggcctggaacagaggcaccttttcagaggagtggtgaggataagtca

SEQ ID NO: 5262 - DNA, 532 bp, mus musculus
aggagaagaagaaaaagaaacatagagataggaagtcatctgactctgacagctcagactctgagagtgatacaggcaagagggcaaggcacacatcaaaagacagcaaggcagcaaagaagaagaaaaagaagaagaagcacaagaagaagcacaaggagtgagagtataaagagtgtagggggtggttgagagtaagaaaccaggagccttgtgccttgagactcctggaaagactcaatagtgagaatatagcctcccaccccattaacttcgctcccatgggagatggcttcccctcatgcaacaggcaggtttgggagttagaggtcaaaagcagctgcctgaatgagttgttgtttccttatcactcctggtccctttgcaagtgaaccctgcagctcacccattcattcacccaacttccttcattcagcaggaggtcctattaccctctccagctgccactgccagagctggattcctgtaaaggagtccaggctagagccacagagactgttgtggaggtgag

SEQ ID NO: 5263 - DNA, 1049 bp, mus musculus
agacaagtcacgccgcctctcttgagtgggctttcccatctccacaatgcttataagattccctgtctcactgcgccgtcaagatggcatgtgataatgtgcagggcttattatgtacaatgcccagcgtcatgggtgctgagtaaatgccagtcgttattactgggcttggtggtgagcagtgaaagtgagcaggggctcctgcctgggcatctgtggacacgacactggccacaaacaggctccgggctcctgagtcctcagaaattgcaggctggttttcactagtgggtttgatttttctgagaaaaggacccatagcttccatcaaactctcagaggggtctgtgacccaaagaaggttaaagcccttcctgtggggaagacaattctggtggcgcgatccgagccaggagcctgtgagcaatctgagatctgtcccaggggctcctgggaagggcctggctcctcccgcagctgttcctttgctcccttgggcagagaagctggcgttcggagccagcctttccagcctcactcctcgtggcttgtcctcgcagtgggtgcaggttgcaggaacagccgggacagatggtccctctgcgggcccctcgcctccacccacatgcctgtctggaaagtggctttggcttagctgtaccagagcttcttcctggaggaaactcaaagccaattgttgggagtgggtcccccgaggatggagcaaagctgccgcagggatgcggctggggagggagggagtgtgggaggagggaagacggcagggcagggagccctggctctgggttctcactggggctccccagttggcccatcctgcccatctctaacccaggccccactcctctccccactccctgatcagagtatctgcggggactgtgtccaggggcagagggcccacccagggtacctcgtggagaagggagagaagggagaccagggcatccctggtgtgccaggcctcgacaactgcgcccaggtaagggactgggcttggggctgccctatgcaggagggttccctgg

SEQ ID NO: 5264 - DNA, 1982 bp, mus musculus
ggggcgacgtgaccgccgaggaggcagcaggcgcttcccccgcgaaggccaacggccaggtgggtacgcttggcccggccggccccagcccctcctctcgcacctcgccccttctagggcccggggccggggccggggccgcgcgctttgtccggcccgggacacgcggcgccccctcccccgcccggtccctttgttctcggcgccgcagcccccgcgggcgaagcgaggggaggggcggggagggggcgccggccgggccctgccgccttctttgttcgcggccccggtccccggcgctgccccccggccgccccgagtgccgcgcggggaacaaaggcgctgctgggccacgccaagggggcgcccaggggccgcggagctggggcccggcggggagcgcactccacccgccgacccgacctcggtggcccacggtctttttttttttaagggggagccgagatgcgggagagcctggggtgggtgggggccacttacacaaagcgggaggctgggaaaataggccgtccaggtgcagagagacagcgccccggggcggcttcccgcccaatgtcgcctagagcggctcgcccgcctgcccgggatccgcacagcagatccggagcggttccgcgcggaatagagagcgcgccccgggggacgggggtgggggccacgggaccccagcgcctcctgccggtcgcgccctctgcgcgctcgctccccgcgcgcccgtgaggggcgagagggaggtgtttgacgggatcctgggtgtgggtgaggctgaagccagactttcgggttgcagtagaatcgaatcgaggaccccttcctctagaagggatcagaagcgggctgggggagggggagcccctgccctcattgctattccctctgccctgcaggagaatggccacgtgaaaagcaatggagacttatcccccaagggtgaaggggagtcgccccctgtgaacggaacagatgaggcagccggggccactggcgatgccatcgagccagcaccccctagccagggtgctgaggccaagggggaggtcccccccaaggagacccccaagaagaagaagaaattctctttcaagaagcctttcaaattgagcggcctgtccttcaagagaaatcggaaggagggtgggggtgattcttctgcctcctcacccacagaggaagagcaggagcagggggagatcggtgcctgcagcgacgagggcactgctcaggaagggaaggccgcagccacccctgagagccaggaaccccaggccaagggggcagaggctagtgcagcctcagaagaagaggcagggccccaggctacagagccatccactccctcggggccggagagtggccctacaccagccagcgctgagcagaatgagtagctaggtaggggcaggtgggtgatctctaagctgcaaaaactgtgctgtccttgtgaggtcactgcctggacctggtgccctggctgccttcctgtgcccagaaaggaaggggctattgcctcctcccagccacgttccctttcctcctctccctcctgtggattctcccatcagccatctggttctcctcttaaggccagttgaagatggtcccttacagcttcccaagttaggttagtgatgtgaaatgctcctgtccctggccctacctccttccctgtccccacccctgcataaggcagttgttggttttcttccccaattcttttccaagtaggttttgtttaccctactccccaaatccctgagccagaagtggggtgcttatactcccaaaccttgagtgtccagccttcccctgttgtttttagtctcttgtgctgtgcctagtggcacctgggctggggaggacactgccccgtctaggtttttataaatgtcttactcaagttcaaacctccagcctgtgaatcaactgtgtctcttttttgacttggtaagcaagtattaggc

SEQ ID NO: 5265 - DNA, 568 bp, mus musculus
ctaattgtttctctacaaaaaccaactggaatacaggatagctctgtcctatagcaacctaaaccagcacctcccttgatgtgcatatagaaaatctatgtcttgtggccgggcatggtagctcatgcctgtaatcgcagtaccttgggaggccaaggtgggcggatcacaaggtcaggagatcaagaccatcctagctaacacagtgaaaccccgtctctactaaagatacaaaaattagccgggcatggtggcgggtgcctatagtcccagctactcgggaggctgaggtaggagaatggcgtgaacccgggaggtggagcttgcagtaagccgagctcacaccactgcgcttcagcctgggctacagagcgagactccgtctcaaaaaaaaaaaaaaaaaagaaacaaaatatatgtcttaaccaacttggaagaaaaacaaaattctgtgtgtggaaatatattttttcaagttattcttctttcaacctggattcagcctcaggctgctgctgacatcagtgatcctctctggggtgaggctggagggcttgcattgcactgg

SEQ ID NO: 5266 - DNA, 513 bp, mus musculus
actctttcattcatttgttcatgccacactgagctgcatgtcagagtctgtgctaggtgttgaggaaacaaatataaagaagaataagacattcccatggcccctgtcctcagggggttgagagtttattgagaacagcgttaaacagcaaagcatgattgattactccagaagagatatagcatgtgatggaaataagaagggctcctagctcagcctatgggaaagggcaggtgagaaccagcactttctaggaagaaagcacagagtgggccagctcagggagggaggacacagtgtgtaaatctgcagcactcacagggtaccaaggaagggtgtggggtggaaatagacctctcttctgactcaacagtctctccataattgctggctttcttatttgtccctgctggtggatgggcaactctaggatggaaacctcttttctcccaagtcccagggtctgtattgtatctggcattctctctcctcagatgtctcataggagcccca

SEQ ID NO: 5267 - DNA, 573 bp, mus musculus
ttggggcctgcctttgaaaggctcacaggccagaatttccttctagttgtattatttctagctggctggcctctggcaaggcagggagggtccctggtcctgctccatctcaagggggtcctgtggcaacaggtggggtcagagaagcagaaggagccctttgtgtttgcctcggtgcggatcctgggtgcctggctggccgaggagacctcatccttgcgtaaggaggtgtgccagctgctgcccttcctcgtccgctatgccaagaccctctacgaggaggccgaggaggccaatgacctttcccagcaggtggccaacctggccatctcccccaccaccccagggcccacctggccaggagacgctctccggtgagtctgtagttacagtctgtccagctagatcattctaccgaaaagcgttaacacaaggacacccctccccacaaactgagctgtgccaggcttcctgattgggccatgagatatcccttagggttatttctgttttggggggcttgttcccacaggactcctcggctgccaggtgtcacttgccaaccccagattt

SEQ ID NO: 5268 - DNA, 1062 bp, mus musculus
tgcagatctgtgggtgggactctgctccatgcaatcattcagggactcaagctcctttcatctagttactccatcgtctcttagggactcagagtcctccactcgattgctgaaatagccagaaaacaagggagaaggggaacataaagggtctcttgaggggccaagcccagaagaggtagagtcacttctgcccatgttcatcagcatgagtcacatggtcctacatgccagggaaatatagggtgtcatggaaggaggggaaaacgctgatgctgatgctgatggagaattcgaagtcttgccataaattttttaagtgcttctttgagtatgaattattttcccaagtgccttggaagaatatttctgtgagcccctagccagccccccatacctgtggttattccccaagtgggaccacctgactacacagggctagacatagaacttttattttttcaagttagaggaagtggacctttcaggcttatagagcaaaatctctctatatattttcttccaacatagctgagtaaaagggcaaacagaaatttgaaagcaatgattgcttcctttgtcggggagaaggatacccactgagttgggaacatatatgaattctgatttgcaatcatttccactatttatgaggtcactggacttactcctgctgagtccaatttacaaagagctttggttggatcagggaaaggaatattagaatcctgttgacttggtgatggccagagtactatggataccaaatgcaagaaaagtatcaataaacttcaaggaagcaaaatcctcaacatcagctctgacatgccacatccaaaagtgtacaaagatatacgtttccagggaaactattgatgttgggtgcaccaacattgctatttgactacacaccccagaagcaagtggggggattttccaaataaaaaacttgttagaaaaacatccaaaatgcctaagataagcaaaagagttttccttacatcatcagcatattccactcccaaggcaattgtaggatgctgatgctgtctgatcattggt

SEQ ID NO: 5269 - DNA, 712 bp, mus musculus
aggtggtggggcctagatgctgacactatggataactacacccattctggactacctacctggttctttttatttaagctactgtttttctgtcactcaaagccacgtgcataatcctaagtaatcgagatagagtcattcattcttcaaaagaatattcatgtatgctagacattgcatttcatgctttctcagcgctctccatttctcccacctgcccctctcaaatccattctactcaccacagccagagtgacctttccaaaacacaaacccaactgtttccactcggctcatgtcgtctgtgactccccattactaacagaatcaagttcaagctcctcagcctgccactaagggtcacccctctttgacccttgcctactccgagcacaacccttcccccgctgaccatgcaccctacacactaaccaccccggacttgttgcctttcctagtaaagtcttattcattcatgtcactcggcatttgcacacattgtcacctcccttggaatttccttctttcacgtgctcatgttcaaattctaccccatccttcccactgtgtaagtacctagtatgtgttatgaactgtggtcagtgttttcacagcagcaactcatgggtaaggccccttactatcctcattttacagacaaggaaactgagactcaaagaagggaagtgagttgccacagatgagtattcat

SEQ ID NO: 5270 - DNA, 1146 bp, mus musculus
agaatagaagtctgcactaggtgtgttcatacacagaatgaaaaagtccagaaggcctacagtaaaattctgaggaatattgacatctgaaatgggggtcaaggaagtggagcctacatggagactgaagattatcaaagaggtcaaaagaacttaaagattactgaaattaagaggaaaaacattttctggaaaaaggcaaggtcaacagtgtgaatgctcctgagagaccaaatgaggcaaagtgtcctagaatcagttagtcattggtgactttggagagtaggttcggtagaggcaaaggctagactgcagtggggttgaggagtgaatgggaggtgagtggatgtttataataactatgcatagcactttcttccaaaaacttctgctttcccagaggaggagagaaggtagtaattgaaggagaggcagggatgagtgagggttttgaggtggccattgttgctttttgaagctgggaaaggcttgggcatgtgtaagtgcatataggaaggagcctgccaaagataagaggttgaagatccagtgggagagcatagggcctggaatggggcaggtgctccttgaataccaaatgttttctgaaacaaatgagcagggagaaagttcctgtgggtacagtctctgggttttgtcacaccccactaactgttctaaaaatgttgctgtgcttcctctttctgaaacagccaggacattaagaattgcacaaaaaccaccttttcaaactccctagagagggctcaatttcagatcccagccaaggtgcttcctctctgaagtgcctatgtggctggattggcccctcctccaacagcacctaaccctggctcccagcacaagggtagatccccaaagcagcaacaaacagaaaagtttccaatggggcttcttgaccaccagggtcgatgtgcctggcccactcttgaggaatcagcatggccaggcatattctctaactgatgactttatacccgctttgaaaaggcattgaggctgactagataacctaaacagcttgaaagagtgtgcttagagataataatgttattatatttaattcagataccccttcaatgtcagtcattcccctttataagctcctactaccttgtgtaaggt

SEQ ID NO: 5271 - DNA, 935 bp, mus musculus
tgctgtgggagcctctaatccatttggggtggtggtcagggaaggcttcctagaggcagtgacctctaagtgagacattatagccaaagaggagttgtccaagcaaagagaaagagaactactttagtatgaggaaatggaattgcagacactatcctgaaataaagagaaagtgtatactgttcaaagaattataagagttcagcatagctggagtagagagggaaaggaagggatatgacctagccacttccttttcagagagctccattatggaaaatcctttctgtctgaactcccagcacggtagttacaggcttctgcaagttggccctaatttacttttgcaaatttatctctctattttgtacactttgcttttgctgtttccccaccaaggaacgtttcctacagtgggctcttaggatttgtagtttctcataccatttttggaggtagcagaatccctcttttctataggacacccattccatgtgattcaggtgagctcaccatgatctgaacccactttcaggctatgttgcacaaagaataacccattctctgaccatagtaatgggttcagggatgggcacataacccacactgagccacccagagtcctcccttatctttttctgttggaactagcattcctttggtgttgctcagctgggaagacatgagttgggactgccagactgtctttccagccccagaaaggagtcattctgaggaacagtgctaagtagggaaaagcagaaccataagatggcaagagagacagaggcaagataatctcacctgagctcctggatggaggcctgccaagaacagctgtattattcctggacttctcagttatgtaacccagtaagttctctctcttttgtttgtttcttaagctgctttgagttgggtttttgtcacttcaa

SEQ ID NO: 5272 - DNA, 1036 bp, mus musculus
tcgggggaattcatgtggaggtcaaagtggaaacaggtgtgagaggtccagcagaagaaaacatggctgccaaagtgtttgagtccataggcaagtttggcctggtctaagctgttgcaggaggcgtggtgaactctgccttatataatgtggatgctgggcacagagctgtcatccttgaccgattccgtggagtacaggaaattgtggtaggggaagggactcactttctcatcctctgggtacagaaaccagttatctttgactgccattcttgaccacgtaatgtgtcagtcatcactggtagcaaagatttacagaatgtcaacatcacactgcacatccccttccagcccgtcgctagccagcttcctcgcatcttcaccagcatcggagaggactatgatgagcctgtgctgccatccatcacaactgagatgctcaagtcagtggtggtttgctttgatgctggagaactaatcacccagagagagctggtctccaggcaggtgagcgacaaccttacggagtgagcagccacctttaggctcatcctggacgacgtgtccttgacatatctgaccttcaggaaggacttcacagaagcagtgggagccaaacaggtggctcagcaggaagcagaaagggccagatttgtgatggaaaaggctaagcagcagaaaaaggcagctatcatctctgctgagggtgactccaaggcagctgagctgattgccaactcactggccactgcaggggacggcctgatcgagctgcgcaagctgtaagctgcggaggacatcgcctaccagctctcacgctctcagaacatcacctacctgccagcggggcagtccgtgctcctccagctgccccagtgagggcccaccttgcctgcacctccacaggctgactggaccacagccctgatgatatttaacatcgacttccttctgcccccaccccagaaatcactgtgaaatttcatgattggcttaaagtgacggaattaaaggtaaaatcacttcagatctca

SEQ ID NO: 5273 - DNA, 883 bp, mus musculus
gctagtaagctcattttaaaggtgaaaaaaaaaataaagcttagtgaaattaaacaacctgaaaaaagtcacacagagagtaaattattgcgtctgattccaaagaactctgtgctagagtaactctaatttttttcacattcagtccacatcctgaatctacatatcagtgtagttttgctaaattaccctctttggggattgagttgcagcctcatgacataatgactggtgatatcaggtccttcttagaaacgtgctgttcatttctggctaatgttccctagacaatcagcacagatactgaaaccctgatacatccatggcagtgacaaaagatgcagatggaaagtagaatgacagtgggtgtgtgctggaaagcaccccagcctggaaggctggataccaaggttcccgtcccagttcagttactcactaattatatgatcctggtcagatcatgacccactgttccccagttccctccttcatgtattccctccagttctgattctgtctcattttaggtaatatctgcttgcgtgatgagtcaaactgggatctggatcataaaagtatttaaagccttcactttctacgctatgcgattatagaatctgttgaaattccagggcctggcttgctaattgggtttacattttgcttttataaaaccccacatgataaataggaaaggttcattaaccaggagctttataacagcaggaatcatgtttggttttctcatcattatatccccaacaactggcacagcccctggtacacgatgaactccagaatatcgatttacttattgactgacacagacaatgttattgctagatgtatgtaacaaattattctctttctctccctgcccaag

SEQ ID NO: 5274 - DNA, 123 bp, mus musculus
gatcggtcgcttggttatcggacagaatggaatcctctccacccctgctgtatcctgcatcattagaaaaatcaaagccattggtgggatcattctgacagccagtcacaacccagggggccc

SEQ ID NO: 5275 - DNA, 123 bp, mus musculus; identical to SEQ ID NO: 5274

SEQ ID NO: 5276 - DNA, 123 bp, mus musculus; identical to SEQ ID NO: 5274

SEQ ID NO: 5277 - DNA, 573 bp, mus musculus
aagtgatggaaaagcttctctctatgtcttcctcaggtcatgttggccccccttatttccattgctctgaaagtgtcccagctgcaggagaggacgggacgcactgcacccactgtcatcacctaagaagacaggcctgatgtggtacgtccctccacccccggacccatccaagtcatctgattgaagagcatgacagaaacaaaatgtattcaccaagcattttaggatttgactttttcactaaccagttgacgagcagtgcatttacaaggcactgccaaacaagatgcccttgggagctgtgagggaaagaggacctgcgggcttagatcaatctcaattccttttcatgccctcctgcattgctgctgcgtgggtatttgtctccttagccatcaggtacagtttacactacaatgtaagctataggtggagcatcagcagtgagtgaggccattcttcatccttaggatgtggcaatgaaatgatggtgcaagttcctttctcttttgtgaatctttccccccatttcctgtttacatgtaacccaacaaaatgcaatttctagtg

SEQ ID NO: 5278 - DNA, 573 bp, mus musculus; identical to SEQ ID NO: 5277

SEQ ID NO: 5279 - DNA, 573 bp, mus musculus; identical to SEQ ID NO: 5277

SEQ ID NO: 5280 - DNA, 2184 bp, mus musculus
ttgaaaattaactgattttcctcaagtttgtcagagtttctaaagtggctttggaaagggttccattgcacacgaagaggaagcttaagttagacaatgtttgtccttatcaataatccatacaaaaattgtttatttcattttcttggactttatatgcgatacctttcagggaggctgcctacctcataatagccctctgttgtctgatagctgctttcacgacccatcatgaggggccttcagcagccatgtttgaatttataaccctgtccttctggtgagagttgattggaccagggagaggacacctggcccaggttacgccagagtctctttcccaggaatttgcaattggaactcagaggtagcctgttagtgtttgtcagttgctgttagtgccaagagatcaatctgggggccatagagtgttgatcttctactgtgtgcatagaaaagccaagaaagctggttttcaaagagagatttaagcagattcataaagagaattagagtctgggggtggagggagattcctgatctggttcccggcagctttccagttcttggttctcgttcctcccgaaacctggccagacatcttgccagagtttcacaagaaacccttgcatcctgtgttaaattccccatccacctcgtctgcttttcctcaccctcttacactggcttgagttagttcctgttgcatgtaatcaaagagtcttaacaaagacagattgatacctctctggtgtgtatttgattatagagatggccaagtaaacacatagatggatgttcatacttgccctttggtaccctagaaggtttgagttgggaacaaacctcagagatctcctagccttatcctcacattagacagatatggaaactgaagactatagacaggtaaaataagtgatttacccagggtcacacagctaggactcgatccctagccttctggtcctcaggccagccaatgttctttctaggctggctccctagtgccatccatccatccatccacccatccatccagtaaatataaactgagcaagattctgctacatgacaggtactggggtacatgttttttgtcctcaacaaactcacagtgtggaaggaccaaagttctttatgtttatttttacttcattccctggggtttcccatctggagggcactttactaactttgctagcccacgatcacagcgagttcatccaggagtctcccagaatatactcccatcatgtattctctgtgcctcttgggtctattctttcctaatatttgtgataatccatgttcatattgaatctcccctgggagatccttgaaaccagggactgtgtgtaagtcattgcttttacttcctagcacggaatctgtcacaagatacttctccaataaatgtctgcttttctagagaatttacttcactccttagaatctcaagtgagagctgtgtatcagttagctcctgctaggtaacaaaccacaacaaacatagtagcttccagcaacaatcatgtattattattctctctcctggttctgagagttgactgggatcagctagatgattcttgtgcagagtctctcatgtggttgcagtcagatggtggctgggtctagggtcatcttaaagactttgtcattcacatgtctggtgtctcgactgagaagacaaaaacagctggagtctggaacagctggggctgtttcacacacaagtgttgtttgcacaagagatgtccaagagcttctctttattctctccaagcactctccatgtggtggcctcagggtaactggtgactgaaggctcccagagggattgcctcaagtttttttaaacctgactctgaagtctctcacacagtgtcacttctgcaacattctgttctcagaggtcctgccacatgcaagaaagacacgatcacagaggtcctgccaggtgcaaggaaagggcacacagactccaccttctcatagaaggagcatcaaacaatttgcagatagttttctacatctctgcttgatatgtcttcctgcatgagaaatatgaaaaaatgaacacttttcagggagctttcatttcagctggaagccatgattttcagacaactgatagtttctggcttcactgacagctacatccattgcaactagtttgct

SEQ ID NO: 5281 - DNA, 2184 bp, mus musculus; identical to SEQ ID NO: 5280

SEQ ID NO: 5282 - DNA, 849 bp, mus musculus
atctttgcaaaaggtctgagtccatcttactcggactgggtgagcgcattctgtatacactatgtaggtgaccacagagtcaggtgtaactcttaccttaacctctactctaggtgacccgcaacctcaaaaatcatgtacctgtctacctgcctgccagcttcccttcatttttccaatgagtatttattgagaacctgggataaatgcagtttgtttcagggctagcaagataaatgctctctgaatacgtttgaaaaaaaaaaaaacagctgatatgaatgaggggcataacttgttttggtacaggtgcttcataatggaggacaggggttatctggtggcgcacccgactctcatcgaccccaaaggacatgcacctgtggagcagcagcacatcacccacaaggtatttgtcacaaagctgagctgctcagttctccaacctcctgcagctcactacatggcatatgtcttctgttctctttggccttggtaggagcccctggtagcaaatgatatcctcaaccaccccaactttgtaaagaaaaacctgtgcaacagcttcagtgacagaacggtccagaggttttataaattcaacaccagccttgcggtaagttgatctgattccttaacactctcatttttccatcccattatggaacatgaattggaatcatggctagtgtctgaatattattcctacctgtttcatcgccttagaactatagaatgataggaggagacaggagcttagttccagttcccagtttgacaattgggagatataaagctcagagtagaaaagtaaaagttttaaggtctctcagttggtattttgttttg

SEQ ID NO: 5283 - DNA, 678 bp, mus musculus
cttattaaaatcgtatataaactataagttaaaagaccttcaacgggttctcttatgggtagaaagcattgttttaaaaatatatttatagttaaatagcactgaacaagaaaattgtgaaacaaaagtgacttagatgtggatcctatgtgtaaggagtttgtattctagaaagaatgataagctaaaaaaattagaatggaaggtagaaagagaaaagtaccacatgagagatgcaaatgaaatacaatatgcatttggatgaggaagaaagtattattaactagagtgaacagggagcacttcagttaagtgtcagagtttaaagtgatatttagatgtagcctagttttccactaggaagagtgacatgggtgtggttaaggaggcatcccaggcagcagaaatagcataagcaaacccggtgtgagatctctgtccagacatatttgtacccagttggctaggaacatggcagatagaaataaagataaatattttaagaaataaaaaaagagactaatggattgttctgtagggagccaaccaatgaattaggggcagcatttaagatggagtgcctcattcaaatgacaagcatgtattgagtgtctaatttatgctctgcagaagccagattgcactagttgtgtgtattaattacattgtatgagttct

SEQ ID NO: 5284 - DNA, 569 bp, mus musculus
tatttaatttacacatgaggaagtctcactttaatcaatgagattaaattacttgcccaaggtcacacagagattcaccacttctctgattatcatgtcaatgaaaccttgtcttctaactagatataagcttttcaagggctgagactctgtcttgtgtctatttaaagcaactccacaggtatataacagaatcctgggcatggggcccccttgtaggcaaggcttccaacaggtaacctgtactctattagcccaatgttctacctgctgtgttccgtcttcaccccccatttacacccatccatgcacctcagatatctggcacgttacattgctaagtacttttccaaactacctgtcctgggtagtcttccacctagcctggtcataattgtctgacattataacttgctccttcttccttcagtaggagactcctttactttaacataacagatcttggtcaggtgaatcgaggaaagcagttcaattaggataactcaagtaagcctgaagtcatttggtcatcatttattgaatgtttttattgttccaagcactacgat

SEQ ID NO: 5285 - DNA, 170 bp, mus musculus
catactatgggaattcaagtgattggctgaatgatagtattttcaagatttaaaggaacttataaaccatttagttacaagctcttctaattaaaggtgaaaaaactaaatcaaggagaagaaaggaaacgaggaaaatattatacagatagatattagcagaaccagat

SEQ ID NO: 5286 - DNA, 1042 bp, mus musculus
aggcaaacaagtccatccttagtgagcagtgggggtttaaagaactcttcacaactgatgctgctgtttcaagtcaaccatttggttactcctgctccatttctacctctataatggaacatttattttgtacttgttaccaagtcccctgcttaattctgttttctcatttgtttatgtcaaaaaagtataatgtagaaacccatctgatgcaataatattgttttttttccttgccttaagggagcaaaccccaccctccatgcaggttcctgtgcatccaactcttggtgaccgcagcatgctaatgtgtagcatgcaatctggagtcataatgaagctgatttgctattaagcatgacaacactttgtacacccatttcttcatcagcaaaattagagtaactagtatttgcctcactttgtttgaaaggagatgatactgtttttgtgcttagtataaagcttgatatataataagaactcaggagataacaatatcccatttctgtcctttatctattaatcacactatattttactgttcagtattgtttgcgctaatcatttcatttctccacactaacctgacccagtgggtattctacattttagctgctatagacaattcaccaacttcaaatagaaagtttatagatagtataaatgagaagttagaaatgtgtttcataaacacactcatccacataggcttatgtatatgaactcatgtatatttaagttgaatataaatgggtcctcaatttatcagaatcttgtagtcagagaattatttcttctatattgtccagtggactgaaatctgcatgcttcttaaaatacaatacacaagaagttaaaaattagtcttaatgaaagtgcatatactgcaagccaaaaaggtaaaatgtgccacatgttaaataacaaaaaaactcctaagaaataatttactctttaagaaacaatataattcctattacatattcacttctaactacaaaattcaaataactggttattttaattcatttacataaaa

SEQ ID NO: 5287 - DNA, 273 bp, mus musculus
gcagtggtttttttcttcaaaaaattcagttgtccttgataataattcaatctgagatgagaaccctagctctaaatggttacataaactgatataaaaaatgagatgtgaaatgattggtgcattaaaattggtgggttttataatattttccatttatttcacatttgaacattatggaaaatatagagaaaataggttgatatgcgagtttaaaaagcaaaagacaactaaattaccatttttaaggtattttactgttgactttctaaa

SEQ ID NO: 5288 - DNA, 1678 bp, mus musculus
tatctgtcatcaaaaagtgattctttcaaatttctacttatctatatacaatcaaataaacttgaggaactgaggcataacagatctcagaagagaaatacattttgagatttctatagcccatgatacacatctccccacatgcacacacctaggcacataaacatatacacacaaacctacttccatatgatttggtgagggtatgggaaaaaaataccattagaactgtaggtaatttttatgttcttttttaaaatttggccagaaatgaagagaaagtgtatacaacatcaaatttaacagtatagtaaaaatatatatcttctaacaaaacttcatgtataaaaataaaatgtagagttttccagttaacattttacctttaattgctttatttccaaactttgattcttttctttcttgattcagatacccattgtatctctaatttgtgcgttttgatttatgaaacctttctgactcttctccttataaaagtaaccactatttttgtagcctactgtttttaacaccactgcttttaagtgtagtggcctgacacttttttgtctttttttgaaatggagtctcactctgttgcccaggccggagtgcagtggcaaaatcttggctcactgcaacctctgcctcccaagttcaagtgattctcctacttcagccttacaagtagctgggattagaggtgggcaccatcacgcctgctaagttttgtatttttagtagagacaggtctcaccatgttggccaagctggtctcaaactcccgacctcaaatgatccacccacctcagcctcccagagtgctgtgattacaagcgtgaaccaacacgtccggccacctgacactttttaaaaatgcagaaatgttagtccaactaaaaccgttccaatcgtcctttactgatatggcttcttttgaataaacatagaaagtggccctcctggtcttaaaacttgagaaaattacaattgtcttatctgaattccttttttcaggaaaccaaccatcagccctctcagataatatcaaggaactgaaatttgctgtatcactgcatctgaacaacggggcaccatacccctcacacattttgattggctaactgaccacctgcttcctgttggtgaacttatcttcctcactccttcctaactgttctttgcccacacatggtcacatttcttacctgctatataaaactatagttttagtccatcagagagatggatttgagactgacagcccatctccttggctgcagtgcccgaataatacctttttccttggcaataatctttgtctcagtgactggctttctatactgtgagtagcaggacatagacaaaaatcttggagttttagtaacacgacttcaggtctattgataaagaatatgtattttattggacttcttgaatgattcttagacatattaaagtctgagaaccactgttttaatctacaaacatttaattttctatttctttacctttacatgtttgcttaaatatttttctctcctatgtaaagaataagtccctttacctgtagaaggaatactgaaattgttgatcaccactgcttattgctttaactgtacatagtaagatttaagaaatccttactgaatgtatacaatgtactagttacctt

SEQ ID NO: 5289 - DNA, 768 bp, mus musculus
atcgactcattttctccttggaaaacccctatccttcttcctagctgaggtccccacttccagtgggcagggctgacagagctggctttcagaagatgggggagacgcagttattcagtaaagcacccagaaacagtacttacattggaatccagtacatggaatgcagggcttagatgaagcagcctggatttaaaggaggatctgaatgtggaggaagtttaagcactagacttagataacctattcttgttttgttcatgcttggtcaggtgttttgcagaatgacttgatctctggcctcaggttcctcatgtataagtgaagggttggacgcatcagtggtgactgagctttctagggtctctattctgggtcagccacatttagaggtgggaagagcatcacctcattaacgtcattctgcttttcctcacgtggtaaagacccactgagtatgacagagttcaaactccttagtgtgacattcaggggccctcatcacctggccccagtgtctttcccgagcctgtgtgaccactttctccactaccttaaactctagcaaaaccaaactcttgcgctatccctctagtggaaacatactttcacccttgactacttggaaaacttctattcatcctgtaacacttagcttaaacacttcctctttgacatcctcaggtgtgctaatgactctggcctcagggggccactcggctgggatatgcctgttttgtgcttaccccctgtataacacttgctgaa

SEQ ID NO: 5290 - DNA, 1092 bp, mus musculus
taatagcttttgtttctcgagagctcattatgtgcctggtactgtgttctgcattttccactcattgtatcacttaatatttatgcttctgatcttaggggaatgactgtttatattgcatatatgccatttttttgcagtatgaaaaatttgttgagccgagtgtcatacattataaactgacatgtacttactgttgtttaatctaattggtggttgttaaatctaaaggatgttctgactacttcaataaaggcagcagcaatcacttccataaataaatcattagacgtagaacacatgtgtaaacaggtagagtcttctaatttgctaagtgttgatggactcaaaacagttactagaacaagccatagatggaatacatttattgatggaataagtcaaacaacttgaaacacggcattgtggtgtcttaaatggtaattcaaataaaatgaagtgattgatacatttttacttgtttggaaagtggagaatattttagaattgcaaaacattgcacttttatatacatttatcctttcattatcctaatgtagggtagataggacagttgattgcatccaacttcatttatttggcttattatcttttgttttatgattttaactctgtctagaatcatctcctaccacttagagtctatgtattcttctgaccaaatgacttcaagttttctgaccaaattaatggcctttcaaactgttaagccctctgcctggaatgcccttcacatcttctcttggcgaggccgccgcggtcctcaggactctgttggaatatcaccaccccagacaaacattccctgaactgttcctcctatacttacccttcctctggcctcccacagcaccctgtgtatacccacattagcatcatttgacacctggtattatagtgttctatttactggccagctgcaccaagttgtgactctttggaagcatggtgtgtcttttatggttttatttcggttttttcagcacctagccaagtctacacagagtatggactcaatgagcgattgtggcttgaagatgtaaattctttagtatgtattgcatgatatac

SEQ ID NO: 5291 - DNA, 1092 bp, mus musculus; identical to SEQ ID NO: 5290

SEQ ID NO: 5292 - DNA, 931 bp, mus musculus
gctccagcgccatggcgccctccaggaagttcttcgttggggggaactggaagatgaacgggcgaaagcagagtctgcgggagctcgtccgcactctgaacgcggccaaggtgccggccgacaccgaggtggtttgtactccgcctactgcctatatcgacttcgcccggcagaagctagatcccaagattgctgtggctgcgcagaactgctacaaagtgactaatggggcttttactggggagatcagccctggcatgatcaaagactgcagagccacgtgggtggtcctggggcactcagagagaaggcatgtctttggggagtcagatgagctgattgggcagaaagtggcccatgctctggcagagggactcggagtaatcgcctgcactggggagaagctagatgaaagggaagctggcatcactgagaaggttgttttcgagcagacaaaggtcatcgcagataacgtgaaggactggagcaaggtcgtcctggcctatgagcctgtgtgggccattggtactggcaagactgcaacaccccaacaggaccaggaagtacacgacaagctccgaggatggcttaagtccaacgtctctgatgcggtggctcagagcacccgtatcatttatggaggctctgtgactggggcaacctgcaaggagctggccagccagcctggcgtggatggcttccttgtgggtggtgcttccctcaagcccgaattcgtggacatcatcaatgccaaacaatgagccccatccatcttccctacccttcctgccaagccagggactaagcagcccagaagcccagtaactgcccttcccctgcacatgcttctgatggtgtcatctgctccttcctgtggcctcatccaaactgtaccttcctttactgtttatatcttcaccctgtaatggtt

SEQ ID NO: 5293 - DNA, 626 bp, mus musculus
gtggctcagagcacccgtatcatttatggaggctctgtgactggggcaacctgcaaggagctggccagccagcctggcgtggatggcttccttgtgggtggtgcttccctcaagcccgaattcgtggacatcatcaatgccaaacaatgagccccatccatcttccctacccttcctgccaagccagggactaagcagcccagaagcccagtaactgcccttcccctgcacatgcttctgatggtgtcatctgctccttcctgtggcctcatccaaactgtaccttcctttactgtttatatcttcaccctgtaatggttgggaccaggccaatcccttctccacttactataatggttggaactaaatgtcaccaaggtggcttctccttggctgagagatggaaggggtgggatttgctcctgggttccctaggccctagtgagggcagaagagaaaccatcctctcccttcttacactgtgaggccaagatcccctcagaaggcaggagtgctgccctctcccatggtgcccgtgcctctgtgctgtgtatgtgaaccacccacgtgagggaataaacctggcactaggtcttgtgaaaaaaaaaaaaaaaaaagagagagct

SEQ ID NO: 5294 - DNA, 1410 bp, mus musculus
attcagataaggaattgtgaacagtcttatggattaatacgttctcagaacatcagtgttttagcaaataagatattatttacagtgagcacattgttagcctcactagatgtcagtgtagttctaagtaaatattttatatagttcctcagtagtgttgaatgagaagatgttttgctttagaacttaaagattgagaagatggaatagttgcaataagtgtttgtggtacattaattccaacatcctcctctgatgaaaacacataattggtaaatttatacacatcaacacagggccaaaaaatagtccaaggatgtaaataattatggattcataggatacattgtgcttccttagtcaccaatgtattttccgtacattgaaaagtcttactgtacatcacaacatgctggtcagccttttagggcttttcccaattgcaaagggagcatggttactcctcctgccatgagagggcagcactgagattgtctccagcccaggaagcagtgggcactgtttagtatgggttagcacctaggtttttatgtggaagcattcaagtcaggctgtggtgatatatgttctcagagtctaccatagtatcattttagtgcttttattacaagtcatcaaacactgtatctgagaaacatgaggataaattatggtacattcaaaaactgctgataaatagcaaagaagagaacagggtactttgggaatataaggccttttgcgtgagaaatgttttgtgctagctatgagtgaattttctacaagcagagaagttccatttggtcctctgaactggttaacattttcttgattctttgcttagtgtagcaaataaaattctgtttattctttttgagagttcccaaaatatctttattgatttggattttgctttttcactttattttatagttgattttaagtttttcttgagtgtgttcatcagatagccatataaaatggaacaatgcatttgtaataacaaatattatacatgatatttttttggccagcccagttgcacagtcaactgagaaagtggaagttatcactttcctcttaattccttttacatatttttcctctggatgagaaaatgttactttctcatatccagaaaagtgttataaaatgatacattgagatcatctgattccctctttattgtgattgtttctttaaaagaaaaaaaagcagaaaggggccatgaacttacaaagaaagttttaaagaatacaccaaaaattgttaaaacaataaatgagttcatcaaggctgcagggcacaagatcaatacacaaaaattaattatatttttatatacttgaaataaatgatctgaaaatgaaggaaacaattctgtttacaatagcatctaaaagaataaaa

SEQ ID NO: 5295 - DNA, 633 bp, mus musculus
ttttttatttttccttttaattacatttattttaatgctgaatttactcccgtgccataagtttttgtttcttcagtttcttctgggatatctttttcttctgggcaacctcctcttctggtttaggaacaatctgttccttttccgtaaggatcatctcaatgtggcagggagagctcatgtatgggttaatccgaccatgagctctgtaggtccggcggcgcatcttaggtgctttgttcacttggatatgctcaatgaccagagaatctacatctaaacccttaagttcagcattactctctgtgtttttaagcatgtgcagcaaaaattcagcactctttttgggccaccgaccttgtgtccagccccactgcttggcctgcgcacacctgccaactccaccattgtaacgtcggaatggtacacactgtttctgtaaagtgacatctttcagatacttcgtggctttttgtatatgcatacccttgatggcctgagcagtttcacgagtgttcttaaagtgaacacgaagattggaacctcttgatttgcatgatttcgtggggttctccgggtcaagtgagtagcgaaccattttcacagattacctcaggctgcttagggaaagag

SEQ ID NO: 5296 - DNA, 807 bp, mus musculus
tgacatctgtacttgcttggttttagccatgacagctgtattccaactgttgttcaatcacccagggctatctcatctacagaaaaatgtgccagcttctctcttaccacccagaactattttaataagccaaaccaaggcctagcattcatcagcgttaaaatatctgtagcagaatcatctcaggcttgctgttactcatcatgaccccacgcaccctatgttctttcctttgttcacagaacataaatattccatttagtttgtctctaatgccattttctcagggcagttattggaaataatggaagaatgcagtggatctggggaattatgttttctgtgtcttagcaagtaagtgacaggtcctaggcatgtggaattagaattttttctctgcttctacatgcttctgcaccatttaacagaaatacaagtgtaggttatattacctgtgggaggcagttttccagaaggtgtaagaaaaagatgccttataccagtacctcctggagggagcactctaggaactacctctgtagatgctgtgattctgcctggtgccttgcagcatctgagctcacttctcacagaggaaggaaagcagcactcaggtttctatccagtaactcctttcaagatggcttcatttggtaacctaactccccagatagcatggtgaaataaattgacagggtgtagatggtttgagataaatattcttatttgatttagactctttgtaaatcaaagccattctattagcataactcaagaaatctatttttttctgtattgatctccact

SEQ ID NO: 5297 - DNA, 1028 bp, mus musculus
tgcccataataataattagcatgaggatatcaacatggactataggaggggaaaacatttgctactgtgctggttgagcacttaatcataagctttcaaggattccagtagaatttacatatgcaccttgcggtgtgagcctgagtattttcatacgtttccatttcatttggtgtcatctcttcctagtaatcatcactcagatgcttctcatcaagccttagattgcaggttagagacacgatttagcctgattcatttctttggattttgcaacttttgacaaatcagaagcaaattttgttttctgtctcatctttaaaatagttatccaaaattctaacgtttatttcttaaatggtgtcgtttgaaacttgtaatttattatttctagtataagagcaaattataacatcaaactcctttagaaaaccaatctacttactaaccagagatgactttctagtctttctattgcagttagtgatcaacttttaatatctcaattaggtttccaaatatgcagtaggtgtccatacagaaattccattactttttgtttcaaaatgtcgtttagtatagttttcagcattttattaactaactgtatgaaatcatgctaaaaaggtgaaattcaattatttctgtgaatatttttaagtaatcacaaaggctttagacattcaagtagtgtcaaaaaactagagcagtatcatggcaataaaattattgagaaacattaaatgtaaagttcaaattaacatcatgatgatacacctaagtagtgttttgccagaaggtaaagttagggtactcttaatgagttttaaatgctgcatcctcacaccactgtagtattcaccaaagaagaatccagaattaggtgagttcttggatcgattgtaagggaatttaattattgcagctattcctaattcattaatttttcattcaataagcatttggaaacatctatgatatattaagtagttttgaaatacactgagggatataaatatgcatgagct

SEQ ID NO: 5298 - DNA, 692 bp, mus musculus
cttacacacctcaattggagggaacccaagagtatgaagttagtagcatgtggtctagctaccagtgtttgtagctgtattagttttctattaccatgtaacaaattaccacacattaagcaggttagatcagcatataattgttacctcacaggcttcaccggtcaagagtctggtacaatttagttggatcttctgctcagggtcctataaagccaaaatcaagacattggccagctacattctcatctggaggctccacaaaggaaaggtctgattcaaagctcattgtgtgttggcagagtttttcttgtggctgtgagactgagttcactgtttccctgttagctgtcactgggcactgctctcaactcctaaaaatcacactcaaccccttgctactgggctgcctccacaagtgattcacaacatggttccttgcttctgcaaagccagcaggagaatctcccccatcaggaaggcccagtttctttcaagggttcacctgattaggtctcagtcttacccagaataatctctcttttaattaactaaaagtcaactcatatggggcctcaattacatctgcaaaatcacttcacttttgtcatatatcataatgtagtcactggagtgaaatccattatagtcacagttctactcatacagaaagggaaaggattatataggac

SEQ ID NO: 5299 - DNA, 933 bp, mus musculus
ctggatttttaaggactaatacataaacaatataatcatgattttcctattgtgatggtgttaatgcctgttagtgttcatcagtataaaggaaagctaaaaagtttgttgtgtgcaaaaataagtaaagttaaatatgaatatcagaagcacttacaatttcttactggcttatttttttcagctatatcagcttaaataatgcttaactctctgaagaacatggattaaaatgagcaaatttatagtatgaaatcagtatatagaatgtagtttaaaatgaaaatgaagttaaagctcacatttgtttttaattcaggctcttgacatgtaaaggcattttaagccacctacctatttccaagatggtatagaccacctgctgttaacatgctttaaggaaaatggagagatgtaaaagagttttggtgatttctctgctttgagtataaatgaaactgaaaatcttctgtcctgtactcttaatagtgaactattagagtgtttaaatctttgtgtgaaagtgaagactgtcataaaggattatcattagcctctttttatttttttgctatgtgagtacttgttagcactggataatctgaatatagtttagttacaatacttatttctgtatgtctctaaatttggtattttgtaaatgtgctttgacagtaaagaggtaattctgattgaaatgtaaaaaaaccattttacttgaacattataaatgatagatcagagtgtatgggtaagaattacagaaaatggagtagcctttacaaggtatatagcatcaacccagctaaggtaatcagaacagttttagaattagaattccttccacatgagacaagaactggtaaaatttgctgatcatgttagatagcaggaggctggaaattatttgaaaacttggatagtatattctat

SEQ ID NO: 5300 - DNA, 221 bp, mus musculus
aaattttgattttggaacttggtgccagaagacatcattgaaggtggaaacatatggctatgactggagtctggttcagggccctgaagttttaaaatcctaatgcttcctgcagaaatggagctctgagaagggaaatgaaagaattatcctttcttgataccccagagtactgcactatcaagtgcattatggtggttttatacattctcaagagggtc

SEQ ID NO: 5301 - DNA, 2654 bp, mus musculus
ttggcacttgtggaaaaatcctcaataagtttttatggagacatgactcatcttggcaattaatgacaaagaagaagaggtctggaacaccttgggtttgtacagaaaataaagcatttttagagtaatagaaataagcgcaaggtgaataaacaagagttagtaggaaaaaataagtcaagcattaaaatgaatgtctgatgataaaccaaatcaaggaatatttagtcttggtgtaaatgtaattttaaaaattttactttctcaagttagaaatgaagaatagtatactaaatattggagaaaggaggagagtgtagcataacagaataagcaaaaggagcttttgattcaccaaggttatagggaaagaaggtcatgaataaaataaaacctggattaaaactggtcaaatattaggcaagtaaatttagtgaaaacagcaataacatttactctaatgctgtcattttccctaaagagctacacaaattgttccaaagaccatgtttaaatgagtcatggtcatgataatcaatattttcattaattttgtcaaaatagatctgttatctttttcccaagatccccaagtgtttctgtttttctaccttagtgaaaacaattcaaatttggacccatggaacccaagatgcagttgaatatcagccaagagctcaagagaggctcctgggactcatgggcatgcagctcagtggccagacacattgtgaattgaccatggtagaaggcaatgtccaaatgctacgtcactggaaatgttcattcttgcaggcagttttggaccactggtaaataaaatcatgaattatttgatgaagagggaatgttgggaaaagatatctaaaggtgaccatttttagacaatgggctgaggaacaggtcgtaaatgaaatgaagggagaagttagaaagctgtattgcaatatttcaagaaaacattcaacttaatgaacagcattaaatataattaaatggtaatactgtaagagttttaaatattaaagtactgattatccttaatgccaccacattgagttaaactgctattagtattttgggtatatgtacatttttccttcaagaaacaggtcctggggatccttcagtgaactaaacttacatgaccaagtataattctaggacaataaccaaacaaggaaatctcagtaagtgctttggaggaacttgatcagaaacagagcctccatggattgttccttggaagcccgagaaggtctccatgaagccaagacataaatatgaggaagccggccatacacaggggtaagagtccaggcagcaagatagcagttagtgcagaggttttaaggattattaaaacctagcaattaaaaaaagcttatgtgtcaggagtttgtatagatacatatttttctaatccattattgataagatagacaattctgagtaccaatattatcaaatggaatgaggaaagctgtggggcctaggacaagtaaattaaaaacacagaagttgggtatagtggctgacacctgtaatcccaacactttgggaggctgagacaggagaattgcttgagcccaggaggttgaagcttcagtgagccgtattcatgctactgcactccagcctgggtgacagagcaagactgtctcaaaacaaaaccaaaaaacacatttacagatataaaatgcatcttcgtgtgatgattcaatcaaaatagtgtatgtaaaatgcagtgactggcacttagctttcaataaatctaagctattgtaacccccaaaattcctctttatgatacaaaccctacaaaccacttttcaagttaagatagcattgcaatacgttagtaattttgctcttaatttctgcatttccttactattgatcaaaggacaaatgtccctgaatatgcacatatatttaggtatacattaacagtttgaagctttaacctgcacccttgattcctgagcctccttactctattctattttctttctggtagtatttgtaactttctaacgtgcagtatacatttactgtgttactgtgtctgtcattgtctttgtcatagtcatggtctagctggattgtaagcttcataagggatgagatgcatgtttcattcactgatgtatcacgagtacctacaacagggcctgacatttagtattgtacagtatgtatttgttgaatgtaaaataaacaatagatgataaaacttaaaaaactcaacgttaaaaagcaagtaatcattagaaaatggacaaaaaacatgaacagatatttctctgcagagaatatacagatggcaaataagcatatgaaaagatcttcaacaaaattaaatcctcaatgaggacaacacacctatcacaatgaccaaaattaaaacatagtgataacataacactattcaattcttgctggaaagaatgcagagggactggatcattcattcattagtgatggaaatttaaaatgttaacacaaccctggaaagcattttggcagtatctaaaatactaaatatgaaactacagtatgacccaacaattgcactactggatatttaccccatagaaatgaaaacttatattcacacaaatgcctatatacaaatgtttatagaagcttac

SEQ ID NO: 5302 - DNA, 371 bp, mus musculus
caaacagatttgtaattctgtattaaaagtgtctaatttgtagggttacaaaaatcagaactgaggttgtattgtaggtaatcaacaaaacccactgcctctccttcctgacacctagctagactacaattctcagctcttcttgtacttatttgtggccatttaaataggatggtctccataatgtttccctcatagctacacaaaatggagattacttacaaactgaccttatgtcacattttttaaatgaaggatctaccagctggaaacagcctaaatcctgaattactgcttgaagtacctgccaatatcttctctagaatttcacatgggtaggaaataaaattttattatgttaagtcactatt

SEQ ID NO: 5303 - DNA, 387 bp, mus musculus
ctagagctccatccatggcattgcatctatcagtaatgtgttcctttatatcactcagcaacatccaatctatggaggaaccatagcttgtttatccattcaccaattgaaagacatgtgaatagtctccagttttggtgattttgaataaaaccactataattgttttcatatgttttgtgtaaatttaaatgttcatttttcttgggtaaatacctgacattggtcttgatgtatcgcatgtcagttgtatgtttaactttagaagaaactgctaagctattttccaaactggctatactatctgcattctctccagcaatttatgagagctcctgttgcctcagaactttagataagtaatagtacacctttctcatgtaattt

SEQ ID NO: 5304 - DNA, 1022 bp, mus musculus
agtgaggtttacctcctcgcccgccctccccggggagcgcaaccctgggctcgttcgttaccgagccagagagctaggaagcctgtcctccccttcgggtgctatttcctacctcctcccgacttcaccccctcccctcctttttttcttgttgcgggtttgaagcatggttttcatgtgattgttttttccctttttcatggacagtacctgcaccctaagcagttcagagttggcttctgttttccgttagcgctttgctgcacggacaaatgcatacaaatgcatttaagagcccacagaacaaggcgtggaaaagtctcccccacggcaaaaacgtaagtagcccacccgccgggtagggtaggggttagaccaacccctctctccaccccctggttctgctgagcctgatggagatctgaagtccggctccttggcactttttggctttaggagcggccgagtacccgcggtatcttccccttgtcttctcagcttgcaaaataccgtgtttgaaaggatgcctcgtgccagcagatctcagacagtttatgctaaagcgatcttttggctcgagaggaaaagctcgctggcgcgagtcccgaggtccagggcagcggctccctaagctccagagctgggctccgacgatctctctggctccagctcccgccgccctcgcgccctcctccccttctcctcccgcagggccctgtcgaggtcctgcttccccgaggtgcttctcagggcgtccagcctggcgattgctgtgacgctagaggtcccccagggtcagtgtgcgcagcctggaccactggactcaggcgtgaggaagggtcgccagcggggggaagggggtggctgcagaacctcgggcgtcggggggttgttttacccacgggctcagaggcaatcccctctggttagaaggccaacaaacgttgcccatccgagccgaggctgcgccctgatcattgccctgtcactggggaagtggcactcgcggcggggactgggga

SEQ ID NO: 5305 - DNA, 1029 bp, mus musculus
tattgtgcctatttctgtcaaaatgtaatgtttggtacatgatctatggcagttgtcactgaaggaaaaattttaggatgttggtcttcattcatgatttgccaattcttcgtatatatataatctaattctttcatcatagatgttccactcgtattactgtttacatggttttgaacgaatgcaagggggccagctgtatagcacgaccattcagacgtgactcaaagacagggctgtatgaagcaaaatgtacatttatcccaaagagatcccagactgccaaggaatccattgtgtttatgcaaaatcttgattctgtaagtaccttttttccagtttctcaaaggaatccttggggaaaaattaattagagaagctggattttctgctgtgaaattatgcgtaccaatagaaaggcagaaaattactaaggcaattaattagaggtcattttctctggcatgtatcagggtgtctctggaaattaccctgtcttttcttattaacctatttcttttattcaaatgtagcactgtagccttctcattagagtcacacaataaattcttagaacacatctcttccctcactgacttctgtggacttctgtatagagttacaatcttacttttaattccttttctaagtgttagccatattacttttctaaagaaatttataatgtagctttgaaaaggattgacattttagattttccattaccttcacactaaagcataccaagctattgcaaagtgatattgtgaaaacacatagggctctttctccactgaaaagacttaagaaaaaaaaaaattcacaattaccaatgtgtctaaccaattaaataataacacaccacaaaaaagttgaaaactaatgtttgacctgaaatatctgctttaaatatataaagcttagtgcataagaataggtaccttggagtcagatagacctgatattgaaacccagtctgtcattttaaagctgtgtccactgtgggaaaactgctaaatctgagattga

SEQ ID NO: 5306 - DNA, 802 bp, mus musculus
ccaaccctcatctggtctcatggaggtaagggaggactcactgaaagcagtgatatctaagctgaggccaagtagctttccaggaaaaccagagctggaggagtggggagtgtgaaagttgaagagttccaggtaaaaggaacatctcatgcaaatacctggaaataagagataaaatggtacatttgtggtattacagggactctgggatgcctggaatggattgtgcacagtctagctaaatggcattgaacaatcactaaaacactgcctgttctaggtcctcatggggcagagataggtgagaaagatggtctccacccacaaggaacctatgatttccctaggaatattgtacacaaatatctacgaagttaaacaacaacatacatttacctaagatgatataccagatcactgactgtaaagtggacaggagctacgagaattcaaagaagacaaccatcactgatgattccagagaggagcaagcactgggctggcctgagtaaagcgcagggtgtgtatggatgtggggtccagtgcagagcagagctggtttggggaccagtgaggacagcagctaaaagctcagcagggttaagttggggaatagtagaaaataagcttggaatggtagctggtggagggcttgggcatcaagagactgtggactttatgctgaaggcaatcaaaactagcttttgaagatcaggcaggatgaggtattcagtgggtcagggtagggatgacatgacagcagcatgcagagtgacctgggccaactgtagtcaggaggcca

SEQ ID NO: 5307 - DNA, 1149 bp, mus musculus
taatgaaattacttggctcaggaaaagtaacagacagaaaagcactttcagaagtaattttaaataaaaatttttatttggtttaataaatacattattcaaagtatgtgattatttaaatgacaacaattgtcttttccctgtgcaaggctcaagcaagatttaatgaatcaagtcagaagttggaccttttaaagtattcattagagcaaagattaaacgaagtccccaagaatcatcccaaaagcaggattattattgaagaactttcacttgttgctgcatcaccaacactaagtccacgtcaaagtatgatatctacgcaaaatcaatatagtacactatccaaaccagcagcactaacaggtatgtagtgtatagccattgttttttgtgtgtatttttgtctataactggttctgatttaataattgaaagaaaaacctgtgcatagatttttaaaattatgataagatacacatagaataaaatttgttgtattaaccattttaattttattcaatttggaagcatttgctatattcacaatattgtgtgaccatcaccactacctagtttcaaagcattttcatcaccccaaaaggaaacgcatacctgttaagcagtcactccccattcccccttcctcccagctgctagcaactactaattgtctgtctctacagatttgtctattctagatttgtcatatgatagaaattatataatttgtgaccttttttgcctggcttcttttacttagcatattgttgtcaaggttcattcatgttgtagtatgtatgagtacttcactcacttttaatgtctgaatagtattccacttgtgggaatattctaaaattcaaaactttttgtgcacccaacatgatgctcaaaggaaattctcattggagcattttggatttgggatttcagatttccagattagggatgcttaaccagtaagtataatataatataaacattccaaaatctgagatacttctggtcccaaggatttcagataaggaatactcaacctatactatatttgattgacctatttgtcagagcatatgagttctttttaccttttgactgttgtgagtagactgctatgaacatttacgtgcaggtttttgcttgaac

SEQ ID NO: 5308 - DNA, 498 bp, mus musculus
tgagcagtgtttcctgacagtaatgctctgtgatgatgtcagttcaatctgattgtcttattttcaggtacctttataatttaattatacctatctgttgattattttatggggtttctttaatgaggagatgttcagtttactctcattctagtgtgttgattttttttttttttttttttttggagaactggtaaatgtagttagattgttctatggcaacagcatgtatagcaaggagaagctacccttctggtatgcagaactgagaaaataggcttgaaaatttgggactgctcattattaccccttcatttgatttactgtagtttcagtgaaaattaaaataatgaaaaagaatagagttgagaatattggccatatggttgagatggattgaggggatcatgatataataatattttaccttgactcttctctgcaaaaatatattcctgcttatgctttctggtgcccttttagcctttcatcttcaaa

SEQ ID NO: 5309 - DNA, 1034 bp, mus musculus
tttttgagcatgatcgcatgtccatttattcattcaacagatatttattgaacatctgctatatgccagatgcctttctaaggactggagatagagtaatggaaaaaatattcctgtctttgtggactttatagtctggaaaaggagctagacaatggaaagaaaatggtaaaagaaattgctccattagatagcaatatgtgctaaggaaaacaagcaaagcaaggcagggggactgaacttttaaatgtgaccagagagggcttaattgagaaagtgacttgaagtaaaggcttgaaggaaaaagattccaagctggggaaagggtgcttgaggctaaggaaaaaatgaatgtgggaatcctgggtaagaacacatttggcttgtgaaggaactgaaggaggctgctgtgactggagtggagtgaccaaatcgatgagggttttcgtcaatctctgctcaagctgctataacaaaatacctaagactgagtgatttataagtaatagaaatttatttctcacaagtttagagactgggaagtcagagatcaaggtgccagtagacagattcagtgtccagtaagggctcactctttactacacaggatggtgccttgttgctacatcgtctcatggcagaagggcagagaagacaaactttagaactaaaagggctttatagatcatccagttcaactcctacattacatttatgagattcattttttcatgcatatatttctatattcattcactcaaccaatatttactgaagatctattatgcaccaaacactcctttaggaacttggggcacaggaataaactaaacagatgaaaataaactaaacagattttcttctgtttagtttatgaagcctattgatttactttggtggtgcgatctccatcccctgcaatttaccactcaaatcacccttcttcattctatacattgtaacatgaagacaaatcacacgcagaccaagttcttgagctaccctgtctcagcaaatgtttggtatttggtagg

SEQ ID NO: 5310 - DNA, 683 bp, mus musculus
tatctgccacattataaaaatagatattattttattcatttatagaatactcactgtgtttaaggcactattctggacatcgagctgcaatagtgaacataatcaagtttctgctctcattaagctttgcttctagtgaagacacaaataacaaataactaaacaaatgagtaatctaatatttctatatgtattagttagagctaagtaccccctgctcctccaagcttccaagcctccaagcctccctcctccaaaatgactaaaatcatgtatttttctttccatagtcttaaggtgcctggtagtgagtagctcaatccctgtgcacattagaaagaattaggattccttccaggtatctgctgcaccatctcctatggcattgttggctgattaagctaggtcaccattacatacaggtgacagctgccaggaggatcttaagctaccagcggcttccccgcagcacattgtattggagggaacttagaaatgaaaggatgccaatgaacgtgtggctaggtgaccatgtggtcagcttcaattccattactttggaaggagaagagagaggattttaatggctatctagtagtctctgcataattttgtacagttgtttaacaacataggagatgattatggagattattatggtaaattgtcataaaaatttctct

SEQ ID NO: 5311 - DNA, 218 bp, mus musculus
ctttgttctagtattagcatatagacagatttggttgcaaaaagtggagagaaaaaggctatatggatatctcatcatgttttgtcctgccactgagaaaaaacttggagatagaacacaaactaaattattctaaattataatcccagatcagaagctcattgtcccttcagtagtcatggtagtcctgagaaggagctcttataaacatggaacat

SEQ ID NO: 5312 - DNA, 1030 bp, mus musculus
taggcaagaaccacactggtggtcttaaactgtgggtgccaattacatcgttaacacataatcccatggcggagccactgagggagaagtaggcagtacattcctctcccatcccaagaactgcaccctggccacccctagctcttggtatgtagacacgtcactctagggatggaacactaaggaatagactgtgcctcacaaaggccctggaaacaggttcagccttttgggaatggaattcccacaattaaatgggaggaaggaaggtgcgggcttgaggtgggcatatatatcggtccctacataattccttatcctaaggtacagccaaagaagagcagtgtcctctatggtcagtgccttttaaactctggagccaaggatcaagctagcctgggcctgaggcagtgccactccagcgtttctcttcagaggcatcactctcaatggcacctctgtgtctcctcactgttttcaacactccatttaagtaaacagaacatggactgaacacattttttttctccctggttatttgcattttaagccctttatctctagctatagattgaaaggctttgtctctagttaaaggaatttcaagcaattgcaactagatggataagattagatttggtcctgaggggcttctctttgtccctaaaactcctgatattgtcagttttactatatccagacagtgaataggctttgttctgatgctattctatatgccttgcagaaacgtgtatgcctactgtggccaccagtgtcaaatactgcacaatgctcacctacaattttttcaaatagtgtttctctttctattttattctttggtgcttataagacatctgttgttatattttgtatcttccacctacttattcatggctttttcctctaccttgtggatgaatttcttggtatcatcactaattactgctttgacatcttcagagtaagaattatctttttagttatttttattttgatgattatatatgttttctattgttatgtatta

SEQ ID NO: 5313 - DNA, 967 bp, mus musculus
tgcagcatctgtactcttgagctgtttttaaggcagtaaagcaatctagattaaatcagttgtcctttttttaggttatatgactatttatagaatgaatatagtgactcatgatccgtaagatcatcttgatttcttgtattataaattgatcattctctattatttatttacttagagaataaaaaaaaatgagaaagattttacagttgtctctcactttgttccattttctttttgtgggcttaaaaattatagtaggtagataaattgcctttctttggcttctgaaatgattttaatagcttaagctaaattaaaaaatatatctctgaatctttgttctagcaatttgatgtgttagatattaaatatattcatagaaaaagagcttatgttataaatttattattattgtgtacctaattttaaatgcctattatgactgcatttatttggcatttttaaaatctggtttgatttagctcctgataaagcatattgaattcagaaaatataataccatttaggattttttgctgcaaaatctattacgctgtaggaggtttcacatttccagaatggaagcagtaagttttgtggggtcagggtgtaaccagtgaatgaaagatgaaagtcagaactcaaaatgaagtgccttttctgtttaacactgggcactgatagaaaatgataatgtttgattaatgaacggcagccttgcagcgggtgaaaacatctgcaagaagtgatttattatttcaaaggtattggaagcttgcagtatcttgccgatttaggtatgtgtgcctgaataaaataaatgagatgcaacatgtgaaaaatgaaaacacattacttgtaaaggatgtgtcacaagcagggtatttttgttcaagtacactttgtcatggggatttttaatgctgttctgaatacaaatcatttagctggttcataaaatcgc

SEQ ID NO: 5314 - DNA, 180 bp, mus musculus
taagacatttgattaatactattaaagatagaagggattgtcatataaagtagcactgaatttgtggtcaatttctgagttgtttttcattcactggtcttgcctttatactacttttactttctgtgcttttactgaacgttttaaatctaaacagggaaatgaataaaattagaatac

SEQ ID NO: 5315 - DNA, 180 bp, mus musculus; identical to SEQ ID NO: 5314

SEQ ID NO: 5316 - DNA, 119 bp, mus musculus
tttcctccaactttgtttaagaagaaatcacattcctccagtagtaagaatatttattctttatctgttcattgggaaattgataaattccactattccttccctctgggtctgtaaca

SEQ ID NO: 5317 - DNA, 1297 bp, mus musculus
catcacattccactggctagaaaaagatggtttgttctgttctcttaaaaaatgcataattgtgcatttcactgcagcaaaagttaagacattttctctttctcagcaggccaaaggtaggcaatgctctggctataactttctgttgtcccaagtgtctcattggaagcgtggattgtggctgggaattttgctcctgacatgcttctgggagtcaagggaggtgtctaatgccaaccagtctcttcattttcaaaaataggggcaatgcaaacatctcatttatttggttttcaaaaatgtcctcattcatcatgtcccttgtttccattttgataacccatgatagtatgctgctttcaatttggcataagtggtacaaggttaatgtcagtcagctttgttggatgcctatatccttttgaggcttgtttttgtatttactttccacatgaagatcatgagtttgagactggctgaaaatgttcaatctctgtaaatgtctcagggcacacttagtctggtgtcatgagaaagcctggaagcactgggtctagggtctacatcccagcttcattgatcattagctctggcatcatggaacagtgacaatctcttggagcctcagtttctttaactgtaaatccggtgggttagataaaacaatagattataacaatattaatattattaataataactgaaatttttgagtgttttgacaggaactttacatggcttctctcacttaatcatcaaagcagcattatgaggcaggaactattattaccccacttcgcagaggagtcaactgagttcatttatttgtttagcataatgtaagtggtgaagacaatactgaggccagggcacctgactttatctattcgcaaagtgtgaactgcagaccagcagcataaacaatacctgggagcttgttcaaaaggcaaattcttgggtgcactctagactgactcaaaaccttttgggtgatgttcaggactctgtgttttaacaagctctgtgggtgatttaacactgaaagtggaagctctgttctaggacctgtgttctcaatcctagattgtggttttctatgttcaatgaatttttcagtgtcaagaacgtagtccgactgactcttgattctgtggtggtctccttcctccatcactgctttgagtctgcctatccctcctgcagctgtgtgctggacccagataatggcctctgcgtagagaagcagcacagggcatgtgaagattgtattcctgctgggacttccagtgttctttcc

SEQ ID NO: 5318 - DNA, 807 bp, mus musculus
atagggaactcaattaggaattaaattcctagatataacatagaaacaaaattagttgtgaacaattatttgaaattgaagatcttagggtacttgtgtttttctaataaaaatgctttcaagcaacagatgttatttgtattctcactagtaattcagtaagtggaacatcaataacaaaagctaactaactctaatactttaaagcacctaaaatttagatttttacaaatatcattcatcacatgtaactcagtttctcagaaacacttatgtttctttctgtgtggctattgaggatgtctatcaaaatggtttagcatttttccattcaaccctcttcatcatgattatgtctactgtttatgcagtttggcaagctagtgtctgaggtcatatttagaaagttctagatgccttaagaataataaatggctatttaccttggcccatggctacctactactctcaaggttcatttcccttttatttacttgaacgtggtattgacatgtttgcttttgctccttctaaatttgctttcattctattgtgtttggagtgaaggaaatctttagagatatctaggaaataaaagcaagtggaggccttgagggatatttaggaagtatactttaaaagtatgaatgaaaaggagctttcaaggattacttatggggtattttattcataatttcacctgaatcacctagcacatctcatatctattagatgcttagtcagtctttttgaatacatgaatgagtaaattattaaagtattttaattatgtatttatataatgtc

SEQ ID NO: 5319 - DNA, 514 bp, mus musculus
ataattatatttttggaaaatggtttagtaggaaaaaaaaagtcttgagaatctctaatgtttaatagtcaaaatcaagatccaatataacaggttaaattattccaaggacagtagagcacatgcttacacattaacaagtaaaatgagctgctctcaagcttttaaagcagggatagaagttagggaggcaaaaaagaaaggtaattaaaaatcgcagcagttaatcatttggagcaaattactcatggaacattctgggaactattacgaatttagtattcatattcaactagactgaaaaaggatggaggaaaacaatgaataatagtattattcttaagatatacaagcttcttcacagctgtagagacttcattgggcttaattttaattatgcagaaagaccaaaaattccaaggaattaaataaatcagtaatgcatgacatgttattagctttgaattaataaaaaagtatcattttgcatttgtttaaacaggaaagtagttaa

SEQ ID NO: 5320 - DNA, 294 bp, mus musculus
ttgctagcccaatattctcagattctgtgaagcaaacaactgttcttactgcataatctttaacacttctacattttgagatttatcaactgctctttttgttaatttttctgaataaattcataatgttaccaaatatctaaggcttagattagatctatagccccaaaaacactatgagaaaattttaattctctgcctggagttttataataaagataccatcaaattatcataccaataagtcttttgttacataaaaaatgttttgatatctctgtaaaaagccttctc

SEQ ID NO: 5321 - DNA, 261 bp, mus musculus
ttctaaagattgatagatattgagctgcttacccaacaagatttactaagagtgtttttaagctgctttatctgcgaaaaactgtcaagttgaatgatttccttgctgtcagtgaatctcttcttctttacattgatcattaagcttttattctttactgtctctgtaaagtacttcatggtcaactgcacatcttttgtcaacccatagcaaaagcattggttatggttttgggtctctgtctccaagacatatattgac

SEQ ID NO: 5322 - DNA, 344 bp, mus musculus
gaagcttatttagttcttaaactattccaggatagcttttgagccttgggaaataagataaaaatctttatttccagtcttttctgtaatgtcatatgtctcattttaaattatatttaatggatgattatggtcaaactattatgtgcatggttagatatactactactccaaacacatatcaatagcaataaagcatggatctgaagtaaaagcacaaaatggtaacctggaagaaaattacaggcctaatggccttcaaggctggaagcaggcagtgttgcccaatagtttgataactatgtggtaattaatatttaaattatccataagaaatggaaggc

SEQ ID NO: 5323 - DNA, 711 bp, mus musculus
atcactggtattccccaaatccacagggttttatgggagttccactattcattaattctccaacatagtaaaagccgttatctgaaaattaacaaccctcaattctaagtattttagtcttcctcataaatatatatttcataaagttttataatagtacccaaattgtttcatgtataactgatattaattttacccccataatattcaagtctaaggaattttattttgagtcaccatgttaaatcaaatatcctccaagcttcgaaatactgacaataatttcaattcagtcaatattgagactctctcattaaacattgaaaactcctgagtttatacaacgcctaaaaaacagttcatcatgattttctccttagccttgctcctttagcttctcgctgctgcaattgagcagtgatgttgactaccttttaggcactggtttcctctgagtttaaccaaattcagatattcatgccattccagttctctgcactgaccttcatctaaaagcacacagcaatcttgtaatccactcccattttggggcaatgtatgccgtctggacacaagtttccatagcaaactgaaatgccaaagctccttttgtaaatctcaggtaacttcaaactcttgggctagtcacatcggctcccactaaaaaaggactttcactgcctacctctctgaaataatctcgcctttaaa

SEQ ID NO: 5324 - DNA, 466 bp, mus musculus
ttttgatcccttgtaattttttttattattaactataaagcatcatgggtatagagtgtctctctgggttttgacctgaattgcatccctcagtaacgagcccaagaatacttcttcatgagctctcatttcatacctgtaccagagatttccaagagttttggtcctctgtctctggcttcacatttgcattcagattttagctattacaaaatataaatattaaaatcattactttttaataattttatttatagacttattagctgaggtgattaacacaaaatcttcacatgaattgaagtttgtttggtccacaatggaaaataaattaagaaagtacaagagtcatatttttacttattatttttataaggtcaggtatacaatgttacattcaacaaaagaattaattgttttataaatacttccattgactgtttaggccatttgaaaacaaacctta

SEQ ID NO: 5325 - DNA, 453 bp, mus musculus
agtgaagccaaaggaaagaaaaattcattttgacaggaggatctctgaggacttcataaaaatgatggcacttgaactaaacattgaagtatgaatagaaatttagtatgatgaaaaggacatgaaaggcattcaaggtacaaggagacagcaacagctaagggattgaagtttttaaaatgcatttgtgtgcaggtgttatttaggcaagcaatgatcaaatttcaaatgcatataagcatgtccctgctgctttatttgtgtcagaacagcggattgttaagcacaatcttaatgttttgttcttagactgctttgttgacaaaccttatgatttatttaaaatgtgccacgatttttcctttctagctgcagtgttacagttgttcatcataggaatttcaagaaaatgtccagatagctgcaatttccaaaccacaggttactaatata

SEQ ID NO: 5326 - DNA, 855 bp, mus musculus
gtgatttggtgtgcagagaagagttaacataaaaagcttgaatgtcatccttttaaatagggccacaaggtcctattgcttacaaggctggcccttagctggcacctggaaacatggatttcaagagagtggcatcatccctaggacttataaagatgtctcactgtgcctgaaccgtttgtgcaaacaagagttatacttaatacctgctttccttctggcagtctagaattttagtacatgctaagcagagtgcctatgagactatcccttaataaaaacgctgggaactgagtctgtaacaatctttctcgggaggcaataacatttcacataagttgtcataattccttgttgagggaaataagcacatcctgtgtaaaggcatgggaaggagactctgatagcttgtgcttggtttcctcaggactttgactttcctccatgtgcctttttcctttgtgattttgcttggtctcttttttgctgtaaccaaccatatctctgaatatgattcaatgctgagtcttgagagttttcctataggatcatcaaacctggaagtggtcttggggacctgacacatggagtattgcacaagctttactagaataatttcaggattttgaaattgtaaactaagtcaacacttttcttgcaacccagaacattcgaatatggacctggaacccagagattttagctagagtcccctgaaaagaggaggcttcctcctggtgggtgacactgtgaattagcaggcacctggataaattagaggacctctgggctcacaagccatcacttctgacatcctttggttttccaagcattcccagtgattcatttgtctgt

SEQ ID NO: 5327 - DNA, 314 bp, mus musculus
gatgagaaacacaggaatgggaccaagaggaaaaataaagacaatgtatttgtcgtgcgcccatcatatgctaggtgctagaaatacaaagatgaaaaagcatatttcttatactccaggaccttacagagacacaaacaacatatctatgtgatggtgatgataatattgaaaacaatagttgtcaattaattgcacataatcaccgtgtacaagatagaaaattgtatttgtggctattgtaaggacacagggtaagggcactcagttctctgaggggatggaaatgagtcagtggattagggagggggcaa

SEQ ID NO: 5328 - DNA, 756 bp, mus musculus
atacaagcaagtataacttgaagggcatataaagggcatatacaaacaggatagaatatgagcatttaatgatttatataggcaccagaaatctgaaagcccctataaccttttctattcagagactttatccttctcttattcctacagttatagtctttgacagataatgttgaccttgtaaattaaagtgtaatttgattgctttggagcatttttggtgtgtttgcttccttaactgtgtgtacagtagagctacatttaaacacagggaatttggcccttttgcttttaaaagtaaataccaggctcactatcattgaaggagaaaccatattcaaaattgttaggctataattgttctgaatcatacattcaaaagtgtatgtgtcttatcaacataaagtattttaaaagattggaacactagaaaactaaataggatggctattgaggacaacaggcatagttttaccattttggtaccttctactgagttaatcttggtataaacatatttactttaaaagtaatgtcaaataaaaacctaaatgaaaaatgaaatagttttctatcaaggaatcatcttactgtatctctgtatcatttatggtgtatgtgttacatacattacaaatgttatttgatgtcatgatttctgaatccaaactggtatttgtcagctaagatttactgcttgagtacagtaataaaaatgaaaatagttttctgaaattttatgtttaaactaatttg

SEQ ID NO: 5329 - DNA, 306 bp, mus musculus
tcccaccaagataactcctaatgactttttcaaaaataacgtaatctctatatagggttagataatatatgtctgcagatgtgttttgttaaacaaagggaacatctttgtttcaaatctcttcttttacttgccctcatagtgttctgtcatatggcagaccatagttttattgattcagagttttgctcttataaataatgctgcgttgtttgggtacatacctttgcagacttacacagacatttccataatgtaaattcctagcagtggtcaagggatttgtgcatttaaatattgatggat

SEQ ID NO: 5330 - DNA, 318 bp, mus musculus
ctgagagctgcaggggaggcctgctgtctgactggcagagagagtcccaccactccctaccctgtaccctggaagaccaggctgcccagcctgtccacctagtagaccgtttgcctgcccaattctccttctctgattcctgatgtgcagcttgatgcctgcatgggctgcaccagctgagattgtctctaggtcctcccttctgccagctggtgtccagggaagtgggtcctctggcctgcttcctgccagccagaatttcgaggaccttgtttctcccactgcagctttcgaccctgtcctggatcacagactagg

SEQ ID NO: 5331 - DNA, 1550 bp, mus musculus
ggcttctgctgctgctgctgtccctagacctgaagactggccacaaaaccagaggcatttcccaatgtgtgagccggggccttcccaggctgcgctggcagaggctgcaggggaaccaggagcctaaattcccaagcaggcaaattacccactgagcaccctgcaccctagtgcctagggaccagtccaggagacagggcagaggaggacacatctgccaggtggctcccagggtcccacccccgagtcattctcatactcagtgccactgttaatgccttccgctttagcttaattaagccatctgcccacattaaatggtaaattatctcaatcactccctggatcccagaggggagaaagagatgaaaggaaaatgtcatcccttgagtggagctggaggactctgccccacctgtgatgacttctccctcagtgagagacagcctccagtgtttacaaatccttctgtgtccttgaaaatctaactccacctgtcatctctctgcttctttctcttcctatagggaggagcgaggctcttacatgtctgaccatgggtaggaaaaaagatgagagcttttctgtttttcctctaccttaggggtgcttgagtgtctgtaatgttgctctcttccaataagcctgttatttttgcacccctgtcagctctcagttctgctgaggaagcactgtgctcccactgaagtgacctgtgaacaccactctgctctgcaggcatgtggccagaggctggaggatggagggatctcattacaggcatctgtgggtaagtggggaggtgtctcccagggtagaagcaccttcttcgaagggttgctgtggaccaggggatggcccttgcttggctttgcagttccagacattggatttataagcatgctcgtagttgttcaggttcaagaaccattgacttacagtcactaaatccctaagagactgatgaacctgagtccagtaaaaaactgggagacatgacttaagagagattgactcacagtcactaaacttctaagagactgagtgtcttggttcattttgtgttgctatagcagaatacccaaggctgagtaatttataaagaaaagaggtatatttagctcatggttctgcaggctgggaggttcaagaagcatggtgctggcatctgcttggcttctgtgtgggctttcttgctgcattaagacatggtggaagatcaaaggggaagtggacatgtgcaaagaggtaaatttcaaggagtgtcctggttctattaaagcccactctcaagggagcattcctgtgagaactagttcagtctcacagagagcaagcgctgactaccaccaaccatttatgagagatctgtccccacctgtcaccgggccccacttcccaacaccgccacattggggatcagtttcaacatgcattttggtggggtcaaactcaaaccatagcactaaggagcccacggtaaatgtaaaatggtgagtattcctaccaagtattccctttttggtaccaagcttacccagaaaactaat

SEQ ID NO: 5332 - DNA, 402 bp, mus musculus
cagtaaatgtttgttgaacaaatgaaatgattgtaccattgtggtgtgttactttaaaagattactataatacttctaagtggatgttgtgaattactaaattttaaagcctcttcttatgtactctgcagcacatactgccttctggttttaatgttaacagatgcttagatgctttttgcacatgttttcctaaaatatatttttttcttcatgaatccaattttggttactataggcagttctgataagttgagagagaagcttgagaagcaagagctaaaattaagggagcattttgatataagataccattcagaatcaggcacaagtgttgtatttagtctgcatatggtctgtaggtgataaaattattctgaggcttaactctgtgcagtttag

SEQ ID NO: 5333 - DNA, 783 bp, mus musculus
tcccccaagtatatacgctatccttattaagaagaccttcccacggtggagcaaaaatggcagagtaaagaatgccaaaataataaactggcagaaactggcaggatcaactttattaaaactctggaaactaatgaaaagtttacagtaacctagtgaatgcttaatcaaggggaaaaacacctaaatctctctaagaaagctttgtagtgctttatttatcctggccccatccctcactccctagctcagtggcagtcttgaagacaacagagtacattccaggtataggtttctagtaccagaggaagtggaatggaccttattttcaaagaactgtggtcgtttgttttgacctgtctgttggctttctgaaggactagctcaaagggcttgctttatttcagcttactgaaagaagagagttttcaatttcaaaactctcccagaattgacataactacactctgggtcatttgttaaaaacatttaaaggcaaatgcattagctgctgctgcctggggcaagggataacaggaaggacaaacaatagacaaaccagaaagcttgtgagcaaagtctcgggaattagacactttgaggaataaaggctctaaaaagctcccacatgtttctgggaatcaaggccccacacacagccagagctgggcatatgctcagaaaagacttgagaaagtcctaagctgtcaagtctgcctaaccttcatgttctgtacaagtaggaggagaaggctaaggcagagttgtaaactgtttggctga

SEQ ID NO: 5334 - DNA, 783 bp, mus musculus; identical to SEQ ID NO: 5333

SEQ ID NO: 5335 - DNA, 736 bp, mus musculus
tttatcgtggacaaagagcaaatagtttgtggattggcacaagtctgcagatcacttctgtagtgttgctgtaactgtgtaacagttcatgtatgtgtcaggatgggaatcggttttatttatttaggggattccttttagtcttgctggtatgatatgattgaaactgaggactggacttttgtctagaggcccctctgactagaagcaacaattaaaacaccttttcagctcactgacttcctcctgttcttcagctcatcacttgctgggtagagcatttgtagcatgctatttgttttccaggcctgctgcttttctggccaatgctctcagggatgggctgcctgtgatttgttataaaggaaattctatcacaagagagggaaagggaaaaggaagtacatgggtcattatactgggaggaaggtggtctgatgctatgtagtccgatgtggacttgtgggtgatcaaatactccatttgagctgtttctttcttttcttttcttttcttttttttttttagacagagttttgctcttgttgcccaggctgaagtggaatggcgtgatctcagctcactgcaacctctgcctcccaggtttaagcgattctcctgcctcagcctcccaaatagctgggattacaggtgcccgccaccatgcatttgggctgtttcattcaccacctctactgctttgttcagccagtcaagaaatgtttcttgaaatctc

SEQ ID NO: 5336 - DNA, 443 bp, mus musculus
acataaagactaagagtagctcagctatgtccttatatttaagtgctaacattttacaaaattggctttacaggcattttcttatctcattagcttaagaatgcttaaaaaaatgctgcttctgttacttctgattgttcctaccctcctgacacacacatcaaacaacaaaaccaagtggacaaccgccactaccagatatataacaaagaaaccccttaacattgctggagtccctctgatagttttttgtctcctgctctttttggagatctatagcttcaatgtcaacttccggaagatgatagtattcttaaggccactttttctacccctaatatctcatgttgggatttcccctttcactcttaccagactcagtgaaaacaaagggatctgctatagttctgccttctacccctcagcttcctattattggagcc

SEQ ID NO: 5337 - DNA, 641 bp, mus musculus
cctaaattatttatttcctctctgaaatctttccaaagttgttttagccttaagatgaagagatgcccccaagtggattgttatcagacagactctaaaaagtagttgttgtgaaacctggggtatatattaaaagttcagacttctagccctcatcaccagtgattctgattcatggttctggggtgtggggcccaggaatgtgcatcttaacagcaccctccttcccctctcccccacatacaatatcctctacccaatttacaggtaattttggtgtgaattccctgtagaacacacttgaggcacagtgccacctcacagttgacttgggaaagcaaaacagaagacattggttcctgctttctaatggggcattacattcagacctgtttgcttaagattatagcaaaattaccttgacagagttttgagtgtttccaagccttcagtcaaatagttacactgtcttggtttactgctgcagatggctaagcgaagtttctagaaggctatcaattttcccatctctttagtctttaggtctgggttggtagaagaagggttgcagaagggcactttatctaccacgccgtgtctctagaaatctagcaattttgaatcctgtattactattcaca

SEQ ID NO: 5338 - DNA, 1292 bp, mus musculus
ttcctgtggagggtagcagaagggaaacttcaattacagtataactggtctgatctgttctacatattaaagttcatgctattttctttgtgataaataaagactgttctgctgcatctgaaactctgaaaaccattgctctagcgctaaccgcctgtctctataacaggtatccactcacagttataatgaaagcccaaagatgtgcttgagttagcttatgtcaatgaaaatgttgctagagacttggtctagatttgctgagcggcatgtgaaaactacagtgtactctgatcctcctctccctctctcttttcaccaccattgttgtcaatatatattccttccacattttacccacagaaatctttgtgtactggggtcacattctccataaccaagttgtcaaacaggaagacttctggaaaagaagatttctcctaacttggggaagagcacttagagggaaagagatgagagatggtcagagccaggatgtatttaatcttggtctgcagtggacatttatcatctgccaagactccttctttctggcactgacatcctttcacttaggaacatccccccaatgatgaggctctgtaagggcttctctcattttcccttggactgtaagatgacctaatattccaagatattaaccaagtgcttttttttttctttgaaatggagttttgctcttgttgcccaggctggagtgcaatggtgcaatctcagctcactgcaacctctgcctcccaggttcaagcgattctcctgcctcagcctcccgagtagctgggattacacgcatgtgccatcacgcctggctaattttgtctttttagtagagacagggtttctccatgttggtcaggctggtctcgaactccccacctcaggtgatccaccctccttgccctcccaaagtgctgggattgcaggcatgagccaccgtacttggcctaaccaggtgctttcaaaggtgttttgaaccaagaagcaagtcctgccctgttggatgcaaaactggaaacatgtgagatgggaactgctggcatccatgcctccagcctgagaggaaagccagccagagagcatagagctgcctgcagcacgcaggaaaaaagggtgaggagagcgtgtcccgagagcctccagcttctggttctagtggccactgatgtccaaccctgtttctgcccttcttgttttggttacaggagcccacaaatcctctctaccattggcgcttattggaattgaatttccatcatttttttaaaaccgag

SEQ ID NO: 5339 - DNA, 1157 bp, mus musculus
tctttagggtaccttaaatgaggcacttagatgacatggggaagaatacaatcatttgaccttatggttatctccctacaaagttgatttattttgaataaagtccaaaatccttgcgaagtctcaatgagatcaggcccctgcccacaactacatttctagcctccttctctatcacttcctagccaccccaattctcccttcatttatgccacttcagtcacactagctttctttctgtttctagaagaggctgtttatcttccagcctttcaatgaccatttactctgccagaaatgcgcatctcctagacattcccatggctggctccttctcataattcatctcaaatattacctttcagaaaagactttttcttaaccaccgtgtacaaactcgttgttgccccaaccataaacaacttctatctcatcattctgttttattccacttgcatctagcaccatgtcacattttctttttattaatgtttctttgttaattgactgtctccctctactagaatgtaagcttaatcagagcaagaaccatgtctgtgtcttattcactgatgtgtccctctatcctagcacagtgcttcattcgtaatagtgcttaacaaatacctgtgtgatgagcaaataaacagaatcgatgtatagttgacccttgaacaacacaggtttgaactgcatgggttcacttatacaaagatttccttccacctctgccacccctaagatagcaagaccagcccctcctcttgctccttctcttcagcctacttaaccgaagatggtgagggtgaagacctttattatgattgagttccacttaatgaatagtaaatatatttctcttccttatgatcttttctctagtttacttaattgtaagaacacagaatataatacctataacatacaaaatacgtgttaatagactattatgctatcagtaaggcttccagtcaacagtagactattagtagttaagttttggaatcataaagccatacacaaattttcgactgcacaggtggctggttcccctaactctcgcattgttcaagggtcaattgtcttatgctactgttatcagcagaataagcttgaggcaagataagaggttcaggatttatgggttattaactcaa

SEQ ID NO: 5340 - DNA, 827 bp, mus musculus
ccaaaattggaaactgtttaataaatttgttgaattttataaagaaatttggagtaaaaaaccccacacatacataaaagggcaatgacccagtggggctcaacagagaattgttttttaaaaaagcaaaaggatcacgcctgtaatcccagcactttgggaggccgaggcaggtggatcacgaggtcaggagatcgagaccatcctagctaacacggtgaaaccccgtctctactaaaactacaaaaaaattagccgagcgtggtggtgcccgcctctagtcccagctactcgagaggctgaggcaggagaatggcgtgaacccaggaggcggagcttgcagtgagcagagatcgcgccactgcactccagcctgggtgacagagcgagactccgtctcacacacacacacacacacacacacacacacacacacaaaacgcaaaaggagagccaattgaagcaatgtctgtaactagtctgaaatagataactccttcagcatttcatatagtttatgaacgttttaaataaatccaagttggtatatctaaagcatggataatagaaacacccaggattcagatgatactggtataaaagatagcaatgaattatcttctacaagcattgacaaggaagagaaaggaatgctagcaaatactatcacggaggatttttttaaattgagaagaaaatggcattaataaagccaagacactgatgaagaagagacagtgaatgacattttaatctaatttgatgttagtgatgaccaatgccgtttccagatggtaggagttaatctgattaagagaggaagtgaa

SEQ ID NO: 5341 - DNA, 1105 bp, mus musculus
ctcagcagccattcctcaccagccattcaaggcagttttttattttcaaactttggtttgcagatcacctggaacagaattattctgggggaggaagcgttgttgataaattttcacattcttgttttttttttttcttttcttttttttttttttttttgagacggagtctcgctctgtcgcccaggctggagtgcagtggcgcgatctcggctcactgcaagctccgcctcccgggttcacgccattctcctgcctcagcctcccgagtagctgggactacaggcgcccgctaccacgcccggctaattttttgtatttttagtagagacggggtttcaccgtgttagccaggatggtctcgatctcctgacctcgtgatccgcccgcctcggcctcccaaagtgctgggattacaggcgtgagccaccgcgcccggccgataaattttcacattcttaagctgtatcccaggtcaactgactcagcttctaagggatgggacttgggaaactgtgctgttaaagcaagaacccagattaatcttatatgccctaggttttgagaagcagtggtttagcaaccacaccaccttttttcagggccactgccacatatgtcttctgaatttctgggattttgactgcttgagtggaatgggtcattgtcagtatacatccctgaagattcctgtttggaatttgatccattggccacaaattctttccccatcccacccaacaatgcaggatattttttccaggctggcctggaggaaaaaccaatcattgttctcattctgactaattggagacagtctggccgcaatcatctctctttgtgcctttctcttctacagtacttgggcagggctgcagggcagctggtgtggagggtggctggggtggggcccagagaaaaataattaaaactgcaatgccttctgtcattaagtcctgagtggaatgctgagttgaataatggaaagggtctctgctgtctttgggaatatttttgttattgtcccaagtaaaagacttgagtgtcaaatgagattcttttatgtctgtacttctccataattttttagaatttcctacggtct

SEQ ID NO: 5342 - DNA, 905 bp, mus musculus
ctggaagaaattgggtagtgagggtcttcctgttaggccttacttcagtatttatttgtgtagctggagatcccagaccagcctttctgtcagcgatgcttcagtgaggagcatggggctgaatctcagcttggaattaaaacataccacctttctgtgtgaatgtggatgtaaatattaccagcagacaggtcactcaagagataggtgcccatatttccaagtctaaacaatctctgtaggtcaaacagggaggccccgtgtgcttgttggcaacaccacctttagcagaagtctgaattcccagtgaatgctgcctgtgttctgctctatcgaggaactatggcctccagaagcgttgccctacaagctccatcctagttaatgacttcaggcagaaatgtgcagggaaaagttggtttcagttgggtccactgtatgaggtgatatgtaagttttatgggctctcctcccgggattccttgcttttgactgagaatgtgttttcagttgttgctccaatccatcggtggtgatagatttgcccagctccctgcatatgttctcgccctgttccccaagtgattcaaagcatatttacaagacagctggcttgggtttacagggagcaagtctgaggcatggatcagagcagagtgaagtgacccatacagggaacaaacttatgaccttggcctcctaagcactatctccttacagattcagctaatacagctcccgaaagcctgcccttcatctaagtccacatgcgacattgaaacactcaaaggcagcctggcagcagcaagaagaaaaacattcaaaccaagttagatttcctggcatcatgttgtttgttcttaacctgaagatacatttggggacccctagtctggtgacactga

SEQ ID NO: 5343 - DNA, 1261 bp, mus musculus
gtttggaattcttttcttttttctcccagtctgtctgaattcctcttgccaggccaagtctcacttcttttgggtagcctttttcaactacaccaggccaccctcagcctctcccctaatctcttgcattgtttgaaattctgcagttcaatgttttcttaatgaaagtagacttgagtgggttcccacacgtgacagggactttatgtccagaacacaacctggcatatggtagactttcagaaactgagttaatgatgaattggtaatgactaaaatgcagaaatggaggcacgaaatattatttgcatgttgatagtttgcttatattgtagaagagggatagaaagagaggataattattttcttagttaattttcacccttttcatgtaacttccaaaagaggaaagtaccttctggaaatatgccagagcagaccactgtaagctgagttttctgagcttaactaacactggcactgaatgattatagtgtttaataatttcgggtagtggggtggggcattgtttagtacctttccctttgctgtcatgccaaatctctcagatgtcatgcacatctgagaaaatcagaggggtttcactggctgcacttattgggggagaagaaggctggggagaggaaggaagataattcattctgttttcatcagagcagcaagatttgtgtggggtatagatttggcattcattacatcatgtattgataagggatggttaaaagatcagtagcttctcgtctttgggtggaagagagtttcacctatcactagattgaacacatttccttaggttgactaaaccttctttttctctgacctcaagggtgcagagaactttgaaagccctggtataaacacagtgtgctatgggttgttagaagcacattagtcatgttaaaggagaataggagagttcttgggatcactgaatctattcagcaagtcatgttctgtgcatccataggccagcaacagtgttccagcaggtgtgtgagagggtcacatgcgatacttcagatttctccttcctgtggaggctaaatttgctatgggtagttaaaaggaaagggcctactttttattcagagagttacttcagatatacatggtcttctgagaagtttatcaggatcttaccataattataaaacaggaataaactttctgggttttatttgctaagaaatgttttgctttggctcatcatctcagagctatttcatgtgcttagcacatc

SEQ ID NO: 5344 - DNA, 16041 bp, mus musculus
cttcaggactgtgaaggccttattgttcgctctgccaccaaggtgaccgctgatgtcatcaacgcagctgagaaactccaggtggtgggcagggctggcacaggtgtggacaatgtggatctggaggccgcaacaaggaagggcatcttggttatgaagtaagtcatggaggctgcgggcggtttgggggtaggggggtgagtgcggagactgaccacacctagggagaaaaaactcacttgagagaaagctgagtccattggaagggcttccaggaggatgcctggtctagggcctgcatggtcaacacacacagcatagtggtttcaaggtttttggaaggcagctatgctcaccactatatcaccaatgccatcagggtgttacacagtttttgaaattgagagtccctgcataatctcaaaatgtttcacgagcccaccccatgcgcagttgcttgcacctctgtgacctggttcaggaatcggaaggtcagtgagttcatctgcatttcctgctcccacccagccccctctgcctctattaatgctgtttgtggcaggtttttgtcagctctactttactgtgcttgtacagaggcacaacctttgctagcagactaatgactagaatccttgccctccccacttccctgccaccttctggaactaagacactagtttctctttcagtgctctagggcaagaggagaagggtcccatttaaagctgtttctgcagaaacacaggggcagaggtcatcagcacgccagtgctgtactgtacccgttctgtcacttagatggtatggcaaggccatccccaggcctctttgttcttaagacttttctcttcccttggggacttcattgtccttaagacctttcccctcccctgcactgcacttccccctgtagggtagaggttaattggtcacctgactgaagtcaatattcaacagcagaaatgttaaacgataacccatcccacattcttgccttggacccagaggcagccaggccccaatctctgcacctctacttgcgcccccatacagcctgtttgctgtgggaggatgagaagccaggtggttttgcaggcagacagactctgagagtccgtttatcttatacaggatctcttgactttttcttcttgtaaccttattaaccttcattccagagatgaaaaagacagacccagtaggggaataatcagggtgaacacgtatatgaaattctttcaaaaacctaaaaagcatttaagaaaagaaaaatagttttgtgggttgccacctctatttttttgtttataaaatgggaagggtctggattgccctgtgacttagggtgtgaggaggctttctcagttcagaacttgttgagagataggaagagtagtcagacaggtggagattactaataaaagctaggttggggctgcgtgtgggggctcacacctgtaatcccagcactttggaaggccaaggtgggaggatcacttgggcccaggagtttgagaccagcctgggcaacaaagtgagacccccatctctacaaaaatacaaaaaaaaaaaaagaaggaaagaaaagccaggtatgttggcaccagcctgtagtctcagctactgagaaggttgagctggaaggattgcttgaaccctgggaagtcaaggctgcagtgagctgtgatcatgccagtacactccagcctgggtgacagagcgaggccttgtcaaaaaaaaaaaaaaaaagccaggttgggtaacttgatgaagatatgtaggcattggactgagccctgaattcgagagactctgaccttggtaagatcaatggtaggagcagcagggaatttgtgctttctggaggcaggtagatcctgaaataggagaaagaaaagggctgaaccacacacaaatctgatcatgtgagacacttctctgccttgggaggagtgtttggatagagagaagccagatatgtttctctaatggaggtccctctgcagggaaacataaagccaggggaagggggtttctttccagcccttggcttagggcgagagtacatcagagaactctggacagtggcgtggtcagttcatggagcaggagtgagagaacacagcctgcactcaaggctttctcttggggaaggagtgggaatactgggtctgtgcccattgatgtcccccttttctttgatctttagcacccccaatgggaacagcctcagtgccgcagaactcacttgtggaatgatcatgtgcctggccaggtaagtccctgacttctcagcaaagctagtctctccgatatgccaattattaccacttgccaagcaaatggacccagaaaaacttagaaacatttcgtctcagcgacttgcagactgctaagaaggcgacatgcagactgcaaagaacctttaaggccatcaggtcctctattcaacattcattacacaggttccctagtgcacaaaggtgcacttctctttactcatgttctattctccatgctgcagacaatctgccttctctagcctccaactcttgcaaatgttctccataccctgctgcctggagataacaaggaaggatgttccaggcagcagggtatggacagtgtctaggtaccctctgcttacttttcaagattaagcttcagtattaatttatccaagaagctctctggcttttccagctaggctatgtccctcactgattcccctggccctcagggcttatctctgtcactgcccttacaaatctgtattgtaatagaatggagtaagaacctgcttcagggtccttgtgtgttctgtgggttcataacacaatggaactcaaatgggcaagactcttgctcttctagcaggagttccaggcctcttgagtggatggggcagcctagaaatcaaatggttgtggcacagaatgtgcttgagtctcagtgtgttggttagtaatttggcaaaactgattgcatggagcacttctgttgaacaggcaattcaagcatttatgtggtcaaggggaagaacaaggctcccaataaacagggtaggaagttgttctaggtccctttgaagctccatggattccctaaaccagcggacctaggcatcaaggactccttgtttctctactcaggcctgaaaccttccgggaccaagaaattacttttcccatggcgagacctgctttccctcctgctggaggaggatctgggggaatttacctctgctctaactcctccctgcagtttccatctgagctctctggtattcactgatattcactggtaggtgaaaggaggcagtggggggaaaggagaaacagggatagcttacacagcagtagggtctcagcctagaaggggcccccaggctggcagccgggttctcccagaacatctaggctgagtgtctctccccctggagaagtacagaagcctggcaccctggtttcacttcagctattaccttcagggatttttttttttttttttgagtaagggaaaagatctcaatgtggctttctgattaattacctcactttttttctggaggtggaaggaaaggattgggagccagcaatactttccctccttttccaggaccagctttgtttaaaggaatcggtgaaatgctgtggtttaaaagaagctccccattgtcaactgctcaccatgacctcactcatcaaaggtgcatcaaaactaggaaacacgcacaccctattgggaaggaatgcgttcgtttcatcagactgttcctagcagggaggacggtaggagagtgtgggtgcctatatgtagactctacaggattgggcaatgtgggtggagagcaggcgtggctgggcctcacagtagggactttgagcagatggcgggggctcctgaggtgcagaagaacagcacacagaaaggaaggaaggagagaatcaacaaatgtaggtttcaccatttttgcctgctttaccatctcctcctctagtaagtcaggccagcaaccatttaattattgtgaggaccctcgcccacattagagtcctctccagtctggcctgatgaggattccaaagcattgaaacctggagaggctccatgatcagctgggagcagcagccagagaaaagggttagggatttcttgtgttctgtggtgccgcacgcatacatcttagatagcactgtggagtctggtgggaagaaaataggatgtgagggagaggagagaggggccaggtggggctctgtctcactaggtcaaaggcattttatcaggcaagctttcccaagaagtgaacagttcctcaaggcaagtccctgtccttattacctgcctgatgggtcagagcagtgaggtgaatgcagcttgtcccccatgtggcttggtactgaagttcttctgagtttacccataagatcgtgcgcctctgtgatggaggacagattccaccttcagccttaccctcagatggagatcaatgtcctagtgatgtgtagagatgagagaatgtttttgtgttagaagttagtgaagtgaaagcacggaagtagcagcttgagatttctctttttgcacgctcgctcactctgaggtttttggcatcaggttaaaggcctacatttaagtactcaggaggctggccgtgctggggttgactttgctggctttgaatctgttcaagtgcctccagttgggtgatctggggagaactgtttaacctccagtgcctccctccgtgcagctgtgaatgttagaggagttaatgtgtgtctaaacatttcttttaggatgtctaaaataaagtgctccttaaacattgtttctcaaatcttccttttttgcctccagagatgtgttgatgacccatgcccacaggacatatatcgccctttgacctctaatgttgccctaattgccacttcctctgtctcctccagaaaacacagatgtagactcagacttccatctggactaataggaggagacaggctgtgaagagtgtgtgtgtgtgtgtgtgtgtgtgtgtgtgtgtgtgtgtgtgtgttggtggtggtgggacaggaaggtggtgcggatgtttaaaaatgttgggaccacgcattcaggacagaatggaagtgtctgggctttggcatccacccacccactctagggtccagactagtctaagaccctcggggttaagaaactctcaaggaagcataggtaattaggtgtcctcttcataatagtagaagacgtcataggttatggtgctggatgagataggtagatcaaaataattccttgagcttctggagtactcgatgtcatcagagttgcccagtaccccactcagttatccctacagaccctggaggattggcgatcgcttaaagtaaaaaactcactctggttgatgcctcagtggctgaggtggaatccatacctcctcccagatgcctggctggtcacagaaatcccaggctttctaagtcagatcttgccaagggtttctctcttctgttttccctttatcccccatcagtgttcctaaacctgaacccccagacccagttcttggggaagtggctgtcatgggcagtgactgtgcaaacctgatgttgcatctccttcctgggctggcgggagtccgaatggaccctctgaacctgtgtctatccttgcaggcagattccccaggcgacggcttcgatgaaggacggcaaatgggagcggaagaaggtgagcagcggccttgactcgccccacctgggctcagggcccggggtccactcatgttgctgacttcagcttctttccttttgcctgtttggttgcagttcatgggaacagagctgaatggaaagaccctgggaattcttggcctgggcaggattgggagagaggtagctacccggatgcagtcctttgggatgaaggtaagatgttgctggaaccctgtgatgtgggactttctgcagcaattttgggaaaggcagcatgtctgggcagaagccagaagctttgttctaggagggtctgaccctctcttggagcccccatctaaataagtgttaaagtcaaggagggagagaacactggcctgctgatctggactcaaaagctggaaatacttggtgggggtcctttagctctctggtgagtgaatagccctgagtcccagtgaaccaggtgttgatggctcttttgagactttggttcctgtcttcttagtttaaaagaatttaaacaagagacacggtgcagcattgaggagtttattgcaaaggaaaaagaatattttgaaagttaagtgcagagtagacagtacacctcgggagagagagaattcagggtgggctgctcataagagtgaggcagtgttggccgggcgcggtggctcacgcctgtaatccagcactttgggaggccgaggcaggcagatcatgaggtcaggagatcaagaccatcctggataacatggtgaaaccgcatcgctactaaaaaaaaaaaaaaaaaaattagccgggcgtggtggcgggcgcctgtagtcccagctacttgggaggctgaggcaggagaatggcgtgaacccgggaggcggagcttgcagtgagccgagatcatgccactgcactccagcctgggcgacagagcgagactccgtcttaaaaaacagaaacaaaaacaaaaacgaatgaggcagtgttgattattgctggagaaactccctttataggagttttacatgattattcataaggaggtgggaagagctgttactagtaagcatgttttgggtggtcctctgggtgcacatgagtagtagctgtacattcttgttcatttggcacatgtcttattagcatcttaaatctccacccaggagtgtgttttttactattataatgagccagggggtcagtttgaggacaggaaaaatcaaagtgcacaggctgtctagatgggaagttccctactgaagatagctttgcttgaatgagctcagttagaatatgaataccgaggcttattgtgttgactataggatcaccaaggttgctgcacttccttgattacctatcctgcctcacagggagggtgcttgtgtcctgcccattctttctttccttcctgcttttgttttgtctgctttcctgtgataatttagaaaacaggaacaagtttatggcctcacagtagagccttacatccattgtccatctgtccttccagtttccctccatatttcagaaaagatttaaaagtgcttgtatgtacactatgatatgattgtagagcctatggtggctggaagacctcacaccggtctcagaaatcacacctaactcctgtcttcccccaggtctctgccttttcctactctgggagctcagtaggcttctggctactcccttagcctgattgcaaccctctggttgccatcagtagcagtgccacccacttgggctaatccaggagaccttgcaaatgagagaggcaattcagctaagagaggggatctgcagggcttcccagataggccaaagagatgaacccactaaggctactatgggacatctctctgttcactttctgttttagggaattacagggattatggggtcaaactgcagccaggaagtctttaaacattaggagatcagttttgacaaccagatcatgtcaaatctagaaaagtttacatagagctgctatggaactctccctttttctacatccctcctaccttcttagagttagaagggatcttaatagattaacccttaattttacattgacatctagaatttgtaagcttatgcctaaggactcatagcaaatggacagtagcctagagcctggtgagcatcccattgtacacattgaatattatcctctccctcctgcctccactccccatcttatttatttaagtcagccagatatctttcctaagcctctgcactgagaagggccaggtgtattcttgatccctggactcctgagagaggcagatgtagcccagcaggatcattgatcatgtaaacaaaccacagccttgccctctgtgcagggatggtgggatgccataagccacaaagagcactccctcctccatcctcttttgtaagggatcaagggtcaaggtttagtccatggagaattttgatataaaaggcagaggtcaggagttaagtaaaactaagagcactcatagccaaataggtgagcatttcattgatgaagcagtaactgggagacaggctccagaccagtggccgttccaaggctcctgcccccttccccagggggtcctcttccccatgactccccttccccaggcttccttctccgtggcaccactacacatcaatattcctggcaatattcttcatcatggagacttcggcagcgacttcaaccagatgaaaagccccacctcattcctgaatgattgaggtgctaggtaagcttgtctgtccatctggcactgcccaactctctaccctgggatgcttccaagaggtgcatgggtacctgggaccttgagcatcagtgtcaggaaatggctgacacctctcgtgcatgtgtttgattgaaagagatgtctacggcctgctcatttcagtgttaatctgtgcctcagagcaggtcacccactgaatgttttattcccattcccagcatggtgtggagggtgccagtgccttcactttgcatttcttctgtccagatgtctctggagggtcattcttaactgtcttgcttccagaacatgctctttgtaaacccctgaaacatggcttggatcattccgtctcccacctcagcccctccggagctgcctggacctcatcattccggagagtctaagtggcctcttctcgtgctcagctgcttacctcaaccacgtcattatcatacttttgagtctggatgaattttgtcttagggcggagagctcatcagttctaccggtcttggagaacaagattttctaaagggaaaggaagattcttgaacatattgtgaaagagatgtataagcacccagacaggaaatgaggataagtgtttattaaacacaagttatttcatactagcctcatcctctttttggaaaccattattaaactggtagagtatggaaatccctagatgtcagatacccggactatttaaagttatgttttaatcatgtaataaaggaatgcattctcatataaattaaaacttggacaaggctatacttgattaccatctgaaccctagtctcctcacggtaaacatcagtttagcatgtcatccgagacttttctatgcatttgcacagaatgcatacagttccatgcctgtggatggattctttggctgcaaacaatagaatattgtttgtgatgttaagaaaaaaacatgtttatctcagaacaactaaatctagcatatttttaaacagttgtgtggaattttattgtgcagataaattgctttttatttggccattctctcaatgatgggtatttagattgtgtatagatatggactttggtaagacatctttcatgattccctcggggttcggatggagccccttgagcttggtgctattgaagggattagtgcttggtgctgttgtggaatgggccacctcagtttggagggagatagtatgcaatagtgctccaccttgcccaccattctcatcaacagcctgaaccatgtgtcatttgtggatggcaggaagcaaggagaggtagttaatacttaagggtgcagaatcaggtccaaaaagacatatgaaggctagaatggttgggcaccctcacaggaaatttagctagaatacatttctgcaccctacttgtgggtccaaaaagcagctagacaagttttagatgtagaagcatttgtcaaaagcttttctgggggagcagggctttggtttacaaaagagcagtgtggttgtcagtggcatagctgatagaaaaggtaacctgacatttggcagcattaaaagaagtatggcttccggagcaagggaggtgacattcctcacactgtggcctgacctgcagcctacctgtggtctgagtcatacaggtcttaacgctctatactgttgtgtctgcgagagactttttctcaatagtgttgctgaatgacaggtcgtgacctcagagactcagctcattcatgctggtgtgttccttagaatgtgttaagaggcacaaaccaatcaagaagcgagccttgtgctttatgatcaaggttttccttgagggaacagacaagcatctcttaacagtttctttgtagccagcgttgtgatgaatccaactttagcccagagggttggatgttgaacctgaggcaccagttatcaccgattttttcaggtccagctaatgtttgctgaggtctactgtgtcggttcctgtgcttgaaatgactctgcagggtcagaattattatcccaggtttacagataaggaaactgaggcccaggaaggttctatgatatgctgaagataatgcaactatgaactggtgaatttcggctcagccttccaggctggcattctttgcccagtaccacttaactttattcatgatccattttaggtaaacagtccctgtgccatgccggtatgcttagctattccaaagacagatactctccaggatgggcagctcctatctcagtgtgttacctggaatgcttactgcccagagcagtgattctcaaactcaagagcctcgggttctggcaaggtgccttagggacacaggtgggagcaaggaggggcccagggagacagcaggtggtggcacattgagcctttacctctgcagctttgaattgacctatttttatatttgggtctctgtttaagatttcattgccgtggtagggagagttccaatgctaaactaaaaattcagctgtggggcagagagagcacgtgacggtgagggttcttcttcagagcctctttaactgggaggcctccttgctctcctctttgctctgctgagccagcaaggccctgcagccagcataccagcctctcagggctgtcttctgtgacctcaggcaggtaggagccaccagctgccctggagtcctgcttagaaagtgaggcttcctctgttgcctcaacatcaggagtctgccctggggctgggattgaggtgagggaaccccttcatgtttctccccaaggcttctctccgggagtagtctttgaatggtgggtacccagaggtgctccaatgtctgtatattaggacatctgaccctttccaggacacaccaggaccctgacaggcacgtgtgtcctgggcctgttgtcaccctttccatcccctcagtgttgtctcctagtgtcggaaccccaacccccagctgagttcagctcttctctgccctggttatctcaaatggaaaatgagaacagaggtttgctcagccagattccttccctgcagtcatctgcagataaatgagatactctctgtgaaagaaggaagctgagtcagtgcttcgctcacccctgaggaagatgctcacctgctcctctccccaaccccctccctccagccccagtcacctgtctgtggagggggccaggttcagcctgcagggtccttcctcctgccagcccccaggttgttcttggctcctgagcatggagtagacgtcagtcaggctggaccttgtgatctctattggtgttcccttcctctccccactccatatgagaaaaaaaaatacatctggattagagatgaacagggccattgttctggccggcctcagggccagcagacgaagaagacttgtgacaacgatggcagggatcccatctcctcgcctggacactttctcctccccaccagaaatgagtaggttacagccgaggggagcagcagtgtctgaaaaagaccaccagcgttctgagctggaggttcttatagggcgtgggagaggcagcatctttccccaaaacctgcctgatggttggtgtggggccacttggctttccttattccacaaggctaatgatgaaaaaagggatccagaggcttcaccttaatcataaccattttagcttctgccctagaattactgaatttgaagtcctctttcctattacgttcttttttattttgttttatttttttttttttttctgagacatcttgttctgtcacccaggctggagtgcagtggcacaatcttggctcactgcagcctcaacctcctaggcccaagtgatcctcctgcctcagccttctgggtggcacaggtgcatgccaccaaacttggctagttttttaaattttttgtaggggggggggtctgactatgtttctccagctagtctctgactcctggggtcaaatgatcctcctgcctcagcctcccaaagtgctgggattataggtgtgagcaatggcacccatctttcccattatattctaaagtatctatactgtatccctaatttcaaaagtaatttatgaataatgtagtagaaaacttgaaagcacaggaaagcaaaaaggagaaaaataattccactacccagagacaaccgctgttaaagtactatgctgtgtattctttgtttttgtctaatcctgggctcactctttacattctgtctcggggttaagggggatttctcttcaaataattcccagtgattgaatgtgagagtgagagatggctgcaatcatctgcccagctcctttatttagggttgaggacccaggtccaggggaactgacctgtacctttccacacagtgggcagtgactgggggaggacacaggtcaggcttcctgatttagagggcatgcagtcttgctcccactctgggtcctgccttgtacccctgttgtcctcctccttcgcttctgctcactctgttttagtacctgatgcacctgtttcctggactggaccctccagctgcagctgccatttctccttctccctttcctggctgtccgctccctacatgactgccctccctccctcaggactccctgctttctaaggacttccaagctccaccttgtccagacctatatgagctattgttgcatctgtgtgtgatcacagcatggaggcagacgcaccttcttttgagctctggctgtgcccctcctcattgtggaagccctgcttccctcagctctcaagcagacaagaacagtcccagcatcattgtgtggtcatgagaattaattaagctgatcatggtacttagtatatggtaaatagtacttagtatgtggaacatggtacttagtgtatggtaaattaactggagaattaattaagctgagcatggtagttagtatatggtaaatgctcaaaaaatgtttgccattcttaataataacaatactaataattaagaatgacacttcctccctctctcttgcttccaaccagactatagggtatgaccccatcatttccccagaggtctcggcctcctttggtgttcagcagctgcccctggaggagatctggcctctctgtgatttcatcactgtgcacactcctctcctgccctccacgacaggtaggtgtgtccttacattgtggattggtcacagaagccacagaccagttaacaaatgggccctccatctgggccttccccagacagtggtaaccagctgtggggagaggtccacctgggtcctgcagaggctggtgttttgttagacacccctacgttggataggggagggtgagccagctagaagtgcttggggtctaggtaagctgggcacagggacaaccagtgacccccatggatgctttctgcagcccctgcagggctttctgattcccagacccacttgaaacagtaatatctcaagaatttctaagatgtttctaaactgagtctggcccagatccataacagggactcctgccccagagcatctgaggaggaagagatgagagcaaagaggctgccgtccagcaggagagaggctctgggaaagagctggctcaaggaaagggaagacctctggaagccagggatgagcgtggggatcctggtgctgccccagcaggaagatgcttcgctttcttccaggcttgctgaatgacaacacctttgcccagtgcaagaagggggtgcgtgtggtgaactgtgcccgtggagggatcgtggacgaaggcgccctgctccgggccctgcagtctggccagtgtgccggggctgcactggacgtgtttacggaagtaagtgcctggcagcctcagcgtcaggaggacgggagagatagggagcagagaggcccatggcagggaaagcctggcgttttacagaaagcctctagcttattgtctctttcatccatggtaaaaggagaaaactgtgttgccaaaaacacacctttgtggtttgaggagtccttgcggagcctggtatggaggcagctatgtggttttctgcaaaactcgggctttaaaggggacccagttcctggttccgggcttctcagactgctaacatattgacaaagataaagccacaaatcagttctgaagttgagggtctggagcaggaagagagggggctttagtgtatagttgagggaccctgatggaaatgcagtcccattgccaagaaaatgtccttttcagtgtccatgggcattctttttcccttcttctcttgctgggtggacagaagcccgaggatactggcagtattccctcagggtcctcggggtgggctgctttcccagctggagcagaggctcagcctcacaccagatccagtagggaagagtgcatttgcactcgaatccttttggctcctctcctgaaagatcctgtccccaacattggagcttcccctggtgaggaaggggaaaggacatggactttggattaggtagttgtggttcgcaggttactagctgtgtgtccttggaaggtcactggccctctctgagcccctgtagcactcactgtgtactcccagcccagggcacacagtgccttttggtttgtaaccttggtcatctttctcagctcttagatcataagctccctgaaggcagggcaagccttgtccatctttgtatcaccatcctccctaacacagcaccttctcctgctctcttcagcatccttgaaccacttgctggtggtacttacatggttacatgtggccgggactcacaggattacatggttacatgtggccaggactcacagggttaaatggtcaaaattcaatgggaccaacagagccctgaggagaatggccggaagatgcctaaataacatacccaagggcaatcttctcagtgagcagaagggtggaaaagacactggagggtggggtggaggtgccacagatgggcaacctgtcctgatgagagccaagatgcagttacctgcgtggagtgtcttggaagagcaggacactgtgctaaaagtccagcaaggcacatcgacagcaagtgctgcatggatgcaggggggtgagtttcggggaaaagcccagtaacaacaacaacagtagctcctattggtcaagggcctcccatgttaaaggtgcataatccccacagtaatgttatgagggagataggatcaacccatttcacagataaagaaactgaggcttagatcaaggttcacccccaaggcacctaggtggttaagtggtgaaggtgagatttgaatctggttcacactttgtgctgtgtccactctgctgagatggaacattcatgtggaagcccattattgagtccagtgaccaccctgacaaaatagaagtggaaggcaccagaactcctgactgccttccctccaactttcctgttgcctggggtggcccaagagggtgtggccagtccatggcagccaacttagaggtatctctttctgggcaggagccgccacgggaccgggccttggtggaccatgagaatgtcatcagctgtccccacctgggtgccagcaccaaggaggctcagagccgct

SEQ ID NO: 5345 - DNA, 1075 bp, mus musculus
acactggattcaaaccaaatctccaaatcctggctcattccattccgccatgtggctgctatctcagtgtatatggggtgggtatcctgaattgctggatcctctttgtgtccacactgataactggacagcttaagatttgtttttctggccaagtgtggtggctcacatctgtaatcccagcactttgggaggccgaggcgagggggatcacctgaggtcaggagttcaagaccaccctgaccaacgtggtgaaaccccatctctactaaaaatacaaaaattacccaggcatggtggcattcgcctgtagtcccagctactcgggaggctgaggcacgagaatcacttgaacctgggaggcagaggttgcagtgagccaagattacaccactcgactccagcctgggcaatagagcgagactccgactcaaaaagaaaaaaaaaaagatttgcttttcttgtgaagttaattggctatcctagaggtcagttattttccatttagtgcttttaactaataatgtaatatatgcccagagtaataaacttgtcattatcctctactgtatgtttagtcatttactgtatacctgtgcttcattcttcaatatgaaatctgactattctttctcagtgaagtttttgattattcttttgtttattatagtgactgctgcaacctggccctaaagttcagtttaaagctctgcctgtggactgaaacccactggtaccaaggattgcagttcatattataactggctccgaacccttgctttttttctgaatcagaaaaatggcaccagctacttctctgcttattgaagggatgaggagacttattcaggacttctccctgaaccctccaaagaggcatttaatctaaaaggatcttgtgagatctccattcttaaacatcattaaaatagatcagaaaattatcagtgtatagtgattatgttataatgcagctggaggcagagtttgagtaaatggactcctgagagccttttgagctgtaaaattctagaattcaagcccttgcttaaaaggatttaaagaatgtttatgt

SEQ ID NO: 5346 - DNA, 448 bp, mus musculus
gtgagaagacagattttaagagaaggagcagggctggtatctgaataggtatttggatgttaggggaaaaccctttttggcctctgtggtagagcgatcggaaggtaaaagtgctgtttacaagaataatccattggagatctggggattggggacgacttataggatagagtcctcttgttgagaatttcccgaatgaatctcatgtaggttctgtcacagtaagatggaggaaaactttgatggggtaagtatcacaagtggctgtcctatagggggaaatcctagcctgcagtaatgtcagtgtctcagtattcagccagcgagccactgagctgctccaggggtttaaaatagaatgcatagaatacaatgtatacagctggtgatgctttccaggatcaaaatagagcccttgtctgatcccattgacattgtaaggtttcga

SEQ ID NO: 5347 - DNA, 141 bp, mus musculus
ttacacatctgatctcatacctgatgttttttgcttttagccttgatacctctatatgtatttctatccatagaaatagacagttcaatttccttaatgagaaattagcataggaacaaatttctttccatcaagattaaa

SEQ ID NO: 5348 - DNA, 665 bp, mus musculus
catgagttaaatatttaatccttataacaatattttatgcatagagaaactgagacacaggcaaatttagtaacttacccggggtcacatagctactgggtggcaaagtcagggttagcacccaggacaaatgcctccacagctggtactgtgctctgctttactgtagctaatagtaaaaatggtagcaaaaatcaatagcagtagaacagtgcaacagatattaagcggaagaggaagactcacaacaatgacaacatttgtgctgaaatttttagaacacatggaatttcttcaggcaggtagagagaagatatagaaaatgtaaacagcaaagattgatagtttctctgtatgcctttcagggtcagtgtggttcctgttgggcttttagctctgtgggtgccctggagggccaactcaagaagaaaactggcaaactcttaaatctgagtccccagaacctagtggattgtgtgtctgagaatgatggctgtggagggggctacatgaccaatgccttccaatatgtgcagaagaaccggggtattgactctgaagatgcctacccatatgtgggacaggtgagattgctccacacaattatacagctctgttggctcctccttccccagcatgatgttttgtactggaaacaattccag

SEQ ID NO: 5349 - DNA, 4142 bp, mus musculus
aaatccactctctggtgctcggagggaactgcatttcctatggtgccctgcgactccgcagacgcggagccttttgggaaatgaagtcttttctcaaagaccttgccgctcaactggatccaggcccttgcatcttggcggatctgaggcgtttggagggacaacaacctagatgtggagccgaaatttgagggtgtgacctatcttatgcggagcggacctttgaggatctctgagtggaaggtgtactacaaattcttgcaatcctcacgctcttcgtctgcggcgacagttcacctggggtgggcctgatttgttcctgactctagcaaacaaaccccgggaccggggagagctgggatgttggagcgccctgaggccaggctacttgggggcaaactgaggaaagagtgttgaggattatttctagagttcaaaggtcagaggtcaatgtagcgaggagttgtgggggagtccaaagtcggaggggtgcttaggggagaattagggagggactgaatactcaagggacagatttgtggataagtagcttggagggaggagaaaccgggagggggcagatggcgtagtgctggggaggcggggacacaggggaagagagagggggaaaggaatcccctgaatattcattcccagacttcaggcctgtcagtcgcagtctcggtcgtacctcccctagttgcaaccttagctgttggcagggtgaagagatggcttccccgtctagacagcccccgccaggggggtcaggactgcttcaagggagccgggctcgttcatatggaagcctggtgcaatcggcctgctccccagtgagggaaagacgcctggagcatcagttggagcccggagacaccctggctggactagcactcaaatatggggtgacggtgagttttccaggattggggtgaagacaacagtcaggagggatttagtcctgagaagaatgtagtggcccttctaggtaacctcccctgaaatgttcctaatgtgttgcactctgttctgcctttatctttgttttcccatcacagtgttgcacaagtcctgccctactattccaacggagaggaacagctcctattttattatgccagacactgtgctgagggcttcacatacgttagctcatttcaccctcacatctgtatcaagtatacatttatcgttcccttttggcagatgaagaaactgagacttggattggttaaccagtttggctaaggtcaaataatgagcgtcagatttgggattcaaacaggtctgtctgactctattaaccacacagaaaattttatgttgagagtgattaaacgtttacagcaactaatggagagctgatttttagttctcagttcctaaagtgcccacctctccttgctcttggttcctcctcaatgctctgccttctttccagtaaggtggcctcctttgtgcaaaacaggtactctacaccaagtatttcaggtcatgcatgggggaaattggatagatgtaaaaatgtacagcattgaagttgatggggttactccccctatccctgcccctgttttcttgttccatctcactcaaacaaatgttgaatttagccaacatttttatgcttgctgtatttaaagcactgtgataacttttctgggagatagaaacttaaactatatggttgctgtcctcatgtaatttatggcctaatgagaaatgaacagggacacaaataatgattacaagtgacagaatgtggtgagtttgtaaaggtattaacaacgaataggggtcaggcatggtggctcacccctgtaatcccagcactttgggaggcagaggcaagtggatcacctaaggttacgagtacgagaccagtctggccaacatggtgaaaccctgtctctactaaaaatacaaaaattagccgggcgtggtggtgctcacctgtaatcccagctactcaggaggctgaggcgggagaatcgcttgaacccaggagggggaggttgcgatgagctgagatcgcaccactgcactccagcactccagcctgggcaacagagtgagacacacacacacacacacacacacacacacacacaaagataggaaatcagaaaagattaaatttcagttggaaaggggctgtggtgggccaggcgtggtggctcatgcctgtaatcccagcactttgggaggctgaggtgggtggattgcttgagctcgggagtacaggaccattctgggcaatgtggtgaaaccccatctctacaacaaatacaaaaattagccgggcatggtggcatgtgcctgtaatcccacctactggggaggctgaggcagaggatcacttgagctggggaagcggaggtttcagtgagccgagatcgcgccactacactccaggctgggcgacagagtgagaccttgtctccaaaaaaagaaagaaagaaagaaagaaaatacgaatacactatatctgtagtttctatatttcattatctaattatgataataattacataattataagtaatagtttttaaataaagcattaatgagcccctgctatgtgtcaaggtctgtaggatgctaatgacttcctggggatacagagacagcaagtcacaatccttgcccttaaaggacttatagggtttaggcaaagcagatatttaaagaggtgaataatattatagtagggttatgtattattatagcaatatttacagtatgcattgggagccctgaagaaggtagcacaaagggagtgatagttgatgaatacaagttttccaagcagagaatgggatagtaggggggtgggagcatttcaggcagaagtaacagcatgaataaagtgtgaaaaagatcatggaatgttcaaagaaaaataaaaagttcaggatagcaaaatgtagaggtggcagagggagattaatctagacatttcctttgggagctggattgagaaagcccttgaatgctaatttggtttttatcttttagccagtgcggagccataggtgggtagtgggttaatcagatttatttttttagaaagatagatgccaagaggaggatgagtagaaatagagcgaggaaggccagttaaactgttgcaataaccccagatgagaaatactgagggtctattttaaatctttggcagtaggaaggtgagaccagatgtgagagagatttttgaagcagttttgttgaccacttggtatggtgatgaaaggcaagtattagttaaggatgacattgatgtttctaccttgggaggccaggcagatagatggtgatgccagtcactatgtccagtgatgaataaataggtcaaaataaatatttattaatgacattgttaatagtatagtgtgaaaagcattctcagaagcagtgaaaagacccaggattgtcattctagctctgtcattaacttgatagataattttaggaaagtagcttaacctctctgagcctcagttccttcatttttatttattcattaatttatttattcatttatttttaattttttaatttttagaaatggcgtctcactatattactcaggctggactctaattcccgggctcaagctatcctccctcctcagcctcctgagtagctggaattataggcatcagacattgcgcctggcttgcacaataattttttaaaatgtaagggggccctaagaccaaaaagtgtgaaaaccactcatctatagaatagaaataatgtcagccctttgtactttagcttggttgttatggaatcaaagaagactctgtacagtcactttaaaaagctcaagatgtaagattgatcattattactgtccttaattttggtgacttttttttttaagatggaacagattaaacgtgcaaaccgcctttatactaatgactccatcttcctgaagaaaaccctctacatccccatcctgacagagcccagagacctgttcaatggtttggactctgaggaagagaaagatggagaggaaaaagtacacccaagtaacagtgaagtttggccacactcaactgagaggaagaaacaagagacaggagcaggacgtgccaatggtgaagtcctccccacacctggccaggaaa

SEQ ID NO: 5350 - DNA, 4142 bp, mus musculus
tttcctggccaggtgtggggaggacttcaccattggcacgtcctgctcctgtctcttgtttcttcctctcagttgagtgtggccaaacttcactgttacttgggtgtactttttcctctccatctttctcttcctcagagtccaaaccattgaacaggtctctgggctctgtcaggatggggatgtagagggttttcttcaggaagatggagtcattagtataaaggcggtttgcacgtttaatctgttccatcttaaaaaaaaaagtcaccaaaattaaggacagtaataatgatcaatcttacatcttgagctttttaaagtgactgtacagagtcttctttgattccataacaaccaagctaaagtacaaagggctgacattatttctattctatagatgagtggttttcacactttttggtcttagggcccccttacattttaaaaaattattgtgcaagccaggcgcaatgtctgatgcctataattccagctactcaggaggctgaggagggaggatagcttgagcccgggaattagagtccagcctgagtaatatagtgagacgccatttctaaaaattaaaaaattaaaaataaatgaataaataaattaatgaataaataaaaatgaaggaactgaggctcagagaggttaagctactttcctaaaattatctatcaagttaatgacagagctagaatgacaatcctgggtcttttcactgcttctgagaatgcttttcacactatactattaacaatgtcattaataaatatttattttgacctatttattcatcactggacatagtgactggcatcaccatctatctgcctggcctcccaaggtagaaacatcaatgtcatccttaactaatacttgcctttcatcaccataccaagtggtcaacaaaactgcttcaaaaatctctctcacatctggtctcaccttcctactgccaaagatttaaaatagaccctcagtatttctcatctggggttattgcaacagtttaactggccttcctcgctctatttctactcatcctcctcttggcatctatctttctaaaaaaataaatctgattaacccactacccacctatggctccgcactggctaaaagataaaaaccaaattagcattcaagggctttctcaatccagctcccaaaggaaatgtctagattaatctccctctgccacctctacattttgctatcctgaactttttatttttctttgaacattccatgatctttttcacactttattcatgctgttacttctgcctgaaatgctcccacccccctactatcccattctctgcttggaaaacttgtattcatcaactatcactccctttgtgctaccttcttcagggctcccaatgcatactgtaaatattgctataataatacataaccctactataatattattcacctctttaaatatctgctttgcctaaaccctataagtcctttaagggcaaggattgtgacttgctgtctctgtatccccaggaagtcattagcatcctacagaccttgacacatagcaggggctcattaatgctttatttaaaaactattacttataattatgtaattattatcataattagataatgaaatatagaaactacagatatagtgtattcgtattttctttctttctttctttctttttttggagacaaggtctcactctgtcgcccagcctggagtgtagtggcgcgatctcggctcactgaaacctccgcttccccagctcaagtgatcctctgcctcagcctccccagtaggtgggattacaggcacatgccaccatgcccggctaatttttgtatttgttgtagagatggggtttcaccacattgcccagaatggtcctgtactcccgagctcaagcaatccacccacctcagcctcccaaagtgctgggattacaggcatgagccaccacgcctggcccaccacagcccctttccaactgaaatttaatcttttctgatttcctatctttgtgtgtgtgtgtgtgtgtgtgtgtgtgtgtgtgtctcactctgttgcccaggctggagtgctggagtgcagtggtgcgatctcagctcatcgcaacctccccctcctgggttcaagcgattctcccgcctcagcctcctgagtagctgggattacaggtgagcaccaccacgcccggctaatttttgtatttttagtagagacagggtttcaccatgttggccagactggtctcgtactcgtaaccttaggtgatccacttgcctctgcctcccaaagtgctgggattacaggggtgagccaccatgcctgacccctattcgttgttaatacctttacaaactcaccacattctgtcacttgtaatcattatttgtgtccctgttcatttctcattaggccataaattacatgaggacagcaaccatatagtttaagtttctatctcccagaaaagttatcacagtgctttaaatacagcaagcataaaaatgttggctaaattcaacatttgtttgagtgagatggaacaagaaaacaggggcagggatagggggagtaaccccatcaacttcaatgctgtacatttttacatctatccaatttcccccatgcatgacctgaaatacttggtgtagagtacctgttttgcacaaaggaggccaccttactggaaagaaggcagagcattgaggaggaaccaagagcaaggagaggtgggcactttaggaactgagaactaaaaatcagctctccattagttgctgtaaacgtttaatcactctcaacataaaattttctgtgtggttaatagagtcagacagacctgtttgaatcccaaatctgacgctcattatttgaccttagccaaactggttaaccaatccaagtctcagtttcttcatctgccaaaagggaacgataaatgtatacttgatacagatgtgagggtgaaatgagctaacgtatgtgaagccctcagcacagtgtctggcataataaaataggagctgttcctctccgttggaatagtagggcaggacttgtgcaacactgtgatgggaaaacaaagataaaggcagaacagagtgcaacacattaggaacatttcaggggaggttacctagaagggccactacattcttctcaggactaaatccctcctgactgttgtcttcaccccaatcctggaaaactcaccgtcaccccatatttgagtgctagtccagccagggtgtctccgggctccaactgatgctccaggcgtctttccctcactggggagcaggccgattgcaccaggcttccatatgaacgagcccggctcccttgaagcagtcctgacccccctggcgggggctgtctagacggggaagccatctcttcaccctgccaacagctaaggttgcaactaggggaggtacgaccgagactgcgactgacaggcctgaagtctgggaatgaatattcaggggattcctttccccctctctcttcccctgtgtccccgcctccccagcactacgccatctgccccctcccggtttctcctccctccaagctacttatccacaaatctgtcccttgagtattcagtccctccctaattctcccctaagcacccctccgactttggactcccccacaactcctcgctacattgacctctgacctttgaactctagaaataatcctcaacactctttcctcagtttgcccccaagtagcctggcctcagggcgctccaacatcccagctctccccggtcccggggtttgtttgctagagtcaggaacaaatcaggcccaccccaggtgaactgtcgccgcagacgaagagcgtgaggattgcaagaatttgtagtacaccttccactcagagatcctcaaaggtccgctccgcataagataggtcacaccctcaaatttcggctccacatctaggttgttgtccctccaaacgcctcagatccgccaagatgcaagggcctggatccagttgagcggcaaggtctttgagaaaagacttcatttcccaaaaggctccgcgtctgcggagtcgcagggcaccataggaaatgcagttccctccgagcaccagagagtggattt

SEQ ID NO: 5351 - DNA, 4142 bp, mus musculus; identical to SEQ ID NO: 5349

SEQ ID NO: 5352 - DNA, 1075 bp, mus musculus
gtcacgaccgcgacagaaaattccgtgaagaggaacagctgctccaggaaggggaggaacagcagctgcgccgccaagagcgtgacagaaaattccgcgaagaggaacagcagctccgccgtcaggaacgagagagaaaattcctccaggaggaacagcagctgcgccgccaggaactggagagaaaattccgtgaggaggaacagctgcgccaagaaacggagcaagagcagctgcgccgccaagaacgctacagaaaaatcctagaggaagagcagctccgtccggaaagggaagaacagcagctgcgccgccaggagcgcgacagaaaattccgcgaggaggaacagctccgccaggagagggaggaacagcagctgcgcagccaagagtctgacagaaaattccgcgaggaggaacagctacgccaggagagggaagaacagcagctgcgcccccaacagcgtgacggaaagtatcgctgggaagaagagcagctccaacttgaggaacaagagcagaggctgcggcaggagcgagaccggcagtaccgggcggaggagcagtttgccacgcaggagaagagtcgtcgtgaggaacaagaactatggcaagaagaggagcagaaacgtcgccaggaacgggaaaggaaattacgggaagaacacatccgccgccagcagaaggaggaacagaggcaccgccaagtcggggagataaaatcccaagaagggaagggccatgggcggcttctggagcccggcactcatcagtttgccagtgtcccagtgcgctccagccctctctatgagtacatccaagagcagagatctcaataccgcccttaagtgatgttgccaatatcttgacacctgccaaagcttcgagcacgggaaaatgagaaacactgggtaccaagtgataactcagatgtttctggttgtgggaaaactctctgatattagaatgtcttttcttccaaaatcttaaactacgctcattttacgcactttgtacttctgctttttattcttcctcaagtagttctttactgcaagatgtctttcttttgctc

SEQ ID NO: 5353 - DNA, 2704 bp, mus musculus
taaaagaaatgtatattgctcattgatgcagagacctcctctgtgttggatgctgggcgcacaaacacggataagcctcagcccctgccctcaaggtgttcacagtcacaagggggaagacatgagcaatcagaccatcaatacagggtgatctgttcagcaactgaggggtttatggcagctctgggggaggcctggcctccaggagatgctcctccctgaggctggcccttccatcccgcagccacaccagattccccaacttctcccctctgtactgtgtaagattccctgagcctgcaaaggtatcaattagctagtcagctttctaactaatgcaacagtgcaagtgctaatgagagaggatctgaggagctccttcctccttgccgatgtgccagtgggacaggaaaatacacccccacccaccccaccatgccaaggtcatggagaggacctaggtgagcctcccacacctggctcaccatccctgcccaggggacatccagccatgcccacatggatctttgaagaaaaatgcttcctctctgttcgtggtgactctactggtgggaatttcctttaacagaagaggaagaaagcaggggtggttggggggatggcgagagggactctgacatacgccctcctgtctgcatatagctttgctgcttgtggctgccaacactttcctgtttgtctgtctgcctgctgctcctcatcctagtgaggaccaaggcgtcctccccgacggtagccctccctgtcccaggcctggaagagcatccactgtgcctcactttatttcccgtccccattaccctgcctctggctgcctctcctctctactgcgggctcagcacacaacgctcttgtgttggggtggggtgaagggaagaactgctggtggaggagagtgcatctagctgccaaggcctggggagcacactcaggcaacccttccccttcccccacttttatctcaggagtcagctgcctgcccaccaagtcctcatcactctctctgtcttactcctccaacaggggatgaacgtagggcacttagcttcttccaccagaagggcctccaggattttgacactctgctcctgagtggtgatggaaatactctctacgtgggggctcgagaagccattctggccttggatatccaggatccaggggtccccaggctaaagaacatggtgaggagtccagggataaagagtgtgggctgggagtgaagagggggccggcagctaccctgggcttggctgcctgtgcatgaataacttagttgctgttatctgtaatcagcagttctctttatatgtatatcgtgacaatataacagacaggaaatgtcgtggcctcacttttttttttttttttgagatggagtcttgctccgttgcccaggctggagtacagtggcacgatcttggctcactgcaacctccgcctcccaggttcaagcaattctcctgcctcagcctcccaagtagctggcactagcatgcaccaccatgccaggctaattttaatagagacgagattttaccatgttggccaggctggtctcaaactcctgacctcaggtgatccgcctgcctcagcctcccaaagagttgggattacaggcgtgagccaccgcacccggcctgtgacttcactcttcactggtattgtgaatagtgattgaataatattaattgcaaaaatggctgatatggaaatcattgacatatgagataaacactgactcaaattatatcaataatttgatatctacccactagtagaaatcactgatgcttctgtgtctttttttttttgagatggagtctcactctgttgtccaggctggagtgcaatggcgtgatcttggctcactgtaacctctgcctcctgggttcaagcaattctgcctcagtctcctgagtagctgggattacaggcgcccgccactaggcatggctgatttttctgtttttagtagagacggggtttcaccatgttggtcagcctggtctcgaactcccgacctcaggtgatccatccgcctcaggctttctaagtgctgggattacaggtgtgagccactgtgcctggctgcttctgtcttagtcgccctattaatgggaacaatgtgaggaaggaaggaagaaagggagagaaggcactagcaatattagcaatcacctccatggttcatgtatcctgatgtgtagtctgctgaccacctgcacatatgagatgctggttaaaaatgcagattctctaaggcgtgacccaggaaccaacttgttaaacaatttccccaggaaatgtgcggtttgacaactgctgccatatataccattcatcgtgttaggtgttttgtatatgccacctggttgtatctgccagtagcctatgaaattgaccaagatctctcagtcaggaaatagccaagtctagatttaaacttgggtctgtctgattccttaggctgtgttcaactatggagctatgtctgataccagtattattcaagtaatagccatggtcacaaactgatgttattactgcccatcagcatgtcactaaccaccatgtctgctggttatttcacatcagagcagagaagggaggcaggtcacagctagaactgaggaccttatttcttttcatctcgccctcccaactccccactttcagatac

SEQ ID NO: 5354 - DNA, 2704 bp, mus musculus; identical to SEQ ID NO: 5353

SEQ ID NO: 5355 - DNA, 2704 bp, mus musculus; identical to SEQ ID NO: 5353

SEQ ID NO: 5356 - DNA, 1280 bp, mus musculus
ctccttacagagcacttatttcaccattaacataacatcacctcttcaggtagctctgctttactctcttcttgtgagccccatactgactcatttattttgacattaacagaataagggcttttaacatggaaatttatatctttcacagggccttggtttagaattagagatgtccagggaataaactttgaatcacagaagggctaattaaggctaataagcagcaggaagcaagctggcctccctactttctgctcctctgaggtgtgactctgtaagctacttgctttactgtcacttttgatttcccatttaaaagaggaacatgaatgtggattaagcaaggctacttaaatatttaataaaaggtggaaatgaaaactaatcaccctagcaaaataaaaaaagcataaatctaatcaacagaactaccaaaaaagagccaaaatatgttgttcaaggccacacagctagtaagtgacagagtgggaattagaactaggtctacctgaccccaaaacccaaaactcatgctcttagcctctgcactataatgctgccttttttttttttttttttttttttgagacggagtctcactctgtcacccaggctggagtgcaatcttggctcactacaaccttcacctcccaggttcaagtgattctcctgcctcagcctcctgagtagctgggattacaggcacccaccactatgcccagctaattttgtatttttagtagagacagggtttcaccatgttaatcaggctggtcttgaactcctgacctcaggtgatctgcccgcctcggcctcccaaagtgctgggattacaggtgtgagccatcacgcaaggccaatgctgctttttaaatatggttccaggaaagttcagaaaagcatgggtagaagttctacggcagagcacaccagggacacaaggacaactagggacggttttgctgccagcaggatgtgggcagccagtccgggttcagccagggcaccctggataggcaggcttgctgagtttgctccctgtggacttcagtctttgggctgccataacctgttctctgtcctcttggatccctcattgcagatacctaaaggaaagaaaaccattgtgattctgtcatgaccccaagggaggccacagtgcaggtgtcctgtctgccttgcagcatccacaagggtccagactgacagggtcagtgctggagttttaactcctaagtccttagaacctccttcctgtgagtgattggaaattttct

SEQ ID NO: 5357 - DNA, 503 bp, mus musculus
aggatttttagtgcaggggaagaagttgtcaccacgcctctaagaggaaggggaagtctcagaagtattttcagtttatgacagaagggcaaaaacattgactgcctcaaggtctcaagcaccagtcttcaccgcggaaagcatgttgtggctgttccaatcgctcctgtttgtcttctgctttggcccaggtaaatgtcaatccagatcggtgtagtcactgagtgactccctggttttgtgcagcttgctcaacctaaatcgtctgtatacagttgtctggctctctgccaagggattggggcgggaaaggggacgctggcagtgttacctgatatactactacctcctctcaactttggatgcgataagcctgagatggttgtcggtgaacaatttcaattgtgtctgcatgtaagaaagttatttgctggggcagaggaaataagcttttgaagacaagactgtttgtggtttatgaccagcatcttgtgttataaaga

SEQ ID NO: 5358 - DNA, 176 bp, mus musculus
tcatacaaatagccactttgtactttttcatgtccctccaaactcccccagtccctatttccaaactgtccacttctgttgaatctattgtaaaaatgtgtaccttttagggaactgagataggaaagatgtgaaaaacaggattagtttagaataatggttctcaaacattggta

SEQ ID NO: 5359 - DNA, 1047 bp, mus musculus
tgcaaaagcaagtcccaggtgcctccttcacatgatgctggcctcaaagaccccatgaagagcaaaaagcagccactctctcaaaataacagaactgcctgcttcataaaagagcaaccacaagcccaagagaaagattctgtgaatccatctaaggacgtagaccccagcaagggcatctctgttccatgccaaaatcaagaggtttccaccaacaccatagaacaaggtcctagttccagcccagctagtgatagtggaatggcatgtgctgatgagaccagatcaaaagatgttgctctaaagccagatgggaacactggaaaacaaattcccccaaaacacatggaatgtgcaggaagcttcgaaggcgagttcacaaagccaaccttcttagagttgctttcaaaggccagaaatgcccattatctccggcacagggtcccccctgagtctgagaggttgcttagcattggagagatatttgggcatggggaatcctcatcatccagggcaggaaaggagtgtgaaaacagggtgccttctaagtttcttcctctctaaccgtttaacatagcctgacaataacatatgccattattgctaaggaaatgtgttcctcaaatgactatattaagcaatacagagaaaaacaaacaaacataattgaattacaattttattttaaactccctattattttccgggaatataatatttcttgaatgaacaatgctaatatatgaaaaaggagaggaagaatgaatcttctgaaaatattttaagtgatatgtttatgatgtcatcaaaaatatgaatatatattgatgactggacttgggaaaacagtaacagtcttgctttcagggacttcctgtttcctctaggagattctcatggtgccacctgctggcaaaacggcatagctattctctctgttttagtttgatatatagtagtggtaggaataggaatgtgattgtaaataggtactgtaacatggtctataaagaaaatctgctctttaaccacacccacgtgctctct

SEQ ID NO: 5360 - DNA, 268 bp, mus musculus
aatagatttttaaaatatagaaaatagaaaataccagaaggtataaggaagaaaattaaaactatcaaaaacctcaccattcacaaggcatcaaaattatctttgcatatttatttatagttctcttcatgttaaatgtgtatgtgtatacatacataagtagggttatcaagggtattatcttattataaaaagtatatattcattatagaacatttagaagacataataatttttttaaatgattgttactttatcattatttgga

SEQ ID NO: 5361 - DNA, 1799 bp, mus musculus
agcagatacagtcttttggcctcctcaagtattatataggagatgttctacctcctaccctgagatgccagtgtgtctacatttctcgttcaatttttccaaggtgagagagactctggctgcagagacagggctgagtgtccgtgtcgtccaggtgtggttccaaaaccagagagcgaaggtaacctgcttcttacttttatctgtccccatgttgctggtttcctgaaataatcacagtaggacattgtacttgctgccaggttttctcgccttagctcattggatagagtagttctcttgattcaaaaattctgttatcaataattattttggccacagcagccctgcagaaggggagagagaaggcattcattttagtgaaattgcttgtattttcctagcagccatgactgtggttttggccagccatctgtatgaataaatgtctttctgtgtcttttggtaaaagcatgttctttaattcatatttatttaatgcaaataccaaagttattttaaaagtagcatgcatataactggtccaagacaattttatgacagggtagaatgagtgccttttcttacttctcccagggcccagccctcactaatataggcccaagccatcatactgtcctctggatccaatgaagctctatattccctcatcatggttttagttttagaccttttgctcattcatctacctacctctaaaaatacatgtgccctgtggactgtttctcaagagccctgatctttagtggatgatatgaggaaaaaacaaactctatgtttcctctgctcttacactacaacaatcagcgcagaatgcttctgtgacaaaatatgtggagatattctccatacaccaagcaagcaatcaattgtgcagtggataccaactgggtgtcctctaattctgacactctctacctggaaatagtgtcagatttcacaggttgagggttcagccccacaagactgccctcctcttcaaatgccaattgcaagctccaggtggttttacctatgcttcggatcaactggctataaattgggattccagtgaccccaccccttggatttgattaatttgcagagcatctcacagaattcagggaaatacttacttatatttactgctttattacaaaggatattacaatagatgtgaataatgtgatgcatatggcgagaaatgggggaagggtgtgaagcttccatgccctccctgtgcaccccagcctccaggaaattccatgtattcagctgtctggaagctctctatccccatccttttgggattttatggaggtttcataatgtaggcatgattaattaaatcactgggcattgatggtcaacttaactttcagcccatcccttttccacagaggtttgggggtggggctgaatgttccaaccatctaatcatacctgggtctttctgattatcattctccaccctgaagctacctaggggctgacagctgtcagtcagtcattaacattcacataggtatcactctggagagtccaaaaattttaggaaccgtatgccaaaaaacagggtcaacgaccaaatatatgctttacagtatcacaggttatctcactatttgatcatgattggttaaggtagcatttctctaactgacatcctcagaacagggctgttgatgtgtaccaaagaaagactccatagtgcaataagttgcagaggccctatagcctatggattcataaagcacagggacacatttaaagctctgaaaaatcttgcaataaagaaa

SEQ ID NO: 5362 - DNA, 1799 bp, mus musculus; identical to SEQ ID NO: 5361

SEQ ID NO: 5363 - DNA, 1020 bp, mus musculus
gggagaataatatttgtcctgcttatctccaaaggctgctggaagactccggtgagccattttataaagtacaaagtgatctacaaatacaaggtcttattattattaaaaacacatctcatcttccactggaacgtttagataaaggagtgtggggtgtaataaagaactaagctagagcgagagaaacactgaaaaactaattacgaaatgtcacacaagtaccacaaagagagtgattacttgattaattaatgataggaaccctacatttaagtctttcagttatacttgcatcagtcctctttgcctatcagaatgcggtttgtttctgccaacgaataactatcaaaccactgaggcctaactgatgtgtgattaatgtgggctccattaattgtgtggctgagttttatgcatgaagctgtatccttgatttttcacctttaatttcctcctgtttaactgctggtcataaaattgtttcaaatgtatctgctgagtctgagagcaagttttgcaacttgaaaagtgcctgagtcagtttgggcatcttgtttggtaaaaccgacttgggggaactcttaacgctgtaagatgaattgctacttggcttccactcccagccctgctggctcccttcctgccactgctcactggcactgcatctcatctattatcattaagcacatgcatagcattgataatggcaaaaggcttaataactttctttctgatagcccatcatatgtggctctattcaaccttattttagacagctagagatgatgacatctgtctttctggtctttttcacattcatttaccatctctgttaatatcacctgattttcttttggggcagcaccccttcccatctctgcttttattttctgtgtttcaagtagggctggtctcatttccctggctccggagctaggcctggacaattagaattccagtgattggttcggggataggcatgtgacccaagctcggtcaactctcggtcaactagag

SEQ ID NO: 5364 - DNA, 1379 bp, mus musculus
gtctctaccacagccacctctgaacattccaccgggaccaccatgatccatgaggccacctcttcctccccacatgccaccagggccacctctgccatgatcaccacccgggggtgggaagggtggcgggaggaagccttcaggctttggagccttacacttgttgctctctgttctccaggcgaagttctggtttccacaacccggattgggacactgcctgtctccagcttggtgctggacgtttcctcctccagaggtgttccctcgggaaccctggggtcctcttggagggaggcctcctctatctcctccacggcctcccatgtgacccatgggtcccccaggacttcctgggcctcctggacctccgcagagtggtggtggcatccctctgccctcatggggtggcataccaccctgcatactgttcactggaggcctcttccgagcaagagagactttaagtttgctcccttgaaaatctttcccatcaaaccattccacggcagctttggcagtaggtgagtcttcacaggacactgtggcatcacctttgggctttcttgtttccttgtccaggtaggtgtggatcatgggttgctcagttctcttgttcatcttaacaaccccacactgcttaaagaagtctaccagatcatctagagtcacattgtcatttaatccttgtacataaattgcactgttgtcagagtcttcatctggatctacaggtgggcctagatcaagatctggtccttcatccatgggtccaccaggcttattgaagccaacttgctctccagcgctgcccattccaccgcatcctcctccccgcccacctctgctcatgcctccacgatcaaatccccctcttcccctgccccagttatcagggccactcatgctccggttctctcctagtccggaaaatcctccagactcctgcccataaacacccatgctactggggtggtcctgtcagaatgaactctgctgcccgtagctgctgctctgttagctatactgacttggagcttggctgtaggatcaagtttggggtgggtaactagtgggaggcagctgcccatagctgctttgttgaccatagctactctgctgtccatagctgctcggtttcccataggtgttctgctgagagtaactgctctgatcataactagttggctgtgtagaggaatagctggtaggagggtaggatggaggtgcggtgactggctgcatggagtagctcccaggtacctggggataactgcagttactctgtccatatcctaggctgggctggttgtaaccccctgtgctagattgaggttgactagtctcagtgggcttgtttccattctgcagtcttgtag

SEQ ID NO: 5365 - DNA, 1387 bp, mus musculus
tactgaggattacgtctagtggttgctgggcagcccctgaaatgtctgaacagagcagtgacaggatcgtatttacaatttagagcgtctcttagggatggcgtgtaaccacctggtggcagcagggatcaggcaaggctggctctgcagcaaaattagaggaggtaggtctccagctcctctcaaaatagcagttataacaaagcatcttggatggcaggacatatacatatgcccaagcacaaagctcttgctttcaagatgaagaaattcataggatgatagattgaggggaaaggtcttccatgagatattctggtccgttctcttcgattcaggaggatcaggtgttttcactcctgctttccgaaggaagcctacagctcaaagaagttaaatggcttgctcaagtggcggcagatgtagaggaagagtctagacagtctgcctccgtcccaccccaacagcacacacattcaccaccccccataccacacacactacacatgcaacacacaccacacatcacacaccacacacattacacccaccacacaccacacatcacacactgcacaccacacatactacacacgccacacacaccacacacagtacacaccacacacaccacatgcagcacacacactacacacaccacacacaccacacaccacacacacaccacacacattacacactcaccacacacactacaaacgctgccacatacacaccacaccacacgcaccacactacacatgccacacacaccacacacacgccatacacacaccacacacaccacatacatcacacactacacacacactacacacaccacacacccaccacacaccagacacatcacacactcaccgtaccacacacactacacacaccacacacatcacacactcaccacacacactacacacaccacatacacacataccacacatatgccacacacaccacataccatacacacactactctcacagagcacagcacacacacgctgcacatcactgacacaccacacaccacacacactgacacaccacacacactgacacaccacacacaccacataacacacagacacacacacacacatacaccccacacacctctctcatggcagaaatccagagatcagagtttttgatttccaaaggcttctttcatatgagtctaagctaagagatttggtttctgaagatcataaaagtaataatatcttctgattagaaagcattttcatgtaatacataatgtgcattatgtttcctgagcacttactacatatcaggcattctgttgtgggcttatatttattattagtacctcattttatgcttgcaagtaccctgtgaggcaggta

SEQ ID NO: 5366 - DNA, 297 bp, mus musculus
tgaatccatttcctgttttagtccatattgcttctttgatatggaataagacagtaatgatgactccaggatttttttcttttgcatttctttttccaagactagagtaaatgctggaaacacattaaagttagaaatagagacttgaatttattctttaataaaaaatgttccttgaacatttaagtaaaaatgtatctatgatacaagcattttctaatttaagataatagcaagcagaagaaaacaagttaaatgtaaattttttttctgtttcctgctctgtatgtaaagtca

SEQ ID NO: 5367 - DNA, 297 bp, mus musculus; identical to SEQ ID NO: 5366

SEQ ID NO: 5368 - DNA, 2586 bp, mus musculus
atactttttttctttctatgcgttaatgtgtaggggttggtgtgtgctggattggctgatatggccagacctgcagaaaaacttagcacagctcaatctgctgttttgatggctacaggtaaattaaataaatatcttctgtgtttcttgtagaacataaatgatttttgttttcttttatatcagtttatttagtggcttagtgtttgaaatacacccacacacaaaggaattaacagtattatgtctaggaagttattaagttatggatggaggagtcacagaaagaataagtatctgaatgggcttttgcttttcaggtttttgccatgaacatatttttataagtgggaagaaaattacagttaatagtcactttaaagattcctctttcatgtaagaattgagtattttctgtgacactaagttacagaaacattgaaaattcagagtatagcatttctttgtccctcatcctacattattgttgtaattactttactcaatattaagtattcactgaagttattgaagcagtatgtattctttttaaagtaacattttgtttcaacagggtttatttggtcaagatactcacttgtaattattccaaaaaattggagtctgtttgctgttaatttctttgtgggggcagcaggagcctctcagctttttcgtatttggaggtaagcctaccagagatatttttaaaactgttgcaaaagctacttagatggcactaattttttttttttttgagacggggtctcgctctgttgcccaggctggagatggcactaatttttttaaaagattcatatataatgctaagacaagaagtatctaaagtagaaatttaacatttctagaaaagtctaggggtttacaaataagttaaccagttaactagttaactgactaaaatcagttaagcagtatgttacctagtttttagatttaactgtgcatcatttagatggttaaccatctcacataatctcttttattaagacaacatatacagtttatgatttattaatttcttatgtaaaccttttatcactttcaattgtatataataaattggaacttaagtgtattgttatgtagtattggaaatgatacgtagagtgaggtctttgctttcattggaaagtgttccatgagcactggaaatttttaaactatttactcagtagttaatattgtcagtgatttatgataatgacattatgatcaaatatttgaaatcaggatcttttgagaaacctaggaggtatggttggcttcatggaataagttccttcttatgcttttatactactctccattccattataagctaggaggaatagtaaatgaagcccaaggtatggtagaagggaaggaaagactatggctctgtggttacttctttggattgagaattgaggaaatggtccttagcgtttgtgaacttaagtgtttacaggctgttaacccaatagcctgcctgcatcacagaagtatattttaccttagtggttagaagtatattttactttagtgattactttagtatattttactttacctgttgatcttattcttaggaaaggtgctttgcgagtataaattttaaaattctaggtgaccacattttactaaattttatacatatgttcacaagtttgtcacgttcttgtagaattccagaatgagaatatttttattaaaataatacttttgcacaggaaactatatgtcagctaagctgttaaaagtttttggcaggccgggcatggtggctcactcctgtaatcccagcactttgggaggccgaggcaggcagaccacaaggtcaggagatcgagaccatcctggctaacacggtgaaacaccatctctactaaaaatacaaaaaattagccagaagtggtggcgggcgcctgtagtcccagctactcggggggctgaggcaggagaatggcgtgaacccgggaggcagagcttgcagcgagccgagatcacaccactacactccagcctgggcgacagagtgagactccatctcaaaaaaaaaaaaaaaaagtttttggcagttgtgctcttattatctgaaacaaaatccagatgcaaatgaactctttgaatcctttcctttctgcctgtttctacctgtaagccctccgggaagattctgtttacaactgtatagctacttgaccaccaagaaagaagaaatggagtatgcttcccattctctccttaccataaatttgtctattattattgatgattatttttctttctgttttctttatagatataaccaagaactaaaagctaaagcacacaaataaaagagttcctgatcacctgaacaatctagatgtggacaaaaccattgggacctagtttattatttggttattgataaagcaaagctaactgtgtgtttagaaggcactgtaactggtagctagttcttgattcaatagaaaaatgcagcaaacttttaataacagtctctctacatgacttaaggaacttatctatggatattagtaacatttttctaccatttgtccgtaataaaccatactt

SEQ ID NO: 5369 - DNA, 2586 bp, mus musculus; identical to SEQ ID NO: 5368

SEQ ID NO: 5370 - DNA, 233 bp, mus musculus
tcaactgctgtttgtactgtctgtcttcacattcatattccagatttatattttctggagttaaatttggatgatttctaaattatcacaaagtgggacctcagcagtagtgatgtgtgtgtctcatgagcagtgagcacagtctgcattcatcatgaaacactatcttctaccaggaggaggttaatgtaaatcaccaaatcccaatgccttgtgactttcataggattcct

SEQ ID NO: 5371 - DNA, 1234 bp, mus musculus
aatgagaaaattctcagaaaacatttggagttcagagatagaactcactgcaaaattgatgacattctttacattattgtagctaacactgttaaaaattttaatacagtgatatagctatgggtttattcaactatagagttattaagtcatgaaaatgccacgattattataatccatagatgcgatctctgaagatcagaggagttaagatgttttcccagcattacatagtgcataagtcatggagccaaaactcaaacccaaatcttttgacttcaaaccagtgctctttttgccacagcacagattcacaggcttttaaaaggaaatgcaatgcataaagctgagatttttttatcttataaatattaatacctattaataatgtttcatttgcagtgaaattgtacgctttaacaagccaagtcatcaatggtgagatgcagttctatgccagagctaaacttttctaccaagaagtaccagccacagaagagggtatgatgggaaatttcattgaactgtccagcccagacatccaggcctctcagaaatttcttaggaaatttgttggggtgagttattcaactgcagcttgatgagaaggcaaagtccttgcaaacattgagctcgcatgcctctgtgttgttatttaagtcacgactaagccatatgacccagccaagagttctgccgcctgcaagccggttttaagatgttcagaaaggatgaaccatttttgatatgataaatataataacactgtcttaccctcccacttggcatttcactgtcctatcaccaactaatcttacatgcttcagaggaaggtgaattagcagtgttgatataaaatttgggaataaagaagacatctcttttagagtctcataaacgtttcatacccaaatgattgatgacagatcatgccttttgggatcttgggttgacttattgattccctgtaataaaaatgagatgttggcctggctaacacagtcaaaccctgtctctactaaaaatacaaaaaattagctgggcgtggtggcgggcgcctgtagtcccagctacttgggaggctgaggcaggagaatggcgtgaacctgggaggcagagcttgcagtgagccgagatcacgccactgcactccagcctgggtgacaggtgagactccgtctaaaaaaaaaaaaaaagttagaaggaaatacatgattatgttcagtttaaaaac

SEQ ID NO: 5372 - DNA, 395 bp, mus musculus
gaattagggcctctaactcatcagagcttcataggaagtagaaaaagaaagttcttgttcaggtgagaagtagctcctagaggcgcatggtttgcaaagtggacagtgcctacgtgcagggaaaaagaagttggtgcttctgggtggctaccgcccacacttggactgtttgcctggaaagggtggcaaggactggatttgaggcctcatttactttgcctgctacattgactctctgaggagacaagagacaagaggcataactactgcattgactctctgaggagacaagaggaatcgggagaaaactcatgtctgataaaaagctttaagaggttgttgcggggattatgattttaaacccccaacataatcttacaaaagcttcaccaaaa

SEQ ID NO: 5373 - DNA, 315 bp, mus musculus
tttgatggatactatttgaattggtgtaatatgctgaagtgtatgtaatggaaaaacattattattttctaaattgaataaaatggatttaataaatactgaaagcagaattaactaagcaaaaataagtatgttttgcttagaaaatggatggcagttgcttaagaaaaaaggtttttttactaatttaagaatatacagattgtctggggaaaagaaacttttttttgtattttacttgtacagtctcacatataaccactgttgttctcatgacactctcctatattgatgtgatctttatatgatttgtac

SEQ ID NO: 5374 - DNA, 592 bp, mus musculus
taacagtttgaattactgaaaaataatcttttattttagacctaatgatcttacaaatgacctgaaatgtaaggtttgttttgccttcgtcacagatgtaaattttgttttaaaaatatatttgaggccaggcgcgttggctcacgcctgtaatcccagcattttgggaagccgaggtgggtggaacacgaggttaggagttcaagaccagcctggccaagatggtgaaactccgtctctactaaaaatacaaaaaaattagccgggcgtggtggctggcgcctgtaatcccagccacttgggaggctgagacagagaattgcttgaaccggagaggcggaggttgcagtgagccgagatcacgccactgcactccagcctgggcgacagagcgagactcgtctcaaaaaaaaaaaaaatatatatatatatatatatatatatatatatatatatatatatatatatatgataataattttagcaaactggaagattcaagaaagtctggcaccttttatctaatgtgtgtttctagttttatttttccctacagtcttgacttttgttaagaattgtagagttctcatta

SEQ ID NO: 5375 - DNA, 116 bp, mus musculus
aattttaattttgtgatcaggaaagttctcccatcccacgccagtggtcgggaagagagacagagcagatctatggagggtctcataggccacaataaagggtttgtattttaaca

SEQ ID NO: 5376 - DNA, 2005 bp, mus musculus
ggaactttctgggataatggaagtgttccatatacaagggcactaataacataggggtgtacatttgtttaacattttttgaatagtatatttatgatcagtgaatttcactggaaggaaagtttaacacaattttaaaaattttattgagtacctactatggccctggaactcatctgggtactgttttggtactcaaaaaaaggccattaatgaaaaactcacagctaacattacaatcaatgggaaaaactgaaagctttttttttttaagttccagtgcaagacaaggctgcccactctagtcatttctattcaacataatattggaagtactcaaccaagcaattgggcaaggaaaagaaataaaaggcacacaaatcagaaagaaagaagtaatacatgcagaatacatgaccctgtatgtagaaaatcccaaaaactccaggaaaaactcttagaactaataaatgaataagtaactttgcagaatacaaaattaacatataaaaatctgtttaatttctgtacacaaataatgacctcttcaaaaaagaaattaagaaaacaatcctatcatttaaaaaaagtgaagtatttaggaataaatttaatcaaggaggtgaaagacctatccaaagaaaactgtaaaacattaatgaaagaaattggctgggcacagtggctcatgtctgtaaccccagcactttgggatgccaaagtgggtggacaacttgagatcaggagtttgagaccagcctggccaacatggtaaaaccccatctctacaaaaaatacaacaattagccagtgtggaggcacatgcctgtagtcccagctattcaggaagctgagacatgagaatcgcttgaacccaggaggcgcaggttgcagtgagccaagattgtgccactgcacttcagctgggtgacagagtgagactctgtctatggaaagagagaaagaaaagaaagaaagaaaagaaaaaagaaagaaagaaggaagacacaaataaatgaaaagatatccttcattcatggattggaagaattaatattccttttttttttgacagtctcaatctgttgcccaggctggagtgcagtggcatgatctcagctcactgcaacctccacctcctgggttcaagcaattctcctgcctcagcctcccaaatagctgggattataggcatgcaccaccatgtctgtctaatttttgtaatttttgtagaaatggggtttcaccatgatggccaggctggtcttgaactcctgacctcaagtgatctgcccacctgggcctcccaaagtgctgggattataggcatgagccactgcaccaggcctggaagaattaatattctaaatgttcatactacccaaagcaatctacagattaaatgtaatctttatcaaaattccaatggcattcttcatagaaatagaaaaaacagttctaaaatttgtatggaaccacagaagaccctgaatcaccaaaccaattccaagaaagaaaaaacatagttggggcaccacactacttcacttaaaattatattatacagttacagtaattttaaaaagtactggtataaaaacaggcacatagaccaatggaacagaatagcgagcccagcaataaacacaagcatatatggttaactaacttttgacatggcctccaagagaatacagtgaggaaagaatatttcatgtgaaaataaaggggctggaaaaactaaatttccacatgcagaggaatccaattggaatttgtctcacacatacacaaaaataaactcaaattggataaaaggcccagatgtaagacctgaaaccaaaatctcctagaagaaaacatagggaaaaagctccttgacattcactttggcaaggattttttagatatcacaccaaaaactcaggctataaaagcgaaaataaataggactgcatcaaactaaaaagctttggcaaagcaaagaaaataatcaacaagatga

SEQ ID NO: 5377 - DNA, 519 bp, mus musculus
ttccctccggggtcctagcacccactggcagtcccagttgtggtgctagttccctgttgcaccctggcctccagactctgggaagagctccccactgcattgtccctgctactatctcggtggctatactacccgctgggatagtgcagcttctcagttcctccatcatctacagaatccgtttctcatatttaagtctcttggtttgtaagtcttagaggggtttccatttcctgactggaccctattgttacactctagaaaaagatattacatagttctgaaaagagacccaaaacgatgaatacagtaaagtccatgttaattttaattcttgggaatggtgtgggttgatttcagttctattgtaaactttggaagcttcagatcaatgtttgccaaataggaaaaaataaatacattggtacttaggggaaggaaatgttatttttaagagtctaagctacatgtttaaaacaatagactgctttaaaaagaaaatcttaagatatataaaaa

SEQ ID NO: 5378 - DNA, 387 bp, mus musculus
tggttggtattttgaactgttttagcactttttgactcttctgctttgacacttacttacatcattatagtaggttatttgtacatgttctacttctcgtctttattattttatgtaaaactataagctctaagctctttaggacatggattatattttatgtctctcttacctttcttgtgcttggcccagtttcctcagagtacgtagagagataggatggtagcgtagagagagtcagacagatctatttacagatgacagatgactgctctgctgtggacttgctctgtgactttaaggaagatgcctacctctgtttgagttttgtgaaacggggatgatgataatatccatctcaccggattactggaaagattaagtaaa

SEQ ID NO: 5379 - DNA, 387 bp, mus musculus; identical to SEQ ID NO: 5378

SEQ ID NO: 5380 - DNA, 1546 bp, mus musculus
aaacaaaactactattgaatccgcagtccataatcaaatttcattattgttgcaataatgttttttatagccattttccccaaacccagatctaatttaggatcacatattagacagagttaccctatctacttagtctcttttcatttttattttcaggatactcttttatttaattggggtcaaatttacattcaattacttactgcactgaccttaagtgtacaatctgatgaattttgataagccctgtatatctgaatgcttgttaaaattaaatagaagccttgaaaatattattccataacagtttaaacatctttgcaatcaataaaccagataacaatttaaatatttgaaactaataatcttccctatttatttatgataagtgcatttaataaactgagcagtaatgatctgtaaatatatattagcatttatgttaataatatatataaaccaaactgattatcttattgcactaaaagagaaatggaggcacaaggaagccaaaggactttgagttgatagagtgatgcgtagtagatctgaaaagtttactaagctattttctcctattgtctaattctcaagcaagactcttctagattgaagctacgtggatgccagtggcattcagcagtctaactgccagttaaattacttagccagagacccaaccaattcaattcgtctaatacatgagaggaaacacatttggcagagagtcagcttttcaccctgttggtatcaatctttacctggcaaaatcaatactttatcacttgaggtcagagggtggccatctttgtaccatgtcagtgtaggagggggagcagcatttgtctcacagtaaagagaaatgggattgttgatgatcacatctttggcttcaccattcctgccagtatctagcatgtttcctatttcccagagtttctgaaaacttggaggaactatggaggaaaggcattaaatgttggtcacatataaatgcttaaacaaagatcttggctgtgttttcaccagagtgatttgtaaaagcaatagattagacaatgtggaaataatttcaagtactgacgccaccaccaactctagcccttagccaaaaaagtagtacacgaaagtcggagctggttgtcaagtggaagaacaagaagtatgaggctcagaatgctgtgtttatgctttgctctccccgttaaagggctctggcacttagacaataaaggggctcactctcaggaaggagcattgctaaatgatacacagcaggaaagactaattttgagaaaccattaaaaaatactggttcaattgagagcatttcacagtgatttggcttactaagaaggctaaagaaattatgcaatcaggattaaaaattccattaacaaaaataataggacattttcatacttttctggggacaagtatgaactttatgaaaggcaatttgcctgcacatcaaaagcattaaaagagtgcataacataaaatttatcacagaaaaaagtacatttaacctaaaatttccacc

SEQ ID NO: 5381 - DNA, 1546 bp, mus musculus
ggtggaaattttaggttaaatgtacttttttctgtgataaattttatgttatgcactcttttaatgcttttgatgtgcaggcaaattgcctttcataaagttcatacttgtccccagaaaagtatgaaaatgtcctattatttttgttaatggaatttttaatcctgattgcataatttctttagccttcttagtaagccaaatcactgtgaaatgctctcaattgaaccagtattttttaatggtttctcaaaattagtctttcctgctgtgtatcatttagcaatgctccttcctgagagtgagcccctttattgtctaagtgccagagccctttaacggggagagcaaagcataaacacagcattctgagcctcatacttcttgttcttccacttgacaaccagctccgactttcgtgtactacttttttggctaagggctagagttggtggtggcgtcagtacttgaaattatttccacattgtctaatctattgcttttacaaatcactctggtgaaaacacagccaagatctttgtttaagcatttatatgtgaccaacatttaatgcctttcctccatagttcctccaagttttcagaaactctgggaaataggaaacatgctagatactggcaggaatggtgaagccaaagatgtgatcatcaacaatcccatttctctttactgtgagacaaatgctgctccccctcctacactgacatggtacaaagatggccaccctctgacctcaagtgataaagtattgattttgccaggtaaagattgataccaacagggtgaaaagctgactctctgccaaatgtgtttcctctcatgtattagacgaattgaattggttgggtctctggctaagtaatttaactggcagttagactgctgaatgccactggcatccacgtagcttcaatctagaagagtcttgcttgagaattagacaataggagaaaatagcttagtaaacttttcagatctactacgcatcactctatcaactcaaagtcctttggcttccttgtgcctccatttctcttttagtgcaataagataatcagtttggtttatatatattattaacataaatgctaatatatatttacagatcattactgctcagtttattaaatgcacttatcataaataaatagggaagattattagtttcaaatatttaaattgttatctggtttattgattgcaaagatgtttaaactgttatggaataatattttcaaggcttctatttaattttaacaagcattcagatatacagggcttatcaaaattcatcagattgtacacttaaggtcagtgcagtaagtaattgaatgtaaatttgaccccaattaaataaaagagtatcctgaaaataaaaatgaaaagagactaagtagatagggtaactctgtctaatatgtgatcctaaattagatctgggtttggggaaaatggctataaaaaacattattgcaacaataatgaaatttgattatggactgcggattcaatagtagttttgttt

SEQ ID NO: 5382 - DNA, 1029 bp, mus musculus
aaatcatttaaattcaagagctaatttgcaatagtgttgctttttttgtgaactgtgttccagaatgagaacctctggtagttcatttttttcatattgattaatgattctctaggcagtgctaagggtttagcttgtttgataagttgaagccaggcgcagcagctcacgcctgtaatcccagcactttgggaagccgaggcaggtgggtcatttgagggcaggaattcaagaccagcctggccaccatggtgaaaccccatctctactaaaaatacaaaaattagctgagcggcagtgttgcatgcttgtaatcccagctactcaggaggctaaggcaggagaatcacttgagcccaggaggcagtggttgcggtgagccaagattggggccactgcactccagtctgggcaagagagtgagattctgtctcaaaaaaataaaataaaataaaaataagttgaagttcatgtgaggaatgttggtagtttaccttcctaagattaaaggacttgtttcggtaggacttaattcttttaaaaatgcaccagatgatgagagaaatgagagcaaattttattccaccttttctattctaggtagaagagaagcaagtgctatgtagttttaggagaattaattttcttggtcacatccaaagaaataataaatatttcatgattatttgttattaaattcattgaatgcttgttagtttagtttgttaggacaatatttatttttatatagtacatgataaaactgtttctgttttatagcaggcaggatatattgcaggcagttacccctatacatctaatagttcagcaaccccaattaaagcacttcttttttctctgttgatacctctagccagccattatgtcagctttcaagcacataagaaaataaaactgaggattatagaagaaaaaaggattagcaaaaatccatcactaaccctgtataataacttaatttgtatactgcattgtagtgggtgtctggtgttatcaatattgcattgt

SEQ ID NO: 5383 - DNA, 1029 bp, mus musculus; identical to SEQ ID NO: 5382

SEQ ID NO: 5384 - DNA, 991 bp, mus musculus
tatcagaaaatttggttcacatttcaatatttataggatacttggatctcaggattgaataagaccttagagataatcctcagttcctatactcaattaccatttcagttagctcaaactgcaggtttcagctttgggagtaaagcaaaagaaagctggccagcacttgtgagtactgcccattttttcccatacttactaaatagcagtgtgcaagggcatgactcataaaccaccaccacctttgacaggtttgctttaagaatagacttattatgcaacttcagcaatagatcttcaaatagcttggggacagaggctgtgatgtgaagtttaagaagcatacttctgcaaagcttagttgtaatatatttgagactcattgggggtgctaaagtaaactgcagtcaataaaaggatagtctagtttttggaaacagatggcagatgtgatgataagactatacggaagttcctctatgatgaataatgaggcaaagtgtttactgaagagaatttaaaaagaaaagaactgatggttaaatgcagggtgattggtatcctggaatgaggcagggaaaaaaaaaggcagagtgcagaggtagagacccacagaaaataccaattgtgtatacaggatatacaactaccttaaacactttttacaatgagatgaagtataagttgttgaataaaaaattgtttaactcagaaagacacaaacatagaaaaatgtagacaaagaagaatagaggcatatccattaaaggagtatttgtccatctgtccatccacatacagatggacagatactcctccatacacacatgcacacaaccatacaaatgaattcagaaggactcacctacttagtattttagacactttttgaaatgaagtaggcaattaagtattccgtaaagaaagacatactaaggttgacagagacttagaaacccaaatacattgaaacacatgtcacagatacaca

SEQ ID NO: 5385 - DNA, 396 bp, mus musculus
ttccaatacatacagtagcttattatagaagaacttcataaaattgttgaaagaattaaattagataatttatgttgtatagtcccttgcactgaaagatagcaaaaataaaaaatgtaaccgctattattcctattatgttaattttttattatacatttactgctaagttgtcttttttctctgacagaaaaatataatgctaattaacttagaaatgtcttagaacctatatcagaggacactgtgactgagaaagacttccaaatatgctctgacgttgaatagcatgattttttatatccacatttaaataggaacattttatttaatgtctcaaaatattgcttttcttgctgtctcaacttccttttggcttactgtaagtttaacttt

SEQ ID NO: 5386 - DNA, 458 bp, mus musculus
tataaatgtgaaaaggccatggttaatgagatgtatagtactgcatatgttttttaaaaaaaatattcttttgtgtatacatatactgcagacagaggaagaaagtcgtttaaattttcaatagtgtgattaggcaaggcatttcaagaacaattctatttctggtaatttatttttcattgataattagagttataggcaagaaggttgttacaagaaacttattcataatatagatatgtaatttaatattcaacatggaaaaatttatgaactgcataaataagattgaacacgctgacattaaaattatgctttcaggtacattaaatgataaataaatattcacaataatattgtgaggtgaacacagtgtgtaaatatataaacagtgtgattcctacttgatgtttttatagaaaagtagataagggagtatgaagaaatgtgggtggaat

SEQ ID NO: 5387 - DNA, 188 bp, mus musculus
taaatgcaacaagaacaaatggaattcagacatacttggctcttttgtccctatggaacaggaatgttggccttcagagttcatcacagaataattcccatcaggaattgtggtgatatggaggtttattctaccctagcttgattaaaagtattgccagggatattcactatataaaatactgatgc

SEQ ID NO: 5388 - DNA, 2482 bp, mus musculus
ggccattttaggaccacttgggcctttgacttggtcattatagtcctgattctgcacagaggtgggcagaactaatgaaagcacatggcttataggaaaatatgagtgatctatgaaggattttgggactctctgagggagaagaaatccttggtggaggagtaaagttacaaataaaactataaattatgctgggaaaggcagttgaagctctgagtaactataattttgttattaaaaagatccatatattcaagtgtaaaaaaaggcttagtcatttgattttcatttaaatttgtctctcttaatggattaatgattaatcaagaggggaaaaaatataaaagaaacccttgttctctaaaaagagagcagagagcagaagagagcagcaaagagcaatggtccccaacctttttggcaccagggatgtttcatggaaaacaattttttccatgtcagcaggggtgctggtttctggatgaaactgttccacctcatcaggcattagattctcataaggagtgcacagcctagatccctcgcatgtgcagttcacagtaggtttcgcgctcctatgagactctaatgtcacagatgatctgacaggacgccgagctcaggtgataacactgattaccgctcacctcctgctgtggcctggttcctaaggggccacagtcacagtagtggtgcatgacccggggactggggacctggggacccctagcatagaggaaggttagccagtagcttgtacagagcccctacagggggcagggtaacttcattcctaggtctgatatacattttgtgaggaaccaaattttgacagtaccctctgagttgattaggccctagaggatcgacttctacaaccacacttaaaagagataaaccagaaatctaatttatgtgttcaaaacaagatgcccttcttccctgagtcttctgctaaaagcgtatccttttcagtatcacagcaactgagactgtttgaaagcgcgtttgctcaatgggcaaagaaaaagaacaaaagaattagaagagtgttgccttagtctatctgtgtgctgtaacaaaataccacagactaggtaatttatacacaatttaaattgatttctcacaattctgaaggctgagaattccaagatcaaagcattggcaactttggtgtctggtgaaagtctattcctcataaatagcctaccatctaggtgtctttaaatgttggaaagaatggaaaggctaaaagcgccttagctgtttcccccagccattctattaggcattgagacattcatgagggcagagctcttataacttaatcacttctcaaagggacctacctctaataccaccaccgtggggattaagtttcaacacatgggcccagaatgatggctcccacctgcaatctcagcacattaggagaatctcttgagctcaagagtttgagagcagcctagacaacatggagaaaccccatctctatgaaaaatacaaaaatataccacctcacaccagtcagaatggctattaccaaaaagtcaaaaaataacatgttggcaaggttgtggaggaaaagaaacacttatacactgttggtggggatgtaaattatttcaaccattgtggaagacaatgtggctattcctcaaaggcctaaagaaagaaacaccattcaatccagcaatcccattactggggtatatacccaaaagaatataaatcattctattataaagacacatgtaagtgtatgttcactgtagcactattcacaatagcaaagacatggaatcaacctaaatgtccatcaatggtagactggaaaaagaaaatatgatacatatataccatagaatactatgcagccataaaaagtaacaagatcatgtcctttgcaaggacatagatggagctggaggcattatccttagcaaactaacgcaagaacagaaaattaaatacttcatgttctcacttataagtgggagttatgtgatgtgaacacatggacgcatagaggtaacaacacacactgagacctatcagagggtagagggtgtgaggagggagtaggttaggaaaaataactaatgggtactaggcttaatacctgggtgatataataatgacacacagttatctacataacaaacctgcacatgtactctagaacttaaaagtacaaacaaaaaattaaaaaatttgctgggtgtggtagttcatgcctgtagtcccagctgcctgagaggctgagatgtgaggatctcttcagctggagaggaggaggttacagtgagtgagatcacaccactgcattccagcctgagtgacaaagtgagaccctatctcaaaaaaaacaaaacaaaaattcaacacatggattttggaagacattcagaccatagcagcctcaaaatttattttatccagattatgaaaatgtgtgatgaactatgcttgaacaaaa

SEQ ID NO: 5389 - DNA, 1155 bp, mus musculus
tacggtgacgaacctgatacaagacccataaaacacagattcttttaaaatctattttttcttggcaggggagaggttttcctccatcctctggcagttccctcaatgtaacataagaagctctgcagacacatgcacacgtatgtttattgcggcactattcacaatagcaaagacttggaaccaacccaaatgtccaacaatgatagactggattaagaaaatgtggcacatatacaccatggaatactatgcagccataaaaaatgatgagttcatatcctttgtagggacatggatgaaattggaaaccatcattctcagtaaactatcgcaagaacaaaaaaccaaacaccgcatattctcactcataggtgggaattgaacaatgagatcacatggacacaggaaggggaatatcacactctggggactgtggtggggtcgggggaggggggagggatagcattgggagatatacctaatgctagatgacacattagtgggtgcagcgcaccagcatggcacatgtatacatatgtaactaacctgcacaatgtgcacatgtaccctaaaacttagagtataataaaaaaaaaatagaaaaaaaaaaaagctctgcagattgctaattaggagaacaggattaataatataggtagtcaattttcattacctgttttgctagctactcttctgtgtagcagccttagcgcctgggagatataaaatagtaaatgtcaaagatacagggaaaacagggtgtagtcccagtttaaaataagcatctcactttagaaagaagtttccctaaatagtccatgatagcagatttacaaaaaagtagactataaacaatatgagagtgttctaaaaggatttcaagaactgaaagtgtaagtgagcaggacatgtggtatataagataggaaatactttcattcattttcttttggatcattttacccatttgatggctatttttttttttacttgggcagaccaaatggcgttatggggtttgggatttgaagagggaagatgatttacagataaccaacaattctctgattacttgtagttctattaaaaatttccaatatcctatcatatagttcagcataagaataaaacccttcttagttcacttaaagc

SEQ ID NO: 5390 - DNA, 1463 bp, mus musculus
aatagtatgttcttttgtgatagttataagattatcttatttgaacattgggggcatgaagctacaaaaataacattattaagaactaccaaaagatggtttttatttcacttagttttcataaaatcattagatcaaaagcggacaaaatattagaaggtccatatttgatatttttaagcaaaaatcttaaaagtcaaagtgaatattatgcaattttttttgaaaaaaaagatatacttttctaaccagatcttaaataatgacaaaactgatataaaaaataggctcttagatttattgattattgccattgcaaagcaatgaaaatattgttaaatctaatgggacagccaggcgcagtggctcatgcctacaaccctagcactttcagaggttgaggcaggttgatcacttgagcccagttgttggagagcagcctgggcaacatgacaaaactctgtctctacaaaaaatacaaaacattagacgggcgtggtggcttgtgcctatattcccagttacttgggaggatgaggtgagaggatcacctgaacctaggaaggttgaggttgcagtgagcaatgattgcaccagtccactccagcaagggtgacagagagatactctcactcaaaaaaagaaaaaaaatctattggggaatgggtgaaaaatgtttagtaattaaatgtactgaacactggaccacatgatttatgtaacttagttttcataaagaatatataatagatattataacccattttatgcatacagaaaaagagaggtttaaaatatttccccagggcacacatctaataagcagagaccctgatatttgaaactgtgtatattttactatggaaccatctaatttccaccacagagcaaatcttaaattaagagacaccccaatatcaattacttacattatatcaaacatgtaagtacttggtatatttttgattattcagttaattcatttatagtttaaattaacactaattcactgaacacacatgacagaatcaattttagatgcagaggacatattcagtgacaatatcttaacgctggagatgtaagacacgacaaagtttatagcaagtccgtgctggagatattggctattagaaagtacaggatctcactgattaaaacatgcctatttgctgactcactggcacaaactaaacaaataaaaacataagagaaaaagccttttatttgtgccagtttgatatttaacaagtattctcagatatttgctattgtttgttacagaaagaagagtctgatccatttttgtaatcataatccaagggaatattgataaagtgcagattcacacaagcaaagtgcctgaggaaagagccaaggagctagctggaggtaagagatcctatgttgtggtcaaataaattattggttctaattcctctcttttcaggatagtatacatt

SEQ ID NO: 5391 - DNA, 641 bp, mus musculus
aaagtaacaattaaaattgttcaggaggcaatggaaaatgtagagagcatacatgcataaatagatcactttagaacttgatattgtttgaaaaaacaaatagaaatgctagaaatacatggtaatggaaataaagtgtttagtgtgcaatcagaaaactgggcacagaagaggaaagaatcagtaagctagaagacaagttaataaaagttattcaaagtggaacacagaaaaaaagatacaaaaacacccagagcagagcatctgagatttgcatatcaaatagtttaacattgaagagtctccaatgaagtagggtctcataatttattaaagaattgatcatttcatctatttttatcattttttatataatactgtcagatcatcagattgatgatttggaactgtagttataatgtaataggcatttaaaatctactaacaatttgcaatgtcctttaagtttgaggttgagtgccacaaaattatcagaccaagaataaaagggcagagatagaaatatatcaaaccataattttttctgataccttgaatatggatttaaagaaacataatcagatctatttcatttaacaaggatttattgaatattttctctcatgcatatttttatgtgt

SEQ ID NO: 5392 - DNA, 567 bp, mus musculus
ctaattgtttgtaatttttccctagattattgttaaattttactaatacttaaaataagagaatgtaatcctttttcagtaacataacgccattccgtacatatgaaatgttccattttctaatagttaatatctcaaagtttgaatttatatgtctagtttttataatatcaaattctaattgtaagtatgcatcttaaaatcaaacgttattcatatctaatgttttctaatattgttatatttttgttgaatagaggtaatgtacttttaatctgtaataatgaggtaaaatacctgttttgaaaacgatttaatattcattatatgcaaatagcgatgaactagagtcagataacttttaatatacatattaaatttatgtatattaatttaaaatttaaaaccttggcaaaaaccacaccatttacatttactattgagacatatatacttctgcgataatttttaaataacatgtcacaactaacacttcttggtttgtttttatcagacctttatagagaacttcagaattacctgaaatatactttaatgtatttcaaa

SEQ ID NO: 5393 - DNA, 185 bp, mus musculus
attaaattttgaaagaggaatgaaataagaaaataaaaagtattaaaattaaaatattaaacctgaggaaaaagttgaaccataacaaaaagtaattgtgttgctatagttgtaatattttaaaaatagtattgacatagtcataataataacataccttcaatggcaggttgaaattccaatga

SEQ ID NO: 5394 - DNA, 335 bp, mus musculus
actatttatttaaatatataacttgaattttccgtgttttgaaattccattcaataatcacccaattaattgttctaaagattaaaaagtagtggaatatcagtttgttttataaagatgattagctatagattgatttcaaaatatacatagctgaaagttatccaaattatttagttcatcatgaactagttagcctctactattagatactaaaaatataggcttaattcacccttcccttaaagcatttctcatggtctccctggtattataactagtttggtaccgatccttttttcccttcttacgttaggcactccttttcagtatat

SEQ ID NO: 5395 - DNA, 224 bp, mus musculus
tatgagttttttttgctagttctgaatcattgtgttaaaattatgatttgttttagtatagtgcttcaggaaataataacaacacttttagtatttcaaataatacttttaaataaaaaatcttaggaaggttgaaatttctgaagttggcatatagtgttcctcatgctaatatgcttcttgaaaggttagaaacatttagaggtgccagtagttgttcaggg

SEQ ID NO: 5396 - DNA, 438 bp, mus musculus
aggaataaacattccatttgcttgtttcttagaggaaagtatctctagcaaacaggtatatcaaatgcttctaaaaataatttaagtaatttcctccaatcttatcctgaggatgattttatacatacacatatttttcacaataaacttttaaaattccattagaaaacattacatgtattttcttcagttgtgaagtgtttaccagtgacagcaccagagaatggaaaaattgtcagtagtgcaatggaaccagatcgggaataccattttggacaagcagtacggtttgtatgtaactcaggctacaagattgaaggagatgaagaaatgcattgttcagacgatggtttttggagtaaagagaaaccaaagtgtgtgggtaagatacacttactgttttagtatttttagctttttaaatgtaaatatacattt

SEQ ID NO: 5397 - DNA, 438 bp, mus musculus; identical to SEQ ID NO: 5396

SEQ ID NO: 5398 - DNA, 431 bp, mus musculus
aacattccatttgcttgtttcttagaggaaagtatctctagcaaacaggtatatcaaatgcttctaaaaataatttaagtaatttcctccaatcttatcctgaggatgattttatacatacacatatttttcacaataaacttttaaaattccattagaaaacattacatgtattttcttcagttgtgaagtgtttaccagtgacagcaccagagaatggaaaaattgtcagtagtgcaatggaaccagatcgggaataccattttggacaagcagtacggtttgtatgtaactcaggctacaagattgaaggagatgaagaaatgcattgttcagacgatggtttttggagtaaagagaaaccaaagtgtgtgggtaagatacacttactgttttagtatttttagctttttaaatgtaaatatacattt

SEQ ID NO: 5399 - DNA, 431 bp, mus musculus; identical to SEQ ID NO: 5398

SEQ ID NO: 5400 - DNA, 401 bp, mus musculus
aggaaaaataattgaagatacataaactgaactttaatgggtatatgaaaatatgatagagaagaatgaagtgacagaaaaaaagaaaaaaggaatacatttaggacttatttgaagttagtgtcaacatcaaacactgaagacatatttttacataaaatagtaaaattttaaaatagtaaagctttaaaacttgtatattaagtcacatacatattgtttctcatataattattgctaatctaaatatattatcctgttagctatagagatatattaaagcttattctgtcagaacgaagtataaacttaggagctgaatggacacagtggaagtatggtattgagaagaggaaatatataatgaataattaaaactttataaaattttatgtttgact

SEQ ID NO: 5401 - DNA, 401 bp, mus musculus; identical to SEQ ID NO: 5400

SEQ ID NO: 5402 - DNA, 588 bp, mus musculus
ttttgcaataaaaacaacaccaggtgcctctcaaattcttgccaaaacaattctacatgcaaagatttttcaaaagacaatgattgttcttgttcagacacagccaataatttggacaaagactgtgacaacatgaaagacccttgcttctccaatccctgtcaaggaagtgccacttgtgtgaacaccccaggagaaaggagctttctgtgcaaatgtcctcctgggtacagtgggacaatctgtgaaactaccattggttcctgtggcaagaactcctgccaacatggaggtatttgccatcaggaccctatttatcctgtctgcatctgccctgctggatatgctggaagattctgtgagatagatcacgatgagtgtgcttccagcccttgccaaaatggggccgtgtgccaggatggaattgatggttactcctgcttctgtgtcccaggatatcaaggcagacactgcgacttggaagtggatgaatgtgcttcagatccctgcaagaacgaggctacatgcctcaatgaaataggaagatatacttgtatctgtccccacaattattctggtaagtgtgat

SEQ ID NO: 5403 - DNA, 588 bp, mus musculus; identical to SEQ ID NO: 5402

SEQ ID NO: 5404 - DNA, 950 bp, mus musculus
gggttccgacagcagctcagcttaaccctctgccctgctaacgagggaaactgcggcggctccgcgcccagcacgcccggtaggccggagagagcggcgaggccttcggtgagcgaagagttaaccgcggcggagcgacagatcgcggagctgcacgctgccgcctgcgcggtgagactccctcctgcccgccccgccccgccgcggccgccccgggctcggcgcgcctgcgcatcccgggcctctccggacccggaggccgcccggcagaggcaaaggttgctggataccggtgcggtcctgcctcgggcgacattcgcgcacgcacacgaacttccagccccgacattttcgcgggaaacctgtgtctgtcttgagtatgagtgtgatttgttttccgatcagcgtccgagctaaactccggtcgcagtgtgggacccactaccactcttttgtggtgtatgtgtgtgtgtgttgcggaagggggtgttaaggaattgatggagaaggtggagggactgagaagtcacaacaaaaatgtgttgtgtgtttttctgcattgtcagttgaacacttagcaatccagtgattcttagagtgagaaaaaaagacattgacacatttattttaatttttccattgccttcttgtcctttctcttaactcttaacggagcagagggaactacaatctggcatttgtagacactcagctgttttctcctgttttgcggatttgacaattgtctgttagtaccagtatctaaacttctctccctttacgccttctaacacagtctgcgtgagtttaaaggcagcatggttacctttacaaaagaaacagtgagaaaaaaagagaaactgactataataaagatagaaaagcagtatgaaatgaacccatttaataagctatgtgtgtgtgcctccagtacttgatgggactaatat

SEQ ID NO: 5405 - DNA, 785 bp, mus musculus
ttacattattctgtagtatcttcatgaaaattccctctattaactcttgtcataattgatgccttcctttttgacccctccatagcattcattgtgtgtcccatacatttgacctgaatattaggcctttattatatacatagcacaagtctagttatttcctatgtcttccccaaatattaaaccttttttatttttgagaaaagaggtttttttatacctcgattgtatttttaaacatatgaggaaaatagtaattgttcaacaagcattttaaaaattgagttgtgatgtagtaactctttcatagataagacattttgtcaagaattctggggaaagagaagctttcattatgaagagctactgctggcacttaccattcttcataatgtaagtcaagggaaaggcaatgacgtggacccagcaggacttgttcaagtcttactttccttctctgagaccagtaagtgctatgtggggttatcctctcgagaatggaagtcagagtgctaactattttcatcctattctgtagcaagcaacacccagcatcattatgaatttctcatagggagagcattccagggaccagtcctggtgctttgattgggaaggataaaatctttttgccctgaatattttagttatgttactgtagtagttctttccattttgtaagaacagttaccaccatagagtttcaggaggcacacttgaaaggaattaagagactcaaaggagcattgaacaagtcactaatgatgaccgcaaaatcactacta

SEQ ID NO: 5406 - DNA, 883 bp, mus musculus
ggctgccttgaagacctacaatacttttggtagtaaatagttccaggtgtgtaactgaaggactctgagaatgatgcacaagccaagtcatattttaaaactcatttagacatcttgatgagggcaatgagggacatgtcttgtttttctgggattatgatttcattgctttgcatgagtaaagacctatttctttccttttcacttcagttaatttgctctgcaaataggcatcaacagagatatacttaataaagtgtgaaacataaaaatggaaaacttcctatttgtttcaaccaaatatatgggagagaaacagtgcactcactagcgttggccatgcattcgtcaaggtgcagtgtcaaagtcaatgtgtgttacagtgaaggatgttgcattcaaaggatggccttgctatataaagcaggacatatgaaagcccaatataccatctaggctatgaattacctttcccttttctatttgccacctccttcccttttatttttaatgataatgaaattgaattaggtattacatgtcaacctgagccatgtgtcttcagtgtccttgcatttatcatcaaatacagtgcatgccacctcagtacacacttccaggctgggctgctttcctgtctggtccaacgcacaaggacagagcagacatatcagagattgacaataaggcacactgatgtaatgtatataatgtgtcacattgacaagtcaccccaggaaacactaaagggcccagccaacactgtttttattatagcaatgcttttttttagaagaaatctatgttaagacagattgatttgtagataatttgaaggtaaaatagttgctatcacttctgaagagatgccaatacttagtcc

SEQ ID NO: 5407 - DNA, 967 bp, mus musculus
atttcaagctgaaattatttggttgcttctgtacgttggttgttatttagtacacactgacctctttgttattctgttaagtagcccaagatgatgatgtattgaaaatgtatggcttccttttgtgaaagcttaggttttaccaatcacctgttggggcatctcatcatttatctctcagaaatagaagcacagaggctatattttatacctgctcagtcatctaaggctgttgactagcaagaaaacacactctgttgactcaaaatcctgccccacatagagcatccagcttggttgttagggtatttgtttctaaagatcaagcaacaatataatacactctgatgatccagaacagatgtggggataaagcctaagctgaaaatattcctggggaacttaaactaggatcagaggcatttccaccaggcacgtggcaagttgtagtttggaaaatgtgctctgtcttgtatgacttcagtgtcccactgagctccccacctttgacatagttgcaatgagagaaggttggatttgcaagtggtattgacctcgttgccaagggaagtaaaggagatttggttccactctccatccctaaatgtgacggcagggaaagggcccctgaaaaaaaaaaaaaaaatgaagctgaccccagtatgcttgctacaatttggtgcttgtgtatttgtatctcttttcttcactacctctactttgaagatgattgtattcattttgtttgggtgctatattccatgcctaaatcccagagaaggcattaacaaagtgttggtactgacagactgacaaagatgttggcctactcaccagtccctaaatcatatgagcatttaactgttatagttaggtttgtgggttctcttttctctattcatattctatttctctctccctccctctgtccctctttctctcttagtcactacctagttaccttgtt

SEQ ID NO: 5408 - DNA, 1626 bp, mus musculus
aaataagtagaattaaagctgtactaggctagggcacatttatattactgacaactatagattattcagtaatacctctcagtgcaccagtaagcagagagcatggagagctaataaaagtaatgaagtcttcgtagtacgtgaactcactgctattaaatctcttctgagaaataggatgagcctgccaagtttgttgggaggaaggctgaatgtgtaggctgttgaagtgaaaataagtagagccatacggcaatggtggctgagagagataatggcattaatgcccagaaactgagtgctttacctagccttcaactttattaggaagcaacgatgacataaaactggatagggtttatcacgtttgtacttgtcagctaaatctacagataaaaattatagttttataataatccaaagcttgagtgtaccatgtggctatcaatattgaggagccaatagaggtatagctacataacataaacgttatatttttcatgtgatggctgaccatcatttgccatgactgtttaaggagaggaaagcccattgaagcatcctagttactcagaatccctgaaaggccatgatgatgttgaggtctatagaaagtgctactcaagccgggcgcggtggctcacgcctgtaatcccagcactttgggaggccaaggtgagtggatcacaaggtcaggagtttgagaccagcctggccaatacagtgaaaccccgcctctaccaaaaatataaaaaatatctgcgcatggtgacgtgcgcctgtagtcccagctactcagaaagctgaggcagaagaatcgcttgaacccgggaggcagaggttgcagtgagccgagatcacgccactgcactccaccctggacgacaaagcgagacaccatctcaaaaagaaaaaaaaaaaaagtgcaactcaagttgtgggtcagtcaaggattaagcagacaacgcagcatgccggtacagtatcctgaggtagtaacagtgtggcacatctaccacctctagcactaaagggtcaagggaagggaaatgttactggaatccagagagagaaaagactgtgcagaaaagatcacgctacaggaactgtaaccttcagaagagagacaaagtctgctgcagctactctacagggagggagatggaggagtaaggccccaacccctcttccctctgctctccagcaggggccgcccattgactgaacccaaccaaaagccaggggacaggggagtcctgggaagtggtctcgggggcactgagcaggctggatggagtaggaaggataaagatctgaaggggtaaatggaagatagccctactgtctccctagttttgcctaagtaattattttattaataattccctatattatttgcttggttttctctccaggaggaacagttccaacataagagtgggtgaagcacattaaaccccaataatcaacttccttaagcatttccaagtaacataatctcctacttccctacaaaaaaaaaaatcaaaaattctcacttaaatcccaggagatgtttattttcatcctacaaagaatgtctgttgttgagtgatgacgtttctttaaagagaataattaaagctc

SEQ ID NO: 5409 - DNA, 1234 bp, mus musculus
tttgacctagcaaatttataagcgatagtaaaactttccttttacctttacaataatagcttttaagtactcaggctgacaaattcttcatggactcacttttatgtttttcaatttctattaatttctctgtattaaagttgaattagatggatttatgttgcctattcctggcattcatagcaactataaggcatgatcaagaaaacagaaattctaatcctcatgttacagaaatggccccaattctacttgacagaaatgatttcaattagggagtctctgggctaccttttctgtttcaccagaacaaatgttattgatataaggggaaatccttggataccatataacctgctcactctatggagcagagttacttagagtgctccgaatcccatctttgatctctggcgatatttttctctgttatgtcactgaggtcacctggctcatgtgtgacaaactgcctgcataagtcacagtgccagtggcagagatttgtaaccatgcccctggtccattgcctttgaattatttcacaggcccgctgctttacatttacactctgtcggaagatgaacaggggaagggagtaaaatcaagggcagggtctcatcctgaaggacaaggggaaacaggtggaaggttaatggccctggagcgattccacaagcctctcaggcttgatatatgggcctggggcctaaaacgggcattggctttcaaagatatattatttcatttgaggagagacattctggagttcctgcatttgtctgctgatagatgatcctctgtccacaattggttatggcgtgtgagttttccttgggcctgctcccatacataaaaattttgctgagctctccaaccttttgcatgcctttaggaatgggaccggtgcaagcccactggcaggctgttggatttttttgctgctattttagtagttccttttgaaccgtgaggcaagtggggaatgaaagacacttctgttcattcatacatgacttgataagggtggccttgttataaaaaaaaaaaatggtgaaagggatgttaggaatcaaacatatgtgtcattttgggaagacaggctcagtccaaaatttagtcatttgggtttcaaaaagttgcttacataaaagctagatactatcaaatagcttttgactttattactgttttgcactccccaggcttttagcaaatggcttactctatttttctt

SEQ ID NO: 5410 - DNA, 804 bp, mus musculus
attaaacatggtttttaaaaatatacatcccagctgggcgcagtggctcacacctgtaatcccagcactttgggaggctgaagcctcgtggaccacgaggtcaggagttcgagaccagcctggccaacattgtgaaaccccatctctactaaaattacaaaaacttagctcggcatggtggcgggcacctgttaagcttttcgggaggctgaagcaggagaatcgattgaacccggaaggcgggggttgcagtgagccaagattgcaccattgcactccagcctgggcaacaagagcgaaactccgtctataaataaacaaagaaacaaacacatccctcttcctcactagagaaaatttcatccatccttttggcatgccctcactcgctcctaccgacagtaagaatgactgttataagtggtatgctcctaatattgctattttggtctctgttgatcctaaataatgaagtaattttttttactgctacttttggctttcatatgaagtttccattagttcagtatcttttttgtgtctaaaagttgagaagttcccttagtaacagctctgatcatctctgatttgttactcaggaaaagcggaaaaactttcagattcacttgcatttctaatgggaaccacaccaggtagatattgatgagaatttgaaagctcagtctcttttctcataccacgaaacaaccctaatataagatgctgggttcatacaattagtagtaaaactttcttttgacagtaattttccaacattaaaaaaaattatttttcttctgagtc

SEQ ID NO: 5411 - DNA, 804 bp, mus musculus; identical to SEQ ID NO: 5410

SEQ ID NO: 5412 - DNA, 804 bp, mus musculus; identical to SEQ ID NO: 5410

SEQ ID NO: 5413 - DNA, 1356 bp, mus musculus
aggaaaaggcgctccgtcatggggatccagacggtaagaccctcattcagtatcctccactgggggacccctccccatctggttctggccactcagctccggaccaggggctgtcgctgccgaccccgccccgcagggctctgggcccaccgtggatgctggggtcccgatcccgcacatccgggctcgggactccgccaggttacccctctgcccttggcatgcctccgcgctggagctcgggatcgccacccctgggacggtcaccacccaagccccgggctcttacccagcctggcggtcacgctgcctcctctacccacagagccccgtcctgctggcctccctgggggtggggctggtcactctgctcggcctggctgtgggctcctacttggttcggaggtcccgccggcctcaggtcactctcctggaccccaatgaaaagtacctgctacgactgctagacaagacggtaagttggggaagaaagggccagggtgaaggaggggaccagagtgctcctggcatggagggtacagcacccacggtggttgggatgtccaagggacgtggcagcgccaggcgcgcttggtgaaacacttgtgtcctccaccctccagactgtgagccacaacaccaagaggttccgctttgccctgcccaccgcccaccacactctggggctgcctgtgggtaaggaaagtgtggaatgggctcctttccctggtatcctcagaaggtgactcccctcctgggatctcatgaaacacgctgcttcaaccggtttgctccacacaccattccccttcccccacttggctctgcatcctccaagctgtgaggtgccactgggcccctctagagtgtggcttccatgacccccatccagctttaacactcaacagtcttgcctcttccctgcaggatttgctaattactccctctgagcaagcactactaactttttcccattgcccagacccttttggctcatctgtcaaggtcctggcagtaactggcaggaaacgctggaaataagtgtttcctcaactgggcgcttataagagatccaactgagggctcaatggggcaaatcttccctgccttgtagctccttgggaccacagcaggaagcaagacatcttgttctctcaaatctctttgagtattttgagggatgcagcacatcacagacaacccttatgtagctctctgcacggtccccaggcaaacatatctacctctccacccgaattgatggcagcctggtcatcaggccatacactcctgtcaccagtgatgaggatcaaggctatgtggatcttgtcatcaaggtaaggggctaggaaggga

SEQ ID NO: 5414 - DNA, 701 bp, mus musculus
ctgtcttgctcagctgggcttcagtgacagagactggtgacatcttcctaggaagttggtgaccggagttgaaacaatggccagttccccaggagacttggcttaggaattggtctcctagaattattgagcccttatctaaggaagctccacctttcactctccctcttcaaactcatgctgggagcttgtgcggctccctgcagccccgctctgtatgactctatgtggccactatgccaaggtggagaggaggtctggactgcatttggaatcctggtaatggtggtgattctctttttacttctttgtggtgtccaacatcctctagtgtcactggcacaaaacaggtcaggctattggaaggccacactgcttaacaacaatgtcaggagatccaggctctcagctatattcagattagtgaagtgtacattctcctaacttgctcagcttatctcctgcacctagtgctataaacagttgtgtttcagagctccccaggctggccaaatccatagttccaatccccaaagtcccttgtctaaatggggtctaacttccgccccagtttaacccagggctgtttctgactcagcccctgtcatcctgcctgggccctaggcaacactgcctctctaatgccctagccagacagagcattcctgtttacccaactcacagactctccctactttctg

SEQ ID NO: 5415 - DNA, 1174 bp, mus musculus
gtataaacatttttaagatgttttcatgtttttccaaactcccttctgggaatgctgttatcaggggacgcctcctccaggagggtaggagagctgagccttacactctaggagaatctctgacccagtgaagtttgtccatctcagaggaagcaggacaatgtggtgagtggaaatagtttcatcaggggaggttgaagggactggagatatttagcctgcagaagatagggacaagggccacacgcatggctgtaatcaaatgtgtaatgggctgtcaagtgaaagagagaggtttgtcctgaggctctcgagcagaagtggaccaggggaccaaagttgcggagagccattgttctgtgcgggagccattgtcctgtgtggggccagcacacagccctggatggaacagggtgggtattacataaaggttacatgaccagctgccacctctggcttgggttcatggaggacgtgtgcatgggggagggccaggaccacccccgccacactgtgctcccctacaaaacatgacgtctctgaatcttaacaggggggtctgctccccaccccacccccgccttggggagcctggcccggcctggtacgtctctctgtctatcccctcaggagcacagcctggcttgtgtcatgggccacacaactcttccattatgcatgagggagacccagcggtgagcgagtgagcaagccggccgagggaggggtgagtggttattaataaacaagtgtattgtgtggcgttccattcacggcactctcagaggacgtggtgggcttgagataataaagccctgtttatgccacggagggctggggaggtggccgatgggggtgacaaggagcagggaagccaggaattattttgattccacccagggcagggctgctgtgttttctctgaggccaactttcagggaaaagaaggatcttgctgggattttgctcaggcctaagtctgccagctgggatggcctggggcctaagaaatgcctagcttccctccccacctgtccccatggagggagactgagaagacgctggatgaaccagaccatggctccttcaggagagaggtaggatggtcaactctgccctccctcttggcctctcatcctcaccccattcctcctgctttggccttcaaagactc

SEQ ID NO: 5416 - DNA, 1174 bp, mus musculus; identical to SEQ ID NO: 5415

SEQ ID NO: 5417 - DNA, 478 bp, mus musculus
caggctgccttgtcccatgactttccctgctttgctgtgggactgacagggttgaaggagatgccctgtggcttctttgagggccttacctctgacctgtagtgggagcctgcccccctgcccactcaggaactgtaagcagcttcctctttagggctgcagcttcatacaacccaacttgctggtcctctgattgatggtctattcttgatcagctccccctgccgcatctcttccccagatttgaagcatcagtcaacagctgggattcactttggacctgctggtgtgtgaatagtggcaatagactgtgacaggaagctgatagaccagcgttggaacctttaaggtttttcctctcctattttgtttttccatatctcagctttaaacacagtcgctgaaattaggaagctgtttgtttttgcagagctaggcttggatcagcagcaagatgacccatgagctggttaggaac

SEQ ID NO: 5418 - DNA, 2484 bp, mus musculus
ctttatactttttaaattattgaaaatatataagaaatgtttatatttaccatactagaaattaaaacagttggccaggtgccgtgcatcatgtctgtaaatcccagcactttggaaggctgatgcaggaagatcacctgaggtcaggaattagagaccagcccggccaacatggcaaaaccctgtctctactaaaaatacaaaaattagccaggcgtggtggtgcacacctgtaatctcagctactccggaggctgggccacgagaatcgcttgagcccaggaagtggaggttgcagtgagcgatgatagtgccactacactccagcctagatgacagagcaggactctgagagacaggagagagagagagagagagagagagagagagagagggagagagagagagaggaaggaaggaaggaaggaaggaaggaaggaaggaaggaaggaaggaaggaaggaaggaagaaattaagatagaaattgagaaagaattattaattttaaaataatgagagtaaaatttttcatgctaacctgaattacatgttttaagaaaaacagtctgggtgcggtggttcacacctgtaatcccagactttgggaggccaaggcaggtggatcacttgagctcaggagttcaagaccagcctgggcaacatggcaaaacctcgtctctactaaaaatacaaaaaattagccaggtacattggcatgcacctgtagtcttaggaactcaggaggctaaggcaggagaatctcttacgtcccaggggtggaggttgcagtgagccaagactgcaccactgcattccagcctgggcgatgggagtgaaactctgtctcaaaaaagaaaaagaaaaagaaccatattttcaaaaacaaaattagtgacaggagtatcattgctttacacttttgcaaatatttttaatgtctggctgaaaaaaaagacagctagcttctcaatttgcttctgtattcaatctattggtttaaacataaagaaaaattcagtttcacacaaatatgtcattagaaaaagtaagactttgctgatcccttaaaagggtcttggggattcccaagtttcctcagaatccccatgttgaaacctgtaaattagtatgtactataaattcatgtattaatatgagctacaagcagcttgacaccaccaaagcataccgcaccgggtggaaagagatggagcacacaacctcaccggcctgtgtgacatctcaccctaccttgaagatggcttgagcagagaaagaaagatgatgggagagtatggaacaaaactgagaagttgcagtgatgtaaaaaagatttcctaagctcagccctgctcctcacgtcagacattgtacctggatttctcaatctgtggtcagagctcctgattgttaggtcattttcattgacagagcaggaacttggggcagacagctgtgcacgtgaggtggtttctggtcctgaactaaattgagatcatctcactcatttgtttgacagtcatttgataagttccaactctgtgctgggccttgtgctacaggggcaaagagcattacagtcctaactcttgaggagctcacagtccagccatgaagacagagacatgtaataaataacaccaaaacagtataataaggctatagcagcagtgcataaagcatgatgcaggaaaaagagaaagaaggcagcaattattccacctgaggtggaacagggaaggctttaaaggaaggaaacctggccaggcacggcagctcatgcctataatcccagcactttgggaggccaaggcaggtggaccacttgaggccaggagttcaagaccagcctggccaacatggcgaaaacccgtctctactaaagatacaaaaattagctgagcgtaatcgtgcatgcctgaagtccgagctactcaggaggctgagacacaagaattgcttgaacccaggaggtggaggttgcagtgagctgagattgtgccactgcactccagcctgggtgacggagcaagattctgtctcaaaaaataaaaataaaggaaagaaaccattttagctgaatcttgaaggatgagtaggagctaaccagtagagaagcaagagtgatgatgagggaaaaaagcagaaagtagaagagtgtttaaggtaaaggaattggaatgattacaggcctatgtatggcaaagaattgggtatagcagagtatggctgaaatgaaggtatgccagagtagtaccaaagaaaggatctcagacaggtctttagaattatgggtcttaaactttttctgttgaacaaggtatctcaaacttgaataatgcatggacccatttttaaaggaaacccatatatgtatatatataaaatcagagatcctttagaatgcatgctacccagcttgagaaacactgctataggtaataagctgagtaagaatggaactatgctttattgaggtataa

SEQ ID NO: 5419 - DNA, 959 bp, mus musculus
gacaactcatggcggcggtggcggcagctgcttgggcgcggtgcggtggtgactgagctacaagcctggcggcgggtgtgcgccgagccccggcccagcgcggcccccgcgtgcctcccaggctccgcacccccgatgctgcgcgggtgctgagcccgctccggccgggacgatggtgaagtatttcctgggccagagcgtgcaacggagctcctgggaccaagtgttcgccgccttctggcagcggtacccgaatccctatagcaaacatgtcttgacggaagacgtagtacaccgggaggtaacccctgaccagaaactgctgtccgggcgactcctgaccaagaccaacaggacgccctgctgggccgagcgactgtttcctgccaatgttgatcactcggtgtacatcctggaggactctattgtggacccacagaatcagaccatgaccaccttcacctggaacatcaaccatgcccggctgatggtggtggaggaacgatgtgtttactgtgtgaactctgacaacagtggccggaccgaaatccgccgggaagcctgggtctcctctagcttatttggtgtctccagagctgtccaggaatttggtcttgcctggttcaaaagcaatgtgaccaagactatgaagggttttgaatatatcttggcaaagctgcaaggcgaggccccttccaaaacacttgttgagacagccaaggaagccaaggagaaggcaaaggagacagcactggcagctacagagaaggccaaggacctcgccagcaaggcagccaccaagaagcagcagcagcagcaacagtttgtgtagccagcccaccaccaccacagcaccccagacagctaggcttagcccctctgccctccctccattgtacttgatcattaaaaatcaacttccagccctatctactgtctgggtggtgggttatggggat

SEQ ID NO: 5420 - DNA, 811 bp, mus musculus
tccccttctttgtggtctggaaagtgcctccaggcagaaagccaggaatattgtagggatcttttcatttctttctcttttctcagggatcacaattcctcactgtgtattgtccaatgaaaacaactgtttcatacattatggccaattttctagttgttaccggtgagagggcaagtcaaattccagttaattttcatgtctggaagttgaagtttcttcatagcaatcagtttttgcactgctggaattgttcttgataagtcaatacaggtattttccagagaagtccaagtgtcttctctttctttcttccctgctgctactgacagattacttcctagtctatgctttttcccctcaagcatctaaggaattacatttcccttgttttgttacagcaacccatctgttcctctagctttcctctgctggtgctacttcagtgtcacttttcctgtgatgggtaatctctgggggtagtgcttgaggctctccattattcagctccttttggggattcctactttggtgcatgaggctttgcagtcatctgctggctggatcaagtgcatgctgaaaaagacttgctccatattcaatttccccttttgtaagtgcccaaatatcagctcaagctcatcatttctaaaatatatagaccctactttcctcattccaaaattaaaaaaatatatattatacatacacatcatttcctacatacaaactgtagagaataatataataaacatatatcaatccaacatctagctgaaaaaaaaaaagcattcagatatagccgaaaccc

SEQ ID NO: 5421 - DNA, 729 bp, mus musculus
agtcttttttaggattgggtgcgggccttgggagcgcccccacgtgcaagctcctggttactctgcatgtaaacccacgcttacgtctcttccttccttcccactacagagttttatggacgaggagccccctacaatgccttgacggggaaggactccactagaggggtagccaagatgtccttggatcctgcagacctcacccatgacactgtgagccagattataagcctttgtaaaatcctctacctccttgtccatgcctttttctctttttctttttcttttcgtgtgtgtgtgtgtgtgtgtgtgtgtgtgtgtgtgtgtgtgtgtgtgtgtatctgggcaagagcaagccttcctaattagcttatttacccttcggtccacttggtatggtggccaggcattttcttgaaatagattatcctaccatgtcatctcgactcagaaaccttccatggctgtctgttgcctagagtcaagtccaaactcttatgaacttgtgatccaactcagtgatcatcacaatttggccccaacctgctttggcaacctaatgctccttatggtctgtacctgccaccccatcccctcagccccttacagccttgctattagtctctgagacccattccccaggccatgcttggtagctttgtggatgaactgggttgggaagaaaggtctccctctatgcttatatttctgtgaaggagaagatagcat

SEQ ID NO: 5422 - DNA, 752 bp, mus musculus
caaacagagaagacaccaatgccaagggccccaagggaggagcgttgcctagtgaatttgaggccactgtggctggagcagagtgagcagggagacagtgctagatgctgaaagcgagagggaacatgggctgttgtgatgacattggctcttactccaaatggaaggggacaccattggagggctttgagctaaggagggacctctgctgacttttgccttcccagggtggtctggctgctgagttagttcacagccgactgcagaagcacaaatgtggaggccgagagacctgtaaggagagtattgcagactaggcaggggtggtgggggagatggggagaagtggtcagaatctgtatgcagcctgaaggttttgctgatagattgggtgtggggatgagagtaacagaggccaggtgtcactctaaggcttttggcctgagcaatgatggaaatgccatgaattcaagtagagaagattgtgggaggaggaaagaccaggaactctgttttggacctgtgaggtgggagatacctcttagacctccccgtggaggccatgagtgggcagttggatgaatgagtctggagttctggagagggtctgtgctggacatacacatttgaaagtcatctgcatgtacctatacatgttacataaagccacagtcctgggtgagatcgctgagatgggccgtgtgggtgtgtccaagcactaactctggggcacatccacattcagagaggag

SEQ ID NO: 5423 - DNA, 664 bp, mus musculus
ttcttcacccccgacaactccttacttgcatatatatgcataaaggatgagtctgcctaaacaccttagaaaaatgcctacccttgagcgtccaagcctcagctgtgtaaatcgtcatgcaaatgaggcagcagctgtgggcctggttgccagagccatttgtgtcctctcacacctaaagaaaacacaaatactggtaggaaaagcccgctcctccagcctcatccctgccctgatgactcagggagaaaccacacagtaatttacctagcaggctccagaagcagcctcttcacttccctgccaaccctcctcacccacccgcacccccgcacaggcagggggaggtgataataagcaggctcttaccagctgtctttgcaggggcagcgaaaatgattgctcagccttgttcaggagaacatactcccccagccctggctaattcttgggcatgtggggcatgggaaggaaactggtgccaggctggctcaggtcttagaaaagtgtcattcatctggacagtgcacggactttgtaacaacttagtgatggaaccaaagcttacttttgtgccatttatgagggaactaatttataagcaaaggaactcaactatttgctcatttattcaatgtatacatgacaacacaataaaggagag

SEQ ID NO: 5424 - DNA, 1318 bp, mus musculus
aatggaaacttgaaccttactgaggcccctccccaaccctcttgtcatcctcctccctgtttcccacaaaggagatgaaacatgtgcctggggaacccagcaggaagctgggaatgggggtcggggcagcagatggctcagggccccaactctttagtggcaggagtcagccacagctgttcagcgaagcctcctgcaagtttaatgggggcagatgattggctggggatttgctggtggaagagatcaacgaaggggaacacaagcccaggcccttcatggggtagacaagctaacttcagactctttgttgaggggtgtctgagtgcctctggatttaggtcattgaaatgaccacctcccttacacaatagtctcatccctgcacaattttatacatttgcgcatcatgccactggaatcacccacgaccttttggaattgtggggatagacccaggaacagcctttgagcctgtccaaatcagagacagtgtgctcgtggttttcctttgttcttatccttctgacatttcagaaaagtgcaggaaggtggagagcttcagttcacgctgctgaactcagggaaatttgactcttgcacacagacaggaaacacagatccgaattcttcttcttttttttttttttttgagacggagtcttggtctgtcgcccaagctggagtgcagtggcgagatctcagctcactgcaagctctgcctcccgggttcacgccattctcctgcctcagcctccccagcagctgggacaacaacaggcgcacgccgccatgcccggctaatttttttgtatttttagtagagacagggtttcactgtgttagccaggatggtctcaatctgctgacctcgtgatccgcccacctcggcctcccaaagtgctgggattataggcgtgaaccactgcacctggcccgaattctttttttgagacggagtctcggtctgtgatccaggctggagtgcagtggcgcgatctcggctaagtttttgtatttttagtagagatgaggtttcaccatgttgaccaggctgatcttgaactcctgacctcaggtgatctgcccgcctcagcctcccaaacagacctggattctaaaagttacagcatctctgtcttttctctttgctttggtcagcatccctgggtcctgctttccactcggggatagtgaaggatatgaatgggttcatccgtctgtgtctcccacaggcccttctgcaggtcctggctcaacaactttgaaactggttggcttggctgcttggacgcctgtgtccattggcctgtccttc

SEQ ID NO: 5425 - DNA, 1111 bp, mus musculus
tcctagtaaaattgacagtgatttttaaatataatgcatcttcctttgtctgcttagtaaaaaatttcatttcataattttggcaagctctgtagtggatccaaagtatctttgagttcttgcaaactacaagttgtttcctttccagaaggcttgatttcattaggagacccctctattgagttctaaatagtttatcttagaaagccttgggtcattcacaggtatccaaccagccattgtttagtttgtttttgaaggggtttgataatgctttttaagttgtacagaatgcttaatccatcttattactgtcctgagccatgtaatatgcctgcatcgtgttggggaaatgtttgggaaatataagccagcataacgtgtaaagctcactctttcaccctggaacagacaagaggtgggcttaatagaggcagagactggggatatacctttgtttccctagcatttttatttatttatttttattttattttattttttgagatggagtttcactcttgttgcccaggctgggggtgcaatggcgcaatctttgctcactgcaacccctgcctcccgggctcaagcgattctcctgcctcagcctctcgagtagctgggattacaggcatgcgtcaccactcccagctaattttgtattttcagtagagacagggtttccccatgttggttaggctggtctcgaactcccaacctcaggtgatccgcccacctcagctctcaaagtgctgggattacaggcgggagccactgcacatggcagcattttttaaaaattcagttttaagatctctggtttaggggagagattttattttactgaaccagttctatagaaatttattttattaggaaatttgtctttggaacaaagtggcagctataaaattatttttgttaagcctcagaaatatgaggaagcctgtaaaactctagtggggagatattaacttggagacctaatgctctgtaaatagtcatttaaactgttggttttagtggttttgtttctaaaatgttttcttttaccgtgatgcaccagtatgagatggtgctgacactttctatgaagtggttatgagcaggt

SEQ ID NO: 5426 - DNA, 1654 bp, mus musculus
gcacatttattatgactatcaaataaggtagcatatatgaaagtccttttcaaactgttaaaatgctagttattccaatgtaagggattacttaaaacagtgtctggcataaaataagcaccctaaaagtgtctgttaaattgaaaaataaataaaaataatttttaaattcagcttttgtttgttgccatacattgcttaaatcttgtgctttaagagcaggttgatggtaaattgggaacaagcatttagatgcctcagtgatttttttttgtgtgtgtgcaaatttgtgcctagagttcctcattagctcttccattttcaatgagaccacacagaatggtggcttgagcaccatcttataggagctggttttggagaggagttagactagggagtgtctaccatcttaggccataattgctcactccagcctcctagtttcaaccatttaccagccctccccaacaataaaaaagtacaaacagagaaataagatcagcttgggacattgccctctggaagacatccatgcatttctatagcctttttgtaggccttctttggcagtcacaaaagcttttacttgcacatttggagaatgcgtggtggccttagctccttgttggttccagctgagaaagaactcctgagttggaaactgaggtcagtgtagttcaaaggcaagctcctggtagccttgccctctttagattcctggccactcacccatcgacccaggtgaacttcactcagagaatttgaaaatgccctaaggaaatagttgttgctaaatcattctgtgtagagaatcaggagaagtgaatgtctaaacttgccatcatggttcatgaacttccttattttttaaaaatgctactaatttttgagcacttatctgtgctagaccccataaatgagcatataacatgtttttatctgtttaattctcaacttatctccctaagggaggttccatctttttgttacctgaaaggggtcctgatccagaccctgagagagggttcttggattgcatgcaagaaagaattcggggcaagttcataaagtgaaagcaggtttattaaggaagtaaaggaatacaagaatgcctactccatagctcccttggggcagctggttggctatttttatggttatttcttgattatatgctaaacaaaaggcagattcttcatgagttttctgggaaaggggcaaggattttctggaaccgagagttcctcttccttttagaccatatggggtaacttccagatgttgccatggcatttgtaaatggtcatggtgctggtgggggtgtcttttagcatgctaatgtattatcattagtatataatgagcagtgaggataacagaggttactttcatcaccatcttggttttggcaggtttgggcctgcttctttaccgcatcctgttttatcaacgaagcctttgtgacctgtatcttgtgccaacctcctattttatcctgtgactaagaatgtctaatctcatgggaatacatcccagcaggtctcagcctcatttcacccagaccctattcaagatggagtcgctctggtttgaatgcctctgacaatttccctgttatagagaggcttaaataacacagaaggtctcattgcta

SEQ ID NO: 5427 - DNA, 1114 bp, mus musculus
ttagtaaggagcacttaagcatcttagaactgattagaccatgtgggacaagaacaagtcagagacgctatgggggaatccagtgagacccattctactccccttaaccacataggcaagaagatgtggggaattgttatcagaatccactgcctaaaaatggtatatatattcttcattttagctgctgacaatacagttttgggagtgatactaatcgtctctaagccttgatttcttcagctataaaatgtaggtcataataaggcacacctcatgagtacactgggcatgcaaagctcttagaagagtgtcaacatagaggaaatattacctgttgttattatgataacttagtcattctcaattcatttctcatctttacagaatcctaagtaactcctctaattattgctttatgtacttaggcctgatattcaaaatatctaacacctgatttattacctgcagtgataaacaaacagagtgccactagctatggttttgaggtccctgtggattctacatgaatttagaacaaaaattctgactttcagagttggcaaatcaggtaaatagcagccctatagaaataggtagtaagggtacttctttttgcctagttaacctagttcttcgaaagcagggaaatttagcagaagtggacatttaaggacaataacaaatttcctgtacatcagcgtgtgtgtgtgtgtgtgtgggcgcgcgtgagtgcatatgtgtgtgtgggggggcgcgcgcgcgtgcatgtgtgggcgcacgcgcgtgcgtgtgtgtgtctgcgcgcgtgcgtgcgtgtgtgtgtgcgcgcgtgagtgtgtctgggcatgcgtgtgtgtgcgcgcgcgtgcgtgcatgtgtgtgtgttggggtatgggtgctgcttttctctacctgcctcttccgcctaccttctttcttactcctccacaggggaccttctggaattcttatgatgtggggaatgcagaaatcaccgtgtgaaaaggtagtgcatctacttgccagttggtcctgttccagcctccatcaggaaggcagatacaggacagaagctctttctccttttctcttgggcctaagtacactagct

SEQ ID NO: 5428 - DNA, 1018 bp, mus musculus
cagccccttccataaaccctcacatgcccctgagcaataaaacacatttgatgtgatgctttccatttgtctctagtgtttattttttgaaggatttttaaaacatatatcacaaatttcagacagataaatctgaaccagagaatgaactaaggacaactgatgaaaatagaggattaaagaatttgacacacagaagagaaaatgactgtaacatttaaggaggagtatttttatggaaacatattagctgtatttggaagactggctgggtgtgtggggagggggagaaaaaaataaattcctatttaatgcatcccacggagatagagttatatagtcagtaattcaccaaggcagaagggctctgacctttgctcttctttaaaggaattaagacaattaatgactttcatgcccattatgactataggcattagtagttctttgcctcctgtgttatgatctatatttcaatagtttactgggggttttattttaagctattttataccatttaatctacttcaccaaatcccacttaagaatcaaagcacaaacccagaaagcatctaacttctcttatctgtttgctataaaaattttcactacaggacagacgcttcattccagcaaaagcaggtagagcaaagaagaaaaaaaaagactacattctatcacgactgcagtggcatatgtcttgctatgagttttcctgcacaccgtttaatatatacctattgagccataattggaatatttagcgtttattgtaggatatttggattgtttttcaaaacacaaaatgctctagggtttataaaagagggatgatactactagtgatcttgtagtgctctggtctgatcctgcagataacaagattgtctcacatttgttggtggctgaaccggagaagatctatgccatgcctgaccctactgtccccgacagtgacatcaaagccctcactacactgtgtgacttggccgaccgagagttggtggttatcattgga

SEQ ID NO: 5429 - DNA, 1018 bp, mus musculus; identical to SEQ ID NO: 5428

SEQ ID NO: 5430 - DNA, 1018 bp, mus musculus; identical to SEQ ID NO: 5428

SEQ ID NO: 5431 - DNA, 1018 bp, mus musculus; identical to SEQ ID NO: 5428

SEQ ID NO: 5432 - DNA, 1018 bp, mus musculus; identical to SEQ ID NO: 5428

SEQ ID NO: 5433 - DNA, 1018 bp, mus musculus; identical to SEQ ID NO: 5428

SEQ ID NO: 5434 - DNA, 1018 bp, mus musculus; identical to SEQ ID NO: 5428

SEQ ID NO: 5435 - DNA, 1018 bp, mus musculus; identical to SEQ ID NO: 5428

SEQ ID NO: 5436 - DNA, 1756 bp, mus musculus
ctctgatgcgctccctccagctttcttttctaggatgcttggagcccccctccttcgcggcgttggagcgggctttggtttctgtttgaagcccggcgtcggctccggacgcgcgcagcgccctccgcggtggctcccaggaagtccctgggagtctgcggagggagcccctgggaggcccaggggtgggcgcggtccgacggccgggtgtccttcacggggcgtcctttccacccagctgtccatggagcgagcagagcccctggccgagcgcccgcccgggagcccggggcagcctgcgggtggcagtgggcaggagcccgcgttccaagccggccttgctccccaacccgctgctgccgcccgcgctgccgggcttcctaggcctccgcgagggcctcagcaacccacgggagcccaatccaggcagagaaccggggaggaacgccgaagcagctctttctccctcataatttgagatgctattttatcatcaacagtctgtgttcagacaggaaagattgggctgaataaatgtgtccgggaaacaggatgcagcctgcgtccaaccagagcgcggcggttgtgtcctgtgacccgctgtgaggctgatcattctgcattgtttactcttgtgcgtacatttcaaaacacggaattacatccggaaatctgggtgaaaacgacatggtccctaattgtaaagttttttcacaggacttcagataaatgcagtcatctgtatacctcaagagtggatttatttatttgggatttttttttaagactttatttttaaaataactaatgggtactaggcttaatacctgggtgatgaaataacctgcacagcaaacccacatgacacaattttacccatggaacaagctgcacatgtacccctgaacttaaaagttaaaaaacaaaacaaaacaaaaacccagcacttttaggctgacagcaaaattgagcaaaaagtacagagttaatatcccctgacccgccccccttcatccataccctccctcattatcaacatttcccagtagactggtacatttgttaacaatcgatgaatccgcatggatacgtcattattacccaaagaagtccatagtttatgtgggggttcactcttggtgttatacattctgtgggttttgacaaatgtataatgacacgtatctaccattatagtattacatagaatggtttcagtgtcctaaaaatcctctctgctctgcctagtcacccttcccttccccaacccccggccaaaatggatttaaaagaaaaataacgtatcagaccagaagtttctccctaattagttgcttgttttcctcatggactgcttccggctcctagagaagacatcatagcatgaagcattcttgcacggtttaggttttgttaacaggggctattagtgtgtgtgacttcttaatcccccttctgctgaggggcatctccagcccagttttaattaacagggaaatgctcatattattttggtacactgattataggcgaagcctaagtggaagtcactttggtgtcccaagggatttccgtgttaaaaatgcatagggtacctttttcttctctttctttttttttttttcctgttaattctcctcctccatgaactccagataagcagcaggcccgagccagatttcattactatcacgcactcttcatggtcatcttttaatatttgaaaggatcatttgttaactggaaatggtcaatt

SEQ ID NO: 5437 - DNA, 1756 bp, mus musculus; identical to SEQ ID NO: 5436

SEQ ID NO: 5438 - DNA, 1756 bp, mus musculus; identical to SEQ ID NO: 5436

SEQ ID NO: 5439 - DNA, 1756 bp, mus musculus; identical to SEQ ID NO: 5436

SEQ ID NO: 5440 - DNA, 1756 bp, mus musculus; identical to SEQ ID NO: 5436

SEQ ID NO: 5441 - DNA, 1756 bp, mus musculus; identical to SEQ ID NO: 5436

SEQ ID NO: 5442 - DNA, 1756 bp, mus musculus; identical to SEQ ID NO: 5436

SEQ ID NO: 5443 - DNA, 1756 bp, mus musculus; identical to SEQ ID NO: 5436

SEQ ID NO: 5444 - DNA, 505 bp, mus musculus
gtcatcaacaagccacggttttagctattcaggaatctttactttaacttcaactctgttcatgaatgtttcctcattttcaacagtaggatctacccgggcccttttcttccaaggaggctgaggggtctcactggtactgccaccatctccatttccaggtgttttctgtttgttctttttcgttttcacttcaacatttttctgttgcagaccagatgtcttctttcctggggcagcccctctcatcttcccctctgcatactgctcctgattggctttttgaagttctcgctgtttctgcaaattggtgtccacgtatttgagtactctgctctccggaacccactcatcccaatttttattccaaccactgtaatgtatgaagtatttcacttgtttgtcctttatggcaacctttacacactttgcttcataaagaagaggcccatgaaagcacagcactcgctcaccctcctggaatttaggcttcgggtcctgcttc

SEQ ID NO: 5445 - DNA, 147 bp, mus musculus
catacaggacacattttcaaatatacggtgaagaaggatgggccattacacatgtgcatagttttcacttctcttatcaggtgaaacattcccaactgtttatttttccttacttaaatgaaaaggaatctaggtcttccaccttct

SEQ ID NO: 5446 - DNA, 715 bp, mus musculus
catctttaaaacatgactattttgacattcactcattttaataagattttggaactctctgaaaacctctagcagctcttctctggggacagaacctccttaaggtatcaaattgtcagaagtctgtatgcttcatctgcgttcattcccagtggttcttgacttgagtgagtttccatgtcaaccttcctaggccttcggatgccatgaggtgtggggtatcattggaagatgagactgagaaaaactgattacgggttatggaaagcaaggactcccatataaacttctccaaaggattgggcaatatagagatgtctttaactggcactcatgtccatgcaaagtctatgcaaaggtcagaagttccagaggtggccagtatgccagctgctaggaagaaaatgagaaaggggtttgtttttcaggtgggaaaaaaagaatcctggcaagggttaggtaagatggtaagatcctagtcagaagggctgaggtccggagcagagcatcgtcctaatatgaaacttgaggctgcataaaaagcaagtacagcccagtcctgcagaatagggatccacgttccagcttaggtgagggctgcagcatcatgaactgcaacacctggagttcaccctaggccactagaaacctagagcagcaaaataatttccatgccatatgactggtgggttagagctgcgtgatactcagcctc

SEQ ID NO: 5447 - DNA, 462 bp, mus musculus
gtatgtgtggtgtgtgtatactgtggtttctcccctgaggccggcgcctccgggtgtggtgttggcgctgtgtctagggtttctagaaggggaggaatgagggaaagaggcccctccgggcactgggacaggctcaaggggaacagccccgagctgggtgttggctgagtgtgaattccagcagccaggctcacagacccgtgtcacctctgacgtcaagtggcagggacacgctaaaagcctttgagtctattgattgagaaggctccagaaggttttggagcgctggaagaaggccaggcctggaatttacgcgtcggcctcttggtgtctcctcccgctgaagggagtaaatccaggcaggtctggggctgccgggcgggcacctggggcggaggagcctcgaggctgtggtcctgcagcaccacctgggggcggcgagaagagtagccgcagaggctc

SEQ ID NO: 5448 - DNA, 1257 bp, mus musculus
ttttcttttagcttccaaattcccagccttgaacataacaaggagtgctaaatgttctgaactcaggaaaactgtccagatgggcccaaggaagcaatctgcctaccctccacgtgtacatatcatgttagggcggcctgcttggatttaggaagagcacactcagtccccagtgggaaatgtccatcccgattaaatgagggctgcggagtgtggaaaacatgagaagtggtggagagtttttctggagttgaagtttgagtctcactgtgaccagactgaacctactgaacccacactgataaggaaagcgaacattgtccttggcagcccttcaaggctaagcttttctcgggggtgagcagtccttgagcaattccttcagtgcattaagtgcaaagtggctcttcccttagctacaaataagcagaccactgttattctcaagaaaggagaccccaggagagtgcaacatcagcacagccttaccatgttcactgcgccaggcaggtggaggtaattgaacactcacaaaatttatttttgtgtgagacactcatctgagaggctgggtgccatttccactctatccctagcacccgacaatgttgcctccctagatcttgcttatcttgtacaccatgtatgccaaacacatcacccatctctttgaaatattgtcagaatgatctttgctgtgcagtattaaaacctgcaaatgcccttgctccgttttcttaggtggtcaggctgtctgtatatatttattgagaagacagttctgaaggctaagcatagacaggtttctgaaaaattatgactcacattccattttaactgtttttgggaatctagctatttagtggaagtctcaggttttcctaaagtgctgtgtgctcatacatttagtttttatttcctgaaaatggctaacttgggacttggaggtggctcaacagaggttgacacgttggtttggatctgggccatgttctcgtactctgttggtggtggaaataaagctggaagggtggagaagggtcagggagaagataaggaaagggaacacactgtggttcctacagcagttgcacagggacttcacgggtttacagagggaaaccatagctaggtttaagctttttcccttattaaaagcagctatatatatgcagatgtatgcatattcattgttgaattttttagaaaatatggatgagcaacgttaacaaaataaatgtcacactaaccctctgt

SEQ ID NO: 5449 - DNA, 1257 bp, mus musculus; identical to SEQ ID NO: 5448

SEQ ID NO: 5450 - DNA, 641 bp, mus musculus
tgtatccttttcctgtaataaatcataactgggtgtctaacagctttccatgagttctgtggggacttctagaaaataatttcaggagtttttggaacctcctgaatttgcgattggtgtcagagtgagggcagtcaggcaggctgtcccctctaactttgcaattgggagtcaaaaaacttcagaaactgctgctgatgtttacagctgctcagcagccctgaggcaaaagagtggctgggaaaaaaatacactggaagaactcatgctggccagagttaatacacctgccactatgctggaagaggaagaatggctcagcctccactccggcttcctaatctagcttcaaggcacttgttggcagaattaaaccatactcaacactctgcaaacaagggaatccgggaacaggcttctgaacaggagagaggcggaggaggtgaaccaatcccccacggggctcaccaggactctctctgaaaatccacttcctaattttcaactccaaagcctttgaggtcctcactaaggatgaggggtttgagatgtatgtgatgggattgtggagagctccatggtaaattctgcaaaaaatctccctcttcctttgaatgatgtattatccaggagtttcagcc

SEQ ID NO: 5451 - DNA, 1202 bp, mus musculus
cctttccatgtctggctcctggacattcagtcctctcagcttgaaagatacctcgtcagagaggcttccctgatcacttccctctctactcccgattctgtttcttcctatcagctgttttattttcttcacacagtctgccattttctgatgcttttcttatctatttgtgaattatctcttctgcccttacccttgattataacttctgtgatgacagggaccttctgttctttctcactcctgtcctagagaaccaaaaatggtgccaggtacatcgtgggtatctagtcagtatttttttttttggcctcttcagtaacccaacattttctttttacccgttcaagtcacagaggggcagcacagcgtgctggatggagcactaaccagtcaaagactcagagacctgggtccagtgtgggttgtccctcattcatcatgcaaggtaaagtacatcattcaaacactgtgactgggtcttggtctcctgaactgtatgctagggggagattccgatccagttcacaagagttcttatgcagatcaagttatgtcaataagatagtgcagtacacatgcaaggtagtgaggtctcaaccatttaagagccttcagaaataagaggagcaaatgcagggaagagaaagtcccagagaaaaccagcctttcctaatgctaagctctctgatggggcagccctggggactcattagctaatgcacattgacatttcaatcgtttcttcatcttccaggaaggtttttttttttttttttttttttttttttttttttgccatagtacagcatggttatttttagcaaaataatgatttcagacaagtgagataacttttaatctcctaactataaattctgtggacccaaagacagaagcatgagatgctttatagagtgtttctatagtttcccacctcttgaggtgggtccaccctgcttccctgctggtgttgaggctggatggaatccaggcagtctagacttagggcaggccccagcaggactgaccttgctgtagtccttggtgaggctccgcgcagtgagcttccatggatagttgcttcatggtcctgtggttgggggaacagggaggggcaataggctagagggttggggcagcaccttttgggctgaacttgcctaagcctagtggtgggtagggatagggttcagtgttca

SEQ ID NO: 5452 - DNA, 1148 bp, mus musculus
tggagtaggatttggacagtggagatgggacggggaccccaagagagatggcagagtccttgcagaaggggcgagctgggctggggctctggctcctgagccagggccagagggcatggggtagggggactttggagggtgtgtgtccctgttggggccatgtgcccagggctagagggaggtaggggcaaaggggaccaggaggggcccccctgaaaagagaccaagcctgacagtgctatctcccatgggtgggggtgaggtgtgtctgcagtggatagccctgggctgtcgtggtgggcccccttccctgggccatgtgccagatggtcactgctctgccattgcctgccacagctctgcgcttactgccgctgaagcctctaacactgacagcagagggtgggatggctgcggtggctcagctccgggggctgacatgtgtccggcatgttggccgacagatcccgtggtggaggtggtcagtgccatgcaggacttggccgtggaggagggtggctcggctgagctcctctgccagtattcacggcccgtgcaggccacgtggaagatggacgagcgggaggtgcacacggatgggcaccgtgtcatcatagagcaggactggaacgtggccaggctgaccttcaggccggccttgccctgtgacagtggcatctattcttgtgaggctgcgggcacccgcgtagtggccctgctgcaagtgcaaggtgaggccgcctggtgagcagccctaggcccggggcagctttggcacagcttgggctgtgcagtgatagtggaatggcaggcagtgtccggtggcgctgggacacaggtggctcggacaggtgggaacaggccccgtaggtggcaagctcgctgcaccaggagctgagctgtgagtaggcacggcatgcacagctgctgaacttgtggcttccatgaagaatgtgtggccaaattcaagactcctacacgtgaacccacaagagaatgagaaagggaggggagagcggagggcagtggattagggaggaggtctctggttgttgtgagtctgagcatggcattccagggaccaggcagcaggtctggtagctctgttggggggtgcagagaaagggggatgttcccagaccgtgaag

SEQ ID NO: 5453 - DNA, 1148 bp, mus musculus; identical to SEQ ID NO: 5452

SEQ ID NO: 5454 - DNA, 343 bp, mus musculus
gggtagcgggccatagggaaatcacaagcattgccaggttccctgcagacctctgtggcttgggcatcatttgcagtgggactcagcattacacggtgcacatctcagcagcccgtgggaccgtggggctggacggccctcctcctcagcaccaccttcttgtcaaacacagctgtacttggggagggtgggcagagcacaaagccaaggggacattggagggcagtggacagccaggcttgccctcaagggagcccagggcaaggagtgcactgagggtgactcagggaactggctgggaggggctgggaggcagagagggtgataggctcaacctggagag

SEQ ID NO: 5455 - DNA, 343 bp, mus musculus; identical to SEQ ID NO: 5454

SEQ ID NO: 5456 - DNA, 794 bp, mus musculus
aaaataggcttattccatggaacaagaattaaaaatgaataagctatcaatatataatttaagtacaagtttaggctgggcgtggtggctcacgcctgtaatcccagcactttgggaggccgaggtaggcagatcacgaggtcaagagatcaagaccagcctgaccaacgtggcgaaacctcgtctctactagaaatacaaaaattagctggatatggtggtatgtgcctgtaatcccagctacttgggaggctgaggcaggagactcgcttgaacctgggaggcagaggttgcagtgagccgagattgcgccactgcactccagcctgggtaacagagcaagactccatctcaaaaaaagaaagaaagaaaaaagaaagtacaagtttataaagtattatagtgaaaaattcgcattctggctgattttaagccatttaaaatttatataaaacaaccttccataaaaatttgacaggtgcccagatgttgctttctccatttattttttgtttttttttaatcacagtaggtctgatagagaattggagctaaattataatatttttgttggtaaagttgagttatatacttgtacatacaatggaaatgcttttagtagtgattatttagcaatttttgtttttgttatattaggcatgtttggaggctttcctattctagcatttaaatttaaattttattaaaattaaataatttaaatctagcatttaaatttaaataatttaagtctagcatttacttttaaataattataatgaagttttgaaata

SEQ ID NO: 5457 - DNA, 794 bp, mus musculus; identical to SEQ ID NO: 5456

SEQ ID NO: 5458 - DNA, 794 bp, mus musculus; identical to SEQ ID NO: 5456

SEQ ID NO: 5459 - DNA, 794 bp, mus musculus; identical to SEQ ID NO: 5456

SEQ ID NO: 5460 - DNA, 794 bp, mus musculus; identical to SEQ ID NO: 5456

SEQ ID NO: 5461 - DNA, 2961 bp, mus musculus
aatgggaggtggtgactgcctatccctgagagtcacaaaatgggtagattaattgaagtaatgctagctgctgtaactattaggccccaaatttcagtggctgatgcaacagacgtctgttacacattcatgtagagtccagtcagtgagtggaggtagtggggaaggggatggtttcattctgcactaccaaggattcaggcaaatagaagctccacgtatttcctagcacattgctttcaagaccaccttggacttcaataccaagctggcagaaagtggaagattgcatggaagattgttatgagcttggcctaacaatcttcccaatgattgggatacatcatttccttgtacattctgctgtccacgattgacatgactacaaaagaggctaggaaatgctatctagctgagtacccaggagaaaaagtaaaaggctttggtgaacaaaaaataactggggtagttctggtgcagtacaaaattgcccaaacctagaatagggacgtagatcttggatagcccaaaagaatgatcaaggtccatggcacatcctatttctgttgtctggtaccataatgaatgattgatacaaattctatatcaagaatacaaataggacgggtgtggtggctcatgcctgtaatcctagcactttgggaggctgaggcgggtggatcacctgaggtcaggagtccaagaccagcctggccaacatggtgaaaccccatctctactaaaaatacaaaaagcagctgggcgtggtggcatgcacctgtaatcacagctactcgggaggttgaggcaggagaatcacttgaatctgagaagtggaggttgcagtgagccaagatcacgccattgcaccccagcctgggcgacaagagtgaaactccgtctcaaaaaaaaaaaagaaagaatacaaatgaggaagcaccatttttctattctattcttttggctcatatattccagaatagaaataaactattttcttgttaacgtaagaaaacaggattgtagtgcccccactgctcttgagttcatgagtattacttgcatctacctaaacggggagcctgtcaggaaaacattcaagagtggaaagattaatcattggctttaaatctaagccaaattacaacaaaagccaaaattgataaatgggatctaattaaactaaagagcttctgcacagcaaaagaaactaccatcagcgtgaacaggcaacctacaaaatgggagaaaatttttgcaacctactcatctgacaaagggctaatatccagaatctacaatgaactcaaacaaatttacaagaaaaaaacaaacaatcccatcaaaaagtgggcgaaggacatgaacagacgcttctcaaaagaagacatttatgcagccaaaaaacacatgaaaaaatgctcaccatcactggccatcagagaaatgcaaatcaaaaccacaatgagataccgtctcacaccagttagaatggcaatcattaaaaagtcaggaaacaacaggtgctggagaggatgtggagaaataggaacacttttacactgttggtgggactgtaaactagttcaacccttgtggaagtcagtgtggggattcctcagggatctagaactagaaataccatttgacccagccatcccattactgggtatatacccaaaggactataaatcatgctgctataaagacacatgcacacatatgtttgttgtggcactattcacaatagcaaagacttggaaccaacccaaatgtccaacaatgatagactggattaagaaaatgtgacacatatacaccatggaatactatgcagccataaaaaatgatgagttcgtgtcctttgtagggacatggatgaaattgggaaatcatcattctcagtaaactatcgcaagaacaaaaaaccaaacaccgcatattctcactcataggtgggaattgaacaatgagaacacatggacacaggaaggggaacatcacactctggggactgttgtggggtggggggagggaggagggatagctttaggagatatacctaatgctaaatgacgagttaatgggtgcagcacaccagcatggcacatgcataagtatgtaactaacctgcacattgtgcacatgtaccctacaacttaaagtataataataattttttaaaaatctaagccaaattaatagataatgcatgttagaaggccaatgggggccatcaagttcaagggttttcaaaagaaatggaatctattggatcgtaaatcccatttaaccatcatttgtgtaggtagatacagaaagatgggaaagtgagggttgattatccatttctgctcttctttagtcagtcaagtgacctaggctgatgggttagtttatttctatgagaagaggagaaaaatgaatgaggaatcaccatgctgccaacagcaggagccaggcaacttgaaaatactgtctgaagaggtgaaggaacaagaataggaacagaaagcagaaggcgttggagggagtttcttgtgagaaaagtaaacccagagaaatgaataggctttcctgaggcttacagcaagttagaggtagagctagtcaaacccgcatggctgtctcttaaccaggactgccccttccacctcacgatttcaccttcttctttcattcctcctttcaggtatttgtttggaatttgtatcatagtgtttatttagttcattaaacatgaaataactggggtataattcattttgtcacttgcatagccccttgaaaactccatatcttttttcacttaggaaaactcctcactttctatcagaatatacagagcatcactagggacttggcctgtcagaaccttgatttcttccttagagccttagtgtgattcctaagtttcttcccagctttgacagtccatcagttcatgggataaaaaagaat

SEQ ID NO: 5462 - DNA, 1548 bp, mus musculus
cagaatttatctcatttaatccttatgacattccttaaaataaataatattatctccattttatagatgaggaaaccgaagcttagagaggataaatgcttgcccaacaacacatagcaatcaagcaaaactcaaggggtctaacccagagtttttgctctgaaccatagttgcccagctcagccagtcattcagtatctctgcccacaggggacccatggagtttgggagaagagaaaagtgaggagaccatattcaggatgtgtaggctgtatgttagggtcaaaggctccttcccacctccttgcatgtgcctatactatttttccctcctggctcccacggaaaagagagtaactctagttaaatgctgtccccaggacagtccaggttctcttttggcctgccccttgctgcttctccattcctgccatgggatgcatgccaccttaggaacagcatgcctcagctaggtggagtctaagtggagtagagagaaaagagctctcttgtgggcactcagctagggggaaaaaattgagctgtgctcaggcgactcccctagaagtgcaccccatgattactgctcatccccatgctgcacacggcttgctggtcctagagctttttgctccactggacagggcaacggggcccacagtctgcccagccgtgccctgcccctggacactcatgggctgctgtactgaacagggcaaaggcaagtgcagggacatgggttctggccccaggtctgatgccaacttggccacacccgcaaagtcattggacttctctggacttcagatttttctttttctttttcttttctttttttctttttctttctttttttttttttttttttgaggcagagtctcactctgtcacctaggctggagtgcaatggcactgtgttggctcactgtaacctctgtctcctgggttcaagcagttctcctgcctcagcctcccgagtagctgggattacaggcatgtaccaccacgcctggctaatttttatatttttagtagagatggggtttcaccatgttggccaggctggtctcgaactcctgaccttaggtgatctgcccacctcggcctcccaaagtgctgggattacaggcgtttgccatcggcctggtccagatttttatttttcaaatgaaatgagaagcttgggtttcactctaaacgttcttttcaactctgaaacccagcaattctgaatctctctacttctgggcaactctgtttccattcttccggggttcatgggagagaaccttcttcagagaggctgatgcaagagctccaggggaggggcactgagggcacatgaattgtggaacagaaacagcgatggttacagcagctggcagagtgaggaagcagcggtctcgggagtcccagcccgaaggcagatttcctggccacaaaagcaccaacggacaagactccaccaacggtgccccttggatggtggagtccagctgccaagctcactcaggggacagtggctcttttctcagtcactcatcatgg

SEQ ID NO: 5463 - DNA, 1154 bp, mus musculus
ccacagcctgaagaatgtcatcaaggagaaatatgggaaagatgccaccggtgtgggggatggaggcgcgtttgctcccaacatcctggagaataaagaaggcctggagctgctgaagactgcgattgggaaagctggctacactgataaggtgatcgtcagcatggacgtagaggcctccgagttcttcaggtctggaaagtatgacctggaattcaagtttctcgacgaccccaccaggtacatctcacctgactgtctggctgacctgtacaagtccttcatcaaaaactacccagtggtgtctactgaagatccctttgaccaggatgactggggagcttggcagaagttcacggccagtgcaggaatccaggtagtggaggatgatctcagagtgaccaacccaaagaggacagcctcggccgtgaatgagaagaagtgcaactgcctcctgctcaaagtgaaccagattcgctctgtgactgagtcccttcaggcgtgcaagctggcccaggccaatggttggtgtgtcatggtgcctcatcattctggggagactgaaaataccttcatcactgacctggtggtggggctgtgacctgggcagctcaagactggtgccccttgctgatctgagcgcttggccaagtacaaccagctcctcagaattgaagaggagctgggcagcaaggctaagtttgccggcaggaacttcagaaaccccccagccaagtaagctgtgggcaggcaagcccttcagtcacctggtggctaattagacccctccccttgtgtcaactccggcagctcaagacccccgagcaacatttgtaggggccgctgctagttagctacccttgcccaccgccgtggagttcgcacctcttccttagaacttctacagaagcaggttgcagtgagccgagattgcgccactgcacaccagtctggagacagagtgagagtccgtcccagaaaaaaaaaaaaaaaaaaagaacttctacagaagccaagctccctggagccctgttggcagctctagccttgcagtcatgtaattggcccaaatcaccggagccacgtgaccctccagtgtcatctccggggtggccacaggcaagatccccagtgattttgtgctcaaaataaaa

SEQ ID NO: 5464 - DNA, 1154 bp, mus musculus; identical to SEQ ID NO: 5463

SEQ ID NO: 5465 - DNA, 931 bp, mus musculus
catggacgtagaggcctccgagttcttcaggtctggaaagtatgacctggaattcaagtttctcgacgaccccaccaggtacatctcacctgactgtctggctgacctgtacaagtccttcatcaaaaactacccagtggtgtctactgaagatccctttgaccaggatgactggggagcttggcagaagttcacggccagtgcaggaatccaggtagtggaggatgatctcagagtgaccaacccaaagaggacagcctcggccgtgaatgagaagaagtgcaactgcctcctgctcaaagtgaaccagattcgctctgtgactgagtcccttcaggcgtgcaagctggcccaggccaatggttggtgtgtcatggtgcctcatcattctggggagactgaaaataccttcatcactgacctggtggtggggctgtgacctgggcagctcaagactggtgccccttgctgatctgagcgcttggccaagtacaaccagctcctcagaattgaagaggagctgggcagcaaggctaagtttgccggcaggaacttcagaaaccccccagccaagtaagctgtgggcaggcaagcccttcagtcacctggtggctaattagacccctccccttgtgtcaactccggcagctcaagacccccgagcaacatttgtaggggccgctgctagttagctacccttgcccaccgccgtggagttcgcacctcttccttagaacttctacagaagcaggttgcagtgagccgagattgcgccactgcacaccagtctggagacagagtgagagtccgtcccagaaaaaaaaaaaaaaaaaaagaacttctacagaagccaagctccctggagccctgttggcagctctagccttgcagtcatgtaattggcccaaatcaccggagccacgtgaccctc

SEQ ID NO: 5466 - DNA, 931 bp, mus musculus; identical to SEQ ID NO: 5465

SEQ ID NO: 5467 - DNA, 3031 bp, mus musculus
caaataacattcttttggagagacacagtatatagtattatacatactggaagtccctatgaaaggagttttcttcccagatgcccccaaatgtgtttttaagatatcctcataaatgctcttctaataatatcattcaaaatgaaaagtctaatgaaatccccaaggcagctaaataagtttagggaacaatagaatacaaataaaatcaccagtatccatttaatgcctcattttgataaagagaaaacagactggattttcaacatcaaatctattaatcagttacacagttactcataactgtgaatgtgcaggtctgacctaagatcattttgcgcttcctaaagaattaccactaagagtcagggttgaacttggtgctgtggcgcatgcctctagacttacctactggggatactgaggtgggataattgcttgagcccaggagtttgaggccagcctgggcaacataacaagaccccatctcttaaaaaaaaaaaaaaagtcagggttggagagaactcaatgaccttgattccaaaccaaacttctcagaagtccatggagtatacttggggcatggggcgggggactgtatgggaggtctaccataaaggcttagctctttctcattagaagaaagatccatgatttcaatgactgagatctagaaacctttaggagccagaggaatcatcacctagtaatttagcattaactctgtggtttagtggtggtcctttttatgttcaagagggggaattgttcaaacaatatagttggtttgaaatacttccaggaccaatgcaaacaccaagtgggctgcccagaaaccacacattgtttccctcagacaaaagataatgatgcactaatgagttttaccctttattgccctctctggaacacagcctcaggaagaaaacccacgaaaccaaattgttagtcctcaaatttacaatattttgcaatgacccctatccctttttctttaagtgctagtacttgggttaagtatttgtgttgttttactcataaattccaacctcatgtaatctcaaaagtgccctcccagagagagaaaggaaatgagtaaatgaggaaaaataataaaagtctccctgataatagaatacttccaagagacttaaagcacttctgagatattatctaattctgatgtactttgatctcattaaagggggagaaagtaacacattattttaactatggagtgtgaaagtgaggcaaaaagaagttggactcgtaggtccatttaacaaaaatcatttagtaaataatcaaaactatgaatggaggaaattagtacccaattaattagacttgtaaaagtgtatgtattgaggatttacaggatttgttggaatcatttgtagttgttttattgaagagcaagcttaatggcacaattgcacatcacttggactgaaatcacccacaacccttccttaacctcatcagtcctcctccccattcccgctgctatttctgtcctatgtgtttgtaaaatctccagaaagtcttgcttataggtatggtttctacatcctcacctctttcctatctaatgtggcttcattttcaaaacatttccactgaaagtgttcccgttaaagtatgttttgttttgttcagttttttttttgtgtttgtttgtttgtttgttgtttgagatagaggcttgctctgtagcccaggctggagtgcagaggcacagaggctggagtgcaggggcacagaggctggagtgcagaggagattgagctcattgcagcctcgatctcttgggttcaaactatccttctgcctcggcctcctgagtagctgggaatacagctgtgcacctccaagcccagctaatttttaaatttttttgtagagatggtgtttcaccatgttgcccaagctggtctcgggctgctggcctcatgcaatcctcctgccttggcgtcttgaagtgctgggattacaggtgtgagctattgctcctggccttcttgttaaagttgatagtactttttaaggctggaggaccacagagctgtttcttatctcttgttcttctctagtttctgtttaaatatgttcatccgtatccctaactttaagcattgttcttactccagtgtgtacatttcactctcacctttcatgtaaactttagaaaacctgagtttttcaaatgtaaatctaatagacatctcaaacttaacatggccaaaatagaacccttgagttctgcctgagactcttcttcctctagtcttgcttacttcaaaaactttgctccagtctcacctctaatggaatatgtgacacgttgtttttatttctgaaacgcttttttttttttttttttttttgagatggaatctcgctattgttgcccaggctggagtataatgacgcaatctcagctcactgaaacctccacctcctgggttcaagcgattcccctgcctcagcctcccgagtaactggggttacagatgcatgccaccacgcctggctaatttttgtatttttttgtagaggcatagtttcaccattttggccaggctggtcttgaagtcctgacgtcaggtgatccacccgcctcagccgcccaaagtgctgggattacatgcatgagccaccgcaccggactatttctgaaaccctcttaaagccatttctgtctctttttctccactaccaccctagtgcaaactgccattatttttcatttgtagattattccagtaattcttaaatggtcttccacttacattctcaccaatatacctttctctataaagcagtatgagttaagtttccaagtcataaaattagatgatgtcactttgctactctaaaccctgttgtggcttctcaccaaacacagaatccaaacatttatcacggtccataagaccatgcatgatctggtccccatctgccgtatccccatctctggatactggccccctcgcactgtaagttccaaccatcctggcctttctcttct

SEQ ID NO: 5468 - DNA, 2183 bp, mus musculus
aaaatcacgtaagaaggcatataaaagtgctaatgcaggttctaccagcaagaagaattcaaagagggaaccggaggagtttagggatagttagaaagctttagcaaggacatagataggaagttcatctttgaagagtggatagggtctgaacaggtacatgcacaaacaggtgaccagcggagagagcagcaggcacaagggccagccaaagaaccacttcgtgggtaacagtaaagagtctgaaaggccacggaacccaggtagtgaaggatttggaaatccaggcaaagatgtttatatttataagtgaaacgggaattttcaacatgagagtaaaataacaaacatctagcatcccttagtttagactctgctaagagcactgcctatccctggttcaataagtggaaaaggcatttttcaacatgagagtaaaataataaacagataacatcctttagctcagactctcctaaaaacattccctatctctggtccaatagcatctcattttaccaccatatggtcagttctttttattaacatagctgtggggttgagcatctggtgagacagttggatcacataaaccagtggaagggcaacgataagattttacctttcttatccccagtgcctctccatagtctctgcagcctacaaggcactcaagaatatccatcccagtctacagcaacatatgggagagactcggaggcagtggctggagacaaacaagcaggaattgcaaaaggatagcgaaaatggaggttaaattttttttcaaaaaaaaaaaaatctttttttttttgaggcggagtcttattctgttgcccaggctggagcgcagtggagcaatcttggttcactgcaagctccgcctcccgggttcacgccattctcctgcctcagcctcctgagtagctgggactacaggcgcccgccaccacgcccggctaattctttttgtattttttttttgtagagacgaggtttcactgtgttagccaggatggtctcaatctcctgacctcgtgatctgcccgcctctacctcccagagtgctgggattacaggcgtgagacatcgtacccggcctcaaaaaaaatctaaaagatgttgataactttctactcttctctgtaatctgtttcatagccaccctttaaaaatctgcccctttatttctgctcaatctcttcagtgtcctgtatactagaaaagactactgtgtttttttgttttgttttgtttttttgtttttttttcgagacagagtttcgcttttgtagcccaggctgcagtgcaatggcacaatcttggctcactgcaacctccacctcccgggttcaagtgattatcttgcctcagcctcccgagtagctgggattacaggcacctgccacgatactcggctatttttttttttttttttttttttttagtagagacagggtttcaccatgttggccaggctggtcttaaactcctgacctcaggtgatccgcccacctcggcctcccaaagtgctgagattacaggcatgaatcaccgcacctggccattctgtgtgtttttatgacagcaataaaataagtgggcttagtaactaaagcaaacatagcttctctctatttcctttgtgaagaagggattgcaggagaagaatgtaggaagttgcttccatctccctaatgccccaggctctcaggctatagctaagagcctggccttcatcaattcctactgactcagggctccttaccatcaactttctgttattactttaagaccaagaacgatttttttttattttttattttttattttttttgagacagagtctcgctccgtcacccagactggagtgcagtggcgcaatctcggctcactgcaacctctgtctcctgggttcaaacaattctcctgtctcagcctcctgggtagctgggattacaggcacgcaccaccatgccctgctttttttttttttttaaagtagagatggggttttgccatgttggccgtgctggtctcaaactcatgactgcaagtgatccatccacctcagtctcccaaggtactatgtttacaagcatgagccactgtgcccaggccaagaatgatgtttttaaagtcagttaaaatttatacctttgatagctcacttggaaaagtta

SEQ ID NO: 5469 - DNA, 344 bp, mus musculus
tttttaagtgaatggacttggttcagtatatcacaaaatagccacttgtataatgcttaattatgtatttcatattccctctgtgatgctcattaactgtagtatccccttctctggtttttcccattaacactgatcaccatgtaagtagaactaaagctccatgagagcagagaattttgtctatttgttcagtgtcctgtctctgatgtgcagacgaatacccagaagatacttgttgcatatgtgttgaagaagtcggtgggtgggtgggtgggtggatggatgaatgaactcttgcacacttgacatcttggaattctttcctatgatacacaattcag

SEQ ID NO: 5470 - DNA, 344 bp, mus musculus; identical to SEQ ID NO: 5469

SEQ ID NO: 5471 - DNA, 344 bp, mus musculus; identical to SEQ ID NO: 5469

SEQ ID NO: 5472 - DNA, 1136 bp, mus musculus
gtcttatagaaatatcttcattatgctttgaaaatgtgtacagatgcttctgtatctaatgagatagagatccatttaaaagcattactgaattcatagcatctttttgtcactgtatatcttctcaatcaatcaatggatgccaaaatccaagtacaacacagcacagtgttgtcatctgagcaaggcctcttttgcagtcgttgtctgcactgcccagcactcacggatctgccggctcccttgggttgcagcactctgtctgcagtggcaaaactcctaagaaacagttcattctgcccagtgtgaccctttgctggaagtttttcctgccagctacaataggcaggggtgtgagagttcacctcctctgaactgtctctattgctctctcaaggcaaatggactgcagagttgcactggcctcagagccactaaccatgtcatgactgcctcatggggaaagttccaaggggaacagtctgtggttccaagccatgttttgattcaagtctctgaggatgtccatacccttaatggctaatagaggagtggggtcctcgagcttcccaagacatatgaggaccctacttttttcccattaatcttagacgcaagctctagcttctgagatatctgagccagcattcacgtaaacaccccattctgtaggaatgaacagaaggaaaaggcagccggaacaaataacttccaagttaatattttgccaagactaacccagactggaccagactgtaaattcctgatggaagaagctgggattcccctcctccaccccatccccctaggccccgcctatactccattctccgtgtcctcaggtataagtcggagatacagcattccaagggagagcccctgagctcagggctgagtgaaacctggccttgaacccagtataaccttctagtggccctctgaacctctgaggctatgacagaggaagaggggcccagaaccctaacagaggagggagtggggcacagggccgagtccgtttccttgcctccgtttcagaagagctgtccttggtgttgaagcaaacctcggctgcttgtctcctctgcaggggagagttatgtaaataacgcctgcgtctctgggaactccactgt

SEQ ID NO: 5473 - DNA, 860 bp, mus musculus
tgagaaggaaagggctttctacagctggttaaaacccgggttcaacagaatcactctgagcagagccctgagctgggctggcctccacagccaagtctgaagagtccgcacgtgctttcacaatcattcactgaggccgggtaatgcacagcctctggcctggctagacatttccccttaggaggtcaaaactctcttctccacccagccatccctctctccacacccatctccttacacacaccttcccattttcttttcactcctcccaaaacctgccaagagacactgccaaggggcggtggcagggaggattacttggtgctggtgctgggattctttatcctcaaatcagcttttactgactgcttctaaggagcagcgctgagtttactcacctgtattcagcaggtgtttgtttgtatgcacgccatggtcaaaacccagcccaccgcccacagcccagcaactgtagaaaccagcatcctttaggtgggttcttaaactgtaatgtggccctggggtaatattccaaggtggtgcttcagaaaatggataggtgcctaagaaagctacgtgtcccacccctgtgcattcagaaatgtcatttgttccctttattgtgccagttcctctctcttcttatgacttaataccccattgttatttaccatccagggctcagtcatattatcccagccactgggcaggcccagacagcctgtggtttttctgcaaatcagagctcccagaggtcgtctttgcacagacagagacagaactcgccctgctcagtgcttgcctttcatgctagacagtcaggcccactctagccctcatacactccactcagaacctaa

SEQ ID NO: 5474 - DNA, 1637 bp, mus musculus
actccaatctaagcccttgtcatatctgcttagactactgaagaagctgcctcaccctcaagcagtgtgctcttccaaaacatgcatctatgagaccgtcactgatttcccattgttctcaggctagcaaccttatcactgtcatggacaagaaggccctgccgtcgggcccctgtctctctttctagcctcatcttgaagccttctccctgctccttgtactccagcctcctagccgccaatgtgtcagcagagagtcttcgcgtattcagtttcctctaggtgactgtctctcccctgctgtctctgtctcattaccttctactcatactctctaaatcagctggagtgttatttcctcatggatgacttccctggtctcctggtctaagaagtgttctttatttttttatttttattttattttattattttatttattttttatttttttatttatctatatatatatattttttgagacggagtctcgctctgtcacgcaggctggaatgcagtggcctgatctcggctcactgcaagctctgcctcctgggttcacgtgattctcctgcctcagcctcctgagtagctgggactacaggcgcccaccaccatgcctggctaattttttgtagttttagtagagacagggtttcaccgtgttagccaggatggtctccatctgctgacctcgtgatccacccacctcggcctcccaaagttctgggattacaggcgtgagccatcgcacccggcaatttttttattttttatttttttattgagatggagtctcgctctgttgcccatactggagtacagtggtgcgatctcggctcactgcaacctccatctcccgggttcaagtggttctcctgcttcagcctcccgtgtagcttggattacaggtgtgcgccactacgcccatataatttttgtatttttagtagagacggggtttcaccatgttggccaagctgatcttgaactcctgacctcaagtaatctgcctgccttggcctcctcaagtgctgggattacaggcgtgagccaccacgcccggccgagtgttctttattggctgttcttacagacccatgctccttcccctcactgtacttacatcagttcacagtgtctttggttgctgtttcttgattaatgtctgtctccctgatcagagtatcagctgtgctccagttgaatgatgaaggtaaatcttaaaaagataaagtaaaggaccatctctgtgagcaggggtcacgcccaagtgtgctcaccatccagagtctctagcacttggcacagtgcttggaacaactagttgctgaatacatttgttgaatgactaaatggctatttacttattgaatgtttaggtagaggaagaagaacccactggatacattcgattcgaaaaatttcttccggtgatgacagaaatactactagaaagaaagtaagtaagtaaatgcaattgttaaggcaaagtaatggtcagaattatgaatccattcatttcaggacgcttggctttttcactttgtgtgttatactcaagcagtgtgtcctaaggtggcctccctctaacctttcaagctacttctgaactggcagttggtacctgcttagaa

SEQ ID NO: 5475 - DNA, 1637 bp, mus musculus; identical to SEQ ID NO: 5474

SEQ ID NO: 5476 - DNA, 1637 bp, mus musculus; identical to SEQ ID NO: 5474

SEQ ID NO: 5477 - DNA, 1637 bp, mus musculus; identical to SEQ ID NO: 5474

SEQ ID NO: 5478 - DNA, 876 bp, mus musculus
tgctgaatttttcctcatgggattttcgaattcctgggatattcagattgtacatgctgctctattcttcctagtttacctggcagctgtcataggaaatctcctaatcatcatacttaccactctggatgttcacctccaaaccccaatgtatttctttttgagaaacttgtctttcttagatttttgttacatctctgtcacaattccaaaatctattgttagttccttgactcatgatacttccatttctttctttgggtgtgctctgcaagccttctttttcatggacttggcaactacggaggtagccatccttacagtgatgtcctatgaccgctatatggccatctgccggcctttacattatgaggtcatcataaaccaaggtgtctgtctgaggatgatggccatgtcgtggctcagtggggtgatctgtggattcatgcatgtgatagcaacattctcattaccattctgtgggcgcaatagaatacgtcaatttttctgtaatattccacagctcctaagcctcttagaccccaaagtaattaccattgagattggagtcatggtttttggtacaagtcttgtgataatctcctttgttgtaattactctctcctacatgtacattttttctgtcatcatgaggattccttctaaggagggtagatcaaaaacattttctacctgcattccacatcttgtggttgtaacactctttatgatatctggcagcattgcctatgtgaagccaatttcaaattctccccccgttctggatgttttcctgtctgcgttctacacagtcgtgcccccgaccctgaaccccgtcatctatagtctgaggaatagggacatgaaggcagccct

SEQ ID NO: 5479 - DNA, 1457 bp, mus musculus
ccaagacattattgcattaaataatttttgcgttggcttataagtgttttccttcttcctcctcctcctctcccatctctctctctctttttctctttctctctccctccctctctctctcattctctttctctcagcacttacacaatggtgaattttacacatgtctcagaatttgttctacttgggttccaagggggtcccgggatgcaggctatgctatttctgatttttctgatcctgtatggcatagctgtggtgggaaaccttggcatgattgtaattatctgggtagatgcacacctccacaccccaatgtatgccttcctgcaaagcctttcattgttggacatctgctattcctccacaattgcacccagggctctggcgaactccatgcaagaggaccacacaatttcctttggcggatgtgctgctcagttctttttcttgtctctctttggtatcacagaggctttcctcctggctgccatggcctatgaccgcttcatcgccatctgcaaccctcttctgtactctgtgagcatgtctcaccaggtctgtgtgctgttaatatcaggatcctacttgtggggtgtagtcaatgccattgctcaaacaaccatgaccttcaggttgcctttctgtgggtccaatgagatcaacgactttttctgtgatgttcccccactcttgtccctctcatgttcagatacctttataaaccaactggttcttcttggtttatgtggctccattattgtcagtacctttttgattgtcctggtctcatacatttacatcatctcaacaattctgaggatcccgaccatgcagggacgctagaaagccttctccacgtgcgcttcccacctaacaggagtgtgcttgttttttggtactgttttcttcatgtatgcacaacccagtgccatcttcttcatggagcaaagtaaaatagtgtccatattctacactatggtcatccccatgctgaatcccctgatatacagcctgaggaacaaagaggtcaagcaggctctgagacggagcatgcagaagctgtctttgtgatcaccgtctccatggatctcctcagtcatcctggacctcgccccaaagcgctgctacccatggaggttatgtcttaggaatatggcattccagggcttcttagtttctttcttgaagtctgtgatccagaagaccaagggtattttaattgtctttatatgtttaacgataaacaaaatcaaggcttatgaggaataaaatgcagactggcggcgactgaatagacggatatatatggcttttttgtctcacatattacatagtatcttggtccaactccgtcagaaaacaattatgtaaaaattgtatattttatttagaaaataaataaaatgtttatcttgaatgtagcttaccaagtacaaatatggatcctacacaaa

SEQ ID NO: 5480 - DNA, 5492 bp, mus musculus
aatgttaaagatgtattgattctataaactttgatagataggtatatattaacaaaacttctttttttgttgttattggtaggccaccatgaagactttgcttagaacttggtcagaattatatagagcatttgctcgttgtgctgctttggtggcaacagcagaagagaacttgtgctgtgaggaactttcttccaagataatgtccagtttggaagatgaaggcttttctgtgagtttgtcctgatgctacctttttttgtttgtttttaaaggattcttttcaagtaaatggagataatatttgtgaactgtcacctattactgcctctatttatatgtgataaagttgatactgcaaacaagtatgctttgtgtaacagttttgtgtctttgggctctaagattcagttttgggatcattaatagtgaagatcttttactatactgtgttatctccttgtgcttgtgtcattctagattaacacttcaagggccttgctctcctggacctcactttctcatacgtatctgttagatctttaaattcaatccctttgaaagtttgtagtcttagaaaatataagtctcttttctctttcttttttttttttttttgagacggagtctcgctctgtcgcccaggctggagtgcagtggcgcgatctcggctcactgcaagctccgcctcccgggttcacgccattctcctgcctcagcctcccgagtagctgggaccacaggcgcccgccaccacgcccggctaattttttgtatttttagtagagacggggtttcaccgtgttagccaggatggtctcgatctcctgacctcgtgatccgcccgcctcggcctcccaaagtgctgggaccacaggcgtgagccaccgcgcccggcctctttctttccctcctcatggaaaggacagctgttgggaacagattgatatgcgtcattccagaatagacctctttctgtttacgcatgtcatttgtatattgatccttgcatatgcatttgaatatatggtattcttgccaatgaaatccttattgcatttattccaaagtaattatgtaacttttcgtaaaacactgtcttggctcagtttcaagtcaatccatatagctctattatttgtttcaactgctgtctagtattctgtagtatggttgtaccattacttggaattctattatttatttatttattattttttgagacagagtctcactctgctgcgcaggcttgagtgcagtggcacgatctcagctcactgcagcctccgccttctgggttcaagcgattcttctgcctcagcttcccgagttgctgggactacagttgcacaccatcatgcccagctaattttgtatttttagtagagatggggtttcaccatgttggccaggctggtctcgaattcttgacctgaggtgatccaccttggcctcccaaagtgctaggattacaggcgtgagccattgcacctggcctggaattctgttattttaaggacattttgtttttttctattatttattactgtgtatgatcctggtaatggccttcacacagaaaccgttgtttttccatgcagattattgaaatgatatttgttgtgcctgttttctctatagcttatatctaacacatattttaatgaggaataaaagaaagtaaaaataacagttctttttttttttcttgcccctgagacagagtctcacagtgattgttggacgacaacccaggctggagtgcattggtgcaatatgggctcactatgacctctgcctcccaggttcaagtgattctcctccctagtagctgggactacaggtgtgcaccaccatgcctggctaatttttgtatttttagtagagagggggtttcaccgtgttggccaggctggtcttgaactcctgacctcaggtgattagcccacctcagccttccaaagtgttgggattacaggtgtgagccgccgcgcccagccaaaaatgacagttcttattgtaaaagattacaaacaacaaagcaaattccccctcacacgtcttctcctcagtaataatcactacccatagttagatgttcattgttttagtgttttaaatggatttatatacatatcctctacttgttattagcacaattctaattgtatttgtcggagtgactttaaaaatgtaaatcagatcttgtcactcttgaagtattatagtgttttgttagatttggaataaaaatctgagctccttacactacccatgaggtttctgcttccttttccaaaggacttacctaatcgcgcttgtttatttttgttgtatagcatcttatttcctttttagtactgtctcgaaattgtttatttctgtactttattatgttatttcacccacactccatgaggttagggacattgtctgtcatgatggtgattatctctgggatctgtctactgaataaacaatgtgcaggtttttataactgatcggaagaaggttgaccctcagttatcacctttaaaaaatggtcttagttaggctttctccctttgttcttttccagaagaaacttggagtctgtcaaatttcacaaaataccctgttgagattttgcttggctttgataagggtgaattcacagattaattcggaaaagaatttacgtctttctaatcaaattgttccttccagggatttgtgtttatttaggtcttctaaagttaacctaacttgattattgtttttaagctgttttttaacattataaatgggtctgttcttccctcatacttgcttgttgctgaaggacataaaagttgttgcttacatacttccttgtattgaatcatgtgtttttgggatacacttcttggttacagtgctattcttttaaattatcataggattaatgtttttttctgcatgtatatcttcattagtgatattggagttctcattgttcaatttttgtattatggcaatagtgacctcttagaatgattcagaaaactgttcttcaccaatttatatagtgtaaaaggaatgccatatctacagttgtattctttttttctttctctctttttctttcttttctttctttcttgatgaggtcttgctgtgttgcccaagctggagtatagtggctattcacaggcaccatgcacactacagcctccacctcctgggttcaagcagtcatcctgcttcaacctcccgagtgggttggactacgtgatgccaagcccaccaacctttttgttctgaagtcttctcttttcttggttggacttggtaattaaaggcttatctaagtctaccaaggaaaacaacatgtagttttattttattgatcattactacacagctttttacttttctttgtctttaatacattgaatggttttgttttaaagcttttttcaaacatatgcatgtaagactttgattactgccatcagtgatcatatagactactttgatgcctttttttttttttttgagaccgagtttcactcttgttgtccaggctggagtgcagtggtgcgatctcggctcactgcaacctctgcctccgggttcaagtgattctcctgccttagcctccctagtagctgggattaaaggcgtgtgccaccacgcctggctaattttgtatttttagtagagacggggtttctccatgttggccaggctggtcttgaactcctgacctcaggtgattctgcctgccttggcctcccaaagtgctgggattacaggtgtgagccaccacacccagcctttgatgtcccccccttttttttttaatagcaccagggaacttggaagggtgctttgtaatttgagaattttttatggatatgtgttgctattttatcattaattttttattttactgtattgtgatcagagaggatcatctaggacttctaattttggaattcatcctgtgttataactgtgataatgtagttttataattgtttatttataagacacttgggatcaggtatctccctgattatgaatttgctgtatattaacatgtttattaaatactttgatgccatattgttatacattagagattaatgactactgatgttttcattgtaatgtgttccttgttactgcctttttcttaaattctactagcttgaaatttattacaccttcttgaaaatttgtgtcaaatgtgtctttaaaaacaccatcctgagcaataattctttctttttttttttgacggagcctcgctctgtcgcaggctggcgtgcaatggtgtgaactcggctcactgcagcctccgcctcccgggttcaagcagttctcctgccccagcctcccgagtagctgggattacaagcattcaccaccacgcctggctaatttttgtgtttttagtagagacggggtttcaccatgttggccaggctggtctcgaactccagacctcaggtgatccacccacctcagcctcccaaagtgctgggattgcaggcgtgagccaccagtcctggccagcaacttctttttatgttttgtttccactgggtttagtgaaaacttttacttcataattttcaagaggaatttgatagagaatctgtgatcctagtatttccaatctcagtttattggttgatatgatggcttttatggggatcttaaaagtgaattatttttcttaaatattgaggaagagaaagtacagtgtttgactcagcagttaactgaaaaagatttgtaatcatgtatggtcatgcgcctcataacaatgtgtcagtcaacaacagaccgcaaatctagtgctacatatcctaagcagaacgttataatacggtatttttactgtgtcttttcgatgcttagatacacaaatacataccattttgttacagttgcctagagtattcagtatagtaactacacacctatacaggtgcctaggctatgtgtttgtagcttaggaacaacagactatataggtgtgtagtaggctgtatcatctaggtttgtgtgggtacactgtgttctcacaagatgaaattgcctgatgacccatttttcacagtggatctctgttaagccgtgggtggctgcacttaatgtactgtaagctgtggcatgtgtgttacataggatatatgggagtaacagtcttatattttttcatgttgcttacttttgttgaatactgtcccagtacttgaatgtttctaacagtggtactttcttccctagaatttgttgttcgtggatagaattatttatattattactgtaatggttgattgcattgacttctcaccatataatattaaatatcagcccaaagttaaatgtaagtatgtattttttaacctttgtttgtccagtatttcataagcagtactgaactttgccaggggaagtcctaatacctttgccacctcattttactaacttttgatcttgtttaaccatgttagtta

SEQ ID NO: 5481 - DNA, 5492 bp, mus musculus; identical to SEQ ID NO: 5480

SEQ ID NO: 5482 - DNA, 5492 bp, mus musculus; identical to SEQ ID NO: 5480

SEQ ID NO: 5483 - DNA, 760 bp, mus musculus
gagcacatcagactctctgtctctaacgtggcttttacaggggcctagagccttcggggtgggggaaagccttctcctgccattgcacgcagagcaccagagagagccaggctcccgagagggaccatgcaggcaccaagagaggtaggacttgagggcagtgcagctggaaggccaggcccaggcctcctggagccattccaggtccagcccagtatttgctgcccctggggaacctcgttcacactgacatcaactagagttggcttttcttaagattattccgagccgagggaaggttaatttatgcactgggcagtatgttcagctctgtgatgccagctgaccatcattgagaacttctctgtgctcaccactcatctaagctctacgtgcagcaccaggaaccctgacagccatgttatgtgtgttctgttttctccatttctccacacatgagaaacccaagtccaagctcaatgaacgcacttgcctaggatcaaaaatctggaaagtggctggtttgggattcaaaccccaaccatcctatcctagagccagtcctcaaagctgtgccctcaactgctgagacagcagtgatcctgcagagggagggtatgggaagacaccttcattctgaactattcccattcttctcccttttctagagttggaaaggttgcagattctctgcccaaccaaaagtttcagaggaacaactctgtgccaggcacccttctaaactcagataattagagat

SEQ ID NO: 5484 - DNA, 1725 bp, mus musculus
attcttggattattttcaatgctgggaagaacatttggcccagggaaaacttttaacagcaaagaagttaagaattgaaaatgatcatgtagtaaggcagaacggatctaggatgcaaggcagcagcattgtaaggaattatcctgtgggaagggaacatgaggagagggccaatagcaagcaggagaaacacaaaatcaaaataaggaaagggatttaccaactccagcttaagtgatagaactgggtatctctctgtgtagaggaaacaagtgtttgtccaaagagttctgtgtttgccttgtgggtaactaccaccacgtggatcattcagggtttaagactgtgtcctctagttagggttatttccaccatatttacctaaaaatggggaaatgttaatacactgttcatctgagcactttaaaaatctaaatgtttattttacaaatatcacttatagctagaaaaattaaacattctatatcaaaacatcaaatatcctgtatccaaagcttaaaagtacaattatcttctcaggactaatttggccttctaatcactcatctgcatttgtatgagcaaatactgaattcgcctttgctgaaacctaagggcttccccaggttattttcctcatccgagatgcctgccctcacagtctcagccacttcatgtagttaggcactaatccactctatttttatgcattatcactggattttgaatggaaatttacttgtcttgaattctggacttactgaagaggagcaaaacaggctcagccactctcactgccactatcccaaccaggccatacaaagagaaaacagaaattcaaaaggagcacctaggaccaggcgtgttggtggccaccagaagtccatctgaatgcggggtccttaaggaggaacactggggcttaagccccatcctttctgtggaggaccgattgggaagcactccccatttcctataagtcaagtgaggaggactcccgggcacatcgggagcaccagcttcacacttcctgctaaacatttgctgaacaacagcagcctctagggccaccacagcctggccaccagagaaaataatagtgggagagaccctaggtaagacgggcttgtgtccctgcagtgtggggacatgtgtgaacatacagacttgtgtttgctcctctcctgaaaattctgaggcaggagtctggctggagcatccaagaatgctgggcaaggaaacatggcaaccatcacctggcaaggtgaggcaggagaaagtcaccgttgggcacggcagcctccgagacacctttagcatacccggagcaagaggtctgtctgccaggtgagagaaggcaatgaggaggctgtgggcctggtctaaggggaggggagtcacaggagatgggtgaaaaagcttatcactcagtcagcaggctgagcagtccagaagccccacccggagatccagggaggagccgctcgcccttcccccagcctccctgaccccagcagagatggctgctatcagccaacagagcacaacagcagcactggctaaacaggcacaacttcttacctttttgctctctgatcctccctcacccagaatagggatgaaggagggaggaagcatgcaaggactccaaatcacggaacagcctgggaggagaggaaactgagactgggatgtgagattgaagtttttatttagattagatgg

SEQ ID NO: 5485 - DNA, 1046 bp, mus musculus
agaatatactaatataacgttaatatagagcatatcaacatactaccaatattacataaattgtaatgataaaattataattataaataatgattaataatgaccaataatatggctaataactaattattaagttggtgcaataacatggcaccctttttttgaaaagtctaatggaacttgccatctgatttcttacaccttctcagaatccttgtgaagttgctggctggggatgggaatagttacagtgcggaaactgaagcacaaagatttatatccaggcaaaaagttattcagggatgaatctagggcacggagtagacaaaacagacctgcaagcctgcgtctcagccttcagaggtgcagggagggtgaggcagtccagcatgtgcctttcccatgcccgcagctccactccttaggctacaaccaacgtggcctgtctggccgttcctgggtggtctctctcactggcactggctattctcataccttcttagagtgaaaacgacttcaccatttactttgaacaccaattgctagatttttccaacacttaatgccttgctttttataatccatttgaggattacatgaattccttctcctgccccaccacacacatcccgggctgaatagcttttggtttgcattcctgatgcaagtgctcagagctggtgttctccacgttttctttggactaagaaagcttatacatgaagaatttttcttctgcctggctaaaacctgctgaaatggtgcaaatcagatgtcacggatttgttttaaacagcagcatttaatgaaaaccaaaacaaattaataaaactacagaaaacagaaatactgacaggcttatcaataatggcaagtagtaccctctgctagaacaaaatactcatttcaaatcacgaacacttacaaaattttagaaggcaaagtatttatttttgactcatggattcaatgagtactgagtggaggaaactggaaggtggaagtgcaataaaagatatttatttgcaagtgtgcatgtgtgtgtg

SEQ ID NO: 5486 - DNA, 824 bp, mus musculus
cacaatcatgaagtctgagaagtcccacaacctgatgcctgcaagctggacaacaggcaagcccaggtgcatttccagctcaagcttgaggcttgagcaccaggggagccaatggcataagtcctagtctgagtctgaaggccccaaaactagcagcagccacgtctgagggcaggagaagatggatgtcccagctcaagcaaagacagcaaattcatcctttctccacctttctgctggaatccagccttccacaggttgtctgacgtcacctgcattggcaagagtgaatctgcctgactcagtctactctatcccatgccagggtcttccagaaacacctcacagacacacccaggaacaatgtcttaccagccatctgggcatcccctggccagtcaggttagcacatacaattacccctcacaggtgctgtcttgtcgaattcatctaatgtcagctctttctctggtgctacttcctgccaagagacctcagccccgtttttgccaggttctggtgctgctctgctggagacatgcacaccaggatgaggaacttttgaccaatcatgccctggccacgaacttctttttttcatacacatgttaatggaatcctgacagtattcccattttaggagagcaaaaggaagaagagctattcccaagcattgaaaataacattaagggaaactagagaaatagaagagtggtatcttagaatccaagggaggggagagagggttaaagatatggcaaaagtcaaaccagaatgggtcataaaagacattccttttgacaaacggaatggggccacagctt

SEQ ID NO: 5487 - DNA, 1063 bp, mus musculus
catttagttttaatcaatttggttccaatcaaagggatttttcaacgcttgaaacacactgagaggtctgaggacacaacgtatttctaaattcaacggggaaaaatctattttgtgtcatcattatgaccttgcttggtaatatcatcccttttgcccacacctgggtgatgtcttctttcttggtggagcttagtatgccaaccacacactgctctgtgacgtgtttccttggcagtggatccaagtccgtagcatccatcgaaggggtcagtgaaaggcaagcagcaggctggtgtgagctggacatctggcatgtagtaaatgcattgagaaagctaataaaccactcattgtgaatgactcctgaaattgattccaacatgagcagttgggggagaaataagcttttaggaaggtcatttaatgtcatatagagtctttctctacaacccagttaaactgcttagcagtttacaaagcaaatcccagcccaattttgatctggtaattaattgagccttctactcagggaaagtctgtgcatagaaactagatatggccataattctttagccttaataactcaggatttgaattgccagatggtctttgacacgagatcgctgctgaagagaaatggaaatcactccactcatgtcagtgctttgtggattcctcaccagtgacatagaagcttggtgtatgtagctgcacccctgcaagtgcagtcttactgaagttctcatattaatcttacaaacacattatcagaagtgggaaatgactaaggatatgatcaaagaggactcaaatgtttctccaggtctcacctgtgggaaagaatactatttcttacaaaaaggaagtggaaagggctctatgtctgtacatggaacgaggaaggttgaggtcctggagaggatgaaggcctgggaagctccactctcagcacctggaaggactgcaggcctcagggacaccaactaaacaagcgagagtccagaacaatgaaattacaatcaaaccaatgctgatatgcaatgctactaaccatggttta

SEQ ID NO: 5488 - DNA, 955 bp, mus musculus
gctctccatgctccccaaaacaacactcacgaaaagctgcccaaagctagggatacagaggagagggctactttttagagtgacttctaacaaaccatttttccacaagacaaaagagcagagagattcagttgtgtgttcatcctgtggtctacaataacagcagcccctccaccgtcagcaccgcccatgctatcatgcctctgccttctctctagagcagtgcactcccggaacacactgggaaggggcccttcctctaaactatctagctgtcactgtcaccacttaataaacagttaaaatgcagtgactcagattgcaagtgtcagtttggcctgggtgattgtcaaatggacccatcccagctaatttaggtcttccgtggctctactcaggatgcctaaaggcaggcctgatgcctacacatcctggcaaattccaggagcaaggggggcaagaaaagtgcatggagagtgcatccgggcatggtggcatccaggtgtgagtgacgtggaagaaagacttgggaaggaggagccacgtgctctcaatcagtgagtaatttatggtctgtgctccaaaaacagcagcagtcccccttctcctacaacctctggaggcagaacccatggctctgccatgtcaggtctctccacacctgctgtgacaagcaggagagaagagagtgtttgtcactcaagggagttcttcatggacggcttgcacttgccgtcgtgagccagctggtcccatcactccttgtacaaggggcttctctcctacgctcacttaattcagtcaaatagcatccatgtgtggttctgggccacattctatcatccagagtggctcattaaggatgcccaagtggggtgaagagtgtctgcaagtaattttgtaaattttaacaaacttaacaagaaacagtctaaagcattcaaaacacaaaatc

SEQ ID NO: 5489 - DNA, 291 bp, mus musculus
ttgctgtgctaatttcatgccctcctaccttgtgtatgcttggatagtgtggggccacttgtttgcctcttaaattgctgcccattggggcaggggccatggcttatgtatggtctgtgccaagagagatctaagcatgattaaatctggctgctcttctcttcctttttaccacctcttgatgtttgcatccttctagggcttaaagttcaagagcagcttttagaacctccatcgcggggttgtagagagaggagatctcatcctttttctgtatttccaaatcctatc

SEQ ID NO: 5490 - DNA, 612 bp, mus musculus
tggggcaagggacccaatccaatcaccactgccctcccaaccactgcttgcattctgtctataaacatatttttaacagaatacttgagtggagagaagacccccatcatggggggaaaagaaaccactgtgccttcacatatcttaaaccaatggcttttccttatgctgaattaacatgtcttctctcattttgtatgctgaaggattagcacctccctgcaattcaattatatgaacatttatggagcacctactgtgtgcctgcctgctctgttttggagctagagatacaaagataaataaaacacctccccttctcccaggagcctagtgactgcagtgagctgagaaaacagatgttttagtcatgatctaatgtgaacatttgtataatgcaagcatccagtgctctggggcaagagaagcattgtatttccagagtgaagttgagacttaccagttcaatgaaatgaatgcgcccatctcgtctgaatcattaattggctacaacaattacttcacatgccaatgagaatagagaggatgctgatgtgcacaggcagggaggaagggcaggggtggcacttcacagcgtgctcctgactctat

SEQ ID NO: 5491 - DNA, 1412 bp, mus musculus
tttactggcccggttttgtgtgaggttggctggctgctgtagcacgttctccccctcctcctcctcctgcaccccctcggttccctcctctgcctgcgggaataccacttcagggcgttcagcagccttcccagggtgggtcctggcctagtaccctaaaactataaccgagaatacctatcattgggcagcctaggaaacgcgactgggacttttagtaggggcccctcaccgctctgaagcactcacacttgagtcagggaacatgggtttgaatccccacccggccgtttatcttgtgctcttgggcacactgtgtcccctatataaaataagcacccatctcttcatctgtctcctaggcctgcgacgatgcaatgactgcacgcaaagcgcacattcacggtcaggtcacttctggcgtccggctgtggtccccgcagggtgcccgccggcggagcgcatcctccggcagggggcgagctccgcaccccgctttcctcatgggccggcgcggcccgccgttcaagtggggagcccagaggtgctccgcgccgtgggcggggggcggttggcgcgcacaaggccggactccggcggggcgcacctccacacgcaccctcgcgggcagcgggtcggagtcggggcctcgggccggctgggggcggggcatgggcgcggcgcgcggggcccggaacgccgagacaatgcggcgcgcggcggccaggaacggctcggcgggccggggcgcgcgccgccttccttcctgcgggatccgcttcccggcggcgcggcagcggcgagcgcgccgattggcggcccggtcctcccgccgccccgccccacgcccggccggccgccgcccccggcccggacccgcccctctccgcgggaggcgtcggggcccgcggctgggtggcgggtagttcccgccggctgtgcgcgcccgcctcggggctcgctctgagaggacgcggcggcagcggactcggagccctcggcgcgcaggcgggcggaccggccgagctgcgcggggctgcgcgccgcccctgctccgccgccaggccccgcgcggctcccgcgcccggcgctcccctttgtccgcgggccggagcggcggcggcagcggcggtgtccgagcggcggtcggagcctgctgcggcagttgaggcggcggcgcccctgcggctgtgcgccagcgccctcgcgccgaggcgatgccggaccagatctccgtgtcggaattcgtggccgagacccatgaggactacaaggcgcccacggcctccagcttcaccacccgcacggcgcagtgccggaacactgtggcggccatcgaggaggtgaggcggcctgcgcggcggctccggccgcaggtatcccgcgccccagccccgcccgccgctcccgca

SEQ ID NO: 5492 - DNA, 236 bp, mus musculus
ataaccgagaatacctatcattgggcagcctaggaaacgcgactgggacttttagtaggggcccctcaccgctctgaagcactcacacttgagtcagggaacatgggtttgaatccccacccggccgtttatcttgtgctcttgggcacactgtgtcccctatataaaataagcacccatctcttcatctgtctcctaggcctgcgacgatgcaatgactgcacgcaaagcgcaca

SEQ ID NO: 5493 - DNA, 736 bp, mus musculus
cgcggcgcgcggggcccggaacgccgagacaatgcggcgcgcggcggccaggaacggctcggcgggccggggcgcgcgccgccttccttcctgcgggatccgcttcccggcggcgcggcagcggcgagcgcgccgattggcggcccggtcctcccgccgccccgccccacgcccggccggccgccgcccccggcccggacccgcccctctccgcgggaggcgtcggggcccgcggctgggtggcgggtagttcccgccggctgtgcgcgcccgcctcggggctcgctctgagaggacgcggcggcagcggactcggagccctcggcgcgcaggcgggcggaccggccgagctgcgcggggctgcgcgccgcccctgctccgccgccaggccccgcgcggctcccgcgcccggcgctcccctttgtccgcgggccggagcggcggcggcagcggcggtgtccgagcggcggtcggagcctgctgcggcagttgaggcggcggcgcccctgcggctgtgcgccagcgccctcgcgccgaggcgatgccggaccagatctccgtgtcggaattcgtggccgagacccatgaggactacaaggcgcccacggcctccagcttcaccacccgcacggcgcagtgccggaacactgtggcggccatcgaggaggtgaggcggcctgcgcggcggctccggccgcaggtatcccgcgccccagccccgcccgccgctcccgca

SEQ ID NO: 5494 - DNA, 815 bp, mus musculus
catattggctcagcaaccaccgggagagccatcacctggaaacttgctgaaatgcagagccccgggttccacccaggacaatttttacagcatctccacgtacaccacaggcacgtgagagcttgcgaagcactgttcgagacggaaccccggctgcacactggagttgcttgggcgtttgtgaagcagagctgcctggctccactccctaaaattctgacttaaattagtctgggtggggcttcgagccttggcattttttaaagcctcctcccaaatagggttgataatcactgataaacagacagttacgtaacaaccttaggcagttgatacgtgctgtaaaggaaagtcatgcataacatggggatagaaagtggttctggagatcaggaaaccgaaatcaggaaaagcctctctgcagaggtgacatttgagcaggctggaatgcagagaggaagccagccacagaagatgtgggaatagaacagcttgggaaaaggccctgaaatgccaatgggcgggatcatggaaggactgaaggaaggtcagggtgtgtggggaggagtgggcgaggaagagaaggatgagagacgggcagaggggtgggcagtgccaggtcacagagggccttgtccatcttggggaaggaatttggattttgttctagtgtgatgggaagctgttgaagggttttgagcagggaataacatggtccgatatccattttaaagacttcactgtggttctagggaaaacagactagcagggcatgaaaggaaagagggagaccagttgtggggtgaggggctatt

SEQ ID NO: 5495 - DNA, 537 bp, mus musculus
cagtcagcagccacagactccccagagacggagatgagaggagggacctcatgccctgaggcagccccagcctcactcccatgccctgcaggcgctgagcagcccccagatcccgggctcctttgctgccccagggtcgggcagttcttgcatcttggaccgagtgggctctgccctgctgtggcatgactgggcttcttctgtcctttttctttattttctctttgaagaacaggagttggaatttcactcaccctgccccagctggatgtgtctaggccaccgtggtcccaggctctctgcccagctgggcctcaggaccaggttttaatgccgctgcttgggtgtgccgagcgagaagggctcgccaggcagtgcagagattccaccgagcccaggccgcagcccccacctcccgccgggctgtgctcagtgtcaggaatcggctcccaagatggccgcctttcttgtaaagctgtgccaataccccaggcatctgactggtgctttccagctggcactccttttacagattcc

SEQ ID NO: 5496 - DNA, 537 bp, mus musculus; identical to SEQ ID NO: 5495

SEQ ID NO: 5497 - DNA, 537 bp, mus musculus; identical to SEQ ID NO: 5495

SEQ ID NO: 5498 - DNA, 537 bp, mus musculus; identical to SEQ ID NO: 5495

SEQ ID NO: 5499 - DNA, 537 bp, mus musculus; identical to SEQ ID NO: 5495

SEQ ID NO: 5500 - DNA, 1511 bp, mus musculus
cctagcttataggtggagacacggaggcacctgagaggggcggggtctcagctcaggccctgggagcctgttcaacagctccctctagcgtcggcccagccacacttcagcctggatggtcccagatgcatcggctcctccctgcacctgggtcctggcagccggcacagcctccccgcaatcacccaggggcaaaacgggcccctccttggagaactaccgggaagctaaggctgcaggcagcttgactgtcacttgcttatttggaggaaagaaggacacaggcccgagttgttttgaaaaatgcaatcagccctaggagaggggcttagctgcaggggccgtgtgggtccagcggtcaccgggagaaagaactgggttgggtgctggataagaaagagcacaaacctgtttgtcttccaccggccccttctgccttccaccttcctgttccaccccaggaagaacaagctctcatctcaaatggcctgagccctctgattccttgaagttcaaattcacaacaaacgcctctccagcctcttcctgagcctcagtcttttttttttttttttttttttttttttttgagacagagtctcgctctgttgcccaggctggagtgcagtggcaccacctcagctcactgcaacctccaccctccgggttcaagcaattctcccgtctcaacctcccgagtagctgggactaccaggtgcgtgccaccgcacccagctaattttttatatttttagtagggacggtttcaccatgttgctcaggctggtcttgaactcctgagctcagacaatccactgccttggcctcctgaagtgctgggatgacaggtgtgagccacggcgccccggccagcctgggtctctcataagcatttggtgtttcccacctctctggtcgccttccctcaaagcatctcagagtctggttggcctggcaagcttcggggatctgactgatgaaagcattttggagcaatgggatgagatgccaaccaatgccgtcagccggcactgaggtgggattaacaggacaatcaagccctcggttcccaggagcctcactgagcagctgctagaactgtgccactaaacaggctttaatttacaggcaataccgactctgggttaactatttctcacagggctccccagctgcatgtttacatttctttccttgttcctctttttcttcttcttctttttttttttttttttttttttttacaattcagcagattaagaacaatagcagggtaactgagaaccacagaggtggctgtaagtgactcattaactccctctcccatgtttccatcaccgtgaattacaacgtcatctctgatgccctcagacagctgttactagtttgatccgagccttgcttgaatatgaatctttttaagccgagcaggagatggttctgctctcaaatagactgccctcccctgggcctcccatttcttaccccaccatcctccttggagatgaaag

SEQ ID NO: 5501 - DNA, 1511 bp, mus musculus; identical to SEQ ID NO: 5500

SEQ ID NO: 5502 - DNA, 1511 bp, mus musculus; identical to SEQ ID NO: 5500

SEQ ID NO: 5503 - DNA, 1511 bp, mus musculus; identical to SEQ ID NO: 5500

SEQ ID NO: 5504 - DNA, 1511 bp, mus musculus; identical to SEQ ID NO: 5500

SEQ ID NO: 5505 - DNA, 263 bp, mus musculus
acttcctgagaaatgaaggctgggtttgcctaattactggagcaaggtggctgttctgctgggaaacgtgagtggtggctttctgtctctgcagaaaggcttgcttttgctcggtcgtcttactagacagccaagcaccaataaggttggctcctttgcttaatgaatgacagaggggtcacagcagcatgcagcattccccccgccccccgtttcttgtgaggcagcctgcgtcgggcccgacagcctccaggagagagcta

SEQ ID NO: 5506 - DNA, 263 bp, mus musculus; identical to SEQ ID NO: 5505

SEQ ID NO: 5507 - DNA, 263 bp, mus musculus; identical to SEQ ID NO: 5505

SEQ ID NO: 5508 - DNA, 263 bp, mus musculus; identical to SEQ ID NO: 5505

SEQ ID NO: 5509 - DNA, 263 bp, mus musculus; identical to SEQ ID NO: 5505

SEQ ID NO: 5510 - DNA, 576 bp, mus musculus
agtagaacccttctgccagctctgctcttgaacttcacatagacacccgtgaggttcactagggaacattctccccactggggaagggtcccgaaggccaccgggagcccctgacctctccgagccttgttgtgggctgggcggaagcccacccttgctgcacccgcccaagcccccgggcctctgagcacagtgtcattgcccccatccgcaggccatctacaagatggtgtcgtctgtgatgaagatgccggaggatgagtccaccccggagaagcgcacagacaagatcttcaggcagatggacaccaacaatgacggtagtgcggggtgggggcggggctgcatgtgtacgccacggtaggggcaaaaccatgtggtttggggcaccccctcccctctgcagcttcttggtctcctgagggccacccccgcccgccacctgcctggcgcctgccatgcccagggaagagcgggatgcagtcagggacacccgtgctgtatcctggctcctctgtgcagctttgtgatgctgggcatgttgtggcctctctgagccactgtctccccacttat

SEQ ID NO: 5511 - DNA, 576 bp, mus musculus; identical to SEQ ID NO: 5510

SEQ ID NO: 5512 - DNA, 576 bp, mus musculus; identical to SEQ ID NO: 5510

SEQ ID NO: 5513 - DNA, 576 bp, mus musculus; identical to SEQ ID NO: 5510

SEQ ID NO: 5514 - DNA, 576 bp, mus musculus; identical to SEQ ID NO: 5510

SEQ ID NO: 5515 - DNA, 800 bp, mus musculus
acaaccatgaatctccttcctgttctatggatcgacctattctggacattttatataagtggaattacacaacatgcgagcttttgtgcctggcttctttcacttagcatggtgtgttcggggtccatgcgagttgcagcatgtatcaatatccattccttttcatagctgaataagattccatggcatggataaaccacatattgtttaaccttccatcagtccatgaacatttgccttgtttctatttttttggctattgtgaataatgctgctgtgaacgcacagatacaagtgtgtgcttggacatatcttttcatctcttggaaattcaccgaggagtggaattgctgggtcatatggtagctctgtgttcaactttttctttccagaacaggaatggaagtttatttataaagctttagaacaggaaagaggaagatgcgcttggcagggatccaagtaggcgccaaggcccaagagagaaaagaagagagaaaaaagagagctgtgttcaactttgtgaggagctgccaggctgttttccccagcagccgcacgcgttacattcccaccagcactgtatgagagttccaattccccacatccttgccaacacccatcttctgtcgttttgattttagctctcctagtgggtgtgcagtggtatcttgtcgtggttttggtttacatttcctaatgactaatgatgttgagcatctattcacgtgcttattggccatttgtgtcttctttgggaaaacatgcattaaagttctttgcctgtttttgaattgggt

SEQ ID NO: 5516 - DNA, 2731 bp, mus musculus
gaggttagattttgatgatactgatccgtatttgtggtgttttgtcttcaggttaatcactttgtatgggattggaggtgactctgaggacagtcccgttatacactaattatgatggtggtatcatatactgacactgaatgatttgcgctgtaccatcttttacttcttacttcatgtttacagtattcctgtgcttaagaaatccaggattccatttcttatttagcagacagaaagtgctaacagattaattggggccagatccacatcttactcatttttgtatcttggaggccactgccccacagagtagtcgtttccaaagtgttgctcaaccgtcactgaaccactgaggttttctccatgtgttgttgatttatgggagaggcaggcgtggatttccattcctctgaatcccggccatggctctgtgtcttaaacaattttacatctaggattctttgctacaaacagaaacccacgtgggaggcaggtgggaaatgacctgatttctttattgttctctgtggagaagaacagggtggagacgagtgtgcgggacctggtaggggtgagtttgaatgtgactgtgaatggcctggctcgctctcgcctgggatgctcttgaaacctttctgtttcccctggtggtgtcccaggtgcctccccctgacccaccgctggtctgtgcttcacaggcacaagaaagaataggaaggcaccagggtatcgatatttcccagctgggaattctgagtttggctgtgagtgtgcttggaagggagaaggcaggtgtgttgaggatggagcccaggccaaggacatgccaccctctgagcagccagcatggaaagcagacatttcaaaataagtggttgtttactgcacaagctgtagcggaagcagtcgacattggagtcaggcaagtgtggtttggaatcccagctttgctcctcggtaaccattggaccttggggaagctccctgacacatctgagcaaaggtgccagtgccaccgtcagtgcccagacaggctgggatggagctggcctggaggctgcatgggaggcatgctaccccaaaagaggcacacacaacaaagatgcgaaactgcgtgctctcagcaacttaaaccaacttaaatagctacactagaaatgccccgctttcctggaattcattttaacaaccttctctgtcttggcaataatttctaaacacaagaggtagcacagagcaggatgtacagcagggaccttgtccaacagccttcagtgtgatctttggcaaattaatccacctctcagcgtctccatctgtgaaatggggttaagaataacaccgatgcggtagaccccgtctcactgggtcttcgaggcaacttcatgagaaaatgatccagagtgcagaaaccaattggggaggatggctctgtggtcacctggaggacatgcgttcaatcccaaaccatacagtttctgttggctgaatgcaggatgtctgccaaatccatcctgccctctggcagtgcccaaggctgtgggagcccacctcttacattagtgtgacctggatgtgagacatggagtcaaaggagatcattttggaacttttaaatttaatgactgccctattggatttcacacttgcatggggcttgtagccccttcgttttggccaatttgtcccaatggaaacaggtgtatttacccaatgcctgtaccccaattgtatctaggaagcaactcacttgcttttgattttactggctcataggcagaggggacctgtctcagatgagactttggactgtggattttgagttaatgctgaaatgagttaagactttgggggactgttgggaaggcatgtttgattttgaaatgtgaaaagacatgagatttgggagggtccaggggcagaatgatatgctttggctctgtgtccccatccaaatgtcactttgaactgtaatccccataatccccaggtgtcaagggtgggaccagttggagggaattgcatcatggggccgtttcccccatgccgctgttctcgtgatagggagttctcacgagatctgatggttttacaaacatctggcatttctccggcttgcactcactccgtcctgctgccctgtgaagaaggcacctgcttttcctttgccttcagccatgattgtaagtttcctgaggcctccccagccatgtggaactgtgagtcaattaatacctctttcctttataaattacccagtcttgggtatttcttcatagcagtgtgagaacggactaatacagccagtcttagacctaggggaagatgggcctgagggtcagagagttaggtttacaagggagggaagaggacagcaactgggaggggcccgtacacagtgggcacagtggcattgctggtgccagcactgctcttactcttactccttctagacatagcaggcaggaccccaggagagtgtggagagcagcgagatacttctgcagctcttcccacgttggaacctcagctcttgcagtttacttggggtgtcacggattttctcactgtccgatacaatcatattcaaatggggcaaaaaatgctttttcccatcaaatagaaacagctggaccattcgccattctgagttagtcacagtatggttccttatcaaacctgaaaaattaagaattgactcttgtgaaaactcagattttgaaaagaa

SEQ ID NO: 5517 - DNA, 2731 bp, mus musculus; identical to SEQ ID NO: 5516

SEQ ID NO: 5518 - DNA, 2731 bp, mus musculus; identical to SEQ ID NO: 5516

SEQ ID NO: 5519 - DNA, 319 bp, mus musculus
ccaacagagtatgttgacaaatctaaatttttacaaaaaaaattgaaaaaattgtattttagtgtagctttaacttccattgcttatgtggatctttttgtattttaaagagccatttggctgttttttttctttttaaggagaattagctgttcctattttttgaacatttttatatcaggcagttgagaattttctccttcctttatatagtttttccagcagaatcattattttttatttttacgtaagttggaaggtgttccctttggaaattctgatgtcgatctgatttttgttctctttttcgtagctcttc

SEQ ID NO: 5520 - DNA, 377 bp, mus musculus
acaagaattcaaagtataccagatgagtacaaagaaaatggaatagcttaaagaaaggcgttgctttttacctatgataacctttccctaaagctggcacagctcagtgtaattgggagaaaatgttcaacttgtgatttcttgtttgaaagggaaagagaaaagtgaaatgtacatccaatattctcaatttgtgaagggctgccagagaaattggtttctgtcttatatgactcagagtattgatggagaatcagcatactttgggctgcttagaacaaaggggagcttggtagtttgtttgttacaacaacagagaacctgcaataccccagacaggcaccatagggaggaatcgattattagcttcttaaaaa

SEQ ID NO: 5521 - DNA, 292 bp, mus musculus
atgcctagattatagaataatttgaagagtattttttgaatgaaaacaatgctgtaaaactgattacagttttcctaaaatgtcattatctctcacagctttacatctatccttgcttgttgtgttctgtgaccttttgtagctctcccctttcataattgaaaaaccattcttccttcaaaaacttcacctcagatgacatctcttgatctttcttcagcacagtgcaggaagctcttaagacagtgggagctctaagaatgtaaagcattattactattatttgccaaag

SEQ ID NO: 5522 - DNA, 1009 bp, mus musculus
atacattaaatctctttcaaatgcagagattaataaaaacagttcttcaactgggtttaaaaaccttttttcatgctgtataaagaaagttattttattttttgacttagaaatatccgattagctgcactgtaactgcttgtaagatctttactaccctcttgtgatggttaatactgagtgtcaacctgactggattgaaggatgcaaagtattgatcctgggtgtgtccttgatggtgttgccaaggagattaacatttgagtcagtggactgggaaaggcagacccactaatgtgggtgggcaccatctaatcagctgccagcacggccaggatataaagcaggcagaaaaacgttaaaagagtagactggtctcgtctcccagcctccatctttctcctgtgctggatgcttcctgctgtcaaacatcggactccacgtttttcagttttgggactcggacttgttctctttgcttctcagcttgcagatggcctattgtgggactttgtgattgtgtgagttaatacttaataaacttccatatatatatatatatatatatggataccctattataatatatatatatatatatatatatatatatatatatatatatctcctcttagttctgtccctctagagaaccctgactaatacgcctcctgaagttatttatttgttggttggttagttgtctcttcccacatggcccacctagtgttttcaattaataatgttgaatctccatttccattaaacttacaaatacattttgaggatttttgcttctaagaaagagggagatcttcaagacacagcaactattccacaaaaaagcaatcagaacagcaagatacatgaaaacaaacaaacaaataaacatgtatttcaaagaatcagagaagcaatgaagaatgaagactgtaattaccccaagaaggaagccccttgaagaggcaccctgagcactttcagcaatagctggatgtggtcatgggtc

SEQ ID NO: 5523 - DNA, 1030 bp, mus musculus
gtcaaagcttttctctgtggtccagtgctcagctgccattggactcagatccaaacaagtttagggaaagagacagtacactgacctttgtttcctgtttccttccaactctagagcaagttctatttcagctccaccatcaacaaatagctctgaaaaccaaatagaccacactgttggaagtcagagagagtgaggtcaaagagaagtcccaaaagagggaatataacatcttctcatttccttggtggaaatttccagccttcacactcatccatcaggatatcctccttctctgctcttatcactcaaatgtttcatctgttccagtgtccacctgaagatgacacagctgtatcaggctggatgatcttttatgttgtgtctgcattcattgctttctctatttcctttcctttgtgatattttcagcattaggaagtttcactcactttgaccattgttttcatacatttgggttttagacacaggattgtttaatttgaatccaaaaggatggacaggaaggaaagcagacagcagagatatcattcacttcctaactgaaatcataacattctactttcatgactttgtcacactacagaaaaatgcagggcattcatttgaagaaatgtaaacagtaagactgtgacatgttctcttcttcagggtcttcattcaaaaggtgaagactaaacttgtttttggaggagatttttgacttttctgattgcacattctcctaataaaggccagatttggctcaaagtgaatgtgcaatttcctagcactaaaattctttcatgagttgcttaagtattaatagaaatcactcattgcacttttttgataataggtctgcagaaattaagctgcctgattgatgcttcaacattgctactgaaacttttgtatgtgtgtgtcttggattttgttttatttcctttttgtgcaaaagctctggtgctaaacagatctggttatgaatattggcttggccatgtaccaaatgcatagctttgggcac

SEQ ID NO: 5524 - DNA, 737 bp, mus musculus
ccatacagcagagtagatacagagtgctgccaggagctgccaccctgagcacagaaggctactctgcagcagccttgggactgggccacatggccatagaagcagccagaaaggaagaaagggtggggtgaagccaaaattcaagccaggcattttcaacttcagcccttagctagtgaggtcattttccatgtaatctctgtttccactagattcaatgtctcttaaatgttgaacacacaaaatctgaacccatcccatgagccatccagaccaacacaatgatgcttgcattcctggcattgtcatctggatcaggaattagtgtgagtccaagattcaagcctgggcttgaggttacactttgaccaccacttccatgagtgtcttgtacttagagaggatagccctggtttccagagagtacactccatcatatctctaaaaggcagaagtgtctgggggttcagagactgggctagaattccagctctaccacggacttcctgtgtggcttttgccttcagtttcctcctatgttgtgtgggaataataagagaacctacttcagagtgatagcaaagatctaatgagctcattcatgtaaagcatttgaaatactatatgtggaagcattctgtaatgtaaaatataattatcaatgctcacacatgtatactctcctattaaaattatacagtttcaaactctaacatcgcaaggctgctactgattct

SEQ ID NO: 5525 - DNA, 499 bp, mus musculus
tctcacctgtaagccaaccatcttctggacatatgaattcgagagagcttcaaacttgagccctcagtgatgtgccccactgggcatttccttgacagtgtctagcatcctgaggccatgtcaccagtgcctctccaaggaaagctcctcaggtacagtagtttgttttcacagtgtgaacagtagcctgaaataaggttagcatggcagcttgcacaacaactttgcactggattgtgatgagcaggggtaggaggcgtttcttggaggttgattaatccatacgtgtttatgcagactttccttagagaacacctcctcaccctgacagtcagtgtgtgcacaggcctcctaatgcactgtgtgctagttaaaatgtccaatgtggaaagtattataacagctatgcaaccaactctgattggaagcagcttttgcttcagatatgatctgtgttaccagaaaattgggcatgtgcagggctggcttaatttcttta

SEQ ID NO: 5526 - DNA, 1015 bp, mus musculus
ctacctttctactcacctaactcacacttgtgttatttgatgcagatccttaaaaatggctcatggattacagaggcatgaaactggtatggaaacccatagaaacaaatgaattttaacacatgatcccctcactcccctatggcctcttttatttccagagtgcatgcttcttaacaaacatccattcaccctgtggtcctcagagaaggtggcaaagaagaggcagttttgatgagttaattttgcccatttgccccacaatattctctctggagggatgtggaaaccctaaatcatcttgaagagtgcatgaactttattttcttaatcaagccccatgttattaagttttctcattattcactgagttttttccattggccaagtctgtgccaatccctcaaaacatctgaaactcagaaccacacgtgaatgatctgatctttgcctagcaccatagcacagccacctcccttgccctggaatgcccttttagcaacatagctggtttcccctggcatttttgacattcacatcgcactgtggactcccactgagcctgctgtcaatgaaatctctaaggcttttccccatgtattgcagtttagccatttctcccccatctcatgtacaatttgacttttgaacccaagtgcaggaccctccatttacccctattaagtttcaccttgttagattcaggctattgttccagcctgtcaaaatcattttagatctcagccctgtcagctgtctccctccttgctttatgccatctgcaaatttgatcagcatgctttccatgttttcatctaagtcatctatggaaaggttgggtagcaccgaggcaaggacatggccttctaggtcactggagattgctctccaggttgccagttatccatcaatcaacagtcactgagtactgtctttcatccaggttccagtacactgagttacattatcatccagccacatttctccattgagtccacatcaatatcaggggtat

SEQ ID NO: 5527 - DNA, 1002 bp, mus musculus
acataaagaagacatttctaatggctcaggtttcccaacaatggaatagtctgtgtgttgagtaaatgagaggttaagaggctggaaggtctctggcaactgaaagaagatcccaaacctgaaaggaggtttaacgaatccattccagaggaaaggtgctataattattagggaagtgggattcgaaaggacatactttgattaattagaaaggtcaggaaggtggcaaatgtgttggcaaagatgcagaggtagggatcacaggtgtgtctgggggtagtaagtaaagctgattggctgaggtgaggactttcggttgcccaaatctccccttgcaatgggcaaggcctagtgaggtgcaggggttgggttaagaaaactgattacttgaagaagctgggaagatttaaaggggagagagaggtggggagaaaagagggccagatctcgaaagagccacagttcaaaagtaaagaactcaatttctaccttcaagaccaagaggccaccaactgcatccagaaacaagaggtcaagtcagcataggatcagaaactaggaagcaagaaccaggcggggggtcatcggaagtgcttctggctgcaatgtcagtgtcaagggtgtcctttctgcagccgcgtggtttaaaggtgctcagggggtgagggcaaacagtgttgagaataatgggctcacttctacgcagtggggctggcctcacagctacaggggacagactgaccccagatgtgccccccacccacagcacagcaaacccctgaaggatgaatagagactcccaccctgggaccaggatgcccggcacagtctggggctcggtgacatggctcctgtcccagaacatccatccgggcagagacaacaaaattgcaggctcgaatctgctctttgccattttctagaaaatggcttcacttataaaaagaaggaagggaaggaatatgggccaattctgagggctaattgtctttgctctcaaca

SEQ ID NO: 5528 - DNA, 144 bp, mus musculus
aaaatgccagaagcaaattgaaggatttttttacaagggtttcagattcatataaatttgcacttaagaataatgtgttcaaaaaatatatataacattccatgaaaacaattcaataggatattaaatctgtacaatcttttt

SEQ ID NO: 5529 - DNA, 358 bp, mus musculus
tggcaggtgattttcatattactaagaaggcagctatggatttaacagagcaagggaagttcactaaattaactagaaactgagtgaaggcagataccaaatgagtcctgggaatatgagacaacttcaaagacaattttcactgattgacatttcaccatttacagtgatgaaggaataaatgaccatgagagaatttatgtttttactctattgaaaaatattaatcataaacataatttttaaaacaatgtataaaataaatataaaaccaatattaaaaaacaaatataaaatttatgagtaaatagaaattctccataccattgcctgttgtatgaaaatgtcaacaaaattc

SEQ ID NO: 5530 - DNA, 423 bp, mus musculus
tgtttttattttctcccctgctatttgctgatctgtcaggtcagagaattcaaaaatcttgttatttcttcctaaagaagtcacaagctgatctatcatttctcctgttgaaaatatgaggattgcttttgagatgtaatggctctcagatttatttattattacatttaattttgtatttttggcacatcaaattccaagctaatgttttatgctgcttcacccacaacttactatgcaattgatgcctttagtatatcatttctctcatctgctaagtgtatctcagaatgtcatatgacttttctctagatctctgacatcatgactatagtttatgtgatgcatgaaatgtatccatttttgactagttcatctttggaatgtaaactgtgctgctaggcagcaaaatcagagggaaaa

SEQ ID NO: 5531 - DNA, 1112 bp, mus musculus
acctgcccttgtccatggggaacatgttcagccattcttgagccctctgtatcttcctgcatctcacagccctttgctggtatttgcctacttggaagagctcaaggtcattggcaagccagaagatttcaatgtacactcattcttctctcaacagatcaagccacaaaatatttcttggatgctagtcactgtaatgaatccagaaatatcaaccatgctctgcctttcaggagcccactaagtcactggagatgtcacaattcaaggtgatatatgatccatgactctatggcgatggggatgatttccacatgtgacttgtgaaagcaaaagggcttgatagtcacatctcaaatcattaagggccagttaacttggtccccccaggagcatcaattccccagcaggagccccacagttcacatttttccatccagataaagacttgtttatccttactctttattccttatctctaagccagttccctatttgtttccaacattctctccattcccatggtgactcaactcctttaacatgctttggtgtggcacctgtcagaggacgcttgaaagtgtaaggagattgtgtctcctgtttcccccttatccgcacacttattctgacccttcacaaagctctagtagattagggaagcatgatttctccttaccaaagacaggctgcctttccacaggaggtggagttttctcaagcacccgtaatcctgccctgagaggttctgtcagcttgcctggcatggaaactaaactctcgcaccatttcccagagacccctctggtgccttcggttcttcagcacgagggtcagtctcaagaaaaggctctcattttgtcctatgcttccatgatgtcaatcttcttatttattggcagcaggctggactggggggtggcagggggtgcagagaggggatacaaaacaaaaacaaaacatacagtgtgccttactttccattgcttggagatttcaggcactgtaattcatctgaacttgtgcagaagataatagtaaggttatctgtatcacatttcattttatgacatatcaccttgtttacaccgctctttgggttgtatatggga

SEQ ID NO: 5532 - DNA, 378 bp, mus musculus
actggcaaagagctgatgcagtctggaataaaatccaagaagaaaatgttattcctcgtgaaaagacattaagattattagcagaaatccttagagagggtaaccaggaagttccgtttgacgtacctgaggtaattgtttttggcataatcgtaacagattttgttgtcagtataattaggttatagattagcctacttttatattgaaaagattaccagtttttatttaacagaataactttgttttaaagttgtggtatgaagatgaaaaacattccctgaattcttcgtcagcctcaaccacagaacctgatttccagaaagatatattgattgcctgccgattgaaccaaaaaaaaggcaagcacatacgggg

SEQ ID NO: 5533 - DNA, 144 bp, mus musculus
atgcaaaatggtttatcgttcaaactgtccactctgatccaaccctgtactgatagtacttcccagtatgatattgtgatgtttcatacaatgcagtgaacataaccaacttgttacctaaataaagaattgataaaaacagtg

SEQ ID NO: 5534 - DNA, 441 bp, mus musculus
acttggacgagagtgcattttgtggttagaggcgaaacaagcaaaaggaagcttttttaaatgaaaagatttgctttagtaaaaaaagaaaggcagaatgagcacaatcacagtagaaggcagacctggggataattagatgaggcctgtgctttatggaaatggagttcaaatagaatgttaaatctgtcaaattgattcaataaaggaaattcatgttgcgccagcattggggtgaagaggtaacagaactcatccaaaattccaaacattcatagaaccttttgaaattcctgcctatttgtaagagctagtatccgaaacaataagttagacatgcagtctgtagtgggcactctatatggggcaatatgctaattattttacataccttatttacaaacattattgcattaacactcacagaatctttataagaca

SEQ ID NO: 5535 - DNA, 441 bp, mus musculus; identical to SEQ ID NO: 5534

SEQ ID NO: 5536 - DNA, 175 bp, mus musculus
aaatcatacagagtccacatgggaaacagatcaaagtgaagcttgtctttttgaagcaggaaagatgtctgcagaaactagcatttcttagcattcctcagtatttatgtgagaggaggactagcgtctaccatcaaagattaagatcttccattattaagattaagactgcctt

SEQ ID NO: 5537 - DNA, 175 bp, mus musculus; identical to SEQ ID NO: 5536

SEQ ID NO: 5538 - DNA, 719 bp, mus musculus
agaagatagtaaattgtttgttgtataaatgaaaaaaaaaagaacagattgttctgaattgcatttctgcaaatttctgatcattgttcccattttagcaccattattttcttagtattgttttagttgaaaacagagaataagaaaaaggtttgcatgcaaacaaagttgacccttggacaacagaggtgtttaggtgcattgactccctacacagtcaaaaatctgtgtataaaatgtgactcccaaaaaacttaaatatgactatcctgctattgactggaagccttaccaataacaaactgtggattaacacgtattttgtatgtgtactatatactgtattcttacaataaagtaagctagagaaataaaaatgttaagaatatataaggaagagaaaatatacttgctctttattaagtggaagtgaatcatcctaaagtcttcatcctcatcatccttgagttgagtagaatgaagagaaggaggaagacaaggggttggtgttgctgtctcaggggtggtggtttatctgtgagtttttttttttcagattgccatgaatctccaaaaaagtttctaatatattcattgaaaagaatctgcatgtaagtgggccctctgaagttcaaatccaagttgttcaaggatcagctgcagttatctgtgattatgagcctcaggagcacgtcagaaggttagaaagtgtgaacagt

SEQ ID NO: 5539 - DNA, 1361 bp, mus musculus
ttttttaaaaaattgggtttgaaatcaattttcttataacttgtacctattttgacaataaattttcagagtagaaacaaatatttctaccctcagtcattaaatgtaacttttaaacatcaactcttcaagtatcttaaagcactggtttatccacactcaatctctctatacagcaacattccatttcttcaattacccacatgacaaaagttttgtttgtttgtttttgccttagtgatatgggagggggggcagagaggtgctgggtagagaaacgcgggtccctggctagggctccacccccacggatgtaggtgaggacatgcatttctgccttcataccaaaatgctgcattttccaagaccatcctggcctgccatgtccccatcctgagcttataaaaacccgatacccggccaggcacggtggctcatgcctgcaatcccagcactttgggaggccgaggcgggcggatcataagatcaggagatcgagaccatcctggctaacacggtgaaactccgtctctactaaaaatacaaaaattatccgggcgtggtggcgggcgcctgtagtcccagctactggggaggctgaggcaggagaagggggtgaacctgggaggcggagcttgcagtgagccgagatcgcgccactgaactccagcctgggctacagcacctccgtctcaaacaaacaaacaaacaaacaaaaaaccccgagaccctagcaaggcagagacataaagcagctggatgtcatgaagaacacatctgcagaagaagacacaagggtctggtcatccagagcacgccggcggaagagcacgctgacaggccgtagcaggccagcaggccatcgatctgcagaataacatggtgtttgcctggagcagtcagaggagagcccgggccaccgagcagcccgactccagggtaaaaccatctccgttctgattcgcccatgtgctgagggctacttctactcaataaaaccttgcattccttctccaagcccacttgtgattcgattcttcctgtacaccaaggcaagaaaccccgggatacagaaagccttctgtccttgagacaagatagatggtctaattgcgctgactaacacaagctgcctctaggcggcaaacttaaagagcaccctctaacacatgcctacggatgcttcaggagttgtaaacattcactggtatacattgctgtggggtcggtgccccacagcctgcccgtctatgtgctcccctagaggttggagcagcggggcaccgaagaagtgagtcacacccctatcacatgccgtgtgatggggatgagggaacctttcactattttcaatagtgctt

SEQ ID NO: 5540 - DNA, 475 bp, mus musculus
tgtgtgtatatatagtgtggaacatgttttgaattacatatatacactgtggaatggctaagtcaagctaattaatatatgcatgtatcttaaaattaataaagtacaccatacgataaggtataggcaatagctactacaagaattcagatgagaaaatgcagctattgtgggacttggcattcatgcaaggctctaaagagaaaggaagaggaaggaaaaatttggtgatcactgaagcatatgaaacacagagaattattgaaggaggagtgttgagtaagttatagtctgattggcaaaaaggattattgaaagggatttgaaggaaagtttaagctggaagaaaagccttgcagaaaaacagttaggtgatacctcttatcaggtaagccctgtacttatgcaagaccttcctgataagaaagagggaaatgattcatgcttctctacgtattttgctaatttataaact

SEQ ID NO: 5541 - DNA, 363 bp, mus musculus
tcaattttaatataaaatctaatttttattctatttatggattgatttttccttttttaaattactttaataaaagagagattttattatagggccttgcttttcttacttttttttcaattagtgtatttggagcattcattcatgtaagtacaaatatttctacttaaggaagcactgtagtttatttacccatcatttaaattttgagttattaccaatgcctcctaattccacacaatctgtggagaatatgcttgatgcatttcagtaatcttataggatgaatttcccataaataaactgaaaaatccaatgataaccacataaatattttaacaaatacaaattcttaactcaaat

SEQ ID NO: 5542 - DNA, 973 bp, mus musculus
tgctatttttaacaaaaatctgctaagtcatttaaaacaagtcttagtgaaccatttatttaatttttcctatagattccaagtcccagtggggtcagattccttggcgatcagaacatttttctactcagctttacttcttgatggaacattatttccagtttagtggtagcctttaaggacaaaaatggtcataatgaaggaaaatgccacaggagtatagaaaagagtcttacacaggggcatgaactcttactatatactccctgttcccagccctgattcacactgaatgttcccaatttatgcactatcaacctattgaactgtagcagcaagaaagagtattatgaaagtctggatgatagccagcagcaaattcatcatccagcagtcagggaaaaaaatctaggctagcctgatgaagaaaatataggtccacttgaatctgaagaagactcttcttgaatctgaagaagaaggaccaggtgtaaacagtatggtcaaatcaactcaaaaaatggagataccagcaacccagagtcccatctagttgcctgtgatatttctgaggaaaccttgacaaattatacattatttactccatttctggtgtgattttttgccaactcatataccaatgcatgtaagagacgttatttcctctatggtatgcctaatagtttataagtagccctctccaaaacacagagaatggggccaacaatattgctttcctaaggcagagctcagcaggaagcagcagctctcctaacttgatgctgctggtttttactcacagggaaacttgagcctctgactccgaagctggaaatagaaggttgtcaccaaaagtagacaggtggattgcccaaggttattaaatatgtctataaatgacagtaattattcctattatttatccctacctgaatgaaaggacttcttaattagtgcctgagaaagtaaatga

SEQ ID NO: 5543 - DNA, 245 bp, mus musculus
ctatccatcacctcaagtcccatccaccacacatgcctttggtgaggccagttgcagccagctttgctatttttgtatagtcagtttcctctggactcataaagactacaacagataaacttttagtttttacaccgtatttaagtcttactgggaaaagaagtcaaggaagctgttttcagtttgtctcttccatttctcatgagttagcattaatgtccataacatatataaatttttagcca

SEQ ID NO: 5544 - DNA, 535 bp, mus musculus
ctactgctattaggtttataaagaaataggaaactgtaataaaaaagcactgcatgtgagacgagatcacaccactgcatgctagcctgggtgaaagagtgagactctgtcaaaaaaaaaaaaaatcactgcataaataggttggtggatttggtgtaaacatactgttctgtagaattctgtaaacatctgttagcttcaggaaagctagtatctagaagtgacaaattatcaaccaaagagtagttatattcccactttcccagtatctccatttactagtattcagatcaaagcggtgaaacagatgttatattctggattcatagacattatttagtcagggaaacttaaaagtttctcagaaaatattggaggtttattcttttttatagccaggtatcagaatatgcaattaatgttcacaaaatctagaagtaagttgatcaacaactttgtcaaatacagaaagtacctgaatatctacaaagaaaggcacaattgttttttattttctgaacattttgaaaccaag

SEQ ID NO: 5545 - DNA, 1007 bp, mus musculus
aattaaaagtaagacatgttctagcaccctttttttgttccccttttcttggtagtttttggaagagataaaccatagttagtttttcctcaattacagcttttaattattttcttttcaaattagattaagatactggaacaggaaaatgaacatctgaatcaaacagtgtcttccttaaggcagcggtcccagataagtgcagaagcaagagtgaaagacattgaaaaagaaaacaaaattcttcatgaatctatcaaagaaacaagtagcaagctaagcaagattgaatttgaaaaaagacaaattaaaaaagaattggaacattataaagaaaaaggagaacgagctgaagaacttgaaaatgaattgcatcatcttgaaaaagaaaatgaattattacagaaaaaaataactaatttaaaaattacttgtgaaaaaattgaggccttagaacaagaaaattcagagctagaaagagaaaatagaaaattaaaaaaaacattggatagctttaaaaatctgacctttcagttagaatccctagaaaaagagaattcccaacttgatgaggaaaacttagaactgcgaaggaatgtagaatctttgaagtgtgcaagcatgaaaatggctcagctacagctagaaaacaaagaactggaaagtgaaaaagagcaacttaagaagggtttggagctcctgaaagcatctttcaagaaaacagaacgcttagaagttagctaccagggtttagatatagaaaatcaaagactgcaaaaaactttagagaacagcaataaaaaaatccagcaattagagagtgaactacaagacttagagatggaaaatcaaacattgcagaaaaacctagaagaactaaaaatatctagcaaaagactagaacagctggaaaaagaaaataaatcattagagcaagagacttctcaactggaaaaggataagaaacaattggagaaggaaaataagagactccgacaacaagcaga

SEQ ID NO: 5546 - DNA, 185 bp, mus musculus
ggcagagcagtgattccacagagggcctgggcagcagtgacagctgcagggacaaatctccaccttctagtagctgtgaggacagcaaatatccagggagacaggaagaggagaaagatgggagtggacttcagaatgagcccatgttgggatgcctgagtttctgagaagatatcatgtgagac

SEQ ID NO: 5547 - DNA, 302 bp, mus musculus
tcaaaatgaagctttaattagaatatatattagaaccaaacttataaagcagagtaggacctggagtggagcctggactcattacttacagtctaaatggcagcattatcatacatccttcaggaagaacttagtctttataatagaaacaaagcaatacctgagcttctgaacaagatttctctacacaaagaaatatgtgtgaaacaataaaaacctggaaagcaatctagagtgtggttgaataagctatagaaattgctatgaactaaaataagtgaggagcaaaatatggattgagt

SEQ ID NO: 5548 - DNA, 375 bp, mus musculus
cttcagccatcttgccgtgtgccttcttctagggctccagaacttttttatccaagtcttagcctactcacgattgaagagtaaataggagttgaaacttgtctgttacaaattcagcttatactggtctcctggaagctggaggctcctttgggaacataagtgggtagaatgcatatatttcactttgtgccttttattttcggagtttaaaaaaaaatcccttactttttatactgcctcatactagcctctctaagataacttaaaccattttctttacccttttattgaagccaatggggcattgcaaattatcattgtactactgagtcagtaatagccatagagttttttaaaagcattattaaagga

SEQ ID NO: 5549 - DNA, 68 bp, mus musculus
gataccaaaattccttttgataattttttaagtttccagctcttcaccgaaatgttgtattcttattt

SEQ ID NO: 5550 - DNA, 68 bp, mus musculus
aaataagaatacaacatttcggtgaagagctggaaacttaaaaaattatcaaaaggaattttggtatc

SEQ ID NO: 5551 - DNA, 68 bp, mus musculus; identical to SEQ ID NO: 5549

SEQ ID NO: 5552 - DNA, 1140 bp, mus musculus
actgagacctgtataaaataatgttcttagatatgtgaggagttgtattcccctcaggaccttggtttctctatcaaaggagtcaggtggtggctaagtctccttctacttgtaaagctccatactctagttttgtttatgctttagctctttagtgtttacactggttcgtctcaaggtttaacatacttatgaattactagaatcttgttaaaatgtagattatgatgcagttggtctagggtgggttctgggctcctggttttctaacatctcccaggtgatgctgaagcagctgctctgtgaaccacatttttactagcaaagatctaaatgatgtacagaggtaaggggggaaagactagttctttgtcttcctgtggtaatacattcacctgcttctgtctcagggctaggattcttgactttcttctgcagaacactgaaacatgcctcctctttcctggccccaccaagcagagtttaggcttcaagaagactgaatgcatctgtacagagcacaatcccttctccaagaaggaaaccatggggcttatcaagaaaggtctgtacttttactgtcaggcatcctcagccctgctgaaatatgaaataaatgaggtggagtttaattttagggtctacaaatctgtaatgtgttcatcattcctgatgccattttacatggcaggctggtgttgtcagacatgttttgtgaggagagctgcatttgagttctggtttaatgaagccttcgcatacaccctcccaggtccctcctctaatctccacttaccggagaaagagatgccacttgtatgaggggttttcactattggaaatgcacatctcttttgctttcctaggggcaggctctttggggggattttcctaagctggactgcaggctggcttcccagcagagggcgcactgccccagtgccatggcccagagcagtttcctcctcttttgggtggacttccctccccactaggctggttagggctgagaaggaatccaggagaaatgagctttcagcaaaggaggacatgaagatgagattaagggagaaaatcaaatctaatcatttcagatctgaatcagtgacttttaaaatgaaaggtctacttggctaccgt

SEQ ID NO: 5553 - DNA, 494 bp, mus musculus
caatgttgtctgcatccgtaccttccactcacttccactagctagaagggtagaaaaggaggaaggcactaagtgagaaaaatggtcctatttgtacaaaaaagtctgtcctttgaccagcatggcctaaatctatccagaatttcatgatgtgaccacatcaattggaggcaataaagaacattaatgggaaggcccccttactgtgtggagcagtggtcttggaagcctcaggggagatagttgcagccacctggtagattgtctaaatatggtacagagcctgcagaaggaataggatgactgttctggatgccaacagtaacggtcccatgagtaagtgatgtctggggttacctccactccctcaggtgctgtagcctgaagccagcactgtgattggtcagaacatgggtggataagcatggatcacacatagttcaagctcaaggctggcagtggactataggtagtccagagtcctaaactccttc

SEQ ID NO: 5554 - DNA, 149 bp, mus musculus
atattaaaaggctcttatcttctgacttagcacagttctcagtattcattacggtgatatcttgctgagtggaaataatgttttatataggctttttgttgttgctattgttcaaggattgggagtcctattcaagcttcataggataa

SEQ ID NO: 5555 - DNA, 998 bp, mus musculus
gatgcagaaaactatgatactctggatctggattcctgggtctgaatcttggctctatcacttattaacagtgtgtgaccttaggcatgttatttaacctctcttaacctcaatttattttcactttaaaaaatgtggataacaaccttgactgtgttgtagggttgttttgaggattaaatcagttaatgtgcatgaaactggagggtagtgtcttgcatttagtgaacacctccaaaatcttagccattattaataatattatccagaatatataaaaattacttaaattggccaggcgcggtggcttacgcctgtaatcccagtactttgggaggccgaggtgggcggatcacgaggtcaggagatcgagaccatcatggctgacatggtgaaaccccatctctactaaaaatacaaaaaattagccgggcatggtggtgggcgcctgtagtcccagctacttgggaggctgaggcaggataatggtgtgaacccgggaggcggaggttgcattgagccgagattgggccactgcactccagcccgggtgacagagcaagactccgtctcaaaaaaaaaaaaaaaaattacttaaattaataagactaacagtccaatagaaaaggagtaataggtatgaattaataatagaggaatttgatatggctaataaacatataaaagatgcccaatgtccctggtaattacacaaatgcaaactaaaacaatggtaaagtgtaaatttatacccatgaggtgaaaaaatctagaagtgtgaccttgcaaaggtgtgggaccacgtgaactctcacacactattggtctgagtgtaaattttcaaaatgggtgccactaattaagagagtaatttggtgatgtctagtaaatctgaaaatacacataccttacaactcagagcttccattgctgagaatgtactatagagaatttcttgtaaatatacataaggatatgtgtaagaatacttactgaag

SEQ ID NO: 5556 - DNA, 990 bp, mus musculus
gatcctgatcaagactctagagacaggccactggtttccctccaagtttactcctcattcactgtctttctttctttctttttttttttttttggagatggagtctcactctgtcacccaggctggagtgcagtggcgtgatctcagctcactgcaacctctgcctcccaggttcaagcgattctcctgcctcagcctcctaagtagctgggactacaggtgcatgccaccacatgcagctaattttttgtattttaatagagatggggtttcaccatgttggccaggctggtctcaaacttctggcctcaattgatccacctgccttggcctcccaaagtgatgggattacaggtgtgagccacctcgcctggcatatactgctttctttagcttccatagcctcaaccgagagcaagagaataaggcttctgacattcttcctaggaagctttacggaacagattggaaaattcacaacaagccctaagtggcccatagtggattagtggggactgtggccgtcaggactcccccttagctgaggcttctgtgtcttctgtgtctgctttcttagggccctttagcctgtgagctcttaggaatgcaggaagaccctctctttccccctgggtggtaacaaaatttcccctggtccatcattcctgagccctagttcagtctgtgtgcggccaggtcagcgctcaatagggttccaaacctgttggctgcaagcacagactccctctgagtgtgaatgttatctctcaccagatgagggatgtgctcagcccagatcaaacacttgtttatctacagggtggtgagagccaaaactctgcttctgtttctccctggtggtttatttgcttacccttatcacctctgagcagtggtgttgtttgcatagagttctcggtttctggcatgttaaatttagaggtaccccaggcttctcggagggatcagagtgttgagcaactcctcagg

SEQ ID NO: 5557 - DNA, 1322 bp, mus musculus
ccaaatagaagctgaaagtgcaggttagaaaggaatagagatatgggaatcaattttaaaaaggattaaaatgaaatcttcaaatttttccttatttaattagtgataggagaaggaaaagacccagaaatgataataaagctgctaggtagaaaattaaaggaaaagaaggttttaagaaagagagagtagaccgggcaaagtggctcacgcctgtaatcccagcactttgggaggccaaggtgagtggatcacctgaggtcaggagttcaagatcagcctggccaaactggtgagaccctgtctttacgaaaaatacaaaaattagctgggtgttttagtacgtagctgtaatcccagctacttgggaggctgaggcaggagaattgcttgaacctgggggatggaggttgcagtgagccaagatcgaaccactattgcactccagcctgggcagcagagcaagactctgtctcaaaaaaaaaaaaaaaaagtgggtaatgtttacagtcatgtttgaccataggcagcctcagacttctgtgtctccacaattaccattaggaagttagaaatgtcacaagatattatttcctccgtagacctttaagataacagtgacatccagaaagttgccttactcttaaaggactgatcactgccattactttatatataatatttaagggtttcaggagaaacaaattaccatttctgtagttgtttaaggtatttacagtattactccccaaatggccacttttagtaatgattatatttactaacatcaactagaaactatgtttgatttttctactcttcttgtacataggaagaaaatgccaatcaaaaatgaaagtcagttaaaaccacttgaaagcaatgtctgttcctttttagaatggaaagttggaggaaacttcagcctctcctcttagataaaatgcatgccccaggttaagaattccaggtgtaagaatactttgtacctttttgccacatagttccataccacaagattcccttctcagtggacactgaggttgcatagggaatagatcaccttccttctcagaattcttttttgtaatgaggagaacgcagggatgcaagctagccccctactccagggtgtggttgagaaagggctcccaggcacctgagatgccaagagaagtgggtcattcccttcctgctaagcagcagaggtttttgccaaggatctaaattccatcttggaaactcatttctccatagaaaccatttcacaaagagttctataaacaatggccttcctgcaaaaagcctacttaaattacaat

SEQ ID NO: 5558 - DNA, 1285 bp, mus musculus
gtcccctgaagcggggccagctgagcttcccctgccctagacctaagaggttctctgtcccagggttgtggggtttgggagattggaggtcaaagttggaaactggctttccacccctctgctgggggctggagcctgccctttccatggaggggaggtggttgggacagtgagggcaggcaaggcctcccagctttcccaggccccagccctggttgcttcacttgctggaattgcacaccgcatcaggcctctgaccccctagagaaagtctgggggcaggggctgggagagcctggtctggagtctccagggtcccctcaggcctctgggcaggcctatcccgtcatctgccagcaggtccagaacatccatgggcagctgtgactctggccactagaatgcagcttcaaaagcagcttcaggttccggtcccagggtcaagcctggctgtgtgagccctgatcactcttcctgggaatctctgggagctagacaccatgtggacatagctggatctgcagagccaggggtacccacagggacagtgccaggcactgactacacaagcaggggaggcctgtgtgtgccaggcagaggagctgggcctagggagggggtcagagctgcctctcagggctgagctgggcaaataggttcttactgagggctgcccccgtctgggctgtcagatgccaccccagatatagtatctcttttctcctcctgtccacactacacacagcatagtagaattccagcttctctcactctggccctgctctctgccttctgtttatagccctcctctttcagatattcaacggctgcttccgcatcatttaggccaagatcacctcctcaggggggccctcccttatcacactagctaaacagcagcccccagcccattccccactttacctttcctcatagcacttatcactacaagacaatatagtcaatgttcatttattctctgtctctcccactggaatgtgaactccatgagggcagggactttggcctgactagtcccagaattcccagtgcaaacaaagtaggcatgcactaaatatgttcgatgaacatgagcaagcatgcacatgcaactgacacacgacaaacatgtgcacacgcagacacacaacacacatgcatgcacccccgcacgcacttgtgagcagaggcattcgcatgtctcacttggctcagctcctgagagcctgagggaagcattatcacccacactctcccactcaggcagcctgcagtcggactccgc

SEQ ID NO: 5559 - DNA, 649 bp, mus musculus
tctacaacaaccctatgaaatacaaagaaaaccaagaaacaatcacatcaaatgataaccagtaagagaacagtcactgccaatctcctaatacagggtcttgcccatggtccttaagaagagctagtagaaatgccttgcccatgttggaaaggtatccgattgctgcactggtgtgtagggggagcatctcacttaccagggactgacttcttccttgattcctttgtagtgatggaaacttccctggggatggatacttccctgggattgcaatctccaagccagacattttgtctgccacaaactccagaattctccaagtccttcagtagcagaaatacccagacacttgagagtaacccatcacctgagcttggggacatttcaataactccagtccagagtcctactaatctcttgacactgtctccagctccaagccaggaaaaaaatgagaatgagaatttggatgagattaaaaccaacctttcaaagcctctagatgtccaccagatcctaataggaaatcaagatcctccactacttcctgtagaaatccccgatattcacccgcttctggcctgcattgatcctcttggccaagaggagcagcctggttctgaaaatgccaatctaagaaataaga

SEQ ID NO: 5560 - DNA, 1416 bp, mus musculus
ggaggcctccttatgttgaggaccctggtttcccaggccttggggtgggatcaggtggtaaatacatgaatatattacttcccatattcgctttgatcaggaacagggagcagagccagtgtgagtaaagaaaacagcaaagaaaaatttgcagcttgcagcttgcagcttgcatctctggttgtcaggctgctgtgcctgctgtgaatgaaagggacgttgccctcctccctcagcctccctgcagcctttccttgctctgcagcccaggacatcaccagcatataatcaatagcagcccacaggccacacgggtggtcctccaggcccttgagcatttagtggcagtaatcaatgcagtgttccccctaatgatgagagacatctgcccttgattgccctaggttacaatggctgtgtcatcctgtcctgccacttgggccccgagaaactactacttcaaagatagtataatactgtgcttgctgtgtttactctttaggtttactttcccttaactctagagtgaatcctctttgctgtttgccatcttttctcagatgccttggtgttgagacaacacagaaggacatggtaaactgaaaaactggaccactgtacagctgatgttatcctggacaacgtgtaatctttcctactgctccccattccatcttagcccctttttcacctctttccacatctctttgtttctctaaaattctgggtgcaatacgtcagctaattgcctttacatcttatttgtaaaatgggattccaatattaaagaggaaacagtgtggtcgagggtaaagtacacacatttaggaaacatcaaacgccagcttcagacctggccctgccatctggtaactgaagacttggtaaagttattgaacctctctgaacctctgttcccttatttgtaaacttggaaacaagtcattacaatgccgagtcatctttcagtgacaatgcatgcatggtgcttaatatcattgctattatcaccaccagctgatttttattattattattatttttttggtgaaaattagatgagatgtgaaagtactttgaatacattgctaaataagttgtaaaatatttgcctacttttggccaggtgtggaggctcatgcctgtaatctcagcactttgggaggccgaggcaggcagaggacttgaggtcaggagttcaagaccagcctggccaacatggtgaaaccccatctctacaaaaaatacaaaagttagatgggtgtggtgctgcgcacctgtaatctcagctactcaggaggctgaggcaaaagaatcacttgaactcgggagttgaaggttacagtgagccaagatcgtgccattgcactccagcctgggtgatggagtgagactctgtttcaaaaaaaaaattgc

SEQ ID NO: 5561 - DNA, 1072 bp, mus musculus
accacccagacaatcctaatcacctcacagaaccatgagaagtaataacaaactgttttatgccactaaccttgggatagttttctgtgtaccaataggaaatcagaagagtagataatggagaaatcatcagtaaagtttgaaggggagagtaatgataaattcatattcataactgatcattttgaataggtagggacatagagtcaggtaatagaagataaacacccatgtcttctgctcccaccatacattcaagtttatctggaatttgaggactgctggacaaaattgagtgaagttcattctcctgtgtacaattggtattatggagattcaaaacgatctaccaagaggaagagagaaagggccaagcccttgacgattaaagtaccagtttccaattctgatggccagctattaagatagcctccaggcacacctccggcattcatggttgggcaaaatcatctgaaaacacagtacactgtggagtatcagctgtttactttcaagatggtattgccaccagggcagtgcttgctgcctatgctgaggcaacatgagagagtaccgtactgcatactgctagcccagtaaaagaccagtattcaaaatctgatataagccttctagggaatgcatatcactttcccaccatgatacggtagaaaaattataagtagaactatcataaatcacagaccatctgtgtagggaaaagtaacctcttcaggatattgaatctgtctctctaaaacatgatatatttcttcgtatattaaagtcttctttaaagtttaaaaagttttacatggtcttgactatttttgtcggatatatttctagatcctttatatttttcttcctattaaaaacagtatctttcttaaaaataccctttctaactctattgttggaatacaaatgttcatttgggatttatatgttgatctcacattcttcttgtttactaaatttatccattaattctaacaactaatttgaagagtcttctgggttttctatggagacagcatgtcatatgcaaatagtgacaacttaatttact

SEQ ID NO: 5562 - DNA, 1460 bp, mus musculus
atttgtccaaatttcctttaaatgtttaactttctttctcactaccgagctgacctctttcctatcccttctggcctctgtgagctccgccctctttcccagttcatcatgagctgggaaattcttacatcaatgctgacagaggaaacaatgcacctacttcataagagaggattaatttctttcttttgctccaagttttcaaccttagagtgtttatatttttcatatactttgacctatggaatattattaatagatttcctgatattaaatattcctttactctgtaattaaaattgctaatttatttatttatttaaaatatgacttaatttcttatgccagcatatcatttggaatttttgaaattatattcataaactagattagcatataatttctgattcctggattcattcattcacttactaatttatgtatcattgaacaaatatgaatcgtgcctggctttatggaatttatagtccagtaatagatacatataagtatccttgaagaagtgacatccaaactgacctctgtgttaattagaatggggcactgtaacacagagatctgattatcttaactgactcaaatgagagatagaagtttcttttactcctacacggcagtctgaagtgaagcatataggcctagtggggtagtcacaccaacctcaacatgcgacccccaaggttagctccattcctctgcctttccaggccagccatcaagaatatgtacacggagtctaggacaagtgtccttacggagatagcctgaaagttgtacacaagtcttctgctcacatcctatatccacacttagttgcaagggaggctggcaaatatactctgtattgggcagccgggtaattggtgaaactgagggtaccacaaagaagaaaggaagactggataaaggagagcaattagcattcgctgcccaatatctaaaagagtaaataggaactaatcaggggaagggtatagggagtaagaaagactgttctatccaccttgcagttccaaagaggatactgagaagcaaatgggcagttttgtaatgcagtgttggaaatacaatgaaaaggtatgtgcagcgtactgaccactgaggggcacatgtgaggggcacctaacccaagcttggaaggcaagatgagaggagctttcctatctaggctgaagtctgaagagtgaagtcaatcacccaataattgttggaggacaaagaagcatgaaatttgaaggccctgacataaggctgagcatagagtgattaagaaacgtaaaaaaattagtttggctggtagacccattgcagggaaagtcatgacaagaaatgaggctctgagaggttagctagaggaagatcatgctttactgaaagctaaggagattggactttattctaaaggcaagaaggatttgttcaagggttcaactcaggag

SEQ ID NO: 5563 - DNA, 713 bp, mus musculus
aattagccaattatggtaaaacaaaaaataatttgacaataaagtttatatatgcacgaatgacctctactcttttataaatcagtcacagtgattccaaagtccatgtgaggaattaaatgtttctcactttaagcttcaggtgtgatgtgactccaggagcattctaagtcaagctgaaatgcttctatttaaggattgctagtcaagtatccctttctttattcgggcacatattaatgtgtgattctcattgaggagagctctctgctttgatccataaatcaggaaactgtaagaaattcgcattgccagaaactttccaacttgaagtcagaactttcgtatcattaaattgatccactgatacttgttttgattaaagcaccagctaacttgtaacagcatctgcactcagtgatatgactcaaacaagcataatgaatgcctatcttttaattttttatgaaaaggcttcataatatataattaagatgttttttacatgttctactgatgagccatctgcaggtatgacatttagcatctgtacttaaaagtagccacctgttacggtctggttatcctgactgtgaatcatttcggataaatggaagttggtatcatttagattcagagttcctcatgaatccctcatctttttgacatttattattttattacaggctatctttcagggattttttaaagtt

SEQ ID NO: 5564 - DNA, 789 bp, mus musculus
ggagaccaatcactgtcagcttccatcattgtaacaatgaagtagtatttcaaaatgaaagtaatataaagatattttttgacaaaaattgacaggacatgtcacctgcagatactttctagagaaaattttaaatgttgtgttgatggaagatttgcatttcaaaaaaagaagtaaatgtacacaatctgttaaatatttaggtaaccaaatagattacttgcagaaaataataatggattgtagagtttaaattttaaaagaaaataattaatatatatagcaattagtatgtaatttttgatgtggaagaatggaattaaagtgttttacaatctttgcaatttggaagacaaagtaaaatgtattgattacacttgcagattgataaatcaagtgtgtattttgtaatggctagggctcataatacacaatagaagaacttaatatttactaaataaaaattaatatagaatatggaggagaagatcaagcagattaaatttggatttttgagagactaataaaattaaaatgtctctggcaagactcaaaacagatggaggatagggaagaggaagtgtctgccctcacacatcagaagtgagaaagtttctagttatataaactaaagatattaaagaacagctccaaaattttagagacaactcaagtcaaaaattgggctttgaaaatgatgtgagaaaaacattaaaaaatcttaattgcttgataattaatatagactctgaatagtcaaaatcttctaagaaaacttcaaacttagat

SEQ ID NO: 5565 - DNA, 1081 bp, mus musculus
acgttagtacattccttattttaaaaatgatagacttcatgtgctgtatttctcaaatgaaggcgaagaacacctacgttgttctcaatgttttatttcaatacttaaggtatccaggacataataagtctttcttctaaaattaagtaaactgagaaggttcttcattctaattctacttctctgactcatttgttcaagaatagaactcttgggacagccaaacctgattctctttttatttcctccaaaggcacttctctaaccaactgtattccaccttaagggaatcattgcttatccagagtcctcgtatgacctgttgacagtggtttaaatatatccattcaatgaagcatgaccacataaagtattggtcaaactttgatacaaaaactgaaaattttgttaaacagccagattaggagtcagtaagtctgtagggcctgagattccatttttctaataagctgtctcatgatgcagaaactgttagtcatggaccactatttgagtggagtgggagtcaagagtactcacccatggtctggcctacttctgtatgaactaggtgaaagttcttgcattatgtggcaggtcatagctgtgtttttttgtgttttttgttttttgagacagagtcttgctctgtcacccaagcctgagtgcagtggcatcatctcggctcactgcaacttctgcctcccaggttcaagtgattctcgtgcctccgccacccaagtagctgggattacaggcatgtaccaccatgcttggcttatttttgtatttttagtagagatgggggtttctttatgttggtcaggctggtctcaaatgcctgacctcaggtgatccactctcagcctcccaaagtgctgggattacaggtgtgagtgaccacgccccatcaggtcatttttgaacagctattatatggttctggcatctatcagaaaaaataaatatatataataaggcacagcctctgcctttaagaacaaaccataatctagttagaaagcatagctctaaacataaacttggtgccatataactgactaggctgatgataatgaca

SEQ ID NO: 5566 - DNA, 617 bp, mus musculus
gcagtgtctcctcaggaggtttctgtccacaaaataattttacgtttatttttgcaatatttagataaatctttgcacaaagtatctccagattgatgctgatatactaagatccataaatattcaccagttctaacccaagtatccttttccggatacatgcgaaatcattggatgatgtctgttttgccacctccatgtttcatcaatatcttactatctccacaatgaccagaagagaaatgcaattaccctgtcagccatggcttgatttctgatttccacagagctcaagttttactaaagaagacttcattattttgttaggcataatagcacagaaggagttccagcttcctcctggagctgcaaactgcagcaagttggagtgaatttatttctgaggtttgacaattcttcaatgttaatatattttcagtctaattttgttatacattagcacatgctcagaatgtcaaccacccccttattgcagatcacagatttaggttaagtttgtattgccaagtgtttgctaaagagtaagtgccttatgccttgccaaatttatcgatttgagttttgtttgatttagctcaacattagagaaagtgagt

SEQ ID NO: 5567 - DNA, 792 bp, mus musculus
tccaaggattctaaaaagtttatctgttgtaaaaacattctccaaaataattagaataattattctattagatttttctattaggacaatatagcatgatctttcctaaaatgtgttttctttgtttctgccttgaatctgattcagcctttgaaatcaggtcaagaattccgatgttcaagatctggtcatttattttgttttcaaactcgaatatatgcaaaaccctacccataacactgaagggctattaccaattcccctaaccaccaaatagtcttaatcctccattttgaggaagcatcagttctatcccagctctgctgcccataaaaagatagcagcgcgaatcagattctctcttccccacagaaccaggtttcttttttttttttttttttttttttttttgagacggagtctcactctgtcgcccaggctggagtgcagtggcgcgacttcggctcaccgcaagctccgcctcccgggttcacgccattctccagcctcagcctccagagtagctcggactacaggcgcccgctgccacacccggccaattttttgtatttttagtagagacggggtttcaccttgttagccaggatggtctcgatctcctgacctcgtgatccgcccgcctcagccccccaaagtgctgggattacagtcgtgagccaccgcgcccggcccagaaccagatttctgagacagaatgatcagggtcagagatgacatttaggatgacaagtttaagggtaagaatgttgcctatcctgggttgaaactgtt

SEQ ID NO: 5568 - DNA, 609 bp, mus musculus
actagttcccagagagttgctcgtacagtttgggcacatagtcgtcccactcagcctggtaacacgtgccagccaccggggccccgagctcgtactttttacggaaggacaccacctcaaatttgccacggtggtctccagatcggttgctgaggatgggctcgtcacactttagtggcctgtcctgctcataaaccagccagacatagcggtggagacctgtgcccttgggaggccccgagcccacataatcggagaggagtgtgtcactgctgatgtcattgcccttcatgttgaccaccaggaaatgatgccattctctgtatttgggatccttcctgctgggagcatcagggtctgtcaggaccaaggtgtagagcttccctgaatcaagaccatcccactaaatgctggtgggtctattcttaacctgggtgggcgtcagcactttgcccagctcgtccaccaccgcccgggcgtaggtgacatgcagcaggtgctgtgaccgctcgtccatttctcgcaggctcaagggcccggaccacttgctgaggtccaccggcatggcaaggccaagcagagcatgcagccgggagtgccgcggtaggc

SEQ ID NO: 5569 - DNA, 2495 bp, mus musculus
tgaacaaatttatttccacttggcagtgaatttttttttttgagatggagtctcactctgtcacccaggctggagtacaatggcatggtctcagctcactgcaacctccacttccagggttcaagcgattctcccgcttcagcctcccaagtagctgggactataggcacgcaccaccacgcccggctaatttttgtatttttagcagagatggggtttcactatgttggccaggctgatctcgaactcctgacctcttgatccaccctactcggcctcccaaagtgctggggattacaggcatgagccactgcgcccggccttttttttttttttttttttaagagacagtcttgctcttttgaccaggctggagtgcagtggcgggacttgtagctcactgcagccttgaacttctggactcaagggatcctcttgcctcagcttcaagtagctatgattacaggcatgagccactgtgcccagctgcagtgaatcttgagagtagccaggagtgtccagtggatagtgtggttaggttcttcattcttctctgaccaatctgccctgctaagagtcccaggagattctagctgaatagaaagtcggtcttatttggtaaattaaactgtatggcttagggaaataccaggaggctgggaaagacactagcttttattaaacacctgtcacctatcttcattctttcgtgtcccacattagggtattctgatgatatttttgttttgttttgttttgttttgtttgtttttttgagaccgagtcttgcttcattgcccaggctggagtgcagtggtgtgatctctgctcactgcaacctctgcctcctgggttcaagggattctcctgcctcagcctcccaagtagctgggattacaggtgcccgccaacatgcccagctaatttttgtatttttagtagagagggggtttcaccatgttggccaggtgaactcctgacctcaagtgatccacccgcttcggcctcccaaagtgttgggattacgggtgtgagccactgcgcccggcctctgatgaactattttgactgtttttttctctccaaacccaatttgttactgtcttatgagtaaagcggacagtgtaactttgtacctgaatctcatatggtatcctctagcatctgtattagtttattcagcattcactcatggtgctaggttttagagcagcagggataagaaacacgatttttctctttgaagaactcccagtctggtggggaaatagttatgtagaaaggttgagtgtgctggcagaagcctgtggtctgagctacttgggaggctgaggcaggagtattgcttgagcccaggagttcaaggctacagtgagctatgattacaccactgcactccagctggggaacggaggaagaccctgtctttaaaaatcaataagcaaatttcaactatctttttttttttttttttgagacagagtcttgctctgttgcccaggctggagtgcaatggtgtgatctcggctcgctgcaacctccgcctcctgggttcaggtgattcttctgactcagcctcccaagtagctgggcctacaggtgcgtgccaccatgcccagctaatttttttgtatttttagtagagacagggtttcatcgtgttagccaggcaggtctcgagctcctgaccttgtgatctgctcacctcagcctcccaaagtgctgggattacaggcgtgagccaccacgcccggctcaactatcttttttaagaaaaggtaattacaggtgttaagtgctgtgctatgggaggggagcatggagtaaggaccccctcagctgaacatgtgggaggtagatcagagatcagagtggaggaagagaccctgagttttaggtagaggtggaggcaggttgggatggggagtaggcattctaggtagagaggacatggtgggcagaagagaaaagtgcctggcatagtcagagactgcaagtagctggacccttggactcctggggtcagtggagagccaaggtgtagatcctgagggagggaccagatggcctgctttataagctaccataaggagcttggattatatcctgaaaaaagctggagtcattgaaggcttttatttttttttgagatagagtctcactctgttgcccaagctggagtgcagtggtgtgatctcggctcactgcaacctctgtctccccagttcaagctattctgccgcctcagcctcccgagtagctgggactacaggcacccaccaccatacctggctaattttttggtatttttagtagagacggagtttcaccacgttggtcaggctggtatcgaactcctcacctcaggtgatccacccgcctcggcctcccaaagtgctgggattacaggtgtgaaccaccatgcccggcctcattgaaggcttttaacaaagatgtgacatcagacttatgaatttgtttttaaaacattattc

SEQ ID NO: 5570 - DNA, 2495 bp, mus musculus; identical to SEQ ID NO: 5569

SEQ ID NO: 5571 - DNA, 2495 bp, mus musculus; identical to SEQ ID NO: 5569

SEQ ID NO: 5572 - DNA, 802 bp, mus musculus
gcctccaggaagaaacacttatttacggacaaatctgtgatgccctggtccgacctgggacactggggacattgctcctatgctgagttactgagaagagccagccctgcagctgtgcccagcctgccctatcccctgctgatttgcatgttcgcagagcacagccccctgccctgaagacttattaataggctggtcgcaccctgtgcaggagtcagtcccaaccaggacacagcatggacatgagggtccctgctcagctcctggggctcctgctgctctggctctcaggtaaggaaggataacactatgaattttctcagccagtgggctcagtacagcctggctcttgatggaagccttcctataatatgactaatagtatgaatatttgtgtttatgtttctaatcgcaggtgccagatgtgacatccagatgacccagtctccatcctccctgtctgcatctgtaggagacagagtcaccatcacttgccaggcgagtcaggacattagcaactatttaaattggtatcagcagaaaccagggaaagcccctaagctcctgatctacgatgcatccaatttggaaacaggggtcccatcaaggttcagtggaagtggatctgggacagattttactttcaccatcagcagcctgcagcctgaagatattgcaacatattactgtcaacagtatgataatctccctcccacagtgtaacaagtcataacataaatcacccaggggagcagatgcgtgaggctcagctgtcccagatgccccttctggtgccttcgcc

SEQ ID NO: 5573 - DNA, 1162 bp, mus musculus
tgcctggaacgctgcagctgcacccaccctgcttgatcccacctgggaggccaggacactgaggagctctgaacccagcccacagggaagcagaggaaggtgagcccccgccgccccccagcccttcccatcccttccctgctccctggtggtctaaggacccaagctccctagacttcctcttccaccgtctgtacgtttcaaattacactggtgtaggcctgtactgctggtggggctgggcccctaaacgccagaaagtgaatcttaagaagctctgccctaaactgagaaccacatgctgagggaagggctgaaaggtgaaggctcagcctccctcacatgggtcctgggttacattaggtaccgggctgattgataggcatttggccatggttccttttcgtctacctttgggggccttctcaggcccagaacaaggctgttgttactatgtggaaaagctgaccagtgctgcacactaggggcacacacctttccatgagcagctcctgccctgtggcgacagccagcgtgcacccagacgctggtgccatggcgaagcaggcgttcaagaccatggagaagacaactcctcatctagaaaatgaggacacctcagtgacaaacacacctttttataccaatcagtatcctctgttcattaaaactggctatccattacagcctagccgtctttcctgggccgagaggagcccatgcttcagtcaccagggactgtctgatagggcccacgcctgttagccatgccggccgacagcaagataggccgagtgcagagtgggcgggatgcggggtcctggcactaggcttttgtgcttaaggcacctctgctcactgacgacaaggtcaaagagcagtggttctccacctcagctgcttatcagaatcaccaggaaggtttaaaaagtcctgatgtccagaccctaagtcagaagccctgaggggaggatccaggtattctcatgcagaggccatgcttgtctatgtgggaaatcctaggaatctacagaaagcagacaactagggagtccagcaaaatctcgggtgcaagataaacacacaaaaacctgtttctacctcctagaaatgaacatgtagacacaaaagttaaaaatatgtactgtttacaattgctgaa

SEQ ID NO: 5574 - DNA, 602 bp, mus musculus
ttcttcccttagaagaactcttgaaggcagaaattgggtcttacttgctttcatcttcctagatcccagcacagaatttgcctcagaatgggtgctcagaaaatgttggttgatgttaaattgcacttcacaatcacattaactaggtatggaaaattaaaaaaaaaaaacagagagagagagacatgcatgaaaaggggggggaaggataattcaatgacatgagctaataaaagtaaggatgtactaggaatattgaaggccaatagttttattttgaagctttagaattaagaaacttaaccagaattttctataatataaagaatctatttaggttattattttgttggggacaatgtcatactgatgacacagaatgaggacgtgaggctgtggactccggtcatgaaatcctcatgtgttcatgtgatggaggaagaaatcttatctcttgatagtgtggtggcactgtgataatgctgtgacgtgacattgtacccaaggactctcctggccatatacttcagtaaggccaaggacagtccggtactatcttgcatcatttgccagctctgtaagtttcttgtgattcttttaga

SEQ ID NO: 5575 - DNA, 331 bp, mus musculus
atcattgccagagaaagaatgacttgcacttttaaggacaaaaacaatttgagtgaatcaatgtattgcataacaattgtattctactttcacatttttccataatatcatgcaaatagagatggatggtaagtactagtgtatctgttgggtctgaagaggagagaaaaccaaagtccacatcctctgatattacttgttaaggagacttttgtattttcaaaaaaagattggaaaattatcttgtattggatggcatctaatgacattgtcttcaatctcttcattcctagacatggagttgcaaatgttcttgagtgggatgggaaaa

SEQ ID NO: 5576 - DNA, 783 bp, mus musculus
aactttttaaaatgaaaggagtcaccttttacatgactcaggtgaaaaaacagtataaacattaatttactttgtgttcaaaagaaaattccaactgctgttggggaaggacacagaaaagaaaaataaccacccaagaaaaacaaaaacaagaaaaacaaatcttatacaatcttagtatatttatcaaactagtagctagaaagtgaatatgcacattactaagacaaaaaacaagtgtaattcagaactacttgattttttttagttaaatgcaataattattatgcttagttttataacctgctctccttgtgaattcttccttcaaatgattacttaacgcagtagtaatagctagctgtaggatgtcctttaaatttttgtgcaaaaaaaaatttataccaggtatttggaaatatactttacaatattggaaaatgaagtatttttaatgtattacagcaattatgtttctaagcttaatgttaagcatgtagtcttagaataggacatgaaattaaattgtatgtagcttggaatatattgcttcagaaaactgaatgtgtatgtcggtcatattgcctttataaccatgctaatatctatgctttatacatactcaaacttgccttgccttaaaaacatacatactacatacttaaatcaggaattctagccatctcacagaataccaactaaaactaagtgcattgagatctgagattggtaaacccagattcatttaccacagctgtaattaagtttttagaaactattctc

SEQ ID NO: 5577 - DNA, 783 bp, mus musculus; identical to SEQ ID NO: 5576

SEQ ID NO: 5578 - DNA, 783 bp, mus musculus; identical to SEQ ID NO: 5576

SEQ ID NO: 5579 - DNA, 783 bp, mus musculus; identical to SEQ ID NO: 5576

SEQ ID NO: 5580 - DNA, 783 bp, mus musculus; identical to SEQ ID NO: 5576

SEQ ID NO: 5581 - DNA, 783 bp, mus musculus; identical to SEQ ID NO: 5576

SEQ ID NO: 5582 - DNA, 1095 bp, mus musculus
ggcccaggttcagtccactcctggagctttgaggggctagtgtgtaaagggcacagaagcccttttgctaggtgcactggcctgagagcttcgaggggatttgccaatgggattgtgccacaatttttattactttttccctagtcttcgtggtctaagttttgttttctcaatctttcttttctcatcttccttgtgtggagttaacttttaatcagggaaagggaatacatcgagctattgatgaatgaatcactggagaaaacagtgaagtgggatttttatttcagggtctcttaggtggcagtgccgggtgacaggtgggggtgtcccttgtcttccattgtcccggagactaaccatcagcctctacctaattgaatggcatttttatgtgtttttcatgaacggtggtggatggagatgtgtggaggactagcagctcttcatgctggagggagttattccgcctctgctctcagacagcctgtgaccaggcacgggtcacattgctgccctggacttgcactgtatggcatttgaatgtcatgtaggggcaccgtgtatttcagtggctgtgtctaggcagcccgaaagccactgaatccctcatgtccactctgcagccgacattcactcagcatcctggaaaagtgcccactggggcaggagcttctcttgctcatgtggacatgacggtaagtccttcttggagaggcagcatcaagtcatgttgttcgttctgtggccaggaggtacaaagtcagctgtttctgcttttaagtgatgtgggcttaaggaagagggaaggaggaatgaaggaaagaaaggaattgaggagggaatgaaagaaggagagggagggagggagaggaagggaaggagggagaggaagggaaggagggaaggaagggaggaagggacggagggagggaggaagaagccccatggctttcttgtaaatagcagctgccctgaagtctgtgaagggcacaccaagagtctggctgggaggttgtcagctaggaaactgtggcccaagttcgtggtgagtgaggagttactttcttcccttgaccactggagcaggataga

SEQ ID NO: 5583 - DNA, 669 bp, mus musculus
agtactggtatttttattggttgttttttgcattagttaaaaagcacttcacatttcaatggttttttagccttatagtgaagaagaagaaggccaagagtcaagtgaagagggcagtgaagaagatgtagaggcggtggatgaaacagcagatggagcagaagttaagcaaaggtacaaaagtgggaaaggatatcaaagtaggtttaggaaacattttatttgtttatttttattattataactaattcaatactttcttgaaatggagacaacttgtacctggagagcttttcatactattgtctgcttaaagatcattactgttttagttttgtaattatttttaatacatttagctctacctcgttttcatctggaaactgttagattttcaaaacttactgatgattatcaactgtgattaaagaagttccctaattgagtgaataggcataacctgacctgactcactttgctattttgtctccccagaactgatccccactggagtgctgttcagaaagcgatttcagaggcgggcatcttctgtcttgttaatcatgtctcgttttgctacctaatagttctgatgcgaaataggatggagactgtggaagacaccaatggatctgaaacagggttcagggcatggaatgtacagagcag

SEQ ID NO: 5584 - DNA, 833 bp, mus musculus
gattttctttcatagccaacattgaagccgcgtctgactcctaattcagagttagaaagccacaagacctccaagttctctcctctcctctcctggacacattatagatttttcagtatcctcaactgaatgcaagactgtgttccggctagtgcagtatgcaggagactatgacccaggggaggcatgtcacataatcattaagaatagagagacttggcttctaacttggctagatttcttagtagctgtatgactttgggtacattctgtcatccctcagagccgctgttttcttacatgagaaataaaattaatggcccctaaagagttgtgtgtgggacgggtgcagtggctcacgcctgtaatcctagtactttgggaggccgaggcgggtggactgcctgagctcaggagtttgagaccagcctgggcaacacagtgaaaccccttctctactgaaatataaaatacaaaaaactagcccagtgtggcagtgggtgcctgtagttccagctactcgggaggctgaggcaggagaatcacttgaacctgagaggcggaagtttccatgagccgagatcgtgccactgcactccagcttggcgacagagcgagagcgagactccatctccaaaaaaaaagtaaatgtagcgtgaagattaaaaggttactcaggtaaagctcttacaactttagcagaaacagaataagctctcaatatttgtaccatataaatgtgacatggtgggtgtgtaaaactcctgcaaggagtactgtgattggcctaacatcagatgcaaacacagcaatggcttcatgcagtttagtgg

SEQ ID NO: 5585 - DNA, 833 bp, mus musculus; identical to SEQ ID NO: 5584

SEQ ID NO: 5586 - DNA, 628 bp, mus musculus
ggattctggatattttagtattaatatgaatattatttcagttctgagatacaattaaaattatttgcaaaccagtttgatctctttgcatcttgcttttaagttttgtttagcagatcacagaagtgcttagtttcagtctaatttttccccaatatggacacaaaatgttatgaggactccactcaatgacctgtgaattatgaggcatggttctttccttaactcaggtagttttgtcgggtaaagactcaaagggatcctcttcagatctctggagtgctctgcctatgcagtctttccatttccagtactctgccctataaactcatgctgctttcactttccaggactttcaacaatgaatttcttcaactcagagatacctcaggatcctacctaatatgttgtctcttcaccatgtcctagggaatctctagccagtaagatcaggcaaacttgagcctcaactaattttttttttttttatttctcagagcagtatccttcattggctgatattcaatgtcttaagaattgatgtttgatacattttatttggtttcttactttggttttcattttgctttttattttagttgttttaggcataatggtaagcccagtc

SEQ ID NO: 5587 - DNA, 628 bp, mus musculus; identical to SEQ ID NO: 5586

SEQ ID NO: 5588 - DNA, 892 bp, mus musculus
tctggctcccccgttctcttaattgtatgatgttagtccacttaattaagttccctggagttcaattttctttatgtaaatataataattttgtttatgtaaatataagaattaaatgagataagtataaatgtctaacaaaatgtccttcccattgtaggtgttaagaaatggccctttcttttaatgtactgcataactgaatttttttcttactgactaggttataggtgccttttcccctcctcgttcctacttcctagggacatggtaaacacttaacaagtagtttattgagattgaaaaaatgtattcattctattgttgcttgttggttctatcagaacactttgataggaacaaaaatggtgattttctatatcatatctgtatctttgaagacagttatctacccttttatcatatttgtgcttccagctgtgccaagagcaaatgttatagagttaaaacgcgggtgaggtgaggcaggatctgcagactgtggctcttatctgcttaatgatgtgtacagtaagtgtcatattaggaagaagaacaggaaggctcatctttttgaagcagaaacataatgttcagtataaagaatctcatatcatgttttctaaaaaattgtatgcgaaaaaaatggtgaaataaaatgcttaaggagagacatctgttctctctgattctttaacccactttagacttggagaagcaaagaaaagcaacagtttaattcttgtgtttctttaggtccagatctttagctcttgcataaaagtgagcaagctgccatctgtgcaaacaggtggcttgaattaaatatgatgctaagtattagaacaattatatttctagcatggcaggaagtgacaaaattaagaaaacc

SEQ ID NO: 5589 - DNA, 892 bp, mus musculus; identical to SEQ ID NO: 5588

SEQ ID NO: 5590 - DNA, 892 bp, mus musculus; identical to SEQ ID NO: 5588

SEQ ID NO: 5591 - DNA, 892 bp, mus musculus; identical to SEQ ID NO: 5588

SEQ ID NO: 5592 - DNA, 892 bp, mus musculus; identical to SEQ ID NO: 5588

SEQ ID NO: 5593 - DNA, 1007 bp, mus musculus
cgaaggctatgaggtgctgaagttcgatgacgtggtcaccaacctcggcaatcactatgaccccaccacgggcaagttcagctgccaggtacgcggcatctacttcttcacctaccacatcctcatgcgcggcggcgacggcaccagcatgtgggcggacctctgcaagaacgggcaggtcagtgacccctacactcaccggcccccgtaaaccctcgcccgcgccctgaacctcccagggaaccagcctcctttctctccacccgcgggctaccctgcgagccccgggaatgaacgcgcctcggtgccacagtatctccgcttcccgatgcgccgaggccgcgctcaccgggacgtagagccaaatgttgggccttgagagcccagagacccccatacctaaactacactccttggccacttgcgtccctgcctgcctctccgtgggcttctcggaaacctcagttctttagttctctccaggtcgcccccttgccctgcagcctcctttcctcttggccctggcccctggctcccacccttccactctgggtcagtgttcatgaagcttcccctctccctatttcccagactcgtcggcgcgaggaggaggggggacctggaaggagttgactaagttggagagagaacatggagctggggtgggagtgtggaccctgaagcagcaggcgggaggcccgtgagtggcgcgcctggtgtgggctgagcaaaggcgcgggaagaggtgccccggctcacctgctcccaccgcttgtccccaggtccgggccagcgccattgcacaggacgccgaccagaactacgactacgccagtaacagcgtggtgctgcacttggattcaggggacgaagtgtatgtgaagctggatggcgggaaggctcacggaggcaataataacaagtacagcacgttctcgggctttcttctgtacccggattaggggcgcggggggtgcgaggcggggtggctgcaggccgcccggtct

SEQ ID NO: 5594 - DNA, 1314 bp, mus musculus
aaccccaagagcactggggaagcaaattcgtttagctgggcacattatcagcctgaacaaaatcaaggttctggtggcaggaagacaaggaaacggatttgggttaggtcaccactgggaccactgtggagaattaggccaaatctccatggttcctcaaagctgaaggttctgcaatgacagcagtggattctttctgggtccttgtcagcaggcgaagctgacacagaaacgttcttggtttctttgccagaaaggtgttatctgagcttccagcagctgctgtaaaatggaaataatggctcttctgccccaagggccctgctgtccagagctctctggaaggtggcaagaggcctccatggcaagcttgaagggatgagatgctaatgtgcaaactatgcttcagggtagagatgagacaaacaaacaaaaatgcacagagagaacagagcttaggccctggacctgtctggcttcacatccatgccactcgcccctcccctcctccactccgtgttgcatggagctgcccctgatgactccattttggttggagatggggcttggccaacggggagcactagcaggagatggggaggtgggaggatgggacaagccaaggttttccctctctgtctacctcgggtagtgtccctgctgcagctgcggttctgccatggctccggcgcctctcccaaaaggcctgctgtggtttctgttttgcccctgtgctacagcccctgctctccagcgacagcactttcctggccttgccccccagcccagggttgtcacatctgacactaatctcagggttgtgtgtttggctgctcagtctcccacccactgtgtaaccaataaccaatactctgcctcaaagtccttctgttttcaagactccagtggtctttgtctcctggttagatcctgactcatacaaaccatacaagaaatacccaaacacccatctcttagctttaacaatgattaccattctgccacatttgtttcatctatttttatttttgtggaaaaaaaaatctcaggcatcataatgttgctaaatgatttcagcatgtatctctgaaaaataaggacattttcttacataacaggcatatttagttgttcacacccgtgttcacaaattaacacacctaacaacatgagcaaaacttccttatggccatcaaatatgcaatccatattcaaattcccccgattgttccaaagatgtctattttacagttgctttgttcaaatcaagatttaaacaaggttcacacattgcatttggtagatatgtctcct

SEQ ID NO: 5595 - DNA, 368 bp, mus musculus
gcaaacacagaagactacacttcccgttgcccctgcagtttggtggggtcatatgactaattctggccaatgaaatagggcacaggtgacacctccctttagcccgaggcttcaccctctgccttttctcttcccctgccacagccactgaggacattctagctgctcaggatgcaaaatgatggagctgctggcagcctgaatccccaagtgactgtgtggagcagagcctccacctgactaccaaaaactaccaggatctggtgttacttgttacagcaacgtaacccaggctctcctgatgatgagtactctgatgaggctcttgcttcacagaggaggtgacaattaagccttgaggagacaca

SEQ ID NO: 5596 - DNA, 810 bp, mus musculus
ttgtataaatacacacaagtccctctgtttcctgttccaaaaagaactggaaattgagacctgccctccatgaaagggcttctgatctcagagggaggtttgtgcaaggtagcagggaccgctctctgagggatggctccagccaggcggctccctgttccgtctgcaggtgaggctggctgggggcagcatccctgcagcactgaggccaggacatctcgcagctcctccctggctcctggtgccctctgctggcatcatcaggaaagaagaaggcaggttggcagttcagggtcaaaggagagttcctgaggcttgacatggccagctcttttcccctgggacagaagcctgcgatagacaattggggtaagaaatagggactgagactccaacagcacacacaacatccttccctgccaaagcaggaatcctgccctctccctacagccacccattcagcctgccctgacatctctccaaatctacagattcttaacctggtttctagaaatatgcatactgggagtagggtgtggaaagggtggggtgagccccttccctccctccaatctcactgtcccaaaatcactaggccgagtccatgggtgtgaccaagtattgggatgctgctcttgggggaggctattgctcagagggaagtgatttgaaaatcaaattggtgaggccagaacattccattcttcagctaagcagtttccaaccagggcatgcaaatgagccatctgaggcataaaagccctggagggttggtctgagggcccttggcaggggcactgtcctaacact

SEQ ID NO: 5597 - DNA, 341 bp, mus musculus
gtgttttatgggacagaaactgtttctagcacttttgatacaccaataatgaagaattaaaaggaaatatgggactctagaaatctaaataatttaatgttctttacaaatattggcagatttgcacctatgattttaaagttagagatggtcttcaagcactacacattttgaagccttgagattaatcactgattgttggaggtgggatcccaagacctgtctcttctttgctctacaatacaaaatattagaagttactttcaaaaaactattcgtcaaaggaaggtagcaatatcagctttattgagatcaaatgactgcagagcacgatttccacc

SEQ ID NO: 5598 - DNA, 379 bp, mus musculus
aagaaaagaaaaaagaaaaggaaacagattctaagaaaccatggcaatgggtgtttgtaacagctcagatatatagccccattgctagggaattgctattggactgcgagtcacacattgaaacagattttagttaaatcaagctctgacatgattgtaacaaaaaccaaatgaaacgtctgccaaaacagaaattgtgtcaaattcctaaacaaggaagaatgtctataatgggtgccacatctgaacagcagttaaacaagttttggtaaagtttacaaaattctcaatggattttttggtgtcattagacaatgtttttcctatttattttaactcatcttggaaattgttttttcaaatatacaagaaagaagta

SEQ ID NO: 5599 - DNA, 1098 bp, mus musculus
acctctcatcttcccctgtgagaggggatcgtgaactattcacaggcctgattttaccagagtggaactgagtatgtgagggacaggaatgtataaaggcagggaaagtagaagggagagaaaccagacactggagaaaagataggattttccagagtatgactatcaaaaaaaaaaaaaggttaaatgcagattttagaaagttacttacctcaaaacactcagggaaaattccaaagttaaaacaatacagggtaggtggggcatgtgacactaagtgccatttagaaggaaaaatgtggctttctactaaatcttgactatgagaaatcctcattaatcaacaaaaagatgaggtaggagggaaggttcaaaacatggactacaactataattctcagttaatttgaagcaccttagtgagtaaattccaacattggcgaaaataattcatttcttttgctaccgaagatagttatccagataaaatgtatgtagatcagatggccctatttgtttcacagtttactctatttttagtccctcttttatccagggaaaggggtgggagagttatttgggtcattttttgcttgagcacagaactcaacagcaattaaattatcatcgagcaaaagtgatattttaggcacagttgtttacaaaacagtaaataaataagaaccactggttcctttctatataaacacgcttctcctaggaattcatccatttcagaatttccccttcactaggcagaaatttgaacttgagatgaggattaggcctttcagaattctttggctgctgcctacatagcaaattgtacacattcaattgatatcaattggtaatgagactagcactccaggccactgttttcagtgttcaaaaccacactgacttccttctaatttcctgttgtgcaaatggagctcttaaatgtggtgctgcattaatagaactcttttcagaatcattttaacaatgacaaaaataatgacacagaggatcaagcctaagctgactagtgatgatgatgataatgatgattcattaccttgattctttgtagaatgtctgcaaatgtagcttcag

SEQ ID NO: 5600 - DNA, 195 bp, mus musculus
attttgatatgcaataatatattttgtgccagccattaattatattaaaaaaaaaggatgaaaagctgcatttgttaaaaacatacaatatttcagcaaactcaacacacagaagtcagtgctagaagctatcttccagcaaatcttctagttgaatatacacagtttgaagtgggaaataaaaataaaactaaa

SEQ ID NO: 5601 - DNA, 611 bp, mus musculus
tgtatctcagggattacccccaacagccctggggtacaatgagccttcaagaagtttaacaacctatgtaaggacacacagccagtgggtgatgctgcctggtctgactcttaccattcagtggcactgtttgttgactgactgactgactgactggctgactggagggggttcatagctaatattaatggagtggtctaagtatcattggttccttgaaccctgcactgtggcaaagtggcccacaggctggaggaggaccaagacaggagggcagtctcgggaggagtgcctggcaggcccctcaccacctctgcctacctcagtgaagttcccttgtgggaggccctggaagcggatggagaagaagcgcagtcacctgaaacgagacacagaagaccaagaagaccaagtagatccgcggctcattgatgggaagatgaccaggcggggagacagcccctggcaggtgggaggcgaggcagcaccggctgctcacgtgctgggtccgggatcactgagtccatcctggcagctatgctcagggtgcagaaaccgagagggaagcgctgccattgcgtttgggggatgatgaaggtgggggatgcttc

SEQ ID NO: 5602 - DNA, 493 bp, mus musculus
ccctccactaattccttttttgattttgagcagataaggaggactctgtaagcctcagagtcatcacctgtaaaatgagactaggaattccttcctggaggagctcctgcattacctaatgcataaagcacatgagatgtctggcatgtggtaggtgatcagtaagtgacacttactgatgcatttcttccttggggctggaacaaagaattagatgtaagtgctccagatttgcataaggctaggattgagtctcttcattacaaaccaatttggggaattataaaagaaaatctttcatttgtggaaatcacttgactgtcattagatccagtcaatctctgagttggaagtttttgaactaaaagttgaccttcctcccctctcaaaccaccaccctgccactgtgcagctaagcttcatctgcatcctcagcaccctctcctcatgcccttgcagtctggctcccaccctcaacaagcctctgcagcag

SEQ ID NO: 5603 - DNA, 954 bp, mus musculus
tgagacttgagagagtacatttctaacaagttcctgggtgatgccatgctgctgcctttagcccacttggtgtggagaggctgtggacatggagcatggagctaggagtaaaaatgggggctgggtggaggaaggggaggatgagggcttgtcacctgggctgatgattgcaccctggcacacttcagctgtactgcatactggtaatagcatccatggtgctcccagcctccaatgggctctgggagctgtctgcatccctcagccagcttagctctctttcccaatccaaatagcagcaacatcctcaacctccaaccgcccacctgccattataaaattcttccctccacccaagcctaagctttctgccagggtctggctgggtttcctcttccttttggcctcccatgggccctcaatacattcatcaccccttctcgatagctcccaccttttgcctttcccacctctttttcctcaaccataaacctgtttggcaccctcctgtcctacagccactgtgctgggaaactggccctgaacctgggtccccttccactgctctccagtctctccccatcctcacaccctgattgcatcgaagaacaaactcacacttgtagtttctctctccttcgtctcatctgttctatgtaatctatcactaccaccattctgccttccccgctctactgaaatggctcatctggagttaacactggccttccgatttcccagtccaggaatttcaggcccagtccagcttgtcctccagaacactttacagtgttgatcaccagtgcccagtctccctatagctctccagattctctttggccccttctcagcctcttttcctggttcctcttcctccatccagtcctcaccaggtaacatttcccagcttctcctctctccaaacatcctgcgtgggcagattgcccaagcctg

SEQ ID NO: 5604 - DNA, 1446 bp, mus musculus
aatcagcagtcaccatggttattctaaatactcatctgatcaagttccttattgattcaactatttcccaggactcccatggtctaaggcagagtcagcaaaccatggcctacgggccaagtcttccttggtacctgtgtttgtaaagaaagccatgcccatttaattatatgctgtctatggctgcttttgcactatagtggcagagttgagtagttgtcatacagactgcaaagcctaaatatttactgtctggttctttaccaaaaatgtttatcagtctctgacctagatagtctctgggtgagtctctctctctactggattttgtgtgtgtgtgtgtgtcccaagtctctttcacgcctgtgtttggattcgctcacgacatcttcataaggtgcacacataaaatgtagcatttctctgccctctgaaaatgcttcttctaagtggcaggtcgagagttgtagtggttaggagcatgggtttggagccaactggtttgtctttgccacatcctgtctgcatggcttaggccctagaagcacaaaactgctttaaagtggggtgtcagtgcctctcaccaaggactgtgagacatgagcaaagtgctgtgtgtcaggtgcctgacattgtgtgcttgttgttggctgttagtgtgacttgtgactagtactcaaacaataatagaacttgaagagtatcttcccttccccaacccatccttgttttggtgatttgaaaagagacttctgaacttctttgggatttggcaactccaaagtgatactcagaactcccgggcagcccgtgtggaacattcagtgcgtttgttcttggagtgtggagggcttttctgtgtattaactctgtcagtccagagaggagtgtgttggcttttgcctcccaggcaagtgtagagccagagccctctgcaggtcagccccatctgcatctcccagccagtgtggcaggggccatgcctgccagtgacgtctcgggaattgtgtcatggatggtgccactcacccgagtcaatgctattcttgtttctgaggtgaattgatctctgtctccagcagcctgacccaaattctgatccctagtgatcacctcttatctaacaggacaaacccggtccacttgtgttctctaatgaacagtaatggaaatctgaggcaaggtgacatttccccttatggtccatccacacgttgttaaccctggcttctctgggctggggtactgtcctagaaaagctgccagctcaggctcaagcagctgtgggctcccagcttctctctgccgacccccatcccactttgcctgctgcctgtttcctccttgacctccaggttctgtgtgcctgttcttccctacgttctgcctgtctcctggttccctgagctttttagtcctggactggccctttggcttctgtctttc

SEQ ID NO: 5605 - DNA, 1169 bp, mus musculus
ggctggcctctggaagtcagtcggcaagtctgacaaatagctcttgggtgtctgtggaattgctttttgttagaggcataatcgttggaccacttgctgttttagcctttgtgtaagaacagagtgtgttccttcagcggggctgcatcttatccattcgccttgcacatatttatatctggatggattcggcgaggccagtaaatggtctctctgctttcccaagatagggcagatttttacacccacatataatctcttttctgagaatattgtccaaaaactaggtcatctattgtaaaggaaattagatggtaattaaatttagctggaagttacagtattggtggtttcattttaaagagagtgtgcttccctaattactttattgctacagttatactggttggtttttattttttgaggggggcatggggtggtgttggaaaaggttgtatttagtaagttagatgatgaattctggacttgaatttttagttggcagagtcccacgtccacgtgcaagtttcctttcctttgtgcccttttcagatctacctgacagaagtcagctctactccctgcgcagtcattcagctcagcctcctcgggatatcttttgacaagagagccatatagacagatgagactaggctagcaagaggcagctgatttcagtgggttttcctgtatgcggtccctggttacagctggatgggacctaaatgatctcgcactgtgtccctcccttctcattttccgattagaaagggcacaaagacagaagcccggcagaaggccagcttgctagtggagcgtcagagctcctgggagagcacaggtcaggtgacaccctattcagtgacctgtcgtttgccacctttgatgggtggccctgaggtcagggaagctgggaagagttggccccagctgggatttggcgtcatcatgcccacaggaaatgctgagtgacaggacaaccttggaacaggctagcaggcccttgccttggtacatgggttacgtgacttctgcactttttcttagcgctgagattcacagagatcactcgatcccggggagcaggcccaaagtgctcatggctcaccacttgctctcctccttgcccctcaccatgaacgtctttgacatgaggctagctgcctctc

SEQ ID NO: 5606 - DNA, 1314 bp, mus musculus
ggcagagactaatgccacaaaatgctccagcagctcctgctggggtgggaaaggctgagctaagaaggtggaggttccaggccttttctccaaagcccagagcttcccttaggctgccaagattgcacttctgccatctcaccaaggcctgtgctgtcacagagaggaccagcagaggcaacaagtttgtgccttagcagaaacccatcatcagaaacatataaatagcaaacatttacaaaaaagaaaaaaaaagaatgctaacattctgaagtggtaaggtcagggacatagctgggtgaggagagcaacctttaaaaatagatctgtgaaaagactttgaaaacccttgttaaggacatgtgtggggagccagctgttctcagggtatacatgccatcctacctcatttccttggagtttcttttttcttttttttgagacaaggtcttgctctgtcatctagactggagtacaatggcatgatctcagctcactgcaacctcctcctcctgggctcaagcaattcccctgcctcaccctcctaagtagctgggcctacagatgcatgctaccatgcccggctaatttttgcattttttgtagagatggggtttcgcaatgttgcccaggctggtcttgaacttccgagctcaggtgatccacccacctcagcctccaaaagtgctgggattacaaatgtaagccaatgcattcagccatttccttggagtttttagccccacttaccactttctctttcagggaacttctggaaagagtatcatcagggtagagacagcaattctagagaagaagctgacatccagtattgtccatgcccaagaagcagctgctgatctgcttcaatttttctaatttctggggaaaaaatatttaggcaaatcaaactaaacacacaatgagaaatatttttggcagtgttttttttttgactttttattttcatagaggaaaaataattggaaacattgatactgacttctgtgaagtcgacctgtgaaaatgaagtgggaccaagagggaaaggtgttggatcttaattagtcagaacattgtgaaggggagaggcaaggctcaacactgtgttggatttctgttttgctctctcacagccccactgtctgcaggcctcagcatgtgtaaccccattctgcgtctgctcctgggcttggctggctggtctggggtgagaggacagagcaggggctggaaccttagcctcgagccatctggaccatggctcattcctgggctccaatgtcactggggacttaccgtcttagtaataat

SEQ ID NO: 5607 - DNA, 1033 bp, mus musculus
ttcctatacgttcttctcatcttgagttcctgcaccatgaaatttttcctgacttacctcttccctccccacaaaatctgggctagttggctctcctattccttccatagctttctgaagttttcagcatagcacttatcaaggggtgttgcaatggttgtgtatttgcctgtctgtctcactagaagcttcttgagacagggactcttgttcattgagagaacatgtgccatgagtacagagtctagcctttagttgtcaattgctcagtaagtgttagttgactaactgaataaacagagtagcataaatgttttagtcaaagtatgcacaaggcaataaggaactaaggagagagatacaggaatgtctcctatccaatctgaaggatgcagcccaggaaatgtttgaactgagtttgctaaggtaagtataatctttgaccatcttgagaggaaggacacaaggggtatgaaaaagaacattttagataaagaaaacaccatgagcaaaaactagtggaaaaatgtaagcaaattacttggagctaagagtatttggaaagcacaaaaaatgtctctggagaggtgagattttctggagctttggtcaaatcgcaaagtttggcagtccttcttgaaacaggggagcctctgaaggaagtataatgggaaacttacatggccagattcatgcttcagaaagatcattctagacatacctaggagaatgacccagaggtatggaatcagatacaggaaaacacattttgtagggcttgcagccatctagttgataaatgacaagggctgagtaataacagtgatggttattagcaaggagggagccaattgttctcagagtgctgggggaaggtgctagtatcgaaccaaaatattctgtaagaactgtcatttgggggattatccagctgtcagcactgtcacaggcctggctggggctaagctgatcctgtttgtgtatctctggaaccactgctggagtcggcggagagatctcccccctacttcag

SEQ ID NO: 5608 - DNA, 1017 bp, mus musculus
gagtgtccacattctgaaccactaaattatgttgtctctgttccaccaaaattcctaatttcatactgcttgtgttggaaagtgtgttaattgacttctacttacctgtgaattgctgaatgtaatctctgagtaattaacatccttgtttttctgcctgtaggtccgtggggaaggtgtacaggagactgtggtcccggaggagtccagagtcgggcagtgtggtgttttcatgttgacgggtggacaagtcacctgtctaactgtggtgagagcaacaggcctccaaaggaaagaagttgtttccgagtttgtgactggcacagtgacctctttcagtgggaggtttctgactggcaccactgtgtgcttgttccttacgctcgcggtgaagtcaagcctcggactgcagagtgtgtgacggctcagcatggactgcagcaccggatggtgcgctgcattcagaagctgaaccgaactgtggttgcaaatgaaatatgcgaacactttgcccttcagcctcctacagaacaggcttgcctcattccttgtccccgggattgtgtagtatctgagttcttaccatggtccaactgtagcaagggatgtgggaagaaattgcagcatagaactcgcgcggtcatagctccccctctctttggtggtttgcaatgtccaaatctgactgagtcaagagcctgtgatgctcccatttcctgtcctcttggggaagaggaatatacatttagccttaaggttggaccatggagtaaatgcagactgcctcatcttaaagaaattaatccaagcggaagaactgttctggattttaactctgattcaaatgagcgagtcacctttaaacatcaaagttacaaagcacatcatcattcgaagtcttgggcaatagagataggttatcaaacccggcaggtttcgtgtacaagaagtgatggacaaaatgctatgttaaggtaggagacctttgatgcttgaatttgattcacctaaaatatt

SEQ ID NO: 5609 - DNA, 472 bp, mus musculus
taaaagctatccaagcaatgagattcactaattcatagtaactaagtagttaattagaagtctgtaattatctttgccacttaattaagaactctgtacagatttctcaatataacttgttggaaactctacttatcttggttattgggatttcatgaggaaactgctttcagtgtattagattgtctcattaaaactttgctcagccatctggggaagcacaagttgattcctaagagtctaatagttcagggtttgctggtgaagtgtgactgaaagggcataggatagcacaaataactttctaatcctcaatcactaaggtggatattaacccactatgcacagctatggcattattacttacttatgttggtattgattcttattgactgtaggcatcaattcttatcgtttactgcccaggctgtataagatcattgcaaagctcacctattctacaaatgggtga

SEQ ID NO: 5610 - DNA, 377 bp, mus musculus
tgagttcttgagaaacaatagaactaccatatgactcagcaatcttatatctaggtatatatgcaaaggaactgaaatcagcatgtcaaagaggtaactacattcccacgttcattgcagcattattctcaatcatcaagatatggaatcaatagatgaatggataaataaaatgtagtgtattcacacacacacacacacacacacacacacacacatgcacacacaggaatattatccagcctttaaaaaatgggcaaaatcgtatcatttgcaacaacatagatgaacctggaggatattgtgctaagtaaaataaccaggcacaaaaagccaaataccacatgatttcacttacatgttgaaattaaaaagtc

SEQ ID NO: 5611 - DNA, 807 bp, mus musculus
ttcaatttatttaaatattacctataagccaggcatatctctaagtactagaaatgcagggaagataatatttttatccataggtgatatgtatacatatttttaacaaaaattgcactcatacagagtacatacatttaaccttaccttttgtcagtcaacaatgtcatgtaaattcacgtaaagacataaacttaaaaatgtaatttcagtggctatgattacattgaatggccatgcagtagcttatttaaccaatatttcttttttttgcattggaactagtttctaattttcccctattaaaaatatcctgatcaagatgtttgtaaaaactgtccacattgtattggataaataattaaatgtgggttttatggatcaagagaatgggtcaaaaacatggcagtcatgtttttaaggtttcaaacaggttccaaatgtcctccaaaaatatttatccaagttgtgtaattcctaaaaggacatgcaagtgcctatttcctcacaaccttgacaatcttaataatgtaataaaaaactagattttatgaaaagagagtatcttatttagttgtattttccctgtttttgattactaattgaacagtttttcataagcatattgcctatttgtatttattacttttctgttttctactgattttttaaaattttctaatataagttgttagcagtcttggggtgtttgggataaataatttatgcttatttcctttaagaaattaatacttcagattggagaataaaactactgaagagtttaagaaataagctgacaaagta

SEQ ID NO: 5612 - DNA, 1487 bp, mus musculus
gggccctactactctaccaggaacttgtgtttcttttctccaccctccctctatccttcccttccttcctgcctttcttccatcctctacagaattatagccctaattgttggaatacgctgaggctgtaaccaactatcattaggacctatttactttcttgattctgtaggaccttctcaggcaacaactggacattttctttgtaaatatttagcacgattggaggatttatgaagttttattgcataaatttatcatttgttccaggtttaaacacaattaactgatctgtagttaaagtgcttttctcccaacctttggtggctgcaatactacctcttcattatctcttcacttggatgctggaaggaggtaacaggagtgtgttggtagttgatgcaactatcagtagtcaagaggagaggctagaggggaagggaggcaggcaggatcccagcaggccctgtgatgaaagggcacctgggtcaagagaacatcactcaagactgacaaggcagcaaagagcttcttcctgggtgccaatattgcatctctaccaaatcagaatgatttggtaaatgactgataaacctgtcattatctttccatgggtagatagaaataaacctgtcattattgttccatgtgtgttcccatgcattgtccacagatgcatgattatttaactgaataatcaccttgtctacttgtacatcaaacatgacagctttcattacaaaggaattatttaacctgcctcaaatgttgcttcatatatggagcgaaagcaggggaacagaaccatggaaggttagaattggaacatcttgtttaacctcctcagtttgtagatgaagaaactgaggcccagagagagaaagtgatatccccaaagtcacacagccagattgtggcagatcaagattaggccccaggattagtgcctctttggactatggtaagctcactctgtggggtagcccggagctctgaggtgcctatttcctgtaccaagatgattatgaaagaacaatgagggggacacatatttacaaaatatcatcttagttaaccaaatgcaaatttcccaatttgagaatacttaagagttcctaagagggggaagacagagacctgggatgaaaagatattggagtaaatgccattgcccctcgaacccccacaacttcttatcatgaatgaataaagcactattggttgcaagtgcccaaacacagctcaaacaagtcaaacaactacaacagaggaaatttaatagcctatgtgaataggaagttcagtggctgaaggtagttttaggcaatttaaaccaaattttaaaattcttgagcaggatactgggccagccattctgagtttgtgtgtaattcccttaaagtgggctgggtgtggcagctggagaaggcttgatgttagaccctggagagcagagaacaaaaacctaactcctagaaactaatttg

SEQ ID NO: 5613 - DNA, 190 bp, mus musculus
tattttcttatttaaacatttgttgcaaggcattcagtatctgaaatcatggttctagagagatgcagacctggtctttctattttgtgctgaaaaaatgatgtgaaaagtatctaaattagcctggttgtgttgctgtctgggctgtagtacaggtgtctctgccctactgccatttaaaagtgaataa

SEQ ID NO: 5614 - DNA, 183 bp, mus musculus
acttctgctaggcaggcagtattcaaagacaaaagaggccagaccaatgacttccaagagcttatttagttttaacactatccatgttggtagctccttatattttactcatcaggcaagaccattgattggtagttttattgatgtgtggattgcactatttcccaacgagttcagcttcat

SEQ ID NO: 5615 - DNA, 330 bp, mus musculus
aaaaaaaaaggaaggaaaaaagagaaaagaaaaccataaaaccatacaaaatagaaaaattaaaactgtaaaagaagagagatttaagggggagactaaggttaaaacgtaagaggctagatctgagtgcaatgtgtgatgcacacaggaagtattactctcccttgttatgagaaatgagtaatctgaaacgaggtgacttgcttgaagataatctttgtaaggagaggagcctagatttcaacccaggcctggctaattccaaaacttgcatacggtatttgtgtcatccatactagcacttaaatttaaaataatcatttatttaag

SEQ ID NO: 5616 - DNA, 1004 bp, mus musculus
gtgttcttttaagagatggtgccatggaaacagaagctttcttatttttttccaaatagtgatgctccccaataatcccagtagaattttttttattggtttaatacacattaggaatcctagaccacattttcttcataatcccaccatacatttttccgccaagccaattaactacctgaattttctcaagaacatttttttaatacaaagggaatttagaaacttctataaataataatcatacatttgctatgttatgaggctgtgagcctcctatcactagcagtgctaaagcaaggatatgcaccagatactaggtaagctgtggaagaatctcatgtagctggtaattagtccaaatagataacctttaattctctttatggtcatatctactataattttactattacttaaaatgaaatttggagtctatgatttgttttaagcatattaccaagctatagtagattcatacaaaattgctctgttttaatactcacaatgagagttcattattgtgtcactcagtggtgctggagtactagacctttgagttccaaaaattaaaacgcttgggaaggaagtaattgacatttttcactagaaataatctcatgacaccaatatagcttttaagtacaatttggagaaataaaaaataattttgtccttgagtctaattagtttccttgataccaatgatactgcatttctctgaaagaaacaaatgataggaacatagctatcctggcataataggtttctaatgaattactgatattcatataaaaaaagaaagactttgcatttaaaaaagattttgtattaaatatcacactgtgattattctcacaattattacaaaatacactggaaccccagttggtgctaacagtcaaataataggctatttagggggtagaggcatcttaattttaagtagttgttaactatttacaatgcacaaattccataataaaaagaaactgaggaatatt

SEQ ID NO: 5617 - DNA, 1276 bp, mus musculus
ggataaatgaagataaaacacagcctcacaatcagctcagaaagattttaatatcaaattagtgcatatcagtgcaatttacaaagtaagttatttttaaaaaatcttttagattcagagttgttttctttaacattttggggcaaggggtaaaagtttaaggaacactacttggcctagctctctcaatctctctattacactttccttttactttgcccatattcccttctagctaacagttgtatgcaaactttcgagtcagaagcaaagcagtggccttattcctgttggtgactgcagcaaagcaatgtcagacagaagagagggttggcatgcttacactctgcatgccaatgcaagacatcagctctaggggtttgaaagcctgtggcagtgatatctaagccagcagcagtagagcttcctgacctctacatcacagctatggcagtatgaccttgaaattagtagtccggttgtaactcccctgattccaactcctccagctcctctgatttttgaaacccttaatcagtaaatctctccctgcttgaattccaagagtgctttctgtttcctggtctgaatcatgactgatacagcatttggtagcagtgatttgagaaatgcagcttttcaaaacattatatcctgagcatatgtattttatgacaatttgtgatgcagtttgtttgaatcttaagcgtaaatagaggtaccactctccacccaaggaaagctattggcagcataagtaggtacaaatgtctttcttttccttacaattcattatcttttaacttactttcatatgtggatcatgctgtgggaaacaaatacgatcattatcagtaacaaataaaatcttctttatgaaagagatttttttcctatgcctggcaattttttcttattatatgctcttctgcttatatagttgcatttccttggatagctttaaggttactataaacagatatctcactgataatgacaatggcagccttgaaattccaagccatttctagcaattcatcttgaagcagcattttagttctcttttcgttgattatcttcatgttatactattaggtccaggggcttagtcatttttttattactttgactagaaaatagacacttagatatttgtaaaaagttctatattgttgaattatggcaagtacactatccacccaagcaatgcaaattacaaccatgtgcactgtttcttatttttgcaatgttataggagagctgacttatttttcac

SEQ ID NO: 5618 - DNA, 9720 bp, mus musculus
atgaaaatatgaatttttaaaaaagaagatttgttgaaattctgtttaaaatacaattagaatatcagatccccttgccaacttgatgctgcaggtgaatactcccacaccccatttcaggagatgactagaggattaatttccagaaaagggaggagaaagggtctccagactgccatgacaaacaccacagactgggtggcttaaacaatataagtttattttttcgcagtactggaggctagaaattcatgatcaaggtgcaaagtgctgtcagggttggtttctagtaagggttctcctcctggcttctcctcttggctgccttttcactatgtcctcacatggcctttcttttgtgtactggaggaaacagttctctggtgtctctcacacgtcttataaggacacctaaggataccagctctaccatatcaagccctcacccttatgactgcacttaaccttaattactaatttgtaggcctatccccaaatacactcacattggagattagggctttaacatatgaatttggggccaccaactcaattaataatatataccatagttgtaaggtttctgtatcggtttgaaccccgagagcacgtcaatagacaacacgaggtggtgtggagcaacatgctgttttaatgagcgcctgggtgcaggcgggctgaggcctaaaatggcatcagcaccaagtgaggacaagacaaaggttttatagtctcctgtaaacaggaagtgttctagtctgacataactgctgcgttgtacctggatggcctctttctcgatcttcagggttacgtgtcttccggccagggtagctgtctttcggtcggctctcttcctgcttctgatatcttgctggcgcacgccgctgacgtaagtagccttgcgccttcgtactgggcctgagaaggaaggagttattcatctccttaagctttcaggcctcagggagaatcgtacattcccgtctatttggttgtagataaaagggataaggggcctctttctcaataactacttcacgtgtgatatagggggtggtgtgggcaccttggaaaaacaaaaccttaattttttgggtattcttgagagacgggttggtatccacattgtccttgtagtaggagcatcatctgtattgtctggaaacgcgtctgtgcctgcaagacagttatgttgagaggacaaggaggtgtcaacagggagaggtatagcctcatttgctgcttcacgaatgaaagactgtgtctggattaaggaggggaggtaatttctgagtgggttagagtttggtaagggtggaggccctaagataaaagttcggccatacatgattttaaagggactataaaaagaggctgcttttggtgttgtgtggagtctcatgagggcaaaagggagattttttgtccacgactggtgggtttttagagccagcttcgtgagttgcgctttaagtacagatttagttttttcaactttgcctgaagattgaggcctgtagggtgtgtggggaacctacttcatatttagagatgtagagacaccttgaataatttggctgatgaaggccggcctgttattgggctggatggatgttcagagtacgaaatggggaattatatgcatgatgagagtttgtgtgacgacatttgcaccttctgaagttgttgggaacatttttacttacctggagaaagtatggacaaagactagaagatagcagagcggcatgtgagtgaggtttacttgccattcttgccttggtacctggccccaggcttggtcggtaggaaaaggtagcggccagagggagccttggggtgacactgagtggcagatagagccagactgggtaatttctcagacatggctggaaaggtgaggacaagtgagaatagggtggaaaagttgcaagagaggtttgtaaccgacatggaaagagttgtggagtctttggaggtgaggaagattttgagagtgaggaagaacaaagcacctttccttgacataccatggtccttgcttttgaaggttttgggctcagaagtcctgcttttcttctgaggagtaaagaggagagaacaaggacagggagagaaactggccttgcacggatcatagggctatttgtttcactacctgatctgttagcgcatttccagccgatatgtgattgtctggggtttggtggcccctgcaatgaatgatggcaactttctgcaggagcctgatagcttgaaggagtttgttgatgagagagccatttatgacaggagtgttttttgcagctaggaaaccccgttttttccaggtagacgagtgtgactgtactatatggaacgtataatgaatgacaaattgaatatatgttaatttgttgtccggctgtcagtgtgagagcttgagtgagggcaatgagttcagcttttgggaggtagtgcctaggggcagtggattggcttcaatagtatgtgggggcggggggcgggggacactatagcatagccagcatgccggcgtccttgctgtaagaaggagctgccgtctacaaaccaagtaaagaaggggttcatctgttagatttggaaaaggtataagaaaggtttgaacagtgttcacacagaagtgtttagggtctttggcggttgtagcttcaggtaagagcatggctgggtttagatgggagctggttagcatagtgatttggggggtttctatgaatagagcatacagttggaggagtcatggggcagagatgagactagtacactgcagtgagttggcatgtctttgatgttatgggttgaataaactgttaggttggcatggagagatagttttaggcttttaagggttaggacagcagctgccgccaatggtcggaggcaggcaggccatccaagaactgaggctttaagctgtttagagaggtaggcaataacctgaagggtgggtcctttagactgggttagaacacctagtgtaactctatgctgttggtcagtatagagggagaaaggtttggtgaggtctgggagagtgaggacagggctgaggtgagagccttccagagtagacggaaaggttgggtaataggctgtgcagatttttaaggctcatggagtggggctttagcagcttggtataatggtttggcaagtagagcgaaggagggaacctagagcctaaaacatcccactaatcctagaaaagagagagaattttttgcttagtttgcagaggcaggagggattggaggagagatatgcagtcagctgtgagcccttgggttcacggggtaagagctagccctagataggtgactaagggggtgcataattgtgctttcttagaggagacctaataccctcgttttgtcaagaagtttaaaagagagagatagtgtgggtgttgcagtgtttttgagaggggctacacaggagcagattattaacacattgaaggagagtggatggttttagggatagggtactgaggtcaagagcaagggcctgtccaaaaagatgggggctgtctctgaaaccttgaggtagtatgcaccaggtgagctgatgtgaaagtttggagttggggttttcccatgtaaaggcaaagaggttttgggaatcaaggtgtaaaggaattgtggggaaaaaaaagcatcttttaggtttagaacagaaaaatgggtggtattagacagaattacggaaagtaaagtatatgggttaggaactactagacatactgggagtacagcttggttaatgagcctgaggtcctggattaagcgataagtttcatctggctttttgacaggtagaactggtttgttaaaaggggagtttgttgggtggagtaggcgactggtgaggaggcgaaaatgataggctttaggcctatgcgagttgcttgggagatgggatactgcttctgtgataggaactgggtgggctttttaagggcaatgtggatgggggtgtggtgttttgtgactgagggtgtggaagtgtcctaaacagaggggttaactacggatgggggataaggaaaagttgcatgttttaaggtggcaggttggaggagtagaagaaagttagaagccccagaggggtctgggttggtgcgttgggtactatggggaacatggaagtgaagagtagtgtggagctttgaaaggagtggagtttggcatgagggtaggactaagaaagtgagtgaaggaaaaggtgtatagggagcagaaaagtggaggggtggcttggggtttggagacttgtctattaatttctacaatagagacttgggagaactcagtgggtcctgaaaaattaggtaaagcagtgtaggttgccctggtattaattaaaaaacatactggcctacctgccaccatcagggttacccttggctcggatgaagagatggtagttgccagggtgtccatttcagggcaccgtcactcttcagtggcaaggccgatgagatcctaataggaggttttggccagcttcggaagggatgggggcggtccttgtggggtccgctgacagtccaacctccggtggggtcctccgcaaagggggcatggcctggtgggcttacctgggtttgggcattgtctggaccagtagccttcattgccacacttgaaacaggcgccaggtggaggtggattgctaggaggcttccctgttgagctgcagccctgcgggcctggtggaggtaagcatttgagactacctgtgttttgcctttcattttcctcatcacgattgttaaagactttgaaggctaaattaagaaggtctccatgtggggtttgagggccgtcatcaagcttctgaagtttgcgtggaatattgggggtggactgggaggtgaaccaaaggtttaagatagtggttccttttcagctggctgagtttaggttggtgtattttcttatgacttcagttaaacaagagagaaaaagggctggttttcgtcaggaccctgggtgatttctgaaagtttttcatagtttactactctatgggcaccctttttgagtcctgcaaggagacacacaatcatgtggtcttgatggtggcatccagaggccccatcttgataataccagtgggggtcctgattgggaactgcctctgcgccagtaggctgggcaggagtttggtgatgaattgtatcagcctgcgcctgagctagggtccagatatggtcttagtcttctggggtgagggtggaagagaataatgtagaggtcatgccaggttagtttataagactgggtaaggtactgaaactccctaatataagaggtggggtcttctggaaatgaaccgagtcttttgttaatttgagacagatcagtgagggagaagggaacatgaactctagtaataccttcagttcctgctacttcctgaagtaagggtgggtcataggctaaagatggcatctgaaggagtatgggccggagggaaggaaaaagccggaagtggttcctgctgagggtatgaagggggaagggagttgagttgataagcagtggaggatacatacgggcgtaaggtggcaggatgggtttataggcttcaggagagggcgatgaggaaggagaatgagtacaggcaatgctagaattgtcctgatgggacggtgtaggaaaagaagtggatacagctgactgggaaggtggtggctgagaagatgatgactgagaagacaacgaacgggttaaagaaggcgattgagagaaagaggtagtggctgggaggcatggacagcagtctgctggattgaatgaggaaaaagaggtagggttgggaggagaaaggtgatctggatagcaagaatggaagagaaggatttgaacaggtaaacaagaattgtagaggtcgggctgtgatctgagtgcaaaaaacgcctggacatacagaatttctccccatttctccagtcattggcaataattgcttaagttcgttaaaattataaagtcaaatgttttatttgagggccatttagatgcattgtttaatttgtactgcatccaggctatattgtaaaaaaagacggggcacttagggtggatatcttgtctgaggcctaaggtttgcagggttcttttatgaggcagcctagagggctgttttttggaatagaggaccaagaatttcccataacggagggtaggcatgggagaacagagaaaaaggagaccgtcctggacagctggagggagacgataaaaggagtgatcgtcactgctgcctttttcgttcccggaatgggatcagttggcttagaggtgtcccctaagaacagatgatcagcaactgcctggcacacaccagagccttcttggaccaacgctggatttttggaccggagaaaccaagagaggccatgtagatttttccctgttgacagagctcccaggaaacttactggtaggtgagatcagtgactaatgtgcatgcagaggggtgactggaggctgaggagtttcctttgtctggctgctgtggcctactctctggggtggaggggtaggcccaaggaggacgcagacttgagcccctcccaggttttggcaccagaacgtaaaatttttgtattggtttgaaacccaagagcgcaacagacaagatgaggtggtgtggagcaacatgctgttttaatgagcgcctgggtgcaggtgggctgaggctgaaaatggcatcagcaccaagtgaggacgggataaaggttttatagtctcctgtaaacaggaagtgttctagtctgtcgtaactgctatgttgtacctggatggcctctttctcgatcttcaggagtatgtgtcttccaaccagggtagctatcttctggccagctctcttcctgcttctgctattttgctggtgtaccctgctgatatatgtggccttgcaccttggtactgggcctgagaagggaggagttactcatcttaaactttcaggccccaggaagaatcttacaatagtgaaaaaaaaagcattaaataaatgtttatccacttgcactcttatttagctaccagtccccacacaggaggctggacaagtctactctgttatctgcacaacctaaagagtctgacatgagggcatttcccagcacgatgggcaaatgggatcaccttacaacaaaccccatcacgtgcagaacacactgttaaaaaaaaaaatcatgagccaaactaaatttaacggagtttaattgagcaaagaacaaatcatgagtcaggcagcctctcaagccagagtaggttcacagactccagcacaggcatgtggttggaagatttgtggacagagaaagtaaagtgatgtacagaaaatggaagtgaggtacagaaacagcctgattgggtacagcccagcatttaccttaatttaacatggtttgaacagttggtctcctttgattggccaaaatgtggtgattagcacaagagtaggttacagtctgcttatgcctccatttaggtaacagttcatgattttcagagaaagctttaggctggacttaaaatatgtaaggaggcaagtttaggctaaagttaatttaacaatctccctttttggtcatcttctcaattttgagagattgaccaaaactttagtcattgatgtaactatcaccatcataaatgtccttatttggtttcaaaacccaccggaaaatagcataatagtggattttgtaagataggaacaaggacttcggtaatttttttttacgggttagagtagagggtacctcctcatgctggaatatcctgtttacaggagaaaaacaaaacctagtctgttctaggatatatctgtttccttgaagtcttattttttattatgtcacatttatcataagtgactgctttttggtttggtctggtctgtggggtcctagtgcatgagctcactccaaaacagtatcctcccataattttgtttaaatctgttaaaagaaaatccttaaccaaattaaatttatccgagtataattgagcaaagaacgattgacaaattgggctgcctcccaagccataatagactcagagatactccaccgcagccacgtggtggaagaagatttatggacagaaaaaggaaagtgacatacagagaagggaagtgaggtacagaaacagccaggttgtttacagctcagcatttgccttatttgagcagggtttgaacagtttctcttctttggccaaaatgcggtgattagcactggagcaggttacagtttgtttacatctccatttaggttatagttcactatgcacagagaaacctttaagccaaacttgaaatatgtaagtagatagctttaggctaaacttgattcaacaacactcatgtttattatacccaaattacaaaacttttcatgaaaatctatttttatacatccatgttgtgtggaaaattttttaaaaaaagaaaaaagaaatctgtttttagtttatgaccatatgaatatgttaacctattaaattttttttaataactttatagggggccaggcatagtggctcacacctgtagttccaacactgagaggccaaagcgagaggatcacttaagcccaggagttcaagaccagttgaggcaaaatagtgagaccccgtctctacaaaataaataaataaataaataagtaaaataaataagagaagaaagaaaaattagtggggtgtgggtggctcatacctgtagtttgagctactttttaggctgaggcaggagctcaggaggtggaggctgcaatgagccatgattgcaccattgtactccagcctgggtgacagactaagaccctgtctcaaacaaaacaaaacaaaacaaacccctcaaacctcaatagaagagttgtaaacaaaagcaaactcaagttcctaccaattattattaatcattacattatacaaatttctattggttttgtgcgactatgttgtagatcagaatatcaacttctagtttaagataacagattgagtctgagagtggtggctcatgcctgtaatcccagcactttgggaggctgaagcgggcagatcacaaggtcaggagttcgagaccagccttaccaacatggtgaaacgctgtctctactaaaaatacaaaaattagccgggcattgtggcacgtgtctgaaatcccagctactcaggaggctgaggcaggagaatcgcttgaacctgggaggtggaggttgcagtgagctgagattgtgccactgcactccagcctggtgacagagcgagactccatctcacaaaaaaaaaaaaaaaaaaaagaaaaaagaaaaagaaaagataacagattgagtacagaccgaaaattctccgttctatgacaaataccgaggagtgactgaaaaaaaaattaacaaacatatagcaacagttaaaaataagtaaatagaaatctgcatagaccagaaatttacaactattattgaagaaaagaacagtaagaaaccagaaagtagtattttgggggcagctcacgtggagtcaggctcagtgtaggacttgagtgaaagactttcccaagaagccccagggctaatctgggcagccctggatgcttaggtctggaacccagggccagaatctttgacagccagatccagtaaaggccaaaaccaagaat

SEQ ID NO: 5619 - DNA, 9720 bp, mus musculus; identical to SEQ ID NO: 5618

SEQ ID NO: 5620 - DNA, 293 bp, mus musculus
gtgtgtgtgtgtgtgtgtgtgtgttgtaaaagttaagaggtgtgcatacttctgagtttgaataagttgtggctgagactatttgaattgatttcatactgggaaatggcatacaagtaaaatcagtagtctattcaaatcattgtacagtcaagtcagctaaatatatggcaatgaagaagtaaaatcaaacctcaaattgaacaaaaccagtctattctgtagtcaagtagacactatgtctgtctctctaacttctctgcccagaccaaaatcatgatttggagaatgca

SEQ ID NO: 5621 - DNA, 1004 bp, mus musculus
attttgaggaatactttgccaaaagaaaactggaggaacgcgatggtcatgcagtcagcatcgaggagtaccttcagcgcagtgacacagccattatttacccagaagcccctgaggagctgtctcgccttggcacgccagaggccaatgggcaagaagaaaatggtgaggctgtaaatcatttttagccactgcactgacctctgcagctgttacaattacaaatgcactacatgcctgggtgtttaccttaaaatttgaagaacagctgcagaggcatggaatttcatgagcaaagattagaactgtaattttagggtattgtgaaatttttttgtcagcaaatttgtgtcatttgtacatccaataaagaacaagaacaattagagcccatttctaagagataaaaatatctaaatgtattcctatctttctgaaatattttacttttgaggaaaaaaaagttgagaccgacactccctcaccttttgttcttctccaccgacacctgaaacgccccttcacactgtgagttcctgagtaatctgtggctacaggtttcataggaactgtcagtcacctaaagagaatttcctcatttatcagctgtttaagtcccccccacccccccaaaaaaaaaaaacctgaagtaattaattaatttttgagcacagtgtgagctgattccgacaagtctgtcctgggcatgcgaggggactggtgtgcgagggggccgggtgcaatgatggcactctgtggagcagattgcagtgattcctgtcataccatcccgggcagtcagcccattagctgccattgatttactgaccttttggcccgcttctctctctctctgtctctcggctacagacctgccacctggaactccagatgcttttgcccaactgctgacctgcccctactgcgaccggggctacaagcgcttgacatcactgaaggagcacatcaagtaccgccacgagaagaatgaagagaacttttcc

SEQ ID NO: 5622 - DNA, 259 bp, mus musculus
ataactagatatatatatttatacatatgatatataaaaaacatatcttcccttgtttacccttttcagggaaaagtaatatataacttttccccatagtcaatatgatatctcaatcattggctagttacctttcaacaggattattacttatcttgtctgtcagtcattacttaatatgtctgctagttatttaagttagattataatccagtaacatggaaaacattttaaaattaagtagtggtataaaatttta

SEQ ID NO: 5623 - DNA, 441 bp, mus musculus
caatatgtgaaaaaaaatccagttttgcaaaatcaagtcattcttcctgaaatttcgttgaatagcatatggagctctctacattccagtgataacatctttcaagctattaatttgaagagatatacgttaatccaaatggagacatatatttggattaatgtgagcctctttagaaatctctactatgactttccttaatgtgacccttttaaattaacaatttaccaaaatatttttatgtacacaattccatccaccttcaatctggtgacgtagaaatgaccaccgatgttttcttatcacatacacttagtcagcaaagtgtattgaaatgactcccaaccctttccctttttgttttcctttgttaaccagttttcctttcctggtcactacctgtatccctgatactaaatttgcctgtgaaataatgaatct

SEQ ID NO: 5624 - DNA, 1111 bp, mus musculus
ttcccaggggttcatgggccatactttgaaaatgattgtcacagagtttagagtttacaaaattcatatttgatctactagagtcaactatcaattagagcttttaccaaatcccataaaaatgcaaggactttagaatactttgattccatttaccatctctaatgccttgtatgttattattgtcatatatctaaatatatatctattatcaaaacctataggagactattattgctttgtacaatcaatatttatgtggctttatcctcaagtttaccatttccattgctctttattttttggcgtgtatttgtatctgtatctggaatcatttttcttttgcctgaaaaatgtcctttagaagttacgtctgcatgagctccaaagaatgaaatttttcttttcatattgttgattacatctttattttgcctttatttttgtagaatatgttcactgaaggtagaattttaggttataatttattattgttgttgttttattatttttcatatttcatatgtgccattccattgtcttctcttttctactgtttctcagtcttacctggacattgctcctattgtcttcaaagacctgttttgtttgttaggcttatattttgtccagtttttctactgttcttggcaaggctttttttcatacaagattctccatcatgactgggagtagaattctcttctaattaatttttaatcataaagtaaaataatggaagaaaggttgtatctaattctaattgcatttaattattttaagtattcaggtacttcaatatttgtttaaccttgatacctagaagatttgagagaaaaaaagtgggctacatttaatctatacacacactgcttcctgtgggttctaaggtagaaagctaaaatttgtctttatgtcagactcgtgtactttggaatgaatcattttgataaaccctcttagtcatgaatatgtaagccaagtaccttcacattgttttggcagaaggcccaaatatttgttgagtaataaaaatgccaattctttaagaggttgataagtattttctttatagtgtgaaagattataccagttgaatagtgtgaaatgg

SEQ ID NO: 5625 - DNA, 198 bp, mus musculus
ttttaatttatagatgcaaatgttcagtttaagagaaagtaaaatgattgaaatttttaacacaattaatagcgtattattggtatacttggaaatgatagcttttatttcttctagacaagtcttttagacttactaatttggaaaaacattttgggagagaacttggatgctctcaacattaaaagcatatcctag

SEQ ID NO: 5626 - DNA, 202 bp, mus musculus
agaatgtgtagacaagatcaacagatacagcacaacatgtactttctgagttgcgatgtaggtattatcaatatagcaccttagaaaacagaaatcacttcatgtcacctccacgtaaacaaagactaagcttttgcttttcagattaactctttattccccggacaaagaaaagggagtatttaaagcaaagtcgttgagg

SEQ ID NO: 5627 - DNA, 108 bp, mus musculus
gactggattctggtacacaacatccctggtatttttcatatgaaataatgcttaaatgttataaacaagttctacaaaatgttctaaaatcttttttggtattttcat

SEQ ID NO: 5628 - DNA, 1614 bp, mus musculus
tacacagtactgtttgacagttcatcacttcaccagccacggaagaagcacatccatcaccaaaaagtgtgcctccagaagtgaatgtcattttgtcggttgccaccacagccgagattctgaacatacggtaaggatcgtgtgtgtgtgttattgtctaaactttcatcctagtaatgtaagtcgtagatcaaaggagaggcaggaaggatagtaatatgtggaccatgtttacattttgaggaaagactccatacaaagataaaatggagaccaaagaacagactccatacaaaggtaaaatggagaccaaagaacagagactccatacaaagataaaatggagaccaaagaacagactccatacaaagataaaatggagaccaaagaacagagactccgtacaaacataaaatggagaccaaagaaatgaaggaacccttgtcttattcactgcttctgcttagatgaggaagggagtctgaaggattagcctcagtttaatatgatgaactgtagataccttttagatcaattgatggctttaacgttctcattctatcattctaaatgagcatttcactcctttatatgcctggaattctgaaatgcttaagaaagaattacttgaaaatatgttcatttcatgaggttttagaatttgatttaccctgtaataagtacagaaaatgattctcatatcagtggcttttaactctagctacacaagaatcacctgggtagcttttacaagctctgcttgttgttgagggatgcaggccggcaggctctccagaccagttgaaatggaacctcagggtaaggtcctgggtgtcaggatctttttaaaaagttccccgaggtgattctgatgtgcagccagggttgagaaccactgatatggatgcctagagttgatgcctttatcatacctagtcatcctggaagcctctatgaatggctgggtttatcaggttgagacattgtacctggcacggtttggtattacctgaaaacatcccctgaaaacaccagttagggacaagcctttattttttcttacaccactcagcaaccataattagtaaaccattgttgctgtaatgataagaatcaggtgttagcatagacaatagagagtcattattatcccctaacaagtagcactgagaaagaaaatcaatgactaatccgaaaggttcctagctttcatttttgtctgagtgttttcccttacaaacctttagaagatttgtggactcaatcaagcactcttatgcagtttctcttcctctttgccttgctaatgcttggatttgatgcagataaatcacagttaggataaaagactttcagcatggtttttcccttccattctattggcattggtgggggaagggtacccaagagcctagatgatgcaaaattggataaccaactccaattgtctgtcttcagatagagctcaagaagcctttgttttatctttctttcttttgccccttccctcttctattattcactgtcatttcctctctccttttttgtaacaggagtgtaggtcttgctgtgaaggaatgatctgcaatgtagaattacccaccaatcacacta

SEQ ID NO: 5629 - DNA, 1063 bp, mus musculus
tggcagcagcagcaacagcagtagtttggggatatttcccacccactattgagtgggttatattagcaccaataaaaaggaaattccaagagcacagttggatcacattgcaccatttctttgttatttacttgacggccttctctcttaatcctattggccaatcttcatgaacatttgcccagccttcccttagagaatgagctgtttgaaaactcaccttgttctgttcttctggaaggggatttttgggaagataaaaatgagggacactaaactacaaacttagcctctctacaaactgagcctgacacctgcctcatgcactgttctttctggcaggaaattgagaaggctgtggtagcccgaaaacggtgagacactgagagacactgggagacctcactgtggaaatgcctctgactgtgtttagctgtgcaggtcacagattagcaggttgcagtggtttctaggaggcctgggctttctgcagaggaggccctgctgagagaacagctgaagtttgcccccaagatcagagagcaagcttgtttaggttaaggcttcaaagtaccagcttttattacattttaatgatcagagtcatattttattcatagggctcaagctgagcaccccggagttagtaaagcacaaggtttctatttcatactcaggccagtctacgaaaaagtttgaaatagaaggaagcttggggatttggcctcattatttaaaaatgaacataaaggatttgctgaacactgacaataaaatatccaggataacagacttattatgtagctttccatggtttatgttgaagacgtaaataagtcacatcttgtttgctagagaactaacctttcattaacttgtatttccacaccttcacaatacacctctagcagaaatgcaactcttgctggaattcctctccaagtatgaaaatttgagaacattctctgtgttttacttttgctttctgaaaaaaaaaaagaaaagtaaaaaagagaagcattggattgtgctccatttttacacataatatggagaagattga

SEQ ID NO: 5630 - DNA, 1126 bp, mus musculus
caattttcagtctacttcagcctagaatctgggcctcagcccgtagccacaggtttctctctggctctctgctgcagaggaggatggcacccaaccaattctgtgcagaaagccaggagagtgcagaaaatgtcatgctcatgagcaaagttctgggtacaaaggacttgtggagtctggaaatacctgaattttccttggagaggaaagattaggcctgagaagttgttcaaaattggacccctccttccaaagtgtgtctgaaaagtgtgtttgggataggcttgttatgtatggcctttatcatgttgatgtatgttacttctaatccagtttgttgagagtttttatcatgaaggggtgctgaattttattgaatgctttttcagcatctgttgaaattatcatatggattttgtccttgattctgttgatcatatatcatgtttattgatttgcatgtattgaaccattactgcatggatgtgctttgagaagtgctgcatgttcaacaatagccagtcagattaaaaggtgcgcctataggcccagagctgcccatgtgccatgggagaaggaccaatagcactatgagcttcctgctagggcacaccaaaatgaaagtgtttggtgtgagatgtgtaccacatcctccaagccaaaattctggctttcttctgggctgccagctttttcatttcacaaaaatttcagcctttcacttcccttgctcagattctttttaccctgggatttaccctgagattttttatcctgtaaaaaaactaccctgtaattttttttaccctgaaatattactctgtaatatttttaccctgggatttaccctgtcacaatccataacttggttttagctcctgttcttctggtttcatttagtcctcagtgccctgaagcacgtgccatcagtgtcccctttctccctttctgtcatcatccagtgggcttttccctgacttccaactcccagtattttcatctcagtatctcatttctttttcagcagaagcacagaaaacagctttgcctatgatccatgatcagtgagccagaagtgcctgggaattaacaaaccctgggagcagctttcaacaatgacctcagg

SEQ ID NO: 5631 - DNA, 266 bp, mus musculus
aaataagttatttcattttagagggtagtcacacatatggaccctacacacacatacacacacacacttttacactccctggtcttaacactcttcacactccagcttattgttcacagtgtagatcccagctgaaggctggtgtggaagaagccaggcaacaaaagatgtgcatatgggtttaagaattttcactgtatttttaggatggatgttgacaaatgactttaaagtagctcaaagagacaggcatcatttcttgaaaa

SEQ ID NO: 5632 - DNA, 882 bp, mus musculus
atacatatttttgttttcatgtttagcagggaagaaaggaatttggaattaagtgaatgaaatgtcagcacatcaatgctgtactattaggaggagagagactctatgaaattaagaccaaaaaatcaatagatgctatctgtcctttgaaggcaaggtctaatattctttgtaatattgaacagcatattctatgcaaatacttaataagttattacagcaatgtaaatatcaggcagatattttcattcacgtttatataaggcaaatgcattagttagtgtaaagggaggtaatacataataataaaggtaacagtctatcaagaagacagaacaattttagacatgtatatacaacaccctttatataaaattaggaaaaattagaattacaatgaaaaaattagcagacccaacttcatagttgagtatttagcaaaatgctttcaaaaattaataatctttaaaaaatggaaataaaagctatagaaaacaaaatttacaagcttgaagatcaaattttcaattccacaaatacttgattgattagagagtgggtaacaaaactgtttaccaaattgtccaccaataaaatgggaatggacagattttatctctactcagtagaaattattgtaattaaagggccatgttgtacagagacaactggctataatagaattttgtccacttctatcttcatcacctaaaacagtgcctggcttatagtgggtgctcacttaacaattgctgattgaataacgaatgcatgataagtttggtaccgttttcatgatcatagagtagccagtttatatatatgattaagaaacttgatgtaacttcattatcatggcccaaataggcttaaaaaattgtt

SEQ ID NO: 5633 - DNA, 522 bp, mus musculus
gaaataacttttgaaatcagattgcatgggtttgaaacccagctccactacatagaagcaagttacttaactgattggaacatcaggttctttatttatcaagtgggagcaatagtataattaggttgggtgcagtggctcaggcctgtaatactagcattttgggaagccgaggtgggcagattgcttgagctcaggagtttgagacaagcctgggcaacattgtgagactttgtcgctacaaaaaaaaaaaaaattacaaaaataagtcgggagtggtggcatgtgcctgtagtcccagctacttaggtggctgagtagaaggatgcttgagcccaggaggcggaggtggcagtgaatcaatatcttgccactgcactgcagcatgggtgacagagtgaccctgtctcaaaaaaaaaaaaaaaaaaaagaaaaagaaaagaaaaaaagtacaaatggttcataaggaatattgtaaggattatcttttctgttaacgccacaaaagaccaccagaataaa

SEQ ID NO: 5634 - DNA, 1342 bp, mus musculus
acaaggtccttttggtacacaactgggtaaaccactgagataagaatcctaatttgttcagaatattagacttttttctggttcaattttttgaataatatctaagcagaagttattataatcagagtaacttttcaaatataccatctccaattattaatataatttttaaattgttaaattatttctctataaaaaaatatacatgtatgcctgttaaaataggcctgatatggctggcagtttctggtaaagtgccaggccccacataacaggtattccaagttagaggcaaggtttaaattgaaatgcttagttaataatttgtaaaatggaatatagtgatgcaggctcatgttagttcaatatgaagagacattgtaataccacaccaagtaaacttaaaatgtggtcttactgattacagagtaatatatgttcactgtagaaacctttctaaaaagtacttatgaatgataattgctttattggtaaattatgatgaggaaggaacaggattaagtgaagcttttagctatatttcaaatattttattttttaaaaagacagaaaactctgaagctaatatgttaaaataattgactttgttacatctagatcatgggtatatagtttaatttctccatttttgaaatgttttaaaatttaaaataaaatattttaaaacccataagcataccacatagtgataattattaacattttagtgcttagcatttcagcttttgttgtatgaatatttaaatgtacattttgttataaatatggaattataattgttaaatatttttgagcaatgtattttacatttttccataggccatatacagtaaatattaattgcccaagtcaaaataaaaatataaacacaaatctaaatttaacattcttttgggaagaaagaattgcaattttatgcatacataaagaccaggtggtctttatgtctgaagaacaagagaaaattgggggtattataaaaaagaatgttgtcggtggttggagagaaagctcatttatattagtaaagctttggggaactggcaagcttaactggtgggtgatggcagcaagcaaaattagttcctagacttgcagcaagttatctcagtagttatagataaaactggtctcaggttataacaggcagtttcagcagccagacttgcagagaatttcttttctagagcaatgctgtgtgccctgagtaccttgtccccctggcctctagactctgatttagttgagtatgataaaaataatccaatttgcatgatcaactttcacataatatatttttaacagcacactattccattag

SEQ ID NO: 5635 - DNA, 594 bp, mus musculus
tataattatatacttaatttatataatttcttttttatatggaatatgtaactactatatgaactgttcagttctttgcttttttaacttttgatacattgaaaattactagaaattgttttctagaaagcaaacaaaaataagctcatttattattgctcttattttattatatttatacaaagcaggtacatttacaatatatattattcttttcatcttagtaattgtcttcaaaatcttctcacacattaagctgtctttccatcccaccctcaaaaggtagcttttccactatcgttagtgcccatgtatgagaaatagcttgctttactgaaatagtcattctacctatctttcaacaactgatatcatattactctcttttgagaactaactggagtcattaaagtttaagcaagaatctttaaaaaaattctataaaagtagtattaattaatcaaggcaagaaaaaattagcattgctctgttaaacattagcatctgagaaaattgcttaataactctacatcaaaaattttaatttatataatcaaaatatgacaacattccatgcactattcatttacattt

SEQ ID NO: 5636 - DNA, 1342 bp, mus musculus
tgtgtatgtaatttttgataggtatgaaaacactgactcttttattgccaaaattaccttccttaggacagagcattttgctattaaaaatatcaaacatgtattgaacatttagtgtaccagacattgtaataagtgttttacataaactttctaatttaacctctttcttttatctaattagactatcctgttctgacaatccattttacagatttatgaaaccaaggtttagaaaagtaaaataacttctttaagtcacatattttggtagttctagaatttgaacccacatacgtatgattttagagcctatcattttagtcatgatgatacatatactgccactatttttagtctcagctatttctcattaacagaagaaattgactgctgacagggatcatacttgtgtaaatatttgttaatgaccaagatttgcgagtatggttttcaaggctgacattgttagcagccacatgtttcttgcttttcaatgttaaattaaatatcttgaatgtgcaaattttaggactctggagtcagaacacatttttatgccagcctaaacagaaaacgcttaattcattttcaaaaagggatgaaagggaataaatgtaatgggcacctactgtctcccacaggttcccatggcagcatagcaggctcaagagccatcagacagtgagaaaaaaagagacacagaatgggaggtgctggatctcttacatggaatcacatcagagagaaagcaggagctgaggcagtgtgatgtctgggaatcgaagcagagggacagatcaggagagagttgggtaggcttccacagcacattccagcctcctcatttctcatctccctgacttgactttaatgatctcgggacacacttgccctctgtcttacacttgctaccctctttcatcaatttatttcattgtctcttttctgactttcttccctactaacttcatacatatggagacactcttgaaagaccctacgcacacaagtgcacacattcttccatttaatctcagcacaccttctcattgtattctgttacacaaactgaggaaatccccagcacagtgttaacatatcactatttaaaaaagaataaaatagttcagatattttagaggccatagatttatagcgattatatgtagacaaagctaaataaacctcatgttgcaaattatttgtattgataaacaatgaatatgtttctatagatcagtaagcaaatatacacacacatacacacatggttctaaacaggtcctgtaattgataaactgatcttttaaatgccgatcaaaatatgtaatctacagtt

SEQ ID NO: 5637 - DNA, 1034 bp, mus musculus
aatattatatttgctccccaatggaactgttcaaacacatcattaattaaacatatacaaaatatacttgatgtggctttttctttgggaaaaatacaaatctgaaagtgaatgtttcatatatttatattcttcaggtattacagcatataatctataagtttaaatattatgatctcttgtatttaattttttatttctcctttcagcaaatctgggtatatttgaaagtattttccagtacatatttttaaacgatataaaattcacctgaattagaacatatcccttttttcactttctctaaatctgaaaacttcatgtaaacattaacttttcaattattcactcataaaatatttattgaacagtaactctaaacacaatacacagcagacattggagataaagtggtaagcaacccagacattgctttgccctcacaatgcccccagtccagcaaagacagatattagtcaaataatcccacaatctcttttgcactcactattcaaggtgaaccctaccaaagaatgtagagagcagaaggaataatcaaagtactcaggtttactagactcctgcaatttccggccaactagtagagtccttgagtgagactttccctaggtcctctattaccaccctgaagctgataattggaacatatgaatcaatgtggagttacaacaacatgatttagaatgatacattttggagacagtgggaaaaccagtaggcctataatattcagaaatcacctatatacatgcttgattttgtatatttgtttacaacctgccagcgttctctgttttctcttttgtctttggtgaggatccccgttagtactattctcagtgatctgttttttttttgttgttgtttgtttttcctgccagtttccgaaataccactttttaaaatgcctaaatttgacttgaatgttcatattattatattattatgggaatggtttattgttttaagcttccatgtcttgcaatggataggttttctgtagtgcagttgat

SEQ ID NO: 5638 - DNA, 339 bp, mus musculus
ctgctctctaaatagatggtaataaatgaagacatgcttggctctctttctgagttttcactctacaccttagaacaccaaagcccgtaccttactttggatagacccatctggccctgccttgacaatctatatcaaacatatttcttagagtttgctaaagctgaagtttgaattttgtgtactagagcagaaaagaaaatgaatttagatttataatttaggcattaggaaacaatgaaaagtttaagtttaattttaattttaaaataacagatttgcatattggcatcatcactctgataacagtgtgaaaaactgattagataaggaagacaa

SEQ ID NO: 5639 - DNA, 769 bp, mus musculus
tatctattcagaattctgcaatttaccacagtctctgaccctccctattgtttagactgagtactttgcacatctacagttatcaggccactcaaagaatttccttatgaatcttaccattaaggaaaggggacacagactaaagtcataataacctgggtttctatctcagttcaacacttactgcatgtgtaatcttgaacaaagtattcaaattacctgagtctttctttaactgaacattgaattgatctctgccttgcacagaaataatgcctgtgaaatgtccagcttgataactggcctgccctttcttttctttttttttctttatttcttttctccttcctttcactttttttaaaagataatgcaatatgtaattattattatctaaacatcttagatatagattaaaacactttctcaactcgaatatgaacctattattagcacagtctcaagaggttaaagttgaaataatctgtcaaacggatcaaataagtgggcaccatccggcccctatttccccttcttccaccactatagaaaagtcttcttatgtaacattttcctctttttcaaatttccagtgatgactggaaaaaattcttcctggttagattagaaaacccaattttctaatgtgctattgcccacttcaagtattaagtgaagctccaaataatgatagcattatattaaagtaatagacaaaatagtctatatcatacaaaacaaaaataagaattaattttcaaagaaaaat

SEQ ID NO: 5640 - DNA, 331 bp, mus musculus
atgtacagtcaacttgatgtacagtcatcaggagctaaatcatcatccaagacctcttgaatgaccttcagctgtgccatctctgcccagctggtgctccatttgcccacaggcataagcttgcttgttcattttcacatcaaaattgctatatattgctttgtccatgaatttcttatcctctctgtcaatcatgcttgcttagctaagctccattcaagaactactatgataatatccaaataatctgtgtatccatgtcccaatgtatgaacacacacatctcccacaatttgttttgttatactgagaagcaggtcataagtactat

SEQ ID NO: 5641 - DNA, 331 bp, mus musculus
atagtacttatgacctgcttctcagtataacaaaacaaattgtgggagatgtgtgtgttcatacattgggacatggatacacagattatttggatattatcatagtagttcttgaatggagcttagctaagcaagcatgattgacagagaggataagaaattcatggacaaagcaatatatagcaattttgatgtgaaaatgaacaagcaagcttatgcctgtgggcaaatggagcaccagctgggcagagatggcacagctgaaggtcattcaagaggtcttggatgatgatttagctcctgatgactgtacatcaagttgactgtacat

SEQ ID NO: 5642 - DNA, 2015 bp, mus musculus
gaaagaggttaataacatggagctttagaggacagattagtcatgtagtttgagagaagttggggaaaattttatttaggagatatgacaaattctccttaaacaaagaaaagaaaaaagaaaagaaaagagcagtggagtctgtggaaaggacaccccagaaggagggacttgtaagcatatggttccacacgttagaatggttatatgatcctctgcctttttataaattagcatttttaagagattaaaaatttttatgtagatatatagaaatataaaattagataattattcaaagaaaaatatataggactattaaatgttgtaatacatttttctatgggctgaaatttggattgttgagcatacttgattcactttattgtgagaataatattccttgtctgcatgattatagaatgttgttatggtgagttgcacctcaagtatttgaatataaggtagttagtgttccttgagagaattgaacttttaagtcagtacttaacacgtaatatgaaatattgttttaaagagaccaaatgactccaagcctaaaatagcttaataaagtcattttgagtgttaacgttgctaatgaaagactcttcaatcaggtagaggaaatgtcagcagctaggacagcatggataaaggcaggtcacaggggcaaatgatggcagtatttatcaagtccaatgtagggcattgagcactcgatctaaaaacctccaatgacttatctagatatagatggtagatttttaccttatataatcagatgtttaaattttaactaactcgtccaagttcgatgctacatttgctaaagcaattttcattacaatttgactttccatggtgctgtactggagaggagttagcagccttagcagccatgtatcgtaaattgacaaatcttggtgagcaaaaaaaaaaattgtattgtttttaacaatgtaaaaaggcagttatttattttcaggttgcttaaattgaaacaataaacagtgtttcacggatgattgccatgttcccttttattctaaaggcagatgaaagagtgattctctcagaactggagaaaaaggcaagttcgagtgtatcactttaaattctgttatgatttttacaccttagatggcccctaaattacaaaacttctttacgatttcaaaactttaaagggaaagggagcatcttggttgtttgctggcagtattgttctatacagtttgggtaaaccctgggacaaatgcattggtcaggaattccagaactactgtttattttaaataatttaaactttttagatattaacttaaaacaaatcttatcccagctttcactcaaacaaaaatatcctcaaaaatgacagaataaaagtgatggttaaaagtatggatctgaaatttcaggtttaaactgttgtctacttcctagaaacctgtgggccaactgtgctcataacaagatctcatccagcaaagatttgcagcatttttccttttttgctatatctggcttttatttttttcagttctattgagtttaattaacaaataaatgaaaaatcaaagtttgtaccatttgaccaacatctcctcattttccccacccttcagcctctggcaaccagcattctactctctgtctctacaaattcgacttttttttttttttttttttttaagattccacatataagtgatatgtacagtatttgtctttctttgtttggctcatttcacttaccaaaatgcccttcaggttcatccatgttgtctcaaatggcagtatttccttcttttttatggctaaaaaatatcctattgtctgtatataccacattttctctatccattcgtacatccatggatgcttaggttgtttccatataatggccattatgaataatgctgtaataaacatgggagtgcagatatcaaaattgtgtttcttagggtgcaagtttaagagaaatactcaaaacttggcacattcacaaaagt

SEQ ID NO: 5643 - DNA, 210 bp, mus musculus
acactttataggggtcatctgctttagtggcataggtatcaaacaaggaaataattgatcttaattaaacacatatatagcagaaatatccttttaagaaaatagaacctgtattttgaaacttagaatttttaagaaagacttttaaaaatgcacttaagtttagccagttcaccactcagtaatccacaccacttgtgaggattaagt

SEQ ID NO: 5644 - DNA, 210 bp, mus musculus; identical to SEQ ID NO: 5643

SEQ ID NO: 5645 - DNA, 186 bp, mus musculus
aatggtagaaattagttgaatattggtattgtttatctcttttccattagcactctccttctgcaagaaacttgagggaaaagtacttatatgaggctgtacagctggaatggtcaccttgcctgggactgctcgcccaatcctatcacaagaaattacaaatctttacccccttcttttatggaa

SEQ ID NO: 5646 - DNA, 770 bp, mus musculus
taaccttgcatttttataaataagacatttagcaaaaatatcagtaaaagagatacactcttcgagggttataaattcctcaagttgttacacttaccccatctgaaaaattgtcacattttaatgactgcattaaaacttatatacattttatagcagtgatttgtactgccagtctaagtgcttctaactgtagcaagatgattctttaaaagcttatatttttattttctgatttccagcaaggttatagtatggctcacaaatgcactattcgcttttaggagatggatgttaatgtcactcattctttcaagcataatgaagaccataatcaaaactttacactaatcaacttgtttcaatctaaattagaacatttgtttcaatccaaatattttcatgatggttgtttatggccaaaattcaaaacgaaaagagaaaccaggattaaagaacatgtaagtgatcctaaaaaataatactaaaatcttcacttttatctcatctatcgggatctttcaggccaaagtttatgaatgaattttgtagttacttaaatagtaacaaataatatgtttatatactattaaacattcaaataatagtgaaacaaataatgactaattagcagatgaaaaagcctattcttctaagtccatattcttccaccatcaacaaacaccacagatcattacttaatctttgaaaaatgaacttatgtagtatatacaatgtattgcatatgctataaaacaccatgtattata

SEQ ID NO: 5647 - DNA, 666 bp, mus musculus
agtcagtagtggttcatttcatctgggcctagagttcacatgaattaacctagggagcctagtgttactgggaataggaagttagggatggcagctcttggttagatgacattgacaagtggtgcttttgtgcactgaagagaaaactttaaaaataattggcaaacttctcttccttggccttcctgttgacattacttatctcattatcttaataaggtttcgtgttagttttcacatctctctttcaatacatttgtcatcaaaggtaccattcttcttgccttgaatatatacagactaaatatctgtctctccattattccctccctcccttttcctgaagaacttggatcctccaataatctattactgctcttttggaaactcttttgcctactttaaaatccactggctccagtttattgtattgttggctgcaaagcaaagtactactttgactgtagtttctaactctattcctgtggcttagtttgccctttacctctagcaacatgatgcttctcacatcctctctgtcctgtctgcttatcccctcttattttcccatgcagcctgaggctggaaatgacttcttattttgtacttgctaggttgttgttacagtctccgtggccaaaaggttaaggaaaaccaggaaatatt

SEQ ID NO: 5648 - DNA, 393 bp, mus musculus
atttggtacttatggcctcagcaaagagtctgagcataaaataaataatgacaaaaattctgtcttttcatcttctggagttgacttaaacaggatgaggatatctacctatctacactttgcactttgaagatctagcatttaggtttgtttgcaatttgttctttctctatgtgtactaaaaaatattagctttctaaacataaacctcattagagtatccatttacatacaaaattccctaacaataatgatgatcactttttgagctcttattatacatcaatttacaatttacaattactttactcagtgcttatcactattctctgaagtagatggttatatcaccattctctgaagtagtctctgagtgaagtaattgtaaattat

SEQ ID NO: 5649 - DNA, 938 bp, mus musculus
acaaaccatattggaaaatattgatgaattaaactaaattaaatgcaaactgggaaacaagctgcagacagggagaagatattatatttgcaatatatataaatgatcaaaaatattaaactgtgtgtatgtatgtgtgtgtacacacacacacttatttattagtgctggtagtataaatcatccaaaccctttggaaaaaatctggcaatatctaatatggttgaagttgagcatacctataacacagcaattcctagtctaggtgtatataataaagagacatttgttcatgtgtacaaggagtcctgtttaaggctattcactgcagtattgaaatggtaaaaaattggaaacaacataaatgtctgtcaagtatgaaacagaaatataaattgtaaaatcataaaatgaaacaatactatacagtggttaaaatgaatgaattagatctacatgtatttccatggatacatttcagaaacatgtagttgattaaaaaagaaaatttgcaaaagcatatatacactatatgcactttaaaataattaataatttttaaaaatcactagacatttctattttgttgtggatacgtgtatatgctgaaaagtataatgataaagtgatgaagaatatattacatctttccgatagttgtttcctccgaggaacaagcagcaggaatagttaaatctacatagatttcttttatttttttaataaaagatctgaagcaaataaggcaaaatgctaacttttgttaaatctgcatagtattactgtcatagtattttctgtgctttttagtatgtttgaaatattattaaaagagaaaaaggatcataaatattagctcttttagatctttgctctccaaaattgtccacattctaagaccatctgttggaaacaagaaatataagaatttctatttg

SEQ ID NO: 5650 - DNA, 1956 bp, mus musculus
agaagtcattgatatttgtcttcataaaagtatatgaaaagttaactttttttcctctgtaaatccttaggaactaagctcttgatctcttaaatatagaaagataatattcacattctacctgtctagcttcttactgtattaaatttgtatcacttttttttttctttttaaaacagagatgtgctccggcatctattcgcctcatggacaacaagcagtttcagtttggtaagtaaggagtggtaattttaaaatgtcatttagccacagaaatttatgaaacatcagtaggaagagtacggagtgcagaggtagaaagaacgtcagtcttgcctttcaggaagatgtcagtctaatgaagatagacaattacataaatgagtgagggtagcagtgttggagggcctgtgaaagaagactgcactggataccatgggctgcaaatgaaggaattgattcttcttgattttgcttgaggataaagagtcagaaaaggcttttataagagagatgcttgagctaaatcttcaaaggtgaatataagtttgcctagatgtctcttcttcttctcaaccagacttcttcacttggcagcaaaaatgtgaaggtgtgaaactcaatgatgtgtgttaggggacttcaaattgttctatgtggctcaaatagagggtggggttagagttgttacatgagataaagttggttgggtgggctagggctttgcaggatagatttggattttgtcttgtcagcagtgggatttctttgaagaataaaatcaatcaactttacatcttagctcattctggcagcattgtgcaggatagattagaagggtacatgcatggaggagagacactaggagatgaaacagctcaagaagcaaagtttgagggctttgagcatggcagcagcaatggagatagagaacggatgatagattttcagaaaatcagtttgctaactggatgtggaaggctaaataaaaggaggagttgaagacaacacctagactgatttgattgggtagattaaataacatagaagaatgggtggtggtcttgggaaaaagatatgataatgggttgtagttatattgtgaaatttactttgggatttaagtttatagaatttaaataccctcaaaacaattcctaaaatcatgagagtgatcgttcagtaataaatactaaaggcaaagataggcaggcttttgtcatgtctaaaagtaagctgagattttaatttagggaagcatggttatagttacatagaaacttaactaaagtcaggttcgtaacatattaagagttttaaaattacattcttctaagttagtcataattgtttatttctttaagtaaattactttcaaaatactatactactgacaaaagtttaagataaatatgttctataagtaatgaaatacttaaatcaagtgaaaaaccacttgtgtgttttggcctgcatttaaagatctaggtcttaaagagagccatgcatctaattaataagactgtgttattcgtttatatgttattgttgttgtaaacaatgttagacctaggcatttgtaaaattagttatgatttggccatacttatttataattggagtccataacaatttaaagtgaaggtttaaagaaagtcttcctgtcatccctcttccatgttctcattactatacctgaaaacatacttacttgctcccctctagcttgctcctgtctgtggtattataggttctaccttctctagtctttactgtgtctcccctctctctgccctttacttagccaccaaagtgatccttttgaaatacagatctgatcatgctttttggctgtctatataaccttttttatttctcaattttaattgaagcctttacattaatatatcctgccatggcttcatgatcaagcaaaagaggaaataatgcttagca

SEQ ID NO: 5651 - DNA, 1830 bp, mus musculus
cgcataaattaataattttataagtatttagaaatggtataattctcttaacttcctctttcagtttttgtactaatgtttgtttttgttcgggaagaggagatttgcttttaatccttccaaaaaatgatgaaccaccgttccattcagtagtttgacaagctgttataatgtgtattttttcctcaattattcttgaaatatttagagcctctcctgcttctaacatgaaggcctttagatgccagtctgccagaaatctggaaacagaggaaccggtgaagtgaagatgtaatggagatttagctaatgatgtacttcacaatccaccttggatctcctgcatgtccaaatctcagtagttaatcaagtgtctgctgccattaacagaacagaagtaatggataacagaatggaaataagagatgccagaactacttccataactaactcaccaaatcaaatcatcagtcctcatattcttgttttatttaatacaaggagaagaggccatgcactttccaaaaggtcaaagccacatagaataggaaggcaatctctagtttaaagctttctcttggagtgttttctccccctgtcttcaaagggtctacttgagagatagtggtgtttactgctgcagcatgtatcacaagataagaaatgaaaaatcaatctttcttaccaccctgttctctttcccttttttatcttttcccttttgtcaattatagaattatagggacatttttctctgatagctggaagttgaacctcaaccaggtataaaagatgcataacaaccttttagcagtaagtgtcaagtgagtgagcactatgattatcaaggtgactttggaaaccttttaaaaatgcatttttgcaaaacaagataacatatattgataaaaagtgactctcagattggtaatgccagaaaaaattttaagaggactcaccaaaagtactagatctatgtaagttgtagaatagagtgaagtttttttatatatttgtggtagcctccatcttttaaactttttgaactcagtagaaaaacagactgaaattttaaagacatgcagtatttgtatcattttaaattctgtaacactgggaattaaatatactcaactttagaggacacttgccttactgtaatctataatcattttatattgaaaaatagggccagacattagccaaacggtaattaatttactagccataggtatagtgtttaatattctcttggggagtgagtctttactaagtgattactctatacttgataccactattaattgaggttcttttggttgtttaattaaatcagctcctttggatttgggccaagattgatccaccacatactgaaatccgttctacaacatcataatgtgtatttactagaaaaggacttgcttcataaggaaaaattattagaatatagagacttataagtacatttctagtgtgaaaaataagcatttgttagtttaagtgagacctgccaataacttgattgcaaatattaatatcatgtgaacatataaaatgggcccaaatccttgttcaaaagtgaaatttgcacgtttgtgaaataaaacacatcaatatcaatgactgaataccttaattcaaaacagcaaatggctaaaattatactatgcaagcaggaccctagtaagttatgtgggaaagcatttattgctgctaatattttattttcaattatttcattaggagagtcaaatgcttaagatagaggacacatgactaaaagtttcaccagcactcatggcatctgctataaaacatgtgtccaca

SEQ ID NO: 5652 - DNA, 2084 bp, mus musculus
aaataatgactgcaatttatggaaacacatcaaacttattaacatctgttagtgcataatgatagcaaaaagttttaaaaaagaaaataagctttctgttacccttgaaggatatgagggtataaattcattctgtaaactgatgagtaaagggaaagaaaacatttatgctgtcgttcctgtacaaactgtaattcagtttgttaaccaaatagttgatacgtaaaatgtctgctctacagaagaattccagccaatacatggagaaggaaaaaaagacctaaaccatcactcttttgtcacggtttctcaactaatgaatctaggaaatgatcatcaattactgcccatacaattaaatgaaaggttgatggagaatttttataagatgaattaggatgagaagaacaaaacctactaattagcaaaagaaagacagcagaaattactcaccttctgatgtgatatagaagtacaaccccactcatgaaatatacttgccaaaaaataggacatgtatctgttcaaacctctaggtctacccattttcaagaaactcagaagaaagaggaagatgtcacatgacaccatggaaaccaatcagcaaaatccaaaatgtaagacattctacaggacaaatgactgaaataagtggcaaaagataaaaaagggggaggactatcaaaaaattaattaacagattaaaataaattaatacttaaagacatttcatccagatagtctggatcttgatttgaacaaagcaactttgtaaaaaagaactttgagggagtcagagaaggttaaatatggaccaattattagataatattaaagaattactgataattttaacatgcgataatagtattgtgataatggttaaaatgagcttatctcttagaaatacaaactgatgtatttacaaataaaatgatataatgtctgagatttgcttgaaaataatccagctggggagaaggaaaaaaacatgtttgaaaagtacaatgaaataaggttggccatatgttgataaatattaaatctcgataacagaggcatgaggatttctattattgtaactacttttagataactaaaatatctaagtttgtttcatggtaggcaaagagacatagaaagtaaatgtgggaagcaaatgctgaaatatactctacctacactttcttgctactatttgtttttggaaaaaaaaaacttgatcaatagaaacacccaattttgacatttgtaaaatattaaatacaaatattataggcagtagtgtgctagtaaatagctctctgaagaaaaaagccctgatttgtagtatttaccagtttgcaacatgtgaatactcccaccaaggctgatttcaagctattgatgggacctcgtggaatgtggagttgagaagagatgtgtactctgagcagccagctccagcccacatctggagagatgacagataagcattagtttctggaatcacattatggatcttgggtaagatcccagctctaaagtgaaccctctgtttcctcttgttcagctaagtttttctgagcattagtttccccctcttaaaatgaggataattcctactacatcaagacaaggattaaatcagatcatccatgttatggacctagtatggttccagttgcaatgagtgatccttcatgctaatatcgtttcttctcttcaggttaaaatagaagggagaagaactcttggtctggggcagtttcaaagtttcaaatgaagggaatgaagctgatcatcttttcagaaggcttcctgcccagaatttctataattagttaaaattacaggtttcaggcacagtgtcacaaacctgccagaaactcaccaagctctaatttggttggatattaattggtaggctaagaagtgaatgtgatatgattgcagctagaatagaactatttgttaaaggtaggggtttctgtccaatgtgatctggaattgcaagtacacagtaacaattaagtattatcttagacttgacatggtgaaaagattataactttcctaatcttcttctggggaatgttgaggcc

SEQ ID NO: 5653 - DNA, 2084 bp, mus musculus; identical to SEQ ID NO: 5652

SEQ ID NO: 5654 - DNA, 1020 bp, mus musculus
atcattcagttgtatataattatttcttttccgtggaaatgtagctttttggtcaaagagggtgatacttctatcagacagttcaattctgtggctttctattatttcaaaataaaattagtgagcaccttccatgtgtcctccagaaatttgcttttgcatgtggggaaaagatgagggtgagacagctttgcaagctgcagagtaacctggagcagtgtctaatactcactgatattagctgggcttttgtcgttcacagatcaggaaaagaagacctacaccagcatcacttgtgattctcaatgagcataaccccccaggtaaagaagcatgatgtgtttcacactgatggaacagaatggaattgtttaaagaacatcaaagtacatgtcgtactgaaaagtttcaatttaggatttcacagttagcaatactctagaaagctaatctataaaatggatcgtaaacagaatcagaaataaatattacaggaataatctcaagccacagcctgtatttcctctagaatatcataagtgatgatatgctatgaaatattttgctagcactggctgtcatatgttcaggtgtttgtatggaacctggattactgcttattaatgaggctggtggaaagctgtttaattaggtttaaaagctcaaattacagccctagagatgcttatatctttacagagtaagttttttatatggaaaaggttgacatggggtgggcaatgacccagcgttggcttcagctttgctgatgacgtcatctctgaataatgcaattgacaagtaaccagatcaattttcagcactgcctatttgagagccattctgaatggctgaatccatttgttgaggttttattttccatttcctgtaaaaatgaaaaccgcattattattccggataaaagactatgatctgtaatccacaaacattatttacttattgaagcggggtgatttttagtctcacatttaagtgctgcttctggatatacaagtagga

SEQ ID NO: 5655 - DNA, 1020 bp, mus musculus; identical to SEQ ID NO: 5654

SEQ ID NO: 5656 - DNA, 1020 bp, mus musculus; identical to SEQ ID NO: 5654

SEQ ID NO: 5657 - DNA, 1211 bp, mus musculus
cttttggaatatactttgtcatggaactcagactgtttttctctcaaatgaaaaggattggtgtctctttttctctttctttttaaaataaattaatgttattaggtgggaaagtaaaatgatttcaaggctgccatgaatgaagaattttatgattaagtagaccctacaactccatgtatctcttaagtctgtgatatcactaacatgtatataatttctcattaattagattctatttcatgacagggagaaatcagaaagcttttcataacatggcacagtatttatttccctcacaggtctgatggcatcgtactttgtatccaaatctaaggcttttacttttttctctttctccacagttacagaatgcatcccctaagcaaaggaagcagagtgtgtacacaccacccaccataaaaggtactgttcaggtactgtttcgggttgtcatgagtggtgaatcatggctggtcggccgtctgttctctaggaccacatatctgatgataagctagatctagtctcagctctacaacttaacagtgttatgttcagtaagatatcttatctacttaaaacttagtttcatcaagagtaaaatatggggttgaaaaagaaatagctagtgatctcagaatttcagtctagaaattcagtttccaaaataatgacaaagatttttttttaccgttattcgcatacttccttaaagagattttcccagaagccctaattactcttgccagtgttggcagatgattactgtttttctcttggctaaagcaaagcagaataacttgaatttcagggagactgaggatgaagtgttgcctcattgtattgtgtcaggagcagctctaagaaactcaatcaaaccagctattcactgtacatgtaactactgttgaaacaacaactaagaatctagttcagattctgaaattttccccagaattggaactgctaaaagaagacctgtcagtatcttgaccaacatcagttccagggaaagcatctcttatttctcacactgaaatgttcttgatttgaggtagagtctgtccagtctactctctcatgttttttccagtctggtgcttgggctgtgggcccagtggctgatcatactcaatttgtccagctcagtttcaactgcatgagaggccagctgagcagcttcctctggagtttggagagagggctaa

SEQ ID NO: 5658 - DNA, 1211 bp, mus musculus; identical to SEQ ID NO: 5657

SEQ ID NO: 5659 - DNA, 1211 bp, mus musculus; identical to SEQ ID NO: 5657

SEQ ID NO: 5660 - DNA, 988 bp, mus musculus
cacaaaaactataaccctagctctcccagaatatattggtaataacaaactattaaagtaataatgagaatggtaaagcatatagtctggctgtggattccagccctttggagctgcttggaatataaatcacttctcagtttgcaaatttattcccctcagtgagatactgtatataaaacacaatgtctgatttgaagagtttgggcagaggaatggggagaccctcaatttcttcacttttcttaacctgtcttgcctccattagtggggctatcaacactgtatcacctgatggccttagtctgcacctgttgctgctgtcccagatggcactcatcttggtcttttttcctgaggtctcatcttgacagtgctgatgtggaagacatcccattcctgaagtccattgttgccatgcttgttgaagtagtggaaggctctaacttcttacttggctcctgaaagtgtctaagcttttactttactttttcaagaaggtatagacaagtccttgagatgagagaaaaagctatctaaagagaaacacagagagctacctctaaaagtgctgtgacaagggataccccagaatgatgtcaagccacactgactcttttctctcagacatgatccatttcccatttagagagagactgtggcagtgtttatcttctcttttgtgaggagttttaatttctgtatgtcttagcccagttttctacataaattctatttttctgttggaattctatgttgtctttgtgtaagtagagctttacagcatcagcttgggcagttgagtgttcttggtcatcgtcttctccttaatctttttggaaagagtaagccagggagttttattagggtttatgtatatataattgtcctcatattctatcttttttctgtattattgaggaaaagcagtaacctgatagaacttgtatatatcatcaagaggactgacctaataagcacctactat

SEQ ID NO: 5661 - DNA, 988 bp, mus musculus; identical to SEQ ID NO: 5660

SEQ ID NO: 5662 - DNA, 988 bp, mus musculus; identical to SEQ ID NO: 5660

SEQ ID NO: 5663 - DNA, 179 bp, mus musculus
taatgttaagagcaaatagattatgcagaagaataaactaaaggaatgatattctacatcaaatttttttcttcacatagtaaggctgagcagaccaaaataaacagccagagaagttggtcatttttacttcaccattcacctatcctagcctcattctcccatctcatagtaccttt

SEQ ID NO: 5664 - DNA, 12882 bp, mus musculus
atggggtatattaaatgtgatcatttactacgccatcaatgaactgtatattgtctttatacagtgaattgattaatctgatgttatccttagcatacctaaggaagatgaaataaagacttcagatactattaatggtaactggaataagaggaacagaaaccaatgttctaagtagttcaaaagtttgtttttccactaaaataactataaactagtaatataaatataaacatattaataagcaaatacaacaggtatcattaaaatatcatttgcctattaatgttgacactttaggtatatgtgtttgtgtttgagtgtacatacctctgtgtgtgatgtttaaataagctatactgcaatgggttggcattagcagaatgaaatttcaattcatatcaatcaaaattcaattcatatcagtcaaaattgaatgtgatgtagcagctaaaatgtgaatataaagaaactaggagaagctgtgtcgttacccagatgttgagtctgatccaagtactaaatgactgtgtgatttttaccagattatcaagcctctttgaatttccagatctgtctcttcaactaggaacaaaggtttttgaatttaattttcattgagttcctgtttaaatataaagatttaaaatttgtgtggttccttttgtactgcccaaattgaaatcttataaatcccaacattcagcattacattgttttatttatatgcaggttttaaccaggcacattgactagagttatttcaaaattttagaatacacttgtttaacaacccatggtggttgtttattcattatttctccatcatacttaactccattagaagtgatatgatattactaaacatttgcttatctttacagaaaatctaatgatttacacaaataacaaagaagttcccagatggtattatacatggatgttcaaatgaagagactaaaacttttatactttatgaatattagtgagataaataaataaagattagggtttttttgaaataaagattaggggtttttgacatcaataattgggtcaatttgtagagaatagattttcactgtgtttttttttgtactcatcaaaacattatacttgtgttatttcatatttaagtatctaccaagatctacttttgtaggactcagtgctcttgattaaggataataaatactattgtattctgctttgtattttgcattatacaaatccacacacttttttaggcaaaacaagaaaaacacctgtaaagcccacatagttctaaagcatttggaaaaactacaaaacaatctttcttaagtttttgtagtattggaaataactgtcaattaaatacatattaaatataaacataaaataaaatatacatgtataaatgtaaacatatatatacaactgtcccagattatacagcagttgtataatgtagcatttttagatattttgggttatactaataaggatttgagcaaaatattgagcaaagccctaattgttttgtatagaattcaacaggaaaaagcttactgagaaataaaagatgtataaatttgacctaggcatatatatgtacttaaaaacaaattgaaaattaatctttctaagcccccaagaactccagagataatgataggaaatttgtaccttcaagtggccaagcttcattgtactataatgtctagttctcagtccttcagatactttccatgattaagccaccacttgcagacttagatccattccagcctatgaaaattttttgttttttcagagtaaatttcgttcaatagctctatagcttcctattaaattcacaaaactaatggacatttttcatcattaaatggtgtggtgatcccatggccacctttctgcattttggtaagttttagtaaccaaaccaccttcttaatttctattatcttacgttaatagacaaattgttgctctcttcatgcaatcttctttttaaaaatcagtcatcacctgatgtccaatcaagctgcttcccacccttgcaagacatatatcactacaattctctcatgctgagaacctactgctttagatatatgactgtacctggcttaagagttccaaaatgcttcatctgtttgctatgattccctactcttccctaataaggaaagttttactattggctttctctgcattgtgatcatttaatttccagctcttccttaattttccttctctacccaaaaaactccttgttctaaatctacttagatgggaagaagaaaggagaagtttctactttctccatgtttagggttggtttttcccacttaaatcagaagaaaccatttttccacttattggtgagtaaacacaaaagagacaaagcaagaataagctctgactctaatttctactcttccagatgtaatgtgactgtattacagatttgagacagatctaattaattcctgttatcctcttttcactcacaaaaatgtccctatttgagaaataaaatatatggtaaccttagccagaggtgtggaagtcagttaatacaaacaaaaaacttccgaggctatgactagaaaggaagcagattaaaatgaaggtaaacctcataaaataagaagtgcaattgaaaatggttagactcccacacattaataatgggagactttaacatcccactgtcaacattagacagatcaacgagacagaaagttaaaaaggatatccaggaactgaactcagctctgcaccaagcggacctaatagacatctacagaactctccaccccaaatcaacagaatatacattcttctcagcaccacaccgcacttattccaaaattgaccacatagttggaagtaaagcactcctcagcaaatgtaaaagaacagaaattataacaaactgtctctcagaccacagtgcaatcaaaatagaaatcaggattaagaaactcactcaaaactgctcaactacatggaaactgaacaacctgctcctgaatgactactggatacataacgaaatgaagtcagaaataaagatgttctttgaaaccaacgagaacaaagacacaacataccagaatctctgggacacattcaaagcagtgtgtagagggaaatttatagcactaaatgcccatgagagaaagcaggacagatctaaaattgacaccctaacatcacaattaaaagaaataaagaagcaagaacaaacacatttacaagctagcagaaggcaagaaataactaagatcagagcagaactgaaagagatagagacacaaaaaacccttcaaaaaatcgatgaatccaggagctgtttttttgaaaagatcaacaaaattgatagaccgctagcaagactaataaaaaagaaaagagagaagaatcaaatagatgcaataaaaaatgataaaggagatatcaccaccgatcccacagaaatataaactaccatcagagaatactataaacacctctatgcaaataaactagaaaatctagaagaaatggataaattcctcgaaacatacaccctcccaacactaaaccaggaagaagttgaatctctgaatagaccaataacaggctctgaaattgaggcaataattatagcttaccaaacaaaaaaagttcaggaccagatggattcacagctgaactctaccagaggtacaaggaggagctggtaccattccttctgaaactattccaatcaatggaaaaagagggaatcctccctaactcattttatgaggccagcatcatcctgataccaaagcctggcagagacacaacaaaaaaagagaattttagaccaatatccctgatgaacatcgatgcaaaaatcctcaattaaatactggtaaactgaatccagcagcacatccagaagcttatccaccatgatccagtgggcttcatccctgggatgcaaggctggttcaacatacgcaaatcaataaacataatccagcatataaacagaaacaatgacaaaaaccatatgattatctcaacagatgcagaaaaggcctttgacaaaattcaacaaccccttcatgctaaaaactgtcaataaattaggtattgatgggacatatctcaaaataatgagagctatctatgacaaacccacagccaatatcatactaaatgggcaaaaactggaagcattccctttgaaaactggcacaagacagggttgccctctctcaccactcctattcaacatagtgttggaagttctggccagggcaatcaggcaggagaaggaaataaagggtattcaattaggaaaagaggaagtcaaattgtccctgtttgcagatgacatgattgtatatctagaaaaccccattgtctcagcccaaaatttccttaaactcatagacaacttcagcaaggtctcaggatacaaactcaatgtgcaaaaatcacaaacattcttatacaccaataacagacaaacagagagccaaatcgtgagtgaactcccattcacaattgcttcaaagagaataaaatacctaggaatccaacttacaaggaatgtgaaggaccacttcaaggagaactacaaaccactgctcaataagataaaagaggatacaaacaaatggaagaacattccatgctcatgggtaggaagaatcaatatcatgaaaatggccatactgcccaaggtaatttatagattcaatgccatccccatcaagctaccaatgactttcttcacagaattggaaaaaactgctttaaagttcatacggaaccaaaaaagagcccgcatcgccaagtcaatcctaagccaaaagaacaaagctggaggcatcacgctacctgacttcaaactatactacaaggctacagtaaccaaaacagcatggtactggtaccaaaacagagatatagaccaatggaacagaacagagccctcagaaataatgccgcatatctacaaccatctgatctttgacaaacctgacaaaaacaagaaatggggaaaggattccctatttaataaatggtgctaggaaaactggctagccatatgtagaaagctgaaactggatcccttccttacaccttatacaaaaattaattcaagatggattaaagacttacatgttagccctaaaaccataaaaatcctagaagaaaacctaggcaataccattcaggacacaggcatgggcaaggacttcatgtctaaaacaacaaaagcaatggcaacataagccaaaattgacaaatgggatctaattaaacttaagagcttctgcacaggaaaagaaactaccatcagagtgaacagacaacctacagaatggcagaaaatttttgcaatctactcatctgacaaagggctaatatccagaatctacaataaactccaacaaatttataagaaaaaaacaaccccatcaaaaagtgggtgaaggatatgaacagacacttctcaaaagaagacatttatgcagccaaaagacacatgaaaaaatgctcatcatcactgtccatcagagaaatgcaaatcaaaaccacaatgagataccatctcaccccagttagaatggtgatcattaaaaagtcaggaaacaacaggtgctggagaggatgtggagaaataggaacatttttacactgttggtgggaccgtacactagttcaaccattgtggaagtcagtgcggcaattcctcagggatctagaactagaaataccatttgacccagccatcccattactgggtatatacccaaaggattataaatcatgctgctataaagacacatgcagacgtatgtttattgtggcactattcacaagagcaaagacttggaaccaacccaaatgtccaacaatgatagactagattaagaaaatgtggcacatatacaccatggaatactatgaagccataaaaaatgatgagttcatgtcctttgttgggacatggatgaagctggaaaccatccttctcagcaaactattgcaaggacaagaaaccaaacaccgcatgttctcactcataggtgggaattgaacaatgagaacacatggacacaggaaggggaacatcacacaccggggcctgttgtggggtggggggaggggtaagggatagcatttggagatatacctaatgttaactgacgagttaatgggtgcagcacaccaacatggcacatgtatacatatgtaactaacctgcacgttgtgcacatgtaccctaaaacttttttaactttttttatcctaaaacttttttttaaccctaaagtattaaaaaaaaagaaagaaagaaaatggctaaccatagagagaaaattcctaggatccaagtaatttcattgaaatgaaatgaaacaggtaaagtgaaagaaaaacatcacattatggtaataaaatgaaataatatagctattaaaggaaataaagactaagagaaggaggataaaagaggaatatgatccaggatattaggagaatagagacgcaactaatgaggaaaagaaagtaaaaataaagggattgtttgcaggaaaggatggattgtcttttagaaattgtagaaatcattcaaaatgcagttaaaagggcagaaaagtgaaaaccagaaagacattgaaaaagttggaggcattttattagcaaaggaaattttagtgggaagaggaatatatttaagataactctacaaaaataagatgatactcaatctgagcttttaatttttatattgttatgctgcttcattttgatttaaatatctcaccaataaaatgtacttaaattttatttttaatagtaattttcacgtataaacatgattttaaatgtttataagaaatatgaccaaaggcaagaaatctttaaaaagatatgcagtatcaccttaaagagttacattcaattgtcagtgtttcagaagacaagaaacaatctctgcaacaaaacaaaccaaaagaaaacaacatttaataattaggtaagtgacttccaggaaaatccacatgttatttaggacaacaacatatattaatagagtactattaagtattactaaaaagggaagaagaaaacaattaagattattgaaaaatgttttcatagaggtaaaagaatgggtgggaggaacttctgacaattaaaatttttactttgatagacttaatgaaaaatgtaattagaagggagtaaagtagttatgaaaaaaataatgaagaataatgtaacgtgacttttatatagctttataagaaatttgtttttaaacttttagaataaaaatgtacttctcatatatatgtatacatacaaaaaatgtgaagcaatttattgtgtgaaaactcactaaaaattgcctggtgtcatgtccaatcgtatcaaatttatcacatcatcatctgaaaatatcttataagaaataaactgtaaatcatggttttattgaacttgagttcagcggtgtctctcatggtgtcttatggtaattactgaatttatgaagatactaaaaaaggctatgtcatttattttctgatgaagtttatagaaaatcaatccaattgatagtttgtaattatgcagaatgctaatgctaaatgggtatatagaaaattaactgtttcttcctaagatactcaagtgttaatttttttcccctagactgtcaggcctatgagtaaatactaaatctattagctgtctccactcataaaccaaaccaaaccaatacaaagatattaaatgaggagaggaaatgtagtaaaaatactgtctgggtcttatggttgggatgagtgattttataacatattatggtgataattttattctaggattttatttttggcctaatataggaatgtttaaaaaaggcttttctatgaaaattataaatttatacttgagattaaagtctagaagggggaggaccttaaagctaagttaccagtaagacaatgaataattcagaagagaacactactcttttactgactgagtgcccaagatgccaatttccatgaagtcttgatttatatagtaaacgttatgcacatatatgtgtgtgttttctaacagttattttttaagctttagagataattttagactttcagaagagttgtaaaaatagtagagttcttgtatactctgcacccaccttgcccttatgttgacatcttacataacaatagaacatttgtcaaaattaagaaattaaccttgatataatactaactaaagtagaaagtttaaaaagtagagattttagtcttttcactaacgtccttttactattcgaagacccagctttgcatttagctgtcatgtctatgttgtgtcttccagcctgtgatgtgtatcataacaggggatacctgatgttgtaatgtatttctggtgttgttaactttgatcactgtgctaaggtggtgtctgctaggattcgctactgtaaacttactgtgttttccttgtaattattgaatatttgctggagataccctgagactatgcaaatgtcccatttctgcttaaacttttgctcattttactatccattggcagatcttgcttgtggcaattactactgtggtgttctaatggtgatattctgtttctctcaatccttctacatttattattggaattcttctgtaaggaagagttgtcacgtctggatttatatttttaactataataagatattcaggataagtatagatttagaacttaaagatgttaaatcatgttaaaattattccaaataccatatcaaagaaaactaagttggtaatctatctcagaaaatatatgtacttaagaagggaaatagtttttatgatttgtagaattgattcaactttttacttaatattgactttggactgaattcaaagttttcttgaaattctacatctggactttttaaagtgtctagatttatattactttggggatcattttgtcaaagtcttgaataaagttacccagtcctggcatgataaatttaaaaaaaaagaaaaataatttaataaaaaagaatgagacatgattgtgtgtaattatagttgcccattgaacatttaaagtttaaaatgattatcaagagagggctaattcaggagtcaacaaagattggtctaatatagaagtgcagaaaggaataagcttcataaagttctataacggatgtgctgtaatggatgctatttacctagtatactagcatacctttgtactacctggtcatctctattattgattctgaagcatcattattgttactagagtgtgatcccctccaggaaaatttatataagtggccataggagtagaaatgaaatcttatccaaaagaactaaaattcaatgcagaaaatagatatttattagcatctaacttctgttttttcatggatttatcagccatcagcttgatgctttatacttagaaacaattacttaataaaaagcatgtcaagaagggagtcactcctgctttttgtttggtatgaatgttatatgtgactacttctgcatgttcacttcatatctcttattttgtatttaaaaatttctgtttgaggttttagaagcagattttagaggcaatgagaaatgagaaaacaaagtgaagcctcctcttatctctgtccccttccactctgtccagtcccatccatggcatgcatcctaatttatgctaaagaaaaagtgttagttttaagtacacgcttctgaaataactgaggtcctcagtttaccttggtgaaaataattctacatgctcaggagataagagatattatatgctctctaaaacattttcagtagtaagatgtagaatgagagaagtaaaataattccatttgaaaatactcgtttcaagttatagtctttaagacagtgtccgcattaatagtatcttggcatttcctgttgcctatttcctcagccaaaaaattaatgttgagagtttaaaaaaagacatggttaaagtataaaaatacacagaacaaatttatgtatttataggttatcacaaattttataaagaaaaattaggtaaagctgaaaaatatgcttaccatttgaggagaaaatattacttcatcatgtaggcactgtgatggccactgaagaaacattttctggtacatgttatacatcccaaataagagttcatttttctcatagtaaacaaaatatctgcatttataaacacaaggacatgatatttataccttgtatataataatagagcagtttccacaaaaaataggataaatatttgtttggtttgtttttatgtttattaggtaaactttcttttaacaaatctttgtctttatctcatcaagatcagaaatctttctaaacgtgatctgtagattttatttatgtatataaattaccctccatactttgaactaatgtgatcaatgaaaaacttaaaaaattaaaagtttgaaataataaccataaatatattaaatatactgaaaaattgattcagtgttaagagttaaaagcataatgtttaaaatttaattattgaaagaatctacagaattggtttttcaaattgcaggctttttaaagacaggatcattatcaaaattctagaaattatcaaaaaccaacagcaaaaagtaaattaaatagtccttctcgcttagacttaattggcttacaggtgtctttcatatgatctacatgtctgactttgccttatttacttgtaagctctttatatactgatagggctctctgtcttagaaagcttgataaatgcagagaccttatctatcctataacttgctttacttccaacatccagaaaaatatcagtgttatttcctccacagtctatggtctgaacaactacacaaattatacaaaacccttcaatggcttgctatctcatttaggatataaactctaacccttagcaccacctccatggccttacctgtttttgcttctacctttcttttaatcttaccctctccagttccccacaggcacactgagccaagacacaccagcactgtactcagcagaaatgcactgagtgtaacattcttaagttcttgctgtttccactcttcctggagtgctgtactccagacatccccatgactagaacttctctttgactcaggcctccacaccaacaccatcttatcagaggggcattacctaccacctcatctaaaagcacaattccccctgctcactgtgcaatgtttcctcaccctgtcttattgtacttcttgatggttatgtccaacagacatttacatgtttagttaattgttcttttatttttggaccctatcttctgtttgagattttattcatttcaaactctgtaggtcatgagagagcatatcacaggcattcaaataaatgtttgttaaaagaagaaataaatgactggataattatcagaagagctcctcaaagaaacacactagtagtcccgagagttctccaggtgtcttctcaagagaatattctattatcttctgcttggctaactgctgcttcagactatgagattagtaacacattaatatcagaaagcagactcccatccaaaagtgaggcaataacaaatgctctcaaggatatgggggaaagggaaccctcatacactgctggtaggaatgtaaattagtgcaaccactacagtgaacagtttggaggctcctcaaaaatctttaaaaaaagaactataatatgatccagcaatcccattgctgggtatgtatctcccaaagaaaggaaatcagtagattgaagagatatctgccctcttatgtttgttgcagcactgttcacaataactaagattgggaagcaacctaagtgtccattaacaggtgaatggaaaaagaaaatgtatttatacacaatggattactattcagccaaagggggaaaaaaaaagaagaacgagattttttcatttgcaaaaacatggatggaactgaaggtcattatttaagtggaataagccaggcatgaaatgacaaccattgaatgttcttgcttatttgtgggatctaaaaaccaagacaattgaactcatggagatagagaatagaaggatgactaccagagtctgggaagggtcgtggggcatgggggagggaggtgggatggttaattaatacaaaaaatagttatgaagaatgaataagtcctagtatttgacagcacaacaggcagattatagtcaatactaatttaattgtacatttaaaactaagatagtataactggattgtttctaacaaaaagaataaacacttgaggggatggatacccgattgtcagtaatgtgattatgcattgtggttacatacctgtagcaaaatatctcatgtacctcataaatatatacacctattatgtgcccactaaaatttaaaaaaaatgagaagaagaaagaggactcccattgctacttcaatcactcctacctctttttaagcatggcaatagaacagaggttagattttggcatttgacattagtttactgaaggttgaataaaatcaacaggacataaaatacacaggagactgctgaatttgactatagttagaatatgaattagttgaatatggttgtttgtttgtttgttttgagatggagtctcttgctctgtcacccatgctggagtgcagtggcgcaatctcggctcagtgcaaccctctgcctcctgggttcaagtgatactggcacctcatcctcccaagtagctgggataatattgtttttattattatacattcttttactattatccctgagactatctgttatatttacc

SEQ ID NO: 5665 - DNA, 123 bp, mus musculus
ggaagcttgcttgtctaagtgtgccaaggctgcaatcaagcccttcacccattctttcaagctgccacctttgtgacagctgcagatgcagaagagctggctgctgtgccaaggtaaaaaggg

SEQ ID NO: 5666 - DNA, 352 bp, mus musculus
tataataaatcataataccaaaattttgatatttcacataattttcatgtcttacatttgctctagtggaaatataatttgaaaaattacagaaaactagctcttcatttattaaagttatttatttttaacaacacttgggaattactattcgttaatctcacactttaagaaacctgccagtactaaccacaaaatctgtgagttgaagcagatattaaaaaacagtagcacagaggttagaggtacaaagacttctcacttgttgcattgcaggggttcaataatatgatataaattaatccagccggcctaacaagagatgatacctgggttctctggccctcaggag

SEQ ID NO: 5667 - DNA, 206 bp, mus musculus
ccaatgggctgcctgtggttcccataatcggtcctaaaaaacaaaaagagtctgagggcaaagagttgtcccagcgtggactccacgcaccaactatgttttcaggattctatttgttgatgttaaatgtcaaaaactaaaaaaagattatgtctatagttgactattatagaccataaaatattaacaaaaacacagatatataa

SEQ ID NO: 5668 - DNA, 1075 bp, mus musculus
caatatgattacaaatttacttaacagtataaattagagctttcacaactctgaagttcttttcctactaaacaaaccttggaacatatggaaaaattctctggctggcttaatcacttaacttgacctcttttcattatttgcttggtctgtcctcaaaattaaaaggaaactattatatttcatgatgtaacatgcagttcaattatcagtaaataatttaacaagatctgaaagagattaaaaatgatttgcttaacagctttggttaactagcatcaattgtattttagtgaagatatatttagaaaaagctaaatatatagagagaagtacttgctgaatcagccaattagaggcagtatgcagagaaccagtgagctgaaaccaaggattacagttaaacatacttctcctgagaacaatgtcatcatttcatctcccagtatgagagtctatctaagttgactttcagctatatttgcaatggcattatgcacatgccttgccatgattcatctattatggaatttgagacctcttggtgaaagggatgattcctccataactacctctcaccacgtgtctgctggcaaggaaactttgataggtcctttgcaaagtagatgactcaagtgaattgcactaccaaatgatttggtcattgctagatctcatggagtgtacaggtgcccattatgtgtttgaatggctgctaacctaaacttgctgctctatctttgacaaacccaggggccatacacctgcccccttgattaggaatacacaagtttacacagtgaaaaataccaccttattcctagtagcacaattttcagatcattagggaatagggtaaagaaggaaagctataaaagtggaattatttgcattaataaatattttgtgagttgaatactttttaattattgatgtcaggatgatttagttaccactaagagatatttcactaagatactttttggaactctgattttgaagcctattagataagcaacaaaaataatggtaatgttggatgaaatgtgtttcaaatatgtggggtttggaaaac

SEQ ID NO: 5669 - DNA, 445 bp, mus musculus
tattttaaggcaagaaacatgaggtcaaaatagccaccaggttttcagtcctccagttcgttaattcaagttgaaagggattgtttctttgtagttttttaaaaagggtgctgattgtattttctttattttaacttattccacattcccactcataagtgaataattactattaggatcatggtactgccattgaccagtcctggaactacagctagggtcacccttagccaaacataactaccaggaaagaggaaaaaaaaaaaaagtctgcaaaggaaattcagggtgctattaccagaatattttggtggaggggagggtgttgggtggtgacaggaaagcatagtgtatgtataaacaagttaaatgcagggtgcagggtgaaatgcacactgttatgtgaaaatgctactgagcaaaagagcaacagtttaaatggtaa

SEQ ID NO: 5670 - DNA, 445 bp, mus musculus; identical to SEQ ID NO: 5669

SEQ ID NO: 5671 - DNA, 220 bp, mus musculus
tgtgaaagagatgcatacagtgtggttcactgagtatgaaagaagataaaagctgtgtgttattaaaatattctgcattgacttttatttcctgtagatgtaatcagtgtgtattagttttttacggaggctgaaacaaaacaccacaaactgggtggcttaaacagcagaaaatattttctcacagttgtggaggctggagttccaagatcaagatgcc

SEQ ID NO: 5672 - DNA, 220 bp, mus musculus; identical to SEQ ID NO: 5671

SEQ ID NO: 5673 - DNA, 173 bp, mus musculus
tatttcatgattgctgcaactaaaagtttcataacaatgtacacacacatttacaccttctgtacatttatgcttccaaagaaaatctatggtagttttcatttggcggcaagtaacagaaaacccaagctaaaagtagcttattacaatctaacaattaattgattctatac

SEQ ID NO: 5674 - DNA, 224 bp, mus musculus
catgtacctggatttcaatgacagatactgttggaaaagcactatttgtttttgaattatgaactatgagtgttaaggcctttagttgctaattgttggctttcatgttatcaaaattatatccttcatataagacttcatataagacttttttattatcactgaaatttgattaaatctatctggttgaagacagtaatttttctgtttcaagtagacaatca

SEQ ID NO: 5675 - DNA, 1294 bp, mus musculus
tccagtaaaatatgctttaaattcctttatattagcaaatccctaactgtattagagtgaatgtgttcatttgcttgggttaccacaaagtaccacggtctgggtggcttaaaaaacagaagtttatggccgggcgtggtggctcacgcctataatcccagcactttgggaggccgaggcaggtggatcactttaggtttggagttcaagaccagcctggccaacatagtgaaaccccatctctactaaaaatacaaaaattagccgggcctggtagcatgcacctgtaatctcagctacttgggaggctgaggcagaagaatcgcttgaatccgggaggcggtggttacagcaaaccaagatcatgccattgcaaaaaacaaacaaaaaaactcggaagtttatttcttcacagttctggaggcaaaaagtccgagatcaattgtccgtagggttggttacttccaagggcctctctctttggcttaggttttcttccagagtttttatttcttcccttgtgcctgcttgtgtcctaatctcttggaaaaacaccagttatattggattaggacctatccatatgacatcattttacctaattacctcttctaaggctatatttccaaatacaatcacattttgaggtactgggggtcagaacttaagacttcagcacatgaactgggggaacacatggttcagtcataacagtgcatactatggcagtttaaatatcctattctgatactgaagtacttttcagtgactattcagtaaatatacgtgtacttctttgccttttcatagatccaaatgctgtctttctttctgctcacaattttacccttgctgatttcttgaagccactggcttcctcaaaatggttggtgaggaaggaatgcgaatgctcttgtcttttggaattctgggataaaagttttgtcagaaaccaaagagtatttacttggatacttttccttaagatgatgatgatgatgatgaatcatttattgagtgcttattttgggcaagtcattgtgtcgtcattttcacaacaaacctacagaatacatgtttttatccccacttgatatatgaggaaactgaggctcagagagatgaaataaccttgacctggatacttcttattttgtgttttcttttttagggtacctgtttgctcctaaaggactatcaattgtgaaagtagaaatgtgggaaagaagggaaggctatatcaaattcatagccactcagcttgttgatggcaatctgagacctaagggtccca

SEQ ID NO: 5676 - DNA, 1067 bp, mus musculus
ctttcaaaaataagtaacagcattaacaaaaaccaacaaaatttggccctagcccatctgaagtatcagccagatttgcatttagttccccagaccaaagtaggagaagcagttagctggttacaagcccttcacagtgctaaagaacaatgaatggagggcttcaaaatcaaaaccatacgtttggtaggaaacagctccaactggtgcttgattactaactaggcgttctgcttctaacatgattaggacaaacacagaaaaccctgtagggtttgaactgatggactgatgtttccctcccaggaagaaaaagagcagtatccaatggcattgaatcactgtgattctggataccttcaaaagccagggctttgagggggttctcatttctatgccacacagtgagcccttctctttctcaggaatcctctccagagagagaggctttgtgtagaattttcctgaatgcaatgaatgtcagcacattcccagctagaatgtgcattctattcttatcaagtgaaactgacctccctgccccagcatgctctccttgttcaacatgatgattaatttcaatgatgcaggtttctagatgaattgcactagaatttgcatccactccagatggcaaatatgtacctctggaatctcctcacccttaggaaagaggtcatgtgctagcttgcaagaatgaggatttttaaaatagttggcttacaatcaaatctgtgtcccacaaaatgctctgtccagactagcctctctccttttagttggcagcgatcctctccttcctactcattttccatctgataccatgtgactcaagtaggagtcacaaccaaaatgaattttttttactgcaaaattcaagattttacagtattttttcagccaatggaagcaaccaggattcataagagtctgcaagttgatgttcaataggcccctgaatcatgcttattcacagatttccaagttaattgccctgatacatgctactgagcttcttctagtgaacaaaaatcttactccattagtcatcactgtcaaaaggaata

SEQ ID NO: 5677 - DNA, 1196 bp, mus musculus
attaaagattagatttcagaattgtgttagtagttccatacaacttttactattcatagttacccattgtacattaagcattgtcagaaacaaaaaatatattcataaatggaaatagtaaaaaagatatttaataagatatctggattttaaagtttttccttttctgaaataaaagaaaaaataaataaaacacaatagaaaacaatctaaatactagaatatgagtgaggcaacagaatgatatgaattcatttttaaatagaaaaaaattaagtgcaaagtactttatttaaaaagcatgaacacaccattttatatactatcccctgatttattttcacaatgtcttatgtgtatatatgtatattacacatgcacacacacttacacacacacaagtcccatgggagcacatttgaatgggtatgcataatgagtcatggaggttaattggccaaaaatttgggtaagtagtcctatttccacaacggccgaaaaagatgagcatcactcattctaacatacacggaaccctcaaatgtgatcagaaaaatcaacagctcttaacttaaatactgataatcgatagattcacagtactgatacataggtgagaataatagcttcatttcaggtaagtataagggatttgggaatatctggttatgaagagtctaagattgaaaataagtgctgatagaaactgttcatgaaatgtggccaccatccattctatattctgagaaacaatgtggtaataatctggtgattttggtcttttttgtctgtttgtcccaagtacagaagttgatggacatacacaaaataaacttctgctaaaaaccttgatgagtgataaaggccatctgccagcagctggagaagtgtactttgacaggctgtatattgcagagagagagggagagagagagactattagaagatattttcagaaatagttgtggattttttgtaaatgaaattaaaacataaaacacagaaggcatatagtagggaaataaaagtcaaaattgcattcctaaagtactgtcatctctgaggaaattgtattagctttatccatctcaaagtatttttctgaagcatgtgattaaataacaataatattgacttctatttaaagatatgttactttattattatgttactttgctgaattcgttattaaagat

SEQ ID NO: 5678 - DNA, 937 bp, mus musculus
tcttggaatagttcctaccattttgcaatacataaacaggtcatattcaatccacctgtaaggtacaagggaaataaaagtaattttttcccttcttccattgctactacccaagttgaagactgggacattgtctttctcccacaccactgtactggtctcctgtttgctctccctgcttcctctgtgtccccttaatgatcaatttttagtaacagacagatgtgctggaaactacccaaatgctttcccattgatctttaaactaggtcaggcacagtggttcatgcctgtaatcccaaccctttgggaggccgaggtgggcagatcacctgaggtcaggagttcaagaccagcatggacaacatggtgaaactccatctctacaaaaatacaaaaaaaaaaaaaaaaaaaaaaaaaaagctgggcatgatggtgggtgcctgtaatcccagctattcgggaggctgaggcaggagaatcacttgaatccgggaggcggaggttgcagtgagccaagattgcaccactgcactccagcctgggcaacagagtgagactcggtctaaaaaaaaaaaaaaacaaaaaaacactaacgcaatacttcttagcttggtgtatagtaaggatcttactgacctctccaacttcattttatccctctctccaccatagctggcacattctccattctagccacaaggctgtttcctggaacacctctttcctgcatttgtctttctctctgtgttcactcagtcagaagctcttccggggctatctctgaccagctctttctcatccttcctttcctcaatatgacttttatcacctctctagtatcccacgctactattctgtatctgagcaccctattttttcctgtgacatttctaatttagatgttgatttttgtttttatctattgcctatctca

SEQ ID NO: 5679 - DNA, 1745 bp, mus musculus
tagaattcttgctaattagcatgcttatttcttatgtagttttttaaaaaaggaaatctaatatttaaaatatgttgtctatttattcttctcattaccaattgaaaatgattgctttgttgggtttgcctttcataaagatacatatattttccccaatatgctatgacctaggtaacttgtaaagactttactattttgataaccaatgtattaatttattttctaactcagtataaatctgggactttttaatcccatggcttactgtgcctgtctggggctggttttctcccagattcattgccggtacttcctctcctctgatctgtattgcagaaggctgagccctgcaaactaatgtctcataatcccttaccacgtcgttttcatttgagtttgggcaacgagaagaattgaagggagatagacaggaggaagaaggggagaagccccctctcttcttgcttttggcacttgtctctgagagtagcttagtttctgctgtaaagtgagcttttgtccagcagtctttcctgctgaggtgccagctcccaccaggaagaacgtgttgtggttccaagtcttgcctggtggccccaactcctagcacatacttaaaccactgcttctcgtggttcctgaggttggtagtagcttcctgctgctctttatatctgatttgccttgctattctgatttgccttgctattccatttgccttttagctcaaccaatatctttttaacaaatttcattgcatggacatgggattgctcttcaagagaacatgctgtggggagtattaattgactgacaagttcaagttgctgcatctttggacacactatagcgttcataccgtggctatacttatctcaagctgctctcagtcaatggagttattagaatcaggctatttttgcataatacagaattcctctaatggtcaaactttgctttttgggctctttactgacctatcccagacttttccagaagtttgctgtaatctgacatttcctacccaagcctccttttctccttctctcctctcatagttgtaggccggctttatgttctctccccctacttcttctgttcttttctctttttccttcacaggcattttccccaatcaaccttttgcagatcaaatcccacattggcatctgtttcttggaggaccccaaatggcacaaccttcagaagaattcttctttattgaacaacttagcttggattctgtttccctggctggactttaaagtatcacatatccagaaaatgtaatgctaacatatgttgtaggtcctttgttaaaaatgttatgttatacaaaagaatttccttttggcccatcatttcatcttcagacaatatcaatctctgtcatttttgtagccatctgaggaaacaggatgaatcctccactcaaaatttggtttcgatgtcgaaactgataatgctacataaacttcaagagactaggagctatctgaggagagcagcgaaggcctgccaggcaggtccaaagtggctttaagagagtaagaaaaagagagcagctaggggtttttattgtgattaggggctgggtctgaggcaagcgttccatgcatagacaggaacttgtgtaggatttgaatctcccgccagcatcaaaggaaagagcacatgggctttttatcagcccacatgtgggcgacaaggcgaagaaggagggataaggcttaaaagctctc

SEQ ID NO: 5680 - DNA, 178 bp, mus musculus
ttagcttctagaagcaataagaatagaaagacctccaagtttaccaaactctacataatcagaaagtagttatctaaaaattgtctgcaaataactaaaaaatgttgataaagaaaatcatattgactaatctgatgtttagcccgtattagtacaatttttattttttttaattttt

SEQ ID NO: 5681 - DNA, 551 bp, mus musculus
taaagactgtatgcccacatgcgtaacattttgttagaaaaccaggatgagaacatagcgcattttcgtgcagaggtgggagtgggcagtgtctaaaaaaaataactttatgaacaaaacctgttcactttagatgtgattaacctcccagtgccatctgcattattaatgtgatgggattattatactatcctaatgtatttgaatttctattaatgttttctccattaaataaacaaataaaagtggttgagaaagagatgacatttgctttaactgttcattgtggaattttttttctaaagcagtggtggtttgttaaatacaaactattaaatgaatgatatttcatgagaggttttgaacctaattataacaaatgtcatcatgttctttattaaaaggatttgaaaaatttctcagcagaaaaaaattgatacctaaatccttatgatatttaaatcattccattaatttaaaaattataagttgaattgacagtacacttaatttaaatttataatcaaattgagttattaattgaataactt

SEQ ID NO: 5682 - DNA, 169 bp, mus musculus
ggtcaacatatctgatactatacataataaaattttagtaaagagaaagggtaaaacaactaataaaatgagaattttagcttagttatttattttataattgcaggtctttttttttctttttctgagactaggcgagatcgagtgaattcagggtggatggtcatgg

SEQ ID NO: 5683 - DNA, 3469 bp, mus musculus
ttatgttatatgttgtacatatattatagatataacatatctagatataatatacagatatctaatatagacagacataaagatatacagatatatctatatatagacacatatatagatacatagataagttatacatatataggtatataatgtatcctataggtatataaggtatccataggtatatggatacatatataggtatataaatgttatatctatatatggatacatatataggtatataaatgttatatctatatatggatacatatataggtatataaatgttatacctatatatgaacacatatatagatacaaatatatgtcatatctatatagagacacatatatcctacatagagatatatactctacagcaagtactcaatgagtagtatctctgtaggtatttgttaataaaatatcatatatgttatatatctatatatagatacatacatctgtatacatacatatgtgtatatataatgtatatataatgtacctatctatataatgtgtatatatacataaacacatatgtatacatatccttatttacatatgtacataactttatatacttaagtatatatatctaaataaataatgtatacatatatacctgatttgtataatatattttatgaatatatagtatatataatgtacatataatctattatatgtatttttaatttcatgaaatcatagacatgtatttctcttattaataaaccaaaatagcatcatagtgataatattttagtgatctagggagtgatgagtaagaagcaatggctagactcaaaacaaagaactcaacacaaagggttttgtgactaatgaaattgagccattatgaattttgcctatacttgtaattcttaatatgattaacaatcaaaacaattcttattatattagcataattataattcttaatatatttgccttggtaagtagctcaatatattttattacaaaaccgtaccttagttctggtataaatacagttatgatatctttggtgaagtattagaaattgttctattaggaaaggtacttaataatcaaaaagttatcaattgtattatacttatttgttgttgaaaaaatgcttaattttctaaaattagagtttttatatgtgaaaagttatttgtccccagtcatttgaaagacattaagttagagctaggcagcttaagtttctgtattattgattaaattaaagtataatattactagaatagatggcattgccttgacacaatttatatgtatatatacacacacacacacacacatacatatataataaaacataaataaatagaaataactaaatttagaatatttaatttttggtattattaaccatatctaatgaactaaggagaaaatgaattgcacagacacatacaaagaaacatatatttaagttattatttatgcctagtatataccatatattattggtgtatttccttttattttccatgggagagctaaaaaatattagtgaaataacaagaaacaagcacctgtgtatttatatatgtacaatgatttttttcagttacctttaatttaaatcaaagagttatatgtacaatgatattttttcagttacctttaatttaaatcaaagagttagttttttaaagcacctcacccttcacatttaaacttttaaaatgcctttttagaagagatgacagcttttactattcttttgcaagtgtccattaaaatgtatattacaaacattaaaatatattcaatgccaaatctgcagaatattaatattcatattttattatatatgtattcattgaaagcattgaaataagaatgttaataatattttatgtttatatgtacacaaatacatatgtctattccaaatacatatgagccatttgtacttgcaattttatatttttatattttatattttattttaaattccattttctcattctatcttttgtctcttaataggtgtagatattatatgactggtaagattgattaagtgaaaggaatattagatacatgcaggcatgcataaaaaatacatttggaaatgatataatttatttcaggtttaaagcctctccagaactgaaaatagtcataatagtactgctgatagctaccttccatttatctgatgtaatttaaatcaaaaagcacacaaggaattttttaaaaaacagaccataggacagaaacgttatacactagggtgttctccatgaagaaaaaaggtgctattcttttacttatagtacatctttattagtttagcctaaaaatagccattgacttgttttttattatgttcaatgtcaaagtgaactttcgattttgcaggtgaaatgaatggctgctttgctcaaaaatactctggcaatcagccacacattctgccaaaccagcatgctgaccacctacttggcttgagtcagatggctatttggaaagcttttagtagttatcgttttatgtgatatagctgcccacttttcagcatgactcatttatcattttattccaaagaactgaattatcttgtattttttcttattatctttctggagagtctgacaagactttaatgtcagtatattttttactagaaaagaacatatgcgatattttgaaaaccgactgaacttgacagcttgagaattgacacgcagaatatgtacatttctcacattgctttgtaggatatacgggtgtttacttttagggtctggaaacttaaagctttctgtataacacctcctgagaccgtgtttaagatttttcaaattaaaaaatacctataagggccaggcgcggtgactcacgcctgtaatcccagcactttgggaggcctagacaggtggatcacgaagtcaggagttcaaggccaccctggccaacatggtgaaaccccatctctactaaaaatacaaaaattagccaggcatgatcttggcgcatgtaatcccagctacttgggaagctgaggcagaagaattgcttgaatctggggaagtgaagatttcagtgagctgagatcacgccactgcactccagcatgggcgacagagcaagactctgtctcaaaaaaaaaaaaaaaaaaaaaaaatatatatatatatatatacacacacacacacatatatacatatatacacacacacacacacacacatatatatatagtccatctggagcggttgaatatagaaaaaccttggtaaataaagttgctttggtaaatatagttactataagtattatataggcattcatttgtaatatataaaatgttaaataaaccccaataactcattaatgtctcatggaaatttggaaactgaaaatgcaagtattaacactaaggaaactgtagtaagaaaaggaatggggtaaaattatggaaacgcacatagtacct

SEQ ID NO: 5684 - DNA, 994 bp, mus musculus
ttaggaaaaatagaaatgaaggtacatatgcacacaaaattttgcctcatttgtttgctgacatttatttttcatcattgcaaccattgccatgaagaacatgaccatggccctgaagcgcttcacagacagcatcgtggaatgacagaattggagccaagcaaattttcaaagcaagctgctgaaaatgaaaaaaaatactatattgaaaaactttttgagcgttatggtgaaaatggaagattatccttttttggtttggagaaacttttaacaaacttgggccttggagagagaaaagtagttgagattaatcatgaggatcttggccacgatcatgtttctcatttagatattttggcagttcaagagggaaagcattttcactcacataaccaccagcattcccataatcatttaaattcagaaaatcaaactgtgaccagtgtatccacaaaaagaaaccataaatgtgatccagagaaagagacagttgaagtgtctgtaaaatctgatgataaacatatgcatgaccataatcaccgcctacgtcatcaccatcgtttgcatcatcatcttgatcataacaacactcaccattttcataatgattccattactcccagtgagcgtggggagcctagcaatgaaccttcaacagagaccaataaaacccaggaacaatctgatgttaaactaccgaaaggaaagaggaagaaaaaagggaggaaaagtaatgaaaattctgaggttattacaccaggttttccccctaaccatgatcagggtgaacagtatgagcataatcgggtccacaaacctgatcgtgtacataacccaggtcattctcatgtacatcttccagaacgtaatggtcatgatcctggtcgtggacaccaagatcttgatcctgataatgaaggtgaacttcgacatactagaaagagagaagcaccacatgttaaaaataatgcaataatttctttgagaaaag

SEQ ID NO: 5685 - DNA, 994 bp, mus musculus; identical to SEQ ID NO: 5684

SEQ ID NO: 5686 - DNA, 174 bp, mus musculus
gagcagagctgtcccaggtaacttgtaggtagtatatgagaataaatgtttatttgtgtgtgacactgagttttagagtggtttcgttaggcagtattactgaggcaatataagaattacagaatgttctataagaatgtaatacagggcattatagaatgttcatttaggttg

SEQ ID NO: 5687 - DNA, 1037 bp, mus musculus
aacactttagtgttatctgggaccaaaattacaatgtagaaccctagaaagctagacctgaccatgttgtaggcacttttccctaaggcccaaacgacttcaaacaaaagcaagccaaataacctgtatacttaaagcccacaccccacctcccagatctgacagccgatgatgagggtgcgcacaccttctagggtgtaatcaggggcacacgcattagggctagacaataaggagtcagagacatggtcagcagggggagagtatgtttcccctctaagcctcccttggctcaggctgggttaaggcctggttcaggaaaagggtaatggcatcagaagagtgatggccctgctcccctacaggtcagccctgattgttgggttggggaggagagagagaagaccatgctatgtgcactctgacctctctctcctttgaaagcttcctccccatataacataccccatcaatgtccttgaacttgcagtttcttaatcattgatggtgactaatgtttggaagtgggagtggggatggaggtgagggagttggagcctcatgctccccctagaggcgtatataaaagatgcaaagtcatcttcagcatttagtaaactccagctttgaaatattttggaagtattgatttcatatcataattaaatattatatatttagaaatgttattaatagtaagtagctttatttttatgtttaatctaatatataaaacacctagtaacatcttgaattggttttcctactgagcaattttctttataataatagcaaatactaatataatttgtatgatgagtctagcattgttttgagcattaacgtgtgtcaaataatttaattctcacaataaccatatgatatgcatattattattatctcgatttttacagatggagagatgttaagtgacttgcctaaggtcacatagctaataaacgcagagccaagaagtaggtccaaataatctagctccagaggttgcttttaatctttatgctatatgttcttatcct

SEQ ID NO: 5688 - DNA, 750 bp, mus musculus
tggaagcttagatcagtgaattcttcttgaatttacctttttataaatctttaaaaacaaatttgactttaaaaaagcacaaatataaatcggaaatgctaattagcacgttaagttagatgaaacatatcagtggaatcaaagctcacgcgtcaaatgatgtattttaatattttaaaaatcacagtttaagctggacatagtggctcacacctgtaatcccagcactttgggaggccaaggtaggtagatcacttgagctcaggagttcaagaccagcctggacaacatggtgaaaccctgtctgtacaaaaaatacaaaaattagctgggtatggtggtgcctgcctgtagtcccagctactcaggaggctgaggcgggagcatagcttgagagaaggttaaaggctgcataagccatgattgcaccactgcactccagcctggataacagagtgagaacctatctccaaaaaaaaaaaaaaaaaaaaaaaaaaatatatatatatatatacacacacacacacactatatatatatatatatataaactatatatatatataaactatatatatatataaactatatatatatataaactatatatatatataaactatatatatatataaactatatatatatataaactatatatatatatatagttagtttaagaaatgagcaaaaatgaatagctaggcagaaatttatgatagcttttcttagattaaacaccaaaaatat

SEQ ID NO: 5689 - DNA, 467 bp, mus musculus
acagtcagtgctggcataagctccgccaggattcctgggccctgctgtgcaggggtctcctgaggaaggacagaatcgtatctcggtctccaagcccacttggttcttggcacttctgctaagagttgcgcaggctacctattaattttaaatgtattgtttttgaggatgaggcagacatctgtcttagagggacaggactgatagccgcaagtcgttcctcagaggctgctgaataaatcgtcagatgacctttattgttgtcaccctcattttgttcaaattgacgcagctaaagcacagtattaacaaaactacgcattgcatgcagcagtgggattagtgaaaaggaccatgttgttgactagagaaatggaagttcacgtatctcataactgcgtacgaagcagtggactgggaaggatacaagaggagaatgacaagattaaaataagagacaaggcctt

SEQ ID NO: 5690 - DNA, 1543 bp, mus musculus
aatgaatcaccttttataaataaaatttaatggtaaattcagacatagaacttaatttggctagagaaacttgcatgcatacacttagcattgcctttaattaattctgttgacttagaagatggtgtagacaataaatgctttttttattgatcataaaataactgttcagatccttaccaataagggacccactagggaaggccagtggtttacttgggttatgcttcagctacttctcaatagtggccattaggacctccactcccactgcatcacagtgaccctgggtaagtcacatggtattaaccataaataagtgcatcacctgtttgtgtctctgcattaagtaactggagttgaccatgggaataaaacttgggaaaatttaacgtgaaattaatggtataattctatagttgcagacttcccttttctgaaacttgaaggcaacagatacagtgatgatcccatctctcccaccatcttgaattttgtgtgaactgttaggccttgtgtatgggtaagggttttctccagaacacttaactgccaaacatggatgtgattttgagcataggcccattggaaaggcaaaatgtatgcatcagaactgaattccattctgtgatcacaatccaggttagtggagccaacatttttgaggatagccctctcctggatttattactctctgcctctgcctgttattcggtctcatttggggccactttatctcacttagtatatggtagtagccatcctggctgtctttcccactgaaggacttttgttccttccctggaaccctttactctcagtcttgtcatggcagcagtttgggtctcatttcgttctctatcctaggcatcttaaaaggaacaccatcatggcacatgtatacatatgtaacaaacctgcacgttgtgcacatgtaccctaaaacttaaagtataataataaaaaataataataatttaaaaaaaaaggaacataagacattctcttgcccaagttagcagtaactgcttaactgctgaattcagtaagcttatcttcagatcttaatttccaacacgctttccttttagtcttggcttctgtggaagctcattctcctggttttcttacccctcagctcttcttttcttttaggtcttctctcctgcccagcctctaaatactggtgttcctctgggtttagctcatctctaactgcttttatttaataggtgactgtactatgctcaaggttctatttatccctttacgggtataacttccaacactgaaactgcagcccagacttctccctggaggtttgactcatatatccaactttccattgggcaacttcacctagatggcccatagtcatgtaaaatccaccatggcccaaagtaaacttagtttccacttcaacttcacttcccctgatatttcatacctcatttagtaatatttccactcacttctcactcaaaccaaaaacctagaagtcatcctttactcagtcaagaagttgttttacctcatgtttctt

SEQ ID NO: 5691 - DNA, 1062 bp, mus musculus
gattcaaagagaaacaaaagacacattcctatccttaaataacttacaaggacttgggggaatacaaaacaaaacaaaacaaaacaaaacacagaattataacataatatgacaattgctgtaaaaataattttcaggtataccttatacctgtgggttttgtctcctcatcttaattttgaacttcttaactatgtgtctgccctttgaagaatgctcaggccagagacagcagtcgataatattgtgaactgaagaaacgagacagatgctaagccctcagctaaatataacatgtccaaattcacatcagaggtttgagcccagccatattctgtgtgtgaaaacatctggaccaaaagaggtgcaagaagcttatttactggtgtcagtgaaaatactaaaagtgattttcctagcatttttggaacctcgttgaagagggggtagagtagataaaatctcagaaacatgggatttacaaagccttaatttctgtctcttaccaaatgttatgttaaactctatggggacaactcaatccttacaaatgttgtacaacaatacactgaataatgtgatgtttggaaagtgtctcctgatggggtcaaaatatcccagaagacaattgggccagtgttagactttctgcctttggaggcatgttgtggttggctgggcagggaaggaggacaagtggaaccagtgggcctccagctccttcactggaaactcctgtgctgaccagcactgtggcctgggactcagagcaagcttccccacccatctttgcactgcagctcagtatgaaacactaaaaggataacatagagattaccagttgaggccgttcccaaagcagtattatgtaattcatgcattggatcattggatccttcccatggagcaggatccaattaggcagcctaggaattttattccagtttcatccatggaaaaaatgaggtatagagaaattaagtaacaaatgtttataaacacacggctggcaaattctaccaccagtatctcatagaggttgagagaggcctatgccattcc

SEQ ID NO: 5692 - DNA, 1028 bp, mus musculus
cctacttcactctcttaaatatcactcttaaatgagcaaaaatttttgagagggtgtctggtctgacctcgtatcttccttgattcttgggttagagcacctgacactttcacatgatccatttaaacccatttaccaggctaccagggataccagagacttgtgggtcaagtgccagttccagagtctgctaatcctatggatttatatttatttatgtatcatttttaacctctgaggatttctttcttttcctgccaactctggtattataaaatattttttgtatttgcagcattttagctttgctgtgcctgattgtgtttttcttagtatccaactcagaataatggagaaatgaatacatagttgggtatttttttgcataagcatgaatttctgcttattcaatgacacttcttacctgtaacacctttgcaagatgattgaccagatgttaaaaggaaaatttgtgtctgtggaacagagctgttttctataagaagtcaatttatgttctcagacccatagatggagcctgatacaattttgacctcctacaatgttgctttaaccaattcaattaatcagtcttttaaatttaaatgacaaaccaaaaatattccatattatcataatatattattacttaatttattgcaggacacattatccagaccctaaaacatagaatttatttctaatgtaagcaattagaattccttcaataattagtgctaattctttgtggctgattagaacttctcttaggaccacaatgaaaggaaaaggaaagactcggttgctagggcaggtgaagcagaatcacagaaggtaaacatcttggggactattttcagaaggtgatacattcttacagtgacaccaagactgtgactgagtattcaacaactgattccttggcacactgtttgagattttcaatgcattcttatttttgctgcaaatatattaaggagatataagacaagttgcatgctgagcttttgacgatggctcaattcaat

SEQ ID NO: 5693 - DNA, 408 bp, mus musculus
ttttctctttacctagatacccatgctgtgaacaatctacataatcagatgatgtggtcccaaatatgaacttggggaaatctttgatttctccagaaggatgtatttgtctgtgtgaagaaattgtattcagtttaatttttaatgacttgctactaaaattcctatactctccaaatgtagctttctgggtaatttgaggttgtcacctttttctcatttagaagtacaggattaattcagtagttatgagtagacatcagagatgatgctgagcctcctactggccagggcaagaaagggaaactcaagaaattcagttgttctcactatcagataaagaaagtagcatacccaaattccactggggaaacaatgatcatcttttttactttaaaatcaaaagga

SEQ ID NO: 5694 - DNA, 1162 bp, mus musculus
attagcatttcataacattatttgtcttggtatttgaatacattagaattctatttgtcctgtaattaatttctaactcactttgataaaataccaaaacaaaggaaacaaagtcaacaaaacttaatttgtatccttcatccttttgaacagcagctatgtgaacatttggaaagaaccttagtaaggcggcttttctatcacctataaaaagttgccaacagacatcaaaggagttgacaaaaaaaaaaaaaaaaaaatgcaggaagctggaaggcaggcctggatggaattggaactgtgctgctgtgactcctttccccagtgctaaaaaatagatgtagtcaggaggaactaacatagattggcagtcacccacacatctctggtgttaccttagtcttgtttcaagcatacaagccacaagtttttgggtgtcttaaatatacctaagttgtagtctctatttatttttttattatacttttaagttctagggtacatgtgcacaacgtgcaggtttgttacatatgtatacatgtgccatgttggtgtgctgcacccgttaactcgtcatttacattaggtatatctcctaatgctatcccttccccctcccccaaccccacgatgtagtctctttctaagttccattaaacagaatactaaaatgaccttttttggtgactcttgcctgtctctaccactaactggcttaaaagctgctgggtctcttcctttgtaaagagcaacatgagtttacagatgaggtctgtctatatctcctcttatgtttttctcttaagaacttcaagtgaaataaaacaaaatagctcttttatgaatactaccttttgtattttacctcataagatttaatgtattaaacatttctataccaacatgctgggactttgtattgtctgtcctatatcctcattgcctagaccctccttgaccttggtggttacttagatagtacatgaatgaaatgaaaaatagattacaccataccctaaccaagtcttgtaagaagctaaaggactacaaatccctgagatgattagcacagaaaagagaaaaggatgaacttgttagaggttttgttctctatgaaatccaataaaagaagtggatatagtgcaaatttttatggagcaat

SEQ ID NO: 5695 - DNA, 1136 bp, mus musculus
aacagagaagtaatttggctaagttaacgtagctggtaaacagcagagctgggatttgaacccatgcagtgtgccattccaccgttcatactcttcacccccaggctgggttacatctaagagcaagggtattatattacctcttcagaaatggactcagagagagacatccagtctatcacctggtggtcacgctgggcagcctttgaagtttctttcaacgctgagagttcatgactctgaaaatccccacttctcatgatttgttggagactgattccacttcagagctctttccaagtctatgctgcgtcctccactgagggtcagaatccctcacttgccacatatgctgccttgtaatgttagctcttaaggatcataaaccatagaccatgaagataaatttgtccaacccatttgtctgacaccataggaactgaggccctagcactggtttgctagtggttgtataggcaagtgggagagcctggacaggagcccaagccaccacagtgctggtgcaccttccacagcatcaccccacagccttctctggactgtaaaccatgtgaaggcaggagtttgtctttcatctctttgtatcctcaccataccaaaaatagagtgaaggatgagagaagtgacatttgtgaagccattactattttttctttcacttagcaacagggtaatagacccaaacaccactctagatgcctggggtatggccctgaacatgtagatgaagttcctgctcccatggagctcacattttagggcagggaagcagagaataaacacaagaatatctaaatgaacacagttgttccaggcggtgataacaactgtggagaaaacagcagggcggtgtgatgaaggcaaggggaggtggctcctctgtgtggagtggtcagggaagccctttggaggaggtgacatttgattgagataaagatggggaaagaaacaaccatacaaagatctgaggacagagaattccagacagagagaaaagcaaagcagatgcctaaggttgactaagttgaatgtgtttgatgagcaggtggtcagtgtggtccaggtgtggtagacaaaggtgattggtgatgggagatgaagtccaagaataccac

SEQ ID NO: 5696 - DNA, 1136 bp, mus musculus; identical to SEQ ID NO: 5695

SEQ ID NO: 5697 - DNA, 1136 bp, mus musculus; identical to SEQ ID NO: 5695

SEQ ID NO: 5698 - DNA, 1143 bp, mus musculus
atgcacaagcccttatcctagagtcactgaacacaaacctctactatacccagttggaactccagaaagaggtgagtccctactggagtggggatgggggttgggggaagaacccaggtctccatccagctctgccatatagctctgccctggatggctctgggttggggaagatggctattaaaatgtatgtctttcagaaagctatagtgggaaatctggagaaaatgcttcaaaccaagtttgctgaaactgaagaaaagtataagcacaccatacagatcctgacggaagagaacattcatctgaagtgcggctgctgctgaaaaagacatagctgagttctctttaggagtgggaaggagtttgagtgaggaatgggttaggaagatagaccaactgctccctagttatgtcaaggcacaggtgttttcgggagggaggtatgtcactctaggccagtgacacaaagccagatagttcacttgaggtggagtggagatgtgtctatacttctcccattcacctgtgtccttgtttctatgcaaaacaacacaggacatttgtcttccagtttctgagtttgctcagttctatgactgagggtggtttttaaatccatctcccctgggagtctgatggtcttgccattacatgcagctgcttctggttcctatggaaatcacctttggatcagaaggtgtactgttacctgaagctgcatcttaaatcattaaaataaattttggtcaatactttaatagaagaaagttatttattgcattgatttagtagaaaattcctcgtataggactttagtcacctgaacaccatacctcactaaattcaaaaccactgcaagtaatgagtgagagactgctgtggtgaaggaacgaaggcacatttctctccctgcactccaaatatcctataccctttctagcttttgagttgacattgatacatctttcctttctttttacaggcaaaagataatttctaagaatgaagaaatttgtgaaggatgttctgggagattggcctctattactgtttctaaggatgattctgacactgtgcaagatggtagcaagaaaggacaagaatcataaacaaaaagttgctctgcattgttgaagatgg

SEQ ID NO: 5699 - DNA, 693 bp, mus musculus
gaagtatggaacaatgatggtgcattggagagtttctcttacttctttatgtccctcccttccctggaagctggaaaagaagctgccagggatgaacacctttgcttctcctcatccttggaaaccattaaaactgcgtctgaatctttgctgcactcctagagtatggactggaaaatagcccaggggagtcaaaatcctgactttgattcacaaacatgcttgaaagaaaaaagaaaggaaggaaggaaaagagaaattgtggctgtgacctaaccatagctaaaaaaatctctttgacttccagtggtttggtattaatggaagccttttatcttcagcactttgtccttgtgctgccaagtggaggaagggaaagtgcagaaagctctgtctgcataatcatgtgcctgctggccctccccaaatccagagccatgtgaaggctcaccctcctggttctgggaggccccaggctagcatgagaaatcagtgggaaaatgttccttcagatgtcaaatcccaccttctctcagaaaagaaagacataaataaagccgcaggcaaggacaggcaggcccttaggttgcttatgcgagcattctaaaaatctcctcatcaatgcttagcctagatttcacagaccaaatgccaatatgttttgccctaaaacacagtttataaaattaagag

SEQ ID NO: 5700 - DNA, 2048 bp, mus musculus
gtttgtaattgggatgttgaggcagattgtgattgctttaattttcttttttttttttttgagacggagtctcactctgttgcccgggctggagtgccgtggcaccatctcagctcactgcaacctccgcctcctgggttcaagcaattctcctgcctcagcctccagagtagctgggtctacaggtgcacgccgccatgcctggctaattttttgtattttagtagagacggggtttcactgtgttgcccaggctggtctgaaactccaaagctcaggcaatccgcccaccttggcctcccaaaatgctaggattacaggtgtgagccactgtgcccggctaattttctttttaaataaagagataaaaccacatgctgagaacgaaggaagaaaaatatgaacttcagcagagaattaaaattttggattaactgcttaggagaatgggggaggttgctgatcaaggcagttaaaataattgtcgactggcacaaggacaaagctgagtttgttgaacatgaacattaagtggcaaaattctgcagggttgtgtgattgatttctggaagttagcaccccccggtcgtgggcagaggaaatcggttgtagaaatgaccccgggtgggagtttggtgctcgtgtgcaaagtagttagaggtacaaatgggcaagggagtgaggtatccaggtaacatggtagagcaggtgatccgccatagactgtaggcctggaggctgatggaggcagaagcgatgccggcaaggggttgatctactctgctaagttggagaagttaaggaagagcatgtgtaactggagtgggtatatgagagaaccggatggaaaggagaatcctggctattggtgctcaagatttcagagatgaagcagttaattagctagactgagatgtaggataagaaggtcctgggtgaggctatcggagtgagtgacttaggcagaatggaagttgcagattagcatcgaggaactcatggaaattggatgccaaggttggtttggttttacatattgtagttaaaggataacaaggcttgacgaaaagaggaaacctgataacaccatataaaaccctctccttatttaagacatgggccctatggacatggaatccactccacatttctccacgttttctttctttcttttctttttgaaatggagttttgctcttgttgcccaggctggagtgcaatggtgtgatcttggctctctgcaacctccacctcctgagttcaagcgattctcctgcctcagcctcccaagtagctgggattacaggtatgcgccaccatgcctggctaattttgtatttttagtagagatggggtttctccatgttggtcaggctggtctcaaactcccgacctcaggtgatccgcctgccttggcctcctaaagtgctggattaagtgtgagccactgcgcccggccccacattttctttttacttttatttgttttgagatgaaattttgctcttgttgcctaggctggagagcaatggtgcgatctcggctcactgcaacctctgcctcctgggttcaagcaactctcctgcctcagcctccgaagtagctgcgattacaggtgtccatcaccgtgcccagctaactttgtattttttttagtagagacagggtttcaccatgttggtcaggctggtctcgaactcctggtctcagatgatccacctgcctcagcctcccaaaatgctgggattacaggcgtgagccctcgcacccagccccacattttcgtttttatcacttacaagctcctgatcagttcatcaaggactttaaaaactctcatactaaggcacagaagtaataggttgaaatcaacatggatatgagggaaatgcagatctagcttttaagtagaggggtatgaacagcctcccttgagagagtatctcagggagagccagatcctccaaggaggactaggtctcagttaaggcctgaaaaggaagggagtgctgcatgagaaaccggaaagaccttattgcccttgaaga

SEQ ID NO: 5701 - DNA, 694 bp, mus musculus
aatgagaactaaaatctaaatctctgtagtgaaaaatgtatagattccattacactgatgttattttgtacctgctgtcttcagggtcacctagccaccaataagaatgaaccaactgagagcctgtgccaagtgccagactctgaatctgggccaaatagactgaaacccttcctccacatctgtttaatgtttttgacattccttgtatcctccttgctgaatctacataaactaaaaccaaaaactgctgctgtcctaaagcacctgcaactcctcctcaccccattccctccaatcagacccctcagatgtagacaacaacatcaatcagactcaatgggacatgatgatcagttaatttcccctattgctagctcactccttcttccctgctgggagcttacagcatgctgagtggccaaggtcaggctacttatgatagcgttgattaaccaaattaaccaagtgccttgcttgtgcatatttacttcctactgtttactctttggccattttagtacttgtaaatatataccaaaggcagcaatagcaaccagccctgagcctttgacatggcatcatacatcaaggggcacaaaatacatacatgtatatgtattaaaaagaatcttcaagaaatcacattaagcagttaatagtggctaattctgggaggaagaaagggaaggaa

SEQ ID NO: 5702 - DNA, 344 bp, mus musculus
aggaaccagctttgttattttacatttgaccacctcttataaatccaaacatttactatttgatgctctgttttttaaccctgccttattctatgtgcagactgctccaagaaaaatatcagcaactaaatttgctgttttcactctaagtgggaacattttctatgatagtaatagtctgacttagaaaaggctacttcttaaggcaatgagtgtggacagtttgtcggattaacaccgagctgggatgctatagtggtaagactttgaaatttgggagtcagagaatacaagggctacttctgattttaccttttactaattgcatggactacttaacagaa

SEQ ID NO: 5703 - DNA, 1235 bp, mus musculus
caggttaaattgctaagatgatcagtcaacaaatatttttggcagatctgcgatgcatgatgcgatattttgagaggtttgtgcaagatttttatttccctcctcctttgtaggaaaagatccactactcatacctactgacatcccctggcacttctagaaccagcttacaccccatcctctgctcacccttctcccaccttccacctgtattaacacctgacaggcacttatttccctatcaggagtctctgtagttgttttgccattgaccaagatatgtttagaacatttttaatctcttgtgcaattttggcaaacagcagcctgagctctgcttttcctaacaaataacttgcagattgtcatgtttctcttgggagaaggagaaaggttcaatcagagcagaattgaaatgatataaattaggcttattgtttagcaaatcgctggtgttaggtaagaattgtagataagaatagcctagaccctcttaaagatcagagcaggcatgtgtgcatgcatgaggaaaccaggcctttgttagtatcctttctgaaatggctattaaagtaattacagtaatttatagatttttttttcttcttccatttcaaaatgggttccattttttgccttttgtcttgagttcctcagttggagtgtgtatgtgtgtaagcatgtcttgggtagcactgccatagatagtatctatgaattatctgcacccaagctgatgaggtgtggtgaccacaggcactcacagatggatttgccagctttgctttcagggagccttggtcctttgagaataagagaattgtactgagaacactatgttttaatggttagttatagtttgtcatagcaccatttaaaattgctgtgttttatggacataaagatggcaacaatagacactaaggagtactagggcagggaaggaggggggcaagggttgaaaaactacctgtagggtactatgctcaccacctgggtgatgggatcaatagaagcccaaacatcagcatcatgcaatacccatataacaaacctgcacatataccccctgaatctaaaataaaaattaaaattaaaaagttgctgttttttatttaaagagacactttttcccatgtctttaaaaacacatccattcatacctatggattttattattatactttgttgcttttttatatcattgatgcttgtgtataagaatggcaatactt

SEQ ID NO: 5704 - DNA, 1086 bp, mus musculus
ctattgcatttatcaagggagatataacttgtggattcattctataatgttttacaggagaattttttttatctcagaaataagaattttacatctctacaagtaaatcagaaatataattagatacataaattcataaacatacaaaataggtaaaatgattatatggatttctaaaagtacctttaaattggctgggcatggtggctcaggcttgtaatcctagcactttgggaggccaaggcacgtgaattgccagagctcaggagtttgagaccaccctgggcaacatggcaaaaccccgtctctactaaaaatacaaaaattagctgggtgtggtggttcatgcctgtaatcccagctattcaggaggctgaggcagcagaatcgcttgaacccaggaggcggaagttggtgcgccaagatcgtgccactgcactccagcctaggtgacagagtgagactccatctccgaaaaaataataatgataaaataaaatacctttcgattatactatagagcaaaaaaaatcgtgtaggtgtggataagtgagtatgtatgtgagtgtgcatgtggatttgcttgtatgaagacatgaagaaaatacaaagggaaactcttatttctgagaggtaggattgtgggtgagttttttcctttatggttgtttttattttagatattttctacagtgatcatgtattttattataaaagtgttataaaaatgagtttttacatgctatatagaactaaaaacacttacaaatgcaaaaacattatgtcttttgaaatgcaaggcctctacagaaacagtatccctcctgtttttaaaatcacacttttgatacccaatgagatagttcaccttcggtaacatgaggcgtttaattaacatccagtggggtatgattggaccccctgatgtgtcatactttcacgtgaattattatcttgcaacatacattctagtaataacaatgacgttatctagtaagttttcataaatactaagactatataaaaatcttagcttttcctctttatctcttagacagtacgtagttcaaagtatactttttacaa

SEQ ID NO: 5705 - DNA, 1405 bp, mus musculus
tgatgcctcctcccacactgccagggcctccactggtcgctacaatattgtggccaaccagccagaagctctgtgcgcaaaacaaacagcctgcttctggctgtgagatgaataaagatccttcaaggtctgactcacacagctcccatcctgcttagagacttcctgtaatctggttccctttcttgtagaagctcatgtcctttctaaacatctttcttcatggtcttatgaggctctagccaggagcacccaacattcctaaatgcttgcttcttccacccccaacaaaccccaacctgttctctcagaatggaaagggcatttctgggatggggagagaaggtgaatgctttaacatgcctcacatggcccgggctgcctgtgcagcatgatgcttcagaatgcagctgtcgaaagcatagtcacaaacggaagcggttccagctgactggcccctgagtgctagattcagaatctccgccctggcgtggcagcagccctttcctgcttggacattagtgcaggcccatcatttccacaccatggtgttttttgcacagtagtgacaagtttgcccctggagccaggagaagctccaagctctgtaatctgaagctccaagtaaatgaactctaaaagggaggcccatcacacctgccacctactcccaaactgtcccctacttggatttctgcatggcacgtttttcagatgagttttgcatcttccaagttttgttagggaggctggatgccagcaaagaggaatagaaaaatgatatggagcctaaatccctggaaaaacaaaaaggacttttctgttgctgtggtggattccctggtgcccagtacacttccgttcccagcaggctcccgttttttggacagacggggaagttatgatttgccctcacaattggatcccctgggagccagaattagtgtgaacacctattccggagggaactgttcaccctgccgagtaaaggggcactgccagcacaccaggggccccagacgctgtgctctgattgcccttcagtgaccacccatgcaggcagccccaccgggcacaaaggcatgattcctgttcccttttgtcaaatgaggccaactgaggcacacaagcatgattgatccaggccagcgtaggaaaatttagtaagtcctggccctgctgggattcacctttacacctgctagtgctgctgctgccgctgagaaaaacagaaatggaaagaaattgtggactactcttcctttgcactctggtatcattccagaatgctaccaaggggccctttaagttgactgcagagggtgaggattttatagacacagagcagaccaacgaaagacccaacactcatgctgaaagcagcctgcccccaaagccttaaact

SEQ ID NO: 5706 - DNA, 1405 bp, mus musculus; identical to SEQ ID NO: 5705

SEQ ID NO: 5707 - DNA, 1405 bp, mus musculus; identical to SEQ ID NO: 5705

SEQ ID NO: 5708 - DNA, 732 bp, mus musculus
attgataaagaagttgtgctacctacatacaatggaataccaagcgaaacgacagggcatgaactattaccatccttgcaacatggatgaatgtcaaaaccataatgttgagcaaaagaagccagacatgcgagaaacatgatgtatagtttcatttctaaacattttcattaatctgtgatgttggaattcgggatagttgtcaccttttgaagggagaagtagtgaacaggaggtggcccgaggggtcttctggggtcctgatgtcttctatttcttcatgtttagactgcttacacagtctagtctcacttttggaaaattcatctagttatacacttatgatacatgcactttctatatgttaactatacttcaataagaagctacttaaaaaataaaaataagctagcagcagtggctcatgtctggaattccagctactcaggaggctgagatgggaggactgcttgagcccaggagtttgaggctgcagttgactatgatcgtgctactctaaaaaagaaaataaaataaaaatttaaaaagatcactaagatagtgagctcccccccaaagcatggttagcctaaagtgctatgcagggtttgaactctccccatgccctatgcaagggagcagagctcccagaagttttcagacagtcaaaggaatagggactcgagatcgtaagaaaaaccctcatcttctcagaccattgcagtaaacaaa

SEQ ID NO: 5709 - DNA, 857 bp, mus musculus
agatccatgcgcagcaaccacagtaatctacattttacactgtctaaattttacaatgacaattccatgccacaacctaccaagttcatctgttctttggttggacaaattctggaagagactcatttgcttttttccatccttctttctgtggaccgagtagacagtctcccacaggctgcggctgtacgagagggaagaccacaaaggcctcatgatggagctgagtgaagactgccccagcatccaggaccgcttccacctcagcgagatccgttccctccacgtgctggagggctgctgggtcctctacgagctgcccaactaccgggggcggcaatacctgctgaggccccaagagtacaggcggtgccaggactggggggccatggatgctaaggcaggctctttgcggagagtggtggatttgtattaaaatagcttaacactaccaatttcccattttggaacctaataaatatttagtctgcattgctggcaattgctgacttctgtcattctttcattgtgcaaatcagttcacctttaaatgctccttgtcaaaagttaagaagtgaatggggtgggggacggggtctattggagaagagcttcaaggtagagtgagtttgaacaagcctcagacgttggggtggaggcagggtgtagcctgcccgagaaagaaaacgcagggcaatgccagagacctgggagaggctgactggtgagaagggaggcattcaactaagcaccttgaggaacaatagttgggaagtttccttctaaccaaaaatgggttagacaaaaggcaaagtcagatgagtggagagggcaaacttaacttggccaacagcctg

SEQ ID NO: 5710 - DNA, 857 bp, mus musculus
caggctgttggccaagttaagtttgccctctccactcatctgactttgccttttgtctaacccatttttggttagaaggaaacttcccaactattgttcctcaaggtgcttagttgaatgcctcccttctcaccagtcagcctctcccaggtctctggcattgccctgcgttttctttctcgggcaggctacaccctgcctccaccccaacgtctgaggcttgttcaaactcactctaccttgaagctcttctccaatagaccccgtcccccaccccattcacttcttaacttttgacaaggagcatttaaaggtgaactgatttgcacaatgaaagaatgacagaagtcagcaattgccagcaatgcagactaaatatttattaggttccaaaatgggaaattggtagtgttaagctattttaatacaaatccaccactctccgcaaagagcctgccttagcatccatggccccccagtcctggcaccgcctgtactcttggggcctcagcaggtattgccgcccccggtagttgggcagctcgtagaggacccagcagccctccagcacgtggagggaacggatctcgctgaggtggaagcggtcctggatgctggggcagtcttcactcagctccatcatgaggcctttgtggtcttccctctcgtacagccgcagcctgtgggagactgtctactcggtccacagaaagaaggatggaaaaaagcaaatgagtctcttccagaatttgtccaaccaaagaacagatgaacttggtaggttgtggcatggaattgtcattgtaaaatttagacagtgtaaaatgtagattactgtggttgctgcgcatggatct

SEQ ID NO: 5711 - DNA, 938 bp, mus musculus
tgattgcttacaaagaacacacttttattccctgtattttaatgtttgtttcttccacaacatctccagttcattgatcaggtcagattcgttttaatattttccctaatttgttagaataacaacattgaaagtgggttcaggggagaaacactttatcaactggtttaaaaaaccatgtttcaaaccaggtgcaatcccaacatttgtaatcccaacattttgggaggccaaggtgagagaatcacttgaacccagggattcaagaccagcctgggcaatatagtgagactccctctctacaaaaaaatttttaaaaataaattagccgggtgtcacagtgcacacctgtgatcccagctacttggggggctgaggtgggaggattacttaagcccaggaggtgaaagttgcagtgagcagtgatcctgccactgtactccagcctgggcaacacagcaagacctttatctcaaaaataaaataaaagccatgcttcatgaagatgcagactgattgtgtcactttcgttgacacccaaggatgcatgctgtttatttttgttcttttgtttattgccatgacagaccagctcgcacaagttaaggctgtacgagagagatgactaccgaggccttatgtctgagctcactgatgactgcgcctgtgttccagaactgttccgtctccctgagatctattccctccacgtactggagggctgctgggtcctctatgaaatgcccaactaccgggggcggcagtatctgctgaggcctggggactacagaaggtaccacgactgggggggtgcagatgccaaagtcggctctttgagacgggtcaccgatttgtactaagctgtgcctgccttgttgtgatccccatagaaacataataaatatacaagttgtgttccctgcactaagtggctcttg

SEQ ID NO: 5712 - DNA, 1261 bp, mus musculus
gggcaccagtatactcgcagagccaacgctgagccctgtggtcactccatccatcatgattatcaccagtatttctcctataaccagatggtggcgtctttcaggtaagaaatcctaggaatcttgtgcatgatctcagatctcataatcccttaagaatttttttaacattttcaccattactagattgaattaatttgtgggattccccatttatacccttataaatgcagaggaccagactgtattaagaactttcagtattattttatttactctttaccctacaaaatagttcttattatcctcacttacagagcttacgatcattcacttacagagctctcaagtggtggagtaatgatttgaaccttggtcgatctactaccagcctcactctttttttaaaaaaagttttaatatagaaattttagaaaaatatgagacaggatctcactgttacccaggctggtcttgaagtgtgctcaagtgattctcctgcctcggcctttcaaagtgtggggattagaagtgtgagccatcatgtcgggccctggcctaactcttaaccattgttttggcatctgatggcatctgaaagtctgtcagaatttttgccaagatattaaccatcagaaggataatcacataattctgatagagctaaaagtctgtgttcaaagaattgatagttgccattgtggtattaaataatttgagacagccttcaggttctgccttcaaaatatatcaagagtctgagcactttttaccaactctaccactaccactttgggctgagcctctgttatctttcacctggattattgtagtagccttagcagtctccctttggccttgtccctttagcctcttctcaacacagcagtcagagtggttctgttaaggggcaatcagctaaggccactcctctgctctagacactccaaagggtgtctgtttcacctggagtgaaagccaaagtccatttactggcctttaatctacctgcactggctgcccaggacctctctgctcttacctcctactgctctctcttcactcatcctgctgctgccccactggcctcctgactgggcctcaggtatgtcaggtaggttgctgcctgggagccttgtacttgttcttccctctctgaattgctcattccccagatatctgcttgttgcttccttgtgtcttacaagtctttgctcacatttcacctgccctgacactcccccatcctagcactctgctt

SEQ ID NO: 5713 - DNA, 323 bp, mus musculus
cagctttttttcaatgtctcaggtgctgggaacttagtgctggagacatcaagtggatttatcaagcaccgatcttagcagctattggggtaagtttaaaagtttgtatagttaaaaaagggatgaaaaattaacctgctgctaaaacccagagaaagtgtgtctgtcactgcattctacaacagatctgagaaactgacaagtacagcaacatctattgggagagtctgggacagagatcagacccttattgtgactgacactgagatccatgcagaaagccttcctttaatcagctagcacttggggtcaattccgagact

SEQ ID NO: 5714 - DNA, 323 bp, mus musculus; identical to SEQ ID NO: 5713

SEQ ID NO: 5715 - DNA, 337 bp, mus musculus
atgttttttgaaataaactaaaaactctacataaattttcttaaattcaagaagaaagtaggtattattttaaaaatattattgacacatccttgttcattgggaaataattatttaaccaggaatatcaggtagagttaaagatttaaaataataatccacttaaaagatagacacattatttttggagatcttactgactaaaacttgggtttactttttataaaaccaatttattgtgattgtagctataattatttatagcataagatattattttagttgttgtagtggttttaaactttaaaataacatgtattttttctttaaatctgaa

SEQ ID NO: 5716 - DNA, 799 bp, mus musculus
acgcatttaggactccaaatcagtaggttccaatgcttaatcccaagaccagtggcatcaccatcatgagggaactagttagaaatgcaattcttaggccctatcccagccccactgaatcaggatctctgagggtaagtttcagaaatctgtttcatctaactctctaggggattctaatgcaccctgaagggtgagaatgcctgacctagacactatcaccacaaaagagtatgagccaagggcagaagaaaataccttccaggcctgccatagaggggtgtgtgtgtgtgtatgtgtgcgtctatgtgtgtacacatatctcaggaaaaattttccccagtgatttaacacttctgaagcaattctgaaagattatttctaaacatcacccatttcatttggccaacattgttaattttccaattaagggaaaatatggattcattaagaccctattagctcatctatatttaacctatccaactctaataaccatatctatttaatattttctctcccctttaaaatttattaatccttttatccttcttaatcacctatcactttagaaaaaaggttgtttgtttgtttgtttgttttgttttttagccaatgatacccagttgctgtctggaagataaacctccttccattttcagacacaaaaagaagttgctctaggtctattcatagttgtacgctcatatatgactgagtagttctagtttctacactattattttctcctgtaattgtaatttgagaagttcactggctttcacattttgggttcatt

SEQ ID NO: 5717 - DNA, 2341 bp, mus musculus
aacttagtaataacagaagcataggaattgattaagatagaaaggaagatctaatttccatttctatatttgccacaacttgtactgagagcttggaatgttatttaatatcttcaatttttttgcctgtaagttgctacatctttctgaatgtctcctatgaaagcaacctgaatcccaaggacatctgaaggtctaaagaaataaaaacctgaatagatatttacaaagagcttccagagctagaaaagttttaaaggagcttataataattttaaaatatgtgtaaaccagtcttccaaataagcccttgctcaggatgaccttttctgaggcactgctgcataaggctttgtagcctttacagagccctctacacaaaggcccttgacgaaggaagccagtgaggattgaaatccagtccaacctctgctttcggaaccactcaccaaaggattactaccattcagagggttcatcttcttctaattctccacctagaggggtgccttttctaatttgcataaaggtgctccagaggaaagcagcgccccacacataaaaataattaattttatcattattttaattaataattatttttgctattattaataataataattagtttttctattattatatgcctttcatgttttgactctaattctcacaactctatgaaatagatattatgattccaattttgtaaggcacaggtaggttaagtagtttgtccaaggttatatagttagtaaatgttgaagctaaaatcggaattcaaactaaaaatccaaaaatctgaaatctaaaatgctccaagatctgaaactttttgagctccaacatgaagccacaagtagaaaattccatacctgacctcatgtgacaagtcacagataaaatgcagtcaaaactttatttcatgcacaaaattattaaattatataaaattatcttcagcttgtgtatataaggcctatgtgaagcatacatgaattttgtgtttagacttgggtcctattcccatctcattatatatatgcaaatattcgaaaatctgaaaaaatctgaaatccaaaatacttctagtccaagcattttgaataaggatagtcaacctatatacatacagttctgttgataagtttgagtcttctgtttgcaaccttctgagctgtcttaagtaggggtccctggaaacaggctccaatatgaagatatgcgtgcaggcaatttactggagtgtcttctcagcattaacctctgttaggtatgaagaagcagcatggggcatagggagaaattgaactgcagtgtagttgtaatagaggcctaagctaatcacagagggctttgaagctgggatggctctttaagtagtccccaggtgaggcaaagagacctttttagcaaacacaccccaggtccctttatggccctgtccagtcattagaggtagactgcctccaggaggagagtataatgttgggtgaggcagctctctagctgtggccttcagaggcactcatctgagggcagtgagccatcagcacttggaatagctcagagaatgaatgctgcagtgccaaggggaatatctggagttcagcaccacctccactacaagagcttacagataagaaaagggggaccaactcgataacattaggggaggagaaagtcaaccttatcatagtaaggcccatgctaatgtatagataagcccctattccttccataccatgcgcacatttgagtacttatatctggttccaaagtttatgcgtcaacccaatcatgtggctatggaaaagtcccttacaatttgcagaacaattctcatccattatttaatttgctctgcatagtaaacctatgaagtaggaagggcagctattagaatcctaaattcacaggtaaggaaacaaaaacacaaagagattagttaacttatctaacatcatatgtggttaaggaacagacactggaatcccaggtttgtggtgtgtgtgctgatggtggaatgtggtagaaggactgagacaggctgcagcttcccaaagaaagtgactcttccacactgggctctgcatcattccttagcaactgcttccttatgcttctttggaaataattcaaggaagttccttttttggaagccatgttttccactaacaacaaagattaaattgggcaaaagataggatgatatcaattctcatgattcatctcagggggccttcctatttagccttaagggaagaatcaagctgaacgtgtttataaagttctgtatattctcaccttgtttgtgcatatgtattataatacagtgaaa

SEQ ID NO: 5718 - DNA, 1029 bp, mus musculus
aaaacagatcattttggtaaatttgaggtgttgtaggaccgcttaacccagcctggagaatttgagaccttttggccaatctgatgtctaaaccacccaggatgagtacaattcattgcagcagagttgggaaagggcctttcccaagtagcagaaacaagattttcaaagactcataggtcaggaagacctcgcaacgtgatggacagcaagtagtttagtagagctgactgaagaagaggaaattggggaaagtgggacaagcaataagccaggtaaggagaggtaagctagtgccagtttgtgataagttttctatttcctgctaaaggttttgaatttatcctgaagcctattaggagctattcaaaaatttttaagtgtgaaggtgatatgatcagattgcatttagaaaaatctctttgacatcatgatgaatgatacagctgtagagagatcagttgtaggaacttaagaaatgatgagggctggaaataaggtaattacaatagacttgaaaggaagtgaataaattccaaaagtattaagatgggttagaaaaaactagatgctgaattgaatatgaagcaggatgataatgtaatttattgaagcattcattgagatagggaaataggttgataatcaggattggataggagtaggggtgggaaggaatatgtcctgcccatgagtcatcaggtggaactatccagaagcaagtacttattcaggtccaggtcctatcaagaaatgtggcttaccaggagtttgaggctgcaaagagctatggtcacaccactgcactccagcctgggtgagagagaccctgtctctaaaaaaaagaaaagaaacatggcttaaataaagatttggagacatcagcatgtagagggtgactcaagccgtgaaaatgattgagatgaaccaggaaagatgcagaatgagaagataattattaatatttgctctgagtatactgttttctgtatcaatatcatctgataatccctctcatttggcttgtca

SEQ ID NO: 5719 - DNA, 1313 bp, mus musculus
tctgtacacgttagatgtaagagtggggatggggttatcacacacttttaagaataactattttattggacttttactacatatagacacattttaggacggatttcatctatggcaaactacatttttgaaatattaattgtgttcagtcccaaatgagctgttgcagaattagtttgcctgatggacaactttacatacttttggcatgcaatacttctctaattgggagatggcctttcttttgaacattttaattttttccattttttatatccccaattttctaaaatatagattcatttattagtcaccaacaacgccttgacattatgagcttcttgacataaaactcttgaaaaaactatagtttaaatgtcctagactaggttaagtgagtgaggtacctgagatgcaaaatttaaggaggctgtcactgttagtgtcatggtgtatctctttgagagttaggccctaagcacatcactcagtaccctagtcccagctttgggtcagaagctaagcattctggctgtagaactgcccaagggactagtactaatcttgacctgtgctttcctctccctcattccaatttgctcatgtctagccagactttctgacgatctagaggtgacattaggtcttattgctatggaaatggagactattcctctgcctttacatctgtattagactttcttcatatttccaacctgttccaaaaattgaggggtgctgtagaaagttttcagtatctcttaggcaatgggcatgctagaattcacttcaagccttcaggaggagtttggtatgctacgctgactgcccttgatgggatttgtatttcctggggcatttgcaatgacggaggcccgaaaaaagctgcgcgggccaaggtcaaagtttgtgttaggctccttagccctagggatctttagcttccatttgattttcttcatgtgatctaaatgagttgaacttataaaaatattttcaaggctactctgtttgctttttatttttttcaacttgttaaatgctatacattgatcttttaaatttcatagggaggtaactgactaatttgaagttctcataaatgaatcaatagggttgctacattatgaaagaattttactaagtttcttctataatgcagactgaaatataagaccattttaatttatcaccaccatacagtaaaaattagcttatgatatgtaggttcctccaggattctgaacaacttgccacatagcagatgctcagtaaggcatattaataaacctacactttatgaacatactttg

SEQ ID NO: 5720 - DNA, 1313 bp, mus musculus; identical to SEQ ID NO: 5719

SEQ ID NO: 5721 - DNA, 742 bp, mus musculus
gaagagaaaaaatagtaagggaactgattttgaaatacattcctataaaagtgaaaacactgttaaatttaggttaataaaggttgtgctgctgtaacaaataacctccatattgcagtagcttacataaataagtttaagttctttttttttcatgtaaagtacatagttgttttttgcttttttcttttttcttttttttttttttttttttttgagactcactctgtcgcccagactgtagtgcagtggcgtgatctcagctcacggcaacctctgcttcctgggcacaaacgagtctcatgcctcagcctcctgagtagctgggtttacagacatgtgtcaccatgcctggctaatttttatattttttgtagagatggggtttcaccatgttgcccaggttggtcttgaactgctggcctcaagtgatctgcccacctaggcctcccaaagtgctgggattaaagatgtgagccaccacacccatccatcttgtaaagtacactggaaatctgggaaatgttctaaggcagcgagcctccctgttatggtctaccattcagggatgcttttaatttatggcacttccacttctacatggggtctgtgagtcatggcaccagagagagaaggctggagacttaagcactagttatctcatagtcacctctagttatattccattgtgcaaattaagccatatcttatctctggtgggaggagaattataatgttctca

SEQ ID NO: 5722 - DNA, 426 bp, mus musculus
agaccaccagaagcttagatttgatagtcctgctgcagtactagtttttgagggttaaaaggtaaataataccttatccatgtcttcaagagagtcatagtctagtgggagaggcagagggttatatagctttgtgataaatcctgtaacagcagtctcaggatgctccacgagcaacaaggaggcacttaacactgtcttgggcaatccatggtcaaaaaacgaggctggaaaaacatgttggggctgcatcttgaagagcattccaaagctggtaaaatttgccctgttaacaagaattgattgaggattttaaaacggaagttatggaaacaataggaagattattctggcttatgagggataggtgaattagaatacagatatggctcaaggaaggagagtatttctttagacaagagatgt

SEQ ID NO: 5723 - DNA, 1329 bp, mus musculus
tggctggaagttaaagatccaactattgggaggagcagggcctaagaattgaggctggacacttggccggagacatcactgatatccttgaaagccatatgaaggattttaggctttgtcctgtaagtcaggggatagcccctgtagaatgttaaataagggagtgaaatgccaaatttatatttgataaatatccttctggttattctctggaagaaagcttggaaaagaacaagccaagaagcagagagagacaataaagtactcccacaatagtcccaggacttgacaatagaaacctgtacctgtctcgtggaagtgaggatggaaaatgaggaagatacctagaacatttgtgaggaagaattcacaagtctgatgggctgtgaagggtgagaaatagggagagagaaaaacctggaatccctcagatgactgcttttcttgcttaagcagtacattcatcaagactaacagatgtgtcttaaaaagatgactctgggccgggcgcggtggctcacgcctgtaatcccagcactttgggaggccgaggcaggcggatcacgaggtcaggagatcgagaccatcccggctaaaacggtgaaaccccgtctctactaaaaatacaaaaaattagcccggcgtagtggcgggcgcctgtagtcccagctacttgggaggctgaggcaggagaatggcgtgaatccgggaggcggagcttgcagtgagccgagatcccgccactgcactccagcctgggcgacagagcgagactccgtctcaaaaaaaaaaaaaaaaaaaaaaaaaaaagatgactctggctacagaactaataatagattggtgtgggaccaaaagggggtgaaagaataaagggttgcttaacagggtgttttctgtaaataccaaagcctccctaggcacctgctgtagttctgtaaatgctgccaaggaactggcccaataactcttccatctgagcaaaactgcagcatcacagagcccaaaccctctctcttttcattttcccaaaatctgtgtggctgcaatgaagggaaggtttcctctgaggtcctttcagctcactcatctacaattttcccacatagcccatggcatacactcaatgtattatccacagtagctttactagcttggttcataaaactacttggaaaatgcatgattgagaaacttttaagagcttcagggaaaattaaactcaaggaagaagatcatcagggaaatgatgaaagttgttatcaatgtttttactgtaatttaaatgaaataatatggaaggatatttaaattcaatataatatctaa

SEQ ID NO: 5724 - DNA, 1792 bp, mus musculus
cttcaaatttcttaaaaataaaaaaaaaaaattaccatgtggcttggatcaagatggagctcatctttgaccatattgtttaaagaaacaacataatgttagttgctctagttttaaatctcatagaaatagtctcttaatttgtcatgagagtagtgtaccctcaaacgcattgttgtctcttactaaggaatttattatcacaatcacatcgtttctttaaattgacaactgatcagtgatttcataagctaaagtattttctaatgtactgtagcatttgtcatcacttactctcttttataatacaccagtttctattttgttttatttaaattatcttcccttcttcttttgagtgttgtggtctgctctttcttgtctttcttataattctttttccctcaatccttcatccatttgcttccatattacttcactttttttttttgtaatgacttccagaaaaaaagtacataaataacttcttcagtgtatgtatcatgcaaaatgttttgtataagatgggatagctgcaagttatacacctttggatattaatagtagtgatagttttgtggaatgattgaggacaaaaatttctgaaaattaggtacttggccagaagattatgataatcggttgttttcctatttacattattttaaaaccagaccagctggacacggtggctcacgcctgtagtctcagcactttgggaggccgagacgggcagatcacgaggccaggagatcgagaccatcctggctaacacggtgaaaccccgtctctactcaaaatacaaaaaaattagctgggcgtggtggcaggcccctgtagttccagctacgggaggctgaggcaggagaacggcgtgcatctgggaggcggagcttgtagtgaacagagatcctgccactgcactccagcctgggtgacagagtgagactctgtctcaaaaaagaaaagaaaagaaaagaaaacaaaacaaaacagaccaccatgactttttttttttttttaaggatagaaacattgaattaaattatgctggtttagaaattgaatccagtgcagctcattcataatagtgatggtgcattaaatgtagtataatttgtcttgcaggcttctcatgagaaggaactattttaaactgattgtagacctggcacctggcccactttctgggtgatctcccaagtgtgaactttccctacccttagcccctcctttccttcctggaggtggctgatagaggtggattatactgataattacacaagcagtgtcagttgcacacatgatttgcataactgtgctgtgctgatttcatccatcaaattctgatactgatgcctttggtgcctcactgtatgctttgcaataaacactgaagaaaggagatgggattaatattttcattcttgactcttaaaacacacacttgaggtcctactcattgaaatttacctagaaggtaaaagccactttcagtcaggccggctgtaagacagcccatttgatttccaccaggtagaacgcctctttccccctaccccagaccaataaccattatgtatctactcttcgttattgtttctaataaaagaaagtaaaacttttaatagcatatacaatcacatcttttatgaattgtagtagtcatgcttctttcagaccctatttctagaaggaattaataagcctttcttttataattctatgcagctcttttcactttggtgcaagtcatttagaagatcaatttattgtaggaagctttccttcc

SEQ ID NO: 5725 - DNA, 1792 bp, mus musculus; identical to SEQ ID NO: 5724

SEQ ID NO: 5726 - DNA, 1070 bp, mus musculus
tgtcaggatttttctgtagccccaaaatttgcctcaactcaccactattgtgaatgtcatagcagctatcagtaataaacatcagtgttgaattttgtttttttttattttttttactttattattattatactttaagttttagggtacatgtgcacaatgtgcaggttagttacatatgtatacatgtgccatgctggtgtgctgcacccactaactcgtcatctagcattaggtatatctcccaatgctatccctcccccctccccccaccccacaacagtccccagagtgtgatgttccccttcctgtgtccatgtgttctcattgttcagttcccacctatgagtgagaatatgcggtgtttggttttttgttcttgcgatagtttactgagaatgatgatttccaatttcatccatgtccctacaaaggacatgaactcatcattttttatggctgcatagtattccatggtgtatatgtgctacattttcttaatccagtctatcattgttggacatttgggttggttccaagtctttgctattgtgaataatgcagcaataaacatagcagcatgatttatagtccttttggtatatacccagtaatgggatggctgggtcaaatggtatttctagttctagatccctgaggaatcgccacactgacttccacaatggttgaagtagtttacagtcccaccaacagtgtaaaagtgttcctatttctccacatcctctccagcacctgttgtttcctgactttttaatgattgtcgaattttgtatagcacttttggaaagaatttttggggcagcaaagatcctctttcctcattggatttccatgtaaacattctgtgcattctgtgtaacctgttgtataaccattaacagcttgggaaagagaaggcgaaaggaaaatttgctgctgagtttctgtaggtgagaatagatctgcttattcaaatagtcagcaaacaaattagagacttcttgccaatgcgaagaaaatgacagcactcaagagacgatgattgttttatttttttaattttattttta

SEQ ID NO: 5727 - DNA, 1070 bp, mus musculus; identical to SEQ ID NO: 5726

SEQ ID NO: 5728 - DNA, 1241 bp, mus musculus
aatttactttctaaatgtttccctttagttagttaagtttaaaatgtgatttcctccaggaaataatgataatctctctcttttgtggctgaaatgtatgccccactctacatagcatacttagagtcagtgatgtggatcccaccctcatacacccttactctttttttatttgaagtaataaaataaaaacctttatcaaatgaaatgagttaatactgacagcgtatatttgaaaatgaaaaattgtaaatttataagcataaaagtatctccacactaataagaggaattattcaaagaaagaaaaaatattttacatgggttttagtgtgtgaatcatttcctttgtgatgaaaatgatcgtgtttaatgatatgaatcatatcttttaacagttatgataaatcttctaaattcaaactgaaaattatatatcagagtcttccaaattaaaaacaaaagaaaaaccctcccagggtgagttagtaatttttagagctgtattatctctcagtttatgcacttgaataccacttggtaaatgtacctgctgcaccaaagtatactttagtttcatgcagagtaaagataactcattatatcctttttatcatttgaacatcaatggctatggaaaaagtaattttcatcctgggtaaatttgctcatattctcaaggtgtacatggacctgactttgagctgtgtgtatagggttcttggtatattatttagtataggtctagcacattccagagcagattaatcatcctctaaatgctcacttctcacaaacagaaaccaatgtatcgacctccatgtgccctaacctgctgagctgtgttgatttgatttatgggaagttgatcattcacactaataatcttttatcaccttatgtatggggagcacaaggcattgggttatttttttggcttttgcaggagtctatccttagaatacaacagtgatttataattatttttctgaagtatcatttagatattctaagcaaaaagtctcatacagtgtaatataattagtactctatttctgaatggactttccctttcttgctttttttgaagcagattatctaagctcatttctattgagagagatctgctaacaaagcattcaagttagggttatcactgtcaaaatgaagtggaaaatggcaacaactccttttttcattaaaagctaaataaacaaaaattcatttagtattaaaaaaat

SEQ ID NO: 5729 - DNA, 994 bp, mus musculus
ttccctttcctttagaattagatttttttctcactaatctcttgagttgacacagataattataacatatgttccatcactgactagtccagtttaaagaataatagaaaatgtgagttcaaatattcttgagctatttgtaagttactccttggatcacattttggggctcagtaaaaccatttctttgcaatttagataaagccagacctatgaaattcagaaggaaaattcaagctgaaggttcctatataaaataatccaaaaggacaaattttaatgcatatattgccaagtatcaactctccaaacctcacaataaggcacagatagttgcatgaacttagtctatttgaggacttagtatcttcaaattgatcccaaacagtttaagagcgtgggcttaaatgaatctatcttcactttatatatgtcaaattattctttttaaatatttattttcagcctacccctcttgtattcccatggaaggagctgagtatatttaatattaggagcacatccagaagtctttgaagagggggatggctcttcatattcatgaagcttgcatacttctgttggtcatccctggattggtcacctctgctgctatcagtcatgaagactatcctgctgatgaaggtgaccagatctccagtaatgacaatctgatctttgatgactatcgagggaaagggtgtgtcgatgacagcggctttgtatacaagttgggagaacgatttttccctgggcattccaactgtccatgtgtctgtgctctagatggacctgtttgcgaccaaccagaatgccctaaaattcacccaaagtgtactaaagtggaacacaatggatgctgtcctgagtgcaaagaagtaaaaaacttctgtgaatatcacgggaaaaattacaaaatcttggaggaatttaaggtatgcgttaccctccatatttattgaaatatcaacttttcataccacgtgcttagtac

SEQ ID NO: 5730 - DNA, 916 bp, mus musculus
accacagtctctaattatcttaagcttttagtctagtgaatatcttccctcttacttttaaggtgccaagtgtcagaacttgttgctgtttgttgaattccaagaggcaatggagaaaatgtaggaataaactacattttcttctacatttaagatgtaaagggaacattttcttagtagaaaatccttacttttcagaaaataacttcttaggtaaagcacatcattttaaccctttttgcagaaaaaaaaaatacaatgcttctggttcaaggtggcaatttgagcacatatgtttgaatcctcctctttcccaaataaccatgaaaatgcaggagacactttttagcattgctgaaaccacaacagggtgacatccacatgttcaaactgagtggaattcatggaggatatatgcagatagaagaagttgagtgatgggcaagacgaccaatggttttctgcacaagaagaagccagtcagagaagtaggtggaagcaccttctaccccagagagggagctggaggaaagggtgggctttgggggggtctttgaggtgcaaatttctgtgacactggtcatagctcacatagagagcgattgctgccacggctcttaaattatttgaactcacacattacgtagctggtcattcctaggcaaaaagccagggcttcctttgctgaatcctaacgaggcagttatgccaggtaggaaagggaagtgctgccccagctagctagatgccgcaacagaggaggcaaggaattcctccaaagagagaggcacacttgggtgtgatggcctttggtttgaagctggagttccttcttactccccaagttcatgggccaccagcctgagaaagcagtgaaaatgctttcctttgtctgttttcttgtttttgtttttat

SEQ ID NO: 5731 - DNA, 1658 bp, mus musculus
ttcactgttttcagaacattaaatgaagtgttaccatgaagaaggcacaaattacttaatcctcacacaagagccagtctcattagctcacactcacacctcttaggtcataccatggccatcaattatacccggctgatgctgcaagggacaatctcactgctctgtgacatatttttctgtcttacagattctaggtctcaaaatataaggaatgacctcacgagtcacagcccagttgttcctatatgtagttagaaggagatatctgaaggttggtacactgttaatattattcaatcatttcagctctcttctcaacctctctattctcaacactcaatttcaagtttatggcaccactgcgattctagcccttccatttcccactcggaatttctgtgctatcgtccctcaggagctccttggatctggcatcctctctaccgtcaacctcacaccccaggcaagaaggggaaatcccagaggccataatcctccagccatctgggaggcacccagaagacaaccattagcagacactctgggacttcaggcagttctgctccttgaaacaactgtcactggagaggcgattttacagcagccactgttgtcaagtggaaatacatttttagtaataagaataacagcaatggacggataagctggctcttctggaacaaccatccagggatattccagccttacagttctatcaggtcaagcaaaagttgatgtttctacctcaccagggagcactttagcccttaatctcttttacaagcagcagaggacttgaagaccaaatgacagccagggacctggccattgccgggtagcctaggaatgtgcgaccactaaggaattgaagcccttctctgtgtctctgtttttctcacttgtcttctttccagctgtcctataggtgtggtaaatctgaatgcacaattctcaaaaaccataactcccactttttctaggtgccaaagagaatgttaaaatatcttcaattatccattctctcatttcaacttcagcttctagtattgattaagaagtggagaccacctcatctgtcctcctcaatcttattcatgcactactgagacgcacctacaggaggagaaacacttccaagcacacgatgtgaatttgtatctttacacacctaacataccgactattcctgaatccttatccagtttgaaagagaatacaatgcaagtaaaacctgaattgattttagcctgatgttttcccgtggaacagggactcataaatcactccatatgtcaaactctgcccttcttccccgattcagtaatcactctcttagtaacttgggagatataaactagacatttgtatctaccaggggttctatctggcttatttatttaattcagctgagaatttggggtgttatgtttcattaattcaccaatgacctattttaaatcaacgattctgagccaacttctttttgagatattggacttgatataaatacaatgcagaaagaagtaattctccattctgggttaacttcattattgtgctaagtattcccataagaaaaaaaaattatcatatgctctcaagcttcacagacatatttttgtctgtatgtttactcagaaaggagataaagtcta

SEQ ID NO: 5732 - DNA, 294 bp, mus musculus
aatgaagtaaagcatcttaagtgtttaccatagagtctggcacataatgtgttcaagaaatgggaggcaccttcatcaaatgtatcatggttagtatactttttacttgcttagaaaatagggagaagaggttggcagagattggaaggagagagagagaataacctgcaaatccatcattttaactactaggcttctcaagaaggctaggtcctaaaaacaggtatgagtagatgttctttaggctcacagagcactgggtgtgatcaaagcatgtggtacccgggcacaaca

SEQ ID NO: 5733 - DNA, 977 bp, mus musculus
tctgacatgctggctctaggagaacataaattccactactagaaggtgggcagggacttggttcactgtgtgcctgtcccatcaaggtgctcaaggacaatgtttgtggaaggaaggggtaaactgagtgaggcttggactcaggaactaaacagaattaagaataagtagagagggtgtaagggacagtgagtagctaggagttgggatgttcttggcaaaacagttcagcctagtcagaataatgcagcaaaactactggcatatggaaggactagactctcacatcttgattcccaggccttggctaattcaggatgaccacaggaatctcacttctctgtttttctcttcaattaaataagattgaattagttggtccctgagaacctttgagttagttatgtgattagatagagttgaggaaaacccagaaaagaccagtacccaatatggatgttgccagtggcttgaggaggtgagaaggagggcgtggtacctttgctgggctcccatctatcaactccatcctgcccatgctcttcccttgctctctgccctcaagggcatgggctctttctctgctttctgctttccccgtctttctgaaccagctctgctcagtgcccacatttcctggcagcatagttggcaggcacccttaggagcacctctgagcagagcagatgaggacaaaggggcatggacctcaacatgaggcagtgctgtgccaggccagagtcagagggcaatttatgccccagccagagcaaggaggtggcacaggcaagcagaatgcactccctgggtccctctggatgccaaacagcactggaaattttcacgaatgctaaattcacttgccactttacaggaagcgctgagccttgagccatctttccttcagcagttccaattttttccagttgcctttttccttagccatcaggaccatctgcccttgggcatgtgggtct

SEQ ID NO: 5734 - DNA, 1545 bp, mus musculus
ttatccgcagcccttttcttctttgagttagtaaagatttattctgtaacctgacactcatctggccctttgcagtttgccagccatattcccatgtgatttcccactggatccaggcccccatccggctggcaggagggggctctgacgtgcaggttggaaatcagaagtctgtgagagcgcgggagtgcatggcagctctgggtcccagacctggcccgacccctctgcttcacctccagctctgctgctcctctactcttgggtcgagatccctttggagccacagcgaggaaccctgtggtcctcaggcaggtgtaccttgagtcagccaggagccctcttttcctgtgtcaaagcctgccctcgggctctgctcacctctggtgaccctccaagatgcccctgccctcagtttcccctcatgatctggcctctgcccccttctctagccacagcctctagtacactttagcaataccaccagactagttagagttccccactcaccaagcaagacatgcagtttcatgcctctgtgccttcgctcatgctgtttcttccgactggaatgccttcccctgctcctcctgccttgtctgcctggcaagttcatctctcacgatcccctcaaaggccccctcctccaggaaggcaacccctgtgcccctcccctccaggctacctctgcactttgtcaatgcttctcttgtggcacttatcacactgtattttacttgtttacatgtttgtctccccttctagactgtgaatccttaagggcatggactgtatcttatgcatctctgtatttctgcgcctagcacggtgcctagcacacagtaggcgctcaataaatgttgaatgaatgaatgatttaatcaagacttgatcacccaacagcttgtctttgttgctacatgagtgaaaacagcagagaactttctcacagttttcccatctcagttccaggcctgctaacttgcagttaggcacttcaagagttttgatcagaaatgatgcccaaaggctgggcgcagtggctcacacctataatcccagctctttaggaggctgaggcgggtggatcacaaggtcaggagttcgagaccagtctggccaacatagtgaaacctcatctgtactacaaatacaaaaaattagccagacatagtggcaggagcctataatcccagctactcaggaggctgaggcaggagaatcacgtgaacccaggaggcggaggttgcagtgagccgagatcgcaccactgcactccagcctgggcgacagaatgagactctgtctcaaaaaaaaaaaaaatttttttaaaaagagagagagaaatgatgcctaaaatatgttcttcccaaggcccatgggcatttgttcagggtttacgatttgcttatctcaatgtttcccaaagcttgagatacacaagtgtaccactggccaaagtagggtggctgtacatggccacagcacagcaatcaattggacttcaaggacacggtcttggcactagtctgtctttaatgtctt

SEQ ID NO: 5735 - DNA, 1545 bp, mus musculus; identical to SEQ ID NO: 5734

SEQ ID NO: 5736 - DNA, 991 bp, mus musculus
cctggcacaccggccccactctacccttgccactactgcagttaccagagccgccacaagcaggctgtgctgagccatgagaactgcaagcatacccgcctccgtgagttccactgtgccctctgtgactaccgcaccttcagcaacaccacactcttgttccataaacgcaaggcccatggctatgtacctggagaccaggcctggcagctccgctatgcaagccaggagccagaaggggccatgcagggcccaacacccccaccagattcagagccctcaaaccagctgtcagcccgacctgaggggccaggtcacgaacctgggactgtggtggaccccagcttggaccaggccctgccagagatgagtgaggaggtcaacactggaagacaggagggcagtgaggctccccatgggggtgacctgggtggcagtcccagcccagcagaggtggaggagggcagctgcacactacacctagaggccctgggagtagagctggagtctgtgactgagccaccccttgaggaggtcactgaaacagcccctatggagttcaggcccctgggactggaagggccagatggactggaaggaccagagctatctagctttgaaggtattgggacttctgacttgagtgctgaagaaaatccccttctggaaaagccagtgtctgagccctccacaaatcctccatccttagaggaggctcctaacaactgggtaggaaccttcaagacaactccacctgctgagacagcacccttgcccccattacctgagtcagagtcattactcaaggccctaaggagacaggacaaagaacaagcagaggcattggtgctagaggggcgggtgcagatggtagtgatccagggagaggggcgagccttccgctgcccacactgcccttttatcactcgccgggagaaggccctgaatctgcactccaggactgggtgccaaggccgccgagagcccctgc

SEQ ID NO: 5737 - DNA, 991 bp, mus musculus; identical to SEQ ID NO: 5736

SEQ ID NO: 5738 - DNA, 773 bp, mus musculus
ataagatcttgtttaattctgaggttaatacagttattacacccactggaacagaagctctcagacaggccttggactgtttttcattgttctactctcaacaccccagtgttgcccggcatattagatgattaacacttgttggatgaacttgttcaatgaacacctattttatagatgtggagactgagactcaaagactcgcccaaggtggtaaatggaggagttgggattcaaacccaggttagcctgcaccaaatcatatgttgctcccccacctttttcttaggtgccctcacttcctgctcacagtggttccaggcagccctccagacaccacctcttctcagcctgccaggtcccgagtgcccagacagtgactcaggtgcctcaggggcagggagtgggtgacgcttcacaatgccctgcccaggctctgggaaggagggcatcgatgtagaggggagagtcccagcttctgggtctgaatgggggtagaggcttctttggggccagattttggggctatcagtgccctttggaaaacatcccccaacatctcctaggaggtggtgagggcctgggagaggccaggattgggggtggggagggaggtgagctcttcacctgccaagacggctagggatcgagagaggcagctcgtctcccttcctgtctgctgaaccagccagcccaccctgggcagctatatagccatctccctgaggtcttcctgctagtaatactctgctggcaggccctggcaggcctgg

SEQ ID NO: 5739 - DNA, 1036 bp, mus musculus
tttctagggcccccttactcctccacccccgctttgctgcttctggctccaaccagtgcgtgcatgaccatcacttggataggggctcagggctcctctttccagaaaccctcatgttgagagcagcataaaccagtggttaaaagcaggggctctagagtccacccagccaggttccagcctagattctgtgccccagtagctgtgtgacattggccaagttgttcaacctgtctgagccccggctctgaaaagaggggatagtgcttttcttataggcctgttgtgacaagtaaatgctgtaaatagggtccctggtaattgatattattagggtgccaccaaggtggggtgctaggctaggattatgaggaactgactaaaaggagtggcagggagctggcatcttgtcctttgggccatcggtgtggtcgatacatagtaggtcctcacagaaggtctgttaaatgactggggacgagggcctgcatcctgaggaggggatgaaaaggagagagaagaaaagactcagcccagctcactgccttaccgtgccccttagagccactgctggtgaagctggtctcggagctgacaccactcactgtccacgagggcgatgatgccacgttccggtgtgaagtctccccaccagatgccgatgtcacctggctgcgcaatggggccgtcgtcactccagggccccaggtggagatggcccagaatggttcaagccgcatcttaaccttgcgaggctgccaactgggggatgcagggaccgtgactttgcgggcagggagcacggccacaagtgcccggctccatgttcgaggttaggtcctgatgaggatgagatactctgtgtcccgtgcctgtactcccaaccaggattccagcagccttgcctctccacctagggacagaccagtgggatggagcaaggggccagcctccaaccccaccagactccatggcctccttcttccccaccagagacagagctgctgttcctacggcggttgcaggatgtgcgggc

SEQ ID NO: 5740 - DNA, 1036 bp, mus musculus; identical to SEQ ID NO: 5739

SEQ ID NO: 5741 - DNA, 1460 bp, mus musculus
ggctttcatcttcaaggagactatcctaagttccctctcatggcagcactgagttctcagagggtgataatggaaattgcaacatctcttgaggcctaggtttcaaagtcacaaaacattacctatacccagactcaaggggtcaggtaatagataccagctcctgatgggaggaaaagcaaaatcacattgcaaagggacagcaaatggggataagaggattattgtggtcatgctgctaacaatcagtgttttccacaagggaagacaggaattcatagggtggagaattccccactagagagaagacattcaaaggtgttgggtgggtcaaaggagtgacacatgttcactctaattggctttctcctgagttgactgattgcatctcccattcttatccccagacctctcctgggctactgatctgctagagggaccccttcctgcttccagtctcaaaggtgcatggccagagagggattgaggttggccttgtgacccatgttgccctgagtggatgcagcacagaaactgtacaggactggagtctgatgatgaatttcacttttgaataattaaaatgagagttcttaataaggcattgtttagaagaaacacactgattgtgtaggcatgtactgtttattaacatttaataattcaaaaaacattgtgaatactgactcttagaattggaccaaggcctgagccagtgataaatcttgcttaaattattgactttctggcccgacgcggtggctcacgcctgtaatcccagcactttgggaggctgaggcgggcggattacgaggtcaggagattgagaccatcctggctaacaaggtctcaatctaaaaatagttttttaggttttagtagaaaccccatctctaataaaaatacaaaaaaaaattagctgggcgtggtggtgggcgcctgtagtcccagctattcggaaggctgaggcaggagaatggcgtgaacccgcgaggcggagcttgcagtgagctgagatcgagccactgcactccagcctgggcgacagagcgagactccgtctcaaaaaaaaaaaaaaattattgacttttttcacacgggagtatgataattagacaggaagaggaaggaaaatgaggaggggaagctaatgcttctgggggctgatgttgtggcaggcgctagcctgggcactggctcatgcttgcattgctatctccttgccttgcctgtgagatgggaaaaccaagcctcagaaagtttacacatcttgaccaaggtcaagactaactaagactacatgacacagtgaatcaagattcacatttgtctgactccaaaacctttggtttctgcacctactgttctaccaggagataaaatttcagtgccttccagaggtttctctaaagagctcaatcatctactggtgtgtttgctgtttaagagcttgtgctcta

SEQ ID NO: 5742 - DNA, 947 bp, mus musculus
tctttcttgctcagagatgggaagacagagagaatgaagtgatagattcctttacctcaggctctgtgagtgagctcgtcagcctcccaggctccacatgtgaatacaggaagcacctgcacagcccaaaacatcctggccatacctagtatgtcctggattgatgcatcaaatctttagattattcattcttatgtgaaatgaacatcttccaaatagctttcttcatttcatcgcttgatcagcagtaagtagcaagtgcttctgatgttctggtgggaagagaaaaggtatttattttaaaactattcaacttaggaaagtctgacctttagagacagattcaaagcataaataactatctgagaggaacttctcttctccatctctggtttccatgaagaggaattttccctaagccctttaagcttctggaccaaaacttctgtctccctggaaatatattaggttacctgtaggtgagcaatgccattggtcttgggtggaattaatctatcaaaagctatacacatggcatttcatcttcctcctcctccctagatcagtgtgaggcaatgatttttttacagattaaagcttgccctgaactgagccccagacgctaaattgggtgtgcagaggaagtaacagcacttttatttcatcactaagctacattgccgttaactttatcagtaataaagataaatttttttcctgcaaatgctggctcctttgtttacattctcagtttcattttttaaaattcacacaggagggaagggttctatttattggactttcctcaaaaactccaccaggaagagcacacactgtattcaagtattcaaatagggggaaagtggtttagaacacaagccgactatgctgggcagaattttaggatggcccccacatgtggtagccccttggtgttcctgcagtgt

SEQ ID NO: 5743 - DNA, 1589 bp, mus musculus
agaaaacacctgcaaagcagcacagtgacatttgctaaaggtgagatgtaagacaacagttttccatgtaatcgcacaggattggacagaaagaaggctccctcatttacaggccaaagcgaatttgtcagtttcctcaccaggttacatgaacattttctcagatattttcctccaaaagtgttttgtgtagataaaaataacttagatgtgaccgggtgtggtggctcacacctgtaatcccagcactttgggaggcccaggcaggtggatcacttgaggtcaggagtttgagaccagactggccaacgtgatgaaaccttgtctccactaaaaatacaaaaaaaaaaaaaaaaattagctgggggtggtggtgggcctctgtaatcccagctactcaggaggctgatgtagaagaactgcttgaacctgggaggcagaggttgcagtgagccgagatcgagccactgcactccagactgggtgacagagaaagactccatctcaaaaaaaaaaaaaaaagcaacttagatgagtctaaatatcccaccccacccgctactggaatccttcaacagttcctcaatacccaaagaaaaaagagccataacctttaacaaaaaatcgaaggctcttcacaatcttccccaaacctacttttctggccactcttaaccttccccccttgaacatatgttaaccctctgtcatgctacctcacacctgttaccagaccatacctttacccccatgtctttgttcatgctgttctctccatcaggtgtaccttttctgctaattgttgtctgtccaaacaatacccatgtgtattgattccctgtggctgctgtaacaccatgccacacaccggatggcataaacaacagaaacgcattgtcccacagttctggaggctggacatctgagatcaagatgtcagcaggattgattccttctgggggcttgagggaaagacctgttccctgcctctcacccagcttctggtggtttgctggtaacctttggcattcgtaggcttctagatgtatccctgattcctgccttcgtgttcacatgaaattctccctgtgtgtgtgtgtctccaaaatttcctttttctttttttttttttttttttttgagatggagtttcactcttgtcgcccaggctagagtgcagtggcgcaatctcggttcactgcaacctccgcctcccaggttcaagcaattctcctgccccagcctcctgagtaactgggataaacaggcacctgccaccacgcccagtgaattttttttttataattttagagagacagggtttcaccatgttggtcaggccagtctcaaactcctgacttcaagtgatctacccgcctcggcctcccaaaatgctgagattacaggcatgagccaccgcacctggcccaaattttcctttttcataaaacaccagtgctattggattaggagcccactctactacagtacgacttcttgaccaattacatctgccaccaccctgtttccaaataggttcacattttgaggtactgagggtcatggcttcagcatatgagttgggaact

SEQ ID NO: 5744 - DNA, 407 bp, mus musculus
taaatatattattgtcagtcctcagttgctaaaagttatttgaaggcagatggggatgggaaatgtagtagctttgtctcgatcccataactcactggacacagccagggagaaagactcccaccactttttccacttcctcctctttctccagcttcttcctcctccccagctctgttaattttctatttttcaaacatcaggatacacccttgagtgcacatacaaggaagacaatgttagtggaaactccaaattatatgatcgccctccacagctaaaccatagtccaataccactgcaaattatttataaaaatgcctttagtcagcaattctatgattagcctttggaaggaatcttgctggagaaaaatacttatcaacagaaagcttgcaaaaggaata

SEQ ID NO: 5745 - DNA, 1264 bp, mus musculus
gataggaaatagtatctgccatttgttgtgccttggccaggtgcaatactaagcatttagttcatattactgtagttaatcctcacaaccttgtgagataggtactataacacttccagatgaagaaaacaaagattaaagaggtctaatcactggcttagagtcaagtggctgaagtggtcaattggcaaccatatttgttgactttgacatccattcccttatctggtgtgcagtactgttccagccttataagtgtgcgtgccatttgacatacacacattcaatgtgctattatgcagcatttaaatggctgaagttaaagaggaaaaagaccacattgttcctagtgtgactgatttccacaaacctgtctctcttatctttcccagcaaatatggaagtaattttagtgttgctataatgtgttgcttgaagatgctaaagccatttttgtctagggattcacaggtaatctactaggaggaaagggatgaaacccaccaccgttattaccaaactatacagttatctgatcagcacaatacacttaactatttcacgatatttgcaaaatgggcacagcccacaagagctcagaatgtttgggtaccttggtgttcctgcactgctggtgctgcatcagtggaaacggcaccctgaagggttgctggagattgtcctggcgcttcctcctccctttcgtctcctgattctctccctgagcctgaggctctctgactacttgcagtgagtttcatccggagggcttgattctctttctccagtttgtggatctctgcccgcatttcctggataagtctcatgagctggatatcagcttccattgtctcttctcatgttgctctagttggcttctttgggagagacaggtggacttttcctcatgagcccaaaacacaatctactcagtgggtctggctgatcctgctcataaacctttccaaacaatagctgtcactcttctctgcgccatctttcagcacctggggggttaggctgtcaagggaggtaaaagatcttccatgaagtattcattctgggttttgtttttcaaaacagagattttctttctatctttcatttcatgtcaatccacagttctagaatattgctttgtgtgggaggagaagagaacactccacaaatttccagtgaagaacagtttcttgtttccatcatgaacttaccatcacaacagccactcagtcttttctctattgccacttctgggatcaaatgt

SEQ ID NO: 5746 - DNA, 1766 bp, mus musculus
caaattacttaactccctcatttcctaatgtaaaaaatgaggataattatacccagatgataagtaaaatgtggaaaacaaatgacatagtaacataaagtaagcactgatgtgtccggaattggtgggttcttggtctcactgacttcaagaatgaagccgcggaccctcgtggtgagtgttacagctcttaaggtggcgcgtctggagtttgttccttctcatattcggatgtgttcggagtctcttccttctgatgggttcgtggtctcgctggctcaggagtgaagctgcagaccttcgtgctgagtgttacagctcttaaggcagcacatctggagttgtttgttccttctggtgggctcgtggtctcgctggcttcaggagtgaagctacagaccttcacggtgagtgttacagctcataaaagcagcgtggacccaaagagtgaccagtagcaagatttattgcaaagagttaaagaacaaagcttccacagtgtggaaggggaccccatcgggttgccactgctggctcagcagcctgcatttattctcttatctggccccacccacatcctgctgattggtagagcccagtggtctgttttgacagggcgctgattggtgcgtttacaatccttgagctagacacaaaggttctccacgtccccactagattaactacatacagagtgttgacacaaaggttctgcaaggccccaccagagtagctagatacagagtgtggattggtgcactcacaaaccctgagctagacacagagtgccgattggtgcatttacaatccctgagctagacataaaggttctccaaggccccaccagagcagctagatacagagtacccactggtgcatttacaatccctgaggtagacataagattctccacgtccccaccagactcaggagcccagctggcttcacccagtggatcccgcatcggggctgcaggtggagctgcctgccagtcccgcgccatgcgctcgcactcctcagcccttgggtggtagatgggactgggcgccgtggagcagggggcgggcgctcgtcggggaggctcgggctgcacaggaacccacggaggcgggggaaggctcaggcatggcggcctgcagtcctgagccctgccccgaggggaggcagctaaggcctggcgagaaatcgagcgcagcgccggtgggccggcactgctgggggacccagtacaccctccgcagccgctggcccgggtgctaagcccctcattgcccggggccggcagggccggcctgctgctccgagtgcggggcccgccaagcccacaccctcccggaactccagctggcctgcaagcgccgcgcgcagccccggttcccgctcgcgcctctccctccacacctccctgcaagctgagggagccggctctggccttggccagcccagaaaggggttcccatagtgcagcggtgggctgaaggactcctcaagtgccgccaaagtgggagcccaggcagaggaggcaccgagagcgagtgagggctgtgaggactgccagcacgctgtcacctctcactggcataaagtaagtcctcaaatgctaatgttcttcacgtagatgtggccatttactttatgtacactaaattgcaataaaagaaagcttaatttgagagagaatgtatctgaagaaaaccttcaaaaaagctcagaaagggaatatagtctcagtgcttttagaaacagcacatttgactggcttaaaa

SEQ ID NO: 5747 - DNA, 1232 bp, mus musculus
atggttttacactggagttctaaactggagttaatggatagaattaaaggagtctgtgaacttgggaggaaaaatggatctttcccatgaggaatatttaattagaagtcagcatttccttctattgtgaatataagcaatgcacccacccccacctcagcattgtaatgctagcagtatttctgaacttttactgacaacaaaaaatcagggatattttcaaatcacattacatttttcagatattttgaaatatcattcatgtttaccactgtttcaaaattactgggctcatgcctggatatttttattttctgcattcataagctcatgtattaaggtatcacgtatttgattttaattactttaataatcatatttcaatatattcagtttccttagtagtctcatgcatcttattttatgatttgaacagagctggaactagggtcttgcaaggcacaaactggaaggtgaatgtttccttcaggatcaggtgccaagggtactacatgaaagagagaactggctctcaggtctttggaagtgcaggatcagtgagggtagaactagcatttctacagatccaagagtgatttcttaagttttgcaaattcaatatcttcttttcctcaccctagtccaggctctgtctttcaaaacactatcctgagtgtgattcccttttcaattgtaattcttgaacatgtcctcatccctcagggaagtctagcatacccatgaagtgtgcttgggaggcgtgaagaaaaggaatccagagaagggtggtttttctcacattccagtttctcttctttccttggaagacagagcaacagcagcccattgaaggcactgtggccaagaattctgggacatggcatgaccgactgcaaaggaaatggagatactaagcactgatatgagtggggtggtcactgagataacgacacaaacttgaaaaaaaaaaaaaacctctcataagggatgcaagatgggcccaacactttctgaatatccattggaagtagctgtgtcctaccctaatgctcagagtctgtgaccatgtccctgggagatttcttagatgggcttaatccttaaggggctatgagaatcctgtaaaaaaggcaactttctcaggctagtagcataaaaggaagtcagaataatttaaagcataataggtttttgaagaacttttgttggcttggagatggaggatagacaca

SEQ ID NO: 5748 - DNA, 927 bp, mus musculus
aaaatagccacacgtgccattaacaggtacttagagccttggtttttgatatttgaaaacaccatacttccacactgtttgctaacgaagttcattgaaagattccaaagtatttttgtggcaggaaataatcatttcatctattcctgctctcattcacccgacaattactgagcacctatggaaagctagatccctgtcgagggtattgaaaagaaagatgaatgagatgttgtgcaagacccaggaagctcactttattagtctatcaggtagctatattcatggaagactagaatataacttgtgtcgtaagagatgtcatattacaatgccaagaggcaggttgtctgcaggcattgcatactcatcttcatcagcataaaacaaagttgaaactgtgtgctcatgacataaacaaagctccaagatggtccccttgcctgcccccactatccttcccttgcaaatggattcttcctctgagtctcccatgcagaaattttgagatcacctgaagaagtaacattatatagaaagttattctattcttctctctgagccttgggaggtgagctcatatctaaactgagatttaaaggccaaatgaagatttttctggcaaagaattgggtgtacggcattccacacaggagaaaggacaaaaattttaagccaggcaacaccgccaatcatcataatgtgcttggagagtttccttctcctcagttttctttcctacaatatagaaacaatcattcccatgtctttacaatcctgtgcaggttgcatgcttgaaaaattaagtgtgctcaacaaatgttacttctcatattctttcctgtgctggaagaatggcatatgcaagtgtatgtgtatgtgggcaggaaaagaaatgatgtatgaagagaatggtggcatgtgtga

SEQ ID NO: 5749 - DNA, 953 bp, mus musculus
tgagtcaaaaaaatttaagctccttatgcttatagaagggacctaggagtaaagagtcaagaaaggacaagcctggatcatgggaatatcgtgcctggagacctcacatgaggtcagtacttttgctggattacttttagctgtcatgccacgagccttgtcttatgacattcctatttttttgccactcagatgttgttgagaatatttttcatgataggcacaaaggtctctctgtgagcaaccactggagaatgttttttttttttttttcatttctagctccaacaatagatgtatttctcataagttattagctttgcttttcatcctacaggcgatgtaagttgtgaaattcatcacgtttcctttttttatatttactgctatgaaacccaaccccagacaagtccatgatccatctcttctgaaaacagtctcccagatgcctagagcacagcaatcgaggggccgttctcaggatgcctcgctagcctcagattctgacctcacagcccagcaggtgtgcagcatgattgctaactgaactctcagttcaccttatttttttctcagttcatgatttcctcacttccatgtattattattttgtaggcagttttaatatatctatcttcaatctgaggagtgtaagtagattgtttaaagctatagaaaacccaatgctcatcaaaatttcccagtcaaatttatctgctgtattattaggactttcagagagatcatgagcctacactggtatctgtatcatgttcacagatttgtgcatttataaaattgtttagctaacaaaaaagtgagactgcatattgcaatgtttaaccaagcaggttttagagccagtttaatggagttcaacttccagctctgtcatttaacagctatgagaccaaaggaaaattacttaacctctcttggtttcctcatcacat

SEQ ID NO: 5750 - DNA, 3733 bp, mus musculus
ggtaggggtgggtctccctgacatgcccttgtggagacctgcattttgtcttcatggcacttatcttaactgtgatgaatgatctgtgcacagcctgttcactgcgtgaaagtcacgtgaggtcagtaagtggatgggtcttgtgtgttgctgtatgtccagctccccatgcctcacacagctggtacttcttcaagtatgaataccagtatctgggcctatctgatgcatgtgtgtgagttagaaaaaggtgccccttcctcaattcactacctcatctgtcagagccaattcttgaaaccaaacccttttctgccttctgctggaagattgttgtactaagcaggtaaactgattctgtttctaatatgaattagagcaccccttaaaggtggagtccttgctcagggcacaacccatacaacttcatgcagtggtcctgataaccatataaatgtgtacattacttcacagttggcaaagcactttgatctacattttgccatttaattaccataataagtgagtgttatcagcccattttacagattcaattaaagggcaaaagacttgaatgagctaaaatcaacctatgtgttccaatttcaagccctttttcctttacactaaaaatgtaaatgaacctagaaagcacctactctcaaacactggtggaggcaggagccccggcaaacgttgacagttgtccctcagcatcagtttcttctcccttctgcactgtctgtaacttctcattaaatgcagagtatctgtgctgttgttgcttgtatgatgtgcagtctcgtggcatttctgatgatgtggaaagagcgctagatactgggtctggcatgtgtaaattccagtgccagctccacctcatgtaatatggtgaccaccggcaattctctctccacatctgaccccaagtccctcatctataaaatgaggacagtcattgccttctctttcttacacattgttatgcggatagatgacacagtgcatctgctgctcttactgtttccttgactatcacttttcctcccaccgccccatctccacccccaatcatcccctccccagacccctcatgtatacatcatagagctcccaaatcactccccaggcctgtggtctttccatgcataatttccaccttgtgctccttcctcatgttctgtaggaattcctggagttggtcttctggattatgaattcgttttttaccatgccgctattcctcatctcgattaggcttttcttcttagttttctccaccttgcttttcctttccctgagctctctgttctctaattgcttgcttttcacagcaggctcctcattgtttgctcatgcttcctaatggggacctaaactcaccgctgctgcagctcacctttcaaacaagccagctgccgttagagagccccaagcatcccccaccgggttcctggggctgcagggttccatccttcaaggcctggttggtaagatgagtaggtgaggctgagccagacttagcactattaggaacaggctgccctcaggcataggacagttggctttggaagtcctcgggtctaaaggccccacctcacttgatggcctgcctccactgggtaaggaagggactgatgtttgtcctcacaactctgcacatcagcttgctacccgtggcccccaaagccaccccctgctccctcatctgcttgtgaatgtgtttgggacatttgtgttccctaaagctatattcaccacagggaattagagaagacatttctgtggagacagagaactgtagaagggaaggtccccagagctgtgctaatctccctcaaggtttgcaatagtggtccagagtcacctggagctctgcctttccctcacattaggaacctgcggcagcaaatttcccactcaaatttgataacagtaatgcacgcttaggtaatccttctagtaagttgcagagccaggattacaagcccctcccacccccactcctccctgccccccagtctggctcccaaggccacgctctcatctgctgttccatatttactgagttgagtctagagacaaatggtggagctggccactccatgcaagagggctggctgttgaaacaaagtttttcccaccgtaagttcccacacccccactaccctccacccccatgcctagccttgctgccagcccctgctcctgtgaggccaggcatcctgtagggttctgtcggggggatcacatcctcacttctcagggtccctcctctctcagtctcactctatctgccttgtgtctttccagagaaatgaatggcttcttcgccgctgatactgttccttcacctttccgtcaatgctcttgttttgccatttgttttcctttagctctttcaataactgtttgaggcaagggagagagttggaccaggtgttctcctagattcattttaggtgtaacatcctctgtaactcaacataagacatggacagccccttcatttctccccagagaaacagcccctgctgtctctctttaatgaattcacccatagtgaggttggaggggaaggcagcaggaattgctgagatttattttaaaccctcttgcaactgcttcccctgaatctaaactctggatttctacccaggggttctgagttgccagactgctccatgagcaactgggaaattagttcaaagctctccagggttttcttttattcatcgaggaagaagcagggaagcaataaaatgaaaagaaacagcaaataattaagactgacaccatcccctcagtgccagccacctcactcacccaagtcttcatttaagtcaggaaataagattataaatgaagatttttttttcctctggcaacatgaatgcaaagaaacatttccatcagcacagagagatcagcaggatgcttatagaatagaagactattcagtgacagccaattcacttgcaaattaagacacattcactgaagatgccctatatgttccactaaaatgtttttttttttgatatagtgttggtggcagtggtggtttgttgcaggccactgtgtacacatagcttatctgtcactcgagatgaaagagttcctgcaaactaaccagagaacgttccccaataccctgtacattattggaattcatggaggggagaattcaaaaggaagatggagtgaagactgaataacacaaaactgttctcttctactttaaggaaaacccaaaagtgacactgtggattttcactgttctaagctccccgtgacctgtggtgaggcgaaagggattttatataagaagaaaatgaaacacggtgagttccttggtcttctgctctttggaatccctagatgaaggactcactagaagggaggaaaatacccgtgtgtgtaattgatcaggaaatggaccctgctagctagactgcagaagaaacgcttcttaggaaggaatttccaaactcttccacatcatggtatttctggcaatcagaccctccactcccacctggaagtcacccatgggccctgctgtactgacagccatgtccttgctgcatgtaggcactacacgaatgcacattctgtcccacccctcaccactcagtcaggctttagggctggcttcagtccaagagaagaggcccgcagactcccctgctactccttccacctcacagaggaagtctctcttgacctggaa

SEQ ID NO: 5751 - DNA, 3733 bp, mus musculus; identical to SEQ ID NO: 5750

SEQ ID NO: 5752 - DNA, 3733 bp, mus musculus; identical to SEQ ID NO: 5750

SEQ ID NO: 5753 - DNA, 1788 bp, mus musculus
aattccagtgccagctccacctcatgtaatatggtgaccaccggcaattctctctccacatctgaccccaagtccctcatctataaaatgaggacagtcattgccttctctttcttacacattgttatgcggatagatgacacagtgcatctgctgctcttactgtttccttgactatcacttttcctcccaccgccccatctccacccccaatcatcccctccccagacccctcatgtatacatcatagagctcccaaatcactccccaggcctgtggtctttccatgcataatttccaccttgtgctccttcctcatgttctgtaggaattcctggagttggtcttctggattatgaattcgttttttaccatgccgctattcctcatctcgattaggcttttcttcttagttttctccaccttgcttttcctttccctgagctctctgttctctaattgcttgcttttcacagcaggctcctcattgtttgctcatgcttcctaatggggacctaaactcaccgctgctgcagctcacctttcaaacaagccagctgccgttagagagccccaagcatcccccaccgggttcctggggctgcagggttccatccttcaaggcctggttggtaagatgagtaggtgaggctgagccagacttagcactattaggaacaggctgccctcaggcataggacagttggctttggaagtcctcgggtctaaaggccccacctcacttgatggcctgcctccactgggtaaggaagggactgatgtttgtcctcacaactctgcacatcagcttgctacccgtggcccccaaagccaccccctgctccctcatctgcttgtgaatgtgtttgggacatttgtgttccctaaagctatattcaccacagggaattagagaagacatttctgtggagacagagaactgtagaagggaaggtccccagagctgtgctaatctccctcaaggtttgcaatagtggtccagagtcacctggagctctgcctttccctcacattaggaacctgcggcagcaaatttcccactcaaatttgataacagtaatgcacgcttaggtaatccttctagtaagttgcagagccaggattacaagcccctcccacccccactcctccctgccccccagtctggctcccaaggccacgctctcatctgctgttccatatttactgagttgagtctagagacaaatggtggagctggccactccatgcaagagggctggctgttgaaacaaagtttttcccaccgtaagttcccacacccccactaccctccacccccatgcctagccttgctgccagcccctgctcctgtgaggccaggcatcctgtagggttctgtcggggggatcacatcctcacttctcagggtccctcctctctcagtctcactctatctgccttgtgtctttccagagaaatgaatggcttcttcgccgctgatactgttccttcacctttccgtcaatgctcttgttttgccatttgttttcctttagctctttcaataactgtttgaggcaagggagagagttggaccaggtgttctcctagattcattttaggtgtaacatcctctgtaactcaacataagacatggacagccccttcatttctccccagagaaacagcccctgctgtctctctttaatgaattcacccatagtgaggttggaggggaaggcagcaggaattgctgagatttattttaaaccctcttgcaactgcttcccctgaatctaaactctg

SEQ ID NO: 5754 - DNA, 1788 bp, mus musculus; identical to SEQ ID NO: 5753

SEQ ID NO: 5755 - DNA, 1788 bp, mus musculus; identical to SEQ ID NO: 5753

SEQ ID NO: 5756 - DNA, 860 bp, mus musculus
taaatttaaataagtgatagatggaaacaatgcattcaatatcataaatcaatctttctgttttttcaacagagaatactgaagtctcaaaacaatagctcagttgacccttgtgtaagtacaaattctgaactacgacccccagaatattccactcctttctccaggcatatgttctgtgtcatgactgctgttgcctgaatcatgttcagtctcagctggagtatgtggctgtgtgaattcagttgcatcacccaagccaggtagatgtgcctgggccttggatgtctcattatgaaagcaccctttccatctgtttcagtagaaaccttccaatgtccttatttcccctggaaagtgagtatgggaggctgagctccagaccactgaggtctcttgagacagagcctgaagtggtaatgggtagggctggcctggtgattagggggaaggaacaaatgtgagaggataacagcattttcaagtaagtggtgtggatgaaagggaaagtcctaaaaatgcactccaaggtgcaggtagagttgaagatggtcataagcatcagccagaaggaacagaccaggccaagctattatgttccaggtgttgatcctgtcattagccctgtaaaggagtacatacaaggcaaggggtcctttacagagctcatttggatggtttcagggaagccattagggtgctgagctggttaggactgaaaccatcacgacctagcaaatcctgaggcattttaactcaactgcttatctggtgctcagtactatgcaaactttctgatgccacaggccccatccattctctgcttgctatatgactgcctgctttggattctgccaaaa

SEQ ID NO: 5757 - DNA, 606 bp, mus musculus
ggtagatgtgcttgggccttggatgtcttgcagtgtgaaagcactctttccatctgtttcagtggaaaccctccaatatccttacttccttattcccttgggtagtgagtatgggaggctgagctctagaccactgaggtctcttgaaacagagcttgaagtggtaatggatagggctggcctggtgattaaggggaaggagtaaatgtgagaggataacagcattctcaagtaaggggtatggatgaaagggaaaatcccaaaaatgcactccaaggtgcaggtggagcgaagatggtcttaagcatcagccagaaggaacagaccaggccaagctattatgtttaaggtgtggagcctgtcattagtcctgtaaaggagtacatacaggacaagaggtcctttacagagcccctatcaccagtctcagggaagccattagggtgctgagctggttaggactgaaaccatcacgacctagcaaatcctgaggcattttaactcaactgcttatctggtgctcagtactatgcaaactttctgatcccctgggccccatccattctctgcttgctatatgactgcctgctttgggttctgctgaaa

SEQ ID NO: 5758 - DNA, 1141 bp, mus musculus
tgttcaatgagcaggagcaggaggagagtgttgtctaggagaagcccccttttatttatttcccttctgagacagggtctcgctctgtcacccaggttggggtccagtggcaggatcacagctcattgcagcctcaacctcccgagctcatgcaatcctcccacctcagccccccaagtagctgggatgacaagcacaccaccacacccagttattattattattattattatttttaatagagacaaggtctcactacattgcccaggctggtctcaaactcctgagctcacgcgatcctaccaccttggcctcccaaagtgcttacaggtgtgagtcactgcacccggccgggaagcctctttttaaagtaaaggacatagactgcacagattcagcccagactccatctatttatctatttaattgagctcctacaatttattgagcttctactatgtgtctgacactctgctaagttctgaagatccagagatgaacaagacctagtcccttccctgaagagtttatagttcagagcaggcattagggaaattttttgcaaagggctagattacaagtgttttcagttttacaaaccatacagtctctgtcataactaccgtggtctgctgtagctccaaagcagccactgcagacagtgtgaatggacatgactgtgtccccacaagacttgaagggcagcagcctcctggcacagaggtggagaaaaacacacaaagcctcagagcacctgccaggcccctgctgaaggtagcagctccaggcggccccataggcggcatctcacatggccccatctcctccgccgtggttgactggaccagggaggagcacgtgattcacaggtagcccatcctcaggctgccagtgatggacacgggtggagaggccagcagagatagtggccgccagctgggacaacggtggtaggagacagagaccgaaaggcaggaaggatagagcagagccaatagacttccctggaccctcaagcccttccaaacctgagccgtgttccaggccccatggggacctcccgggaggtcttgctgtgagcctgtcctgggacccgggcaggcttgcacggagctgagagtcctgtcttctttatttccat

SEQ ID NO: 5759 - DNA, 1046 bp, mus musculus
tgctgggctaccttagagtcctccaagcacagaaggggaatcctggctatggagtgtggtaggagggagggaccctaaacagctggggctccagtaaggagttagaggcagttggaatcccagaggacagagatcagggtctgggtctccgtgtctgccccagagaagagctcagagtgtctctgtccccagacatacaatgtagacaaacatgtgccagacagtggagccacagccacggcctacctgtgcggggtcaagggcaacttccagaccattggcttgagtgcagccgcccgctttaaccagtgcaacacgacacgcggcaacgaggtcatctccgtgatgaatcgggccaagaaagcaggtgagctggggcccgctgctgggtcacggccaggtcacagacgttggtcacatatactgacctctgacacccttagggaagtcagtgggagtggtaaccaccacacgagtgcagcacgcctcgccagccggcacctacgcccacacggtgaaccgcaactggtactcggacgccgacgtgcctgcctccgcccgccaggaggggtgccaggacatcgctacgcagctcatctccaacatggacattgacgtgcgacccccaggccaagggctggggctgggcagagagtagcagggagggggcactagctcagacccaggcaaccaaaagccttatctgggccagcagggtctggaggtggggttgtgggcgtagaaggtgcagcccaggctgggccattcccacagccttggggaggggagtcaggggctgtgcatgaggagggggcacggggccagccagggccccaaatccacctgccccatcctctgttcccaggtgatcctaggtggaggccgaaagtacatgtttcgcatgggaaccccagaccctgagtacccagatgactacagccaaggtgggaccaggctggacgggaagaatctggtgcaggaatggctggcgaagcgccaggtgatgggggctggcgggtgcagggggcacagcagggggagggcag

SEQ ID NO: 5760 - DNA, 928 bp, mus musculus
ctccagacaacatggcagggaggccctcgcgcacacttccctggacatggtgctcatttatgtgccctgagagcctgcggcgagcctggccctgtgccgggccccatgtgtcactgcagaattgtcttccttcagaacgagtcctcgggagccccaggaagcgtgggatttttaggtcccttggtgcctgggtggccacccagggggctgtggggagaacagcccggagccctgccggtccgtccagcctacagaggaggagggatgcctcacgcatgtgttttctggagtttgcttcctagcaagggcaaggcaccaactttctccacccaaactaacaggttttcccacttgcctttgccccacaaggtgctagaaagaggagctccagtccgactgagactggccagccagcctcagctgtgggcacagtgtctggtcacggtggtcactcagccctgtctgtggcctgaccgagctggaggaaggggccgggacagccggctttggtggcctgatgtgccctccttcttgtcccaggtggtgaaggcatgcaacgagggcgtcaggaaaatgagccgcacggaacagatgatcagcattcagaagaagatggagttcaagatcaaggtgaaccggtgggattggtgtgagcctgtgcccatgcacaggcccctggccccgccccagaggcacagatcaccgcgcctggctggccttgcttaggtccttggtcactggccacacttaggatcccctctgccccctgacctccccagctgaagccaccccgcctgccaccaggcgtcagacaccaccacggtggtccggatctgtctcctgggagacgggagtgcggggctagtgtgcggcccagacccacgcagggtgtggaccctgctctcacctgcccgctgcgtggccttga

SEQ ID NO: 5761 - DNA, 928 bp, mus musculus; identical to SEQ ID NO: 5760

SEQ ID NO: 5762 - DNA, 1590 bp, mus musculus
atatgcaatggaaaaacattactgtagcctgagttgatccccattataaactttgggacatacagaatgtggttaagaatgagtgaagatagagtgaatgacagtttgagtgtctgaatgtaagagaacatgatcagcattacctgtgataaacagctctgataattggccacactgaatggttctcactcttatttctgagcctttggtgagttgagtcttttcctgccctctcacagccttcagcaccagtgagcaagacaaggataactggaatgggcagctgaagcttctgctggagtggaaccagctggacttagccaatgatgagattttcaccaatgaccgccgatgggaggtaagcacgaagctctcctgggttattccagtgttgggtctggacagtggtctgggcaatgtctgatccatttccaacaaggtcttcaataccaaatctcttaaaggattgttctgttccagaatatcaggattgctgaggcttaatttccttgtttgcagcatggaatcataacattgacttagtaggtttgttgtgaagagataataaaaataaatggtataaaataacatcaactccacattgccttcagctgcaaagtgagggtgattctccatctgggtgtagagatgcagatctccttctggatgtgtgtgggcagaagtatgggaaaaatatatgctagatgattgaaagtagctcaactataaatccagacggcagcactctttttgctccctgcccccacctgcctagccaaattctgattagagaaccgtccgtagtgagatacataagagacaaatagaacaacttgactgacgctccccagtgaacgtcttagagcaggggtgccggtccatggcctgttaggaacaacaggaagtgagcagtgggcgagcaagtgaaacttcatctgtatttacaccagctccccattgctcacattaccgcctgagctccgccttcagtccgatcagtggcggtattcgattcctataggagcgtgaaccctgttgtggactgtgcatgtgagggatctaggttgtgtgctccttatgagaacctaatgcctgatgatctgacactgccacccatcacccccagatgagactgtccagttgcaggaaaacaagcttggggttcccactggttctacattatggagagtagtataattatctaattatatattacaatgtaataataatagaaataaagtgcacaataaatggaatgctcttgaatcatcccaagaccatccccccagcctggtcgatggtaaaattctcttccaggaaaccagccccttgtgccaaaaagattggtgactgctgttttagagccagaaactcaggacttcccctagccacatgagtaccttcaatatggaagttgcacatgcaataaaaagtgttttttttctttctagcaaactgcattttctcacttttcaatgtgattagtgttttaggattgcattttccagcagtatcctcccgtgtacaactaaagtgcagtcagccctaggagccttgttcaatgaaaattattataaaccatcacactca

SEQ ID NO: 5763 - DNA, 1834 bp, mus musculus
tttgtgttgctgtgatatgtaaacatagatgtcaattttcaacactttcttcttccttttattaaaaaaaaaagttactgtgtttcatcatgattggttaagaattattgttttgtgttcaggttttcattggtaaaagattgaaactgggccccatgctgtggctcatgcctataatcctagcactttgggaggccgaggcaggcagatcacctgaggtcaggagttcaagaccagcctggccaacatggtgaaaccccgtctctactaaaaatacaaaaaaattagccgggcctggtggtgggcgcctgtaatcccagctactcaggaggctgaggcagaagaattgcttgaacccaggaggtagaggttgcagtgagccgagatcacaccattgcattccagcctggacaatgagagcaaaatttcatctcaaaaaaaaaaaaaagattgaaaaagattgaaactgactgccaggcatggtggctcacccctgtaatcccagcactttgggagaccaaggcgggcagatcacctgaggtcaggagtttgagaccagcctggctaacatagtgaaacaccatctctactaaaaatacagaaattagccgggtgtggtggtgcacacctgtaatcccagctacttgggaggctgaggcaggagaatcgcttgaactgggaaggctgagtttgcagtgaaccgagattgtgccactgcaccccagcctgggcaacagagcaagactctgtcccaaaaaaaaaaaaaaaaaagtataaaaatgaaaatgtatcattttaaattagatttacttgtttaattatttactaagtgacagatttaccagactcaaaactttaaattgtttaagaatgaaatagaagcaaaattctcccttcctcctctgctgccttatcctctctttccgccctctccccagatagataactattgtaatcaatcccttagttatcttccgaattttttaaatatacatctaaagtctgttaaattgtgactccaaaatatacattcatgtcctaatcttcagtattggtgaatgtgaccttatgggaaaaaggatctttatcagcagatatcattaagttatctcaagatgagagcactctgcattgaggagaggccctaaactcaacagcaggtgtgggggttttttggggattctttttacttttttttttttttcgagatggagtttcactcttgttgcccaggctggagtgcaatggcacagtctcggctcactgcaacctctgccttcccaggcacaagcaattctcctgtcttagcctcccaggtagcttggattacaggcatgtgccaccatgcccagctaatttttttgtatttagtagaaacgaggtttcaccatgttagtcaggctggtctcaaactcctgacctcaggtgatccacctgcctggggctcccaaagtgctgggattacaggcgtgtgccaccacacccagccgaggtgttcttttaagagaagagaaagtcagagactttgagaagagggctatgtgagtcacaggcacagatggaagtgaggctgccgtcaaccaaagaaggcctaggactgccagacgctggaagagggaaagggggactctccttcgggtcttcagaatgggcccatgtggccctgctcacacttgatttcagacttcgacctacagaattgtgaaagaataaaactctgttgtctttaagccatcgtgtttttggcaatttgttataacagccccagggacggaaaacaacatctaagcaatgcaagaatatattcttttttgtgtgattttatccttaaaag

SEQ ID NO: 5764 - DNA, 1655 bp, mus musculus
attcccagcgtggggctgttatgagcagtgctgctctgaacattctagcacctactttttggtggccatgtttatgtgcatctgtatgatttaaatctgaaagatgtgaaaggagaagagaaatcttaaaggaggaaaaaaaaagaagtggacttgaaatgttttatgaaagctttgcatccagtaagtcaattagaagagtggtgtaggttgtcctgggacagccccgagcttaggaaacccccgtgtttaataagagcacgtaagcaagcctgtccaaagtttgccgtggagagtgacatttactgtcccagacagcaaacagatgtgcccccctcgctgggagtagacactacccctgtctcaccagtctgttcattctgtcaacatcccttgcaagatactaccttaagtctaaggtagtatcttaaggtagtatcttaggtagacttaaggcagtatctcccctttccatctattctttatctagatgggcctaattccaaagtctaaaagctgcagtgtcccctggagcctctcctgtaccttccagcagcggtgggctccctgaccctcatactttctggctgctcttgtgttactctgccttgcgtttgggccacatgtggatctgctgtataccttctactagactagattgtaggttccctaagacagggactccttccttcattgtgcccaatgcagtaggggctcagttccatgcggctgctcggcccgctagaaggtcaatgttagaataggcggcagcttctgcataccgggtcccatcttcccctactcgcgagttagcaggttagcctgccctaggttcctgggtgatgagactcctggatcaaaatgaatgacagtctcttgcagcaatagcaatagtgagagtatcagcattgtcatgcactggcttcccaagcctcagttcccacagggtgacaccagcacacacagtaactcatgttgtaagaggaaccccaagcttaggaaaccccatgtgtttaataagagcacgtaagcaagcctgtccaaagtttgctgtggagagcgacatttactgtcccagacagcaaacagatgtgctccctcttaaagtagacattacccctgttgtaccagtctgtttactctgtccacatcccctgcaaaataacacagagcagagagcacctgcccgtgtccacacccagaggaagaagaaactgaggcccgtggagagctggctgccagcaacagtggggtgggatgtgctggtagcagcagggagagtggaagtcagggaaggatggaagggaagggaagaatggagagtactcaccccccaaagtaggccacatccttgtacttatccccgagtataagtgtaccctcggcttccggggtagaagcttcctttaagacccttgtatttgcgcgtgacttgaggttggtgaattaggaccacttgttagactcacctcgtctactccaggaaggagggcattctaatctggcttttacaatctcctccttctagggaaatacagacatgcctgcaaagaacatttccaacgatggtgcgcagagttttcccacatctaaacgaccccagcttcatatcttactccttagacacgggaatgaaattctgtagcaaaacggct

SEQ ID NO: 5765 - DNA, 1185 bp, mus musculus
caagtacagtagacactcaaaatgaacccttagatatgaaagagcccgatgaagaaaagagtgaccaacagggagaggcattggactcatcgcagaagaagacaaagaacaagaaaaagaaaaacaagaagaaaaaatccccagtacccgtagaaacccttaaagatgttaaaaaagagttaacgtatcagaacacagatttaagtgaaattaaggaagaagagcaggtaaagtctactgacagaaagtcagcagtggaagcccaaaacgaggtgactgaaaatccaaaacagaaaattgcagcagaaagcagtgaaaatgttgattgtccggagaatcctaaaattaagttggatggaaaacttgaccaagaaggtgatgatgtacaaacagcagctgaggaggtactagctgatggagacacattagattttgaggatgacaccgttcaatcatcaggcccgagggctggtggtgaagaattagatgaaggtgttgcaaaagataatgctaaaatagatggtgccactcaaagcagtcctgcagaaccaaagagcgaagacgcagatcgctgcaccctgcccgaacatgaaagtccctcacaggacattagtgatgcctgtgaagcagaaagtacagagaggtgtgagatgtcagaacatccaagtcagaccgtcaggaaagctttagacagcaatagcctagagaacgatgacttgtcggcaccaggaagagagccagggcacttcaatccagaaagcagagaagataccagaggagggaatgagaagggcaaaagcaaagaagactgtaccatgtcctaagctgaggcaggcggcaggcgcggtgcacaggaagtctcagtgtgaaggggtcttttctctccactgccaatgtaagtagaatgttctaaattcatagagaggcactgtatgacaattaccaggtgctctactgctttaagttatagactgttacttgtagatttccatgtaatcattgaggttatcacccagattagaaagacatatttgttatcagtgtacgttctaattgagagcattccagtagtatcaaacaataatgtctactgtttatagtccacttaataaaaatagaggcatttactatttgccttaggctgataggaatgtgggttttcttgaccaaatatatcagcatcta

SEQ ID NO: 5766 - DNA, 1185 bp, mus musculus; identical to SEQ ID NO: 5765

SEQ ID NO: 5767 - DNA, 1185 bp, mus musculus; identical to SEQ ID NO: 5765

SEQ ID NO: 5768 - DNA, 831 bp, mus musculus
cactcactggataagaacagtggcttcctcctcactgagctttcactggtgccttaggctccactgttggagatctagttgttttagtcactctgttgtctcatgctggagagaagcgacctttcacatgagagttagtcacttgtctatggtgagtcagatgctatcagctgcccttggtgacaggaggctatggatggatattaatggctgggaggagggtcaggaggccaccagcaagctgaaaagagtggcttggagaggtgacagtaagtcctagaaggagagatgagcctgggaatgtccaactccatcggctgacagggctgacctgctctgcacctgccgtgtgaaaggtacctgggtctgagtcaggtcccgtagggcccaagcacactcacatggacttcctgttactggggctgcaaagagttgctacttccaactggaaggggctctgaccaaattcacagccctggaccaatctttctgtttggcttgtagcaaacttgcaaattcctgtgaggggaaacaagatttatttctcattgaaacattcacagaagaatcaggttcaaataattattcccgacttcacttcccttttactctgcgttgcttcacaaagacgcacacacacgcacacagaaatgagtcatatgttcagctttctgaaagtcaaagagaataaacagatgccacagaggagatggaaaactggcattgttttaataaaaactctgaagacaaaggaaggaacagaaacttaaagatttaaaagagcaaatcccaatggtgggtgattcaaacatctttccaattcccactccc

SEQ ID NO: 5769 - DNA, 949 bp, mus musculus
cacgcggagccgtctgttaggagcttccagagtgttctctcgacactgccagccccgtgttagcacctgggcctcagtcccacttgctcccaggcgccggttctgtggttggtttggaattaaagtcctgtttgaagttgtcagacacagacatgaatttctgggcgctccctgagtcagagtctcagaagacctgtgcaggctggcgtgagaggagcggcagccacactgcggccccacgcccaaggactgggctgctctcgaggggggcgcgcccaccgctgtgtcctctctgcccagcctggcttaccaagggctacctcagtgggagatgaggttggaggaacgaaggcgaggttcctccttgctttggggagaaaagtattcaggaagtgggtgtgtgggaaacctgaagatggcgtgcacaggacacagcgtgggcggcctgggcagaagggcggctggctgtcctggagctgctgctggagcctgccctcagagtgtccctttccagtgctgtggcattctgtggcagcttccccaggtgtggtgacggggggggggcggggcctccacctgtgacagccaggcttgagggtggacggcgtgcctctcccaggagccttccccatgtccttgccttgctgagaattgccctcccatgccgctgaggtgttaggtggtttagggccaaaaggggaaaaccacttgagtcttgtggtgtgtggtgggcagacaccacagggtggcatcacctggtggcatttccagaacctcagccccgattccagcacccaccaccgcctgaccctgtgtaacctgctgtcccgggtcccagagtgcactctgccccgctgctctgctgcctgtcctgggaaagtatctttgccccactaggaaatgtaaacaggagggcttggggagcgtgggcacttttctcatgagcagc

SEQ ID NO: 5770 - DNA, 438 bp, mus musculus
attgctgaagaatactgatattaataataatgaggttcagaaatagtttactaaattgtacagtgttccacaaattttaaataagtatctctcatgatcttcacaaccagagaaatgttgttcaaatgtattatataatataaatagcaaagtctataaaaagtttctaattacataagtttttgaagtctgaaagacttcctagaaaaaaaaagtcgtgatttttatattttaccagtttctgagtttattttgatcttatgtggagattttctcaggaaaacatagatttttttttaaaagtgttgtctcaagggtaaaaatacagaacatatatttaaactttgaacttatactggcatactaagagggcataaatcagaactgatgggagaggagaaaagattttatttcaacaggcaaaattccatcctttgt

SEQ ID NO: 5771 - DNA, 995 bp, mus musculus
tcacattaaaaataaatttaaaagattgcacaaataagctatgcatttcactatttcctgcttatatgcaaaaaatgtatttatgataattacatgtactgccagaactgaaacaatacattcctcataatggagcataaataaagaaggtggagccagctgctcttaaactgtttatttgcaagcaataatgatatagagaatatacctttttcactctgttagtctggcaatactgaacctgttgctgcattagacgagttgcattttgctggataggggaaggagagctgtctgctgtctggtaggagggctttgtctgtgcctttctctctgtttctttctgtttttctttctctctctctctctctcctcttctctctctcttactcgcttgctctgtctctgtctctctctccctctcttcccccctccctcctctctcttgctctctctctctcttcccgtctctgtggtttgtaaggtaggttgcagtgtgtgtatatacacaacatcaagagcaggaaaatggactcattagggaggcaggcagtcattaccactcacactgtacttccagggagacaccgattataagaagagaaactcagcgctggggaagaaggtagggcagacaactttcttaaaaaaaaaaaaatcctgcttcctcaatgccccctctgtcatctcctttagcccccaatgcctttattctttcctgcttgaattttaatttccagatttaagtttgacagagctagtgctagcttaaaatttagaacatctgtaggaggcctaccctttactaattttcttcctacttacttaggggtgtgcccttgtgattcagttttgttactttaaaaataattacaaacaaatctatttttctcactaaagtaccaaataaatcagaatctttcactcttttaaaacagacccttccgtatgtttgtctctttgcttttcttgtctgtttatgcaattccatctgt

SEQ ID NO: 5772 - DNA, 922 bp, mus musculus
tgggcttatctgttttgggattttgagtgagttccttacacacacaaatacatgaacagaaattatatatgtttcttgtagtctccagaatattaataataatcttgtattacctttctaattaaaaataaataaataattttaatttaaaaaagcaaaagctaatttcaatcttaatcctctcatttatcaagctgttttatggacagtaatatttctcagattcttctgagacccttatttatatcctgttatattccattaagtatatactttttatcataaaatgtcttggttttgtcaattttatgcaattgttaataagtactctaaacatatgtcattatttttcaggattattaagttcagttttatgttttagattttcgtggactaaggatggcaaccctttttatttcactgaccatcggataattccatcgaacaattcaggaacattcaggatcccaaacgaggggcacatatctcactttcaagggaaataccgctgctttgcttcaaataaactgggaatcgctatgtcagaagaaatagaatttatagttccaagtaagtactataacgggaatttcattttacaagtgttttagtgaagtgttaaataggagttagattgggttccaatgaaataaagcagttattaactaaatcaacttatatgtgtcttgtattttatttataaggaaaaatttcctccaggtcttgatacttaaaatcggatgaccttagaaaacaacataatttgactctgtttcagtaaccttatatctaacatggaaaaatataatatctgctttgccttataagatgagaattaaacatattattagttaaacttggctaaattctatgcagtaatagataaccccaaaacctctatgtaaacataaagttattcccc

SEQ ID NO: 5773 - DNA, 922 bp, mus musculus; identical to SEQ ID NO: 5772

SEQ ID NO: 5774 - DNA, 587 bp, mus musculus
tgggccctacaaccaagcatagtacacattctgggttctgattgcctttttcggattcttttttctaccagatcaccaagtttccataaggtcagctatgtaatgcaaaggacccctttttgggaggttattccaactttacaatctccttgccagtctgagtttctctccatttggtgcctctgagggcttacctctttaacatttaacctcggctatgtgtacttcttaaagagttttatacttacatagcatttacatgtgtttgtagtggaaaagaaatccctcttcacgttgcatggtgccgtgtacttccctatacttccatgttggctggacttgttcccatccgctttccatcatttagaaagtcatcaaactctcacttgctggtattttatttttatcaggtactcttatggtttcatggagttattttgtaataggcaatggaacatttgctaatttttttctggaaacattgtcaagtctcaggtatataatctaataagaaatggttaatgtcaattgtatatgtctttccattggctccacaaacattactgtaacaaattaaagtgcttgtt

SEQ ID NO: 5775 - DNA, 604 bp, mus musculus
tacccttggtgcacaatttcattgtgaaagaacagattggatctattaagtagccatagctacttaaatgagataatctaagctaaacattgctccagaggtaaggatgttgataatgacatacacaagacaacactgctttaaatctgtttgttttgttagacgtttcatggtgtgtctccctattcgcagatactattttagtttagaaaattagattgtctgatgatagagttctgtgactatgcatagtgataatatcttgtttttccaaaacatactttttattcattctgaaatgccagcaaatctttcacaattacttactttttccttgctatttgaattattataatttttctaacaggttgatactttaaatctccctagactctaaattaaaacttaaaattttttgacaacctctcccctcattttctaaaaattaactacaacttctagtgcttttactatagtcatggcctcataggcctttacaatgaaacttaatccatacagtcatacatgattgattctgggacacttttaaagttttgagtacttaaaagtttaattgttctattttagtatttttaaaatatta

SEQ ID NO: 5776 - DNA, 357 bp, mus musculus
tttttttttcatattatgagttttttactctttaaccattacagaatttgctcttgctcttcaaccatctggaaaccttaaaatccaagcttttgaaagaactcaatgctagtgcttttaaaaaatggattgatttcttccatgctttctttgttctcttctataattaactctaagaatttttaaagcatttatattaaattttcatatctgattttgaagctacaatatgtattttcataaacatactgatattatgcctttgaaccacttccccacatttggaaataattgacagaaataatcccatgactaactgctattttataggtttgtgtagttacatggtgtatattt

SEQ ID NO: 5777 - DNA, 498 bp, mus musculus
tgtctataaataaatagtgatatatgagaatcagttggtagttctttttctgatactctaaaatatttaagtgtcctctaagcaaaaagattaaaatgctgcttcataaagtttgttataggagtcatattgtgcttcaatttttaaaaatcagcttgtttctgtggtgctcattatgggtgaaaattttgcgttatgtcaaattcattaaccatgtcctgaccaccatgtactaacaggaaagtggtggggtggcggggagtgcacacgcatgttcatgttcactcaggggatcgcatgtatatatttatggttatgtggaaacagtgattactttctgtatttttaggtgtggtgggaaaaactgacgaatgatctgtctctagaagttctgataatacatgcagtctattgatagagaaggacttcccagatgaactgaagcattttttagcatcagtttataattctctgactccatcttcaagcacacttaga

SEQ ID NO: 5778 - DNA, 594 bp, mus musculus
aaaaatcactgagacaaaatattttacttttcaccgaagccaaataaattaataaactgtcactctcattaatgttgagtaaataaagtcttcttattcttatgcttaagggtttccccccacccttttaaatattagactaatacattatgtcaagcaaatggataataagcaggtataggtacgccactgaatttttccaaaaagaatctcacacctacagtctgcatgtcgcaggcttgggtttagaacagcagcatgactctgttttgtgaatctagccaattccagtttcattccatggatgcagcactcactgggtatttacctttgcttagcactagagagagagaaaaaaaaggagacatgaacctagctagccctcacggtgctcatagactagcgcagaggcccagtagcacaatatcaatataaatttttcaacaatcctgaggcatatgttataaaggtgatgtattgagaaggactactggaaaatgtagggcagcgatagattgtggaggccttgtattttatgtctgtggagtttagacttgaatcagaagaccatggacagaattgaaggattttatg

SEQ ID NO: 5779 - DNA, 594 bp, mus musculus; identical to SEQ ID NO: 5778

SEQ ID NO: 5780 - DNA, 594 bp, mus musculus; identical to SEQ ID NO: 5778

SEQ ID NO: 5781 - DNA, 640 bp, mus musculus
aaggcagccaggatacaacccagttacgctgagtcagcatctttctagagacacttcccaggcagttagatatagccgtgcacagtcctctgggccagagcctggagctaatgagggaatctgggaaggagcagtgagacttttaacaaaagagccccacaagccatcgcgttcatattatgcctcttcaaaatgtcccagttcctttctcaccgtcaagtatcaccacactgacaaacaggggaggttggagtgatgaacatttcatgagccatgggatgtttctgtaattctcagcatcagaacactttttttttatacacgacaaacagcagggaaaggcacacattttatttttccatagatatgacttgtaaacgtctaactcacctgccctttcagtacttttaaagtgcttttcttctgagagaaataacacccatttaggttttccatcaagtctgggtgataaaatgggtactttcacatcagaaagtggactcattgtaaatgtgagatatgtcaggggaggatagcctggactctctcaggctataaaagtgacatttaactacctaatatcagacattgttaacagcagcaattgctaacaagtctgaccccaactctcatcagttaa

SEQ ID NO: 5782 - DNA, 1040 bp, mus musculus
ctctaagctggttttccctgtgacaactggaaagggagagcaaattcattacactttgggcactgtaatttagataaaatcaaagagcaccttccctaactgaagtgattagaaacaggccatatgttgtgattttcaaaccaaggtgtgtggtcaggagaactggctctgtgacaagaggctgaaagtttctgaattagaggatagcgtgcacaccattgaaacagaaaatgctgtttcctcttcccatcactttggtacacattgagagtcatttagtaaaagtagaagaacagagacgctgattagcagtacacagtcaagtgcattggtggtgcagtggcctcagggacaccttggtttctagagaatttacaaatttgagaaataaactttcaggacgaccattacaagatgagagggaaaagaaggaccctggatattgcaaagaggaaactgctccagtgtagtggcattaatattaccatcttgcatttccctacaaacatcactaacatagactttgggctaaattctacagttgttttgcttgtaagctccccagcatctctagtggcagctattatgtccactttcagttcctagctgtgtgcattatatttgcattcgtgattgccctgactattcaccctttcgcttatctacaccctctcaatgaaactgcagtgccttctctggttttagtgtaattctctaccactgcattcaatccgctgataactttggccaacagaccgatgcagaagtgatggcgcactgcttttctctctagttctcaagcactgtcttgcttctatattcccgcctattcttcagccattgctaagagaaaggccttgtaccaggtgaatgatgagagatacacggagcagagacccacagacacatgaccggtcccagccaataccagcattgcataacatcgattagatgaaccccacatatgcaaaaagctaagtaccactgatgtctggggtggtttgttgcataacagtaactgactgatacgtcatcttttc

SEQ ID NO: 5783 - DNA, 132 bp, mus musculus
gaatgacatggaacttaaaatacaaaagcaaaagcataaaatataaaacatttttactattacattcaacagacataaagtcactccatcaacttgccataaacatttctaatgcttactttcagtttctgt

SEQ ID NO: 5784 - DNA, 1725 bp, mus musculus
agtcagtgagggtgtggtggccgggggatcctggggacagcgggctgggctggtggcctgaggctccctgcagtaactgtgtcatctcagccaagtcatcctccctttctgggcctccattttcccgtctataaaatgaaaaagtggggttgtgtggtctctaatgacactttcactttgacagttcgattttaatttttctcttattttctcatccatctaccaacatacactgaatacctgcttggctctgacctctaggtcctgtaagagggccaagacctggggttcttcttaccaggcagtctttgtcagccagggaaaccaacaagcaactccatttgtcgtgcagggcagtgggtgctgagcaggtaaagtttggaaggcttggagagacaaagtagacagtgacacttgagttagtttccttcggctgctgtaagccatgaccaccaatgggtggcttaaaacaacagacacagctgggcgtggtggctcacacttgtaatcccagcactttgggaggccaaggcgggcagatcacgaggtcaagagatcgagaccatctgggctaacacggtgaaaccccgtctctactaaaaaaaaatacaaaaaattagctgggcatggtggcgggcgcctgtagtcccagctactcaggaggctgaggcaggagacaggcgtgaacccaggaggcagagcttgcagtgagcggagaacgtgccactgcactcccgcctgggcgacagagcaagactccatctcaaaaaaacaaaaaacaaacaacagcaacaaaccagacacctattatatcacggttccggaggccagaattccaaaatcaaggtgtgggctaggctggttcttctggaggcactgagagggaagccatccccttcctctcccccagcttctgggagctgcgggccgtccttggtgttccttggcttgtgactgtgccacttcagtccccacctgccttgtcacccagccttctccctgcatgtctttttgtcttcacatgggcttctaataagaacacgtcatcggatttaggccctaccttgtcatatgacctcatcttaactaaatgcatttgcaaagactatctctaaatgaggtcccactctgggattccagtaaacttgaacttggaagggccgctattcaacccagcacaggcccctcagtggcattactcatggcattagttgtcttttcagaaaccttcattcaggcctattaacaatcccagggggtaaaaccaaacttctcgcgttctttggtgtcctgattcgagcctcatcctttggccatgctctgaccctggctaccgtgaactgtcttctccaccagccctttcatccctcgcctgctgggtttgcatccccagctcactcctgcactgcctgtgggtcccagcggtggtcttccctggaatgtttctggagcccaccatgagcccaactgggagcacagcctaggccttttctgggggccatttctcaaaaggagccccctgtctccagtgccaggcccctgaccagcgcctgtgtcccagcttcctctcaacacttggtaggggtcaggtctcaggggttgtggggatcagagaagaggcaggagaggctgatgtctcaaaagaaacagggatcttagggagtggaggctttgaaagctacaactggaaggatccaaagataccccatctccaccccgcaccat

SEQ ID NO: 5785 - DNA, 1725 bp, mus musculus; identical to SEQ ID NO: 5784

SEQ ID NO: 5786 - DNA, 664 bp, mus musculus
acctctatgacaatcaagtgtctccagcctttgccaaatgtccccagattgctcctggttgagatccactgttctaaatgcatggtcaatgccctgtgtgctgggctgccagagggaactgggatggcctggtggcagggttgcccaggaagaaataatccaagttcccaagtcaacagtgaggatatattccaacaggtctactgtcacaaggagaggacaaaagtaccaacggagcatttaaaggggaatcagtggccaggtcttagaatagagagtttcttaatttgggtatcccaggaggagaccttcagacaagggttccagaaaaagtagcttatatgaaaggcgcaaggaagactgagagggggtagggaactgatataggaaaataaaggttgatcaagctaaccgcccctggaggtgactggcctgtgaccctgctgggggcctctaggcggcagtgtcaagcacatgcctcagactcatctccccaggcttccaagggtgagggagctcgggtgtatatatttataatacaccaattcccaacagtcagtggttgctggcttctcccacagggcagtaattccccaaagcaggctccagggcccaaggaaagccctcggcagggaaacattgagtgtcaggcacagggaatcag

SEQ ID NO: 5787 - DNA, 1091 bp, mus musculus
ggtcctattattatccccatttcatgggtttttaaaatggggtcaaagggtcgagagcgtgtgtaagccttcccagctaaaccgtttgcaaacacaggattcaaactccaatctgtctgactcagaaactgacaccatgacctaggtcatctcctctgtatttgcacctctgagctgggcaggtagttttccttccagcatcaaccttgctgcctctgagggcggctcccatgttcagggagggaaagggggcagctcagagctagcacctactggacacttgcctgtgttgaagggctccctcgcttatctcatttgatcttcacacagccttatgaaataggaactgttaccaccacccccattttacagggtaggaaactgaggcacagagagatggaggtaaatgtccaaatggacacctgggtgtcaggatttgaacctgggtcttctggctacagagcccacgctcttgtactctttcaccgccctctggagggagcactcctatggagctgggtgaggccagagacagtccctcctggggctcctcatcaatacctacagagcttgcctgggccagggcttgccctccactctccctctgagacaaggactcaaagcctcacaggttcctctccttatactctttccatctcaggaaccccctacctccccaccactgccctgccctgaactggagacccaggcttctgaggagaccaaccagtccagggctgtggggagtgcctcgcgaacccagcctcccatacctggccagagatggcggtgaatcacccggtgtccccgctgggtttcaggccacggacacaagtaccctctctgactgctcggctccagcacctacagtcactgcagaagtctgcagcgtatggccacaccctgcaaggtggccacggcaccgaggcctggctgccagcagggctgcctccctttctggcctgaggatcggtgaggagggaggtggggtggggaggggcaggggagcagggctggccactaaggtctgtgggctggccttcacagtgcggtaatcggcaaaacagtggtctctgtcaaaagcaacatgg

SEQ ID NO: 5788 - DNA, 2116 bp, mus musculus
tccagctctcaggacaggtgctatgtctgggtctccatcacaagaatccctgtgttgcattggtgggtgtgtctctgcctgtggtggccatacgctcttgaaggagggattgtgcctggacactggtgtgtcccaggggttgacaatctcagcgcctgaaatgtcactgtgtgctcaatcaatgtttttgaacacaggggtgaggttttaagtatttagcaagcagcacggctttgtcatgtgccaagggggacactagctataaataaccaacagggctttcctgaccctgcttgtcagtcaaacatcagccctggtggaatgaatgaatgcatgaatgaatgagtacgaatgcatgaatgaatgcatgaatgaatgagttgtaagacccatataagaggttgtaactattaactaaagaggaaaagcactttctgaggaaaagcactttctaaggcaaagcccaatgttgtgttttttaaatgttttcctttttctggacttttctggcttggctgttcagatgtgggggtgggggcttggtggtgcaaagatacccgacccccaccatggcaccaggctggagccaaggccagatgggaaagcgggcctttctgtgtccttaacagagctggcggcagctttggtatttcaaatgtccttctgaaatctgaatccaaaatggaacaatttttcgagtaaataataccattgatgtcagtgttgctgcaggaggttcagcaggccccagaaactcagaggtgaggacgtggtattctggctacacaaggtctctggctgcacgaggccacctgccttgcaggggaatgaacggtctgtgggtacttaaggcattggcctagctaagagacacattttctttttcctgattatacttgatagtgccccagggacattcaaaaatgccataccttgggaccctatgctgtcatgggcttcgggggcctgggtcaagagtgagaaggtgaggggtggtggagccagggggaggagtcttgcagctgcaggggagataagaacgggtcagggccttctctgagtgatgggctgcccctggctcccgctgaactactgaatgggatggcttcagattcccatattggtttcctactccgccaggatttgacgcagatactccccggtttgagttacagaatccggatcatggcttcctgacccttggcttcttgggcggtttgtggaggagggggaggtgttgagttttcaagaggggccgggcccagagtgtattcagaaggcttggaggagagtggccaggatgcagccagggctacccctctgtggtgggagtggtgcccccacactcagggacccttcagcagggaccccctcccattgccacccaaggatgggaggcacactctgggacacctctccaaggagaaagtctgagtttagtgcgcgtattgtatgtttaacacctccctgacgcttgctaaattctctcttaaacaaggagagcagacctccactggtaggatgcagtatccacccaggatttaatagcatcagcagtctgccttctttttctaaagttttttaaaattgttactttctatttatgacagctgttaccatttttttcccatttatggtagcaataaagtttcactctaaaataagtttattttggttgaaaaaaagtgagctcatttgaataaagattttcagtactttttagtacaggtgttctgatctccaggtgtggagggagggaaagaaacaactggagtttgggaaactctcatctagtccaacctccccacagcagagatgggtacactgagtcccagaagagagaggcattgcccaagcacacacacctcgttataaaagactgagacagggtaaagggctcagggttggggactccggcctttttccactttgccatctcttctttgtgaggccaggatgtgaatgtctctcttggtgtgatcctcacaagcagggggaaatgtgggctcatagatctgctgctgccagggtcctgggggatctgcaggggctggaactgagtgagccttttcatctctaccccacagagccagtcacagaattgatgcttagtgag

SEQ ID NO: 5789 - DNA, 1040 bp, mus musculus
gcgggaaggacgggcgctgcaggggctccgcgcgctcaaggtgctcgcgggctcccgggcccagccgggctgaggtggcgtgggcgccctgcgggccgggcctccgcggcgcgtcccagtcccagtctccgcgctggtctggcccggtccctcagctccaccccctgcctccccctcccgcccgctcgcgcctcctgaaaagccagctcgcccggggcggcggcgcagagccgggccggcgcacgaggcagccagcgcggccatgacggcggagaaggcgctgcccctgggcaatgggaaggctgctgaggaggcgcgggagtccgaggcgccgggtggcggctgcagcagcgggggcgcggcgcccgcgcgccacccgcgcgtcaagcgcgacaaggcggtccacgagcgcggccactggaacaacaaggtggagttcgtgctgagcgtggccggggagatcattgggctgggcaacgtgtggcgcttcccctacctgtgctacaagaacggaggaggtgaggtgatagtgaggagaaggggagggggcgccaaccgcccggtgggggcggggagccaggggcgagcgcgagaccccctcccgcgcctgcgtggagcggaacccgagcggagaacctcgactccaggcacctcgcgtgtgagctcgccccggagcgcggcccacctgtgccagtgcgcacgcgcacgtgccaattcgcacctgagggttccacctgccagcgcggggacttgcccgcgttctgtccccagcatgagatgcagaccgaggccagggagcccttgctttgggtaggcgccctggtgtttcgggcacttggccccttggagcctcagctttcctaactgggaaaacggcctgtggggaagggactcctgatgatcaaagtggtctcagtttttgcgcgcttactgaagtgccgagcacctttgaccatatcatctcatctcatcctctcagtcactttcgtaggcaggggtctacccattttgcaggtgaggacactgagggtcagagaagt

SEQ ID NO: 5790 - DNA, 723 bp, mus musculus
gagttagaagggagagagggtttatgaagaaatatttttggggagagccgctgcagagttgggagtctcaccccactttctcccaagcaggtgagattaaaagcctcaagccaagggagcaaagatgtatcagttagctactgctgcataacaaatcactccaaaaaccaggggctttaaataacaagagtttatttagctcactggctgggggctagctgatctaggatgatctcacttatgcatgtggagttgactgctaggccagcaaatcagttctgctgatcttgtctgggctcgctcatgtgtctgagatgaatccactgacccagttttgctccacgttgtctctcatcccccagcaggctagcctgggtttgttcatacacagtggcagaggtccaaggaagtgagcagaagcatacaaggactcttcaggtctaagctggaaaaggtacatcattatttccactgctctctattggccaaaacaagtcgttagatcagcccagattcaagaaagattttaacccacctccaatgggaggatcatcaaagacacattgaaaaggggtgtggctacaggaagaatggagaattgtggccaattttacaagagagtcttcagggagtttgaaatggcgcaattatgggggtcattagatttaatttcttacatgtgacgaggaaatttaaggtgagagactacagcttccaaactga

SEQ ID NO: 5791 - DNA, 1731 bp, mus musculus
gctttgtaggttgtgatatgtttgggtgacttattatttaggttattttgcagaattatttatttgctgttttatttatgtatttcattatttatttatttgattatttagtaaattatttatctgatgaattattaatacatcttcacgacatcctttaaattatttataagttaattttgagtttattgcttttagacgctgcattgttactgactagttttgatttttttctttgtggttcttgaaaattaaagtatcagctctaaggcaaaagtatagtcattgcaatgctcatggattttttttaaatttatggcagagataaaatttcagctttttttagctttaaatttacctatttagagttaccagtggtagaatgtttgtgtattatgtgcatactcattttagagtcacttacaaattaatgatatagcctatcatttataaacagtgattgaacatgtaaacctcagtctgcattaccctttgtgtctttaaagaacagatctgcattttttacttgttttaaaatgaataagtcttggttattttattttaatggcaaatctgttctactactggaatgtttttaggacagttcagagaaatgaagtccaactcagatttggattcttgacgaataaatttgactgctgtaatctttgtttttttaaatccaccttatatttgtattgggaaaacatcaggctgtttatataaatctttctatataaattgtgtatgtcagtcataatgacatatttcttatggaaatttttatatttaatgaatgaaaatggacaaagagctttataaatgcaagctgtagtttctttgacttagttaataattctcttgtgtgaagtttctatttttaatcaaatttaagatcatttctgattctatttcgtaacatagagcagttattagggctctcttattgaaagggtttaatgaataggttaaagtagtcattcgggtgagtgccatatgcacaacatggtctttattttgtgtttgcttgcagtgaattagtatgtactttacagttttcacacttcagagagaaactgcattgtacatttcaagttgagatgctactgaaatatagtgaaaatggcctctgtagacaggtttcactataaaattgtaaattatgcatacatatatccaaatttcttattttgaaatattgaatatatgaatatttaattggaatgttcctttagtatcttcatatgcttgccttaaaggaagtgttttcctttgatttatatacatggatttagaaatgtgtgtgtcatacatatctgtgtcttttctggagatgaacaaccacagatactattagatatggcattttctttttaaatgtgcttcagtaatgccaatgtggtcttcttttgaaaaaaaaagaaagaaagaaaaaaaagcttccttctccagtattgaataatctacccagcccctattattaacatatatttggggagtgctagctgtgtcatctaagtgatctttccttggaagatacacagatatgtgcacagacacacatgcacatgtgaaattttcttatgacatcaaaataactttttaggacttgtttttgaaaagagacattaatgtagacttttataataatacttagcattgttgatttcttatgtgcagatacagagctcatatcttttacatggattattcgttgatcttcacagtgat

SEQ ID NO: 5792 - DNA, 1731 bp, mus musculus; identical to SEQ ID NO: 5791

SEQ ID NO: 5793 - DNA, 1731 bp, mus musculus; identical to SEQ ID NO: 5791

SEQ ID NO: 5794 - DNA, 1019 bp, mus musculus
gcagtacaaacaccgtaaatttcagattgcttaggacaaaacctgacaccgagcggtaacattttactcattcttaccctacccgccacccccttgagaaagtcaggtcccctggcctccaaggatgcaaacatggaaacccagtcagtcagagcagtaaggttctctctggggaatagggcatccttctgttttccctgtctcttttataaccatgtggagtccaagtcttagaacatttgcttgtaagtccggaatgccactgagaaagttcgccaaggaagggcgcagaggtcaaagttgccaaccaggacactttgagagaggaccctgtggttgacatttgttagtgaaatttgcaacacctcagtggaggccaaggccaaaactttcaaggagatccctatgcccctttcccctgttggtcttctgaggtcatcccaagaggaaactgcgtttccccagtaagcacgtggcactccccggacctgccacctgcctgcttcgtccttctcgtcgtggtttcccaaaccccggttctgccggcccgggagccttagcactggagcaataggaaaaggccaccgcgctcgggtctggacagcaggagggaaacacggtgtggactgcgaggctgcacctgtgatgtcccggcccctgctaagaggacggccctttcttctgcctcttgcccaactccaaacccacattcacgccagcagcctctccaggaccggcctcgctacagccagcgagggctcgaaatgaggagtgccgcggctttcaaactccgggctccaacttgagcgccccggcgcccgagtagctcccgggatgcagaagttgccacaaacttcccaggcccctcttcgccgatgcttacaatcagccgcgcaggcagggagcggagggaggcggagatggaccgggaaaggatgctgagcagactcgcgatccggtgggggaacattaccactcccgcagcccactcctccaggcaccttactgcccgcccggct

SEQ ID NO: 5795 - DNA, 808 bp, mus musculus
gttattttttatagaaatgccatggacttttatgtgttgattttgtattctttgactttacttaattcacttattagttcttttgttttttgagaaagagcctcactctgttgcccaggctggagtgcagtggcacgatcttggcttaccacaacctccgcctcctgggttcaagcgattctcgtgcctcagcctccgaagtagctgggattacaggtgcatgccatcatgaccagctaatttttgaatttttagagaagacacggtttcaccatgttggccagactggtgaactggtctcgaactcctggcctcaagtgatccaccagtctcggcctcacaaagtgctgggattacaggcatgagctactgtgcccagccaaattcattagttctaacagttttttgatggagtctttggagttttttacatatgtcttttcaaatattaacacaacgtattgttgtgtgtagcatcccaccagtctcccagctcacatgggggaatgcttctgtcatctgtagctaaatctgtgcagtttctgcactgttacaatttcattttttgttccattctcattttcaatgtcaatgagaacatagtgtgcatcttgcatgataaggttattcgtgttgcttaagtcataagtcttcctttctttttccacaggagaggcaaagaaccgaaagtataacccatcaagtttccataggtgtagtgtgtatggagtaccaacaccacattttaatgatggacgagccatggcaaaatctctatattggctccatgaactacaaatgtaagttt

SEQ ID NO: 5796 - DNA, 820 bp, mus musculus
tttttcatttctagaattttcatttggctctcttatagtttgtatttgtctgttggggtttgccatttgttaactcattatgtccatcttttatttaaactattgaatatatttacaataacttttgaaatcattgttcactaattctaacgtttctgtcatgtctgggtttctgtattctgttttgtttctcatgattattttttcaagattttgttttccagtaattactgagtgtgtgctaggcatagtaaatgctatgttgttgggactctgggttgtattatcatcctttaaagatgactgcgttttgttctggagttttatttgttttgcaactggactttcaacttggttttaggctttgttgggacaaatctaaagtagctttattttagggttagagttgccttactctttaagatatggcctttataaggtttcaactagatgccctgggtattcagcaatttttatccactccgacaaactgaaatgttgtccagtactgtgtggcttttggaatctttgttcatcttccagcccctcagtagcttttctctggcagagttctctcagtctcatcctctggatatgtatctcagtatttggctaatgactcagtaagacccctaaactgagtccaatgggacttcttccctatttggtaccctattcttcacattctatctaactcagcagttccgtgttccagttgactcctcctcttctcagggaatctgctgcttcctgtttgagttcctcttctctgtgccacagtttggaatgccttccccagcagaaacaactctctcatgtg

SEQ ID NO: 5797 - DNA, 1218 bp, mus musculus
atggaaattacctgcataactaacccccctgctcaagcagaatgccagacacctgagaacacctttcattacaatgtacctccctttgcaaaggaactaattgcatctgtttctctttcctttaggtgcccaagcaaggaaagaaataatgaagagacacatgtgttagctgcagccttttgaaacacgcaagaaggaaatcaatagtgtggacagggctggaacctttaccacgcttgttggagtagatgaggaatgggctcgtgattatgctgacattccagcatgaatctggtagacctgtggttaacccgttccctctccatgtgtctcctcctacaaagttttgttcttatgatactgtgctttcattctgccagtatgtgtcccaagggctgtctttgttcttcctctgggggtttaaatgtcacctgtagcaatgcaaatctcaaggaaatacctagagatcttcctcctgaaacagtcttactgtatctggactccaatcagatcacatctattcccaatgaaatttttaaggacctccatcaactgagagttctcaacctgtccaaaaatggcattgagtttatcgatgagcatgccttcaaaggagtagctgaaaccttgcagactctggacttgtccgacaatcggattcaaagtgtgcacaaaaatgccttcaataacctgaaggccagggccagaattgccaacaacccctggcactgcgactgtactctacagcaagttctgaggagcatggcgtccaatcatgagacagcccacaacgtgatctgtaaaacgtccgtgttggatgaacatgctggcagaccattcctcaatgctgccaacgacgctgacctttgtaacctccctaaaaaaactaccgattatgccatgctggtcaccatgtttggctggttcactatggtgatctcatatgtggtatattatgtgaggcaaaatcaggaggatgcccggagacacctcgaatacttgaaatccctgccaagcaggcagaagaaagcagatgaacctgatgatattagcactgtggtatagtgtccaaactgactgtcattgagaaagaaagaaagtagtttgcgattgcagtagaaataagtggtttacttctcccatccattgtaaacatttgaaactttgtatttcagtttcttttgaattatgccactgctgaacttttaacaaacacta

SEQ ID NO: 5798 - DNA, 498 bp, mus musculus
ctctacagaatgctttggggctgtgggagctgtaataatgactgagtgactttcagccttgcctaggatggtggcttgcagttgaatttaattttatttagagaaaataaagtacagtactgtgacatttcttgcacacttgagttcatggagcaaaatccatacccacaacacaaccattaaggaaaatgctctggacttgatgcagtttgttgttgcaaaaacaaagaatagacccctgggctgaaaggaaaagactttttccatggtctctttgaagtgcttttgccagtgcccagcctgccccctggtggcacttttgctcatgttttcgttcacagctggaaaatgacacactaaatgcggagtgaacaaatgctgtgaaaatgttatagagttacagcatcacaggtgtcagggtatccggttctgccagaccaagaaagactcacctaagtcaaattctcagagatcaaattgttccttctcttcacttca

SEQ ID NO: 5799 - DNA, 1235 bp, mus musculus
ccttgaagctggagctggcgtcagtccctgcctaaaccacatagcagttctacagtggaccagggctgaaatggatgctaagggaggccatcacaatgtctactcgttttcattatcttttcaacttctaatggatatttcctttgctgtggcagagatcattattgtcttcctttagcaaatgagaaaaccgtgagatcacactcttacatttcaaattatttatcagtctaaaagagactatttgtttatatagagagtatttggaggtgtgagaaatgtaactgaggccagcatgctgtaagaaggtggtttgatctgtgcttcatggaaactcagtgcttcccccagagctgagatggacaaggagtgggtgaggctatgaattcccaccttacttcagtcacagtccttctttcttagatgtttcatatatgttgcagttatgcatgcaggattccatttaaatctaagctgtcactgcacaggttgaaaaccactactccattctagctctatgatcttgaaaacaaaaatcccttcctttttttagtgctcagttccctttacctgtaaaatgaatgtgttgaactaggagtttttgaagcttccttccatctttgacagttcatgattttgtgacttttaccattggccaaggtggaacttattaatttcatgaaaactgactaaatgactgtctcagaagttattaattcagcacagcttcctcatcttagtgagttttcagctggctaatgccacataacagtcagaaaatgccaacattgctggtgtgggatggagttaacagtgtgagatttgctaagtgtttctgcgcaatcagtgtgaaagcaatcacatctccagagtgagaaaggtcagtgccctgtagctgccaaacctcaccacactaaggggacatgaaggggactgccacctgcagaacacaaatcaggctaaaaaatgaataccctttgcagttgcagtctaatagcaccgactgtcaaatgatattactttgggagattgttaagcccccttctcagtgcacagcagtgtataaatcccctcatctcatttgattaatctgagagactatagaatatgttattaggcatagaaaacatgactgcaatgtgactagtattactgagcatgaaaattcctttaagtcctgattttttttctagttccacattgtttgaaagtgggggaacattgatctcagtgaa

SEQ ID NO: 5800 - DNA, 577 bp, mus musculus
acactgtgtctctacatactgccataccgacccatttattttaataccatcaatgtttgaacaccaggagtttgatcctgtgggatatttgattgcacacttgcaaataccagcaagcaaggtttataattaatcaatttcaataatgacccccaattgtttacttcttgtatccatgtcctgtgcagtgtgatttgctgctcttaccattaagaggtgaaatctctttcctcgctatttgaatatgactgtgcctggtgagtgacactgaacgaaagaatgcagcagaagtgatggtgtgccaattccaagtccaggctttactctcttgagattcttgcaaacaacgatgtgtgcaaatccaggatggcctgctggagggagacaagtgaaccatcaccatcttcaccctgaccaacagccagccaatcattagacaggagtgaggacatcctaggccagccactgacctgatgactgcagatccatgagtgagctctgctcagatcagctaaatatggctggcaccaaaagaatgactcagctgacccacagattcatgagttaaatatgtccc

SEQ ID NO: 5801 - DNA, 999 bp, mus musculus
ggttatgtattaaaatgcaatggttgttttaagggagtggagctttgagtcattgtatgtattaatgctactatcatttaatgttcttatagcactgaaattgaaggatggagaatttaaagaaaaaaaaaaagtacaccaatactttatccctgattttagtcagtttattaccactgataagaaaagcctgagattagaaaacttgcaagaaattagtaccctggagctgaagaagaaatcactcatcatcagttcagtgttggaagtgaaaagaagtgaattcaacatgcaaagtattgtgcctttctgtcaaagtagcaccagagagaagtaaatgatcaaatatattgaaccaaatatcacatttgtagattaacactagattatttgtttataggtttacttagaaaataccactggagcttttgaaaattttattttactttttttattatactttcagttctagggtacatgtcgggcagtggggggctgggggaggaatagcattaggagaaatacctaatataaatgacgagttgatgggtacagcaagccaacatggcacacgtatacctatgtaacaagcctgcacgttgtgcacatgtaccctagagtttttgaaaattcaaggagcctaaaattgtcctaggctaatcctaaatcttaatcatgattgagattggtgataaatcgatcaatggaatcaatttggtggaatcctcaattttaggctaatccaaaacatttcaagttttacataggggccaaacaatctgtaaaatgatccccatgtaaaacttgaaatgttttgataatctcaagaacctaggcatatatttgatgttatcctcatattttagaatatatgtgtgcagtatttcctagataattcatataagatcatcctcatatcatttagaagaattgctgttctataaagtaatttttctactgtagacattattttcatttgtggaaattctaagtatatag

SEQ ID NO: 5802 - DNA, 999 bp, mus musculus; identical to SEQ ID NO: 5801

SEQ ID NO: 5803 - DNA, 999 bp, mus musculus; identical to SEQ ID NO: 5801

SEQ ID NO: 5804 - DNA, 543 bp, mus musculus
agaagcaagatctggtactgtacaaaatcacagtttctgaattcaaggtctgcatttgttacttgctatgtgggtcctggcaaagtcaataacctcagttttctcatctatatgatgggggtcatagtgatacctaatataatgatttcaggtattaaatgtgactatgcctataaaaatccttagcattatatctgacatgaaatgtagtaagggctcaaaccaagggtgactttggtttgtattataattattacataccagaaggttgactagggtgagaaagacttgaaaaggtgccagagtggtcatagtcaaataagtttgcaaaatacacatgagtacattgaatgctttgaaaagtactgcactaaagattgttcctaagctttatgtaactcagtatttttcaatgttatatgcccaaggatggcttcccctacaccactctcaaaactttgatgtgaatgtcccacagaaattagaactgtgataggtactccaataacaagccctcccttccgtggtggtgatttatattta

SEQ ID NO: 5805 - DNA, 3264 bp, mus musculus
tgtctgcgcaggttatggactggaggtggacatgtgggctgctggcgtgatcctctatatcctgctgtgtggctttcccccattccgcagccctgagagggaccaggacgagctctttaacatcatccagctgggccactttgagttcctccccccttactgggacaatatctctgatggtgagatttggggcttcctcacacagcagaggagcggatgggtttttcaggtcagatgtgtagaggacccaccactgtgcctggtgcagagttggactgtcaacatgtcatgtctcagcctttacttcctcagtagcttcatgtaggtttgtgtagcactctgaaaacatggcttgctttcagatttagtgaaaaagcccaaccaccagttacagtcaccaagtacttttccttaaggcaattcaagaacctcagaacagaaaaatatcagaaacattgtaactcccctttggaaagagaaaggccatcttatatgcagaagtgtttgtgaatggaacagactgaaaatgcttattttacacatgcataatcaagggtcctatagcagcacacttgaagcacaggggctctgcaatgaagatctcagttattttttagtgacttggagcatgcatggtcctccctgcttttggccctctgttccatttgattccaaatgaaatccttccccttgtctctactgatttgtctgtactactcactgtccttgtaaaactgggaactagataattggggattttgagtctttagcttaaaaagtagaataggaggctgggtgtggtggctcatacctataatcctagcactttgggaggcccaggtgggaggattgcttgagaccaggagtttgagaccagcctgggcaactggcgataccccttctctacaaaaaatgaaacaaattagccaggggtggtcccagttgctctggaggctgaggcaggaggaccacttaagcccaggagtttgaggctgcagtgagctatgattgtgccaccacactccagcctgggtgacagagaccctggttcaaaataaaaataaaaataaagtagaataggagtgataacattttgtttttcaattttccctaaacatgctattgaattttagttattgaactgcctccatccctagcctctatttcctcactgggattggaggatgagggaagggaaaatcttcattttcccccctttaaataaggtagggagagggtggcttgtcacagtagatgaggatcttgagctgacaaggcagtggcaactgggaattgagggactaaaaatcattttagaaagttctatgcagcactccttagatttgggcatgggtggcccctgtcctgggccctgctgtagtcacacccttctctacagagtgaggagagtatggggcctaggggatgtgcccccagagcccaggtcccctcttctagatcacttccttagggcccctgaattccctgtccaaatggcccaagcccacatccaaggtttgtgagacctctttccagcctcttcccactatgccataaagtggccaaggagtggccatctggaggggttagacagagcttggacatgttgcctggggtgtctggttgtccacacttgtacacaagagtctgaggattctcaacttaaatctggccttccagcctctgagtcatttgaggaccctgagggagtgatgtggcagtggtggggctggggctttttggggcagaattttcccagcttgaattgggtggtgtaggaggaatctgggccttctgtgctcaggaggtggctggacatcgggggaggggagcggtgattggtgggtaagcagctggtcttgagtaagagacagccttcaataaaggcaaaaaataacaacaacaaaaagtggatgttttcttcttgtgcatatcttgagtgattggaagagcagtctcaatgagccaggctgggagagccagcaagccagggggaaatctcttctgctttctgcctgctgctgggcccaccagttgggccctcatttctctaaaatcagtcatggtcttgggcagaaaataaaattatttttgaatttgcactatttactttttagatttctttacacggttttcagttttgtcaatgtgaaggcatatgtattgacttggaaagattgaacatattttatttaacaatgtgttagtttcgatttgaaaccttaaagtatgtagatgtatagcatgtgttctccatttgttcctttgccctgagtgccagggatgttaagagtgggtctggccctgcgattccagagaaatgaaggaacgtcctctcgagctgtgctgtccaacatggtaacccccctccctgctgccacacgtggctatttaaatgcaaatgtaaattaactcaaagtaaatcatataaatattcacttcctcagtttcacacgccagatttcaaatgctcaataatcgcaggtagatagtgcagatagagaatgttcctgtcttctattggactgtgctgctctagaatatgaaggaggctttcagccagccgtggtgctgacgtgaatgtttatgttcttatttcatgtgtggggaagaaaaattcagaaccacctgcattcatcacattttccccttctctcattccaacagctgctaaagatctggtgagccggttgctggtggtagaccccaaaaagcgctacacagctcatcaggttcttcagcacccctggatcgaaacagctggcaagaccaatacagtgaaacgacagaagcaggtgtcccccagcagcgagggtcacttccggagccagcacaagagggttgtggagcaggtatcatagtcaccaccttgggaatctgtccagcccccagttctgctcaaggacagagaaaaggatagaagtttgagagaaaaacaatgaaagaggcttcttcacataattggtgaatcagagggagagacactgagtatattttaaagcatattaaaaaaattaagtcaatgttaaatgtcacaacatatttttagatttgtatatttaaagcctttaatacatttttggggggtaagcattgtcatcagtgaggaattttggtaataatgatgtgttttgcttcccctttgtaaccaagtttattctgtactacaggagtggtgcttaccagggtctaaactccccctgtgagattaataaggtgcattgtggtctttctgtgttaataaaatgtgctctgaataacaga

SEQ ID NO: 5806 - DNA, 999 bp, mus musculus
gacccacagggctctgccagaatctgcacgttggctcctgacccgtgggaggatggacgaggcgatacaactgatccagaaggcggcctcggtcaataggcggaaactctccccggagctcatgaaccaggtacttccagcaggcccaggcccaggcccagaatcagacccacacggatcttcctgcctggcttctcactctgcttcttcctcccagctggtcccagagaagacaggcccctcagggaatgccctggatctgttcagacacccccagctccggaaggtgaccctgattatcttctgtgtctggtgagtgcccagaacccgaggacagaaccacagggctgcagcctccctggtgtgtgttggcagaggggtgggctggtggctgtttggctgggatggtctctccctggttgtgccagtgtcccctgctgtgactgctgaccaaggcaggctctccctctgggtggtgtctcgtcacccagcagtgacaggaacccttcattaccttgtaggtttgtggacagtctggggtactacggcctgagcctccaagtgggggacttcggcctggacgtctatctgacgcagctcatctttggagctgttgaggtgcctgcccgctgttccagcatcttcatgatgcagaggtttggccgcaagtggagccagttggggaccttggtcttgggtggcctgatgtgtatcatcatcatcttcatcccagcaggtatcagggctggctatccctcacccgcatgccccctcacccaccggctgccaggggctagaccagtggccattgttctgcttccaggagtaaaggcttcccgggggtttgggtacagaaggggtggggagttccagtggatgggaccggcgtcagggcccaggtgatggggctgtctaccctctgccagatctgcccgtggtggtcaccatgctggctgtggtggggaagatggccacagctgctgcctttaccatctccta

SEQ ID NO: 5807 - DNA, 6622 bp, mus musculus
tcaagataggacagacaggttccctgccctcatggagcttaaagcatagtggaagagatagggaagaataaaaaggaaagagtaagataaataaaatggctgcaaattgtgaaaagtgccctgaacaaacccacctaggggctgagggagggcataaccccacagaggttggccagccaggccctggcccctctgcacctgtgcagacccaaggcccagcaggaagctggaggtttggaaagacaatattttgcccaggagaccgggctccttcacagcccctttgtctctgcaccaactcccctggcactgtgttctctgccaccccaccccaagggaagaggatgtgagggtgccctggcaggcttcttccaaaaatcttcaaaaccaaaaccaaccatccttgtggcatggaggaaatttcttttctttctttattgttattattattaaaaccatccttgtggcatggaggaaatttctttttttatgattattattattatttaatagagacaaggcctcactctgttgcctgggctggtctcaagctcctgggctcaagcagtcctcttgcctcagcctcccaaattgctgggattacagacatgagccaccacacccaacccagaattttttttttttatttttttatttttttttttggtgagacagagtctctctcactctgttgtccaggctggagtgcagtggcacaatcttggctcactacaacctccacttacagcaattctcctgcctcagcctcccaagtagctgagattacaggcatgtgctaccatgcccagctaatttttgtatttttagtagagatggagtttcaccatgttggccaggctggtttcaaactcctgacctcaagtgatctgcccacctcagcctcccaaagtgctgggattacaggcaggagccaccgcacccagccccagcccagaaatttatttaatttgagtaatgtttatgagaaataaatagctcatgcatccctgagaacttgtcctcagcccggttgagaaatgctaacttaagaaaaagagagggctttagtctatgaaaatatctatcttaaattaccactgcagaaaagaaattgagttttgatcgttggtaaaaataattttagataatcattgaaatgcaaacctaaaatgaaaagcatgtgtaagactccctgcaggtacacccagcttgagaacccaggctgggtcagcaccgtgccagcagcaaggacttctgtgaaggcctgggttctcgctccatgtgatctcactttgtgtcctggccagaaacaggctgcaagcgcagttcgatgtcattcagttcaattgtgcccatgttctttgtgcctgtgacatgctgggctctgcccacaccagggatacagagacaagagctaccgccttgtcaccttggaacaaaggtctgggggcacatgagctgtcacacacagtttatgtaagggctcggaagtcaggccatcctgggtataagtctcagttttacaacatatttaacacctctaagcctcagtttcctgagttataaaatggaggcacacacagtgcctgccttatccggctattgagagaattaggtaggataatgccaggaagtgcttagcctgcttctggatgcactaatgacaaaatcctcttaatacagagtgagcgccgacccagggccacgctctgccctagaacttcccaggtgtgagcttatttactaagcacagtggccctgtgaggcaggcttgttgttatccccattcacagacaggcagatgtgtgactaaccctatcttacaggcaaggaaatggtggcaggatggagctaaataactcactgaaggtcacacagctagtccagaatctactctgaatggtgactgctgctagcatcagcgttgccacttctggcagttggagaatcagaaaatacgttatgaggaaaaggacaggcagctttggctttgaaagaggagcagcctctccccagtggagagaagggtgtcgcaataccaggaacaaacataggggggcaggcccacagagacccgggctgagccagggaggtactggagcagagggcatagggcagtgctggagacaaagctaaaggtagggagtgtcccctcctcagaggccagacacccctcagaggacagggggctaccagggtgtgtgagcaggagagagaggggctgtgtcaggtcatcccgtctcttccactgcctggggtggagcctaggtggacaagtgacttcacttcatgtgcctcagcttccctatctgtaaaatgggatgggatattcatgcatcgactcacaggttcatacaagtgaattgcatagttcaatgcttggcacagagtgagagctcagcaaatggaagcttgtactgttattagccatcgcaaggctaccctcatgatggggacaggtgatggattcgagtgggaggaacacctgtggcctgggccctgtccggcaggtgtcagaaaagtccaggagagtcatgcttaggccttctccaaagatggaggtgcaagagccccacagcatagcagcctctttttgaagtgatgtcaatgtgcttcttcctctttgggcccttgaagctcaggctcagtgttgagtcccaacctgacttctctgcccatctcattggcgctttatgccagagacagggggagcatgattggcacctactcaccctgaagggactgccttggtaaggcaactcaggggaggcctggggagccagaaccgtgtgagggtgcccgaggcagcaagggaaagactcagagcacgatggccacattcagagatcacatgccctgcccccaaagccccagctgtggacaagaatgactcaggtcccttggacaggctgtcaccagtgatgacttaggaccagcctgcccggctccagcaaagcacaggaagctcgaaggtttagaaatgggtcattgttgtgctgaggccatgcgtcaaagaggacatcccacagccagctcctatcctggccagcactcttgacaaaggcagagggagtgcagcttagtgagctggtccctttacacaggttattcactccagaatctggagaattctgtccttaaggaaaaaaaaaaaaaaaactaagctcaagatcccacagcttgtaagaccaggcctaagagtcaaacctgaatctccccacatgagagcaccatgctccccctcacccagcaccccctctgtaggtggtggcccagaggagatgttgccctgggctgctcttccataggaggaaagacatgattcactaataactgcatgtcctgagaattccctgttggggaccccaggacttcactaggggcatggctcttgggtgacagttgggaggtctcttccagggtctcagtccagccaagcatgtggccttgcaagaaggcagcttctaatggctcagaaacaccagggcaggggggccacagtccttcacaccacacacttagttccccagcttcagaacgctttaaaacgctgcagcatggagcctcacgctttcaaaacagtatttcataatatgccaggactttgtgttttattcgtcctctccctgtgacctaggctaatgcagacaataaaaatgccaccaagttctgcaaaactgaaaaaatgaagtgggtgattaggggacatttgataatgtgctttggttgaaacttgagaaattattcctagtaacttttcctaagactgtgactatattttccaagtgaaaaataagagctagtgaaagtaatgtgtgtgtagatttcggagcaatgggattgaggatttggaagcatgacttcagaaactgagccacgtggtcaccttccctcattgaatcaatattcggtgaatacccacctgtgtctggaactgtactgacccatgttaagcgagaaagagtgattaatgtgacaagatgtggctccaatttctaagtcctcacactagagcgcccccttctggagccagtcagcagagagagaagtttgactgtgtcccccttgaaaccgtcaactgtttggtccacttgagacctaggtaaaatctgaggggacagctcactctaacctggatctgaacttaaacttgagccccgatgacagaataatccctttctgcctggaaatggcccaagccatctcatgctgaggctttttgacataatctctaccacagctgtgtatgggagcagtgctcagaaaatgcaaggcggtcctcactccacgtacgggcactcacatgcagtctcagtgtcggtctctttctgcaggtctaggcattaatcctattcagctggttgcattttacccttatgggaagcagagtgctgacttcctcctttctccacctctattcctttcccctaaacaaatgcagccatgccctttacaggcaggaggtttggtattgggccgcctgccactctgaggatgttcctcattgtttatcttggcttttctccttctcagatcaacaataaagcttgtggcaaaattcctgtgccccaacaagttgcccgggaccaggacaaagtccacgaatttgttcttcaaagcgagctgggtgtcaggcttttgcaaggacgaagcatcaagaagtccttcctttccccgagaactgccctcatcaacttcctggtgcaagattgacagccaggaggctgcagctaccacgagggcctctgaggaacctccttccaggcctgggatgagggggcgatgtctgctggcccaggggaagggaaaagacaaatgtcttgactgttgacctcggtcctgtggcagactgcagtcaacagtgtgcctctgtagtgtggcctggtgctggggtgaaggtgagctgggcaaaggagaaatatgagctactgaggagggggttggacatcctgcccctcaccccccacccacactgcaggtagaggaggccatctgatcccatgggaagccatcagagacactgctggtgggagcaggaaggagcagtgcccctcgagcagccaggaagcctgcggatctgggaaatggctctgccttaggcacttctcgggaatttgaggccagcctgaggaactgcaggactcaggtgcaatgtgccagccacttggaactgctaactgagcctccagatggtagtgaatggtctctttgccttcaggctggatgaggaagtcatttaggaaatgttcaaataaccaatatgtggaaatggacacagggatcttctgaagttgctttgaatcaaaaggcaggcagtgctggttcctctgcctgtgtccccaccactccccagctctgtcatgcaggcctgtcctccccaaccccagctggatgtgcctcccaggcctgctgtggttctgacacacaggatcccaggcaaggcaccacttcctcacatgaatgaggagcagcaagtcataaccactcccttgggtatacaatttgctgtgtagtgaagtggaaccaggctcaggctgctggtcccaacctcagagccccaccgcagcccagtagggatgcagcacgccccagagggctcatgtgggccccagatggcaatgccaccattgttgatgtgactccagagccagttattaggaagagcaagctcaccacagaggagtggaactgaggccccccagatgttgcctccggtgtccaagccacagcggtctggctgttgggaagatggccaggaatggactcataccattggcacattaggctaatcctggttttatgtgaagtcagcaattaagtgttcccactagaactgacctaagccactgattaatatttaatgagggaaggtaggggagaatctagccattttataatgccagaaatctatatatgttatctgatgccatttttctgaagtagcctcacatgtggtccccctgcagttcagcagttaacagatgacttttttagtgtaataaaatgtttatcatctatgacttcaggacatatgtgtgatcctggaatacaccatattccaatttcagagttaattacaaacagattgaggtattccatcatcatcggaagcattggctgtgtgtctgactccacatggaatgctataaagtgggatacatgtggttcttcttgttccagaacttacagtccatggtagacaacactgatacaggcaaactagcaacagcaattaagtcactggttctcagacttaatactctgcctggtcctcatgcccagatattccaatttaattggtccatggtgtggcttgaacaccaggaatctttaaaactccacaagtgattctaatgggcagcaaagtttgagaatcactggacacattgatgcacttgagccatcatttctatctagttcttcctcttcctaatcttcaggttagcggggataagtttggtccaggaccaagagttggaccaaaagggaagacaggggccagaagtctagagtgctagagccgacttgaatgtactcagtctcattgcacatggcagtgaatatggattaaatataagcccatgaaaatatttggtacaaggaaggagtgagtgattttgat

SEQ ID NO: 5808 - DNA, 1100 bp, mus musculus
acctctggaccctcagtgacttcgccgtgcgcctcggtaggtgtgaggacctgagcaaggggccggccatagggcagctgagcactgagaagttagaactctgctctgggggatctgagggactcacctgttaggaatccagaatgccatggggcggctgaggggactatgaccctgccctggaagtctgacaggcacatggccctggcctggaggatctgaagggcccagctcagcctagtggcctgagccctctgctcattcccgctcaggtcacatccagtacatgtccagcatagttcgggagcacagacagaagctgcggaagaagtacggcgtccagtttatcttggatgctctgcgcacccactacaggtgaggccagtggggccagatgggccatggggggctgacacagtggcctccggccttggggactgggcggtgcgcttccctgactcacctgcccaccctctctccccgcctttctttgggacctggctgggtgtgcctactgacctgccagcccgcagcgggagcgccccctggctgctgacgacctacgcaccgtgcagacctccctcctgggcctggcgagggagttcctggtgcggagtctctcagcagatgacgtgcaggtcacgcagaccatgctgagctttttggcggccacaggcgatgacggtcaggtaggctggaggttggggagcgggaggcttgggtgaggggagtgggggcccgacacagtgtgagaccctgcatccccaggcggtgggtgcgctggacctgctgctggccctgctgcacggttccctggtgcaggagtccttggctgtctttctgttggagccagggaacctcgaagtgctactggccctgctagtgcggccagggtcactgcccctgctgcccgatcgagtctgcaaggtacacccagcccaccccctcccctggcatcccattcactggggcccctgcctggggttcagggaggtacagcaggccttgggccagcggatgaagctgccttcaagggcctcttgagccacacacctgcacggtgacttcccctcctacagtaactccttccacatgatgac

SEQ ID NO: 5809 - DNA, 2293 bp, mus musculus
ccatctctcccagccccctttccacagagggggacaccaaggctcggggaagggaaagagcagagcagagccaggtgtcttcatagaaggccagcggtcagcccaaaaggcaaaggtgtgggaactgaggagggtcctgggacggatgtggctgggccagatgggagaccgtcccgggctctggccagcctgggcagtcagcctcccttcccgggcccggctgggtgggggcagcagggctcaggcgggcgggctgttgatccagcccgacaatgatgaaacggcccctttgtcctgcggcgccaaagttgctgtgactggaggaggcgtgacgtgaaagggtcattgttcccacttgggcaaccactcagggagctggaggaccggcccagagcaggcttcatgccagcactgcagccctgcctgctgcctgtggccggtcggggtatcctgggctccctgctcctactgtggccagttcctccctagggccagggccagcttgggcacaggtatccctccccaccactgtgtccccctccctttccctccttcctcctgtctggaatagatcacaaatgggggactccacatacacgtgaacgctgccaggtcggacgcctgcaggcaccaaggagagctggcgggtggggggtaaagaaggtgctttatcctgggacaaggaaacatgccagtgacattcacatcctgaggctgtgacctcaggaacatctccttcccactcccaccccccaaccctggcaccttgtggatggagggagagagggccagagaagggaatttggcagccctgggcaccttctggatagagggagcgagggccagagaagagaagtgggtgggcccgggcaccttgtgggtggagggagagagggccagagaagggaattgggcagccccgggcaccttgtggatgaagggagagagggccagagaagggaagttggcggccccgggcaccttgtggatggagggagagagggccagagaagggaagtgggtggccccgggccattcagcacaagctcgtgggctgatgcccaggctggacttcactccccaccagcccctagacatgatggacctccattctctctggaaacctgaggccccttctccatgccccccattcctcccttgtcccttcaatccactctcccctgagcagctgtgccccgtgaaatctttctaaaaccaaaactttattggattccaccctagcttcaaacctgccatgccacgtccagagaaatcccaagctcttgtgtggcattcaaggccctccctgcatagcagcagccagggctgggagcccctgtctggatcctccctcagcccctgtgcaggaacacagatcacagcaaagactatttcatcttcccagatccagcctccacccttttgctctcacaggtcccgcctcttgagtacacattttccctcctccgggtcccactgcctctggcctctggggctcagggccggggtggtcaggagtggctggtctgggctgaagtgagagtctccttctccccaccctaggtggcccactggcttcagtgcacagaactactctcctcttgggctctccactgcccccagcagctggcatcaggctcagcctgacccaggctaattaaaccctcccccagctcagaggaggctctggctctagctctagacttctttccctggagggacagagctaattaaccgaaagggtttaattaatcaattagcgtggcctccagacccctccacttagctgtggccatggcagatatttataaacaggagctgccagacccttctctggctggaacctgacagaggggagggcgggcgatcatggtgggcacagtagcagtgaacacggctgcagaggcaggacgtcctgtcagagctgcagaagcgccagccccagctcctgagcaccaccaaaggcctgggcagatgcagtcagtgatgctgggacatgtgaggggacacagtgaggcagatactcgggggccccatgcaacacctctttgtgcacaagtcacacagttctgacacccagagctaggtaagttcccagaggtgtcccagacatatggccaggggtgctgatgatgtccagctggacacagcaccctagccaccaagacctccagggatgggcctgcacagagggccatgggagccagaggaggcaccagaaccccagctggaggacaaggtgagggaaggcttcctggaggaggagacatgtgcactaaactcagggaaagag

SEQ ID NO: 5810 - DNA, 483 bp, mus musculus
agggtacttcgggaagtgttggtgactgttagacaggtgggccagactcggcattgtcttcagcacctgtcctgggaggcagctggccaccagagactggattcagggagcagagtcccgctaggggaggccgggcaggcccgactggctggaggcaggtcggcctttgggctgaatgtctggggcttcctgccagagccccatctttccttctttggccctcaggcgccctgacaactcaccactcacttcttagaaatggactcagctgctgcatgctgcttcagcactgctgggtagttttgctctagacagccctggccacccaccccactcctcaagtcagtgcaggcaagggccccctgccatgatccatcaggaggcctacactagcacaaaacacccagcaaaaagagtgccctgttcttcaagctcttggctctttgtctcagtgtgcagaagggatgggaaaatgggatgggg

SEQ ID NO: 5811 - DNA, 755 bp, mus musculus
ttttttgttcatctccagatccctcattatccatatggactcctggatccttattttattcaaagggttacaattgactactttttaaaaattttgatgctcaaattgtcctagatttggccagcgggagacttttcaagctaattcctgtgtcgccttaccatgtttccatcattcttcaaaacccttagatgatgatttattagcaagatgcccctaagataactttactttctggcacagcaagaatttccaggctcattgtgtactttcccaggtccagtcctgaaaccagctgtttctccaaggaagctctttttatttattattttagtttattttttgagacaggttcttactctgtcacccaggctggagtgcctggagtgcagtggggccatcttggctcactgtagcctcagtttcctgggctcaagcaagcctcccacctcagcctcctgagtagctgggacttaggcatgtaccacaacatctggctaattttgttattttttgtagagacagatctccctatgttgcccaggctggccttgaatgcctaggctcaagtaaatctcccaccttggcttcccaaagtgctgggattataggcatgagccatcatgcccggctggaagttccttttagttgaggaattatatttagaagccaagatctgggcattagatgtgctcattgctactgggatatcattgctttgagactcccacagcagacagatctgggaaatatat

SEQ ID NO: 5812 - DNA, 1506 bp, mus musculus
tatactgttttaacaaagggtaataaattatggagaagtgacaagacaaaggaaaggaggtttaggcttctaggggtggcacattgtgggaaggtaaatagggaagacaaatggatgataaggattatttagtaaagtttgctatgcagacgaaagttagtgctgtttccagtgataagagttattgcctcttcctggtacaggagaggggaaggcaaaccttcacaacaggaaatttgtgtccaaattttaggcagaaaaggtaaaggacacataattcctcctgcatctgctctttctcagttgccttcagctgaaaataatctttatgacaaagtggcatattttggggtggcatattctgatccctgtcactgtttatagtcttccacttattagcaacttcctaatcattgctgttggcttctgatggccgccattttatactgctctgtccccaatactgttactgcatttatatacatttccttattaattagcatcctgctgtattctgtgacttcatattttcttttatcttttaactgagtaatctcatctgtcagtcatgatattactgtgggtcataagggtttgaaaaccttttaccttttttgtaccagtgttggacatggtaatcttaaggaaggctgttcctcaatatagcctgttgaggtgaacatgtttggctgattttcttaactggttttgtctaatattccttgcctgattgttcaagatgtctcaccaccagtccgtgactaagtgtgggggaagatctgtcagggcacccagacaccttagagccccaagtctctagatgtcttctttgtggtaattaccttcctcttagtatccattcaaggagccagtcggaggtgtccaaaaaatcacttttgaaactctccaaatgaggagtggaaagcctggggatactgaggaactgacctttgtccctttcaacttggtgctatcagtgaccacaccccagaatttctgaggctccttgacaactcaatggacattgacgaaagaagtttgaagactgaggctccagcctgtgctctgccatgtgcccttatataaatcacttcctttttctgggtccaagtttctctacttcattgggtcaggtgctataaaatttatattgtataacaaagttaaagtgctgatactgtgaatatttaaaatattcatgtgaagataatcattgcagtaatgactcagtgggttgaatttgcctactctaagtattcttaggtattcatttctaaaatatttctccagaaattcttagtacctggtatgtaggagacatttaataagttttgttgagtgaaaagaaaaccttacctttccctgggttcatgcattgttgattgagcggccaaaaataatgataaaaattacagctgcatttattgaatgctcacagttggccaggcacagttcaaagagattaacacataactatatgtcaagaatatttctaaataaatgtaa

SEQ ID NO: 5813 - DNA, 1197 bp, mus musculus
aatcactgaattagaggctgtgaaaagtagaataataaagtataataacaatagcaaaaatttattgagggtttctaagtgccaggtaccatgctaagtgctttacatgtgttatttaatttaatactcaaaataactcaatgaaggacgtactgttattatctccattttccttgtaataccttagaaatgttcatgacatttgaaaggccattgttatgagttagttgaacatatatatttgcattgcagaggatgttgcaaaacatacccacctgagccgcttgtctatccaaactgaaactcaagttgatgagcttaaggggatctttcctcttcagtctgtctttctctctttttcccaaggctttgatctttaacccccgtgtctactcccccaaggttctactgcttcttcctcttagctctgtctttggccctctgtcattttttcccccttctttggatttgggatgaaaggagaagggaagttgaaggtcctatatatagaaagagtgaaaggaagtaccatagccctaattctttagattcatgacaatctctaagacaaaaaaaacagttttagttttaaggtgcctattttgcagcaaaatcatacgagtttattgtaataatttctaagctatttaacccatcatactgtaagtccaacccgttttaaggattgaggacttgggggagaacctgtttctcacagtcacttgaggatccagacttaggaaggttctgccatcttgtatctccaccatctggaaagtgtagcctctacgatctctgaggaagaaaaggagtgtggtatggaacagacaggaagtgatgtacctcacttctgcttacatttcctgaagaaaacacagcgtttcatcttcccaaaaggcgcctgagaagtgtgatctttcctgttttcaggaggaaaggagagttggatgtgagtgagaactagtcgttactaccaagcaagttttagattttaggttatttttagtgtttgtgtctttggagactgtgtacattatgcgtacttccaactttgaaactgtctcctgtttgaatgattgcaggttgaatcaaattcaaatatacccttaactcaagtctacgattaggaaaaacaaacaaatgaagctttgaatgtgaaataaaactatattgggagcttttgtgagtgttccagtt

SEQ ID NO: 5814 - DNA, 1524 bp, mus musculus
cattaaaaaacagtcattggaacttttcacataatgagccatttggcttttcttgtggagctgtgacatggttcagtggaaactggctgttgtaaagttaggtaaaaccagctttgtattgaaatcctatgaatgaatttcagaccatcatcttcgttttctccctggcttagatggtttaataatgagtatggctgacttactgagctttgtcttgtgtgggtgctgctgtaagtggtctgctccgtaaagtgccacagttctctttctgaaccagctgctgtttttctgatttacccttatttggcagattttgccctttgatacttttgacattatcaacaccaaaggcaggaggaggtgcactcttggagctggtgagagagagggggggatagaactgagagagagagagggagaggttgagggagagagagggagagattgagggagagagagattgagggagagagattgagagagagagagagaaagagggagagagagaaagagggagagagaaagagggagcgagagattgagtgcattattgagctgattgcttgtcttgtttttgtctaaactacgaattggtcttggctgttagaaagtgaatctcttaaagacactgggactgaagcacaggatttgagttcatagaacacagcctcagggacacaccaggacacattccttcacacataactttctggggtctataatgggaatgtagaggtcatgtgccctcaattggagagagacttagagtccttgagccactgtccctcggtggccctacccccacccccttgaaaacatctgggagacagtgatcaggccaacaatcaaaagaactaggagtattccatatgaacaggtagagaccctaataagagcagatgtgtattctggactccagaggtgaccttggcagacatgagatgcagtcaaagtctttttcttctagctctcattctagattagtctttgattatccatttagatatgtagaatcaaataagccagtattgatgtatcatatcatgctggggaaatttttgaaaaatatttacctgtctcaatcctgcctacaggccattttccaaaaataatttataattccccttgtaatgtattgttaatatgctctaatgatatcaatgcttaaatccatcataattttaacattatgacagaatttaaaaaattctttccatgttcctttgggactttgttatgttgtatgtacattatattaaatatagttgcatttataatatagccaaaattcagggttttgagtttttaaatttaactttttgtcattaaacttgtgcccatgtagttataagcctcttaattttattcttaatcacactgtgtgtcatgatttcccttgccacacttctacttttgttcattgcagctatttctaaaatttttcacttgtatagttagtattgcagtgggaatatctttgaacatttggattactgggtcaaagggtataaccacttttatggc

SEQ ID NO: 5815 - DNA, 442 bp, mus musculus
ccgcggcgctaccatggccgacgtggaagacggcgaggaaccctacgccctgacctctcactccaggagcgcaggctccaagtcgggaggcgacaagatgttctagctcaagaagtggaacgtggtggccatgtggagctgggccgtggagtgagatatgtgcgccatctgcagagtccaggtgatggatgcctgtctcagatgtcaagctgaaaacaaacaagaggactgtgttgtggtcttgggagaatgtaatcattccttccgcaactgctgcatgtccctgtgggtgaaacagaacaatcgctgccctctctgccagcaggactgggtggcccaaagaatcggcaaatgagagcggttagaaggcttcttagtgcagttgttcagagccttggtggatcttgttatcaagtgcccttcaaaggctagaacactccag

SEQ ID NO: 5816 - DNA, 442 bp, mus musculus; identical to SEQ ID NO: 5815

SEQ ID NO: 5817 - DNA, 351 bp, mus musculus
gctaccatggccgacgtggaagacggcgaggaaccctacgccctgacctctcactccaggagcgcaggctccaagtcgggaggcgacaagatgttctagctcaagaagtggaacgtggtggccatgtggagctgggccgtggagtgagatatgtgcgccatctgcagagtccaggtgatggatgcctgtctcagatgtcaagctgaaaacaaacaagaggactgtgttgtggtcttgggagaatgtaatcattccttccgcaactgctgcatgtccctgtgggtgaaacagaacaatcgctgccctctctgccagcaggactgggtggcccaaagaatcggcaaatgagag

SEQ ID NO: 5818 - DNA, 351 bp, mus musculus; identical to SEQ ID NO: 5817

SEQ ID NO: 5819 - DNA, 867 bp, mus musculus
atgttggccaagtcaattgccaactgccaggtggagcttctggaaaactgtgggcactcagtagtgatggaaagacccaggaagacagccaagctcataatcgactttttagcttctgtgcacaacacagacaacaacaagaagctggactgaggccccgactgcagcctgcattctgcacacagcatctgctcccatcccccaagtctgacgcagccaccactctcagggatcctgccccaaatgcggtcggagcgccagtgaccctgaggaagcccgtcccttatccctggtatccacggttccccagagctttggggaccacgcgaaaacctccaagatatttttcacaaaatagaaactcatatggaacaaaataagaaaccccagccatgaaatctaccatgaagtcttcaagttcatgtcactgagaagcttgtgcaaagcagccaccttggaccataattaaatcaaggacattttctttgagacattccttatagttggagactcaagatatttttgttgcatcaggtgtattcccttgcatgggcagtggcttttataggagcattagtcctcattcgctgaaccctgttgtttaggtctaatttaagttttacatagagacccatgtatgactgcagcccattggctgcaagaccagggaggaaagtggcaagctgtagaaaatgtttacacgcatggaggggcattgctctagccctcagagcgtccggagcagcagggtacatgggtgggaggttcattcagcacccaccagtcaggtatgttctgagtgaacccacagcagtcgcagaatgagcacctggcagggtgggtttcctaggaataatttattatttt

SEQ ID NO: 5820 - DNA, 939 bp, mus musculus
aagtcattttagctttgccttttatcagcttaagaaactgtagatcagctttaggcttatgtgttcaacactaaggaacatgccatgtttcttcagtgacaaaggcaaaaccaaggctgatataggaaagcaggaccaatggaccaaggtgttaggtgtcatatgtttttgggagcagcaccatttgccagggcatctgtcttcttcctcacagtgtacttcagttttctacatgttcctcctaccaatatgaagttatttgaaactcttaacccctctgtacctccacctactttccttgccagacttctccttaaaacatttgctttgtagggatgtgaaagttatctctttgattgagataatgtaattaaagggaaacttgatttccttgccaagtctggatttctctaccgagttaccacctcagggatttctaaaactcaattacagtctgctctgcttgttagtgaaaacaaggtgctataacgatctctcttcctgataatctgttttctgcatttaaatattgttaatattttttttccttaatccagctaattgaagatgtgagggtgtttcaatagtatgattcctgaaatttgtttcataaacgatattaactttatacttccaaacatgttaaagtgtgaatatgttttaaatgttttgttttccatatctaaatgtattttaagacttttacattttgcatttcctaccagcagtgtgttttatactgaatgcaggcatttcaaaagactcctattttgagcatgtctgtgcctgaaagtatgcaatgctaatttgaacagtaagcaatgtaaacacctcatatttaaaaattggttgaaaatgagaaaaagtactattttagtgaaaaagaaagtaagaaataaaaagttcttcatgtgaataattccaaagcacctcatggta

SEQ ID NO: 5821 - DNA, 1097 bp, mus musculus
tacgttacatgtgatgtgcttgagacacagtagagacctaacacactgtaactgtcatccttgcctgcactctagaaagccactgctgtagctcactctggtggtataaccatctgtccagcggcctcagggcatgcagtggctcagacatattttttcatggaaacctcatcaatggctaatagatgtaaagctatttcagctttttccaggtccttagtttagtggttttatatttctgcccttgttctttccaatttccaggtgcatgggatccagttattttttcttttctttttttcttttttttgatagggctgtacaggaatcagaattgacacattcgcccatgaatttccctcttttcaggtctccatttctcctggtactgcaaaagcctagatttctctgatctcacctctcccagcctcatctgggtaaccaacgtacttatttcattctggtcaagattcctctcaataggtttattgcagattgctgcagctgcaatcagtgtttacaatctgatgacaagttggagattaaggcttgtcatcactatttaattaacctcaaattaagcagtttctggccccattccatgcccttccacaagccattcagagctgctaaaacagtggtgtgaggcctgatagattccgggtcacaccactggagagtgggagctggctcagcagccactctgaagaaaatcaacatttgattcttactcttatgcctgagggctgaagataggtagctatccaaagaaaatgtaaagggaggggaagaaaggagggcacctttctatactagtaagtgtgtagtctgtgaattgcaaaggacatgagccaaaaagtgttccagagacagaagaaaaaagccttgctcttagtgtttaaaaataatttgtttttctaattgcagaggtgacatgcatcagtagtaaatggtaatggtaaaaaaggagaaaaataataagaaagtgaagaacattcaacttcctactctacacacccgcttttgaggcttacctgagctgtccaatctggtagtcactatcctcatgtggctcttgagcttttaaaatgtagcaa

SEQ ID NO: 5822 - DNA, 868 bp, mus musculus
tgatttggcttacacatttcaccactcacctttactaagatggaaaattaaatgctatctgtaggtccacagtcagaaagaaaaaaagtgataaataaggacaggttggaaagacttatgaactagcattataacggttctctcaaagctctttaaaaaaaacacacacacacacacacacagttttgcactgttgcacatgctagagtgtagtggcaccatctcagctcactgcaacctgagcctcccggttcaagcaattctcgtgcctcatccaccagagtagctggaactacaggcacgcgacaccacgcccagctaatttttgtacttttggtagagacggggtttcgccctgtcggccaggctggtcgcaaactcctggcctcaaggaatccgcccacctacacctcccaaagtgctgggattacaggcgtaagctcttggctcacactgaaggctcttttgattatcagcagcacaccctactcaaagtaactcaaatgaaaatggaaggtgagagttagttgtaatgctacagcaacctcacagacaccaaaaagtagaaatgaaatttagttggacattatgcaaaccagagcatggcgagcagaataaccaagatttctctgagcagaataaccaagatttctctatgtggcttttctcatttatgcatctcagagtcaggtccttcatctttctctcacctgccttcctctgcctactcatcttacataacatagcgcagcagtggtaacttcagatcctaggttacatgacttgtctactctagtgcccatctttgatgataacctctctgcatgagcatctaagtaaacttatgtgactttgagaagcgctttag

SEQ ID NO: 5823 - DNA, 145 bp, mus musculus
cagatattttccctcctttcctgtgaagtgacatttctcccagatattttctcttctgatctctttagagagttaagtctcttctgattgatcttcactgtcatattccttctagaattttgatagattccatagctgacacatt

SEQ ID NO: 5824 - DNA, 1058 bp, mus musculus
tttgacaaagtgctggtttgtcagtttcagagagaaagcaatcaggagtgttcatgtggaatatttttagctctgaaactgctcattgtggagtaggaagcctcaagaagaaagtatttcagatgcctttgcgagtcatttttgaaagagagagtgagagagacaattggagaaagcagcgagagggtctttctgctgcaccgtctctttagaaatcaatattgaggcaccagaggccatgttctgaaaggcaccctcggaggggaggggtttgggagatctcccttaccggagcctgaaagccgcatcctccaggcccaggtggtcttgagcaggccaaccctgccctctgctgaccgtcctggggaaagcgcctcttctttgaagtcccgccctgctgtgcttagtacgcggtgtgctaatcgccccagggagctggaagcccaggaagcttggcaccaagatcttgttagaaaaattacactgtgacattttgttcctgaaggaatctgataattgtgagcaacatcaggactgctgtgttagggaggccgaatggagcaaggactttgaagtcaggaggatgtgagttggactcctaccgtatcctggagaagttaatcacttccgctaagcctcagtttccctatctgtaaagaaaacctccttcgtagagctctttcgaggatgactaacatgatgcatgaagaatggctggccctgaacaaacaaaactaaatactatcaataattagtagctatcacaattaatcaacatccttctcttttccaaagtaccttttattgtatcacctttgcctttgcttttttgaggacatcacatggactgaaaatctcttttgttggtcgtgttttccagggtcgttttagcatcaacctttatggaaccggcttgtctttaactgaatctgccagatggatatcacaagggaattatgctgtctctgacatcaagaagtcgccggtaaggttctacagatgggttgggagatgaatttttatttctttctttcgttcttgtctttattactgtggta

SEQ ID NO: 5825 - DNA, 3171 bp, mus musculus
aggcctgtggaaatcgaatcaagggtttctggagtggagtgattccagctgctttgagctgaaggaaaagtagcctggccagtaaagcgtccgtgtgctggaggagtgcagccacccatcccggcgggccttgcaggacgaccgacaccaggaaggctttgtgccaggcccagcagccacccccagccgccttatgcaagtgggtacatgccctcgccagacgccagctttctgatctgcgtctttagattttttccatcgcctaagcgttacttctccactgatcggtgagtttagtgatggccagagctcactggaggacaatggacttggataaccaaaggtcagggcttggtcataacaatgactttattaccgggaaggacgagtcaaaaaataggaaggcctgggaaccctcaggctcgccactctaggtgggtagccctgtgattcagccagtgggattactgctgtgagaatgggaaagttgtttgcttctgggaatgtttgatccactaagtatcctgttggccagttccagtggatgcctgtagaaagtgggccacctcctcccgttccccattggaatctggtccgagttgctgtgttgggggtggtgcctgtgaactcgagtatagcagtgtggtattcattaaggaaaagaaagcgcaccaccggccaggccttctggctgagagttatcacgttacattattttctttcttaatatttcctttaattcacaacatcatctgaatgatcaggtttactttagcatccttttaaggtaatatgtttcatttctgacaggttttagagacctgaaacatcacagaagcttctgagtggttctgaagattcaagaggtatatatttttattacaagtagagtcattgttactattaatatgtgtttttaaatttttataaaactgctgtcaactcattcttggataaaagctccaagtgaaaatgttattgtaattcagatcagatttacagcagataacaccatactcttgagggccgccaaagtgaaaaaccacaatacttaactactccaaggggggaaaatgggggaaaaaggattcctttttggtgtccccactgttcacttagaattccatggccttggaacttgaggtttgatggaacatagcagtcaatttccttttcttctttctttctttgtttttttttttttttgagacagagtctccctcgcattacccaggctggagtgcagtggcgagatcacgactcactgcatccttgacttcccaggctaaagtgatcctcccacttcagctgggactacagctgattttttgtattcttagcagagaccgggtttcatcacgttgcccaagctggtctcgaactcagggactcaagcaatctgccagtcttggcctcccaaagtgctactattacaggcctgcagtctgtttctaaaggttccatcttcacagcccataatcaatgaagactgatttcgaaagttgggttttccggtatgacccaggaaacagcagtcctagctgatgaacatccagtgtgtattaagactctgtcatccagtggaaagagcacttaaaaaaaaaaaaagaacaaagatcccactaaagtgacctgagaatggcaggatcattgtctgggatatataggagaaatctggtccaagagatttaacacttactgggtgaattagaaatgcagtgaggtttctgaccattatcactgttcacaatgtaaaggcatgatgggagagcttaagggcacagtctttgaggcagactgcttagtgtcctggagtttctaagtcttagctattatagctgattattatacctactagcatgtaagcttcacaagggcaatgagtttagttcgtgactgcaccttcattgctgtatcctgagtacagaagcgctcctggaacattgtctgtgctcataccttgattatgattataattttttattcagcagacacacacttgctcagagccatcccactccctttgctctctcacagatacttttcccctcctcatcattcagatctcagctttaatgttatttaggccccttctctgccccacatggctttaaacttttatttaataaacatttccatagcatttagcatgtgccagatagttttcgaaacactttaccaataactaactcatttaactcatgacagctctatgatgaaggtttattattatttccattttacagatgggaaagcttaggtgcagaaaggttaagtaacttgttccaggtcttacagctgggaagctgcagatttgcgattcaaatccaggtggttaagctttaaatgttcaccatgctatgttgtctatcatattactttatttagtttcaggtatcactaaactggatcctatcaagcccttccataatttttgtaagttaaaaagttttattggaacacagcctcatccattcttttataatagaccatggctacttttttggacagaggcattgttgtgtagttgccacagagatcttatgtctggcaaagccaaaaatatttactgcttctcctttacaggaaaagtttgctggcccctagttggtttgattcacaggcccagtcatcagctgaagttgtttatttgattgcttgtttatgacagttgtagtaggtttaaaggcaccatgagagcaaggctctttcttgttttgttcacctctgtatacccatttgctaacgtggtgcctggcaccaagcaagtgctcaaaaaaaattgaataaaggatcattattcagtgggatagcaaagtgctttgtaattatacttagcccttgaccctttgttttttttttttttttgttgttgttgttgttgttgttttggcttttaaaggaaatttgttaacaaagttgtcttcattttgatctctaggtttgcaggttgctatgttaatgttgtttgtctttggagtcttacttcatgaagtctcactgagtggtcagaatgaagctcctcctaatactcacagcattccaggcgaacctctgtataactatgccagcatccgcttgccagaggagcacattcccttctttttgcacaacaataggcatattgccactgtctgtaggaaagactctctttgtccatataaggtaggt

SEQ ID NO: 5826 - DNA, 1360 bp, mus musculus
tttataaatgtcttaacagtttgctttctcaactctctaagttatttcccttgatttcttttcagctaatattctttaagcttcttccagtttctgtacttctcacttgtggttggtagcaggagtagtgagacagaagaaagaaaaaaagacacaattttaggagtatttcacattgtataaggtttctttgcttcgcaattctggtgaaacgaataaagaccatatggcatcctaggcagttttcctaatgtccatttattctgtaggatttggcttgggaaacatgttccatatcagtatgtatgcatctaggcaaaggcaatgacaggaaaactgattcttaggattcgacttttacatttttcaatggaaagtcatatactgtgcatcaaaattgcccgtaaaaattctatctatctatctatctatctatctatctatctatctgtctatcatccatctatctgtctgtctgtctgtctatctatctatctatctatctatctatctatctatctatctatctatctatctatcatctctgatagagtctggctctgtcgcccaggccagagtgcagtggcatgatcttggctcactgcagcctccatctcctgggctcaagccatcctcccacctcagcctcccttgtagctgggactacaagcatgagccaccatgcctggctaatttttgtattttttgtggagatggggtttctccatgttgcccagggtggttcgaactcctgggctcaagcagtctgcctgccttggcctcccaaagtgctggggttacaggagtgagccaccacacccagcttgtatgtagtcttttacaggatctgaaatctgaaatggtccaaaatccaaaactttttgagcacaaacatggcactcaaaggaaatactctttggagcatttcgcatgtgggattattggaatagggctgcttaactggtataatgcaagtattccaaaatttagaaatattcaagatccaaaacactctcttcccaagcattttgtataagggatattcaatctgtacggtaatgcttctttagaccagctgagctagactataggaagaaagaagagaccgtgtagatgtctgaaaatccagccactctacgtttaataactttcaaatctctaggtgtaaatggggaaatggatgttgagttaaatgttcctgcttgcttgtaggggtttattccattctgttttttatgttaaacttttatagccttaatatctgtcagtcagcttgtttgttgtaaggattaaatgagataatttatgagaaagatctcacaggccctaccaagtagtaggtgcttaaacatttgttgga

SEQ ID NO: 5827 - DNA, 122 bp, mus musculus
tcactttttgacaggacattcagagtgagccagtatcaggatgcagaatctgtaagcagacagagatacgttaccacacttttaacagattcattgggagtatggagtgtggatattgctgc

SEQ ID NO: 5828 - DNA, 650 bp, mus musculus
aggaagtgatctctctgcaatggacacagaaaagataaaaggttcaaggggaaatataggggaagagggagggggaacttaaatattggggataaatgaatttgggataattaaaaccaaatatagagaaaattctgaagggaaactgataatagtgtatatgtagacattatgctcctcaatggaaattttaaggatacaatattgtttccagtcatctgtctttcagcaatatcacccagtgactcgatgcaatcaaatgtgtatatgtagacattgtgctcctcaatggaaattttaaggatacaatattgtttccagtcatccccctttcagcagtatagcccagtgactcgatgcaatcacctcaccagttctcttctgaggaaacagttttagacagattcaaagcccagttcaatgtagccaagattctttaatttctaatttagctaattagtagcaatacaaactcttgccaaacaagaaatgtgaattcttaaagattaaattttattttatctctatgtagaggtaggaaaccaatcttttgggaggcacaaattaggatgacagccaacattcatatattcattctaaaataaagcctttatatgtaatgaattatttgtcataattctagaaagtgg

SEQ ID NO: 5829 - DNA, 669 bp, mus musculus
tatgaagtaactatgactttcacagtcatttcactctgtgactatttctaatacacagaatgagaaatttggacaggaatcttagcagctcgaaggttctatgattctcatatttccctagatgaaaaccccaggcagaaatattttctatttaatcagatattagttcataattaagtacatacaattgaatgttaattacatcttgttctttaaaaacctactttctgggcattctgcaggagacaaatcggaagaatgaagtttaacattttcaatacatactttgttatgcatattcctaaattagaaatggtttttacctaataattcccacctgtaaatgacttccagaagtttatgttatcctgaattaatcactcacataatgtcaaaagcaatgtgcttataaaatgtaaagacaaaaaagaactcggagggggggagcacttttaaaaattgttttttaatggatgttttcattttaattaaaaatcaaatatacaatttaaatacataaagggatgctgatatcagataattaacatataagtacatcttgctgacaacttaaatatgcatgtttttattaagaaataaagaaaaaactcaaaaatccaacagtcaaggtcttcctaaagtacttaaagcaatttgaagtttgttaaa

SEQ ID NO: 5830 - DNA, 603 bp, mus musculus
ataaagtaggctactattgctttggtgtgccctctgtaaattaagactatagtcgtggatcttaaaataacaacaatttgttagaacaaagaaacaaacaaacaaaatttcacatttttccttgctcaccattctaaactccagaaactctcactagaccaaaatatggaaacatggaagaaagaaaatgaaagaattatatgagatgtcactcataaggtttggtttgcacctcagttcaatcactctccagctacaacatcttgagcaagccatcttcacctccatctccggtccagtaattataagattgtaaagtaagccctgcctttgttatcatcaggggctgcaaaaagaatcaggtggcataatacctgtgaacctgcttggtgaactccaaagtgtgacataaatacttgtagttttttctgggaaggacttagcagccacaggggcattgtcaagatgatgttggaactgcttaggtcttctttctggagaaggaagaactcagacttgagctcttatgcagagagcccttagagtgattctatacgattaactaccttgggttgaagttatgtcactttctaggctaatgct

SEQ ID NO: 5831 - DNA, 1930 bp, mus musculus
tttaagtcacagaaacaaaatcattgagaatcagatgagtcttagtcatatattatgatgctcataagtatatgttttgtcctcattcgtatatattttttaaccatagggaattccttgggagcaatattaaaggggagtaatatttttataaccctctgtattagtctgttttcacactgctgataaagacacacctgagactggacaatttacaatagaatgacatttattaaacttacaattccacgtggctggggaggcctcacaatcatggcagaaggcaagaaggagcaagtcacagcttaagtggatggcagcagccaaagcttgtgccctgcacaagctgcttttaaaaccagcagatttcatgagcctcattcactatcacaagaacggcacgggaaagatccgcccccataattcattcatctcccaccaggtccctcccacaacatgtgggaattatggaaactacaagatgagatttgggtggggacgtaaagcccaaccatattaccctctgtcacagagtggaagtggcctctttcccaaagtttgccttaagtttgactctaagcttaggttggttggagaagacctttccatgacaattctctagaaagtttatcatttcagatggtgtcatgatgtgacaagttgcacgatgaggaagttgggccaaatcaataaaagtattttcaatgtgcataaatcctggattatcatgcttttctcaagactctagaagattcttttccccatagtccttgaaaagggtaagaaacaatgttggttattggaaaactcccataagggaagcagcctgccagttaaggctggaatttgggaccaacgctgctagacgatatgtaaaaacattaaaacacattacaagagaagctgctgttgattattaagaaataaacattcctgtggctcatttgaaggcaaatctgtaataatcagtggaggattcatgtgaccacatctgaagcctggaatttccaagttcctgtatgcagtgagaagctgagtgccacagcaaggcagatgaagaaaagatggtgttgaactgcttcctttccatctggtgttttacagcagctctgctcacagttactcttaaaggaaaatagaatgaagaaaaataaattcacaatcttgtgttgtttaggctgaataatctaagccaaattattgcttaggaataaattaaatattgtacaaagcagagtccaaacataaataaaatacactggagggagacctctcacttaatgagaccctgagctaatgtaatttgcccaataacagcaacataactataccagtgccaagtatgagggttagtatgggtcctgtcatttttcactgactaacctgtattaaattgcaacactcccagtattctctgccacttttcctaatttattttatctatagaatatacccccacataaaatattacatatttaacttttaatttttatttttcccctcttgcattggaatataagctccccaggcaagaatttcgaaatgttttatatccttttcaatccctggctcataataggcactcaacatatatctattaaagaaatagaaaaataattttctttctttaaagatgatgcagaaggccaggcatggtagctcatgcctgtaatcccagctacttgaaaggctgaggcaggagaattgcttgaaactgggaggcagaggttacagtgagctgagatcgcaccattgtactccatcctgggcaacaagagcaaaatttcatctcaaaaaaaaaaaaaaaaaaaaagatacagaagtaggtaatatataatataaaatatttattccaaatgcattctagttattgaaagacacttttaattcaagaagaagtttgttaattaattcatctttttatttttta

SEQ ID NO: 5832 - DNA, 1221 bp, mus musculus
aaagaatagggccaggggataaatacctctctagctcttgcaactcaagagatgtttttcatatcttagataataaatacttgcagtaggtttagctcataactaaaagtatgtgctaagagactcccctagaagagtttgtcttccgacatgctgaattgccctggggttggtggcagcttaataaaatatgtgagtgttcagtgcggagctgttaagttatttattccacttctgatactgcatgcatgaactgccactgtttgatgaatcactgaagagaatgggaactgacaaacaactcttcctttagcggctgatcacactgacagcatcaatagaaaaacacatcatgggttctaaaatgccacattttcaccgtttaccctgaataagacatgaagctctttaaggaaagcagtagtacgttatcattaagggccagctgacagagaggcaagtgtgctttgaactctctcaagtcatcattcttaatttcttctcttcttagatggaaggcccacccacatgggttctgagcaaggcagggactgttgcaccttttaaaatctcattgatagattggtttcatcaacacccatcctgactcctgcccatcgggagaagctcctattctcattagggtcctgtaatgtctgcagctaacattgttctcatgcaaatagaatgacacagaagatcagtgccatgaaaattcaatttcccccaaccatcattaccctttttcttttagttattcccactccaatctgcaggaggtaatgtgtgcaatctgctggtactgtgcaagatgattactacattttagtgatgaatttcccagctattgcactagggggtgttttagcaggttccctgatacacctaatgtagatgtggcagtagtccttgcagtccttacccagctcttccatagtggatttccacaaggagtggatgcctggtcagtagaacttgtattcaatactgttcattctttagtcatcagtggcacttgtgaaagtagtgatttgtttaatgttgtctgaaaaataaaaataaaatatatctctacctgtccaaattgaaggattaaaagctctgtcaaaagaaatgtagtaatttttgtctttagtctatgatcaaacttgggtaatttaataaggatgtaaaattcagggtagctcatataaacatattgaaattataaaagtgtgtaag

SEQ ID NO: 5833 - DNA, 1221 bp, mus musculus; identical to SEQ ID NO: 5832

SEQ ID NO: 5834 - DNA, 337 bp, mus musculus
caaaataaactccacttattgaaaatttattctagacttcttaaagaatgctaaatgcaattaaaagcaaaatataaatacctttgattgtttaataggagaataattttaaaggaaatatacatcaggaaaaacatttatgaacctcccagggttacatttggtgttagaggaatattgagaaaaaatattgataaagttagtttctggaggttttgaaactgaacacaaagtcggcagtacataaatacctacttgcccaatgcaaatgcacacagagcaataaacacacacatccaatagaaaatgcatgctgctgtttgttagaaaaataaat

SEQ ID NO: 5835 - DNA, 337 bp, mus musculus; identical to SEQ ID NO: 5834

SEQ ID NO: 5836 - DNA, 167 bp, mus musculus
aaatgctttattatgtgagtggctagaaacacatattttcatggacaatgagaagacagctctcaatttctcagtactatgagtagtgaattactaaatgactaataaactaccggtaccaaaacaacgtaactgaaagttaatattaagaaaggaaaaggaggttt

SEQ ID NO: 5837 - DNA, 615 bp, mus musculus
gcaacttacattctagtgggaagattttatgaaagttgttgatcacataattgaaatatatataatgtatttgtctctaaattatttctaaaaagaggatttcttaagtgcaggagataattctacaagaataaaaaatccaattgaaggtataagatgagtaatgaatattcagtatctgcagtaccatcataaccatcataaataatacagctgtccaaaatttagtcaagggcaagtttgtaaagattctccaatttctatttttttctaacagaagtgaattggctataggcattagattaagtatgtaattttctgtgcctttatgatcttcatcaagtcttacattactttggggcattaataactgtattagtcagggttcagtcaaagagagagaaccagtagaagacacattgcaatagtagagacctattgcaatgagttggtttgcgctattgttgggggtggctaggcaagtctgtaatctgtaggacaggccatcaggaagggtagagtggaactctcctgcatgggctgaagttgctctccacaggtggaatttattcttccatcagggaagcttcagacctatttttaaggtctttcaac

SEQ ID NO: 5838 - DNA, 125 bp, mus musculus
tgtaaaatttggggaagaactgcatagaactacaaaattttggattttactgaaaaaattatgaataagagatttctttcaattttccaaaatttctgtatcattgaattgtcacatatgtgatt

SEQ ID NO: 5839 - DNA, 223 bp, mus musculus
gttcttttgcaatttcagcaatatatggctaaaaattatttttactctcaacaaatattttggaagaaaatgggacaagtttatactcttatccttctttagagagaattttgacactggtaagaatattagttatgtgttcctgaattaacctatgatgtcatagtgcatttgggtgtggtgttttggtacttaatctaaaactatcctatcaggagtatct

SEQ ID NO: 5840 - DNA, 502 bp, mus musculus
aatattttattgtttctcatgctcgtaggcattgactgggcttggctgggcagctctcttctgaagttgtaatcggatgttgtctgtggttgctgtcatttaaatgctcagattggctgaatgtccaacgtggctcactgacatagttggcaggtaatgctgattgtcctgtgggcattcagcccgtggcttgggcagaatcagctacataatttacggaacctacctagtgcaaaaggaaagtatggagtttcttgttaaaattattaggacgttcgagatagtaacagcacacgttgcatgctcatgaatctggctcggggcttggacttctcacagtaaaatggttgggttctaagaagcattcaaagaccaagcattctaaaaggcccaaatagaagttctaaggcttttcacaacctagtaggtcacgattctaattgtcaaaaggaaatcacaaagccagctcaggttcgagagagggaaattagatgctatctct

SEQ ID NO: 5841 - DNA, 183 bp, mus musculus
aagcatgtatcctaatatgtatggtaatatctcactgacctcatgtcatgaggaactaagtaattataccttagtatgttttcaaattctgaattttatcactttaaacaccattttaaaatattacctctatttcagaattctttctaacatgttatgtgctttttagcctaggaaaaaaaa

SEQ ID NO: 5842 - DNA, 345 bp, mus musculus
agcttatctgcaaacatgggtttctttgctcaataagttacactgcaatttgaattttggaaggtggaatactcacatttcagtcacagagtagcaattcagcctcccaatgaaatcattcagaatataaacaggcacaaaacttcaatggtgagcaatgctatgtaaaacggaggaagtttaatattatgtacattatgtgactttatattcagaaaatttatgataagcaaatgatacatgaatattttaaatacaataaatttaataacaaacacaaagcaaaataatttttacatacactcaattaccaagtgagaatatattatgttaaacattgttttc

SEQ ID NO: 5843 - DNA, 6223 bp, mus musculus
tatcatcttgatttattgctacatcatcttcaaaatgacagtattgtgatttggaagaatatcctaactagcagggaagaaagtggaacaacataatccatgacactgaacaattctcatatttgttgtcagagtcataattatttgttgctttgcttttgaatttttgtttatgaatcccttgctagatgaatagtttgcaaatactttctccttgtctgtggttcgtctcttcactttgttgattattttctttgctgtacagaaggttttagattaatattatcccatctatttttccttttgttgcctgtctccttgtctgtgtttcgtctcttcacttccttgattattttctttgctatacagaaggttttagattaatattatcccatctatttctttcttttgttgcctgtggttctgaggtcttatcaaaaaacaaaaacaaaaacgaaaacaaacaaacaaataaaaaaatgtagaccaatgtcttatagcattttccaatgtttttattttctagtagtttcataatcttgggtcctacatttaagcctttactccattttgagttgatttttgtgtatgatgacaagtagggaggtctgatttcagtcttctgcatatagatatccagtgttaccagtaccattaaagagactgctttttctccaatgtatgttcttggtgactttgttgaaaatgggttgactggaagtatgtagatcttttttggggttctccatcctgttttattagtatattatctgttttgaagccagtaccatgctgttttagttactataactttgtagtataatttgaaatcagatagtgtgatgcccctaactttgctggttttgctcaggattgcttagctattagggtgttttctgactttagatacattttaggatattttttctatttctgtgaagagtttcattcgtattttaatagttattgcattgaatctgtagagatctttgggtagtatcagtgttcaaacaatattaatttttccaatccatgagaatgcaatatcttttctttttttgtcctcttagatttttttcatcagtgttttacaattttttatatacagatcatttatttctttggttaaatttatttctaggtattttttgtagctattataaattaaattgattttttcatttattcttcagattgatgactgttagtgtataaaaatgctactgaatttcatatgttaattttgtactctgcaatgttatgaagctcatttattataagtttctggtggagtctttagtttctttaaaatataagatgaagttatctgtaaagataatttgaatcgttccctttgaatttggatgttcttaaatgttttctattgcctaatttgtctggccagaaatttcaacactatgttgaaaaaaagctgtgaaattggacatgtatgtctcactccagatcttagtggaaaagctttcagtattttccactcagtagaatatttgctgtgagcttgtcatatatggcctatatcatgttgaggtacaccatttctacgctaagttcgttgaaggtttttatcttaaagaaacgttgatttttatcaaatgctagtttagcatctattgaagtaattatatggtttttgtttttaactctgtgaatgtgacatattatgttcattgatttgcatatgttgaagcatccttgcatcccttagacggatcccacttgatcacagtgagtgaacttttgaatgcattgttgaatttggtttgctagtgttttgttgagtactttcacaactatgtttattttgtagagttctttcacaactgcgtttgtttattgttgttgtgcctttatcttgatttggtatcagggtaatgattgattcacagaatgagttgggaagtatttcctcctcttcaattttttgaaatagtttgaatataactgacattagatcttctttaaatgtttgttagaattcattagtgaatcaatcacatcctaaacttttctttgatagaagaatttttcttagtttttcaatcctgttacttgttattggtcttttcaggtcttctatttatttattgctcaatctctataggttgtttgtgttcaggaatgtatccatatcttctcggttttcaaaatggtgggcatatagttgctcataataaaagctaacaatcttttgtatttgtgtgttaattataatgtgtgctttttcatctctgatttttttgtgtcttttcttcttagtctagctaaaggtatgccaatttttattttttttcttaaactatcttttgttttattatctttcttatttatttaatcttaattgtatttacttatgctctaatattcataatttatttccatatattaattttggggttggtttgttctcgcatttctagtttcttgtggtgcaatgttaggctgtttctttggaggctttctttttcttttttgatgtagcatacaatgctataatttttttagtacctctttttctatatcccctaggttttactatgttttgttttcattttcatttgtttcaatcatttttttaaatttacttcttaatttattcattgacccatttgttgttcagaagcatgttgtttaattttcatgtatttctatagtttcacaagtttctcttgttattaatttctagttttattctaatacagtcagaaaaaatgtttgatatacttttgatttatttaatttgttgagacttattttgtatctaacatatggtctatcccagggttccccacccgcagttggtacgggtacctgagactggtactggtccgtgacctgttaggaactgggtcgtacaacaggaggtgagcaatgggtgagtgagcgaatctttatctgtatttacagctgctccccattgctcacattactgcctaagctccatctcctgtcagatcagaggcagtattagattctcataggagcacaaaccctattgtgaaatgtgcatgcaaagaatctagcttgagtgctccttgtgagaatctaatgcctgatgatctgtcactcccttccaccaaccccagatgggaccatctagttgcagaaaaacaagctcagagctccagttgattctacaatatggtgagttgtataatcatttcattatatattaaaatgtaataataatagaaataaagtacacaataaatgtaatgctcttgaatcatcctgaaaccatctcacccccaacctttgggtctgtggaaaaattgtcttccacagaaccagtccctggtgccaaaacatttgggtacagctgctctatcctggagtatgttccatgtgctaatgttaataaaatagtctataaatgtctgttaggtctgtttgttctagggtatactttaactccaatgactgtcaattttctgcctgcattagctatccattgctgaaagtacagtgttgaagtcacatactattattgtattgaaatctacctatccctttatatcaactggcacctgctcatgggaagaaggctgcttcacgtgttttattggctcagatgagtatgcatcatctagcagggccctgcacaagcaggatagtttcctgacttcaacaggagagttcatagacaagactggctcctattcgtatatgctgtggagtggaggctggtgtgcctgtcacattcgctcagatgggcatgtgtttcccagcaggtctctgcatagacaggatagtttctcaactatagccgggaggctggatctgagactgggtctcctcaggatctgctgtggaaaaaaggctggagagccttgtgtttactcagagggctgtacatcacacagcactttcctgcagaggtaggagcgttccctgattcagtcaaacggccagttttgagatgggacctcctcagaatttgccgtgggatggtggctgaagagcttggtctttttggttcagagcgggacctgtctcccaagacgatgctgcacatatgagatagttccctgactgctgaagcaggaagggctggagctgagacagagccttcccaggatctactgtgagctgtgggttggaggctggacagtccatctcattggctcagacagacagacagacatctcccaacaggtctctgcacaaatgggatagttccccagctgcagtggtagaggatggagctgagtctggccccttcaggatctgctgtggggctgagactgaaaagcccatctcattggcctggacaggtatgtgtctcctgtcagtttttagtatagatgagatagttccctgactgtagcaagaagtgtcagagccgaggctggtcacctttgagatctgctgtgaaatggaggttgacaaactgacctgggatgcctagactttggggctgggagacgtgatagtctccctctgggtccttgtacaaacagcagctctgagttgaaaccttagctgaggaaggctggagtagaaccacagggcaagtttcagcctcattgctgaggccaatgttggcaggcagaggagcctttctaccaagacactagcgtgtacaattacttttggaccccttggcagatagttttgcttgcaaactcaaggtcaaatgaggctatagccaagttgcgtgggggactgggcaatttctcggcttgaacttggaagcaagctcagtgaattgctttgggagtgcagactaaacgcaggaacaacgacctgggtgttgtctactctcaaaacaatactcctaggtcttgggctccagaatagtttcaaaaactcctatttgaatcctgaggctcctatagagaaacttttaactgtggattggtatagaatttttgttgttctggggggatatgagtgcgttatcttccattctgccattcttgatgatgtcactctagtgtttaattttgatgaagaatatttcgtaaatgttttaatggatcataattttagcatcagaattaaatatttttaatgtaaatgtggatatgttctattttataacattgtgtttgaaaacaaatagacttacttaaattgaaaataagtaaatagttacttatgagtacatttttgaacctatttgagtatattcccttgatataaagaattgatgtaattatcctaattatttctagtgttttgtcaggattataatagaaaatgaatggtagggaagcctaattggtgttttgaataaaaaacttggtgctgcgcattgctatgtcctgccagtttatgtaaagagtgcaaaaaataaagaactctttatttacatatatgtttattcacttatcaatttattaaaatattaattaagggattattatgtgaagataatatgctagctgttgataattaaacaaaaaacaaatcagacttgaaaaagtggtaacatctttttaggaaagggccacatatattgagagaataacaaggatattcaggttgagattttgagctaaaaaataatttttctgcataagtattacttgacctaagacttaatgaataagagttagctatttatagattgatgaaatgataatgggatgataacttcagatacagaaaacatcacgtgtaatgttcttcctgggaaaaagcagcataacacataggaaattgatgtgagacgagtaggactgaagtataaagcaggacagaagatgaaaaacgtgaagtggaagtaaaggcaaaccagattgtgcaaaacctgttggccatctaaacaatacttaaactatatgatagaatatggatgcttgaaactttgtgtccaatctttccaagaaaggcccactgtatgacatttgctagaagaaagatcacaggacccaaattcaaagctaaatgtgtaattaagctctttaactttcatcattagtagatggtcacccacaatgaccatgctaattactgaacatggaagtgctatactggaacgtacgaagggacatctgagagcaaagtagatgaagctgtacagggaatcagatagttgatgggcatagctgagcctcagatccagggccacgtagagaaccacacatgcttttgagcattaacgatatgggaactatgttgttccatggttcaaccagattgatgagtgggatacattttctaagctgaaagtcagtaaattggcttcgagtgggatcac

SEQ ID NO: 5844 - DNA, 4268 bp, mus musculus
taaaacaataattaaatttgtaaatctatacgagttctgtggctaaagaaagtttatataattataaagcagttcacaattaaacatagatgaatagataaacatgtcaaaaatgttcagctcttgaatcctcttttctcaaaagaaacattattctgacttgtaatgccatacattcccttgtcctgtttttgaattttatataaatataaacattcatattttactttttgtgtttttcttttgtgcaatagttcatatgtaagattcacctttattattgaagcagtggctcatttattactttatcgttctgttgatgtacatttaaaccgtttgcagcttgaaactataacaaataacatcactttgaaatgttgtgtacatgtctttttgtgcacttatatacatatatctgtttaagccttcctacaagtgaaatactggcttatggggcatgtgtactttaacatttagtaaatactcttaaataatttcctgatgtagttgcagctgtttatacttctcaggcagttaagaaaatttgagtgttttatgtcctccgtaacacttgggatggttaagtctttagcatttttttcccttttagatgggtaagaagtagtagtattaatacataggctattaatttgcatttatcatataccaatgaggctaagaacctttcatgtgcttattggtcatttaatgccctcagttttatagttcctgctcaagtattctactcattttaaaaaatgagtgttgtgtcttttccttgctgctgcttatataaatcacttaaagtggtgcagagaaatgttccattgccatggtggatttgtttcattttccttttaattctgtcattttgttatttatatattttggtgttattagtagcttggcagtttaggattgctatatttctctggtagagccactattttatcatcaggaaatgtccctcttttctatagaaaatcagttatactcttgaaatctacttcatctgttattaatatattgcattatctctcagttgattaatgttttgtagtgtaagtttttccatcagttcacttatttttttgttggtggtggttgttttgttttgttttgtttttataaagtcggctagtccttgagttagttgtaattcatcactactttgaaattaagctagcttttattttgaagttttatttttacagaatgtgtttttttttaaaaaaaacctcacatatatcattgattataatttaaaaaataatgttaggactgtattgtaaggtgatgtgtttccttttgttttattctatgctttcacaggcattgttatcagaagagggtcaacacttcaccaactgctccctgttcacccctctccctccccaaaaacaaaaagtcctcatggtggtttcaaatgctcagattatcttgctgggtttcctttccctgaacataagtccattattcctcattatcttgctagttctgtgctgtcttccatcatatatgtcctatttttttcaagctttaatagttgttctcaggattagtctgtcttaaccttgtccattattactagaagtttaaccactcctttttattttcattttagacactgatcatacatagtgatttcattacttttgaacttgacctatattcctaaattctgttactatcttcaaacattttcagcgatacaattatacaatttctaaacaattatgttttctacccatcccacttatatactacttactattttcttgtacataattgatttggctagcattttttttaacaatattttaaaacattggtaaaaatggggatcattgtattgttcctgactacaatgtgtttcttacatcaattactataaagctaacttttgttttaatagtaataaaacgccaatctattcttattcttatctcattatttctgatcacaaatgggtgctgaaattcattacgtacatttttttcttttgtgaaaactactttatattcacgtaattggttagtatgtaactaattttctaatattcgataacctttgcatttctgcattgagatattttggcaatattttatcattttgaaatgtggtggttagttcctattagtatttcataaatttttttctgtcttcatttatgagtgagatcatttagtagattttttaatatcttggttcgataacaatctaagtgcttatatttttgttaataaagtaagaaaacacataacaaaaccattgtatttttctacattgacattattttcaaatattagcttaattcaacataaattggccctaaaaaagaaaactttaagactaagtaatagtatattgtaagaatattcatacctaagtaagctaaaataacataaaattgtaaaaacaattcaaacagaatattgaaatttacatgtgaattatctaattatctggaagatcacctatactaagtgtggtatagaatgttttacttttatatatttgtgtccataataggtcaccaaaacttatatacgtgtgtgtgcgtgtgtgtgtgtgtgtgtgtgtgtgtgtgaataagtttgtattgttattttaaaattttatttcagtttttgggctgaaatcacacatcaggctaggattacaaattgaagaactaagaaactcgaacagactttttattagcaaccaatttagccctctacatataagaaaatatatctatgatttttatactgaaatattttatgagatatacacattatagtgaaaaaattgcaatagattgcccaaaccattgtttactatttttatagctacttacacgcaagaaagaaagatatgaatttttcccaaccagttaaccacttaataatttttcactgtatatgctagagaagcagccaaagattatgggtcacaaaactaaaaatgtgttccttatatcctgatatcttatagaaagatttatggcatgcagaaaaataataagccaaaattcagataaccagtaagacatacatagtcacctatccatgttacgtatgtaagaagtcttgagatagctaccccgccataagtaatgtgtaatcattcctcgaagctatatttttgcatcatctcaaagatatgctccttcagagaattttattatcattatcaaggcatatctacaatttgcccaaaggagtaaaatatacagtttcagacatggatttcttaatttcgtttatgaattatatattctcccttcgttccaaatcctttctgccatgaaggagtatttgagattttatttctaaacctactcacattaacttaggttagaaaagcaaaattaaaaaaaatttagaattatttaattcaaggtataatatactgtgtgtaaattgaaggtttattttgtgcttacatatctgaaaaaaactggaagtgaaagtatgcaactttctttttattgactcttccttactatattggcttacatttttcttgatttaacctgttaccaaagaattcttgcttaatagtgcaattttatttaagtgtccttggtggtcattattgagccatagttaaaaatcttaatttttaaaaaacaaagccgcatttattttcatttatcttaaattattttgcatatctaacttggttttcttttatagattttgttatatcaaacagtgagtttgaacatgtttcattttcaccttcctaagttttatagtgtactcagaattgctaccactctcaatattaaacaggaaattagattaaatgtcctactcactcacacataattgtcactattagcctaattaggtgattctttcactttaaaattcttgcttctgggtagattttacctttgggtgtttagactaattcttctacaacctggctggagagaatatctaatcccactgcgtgctattaggtataatttatgttggtaacaaacatatgtcactaaatttcactgtttatttcatcacatttttcagctgaacaaagattacaaattaatgaagtgaaagctagcatattcagcaaagcacagttccaaataaagtttctttcttcacattacactaacacattatttattttcccatcacattgcagtaacacattatttatttacctaaaataagttcttcaactgattttagaattctacctgtctattcattatttaaattttattactggacttatggaagaatgccaactgcatgatgaaatagata

SEQ ID NO: 5845 - DNA, 729 bp, mus musculus
acatttaccttgttttctctttattcccattaatgtttttcatattgcgttcttctctccccttctttagttgctcacaccatttcatccatatgatttcctttttaagattttcatcctttaataggtcacccttacagttagtatttggagacataaaatgacagtagttcatatgattttctataactacattcctttttctgtttttcttaatttattttctgttaacatgttcagtttggtttgtatacaacccacgctctcataggtattctgtgacttccacttgtctttttctgttgaagtttccatagaagggcacctaggaatacttgctgactagacaaagtttgttttcttaaacttgcaaggcagaacaccagccatcgaccatctcaggaatgtttcaaagagggaggtccagcagaattggtgaaacttggtaaaataaaccagttactggaaaagtgatgagtttatctttggaatattagtctgtgtaaaatctgagtttagttaatctatctatggtcttattgtggaaaaatatggccataacactcgttaaaataattttcactcaagctacactgcatggtattgtttttcagtttaactgttttgtgaggcatggtacagttactttccaaattttgggttctgtttaatttgtcatttttttctcccttactctatttcccttcttccttttctgtgaaggagaaa

SEQ ID NO: 5846 - DNA, 1467 bp, mus musculus
actctgcattggctaagtgcttatcctggaagcaataaatattaggtttctgagacccctatatttaaaacagtttagttacatgagttttgttttggttgagtatgttgaatgagaagtgtctttcaaaggactggaaattgaagaaaacataattccagaagtcgtagatgttatgttaaaattgttttatttctgataaaatgacttaaaataaccctccaatttgggatatttttatttaaactttataagactaacaaaggaccaatttacaccatctgcttcagttacactctgatgtgtattttctctccattttttttctctttaaatagacattctgtttggcaccttgtgcttaagtacatgtctttgagtaaaaaatgtagtttgtctgacttcctgtcaaaccaatatttattcacaaatatctgttttgttgctttctcacataaaatcatatagcacttttccaatgtgaagagttggctagttggtgatagtgtgagctaccagctggagcttttacagtttttagtatgccagctgctttcatgatggacaatttgttctctgcctttagctttactttttttttttttttttaaacggaagtgtgttacttttgctccaattatgagaggacaggatattgcctcatattttaaaagtacatattttgattgttcagttaacaataacaatagcatttcttttgaaactattattctggtgaactgttcttgagccaaaggtgaatcagacactaagcctcacctctctgtaagatatctttcaactatctttaaaaagttcattcgaagtttctgttaacatagcatatttgaagaagagaaaaatggaacaagtgctgggaagatagaccagaatctttcacttataagtgtgttttttgtggaataattgctgggcaattctaatatttttgcctgtcctcttgctgcttcaggaaagtaagaatcagatctgcttgtcctgactttgcctggggactgttttacaatcaatgagaagcccgtacaattattttctctaagttatttgactatgtttctgaaacaaaatttgaactatgaggggtcaacaataaaaacccaagaatactgaaaatgaacttttccctggctatttataggactcttttgtttggaagaggcttctgtttttgccattatcttcatgggcattttttagcgtatgtgacaacttggaaacaaactaaattcagttgtgattaaatagaaaattcatagtcttaaaactcaccatataaatacccattacctctatgaggcttaaaattatattataaccagagcacttcaattcactggtaaattacagcaaaaaataaaaagaaagaaaaatacacctaaatcaggttatatatgcagcctacgagtttagaaatgtattgttgagtagcaaatggatgttttcaaa

SEQ ID NO: 5847 - DNA, 2538 bp, mus musculus
ttagccaattattttcaaatcgtgtatttttcttattctctcctgcattggaagactattttatacaatctttctttcatactgtccccattacctcagtgaaagctccctaagagagagccagcatcttttctacagtgtaagctggttgttgggctgcctatgtgaccaaggccaagtcaagctcaaagcctgtaagtctagatctcaaagattcatatgacagtggtggagtcagcaagtacagaagactttgaagcagtacatatcacactatggatttccctcttgagaattagtaagagcagtgtgtgttcagagctttctctctgggtttcagaagtcacctccacagtatatctcatttcaacctagctacaaagtaggaattcacagttactgctgaaccattatatttaataaaacacaatgtgttcttttattgtgaatttcacatgtgtctaatttgatgtatattttttccaatgtttttggtaagttttggaacatttcttatgtgaattactaaaaaaaaaagcctttattatactcatttataaaagatgtttatcaaattacctttcatcagtcactttcatttgccccaggagttgcaacttcaataattttaattttgcattggctttttgtcctattccatcttaaactgcccttctcacttatctatatatttattcatacatacaatgtatacatattattgtatttatatttatactttatataaatttatgtttatatttatacattatatatatataatttagatacattcagtactatatatcacaagataaatatgcttaaattttccaaaattttatggtttagttgtggtattaagtattaagatatgctgtctctcgtttttacacttcttttttgtgccttttgctaaaacttcttatcaatttgaatgtcatgaatttttttatacattgactgtcttagtctattgcatgttgctataacaaaataccacagactgggtaatttacaaacactagaaattcacttggctcatggttctggaggctgaagtgtaagaacatggtgctggcatctggcaagggtctttgtgctgtatcatggcagaaggtaaaagggcacttcccaaaacttctttgttaaagtcattaaaatgctccataaggaagagccctcatgacttaatcactctttaaagggccaacctcttaatactgttacaatggctattaaatttcaatgtgagctttggaggagacattcaaaccatagcattaacaaaactactaaatgttaacatgtaacttagtataaatagaattgttaaaaaccaattcagatcactctgtgataaagaaaaataaatcatttaaagaaagaaaattcaacatcatagaaaatacttcaaaaagtaggatgtcagccaaacgtggtggctgagctggtggtcccagcactttgggaagccaaggcaggcagatcacttaaggtcaggaatttaagaccagcctggccaacctggtgaaacttcgtctctactaaaaataggaaaattagtcaggcatggtggtgtgtgcctgttatcccagctactggggaggctgagacaggagaatcgctggaaccagggaggcagaggttgcagtgggctgagattgtgccactgcactccagcctgggtgacagagtgagtgaaattcatctcaaaaaaataaaattaaattaaatttaaaaagtaggatgtcattcttcaaattctatatagtaaatgataatttttaaaatttttattactcatcactttcacattgaatttttgatgtatgtgagatattagaaacaatattcattataatcagtaatttgctaattttttaaagataatattttatttgtggaaaattcacactcacctccttcatccccaaaagggaaatattagtaagaagtggggaaactgagggaaggaagcaagatcaagtggtgaaactttccgtagcaaaaatatattggcaatgaaaaatattaaactcatttcatagaaaattatggactattgttaataaaatttatattattttaatatttttattcttatgcctacgttttaaaaatataaaagagaacagtttcttaattgtacaacaagtgcctggattttcagtttgtgtactctaagaagttgtttatttcattaaataattatgttattaccttagtgaaaacagaactgtgaaaaatttaatccaaatttcaggctgtagaaggtacaacttcgggattattagaattgtacacaatgtagtctggagtcattttcccttcctgtgttgtaaatgccaactgaaggctttcacagaatatgggattctgtaaaattacaaggcagattataaataacaagggctggtttctctatctaatgaaggcagatgtttttgattcccaatctacctttgtgtatgcatttccataatagcatgacatataatcttcttgtctctttgatataaatgctacatgagagtt

SEQ ID NO: 5848 - DNA, 2538 bp, mus musculus; identical to SEQ ID NO: 5847

SEQ ID NO: 5849 - DNA, 2538 bp, mus musculus; identical to SEQ ID NO: 5847

SEQ ID NO: 5850 - DNA, 1711 bp, mus musculus
aatagcaatgtaactgaaaagttaaaaattgctgctgtctttcatctttatttgccctcatgtacctgtttcactcttctctacacactgactttctctgcttctttaatccacataagaaataactagaagccacatactacactgttcccagtgctttatttacttttttaaaaaatatataatccttaaatcactttttgggggaaaaaactctgactgcatctcttaggtccagtccaataaactaagatcataaaggggtcaggtgcaacagtatttgaggacttagagctataactgaagtcaggggatgggctgataagtggtttattaggatgttggtggacacgacaaacaaataccaattacaccaaagcatagttctttacccaagtatgtgtgcccacaccctactccagacattaaacccgaatctctaatgtattatctcagaattgagattttgaagaaataactttcccaggtgattatgatgaacacctttacccttattgaaaatcattgataaaatatacttataagttagtaaaatagaatagaactagttctgcttctcatctcaagtactttggatatctcatgtgaaatgagccatgtctgtcaggtgcacactggtacaaaatctttgaatctggaacgatcatttatctgttatttactttgtgaagctcatgaatctcagacttgtgtttatgtttggacaccgataagatagaatggattgagggattacaatactgtacttgtatccacaaaagagtatgttatgagttaataaaagataaaaatggtcttctgtttaccactgagatgtagaaggtaaaatatcctgttccccagtatgggtttccttgacactttgcttatcttctttgctattctagttttattgtattccctgatacaactgggcagatgttccatggtacggaaacggtctgtctggtttcaggagacgtttctgaacagcaatgaacagttttacttcactttattcaaaatgttcttgttttttcttgagtctcacagcttttggttgcaaaagttttctagccactcagagacaactaactgcagtctacgtacatgtcttgatatcccccattatacctgcattctctgaacatgatgccatctgaataaaaccaaagcattaacacaatctaaaatatattaattgttcctgataattatgacagaatattttgccctgtatgtagaaaaaatgttttttgtcagaaatggcattttcactctttttgctagaggggatttaaaagtttttccactttaaaaaagcatattttaacaatgagaatattctttgaaggttagaaacgacattaagctttcaagagttggtatagatctatgcaaggtcactactaatttgctgagagtggcaaacatttaaaacatcatacatgaatataaaccaagatctttacataatatatttagcaaaaggatgggaacagttatttcacaatctatcccaaaatataacacagggatcaagtcttactcatttttatgtttacagtcttagcatggtgccttgtatataatgtttcttttgcgtttgaatagattatttagcatgccatttcattttttaaacggataggcatacaaatttatcttaatgattcagaattgaccttgatgctttctaatgctgtggtgc

SEQ ID NO: 5851 - DNA, 208 bp, mus musculus
aactgaggtgaaacgtgcatattttttgaagatcacagcttccccaattcaaaacaagaaatagaaaattttagtagatctctatctatttcatatttttgtaattaaaaagaaatcccacaaagaaattcctgacacaaatagtttcagtggtgaattctgtaaattgtttaagaaagacataatatcaatatcaaacaaaactctt

SEQ ID NO: 5852 - DNA, 225 bp, mus musculus
gcaataatatttcctaaggttcttatgggtaagttaaaaagtgttcatgagatctccatatgcaatgtaacaaacttacaacaatatttgactttcatcatttgcatactaagaaaatgacttataacttatttctatgtaacagagtattttctctgtgaacttcattaacatgggtatttttccatcttcttgatttggaattacacttcaaatcatcacatg

SEQ ID NO: 5853 - DNA, 810 bp, mus musculus
ttgttacaaaactaaaaagagataatgttatataaaatcctgttgaacataactattttttaataattatacttcaaggtttggagcagatacactttccattttctttccttcatgaaaatgagtgaggagtctgttttaaaaagaagaagaaatgatcaagagcaaggggctcaaaccccacgagaaatcacctattcaccaaaagaggggaaactacctcttgacacacaacgtgttgaaagctctttttaaaagctctgtttagaataccatctggtcccagcatgcttcataaagcaaagaaaagagaggatgatggggcttggcacatctacagctctccctgttagtgaaggaatgctcgccataatactggctaatggatgaagagcaaaatacaaaacaaggagcagcaagtgggacccagttcgttaggcaatgtcacctacatgtaaatggggtcatgatcaacagtatctcaaagactaagcatgcttatgggcttcaggatgtagaaaacatcctgagtatccactaatagggtctggagtaatagacttgaaaagcagcattactgaaagagtgaacagattgctgggctgaactaccatggtgagagccagcagcgtggtgccaaaaacagtcaggactgttatgatacctgagttaacacagagatgatgccaatgtgcccaagcatattttttagaattagaatggccctttagttagaaataataataataaataggcagaagtagttaccttaaggaatcatgttagcttaatgctttctttaaggggata

SEQ ID NO: 5854 - DNA, 1374 bp, mus musculus
gagtactttatactctactttaggcccagcatttgatttaacctagggctatatgtacatataaattttcatggacacatttaatacatttccatttttatagccctctcaaacttttcaaatagaagtgaagggctgtttaatcccttctctttgagagatttaggaatataatatatgtgtatacaacctgacttgctggctctacatttggctttttttgaatcagatattaatttgagaagacagtttaatattttcaataaatattacatgttgctgtttcacacaagagggatttgtcttctctgaattaatttagtaacctgaaaggtttcagatggtagaacattcatttagatgcaaaatcacaaggtacagtcagaagcaatggaaacctctctaatgctcagttgaggaccctgctgggctaaaatgtctctacacattttccttctcatatttaggagaactgtaaatcgctggaaacagctacttcatttctgttctctggccagtgcttgaatcccaggagacattccagggtgtatgggtttgatgtcttcagcacatcctccagaggactctctatacataccacagttgaactggctgcctttgtaagaagttttgatccagcaataagattgcattatctcttttccctggagagaaagatcccgtttgatcaagtttacagtcacctcagggtcagcagggagcattttgcattatgtcttgctggctcttccgcagcctgcagtggagtccatctgctctcctgacagtacccgtttaaacttgagcagcagcattaagaagggaggggtcaggaaagggatgaagcataaagaaatccaggtatgaattggtgaccagatgtttcagttggagggagcaatgtccaatctattgttagaaattcccatttcagtgttgcttaactatactagttttcagcaccccagtattttatgttctctcaggtttagggttaattaccattcttctttagaagcacattttgaggacatcaggtgagtgaagagattttcctgccctatcagagtggttttcttccaggaaaattccatctttctattaaaataaatttcacactaaaaacttgcattaaaatatttttaaagaaaaatatcagtatttcattttatagtaatcgctatgaaagtatgaaaccattctatgaagcacttactttgcctatggaaagttgtttcatgtacatttctaaagcattaacaaatcacaacacatacagtgtcatggacgattagaaaattattagctaattaatttttattagccaaaaaaacccctcaaaaattaacatacatggctttcttttctcctgga

SEQ ID NO: 5855 - DNA, 775 bp, mus musculus
aactcatattgcaaactctccctcccaccaaaaaaaagagtgtatctccctataaaattcaatgtagtactgggggaagaattcattggaggaaggaatacctgcacatttcctaaaggtgtaaataaaataaaagcataatatgtaggatgcttgctgtttttatatatttcacttactacttcaatcaacttcaatgactaggttagttttaggataggcaggcccaggagggaataattctatcctgcctcagtatgacctattagttatgataagaactgctctttagcattgacatattccagtgctctcattcatcaaactagaataatatatctaagaaagatatgataatcttggggaaaaggagagatcagtgaaccacattttgaaactagttttagattactacctttagtatttctaaaaagaaaattacattgctgtcgttttaaatcctttgaaataaatgtattttaaaagtcatcagggaaaaccattgttacacgacaatgtttcttctagttgttgtttgttttgttttctttccctagctaagttttactttcttccctgagaaaaagagtagggaacagctgtatgatctatgcaatagttgatgcaaaactacatcgaatcctcatgctgtttgccatgtctttgtctattgatatcagtaaaagcaacatgacttggtttctcaaacatacaagtgagatcactctcctcatgagcaacattcaacatgctggaagaccaagtaagactgcag

SEQ ID NO: 5856 - DNA, 178 bp, mus musculus
ttacaaagtaattcacaaaaggaattctaagagaacatggaaagctgatcataaacttaatgaatttgtagggatagaggaagaatataggaaaatgaacaggggtagtgtgtattgattacttttgattatggttggaaggtattatgtgaaagaaatgagttcaaaaaaagaattg

SEQ ID NO: 5857 - DNA, 809 bp, mus musculus
gaaaatcaggctaataactagatgtgaatagcacccagccctctgtttttctcccacatcaggcagcttgtgttatgtagaagtcctaaaattcttggcacggggcaagcaggagcttcctgagtgtataatgcccacaactagcctatgatgccaagggcctctgtccaagatgaggtttggcaaaacatatgtcaattatgtcttctttgtcacactcaggttgtcactgctcaggtactcctgatcctgagacaccagagagggcttatggctccagcctcatttgaagcataacttttcctgggacacaacttccatagccttaaggatagatgtgagtggaggaaattctgaatcattgatttcccctgccattcctaagccaatgacaagtcaaattcagtattagaagacaattgcaccataacccgctatctaagcccttctgcttaagaaactccctcctccctcaagccctggtctgtccctcaagccctcaaaagaattgtccacagtggagtgtttgtgcggagtgtttgtgtgggtagtgggcagcaggggaatagttagcaattggtagcaacagctagatgcatctccttccttctgtagaaatgggaacccaatacaacattagttactttctgggctaaatgttctcaggctcagctcatacggctgtcttaagactccattaaggcaagattcccaacttccaggcttctgtcttctgcctagcatagatgtctagcttcttacgtgtctgtaaatgtctctgtaagaaacaggaaaaacttagtcaccat

SEQ ID NO: 5858 - DNA, 670 bp, mus musculus
attagttaaacttcccctgactgactctgtgacaacatacaaaaatgtatgtcatgcattctttctttgcccttctaagttagtcacatttaaaataaaaatagcctgtggacatatgttactttttctaataattatgctctttcactgcttccacctctcaaaaataaaggtcttgctgtatctcttttgtcttatagagatgttaaatatgataagagggttaatatggaatatctgagttatgatgaggtagtatagacgtgtagcatggttttgatcagaaaacagtgaaattatgatgaaatataatcgtgccagaacatctcatgaggactaaagatgaatactttctgtaatcaatggttgggtatacatgatgataattccaactgaacttgacttttgaaagaattagagaaaaatatatgatagtactgggagggaagaggtagaaagtgtgtgatcaagacagatgtcaagaagggaaatacagctgaaataaaaagtcaaccaggatgatcccagcaggcataattgtattctaaaagaagctgatcctcaattcatgtagtctttgtgagaacaaatgattaaattatatataaattgtaaaattatttagaccaagtttgaacatgtgtagataaaagaaataaaaataagatat

SEQ ID NO: 5859 - DNA, 2966 bp, mus musculus
aatgtagtttcagagtttggttgagcccccttcagtttgtttttctatcccaaataaagggtgcctttacagcttcaaattttcagcacctgtttccttgttgtcttagtctgtttgtgttacagtaaaggaatacctgaggctgggcagtttataaagaaaagaggtttgcttggcccatggttctgcaggccatacaaggagcatgacaccgccatctgctcctggtgagggcctcaggaagcttctactcatggtggaaggtgaacgggagcaggcatcacatggcaagagaaggaggaatggggggtgggggaggtactaggttctttcaacaaccagctccaggtggcaggggtgaagaagggagaagactgtcatgggaaataattgagaactcattcattactaagaagatggctccaagctattcctgaaggatctgccgtcaagacctaaatacctcctgatatggtttggctctgtgttccccacccaaatctcatcttgacatgttgagggagggaccttgtgggaggtgatttgatcatgggggcagtttcccccatgctgttcttgtgatagtgaaagagttctcatgagacctgattatttgaaagtggcagtttcccctgcacatgctctctctcctgctgccctgtgaagaaggtgctttcttcccctttgccttctgccgtggttgtaagtttcgtgaggcctccccagccatgcagaactgtgagtcaattaaacctcttttctttataaattacacagtctcaggtagttctctatagcagtgtgaaaatggactaatacacctcccttcaagccccacctccaacactgggtatcaaattccaacacaacatttggagggaacaaacatccaaactctatcacgtgttcttacccaatggctatgtgtctttatatttaaattgctttttccatctcatttctttgtcctcaattgctatcttttccgtcatcctctttagatggatctctttccttttctttcaatactacaccactttcaggagttaatgataaaggccctaactggtacctactagtaagatgcagcttatgaatatgttttggtttggtttcaattttgtatttggtttgaattttagttttttatctccattctacccaaagtagtaaacaatttaatgtttgggccaagagcagtggctcatgcctataatcccagcacttcgggaggccaaggtggccagatcatttgaggtcaggagttcgagaccagcctggccaacatgaggaaaccctgtttctactgaaaatacaaaaaaaattagctgggtgtggtggcacatccctgtagtcccagctactcagtaggttgaggcaggaaaataacttgaacctgggaggtggaggttatactgaaccaagatcacaccactgcaattaatcctgggtggcagagtgagactctttttaataaaaccaaggagtagctcttccatgattgggaaaagttaagttattttcttttcaaactccattttccatctgaaaagatttagtttgttgtttatccaatccactcatttgatggccatttttacgtacatgaatccttgaatttcattccattttctggaatattttacatgtgtgttcttataaaactttcaaaagttgtttttatatatgctttagaataagtattgttgatacataaactgtagcttatatagtgattttcagagtgttaaaatttaaaatttagattctgtgtattatttttgtaataatgcaaatactgcaattaaagataaaaagagagagacaaagtgaacaaacagggatctgttgagggagggacctagaaaatatcaatcactaaaatcaaataatcttttcatctatatccttaattcatatttttatttatagtgattcctccaaatcactaaaagttcagaacacataaaaattctagaaagttctaaacaaaatcttctatgacccattacaccttgtttcagtctgtaaactcttcagctaatggtctgcctcatccttatcattatctaattcaatatttatttcagctcaatgtaagtcttaaagattcatttgccattctcctgcaaaagggaatagcactaataggactcgctactcaaaaaagattggtttagaagattttgcccctttcttacccaaaggcagctcttttactgatacttccccaagcctgttgtgctctgagaacaagcttttatttcccctttcctggaatattatccaagtcatttctgaatgacatattatccaagtcatttctgaatgatacttccccaagcctgttgtgctctgagaacaagcttttatttcccctctcctggcgtattattcaagtcatttctgaatgacccagtttgcatctaaagtccttattgtttctaaccagcagcacccagaactggacatcatctttacctcctgaataaggttagctgtgctagtccgtatcagataaaactggactgggttcacatgcccagtttgaaaatgctttctgattgtcagtgattcacccttccccctagtgttggtttttttgttggtttgtttatttgtttttgcttctcatttatcatctttctactctctcatccgccctaacttcacttttgatctatttaagatttgtctcaccctcctcccagaatgctgtttggcctgctcctgatagtgccagcgtgtggtgacttgctatatcacagacatgcaccaacgtctgctatttgactgcataaactcagtgtttgcccagtgaacttcagatcacactgagcatctaattctaaatatatgcttattaaggctctctgtgcagtaacccacacaattccttgtattatgttaatgaagcaaccattctgtttatttgccctcaccctaattcaaaattacacatggct

SEQ ID NO: 5860 - DNA, 292 bp, mus musculus
atttcaattgttaaaactagaagtgtctaccatgaaatgatgtttgtgattccagaagtttgtaatgcccttggggacaacctgaacttacacttgtgcaaatgcacaatgcccattagaacagcttcaatttgtcctacagggagtcctctgacactgttatgagaatttcagtttttcattcctttctcttctggcaaaagaccctagtggcacaactgggtcatttatgtgctcaaagcatatttaataaacaacatttttctatgcttggaaaaagaaaccttcaaaa

SEQ ID NO: 5861 - DNA, 192 bp, mus musculus
agaggactatggagtataagtgtatcattatgtggaagatagcactgccatcagtctataacctgctgtaagaagcattggggaatagcttcacatctaccaagtctgtccacaggtttactctcctgtaaagaggcttcctggggtatacctggttttgaaatggttaatattactgtgtcttcatcttac

SEQ ID NO: 5862 - DNA, 1531 bp, mus musculus
ttttcaaacaagtataaattctgcaataaagagatgtagtttttttttaagattgagtttttgtttgttatttctgaatggttcatcagtatgttaactataccttttatcgagaaggaaaatcactaagttttattcaggctctaccaacccccattatatctactgtttgtttatgtcctaaattaacctttcatcctatgaagtaataaagttcattttaaaccaacgattaccaaatgcatttttttcaaaggaagggcaaaaaccaaatggcactgttttctctgaatggaaatctgtaagttagttaaaatgtttatacttcattttaagaccaaacaccaataaggacttctgaaaaattgttccttttttcacataatgttagtgactaaattaaaatttcaagaccactaatggattcaatcatctttattaacctatcatcagtgttacattttatacataatatcttgtattctcaaagggctctactttagtacatcatgttaatagtaaaaagccaagtaagatggctaaacctcaccctagcattttaatatcctccggacaagggaagctagaaagtcaagtcaatcactttatacatgtaagagtagtgttccaaagtaactaagaagctgctacatttttaagcagggaggaaaaaactttcattttggtctttgtgttccagcaaattatactttcaattaacaccaacaatgatatcataaaaaatgctctgcttttaaatttctgaacttcttcaatacaaattaaaatagtactggagtcttttgggaggccaatagctagcagctacattaattggtgtagaggagcctccttatcgataaccaggtccaggttgggtatagccctgaccaaagggaggacggttacgcgcataaggattaggcccacttggaggaggggtcatggtacttccaggaagtgaagtaaaacctggtcttggttgataggccccaggttggcttggagccattccaggttgagaggcaggagccacagtataattagtaggctgagaagtttgggcagtgtaagtttgtgcaggataattgctcgcctggtactgctgtggcggctgagcaggcagttgttgaggctgaccagaaaaggcaggagctggtgcctgggaagttggttgctggccatatccctggaactgctgaggttgttgaggtccagtctgctgactatagcttgctgaaaaggcaaaataaataacatgtatcttatcttttagtaaaactacttttccaaagaattagtcttactgttaggtggaccaaaaatggtgagaaatttaataaatatgtatgtaacaagcagagtggtagattccatcacataatatttcaagaccaagtagttatcaaagaggcattctctacaattttttaaactctctaagacataatccctgagagcaaattcctgacatagcataattcctagaacagatgctcaaatgataaatgaaagaattatactttctagg

SEQ ID NO: 5863 - DNA, 1531 bp, mus musculus
cctagaaagtataattctttcatttatcatttgagcatctgttctaggaattatgctatgtcaggaatttgctctcagggattatgtcttagagagtttaaaaaattgtagagaatgcctctttgataactacttggtcttgaaatattatgtgatggaatctaccactctgcttgttacatacatatttattaaatttctcaccatttttggtccacctaacagtaagactaattctttggaaaagtagttttactaaaagataagatacatgttatttattttgccttttcagcaagctatagtcagcagactggacctcaacaacctcagcagttccagggatatggccagcaaccaacttcccaggcaccagctcctgccttttctggtcagcctcaacaactgcctgctcagccgccacagcagtaccaggcgagcaattatcctgcacaaacttacactgcccaaacttctcagcctactaattatactgtggctcctgcctctcaacctggaatggctccaagccaacctggggcctatcaaccaagaccaggttttacttcacttcctggaagtaccatgacccctcctccaagtgggcctaatccttatgcgcgtaaccgtcctccctttggtcagggctatacccaacctggacctggttatcgataaggaggctcctctacaccaattaatgtagctgctagctattggcctcccaaaagactccagtactattttaatttgtattgaagaagttcagaaatttaaaagcagagcattttttatgatatcattgttggtgttaattgaaagtataatttgctggaacacaaagaccaaaatgaaagttttttcctccctgcttaaaaatgtagcagcttcttagttactttggaacactactcttacatgtataaagtgattgacttgactttctagcttcccttgtccggaggatattaaaatgctagggtgaggtttagccatcttacttggctttttactattaacatgatgtactaaagtagagccctttgagaatacaagatattatgtataaaatgtaacactgatgataggttaataaagatgattgaatccattagtggtcttgaaattttaatttagtcactaacattatgtgaaaaaaggaacaatttttcagaagtccttattggtgtttggtcttaaaatgaagtataaacattttaactaacttacagatttccattcagagaaaacagtgccatttggtttttgcccttcctttgaaaaaaatgcatttggtaatcgttggtttaaaatgaactttattacttcataggatgaaaggttaatttaggacataaacaaacagtagatataatgggggttggtagagcctgaataaaacttagtgattttccttctcgataaaaggtatagttaacatactgatgaaccattcagaaataacaaacaaaaactcaatcttaaaaaaaaactacatctctttattgcagaatttatacttgtttgaaaa

SEQ ID NO: 5864 - DNA, 1531 bp, mus musculus; identical to SEQ ID NO: 5863

SEQ ID NO: 5865 - DNA, 1531 bp, mus musculus; identical to SEQ ID NO: 5863

SEQ ID NO: 5866 - DNA, 198 bp, mus musculus
cacacaatgaatttttgaatgatcaacatattggcagtagtatggtttagggttttgctctaatgtataataacctacttgcaaaattctttatagacagtctttcagcaaaacaagtgattttgaacattatcccattttgtgaacaactcaaattttaaatattgatattacaactgagttaccagaatgactaat

SEQ ID NO: 5867 - DNA, 841 bp, mus musculus
ctgagaaatatattgcaaagtctaatataatatctgtatcttttttttataattcttataatgtcacaacttaactttaaacatttgtgtagaatagtgaggcagaagcttggactagagacaaagccatattagaatacacattatcaaaagataaactgtatagtctgagccaaattgtttggggccatcttgtccagcacccccacacaaaataagaaagtaaaaggaaagagttaaacccaggagtctgcaaaacaaaggcactggagtagattggagatgcttccagagttgctcattatatatggggtttgagcagacatgaagaccagtggagtctactactagggaaaagcaccattctggctttcatataacagtgaaacactctaatatgcaaaattctctttttaatatccttttgtatctttgggacttatcttgatttttcccattgtctagttcacatttctcctgcctcaacttctcaactttaagcaatgattgctgactttgtactctgtttcctggcttccgatttcacatttttcttttgttatagtgcctccaagcattaatcctttggtaaggagtttttggctcagttctagggctttccatgcatatacagtgcccttataggcagccttatagttactttgagcacttattgagatagttaccaaggtcacctggcctgaactcacacatatgaaaaagtgcctggtgttgctaggtggtagaataagacttacccataattgacatatatcatttttaagattgcaaactttctttaacattttaaactagttttgatttaaaaaattcaaaagcg

SEQ ID NO: 5868 - DNA, 263 bp, mus musculus
ttccatacacatatagtatgttcaataaatattccagattcattagaccttgtgtttaagtgacatccctacacaaacataaatgttgttcatcacatactgttattactagttcatttgtaaggttgattgccaaagttgaatgtctatgaaatgatattagttgtggtaatgttttcttcatttcattttatgtttttaaattgtggtcattgaacattgtacacatattgaatctctaatgggtagaagttaaataaata

SEQ ID NO: 5869 - DNA, 1431 bp, mus musculus
gtcatctgctccaggttgggtttagatgtaccatttttctccacactgcaggtctgtgagttctagtccactctccatgtatgtcatcctccttggattagcagatcagcagggcatgctcttatcatagtgatgtcaaaagcacaaggcaatacacagaattacatgagactcttaagacttagattcagaaaagcacacggtcatggatgactacataccgttagttaaagcaagccacatggtcaacctccaagtcgagaggctgagaatgatactacactcatgctaagaccatgccaagggtaaaaagtcataattcaggtttagctcagtggccagtgtcagggagcattcagtctatagaattctaaattacatacaaatgtatgtctcttaaagcagcagtctccaacctttttggcaccagggaccagtttcgtggaagaccatttttccatatatttggggtgggcatggtttggggatgatttacaggcataacgtttattgtgcaccttatttctactgttattacattgtaatatataatggaataattatacaactcaccataatgtaggaacagtgggagccctgagcttgttttcctgcaactaggtggacccatctgggggtgatggcagaaggtgacagatcatcaggcattagatactcataaggagcatgcaacctagctcactcatatgtgcagttcacaatacagttcatgctcttatgagatctagtgccactgctgatctgacaggaggtggagctcaggcactaatccaagtgacggggagcatatgtaaatagaaatgaagccttgctcattcctctgtttgctcacctctggctgggctgcccagttgcttacaggccatggaccattaccttatgtcacttaaagcagcagtctccaatctttttggcaccagagaacagtttcgtggaagacaatttttccctataatgggggtgggagatggttttgggatgatttatggacattacatttattgtgtactttatttctactggtcagtggactggggtttagggacccctgatttaaagaactgcgttaatcacaaaaacacacatataattaatcttgaataaaaatagaagacacttatttagcataaatataaaatgttataattactgtggtgcaggaaatgttaaaaatactaagcaatggttttcaaaacaagtaaagattaataatagattcaaccaaatgtgtgagaaatttttaatttgaaaaaatgtagttgtcaaaagtaagtataattcagtaacatgtttgcttctatgtttttgaaaactagatagtatgcaactttcagaattctagtttttaaatgtggagattaaattagactgataacacttcttaatgaaaggtagctcagcatcagagtg

SEQ ID NO: 5870 - DNA, 1056 bp, mus musculus
gtcaccccacctagcagcctcagtgagacctatgcatccaagccaagcgatgctcctaacaaggcctgacacttgcactcaccatcaatagatattagggactacttgcaggaattttggtattgccatttcaaaaaaaaaaaaatgcccatgattactatcagacaccctgtcatctcatagagttagctattttttttttctggattttggagaacagtctactacttgaaatttgataggttgtctcatctggtgctcacaatacctccataagaaagaaaaagtggtcatttataaaatgaggtaacaagttcaatatgatcaagtggcttaggtatagtcactgctgatgaagactcccaggcctgtcagctaggatggtgtacttgagcaatgaatctgggaagctgaccttcagtatatcctgagtaacatgttgaggcaacctgatgtacaggaaaacatctaggcagagtttctgtaactgcagagaggtgccaagagaggatgaaaaataaaacctataaggatgccaaaaagaaactttttaagaaacctgagcaaaactgtgaagccttttcagcaacagccagggctcttatggagaactgaagtccagagaaccttgaccaattcatgagaatggatgataaattatgaaccgaatcaatattctcttccaaaacaaaagctgagacatgcattatagatttagaaaacacagaggcaagagaaatcagagtacaggatcacagttgaaccttaggtattcttgtctggcctctttttaatttgttttacagatgaggaaaatagggtataagagttaaacagatagcaaacttgataaagcaagctaatggcggcacttagactgaaaacctgattcttcatcttaatccagtgctcttcttacctcacagctcagctctaactgtctgctacatataggaaggcagttacagcttctagaaattcctcccatattctggttccagaatttttgcattagatacactacagggtggtcttctctttctgtctctctcaaga

SEQ ID NO: 5871 - DNA, 134 bp, mus musculus
tatttttgttgattaatctattgcttttattacctaaccttatttacaaatgggatgccttaatttttttccttctcataactgaaaaccaaaatatttcagtaacattttcttaaacgtatctgttatttttc

SEQ ID NO: 5872 - DNA, 304 bp, mus musculus
taattactatttttatttatttctgagtgttttactaccctaaaacttagtgatataaaacaacaatcattcacttgctcaggataccagtgattggcaacacaggaagtgctcagagggcatggctcatctctgctccttatacggtgtcagctggactcattcatgctgttgtgggtcatttggcaggtcatctggttggtcctggatgactttcattgctggcaactggctgacactgtcagccagggtatgtcaataccatccacattctatctccagcaggctactatggactttttta

SEQ ID NO: 5873 - DNA, 767 bp, mus musculus
aatccaatgaatggactataataaagaatgagagttttttcagagttcctttttgcctgctctagaattaatgaggtacctatacaaacctagtaaattattaatttatgaaagtgaagctataataattatactaaactacagtatccagaagatactactagaaaagatttaggctatccaggatatgtttcttttattctagagttgatgacaaagtaatgagagtaaagagacaatgacagcaatctcagaggaaagctgttttcaatggaaacataacatctgggatggggttaataaaagaaaatggttgatctctttgattccagtaaaatgactcctctgctgagcaaaaatttaaggggaaaaaacaccaaagagttgacctctctaccagagtgattctctggacagaaatcaagaatgcttctatgttctcaacagcactcatcatcttgctggccttcagtcagtgttaataattataacatgtctgtccctactgtgacctctgagagaacttgtcttccatgtcccttctcctgagaagaccatcgttttctctctgctccagggccagcccacttccttagacagggatgatcttcatccaaatccagaccattcctactggcagctcttgtctggatccaactggtctcagctggaggtccagatggctcattcctcattccccagcagggtttcagcagcatccaccccttcctgatctctctgccattagtgccatcaggcttaatgtt

SEQ ID NO: 5874 - DNA, 5546 bp, mus musculus
gcccctctgcaactgattctgcttatgctatagtgatgagatctctgacactcacctttgttacaggtgagtagtgacagatacttcggcagaataagtacctcttagtaaaccctgatcagttgtggaaacattgtgttggcttacgagatgcatgagaatctatgttggcagatgcttgtaggatgcagggcttaatttttactttaaaagatggacagaaaggagtcgacttctacatttacacctgagaattggattgaatatacagaaataaaatctatgaggaaagtttaccactgaactctctggggttgtatgtgtgactaaacaggaaggaaggaaaatatccaaaggctatatttgacaatgtcaccaatttgcaataaaactttttcatgataaatgtccaaaggaaaataaagctttttaaaaattatatgccacactactttttaaactagaaatgaatatttctaaacatcttatcactaggcatttttttttacttacatgggatggctcaactggcaaaattatagattttttaaagatctgtggatctcactgactgtaattctctaaacaaaacatgtaattatctaaataaaacatgtccagctagctccacttgaatgccgtattagttacctttaatgaaagaaccacaaactttccacatttatggttgtctgaaataacaaccttagagacaggtatttaactttgatgttactgatttttcttgtgctcaccaaaacgaaggaggagacaatcacatcactagttattccattttcttttccaaggcacatgaattgtatgataaatacagtagtctctaccacctaaagattagatttagaacattgcctttgttgtttaaattataattctgttttcttttctgtttctagatattaaaactcctgaactaaaatcagaatactttattgtatttcagaatacaatgttatgtatattgtttttctaataatacataatactggagaaagtttgttaatctttagattgggttcaatatattatttatattttgtgaatgttattttcttacctaagtctaatatttctggaataagatcagcaaatttatgttctaataaaacttcatgtaatatactgtggataaacataacacatgaagttccttatcaaggttttctatatcattatcctttgtgtgtgtgtccaggtaacatttcacagcctgtactgatggatataaatgctgtgctttgttgccctcctatcgcattaagaaatttgatcataataacatgggaaataatcctgagaggccagccttcctgcacaaaagcctacaagaaagaaacaaatgagaccaaggaaaccaactgtactgttgagagaataacctgggtctctagacctgatcagaattcggaccttcagattcgtccggtggacaccactcatgacgggtattacagaggcatagtggtaacacctgatgggaatttccatcgtggatatcacctccaagtgttaggtaaggagcatcacatactgaggtatttcacatcaccagatttgtgactgaaacaaatgtctctctgaattccatatgctttatgtgaaaactgaagcatttttttccctctttcctctctgcagttacacccgaagtgaacctatttcaaagcaggaatataactgcagtatgcaaggcagttacagggaagccagctgcccagatctcctggatcccagagggatctattcttgccactaagcaagaatactggggcaatggcacagtgacggttaagagtacatgcccctgggagggccacaagtctactgtgacctgccatgtctcccatttgactggcaacaagagtctgtccgtaaagttgaattcaggtaagcgcctgtttcttgtagaagagtaaacttgatgctcaactttttcttccatagaaaataacgaataaccaaacagcaggtaagaaaatttgagctcctagcttgaaaatattctctcaaactgagaaatgcattacaacgctagaatctgtcttttagtagaacagccataaaaatagattttgttaacttagtgatctataggcccttactttgagattaattcttgatatgaaatatcaagagttttatgtagttttaacaatccttgttcagtagatagcccagaatgacagctattttcttcctgattttatttcttgtagtagttattactttgttaccttgagtaagagacaagtaattcttcccgtctcatcatccaaaagcaatatattaattaattctccaaatatttattgaatgctatttataagtttgaagctggtgatgcaaagatgaaaagctaaggtccacatctttatattgttttgggcaggataatctggtgtttaggagcaaagcctctcacataacatggctttttgttcaccagctatatgaacttgaacagtatttaatatctctgtctcatggtttctttgtctgttaaatgaggataataggatctacctaataggattattgggttaattaaataaaattacatatatatgaaaacatgttgtacatataattgtattaatatacctactacataattgacactcagcaaatgttagccactagatttccttatattaataaatgttggttattatatatatcgtattaataaaaattagctattgtgataattattacaactaatattaaatataatcatattaattattcctcataatatctttcatgtttgttcttttcttttttgcatcagctttattgacatctaatttatataccatacatttcacccatttaaagcatgcaattcaatgcttgtgtgaccattgctacaatcaattttagagcatatttatcacccccaaaaggaaaccatgtattcgttagctgtgttttccatgatcaatctcccatcaagtctagcctcttacttcatacgtcttatctatagatcagtccatttatcttcagtattacctgatcttcccttctgtagtaccaacattcaacccaaattctaaatcttttttcccttttatctccttaggagcttttcttcattctcctctctcttttgtttagtttttttgttccttaaattattttcctaaagctgctcataaaacacgcctatttttcttctgtatccaaaaacttggtgttatgacttcctcaaacattaactcttggcttctactcatatccaagaatttttttaaaagaggagcctacacttactgtctcttctatatcacctcacatctattccttaactcatttgtgtctccctgcgcagaaaatgctctgacaaaaagcatctcccaagtgccaaataaaatataaatgtttcattctttgttcacttaattagcttctttgtaatatttattataattattaattttaaatatctaataatatataattttatataatatttactaattttaaatattttattagctttttaataatacattttatgatcctgtaccccatgcatgtgggcctctttgggctcttcaaaagtgttaagtgcttctattcctctgttcccttttacatgcaatttcttttttttttttttttaatctttgttttttgagacagagtctcgctctgtcgcccaggctggagtgcagtggtgcaatctcggctcactgcaagctccacctcccaggttcatgccatcctcctgcctcagcctcccgagtagctgggactacaggcgcccaccaccacgcctggctaatttttttgtatttttttgtagagacggggtttcaccgtgttagccaggatggtctcgatctcctaatctggtgatccgcccgcctgggcctcccaaagtgctggaattccaggcgtgagccaccgtgcccggccttacatgcaatttccacctctccataaggcacttctttccctatactttcttcttccattgcatttgatcaattcctgttgaagttttaaaacttagtttgacattgatcctctgggatgatattctcttgccttgaattttggttagctattcctcctctgtgctcacagaatgcttcatgcatgcctctgtcagagcacctccatagccctgtaattgactgcttggcactgttttcattcacaatgcttctgacacaatgctcctttctgatgcgttttcctcgtattctcacttggttcttttcttaactttcagtcaactttttcgttttcttaagtagatttatttcttctattcatctcatgaatggacacatttctatgtattccatctttgtccatcttcttattctacctttgtacttgagtaacctcatccatacctgtggcttcaaccactgtctaatttttgactctcgagtctatagttctgctcagatttctctccttggctacacagtgaccaaaaccaacttccaactggacagcttctcctgcatgcatcaagggcacctctacttacatatttttgaaaccattctgctctactccttcatgagccctatatctgtattttatatcttgataaatgactcaagctagaaactttagaatattctacaacatttctctttcttattccccatattcaatgccagtcatgatgttttgttgattttaccttaatttttttcttacatctgagtctttttctttctccctactgtcttagttggtcaaatagtatctcaggatactacttgtatctgatttgtatccaaatcagtaatcaggattattgcaatgtccttgtaacaactcttcctggacccagcttaacttcctccaatttatctcctctactgtttctggagggaactttctaaaatgccactcttctacttacataaccccagtggcctctcttatagttcgtattgagctaaacactttgacaaatcacaacctgccttgcgcttcactattctccatcctgtaccccatgcatgtgggcctctttgggctcttcaaaagtgttaagtgcttgtattcctctgttcccttttacatgcaatttctacctctccataaggtacttctttccctgcactctcttcttccattgcatttgatcagttcctgttgaagttttaagacttcgtttgacattgatcctctgggatgattttctcttgccatgaagtttggttagctattcctcctctgtgctcacagaatgcttcatgcatgcctctgtcatagcacctccacagccctgtaattgagtgcttggcactgttttcattcacaatgcttctgacaccaaatgtgtgtgagtttttttccctacaccaactaattctccaactctctggacaccacctaggtgtcctacaattcaattcagacactaactacctggagttagcacagaccccacaggttaaaggcttagtctcataagaccttcctcacttcagacaccagtcacaagtcccagattgccacctgaacttctaatcaactggctataaatt

SEQ ID NO: 5875 - DNA, 708 bp, mus musculus
aatattatttctgataaatatgatgcttgacttttttgttaaatactttaggtgatactcattaaagaaggaactcattatagaaagaatgtaatggggaaactaaatggttaaatgttggaaaagtcatttcaaacatggaaataataaaaaacttattccacaaacatttcattatttcaatgtaggcaaatgagtgtacaatgatgtatttattttgtgatttagaatcaaggtaattttggcaagtatgggtctgctcagtagagttctgggtcatttttctctcataaaccacactcataataaattatctattcattttctgttttggacttttttgaatgcagtgaaaatctaaagacctttgtaaaataatatgaatgcagtgtttttatctattgttagttgttttcattcttttactgttgtcttgcccacattcaatacaagagtactttttaagctacttgcctttaatgaatgctttcaaactactgactatagtttaaataaaaaccttttcttccacacatatatttcaacagtccacacaatagtaaattaaattacttaattataattaatagtacaactgttagagatttcatagtaaacacaaccagatcatagtaagtatacatcttcactgtggaagaagtagctggccatacaggattagccaatatcatttagctggccatacag

SEQ ID NO: 5876 - DNA, 541 bp, mus musculus
attaagttaatctttaaaaatagtggtttcagggtaaatgttgcttaaaattaactcccctaatgaataaaaggcagaaatatagaaatgtcccttttttaatattcccattattaaaaaaaggaaagtcaaagcattttttgtactatttgcctcgtgatccaacaggtctaccaaaaaaaaaaaaaaaaaaaaaaaaaatgaacaaacactgaaaacttgccgactcagctttcagtctttgtaaagatactaattttcactttgagagaaggtatatttaaaaggaacttactttctcagcttttatttttaaatgtgagtatttttgtacttgtgaatttgcacatcttctgaaaatgatttaaaacttgcaaatgtactttgatagtattattttgaaaatgtgtttatcttcttttttctgtcctttctgtcacctgttgggtattcttgcatttctctaaaaatgtctttactgcattaaagaaaggacattggttgaatcctactctttgattaagatgggatgtatagatgg

SEQ ID NO: 5877 - DNA, 332 bp, mus musculus
tttcatggcttgatagctcatttctttttaacattgaataatattcctttgtatgtaccacagttgatttctccattcaccaactgaacatcttggttacttctaagttttggcaattatgaatgaagctgctataaacatctgtaggctggtttttgtgtggatatgcttattattcctttgggtacatagcaaggagcataattgatggatagtatgtaagattacatttagttttgtaagaaaataccaaactgtcttccaaaatggctatatcatttagcattcccactaacagtaaataaaagttcctattgcttcacatccttgcc

SEQ ID NO: 5878 - DNA, 682 bp, mus musculus
catttcaaatgatttcatgttagtagagattgagaagttgacatgactgttagtcttgttccaagctccacctcacagctcactggttgggtggcattaccagcctgagggctgaagaagcaaggcagagcagcttctgcatcatctctgcagcttatgaagatgttttgccaacacagtggtactgaaaagacaacagcagcagacacacccagacagttggtgcttggtctggatttcatattgctttgtaaaatgtgttttatatattggtgacatcctacaattcccctgatctttgagaaaattagtctgttatcatgaattgatgtagttagaaattcagcactaaaattccttgtgctttttaggggaaaacacctgtggtgctcaccaatatttatcccatcaggaagttaggaggccctgacccggaaaagacctttcgaatgtagattggagactgcttcttagctagggttattaaaagtccacacacatatttattaaaatccacatactcattaaaataaataaataaaatttaaaagtccacatactctctggataaagtcttggaaacacacaattggactaggggagatggtctccgataatggttaatctctcctatatctcctgagcatggacctgttcccactacttaactttgtataaaggt

SEQ ID NO: 5879 - DNA, 463 bp, mus musculus
ttctttcaatatcctccgattgctgggatagatgttcagaagaaaaatagaacacttcatactgcttcaagttttgaagtatgtaattaactcaaaacattcacacattttccaaattatttatggtgatacgttaaccttctctatctgtcttcccagagtaaacactcaaagtcctcatctttaaattctctttctcctactggccactttagaaggctatctaagttgccttttacaaagagtaatctggatgatgcattggctaaactgcatttaaaattgaaatataaaagtcaacagtagttggtataatttaaatattgaaacatgcatttttattagctataaaaatgtgtcctaaaatatctgggttagtttctctgtgctgtgctgtggcactgaatgccccctgttcagtccacaagaatacatggtggtcttgaacagaacaggctgaatg

SEQ ID NO: 5880 - DNA, 186 bp, mus musculus
tgcacatctcatggcagctaagccacatggctgggatttaaagcctttagagccagcccatggctttagctacctcactatgctgcttcacaaaccttgctcctgtgtaaaactatattctcagtgtagggcagagaggtctaacaccaacataaggtactagcagtgtttcccgtattgacagga

SEQ ID NO: 5881 - DNA, 1232 bp, mus musculus
aaagaaattaaatatctttgtatatgtgaggatgatggggaaggagtaattctacttactagagagcaaggtaagcaatcaattccttaggctctagaaggctatatattctgaaactgttgaaatacaattctccttggcagatacgaaccattaagccattattggtaacagcaggggttaatcacagatacaagttgagtgcaggtagcaggagagtgatgggagccagatagatgctcctgaagaccgggaagaggctcgcagaagtgaaaaggtgcaaaacacttgctcagttcaccatactgtccagagccatacctaaggtaagcaacgcttcccgcatcctcagactccaggcgtccaaattcgcacgcttgcaggcattctattgattcacacttgagtccttcaacaggtagcgccaattacatcccccagagcacgacccccagcatactggccaataccgctgtcaatcaaatacctcacctacttctctaaattcccccctcccactgtcattggctttaccttcggcctatccacagatttcttctgccctggagaccacagaacttaccctatcgaatctaggattggcgccgaagctactcccgccctttgacgtccccgggcaccccgcccccttcacctcccagctttgccggggaagaagcagggcggggcaagctaggggccggcccgggggcggggcctgcctcccacggcgggagggcggagcctgctctggagcctgactgctcggttaggacctcggagagcgccaggcgccgcgaccagagggcccagagaagcggccggagcccgcctacctcggccccctcagcttcccgggctggcaggcggctagaggcgtctgaggaaggtgcctaagtcctgggtcagatagtcatccctctgggacgccgccgccgctgccgccgtccagctgtggctccctcgcacctgtgtgtgtctgtgtgagtgtgtgtgtgtgtttgagagagagagagacagagagagacagagacagagagcgagcgcaccagcgcgcgaatgcccgtgtgagggtgtttgtgtgtgttctggctgggagcgcgaatgcctcggcgtgaggtgtttgtgtgttcgcgcgcccgcgggcgggcgagagccccgcgcctcagcgctgggcctgggggagggacagcgggagcggcggctctgcgcgcccagcaggctgaggcggg

SEQ ID NO: 5882 - DNA, 242 bp, mus musculus
cagatctttccaaatagttattatgaaattcagctttattaaagataaaaattattggttcacttaggctaaggtactccatgccaatagttttatattcccttcctttaggacttgctaccagaacccctgagtcagcactaggcttttataggaatgaaatatcagctatgagacagaggaatcaagtatatcacttgccaggtgaagatgaaaatctctttatgaacaaacaaaagtta

SEQ ID NO: 5883 - DNA, 465 bp, mus musculus
cttacgctagtgggaactctgtttataattcttgtcctttcatttatttgggtggtttttcttatcaatttagatgagtgtttttatgtagtatacctttgtaggtgttgacattcattttaaggatatgatactaagtgtacgtgttagaggtgttgacattcatttttatggaatgatattgttaacctttttgttttctagctggtttaggtgaatttcgaattcgtgacctgaatgatgaaattaacaagctgctaagggagaaaggacactgggaggtccggataaaggagctgggaggtcctgattatggagtgagtacatggcagccccagtggcgggtcttgtctagttttccacccacagcagttcccagctcattcttgccatagtagtcgcttgatacaggaaagctatgaacaggatgggtaggatgatgctggaagacctcacagcacatgc

SEQ ID NO: 5884 - DNA, 465 bp, mus musculus; identical to SEQ ID NO: 5883

SEQ ID NO: 5885 - DNA, 1227 bp, mus musculus
agaccaagtgagctccttgagagagctgggtctgtttgagcccatccagagatgaagaaaaaaaaaaaagagagagagagctgggtctaagttgtatttatatacactgtaaacatccacaggagtagggcctcagtgaaaatctgatgggagaatgaatggggaaccttcatgtagactcagtgggagtattatgtgtcaagttcagggaagacacagctgaaatggagatagagattcaggatctgtcaaatccagaggacacagctggggtaggaggtttctgctagtttctgctgaactagaaacagctgctggtcctgaagagctcatcatcccctaggagggacaggcataggaagcagacctctgagaatgctatgtaattccctgcatgccaggtcctggaagcactgacactaggcaggcttagaagagatgtgatctcacagcaggcggctctaggctgaattagtagattggtacttgggattagggcgttttctgttgaagggataccatttgcctttgggcacctcaaggataggtacctggtcaagttgctctatgtccccagagtctagcacagtcctcagtgccgagcaagcacctgtggaaagagttgcaggaagggatgtgtggatgagttcagagcagaggcccgtaggtgtgtagatgggtgcctgatttctacctccatctctccagctggaagatctggaagttactgtagctgatcacattcaaaaggtcatgaaactgaacttcgaagcagcctgggatgaggtaggggatgaatttgagaaggaggaaacgttcaccttgtctaccatcaagacacttgaaggtaaaatcctgggaatgccatctctggcctaattactgttcaagatctttggctactattgaagtgctcatcccttttctctccaaggatccagggccatgtctggagcacatatgtcaaatgccacttcattaaaagcccttcagaacatgggggagtggtggtggcacaaagggcagataagatggcttaacaatattgggatttctcattacagaggctgtgggtaatattgtgaagttcttgggaatgcacccttgtgagaggtcagacaaagtgccggataacaagaacacccacacgttgctcctggctggtaagtggcatttctagatggggagggcctggatagcttacagcctggatgccactggatcctg

SEQ ID NO: 5886 - DNA, 1244 bp, mus musculus
tccactcctttaccaggagttacctcccaaataaactaattgaatgaattcttgtccagggtctgcttttgggagaacccagtctaccataaactttttggctatttcagtaaatgcagtataagttatactgcagtaaactaagtatagcttatacttagccaagtggactatagatgccattctagccaaaaagtaaatcatgaatggaattcttgctttccacagtgcagaacagaattttgtctgtagctaatactgtttcattggtgtcttggtgtcttgtttaacttgtatcttattggtcataactggatcctaaattctcatcgccttttttggaaactgtcatgggacatggagggagatatcagtgaagatttggtgtgactccagaacaatgagggtttagtgtgatcccataattagagaaatagcacaaagaacatattctgctcatgttatgtaaagaggttctggaaagtggttcaaacacatgctcagtgaagataatgctgggccctttattttcctgctgggtgttcctatcccctccacaggttgggtcaccatttatttatcagtgattttctaatccataccgccaggccagacctctcctgagaactccagtcccagatatctaactgcccacaaggcacttgaagatttgtttgcaccacaagtccaacaagtcccaaatggtactcattatcttcccccaaaccctcccctcttcctgcgaatggcacaacccagtggccccatcagaaaactttgaagtagccttgaggatctgtccttctcacttcatcaacagtcccatctaatcagtctccaagtcttacaaatttaatttcctaacaatctctacaaacttctctccattctccttgtcatcactgcatttccaaaacaccgtcatctatttcactcaacaccggcctcctagtgcccctccctgtatctagtcatgcccctcttgtagcattctccacacttcagcctgaaaacatctgctcacacttttctctggttaaaatgctccaatggctttaggtaaaatccaaaatccttatcctggttgaaaatcctcccaccactccaccttaactgtgtcttctgcatcatgccttcttattttgttcccactactcccagtcctctagttctttagggagatcttgctctctctcacctcctgccacttgcattttggaatctcttctacctaaaaccatatt

SEQ ID NO: 5887 - DNA, 1209 bp, mus musculus
gcaattcaagtgttttcgtctcttaagtttcagtagtgggcagcttttgtctcccttctgttttcactcaaagcattttgtctgtaaagaatctcagcttaggactcaaaacaagtctgtgttgaggatttatttctagagttgtgttaaacagttttctgtagctatagataattacttatgaagctgcatcaagtacgtaccttgattactactatctcgtgactaactgcttgttcacagccttccccacccttcccaccagctccccttcactaacctgtgcatcctttgcttgtctggtctcttttacttcttgtttttctcctagtttgtgaatagctcttaaagtctgacttgttgtcatggtgcgttgaaagagtagccagttgtcttttctgggtagatcagctatgagctgactgactaagaggagtagttaaaatggagaaagcttagctgtactttgtcttgcatgttaaacgtaatgagtttagaggattatgattatttgtaatcatcaggatctgctagacaggacatctgttttactttttactcttatgttggtggagaaatagcgtgcttttcattcaatgtgaaaattttgtgttctagctgggcaccgatggcttagtttttgaaatgtaatttcttgagaagtagcatgtggttagtataaaattgtctttcctattaggactagctacgtaattagtctgaaatatttttctaactggaaaattagttgctgtgaacttttggatttttattattctagactgcattacacttgtttgctatattcaaatattttttctttggttttacttcctaggttgcacgttttcaaaaaatacctaatggtgaaaatgagacaatgattcctgtattgacatcaaaaaaagcaagtgaattaccagtcagtgaagttgcaagcattctccaagtaagtggttagtggggaggaagggactagatggtgtaaagtcagtcacttagactctataaaacagtgctgtctaatttacttttcttcagtgatagaaatattctgttctgtgccattcagcatagtagccacaagttgaacaggactgttgagcttgacatggggttaaacttgacagaattaaacatgactatatgacttgaaatgtggctagtgtgatggagaaactgactttaatttaatttaaatttatttaa

SEQ ID NO: 5888 - DNA, 1209 bp, mus musculus; identical to SEQ ID NO: 5887

SEQ ID NO: 5889 - DNA, 1209 bp, mus musculus; identical to SEQ ID NO: 5887

SEQ ID NO: 5890 - DNA, 1209 bp, mus musculus; identical to SEQ ID NO: 5887

SEQ ID NO: 5891 - DNA, 1209 bp, mus musculus; identical to SEQ ID NO: 5887

SEQ ID NO: 5892 - DNA, 1209 bp, mus musculus; identical to SEQ ID NO: 5887

SEQ ID NO: 5893 - DNA, 1209 bp, mus musculus; identical to SEQ ID NO: 5887

SEQ ID NO: 5894 - DNA, 1209 bp, mus musculus; identical to SEQ ID NO: 5887

SEQ ID NO: 5895 - DNA, 1209 bp, mus musculus; identical to SEQ ID NO: 5887

SEQ ID NO: 5896 - DNA, 190 bp, mus musculus
agttggttgtatttttgtattaatgagttgtcgcagctgtatgcatatttctttaaacatgtttttgaacacttttattgtttttccagcttaactttcatagaaaatttaagagaagaaaaagaataaaagcatataataaaaatcatccataatccactatttatattcaaccactgttaacatattt

SEQ ID NO: 5897 - DNA, 8340 bp, mus musculus
ggagtcagtgtcctcacatcagatatgaggaacccagacaggggccctctgaggccatccatgttagcgctgctcctcacttacttgctgtccgttccatacaatgctgcgattttcagatacatcaacttcacagagagaccaacatttacttcagtggctgaggttttcacagcagacacatttaagcaggtggcccttctgtactgggtatcatcttgaatgtgaggaaagaaaggtaagttggttcctttatgggttgaattgtgtccttcaataaagacacattgaagtcctaatccccaaaacttcataatgtgacctcatttggaaataggttcattatagagataatcaaattaaaatgaggtcattatcagggccctaatccaatacgactggtgtcctgatcaaaagggggaaatgtgaatacagagacagacaaggacagagggaagacgatgtgaagagagaggcacagggagaatgccatatgaagacgaaggcagagattggagtgatgcatctataagccaaaggttcccagcaaaccaccagaaactaggagagaggcatggaataaactaccccgcacagacttcagaaggaaccaaacctgctgacacttggttttggacttctaatccctcagagtgtgagacaatacatttcttttattttaagccacccagtttttggtactttgttatgatagccctgggaaactaatccagcttctgaaggctcaagagaaggaaggcttagtcatatacagtctagtttgaaggattaaaatgcctcagaggacttccagatagagttggtagattgaatgaaaacacacctatttcaccttgctttttccttgtaagctcatgaataaaagggtttttgaaacttataaattcacaaagacaaagaaagggaatcaaccaagtcaactaaatatcacgggtggaaagcaggtgggcaagtggcaatggccttgactgacttgaaaaagctaaatcctaacctagcaatgggtaaatccaagaagcaactcaactggtaccagaaccctcatgtccatgtaggagactggaagaaatgtctcctaggagtctcatcagactgaaaggaaagacttaaagatgctgacacccagggtcggctgacaaatagcccagccagattacctgactgtgaagatgagagttgatgaactcccactacatactttggacttccaatgacacttttagagtcacaatcttgggagcagatggtctaggatctccatgttatgaagaaatcttcttagatgtaagagagggtgctatggtttgactgtttgttccctccaaaactcatgtgatagtattcacagttggggcctttaagagacagttgtgtcacgagggctctgccttcatgaatgggttaacccattcatgattagtggagtaatggaaatgggttaatggatttatgggttatcatgagaacaggattagtggctttataagaagagaaagagagacctgagctagcacactcagctcccttgctgtgtgaagccctacactgcctcaggactctgtggagtatccttatcagcaagaagttcctgaccagatgtagaagaaaagaccttggacttggcctccagaactgtaagaaataaatgccttttttttttttgagatggagtctccctctgtcccccaggctggagtgcagtggcgtgatcttggctcactgcaacctcttgggttcaagtgattctcctacctcagcttcccaagtagttgggattacaggtgcctgccaccacacccagctaatttttgtatttttagtgaggatggggtttcactatatttgccaggctagtctcgaactcctggcctcaagtgatccgcctgcctcagcctcccaaaatgctgggattacaggtgtgagccattgtgcctggcctaaatgccttttctttataaattactcagtctcaggtattctgttacaagcaacagaaaattggccaagacagagagactaaaacagatacaaatattttgaaataaataattctgtaccaagaaaaagtatgaaaaacaactatcaataatattctcagagagataaaagaagatattgcagtccaggtatgtggcttatgcctgtaatcccaacacttcgggagggtgaggcaggaatttcacttaaggccaggagtttgagaccaactggggcaatatagtgagatcttgtctctacaaaaaatacaaaaattagttgggcttgttggtgtgcccttgcagtctcagctatctgggtggctgaggtgggaggatcacctgagcccaggagttggaggctgcagtgaggtgtgatcatgccaccacactccagcctgggtgacagagtaagaccttgcctcaaaaaaaaaaaaaaaaaaaaaaaaaaaaaaaatgtcagccatgaaacaaacaaacaacaaaaaacggattgctattaaacaaagaactgttgggatttaaaaacatgtgagataaaagtaaacattcaatagaagggttagaagaaaaatttgatgaaatctttcaaatggtagaagaaaaattctagtaatagaaaattgaagtgacaatataagaaagttataggaccagtataggaggtccaatatccaaataataaaagtcaaaggaacagagtatagagatagcaaagaagaatacattattaaataaataagagaatttttcagaattaaaaacttgattatacagattgagaggtcccactgagtgtcaaacacaatgagagaaaatcagccaactctaagacgcattataaaattttagaacactgggaatgaggaaagatgccaaaagcctttagagagaaaaagcaggttatgttgtgagggtcaggaatcaaatagtattggaaatctcaacagtgacactggaagttactgtaggatataaaataaaacatcaaaatattgagatgagatgactttgatgcccacttgtatcagtcagcgttctccagagaaaccaatatgatatgtccagtgggatatacagtcagccctccgtatctgtggttctatatctgcagattccaccaaccctggatcaaaaatgtttaaaaaagtccccaaaaccaaaaaaacccctcacaacaatgaaaagatacaaattaaaaataatacagtataacagctgtttatattgcattaggcattatatgtagtctagagatgatttaaagtacagtcatgcattgcttaaagcttgggatatgttctgagaagtgtataactaggcccttttgttgttatgtgaacattacagaatgtacttccacaaacctagatggtatagtttactactaggctctatggtacagcctattgctcctaagctacaaacctgtacagtatgttatgtactgaatactgtaaataattataacacaatggtatttgtgtatcttttttttttctgaaatggagtttcgctcttgttgcccaggctggagtgcagtggcatgatctcggctcactgcaaccttcgcctcccaggttcaagggattctcctgtctcagcctcctgagtagctgggattacaggtgcctggaaccacactcagttaatttgttgacagtgtttgtgtatccaaacatagaaaaggtatagtaagggcatggtattataatcttttgtgtaagtggtccattgttgaccaaaatgtcattatgtggtggtgtgcttaggttatatgcaaatatcatgccattttatataagggacttaaacattctcagattttggtatcccaggaggtcctggaaccaatctcgcatggatactgagggacgactgtgtatgtaacattatatatgtaaaatatatacaaatagatttatttcaagtaattggctcgtgatcatgggggcaggcaagtctaaaatctgtagggtggctgtagacgcaggcaggaattattgttgtagtcttgaggaagaatttcttctttttcaggaaacatcagtttttgctttccaagcctttcagtggatttgatgaagtccactcacattatcgaagataatcttaatctcttttgcttaaagtcaactgatcgtagatgttaagcacatttacaaaataccttcagagcaacatctagatttgagtttgattaagtaagtgggtactatagcttagccaagctgacacataagactaatcatcacaaaaactgaactatcaattaagtgtgctagtagaataagatgttttcaaggatagaaagcctaaacaattttatatgccatacaccctttctcaggaagctattggaggacatgttccaacaaaccaggaaattaaactgagcaaaaggaagatatgtgtctcagatggactccctcgaagactttgagacattgattcttgtgcaagtgatttattaaagagacctataaaggagtggaggaagcaggacaaaagagagaggaagccaatcaagttgtgattccaggcagcgtttcatggagggtgacttctatctgatcctggagaattctgtggtataaatgacttcagagttgtcccaacctgaggcaagggagctggctggcatattcccaaactagtataagaatcaattatactagtcaatgctctggagggtgggggctgggggataaaaattcctaggcacttggttctctggctttagacaaagcacttccagtagccaagggcagtcttctgaagaaggtccgtaggtgctggctgttggaagcaaaagcacactgaagccaggaagtgtgcgtgtgtgtgtgtgtgtatgtgtgtgtgtgcgtgtgtgcactaaaagtggtgaaatggggtataatactacaaactgggatacaggaaacagaagatccaaaacaggaaacaaagctatccctaggataatggtgaagggaagcctaaaaacaacagctgtgcaaacagttcagattgccatagtggatcagaagaccaggagataattattcaagaaggcaaaaatgattagatgctgaatgagtttgaacgtagtaagaagatgtttacatatatggggaagactttgaggttgaattcatgataaggatatagaaaacttaacaaacgaaagaccaagacaagcgtaaactcaagggaaaacaaactgtattataaagtaatgtaatcatagctcacaagcctcacaagtaagttgtgaatagcatttacatcatcataataatgtaaacactgaatgttttgaatttaactaaaattatgaatcaactccattgggaggatcaggataggaagtaggtgtgtgtggtgtgattgcaaagaatggtgaaaaagtcgcatttttcatattgggaagccagtggatggtgcaatgaaaaaaatcgaaaagtagcagtatcagcacattacttatagataggggcaaaaatgtccaaaacatcttctagaagttgaaagttttttcctctggtggtgaaactgggggcggggaggggatggggcagtgtatacaactgctatttttcatgcaagtcttacaaaatgatctgactcttgaaactgtgtgcatgcagaacatttattaaaaataaagaagtaaattaaaaaaggaagcaagtcctgaaggcagagatgacagagatgtcggaaattaggaagaataggaggctgattcagatatattttagctgtattaatttgtgttctcccactcccaagcagggccccagtagataacaatgccagcaaggaggctttgatcttcagactttaggaacaaagaatcttagaatttgaaaagttaaactcatagggtcataaaagtttgcagttttacgtggactgaatctcattatgactcattttctaaaactccactctggctatagcgtgccatgattgcacctgtgaatagtcactgcactgcagtctgggcaacatagtgagaccttgtctctaaaaaagcaaaaataaccctccactcaggtgttacttcctctaagaaaactttactgatccctccctacatccccaagatgcctgggtttcttgctatccagcactcatcagcctatagtagcaggttgtttacttgccttctccctccactgatggccgaacatgtgcttgcaatcacttccaggtaaatgcagtcatttccagaatgaacaccattgttcaggaactcccactctttccctggagcagcatcaatttacctcagcttcgtggagagctcctggtgtctggtcacagcaaaagtccctgctggcatctgagatgtgtaactgtcttcctctggtttggttcctggcatccatcctagtgacctgctgagatgtctgtgccattggtctgtgcctttcttgtcttgaccacagggaccctccttatcttctgttcgtcctaagccacatccttgagccccctggctgtactcctgagcctctataaggccgaggaagactcagggttggctatgccaggctctgtttgctcaaatgtgtcctgctaccattttgctccactacatctgtaccatatttggggctatgaaactcttaggaacctcacttacccggctgggtctttcctgggaatgacaaacatccgttctcctacagatccctgaactaatctgtattagtttctattgctctacaactatgttatcgcaaactagaacaacatatatttattatctcatgatttctgtgaatcagaagtctgactactgcttagctgggttctttgcaaggctgcagtccaggtgttggccaggactgagttctcatctgaggctcaactggggaaaaatctgcttccaagctcacatggttgttagcagcattcagttccttgcaggctgccagactgggagggggtctcagtttcttgctggctgttcattggaggctgctctcagttccttgccacatggtcctctccataggtaatgcacacagcagctggctatttacagccagcaaggaagagtgtctctttgcaagatgggcactataattgtatgtagcataatcacatgcacataatcatgtacatctcttacctttgctgtattctattggttagaaacaagtcatagggtccacctacactcagcagagggaattaggcaaggatgtgaattccaggaggtggcgatcatggcggaataccttaaggtttgctccctgcgaggtctgtctcctggacctaaaactctcacctgagggtgcagattcccacttctgcattaatctctgactctccctgaacatctttgtttcctcctggcctgtggagtcttgggtggcaaaattaactttctcttttctcaggcatgtcttctaaattctattgtttgtagaagcctggctttttgtactcagaaacgaggattttgagatttttatgctatgttctctgccagaaatttcaaaacctaaaagccagaaactcatttttgttctttattttttatgcctttcctttccaattcagtaagcccagactgccctagctattgcctgagaagtggggaaaggtcatgggcaaaagtgaatgactgagaataatatcactatgccctgaataatacacaggatctgctggaatgaacacagacgcaacaccagagatctgggtacaaatcttggctctaccacttactagctttgtgatcatgggcaagtcattaattttctatgagcctcagtttcctcacctgtgaaatagtgataatcatacctactcttataatgctgaaagaatgttcgtaaagtcggtaagattcttttgtaaattataaagtgtcatatatgtacgtattactattatagttgttggattctctgatgggtggttaaaattgacacaagtatgcaagagaccccctaacagtgattgtagatcaaactcaattatgaaaaggcttctttgtagttctggagttggcagagaggctaatgcctttgatagaggtgaaatgtgtgatagcagatgctgactacacacttgtcactatgtcttgggcaagctctagtttgacttgagattttaccaaatcagcatcattataccagatggtaatattatgtgtgtggatgcctcaggtaaattatagagatggagtgaatgaacagtcagattcctaaacccagacctatccactcctgggagtgttattccaaatgctgtttggatacagtttatttattctctgcacaatgttctttccatcacatccatcacgttcctcatcccaggctctgtgcaggagaga

SEQ ID NO: 5898 - DNA, 2978 bp, mus musculus
ttgttctgttctctacagttataagcatattgttggccttgcctatagctacttaatgatttattctcttacatccataactggcaataattaggaaaaaaaattgctgtgaagtcgaacccactatcctgtaaacataaatttggcctccctaggtttttagtaataaatgcaaaataaaatctgtacagcacattttaaagtttgccattagtttacaaagcactaataagtacagggtatgtcagtaggtggtcctaaaataaattcatcagtaaatcgccaggtgcagtggctcacacctgtaatcctagcattttgggaggcttgggcaggtggatcacctgagatcaggagttcgagatcagcctgaccaacatggtgaaaccccgtctctactaaaaaatacaaaaaaattagccaggcatggttgcaggcgcctgtagtcccagctactcgggaggctgaggcaggagaatggcgtgaacccgggaagtggagcttgcagtgagccgagattgcgccactgcagtccgcagtccggcctgggcgacagagcgagactccgtctcaaaaaaaaaaaaaaaaagaaactatctcaaaaaaataaaaataaattcatcaatgaatcaatgtgaactttctaatctttaatggcagtgtgtgaaaaatgagaggtgctcattgtatgtttctggacatcttgctgtgtatttaaggaaagactaagatagtgcatgttcaggaagtcttttaaactctgcaaagaatcagaaacacatttatgtagggtcttcagattttacttttgagacctagccttcttatcacctcctattttcgctaaattttaaaatacttactgtcagcagacaggaatgtcagtgattctgacttgtatgtttttcaattctgatttggcatttgttttgcagtaccatctgtcctgttggcttctgggtaaagagacggtattacatgaaaaaaaacaaagctcctattatcctctagaaattggagagcagctgccttcactgaacagtagtgctatgatccctgggactgttgagatagaaattaaaggtattgcaaataagagcagttttacagaaatagccccctgccccaccacttgtcattttgttgaaaaaaaaaaaaaaaactgttttgaccacattccctaatttcagaggaatgaagagttacattttctagcatattcataatgtaggtattagaggaaggaggaatgatgaaacagtgtaaggctttatattaaaaataaaaagttgtggtccaatggggagttttcaacctataagatctattaatattgggaggtctttaccacctggaaagtaattatcgaacacatgcttcttttgccttaggggtgtttttaagaatttcttaggctttcagaaagctaatggtgattgatgggataagggagactaaggaaaaggaaagagtcatgatgatcattatgataaagcatgattcacaggatttatgcctttttggccaggtggtatcatcttctgagacggtgagaattaggagaggaatttgttaggggagtaagtaggaaaatgagtttcattttggacatgccaaatttgtagtcagttggaaaaaaaggttgagtacctaaatctggggtcatgatcattattttggcatcatcagtgtattgatctctggttcttagctgtttaaggatgagaatctcaatacctgctttcccaggagaacatgcatatgcctaaatagttgcataatttctagagattgctggattccctgaaacccagaagtcactccagaattaacttcttcacctgtcccagtgtgagtcaagaaaatgtagcaaaagccaggcacggtgattcacgcctgtaatcccagcactttgggagactgaggcaggtggatcatctgaggtcaggagtctgagaccagcctaacatggtgaaaccccgtttctactaaaaataaaaaaaaattagccaggtgtggtggcgcacacctgtaatcccagctacttgggaggctgaggcaggagaattgcttgaacccgggaggcagaggttgcagtgagctgagatcgcacccttgcactccagcttgggcaacaagagtgaaactccgtctcaaaaaaaatttttttttaagtcatttaaaatcattttggaatggtaaagattgtagcaataaggtattaaaactcatgtgagctattatgtgtgggaattgtttctgaagagctacaattttttacccagagtatgccagtaatctcctagaaggtgtactttgttcacagaaagggcattgtgtagcaggcctgggatgcaaagctaggttatctggagatccaaacaaactacaaagtaaggtgattgtgggtctggacacaggcaaagtggaatagacagattcgaagtggcctgcgatattgccgtgattgtcacaggccacaatgtgggtgacaggtcaggtctgacagatcttgagtggtactgtaataggaaagtgaatgcaccagctgctgcaaatgatgggctgagtctgaggcaagcaccatggatagctccaaggcagggctattactgcctgtaagaatctgaagcaaataaagcccttttttatcaggaaggcgcctggcctgtctgaacaatactacttcgaaggtgtgccatgaaagatggtacccaggatctctaagtaattacatgacagcaattttgaataataatttcaactattcttatgggccaggacaacacctcacccatatctgaatagcctcactttgttatgtgaggattgagaagttggcatttaaatacatcctagtggacttcttgggtcatcttatcaccttgggaggcatataaatgaacctcaaccaatccagaggatatctcagtctttgtgaaactcctgatcatttttgtaaccttgcatgtgctttc

SEQ ID NO: 5899 - DNA, 2978 bp, mus musculus; identical to SEQ ID NO: 5898

SEQ ID NO: 5900 - DNA, 1504 bp, mus musculus
tctaatattgctattaagcctatttgagggttttcatagccatagcagaattagactttctggaagatttaggtgattcctttttccagaagtcttaaagactgtctagagagaggcagagatacatgcttctgtttctctgaatctcagggaagccttctgaacagatttagcagtccagacaagggtgggtgtgccaccttgtgtttaaacacaaccacgagtagcagaaaatagctggggtttatgttgcagttgtggctttaagagcagccagcacaaagctctggcctaaacaccagttaactcccattgcccaaggccactgaactgaatgtttggattgtccccctgtatttgtgcctgcccaggagccagctcagatgagtaatagcttctgctgaagaggaagcggctgaatacatcagagcatctgggcaggacttcttgaagcccgactgccagcggagactggccttgatgaggagaaggcatccctgagggccagctcagctcctgagagctacagagcccctcagcagagggatggcctgaggcctgccttccagacaacattgtcagcagtaaagttggccatgtagtgccaactacgtggtttccacaagtgtttcttcatgaatcttcacaacattctgaggaaagtcctagttccctaatgtgaatgaggaaaacaggcggggggagcccggcaggggttgaagtcactttttcaaaggaagagtcacagctgagtctaactcaagttcacatgataccagtgaactgaagagcacttatagctgggcatggtggctcatgcctgtcatcccagcacattaagcccaagaatttgagatgagcctgggcaacatagggagaccctatctctacaaaaaattaaaagtaaaaaaattagctgggagtggtggcacatgcctgtggtcccaggtccttgggagcctgaggtgggaggattgcttaagcccacgggggttgaggctgcattgagccgtgattgtgccactgcactccacctggatgacagagtaagaccctgtcattaaaaaaaaaaaaaaaaaaaaaaaaaaaacaaccactatatgagataccatgggaaaatttacaccatttcattaatcttcacaatagtcctaccagatagtatatttgctggcaaatatcgatgaataatataatagggttaaagcagttctacatttaaatctaaatggttaggggaatattccaactctgcctctaaccatctgtggcttgctattctcaagaaaacttataatgtaaaatgtatctttgcagcagttacattacattcaaccactagggggcagcatcaacacaatttttccagtcttccatctgtaaaggaagcagggtagtttgagggtgttttaataggttgagcagctgtgcaggtttgcctggcactgagtagtttcccaggatgtggggctttcagtgcttaaaaaacaggaaagtcccaggc

SEQ ID NO: 5901 - DNA, 2020 bp, mus musculus
tgattcataccccagggaagagttgatgctatcaatttaaagtgtttaatatacatttatttaaatgtgaagttgcactttgcctgaggaatgagtatttaaattgacagcctaataaaattcctaagtaatgtagtcttcccccccatttacttattagtcatattttaaaatcattcatttagagacaccagaaaagcatgtgaactaattgttaagggatataataattgtttagggaattaaatgttaattctatggctatcttctttttcatcataaatatagagctttgatcttcagtcttcttaagagcaaataaatttctggatcaacagttctacataatgttaataatatatataatttatttaaaatattctggctcttcctgttcagggaaccattcgtttggatcaaagactccaatgaaaccaatgaataaaaacagccagaatattttagctaagtaatgtttctaagatttaatagataaaaactaatcctcttttccagaagctttttagttaaaatttcacacattattatgccttattcttttctcataatttgtggtccttgaaaattttaattattgtagacattatagaattgaattacttttcatgcaatcaaattagttacattaattatttgctagagctataaatatggaaatctggtaaagaaaatcattttagcttttccaggtaaataattaaaaattcattttccttatgttctgaacaaaatgataattgtcctaataagtacgtagaaattttaaataattcattaataacatgtgtcgcttgtaagccttattttgccttcaccaagagttacctattagtcaaccacaatctactaaagtgtctgaagtatccacaggctgtatgtggtaggtttctactctatttgtaacatatcagcctgaagtctagtggagttgccattgtggaagggttccaaccagtcatggtgctcttcacattttccatcgatttggcccctttctggccagaaacttagaccacacatacacacagtgttacacagagggtgtaatgctaaactttcaggggttgctatatggtaaccccatcaagtgatttcagcatttagaaggatttgctttggcctcacagtgttctttaaatttctcgatttgcttccctctaagtaggcatgctctctctagttagttcatcacaagcctaccatctcctgtggtcttttatttggcccaattcacacagtgtcataagcaagtagattttcaatttcttatccttgctttggcctgacaaggacctcacaaaaagattggattatcctgatttagaaaaaagccccattgtttttattccattcttactagtcacttgctttatattttaaaataatcccctgcttcttcctaaccctgagggttgacaccaaatgaaaataactctattgttattaatctgtagtatacttacaacaacctgctcaaaagtgtaaagcataatgactagaataaaccaaaaaagatacttacatgtggaaatatcactaccgcataagaatacaaaaatgaaactttaagagaggtgttatatgtccattatttatcaagcagaacattaaattgttaataataattaacaacattgttatttatttgttagtaatttaacaatgaacaatttttaataataatcatttaataaccatttgtttctgtgctggaagcagtcaaatattgttctctaaataaggaaactttttcattatgaaacaccataatattgtgtaccaccaaaattacatgatgtagttaataaaataaattcagtaatatcttaaagctatatgtttttaaaatattttgcatacttatagaatcataaggaataactacaaatcattttaacacattaaattaaagatgaaaaaataacatattagcatatgcatgcttgtattatagtaatttaaatattaaccttttcaaatctttgaaagaagtaattta

SEQ ID NO: 5902 - DNA, 159 bp, mus musculus
gttgatctaggccctaggatacaatagcaaacaaagcatgcgatctatattctttaagatttgtgaggagtaggataagggaagccatacatgtacaaagacaatgtcagatagaaaatgctgtgacaaaactgagactaattgagatagagaatacct

SEQ ID NO: 5903 - DNA, 591 bp, mus musculus
gactatttccaatgactacattccaagatagcctatgctgctggatgatagcttaggtgattgcagatccttttcctcagagtctcaaggccagccctaatgaagaggtaaaacccaccacttcagataagccagtggctcaagcctataatcccagcactgtgggaggccgaggcaggtggactgcttgagcccaggagttcgagtccaggctgggcaacatgccaaaactccattctacaaaaatggcaaaagattagccaggcatagtggtgctcgcctgtggtcccagctactcaggagtctgaggtgggaggatcacttgagctggggaggcagatgttgcagtgagccaagatcactccactgcactccatcctggatgactgagtgagaccttgtctcaaacaaacaaacaaaaaaaccataaaacataaaacccaccacttcacaacttctatcccttggatggctatctaaattaacccagaatgacttcttgacctttgtcatcccttagatgacaagcatatgatgggctacagtcttactcatttattccttcattcagtgaataacgaatgtctactc

SEQ ID NO: 5904 - DNA, 1166 bp, mus musculus
aaaaagatatctgaatcaagaaagggcattcacaatgttagaaagcaatgatttttaaaattctcaaatttaaacagaatgctttgtttaagcatgatgtatgtgtttgtgttttcaaatgcaaaaatgttggaagtttttgcatgaagaaatcatttgatttcatgataaatttacccatctgggtgctagaaatgaaaaccttgattgtttactcaactacccaatcagagaaagaaaattttcaaattacagttatatcaacagatacagaagagatcttagctagtaaaaacatccttaagcattattttgctgacgacaacaaaaatatttccagccacatatcaaaccacctacaaattctttggggatcaatttcttcatttctatagcaaagtaacatgtgcatgtctactacaaatcttaaggcaaatagtcctgttcctattcacttgtcattgcaatgaagcatctgccgctcactgtttttttgttattttttttcctgattactccaattcaaaaacatcatcctaccagctcttttagttgttaaatatccctgtgcttgtggctacatttctttgcactggagaaatgatctcattaacaaactagttctgtgcgtccttaacactgaggcccctcgcctgcagctggaggcagctctctgttcagccccagtgcagagtgacacagacaggcgacagcgtcgctgagcaccaacttctattccacggaggcagacagcgaaaaccatttcataaccatggcaaggcatgagagaagcacaggtaatcctgtttctgtattcagtttgtgcaagaatcaaatatattcatctggaagagacaactgggcaaaaaaaggagttggggtgggggaggttctgtgttagaactgctgagccaggaaataaagtcacaaattaggaaatagagtataaacacaaaaagaaaaaagcctctgagatatatatatatatatatatatatatatagatatatagatatatatatgcacatacatatatttgcgcatacatacatttataagatatatataaaaaaaggggatgtgttggtgaaggttttgttacatgggaagtaagctgtaggctaatacgtagaagtaaaaggagtagtttttgtcctgaaatctcc

SEQ ID NO: 5905 - DNA, 3537 bp, mus musculus
caaaggcatccaacaagaggcctactctctttttgttgacaagacaatggagagattcttgtttttaaccacccaacactcattccccttgccaagggcccaagcctaaggcttcaggctactgttggtcattgaaactgtccaggaaaggccatgtgaattgattcgtgctgatgaaacacaaagaggaagttttctggaaccttttgggaaaagaaggtttttttgtcttttgagaatagaatgcgtcttttcctctggatgttaactggggccaatgttgagtatgagtgcaaggcctggagctgccacagccaattggaaaagttacttctagcccaagagtgaggccaatattttgaaggctccagagccagttgagatgaccagcctgagcaccccctccaccctctaggctgtttcatttatttagggcatttttagttgggttttctgttgttagcaaccaatcacatcccaatacagggagagcagcaagcattcaaagacataatagcacctaacagagactttctctttgacatacttaggaggatggaaagagaactggaaaggaagtaatatccttattgattcaaggtcatttaatgccgtgtctttctatcaaatgaaatcattttgtgggcatacctctcctacttaggaaatatttatcttaggctgggagaggtgatggcttcacagaaacaatgctgcagtaggctatgagggacttatgtttgcttcttggtaactttccttaacaagaaactccaaaggcatctttgaaagtgagggctggggatggggggaataaattattcaaacagtgtctgtgcctctggaattaagcacgaagctgtctgagcatatttcatatcctttggaactcaaactatggccaatgaactagtgtccatggcgtcaccttggagcttattgaaatgtagagtctcaggcccctgacctagacctacagaatcagaatctgcttattaacaagatgcccctttaatttgtatgcacattaaattttgagaggcactgttctaggatgcatgtcaccagctgagtgctgcttagaccataaacagctgttgtgtgcagagcttggcctcagagagacctgcttcaacccatgaataccagctgtgtgctcccagcccgagactgtctgctttgtttcccttcagtttcctctacaaatgataggtcatctgcacaaaagaaccagtttccgagaattccttggggtttacttaatactagtatatctcagtccatcgcgaacatcctcatcttgtagttgtagaagtcatagacactgggccagatgaaaacctttgggcttcttttctttgttattaaattttctatatcctatattctatatatataaattcattcattaactcaaacacggattaaacttctttgtgtcccatgtaaaccacatcttttcagatattttatcaaagttattatgatgattaacaattccctgagatcttttatattcagtactttctgggctgccctgaagaaatgttcaatcaggagctctcctgactctatgaagctttagaaattcattttttcttaatattacagttaatagtcatgtaagttacataccactagccagctaatggttaggtgaatgcaagcaaaataaataaataaagacaaaatcagagctccttcccgctagctgggttctctgtgcttcactttgtacttgctcttcaggaacgatctacataggacctcagggactttgaatctaatgttctacatctgtagaatggagatggtggttccaaaggctctgaatatgagggaaagtccccagcacttgcccagcatgcagagatgctcagtgaggtgagtgcctggcagtgacggaagcagggatttacggcatataaaggggagatgaggtcaaatccagtttctcaccaaagggaaacatatccttgactaatgacagcaaagggagaattggagggaagtaaccgaggtttaaatgtggatagtttctgggaaggggcatagggcccactgctctggggaaaaggggctttgtgtcacttgagcccttgggttggagttaggagtgcaagaagtttatggggtgagataagtgtcaggggagggcacctgtgatagataagaggggaaggttgagcagagagagcctacaactgcaatccaaatctgactgtctctgcgcactcctgggaactctggagccaagaaagcctcttagaggagttctgtgttgggcagaaatagcaacacctgaggatccccgctgtgctcaattgttggctgggccctgcctgggaagagtgtggcctcagctcaaaagctgagggagaacctgaagagacacacagctggggcctgtcagctaatgacattcttgcatctgaatagcaagtcactttcttaaagggagaggcaagctatacacctccatggctggcacaacctgagggaatgaaaatccttcagataaatttacaaggatcctacagcagaagacaccattccctagcttcccaggagaagcctggaggggagcaagcattgtggaaagtccgtgcacctgaatgtcagagtagcgatagctgtggagatactgaagcagatgaacctgtggctagcttcacagcatcctacactccctggttgggtcaagggaaacagctgagagctgtgctcccaggagggggaccgcagtgcagctaaggtcagcaggctagagaagcctttaggctgggccaggagaaggcagactgtgtagactggattgcccatgactggcagaaatggatgaaacaggaatggagtgatgcccaagaactggtggaactgggtacaactcagggggggttagcaaggccagcaggtaactttggaccagatttgtacccatctgagggcttcacctgggaaagctacagggaggagcaagattcctaaattgatggagtaattaccaagaacaaacagaattttaaaccagagggactaatttatcttgaactgatgagattaagctttgtgctaatgaggagaaacagggaagtaggagctagttaaattcagttacagaaaggaaagaaatttacaaactgcatttcccagttatgtagcctattaaatttcatctctgttaaacagaaaatgatatctttcgatataatcatttcactttttggaatctagttttataagtggaaaaaaactttgcaaaaagatttatttccataatatttataattgtgaaatgaaataaatgcccagcaagagggtgttagataagttatagtacatccacttaatgacatattagactactaacaatgatattgtcattaaaatgcaatagtatataagcattttttaaattaaattgggggaacaagcagaaagaaatattgtacactgtttctcaaaccttttgaccacaccacacccagggtaaatggttgtttttgcatcttgacccaggacacccatacatatttt

SEQ ID NO: 5906 - DNA, 1059 bp, mus musculus
tcatgagcaactgcatttagggagccagcatttaactggcactgatatttcaagatcctgaccagagggcaataacaagagagatgaagcccagggagagttaaagcattgccatggcagggcagggcacaccggcctgctcttcctgctgacagagtttcccccggcgtggtacaaatgactccccacccatgccaagatccaatccagtgaactgcaacagcaggctggctctgtgtggaccacaaggctgggtgtccaaagtagctgttcagtagtcctggatgttgtcctcccatagcccttctggggagagagcaaatgtttgggcatccaacacaactggggtcaagtccctattccactactcagaagcttttcgtaacaccagaaacctcagtttttccccaccgaaagcagttttataacacaatcagtagggttttcacttaaaggccccagtagaggggcaggcacagagaaaagctccactgtgactattaacacattctcaggtgtgaactaatcaacatgacctcctgtcactacttttttctgggttgctaagaggtataagaaaaaccatttgaaaagaaatggttaagtgatggtcagtaatacaagaaaaatcaggcgtttgcagggaggagagacacagaagaagggaaagatacatttataatcaaagtagaacaattggggatctatagaggttaagtatagccacataagattaaatgataagcggaataatcattgccaaatcaactgactgtaggacccggcaggtaatgctcctgaaagaggtggcccagggatgtcaacgcgtatgctgtgagccagagaactggagagagctcacttccccatcaggaagaggcaactaatagtgctggattgttcatgctggatgctagcaaatcttctcatctttcaaaatgggttccaaatctggattcttatgtgaaatttcctgatgttttcaacattgttcaggccaaataaaactagacctctagtttggaagattagcagttccttcacaagcttgatggagaa

SEQ ID NO: 5907 - DNA, 1059 bp, mus musculus
ttctccatcaagcttgtgaaggaactgctaatcttccaaactagaggtctagttttatttggcctgaacaatgttgaaaacatcaggaaatttcacataagaatccagatttggaacccattttgaaagatgagaagatttgctagcatccagcatgaacaatccagcactattagttgcctcttcctgatggggaagtgagctctctccagttctctggctcacagcatacgcgttgacatccctgggccacctctttcaggagcattacctgccgggtcctacagtcagttgatttggcaatgattattccgcttatcatttaatcttatgtggctatacttaacctctatagatccccaattgttctactttgattataaatgtatctttcccttcttctgtgtctctcctccctgcaaacgcctgatttttcttgtattactgaccatcacttaaccatttcttttcaaatggtttttcttatacctcttagcaacccagaaaaaagtagtgacaggaggtcatgttgattagttcacacctgagaatgtgttaatagtcacagtggagcttttctctgtgcctgcccctctactggggcctttaagtgaaaaccctactgattgtgttataaaactgctttcggtggggaaaaactgaggtttctggtgttacgaaaagcttctgagtagtggaatagggacttgaccccagttgtgttggatgcccaaacatttgctctctccccagaagggctatgggaggacaacatccaggactactgaacagctactttggacacccagccttgtggtccacacagagccagcctgctgttgcagttcactggattggatcttggcatgggtggggagtcatttgtaccacgccgggggaaactctgtcagcaggaagagcaggccggtgtgccctgccctgccatggcaatgctttaactctccctgggcttcatctctcttgttattgccctctggtcaggatcttgaaatatcagtgccagttaaatgctggctccctaaatgcagttgctcatga

SEQ ID NO: 5908 - DNA, 1075 bp, mus musculus
aaggaaatgcataggatagtaaactccagattcagagtagcatttggtaggagtaagtgaggaaagtaattaggtgtacaaagggcttcagccatatttgtaatattttattccagtagtttctcagaggtacaagatcatagagttaggaaaatttttaaaaattagattatagtttaatctttaaaaagaatttcccttttctgtaaatgagtctctttttacatatcaatatacataattcttaacacgtaatatatgttctgattgttgcttcaatagaagttacccagccatgtgttacttagattgatcttctgtttttttccaaatgctcttcaaatgctgctgaatgactttgtaaatagaagaagatggctgaggcaaatctcactcattttagaggtttcttgtgccaaggttgaggacatgcctgggagaaaggaacacagaatcacaggaacatctctgctttttccaaagaggatttgggggcttccgtatttaaaggggaaagagtaggcagtaggggaaagaagaaagaaaaagaaggggaagtagataaaaggagtaagcagtttcattctttagaggctttgatcagcattccctgaatctacattttacatatgaaagaagcaggttaaaggtttagtcaattacggtgttgaatctgcatttttacataagattaagtaaacatagagtagaggaagaagtcaagtatatatttgtctctgataagtggagggatgacttctagttctgtcctgctcccccacaaccccccctcccaccgtaaagataagctgttaattttagggtaaatcttttggaacccacaaggaatttccttgtgagcaaattatgagggagacctcctagggaggtatatagccttctatctttgtagctatctatttaggaaacaaaccaggggatagttttgcatgactcagttcccaacattgacttttacctttgtcatagtgagtttggtgtcccaagatttttagtttcctttcacaacttcataaattgtattgctgattgtggcactgagtctttaaaagaa

SEQ ID NO: 5909 - DNA, 209 bp, mus musculus
aatattaatgataaagtgagaatcctttccttttcctgattttaaaggggatgcttttaatgtttcatcatcaaatttgaagttactataaactttagaaattacctaaaatcagctttttaaaattatcttttaatcctggttttccacaaaaattaatgtaattttttacatgaattaattttaagtgttatttaatggtcttccac

SEQ ID NO: 5910 - DNA, 649 bp, mus musculus
actgacatcaaaatttgaatatataatggttccttgtatctaaaaatagaaaactgagcattgttttaccatatttcaacaactaaaaagtgttctgaaaaccggtttgagaatttaaccttaacagcacagttccataaacataagcctgtgaaattactgaaaagacagtacctgttggtctgtacttattttacttaccttgactaagaagatgaaaatatcttaactctcaagttaaaagatattttaccaaaattatgagagtacacaaataattgaagtcctaaagcttttatttattttcctcacttggttagtttaattcttcatgttttattgcagaataacactgtcaaaggcttaggtttgggggtagttacatatgacaactgcttttacattctgttttggtcaggactatttctaaatctaaacatgaacatattaccggaaatatacttgacctcagagtttaagagcctttaatactactcgttaagatacaattaatcaataaaacctactccaattatttccaaagtcaatattgagaaagctaccccttgaactttaactaaatcaacagaattacctcctaacctaggcaagtcatgatccaactttattacacttaagactatcagtg

SEQ ID NO: 5911 - DNA, 1477 bp, mus musculus
agaaattactgaggaaactctgagggccatatctttaatatgtaaatacatactgctgtctttgataaaggaaggatatagcacctcctataggaaagaaaggatcccttggctcactgatgaaagctgaatttccttaataggaaagaaaggatccattgactgttactgatgacagttggatttccgtattagaatagataagctgaggttgtccagggccaaattgtgtagctctttgatgcctgttgggtaaaaatgtgatttgaaaatggaggaaatttcaggatgaattaattgagaatcttctggttgagaagagctgctttaacagccttaacaggaggaattagtgtctttctctttgctgtatatgatggacagaactcatatactaaagatgggtgattgatctagttcagagaaagaaaaatgtgtaaaacatttaaaaagttggtggtcttcctatttcccatatgttgtcataaatgcttcatgtgtactatattatttaagcttctcaacaaccttgaataagagactacatgtctgttgtagatgaggaaaaagatttaagtgacctacctgaggttgcatagctcataacagaatcagatctaaaattcagctgtgtttaacaactcagctttttaatcatttttagcatgtgcaatattttttctttatgttctttaataaacattaattttctacttactggatgccagttactgtgctatatatgtgtgcgtgtatgtatatatatatatttaagacagggtctcactctgtcacccaggctagagtacagtggtgccatcatggctcactgcagcctcgacctcctgggctcaagtgatccttccaccttagcctcctgagtagctggcactacaggcatgtgccagtacgcctggttaatttttgtattttttgtagagacagggttttgctttgttgcccaggctggtcttgaactcctgggctcaagcaatcctcctacctccacctccccaaattctgtaattatgggagtgagccacaccagccagttatgcttattactgtttttgaagagtaataagatatttcctgtcctcagagagcttatagttgaattatctcacatcttcgttatggtcaaaagttaacaaagtagaaactttggctgccttgggaaagaatattggactatacctctctttccagtggcatttacatgtataaagcaaatacgattaatgccagtttgaaatgcagtgggatagcttgtgtataattatgtgttaagatggtaacatttgactacctggggtgttaatacttatgtcattaaaaatagtttttagataatttaaaaattattacaagataagtaagttattacaaggtaagataagtgtggtagcttttgttattttaaatgactagaattcatttcagtcttcacattgactgttatttttatggtattggt

SEQ ID NO: 5912 - DNA, 1473 bp, mus musculus
atgtaagacacttagcacagaacctgttccaagtaaatgcacatgaggccttaagctttcaatgtaaatctaaagagagtatttaaggcatctgaaatcgggattggagtccagtttatcactgttcaccttcagcttctttcctaaacactcacatacactagattttacaaacttgcctgaaacaacttctccttttttacaatgacattctttaaaatcttatttgctgattctttgctaattatatacctcacacctcatggaaataatgtccaatgagaactacatgtaagtggcagagctaggtgacctttgtcactggaagctttccagtatttctcaggcaggcatatggtttaaaaagcccacaatactgtcaatcaagtaaatgtaaaccaaaagatagagaaggtttttctcagaaactatgcatcagcatttccatattcaaatggtaaaattattcaagatgtttaaaagggtgacatcaaagatgacattttcaacaaaagatatgctaaagaaataaatccagttgtaaacacattctgtcaactgttttctttaatgtgtgcccctccctgagagctctcaaaactagaaagtcctcatatatttgaatttctagtgtttcccttttgccaccaaaatacatatactccttctcacccccattccccaaataaaagcagcctcaaatttacctatcagagtccaggtataccttaaagactgaggaagcctagctaattctctccacatgctgacaaagtttctactgcttgaagctcaggtgagtccccaggaaccccagttttttgaaactgtacacggaatagcagaatgacacttctcccaacacccattctgtgcggtctttgaaaaatataaatccagggtcaagtaactaaaaaaacacagaagacaaatagctaagtaatagcactttataaactactcagaactcctgaataaactgttgtaaaatcctaaagttgttagctataaagcagcaacttaacaacaaaaaaaaagtcaaaggaacaaaaaaagttaacaaacaacttaacagaacaaacaacaacttaacaaaaaaaaagtcaaatcaccatgcttgaagaacagaactgcccttggcctgcacaacatgttctttgttacaaggactactttgttcttccagctctttggatgcgtgtgtagttcctggacctgtgcttgcctcatagccaacatggcccctgctagtaggaaagcagtggcccagcacagtgctctcagggactggggttccagagttcctccttagcctcacgagtcagaacatcaggagacaccatagaacctggaagagtcattccaggggcaactctgtctacacccaacccttctcatctgcatcctggttcctgaaactgttataataagagacaaaatctctcattctgtagataatgttataacttacag

SEQ ID NO: 5913 - DNA, 756 bp, mus musculus
agaagaattttagttctagcctttaatatattttttaccatacaataattgatttaaagagtacttcaaaaataactaaatgttggacgtcatggagagagatgagaccatctgggaagagtatacagagtggaaagaaatgaggccttgaggagcgcccacgacaaggggtggagttggggcatagagaaccccgggagggagacaaggaaacatgaggtaggaggatcagaagggtgcagagccaaattgagggaggtgagggctttgagaaggggtgggagataagtctcaaggaacagggttccgaagaataaaaatggaaacaaagtcattgaggccacgggattcggtacagtggtgctattaggacccagacccaggatccctgttgggattgtcacattcactggaggacttgtgactgcctgaaagaatggggacactccagaaatcctacactaactgtataaaactggcagtgcatggtttgtgtgctgttcagagaacccctgaacattgaagttgacttggctgaacgtgtgctcagctgtccctagcagctcacctagtagccagcctggctttttgccctgctgtttgcccatagcagcctcagatgccagtttctctcactcatctctccccagttgcaggggtttgtagtacagaacctaggtccttgactctgcaatttcctgactctgtgaactcaggcaatcactgcatcttctggactcagtttccttatttgtt

SEQ ID NO: 5914 - DNA, 756 bp, mus musculus; identical to SEQ ID NO: 5913

SEQ ID NO: 5915 - DNA, 1964 bp, mus musculus
taaaatctgtgcattcagtgacagttcttcattagcagccgactgttaatccacagctttctatcaaatgaactggagcttgagtcttcaggctttcactgatacctaccttttccttttctctctccttctctccatccttttctcctcctcgtccttccttcctttcttaaatgtttaccgagttcctatgtgtacaggcagtgggctaggtaccagatagaaaatgatgaatcagaccaagaccctggcctcaaagagctcacattcagaccagtgaacatattaagttttggaggttgtatcagttgtctattgctgtgtaacaaatcacttcaaaatttagcagtttcaagccacatttaatgtctcacagtttctgggcaccaggaatccaggtggcttagctgggtcctctggctcagggaccctcacaaggccatacttaaggtgttggcctgagctgaagtcatctcagggctcagaggtaggaagagccacttccaagctcatgtgactgttgccaggctcctcgctggctattggccagaggcctccctcagttccctgccacatgggcctctctagggagcagttcacaacagggaggctggcttcccgcagggtgagcaagccagagagggcgagcctgaaagcagccagcacttttttgtgtgacctaatctcagaagtgacatctattattcttgcgacattctatttgctaggagttattgggtccagcccatgctcaaagggaaggggttacaaaaatatcttaaacaaattgcactgcagaagctatttgtgtgacacgtgattaatgaatatcaggacatgggggatttgggggcatgttaaaggccccccacagtagaggtattgtcataatgtgtgtgtgtatatatatgtgtgtgtgtgtgtgtgtgtgtgtgtatatatgtgtgtatatatataatatatgtatatatatgtgtgtgtgtatatatatatatatatatatatgtgtatatatatatatgtatatatttttttttggacggagatttctcttagtacccaggctggagtgtaatggcgttggtgtgatctcggctcaccgcaaactctgcctcctgggttcaagcgattctcctacctctgcctcccgagcagctgggattacaggcatgcaccaccatgcccagctaattttgtatttttagtaggatggggtttctccacgttggtcaggctggtctcgaactcccgatctcaagtgatctgcctgcctcggcctcccaaagtgctgggattacaggcatgagccaccgtgcccagcccataatatccttaaagacatttaagcctcaaatcaccgggcccgaacacagcaaattaaaaacatcaattaccctttctttaagatgccataaggaaggtatgtgaggaaacttccataggattagactaaagccccaaataataaagatggttccttattcctgttttcctactttgctaaaaggtacactcagatgctgtctctaatggagaattgggataaacttcaccagtcctgcttaatcaagtgtatctcccctccaaaaaaaaaaaaaaaaaaggaaagaaagaaagagaccagtgccagtgagacaggtaggggatattcaactgtccctatttcgttccagaaaaactaaggcgttacaacttgcaatgtatctggtttgactcaatatgttttgtattcaagtttccaaccagcaaaatttgtgaccttattaagaatactagttcatactcagtacccaagagaaagatttccattccagaatctagtctactagcttggttattattcatttatagtgtcagatcagagaaagattgaaggcattcctaattagttgccttgggatataacacatttgaaataatatcaattgatatttcagtgtctgttaagcctgatttatagggac

SEQ ID NO: 5916 - DNA, 1964 bp, mus musculus; identical to SEQ ID NO: 5915

SEQ ID NO: 5917 - DNA, 1964 bp, mus musculus; identical to SEQ ID NO: 5915

SEQ ID NO: 5918 - DNA, 165 bp, mus musculus
catcttttaggatgtttacttaatctattttttaatattagaagcggctagtagtctttatttaaaaattcattgttaattgttttaactctgtgaggttaaaacaatttaaataagtttaggctctgcctaatttagtaatgaaataaatgttgcataagtaat

SEQ ID NO: 5919 - DNA, 2139 bp, mus musculus
atccctggtggaaaacatctctgaacacaaatagtatatggttcacagatactaatatttatagtgaagtgttagcctatgtgtgaagacttttgaaaatgaaatgtgtctttatatttcttccattgtagcatgcagtccattcagaatcttgggttggccatcatttccatcattgctggtatgatactggattctcgggggtatttgtttttggaagtgttcttcattgcctgtgtttcttgtgagtattccgtatgacaacattttgtttcttttactacataacagaatgttcttatttttacttaggcatagctcccagatttgcctaattctcacctgtgaattagaatttcatagctggtgactttctagccctctgaagattcacaggcattttttaggagattcctatccttaaaggcagtgattgagttggtttcatattctgttttaactatttacagtttaaaaaaaaaaagcattttcccacttaaagtggaacaatttgaagagtcctgagtatatccttaatgtgactatgtggaaacgttggtgtgatttaggtgtgagtactcatggttattcattaggcagttttaactgatttttatttttagtccgtaatttagtttttacctgtaatttcattggtttgaaattggaagcattaggaaacttgaaaaatatataaaaataatagcatttgtccataggtaatctttaccctacatataaattgtgtttatctgaaaagaaaattctccttaacacatcaagatgtcttttatagttcaatattgtgcttaaaatgacaaaccacagtgatgattttatcaaactttgttttcatttatagggaataaagaccatccatacctgaagtgtggtatttgcagataattgcttatgagttgccttgagtgcattttattatctcataaataaacgtgcttgttttagaaacaaggacgtcaagttttaaaaataaatgtttaaaaaagtgggtcatataagaatttcagacattaaatcataaaatgttttttgtctatttttgttgttgcagcatgtggttaaatgtcagtccacagttcaacatgtatttgggtctcaaagcaaacagtgtgccgtttgaatatgtttttctgttattttattttattattattacttttttagagacaggatttgtctctgtcacccagactggaatgcagtggagcagtcacagctcaatgtaactttgaactgcggagttcaggtgatcctcccacctcagcctccgtgatagctaagactacaggtgtgcaccaccatgcttggctggtttttaaatttttttgtgaagatgctgtctcactgtgttgcccaggctggacttgaactcctggcctcaagcgctcctcctgcctttgggattacaggcatgaatcaaaataataagataataggcctgccctattattttaaagtaaattaaacagtgttcttcacttattaaaggaaaaagccaagggaaaacttgaattttgaggtcttgattgatttgagtctaatgatcacattttaatgtttggttacttgaaatttgtaaaatggacatggcattttcagacttaaagcccccaaaagactactatttggcttcctctgaaatgataaacaatcgggggctggcaggagtttttggtaagtcctgcaaaggaccagcactgagaaagggagaggaaagaggggcagggctgggctgtggctgggtcggctcccttttttctaggggcctcaacttctttgtttctggcctgccacccctgggctgagtagcccttggagaaaatagtgtgtaacttatttttagtgcttttggaaaataaaataatgggaataatatttttatttaaaatagcaattaataaaggtttgattgtgtctaagctttgctttgtgattatgattacataggaatcattgagaagaaatacatattttaagggccctatgttttttcactcctagtgtcacttttatctgtggtcttactctatttggtgaatcgtgcccagggtaagtagaagatctgatatttgcttcttaaaccgcagtggatcatcttgtggggtctctgggtctgcc

SEQ ID NO: 5920 - DNA, 404 bp, mus musculus
aatctatagaatttaaggccctggacacatgatgtatttccacatatttccaaaattttttttacaaatatttaagatatagttgttaggcaacttattaatcaaaatagacctctcatatgatactcagaattgcctgaccctttcaccttgactacgaaaggtaggacaggacagatcgagtgtttctcagcctacagaatatcaaaatacatattattttattgtattttaagaggtatcttttccttggatgtcaggcaaatatacttcagtgcagcttttgaacgattaacatattggcagtttaaaattatttaacagggacattttatcattataaatggggaaatgacatttaattgatcttaaaggaaatgattttataattaattaaaatgatc

SEQ ID NO: 5921 - DNA, 404 bp, mus musculus; identical to SEQ ID NO: 5920

SEQ ID NO: 5922 - DNA, 748 bp, mus musculus
agtattaatttaattgaagtgtatgtggttggtgttaattagacactaatttttcattggttttggcatttatttctgttttgtttccatagcaaaaaaagaacatttagcaattcctaaatcaagaaccagttctgaatcaaggatatttaaaacattaaacataagattttgaaaagtaataatgtcttcagcatgaaggaaacaggcacaccaatatagccatagtatgtgtgtaaatcaatacaacttttcaaagggcaataaaacaagatatatttaaaaattttaaatgtatggtctttaatccagtaattgcacttctagaagctgtactaaggaaataagtagggcagacatatggagatatatatacactgtagacattctttaaaacagtgaataatttgaaacatgtttatcaggaatgagtgagttagtaaagttctggaagttcatactttgccatagttatctctatggaggtaggatctcaagaggtcttttgttttctctgtattgcttgaattattttgtacaatattcataaattttcaaaggaaaaatataacagccataaaatatttatgttttgagttaataaaaaattaactacagagagccctgtgccttaaatatggttgtcagcatagcagatgaatctgaccctgtggcaaaaaaataggtgtttttagatatgaatacatactgatagtcaccatatgattttaaagtcacaactgcctta

SEQ ID NO: 5923 - DNA, 748 bp, mus musculus; identical to SEQ ID NO: 5922

SEQ ID NO: 5924 - DNA, 1199 bp, mus musculus
aaatctggttgaaaagttatgtttttaagctggattttgctctcatgctaatcagttttgtgtcatattgctgttttttattaaaattgtcatgtttttctttaatctgtttatggacttacagaggggggctcatttgcttactcttgatgctcttaaagggtaaacaaagctccatgttgaagaattgtagtgcccatggggatattctttacataatacttggttgcaaaatactatctcagtttaaataggaccacagcaaccgctaaaatgtgaaagaacaaccagcaatccacattccatagagagtccaggaaggctgtctctggaaccacagaaggtgcttaaactcagtcaccaaaccaaaattgaaacagatgcagatgtaggtttgccagggtcaattcttgaatcctgagagcttgtcagaaccttccatttacacaagactagagaagaaaacaggaatgactggatttaaaaaagactaaaggccttaacatcatgagcttcttttaatggccagaactgcaaatcacagactgcacatcacaggatgattgccttgcactgtcaatttgtaagttctaatagtacaataaagtttttcagtgttttgtaactctttttaaagggaatttacaaatatttcatgagcataattcctttggaatgtaatactcttagcaaagcagctactgtttaatctttttcaatccttgtgcaaaactttatagatacacgtgaaactcttcggcaggctgtctgagctcttgccctctcagaaaatgtgtagaagtttttctttaaagttgcacttgctgttttattgaaggaaaaacatcatagacccatactttctgaactatttttgaacttttggtcacattggccaaagaccaaaagcttcagggacttttttttttctggaaatgaaagaggcaaattgctagagtatgagaaaaatttaaagacactgaataagcagtaataatgttgtttaggcaatatataaaaaaggaagggagaaaaacctgattcgttttatcctggtatcctaaaatctttattgagaatttaaatttagatgattcctatttatgaagtgtttattgtgtgcctttattgcaagactttgtagatatactgcataacttattttccactaatcattttcatgagtgtacagaatagag

SEQ ID NO: 5925 - DNA, 448 bp, mus musculus
taaaataaattaaaggcgtagatgccttattattgctcctgtagatctaaatgtcctaaggatagatcagggaaaaaaaaatgtcgctaggaaagagatgtaaatcatgctggggtagtcactgcaaggtgtataggcaaacactcatctttttctcagttgtagctgtggtcttagggaaaacacttgaaatttaagagtccaaaataatgtgaaatataaattagagataatctcagtaaacatagaaaaatgttttgagagttcactgtatcttagtggaatggcaacaacaaaaacaatgtcatattagctaagatgagactgatctacctcagacagaatcccagtggcagtgggattacatatttgttttggtgctgcaacttggatagtcccttaatccagcttcacagactctgtaatggggatgacagcaacatatcat

SEQ ID NO: 5926 - DNA, 763 bp, mus musculus
attatacttaattggttttacaagtactaaataatgcctattaagacatcattttgttgatggggtaagttgaaattttaatgtggccttaatcaccttcttcttagaaagtcttcccaaatcctttagccttgttgcggtgacactagataattagtaggaaagaagatggggaggtgtatatcgatatcaattaaccctggcttttggtgaatttagtagttccatagaaaatctagaaaacaagaataaccaatttaaagagcaaaatctttccaaattccagggtattttaaattgaattattaattcatcttataaatagttactgagacttatgttttcttcttagaatttctgtttaatgggaaagtaaagtgttacctaaataaatataactacaaatttttataaatgctagaaaacaaatcttgaagttctctgtgagagttaaatgggtgaattcatacttagagacagagttcagaaaaaggctttccagagtaacttctatttaagctgagatctgaagggagattagccagtagaagggtatggagagcattccagataaagaaaataagcatgcaaagtccctgctgtgggaaagattttggctctggataaattttgggaagactagcaagttaggagcgtggcaagaaaagaggctgaagatagtggcacagtaaaggacatgcaaggatggtaaatagggcattcagtaaaatggaaagccgttggagaattttaagtagaagga

SEQ ID NO: 5927 - DNA, 1084 bp, mus musculus
aggcaacatacttatggtaagtgtaacctctacttggcaaattacatctaaacaaggagaactatacatacttgaaggaagatatagctccctgagtgcagtgggctttgtaactgaaacattccactatggaactagctctggagctatgaggtggggattggctctggtggaaagtaaggtttctaaatcaggtgtattccttatctacctgaactgtacttctgcttgaactcctgcaagaataccaccaaaaaggaacagctgatgctgtcctgctggcaaactgttattcctgtcctcatccttctgaatagactgatgccaagaggatttgatagcagtcttgagattttaaaggtttagttaacacaggcagactctggtgagcatggcatttaagtccttgatgagtcagaatttgaaacatagaatgttgggatagccaaaagacaaatgaaaaacacttgtccaggaatcattgacaaaaagtttttaagaacagcattattgcgatataattcatataccacacaattcattcatttgaagtgcacaattcaatgaattttagtatggttactgctaagtgaaactattagcataattgactttagaacatttttgtcacctcaaaaagaaaccccatacccttttgctccatcctcctcctatctccctatattctcgggaccaatactcctttctctctctctagattagcctattctggacatttcatataaatagaatcatgtcatatgtggccttttatgagtggcttcttttacttgcataacgttttcaatgttcatccatgttgtgccatctatcagcatttcatttatttttaaggttgaataacatttcattgtttgatatagcatattttgtttattcattcatcatttgatggatattcgggttgtttccaccttttggctattataagtaatgctgccatgaacatttgtgtacaagttttttgtggccatatgtttttagttatcttggctagatacctactggtggaattgctgggtcatatggtaactccatttttaattgtttgaggaactgcaag

SEQ ID NO: 5928 - DNA, 1084 bp, mus musculus; identical to SEQ ID NO: 5927

SEQ ID NO: 5929 - DNA, 846 bp, mus musculus
attgccatggatcaacaaattagaagaagatagctgagaagataaagtatttggtagctgtaaagcttcaagcaggaactcaagaagatttttagaacatctggtcgaaatttatttctttataggtaagcatccccttttacaaccagcatacataaagcattaaattggcttaccccaccccttcctaacaggagagaagctggttagatttattactcctttgatacaggtctggagggagagtgaagtggcatgtggaactcccactgaaggactccctcaaaatctttaggactccttttagatagaatgtttgtctgcaatttctaactcatttttaagaatctctctagattgagattgtgcaagatcattcacaaaaataaaactcaattgataatgtttctggattttttctgtaatatttatgtccaagcaagggatatcatcaacacaaaactttttattctcttatttttaaaattggtttttgtgtaactggctcattctcttgctcggttaaatttaaaatttattttcctttgacaataaaggtggagttaattgttttgtctgtgtctgccttcattttgggtgtccataacaacctccaaacaccaaactgcattgttcttttaatatggaagattataactaacaggtttcataatacttttttgttttaaagatatagcatacccaaccaatcaaaccaaataaccagttatttcaaaattgtatgaatatactgcagaaggggagctgatttcaaatcagtgttttcaagttcatggcaaaattttaacacttgtgttagaaaagtatatttcatttaatgctgtt

SEQ ID NO: 5930 - DNA, 895 bp, mus musculus
ggatacagtacagataatccgaatggaaaattgcactgaaaatgtcttcccctgagttatatttgctggttcttacataaaatgttatttatacaacagattttattgtatcttctcttgctttactcctttatcaccttctagctaactgtcctgacttcagacctctgttagatctgccagatgtgctctcctggcccatgaaatcaagcgtgggtgagacctggtgcagaacgggaaggcgacccatacttggtttcagaggctgtgagaataactgcaatttagagggaataccatttatgtttatgcaggacttccagagaaaaaacaaaatttattatagacataaagaataagagatgaaattcatgattatattgcatttctgttccaatgggattaaaaaaaaaaaaacacgtattctaagtaagttgaaccaggttgacagctaatgatttgatgtctctgttaatgattttaaaacattgtacaaatccaaaactgtttactccttcaaggtatacctccttttctcccacttctccagctattgtggtccatttgcccttgctctgggctagttccttggtaactaacagaaatggatggacagagatgccatgacaggagtatggattttgctgggtcctcatttatgctggggcatctatcaactctttttccaacatatttttgtttcccacacagccccactcacagatgcttgcctatagggccaaaaatctctagttagcaatctgccagagtcctgcttttttgtgtaggagattggagttctttcaaataacccatctggtaagatgtagagaagtagagaaactgaggtaaataaaatgtatattgttaagtactttattgcatactttgtacc

SEQ ID NO: 5931 - DNA, 895 bp, mus musculus; identical to SEQ ID NO: 5930

SEQ ID NO: 5932 - DNA, 712 bp, mus musculus
gacttaaatcaaccaattcacttaaaagaaacagttctcactaaattaaatcagtccagccctccctcccccattaattttagaatatagatccagttttttttttgtttttttttttttcagttagatccagcttttaaggtcagattctgtgacgtttatttgtgttccatactaggcctgctgtgttgccttgttgttttaacatgttggtaagcttatcaattgatattcagagagtatcaactttgagactcaggataagctttgttatgaaagccagctgtgtgaaatgcctgcagatggactagtgggagcggatgggcctggatctcccttgctcagcctgccattcacctcttcccatttccccaagcagaggaggctcagacttgagaaggactaatggaaactcctcttctcccagtattccttcagggtagtggttgtcgaactgtagcctgtatcggaatcacccaatgggtctattaagccagaatgctggccctgccccctggaatttctgattctgcaggtctgagctggggcctaagaatttgactttctaggtgatgctgatactgctagtccagggactacattgtgagggccactgctttagggacaagaactctaagttaaaagaaaaaaaattagaagaatgccacagctctagatagacatagaaaattgagaataggtcattttcaca

SEQ ID NO: 5933 - DNA, 293 bp, mus musculus
ggaagcatctcatttcttaaaagctgtcaaagaattggtgtgaggtttaaaaacgtctctgagcttgatggaaggaaggtaggcggtgatagttcatgctccctttcctccagacacttctcattttcctttcttaacctgctttgatattatgatttcttttgcttcatttgttaagttctcttacaacacttcttgttcacaagtgagtgaagagctgttctctgcttgtaacgttggaaatgggggagtgtttcagaaatgacacaacaaagcattaagccatgaaacaa

SEQ ID NO: 5934 - DNA, 293 bp, mus musculus; identical to SEQ ID NO: 5933

SEQ ID NO: 5935 - DNA, 542 bp, mus musculus
aactcagatcccacctcggaaaatcctcctctccccactcgcattgaaaagtttgaccgaagctcttggttacgacaggaagaagacattccaccaaaggtaatatttactggggtgttttttttaatcaccagcatcactgatgatttttattaccactattccagacctttcgtagtagtggagaatgtgatcatgccaaagcacttccccttctcatgtttgttttggtccctcttcattccctggctaagacttggattgccatttaccatgtctgacctttatttcccccgcaagaaaactgaagtcaggtagattgaagcacagatcctacgtccaaagttagaactctcaacaccaagtattccaaactgtcattttgctatccatattaacaaataaagtaatggatatttcattgatgactgaatctacatcaagacaattgaaaacttccagataaaaagtagaaaatccatgtattcctatttttaacaacacaaaagtgaagccagatttcaggggttcagaagatagta

SEQ ID NO: 5936 - DNA, 124 bp, mus musculus
tccttattaaaacttcttgaagtagattctgattcctgcatgactgactcagacattagcaataagaagcactacataaaacatttgactgtcaagattccatttttggatgtagaaataagat

SEQ ID NO: 5937 - DNA, 546 bp, mus musculus
gtattgaaaagcagtcagtaggttttaaaaaggtaacagagagccatagttaatccaggaagttgagtaaatcaaggttagttaataaaattttagtattttaattaagaaattatctttgcatcttgtgtaatgtgaaatgtataaagcatcaaatgtgaaagtcacacaatgagggcaagaaggctttaccatcctttgctggaggatggtaaagatgaattcatgaggttagttgaacttaagtaatggatagatttaaatacatacatgaaatgaagagagaaaaggtaagacttgacttcttcattgtgacaacatgtccatatccagacatgtgtcagattagcagtgggccagaattaaattctgctgagtgggcagatgggtggacactggtcttctcctgactttctctgaatcccaggttatcccgggagcccagtcaaggactccatgtgtattgtctatggtgtggtactccagctgagtgcacactgcctgttccccacccacctccacagacaattcaattctactttgcat

SEQ ID NO: 5938 - DNA, 552 bp, mus musculus
ctatacttttaattactatgtgcaagaagtttcagccaagtataaaattagaggacacagttcccaagactgccccgaattttgacaccaactataagttgaggaggggactgggatgggtagcattcacaaaaccctgttcagtttcaatatttctctgaaaagactcataaaactctccgaaacctgttatactcatggttatgattcattacaggaaaaggatatagattaaaatcagctaaaggaagagaggcatagggcagagtcaaggtaagttccaaatgtgacctgtcattgtcctcttccgatggagtcaggatgcattgctctcctggcatcagtgtatgacaaaatgcatgaagcactgccaaccagggaaactcacccaagtcttagcatgcagaattcttactagagcaccatcactaaggcatttttgattgattgattgattgattgattgcccatttggttaatcttagcctccaggttgactgatatcacataacccaaaactcctacccaaaatgatagggttggtctttctta

SEQ ID NO: 5939 - DNA, 392 bp, mus musculus
cttgggtgtaaaaactgaaaagtgtcgcagcatgactaaggactatttctcagttgctagtctagcaccctgtatcaggcacctaccttgctcatgttgggatgttagcacccatgaaaacttggacaaggattacattgagttaagcacttagtgattctttgagctaaataatagagggtgggaggcatatgtaaaggaggtttgtttaacgatccctgtattcattgaaaatgtaatgtgaaatatttatatatttttgagggagaatcattaactatggaaggattaggaattatcagtaatggacattttgtataaacatgttaataaatttatgtaatatttaacttctctcctgggaataaaacactttttgaagaacttttagg

SEQ ID NO: 5940 - DNA, 725 bp, mus musculus
atgacatatgacaatttatatagtattttaatgaataatgaaataaatttaaacagttttttgctgaacaaaataataaccgtctcaaaaataagtactggggtaattttattatctgttgttatgtacttatctttgataaattttataaattgtggattcttggtttttgccatttctctttttaagttgtaacctgattaaacaattttgtgtttgaatggtttgcttgaatctttaacaaaataatttgattcaatgaaagaaaaggtaatcaatgtaataataatgttaaataaatagttaaacaaacaaatataccaatgaacttactttgaacaaacatttcccagtgcgcattatgaaaggtatacaaagtagaaccttcagtatgttatcttgcattataaagatccaaagctaaatagaacatgcagccttttccaaacttgttttactctggaacattttccttcaatcatcttgtgaaaaatggccacaggaatgctgctttaaacaaaccctataatatttaaaatatgaaattctacaaaaacgaagtttccaatatcttcactttgataatgaatttttcaaatgtcaagatccacaatttgcatttttcagtgcaaatacactttttcagaagcacaactctatatacagtgctgataaggcttgaaggcactgattactccttccctttgatctggaatttcacctgc

SEQ ID NO: 5941 - DNA, 222 bp, mus musculus
cagagattgaggttagctagtattgaggactataaaaatctttgatagtttaatgggtaaaatatgcaacagggtagaaattgaatatgatagcttttctgcttctttccaaaacaaggaacaacaaacaatcagttctcctaacccagaaatgcttcatatggtttcacaattgatttggatatgtattgttcctcaaatgcagaaatatatgtatatgta

SEQ ID NO: 5942 - DNA, 118 bp, mus musculus
ataaggctacgtaaatcttattttgcctagaacacattaacatctttatgtctgtctacattgttttcaatgacaaagtcaaagtacaataatataggaccataacagttcaaaccct

SEQ ID NO: 5943 - DNA, 1520 bp, mus musculus
tcaatctagccctgaaaatttagatttacaaaatatgaaatttttactttgcctaaaccatataataaaagccatgtgcctagggaagttcattaaatgttttaaggtactaagcgaatgatgggaaatactgtaatagaaagatcacttaatccaggattttcaaacttcgttcctaggaacatcagatgttaacagttggcccacgcccaaacaaaacaaactaaaaaaaataaacaggccaggtgcagcagttcacttctataatcccagcactttggaaggccaagtgggcggatcacttgaggtcaggagttcgagaccagcctagccaacatggcgaaaccgtgtctctactgaaaataacaaaaattggccagccaggatggcatgcacctgtaagcctagctactcaggaggctgaggcaagagaatcacctgaacccaggaggcggagatggcaatgagctgagatcatgccactgcactcaagcctgggtgacagagtgagaccctgtctcaaaaaaataaattaattaataaacaataaacaataaaatgaattccattcattatataaatttggctgcaaaaaaataagccctccttgcaaagacagagagcaacagcatattgaaaagttagagagcatcagcatattaaaaatcctgagaaatacatttaagcctgtttaatatgtttaagtcagtatttcccacattcatttttactatatggcttttttttttttttgcaatcaaccactgttaaccagcaaacatcaagaatcagtaatttaatctacagagtagagattctctttgactgctgagagatcattcactgcatcagaatcccctgttaacaatacaaattccagaaccccaaccccagactcactcactcagcccgaggagtaagaacccattctgcatagtgacactctccgcatccctgggattattatgcatatgaagcatggcagcctgttatccaataggatagataacccaagggtgtaaaattggtgggtgctgttttctgggatagaatggacacattttttaaagacaaaaatatcttttactaggaatcattctgtagaggacatatagacaagtaagtgtaacacaaaaggtgctctgcaaagtgactttacagaaacacagaaaggcctctggttgaaaaatctcttgtcatcagtcacggcagtcagaatttcaatatcagaaattccattgttcttggaagtataaattgaaataacttttctcaaaagctattttacattagatgtcaagagactaaaaaatataaaatggctttaacttagtgattctacttctgggaaaaaacacttaaattcagaaaaaaacttttcatacaaagaagttaattgtaaacttttaatagggaacctaaacctctgacagtgtgtaaataaattagtgtatattcatataatgtagtattaggtatttatactaaaatttataatagcacaaaaaacacattgtaat

SEQ ID NO: 5944 - DNA, 377 bp, mus musculus
tacttagagataaacctaaaaaatagtgtagaagctgcacactaaaaagcataaaacattacgaagaaaaattaaagaactacataaatgtactgagttgacagatcaggatactctatattgttcagatttcaatccttgcctaatacagctacagattcaatgcatatccagtcagtatcctctcaggtatttatttaaagaaataaccaagtttattgcaatatttatacggaaagaaaataaaaaacaaagaataacctattttcccaccaggcatccacagagttcctatgctcatatttcatactatatttaggatatagaatttcccctaactaaagtcatttgctctatgctcattgcttaatatatgt

SEQ ID NO: 5945 - DNA, 85 bp, mus musculus
caaaggaggcccaatttcactcaaatgttttgagaactgtgtttaaataaacgcaaatgaaaagaaaaatgttggtgcagctgtt

SEQ ID NO: 5946 - DNA, 1288 bp, mus musculus
gattaaacccaatgaggcagctgcgagaaccttccgtgtagccaggtcagagagaagttgcgggtaacctggggacctactactcgcgattgatgtctgaagtgagaattggtcttgtgggactgggatcttaacctgtggggtctgcactaactctagctactgtcagaattgaattaaattgtaattcaattacaattaaatctacagagaattagagaattgcttgatgtgggggaaaaccccacacattttggtgaccaaaaatgttgtgagagtacaaaagagagcataaagcagttttttgttttgttgttttgttttgttttgttttgttttcctatagacagactatgtctcttctcccgggcccctcaaaaggtgctgcctccccttcttctctctttagccagcacaagagcacacaggaggccggcataatcacgaattgcagctgtctgaagggcagtcacataaaagaggagaagcttcacctttgcttcacaaggcacatcttgaaccagggatggaaattacagagaggccaaaaccagctcggtgtgagcaggactggtaacagactggccaagcaacagaaggggctgccctgtgaagaagcaagctctctgtcaatgggaggtgcaagctgagcctgcactaccttttgtcacggttgctatggaaaagattaagagcccggtattaactatctattgctacataacagaataccacacaacttaaaagcttaaacaacacatttttatcatgtcacaatgtttggggtcagggattctggagtggcttagctgggtggggtctccgggttggtctctcgtgaggctccagtctagatgttggctggggatgcagtcgtctgtcagcttggcgagggctggatgatctgcttccggaatggcccactcacatggctgtgggaaacaggcctcagcccctctccatgtggcttctccatagggctgcttgagtgtctgcatgacatggcagctggctccctgaagagcacgtgatccgaaagagagagcaagacagaagcgcagtgtcttcaacagcatatctttgaaagtcatattccaccgttttcactacattctattgataagtgagtcactcagaatagcctacattcaagaggagaggaatgaggctgcattgaagggagcacactgcaaagaatgtgtggatttattttaaaaccactataagccccttcagtgctgagttattgtgatgccttatgcattccgaagccaaacgtggatgtgat

SEQ ID NO: 5947 - DNA, 727 bp, mus musculus
agacataaaatgattgccgtatttatgtgtgtgtgtccaacagatctgcaagaagtgtgactctctgctgccagtttgattctccaaatggaaactggtggtggtggcagccgggggtgagagaagagggtgatgacaagaaattgtatcaagcagaagggcttattaatatcaatatttctcaccatgataaatgagtgtcctgggggctctgagggtctgacagttttcatttgctccagatgaagtcctcacagggcctctgcttttccagcctgggatagatttgctgaaatcacaaacccacagcagtctcaagaccatgggttcctataaaatcacatgtaatacacaggattaaacaaaaaccaccccagtatggtgtttccatctttctagctcatcattctgtctttggttagagtgaagcctcatttttctcatcttaactcctgtcctgtttcctttcctagagtgcccttctcccacctctaccttccccaaccataacctccttcaagaaccggttcagataaagcctactcaggtaacacccctatagccccagctctctccgtgtgtcatgcttgtctttgtctttttaggccactatcatgaaataccatagatttttcacagtttcacatttatttttcacagttctggaggctggaacatcaaagatcaaggcaccagcaaatttagagtctggtgagacccactttct

SEQ ID NO: 5948 - DNA, 16571 bp, mus musculus
taaatacaaatacaagagccaataataatttaaaacaagaaggtaaacagtaaaatcaaaagctgactctttaaaaaaatgcaaaaaactagtataaaagacacactatctaatcaagaagagaaatggcataaaaatgttctaaatattcaataataaatattaaatatttaataagtaatactaagttattaataaatattaggaattaaaagagaagatgactattttccagaaagaattataaattgtaataaaaaccttgaattaaatgaataacaattacaaaaatttagttaataattcaatgtactctctaggatctacagaacccaggtgtttttattttgacttttatgaaatcttcgaggaatatatcataaatacattaactagtatatttagagaacaccactgaactcattttatgaggtagctattacctcaatctcaataacagttaattttgtatggcactttgtcatgtgtcacatattattttaagagtaagttgcaaaatgagaattcttttacactgctgatagaaaaataatattatataatcattttagatatatctaataaagctgaagataaaaattccttgaaccatcaattcctcaacaagagatgcttttgtatttgtgccctaagagacaagtaccggaatgttcattgcaaaaccatatcaatggaaagttggaaacaaactaatagctaccaaaagaatgtacagttaatacttataaacaaaagttgcatatatcaatatggacacatctcaaaaatagaatgtggaatttgtgcattaaaagtaaggcagctggtagaaaattgatgaataaaaagtcaatatagaggttctgtggaggaaggggttggattagaatttggaagaaaaccataagtagcttgaatcatatctgtgatgttttatcacctgaaaaaataaagacagaaaaaaatctgaagaaaaataatatagaaattgtcccagcatccaggtagagaaaacaaatctacaagggccaatatcagccattgctccagtaacattcaattctgaattataatggaccagtactgatatagcttaggtctgtgtcctcacccaaacctcatgttttattgtaatcccagtgtcggaggcaggacctggtgggaggtaattgaatcatgggggtaaatccttcatgagttgtatagcactatccccttagtgctgttctagttatagagttcttatgagatctggtcatttgaaagtgtgtagcacctccagctgccctctcatcctcctgccccagccatgtgaagtgctgctcccactttgccttccaccgtgattgtacattctctgaggcctccctagaagctgatgctaccatgcttcttgtacagcctgcagaaccataaaccaattaaacctcttttctttataaattatccagtctcagttatttctttatagtgatgtgagaccggactaatacatgtgtcttctaggtttctaaggaaagaagctgtgatttaagaatatcctacaagccaagatatcattcatgtataaagacagcaccaggcagacattctcacacacgaaaaagttggggaatatgtcacacattgacccttttgcaaagcattttctgtcaagaaaatctaaccaattaaaggatgaatcaaaatagagaacccaggaattaagaaatatgattaaaataaagcatagcaaaagaaggctgataacgagtaacttcacttaagaacagaacaaatattagacaattttgttaattatgataacagaacacaacgtacattttataagtgtaatcaacataaaatgaataaaaactaaaagctaggagtaggggtgatgtgtaattgctagagtagccatatattcatcttttttcatcattcatcatctttctggccaagtgattcacaattctatccacattcaaaaaatgtagttaaaacataattatttcacctcgttttttattgtaaactttattttttagagcagttttgagtttacagcaaaattaggcagaaagtactgaatttccatatacccactacctccatgcataatctcccactatcaacatatctcaccagagtagcacatttgttacagttaatgaattcacattgatacattttcaccaaaagtccatagtttacattagggttcaaatctttgggttttgacaaatgtataatgacgtgtattcaccattgcagtgtcatacagaacagtttcactgtcctgaaaaccctctttgctctgtctattcatccctttctctcttctaactcttagcaaccactgatatgtttactatctccagagatttgccttttccaaaatgttatagcattaaaatcataagtatgtagccttttaagatcagctttttccacttagtaatatgatttaagattcttctatgtcttttcatgtgtaggggaggcaaaattctaccttcaccttcttagggtcccggctgtgtctgagaattaaattggcatgagctagattaatgggagaaaagcatacagatttatttaacacaggttttacatggcataaggaaatgaagacccaaagaagcagttagagtcagatacgtatttatttaattagacaaagaatagtaaagtgtggaagtatgataaggcaaaggagcttaggctagggtagttaactgagtagagatgtacctaggaagataagagttagtttaacatagcttgtttgtacagaattcctatggcttcctcctcaatttcctcatccttgatgataagaatgtttcttttcctctagtatagggaggacatcttccacataaaaatttcatcttccgccttaaaggaaacactaaagtcagagtgatctttttgcacctgctgtttgtcaagtggctttaacttaaatcgtcaatatgacagagtggtatatttttaagttctttacttgccttgatcgctcatttctttctattgctgaacattattcttctgtttggatttaccactgtttatttaggctctcacctactgaagaacatcttagttgcttccaagttttggcaattaggaataaaccttctataaaccatccatgtacataattgtgtgtgtggccctaagttttcaattcctttaggtgagtaccaaggaatgtgattgcaggattatatcatagcaatatgtttagttttataaaaaactgccacactgtcttccaaagtggctgtaccattttgcactcccatcagcaatgaatgagttcctgttgctccacatcctgccaaacatttggtatcatccatgttttggattgtgagcattctaaatagtgtgtagtggtaactcattgtgttaatttgaaattccctagtgacatatgatgttgaacatctttttatatgcttacttgccatctctttttcgtctttggtaaagtgtctgttcagattttttgattttcttattgattagctttaagagttatttgtgtgctttggataaaagttatttatctgatttgtcttttgcaaatatttcttctgtctatgacttgtcttctcattctcttgacattgcctttctcagagcagaggtttttaattttaatgaggtacatcttattgattatgtcattctcagatcatgcttttgatgttgttttcaaaaagtcattgatacactcaaggtcagctaagcttttccttatgttatgttccattcatttttttatttttgtgttttacatttagttttctgatccattttgagttaatttttgtgaagggtataaggtctgtatataaattctttttttttttttttttgcatgtggatgtacaatttttccagccccatttgttgaaaagactgctagtttgccaaagatcagctggactacatctatatgggtctatttctgggctctgtattctgttccattgatctatttgtttattctttcaccagtaccatagtatcttgattattgtagttttatagtaagacttgaagttaggtagtgtcagctatcctatattgttcttttcctttaatactgagttcattcttctgagtttctgcctctccatataaactttagaatcagttttagaatcagctttttatatccacaaaataacttgctaggattttggttaagtttgtgttaaatccatagatgaagttgggaagaactgatgtcttgacaatattgagttttcctacacataaacatggactatttctttggttatttagttcttctttaatttcttatatcagagttttgtaattttccttatatagatattgtacaaatcttgttaggtttatacctatgtttttcattttaagtgctaatgtaaatggtaatatgtttttaatttcaaattccacttttttattgcttgtatataagaaagtgattgacttttgtattctagccttgtatcctgtagccttgatataattgcttatttgtgcaagcaatttttttggtcagttctgtcagattttctatatagctgattatgtcatctgtgaatagagaaaatttgatctcttcttttccaatttaaatactctttatttctttttcttgtcttattgcattatacacttctagtaagatgttgaaaaacagtgggaagggctgggcttggtggctcatgcctgtaatcccagcactttgggagaccaaaacaggtggatcacttgaggtcaggagttcaagactagctcggccaacctagtgaaactttgtcgctactaaaagtacaaaagttagcatggcatggtggtgcatgcctgtaatcccagatacttgggaggctgaggcagaagaattacttgaacctgggaggtggaggttgcaggttgcagtgagctgaaatcacaccactgcactccagcctgggtgacgaagtgagactctgtcttaaagaaaaaaaaagaaagaaaagcagtagtgaggtagtgagagggaacaccgttgcttcattcctgatgttaacagaaagtctctcaccattaaatacaaagttagctataggattttgtagatttttaaaaatcaaattgaggaagttctactctactcctagtttgaaaagaatttttatcataaattggtgtttgattttgccaaataatttatctgcatctattgatataacgtgatttttcttctttagcttgttaatgagattgattacatttattgattttcagataataaacttgccttacatacctgggataaatcccactgggtcatcatatagagtcctttttataccttgtctaatttgatttgctaatatttttgagggtttttgcatttatgttcctgagagatattggtttgtagttttattttcttgcagtatattttgtctggttttggtactagagtaatactggcctcatggaatgagtcacgacgtgttcctctgattctgtcttctgaaagagattgtagataatctatataatttattctttaaatgtttggtagaattcaccagtgaactcacctattactggtggtttctgtgattgaagattattaatttttgattcagtttctttaatagatatgagccagttcagatggtctattttgtcttgtgtgagttttggcagattgtgtctttcaagaaatttggtccatttcatttagattatcaaatttgtggtcatataattattcatagtatttattttcttcttgctctgtcacccaggctggagtacagtggggccatcttggctcactgcaacctccgcctcccaggttcacaccattctcctgcttcagcctcccgagaagctgggactacaggtgcccaccaccacacccagctaattttttgtttttttttttagtagagacggggtttcaccatgttagccaggatggtctcgatctcctgacctcgtgatccgcccaccttggcctcccaaagtgctgggattacaggcgtgagccaccgtgctcggcctttattttcattttaatgtccatggaatctgtagtgatgtccctactttcatttccaatattagtattttgtgtcttctctctctctttttatttattattattttgttggctttgctagaaatgtattcaccttactgatctcttcaaataactagctttcggttttgttgatgtcctctattgattccctgtttgcaactgtattgatttatatactaatttttagtattcattttattctgcctgcattggatttaacttgtacttatttttctagtttcctagtgtagaagcttgaatttctgattttgtatatttctttctttctaatatatgcattcaatgctataaattttctccacagcactgctcttactgtatcacacaaattttgataaattatttttaatttttatgtagttctaaatattttctaaatgttctttaaattttgttttccacccatgtgtttaatcccgaagtattttagaattttccagctattttttgttattaatttctagtttaattccatggtagtcagagcagacactgaataatttgtattgttttaagtttgttatgttgtatttggtggcccaaaatgtggtctatctttatgaatgttttatgtaagcttgagaagaatgtgtattctgctggtgttagatgaactgggctatagttgtcaataatatttagttgatcagtgatactcttgagtacggccatgtccttactgattttgaaagaatagattcaacaggcacaaaatcaatttgcacctcacatattttcatggtctcttgttgggtgtgtatacattaaggaatatgtctttttggagtattgaaccctttatcattatgtaggagtattttttatcccaaataatgttccctgatctaatgtcttcttttgtgctttttaatagattagtgttagaatgcataacactttctccacccatttattcttttaaaataaataataaactgtattttaagagcagttttaggttcacagtaaaacatctctttacttttaatctatacatgtttttaaatttaaagtgggttacttgtggacaacaaacatcttgttttataatctactctaacaaaatctgtcttttaatttgtgtatttagatcaacaattaaaggtaatgattgacatagttggattaatatccaccatatttattattggtttttatttcttgcccttgttctatgtttttttttcttttggtacatactttgtctgcatgttattgttttaattgaacagttgtttatatgattctatttttcttttttacaatatcaattataattttttttaccatgttcagtggtttccttggattttgcaatatacattaacaactaatccaagtacactttcaacaacactataccactataagtggttgtacaagaatcgtataataaaaaactatctttaattcttccttactgttctttttatcgttggtgtcattcatttcatgcttatgtaatacatatgtgtatatacatatgtaatatatgcatatatacatatatgttatggtttggctgtgtcccaacccaaatctcaccttgaattgtagttcccataatccccacatgtcatgggaggaacccagtgggaggtaattgaatcatgggggtagttacctgcatgctgttcttgcgatcgtgagcgaattctcacgatctgatggtttcgtaaccccctattgttcgacacttctccgtcctgccgacccgtgaaaaaggatgcgtttgcttccccttccaccatgattgtaaacttcctgaggcctccccagctatgctgaaccatgagtcaattaaacctctttcccttataaattacccagtcttgggtacgtcttcattagcagtgtgagaacagactaatacaatatatatatatgcatatacatatacaaatatgtatatataattgaatacattgtcgatattattattttgaacactattattaaatcaattaagaatttaaaaagtaaaagttgtaattttaccttcacttagttattcttaaatgctcttcctttctttctacagatctgagttttgttttttttggtttttgtttgtttgtttgtttgtttttttgagatggagtctcgctctgtcacccaggctggactgcagtggcgctacctcggctcactgcaagctccgcctcccgggttcacgccattctcctgcctcagcctcccaagtagctgggactacaggcgcctgccgccgcacccagctaattttttgtatttttagtagagacggggtttcaccatgttagccaagatggtctcgatctcctgacctcatgatccgcctacctcggcctcccaaagtgctgggattacaggcgtgagccaccacgcccggcctagatttgagttttgaacctttcttcttcttctccttgatgttaaaaaatgtcttttaacatttcttgcaaggcagatacacgtaacaaatcccatctttctggctaagaaaatgtatatttctccttcacttttgaagaataatttaacagacagaattctggtcggctggttggcgtttttgtttttcaaacatatcaactgtttaaatatttaactcaactttatgttttcatagtttctgagaagaagtttaatgtaattcttgttctcttttctctatagatgaagtgatttttctccggcatccttaaagatttttttctttatctctgattttctaaaatttgaatatgacatacctacgtgtagttttgctttctttgggcatttattctgcttggaattttctgagctcctgcatctgtggtttggtgtctgacattaattcatgaaaattatcagtcattagtgctgcaaatatgtattgcttctgtttctttctcccttttctctcctggtattcttgtttgtgtatgtcacatcttttgtggttttcccacagttcttggatattctgttgtgttttggttttgttttttagtttttatttcttcttttcagttttagatgttgctattgtcatatcctccagcgcagagattgtttccccagctatgttaattccactaatgagcccagcaatggggttcctcatttgttttagagtattttttatcttaagcatctttttattctttctaagaatttacatctttctgcttacattattcatctgttatttcatattgttagcagcagcgaatctgtatcggtctgcaacgacctcaattcttgccccctaagaagaaagaattcggctgaggggcacaaggcagaggcagagactgaggcaaattttagagcaggagtgaaagtttattaaaaagttttagagcaggaacaaaaggaagtaaagttgttattttacctttacttagaagagggctaagagggtaacttgagacatccaagggcacagtttgactttgacttggggttttgttagcatgcttctgggttttgcatctcttctcccctgattcttcccttggggtgggctgtctgcatgcacagtggcctgtcagcacttggaaggggcagtgtatttactgaagttgcacacatgctcatttgaatcatttttcccttacccgtcaagtgtttctagaggaaggtcgtataccagttaaactttgccattttgcctcttagggtgcatgcttgagcccagttgcccaactcctgagatattatcaggaagttgctgatccccagcttcaggtgtttcctatctattgggagacggcccttccctggtgccggctgcaaccaattactattttagagagacagtttaacaaccacctgaccatcattgcctgatatttctggttggggaggggcctcacgggtcctgctcatgtctgcctaactacctactctaacaatattgtctcctttctttttcaaaacatccattagcatattaattacagttaatttttaaatttcttatctgataattccgacactcctgccacatttgactctggttctgatgcttgttcagtctcttcaaactgtgttttttgtgttttggtgcatcttgtaattttttgcagggaggcagatgatggactgggtaaaagtaaccatggtaaataggcctttagtaatgtagtggttaggtgttggaagaggggaagcattctatagttctatgatcaagcctcagtcttttggtgagcctgtgatcctggactgtgaacctcacaagtaagtctgttttgttttgttttggtttctcccccagcagatgggatcgaatgcctggagggcactgaaattaatgcatttacctttgcctaggtgagtctagagagagctggagttggatatttcccttcccctaggcaggttagacctgtatataacctggcaggttgggctctggtaaataatttctcctgaggacaagccttgttagaacaaaatgttctagagtattacaaaataattctctttgccctcttcctgctggaagcatgagaaaaattttctccattattcactgtgaggactcagtagaatttctggtggtaaaactcacaaagatccccccatacatgcccccggctacggctgggtcctcctggagcttttatctctcaggcttgtccgtaatcagccttcagtgattcatcaattacaatttaggttttcctaccctgttactggtttctacaaaagtttctgtttctggatttctgtttgggtaaagttgtgattctctgccattctctctctccggttttgggggcagtgacatattcagtgacttcatttttctcataatctaagaagagttattaatttttcagtttaactttttacttgctgggatggagtaaagacctctaagctccttacatgtttgacaagaaactggaagtgcaccgctttttttcataactgatttttatacccagagaaacttttatgaaaataatatttttttgtaccaaagaaacattttctaaaaatatcagcaactttgggtttattttactttgtgttgctgctgctaaagtacagtttgttacttaaaatagtttataaatatatatcaatagatatagatgtataaaatacatttttttcttaaaaatgctcttctatttctctgtgttacatacctctggctattttggtcaatatatataagtaaaatgatgtctgaagttttgtgtttttttttttgtttgttttttttttgagacggagtcttgctcttattgcccaggctggagtgcaatgttgtgatttcagctcactgcaacctccgcctcccaggttcaagcaattctcctgcctcagcctcccaagtagctgggattacaggtgcccaccaccacgcctggctaatttttttttttttttttttttttagtagagacggggtttcaccacgttggctagactggtctccaactcctgacctcatgatcctccccacaaggcctccgaaagtgctgggattacaggcgagagccactgcacccggcctctgaagttattttcctggatcattatgtgatgtcataggatctaaggtaattattttattattattctactttactgagtaataattaaaataaaacaccattaatattatagaaataatatcattatttttattaagaaataaacttaatcagtatctctgttgtccccttgaactagtcaagaactttaatttcatatcatgttttcttcccccaacttcctaacacatctcttattgaaaagatctcaggttttacttttaaatatgtattagtcttttctataatacacaattctttagattctaaattgattgctgcctgtgctcaatattccttgttccagcatctttgcttgtttcttctgaaagattttaagattgtttctcttactctggcttttgatgcatttggattggagactacattctccatcttgcttgataatcagtttacttttttttcttttctttttgtttctttttcttttttttgagatacagtctagctttgtcacccaagctgcagtgcagtagcacaaacagggctggcttactgcagcctcgacctcgcaggctcaagcaattctcccacctcaggtttctgggtacctgggactataggcatgtgccaccatgcctggctaatttttttttgtattttgtagagagggagtttcaccatgttctccagtttcatgatgttccccaggatggtactgaatttctaagctcaagcaattcacctgctttggcctctgaaagtgctgagattacaggtgtgagccattgtgcctggccaataattggtagacttttctttttttattttcacatttttaaaattatactttaagttctagggtacatgtgcacaacatgcaggtttgttacataggtatacatgtgctatgttggtgtgctgcacccattaactcatcatttacattaggtatatctcctaatgctatcccttccccctccccctaccccacaacaggcccccgtgtgtgatgttccccttcctgtgtccaagtgttctcattggtagacttttcaatgtaaagaatgatgtcatcagttctgtgtatttatgtcattggttgtagtagcaataatagtattgttattgggttattacctctattacattatttttcttcctttgaaatgagtattaaaatttggatcaatgttgtcttttaatttttctgatgtactttattttgtacctttcccctgcattttggaaaaattgatcagattcatcttcagctgcagctattctactatcccattcatttactgtgattttacttttggcaatcattttcaagatctctagttggtaatattttttacaaccaagttattgattcatgaatatattaaactctcttattactctgaagatactaatacatttcaaagtatctttttgcactaggaactctagttcctaggatgatgtatgtttattaaagttggtgattctctctctctctctctcccatgttacttgttttcttcaagtgtttgatgaatccagcttgtctctttatctttgtatttaagaatgattaccctttctgagagtattatttttttcttcctcaggctatctttaaatttgtaaaagagaaagaaatgtgatatatgtcagattatcctaacagcattgtaaatatgagtgtttctttatccttgtaaatgtaaccaattatccaaagcccaccctgtgtcttcaggcctaagcagtcagttactgcttttttgttggaaaagaagcccattttacctgacggttcattgtctgacaacagagtaagacatgtggggagaagatctctctacaaattaccctaaaggttgtcctaggacacttccctgcttaaggctctattacttttgaacttggcaaacacacctacagagtcatttctaccttttacaactgtgcttccttttatagttataatcagtataaaatatattatactttttgaacttggcaaacacagctacagagtcatttctaccttttacaactgtgcttccttttataattatagagctacgatcgcaataatcaaattctgttttataatatatgtatatattataatcatgatctattataacttctactcaacagaagtgaagtttccctgtttttcagcagtgtaactcattcatattgattaaaactttatatatgtaaaaaagataagtaccttatgtatcatatgtttataattttacatatatgtgtacatacatgtgtacatatatagcacgatttcttttttttttaattttaatttttgagacagaatctctctgtgtcacccaggctggagtgcagtggcacaatctcggctccctgcatcctccgcctcctgggttcaagagattctcctgcctcagattctcctgagtagctaggactacaggtgtacaccacccctcccggctaattttttgtatgtctaatagggatggggtttcaccatgttggccaggctggtctcgaactcttgacctcaagcaatctgcctgcctctgcctcccaaagtgctaggattacaggcgtgagccaccacgcccggcctatattgatttctaaatgtgtcaaaggtgagaaggaggtagatatacatcctgagttcaccatttgatttattcttacactctatctctttaagctgagattataatcactttcttgttttttgtaaaaagttgcacttcatataggatacacttaatagaaagaaagactgtaagtatctgccattccaggaattcagaatagcatatgccacgtttgtgtgtgtgtgtgtgtgtgtgagttaaagacctaaaataaaccttctaaaagaaatattattaatcagtattcttttcttgaaaaaaaaaagttttgaaatatattgctcacaacatttttatcagtattagaataattgaaattagacttatgtgcttttaatttgtttaagtccagtgtttaattttagaagtctaatgcgttactggcatttcataaatattttatgacatgtacattagtaaagatataaataactaatgtcttatcacagttacattttatcatgaaaatattaaattgtctataataaacaatgttcttgagcatattccattaactacttttctggctctctctttaatggcggtgttgtcaatgctgtgaaattatcatgaatttaccccataggcagctgtattttcctagaattactgacctcaggatttataaagagagatagaaatccccttatcatatgaattaatttagatgggcttactgtttgcaaaagaaatgttcctaaaaagaaaaaagaatttgtttagaaaagttattgataaaaatgcaatcttcctttgtaacttaagatgtaaaaaccttatcagttgattttgttttatataaaagttaaattttattcatacttgtttttaaattgttgcttgacggtggttaaaaatgagttctggccaggcgcggtagctcacgcctgtaatcccaacagtttgggaggccaaggcgggtggatcacatggtcaggagttcaagaccagcctgaccaacatgggtgaaaccccatctctactaaaaatacaaatattagctgacgtgatgacacgtgcctgttgtaccagctactcgggaggctgaggcaggagaattgcttgaacctgggaggcagaggttgcggtgagcctagatggcgccactgcactccagcctaggcgacaaagcaagactccatctcaaaaacaaacaaaaacatgagttctgagtgcaattctggttttcataattctgagaacagttccagaatagagttaaatgttgaccttgacaaaacaacccagcctctcagtcccaatggttgtgtgtatcttattttgaaataaactacagcatacagcactgacaacgtattttttcagggtaccttataatcagttgaatcaaacacatcacatggaccccggagaatgaaacttctctggctttgagcttctatctattgcatatactggccatagatatatctactcaggcaactgaaaataaacctacttgcttggaacctggaaaaaaaatcatattttgtactaaaagtaggttaagtatggacctaactgaatcaaatcagatttaacaaaactttacattgaccaagtataaaagaataataaaataatttaaaaagataaaaaatggatactacagtactccatgagtttaaatttttttttaccatctttcttctgtttaatcttcattgtccagaggaatatatacaaaatttttacatttaaaaataattcatatgtttaactgaggagcagattgaatttgaacatttaactggaaacttgttcactagtacctacttctcatccatggtttcactttccattgtttcagttactagtggttaaccacagtccaaaagcattaaatggaatattccagaaattcataagtttttaattgtgcaccattctgaaaagcataatgaaatcttgctccatcttgctcagcatgtgaatcattcctttgtccagtgtatccacgctgtatacattagctgcccgtcagtcacttcgtagttgtctgggttatcagtcaaaaaaaaaaacccatagtatatgtgagctttcatactatccatggtttcaagcatccactggcggtcttaaaacatatctcccatgaataaggggcgactactgtatttggcagctgagtctttctgaatgcattttgacagccttttcaatggcagtgtttatagcaaaaccaatcattatacaacacataatgatccaacagcctgaaagctataggtccactgtctacctagaaggaagtaggtaattaaatatacaagtattatgtgggaatgtggttgtgaa

SEQ ID NO: 5949 - DNA, 534 bp, mus musculus
tcctaatgtctaacttagtgaccttccgatgatactcagcagtgacctcatcagtactgtgggagtggaaagcaaataagctggtggtatgtgggagcacgctgcagatgatgggccctgactgggccatgttcccttttaaattcattgttaaatatcacccttcagttatgtacattgatttagccaatactatctctatcaaaatgggtgaattatttttattaaataagaatgtatattactttatgggataacattggatggcatgaatacaatataatgccttagacttataaaataaacttttcagaataacaaaaatatatactagagatatcaatttgtttttctatttatagatataatcacattataaagatatgttcatataggcaagcaggtgcagccaaaatattcaattcttagtccttgcagtctaggtgatagagtgccagaaatgaaacagttaattcaattatgctagcatgaggaatataaaagagctataaaaatgattaataattgatctgt

SEQ ID NO: 5950 - DNA, 969 bp, mus musculus
agggaattaaggcacaacaaagaacttgcccaaagtcacaatgaacccacactagaaaacttacagtctgtggtcttcattttacatttttttttgacagcatttactttctatatttaaaaataaatataggtgtttaaatacatttcaaaaaatatgtcaaaataattcacatttcttttaattctagaaatattttgaaaccttaacaatggatatattcagtaattattgtaaatagaaatatgagttaggaatttaatcatttgactttctaattgaggcgaatggcagtggctaacaacaccggagtagcactgaatgcagtaattcattcccttcacacaaatagctactgaaaggcagatggaggtgccagttgtgtcgggtgcaggtgattactgcccagcctggacgccaccaggttgtttttctctccaccagaaaactgtccattcactttcctaagtgccaaaagcaaaaggagaggaatttatgaagtccctagcccatatggctggtagtgaattaatctgtgtctgagcagcaggtagcacgagccagtctgtctgttggggctgttagtaacccaggggcagatcagagaacagcaggagagaggatcaactcaggctgcaaatacagtcaggaatgtggcaggaaattatttctgaaaacacactttgcagcataagggcagccatcagatgctacatgataatctatctgcactttgtacactcataattatatagagctatataagtaggtgtgaatttaaaatgtagttgtagatatatagctatcatgagattttcctttatatagcatcttgcgttaaaataattatttcaagagtacctcaaaaataaaatacgcaggcagagagattttaaaattatgaaaaagagaaattagaatattagaaaaagggtatggatctattcgaaagtagaatagcaaagatga

SEQ ID NO: 5951 - DNA, 2421 bp, mus musculus
aaacacattttccccctcattgtcatcgtaggttacatgttgtcaaagacccgtggtgtgcagaggagaactttgtgatgattagcaatgcggcctgactcaaggcacttccgtttgatgttttaatggggagtattttcgcttcagtttcaattaaagatgtcagggctaggagcgttagttcaaaaacttagaaactctgccaatcagccacgcgaatgtcatcttaaagtctgccagtgtaccagtattctcgtcaggcggcagcatctgtgttcactgggtcgcttacctcctctcctccccgctcctcctctgcaacttggtctctcacagcccacgtttcccacaccaggaccactttctactggaacaagacactgttttgtgcctgcttttacccataaagtttcttctgataattccttctcccctccattcatgcatgcattcattcacttatgttttcagtgagttagtatttaccacacaccaaccatgtaccagacattggcataggcactgggaatataactatgagcaaaacagatggaaatccttgtccttacagagtgattttctagtgaggagtcaacacacacacatgctttctctttctcaagtaaatgtagaaagtaggtgttgtctctacttattaaattctcctcattcctcagccacatatcaccttctctgttaagtctttgttgattcattctttgcgccagttcagaagggagggagttaattgcctgtcctgcattagctctgtgttttcatttgtgaccgctgtagtgctttttaccgtgtattaaaatactattcactttacagtttataaagcagtatgtcattgattatttaattctcataacaaccctggaaaatgggcattatcatctccattttacagatgaggatacaaagagaccaagtgactttacaacccagtaaatatcaaagccaggctttccttccttatatctctctcttttttatacatttgaggagcacacattgtatgccagccaacagtgctggctcatgggcaagtgtgtaagtgtgtgtgattaataaaaccagggttcttgacctcatggagttaatcagatcggtacacaaataaatgtaaaaatccacctcttaaaagtactccttaggaaaggctccaggttatggtaggattacataatagagatttggccaagtcaaaacagtcagggaaggctttctgagcaccaaaggataagagttaaaaggtgatggtggctgctgggggcaggcacatggagagtgatgcaggtggagggaatatgggggcaaagaacttaaacctaagactttctctaagtcccgaatcttttttttctcactgtgctggattcctttttgtagcttttgatcctttaaaattataagctttctattcctggaacttctcagctttttttttttttcctggacagtctagattataagctttttgaagacagtgattgtggtatacatttcattccccctggcacctagcacatggccacagcaggacttagttatttaatttaatttaatacgttgaattaagttgaatctataataaatagtctcactgtttctaccagaattttatctcaaggatactaaagtggaatgtcacagttgagaaagagaatatagcattatgtttctttcaggtacacattcccacttctgaatcctgctttcctacccactccccaactcagtcccatttcaacctggtctttcattagacatctcaccacaaatctctgagattctgtgagctggcctctgagaaatgactcaatgttaagataaatcgttttgagactattatcctttataatacagggccatttatattacgatttaacaatttacatatagttgtctcatttggtccttaccagtagagatttttttctccagttttacagatggaggcatagagaaattaaacaaaattctcagggtcccatagccggaagatgagagttgaactagagttggaactagagatctaattattctctgtccagtgaccagattctacagaggcagcattgtgaagtggtttaagaataaactctaggttctgagtacctggatttgattcccagcactgctcttgaccttgggcagtgtatttgcctgctaggcttctatagcaaaataccacacaccaggttttgctgaaataacagaaatttattgtttcatagttctgggagccgaaagtccaagatctagggccaggagagttggtttctggtgaggcctctcttcctggcttgaagaaggctgtcttctcactgtgtcttcatggggtcttttctctgtgctcttgcacacctggtgtctcttcatctcatatggacattagtccttttggattagtgt

SEQ ID NO: 5952 - DNA, 733 bp, mus musculus
ctctttccaaaacatgctgatactgaaggggtcacgctgaaggctgagggctagggcctttaaaggtggggcaccctcttccttctacccgtccttgaccctcagcagactacaggttgatctcccctttgccatgagtgcccaaggagggaacttgtgatctagcagtttcttgataatccccaaaaggctttaattactccatttccctgccacgcccagggcaggaggagggtgagcgggaaagctgtccaccttctgctaaacgggtcaggaggcatcgggagccacgtgggttgtggtttaggagcctgagctgctgatccccaggcaggcctacacaatgggagctgctccctgcagcccccgggccggcctgggttgcataacccatgaggtcagcccggcctgcggcagttgctttcccacaacggaggggccgctccccacctcctgcgggacccacagccctgggtctctttccagctttcctctttcactggcaaagctgcaggccccataaactggggaagggttgaggccctgcctctcctgaactgggcaagggtcgaggacttccccatgggtccaggcctccagcattacatcaggaggtagcctggggaggacagagcactgaatccctctggcatcagctcctctggccagccctgcacctgctctgtggggctagggcctggggaggtgtcccaaaatagcccgcaggggcccg

SEQ ID NO: 5953 - DNA, 215 bp, mus musculus
agtgagcaccttcacttttttgatatcccaggatccaagtgaaaaaataaggataaaagacagtggggaaaataacagcttagtgcagaacagggaaagcttcttttctgtttctgaagccccacaaggtcacctcctctcaatctggctatttcatggagaatccaggtgacaaagacagaagacacattttatgtctgtgtctttttgtttct

SEQ ID NO: 5954 - DNA, 1357 bp, mus musculus
caaaaaccaaatacccacctgcccaaaccaccgagagtggcccgccccacactgtgccctgccccacgctgtgccccgccccacactggcgtgggcagacactttgaggagctgagttaacaatgggtttctaaaggattagccgaaaacaattacatgtgatttatgaggatggtaggaagggatgagcaatgagcacaattagtagaggagtaatagtgattttaaaagttgttttaagtgtggcgcaatcacagcgtgcgtgcgagggctggcacctgccggccttcctgggagactgcctggccctcttcctgtggagggtggtactcagggtccgcggggaagggacactttccaagcatcaaggaggcgccaacccgtgctacggtcggcttctagtggagggaactgaggcggggagagcttgaggtatttgcctggggacgtacgggagcaggaggtgggacccggacgtcctggctcagcgcagccttttccagtacccgggaccacgggccagcctgtgtcccccggcgccaggcagagcggtcccaggcacgcgccccagggggcttattgaactgcatatcccacaaaaaccctcactgacataaacgtgccctggctggtggcccctgcctgggaactggaagtcagggctgatgtgcctggccggccgtggttgcggtggtcagggccaagcgccggggctggggggccacttccaccctttcccacacgctgctgcctcagggggcacattccggggctggctctctgtgggtagaaccaagctgcttctgaggggctgaactcagcacccaagtcctcccctcgccttctctttccaccaaaccaaaggctcgcccagcctcggctgcagcaaggaagaggtggccgatgtgtgcaacgggggccaggacatgggggaataatgtgcccttgtgcctgctctccagggcgcttcatgttccatcccatgaaataagcgtcattctcagccctgttttatagagggggaaactgaggcatgggaggttcagcaacttcccacgatgggcacctaacccatgttaggcggcagagcttcatggctcaggccgccagggtcaggggccacagtcctaaccatgaagccatcctgccttgatgaatgtggcgtcaatgggcaccccggagccagcccccggccctcccctggctgttctgtcgtggggagagttgggtctcaggctatctctgagcatctcggctggcccccacctgcccttccctgagctggctccttatggccctgagaagtaaaaaatatccctttccttagcaacttgaccccaggacataatgaaggggg

SEQ ID NO: 5955 - DNA, 765 bp, mus musculus
caaaagtaagtttttaaaaaacctgcatgcgatacaataagatttctataaataaggatattggaataaaggtaaaatacagctggaatgctagggtttaggtagagacatttaggtagtagaatgcaccccctaaagccctataatttttaccttgttctgagcttcctgagaactaaagaaaagtaagacagggttggttatatgattcatgtcatctataagctaaaaataaatcagttgatctccacagtggagatcaagattgcattagattaggtctgccatgacaaagtaccacaaactgggtggctccaaacagtagaagtgtattttatcacaattctggaggctaaagctctgaaagcaagatgttgggaaaaccaagctctctctgaaatttgcagtggagaatccttccttgtctctttttagctgctggtggttcttggcatcccttggcttgtagaagcatcatcccactccctccttcatcttcacatgatgttctcattgcaggtgtccacattttctctttttacaataacactggttattttggactagaggcccaccctacttcagcatgtctccctcttaattaattacatctgcaatgaccctgtttccaaataaaatcacattctgaggtattggaggttagaacttcaaagtgtgggaacaatttttaacccatgacaaggattaagaaggttatgagtgtaggctatgaggccagactgtcttgctgaaatccagactcta

SEQ ID NO: 5956 - DNA, 735 bp, mus musculus
actataattgcttttgaaaacatattcataaatcagcacttccatacaagaaaagtggcacatgtgcagaatgattaatctgtaatacattttacaaatatttagaaatcctctacttcagtaccaggcactgccccagacaactggtataccaccatgtgcaaacaaactatggtctctgtcttactccacctggcatgaacaagtggaaacactgcaaggtacaggccagaaaaagatggtgtgacaggagtgttaagtaagaatatcggcattgaactcagtctggatctggaggtcagggtcagaaaggttaaagtttgttgaatctatgtgtgtttaaaacttttagacaactttgtactcattgtttaactagtattagataggttcttagacgatttaagtcagttttctaaaaggagtaatataatttaaaaaatgttacatccagttcaaggactcaacattctgactaggcatttgagtaaataatttattttctctaaatcatgggttcttcatctgttttatgagtctactaatacacacctatactgcttcatagcacagttgaaaggctgtaatgggagaatggatgtaaaagaagttagtaaatcataatatttacatatcattgtaattcactataagaattatcaattaccttttgctcgattgaatatagttatgaatgaagaacagtctagtcatgctagtcattacatggtgtat

SEQ ID NO: 5957 - DNA, 1567 bp, mus musculus
cccctttaaaaaaagcagcattcaacaaaattgtaaatgttctcttgttttgcttctatcacacactttgggcttgagttgtattttggaaatgtttgtgtcaggataaggcaaactcagggtgttcctaggtcaaaagctctaatcatcaaataaattcatcaccacattggttttattcttggacactcaccccttttacctaagaatgtagtatagcatattcaaaagaacaggtggtctacagaatactgggatttgaaacctagatttctatgagatgttgggcgagatattttaacttctcttaatctctccaaataataataataataatacctattgaatgcttatatgctaggtactgttcctggtaattttcaaatgttatctcatataataatcattaaaaatcccatctctccattttgaagataaaaaaatgaagcttaaaaaagttaaataacatgctcagaatcacacagctagtacagaataaaatctggattcccaactcatccaacagtttcagttccactgcttttaatccctactacttggattctgtaaactgatggtggcaccattgttaagacacagactgggagacttgatgcagggcatgcatctggctcaagcttactgttgtcagtggaccataggtgcccagagctctaactcatcctctgtttgacctgtcaacctaacatgagtgacacagagatcaactctccaaaacaaagagtttattcaggaagaataagggattgcatttctggatatgtgtgctacggcagaccataggcatatctgagaaggcataagcaagggaagcttttttaaactgtttaatttttttttagagatggggtcttgctctgtcagccaggctggagtgcagcagaacaatcatagataaaagtagattcgacctcccaggctgaagcgatcctcccacctcagcctcccaaatagttgggattacagtgtgagccactgtgcccaaggggaagcttttaaaggcaagaccattgtttacaggagattttcaaagtcgctggtgttggttcattggtggtgctagctgttgataggtgaaggccttcataaaagaggcttaactggaaagttctggttgggaaagtcctttgtggcagttcctgttactgtcatacctgtgtgagggcccttccttcatggcctcccagttccattttcttagggtttgacatgagtgactccatctttgtactgataattttcacagacctgagagagaatcaccccaaactgtcatgtttatacctttctatgtggcccaaatttatacaatcctgcaaaataaatactgaaccagccagtaggagcaatctgcttaccaggcaatccttctggaaaccttgcaggctacaagtcccaagacagccctgtaggcacaagtcctagagcgactcacaacatctggtcgactccacataaggttcagagttccccagggggcatctcaaccagttagcatagccagacccggagacaggggctccaaaactcagtcatctctgatgct

SEQ ID NO: 5958 - DNA, 427 bp, mus musculus
tggtttaaacccttggccctgctattcatccctggcttgtgtatgacctaagaatcactatgcaaatatcacaaataggcatgtttgggtgttttttgagagtatgttttctgatctgtggacttcatttctgtgtttccaaatgaatgcatttttatatgagtatttgcaagtctttcccccgctctgccccagagaagatttcatttccaatgggatctgtaatggcataaggaaggctcctgatttttaagagacttaaaatcctgcttcaagataatttaaacttaacccttctatttttgcaatattcgattatccccaggtccctctgcccacttattttctgacttaaatcataagtgctctcagagccaattttcaaaaaattttactttgaaatttttatttgatcagcagcctcaag

SEQ ID NO: 5959 - DNA, 176 bp, mus musculus
tacactttaatttaatttctattaacctttatcttatcatatgtaaaatgatattcaataaatgacagatggctattatgtttagctcttctatgtgcattaacatctgtcaaggtttcagtagaagtcagtaaatacttactgagtcattcatttatttatcaataattcaacat

SEQ ID NO: 5960 - DNA, 750 bp, mus musculus
ttaacttgcattaacctttccttcgaggctgacaaattgtgcatctgtggcttgttcagtctaatttttcatgtcattgccttgcaaagcatacagatttataatgtcaccatgtgatggatgcaggtccctcctttgccttggagaagggtttcatcccacttagattatgcattggtttatttatttatttccagttccacttaccacctatttctaagggcctccagtgaatttatctcccagaggctcatgttttgaggatgaatggaagggtaaccctgtcaggaaccattaacacgctgctgctgaggagcctccacattgttctggcctgtctcacacagaacagcctttgcctgttgtcactaagaatttgtggacagaaaatgaagactggtgaaggaaaattaggtcaaaatagtgtgtgggaagcaaagtgacattcttgtcaattttgcctaatctctaaaaaaagagcttacagttataatttccttcgacatggacagctgagacttgaactccattattttgttgtttttgttgttttaatttataattgctcccttcccctcttccccacaaactttggataccaaaagtgagcaagtgtccaaaagttctcagttgaaacttagaccagaatgctagggatctggggagaaagtaggcttagcagggctgagtgtcccataggtgttcacagttggtttccaaaatgggtttatgtaaagaatcaagggtgat

SEQ ID NO: 5961 - DNA, 9860 bp, mus musculus
gtagaaattaatgaagtaaattgatattattttaatgggtttatatacagtcaaataaatattagtaaaaatgatttgatatacactcagtataatactgtagatgtagagctatacaatttgtttggagaacaggtatttgtcactaataaaaactggagtgaggtgaatttgtaataaaaactggagtgaagtgaatttgtattcaacaccccatcatttcaaatgcatcttcttatcattcatcccttacttgcaagagacagccttgttactgtataagtctatttacatttcttatatctaacatcagatcttctcttggtaacatcatcagaaaagaaattttgaggaatagcaatgtctgaacataagacatttaaaagaagattttacattctaaaaatcatgtccactaaattactaaattgcccttcctcaggttaaagccacatgctccttccttgtagttcccttctccatttaaagcaacattcagctcagtctctgatttaataacaacggagacaccgaaaacagaattttaattccatctctatcattaatatattacatgaccttgggcaatctccaagcctcatctccttcatctaaagaaatgatattctcaactccatagtagcttactttacagtcttgttcaaaggaatgattagcaatgtctgccaggtatattgaacatattaagtgctagatacatatttaattacaagatggaatctttatgatattaaaggatctgctgcaaaaaaaaaaaagaaagcaaaataaatcatgcactggaatgcaggatcagagcaattggacatttttcttccttggtaagaaatttataagaaaaaaagaaaacaccttctaatgctacctgttgcaaaaaccaactaggtcagttttacaatagaattttttaagacaatgaactatgtgccccaatgtggtttatgttgaggcacaaattttgctattttgtgcagaactgcagaacacttatttgtcctactttaagtaaacctcctgtagaccaagaaaccatagacctgcaaaataatcagatgtgatatgcagagtttcccccatactttcttgtcatctcttgtactcagagagtgggcacaagaggtgaatggagaaaataaaaatgaattacactccacaaaagatgagggtaacatttcctaagtaaagaaataaagtcacatttcctaagtaaagaacagcatgggaatttctggatattagcatcgtagcactcagtagaacatttaggcctcaatgcatgtggtagactgtcccactggtgcatgaaatggctgcacccctcagtattaaccctcttgtgttgtcagttccctcctacattgaatccaagccaaggaagcattagcacaagtgatacaagcagagccttgatacacacttgcacttagcacttttctgcttggaactcttagaaaccagccactatgcttaaaggaattgaagctattctgtaacagagaggccataagaagatatcctacaacataggacaacacatatggtagacagctgagggccccagctgagttctcagacctgtgccaacaccccacaaagcaaaggaatctagcagttaacccctcaagtttccagaatttataaatacttattttaagcctccaagatttggggtaatatgctacacaggactaattaattgaaacaccacctattcactttcagctctttttatgagaaattcatagttaccccaatgcagtgaattcttttaagtttatgttgctttcgtatccatttcaaacacaagtttaactttcacatatgagaagcagggctcagtcacccttgatacagttttcagttctataccacacccaaatggctcaagccattggccagaaataagaactcagaggcatctctctacctaacagcctgggctcccttgcctatgaacttaaagtggctcaagcctcaaaccctattcatatatatatgtatagttcccaacttttctctctctctctctctcgctgccttacttttcattcctgcctcacgtgacctgggcacagaggactgctcagctgtctcattgtgaggttcctgctcaggatgtttaaggaaaaatcattgaacttgttttctattgggaagtattgaatttgaaacatctgaagaaccaggggctactccaggctaagtttccccgggatcctggggcatgagtggagggctagtggagagctgcaagatcaggttcccagccccagagcatagtgaggctgagatgaactgcacatgggtcaggcaagagctgcaagggcatctgccagtataaacatgtttcccacatgagcgaacccctggtcatgggtccaacagttaagcatgaggctgtcctccaggtaagagaagcatcctgtgaaaggtatactgttaacacccatatccagctccccttcgggttcccactggggagggttgctaggcacattgttattggaaccccaatttagcaggaggctcccccaatgcccaagcactaggattttccaagcttccctccctacactttgatctcagatactcctcaagcattctttcctgtggttttcttagttttgctttgcatcatggttcatctattaagagttggcatgaggagtgcatataggggataacacaagtataggggatcatattagattcagctggagggttttttttaatcaacactccaagaaattgggttcactgttctttctcttatatcttgatatggtttggatctgtgtccccacctaaatctcatgtcaaattctaatccctaatgtgggaggtagggcctggtgggaggtgaatggatcatggaggtggatttcccacttaggtgctcttctccttatagagttctcatgagatctgattatttagaagtatgtgataccaccccactctctcttcctcctgctccagccatttaagacatacctgtttccccttcgccttccaccatgattaaaagtttcctcaggtgtcctccccagaagctgctatgcttcctgtatagcctgcagtaccatgtgctgattaaacctcttttctttttttaaataaattacccagtctcaggtgtttctttatgagagtgtgagaatggactaatacacatcccatctatttacaagggattattttcttagcgagacacttgccctgaagataataagtgtcatcttgcattagtctgttttcatgctgctgataaagacataccaagactgagtaatttataaagaaaaagaggtttaatagattcacagttccacatgactgaggaggcctcacaatcacagcagatgtcaagagagaacttgtgtagggaaacttccatttataaaaccatcatatctcctgagacttactcactatcttgggaaccacatgggaaagactcatccccatgattccattacctcccacccagcccctaccatgacacgtggaaattatgggagctacaattcaagatgggatttggatggggtcacagccaaaccatatcactccttaagtacatagtaacagaaataaaaactggaaaaaaatgttctagccctttgattgaatactttcttggttcttgatcttatactctttcaggacatcacttacagaatctgcacacttggtcatcagtattggaggaataggcaccttcccccagcctcagccagcacctgtctataggaagtaaataatacaacaaaacataaacaaaaataggtcatttgaataatcttaaagttctgtcattgaaatatttgctcaaagatcatttttatttctagaccattataaaccaagactggctgcagctatcattgtacctgattcacagctatgtaatataaataagaacttttaaaaagatttccaaagtaaaggcaaggggactggcaagttttcaattaagatgtctcaacctaatttaagattgaaatgccaaacacaaagttggtcatttggtgaacacgtaaaagagcagataataaaaagatgcttttagtaagcagatgtgcaatgttaatatagaggttatgtcattttatcaaattccactattacagtggtcatatgtttattgtaataaactgtcatcaaagttttcaccagactcagctgaattatgttttttaattcagctttttccaagttgtcaaatattgaatgtgactgtgaatttttttggccagaaagggggaaataaagagaaagaagagaaactgggagtttgaattgatttattttaagaataattcatattggttatttaagtaactcatcagttaaccacatcaacacacttaatatcttctacttacatagttaaaaatgtatattttgcttatgttaacttgaaaagaggatatggagtccaaaaacattcagattataatgctttttaaataaaatttgacaatatcaaaagaaaacaagactctaggtccatcccatagtactttactaaagaacactcctgtcagtctaatctaatttaattatgttgaaagtggattggcttcgaagattgaggaaaagaaataatatttaaattatcttcatttgagtaagatattttattttgtcatacaaggttatatgtcatattattcatataattgatgaggaaaatctggtttggatatcatatacctattagggtgatgcataactggctggtgaataatagtcacaaatttttttcagcattgacttggagatggaaaagataaataccagcatttttcaaaagctgatgttgaatgcttggttggatttatctctcttatctaagatccagagcatattttcaaacaaattcagaattctccataaatggataaattaggtttaatgatgataataatattaaggtttaaccgacagaaacttagagaaaagagaaattcatagatattgtttagctctgggtccccatccaaatctcatgttgaattatgatcttcagtgttggaggaggggcctagtgggaggtgattggatcatgggggcagatttctcccttgctgttctcatggtagtgagttctcatgagatcttcttgtttgaaagtgtgtagcacctcccacctctctctctgtgtctctctctctctctctctttctcctgctctggtgtgtgaagacatgtttacttccctttcgccttcctccatgattgtaagtttcctgaggcctctcagccatgccttctatacatccagcagaattgttgagtctaaacctcttttttcataaattatcccatctcaggtagttctttatagcagtgcaagaatggactaatatatttacctaataagaaacccacacagatacaatatgaggaataactaataatacacctaaaagaatttaagaccatcattttatgtggaatttttttttttttttttttgagacggagtctcgctctgtcccccaggctggagtgcagtggcgcaatctcggctcactgcaagctccgcctcccgggttcatgccattctcctgcctcagcctcccagagtagctgggagtacatgagcccgccaccacgcccggctaattttcttttctgtgctatccactctttcatattttatctgtacatttggtccaactttcttcttctatcatcagtctactgaacacaatcaccagaacatgttgtttacttgaaatcagtacatcaaatatgagctaataataaaaaagtgatttctcaatggagttaaaatattcttgaatacttcaatcacatgaaaagtttcttgatttacacaacatgacttataataaaggaatacaagataacttttatgcaaaaattatataaaattccatataaggccaggtgcggtggctaagtgtgtgtgtatgtgtgtgtgtatgagagagtgagagtgtgtttctggaagagattagcccttgaattgacagacagaataaagcagatggctgttcccattgtggccgggtattatccaatccactgaggatctgagtagaaaaaaaaggcagaagaagggtgaattacctttgccagactgttgagctggcccatcaatcttctcttgctgatggtgcacctggttctcaggctttcagacacagactgcagtctatagcatcagctctctagatctcaggctttaaaactactccaggagctttactgagtttctagcttgcagatggcagactacaggactgctcagcttccatattcatgcaaaccaatactttatggtaaataccctactggttctggttctgtttctctggagaatcctaactaaatcatattttggtaccaaaagagtccagatgaacagaatgttaagcatgaggtttttaaattagttttagggtttctggaattggctctttaatttgattagacttaagatgctaatgacttaatttaattactagagctagcactgtaatccatggtgtgatctggcaatatacctataaaaatatgtgcattacataatcctaatcagccacttataagaagtgggatgactgtatatgatgcttttaaataactttgggaaactaatgaatataatgttgctgactggttggtcccaacatcagtgggagatagaaaggactctaacagttaggctggttgactgaaacatggactgaaaagtggcctgctataagcaacttgtaaatgctagacatgtgttggtttaatgtagagaaatagattcaaagacttgcaaatgcaaggagactgaaatgttaagagtgaatttgtcatttaaggcctgctcacccacactgggaagatccagaagacatacctttcaccaatactgtgagaaatatatctgtgaggagaacctcagcacccttgaagagctctgtaatcacctttctctatagaacagaactcccaatgggatctacaatcactaaattagaaaacctaaatgcaatgggagtaattggattccagtgtgacaagggcagcactcaaccaacaaaggcaaggtggatgtggttaccataatggacagcagagtcaaagtaagaaagcaaaatagtctgacttgaacagacctacgacattggctaattgatcatggtgtttctaaaagggaaatgaataggaagcttactaaattcttacttgatctgtacaagcagaaaagttctaggtaaagtcaacaaaagaacatggggcatgttctatggtgaaggataaattgttgcatctggtccctggttcttcctacaagcaagaaaaaggcacaacactagtgggtctctttgtatttcagaggcaacgtattcctcatttgggtgtattactccagcatatttattgagtgaaccaaaaagctactagttttgagtgggacataaaataagagaaggctctgcaacaggtcccttctgccctacaagctgttctgccacttgggtcatatgatccagtagatccaacagtgcttgaagtatcagtatcagacagggatgctcttgggagcctttggcaggtccatagggatgaatgacagcacagacctttgggattttggagcaggactttgccatcttctgtagataaccactctcctttagagagacagcttttggcctggttactgggccttagtagagactgaacacttgaccatggaccatgtgtcaccaagttacaataaaacctaagctgtccatcattaatttgtttttacctggtccagcaagtcatagagctgcacatgcatagcaacactccatcattaaatagaagtggtatatatatatgataagatccaagcaggtcctgaagatacaagttaaatgaagaagtcgtccaaatttcccactcattctacactatcttttctctcacagcctgcttctatggcctcatagagagttttctatgatcagtggacagagttagagaagagtcaggcctggtttacagacttttctgcacattgtgcaagcaccacctaaaagtggacagctgcagtaatacagctcctctctgggatatctctaaagaacagtggtgaagacaaacctcctactgggcagaactttaggctgggcacgtggttttgcggtttcgttggaaggagagaaggtcagatgtttgactatatatgaattcatgggctgtagccaatggtttggttggatggctagagacctggaagtaacattattggaaaattgatgacaaatacatttgggaaagaagtatgtggatagacctctctgaatggacaaaaaacagaagatatttgtgtcccatgtaaatgctcaccatagtgtgatcttagcaggggaagactttaaaaatcaccaggataaaatgacctgttctttggataccagttgtctttgttttccaggcaaccctgtcatcaatggattaattaacatagtggccatagtggttgcagtgatgctggttatgaattggctcagcaacatagacttccacttatcaaggttgacctggctacagccatcaatgcactgcttccatcaaggatggtaaagtgttctgaacttactggaatagacactctggatacaggtttgtctttcttgcatggagtacttctgccaaaactcccattcgtggatttataaaatgtcttattcaccatcatggtataccacagagcattgctttttatcaaagaacccacttcactgcaaaagaagtgagagaatgggcccaagattatgaaattcactggccttcccatgatatccaccatcctgaaacaggtagctggataaaatggtgaaatggccttagaagactcagttacagagtcagctaggtagcaataccttgcaagacgggggcaagactttccagagaatatgctctgaatcaatatccaatatatggtcctatttttaccatggataggattcatagaaccaggaataaaggggtgggggggggaatgagagtagtgccactcacaattacttccagtgactcactagcaaaattttgttttctgttcatgcaactctatgtgctattcactttgaggttttagttccataaggagaacttcttccaccaagagatagaactttgattacattaaactagaagctaagactttcacctagctactttaggctcctcatgtctctaaatcattaggcaaagaagagagctaccatgctgggtgggttgattgatcctgactaccaagtgaaaattagaattctactccactagggcggtaaggaagagtagatctggaataaggaaaatctaccaggatgtctcctaatattagcatgccctgtgattaatgttaatgaaaaactataacaaccaaatatagggaagagtactaataacacagtccccttcagaaaagaaaatttaactgactccagcaggtaaagaaccatgaccacctgaggtacttgttgacagtaaagggaatatagactgggagtgagagttagcgaaaaataacagcaacaaccccgtgactaggtacagaaataagaactgtaattatcttgagtatttcttccttattttgttataaatacacacacacacacacacgcagatatatatatatcaatgcatatatagatacgtatatatattctattttatctctcatttctttacgatgtgacataagatgtgttgactttatgtcatggtatttaaggattgttaattttacatcatagtatttaagttacaggatattaagaaaaagagtaaacatcaattaa

SEQ ID NO: 5962 - DNA, 318 bp, mus musculus
tatttaagtgcaacatcttaaggagagagaaagaaggaaaggaaaggagaattgcaactataagatgctttttggtaagctaggagtggggggcaatctgaaaatactcctcgtataataagctgtatatccttacatcatactattctgattactatcacagcactgccttttttctcattctgcctattccttcatctccattggcctcatatatatagtgacattaggaatgacatgggaaccttaccagagtgtttatcatgtaaatttggcagctatcctatcaaaccatttttgttaactagtttctttaga

SEQ ID NO: 5963 - DNA, 235 bp, mus musculus
caaaattcccaattttatcttatttctagagcatattaagcatagttattttaaactctttatctgatgactgcattatctggattgtcagtacatctatttatattgtctaagccttattttgattattaatcacatttcttgttctacatatgcctgtatgattttatttaggctccagatgctacctataaaaaattgccaggataatttgaggccttggacgatggtatct

SEQ ID NO: 5964 - DNA, 1054 bp, mus musculus
ccataaagtaagtctgatgacaggtgttgtattaaatttttatatcgcaatgaacttatactcacacaaaccaaatctgcatgtttcccttgatatacacctgcaacttgttaattcaagaaactttattaagaaagcataaatttagcaacacctatagatttgtaaagccctattagcttgcttgacaatctagagtaaatgtatttggggtcttacttgcatggtttgcaaagacgtggacactacccatgacttttttcaaaaggacgtgcttgcagatagcacagttccacaaattgatgtacgcatattacctagacttggagccaaaagagttgagagagatttgggtcctgtgtggagctgaggacatcacttacctgccagcctgcttctcgctgaagtacttttttccagtcttcttccagccttggggaggtctcatccattgctgatgctgcttgcacaaactggattcgccagcggctgttactctctctccttgcaagcttttaccaaagcagcagccagggcagtccaggggcagactgtcatggagaaaatgccatgccagaggatgagggatcgggcaggaagaacccaccggggaacaaatttgggacacatggggctacccagacagatgccaactggccaagctgaaggccagctcagccatcaagcgtccagagattaggaacaaccaagctccagggccggtggacaatgggtcattcttatgcttgtggtgtaaaggtcagaagagggaagtgtgcaggcttgctctatgcttgagaaatatgcatttctatgtgtgctcccgtcttctccttgccccaatacacacacacacacacacacacacatatgctcacacacacaccagaatttgcattgttctgccaggttgcatcagtgggctggtgtatcctagaagaaataaactattttacatagtagcaacacatttcatttgaatacatctcccccaaaaagcagcgtatgaatcactcagcagccagtgaacatgaataatagcaagctcctttgg

SEQ ID NO: 5965 - DNA, 1205 bp, mus musculus
aagtatgtttttcaagaatacttatcacccaaattcttctatttttgcctatggagaggtacttggccttctttccttttttcctggaacaatggttctcaagctgtgatgcccagaccaacagcatcagcatcacttgatatattagtttgttagggctgccaggcatggtggctcatagctgtaatcctggcattttggaggcccaggtgggtggatcacttgaggtcaggagttcaagaccagtctggccaacatggtgaaaccccatctctactaaaaatacaaaaattagcagggcgtggtggcaggcccttgtaatcccagctacttgggaggctgaggcaggagaatcgcttgaacctgggaggcggaggttgcagtaagctgagattgcaccactgaactccagcctggctgatagaacaagacttcaactaaaaaaaaaaaaaaaagttagggcatataacaaattatcataaacagagtggcttaaaacaacagacatttacgttctcacagttctggagtccagacgcctgaaatcaaggtgtcaggagggccatgctccctttgaaggctctgacggggactcctttcttgcctcttcctagttcctagagttgctagcaattcattggttttccttagcttagagatgcatcgctccaatctctgcctctgttaccacatacatggcacctccttatgtgtctctggatctgtgtgtctcttctcctctctttataaggacatcagtcatactggatttagggccagtgtgacctcatcttcaccagttacatctgcaaaacctctgtttccaaataaggtcacttttggagattcctggtggacatcgatttgggtttgagggggtgggatgctattcaactcagtacacctgggtagtgcaaattctcagcccccaccctagacctactgggtcaacaagcctgggagtggagcccagcaaactgtgattcaataagcccattcggggatttggaaccctctaaagcatgaggacaaatgtcctagaaggggctgcacaggcatcttccaacttcagtattcagttctcatataaaacatgcaggtatttttccatttaaggagaaaggagggtttgtgggagtaggggctggactctgaagcagaaatgaacctgcacctgagctctgatgaccttaccagtggtcgtg

SEQ ID NO: 5966 - DNA, 1351 bp, mus musculus
gatatgctgatggtttcctgtctactgtttccacagctggataaaaaagttatcagccaaattgcaatgaacgatgaaaaagcgaaaaacaagagtcttgtcaagatttggtgcaaaacttttaccaacaaggtacgtttccaagaatattcccggggcggggagtgaacctttgcatctgaacatgaaactaaatcttgccttcaaggaaggtaaatagaaagtcaggggaaagaaatattgggagtccctgaaaaatcaaaagtgaccagtgaatgcctttagaaaacaagtccttgaatgaatgccaaatgcaggtaaacagtaggacagacagactcccttttgccccatcccagggatacattatttctggtttgttatttccatgcctcttggagaaggcttagctctgcctgccgctctgttctcatttttggagagacttgtggaagtagtccagcacgccctacgggtgttggcagcaagtgtcctctctcttactttccagacttttccagagtattccccctgctcgggcccagagcattcatgccctctgtcaggaacctacccaggctgctttgcacctgggttgtggcttgcccttgcttctggggtgtacatgtattttttttgtggggtgctaaagactggagactagaataaacaaagtagatgtttttaaatgatgaaggctgatttcagttgtcctcagttattctaagatttctaataaaggtgagaaataagtcttcaagagaaaagaactgttctgttggggccatactgcatgcaccatgggtggtgtctgcgcctgttcattcccacccccgccattgcctcccattccccactaaaagccagtgttgtgggcatttgtcatgtttgtcatccagacccagattaacgtcactgttccctcgactgctaactgcacctccccttccctctgttggacggatggcatccaaaactggaccatgaagaatgtgacctacaaggagaacatcgccaaatgtgagtggagctcagtggattggccactatgacaggtgttgtctgggggtgacctatttatccgtgtgaagtcccagtaagtgaaggaaaggacagtaggagtcaccaagcacctgccctacatcaagcagtgagcaacatgctttcacagcagaggaaactatggcttaggaactgaggtgacaggcctgaggtcccacagcaagggcagaactggaacttgaagtccatttcctttgccagctccacaccacctcagaaaagctcaacagattctagaggattccctctacatgctttgttcagattcctttagtcaataactctaggg

SEQ ID NO: 5967 - DNA, 1351 bp, mus musculus; identical to SEQ ID NO: 5966

SEQ ID NO: 5968 - DNA, 172 bp, mus musculus
agagaaaatattatatattttcaaaaagaatagctcaaaatagtattatcaagctgcaaagccccacattcttttctctttattaatcatgtttctgacattttaagattgcatctctaagatgtaataaaatcttattattcttctaatatctagaaattaataatgtaga

SEQ ID NO: 5969 - DNA, 486 bp, mus musculus
catacatagtttcataaattttttagataaaacaagagcattcaaggaaattttgagctaagaactattgtcttagtgcagtctttgtcttttttcttctctcttctcctttgtgtcaaacacttaattcagtgtcctgtttaaaaggattctccttgctaagacacccactttgttccagggtccatggtcttgctctgtccactacacggagtttgtttcaggattaagtcttggtaacaggcttttggtccctgccctagtcccctttcttgtgcacggcatcttacagtgggcccgccagttatgcagtagagctccttgctgtgcctgcacatttggctctgctcccaaattactgggcctctgacatttccaggcctataacttgatcctaattccccatctgtgtccatatggacaacttgctaacttccataatggatggagacaggtccaactgcaatcttcaatttgatctcaagg

SEQ ID NO: 5970 - DNA, 729 bp, mus musculus
tggtagcctctgcatagttgccttgggcatctgcctgccaggacctctgtctgctttcctaacacaaagccccctcagggagggttcttcctcattgggtactaattcaggcacctccataggctcttgcttctctcaagcagtgtgtgaggtattggattttcgggggtaaatgtagataactcatttttctttttttttttctttttttttttttgagatggagtctcactctgtcatccaggctggagtgcagtggcgcagtctcggctcactgcaacctctgcctcccaggtttaagcgattctcctgcctcagcctctcaggtagctgggattacaggtgcacaccaccatgcccagctaatttttgtatttttagtagagacagggtttcaccatgttggccaggctggtctcgaactcctgaccccaagtgatccaccagccttggcctcccaaagtgctgggattacaggcatgagccaccgtgcctggcctcatttttcttaaatgtctaaatatgttaaaatatgtatgtgttatgttcataataaaataatcaaataagtgttaacaaaaaatgagaattatataattagagcaataatccaattaacacaacagtacagcagctttaacaagaaattgattagacatgcaaaatttgtaaatgatattatctggagaattatattggctctgctaacagatgtctatttttaacatt

SEQ ID NO: 5971 - DNA, 642 bp, mus musculus
aattaaacatggaattggttaagagaacaaaaaaataacagaatatatatttgtttaatgaaaaccttcttcattaaaataagtttcttattattacgattgtttctataggaaaaggttggttaaagttgagtgtccagagatcaacaatattcacttcacttttcaaagtaattttcctaaaactgatctgctgtttaatatggaaatatattagaacttgggtgcagtggctcacgcctgtaattccagcactttgggaggccaaggcgggtggatcccctgaactcaggagttcaagaccagcctggccaacatggtgaaacccctatctctattaaaaatacaaaaattcgccaggcatggtggcacatgcctgtaatcccagctactctggaggctgaggcaggagaatagcttgaccggggcaggaggaagttgcagtgagctaagattgtgccactggactccagcctgagctacagaatgagactcaaaaaaaaaaaaaaaaaaacatattaggttttcttagttctgaatcattttagttcaccatggtctgagagtcagcataggtagtgctcttctctgttaaagaacaggccaagtattctttgacaatgcaataggtagtataatttt

SEQ ID NO: 5972 - DNA, 477 bp, mus musculus
gatgaaggaaaagcacgggaaagataaaggagaaacaggaaatggaagtaacataatcaggtaaattatgccaactatctttgctcagaacaaggggattgcgttcataggtaaaggaaatgagagcgaaaccggcaaatgtttgcaatggacattgaaacaaaacttaagacatgttagtatggcacttctgaatttaaggagatagtgggctaggcagtgaggtcaaggtttaaaagcagagcatttaattggcaaagcatatgtggaatgaaaaagtacagtctttgactctcccattcagacctgattattggcaacaccagaatcgcagtttgcatggaagctggttatggtttaaagaggtctggaggttgtaaaaatagactatgacactcagatgaggctcctgcgtgtattttatatttcactatccctattcttgtcctgacatctaaagcttccccttctaaaaga

SEQ ID NO: 5973 - DNA, 374 bp, mus musculus
ccattattaatggtacacattaaaggcgttgttacctaaagatccttctaccatctgatttgacttcattttgtcaacctttaagaaataattacctacacttactagttcaaaaacacatggaaaagtcacctctagttatcactcgagaatgaatggaaatgttttctaggggaaataaaatgatttacaaagcatagtatctggggtacaattttaagtgggaatagatttctgttatagtcttatgtttttatgaaaaagacagcattcagccgatgcaattctccccagtgtggaatcttaactcgcttttccttttaacagatccagatagtaatgaatttcagctcatattacaaccacagtttttg

SEQ ID NO: 5974 - DNA, 493 bp, mus musculus
gaagaattttgatgtacaaatttatttgatgatgagtcaggagaagtgatagcccaggaactgactttaccttgacaagaacaaagatgactgataaagacacaaatcaccactgcctcacaaaaaacaacagcaaaacttaaaatttttgaacttgtcacgtttgtaacctggatatttaagtacttcacgtttgctcttttaattgtcacatcactgtgaagttatagaggctttaatgctcctttttaagtccaaagggatgtttcccacagcaggcgctttccatttatgagaacttaacatgtttcctgccctaacagtttttaaaaaaggaaaaagagtgacctgtagaaagcaaaatcatctgctgccacttacccaccaggggaaaaaaaatccgttctttatattatctaactctaaataatttaagtaatttactttaacttaggccatgaaatcgactattaactatgtctctttcttaaga

SEQ ID NO: 5975 - DNA, 273 bp, mus musculus
ttaagattttctcattttattttattccaaagaatgtgttttcccttttcaagaggaacaatactaacatgttctcctataagtctccctgtaatagctacagcagaacttaaacattaaccctaaaatgttaaattgtgaattatcaccaaagaggttttaaaattatgtctcctgcacagaggattgctggtgcttacagaatagaaccactaaaacaaacacaaatttactgagttctccaattagaaagaaagtattggagattcaggc

SEQ ID NO: 5976 - DNA, 1230 bp, mus musculus
ctaaatatatacagcaaggtaggagacaaggaaagctcagttactttcagggcagctgtaaactaattatatgatatacgcagtcatttttccagactatatatttgatttttagttggaacactataggatataccacttcataagaaaagaagaaaaaaaggaggaatagtagaaaatgagggggaagaggaggtggaggaagaagaggaggactccttgagtaatgacttgggctacatatagggccatatttactataatgaaagcacataaaatatgaaagcatggcaagcatgcagaaaattatgaccagtgctcttgtcacatctgccatttcagcagaattatactcacaactctggtcttctttagctatgaattcacatctacaggtcttcttcttctttactcctcctcattatctttggaatgtccctccttttgtggttaccagctattctctcattgaatcagatcaaatgaaacaagttttcattcaggtttctgggatgtttagtcatgaaactatctgcaaggttatcagtctttaccctgtttcctgacttttctgctgtcatgcctaatcaagaatgctgactgctttgtgaatgacagcttcaaattctccaaagggaagacatctctccactcaatgcattccaatgtagcacatgctcacagagctaatcttgcctatcacggtgaattctttaggttactaagctcgtaattaaaagtcttcactaatgacatggtaattgttttaatgggtttccaatgaagtgtgaagttccctgctgatgtgtcaacaaaatatgaagcattgtgagaaaacgatgtaaagcttcatagaatgtagcattagaggagaccttaaaattatcaagggtaacctttccatattagaaaagaggaaataacttcagagaagtgatgtgtgttgctgaaggtcattacactgagtggaaactgtgggtgtcctgactcctagtactgtgattcgtttccatctcactgcctactaattttgacctgctttttatttatattgttcctgtattaaaaacctgattttatgtttttcactatatcaatggaaatatttatttattctatcaataaaaaggtgcataagaaaacaatttattacattagttttatgggaagattgcaaaggtgactttggggataaaaatctacagagctgagaatttcttggttgggtgc

SEQ ID NO: 5977 - DNA, 166 bp, mus musculus
atatatttaagagtgtttataaataataaattttaattagctaaaaatctttgtttaccttattataggaaaaatataccaatattagtatttcaaatattagttgttctaatttacctgtaagtatctgtattgaaaacaaaataatagacaggaaaattcagta

SEQ ID NO: 5978 - DNA, 350 bp, mus musculus
gaaacagaagacatctaggtattctaaaagttgtacagttccctctcactctaaagagaggtaataaaatttccaaattaaattcattagactaaaacttgaatggaataactatagagttttaatgtggaaagaaattacctttagatatacaaaatattataaaactggaagaaatcatataacataatttaatttaattcagccataatggaattcatgtactgcaacattcataaaagtgtatatgtacacacatatagacttgcacatgtctatatatgtgtatatgtacatacctatatatgcatttatatatctaatttacacaatagtttaattagtttaaa

SEQ ID NO: 5979 - DNA, 617 bp, mus musculus
gaaaactgaatagatttgagcttccaatagagatgtggactttgaggacaggtaatttgtacatagattaagtagttatacatttttaaatctgaaatactgagacaaaataatttctgtatacactgaactatgataagagatttagctttaaaaggcacctaatccaaacaagccacttgacaatggacaacagacacagcaaaatatagaaatgaggcccaagggaggaaaaaatcaaacaaacagtggagttacgaaaaaaaaaaaaaacaaaaatcttaaagataaacacaaagaatagcacattatgctattcatgttaaataatattgatattggatgttgaaaacattttctaaccctttagaaggatccagccatcacaccggggcctgtcgggggctgggggctaggggagggatagcattaggagaaataactaatgtagatgaccggttgatgggtgtggcaaaccaccatggaatgtgtattcctatttaacaaacctgcatgttctgcacatgtaccccagaactgaaagtacaattaaaaaaaaagtagcaatcctcctgaatgtaagtggcatttgctaccttggcattttttttttctct

SEQ ID NO: 5980 - DNA, 431 bp, mus musculus
ctctgaaaatagggtagaaatagggggagagaaggctttgaaaaatggcaatactttggcactgttgcaaaagataatgaatttttcaggtaggcagggtgagtggggtttttcaggtggaatgagtagctcaggctaaaagagaaaacatagttattaggtggctattgttagatcatagtgtgttagagaagcaattacaggtgaaactagagaggtaagcttggacaagaacgtggatataatttaggaatttaaaattcttactttgggaaaacaggagttgttagcatgttttaatcagcagagaatatggaaaaagtataccttttcttggttattcaaagggtaatgagaaagttacctaaaatgagtacaacacatgagacagtacaacacttacacagctggcacaataataggtattacat

SEQ ID NO: 5981 - DNA, 135 bp, mus musculus
ataagatctggaaagccctaagctgtggaaaaagctgccaagtccagtttataccaagctttggtggaaaagttatagaagttgattattagtaaatatctgccactaaaaactctgtcttggcatttgcatacc

SEQ ID NO: 5982 - DNA, 994 bp, mus musculus
accacagtcttcaaatcattgttattatagaatgcaaaaatccttaagaatatcaacattattatgagtaataatattactcatatcattagtattaaaaacaattatctaagactttactgctcattctaaattttaaggacataaatggatcatgctacacctatgattactcctaaaatgtttttcctgcattataaactaatgaacaaattttaaaaattaatatataacttatttcaatcaagtttctaaaagaagagtaaaagtcttccataaaatttgtctataatacagaataaaaaagagattttcatagctgtattataataattgtgagatgtgttgttcactaccagtaataatgcaaagtttgggttttttttttaaagttccagatcacagaaattaattgatttagtttgtaaagtaaaatatcttcctttaaaatatgtacagatatgtaataaactacaaagaaacatttctacttgcttcaataagaatatgctttttcaaatgggaaaaaaacctttatactggtaagtatatgccagttcatttcacctatactctgcctattttttttctgagaaaagaggctaacaactcttgtgaatatgtaatatgaagattgttagttatgtgaatctctacagaagatacaagaaaagaaatttattgtgaacaatcagcttaccagtcatgattggacattgtctgtagttacctaactttttctatataaagagctagtatagtgtttgtgtgtgcacgtgtgtgtgtgtgcgtgtgtgtgtgtgtagctgttagggaggagctgatagataaaaagaagctaagcatgtcagcatatgtaccaagaaaatgtcttaagaatatgtagtatatgcaaaagatgtgctaaaagatacatcaaaatacatttttatgtgcaatttccttgttttcataatggaccatgactaagctgggggtttaggaagccacaaaa

SEQ ID NO: 5983 - DNA, 1225 bp, mus musculus
ttccttccttccttccttccttccttccttcctccttccctccctccctccctcccttctttttcttttcttttcttttctttttttcttgcaattttttgcccagtctcatggacttctggccaatgcatgtgcaggttggcatatagccaaagactcacagaaaaccctatgcaaattatgaaattccttctccccctggctctctcctctctggaattgtaccctgtaaattctagtcagttcagcttccctgaactcaaattgctgtctctttcattcagtgagcatgccaggttctatttccctatatcatgtactgaaaactggctccaggcagaaagtcttggcaatggtagagctcaattcagtatgttccttattttagaaaatactattctagtgctgcttgttacctgatatctgcaaattgctggtttttttttttacatttttaaaaaatcgacacacaaaattttatatatttaaggtatacgatatgaagatgtagtatatattgtggaatggctagatcaaacaaatagcatatgtattaactaaaatacttataacttttttgtgtaagaaaacaatatttactctctttttctctcgatatatatacatatatatatatagtcacatacttgatcaattttttccaggcatttgtgtcagaaaagtaatttcagaccctgttactttcttatgaacataagtggaagggctatatttcactttaataccattagtcttacaaaacattctttcccctcaggctcaaatatgacaaccgcctacttgaaacactaaaatggctaatacctgtataaaaatatctaaagttattagttgagtttacaatgcccttcaaaatctcggtctctcggagcttatcaagtacatctgtggctttttctctttgtaagccaattttaattttatttaatcttatagtatttattgtttttcaaaaatcccttcagattttctgttctcaacatctgaaatctctacaagatacaaatttaatatatgcacaaagcatcctgtatttacaaataacactgccaaataatggaaagtccattatttgtaatgtttccatacactacaaagatattgagagagatatcattgtcatgtatcgcagtttgccaagttcccttctcagtgtctttcaaatatcatcttatttcttttatttaactacacaagtgtcttc

SEQ ID NO: 5984 - DNA, 412 bp, mus musculus
aagcagaatttcttcttctgcttgattccccatgtgttgcttgcagctggagtggaagcatgtaatctgggatccctcaatcagggaagtctatgctttatatttttggacttgagaaacataaagaaacaagatatatgaggaagaaagtatacacagttttgatcatttctgtatatggggtttaaaatagcatctctgcagccagtaacagtaacagagtttgtgtccagtctccagtatcagtactacatgtgtcatctcccctaattcactggggtgcagcctaggggatttcactggatccattcaatttctgtagctctcatgagtatgtagcatgcaaacatgtttttcatgatctcctatagagcctgtttgttacctagtattttgtgattaattctccttc

SEQ ID NO: 5985 - DNA, 687 bp, mus musculus
atattgagtaatcagcatttaattccgtgggagaaaaatcaaattcttcatgaatttcaaatgttttctcacaacttaaattacatgggactaataaagaattatgtgcaaatatgttaactcctggggtatctgagttgtaaatttagtttcagttattgttactgttctcaatttcaaactcacccttcgtgatgtggggctgacaccttccaatcatatttctgctgtgttctcttggcttctgtaagtctctcctgtaagccagtagaaggtactagaaaagcactttatgaattgaggaaaaataagaaatacactccttcctgtttattttgtcttccttgattttgcttcctgctgctctcagcatcaccgtggcaatactttttcaccttgacagtgacatttcatttcaataacagcagttgatttcagtttgcatgtttcccaacactttcagaaacaacttcatcacacaccacccccccgccgctccctcccccagccccagagacatcaacttcaatgcagggagcagtaactcctcagacacctaagtttccaacacctgagtttctgctttgcaaaatccctactccatctccaaagttttagtaaccccaaaatttaattgccccagccttagatggaaactaccttcagtagttactatccccaatactt

SEQ ID NO: 5986 - DNA, 305 bp, mus musculus
cccttttctgaaggtgtgacatttctctaacttagctcagcttttgacagtggagaaacatgggcttcctcagtttaaaagggccaccaaatacaaagaactagcagaaatgtttatatctggggttcagctgagcagaaatatatgcctgcaatcatccagtgcatctcagataaagccccagagaaagattccaatagcagaaacaaatacacaaaaaaaaaccttagtgtattgtaatttcctattactgatttgtcacttgagatattagcatattatacaaattcacagtctcaagaccc

SEQ ID NO: 5987 - DNA, 1023 bp, mus musculus
ctttagacttcagttttataagtgaaacatttaaatgtctgttttgactaacattacaagctttgaccacattgttaaaagtaatagctgaaactaagtgcttgtgtgtgctaagctaggctctgtttaaacacttattatgtactaggcattgctctaattggtttacatgtattaactcatttaatcctcacaaaagccctgtgaagggagatgcaagctgaagagccaaataggaaatccaaaggtctcatttattaatggcattttatgagtgtcatagcatttatttaaacatagagttgtcattggtaatagaaagttaaacagaaacccaactcatgaatctgaaaatgatccattaataatatatagtattgtccgaagcctcccagctgctgggaacattgggaaggcatgatatttgtcttcaataaaccattttctttgtcaggttcaccagcttattttcctttcccctataaacatattccccttgcttttgcccttgatttaataaacataaaaagataacatttagatccattcacaagaaactgtatatgtaatattttgatggaaacatatctctttggggagtgtaatgcggtagaaagtagacatttagtaaagagtaaagagtaataaaggtaatctctcaggaagtgtaatatttatcacttggacttttttccttttagttttgattacgaagatgcaggctaccagactgcagaacttgtaaaaatggatattctactgaatggaaatactgtagaggagctagtaactgttgtacacaagtaagttcaatagaaactaatcatggaatgtgaaaatacttttgatatgtttttcatttatttttgtttgagcagctgcatttaaaaaacttctaaggtaattaaaatagagttcaccctactaactttgctttctcttttttttccacacttctctctagactgctaaaaatagaacagagctataatagtcaaaaagaacagtgtcatagaaatgttt

SEQ ID NO: 5988 - DNA, 426 bp, mus musculus
agccacagttttcatagcttaagtggttagagttagagttcaggactgccagccagctggaaattgaataggaaaatacttgaaaaagaggaacgacccaaaatctgcatataaacttctctcacatcgttggataaaccagaactgtgcatgcacagtggagattccaaggaatatagaaagaaaacctgcctgtaggctgaaaatgctaagcaaagatttgaatttctgcccagcacaaggatcatgggaattgacacttaaatatttccaaatgagatttgcttttaattgaaaccccagaagggctatgacttaggaataatgattatttcctcaggactaggctaaactgaaacaaatcctccccaagaaattataaaatcaagcccacacaagttgaagatacatagtaatttagttatt

SEQ ID NO: 5989 - DNA, 1996 bp, mus musculus
agcaggatccttatgtcagtgattgctgaagtttccaacaagctaatttgtaccagagagacaatgtaaacatttagaaagggggttatatttctgttctgtctgcatatgtcagatgacaaccagagtttcaaagttcaatcttatgaagggttatattgcagacttggcctagaagtccaaaatcattaaaattttttgcaaaattatacctgaaaattctttatgttgtttattagtagtcattatggggtttacaaagataataggatataaagtgatttccaaatctggtgcaatcacctgccatttacaatagacaaaattgttattttcattaggttttaatgaaaggaatgatatataaatttttaaaggcatgtttaggttcatgaaagaaattcagattatttttgcatccataaagaactagtttgttgagttgatttaggaaccaaattgtaagacatattgcaccaggcaatttattttctgagatgaagctcaagtaactatgagcacaacatcaggaatgatgttcttatgttcccagatgtctctaggcatctttgcactcttgaaaaatactaagttccctgtacctgaagagattcatgaatcaaaaagaatgtgagcccttgagtattcaatatcccttcaaaccttagaaattgtctgtcaatgatggtgattatcatctcacaagagtatagttagcttcttttaagagacacaaaagatccctctgagttagccctagacacacattactccaattgcctggagaaatgtttagcgatccatacagaattactctaaattagatttagagaaaacatcctctctttgaagaacactagaattgaggaaaatatggtagagcatataggttattttgcctctgttactttgaagaccttaaatcatggagtgtgttagaacacagtatatttatgacaatcatgacagttcagagaaatgcgatgaggtcgtttactctgaaactgaatcaacactagtctctgctctgagacccacaaaatcagattgtctgtttatctgttttatctgtatgatttctattcctctcattttgttgttgtcctatttataaatcacctttgctaaatactaaagttattactataaggtagtgtcccaggtctgtttggtaataatgaaatgtccatggccaaatcccattgctttgttttgtcagtgtgctgcaagaaaattacttcgatatgccctctcatattagaatacctacattttacatacctattgcctatatcaagttttgaatcataccactttcaggtttaacctggccacacagcatattttctctatggttgctgaacacggaataatagtttaatgattcagataaactattttgcagaaacatttaaaatcagaaattgcagaactactgagtatctgaattttaaagggagcctcttaaccatattttgttttctttagtactcacactgacaggttgatttactacctcattttcccaacaagtgttaagtttccaatatgcagttaagggtttctgaaaacagtgactatttaatcacatccttatagtttccccaaattgcttatagtttaccctcatttagttaggtctataatatttctcaattagggtaaaaatttctattcctttctaattactgatgcatataatatatataaaaattaggtagcctcccatgaaaacttaaaattaagagcttttagcatcaaaatatcagaataaaaaattaggaaaactcatcagttcagaaagattttctttaaatacactaacgtgaataaaatgctcacagagaattactcacatctaaggatacagactttttcctaaagtgaaactattcttggctcactcagactctggagagtgtttaaatgattttgaagttcactggtcaaagtcacagttggtagtaagaatgattgtcccagaagagaatggaaa

SEQ ID NO: 5990 - DNA, 673 bp, mus musculus
tataaaaggtagggtaacattaaaacataggacaagtttggcttaaatatttgaggaacaggttttatgctagcagaggagaacatgaggacagaggaaagggtaaaagatgagaaatttataaattttgtttcaaaccctagtggtagccccacacttgcagtgaatatcgcctgaaaagccaaatgttgatagtgtctggctaaggcagtacaggaaagcacaagccttgcttcaagaatcttactgactagctaaggaaacactatgtgtgtgtgtatatatatatatatatatatatatacatatacatacatatatatatatatacacagcaatacaatttatagagtgttaagcactaactacatgaccttgaaaatttattttaaatttctccaaacctcagtttcctcatctataaaatgaagataatacctatcatctgtctatttctatgatctatctttttcatcagtattattaccatttgtcatacatggcactgggaatatctatgctacggctaattaaaagcatccaagaaaatagggtctaaacatcacctaatcaaataatgtcaaaattcactaggtcatccacaatttattgagcacatattcagtaccagtactgaatatacaaaaatgcatttacataattctccttctct

SEQ ID NO: 5991 - DNA, 1553 bp, mus musculus
atctagaaattctgagaggggaaaatgtgattttggatttacaatgacagggtaatattttatttatcttcgaattccatggacaaaattaggctcacttaaattaatttttgtaaacccaagtaagttctaaaaaaaagtaaaaaatacatagaatacttgagaatttagcagggacagggaaaaatttcccagtaagtctgaagtcttgatgtaagtgggaattagataactaattggaggcattttattttaagttaaagacagatttctttaataagtttttaaaattgatcaactttaaattaagcacagtaaatgtgtataaatatgaaggcaatcataaggattttttcacttgtgtttccatattctggcattagtatatcatcataaaatagacaatgtttttgtctcaagaacaagaataaaattgaaatctgcattcatgccaattcagcataaaaaagaataggctacagttctctcacaccaagggccccatagttataaatgtgaaattatattccaggtcaaaatttgtgaaaaatacacaaaacactttgattttacaagagaggagctttaaataagatgattttagtagattgaaataaataaccagtatttaagtaaatgtataacgaatgaataaatacatgcataatattttcaaagttctataccagtacctatttttactcttacaaaatttcctgtaaaaaaatactacatttgaaattatttcattggttttagaactggcattgaaggtacccagtagactcttaagcctttactgcttgtctcactagaaacatttatttctgacctaccaagttttcttcacatcatcaaatttattcagcttctcagtgctgtaccgtatgatggcaagacatacttggtatttccatttttgttggtcattctttattgctttttactgctaggaaggtcttgccaggcttctatacagttacaaaaaccattaccaaactttatcaaggactttccaaatggagttttcaaatactattgaccacattgctctagttaatgtaaggtcagctctgactttttgtgtttgcatttcggaagtgaggtaacctcattcaaatatatatgcagcactttctgtgtacaaagtactgttctaaatacaaaagggaatataaagatgactttcaaggaacatataatgtagtcagaaagatgagaggattagttatacaatttaaggaagggaggataactttgggaaggttttgtggaggatatgtgtttagagatgcgagctggggattcaacaggtaagagggagagagatcacaatttccaactgggtaaacagcttgaaaaaagaaacagaagcctgggcacaaatgaaaattccatattaattggaagttaagattcatatagagacaatgaaaggttaggttagaacaataaactgagaagtacgaatgtggacttcaggaggctaggggaaattacgaagtcataaaaagttcacagagatacttgagtacaaaagatacattattaaa

SEQ ID NO: 5992 - DNA, 375 bp, mus musculus
gccctttgaaagcaagggctgaatttttattagtttaataatctgggattccaattgttgaagtgggattccaatggttaatgctcattttagtcaagttctaaattcttgctcaaaattagatagctaagtatcttactagttaaagaaagaagaaaattgatgtctgtagagtgcttgctatgcctctttagtgaactagacggttagtatttatagtcgggttgtactttctcaacaacccataagtctagatgttgattaacattatcataattcacaaacattaatcgcttattccttggcactataacacaatgcatcatgtttgtcttgtcttttcttaaagatcaaactactagcaatcatgttaat

SEQ ID NO: 5993 - DNA, 534 bp, mus musculus
cttcaggacaagttaaattattttctggaaaacagccaaatggcttcagcaattttttggggggtgttgagagtggggggtgtctgtttaacaatgtaagtgctaccaatcggtgtcacagtagaacttgagtttgttctgctgacttaatgtgctgttttactatagatggagtagatttgtaatgaatcgtgttaataggctaattcaacatatgctttatgaccaattgactacttccattggtaaagactaggggggagaggactgattttaaaaatataaaaactgacacaataggtgacttaatgaatcctcttctgctacatatacatgtgtacacacagtttctttatacataatttggcaaatgtgtaaatgaactttattaattttaattatttgtagaaaattttgagagtgattgaagaatcattctcaaatcagaaacaagagatagagctcatgttgataccttctctgggctacagatggagctgaaatttcagtatcctatgtaccaaaggaaaaatg

SEQ ID NO: 5994 - DNA, 534 bp, mus musculus; identical to SEQ ID NO: 5993

SEQ ID NO: 5995 - DNA, 857 bp, mus musculus
cttctctgctaaaaccctcaatgacctctcatttcactcacaaagtccagtccttatgatggcctacaaagactgacatggtagcctaccccaccactgcctactgtctcacctcatcccgctgctattgtctcgccgctgtttcctgctcctgccataccagctccttgcttctgcatgtacctcaggacattttcactaggaagccctctgcctagaacactcttcccccaaataccttcatggcttgcttcctcactttcttcaagactctacccaaatgtcactttctcagtgacatctttcctgaccacccccgacaactgcaaagctgcccaccatctggggcacttcctaattcccttctctgccttatttttctccataatgtatgtcaccatatgacaaaagatatattccacttaatggctttatttattgtctgtctctgcctggtaaaatgaaagctctatgggaccagggacttttgtttattttttctgaagtgtatctctggctccaccaagggtgccttaccctatagtgggtgctcagtaaacaaataaatgcattggtcattctaactctgatttgaagaccttgctctttacaaacctccatttattactgtaatgtttggaggaagcgtcttaaccccagtcctattcaggcagttgactgtggcatgagaagtaaactgtgccaggaaatgcacagttcaccatcagaagccccagaggtattgctagggcaacaaagattatgttttagccagtttactggttcctcaactgtttcctctcatcattcataaatttgctgcagagattggcagagaacaaattggctcaggctgc

SEQ ID NO: 5996 - DNA, 730 bp, mus musculus
aactacaatatttgatacataatttcagtgcaatgtggtctgactgaagtttaccttcagattaaaaaactttgccttgaggaaagctgacaggtttctctctcctcatcatgtacacctcaaggccctcctaaagagaacaaattctctatgggtaaaaggcaacaaagttttcaagaacacaaaataaaccaccccagtagggttgggtcctattaatggccccatttcacagggaggaaatactctttgatttctttctctggggcttagagatgtctcttgcttggagacaagacctccacagtccatgtggagctctgcttaacaaggtgggctcagcttagcaatggcatatggcttgcctctgcttgttcacattaccaaggatgaagagtaaatagggatttggggttgatactctcaccagagggtatgcatttggctggactgccaaatcctgggatagtggcagaaggactgacgccattcaaggcagagatcatgaccctgaccatttctgtctttgacagtgactaactgtagatgttgttcttttgggctctggcttttacttttacttttggcttttacttttcccaaggctaggatcctaggatctcatagctctgcttctggctgggatcctgttccatcacagttagattatttttacattaggttgatactatacaccctactagctgtgtaatcagaaatgctcatttca

SEQ ID NO: 5997 - DNA, 245 bp, mus musculus
tatcagtttttgtttagtaatttctcgagaggaaatacaattgatccatctataatgaaactagaaaatacatttatctcacttgccactttcagtaaattggtaatgattttgtggagtaccagctggaggagaaatcatgactgttgtgctcacgctcagaaggaaaaattatcacaacccattacctaaacctactctgaatttttgtgaagagatgttagcatagatgctactcctttgca

SEQ ID NO: 5998 - DNA, 265 bp, mus musculus
taaatatttaagctttttgattatatatgtttaaatcttctgttatagctatatatttagttttctgtatatttgtcttgttacagtctgaaaagagtatattaaatcacccattactcttgttttatgagttgttcttgtatttttaagtggttttcattcatatatttcacttcttgtctttggttcataaatgtttactgtgttcatcaattttaaattttataattacacatggcactctttctcctatataatgcttttg

SEQ ID NO: 5999 - DNA, 270 bp, mus musculus
aaatctcattcttaaccactatcctgtctgcctctcattatttcatttgaaatagctcacggttagtgtaggcagggtccaataaattgtttcctagcaccatacaaatcaatccctagtaagttgttatggaagattttgtaagaatagtgtaaagctcctctgttgatattttgaagaatttactgttctcctcttttgcaaagtgaatatgcatgtgtctgcgtcagcctgcagtcttctggcccctccccaatcttttaagttcct

SEQ ID NO: 6000 - DNA, 511 bp, mus musculus
cccctcaatattgaaaaaaaaaaaagaaaagatccttgagtcttactgtaagtgccttggttttcagaaactctgaaaccaagagtttcaggagaaactctatgaataatgggaggacccaaactaatgatgctttacaattccatagtgtattcacatgcactctgtaaattgagaaacaatacatgtaatttttcaagaaaacaagaaaaccttaaaggagaagcatatgtgtaggtttcagacattgtaaattatagctaaaatttacaaaacataatatattttactgagttcaaactcctttaaaactcattttgcttttgcccaatgatgatcataccaaatatattaacatttgataggatggtgatggaaagaacctgtgttatattcagggaatttttcttcttgctgtcctactcttttcctctgggttaattgtatcatagagctctcattcacatcagaaggagtcttccatgtagaaccacttttggaacgataattt

SEQ ID NO: 6001 - DNA, 498 bp, mus musculus
agaatagttctcttaaaggatctgccttctaccgtcagtcagatgagagtctcatgacccacaaactttatttgccctcattttgagtcattcagagaggtcaatgcaaaactaaaactagtagctcattctgacattaattattgactcataatagatgagtcaaactgcctttgtgatgaaatttccacagattagctttgcattttgggggtaatgatgtaaatgtctatctttttaaaatcaacatcaggatttgtctaagagtttacatttataatcttagtgctagccactccaagaggagaacttagaacagatgagggaaacaagaacttccttctctgaactaaaattgaacttgattgctggtgtttctcctgaaaattctttgacctaacagtttcttaaattgcttagaagccaaacgttacctaaattcccttttctctcatgagctttccaatcccttctttactatgctttttcctggttgac

SEQ ID NO: 6002 - DNA, 410 bp, mus musculus
atgactttttggaaataatcattataagaatagaaagtatattttagtggtaaataaatgtggtgcctacaaaagcatccaggtgaatccttttttaataacgtaaagataatcttaattgaccctgcttttctgttcattaggtgtgaattagtaaggtttacttcagatgggtttgcctatataatcattattttagtctgagttcatttttagttaatgtagcctgaaatgtgaatctagtgagtaatgtattttagttacattgccaaaaatttggagaaattctcaaatttgcttgtcaaatggagtgtgtctctgtaaggtaacaaatttaacattttggttaaaaaagaaaaaagtatataatcataaaatttttaattattctaaaccttacaggtgccata

SEQ ID NO: 6003 - DNA, 384 bp, mus musculus
ttctatcctttgaatgtcatacttaggtgccacaactatgtttattaattctatttttaaatataactttgaacctatatacctacagcctactataatcaatggctaggaaaaaggactgtgtttattttggtatataattgggattgtaaaatgtggtaaaaatgtagtagaatagtatttaaatattcaatccaaaacaatttaaaatgtcttgtatcaaaaaagattatttgaagatacttgaaaacatattgtaagaacaaatatggttacggcctttttcatttcttttttaaatgaaaaaataaaaagctagtatttctttttgaccagtcaatgtatgtgatgcaagatatctcacagaaagaagctacttatcca

SEQ ID NO: 6004 - DNA, 288 bp, mus musculus
caaaatcttaaataatagaatttatttttatcttttataataaatatacagcaatactagattcattatttacccatacttttttcatacttttttgaacagaaactctactatctggaacatttttggcttatccatacttaaaaatatattacttgtcactttttgcaacatgaaaaataggtatcttaacataaaattataatgatttgagtaacctgaacctaaatttctttggaggcatcaatatccagttgccttagtctatttaggctgtcataacaagat

SEQ ID NO: 6005 - DNA, 343 bp, mus musculus
ttgtgtccataagttacatcatgaataaaataaagtttgtattttgctggaaagcaggtatttttagtgaccgatatattagtatttatatccatgacaaataatgacttaaaaaccatcattctctcaacatgtattacattcttatgccaatttactacctagtaatgttcaattaataaaaatattgctgcttgtatttgggtccaggaatttttaatcagtcaagaaaataataattatacaactagacattatagactaaatttgaaagctaatgtctttgaagtttccatgaaactaatgctcatgccattcaagatgagaaatttattaatttcta

SEQ ID NO: 6006 - DNA, 462 bp, mus musculus
aaaggaggcatttttttcttctcgttaatgttctttgtgaaaagaacatagaaaaacttagtattaatactgcccagtattatgccaaaactacaaactaaaagtcattcacttctgtattgaacatgtcataatgaaacaaattttagtttaagttacttggaaatctatatttgacaatatattcttacagtttgtttgttttttttttttttcaacaaatccaggggattaagatgggtatctaggaaggtgtgttagtcagctttgggctgacataaaatatcacagactgggtggcttaaacaacagaattttatgttctcacattcctgcagcctggaaattcaagacccgggtgtcagctgattcagttcttggtgagagtttgcttgctggattgaagacaactgatttctctgtcacctcgcttgataggaaaggagagagagagagagagag

SEQ ID NO: 6007 - DNA, 290 bp, mus musculus
tggaagaaaatagaaattactgaggttttagataatccaaatatttaatcaagtcaccaaggtttattgtggggaatctttattattaattaaaatgagtgatgaaatcttaatatacgacaaaagttaaaatttgcttttgcaggcagatgaatggtctaggtatcaaaaaattaagttgagtctctaactcacacaaatttacaaccctatcactttatgaatttgtttaggagattatttttaataacactggtgaagtctaagaatagctaaaatttatagtacac

SEQ ID NO: 6008 - DNA, 915 bp, mus musculus
tttgactctgagccttaatagctcttaaaattgtaatttctattttgtaacttttctgatctttataagaagttcatgtatttatactaaattctctatagatatatgaaagtatttaaagggacggtttgtaaatactgggaattcataccactaagatggacaaagttattcctaataataagaaagaagaaaatacgtttttgcttttgatatttaccttccttttctgccttttttggggtaaataaattgtttcaatacgttctattatatttagagctaaaatggacagtattaagaaaagctaatacagtcctgccattttccttaggaggaaagtaagtcccaataagctgaataatggctgagacaggtgccctggttcataactcaggtcttctccactccgctaccccttgttattccctcaaagggaagagactgaacatttctaatgaacaaataagaagtgccatcagtgtgctctagtgtgttttgttttgttggtttttttttttttttggaaagcaaactggggccacacctcaatgcttatcatacttccccaactggaaaagtgtggtcttctgaatcatcacaagttgcacattctgagccctctactacttggagcttctctatgcggatattgacaattacttcactgtgtggagccagttggcacaaaactgatcatgttcttgttcttatcaggctagaagactgcatacctcactcactaaacctgtcaaacttgtttcctttcttgttgccagtgactgtcattattttgcagcctccaagtcctaacctgctgatacagatcagatggtgactgaatagaagctgccccagtcctgggttcatgatgtacgcgtaagtattcagcttttctcagtaaaggttatcagt

SEQ ID NO: 6009 - DNA, 608 bp, mus musculus
aaatattccgtatgattatgatgcaagtggtctgtggaccataatcttgacaaccctgttataggtgattttatattagcttataaatagtgtcagagatggaagaattatgtgtaatcagttcaaaggcatggacttgaagtattggaacaatgaacattcagattatttacttctgaaccactcttttaccaatgtggccaagaattctgttattactgaaactatgagacagctttatggggaagttaaagagaaaagaaactttggaagtgaatcctagatgctccaagaatattttagttctacacacatctcacatattaataaacgtgtgtgtgcgtgtgtgtgtgcgtgtgagaaagagagagagagtgagagagagagagggaatattgaatatttcagggtgaggtagaatgttctgtttttcttgcttttgtttggaatacattaatatcctctgatgaatgtgatttagtaggtatgcccaaactgtagtttcattctttattaccttgaaagttgtattctcattcatgtactttttcttctgaaaacaaattcttttttttacaggcttttctagtaaaactctttttatgact

SEQ ID NO: 6010 - DNA, 996 bp, mus musculus
gagcttggtgtgagcagttccaccaggatactattattacacaatttccaaggaccagaaccttgaccttgtacctccaggttcccaactaaaggctagggtactgtacttactagtgaatctccaggacagtcaaatacctagaaaaatttaacttttgttggttatactagagtcacatatactttccctaatatcccctagtttgttaattcacgttcagcctacagccacatgattaggtagagcatcagcaaagagatcggctactggtacctgtgctttcaggttcctaaatgtcctcagaggagtttctgcttaaagaatttcctctactttattataaaacttaaaatatttcaaggaataactcagatagttccccttcccacttaaaccctttctcttcattgctccatttaatataccaacccaatatggtgcataacatgggaagaatgcaatgctatagtgatgcaatatggttaataatcattaacacgtccacagtacttatgtgccagagtgttcaaagagctttgtaaacattaactcatttgatccttacaaaaaatctatgaagtagttagattctattgttagttctattttacacttgaggacaccaagggccaaagagattaaatttgcccaaatctagctccacagtccagattcttaaccattaggcaacccataaatactctttatgtgaattcaaagcaaccttataaaagagaacccaagaagtagggcttttaaatcacattaaactggcagtaactgcctcctgaagtgcctatgaggacaaagtgtgaaaacgcatcagatgataaaggcctgaaccctggttagatccacatctagggccttttctgggaattccatcaactcattgcctaaactcattacaggaaattactaagcattgagatgactctagtattatgagctcttaaggtggccagccaaggataaaaccatacattcaatttt

SEQ ID NO: 6011 - DNA, 867 bp, mus musculus
ggatgtggtctgcctcatatcccacggacaccatgagctctgtgtttcaggagtcctggtaatcagagagcagctcccggtatggccttcgtgtctcctcctgaccagtgttgatccataggtgttccatgacgtggactagtataggcctctccctgcagtcagaaataggtttatgaagctctctggaaatgaaaagcaaagagtgggatcttgtacaattgttcacacagtatcagcttcctcagcgccacaaaatctgcccaataaatggcaggacctggttactgtggtgtaaagaatgactttccagctccacatgtccactggggcccatcatatgtttggccatggaagagttcaggaccgcataagagggactcccaccgaaggtgcccagcttctggcctacagtgaacctggtatcaaatccaaagtctgttatttttatgttgtgatggaccacaaggaaattcttgggcttcaggtccctatggatatcccccttctgttggtggtactagagggctgatactatctgctggaatttgcttcaggcctcttccgccttcatgtagcccaactctaggatgtagtcgaccagctctgctctgctggccgtactccatggctaagaacaaagtgtctgtggtgttgaaagagtttgatgaccttggggtgaccccatggaatagactctagagggagtctagagtctcactgctgcccagtgagaaggtacttggtgaacttcattcaccctggtgaagctgtcctggctgatgatctcgaggagcctataatgatcagtaagggtctcctcatcagcagagatggtcgtaaggccctgccacatggtaaccttct

SEQ ID NO: 6012 - DNA, 665 bp, mus musculus
cagcattttccctctgtcatatagatgataacttttctttcatctcaggaagtggaaacagagcaatacttcactctctttctgccagcattgaaggagcgtggatatgatggatttttttctccaaagtcacgtgccaaaatcatgtctgagcaggagagaaagcatgtagatggttgtgcaatattcttcaaaacagaaaagtaagttaaggaaacaaagcacaatggtgtacttttatttatttaaatgcttacactttaaaattgtctttggttttgccctataaaatcaacagaaagctagaaaacaagtattatgcaacttaaaactgttgttaatgtttcatttctcaggctgtgtattcgaaataaggatatttattgtattattccttatgcttttattaccaaataacactgaacattttaagagatacagacttgaatggtctcatatttcagaacatattttcatgaagtaaagtattagtttttgtgtaaaaaaagaaagtgataccttttaaggttggccataagtgatctgggtttcttttctgtgatttttttttaataattgatttttgagaatcattcattttaaaatcatttattcactaaatgtatactgagcatttgctttgtgataagtcctgtgctagacac

SEQ ID NO: 6013 - DNA, 988 bp, mus musculus
acaaaagtgtattttaaaaaagctttgaaaagagccacctgccagaccagattgattaagcatctaaataacatgttgaatttaaaatatatttgtgtaagatacctgtttcatccttgagaaacaataataaactttgttgagaaggttgagttttctccagagtttacttaagatgtcaggataagtaattgccttgctgctacaaatttggaacttaacattttgttgggcctatttttgctgccactccatagataatatatttcatgaaggtttttttcattggcagaagttagttccttttgttttctctgcagaaaaaaacttgttttgctctgtgataggcaggtatccaagtactaatacttttcttttcagtctagaatcaggtaatgaaggcccatcattctcaccgacagaggagatgacagtcttgctcatcccatatcctctagtacagctcaaggacaggaacaggagctggaattttatcagcaggctcaagagtcagagggcagtagtgatgtggattggagtagatgattaactctttgaagactcctctcattttatcatctccaaattgaccagaatctttaacactgttccctcatttatccctttgaatgatacagacacaatctattttgttgattcacattttcttctgctttttctgatgcagtagattagacgttcatggactatagcttgtgggccaaattcagtctatggctggtcaaattcagccaagaatggattttacatttttaaatggcttaaaaaatcataaaagtattttgtgacacatgaaaatgatatgtcagttcccccaagtaaaggtttattggaacatagacctgctgatttatttacatactgtctgtggctttttctctacaacgttgacaaagttgagtttacatagttgagtagttacaagagaccaaatggcccacaatgtcgaggttgagacaagtccagg

SEQ ID NO: 6014 - DNA, 988 bp, mus musculus; identical to SEQ ID NO: 6013

SEQ ID NO: 6015 - DNA, 1056 bp, mus musculus
gatataaacccttgccaacaagagtttatttttaagactcggacagtctgttcactgtggcaattctagcaggctccatcaaaccactaatgacatagaagagaaatgagaaagaatcgacttggagtaacttaatgatactacattttaaaccaatgtcaagcatgcactgttcccttagagatattaataaagttggttgaagaatatatgtgctctagttctatgagactccaaaagagattcctattgctaattttttcctttagcatgtgaaattgttagtcagcatgctcttgcaaggacaaaagttagatttttgttgtaggatactcagttttcttcctcccccgaaaatgttaattttagtgcttcaaggaatatagaattaaggttggtaatttgcttctttatgagacttgggtgcatggtctcacagcctgtcatagatcaggggaatagatcaggggaattctcttatccttgccacaattgaatgttattcctggaacaatacagtctccccttgggcaaggcagaactgatttgacattatcttggaataatcagttttatacatccaagcataatgtttgctcccttcgtctgttttagtctactgcaaaagtctgggggattctgacagtcttggataggtgaatacaagcagattgaccaggggctagaacttaacactattcttaataatttgtcatgacccacatgtttccctcccagcttttgtgtactatcttctcactggctcaaggttgctttattctatacaagttaaggaatgttgacattttgtcctgtttttttcaatttagagtttctgatcctgaccactgttgagctttcctacacctcataagctaagtttttccctttaagctctggccctgattttgaccccactactctagtcttgtcactgctcgtttgtaatgactattccctgttgagccacacagactgaacacctccattgtgggctcttattatttacaatatttcagtttcttattcagataagttttagtaagttataaaatg

SEQ ID NO: 6016 - DNA, 194 bp, mus musculus
aaaacaatgcttacacatgttgtttaaatgttgtttgaagttgaaatgttttgaaatggtatctgaacagcagagaaaaacacaattttaatgtcaacatacaagagacacctttggttgcatttacaccaaaacattgtaaattattatatttaattatagctcctggtttcccattttttcacagatacact

SEQ ID NO: 6017 - DNA, 1352 bp, mus musculus
aactgtggttctcaaagtgcaattcccttgatcagcagaatcagcgtcatctgagagcttgttaaaaatgcaaattcttggacatcatcccagacctactgaatctgaaactctggggatgggactcagcaatctgtgctttgcaagcctttcaggtgattcttatgtgtgataaacttagagaaacacccaataaaatgaagaaattggagacacacacacaccacagaaagagagagacagagggagagaataataaagtaataagataataagataaatcaaaaagagaagtttgaacatagaattgtttttatggcaaacaaaaagtttgattctatgttttccaaacagataaaagcaaagaaggaagcattattaatttacgtgattcctttgacactgcattctattcaagaaagaaccaacttcctttctctgttgctcttagcaaaaagatttctgaagggttatctaagtaagatatgtttatttcttatttctctattcactctttaattcatcatagttggcctcatcatctattgaaaatgctcttgatgacatcacaagtgtaaagttctctttctaatattcagcaacatgaaacccaactagttattctattctattccttttgatagatgcatattaggaatatcatcaatgcattcactcagcaaatagttgttgagcggccagtatgtaccaggcactgtgcaggacattgttgatagcatgtagaacaaaatgaagtctctacctttatggcccctgcaaactaaggagaaagaaaggcaatttattttctttttatttatttatttatttatttatttttgagacggagtctcattctattgcccaggctggagtgcagtggcatgatcttggctcactgcaacctccgcctccaggattcaattaattctcctgtctcagcctcccaagtaactgggattacaggtacctgccatcacatccagctaatttttgtatttttagtagagacggggttttctcatattgatcaggctggtctcgaactcctgacctcaggtgattcacccgcctcgacctcccaaagtgctgggattacaggcatgagccaccatgcccagccaaaaggcaattttaaaatgaagtaaagcataaagaaataagtaccaagatagatatagctgctgtgaacaaaaataaaacaaggcaaagccatagcacctggaatgtatatgctacttttgttagagagaccaaggaagatttctagaggagtgaaattttagcagaaatctatatgaagtgagagaccaagatttttagatagctgaggaaaggccatttttggcaga

SEQ ID NO: 6018 - DNA, 928 bp, mus musculus
agagttcctagaggaagtgctgagagagctaatttttaaagaatgtatagacatttccagccttgaaagacaggggaatggcatttaggcagagaggagagcatgaacaagggcataaaactgaaaaacagcaggtatatgaaagggaaactatcagtagttcagggttgctttagcatagatctgagtaggagcagtaagacatgaagggccatgtaaaagcagtaggacaagaagtttagaatttatgctataggtgattgtgactcattcaaagaaatttgtcccgggagataatctggttaaatctgtgtgtgcaaaacacccctggaggctgtgcagaagtcagattgagtagatatgagaagggagacaaggagacaaataaacaagctgctgctgagggcctgaactagagcagtggtggaagcaagccgataaagggccaatatatgagaaatatttatggagggaatctggtggtgaatgaatgaaaatgggatatgatgagaggaaagagtcaagcacaattccgagtctaaaacatggatgtctcaaaaaacagaggtaccaaaaaatgtaagatagaaaattcagggttcagggggaagatcaaggactcagttctgtatatgttgagtttaaagtgcctgtggaacatgtaggctacagtagatagatgtatacgtctgaatctatgagatgtctggacagggaaaaagaacatggaaattatatgaatataaataataactaaaacaatgacagaagttgaagttatccaaggaggttgttctttctaccattagccttaatatattgttctttttataggagtggtgactctgttcactgtttttgagaaattgctattaatattattattttgtatgtatgtggattgcacccttgtttagatatatggttg

SEQ ID NO: 6019 - DNA, 1108 bp, mus musculus
atctcttccgccgccattttaaatccagctccatacaacgctccgccgccgctgctgccgcgacccggactgcgcgccagcacccccctgccgacagctccgtcactatggaggatatgaacgagtacagcaatatagaggaattcgcagagggatccaagatcaacgcgagcaagaatcagcaggatgacgggtaccgcacgcttcttcccccgctccccctcccccagcgcgccgcacgcgcccttcgttcctcgtgagccgcgcgctgcccccattctttctcagagtcgattccccgcgtgccttctgggccccactagattggagggaagaggaaagtaagagatcgagggggtgactggagagacccgggaagagtgggggaagggcggaggggttggaggaggagggcggcggcgtctgtgtcccgagcgcgcaggcgccgcgtgggacccgggggggaggggccggcctcccagcgctgcacgctgcagctgccgccgcctcttcattgtgtctctgttaccactcggcgcggttttcctgggaagagttttagaggactgagttggggcacaagcaggcgactggtacccagattcacaaaacgtgttatgattgatgagttctctgggtggaacgttggcttgacagctgagaacgaagatggacctaagtaagataagatgtgagggattcatctaggaagttgtgccttctacctaaaggaatctgggcagaacctttactgtattttattggtctcttttgagctttgctttatgtagtgcggacagtgagctgtccgctggtttgagtaacttcgttgggatattgggatttttgtgtgacatagattaaatgtaaacatgaattaaattgcctacacttagggggtaaatgtccctgtttttatttcacgatttaattccagaactgaaggatcatttgagttattgttaattttttttaaaaacacttttatttctagtaaaatgtttattggaggcttgagctgggatacaagcaaaaaagatctgacagagtacttgtctcgatttggggaagttgtagactgcacaattaaaacagatccagtcactgg

SEQ ID NO: 6020 - DNA, 1088 bp, mus musculus
aaaatgaaacaattaatctagattttaacattttcagaaacttagtgataacattatgaacaattctaaaagccctgtgatttgaaaaatatagaatcattaatggcccaagataggccttcacaccttcacaggtgcgaaaggaaaggccttcacaccctcacagaggcatcatgcaaaggacagcggctttggcttttccaattttccatctttaggccctggtgagaggcacacttatgcactaaaatgcacatatatgcacatgcattcaaaaataggcatttggtacaatggtgatcttgtacctgatgggctgaaaccagcttaagaacaaatttgttcttcctgatatgataactaggtctccaagagaaaatagaaaggctgctttagtgccttacgcttactaaatttaaatctttatttacctgggtttgagcctacagtctatttatgattacatatcaaaattgattaaaacacttccatttctaaaagttcaaatatacttgttaataaaaggattatcggcattaatactttaatttaaagaaaagttgtgttctgttttcctttctgtgtcttactccccccacactctccctcccccatcaccatcttcaattctaataaataatgctgatgttcaacagttgcagaaattgtgctattatgtaactgtgggccttgcccctgtctggccctctagatgatttgtagcagtgttattctacactttttaaaagaagcgtcctccttttgtccatgaatcatgtttaccccatacccagtggcagaggtgttctttaaagacttgaatatatgaatgtgtgtgtgtagttacttaaaggttattcctctttgtaataggaaactatatgggatgaacacttttaaactttccgacacaacttccattactaactttctaacagaacttccataactagaaggtggaaaccaaaaccctcatggtagtatttcctctggcagctggtgctgtgggcaactgttttgttcaatcgggtttcttttctttttgcctctaatgcagaaatcaacagaatcactcacacatacaagta

SEQ ID NO: 6021 - DNA, 776 bp, mus musculus
agagaaggaggactgatggctgtaatattggcaaagaaattgaactcagattataaaagactttatgcagagtctaggggggtgggttgaaacttactcagcaatcactttggcaggtatccacaccgagtcacatgatcagaattgcacttgaggatagtttctctgtctataggactgaggctgagactggaggcaaggacgtgttagaaagtaggcgaaattgtccaggtctggggaaattaggctgtgtaaaaggacagtggcagtgggaatggaaagaagggtggtacatgaaacagacattaaagggggaacaagttgattgttagcttgaaactctcagcaggctttatcaattcttggaatgaaggaaaatttctcccttcaaaaaaccttgtatgttgcaaccacttaggatgtgaacaaagacaattcatctccattttcaaggctcagtagtcaactcagagatggagacaagaggacttaaagatgggaagaaaacgtgtctcattaactcacagttccaaaatgttacagatagctgtggggttttggtttcatttggtaaaaatcaaatgaactttttttccttatttcttctgaagaaaaaaaatcagatttactaaatgacatgttaaaatgtttaattccatttattctttaatttaaacaacacaaagttatttcaatgagacatctgattttaatcccaagtaataaaaaacaaaacctaaacattggcctaactgaaacgaagtctagtttaactg

SEQ ID NO: 6022 - DNA, 369 bp, mus musculus
aggaattaccagaaaaacactggcagcactgtcttccaaacaccactttgtacttagaaagtactttttccatttgttgctctttatagtcttctttcatttatttgtccagttgttaggctcttcagtagcttcagttgttccagttcacaaggtcctcattacagcatgagttatctttttgtttactctgcttgcttctgtgttaggaataaatgagctgaaacaaaatcatccaggaaacacatatcctggatcacgtgtccctgacaaccttctgtgtctctccagggtgctctgaagctgaattgtttaaagggttataggttctctgagataattaaatcaaaggtggtttaatggtaaaaa

SEQ ID NO: 6023 - DNA, 622 bp, mus musculus
acctacaagcccccatcaccagtcttcaaggcaccatcccctcttttttggtttggttgctccttcccatccccataccatagctcctactctcacattaatgtggaatcgcagaatgtcaggtgaagcaatacttaactgcagaggcgagcaccagcaggctattcactaagtactgcccctccacacaaaaatgatgttcattggcttctggggctcagtatcaagtaaacaaaaagggaaatgaaactaataaatagattccgtaggacatgtggaatggaactctcgcaaagtgaatgtaggatccgagtctggtcatgcttattggcaaatactaagcatactttatcctttttaaatatacatagctgttttattatttgatttagccacatgactattattactaggatttccaatcaccagagttaaatgaatatacagatttaatgtactattctgtgttatttaaagctcttcagagttgcataattagaatgttcccaagcagtcaattatgttgatttgaggatactccttgtgtaagcactggggtttaagcagtcagctactctattcagtatgtcctgatgaaattaaatttaaaggggcattttaa

SEQ ID NO: 6024 - DNA, 622 bp, mus musculus; identical to SEQ ID NO: 6023

SEQ ID NO: 6025 - DNA, 239 bp, mus musculus
tttatcctatatcccccagattagacaaccctagagaagcaaagtggccacagaagatcaatttgaaagtttttgttttaaagagaagagggatggtcatcctactttgttttagtgatgcagagaggtacagacatcaacttccagggtgcgagggtcctcagatgcagcctccgcccacagctgcctctacccgattcttttcctgtccagttccaacaagaatagcaggaatgatc

SEQ ID NO: 6026 - DNA, 1543 bp, mus musculus
gacattataccaggcactttatataaatttcctgtaaagtcagtaccattatgaactgaagaaaccagggagtaacaatgttgaataacttgcccaaggtaaagaaatctagtaagtatcaatcaatgaacaacaaaccctatgtgtctgacttttctttccactaacattctagcaatacctggattttttatgaattcaaagtaattatacaactcccctgttgtcagtattttagccatgatttacataacagaaaaatgaaacagtttagttcaaaatgaattatttttgatttagggacagtaaggaatttctaaaaatgcactaaaagcactttagtacgtaaattccatcatgactaaaaggtgccatgcctatgtaagtataattgtgctgaggtttatacaattccataagtactaaaaagagaagttttttaaaaagtcataaaaatgcaaaacaaatatgttctgatttctgagaaagcctagaagagcccccaggcaatatgtattcaagggctatgtagccaggtgttcccctctggggttgtattcaacgtgatttcttgagaattaagacagtagtgaggaaacacagaagaaaaaatttctgctgtaaataaaatcctgatagaaaaagcataccagggaattttggttgataattgtttcgctaatttattgcctctcactttatctcgaaaaataaaacattgtttggcccttattcaaataattttcactagtgcaggaattctggtaacctgatcatatatatctatctttattatgagatcttcagttgtttaaagttaccatattttataatattatatatatatatatatagtcaattgaaaaactgatgtagtcgagaacacaccttgcctaatataactgctacattgaattcatttacatcataacaatttctcagttctttaaaacagaagtttaaaagcagattcattatgtggttcattagattgaattctgtggtcagacaaacccaggttttgtttcttttgtgtgtgtgagacggagtctcgctctgtcgcccaggctggagtgcagtggcgcgatctttgctcactgacacctctgcctcccaggttcaagcaattcttctgcctcagcctcctgagtagctgggattacaggtatgtgcgacgacgcccggctaattttgtatttttagtagagacggggtttcatcatgtttgccaggctgatctcgaactcctgacctcaagtgatccaccttcctcggtctcccaaagtgctgggattataggtgtgaaccaccgcgcccagcccaaacccaggttttaattatgaccctcctgtttgctgggtgaactccttaagactctgcatgtctctgttttctaatctggtaatgaggatcctaatgcttaccttcttcagagattattactggtattaaattatattattttaaatgtctctgtctgcctgcaatggtgctgaatcaacagtagctgccttctctgttttccccaaacaaattctcccca

SEQ ID NO: 6027 - DNA, 453 bp, mus musculus
tatcgaagagtgttattcaacttcctggtgattaaattactgataaacatagccgattttttttggttttgcaggtcctgaaaaatagagaatgcatatgacttccaaatattggtagaagagccagtcaaataatatcttccatgaatcctcttacaattaatttgctgattgatagatgttcaaaatctagaaatgaatgagttgcatgtaaggaaatcagtacatgcttctgctgccatcatatatcacaatacaagcattaaaagctatattaattatagaactttatgatcttatttacatggtctgtgaatttgatctttattttggaattcctttaatccattctgattctaatcacctcaggaccaactttagtgtatttgtacaaggcgtaatcattggctagctctataagttgtccaaacaaccaaatgagatgtcgcaaat

SEQ ID NO: 6028 - DNA, 816 bp, mus musculus
ttattattgttaggattttaattgtctaacaaacaattgatagtattttgttgtttttatgtttgattacttcaaatcattaccttaaaataagagtaatttcaatggtcaggcatggtggctcacgcctgtaatcccaacactttgggaggctgatgcgggcggattggttgggctcaggagttcaagactaccctggacaacatgacaaaaccctgtctctactaaaaacaccaatagcaacaacaacaacaacaaaaatagccaggtgtggtggtgcacgcctgtggtcccaactagggaggctgaggtgggaggattgtttgagccccggggggcggaggttgcagtgagccaagatcgcaccactgcactgtagcctgggtgacagagcgggaccctatctcaaaaaataaataattttcttttaaattttctttctgaattacatgcaaatacgtttttttgtttttttttttttttttgagacggagtctcgctctgtcgcccaggctggagtgcagtggcgcgatctcggctcactgcaagctccgcctcctgggttcacgccattctgcctcagcctcccgagtagctgggactacaggcgcctgctaccacgcccggctaattttttgtatttttagtagagacggggtttcaccgtgttagccaggatggtctcgatctcctgacctcgtgatccgcccgcctcggcctcccaaagtgctgggattacaggcgtgagccaccgcgcccggcgcaaatacgttttgaaacagctattagaattgtattttttatggttttcacctt

SEQ ID NO: 6029 - DNA, 816 bp, mus musculus; identical to SEQ ID NO: 6028

SEQ ID NO: 6030 - DNA, 816 bp, mus musculus; identical to SEQ ID NO: 6028

SEQ ID NO: 6031 - DNA, 816 bp, mus musculus; identical to SEQ ID NO: 6028

SEQ ID NO: 6032 - DNA, 785 bp, mus musculus
tagactagtgtagaagctccacactcatcagattcttaggttgcatgtattttactgccctgctgtccctagaatgccccatatgaacccaccatgacggcgatgccaattctcccagcaggtccataccccaggcaacggagacatggaatgggaggcaaagggcacaccctttaaggagattttccagaagtcccacaaatcatttctctttatgttttgtcaatcaaatattaagtgatcatatttggttttgaaggggctgtgagtattttttcctggctacaatggggtttctgttactaacaaagtagaagagaatgagtgtgcatttggacaattcacagtatctgccatgtgatgattatagaaaacagagggactggaacaaataagagtccttttagaagtactgagaactcagtttttattggaggagctcaattgtatcttattttatgggtgagaaaaactgaggtcagttagaatgaatatctgtacctacacacttcctcacttcccatcatcctgataacataaggctcattctggtcaacaaatggtttcattcaagctgacattttcaacaagtttcatttgaactaaaactttatgaggaattcacaaaatatcctcaaaatgctctagcagtttgcatggtgtaaatatttaaagcaaatatattcaaatagataaacaccgactgtctcatctttctcgtagataaatccaaatgcatcagtggggcagtgaaaagtcagctatctttgttcagatgttgttta

SEQ ID NO: 6033 - DNA, 10876 bp, mus musculus
tttgttcttgatggtttaacactcttagaattcattctcacatatatttcccaaggtttctgatgatatagatgaacaaaacattacaattattttgaaatataaactttttcttggttcacatttgtttcctacaaacctgctgagatctgacacaaaatataggtctggagccagtaaagggtagtttgggtaggtcttgaggtacttaatgtttccctaccatactgctgcctcaggtacatttattatatggtcttcaagcaaaggagagctagtttccttggagaaaggaggggaagcctttcctggtaaagacgacttagaaaacccaggagtctctggatgctcagcattgtttaagttcacccatgtgtttccatttcaaaccacagggttccagccttctcaaacaaagctctttcagttggtaaatctgtaaattcaacttacattgcacttcttcaacccgtacaattaaatggtagtctcaccttcagcagggttggctctgtgggtgtaaggaataagcgattcctttagatttgtcatagaatagaaactctttgtttcttttactatgacttaaatgaagagtttaaagtctcaaacttgccaccttctttttgtaaaactctctaaggcaagaagcagcagccattcttccccataggtcttatcattcccactactttgcaattgtaaagggcaaccaccatttgatctgccaagatatttactccaatagccacattgtcagaaacaacaacagcttacagtttaattgatatgatgccactggatgttgtgaattactcagattctatttcacaactgccataaatctagcctgcattcaaaaacagcaccaatcaaccaaagagccttctcagggtctctacaggaacacaacaaccaaactagatattgtaatacagggaacttaatacataaattgattaaacaagtgctgagtgtctgattgaataaacagagaacactatggtaatatggtgattatagctgtggacacagctattacatttaggcctggagaagtgcagggaagaagttgggtttattaaaacatccaaagcttagatgaagacctcatgtagattaactcagaatatctgatcaggaggccttttcaactgccaagaattacagtgaaggggagaatagcgcagttctggagtgctcaaggcagatagagactgcaacaaaccactgctgctatgggcattattgtatgaacagtgtgaaaacaggaaaggaagaaatcattctccttttctctgcctttaagttctgctcgagtatctcctactattgacagaacctaacaggatgccaattagcaaatagtttgcagagtaccagctcccgagcacagagcagagtatagaaggatgaatttgaaactgagtgttaatatgcgcttggctggcacaaccactggttgtgctaagagaaccactattctcttagtagaggaggtatggcttaggatatgtttgctagcttcatacctttagggattcaccctcttttataaacactagatatttaataatatgccttgtgcactctgagatctgtgttgtctgccccctccctactttcaaaagaaaaggaatttcttttttctttgccccagtgccccctttcttctcaatttagctgcttttcattgatttctttttggcatgaactgagtgctggaaaccagctaagtagattgacttctagagtttacagggcccagactgccatgtactgactacacttttcaatgtctccttcgttcacctgtgaattggcacctgctttggcctcttccagtctctgttgctgttcccaattggcccactgaactttgcatgcagatgggagaatttcctatttgggaatgagtacttgttgatgattcatttcatggagtctctaactctctgcaccattggaaatctctttgcttctctttatgtcctcccacatggttgctgctacgtcatgtgtctttcaggagttgcactttggcctgtccctgcatttttgcatttgagacatattctgtcatgtagaagtggaagtactgggccatatagtaattttttttttttgagacagggtttcactttgtcactcaagctgaaatgcaatggtgcaatcatagctcgctgtaaccttaaactcctgggctcaagtgaccctcacaccccagcttccctactagctagcaccacaggcatggatcaccatgcctggctaatttggttttttcaattttttctttttttttttttttgtagagagagggtctcactgtgttgcccaggctggtctcaaactcctggccttaaacaatccccctgtctccgccttccaaagtgctggaattacagacttgagccactgcacttggcccatgtttaacattttaagagattgccaactgtttctaaagaaaccacacaatttcatatacaattccagcagtgggtcagggcttcagtttctccacatctttgccaatacttgttattgcttgtctctttgaggatagacataatgatgtatgaaacaatatttcatgtggtttttatttgaactttcctaaagactaatgatgttgaacttttatttatgtgttactgatcatttatatgtcttatattgagaaaaatccattcaattcctttactaattgttcaaataaattgcctttttatttctgagatacaagattttaaaatatgtattttgaatacagatctcttatcagatgattttcaaatatcccctgctactctgtgggtggtatttttgctctcctgatggtaccctttaaagcacaaaagtttttaattttgatgaagtccaatttatttatttttttgttctatcacctatgctttcagtgtcatacctacagtttagcttaatccaaagtaacccagacttactcttgtgttttttcctaagttttaggtcttacatttaggtgcatgatacatttctgagttaaaaatgtatttgtatacatgtaaggaagacttccagcttaatttttgtgatactcaatgtttccagtattacttgctaaaaaaatttctccattaaattgtcgtcacacccttatcaaaaatcaatttaccgggaggtcaagccaagatggccgaataggaacagctctggtctacagctcccagcatgagtgatgcagaagatgggtgatttctgcatttccatctgaggtactgggttcatctcactagggagtgccagacagtgggtgcaggacagtgggtgcagcgcactgtgcgtgagccaaagcagggcgaggcactgcctcactcaggaagcacaaggggacagggagttccctttcctagtcaaagaaaggggtgacagacagcacctgtaaaatcgggtcactcccaccccaataatgcgcttttccgacgggcttaaaaaacggcacaccaggagattatatcccgcacatggttcagagggtcctatgcccacagaatctcgctgattgctagcacagcagtctgagatcaaactgcaaggcggcagccaggctgggggaggggtgcccaccattgcccaggcttgcttaggtaaacaaagcagctgggaagttcgaactgggtggagcccaccacagctcaagaaggcctgcctgcctctgcaggctccacctctgggggcagggcacagacaaacaaaaagacagcagtaacctctgcagatttaaatatccctgtctgacagctttgaagagaacagtggttctcccagcacgcagctggagatctgagaacgggcagactagactgcctcctcaagtgggtccctgacccctgacccctgacccctgaacagcctaactgggaggcaccccccagtaggggcagactgacacctcacacggccagatactcctctaagacaaaacttccagaggaacggtcatacagcagcactcgcggttcacgaaaatccactgttctgcgccaccgctgctggtacccaggcaaacagggtctggagtggacctctagcaaactccaacagacctgcagctgagggtcctgtctgatagaaggaaaactaacaaacagaaaggacatccacaccaaaaacccatctgtacatcaccaacatcaaagaccaagagtagataaaaccacaaagatggggaaaaaacagggcagaaaaactggaaactctaaaaagcagagtgcctctgctcctccaaaggaacgcagctcctcaccagcaacggaacaaagctggatggagaatgactttgacaagctgagagaggaaggcttcagacgatcaaactactctgagctacaggaggaaattcaaaccaaaggcaaagaagttgaaaactttgaaaaaaatttagatgaatgtataactagaataaccaatacagagaagtgcttaaaggagctgatggagctgaaagccaaggctcgagaactacgtgaagaatgcagaagcctcaggagctgaggcaatcaactggaagaaagggtatcagtgatggaagatgaaatgaatgaaatgaagcgagaggggaagtttagagaaaaaagaataaaaagaaacaaacaaagcctccaagaaatatgggactatgtgaaaagaccaaatctacgtttgattggcgtacctgaaagtgacggggagaatggaaccaagttggaaaacactctgcaggatattatacaggggaacttccccaatctagcaatgcaggccaacattcagattcaggaaatacagagaacgccacaaagatactactcgagaacagcaactccaagacacataattgtcagattcaccaaagttgaaatgaaggaaaaaatgttaagggcagccagagagaaaggttgggttacccacaaagggaagcccatcagactaacagtggatctcttagcagaaactacaagccagaagagagtgggggccaatattcaacattcttaaagaaaagaattttcaacccagaattttatatccagccaaactaagcttcataagtgaaggagaaataaaatactttacagacaagcaaatgctgagagattttgtcaccaccaggcttgccctagaagagctcctgaaggaagcattaaacatggaaaggaacaaccagtaccaaccactgcaaaatcatgccaaattgtaaagaccatcgaggctaggaagaaactgcatcaactaacaagcaaaataaccagctaacatcataatgacaggatcaaattcacacataacaataaattaaccttaaatgtaaatggactaaatgctccaattaaaagacacagactggtaaattggataaagagtcaagacccatcagtgtgctgtagtcaggaaacccatctcatgtgcagagacacacataggctcaaaataaaaggatggaggaagatctaccaagcaaatggaaaacaaaaaaaggcaggggttgcaatcctagtctctgataaaacagactttaaaccaacaaagatcaaaagagacaaagaaggccattacataatggtaaagggatcaattcaacaagaagagctaactatcctaaatagatatgcacccaatacaggagcacccagattcataaagcaagtccttagagacctacaaagagacttagactcccacacaataataatgggagactttcacaccccactgtcaacattagacagatcaacgagacagaaagttaacaaggatacccaggaattgaactcagctctgcaccaagcagacctaattgacatcaacagagctctccacccctaatcaacagaatatacatttttttcagcaccacaccacacctgttccaaaactgaccacatacttggaagtaaagctctcctcagcaaatgtaaaagatcagaaattataacaaactgtctctcagaacagagtgcaatcaaactagaactcaggattaagaaactcactcaaaacactcagctacgtggaaactgaacaacctgctcctgaatgtctactgggtacataacaaaatgaaggcagaaataaagatgttctttgaaaccaatgagaacagagacacaacataccagaatctctgggacacattcaaagcagtgtgtagagggaaatttatagcactaaatgcccacaagagaaagcaggaaagatccaaaattgacaccctgacatcacaattaaaagaactagtaaagcaagagcaaacacattcaaaagctagcagaaggcaagaaataactaagatcagagcagaactgaaggaaatagagacacaaaaaacccttcaaaaaattaatgaatacaggagctggttttttgaaaggatcaacaaaattgatagactgctagctagactaataaagaagaaaagagagaagaatcaaatagacgcaataaaaaatgataaaggggatatcaccaatgatcccacagaaatacaaactaccatcagagaatactacaaacacctctacacaaataaactagaaaatctagaagaaatggataaattcctcgacacatacaccctcccaagactaaaccaggaagaagttgaatctctgaatagaccaataacaggctctgaaattgtggcaataatcaatagcttagcaaccaaaaaaagtccaggaccagatggattcacagccgaattctaccagaggtacaaggaggaactggtaccactccttctgaaactctttcaatcaatagaaaaagagtgaatcctccctaacacattttatgaggccagcatcattctgataccaaagccgggcagagacacaacaaaaaaagagaattttagaccaatatctttgataaacattgatgcaaaaatcctcaataaaatactggtaaaccgaatccagcagtacatcaaaaagcttatgcaccatgatcaagtgggcttcatccctgggatgcaaggctggttcaatatatgcaaatcaataaatgtaatccagcatataaacagaaccaaagacaaaaaccacgattatctcaatagatgcagaaaaggcctttgacaaaattcaacaaccttcatgctaaaaactctcaataaattaggtattgatgggacgtatctcaaaataataagagctatctatgacaaacccacagccaatatcatactgaatgggcaaaaactggaagcattccctttgaaaactggcacaagacagggatgccctctcttaccactcctattcaacatagtgttgggaattctggccagggcaattaggcaggagaaggaaataaagggtattcaatcaggaaaagaggaagtcaaattgtccctgtttgcagacgacatgattgcatatctagaaaaccccattgtctcagcccaaaatctccttaagctgataagcaatttcagcaaagtctcaggatacaaaatcaatgtgcaaaaatcacaagcattcctatacaccaataacagacaaacagagagccaaatcatgagtgaactcccattcacaattgcttcaaagagaataaaatacttaggaatccaacttagaagggatgtgaaggacctcttcaaggagaactacaaaccactgctcaaggaaataaaagaggatacaaacaaatggaagaacattccatgctcatgggtaggaagaatcaatatcatgaaaatggccatactgcccaaggtaatctatagattcaatgccatcctcatcaagctaccaatgactttcttcacagaattggaaaaaaatactttcaagttcatatggaaccaaaaaagagcccacatcgccaagtcaatcctaagccaaaagaacaaagccagaggcatcacgctacctgacttcaaactatactacaaggctacagtaaccaaaacagcatggtactggtaccaaaacacagatatagatcaatggaacagaacagagccctcagaaataacaccgtgtatctgcaactatctgatctttgacaaacctgagaaaaacaagcaatggagaaaggattccctatttaataaatggtgctgggaaaactggctagccatatgtagaaagctgaaagtggatcccttccttataccttatacaaaaattcatttaagatagattaaagacttaaacgttagacctaaaaccgtaaaaaccctaggagaaaacctaggcattaccattcaggacataggcatgggcaaggacttcatgtctaaaacaccaaaagcaatggcaacaaaagacaaaattgacaaatgggatctaattaaactaaagagcttctgcacagcaaaagaaactaccatcagagtgaacaggcaacctacagaatgggagaaaattttggcaacctactcatctgacaaagggctaatatccagaatctacaatgaactcaaacaaatttacaagaaaaaaacaaacgaccccatcaaaaagtgggcgaatgacatgaacagacacttctcaaaagaagacatttatgcagccaaaaaacacatgaaaaaatgctcaccatcactggccatcagagaaatgcaaatcaaaaccacagtgagataccatctcacaccagttagaatagcaatcattaaaaagtcaggaaacaacaggtgctggagaggatgtggagaaataggaacacttttacactgttggtggaactgtaaactagttcaaccactgtagaagtcagtgtggcgattcctcagggatctagaactagaaataccatttgacccagccatcccattactgggtatatacccaaaggactataaatcatgctgctataaagacacatgcacacatatgtttattgtggcactattcacaattgcaaagacttggaacaacccaaatgtccaacaatgatagactggattaagaaaatgtggcacatatacaccatggaatactatgcagccataaaaaaggataagttcatgtcctttgtagggacatggatgaaattggaaatcatcattctcagtaaactatcgcaagaacaaaaaccatacaccgcatattctcactcataggtgggaattgaacaatgagaacacatggacacaggaaggggaacaacacactctggggactgttgtggggtggggggagggcggagggatagcattaggagatatacctaatgctaaatgatgagttaatgggtgcagcacaccagcatggcacatgtatacatatgtaactaacctgcacattgtgcacatgtaccctaaaacgaaaagtataataataataataataaaaaaatcaatttaccgtcagggcaagggtttatttttggactctcaattttgctatattgacgtatgtctgtctacatgatctatatgtttatctgtcttgattgctgtggctttgtagaaagatttgaagttggaatgtgtgagtccttcaacttggttatattttttaaagactattttggcttttacgcattttcatcaattttagggtcagcttatcaacttttgttaaaaggtaagctggtaatttgatatatgtatagatctagttgggaagtatcaccatcttaacaatattaaatcctctaatctgtcaacatgcaatttcttattctttttttaaatttctttcaaccacgtttgtagttctgaatgtacaagtcttgcatttattttgtaaaacttattcttaagtatttattcaatttgatgcttttgtgaatggaattgtttcttaatttcatttttatatatttacattgcttttggtatattgatattgcatcctcttgcaatattgctgaagtcacttatttgttctaatggtttcttttaaaaaagtagattccttaggattttctatgtacaagaccatatcatctacaaatagagataatttaacttcttcctttctaatctgttatcttttaacttttacctgcctaatttccctagctagaaccttcagtacaacaattgaatagaagtagtgagagtagacatctttttcctaatcttacagggaaagtatttagtcattcgccattaagtatgatgttcccttgtggttttcatagatcgctttaccacatcgagaaaatttccttttaattctagtttgttgagtgttttatcatgaaagggtgtgagattttgtcaaatatgtatcttttgtttatagaggtgattatgtgtttttgccctgttttctattaatatattaagttagttgattttttaatgttaaaacaaccttgcatttctgagataaatcccagttggtcatggtgtataacatgttttattgtttctggatttggtttcctattttttttgagtatttttctgtatttattcataaaggatactgatctgtaattgtttgttttcttgtggtatctgatttttctatcatgaaaatactgacctcatagaatgagtaggaaaggttctactctcatctatttttggaagagtttgtgaagtattggtcacaatttttatttaaatgattgataaaattagccagtgaagctatctatctgggcctgggattttctttgcagtaaaaaatattttattattaattcattctctttacttatataggtctattcatatattctgtttctttttgagtcactttggtagtttgtatctttctagtaatgtatccattttgtgtttttgtctaattgttggcatataattgtttatagtattccttgtaattctttttagttctgtaatgtcaattgtaatgtacactttttcattcctaattttcttaatatgaattttctttattttccttattagtctact

SEQ ID NO: 6034 - DNA, 1052 bp, mus musculus
agcattgtaagtgtaaagataaataaatatatagaaatagaaatacagaaagcataagtctaaataaataaatatattctgttgccttttcatgtctccctgaagaatgattaataattactgattactagccacttaggaattattaataattaatcactcataacaattatttttatcaaaaactcatcaagatagcatgcttcattagaaacaatgagaagctgattttttttccccctaaatttaattcttaacatttttggtgacattggtagtggggctgggcataagatactttaaatcatctaataaagcaaactcagacttggcagcatctctttcagaaaacttattcaataaatacttatatctgatttgtttcaaatgatatttcatgaagattatatttcgggtatttattttacgaaaaaattttacaagtagagggattaggaatatttgagtacttggaccataagcatgattgataattaatgtaaatcacaagagagaaggatgttaatatcattcctatttgataaataaacattaagttaatatcatggggtttttagttatgtacatttaaaaaattctggacagaaatttatagttaaagagttaatacttcaagagaatgaaaggacaagactatagaaaatgtttgcaaatgcatatctgataaagggcttatatccagaatatgtaaagaacttttaaattcaataataaaacaaccaacaaccccctaaaaatggcaatagatttacatggatatttcattaaagaagatacacagatggcaaataagcctatgaaaaaaattctcaatatcattagtcattaaggaaatgtcaactgaaatcataatttgatgctgcctcatacatattagaatgtctaaaattaaaatggccatatcaagtgttataaggatttgagtcaaatgaaatgctcacaaactgttgggtgagtatgtaaaatattataccactttggaaaacatttttgcaatttcttaaaaagttaaatatcctctttccacatgc

SEQ ID NO: 6035 - DNA, 590 bp, mus musculus
ataaggctgaggcaataataccttcctacggtattgtgaaagttggcaaaatgctatacatttgaaactaatatggcatctcttaaatggtaggcaatcaatagatggtagtcataatggagcagctaatattattttattacaattattgaaaatacaatattttgaaatgactttgttggattaattcctctttgccacagagcagtctaacgtgactttgtgctgtccttgtcacatacctagcctctcacctgcccatcctcgagtcatgcccggtggaaagctatgctaatgttccagttcatttgaaaagtgggctgcagcaggaggaacagaatgatggagaggagactaagcacagatttatatctgcagtgccaacaccttagggccatcctaaggagcttttctactgagtctggaatgtgcagttggcatggtaatatgaaaaggtagtgagtgaggtttgtcagagagaaaagggctacaaatcagcaggtcaagttttcccagcatgtttcaaagaaacttaaagaagagatggccatgcttacttgcccttgtctagatggggactgaaatcatac

SEQ ID NO: 6036 - DNA, 708 bp, mus musculus
tgttttttgcaaaacttattagaaatctaagtggagatacctcgtagacaggtagataatgagagatgccatgggttttaaatgtaaaactgggagtcagaagcatgccaggtatttctgagtcatgagactgccttagatcatcaagaagtcaatgtatagacagaaaaagacatgagactgtggtcaaaaacttgggaactttaagatttagaagacatctgcgagaagagaaacaagccaagaagactgagactgagcagcaggtgagacaggaggaactatgactgtagtctgaaagccaagcagggtgtcaactttactgaatatttccaagagatcaaataagatcagaacaaagttttgaatataggacttggcaaaatgaaggtcactgatcttcttaaaaagagtgttttctatgaagtaatgagaggaatgcgagttacaagtcactagcagagagaacagaaggtgatgtattggtggcactgcatatctcttttgggaactatcacttttatcaacttttactgtgaaggagagctgaaaaatggaaagtaatgtgagtggaacatggaatcaaggaaccctgttttttgtttttaatgaaaaagatttcaaacttaaaataatcaaactgaaagggaaaaatataataatgtaggaaaaaaggtaaacataattgctggaataaagttcttgaaa

SEQ ID NO: 6037 - DNA, 2031 bp, mus musculus
gtggtatctctttatggttttaatttacattttccttatatctacagatgttgagaattttatgtgcttattggccatgtgtacatatatcgtctttgaaaatatgtctgttcagatgctctccccattttgttttcattattgtctttgtctttcattattgagttttaagttctttatatagtcagtctatcacatatgtgatttaataattagacatatgttttgtaaaaattgcctccatcttctgagttgtcttttcaatgttttgatggatgttgtacttttaacataataaataaataagtattggataaatacattaaatcattaattcttctaattatttctgtcagtcagttcaatttttatttataaacaaattttcctggaaacttacattcctctgagtgcatcagcttcattggttggtcattagttacttaggggaatagtcagtcacagcacagagatttttgcccctatgacaatttaggggaaatatgtgggacacaactcgaggaagagagtctttgttattaccagctattcacccacctctggtgcactctcttcccatactccaccctcacaaagttgctctgtctcaaacaaaaattcccataacttgacccatatgatgtttttttagattatattttaattttaaaatcaacatcaaaactttcccttgaattgatattttctcagtatatcttttttgatccctggctctgtactttgccctgagctgcttctctcagttagaattacttagataaagaatagggagaagaaaattctcaggggctagcccacttatttgctgtaaatataatcagctcagctagacttccacattgtaatgatgtcaccctgttacctctggctggttctgctttggtaccaccagtttttatgtgcacaatagtgcatatacaagcaactgtcccttcagggttaagtaggggagagaaaaaggcacaactataaagccgctcacccagtatgtgacatctaattctctgctgacctcaactcccagtgtctccattgcagacagagtcccaaatattttctctcttcctaggagtttattaccatttgtcttaggtcacaaaatacatcagtgtcttttctttgtccagttttaggtttgaggagtaaaccagcagccatggaaattcatcttgttagggctcagaagaatttttttttctttttaactatttgttactggaaatttcatcatatttgaaagattcttaccccgtgtcactgagtatccttgtcactgtccctaaaggcttactaacatttaactagcatctagaaataacctttaaaatactatttacaatgatatctccaaggattcacaaaaaacttacaacataaaatgcttttattaataatgtaagaaagagtaagtgtggaaaagaagggtttggggaaaaagtatatagagaaagacgtcttttatcataaatacattgtaaatagaatatttttaaaatattgattttggcaaatgcctatggtttttctcacctcttgttttattttatttttttctttagagataagctatcactctgttgcccaagctggagtgcaagtagcatcacagctcattgtaacctcgaactcatgggctcaagagatcctcttgcctcagactcctgattagctggaactacaggcacacaccaccatgtccagctaatgttttaaatttttgtagagacaaaaatttttaaagttttgttgcccaggtttgtgttgaactcctggcctcaagcgatgctcctgccctggcatcctaaagctctggagttacagacataaaccacaatgaccggccatggatagaaccttaactaaaggtcatatttcaggtacaaagaaaaaaaattggggaagtaaggacaataggagcttaagagaattttaggcaggatacccttccaatgtccctcgaatgttgaatgttgcttacgtacttatctagaattgtagctgtgttattgg

SEQ ID NO: 6038 - DNA, 298 bp, mus musculus
tccctattaaaaatgagaaagtaaaagagaaatatttgggtcaaaaactgcaaataggatattattcatggcatagttctgtgtgcttatgcaaagtgtatctgtattggagaattagtttagtaatattccagatggttacaggaagctagaaacataacattacatggttgtctttgtgatgtaatttttgtaattatttttaggtttcatggaagttggcaatagaaaccttaattttgaagaaacttaaagtaacagaaacttaggtgtaatctcagcaatgagaaaggaccat

SEQ ID NO: 6039 - DNA, 336 bp, mus musculus
tttgctggcactataagacaaagttaaacaggtgtggacaaggacaggtattcttagtctcgactttcaaacaaaaacttgtttacttatgaacaaaagaaaatgagttcaaacatgggtggtgacagcataaatgcaaaagcgctgaattgataaactccctcttaagggcttggcaaaactttgtatcatattaatctaaaatttttttacaaaaaataatgtatcatgtgaggcttaatatctgaataagtcttatggtcctaatccagtctccatgaaacttgattggatgataaagtgccaaaagctgaatcttggaaggtaataaaaaaa

SEQ ID NO: 6040 - DNA, 345 bp, mus musculus
gggttaagaattccctgtaccacaggttaaaaatccctgaaaaggggattaactcttcaattcaaagctagatagcaaatgtgtaagtgtctcaaaagcaaaattctgagtttgcaatctagaaacataaaaatactttaccaagtatgtgtttattttttaactaaaagtgttccttggaaatatttaaatgtcttggtaacctattttatccctgtttggttaatagagtaagttcaaaggttctattggtagcagtgacatcagagaaactgttatgatcatcactgggacacttgtcagaaagttgtgtcagaatgaaggctgcaaactcaaagtaagtgc

SEQ ID NO: 6041 - DNA, 558 bp, mus musculus
tggtcagacatttttcctatgggcatcagataaaacaatgctgtaattcaaattatgtaattccaaaggaataaagctgccaatctccctccctataaaattaaaatccatgaccacaaaccatctcttcatgttaattggtaactacacattagattcctaatatagttaatgtcctgatttattgttttcctcaataaacttaattcctcaaaatatacaaaataaattacacgttaacaattccaagatcattataaaacagaccctctcccacatttctctcagccctatgcagtggttttcacctaaggacatgcttggaatcaaggtttcttttctccatttacaatctggtactgatacgactccctcaagcatctcttgtgttaaattcttattttttccaactcaaatatggataaattcattatgttttgtctttaatgtgtcccacctataccaaaagctacgatttaaacatacatgaatcttaaaaacacaagtcataaatgtaaagccaatgtatcttgatgcaattctcttataaattaatat

SEQ ID NO: 6042 - DNA, 986 bp, mus musculus
tgtagaaatgactacacagagagcgagtaggagactatttcaagtggctcaggagagatcaagatggctggggtcaggaatgaagtgggaaaggtggtgatatggtttggatatattttgaaaataaagtcccaagcacattctttctcaatatcttatgtcagcaactttatagaaacttcacactctaaggaagtagagtttcctggaaaatctttattacttaattaagtagggaaaaatactttcaagtggtctcctgagtcccttctcatttcaccatccttagccctactggaatgccaggattcagcaactcttctgggtgagtaggtgaccaaaaacaatgatctctggttccatattcatttaggaatgttgtacttggcacaatggatttccagtggctaaaggcttatttccttaggtcaacataccatctggcagttaacaaagactttcttgataagccttaagatataggacaagccagagcaacactgagctctggaaatccagtggaagtgttgaatttatactcagtgtggagctaatgcaatcccctcctcccaaccaactcactattcaaaagaaggaatagaaataaaatagcaatgacaaagaaatacaagacctacagtttcccagaagtcagaatcacagaactttctgttcaagtacttctacaaaaattaactttgcttgctagcaagagaagttaggacttaataccaaagaataaatctttatgtgacctcagtgatataattgctttttccattaatgtctcatgtcaagtctgagatttcaataatacttcattatgtttatgtattcataccttgcatctccatcctgattttaaatcccttcagaggaagtactgtaccttgggatgcttttactcaacaggtattccacaaacgtgttaacctaacacatattttacacaatttctctggtttctcagaggatattttgaagtc

SEQ ID NO: 6043 - DNA, 354 bp, mus musculus
gaaacagattttttttaaaaaaatctgtacaccctttatctcttttcttgcctttttgggctggctagatatcctggtcctatataggatatgagtagtgagagtggaagttctttcctttcccctgatcttaggaggaaagttccccagtactcctagttttgtgatagttttcatcatgaaatggtgtttttatcttgaatcacaaatgggtgttttatcatgaattttgcaaaatgcttattctgcaccaattgatatggttatataattctcccttagccattaatatggtggagtacattaattgatttttgcatattgaaccagttttcaaagaactggtccatttca

SEQ ID NO: 6044 - DNA, 1743 bp, mus musculus
taaaatgccatatatatttgagttattttttttttactttctcttgttctgttgttctctttttctgttcataaatgagtcgtgacagtgtgttttaatctgataaggctgctcccctcctcccgttgctcttcttttgcagaagctttttggatattcttatttatattgtcttgacattcaaactttagaaaaaccttgtgtatttatgaaaaataaaatgttactgggattgcttttatttataaattaaattgaaacagtttatgtccttgtgatgttgagtctttctctccaaagaaacagtatgtcatcccacttaccttcatcttctttcatgtttgcaaagatggttttacattcttctttcttttttcttctctttctttgagcatttttgttaagtttatttctctgcatttgattatttgttgctatcatgaattggtcttcatcaggatcttctaacagattattgtttacatgtaatcaaggctattaatttaagtgtgctgctactggcatcttactaaataactttgatggttgtattaaatttgtacttgattttcatgagcttcccaagcatatgagacatcatctgcaaatatagtgatagtttctcctcttctttccaattttaatatctctaattttgtcctcttgtgaattgtaactattcactgagtgaagtgttatttaatagttgatagtgggcatccttgccttgtttccaactttagtgaaaatgcctctattattctcccattgagcctgatactctctctgtgactgaaatagatgtgtttatcaggttatataacttttcattgattactattctgagaattaatttttatttgtcaagaatgcatgttgaatttggtcaaataccattttagtgtcaatggagagaggaatattctttttctctttagactaattaatataataaagtagttgaatagatttaataatattgacctgattttgtgttctaggaataaattccccttggtcatgatatatttttctcgtaatgtgctgacggcttctgattaataaattttattattttaacattgaaatgcatgagttaaaatgttctgtagcatatgtttttctgaaatcattgatgattttagctatacatgtttcaaataggatttggatatacttttttatatgccttggcacattttagtaacactggaattatatatttaaatatttatcctgatctatggcagagggttcctggtgggagttccctcatcggttaaaatgttctgctttcttcatcattttttctttctataccttttctaagctactatactagttctttcattaatacatgatattcagtgagtcagctttgaagatatccatctactgtcaaaggagccaggttgttttacaggttcaccaagttttggctgccacaaaataagaaggcttcctgaaagcactgctgcttggcatacttcttgtagtaaccctgtcaccgtctgctttttgaagctaaactaggtatgtggtagggtgtgtgtgggtagggattgtggttctgctcccactcagttcccccatgcctctcttattaccagcaaggctttaaccccctggatgggccccttgccatgaggaagtgtacttgtgctcttcctccctgggtctgctgcagctgcactctctttgcagggatctcttctaagcttccctcattttccttctgttggc

SEQ ID NO: 6045 - DNA, 1743 bp, mus musculus; identical to SEQ ID NO: 6044

SEQ ID NO: 6046 - DNA, 507 bp, mus musculus
tccatgtacccacatttcactctccttcaagtcaaaagggaattacaaatagaaaaataatgttttgtcttacaaaccatgttacacaaatgctttatttctgtaattccaattacatgctgtaaatctcttcagatttctttctaatactattttcatttgtatttcatttcaacaaagatttcggggagactttcttctactactttgcttaagttgtaaattccaaagtgctatgattttctatacacctatatactttactcagcatattttcaaatttatggctttgtcgaaatcatttgtatgcctctcaagcctgtctttaatctttttttatttgaaaacatttagaactagtggaataatgcactgtgattactttatcccttttgattctcaggtattatcttcagattatttctgcttcattatttcatcattctccagtaagatgtggcagtcttatataaatctctgcaacaggaatttctaaagcctcttgct

SEQ ID NO: 6047 - DNA, 1126 bp, mus musculus
gaggccatatattcttgcctctttgcatgcaccataatttgatactatgctagacagtgtataaaaaacaaaagagtgaagaaaatactatctatcccagaaaaggacatggcagaaaagcacatggcccttttcctgacacattgctagtaccagggggctgagtcaacataagctgcttttgagctgggtctgagctttgacagagatttagttagagtcaattcaccacatgcttcaaatactttgagggcacaatcagaattttattttcagtagagctttgactctcagcacttgtaagactttgcctatctctttgtacgcaagatcagcaaccacccttcatactggtaggacacatttctctataggctacccaccagtttttgtgttttggtttgtttgtttgtttgtttgttctactggtgaattatctttgttcctgtgacctctcctgggctttatttatttattgccttggaaggactctcttcactctgtcacccttcccctaggctttggagagccatttctgtgttcttggtgaaggctcagtggcttcagaggaatttttctcagggctcctgttgagtccccagcctgtagaggtatgttacattttattcagtgccatgtaccccagagagattttccttatctcttaacctgtcccatgtatgtacttgaaatacaccaagacaaagggctttatttagactctccttcctccccacccgggcttaaatgcactatcctttgttcatccaatgaacgtctgcggaacttgctggtgggtgaatgcagacttatattaccaggctcttccagatgttaatccttcatgccaggcttcttgtattgctaaaagtgtggctagttttttcttaactcatccgtagagaactccttttcttcctgcctgaaagcagtcatgggcttctcctcttgtaggaaagattcataactttctgcatcttctaggatgtttttttagtgtctttgcttattctgctcagttatgataaagaaaaacaaaaatcaaacaaaaagataaaaagccaaataattttaccttgtctatcttgctatcattcttaggatacaaacaagagtagtatgttat

SEQ ID NO: 6048 - DNA, 640 bp, mus musculus
tttcaccctttttttgatattttcttccatatgcctaaatatacattcagaaacctcttgagtttacagttttagctattatctgttgacttgttactttggatgaagaaaatgtatgtcgtttatatttactccaactcctttctatgtgcgactgacacacacacacacatgcactcacacccattttcctaacaatggccatataataatttttggtaagattaacattcactttcagcattatgaaaactgtaaatagcatcatagtttagttgtataatattccataatcatattcactgtctctttggttttagttgttgttgttatttaaatttctttctctacttaccgctctcctgttaaggatttctggtttcctggaccccatataagccttctcctctgtttacacacttcttttggtaaacacagattctagtgatttcttcaaaaagagtaaatgggaggcaagtttcttaagatcttgcatgtccaatgttgtacacttatatttgattaaaactttaactgggctataaaaattctatatgtcttctcagaatgattttcctcataattttcaacgcatttctatttttttctagttaccagagttagttttgagaagtctgat

SEQ ID NO: 6049 - DNA, 1590 bp, mus musculus
gcatttggtttgcttccaagttttgctattataaacagtattgttaagaattttttttttgtatatgtctcttactgaacattagactcacacctctgtttcccactgctccacaccccagcattccactttcagatgagcatttctaacacatgaaccttggctggaattcaggggagttgcacacagaggacctgctccatagagaggccatatggaaaagcgatatgattctatgagaggaaaaggaaaaagtatcaaaatggagagaaaacaatggtgaccataagcaaaaataaataagttggcctccaccctgaaatctatcagtgttctatgatgtgggccatggatttgagaaaaagcaaaataagttaaaaagtgaggcatctcatagccctggggtctacaggggaagtagaacagcctcagaaatgagggagcaagtgtcagagtaggcagcttggaaaagcctagagaaagacctacaaccaggctctgcaagcttgggccagtgtgctcaaaaccacacttttgttgccatggggaataaggcaatgttctcttttcttacaccatcctcacaattacccttaacaaattttagtcatctatattactatggtgagactatccatcccacatttcagatatttccaggaaagtggaggtggaaaaaaccagtttggcaacactgcatgaatctaattacagaataaaatgtctgtaagtaattactatcatagatgcgtcaaaaatagacctgagcccaccagtaatttttttcaacattctaattttctgtcttaagttcacccttaggcataaaccagaaggcctctcatgagacagctcttgcttatccttctaacttcatcttccaccctatgctcacaaggtccaaatagtctagttagagagagctaatgctgatccctaaagtcatcatgattagtcgagcctcctctgttcatgccattcctactgtctaaaataccctttcccatctcatccactaatttctaagtggtcttcaagaatcattcccttcttgtaccgtttgctttccctgtgcccttcattagtcccttagatcttttctctctcccttttttccctcctctatatttccaacttcagtctaaggcatacaaaacaggccaccacatcataaatatactcttagattgaccccagtcaaatttgcttttcctcctattagattttgtttcttttgtgtgagggatatggtaaatgacatccagttgacaatccacaaaggttgatagagtagatgttgtacaggccatactctacccatcttaacttgttgggacactcatctcccagatactgagaataatgtggactgatggcttatacctgccaccttctcaggaaaatcacccttgattgacagaaagcacctttccagaatttgcctgggagggagctatgccacccgtttgctgtggtcagaaaatgacgacactttcatacactgaaggggtacgagatccctgccccttccttcaatagggcaaacactgccatcaaatggatgcttcagcatctggagggtcaggccaa

SEQ ID NO: 6050 - DNA, 863 bp, mus musculus
ccttccctgacaaagtgttgcaaccaacacgacaggtgctatgagacctgtggcaaaagcaagaatgactgtgatgaagaattccagtattgcctctccaagatctgccgagatgtacagaaaacactaggactaactcagcatgttcagggtaaggatgatctggtggcttggggatgagtgtactttttaaagttgtatcaaatgctctatgttttagtataggatttaccaatagaaatctttcacatatattatctattgtgacacagacttcaattttctgaggtgaggagctgatgattttataatctaaaatgatttatagtcacagaagcaaaaagcattaggaaaccttgggagagtaggggtgtctaaggctgagagagagaagaattcatctaccttgtgccctaaaatatatctccagtcatcatgtaagaacctaaagtagctaaagtttgaaactctgattccagttgtcttagtccatctggactgctaccatagactgggtgacttatagacaacagaaagttatttcctacagttctggaggctgggaagtccaagatcaaggcactagcagatttggtgtctgataaggactcattttctagttcgtagcagatgccttctaactgtgtcttcacttagtggagaggactagatagctctctggggcctcttttataagagcactaatcacatttaccatcttttggaacttagacacctccaaaggcctcaccttctgatttcatcactttggaggttaggatttcaacataaattctggaaagacacaaacattcagaccataccaccagtgaatttaagagtatagcacactggatttggag

SEQ ID NO: 6051 - DNA, 594 bp, mus musculus
taacttaaaaatttccatgagtttgagtgtttaaactatttctcagagtgtatatgctaagttggttatatctcacatttagcggagacagccaattatatttagcatagacagttctttatgtagaaactgaagctctgaggtagttacctataaataatgctaagtggtttctctaaccttgggtagagctctctgcagggattattagtcacctgaacttggccttaatgggcaattgtcaagaatattaagtaatgtgtaccaaagctaccaacagctgatctgcacgtggagttctgcatgtgttcagcgtctacagtctgaaaaatcacaacacatcttgtcaatttcttcccctagaaacacacacacatttaattggatcaagacctctaaatgctttagtcttgaaacaaaatagccctgatataaaggttttatttcccatttattcctcttggactgatggcttaaattctgtaaatgaatgtgcagactatcacaacagatttattctgtgtatgagttatacattgaaaacaagtcttcttaaaatttgaaactaagtttaatgtgcatattgaaacatgt

SEQ ID NO: 6052 - DNA, 872 bp, mus musculus
aaaaatgcatatgcttttatcctcgtttctccaaggtcaccaggaccaaatgttgtttctggccacactaatcaggatggcctgatcagctcatgatcaacatctcttgtgaatctctgatgtgattcctttcagacatgacctggaaatgatctatccctccacaagcaataataggaggtcctagccaattgctctacttctgcatcccatttatgatttctctggtgtttcatgaacaagatggtggtcttcttggtgggcagtattctctccaataatttaaaagtcataagattactagaaatcagcaacttatataattatgtctagaactagtcttgattaaagagatatggaagcagatggttttcatgattcatattagatctattccccattccaccccagaaatcagacacacaatatgatctgaaatgtagtatctagtttgtgctttcaaatatttggagaagtgacttcctttctttgaatgaatcagtactgtggttcctctcctgtcatagacaacctttggccattctgtttttgaccttctccagatccacaggatgagcaggaacggatcgaggaaaggctggcttatattgctgatcaccttggcttcagctggacaggtaaaaagaatgtgacccaggttttcaacaaaacctgacatagatgcatcagtcaggtgtcattcacagcataaaaggtaccccccactttcttgagaaagaatacatgaaaagaagaataaactaagaactagaaaacctgggctctgcatcagctaatggtatagcccagggcaggccttttatcatctctgaaatttagaataatagaactttctatttgaagatttagag

SEQ ID NO: 6053 - DNA, 872 bp, mus musculus; identical to SEQ ID NO: 6052

SEQ ID NO: 6054 - DNA, 4007 bp, mus musculus
tgttttactttagaataagcacaagataagtttatctttttaaagtatatagtatgaaattgtattatttactgaaggttttttctgtctataaaatacactatttagataaataaccatgctagtataccaactgttaccattacaagctgtttcaaagagaaattactttttctaagttgatcattagaaacatatgctagcaaagcaaaataagtgccaaataagattttacattttaagcaaaaagaggaatacactttaaaaataaccctcaaagttattttaaatagcccactttacactcatatgattttgcctttgggaagacacaagatggaaagtatcttcctaaacacatacacacacacacacacacacacacacacacacacacacacgatggaaagtatcttcctaaacacatacacacacatacacacacacacacacacacacacacacgttgttttaggcagatttttttttttttttggaaagtttccaattttttttttttttttttattatactctaagttttagggtacatgtgcacattgtgcaggttagttacatatgtatacatgtgccatgctggtgcgctgcacccactaatgtgtcatctagcattaggtgtatctcccaatgctatccctcccccctcccccgaccccaccacagtccccagagtgtgatattccccttcctgtgtccatgtgatctcattgttcaattcccacctatgagtgagaatatgcggtgtttggtttttttgttcttgcgatagtttactgagaatgatggtttccaatttcatccatgtccctacaaaggatatgaactcatcattttttatggctgcatagtattccatggtgtatatgtgccacattttcttaatccagtctatcattgttggacatttgggttggttccaagtctttgctattgtgaatagtgccgcaataaacatacatgtgcatgtgtctttatagcagcatgatttatactcatttgggtatatacccagtaatgggatggctgggtcaaatgttatttctagttctagatccctgaggaatcgccacactgacttccacaatggttgaactagtttacagtcccaccaacagtgtaaaagtgttcctatttctccgcatcctctccagcacctgttgtttcctgactttttaatgattgccattctaactggtgtgagatgatatctcatagtggttttgatttgcatttctctgatggccagtgatgatgagcatttcttcatgtgttttttggctgcataaatgtcttcttttgagaagtgtctgttcatgtcctttgctcactttttgatggggttgtttgtttttttcttgtaaatttgtttgagttcattgtagattctggatattagccctttgtcagatgagtaggttgcaaaaattttctcccatgttgtaggttgcctgttcactctgatggtagtttcttttgctgtgcagaagctcttgagtttaattagatcccatttgtcaattttgtcttttgttgccattgcttttggtgttttggacatgaagtccttgcccacgcctatgtcctgaatggtaatgcctaggttttcttctagggtttttatggttttaggtttaacgtttaaatctttaatccatcttgaattgatttttgtataaggtgtaaggaagggatccagtttcagctttctacatatggctagccagttttcccagcaccatttattaaatagggaatcctttccccattgcttgtttttctcagttttgtcaaagatcagatagttgtagatatgcggcattatttctgagggctctgttctgttccattgatctatatctctgttttggtaccagtaccatgctgttttggttactgtagccttgtagtatagtttgaagtcaggtagtgtgatgcctccagctgtgttcttttggcttaggattgacttggcaatgcgggctcttttttggttccatatgaactttaaagtagttttttccaattctgtgaagaaagtcattggtagcttgatggggatggcattgaatctgtaaattaccttctgatgccaaagccgggcagagacacaaccaaaaaagagaattttagacaaatatccttgatgaacattgatgcaaaaatcctcaataaaatactggcaaactgaatacagcagcacatcaaaaagcttatccaccatgatcaagtgggcttcatccctgggatgcaaggctggttcaatatacacaaatcaataaatgtaatccagcatataaacagagtcaaagacaaaaaccacatgattatctcaatagatgcagaaaaagcctttgacaaaattcaacaacccttcatgctaaaaactctcaataaattaggtattgatgggacgtatttcaaaataataagagctatctatgacaaacccacagccaatatcatactgaatgggcaaaaactggaagcattccctttgaaaactggcacaagacagggatgccctctctcaccgctcctattcaacatagtgttggaagttctggccagggcaatcaggcaggagaaggaaataaagggtattaaattaggaaaagaggaagtcaaattgtccctgtttgcagacgacatgattgtttatctagaaaaccccatcgtctcagcccaaaatctccttaagctgataagcaacttcagcaaagtctcaggatacaaaatcaatgtacaaaaatcacaagcattcttatacaccaacaacagacaaacagagagccaaatcatgggtgaactcccattcacaattgcttcaaagagaataaaatacctaggaatccaacttacaagggatgtgaaggacctcttcaaggagaactacaaaccactgctcaaggaaataaaagaggacacaaacaaatggaagaacattccatgctcatgggtaggaagaatcaatatcgtgaaaatggccataggcagatgtttttgcagaggcaagggaagagaggaagatttaggatgtgctctggccaagcagctcaaaaattactctatcacagatgaataagcatccctaccaaacacactgtcatcgtccttctagttctgtgtaatagataataaaaaaccatctgtccattgcagtaatttgccaagagcacagcctaacatattatttcattttactaacttaaaaatgaaataataaacagtattcatgaacaaagtttattattttctgcaatgtttgaaatgaagtgttctatgactaacttgacaaaataagtcatggaaataataaattttgtggtttataatgaaaaaacaaaatgcctgtttttgactccttcaaaaaagaacaacaagaaaaaaaaaacaaaactaagattagttttgattactctttcatatctacttttctttaaaaaaatcaataaacttttttttttcagatcagtttcagggttaaagaaaaattgggcagaaagtagaaagagttccatatactttctgtcctactgcccttagttttccctatcattgataccttgcattggtgtgacacatttgttacaattgaaacaatagtggacgggcgggcccggtagctcacgcctgtaatctcagcactttgggaagccgaggtgggcggatcacctgaggttaggagttcgagaccagactgatcaacatggtgaaaccctgtctctactaaaaatacaaaaattagccaggtgtggtggtgcagacctgtagtcccaactacttgggaggctgaggcaggagaattgcttgaactgggaggcggaagttgcagtgagccaagatcatgtcactgcactccagcctgggcaacagagcaagactctggcaaaaaaaaaaaaaaaaaaaagtactgacactatagatgttataactaatatctatagcttccattacggttcactctttgtgttgtaacacatctatggg

SEQ ID NO: 6055 - DNA, 1282 bp, mus musculus
ctgcatagaagtacaagtagatgtaatccatgttagcagaatcactggggtaaagccatgggaagcaatttttttttttttttttttttgagacggagtctcgctctgtcgcccaggctggagtgcagtggcgggatctcggctcactgcaagctccgcctcccgggttcacgccattctcctgcctcagcctcccgagtagctgggactacaagcgcccgccactacgcccggctaattttttgtatttttagtagagacggggtttcaccgttttttagccgggatggtctcgatctcctgacctcgtgatccgcccgcctcggcctcccaaagtgctgggattacaggcgtgagccaccgcgcccggccgggaagcaatgtttgattcaatgtaagaaagaagttcccaaaatctagagcctaaggattgaccaagatgctctggaaacaagtaacccctcttctctagagagaagactcagtgaggtataagctttcaactttattcgaagttattagagaaatttcttggaattgatttgtagaaaaatatttccaattttagcttatattttactttaaaaagaaaaataggagagagggagctttgtactgtactgaaaatgagatgacaggatgttgaagttttacccaaggcccccagatacaacagatgctgcccactgaagtgagattccagattcaaatgcagactctacaaagaatatagtagcaaatgacttccacaattcttgaaaccttcagccaggtccaagtgattaaaaggggttgattatggcaaggagagaggattctgtgagaaggaattccagagtgctgaagatgtgtgtgtttggagtgggtggcgtggagggggtttcacctttttacctcaagctgtgtgcaagaagagtttcaaagtgtcttcttagagaacttcatgggagatacttgcatgaggatgggtaggaggtcagagtggggtctgagtgccactcaggaaatttggagggaaagggacaggctgacaaactgttctggcacagaaccaggacattttcttctgcatccccacaggcaaatgatgtgagtgttccccatggaccaggccagtccaggctaggagcaagggagagctggctggggtcaacctggggcctctctgagggggcagatggatcctagtagctacacactgtaggtagacagcttcctaagggagcatataggatgagtccaaagtcactccctagaacagagaagaattagcatgaatcaa

SEQ ID NO: 6056 - DNA, 712 bp, mus musculus
taagtgtttggccattatttgttgaatgtatgaataaatattgcgtaagattgttgcttttaaacatgttcaaccttaagaccaagcaacgaacaatcaatacttggagactttagagttacaatttcgaacccaatcaatctcattttagattttccttgacacttaggaaagtggggatggggactcttttttgccagacctgacccataactggtaatctttctcagcacccttaaagacaaaatgaactaataagaattacaacaaatctttcacagtaaatatttgaagaggatcacacttccttaggatttctacattttcagaaaggaaaggaactaggaccagtcaaaatgcaattttatctatggggctggccatggtttttgagttaacagggctgatttcagtaacccctgttttccacccagcttctaataaactattccagattcttgccttgtcccttttgaaaggccatggatctgtgaaaccacagtgcaatcaatccctcactttctgagtgacccatggaatacaaaatcacatatacactccctcactaaaaaagaaaaggctagctggggagtcatgctttctgctatacagactttttggagaatgttgaactttgccttcacatctccctgcccagacaagcctgttgcacagacagcgatacatccacatggaaggcatcagaagctca

SEQ ID NO: 6057 - DNA, 368 bp, mus musculus
ttttaaagtactaagaatctctaccttctcctatggataacagtggggactaatgtccagctgtgtccttgatgctgtgctcattagaaggagccgcaggttttagctcagtcattctgacccttggcaacatattagtgttgcctaaagaccctggccctgggccactcctagaccaattaaatcaaaacatatgaggatggtatccagacatcagcattttcaaagttctccagatgatcctaatatgcagccatggttgagaacaattatgttagctccttgctactcaaagtgcaatcagagaaccagcagctttggcattacttggaagcttgttagaaccattcagttttgttccaccctca

SEQ ID NO: 6058 - DNA, 407 bp, mus musculus
gacctaaacatgcacagattcagccttgccaatcacttcttgttttattcaggattctttcaaggtaagtgacaaggagccaactcaaattactctgagggaaaaaataggaatatgttggcttatgtaatgaaacgttcaggatttggtctgcattcagacacaacaggagcagatgttcaaaacaatgtcctaaaagatctctcctgtcctttctttcccttgttctccttttcctggtgttaatgtcaatcttcagaaagtgtttttcttacagctcctggcctcagaagaaaaagaccacttctctcttcccaatgttctcatcaaaccaaataacagatatcctttactcttctcctctccacacaattcccaacgaagagagatatatgcaagaaacaata

SEQ ID NO: 6059 - DNA, 1924 bp, mus musculus
ttccagagctgtcagctttctggctatagcttggatatcagccccacaaggacccacaaatacaaacctcaacataggatgacttactgtgcctgatacgtttttgcctttttagtccatagtagacaattatcttgactataattgtcccagcaggagctgcctctgtgtctgtgtatatgcgtgtgtattttttttttctaaggcaaaaactagtttatatctttgttcaaagatgaccttagcaggagacctttttttttttggagttgatcggtaggtcaagccatgtgctaacctggcttgtctgggtatgtctgggaagcagagcaggaccaaggctgcagggcctttatggaatttctgtgctaggaagggagatagacatttaacacaaatatctctatatcttgacatttgcgatatggcaggaaagtacaggcacctatgggactataaaactgatcctaaaacaagcaggcatgaggaggtagtgaggtcacctctaggaatgcctcctcaatggaaacatttgcactgaaccttgaagattaggtagatgagccagtgcttttgcacaccttgttccatgaaagcaagactgtttttttactgttgtattccccagtgtctgcttccttgtaggtgatcaataaagatttcttgaataaatgaaagaataaggggctcccaacatctgtttgctctcttatccctctccttccctacccagtggttcctgttctctccattcccttaccaactggtatgttatttttaaaactaaaaatactctgttttatcatattattattcaattaaagttagaaacatttaaaatccccatagatgcaaatgctagaacaatgaaataaaagctcaagattttttctgcccccaaagctctgtggaataatcaattttataaatttttaaaaaacaaaaactatttggaaggctgaagcaagaggattgctccagcccaggagttcaagaccagcctgggcaacattgcaagaccccgtctcctaaaacaaataagtaaatacaattttaaaaaggaaaaactaggcttcaccatgcaagtttataatgaaaggttatacactgaatatatactttagctatatatttcaaagacctcaagataacgttaaggccgggcatggtggctcacgcctatagtcccaacacttgggaggccagctggggaggaccacttgaggccaggagttagagaccagcctggacaacatggtaagacttcatctctataaaacataaaaaagccaggcgtggtggcatacacctgtagtcttagctacttgggaggctgaggctggaggatcacttgagcccaggaggtcaagactgcagtgacccatgttcaaactacttcattccagcctaggtgacagagagcaaccctgtcttcaacaaaaacaaacaaacaaaaacaactttgaatcagcaaaattaagcaaccaagtgtgttccccttctctaatgtcattaagctttgagtgtgtctttacagaaatttttattttcttatgtatggcatcctagattgtatgactttaacataatcccagatggattaattatcatgaagcctattttgcagacgattcaagggaatttagcccaagagcaaaagttaggtaattccttaaatctgaaatctgtcctctgaaatactactctactcaccgcttaaatggttttcagtgaagtggcattttaaaaataagtgctgcttgctttacctctgaattcccttctccaatgccattttactccctgagctgctttcttggcagtttggggcaccccttgctgtttgtgcctgtgatagtctgacttccatctgctgctctgcagccaggagcctgctgtgctcccttcagtcacatctttcatg

SEQ ID NO: 6060 - DNA, 194 bp, mus musculus
ccagtgaacattcttaaaccaataactttcattactcatgctggcatgctcagtaggtggaagccagaagtaatatacttagacgaagttgaactataaacagagtaaagttgcttaccaagggtgcacacatttgcagaacagattaggaattttgttaatatttgatatcgctatttttcaataatgtcttt

SEQ ID NO: 6061 - DNA, 2516 bp, mus musculus
aatagtttttattcttgttttatggatgagaaaagtcaagttcagagagacgtgattagtccaggtaactgcaattgtaggtaatagagctgggattttaaataggtgttcctcagtgtaaagcccatgatttctctacttcactgtagcagcagatgtgaggagttaccattaagtcctccagacctgaggtaaaccataaaatttgcccaacgtttttatattgccaagtatccaggatacacaggaatggaatggaaattttgagagaaaaatcagcatcttggtgaagctggaagaaccataaacactccacacatcatacatcaaaaaaaaaaaaaaaatgctactctgaccaactggaaaatggtttagcagttccttcagaactatactcagaaacttccttttaagaactcttttatatgacatattcacttgggatgctatcaagaaaatggatgggtaatagtggtgactcagtctatgctggttctgagcaggccacacaagcaatacagaaaataggaagaaagatttgtgtgattaatacagtaggaatcagcatatatgcaatgaaggccactcattagtttgttcctgacactcgtgtaaaagaaaaaagctttaagaaaagggttctttggtcggaagcggtggctcatgcctataatcccagcactttgggaggtcgaggcgcaaggatcacgaggtcaggggatccagaccatcctcgctaacacggtgaaaccctgtctccactgaaaattcaaaaagttagcctgacgtggtggcgggcgcctgtagtcccagtgagaggcaacagcgtgctggcagaactcacagcccttgctcgctcttggcgcctcctctgcctgggctcccactttggcggcacttgaggagcccttcagcccgcccctgcactgtgggagcccctttctgggctgggcaaggcccgagccggctccctcagcttgcggggaggtgtggggggagaggcgcaggggggaactggggctgcgcgcggtgcttgcgggccagcgcgagttccgggtgggcgtgggctcgactgaccccgcgctcggagcggcccgctggccccaccgcccggccagtgaggggcttaacacctgggccagcagctgctgtgctcaatttctcgccaggccttagctgccttcccgcggggcatggctcgggacctgcagcccgccatacctgagcctccccgcccccatgggctcctgtgcaccagagcctccccaacaggcacagccccctgctccagggcgcccagtcccatgaccacccaagggctgaggagtgcaggcgcatgtcgcgggactggcaggcagctccacctgcagcccctgtgagggatccactaggtgaagccagctgggctcctgagtctggtggggaggtggagaacctttatgtctagctaagggattgtaaatacaccaataggcactctgtatctagctcaaggtttgtaaacaccaatcaacactctgtgtcaagctcagggattgtaaatacaccaataggcactatgtatctagctcaaggtttgtaaacaccaataaacaccctgtgtctagctcagggtttgtgactgcaccaatcaacactctgtatctagctaatctggtggggacgtggagaacctttgtgtctagctcagagattgtaaacgcaccaaacagcgctctgtcaaaacagaccactgggctctaccaatcagcaggatgtgggtggggccagataagagaataaaagcaggctgcctgagccagcagcggcaacccttgagtccccatgcacactgtgtaagctttgttctttctctgtttgcaatagatcttgctgctactcacgctttgggtccacactgcctttatgagctgtaacactcaccgcgaaggtctacagcttcactcctgaagccagtgagaccacgaacccaccaggagaaacgaaaacacgccgccttaagagctgtgacactcaccgcgaaggtctgcagcttcactcctgagccagcgagatcacgaacccacgagaaggaagaaactccaaacacatccgaacatcagaaggaacaaactctggacatgccgcctttaagaactgtaacactcgctgcgagggtccgcggcttcattgttgaagtcagaccaagaacccaccaattccagacacaccaagtattcgaggggactgaggcaggagaatggcatgaacccgggaggcagagcttgcagtgagccgagatcgcctcactgcactccagcctgggcgagagagtgagactctgtctcaaaaaaaaaaagaaaaacaaaagcattctttaacacagataaagtgactgtgaaagcaagcacataaaaacaagaaatacaaataaaagaaaaaaatacagtgggaaagaaacaaattcccctcaggtgtgcgggagaatggaccatgcccattcaagatctcagtaaccatgtgtagtcaatctagag

SEQ ID NO: 6062 - DNA, 977 bp, mus musculus
tatatttttcctgttttaggattcagccaaattcagtgtcatgagttattataaaaacagtcttaaagaaaagtgctcaaatggtattgtcaaatttaagagtataaaataaaaatatctcggctgaaatgaatgtaaatgtatatggactttaaaattaaaaaaacaattaaaaggcttgcttatagtatacattctaggaactaaactgcaaaactcgtttgattgactatgtctgtggcttcaaagcagatagaccaagagaaggaaaagagaactatcaaattgcaaataactgccaactttacagcagtgtctatgagaggttctttcttaattaccaccgcctgtcctgacattgggtgtacaaattactcaatatgttaaaccactcctgcctttcagctaaatagatatgaaacacatagaaatggaaacaaaggcagactttgaacttttgatacttcatgtgaacctccattttaaatatacatttctcagctgttagttctcacttcagtttcagaacaatgtttttgacctaaccttcctaccaaatcctgttatatgaagcaagtaagtgtattccccctcgggatccttgaaaaatgacttaatttgacaaagaaataatctctctctctcactctctcttttttttttttttttttgactatgggccaatgtcaaacctgaaaaatgatactgtacccttcccaaagctaaataactggaaaagagctactaaataaactacttagagacatgctaacattgttttatggtacttttggctgtctaattaggtaggtacagtaaatcctagtgtgcaatatcagcaactataataatatagatgtctattttggttcacaaaattaagaaaaatttgttaatgcatcaaaagttgaatttagaatgtaacataaatctcaaatcagtctggcatgtcttggcaaataaaaattataaaatat

SEQ ID NO: 6063 - DNA, 901 bp, mus musculus
ttggcatgagggtggcagcctttgcactatgtgcatggctgaggagttaggatctggagggtgatgaaaggtaagttgtacttggtaaattgcattattttttctgcaattctggtggtatgattatttgccccacatcagtctgctccatatgtgaaaaggctaaaattagattaaattaggcaatagaaaaatcagtgttagaatacagattcccgagagttacactcaattgcttggttcactgagccatgttgcttttgaggtagttctgaatctgtcctagtgtcttagaggtatttcaaacagctgtcaaccaagcctataaaggtgagttatgtggacataaccttccagtctctaaactttcattttttatacagataattttaacaatgtaataaaaatctactaaatatatacttagcagtagcttataaaataaatctcatgacaaagaaagaaaacattggataagatattctatgtacataacttgaaggtttgtagtctgatttttcaataggatcaccgtcggattttcttcagcctatgcagactttttgtgtgtctgcatttggagtcagtgattatctttatgttgatgtaagaggtttttattagcaaagttattaatagaatgcttacttttctattaccctaagtctgtgcttgatattcaaatcctttccaaataaacaaatttcataatagaaatgactctcacccctgttttcagtaacatacaaccttgacaatttgtagaggactaaatgctatttagcggcacattattttctgttagtcaatgccattgactttagaaaatatctgaaaacagagatcttagttctttgcagcttttttccaattttcccacaaagttctccttctttatttc

SEQ ID NO: 6064 - DNA, 429 bp, mus musculus
tattccaactttaaaaattgaaggaggacagctgccagtcttgcccagttcacattcttactcctgaggtctggaggggctgtaaaaagtcgggtaggaaaaagctgctagggagacataacaacaaacacagagaactactgtaaagtacatgtagatgtgcccctgccatttcccagtgtttgttcaataacaaaaatacacagaagcccagttggaagtactaagtgtgagtaatgcaattttccctggggaaaagcataagctgcattctcccagcaggggaaaattaattctgagtcatttggatgttgttttccatagcatctctttgaatcactaaacttctctaatagtactgagttctctcctctggtatttctaatcatttctaaaagtttctagaaatgttggtgaagtggcatagaa

SEQ ID NO: 6065 - DNA, 822 bp, mus musculus
aagttagtcgaacatcacattcaaaaaacaatataagtgtgaataatttgctctggagaataggaaattcatagaagagaaattcacttttgccttcaattcttaatattagagtggtgcatagtctatttataaggaatatttcatttattaacttatgtgccttgatattatcttattctttcagcagataggactcactgccaagataattctaaaataaaaatcattatgaacttattaattaattacccttggaattaaagagcttcattatccctaatttaggttcgtttcaccaaagtttctaattgtttttacagacacatttaaaattgaaacttagagaactggatatccagctctttattatattcaattcaaagaacactcagtttgtgatattttgtttaaatggcaaatcttgaattgatttcagtaaaaacttcattcattattagggcttattctgttctcatctcctttttgtcagcttgatgtcattctttttcttatctattttgagattctataggagttattcaatttagcatctagtattaatcgatattttctctatcaaacatccccatccaaacttgcatgttttacctaccaggcttgctgcttgtattctctttttgaagggaactcttatttttacttctgtaataccaagaaaaaatattattcctttctgctatttgctattatttgaaatatatttactcatttcattagcaaacatttactgagcaaccaatatcttgacacaggtataaatatttttatgtgtgctttatttattcaggtttgcaggat

SEQ ID NO: 6066 - DNA, 473 bp, mus musculus
tgtaattgtcatgtttgattgttctgctttaactcaacccaaaactttctggcaccttatgctcccattttttttacatggaggcataaacaatcttatcattaatccctctgttaattgaaattctagctcttttccttaaagagtccatctacattcacagtgctaaatatcacactaacattgtagctgtaaaatgtttgattcttgccctaatgtttccttggagtttcatcttcacattctacttatttgacattttcttgttaatgaccatatgtaatttcaaattctccctgtattaagtcaaataaatgtctttgcctcaaaacaaatggtttcatcttacttccctgtttatctaccattataaatcctcaagttagacattgctaaataaagttgacttttttccttctcttttctccaagtaagcaatcaggacatttagtttgctgtttttcaggatattt

SEQ ID NO: 6067 - DNA, 181 bp, mus musculus
taacccttccctattttcttaagtcttctctacagagactttcaggttcttagctaatggaaatttgctgaggtaatgaagaaacaagagttgaatggtttagtaaaaatccacagtacttgtgagaacagtacaaacactatttgtatataaagcaaattctgagaaaataatgtatcaa

SEQ ID NO: 6068 - DNA, 263 bp, mus musculus
ttattcctagtttgctcgatgcttttgccagaattttctggcaaatgtagaatgtgtacttattgagcatctctttctttaagcagtgttttcatgaatttaaaatgatgatcatgactcatactatttattggaatggttgaataccaatcttcctttttctaacaaaaggaaactgaggaacaattatcaaaaacaacttgtagcctcatcagtaattctaacactcacagtaccttgtaaatttaataaattttactgtt

SEQ ID NO: 6069 - DNA, 145 bp, mus musculus
ttttactaagatactacatgtaattctcattaaaataggagaacttaagaacaaatttatttactgatgtcagggaaatgtaccaaaaagtggtgacacttgaatcatgaaagaacagtttattattgaatcagctcttagcaag

SEQ ID NO: 6070 - DNA, 552 bp, mus musculus
caatgtaactaaagaataaaagagctcactgcaaatgtgagcagaattattgttttctacaagattcataaatgtaaatagttgaaaaggaaattgaaactgtagctgctaagtgaagcatgttcttggaggtttctttttgtaatgctattctaaagtatctttatatcaatcaagatacaagtcctgttgaaatacattagatattatacttcatgtaaaacattatttttgtgtgtgtggtaataatctttgttccttaaggagaattctaaaatagatttatacaataaaagcattgtcccacttgaaaacactactggattcaaggtgtttctgaaggtaccttcaacaattctaaaatttataggaaagcaagggaaatgtcagtagagttagaagatgaggaaactagtaagagttcatgggagcactaatgattgcacttatagaaattcagtgcatcagcaatcaagaacattgattgccaaccatttgaagctgcctcatgttgaacaaatatccttccttataataggaaatataatacat

SEQ ID NO: 6071 - DNA, 223 bp, mus musculus
agtgccctctgggctttgtatatttaaattttctagaatagtcaggttcaacatatggcttcatgttcacagatgtacaataaatggcatttgtaaattctattctatctgaaaaatcttaaagcatatgttactcaccattctgaagttagtatttctatgcattttcatgtagcaatggtttttgataaataaaacatcttcctcttcccacaaaaaactt

SEQ ID NO: 6072 - DNA, 880 bp, mus musculus
tgtggttcaaatcttcgtttgtgtgacctttatggatacgcaaggttgacagggtgccatggtggaatcattctcctatagggccatgactaaaaacactgtaaggcattgaacttgcttaatgtgtttcttttctatttttatctctatagatatctttaacatgttaagagaaatatcagatcaactttcattagttgtgctatgtcagttttaatctaaaagataatgcataaaacagtattcctcacactccactctattacatttcattggtaatagaccccccttcaccccactattcagaatgacatgcttttatccatgtgtaactgaatatgagcttcacttcatgaaacactttttcactcattccaagtgagtaacagatattcattgtccaccatattatttgtgttgctattgccctgcctcaaacacaattcctaaaaatgactacagaaattccagatagctagttttttccatatatgaaaaaattttagctaggcttattacctaatattgtatactctgcctccttttaaggaatcaaatagctttgcagtacttaaagtattatccaaaactgattactcatcatgggttttagtgcctggtggtctggtaattaccgatatatttttaaaagactttaaaactaaattaaaacttgaaccatgcaattatgcgcaatgcatattgtaaggacagctaatgaactctatcattttgctgctaacagctgttttctcctcataaattctgttcatagattccattcatactaccacacaaaataaaaacaggaagttagaggagagcaatagaacaatataaacattttctttttcttgtagaacctggatcactctctaat

SEQ ID NO: 6073 - DNA, 345 bp, mus musculus
tagtgttattccaagtgtgtttcacagaccaatggtggtatgcacaacgacacaattgaaacccatctgcaagctgaattcagaaattaagagtacatacttcacatactttaacaatttgacattattgtggcatcaaggtatgttttaaatttcagtcaacatggtttgaagtttaagttttgaacagaagtaacttctaatgacagaaaaacatttcagagtagaaactcagattaaaaagactctagcagatggaaatcaacccattacttctttcatcaagaaagtctgatgaatgtcagctctactaaacagtatgtttcatagcacagtaaaacttgg

SEQ ID NO: 6074 - DNA, 991 bp, mus musculus
tttcctattctgctcaatgttttcagcagaacagcccttgtactctaagcagagaaaattggtcacaggattttgctgtgagcccgcaaggacctgattccttgttcccataaatagctttctctgcatatgtgctctgtgaggaacacttaaccctgtatcgttgctgtcaataaagtcttggaacctgaccctcttgattggctcactaccatttaaaccactgttggcaatcaccatgctgaatataaagcaactgagtgttcatttgtcagagttcagcctctaatttctgaggctgcccaagttgcttctttctatagtcctggagcccagatcagtgagtagcaaataaatggtctagatactctatgtgagggtggccaatattaaatttctcttttctctgcctgcaagatatactctggtaccagattaataagattacacctccactctggagcaaagtgccacctttaatcattttcagaatggaccacccgaccctccactcattaggtttatgaacaataggaaaagatcaccaggtgacagcaaaggccaaaaataccatgtctctgaagaccttcttatgaaaggtcttatgaatcaaagcaagggcatcgcagcctgatatttcacaaacagagggaagaaaaattgagaacccctagtgtttgtaataagggaaactttgaaaattgtattaaaatcagaactacagagcatttgaaaggaatatccttacattgaacactaacatcataaaatgaaattcgagcacatcctagaaactgagtgaatggtggatgtcactaggctgattcttgggttctcggcctccttatgagcctgactagccatgtcttgtaggagaaaacaagatggggtcagagggcaaaaagagagtctcttgcccccctgcaagtaaatgctaccatgaatagggtctgattataggaaacactgcctaaaggtgacttatttagtt

SEQ ID NO: 6075 - DNA, 837 bp, mus musculus
ctcctttgcagagaaaattaaaagtgtaccatgacactgagtgcccttggagagggggagatctttggaagtttgaagggtgatcctagaaggtgcttttgtacgtgattgtagagggggcagagaaaaaaaaaatggcctccacccattgtgtttctccatgagctttgtgagtgaggccactggggagtcacctgttcccacaggctggcgctctgatggaagagtgccagttaggcaggccatggaggagggctctgtgacccatgagacactggcactgcaggaatatgacgttggcagtgttttaggaggggattttgccagcttaaggccatgaacccaagaggaaattagattttaagcagaaataaaatcctgtggaaatatttaatgttaggtgatgtttgcatcatgaaggacatcatctctcttccattgaatcttttcctctttttgtccgtggcttcctgtgtctgtaatagaataatccattgtctctgctgagtgctgtctggagcagaagcttttgtcaagctcttcttgataatatcatttcagttacacttgaattcaaagctcttctctcttttttttttcctaagtgtctctagcattaagggaggaatggatccttttagttttgaccacagaaataaaacttcaatcagaacatgttgaacgctggcttcaaatttagtcaccaggaatggtctttagcccaacattaccccctagtgggataaaatagaatagatattaatgaggttatgtgggatgcatttgaatgggtgtaactagatgctctggcttgggcctgctctgtgacagatacaa

SEQ ID NO: 6076 - DNA, 135 bp, mus musculus
aaaaataactttcaaggtttcactgctaattgtgcaaaatgttgaaaacagagaaaagtataaagaagtaaacaaaaataatctgaccacccagaaataatcattattaatgctggcataattaatttttataat

SEQ ID NO: 6077 - DNA, 591 bp, mus musculus
ttcatttaataacttgcttatttatttttatttactaggtacctatattatacgtaacactatggacaaatataataaaaatcaaaatgtgacactactagaaatagcttactctaagtcaatttccttccaataattttagggcaaatagatgaattctgatattttttgttaaaataactcttcatttaaaactgttggtgattctagccttctcttgaatcttgttagaaaaggcatatgattgtggctttgaatttaattttacaaagtgaggttttccagcttcataataaactacagacctcatttccaagggaatcagtcataaaggatggagagtaaatattaatgttccagttcctaaaatgtcctttagatgtctctgtttcatatctcatgtggaccaatacagcaggccactgggaaagacattgcctgaagctggcttcctgacaagttgaatttgtcctcaaaggacaaacgaagctctttgaaaatagaatttgacaaagttaatgaaagaaaaatgtagatgatggcatgcaaatatatcattactacttcataatatttttataacccaaaaaa

SEQ ID NO: 6078 - DNA, 686 bp, mus musculus
taattcactttatttttcttgtataaaaaccctacgttgtagccacagctggagcctgagtccgctgcatggagactctggtgtgggtcttgactaggtggtcagtgaagtcctgatagggagacttggtaaatacagtctctttccagaggtcaggggtcagatagctgtaggtcttagaaatggcatcaaaggtggccttggcgaagttgcccagggtggcagtgcagccctgggctggggtgtagcagtcatcgataccagccatcatgagcagcttcttaggcacaggtgcggagacgatgccagtgcccctgggtgcagggatgaggtgcaccagcacagagccgcagcggcctgtcaccttgcaagggacggtgtggggcttgccgatcttgttcccccagtagcctctgtgcacggggacaatggagagcttggccaggatgatggccccacagatggcggtggccacctccttggagcacttaacacccagaccgacgtggccattgtagtccccgatagcaacgaatgccttgaacctcgtgcgctggccggcacgggtctgcttctgcactggcataatcttcaaaacctcatccttgagagaggcccccaggaaaaagtcaatgatctctgattccttaatgggcagagagaagagatagatctcctccagggac

SEQ ID NO: 6079 - DNA, 1055 bp, mus musculus
tgaaaaggtttgctcagaacatcctttgctggccaactgcactgactccagaaagagacttctaagtgtaatcagagagcaaagcatatgctgtctgccccctggaagcaagaggaaggaagaatccaagggagtttatatggtggatattccacccaaccaaaatccaaaactgactgttcctttctgttgcactggagttgcttgagcctctgtgtctccccctcaggctgggccactcccatgttgagatcctaccttgaaggaatgggaacatagagcttgggaggccctctgtagagaatgctcctgtgaagcagagatttcaaaggactaaaatcttcattttaaatagagttaattttgcaaagggttgcaattgtttctcatgatctctgcttctctagaaatgtctctcattctctgctgagttcaggtctccaaataactatgggtgtaaaagcctgtttcctacttgcatatttatctttcagatcattttgtaactatctccctccttttttccctcgcttcccttattcagcaaatatttgttggtctcatgctcagtcctgtttctgacatacagaatgagagtgtgatgttcttgctctttttctctcccagcaaaatgtgagccagcatgtcgtcatggaggtgtctgtgttagaccgaacaagtgcctctgtaaaaaaggatatcttggtcctcaatgtgaacaagtggacagaaacatccgcagagtgaccagggcaggtattcttgatcagatcattgacatgacatcttacttgctggatctaacaagttacattgtatagtttctgggactgtttgaatattctattccaatgggcatttattttttatcctgtcattaaaaaaaaaagactgttatcctgctacacactcctgtgatttcattctcttttattaatttaaaaataatttccagaaatgtgcagatcctctgtgtgtatgtcagcatgtttgttcacatatgcacatacacatactcataacccctatatgcgttgttgcataacagatgattt

SEQ ID NO: 6080 - DNA, 1345 bp, mus musculus
tcctttcactttcaagatgtttgtctttagatctcaagtgggtctcctgtagacagcatatagttggatcatgttttttatccattctgccaatctcttccttttggctggagaatttaatctctttaatgactgataaggaaagactgacttttgccacttttctatttaattttctctctgccttagagttttgtctctcatttcctccttactgtcttcctttgtttttagttgattttttttgtagtgacacattttagttcctaattaattttgatacgaggtactaggaaggatactgaatatggcttctaagggctggtcctaaccaaactacacagagaaaaatctggctatgctcagtttaggttcacctatgttctccatctctttccctgcaccacctctttggggacaggagaccaagaagcttgcagaagttcttatcttcagtgatttcggtgagttactgtgttacgaggactaggtcctcacccagagcatgatggacatagactacttctccacagaggggagaccagcttaaattatggtcaacaacactcttctttttcactcttcattgattctgtacctgtcagaggtggtgtctcttgtcacttgagtgtgtgctgcttctttccaccagcagttactttgagattgtggttccttcttttgagtctgttgcttatataatggatgggtcttgccagcccagtccccctttagaaattaccaaatctgttcagattttagttacaaatctgttcagattttagttactcatcctgcacataccagctgtccgtaccctttcaatgaaaaagcaagctgtggcttggatccttgtggagtgtcagaggcagtactctgagcttactcagggatacattttagtcatgaaatacataccttagttcccacaaattggagccttcactgccagcttctatatttaccttgtggatttggggagagcagtttttagtaacatctctaggacacacaggtttgtaaaagtccttctctctgtgcttctcctaggtgcatcatttctggcatggcttcaggaagcattgtgctattttacaacgactttaaccggtggcatcatgaataccaaacccgctactgatggtgacagctgtacatcaactctgcccctaggatgagcagaagtacctggagcatcattctcttctaccacatctgaatgtaacttaaatttgctcaaagaagcaaaatattttttaaagttattaataattgctatttttgtagtctttgcttgacttttttgggggggattagcaaagcagaaaactggctgctgggttct

SEQ ID NO: 6081 - DNA, 1345 bp, mus musculus; identical to SEQ ID NO: 6080

SEQ ID NO: 6082 - DNA, 1203 bp, mus musculus
tttactgggaagaaacagatataaacaagtaaacacaatgcttacagatgtgatagcacctggcatttagcagtttcccatgatgggtggttggtgatggaaatgggcatttgtgtgctatgtgtgcaccaagagccatagtaggagagtgccttgcaaaagcacacgtctttcaaaaagagcacacatacacacgttcctcatgtttagtgactccctggtttaaccatctcatgcttagatgcaacatatggcttttactttgttatttagttgtctaacttcaaagagacagtcaacaataatgctcttcctatggcaaaattaatatagcatcaagccactttcacaggtgctatgtttcttttttcctcctttttactccccaggatgaaatgggacctagaatcaaagaagcaatagtttttctctatacctgtaaaagattagcttttcatcattggggatgatgcaagcaggaaaaccaagtgcaagaaaacagagatgaagccaaaaaggacaatttctgattgtaatagctggtttctgtttcatatcactgagcaagatgagaaagttttgcagagttttagaggaacagcttctgcggttctaaatgatgacctcaccctcaatgcccttgccaggtggttagccccactgtgaaaacacaggttgattttcagcatgaaacaagccagagtatggaatgatattttcaggtgacagttggggttctatttcctgtaattagcacctcttaaccttcagacttgcccctgcccttttcaggctgttgaagctcaaatccgaagttttggacagactccttctcaactactcatagagccccatcctcccagaggttctgccatgcaagtggtaagtgctatttttactctcctcatttcttgcctctccttcagatccgcttgatattcataacagtctttcattgtgcttgagtttctccaccatatgtgggtttgtttttttatgcaatatttgttaacctgctaacaaccagcagatgttattgcattgtctcctggaatctttgagaaggtaaatgttgctccagtgctcttgtatttcatcagttggtgtcttgtgttacagaattgaaaggtccataattgtcatgaatcctcactgtaggataaaggactccagacatagggttgatgacttttctggtttgat

SEQ ID NO: 6083 - DNA, 1203 bp, mus musculus; identical to SEQ ID NO: 6082

SEQ ID NO: 6084 - DNA, 935 bp, mus musculus
ttctagttgagtacataactgagacagaaaatatgtgcatagcaattttaaggtatgttaataaaaaagataaagaatttactaaaattaaattgcaagaattctgcaaccatattttctttgcaatttaattttctgtattttaatttcttgggatatatttatatttggcagtataggatggaattttcaaaaacaatattgaaaagggctgggcatggtggctcacacctgtaaatcccggcactctgggaggctaaagcagaggattgcttgagcccaggagtttgagaccagcctgaacaacacagcaagactctgtctctacaaaaaacaaaaaaacttatctaggtgtggtagcacatgccggtagttccatctacatgggaggctgatgtgggatgatcacttgagcccagtaagtagaggctgcagtgagctgtgatggcactactacactccagcctgggtgacagagcaagaccttgtctcaaaaaaaaaaagaaagaaagaaaattggaaaacaagtctaaaatgtttaggtgtaagatatccaccttcatgaatgcctcttaattaatagtttcctctattacttaagaaatacattaattattcagaagtaaaaaataatttttcctatgaatcgttttataccaaatgcaatagttatttttcagtaaaagcaaaataattgttctacatagcatactagaaacattgagagcaaaagtaaggaccactttttgtccagcagcatttactttttcatttttatgagctcgtgaaatctacctctgtcaattggcttattttcttctgggctccacagtatttttctttgaaagtgttttactgcatttcccttcggttagtcttattgattgtatagtcaatttgtaattgttttttctaagtaaaatctttcatacatt

SEQ ID NO: 6085 - DNA, 935 bp, mus musculus; identical to SEQ ID NO: 6084

SEQ ID NO: 6086 - DNA, 985 bp, mus musculus
tggatacttttggagagagtgaattgaggcaagaaaagatagcatattgagatctaattgttctcattttgacatatataccagtcagtctatctgctatattatatagtctctctaaaataggtcttaaatgggcattgttatttttacttctgtgttatggtcattgaaagtccctaattagtgcaatgggagtgccaggtgaccaaaaggagttgttgatgggcactctgtgggtttgcaaagtgcaaacctaaaagactgagagatgagaaatgcattgctatttgtgaatttatgttttatctcacttcacttgaaaatttatgagtagcgtggcttaagggtgctggagttgtgtgttccagggcttgcccctactgataacacccttgttggcgtgaaagtgcaatgcaaattatgacagttacaaccttctgttttgtttaacctgtcagtagatttcctggctcagtgctgagggcaatggtgtgttcagctagtccatattcacctaaacttaaaaggtcaggtttctacaggcaagcctagtcaaagcctaattgatgaggagggcagggaggcagaatttactgttctgttggctagtttcatatcgttaggttgtcctgaaagcatcaggcagtcacagcccctttcatgtaagtgctgaccctagacaggagctgacaatcaaaggaggcagccacaggaaccagtgcaagtaggctattgatttttcagttaggtctaagtagtttgtagtatgggtaatgggtgacagaggcaggtatgtcattatcaatgagctccagaacagtagcaacaaccctccctcatatttccttcagcactgacagtatgcatccagaggcggtcaataaatcgcccaacctttaactgacaagtgacttggaggtttaggttgaggagtggaagttacagagctaaacttccttacttgaacttgtactggatctagcaa

SEQ ID NO: 6087 - DNA, 985 bp, mus musculus; identical to SEQ ID NO: 6086

SEQ ID NO: 6088 - DNA, 1000 bp, mus musculus
cctgtactgaaaatgggtccaataggtgcagaggctgatgagaaccagacagtggaagaaatgaaggtggaacaatacgggccacaaacaactcctagaggtgaactggtccctgaccctgagccagagcttatagatagtaccaagctgattgaggtacaagttgttctcatattggcctactgctccatcatcttgcttggggtaattggcaactccttggtgatccatgtggtgatcaaattcaagagcatgcgcacagtaaccaactttttcattgccaatctggctgtggcagatcttttggtgaacactctgtgtctaccgttcactcttacctataccttaatgggggagtggaaaatgggtcctgtcctgtgccacctggtgccctatgcccagggcctggcagtacaagtatccacaatcaccttgacagtaattgccctggaccggcacaggtgcatcgtctaccacctagagagcaagatctccaagcgaatcagcttcctgattattggcttggcctggggcatcagtgccctgctggcaagtcccctggccatcttccgggagtattcgctgattgagatcatcccggactttgagattgtggcctgtactgaaaagtggcctggcgaggagaagagcatctatggcactgtctatagtctttcttccttgttgatcttgtatgttttgcctctgggcattatatcattttcctacactcgcatttggagtaaattgaagaaccatgtcagtcctggagctgcaaatgaccactaccatcagcgaaggcaaaaaaccaccaaaatgctggtgtgtgtggtggtggtgtttgcggtcagctggctgcctctccatgccttccagcttgccgttgacattgacagccaggtcctggacctgaaggagtacaaactcatcttcacagtgttccacatcatcgccatgtgctccacttttgccaatccccttctctatggctggatgaaca

SEQ ID NO: 6089 - DNA, 585 bp, mus musculus
atatatataaatgtaaacaaataaagaaataatctttatccttaccgactataactcacttataatctaaaatacagtggaattgatttgttttgattgagaaattcagttagttaacaaaggctgatttcacacctgttgtgtggtctacagtgtagactctgctacttgaagactaagaaaagactttctaaacatgcatgttgctagtaaacactaccttctaacacctttaccaaacagatgactgcatgggcctttaaaatatacaaattatgttcaaatgaataaacaccacagaattaacctattttagtaaaacaggtttattctacacaaacattttatatctgctgtaataaatcatactttatgccagctgacatgttgtgagctgcctacggggagcccacatggcaagtaccagaaggaggaccctggccagcagccagcaagagactgaggccctcagaacaacagcctgtgaggaactgaagcctgacaaccaccaagaatgagtttggaaggatcctctcccagttacgtcttcagataagactgaagctcctgccaacacttaaactg

SEQ ID NO: 6090 - DNA, 456 bp, mus musculus
gtgggacataagcagagggttgggaaatagtttgaccgactgggtttgttctcattcttgctctatgacagcactataagaatacatccaggctagcctgctggaggatgggagattgtcagttcagatatggctgctgacctagctggcagccagtgtacaccagacctgtacatcaaaccactcaagatgagaatatccccaccaagcctagcctaaatatctggccgtagattgatgagctaaatgaattcttattatggtaagttcctgagatttgagatggtttgttatacaacagggaactgataggcttattcttcaagaggagcaaaacagggatgattgctattctcttcaatgggttgaggaaagaagaaattatgtgaacatttatacactaataatttattctgtcatatttcagtcagattaaagcaaacagccaaaaacaag

SEQ ID NO: 6091 - DNA, 175 bp, mus musculus
atgactcacatattagttcatctttaaggccaatctggaattggaggtaagaacaacccctttgatttcaattttttaatttgcattcagtattctgtacaaagacatctacgactaaaaactaagcttctttcacttgcctatgtgcaattggagtcagtcttaatgttgtaaa

SEQ ID NO: 6092 - DNA, 1632 bp, mus musculus
tttaagtagaaaaaagaggcttctttacttgttttcagtatttcaaagataactttatggaaaagattaacagagtacctaatgtagaaaaataattagccacaaatccaaattaactcatccaatgtaaattgtaatatgaaataattattttcttgggtaaataattattttaaatcttttcagtttcaagcccttgtgaggagtacatatgcagaaggaaaaaaagtaataaaatataattctgactctctaggaattcatgttttctttttttttttttttgagatggagtcttgctctgtcgcccaggctggagtgcagtggcacaatctcggctcactgcatgctctgcctcccgggttcatgccattctcctgcctcagcctcccgagtagctgagactacaggtgcctgccaccacgcccggctaattttttgtatttttagtagagacggggtttcaccatgttagccggatggtctcgatctcctgacctcgtgatccgcccgcctcggcctcccaaagtgctgggattacaggcgtgagccaccgcgcctggcccatgttttcaaattactccaacagtgtgtcatgaataaggtactatggggtccagagtgagaatgtccaactctggctggggaagttaaggatgtctttacagaaaataggtcacgagaactcatcataaaagaatgaatagtggtttgtaagatagagaaaaagaggtaggttgacctcatccaaaaaaacaaatcatatgatcaaaggcagagacatcatgggtgacacaaatgtctttggagacactacaaaaagttggagtcactggagccagatagtgtgtgaagaagaaaggatccagatacaactaaaaatcacagaaaaatggataccataaaagcaaaacaaaacaaaacaaaccaggaattcattttcacctgggataaaaaatgattgcaacttaatgttgagttgcatattcatgatatgctaaaataagacaatgctgttatataatatgaagttctaggagaacgccggaacaaatttgagaacacatcattttttaaataaaatgtttaaaaattgcattatatttgaatgaatgtattatatattacctctaatatctacttatctgattaactgagtatcttcaatgtatttacatttttacattgatcactaattcccaggagctgtggtcagatgtgtaaccagctacttcttgagcaatagaatagcaaagtgattaaatagctttcttagatgtacatttctattgtcctctgatacatagcttttttaattttaaaatgttagacagaaggctgcaagtaggaaatactttgcttggagaatgacattcacaagtaagatgctgcagtcttttgtgtaaacttcagtgggattcagtaggtacttggtctgaagtggccaggaataagatataaatatccttgtttttgtttctcaaacaacaaactacactggcagagacacttctcatgagtccagagatcaatgagtattaggggatactgctggaaaatgaacaggttaccagttctttgggacatgacttcaaatccttacccagtctcaaactttataattcataaaaa

SEQ ID NO: 6093 - DNA, 687 bp, mus musculus
aatgtatacattaggtggaagaaatatctttgattaagttaaagaaagtatatgtgtcttatgtcatctatcctaaatattcatgcatgtcttgttttctggtaatttttagaagtattgcttttttacaaaatttggaacattattagaactgactggctagacttcatagctgataaatgactatgtcatttagaagcatacagagaaataaatcaaatgatatattctgtttgtcaatagatttgaacatgatatacaggaaaagggctctggctctctacctttgcaatggacaagattctcccttcttacctatgtgctgcaggctccaattcaggaaaaaagatcctatttccatctctgaaaggttaactaccacctttcaatgagaaacgtgcctctgtcaagagagtgccaaggaatggcctgagtgctggtatccacagctgtagggggttatgcagaaccagaaaagactgaccggagggagactctgaatgtaaatggtcagattgtgtctagaaaattctatagttaggttgatttttttgttttggttatgtttagagagtgtccagtggtatttaccagtcagctacaattcagagtttaccgagatggcaatacccaaagctctgaaatgccaaatcactggaatagtgggaattttggaatatattgcct

SEQ ID NO: 6094 - DNA, 365 bp, mus musculus
aatcccagcacacctagaatcatagatggctccttaaacaaaatcacgcagggcctacaagaccaatatgatctgacctgaatgtgcgctacaaccttcttcttgccactgtgtcatttgtttcctatacgttattcatactgactttctttacactcctcaggcacaaagaatttatttcttccacagattttgcagttgcccctcattctgggtgagtgtccttcctcagatttttacgtcttcagcttttttgtaacagtgatatcttagctcacataacaccttctccaaggagccttccttaactattcagtcctatcacactgaaaattgcccaggtttctttcttggcacttatcact

SEQ ID NO: 6095 - DNA, 132 bp, mus musculus
ttttccatattacaatcttgcttcttttggatatttcttatgtatcaccccactttcccctttccccactctcttgccaccttgcctgtgtccaggctttatcctctttgaaatgcccttcaacttatttct

SEQ ID NO: 6096 - DNA, 211 bp, mus musculus
ggcaatgaacatattaagtataaatatacacacataaaatatttcagataatgttaagtttcactatggaaaataaaagagagtaatgggacagaatcaaggtaggtgctagtctatttagaaacactaaccacggcagagtaattacaaaactttacttgttagaacggaaaaaacttgagacattgtttagtcccactccatctttttg

SEQ ID NO: 6097 - DNA, 223 bp, mus musculus
atgtcccaactccaggcactgaattggaagataacacttgtaattcaactaaattgcatggtaaatactttcaatgtgctagattacacaatatgatggcacaccttccgtatcatgtttaaacatggatcttaggataatatatcagactttttgaaacactttttaaaccgaggattattttgctaataaggttgagtcacagattcttcttatcctaatg

SEQ ID NO: 6098 - DNA, 1296 bp, mus musculus
cttgcagttcggtatttcccagagaagtttttaattaggaaatataaaaacacatctcagagaatgattttaaaatcttccatcctccaaaatgaaaaatggaagatatatttcttcaatattgccaatttatctgagattagattattatttgaaaacataaaatgtttagatattttatgagtaataaacaataaacaaatgtctactgctctacacagtagattaccccatttcccctttatttcaaggttaggggactaaaggatatatcacagaaacaaggagctttctcatggatatacaagaatggagtaagtttaaaataacttcatggaaaattgaaagattagttgacaaaccaagctaagagatgtaaagaatgattgacaacaacagtgatgctcagttgagaatgaaaagcacaatttttatgtaatgatatgaatgtacatgtttatgtgttattatctccaagtaatcagcaatccttattcatgttataatatccaaactcatacattttaaataatcctccaaaatgtttttataatttgtcaaagaaacaagatggatcatagaagcagttgaatttacaattttgctactcagaaaaaaagaaatatcagatgtatactatccacccactcctttgcagagatttttttttttttacaaaaacttgtttttaataggttaaacatattatggtgtctgtgtaagtagttgtaagctcacgtttaaatgtaaataattacttggaattttatatgacatatcacacttctgaaacttgcaacagtgtacaaccaagtttgggaagagaaggaaggcacctggtgattcccaattggtgaatggaaaagcaaggcttccaaaaattatattcagccatgtaaggccatataacgctatggttaagaatatgcagactctagccagactgcctcgagtaactgcaataccatctttacttggtcaggtcacttaggcatgtttcacgctgcaatattctcatctgtgaaagagaaattatgacaatacccattcaacgtgttttatgaacattaaatgagttagcctgatcagtcatttaacaaatattacataactgctgtccaaaatgtttattaaatcttttgtctcctaacagaacacaaaatatataaacaccaccacttggcaataataacactgcttttattgctattgaaaagaactgtgattttgttgccaatatatgcctctctctctctctctctctctctctctctctatatatatatatatatatat

SEQ ID NO: 6099 - DNA, 312 bp, mus musculus
tttctctcatgctggtacacttatttcaaataatttatatcttcagtgtctgaaaagcttcttgacacgtgtcaggcttttatattcttagtgcctaaaaaccactggacacttaatttatgtttctcataggaatggaagtaaagaaggaagaaagtgctacactatttcctaaaccagactagctggtactgagggaagaactgtgtttcctatatatggatttctcagcctccaacacattatcagcattaagcaaatgctgtgttcagagtacacaaatttgtggaaccagtaactacagtaataaga

SEQ ID NO: 6100 - DNA, 556 bp, mus musculus
taaaccaaatattttctgtctccaaacctgggttttatccctagaatacgattatgcaaaacaaatgtcacagtgccccaagctatctgaaactatacgttcgtttcttttttattggttacatccatctgttaaaagaaatacatagagaaagaaaatagaatatccccatgtaattttgatctcttgagggacaatgtatgcacaaataaacctaactaaggcacatcattgtgaaatgtcacaacactaaaaaaagggctgcaataggatatctcaaagactaccctgaaaaaaaaagataagtaaaacatttaacattcttttaaaaaaacattgccatttcttgaaaaaacagtcttttcttccctttatttctttctctatcatatggtacatttattgctttactttctcattctggcctcaaacacaaatttactgtgttattcttataataattcaatcttacagctaaaaaatatccgcttcaaaaactgatgtttttccaacccaggctttctgtaccacaatgactgtcactgtctagaagatg

SEQ ID NO: 6101 - DNA, 737 bp, mus musculus
cgaaaatgtttgagggcagttagcatttaggaagcatcctgaaaagtgactggaagccagatataagtaccttcgctacacttacttttttccttataagttgttggcaagtgagtaaaggctaaaataaagcaaaagcaagtgacagcaaagctcttctgcagccctgaggcatacatgaaagacttttgaccctaagaaaagaggctggatgggctgaaaaccattttcaacttggcacagtgaaaaaacaaacaaacaaacaaaaaaccccagtgtagatttgaagtctgagcaaatcagtttagttaacctaagaaatataactctgttttcttaaaggctaggttttctgtaaatgttagttcaatacaaaaactgatattttgaaggagtatttttatcaataaacaaagttaacaaattttggagctagatccttttctgtgtctaggaaatgaattatttcccaaaagattgctgagaagagaggactctgttcatacagaagaccacacaacaggcagctaggtctgaaagaccacactgagagggctccagtaacatccacttacgattcatcatttttaccttcattcagtaaacaaatatttactgagcacctgccgtgtggccagtcattgtacctggcctaagattttagtagtggacaagaccagaatcttctgacctcagagaatttacattctggcaggacagagatggagggagggagt

SEQ ID NO: 6102 - DNA, 737 bp, mus musculus; identical to SEQ ID NO: 6101

SEQ ID NO: 6103 - DNA, 394 bp, mus musculus
gggttgtgcttattcagctgctcattttgcccttaccctcacttgggtcctctctaggtttcttgaggtggaaactagattatagcccttcagcaattgtatcaggcacacaatgacagaaccaggcatgaacaaggagagactccacagggtatcatggaaggtggtgggggtgggggtcagttagctgcatttgagaaaaagtcccatgcggttttttttgtgtgttctgtttatttgttcttttattgttattcattaaaactatcagactaagaagtgatgaagtacttctggggtccttctgcagatggacctacagcctcagctactggaggcaagcaaggcttagagtctacattgcggatgctatttatatcctaaaatctattta

SEQ ID NO: 6104 - DNA, 120 bp, mus musculus
ggtattttattattggttttagaatatcatttttattttacaaaacaatgatttaaaagtgtctatcaatgcttctcacaatgaagtaattgaactacttttgctaggatattttatttg

SEQ ID NO: 6105 - DNA, 361 bp, mus musculus
ctttagctatcacctcccccacaccctcactgatctgaccttcttctaccccaagtcctaggcaagcactatttcctatttcctacagatttatctgttctgagcatttcctatgaatgcactcatacaatatgtggctttttgtatcactgagtataataataagtgtatcacttagtaatatcttcaaggttcatccacactggaacatgtataacttcatttttttatgtctgaataatattccactgtgtgggtaggtcacatttgtttatccatatagttgttttttcatttctatagttgcagttatgattactttagaaaagattatggtgtgagaagaaaatagaatttcatg

SEQ ID NO: 6106 - DNA, 810 bp, mus musculus
cctgtccatccctttgtggccctctcctctttagccggatggaaggtgccctctgctctctgccaagccctgactgattacaatactaaacacagcaatagtttgtttagaaataatgtctgtgcctgcctctttaaattacagacccaagctctcttccaaagccatatttttccagcctcttaaatgagcagatgaagtttctgacaggttggctctgggccacatcagatgaagacacgcagcctcctgtttagtcttctggattgatcgtggtaaagcagcactggcctttgggaagaacagccttcctgttcaggaaaaatccacgtttgcatctgtccgctcttttttgcttatgaaatctcatttgccttcctctgcagtggagcacaggtgaggaaaattgacctctttgtaatttggagccaaaccattcagaaagtataaatcattcattaagatggaaataatttacatttcttgattggcccatagcagtttgaagcaaattaggttgccattaagcagctgtcttggaggtttgtaccagggctctgaggttccctctgtccctctgagaatgtaaaggactccttgagtaccagggccaggctacatctggcctcactcactggagcatctcagggagaactactggggagcatgaaaaaaggccaactctattgatggtaaaggcagcacataataaatattcactttcgtcttccttccttccctctctatcttccctaatttgaaaggtaaagaacagggctaggggaaaggaactctcaaaggaagagagaa

SEQ ID NO: 6107 - DNA, 1143 bp, mus musculus
ttctttatttctgttttctctaaaagtaagccactcttacttttaggcacccagtggattagatgtcatcttttttatattgttcctaatggaacatgaggatggcttttaagaaggtgccagatgtgtgagttctttattgctgagcaagtgttgcttctgtttctgagtctatcaaaagggttcacatgaagaaatacagctatcatttatatgtgactagcagaatatatttaaggaacatattcttttttatcagaggcaagccttaagatataaatcaaaagattataatgaaaaatatggcatgaaataataaattaaaaatgagaatagtttgttgattctaatgtatcttcaggagttggaatggcagtttaggagaggaatgagctaatataaatgtatattttaaaataaatatgctcaatatgcttgctttatttttttaacaggatgaaagaagcaggagtagaccataggcagtggaggggtcccatattatccacctgcaagcagtgcccagtggtctatcccagccctgtttgtggttcagatggtcatacctactcttttcaggtaaagacacctacagttgtttagtttgaaataagggatgcatacttattagtaaatgattaaaaccattgcttatccaatgtgataattcaaattattcatttaacttataaaataaattaataatctcactggtttggaatatgattcaatgtgcatttgttttttctatatcagaatttttaaggtttgaaatactaaagctatgaaccctcagatatcaaagccaacctttcctttgttgctactatgaaagaagtcagaaatgttagcatgctgtacaatagctttagtgatcaatattattttaacaacaataaatgtgctacaatctgtcattagaattattttttaatctcatattttatctcctatattatctcatttaagccaccaaaaatctctttaccagatgaaaaaaacaggatcagagaggcaatttgacaagtttcacatatttagttgacattgaagctaggatttgatataatctctgattcaatgcctttgctctctcttctacattgttgttcctcccaattaagtgtcccatattgttaaaat

SEQ ID NO: 6108 - DNA, 1143 bp, mus musculus; identical to SEQ ID NO: 6107

SEQ ID NO: 6109 - DNA, 1143 bp, mus musculus; identical to SEQ ID NO: 6107

SEQ ID NO: 6110 - DNA, 204 bp, mus musculus
gggcctttgcgttaaaatacttgcttcctcccaaaggctttgttaaaatttcaaatgcctcagtaaaaaagcctatgtttgctttctatgaaaatacgtttaaacattacataggtcttaataagttaaatgtaataatagagcaaaacctaaaaataggcagaatgtattcagactgtagtcaaagaacaaattgaaaataca

SEQ ID NO: 6111 - DNA, 483 bp, mus musculus
tgcatttttaatgaaatgtaatttcttgagctagagattcaaagaatctcgttttgcatctaaaattatgttcttcaaagttttggtagctaaatcggaaagttctatagcccaagattcttgttattaaaagaacaatgactttgaattgccagtgcaaatatatattttttctgctgaactagaaatatcattctttaaaaagccatgaaaaataaaagtcaatgctgaaggtattttattatatataacctttagttaataagaaaccaatgtttgttttgctaaaacataaagtccaaatttcgtgattgttttgcttgtttgtttaatagcaaacattgaaagacaaaatacatttttaggatcaaaacatgtctacccgctctatatactaggtcatgcacaaattgtttttctaaaggtatcaattatcccttcttaaaaacttacgtgtgagagttaatcttaaaagtcaatgtt

SEQ ID NO: 6112 - DNA, 257 bp, mus musculus
acagtttacaaaaatggtaacattttattgtgtcttaatatgatggagttgtatctcattaaatatttttaatgtggcaaatccttaatagaaagtagtatcatgtacaataagccaatggattttaatatatataacatcaagataacactataagaaagagtgaaatgaaggataagttcaaaaatagtaatgtgtctgtaataaagactttgtaaacaaatttgggataggtttttagataaaatgacaggata

SEQ ID NO: 6113 - DNA, 1175 bp, mus musculus
tcaagcaagggggaaatccagattttatatctccttccacttgaatttctggataagaatgagagaaatccgcaaaatccagttacgttaaatagcttttacgagtatctttttggaatgctgtcagttgtaacttcgttttgtctgccaggtataagcatggaagattcaagctgctcctggctgtaagaagttaatgtggaattttgctgcttgaaatttaaattgggctacaaaaattagctcccactggtggaaacaactttctttttagtatgagaagttgtttgaagcttttttctcccccaaagtctcatcgtgatcaggctttaatattgctctcaaaccaacctttaatttaataagcagagtaattttgttcaggaaaattttccatgacatttgttgaattaaatgtacatactcagtattccatcccagcagcaccacctattgttgtcttgtagcttttctactaaacttcacaagaatctaattcactcatttctctgagtatctctgtgagatattcaacatacattttacaggttataagggttaagcattccagttgtgttgtggtgatgtttctaaagtcataaatctgtaaataaaatgaatgcaggatggtagacttttaattggtgaaaggacactgaatagagaggcaaaatgctttaaaatatttatggatattaaacaatgtttggaaaataagattcaagttatacctgtatgttttaaaagttctactcactacacactatgattctacaattaacagcagaattgtattggaataagataagaaagactaaatgatattattttgtgccaattgttattgtaattagaatattatgtattgatttattaaatataagtggctttttttccagcgaggttttaaaatccacttataataaaaacataggatttgcatttacaggtagaaaatgaaaatcggtaagtgtcaagatggggtccactatgtaattttttcagcattatttccagaagagaggtaggattgggaattttagtctttatttgatatttacatatacttatatgaacgtgagtcattgcctgtgttttctgtaagccatctttacttcaaccatgtaaaccatacgaagcattttaggaagaatgtaataagcaccatatggaga

SEQ ID NO: 6114 - DNA, 594 bp, mus musculus
ggcaggtgcctggctgcagaggctgaggagcactggggtggtcctaagctaagtgtgggtctgtttgagaaattggtgatgctggtgacccagagatgtctgcttgttttgcatgcagagaagggcatagaggagaaacttaggcaccgagggccaagggcagaatcagtggaggagagtaaggagggtctccaagactacacctaaactctagaagaagagggctcctcttctcatttctgctaagaacacaacacattctaaggcagtgaggatggaagagaacagcttcgttttggttcttttgaggcttgtagttgtattataagacagcaaggaatcaagggcaatgagacaaaacttagaagatgccttgcaatcctaaacctcagtgaagtgtgaaaacaactaaacctgggtttctgaggactagaagaaacatttggggttggctgaggattgggtttgcatgcatcttaatcaccagagtaagatataatttggtttggtttcatgctaaagttttagttttcggtacttcgaattaaagggtcagatacagtctgtcagctaaaaaagaatatttgttaagta

SEQ ID NO: 6115 - DNA, 473 bp, mus musculus
gaacaaagatccttcttcatggctatatatcaaataacatcattttaaatttgtatctattttgaattgctggtaatgctgccatcttgttgctgtactacaagatgaataaagagcctggaaatagtcaacatttattagcaggattttcaaaatatgttcttaaatttaaacttcatcacctttcatgtgccacttattatctcttttattatctacctcacctaaattctctggaagctgcttggtaaattaaaaggaagatattgagcatatcaataattttttagagcaagcattaaatccagtggtgtgtagtaatagatttttttatgggagatattatttagctttcccttattgcttctagttatttgtgttcaagaaaaatgtttagagaggttcaatagatgtctattgtcccccacaactctgacccccatactctaaaacaagaatatctcaaatctagg

SEQ ID NO: 6116 - DNA, 734 bp, mus musculus
ataccagttcatcatttggggtgtataacattttccacttcacagtaatagactttctgtaattttccatttttctaatatttatgggttcatatatggtctcccaaatttcatctaccttattttattattccatttcgttactcgatatttttcaaaaaacaacagaagcaaatcacttcatatagaaaaaaaatcaatggccacattctggttccttgaaatcttggtctacttgattcaaggcccatttcatgcttgtgaagacagacagccctacataaatacctaagaatcaacgcaggatctataatatcatggtcttcctagactttggttgtaccttctataattactaaatttattccacatggtaaagtcacagaaaaaaatcattagattcatcctcaatttttttttctttccagaagaagaaatgcttttcaaaaataaaaaaaaaaaacttcttacacaaagcatttatgagagcagcagtctttaaaagctcactcattgaaacattcccactatttctttacttcatataacgctcaaatctcccacagcactaattccattttattctttccttctcatactttcatatctcaccttcgtcccttctttgcccttaaaaccctaagttactgtcttttgtatttccagacaaattcatcatcttcttttccagtgctcatctttattttctatttgcacatccgagttcatcaata

SEQ ID NO: 6117 - DNA, 1259 bp, mus musculus
gtgtacatcctcccatctgtaatcagcctcctccactaggggtacatttgtcacagctgatgagcctacactaatgcatacatcattatcacccagagtccatagttatgttagggttcactcttgacattgtatattccatgggtttggacgaatgtataatgacatgtgtccaccatgacagaatcataatgagtaattttaccaacctaaaaaccctctatactctctttgttatctatttctacctgctatcacctggaagtcacagacctttttactatctctctagttttgccttttccagaatgtcatataattggaatcgtgtacgtggccttttcagattggcttctttcacatagtaatataatttaagtatcctccatgacttctcatggcctcatagctcatttctttttagcactgaataatattccactgtctggatgtacctcatttattcatcacctactgaaggccatttcagttgtttccctgattaatttttacatgatttctcaaagagcaaatacttcagaggttcctggctaatttataatattctgtccactaggacaactaagttgaagcaaacataacctatagtgaatactccctcaaaggtaattactattctaatttctatcaccatagatgggttttgcctgttcttgactctcatataactgaaaacatatagtatgtaaacttctgtaactggctttttttcctctctctatatatgttttgctctacgtgatggctttcagagtggtacatgttactgcatacgggaatacttcattcttttgattactattagtaaggattatggggttaactttgggttattatgaacacaactgttaagacttttaaaacttatcttttggtggcagaaccactcatttctgttaggcatatacctagagcttgatttcctgtttcatatgtctacacattcaggttaagtagacactgccaaatagttttttaaagtagttacataaatttagatactcactagcagcatctgagaattccagttattctgtatctttaccagcctttggtattcgctattctcttaatggtatgaccctggaagtcgaataatacctcattatagaaccaattcacatttccccaatgagtaaagattttgagcaatttttcatttgctcaatttatttatcggcctttgcaagagtcttttttgagaagcatctacgtgtttactttttactattgatttt

SEQ ID NO: 6118 - DNA, 415 bp, mus musculus
aaaaaatgagtttaaaaaatatacaagacatatttttgtgttattccccaatttttatcctcttgttttccttcacctaatgtacacacactgttggatttgttgacacatatttgttttattttacattattaacaaagttcttacccgtatatgtattacttgatttatttgtttgggagaattacaaatgtggttgcatgttccacgcatttttctttgactttcttttgttaaaattgacattactttttgttgtcttattttattttattgagactacgagttttgaaatctattctggtcatttaagttgtttcagaaagatattttaaagaacaatactgcaaaaaaaacctttttttttgataaatgttccctggagataatatgacagaatttcaccaggatattt

SEQ ID NO: 6119 - DNA, 1040 bp, mus musculus
gaaaattgtactgaaaaagtaagagctgttgaatgtatgatatacaaggaagttagcaaagaaatctaaggaacaccgggaaaacaaaaggatattttgtgtctctctcccaactctaacattagccctaactctgagacaatgaggtttctgaagcctaccatgtatataatggcttcaggagtagctttcactacaacttaattaagcttgagtgaggctatgagatcaatgttcccttggtagtggcatgagcaataggtaattcctatcatggtcagtttcactgctgtatcttcaaacacactctaagagtattttgaggttagaatgacatttactttgcaagttcactttttcttttcttttttttttttttctttttacagctactctcatcttgtaaagaaagcgaaggctaacattgaatttccaaggttttggaatgacctgtgtcagaactcttctggcatgaaatattatgcattattcgtaatgcccaaaaccttcaaaattcaacaagcatgatttaatttcaggtcagtagataaaattagtatgacatttttggcattgctattaatttcaataataaaagaaacacaattaattatatgaatattgtcagaaaaatccatttaagtaatatatttaagaaatccaagcatatatgcttaaactgtcatttgtgaaaagcaagtaaaaagctttgtgtgtttatgatctagtaatacttaattctacaaacttttttcttttttatgtatttaataatctgactagaaacttattttgtcagagttagagtggatgaactgacatttcagaatccaatctcttatgctctatcttaaggttcaaaacctttgatcaattatacaatagcagcctcgaagatcaaagaatccttaattgctagtgagcaaatatggggaagctgaataatgctggaccgaggcattcataacacgaagttacaggagaaagagaataatgatggaataatggtggaatatatttatttttccttttttgtgtgt

SEQ ID NO: 6120 - DNA, 2027 bp, mus musculus
gcctgcagctgtgaagaaaagctctcagaattctcaaagacaagagcacatagtctgagaggttttgccactgacattgctaaatttgaaaactccaaaattctttctgcaatgtgtgaagaggactaagactaaatattataattgttaataaacagtgaaaagaaaataaattgtattatctacatgtatgaatatatacacataatccctgactcagcatggttcaacttacaattttttgactttactgtgttacaaaacactacacactttcactatactccttgaatgacaacagggttacatctggaggaacccatggtaagttaaaaatatcgttagttaaaatgcccttttgacccaggatatattcaatgtgtaatgggcataactccatcatcagctgaggagcatctgtatagccgtccctctatccacaaaagatatgttccaggtctcccaatggatgcctgaaaccacaaataagacagagctgtctatattatgacttttcctatgtttacattccgattatacagttcaatttatatattaggcacagtgaaaggtgaacaacagtgactaatattaataatagtagaagaaattataatacactatcataaaagttacataaatgtggtctcctctgtctttgtctctcaaaatgtcttgtggtgtacttaccatttttcttcttatgatgtcgtgagatgataaaatgctcaagtgctgagatgaagagaggcaaatgatgaaggcactgttatgtagtgttaggctattgaccttctcacaacaggatagaagggggatcatctgccttgggagatcctggatcatggggccatgatgtggatggttggatgtcaggagcagaccacgttgatgactaatgggtacaaacggtgtggataccctgtgtaccacagggtacacatgtcccagggacatgtgggaagattcatgtcccaggcaggacagagcaggatgctactcagaacttaccaatgtaaaacttataaattgtttattctagaattttccacttaatattttcagactttgcctgattgaggataactgaaaccatggaaaggtaaaccatggataaggggagatgactgtatctacgtgtgtgtcagacagaatattcatttggacacgtgggcagaaaatggcctttcccagccgcatgcagtagctcatgcctgtaatccctgaaggccgaggtgggaagattgcttgagcccaggagtttgagaccagcctaagcaacataggaagacttcatctctacagaaaaataaaaatattagccaggtgtggtggcatgtgtctgtagtcccagttacttgggaggctgaggtgggaggatcacttaagtcagggaagttgaggctgcagtgagctgtgatagccccacacactccagcctgggcaacagagtgaaatcctgtcccttccccttccaaagaaaggcctttcccatgaggcaacagcagttagttattcccggtaacgatcaggacggagagccacacttactgaactattaactttagacacagaacttccttgagttgcaaataacatgcttcactaaagcaatgcaagctgtcctggtattttcttttcctctcacaatggccctgtatacacattaatctgtgatcttcatttcacagcgtcattctgaagcactaagccatgtgccaatgggacagtagtgactcagttctgtatcccaatttatcagcagggcaatgctcactatgtgtcctcctgggcttgaagggaaggaagccatctaggagacgtcctccctcatcatcccttgctcatgtttccccggccctccctcacgatacctgcccttccttcccactgcaataatattccccgaggaagccctagaaggcttttgggttctgttgacaattacaggaataatttattttcaaatggatgttaatctgatagaagtagtcaaattttccctgagctcaggcagaaacaaactt

SEQ ID NO: 6121 - DNA, 935 bp, mus musculus
atagatattttggaaggaaagatggttttaatcaagaaaaaaaatcctctctcttttttttttttaagcttcgtagtgcctagagtactgctgaagcagaatatctctataataacatccttgttgagtggcaacttggcttagatgggaaccatggatccacccttccctgttgagtgaacttagacaattcacttaacttctctgaggtctagctttactcttagaaaatgaagatatcaataataaactacttcaaagggttttgtgagatttgagtgagttttgtaggtaatgcatttagcctagtacacaaaagacattcgatacgtgttgttttatgtttatgtaaggcaagttatgacatggtcacagttgtttggcatctaggaactagattgtggagatactgaagataattggctgtccagctatacagttaacacttattaatcggaagaatgacggtgactcagtggaaattaattcatcctcccgtctcactaaattatcgctgtcattttcttacatatatttgcaaaataaattaaatgattttaggagcaaaagggtggtttagtgtgcaatgcaaagttttaatattttgtataaaattccaaaaaaaatgcctgacaataaaggccactgaatagcataaaggaaacttgtagaggaagctaatattttctctgtgagtgttggttattcgaatacattctttacaacatttgtggaaagtcttttcctgagtattttctgcctttacagtttgtctctgaaatccaaattatctttcagatatttatttcatcctttacataattttaacactttcccaacttttctcctctatataaaattttcatatgattttcccaatggttgtcaaatctacatcatattttcctctaggcttttttcttcggtgttttctt

SEQ ID NO: 6122 - DNA, 222 bp, mus musculus
tcacccttttcaaacatccttctaatctctcaaatttattttattacaaccactactttcattaacttctctgtagccctagtcttcattgcactctgtctatcattcctcaaaattgtttatgctaaccttgaaaataccgcttccctctattttctataattgtaatttaaattttcctgttagttttcaacattattccttattgcttgatctttaata

SEQ ID NO: 6123 - DNA, 192 bp, mus musculus
aattaaataaacctatcagagaagtatcaagaatgaaaatatagagggataaaacctattgagaggttttttaaaaacagctagattaatgctttatatatttcaagtcacaaaagattttgccatgggtatttcgttctatttctcacaatttttatggaactcacgagttgctggggaaatgcttaaaga

SEQ ID NO: 6124 - DNA, 1230 bp, mus musculus
gttctgcagttgagcaagatcacgcaaaaacctctgccaagacagaacgtgcatcagctcagcaggaaaacagttcaacgtgtatagggtcggccatcaaatcagagagtgggaactcagctcggagctctggcatctccagtcagaatagctctacaagtgatggagatcgatctgtttccagccaaagcagcagcagcgtttcctctcaggtaacaacggcaggatctgggaaagcttctgaagcagaagctccagataaacacggttctgcatcatttgtttccttgctgaaatccagtgtgaatagtcacatgacccaatccactgattctagacaacaaagtggatcacctaaaaagagtgctttggaaggctcttcagcctcagcttctcaaagcagctcagagatcgaggtgcccttgttgggctcctcaggaagctcagaggtagaattgccactattgtcttccaaacctagttcagagacagcttcaagtgggttaacttccaaaactagttcagaggcaagtgtttcatcatcagttgctaaaaacagttcctcatcaggcacatccttactgactcccaagagcagctcttcaacaaatacatcgctgctaacttccaagagcacttcccaggtagctgcatcactactagcttccaagagcagctcccagaccagtggatctctggtttccaaaagcacttccttagcaagtgtgtcccagttggcttctaagagtagttctcagactagcacctcacagttgccttctaaaagtacttcacagtcaagtgagagttctgtcaaattctcttgcaagttaaccaatgaagatgtgaaacagaagcaaccttttttcaatagactatataaaacggtggcatggaagttggtagctgttggtggctttagtcccaatgtgaatcatggagagctcctaaatgcagctattgaggctctgaaagcaacactggatgtattttttgtcccactaaaagaattggcagatctgcctcaaaataagagctctcaagaaagtattgtttgtgaattgaggtgcaagtctgtgtatttgggcactggctgtggaaaaagcaaagaaaatgcaaaagcagttgcatcaagagaagcattgaagttatttctcaagaaaaaggtggtggtaaaaatatgtaaaaggaaatacagaggcagtgaaatagaagatctagtactccttg

SEQ ID NO: 6125 - DNA, 1067 bp, mus musculus
atagttaatatagattcgttcaggtgataaggtctcagtatcgcaaataaatttgtatccaaaatgaataagcatagttctgtttgtctgtaagtaggcatatcttttgtatcataaaaatagaacatagtaaattaatgttttaaaaaagtacacccagcaggatagatttaagaatcatatttatattaaaatgtaaaagatttaactctgggttattttcaatttgtgaaatttgtgctatgtaatttcaaactctttaattcacagaaagcgaatgaagagcaccatcgtttacttaaaggagcaccatttaagttaaatcttcacccaagggactattttgacgctaatccttatttttctgaggaatctttaccaccaattaaaaaagaagagaagaagaaaacaatttcaaatacttttaaaccgtcttctcctggtaaaaaggtaagtttacaattttaggatgaaaaaattaagtattataaagaaatactgtctcttgctatcaaatgattttttttcccatgtaaataataaacttttgtttgtatggataccaagaatcattggacccatttttacaaaattacatgaaatcaccaagtatgaatagtgtaggggataatgaagcccttgtcatgaagtaattattagtctcttcaaatgtatttgaatttataattttttttttttgagatggagtctcactctttgcccgggctggcagtgcagtggcatgatctaggctcactgcaagctccgcctcttgagttcaagcaatactcctgcatcagcctccagagtagctgagattacaggcatgtgctaccatgcctggtgaattcataatgaatttttgaagtgcttctctagaccctaggtctagtttttcttaaaaccataaaaagccaaaccatcttttagtttttgaaatggtaattaaaattaactatcttcctactgcagaagttaataagtgagaataaaaattaaaatgctccagcagtttataaaccttagtcaatactttttttttctgtaaattgcctcttcatttttct

SEQ ID NO: 6126 - DNA, 1018 bp, mus musculus
catggtcatgaaaaaaaacgtaaactatttttactaacatttttaaagtgaagaagaaagccttattgtataatttatagtggattctaacttcattgccaagaataatacattatagtttcttagtcattttcattatttgtaagagtgttaaacaactcctaatcattttacttatttttaaagttaataaagcaatatatgtaatatgtaaaaacattttccatgtaaagttaaatttagaaagtgtaaaaattggtgtgtcactgttcacccttattccgcccttgctccctcaagttctgatttcccagtaggaattccataaaatagaatagcttattagaattgtagttgatatgcaattaggtaaaatgttaatttgagcacaacacatctttataatcttgaaccttcctctattactatagttttattattatttattagtatgttttttcatttattcagatattatttctgtctctcaatgtggttttataattttcttgatataaattccaagaacctaaaatcattgctttatcaccttttgatgcttttggacttgtcacccaggtgaaattcattttgaactacagataaagagatacttgttatcaataattgtgactgtctgagagttcactctctttacaagctagctgtttagcctgttccattttcatgactgtttcaagacagcaggaggttctgggtcagagacaaagaatagtttattactggaagcaatagccagtcacttgactctgggtcccagaagcctaaacacagggcattgtgaagagagccaggtgacacttgcctgccaagtagactgtggtacagcacaaacgaagctgtgggaatctcctcttctcatcgcgggcattcaacattcctgctctgcttcagaaggaggagctctatttttcaagactaaacaaacctgctcttctctctgtaaggtaatgggacctgtatcttccaaggctctgtggtatatgaacgtcctgga

SEQ ID NO: 6127 - DNA, 802 bp, mus musculus
ctaaaagagtaagaggctgcctgtttattaaaagcagcattctattaggaaagcatgtatgtactgctgctggtgcctttgcagactttgagtgtgtgtgtgcgtgtgtgtgtcaaactgtgggagtcaactgcagcacagaaatcaccacccagagggggcttctccaagtgcgcaagctcagcagaggaagcctcagccctgcggaagctcagggagggtgaggatggaggctgggagatatttcctcacagctcctcttgtgccttctctctcttccctccctacttgaccctgcccactccttcagtccctcattgtaacccactgtcttttcaaaggtacatcattcttacatttggattttaaaatgtgtgacgaaagctagaatgcaacccaggagcaggagctctgcactaacaggagagggctccttctggtttccatgttccacacacctttttcattaggccaaaagtcaccaagggtgcaatgggagctggactatgctgtcccctttgacaacatgatttcacagagtgcttcctgcgccgatgcagagaactgtcgccagattcgtgagcaataatggtatgaacagccattaattagagagggagattagcttaaacaaaaggggattgaatttagacccactcattatcttttccattgttagctctattgaactccattgtggtcgggataagaacaagagaaatggggattgtgtggagtatgaatcaattaacacatatatgcctgctgtgtgcacacattgccctttaagagataaagaaaa

SEQ ID NO: 6128 - DNA, 593 bp, mus musculus
caaagtcaatattcctacaggggtaacagtttcttgcatttttccctatcataacattttcatatcataacacagtcataaaaataattaattccacaaggcattcatctcatttatatcttgattgacatttgaaacccctaaccaagatccataaagaattttttcctcccctttctcaaattttaacatttagttctcatccagaaaataacataagggttctactatatttgtaggtttaatcagccaattgctttgcacacctgaagttaagaagaattgatcaattcctaatttctactggagcaaaaactatgatgaaaaatcaatagtttaaaatgtttaaatcactgtttaaaatactaccttatagagcaaacagaatgtagggattctacacctgacacacaccaactagaaaaaaaagtataaatccccattcagacgtatgtgaaatcactgcctttgcacagaccattctttgacgggcatttgtgaagcccaagcccacagcaaaggtcaggccttctctttgccttcaaatgttagcaggacctcaaaacaaatacacagcttccatactgagccaa

SEQ ID NO: 6129 - DNA, 3718 bp, mus musculus
tgcttcatcttacatgcacagtcaccaagtcctatctcttcattcttagaaatgtcttttggaggctcactttaccactttcactgctcccacactaagccaagctttcatcatctcttgcctggcctattaaattagcctccagccttcggtccttttgaatttcattctgtcttctttaacactattgcaataaaattgttagacatcaatttcattatgctattccaattgtttaaatacccagagtacctttccacctaatctaaactcttcatcctgacattcaaggatcttcacaggtttgagccaacttacctattaggccccatttctcactatacaaaaaggaaatcccctgcctcagttagcttcatcggcccatcacactaattcccaccttatcttatttgtcctggactgccttcctctttttctacctattttaatcctatgcatccttcactgctcttctcaagtttctcctccatgaagccttccttgacttttctatcttatccctgacttttatatgtgcatattttccttctttgctactttgtagtattcactgcctttgggacctttcattactggtttcttatgcataagtctcatctcttcattgaagctcctcaatggtaggcaagtgcagtgtcatatgtactacaggcatacctcgttttattgtactttgctttaagacttcacagatattgcatttgttacaaattgaagatttgtgataactctgagtcaagcaagtctatcagcatcattttccagcagcatgtgctcatgttatgtctctgggtcacattttggtaattcttacaaaatttcaaactttttcatgattgttatatctgttacagtaatctgtgaacaggaattgatgatgttatgactgtaattgttttggggtgcaatgaatcatgcctgtataaggcagcaaacttaataattgtgtgtgttctgactgctgcactggccagccattcctccatctctctccctcttctttggcgtttccattccctgagaatcagtactattgaaattagggccgggtgtggtggctcatgcctgtaatcccagcactttgggaggccgaggcgggtggatcacgagatcaggagatcaagaccatcctggctaacacagtgcaaaccccatctctactaaaaatacaaaaaaaatcagccaggtgtggtggtgggcacctgtaatcccagctactcgggaggctgaggcaggagaatggcatgaacccaggaagcagagcttgcagtgagcagagatcatgccgctgcactccagcctgggtgacagagcgagactccgtctaaaaaaataataataataaataaataaaattaggccaattaataaccctacaatggcctttaggggttcaagtgaaagggggagtcctgaatctttcactttaaatcaaaagctagaaatgattaagtttagtgaggaaggcatgttgaaattgagataggccgaaactaggactcttgctccacatggccaaattgtagatgcaaaggataagttcttgaaggaaattaaaaagtactgctccagtgaatacatgaatgattaaaaaaaaaaaagtgaaacagccttattgctgatatggagaaagtttcattgattaggataaaagatcaaaccagccacaatattcccttaaaccaaagcctaatccagagcaaggtcctaactctcttcaattctattcaggctaagagaggtgaggaaggtgcaggaaaaggtgctagtttaaagctagcagaggttagttcatgcagattaaggaaagaagccatctccataacaaagtacaaggtgaaacagcaaatgttgatgtagaagttatagtaagttatccagaagatctagctaagataattgttaaaatggctgcaccaaacaacaggtttttccatatgaaacagtcttatattggaagaagatgccctctaggccttttatagctagagaggacaagtcaatgcctggcttcaaagtttcaaaggacaggctgactctcttgttaggggctaatgcagctggtagctttaagttgaagccaatgctcatttaccattctgtaaatcctagggtccttaaacattatgctaaatcaactctgcttgtgctctgtaagtggaaaaacaaagcctggatgacagcacatctgtttacagtatggtttgctgaatattttaagcccattgcttagatctactgctcaggaaaaaaaaagattccttccaaaatattactgctcattgatgatgcacttggttacacaagcactatgatggagatgtacaaggagattaatgttgttttcatgcccactaacacaatatcaattcttcagcccagggatcaaggagtaatttctgcttttaactcttattatttaagaaatacattttgtaaggctatagcttccatagataatgatccttctgatgaatctggccaaagtaaattgaaaatcttctggtagggattcatcattccaaatgccattacgaacatttgcaatgcatgaaaggaggtaaaaaaaatcaatataaacaggagttttgaagaagttttcaatcctcattggtgactttaaggggttaagatttcagtagaggaagtcacttcagatacagtggaaatagtgatagaactagaattagaagtgaagcctgaagatgcgactgaattgctgcaatctcatgatcaaactagaatggatgagaagttgcttcttatggatgagcaaggaaagtggattcttgagaaagaatctaatcctggtgaagaagctatgaccattgctgaaatgacaacaaaggattgagaatattacgtatacttagttgtcaaaacagcaagcaggatgtgtgaggggattgactccaattttgaaagaagttttgctgtgggtaaaatgctattaaacagcatcgcatactacagaaaaatcttttgtgaaaggaaattgagcaatttggcaaactttattgttgcttattttaagcaattgccatagccacctcagcttcagcaaccaccaccctgatcagttagcagccaaggttatgacttgctgaaggctcagattgttgttagcattcgttgacaataagctacttttaaattaaggtgtgcatactgtttttcttagacataatgccattgctacttaataggctacagtatagtgtaaacataacttttatatgcactggaaaatcaaaaaaattgtatgacttgctttattatgatattagctttattgtggtctggaacagaatccacaatatctctgaggtatgcctgtagttggtgtgcacatcagtagctgtcagagcattagatagagaatgacttctaattaatatttgttgaatgcaaattatgctgtcataagaatgcatacagaatgcataactcttctatttcctaataatcagtccaacatttggcctgaattttctctagccttcaagactttggacacttgaaagtaccaaattgaaatggaaggactgtcaactttgcttgggtttcatcctttctataagatgggacatttaccttctcgtttcttgacttattcacatgccttattgaagtcatgcattgaaacatggaacaaatatcgaacgtatgcaaattacttagcaagtgaaggtttttt

SEQ ID NO: 6130 - DNA, 1348 bp, mus musculus
tttcagaaaacaccagcccacgtgggcttaaagtgggctggctgcttggcttacacagagacatttgaaagcagatagcggtttgaaacattcatgtgagattcaaaacagggacaaaaagctgatggggcaatgagggagggggtttcagaaagttagaaaccattgataaaatcttgacatttcttagggaattcatgcttccccatgcaaagtgagtggagaaggaaactagaaaatggttccagcacaaatgaggggttaaccatctccccatttttaaatcttcacaggacttccctccaaagtttacataatcctagattatttctcagaagtgttatattgaagtacagcattattattttgaagtaaaactcacaacgctagagtttgaatttatttagacctatgatgatgtttcatttcttttgtcaatatcgccaaacatgtctaaattcatatggacagagaaactgaggaaccaggaagggttacacacaaatcagtgtaagcaactccacagcctagagagtaccaagggagagggcaggatatggtgttagttgtcccaactcagggtctgaggcagggcctcaggaggaggtatagtcctagatgcttcagagaacaggaccagagctaacgaggaggaatgacagagaggcaggtttcagctcaatgcagtcgagaatttcccaatagaacaagatgccctgtgagttgttgagtgtcccttcctcctgctggaagttttcaagttcagactggatggccattaccagagattaggaaggggacatgaggtttgccactctgcttcgatgttctgcccctgccaggggcccagggtgcagatgagggagaggcaggaagtgtttgtggctgtgatcctgataggaatcttcaaagacccaggcgctgccctgtatcagcccaggcttctttctttactctcttctggtcaacctgtcttcctcggctccctaagccattctgagcccactggaactttttacacttgacttccacttgggttaagtacctgcttcctgatgtgcgaagtagccttttattcgttttggtgttaaacagacctctttcaagttagaatatgctccctacttacagtattctgggattttgagaatgattccgtgcagctactgtctgactttctttatcattctatagcctctcctagatttcgtcttccaaaccatgaccctcatgtatcaaatccttttcatactaaaacctgttagtcaccttgatagttttgctgtcctttggatcttttccacctctttttgtgccttcttcaagtggaatgcctggaacctttggc

SEQ ID NO: 6131 - DNA, 1884 bp, mus musculus
tcttagaggaaatttaccaaactaaaagcgaatacatttaacctatatgattgcatttgctggtgaaggtaccaaatattaaattttggacagttatgaggaggaacctgaaaatgggtcgttgctgcttgacctctcggcttcttttatcaaccctcctcaaggctcccaactgaaagggatctgtttctctaatagtcctcagtataaattgctttgcatcatagttaattatatacacagttcctttactagattaaaagttcatttcagatatgaatgatgtcttatacatctttatctcctccaaagcactggacagaaaagtcttttacttctatagttagtagctgcattgcatttgcaaaatatacttaatataaataaagtatttccctttaatatagtccccttttatgaataaatttattccttacatcaaagcattttttgggtgtgataataaaattgattttggatgatcacccacaggtgtcaaacttaattttctttgtcctttctggctattagcataccacatattcatatatagactttctaaggaagacccctctaaataatccatattttacttaataatatcctcagttgtatgttaagctaaattcaagagttaagcatgagagcaaaaagtgaaagaaattcaattagaaaattcaaagagatgacagcagacaaagaaggtctaaaattagttgagatatgaatgacttcatatctcatcattctaatgtgtgggccaggatatacacacttacaaagagttctctgaccaagccaaataataggccaaagagttgatctcatgaaaaaaaaacttaagaaggcaaagtcatacagcgtaagtctaatacaagattttagaagttctaaattatcgagtctttttttcttttttttgagatggagtttcactcttgttgcccaggctggagtgcaatggcacgatctcagctcactgcaacctctgcctcccgggttcaagcgattctcctgcctcagcctactgagtacctgggattataggcacacgccaccacgcccggctaattttgtatttttagtggagatgggggtttctccatgttggtcaggctagtctcaaactcccgacctcaggtgatctgcctgcctcggcctcccaaagtgctgggattacaggtgtgagccaccacacccagccaattatttttttctttaattaaaaaaattgtttttttgagacagggtcttactctgttgctcaggccggagtacagtggcacaatcagggctcattgatgtcctgggctcaagcaatcctctcacctcagcttcctgggtacctgggactacagctgcatgacactgtgcccagctaattttttttaaatttatttttttgtagagacagggtctcactatgttgtcctggctggtcttgaactcctgggctcaagtgatcctcccacctcagtcttccaagagctgggatcacagctgtgcccacatcaagtcttttcgttttgttttgttttttgagatggaatttcgcttttgtcacccaggctggagtgcagtggcgtgatcttggctcactgcaacctccgcctcctgggttcaagcaattctcctgcctcagcctcctgagtagctgggattacaggtgcacgccaccacgcccaactaattcttgtatttttagtaaagacggggtttcactgtgttggcgaggctgagtcttgaactcctggcctcatgtgatccgcccaccttggcctcctaaagtgctgggattacaggcatgagccaccatgcccggcctcacatcaagtcttttaaagaaacaatagcaaagattcacattgtcttttagtttagtaa

SEQ ID NO: 6132 - DNA, 1202 bp, mus musculus
tgaaaaaggcatacatgtatgaatgtacacgtgtaattagttcattttagagaatacagtcctagatcagaatgtctttatttttggctgttatctaggacataaaccaatgtaattaggaacttaattactcctttaatgagagtggtgactacaatattccatggggtaccagcttagattttatgtaagctctaattaaaatgtaaacatattttcaaagtatagcaaaattgctctgcaaatccatttgttcccctcttgtttataaccacccatttttattttataaatatccactaaggaaaatgagtatacagcttaactgttaagtgttatttgaagttagaaccatcccacaatcagaagaaggaagaggaaaaggagaaggagaaggagaaggagagacctggtggcataggagaaagaaaagaaaggggtaagggtgaaagaggaaaataaaagaatggaaaagggagaagaaggagaaggagaaaaaggagaacagtacaggaacttgtattcatccaaccattcatttattgtggagctattatattatgtattgcatactgtcctaagaacaggaacaagaccagattctatattctcaagactgtctgtggagtagagggatacgtacaggtaaacagctacgtttaatacagtgctaggaaatcagaaaagctattggtaaatcacatagaaatggtttttctccagaggtgcaagggatccaaaaaggcttcatggacgatttgataattgaatagatctgagagtggagaaatgaacataattgcagcatagggaatattttagaggcaattactgcctgaaatgaagagggagccatatgaacaagtgcagaaagtgacggaatatcttgctgaataagtttgtcattcagaaggactaaacccgaggagttatcagaggtacagctggaaagagtggggtttgcactacaaaatatatatattccccttctcttgcatttctatacactttctcctcattgagagatcttgtctctaggtgggtcactcttgaccaaatttatcagttcattcttaaaaggcttccctttctttcctctctggcctaggcttgccatcttaatactattcattgtcttacccatgttgccagagcacctactttggattcttacaacgattactcttacatctctcaacata

SEQ ID NO: 6133 - DNA, 663 bp, mus musculus
cttcctgtgtcctcattatgatgcaattttgggtctgtgtagctgcacctgttcttaccattctccgtcattttgtggaatgttgtgggggatttggatttaggtaactgccattatccttggctgcctaggagtcttcaataccagtatttcaaaagctcttagaaattgatacttataaaccctaatagaaaaattagcacatgacatacatagggcagttttccaaagaagaaatacaagttaccagtgaatgcaggaaatgtttttcaatgtcattagtaatcaaagaaatgaaaactataatggtaaaataatttatctcttttcagaaataatatatctgttttcaaattggcaaagatttcaaaaaaagaaaaaaggaaaataaaagtacccagcatggtccagatttaagggaaattagtatatagtatactgctgacagccacaaacatcatgggagttaaagtctccgaatgtctgtgttttaaagacacaaatggaaacatttatgaaagctgtgtccaggtgactcagccccctcacccccagcttctacctcgtgtgggatgtgagactgggcgagatattccacctggtagcctgtgcttgctcagcgtcagtggccattgctgccatggacagatcctgcgactcaga

SEQ ID NO: 6134 - DNA, 867 bp, mus musculus
gcctttaatagactccagagttccaaagatagttacctcagacacatcctgccattgcagttgttgttagctagggagatgtggcttcctgctctgccgtgttcccagaacaccgcatgcaggcagccttttatgtggtggtggttgtttatgttgtgtcttgtgccttctccctagtgcctgagattgtgagggagacccaggacctaattgaacaaggggcactcctgcaagcccaccggaagctgatggacctggagtgctcccgggacgggctgatgtacgagcagtaccgcatggacagtgggaacacgcgtgacatgaccctcatccatggctactttggcagcacgcaggggctctctgatgagctggctaagcagctgtggatggtgctgcagaggtcactggtcactgtccgccgtgaccccaccttgctggtctcagttgtcaggatcattgaaagggaagagaaaattgacaggcgcatacttgaccggaaaaagcaaactggctttgttcctcctgggaggcccaagaattggaaggagaaaatgttcaccatcttggagaggactgtgaccaccagaattgagggcacacaggcagataccagagagtctgacaagatgtggcttgtccgccacctggaaattataaggaagtacgtcctggatgacctcattgtcgccaaaaacctgatggttcagtgctttcctccccactatgagatctttaagaacctcctgaacatgtaccaccaagccctgagcacgcggatgcaggacctcgcatcggaagacctggaagccaatgagatcgtgagcctcttgacgtgggtcttaaacacctacacaaggtaaagct

SEQ ID NO: 6135 - DNA, 1166 bp, mus musculus
cacagctgcaaaacaaatgggcatttgataaaacacatcaaagtttatgagattcaactaaaacagtgggtaggaagacacacagcagtttagtatgtgtgaaaacagaacacgtcagaatctgttgggtgtacctaaaacagtgcttagagggacatttatagtgttagatggatatagtaaagaaaaagaaaaatgaaaatcaattatattttctttttaggaggttagaagaagaaaaggaaagtaaatctaagaaaacagaagaaaataataaaactaagagaaaaaatcaataagatagaaaccagagaggcaatagaaaaaaatacacaaagctaaaagttgatcgctcgaaaagttaataaaattgatatgtcctcagagactcaaaaaatgttagaaggcacaaattactaatttcaagaagcaagaagggaatattcctacagatcctccagacattaaaaagaataattcacatatgttatgtccattttcaaatgtgtacacatcacattcagcatgctcaaaaccaaactcatgctatcctcattttcttttcatagtagtcctatcccctgagattgtttttactcttttattgtccttctcttatatttacacatacatttatttacttatgtattcttggaccctaatagctagcaaatatctaaatagtggtgagtgtgtttggtgatagtcactacagaacacaaagatgactaacatacacagagtctcgttttacacaaatatctagttcctgctaagatggtgaagttgcacaggcttctggttctgtccctcaaaataaaccctgaaaatagacagagcttagagggcagcacgcactccagtgtggcagacagcatccaagtggtcacagcgttccacaccctcggaagtagagttcatgcctgtatcctggaggctggctgggccacctgacctgctttccctaagggagctttagtaggtgtgacataagcaaatgcttgaaatgtgcttgcacctggggctttcgctctcttcgccactgtgtgaataagcctgggctggcctaccagggacacatagtccagccaactggcagcaccactgctagacatcgaggtaagccatcctggaccctggagagatgccagcgacccctggatgag

SEQ ID NO: 6136 - DNA, 924 bp, mus musculus
aaaatttatattttaggtacaacaaagaagtgaacaaaaacatcaagacagacgtttctcacctgcatcagttctgtgttttctgcatttggaatttcccaaactgttactgtttgttaattggatagtctttacttattcaagttttatcagttttttttaattgtactcccttaaattgtttgctctcagactagagctaaatctagatgaaaatgtgttgtcaccaaacagtgaaataaaataaaacacaaaaagctctttatggcccacagctggccatgcttaaaatctgggttgtgtgattgcatcaactccattcatctgaaataaacagagaagggggaagacaaagagggaaaaaaaccaagaaactctcctctcacagaaacagtggctcctttcccttcagacgattgtatttatgtagaggcccagttatcttaaaagtattccctgtgtttgacaggaagaccagagttggattacccactgattgtgaccttttctcgtacagcagcatggttacaggacaccatcacaagaaaggcagcccctatgctggcgaggagctcagagcatgagctacccattcacccaggaggtgctggaaaaattggtggccacatcagtgggtgggccagaaaaaacactaagcttccctccatcacctcttagagttcgttaggattttaaatgcaaactccaaaggccgttcattgcatgttgtgttttagtgaatgctggtgatcgcgggcgcctattttagcctaagaaaagaagaggtcagaagccatatggacatgcacttggccctggcaggtggaattggaaggcagaacttcatgttcttccctatcttaaagaaagattatttgtagctcattgtaatgtctcattgttctcatttgttttgctaacaca

SEQ ID NO: 6137 - DNA, 501 bp, mus musculus
gagctcctgaaagttcacgaacaacatctgccccacgaaagacacaggggctgatggagaatagctactgagagcacccacaaaggagcattagaagatgtgggagcacccgaggatgtgggaacacccatgagggagaaccagaggtcctgaagcatccacaaaagagcactagaggatgtgagagcagccacagaggaggaacaaaggatatgggagcacctaggagggagtatcagagtatgtcaaacccccagaagggagcatcagaggatgtggaacccccaggagtgagcatcagaggatgtggggcccccaggagggagcatcagaggatgtggggcccccaggagtgagcatcagaggatgtggggcccccaggagggagcatcagaggatgtgggtcccccaggagggagcatcaaaggatgtgggagcacccaagagggaggacaaatgatgtggggcccccaggagggagcatcagaggatgtggggccc

SEQ ID NO: 6138 - DNA, 1682 bp, mus musculus
tgaggtcaggatggagagaagcagacagacagagacaacccactggtctggaatcctaaaatgagaagaccctgtttttgagtgtggctgtgaggagagaattttcaaaggtgactttcaaggatttgcatctgggtttttggagacagaggcattatgggcagacttgagttatcctgcaagacaaacaggtttaagaacataaagaagctcttggttgatttgaaacttgtggagcttgagatgcaagtagaagatacgtaggaagataggcatgtcttgcaaaaggcaagtgcggagctggagttaagagacacacttgaaacttttattggaatgagtgctgttgcctcagctattgtgcaaacttggggtttctgcagaggatcacaggaatgagatccctggctctgcactctttagcctctggacagaggtacatctaaggggaatgtcatccatggggaatgtccccatggtaacatggaaacccaagagatagcattcgactatctggagctttttacccacacattctttacatgtgccaaatccattttagttttacatatggccctatttgaagttgcattggaaagcaggcttaaaaaaaatgagaactctttgagattaataaggagtgaagaacattctccctatgggactcgaagctgcagttgagtttcttcctccctgtcctgcctgccgaacactccccaagcaccactagccaaactcctgaaatgctaccacggaaacctctgatttgatttaatgcaatttgcgcaattgacccttgaaaattaattttgccatctcataatgaatacttaacagggacttctgtattcagaaaactgaagatctattttccatttggttattgtggataagccttccacagacttccatttcaaggctcaaaatatttgccgaagtatattttaatggagacggtattagaattttaaagttatccaaaattaagctactcaaaagttatgataattttaaagaaatgctaaaggtttttgcatagaagcaaatatgtaatcataaaagagaggttctcttttgtaattgtcaactctggtacctgaaattattcatttaatacctgttgtgggatataagattttacataaatgttatgtgtagaaaaaacagtatcttaatcgaacatactttctgtaaattgggagggcaacacagagattccaaaataaatttcatttgctcaataagctataaatacacaacaattgattttcccattcctaaagaaacctttctgatagctcagtggttctcagtcagattcgttggagacctgggaaaggatctgcacagcacaccaccagtgtgtgctggtggtagctcttagtggctttggaagatgattttggggctagaactcatgcatgttccttccttgggaagatgaagtgagggaggtgccccagcctgcctgtgtagatagagcatcgcttactacaggtccctccaaaggcatgcctgatatgtcttcccagccaaactttgcatttttatacataaacggtctaagacaatactttttgccttggtttcacatcccaaatatggaatggaacaagtggaatgcatatgatgctaaataataatgctttactgaaaaaaccttcagagtctttatttttaaa

SEQ ID NO: 6139 - DNA, 1667 bp, mus musculus
gtgacagccgtgtgtggctcctcccattcttcatctgtacaaatggaagagtttattgtgtcactgttcttcaaagataactttcattattgttgtttgcttttgttgttgctgttcataagtcttcagatcaagaagtgtcagatggagagactacagaaaacactgacctttgattgacagtgattaggcggtgttttcttccactagagcatgagatacgtcacacagagggagagaaatgaagatgtatggccaagagggtgcactgggataacttgttttgtcaactcttggctctctcttcctggaagaagattctccctccccttcttcacatggtcagactggacaaggagacttgctttggctagcagtgtgagctgacaaggtatgtacactgcatctgagcagatgctttaagaacgttggtgtgggccgggcgcggtggcttatgcctgtaattccgacatttagggaggctgaggcgggcggatcacgaggtcaggagataaagaccatcctggccaatatggtgaaaacctgtctctactaaatgtacaaaaattagctgggtgtggctgcatgcctgtagttccagctactccagaggctgaggctccagtgagcccagatcatgccactgccctccagcctgggctacagagtgagactccatctaaaaaaaaaaaaactttggtatgtttgtctcacctctgaggctccttgcctttggccatgatcaggacatgtctcaagtaggggctgctccttcagcttttatcctgaataaagtttcatgaagccaacccacagggaatgtaaaatgtgaatgagaaataaaccagagatttgagggttgagggttgtttggaactgtagcaaaataaatatagtgaaaactgacagattctggaattacctatatagttgagtacctgcacaacaagagtaaagcaatgttgtgcctagaaagcatcaggtcaatatggccaaaggtttctttgtcaaagtttaaaagatctgagaaggccaggtgatgtggctcatgcctgtcatcccagcactttgagagaccaaagtgggaggatcacttgaggccaagagtttgagactagcttgggtaacataatgagaccccatctctacaaaaattaaaaatcagctggtcatggttgtgcacaactgtagtcctagctactggagaggctgaggctggaggatcacatgaggccaggagtttgaggttacagtgagctatgattgcacaccacaccccagccacagcaacctagtgagaccctgtctcaaaaaaaaaaagaaaaagaagtttgaaaaacaaagggttggcagcatataaacaaaacatctagactctcttgggtagtctagactgaaacgtagactgaaatgatgatgtggcctgccctactgtttggctgtaatcaccgtgccaaaagaatttgtagtgcttttgaatttaggaaaattctggcaagtaggacttacttgcattctatgtaactatactgtgtgctgaatatgattttctcagggagtaatcaaaacagatttctttgaagatgaagcaaagttcagaggttttgttacctgaatatctgtacatttagaatgggatgtctagccgtaactgattcgaaggttat

SEQ ID NO: 6140 - DNA, 2383 bp, mus musculus
gctttctgtggctgtcaaggactttctagagaaattggtcttgagcttgccatttcgtcagtgctggctctgtgctttgttaactccagggagcttgaagcctgtttttttgttgttgtttgttttgttttgttttgttttgttttaacagatttggacaaaacagaatccagtggtagtgacagtgatgatggcagccaatgtgattaactgaagcatcatttttatttattttatttatttgcttttgcttatttggtcttaaataccaagttgagatatcattcaatgagatttcagacagcgttaaaagtgaaatggcaaattccgtgggattccatatgactgatgagacatgattatttgtcaaataaagcaaaatagaactgttctttgtggtctcttcttcaaagtagcagctctgaaacgtacctaaacccaaaagtcaagcagtgtgttggtttaatagggttcctataacaaagtgcccctaactgcatgggttaaatgtgctggaggcaggaagtttcagattagcgtgtcacagggtcgattgccttggaaggctgtgagggacaatctgtcctaggctgccgccctcgcttctgctgatttgctgtcaatagatggcgttccttggcttgtagaagcatcgcctcaatctctgcttcatcttcacatggtgctttccttgtgtgcatctatctctggatccaaatttcccctttctgtaaggatctctgtcatattggattaggagcccaccccactccagtatgacctcttaactaattacatcagcaatgaccctgttgctacataaggccgcattctgagggactgggggttaggatatcaacataagaattttggtgagggggtaacaattcaacccagaaccggcagcatacccgtttccaccccatcccacaccaagtagccccaacagctgctgagccagcagccaccctgccctgcagcacagacaggggaccagccacttaatatttctggttaaaaccaccaaggaggaaggtcctgagtctccaacttatcagtggaagacaggaagagaggacagagaagggaagggaacattctttaagataaaggagggatgggagaggagataaggaaagtgtagtgggtgagatggtggccccccaaaaatctgtccaagtctaagtccccagaatctgtgagtgtgaccttatttggaaaaagagtatttgcagatacaattaagttaagggtcttgagatgagatcatcctagattatccaagtgggctataaatccaaagctaagtgtccttgtaagagacacaagaggagatgacacagacgcagaggagaaggccatgtgagggtggaggcagagatgggagcgatgcagcctgatttggtttggatgtttgtcccctcaaaatctcatgctagaatgcagtccccagtgttggagatggggccttgtgggaggtatgtgggtcacagggacagatccctcagtaatggcttggtgccttaatgagtgagtatcactctgttcgatattgcaagatctgattgttataaacagagcctggcaccttccccccctccctcttgcatccttctctccccgtacgatctctgcacacactggcttcccttcaccttctgctgtgggtggaagctttctgaagcccttaccaaaagcagatgctggcaccatgctttatgtacagcctgcagaaccatgatccaaataaacttattttctttacgaattacccagtctcaggtattcttttatagcagtacaaatggactaagacacagccccaatccagtaaatgtcaggagccaccagaataaatgccaggcctcccctagagccttaggcgggagcatggccctgtctgctgataccttgatttcagacttgtgacttccagaactgtgagggatacatttctgattttttatgtcaccctgtttgtaataatccactgaagcagtcacaggaaactaatggaaaggaaaagaaagaagtaccattttcaggggccctcagggtccccagtggtggcccaagggggcactaccctgaaacccctgaagtcctacatttttctccagctctgctctggcctgactcacatgaggaatagcagaaccaccagctgatcctgtgctgtagtctccagtgacagtttcctttgagcaccaccatctttccctgtccctgtccaccactctgctcctggatctgtattcaggcacatgctcacctgaacttgaccttagcaatgtgacactggaaggaaaacagatgctgcataagctctgtttaactaatggaattttgtaaaaccaaacaaacatcactgaatcttcagact

SEQ ID NO: 6141 - DNA, 621 bp, mus musculus
tgagtgtcagtcaggataaactaggttacaccttggaaaaaaacaaaacaaaacaaaaaaagaaaacatctaaatcttggtgattctttgtgacaaaagccatgaataaatgtgctttcatagccaaaatatagtgtctacatattcataacagcaatattaaatatcatatgaagactaaaactgggcaaaattattacagtatagcttcaaaacagcatagcataaaagactgcagaaatttatgtcttttcaatcatgctgttgtatagattagctcaattcctgctggttctgctaatgtgtaaaaacccattttaaactggagttcaagctggaataatctcatgattcttattggtctcatatatcctctatggctctagttaggatgatctcgtggtttacttagtttttttttctcatataaaaatttcaccaaaagtgttctaggctatgaaagattaagtcttggaataaaatcaaagattaggttcacaaaaataataaactattgacaaggtgtaccagtcattttgttaaagacgtggtcaataattaggtttataaacttttttactaactggtaattgaattgaccgaatttaccaggtgctttga

SEQ ID NO: 6142 - DNA, 159 bp, mus musculus
cactgattcagggaaataagaaagaaatagccaaccaaagtaacagattaaataaattacattttgttactaccaaatacatacagctactaggtatattaatatttgacaactaaggaattttcataactttcttcaataaagacatttattcataat

SEQ ID NO: 6143 - DNA, 582 bp, mus musculus
agagatctatattgtctgaaatccaaaaggagaatccaaccctttcccaaacagagggatattaaccaggcctaggtccatcagtgccagcctctctcagcagctcatctccactcgatgcccagaaagccaattgatcacgggaattctgtttttttcctgcaaaaggtgaggcgaaaatgagtgtatgtatgtgtgtgtgtgtgtgtgtgtgtgtgtgtgtgcatttagttacattactaaaatgttaatcaaaatgaagttaaaaatggcctgattggtccccctgataattgggccattttgaggagcagaggagaaaatgcagaaaatagctctttgtaaactaaataaaggcaagcagcagtattattatcatttacctgtagacattcaaggtgttttaagtttttttgactaaattttactagatttatggtacatacccttcagaattcaagaaagctttcagcatttggtgttcagagttcagatcttttaaactgtcctggagaatgaacttgttaacagaaagttacacccacacacattcactcttgaatatgtgctatggagtgtcta

SEQ ID NO: 6144 - DNA, 684 bp, mus musculus
cgcccatcctttgccgtcaagaaaacagtactaacgatcataactgctttaaagcctcttacaaaaatctctaaagttgattccacaataaaatatttaccagaaaatattcaatgataaaaaaaggcagtcagtacacacaggagattggtaaatgtttaggctttaaataaatgaacgagggtgtcaattacaaataattatgttagataaaataaggctgtgagcagttcgaatgtttcatatggaatcatacctctgcacaaagataaaaaaacggagacatgactgaagaatccgattaaagactttggggaaaaattgatgtttattttgagcaaatctttctttaaagtggtctttctagttagctggtgtatcttgacagtcatttgtggtggttgcttttgtttaagttgggaggcatatttatgctcagcaatcactacaacgtgccaaattttgaaatatattgggcatgacttaaataaataccacccccaaaatttccacaattataagttagaagattcagctctaaaactccagatttgctaaatgactccttaacactgagtgcagcagcagctgagcagttttcctctctctcctgcaatctgtatgtgtacctggcggccatattttcttttatcagatactgttgctggggcaaccacctccttt

SEQ ID NO: 6145 - DNA, 790 bp, mus musculus
ataatcttaggcttgattgatattttccttgtagaatgctctaggtgcatgacaattcctgtgtaacatcataaaacacatccttgttagtgcctggggatttactgttaatcatttcatttctgatttgttttaactgtatgtggtattgaggttgggggaagaaaaatgaagaaaaagattttgaggacaaaaaacaggaggtaaatgaagatttattaagaatactattccaaggatgttaaagtaagtaaaatgctataaatattcatagcatttgacattcttcaaactaaatattttattagaataatagcatttctagtattaattatttcctatttgaatataatgattcctaggctgggacatgtgctattactacccaaaatggtacttggctccaaggatatatcatacattatatattgaataaataaataaatattgcataagaaaacaaaatgcttacaattttataactggaaattaacttattgtggagttctttatttgcagttaagtataaatataatttagagattattttattaaggataaaataacataataatttaagataaaaataacactgatgaagtgattatattttaaaattaattttaggaggaacagttgaggaatctgcaaattactttgagctactttttctttttatacttgacttacctggtagtggagtgcaggttttacaactggctgttgcataataaatattcactatttcaggtttcagtttaacaacactctaagactctattaaagtttc

SEQ ID NO: 6146 - DNA, 275 bp, mus musculus
attagtaaacattagtaaagtttaacatgacatgtaaaaggaagaaaatgtcatttgtctgattgtgttttcagatgtcttattcatcttattcatctccagctatcctgtatgccatgaagtttttgactggtgacttaagcattagcaggatactgtttttctgaactcacttatatatcatggctatttcctactcctaaacaatcttcatagatatgacagcatgccaataatcaataatattcatgctggggagtaaaaattaaaaaaaa

SEQ ID NO: 6147 - DNA, 280 bp, mus musculus
actctttattccacttaatagatttatttgtaattccagatttatctaaatattttaagtttcttcctataaagaataaagggtttgatataaatatatgttataaattgtttacttaaataacatgatgttttagaaattgcttccttatattatctttttaaatcttcttttctttaaaccaacaagcacacttgactaggaagttatctttaagtatgcagggctcatgttttctaatactttgaaattgttctcatagttcttcataattttctct

SEQ ID NO: 6148 - DNA, 233 bp, mus musculus
acatgtacaactataatgccaggcttatatttttcttaattagtatctgattatcacaggaaattaaaactacatgatgaacttttcacctaaaggttgaaatttggataaaaattatatttagacatgtagataaaattctttttaatatcacatgcaagagagaattcacaattagaaaatgtttttacatggaattgttatcttgttgacatcatatactatatcatatt

SEQ ID NO: 6149 - DNA, 320 bp, mus musculus
ggtattatggcatctgtgaaaactctaatctcctctctaccctctctcaaaaacatgcctgacttcccccaaaatttttgtataagttatattgtgattagacaggataattaaattgtgctgcaattatttgtctttagcatattgtggtccattttgggggtgcatgggaggtcagcaggagaaaatcacagcaggggagttaagtatttaaaattttgagaacagttctcttccccaaaaaatcatgcatagcaaagactttcagagatatacatatgaatccatgtaaaaaagacaccagaggaaatatgtaagtt

SEQ ID NO: 6150 - DNA, 406 bp, mus musculus
ttttcatatagattataattatgaatgtttattgatgtttatattttattttctacaatactttatcttttaaattaattatatataccacgtaaagtttatctgaaagaaattggtttattttaatgttgtctgaaaaaaaattgttcttttcaatagctcttaaatcagtaatttatattacttccagcacatttcatcctaacaccacctgggaagtaaaattttctggagggttggctttcatttcattctaaatgtctgattgatgaaattaagcatgtaaacatttaaaaagctgaattaagggttcgtgaaaaaaataattattcttttactgtgtccctttagatttgttgcaagatgaagcataaagtctaaaataaacatttataactgctgaatt

SEQ ID NO: 6151 - DNA, 348 bp, mus musculus
caagtcactcctttgtgtacccagccatctgctaacaggaagctgtactctcactaactacaaaagaacttacatactttgatttattctgttgctattcaacaatcactctcatctctgtaacaataatacactaggtatataatgaacatcagcaaattaaactctctgagtcattttattcacttcattttttcattcatattgcaaagtaaatactataattaaataaaagcaattaacttgacgcctagaacactttcagttcacttgcatgagtttcttcccacgttttttttctagaattatttttatataagacgcaatataatacaaagcatattcaat

SEQ ID NO: 6152 - DNA, 568 bp, mus musculus
ttccagcctattcaaaaaagccccatactaaactctatttttctctccctctcactctttaattatctctctatcttgttctctccttatttctatttcaatctccatctctctctctctcttttgcttacaagccaaatgcaaaggatgttgtaattacaagattgaagggatcagttgagttcttgagttgctgtgcagaaaatcactttcagtaaaaatacacagaaccgttaaatgagcacaaaataaacctcacttatcttgaattacatcaatgagacttgaaggttgtttctctcttatttattagtgaggaataacttttgcttatgatatttagatggcatatgagttatactgatgagattctttgaaagtgctgtgatataggaagaatctgctatatttaggaaggaaatccttaatcagaaagtttcaagataatgtatgtgtttgtttacatgtacaagatgcagactacacggaacgaagagctgagttattttacagcactacatttcaggtgccaactttcttatctcctctttctttgttaatttttttg

SEQ ID NO: 6153 - DNA, 528 bp, mus musculus
tgaagggttaagtgttgtcagcgatcttttctttaggctaatttagatgccctcatgattttctgtatatatatgacttggagattagaaaacaatgattcagcgcatattcagattagcaactcaaatagatttgcgtacattagctgaacacctacgtctgtgaatagttttatctatctctcttcagcaatactatagtatcttcaggatggatttttgtattttagcttcccttgttgcctctgaatttatcaacgaaacaacaagttattcattaaagagagtcaatcagataatttaccaggccaaaataatttgtagatagttcatggcatatgaagtaaagttaaattctccacctgagcttatagagacttcataatctgcctacttcctcttttctcattcttatgtagtattttcgattcatactattttttttttctcaattcctggagcacaccatgctctttctatttcatgcttcacatttattttttttttcacttagttaaaatgcttttt

SEQ ID NO: 6154 - DNA, 710 bp, mus musculus
gggagcccaccaaagttgtaaactgtggggtacattgctcttttgatgttactttacatagtagaataagaaactagttagccatggagatatataatatatataatagtgtacattatatactatagtgtattaatatatatattactatattatgtaaatataaaataatatataccatacaaatattaatatatagtattatataaaatatattttatatatcagtatggctagtttcatctattatatgtatatattatctctgtttctctttatatgtaaatataaacatccctacattacacatattactacatatttattttagaaatatgtgtgtatttatttattcatacaataattatgtgtgtgtgtgtatatatatatatatatacacatacgcatacatacaaatatcttaaaaaggtaaagctttagcccatgctatttgttttaaaaactgactcacaacaagccatctcaaaactagttgcttaaagtaagtataatttattatcatagatctatggataggctgaatattaactacagtagatggatattagctggaaggtgtgttgatgttaaccatgcttgtttactctacagaaattggatgttattttttgaatgtgtttttcctcccctttctgtgtcacgtgaacttgatctgacatgtttttctcatagaagcagcagaggcataa

SEQ ID NO: 6155 - DNA, 545 bp, mus musculus
agataaggaaaaattattttaactacttttacataagtaaaataactgtactcttattaagaaagtacaatgtaaatctaaaatacaactaaagttataattttcagtcagaagattttagttgatattttgaatattcttgatatatttccctctgcagcaagaaatttgcttctccatagtgcttgcatcaaatttagtatagctataatttatatgtggatacacaataaaataattatctgcattcactgtataataaccagaatctcaaggtctaataatgagtaaaaatcagtcaagctataaagacaataaaggttttaattaaggaaacaaacaatcgtatataaagtattttaaatatctacacacatatgaagactttccctttatttaaacaaaaatgattggatgttactagtttaaaatatgcttaaaactcagtacataatgtgtatatatacacatattttatatagcaacatacccactcaaggctaaatgaagaacaaacttaaaaggaacttattattgataaaata

SEQ ID NO: 6156 - DNA, 1513 bp, mus musculus
atcaagtttgcaatatgacatgagggttctggtatgtactttgtcccttggtatcaagtttatttctctaaatagtttatgtttttaagtttggttacctgtcaaaaggggaaaagaaaattctacttgtaagtatagttataaagtagaaatcctgtagttatgtatgtaacgatcttataaaatataatcagactgttgtgattgttttatatatcagtggacatatatttctagtaacacatttatacatgtaaactttaaattttaattatttgcagttctatgtatgggtatttcactgaccctctgggtctaataataataatgcagttactaagttattcttccagttcttttccttaagggttagttgcattttctatgtgatatatatgtatatattcaatagagaatacctgagtcaccaacagtctaaatacaataaaattgtgcccacattgtaatgcaccactttcttcaagcccagtgccattgtgcacctattcaattttgacataacattttatttaaaatgtggtaaattagtatggtgtgatgtctacaataaaaacttggctatggttgcttcatataatttaaggcaagttttttaccctgttaaattttatgtttataaatatactttgctgacattatgttcatgctggaaattgagcaggaaaactacatgctacattttcagcaattgcttggactattttacataaacatatctacatatcactatatatatattactatagagatatatcactagttatctgttactatttctctaacaacactgtaggaggaattattgcttattttctgccttttgtttgctggcataatcatagaaatatagcgatggagaaggaggtatgttacatatcaagacctgcatgtcctagttttttttttaatccatgatattacccagtgttctctaaacatgctattatctctgcatcataataatgcatgttaaaataggaataagtacagcaaaaactatgatgaaaacaataaacaattaaaaatacattagtctaattgatacatgcatttgagaataatcctgcctcttaataaagatgtaccgatttatgtagttcatgcatcccacatttataaaacttctgtgtgttattaacaatatttaattgaattatttttaaaaaatgataatttcagtatatttagatagttgtgcaaatacattgtttttaatttttatgttataaaagccatttatgatggttattctctcacatagaaactttgaaagaaaaggaaaaaaatgttacttgtttgcagataatggaacaagttagatcattactttcctggaagttaatcgatgcattctcaatcataatgatatgttgtcagcatattgccaaggaaatgacacacatataatgtaaatgacaagaactatcaatgcatctcaaaatgtacagctaagtggtaaggcataaaccagtattcctcattgctacatatg

SEQ ID NO: 6157 - DNA, 221 bp, mus musculus
tgttacccagtcaagtcaatgctggtatcataattaacccaatgtctcagttatacaaaaataaacctcaaaaatatactcttaaagtataacaaacatcaatgaccttaattcttgcattgagatttaattaagagttaatgaaaattcttccaaagaatgaggcctcaagttgaacttagtgtagagacaaatctcacaatgaagttttctccaaatca

SEQ ID NO: 6158 - DNA, 311 bp, mus musculus
ggcttaaaacaacagacatctgttgtttcacagtcctggaggctaacagttcaaaatcagggtatctgtaggtctgtgcttcctctgaaacatgtagggaagaatccttccttgcctgttcctagcttcgggtgatagccatcaatcatcagcattccatggtttgtagatgcatcatttcaatctctgcctccatcttctcatggagctctccctgtgtgtctgtcttcacatgattatcttcacatggccaccagtcatattggattaggagtacatcctactgcaacatgaactaatcttaacttgtg

SEQ ID NO: 6159 - DNA, 1131 bp, mus musculus
aaagaagaaagcaaagaaggcaagaaagcaagaaagaaagaaagaaaagaaaagaaaagaaaagaaaaaggaaagaaagagtaagcttgggatttaccatacatgcagaccaactactgacaggatgaacaagatatattagagacttgaagggaggtataggccagatatcaataggtttttaggtcgagggtaagaaatttggattctgtattagttagctctcactttactaaaaaaagatatctaagattggataatttacaaagaaagtaagtttaatgggctcataattccacaggctgtacaggaagcatgaggctggcatctgcttgacttacgggaaggcctcaggaaactttcagttatagcgaaaggcaaagaagaagcaggaacatcttacatggctggagcaggaacagatgagagggggtgaggtgacacacttttagacaaccagatctcatgagaactcactcactcagtatcacaaggatagcaccaggcgatgatgctaagccattcatgagaactctgcctccatgatccagtcacctctcactaggccccacctccaacaatggggattgtaattcgacatgagatagggcagggacacagatccaaaccatatgagattcccacccaaaaatcttcatttctctgtgaaacataaaacaagttttctttctctgagggatccaaggtgtaaaggaataagagagataccctgtgaaacagtaaaaagtctagaataaattctcagggaaagaataaagctgtcagaaagagatgcaaaaggattgctaagtactattttctccagtgatagaggctgacaacaggaactgaggagggagatgtgatggagggaagctttgagattggcccaaggtagaaactgcatgcaggacttcatggtgaagaaaaaactataagcaaaattatctgaaatgatgggaattttactgtataagaaatataacaagtgcaggtggacttattagcaagtgagtaaaaatggtagcattactaaagatcagttttaggtcaggacaattttcagtgaaattttccattttcacttcagctgtaagtgagttgtgccagtagagttgtaatggttttaaa

SEQ ID NO: 6160 - DNA, 1069 bp, mus musculus
gacatcaagttagagacaaatttagattgatgcaggtagttagaaaacaatttctaacaaatagatatctacaaacttgtttgtgacatgttctctgtacgtacataataaagttgatattagatccctggccttaaattgataacacctggtcctgtttataactttccttgccattaaatgttcaaatcttttaggaaaatattttcctgagtgatttcctgatagggacccttttgtctccatttctgaaattaacactttaattttggaactaattccctattctctggagttatctaaataattgaagtcaagattacttaattaatctgaatattgtattagctatcattatactactctactatttcagctgagaaaatatagctgttgagtcaacccacaggtgtaaccttgttcttttctctctgatttatataacagctgcactttttagttcaactccacacagttcaaaggcgagtcttctatagagtccgctcttgctggaggccattacctaattggctaccctcttgtccagatctatcaattctcagacaggttcttcacaggtgaagcaaagtgtaggcatgccactattaacagagagactcaggcaaatattattgaggttatgatcaaaagataaagaaatacgcacactgttttttctgatgttattctctgacaggctagataagacaggagcagtacaagtgatttcaaacgatctctaatgttggatttttgctgctgctgttactgctattagcggtagtagcagtgacagctgaggtaccattagcatcttagtcaaagtcacatactagtaaagggaaaactctggaatttatttatcaacaaagattaattgaataccttttatggaccagaatctgtgctaagattacaatctgcaaaataatacagggactaccactgggccctccaaaccacaaccactcaaagccacaataactaatttacagatattgagtgagaaccacagttcattgcactgctaaagcccagctatagatagatgagtagtgaagtaaggtaa

SEQ ID NO: 6161 - DNA, 799 bp, mus musculus
aatcactgaacaatgacagccattaccaaaacataattatttctaaattttccatagctattttttttcattcacaaaatagactggttcatttatgctgccgaatcttatgatacttgtgcacctttatctctttgatatcattcaaattcattggatggtaaagcacttactgaactgaaatcaggatccaaggtcaaaaatatttttgaaatacaggaagaacatttatatattttttttattattgggcttcccagagccaacagcgcattgtactactttctgtgcgttgttaatttccaagaggagctacactgctatgaagtgccttccgaatatatttgaccaaagaacttttattgtttttataaaatatgtattaacatctcttgcaaaatgaggatttggcagaactctgttaaagaaataacacacaagagagtaatggttctcagtgctccacatctcagccaccccctgggctatcagcaaattggtgccagagactgcatctttgctgtcactttacaccttgcagttccttctatataaagaaaattcccttgtgactctctatcacagcctccactcattcaatcttagcacttcactctctacaatattatttgtgtgcactaatttatcatattccatgtccccctgctaggcatgtgtaagcaccatgcaggtagagatgtctattttgcacactgctgtctacccagcactagaggagggcctggcattcagtaaatatttgaaataatgaaggactcctgcagaagatgtggttaat

SEQ ID NO: 6162 - DNA, 860 bp, mus musculus
tgagtcctcaattgacctcaatggaccaatggcttggtacagaaggaatcagaggcgaggacatgttcctgctgcagtgggaagtaagacagagcaggactacggcctgccctactggaggaaattgctcctagggccttgtctccaggagttgggaaaggggaaagaaaacattgcccagtcttccaagtctctgggcaaaaagtcactgagttggaaagaagtacctcatacagatgggaattcatattttagaaggccttctgtaaccttcttatattgtttcaacgctcctaagaaaagttttgatgatgtatgttattaattccttttcataaaaagatgtctcaagaatctaaataaatcttaaattttgggggggaaatctatttttatgtaaaaatattacactgaaaacaatttatttactgatgtgtcctctttagtgacctaaaagatacactgagccagcatactttacatttgtattcagatgttgcttagttgtctagcaaaatctgtttgactactttaggtacaatattgctatttcaagtagtgggatttgtagtcagaactagttccttctgagcgtaccactcatcaaaaacaactctgtacacaaaacagaaggaaaatctttcagcacattaaaagtcatgctataaacataggcctcagaaaggaagaaaggtataaaggaatgagagaggacataagaaaagaaagacaaaaccctaaatccacttacttcttaacatttagaattcaatacaatccattacatttgatgattcaagtacgctaagatttttcagggacatattttgtcgcttagtgcaaatatacttgtaattttt

SEQ ID NO: 6163 - DNA, 436 bp, mus musculus
taatatagaaaaataattcttgaaagcctactgtgtggcagagactgtggtaggcatttgaagataattgtaagcaagatgtccttgtcctcataaagcttaaaactcttcatagaatcttggttcatgttatataactgttcacctgtttttttactgtcctgttttagagtgaaaatattagaaattacagagctacacagataacgctctagagtaaatgacatctcatccaaactactgagagtttaggtaagagtgatgggaaattaaaggctaggtaagtgatgggatagtgaataagaattgagggatccttgaagtgaccgtaagatgttggggaatatattctgagaatatacttatgacaacatagtggcctgttgagttatcagcatatttggctttattaaatttgtactgactcctttaattt

SEQ ID NO: 6164 - DNA, 872 bp, mus musculus
tttacatttcattaatataccttcatattaatttttattctttgatctagtgagttaaacaagaaattaatcctgttacagtagcaacattttgttgacttctaaagacaattatattgagcaaccagaagtaatagcttgtattttatccttcacaggtggaatttttgtgattcacttttacagagacaatctgatgaatattcctatcctgaactagtgaaaatggtttggtacaaaggtgttacatataggtaaggcacctatgttggcttctatgttggagttagagctgtttattgatgtcacagagaagatgggacgagccttatagacagactctcagaagaggacacagttctgttgggccaactgtgctcctgtgtttgatcctgagttttacaggtctcaaaactaatgttattagtgcacacaagggtcctgtgactcactcacattaaccatttttataagacttatgtggtacctccaaagccaatgagggattggtttgctagtgaatgtaacattcatatcagttatttaggatactccttccaagcattggaggatcaagttgtttgaaatagtcaaaacagaattgcttgagcatggaattagagaagttagatcacctaagggagattttagccttcattcacaaagcaaatactcattgagtggccactctgtgccagcactgttccattgaattatccataccccacaacaaaggacacccttctagtgactagaatactagtgttagccagattgagagtttcacttccatgaacaatgctagaagagcactgctaaatttttggagagcgagggggctctccttttcctatgtgaagacctattccttc

SEQ ID NO: 6165 - DNA, 924 bp, mus musculus
gaaaaggagacagagcacaagtcaaaagtctcatgctactaagtatttatggttgagtcagaggactccacattcacagaaacaaataggtttcagtatgtttttccctggaatatccttctcatccacccactttactgttactgaccacttcattacttgacaagtcttttttatgaccctactcctgggtcttttccttgtcttttctcaatattttattaatatctttgtaatatacacttctgtatctaacgaagtgacagtgtattcctcaagaaaaagaaactcattatagccacctccatgcccacagtgccgaccatattactcaataaaatatttgtcaatagaatgaaaaattaagtaaagagaacacaaacattataggtgtctattcatgtcgttttctcactttatctgtgggttattggtgttcttattgtttgtatgagctcatattaaagtgctactgttagtcggaaggatttgttgtaactatttcccagatagcagtatattaatttcccaggtagtagtatactaactctatttatgaagttttaatgtgtatttatgacttgtgagagtttatactttattacttttgttaccaaattgaatttcaaacagcaaaatgtgtagtatttgtttcctgggctattggtcctgtaaattggtaaacaaatcatagtatctagcaagttaactcttctaatcattgctctctgatcttcatggtcttccccttttggtctttcctttcttcttccctgtttttcctctgtcttgtattaataacatctgtcatcgtttcctatctctattgttggtagtcatggctaacaccatcgggtacaattagaaggtggcagtattaaatcataaaatagtattagaggaagatgtaatgaactgtagcaa

SEQ ID NO: 6166 - DNA, 794 bp, mus musculus
atattatgacgaaaaaattaggaaaaacaattcaatgggaatgttatcacttctttggctaacacatagatttaaaaagagaaacaaagaatgatgatggagaaataaatatccttattgttattacacattttctgagtaaggagtttgaacggtcagtaggttatctgtgcctgaagccagcctgctgctcatgcaggtgattagtctgagagcccagacctgtaggttagtgggaagaaagtgagtaaagcgctttgatgctgaatccagggagcccttatgtatgtatgtatgtatgtatgtatgtatgtatgtatgtatgtatatagtatggcatatgaaaaattccctttttattaattggtcagtttatgtataattcctattttcacaaattattcctagggaggcaatgcaaatatgattgctggaataggtgtctatcaaacagtagagaatttaaatagttcaggagccaaaggattttctcttggctgtctttttaaattcttcttttttaaatagcacatgcctccctgattccaatcagggataattttttatctgtaaaataatacagagattgtcatatggctgtggattcaggagaagtcagttactaagtcatccaggaacatttgtgactctctacatcctccatactttgtacctgaaattactccttaggaaattatggccccacatctcaattactgtggtgaataattttgaatcccaggacattccactgaagtttgctacaatctacgtaataaaatacattattatat

SEQ ID NO: 6167 - DNA, 988 bp, mus musculus
cagccttatcttaggtgagaccgtttcggcttggaaacaaacaaagctctctctcgatgaactgggttcatttcatatttgtgtaataccctggaagaaattaggtttcaataaagtccatttttgtcactgcatgtagcaatgaatatcacacccagcagggcacagtggcacctggctgtccagaccccagtgtagcacaaaccatctgggggtaattacaacaaggtattctttaaggaccagatgggagcaaggaacagaagcccctacccctcccagtcatttacaacataattcctttcaatgatatacttaatcctcccaccagctatgcctttcagcttgctgttgtcactgttcctttatgtaaattcagacgcaagaccgggaaaaagagggggtgagacagaaagtacaagaaaaaaagggaaagggtgagagagagcgccactggtgcctctagggaccaaaagaaattattcatccctaaattgttttcaccacagcgagtacagtaacaaatttttttaaaaaaaagaggactgaaattatcctaaagaaggtcaatgcgacagccctgtgtggcaccagctgaggtttactcagccacctgttagctagaaagctctctgcacacgcttatgatgcatttaaccagtttaaagggtctttattgacaggccagccacctccattcagcaggctggagccataggcctgctttgtggtcatatgtggcacacaagccttaattcaattacgctgtaagcctatccaatctgcatcactgccctttcacttttgtgccatttgtcttgcatattgtaaagaattttattttgaagagggaaaggcaccctacaacccagttgtctttatttttcatgtaaggttgtgccgcaggtgcgccgccacctttcaactcccgaaatgcattcatctttaagcgatattttagagggaagcagtatttattgtttggtga

SEQ ID NO: 6168 - DNA, 1372 bp, mus musculus
atcaatgacattaaattccttagcatatataaattttaattttcaaaaaaactcatttaacttttaaaaaaatcatttaattaaaaaaattggtgagctgcagtctgtttatggttttatgttaaactatatagtaagcctaagtaggagggctatatagagaacctgaaacaaagtttgttcaatgccattcaagtgacaaccacaaagctaatgatagtttaaacaatggctacacaccaccatattgctggagattattacaaggcttattaagaaaaggaagacataggtgaacacttagtagttaagctgagcaggtagaaaccttttttctttaaaggtttttttcttcaaatttttttaagttgagaactatctcagtgctgtaggatatctcacatttattaaagctggagggaacaaccaactctatttctaagaaatggccactttaaattattcaacaacatttagctcaaaaaatttcagttatgatgaattttatacattccgctttcactcccccacgtctccccaatcttctagtttgaacagaaaaacaaaggacagcagggtccctttcgcctcaggcaacagtctgttgatggatattgtagcagctgaattgctccccattcacattctaaaccctttctcctaattgtcgtctgtatcatcaatgtcactaactgagaccactgccacaattctacagccctttggagcaatattgccttggctttttctcctggggcttgcttcttgcttggtgcaatctgtgaagccacttagcacaggatcttgttgacttataacaggtaccagatgatgcatccagacctctagcctagttttatgctctcatggcttgtgtgcctgccactagtgtgtgtgtgtgtgtgtgcgcacagatgtcagaggatagatgatgcttctgctgccattttcatgcaagagcttcaggttggtgggaagaaattcaatagtacatgagaaaatctgatgtctaagagaaatcgtgttcttgtgtttgatggctttgtgtactcttttttaaacccagcccagaattctcacgaagcatatttatactgctatatcactgtgatgctttaggaaataaaatgtaattgcctccctctttccactgatttccttgatctttaaatactctaccttgtcctcacagttcataaaaataagtttaaggaaaaattattcacatgaataagttatatataaggatttggaaagaaagtactcccaagtggctattttttataataacaatttttattaatagcaatagtgttatcttggtgagaaaataaaatttattttcccataaatttatacagaagatttcttc

SEQ ID NO: 6169 - DNA, 208 bp, mus musculus
gtaatcccaagttttccagaaatattttataacaaagtcacggtgactatgaaatctcaatcactgccagattattcgtttatctatctatctgttcattttttcaaatgtgtttggttagagcataacaacttttttatatttgtctctgtagttcaagaaagaaagggacttaaatagtagtagcattgcttactgcacatcacca

SEQ ID NO: 6170 - DNA, 994 bp, mus musculus
tcagaacattttaacagagaatcagttcctatggtggagcacttattaatattagttcataaaagtaaaaggaattgtctttattctcagataatccatctgctcttttgctttatttgaggctacagacattcatttaataacgtaaactagtgtgcctccccaagttttattttagtaagctagggattttctaaaactctgatttttttccactgtcaaaacacaaaattctcatcaggatgtatttaaaggatattttcatttcataacaacaaaacaaacaaacaaaaaatcccaaaacaacaagctatcttctttggagtttcaaatggcacaacaaagttatttttcatcctttccaacttctatgttcatttaaattcaattatccaaccacttcactctagatggagaaactgggcagttaggggaaactcttgttttaggatgagctattttttctacgtcaggaacagactgaaagctttttatgcttcatgaacattctgcactccttgaaagaaagaagtatctgtgcagagtatcaggctgaaggatgcttctctcacatacacctgctccgttttttgatgcactggcccacaaatcacctcttcatctttgtcaacctcaaagcctctattcttctccagtgacctgaggctgatgcaacaaaagaaggcaattcttaagaaatgtcagaggccttttgctaccaaaaataacaccctgctaaaacttgatagctaggaaactaaaaggtaatgtttgtgctggtttttatggagggcatcttaaaaataagacaactgaagcattgttaattccaattcctgttaatccaaggaatggggctataggtaccatgttctacgaaaaaggcagaagacggtataattatggagattatggcagcagaatccccgactcagaacaccagcattgcctcactagctgccattcaccccttcagcacccctggttcctgttt

SEQ ID NO: 6171 - DNA, 521 bp, mus musculus
gaaataaaagtcaacatgaaggtggtctctcaaggcagttaaggagttaagattagatcagaattccttactcacttaccctaagtgtgtccttccacaaattacttgatctctttagacccaattattagcatttacctcctggagttgttttttaagtgattaaatagtaatatgtatgtattttattgttattcctggaccactgttagtcctcaataaaaggaaagagcagctgcagcagtggaatacagaggggttagaagccctattgctattgattaagaagaaagtcggaggttaatatgtggatgccgcaggcctagaccacactttaatagatccagaaagctaggaaggcagattgtgcgggtaacagtttggggaggagttcttttctggtaagtgtcccagaggaagtatgggcatgaggggataacagagaaagtacaggaagagggaacaaataggaagaaagctggaaaggatgtgtaagcatcaatctatgtcttctgattgtt

SEQ ID NO: 6172 - DNA, 1065 bp, mus musculus
taatcatcaaaataaatgaaagcgtgtataggtcacttctgttttctgtataagtttctcagaacatgctctgtatacactggttattcaataaatgtcagtcagtcagcagcatttatggagtgctgctctacttgaaatgctcataaaggaaagtgaaagtccccaggggaatagacagttttcagattgtttttctcttgtgtttctggttcaggatctacacagctcagttgtcagcacagatggaaaagtggctgtccttttcctatggagctgttgttcacaagtcaagcaatattccatcaatacatcactacagatgtaccacttgttaaaatattgacgtactggcctatccatttgaatgccacctgtttcctccccgctgggacctcttgggctgctccacaatttcacaaccaaagcagtaattcctggcttggtagagagcctctagaactgcactacagcactgccaccaacgttcattctggttggttagtgtccatgacatactccatctttaatatcttaaatgttcctcttgtactaaacattatctacacagaaagttaggggacattcaagaatgatgcctcaaagctgatacagtcattgtcatttaaaaaataagaagacattcaaagactaaatgaactggtacagtgatccttttacggtgaactattggattcttctcctggtcctagggcagagaccaggcctgaatcttgtttgtatcctcgttactaaacacaggcaagggaacagtgaatgttaattgaactaaacggaactgaatgtagacttcagacttaaaggagagaatggaagctgagatggccataccagaaacacaaactaaggcataccagaagacagtcttttcattaccaagtggctgccagctgagggtcagtaattaactgacaaaacacatggtgctacactacaagttaagtaaaacaggaagtagtttgatgagcagatattgatggatataccttgtcactaaggtacatattgctttcaaggtgtacattaactttcagtgcatagctc

SEQ ID NO: 6173 - DNA, 488 bp, mus musculus
aaaaaacaaaacaaaaaatgtataagaaaggaacaaaaggaagaggagagaaagggaggaaggagcccctaattccattagttggaagaaactgttgtaagagaggaaaggaggaaaaggagtgcatttcaaggccaagcaggataccgcggtagagctctaagagagtctgctcatttctctacatctcatggatttgggagagcctccccaagcaggttcctcctgcctttggggagagcctcagagaagcaggttggccaagatgtaagagtttttgaattttgcttttcaactgctagataacagccacatgaatgaaggagtttaccaacttaatcatgctaatcccctccacccagagtggaattaagtgtcttctttccaagagagataggagtcctccaatcctcccagtgctcagatccttgtctgcaattgatcatcgccaagtctgatatgcaaaaaacaaacacaaaaaattaaag

SEQ ID NO: 6174 - DNA, 438 bp, mus musculus
ggtacacttacacagtggcatgccagatattcctattaccactgaaatttaatgcttatcttgtttccctcttagattctctgagtttttgtttaaaaaaaaaaagttaacccaaacatattgagacctacatctcctggcaggaatttctacaaatatagagtgaaggacttttagattcaaatcattttagctacctaccttagaccctgtggtgttctaggaaggcttatttttatagtgaagaggctcaagaaaagataataaggagacttagcagcctaaaacaatctcatgtcaactacaagatgaccatggaacagcctatacacactgccgataagttggctcagcccccttcaatccaactcatcctttagatcaccaagaatgcacctttgccagaagtgaaaaaggaacaacagccaacatgtacct

SEQ ID NO: 6175 - DNA, 273 bp, mus musculus
ctttccctggctaatttgatcctagcagttctaaaatttttggtctcagaactcctttaaactataaaaattattgaggaccccaaagagttcttatgagtagaggcattatctataaattgttactgtatttggaattaagctaagaaatcttgaaaataattcttcattgattgactttaaaatacaatacataaataatgacaatacctaaataacattttatggaaatgactattgacaagacaaaacatattagtgagaagagtggca

SEQ ID NO: 6176 - DNA, 2288 bp, mus musculus
gtaagtatatacaataactctgaatcctgtcccacatcccaattctgactcttttttcattactgtcttgaactcacagagctgccagctaccagaactcagtagaatccttcccagaggtcagtgctccatggagagcagagtccctgaccagagatcatcttggctctgtttggaatttgttgctgtagaaatagcagagatatcaacaaactcatgttcctggggctggacaggctgatgagcccatctgcagggcaggaatagccagaagagaaaattgagcaagaatctaatgatgacctagaggagaaccaggaaacagaggacctgaaaacaacatgaatttggaacgtgaaaagcaaatccagttactcaatacagtaggagagcctacgtgagacttggtgaagagcagtcaggcttcccaagaaaagactatgctcatgcctcagagaagtcagacctctgctgcatctgctcacatgggaccttcctcatgtcctggtaatcacaggagctttaataaacatatgggagtctgtagggagttacttgtgccttctaagtttttcctatcctggcacaagagggggagaaaataatccaaccaaagagaagtaaagagtaataactatactcttcttacagcccctaaacagatttgctgaaactttgagctcctagtgcctatctcctttccctcagaaagcccctaaggcacctcccattctctccttcaccaccaaaaaacaaaggattagagtccataatggactcaattctaaagtattattttctatgtatcacaattatcagaaaattgaggagcaagcacaatttatccttctggtgatatgtgattttctttcttaaaacaaaacaaaacaaaacaaaacaaaaaaacaaactttgtcagttctaggacaaaggaagagtaattaaacttagactttcttaagaatacatgtaaccactaaaagaatagaaatggaatgtataattaaaagctagtagctgggagcggtggctcatgcttactagcactttgggaggccaaggcaggtgaatagcctgagctcaggagtttgagaccagcctagacaacatggcaaagccctgtctctactaaaagcacaaaaaattagccaggcatggtggcatacgcctgtaatcccagctactcaggaggatgaggcatgataattgtttgaaccctggaggcggaggttgcagtgacccgagatcatgccactgcactccagcctggacagcaaagtgtgactctgtctcaaaaaaaaaaaaaaaaaaaaaaaaaaaaaaaaaaaaaaaaaaaaaaaaagctggtagaggagaaaattatgacagagaaagcttgatcaatttagtaaagcaggaaaggagaaaaaagcaaagaaaataaatgatgcaaaataaggttaaaataatacagtaattgtattgaacatgaatgaattgaatctaccagttaaaggacaataattgtaaaattaggttttgataaatttggacatatatcacttataaaatacacacctaaatgataaaaaccaaaagtagataaagaaataaaagacatgccagacaattactaaggaatactaatatcaaccaaagtattgccagagataaagattgattattgcaagaaaaaaatggacaagtcttcctaaaaatgagggattttttctttttttttgatggagtctcgctctgtcgcccaggctggagtgcagtggtgcgatcttggctcactgcaacctccacctcccaggtttaagctattctcctgcctcagcctccctagtatctgggattacaggtactcaccaccatgcccggctaatttttgtagttttagtagagatggggtttcaccatgttggccaggctggtcacgaactcctgacctcaagtgatcgacctgcctcggcctcccaaagtgctgggaatataggcatgagccacttcacctgactaaaaatgagaggttttaaacatttctcagaaacaatggatttaacagaaaaagaattattaaagttacagaagacttaagaaatccaattaatgaactttatcttatgaatgtaatgcacctaacaattagataatacacaatatatttcaagtatatatcaaacagattctgagtacagtcttccttatcttgctaactgttcccaattgttgatattcctctaagctggtttacaatgaagtgaaatggtaggatatataatgactacagcttcagaatttcaata

SEQ ID NO: 6177 - DNA, 548 bp, mus musculus
ccctgggagcacaatgcccatgtcgtagcaggataggaagcagaagatgaaggacaaaaatctcaggtttctcctatgaaatactagatactagaaagcactggaaaaaatatactcagcagtgttctgaaaatgtgatcaggacctcctgcttcagaatcacctgcagtgctcagcaaaatcaagtgttcagcgcttagcccacatctccagaatcagaatctctaaggcactggactaagagtttgcattgctaatgagctcccagaatgttatatgtaccctgaagtttgagaaccacaggggtacaaagtgtgatgaggaatttttaaaaaattacttcacaaattttatgtataatacataaacagcttaaggaattttcagaaaatgaacacccatgtacataaagaaggaatgaatttttacccaagtattttgtcttaagaaaactagtttgtgtgtgaaaacccttttcagatatgtgtcattttttgaagaaatacaagaaagcatgaaggaatgaaatttaaaactaaattcaaatt

SEQ ID NO: 6178 - DNA, 1004 bp, mus musculus
acagaaatcacaggcttttaaacatggcccgaaataataatgaccctggaagattaacagaagcactctgcctggaggtgcgaccaacatattttgagatgaagaacgaaaaactgctgtccaaagcatcagaaccaaaataccagctttttgttccccagcttgtgactggcagatgcgctacaagagcttttcatagaaaatcacatagtttggatctgaacatcagtgagaaactgactttattacccactttatatgaaatacatagtaagactactgcctattccagactaaatgaaacacagcctattgacctttcaggcttgcctttacaatctagtaaaaatagctattcctttcagaatccatccagttttgatcctagtatgctgctgcaaagattttcagtggccccccatgagacccagacacaaagaggaggagaatttcagtgtggtctagaagctgcttcagtgtattctgaccatactaatactaacaatctgactttcctgatggacctgccctcagctggcaggagcatgccggaggcctcagaccaggaagagcacctctcccctctggacttcctgcactcagccaatttttcattgggcagcattaatcagaggcttaataagagagaaaggagcaagttgaagaatctaagaaggaaacaacgaaggcgtgaaagatggctacagaagcaggtaatatttttcaaaagagtttactaaaaatctgtattataaatactggagtttggggagtggagctaactttcaacatctgtataataaaaacttggttttagtaattctggaaatgctatttctctctgagtgcactcagtaatcatgcagccatattataattggcatgtataacccagtctctatgcttcatgcatgtttagaaaaaacctcttttgtgcaatttttcgcaattctaatattttagagggatattaatctctaattaacactggattgttttttact

SEQ ID NO: 6179 - DNA, 1004 bp, mus musculus; identical to SEQ ID NO: 6178

SEQ ID NO: 6180 - DNA, 1275 bp, mus musculus
accaataccacttataaatatatcgactgggcgcagtggctcacgcctggaatcccagcactttgggaggctgaggctggcggatcaggatgtcaggagatcgagaccatcctggctaacacggtgaaaccccatctctactaaaaaaaaatacagaaaaatcagctgggcatggtggcacgcatctgtaatcccagctactcaggaggctgaggcaggagaatcacttgaacccgggaggtggaggttgcagtgagctgagatcgtgccactgcactccagcatgggcgacaagagcaagactcagtctcaaaaaaaaaaaaatcttctttgacattggttgttattaactactgttgactgtttaaatttgagtgccttaaactggaagtgtgatataatacaaagaatttagactttagaaccagacagccttgtgtgaatctgggctctattgttttatacctatctgaccagtgagttcagcttctttatttgtgaattggtggctgtattagttatcaattgctgtgtaacaaattaccacaaacttagtgagttaaaacaatacacatttattatcacacagtttctctgggtcaggaatctaggggttatgtcctcagctttagggtatctcatgagccacaaagtgttggcaaggactagggtctttacagaaggcttgactggggaaaaacctgtttctaagctcacctattactgaacaggatttagtttcttgcatgctgttggactgagggccttagttccttgttagttatatcagaggctgctctcagtttcttcaatgtgggcctcaacaaatgacagcttgcttgcttcatctaaaccaattagggaaagatgtggctagcagatggaagtcagaatcttttgtatgtaataacgaaagtgacatcccctcagtgttgaggtattctattggttagaatcaaattaagaggaggggagcaagggaatggatatgaggaagccagattattgggctcatcagagtctacactgccacaggggcagagtatatttacttcacaagatggttttggagattaaaagaagcaatatgtattaaagttttttatttttggtctgatcttaaactacctttctggttattacctgttagtttttttgcacaggaacaaaatttgctattgctattattactaatattgtttactatttcccatttttttctggttatctagactttgtggaatgcatttcttctatttgtaatgattacctcca

SEQ ID NO: 6181 - DNA, 1215 bp, mus musculus
atatgatttgaatgttgaagagcgattagttctaattgagaaaagtgttgactcaacagccacagctgatgacactcacaaattagatcatatcaatatgaatcttaataaacttataactaatgatacatttcaaccagagatcatggaaagatcaaaaacacaggatattgtgcttggaacaagctttttaagcattaattctaaagaggaaactgagcacttggaaaatggaaacaagtatcctaatttggaatccgtaaataaggtaaatggacattctgaggaaacttcccagtctcctaataggactgaaccacatgacagtgattgttctgttgacttaggtatttccaaaagcactgaagatctctcccctcagaaaagtggtccagttggatctgttgtgaaatctcatagcataactaatatggagattggagggctaaaaatctatgatattcttagtgataatggacctcagcagccaagtacaaccgttaaaatcacatctgctgttgatggaaaaaatatagtcaggagcaagtctgccacactgttgtatgatcaaccattgcaggtatttactggttcttcctcatcttctgatttaatatcaggaacaaaggcaattttcaagtttgattcaaatcataatcccgaagagccaaatataataagaggccccacaagtggcccacaatctgcacctcaaatatatggtcctccacagtataatatccaatacagtagcagtgctgcagtcaaagacactttgtggcactccaaacaaaatccccaaatagaccatgccagttttcctcctcagctccttcctagatcagagagcacagaaaatcaaagttatgctaaacattctgccaatatgaatttctctaatcataacaatgttcgagctaatactgcataccatttacatcagagacttggcccagcaagacatggggaaatgtgggccatctcaccaaacgaccgacttattcctgcagtaactcgaagtacaatccagcgacaaagtagtgtgtcctccacagcctctgtaaatcttggtgatccaggctctacaaggcgggctcagattcctgaaggagattatttatcatacagagagttccactcagcgggaagaactcctccaatgatgccaggatcacagagacccctttctgcacgaacatacagcatagatggtcc

SEQ ID NO: 6182 - DNA, 812 bp, mus musculus
gcaattatcaaccttggctgctatgtcagttattgctgaatagcaagtttccccacagcttggtggcttcattcaccatttgttacctcacaggttttgtgggtcaagaatctaagtacagcttagattgtggatcctctagctgtgggtctctcgcaaggctgcaatcactgaagactctccacttcccagttcactcacatgattgttggcagaatttagtttctcatgggttgttggtctgaggtctcagttcctactgaccttttggctggagacccccccttagttccttaccgtacggcctctccatagagtaccttgcatcatgggggcctgcttcaagggccagaagcaagagggcaggagaccaacagtaccagtcacatgaccgctgtagactttagtagtggaattatagaagtggtatcccatcacttttgctgttttctgtttgttagaagcaagtcactaggtccagcccacactcaaagaggggattacacaagagcaagaaaaaccagagtcagggactatcggggttctgcctaccactactgcacattagaatcacatgggcatgggggaggagcacttaaacacccatgcccaccctgcaccccagaccatttaaattagtttttatccatgaataaggtataacttagatatagtaacaaaagtacacagttgtttaattaccacaacaatcataatatagattatttcaataacccagataattcccttgtacccttttatagtcaatccacttccctactccagcccctggtaaccactaatctactttc

SEQ ID NO: 6183 - DNA, 227 bp, mus musculus
aacaatggacaaaagatctgaagggacacttcaccaaaggaaatatataaagacaaataagtacatgaaatatattcaacatcgtttgtcattaagaaaatgcaaattaaaaacccaaggagatgccactgtacacctattagaataactaaaatgaaaatgactgaccgtatcaagtgtttgtgaaggatgtgaagcaactggaatcctcatatactactggtgag

SEQ ID NO: 6184 - DNA, 1114 bp, mus musculus
taatccataatcacatttttgatgagtcataagcaaagacctcttgaatgaatgcttactttacttattgccaggtactgagctgagtgctctggctacaaagataaatacagtgtagtgatgagtgggcagaaaatcatcagatgcctccacatggtgtgatgatttctatgtggaaattatagacacacaggatgtgaggaaatatgtgcaagaaagtaatggactctggttgagggagtgaaaaaagaaggcacagagatggtaatggctcagctgtgcctcttcaggtgagtttgccatgtgagaaatggaagaaaggcaggcaaaaaaagaacaagccaagagtcccagcggagacttggccaagtgtcctgggctgctggaacattcccctttgaaggtacaagccatctagtaggatgttcagaggtaaaatggactgagaaaaatgtgaattaatggctctccctcttctatggttcttccaggggtaaaagctgacttggcagaagctgtctgatactgtgggtcatcctgaccttgagactgcgcaacgtgccctggcagattcagagtgtgtcctgctagaacccatgtgctggactcatttccagtgagtaatgggctgaggtcaaaggctgttctcgcaggagcctttcagggttatgtttatatccaaccccattctttgtgctaacagaaaactagaatatgtaggaactggaaatccccatgccacactctagtcagtactttcactgccttccccactgaacaattagtaaatacttctactattttgttctgattgctgggaattttatccccttctccctcctccaggagagaatgagtgaaaattagcaagtaagatgactacattcattgcctgaatgctagaaagtgccgcatgcccccagattacatttgtggagtgaaggctttgatctctgcttcctacatgtgtctgcgaggattggtactatggtactaacttatttcttccctttcattttatcctgactgactgagacacatggactttgactttccaaaacctaaattctaacttgtcttaagagtcaaaataagccatggtctaccattctat

SEQ ID NO: 6185 - DNA, 289 bp, mus musculus
tcaggaggaatatcaagtagtacaagtttagtagtgcattgtaaaaacagtattttcagaaattatttcatggcttattcatttatctggcaaacacatattgagtacctaccagattctaagaccttcattgtatattgaagatagaaaacagattatgtgatagtcattaccctcatgaagtttacaatctaattataccattaaaaattagcatttaaatattattaaataagataatcatagtgcttttttaaacggtaaaacatagtttttaagtaatttttaa

SEQ ID NO: 6186 - DNA, 328 bp, mus musculus
ttattattaatgtggctgtagtcattattattgctgctgctgttattatgggtgtggctatgtgctggaccaaaattaatacagtcaacatgtaaaggagcactgagggccatggttccacagtacaaccagccatgagatctacgtcgttccccaaagcatgagaaggcacggcagacttgggaccagaagagacgaatcagcaccccagctctgtcacctccctaaggtactttacctggatctcaacttcttgactggcaaatgggaataataaagcctgctatataggggcttttgtgaggattgaatgagctcctgtttgtgg

SEQ ID NO: 6187 - DNA, 1362 bp, mus musculus
atatctgcttttttagcaggaggcttacacttgcagcatgctgttatgtaaatctttatcacaatcatcagcatttattgaggacctctgttctacggcaaatgtcaccaaacagtaccaagaatgaatgtgaaggaggccacattttgcagattccgttcataactctggcaatctcagaccacacacagactgccagtgcctggtcacaccattgtcctgccgtcacccactccccttggaaggaattgccttgatatgtggaggctggcaccctgctcagttggctgcagggagccttgtagcacttagagggatgggcatgtgggctagattcctttggataaagtgataggcacatcacactctggtgtgcaggctctgacatgccacagattagcaggcatgcctctggtaagaggcatgtgactggccttttggtccatgctatgaaacccttgaattctccctgacattctgtacagccatttccacccagttagggcctatttttttttaatgcttcaagtgcaaaaaatgaaaatgcataacagtggctatggctcactgacttttgaatgcgatgtttccatttttctattagacaaagcttagagagagaaattgcagagactgagtactgtgatcaaatgaacaatttcaatgtgcttaacatagaagatactagagcataggggtttttaaaaatgggctttggtgtcaagcagacatggacttgattcccatctctaccacactcactggccatttgacccagggcaagcttatttttcataagattagaataaatacttattttatagggttgataacagaattaaatgatttaacatatgtatgctacttaggagaatacctggtatctggtaagcactaaaaaactagaattagttaccaccatcattgataatccctttattgagttataaagccaaagagtctcccaaatgtttccgtggcaaattcatcctaaatactgactgatataatcaagaatagcaaaatgaacggtagggtgccagatgcctatggcttgtcctgttcacctctgaactcatctgcaaacagggaccactttaccaatagccaattagaccacagaggtgataaacttgaggcccaactgtcactcaattcccctcagtatgacccaaccaatactacatatcatcacatgcctcctctctgctaaagatataatgcagatttccaataggattgttgcagagacctccagactcaatggttcagataaatattctgagagaagaggcagaacaaattgcctttgcaacattttcagtttaaagctatattttcatgtgtgacctagggtctctc

SEQ ID NO: 6188 - DNA, 1423 bp, mus musculus
gttctaatctaaattttaaccagtagttttttaatgtggcctgcttttatacactctagctaatactagttttattatttggaattgttttcttttccttttaatacttcttcccatgtattttattattttattttattttatttgtttttttgagacaaggtctcactctgtcacgcaggctggagtgcagtggtatgatctcagctcactgcaacctccacttcctgggctcaagcgatcctcccacctcagccccccaagtagccatgtattttaaaatcaaaaggggaaggacttttgcttccttccatgaaggagtagtaattgcatggtctttgcacaccctcctccaaaacccataaacaactagaaaactaaatgaaatatataaaatgtctgttttccagcattagacaagaggcagtgtaggtctatgatccctgaaagcatgacttgcagcctggaaacaatttcctaacctcagggcaggaaagggggcccatgcagagcttggcagtttctctgaattgaggagagataggagctcagaaaggctgaggcagctggaaattacagggcagcattccagagaaggaggagctacacaaaggaagaatgccagaaacctgcataagagtcccattgagtggctgaatccaaaactgcacatgtgtaagtgaactccacaaatccaggcaaagaacaactgccggggttttctatcggaacaattctctgagctcattcagggctgaatgacattcaacgttttattccttggagtggaaagactccatttgaatatctaggtattcaataaagactacagaaaagccaagccttagtagtaggaataaactaacactacaataaggctactctagacctatcctaacaaagcttaacaataaggctcaaaaggataaaactgatatgcaagtaacggcctgccaaagcaaatatcaacactctaaaagacgataacaaaatccaaatagtcaataatataacattcctaacatctaacatccaataaaaaattgttagatatgccaagaagtagcaaaatgtgacccttaatcatgagaaaaataagcgaatggaaataaacccaaaagtggctaagaagtacaattagcagacaagaactttaaaagaactactatcaaaacccagcaatttaagagaaagcaaggacataaataaagaagttgaatatatgaaaaggagccacacaaatgttctagagttcaaaaataacatatctgaagtgaaaaaagattcacttaatggtcttaacagcagataagacactgtagaaaaaaggccagcaaacttgaagatatagcaatagaaactatcctaaatcaagcacagagagcaaaaaggctggaaaaaaatgaatgaaactttagtaagc

SEQ ID NO: 6189 - DNA, 1514 bp, mus musculus
aaaaaagtacctgtgaggtaagggatacgttaatttgcttaactgcagtaatcacttcactatgtatatgtgtatcaaagcatcatgttgtacaacttcaagttatacaattttaaaaatgtgtaaatgcaatagtaccaggagccactaaatgattcatattctaatcctctaattctagtattatttctgaacatttatattttatattaatataatcttttttttttttgagacagagtttcactcttactgcccaggctagagtgcaatggcgtgatctcggctaactgcaacctctgcctcccaggttcaagcaattctcctgcctcagcctcccaagtagctggagttacaggcatgtgccaccatgcctggctaatttttgtatttttagtaaacatggggtttcaccatgttggccaggctggtctcaaactcctgacctcaggtgatccacctgcctcagcctcccaaagtgctgggattacaggtgtgagccaccatgcctggcccaatatagtcttataatatgcacacagccttgcagtgcttagcccctctgtgaataggcccagcatatcctcttcatcttctccccctctgccaagtcccctccacaggccacaacactggtcaccctccaaacacagacccagagtgagctgagcacaatggccatgagatgatcctccctccatgccctcccatctgtcaagtgaggacaggggagggctgatgcctaaaaccagaccagtcagactccaactcagccctgtccctgtcctttgtcatctggcagcattctgtcacaaggcattgcaagtggacattagtttacttaaggttcagcatggaaggccacctggccaccaaaagctggcaaagaaatgaggactcctggcaggttataagcagcctgcagcaactcctgaggacctgaaagaggctgcagaataaacttgggcttccctctttacaacgtgatgtgggatgcacagtgcttctgtcatagagtcaggcaaactttatgtgtggctgttaaagtagggagcaaaccttgtgctctaatctgtctgatagattagccaggaaaatatcactgaaaacattccatggaatttgttttaaggttcccagtcagcacaagctattaaaaggaaacaaagtcatagcttgctcctcagtaagtcttatctttctgttgtctgaggatttcccatgatattaggataaggtttgtataatgtttgcttcaggtgacttagtcatcattagaggtggagaagagggaaaaactcagtgggttatttctgcctaaatgccccctcaaagccgccaactgcttgacctggcttaactcgaacaactagaacagtggttttctttttcttttttagaatgggtggctctccaaacttgaaatggggagaggggcctgaagatgcagtggtatgactgaagctaccaaaactgtcacccaataccatcctcctctgtttcaacacaaaaga

SEQ ID NO: 6190 - DNA, 1349 bp, mus musculus
aaatgaggagagtaagaaaacaataactctgaaggattactgtatgtaaggttattggcaaggtgcctgtctcacagtaagctcttgataggtagtggctatttttggtggccagtctccgaggtgggcccagtgactctgacctcctggtattcatgcccttgtatatagtcccctcctacactgaataggactgatctatgtgaccaataagatattggagaattgcctgagtgtgacttctgagactaggttgcaaaaattactgaggcttctgtcttgctctcttttggatcacttgatctggggagagccagacaccagacaccatgttgtgaggacacttcagcagccctatggagaagtccagatggtgaggagctgggcttcttgccagcatgaggtgatcatccaagtgagccatcttgtagactgattctccagccccagtcaagctttcagatgactgcagtcctggcgatttcttgactgcaacttcaagagagccagttaagccactcctgaaatcttgacttatagggactatatgagataaatgtttattgtggatttaagctgcaaaatttggggggtaacttgttacggagaaatacgtaattaatacatgcttattgtaaatggctgtacaaatatcaatggagtcacctcctacatggtcagttccggttcttgactgatctctgttcacaggggctacagggcaagatgactggtttaaccaaatcaggacttccccttccccagatatgaagaggtaactaaagaggacattctcagcaacttagtattttcagatcctcacctgacctgaggaaggtgagaatgtctgtcatcttggtgctatctgccacatcagacaaactttcagagaatatcacaggacaccaagtcagataatctcctcttacttgtgtcctgtatgtaggtcatctcttaacatagagggacaagtcttgccccaagagctaatcttggggtcccttctctgttcctcacccccagcagctggcaaactgtccacatgaatccctggcatgaatccaccttcccaagcctttcacatcacaaaactgatgaaaatggtaacatttttaaagtagccaatatttgacaaagttttgagagaaacccttggtttttcaggctacacatgccttggcgatattcacagcttgggtgatgggcacagagacatttggcttcaagttctcacacagttgtgttactgtaactccaaacccccagtcccgtgcattccccagcgatccttgctatctccctagagttttggccgctgcttctggggtgttccatttctcaacaattgc

SEQ ID NO: 6191 - DNA, 719 bp, mus musculus
atacatcttaataaattatctcaattgagaataaaagagtcatctatcttacatattgcttttcttgagaaagttggaattagaccaattctgtcatccttttcccctcttaggtcaccattttcaaatgaatgtggtgtgcaggtgctctgtctggatgctgagcttggaaccccaccctgtaggccaaattcattcatgctagtaagagagagcaaaagtgaggaaagtacttacaattctcaaacatgaatcattcaagaatacagaaccagccatttattatccatacatggacccagcattcttctacgctaaactccccaaatcatcatttgagaggtctatctactctttcaagacgagctcaacactcatctcccatagccaactaatgaaattattgccttcattaataaaaattagtccagaatccccagcattggccctaaaaatatatctcagtgagaaaggaaaactggtgtaagcctcagaggatgcctcaccctgagtgtctctgtggcctctctcactacatagtgcagccccagctccactggcctctgaggttggggagggaaggagaattctcctcccttaacattcttgtccaatcacagacacaaaatcactgtttgcattcctcctgccacagccaaggaagggctgaaattgtcctgttctagtaaggcttggggacaacaaaagcacccccagag

SEQ ID NO: 6192 - DNA, 340 bp, mus musculus
gcttccaggtagcgacatggcataatgcatgtggatcgcattcctgtgcacgcaattggtatcacaaggctcttactccaacaggaagggctttactatctgaagaggaaaatgtatacgaaagacagaataaaccttcgaagtttactttaatcaaagaatagtcacacaattctctttgcaaaatgcacctcttttcttaaatggttgtatttcctgtttaaatgcacgcctagaaacatttcaatcatgctatggttctttttcatatctttagtgttatttttattataaaaccaacatacacatacggtaaaagtttctagacaataaacaatgt

SEQ ID NO: 6193 - DNA, 1362 bp, mus musculus
gtttgtcctccataaatagccatcattacatacaggattctccaactagcaaggtggggagatgatccaggatgggcaggggagagagagagaagcagcaccagtcctgaaggtcagaaccagacctcaaaacatccccactagtccacggctcagaggagaaaagaagactggatatataaagggaagggaagcagaaaagagagaatggatgaaggagtgggcatgggcagacccactccaatatttgcagaaccaggggcaaaatgataaatggagacccatgtaccacgtatctaaacatttaaaatgtataaatcagtgaacatcaagtgaacagactattaagtaaattatgtaatattttcttatcttgacaaatatatcttcatagcaaactggaagagcaggcttggtcaatttagaattcctggactcctgagagttacagaatgcaataatgcaaggagggtggtcacctagctcagtctctggcccacgacctgctctcattctctttccactctggctctgtccccataccatgaagggcttcattgaaatgcataaatacacgagcccatacattcaagctccatccacacctcttgcaaacagcttctcttggtgacccctcagacctaggaggagtaccttagcaccagaggctggtataggggaagatatccatgtgggctctggaaataggatcatgccttttggatacagaattctagggtcccagtttcttggagcatggtcttgcaggggagcagactctagatagtcacaattccttggcctgtggattcttcaacccacgggaagggtaagaaaaacaggagcagattctctgaagcatgggtccaggacaaggaccatcttgcccaggtctaaggatagaccagatagaaaagaggaggaaacatcaaagacataagagagaggaaaggaaataacaggtgaaaaagaccttagaagaaattcttcataaagtggcttttactgttacctatgtacgttgagggacctgatgtttctctgggcatcgagggaatgggaacgattcttcctctgaattagccttatccccgaatggtggggagaagtgaatgttcgtgcctgcttcatgttttattcttctgcataaattacagtgcagagactagagacatctaattttcctgttataataaccatagatctattataactttcttgctacacattaaagggaaggaaaagagggagggagagaggatggaagttagtcagtcaatgatcagagaccagaagtttctctggttgaaacaaaagaatatttcatgagacaaacaactgaaaagcaagtttacacagaaa

SEQ ID NO: 6194 - DNA, 1282 bp, mus musculus
tctctatccaaggaagttatagtctagtaatggagaaatcacaaatgagtagattaccagtctagataccaagtgtcagtagccataagacaagtgtaaataaagagacttcgagcagggagaacatgttacagggtaaggccctgactaaagcagtggagagaaggaatggatttcagagctactccagaggtagagtcagcaaggatttgctcattgattagcttcgagtggggaggaggggaccaattaatgaaagaatggcagttcattaaattaggtaaggcagaatatagattttagcaggatggagaaagatgaaaatgtttagtttgagaccctctcattttgaggtccttggggacaatcaaagaggagtgccaatgggctattccccatttgagctgaaatgcccagagatttggaagtcatcttgtttaagacaacactgccaatgaccttaatgagggagagaatggtttcccgctgaatactatttatggggctggtggtggaggaggaatcattaaggaggtagaggagaagccagagaaaggagcagccaggagaaaggggaggtctggaacttgctggaagaaggaagggatgtatagctttcaggcgccgcagtcttgcagtagaggctggcaattaagagttattggctgctgcagacatctcttaagatgaacacagtgagcacaataaacacaatgagccagactagtaagtttttaagacttcttattgaatgaagtgaaaatgtgtcctgctgatttccagcccctggtcacaaggcaggcttttccaggacatcaggcattctcccttcccatttgctgtgactcagagtggattctgtggaagtgagccctctgacttagcttctgttcagtggttgttgaggggggcaggtatggttctaagattacccctaggcaggaaagatgtgcagccattttcagctcagccctaccccgactctagtccattagggcagaacaagcagcgtgctggcacctcttcccttgcatcagaggggctggcctcccactcactggcttatttcctcctaagacccatccagtgaagcagagaaaatgatcattattggttcaactgctttattgctgagggttacaaagatgagtgatatttaggaactaaaatattatcacagccaggtgttgactaatacaaaatagatgcaaagcaacatattctaaccccaaatgtacttttataactaaacctgagctaattaatagtgaaacatcctgtg

SEQ ID NO: 6195 - DNA, 249 bp, mus musculus
ttcagcttgaaaccacatctactgtctctttccacatctatggaatctttttaaacaaaaatgcaaattttctctatacttatgacatacctagaaaatttgagcccatagtaaatatctcagaaaggccatcccattagcctaagtttagtaaaagccaaattccaagacctcctagcaaagcagaaataccagtaattgcgataaataaatattagtggactcaatactctagtgaaaacatagact

SEQ ID NO: 6196 - DNA, 1037 bp, mus musculus
tttttacacatctattcaacaaacatttattgaggggttattatgtgctaagcactgtgctaggtgtcaaagaagtaagcaatgtatgttccttctgagggcaaacacatcacgcatttctgcagatgccctcttgcttgtttttgcacttatctagtactaaaatcagccaaagagtattctctctccagagcagatgcctggcacaatctacttttgagcctgcacctcctcgagactcaaaaaatactctggaaattggctgggtgtggtgactcacacctgtaatcccagcactttgggaggccaaggcagaaggattgcttgaggcctggagtttgagaccagcctggtcaacagaggaagatcctgtctttacaaaaaataaaaaattagctgggtgtgggggcacatgcctatagtcctagctactcaggaggctgaggcaggaggatggattgagtccaggagttcgaggctacagtgagctatgatcatgccactgcactccagactgggtgacagagcaagaccctgtctctgaaaaacaaaaaataaaaaaaatcaagaaatagagtcttagaactgctgactggacaggacaccaaatctatctaccatatggaacccatgaggaaataaaggattcaagagtaaatgactcctctgaagccacccacagtggccaatcttatttatcttgagtgacttaggggctggtcggggtggaggtcaaggaatatcctcaaggatagctagatgtcctttccagtctggagattctaggcagaccagagggaatggtggcgacctggctgccagctctctggagtcgagaatctgaagcaatgtgagctgccgccggttcatgccactgccagtgtttgcctgcgccatcactatcagcatcaaactcactccctgctttgttaagtgctttgggatttctcaagtagaaaaggtgctatataaaatcaatcacaggaaaccctgctgctggcagctcagaacagctacagtaagcagtgtccactcaa

SEQ ID NO: 6197 - DNA, 1221 bp, mus musculus
caacttggtaaagctttgaactattccataacagtcattttctggaataagatactattgtaaatatacaactaagatgtgaatgtttgaataataattttatttcaatttcacatgaaaatttagatgtctcatatactcacccattttaggggcaggaagtcaatgaagctgcttgcgacatcgcccgacaagtggctgatgaaggagatgctttggtagcaggaggagtgagtcagacaccttcataccttagctgcaagagtgaaactgaagtcaaaaaagtatttctgcaacagttagaggtctttatgaagaagaacgtggacttcttgattgcagaggtaaagaaagatgtggtgaaagataagacaaatacacctagtacattttctctaccttttgctttcaagagtactgtgtggggttaggtgacaatcataactagcaatagtaatatttagtttttgaaatcgttttccaattcagggctactactaaatttgatttaattaatctgatatggtgtttttcaaactttttgactgcaatttacagtaagaaatcattctatttcattttaaaaatgctaatgggtcacaattcaaagtttgaaaacagtaataatgaagtttttaagcaatagaatacattttcaaattgttttgggaaaggctgggcacggtggctcacacctgtaatcccagcactttgggaggccaaggcgtgtggatcacgaggtcaggagtttgagaacagcctggccaacatggtgaaaccccgtctctactaaaaatacaaaaattagccaggcgtggtggcgggcgcctgtaatcccagctacttgggaggcggaggcaggagaattgcttgaaactgggaggcaaatgttgcagtgagccgaaatcgcaccacagcactccagcctgggtgaaagagcaaaactccgtctcaaaaaaaaaaaaaaaattgttttgggagaaacgagattaaaagtactctaaccttaactgattccagtattttgaacacgttgaagaagctgtgtgggcagttgaaaccttgatagcatccggtaaacctgtggcagcaaccatgtgcattggcccagaaggagatttgcatggcgtgccccccggcgagtgtgcagtgcgcctggtgaaagcaggtgatgatagatttcaatcagtttgtgattagtaagtcttaaaagaacacact

SEQ ID NO: 6198 - DNA, 1756 bp, mus musculus
attggctcaacttgggtcatttgctcattcttgaaccaggcactgtgtagggagaccacagtgttccagttggttgagagtggatcaacattcctcccctagaactaatttgtgagtgggggaagagtgggccttcagagaaaaataggcggctgttactaggaaaagagcaaagggatattggatggccagaaaagaacatacatgcttaatatagcaccttgtccaggggttttctctgcaggaacctggcctagcagttgaaaaggcaatgtctgaattcctgtagtgaccagttactcacaattttaaggaaattcagtctatccccagataacaccaccttataggaaagtcttgtattatgccaatgtctagctttctttggctgtcacctgtgaccctagttttgctcttgggtatacccctgagatatgtgaaggccattctcaagttctcaggtcctttcttttcagactcaatacctgttgctatgtcttttcctaatctgaaaacatttttagtcctttttctatttttgaccctattttttctaagtttaggcattttggtttagcatgagcgatccagatcacagagtaccaaaatgctttatgctttcaaaattgattcatactaagctgtttaagtttctgtatataatctaagaatatgtatagagttcatttgtttactcaagtagtatgtattgagcctctactacaataattcttaaacctttgttgcacattagaataatcacagaaacaaaaaaccaaacaccgcatattctcactcataggtgggacttgaacaatgagaacacctggacacaggagggggaacatcacactctagggaccgttgtggggtggggggaggggggagggatagcattaggagatatacctaatgctaaatgacgagttaatgggtgcagcgcaccagcatggcacatgtatacatatgtaacaaactgcacgttgtgcacatgtatcctaaaacttaaagtattaataataataataataaatattttttacaaaagaaaaaaaaagaataatcacaaaaacttaaaaatcctgatgcctggcctacaccccaaaccaaaattggactctctaggatagggaggggataggaactcagacaccagtattttttttttttttttgagacagagtctctcccagtagctgggactacaggtgcccgccaccacgcccggctaattttttgtatttttagtagagatggggtttcaccgtggtctcaatatcctgacctcctgatccgcccgcctcggcctcccaaaatgccgggattacaggcgtgagccaccgtgcccagccaggcaccagtattttaagctccccaggtgaggctaatgtatagctgaagtggaaaacctctgctctactaagcagtaggcctccttcaaaatacaatgtcaatgggtataggtttccttaaggtttttcagaaaatgaatttgaggcatgtctccatcgtttgcctctgtctgaccttgggcaacttctgtataggattattcatcaagtcacatcagagaaagcaacctggggcaagccagctctttagccatggataattatcaaggtttctgagaaaaagtacttgtattaatattcagttaaaaacttgcttttatatacttttctcagtttggttgataattcctggaggatgatggtatctgaatttattaaactgacctcatgcagaatcaagagta

SEQ ID NO: 6199 - DNA, 1286 bp, mus musculus
agtttaaggtctcatctctgccgtcctgaaagcccgtatctatggaggagatgagacggtgtatttgaaggcattctctgatgacttgggcgggggttagtaaaggctatacatattcttggaaggggaagacctttctggctttgtggtcagggagggttacaggaacatctgaaatcacccttgatgaaagagccatgtttaacctgtaggaagaaggaagaactaggctcattttggcttaagttgaaagtgtttaggttcaagttggtaataatggttgggcaagactggaaaggaagatagagctgtgtggctgggggctggaagtgggatagaaatttggttctattattattattattattattattattattattatttgagacagagtctcgctctgttgcccaggctggagtgcagtggcacaatcttggctcactgcaagctctgcctcccgggttcatgccattctcctgcctcagtctcccgagtagctgggactacaagtgcctgccaccacccccggctcattttttgtatttttagtagagacggggtttcaccgtgttagccaggatggtctcgatctcctgacctcatgatctgcccgcctgggcctcccaaagtgctgggattacaggtgtgagccaccgcgcccagccaggaatttggttctattattaatcaagtttactgtggggaatttttcttgatgtcaaataggtctccacaaaaatttgcagtagcttggagccatgtctctcaatgttagccatgaggaatatccacttgtatgcttcggtaccactttttgaaacgggttaggacaggatttccagaacttttactttgcaaatgtctttgttaatcctcccttacttgataacctgttctctaagcagcgtctgccctctgaatgtcgacggactggcgtcagcaatgacagagaccaagctgggggcatcccctttgcccctgtttcctctgctcccagcatctgctcaagtcaataccaacatgttgggatctctgctgtggcaactgcaggacactgaatggtggactctccatctgggagtctcagttgctaggtctcgtcccttgcagccacctgctctcattgcgatgacttgggctctctgcatggttgtggggctcactgggatctggtgaaactgatggcagcagccctgcccaccctaagggcagctgctcttcatcctgaggatgtctctatctgagggcatttgggtgcaaagccacaaccctgggcagcccgc

SEQ ID NO: 6200 - DNA, 1320 bp, mus musculus
actcaaaggagagaaaaacactcaaaagattataatatgtacactatactattctgaatagtttgtgttttctcctataggaaatgaggtatcttcatttgttttaaagttttcacttgaagaagtgatttgaatacatttatgcttatgaaaagataactgttggcagcctaaaagatggatctgagggagaagaaacagaaaaaaaaaacaaatggggttgtgtaacaatcatcaacaagatgatgaaaaaacttgattttgacagtggcagtgggcaaggatggcaaaaataccaaagatatttatccagccttgtcttttcatctgtgtttcagttgtatgtttctcactggtctctaaaatacctctaattgtgtatcaactcaaattcaactaagtaatgaaaataatagccaatatttattgataccttactttgtggtagacattgttctaattgcttcatctatattaactcgtttaatcccccagcaactctataaggcaggtgctattaatatacacattatctgaaggaggaaccattgtagagtttcagtaactgaccagtgtcacacaggatccttattcttcctctgtttttttgaaaaccataatgttacattgtctgaaacccggcttgatcatttctcttaccttctgttctatttgccttcatttctctgtatcgctatctctgtctacttttcttcctaacctggcagtctgcatcattttaaatgctggtttctctgccttcaattttcccttattcctcttctttttactgccagagaaatatcactatcatcatgttattgagttgattaatgtcttggaaagatgtaataattctctatcactcattgaatcaaatatgtcatagtattcaattcccagtaattgggctcatatcatgaatccaactctactttccccacattacccagaagagaacagtttcctttcttctgtagttccaaaatcattgcttcctttgtgcatatctatgttgttcttctaatctgaattgttttttattcctttacatcactttaacttttcttcaagatgtggcttaaccaagactgtctcccatgaaattaaaccaatgtgtggttgttttcccctttctgtgaattctctaccatttacaataagctgtgttctgacctatctatgcctttagtagagcactagtctcccaggtaatatgaagacggttgagcctgccctcatgaccaacttaactgacctgagctacatcaaggtgttagtgtgtggaggataggtggcaatgcctctgcttaggcataa

SEQ ID NO: 6201 - DNA, 962 bp, mus musculus
accccaaaagcaatgtgtctgaaagaaataattcactatggtgtgtgcttcagagggatctggaatatggagcttgaaaactagaaggaagagaatggacatcttaaaactattttaacaacaacaaaaaacgagcaataaacatgacattttaaaaaaaggatagactgtaactcctaaggaaatcttgtttccccctgtgacgttgagtctgtattctgctgcagtcttaaccatctcattcaacagtggccgcttgaccatctcattcaacagtgcccaagacagtcatttttcagccaaggctctcaaaagctaaagccaggtaaaggtgttaggtacttttaatttagattaattaatcaattttgatacataggaatgaaacatttaagtctttccttaagtttattattttaatacctaaagagatagactatatggcaatagtgaacttaattatttaattgaacttagctttaaacattttattgttaatattgttgttgggtttttttttttttttttttttgagactgagtctcgctctgtcactcaggctggggtacagtggtgctatctcagctcactgcaacctccgcctcctgggttcaagcagttctctgcctcagcctcccgagtagctgggattgcaggcgcccaccaccacgccctgctaatttttgtttttttagtagagatgcggtttcaccatcttggccaggctggtcttgaactcctgacctcgtgattcacccgcctcgggcctcccaaagtgctgggattacaggcgtgagccactgtgcctggccatgttggttttaactaccactgcaaacaaaggggttatcgtttatagacttccatacttgatttgacttggaagacaaaaccattagctaaatgggactggtaaagaattttcaggtcattcagaattgactaagatttggagaaacagt

SEQ ID NO: 6202 - DNA, 1326 bp, mus musculus
gtggtctttaagtttttccctttggcctgagcatttgccatgggaataaagaaaaaacaaacacaagaagacttattttctatggcttgtcaatatggatatcagaagcttgattgatttgtgtggggatcaattaggtcatgtgtaaaaggctgatggatttctagaccttgttgcttcaaacattacataaaccaggttatatccttcccagaagctgtagtctggttacaattcaaggtctctgtaattaactcatgacccaaacttctttctggtggaaaatagtgcttttccttttctcagtaagaaagcacactggaatgatgaatttgagtagatccactgaacaataaggtcttcctaagctgatctgtcctatatctgctgctaccagtgctgactcatggcatcaactctggcagcatttccttcactgcacctttccatctaactgatccttgaatcttcctttttcatttccccttctctccaggactcatatccctccagaggcccgctacttaatctatcagaagctctgtaaactctatatttagtatagactctgtctggtttacttatctgtattttcgctatcatcccccttgttcaggacaagggtgtgggtctttgcttctctcctgggccaatactacggctttctaattggaatccttgtttcccctcttgtgcatgcaatctattctttacacagagctagtcgtcttttttttttttttttttaatgtgcattgtgaatgcagctggaggccattatcctaagcaaattaatgcagggacagaaaaccaaatactgcgtgtcctgacttagaagtgggaagtgggagctaaacactgggtacacatggacatgaagatgggacaacagacactggagactactagaagcaagggagagggaggagacaagggctgaaatctgcctattgggtactatgctcacaccaagggtgacggagttattcatactccaaacctcagtgtcatgaaaatacccatgtaataaacctgcacacataccccctgaaactaaaataaaaactgagattataaaaaagtacatcaaattatatatctctcctgctttccacttccatttagcttaaaattcaaattccttaaccttgcaagatttatatcctatctcaatctatgcctctttcttcttggaccactgtgctgtctactctgattttttttttttgacttctcagaaacactagacttaaatctagacctgtgtactagagtttctctctaacagagactatctctctgttctcaacctccttcccaccccat

SEQ ID NO: 6203 - DNA, 1140 bp, mus musculus
atgtacacacacacatacacgtatagaataaaacttctcgggtatgtgttatttatgattatgtattcataattataacgaagctaagtcaccattatcttttctgctttaaagtatcagaagctgctaccttgccatgaaaaagtattacatgctcctccaattccttccccaccatatttatccaacaggaaaggaatgaataataaaactttgggctttttttcccttcttttttttccaggtgatgtgttccacctcactgtccccagtaaattcaccttcgaggaggctgcaaaagagtgtgaaaaccaggatgccaggctggcaacagtgggggaactccaggcggcatggaggaacggctttgaccagtgcgattacgggtggctgtcggatgccagcgtgcgccaccctgtgactgtggccagggcccagtgtggaggtggtctacttggggtgagaaccctgtatcgttttgagaaccagacaggcttccctccccctgatagcagatttgatgcctactgctttaaacgtaagtgtttgatacctttttaaaaattacagttttaaaaaaaatgcttcgaagcatgcattgatgttcaactagccgttggagtggattccatgtcttgcagtgtgtgcacggaatggaaacagttcagtgattttcaaaagcaagcaaactgaacagcagtgatatggttaaaaccacaggaattttggcaaatggatttttagaggggtgaggaaatatcaggttaagctgtaactgtgctctgttgtgtccagagccacagagcatttttctaagtattttatattaattgcagtccttaagttttgcaatttgtttattggtgttacaatgccaaggccaactgaggctgagttaaatccttaagattgttgattttgtcttcggtatcactctgtttctttgagatggcaaagaatttaaatttcagtaattacaggtgagtatttgaagctgacatggatactcaaaatgttcaagtcataactaaaaatgaaccatactatcaataaaaatctccatttatgtcaagtaatggaaatacatgccttctaatcattaattctgtagtatcatattgacgtacaatatgtgttctt

SEQ ID NO: 6204 - DNA, 6936 bp, mus musculus
tagagatgttattgaattggcttaaaaagtatgaaataagagaaacaaaaatattaggctaagaaagctacagtttggttttttaaaaatatttctgtgataagaaaaaacaaaggtttcagctgccaaccatagagcttcaaaacatacagctaagcaaagactgacatactcacatataccatctcactaacacaattgttagatgatggtggaaaatgcagccaccaatctcattttttttaatttttgttttgagacaggatcttgctctgtcaatctggctggagtgcagtggtacaaacacagctcactgcagccttgaccttccgggctcaggccatcttcccacctcagccttctgagaagctgggactacaggcatgcaccaccatgcctaatacttcactttttttttttttttgtagagacagggtttcaccatgttgcccaggctggtccaaaatttctgggcttaaattatcctcctgcctcagcctcccaaagtgctgggattgcaggtgtgagcaactgtgccctgtcagatatcattcttttttttttttttactaatctcatggcaggctttatttctttttcactatatttctttttttttaaattattttattttattttattttgttttttattatactttaagttttagggtacatgtgcacattgtgcaggttagttacatatgtatacatgtgccatgctggtgcgctgcacctactaactcgtcatctagcattaggtatatctcccaatgctatccctcccccctccccccaccccacagtagtccccagagggtgatgttccccttcctgtgtccatgtgatctcattgttcaattcccacctatgagtgagaatatgaggtgtttggttttttgttcttgcgatagtttactgagaatgatgatttccaatttcatccatgtccctacaaaggacatgaactcatcattttttatggctgcatagtattccaaggtgtatatgtgccacattttcttaatccagtctatcattgttggacattcgggttggttccaagtctttgctattgtgaataatgccgcaataaacatacgtgtgcatgtgtctttatagcagcatgatttatagtcctttgggtatatacccagtaatgggatggctgagtcaaatggtatttctagttctagatctctgaggaattgccacactgacttccacaatggttgaactagtttacagtcccaccaacagtgtaaaagtgttcctatttctccacatcctctccagcacctgttgtttcctgacttttgaaggattgccattctaactggtgggagatggtatctcattgtggttttgatttgcatttctctgatggccagggatgatgagcattttttcatgtgttttttggctgcataaatgtcttcttttgagaagtgtctgttcatgtccttcgcccactttttgatggggttgtttgtttttttcttgtcaatttgtttgagttcattgtagattcttgatattagcccttcgtcagatgagtaggttgcgaaaattttctcccattttgtaggttgcctgttcactctgatggtagtttcttttgctgtgcagaagctctttagtttaattagatcccatttgtcaattttgtcttttgttgccattgcttttggtgttttagacatgaagtccttgcccatgcctatgtcctgaatggtaatgcctaggttttcttctagggtttttatggttttaggtctaatgtttaagtctttaatccatcttgaattcatttttgtataaggtgtaaggaagggatccagtttcagctttctatatatggctagccagttttcccagcaccatttattaaatagggaatcctttccccattgcttgtttttttcaggtttgtcaaagatcagatagttgtaggtatgctgtgttatttctgagggctctgttctgttccattgatctatatctctgttttggtaccagtaccatgctgttttggttactgtagccttgtagtatagtttgaagtcaggtagtgtgatgcctccagctttgttcttttggcttaggattgacttggcgatgtgtgctcttttttgtttccatatgaactttaaagtagttttttccaattctgtgaagaaaggcattggtagcttgatggggatggcattgaatctataaattaccttgggcagtatggccattttcacgatattgattcttcctacccatgagcatggaatgttcttccatttgtttgtatcctcttttatttccttgagcagtggtttgtagttctccttgaagaggtcctgcacatcccttgtaagttggattcctaagtattttattccctttgaagcaattgtgaatggtagttcactcatgatttggctctctgtttgtctgttgttggtgtataagaatgcttgtaatttttgtacattgattttgtatcctgagactttgctgaagttgcttatcagcttaaggagattttgggctgagacaatggggttttctagatatacaatcatgtcgtctgcaaacagggacaatttgacttcctcttttcctgtttgaataccctttatttccttctcctgcctaattgccctggccagaacttccaacactatgttgaataggaatggtgagagagggcatccctgtcttgtgccagttttcaaagggaatgcttccagtttttgcccattcagtatgatattggctgtgggtttgttatagatagctcttattattttgaaatacgtcccatcaatacctaatttattgagagtttttagtgtgaagggttgttgaattttgtcaaaggccttttctgcatctattgagataatcatgtggtttttgtctttggctctgtttatatgctggattacatttattgatttgtgtatattgaaccagccttgcatcccagggatgaagcccacttgatcatggtggataagctttttgatgtgctgctggattcgttttgccagtattttattgaggatttttgcatcaatgttcatcaaggatattgatctaaaattctcttttttggttgtgtctctgcccagctttggtatcagaatgatgctggtctcataaaatgagttagggaggattccctctttttctattgattggaatagtttcagaaggaatggtaccagttcctccttgtacctctggtagaattcggctgtgaatccatctggtcctggactctttttggttggtaagctattgattattgccacaatttcagatccagttttggtctattcagagattcaacttcttcctggtttagtcttgggagagtgtatgtgtcgaggaatttatccatttcttctagattttctagtttatttccgtagaggtgtttgtagtattctctgatggtagtttgtatttctatgggatcggtggtgatatcccctttatcattttttattgtgtctatttgattcttctctctttttttctttattagtcttgctagtggtctatcaattttgttgatcttttcaaaaaaccagctcctggattcattaattttttgaagggttttttgtgtctctgtctccttcagttctgctctgattttagttatttcttgccttctgctagcttttgactgtgtttgctcttccttttctagttcttttaattgtaatgttagggtgtcaattttggatctttcctgctttctcttgtgggcatgtagtgctataaatttccctctacacactgctttgaatgtgtcccagagattctggtatgttgtgtctttgttctcattggtttcaaagaacatctttatttctgccttcatttcgttatgtacccagtagtcattcaggagcaggttgttcagtttccatgtagttgagcggttttgagtgagattcttaatcctgagttctagtttgattgcactgtgatctgagagatagtttgttataatttttgttcttttacatttgctaaggagagctttacttccacgtatgtggtcaattttggaataggtgtggtgtggtgcagaaaaaaaatgtatattctgttgatttggggtggagagttctgtagatgtctattaggtctgcttggtgcagagctgagttcaattcctgggtatccttgttgactttctgtctcgttgatctgtctaatgttgacagtggggtgttaaagtctcccattattaatgtgtgggagtctaagtctctttgtaggtcactcaggacttgctttatgaatctgggtgctcctgtattgggtgcatatatatttaggatagttagctcttcttgttgaattgatccctttaccattatgtaacggccttctttgtctcttttgatctttgttggtttaaagtctgttttatcagagactaggattgcaactcctgcctttttttgttttccatttgcttggtagatcttcctccatccttctgttttgagcctgtgtgtgtctctgcatgtgagatgggtttcctgaatacagcacactgatgggtcttgactctttatccaatttgccagtctgtgtcttttaattggagcatttagtctgtttacatttaaagttaatattgttatgtgtgaatttgatcctgtcatgatgatgttagctggtgattttgctcgttagttgatgcagtttcttcctagtcttgatggtctttacattttggcatgattttgcagcggctggtaccggttgttcctttccatgtttagtgcttccttcaggagctcttttagggcaggcctggtggtgacaaaatctctcagcatttgcttgtctgtaaagtattttatttctccttcacttatgaagcttaatttggctggatatgaaattctgggttgaaaattcttttctttaagaatgttgaatattggcccccactctcttcttgcttgtagggtttctgccgatagatccgctgttagtctgatgggcttccctttgagggtaacccaacctttctctctggctgcccttaacattttttccttcatttcaactttggtgaatctgacaattatgtgtcttggagttgctcttctcgaggagtatctttgtggtgttctctgtatttcctgaatctgaatgttggcctgccttgctagattggggaagttctccttgataatatcctgcagactgttttccaacttggttccattctccccatcactttcaggtacaccaatcagatgtagatttggtcttttcacatagtcccatatttcttggaggctttgctcatttctttttattcttttttctttaaacttcccttctcacttcatttcattcatttcatcttccattgctgataccctttcttccagttgattgcatcggctcctgaggcttctgcattcttcacgtagttctcgagccttggttttcagctccatcagctcctttaagcacttctctgtattggttattctagttatacattcttctacatttttttcaaagttttcaacttctttgcctttggtttgaatgtcctcccatagctcagagtaatttgatcgtctgaagccttcttctcttagcttgtcaaagtcattctccgtccagctttgttccattgctggtgaggaactgcgttcctttggaggaggagaggcactctgctttttagagtttccagtttttctgttctgttttttccctatctttgtggttttatctacttttggtcttagatgatggtgatgtacggatgggtttttggtgtggatgtcctttctgtttgttagttttccttctaacagacaggaccctcagctgtaggtctgttggagtaccctgccgtgtgaggtgtcagtgtgcccctgctggggggtgcctccaagttaggctgctcgggggtcaggggtcagggtcccacttgaggaggcagtctgcccgtgctcagatctccagctgcgtgctgggagaaccactgctctcttcaaagctgtcagacagggatatttaagtctgcagaggttactgctgtctttttgtttgtctgtgccctgcccccagaggtggagcctacagaggcaggcaggcctccttgagctgtggtgggctccacccagttcgagcttcccagctgctttgtttacctcagcaagcctgggcaatggcaggcgcccctcccccagcctcgctgcggccttgcagtttgatctcagactgctgtgctagcaatcagggagactccgtgggtgtaggaccctccgagccaggtgcaggatataatctcgtggtgcaccgttttttaagcccgtcgtaaaagtgcagtattcaggtgggagtgacccaattttccaggtgccgtcagtcacccctttctttaactaggaaagggaactccctgaccccttgcgcttcccgagtgaggcaatgcctcgccgtgcttcagctcacgcacggtgcgtgcacccactgacctgcgcccactgtctggcactccctagtgagatgaacccggtacctcagatggaaatgcagaaatcacccgtcttctgcgtcgctcatgctgggagctgtagaccggagctgttcctattcggccatcttggctcctccccccccagatctcattcttaataaaagacaagtaagttaaaatcgtaatgaaaaactgtttccggtatcaggctggcaaagataaaaaggttcgctaatatactgagagcaagtgtatgggaaaaacagaattctatacttacacactattgctggaaatgtaaatggtggaaactccattgaagggaacttggcaatatttgccaaaattaaaagtgctcatactcttggcctagaattctattttaaaactgtatcctacagaaaa

SEQ ID NO: 6205 - DNA, 560 bp, mus musculus
aaaacatgactttcttttaatgacatttaatttgctctggttttcacaaccctatagaataggcagtaacattcttaaacttggaccaaaggtcaactttttactcagcagttgcagaatgactgaacatagtgttcctcttttccagcatctcctgcttcacaaaggggccattttgggtgtgcacatagctggcggtgggactgcagctgaacctatgagtgggtgtgaataatctttctgtgggttgagttgcacccaagaacaaagtaagacctgagcctcagaatgcagcctctgtactctcttttagagagttttatttatctttaggttaaataacattctagaatatgtaagcaaagtccctgaggtacatggtatagtggtcagaacagattgtacaaaagcaaagattgtattaggtatgttgtgtgcttagtgttctatgaacataccaggatcttacgcattttcaaaaaaatttaggtgttcggtctataagccaatctgggcagggcataaatgtgatgcatctggaagtataaaggtaaaatcat

SEQ ID NO: 6206 - DNA, 131 bp, mus musculus
atccctattgtattaattattcaattaagaataaacaacatattacaacttttgaaacatttagctgtgctggatttactgaagtatggtacaataattaacaacttcagaaatgatttttgagattttta

SEQ ID NO: 6207 - DNA, 84 bp, mus musculus
actattttgagtagctaaagaattaaatgtctggatgtctgattaataaagtacattgggctatctcagaattgtgaacagcaa

SEQ ID NO: 6208 - DNA, 38 bp, mus musculus
tagaaaaaaatggagtaaatactatataaccaaaaatg

SEQ ID NO: 6209 - DNA, 835 bp, mus musculus
tctgctcccggctttatattattgaaagtcatatttcaacagtctactattcatccccggtcacttgagcttagttatcatgaatgaaaattgtgctctctgcaagatgttgcccctcatagggagcaaatactgggttggaatgaccattaatgtgattttgtatgaaaacaaaaaaaaattattgtaagtcatcttacttggctttttagcagaaaatatgactcacaaatgatacctacaaagtaaatacaaaagtacattgcaacctttgtagtttcttaagcctaccagtcaagtcagaggagctggtttccaggtttatcccagaccgtcactacccctgggaggcctcatctgatttgatctgccaccacacctctgccttaccagctaccctctatgctcctctgcctcctcttcagtctctctggttcctttctattcttccaacacagccaacacctgctatcaggacctctgtacttctggtttcttctgcccagaaaacttctcctcctttatcggcagggttccctccaacaattgacttcgcatttttgttcaaatgttgtttcatcaaaggtatgtttcctgataatcatttataaaatagcaccttatcaccttccaccccctttccactgctttatttttattcctatcacttattaacagatgacatatacttatcttttgttaatgtctccttctccccacatcactactaaaatataagatgcatgagggccagttttatctgcttctgtttcctcggcttcagaaagagtgcctgacccatagcgggtccccagtaaatatgttgagtgaatga

SEQ ID NO: 6210 - DNA, 1027 bp, mus musculus
acttaatcataaaatcagtataaatcataaacatctcaggtgggactttattagaaccaaaaatgcaaaatgactatgcttctgtttttcaagaaatggtacagtcccctaacacagctgtagtgttgatcatatgtctaacagaactacttctaggtcctcttgaacagaacgctccattaggcattctgtgggctaccccttcccagcaggcttttgcccaacccagttgccatagacggccatcagacacttggaatgacatcaggagacaatctgagcggactctgacctaaagaattcaagctagggggagactgaagatatcaatgtcatcttggctgacaatagcattccaaaggtcaaccagggtgaaaagaggatagactctgagttttcagtgccttttcagcaaccaagtggctaacaagtataataaagcatccccccaaaaaagaaaaaatatcctagaggcatgatgtcagtgaaagggaaataaggcaacctgtacacttaagtcatggtattttaaaacattttacctcttccaaggtaaatctcatcctgaaccaattcccacctctcggatgacctacttctttctgctgtgataaccccagtataggtgaataaagaacttaatggtatagaagtggaaattctttgcattagattaagaatggctaatttttaccgcagtttgtcacttttccagccctgtgctttatgctgaatagctcatttaatccttaaacaaagttttgaggatagcacattttgttccacattttacaaatgaggaaactgaggcaaagggagatttaaaccatatgcataatcaaacagttaccatgtgatacagccaattggctgttggccacacagcttcttccaagtcagaccagccttctcggttgtcagccatggagaaggtgaggccttcttccatgtctacaagcacctgaagaagtgaaacattttctctaaggatactggattttagggagaatgggaagaatgctgaacc

SEQ ID NO: 6211 - DNA, 7769 bp, mus musculus
gaaaaaaatatgattttctctcaaaaagatatctccttctgcatgcttccatcattctttgtaagtatctttttagctatggctcactcaagtttacttataaaccagtccttaaggatttcagttcaagatggctaactagagacatcatatgccagccctctcaagacagaaaagccaaaattatgaacagacaattatagcttaaatagaacatctaggataaaacactaaagtctaataaagaactcataaaagatacccaaggcacagaagaagaaagccaatggccagcttggctgagattaaccaggatcccagaggagctcagaattgcagggaaaggatgagtaaaagagatgtagtgatcgatatgcctactgtgagctgctgtgatccagactgcagaagagctcttctacgtatatgaatgctgacactaacgtgagtagtgatatggagacgctgaaagcattgcatcagacagagaactcacactgggtcactcacctcctccaagacctgaatggctacagaagcattccattttgggagtgcaacaatcgtgggactgcatcctgccctgggaacaacaggctccacatctctacatcccagaagttcctgctgacattcccttgcatagactcagagggctgcagtagcacagcactagctggacccaaagatgctgcaaagtccccagctctatcccataggtagtgctactcctcaggaaaagggcagtacagcattcaaaaggccagctcctaggacaaaggaatcataagtacacacttttaaaagcccaagaacttcctatctggggctatgagaagcgactctggccctgtcattggaacaaaccctgtgcttagttttgtaagtgaagagtgaaatgccctcccactagcagagcagcatctgtgcttgagctgtgacatagagaacaggaatcctcctccgcctctgcacaccttctcttgctgccactggaggccaggttgggtgagccaaagggctgactgactggagcagtaagtggtgactgcaatcccattgatggtgtggactctgtgcctgaacttttgtgtataaagcggggcacctcacccctctgtgtggtactttggtgctgctgcctcagagagtaggaaagactgaaaacggcgtggttgaaacttttggagctgagtctgtaaggcagtcatcaacaacaccagcccacaccaactggatcaacagggtagtcacaccacagctaccaccattgcccataccacaccagctgaccagggacccgagagcctgctcacttgccctatccactgctgctactacttgcagatgagcaatccatgtggaagcccaagaatcagactgccactaatcactgacataggggctagtgtacactaccctagggcataaaaacatagtatgctcagcccactgctgccatcactgaagcctgaagactggcccactttccaagtccccagtataacttctacacctcctttactgatacctacaccttaatgcgccaaggaaatcacaggaagcactgatgttgcttacaaccaaagaaaccatatagagatgaaactactggatgcacccagaatcaaagccaacgtgctctaccaactaacaccacacatgtgtcttttaaaagttttttcccttacaaaagtgaaatgaaaggccagggctgggcatgctgggtcactcctgtaattccagcactttgggaggtcaagacaggcagatcatttaaggtcaggagttcgagatcagcctggccaacatggtgagaccccatctctactaaaaaatataaaaatttgcttgacatagcagtgcatgtctataatcccagatacttgggaggctgaggcaggagaatcgctttaacccgggagacggaggctgcagtgagccgagattgtgccactgcactccagccttggtgacagagtgaggctctatctcaaaaaattaaaaataaatttagaaaccaccacacatacatctttttaaaaagtccttcctttataaaagtgaaatcaaaaacaggaagaagtgattacaccagatacacagatatcaacatatggatacagaaaacataaagaaaagcaagaaattatgaaacctccaaaagaatacaataattcatcagcaatagatattaatcaaaaagaaatttttaaaactccagataaagaattcaaaatgttgattttaaagaaactcagtgagacgcaagagaattctgaaaaacaatacaaaacatcagaaaaacaatttaggatacgaatgagaaatttaccaaagtcatagatatttttagaaatataaattctggagccgaagaattaattaagggaaatacaaaatacatttgcaagcctcaacaatagattaaatcaggcaaaagaaaaaatctcataacttaatgacaggtcttttgaaataatgcagtaagacaaaaataaaggaaaaagatttaaaaataatgaacaaagccttcatgacacttgggataacataaagtgaccaattatatgaactattgttattcgcaaaggtgaagagataataaaaagaatagaaaatctatttaataaaataataaatgtaaacttctcaatgcaaaaatcatctcttatgttaaaatcaggctatctaaagtcaatcataaagagcaaattctaaaaacagcaagcaaaaggcaactagtcaactataaaggaaaactcatcagaacaacagtgcatttctcaggagaaaccttacagtgtggaagataatgagataatatatccaaagaagtgttggaaagaacactattaatattccccccccaaatatctttcatcaatgaaggaaaatagtcttttccagatgagcaaatgctgagagaatttgttaccactagactagccctacaagaaatgctcaagggagttctaaatttggaagcaaaaggatggcatttgccatcatgaaaacatgtgaaagtataaaactcactggtaaagcaatcagacaaaggagagaaagaaaggactcaaatggcaccactatagaatttcaccagactacaacaactaacaataagagaaaatgtaaaaaaacaaagaatatataaaacagaaaacaacaatataacaggaacaaagcctcacatatcaataataacctgaaaaaatggactagattctcacttaaaagatatagataggttgaatgaatttttaaaataaacttactatatgctacttaaaagaaactcaccttatcattaaagacatacattgattgaaagtcaaaggatggaaaaagatattccatgcaaatggaaaccaaaagcaagcaggagtagctacatttctgtcagataaaacagattttaagtcaagaacagtaaaaaaaaaaaaaagacaaagaaggtcattatatgatgataaatggatcagtctagcaggaagatataacaattctaaatatatttgcacttaaaagtaaagcactcagattaataaagcaagcatcactaggtctaaagggaaagatagactgcaatatatgacagtgggagcctttaacatgtcattctcagcattaaacagattatttagacagagattcaaagaaaagacattggatttaaactggactttacaccaaatagatctagccaatacttacagaaccttctatctaacaactgcagaatatgcattcttttcttcaacacatggaacattctacaggagatggtaggccacaaaataagtctcaacaagttttacaaactcaaaataatattgagtatcctctcagaccatcatggaataaaagtagaagtcaatatcaagaggaactttggaaactatacaaatacatggaaattaaacaacatgctcctgaatgaccattgggccaaggaagaaataagtatgaaaataaaataaaataaaatattgaaacaaatgaaaatggaaatgacatacaaaaacctgtcaaatatagcaaaaggggtggtaagagggatttttataccaataaatgacacaaacaaacagcaagattacaaattaacaatataacaatgcagatcaagaaactagtaaagcaaggacaaaccaaactcagaattagaagaaaagaaataataaagatcagagcaaagctacataaaatagagattaaaacaatacaaagtatcaatgaaatgaaaagttattcaaaaagataaacacaattgatacatctctagatagactaaccaagaaaagaagagagaagatccaaatcagcaaaatcatgaatgaaggagccattacaactgataccacagaaataaaaaagatcaccagagactattatgaacaactctgtgcagacaaattggaaaacctacagggaatggataaattcctagaaatatacaacctatcaagactgaatcaggaaaaaaatagaaaacttgaacagatcaataacaagtagtaagattgagtcagtcataaaagtctcccgaacaaagaaaaggacacaactggatgaataaacagccaaattctaccaatagtacagagaagaacaaattaccaatcctcctgaaactattccaaaaagttgaattgaagggaattctccctaacttattctacaaggccaggatcaccctgacacccaaacctgacaagaacacaacaacaaaaaaagccacaagccaatattcttaatgaacataggtgcaaaacaatcctcagcaaaacattagcaaaccaaataaaacagcatatcaaaaaggtaacataccatgatcaggtgggatttataaaagggatgcaaggatggttcaacatatgcaaatcaataaacataatacatcactttaaagaaaacaaaattattatctcaatagaaaagcatttgataaaatgcaacatctctttatgataagaactcgcaacaaactaggcatagaagaaacatacctcaaaataataaaagccatataaaacaaacccacaggcagagtgtggtggctcattcctgtaatcccagcactttggcaggctgaggctggtggatcacccaaggccaggagttcgagaccagcctggccaacatggcaaaaccctgtctctactaaaaatacaaaaattagccggacattgtggtgggtgcctgtaatcccagctacttgagaggctgaagcaggagaatcacttgaattcgggaggcagaggttgcagtgagctgagatcgtgccactgcactccagcctgggtgacagagtgagagtccatctcaaaaacaaaacaaaaaacaaacaaacaaaaaaacccacagttaacatcatgctgaaaggggaaaaattttaaagcctttcctctaaaaactggaacaagacaaagatgctgaactttaccactcctattcaacatagcactggaagtcctagacagagcaatcagacaagagaaacaaataaaagacatccaaattggaaaagaggaagtcaaattttacctatttgatcttatgcatagaaaaacctaaagactccacaaaaactttatagttaataaatgaattcagtaaagttgcaagatacaaaatcaatgtacaaaaatctgtagcatttctatataccaataattatctacccaagaaataagtcaagaaggcaattccatttataatagctacaataaaataaaataaaatacctaggaataagtataaccaaggaggtgaaagccaagcgagactacaaaatactgctgaaggagattaaagatgatacaaacaaatggaaaatcatctcatgctcatggattggaagaattagtgttattcaaatgaccatatctctcaaagtaatctgcaaatgcaattcaactgctaccaatataacaacattattcttcacagaattataaacaaaaatcctaaaattcatatggaactgaaaaagagcctgaatacccaaagaaatctggagcaaagagaacaaagctgaaggcatcatattacctgatttcaaaatatattcaaaggctacagtaaccaaaataacatggtattggttcaaaagtagacacataaaccaatggagcagaatagagcaaccagaaattaaaagtcacgtatttacagccaattttaccattgacaaagctgtcaagaacttacattgagaacaggacactttctttaataaatggtgctaggaaaattggatagccatatgcaaaatagtgaaactgggcccctatttctcaccctatacaaaaaccaacccaaaaatgaaataaagagttaagtgtggaaactaaaagcacaaaaattttagaagaaaacctaggggactctctcctggacattggtctaaccaaaacttttatgactaagacctcgaaaggataagcaacaacaaaaaatagatgaatgggacttaacctaacaagcttctgcgcagaaaaaaaaaattaacaggatgaagggacagccttttgaatgagagaaaatattgcaaactatgcattcagtaggggactgatatccagaatatatgtggaactcaagcaacacaacaggaaaacaaaacaaaacaaaacaaaacaaaacaaaccactacaatgtagacaaagaacatgaatagacatttgtcaaaagaaggtataaaaacagccaacaggtatatgaaaaaatgtttaacatcactactcattagagaaatgcaaatcagaattacagtgagatatcatcttagtcagaatggctatcattaaaaagacagaaaaataacagatattgggaaggacacagaaaaaaggcatgcttatacactgttggtgggaacataatctagtagagccactatggaaaacagtatgcaaatttctcaaaaagaaaaaaactaaaaatagaattaccattcaatccagcaatcccactgtagggtatctactcaaaggagaaaaaaaatcaatatataaaaggggtacctgcactcataggtttactgcagtactacttacattagcaaaaatatggaatcaacctaaatgtacatcaaatgaaacaattgtgatatatatacacaatggaatactattcagctataaaaaagaatgaaatcatgctatttgtagcaatatggataaaattggaggtaattctcttaagcgaaataagccaggtacaaaaagacaaatattgcatgttctcacttatgtgtggggctataaaatcttgtcacatgggagtaaataacaaagatggagagggcgagttggggaaaaggaagaggatgaagaaagtggattaagggagggtgcaaatgtaaaatagtcaagatggaataaatgtagtgtttgatagcagagtagggtgaatattcttaactaaaatgtattgcacttgggtgatggacacattcaatacactgagttgcttatttttataaccttcaattatatgcaaagcaatttgatttcaaaatataatttaatatttatcaatgaggaaaatcttttgagtcctatgaagaagcccagagcttaaagttacccccctccttcactttattttgcatagcattacatagctggtttcacacagcattcaactaaatatttttgaaacaaagtaataattatttaactgatgaattaaatattgtgtataatactcttaacaaggggaaaataataaattaaatacttcactcttgtttttgc

SEQ ID NO: 6212 - DNA, 199 bp, mus musculus
cctgttttcaatgttgttgacatttttgctctattttctggaagattttctcaacttcttccaactatctctttacatatttttttctctcattaaattttaaatttctagttgctttatttttttggctttctttatgtccatttttatagtaccctgttcttgttttatggttacaatatttcttcttcctttttaa

SEQ ID NO: 6213 - DNA, 1048 bp, mus musculus
tcacttgcaatggaaatactgggttgtagtgaaggtaagatcttgaagagtcaaacacaaatgaaagtacttgaaacatacttaagaagatacaataaaactaaaataattatgtagctttttttttttttacttaaaggtaatattgcatcaatcatagatctagagatagtcaagacagagctgatgaacctcttcctattctttcattttttaaaaaaataaatttctagttaaattccaagatttctgtctaagccacaatgttttcactcaacatttaatgcacgacccttttgtgacaggcacatacctgaatacattaactccaaaactgaaatgtggaccacaatataactaaaatttatctttcatacagtacagtctttttagaatgaaagtttcatattccccatgaaacaggacttttaaattcagcatttttcaatgtcccaagtactgctttattttaacactctaaaccttaagacagaagtgttattattctgcattagtagatgaggtaaccaaagaccagagctcttaagcaattcctagagttgcacagtgggagactgagctttcaactcagtattgtctcgctataaagatggagtttttccaataatgcaatgctctccttcttcttcttctccttcagtgaattaccatgtctcttatattctctcattcacaagtataggagtgatcaacaattctgaaatatcaatctccttaaaaaaagtgcccatcttgtttatatttagttacttctagaagaactatacttcaaattgcttgaaatgtctacaagaaattttgagtgtgatgttagtaaacagcaatccttgcacatatcactggctgtaaatatgaaccataaattcctcacttaaacatataaaatcaagcatggaattaggttattcaaagaggcaagtctgtgacaatattatttactatcttatttgcaaggatcacatcttctaaaaactaactgttgtatgtttgtctttaaagaggtctatagataaaggcagtgattttc

SEQ ID NO: 6214 - DNA, 144 bp, mus musculus
aacccagattttaatattattggtgcccatctcttagctagtcataggaaaaccaagttaataagaaaaaaatgctacccaatattctttcatggtaggtatcggtgactatttgtcaaatacatgctcaaaaatttacacaag

SEQ ID NO: 6215 - DNA, 1175 bp, mus musculus
gaaaccctgaatttgcataccttggaaaatattttcatagcttggttaaaaataagtgttgtttgattgaaaattagcaaggtttcctcacaggagaaaacaaaatgttgggagacaagtgtaattaagaaacaggattgtgtttgtactatgactttaaacatttttttaaaaaactaaagaccacagtcagcattcctcttctctatttgtaattactttgagtgcttaacctgtcttttaattgtcactccacattttagcggagggcactttggtcggctgttgttgttctacagtacttccgacattgatgtagtggctctggcaatggaggaaggtcaagatttactgtcctactatgaatctccaattcaaggggtgcctgacccactttggagaacttggatgaatgtctctgccgtgggggagcccctgtatacctgtgccactttgtgccttaaggaacaagcttgctcagcgttttcatttttcagtgcttctgagggtccccagtgtttctggatgacatcatggatcagcccagctgtcaacaattcagacttctggacctacaggaaaaacatgaccagggtagcatctctttttagtggtcaggctgtggctgggagtgactatgagcctgtgacaaggcaatgggccataatgcaggaaggtgatgaattcgcaaatctcacagtgtctattcttcctgatgatttcccagagatggatgagagttttctaatttctctccttgaagttcacctcatgaacatttcagccagtttgaaaaatcagccaaccataggacagccaaatatttctacagttgtcatagcactaaatggtgatgcctttggagtgtttgtgatctacaatattagtcccaatacttccgaagatggcttatttgttgaagttcaggagcagccccaaaccttggtggagctgatgatacacaggacagggggcagcttaggtcaagtggcagtcgaatggcgtgttgttggtggaacagctactgaaggtttagattttataggtgctggagagattctgacctttgctgaaggtgagcaatggttctaaatgaatttccgttgccccagtaaagtcatcatagtccatttttatgataaaatttataagaattcttactgtgtacattcttg

SEQ ID NO: 6216 - DNA, 294 bp, mus musculus
cttctaaaaaggaacgatggcatctttcagaattatattatgattttttacattttactatcccttgcattaatttaaatcgtggactgccaggattaatttcagaaaattctacgtcattctttgtgatatgcaaagtaaccacgaagcaagccgtggtggctagcagatcattcttttcatgagctccctggcaagacaggacttatttaattttagcattacatgtatacccatccagccttgctaaatggacccaatgaatgtaatattaattagaaaaaactatcttga

SEQ ID NO: 6217 - DNA, 334 bp, mus musculus
caaaaggttgatagcttgtccagtttttagtgcacagactgacagctaaatacaaattgagaaatgtaagtttcacttcgagcaaatttactgggtgaaaacctcatttttttcatttcatttgaatatgttcattgcttctcagaatatgcaactttatagtgagcatattttttattcttgaaggctcattattttacagtgaggttactgaacctagaccacatagtactgattacccagcataatattaatcaaaatatacaaggcaaatgggattccaaacagtgccaaataggcatctgcttttaacacagaataaaaaagtacattt

SEQ ID NO: 6218 - DNA, 732 bp, mus musculus
tgcaacttgtagtccaatcaatacttagttaacagttcacagaaatggtggtaaacttcattccacatcagtattttagataataaaatgttaaatcatttattgaaatgtaacaagatttccatgcagatttaatgtgactagatagtattttatattgtttttattagcaatataataaatggcaagtaataaattcagatgtagtgcagacagactcaggttgtcagaagtactgggtggcttttttctggttattgtatcacaaagccagtaggtgaaatgcatggaacaagttatttttgtttcttctaacaaatgacaaatattttaggatactattttatagttcttttctatgtaatctcataaccacatatatagaacacatttcccaggatattcgattatggaataatataaatatgaattgctcttaatttcatagaaacaaaatcttttctaatatcctcttatccactatgtaactatagccaccttgaagggagaaacaccacattatgcattctcttatttttgatgataccaagaaaaaatgttaaatatttatacttattgctggtatatatttggtactctgtaaattcttgctgaaagaatgtgaggcagagagctgctaagagtaatagtgtcagacttgaactagaattctggagttgccatttactggttgtatgtttgagcaagttacagtagtcccgcctcatctgt

SEQ ID NO: 6219 - DNA, 1017 bp, mus musculus
atttcagcgaacaaatgagaccatatattttattagttatagactctttctactggactttcgaggctggtggcacttcatggccatggtcattttgcctaccatgtggagaaaatgagccggaaaaataaagtccagcacagacaagaaaaaataagcagagcaaccacaggaataaatgacagaactcttgtcctatctgctctatctcataccaacctccatctgcaacttcccatttatgggagttactaaatttttacttcaactaaatggggtttggtttctgccacttgcagtaaaagaattcagactaatacaataattcatcttatttatcttctatggcaaacaacttaatagagttataaagcaaatttagtagaagataatttcctttcctgggtcataagtttaattaataccttttttatttttgttggataccatttttgaaatccttgaacataaagtcctatgctattttttaggctattacagcaatgggggaagaaactcgacaaggagcatggtgacttctgctaaagttgtttcattaaatcccacagggaaaatgtgttaaacataaagtatatatgtttgtccaagaataaattcttcttttcctacttagagataaatatccaaaagactagggtcctaaatcctatatgttagtcatagaagacaaatttttatgattttttgacacatttgtactgctagacttcactaaagcatatgaagcacacatgttaccctgacagcaaagaaatgaaaattatgcactatatatatttttcagtggcatctttgtagaccttgccagtatctgaactgttagaacatggttgaatgtcaattttctgcaggaattttaaagcaggtttattatagtgctgaacatatctggtcataaattttaccatgcagaaaaagcaaactttctccaaacatgaaattttataaacacccattaattgttcaatatagcatggcttttgaatgctagacatt

SEQ ID NO: 6220 - DNA, 1107 bp, mus musculus
ttttttagcacaaatgtgactttcaataaatgaagccttgggcagcatagtaactttgtacatagcatgtatccaataattctcacttttttgagaatagtaaaattttgaacctaacaaccaagatgaaggtatttttggacacattcatcagacttaaagaaatgaaattgtaacagtaggccgtctagaagctgtagcagaaaacccaagtctgaaaactgttggtggtttcacaattgatgaaaaactatgcacataggacttcaaattcattcatttggtcattagagtatgactgggtacgattacattccaagattccaaagtttttgttttatttttatttttttagatagcctaccatttttactgaggaaaagtaatattatgcagaagttcagtatatgaaagatgaaagggaagctgttctgggtgaagcagagaagtcagtctctagaggctttccagattcacctccctcagtgcccttaggcggctctgcaggggccaaggactcaccagaatccaatttaaaaaccgctgaaagagaatatcaaggatttacatgaccctgagaaaaatgttttatttgtcattcttagtttgcaggaatcctataagcatcagcaaatatttgctttcccccaaaataataattgatgtttcctatttccttaaataatcttagttatcttattatcaaaatactggcctcagaaactcacaggaagaaaaactttacatttttaaacgttcctttagaaagccacatgatcctagaccagggcttcagtgggaggccaggcaaagctcttggttccccagctgagcctcaagatttttccaagttcaggtactttactcggttacatgacagtagtttaggaactctctttgtgggaggcattgcttcacggacctgacaggatggatagggaatggcccttgtgcctgatccataacagtcattgcctgttacacacatttcaagattcattctggctatgaagataatcgagacagtcgacagttaccccgcagctgcatggatttatgatggcactgtcaagaaaatgagccaaaatgacacagtagctggcttta

SEQ ID NO: 6221 - DNA, 1360 bp, mus musculus
atggcaaaatctctgtcataaaataatttggacttaattaacattctccaaggcaggcaagctggaagtataataattcttttgaaagcaaataccctttgatgattacaagaatcaagtatgatcagagaatttttttcttggccattttacaagagcctatccatctttatgtggcctatgacacaaaaattaacatgcgaaaaatggtcattttaaaacgataaataattagtggggcagctgggtgcctaaaaaatttctttacgttatgatagaagatacgttagactgaaccacttatttcaggcacaattttattttgtcatttactttcccattaaaatgtgaagtttataagctgagatcacaaataatttcttaggctttcttccaaataagaaaagtaaaacagaaaaggtaaaaggaaagacgtttttaatttaataagaaatttaaatattaattattataacaaattaatttcaaatttagagctattactaagttattagtttattgacattacattatcaccatattcattcactaactatcaggccaggattctaaaacatgcagaaagcatataggtttgaattcactggatgataatatcaaagattatcgtttcttcttgtggtggaatattaattatatctaaataattttggggaaaggactttcttaatagtatttaagataggtaaaattttacatttgcagtaaggtaaagtattaaagtaacaatagtgataattactcaaagagcaattgcaacttttatagtacactggcacagaaacaagagcaatgctgtatattccactaattctaagcaatttaaaattgtctaaatatggagcatgaagcatggcactcagtgcgtgaacaatgaccatcctgagtgcctgaattacgtcactaccttgtggttatttatgcatatatgtttgtgggattggcctatcttggcaacagtagctcctttcaaaaacagcctttactagccaaaggacattgatatagatattctagttatccaataattcccttcaagtttagaaattattctaaatatttcaaaaatgtatgaaaaaatattataatctaggctcatagaccttgtctaggtggcactgctggcttctgtaggtcttagctcccagaaagcaccttaaaaattttggttgaaggcattccaaagggcagagctctgtaagatgcaggccaggagcaagggctttgcttgctagtactgttttcctttgaagtttctaaaaagcccttagaggcaaactctgtcttcctgtagcaacagcacatgcccctttccatattatgagtaatcgtatcttca

SEQ ID NO: 6222 - DNA, 999 bp, mus musculus
agagatagaaaagattttaattttatcagcttaaaactgaccagtcaacacatgccaaacaataaccccggataatttagcactcttcataaatgtgatattttcaaaagctataaaaaagaactccctattaataactctgactataaaggttcatcacaggctactattcttccctctttgaacttaacgacaactcaagtcaatgccctccttttttcttttgttgcagctgctattgggttggaaaagactgttgttggaaaggactgttgtccaggctccaaaaagtccagacaaggtctccagagactctctatttttcctccagatccttttactgacattaatgatgaagcagctttgtctgtgtctctgccttggttagcaatgccttagtgacagggcagctccagatgcattagatcagcagctgatgccatcatgcgaatgtctaacacttactttaggtaggtgacacttcttaatattcaatcctgtcttcacaatgtcgacttgtcccaccatagatgggtgttctttttatcattatttttgagactgttaatgtttttgcttgtaattcctctaaagagcgtttaagaaaaaataattatttataacctttaatgctaggagggtagtgtagtttgcctggaagaatatgcatcacagagttcttgtttagaaatggtaattaattttacagtcaacagtagtgtgacacactgtctctgactagacgtccaccatggcttcctgccagtcctttggaagaatattaattgacgtccagtgctaagcagtctctttgctgtgtatttaaatgaaacaaagtgctttaaattaaacaaatacattctaaacttgcatattcaatacaagttctgtatcttgatagcgccaaaatacacatttggtttatatctttatttttcctctttttttttttttgttctcgttcttatactcctgactcttatagagccctattatttg

SEQ ID NO: 6223 - DNA, 177 bp, mus musculus
gcagaaagataaaacacactcaactttctcctaccgtagaaatccccagtcttgactcctttccagttgggattctttataagtataaatgttgattttctaaaggtttctagtagcctgtctgccgacaacaaagaaaacttgactttctccatcaaatgatgccctgtaaattgt

SEQ ID NO: 6224 - DNA, 1149 bp, mus musculus
aactatgctgaattaatttatttattttgatatatataatagatatcttaagatagctctttagcacactactatgatgtactttttaaaatatgaatgttgtttttcaaataattcctttcaatccctacagatataaatatatagctatatagatatatatatctctatatctccatagatatagattatatatagcttattttttctttgtaagctgttaaattacttaaagcatgaaatttcttgacttgtagagtgacttaaaatatgtctgaaagtctgcaaggctaatcaaattttagagttctataaaacataaattcccattttttaactttaagacagtttacgaaaacctttacacaccaaacttaaaatttacattccttttggacagtttttacaatgaactgaagatgccagagttaacagatgaccagtgtgtcagtcctattttgcccgtcctgcttgtcacacactggtggatatttctccacttttgttccactttaatataaagcacacagatgtttcagaacaagacttgacttctgaccttgaggctattagggtcagggtcctcagggcctgtgaaattatcacaagctgagctaaagtttttctccatcacaggaagtaaccagtaagtaagaagttaaaaaggagctttgtcagagagacaagatggtctcagtaagggtcagcttctgtagtctgctatctctgcaggaggcacatgcatgggaggaggaatataatataaccactggcacatcacatatctgtcaggcaacgccagggctgagaagtctatttaatgtaatatacgttgtttaggttctaaagtattaatggcaattatctcatcttcgttttttttttttgctactttttgtgaaataactttgatttgggggtatgtaatggaagcatacggatggtggcaaatgaataaagactggttcctgacctcatacaatggattcctttaagcaaataacattgtaccctgatgaattttacattattttttgacaaatttgattaatatgtttaggtccactgtgtttttgtttgaaaggctttctaaaatatagtattgttaaagaaataataaacattgaaatgtttttagatcctttgctt

SEQ ID NO: 6225 - DNA, 757 bp, mus musculus
ccctttccttgtttacaacatttctgaaagatgtctcattttagattttggatttaaaagatttgtttaacaagagaattcacaaagattcagtgattcagagctccagtgaaataagataatgcttcttttctgaaaatgcaggcattccaatgtcaaacctgggtttaagtggagggaccgaatttcctgggcagttggtattgacactggtcctatacctctgattgcagaaggttccattttggaaatttaccagtgaagatgccattgacctctaaaagaatttcaaggacattcttttctaagattttcactggtattattctagaaacaaaccttctgaggcagtatttctgaaactgtgttctgtaggtcactatatccctgagatgataataattgtttcccaatttataataaaataaggtttttgaaaatagctaaacaaatttaagtagtttgatatgctaaagtacatactgtaaagagagctaagggaagtgttttccaaatttatttgaccatgaagtcttccatcaaggaaaaagtattatatcccaatgaataatttgaagccactgaagcagcttcaaaggcttcaaaggtaaattacccattcttctatgtcccactccaccccactaggagctcttcagctctgtatccatcatatattcacatcagcagaggctcacccacgtgctggacagccttttctagagtgaaagagtgttactgttctgttttctaattt

SEQ ID NO: 6226 - DNA, 180 bp, mus musculus
acattagtaattattactaattgtcctaataatgctatctacatctggttaattcctatcattgtacctcctacaatgtgattaatgtcaggagtggggaattttatgtattaaatttcttcttaaaggttacaccctggaaatgtgagggaaagtatttgtggcaatgggatgtcaccc

SEQ ID NO: 6227 - DNA, 440 bp, mus musculus
tgcctaggtaggtagaagaacgctttcatggaagctattaaaaggttctaaccaccaattttttttcagtacttattactgtgacctcactccaccatctgtaatatgtgtatctggattaaaccaaagctcattccagcaataatctgcaaaataaaattggaaaagaaattctatttaggataactgattgattgattgattgattttttcattatgaattaacttgttatattgcttagtaaaaatgtataaatatagtttattgaacaagtaactttggtaggtaagaaataacacacgactggatgcaggatttggatttcctgcttttaatggatatgccaaataaagtttcataaaatgttttttggataacacagtttaggcttcaggaattaaactgagtaaagatatgagaaagctgataaaatgatctc

SEQ ID NO: 6228 - DNA, 269 bp, mus musculus
taagacatttgctgtattataatgtcatccttgatagattgactcttttatttcttatatctaaactacctactgtttttcccaaagaagacaaaagtactaattgaattgtgtgttttgtttggaaaatcagttgttattatcatagatttatttggacatttattttgcacatgcaaatttattatgtaaagattactttgtgaaaatggtacctttcgtatttactaatcatttttatagtattttaaacattttataataaatgt

SEQ ID NO: 6229 - DNA, 1783 bp, mus musculus
ggacggacagttccactttttttttttttccatgcttctggtgctctttgtctgtgttagcagttatcaaaatctagttttagcttttttttttccttccgcacgtggaagaaaagaaggaaaacagctttggaagttctcaaccgtcaacccccgggaggacgtttgcctcctgccctaggagaaacgttcgctctggaggcttgggcggcaagagccccttgtggccaccgagtcctccgacgccctcgccaggctggcctttgggttggcccaggcaggacgggcagccgagagcactcgggccgcgtcgccaggagccgcccagggtgagccatgttcgtaggcgtcgcccggcactctgggagccaggatgaagtctcaaggggagtagagccgctggaggccgcgcgggcccagcctgctaaggacaggagggccaagggaaccccgaagtcctcgaagcccgggaaaaaacaccggtatctgagactacttccagaggccttgataaggttcggcggtttccgaaaaaggaaaaaagccaagtcctcagtttccaagaagccgggagaagtggatgacagtttggagcagccctgtggtttgggctgcttagtcagcacctgctgtgagtgttgcaataacattcgctgcttcatgattttctactgcatcctgctcatatgtcaaggtgagcctgaaggaggcggtttgttgtggcgagggcagctggggccgcactggcggaggcgggagagggagtatggcggaggacgccctggggtggcccagcatgccctggggtggcccagcctgaggctgctttctgacttctcaaggcgttgtcggatcaaagtttagccacccagtgggtttaccttgcccgctgcctagacagagaagatttatcaaggaaggggaattgccatggagaaagagtaaggcacgcagagccggctgtgcgggagaccagagtttttttattgctcaaatcagtctctccagcattctgggatgggatcagagtttttaaagataatttggctggcaggggctcgggaactggggagtgctgattggtcaggttggtcagggaatcatagtgtggttgaagtcaggttttcttgccatcttctgttcctgggtgggatggcagaactagttgacccagattacttgtctgggtggtgtcagctcaaccatccagtgaagggtctgcaaaatatctcaagcaccgagcttcggttttacaataatgatgttttccccaggagcaatttgcggaggttcagactcttggcgccagaggctgcatgacccctaaccttaatttctaatcttgtagataatttgttagtcctgcaaaggcagattagtccccaggcaacaaggggatcttttcagaaaagagctattatcaattttgtttcagagtcaaactgtgaaatgaattccttcccaaagttagttcggcctaagcccaggaatgaacaaggagtttaaaggttagaagcaagaaggagtggattaggtccaatctgtttcactgtcataatttcctcatttataatttttgcaaaggtagtttcaaaaacaggttaaccggctggcacgaacttgggtgcctcacctcctccagaacctgactggcacagtccatcctacacattgtgggtgatgagggcctggcttccagatagccagctgcagagaggatattgttgagtcatttatcgttgtttggtcaccaactctgagaagttctgggttgaatcacctg

SEQ ID NO: 6230 - DNA, 860 bp, mus musculus
tttctgtcccttgccaatttctagaggctgttactagcttgttgggagcacatgcctgggcttgaatgctggctgtgccacttacgaactgtgtcactttaggcatattccttagtatttttgtatctcagtgtccacatctgaaaacttgagttgttgtgagaatgaaatgaaaaaacacatacaaagtgcttaggacagtgcctggaatgtggaatgtactcatcagttgcagtgctggtgtgggcactacctagcccaaaacagtttctatgatttacttgtttttggatttgtttgtatttgaaaatagtgtctatatattttttttcacatgagaagcaaatggcaaactgaatagaaacgacgtttaatgtacttgcattcttttacagatgctctctctctgtttttttttttaattaagtactgtgttattcttgtcttattagagaaagagaaacagtgattattaaatgttgtctaattaccttagcctggtgttgttttcactcaaggggagccagggatatgtacactgtgtacactgcgttccagaaaggagaaaaaaaggatggggttgtgaattcagtaaagaatttgagggaacggttttcaagtgcattgcaccctggggacttgtgtctggcatggggctaccagggaagagacagcagaaaaggtaaccagacttgtgagcactcaacgttgcaatggaatctggactctgcttcctggcaatgcgaccttcaatcagtcccctgacttcttagagaagtagaaaacagtgaagagcaaatgctgtgtaagcagagacttcccacgaaatccttctgctaattaattagctatagatttgg

SEQ ID NO: 6231 - DNA, 461 bp, mus musculus
ccaaagattaggagcttctttgaggagcaactatcttcttaatctttacatcattataggcagacacaatgcccagcatgtgttataccttcaatataatttaaacgaattcatgcatgaatcaggaatgaagaaaggaagggaggaaggaaggaaggagggaggaagagagggaaggagggagggagggagggaggggatagagggagaagttaatggatgtgttcaagataaaacaaccagtcatggtaaaaggaggatttttaatccgtgtctccatggttctctgatggtcgatggtaaatatgtaaggaaggtaattttgcattattttggtgagaaattctgtatattacatatcagtatcaaacataaatattgttatgtaaatattctctgtttttctctaggttttaaatacttacctggtaacctaatcctattaaaagttttgtcttttt

SEQ ID NO: 6232 - DNA, 1138 bp, mus musculus
gatgcaaggaaaatgattgggtcaggcttgtcttagggttgccagcatcaaacatatgaagttattataaccaaggtctacaaaaagtcataaagaagcagacttgagaaaaatgaagggagcctgtgaaagttactgtactatttgttcactatgaagaggttggggaatgatcactgacctctaagtaacagagaatggaactcatctttcacttctgaatgagctcctcactgtaattgatggcatttcctgaaatggctgcgatcattagggctccagtgactgaattaaaagaaaatgaaagatgcagatggctgtaataaagcaggaaaatgcatttcttcctggtgacagatacaactgatcattttacaaggaagtgctttactaaaagtgtttcagctatgtagttctcagggaaaatgaagagtaatgtaaaaattggacaagatgaaactggctgtttcattccagatattgactgcacaagtcacttttaataaatcagctgcttatggtacctaagacagcagtttgttaatattatgaggcactacaaaatgttctctttggttaggcaatctttgagcgtcacatgataaacttaaaagttttatttaattttttatttgctatatgtttttcgaattatcaacacttgaagtagtagacatatttgtttggaaacagctttgatcatctaaaagattcaagggtcagcaatcttttcctggaaatgtccagataatacttattttagacctttgtgggcaatatagtctctgaaacaactgctcaactctgtagttgtagcgggaaagcatatgcaggcaatgataaaggaatgggtatgactgtgtttcaataaaactttacaaaaacaacgtacaactggatttggccttcatactgtaatttgtgaatctgtaatctaaaaaatctattcagcataccaaatgatgttgtgaataacaacaattagaaatcttaaaagctttctacactgaaataaataaaatgctaaagctaaatattttagtcttctactagaaatagggatatgagcatttatagcatttaaataaatacggaatactgttttaaaagaaccacagcttaatgacaacctgtattt

SEQ ID NO: 6233 - DNA, 386 bp, mus musculus
attttagaacattcacaaattcattatgtgaaagtctgaacaatgtacaattatatgaagtaacagaaattacactcttatgttggccttcctcaaatctactccatagtagaagcaagcatattagaaacaatcatctgttccaaaaaaggcaaagctggcgtgttatgttattttgtttttccccataattctgcactattatttggcaaagatggatacttatgaagctattaccatctaaattcactggggtagacaataagaaagctggtggtgagtgtggcattttcctttagggtactctttcagtgctctcactcttaggtttggatctattcctctttcatttctcttttttaaaggcattctcatgtaaagctttg

SEQ ID NO: 6234 - DNA, 860 bp, mus musculus
ctgcagttcatatatcatctttatcttatatacatatctatgtcttccaaaacttagttttaaacagagattagaggaaaggatgactaaacagtgttagtgttgaagacaaatttcatttcttttatttcaattcccacttaatgtaaaattatatacaaatttaattgttctgttagaatcacagaacttcattgtcttaaataccattcagtaacctgtctttatgaaatccaaatatgattttaaatggcttaaatttgatgatgttttacctcactacactgctggaaaaaattacctttgaataaaggagaaatagcccagcctcaagttgttgaggttgttgttaaaagcagcttcatccgaatgtatgaatgatgacaatataaattattgtctaacctggataatttgaacactgggaaaattacattaggacagcagttgtaaactgggactatcaggaaaagtaggaggtatgttaagcctatcgtgtattaaacagtaaaaacaataactagtacaatatgatataattgtttaagaagcccagaggtagattccactttcacttttattcatacaattatgataacctcccaaatagaatactttcatatcttccccatttttatatttacctactggcagcctgctgggtatctaaatcaagaactttctctcaggagcaaatcaaaattgctacgtgtgaatttttaattttccagttccaaagcttagaagaaccaataagcatgcactcaattttaatttaaattgaaacccacagctgtatttactgtagatggtctttcagggaactgaatctaatataatttcttcacttatctaatcat

SEQ ID NO: 6235 - DNA, 841 bp, mus musculus
aaatattttagaatattaggaaaatttagaaagttttgctagtgctgtttgccttcattaggaaatgcttaaacaataaattgataacgattgttaaaaaattaatctgtgacattaaattttatttccaaatatgttttatgggaattgtattctactttttgtatttttaccacagtcttttattatactacgtataaacctgtatttaatatcatatatgtttttgtctttgacatttgagagatccctatttttatgaaataatcagctttgtaaatatttcttattctattttaaatacttggttctaaattacatgaaataccagttttaagtatggttttgtggacaattagacacaccaaaaagtcaccaccacagaattatcgtttagtgagaggccttaagcatggaaattgttaaagtaaacttctctaaccacaatggttgaatgacttattcacagtggtaatggaactatttgggtcactttcagaaaaaaaaaattatatagttatgttactgcaattgcaatacatcactgtattattaaaaatggaaattatatttttactatttttttgcctctcttcgcccacccccacaaaacaaggtcctactaatttagcaagaaagttgacaagttacattttaatctgatgcaagaaaatttagactattcaggtattatttttaattcaaaacaaagagtatgtgtgtcttcctcactttgtgagactgagatagcattgaaaatcatcaaataatttttatgtaaagttgtaaattttaaaaaatgttttgaaatgctttcaaagcaatattttaaacatgtttt

SEQ ID NO: 6236 - DNA, 291 bp, mus musculus
tataattgtatttcagttttaaatgcaataggaagggaataataatactatataagagattttgcagatgatgcacacattcaacaataataactaaataaaagtgttatttcttgctggaattcatttatgtcaataagtattatttgacaaagactagttattaggtaaggaaagaacaaatatattattaataaccaaccactttgtgtcctaacatcaactctcataaagccttccttcaaaccactttggactaccagttattttatatccttatgaagagaagag

SEQ ID NO: 6237 - DNA, 1054 bp, mus musculus
acatatatatatatatatatatatatatgtatatgccctccttccaaatagcaaatgtgccactctatacactagaacagatcacattatttgatgtttgttctgtaaatatcaattgtattccagaaaggtcactcaagtttaatggaaaatgatgaaaaatatctctaatggttttatgttatattttgagaaatatttttgagagacaatagaattgtccaataaaatccagttttaaactatttagccttaaatatcctaattttggaaaattatttttgatgcctacttctgtgaaattcctgttttcccagcacacgttctgcacatatatgtgcattcagatcctacatatattaatgtaatttttacattactatgttcccataactttaggcaatttgtaaatcattgattcttaagttaggaaaatagcagtgaaatgtgatatatgataaattattagcataaacaatacaaagtaaatgatgtgaaaaattactgaggcttgtttaatgaatgataacggacacaaactcaacaaaatgattcttgtagttcatgggaaacctttaagaatacagagattgttaagaatataaccagattgaataaaaatttaaatagattatacattttacatttcacttttgggaaacatcaatgaacagaattgtttcctctttcctctccctcactccaccataaacagcaagcagctccatctgcagagaccgtgataaccacagagaagtgcgatggtccatttaccacactttacaaacactgcactaatgatgctttccttatcactctccacctattaagatgtgcaataaacatatcttcttgagtttcacattagtgtgacttcaaatacattttttatgtgcagtaatgattttctaatgaacgtgcatgcctcaatgtcttctaggtattgattagtataagcaggctaattttaattcctagaaatttctattcatcagcaagatctttatcagttttctactgtatgccagccttataagaaaaaaaaaaagatttg

SEQ ID NO: 6238 - DNA, 1054 bp, mus musculus
aatcacctgctaaagttcaaatagatagttgcaaagttagaattggaaccaaatttttaaaacttccattgtaattttcatcgcttctggccctactttaataagaaataatggacccaaacccaagccactgtgcatgaatctgaagaaccctgggcttgctagatactgagagacattaagaaaaactcacatgatctgtgtgtagtgaacaatggtttttctttccagcagtcatatcctcatcattttcttttatttggaaactctcctccaactctcatttcatgcaatggaaaaaaaaaaaatctctgttttcatcattagagatggcatgaaacctagtctggaccaacatactcacaaatcttgcctgaagtgattgcttcacaaacagcctgaataggagaacatccaaatcaatcagagaaacttttgtgaaactacagtatgggtgaagaaacttgttgggcaaagatttcatagagtaaccatctaaagaccatctttccaaaacatagaaagagccttcctgtatgtggccaaaataaatggaacaggcatgggatatagagtgactgataatggcatttgagtccttggatccatccatacctgatctactgctggaaatcttaaacgtgtgtgtcaatgaattctctttttcagaggagccagtttgaattttttttcagccaccatcaagaattctattaaatcctgttttataacaaatattggcattgatagctctcttactaatagaagataaacaacaaaacagtgtgtgcctttaaaatctcaaaggaaagaaaataatgccatagagctgagaagtgcctgtcactgaaaatgaatctctaaatggaagggaagcactttttccaggaatctactcattactccccaaaagatgtaagaggctatatccatggccatgtagaaaaaactgaagatgataaatcagaaattcaataaaagtaaaagaagaaaaaggtaagttgatttgcaataaaatattggttaacaaaggcagtaatgaaaatgtttaaca

SEQ ID NO: 6239 - DNA, 1165 bp, mus musculus
atagttgcaaagttagaattggaaccaaatttttaaaacttccattgtaattttcatcgcttctggccctactttaataagaaataatggacccaaacccaagccactgtgcatgaatctgaagaaccctgggcttgctagatactgagagacattaagaaaaactcacatgatctgtgtgtagtgaacaatggtttttctttccagcagtcatatcctcatcattttcttttatttggaaactctcctccaactctcatttcatgcaatggaaaaaaaaaaaatctctgttttcatcattagagatggcatgaaacctagtctggaccaacatactcacaaatcttgcctgaagtgattgcttcacaaacagcctgaataggagaacatccaaatcaatcagagaaacttttgtgaaactacagtatgggtgaagaaacttgttgggcaaagatttcatagagtaaccatctaaagaccatctttccaaaacatagaaagagccttcctgtatgtggccaaaataaatggaacaggcatgggatatagagtgactgataatggcatttgagtccttggatccatccatacctgatctactgctggaaatcttaaacgtgtgtgtcaatgaattctctttttcagaggagccagtttgaattttttttcagccaccatcaagaattctattaaatcctgttttataacaaatattggcattgatagctctcttactaatagaagataaacaacaaaacagtgtgtgcctttaaaatctcaaaggaaagaaaataatgccatagagctgagaagtgcctgtcactgaaaatgaatctctaaatggaagggaagcactttttccaggaatctactcattactccccaaaagatgtaagaggctatatccatggccatgtagaaaaaactgaagatgataaatcagaaattcaataaaagtaaaagaagaaaaaggtaagttgatttgcaataaaatattggttaacaaaggcagtaatgaaaatgtttaacagtagtgaagatttaatcaggactatggaaagcacacatgaaaattctctccaaatgcagatggaaggtatggagaacatggcacccaagtaaataacagagcttgaagaatgagctgtcatttaagaatcaaatt

SEQ ID NO: 6240 - DNA, 384 bp, mus musculus
aaagacaaacaaaagaaagagaaataaatattagtatgacatttacaaaataaattacggtattagcacagtttgtctatttctgggtcttctctgtctaggcgcacattggtaggactgaacttcccaggacccatgatgtttagcaaaaccataaatgtgagtgtaagttacctgggtcacttccagactgagatcttaagcaccaaaagatgttttaccataccatctctcacagtcagcaaggctatcgatggttgctgcttggtcagtctggatccaatagacaggaagacagatagcaaagcccaaaagaaaccttcaatgaacatgtatcacaagacatttttaaaaagctttttttgtgtttttatgccaaagata

SEQ ID NO: 6241 - DNA, 297 bp, mus musculus
tctctgtctaggcgcacattggtaggactgaacttcccaggacccatgatgtttagcaaaaccataaatgtgagtgtaagttacctgggtcacttccagactgagatcttaagcaccaaaagatgttttaccataccatctctcacagtcagcaaggctatcgatggttgctgcttggtcagtctggatccaatagacaggaagacagatagcaaagcccaaaagaaaccttcaatgaacatgtatcacaagacatttttaaaaagctttttttgtgtttttatgccaaagatattc

SEQ ID NO: 6242 - DNA, 1282 bp, mus musculus
ttcggatatgaggtgagttaagaatattgcagatggaatagcatacgcaaagacttgtggcaggacagaacatggcacatgcaagaaacttaaccaattcctctgctactgaggggagagaccattgagggcagggatgtgaaagggttctagggcctattaggatctgatggcgtcattctaagagcaaagtgaaaccagtagagaacctcagatatgagtctatggaggttagggatagtaataagatttacattttaaaaagatttagtatcattgcagcgtgagaaatgaattagaatggagccagggggagtcactgatcgtttgaaaggcattgcagtactccagatgattaagaaaaataatgagtaggacatataaaattagaataaaaacctgaataagatatagatgtcaagcttgacaccctaatatacttactggaagatgaagagaattacacaaaaagtaaatgagtctgatcaacagatttgagtattcttgaatctaaagtgggaaatcattaccaaaaatagtcattggagcatattatcagtcccttaatctcaaaaggaaagatatagtataaggtaatgccttctgcctagaagatctgaaccagaaagtatcagctgataattattatactgttttatttagatctctatggactccaaaataaagaaatgtctgatgttagaggtattggatcttatcactgaagtctcaaatcaaatatcacctcctctaagagatttctttgactactcctcgtatgacaccaacttcatatttgctctatgaaatcaacacatgtaataatctcgaccccctagtagaatacaagttctgggagggcaggatcatcatgtgtttttaaatgctccacctcagtacctagagcagagtaagtgctcaataaatacctgtaaaatgtatgagtgaataatttcataggtgcaagagaagagagaataacagaaagatttcacttatcgatgcccctaaattttgagaaaaactaaacaaaaacaaaggtagagaaaaaggctgagtaatgcctttcaatatatttatagattctttcctcaaaagagctcaccttttcagagataacagccttattatccattacacatcaatgtgtacattggcattcagtatggaaattccatatgcatgtagtccatttcataaattttggtgtcatgctttacaattaataaatatttactaccaccattgtctacttcaaaagctgaggagcacatttaaggct

SEQ ID NO: 6243 - DNA, 334 bp, mus musculus
agaaaactctatggaaatttcttataaagttgaagagtaaatataagtttggtccagcaatttcactcctagctatgtacccaaaagaaatcgagctaatatccacagccaagacagatataacagtgatcatagcagctctattcataaaagccaaaatctttttgtaaactgcctattcacagacaaattgtggcatattcaaacaactattactcaacaataaaaatgtacaagctgatatttacaacaacatggatgaaaccagacacaaaagagtattaccacataattacatttatataaaattttaggacagcaaactaaactggta

SEQ ID NO: 6244 - DNA, 629 bp, mus musculus
gtggtctctattgtattcaaagaaatgactgttcatcctcatgcataaaatttaggatgagacactgtcttacaatttcctgctttctgactgtcctgatcgatgttttcagtcatgccactttttcacagtctgcgtggcacttctccaacaggaaatttacctcagatctgttcatgtcaccaatcctcctgtagctctagcttctctgctccaagttaaactgaaaactgccctgtcatttcttttaacctttgagtttgaggcagttctgagaacttctctcacagcaattgcttgttcctcctgggcaccatactataactaggcttaatcatagaattctagggttgaggaaccttgaaaagcactgtgacctctccaacactggccgcaaccactcacaaaccatcctcacacactgtagaggttgtgttgccttttaaagctccctctcagaattctatgctttaggattttctcctaaaaacaccaactgcaaatctaaatctgtcaacctttgtgctaaggtacacttccctttgctcttgctaaagtgggataggggagaaaattgatcactttctatactaacattttatgtccattttttgaaggccattactaaa

SEQ ID NO: 6245 - DNA, 1105 bp, mus musculus
tattattaagtgttattaaagtaaattgaaggcaaagcatgtaataaaaatttccctgcgacaaaagtctgaggtctatatgtggttccacagtgcttagaccatatttaactgtgaaagtaccaatattaacatgaaaatgtttttgctgctgctgcaatctggaatcaacaatgagtatgtgctgtttggcattccgtttttaattacatatcatatttcatactagatgttgaaattatatgccacaaaattttatatcacttaataggtgccaaaattacaaaagttaaaatattttcatttcatagaactcatgtagctaaagtttcatttcctaacagtaatattaaggacatattgatggaaatgaaatttttaaatgccaaacaaccatcgagacttccaggtctacattcatattttcaatcagttcctagttatttacatcagaagtaagtgatagaaagcatctgtcagtctgattctcaggtattttgaattacaataatcaagagattaagtcagaagaaaaaggagggtatccctagagattatatctctctaaataatagagaggattgagagggaagaggaaaaaagatagccaaagtgaaagtggggagggagtttataatttatgatgtaaaatattcaataacaactttaggatagcagaagaactggagagtttaggagggacttttgaaaaacccaagccagaaactccctttaacactctatgaaggaggtaggtacacgttagaattcacttttaattgtatttgttggccaaacacttttttcttttttgaatataattctctctggaaattgtgctacctgcggctctaagattcatttgggttacaaaggaatgtaattaactaaaaacacaaatgaattataagcttttcactttgtcaactgtgtaagctagaggtcctttcctttttgctatacaagtcaaaggaaaatagcctcctgttttgaaagcttaaatctaacattagcgtacaaaaccatatttgccaaattgaattaattgttagaattaatcaacactggggaaaacatagatgccgttaggcagtcatttttcaaa

SEQ ID NO: 6246 - DNA, 1062 bp, mus musculus
agttttattagatttcataatatacagtttttcatgtatcataatacatactgttcaggatacttctgtgtgggcctcattcaaagagattttattactgaagacctttgtttaatagatgtcaggagatagcctcatcatcaaggtatgtgcatttgcagggcagcattttagtcagactccaattatgttttgtgcccattttggaatgtctaaaaatgatagctgtttacatagagggtttattttatgcatcaaagatgatttttcttaacattatcagttctgaagtattttatagacttatgacatgttaattggtctttaaatattttatgtattttaaatgattgaaaaaattagatttatatcctaattgaattattaaatgattttgattagcaagcctaatttcagttgttttgtttgggaattctttgtgtttttatgagagactatggtgctgaagttaaataagcatatggttgatgctttgttgcttaaaggattttttttctctctttttttttaacaaggttcatttttttggaagagaataaattctcttggttgtattataattagaaataacagtgacagaaatatattatcagattgggttaaaattataaagcttggggtaatttttaatgtgttactttattgacacaaatattttgaaatataatgtaattatttactctttaataaataatgtattgattgcactttcactaaatttatccgtaaattacacattttcatcttgtcgcttaaaagcacaaaatattaaattataaatggaagaatcttgatgatgttactatttgtatgttaaataactcagaaaaagtaaaacagaatatgttactaaagctgattttctttccatcttcttctctggatttcatagatctaatagattttaaaaagataaatgagaattccttttttgattttttaaattacctttttacttcagtaataaagtgaccaaatttatatgttttttcctgagttttgattgtctttattttctaatgaggttgtacttttttaaac

SEQ ID NO: 6247 - DNA, 1265 bp, mus musculus
agaaaaaaatacgacagaaaactatagtttctttacagccttagaaaaggaaaacgcgtaatttctaactccaggaggacagtattcgagtacgtgggtttctttcacccccgacgtgcacttcaacttttaaaatgcttgctctggtggtccacagtactttcgcgttcactgggcggtaccatatctctcaatagatttgatccaaaaccccaagtgcgggagacaaagctaggtggaacgttattaaccctccacaactccaacctctactagcttcctcggagcaggcgaggcaccaggcccgtgagaaaacactgagatctggggcgtagctgtgacatggggtatttctggccgggatctcaccgggtaggctccacccgcgggttatcggctccctccaagaagcatctttgaactcctcccatgcaggccctattcctacaccagttctctttctggaatctctttggtactgtgtttcattaatcccacaaccatattcccacctattccctaacgacaacaaacttttaaggtccaggttaccgccgcgtctccctagcaaccgtgccctttaatggttgccggaagaggctataatcacgtgctccgaagacttccgggtttccaacgtgacttccggttgtcagaatttacccctgacgcggcggcggccgacgggaagctgtgtgtgcttaggtcgtggtggccccggtggtggtgggctccgggcgggctcgcgtcatcctgcccccgctgcgatgcatccgcggcgcccggacggatttgatggcttgggctaccggggtggtgcccgggacgagcagggctttggcggcgccttccctgcaaggtccttcagcaccgggtcggacctgggccactgggtgacgactcccccagatatccccggcagccgcaacctgcactggggcgagaagagcccgccctacggcgtgcccaccacctccaccccgtacgaaggccccacggaggaacccttttccagtggcggcggcggcagtgtgcaggggcagagcagtggtgagaagcatggggaccgacacagggatgaggggttactggggccgcggcttgcggcctgcagaccccggaagcggcgcagaggatcccgcctcctattccttctcatcctatcgcgcgccacaccctttgccctcctttggtcctctgcccctgaggctggcctcctcttcctcacaaacgaattctcctggatcaactccaaaaaagacatc

SEQ ID NO: 6248 - DNA, 2061 bp, mus musculus
aacatagcacctaggtttcttttctagctcagaggttttcaaactcttttgcttttatatcccctataagaattgtattaaagtatgtactgtcatgtaatttttatgaatagtaatgtttttcatcatatatttaaacactttaaaggatgtaatttggggcatattataaatgttttcatgttaaaatgaaagttgaatttctcccataatgtatatagttgaatctaaacaccatgaaaatggataacccaccatcattccatttttaaaaacaaatactatgttgaataggagtggtgagagagggcatccctgtcttgtgccagttttcaaagggaatgcttccagtttttgcccattcagtatgatattgactgtgggtttgtcatagatagctcttattattttgagatatgtcccatcaatacctaatttattgagagtttttagcatgaagggcttttgaattttgtcaaaggccttttctgcatctattgagataatcatgtggtttttgtctttggttctgtttatatgctggattacatttattgatttgcgtatattgaaccagccttgcatcccagggatgaagcccacttgatcatggtggataagctttttgatgtgctgctggattcggtttgccagtattttattgaggatttttgcatcagtgttcatcaaggatattggtctaaaattctcttttttggttgtgtctctgcccagctttggtatcaggatgatgctggcctcataaaatgagttagggaggattccctttttttctattgattggaatagtttcagaaagtataataaaaaaaaatgcaaacacccccagagtgttgcattctttaaaaaacaaaacaaaacaaaacaaatacttccgtaacttttaggaatctgactttctttttctacttgaacttaaatttttattcaacttcctccaaagatctttaccttaatgtaacataattttgtttgaaaatactgcttacgctatcacatgtatccgcaattgaaatatacctaaattcaattttttacttttattttgttaccataaagctctgaacattaaaaaaatttatgcaattgaattattatcaatacactactgattaaacaaacatattattaaacacaaaaagtaaaattatattgcaaatgcatcctttaatgagatgataaacttttttcagttagttcctttatctgtaaatgaacattacttactgctgaaataaggggtcagtatcaattctatttctatttttttttttttgtttttatagatgtaagttgaaggaattgagagtgttttattatagcaatgtaattcagttctttgaattccttctatgttatatgtcaacatttgtgtaatggtctattagcaaaaatatttttaatcttcgggcacatgacaatttgataaagtccttcttcatttcttttaaacagtgaactaggaagcacctgactagcaaagagatttgttctccagcaatttgaataatttactttctcaatttctgggaagtataccaagagagctttactaagattcatcaaattattgttaattgtgctgtaacacttgtacttaggcccaccttttaaaacccgtatcaccagaaatggcaggaaaatcaaacaaatttttagttttattacatgtttgccaaaacaatgctttttgataaaatgctttgatcttatttcttgttttaaatgtattgccactaatttggagttgcagatttagctcatttatgaaaaatatctgtcataaaacctcattggcagggccagtcttcactgtcaaaccagtcagccaaatcagatacactttctgtgagaaaaagtttttcattcttcaattcaaatagctattttgaggaatattataaaaatcaatgagaactaaaagtatatcttatgaaactgatcactaaaaacaattaagataaagatctaatataattgatttttccatgtttaagttataaaaacaagatgaccaatacactatttctcatataaagc

SEQ ID NO: 6249 - DNA, 1003 bp, mus musculus
gttcaggctggtggatggcgaaaactcccacctaatctcagtcccactatagagtataatgatggaagaccagcaaagcgccatgatattgcacggtctcattctgaaagtccttctagacttccaatcaataggtcaggaacctggaaacgtgagcacagcaaacattcatcatcccttcctcgagtaagcacttggagaagaactggaagttcatcttcaattctttctgcttcatcagaatccagtgaaaaagcaaaaagtgaggatgaaaaacatgtgaactctatttcaggaaccaaacaaagtaaagaaaaccaagtatccgcaaaaggaacatggagaaaaataaaagaaaatgaattttctcccacaaatagtacttctcagaccgtttcctcaggtgctacaaatggtgctgaatcaaagactctaatttatcaaatggcacctgctgtttctaaaacagaggatgtttgggtgagaattgaggactgtcccattaacaatcctagatctggaagatctcccacaggtaatactcccccggtgattgacagtgtttcagaaaaggcaaatccaaacattaaagattcaaaagataatcaggcaaaacaaaatgtgggtaatggcagtgttcccatgcgtaccgtgggtttggaaaatcgcctgaactcctttattcaggtggatgcccctgaccaaaaaggaactgagataaaaccaggacaaaataatcctgtccctgtatcagagactaatgaaagttctatagtggaacgtaccccattcagttctagcagctcaagcaaacacagttcacctagtgggactgttgctgccagagtgactccttttaattacaacccaagccctaggaaaagcagcgcagatagcacttcagctcggccatctcagatcccaactccagtgaataacaacacaaagaagcgagattccaaaactgacagcacagaatccagtggaacccaaagtcctaagc

SEQ ID NO: 6250 - DNA, 1003 bp, mus musculus; identical to SEQ ID NO: 6249

SEQ ID NO: 6251 - DNA, 1280 bp, mus musculus
catggtatatttgggaaagtaaaaaatgctgatggataaatgaagtttgaggcaaataggataggaaatgagaccagagacagaagcaaaagagagatttgaaggcactgtaaatcttgttagaagttcagattctgtctcaaggccagtggggagtattatgatttggtttctctagcctgcagagtgaaagatagattggagggggcaagactagagcagctgtcaacctatatatcagagagaggctctctaaaagaaaataatatttattcaggaatgggcattgccatgggaataaatgtaccatggtaaactatatgtgcattcaggaaggtaaagggagacaaaggtttttaaaggaaaaatgaggagaattgcatacttgttttgagacaattatccttggctattacaaagatcaataacaagggtgatgtcagtctaagtttggacatgcatttgcagggaagatgtccttatagaagtatttttgtaaggatgctgtggcctttttgcaaggtagcttttgcagaatcttctgtgatagttttttttgttatcaggcacaaaagcatgagacagctttatgacattccccagctctatttgtcatgtgttggtttggtgtttgtttttgctttttaacacaagtgactccattttgattctgacagtttgtacacagggagcccagttgagcacatgctacaataatttgggagtgagttaatgtaaccaaggtgagggtgatggcatggaatgatacagaaataaaagaatgaagatatttaggagataggaatagtagtacttagggcataatttactgggagtagagagaaaggtaggagtgaaggacagttcccaggcaatggggtggatattgaagttgggaacattgatggcacagcaactcatggggaaagatgatgtattcattagggacagactgagtttgagctttaagacattaaagtttggagctcagctactgaaactccgttatcttctgtcctgtggggccttgcattgtcttgtgagggctgagtggaaatctcctgctgttcctcactgattaccaggtacttgttctgatgattcacctacactagagaatgaaagacagaaaacagagatgttggagaaggggtagcagggttagaaaggataacaagagggacagccaatagaaagagaatgtaggaattacctaatagaacagtttttgtcctccttctgacctttctacaaccccccaagtccagctattaagaacg

SEQ ID NO: 6252 - DNA, 642 bp, mus musculus
gatttggaaactgcttaaatgcaggttcctgttacttgctaataaaagcatttctaattattcacctcagagtgaaaatgactcagaactcactctatctgaagagaaatagaagtgtgttaaactaactaaagaagtgatttccccagaacaattcttgctcatgacagaaaggaaggcaactgtgaaggagtatagatgttggagtaaacagttgtgagagcaggttcattggcaaaggagaagagagaagagcaattgtctttctttttttccacaagttaattcgttgagcttttttttttttttttttttgagacagagtctcactgtatcgcctaggctggagtgcagtggccagatctaggctcactgcgacccctgctgcccaggttcaagcaattctcctgcctcagtctcctgagtagctgggattacaagcacctgccaccacgcctgactaatttttgtattttcagtagagatggggtttcaccgtcttggccaggctggtcttgaactactgacctcgtgatccacccaccttggcctcccaaagtgctgggattacaggcatgagccaccacacccagcctcattgagcttttaatcaaataattttcatgctctgagttattaatt

SEQ ID NO: 6253 - DNA, 344 bp, mus musculus
ttagactttgttactaaatagctgtgtgccctgagaccaaaacatttcacctccctggccttcctgcatttatgtacaaaataaagggttaagctgtcctactatccagttccaaaataactctgtattatatttttgacaaataatagagaataaggtgaaggaccagtggtggcactggtatgtagtaaaaacagtacagggtttgttatcacactgtcttgacacttaggaagttgctagaggatgtcaagcagattacttaactgattgaggctcaaattctgatctgaaaattggaacaatagtaggtgcctcacaaggtttttctggaaattaaatat

SEQ ID NO: 6254 - DNA, 1360 bp, mus musculus
attagaatctgaccgtcagaatagtatggaaagtgggacgattgagatgaagacagtgctggtagggggatcaacccaatgtggctgctgaagggggatgtatgccaggaatcaatgaatgaggatctttggcctgaggtcgcatgctcatgaccttgcacttctatcgggtccttttgttgaatcagaatgcctgggacttgtaggaacaatcagtaaaagatgaaggacaactttgatacctaagagaggagcacagaccattgctttcctagtgctgcagagggacaccacccagaaccgatgagtgcagtacgctctacccaggcatagaatggagttctccagtggctactaactcttggactaacatgtccctgtgaagagatgaagccttgccaagttcaaagacaaaggtctaagaaagagtgtcaggataaatgcaaagtaaagctgaaatccttgcacaggctgagcagacatagagttctagcgtgtggtgcaatcaatgtaccctcacagttacagacccagtctacctaatgaggtctaaacttcaagtatggaggatctgaccaaagtccagtgagccagcttgagcgtatgcgtgtgatttaaaatttacaagatttatcttaatgtcatttctgagtgcctgggtcaggtctgcccttgttggaatctgaagagatctaatttggatatccaccatttcatacccaagtttggaatggccggcacttacttcaagaaataaaattgtaagatgcaagtattatttcttggttacagttatgctgtgtccagtttatatacattcagaggccagtgcattcacatattcatttttggggggtttggggtggggaatggagtagagactggttatactattttgtcatgcagagtctgctgccctatgctctgaaagagggacagtttccagtttccttaacattgtaacgcctcaggcagtatatgaagtccacctggagtttgtggtaaagcaaatttttataatatctctacttctttgtccttggtggtgagttttgcttcaagctagttctaaaattcaacaagaatgtcccaatatttcctaacagagagagaaagcatgcaagtggtttgaatttggagcatattttctattttatcacctttaatgagagagtcagagcctgtcagtcatgtgattgactggctgccttcaatatgttttccagggaatttaagaagtgcagtattttcttttctctgttgccagtatcagtgacactaaatatttaattactaactagggctgcagtagctgctcctcaggagtgatgaataacgagcccctgtatatttgtgaact

SEQ ID NO: 6255 - DNA, 1008 bp, mus musculus
acgtgatgattcacattacctcaaagctggaaggaagttacatgtgtggtgttcatgcccttttagatgggggcatattcaacagtctgccattcactcatgttgctccctctttctatttgcatacttgtctgtcccctgcagatagttgcacgtgagaccacaattctaaagactgggaccccttcccaaggtagatggttaatgtgtttgcctaattggaaacatcatttgcccacctctattctgctgtgtgccctgagcagctgatgtgcacagatggcatctcttgggctccctttccactgtggcttcaggttgttctcaccaatgggagccattggcaagaaatcagagggcaggaggaaaaacagtttggggaatattttctccactctttcccagtttcagcatcacagctatgaaagtggctgcatccctctgtaatcacagctcccctgagctatcactggtctctagcagcttaatattctcccctttcccttttaggctgttactaaattttggatacctccacagtattctttgggttttcagaaacctgacctcactactgtatgctgtcccttcattaaaatatcttcagctaattcacctgatcgaaattctgtttattggcaaggtcctgactaatattaataataatagagccacgcttctctcagcagtcatttgtcaaaccctcttttcactttagggaaacaaaaaaatctttctattctgagctgcttttaccttcactgctgatcatgatccagtcctgttttcccacttagctgaccatgtgcactactgaggcctaatctgctgccttgctttggtttacactgtctgcttcaacctgacagcagattgattgactactgggccaagagactccttgctgggctctcaggttacccactgtacttggcaaggcttcaagtgaccataatgagtttcccatccaccagctgtagcccaacctgtcttgcttgcaataagcaa

SEQ ID NO: 6256 - DNA, 535 bp, mus musculus
tcccctttccctgtggttacttaagagcaatgagaatttcaggaagcctatggtctctctctgtggccaccagcacatgattaatataattgatcacttatgcttagcaaaatgcataaagggtagtatcctcatgagaacttttggttgctcacgctctactagaatctttgggctgccacaaatgaaatccaggacgtttgtttctaggttttatgcccctttgaaaaattcaaagccaggtaactaagatgatgtaaagcaacctcagagagaatccttctcactctgtaacagttgtgttctttgcaggagacatacagctgatactctttgtttaggttttatcttcattctccaatgtctctctcactgggatctgcagatctaaaaggagacaaatcaaattctacattgggggaaggtgtgctcagccacaacatagtactaatttcatttagatgggcaataatcatctattgagatcttcccaccaagaaccgtggctgtctgagaccaggaagatgcagcagga

SEQ ID NO: 6257 - DNA, 676 bp, mus musculus
gggcgggcctctctactcgaaggtgaccacgtttagattctgagacgggaagtggagggtgaataggtcaaggcggcctttttttttagtttaacttttccttttttgctgtctagtcatcctcgtcggtcttctgcttcttggtatcgacatcgtcatcctcatcatcttcagctgcccgcttgcccgtagctgtctcagcttcctcatcttcatctccatcctcttcctcaccatcaccttcttcctcctcctcttcctccccaccttcttcctcttcttcatctacctcattgtcagcctcctgctccccattttcctcattagcattcccgttagcaggggcgtctcttccattttctgcctcttccacaacttccttcttctcctgtaagtccttggtggtgatttcggagctggtgtctacggctgcgtctgacatggtggggcacgccggtgatccgatgcaggcgattaaaaagaaagcgagagttcagggactctggcgataaagctgccggagtccgcggcggcggaggaggcgcgtggcggaggcggctgcggcgagcaaggaggctgccgcgagcaaggaggctgccgcgagcaaggaggctgccgcgagcaaggaggcggacgaggaacaatgcaaagatggcttttcagagcagccagtggg

SEQ ID NO: 6258 - DNA, 885 bp, mus musculus
tcattaaaaatggctgactctaacaatatgtacaaaaatataaaatgtaaataaaaaatacaaacaaatttcctttttaaagtacttttaagaaaaaaagcagggccttggaagttttggttcttttttcctcccctgttgcaaattctcatggtttgggttgggtggtggagagcgcgtgtcatctgcgggtggcactgtccacggtgggcgggcgggcctctctactcgaaggtgaccacgtttagattctgagacgggaagtggagggtgaataggtcaaggcggcctttttttttagtttaacttttccttttttgctgtctagtcatcctcgtcggtcttctgcttcttggtatcgacatcgtcatcctcatcatcttcagctgcccgcttgcccgtagctgtctcagcttcctcatcttcatctccatcctcttcctcaccatcaccttcttcctcctcctcttcctccccaccttcttcctcttcttcatctacctcattgtcagcctcctgctccccattttcctcattagcattcccgttagcaggggcgtctcttccattttctgcctcttccacaacttccttcttctcctgtaagtccttggtggtgatttcggagctggtgtctacggctgcgtctgacatggtggggcacgccggtgatccgatgcaggcgattaaaaagaaagcgagagttcagggactctggcgataaagctgccggagtccgcggcggcggaggaggcgcgtggcggaggcggctgcggcgagcaaggaggctgccgcgagcaaggaggctgccgcgagcaaggaggctgccgcgagcaaggaggcggacgaggaacaatgcaaagatggcttttcagagcagccagt

SEQ ID NO: 6259 - DNA, 1004 bp, mus musculus
taccttttgctgcttaagaactgtcctgaggccagtgtggtggttcacgcctctaatcccagcattttgggaggtcgaggcaggcagatcacctgaggccaggaattcaagaccagcctgaccaacatggagaaaccttgtctctactaaaaatacaaaaaattagccaggcgtagtggcacatgcctataatctcaggtgtttgggaggctgaggcaggagaatcacttgaacccaggaggcagaggttgcggtgagccaagatcgcaccattacactccaacctgggcaacaagagcaaaactccgcgcccaccccccgccaaaaaaaaaaaaaaaactgtcctgaaacattagtggcttaaaaagccatcatttattttgcttataattctgtgagttggttcattagttctttggtttgggccagctatactaatgtctggactctctcattcatctttggtcaactggtgggttagtcaggttctagatgatctaagaaggcatcatttacatttctggtggttggcgcatgttgacagcactgacaggagaatctgggtcatatgtatctcatcctccagcaggcaagcctaatatatttgtctggattcaccaaagaaacagaatcagtaggatgtatgtgtgtgtgtgtgtgtgtgtgtgtgtatatatatatgtgtgtgtgtatatatatatatgtgtgtatatatatatgtgtgtgtatatatatatatgtgtgtgtgtatatatatatatatatatataatgagagagagatttattataaggaattgttttatgtggttttggaggctgaaaagtcccaagatctgcagttggcaagttggacacccaggagagctgatggtgtagttccggtccaaatcagaaggcctgagaaccaggagagctataatttaagttcaggtcagaaagtcagcaggctgaagacccaaaaagagctgatgttttagttcaagtctgaagacaggaaaagca

SEQ ID NO: 6260 - DNA, 411 bp, mus musculus
atttccttctgcataaagtgagaatcacactggagtacttaataaataagttggtaatacctcataaaagtgctgtttttgatctttaaaagggccacagttgaacccctgtgaaaataagagaaaagaaaaaaggggagggggcacagagtagcaatactgatgtccttcaataggtaaatggataaactaactgtggtacattcatgcaaagataaaaggaaatgagctacaaagtcatgaaaagagatgggggaaatttaactgcagattgcttaaatacatgtcttaaatacacatctaaaaaagctacatactgtgcttccaactacatgaaaaggcaaaactatgaagacagtaaaaaacaaacaaacaaacaaaaaacagttgttgccaagggtttgaggcggg

SEQ ID NO: 6261 - DNA, 1338 bp, mus musculus
aattattatatccaagctttatgaggccttttttttgaaaaatgtttttctaaactgaaaatgaagaggataacatcttgaatgtaatccttgacagcttctattatggtttctgtcaccttttagtatacttcctaactgtgcgtactacagaaaatggcaaggaattaatcaggttgccaaaagagttgggttacacagcatgcagaaagcacttcagctacattatttgtacaatttctgtagggagttgtgcaatagaggccttaaatttaatatgtctggcccctttccacctggactcagttcaaacccattgcctgcagcttgctgaatccagagtgggaaatcagtcattatattaggaaccaatggcaaatgattccaattcacatttttcagctggtacattttttaacctagagcaacaccaaattggaaaattctgcaattctgcaagctgggcattagatctatattgcagtctaaatacatttctagtcttaagaagttgacaagatgatttttctttagaatttctttagttgatgtgccattgacagaaatttcaaggtctaccacatcatcaccttttgctggtcctttgtttttctcactgagggtaagtggtggtgtcagtgccataaactgcaataatctatgaaacattgactcgactcctttatgcctgtggccacattaggtaaattgaaaggccatatgcagcaaaatgaaactttcttggagattgttaaaaacaaacaaacaaacaaaaaattccaagcatagtgtctcttgcctgtaatcccagcactttgggaggctgaggtgggaagattgcttgagcccaggagtttgagatcagcatggacaacatagtgagaccccatatctaaaacataaaaataaaaaaaaaattagttgagcatggtggcacgtacctgtagccccagctactcaggaggccaaggtgggaggattgcttgaacccaggggactgaggctgtagtgtgttgtgatcatgccactgcattccagcctggacaacaaagtgaggccttgtctcataaaaataaattattttttattagtaagtaaacataaaggaaagtaatgctatatggaaaatgaaatgaagaagcaagtaatagaaaaagaaaggccaaccacctcttaaccatatgaatatatggtcaaacatgttggtagcaaggaaatgtaaaataaaatataaatgagatctcactttctattcttcacattgaaaactaatatcaagtgctggtgagaatatagggcaacatactttgctggtagaataaagaattgctacaacct

SEQ ID NO: 6262 - DNA, 670 bp, mus musculus
aaacatatttaaaatcctagtcaaaggaatcaagatcaaaaactctgatatataggaacagtatggagaattaaatcatatagtatgaaaaaaatgtaaacgcatcacctaaactgatgggctttctcaagaaaagcatcaaattgactttgtccctgatgtttccgagatgctcacggaaaacaagagcatttgctgccacttatcaagacttccagtttatgctttctaacaggcagcaaggacagcactgttgaaatgctgggttcaataaggactttgttcagtgtaatcctggggccagtaaattcaacagcgacagcataaagacataatttgatgctctttgctatagaactccacatatctctgcctgatgccctcggccactttatttatttgctacattccagagtcttagttattaagttgtgctttacactgtacaccccaaacactccatttgttcattcattcactcattcggcaattcaacaagcctatctcaagagcctacaaaatgccaggcactgttccaggggctaaagatagagcagggaacaaagcagacaaggcccagatctcctggagttttcaaaaatacaggggatgatgaatgataagtatcttcccaagctaagaaactaggggctgcacgaaggaaacaaaa

SEQ ID NO: 6263 - DNA, 298 bp, mus musculus
acttgagaattgcattgacttctatagaaattgcatttttccagcaaataatcttggatgaattctcgtctttataaaatttattcttctcattccagaatgacaagtatgtcttcactgaagttattatgttattgttcatgaaagttttatggtatctttcaaatatgtttttgagcaagagttttcatcaaatagttttagtattgttatggtgaaaacaattttctaagaatatttcctttgtgatatgtctgaatattttcaatctacgttttttaaataaaaaaattcttat

SEQ ID NO: 6264 - DNA, 304 bp, mus musculus
aataattttcctaaccagacctcagagaaaacacataacagtcaccacaattttttatttctacctaagatgcagaagaattatcagagaaaacaggtttggaggtctttgtatttttagttcaaatgtgtgtgtctctttaaggtagtatatgactatagccctccgctggaaaaaatatatatatatatgtatataggattaaaatgcaaggttgaagtgtccagtctgttaggggcttacaaatgtgacttttatgatttctataaaagcaagagaaaataaggtattttcctgcagaaaa

SEQ ID NO: 6265 - DNA, 1496 bp, mus musculus
actggaagcttgttggcatagggattagaggtctggtctctacgataagctagccacgatgttgagccttcaaccatcgataaaatcacttggaaatccagtatccctgttagagttggtttcagtgcccatgttgcatgctgctttgtcagggtcctcattaagactttcttcctcccaccttagacagcactgaccctctgttcaggctcacacagtcgctgtcacccaggcccacctgcagctgtgctgccactcaccaaagtctgagaggaactgctcccttaccaggacagtgagcactggcccaaccccactgtgctcctccatgtgtgtggggagtggcctccccaccccctgcccagagcaagaactgattctgggtcacccacccaggactagaacccagagctagtctgcctcactcctgaacaaccaccgctcccaccatgggctgggctcagcaccctgcttggggcttcgtggaatatgtggcatgggacctggcctcaggaagcttattctctatttggggggaaagtaacaagataatacaagacagcacagaatcctgttcatatttctgtggcacggtcttacggatgagaggagctcagaggagactaatatgggttaaatcaggtaggaaagactttgagaggccataagaacttgagcctgactttgaagggtgggtaagaaatagaatgggtgctcccaatggagggaacaccaggcaaagaaaggagtgagcatggcatgggcagaggccaggggagaccaatgtggcaacgcctttcagggactagcaaagatagcaggccggactgccctatgtgcaaattaccattcatataaatgactgataccctttactgagaacaaatgaggagagagagagagtaaatacaaagtgactgcatgcatgaatcaattaataaacgaaggtgtcgagcacctgaaggcaggttggaaaataggaaggaccagcaaaggtaggtgggggttggggaagccaagcactgacttcttggggatgtattatagatgtggttgagtagagactgctcctatcagggaaggtcacagaaaggtcccacttaaattactagttgagtccgctatattttgtatgaaatacatacataaaaagtatgaaaacagcctcttcttttgcataacctttgagaatttccccgatcaaatcctgcagctgggtgagcaactccctggctcgactctgtgtggcctccaggtccagggaccaagttttccccaggcttccttgcagcagctttctccctccttcatggctgacctgcacctctcccctccatggggggaaggtaggagtatgagctcagtgctggaagctgctgttctgggagagttgcttgtgccacaggagtcaaatgaacttttccccacgaggccggcccctctgctgatgctgtgtttgtaaaaccagtaaaggttttccttttgtgaaagagaga

SEQ ID NO: 6266 - DNA, 793 bp, mus musculus
ttccaaattgattttcaaaccaaaattggaacagttctcaaatgctcccaggatttggggctattaatacagaagaacaatgagaaggaaaaagtgagtgtgtaagaggtgatttatgactgaaaggaagttacagcctcggaaacttgtatgtaacccaatcacgaacccttctggagatgttccagggaagagatggagaatgtaaagggagagggtttccgagggatattaaaggttatgaaaggaggtaatgtgggttttgggcctgaaatgagcaaggaagaagctgatcatgttgaacatttcataaccacagcaggtttttgtgcagctgtcatcggtgcctgagacaccccatgagcctttccttttatttatttcttaccattagtccatcaccagacaggttaaatggcaggaagagagtgtccccacaagagtgtgagactgtgactgctgctcaaacccatggtctcgtctcaggtgtccagtcttcaacagtcaaggtcacagctctagctgctaatcagtaagaccagccatggccaagatggagtggaggttcacaggaaagtgtggttgggcagccagatcctggtcaggtgttctggaaatgaacacgtaacatcccctgtttttttcgtagtttttgcaaaagttatttattatttacagttttattggggtggaattgatatacaagaagttgtacatatttaaagtgtgcaatttgatgagtttagacaaatgtatatgccaatggaaccacaactacaatcaagattataaa

SEQ ID NO: 6267 - DNA, 570 bp, mus musculus
agccctctgtaccacaagggttgaaagtgtataaactacattttccagaccttcttgttagcagagatctggtttgggctcttcccatgggacaatgcttgggcacttaggggcagacagggaggaatgaacttcttcattcagtcctggcagcagtggcaccagcagatggctgcacacccatgaaggcagcagtggaggcttatggcctcctgcagcagccacctgggcagcacaggggctgaggggcatggaacagaaaagtgcaggctctggggtgggcagtgatttcctatagttctcatctgtggatcataccatgactctcttttgcttctccagccctcttgacaattttgtaacttaattctgtgtactaaatctctctctacttgaagtgtctagagtggtttctgcctttaagattaaattatgggctcaagaaaatccctaaaccccaactctatctcttcctagttctggtacttggataagttaatggacctttgccttattcacataatacctagctcaaaggtttgttgtacaaacttaatgctgcagtacata

SEQ ID NO: 6268 - DNA, 1307 bp, mus musculus
tcaggtgggccttggcatcttcttggggcagaaagctggggagtgagcagggaggaaagcatcaggcttggtggcagctgagatatgccttttgtttggcagggtttgacactagcatcctgcccatctgcaaggactccctgggctggatgttcaacaagttggacatgaactatgacctcctgcttgacccttcagagatcaatgccatctacctggataagtacgagccctgtatcaagcctcttttcaactcgtgtgactccttcaaggatggcaagctttctaacaatgagtggtgctactgcttccagaagcctggaggtaaggtgggatggagggttggggtccctagcccagggcagccttgctggagcagaggaggactgcgtatgactatgaattgggcagagagccacagccagagaataaataattcattccatttaatgccaggcccaaagtctcatttcttccagtttatttctgcttttaatgtggtatactagaaaaaccaagagtataaatcaagtagtcagttacttctgtctgttcctccctttggggaagtctctcaactgtccgtattttcatctatacaatgggtatagaaaccttcatgacataatccaaaggtcactgtgagctctcaatgtaaaaaataccttaaaaatgtaagagacaatgaaaatcattctcattgagaaagtcacttgtcagtttctctaggataagttcagatttatactaagtgtcctagacaagaatattttggttataaataaactccagctaatgaaaaaaagaggcaagatttggggaatagaagaaaagataccaggatatttcatataacccaaagtcagacaggttggcctgctgggggattcagattaaggacaggaagccagtggcaggtgccctgactttacctccctctgtctggggggtgcacctgagtatggcagtcacagttaatgggaccagaagagacaggcccacatcgggagaacatacaactacaggcatagctggtatatcccaccgccaggaaaggaggatggctgctaatatgaaagtatttaagttatgtatgcatagacaatacacacacaacaaaaaacgtgggtattcagtgaaaggtaagtatgtgtgtatgggatttcaagatatgttcttaaaattactagtcaaaaggcatgtgccttttaaaatttgagcaattgacctcacctccaaagaggtggtaacaatttttactttcaccaaagatatatgagaatacctattctctatggcgttaccaa

SEQ ID NO: 6269 - DNA, 1398 bp, mus musculus
ctgcagtgctattattaatctcatggagcatggaaaaaatacaaactcagatctgtctgccccattttcatctgtgttgatgttcaggacagaggatcatagtgggtgatgccatcactgctgaattaaaaggcaaatttccctccagccatgatgtctctgtctttgtttcactccctttccctccatggtccccctggcctgctccaggactctactgtgaatcccacagattgtcatggaagggcagaagtgtgttacaactttgttttcttaacttcttttttttttttttggaacagagcagcactttccagaggtgatgctaggagaagaatttcttagcctgagtctggaccaggtgtgcagcttgatatccagcgacaagctgaccgtttcttcagaagagaaggtatgacatggctcactggggaaacgggaacctcactcgtcaggtggtcatgggaaggacttgtggtttggtgagatcttttcttttctttttttttgagatggagtcttgctctgtcggccaggctggagtgcgatggtgtgatctcggctcactgcaacctccgcctcccaggttcaagtgattcccctgcctcagcctcctgagtagctgggattataggcacccgccaccatgcccagctaattttttgtattttcagtagagacagggtttcaccatgttgaccagactggtcttgaactcctgacctcaggcaatccgcccgcctcagcctcccaaaatgctgggatgacaggtgtgagccaccatgcttggccaatcttttcttttctttcagagaaaaacaacagcttttttttttaatccctttaaaaataaaaattataaaaaggctttctggctcatgactgctacattctagactctttagagaagaaataacagtgatgatcatgatgacaaagctgccactatttactgaacacttacagtttgccaaacactatgctaagtgctttatgttcttgggctcattccacctctaccatacccctgtgaagcagacattactattgtccctgcattacagaagaggaagcaaattcagattcctcttctaccagtaaaaatttctttatgccagtagatgtagtctactatagtgaaaatagcataagcttcagtgttggccagcaggtccaaatctcagctccagtatttacaaattagttatgtgaccttgggtgaggtactttgcctctcctgtgtttcctcattttgtaaagtgaggataatagtattagaacatattccatagggcaattaattgggataatatatgtaaaatgcatggtatagtccttggtacctagtaggtgttcaatcagtattagcccagtttattatttaccctgcacctggaa

SEQ ID NO: 6270 - DNA, 1398 bp, mus musculus; identical to SEQ ID NO: 6269

SEQ ID NO: 6271 - DNA, 1398 bp, mus musculus; identical to SEQ ID NO: 6269

SEQ ID NO: 6272 - DNA, 1261 bp, mus musculus
gtgtcctactcgcttgtggagcggcgggtgggcgagcgctcgctgtcgagctacatttcggtgcacacggagagcggcaaggtgtacgcgctgcagccgctggaccacgaggagctagagctgctgcagttccaggtgagcgcgcgcgacgcgggcgtgccgcctctgggcagcaacgtgacgctgcaggtgttcgtgctggacgagaatgacaacgcgccggcactgctggagcctcgggtgggtggcactggtggcgcagcgagcaagctggtgccgcggtctgtgggcgcgggccacgtggtagcgaaggtgcgcgcagtggacgccgactcgggctacaacgcgtggctttcgtatgagctgcagccagctgcaagcagccctcgcatcccgttccgcgtggggctgtacacgggcgagatcagcaccactcgtgtcctggacgaagcggactctccgcgccaccgtctgctggtcctggtgaaggatcatggtgaacctgcgctgaccgccacggccacggttctggtgtcgctggtggagagcggccaggctccaaaagcgtcatcgaggcagtcggctggcgttttgggtccggaagcggcgctggtggatgtcaacgtgtacctgatcatcgccatctgcgcggtatccagcctgctggtgctcacgctgctgctgtacactgcgctgcggtgctcagcactgcccactgagggcgggtgccgggcgggcaagcccactctggtgtgctccagtgcggtggggagctggtcatactcgcaacaacagccgcagagggtgtgctctggtgaggggccaccgaagacggacctcatggccttcagcccctgccttcctcctgatctgggatcagttgatgtaggcgaagagcaagatttaaatgttgatcatggcctcaaagtaagtccatttaaatttagaactcataaattctatttgtggaaattgtagttactttaaaagtgtttcagatttagtttttcaccgtattttatagtgaaaatttaaacattgtttagtttttagaaaccttttataattaattgaattttctcagtggcataatacagtattaatcattctccacaagttgggtctatcttgaaactcaagttatggttggatgatatccattttttactgaatatttattttggcctgccttacagccgtcttctctgaacaatactctaaggacgttcagggcattttgatctttggtgaaagtattccc

SEQ ID NO: 6273 - DNA, 1261 bp, mus musculus; identical to SEQ ID NO: 6272

SEQ ID NO: 6274 - DNA, 1261 bp, mus musculus; identical to SEQ ID NO: 6272

SEQ ID NO: 6275 - DNA, 1261 bp, mus musculus; identical to SEQ ID NO: 6272

SEQ ID NO: 6276 - DNA, 1261 bp, mus musculus; identical to SEQ ID NO: 6272

SEQ ID NO: 6277 - DNA, 1261 bp, mus musculus; identical to SEQ ID NO: 6272

SEQ ID NO: 6278 - DNA, 1261 bp, mus musculus; identical to SEQ ID NO: 6272

SEQ ID NO: 6279 - DNA, 1261 bp, mus musculus; identical to SEQ ID NO: 6272

SEQ ID NO: 6280 - DNA, 1261 bp, mus musculus; identical to SEQ ID NO: 6272

SEQ ID NO: 6281 - DNA, 1200 bp, mus musculus
aaacccacctatggttggtcactgcacggtcctagtggaactactggatgaaaatgataattcacctgaggtgattgtcacttctctgtctctcccagtgaaagaagatgctcaagtgggcaccgtcattgccctaatcagcgtttctgaccatgattcaggagccaacggacaggtcacctgctctctgacgcctcacgttccgttcaagctggtgtccacctacaagaattactactcattggtgctggacagcgctctggaccgcgagagggtgtcggcctatgagctggtggtgaccgcgcgggacgggggctcgcctccgctgtgggccacggccagcgtgtctgtggaggtggccgacgtgaacgacaacgcgcctgcgttcgcgcagtccgagtacacggtgttcgtgaaggagaacaacccgccaggctgccacatcttcacggtgtctgcgtgggacgcggacgcgcaggagaacgccctggtgtcctactctctggtggagcggcggttgggcgagcgctcgctgtcgagctacgtgtcggtgcacgcggagagcggcaaggtgtacgcgctgcagccgctggaccacgaggagctggagctgctacagttccaggtgagcgcgcgcgatgggggcgtgccgcctctgggcagcaacttgacgctgcaggtgttcgtgctggacgagaacgacaacgctcccgcgctgctggcgtctcccgctggcagcgcgggcggtgcagtcagtgagctggtgctgcggtcggtggttgcgggtcacgtggtggctaaggtgcgcgcagtggacgctgactctggatacaacgcgtggctgtcgtatgaattgcagtcggcggcggttggtgcacgcatcccgtttcgcgtggggctgtacacgggcgagatcagtacgacgcgcgctctggatgagactgactcgccacgccagcgcctactggtgctggtgaaggaccatggcgagccgtcgctgacggccacggccactgtgcttgtgtcgcttgtggagggcagccaggcacccaaggcctcgtcgcgggcttcagtgggcgtggcgcccgaggtggccctggtggatgtcaacgtgtacctgatcatcgccatctgcgcggtgtccagcttgctggtgctcacgctgctgctgtacactgcactgaggtgctcggcggcgcc

SEQ ID NO: 6282 - DNA, 1200 bp, mus musculus; identical to SEQ ID NO: 6281

SEQ ID NO: 6283 - DNA, 1200 bp, mus musculus; identical to SEQ ID NO: 6281

SEQ ID NO: 6284 - DNA, 1200 bp, mus musculus; identical to SEQ ID NO: 6281

SEQ ID NO: 6285 - DNA, 1200 bp, mus musculus; identical to SEQ ID NO: 6281

SEQ ID NO: 6286 - DNA, 1200 bp, mus musculus; identical to SEQ ID NO: 6281

SEQ ID NO: 6287 - DNA, 1200 bp, mus musculus; identical to SEQ ID NO: 6281

SEQ ID NO: 6288 - DNA, 1200 bp, mus musculus; identical to SEQ ID NO: 6281

SEQ ID NO: 6289 - DNA, 1200 bp, mus musculus; identical to SEQ ID NO: 6281

SEQ ID NO: 6290 - DNA, 1200 bp, mus musculus; identical to SEQ ID NO: 6281

SEQ ID NO: 6291 - DNA, 1200 bp, mus musculus; identical to SEQ ID NO: 6281

SEQ ID NO: 6292 - DNA, 500 bp, mus musculus
gaggttatgagctttggacagaagcgtatttgaaacgggtatttctgtttttctttaactgtattactgtgaaactgttacagctccctaatacccagtttttctatctttaaatgatttctactctggagtccgaaggttagaggagatatggcctataagtgattaccatagtgcctgccataagtccattttttttttaaatctaccctacagggatttcaaagtgggtacagagatagaggaattaaagttgatttgagttaggagagagttagacctgaatctaaagttgtaaacgttttgttaccacaaaccaagagggtggaagtgcaaaattaggctaatgataaggcaagcgtcacccctcatggaaaaaaagccagattttatagcacccagaatctcaagtagacctcaattaccaagaaattgtatgatcatctgtaagtcatcatagaaaacagaggacattttggttgtaatttcaggttttgttc

SEQ ID NO: 6293 - DNA, 1992 bp, mus musculus
tcatgaacatattgatgaagatttccaggttagcaaatacatagctcagttccttgaagggctgacaatcttgtttgttattttctattgcacagttgtaggctgtactccaagtatcacaaatgggcaccactagtaacagatagaaccgagaaatgtgtagatggcttcttgtaaaccctttattacctttagaaaagctcagattcatgacctatatagagtagttaatttgagtgtttgtatataaaatcacaaactacagatgtttctcaacttacaatgaggttatggtttctaccaaatttatattatttttgcactcgtaaagtcaaaatattttatgttgagtcatcactaattggagactgtctatattagaacagaagaccctttgacataatctaagctgaatttttctcttagagatgaggaaacaaggcctagagatagaagagtgcctttaagggacccagcaaacaagaggcaggttggtttagttgaaatgaaaatctgtttttccttctatctctttgtctgacaagcccttctactagtttctgcttctttagtcaaaggctttcagagaacccatcttttcttccccaatgggaaggaaattaatggatgtgggaatatatctggagaccccctttccccacctcaaatgttagccttgacttagttacttaaagccactgacccaagcctcctaatgaagcatggctcactctagaaggtattgtttatggacctgaagccttgagaagatgaacagtatcagtgctcagagctggcttatcagcaggtatcccagtcaagctgacagcaggacctgttactctcttacctttgtttcttagtctttcaaatccattagcatagggcatcatttgatatatttctgtcttttccttctagagttcaagtgctatttacagtgagtcttttgtaacttcacatcctaaggatatcagagcattttggggtactgcattagttagaattaaactaagccatatgggtcccctaggaacagtggtaaatcttggcagaaatgtttatctttttattaacagaaagattagtttgggtctttatgctacttattttaagcaactgtcaagcctgaagatcttaagagcttcctgcttgggaagagacttaataagaattatagttaaggtttgggatagatcaagagtcttagaaacaaatgctgactccctgttgatagagaaatcattttaagctctctcaacctctgctttccattgtataggtcagaattgcatgtcttgtcaggattgttgtacagaagatatggaatagtgccagagaactgggtaagaagctgacatcttttccagtcttcaatgagcatccatttgtgttgggacagtctggggaaaatataggatgcgtcctccctaccctcagttcagctttgagtgtttcttcaaaaggattttatatttgtcaactcacttgacattcccactatcaggtaaacatgtaagagaaaacagactttttcaggatcaccatgcacgtaattgggatacctacattttggtcctagctaggttttggtctagcccatctgaacttgaaaaagtgatcttcaaaaaatacaaaagaatgatgttgatccccaacttaaaatccttcatttgagagtggtgtgggaccacctgcccatttcttcgacctaattttttgccatcatccccctcaaccaaagcatgtcagcaacagaggagttattccattgctctgacttgcttttttttttttcctgcctcatggtcattacacatgcagctccttcagcctataatgttctttgccctgtggctttgcgaaactgcctatttttcatatttcagttcttagcttaagtgtctcttgcttaaagactttcccctgaattctacctaaagcaatatactgtagtattttctgtttcagtctttggtttggcaccttaac

SEQ ID NO: 6294 - DNA, 2921 bp, mus musculus
tggaaaatgcatctcattatttaaggctataacagtggtggtggaattgtgggagttttactgagtgagcaatgaccctcaccctcagtttcttactgttaaatgagggaataggtttttcaactgtgttgtgtagagctgtagccccctatctatcacaaacaacttgagatgttttagaagtgtgtttccagagccaggcatggtggcccatgcttgtaatcccagcactttgggaagctgaggtgggcagatcacctgaggtcaggattttgagacgagcctggccaacatggtgaaaacccatctctactaaaaatacaaaaaataaccaggcatggtggcgcatgcctgtaatcccagctattcatgaggctgaggcacaagagttgcttgcaacacaggaggttgcagtgagccaagatcacaccactgaaatccagtctgggcaatagagtgagactccatttcaagaaaaaaggaaaagtgtttccagggccaggcatggtgactcacacctgtaatcccagcactttgggaggcagaggctagccaatcacttgagcctatgagttcaagaccagcctgggcaacatagtgagaccttatctatctctacaaaaaaaaaaattagctgagcatggtggtctgtgcctatagtcccaactatttgggaggctgaggcgggaggatggcttgagcccaggaagccaagacagcaatgagccaagattgcaccattgcactccagcctgggagacagagtgagacccgtctcaaaaaatgtaaaaaataaaaataaataaaaaataaaattgtatcttcaatcaccgcaccaatcctagaacttagttattatcaccctccttttgtatgtgtggaaactaagactagagagactttgtattgatggcagcagttgctaactaactcccagctacagccaggaggcacagctggggctgcacactccgtggagctccctgggtgccactgtagccacccaaatcatgactacagacccaggcctcctgctctacggagcaggcaggagtccatcctcctggccaggggctacagccaaccaaactgtggctgtgcatcccaccctccctgtcctctttcaggggggcaggaacaggcagtatctgccctcctggatgcagctgaaactctctgacccatggctgcagacctgggcctcccactttgtggagtgggcaggagccagagacaagcaggaaccctacccctcctgagtttgtggaactggagctccctgggtacagctgtggccaccctctcaggcatctctgcagtctgcaccctcaggggcccaagaaggccccctcctctgtcccagcaggctcgggttatctgcttccactgcctggcctctcttctaccctggtgcccactcagtcttggagcagggttggggccaagctgcagggccttgaatggcagcaggaggcagagtcctggatgggcaaggttgggtccccagtaaggcccaccttcaggccaggaagggcctgatggctgagggctgggctgccagtcctgtagactggagcggggacccatgatgcctcttctgggcctgcccgtggccacccatgagccaattggcatgcacttcctccactctgaggtccataaaagccctgggctcagccagagcagggcagaagacagccagagaatgaagagggcagagaaatgatgggaccactagctgcagagaggagtaccctctctgatgatagctggagaggatgggatgaccagccgcagagaggagctactccctctgctgagagctgcagaggtgacctgctggcagagaggagccactctctctagagcctcctctctgctgagaggatattgggatgaacagttgcagagaggagctaccctctccagggcctcctctctactgagaactaaacacctaaagatgacctgcttacagagaagatctactcactgctgatctcctctgaactgttgtaacacttaataaagctcatcttcatcttgttcacccttcacttgtctgtgtacctcattctcctggatgcaggacaagaactcaagcaaaggcatgagcagccacagaggtttccgggaagaaaatcgacaccccaaagattctgtaacattatcttgtccaaggtcatagagtgtgtaggaaacaaagccagcagcaaattcagaacccctgtttttccttgcactctgccactggacccaacgttgtcaaatttcagtaatttattgcagtgttgctttctctttccactgctgtcttgtgtcctatgagaatctgacttaggcttgccttcattgcatgctgacagtttttctcacctagcagctatcatctcaggactcagtgtcaactaactctaatctgagtatactcacattctggaagctatcatatagaggaacacaacctacattcttaacatagggtgtctaatagtggcaggaaggtcaagggaatttgggggtgtatgtggcctttatccctacccaaatcctatcatgtaggcaacctctacctattccataaacagaattagatggttccaggggaactgcagagagcttcttgccatacatcgtgtcctagagctttcaattttgaatggaagtggcagacactggggctttctctcctaggaggacaagggtcactgcaaggcatcagtagctccagaaaaggaaaaaagttgatggagatcagctgtcttttcccatctcctcattagacgagcacttccatagataggagtttatgcagcattttcctgaacagcaacttacaagcatgcaagagatattttggttgactcatttgtcacccccataaaaataagtaccctctgtgttgaagggcataagccagg

SEQ ID NO: 6295 - DNA, 260 bp, mus musculus
gccaataagtttggatttcaacctatagatgatgggggagaacaaacacaattgcaaattaaaagaaactctaccatagtcatcattagaatggtttttaaaggtttcattattcatattcttgatttattctcaatttgaggttactttactgatgaaaaagttctaagttgtccatctaaaaatggtttatgtcaaatgacgttgccaaagcaaatgctattatgaaagtgaaaatataatctcagcaggcgtttatt

SEQ ID NO: 6296 - DNA, 260 bp, mus musculus; identical to SEQ ID NO: 6295

SEQ ID NO: 6297 - DNA, 1817 bp, mus musculus
gtaacacaggctaatttctgtctttgacttcagctcttctgacccccaaggggtgacgtgcggagctgctacactctctgcagagagagtcagaggggacaacaaggagtatgagtactcagtggagtgccaggaggacagtgcctgcccagctgctgaggagagtctgcccattgaggtcatggtggatgccgttcacaagctcaagtatgaaaactacaccagcagcttcttcatcagggacatcagtgagttttggatgattatatgtgctccataaggaaagatactatttgtcacgtgttcacaatgccccatgcactgtggggtaggtggttgacaagcatcatctcttttattctgcatccaaaaacaaaatacgatgtagatactgttatctgcattttaaggaagaggaaattgagtcttagaaaagttaagcaacttgccccagatctcagatcttacagctagccgttcaaatccagatccactccactacagctgctctttactgcactttgattcagctgccagatagtttccatgatgaatcccagagcctaatcaagcataatattcatattcagaaccagggcttccttactaatggcaattattcccaaccaatccttccttagcatttgaaaagggacttctttcttagaatataaacccttccaaaatggacatctttttttttaattggcagatagggatttcaccataagtcatttcctttactatttattcattgaccaggcagcatgataaagtgtaatagaaccagagaacttgcttcaaaacttatggagggtttgtacttggtgggtggggtctagttcacatagggtggccaaggaaggcctctctgaggaggtgacatttagctgacaccaaaaggaaagatgtcagttgtgttaagagcagagggaagcatatgtgcgaagcacctgctaggagccgtgatctttgtgtggagcagtgccaggcctacagagcccaaccacacaccctagcatgtctctgcctcctcttatctagaagacctaattgaggaaggagtctttgtgaaactcactgctgtatccttcatgcacagtccagtggctggaacataatgggcgctcagtattcatggaataaacaagcaaattgagcatagagacaattgactgtaactgctccaagacatgtccgcaccaaaagctatgaaaagacaaaagaaagggcagtaaatagaaaatctatcatctcatccccagggagaggctcagcttagttccatgttcagtgcaaagtgagggattagcacagacagggtggtccttcaatgcatggcccataaccattaaagcagaggtcttctcactgtgcggtcccatctgattgttcagtgatgaggattctgagcatctctcagatcctgcaatacatgtggatctgagatgtggccattgataatgactgccttcccgaggcaccagcgtgagcacctgcggcagaggtgcctcacatttgccagccaggtgctcacagaagttaagtaactatccagtggactcacagctgatcaaaggtgcaagtgagatcataagccaaaaccactgaactccaaagccttattaggaaaataaagcatgtttatcctcttccacagtcaaacctgacccacccaagaacttgcagctgaagccattaaagaattctcggcaggtggaggtcagctgggagtaccctgacacctggagtactccacattcctacttctccctgacattctgcgttcaggtccagggcaagagcaagagagaaaa

SEQ ID NO: 6298 - DNA, 972 bp, mus musculus
ttcaacacctagtgaaaaaatgctaggattcaggctaccccaggaagagtgatggaatcatggatacagctcacgatattaagtcagatgcaacagcagctgttgacatctcgggggagccgtgaagtgggcacttgaactttgactgcactgaaatgatgtcacttgccaaagacagccatctaacctcaaaggctaaaaagtgcccggcacaggataccagagtggttcaattaatagcaagaaattttcatagaacagagaaagaaagacatcagaggctaaccagaagactaaggtggagagaggcaacagtagatcagagagttactgagaacaagtattaaggcgatcagccagcagcactaatggagggtcagaaggaattgatggttagttactagcaggccctgagcacagctggtagccgcaggaagagctggcagggtgagaggtaggagcagctaatcaaactgtctaatgggctgattagacaagcagtgggatcaaccaccaggggtaggcgattcaactgccagaggatcagagggacaggaaaggcaaagacagaacaaggtcagtcaggggcctgagtaaaagggaagatgattgggtggcagtctgatcagccagctgtgacagctcatcaaacaataaagggagccaactgtagtagtagcaaggagggccgaggggacggaacagtttacagagcgggataatctcgcagtcagaaaagctaatcaaagctgacaggagctcctcagagctaggggcgggactagtgaatttgcagccagtgcctttggtcaagggtttattttttcacatcataagcagagcatgcagctcagctgctttctctgctgtcccaaggctcaggggactgagatttgaagactcgttgacaaagtagggcagagatgccaagtcccagctcctataaatatggcagcctagaccaggagctga

SEQ ID NO: 6299 - DNA, 1020 bp, mus musculus
tgcactctagcctgtctctaaaaaaagaaacgagtgtcagataattctttctctccctcaatgttctcagcttcataatttgcaaatgaaattaactaatttttatgtgttgaagaagagatttaatatgttgcttctaaggtaatctcagatatcgtgacttttcaggttggtggacttttcaatactacagtccacctaggaagagttacatctctgaaattggaccaagtcacatgttcttgggtgtacttatttttgatctggatcttttatatttcacttacatgttcttgtaagtgaaatgatcttcaggaaatgttttgaatgaggaaatgaagtggagcagcaaccacctgcttgtgggtttgtatcgtatcacgaagggctgatgggccagtctggtgctccaagaatggcaatgacccatggcaaatgcctcggcagtggtggcagtagaatcctccctggccatggggccagctgtttctgactgcacaccatgtagtgagaagttcccttttcaacctggacattttctaggaaccacatgggctgttaattttacaatggcaaatataactgcagatggctgtgtgcaagattgggctgcaggataaacatgatgaggtacccactttctggggacaaaatggaaagctttatcttttctgttacacttatctcaacagcaattagaatcacaagctattgccaagtttcaggtacacttactgatatgtgatgagaaggatatgaaaagtttgttgtattcaacaaatgagcccttcctcgaataagccctcacatcatttttatcatcagcttgaactaatactttgctctacaccccctactttacttgacttttccccatgtaaatttgggcatgttaatccacaggcatttatttattatctactctgtgtgctttcctgtgcatttggaaatatcaagaaaaaatcaagtccgatcttcatccttaaggatcttgaaatcgaataagagctaagaataaaa

SEQ ID NO: 6300 - DNA, 288 bp, mus musculus
attcaagtgttcattccatatctattaaatatctaaaacgtctgaagcaagggagtagtgggtgtaggaaataaaaagagttacttttatgcagtagacagtcttgttggaaagacaagacgttaaacacacataactcagtatgcattgaaactatgtggaagatagtagatggttaggtgccaaaacaaatattagaaagtgaacagtaaaggaggtgagtgagaggagttacacatgtagataagagaagacaatagaattagaacaagattttgtaaaatgtgg

SEQ ID NO: 6301 - DNA, 289 bp, mus musculus
ttattgttagtgtttaaaagtttggtaccaagaatgccattcctgtcaatggattgtcattgtagcttgctgactatatctattcttttacatttttaacaaatattgagagcaacaaagagactctataaattcttctctacatataacatcctggataactgaaataaacagtaatttcttgagagatacacattcataatatttaatgtaggaaatgacaaggaagtagggagaggcagaaaataaagcatgtgcaacatcctaagttacctactaaatgtgttgg

SEQ ID NO: 6302 - DNA, 366 bp, mus musculus
tattatgtatttttgtaggttagaagtctgggtgtggactaactggacctctctgctcagggtttcatcagactgcaataaatgtgctgattggggatgcactttcatctgtggttcagagttcccatgcagtctcagtgggtgttggcagaattgatttccttccaggtgtatcagtagcaaccccatttgcttactggttgttctccgctactagaggcagcctagcctgctgttctgtgccatgtgaccctctccacagtgcagcacttggtacctcttaggccaacaagacagcatccaccacagcttttaatttctgactcttctcctctttgacctccaggtcctttttgtacaaagact

SEQ ID NO: 6303 - DNA, 563 bp, mus musculus
agaaatgaagcttgggctaagtatacaaataagtcaatgccctttgaaaagcaaaaaagaaacaatccagcctggcttgccctaatgaaggcagcaagacaaggtccaaaccatctgtaccaaaaacgtcacgaattcagatgtaacttaggtggtcattgcacctttaagtctcttcttttgggtaggtattgtgttttacatgaatttgcagaaagagatcacaatctaataaaagtctcaagtttaatcctgaaaaggaagcagatttatgtgtgaagctttctctgggctctaatttcctaatcacatatatattaatgctgatagaacttgtctttgagaggtacagctcttaccaatcttaggaagtggtaaaagattctgctacttcactctctttttacatttttggttcatatcagtatcctatcagagtttacattgccaatatgaatactggcatttgcaggaattatgacaaatgttagtggtttgggcagcaatgtgctaagaaatgtttaacaaatgactctccagaaaaaaaagtatgcacatatatg

SEQ ID NO: 6304 - DNA, 679 bp, mus musculus
acaaattataatgagtttggttaagtgtttagatataactttacataaaaggcatctgatatggtttggatgttttgttccctccaaatctcatattaaaatatgacctgcaatgttggaggtggtcctgtggagggagttggggggttggttgggtcatggggatggatccctcatgaatggcttaatgctgtcctcacggtaatgagtgacttctcactctataagatcacacaagacctggtggtttaaaagagtctggcaccctctccccctctctcatgccctttctcaccatgttacctacatggacttctgccatgattttaagcttcctgaggttctcacaagaagcagatgccagcattgtgtttcttgtacagcctgcagaatcatgggccaaagaaatctctttttgttataaattacctggtctcaggtattcctttatagcaatgcagaatgaactaacacagcatctctcaagtgctctgagtggatcttactaggatgtatgaccttaggagttaattgacctttcccaagcttcagtttctttacctacttaataaggaaaccaacggtgcctatgtcatggacttactaaaagaattaagtgacacaatgtttatatatcactgaaatataattgccaatatttagtagaactgttagtagc

SEQ ID NO: 6305 - DNA, 396 bp, mus musculus
atgataatcagctgtagagtgaataaataaattgtggtaaattcacccaatgcgatacagtatagaaatggaaagaagtgaactacagctatgcacaatgaaatgaatataaaggagggtgctttattatttcattagtaaaaaaatgaaaacaggcaaaaatcatagtgtttagataagtctaggtgtgtaaacaatagggaaaagcaaggaaatgatgatcaaaacaattactttggaaagggagggaagaagtataatggaaagagagcacaaggaggcttccaaggtgctggcaacgttccattgcttcaccaggaaggtggttatgtggatgtccattttgtaatacatcactgatctgtacatttttattttgatctctacatttgaaaa

SEQ ID NO: 6306 - DNA, 1026 bp, mus musculus
ctccttatgttgtgttcagtgctacctgaggccaaagatctttaaaggtgaacaaacttcagttttaaaaaaaaggatgcttaacaaatgaacaaatacaattataaagtacttgatgatgatgataacttctatgaagaaaataaaggagagtaatgggatagtaatggaggggaggactggataagggacaagatctgcaaaatctaaggagggtactccaggaaagtgtaaaagggaaaagtcagttgataaggagaaatcagtttgaagttgtcaggagcaggaagagcccgcagggccttgtggtgatccacacagcctgggaggaggtcaaacgattaagcaaggctggaccatttgagaactagtaagaccaccaaggagtctggatcttattcaaactataataggaagtcattggagggctgtaagtgagacagtgccatgatcagatagaatttttaagagtatattgactgtgtaggaagaaagtggggccaagggggccttgtagcagctcttcaggcaaaggtcaatggtactgtgggctaggatggcagccacagagttagtgaaaagttctcaaatacaagtgacttaagacatttctttttctgcttgattttattcttgtgagatgtaagactattgaacattttgtttagcgtttaaaagtgaatttctgactgattatctggccttgccaaaatgaaaggcacacaatggcatctgactatttttctgggcagctccagccacctctacctcagtacttcgggtgtaatcaataaacataacagaggctattcattccaccaggatggattccaacaaaaggcctctgttcacactggtaataggcagacttcacccgctccatcacattatgtattatgtctcgcactcttcagtcacctacctgctttactgttcagtggtaatgaaatgctctgttgacataagaatcattataaagctgagctgtttacacttgtggtggccaagacaatgtccctccaatgg

SEQ ID NO: 6307 - DNA, 1492 bp, mus musculus
caccgtcctgacccccaggagcacactcacccatggggtcaggctgctattagaaattccttccagagatgccaggtgagagggaggcaggcagacagacatctgtgggggtcacattcaccccagacagttcattgccggaaggaagccacatgcctcacgtcgaagctcatctgattggagtcagacacagccagatacagtcatgattgtgtccagaggcccacgggggctggcggggcccttcacgacagctgctacggcacagcccatctggaagggctctttttgttcaacgctttaaccctctgaggaccctcgggaccaagggatgccacaccctgggtgagagagatactcaaggaggagggtccctctacagaggatgagttaggacacccgggacgggcccacattttcctccccactctgcttcccaggtagattgagggtaggaggaggcccacattccacagaggagagactgtgagcctcttgagttttaagaatctgtgaaggaacacccccaaacacctaccatgcacccccaagcaagtaaaggggctccctgagttccagcagcttgagtaaaggcccagaaagtgaccctgtgaggctcatggagaagggaatgttgagggcccagcctgcactgggtgggcagcgccctgccccaacttcccgcaggttcccaggaaatgaacaaaaggctccctcagctcactcgttggcagatgtctctgacctgaggccattcatcaactctcactcaggcactcagccccccagacagcctggaggtgttggcagcacaccagagagactttcagccaaagacaggtctggtttccctgaagaaaaagaaacctgaactggctgccttcccagagcgtctgcttgggggacccacccaagtaaacaaagctgttaaatgggggcatgtgggccaaagcccgctgcactagaagctcccgctgcagcagtgctgccctgccccaggcaccactctagcaagagagagcctctcaccaccgtggggcctgaccctgctgctgaccagcctctgctacccacagcctggaccctctctccacctggagcccctctccttcctgcctccctctgattcatgcccggtgggtaggagtcctacttcctctcctcttccctgaacacagtaacagtgggtgtgctcctgaaggtgacgtgagggcaacaagactgactgaccttcctcgtccacctagggagctcatacagacccatcacatccaccccctgccacctctgcaagcttggacaggaggtgagctcctccgagctgcagcttcctcatctgtaaactgggaataacaggatctctatcaaagatgatggtgactattcagaacagacaaagccacagagacagaaacagatgaatggtttccagggctggggcaggaggaatgtggagtacctgcttcatgggtacagggtttctggtttgggg

SEQ ID NO: 6308 - DNA, 934 bp, mus musculus
ttttaacttgttctagaagtcttaatatgggctgttgccatgaaggcttgcagaattgagtccattttctagctgcctttattcacatagtgatggggtactaaaagtactgggttgactcagagagtcgctgtcattctgtcattgctgctactctaacactgagcaacactctcccagtggcagatcccctgtatcattccaagaggagcattcatccctttgctctaatgatcaggaatgatgcttattagaaaacaaactgcttgacccaggaacaagtggcttagcttaagtaaacttggctttgctcagatccctgatccttccagctggtctgctatgagtggcttatcccgcatgagcaggagcgtgctggccctgagtactgaactttctgagtaacaatgagatacgttacagaacctatgttcaggttgcgggtgagctgccctctccaaatccagccagagatgcacattcctcggccagtctcagccaacagtaccaaaagtgatttttgagtgtgccagggtaaaggcttccagttcagcctcagttattttagacaatctcgccatctttaatttcttagcttcctgttctaataaatgcacggctttacctttcctgtcagaaataaaccaaggctctaaaagatgatttcccttctgtaactccctagagccacaggttctcattccttttcccattatacttctcacaattcagtttctatgagtttgatcacctgatttttttaacaaaatatttctaacgggaatgggtgggagtgctggtgaaaagaggtgaaatgtggttgtatgagccaatcatatttgtgattttttaaaaaaagtttaaaaggaaatatctgttctgaaaccccacttaagcattgtttttatataaaaacaatgataaagatgtgaaa

SEQ ID NO: 6309 - DNA, 565 bp, mus musculus
tgttttagcctggcatgttagtctggacctgtccatctcttcagcctcatgacccataaagcatttaccctaaacgatatcgcagtctctgaatgcacacgttctggcacatactagtttgtcttccaagactcagcatcaccttctctgggaagtcttccctgattctcccaggcaacgtcagtctgaacttacactctgcttttccaggtctgtttccctacaaggacaaggagacagtgtcagtgtcttactcatctcggcatctccagcacatggtgcttaagaggtgtcgaatgaggaatgatctcatttcccgagtcctaagaatcctctaatgcactgttgttttgtcagtttcatgaattatttttcactagaacctcaatcatttttctagcccttaatggcaggcaggccggctgcttatttgtttgtatcccccagacagtaatcaatgtgaactccgcactgaccttgtggctgcggcctgccccctgctggtcagaaggtttctgggacagagacaactcaaggctgaagaaacaggggttctaaatcattt

SEQ ID NO: 6310 - DNA, 2589 bp, mus musculus
tgggctctgtggttcttcaagaatgaccgcagccgggcctggcaggacaacctgcacctggtcaccaaggtggacactgtggaggacttctgggcgtgagtgtctgtccccagtggggctagagttggggggctctgagctctgggctccctctctccgggttgagccagccctccctagggcctttcagcctttgtgagggctggggctttgtgggttctgcccagggggtatagggcacaaccaccccccaccccaccaccttctttgggctcagggagagagcctggggagcaggagaagcaggaagctgaccttgactcggccactccagggctttgtgacctgggcaagttccttcccctctctgaacctgtctcagctgcaaagggaggactcggctgcctcagtgtccgggtgctcacgggagtggctctgaaaagggctacacaagccctagggagggtgagaaggcctcggctgtagctggaggggggagcaccagggggtctaaaaccctccccaggggttggctcagccttcactgggaaggctctgtggaaaaggtgggtcttgagagtttggataaacgggagtggaatcccaggtggcaggccagtgtaagcaaaggcttggaggccatggggtcggatgaggagttgggagggctgaacccagttggaaccaggccctaaaaagccttgacttttggcatggggtcgggggctctgtccaggctatacagtcacatccagctggccagcaagctctcctctggctgtgactacgccctcttcaaggtaagctctgctctcctctttccctcccgcaaagggacaaggggttgatccctcccggactccactgcgttaatccctcagaggggtgggggtggggagctacgggccacctctcagcagagttgtggtttctgactggaggaaatgctctacaggagcccggacagagtaggtcaggcccaagccgcaccttggaggaccttaagaggcgggaagagggagagggagagatttctgacctggctccttaactagggaagggcatcagaattgcttgaggacactcattgatgccacacccatccctggagggctgacattgtgtttagagatctccccagtgacttctgccctgcctgggaaccatgcagccaagcctgggatgtcccccttgcctgcattggggtctgcccctgaggcttccttaatccaccccgatttgaatgcttgtcttaaggaactcagtaaaagagacatgcacatatacaaggctatacaaggtgaccagtgctgtctgtcggggggagctgagtggctgggggtggaacctgcttgcactgagggaagggaggataagagaatctggcctacttagggcctcagcagagagcggataaggccgggatggtgggtgggtccccatttccctttgaacacagggaggcagttgacttgccatctgccttgcaggatggcatccagcccatgtgggaggacagcaggaataaacggggtggccgctggctggtcagcctggccaagcagcagcgccacattgagctggaccggctgtggctggagacggtgagttggaggaggagggtcctcaggggaagagacgggctgtgtgggtctcatggtggcagtggtctcaaggatggcaggccagtccctatgtcccagccggtgatctcacaaccccctacttcgggtccagctgctgtgtctgatcggggagagctttgaggaacacagcagagaggtatgtggggccgtcgtcaacatccgcaccaagggggacaagatcgctgtgtggacgagggaggcggaaaaccaggcgggcgtgctgcacgttgggtgaggagggtctctggcacagggtggggacttgggtctctgctagagggaaggtgggtggagggggcttggcctgcatgggagacctctgaaagtctccatagcctccctcccttctgccttgcccacctgtatggaaggtctggcgttcagatttctaactttctcttacggcagtgcagctctccttttgcattaagggggtcatattttgggtttccacatgggtaagacacaacaggtgtggctgtggccagaatgagggtaggagtctggtggcctaagttatctctaggaccctctgatgactacctgtgtctcttttcctctgtgtcccccgcacctgcaggcgtgtatacaaagagcgcctgggcctctccccaaagaccatcattgggtaccaggcccatgcagacacagccaccaagagcaactccctagccaagaacaagtttgtggtgtgaggggggccttggcacccctcctatgtaatgggacagccgccactgagcctcattactttgggggatggggcgggactggggatcagacagcctagttcttacctgtcctcaagtgaacaggaatgcaaacactctttaacatgagttggggcctgagccttaggggctagatgggggtagtggtggcagtctgaggacctagcttgtcctggggccacaggacagcagcagggtggaaaaaactcctg

SEQ ID NO: 6311 - DNA, 1169 bp, mus musculus
ggggcggccagtctcaccactgaccagtttgtctgtctgtgtgtgtccatgtgcgagggcagaggaggaccccacatggaccgcagcagcgcccgaggccaggtatacggacatcatcctgtacgcgtcgggctccctggccttggctgtgctcctgctgctggccgggctgtatcgagggcaggcgctccacggccggcacccccgcccgcccgccactgtgcagaagctctcccgcttccctctggcccgacaggtactgggcgcatcccccacctcacatgtgacagcctgactccagcaggcagaaccaagtctcccactttgcagttctccctggagtcaggctcttccggcaagtcaagctcatccctggtacgaggcgtgcgtctctcctccagcggccccgccttgctcgccggcctcgtgagtctagatctacctctcgacccactatgggagttcccccgggacaggtgcgctgagctgtgtgggggcagggacgcgggcgccgggttgcagcccgccctccgcaggagtgactcggaggtctgaggctggactttctccatctccaggctggtgcttgggaagcccctaggcgagggctgctttggccaggtagtacgtgcagaggcctttggcatggaccctgcccggcctgaccaagccagcactgtggccgtcaagatgctcaaaggtgagtgtggcccggtgtggtggctcacacctgtaacgccagcactttaggaggctgagggtgggaggatcgcttgaatccaggaattcgaggccagcctgggcaacatggcaagacttcatctctacaaaaaaaaaataagaaaattagttgggtgtggtggtgtgtgcctttagtctcagttactagggaggctgaggcaggaggatcccttgaatccaggagttggaggttgcagggagccatgatcacgccactgtattccagcctgggcaacacagtgagaccctatctgaaaaaataaataaataaataaaaataaaaggtgaacgtggcagcctggaggaggtgctatggcattgggactaatagaaggggctcacggtgccaccaggtgagccctggagctgggagaggctgtgggatcccacccttaaacctgcaattcacctctgctcctgaccctggc

SEQ ID NO: 6312 - DNA, 1169 bp, mus musculus; identical to SEQ ID NO: 6311

SEQ ID NO: 6313 - DNA, 2026 bp, mus musculus
ggatggaatggggaggcagggctgtggttttctcccagagggagaatccagaatgttgcgggcgtgatttccccctttgggcagtgatcggaagcacagctctgctactagaaagaggtcagattctttacctgtaaaaatactggcgaggtacacgtagcgaggaaggcaggacttcttggcgtcagtctgaaggcagtaatcagcagggtcaagcctctgagcttagattggcatgtgtgtgcacacatgtgtgcatgtctgtgtatgttttgtgtgagtgtgtctgtttacatccttctgttgaacagatgcatgtgtgttgtatgtgttgtatgtacatccagaagagccatccgttgggaaagactggcaccgcctcgcccagcattccagtaagcacaagcctcctttcaggaccaaacgctgctgacactgctgacagtgctgagtgaatcagatcgtgattcattcaacaagcactatttggtggcaggtcctatgctcatgctgaactgcacaaggcccctaagtctcaggaagctccaggtctcctgggaaagaattatacctggggagggctgagagaggagaggaggccagatctcgggctgtggtcaggttgtgatgggcctgaaccggaggctttgccatcatcctgtgtgttgacagcctgccctcaccctcagctcctccctgctatgctctccatctgagaatgcagcccctgccctgggggctgtgtgcttaaactagattccggggtcatccttagcaactcccactccagatctcatcagttacctacttaactgtgtgaccttggacaagttatttaatctctgaacctcagtttcctcatctgtgaaatgggaaggatactactaccggcttgaaacgattaagtgagataatgttcacaaagcactcagcacatacaaatgattttaaaataggcatgggtatggttaatcctgtctgctgaatacctgtggaagccacccatctccctctaacccctccgtatcatcctggtccaactacatctcctcctgggccccacccctccgggctcactcccagcagccagaccagcagcactgcctccctcggggttttccccaaggccaagctgatccaggcaccaaggagaagacaggtgccgagctccggtcagccacgatggaggcccggggagcctcctgagggaggcaggccagctgcagggctgtctctttgcgcatctctaagactgaacctctcaacaacccggatgctcatctcttgtctatattgggtccctggcaactagttggtcatcatgttttacacattatgtaagcaatccagatgtacaacaacctggatgctcatctcttgtctatattgggtccctggcaacagtaggtcaccagtatgtagtcaacgagcgaatgaatgaatgaatgaatgaatgggagggtttagactcagtgagaatggcactggggcagctgatgtttgggactctcatgacttggcctactgtttctggatctctggctctgccccagcttcgtccgccctccctggtcccatccttcagggcccagctctgacttcacctcctgaaagctctctctggtcccatccagccctggaatcacctccctcggaagccctccctggcctcacccagtacctcctctcccttatcctgcccctgatgtctgcagttgtgccctcgaggagttttcagtctttcttgtttgcctgtctacctcccgctaggctgggagctctctgtgggcaagaacctcgtgctcactcttctgcatccccttgtgcagcagggctcgggcacagatgtggcgtgggacagtctgctgactgcccacctcaccgccgcccgcacagtccccttgccctcatggagccagggcgggatgggggcagcactgtcctctggtgccagcagtcagcacattggaagtatctgcaaggggcgtccctcgtgtcctctggctgtggagaggtcaggagacag

SEQ ID NO: 6314 - DNA, 778 bp, mus musculus
tggccatcctgtcctgtcctttcaagagcttcactctgaggcctgacaggctggacaactgcccaggtcttacagctaggacatggcagggcaaggtccctttgctcagcagagctgccccccggacacctgagacttagggatcccccctaaaaagatctcacaagggcacccgggtgctgcctctttccaatggcacggagcggcaaggcctttgctttctcctccagcccggccaacgggggccgcacctgctcgggccttgcctacgacttccagctctgcagccgccaggactgccccgactccctggctgacttccgcgaggagcagtgccgccagtgggacctgtacttcgagcacggcgacgcccagcaccactggctgccccacgagcaccgggatggtgagcccttctgggaggcatcagtgggggctcagcaggcaggccctagggtgggcagggtgggggcttgtgcctctgatcctgcatggggcaaggctgccgcgaccctgggctggcaggagagcccaccctggctggtgtggctgccctggcccactcctgggtggggcattaaagttcctagcagggctgcaatcccagagcaccagaacaccccagagtagctgaggacatggaagaggtggccgggctgcgggctcggcaggggccgggctcctgcagttcaccgtgggtggacgaggcttgagctgtgtggtcagctcagggctgaggccagggctgaccctgccaaggaatctggtgacctctgac

SEQ ID NO: 6315 - DNA, 369 bp, mus musculus
gagtacaatgcttctctgcagactccatgagccatgggctggtatgctacagcagaaaccaaggtcctatagcatcatgttggtattgcattttattgcattttagcactgattacaccaggcaagggccaatccctctctagtaatgcagtacaaaagcccctcaacccgagagtcaggatccttctcccctagtctcatagacggctctaccaggttgcctgttgtgcttcagacagcatggataacaaggcactacacatttgcccaaggatgttgagtgttccctgttcatgctgctcctcttggtctgctcttatctgcactattttgtgtgtgttttctccatgggtcttcacaaatgaaatt

SEQ ID NO: 6316 - DNA, 796 bp, mus musculus
gcttcggggcggggcgggcagagggcggagcaggatggagaggcgaggtgggcggagcagagggcgtggcttcggggcagagtgggccgggtaccgcgcttggtcttagcgcatgcgcactcccggcagctacgcgacctgtgaccatggtggctgtgctgggcggccggggcgtgttgcgcctgcggctgcttctctcagcgctgaagcccgggatccacgtcccacgggccggacccgcggccgcgttcgggtaatggcggccacctcgccccggggatccccagcatcggcgcgctcgaggggcggcgggaggggcgcgtgccgacagcaggagttcccggcgcgcgggcacggggcgtgggcgcggcctggctgccctgtcgccctttgtgccgcgagaccccgatcctgggggccagccgcgcttggtgctcgagcccctcgatcgtgcatgcgcctcggtcagcctcagttcaaggagtctggagccgtggaggcttgggctatagagtgcagccccttcagtgtgcagaccagagagacccagggagatacatttgcctgtagtatggactcacccgtgacggagcacggactagaatcccaacgccctcattagtccattgctctgtccagagtccacactaagggcataaggacaataatctcttctttctcttatgtcagaaatcagcctgagcctgagtaccgctaaggctttaatcacgggtcccgagagccctaagtcttctctttgcttgctgatctcgtaccttaatgtgcaaaagaatca

SEQ ID NO: 6317 - DNA, 272 bp, mus musculus
gaagcttgattttgatcctggattctttcagtccatcacatttggataagggggaaatactggattagtaccagactttgtctatccttatggaacatcttgttcatttgttattttcattctcaccttctaccttgtatagaatatgtgcaatacaaattagggggcctatttgtttgtttttggcatgttagttcacaaaatggtcaaaccagccatgcaaccttgtcctattattgattattcatccaagaattgactcctgcttgcct

SEQ ID NO: 6318 - DNA, 1461 bp, mus musculus
aataattacattttgctttaactagtctagataatgctagaatttattgattttccattataatggcagtcaatttcacattcattgtattattctagccttattttaatcttgctttttacatattaatacactgatatcaaaaaaaagtttgcctcactgtttataagtaacagagacagaatttaagctcagagataactccaaagtttatttcgttccttttttctttctttcttcttctttttttgtttttgaaatgctgtcttgctgtgttgcacagcctggagtgcaatggtgcgatctcagctcactgcaacctctgcctcctgggttcaagcgattctcctgcatcagcttcctgagtagctgggattacaggcccacaccaccatgcccagctaatttttgtattttttgtagagacagggtttcaccatgttggccaggctggtcttgaactcctgaccttgtgatccgcccacttcggcctcccatagtgctaggattacaggcgtgagccactacacccagcccaaagtttattttgttctatcatgttgactcagttaaaataactgatataacatgtatcttcatttaactacctgtctcaactcttaccgaaatagtgtaataaacattttgaccctagctgctaaataatgtctctgtgtttttttccagctattccacatttatcacacagtgaaaacaaaagcaaaactgccactcagcctaactgatggtccaagacaggccatatggcttggtgccatcttgaaatgcaactactgcttttattgcactttgagattctaggttggctgtttgaatgatttactagttgccttgttaaacaagaactagtctttaccattctcctaagtttgtttaaagtaacattcatctttttgttttaatggtggtaagatttaatgtagttgaattactgtcaatttgcctccataaacattttctatatgaagactttaagtgcaagattatcaacaatgcaattaactttgaattaattaggaatcacagtcctgtttctgctggcttctgttccttttgcccagaaaatatctgcctcctctttatttctccttcattctgtgtgaaagaataattatgtaaatatccaaacccggatctacaggatggtaaacaaatgttttgacagagaacaaaatagcacgttggaatagggaaagctatacaaagattaattgcattttagttttattattattattattattatgccattttgggtggcattttgcagcaaaaagctccatgacgagttgttaataggttaaattaccaacttttataaatttttagcatatttttcagctctataaagcaagctcatacaaagaaaaaataatctatggttgtatatgcaaaatttaaaaaataaataaattgaacataattctcaacataattgag

SEQ ID NO: 6319 - DNA, 1146 bp, mus musculus
caaagccacaagaggctggtgtgaccgattcatgcgtcgagcaggactatcattaaggcatcaaacatcgttttgtcccaagctccccactgccattaaacagaagacagtgttggagcactctttcaagaagtgctgcataaccagtactcttgacaacaccgggagagacgttctgtggaaaaatgcagacatcaatgactgtggtttgaaaagtgattcagaagagttggattcagaatatgaagttataattataacttaaccaatttatttcacacattttctttacatatgcacaagattgatgtgataaaaatctgtttaactcaaagcgctgtttcaataaatataaacattttctgtgatatgaaagcattgtgtcatagtttaatgggcagtgttttttcttagtgatacatatggtgcatcttaacaattggtagtgtcttaggttaaattaaaaatggtagcttgtaaatttatttttctttttaagatagcagttatttattggggaatttgattctgactcttacaatgttaaacttgtaatcctgtgtgaaacacatgtttttgggggggagggggtaaccaagatttcagggtagtaacttaggaatctaagaactatcttctactttaggaagagtgggattagttactccctttgtataggaggactttatgctcaaggaatgtgttgtggagaaaaacacttcttcacaaacaattcagtgacaagacctcaaaggtaatgcgtattgaggaaaacagtagtgggtgaaaattcccgcttagctgtaaaatgactctcttgccaggtttccgtgtttgtctcaactgaactctgggctgagtgtttaccagggagaagagatgtgaattaaacaaccttcctgtttagtgttacctgctttgtacaagaatgaagtgcaaagccaacttactttattaatccaagttctttttatgtttttcttaacctttattaaggactagtcatcacaaaatatctatttaacctctattttatgatggtgtgttattatgtttgatacctcatacttcttgcttagagttttgtttaacagttcactggctctgtcccaatgtttgtgatgaacacctttttgctatattgta

SEQ ID NO: 6320 - DNA, 1119 bp, mus musculus
gaaactacaaaaaatttgtgaacttttctcatgaattctttaaaggaagttgactggccgtttagccatttattttacagaaataataataaggactatttaaacaatgtagttaattttaaagtttttgagcttggattttttttttaaggtatatttttcttgtggttataaaatgttaattcttccctgcttttgagtaggcgccaatggcgtagaatggtttggatttattgcatttatctgatgccaagctggagattattgggtgccctgcctgctgtgtgtccagctctgtgctgaggacagtggtgagcaactcctgcttgtgtccccaattcctgcctgtcctccccagaccatgcactccatggtctggtgaggggctgttatgatgaaaggaaacaactgctctggtagggaagggaaggtattaggttatgtggggtacaaatcaatggcccccaatgtagtcttgaggaattgtaagatgttagggtgtttgttggtttattttgatgataattcccaaataaagatcatatctgtagttgatgactaaagctgttagattttatccattgtattcattttatttttctcccctctaagacctacttatatttttcatacctttttaatttctgattcgtgctggtgagggggctgtgctttagaagagatgcagattttgagatgaaagagcagacttcttaactgacctcagaatactttttttgttttttgagatggagtttcgccctcgttgcccaggctggagtacagtggcacgatcttggctcagtgcaatctccgcctcctgggttcaagtgattctcttgcctcagcctcccaaatagctgggattacagatgcacaccaccatgcccgtctaattttgtatttttagtagaggcggggtttcaccgtgttggccagggtggtctcaaactcctgacctcaggtgatccgcccaccttggcttcccaaagtactaggattacaggcacgagccaccatgcccagcctgaccttagaatactttaactaacacttttaactaaattaaaggaatgtaaagggtaaagaatcatgttttgtaatacttataatagtatt

SEQ ID NO: 6321 - DNA, 574 bp, mus musculus
aaaaaacagtatttgtacatcttagtctcttaatgttaaatgccctaaaaattatgttttttccttgtacctctcattaatttatttagtaaattgttgttgtgcaccagccatttttttttttttttgccctgagaaatagataggaaagaaaaagtctaaaccttaaaggagcccgcaagctttaacccagctcttacccaaatcatcataaatcctgaattggtagagcaaaaattcatgaggtagactggcagcagtgcctaacaaatttcccttgggaaaacagtaacagattttttattttttagaaaagaaagtcatctcctttttttactattaaaatttcaaatttaaatattcacatcttacgaagtattctcttagtgtaatagacagtgaatgctgtgagcttgaattactgggaaattagtattttaattatttgtgtcatttatataagttaaaggtatcatgtgttaaccatgtcaatattttgagaaatttgaaaatcccaaatcccaagagatcattgcctttcagatagactgccagctttatgaaagatgatttg

SEQ ID NO: 6322 - DNA, 1161 bp, mus musculus
ctattgcttcttttttttttttgaaatcagttacacaaatatacacagctgtcctttataccagaaagcattctttcttttatctgtaagggaggagatgtattccagggcaaagtagcatggctcattgttggttagtgggacggctgcttgccagtagtgtgtgtgtatgtatacgtgtgtgtatgtgtgcatatgtgtatgtgtgtgcccatgggtgtgtgtgcacatctgcccaatgtgtcatgccttgtttttttcccctctttaatggcactgctgagaacacatctgcatgaataactgctaataccaactgtcaagctagcaaagcagtggggttgggtataattttctagcataaatttatcagcacagtgggcgtttggggttagctccttctgcagatgcctcgtgaagcaggttgtggtccactgcaccaaggaaagatgtagttttgccaaagaagaagtactgtgccatcagcagcagatcaaggggatattatccatcccaagcaactgcaggtcagaaattgtatcatggacagttcacaggaggccacagggagggaggtgattgagaatgtcaccctgtcacacttgagtcactggcgggtacagccactttttatgtgggtgcctgccactgacaggctccctcggcatgtagttacccttcttcaaaggtagaggatgtgacattagtaatctgtgtgggtggaaagcctgttgttactggtcataaccctgatggaagaattagtggacctcaccaggccagtataaatgtaaaacccagagagggtcttgaaaggaaaagaaatctgtttactttacttctctcatcttttctgtctattatcttctaactcagatcaaaactccatgccatatggcaataaagagaaggcactataccatcatcttgtaccttccaaagaagtgacataaccaaagcatcccaggattagcagagaatgaaggagccagtggagacttgcctgtatccacatgggacatttttgggtcctccgagatcagaggtggcacccatctgccctagcagtaactttactcttgatgtaaatttgtcaaatttggtgtttgacagtcattttaaatgagaagtgttcctaagatccaacctaggctgagtcat

SEQ ID NO: 6323 - DNA, 1161 bp, mus musculus; identical to SEQ ID NO: 6322

SEQ ID NO: 6324 - DNA, 963 bp, mus musculus
tccagttgtctgaggccagggagctggccagccctcagttggactcctgcctttttcacccctcccagcagctgccagaccacagagccagttctgtgaaagatcctcaagaaacaatgagagaaaacagcttctgtttgattagattagatcaatttatgtgcctcggggaggggcctgcgcagggcagggggaggggtgcccctctgttgttggtgggggcagcggtggcccatgcggtcacttcataagtaatgaggctccgtggaagctggaatcagagtaagggggagggcgggctggaggaggagcatgtggaaagagatttctgcagtctgtctggagagctgcccaggtttcccagccaaaaaaacaaataaaaataaataaaaggcaagtgctgaatgacacagattatgatattaaaaagggatgccattgaaactgcgccctggagtccgctgtctgtgggggtggggtgtgcttggcaatggggtgggggcatctgaccggctggggacacaaaagtgtgcacaattaaactgtgaatgtccccctccccccatatgtcagaaattctatacttcggatttgtctgcattgcaggttggggaaatggcaggatgaaaagctagtgactcttttcctttttctcattttaatttatcagggtggggggagccagccggagacccctcctctttggtgttcgattccctcccttgcacataaataaccttctctcctggctgcctcccctccccctcggccccattgctgttctggccgtcctattgccgcgcggaatctgcactgccgcttgcttattacgtacaggggaggattgttgacaagtgctccggagcctgcctcactgcgctcttcctccctccctccctctgtccttcttcctctctgtctctctgcaatgatccggctctgaggatggctgctccacgggtc

SEQ ID NO: 6325 - DNA, 963 bp, mus musculus; identical to SEQ ID NO: 6324

SEQ ID NO: 6326 - DNA, 1103 bp, mus musculus
tttcttagtgtctttttcctactcgttagttgtatttggctgctgcaaacaccttgggctcccaagtagttgggaatgtggaaagctacatactttccctctagagagagccccagtgtgaaaaactaagatagccgtgtgtttgctgatccttgggacgagccagggaagggctccgggagcactgtgtgaattaaggctgtcaagaccaaagtaacataggagggagaagatgaaaatgcagcagcacgtctcttaatgtgatcgtttctctttccccttactgaagcatagtgctctctgctatttgaagagcgcaatttagatttatattaaggaatgaataaataggatgcggtgatgaaatctcatctggagtgaatgcagattgtggatgctaatgaccgtgtggctgtgcagagaacccattggaagcctgggcgcttctccctcctctgttcacccactaggcactcaagagcaactcaggcagtggggaaaaggttatctttttttaatgtctctcagtgttgcatcttgccttatagcgccttaaagcacttgacaagccttcaagtaattcttggtggtggcgttttcccccagaaggccttaagagatggttttaatagatacacctatcaatttattcccaacttgagcattttgctgtcttgcatcatttgacatcaccagaaagtcctttggttacttctgtagttcacattgtactttctgtcctttgagttttgggtgctcaggggcaagatgtcagaaatcctgagttttagttgtgccactgcgtagctttgaccaagtcactttacgttagcaggatacaatttccgtgttcattaaatgaggagactggactgaaagctcttagaggcctcctctagctcagacgttctgtaacactcagggctttctgcctcctctgatttggcggtgtcaggatacaggtccaagtgcggcactgtgccttgcaaaattgctctctctccctggccagcttttccaccactgtggaatgaagtctgccgcctggaagaatcccagatttctcaaaggcgtccagttctagggagcagcgtgcaaagccc

SEQ ID NO: 6327 - DNA, 673 bp, mus musculus
aacattccgtttagaatatttgtggagagcaccctgcattactgtatgtatatctaagagctaatattgctgaacatttattctgggtcaggcagtttatgtttgttttatccttaattcttatcatcctatggtgtgagtactattattattctcattttacatatgagcaaattgagacttagagagatgatatataataggtccaaggttacatagctagtaagtggtaatgtcaagattaaattcaagtagtcaggtagaacttgtaatcactatgctatgttgcctccaattagcaatttatcagtagccttacagtagtttattggtgctatttcttatagcatcactaaatatacatattaatccaaagtacaggacagttaagcaaaaaagaaattgctgggagtctgcctactctggagtgtaggcagagaaatattccatcagtccagggatagatttcagagcgcttggagcatgaattctcaacatgggcaataccatccaaaagcagatgattatttgttcttaggaggccagaaaatcttagatattaaaatagcttgtagacttctaaaaagccacagtacataaatatatataccacttatctctgatattcaagtttctctaggagcaggaaggtgataaggagaaaaatgtctaa

SEQ ID NO: 6328 - DNA, 263 bp, mus musculus
agcttcttgtaccatgttgaatagaagtggtgaaagcaggcatccttgccttatttctgatcttagagtaaatgcttttagtctttcaccattatgatgttggctatgggttttttcatatatggattttattatattgaggtagatttctttctagtatgttgagtattttcaacatgaaagggtattgaattttgtcaagtcctttttctgaatcaaccacattgagatgatcatgtggttttagtctttcattctgttaa

SEQ ID NO: 6329 - DNA, 267 bp, mus musculus
atgtccttattttctggaagcaaagtccaagaaatgcctgcataactgagcagttttagaagtataggaatggcatgtcaaaaacatggagatgggtgagtaagctttgtccagagagccgctgaaagttcaaagttccttttagcccattttgcctggagcatggggtatgtggttggggtgtataaaataatttagggttagattgagaagggactgatgtgacatgttgatgactttgagttattttcttaaagaatggtaaac

SEQ ID NO: 6330 - DNA, 315 bp, mus musculus
aagaaaacacacacacacacacacacacacacacacacacacacacacacacacattctgcctttctttaaggctaactagggttcttaagaaattatttcatcaacacattagtttctaaccaaccccgtccttctgaagggagttactcatcaaaacatttcatcagcagctaatcaagacagctaatggcccatatatgtatatacttcattacctgcagtaacttaaatgaatcttatatgactggcagctgtcaactcttactcagctcatgagtaaagaacaaaaatgagaaactgaaggttaaacaca

SEQ ID NO: 6331 - DNA, 191 bp, mus musculus
tatcagtagttataagtaaatttttaataagaattgtataatatattctaattactctttttgctatcattatcagcactttaaaaatacaatatgcataataaaataacaccacaaaataaactgaaaatgtgtttaaaattctccatgagcacttgggggagtggaatttttttttaaaactagtttaa

SEQ ID NO: 6332 - DNA, 1205 bp, mus musculus
ggcactggaggaaactgaggcagaaaagcaataactaatattccaaaagttataaagtttcctggtataagacctgagtacaagcctaaattcaggcagttcacactgccagggacctttaagacaaattaagataaatctaaggcatctcttagtgattagtagaaaatgaaaggggacaaggcttatagaaaggttagatcaaacatcctggtttcttttgttttgggggatttatttgtagtttgatgtaagttctggaaaagaagtgagattggagaggttgattgtgaaagagtaaaatcctgttcagacaaaaagagtaaaaattagcttggactggtaaagatcaaagtagctctcctgttaccaatgttgggagaacagacacaggtagatctggttacagagtcaactggactcactggttacacagcagttgtaaactgccataattgcaccatttgagtgatgactcttttcttaccaatgtagccccaacctgccttgtatatccagacatcagagatctctaatttataaactgccttcatctcgtgacagtatgcaatagctaattaatctacctctcctaatggcccttgagaaacatcaacacatcaacaactccgcttaggggcccctcagatccatcagtgggaactcagacctctcctaaatgcccttgtagagtgacattctatggttcctctagagcaccttctctggctacatccagtccatgtatctcattgtttttcagcaacaggcttgttcctgaaggtctttggctgattaaccattaacatttgaggtcctacagtgaaatgctatgcagtttgactttatatggagtacttggaaaacccactgaaaacttgtaagtactgaaattacagattcagttcggggtcttgaaagacaactcagaaatattaaggaatataaatcaaagatatgaaaataagaagagataaaccagaaattgttatactaatcaaaatgatagacatataggcataatgaataaaagaagtatcacagaagataaaacattgttaaacttgagaaatgttaaagatgttgaaacaacatgattttatgagtgtctgtctgttgaatgtggaagaggtagaggggttaagggtgagcaccaggtttttgaaattggctgataggaatattaagaataagtagaaaatgga

SEQ ID NO: 6333 - DNA, 883 bp, mus musculus
atgcctatggatatttctagataaatacaaaggaatataaggacatagttctcactaccatgcaaattgcagacaatctgaggattaggattcacacttgaaatgatatccaacaaaccccattgtgtggtacaaaagcatatatgtagacagggtgggtagtaaagaatgctaacaattttggaggaggttaaatcaacatgtaattttagaacaggagatcttctgacctgtatatgaagaatgtggagtataaaaataattacttttgttctcttcctggtgatacaaaaagacaagaagcctcctcattgccccttttatgtccctgttgctcaaagtgtagataaaagggttaagcataggagtcaccaaactgtagaacagggacatgaatttgtttttgtcctgggagttggcagagggctgtacatacatgctaattacaggcccatagaggagagatacaatatgagaaccacatgtgttgaagacctccttctttccccctgaggactgaatcctcagcacagtagctacaatgaatccacagtaagcaaagataattgattagagaacgagggactaaaatatcctcacaatggagagcatagatacattgaatgtggtgtcaaaacgtgatatcttgatcatcgctgagacctcacacagaaagtcgtccaccttgttaccgcctagtggcagctggacggcaagggatgactgaagtagagttggccaaactgcttagccatgccatggccactaggaggacacagagttgctgatgcatgatagctgggtacctcaagtgtttgcagatggcaatgtaaggatccaaagacgtcacagctaaaatgatgcatttggtgctcccctaaaa

SEQ ID NO: 6334 - DNA, 1204 bp, mus musculus
gaaaattctgagctggaaggattctgattgtgattagtgttccatacattattttgtcttttgtctgaagcaatgctgaatacaacctcagtcactgaatttctccttttgggagtgacagacattcaagaactgcagccttttctcttcgttgttttccttaccatctacttcatcagtgtggctgggaatggagccattctgatgattgtcatctctgatcctagactccattcccctatgtatttcttcttgggaaacctgtcctgcctggacatctgctactccagcgtaacactgccaaaaatgctgcagaacttcctctctgcacacaaagcaatttctttcttgggatgcataagccaactccatttcttccacttcctgggcagcacagaggccatgttgttggccgtgatggcatttgaccgctttgtggctatttgcaagccacttcgctacactgtcattatgaaccctcagctctgtacccagatggccatcacaatctggatgattggttttttccatgccctgctgcactccctaatgacctctcgcttgaacttctgtggttctaaccgtatctatcacttcttctgtgatgtgaagccattgctaaagctgagcttaatcagtggctgctcagtactgtcacagggacaatcgccatgggccccttctttctcacattactctcctatttctacattatcacccatctcttcttcaagactcattcttttagcatgctccgcaaagcactgtccacttgtgcctcccacttgatggtagttattcttttgtatgcacctgttctcttcacctatattcatcatgcctcagggacctccatggaccaggaccggatcactgccatcatgtatactgtggtcactccagtactaaacccactgatctacactttgaggaacaaggaagtgaaaggggcctttaatagagcaatgaaaaggtggctttggcctaaagaaatcttgaagaactcttctgaagcataaataaacaattaaaaagatgagtttgtaattacattgtttcttaaattatttagaaatgtacaacagagggaactggataaaacaaaaatatatggaaaaatatgctgtagttgtatttaacaatgctttcctggattatataagggacatttgaatgaatgggatactagccatggaactctact

SEQ ID NO: 6335 - DNA, 1019 bp, mus musculus
tctaataacgttaggcttggtatagaagatgcagagacatgctaaaatttctcccccaattattgccaagcagaaacttggacgatcgacatggaaattgtctccacaggaaacgaaactattactgaatttgtcctccttggcttctatgacatccctgaactgcatttcttgttttttattgtattcactgctgtctatgtcttcatcatcatagggaatatgctgattattgtagcagtggttagctcccagaggctccacaaacccatgtatattttcttggcgaatctgtccttcctggatattctctacacctccgcagtgatgccaaaaatgctggagggcttcctgcaagaagcaactatctctgtggctggttgcttgctccagttctttatcttcggctctctagccacagctgaatgcttactgctggctgtcatggcatatgaccgctacctggcaatttgctacccactccactacccactcctgatggggcccagacggtacatggggctggtggtcacaacctggctctctggatttgtggtagatggactggttgtggccctggtggcccagctgaggttctgtggccccaaccacattgaccagttttactgtgactttatgcttttcgtgggcctggcttgctcggatcccagagtggctcaggtgacaactctcattctgtctgtgttctgcctcactattccttttggactgattctgacatcttatgccagaattgtggtggcagtgctgagagttcctgctggggcaagcaggagaagggctttctccacatgctcctcccacctagctgtagtgaccacattctatggaacgctcatgatcttttatgttgcaccctctgctgtccattcccagctcctctccaaggtcttctccctgctctacactgtggtcacccctctcttcaatcctgtgatctataccatgaggaacaaggaggtgcatcaggcacttcggaagattctctgtatcaaaca

SEQ ID NO: 6336 - DNA, 2317 bp, mus musculus
ggatgggcagcagcagccacagcccgagaagccagagtccaccctggatggggctgcagcccgagctttctatgaggccctgattggggatgagagcagcgctcctgactcccagagatctcagactgaacctgccagagaaagaaagagaaagaaaagaagaataatgaaggcaccagcagcagaagcagtggcagaaggagcatcaggaagacatggacaagggagatcccttgaggctgaggataagatgactcaccggatactgagggcagcccaggagggggacctgccagaacttaggagactgctggaaccgcatgaggcaggaggagctggggggaatatcaacgcccgggatgccttctggtggaccccactgatgtgtgctgctcgagcgggccagggggcagctgtgagctatctcctgggccgtggggctgcctgggtgggggtctgtgagctgagtggcagggatgcggctcagctcgctgaagaagctggcttccctgaggtagcccgcatggtcagggagagccatggagagacaaggagcccggaaaaccggtaaggggaaactttagctcagacccatgtctcattgtgttctgcctctcccagccacaccacaccagacgccccagcacagtgctgaagagttctttccttatcctcatgtgtaggttgacagggtagtatagtcaagtggttataaacatgagctccctggatttaaagcctgattccacttacttgggcaaacaacctaatgtctacatgttccagttttctcatcttagaaatgggggtagtaagaattgttgttaggattcaatgggttaatatatgtaaaatgctagaatagtgcatgccgcatagtatgcaatacatgaatgttagctatagtcattatgactaatgtccctccccttgcccaagagtttgctaggtctggttaccatttttttctttcaactattctgctctggatcccacaatggtttaaagaaatttgtttttaagacaagtcaagtgcagtagtgagaaggaggggaaaagtggagtaaggagtttgatctgtaactgagtgaacaattaattcagataactcaccaccacctttggaccagcctggatccctcactgttaagtaggaaggaaggcaatttgtcccttttttttttttttttttttttgagacaaagtctcactcatctcactctgtcgcccaggctggtgtgcaatggtgtgatttcagctcactgcaacctccgcttcctgggctcaagcatattttttgtagaaagcaggctttgccgggacatggtggcatgtgcctgtaatcccggctacttgggaggctgaggcaggagaatcgctaaggtggaagttgcagtgagccaggatcatggcactgcactccaacctgggcagcagagcaagactccatctcaaaaaaaaaaaaaaaaaaagcaggcgttgccattttgcccaggctggtctcaaactcctgagctcaaagccatctgcccgcctctgcctcccaaagtgttgggattacaggcgtgagccactatgcctagctggcaatttgttccttagcagaaaagctgaaaagatcctattctaccctgccagccccctctgaggcctcaactcttccccttttccttcccctgcccttaatgctttttcttctttctctgcaggtctcctactccctccctccagtactgcgagaactgtgacacccacttccaagattccaaccaccgcacatccactgctcacctgctgtcactgtcgcagggtcctcagcctcccaaccttccacttggggtgcccatctccagcccgggcttcaaactgctgctgagggggggctgggagccaggaatggggctgggaccccggggtgagggccgtgccaatcccatccccactgtcctcaagagggaccaggaaggactaggctacagatcagcaccccagccccgagtgacacatttcccagcttgggatacccgagctgtggctgggagggagagaccccctcgggtggccacactgagctggagggaggagagaaggagggaggagaaagacagggcttgggagcgggatctaaggacttacatgaacctcgagttctgactttggtaaagtctgaccctagtctgctgctgaagtctgaacttgggcctctgacctgggccctttgacttccccttcctgggatctgctcagatgcagatcctgaagtttttggtcaataggctctgtcttcgtgagagacgggctgagagtcagaaataaa

SEQ ID NO: 6337 - DNA, 2317 bp, mus musculus; identical to SEQ ID NO: 6336

SEQ ID NO: 6338 - DNA, 2317 bp, mus musculus; identical to SEQ ID NO: 6336

SEQ ID NO: 6339 - DNA, 2317 bp, mus musculus; identical to SEQ ID NO: 6336

SEQ ID NO: 6340 - DNA, 2997 bp, mus musculus
tgcctgaagcctctgctttctttggtgccaggccccactggcctggctcaccctctggtcctccatgccccctaacaggcaccgcatgcgtggggagaccaccctgtggaaccctggctgtgaccatgcaggtattgccacccaggtggtggtggagaagaagctatggcgtgagcagggactgagccggcaccagctgggccgcgaggcctttctacaggaagtctggaagtggaaggaggagtgagtatgcagcatccctgtgggcatcgcagccctgcctccctgtcccctatccagaagacctctgtcacctgtaaccccttggccacagggtcagaccctcccacagaggcagagtcagttggctctagggcccaggtaaatttcagggggatgggtgatctccacactgcccagtcagccacctgatgtctccctctagcccaggcacgagtgctgacctcagcctgtctgcttccaggaaaggtgaccggatttaccaccagttgaagaagcttggcagctccttggactgggatcgagcctgtttcaccatggaccctgtgcgtgggaggagtgtcaaagctggggcaggagtaggagtctccccagggtgggacccccacaggagaaagcagaggtgttgtggccctctctcaggagctggcccatgtaaaacaccatggagggctcagctgcaaatgccacttcccacccctcgccatggccctttccatatcatggcccttcatgttccctgtcttggctctgggagctccagattcctccagatggcacatgatcaggaccccgtctcccatggagcctgaactcccagtgtcctctgcaccagtacttgtccccagctgattgtcttcctcgccatctgcagcattacaaggcttgttgcctgctcttgtgttcccttagtcctctctccccctcaaggaaagaaggaaagtactcccctcagaggggtctttgtgctggccagtgggactctgtatgggcaaggcctcactggagccctgggtgtctgcctgggcctccaggcacaaggcccatctctctgacttctccctcctccaccccagaaactctcagcagctgtgacagaggcctttgtccggcttcacgaggaaggcatcatctatcgcagtacccgccttgttaactggtcctgcaccctcaactccgccatctctgacattgaggtgcgccccccaacctggcctgtctccatctccaatctaccctggccctggccctggcccctgggccacgcctctaaatacccattttacaggtggataagaaggagctgacaggtcgcaccctgctctccgtgcctggctacaaggagaaggtggagttcggggtcctcgtgtcctttgcctataaggtccaaggctcaggtaggagccaggggcaccaggatcctgggctgggagtggcaggaaggggccaaggccaagaccacaaggccttctgtcaccccagatagcgacgaggaggtggtggtggcaacaactcggatcgagacaatgctgggagatgtggctgtagctgtgcaccccaaagataccagataccaggtgggggactgtccacagttagggaaggagttctggccaaaaagggctcccatccttatggggtggaggggttggacttaggcccctggctgaggagaggaaactgggttagaaactggtcttcagcttctttcccagctctgagggtagagctattggggactgtttgggggagttcaagtgttgggatagtcagggccctggaaaggaaggacttgggcccagcccttcgtgcatttttaaaaagttaaatagccaggcacggtggctcatgcctgtaatcccagcgctttgggaggctgaggcaggtgaatcataaggtcacgagttcgagactagcctggccaacatagtgaaaccccatctctactaaaaatacaaaaaattagccagttgtagtggcgggtgcctgtaatctcagctactcaggaggctgaggcaggagaatcgcttgaacctgggatgcggaggttgcagtgagctgagatcactctgctgcactccagccttggtgacagagcgagactccgtctcaaaaaaaaaaaaaaagttaaatagagacaaggtctcactctgttaaccatgctgatcttgaactcctggcctcaaggaagcctcctgccccagcctcccaaagtgtgggggttagagatgtgagccatggcaccaggccccttcatgcttttatttatttatttatttttgagagagggtctcactctatcgcccaggctagagtgcagtggcaccatcttggctcactgcaacctccacctcccgggttcaagcagtacttgtgcctcagcctcttgagtagctgagattacaggcacgcgtcaccacacctggctaattttttttttgtatttttagtagagactaggtttccccatgttggccaggctggtctccaactcccggcctcaagtgatctgcccacctcagcctcccaaagttctgggattacaggtgggaatcacggcgtctggccctgcttcatgcgtttttggtatctttccgcccccagcacctgaaggggaagaacgtgatccacccattcctgtctcggagccttcccattgtcttcgatgaatttgtggacatggactttggcacaggtgggcaaggggctggtcctgtggggagaggaaaagactggagctgcaccctagctgtccatcttctctcagagaaaaagaaaataagcttcagccaaatagacagagcttggggtggttctcaagggactgtattagacaagtgggggccaggagtggtctcggagctacatccttcagcaaaagaggtgagtgtaggaaggaactccgtggagtccctcatgacctgggcatcctgatgtacacccaggtgctgtgaagatcacccccgcacatgacca

SEQ ID NO: 6341 - DNA, 772 bp, mus musculus
cttgttctctccttctgtggttcatctgggggtccccctatcggtgggggtgcagctccaggatgtgccccgaggacaggtagtgaaaggatcagtgttcctgagaaacccatctcgtaataatgtcccctgctccccaaaggtggacttcacccttagctcagaaagagacttcgcactcctcagtctccaggtaaccagaccccatgccctcctgctgcttgtgggggcctcctgccctgttcccatctgtcttgtaagtgtcatcatcttcccactggcctcctcccctcctgtcttcccaccctggcattctccttccacgtttctcccttggtctctgtcctttttggtcagctgtctcttgctctgtgacccgctccctctccctctccctctcctgacaggtgcccttgaaagatgcgaagagctgtggcctccatcaactcctcagaggccctgaggtccagctggtggcccattcgccatggctaaaggactctctgtccagaacgacaaacatccagggtatcaacctgctcttctcctctcgccgggggcacctctttttgcagacggaccagcccatttacaaccctggccagcggggtgagtctcagccccagggcctcaacctttaaccccctccgagccctctcaggatgagtttggtgccccctaagtgagataacctgaaagaaagtgccacacagaaggggtgcttaggaaacatttgtcccctgctccctctgtggagtttgacccaccctcc

SEQ ID NO: 6342 - DNA, 772 bp, mus musculus; identical to SEQ ID NO: 6341

SEQ ID NO: 6343 - DNA, 772 bp, mus musculus; identical to SEQ ID NO: 6341

SEQ ID NO: 6344 - DNA, 1522 bp, mus musculus
tgtccgcctgcgggacctgggaggggccatcctacggcacgcccggcggcaggcagagaacatcggctatgaccccgagaggggcactcacctgcccgagtcacccaaattggaagacttttaccgcttctcctgggaagacggtgagaggcctggatgggtggggaggagaggggccaggaggaggcacaggaacagagtctacagagtgagggatcagggtggtccttggggctataggtagactccaggagcaaagctgagggtgagcacagactgaggtatacctttgtggctagaatagttctaagggttaaagtttaactaatgtactctgcacttcttaagtggtagaaaaggggaatcaggtactagtggtctgtttgaaaagcttaaagcctcatcagaggtcttcctctcttggatcccctctgtatggcattggagcatgggacagggagagtgcattgctggtgtgtgtttggctcattcagaagattgcaggtggaggaccagaaaaatggaattgcctctgagccccacacgctgcctgtccctgctctctgcttctcgatggcagcagccagtcactcaggccagggtattgccaagctgcctcatgcctgctccatggagcccataatcgtgactgtgaactgcttcctgcagacgtttcccagattctgaccttgcccctgtggctgccttctgggcagtggtgttgcagggccaaggcccacagtgacgctgctggaagctgctggcccaggcattccaagagagagttttgcatccgaaggattcggcccctttctcttgccctgtgctgggcaggtccttcagccccttctgtcctcccttctccctggcagtggacaacatcctcatcccagagaaccgggcccatttgtccccagaggtgcagctgaaggagctgctggagaaactggacctggtgagcgccatgcggtccagtggggcccgcacccgtcgtgtccgcctgctacgccgggagatcaatgcccttcggcagaagctggcacagccaccaccaccacagccaccatcactcaacaagacagtatccaatggggagctgccagcagggccccagggggatgcagctgtgctggagcaggccttgcaggaggagccagaagacgatggggacagaggtgagagatagtcacaggcaggcagggggttggagggtaaagagggacaaaggctaagctgaaatatcataatgggggtattctttctgagtttagatctgacacttgtgggcaagcaaaagtgcttggaagggccacacttccatgtatacgcagggatgatgttcaaaatatttaacaatcactagagactaaaatttatccatctcagtagatgttggctgttatattggagtgggctcccaaaggcccctgttgtggatatttagttgctggattgtggggagtttcaggtgctgcagcccagcagctgtttattagccaattaagtatgtcagtattttgca

SEQ ID NO: 6345 - DNA, 480 bp, mus musculus
agattgtgtgggacctcatagctggggaacttagcagcctggatcccaacacaatcaaaacttttgtttttccaaagataagcttcagggagaggccagtttctctacctgaaagatgagggaagaaggaagagccatggagaaagagagatgagaaggaagagtcaaagtaagtgggggaggtggtgaaggttctctgagactcggaagtatgcaggttgatacataggagagtcgtgtgttgtggctgagaccgatatgagcatcccgtgtaaccagcattcaaacatcacccttcttaaggttagtttgaatttttttggtcttagaaataatctatctggcttttaaaaagccaaaacaaagcaaaagcatttcttcctgatgctaaaaaaaaataacatattcattatggacaaattggaaaatacagaaaaatataaacagcatggaaaagtcacccagagataatcactgttg

SEQ ID NO: 6346 - DNA, 955 bp, mus musculus
agaactacaaaacaatagcagtagggcagaaacttgaaagaaggcaggagatcatggtgacagtggatgggaaaaagtgagggttggggataagggttgcgggttgtcgaagggtggattttctccttcagcaactacaggagatatgatgcctcataattcggagccagaagtggggctttgggtgagatatctttgcacagataacatgtatacatcatagttcaaaacccagtagtcattgtttacagcaaataaagaaatatttagtaaattatccttttgtttatgccttaattccaaaagttgtttagttagccatgtttacattaattaccaactattaataatctgtctgcttgttagagaaagtggcttagaggtcagagaaattgacttgtgattttttttcacagttaacttaaaaacacccataggacattttctcttttcttttcttttcttttttttttttttttgagatggagtctcgctctgtcgcctaggctggagtgcagtggcacgatctcggctcactgcaacctccacctccttggttcacgctatcctccttcctcagcctcccgagtagctgggactacaggcatgtgccaccacgcctggctaatttttttgtatttttcgtagagatggggtttcaccgtgttagccaggatggtctcgatctcctgacctcgtgatccgcctgcctcggcttcccaaagtgctgggattacaggtgtgagcctctgcatctggccaacccataggaaattttcaacagcatttgctataaacatgttgttctgggcattatcctttaagtcatacatgaatagttttctttaaaattcaataccagcaaaaacactgcttttttttatattgaggtttatacagttgatcatactttcaatattcatatttttcttttctgtgatccttgttttctatt

SEQ ID NO: 6347 - DNA, 955 bp, mus musculus; identical to SEQ ID NO: 6346

SEQ ID NO: 6348 - DNA, 293 bp, mus musculus
taaactgttctatcttcatgatataggctggacagaagtttttactgttgaagcacaggctctgcaatattcgatctcagagaagagttttgagaaacatagctgtagaaaattcattagaaaaaaatcaagttgatctagtgttttatctagataaggacacttattactcatgtttctgaggtcacaatggtaaccttgaggtggtatcaagaactcagaaagtcattgaatcagcaatgaaggaaaagttaacccctatatgtgcctactaactgtaaaatacaaacaga

SEQ ID NO: 6349 - DNA, 536 bp, mus musculus
tacacttcaagtgggtgaattacatggcatgtgaattatattgtaatagggctattttttaaaaaataaaataacttggttcaaggtaattgtgtatcaaaactttttcctgacattgtgtaaattcagagaaagtgaaagaccaggataaatctaagtaaacgattgtttagataaagtatgactgtagtatgaaaaatgcttgctatgatggatatttgagaaatttctttttgagtttgtttatgtaagcagtggtcaaatacatatttaatttctcaaataaaacacactaacgaaaaggtcctataatatgtggcaaacatcatattcctgattacagttaatcagctttctgacagtctgtgggaattaaatgttgcaaagctgtagtacattatcaggaattccttacagcccagtcttatgttaacacttcactttctcccctttaaaagtcatttttattaacaacaaaattccttccttgtgatataagattttttcttttttgttacttttctgattatttttaa

SEQ ID NO: 6350 - DNA, 187 bp, mus musculus
ccagaatcccctctattatgaacccgtctctaatattttattttaaatatgtgattattatttttggttaaatgtgacttgctccccttcagaccaacagaaagctttttctagttggtctcctgagcttcctctcttccctatattatgaaaataaaaaaagtacctcattttaatcaattctaag

SEQ ID NO: 6351 - DNA, 1198 bp, mus musculus
gctttctaatatcactccccagggctgcattttaagatttcattcatttctgtgtggtggggatggtatttgcatgtagaggcagaaggaataggatactatatatacgtcactgtgtttgactatgtgcttgggtgtccataaactcctgttcctactcatggtgactgtgccacataaagacaaatatagccaaaccaatttgcctcagtttttcccttgccacctttgatctagctcattattctctcttgcacatagtgatgctcactaaaaataacgtttgaattctcttcttagtgtctttcttttcttttttctatgattcttcctttcaaaacttaatggatcaactaatgctttattcctttttttgttttttgttttgttttgtttttagagacagtcttaagagctccgttgtccagactggagtgtagtggcatgaacacagctcactacagcctctacctcctagactcaaggggtcttcctgcctcagcctcctgagtagctgagaccacagacacatgccaccatgcttggctaatttttgattttttggtggagatggggatctcacttttttgcccaggttggcctggctcaagtgacccttccgccttggcctcccaaaggctagattataggaaagagctgtggcccccattgcttacatttattgaaatttgtaggtattttaatcaaattgcaggctgtaattattcttagtgatgtctaacttttattgaataacaatggaaaacttggaattacccacgttccatctacaataaacatttgagttcagaattaaatctaagaataaggcaaagagtaattttactttttgattgattaatataagtttaaataaataatacaaacaaatagttcaggattcaaaagttacagaaaagtattcagtaaaatacttccttttcactctgttccccagtcattcagttcccctcccagaagaaaacaaatgttattagttgatctttttccttccaaggatatatgtgtgtatctcttttattcatttttaaaacaaattatagcattctgtagatactattttgcaatcaattttttgagtttgtcttagtgttcattcttttttttcagtgcttacaagttgtttgttcttttaaaaagtcgtggtatttcactgaatgaatttattacaatttat

SEQ ID NO: 6352 - DNA, 947 bp, mus musculus
cctagccttttggaaaggaatgccctggggtggctgggcggctgcccctgacaggctgtgtcacttatctattcacattgattatgaaagtcagctgtggccagatctcgcttttttccttcttctctcagcccctcttacaagcacccctgcctggattttcatgaggaaataatcagattaggcctttcacggtgagttcatatggagttctctttctccagtgtgctactaactgaataaacgtgtttagtggtaaattgtaaatgacattatgattaccaaagccagcatgggtttcatttaaaaatgatcagaattgcagaccacaaaaattgtgactggcagataggccatttggagaagtgggagaaaagaaaagacaaaaacaagggagaaagataatcattactcaaaactaaaccttccccgagtgacagaagcaggaagaaaacaaatccagaggaaggaaaaatggaacgctctatagaagtgatgctgaactgtcactgcaggctcctgccagtagtggctgaggattgagctctgaagtctgtcaccctcttaagtagttaatgtgtattctctgccataattaagaactacacccatttggtggctctggaaccctgcttacgtgtgctttatttttgcctcacgccaaaattaaaataggaggattgattaaaggtgacctaggaaaatgaataagatactgacaaactaccccatctcttagtcattggtaaactctgaaaaaataaaaaatacatatattttttaatttatgaagaccaggatttcaagtctggctacaaaagtggataattaatattacttgttgataatccctaggctattgtctttgctaaatatgtggctatatctttatactcctgggatagtatgataaaatattaaaagggccaaatgaagacataacacag

SEQ ID NO: 6353 - DNA, 989 bp, mus musculus
gaatgtgaaaattggaagcttgcttggaattgtgaactcgatttggtagtagaaagctggctactaaagaatacttagattctagaatggaatacagtcacacagccactgaagaaatgtctgtggggttggttcagattccagaagcaatcaaaatctacctttgtcaaaagtgcaagataattcacaggtcatggagaaaatgtcatttactctctagatagcctaatcctgcaacagctgcattttgaccctgatttttcctttctttcaacagtattgctagtctatttggggtaagtttgaagaagcgcccaaggtgatggtgataacgatagctgctatagaaagaatgtcagaccttgttaagtgtcttacatacaatctcaatattaatttcacttaactatgagatggattaacattagccccattttacagataaggaaacagactcagataaacaaagtatcttgtccaaagccaaaggtcttagagctagaatgtgtagttctaattccaaatcttatgtccatagccaatatatggtgggaagcacactcttcttgccactccactccaaggtttttgtgagcctgcccattgctatcaaaccctagaatgactgataggctgacaggtatctctgatgacacagctcttttacatttccagggcagtgtcttcttgggatcaggactcacaggccagaacttcttcacagcagagcaggctgtaggaagagagggtgtagacagccatgaagagccctgggctgagctcctcaggggctgacattcaatcactagttaagccttttaagctttttgagccttaattaagcatctctaaaactgacaaagtggtgcttatccttcttattccaaaagtcgtctaaagaggtagaggagcaagaatcttggaattcatctaaaatttctccttcctcctcctttccatatctgttcaatcaccaatttctgccagtt

SEQ ID NO: 6354 - DNA, 989 bp, mus musculus; identical to SEQ ID NO: 6353

SEQ ID NO: 6355 - DNA, 1031 bp, mus musculus
aaattatttttgcatgcttctctaatgtttataaaatgactctagtgaatactttctcatctttaggaccttttaatatatcttattcctcattaaaataaatttgagcatgattccaggctaaacaaatttcttaaagacagcaatggcaacatgcaaaatatctccatctagtgttttctcttttctaaacaagaacaaattatcttggaatctgactaattttgctccaggaaaaatacctttgcacacagtacccggcacaaagtttgtgttcggaaagtgctagtggtaatcacacagtcattatttctttttctattttttttttttgagatggagttttgctcttgttgcccagggtggagtccagtggcgcaatctcagctcaccacaacctttagctcccaggttcaggcgattctgcctcagcctccctagtagctgggattacaggcatgtgccaccacgccccgctaattttgtatttttagtagagaccaggtttctccatgttggtcaggctggtctcgaactcccaccctcaggtgattcgcccgcctcagcctctcaaagtgccgagattacaggtgtgagccaccgcacctggcccacagtcattatttctatcacttcacgctgagcagggtgttgtgagttctgcacaaattcatccacactctccaagggctcccagacgtctctcaccagaacaggagctctctgtccttgggagggatttttctccacccacaacggaataagatgtagttcatcttccctgggaaatgggggatttcttgctttcctccacattccttccctgacattcagtctgcatgatcaaagactctctcaggcatcaggaagaaccttccattggtacacacacacaccacccagacattctggcagcaccgccctttctcactatggtccccaagtgttctcagactacagaagaaaccctactggtccacatactcattttttctaccttttgattcccatctattatgtgtttgtgtccc

SEQ ID NO: 6356 - DNA, 530 bp, mus musculus
tcatcattatatatgctttagaaggtaaagctacttactgcttataatggttatatgtattttgtaaccatggggtgcttataatgaagactttcatatattattttttaaattttatttggatggaacataagatagacctatagtcatgacatggaaagataagggaaggcctagttacagaacctggggacaaagttgcaatttcacctctttactcctaaaggattatctttatttcttactcaaatgaaattatgggatggattatttgaactacttcagtaatttccttgccaaaaccactctcctttctatcatgatattgatgagattagttatgtgatgaaacagccctagaagataatacatctagaaggcctgttgtattacgtattgttgatagataagtgggctccttaaatctcacaagggatccttcctacaatataaagcactgatttattactttttgatgataaggtattttgacatggatacaatgaggaaataatgacacatatctttaa

SEQ ID NO: 6357 - DNA, 931 bp, mus musculus
tatattgaagagggaacaatagataaaagatcctggggcagatatctgggggatagcagaaaggccagtgtggtaggaccacattaagcaagggaagagctatccatagtaaaactggaaagcaggcagggtaggaattatcttaggccaggtaaggagcctgaattttcttttaaacaaaacagaaagttctgtgtggaagtgtgacatgacccaatttgttttatgcaaagatcacttctgctgttctgttgattgaaaaatgagcaaatgagaacactaagagtcaaattagccgaaaatgctaagactagggtgatagtgggataggactgatttgtgagaagttttgcaagcagagtcaacaggaccttttggttctgaaaaagagggcattcaaagatgactgcttgtttcctgtcttgatcacctgaaagatggctgagtcactcacttaagcaatactagggaaggaataggtcggggaaggaggagtgctagatgacaacttatgagtcatacatgtgaggcttgcaaggcccactaaaattttgggtagagattggacacagattccagagatgaggaagaggtcagcactggcaatacggacttcggacttcatagttaatggcatagaaatcacctacgataatagaggaatacagagatcatttccaagccctgaagcatgtctgtaggttttcagatttacttactgaatatattcaatgaatgtcttcctgttgcctgaaactttattacaatattattttctgatttactatagcagggaaacttttccaattgccacacattcaccaacaccgtatcttcttagttttctaacctcaacacttggaagttgtttttatttaataacgtatggatgttcttttgacatgaagtcttttggttctttctttttact

SEQ ID NO: 6358 - DNA, 268 bp, mus musculus
tctcctttttctttcgggttcacttgaactttccagagttcatcatttcctgtttaaacaatatttagaatgctattttcttataatagttttattcgtgaatacatgtttaatacatactatgaatatcttacataactaccccttgggagtaattagagaggacaatttcttgtgaaaatatttatacttttgtcctaaacttcagcttaaaattaaagggtgtggggaagataattccattagaataattgttggaccaagaata

SEQ ID NO: 6359 - DNA, 663 bp, mus musculus
caaagattcacattttttaatgtattacggacatacattaggtgctcctttgaattttgttggccccatatttttattagaaaaaaaggctcttaacaccaaaacaactgagactttctttcaatttatgttgaactaggtaagtaaaatctaagagtatggaaattttatactttatttttccagcaatttacagctagggtctgtaacataaatttgtaaaaatcatctgtccataaatatagtgatagtttaggttctatttatttatttatttatttatttatttatttgtttatttgagacagagtctcgctttgtcgcccaggctggagtgcagtgacgcatctcggctcactgcaaactccacctcccgggttcacgccattctcctgcctcagcctcctgagaagctgggactacaggcacctgccaccacgcctaattttttgtatttttttagtagagacggggtttcaccgtgttagccaggatggtctcgatcttctgacctcgtgatctgcccacctcggcatcccaaagtgctgggattacaggcgtgagccaccgtgcccggccctctttagttattttaaaataaaaattagtctagctatcttagcatggaaacagtgatggattgtgtatgaactgaccatgtat

SEQ ID NO: 6360 - DNA, 300 bp, mus musculus
tgaagaaaagaaatttgtaactccctaccttaaccctaatgaacttgggagcattttctaaatattgccttaggtacttagggacatgggagccatttcaagcttctgtgtctctgtttgaaactagaatttaggagaaaataatatataacttattgtgtacagattaggaggcaagagtccttagttctaacatcaaaagtaaaactgccataatatgaaaacattatcttcacaatagtgctgtgttttgcattgtcagccctactgatgtatggtaaatatgagcaaaagccctta

SEQ ID NO: 6361 - DNA, 991 bp, mus musculus
ttaaaatgaagataattatcattgaccagcctctatcacagttatgatgaatattaaatggggtaatgcatatgaaaggacttagaaaattataaagcagaatattaatggatggtttaaatatattgtagaaaatataatagaaatatcaagggatgattttctgcatagttattaattgatatgtatatctacacacatatgtatatatacatatatgtatatcctactctgtaggctaagttaacactcctctattagaaatgtcagtaatacatctcgcttgctcacttcctagacagaatgattcttgtaagtatttcatttatatactctccactgaaatatatactgtgtgaggatagggctggctggcagtatctcctttggccaacactgtatccccatcttagcatcatgcctagcacaataaatatttacttgatagtttgactgatggaatgatggaatggctgcctataggcatgaggagtggtgcaggggataaaatagctatccaggtaaaatttgggggctaataccccacagtcaagatgcaccatatatacagactcagatgaagaatgaaaatattaccatggctggtgtgacctggccatgcctacctctatgatttcatcttgtatgtctaacttcttattcattgcacttcagacatgctggtttttgttcattcaacagtccaggctcactgctcattaagcacctttgaagattattctccaaagtgttgacatggctgtttccttagcatccagctgtcagcttaaaggttagctttgtagaaaactcttccccaaccacacaatctaaagtagctgccccctttaccttctatcatgcagtcttactatattttgaacgtagtatcactaaccactctatttaacattataattcattgttccattataccttagtccttttcacttattttccgcatagctcctatcaccttcagatgttttat

SEQ ID NO: 6362 - DNA, 960 bp, mus musculus
aatactatgatataaaaatcattaaaaccttcattgtgcacaagaagaaactgagagtttaagtaacttgccactgtcatactgtgaacagaggatagaattgggatttgaatttggctatgctagctgtaaatattatatatacaccaatatattatactgcccatatactacagaaaagcagactttacttaccaaataagttgaaattaatatattataattttggcacaggaaaaggcaaatagagaaatggatgtaaagagatagctcagaagcagatctgtattgatatagcagttcagaatataccaaaggtgatggtcttacaaccacttactgaagaagtgacagattattcaatatataatcccctaaacattgcctattcaaatgaaaaaaaaaacataaatgagtactttagcttatatggaaaaatataactcagaataaataaatatctaatttaaaagaatagctatagacctcagagcaaaaagcatttcttcagtaatacacccacgccaacaacaacaaataaaaagtatgattcattttaccacattgatgcttaatatagctgtataacaaactgtatatatatatatactatatatagttaaaccataaatgatacactgcaaaattatatttgcattgcctgtaactaaccaagatttagtgtctgaatgcataaaatgttgctatgtcataacaaaaacaattaataaaataaatcaagaatttggacaaatcacagaaggaaaatcttaattgctaataaacattttacaaactcagtattcctagaaattaaggaagtgtttattaaagcaatgagatataatttcatatctataaaattgacaaaaatgcaaataaacatgtatataatagtacttaatgggcatggacttggagaagcagaaccttgccaacactaccaataggcatgtgtac

SEQ ID NO: 6363 - DNA, 416 bp, mus musculus
cttgaactgttcagcatatatgtacatgcatatatatatatatcaggatgtataatacatatacatgtgcacacatatatgctttcacatataaattttacatgttttcatatgtaaattcaaagacatgattatatgttttatatatatatttatatataaaatttgttttccaatgtaagagtaaactccaactggcagataaccacttttaacctgtttttatattcaggctctcttgcttgatataatcctgagttcaaagtcacttttaaataataacttactgagtttaactgattttgctttgaagtgtcttatagcataaagaatgctatacatgaattttacttttagggtaattctaaatgtatattgcatgtaatgagaaggaaacttggagcattaaggacagt

SEQ ID NO: 6364 - DNA, 736 bp, mus musculus
atttgggttctaattcctaatcctaaaccattgcgctttcaccaacagaggacttagctttccctatatgattttagcagagggataatgccagatattatcccagattccttctgtctaagggacaaagggcaccatactcaagcaatcttaggaattccaggtgagccttgatggagaaacagagggctgaaaactcctggggtttcctgagttacaaaatcagtcattcctccctggctgagctggatacatggaaatgtagtggacaagaaaagatattgcctttttgttcttagagcatatggtccagtgaagatgacagaaattaatcaaataaccacagaaatattttataaatgtcattttgcaaatgagagatttttgtgttctgactgaaaggggatgtgcatatgaatcttcagagggatctcaaataatgttctctcctgactagtttctcatgtacccttttacgtgggtggaagggacttatgctgagaaaagcacactttctttctcttccctagagggctggaatctgcatgtaggtagagcaagagggtataggttttaagggaatctctcccctaaacctatccctatcctatcaacatcttctggaaattcccacaaaccaaaatatattgggtttaacaaacaagaaaaacttgaacagaaaaaatataaaagagataaatataatattcacataaacaaactgcaaactcttcct

SEQ ID NO: 6365 - DNA, 6 bp, mus musculus
agtagt

SEQ ID NO: 6366 - DNA, 1132 bp, mus musculus
gcttagcatgtcagattacatgttttaaataattgcttctttctactttccattaaactactccaggattcacccggcgtactggcgcataatgcctaggaatgaaaaattgtttcatcatcacatcatataccttcttatgtgtttgagtggtagaaaatattataaaaatgcagcaaattgtgcattcaaaacacagagcagtctgaaagaaaccacaaattttagtaacaattggaacaaagacaatggaaacattatcactagagtaagcatccaagttttgcacttcatttggaagacattaagaatgaaaccaagaacaggacatgtgtcaattagagcgggaatactttggctcagagtgctggaaaatcagtgaagtggaaccaaacaaacaaaaattagctatttaactactttccaaaaaataaaaaatttgtttctaatgaaatgtgtacattatcccattaatcttttaattaacccctgtcagcagtgtcaagaaaaacatgaccatggaatactgattttactttaacttgaacaaaataaaaaatgaacaattgattttcattttaaatgataattattcatccaaggaattgttcctgtatcataaacctatttttctcttcctttccaagtggtatatattcctttaacacaaaagatagagtaggagtgaaatttcatcatttaacgtgggaaaagaggatcttaaaatgtaacctatataggccagttaattagaatagaaattaaccatgtttaagtttttctttgagacagggtctcaagaaagaatcctgctccatcacccaggctggagtgcagtggtgctaccttggctcactgcaacctccacctctgtgatttaagcgattctccttcctcagcctcccgagtagctgggattacaggtgcctgccaccatgcccagctaatttttgtatttttagtagagacagagtttcaccatgttggccagcctggtctcgaactcctgacctcaactgatccacctgccttggcttcccaaagttctgggattacaggcctgagccactgcacctggcctgtaatttttaattcaatttattccagtgctctgataaattggttaccaatc

SEQ ID NO: 6367 - DNA, 602 bp, mus musculus
ttaattatgttagtttagtagtctagataatgtattttactatttcattaatttaagtaaaatatacttggaaatcaattttttgatattcatatttcaataatggtgatgtatgtgattgtataacaagttgtttccaaattatataacatagaaatatctaatagaaaacaattgtctcaaaaataaaacaatataatattgttgaaacttcaacttgataatcaaacgtaagagcttcaaaatgagaatgcattttttagccaaattaacctaatcatagttgcctgggatgtaatcgagctgccatcaagatatgcatcacctcaggttagctttcgtccaactcttcataagtattaaacagtatattttggtagcattcacagagttgtgagtttgatttagagttggacctagcactgttgtaaccatctgctagatctgtgtctcactgactccagaggggacatgctggagtgagctgtctcacaacaatccatcctcataggtctactctattaagagataagttaaaggttttaaattgtatcccaaatcaacactttgtagttatatcacttaattgccattgaaaatgt

SEQ ID NO: 6368 - DNA, 122 bp, mus musculus
ataaaggttgaagatagtttcagatcaattttgcctccaatactattaaaaatggagatgattaggagatagtttagggacatgtatctcagtgggtgtcacacagtctaatctcctacaaa

SEQ ID NO: 6369 - DNA, 284 bp, mus musculus
ttagctccattgtttaacaaaatctttagctattaaaaatgctctttaaaattacatagttttattttgttatttttgtcgcatataaaacatatcaccttttgttctgtcagcttttctcaacatcaaattgaaaccatctcatagtgatggccagatggataacagttttacttatttcatttctctagtgagttttctgctttgctatcatcacctctatcagtttgactcaaaattctaagaaactttttcctctacttttttgtcttcagtattaacat

SEQ ID NO: 6370 - DNA, 596 bp, mus musculus
ctcatcctttttcttcttcagaaatatatatatattgactactctagtaatggccatgttgttatctcttttcattatttgctgtattttcttatgcactttttcctataaaggctatcatattatagacacaaaaagatttctctaagcttaactgttaggttgcatctggataggcataactacagcatgaaactttatttttttctcttccatatcaaaagaaatatgaattgtatatagagaaaatgcaaatttgtagtgttcttcttttgcccactagtaacttttctgatactggcatttcatcttccattgattttccagtgttaagaaaaacaagcttgataaaatatttcaccaaaacagatagttgtatttccttgaccactacgttcaaataaaatcgacctttttctcaatcctggaaatgagccaggcttacttctgcttcagaaattgtgtaccagactttgccttagaaagtgagggacataagcctggcttcctgtaatgagatgttagcctcatgagatctccttggagaggccttgcttgctgtatgtatgtgtgtatgtgtgtacgtaaagaaccct

SEQ ID NO: 6371 - DNA, 236 bp, mus musculus
tttgtttttacaaacatatctaacataatttatatagttatcttcatatattaacttgtatggactgtcataaatgtaaaatgaacaaattagtgtcacatgtcagtacaattttatacctcaatacatatatctctttttagtttccttaattttctaaattaaaaaaaatcaattgatcagaatagttttccatgcaataactaatattcaaaatttattatttaattaattat

SEQ ID NO: 6372 - DNA, 495 bp, mus musculus
ctaaccactcacaaaatggataatggtggaaaaatgtctgctccaaagtattttataagaaatcaataatatttttactataagaaaccccttatactatataaagaaaaaagaaagtttaaaattaaccaacaaagggttattgttcagaacccatagacacatgtactgcaaggtggccaggacgctaaaaccaagaccaaagaaatcgtgagttacatttgcttgttccgcctcaggcttgcatctctgcttctctaaacaaatcagcttcattcttcatcacaatgagaactacaacttgtacatacctttgcttcttcctaaaactcttacttagaccatcacattacttacctagacctatcgtttaagtcaaaaacaaaacatcacctcacaatgagcctcttcatgtcaaaatcagcttacattcattattttaaaaaatgggggaggggcataaaagagctctcctcaccaagatttcaggggata

SEQ ID NO: 6373 - DNA, 425 bp, mus musculus
aaatatacagtagagttatctgcatggtattacctttttggactgttggaatatataccataattttagagtagttcctatactcaacttttagaatatatttactttgttgcagttttagcaatgctaccataagcattcatattgttacacagttgccttgtcagaaacctcggataaattcttaaacatgtgttaaaggtatgcatatctttaaggctttgatacgtatgggctggataacttcaagaaaaggttatgcaaagttatattgccaacagcaatgatgtaacacaacttaacttttaaaaatatttttgaagtacttatttgcatgaattaccgaatttgtaaaccggttacaaaatatcttattcaagtaaagcccaattttagttatagggaatgtgagataatggttttat

SEQ ID NO: 6374 - DNA, 750 bp, mus musculus
aacatgtaggtattgagaaaacaattagaattttaactatttctgtccatattttgattaagaatataactgtataggatatattatacatagctctctaaggggtgcaacattatttatctgctcaatctgggaatattttcagaatttgtccatttgaaatctatctgtttaaaatgtctttggtagtaactgaagaagttgttctaacttactcagacttgcaaaaaaaaagtaaaacctaaaaagatgtgagaatgattgaaatcacatgtcaaatgtatggtttacaatttattagaaagttcacttaaacatgaataagggtaacatagattatcaatattatggttttaattttacttccaatctttcactacaaaggaagcactaaaatccttaaccatgcatgtgcgaagggaattttctttgacccagtcctgtacagatcttttattaatcatcttaattcttaattctgcactgcctgctcatttcttgctgtgattgttttgtagtgatctatataaaaatggctactacctcctatccagacacagtctcaggattttgtgtcgttgtttttgtcttttgttgatcaaaggctctatgtgcacaggctccatccactctctttctaaagcatttgtcatttccttccattaggtaatctctgcagttctctggctatggctgttaaatatctggaattagtttatctatattgagtttgcctcattgcaggttcaa

SEQ ID NO: 6375 - DNA, 794 bp, mus musculus
aagaaaaaccagaaaccaatgggcactgctaggcgaagataaagccaataggtctttaacagttagagacaagaatgatggcaaggatgttatatgtctattcattctcccatgttggcttgctggcaaaaggcagaggagtaaagagtaataatttgaaaacctgctcttagcatgtgtgatatgtcaggaacttagaaacttttatttaatatttgcaattggtagttgtaaaagtataatggccaggaagggcagagtcaagatttcaactgagggagcctgtcttgcctccactttgcctatagtcttactagggtgttctttgaaacaacattgcaataacaaccacaactcacaatttaacaggacaacttgtaatgaaacaaatacagatgactttcattacagacgggatcaaacttacttgtatggaataattacacaatgacattacagagtggaatatagatactataatggaacaaataattttgagtgaaagtgttttccctattctgacctcctctgagagtacaaaaatgaaggtatatgaaaatcctagaattacggttctgtaaaaggatcctcagtgatcttctagaatactatgttagggtcataaagcaatattgcaaagtgcttatacctttaccacgtagtcaacccaaatgggtgttattaaaaagtataattctctcatgtaatattaaatcttttatctaatttaatttacagaacttctttcaaatagttagcaaccttctagatgaagaaaacaaggaaaaatggga

SEQ ID NO: 6376 - DNA, 1129 bp, mus musculus
tcaaaaactccagaaactaaatcctgtctgtgaaacagtgtagaaaagaaatacttcacaagagttaattatttgggccacaaaatataaaataaaatctctcatttccagtggatgaaaattggcgcttctaaatcagagtgctagtaatgttcaacaatttgagcacaacacatgattggctgtgaaacagtgtacagaaacatgtagctccacctgttcagatattcaaaagtcatttcatggttattataagataaatttatttggacatgcctagtcatgcatgcattagacatgtgtctcagccaaaataaattgcatttcattataaaatggaaaaccaaagctcacaataggtccatttttcttattttgttctttttcaaatcaattattttacttcctccattctctgttttatttatttgtctttgtctttctctatctctgtctcttttaatgtaagaatatctttaagaaaagtttctaactatacgtttctaattatacatttaaagacagcatgtatgtgcatacattcgcacacacattttatatatatacacacacacacacacacatgctctttaaatgttaataattaatcacataaccctccttttggtggctttggtctcactgtcagaattgctaagtaggaaggtacaggcagccagtgatggctcccttgtcaatctcagtgagcctgagcagtcgctggagcttgcagtatcagttgctaggcaacctgttcatctgctgtgcctgatatttcaattcggcagcagtaaaggtctgttatgttatggcctttcagaactaccttcattacataatatctaccattataataaaggagctttaaatgtttaggggtgtgagagtagcaaggaaaatcagtgcagctgtgccactcagataatgtcaaggtagactttctgcatataaaaaagtataaaattatgacatatttaacactcagtccttcctggcagagaactaaaaaagcatcctaccagactatttacttgatgatatcaaatcaggtcttgttaccattctagaaaagtttctaactgctgctataatgaaggtaaaacagcaatggcctacagaaataagaaga

SEQ ID NO: 6377 - DNA, 338 bp, mus musculus
ctaaggaaaatgaagcatgtaaagttaaatgactctcccaagttcacaagaccagtaactcccagggctaggattagaacccaaatccatctggcttcagagcaggattccttaaccaccggtctattgtggcctttgggaatttaaaacctgggagagtgactttcacacttatctacagaggcctggggttctttgtatgtgctacattagatgtaatgggaagcaggaggaaccatatcacaggcagatcagtccctcgttgataattggaattctatttaaaattttgttttacaaacatacatcctctaatatttttttaaaaaagaagttcc

SEQ ID NO: 6378 - DNA, 488 bp, mus musculus
agtctttttgtatgttatgcattattattttacttactattatttgcttgttatggttctgtaatatgcactctatatctgagaatataatgaatctcaaattatcttgatttactcaaggacttttttagaaacttgaaaataacattctgattgctccatttcattgaaatattaaaacaccaattgtaatttactttcatgccaactttctagtgactggtaaattgaaaattagggtttttttctgactttgatagattcacaatctgattatttggaagtcacatactacccatgttaccaacccaatagactggaaagtgacactggaacaacctgagcatgtatgtaacacatcataactaatcttattaatgccattagtactgaattggagttacactgacacaaccttaccttatttagtccataaaattaggtagttcgaccgattaaccctgtttctaaaaggttatgtttaaaga

SEQ ID NO: 6379 - DNA, 1025 bp, mus musculus
caaagactaaattggccttatggtttttaacaatatctgcaacttttttgctgcttagctacagaaaaaaatacactacactcacgtagtgcaatcctctatcttttctgcagttgtacccaggttgcttagtactgttggagaaaatgtgcacacaactgcacattggagacaccagatgcccatgatctaacctcagtcaagctttcctaaaatccttgtttatatggtcatctccatttcccattcccatatatttgttatataacttcatcatgattctttcctcatgaattactctcaaaagattatctttacctcttctttgatcaaacagcaacttcctctatgtccatctctttccctccaacatgcattaaatctctatattcagacttattatctgcttttctttcatttcaagataacacagaggatcgcactataaaatcaaactcatgtgaatcagggctcttatccctagaaagcttgctaataatttcaaagatacaagcaatcaagaggaagtgatgaagcagagagaagtccaagacctccagtgcagcctccacacccagtatttcattcctgaaacacccatcctaacccttgttcctgatcccaccccaacttttcttactaaccactctccgccagtgcagatgatgcctcttcatttgttacaactcaatttagatgctgctgctttcagtaatccttctctgaatccctgtctgggcagagatgctcaacccatatgattgcagacaccccatgcttgactgcatcatgttactctcctcgctatattgtatatgtttttctatctcctccctggatggtaagcaacttgtaagtagaattatgtttttctgtatctctagctattagcctggtgcctgcaccaaattaggtgtttaataaatgcttgttaaagaataaaaaatattaaggatctctgccctctggtacattataggttagaatgggaaaagtcacatggggagaagtgatataaatacagt

SEQ ID NO: 6380 - DNA, 208 bp, mus musculus
tagtttttcctgcttaaaacctattggtgttatctttgtaaaaacatcttcacttgtttggaaagccatgttctaaacccaagcccttggcccactcagcctctttgcaccatgtaccagcagcccttgccttctgctgctttcttatgccaaagtcctttatgcctcagggtcactgcctcctaggggtcttctcactctccttcct

SEQ ID NO: 6381 - DNA, 983 bp, mus musculus
ccctgctcctgtcttccattgaggcagaaggtaaaaggctcccttccccttcaccgagtgacaatgcaaaattcgagaaaggaaaaaacacatctttcttgcttctattgcttgctctgttttccctgcgcttcgtgctttctccggtggtttctctccttcagagaaacgcccctttctcctgaggtttgtccatttcccagctctcaggtccagctctttcgtattctgcttaatgcattccgtacagtgctgtgtggtcttcttgagcttgtctctgcggtgtgctgtccacactgccacctgcactgccgcctaataagaggaccagccgcccgagagggggcgacggctctaatcagcgcaaccaacaggacacctccgggtggcacccaggagccccgaagagcgggcgcactcgctcgcttggctggtaaccaaccacctggctcggggctgcgacctcggtgacagaacacaataaaagactccaacagcgctggctctgcgcctctgtgtgctttgtggggagctcagtcggcggggcggacggtgcgggcagatgagccagcagccaagcagcctgggggatgatggcaggcaagcggagatccgggaccccaggtgttcgcacgacctagggtcgcggctgtccctgttggttagcagggctccaaggcgcgtggcctggactggtccagctcagacaggttgagcctgggccaaggtttccagcctgggaagcaagcgcgcgccggagttgctgggcaccacctccagtgtcctgcccttgctccatcctgcctccctcagggacagccgggtgcgtcggaccttcccgcggaggcagtggggcgctccgagatgggtttccaaaacggcgccgtgtggcccctcctctagaaaatggagggcttttgttagatgtcccacccaattttatttgttgtgtgcacttgatgtcttaatttctcagtgttcat

SEQ ID NO: 6382 - DNA, 601 bp, mus musculus
tctataagaatttctgctgcaattttcctcctttttggcatatgtagctcattttagcagcagtgactttatttgctgtatgtaattacttaattttactgggtttactcacattgttatgccattgtaacaaatttatgtattcattcatgtgtagctgcacaatatttaaagaagctgccaaatgctatcagaagcaacacagaccccaggcctaacaaatgaagcagcctggtaagatagaggggctgctggcagatgtgatactgctctgtgggagaacaattggcatggatgtttgcagataaagcaaataaagcaaagtgacatgtgcctggtatcagtggttaataaaaacaggtactgtatgctctatctgctaacattacttgcagatttcaaaacttgtagtgactagaaaatatacttttatatcactttctatgggtcaaacactgttacaaatattttatatatgttatttgttaaatttttacaacaaagatgtgagatagatccttcattatcatcacctctgtttcccaaatgaggatagtgaggtacttggagattaagtgacaggcagcatcagagatgggct

SEQ ID NO: 6383 - DNA, 684 bp, mus musculus
ggaacaagtggaacaattataactctaatagttactagcaggaatgaaaagtggtacgaccattttggaaaaaaaatagccaagttttttgtaaaattaaacattcagttaccaaataactcagtaattacactcttaggtatttattccaagtaaatgaaagcttatgcccacacataatcttgtgcataaatatttagcagctttattcataatcaccccataaaggatgtaacccaagcgctcatgaacaggtaagttgttaaaaaaaaaaaaaaaagttttggtatcgttcatgcaaaagaattctacacagcaaaaaaatagaaacaagcttctgatatataaaagaagtagtgactctcaaaaacatgctgaattaaagaagccatgaataagagggtgcatactaccatgttatttcatttatatgacattccagaagagggaaaactaatctatagtgacagaccacagagtagtggttgactggggctgggattgattgcaaatctttgtggtaatatcctgattgtgatggtagtgatgttttggattttgtcaaaacttatccacttaagatgggtgcatattattttatgtcaatgttacctcagtgaaaatttttgaaaatgttttaaaaatgtcatttatgtaaagcacaagaataaagttaaatatttc

SEQ ID NO: 6384 - DNA, 1046 bp, mus musculus
gtttattagggatatcaaagtatttcttattaataatccacaaaattttcaagacatacctatagctgaagtaacaaatactgatttttgtttctttgaagttttgttgggggttttagcccttagcctgatgctatccagtgagggacattatttagcagctgcatgatttattgctggttgcatttggaaatgttattgattgccattgtcacatgatctgtattaggaagccatggtccattctgaactgtgtatataaatattgttgattgatttccaactatagtaatggattatatggctgcctctatttgcagcccaccttagacacacaatttcttgcttataagcccttaaaggtaattatgtctgcttaagtacttcgtctttcaggggttataatctcccagcagccttgccacttactaggcatcagttaagttcttaaaatatctcttgtgttttttctagtagcagttgtctgagcttcacctggccatcctggaggtatttccatatccttattctcatttgcttcatcccatacagctgtatgtacagggaatcgttttcatgacagggaactggcaacagtcacagaactcattgccagatagttttttgccacttggctcctcatagtgaccatttcaaaagctggatatgacatttatgatagctttaagtgtcactatcatctggaaagctgaacacatacctctggagcttgatactttactgactcaagattaaactttgtcagtttgtcagtttaatcttggcctccttgattcaggaaaccaaagtacctatcatcaaataatgcactatgtattttagctccacagagtagatgacatgtcatgattgtgggtagggctaagtgacagaggcttgtctgaaatctggtctgtagataagtactcattccacagttagcaagtttcttcctacatggaaacttccggaagaacagcaattcgcagaatcatttgagaaattaactaactttagctaccatcataatgtggatgatatcttgg

SEQ ID NO: 6385 - DNA, 472 bp, mus musculus
tctttttatagaacaagagtagagggcttgggtggacaaagaattatggcaaagttaagtatatgtaggaggttttcttctgttagggcaaacgtaatcttcatgacacctggcacaagcggttcagtgttgaagctgtaatgaattcaagaaacagttcaaaagccaaaaataatttaaaaggaattccacatttcattgtattcctagaaaaccataagaaggatcccaattcatagtcctcaataacactcactaaatctccatgtctctcaggtcttcttcctgtagccactcccacacaaactgttgggtaacaatgagacttcttttgtcagattggggctagtctgctcaaaaaatacaatgttatcatttttttcccatcataaattaatacagagattgtatgcaatgtgacaacaacatttaaggtgttaagaaacataggtatgaaattagtcatgggtgt

SEQ ID NO: 6386 - DNA, 402 bp, mus musculus
tttccaggttagttcgcccaagttagttctgacatgtcaaccccttattctaaaaccttcaacaacttccgatggtttactaaattaagttcaaactctttgcttatatggtgttcaaagctctttctattccagctcctctccgccttccttgcccacattttctccctcctgtgttcctttcatcccttccattccccctgttgcactccttctctatacacacccagagtttctttcaagctagacaatttgctttccatgaatgagcccgtgccctcccatctcagtgccattgccctggggcaggaaaacagagtcatccactggccaccacatcaccttgatggtggctaacctcactcccatccatttctcccttcactgtgttcatttcagggg

SEQ ID NO: 6387 - DNA, 1213 bp, mus musculus
ctgactaaaatgcccactctaaagcagtcatgagcacaaatgggtcagtgacagaactgaaaagaggctgacatgattctaacacatcatgcatctctgggtttgccaatccctcctgtggtctcatggtcaaatctgcgctgctgaataattttaaggaaatagcggggtcttgacagctagagaagatgagctttcactcttgcacagtgtctgacaccagggttccaattttgattgtcttacatggatcagtaatttcctcttttcttgacagggaccccacactgaagtctactatattgtacagggtaaagcgtgcaataaaatacaagtacaataaactccaatgagaagattgaaaatataactgataagcaaaaggatctcagaacagtaaactggaaatacttgaactgccaaagataagatgatactggagcaatttttcaatcttaattatagtgaactctctctttttttggtcttgcatccctctgtggatgagtcaatgcttctttcttttaaattcagtaggaaatttatggttgagctagataagaaaaatgtgcagtatttgtctgatctagtttgccattatttgctgatgttagagagagtgtgtgtatgtcaggaatgttcttgcccaaactgtgagataacccggtgttgcaccctcctaccatccctttcagcactcttcctggtgagatacccagaagtttccaccccaggaagccaattctgtgtgctcttcttactctccactccctgtcatccttgacctgctgaggtgttaattctaccaagctgtcagagcagagcatgaaatgctggcctccaaagcttggctcagcttcttccttgcctagaatttcctccctgcccttctccatctgtttaatttctgcctattcttaaaggtatacatattggccagtactcttttgattataagtaactaaaatcatactcggcctagcttaagccaaagggcattttttgaactcagataaccaaggccagggcagagtagaaactagctgaccataagatgtctggagtcagggttccaaacgctgtcaagacccactgtcttcacttttcatctgtgatactcagtgattcagcttcattctctacagggaacttgcacataacattggaaacttggtcttctgcagctcaaccctttccagctttgccaacagaa

SEQ ID NO: 6388 - DNA, 1374 bp, mus musculus
tgaaacatgacctgcatgacaggctataagttgtcaatagttctttttctttggaaaagtacagttgtggcatttactcactttagcagatagctaaaagggaaaaataaggaaaaatatacactggacctgcagttaagtttttgacaatgccaaggatcaaaaacagatgaaacaacatttgctgaagatgaaaaggtattgcattggtcttaatagatgttgccatctctgggtgaggatgctgactgagcctgttctgtgtcttcatcacctctatttgtttcttcttctacgacagacctccaagagacaagatccatgtagtaagccacactaggtccttttgacccttctcattcttctgtagtctcttccctgtgacttttgacaaaaatactcagttcacaatattagctgcctgcttctgatgggtaggaggtaatcaaaatactcccaccaaagcactctatggtctagacttgatacttaaaatttagttttcagcattcctcaacaaggataccttgaggtaataggagatattttggtaagtgaaaataattcctgcttggaacacagcctactgaactcaggatttaatttcttgagtattaggcagttctcaataaattgatgtatactgaggaatgattctaaagaggttagtgatatcctgtttgagaatagatttagaaaactgaaggtactctccagctctacaattctgtattaggaacaatagggaaatgagaaagtgcctctatattgcaatctaatgagtctctgggggaagactgtctacctgcgtagtagttgagaacaagacaagctcccaaacacatgaaaatcaacttgaaataacatcaaattcagcctgggcaatatcatgagaccttatatctacaaaaaattagccaggactggtggcacacgcctgtagtcccaagctacttgcgaggttgaggcaggaggatcacgagcctgagaggccaaggctgcagtgaggtgtgatcatgccactgcactccagtctgggtgacagagcaagaccctgtctcaacaaaataaaaaacatcaaattcattccatattcaggtaacagtgacatatatctactgaattatttttcttttaggaatgtctatatctatggattgtcactataaaaaaaagaaaaaaccctaaaactgagcttgacaaagggaataaaagcatactttgtttttcttggtgtccccatgttaataaatcatttcttctctttggctcaatgagcagcattttattacaattacgttcaatagtcactaggttcctgtgtctatagaaatagaactgaagtttctgtgcatacatgggatattgaggaga

SEQ ID NO: 6389 - DNA, 1374 bp, mus musculus
tctcctcaatatcccatgtatgcacagaaacttcagttctatttctatagacacaggaacctagtgactattgaacgtaattgtaataaaatgctgctcattgagccaaagagaagaaatgatttattaacatggggacaccaagaaaaacaaagtatgcttttattccctttgtcaagctcagttttagggttttttcttttttttatagtgacaatccatagatatagacattcctaaaagaaaaataattcagtagatatatgtcactgttacctgaatatggaatgaatttgatgttttttattttgttgagacagggtcttgctctgtcacccagactggagtgcagtggcatgatcacacctcactgcagccttggcctctcaggctcgtgatcctcctgcctcaacctcgcaagtagcttgggactacaggcgtgtgccaccagtcctggctaattttttgtagatataaggtctcatgatattgcccaggctgaatttgatgttatttcaagttgattttcatgtgtttgggagcttgtcttgttctcaactactacgcaggtagacagtcttcccccagagactcattagattgcaatatagaggcactttctcatttccctattgttcctaatacagaattgtagagctggagagtaccttcagttttctaaatctattctcaaacaggatatcactaacctctttagaatcattcctcagtatacatcaatttattgagaactgcctaatactcaagaaattaaatcctgagttcagtaggctgtgttccaagcaggaattattttcacttaccaaaatatctcctattacctcaaggtatccttgttgaggaatgctgaaaactaaattttaagtatcaagtctagaccatagagtgctttggtgggagtattttgattacctcctacccatcagaagcaggcagctaatattgtgaactgagtatttttgtcaaaagtcacagggaagagactacagaagaatgagaagggtcaaaaggacctagtgtggcttactacatggatcttgtctcttggaggtctgtcgtagaagaagaaacaaatagaggtgatgaagacacagaacaggctcagtcagcatcctcacccagagatggcaacatctattaagaccaatgcaataccttttcatcttcagcaaatgttgtttcatctgtttttgatccttggcattgtcaaaaacttaactgcaggtccagtgtatatttttccttatttttcccttttagctatctgctaaagtgagtaaatgccacaactgtacttttccaaagaaaaagaactattgacaacttatagcctgtcatgcaggtcatgtttca

SEQ ID NO: 6390 - DNA, 1374 bp, mus musculus; identical to SEQ ID NO: 6388

SEQ ID NO: 6391 - DNA, 1374 bp, mus musculus; identical to SEQ ID NO: 6389

SEQ ID NO: 6392 - DNA, 1374 bp, mus musculus; identical to SEQ ID NO: 6389

SEQ ID NO: 6393 - DNA, 1878 bp, mus musculus
aagacatcagaatgtgagtctagcagccttccaaagagagctaggttatggttaattaatttttgcttattatttctctgaactattaggcttttatagtgaccaagtaaattagtcatttcacagaagttgaatgataacattcattttgcttaaccttttccatttccacaaatgtctcttcttttattgtagaataaaatgttggccttgtaacttttgatgttttttgtttttttttaaacagcttactgctggttgcaggggggacagttctaaaaatttgtgattttggtacagcctgtgacattcagacacacatgaccaataacaaggggagtgctgcttggatggcacctgaagtttttgaaggtaaaatggcaaaagtatggtatgtttgataatctccctcactccttgtgaattcatatgtttttatagattttccccatttccatggttttatttctgcataatacataaagtatacaatgaaatctaaggggatattaaatatagtgttatatcctaaattttatagtaagatttaaatcttctatgcttctaagcatatgtacagttgatcctcattgttcaccaatttcttaattgcaaaattgcctatttgctaacatttatttgtaaccccaaaattaatactcatggtgctttcatggttatttgcagacagtgctttcatgtactcgcagacagtgtgcatgcgctgagcagtgcaaattttgagtcatctaacgcatgcttccagctgaggttgaacaagacaacgtttttccgtcttgtttcagctctcatgctgtaagcaggtgtccttttttgtgctgttcagagccctttttcatttttgtgatttttgttggtaattttgctacttaaaatggccctcaagcatagtactgcctaagtacaagaaggctatgatgtatcttaacagacaatatacatatgttaaattatcttcattcaggcatgagttacagaaatgttgactatgagttcaatggtaataaatcaacagtatatatgaataaggtgtctttaagcagaaatacgcatgaaacaaggctatatattgatcagttgacaaaaacatggtgaccagaggcacacaggaacctacccctgtattttccttaggagcagtgattcagtgttcactaattcagtgttctcagaaactttatagaacataaataccaggaataatgagaattaactgtgcttttgtattggtttcctagcaattaaaaattgagagccctaaagtttaaatgaggatgccttaaaaagaatgcaaatagctgggcgcggtggctcaggcctgtaatctcagcactttgggaggctgaggtgggcggatcatgaggtcaggagatcgagaccatcctgtataacacggtgaaaccccatctctactaaaactacaaaaaattcgccgggcgtggtggcgggcgcccgtagtcccagctactcgggaggctgaggcaggagaatggtgtgaacccgggaggcggagcatgcagtgagccgagatcgtgccactgcactccagcctgggtgacagagcaagactccatctcaaaaaaaaaaaagaatgcaagtaattggacagaaataagatactaagaattacaaataaatgtcaagcttatatgtttaccttcttttatacctccatatgtcactgaagttttaaaagagttgtctgtaaattatatgctaggtttctgtataaaaacatcaaattatcttttaaatgaaagaagttgaactgaaggtatgtgatttgtatgttaggaagtgtaaatgcccataaaattcagatacattcagttaatcagactctggttatagcttatt

SEQ ID NO: 6394 - DNA, 810 bp, mus musculus
atattgtaatattaaagatcaagaaacttttaataggaatcaaatacaatttttaattgagcccatttattgcacacatgagctgtattgaaaattctcccaaatcaaaaaagtcagtaatcataattgcaattaaaaggtgaatctaataagctgaatcttttttgcttagattctctttaaatcaaacaattctaaattacttttactaaaagctcaaaattgatttaatgttaactatatcctttattcataaatttgtcctctttctttttgagctctagttgatttcacatactccctcttcactaaaaagagtttattgatacactgtgtctacatgatgccatgacatctgaatgaaagatttgatatttgctatccagatgctctgccttcttcactccatctggatatttggccttgtatttacaaaccatctgggtttgttacgatactttccacttttcaaccagatgttttggcattgtgtggacaaagcatgtggcattatctataaaatgtaattatataaaaataaataacactatgtaagcaattaaaggaaaaacattttcccatctaaaaatctcaacaatatttttctcagtaatatcatcatagcaggacatattttacttgctatattttaacatgttaaatttcatatgtgaacaaaaaaggaaaattatataaatgatatatgatttgcatactatgtatacaaatatgtataaaatgatttatcaaaggaaatttctaatattttaataatttgtaatagaaaatatatgtgatttaagatatttt

SEQ ID NO: 6395 - DNA, 3079 bp, mus musculus
catagaccaaggctaggttctgagtatgttgtcctggggagctcatgctagattttgatactttttaaaattataaatattataagtggtgtctactattgagtctccaaagagaataccagaatgacacattgatgaagaaagcgtatttgtttacctactgcatggggcagaacaccatcttgactgaggcttagtagtgtcttagaaggggagcttaagcctgatactgttgtggttcagggatctccttgcaagtggtttaaggcaatctttcaatgtaggatttaattaaggctaagcaaaattcttaatagtttattattgtaaaacagatgaattcaaggaatgactcttggtaagtagttgtttgataggcaagtatgtttgactagttgagtgaactattgtcctgagaaggggcttggtcaatgtattagttcattttcatgctgcttatagagacatacccaagactgggaagataaagaggtttaatggacttacagttccacatgactggggaggcctcaaaatcatgacaaaaggtgaaaggcacatctcatatggtggcagacaagaaaagagagcttgtgcagggaaactcccccttatagaaccatcagatctcgtgatacttattcactatcatgagaacagcacaagagaggcctgccccaatgattcagttacctcccactgggtccctcccacaacatgtgggaattcaagatgaaatttgggtggggacaaagccaaaccatatcattccaaccctggcccctcccaaatctcatgtccttatatttcaaaacaaatcatgccatcccaacagtctcccaaagtcttaactcatttcatccttaactcaatagcccacagtccaaagtctccttcaagacaaggcaagtcccttccgtgtataagccagtaaaatcaaaagcaagttagttacttcctagatacaatggggtacaggcattgggtaaacacagccatttcaaatgggagaaattggccaaaataaaagggctacaggacccatggaagtttgaaattcagtggggcagtcaaattttaacgctccaaaatgacctcctttgactccattacatccaggtcacactgatgcaataggtgggctcctatggccttgaaagctctgcccctgtggctttgcatagtatatcccacctcctgactgctttcttgggttggcattgagcgtctacagcttttccaggtgcacggcacaagctgtcagtggatctactatcctggggtctggaggatggtggccttcttctcacagctccactaggtggtgccccagtagggactctgtgtgggggctccagccccatgtttcccttctccactgccctagcagaagttctccatgagggccctgcccctgtagcaaacttctgcctgggcatacaggcatttccatacaccctctgaaatctaggcagaggttccaaaacctcaattcttgacttctgtgcacccacaggctcaatactacatggaagctgccaaggcttggggcttccacattctgaagcggcagcccaaactgtatcttggccccttttagtcatagctggagttgctgggatgcagagcaccaagtccctggactgcacacagcagaaggaccctgagcctggcccacgaaaccattttttctcctaaacctcagggcctgtgatgggagggactgctgcaaagttctctgacgtgccctggagacatttttccccattgtcttgggggttaacatttggctccttgttacttggtcaaatttctgcagccagcttgaatttctcctcagaaaatgagattttcttttctatcacattgtcagggtgcaaatttcccaaacttttatgctctgttttccttttaaaactcaatgcctttaacagcctccaagtcacttcttgaatgctttgctgcttagaaatttcttccaccagacaccctaaatcacctgtctcaagttcaaagttacagaaatctctaggcctagggcaaaatgctgctagtctcttcactaaaacataacaagagtcacctttactccagttcccaacaagttcctcatctccatttgagaccacctcatccaggatttcattgtccatatcattgtcagcattttggtcaaagccattcaaaaagtctctagggagttacaaactttcccacattttcctgtcttcttctgagtcttccaaactgttccaacctctgcctgttatccagttccaaagttgcttccacattttcagatatcttttcagcagcacctcattcctgttaccaatttactgtgttagtcagttttcatgctgctgataaagacacacccgagactgggaagataaaaaggtttaatggacttacagttccaaatggctggggaggcctcacaaccatagtggaaggtgaaaggcatgtctcacatggcagcagacaagagaagagttgttcaggggaactcccccttatagaaccatcagatcttgtgagacttattcactctcatgagaacagcatgggaaagacttgcccccatgattcaattacctcccatagggtccctcctacaacatgtgggaattcaagatgagatttgggtggagacacaccaaaccatatcagtctagaactccattggttggacaaatgggtttgtctggagtttcagaagcaaacaataaagttagacattacagctttattttcctgggtagaaattccctggaacaaaatttaaagtcgtttaatataggcttagtcctcacagttaaactctgggaccccagggatatcaattcttagtatttggaaatgataacaatcatcactaactctccacaccagaagcagaacagagagggagacagagagagagagagagagagagagaaagagattctctcatataaatgtaaaaatagtcatatatgtgtatgctataaaaaatataaagacagttgctaggtaagcacattcacacacaattgcaaaaggattctacctagtaaaatgtatgagccacttgaat

SEQ ID NO: 6396 - DNA, 213 bp, mus musculus
agttttccagaaagcttaggagtattcttatattatgttatgggaagccaaagcatcagcaaaattagttttcacagcacatatattttcctgtgacataatatggaaaattgtgtaaatgcatacattaattgcatgaaaaacatgaaatgatctttcaaacaaatgggcatatctttatatatcctatttctgggtttttaggcactgcat

SEQ ID NO: 6397 - DNA, 829 bp, mus musculus
atgaagtttccactgagacagcactaattgtgagcaaagtaggatcacgggcaaacatcagcagttaggtttttcatgtgctcagtgtgaggcaactgttgtatgcctacacagtacatggccttgtgattcctgatccattcttcttgattcccttgctctatgtgtatggcaggtctttacccctgcaggtagtgtttcccaggctaccttatcagctaacttttgacagcatgtggcccctattaagaactggctagagcttggaaggcataagaaggcaaaaaggcgagtatttctcccttttttctgtgctttaagtgtggtttccatcggcaactatttctcttccatgactccaggtccctccatgctgttccagtttgtcctcatttattcctgtccagtaactctgccttctccttttccctctccagtgaaaggatagcaaaaacatcttctcttgcctgaggcttgtcagctcttctaacatctgtataaacaacttcataaattaaattatctctgtttcaaatatatgttgctgttcttgcatccagatttatataatttacaagtagagataaaaggtagagcagtctacatctcagagaattatatgcgccaatgcagttgaagaattctaacagtccaggtaccagagggagtgaggtgagaatgataggaagtaatagagagtggcaccctggaaattgttaagtataaaaagagtaatgatgaggtctaggctatgccatgggaggggacggttgaagtatttggagacatgaacactgaagaacgagaggtcaaagaacccaggagtcat

SEQ ID NO: 6398 - DNA, 1278 bp, mus musculus
ttcagccctggcatactgtgattcctctggaatagcggaccagaggaaaagtttgcaccgccgcggcgaaaccccgcgcgcgaacacacgcagactcgggctggagtttgggctataaataactgcatcactagggggagaggttcctgcagccagaatgtctagttctctttgctcttctgggtgcaagctacgtgaagaggattctgattctaagagcctgaattctttagatgcagaagtgtgatgtataaaaggcgcgggggtgatgggagggagggtggtgatctgtggctggcgggcggcgagtgcgcccggcttctaggcggcgacgcctctagggcgcagcggcgaccaagagctggcgttctaggagttcacaagccccgaggcggcccgcagtacccaagggctagcgctgggaaccgcttgaagcaggtgccgggcctcctggggcatttgggggtggctagaggaagataagaaacccccttccctcactttccttgtgcacgttctctcgggttggtcagttatcatcgctacagggagcgcgtgtcagagtctgacgcttgaaggcaaagtgcagctgcttactttttctctccgtaaatgccgccgccgccgccgcctcttcctcagaggagatgcttcccgaaagccactctcctcttcccgaaagccactctcctcttcccgactccttctcgagcgagggcgccaccggctccctggagtgcccaggtctggcagaggcgtaatggatgcttggcgcggctggcgcgcccgtctggcagcccccgccccgcccctccgacggccccgccccagccccgggacgccagcctttgcccgcgcggtcgttgcctgggtctgtcagggcgcgcccccagtctagcccctctcccatcacctgttggcccacaggactccggggcgcggagccctggagtcctaggcctggcccccagcgtccgggtgagccgagggactgcgcctccgcgggcgcaaagggaggtcggcactctgctccgagcgggaagggatacgcgctcttttgagggtttaaccagagagcggaccgagcagaagagagacgcacggatcacttgagagcggcttccgattaaacgttctcgggccgggttctgttttgttttaatttgttagtttgtttctctcttaacttggccatcactgctgtctgcttaggtcccttgcttccacccccaggctgagctgaggggtagcagaatggcaataaacagtaatctcgca

SEQ ID NO: 6399 - DNA, 491 bp, mus musculus
tgatcactttaaatctttttgaggaaaataaaattagtatattttcaggtactttaaaaatattattgtcaggtaaaattgcagcttgtcaattgtgatgaaaatttagttaaatgtatcttcaggattttaaaggagtctatcatgttatcaagaaattatataggactacaagctaattagaaatatgattaatataaaaatgtgcatcactgatttcaaaaatcttagaaatcaataaagcatagcaaattgaaaacattaaactgtataatttgaataatttacagaaaacttttttttttcaagtacttcaatgaagtgcaaacaagcccccttgaaattaaggcaccatccctaatatgaattagcaataaaatgcatatctttgctcttatcccaacactatcagttaacatagatactctttactttctgcaaaatttttacagcagattagagttaatagaataattgtattgtatctttcc

SEQ ID NO: 6400 - DNA, 1167 bp, mus musculus
aaacttccttttgaaagctgtttcttggctttgaggaaagttctgtttctctcaatggtttgataacactgaaaaggaaaatgcagttgattactacttgtttatctcatatttatgattttaaatatatctccaatatatttatgattttctcttcattcccaccgctacctccccttctgtctttctctatttcgtaggaaaaattatgacatcaacatccaaaggaattcttcgcccatttttaattgtctgcattatcctgggctgtttcatggcatgtcttctcatttacatcaaacctaccaacagctggatcttcagtccaatggaatcagccagctctgtgctgaaaatgaaaaacttcttttccaccaaaactgattattttaatgaaactactattctggtgtgggtgtggccatttgggcagacctttgaccttacatcctgccaagcaatgttcaacatccaaggatgccatctcacaacggaccgttcactgtacaacaaatcccatgcagttctgatccatcaccgagacatcagttgggatctgacaaatttacctcagcaagctaggccacccttccagaaatggatttggatgaatttggaatcaccaactcacactccccaaaagagtggcattgagcacttgtttaacctgactctgacttaccgccgtgattcagatatccaagtgccttatggcttcttgacggtaagcacaaatcccttcgtgtttgaagtgccaagcaaagagaaattggtgtgctgggttgtgagtaactggaaccctgagcatgccagagtcaagtattacaatgagctaagcaaaagcattgaaatccatacctacgggcaagcatttggagaatatgtcaatgataaaaatttgattcctaccatatctacttgtaaattttatctttcctttgaaaattcaatccacaaggattacatcacggaaaagctatacaatgcttttctggctggctctgtacctgttgttctgggaccatctagggaaaactatgagaattatattccagcagattcattcattcatgtggaagattataactctcccagtgagctagcaaagtatctgaaggaagtcgacaaaaacaataagttataccttagttactttaactggaggaa

SEQ ID NO: 6401 - DNA, 420 bp, mus musculus
ctaaatcctttgatctctctattgtatgttctcaagcttccctccagtcctagagcaacttgctgtgagttatgagctgggagaggtgattaggagataatatataaacaattagaagacaagatgtcactgatgttgctattatgaagaaaacacacacaaatgtttttttgagaggttagaagacccctgtccagcagcaaagctttcgtatgtaggctgtgtgtgtgaatgtttgctacaatgagactctgcctctagcctgctaagtgattaggatagtatcatggtggaagatcactcatgtttatttatgactgaatgattttattgaggatggcgtagaaaccccttaccgccgcatgcactttcctactgccacgttgccaccaaatatgggttaagggcattagaaaagaa

SEQ ID NO: 6402 - DNA, 274 bp, mus musculus
aggtaaattttttctgcaagggtttttcagagtttcagagagaacagaacatcaaacttgtggaactattttatgaattcttattaatgaatattctagtagcaagttgtggggaacagttaacctctacctatcttaaatttcctgtggatttcaacatatattaaaaagaacctaataagtttgtataaccaaattatcttaggtcagttcataataagagtcaaagtggaaaaataaaattcaaaataatctagaattcattgtatttagg

SEQ ID NO: 6403 - DNA, 490 bp, mus musculus
tgggatgccaagccttgaaactcacatgtaaaagaaacttctactttgaatgctgtgacaaaggactaccagaaaagcccacatagaattgaattggatccaagtttgtcctgaaccgtttgagcacaataaccttgaactctaggcacagtataactcttgatgcaactgggactcctccacaaaagaaatcaaaatagctatgcaaacacatttttcaaagttgtgtgaatgagcattgctctgcatactcgctctaaaccttgaagcagaatattatacacagaactgaatttccatatgtggaaactgtaaaattgttatttgcaagtcatgttcatttgtataccagaaacctgccaacaatgcacccaaaattcatttgtagctgctatttatagcaatatcagcattcaagttttatgtaaaaatagcaaagtgaagctactggtataatagtagctataacatctttactcattcatacatg

SEQ ID NO: 6404 - DNA, 1069 bp, mus musculus
aaagtttttaaaaattgtctcctagttaaaatagccatgggtgggagaatgttttgaactttttaagtattcagatactttttaagtatccagtagtcaagctagagtccaccccagccttcactgtcaactactatgctatgtgatatttattcacttgatgaggtagacagtatttatggggaggacgagaaggtgaaaaaaatatgaggagaattttgagctggagaagacataagacactggtgctcacccaggacagacaactccgtcctctcaataaagcacaattggagagtgactccaagaggagagagacatttaggtgagctgaggggcaggtggggaaggtttgtcagagcagggagcaggcttcgtgggcctcaactaaattggactgagactcatggagaaatggggaaaaggattgggcaggcggagttcccctgggagagtcaagtacgattatgccaataacagaggcgaggcagaggttgggaggcaggctggaggcacgctagtcacctgggaaaggaacctctgaaggaaagaggtactaatgaatgtgatttatgtgagttcatgttcataaggctgtataaatgcaagttgttattgcttgaggaggcttaaattcaccagaaggaaagtgttacataagagagacataggaataagatattctgtgcaaattaactgaggctgctattctgtggctaacaacatcctacctccggctgagtatcctattacctagtctgagatggtcggggaatagatcagcggtactttcaagaggtggggaaagaaatctccaaagcacaccctgacagagacagaggtgctgctggagcttttaagaacaagaaagagcctcctcctctggcgaaggagtgggctaaccaatagaaatgctcgaagggagtttaggagtgaagggggcaccccaggagtgctccctgaatggagggagcatccacagaagatgctcacagcacaggcttaaatgtgagtttgaggacctctaacttgattaaaatgtcaacttttatcctcatatcccagggtt

SEQ ID NO: 6405 - DNA, 276 bp, mus musculus
ttatggtttctaaatctcatttcttactgagaaaaatcctccccatactaagcttataaaaaattctactctgatttttctaatagtattagagaagtattttttagctttttgatctttatttgttttgctaaaagttttactaagtgcctgaatacataacctgattaacaaagcacaatgtgaaatttgctttttttgtaaataaaatatgatttttgcaaataatctcactaattccatatcacatgcagatagttgtattacatgagataa

SEQ ID NO: 6406 - DNA, 1423 bp, mus musculus
aaatccaatcaaaaacatttttcaagcatcaatttaacatggcactgctctacagaataacataaaccaaattctatgcatccttctcttatttccagtcagacaggtctaataacatatatccatggagaagtataaacacactttaccattttgctaattgtcattcacaatgaacaaggtttatcttctaagaaacttgttataaacttggtctgcatttaaaattcactgattttatatgaatccagtacagagagttgacacatagagtgtcatgtgtcactcatgtgctcacatcatgtgagcctgtttcaaatattggtgcatatattaaaaatgaaagatataaagtttattttaataggtaaaggaaatatacttattttgagggtgaattctgagatcacttacttttgactttttctaatttttagggcgaggtcattgggatgaagatagtgtggtcagttctccagaccctgggtcggccagtgaatcaggtgaccgatatcgtactgagcagtatcaaagtagcccacatgaacccagcaaaattgaaactcttataagagccactcagcaaatgattaaagaagaagagaacagattacagctaaggaaagccccctcagaccaactggcttccattaatggggctgggaaaaaacactccctgtgttttgcaaactaccaacagcccccaccaacaggtgaagtctgccatggctctgctcttgccaacacttcaccatgtgaccatatccagcagagagagggaaaaatgttgagcccccatgaaaatgactatgacaacagtcccaccgcactatctcggataagtagtcccaattcggatcgcatttcaaaatccagtttgatcctagctaaagactatctgcattcggatatatctcctcatcagacagcaggagaccaccctactgtctctccaaactgctttggctctcaccggcagtattttgacaagcatgcttacacattaactggatatgccctggagcacttatatgacagcgaaaccattagaaactattccttgggctgtaatggctcacactttgatgtaacttcccatctgaggatgcaaccagacccagcacaaggacacaagggaacatctgttataataaccaacggaagctgatgttttgctgaaatattttgttctttaaggatctctgaaacatatttatagtttaataccccattaccagcatttactatgccacagattgttagagagtataacttaagttactgggtatttgatacgtgttcctataaaatcaaagaaaacatagcactagcattcagggttatacacagaaaagggagctaaattgaatacacaaatttcccctctaattatatgggaaccagaatagataaattttgactt

SEQ ID NO: 6407 - DNA, 188 bp, mus musculus
ttctgtgtgccattgctgctcaatatagctttatgtaagcatggcaagtgtttagttctaccttcagcattcaaggcaaaaggagttgctgacattgtcctcccccaaagagttaccagcctatcctatgggcaagattggaacaccaagctccccggggcatataagaacatttacaaagggtactc

SEQ ID NO: 6408 - DNA, 582 bp, mus musculus
tctcattattgacagacctttatctcctcttcagcctgtgatcagctgtctcttggggtggctgccatcttcgggccttcacacagctcatcagcaaacgcagtgcagtccatctgcaatgctctgggagttccccacatacagacccgctggaagcaccaggtgtcagacaacaaagattccttctatgtcagtctctacccagacttctcttcactcagccgtgccattttagacctggtgcagtttttcaagtggaaaaccgtcacggttgtgtatgatgacagcactggtaagaaaaatcagtatcttttggagctatgctttaaatatagataattttctgaagcccattccaggttcttattgtattcttatgtgctttattttgagttttgaaaattcagctaaggggtagaaagacagaatcaaacaccaatcctaatttcacatatccaaacaaagaatacctatgttgaatacttcttctctgtatttgtaaaataagcatttttttattcctgtgaaagatcagctagtttggtaggttggatgaaagatagatgtagtaaacaatattat

SEQ ID NO: 6409 - DNA, 2382 bp, mus musculus
gtaacaagtgcacagagaggcaagaaaacagcatcatgacatctcaggagaagaagggctcaggagaagaagctgcctggaaaggatggagaagagttttagagaaagtgacgttataaaattatcatgaaggataagtaaaatgctgcaactggagaagagtctacagtgtgcaacatgtgtaaatgtgaagatgactgagggagccagtttgtcaggaaattgcaagcacttcattatgactgagtaacagaaacaaggaagatgaggaatgatcaatggattttataaaaagctagcgtaggagagatcacagagagctttgtactaccaagtccaccttttcttgcccaccctgccctggaatctacatggttatagcaatatcagtgatgtttgtgtgatgtgagcctgctttcaaaccaccatggaatgcctcaaaaattggcatatatccattcacctttttcctggaaactcagaaaaagacatagagggccatctgtcagcctagactattgtggttactacggtctttggtatcaggacattctagactgaaatcctgaccctgtcgtgtagtttttagcaagggatttgaccactaacagtctgagagttgatgcatgtataaggtgaggataatatgtgtcatacttcacaggattgttgttgtgtaaagtgcctcatagaggaaacataacaagaatttaaaactttcaacaatataaatgctatgggccatgtgccatttttcttcactaaactctatgataaagaaattattaatctcacaatttttgaaattgatgcttgtttattataggaaattcaggaactacaataaagtttaataaaaataagataaaataatcaagattttttgctatcaagttaatcattttagatttctttccagtctgtttctctacaaatacacatacacatacacacaaagagcatatcatttagagttctgggaaagaaacagaagaaacacgtagcttgtaatcccactattttaatatgagaaaacttagatgcagtgagttgaagtaatttgcccaaggttacatacatagcacataagtgatagatctgggttttgaaactaggcagtcaactttagaatctactctgttaaatactgttacatgatgttagttgttgttttattttgtgggggttttttttggctctttttaaaaatcattattttaagcaagataatggcaagattagaactatttttggtaatggctttctgactgcagtgtggagaatgtgttggggatatgagatatggagagcaatagggcaacactggaagcaggggaattcctgaattagccaagttgaaaagagatgacagtttcaattaagaagattttgatggaataatgttgacatgaagaattctaagaggacttaggagatacagattgtagaatttagtaagtggttgccgggaaggagtgatgaagacaggaaataagaattactctatgttcctagttggggatactaatcagtggcacatttacctagaaggggaaaacaagaaaaacagcttcaagagagaagacggtgtctgcttcttaacatatgaagtttgaaacatctatgaaatattcacttgctatcattcagtggtattgtatatatcataaattcatcttaaaaataggaacttggtctgggcaggcatataatgcttccattggcattttgctgtgcccttcatttgaacttctttgtagtattaggaaatgaagaaaatcaacaaaaaacaatgaaataaaaatagggtgatagtacaaaagaaatgagttagtaggtgggcagccatggagataaatatagacatgagaagagcttacagacagaatgtacattcttttcattagtgaaggaaaagcagtaatatttttagaaatagtaatatttaccaaattgagcctagactaatttctatgatacgatcacaggaaaaaaaaaagccaaagcttttatcttaagcaaaaacacaaacactttcttaaaacactaactttattcatttggatgaagtatacttatagattgctttagatacatttttgtgtgcttttggagttagcataatataatggaaagtcaattaatagtgaaaactcattttattttatcttgcacgtatatttaaataggataaaataaaattaaagttaatataaaaatgtatattcctggaagacactaatttttgaataagataatttttatattatgaagcatacaatcaaataatttccattttattttagggagtggggtaatttggatctcagatgattatatgttgtacattttaaatacaagcttcaagtgctgtgttctcta

SEQ ID NO: 6410 - DNA, 1354 bp, mus musculus
ataccatggtgttttctatatgctattttctatttctacagtaatcacccatccttgtccacttgctaaatggttacccattctgaacacttctatcgtgctttggagattctcacattattgtacataagtcattgaagaaaaatgatttgcatatctgtctcaccaccaccaccctataatctcacaggtggtgaacatataccatttatattttttaatttcacttctgtattctcaattcaaaatacacaatatgtgctgtcatgtattcctgatacatttacatcttttaatcattcataagataacatgtatgttcaataagcacaactactaaagactttggggttgatgatattatttctgggacaagaagataaaataaaacctgagattctaaagagttacgttctacttggcattcccaccaggacataaaagttctgataattgttagtcatgagcccagcaacataaaacatcataagctctttcatcaatgtcaacgttaaatcatatttgatgtattaagtgccagtataaaaccaataacagcagcatcctgggacatagccagaataagagctgtgaaggatcatttgccgttcataactgcattgacttgagcacaagtggggattaaagaacagcaggctacctaatcagccgctgtctggagagctgaagttgggttatcacaagctgagagggcagtgagagcgacagtaagacaggcgtacatctgaacaggttgtcaggagacaaaagtgcctgtgaagtggccatcagaattgaacaatgaagtgtgttggtcccactgagggtgagtcagtcacaccgccaggatagcagatgatgaagtatggtgaagtaggagaagaaatatacaggagaagaaatatacaggatgcttctggattatgcttgttgtctttgtttaattattaagcaactacctctgtgtcttcttttaaaaagatgcccgtttggtgaaaaataagagtgactgattataaacaaccattaaatcaaaatattaccaaattctgcacacagaccaaagttacaataatcctgttaaagagtttctaaaacattgctgtgatgcatttctgggttgtgtttgtgtaggtgtctgtgtgcccagaatccctttgagggaatcttcgcagtccatgtagttcaggcgaggctgcttcagtcacccactgatgccattcggtaggcatctaacctaactgcaactctctactcccaccaaatcacaccagtctgggacagaggccttcctaggatactgacagaacttttgaggaaaatatctttttatgagtgtgaaattctgattgtc

SEQ ID NO: 6411 - DNA, 879 bp, mus musculus
ttatatgatagtgcaatggtataagtgtcaataaaccatctaatgaatgcattttgtgacatcctgtgcttacgtgtttcttctggaggcttatctgcattatctcatagtctgtgttcagtgaatacaaaatgtctaaacactgtgagtatatgacctaatctatcagaagatattagttaaattaaaattcatattaaatggatcacagaagaaagtattggaatgtgttattcagatcagattttactgtcttctcctttcttgggagcactttaaaaggtgcaaagatgcgtttttaaatctccaaagataattctgggcatggtcttatcccaccaggggtagtgcaaaatactattcaatgcttcccttaagcctacctttacctattaatttatcttggatccctagattttgcgctgtcttttagctttgtctgtataatatggcatgttatctttatgagaggatgaaatagatccattacagtaaaagatgtatgccattaatgagtttctagccagctatcaaggtatcatcaaatgtggtttatcttggtgaatgaaagcttgaatggaaaattaagctcccacactgactggagaagttcagtggatcgttttgttctttaatgttacacttcactgaacacacttcacagagccgtgaatcatgctttaaacaagctgcctttactttaacggcagcagacaatgcagcaaaggtgaataataagtgttagcaatcttaactttcttttgcagtactctctaccacgtgcctgatggacaatttacaaagtacatatgctattttatagattggaacgtgggatccagccagtggcctgaatatgacagaaagtcaaaagggaaa

SEQ ID NO: 6412 - DNA, 1016 bp, mus musculus
gtttccatttctacagtgttgtcatcatcaccatcttcatcatcattatcatcatgttcttaataagtacatctaatagtaggtattaagcaacaagaaacactgtttccatatactggctgtcaggtgccacataaatcctttaatagaaatataattcatgaattgcagaactgcataatttaacacataatacataatgcatggcaatgactctgtagttaatggggaattcacaagtcacatttaatcatcacccattacaagtgctaatatattaatatttttattaatttaatgttattaaacaaatgctaaagttttgcctaattttattaggcaaaattaattgtatgcaatatattttcactaggtttctaaacctgaaaattttttaagcaattgaattagaaacattgttaaataagaattaaaatattagagtcctgtgtatctattgttaattcaatcaacatttaaagagcttatgtgtgtacaagcagtgccgtgagaacttgacctctgctctacacaattcagggagagagatacatagagcactggcaggccagacagaaaaacaggataatgagtggaaaatactgacagaataaaacaaaatcaagttgtgaaaacaaaagaatgtgcctggtcaagtggaaagggcttcctaattaagttaaaacttgagccatgtcctgaggtaggggataaagttgggatgatgtgaaagatgaaagaactcagcagggtaccagaacaaggagaaacaaaggaaaaatattaatggaagtcccaccaataaagggagtgtgaggagaaagagagagagatggaagcagtggggaagggagaagagggctagatcagagaagtcatgatggaaaaaaataatagatttgagtttgacttgtttcctaaaggagaaaatgctattaataattgatattttaaaaatagattatccgggtaattgtgaacctttacagaagagtggcgtagacgtagaattagga

SEQ ID NO: 6413 - DNA, 162 bp, mus musculus
tattaatatatatcttcttatgtgctgttacatgttctataaaatgtttgcttttttttaaccagcacatagcaatgtcaacgtgttcaaatccacaatatagtgttacatataaaaaaacaagaaataaatttcagaaaacaaataagcaaacaaacaaaa

SEQ ID NO: 6414 - DNA, 632 bp, mus musculus
caccaaaaggaaacctggtggaatttgggtggaaagcagtggcccgtgtgccagggctggtagtaggtctgccccactagccagttgcagcctggccctgctctcctgtactatcctgtagggtttggaagctacacagaggcactgagacatgagagaagggggtttctgaaggcagataccttcataatacctttatctcctttgactttgccctagagttttagatttttattttattcttttctaaaaaggagggttttatttagcaatattatctgaaaaattaaacctttataagtaattctctacatctaataaatattcttcagtaataggattctttggggtaaaacatctagataatcatattatgttttccattaacaaaatcacacattttagcaattttatctgtttagcaataatttccaacatcatgtaacaaaaacaaaacagcaaacaaaacacaaagtttcttagctttgtattttttactatattagttttccttagttaaagacattcttaacacctcatgtttatttgtgtataggtatgtgtgtataattatataaaatataagtttttccatatgtttcttatgaggttaaataaactattggcaattt

SEQ ID NO: 6415 - DNA, 121 bp, mus musculus
ctaataacccatcatgttaatccttcctagaattttatgtaatataattttatattataaaaataaagatcataataagcatactacaagccgactttacagataccacataaatataaca

SEQ ID NO: 6416 - DNA, 1004 bp, mus musculus
actttctatttcagtctaagggctttcaatttcacttgtaataagatgggaagtcaccagtgggctttaagcaaaatagagacatagtgtgactatgtcttattagaatcactctggctattattttcttaacccactgagggaggcattgtgcaaggagaaagactgagaggctagcccagtagtccagataatagtgaaaggtggcttagcccaagaaagtaaagaatgatcaagagtggtaaaactgacaggattttctggtgaatctatgtaatgctgagatagagaggaatcaaagatgattccaggggttttggtccagtggctgaaagaatggtgctgccattgtgaaagattattcactagacacattaaaaatggtaagacagattttattcagacttcagaatagcagagacagatttttgtataaactgaattcaattccatggaaacaaaatgaaagagactttttaaatgcagagtgtgctaaaagtagagtccatgagcacattaagagtgggaaggggagagaggttgattaatgtcattaggtcatctacatttgctaacttttaaagttagactcctatccaaccaaggaaactaggagataagggacttatctttcttgctgagtacttttcaaaaggatggctcccaagttcttgagaaggacattgctgagttgtagaagatacttctaaaagggacagagaacagatttacatttgcacatttgcacataaaaaaaaaagtaaagcttccaagaaaagggtagtcagagaactatagtcaggttttggctggaacaaagcataaattcttttgtagcatcaagctttctcaggcagggattttcaggggctgaagttgtcatcctaggaacactgccctgagctgacagaaactatactagcgtttatttaagtctgttagtataggtggtggataaaatcatttgtgctaagagtttgtagttcttatactatgaggctgag

SEQ ID NO: 6417 - DNA, 1490 bp, mus musculus
acaattcaaaatggcggacttactattacttacatttaagaaatttccgcaataagggcactaaatacatactgttagattttactcgaaaacactcaatatttaccaacgtgcaatttttaaaaaaagtttttggagtacaaatcttcacaaagcacccgcatccaatgttccagtcagtagtcagttaatgctcctgcaaacgtatcatttcctctttggtttttccttttcaaaaacaacctaaatccaagtgcgttcttccccgttcttttcaaaatccttaattttaattcatgaatttacatcaccgataccaaagcaaaaacgatccccgacgcctgcccggtacaaagcagttcggcttgcggagcgcgaaagggaggtgcgcacgccctctggcggcgcggccccgtgcgtcccagacgagccggcaccggccgcgaggacccgccgccgggaccccagcctgcgccgcaccctcgcgccctgcgcccccgcgtggcctgcgcccccgccctgccccgccccgccctcccgctccaagccggctttggccgcccggcagcaaccgcagcggcgagcctgggcggccgctgtggcaacgcagtgcccacaccgggcgccgacccagcagcaccgagcggggagagaaaggtgtgaacccggaagtacatcgactgcccgcgtcttagcggcagcaccggggcaataaatcagggccggcgaaggaaagacgcggcgcgccggcttccgaaccgcaacttgctgcgagacctgtcacttccccgcggtgcccagtcctcgcccctccctggcgctcgcgcctcctcttttcttcctgctcctcagcacggagctcccctcgacgttgctcacgtgccagactcgggaccgcgagcggcgtccgcacccgcacgcacacccggccacgctcgcactcgcgcggccgcggggccggctgcttacctccggggcctcatggtcgcgtcgctagcctgggtgtgagagggggagagggtgtgaggacgtgtgtggcgttcagtcccgaaggacggggcggaggaaggggcctggagtctgtcacttcctgagggagcgcggaggtcgagagacctgtgaggcgcgcggcggggccgggagggtcagcacattgtgagccggcaaggggacgcggaacagccgggcggcgcgcggccaccgggcacggaatccgctgtcgccaccactccgccgccgcagcccggcgagtggcggggcgcggggaggagggggctgagccgggtgggggagcgcggggcgcggcggcggcaccaggcggttcgactggagccctgcgtcagccggcggcacgcgcacacctgcccgccgccgctaccggccgcgtcattggctgccggcgccgagcgcgcgagattgaaccttccattcattccagggccgggcgggcgagcgcggccgcggtggagctttaccgcgggcgcccccga

SEQ ID NO: 6418 - DNA, 110 bp, mus musculus
gaaaacatgtttacacaaaacttgtccatgattattcatagggtcattatccatagtagccaaaagttggaaaccatccaaatgtctatcagctgacgaatgggtacaca

SEQ ID NO: 6419 - DNA, 1018 bp, mus musculus
caggtggtaacgtccttatcttggctatttggggggacaaaggagccccacatatgcaggccttacacttctcttttgccttgggtgcctttttggctccactgctagctaaactggctttgggtccgacagcgtctgctgaaaaccacacagagtctgacttccatcctgcactcaaccaatcatctgatgctgactcagaagctctgtttggagtacctaatgataagaatttactgtgggcttatgctgttatcggtacttacatgttcttagtttctgtcatttttttttgtctgtttttaaagaatagctcaaagcaagaaaaagcaagagcatctgctgagacatttcgaagagcaaaatatcacaacgcccttctttgtctcctttttctgttcttctttttttatgttggagctgaggtaacatatggctcttatgttttctcatttgcaaccacccatgctggcatgaaagaaagtgaagctgctgggttgaactccatcttctgggggacatttgcagcctgcaggggcctggcaatcttttttgctacctgtttacagcctggaaccatgattgtgttgagcaacattggcagcctgacttcatctttatttctggtgctttttgacaagaacccaatttgtctctggatagcaacttcagtgtatggggcttcaatggcaaccacatttccgagtggtgtttcttggattgagcagtacacgaccatccatgggaaatctgcagcattttttgtaattggtgcttccctgggagaaatggctattcctgcagtcattggaattcttcaaggaaaataccctgatttgcctgtagttctgtatacctctttgggagcatcaatagctactggtattttatttcctgtgctatataaattagccacttcacctcttgatcgccagcgaaaagaagacagaaagagtgaggaccagaaagctctgctctctagctccgggctaaatgaatatgaggaagagaatgaaga

SEQ ID NO: 6420 - DNA, 129 bp, mus musculus
atccccttttcattgctttccactgaattattgtttacttaaaagagaataaaagcaatgacctggaaaaggtgtccctagagctcttgttaataattattctttcaaaataaatcagaaaaaaaatgt

SEQ ID NO: 6421 - DNA, 193 bp, mus musculus
ttgtaaaatgtcacatgagtttgtcactgggaggctatctgtgggtgagctgagtgatatatgtgcagtgaccaatcactggcagacgttgaaaggagtgacatgattggtccctgatcatgatgtgcttctgctatttacatagcgatttgtggactgggagcaagcagtgaggtttgtaccttacgaaatt

SEQ ID NO: 6422 - DNA, 540 bp, mus musculus
atgtttccctccatgtcctctgctcagtcctgggttctgaaacatgttcggactagatgcttttgctatgtgacctcccctggctgtcaatgaatttagacaggtttggtgatattggtctcactcttagatcatgaaagaagcttacctggaagctctgttctcatatacctgaaataaggccagctgaggagcgtagggctttactagtgctgttattaaattttggggaaaaatgcaagttcccaattcagcctttcttattaaaaataaatccaatccctctttcaagataagattgtttgcctcttattgaaactcaaaatagtaacccaagaaggaagctatatagatagcaatgagtcatggttagaaattgttttgctgcaatgatatctctgtattgctatgtgaagtttttctttgtgcaaaagggatatactaggattgagtgattgatctattcattcattattcaagaaatcactgaattcccaaagcattttcaactattatactaggtttatcagagatttcaaa

SEQ ID NO: 6423 - DNA, 554 bp, mus musculus
ctatatacattgaaaaatcttttaccaacacaaaaatgatcttattggtgtttccttaagtcccttggtcagtgttctcatgcagcttaaaatccaaattgctttaaggacaccacattttcatcctcaaatatctctccatccttgcctgtttttttgacatggtttataacccccactccaagtatactggatccaaatcgttctgacatatgtagacactgaaatcttctccgctgttgataaaactggtctatctctttttttttttctgaagagagttcttgctttttttccttctgatgatagaaataaacattttaaagatttttgctctcctaattagagctatagcacaatatgtcaatataatcattatattatctcatataaagattataatgatcttcatttttactactaaagactaaggcatagagaggttaagcaacctgtccaaggtcaaaggctgggagtgtgtcagagctgatatctgtaataaaagcaatgtaactgttattgctgaaaggcttgtctacattaatttggtgcaa

SEQ ID NO: 6424 - DNA, 270 bp, mus musculus
aagcagagtgattatgaaaaggaatggtcaatgggccttttgccaggtaattagttgaagaacagagcagttcactattggttctaccctgaggatataatcacgcaatagctttcaaactggaaattctgcaactgaatattagtaaagtaggcagtggtgccagaaagaaatgaaagtgctcccaggtagcttgtaattagccccaaagacaaggactgccagctcagaagtcaaagaagtttcataatctggtcatgtgccccttct

SEQ ID NO: 6425 - DNA, 1210 bp, mus musculus
ttatataaaaattaacttgaactttatttatatgtcttaataatcctttaaatttaagtgtaattggacatatgttttctctttgttttgaatatattgcaattactattgacaatgtaaaaaaaatttgtggctttgaatgctgtcaactaatcttatgttagcaggagaattattaataaatataaaaacaaatcaattttaatcacaacttataactttttagaatgttaatagactttgattaaataatcaaactgcttaataatcttttcttttagcttttttaatgtgtagaatttgcaacctgaagggacaggatttttcctaaagggacaaggagtcaattcttaaaatgtgttatgcgtgaagatagctactgtgtttctttcccccttcttccctctccttctctttctcacatgaacacacacacacacaattgcaagtttaccttcgcttttcacaatttttgacagacatatatattcctcattacactgtaaatgataaacttaactatttttgtttcatcttcacttctttttatatggtaatattattaattccataccattgcaaagctctaggataaaacacaaaacaaaacattgttctcatattagatttagtttagctttgatacttcctgccatcttgtctatttgcttacgaacaataatgacaaaaatggagaaacaagcagcaaagcacttgaaaaaattagatgaaatacagtgggtgggaaactatctacacctgacttagttttcctaccatctgattttcatatgaacttcaaagatagcttgaaatgaaagtaattaatggtagcatttttccaggaccacctccatatgcacgttgtgttccaagagcttttgtgggatcagattcctagtcaggtgcatattgaagaaaatagataactgataagggagacctgagcctgcccggtcactttaatccttagcaccctgtgacttttagactgatgttggaagagatacaaggcaatagccagatgcctcatgagactccagaaggagtgcattctgcctcttggcacttgcctttttaaaaatttccttgtatgaaatcctttctctcccttttagaactttcttttctccagtttttagagccctgctctccctaaagttggcctttttgtttctttttcatcctctccaagatgaaaaagagacac

SEQ ID NO: 6426 - DNA, 334 bp, mus musculus
atacaatttcatctgttaatttgataaatatataaacaggcggatcatgtaattcattttcacaaacccaccagagctcccagttcattcagagacaagatcttctaatggttaatgatatcctacatggtcactctgaactcaactttttgacattctcctcctcatccatttttttcctaccacagcaacctctcaattcttacaactcacccaagcaatatttctgttatgagcctttccagcagatcttttcaatgcctgaagcttcttccctcacacctccctatgacatactgccttgcttctttcaactctctgcccaaatctcagt

SEQ ID NO: 6427 - DNA, 544 bp, mus musculus
taaaaaatcagttacattaagtacaaatttatttttacctaatatgtagaaaaagtagatatcctcagagactccattatatatttcatttgaataaaagtagcagaggacaattatttgctattctgaataatttttttaagaacatgtatcttattctgtaagacattttacattttggactgctttgcccctgaaagccaccattaaataaaaaatacaatgattttctaaaaaagaaagaatttcacataattataatgtgtgtattcataggacatcaatattataatgattttgtctggctctatgtagcaatttgaaaatgaagctacaataatcatccctttttccttcatttttagattcaactgaagtgttggacttcattaaccttgttggaaacttaggaatataataaaactgctttgaatgttccctttaacctatgatttagatggaactgaaattcaaagcaaaatggaattgaaactagacaacacatacattggtggaattaagaacgtagtgcaatttcatgcca

SEQ ID NO: 6428 - DNA, 289 bp, mus musculus
tactttagagtcagtgagacttggcttcagaagcctggtgttccttacaatggtcttacagttgtacatattaaggattaaaatagataatgtgtataaatattgatactatagcatttggccaaaagtaagtgctcatataatgacagcagttaaattattatcactattcagtcttccttctccccttcgtgaccatactactttaaagaatagaatactttatacacatagtcttcacagacctttcctttactcctaagacatgtattccccgaacactaacctt

SEQ ID NO: 6429 - DNA, 164 bp, mus musculus
tctcaggtaggcatatggaactaacttatattactgatgaatgaaaattctcaggtttaccacgccaacaaagatagcatctaggtattttaccagagctatgtgggactatattagcttgatccttattctaaagataaccacttgtttgctggaaaattttt

SEQ ID NO: 6430 - DNA, 773 bp, mus musculus
actacgtgttctgtgaagaccattattcttcaaaagacattttatgtatctgttatattgaaataacagcgaggtgttattcagttcatacttgaaaataatttactattcatcttctttgtgattttttcaggtatattattttaaaaagtagactaataaattaattaaacattgcattctcaggttgtctcacaagtgtaagagtccaaaacatccctaaaataaaaatcaatttacacattttaaaaatggtattgttctagctcaccatttaaaatatgctgtgtgtcatggtttatatcttaccagtcgccatttttataatttatcagtgtcaatatgtccattccacaaaagaatcacatgaaagatatatttcttgggccagtgtatatttggccctaatttttttacaatgagaggaagtgcataggttttgcgtgaatatacatgggacaaatgaaacagatctgtgatgaagcaaattgcttgcatgtgtggctttatctttatagacaagtggcttactcagtcaagcatgtaagctgaacttgacttctgctctagaaattatcccaacctctgccatactgcccactatacctctcaactctgctagaacaacttcactctgcacacttcactgtggcagatactgtgctacactgtgttctagacactgcaggtaccaaggacatacccagagggctcacagggcagcaggcacaagtagttacaaaataaaatagaggaaagcataatttataaag

SEQ ID NO: 6431 - DNA, 410 bp, mus musculus
ctaaatgactttctctatgatgtggaatacaaaagcttggtaaattatgtatttccatttcctccctataagtcaacaaactaaatgaaagtatgttatgatattttcagtgagtataaaacacagatcattatttattaagagtatccagtggggaacatttggtaggaagtaagcaaacacttttcagatggaaatgctagatttcctcgtggtaactgagactacctgcattcctctgaggttctttgtgacatcaaagcagtttttgcttaactgcctgattgcttatatttccatccagctcaaaacacagggatttcatctaagttacacgacagacacatagcatcacaagcaaaatttgccttttggacagcaaaacaacaaactgtaggtagttcactcat

SEQ ID NO: 6432 - DNA, 393 bp, mus musculus
actccaagcagaactggatttcacctacaaataaaattgaatgatgggccttagttctctaaggtagctggaaaccatggcaaatgccatcagtgtattcatactttgcctgggaatatgatacaaaaatgatgcttttaagagaaatacgtgcttaactatttgcatcctacctttaacccctagtgatacccctaaattattttcttgaatcacctaagttaactatatcttgttttcttcacagtaatactgtttatcaggggattctccatgcctaggaaaagctctttgatcatccgtgctattttccagtccctaccattaaatggaaacagcttaaacttccaaatagtaataatactaatagcaatttaaaaataatagcactta

SEQ ID NO: 6433 - DNA, 206 bp, mus musculus
tattttttttccatttccattaacatttgcttagtctaaggtattatcaccttacacagagtattccagtgacattgtacctggcttctatgctaaagggacagaagccctttcccagacaatcatggacacttttatctcttcaaaacactgccgtgtaactttcctgcccaaaaatgcagtagcgctcaatgtactaagacaaa

SEQ ID NO: 6434 - DNA, 206 bp, mus musculus; identical to SEQ ID NO: 6433

SEQ ID NO: 6435 - DNA, 337 bp, mus musculus
ctcccagtctcctgaagagagtaatgcaaccaatggtcacgggaaccacttcaccttaacagctgctgagtcggccctacataaccctcaacgtccaggatgctatggatttttaaaacatttcaatcattttcatcagcaaaaggaaaaccaacaaagctaacagtagcaatagtcaagggatcctccatcatcattaagactgtggcttaagttttcttggatcagttattgtataaccttgtcagtcaagcaactataggatgacttacaggatgacaggtgtaggatggttttcaaaagtcgcattgagagctccattttatgcactactaaa

SEQ ID NO: 6436 - DNA, 456 bp, mus musculus
ctgggtttttcctctctttcgtgttcaaagcatttgaaaaaaggtgtatttataccatttaattctttagtcgttgcaactgcctcacattcttcaggtaatacagtgccagaaggaagcaatggtaattggtaatggaaaaatgtacagaaagatagaaactcaaaaatggtacatatgaaacttctgataatactaaaagaatgtaaaccattgtttttctcaatccatcagaaaaaaaaaagcaatttgaatgtgtctaccctatgaatggatcagttagtttgaggctgagggagaaatttgtgaaaaagaatcagggttgacattctgtgggctttatatatgtgaaagaaatgtatttatttccatgaaatcttttgtaaataagtgatggcttcataatggatattggtaagaggtaataaaacgtgataaaacattaaggtaaatttt

SEQ ID NO: 6437 - DNA, 363 bp, mus musculus
tatataagctagatgactgatgaatggaggctttactcctctgatttcaaaggagtgggaagacccgatctggagtattgtttgcattacttggtttcccattttcagatagttattcgcaagctagggtgctcataaaagaggatgagagaccaattatgatttatacattacacctcactgaggataatcgaagccagtgagtatgtgcaacttggagataatatcagtgcgaagagccttagaaagatttcttcaaatatgtgaaaggctaacatggaaaagaatgaatagatttctttctttatagatatctcaaacctctaatcaccaaatggacttagatcaatataataaggaata

SEQ ID NO: 6438 - DNA, 233 bp, mus musculus
gagcattttagttcagagattataaatgcagctttagatcaaatagagagaaaaacaggctaaagccattttttaaaaaatatgtaagcctgataaaaacatgatgaattctaccctagaggagttctgagagctgattgtgccctgggttcaggatgtttttcttcaaataggagaagaaatcataggtcactttgttccttcttccatggactgcccacacatgagagcac

SEQ ID NO: 6439 - DNA, 888 bp, mus musculus
gcatggcctgtagttcatcgtagggatgaaaatattctccagagatttgaactttgcttgtcagatccttctgggcccacttgaaagaggttggttattgcctctgacattggactgataaccctagagcaagaaggaagcctgaaaactttggcctatcagacttggttatgcatgtatgagggttttctctgggacttctcagggaaagaggagttttttcctcttccttggttttagctattatttctttattatattgaaaagtttcagtctatcaatcaattgctattgttctgaacaactgaccactaatatttgtacatgaatgtttgtaccaaattgattattttggccacttgaagacggctgtagtttatcaaagctaaaaaactttgaaatatacctgctttaggccaatgaagccaaagatttctaaccactctctctaggccttcttatacttcaggccatttccaaattctatagccaagatcatggtattcccctggaatcattaaactattttttcttcatgactttctgtatcatatttaaaccattcatccataacttcaagtaattcctaacctctaccttcatctctttccacactttcctattcttcagctcataggctttcacaaattttatttttccatttgatttctttaccattttgattgcaaacagaattatgaaatgtctaagttagatcatttttggtagtcaaactttgatgagcagatgcatttattaacacatctacttctagaaggcaaaagtctctcactcttcattgggtctacttatatttaaatgattttacatgtatgtaggtatggctgcctaggaagaaggaagaagagttttaaagaaggggattca

SEQ ID NO: 6440 - DNA, 2245 bp, mus musculus
attctaacaaaaagtcatgatgctggctttaaagtttactgtagaagtaagttaggttcttcaagataaaaggcaacttcattttacacaagaataagacttgatacagaatgcagctgggataacagaaggctatacacaagatgagaagcatgatgaaaatatgaccctgctcccagtcaatgttgggcaatacaagctgcttaaaagttggaacccataacatccctggcaaaacgtaggataacaacaaaaaacaaaataatggcagccactggggaaaaccaaggcagatcacttggaatatataatatgatttccatctataaaattactccagagcctattttgtttaacatttatgaacattatgaaaagcagaaagcaaaaaaatgtccaaagaaatctaaaacacaaatacaagctttgtattacatctcattttgaggttatttattgatgagatatcatagactttttatcaagactttgatgcaattatttctcattttaggtggggtaatagaggctatggaggaataaatggcaagttcaagattagccccatcattgtgaaagaaagaaatgaattggaatgtaactttcaggcactaaaatgattcaagaaattcaactgtttaagtaggtgaagttatctaattggagatacttagacttctcatcatttatacttgcttattcatgaaatacaaatttaagggataaagctgcctgtacaatttaataaataggctctctcttgccctgacacagcaatcatggaagcacttgttatggaagtgccacatgactgaattagcctggggttctgagctcccacatggaagacagctgccttggaaagttgcctgtaccctcaacagaccttgagagagcaaataaataaactgtcgtgtattaagccactgggatttggtggtgtttgtttccaaatcatactgtaacctatcttgactgatatgccaaccactaaaaaactgttaatatatttatatttaaccatccagtgttattttctatgtatagatatgtatagaaatttgaatcttgctacacatgctgtttttgtaacattttatttaccaaattatgtattatgaatattttttcatcattaaatcttttttcaaacaattatttttaatagtcatacagtattaaagttgtgtcatatttaatctagcccttcactaatactggacaattttgctgaatagtgctatactggcttactaactaacctattccatgtctttgtgcaaatttccaactactttcttaagataagatctacaaaataaaaatgctgcatcaaagttgagttacattttaaaggcttttgatgtacattgcccagttaccctttgaaaaattataccaatttataatttttctgggaatgtataatacatcatcatcaccatactattggccctgaaaattatagtttcttaaaactgaaaacttggtatatagaaactacctcatttattatttgatttgcaggcaaagttactagatatagctggtttcatggagatgttgaattcaggtctttctgtaagagtgaagaattttatgttgtatttgtgactccctaaacttttggcctcattctgaaaatgttattacacagtatttcattgtcattattgtataaaggccctgcaggttcaatttcatattcaggataacttttaacttccaacctttgaatttgttatttgtttacatatatattattaattacccgtcttattaattcataatttgagactttgatttgcataattcaggtttttaaactgaattaaacacttaaataaatattatttgtgtatcaatatatacccattgcttaaaaagttccagtttcaggatcatggatggtggacatggtgaatttggcagtcagtatctattactgacaattagagctcaagatgtaaatcggattgcactgaaaatgcccccattccatccgttgatattgggagagtgcaagtgaggtaggggatgactttttgttttgcctcttgcttctggcaggtaaggacaaatatagagcatcactccaacatctagtccttcacttcaagaacacttgcaggggaggcgtggacggcagcttcctgatttctgaatcacagttccagggatgtgttcttgaaattgacagctttctagtggtattcatctgattgtccactttcctaactatgga

SEQ ID NO: 6441 - DNA, 213 bp, mus musculus
agtgatagtgccaaaagaaaagtaacagcaaaatttgagtgaagttcagagaaagtagaaatcattcttatagtgttaagaagggacaaggagtgtttcatggagttcacatcagctgagttgcgtctaaagagcatgtgaggtttctataactgtaaatagaagctcagtaaacatcaagtgaaagaaatagtgcaataaaaggaacaaacg

SEQ ID NO: 6442 - DNA, 1389 bp, mus musculus
ttacatttccacttgtctaaagaatttttgagacatgtgccaaaatctttagaacattagagctgaaagataccttaggtaaatttctcatcaatctattaaaggatattcaagcccccaatttcagcctctgtatccaaacttcaatactgccctatgttcatatcatcactggagaggtctggcctttccttatggcctctttaatcttaattgcatcatctctgatgttttatttggctttgtttgttactccagttactcccacctgtttcccttcatggtttggtttggccccttctctgccctccactccacattgatttcaagagatcaacaaatgttagagaactgggttcaactactaccaagaaagagcttaaccctgaaacctagcatcctaggcctgcacccaaagggagaagagaagcttattctgagctatgagataatcgtaaggtatcaagtctcagggcctggcaaaggagggataatggaggatataggcaagataataatatgactgggtatgtcgttatccaggctgcaaatagaaggaggctttgagcaaaagccttaaaacagttttattttagaagggcaattttctatcatcaatgccaagagaaggctcagcagggaccctactttgtcctgctttgagcaaatgatactgagctccctaataggagttgcagggtatgaagcaacagactgcaggggcctccattactttgaggccaaccacagggtagagctcttgtgggaacagctacataacatgcatgtccagcagtgccccagggaaccaagccatcgagagctactatcacagcccaagtgctgcctctgcagaaagcagtagcccagatgctattgagaactgcttacaagaactgccacttggaagcaccctgagaacttggctttacttggaaatcacctaggagcatttgaaaaatagctactcctgagaccagaacttttaattcattatatttgtcagaggctcattaagccctatgtatattttaaacaagtactcttggtgattcttatgtctgtattcctggcttaatgttcagctatttccagccttttaaaccctgtaggagaacagggcaccagttatttagggaaagaatattggtcattctaactacttccaactgaagaaagagactaactttttctgtcaacaaatgtgataggttttggtggactgagtctcttggcaggtttgagttgagcaaataaacttcgaactaaaactaggttattgatggtcaaaggggtatctgagagaagaatcacagtaataatattgaggaggacgaactttctagatggcactgctttagagatcctagaattaaaattataatattt

SEQ ID NO: 6443 - DNA, 1008 bp, mus musculus
ttttttttcttcttcagagtaaaaggccaagctatgatagcaactggtggagtgataactggcctggccgccttgaaaaggcaagactctgccagatcacagcagcatgtcaacctcagcccgtctcctgctacccaagagaagaagcccatcaggcgccggccccgggcagatgttgtggttgttcgtggcaaaatccggctttattccccatctggtttttttcttattttaggagtgctcatctccattataggaattgctatggccgttcttggatattggccccaaaaagaacattttattgatgctgaaacaacactgtcaacaaatgaaactcaggtcattcggaatgaaggcggtgtggtggttcgcttctttgagcagcatttgcattctgataagatgaaaatgcttggcccattcaccatggggattggcattttcattttcatttgtgctaatgccattcttcatgaaaaccgtgacaaagagaccaaaatcatacacatgagggatatctattccacagtcattgacattcacacgctaagaatcaaggagcaaaggcaaatgaacggcatgtacactggtttgatgggagaaacagaagtaaaacagaatgggagctcctgtgcctcgagattggcagcaaatacgatcgcctctttctcgggttttcggagcagttttcgaatggacagctccgtggaggaggatgaacttatgttaaatgaaggtaagagttctgggcatcttatgccccctttgctctctgacagctctgtgtctgtctttggcctctatccacctccttccaagacaactgatgataagaccagcggctctaagaaatgtgaaaccaagtcaattgtgtcatcgtccatcagtgcttttacattgcctgtgatcaaacttaataactgtgttattgatgagcccagtatagataacatcactgaagatgctgacaacctcaaaagtaggtcaaggaatttgtcaatggat

SEQ ID NO: 6444 - DNA, 1008 bp, mus musculus; identical to SEQ ID NO: 6443

SEQ ID NO: 6445 - DNA, 1008 bp, mus musculus; identical to SEQ ID NO: 6443

SEQ ID NO: 6446 - DNA, 278 bp, mus musculus
cttggcttgtctttgtgtgactgaacacagctaatcaaagtattatatgcatatatgtagagccaggtaatataaagaccatgtagagaaactactgtatttgcaaattgatcatactactataatcccttgctttggctataatatccatggacgtcaaagtcagagatatgatttgctagagggctcatgagaataatgctcttttgtctattggaattattctaactaaatctaatcagtttttgggggtggttacatgatgtcaagttagatat

SEQ ID NO: 6447 - DNA, 1222 bp, mus musculus
tatgtaaaagtgtgagcccttttgttacttttagaatgatcacagttcttttaattagttagggtctggtgaaggggacacttgtttttgcattttaacacatgactgcacaaaagggaagctaatattatcacttttttttttggtgccagggcaaatatttttttaaaaaaggagctccagtcctgagaaattaatgaatttactggaaccatatatttactcaggaattaagaatgtttcctttttttctggggtaatctgttggtgggatgggaaggcagtttattaaaggaaaaagagttgaaaaattgttgcttccctcctcctaaaatgctgtttgaaatatttatgtctaagattgcacatctgaaaatgtggttggatggttttttcccccacttagaggagaaaaacttcagtagtttttatttcattgtgattttcttcatgcctaaggtgctaacataaaacagagatagatgtgaaagttgctatcttgtccaaggaaattttaacagagtgtgacaacttttcttctcttcagtgacttttcctttatgactgaacatggtgtttatggccggatatgagtgaattctttgttttatgaactaaatctttaagatgtggctccaagatgcttcaaggagctttatccctcactctcctatctgtgaaccatacatatgcttctgccctgaacatgaactttcttacccttggttccaaccccaaaccatagtaatgggtgtcttcactccctctgtttaatctaagtgtaaatcttagtggttctaccggtcagatctgtctgtgtctctccatctctgccattaccacatatgctcaagctgctgctatttctttggatgactgcagtctccaaattgttctcctcacttccattcctgcctctttccgtcttctccaaatagttgccaaggtaaacctgtaaaactgtaaatcagatcatgtcatcctatagcttgaaaggcaacagttaaattctgtggcttttataatcagatataaatccccaccatgccccacaatatcctcaagatctgatccctgcccccacttgtcaactaccactctctcccatggtgctgctctgctgctccacattccaccaggtagatcttctttctgcttagtgaacagtcagctcatcctcacctcagggcctttgcacttgctcctcttctgcttcagacat

SEQ ID NO: 6448 - DNA, 195 bp, mus musculus
cctagaagcacagaacaggggcccctcagaatgtgttctcagactcctgagggaaggatgctacccagctacagctggttcctcgagagtttggaaaaagtccctttatagaggcaaattattattagtagtagtattgtttaacttcttttacctaaagagctggttcattattgtttacagtttgacaataat

SEQ ID NO: 6449 - DNA, 500 bp, mus musculus
taggccatggactttattagggtcccagtcctaaggggtctatagaagcctgtctaaagattatttagaaagattatagaaaactgttcagtccaatgggtgtttatatctgttcagacccttgctcttggcttcagctctcaactgtggctttgtgcccctgttgttaagcgcattgattgtagccacttagagctgttgctgctctgaacagcattgcccaaacagaatattcatttttgcacactatttactgagtgtttaacacaatgttttactttatgtagaattttttttgtcacctaagaaacaaaacgagtttaaatatttcatttaaatatttccaaagtctaggccttcggccttggaagttctttgacgttgagtcctttgtgttttctttcagttacaattcaggtctttgagcaatgaggtcagataatcttgttccttgctcttagttcttctctgcctgccctttcttatctctcccggcccct

SEQ ID NO: 6450 - DNA, 1210 bp, mus musculus
attggtgtttcttaaatatagattacttgctgctgctttttaaattggatataaactttaaagtgaacagcattgtaggaagttgaagaggaagaaaatatattattttgagaaggtattatttaaatctatataaatccaacttaattaaggacattggataattactattaaggtcacaaatttataaaaatttacaaactaacatgaagtttaacagctttattcaagagtaaagttcatgaattgactgaaagagctcctcctaaccaaaaaaaaaaaaacttctgtatttttccatagaactaaggtcttaattccttctatcaatcatgtgttttccccgtttgcattgaaggctccctactctgtcctgcagcagcagtccctcctgttggcagggcttttctctcctcctgggggcttcctgcagtccacttcaaacagggctctggttccctagcgggcctgttaaattattaccctcaggtgttgattcatccttggcattgttgcattttaccattttgtagtcttcaggcatgggggaaggggaagagagttgaagaagatcaaagtagcagtactgaagttggagctttagaggtggggatgagccctcagcccctctgctgttcctccctgcccttcccccgcctgaccccagcctacccccaccaccccctgactttctgccctctcaagcctaatcagaagacagagggggctatgtgcttgaactgtttacttacaagcactttatttttacttttgcatacaagcaacaaacggtttaacactacatgatgttttattgtatagtacaactgtataaacagaagataacagatgaggacttactatttttttgattcggtggtttttgaacatacactctattctctgtaagacactgtgggggaaggttatgatgagcaagagactccttgttcccaggcagtgctgagtgaaatagttaataaatttttatggagcgggacccaattattacttgtgttatagagcacaaatatgaaactccatgagaaaagcacatcaaagggaaacaccagcatggtttttaaatatctgtaatcagtaaagtattgcatgttctttttagaaaatcagaaaatactcaatttattaaactaaaaacacagtcactctacccagagttaaccacactttggcacatttaattttccat

SEQ ID NO: 6451 - DNA, 443 bp, mus musculus
tcctcggtatcccagctgtgtctaaaatggacagatttgagaatgtcagttcttcaacttatttacaaactgatcaggtccaatatttatctgctgcttgctgagaacagcatcaaagtttaaaaaaaaaaaaaagaaagagaaagtttccaaccatcaagcaagtgtgcaacacaaatctaaaccatatatgtgatgagacccacatgtcattgtgagagtgttgcaggactcattaatgacacccacagtagcaagtaagtcttcaagaaacctttggaagagagaaggcctgtatatgaaatgccagaaggaaggggcaaaaggttcagaactaggactctgggtatggagttcagacacctgtgaattgggcattctgaaccacttgtacaatgtgcaaagctgattttttcttaccatagcacagggttgctttctat

SEQ ID NO: 6452 - DNA, 459 bp, mus musculus
ataccttttagttcagcaattacacctttaagaatttatccaataaacatatcacatgtgtgaaatgacatacctgtgaagttatttagtacaatatagtttataataacaaaagaataaaaataacttgaatatttgtctctaagaggttgaataatacaaaagaatatcaacaagtgtgaaagaaaagaactaacaaagaaagaagaaaataagctctttatatattaatatggaaagatcttcaagatatatttaaatataaaacaaaatcaaaatgcagaacagtatatatagggtgtgccaccatttgtgtaaaaaagataaataatatttttgctgcttatacatggaggaagatatagaagagcatttgttgtttatagggaaaggcattagaattgcctcaagggtatagaccttttgctgcctaaattttgaacattattcacgtattat

SEQ ID NO: 6453 - DNA, 1635 bp, mus musculus
aatttctttttcttagaaactttgaatgttaacttccttttttatgtgaaatgactgtaataaaatgtgcagaattgatcgcttagaagattgatgttcttaaaactgatatcttctctgtgactatatggtatgctaacaaaaaaaaaaagaaaagaaatagaaaagcatgcttctctactaatggtacactgacctttatcaggaactatttcccaggataattacagaattttaaaaagatgatttgttatattttctcctcttagttatgatatcttattttctcttactttttcttggaaaagatgcaaataagttgaatgcccatttgctataagaattaagaggtggtttttataaagttcttttgccagtaaggatcagctaggttacactacagtaactaactaccctcatttctcaatggctgaacagagcaaaatgttacttcttcctaaactttcatgtcccgcaagggtcagctgaggaactctcttgcacaaggtcaatcattgattcaggctgacaaaaactctaccatcttgaaattgaggtatacggaatagatgtctttctcagtctgtgtagcagaataagagaggaagggaaagcattgcttccacaattactcgtttggactggtaatgacatgcatcattactacctaaagcccattgaccacaatttgttacaaagacccaactatttcccaaaggactgggaagtagaatccactgaggtaccaagaaggaaaggagaactgaatgtgaattgttccagaattttctatcatagagtttatgttatgtcactgtggaaatataaatcggaaagatagactgtggctagattgtggtagactatcttagcctaagggatttgtactttaaattataggcaattgaaacccatctgtttttaagcctcagaaattgcttttcgtgctattataatactctgaggattgaagcactagcatttggagtggaggtagggttaaagatgagaacaactaatcaaagatatatattcgctataatttcctccaggatgccaatacttacaactctttcctgacattttcctagcctccactgaatttggtgtgaatgttttctttattctcccttgtatgttccttttccaaatttgaccttgctcctcatctcctaccttccccccacagccaaaatttactaatttgtgacattattagaaaaattacatgttcagtagctgctttagtaatgtttatctggctcagatgtacaatatggatacagggtgaaatcaggtaattattttaattatttctctttttaaagataatgagtgtttgaaaggtgtgactgcagtggtattagaaattatctggagagtacaggagaacctagagaataaagattgactgatttcgagcttaagtgactgaagggatgttttgggttatcatttgaaaagatgaattactagtttacatgaaaatacttaaggaaaaatcacagactactacccttagttataatgtatatatatatatatttttttttaatagcattaaatctattgtttatgttactgtcaattgtctttctacaacataggtctactcgattcttgtccctttcctgc

SEQ ID NO: 6454 - DNA, 18020 bp, mus musculus
ttttcatcttttaagtggtggaactggcacttgggcttagatatttaactaaaaccccatgttcttaaacattgtgacataaagtatctacatatctaaatacatgaataaatagaactttttttattccaaattatattagttaacatattttccagtgtttgatgaattaagttcaaattcattcaatagataaattgtaaatttcactattttttttctttttctgtttttaaacttttaggttcaggggtacatgtgcacgtttgttatataggcaaagtcttatcctggggatttgttgtacagattattttgtcacctatgtactaagtgtggtacccaatagttatttttctgaatctctcctttcatcttccaccctcaggtaggtcccagtgtctgttattccccacttcgtgtctacatgttcttatttagctctcactgataagtgagaacatgcagtatttggttttctgttcctgtattagtttgttaaggatcactttttaaaaataagcatggtgataaagtgagtaagagatcattaatttgacatgtatagtctgtggcacccattgggcatccaatgacagtatgtattcagcatatgcctcaataattcaaataagaaatttagagacacaaatttagaaatatctggcatagtgatggtcaaagtgtggcttttttgctcccgtaatttggcaagtgggagggagtggcatgcagcggcttcacttcttcattcctgtagctcagtgagcaggacagagtggtgcccagcagctttgcttcttcactctggttttttggggagtgggagggagtggcacccagtggcttctcttcttctgtagtacagtgaatgggaaggagggttacagctcttttatttccactgcccacagctcagcgagcaggagctctttcactcctgcagtttggtgagttccaggttcttgtcccatgaccaagaggaataagtatgtgggcaatggagagtgagtaaggcagagtagaattttattgggtgacagaaaaactcttagccagaagagaggacccgaaagcaagttgccatctgtgagactgagtccagggtttttatgggctaagaataggagaatgagtgctgattgttccctgggtggtcttggataaagcaccattcaattggttaaaagacatcattcagagggaaccaatcaagagagaatgggtaagatggggatagaagttctcactctacttgtggactctatcaggaactggcagttaaattttcaggctttaaactgtccttggcttgaatgttgtgtttcactgggcacctgtccctgttcacctataagaatttgtctgtctcctgttactattaattccccctctgaagaggtacatctaactgtttaggacagggacaaggacggttataactgctttatgttgagatggggcattgttttgggaaaacggcagtcacatctctctcagaggcctatctgagggtccccagtaaaaagggagccgtcatccaaggctccatttgcatgaccatttggagtttgatggcctctaggccagaagaaacaaactttttaaggcagttaagtatgcatggttcaaatatgactattatataaagaagagtaaactggggaaaatttagtgccagagatagcagaaataagaagtaaaatagactaattctgaaaaaaatgttgtggccagagctgtttcaccctggtgaaagaaattaaattttgtataggggagggcagttacattttagaagagaggtagctgtttaggggagtatataatcccatgggtattcaggactaagtgatccttggcaaagacaccttatggtggggaacagaatgaaggtgagaacagcaattatagacaagactgtaaacaagatatccatgaaaggttaattattgacacttatcttttatgatttttagcttgaggtctccaatttcttcacactggtgcttcaggtgctcttctgggtcaacagaggtaattccaccagtttgccttgcctttacttgagtataatgaatccaagaatctattctagtgaccttcactgctgaaggagtaggaataagtaaagtgtaaggtgtctcccaatccaggcctagagagggagaaaaagaaggaagagcctgtaccagtactaagtcccctgggttgaatatggttggccctggttcacagggttgggcttccaacagttatttcagttcttgtagaaaatgggccaaagcagttgcatgtttaatcaaatctggtttcttcatctagcaagaaatcactggtgagaaaagccatccatacatgatttagaaggaacttaaacccagtttcaaaggagtgtttctaacatgtagcagggcaataggaagaagagtaatcaaagggagatgagtcttttgagggagttttctgatgttccttttcataatatcatttgtctcttctactgttccttttcataatatcatttgcctcttctacctttcctgtgaattgtggtttccaagcacaatggagatggtattctatgcctagtgcctttgataatccctgggtgacagccaccttgaatgaagggccattatcgctctggagttacttagggagtccaaagccaggaattatctcattaattagtacgtttatcacctcaaaggctttttctgtctgacatggaagtgcttctacccagtttgtgaaggtatctacccataccaggaggtactggatgccccttatctttggcatatgggtgaaattcatctgccagtcttcccccgtgtagcctcccattctttgggttccagcaggggagaacctgttgattgaggaaattatttttaaggcaagtctcatgagcattaacgacctgtttgattatttttagcagatttttacctgagaacaacctttggaccaattgatacattttatcctttcctaggtggaaggcttgatgaaggattttaagaactttccattggctggaagttggtggatggtttgccatcctcctattgtacctatcgtgaggggtgaaaggtgtattcccaagaggtggcccattctatttctgcagaatattgaagttttatttttcttatggagccctctcagagcagaggggcatcaagtggatcagaaatctggggcctctcactgctgatttagctgcttcatctgccaatgtatttccctcacctatttcatccatccccttttagtggccttcacaatgtattactgcctcaccctgtggaaggaaaattgaggataatagtcagttaatttcctgaaggcatttaatgggagacccattagctgtgaggaagtctttcactttctagatagtggcatgggcatggaggtctaggaatgcattcttataatcagcataaatgttaactgctttctctgcttaattcaagaaccctcatgagggcaattagctcagctggttaagcacttgtgcccaagcagagaggcacactctcagtaatgtcagtcagggtgagtactgcatatcctgctttgtgaatcccttgttctacaaaagaacttcatttgtaaagagacttcattctgggttccttaagggggtttctttgaggccctctttggccacataggtttacactactatctgttcacagtcattttcaggctccccagcttcctctgggaggaaggtggctctatgtttagggagggacaggtccttacctggactgtagatctctccaatggcagagcttgatatttgaggaggtggttgtccattagccagaaactccccttggaagacagcagtactgccacattatgtggggtataaatggttaagttattccccatggttaacttagtagcctctggaaccagcagagctacctctgcaactcctcagaggcaggaaacccatcctttagccaccaaattaagctccttgcttaggtagcctatgggctgctgggctggactgcagacctgggttagaacttccagagtcattcccttcctttctgatacataaagattgaatgtcttacctatgggaagactaagggctgttgcctcaagcaaggcttgtttcaattggtcaaaggcccttttagcctctggttctccagtcagggattgagtcttagctgcctgagtatcctttattaggtggtataaagaatgagctatctcacagtacccaggtatccatccataatctgcagaatcttgtaatgcccaagaatcccctcagttgtttgagggttttggggaggtgaaaggaagagatgggcttaatactttcttcacctagtaccccgatatgctctgacaagactagacctaggtacttcactgaagtctgacagagctgagccttagattttgagactgcatttgtcagggttatctagagggacagaactaataggatatatatgagtttattaaggagaattgactcacctgatcacatggtgaagtcctatgttaggctttcacctagttggggtgaagttgttaagttgaggagcaaggaagccagtggtggatcagttcgagtcctaaaaccttaaaagtagggaagccaacagtgcagatttcagtctgtggccaagggcccgagagcccttggtgaaccactggtgtaagtccaagagtccaaaagctgaagaacttggagtccgaggttatggggcaggaagcatctagcatgggagaaagatgaaggctggaagactcagcaagtctgctcatccatcttctcctgcctgctttattctagccacacaggcagctagatggtgcccacctggactgagggtgagtctgcttctcccagtccactgattcaaatgttaatctcctttggcaacaccctcacagacacacccaggaacaatactttgcatcctccaatccaatcaagttgacacttaatattaaccattacaagtccaccccttgtcaacttgaacccatacatatctcctgaaatcatccataatcttcaaataaagctaatagtaaggttatatttatgcctaatacaatacgactatccttcgtacaactagaagcacactaatccttaacataaatgctattacatagagttaacaatgcttaaatgctaatatgaattcaacaaatcttttgtcacatgataaaggcaaaagaaaggaaataaaatgaagatattttcttagtacaggtgtatacatatacaaacatgttcttaacaaaagaaggaggaaatagtcatgacaattacagtcatttctgcagttggtcacgtggttatagctggtattgatgactaccttcctctactgtctattctgtattccctttgccttcagcaagcacctcagcaggttgtggtttttaccctgtagagtgacccaaaccttcattcctgaagggtttgggccgtttgtagtccttcctggattgggttgttgttgtttcccattgactttaatcacagggcatggtaatactaagagacaccctaagggatctcctgtattccacacatattctttcttacctccattgtggagtagtagactgatttcatcttgttagtctgggtcaatcacccagccaacactgtaactcccttcttagcctgttgactcagagtaggaggactccaaagtgtccgggtggcaatcttaactatcagtttaatggaatcattgttgtgtctcctggtggcaacattcctccttctggaactaagacttctaggccagcagaatgtaatgtctcaggaacaggaagcaaacatttttctagggggtcactaggagtgatggtgtgtggtgccacttccacttccatcccttgattcctggacccatgaattcttgaattctgactatgggagaaagagtactatgtagtaaatgctgattcagagcatacattggcttctgaagaactttgtcccagctctgcaaagtattgtcacctacttggcatcataattgtgacttcaaaaggccattctaccattctatcaatccaactgcttcaggatgatggggaagatggtaagaccagtgaattaaatgagcatgaatccactgctatacttctttagccacaaagtgagtgccttggtcagaggcaatgctatgttgaataccatgacggtgggtaaggcattctgtgagtccacagatggtagtgttggcagaagcattgtgtgcaggataggcaaacccatacctggagtaagggtctatgctggtgatgacaaactactactctttccatgatggaagagatacagtataatcaacctgtcaccaagtagctggctgatcaccctgagaaatggtgccgtacagagggctcagtgttggtctctgctgctggcaaattggacactcagtggtggctgtagccaggtcagccttggtgagtggaagtccatgttgctgaacccatgcataacctccatccctgccatcacggctactttgttcacaggcccattgagagatgacaggggtggctggggaaagaggctaagaggtgtccacagaacgagtcatcctatccacttgattattagaatcttcctctgctgaggtcacgttttcatgagcactcacatgaggtacacatatcttcacagttttgacaactcagacaggtccatccacatacctcttccccaaatttctttgtcaacagtttttcaatcatgcttcttccaagtcctgaccatccaaccaaaccattggctacagcccatgaatcattatataattgcacatctggccatttctcctttcatgcaaagtgcacaaccaggtgcactgctcaaagttctgcccactgaaaagctttcccttcaccactgtctttcagaaatgtcctagaaaggggctgttgtgctgcagctgtccactttcaggtagtgcctgcatatagagcagaaccacctgtaaaccaggcccttgtgttctcttcctctgtcaattgatcacagggaactccacatgaggctgttggtgcaggttgttgaagagaagacagggtgacaggagtagagaccatgggcattggagccacttcctcatgtaacttatttgtgcctttaggacctgctcgagcactatcacatatataacacttccatttgatgatgggatattgctgtgcatgccctactttatggtagatgggtcaaaaagcacccagttcatgatacgcagttcaggtcatgtggtgacttgtgacccatagtcaaacgttcagtttctactaaagcccagtaataggccaagaactgtctctcaaaaggagagtagttatctgcagaaaatggcaaggccttgctccaaaatcctagaggcctctgctgtgattcacctatgggggcctgccaaaggctccaatcagcatccttatctgtcactgacacctcaagcaccattggatattctgggtcatatggccttagtagcagagcagcttgcactgcagcctggatctgttgcagagccttctcatattctggaccccactcaaaactggcagcctttagggtcactcgataaatgacccagagtgacacacccaaatgaagaaagtgttgcctccaaaatccaaatagccccactaggcattgtgcctcttttttggttgtaggaggggccaaatgcagcaacttatccttcaccttagaagaaatattttaacagatcccacaccactggacctctagaaattttactgatgtaatcttagtcggatttatttcctatccccggcaggcaaatgtctcaccaataagtgtgtttgctgtttctcgcttaatgggtccaatcagcataatgtcattagtgtaatggatcagtttgatatcttgtggaaggaaaaagcaaccaagatctctgtgaacaagattatgacacaaagctggaatgttgatatacccctgatgtaggacagtaaaggtacattgctggccttgctagctgaaggctaattgtttctggtggaccttatggacaggaatggagaaaatggcatttgccaaatcaatggctgcataccaggtaccaggagatgtgttaatttgctcaagcaatgaaaccacatctggtacagcagctgcaattggagtcaccgtttggttaagcttatgataatccactgtcattctccaagatccaactgtcttctgcacaagccaaataggagagttgaatggggatgtcataggagtccttgatggtgggactaatctctgcaatccctccaggaatgcaatattgtttttgatttactatttttctaggtagaggcagctctagcagctctaatggctttaatttggcctttccaccataatagccctcaccttaccagtcagggagctaatgtggggattctgccagctgctaagtatgcctatgccaattatgcattccagcactggagaaatgagtctggggacccactggatccactgtaagtcagacctgagctaaaactgcattaatcacccgaattccataagcccctgctttaactggaggaccacaatgacattttgggtcccctggaatcagtgacagctcagagccagtgtccagtagtccccaaaatatctgattattccccttctcccagtgcagttatcctggtaaaaagccagaggtctccttggggaaggatgggagaaatattaacagcataaattgtctgtggtgtagtggtgtccttcctcaatgggacccggcctcccttcattcaaggggttctgggtctgtaaacaggtacaagtctgaaattggttgtggggctgtgattctctgtttttataattaaaattagtctttttttacttgacctggaagttttctgcttatacaaattaagtaagaatgcagtagacttcctattaatttaacttctagaaataccatgattaattagccagtgccggagctctacatgagtcagactattccgattgctgctttgcctctgctgtccattagggtgactatgcccactttgcctttgacagttgagtgccacctcttggctcctgccacctcaagatccaattattcccatcgcatttaaattttataattgaatgactgtggttcctacggtaagatctggcatacagagaagaccaatgaaagagctcttcaaggatgcaggtactcccctcacaaatttatttggcaaggtattggtgaacggtatgtcttctggatcctccctgctgagacgggtaggtctaaagtgactaagccactctagcatcccaatttcccttagcctttggatcccctcctctacattaaaccaagggagatccagcatttccagcttgcttactgtgggctatcttttgatctatatttcagctaaccaagcaattaaattattagaacttttttttaactccccaagctgcaacattaaatgcagaatacctgcttagtggccccaaaatgaatgaattcagcctgatccaactttatgttccttctatcattattccacaccctaatatccattcttatgcctgttctccagatttatgcttatataaattagaaaattcaagcatttttggggggtgtagcacaactcatggatcacactctgaacctcacttctaggggcctttagtctagtgataggtctagaagcaaacaggggtgttagtggtgggttctgaggagactcaaccttgtctttcctggcaactgcctgaggggaggccatcaatgttgcctcagccagtgcatagttaatctcctcagacaaaggtgaaaaggctgatggcagcataagtgggggaggggatgttgccaccattggaggtgggaaggctgtttcctctggcaaaaaggctcgtcagagtttacaagcttagtgtccccagcttcatcagggtcctcccacatgtccccgtttcaagttgcaggggcacattattttccaatcaatgccctcactttaattgtggacatctggtaagactgagcatgcacttttcattgcaggtcagccactcacatgataaaaacttgtgtctgatttttggcaatttctgccagttgtctacaagagataagactatcactcaaggtaatgttagaagacttgaggcacagtatgtgcttctggagctgggagttagaatctttgagctcattctttcctttcatcactttttccagcaaacttaggagcaaccagccaacttcattgtattccttttggttcaacacatatggtaaaaggtattatacatagattcattaaactccttgcctctcacaagcagtgaatcagaagtatcaaatgcatttattttgcataagtctgtaaacagttcacaccaaggactatcagtgttctccatactattaggagtagagtccttagcatttttgagtctaatcagattaagcagccaactccagaaaccccaaaaccaactgaagaaatccatccttaaaattattttcctctagaacaactctggtaccaaaatctgtattagtaagggttctctagagtgacagaactaataggatatatgggtatatgaaatggaatttattaagaagagttgactcacactatcacaaggtaaagtcccatgataaaccatctgcaagttgaggcacaaggaagccagtggtggatcagcccaagtcccaaaacctcaaaagcaggaaagccgacagtacagccttcagtctgtggccaaaggctcaagagcccctggaaaactactggtgtaagtacaaaagtcaaaaaactgaagaacttggagtatgaagttatagggcagcaagtatgtagcatgggagaaagatgaaggctggaagactcagcaaatcaacccatccatcttctcctggctactttattctagccacaaaggcagctgattagatggtgaccacccagattgagagtgagtttgcttctcccaggctcaaatgttaatctccttcagcaacaccctcagagaacacccagaaacaaaatttgcatctttcaatccaatcaagttgatgttcaatattaaccatcacagagaccttatatcctctgttagccagaaaattaagaatagctctactgccctcctgaataatttattcagttgaggcacaaagaagaatgccatttacatattgtaaaactttaacctgggtgtaaaataactcagatcttttgacaatgcctgcccgaacaggtgggggctgtctcagaattcctgaggtaataccgtccaggttagctgggtggtctggttggagggatcctcaaatgcaaacaaatatttgaagtcagggtgtggcagtatgcagaaaaaggcatccttcaggtccaggattgtgaaccatttagttctctcaggtatttgaattagcatggtatagggattgggaatcaccagatgaattggaaccacagcttcatgaatgaggcacaggtccttgaccagtctctatttcctgttgggtttctttacccccagtatcgtagtattacaagagttattgcaggatttgaggataacttgcatcctcaattatcgatgatggctcctagccctttcctagcttctggttttagggtatattgtctctgattagggaagtaggtgggatccttaaggtggatttggactcgtatggcagttgtggctcagccaattttcctgtgagttgtgcaaacttcgggattaacatcagtctccaccaggaggagaaaaagagtctgtcctggagccataaggatggtggttcccatgtgggctaaaatataccttcctagcagaggagttgggctttcaggtatgaaaaaggatgagtaaacaaatggactccccaactacaaccaaggggtaaatggttggggaaagtattgggttaaaggctttcctgagacaccccttcatagtcttgctaatggaggaagggaagcctggattgcagagaacagaaatggcagctgcagtatccaggagttcctcccttcctcctccagaatcacctggggctcctggatgataatggtggtttgagccatcggagctggggagagtagccctgggacccatcagtcctgctagaccatttaggagactggctctgaatccagtgacctgtgtctccagggacagtccaccctccagtagtcccctccgcagattggacagggttgaggttacttcctcatgctgcctgggcagtccttcttaaagtgccctggcttgccacattttagcagttaacaggtgtatctccaggattctggggttggtaagcctgccaggtagccattagaatctctgcctttttcttatgttttctctctctctcgagcctccttctgatccctattgtaaaaggccaaggtggtcactttcaggaggttctctaaagtactctctggtcccatagcttatttctgcagattcctcctgatgtcagggtccacttgagtaataaacttatcctttaggattagttgtccctcgactgaatcaggagatagagaagtgtgctttactaaggcctctcttagcctttccaggaaggcagtgggattctcatctgatccctggtttatcatgaagagtttggagtaactgagaggcttagttttagtccttcataagtcttccaatatgtacatctgaaagcgtttcctcttcaattctccacgtcatcactggggtcccagttaggatcctctaatggtactgctgtttttccaattggataagtctcttccccttccttggcactatatgaaatacaaagctcatccccaaacttatctgccacttggagggctgcctgcttctcagtggtactcagggtttgattcaaaagtaacataaggtccttccaggagtcttcaaatacttgggttaaattctggaaaacctctctatacctgtcagggttgtctcaaaacttagcaagatcccccttaatttttcttaagtgctgtagagtaaaggggacctggaccttaacggggccatattcacaaggctcttcacatcccttttaggggcatgactgaggctggggctcacctaaaacaaacaggagaagcttgagagagaacctggatagggaggagaggatggaccaggaaaagcagcaccagaaggggctgattcccgctctggaggcgcctctggggtttgcttccctagtctcttgggattgtcctttgcagcctgtcctgagatgaccgctaggagggctggatcaatcctacaatgtcagcaaaggttcagattatcctgcaaggcaaagaaagcctgcacatatgggacctcagattatttgcccttgagtacacagaaaaggtccagctgcaggatagtattaaaattaatagtttcctctggcaactaagtctctccatcctgtaacttataactcggccatgctgttgtgcaaaggaacataaggtattttttgttgttgttgttgtttgtttgttttttattatactttaagttctgggatacatgtgcagaacgtgcaggtttgttacatatgtatacacgtgccatagtggtttgctgcacccatcaacctgtgatctacattagatatttctcctaatgctatccctcccctagctccccatcccccaacaggccctggtgtgtgatgttctcctccctgtgtccatgtgttctcattgttcaactcccttctgagtgagaacatgcggtgtttggttttctgttcctgtgttagtttgctgagaatgacattttccagcttcatccatgtccctgaaaaggacaataactcatccttttttatggctgcatagtattccatggtgtatatgtgccacattttctttatccagtctatcattgatgggcatttggcttggttccaagtctttgctattgtgaatggtgacatagtaaacatacgtgtgcatgtgtctttatagtagaatgatttataatcctttgggtatatacccagtaatgggattgctggatcaaatggtatttctggttctagatccataaggtgttttctttccagaatctgagggtcgaaggagtcccagagattcaggatgtactcaagaggagtgcaggatgaagattgttcattacccatctgaaaagggggaaaatggcatcccttagttcctttctttcttccagctaaaacctggggtatgtgagggagagaaaaacaggtgtccctttctttctttcctcctttccttccccaagtcctggcagccactacaggagccacccatggatgtaagggtgacctccaaccaaggggtgagagggcccacaggtggggctatttgtacttacctacactgcaccctaaccctctgctgtcagtaacatttgggtaccctaggcctcatctatgccatggatgtgagtgagtcatccacccatgaagcaggaaggcccagttagctgggatagtcatgcctatgtatgctgtgccctagccttctgctgtcaactgcctctggttccctcagatctagttttcttctcagagctccaaaccaaagcttggaaaatactttggagtaatgttaaggtaaagctgtggaatgagatccttctcaaacaaaggtaaaagtgggagtcctgggaattggggacctggcctaataagatccctcccaagaggaaaaaaaatagtcccttgcacataaaagctcctagtattcacaggattatgttgactactaacatagtggaaaaaacaacttaaaagcagagaaggaaaggtgacttgaggaaatagcctcttgctctgtactaatgggtttcttcaacaggggaaagaaatctctcttaattgttacatcccgtgtttcaaagaatagataaaaacaacatcattctggattaaactcctgatgactaagccaaatgctcattctacccagtaatgttatctctttggaagtcttggtcagacacctgaatctgctgtcagggattggaggcggtttaggcatcttcaggtaacactaaggtgtggccttggccagataccttcagttgccccaggaccttattctgatcccacatgatggctaggcatctgtgaagggaaactggatttgagcaaggccaacattctctacaccctagggtgaaggggagttgacaaagtcctccccagcaagcctgtcctctgagtcttttagttcagcagctacactatcttctcttaactggctgacaaaggtctggtgtttaatttgttttcagaaaaaatctgaggatgaggagcctcagaatgaaagtaaagagtcacaggtctgctcttactcacccttccaaagattctggatgagcccccagaaatgtgtggcgtttttgctcctgtagttcagtgagctggagagagtggcacccagggattcattcctcccctcctgtagtggctacttctttcctgttgtttgggagtgttactgctgtttttactcctgctgcctgcagctcagtgagcaggagtgttacagctttttcacttctgcagtttggtgagttctgggttctggtcttgtgaccaagaggaataaggtacacagacatcagagagtaagtaaggaagagtagaattttattgagcagcagaaagaacgctctcagccatgagatgggacctgaaagcaagttgccatctgtgaggctaagtccaggggttttatgggcttagaatggggagatgcgtgctgtttggtccatgggtagtcttggaaaaagcaccatttgattgcttaaaaggcataattcagaatgaaccgagagagtgggtaagatggggataggagttctcaccctgggcatggactctatctgataccaggagcttggttttcaggctttaaactgtccttggcttgaaggttgggtttcaccagggactcatccctatctgcctagaaatttgtctgtctcctgttgctatcaaaggtagccaaatgtgacaatcatagaagttcaaaggaaagtgtatgtcaacaatagagtttcattttgagcagagaaaaaggctcactggtttcagggaactgtagaccatttgtggtcttaccaagaggctgaaagggtaggggaagagagccagggttgagtgcaatgaaaaatgcaagttaaggaaacaaatatattcagaaaagaggttttccagaatttaactattaatggaaggaaagagtagggaaagtgagaataaagaatgaggaatatttgattagttttaaagctaaagagaaatgtccgtttcagaaagaggtgagagaaaaatatccaatcacccatctattaaaaaggaggatagctatgtgagggatgtacatcccctgtaatacaaaaggaggaagaatggaagaatacatgggggcccataaacatgggctcagaagatacatcatgtgatttggaagggttcctgtctgagggcttctatgttggtaaagcagaaggtaaatctatttgctgagaaaattgatgagatattttttaacttacagaaccctttccaagcactctagaaattactaaaaaatagaagaggcaagagatattaagagatatgtagagttattaagtcaattaaaagcaataatattgaaaagccagatggttaatgtttaacatataattttaaatttccatatttgcataattttcatagattacaaccacttccctctccatttcattcaagcttcacaacaacaataaacttcaagagctctattatgtaactacttcatttaaatatactaaatgatatcaattacaattaaattaacaatgatcttcccattaagagacaatcatcattaacgtttttctgtatttgttcctatatatgctatcatagatatgtcttccaaaggacccaaactggcccaaactgtacatttagttttgtaatgtaatttttaaaattgaaatattaattttgtacattttctacactaagattataatcagcattgtattatatcagtgtactaatttgggaggaaataatttttacggtattgataattcctatatttttctattttttaggattctcagggaagtttaataggtttcttaatactgtcttgtgcagaagtcttcaagatcttcttcatggccagccctatggtttcattctgtactgcacgcttcattttcacaaccccatctgttctttcccttctccaacttttgaaagccacatttatttgaacgatttggggagcaggtagaaattgttattcttctgaggaaatgtcttgatttttttgttagcctgtttacctcaactggtggagtttagttctgaggttattgaacatagttatgactcttcacttgctttattatagaggagttttgtgattagcaactttcgcctgcacagtgccttccttactgagaataaagaataattctcatttgtaatcatctagctgtttatgcagccactataagatgacagtgtggcgatgttaatgaggaattacaattctatacggcagtgttatgaagaaaagatacttttggatccttagatttatgttacaaataatgccctctttctttggcgactcttattgttagattaactcatcaccaaaaccacatttgagtaggacactaaatgaatattttctttaaaaacttctaaggacttacacaaaattgtaatcttgttatttttaaaatcaaggagttgaaataggaaaaacaggagtggggaataggaggaaaaataaaagaaatgaaagtagacatgacaaattttaactttcagcaaataaaattgaagccaagtttttgtgagacttagcaaacaacctttacccgatgctgtgatccagatatagaaaagaacacaaatact

SEQ ID NO: 6455 - DNA, 335 bp, mus musculus
aataatatatggaaagtattctttgctctgagaatataggagaatatgcaggaaactctgtggccctctgaagtgatcagtgagtgtctaatgaattattgtcatacaaacacatacttctattatcctgtagttcacaaattctaattgtgtcctttcctttctacggtgataaacactactgtgaatgattcactactttaatattctttagctaattttgaactaagatcactattcttgggaatttggggaatttgggaaatttggggttctgatgagtaattctaacattataatacatcttaaactactgtaaaatccatttatactaa

SEQ ID NO: 6456 - DNA, 600 bp, mus musculus
acctcaagtagtctgaccaggggacacatgagagcttttcattgattgcattcccacaagcatatttccgtcacaagtggggcatgtatctcttgtttggtttgtttttagtttcaatagcatataacttgcttatttcgcttctatggatactacctgtgccactaaataggtccccttaaacctcttgcaaaaaagaaggaagtattatttactctacttttctcttttaaccctgaaatgaacatacacattgttaaaaatatttatggcattttattgctactaattatgaaaaaaaaaagaaacagcaggaaacacaaaagagcaaatgtcggtctacatttaaagcaaccataatgaggactctcccagtgttttttcaacttccttaatctatggaccattttcagctaaaaaataattaatgataagtacactttaattctaagtatcaatttttataatatcagctaaaaacataccaacaaaacttatatatgttttgatataattgtataaaataaaatttttatgtaaaataagatataaacttattttacttatagctctgaaatctattaaatttcattttcaaat

SEQ ID NO: 6457 - DNA, 481 bp, mus musculus
tcaaatcattcctaattgggatctcttaaataactccctcctgggtctagagaggaaattgaatcaagcattaaatcaggaagtcatctttatctttaaatatattgttattcataatcaaatatgctgatattgatgttgccaaagattaagaaaaagatcttttttagtactttgtaattaaggaagtactagttggtaaaatcatggttaactgatagtggtaaaaaccaatgaaatattaaatgcatattgattactgtgggcaaatggaattgcttacttgaagtatttaggatacagaactaatgatgaaaatacaaacctatagacaacaggagctgatttaataaccagatgagtaacaatagatctcattactgtgaatgatgttgtagaaatagggatacggaggagacagtattcagggccaaacatataatgagaaaggaagttcagtgttgaaatagtaataataatt

SEQ ID NO: 6458 - DNA, 333 bp, mus musculus
tatattatataattggtttaatgctatttagcattatttttaatatttaaacagaatcaattttaaaattttatttttaaattttagaataaaatttaaatattattttgaatgttgtgaaggtgaatatagcaactttgctctgtagaacagggtaatagaaggaacctcatatagatagattcattagacaggattttcagcatctctcccttggaaattagaaactggacatgagatgcctcaatatcattgacaagattaatacatttttgtataaatctaattgcagccatgggaatagattagagttcctaaaaacttctgcagagt

SEQ ID NO: 6459 - DNA, 336 bp, mus musculus
ttcttgtagaagttcaagctcattgtattttaagatacacttccgggagaatcagtataccacacacgcacacacgcgtgcacacacacacacacacacacagcttggttgcttgagtttgagcccctcgctatgaacttttattgctttactagacacctgaggggaactcagaaatgatatattttatcttatttttcacattattgtatattttcttgtgtcataacttactgtgtgtgatacttacctcacttggtggattgtgcttcactatatttttttagtattcttattacttcctcgactaacaccttctttaatcaactttcttta

SEQ ID NO: 6460 - DNA, 1622 bp, mus musculus
aatcatctgcatgttccaatatttacttgaactagtgaatacacacagtaattaggctactttcatcaatcataattacagttttatacttttaatttttaggattcataaattaaaactaaaacttatcaaatttatgactatcagtaatgtcattgtcccttaagagttaacaaaagagcttctgtacagtaaaagaaactatcatcagagtgaacaggcaacctacagaatgggtgaaaatttttgcaatctacacttctgacaaatgtctaatatccagaatttgcaaggaacttaaacatatttacaagaaaaaacagccccatcgaaaagtgggcaaaggatatgaacagacacttcttaatggaagacatttatgtggccaaaaaacatatgaaaaaagctcaagatcactgatcatcagagaaatgcaaatcaaatccacaacgagagatcatctcaagccagtcagaatggcgattattaaaaagtcagcacttttggaggccgaggtggacagatcacgaggtcaggagattgagaccatcctggctaacacggcgaaaccccatctctactaaaaacacaaaaaaattagccaggcgtggtggcacacgcctgtagtccccgctactcaggaggctgaggcaggagaatcacttgaaccctggaggtagaggttgcagtgagccgagatcgtgccactgtactccagcctggttgacagagcaggactctgtctcaaaaaaaaaaaaaaagtcaggaaacaatggatgctggcaaggctctggagaaataggaacacttttacactgttggtgggaatgtaaattagttcaaccatagtggaagacagtatggcgattcctcaaggatctagaaccagaaaaacatttgacccagcaatccctgagtatatatccaggggaatacaactcattctaccataaagacacatgcacacgtatgtttattgcagcactgtttacaatagcaaagacgtggaaccaacccaaatgtccatcaatgatagactggataaagaaatgtggtgcatatacaccatggaatactatgccaccataaaaaggaatgagatcatgtcctttgcagacacatggatgaagctggaagccatcaccctcagcaaacaaacacaggaacagaaaaccaaacaccgcatattctcggtcataagtgggagctgaacattgagaacacacgtggacacagagagggaaacacacaccagggcctgttgggggatggggagtgggggatgaggggagggaacttagaggatgggtcaataggtgcagcaaaccaccatggcacacatacacctatgtaacaaacctgcacgttctgcacatgtatcccgttttgtttgttttgttttttgtttgttttgtttttttaaagaagaaataaagaaaaaaagagttaacaaatattctgcgaataattttggaagaatcttaaaggtaaaccttgtttaattttctatgccagaatttatctgtcttccctttgttttaacataattcttccaacatttcttttaacaaaatgaaagatgatagaattgttacatacaaatctgcttaaagtgctacatt

SEQ ID NO: 6461 - DNA, 255 bp, mus musculus
tttttttctttcctatctgaacttactttttttctggatgtattattagaaatgagtcattctagtcctccttcagtgtcccttttatgtttccatctttctatctcatgtgtactttaatataactaattctgtcatattgttctcttcttttatgtatctttatgcatatttgtctattctaacacttttctattgctatgtttcctctctagaatttgtatttgtttctcattcaatagtctttttttttta

SEQ ID NO: 6462 - DNA, 375 bp, mus musculus
aagatggggagtaaggggcagagagggaataagaatgaaatcatactaatgccatttaatatgaaaaaatgtatagttagaattctgataaatttgtcacttctgatttcaaaaattagtcttcatagaaaaaatgttagtgatatttgaggaagggtattgcatcatttcaaaaataaataagggaagttattttagatgttgtgccaccatttaaaagtccattcttgcagacagggagcagtggcattctgcatgattcagtgtgcccagaaactgccacataggtagggatgacaggaaggaaggagtttatcaatgaaccagtggttttcaaagtgaagcccctagagaagcaacagcagcagcgtctga

SEQ ID NO: 6463 - DNA, 204 bp, mus musculus
ggaaagaattaactcctggtaatcaaaaatttctgaaaaatgctgctctccgctgttgcacactttatttccttttgttgtccaattaatgaaagattagtagaaaatagtctggaaatgaggccttaggggcaagaaattttcttatcaagacatcacagtaactgtaatcagttaacagtaatttatgcatatcacaaagta

SEQ ID NO: 6464 - DNA, 672 bp, mus musculus
cattgaactagaacattagtccttatacaaataactatattagggaatattactggtttctacagggaaaatagattttctgctagaatagaaatgtgaacacttcctctactttaaagtacaaaaaatattctatttcacctttcacaatgccaaaggcacctctgtatcactcaaaagtatgtgttgattggccaggcatggtggcttacgcctgtaatcccaggactttgggaggttgaggcgggcggatcacgaagtcaggagctcgagaccatcctggctaacatgatgaaacctcatctctactaaaaatacaaaaaattagctgggcgtggtagcacacgcctgtagtcccagctactcaggaggctgaggcaggagaatcacttgaacctgggaggtggaagttgcagtgagccaagattgtgccactgcactccagcctgggtgacagagcaagattctgtttcaaaagaaaaaaagagtatttgttgataaataaaagttaaactttaaaaaatatattgttttcccatcacttttattgtctgattgaggaaaattacctcatatttgtctcattcagttcatctttcaacatgggattctaactatagaagttgtcatgaaaccaaccaaagttatcaacagagccctggctttagaaga

SEQ ID NO: 6465 - DNA, 1192 bp, mus musculus
tgacatcatcgcttggctggactctggaaagcaggaaactgctggagcgtgtttggggcatcagtgatgtcacccgctacaaatgctgggtggggttactggactgagggccatgaaaaaagaaagctgcggccccggcccgtggactcactgccattctgctctttctcacgtttcagttcagctcggtttgttttccgtccccctccctctactgtaaaagtatgtactcagtgtttcgtttcctgctggatctgattcaggtcagtgatgaagttatttgtgaactcagtggggaggtgtttcctcccctttgtaccggccctacttagggatgcacggttggttatacgcttgcttcactcggttaggcatggaggagaattcattcagccctcataggtttaaatcaaatgcatgacccttcacattttccagagatttacggccagttacaatgagacaattaaacattcacccccccgccaagctgcacttggagatgtgtaagcagtaatgtagtcatgcgctccccatgatgtgagagcgtgcagaacgccactccccccagcaggtccgccaggacctccgcagggagcatcttgcctgcaaaatcacacatccctttttccccctctctccactttccctactacttttccactcccacacccacaaataaacaaagaaaccttgagcttattttacaaaagtctttgaaatggccctcgtctctccaatgctcctgggtcctggtttggccccatctgtgcaatctctctgatgagtgtgaaataagccaggtttggctcatgctctgccggtgagcttgccctccccatgagcctgtcctctccatctggcctcactttgtttgtgtccctgtgtcctttgtctcccatcctgggatcctggtggtttcctcctcccctcccagcatgagtccttttccccagggttcttccctatctctacatcagaatttcctgctttctcccaaatatgcatttccctggcccaggcatccactgcttcctctcatcgtgaggtccctgccgcaggctgctgatggtattgtggccgtgccttcctccacaacccagggaaagctacgtgtgtgtctgtcccatagggaaggagtcatccctgtctcctcagtgtggtgtgttcaggaggaaggaaagtaaccagc

SEQ ID NO: 6466 - DNA, 1192 bp, mus musculus; identical to SEQ ID NO: 6465

SEQ ID NO: 6467 - DNA, 1009 bp, mus musculus
tgcaacaagtatttattgagtccataatttgcccagcactgggctttggtactctgggccttgatactctaggttgtgtcagagatgtctaatatatttaaggtgacagagttcacaaatgagactttatgaaaatgaatatccctttttaagtctcgagaaatatgatgtgcacccgcttgaggctttattaaatctccagcgagcatgaacttgtttgtgacccaattgtagaattgttgtatgatgactatcccactggcaggcacttcttgtccaagagaatgtaattggatgttggtgactcaagcaatcctgggaagactcctccatgaccaaattaaagacaacaggggcttggtttgtactcagctctacaccaatcagcatgagacaaagaagagatccatggcaaagtggggagactactgtttattttacaagctagagaaggaaaactgcagttcctgagttgcaaaactgctaagaaatgggagaacacagaactttacaggctgaaccttggtgtcttagttattcctcttggctacagaatgccaaccagtaggagattcatcactgagatattacagggaaatgaagccaggcaagaaaaatatgtattccctttcttctcagcccataaattttgttattaataaatcagactcttatagaacagcttgccacggctgtctctagaaatgtttttattagcagaatttttattaaaataaaatacacagtagttttaagagtgaacattatagttttaggtcataaggggtgtcatggagaacacatgtggatgctacttgccagttacttgatctaggccttgactcttggttttctgttgctcggataagttagcatgatttgacatgcagttaaaggtgtggtaacctgtgattgatttcccattcttgatgctccctgcctggacttctcggaaaatttcaaaacaattcattcttctatgagggctgcctccttggttgcttcggct

SEQ ID NO: 6468 - DNA, 1009 bp, mus musculus; identical to SEQ ID NO: 6467

SEQ ID NO: 6469 - DNA, 1009 bp, mus musculus; identical to SEQ ID NO: 6467

SEQ ID NO: 6470 - DNA, 1009 bp, mus musculus; identical to SEQ ID NO: 6467

SEQ ID NO: 6471 - DNA, 851 bp, mus musculus
ccttctatacctatcagaaccttcatcagagccttctatacccaccaccattgaagagtaggcccctaccatgccgagagtaacaaatgacctcctgaggagtttaaactccatcattagccttcaatacagaaactgtgcactgatgtttcagctcacccttccagcaacccacaagtaaaagtggggatcttatactctcatcagcaggggtcaacaaggtatcatagagtgggactaaacagcttctgtagatctcattatttccatgaacgagtgtcaacaaaggaatccagacacctgttctttcctttaccccaacatccaaagcttcaccactatcatcttccttgaatccacagtgacttataaatattattacaccttttcttccttttaatgttaatcatctctcatcttttacactaattttcacaaaggtcaactatcctctgttctactccttttctccattctttcaaaaattctgaaagctttttcacgatttcatctagatattatggctcatcattatcaaatgttatgtatgctcttctctgattacaatatgctcttcctctgtaattatttcaccttcttgctctaacagaattctgagtgttctgactactccaccttctttgcagccctcttaagtggtaacttttatattctacccaagggcatgtgttgaggaaatgtccttattattcctccttgctgttttcaaaccattctccttccctcctccctaaaatcctctgtctttgaatatcatctcattagattgtatcctcaacatgattatcatctaagagggtccttgtctcattctcactgattccttgatg

SEQ ID NO: 6472 - DNA, 568 bp, mus musculus
acacatagcagcagctcaggaaagatttgtagattgaaaacatgaatgattctattttaacccatcgggcaatgtttgggatagagtgagtcttatgctccagaactcaagttaggccatatgactagaaagctttctgtatctaaaagtatgtttccaataatgaatggatgaaatcaaatttaaaagttgtttttctttttatatggcattatagtcattttgatgtgacactgacatcgttcttgttatgttgtttcccttttataacacaatttgaataattttaggacaactctgtaagatttgcaacaattgaaggcaaagccagaaaatgttatttcaagagtcttatgatttgcaatcctcaccagaactgtgtaattttgttgtctcttgtggtacaggcatgaggtggaacgtgtagtccaccctaggaagaggaagaggagcaaacatttaaacatgcagacacgttaacattgaactggctatttcttttattgatatcaacacactttggctgccccaacattcagcgatactcaggatagtcacagaattaaag

SEQ ID NO: 6473 - DNA, 559 bp, mus musculus
gctatggtacgatatgaaggacacttcacttctgtggtattttcccccaaaatctgtaagcccagtctcatcatgagaaaacaccaagacatgcaaatgaaggacattttacaaaatacctgacaagtactcttcaactgtgtcaaggaaagactgggaaactgtcacagaatggaggaggctaaggagacacggcgagtcattgtaacatggatggtgggttgggtcctggaacagaaaagggacataagtggcaaagctggaaaaatatgaatgaagtctctggttaacagtgtcgtagtactgttcattttgcagttttgataaatgtgccatgttatgtgaaatgttgctgttagggaaaccggatgaaggatgtaaaggaactctcagtctgaagtcatttcaaaattgaaagttaaaaagttcagtgaaggatgaagaacaaatacattttttcttatggttcatgtgaatgggtagaatatcaaaataaccaagtttagtaatgttctacaagtaaaacttgcctatttttcatagtagactccacacaatt

SEQ ID NO: 6474 - DNA, 1436 bp, mus musculus
cttttgataaactagctggcttgattctgtagttcttttgatgagaagtcagccagtgtcacatttcctaatcatggactagctgccacacggtacttacaccatgcctcagatttctggatcagtggcagttttctctaagggaaaagccacagggtagcacagtgggcctagaggagccaactgcagagtgctcagtgggcactttaaacagggtggtgcagacagtggctctgagcacctgtctgtagatcgctgttcaaatgcacgcacgctctgttaaactctcactgtgtacaaataggatatatttatagggtttaattcagcatggctctaccttacatactgtttgaaatgctaaaaagcagataaaggccaggcagggtggctcacacctgtaatcccagccctttgggaggcgaggtgggtggatcacctgaggtcaggagttggggaccagcctggccaacatggcaaaaccccatatctactaaaaatacatagctgggtgtggtggcgctcacctgcagtcccagctactggggaggctgaggcaggagaatcacttgaacgcaggagaatcacttgaacccaggaggtggaggttgcagtgagctgaactcctgctactgcacgcctgggcaacagagcaagactctgtcttaaaaaaaaaaaaattaggaaatgatccttcatatgatactcagattcactagaagattcttttcattgttttttctaccacattttacatggttctatttacagaaacctaatgtgcatacatttcttatacacatctgttgcatgacactttccacactatccatcccataatcatgaatagacctattcagaggcctaggcactgcaagtcctcaatggaggtttttcctgtaccattgccctcttcttgcataaaagggtgggtattttatgaatatcaccagtaaaaagcttcttcagacatttaattatctgtgatggtgccattgaggcactggtgccaagtttagaaggttcaaaagtgagttagtcgaaaagttctgacagtacccttagctaacagacagcagcaggctgccctcaagaacccatctcccttgtgcgagcaggccagctttccccaagcagacacgtctctgtctctggcaatttgcattttgtttacagaaggagactggatgagtccagacgtattgcttatcctgatctggtttaatggcagtgtttttgtaagcagttcctttttctaattttcttccagtgacaggagcatctggtgtccctgagaacagcccaccttgtaccgtgaacatccctattgcaccgatccacagctcggctcaggctatgtcccccacgcagagcatagggctggtgcagtccctactggccaatcagaatgtgcagctagatgtcctgaccaacca

SEQ ID NO: 6475 - DNA, 2567 bp, mus musculus
ctgctagcagctactggagaccctgagatcccggtcatcatgttgcccatttggggaagtcagagattgtgctgtcttcttgatgatctggtttagatttgctttttcatggctttttaaaagaggactcgattggccgggcacggtggctcacgcctgtaatcccagcactttgggagcctgaggcgggcggatcatgaggtcaggagatcgagaccatcctggctaacacagtgaaaccccgtctctactaaaaatacaaaaaattagccgggcgtggtggcgggcgcctgtagtcctagctactcgggaggctgaggcaggagaatggcatgaacccgggaggcggggcttgcagtgagccgagatcgcaccactgcactccagcctgggagacagagcgagactccgtctcaaaaaaaaaaaagaggactcgattaaaagtgcacctgtatagcatctaaagatcagagatgccaaatattaacacctttgttaatttgtaggaaacttaaacctaggttttaagcaattcaactctaggtgctcatataactattaactattgttgttactcataagtgcttagtgagcctgcttcctctgccctaaagttccctatgaccatgggaggtgggaaggtggggcatgggaggtttatctgtgataatacatgtgtgcatgtacagaactacctttttggtgtttttcaaagaataaggaatcaattttgctcgaacctagctcccaaaactcactgtagaagagaaataactgtctcatggagattgcattgcagttttccaaggatgaaagatactaaccacagttaaatctcaactccattatgaagtgaataccttttgccactcctttcagaagaaaatggaagcagtgagaggttgaaatgatttctggattccatagacaaaaaccaatcctgaaacagaatccaagatttctgggtcacattaatgaatagacctggtttattcccagcttctcactctggtgtgtcgtaaagatttgcctgtaatgagctctgagctacttatacttagtcatctcccatgaaaacaagtattacatacagatgggccacccctgcccctcatcaggtgagctcatccgctttatagaatgagatttaagtccttgttattgaattctggaaagagtgaacgttcggctgaccagttttattattcacccaggcttcacaaaggagccagtctgtgtggatttgtttccctacacttcctagaaacagctgctctatgtgctgaagaataagaagccatccattggaagtgctggctcatttcttgaacccatttcagagttcctgtctgagcgatcgcttcaagtaaagaaggcgccccagagtaagtcataggaatttttttttttttttttttgagatggagtttcactcttgtcgcctaggctggagtacaatggcatgatctcagctcactgcaacttctgcctcccaggttgaagcgattctcctgccttagcctcccgagtagctgggattacaggcacgcaccaccatgcccagctaatttttgtatttttagtagagatggggttttactatgttggccaggctggtcttgaacgcctgacctcaggtggttcacccgtcttggcctcccaaagtgctgggattacaggcgtgagccaccgcacccaccaccatgcccggcagtcataggaatttcttaagcttcaaccaccactcaggacagcatgcagacaccttgcaaagcatcttgctctttgtcctctgacctgcccatgcgttcttccaggtcactgttatgaatcccagcatcccatttgccacttagctctggctggctcccaggctctcccctgcacccagtgatggtgcagcatcctcactgcaggcacagctacgggatagctcttgtcccgggaaagagcggggagcttggatgataaaggcaaccagtcacattgccttctcccagttgtgacagccatttcccattgtcttcaaccctgagggtatggacaacctagtgcttcctctctccactcttctccaaaagtagaaaagtgcccagacctgacaccatttcccttctgtcctgggaaccaagggtctctatgtctcctgttggttcatcctccagctcatgtgaatgatctgtggttcctcctttcacatgaatcaactcagtgtctcctgtgtcaccttgaaccactaatcagaatcttgcactttcacccagtaacaggggcatttccttttatttcagtgtctggggtcactgaaacaggggcttgaccagtgttatattttctttctctccccagtaaaaaggcaggcagtccagacaccacagcatgtgcatgccacacgcatgcgcccccccaacccctatgatgagaagacacaccctcgagtgatgaacttctttctgtgctggagcccatggggtcctctgagtcccacttcctgccttcctcaggtacctgcttctgactgcagaaggctcttccgtcccaggattgtggtttctcaccagtttctc

SEQ ID NO: 6476 - DNA, 1382 bp, mus musculus
ccagtctgcaaagataagaattggtaaattggaggaagggaaagtgtgcttcatttagtgatctgttgccgcccgaagtgtggcgttctgcctgcatcagctgcttgtccttgtgcgggatggtggggaggtgacatttaggaaatgtgtccacccaggaacacttggtatttttcagagtaactgtgcatggaaggacacaggcgcgtgcacatgtgagggggtgctctgctggagcgaagggcgtgggcgctagagccacagggagctggagggaagggcgtgggcgctagagccacagggagctggagggaggggcgtgggcgctagagccacagggagctggagggaagggcgtgggcgctagagccacagggagctggagggaagggcgtgggcgctagagccacagggagctgcaggttgtggtgcttacgcccagcccagggcctccaggatctcagggctcccgcagtgagcttcataaatgaaagtagaaagctgttatttgtgtctgggcagccagaaacacttgcttcttctcaaaggctctctgatgccctgagattctcctgccacactctggagtccaaagagctatttattactcagggccccaagtatgttcttaaaaagagggaagatggtccctaggcaaggaaacccacattgcctagaaaactgttggcttatatcagattatacgaaaacaatcaacaacaaaaccctggcctaaaaattatgttatataatgttttaaagcagtttaaagaaacttattccatgggcctaacacaccttcttcagggaggtgtttgaaaagaaacgcatcctctgacctttgttacaagactcctacattctcttggcttttcatgggcaagccctggcaccatcttggaagctgctgccatctgtagcagttgcgctgccgggaacatgaggctcctgtcacacccacagatgtggcctgtgtcctgggtgggttcgtctgagtgctggctctctggagcaggcccagtggaagtgggccttgttttcctcgccgtggtggtgagagggtgggtcctctttccttttgcagggattacgttccttctcctttcctgctcctgtgaggacagctcggaacctgtcttagctgtggcttctctgcagaaagtaacaaccttgtcttggttgtcactgatggcctccaggacacagtaggcaattcagccagggcttaaggcagcgactcttagtggggcacctagaccattgattagagaagacaacctggtatgccggcaaggtgtgagcaaaggctgcaggcaaggtgtgagcaaaggcagtaactggaggcctgatttggtttgcagtgcctgtttgcgcattccctc

SEQ ID NO: 6477 - DNA, 1262 bp, mus musculus
acaccggagagcagagccttctcggtgctaaacacgctggtctagtccagtccctttgctttacgtaaggtcccagctaaagtcacttaggtgcttttgagaaaaatgatcccgattcctgctgtgctgtcctgtgctctgagccttgactgtaagaggggagctctggcgctgagaggacaggaaaggggtggggggatggcgtgggccggagccatcgaggagcggggactgcgtctaaagacactgtccaccccgcggcctggcccttgtcagaacccacgggcctgccctccccatcacagctccatcttcagaaaagggctttggcttgctgtgacattacagaattgtgcacttttagaccttaggtcctgtagggcatttaattcaagcccctcgtgtcacagataagaaaacagaggtcgggaatggttgatggttaagacggcgcgtggattcccagggcctagcctgggtcctttcttggacacctgccaccttcccacatgcaggggcagggtggggagccagcccctcgcccccaggggcgagagagacagatagtggccaccgcagtctgagcacccactgtgcctggacaggtccctggtgggaggggtttgggctctgctccgctgatttgcaaggcctggggtgtcgtccacctcaggggagctgcctgtgctcgcagcgggactgagcagatggtcccggctgggagcccattgttctgcttcctggagggaccttcagggttgaagtcccttctaaaaacctgtggctttcctgcctgtggtggtgctgggaggagaaggtcacagaggccctgttccgactcaagtgctgccttgtgtcctcctagggaatgaaggtcttcttcatggtggtggcagcggtgtacattctgtacctcttgttcttgatagtgcgggcgtgttccgagctacgtcacatgccttatgtgggtaagtgctcctttcagaatcggtgcaggggtggcttgggagtgactcaggtgggggaagaagtggttggagtctcccaagccaggggccttccttgagggcccagggactggtccattcccacaggctggggaccagggcacgtggtccctgggagccacaacaggccttacaggttactctggcatttgggaccatcagagtggcctgggtcctgcgggactgtaccctgcagagcagggcgagtcaccctgagcttgcgggatcctttcctgaatctgtccccaccagagg

SEQ ID NO: 6478 - DNA, 519 bp, mus musculus
ttatttcaaagctttctaagtgcacttgtaaactttcttccattaaaaactataatacagtctgggcgtggtggctcacgcctgtcatcccagcactttgggaggttgaggcgggcggatcacctgaggtcaggagtttgagaccagcctggccaacatagtgaaaccctgtctctactaaaaatacaaaaattagccgggcggtggcaggtgcctgtaatcccagctactcaggaggttgagacaggagaatcccttgaacctgggaggtggagtttgcagtgagctgagatcgcgccactgcactccagcctgggcaatagagcaagcctctgtctcaaaccaacaacaaaaaaacgaaaacaaaaactataatacagtgagaaaagtgaaattttatttgatgatgaaagatctttcagtgatttgagacatccttttgaatattaacaaagtgacatagacatagtgataacaaagttgtatttcaaagggtactaattctagggtagatcctga

SEQ ID NO: 6479 - DNA, 519 bp, mus musculus; identical to SEQ ID NO: 6478

SEQ ID NO: 6480 - DNA, 2145 bp, mus musculus
gtaaaggcttctagggaaataattattccaccttcccaccaggactaacccagcctggagtgaacgcttcgggtatgagagagagccaaccttagaatgggaaagcccgcattctagttcagctgaggtgccttggctgggcaggtgccaccagctgttgcttgcagtgttgatgtgactgccctggtaggctggacagaactggtgtcccttctctgctgctgtggactccactcaggctgtccccagacagactgtcctttaggcgagggtgtgaggtcagcccccctctcctgctggaacttgcacacagcctcttgagagttcacgtcctgcctcccgctccagcccagtgcgcccctctgtaaaatgaagatgataatacctgttctgcgcacagcacaaggttttgtaaacatctaatgagataatgtagtatcttgatttgctatctaagtcatctaaatattttatctaaattgccagcattgactatgatgtgctggactctgtactaatagcttaactaggctatctcattttatcttcataaccaccatctagggtaggtattgcatgcagcctcattttacatgtaaagaaatggaggtttagattaagtcacctgccaaaggttgtatagccaaaagaggactgaactctgaggcagtgattcccagctcttatgagtatagggggtcactggggctcttaaaatgcagattccaaatcagtagctgcggggtggacgtgagatgaggaaccgcagatgcatttttggtgaactcctgggatctggcgaagtctatgctgtgaagttctcagaccacacttcaggagcgaggtgtctagacagtttgaaatgtatttggcaggtgtttgaaattctataacacaagtgtcagctcctgtcagcttcccggggtctacagaagctccctccgaactccctccggggatcactccttctagtgaaacaggtggaggggagggttagcaaccatatgaagccctgtgtgccacacgtggtggcagcattgcttcttacctacttcatcacatttaattctcacaaaaataccgtggtagacattgttactcccatgataaagatcggccgagcctggtggctcatgccggtaatcccagcactttgggaagccgaggtgggcagattgcttgagccaaggagttggagaccagcctgggcaacatgagaaaaccctgtctctacaaaaatacaaatattagccgggtgtggtgtcacatgtctataatcccagctactagggagactgaggtgggaggatcgcttgagcccaggaggtcaaggctgcagtgagccatggttgcaccactgcactccagcctgggtgacagagtgaaaccctgtctcaaataataataaattaaaaattttaaaaattggccgggcaccatggctcatgcctgtaatcccagcactctgggaggctgaagtgggtggatcacctgagttcaggcgttcgagagcagcctagccaacatggtaaaaccccgtctctactaaaaatacacaaattagccaggctcatggcgggtgcctgtaatcccaactactcaggaggccgaggcaggagaatctttgcttgaacctaggaggcagagattgcagtaagccgggatcgtactgttatacgctccagcctgggtgacaagagtgaaactttgtctcaaaaaaaaaaaaaaaaaaagcctgagttttagtgagaggttgaccaacgtgcctaatgtcacatagtgaatgagagatggagccaggagcagacctgggatttgactctgaattctaaactctatgttcccataagaaggacaaatgaggaccgctgaagaaagagggttcaggaaggggcgtgtggaagcatgagtaattatcttacttgcttgagtcacaggaaaccactcagaggctaacactgacttggggttaaccagatgcctggcattgttctcagcgtaatgcccttcagaggtatttagcctttgtaatccttaagacagccctatgaagttggtactgttcctgtccctactaaagacagggacactggggcaaagagatgaccaagagctaggtgaagcctgctccagagaccaaccaca

SEQ ID NO: 6481 - DNA, 3529 bp, mus musculus
gtctcctcttccttccttctccttcaactgcattctcattgacctgagaatttctctactctttcaatttctgaggtctcattcatttttcagtgttcagttctcagatgatgtcccaaaacccatccagtttctcaggccctgactcttctttgccaccccgacagcttatatctacaccccagaagctgattctccacggctggagctgaccagattccagatcacagtcgccacactcccaacctgctaactggctgctcctctctcttccctgttcctatgacaagcatcgatattcttcagtctcccacgggctctactcctaagcagggaggccctcaagggctattcctgcattgttctgtactagagtgtgagcttcatgtgggcaaggctcaggtctgttgtgatcaatgctgtcagcccagggtctagagcagtagtgcccaggatggaacaaacatgcagcgtgaatttttgtacaaatgacatgaacagctccatctattcatgacataccacatacctttgctttgccacatgaattttaaaaatatattaaagtagaaaattatctcaatagatgcagaaaaagccttcgataaaattcaacaccctttcatgctaaaaacgctcaataaaccaggtactgatggaacgtatctcaaaataataagagctatttatgacaaacacgcagccaatatcatactgaatgggcaaaacctggaagcagtccctttgaaaaccagcacaagacaaggatgccctctctcaccactcctattcaacatagtgttggaagttctggccagggcaatcaggcaagataaataaataaagggtattcaaataggaagagaggaagtcaaattatctctgtttgcagatgacacaattgtatatttagaaaaccccattgtctcagcccaaaaactccttaagctgataagcaatttcagcaaagtctcaggatacaaaataaatgtgcaaaaatcataagcattcctatacaccaataatagagagtcaaatcatgagtgaactcccatttacgattgctacaaagagaataaaatacttaggaataaaacttaaagtgatgtgaaggacctcttcaaggaaaactacaaaccattgttcaaggaaataagagaggacacaaacaaatggaaaaaaattccatgctcatggataggaagaatcaatatcgtaaaaatgactatactgcccaaagtaatttatagattcaacgctatttccatcaagctacaattgactttcttcacagaattagaaaaaactacgttaaatttcatatggaaccaaaaaagagcccatatagccaagcaaaaagaacaaagctggcggcatcatgccacctgacttcaaactatactacaaggctacagtaaaaaaacagcttggtactggtaccaaaacagatatatagaccaatggaacagaacagaggcctcagaaataacaccacacatctacaaccatctgatctttgacaaacctgacaaaaacaagcaatgggtaaaggattccctatttaataaatggtgttgggaaaactggctagccatatgcagaaaactgaaactggacctcttccttacaccttatacaaaaattaactcaagatggactaaagatttaaatgtaaggcctaaaaccataaaaaccctagaagaaaacctaggcaataccattcaggacataggcatgggcaaagacttcatgactaaaacaccaaaagcattggcaacaaaagccaaaatagacaaatggaatataattaaactaaagagcttctgcacagtaaaagaaactatcatcagagtgaacaggcaacctacagaatgggagaacatttttgtaatctatccatttgacaaagggctaatatccagaatctacagggaacttaaacaaatttacaagaaaaaaacaaccccatcaaaaagtgggcgaaggatatgaacagacacttttcaaaagaagacatttatgcagccaacaaacattaaaaaaaaagctcatcatcactggtcattagagaaatgcaaatcaaaaccacaatgagataccatctcatgccagttagaatggcgatcattaaaatgtctggaaacaacagatgctggagaggatgtggagaaataggaacacttttacactgttggtgggagtgtaaattagttcaaacattgtggaagacagtgtggcaattcttcaaggatctagaactagaaataccatttgactcagcaatcccattactggttatacacccaaaggattataaattattctaatataaagatacatgcacacgtatgtttattgcagcgctattcacaacagcaaagacttggaaacaacccaaatgcctatcaatgatagactggataaagaaaatatgccacatatacaccatggaatactatgcagccataaaaaagaatgagttcatgtcctttgcagggatatggatgaaggtggaaaccatcattctcagcaaactaacacaggaacagaaaaccaaacaccacatgttctcactcataagtgggagttgaacaatgagaacaatgagggcatggggtggtgaacatcacacactggggcctgtcagcgagtggaggcaaggagaggggtagcgttaggagaaataagcaatgtagatgacgggttgatgggtgcagcaaaccacaatggcacatgtatacctatgtgacaaacctgtacgttctgcatatgtatcccagaacttaagtataattaaaaaaaagaaaaaagaaaataataaccaatatttgtggatcactgttttctgcatttgatacttatctgctttatttcttacaaaaaccttatgatgaggcagagggaacatattgttaaatttccactttagaaatgttaaactgagactcgatgggcaagtaatgagtctaatttcttcacctgaatttggtttcatcttctcttaacttcttacagactttgcttcatctagaatctcctattggctttgtctcatgtgactgtcccctgctttcaactcccactctctcaatggcttactctctcttgcctaacaattggaatattgtactaattaacctcctatttcttttttctttttttctcttttttttttttttttttttttttgagacagggtcttgctttgtcacccaggttggagtacagtggcttgatctcggtgcactgcaacctctgcctcccaggcttaagtgatcctcctgtctcagcctcccgagtagctgggaccacaggctagtgccaccatgccctgattcttgtatttttttgcagagacaggggtctcactatgttgcccaggctggtctcgaactcctgggctcaagcaatccacccatgttgggattacaagcatgagctaccatgcctggccctatttccattcttaacaaaattctattttatacttctaccagaattaccttcaaaaaatacaaatttgatgtca

SEQ ID NO: 6482 - DNA, 825 bp, mus musculus
gaaactcttatgaacacaaacataagctactttagttattgggataatcaagaagctgccatacagaagagttgattaggagagagaaaggattttaaggtccaagaacaagtgaaagggtgagattcatgctattgactagagacagctacataccacaagaaaggtttctcaggtcatttttggaattgccttgccattcctctaagagttatgactccatattcaagagtttctactttaggcccttcagccaggccgatgggaaccttgcccagaagattgtcggggtgttatttgttttcatgcctgtccaggtcacagcatgacacagaaaaccttgccaacttttaattgtgttatgtagctaaataaatagggaagccgttctggaggggctctcaagatttacctgatgccccagctgcttgaccaagtggagccaacagcttgaaaagcgctgcagccacgactggcctgaccttgatcttccttagactggctgttaatccccaacttgtggctgggtctggaaagcagtgtgtgtaatagattgcatgtcatcttgtatgcttctagggcacagacattggcatacagtattttctgaataacttctgaaggacttcagcgaaggtagtagcattcggaggtggaaaagttccttagctttcagattctgcgttgatatatcattagctgaaacaatattgcaaacatcactattgccttaagggagagagaagagtcacttagtttcctgcaatttctgagatgcttcttttaatattgtaaaactcttgctaatatgctctttcaacaatg

SEQ ID NO: 6483 - DNA, 452 bp, mus musculus
agaattgagcttttatttctatatgagctaaagacaattgaagagactcttggagaaaatcttaggaattcttgaattaatttgccttgaagaaaattttgtcccaatttcagagatcctttaaatatgttttaccaagtttgatgcgggcttttaaaatttaattgtattaatttttgtgtttattttaggtaaatgagagatatcttgacattctatccctagagagatacatatttgtgtatctttaaaagttaacacttccttacatagtgacattacactgagcaagatggattaatcctacagataacgtaataaccagtccatattcagatttctgtagtggatcccctgatattctttatagctggattgttcaaaccagaatcttactcaatactgctcattaaatctggttgttacgcctttttaaatctagaaccatctct

SEQ ID NO: 6484 - DNA, 1615 bp, mus musculus
tctcctaagagaaaatcaactctgtaatgtggttccagaccgagacgggaatcacagcgtgtccccttgagctgacagcattgtgagggggagtgtggggagtcaggaagggttcaccattaggctaggaggggtgggttgttctcctgagaatggggctgcaatgtttttggaaataagtgggccccttgggcttgtctccttggttttgtccaggctcagtggagcactgttggctgggaggaaacatggccttcgatgttgcccacttggcagtttccaccattgttgactcacttaggctgatggcagctgcctctgctgggaaggaagcgtttttcccacaacatattaaatgcggcactggaggatggctggctggtccaggggccggatctggctctgttgctcacaatgattctgtttggcaagcgtttttaaaaagccttggtaagttccagatggtgaccacttgcctcatttatcctccatttgaaaaatttcaaaaactattcatttgtttgcataccaaggcagtacagaatcttctacagtggcacttcgatggtaagaattggggtttttttcctgtgattctttcctccgtgttgtggtttatttagcagtgattggcttctttgtctgcttttagaattgggtatatgtttggatcagctgtatgcattaggacccattgtatgcattagtatcagctgaatacattagggtcagtcatatgtattaggaccagctatatgcattatggtcagctatatgcctcaaggtctgctatctgcatcagggtcagctatatgcaccagttatgtgcattgaaaacagttatatgcgttacagtcagctctgtgcatcaaagtcagctgtatgcatcagggtcaggtacatgcatcagggtcagctccatgcatcagggtcagctccatgcatcaaggtcagatatatgcatcagggttggctgtgtgcgtcaaagtcagctatatgcatcaggttcaggtatatgcatcagggttagtatatgcattaaggtcagctatatgcatcaggtcagctatatgcattgggatcagctatatgtatcaggtcggctaaatgcatcaggatgagctatatgcatcaggatcagttatatgtaccagggtcagctatatatgcatcaggtcagctatacgtgtcagggtcaactatatgcataggctcagctatatgcatcagcgtcagctatatgcatcagggtcggctatatgcatcaggtcagctatatgcatcaggtcagctatatgcattagggtcagctatatgcatcagggtcagctatatgcatcgggtcaactatatgcatggggtcagctatatgcatcaggtcagctgtacaccttagggccatttatgcacatgaaggccagtgatctgcatgtccctgctctttaatctggcagctcttccccagccaatgatctatcaatgcctacctgaaaagtgacaccttctgtggggcaatttataatccctgctgctttgctcgatagtttgaaacaaagctacatataggacttatttgcatgaaacacataatgtgggtggcccaactttgggtatt

SEQ ID NO: 6485 - DNA, 718 bp, mus musculus
cagcagctctgagccagcccggtgctaggtgatgggcaactgcagtgcccatgccacaggctgggtcagattttcttgtggggacgcggtcatggggatgttgctagggacagtgaagttggctgtgtttatccaaatctggtaggaatggatccttctaagaaaatatgctttcgacttcatgattttccagcagcactgaaggccctgcacacatggggctgctagctggggcatgggacacatagggtgtcgcggcatccagccccacacagtggtcactccgggtcccgtgggcagcctgacccaacctaagtggttgtaatgtttctgacggccttcacagcaatgttgtattattccatcacatgtatggaacgtgtccagaatgctggggcaagagaaataatattccctgcctaggtatccactctgcttttctcagaagcaaacaaacacatctgaggagagaaaaagcacaaccccatgtttgatccttccccgtgtccagccacttcctacaccatcctcaaatctgacctgcactcgaggactcctgcgtgctttacaagcatcttgttttagttcttttgtttttctgcaccaaccacgtctttaccagtttaccgaatgcccgccacatgtgaggctgtagactgaattcatttcttggtgaatgctattgtgtgcctggccatgagttttgtcctccaaacag

SEQ ID NO: 6486 - DNA, 1064 bp, mus musculus
agtacaagtgaaaccatcagctatggaatgagcaggttgtctcaaatcccctttcaagtttaagtgtggggaccacatctgaccagtgtgtaaaatcaagccccatgcagaaggatcccagcaagcgtcctttatgtatgaaaaggaagaagaaaatttccccatgaaacatattcaaagtagagaacaatctttttgattccattgttattttaattgtatacagacataggagtctttgcataattagacttttccttctttcaggactgtggatgcaaagccctggacccccagacgttataggacattactcctcagctttgcagcccggtgatgtgaagcgaaacaccatttccccttttttatggcggaagaaaacagaacacaactgcaaaggggcttttccctcccctgctcatcctctttccccaaatgaattttggtttgctgtggactctattctgctgaggaactgttcttgttgggcaaatgtagatcttgtctactctgtggcaggaaaaggccttttctttcattttgtaagaaagagcacagagttcctcctgtacctgctccagctgtgcctgcagcccctcacggccgggtgatgccattcccaaactgctcagcccccagcactgtggtggccacagctgtgggtgtcttgctggggctggagtgtgggctgggtctgctgggcaacgcggtggcgctgtggaccttcctgttccgggtcagggtgtggaagccgtacgctgtctacctgctcaacctggccctggctgacctgctgttggctgcgtgcctgcctttcctggccgccttctacctgagcctccaggcttggcatctgggccgtgtgggctgctgggccctgcacttcctgctggacctcagccgcagcgtggggatggccttcctggccgccgtggctttggaccggtacctccgtgtggtccaccctcggcttaaggtcaacctgctgtctcctcaggcggccctgggggtctcgggcctcgtctggctcctgatggtcgccctcacctgcccgggcttgctca

SEQ ID NO: 6487 - DNA, 956 bp, mus musculus
agtacaagtgaaaccatcagctatggaatgagcaggttgtctcaaatcccctttcaagtttaagtgtggggaccacatctgaccagtgtgtaaaatcaagccccatgcagaaggatcccagcaagcgtcctttatgtatgaaaaggaagaagaaaatttccccatgaaacatattcaaagtagagaacaatctttttgattccattgttattttaattgtatacagacataggagtctttgcataattagacttttccttctttcaggactgtggatgcaaagccctggacccccagacgttataggacattactcctcagctttgcagcccggtgatgtgaagcgaaacaccatttccccttttttatggcggaagaaaacagaacacaactgcaaaggggcttttccctcccctgctcatcctctttccccaaatgaattttggtttgctgtggactctattctgctgaggaactgttcttgttgggcaaatgtagatcttgtctactctgtggcaggaaaaggccttttctttcattttgtaagaaagagcacagagttcctcctgtacctgctccagctgtgcctgcagcccctcacggccgggtgatgccattcccaaactgctcagcccccagcactgtggtggccacagctgtgggtgtcttgctggggctggagtgtgggctgggtctgctgggcaacgcggtggcgctgtggaccttcctgttccgggtcagggtgtggaagccgtacgctgtctacctgctcaacctggccctggctgacctgctgttggctgcgtgcctgcctttcctggccgccttctacctgagcctccaggcttggcatctgggccgtgtgggctgctgggccctgcacttcctgctggacctcagccgcagcgtggggatggccttcctggccgccgtggctttggaccggtacctccgtg

SEQ ID NO: 6488 - DNA, 1179 bp, mus musculus
gtatcaacgtccaagtccggtgaatgactggaataaagactccctttaataagggatgctaatttaaattgaaactgtttctgtctttctgtacaggaaaaagtaatttttttcaaaaataaaccaaactggccgggtgcggtgtctcacccctgtaatcccaccactttgggaggatgaaccagacagatcacttaagctcaggagttcaagaccagcctggccaacatggtaaaacctcatctctactaaaaatacaaaaattagccaggcgtgatggcacatgcctgtagtctcagctacgagggaggctgaagctggaggatcacatgaacctgggaggcagaggttgcagtgagctgagatcacgtcattgcactgcagcctgggcgacagagcaagactctgtctcacaaaaaaaatgttggggaaaatattttcatatacttgagaagctcctgtggactttatactcgcaatcgtcatgcgtgagtggcattttagtgccgcgttcctgcactcctggcaggctggctctccatgcagcacagcacacacacaaggtctctgttctctattttttgaaaaaactggaaattttatgtagctttggctacatctcaagaacagctctcttcatttttgtttttctaagtagcaagttagatttctaatcctattctccccaaatgtatgctttcctttaagaacatatgtggaccacgtatgttcttaattaacgacaccgaataaaacccaatgcactttgtcctcacctttcagtcatcactgctcaatttaaagactggtccttacagtctcccacttagaagcaggtcagaagacttcaccatttgagcccctccttcctgggccagaattgaggatccctggctcactgtcccactgggctccagccatcccctggcctctgcaaggggagatctgtgccaggcactcctctctgcttattccctcagacagctaatgaaagatgggtgcagttgccatggcaacccttccccgccaatgcgctgccatgaagatacagaatgtctagtctaaaaatactcttttgctctgttggctgttttcagggtgataaactcagaaaatctcacttcttcagtgccctattcacttaacctgtcttctctgactaaacaagattgctggact

SEQ ID NO: 6489 - DNA, 9500 bp, mus musculus
acccctgtacccctccctccctgcactttggtgtgttggttcattcatttattccacaaacatgagggcaccctgtccaggaacacagattaaaaggacacccgtggcctcatatttcagccagcgaggcagccaatggacatttcccaaatcacacaggccccaggaccaaaaagggcagtgagggagagcgtttggggtggaggctcagccagagacccaggagggcagcgtgggcattcccgtgatcccttctgcagtgcacaacactgcagcatgagctcgatagcgcctgactgggcaagcctgcagctcagctccttgtccagccggacccagtcgctccccgggtgtgctgggagaacacagggtgaggtcatggtgcaccagtgcccttcctgttcctgcacaagttggctttctaagagctactcagtacaaatgagtgtcattttctctttattttcattattttattttattaactgaaaaatattaattgtatatattcattgggtactagtgaagttttgttatgtataatgtataacgatctgatcagagtaattagcatatctattgtctcaaatatttatcatttcctgtggtgaggatgttcaatatcctccttccagctatttgaaactattatatattacactgctgttaagcctggtcactctgcagtggcatagaacactaggactccttcctcctgtgtggatgtgactttgtgtgctttaacaaatgtctccctatgtcccctcctcctaaccttcccagcctctagaaacctctgttgtacgttttacttcaattagatccactgtttttttagctttcacctatgagtaagaacatgcggtgtttaactttctgttcttggcttatttcattttatgtaatgttctccagttccatccatgatggcatgaatgacaggatttcattctgttttgtggctgaatagtgttaaagtgaagtaaatatggccagagaagggctccgtacttttatatttgagtccttctggataggtagacaagattgaaaccccaacttaggagtatgcacctgtaacaatcgctgagtcctggccaatccccgcagctgtacttcaaccactcatacactggcgagtgctcaaactgtgttcaaataaggcaaacagcaacctgtaaccaatccagctgttgctgtacctcactcccgatttctatacgccgctttacttttacgtctgtaaatttgttctgacgacgaggcacccctgcagtctctctgaatctgctgtgactctgggggctgtatgattcgtgaatcattcgttgctcaactaaactcctttaaatttaatttggctgaagtttttttttaacaatagtattccattgctaaaagaaaaaccttagataaattaaatgtaacagagtttaactaagaaggaactcttcacgaatttggcagtcaccaaaccagaacaggttcaaagaccccacactgcgtccgggtgggtgagaattcatggagagaaaaaggaaagtgaggcacggaaaatggaagtgaagtacagaacctcctgtttgttacagcacggggtttgccttttttgaacacagtttcagcagttggctgcctgtggtcggctgattagtagtgtgctaatcactacttggtgattagtacaacagtaagttacagtttgtttaccctcccgttagctgacagctcactgtgtatgaaggaacctttagacccaacttataaggaggcaatgttaggcgaaattcaatttaatatgaactttaaagtagttttttccaattctgtgaagaaagtcattggtagcttgatggggatggcattgaatctataaatcaccttgggcagtatggccattttcacgatattgattcttcctacccatgagcatggaatgttcttccatttgtttgtatcctcttttatttccttgagcagtggtttgtagttctccttgaagaggtccttcacatcccttgtaagttggattcctaggtattttattctctttgaagcaattgtgaatgggagttcactcatgatttggctctctgtttgtctgttgttggtgtataagaatgcttgtgatttttgtacattgattttgtatcctgacactttgctgaagttgcttatcagcttaaggagattttgggctgagacaatggggttttctagatatacaatcatgtcgtctgcaaacagggacaatttgacttcctcttttcctaattgaataccctttatttccttctcctgcctaattgccctggccagaacttccaacactatgttgaataggagtggtgagagagggcatccctgtcttgtgccagttttcaaagggaatgcttccagtttttgcccattcagtatgatattggctgtgggtttgtcatagatagctcttattattttgaaatatgtcccatcaatacctaatttattgagagtttttagcatgaagcgttgttgaattttgtcaaaggctttttctgcatctattgagataatcatgtggtttttgtctttggctctgtttatatgctggattacatttattgatttgcgtatattgaaccagccttgcatcccagggatgaagcccacttgatcattgtggataagctttttgatgtgctgctggattcggtttgccagtattttattgaggatttttgcatcaatgttcatcaaggatattggtctaaaattctcttttttggttgtgtctctgcccggctttggtatcagaatgatgctggcctcataaaatgagttagggaggattccctctttttctattgattggaatagtttcagaaggaatggtaccagttcctccttgtacctctggtagaattcggctgtgaatccatgtggtcctggactctttttggttggtaaactattgattattgccacaatttcagctcctgttattggtctattcagagattcaacttcttcctggtttagtcttgggagagtgtatgtgtcgaggaatttatccatttcttctagattttctagtttatttgcgtagaggtgtttgtagtattctctgatggtagtttgtatttctgtgggatcggtggtgatatcccctttatcattttttattgtgtctatttgattcttctctctttttttctttgttagtcttgctagcggtctatcaattttgttgatcctttcaaaaaaccagctcctggattcattgattttttgaagggttttttgtgtctctatttccttcagttctgctctgattttagttatttcttgccttctgctagcttttgaatgtgtttgctcttgcttttctagttcttttaattgtgatgttagggtgtcaattttggatctttcctgctttctcttgtgggcatatagtgctataaatttccctctacacactgctttgaatgcgtcccagagattctggtatgttgtgtctttgttctcgttggtttcaaagaacatctttatttctgccttcatttcgttatgtacccagtagtcattcaggagcaggttgttcagtttccatgtagttgagcggctttgagtgggattcttaatcctgagttctagtctgattgcactgtggtctgagagatagtttgttataatttctcttcttttacatttgctgaggagagctttacttccaactatgtggtcaattttggaataggtgtggtgtggtgctgaaaaaaaatgtatattctgttgatttggggtggagagttctgtagatgtctattaggtccgcttggtgcagagctgagttcaattcctgggtatccttgttgactttcaagtcaaccctaagccaaaagaacaaagctggaggaatcacactacctgacttcaaactatactacaaggctacagtaaccaaaacagcatggtactggtaccaaaacagagatatagatcaatggaacagaacagagccctcagaaataacgccacatacctacaactatctgatctttgacaaacctgagaaaaacaagcaatggggaaaggattccctatttaataaatggtgctgggaaaactggctagccatatgtaggaagctgaaactggatcccttccttacaccttatacaaaaatcaattcaagatggattaaagatttaaacgttagacctaaaaccataaaaaccctagaagaaaacctaggcattaccattcaggacataggcatgggcaaggacttcatgtccaaaacaccaaaagcaatggcaacaaaagacaaaattgacaaatgggatctaattaaactaaagagcttctgcacagcaaaagaaactaccatcagagtgaacaggcaacctacaaaatgggagaaaattttcgcaacctactcatctgacaaagggctaatatccagaatctacaatgaactcaaacaaatttacaagaaaaaaacaaacaaccctatcaaaaagtgggtgaaggacatgaacagacacttctcaaaagaagacatttatgcagccaaaaaacacatgaaaaaatgctcatcatcactggccatcagagaaatgcaaatcaaaaccactatgagattccatctcacaccagttagaatggcaatcattaaaaagtcaggaaacaacaggtgctggagaggatgcggagaaataggaacacttttacactgttggtgggactgtaaactggttcaaccattgtggaagtcagtgtggcgattcctcagggatctagaactagaaataccatttgacccagccatcccattactgggtatatacccaaatgactataaatcatgctgctataaagacacatgcacacgtatgtttattgcggcattattcacaatagcaaagacttggaaccaacccaaatgtccaacaatgatagactggattaagaaaatgtggcatatatacaccatggaatactatgcagccataaaaaatgatgagttcatgtcctttgtagggacatggatgaagctggaaaccatcattctcagtaaactatcgcaagaacaaaaaaccaaacaccacatattctcactcataggtgggaattgaacattgagatcacatggacacaggaaggggaatatcatactctggggactgtggtggggtggggggaggggggagggatagcattgggagatatacctaatgctagatgacgagttagtgggtgcagcgcaccagcatggcacatgtatacatatgtaactaacctgcacaatgtgcacatgtaccctaaaacttaaagtataattaaaaaaagaaatggaaaaaaaaaaaaagaaattcaatttaatagagtagagaccacatttcctgtatccatctctccctgaatggacccctgggtagattccggaccttgggtattgtgactgtgccatagtaaacacaggtgccgttgcctcttggatgaactgtttcctttccttcctacagatgtccagtgtgggggcagctgaggatcatgggggttctgcttgtaattttatgaggagcctccatgctgctctctacagtggctgtactggtttccattcccaccaacagtgtatgagagtccttttttctccacatcctcgccagccagcctccttcactgaaagaagaaataataatatatgttatgatataatatatctaattaagtattgtcactatgttctatatttatttagcatattacataagatgttattgttgtatactaatttgtattaggtattaataatatactatttagaatataaattaagcatataaatatataattaaatcaattccctgccatgggtcgtgggtggcattgctcatccccatcctccttctcagcgatggggactttgtccccctcagcacagatcaaggaagaaaatctgcagggagaactgtcctcttaccatagggacgagagtccctccgagacaagacagtggttttgctcgttggctcagctgtcctgttccagaacgggggctcggcctcacccgtgcagaactaaaaattgcactgaagagcttgtggtcttgtttgttccaaacaggcagtctctaccccaaccccacaggcaaactccaccactacagctagggtgacggaacatcctcagtcagctttaaaaacagcatttgcttccttcagaattgggaggtggagccatttaactgaaaagaagcatttcctcccctctgtgtgggccttggggggctcctccccacctctgtcccccgccctgggatgatggccaatcaggccacaccatgacccacaccccagccctcaccctggccctcttcacagccacaggacaaagtgctggctctccctcccatgccaggggctgcagacgtgtcccagccaacttcaacaaaccgcacatgctttccacacacaatcaaaccaaccgctggctgtggtcagcatcttcaagtctgagaaaggcaggatacaagacatctgtggtagttccaaaaggactttgagaagaaaaagttcttgagtatgcattgctctctggaggacactccaatgggaaggcagatgcgtagttgaaatggggtccccaacccggcatggcttgcctgggcagccctgggaaggggcaaagcctcatggactgctccagggagggccggccactcctcttgctgctgtggggagacggaactgaggtttgcagacctgccctgtctcggacggcgctcgctgaccaggcacggtggagcctggggggtccaggccaggccctaaaagcctattccaggggaggcagggctcaggccagggcgcgccaaccttctagagcctggatgcagcgttctcaaggctgggaaaaggtgggggtgccagagactggacaacattcagtctgcagtctggcgcggtgtccccacattggtttgtgaaatggcgactgagcttccacaagattcaagagggagctgtgatcagataacagcgtatttcttggtgataggaaagaagcatttttaactttgtttaatccagtatccatggttattccactctggatttcctcctacacacacatgcacacacacacacaccacacacaacacatacacacagataacacacacaacatacacacaacacacagacatgcaacgcaccacacacacaacacaaaatatacacacaatataagcagcatacacacaatgcacacaacatacacagcacatacaacacacacaacccatgaaacacacaacacacatacataccacgtataacacacaatacacattcacatatacacagcagacatacacagcacatacaacacaccacatgcaatacaacacacactcatacacaacataaaacatacaagcagcacaaacaaaacacacaccacatgcaacacacgacacacatacatgatacatacaacacaatacacaatacacacacaacataaacacacagcacatacaacacacaactcgtgcataccacatgcaacacacaacacacacaacatacacacaacacaagcaacacacacaactcatacaacatacacaacacacagcaaacatacatgctagatgcaacacaacacacatgacacacatgcatgccatatgcaacacacaatacactcacacaacacacaacatacagacaacacataccacatgtgacacacaatacacacaacatgcacagacaacacagaaacaacaaacacactcaacaggcacaacatagtcacacacacacacacacacacactgcttgaaacttattgatagcatggaacaatttgaaagcattactgcaaactaggacaactgaattttaataaccatgatggattgatcaattctgtatgttccttattaaagcaacagtgacaagggagatgctgtgtgttcattgttgatgctgctttgttcacagatctttgagaaccaccaccccagcctttacccttaacattccatccgaggcaaaccacactgagcagccgcctgcaggcctgggagcaaggctacaggaagcaggtgtttccatccctcccaggcgaggccgcccaacaccaacactggagaagaaggtgggtgggcaagccaggtagttccttccttccttccttccttccttccttccttccttccttctttcctccttcttttttcccctccctcccctcttccttcttctttttctttcctccttctctccttccttcccttcctccttcctgctctccctctttctttctctgcttgcttccctccctccttcctgccctccctccttcctccttttctactctttccttccctcatttcctccttccttccttccctccctccctccttcctttcttgtaaaaccttcacggaaagtacagcatctgtcaaaatttacttcttttatatcaatcagaaattttcaaacactacagaatttccaccaagtaagttatttatatcattatgtgatcaattttgcacgaacaatacaaatcaaaattgccttagcttgaaaattttgatgagcacgttgtctcaggactttgacatatgtacatttttatcaagagtctttgacgttttttaccttttctctagatcttaatgaaacaacacacttcatcatcagttatgatcgtcttaagaattattctgctttccttcttcgaagttcaaaagaatatttcaaatctgccttttatcttttaaaatgtgaggcaaaatctctacattattatttttactgaataggttttaaaaacttaagttgttctttccgactctctttgtcactaataaccacttatttgagtgacccaagcctctatgcaccgaaacccctccagtgggcctgatgggtcaggtgggtgcatggggaaccatggtaggtgcctggccttcttaaatttctcaggccaaaagaactcttactaattttatgacatcattgtttcacacctcttgtaacatacttgaattcatttaactaaatgaaagttgacattcgtgttttgttcttaatcatgctcactttttaggccaacaggacgggccgcagatatgggtctgcagggactcagccctcaaaagtatgatagagtatttgcaaacatttttaacatgttactaacagaatgcaatagcagggcaaaatcggaagaaagagtaaaggggttcccaggacaagatggatttattctaataaagggagcagagatgggtgcattggtgaagagacgtgggtgtccggtgagactgcacagtgggagggtggacacacaggacagctggcagcaccgggtgcacggtttcctcagaaaaatctactaggttatggtcttgaccactctcctaacctttctcaatgatccatttttagaaaaaacctcatttgatggcggaagatgaaccttcaggg

SEQ ID NO: 6490 - DNA, 9553 bp, mus musculus
acccctgtacccctccctccctgcactttggtgtgttggttcattcatttattccacaaacatgagggcaccctgtccaggaacacagattaaaaggacacccgtggcctcatatttcagccagcgaggcagccaatggacatttcccaaatcacacaggccccaggaccaaaaagggcagtgagggagagcgtttggggtggaggctcagccagagacccaggagggcagcgtgggcattcccgtgatcccttctgcagtgcacaacactgcagcatgagctcgatagcgcctgactgggcaagcctgcagctcagctccttgtccagccggacccagtcgctccccgggtgtgctgggagaacacagggtgaggtcatggtgcaccagtgcccttcctgttcctgcacaagttggctttctaagagctactcagtacaaatgagtgtcattttctctttattttcattattttattttattaactgaaaaatattaattgtatatattcattgggtactagtgaagttttgttatgtataatgtataacgatctgatcagagtaattagcatatctattgtctcaaatatttatcatttcctgtggtgaggatgttcaatatcctccttccagctatttgaaactattatatattacactgctgttaagcctggtcactctgcagtggcatagaacactaggactccttcctcctgtgtggatgtgactttgtgtgctttaacaaatgtctccctatgtcccctcctcctaaccttcccagcctctagaaacctctgttgtacgttttacttcaattagatccactgtttttttagctttcacctatgagtaagaacatgcggtgtttaactttctgttcttggcttatttcattttatgtaatgttctccagttccatccatgatggcatgaatgacaggatttcattctgttttgtggctgaatagtgttaaagtgaagtaaatatggccagagaagggctccgtacttttatatttgagtccttctggataggtagacaagattgaaaccccaacttaggagtatgcacctgtaacaatcgctgagtcctggccaatccccgcagctgtacttcaaccactcatacactggcgagtgctcaaactgtgttcaaataaggcaaacagcaacctgtaaccaatccagctgttgctgtacctcactcccgatttctatacgccgctttacttttacgtctgtaaatttgttctgacgacgaggcacccctgcagtctctctgaatctgctgtgactctgggggctgtatgattcgtgaatcattcgttgctcaactaaactcctttaaatttaatttggctgaagtttttttttaacaatagtattccattgctaaaagaaaaaccttagataaattaaatgtaacagagtttaactaagaaggaactcttcacgaatttggcagtcaccaaaccagaacaggttcaaagaccccacactgcgtccgggtgggtgagaattcatggagagaaaaaggaaagtgaggcacggaaaatggaagtgaagtacagaacctcctgtttgttacagcacggggtttgccttttttgaacacagtttcagcagttggctgcctgtggtcggctgattagtagtgtgctaatcactacttggtgattagtacaacagtaagttacagtttgtttaccctcccgttagctgacagctcactgtgtatgaaggaacctttagacccaacttataaggaggcaatgttaggcgaaattcaatttaatatgaactttaaagtagttttttccaattctgtgaagaaagtcattggtagcttgatggggatggcattgaatctataaatcaccttgggcagtatggccattttcacgatattgattcttcctacccatgagcatggaatgttcttccatttgtttgtatcctcttttatttccttgagcagtggtttgtagttctccttgaagaggtccttcacatcccttgtaagttggattcctaggtattttattctctttgaagcaattgtgaatgggagttcactcatgatttggctctctgtttgtctgttgttggtgtataagaatgcttgtgatttttgtacattgattttgtatcctgacactttgctgaagttgcttatcagcttaaggagattttgggctgagacaatggggttttctagatatacaatcatgtcgtctgcaaacagggacaatttgacttcctcttttcctaattgaataccctttatttccttctcctgcctaattgccctggccagaacttccaacactatgttgaataggagtggtgagagagggcatccctgtcttgtgccagttttcaaagggaatgcttccagtttttgcccattcagtatgatattggctgtgggtttgtcatagatagctcttattattttgaaatatgtcccatcaatacctaatttattgagagtttttagcatgaagcgttgttgaattttgtcaaaggctttttctgcatctattgagataatcatgtggtttttgtctttggctctgtttatatgctggattacatttattgatttgcgtatattgaaccagccttgcatcccagggatgaagcccacttgatcattgtggataagctttttgatgtgctgctggattcggtttgccagtattttattgaggatttttgcatcaatgttcatcaaggatattggtctaaaattctcttttttggttgtgtctctgcccggctttggtatcagaatgatgctggcctcataaaatgagttagggaggattccctctttttctattgattggaatagtttcagaaggaatggtaccagttcctccttgtacctctggtagaattcggctgtgaatccatgtggtcctggactctttttggttggtaaactattgattattgccacaatttcagctcctgttattggtctattcagagattcaacttcttcctggtttagtcttgggagagtgtatgtgtcgaggaatttatccatttcttctagattttctagtttatttgcgtagaggtgtttgtagtattctctgatggtagtttgtatttctgtgggatcggtggtgatatcccctttatcattttttattgtgtctatttgattcttctctctttttttctttgttagtcttgctagcggtctatcaattttgttgatcctttcaaaaaaccagctcctggattcattgattttttgaagggttttttgtgtctctatttccttcagttctgctctgattttagttatttcttgccttctgctagcttttgaatgtgtttgctcttgcttttctagttcttttaattgtgatgttagggtgtcaattttggatctttcctgctttctcttgtgggcatatagtgctataaatttccctctacacactgctttgaatgcgtcccagagattctggtatgttgtgtctttgttctcgttggtttcaaagaacatctttatttctgccttcatttcgttatgtacccagtagtcattcaggagcaggttgttcagtttccatgtagttgagcggctttgagtgggattcttaatcctgagttctagtctgattgcactgtggtctgagagatagtttgttataatttctcttcttttacatttgctgaggagagctttacttccaactatgtggtcaattttggaataggtgtggtgtggtgctgaaaaaaaatgtatattctgttgatttggggtggagagttctgtagatgtctattaggtccgcttggtgcagagctgagttcaattcctgggtatccttgttgactttcaagtcaaccctaagccaaaagaacaaagctggaggaatcacactacctgacttcaaactatactacaaggctacagtaaccaaaacagcatggtactggtaccaaaacagagatatagatcaatggaacagaacagagccctcagaaataacgccacatacctacaactatctgatctttgacaaacctgagaaaaacaagcaatggggaaaggattccctatttaataaatggtgctgggaaaactggctagccatatgtaggaagctgaaactggatcccttccttacaccttatacaaaaatcaattcaagatggattaaagatttaaacgttagacctaaaaccataaaaaccctagaagaaaacctaggcattaccattcaggacataggcatgggcaaggacttcatgtccaaaacaccaaaagcaatggcaacaaaagacaaaattgacaaatgggatctaattaaactaaagagcttctgcacagcaaaagaaactaccatcagagtgaacaggcaacctacaaaatgggagaaaattttcgcaacctactcatctgacaaagggctaatatccagaatctacaatgaactcaaacaaatttacaagaaaaaaacaaacaaccctatcaaaaagtgggtgaaggacatgaacagacacttctcaaaagaagacatttatgcagccaaaaaacacatgaaaaaatgctcatcatcactggccatcagagaaatgcaaatcaaaaccactatgagattccatctcacaccagttagaatggcaatcattaaaaagtcaggaaacaacaggtgctggagaggatgcggagaaataggaacacttttacactgttggtgggactgtaaactggttcaaccattgtggaagtcagtgtggcgattcctcagggatctagaactagaaataccatttgacccagccatcccattactgggtatatacccaaatgactataaatcatgctgctataaagacacatgcacacgtatgtttattgcggcattattcacaatagcaaagacttggaaccaacccaaatgtccaacaatgatagactggattaagaaaatgtggcatatatacaccatggaatactatgcagccataaaaaatgatgagttcatgtcctttgtagggacatggatgaagctggaaaccatcattctcagtaaactatcgcaagaacaaaaaaccaaacaccacatattctcactcataggtgggaattgaacattgagatcacatggacacaggaaggggaatatcatactctggggactgtggtggggtggggggaggggggagggatagcattgggagatatacctaatgctagatgacgagttagtgggtgcagcgcaccagcatggcacatgtatacatatgtaactaacctgcacaatgtgcacatgtaccctaaaacttaaagtataattaaaaaaagaaatggaaaaaaaaaaaaagaaattcaatttaatagagtagagaccacatttcctgtatccatctctccctgaatggacccctgggtagattccggaccttgggtattgtgactgtgccatagtaaacacaggtgccgttgcctcttggatgaactgtttcctttccttcctacagatgtccagtgtgggggcagctgaggatcatgggggttctgcttgtaattttatgaggagcctccatgctgctctctacagtggctgtactggtttccattcccaccaacagtgtatgagagtccttttttctccacatcctcgccagccagcctccttcactgaaagaagaaataataatatatgttatgatataatatatctaattaagtattgtcactatgttctatatttatttagcatattacataagatgttattgttgtatactaatttgtattaggtattaataatatactatttagaatataaattaagcatataaatatataattaaatcaattccctgccatgggtcgtgggtggcattgctcatccccatcctccttctcagcgatggggactttgtccccctcagcacagatcaaggaagaaaatctgcagggagaactgtcctcttaccatagggacgagagtccctccgagacaagacagtggttttgctcgttggctcagctgtcctgttccagaacgggggctcggcctcacccgtgcagaactaaaaattgcactgaagagcttgtggtcttgtttgttccaaacaggcagtctctaccccaaccccacaggcaaactccaccactacagctagggtgacggaacatcctcagtcagctttaaaaacagcatttgcttccttcagaattgggaggtggagccatttaactgaaaagaagcatttcctcccctctgtgtgggccttggggggctcctccccacctctgtcccccgccctgggatgatggccaatcaggccacaccatgacccacaccccagccctcaccctggccctcttcacagccacaggacaaagtgctggctctccctcccatgccaggggctgcagacgtgtcccagccaacttcaacaaaccgcacatgctttccacacacaatcaaaccaaccgctggctgtggtcagcatcttcaagtctgagaaaggcaggatacaagacatctgtggtagttccaaaaggactttgagaagaaaaagttcttgagtatgcattgctctctggaggacactccaatgggaaggcagatgcgtagttgaaatggggtccccaacccggcatggcttgcctgggcagccctgggaaggggcaaagcctcatggactgctccagggagggccggccactcctcttgctgctgtggggagacggaactgaggtttgcagacctgccctgtctcggacggcgctcgctgaccaggcacggtggagcctggggggtccaggccaggccctaaaagcctattccaggggaggcagggctcaggccagggcgcgccaaccttctagagcctggatgcagcgttctcaaggctgggaaaaggtgggggtgccagagactggacaacattcagtctgcagtctggcgcggtgtccccacattggtttgtgaaatggcgactgagcttccacaagattcaagagggagctgtgatcagataacagcgtatttcttggtgataggaaagaagcatttttaactttgtttaatccagtatccatggttattccactctggatttcctcctacacacacatgcacacacacacacaccacacacaacacatacacacagataacacacacaacatacacacaacacacagacatgcaacgcaccacacacacaacacaaaatatacacacaatataagcagcatacacacaatgcacacaacatacacagcacatacaacacacacaacccatgaaacacacaacacacatacataccacgtataacacacaatacacattcacatatacacagcagacatacacagcacatacaacacaccacatgcaatacaacacacactcatacacaacataaaacatacaagcagcacaaacaaaacacacaccacatgcaacacacgacacacatacatgatacatacaacacaatacacaatacacacacaacataaacacacagcacatacaacacacaactcgtgcataccacatgcaacacacaacacacacaacatacacacaacacaagcaacacacacaactcatacaacatacacaacacacagcaaacatacatgctagatgcaacacaacacacatgacacacatgcatgccatatgcaacacacaatacactcacacaacacacaacatacagacaacacataccacatgtgacacacaatacacacaacatgcacagacaacacagaaacaacaaacacactcaacaggcacaacatagtcacacacacacacacacacacactgcttgaaacttattgatagcatggaacaatttgaaagcattactgcaaactaggacaactgaattttaataaccatgatggattgatcaattctgtatgttccttattaaagcaacagtgacaagggagatgctgtgtgttcattgttgatgctgctttgttcacagatctttgagaaccaccaccccagcctttacccttaacattccatccgaggcaaaccacactgagcagccgcctgcaggcctgggagcaaggctacaggaagcaggtgtttccatccctcccaggcgaggccgcccaacaccaacactggagaagaaggtgggtgggcaagccaggtagttccttccttccttccttccttccttccttccttccttccttctttcctccttcttttttcccctccctcccctcttccttcttctttttctttcctccttctctccttccttcccttcctccttcctgctctccctctttctttctctgcttgcttccctccctccttcctgccctccctccttcctccttttctactctttccttccctcatttcctccttccttccttccctccctccctccttcctttcttgtaaaaccttcacggaaagtacagcatctgtcaaaatttacttcttttatatcaatcagaaattttcaaacactacagaatttccaccaagtaagttatttatatcattatgtgatcaattttgcacgaacaatacaaatcaaaattgccttagcttgaaaattttgatgagcacgttgtctcaggactttgacatatgtacatttttatcaagagtctttgacgttttttaccttttctctagatcttaatgaaacaacacacttcatcatcagttatgatcgtcttaagaattattctgctttccttcttcgaagttcaaaagaatatttcaaatctgccttttatcttttaaaatgtgaggcaaaatctctacattattatttttactgaataggttttaaaaacttaagttgttctttccgactctctttgtcactaataaccacttatttgagtgacccaagcctctatgcaccgaaacccctccagtgggcctgatgggtcaggtgggtgcatggggaaccatggtaggtgcctggccttcttaaatttctcaggccaaaagaactcttactaattttatgacatcattgtttcacacctcttgtaacatacttgaattcatttaactaaatgaaagttgacattcgtgttttgttcttaatcatgctcactttttaggccaacaggacgggccgcagatatgggtctgcagggactcagccctcaaaagtatgatagagtatttgcaaacatttttaacatgttactaacagaatgcaatagcagggcaaaatcggaagaaagagtaaaggggttcccaggacaagatggatttattctaataaagggagcagagatgggtgcattggtgaagagacgtgggtgtccggtgagactgcacagtgggagggtggacacacaggacagctggcagcaccgggtgcacggtttcctcagaaaaatctactaggttatggtcttgaccactctcctaacctttctcaatgatccatttttagaaaaaacctcatttgatggcggaagatgaaccttcaggggccctcttgaagccgctggtttttcgcgttgacgagaccaccccggctgtggt

SEQ ID NO: 6491 - DNA, 1021 bp, mus musculus
aaaatcagaagaggagagagagaaggaagtaacaggagcgtggaggaaggaaagaaggaaagcagaggagaattcagtccactgggataatggaaaggcataagtgactgggaagcaggaggctgagaatccattccatgcttctgagcagttttctgtcaaataatccaggatagtattaatgtacttgtaagtctagggagaagactctggattgacctgctgcttctgttacatagtaattgtaactattaaactttgacgtcagtgtgatgatgaggattgttccctttgaaggcccagtgggtcggctgttcccttctcacctctgacctttgcactcttgtctattcccgcccgcagaggcgacaggaagaagggtattacagccgcctggaagccgagaggcgcagacagcacgacgaggcggcgcgcaggttgctggagcccgaggcgcccggtctgtgccgccctccgcttccccgggactacgagcccccgtccccgtcccccgcgcccggcgcccctcctcccccgcctcagcgaaacgcctcctacctcaaaacacaggtcctctcccccgactcgctgttcactgccaagtttgttgcatacaatgaggaggaggaggaggaggactgcagcctagcaggtcaggataagtactccagcacaagaaagtctcatggggaccttcttcctgcccctcttaaaccacggccacccccctgccagccacgcccggcctccgatggcgtctttctctccaactcattccagccaccctcagccaaagccaacagtactgctcacaaaaaaggccagcccctgccccctccaaaaaaatccagctcctaccatcccagccactgcaaaggtagaggtaaaagagtgacaaatcagctctctttgtcttaatgattggaacctcagcatctctctgcacacttgccctgtagtatggtccatggcgatcatacttgccttggaatttggatgtcatgtgatcactggtctcggc

SEQ ID NO: 6492 - DNA, 6229 bp, mus musculus
tccatcctgaactgttgcctaagtcactgaagagatgtccatgccccactttccaagggtcacctgcacctcgggcccttggtcagggcaatcctactctctaacaagtcccctgctgcaggggtcacggttcagccacctaaaggggttggctcattggcatcactcccccagcatgtttccatcttttttcagttgatcagtatgattgtgtttaaaaccgtgtgttattttacagatgttacttatgaggtgctttcagtattagaagaagtgatgatgaaatctgcttttatattaaaaatcatgttaccatattgggaagttgcactggtcaagttcaagtcacacaggtaactaaagggtacatggcagagtggtttgcagtggttggaggccattctttcttgatgcccttcactttcgatgctttttgctgttggagtagaagtgaagagaacctggactgacttgagcagacctgaaaataaaacaccttcatagagtcgcttcaaggaccgcctgtgattatattggaaacattgccttttggtgcaggtgatagaattatttttcaggatccactttttaatattttctggaagtcttagaatgagtgaaacatgttcagaatcatgaaacatagataagccagcttcgtccttacattctgtttctgtttcctgaggagcaaacacatgtatggtcgccaccagaaggtctggtgagctgatctttagttccttaaaggatattaccctaattcattcatttttatgccttgagaacccactgaaatcctgggatgtgcatttttgtttttttctttttgagactgggtctcaccctgtcctccaggctgaagtgcattggagccacctcggctcactgcagccttgaactcctgggctcaagcagtcctcccacctcagcctcctgagtagataggactgtaagtgtgcactactgtgcctggctaatttttgtactttttctagagatgaggtctcagtccattccccaggctggtcttgagctcctgggctcaagtgatcgtcctcctgactcagcctcccgaagtgctggaattataggagtgagccactgcacccagcctcagtattttctagaagcaatgaaatgagttagacagtcctttgatgacattttattctgtagaagctactaaaaatggttcatcaaacattaaaacactggaaaatgtttttaaaatcactagttagtgaaacttttgttctatgtgtaagtggttttgttttgttttgttttgttttttgagacagagtctcactgtgtcaccctggctggagtgcagtggtgtgatctcagctcactgtatcctctgcctcctaggttcaagtgattcttgtgcctcagcctcccaaatatcagggactataggcatgcaccaccacgcctggctgatttttgtatttttagtagagacggggtttcgtcacattggtcaggctggtctcaaagtcttagcctcatgtgatctgcccgcctcagcctcccaaagtgctgggattacaggcttgagccactgcgcccagctggttctgttttgcttctcgtattagcaagtattatcatttctctttgcttttgatatctagactgcagcagttattgtgatgttggtgtcaatattatttttgttttttgcttgttttttacttagagagtcttagtctgtcactcaagctagagtgtagtagcacagtcatagctcactgcagccttgaactcctgggttcaagcaatcctcccgcctcagcctcctgtgtagctaggactacaggcagtgccactgcactctgctaatttctaaattttttgtagagatggggtttcccaggctggtcttgaactcctagcctcaagcgatcctcccaccttggcttcccaaaatgctgggattacaggcatgagccactgcacctggcctaatatttatttttgaaatgtggagttttacctcttttcccttcaatttcataggtttgctgactgcgccatattgttgctgacacaactggagactggacttaggaatgtttttgccacacttaacagatgtccaaaaagactcctgactgctgaggtaagcttgtttttattattgattgtgatcattgttgctgtattaacagttttctgttaccaattaaaagtttttaaaaatgttattctgtttcacattaaaatgattttaatttagctaagaactgtggaaggcctatcatttctataggatttatatttatgttatttatgattgtttttgatatttctgtaatatttctaaacagtctttaaaactcaatgataccgtgaacgtagtaggcactggttctctctctagctgtgttgatggtgtgtcactgtaaccgcgtgagatggctgcggtctagccgggagactgaggtgaccagtggttgaacctgaccttgggaaactaatcaaaaccttctgaacttgagtttctccatcttacaaatggaagacgtaggatttggaggtgacttggtgtggtgccagccctgcagcaggtcatgaaagcctttgtctcagtttcttgagcccctccatgtgtgtacacacacgcgtacacacagctgtctcagagttccacattgacccccggtcgccctgtctgaggcaagcgtctctgagtttccagcctacctcctctggctcctagaatttctcatttctgctcctttttagtagttatgataagatcctgctgcttagtgacagagatctcgaaataatatggctgcagtgactgaaataggatagaagtgcatttctgcctttcccagatgtgagtagctcccactgagatggcagcacccccatcatcagcactcagacccctctgtgtcgtcttccagtgatgagggccaggccttccttatggagactactacttcctggctccagccggctgtgtcagccatcacatctgctttccagccagcaggaagagcaaagattggtgcatgcccctctctaaggacacttcctggaggtagcacaggccttgggccagggcttagtcgcacttgctgccagggaggcatggaagcgttcctggatggccaagtgcccagcttcccacgggacgatctgttgtggagggagggcaggtgcagccgctccacacctcggattctcgtctctttctctagcttggcttttgctttttgcccctctttgtaggcattcctcaatgctctgccgtcaaccccatcctctgtttcctctccctgggagatctcatacaattctctgccttacattttcatctctgggggaacaacaattagaaaatactttgaacccagtgaaaatgaaacccaacacatggaagttttggacccagcaaaagcagtgctgcgagggcagcttacggccccggagccgggctccccagtgttgcttctcactgacccccatctgatctctgcagttagacctgcttatgttcactaaatatcttcatgtgagttttcctcagcacctcacatttatcttctttcagaaaggcgttgtttcccacagatttgtcctctgacgctccctctgtcatctcagcctcaccagctgcagactccagcagcgtctcgtgtttccccaacacctcccgtgtccactcagtggccagcacagccggtggtttccacccagctgaccttgtgctcttcctgtccaaactgagaagccccccgcctggctcctcggcccacccgagctcatctcacgattcttcctccttctcaaatttcattctcacagtcctgctgattcttttttttagttagttttttttttttggtttttttttttgaggcagggtcttgctttgtcacccaggctgaagtgcggtggtgcagtcatagctcactgcagcctcaatccccgggctcaagcgatcctcccacctccgccccccgagtaactgggaccatagatgtgtgctactacacctggctcatttttacattttttttttccttgtagagacagagtcttgccatgttgaccaggctgatcttgaactcctgggcataagtcatccttctgcctcagccttccaaagttttgggattgcaggtgtgagccaccatacgtggccccactgattattttctaagctgatattcttacgttatttatggttttttttcatttgtttaacctcctcgatgatgtcctgctgcctgccagatggagttcatcctcttcacgtggcagcaaggcctcgggttctaaccctgccctcctctttggtgtgttccctgtttggatacctcagtgaaatttaggcttcttgtcagctccagaacttgcttgtctttcctcttactttgttcctcacccccagattttccgctccaggtcaggggctgtggccacaaaagcgaccttccagaggctcatctactcaaaggtggaggctgcttttctctgtgttctgtttctgtctcatcttggaggcagtcctgctttgccttactcgtgtgcatttctgcagaggtctctgcgggttctctgaggcaggcctacacgttgctgtcgcctgctgcccatgcccagtgccttccatgtaggccactcagcgcggtgtggagcgaagcttcaggaaagagctgggccccacccattagagcccttgcttcatgatacctgcatggggattggctgcacggtggcacgcaccatcactgtagggccatgcggtgcaaataaatttggatatttacttgtcatttgacttcataaataaataacatggctgtttccacagaggatataatctatcaaagaatatattattagcacaggctttcacccagaataaacaggatcagtttttaaggcagtacatatatgaagatattttataaaacttaataagacactgcagatgctgttattatttactgattacttttgtgtcatgaggtttcttcaggaccagtggaagatatgaatatgagtgagattttctgacttcagaagcttatttatcatgggagagtgagaaggcatttatactaactctgtaaaacaaagtagaagctaatgtgtgtagttgatgtaggtaaatgaaaaattctgctttttggagaaagtgggaatatgtggtagacgttggatatttagaactcagagggaattttagggctagcaatacagatttcagagctaaagataacagattttagagtcatctgtgtagtaatgttgaagaatattggcaatatgaaatttaaaatagattattaaacatttattattaaacattaataaatcaaaaaacatttcttgagagctagcttacacaaaatcctgatttcatcacatcacaccgcatggccctacagtgatggagcgtgccaccgtgcagccaatcctcatgctgtcaaatctcactgaagtgatttcatcaggctgtctgtcaaatctcactgaagtgatttcgtcacgctgtctgtcaaatctcactgaagtgatttcgtcacgctgtctgtcaaatctcactgaagtgatttcgtcatgctgtctgtcaaatctcactgaagtgatttcgtcatgctgtctgtcaaatctcactgaagtccccaaaagccttttgagataggcattcttaacttctccttttgcagagaaaacctgcatctgtggagttcaatcggttgcctgtaggtttcatgtctagaaaatgttgcagttgggatcagaactcaggacagcacatgtctgtaggccgtgccgatgatgctgagaagcagcgtgcatgaaataaaataaaaacagacaaggctattcattggagaaaataggaagctgtgctcccttgtgcacaaataccagtcgtcaggagaagtattctgttgtatgagcagcgatttgtgagggcctgggattgtacattttagagataactgggctaaagctctgttgagagcagtgtcctaatgcggcttcatggccagctgcactgtgtttttgcgtcttttgtaatgtgtttattttgtcagtgacattcctctcatagtgtttctagatgaatgtttgttttaacaaaaaactttgggatgtgtggccatgtaccagaattttttcttattttgcatagtgttagtgtatttgtattttgctttaattgtttattttcatttctttccttttc

SEQ ID NO: 6493 - DNA, 6039 bp, mus musculus
gcatcactcccccagcatgtttccatcttttttcagttgatcagtatgattgtgtttaaaaccgtgtgttattttacagatgttacttatgaggtgctttcagtattagaagaagtgatgatgaaatctgcttttatattaaaaatcatgttaccatattgggaagttgcactggtcaagttcaagtcacacaggtaactaaagggtacatggcagagtggtttgcagtggttggaggccattctttcttgatgcccttcactttcgatgctttttgctgttggagtagaagtgaagagaacctggactgacttgagcagacctgaaaataaaacaccttcatagagtcgcttcaaggaccgcctgtgattatattggaaacattgccttttggtgcaggtgatagaattatttttcaggatccactttttaatattttctggaagtcttagaatgagtgaaacatgttcagaatcatgaaacatagataagccagcttcgtccttacattctgtttctgtttcctgaggagcaaacacatgtatggtcgccaccagaaggtctggtgagctgatctttagttccttaaaggatattaccctaattcattcatttttatgccttgagaacccactgaaatcctgggatgtgcatttttgtttttttctttttgagactgggtctcaccctgtcctccaggctgaagtgcattggagccacctcggctcactgcagccttgaactcctgggctcaagcagtcctcccacctcagcctcctgagtagataggactgtaagtgtgcactactgtgcctggctaatttttgtactttttctagagatgaggtctcagtccattccccaggctggtcttgagctcctgggctcaagtgatcgtcctcctgactcagcctcccgaagtgctggaattataggagtgagccactgcacccagcctcagtattttctagaagcaatgaaatgagttagacagtcctttgatgacattttattctgtagaagctactaaaaatggttcatcaaacattaaaacactggaaaatgtttttaaaatcactagttagtgaaacttttgttctatgtgtaagtggttttgttttgttttgttttgttttttgagacagagtctcactgtgtcaccctggctggagtgcagtggtgtgatctcagctcactgtatcctctgcctcctaggttcaagtgattcttgtgcctcagcctcccaaatatcagggactataggcatgcaccaccacgcctggctgatttttgtatttttagtagagacggggtttcgtcacattggtcaggctggtctcaaagtcttagcctcatgtgatctgcccgcctcagcctcccaaagtgctgggattacaggcttgagccactgcgcccagctggttctgttttgcttctcgtattagcaagtattatcatttctctttgcttttgatatctagactgcagcagttattgtgatgttggtgtcaatattatttttgttttttgcttgttttttacttagagagtcttagtctgtcactcaagctagagtgtagtagcacagtcatagctcactgcagccttgaactcctgggttcaagcaatcctcccgcctcagcctcctgtgtagctaggactacaggcagtgccactgcactctgctaatttctaaattttttgtagagatggggtttcccaggctggtcttgaactcctagcctcaagcgatcctcccaccttggcttcccaaaatgctgggattacaggcatgagccactgcacctggcctaatatttatttttgaaatgtggagttttacctcttttcccttcaatttcataggtttgctgactgcgccatattgttgctgacacaactggagactggacttaggaatgtttttgccacacttaacagatgtccaaaaagactcctgactgctgaggtaagcttgtttttattattgattgtgatcattgttgctgtattaacagttttctgttaccaattaaaagtttttaaaaatgttattctgtttcacattaaaatgattttaatttagctaagaactgtggaaggcctatcatttctataggatttatatttatgttatttatgattgtttttgatatttctgtaatatttctaaacagtctttaaaactcaatgataccgtgaacgtagtaggcactggttctctctctagctgtgttgatggtgtgtcactgtaaccgcgtgagatggctgcggtctagccgggagactgaggtgaccagtggttgaacctgaccttgggaaactaatcaaaaccttctgaacttgagtttctccatcttacaaatggaagacgtaggatttggaggtgacttggtgtggtgccagccctgcagcaggtcatgaaagcctttgtctcagtttcttgagcccctccatgtgtgtacacacacgcgtacacacagctgtctcagagttccacattgacccccggtcgccctgtctgaggcaagcgtctctgagtttccagcctacctcctctggctcctagaatttctcatttctgctcctttttagtagttatgataagatcctgctgcttagtgacagagatctcgaaataatatggctgcagtgactgaaataggatagaagtgcatttctgcctttcccagatgtgagtagctcccactgagatggcagcacccccatcatcagcactcagacccctctgtgtcgtcttccagtgatgagggccaggccttccttatggagactactacttcctggctccagccggctgtgtcagccatcacatctgctttccagccagcaggaagagcaaagattggtgcatgcccctctctaaggacacttcctggaggtagcacaggccttgggccagggcttagtcgcacttgctgccagggaggcatggaagcgttcctggatggccaagtgcccagcttcccacgggacgatctgttgtggagggagggcaggtgcagccgctccacacctcggattctcgtctctttctctagcttggcttttgctttttgcccctctttgtaggcattcctcaatgctctgccgtcaaccccatcctctgtttcctctccctgggagatctcatacaattctctgccttacattttcatctctgggggaacaacaattagaaaatactttgaacccagtgaaaatgaaacccaacacatggaagttttggacccagcaaaagcagtgctgcgagggcagcttacggccccggagccgggctccccagtgttgcttctcactgacccccatctgatctctgcagttagacctgcttatgttcactaaatatcttcatgtgagttttcctcagcacctcacatttatcttctttcagaaaggcgttgtttcccacagatttgtcctctgacgctccctctgtcatctcagcctcaccagctgcagactccagcagcgtctcgtgtttccccaacacctcccgtgtccactcagtggccagcacagccggtggtttccacccagctgaccttgtgctcttcctgtccaaactgagaagccccccgcctggctcctcggcccacccgagctcatctcacgattcttcctccttctcaaatttcattctcacagtcctgctgattcttttttttagttagttttttttttttggtttttttttttgaggcagggtcttgctttgtcacccaggctgaagtgcggtggtgcagtcatagctcactgcagcctcaatccccgggctcaagcgatcctcccacctccgccccccgagtaactgggaccatagatgtgtgctactacacctggctcatttttacattttttttttccttgtagagacagagtcttgccatgttgaccaggctgatcttgaactcctgggcataagtcatccttctgcctcagccttccaaagttttgggattgcaggtgtgagccaccatacgtggccccactgattattttctaagctgatattcttacgttatttatggttttttttcatttgtttaacctcctcgatgatgtcctgctgcctgccagatggagttcatcctcttcacgtggcagcaaggcctcgggttctaaccctgccctcctctttggtgtgttccctgtttggatacctcagtgaaatttaggcttcttgtcagctccagaacttgcttgtctttcctcttactttgttcctcacccccagattttccgctccaggtcaggggctgtggccacaaaagcgaccttccagaggctcatctactcaaaggtggaggctgcttttctctgtgttctgtttctgtctcatcttggaggcagtcctgctttgccttactcgtgtgcatttctgcagaggtctctgcgggttctctgaggcaggcctacacgttgctgtcgcctgctgcccatgcccagtgccttccatgtaggccactcagcgcggtgtggagcgaagcttcaggaaagagctgggccccacccattagagcccttgcttcatgatacctgcatggggattggctgcacggtggcacgcaccatcactgtagggccatgcggtgcaaataaatttggatatttacttgtcatttgacttcataaataaataacatggctgtttccacagaggatataatctatcaaagaatatattattagcacaggctttcacccagaataaacaggatcagtttttaaggcagtacatatatgaagatattttataaaacttaataagacactgcagatgctgttattatttactgattacttttgtgtcatgaggtttcttcaggaccagtggaagatatgaatatgagtgagattttctgacttcagaagcttatttatcatgggagagtgagaaggcatttatactaactctgtaaaacaaagtagaagctaatgtgtgtagttgatgtaggtaaatgaaaaattctgctttttggagaaagtgggaatatgtggtagacgttggatatttagaactcagagggaattttagggctagcaatacagatttcagagctaaagataacagattttagagtcatctgtgtagtaatgttgaagaatattggcaatatgaaatttaaaatagattattaaacatttattattaaacattaataaatcaaaaaacatttcttgagagctagcttacacaaaatcctgatttcatcacatcacaccgcatggccctacagtgatggagcgtgccaccgtgcagccaatcctcatgctgtcaaatctcactgaagtgatttcatcaggctgtctgtcaaatctcactgaagtgatttcgtcacgctgtctgtcaaatctcactgaagtgatttcgtcacgctgtctgtcaaatctcactgaagtgatttcgtcatgctgtctgtcaaatctcactgaagtgatttcgtcatgctgtctgtcaaatctcactgaagtccccaaaagccttttgagataggcattcttaacttctccttttgcagagaaaacctgcatctgtggagttcaatcggttgcctgtaggtttcatgtctagaaaatgttgcagttgggatcagaactcaggacagcacatgtctgtaggccgtgccgatgatgctgagaagcagcgtgcatgaaataaaataaaaacagacaaggctattcattggagaaaataggaagctgtgctcccttgtgcacaaataccagtcgtcaggagaagtattctgttgtatgagcagcgatttgtgagggcctgggattgtacattttagagataactgggctaaagctctgttgagagcagtgtcctaatgcggcttcatggccagctgcactgtgtttttgcgtcttttgtaatgtgtttattttgtcagtgacattcctctcatagtgtttctagatgaatgtttgttttaacaaaaaactttgggatgtgtggccatgtaccagaattttttcttattttgcatagtgttagtgtatttgtattttgct

SEQ ID NO: 6494 - DNA, 655 bp, mus musculus
gagacagccccgtcttagcctggtcagggcctggggcagtttggagactgtttgctgagggcaactgaggtcgcagtgagccaggcaggccctggggtgcccaccgcacaccccatctgtgccaggctcccagctcagggcaccggtgggcactccagtgatgttccctggcaggcggagggctcatttctcgcctccttctgaggcaaggagggcagatgttgagcctctggggtccttggcccaaggctgcaggtcctggctgctcacagccagcgggtggagccctgtccggccaacacactcgctctttgtctacgtctcagcaggggaaggtacccggggtggtgtccggctgggtgggtgtccaggctttggcagcagtgccagccttccatccggccctggagacgccccccatgagttccggggttgcttggagaggtcaggatgggcagaaatttgcaggggcagggagctggcaccggggttggagaggccttgggcagacgcagcccctccaccatggcagggagctggcctcaggcagcaaggcactgcgggtgccccagagacacagacaggctgcgtcaggctgaaccccagaccagctgagccagggtggcaaatcccatgtccgctccagacagccctg

SEQ ID NO: 6495 - DNA, 194 bp, mus musculus
ggcaaatgagtttatcatttcaacaccatttattcagtaacttcttatgtacttactgagaataccacttaaatcatattttaaattcatactgtgcccaagtgtaagatgtgagtcttgatatataggatgtatatgcatgcatacatgcatgcgcaggctggcttctgtttccatcttaattcatatggtaa

SEQ ID NO: 6496 - DNA, 454 bp, mus musculus
gttcttaggattccatgcttttaccgtaattagccaattgcctttttgactattgtggttgctcttatttagagaaatgtctgatcagcactcccattgaacattcctggagggaaatcttttttgcgcattcatattaaagttctgaagggcaaattcacttgtgcgagactcacaacgtatcagcaagtttctttgtaagttttgttatgtatattaattcggtgttcagaaaatctttacctgtgttcccatcagagacatttgagtgtcaagccttttccagtctggacattttgatttcggtaaacatgttcccttccggcctcagcagagttgcttcagaggcaatttgtactgcctggatttcaatgtctcgttgctacatctttttttcacctagagcattgtgataaaggctcctcttattgctagttttgtccttgtgatactt

SEQ ID NO: 6497 - DNA, 893 bp, mus musculus
aaaattaaaacattactctcgcctctactgctgctgcaataatttcagggaagatgagagactgtgtggattccagacaatgaacataattcatagcctgctctaaagctctgtaggacactttcttttaaatgtgtaagacattaacatatcagtcattttaaagactcatagagaatgaaagacttaccagatagtttttgatgtgtgaaatttagggaaatgggaggtgagatatgtagacggcaatggacacaagtgtgtgtattacctggtgatgtcacagcactataaggggagaggagacaaaggataagaaaggacctatgaagaacttaaaaggtcagtaaaaggaaaaagaaacaagaatatcattatttttaattgtttgtgtaaaaagacaaatttggggacttttttcttaacggtaacagctggagatggtaatgaattcacagaccaagagtaggcctacactcacacaaatgggtagttcttttattaatgtaggaatgtagaaaacttgccagtgtttaagatgtaagttcccatgtgtctctttccattttcattatatgcctatttcagtaaataattgggtaaaaagcatgttttcttaaaaaatacactaaaatggtttcagatggtgatcatgtttttccttattggatataaaataacagatacacactttaactattccacaaaaattacagtttcccaaaccaaaaatagtacacttaatatatatgtgttttatcttcattgccccttttccttaaaatgtttagactgacagctcttattaataggtaagttgattacgggtatcttcttttcattcaattgaatggcctactgcagtttttgaatgaaggagatattcctacatt

SEQ ID NO: 6498 - DNA, 1064 bp, mus musculus
tgaaagcagctctggcagtgactcatgtaacaaactgaaccagtagaaaagaacaggcataaatctgtgttggttaaaatttgaggacaagagtttagaaaacaagagaattaggaacatagaaaggagagagttgaagacagctattgaacatactctgaagaaataggtgagtgaagaatgttaggatatttttagaatgccatgaaatgtgttgaccctgatccttctgcatttcacccttccctcaacacttcctcagaaggtatcagaaaacaaatacgcatttcagttactttcattgaatttcagaagaaattaagatggctagttactaggtagaacaacaacagattaaggttatttggatgccaaaaattgggaaagcatactagggatgtgatacgagtgatacagcatgaaactgtagctttctgaggctacttatttagtagtcaaaggatgaactttttatttctcacttaaatgttaaagaaaaaaacaacaaacattcataagaatacttttattttaaataagtataagagataaaaaatgtcctgcaaaatttctgacttaattgtctgggtgtggcgcaaacatttatttttgcaaatgtcaccaggcaattctagtaagcatctttgaaccactactgtgcaccctgacagcctccatgtctgggagaatttctggtaaaggtgatgtgatgacaatgatagtgactgttctggcttttcaaatggcagtgggagaggtttgcccattaaaaaaaaataaatatatgcactctaaaacaaatattggatctaatgtttttagtgagttttcatttgccttttaattaattatattttacctgtgtttttcttttaattgcaaggtctaaacattctttatagtttctgtctttaatggcgtttttaatgacatcatcttccaaaattatatagctattcatttatacgtcttgtgatgttttcaatatactatcagtatctttctgttaattaggagagggaaatagcgcagaggagtgagtcccagttatcactgggttttga

SEQ ID NO: 6499 - DNA, 1951 bp, mus musculus
aagttcctaagattctattttccattttccttacatctcacttgactcactctatctagttaattcctttccatcctatagctttagctctaaatcagtgaattccaattttttatattatacttcaagctctacgttacatgtgcacaacatgcaggtttgttacatatgtatacatatgccatgttggcgtgctgcacccactaactcgtcatttacattaagttatctccaaatgttatccctcctcccttcccccaccccacgacaggccccggtgtgtgatgttccccttcctgtgtccaagtgttctcattgttcaattcccacctatgagtgagaacatgcggtgtttggtttttttgtccttgtgatagcttgcgagaatgatggcttctagcttcatccatgtccctacaaaggacatgaactcatcattttttatggctgcatagtattccacatggtgtatatgtgcctcattttcttaatccagtctatcattgatggacatttgggttggtttcaagtctctgctattgtgaatagtgctgcagtaaacatacgtgtgcatgtgtctttacagcagcatgatttataatcctttgggtatataacctgtagtgggatggctgagtcaaatggtatttctagttctagatccttgaggaatcaccacactatcttccacagggttgaactagtttacagtcccaccaatagtgaaaaagtgttcctatttctccacatcctctgcagcacctgttgtgtcctgacttttaatgatcgccattctaactggtatgagatggtatctcattgtggtattgatttgcatttctctgatggccagtgatgatgcacattttttcatgtgtctgttggctgcataaatgtcttcttttgagaagtgtctgttcatatccttcgcccactttttgatggggttgtttgtttttttcttgtaaatttgagttcattgtagattctggatattagccctttgtcagatgagtagattgcaaaaattttctcccattttgtaggttgcctgttcactctgatggtagttccttttgctgtgcagaagctctttagtttaattagatcccatttgtcaattttggcttttgttgccattgcttttcgtgttttagacatgaagtccttgcccatgcctatgtcctgaatggttttgcctaggttttcttctagggtttttatggttttagatctaacatttaagtctttaatccatcttgaattaatttttgtataaggtgtaaggaagggatccagtttcagctttctacatatggctagccagttttcccagcaccatttgttaaatagggaatcctttcctcatttcttgtttttgtcaggtttgtcaaagatcagatggctgtagatgtgtggtattatttctgagggctctgttctgttccattggtctatatctctgttttggtaccagtaccatgctgttttggttactgtagccttgtagtatagtttgaagtcaggtagcgtgatgcctccagctttgttcttttggcttaggattgacttggccatgcgggctcttttttggttctatatgaactttaaagtagttttttccaattccgtgaagaaagtcattggtagcttgatggggatggcattgaatctataaattaccttgggcagtatggccattttcatgatattgattcttcctgtccatgagcatggaatgttcttccatttgtttttgtcctcttttattttataggtaactcaggctatcactggaactacagagacatattttcaattatgaactagacattacatcacatttcaaacttaaccttacagtaactacttcactgtgttgaaatccttggtttgcctgactctcccaatacagattgagttatttaaaggaaggaattttcatgtctcc

SEQ ID NO: 6500 - DNA, 663 bp, mus musculus
aaaaaaaaaaaaataggagagatatgtagaaacagttttacatatgcatccactgaccttctagtacttcaacacttaggatttgagtttacagtgagtcaggagggtaaaaatgtttatggggataactgcttcacccataaagtaatttagatagagtatatatttgcatatacagtctcaatccttccaaaaagcagtatcatttcctaatacaaaggacagtagtacatgtcagggtacaactgggaaagaatttcacccaggaccttgagagcacaagtgtagacaaaataactaaatctgtcagtgtcagcaaattactcacaaaacctatcctcaggagcagtgtttgcactctcactcagtcacgctgataccatggaatctgttcaccatcgacagagaagaggcagaccctgccagaatagcacaagtattgactgagtgcatatcctcagacacccatcttcacagaaatgtttcacctggggtctgcctcccaggtcctatcctccctccctgtgacaccttgctcctcacatcctccctgagggcactttttgttgatagaatcctgacaaatacctgtctgaaatatcataaagccattgaaagctcaattgatttcacttacaatagaaataatatctagatgtcatt

SEQ ID NO: 6501 - DNA, 952 bp, mus musculus
aaataagggcgatgaaaccattgtgtgatgccttttatttcacagctctgctcatctgccgcacaaatagcagaacccatggttaatcactgcatacccctgggtcccagggcactcgtggagctttccatatggtctgctcaaaacggggatttatgcatatatgaaatacaaattatgcaaagagatgtaatcatatagtgaaaccaggtcataagagaaaaatacctgttcaacaaaaacagaaacctacttaaaaaacactccacatttctggttcccaaggcaaagcaataatgtgcacactatataaatcttcatcctaacattaactgggataatctctcagacatactcaactggaagctttcattttcactcatccaggaaaaagaggagaaaaagtttaattgattatttccattttgttcttccttaatgtcttaagctttttaagtcttgctgcctattgggtgacttagtacctctacggtaaagtctttaagttttttttttttccctctaatttcatctataagctttagtctgttctttttcctgctggtttaaatagattatttttagctttagacagggtaaccacataaataggggcacttttgaaagtcacaagaggcactaaacagaaaagacactgcaacgacggggaaaaacagagactgcgctgggccagctgcgaggtacacagtcaccttgcctagggttcgctttgtggccaacagaaagatattcccctaactggtaaggtcagtccgaagagcacttacataagcagaaactattttgactgtacttggatcctatttcccacacatttcacattccttatgacagtcaatgagaaaggcagaaaaatgtcagagttttcatgagacatatccagtaacaagaaagcatggaaatgaaaatggaaaaaaaaaaagccttttgg

SEQ ID NO: 6502 - DNA, 1071 bp, mus musculus
gaggcaacattttaatacttaagcctggcatatttttaatataaatagttgaatttgaacaaaaagttaaaaattaatgttagacttttagctttaccaattttttgaacctgtattgtagatcctaacaagtttcatttaaaaaggaaaaggttattttttaaatggttcccactgggtatacaatttgttaactctcatgatatagttaattattcttacagagcaaaaaaaaaaaaaaaaaaaggaaagtatttatttttgttaagttcaatatgacctgatagaacttcatcaaccaaatattaatgtctttgcacctgtcttatacaagcagagaatagatgcagatggaaataaattatgtcatttttttctcaaataattatcttcagaagtcatattttacaatgcaaaacattgagaagaatatttttatttaacttgttcaatttttacagctaaatgattttaattatagtaaccaggtagtacccatattccctagaaaaatttgaagaatgcaggattcattacatgtatgcatatatatgttatatatatgttatatatgttatatatatgttatatacatatatgttatatatacatatatgttatatatatacttataaccctgatttctaagtaaataccatcacttccccattctcccactattgaccttgaaaagagagttctgcttcaatctgtcactacttgaccaccacacaggacttacgcaggcttcacggtggacagtcttctgcctgtttctgcaaagaaaaaccgggaggtggggctgtgctgccgcagaatctcctgaagtaccccacagctaatgctgttccaattcggtacccccaaagcatatccttgccaatgcacttttcacccagcagtggtctgctgtcaaaggaattcaggctacaatagcaggaaacgttagaagcaccttaaaagtataatttatagtattatgataatagtactcttcacactaatagcttctttataacataagcccagtctactttcttattcttgttgccaattactttctgatgtgaa

SEQ ID NO: 6503 - DNA, 1017 bp, mus musculus
taacccctcctaaaccaaagtcaaaagaggaggtttaatgtctcgcttggaggtcttagtatccactgctttgtaggtcatcaagtatgagtcacatatgagcaagtaaaggttggggagctattgatagtagagtaggggattgcagttcgggaagtgttgtggaccctgagtttgccagggtgaaattcagcatgtgggctagagagagagattggaagaggagaagagaagaggagagcatgagctgctctgtgactgtcttagatctttcaggaagggcaaggggacctcagcagaggaaatgagaattaaattggcagatgcctaggggataaggataaactcaaaacatgcacttgactatgtcagcggactggttgggtgtaaaggatagggagaaatctcagaaaaatgaaaaaatgaaaaatgaaaaaatgaaagcacgggcccatcagaaaatgaattttaaaatatggaaaaagtagaaaatactagtgggagtcatctaccatggtaccactcaaggaagaactatcccttctctccttacctcttctactgcttgttctgaattggaggagtcagagaatatggatagccaagatagagcaggagaaaagaagtcctaggtgagaaatgagtgaagaagttgtcccttccctttctttttcatgggctttattcttgcatcagccaatagctaaggcagggaagtaatctcaactttaaattagattcagagctttgatgagactagcattttaattactgaactcagattttatttttggcaaagaactcactgtacggaataaatgtaagacaaattttaaaattttatttactttatgatggcatctttctgtcatttttatgcaatacaacagttactgtttcacaaatagaaacaaacaaaaatgtggttcctttctgaagaataatttggaagtggaacaactgtatttgaaaagacacattagtgaatgttttaaacatgttaggaagcgttacacc

SEQ ID NO: 6504 - DNA, 1017 bp, mus musculus; identical to SEQ ID NO: 6503

SEQ ID NO: 6505 - DNA, 646 bp, mus musculus
tacagtctgtggagaaaggtaattgccaaatttaatgatgacaaaaggaaggccaaaatatttgcacttgtcaatgtcaataataattcttgtattggagttttataatgagcagaatttattgagatagaaatgaccatacataaccactccattaattgcctaatgtcaaacagcaaaatcaggcagcgaaagcaggatgaaatggcttcaataagtgagaggaaattcaggtataagggcaagttgcagtgggaaggcaaattaactttattccacattcatacttgcaagtgtttcaaaaccttcaaaaatctttgaaatatcttgtgatcagtaattcaggagtacatatttcttcctctttcatttatgcggtgtgacaagtgaatccgagttttgaaattcttgcttaatgtattctctttggtataagaatgagccatattttgaataaccatatcctgtagatgtgcctaaaattcacgtaatttgatcaggttgacaatcagctcttttattcattatttcaagtaatatttaatcttgttactatatgtttattacttaccagggatggtgaaaaggattgaaatgatcgagccttcaaaaaacttatggaagacttagataatagccaaatgga

SEQ ID NO: 6506 - DNA, 646 bp, mus musculus; identical to SEQ ID NO: 6505

SEQ ID NO: 6507 - DNA, 544 bp, mus musculus
cattaataccattacttatctgatttattccactttctttaaagacaaggccacttaatgcaacattaaactccttgtggctctttttgtccattgaatattccctgactgggacagacactcaaaagactcagtttaaaagcactagaaataagacttctctagtatgtcattaacatggtattcagttaagctcatttgttaactatttttaatttttaagaattgcttttacaaattttaatcttctcttttaatttgataatttgcatccaaaaccaaaactgtaagacaatgtacattcagagagcatttgctttcatatacaacatatatactcatacctagttttgtctttatccatctgtgtaaacatttttactaactcttacttcaaaatccaattgcttttttctggaaaaatatatatattatatatatatatgtgtgtgtgtgtgtgtgtgtgtgtgcgtaatacatataatattcccattccttcacacaattgcatatgataaacctaatttgtacattgcttttctca

SEQ ID NO: 6508 - DNA, 856 bp, mus musculus
tgtcaaatcaaagaagaacttaggagtggggggctttgaccaacacaaatattatgttagctccaattcacagaagctctttatagacgcaagtgctttgagtgccttaaatgacaaagtttttgtttagttccatattttacattgtatgctgtaaaatacaaatatagtactttgtatgcaccttttgaaactttaaaaattattatcatgaacatgtaacctgattaaattcaacgtggatttatttttctattcactccttcatggtgtctttgtataagcctttgaggaacttcttttcattgatgacactaaggagaaaaaaatgtcactttaattatctctttttttctgtttgtttgttccctttcttggttgaaggtgaaagtctggttccaaaacaggcggatgaagtggaagagggtaaagggtggacagcaaggagctgcggctcgggaaaaggaactggtgaatgtgaaaaagggaacacttctcccatcagagctgtcgggaattggtgcagccaccctccagcaaacaggggactctatagcaaatgaagacagtcacgacagtgaccacagctcagagcatgcgcacttatgatataaacagaggaccagctccattctcaggaaagaaatgttgtgatggcaagccttacccaaatatcgtttacacagagagatgactatggcagtgatgtttaatattattaaatccaggcatttcgaatctgtttttcatgatttatagagggtttacacaaagtgccacttattaaagagcttccacagtgaagatggagaaggtgaacttgctttgaatattccagatgtgtttggtcgtgcgt

SEQ ID NO: 6509 - DNA, 311 bp, mus musculus
tgggaccatttgggtttgcacgaatatttggcaaggagagcagtgtgtttggttcagattaaaagtgggagtcgacagatattagaggtccttaaaggttggcaaatgagctgctgctctctgcagaactgaaatatatttagaattacatagaacttaatggtgtacaggagaaacgcctgcttaactacaaaactcttatttatgatggaaaaataaaaacaccatatgcatactgccattcccagaaaatactgtgaaaatattgccttgttgtggctacaaattgtgtaaccccacctttggtgaat

SEQ ID NO: 6510 - DNA, 520 bp, mus musculus
catttagccagtgggttacagaaacagtattttagtcaggagactcttattccagtgccccttttcatttccctcacttcatgttgactcactctgtgaaagagctcaggtcagttacaagtagaactagccaggaagggacagagtctcaccacaactgataaaggagtatcttttcaacaattagccttcagcagagggaattaattagtgaattccttaaaagctgttttctatgcaccgacttcagacaagtgcagttttggtgggatgtacttctattgtaataggaacccaaacctggtatctaatcatcaggatattattaattgcatgattgtaagtatcatttaaactgactcctcagagggaactcctaattctatctcaaatatttcctatgtaaaacggaaataactatatcttacaaactcatatatgtatactcggaacttctgaatggtatttctgggttttaagacatgcatttgaaaattatcttgatttccttctcccaaag

SEQ ID NO: 6511 - DNA, 1505 bp, mus musculus
gtcataaaattcctccataaaacaggatgcaagattccatcactgaagcaaagagtacaaagagccggtgtataaatatctaattgtaccaaaggactgggctttctcaatgactgctcatctggagtctccagggcatgctcgctgtggtttcctgatttttagaagccagtttaaaaaatgagtgcattaaagggtaatttgcctgaaagttcaggaagtaaagggggtggtgtggaagcaggctgaaagggagaaagaaaagaggaacgtagtgagaagacagaaaatgagaaagaaagtggtagaaagacagggaactagaaatcagaaaggttgtctccacacaaagttagacatgactgtatttgtcgtctgttttcatttccctgtaggatgttcaccatggaaacggtacccagcaggccttttatgctgaccccagcatcctgtacatttcactccatcgctatgatgaagggaactttttccctggcagtggagccccaaatgaggttcggtttatttctttagagccccacttttatttgtatctttcaggtaattgcattgcatgattacccctaattttcttgtcctttgctggtgttttaaattacacgagattactgaattgtcccatgggaccaagaaccagtgcagaacaagtgcataacccagagcactgtttgtcagggaaggttgggctgatttgatgtgttgtttgatgtttatttcaagagctcccatgtgcttgttttcctctcttcttgctttcttccatttgctctcttctctgcccaccgtggtgtgtctttctcttcccaggttggaacaggccttggagaagggtacaatataaatattgcctggacaggtggccttgatcctcccatgggagatgttgagtaccttgaagcattcaggttggtacttctttctctctgaaagtggcaaattggaaaataaatgtccattgaaataacaccaaatatggaagagaaatgtaaatgtctaattaaggtaaattatcgctcaaagccacataagaatatgtataagaagaaaagatctatcaagacctggttttgattatacaggtatattggccaatggcccattttcccccttccctcccaaataaggaggaaaaaatattttattattaaatagttctctctggaaaattctgcctattttaacatatgatgtggtttttacagtagacattagcatattcattgccctgagaagtccttcattacctatttgattttgttgaacaagcatttctcaaacttcattggactacagaatcccttttttacatagcaccatttagcattcctagttctggggagctcactcattttcatgacattggccaaggcaatctcatttgatggtagggtaaatgacttttgtatagttttcctttcacatgaaaacattaactaattaattggttgcttccattttctctggaacaaaatctacaaaatgta

SEQ ID NO: 6512 - DNA, 1505 bp, mus musculus; identical to SEQ ID NO: 6511

SEQ ID NO: 6513 - DNA, 1505 bp, mus musculus; identical to SEQ ID NO: 6511

SEQ ID NO: 6514 - DNA, 4792 bp, mus musculus
cattctgtacttttcaacttgtgaacaaaaaacgtgatttttaattaaaaaatgtcatataactgaaacaaaaaataaaaagcacagcaatctggaattgtttaatgttggtggaaaaatgtctatgaatctcaatatctcatgagaacttcattatattaaaatgtaattcaaaatttaagttaatgataatgcttgaaaattaaagttttctatttttattattaaaatttttattagttttttattttatttttatttatatttttatttattaacttctattataggttcaggggtacacgtgcaggtttgttatacaggcaaattgcatatcatgggaatttgttgtatagattatttcatcacccaggtaataagcatagtgcccaatagctagttttttgatcctttccctccttccaccattcaccctcaagtaggtgctggtgtctgttgttcccttctttgtttccatgtgtattcaatttttgtcttccatttataagtgagaacatgcaatatttggttttgtgttcctgtgttagttcacttaggataatggcttctagctccatctatgttgatgcaaaggatatgatctcattgtttttcatggctgtgtagtgttccatggtgtgtgtgtaccacatttgctttatccagtccaccactgataggcatatataggtagattccatgtttttaatattattaacagtgttgtgataaagatatgcatgcagatgtatttatggtagaacaatttatattcctttgggcatatacccaataatgggattgctggatcaaagagtatgtctgttttaagttcttcaaaaaatctccaaactgaattacacaatggctgaactatttacatttccaccagaagtgtataaacattctcttttctccacaaccttaccagcatcagttattttttgacattttagtaatagccattctgactggtgtgagatagtatcttattgtagttttgatatgtatttctctactgatttttatcttgagtatttttttatatgcttgttggctgcttatgtctcttcttttgaaaagtatctgttcatatactcagcccaatttttaatgtgattgtttatttgcttcttcatttgtgtatgttccttatagattctggatataagacctttgtcagatgcatactttgcaaatattttctctcattctacaggttgtctgtttactctgtttatagtttcttttgttgtgcagaagctcttttgttaatgaggtctcatttgtcaacttttgtttttgttgaaattgcttttgatatcttcatcatgaaatttttgctaggttctatgtccagaatagtatttccagggttttaatagtttgaggttttctatttaagtttctgaccatcttgcattaattttacggtgtaagaagggggtctggtttcaatctgcatatgtctagccagttatcacatcatttattaaatggagaattctttcgccattgattgattttgttaactttgtcaaacattagatggttgtaggtatgtggcattatttctggactctctattctgttccattcgttcatgttctgtttcagtaccagtatcatgctgttttggttactgaaaacttacactttgaagttgggtgacatgatgcatttagctttgttatttttgcttaggattgccttagctatttgggctcatttttggttccatatgaattaatttttttttctaattctataaagaatgtcattggtaatttaataaaaatagcactgaatctgtaaattgctttgggcaatatggccattttaacaatattgattctatctatggacatggaacatttttctttatttgtttgtgtcatctctgatttctttgagcagaattttgtagttcttgttttaaagatgtttcacctctctggttagttgtattcctaggtattttattctttttatggctattgtgaatgggattgcattcttgatttgactctcagcttggaaattcttgttgtataggaatgctactgatttttgtgcattgattttgtatcctgaggctttggtgaagttgtttatcagatcaaggaacttttgggcagagactatggagatttctaggtgtagaatcatatcatctgcaaaaagatagtttgatatcctctcttcctagttaaatgccctttatttcttcctctggcccgatcgctctggctaggacttccagtatgttgaatgggagtggagagagaggaaatttttgtcttgctctggttttcaaggggaatgcttccagcttttgcccactcaggatgatgttggccatgggtatttcatagatggctcttattattttgtggtacattccctgaatgcctagtttgttatgaatttttaacacgaagggacctaattattaaaagccttttcttcttctattgagatgatcatgtgctctttgtttttagttctatttgatgaatcatgtttattgatttacatatgttgatccaaccttacatccaagggataaagtctgcttgatcaaggtgaacttattttttaatgtgctgttggatttggtttgctagtatattgttgaggatttttgtattgatgttcatcaaggatattggccctgaaattttctttttttgttgtgtttctgccagattttgatatcagaatgatttaggcctcatagaatgagttaaggaggagtcccttctccttgattttttgttatagtttcagtagtttccagttctttatgcattttgtaaaattcagctgtcattccatctggttcagtgctttttctggttggtaggctttttattgctgattcagtttcaaaactcattactggtctgctcagggattcaaattattcatgactcaatcttaggaggttgcatgtttccaggaatttatcaatttcttctaggttttatagcttgtgtgcatatacatgttcatagtagtctctgtttttttaaatatttctgtagcatcagtggtaacatccctttgttatttctaattgtgtttatttggatcttccctctttttttattagtctaactcacagtctatctatcttacttgttctttcaaagaacaaactcctagcttcattgatcttttgactctgaattttcttcagttcaaagattgaaggaatatcatcccacacagatgagaaagaaccagcaaaagaaccctggcaactgaaagagccagaatgccttcttacccccaaacaattaccctagttccccagcagtggttcctaactaggctacaatggctgaaatgatataggattaataacatggataggaagggagatcttcaagattcaggagaaagtataaacccaatccaaacattctaagaaataaaataatacaggaggtgaaagatgaaatggctattttaagaaagagccaaactgatctgataaagctggaaaactcactttatgaatttcagatacaattgttaagtattaacaggagaactaaccaagttgaggaaagaatcccagagctcaaagacaagttctctgaaataactcagtcagaaaacaaaaaagactaaacaagaacgaacaaaacctctgaaaaacacgggattatgtatagagaccaaatctacaacacattggcatccctgaaagagaaagagagaaagcaagccacttgcaaaacatgtttcaggatattgtacatgaaaatttccctagtctcaacagagaggctaacattcaaattcagggaatacagagaacctctctgagatactatacaagacaatcatccccaagacacatagccatcagattctccaagtttaaaatgaaagaaaaacgttaaaggcagctagagaggagggacaggttacctacaaagggaaccccatcagactgacagtacatctttcagcagaaaccctgcaaaccagaagagattgtaggcctatgctgggcattctcaaaaaaaaaaaataaatcccaaccaagaatttcatatccaaactaagcttcataattgaaggagaaataaggttcttttcagaaaagcaagtgctaagggaattctttaccactaggaaaggaaagactgttaccggctaccacaaaaaaaacaaaaacacacttaagtacatagacccttgacactatacagcaatcacacaaacaagtctgcataataaccagctaacaacatgatgacaaggtcaaatctgcatacatcaatattaaccttaaatgaaatgccccaattaaaaggcacagggtggcaagttgaaaaaagaagaacgacccaactgtttgctgtcttcaagagactcatctcacacgcaattacactcataagctcaaagtgaaaagatagagaaaaatctaccacgcaaataaaaaaatagaaaattcaggccaggcgcagtggctcatgcctgtaatcccagcactttgggaggctgaggcaggtggatcacctgaggttaggagttcgagaccagcctcaacgtggagaaacaccatctctactaaaaatacaaaattagctgggcgtggtggtgcatgcctgtaatcccagctactcaggaggctgaggcaggagaattgcttgaacctgggaggcggaggttgtggtgagccaagcttgtgccattgcactccagcctgggcagcaagagtgaaactgtctcaaacaaacaaacaaacaaacaaacaaacaaacaaacaaaa

SEQ ID NO: 6515 - DNA, 414 bp, mus musculus
tgtggtttcacctatttattctgtactatttctttttctctcctttcttttcttctactggattggtcaaatattttataaatatttcagtattttccaccccacttacttaaaggcattatctttatttatatgcccaattaatggttaccataaaaattataatataatttacttacttaccttgtcaaagtctaagttcaacaatgtctttattcttctccctgcaaatatggagaccttagattattttcctccatttaattcaatacaacttctatattattcattttgttatttttattacattgtttaagaaccacaaaaaattaatatgattattattgaccacattatttgttctccattcattctttttctcacatcttccaatggaatcattttatttcagct

SEQ ID NO: 6516 - DNA, 1376 bp, mus musculus
ttaaaccaagatcaacaagactaagaagatgtgtcagcaaaaggtggtagaagcctttgtaatagggctttacttgagacttgagtgatgcaggtggagtccttaagtcagaattccactcagcagaccttcacattagaggatccttgaaaccaagcatagggtgaggaggtcagggatcttcgaatcaccttagtgagactgaagattggagtcaaatgcttcactgtttgttacttaagcgcttgattttcctgaggttaacgcgataaggacatgagggttttatgtttatcctccacagtgcctagcacatacaagcacatagccagtgttagtgaatgtgttcttttgagcatgtagtatgatcagaaattgcagtgacagtggcagaactgacactcttactctcccactccaactgcagaaggaaagaaaacggagaaacaagaaacagtaaacacataaactgagagaaaggaagaattttccatcaggcaaagcaaagtttattcttaaaaagaaacatgcattatatctcaaagaacagagaaacaagatagggtatttaagggttaatttgtgtgagcaaagtgctctgaaaccatgggtatgaaaccacatcaatgcagtctcaccatggctgcctgccgcattgtgcagctgctatttttagccaacattcatactgctctgggtcagagtgggggacttctgtgcagagaagaatgaattgcttgcagcaagccaagttttgaggagtaattatttgtgctataatgtacagtcagggccagctccatgccacacactgaaaactaagtcttccaggaagtacaaataggcaggtcttcagtggctgcttatggcttctagcactaatgatacttggcagtgctgccaggatgatcaagaattaattgatttgttgtgaactctaccaaaggttagcaccgagtctgatgttatacaatgtagatacattttcaaagtacttcatgatcattaattattttttttgtctcaatgttccaaggaagtaaaaattagttttctttataattttaatgttatcttttcaactttatatttattaaccttagactttctagtaagagcaaatgctctttcacaaatttcttgttacaagagatacagtaagtaacaattcagtttttatttactaatagctgttttctaaagcaggtaccaaatctctttctttttactttcctattacccaagggtgcctgtgcctgaccaacactaactttctatacctatcagataaatcctaagaggccaagatatacttcaccccgaatatggatccagttttaaggaagtcagagtcacaacttccgtttttcaaagca

SEQ ID NO: 6517 - DNA, 728 bp, mus musculus
gcaacgaatcattggtcctattctgtaatacgaaaccaaacagaatcagtctaatgatccttctatatacaaatttataatcctttaaggaatctatatgatgctagctttttttggtttttagttaatttgctttgttttgaaacaaaaatttccaagcaaaatagtgagatttttctagagacagaaagaaacagaagtgccaattttcttctaatttttcatctaattaaatctttgattcgaattctccatttgacaaatgagaacgtctacttccaactctagtcttcacaaatatatgcaagacaggatggttacattttataaagtcaatttagctcattattctctaccaatagacttagttcacatgctagaaaattgaagtatttgatcagttaggaagaaaatatatgtgattttacaggactcttgagcaatttttaagaagagaggaaaggggcattcttccttaattatctaacttaaatttcacctcctctgtgaagtcctcctctttccccagctttctttacccttcagtcatcacctatttccctttaacgttttgtgcaatggtcatatcccaactttggattatatttcaatatgtacaaactgatctctagtctagccagtgggctactggaggacaagaaagttaaccacttgtatctcaggcacattgtgaggaatcaatagatattaattcactcgaattagaa

SEQ ID NO: 6518 - DNA, 950 bp, mus musculus
catactgggagttcttgaaatccttattctgaaaagtgtggtctacagactggcaacatcagcattacctgggagcttgtcagaaatacaggggttcaggtcccatcccagacctactgaatcagaatttgcattttttagctagattctctgagtagcacaaatttcaattcattctctctctctctctctctctctctcccgctctctctccctctttctcttccagttctggtgttctatcctgactctatcaatttgctctcttcctttcctcagcatattgacttgtccagcagagcttgttttgcagaattcatccaggaatatttatttggcacccaatatcctatgttctcttatcaaatgaagaagttattttccttaaatataacctttattggttttcacagttctctagttccagacttgaccaaatgctatctgttatgcccataatgtgacacacaggtctttaatggcataaggctaggctttgctgtttcttgagtcctgaaagatgtgcatggagatcatttctctaccacttatcttcagatattttgatacttttgcatacctttattgcctgctaactgaattactacaagtcctttctaactggtccactgccaacttctattagcagattttcctgtattgaaattgctgctgcctatcaggcagcaccatctattccaacgttcgttcaaaatcaccctcttctaaaggtattggctttcatttccgactagtattgattttggaccaatgggcgacaccctatactgcttagagttcctgtcttcccactttgctgttcgaagataggactccacgtcgtggaactccaagtcaaagaatcacatccagtggaatctgggaggccttctttcttcctacttgcttttaaagcaaactcaaaagacatggctgtttggtgactgttc

SEQ ID NO: 6519 - DNA, 1798 bp, mus musculus
caatacaattaaattccctaacatgtcagagattctctaacatgtcatctcttgaacatttcgtatgctacatataagaaacataaattatcattatgacttaaaatatatttcacataaactatcacagtattaatactttctatatattatgttactatctctatataacttctacaacttaatgggtttgcaaagtcattttgtagtaggacaagcctcagacaaaactcctcagacaccaagttaaagaaggaaggggtttattcagccaggagcattggcaagactcctgtctcaagagccaagctctccaagtgagcaattcctgtcccttttaagggctcacaacgctaagggggtccgtgtgagagggttgtgatcaattgagcaagcagtgggtatgtgactggtggctgcatgcaccagtaatcagaacgaaatagaacaggacagggatttttacaatgcttttccacacaatgtctggaatctacagataacataaccagttaggtcaggggtcgatctttaactaccaggcccagggcgtggcaccgggctgtctgcctatggatttcatttctgcgttttagtttttacttctttctttggtggcagaaattgggcataagacagtatgaggggtggtctcctcccttattcatctgactaaagagtgaatattactatttccagcagtgccggtttctccagataaagattcaaaatgaataccctgctacagatctaggtaaactgtctgatttggggaactggaatgtgggatcagaactgtgatccttttccaagccggtaacacttaccatatcaacagggaaactcaaaggcatgcttttagctgccatgcagctttacagtccttaaaatatattccttcggtaaatttccttgggtaaatttcacctttatgcaaattttattttcaactttttattgtctgatttagatacatggaattctgcacccaccacatggaatccagctaattaccttcaattacagttaattgaattatgtacccgtttcatggtgatagaacatttttatattttattcattatctatcttcttgaccactacttgctaatccttacaatagtctcctccttattcatagtttcactttccacagttcctttggtcaaccaccgtctgaaaatattacatataataagatattttgagagagaaagaaaaaaataagaccacatttgcagaactttttttacagtatattcttataatagttctattttattattagttattgttaatctcttactgtgcctaatttataaactaaacttcattataggcatgtatatataagaaaaaacacactatatatacagtttagtactatcctcagtttcaggggcccactgggagtcttggagtatatcccccatggataagagggaacaactgtatattagcaatgtaattgattacatgtagattatgcaaatatatgcaaaatgtttataaattcttttccaccagcacaggaaaacattgttttcatgttcatttatcacacctatatataggtcacggtttgaagacagctagttcatctggctatcaacctccaaggcctgccgtagctcactcaaattaatcatctaattaacaatcttttacacataaacataaagtattactcttaataagtataggatttttgtaaacccactgcagtgcacctaattaagctaatttttttattttttcagaaaatctaagctgtctaggttagatgcacaataaaaat

SEQ ID NO: 6520 - DNA, 1864 bp, mus musculus
tagctcctaattaatgtgaactccacgaagaaagaactcccaccattttatgtgctctgggatgcggctgagtctttccaattgcagtctgtttactctttggacagctgcatctcctccttatctgctgaactgaggactgtacaaatgtttcttgtgggtcagtgtaatattaaagaatagctatgtttagaaggccagttaccgttgctgtacccacacgtcaggggcaaaggctgagtgggcagatggggggctgccacccctcctcacgcccggcttgggaccagcctggagtctcaagccgaaacccctcacgcgggtgggcacacaatgcccggcgtgtcgcctgggcctcctcggaggtgctttaacaggctcttgcgcttttgaacggccctcctggactctgatctgtttaaactagaggcgttaataagtgataacctggatctgccctccttggaagctgcctgcctatattttattgtttaaaataaataaaaatggtgccccgggagagaagatggggttgtttcctttttcctctggctctgccccgagaaagagggcgggatcctcacggctcacagtggggagggtctttcgtcggccgccggctcgcctcggagggcctggaccactggaccgcccttccccggggccctgccgcgggaccgcgggcttctggctcctcctggggctgcgtccgtatgcgcggagcgtgtggccgggccgtcgccgcgccaccccacctgagtccgccggccagcgcggggacgcaccgggcagcgtgtgtttggcgaccctcccgcacctctggtctcagttgcgtgtgtgcacgaggggttccatagggcccagggatgcttggtacccacgggggagaatccctcgccgaaccctgcgggtctgcggggcgggccgcgagactggcgcgcaaaagcggctccaaggcggggctcccgcgctccccggggccggcttgccgagtccaagttgagcaaccggcgtcgagagagacaccgcccctgctgcgggcgggggcctctcctcgcttccgattggctgacggggggaacctatcgccgtcggccgcctccgccagagcggtttgctggttttcattcattggccccggagccgcccctggatttccatcttttgtggcgcgaaaataaccctttgctccctcgttggttttgttgaggttgaggggtgggactgtgttcccctctgctcgctctcgtttttcctgccctttaacagctcgcccccagccccaacccccaaggaagaaagagggaggtaacgctgaggaagggtggaaagcagttctgcgtccgtgggtggagcccgccccttggctgaccgcatggtgcccgcacggtcccttcccttcccccagcgtccagcgcccggaggttctggatttgcgccatgctcagcagctggagtcacatcttcgtttccctgcccatttccaacatcttagagttgatgcgtccttttttacttaaaacaactacaaccaaccatgttctcaggtaccagaacttttctgggcttctagagaaatcgactcgccctgcccgctcccttcctaaacccctttgtggtccacagggttgttttaagcaaaatcaaacaacccctccaaaaaaagcaaacgaaaaattccgggtaaaatcaactatgctgagaccacgttttcgttgaagctgccctaagaccaatgaagctgagaccgaccttcaaggattaacgatttctgtagctgaaatgttctaatttcactgacgtttggtggagacggtgagaaaaaataaatatgaatttgacttggaaaagcacaaaacaaacg

SEQ ID NO: 6521 - DNA, 357 bp, mus musculus
atgaacctggacctagcctcagactccttctgaacacagtgaatcaataaagtcaacacgtgagacaaaacttatttgccaaccctgaattaagccgttgtccatgaacagtgaagaagtaaggtttttcctcactgacagacaagtatctcctcgtacagtgaaaggctgtccccacccacagctaactcattaagaccagcgtgtggacttccgcatataagttaaatgctgctggacaacagcttctctaaaagcaaaacaacatgtttgaatcgttggttaatatatgtaggaagagctggtgctagggaaccactggggagagaagagccagaagaaagctgtctgttccct

SEQ ID NO: 6522 - DNA, 1226 bp, mus musculus
actgtgtgcagtcccagagaggatatcatcactgcccagacacccacagtcatgggggtgagcacgtggctcagacgaagatcattagaacaggcgttaatgacaaagatcatcagaacagacattaacgactggtccgggggtgaacacaagatcagagcagggtcactcagggctttctggattaatgtaaggatatcagaagaaagaaatggctgttttatctgaggttgaaaggatataaatttgaggatgttagcagttatctttcccattttctagaaagatgttgtctgtaaaatgaagctatgacaatgaagaaccgggaaccaagatatagcaaaagacagagagagccctgagagcattatgtgatcccctggacccacctacacctgaagctctagatccttccttggacttttcagttacatgagtcattcaatgcccttttgccttgagctagtttgagctaaaaaagtcctggctagtacagctgtgagtgttatgctgaagagtttggactgattgatataggactggaaagcctctgaaagtcccccattcttaagtggttagagaacagagacacagagtggacagaaagactatgaagagattaaaacctcttatcttcagcctcctaaattcacatgtcacaagatgaacccttaccaaataggagctactcagggctgggaaaaacttcaagtgggcacctggtcttccagcataagaggacatataagcccaacaacatgcctccgtggagctggaagggtctgcttgtggggtaacttcttaccatgccaacaggaccttccaatccatcatgtaagttaagccaataatactacagccacaatagaatgacatactttgctagccaaagcaagatccacacaaaacaatgacgagtttgagctagaaattattcccaatattgttagcaaaatctggatagtagatgtctcaccccagagggtgaaaatacctcaagaggagcaggtgatttctaaggtcaaggaacaaggcctgaaacagcattactgtagcaaatgtgaagggtctggttacctccctgtctgaaacccaagacgtttggaggaaaagaggtgctgaaatatctgcagttggtggtgacacctgagaacctgggtgatcctacctccctacatacaagggcagggatcatgccttttgcttcaaatagctttgaaccttct

SEQ ID NO: 6523 - DNA, 4302 bp, mus musculus
ctttggctttggggattcacgtggtggcggtggaaatttcggaccaggaccaggaagtaactttagaggaggatctggtgagtttcaagttctacgtgtttaaaggatgagtgtgcttttattttaaatatgattaggttttcattagtagaatcaagaaatccaacctaagtcaattttcctaagacttcaaatagattgtatcctggcaagctcttgtgatttggccagacaagaagttaatagagttgtattaataacagttgtatttatctggattaataatgtaacatgaagtgtcatccgaaaagctttgacccccatcaagtgtcattcttacgtataaataggatggaatctctaagattgagacttgttaagagtccaaaatttaggcggtagatttaattatatgctttcatgttttgtgggtaaactggtagcactggtgtgtccttttctgcggttcttaattattgtgctgaggtagtaagagaactgaaaatgaatattagcaataatgctgaacagtttatagtaaacgtaatctttttttggcccctaacagatggatatggcagtggacgtggatttggggatggctataatgggtatggaggaggacctggaggtcagttttcctctacgttttggtttgtttatgtgactaatacttaactatatcgtatatttacttcatttatattttgagtttttaaacattttatattagtgtctataaatggcttgggtgatagtggtccagttatttctaagtagttttgccatcttagctgttatagcctaaggaatagagtgccattttaaatgaaaatgtaaagataaccatcagagtatctcatcttttctcaagcaaaatgattggatctagatatatctttgtacgtgcttctctggaaaagtacagaatactggatttaacagagtaaaacctaagggggtggtatatgtaggaaaaaatatgaaatatgtctaaacccgtaactagatgggaagcatcccaggataactttcaaaaagcgtaacctacggaaatgttccaaaatgtttagtgtgctcctggctgcagataaggttgtgaactaccattaaacatgaagtgtgatatatcattggcgtacagaaaaggctgatacacactgacagattttgtaacaagggacatttaaaactgagctggtaatagacttgatttctggtgttgccactcaataggcatgactaaatagtgtatctcactgttctactttttataattaaaattttagaggaagctgagttcttgtatttaactacaagttagagactcagcccacaagctttttttttttttttaatatggtttcttttttttttttttttttgagacggagccttgctctgtcacccaggctggagtgtagtggcgcgtctctgctcactgcaatctctgccttcccggtccaagtgattctcctgcctcagcctcctgagtagctgggattaccggcgtgcaccaccacgcccagctaattttagtatttttagtagagacggggtttccccatgttggtcaggctggtcttgaactcctgacctcgtgaactgcccaccttggcctcccaaaaacgctggggttacaggcgtgagcaaccatgcccagccttttttttttttttatttttgttttgcagtatgtgaaagtgtaaatttttgtttatgtccgcacttctatttacagtaaagaacatactgtgtggagtgttgggtctgttttttttctttgaaatggggtctggctttgttgctcagactggagtgcagtggtgtgatcttggcttactgcaatcttagtctcaagccatcctcccacctcagcctcctgggtagctggaactacggggtgtgccaccatgaccggctaattttgtgtttttttgtagaggtgtgggggttttgctgtgttgccctggctggtcttgaattcctgggctcaagcaatccacccgcctcaacttcccgtactgctgggattacaggtgtgagctgctgcgcccagccaagaacattgtttcgttttttgagagggagtctctctctgtcgcccaggctggagtgcagtggtgtgatctcagctcactgcaacctctgcctcccgggttcacgccattctcctgcctcagcctccagagtagctagtactacaggttgctgccaccatgtccggctaatgttttgtatttttagtagagatggggtttcaccgtgttagccagggtggtctcaatctcttgacctcgtgatccgtccgcctcggccttcccaaagtgctgggattacaggcatgagccactgtgcccaaccgagaacattgttttaagatatgtaattcgtagagagacataatagaaactttatcttttgggccagtaggaggaagtgctcttttactttccctctagcccacactactagtctagcctcacagtccttacccacaatatacatgaagtatttcaagatacttaagatttttagttttgagggaaagctgtggaattacaggtatttaactgtgtgcacatggtgttatccatttggctgagtaaccccagccaccaaatgtttaccaaggatagttattcagtccttgaagctattttagaggaatttcattaaatatttcacatggaaacttggaaagctggaaatggatgtgaggagacagttcaaaatggtattgaaaatattaagtgattacttaaaggcttattttataataggtggcaattttggaggtagccccggttatggaggaggaagaggaggatatggtggtggaggacctggatatggcaaccagggtgggggctacggaggtggttatgacaactatggaggaggtaataaattcacctgcaacctttatgtgggaatttggaattaatgtctttgtaacacttgatcttttgtttccatgtttgtcactagatgcccataaaatttgtggataagtgtttgcttttatttgtttttatgggagctttgtcctaagtccttggtttaatgtttgtattgttctgagtattccaattttttaataggaaattatggaagtggaaattacaatgattttggaaattataaccagcaaccttctaactacggtccaatgaagagtggaaactttggtggtagcaggaacatggggggaccatatggtggaggtaatttataaaaattgaggttattcagatttttgtgattaaaggattagccttttgtgacttaaagggaagataacatactaagtagtttgtactgtgggcagtgctccatgtacggtcttagtgaaaataaagaaattttgcataaatctccacagaagtactcagcaagcagttatgacatcaaattgggattagggatgttggaggtgggggtgttcagtagtttaatttctggtggggactcataaacagctaaatacagttgcaacccacattgcaagtggtatacattggaatgagggtctttgaagttaaatccttaaaccatgattcaaaccattgcttagcttatttttgaggtttttagctaggagtaaactagctttgtcttgggcttgatgtacttttaaaaaaatcccttactcagtccaaatgaggatgagagggtgaaaggaccctttatttaaaagaatagggtcagccacgaaataaaaatgtctatgaacccgagtaatttatctcctgagtaattctgctaactggctgcaaaggattaggatctgcttgtttaaaagactggatggatataaaatagaatcaactgtagtgttaggctgatcatgggaaatcaaagtaagtttgttttctcttgctgttccaacaattataggaaactatggtccaggaggcagtggaggaagtgggggttatggtgggaggagccgatactgagcttcttcctatttgccatgggtaagtagcttttgagttttacaattattattatcttgggagacatagctgcaggagtaaaagctttttaggatcatgttatctttccttaaaatctggttagatggataatttcataacctattttttttttactctttacttctgttgaaacaggcttcactgtataaataggagaggatgagagcccagaggtaacagaacagcttcaggttatcgaaataacaatgttaaggaaactcttatctcagtcatgcataaatatgcagtgatatggcagaagacaccagagcagatgcagagagccattttgtgaatg

SEQ ID NO: 6524 - DNA, 1198 bp, mus musculus
ctcagactcaaaacagagaagtgacccccagccccacctttgtctcatcttccactccatccatgcattctttagatttcagctgttctcttccttcccagctcttctattctcttcgtcctcaccaggccaagaccacatatttcacacccctcccacaaaatgacagaactactcccacctctgccatcttccctcctatccacagggtctatgcctagccatctgtttgggtcctaaactgacgcttggagcatgtaacatccactaaggaaagtttgtcttaattgcctcccttgctgatcacaatgacattcaaaatccttcatcaaggttatcttcaaaccctcctttcaaactagcctctccctgtgctctaaacatgtctcccagaatccctgctctgagccaaccaattcaagtttcccatggaatgtaattgatacacaagagggagttggatgagaacatctttaaagccttctgagccctgtagatcatttgcagacattctacaaaactacaaatagtcaccgcacttactatgtgctaaacattacgttaattgcctttgttttatgcacattagctcccttaattctcataatagtttgatgaaggaggtagtattactatcctgttttacagacagaaaagctgagtcttggggaagataaattgtggctccaaggctacccagccaagatgagcaagactgaaacacagacccacatgacactgcagtcccgctctgggtgtcagaagagtgctgcttcccccagcttctgttagcctgtgttaaatgtttccaggttgatcctccagcctaccctcacccctatgctttctttctaaaacataagcagatgaaaaataaagcatgagtgcttcttccctaggatggcataccagaatcaccagatgacagacatcggggtgctgtcggacccgggaatcagaacctctgcagatagatattttggaaggcgctccctagattggcacctctggttagaaccctgcccagggactggacaagttgggcccatggctcatatctggccagtgttcattgctttgttgaatcacacttaatcctttggttttggtagattcctgcaagtagactgacagctgcatgtttgcaggaaagttaaatattttgacagcgcagaagactgctgcatctggagggttc

SEQ ID NO: 6525 - DNA, 996 bp, mus musculus
tatcaaagacatattgtagcatgtgcacagacacaacatcccactcctgctgttgttgtttgctttcatttggatcccaacccattctgggcccattaagctaatcacccaacaaattctgaactgtcatctcatcgtgaggctgttccatgcttgactgaaaaacctgttttcacccaacttccctggaagaagcctactgcagcccatttacaaatgtatgcatcagtaaatcaaaagtgacagcacagatctggcttttctgggagaggggatggcagagggagaaacccagtccttcccctctgtttcttaaatgatgccatatacacagctttatttgaaatgttctttaaaaataggtcatcttcaacttccttgatagctcattctctacatcggtgaaactttggctcctttcattttccaaagcctctacctgtgtttttctgtgagtcgagtcatcctccactgagccgagtgaaggaatctggctctcccagatgtttgcaggtatttcctcttcagttgtcactttgccaagtggagcacatgtgttctttaatttttcttcattaatcagtctccaaattcctttacacttgctcctcaggtgattccatcaaatcaacatatttctggagctaaaaatgcctggaagaatacagccttccagctgcagccatccaaacgtgtggattcgcgtatgttccctgcactccatggccatatgtttccacaggttcacttccaggagcgttctgtgtctccatttgcttccctgcaaatgcatacttagtctcatctgtgagttttctaactgagtcttaaggcatcaaaaattaagagcatattgataacagcccagtgttggtgagagagggtgtggggaaatgggcattcttgtacccgttgctgagaatttcaattgacctaacttattttgaaggccattttaaaataaaatgaccttttaaaataaaaaatacagagacc

SEQ ID NO: 6526 - DNA, 1355 bp, mus musculus
ggagacagccaagaggcaagtgtaaaaagagcagagatcagctcaagccaaggtcttgaggtgagcaccagcatggaaggctcaaggagtggaaagtctgggctggtcactaagggccttatgcatcgtgaggggatttgaatcctcaggattcaattcaaatggatgcagcaaagaatgacacaattaatgatacatcttttataaagattactctgtctgttgtgtgggggagggcaaggagacatgaaaaccacataagggaatccagaggtgatgaatgcctgcttaaggcatcatggcagcgatggagaagaggtgacagatttctgagaaatcaggaaaaacaacaggagtttgcaatggattggctgttaagaataaggaaaagggatgagtatgaggtgacctttacatccctaagcaaagatgtgacagctgcagatagtaaccaagttatgaaagtggatgagataaccttgatgggtatgcttgttttatgggtgtaaagaacaggaccagactcatagccccaaaaaaagaccccctcattttgctttacctccagggaagcaaaggggcacagggtgaatcagctctgtgctccaggtaacagtcacagttctgtacactgtactgtttaagatatcagaccttggccaacatggcgaaaccccatctccactaacaatacaaaaattagctgggcgtggtggtgtgcacctgtaatcccagctactccagaggctgaggcagaagaattgcttgaacccaggagagggaggtggcagtgagccaagatcatgccactgcactccagcctgggcaacagagtgacaccccatctccaaaaaaaaaaaaaaagaatcaggctttagaaaagaaggttagcaggtgcattctttttgagcatggattggaattggatatttgggtttctaaaaatgagacttggaactgttagatctcaatgtacctcattctagaacaacttgacttatgcacatatggggtgcagggaacactgtgtcagacctgacaggagaaagttagttttttaagcaaatatttcatgtctctcttttggattccaggttctctgtgttctcctacataaagatggcaacagtagaagggagacattgccattctggctgtccttgggattcagacttggtaatgaactgcaaacaccctggctgctgacgcctgtctgcccccaagttttaggagacaggggtaggctgagggctggggtgatcagcaggcttgtatgcctggaaacctgtgcactaattttcggttcaatggccacattggagaagctacttttaggagaccgcaaggctgaaatt

SEQ ID NO: 6527 - DNA, 1496 bp, mus musculus
atctgtgatggaggaagagtttctgcttgaggccatggaggggccaccagagctgtatatcccagacatggcctgtgccaagaccaccacgaggggagaatgcccaaggaaagacagccatctgtggcagcttctgccaatgccccatgctgagtatgaggtcaccagacccacagccacttccaaatatgatcatcctctggggtttatggtaacccacgtcacagaaatgcaggacagttttgtgaggcctgagggagctggcaaagtgcaaagccaccacaatgagtctcaaaggtcacctggaaatgatcatactcaagacaagttccttcatgttgactctgaggccccacgagaagaggaaagcagtggattctgtcctcacaccaaccacagcttactcgtaccagaaagctcatcacagtgtatccccaagcacagtgaaatcacaccttatgcaactgaccttgctcaaacatctgaaaagctcattccccacctccataaactgcctggagatcctgcccaggtgaagtcaaggtctggtactttgggtcagatactacctgggacagaagctgagatggaaaaccttcctctaaatactggcagctccaggtctgtaatgacccagatgtcctccagcctggtgtcggctgctcagagggctgtggccttggggactggtcccagaggaacatctttagaatgcactgtgtgtgatcctgttaccgcaacagaaacaagactggggacaaaagcaagacagttaaatgatgcttccattcagacttcagctctaagcaacaagaccttgacacatgggccccagcccctcaccaaatccgtctctctagactcaggcttctctagtatctgcccaatgggcacctgccatgctatacctgcccactgctgcatctgctgtcatcaccaccctcactgccacggggagaggcaaagccctggccctgaaccctcagtctgtaggcactgcctgtgttcactaactggtcaccaggaagcccagttcatgacgactttgaaagcccttcaggacactacagtgagggagctatgttccgtaagtgttcaccctggcaaagatggaaaggcagatgcacccgtgataaacacctcagggataatattcagacttccttgctgaatgcaagatctcagggcaaacttttctattttaaatcatgaataacatttgtagagtgctttattgtttatgatatagtatcacacatttcttctcgatacttccaatcaatcacctttagaaataagcaaagcaaattttatcattaatcatcattttacagaaaggaaaactaaggggtagagccatgcattcatatgtctaaggttataagcattaatgcatctgtaactcatctccagttctagctgagaagttctgtgtcttaaattcgtttagctatataatcttgcacaagccatttaatctttttgtaaaataggga

SEQ ID NO: 6528 - DNA, 1496 bp, mus musculus; identical to SEQ ID NO: 6527

SEQ ID NO: 6529 - DNA, 1496 bp, mus musculus; identical to SEQ ID NO: 6527

SEQ ID NO: 6530 - DNA, 1496 bp, mus musculus; identical to SEQ ID NO: 6527

SEQ ID NO: 6531 - DNA, 560 bp, mus musculus
atagagtctacacaaaacaatctgaagaatttgtaagaggggccaaggatatcacacaagaggatacttaaagaagagtcggatattatcaaggcagactcctttttcattcttcatgccgtgaatttcataagcttacagagatagtataataaagagtttaagaggtgagttttggaggctgacaggtttcggattttatctctaccacctatcagctgtttgaccttggaaaattactaattaacctctcttaactctaattttctcacctatagaatggatacaaatacgtatctcatagacttgtaaagcttaaatgagctaagtgtataaaatacttatgtagtgcttgatacaacatcaatgttctgcaaataattatgttttattattattgataattgataacatggccatgctaaaaaaagttattaataacagtaaaagcattatataaaattaaaagtaagcaattttatttaaaaatagatatctggttatgccttattttcttgataaaagcatgagctggtgtttttttattatcaagctttact

SEQ ID NO: 6532 - DNA, 560 bp, mus musculus; identical to SEQ ID NO: 6531

SEQ ID NO: 6533 - DNA, 560 bp, mus musculus; identical to SEQ ID NO: 6531

SEQ ID NO: 6534 - DNA, 560 bp, mus musculus; identical to SEQ ID NO: 6531

SEQ ID NO: 6535 - DNA, 560 bp, mus musculus; identical to SEQ ID NO: 6531

SEQ ID NO: 6536 - DNA, 800 bp, mus musculus
cgagaatggttaagttcccagctatgaggctgcaggccaaataatggtctcccctgacatgaattcatgagggtgggggaggcccaggtggaggtggggcagcttcccatagaaaggcctggaaggggcgagagtgaggacacacagacctgcatctgagctccatggataccagccctttaggcaaggacgaggtgagacgaggcggatctcttgtgtaaatcaagctaaaagcaatactgaacaattcaaacaaatcagtaagtccaacaaagttcatttcccatagatgacctatcaaatgcttttattacaataccaaattctttctctgcaaccattggttgccctaagaacatgcttgatcatctactgagcactgcccagagactccaagaacaaactacatgagactttgagtgtttctggagggcctgtgtgtggccagtgagtgaagcaaccagagagatttgggcccatcacaattattgaatatgataaaaacccacagggaaatggtctggggatatcttggactttatggcattttagacataatttgtgatggtctagagtttcctgaggcaatatttttctgcctcatgagccaaaggagtagacattcaagaccctgaactggaattacccctccactgtgaagctcccccatggcccctgcaagcccctcatcagtagtgagaccagtccttgctggggaaggcatttggcacagaagcagctgaaaactgcccctgccttgctctcaacactcacaacatcactgtgcacattctattcag

SEQ ID NO: 6537 - DNA, 1097 bp, mus musculus
catggtaggaactcagagttttttcttttctctaacagtaaccaaagaaggattttaagcagagacatgacagagggcaggggaaaatcagagtttgaggccaggcttcatgatgaccttccaaggtcaatcacagaggtaaagaggggatcctcatgtggaacaaggaggtccacagccagccagagaggcagccctgtcccctgagagagctggctctgggtttgcagtttatttctgggatcctgatgtcagttgttggtctagatccaaatgtggccatatccaaaaaatgtttaatccagtcagggcactttttcaccattatttcacccattcagttaacaactcatgaccactatttaaaaattatatgctagttttgaaagaaattcaaagttaaaaacaagtccacaaatgactaaaataattaaaacagagaataagacaacaaaggtaggactgaaaggcacctgtaaagctttttgagaaaggagctgagaatgtcccgggggcctgaagggcttgaaagaaaatgcagtctgtgtttacacctcaaagatgtgcaagactgtgtgagtgggggtaatattttgggaagagaaagcgcaatgaagatatataggtgaaatatctaagtagcatcaacaaataactgttgttaatgttgtttaaaaaacaattccctggcttcttgtatttggaatggattgtctccgtggaagcagaaactacctctctcttaccttctttcaggttttcctgggatcagctgcactccttagcaaaagtatattggagaatcaactgagaaagtaactgagacatttcaatcatttctaggtgtaaagaaagaccagatcccaggaaaatattacggtcagttcaatgcctaagtataacaccagcatcactggctgggaccctcagaacctactctcctattttcccttcatcttcttctcttctttctttttcttattccttttctttgtttccccccttctttctcttctctcttttcctccctcactttcttgatctctcgctctctttcatgaattcactgaatcattgcagaagtacttgacacatac

SEQ ID NO: 6538 - DNA, 148 bp, mus musculus
aaactttaaatactgatctgtattattattggatatactgacacaaacttaaaggccaaattaaccaaaaattcattaactttgggatctctgtagaagactttaatttttgaagaaagtgatggagctagttctaacagacgttgcc

SEQ ID NO: 6539 - DNA, 1110 bp, mus musculus
ctatctcaagagtcttaactttatcacatctgcaaagacccttttttgccacaacattcagaagttgcaaggattcagaagtggccatctctgtggggcgctattctgcctgccatggagagggagatggaaagatctcgaaagatcatttaagccttgctcaggtatttggaatgtatcctgagtgcagtgaggagtcaccaggggttttaagagtctgtggaggtgggctcgagggtcaggagcagaggcaggatgtctggttaggacaccactgcaacacaggggcccatgcctacaagtaggaggaagccttgtgctcccttttgggattgtggagaggctgcagcttgtggccagtcttaacgtcagaagttattccgagcactccctgagcctcctggtgctttgacttaactcacactagggcctctaaacctcaatgtcaaacattcagggggttgtgttctggcaagaggtgcaactgtttttgtgttctcttccttttgcttggaaaagaatgagagcgcataaaagctctcattattgataattattgattatcaatacaaaatctcacctttttcaggagtatttctgattgaatgagtaacatagtcttaggaaagcatcttggttgggatttcagatataaggaagcagttggagggagtttgggggaaatagattttcctgccctctgtgggcaaagtctaccctgttctttggagttttccaaatcccagctcacacccagacatctgaacctactcagtttgatgaggaaagatgaagaggccagcctaaagctctgatttatatttattctgcaagatatcaatggcctcattttactaaagtctattgcattctttgtatgtcttaaacacagttccacagaattttaatgctttccacttcaacccttaaaacttatctatagttccaaaagtatatatcttaatactgctaggaaggatgaaatatcatggtcttaaatttcttttctcagtctcaaaataaactatcaataataaccataatgaatatttgtattatttttaaaaaagatgtttacagatggaaatttaggaatgccacgaaagaaga

SEQ ID NO: 6540 - DNA, 116 bp, mus musculus
agacatgagaatccagctgtcttctattgatccagacagtaaagagatttgcaaaatgtaaaacaatgctacttttcttctatatttttctgttttgaaaaacagtagtttcccat

SEQ ID NO: 6541 - DNA, 2662 bp, mus musculus
ctgaggagtaatcattgtttcaaataatttatcttttaatgattttagcatttaatctggcaagtaaatatgacctgatttatgctttgctttcttttttttccctctaaatctcacatgaaaatgtatcttgaagtaggtaagtttgaactataccaaaactgaaaaaaaacatagccttaaagacataaggagcaaagtatacattttccattagcatatgtctccctaatcaaaaaatgaaactttattagcatctttaagtttagttggtaatgaagtatttagcacgtggtgtgtgcttggtaaataaatgaatgacaaataagatgtggtcccgtagtcaagatgcagcagtgtagctgtgcgctaactggtatatattgcaaatgtggtgcccagggacaaaacatacttccagcatgagcaccttatggttaacatgataaccatgttagtttcttcttctcctcgtttttataacaagatagtcatttcaaatctgtaatatagctatttagtgatttctgttttcttttgccaaatgttcaactgttttacctacttatgtaaaaagtgctgccacaaaaacgtcaacattgtttcacagtctgttctcacaaagccatttctctctacacatttatttgtgtttttactggcaattgtaggtgaagttagcataatttcttaccaaggcagtttagccaaacaaacaatttaattatctgaagccataaaattatgatatacccagattgttttctccaaatactttttcctatgtaagggaaccagccattcttggagaaatcaccaattccagatctgactcctgcatctagaaataaaaaagataagcctggattatcttgaggatacaggggacttgcagagacttctctagctaaatgtaagacaatttcagcatcaaaaataatgactgtaatgttttgaaacatattaagtaggtaaaaatatgtgatttcaagtgatgttaaccacattggtcatctttggaagtttctagggcaccatcacattctgaataagtagtaaagacatatataattaagtttttgaggggatgatatgtacacattaactttcaggtgatatttgtagaagaattccagctaaaaagtacagaagaaatgatagaattagataatcattttacaaccccaatgagaggctggatctaggcagctataaaaattgcctgctaacatcattaagtgaagattgatggggagctcaataatggctggaccacgctgaccacactagaatctacagacttaatcctaacatacagcattacccagaatggaatatctatcacgcattctgggcaaaataattaagccagcatctaatcaaatcttgtcatttgattatcagtttagaagaaatatgggaaattaaggaatatgtgaaatgacatcacaaggaagtaaccaaccaaatctagaacataggaggtgcaacaggacaaataatctggttattttaacaaacaaatggcataaaagaagacaggggaagggagactcttagaaatgaaaagaaaaccttagagacttatcaaccaaatgcaacatatggaacttatttggatcctgatttaagtaaactaaccatatgatgtttttaagacaaacatgagactgtaaatccaaactgagcattagatgacattgaggaattgttcattttgctaaatgagatggttgtactctggttattttaaaaattgtacttattggactggagaatgatacaaggtatttatggaggaaatgatacaaaatatgagattgctttaaaatactctagtcatcctccccagaacatctgtgggtgaaagataaaacaagattgtcaaaatgctgataattatttaaactggttgattaggatttatatgcctattctctctgcttttgagtataattcaaaatctctagaataaaatgcttataaaatttaaaaggcattaagtaagcaaaagtaaaaatcaattggactacatttatttgtttcatttcccttctggtaaggaaaatatcttaaatccctccctttttgttctctgagaacagctctggatttctgggcctctgctcttggatatcttgatttatcatcctatatatatatatataagacacctagtttaaaaccatactacaaacacccaaccagacaatctgcagtcacatctttataattggctcaagggtaaaagtagcatgaaaactagggactcattccaacaataatgaaagcatttctctgttcactgctgtggcttcaatgactgtgaaatttttccatttctggaaatcacatcagtaagagaagtagagccaagaggctgagagcaggggcacctgaaggggccaagcttctagctctggctttgccactgaaaaagaagttgttctgtaaagggtggaaattcatagtgcccaatgcagaggattattgctaaaaagaagcacatttagcttagagcctgatatagagtaagagagtaaggcatggtgcacatactaatgtaatataatctgtttttactaatttatggtgtttctgaattcatctttatactccttccaagctcattccttccttacaatcaaatttattattctgg

SEQ ID NO: 6542 - DNA, 523 bp, mus musculus
ttttttttttttttgcagtttttacatttatttaaacagaaaacgtgcacacgagctgtctactcattttcttcgctgcgcagcctggcattggggttggtgactctgatggccagttgggcagctgtttccacgatggctttgcggttcttggaggaaacattgtgagcgatctcggcacagtaagatttgttgcacatcagcagcacttccagctccttgatgttgtggaccaggaacttccggaagccactgggcagcatgtgctttgtttttttgttgctcccataaccaatgttgggcatcaagatctggcccttgaatcttctacgaaccctgttgtcagtgcctctgggtttccgccagttacgcttaattttgacatattggtctgactggtgctggatgaacttcttggttctctttttgacgatcttgggcttcacaaggggtctgagggcggccatgatgccgaggaggagatggctgccacctccgtaggcagcgccgaggaagagagcct

SEQ ID NO: 6543 - DNA, 1552 bp, mus musculus
ttttctggaccgctctacagtaactgtggttcccagccagagcggcatgaggaggactgaggcctgactctcttcctgcgtccacgtccccacgtccccacgcccccacacccctgcaacagtaaggccctgctcccacccccgctgcgtcccgcccggttccccgtggcatcgctgcgctgccctgccctggtccggctctgggctacgggcagttgacaggcggcgcccgcgctccgcttcctgccctgattggcccaccgctccccctcaggcttcccctattggctgacagtgctccagccgcgcccgccggttggccgttcagccgttgccctggcgacgccgatgttgtggttccgcggcgcgctgggagtttgggtttggttggctgcagccagccagccgtgtaaaaactccaacgccgggcgccgcgggcagcacccacggagacccgcggggagctggtgagcctgagcgggctggaggacaatgggggcgcccactgtggtcccgggccttgtccactgtgcggagctcgcagtgcgggcagtgcgcgccggggctggagggaggggaccaccttgtcgccgggttgggatgagcacagggcgggatctccaagcctgcccaagtcccgcggccccttggttacctgttgcttatcctctctgtacttgctgtgtccctggcgtggacgtgcctgtactggatacccggcgtgacgtgccccctctgtgtgccccgcacgcacgtgtctctgctgaataccccgcgtgaatgtgcccctgctgtgtacccggagtgcgtacgtccctgctgtgtaccctgtgtggacgtgccctgctgtctacccggcgtgcgtgtgttcctgctgtataccggcgtgatgtgctcccttctgtttacctggcgtggacatgccccctgctgtataccctgcatggaagtgccagcgctaggcgatcgtaaggcgcctgcaggcgtgtcagggcgaggcgtacagaccgacccagagcgggcgcgcggattttgcttttgcagctgcagctcctggcaactggtcaagcaggcagcgtccagcgcacccgcgaacaccaggtccggcagcatctgtcttttcccgcagcgtgcagcgcctgaccatgaggaacacaagcaaggaacttcagggcgccacgcaccgctacgctccctgcggtgagtgcgccctgagcgcgtcccggccagaaagagctgggtgcgtgcactctgcttgctagacacgctgtggacccaacgtcctctatgtgggctggaggggggtgtgaacgatggaggaccaagtgataaaactaacaagtcaaagaaagccacaaactgctcctgtgcctgagtgtgaaatcaagacttaaatatgagtggggggagtcttgtttttctttattttcaacaagagagaaccaaggctacctatcttggttcaatctggagcaacaggatcccttggaaattttctttgtcatagttcaaccctatacaattctcacaactgcgttcctgaatgttgacc

SEQ ID NO: 6544 - DNA, 446 bp, mus musculus
gattatagagtgacttttgtttattgtactctaaatattatcttccttcctataaaatggtttaatgcattattgttgatgtagaggaatattatttgtttttgtatgttgatcttgcattgggaaactcttctggattcatttatatttgctgtgaaataggtacaggggttagtgggggcgagaggaagggtacagtcatggtatgaggtactgtcaagccaaagcacaaaggatatacttatgctgagtctccaaagatgaggaggaatttatatcaataaaatcacaaaagaatgatgctgtgtgctgctgtggcgtggttagggcagagggtgtgaaaagaggtatagtgagatatatgcaaaagatcatggagagtagggccagtaaatcatgctgaggagtgaaaatttatggggtaagcatttattaaagaagttagg

SEQ ID NO: 6545 - DNA, 1113 bp, mus musculus
tcactataaaagatactccattatgcattttcaaattccattttatttttcacttgtatttgtaaatgggcacgtgttataaattctttctcttttcctttcggtggaagaaaatttgagaagataacagggcataggatgtctgacttctctcatacaagatgtagtaattaaactccattcctcttcctcagatgcaatttaggcacatttccaaagaaaagagaaatagatttgattggatggagtagttattaatgaaccaatcagtttacattcatgaaatgtgaagaagaggaaatatttcctattatgcttcttgattcagctgtaactgctgggcaacacttcctgcttggcttttctttgaccctaagtatgtgcattgaaacacccagtggtctccaagttggagattcttaagtttagccttacagcataatgagcacataagcactcccagtgtctctggatctgatgttcccatgacacacaatactgtttgtccagtagcagggctgctcatatttcaagtatgagctgtgatagcaccttccaaataaggaaaaggataggcaggctgtgcgttgtgaaggcaggtgttgagtttcaatccataaggaagaacttttgggatccctggtgtcaagtatgccttggcatccttcccttccggaaactccagatacacagggcccatgcagccgttgcatgttccattagcgaatgttttcctagcatggagagccccgcttctgagcgacatgtgtggaatgtatactgaactcttgtttacattttttgtgtttaaatcttgcttgctgtacgtatggaccatattgaattaaaagagtattacatgaacaaattgagctgcaatggcctgtaaattgtgaaaaggcaaatagaactgaagggtgtggaccttgtttactggcagaagcaatggagtttgaggtcagaatggtttgacacacagcttgtaattttcaggaatggaaactaaggcacttgcttaaaacttctgatgtgatttttcttaactataaagtagggataaacaataatgaataccttatataattgttatgaagcagcaaagttttatagact

SEQ ID NO: 6546 - DNA, 292 bp, mus musculus
atatgaagttgcagaaacatctagaatttattatttataaaatgaaagcaaaactcctaagtctggtaagacactgcttatgccaaatgatgcaagcttgaagggtacatgacaagaataaaaatagcactgaaactgatcaagacatttgatttgatccttttctactccaaattcagcttaaacaaatcagcttgacctaatctttgcacaaaatatgactgcactttattattattactatgaaaatgcccctgataccctaaaaatcactatataagtgttgccattt

SEQ ID NO: 6547 - DNA, 321 bp, mus musculus
ccttgccttcgtcttgtcttggccaaccttcaggcccagggtgcactcaatagtcctgcaatccgtttttagggggtcaggccatgctggtaccagaagttggatagggccaatttgtaaggaattgtgagtcctgcataccaaaatgatttctagaagggaaattggaggcttggtgggccaggtccttggagccaaggcatatagcttgaagcaccagacctagagcagggaaccctcttgccacatttctaaagacagtactgatcctaatgaccaaaacacaaacaaaaacacaagtttataaggataatggaataa

SEQ ID NO: 6548 - DNA, 322 bp, mus musculus
cgatttcatcctctttctatcatgtcataaaaattctgctccacacacataaaatattttccatctgtttgctaaaaactccaaaattccatacttttcacaacttgttacctttgccttgaattttccccatatgcctagcacaatagtactcaacaatccaaaattcacataaatacagcaatatttggaagcttattctcagtcatgtattttgttttagggcctccatgcctaccttcctcatgcacataagcaatatatgttgggcacatttaaactgtaggacttactgttatattttgtgatgtaattttttgct

SEQ ID NO: 6549 - DNA, 793 bp, mus musculus
agagacaggagagagggtggtgaggtggggaaggagagggagaaaggaggagatgaggaaaaggaaaatagcgggaggaggggagaggggaagggggtccgggcgagggagacctagttgagcgagaggcggcgcccctgcgagccagcaagagaatctggggccaggagcgcggggcgggacggcaggcgggatggtggccggaacaaaggcgcgaaaattcgtcccggagcacttcaccttcactcacgccggccgccccacccctggcgcccgcccgcctcacccctggcgcccccccgcctgcccgcccgcccacccacctccgggcgcgcgtccgcacgggtcaacccgcgaaaaagacccggcggctcccggccccgcctccagagcgcagcatccgcgcggcagggacagcgccgggacagcgccgggacagccccgggacagccccggggaaagcgcggggacggcgtggggtatgccagggacagcgtggggtatgccagggacagcgtgggggcggtgcggtctgggcctggacaggggtggccacgcccctggtcgctcccctgtccccaggtcaccctgacggccctgcccggagccgcgaaggctatgctcgcgtgggagcgggtggtcgggcgggcctggcgcgggactgagcgttcgctccttgcccgcaggtggagctcttgcccgacagagacccggacagcgacgggaccaagatcagcgtgagtgcggggcgcgccaagggccgcgggcccaggctcgggacgcacagcccttc

SEQ ID NO: 6550 - DNA, 1301 bp, mus musculus
ttgaacatccttaattttagtaagattctcaaagtgttctctcattgaatactaagaaacaaagttagagattctgttttattttaaatcttgtggaggataagaattttgtattttcaacattttctcctttccctttagtaattcaaggttatcaaggactctgatttttcaaaaaaaaatctttcagaaaaaatattttgaattagttacacttcaagtcccccctttcctttaatctgttgtcaaaaatacagatttatacctgtccagttagggcttacatgtagtagaaatataaacatgtcctgagaagaaaatatgaatagatcctgttcagattttcatagtgctcatgtggtttcttcttggtctgagtgagagaactacagacaagtaaatgaaggcaggttaacatttctattcagatgtctgaaggggctttgggggcatttttctagagattttctctccatggcagcttgagtgtggtacagataaagattccacactggtgtgcttcatgacactatttatactggaggtcctggagtctgaatcctgccagccacacacaggagagagccagagagtcagcctccaacgccctcagtgccctgtaagggccttccagggactgccttaggcttattcttttctcgtagcaggggctagctccccagctcgctgacttcagtttgactccattgacggtaaatgtagcagaaattatttcactttcttaaataagatacctattcctaatttccaacattgatgaagattttcggcatgtgaaggaatctcgccagtcatttgaatgagtgagtaggaggggacaggacccagtcacactttccgtcttgaaactggcttgcccctttgttatcccgtcatggatcccgtaccatgcaaactgcatttattcactaaggattccactaacatgggaagaaaagtatgcattccctgtcactgtggaggactattagacagttctttttttaagttcatatttcttcaattgaatttgacctctaagcaggaagactctcataaaactggtttttctcaccgctgcttgaagtagtagctgtctgagttaggatttgttcaagtaatggaatcttgactgtcttttatgttatctttagtacacaggctgaaggctttatctttatcagtgtcatgattctaacaacaaaatagctctcgctaacatatagtgacaggtaaatcatttaaaaacaattgtacaaaaagtttcttccagttgtgattatctttcttaatagtaattc

SEQ ID NO: 6551 - DNA, 1104 bp, mus musculus
cttctttctacctaaaatgcagtggtgataactggtgactgatttgtaagcaatctcaatgtaatgataaataaccttttcctttctctactagatgttggttatctttctgaagtagactgtccatggcctgaacattttccgaaaatcattttgagcaaaatatctgtttaataacaagataaccacatcaagatggttggaaagctgaagcagaacttactattggcatgtctggtgattagttctgtgactgtgttttacctgggccagcatgccatggaatgccatcaccggatagaggaacgtagccagccagtcaaattggagagcacaaggaccactgtgagaactggcctggacctcaaagccaacaaaacctttgcctatcacaaagatatgcctttaatatttattggaggtgtgcctcggagtggaaccacactcatgagggccatgctggacgcacatcctgacattcgctgtggagaggaaaccagggtcattccccgaatcctggccctgaagcagatgtggtcacggtcaagtaaagagaagatccgcctggatgaggctggtgttactgatgaagtgctggattctgccatgcaagccttcttactagaaattatcgttaagcatggggagccagccccttatttatgtaataaagatccttttgccctgaaatctttaacttacctttctaggttattccccaatgccaaatttctcctgatggtccgagatggccgggcatcagtacattcaatgatttctcgaaaagttactatagctggatttgatctgaacagctatagggactgtttgacaaagtggaatcgtgctatagagaccatgtataaccagtgtatggaggttggttataaaaagtgcatgttggttcactatgaacaacttgtcttacatcctgaacggtggatgagaacactcttaaagttcctccagattccatggaaccactcagtattgcaccatgaagagatgattgggaaagctgggggagtgtctctgtcaaagtgagtagaagatacgttttttattttgactctatatttagctaataatgatctatacatatgt

SEQ ID NO: 6552 - DNA, 1038 bp, mus musculus
gtctacttcttagggctgacttgctgagtcaggacctcagcctcctcatctgtaaagtggtggggttggacccagtgaccctgagggtccatttgagctcaaatgtcctatgagtctatgattttttgacttcagagtccagaaatctcttggatcatgtcccctaaggagatgccagggttcctttccagcttgcaaacctgtttttcagccacagatgggcctccagggcagcagggaagccgggagccaagaggctgccttgtgcgagtgagcgatctgtgcaaggatgatttgtgagggcagagcggagggcagcagggctggggtttcccggggctgctggcgcactccgacatctgctatttttcactccagtgagactgatttgctccagatgggcccctgcagactgtttttggctgtgctgggaagtgtggcggctggctgtgtttcatctctgagccctctaagagacagcagagcacgtgttaactgcttcagctaaaaggccagcagattctacaagagggccccagttccaaatgatcccttctgagcagatggatttttatttccctgaggcattactctcacttcaaagaaaggtctgctctggatctcatggaggaatacctggtttggtgggccttagttaggaaaaatctttcaactggagggaagactgttttattgggttaagtcagatctttgggtcagtgtctgtggttcttctccagctaacagaactttgactttactgaaggggaccctaccacctttcgtagactcaagctttactagcaagaccactttaggaagcttcctctataagccttagctgactgagcccttcccttgggggccaaatctggtgactttctgagtctttatttcacaaagctgcttgacagaggataaagacttccttggccaggagtcaggaaacttggtttggaagcatgaacctgttgcttcctggctgagtgatcttggatgggttatttgactctccagcacctccatttcatttgtaac

SEQ ID NO: 6553 - DNA, 715 bp, mus musculus
ctcatatcctggggctgtaacatcccttcctccttttttccttgaggacccagcctccctggcaacttgctttcaattcctagaatttccacgtgggaagcagaactaacctctagactcctgctgcgggagatagagaggtcacatgcggagcgggggagttctttgcaagtatctccaaggagacatttaaaggccatcccctaattgcagcgtgaagcttgcagcaggtggaattcctgactttcgccagaggatggcactgtgggtgtttccaagaaggagctgagcttttttttttttttttttttttttgaaaaagccatttccaaatggcagtaacagctgcacttcaaaccctgcagggaacattagaaaatgttaacccccggttgggtggggaagaaggactggaggcggacatggggatcgtgaccgcggaggccagccccggaggaagggcaggagctagagaagtgccaaaaaggagagagaaaaggaaactgcagggcaacctagctgtggctggggactagcgtccttctctggtggaggttgagcaaggacaagagccctagctggtggggatttgttttccagagtcgaattcaacctgggaaaagtagcagggtgcagcggggtgcagcgtatacatgtgtcatttgccaactttctccgtctgtacccactttggaccggtcatttaagagctgac

SEQ ID NO: 6554 - DNA, 1170 bp, mus musculus
ctgttaccttggaggttgctgcaggcccgtggctttccacaaaattctgcacccagcctgggcctaggagcgaggacttattcccagggcgactgctcgtattcgcgcacggcgctgtatgatctgctcggcgtcccctccacagccacgcaggcccaaatcaaggcggcttactaccgtcagtgctttctctaccacccggaccgcaactccgggagcgcggaggccgccgagcgcttcacgcgcatctcccaggcctacgtggtgctgggcagtgccaccctccgtcgcaagtatgatcgcggcctactcagcgacgaggacctgcgcggacctggcgtccggccctccaggacgcccgcacccgaccccggctcgccgcgtaccccgccgcccacctctcggacccacgacggttctcgggcctcccccggcgccaaccgcacgatgttcaactttgacgccttctaccaggcccactacggggaacaactggagcgggaacggcgcctgagggcccggcgggaggcccttcgcaaacggcaggagtatcggtccatgaaaggcctccgctgggaggatacccgagacacggctgccattttcctcatcttttcaatcttcatcatcatcggcttttatatttaatcggagagagaagggaaggggagtgtccccagccaaccccccagaaacggccttttttcctgcctctgaacccttggccattgatagtctacctttgctgggatccgaaggaactgtactccccctgccctccccgacccgcccagcttagccgatgacctgcacatcgctccactgtggtccagaaaaggaggcctttcgatgtctgagaaagaggccccacgctgtagagtcccgaaagcccaggagtgaagggggttcctggagtctctagggtgcttcttccagagtctgtcttcttgcttccagatgtggtcaacttctggaacactcgctgtagctttattgtttagccccaagcaagatttatctcctcctgccccgcatgtgtatggtgggcctctgtaaccttgaaatgtgcaatgtgaccaattgttgactaccaaaagaaaaggtctggggttgtacgaaacttgtctttctgtgacttccccaagccgcaggtgagacctggtccagggt

SEQ ID NO: 6555 - DNA, 337 bp, mus musculus
catggtgttttggactctctcactatttttttttttattctttatcactgaagaaagaatgaggcctatagtagtatatagaacaccttattaaaatgaatcatttacacacatcttttatctaaaaacaacattcaataagtgtgaattgaatcaaacctgttgggctgggataaaagatgtaaaatccaaccacgtgattctctcagataaatgccacaatacacattcctgaatatgttggatttagtaatatggtgcatttagtaaaagtgttttgttttttcctaataaggcctttttgcttgaggaaacaaaatgcagaaatttttgttgt

SEQ ID NO: 6556 - DNA, 1443 bp, mus musculus
ttttttaatcttgaggaagggctataaaacagcaggcaagggttctcataggattaacatttctattttaactttgccacctactgcttacatccaggctgtttgttcaaagcagactgtgtaacacagtcaagagatttttgccagttttccttttgcttctggagttatgaaaatatttaagtgtctaggtcaggttcagagacattctgtaaaatttatatttttagcattatacatgaatcagaatgacgtggtttttgatgaaagagtgagagtattcttatgaatgggtgttagaggtttaagatgatttaatgctattatgattttttagtgtagggtcaatacatgtgttctgctaacattcttatatagtgtatactgtttcatgcttcttattagcttccgtttaactggaggagtactaagttggaacattggttccaggaagtcctctgaaagtgtggagttttgaagtgtgtgtcacatatgtgaataaagctttaaaatgcttgccttgtagcattagaggataactgccttcatagtaactaaccagttctggcagttgcatctcttggaatggcacacttaatgaactgcagagccaggaattttgatttttaaagaactccttaaaataccccatgtaaaatttgatagctggagcagtgcatgtgagttcagaaacgatgactgtcagctagaagttgtgtgtgaatgtcactctgaggatgtctagacgtctcctttgctttggcgtaaggaaaaaaccctttgtaagttactgatttttaataacatcgtgggtcactgctttccaaagcagaatgtggaaacttctgagagtttaccatagattctacagggattttcacagcaggaaatactaatggaacagagtggaacgatggctgaattgatgggagatagatgataagtcacggtgtcatgactacttgatcatgtagaagagtagcaaagagaggtatgtgaagagacagggaaagaaaagaacatagccctgagtgaatgctaatctagaggcaaatgttgtcatttacattttactctaaaaagagaacttattaaaaataaaaatacagctcattgctgaaaaaatttgtttcaaaaagcagcattatttttctttaagctactcttcagagacctgttattttaaggacaacgtaaaatctcatgtaatgattgtataaagatatagacatataatgtgtcatatatatgttaatatatatgataattggttctagtctgctcaaattacccatttactatttagtattctggcttaggcaaataaatatatatttacagatttctaaaatattttattactattataatgatgctaattaaatttatctgcagtgcttatctttttccagtaatgctaaataaattatttcatccaaccct

SEQ ID NO: 6557 - DNA, 769 bp, mus musculus
aggaccatttttaatgtgacttattagtaacttcattatgtgtttgcgaatgtctacttgtgtgatataattttgcctctcccctatgttgtagatgattggttcacaaattgaggcgtcaaaaataagaacacattcaaaaggttagcataaatcccctcgctagtgatagcatgagaaagtgtgggtatgttacatgtgaggtagtggtgggacactactagaagacagacaacttaaatcttattcccctcttatatgaatttattgtgtgattttctgtgtgacaaagtttcaggacctctatcttttcatttcctcattcacaatagaagatagtatctattttatttaacatgtaagatgttgaggggatgaaattggattgtaatatatatgagatagtgtgtggaaaaaaatattgtgtaactataagcaaccatgagtaacagtaatgagtagtaatgtttatgtcatttaactgtactttattctttatatttagtttttaattgacatctttagattttaggtaagctactaattgcacacatataacttgtgctaatgtgttttatggtttgatgcctttgtatctgattctttttaatatataacaaagcaactaacatagtgaccaacacatagtgaagtactgaatatatatttgaatacactttgtaagttacttataggttatagcatattgaaattaagctctttcaagactctctgtcctatctttgcaaatgcttatacttaatgtgtg

SEQ ID NO: 6558 - DNA, 1045 bp, mus musculus
ctcctaatgggaaaatgctatcacttctcttaaattaaaaatttttattaactgttaaaatgtgcctcaacacataatctaaagttttacagacacggagtttcagagcttctatttcttttaaatatgtatattttacactgccttttttttaacctgctagatcagagtggatgatcatatcatcaggacagatcaaggccttctgctacgtagtctacaacagaaggattcaggcaattacctctgccatgcggtggaacatgggttcatacaaactcttcttaaggtaaccctggaagtcattgacacagagcatttggaagaacttcttcataaagatgatgatggagatggctctaagaccaaagaaatgtccaatagcatgacacctagccagaaggtctggtacagagacttcatgcagctcatcaaccaccccaatctcaacacaatggatgagttctgtgaacaagtttggaaaagggaccgaaaacaacgtcggcaaaggccaggacataccccagggaacagtaacaaatggaagcacttacaagaaaataagaaaggtagaaacaggaggacccacgaatttgagagggcacccaggagtgtctgagctgcattacctctagaaacctcaaacaagtagaaacttgcctagacaataactggaaaaacaaatgcaatatacatgaacttttttcatggcattatgtggatgtttacaatggtgggaaattcagctgagttccaccaattataaattaaatccatgagtaactttcctaataggctttttttcctaataccaccacctaacagagaacacaggtgaatgcagatgttcactttagcagacttaatgtttcctatgagatttcactgtacaggtttgtctttcttctttgcctgagaaataaaaatgtcatttgccatattgccatctaaaggagaaaaactgcatcagcaaagccattgtattgaactaaaagtttaaaatgaactgcatggatttactaagctgatgaatattccaaaacgt

SEQ ID NO: 6559 - DNA, 1480 bp, mus musculus
tcaggggcaactcggaggacaagccgcactgccaatgcatcctctaatgagcacttgaactcctagcatgccctaggaaacaggtggccatcaaaacaaacctccattttgcataaaattaactttttatttcactgtgtaaatgttttgtgagactatgtattcaacaatttttgacaaagtaagttttatgattatttgacaattttttttattttgaataaaacagttactggaattcacaaataccaatgtttttatctgtagattctgacctatttttcagaggaaagaaagcataaatttaatatctgcttatattttaggacactttattttttattttttattttttgagatggagtttcactcttgttgcccaggctggagtgcaatggcgcaatctcggctcaccacaacctccgcctcctaggttcaagcaattctcctgcctcagcctcccgagtagctgagattacaggcatgcaccaccacacccagctgatttttttgtatttttagtagagacggggtttctccatgttggtcaggctagtctcgaactcccaacctcaggtgatccacccacctcagcctcccaaagtgctgggattacaggcgtgagccaccgcacccagccaggacactttaatacaaaaaacaataagttattattacgtatttgcttttgtttttccattgcttagtggttttgtttgtttggtttttgaccatgtttattgtcaatcagtttatctttgactcatgtatagaattttttggccagaaaattatatgaaacctttaagaagcattttagagcatagacaaagatgaaaaagattttcaagtcatccaacttacatgaggttgtaatatcaccaataaaaatactggacagggccaggtacggtggctcacacctgtaatcccagcaatttgggaggctgaggcaggtggatcacaaggtcaggagatcgagactatcctggccaatatggtgaaaccctgtctctactagaatacaaaaaactagcgaggcgtggtggcacacacctgtagtcccagctactcaggaggctcaggcatgggaatcgcttgcatctgtgaggcggaggttgtagtgagctgagatggcaccactgcactccagcctggcgacagagcaagactccgtctcaaaaaaaaaaaaaaaaaaaaaaaacttgaccaaaagtaacactagaagcaaatatatttatgaatatccaaatattccaaataaaattatacaatctatcctattaaagaattttcttagctcagttcattaacttaatatttaaaatgaaatatgtgcttttccaagtacagtgttaaaaattagataaaatcattgtttttctgatcaatttaaatatgttagctaggagaagaagaaaatgttcttaacatagtgaagaaagggttgaatcccaattaaagttcttaatggataaaa

SEQ ID NO: 6560 - DNA, 985 bp, mus musculus
ttattccttaaatttttttcctggatactggacaatcaattatttaagatttacgtgctttggatgtgttggttccagaattgctgacaatgctagattggagaggcaataaatgctaagtcgcatacaaaagatttgaatgaagctgttatggttatcaacatcatgtctgaaaatgacctttttgatttgtttttaaatttagatagttgtatgatacaaggaaatgagatgactaatttatatttaattttatatttaaaggaaatttgagcatttacattctcttttaaagtaaatgctatgtgtatctgtctctgagcaggtctttgcttcaaacttttggctgacactagttggtaaaaacagcaaagggactacctactaaaggaatgttcaatctagttctcctgacagtcaaaggattcgattatcattttctaagtatcacattctttttgttcaatcactatgattcaggaacaatcttcaaagttgactttgaaatactgaaacaaagacaaaataggaaacacagccctaaatctgtcctagttaacagtattaccatcatcagaatctcctccccgaattttgggatgagatcagacaaggctagggagatggccaaatgtagaatggtaaaatgctttgtctcctagaactcatcaaaatgaaaagaaaacttgaccttcagtttcagtgtccctttctgtaaagagtattagcactttaaatagcatactgaattccagttaggaattgtgtcttatgaactgaatgatttttcttttcaaaggtattgataacaagggtcatgaaggaggagaatgtgcttattttttcaactcactgtcaaatctcttccccattttctagattatgttcctttttttgattgatggacctattatatttctgggaataaaagccaaacacacacatcatacagaggtttgctttaggcacacaaattcaagttctg

SEQ ID NO: 6561 - DNA, 762 bp, mus musculus
gtgcactgaacccatgcccctgttatcctaactacaccccacctataaatgcctattgacttactgatttatccaatttggattcacaatagacaattcttgacaatggatgacttaacgattactttaaatgtgctgagagattacttaaaaacgtttggaatatggcttctgccataaattcactcagattattttgaaacattgattttaaccttactaatttgttaactaagcagaagaaaaatactatccccaatggcatagcatgaggtaggtttagaagtagaaacaggacacatcccatgtacatgacatagtttcctgtagatcgtctcatatagcttaaaatcatgaagaaagtgagataattacactatctacaaatcttgaaataatttctaactctctcagtgacaaatttctctctttcccttaaattccagatgctactcaatatgggtaattattggaatactttcttttgcccttaattaagttttctacttttagatacccatttaaaatttagtgagtttaaataatttgaaattatgacaacactaaatttgtatgtaaagataaattagagattgagtacacctgttatgaccaacaccacatctgtgggtgatgttctgagtatttgtaattacaaggcctaagtcatgatttcatacttaaaaatagaagatgtttaaaaaatgaaaatggcagatcagtaaagccatgtttttaatcgatattttttatttaacattt

SEQ ID NO: 6562 - DNA, 129 bp, mus musculus
agattaatgttgggaaccttcccaaaatctaagttctcttatgccagccaaaggccaatcttgtaagcaggcctttcaaaggagaccagtcagatctgggtgttaactcttttctatacaccctatatt

SEQ ID NO: 6563 - DNA, 5619 bp, mus musculus
gctgaggcacaggcaggtcatggctctggactttagagctgataggtcttggagctgggattcaagctcagacagttgtgctccaaagttgtttctctttctgttataaaacaaagagttcctctgatggcagaatgcagtctgatatcacatgatctgtatcatagtggaaatgagaggtcagagcagggctgactgccataactaacatttaggacagggatatatgtgtgatgaacattctgagattcccaggagttagggcagggactcacacagatcagagtggctctggttgtcagtaggcccagctacctcaccaagtgaatgatgaagaaggccccagatgttggtcattgccactaatgctttgtcctttacctctctgctatctcttcagactctttatcccatttttggggggttccctctggaaaatcttttgggccagctgtagtacctccccagccagtgtctgtaggggacaaacctcatgcgaggcatcctatcaggctcccggaggcctatttctggaggtacatcaggatggtgctgacccacagggttctattgtggtctggctcaagtaacgttggcccctgccagggaatacattctgtgccaatgacttcctttaatattgtactttgggggtctcccccatggtgttgactcttcccctgagaagatggaaaaatctaggacaaaatataaaaaaaggagaaagcattctagttaacagtgtcattatttaatgaggtatttgaaatgtcccagaagggagtcttagattgcttttaggaagaagatgatacaatctgatcctaagctaattcatgcaaaccacaggttagcacctttgaagtgacacatgagatttaagactcttggagttctgtcagaggggccaaaggaaggggagcagatggaaatgaattatgtgtggatatggcagattttctgagcaaaggtcagggatgtgatacattttctaattcaggggtggctcatgagagggacagaagtaggtagggaaagtagtggatctgcaccaaccagtccacataatattgaaaatcaacttccacctgaacacacttctcaagctgctatttagtacttcttatataacaagtatcattctaacagctctaaatacttgatctaatttaatgctgtcaataaccctgttgaattatccctgttggatagataatgaaacccaagattcagagagatcaagtaacttgctcacagtcacacagcaacagcctcctaaccaatctccctgcttcaacttcttccattcttatccaactatagtctacattcttacagaagtcattctgacctctcataaataaaaatctaataatgccaacccttacttaaaactcccaaatggcttctgatcatacttggaacaaaatctaatcttttatcatggattaccaaactctgtatgatctaactcctgatgacctttatggccttatctggcatcacagtctcttatgcctgtgtgccctggcccagtgggcattcttgcaattcctggaatgttttaagctgattgcctctgctcttctcttggctgactttacgttattcatatcccaaaattattacctcttcagagaggccattcctgacacctgaattaattcatgatacttcgcagcccttgatgtttctttcctatttctttgtttattggttaatggtgtaccatttgtttattgattaatggtgtatgtgacattagagcccacacttattctgactgcatgatgtcaaaacctgctcataacctctaccctgcctgtgatctgtgctctgcagtttttcagcacattattgtggactagtgagcatttttataaaatacaggtgacccttgaacagcacgggtttgaactgagtgggtccacttatatgtaggtttttttcaataaatgtattggaaaattttttgaagacttgcaacaatttgaaaaaactcacaagccatgtagcctagaaatatcaaaaaattaagaaaaagttaagtatgttataaatgcataaaatatatgtagttactcgtcttattatttactaccataagatatacacaaacctataattaaaaaaagttaaaagtgatcaaattttatgcacacaaacacttacagaccatataagtcaccattcacagtcaagacacatgtcaacaactgtaaagatacagtgttacatgttttggctctgtgtcctcatccaaatctcaccttgaatggtaataatcttcacatgttatgggagggtcccagtgggaggtaaatgaatcctgggagtgggtttttcccatgctattctcatgatagtgaataagtctcatgagatctgatgattttataaaggggagttcccctgcatatgctgtcttgcctgctgccatgtgagatgtccctctgctcttccttcatcttccgccatgattgtgaggcctccccagctatgtggaactgtgagtccattaaacctctttcctttataaattacccaatcttgggcatgtctttattagcagcatgagaacagactaatacatagtgttaaatcataaaataaaaccatagtatgtactgtactaccccagtaattttgtagccacttcctgttgctactgcagtgagttcaagtgttgtacctgcttaaaatgcagtgacactaacaatctcagcaggagcagttcatctctccagtaaattgcatattgcaataaaaagtgatctctcatgattcttgcgtattttaaaaatcatgtttagtgcaataccataaacattaaataacaccagggaacccatatcaagtgacactagtgttgctggaagtgctcccaacaagcagagaaaagtcatgacattacaggaaaaagttgaactgcttgatacatactatagatgtgaggtctgcagctgcagttagttgcctgccatttcaagataaatgaatctagcataagaaccattgtaaaagaaaacaaaacaaaacaaaaacaaaattcgtaaaagccatcactgcagctacaacagcaggtgcaaaaaccttgcactttttgtacaatacatttatctcatattgaaaatgcagctttcacatgggtgcaggattgctgtgagaaaggcatacctatagactctaatatgattagaggaaaagcaaagtcaattcaaattaaaagtaagattaaggatcagagctgggtcatttaatgccagcaaaggatggtttgataattttagaaagatatttggctttaaaaaaatgtcaagatagcaggagaaggagcttctgccaatcaagaggcagcagaaatgttcctagatgctattaaaaaaaatcattgagaagaaaggatatctgcctgaaaaggtttttaatgcagtcgaaagtgccctattttagaaaaaaaaaatgccacaaaggacttttattaataaggaagagaagcaagtccaaggatttatgtcagaaaggagtaggctaactctactgttttgtataaatgcaatccggtttaggatgagtccatatctatagatatgctcttatgtgtaaagctgttcatccctgatccttgaagggaaaagataagcctcagctgccagtattttggttgtacaacaagaaggcatggacaatgagagcactttttccggattggttacattgatgctttctttgttcttgaagtcagaaagtacttagacagtaacggactgccttttaaagttcttttgatattagacaatgctcctggccacccagaacccatgagtttaacatcaaaggtattgaagtggtctgcttgcctcctaaacatgtctctaattcagcctttagatgagggggttataagaatctttttttttttaataaattttttgtagacatgaggtctcactgtgttgcctgggctggtctcgaactcctgagctcaagcgatcctcctgccttagtctcccaaagtgctaggattacaggtgggagccactgtgcctcgccactcataaggatttttaaggctcatcacaaagcacatggtactctacagaaaggattgttaatgctatggtagagagccaccagagagaagaacatcatgcaagtctgtaatcctaaaacgataaatttctgctggagaaaactgtgtccagatgtacatgatttcacaggatttatgacagagccaatcaaggaaaccacaaaaagaaataggagatatgaaaaaaaaaaaaaggtggtgggtgaaggctttcaaggtatagattttggagaacctcaagagcaaataaacatcacaccagaggaattaacagaagatgacttgataaagatgagtgtttccaaaccactgccaaacaatgcggaagaagatataggagaagcagtgccagaaaactaactttacgcaatctggcaaaagagtttcggttattcaggactgcttttaacttcttttatgacatggacccttctgtgatacaggcactgaaactgaagcaaacagtggaggaaggattggtaccatattgaaacatttttagagaaataaaaaaggaaaaagtcagacagagaccacaatgcatgtcagtcacaccaggtgtgcctgcctttcccgcctccccttccacttcctctgcctcttcccctctgccacccctgagacagcaagaccaatccctcttcttcctccttttccttagcctattcaatataaagatgatgaagataaagacctttaaatgatccacttccgcttaatgaatagtaaatatattttctcttccttgtgattttcttaataacattttcttccctctagcttactttattataaaaatacaaatatgtattacatataacatacaaaatacatgttaattgactgtttatgttattggtaagacttctggttgacagcaggctattagtagttaagtttctggggagtcagaagttatatgtgaattttcaactgcacgaggggtcagtctccctaacccccatgttgtccaaggctccattgtagatgcttttttacttttcagaaataaaagccataaacttgtttatttgagggtaggaagagtaatgtcaggaggctattttttctttctagaaacatacatttttatttcttcaaaattatttagtacacaacagtttccgagggaaactcgatgctatttgttcttggattagaaattctctctcctgatggtgattactgagtctccatttaaaactcttggaataaacaaagctgtgaggatgcggggtgctaattaagccttttcctaattgcttcattgtgcgtcaagatgaagacagtcctgaagttattatactgttttactcaccacttttaggtctgtgactcaaactcccacttttattcggctatatacacactaaaaagcaatgacatttacaaaccaatctcagaccagacactcctgccttagaacatggtgcacagaaaatatttcttaaaaccattacactgaaatatacagtaaaatctgtttttcagcagacattgttatagtctgttgaattttcttacta

SEQ ID NO: 6564 - DNA, 120 bp, mus musculus
tgaagtttgaaatgaaattggaaattaatatttttacctttactcacatgcacattcagtcttcatttctctccattgacttagcatttctcttcatttaggaaaaaaaatagatttgtg

SEQ ID NO: 6565 - DNA, 120 bp, mus musculus; identical to SEQ ID NO: 6564

SEQ ID NO: 6566 - DNA, 134 bp, mus musculus
aaatctgagatggcattgtcacttttacaactctatgatgcttaggaatttcctttgtactctggtaatttcttcatggctcttatctcccctacaatatattgtgagctagtgaaagggagagcttctacctt

SEQ ID NO: 6567 - DNA, 788 bp, mus musculus
gcacaggtcccacctgatacgtagcaaggtgcccaattaatgtttattgaaatgaatgattgcataatctgcccaaattccacagattactggctgccactttcatacttttccttaaataattacttgagaggaattgaatatgggagaggaaaatgaaaagaggagccaaagggtttgggagaattaaggcacccttgatagaatcagtgacactgggaaaaaaaaaaacaaaacaaacaaacaaaaaaaaacttggttcaggaggaagaggaagataaagaacatcagagctctgaaagttccctcccttgaggaacaaagctccctgtgataattaatagcagctacagaattttccatcagaacagcttgtatcttttggcccacaccattcaatggctgcccataaacctgtcctatctgttcaaaaatcagagtcaaacctcagctgtgctgtgctgtgctgtggttctgtttgcctgagctgtgaatcttaagatgttggtctgaactttacacacacctgttctctcatagcttctctgaaccctaagttttaacttgtgtgtactctacttttactagtgccctcctgccacccttggccgtgagctctctctctgaccctgctccagtgtatgcctcagagccttgtaatatccagcctagtccatctacttggacttcagatcacacctgtatcactagttctcctggataccttagcatctgaggtaggcagcctctaagatggccccaatgaactgcctcctaggatctatacc

SEQ ID NO: 6568 - DNA, 4882 bp, mus musculus
aagcctgaggggaaaaaaataagttgaaatatactgtttgccataaacaagaaaattctgtagcccaaaacaacagtatggaagagctcagtggatcaataaatatttgtgtgtaaggcattatgcttggtactgaaagaaattcaaagatgattcctaccctcaaggagtagacagtctggtcagggacatagacacttacataattaactactataatacaatgtaggaagggtttaataccagaagggaggatgacaataacagccagcattactacactttctatgtgcttgatactgttcgaattgccttacctgagtgaatttatttaataaataagcttgcgaggtggatactaatactagctcctttttacagatgacaaaatggaaagagagagtggttaggtcacacaactcgtacatgacagtgagccactgagcaaattacttttgactgctgcaggatgcaagagggcctcctgggaaagttggcatttgtgctggatctagaagaataggtagctcttgaatttgtagaaggttgagggagagcattccaagtagaggaaaaaaacacaaagtctgggagatggggacttgtgaagcacatggcaaatgtattacccaaaatcctttcactgattttaattcagagagtggagtgtattttaaagaaaacccttcacaaaagaaagcaggaaagatcaaaaattgacatcctaacatcacaattaaaagaactagagaagcaagaactagaaaagaactagaaaagcaagagcaaacacattcaaaagctagcagaaagcaagaaataactaagatcagagcaaaactgaaggaaatagagacataaaaaatccttcaaaaaatcaatgaatccaggagctggttttttgaaaagatcaacaaaattgatagacgtctagcaagacgaataaagaagaaaagagagaagaatcaaatagaagcaataaaaaatgataaaggggatatcaccaccgatcccacagaaatacaaactaccatcagagaatactataaacacctctatgcaaataaactagaaaatctggaagaaatggataaattcctcgacccatacactctcccaagaataagccaggaagaagttgaatctctgaatagaccaataacaggctctgaaattgaggcaataattaatagcttaccaaccaaaaaaagtccagcaccagacggattcacagccgaattctaccagaggtacaaggagaagctggtaccatttcttctgaaaatattccaatcaatagaaaaagagggaatcctccctaactcattttatgaggccagcatcatcctgataccaaagcctggcagagacacaacaaaaaaacagaattttagaacaatatccctgatgaacatcgacgcaaaaatcctgaataaaatactggcaaaccgaacccagcagaacatcaaaaagcttatccaccatgatcaagtgggcttcatccctgggatgcaaggctggttcaatatacacaaatcaataaatgtaacccagcatataaacaaaaccaacgacaacaaccacatgattgtctcaatacatacagaaaaggcctttgacaaaatttaacagcccttcatgctaaaaactctcaataaattaggtattaatgggacatatctcaaaataataagagatatttatgacaaacccacagccaatatcataccaaatgggcaaaaactggaagcattccctttgaaaactggcacaagacagggatgccctctctcaccactcctattcaagatagtgttggaagttctggccagggcaatcaggcaggagaaagaaataaagggtattcaattaggaaaagaggaactcaaattgtccctgtttgcagatgacatgattgtatatctagaaaaccccatcgtctcagcccaaaatctcctcaagctgataagcaacttcagcaaagtctcaggatacaaaatcaatgtgcaaaaatcacaagcattcttatacagtaataacagacaaacagagagccaaatcatgagtgaactcccattcacaattgcttcaaagagaataaaatacctaggaatccaacttacaagggatgtgaaggacctcttcaaggagaactacaaaccactgctcaatgaagttaaagaggatacaaacaaatggaagaacattccatgctcatggataggaagaatcaatattgtgaaaatggccatactgcccaaggtaatttatagattcaatgccatccccatcaagctaccaatgactttcttcacagcattggaaaaaactactttaaacttcatctggaacaaaaaaaagagcccacattgccaagtcaatcctaagccaaaagaacaaagctggaggcatcacactacctgacttcaaactatactacaaggctacagtaaccaaaacagcatggtactggtaccaaaacagagatatagaccaatcgaacagaacagagccctcagaaataatgccacatatctacaactatctgatctttgacaaacctgacaaaaacaagcaatggggaaaggattccctatttaataaatggtgctgggaaaactggctagccatatgtagaaagctgaaactggatccctttcttataccttatactaaaattaattcaagatggattaaagacttaaatgtcagacctaaaaccataaaaaccctagaagaaaacctaggcattaccattcaggacataggcatggacaaggacttcatgtctaaaacaccaaaagcaatggcaacaaaagccaaaagggatctaattaaactaaacagcttctgcacagcaaaagaaactaccatcagagtgaacaggcatccttcagaatgggagaaaatttttgcaatctactcatctgacaaagggctaatatccagaatctacaatgaactcaaatttacaagagaaaaacaaacaaccccatcaaaaagtgggtgaaggatatgaacagacacttctcaaaagaagacatttatgcagccaaaagacacatgaaaaaatgctcatcatcactggccatcagagaaatgcaaatcaaagccacaatgagataccatctcacaccagttagaatggcgatcattaaaaagtcaggaaacaacaggtgctggagaggatgtggagaagtaggaacacttttacactgttggtgggactgtaaactagttcaaccattgtggaagtcagtgtggctattcttcagggatctagaactagaaatactgtttgacccagccatcccattactgggtatataccaaaaggattataaatcatgctgctataaagacacatgcacaagtatgtttattgcggcactattcacaatagcaaagacttggaacgaacccaaatgtccaacaatgatagactggattaagaaaatgtggcatatatacaccatggaatactatgcagccataaaaaaggatgagttcatgtcctttgtagggacatggataaagctggaaaccatcattctcagcaaactgtcacaaggacaaaaaaccaaacaccgcatgttctcactcataggtgggaattgaacaatgagaacacatggacgcaggaaggggaacatcacacactggggcctgttgtggagtggggggagggggggagggatagcattaggagctatacctaatgttaaatgacgagttaatgggtgcagcacaccaacatggcaaatgtagacatatgtaacaaatctgcacgttgtgcacatgtaccctaaaacttaaagtgtcataaagaaagaaagaaagcccttcaaaccttaacttgtcttttatcctttacattggtgattgccatattcatctgcctagctcctaagggagaattcagaatataatccaacaccccatcttcattcctaacccacaccatcaccactccccacatacccagatcatcgtcctcctctccattctcacaaccactgcctcagtttaaccactgcccttgtgacgtcccacctataccatgtggtagcctccagccttgagtctctaaacaatcgaatctagtctccacatcaatgctgagtatctttctaaaatgccatctggtcaaagtgctcccccacctacaggattaattcaaatttgttattgaggcataaaaatccacttgtgatctatcccctgcctacctttccaatcgcatcttctgacattttcccaaaggtatcctttattccagccacagtaaaatacttgttctctgacaataacatgttctctatagacagctttctaccctgaaaacctgtccccaccttatcccctaccctttcagcccttaattctactctgaaaattcctgttcaggtgatttagcctgcattatttttgtggaagtctttgatgacaacccaatgcaagttaggggatttttttccccctgggctcccatagcatattatttgagtccctattttacgatttcccacattacactgtattgtttcttcatgtctcattactctccagattgtaaactctttacagggaggtgccttgagactctctttacctgtatttcccactgctcactccatgtttgataaatgcattagtcattggattctgaatgctgggactatggacatagccagctctagcctatcttacctactctctcctttaaaggaaaccttattactttctctgctggacctgtttctaaatcaaattaagatagcaagataattatatattattgtcaatactacacataactttgtattatcatttttaaagctgcaagacagagaagctagcttaaagtgttcaaaatctggtt

SEQ ID NO: 6569 - DNA, 782 bp, mus musculus
aactagacattgtttctttatttttgaaatgttattgaaggaataccatttggagaagatacaaatgtaagaattgtgaaaaggataattgtgacacaaatcaaaattatagataaaaatatacctgtaaaatgtattaaggcaataacattctttctgcttgttgaccataaatatttatattccctggatgggtacattgttattgtcaagggtgtttaaataatgatcttgcatgcataatttattctctctggtataacagaatcagcaatttagttttctgggacccgagaaaaacatgcaaaagacatactttgaaatgtaaaactgatttttccttgcaactgtaggtccttctagatcctatggtaaaagaagaaaacagtgaggaaattgactttattcttccttttttaaagctgagctctttggggtaagaagttatggccaaactagcatgttagacatgtttttaacactatatctggcagagttttcaatgtaaatattaaagtagatgttaatgtcaataagtgatcttaataatgcatcagtagatattttttcaaggattgtctctatcttcacgcctagcttataatttgccttgtcgtctttttttttttctctttatttttatgtttttatccatccctggtggtaggggataaccttgtcttcttcgataacaagaagtctgaagcttattagaaattttactttgagaattgatcgatgagaagaaagcaactagatatcacgtggatcatatatgcttg

SEQ ID NO: 6570 - DNA, 4056 bp, mus musculus
ccccgcttcaccctgtcaaaaccccaactctgggcgaccctgggtttggaaactccgccgactcccgacgacacgtcccactctctcccactaatgccgcttattttagtcgcaggatccccctactacagtttcagcgaaagccggaaattttcatttaactctcccccccacccccacccccaccgcgcccttctagcccccgactcgtagaagggagctagggagcccggagctcggagcactgccgggactcggccgcctcatttctctccggaaggctttaatttgcacactttcttgccactgcgccacgagcccccagccccgccggggggtgggtctccggcagagttggcttcgcgggtccctgcccccaccccgcacggtcgccccagctgcctccccggctggggcccccagcgccggccggagcccagcggcccccgtccgcccccagcgagcggcgcgggcggcgccctccgccgtccctccgccctccgccgctgtgcccaccccctcgccggagagagtgctggtaactccttccccagagtctgattacctgctccgcgaggccgcggacacgtgcggagagccgactgacactcgcagccccctcgggaggcccgacgcgactgggcccctcaggtgaggagctgtgcgctcgggtgggtgggctgcggggtggggggtcccgggggagatctgggggattggccggggtccgaggcagaactgtgggtggggtaagtggagggtggcggggggtgggggggacctgtgtttccttggaatcggctttggttaaccccttacgaactgagacgggattggttatgggggccagttttggggagctagaggattctccttatctgatgagagggggagatcccagcctagggacacccgcgacaccgagatcctgcttccacgtatccgtacgcacacacacccacacggaacacgcctcatacagtttctccaaacggaactggaactctactcggacactcacataataattcacatttagggtttaaaatgcactgcctctagggactccatgctggagaatgtgcttgcatttccccctcgaaaactccctctccagctcgctgaggtgtgggtgtgggctccaccttcccctccacgagataaatgttaacgcaggcttcctgcgggcgtgttatacacagaaaagtgcacgcagccggccagtgcccaggcttggagccccgcgaagacgcacgtttgctgtagtttccaagtttacttttataatttaaaatattggagttaaacacacgccccgcagtgagcagccctggtccccgcagcgcgcccgtccgtgtgcatatgggcgcatctgcgtgtgcgcacacgcgggagtcgcggtccccggtgtggcctcttgtcgctgtgctggtggcgacccttgtggtgcttggcaggcttcgggagaggcgcatgaaggatttcattgagtgtgaagacagagagcagagacagaaagcagaaggaggcggctgcagcctttgtagtcgcggaggaatgcggaaatgttgaagcactatgtcaaactttttttgaaatggggtcaagtcacattcagccagcgtgggaaagcaacaacaacaacaaaaaaaagtggaggagagggggggaaaaggcattgctgctcccgtttctctccgccgaagccgaccgtctggggggcgagtggggggagagccagggcagtgcggggcccggcgggggcagcaggcgcagttccctgcgggggtgggacgtccccgacgcttccttcgctgcggagcccggggctagactcgagcgggagggggttggggggatgcaggacaggcgggttgggcggccggcggcggctccccggctacctgtgtggccctcgacctggctcagacccccgggcagtccctgggggctctttcctcggcttttaaggaaagttctgaatgtagtgagtgccagaagctctgctctcgccgcggtccgctccacccgctcatcgtgggggtcgcgccgtttgtttaattcctggcaaaaggcgagcgggccagcggttgcgaggcaggtaattccgaggtgccccgggaattccggacatgcggccgtcgtggtgaaagtcctgccgaggccgcggcggccctggaggagggaggccccctaggtcccagatagctgctgaatggggagggaaagttagggtaccctactctggcgctttgttgtgcagagggctccgggggcgtccggctgcagactggaccgggcctttagccggagggggaatggggcagccacctctgctacctacagcggggaggtcctgggaatgggaaaaggttcgcgagtccgggccccgaggacagagaccttctctctcacccctggaggcgcaggatttaaccccccaccccccaccctttgaaagggaggttgagttttgctcaggtcgaaatcagtttaaaacttaaggacgaggcgcgattatgctatccccttcctgaagttattctttaaggagacgacaagcgaaattgtggcgaacacccctttctcccacccttgggatcccgtgggggacggtgtctcccctcccccaggaccgctcgctcgcccacccccgataagccccaaccctccccgaccagatggctggtcttcccaaggtttccaccagggaggtcctcccagccggagagagaattccgtttccaaccgagactcctttaccccaaaaagaccatttgtgtatgcgagtcgtttttaaatgtctcctcgtagaaaaactgaaagtagaaagaaaggaagcaatttctgagcagatgtctgaccaccccttctcgcacactcccagcatcgggttacagggtcctgggagcccccacccacattctgcggccccacacggatggacccacagtccttccgctccagcttgtgcgcgacccctgaacgccctccggcacccctggaccccgtctccctgcacgtccgggcctcaggaggcggggagggtagcggcgcaacacaatgatatagggataaatattaagccgtgacattgacgtgcccggcgcctcccctcccccgcgctcccggcacactctgggctgctcggcacgccccctcccgttccactgcgtcccgcgccgctcgctcatccccgaggggcccctgcaacctctccgcgcgaagacggcttcagccctgcagggaaagaaaagtaacttcgcttttctcggaggaaccaggaaggattaagcggcttgggagagggcaggagcgcgcggagggtagcgatggaggcttcgtaaaggaggaggaggggagtctggaggaaccccgaggaaggcttctgggctgtctgattgcactttcttcttatcctcccgtctcctcctttaggtgcaatgattctggactgagacgcgcttgggcagaggctatgtaatcgtgtctgtgttgaggacttcgcttcgaggagggaagaggagggatcggctcgctcctccggcggcggcggcggcggcgactctgcaggcggagtttcgcggcggcggcaccagggttacgccagccccgcggggaggtctctccatccagcttctgcagcggcgaaagccccagcgcccgagcgcctgagccggcggggagcaagtaaagctagaccgatctccggggagccccggagtaggcgagcggcggccgccagctagttgagcgcaccccccgcccgccccagcggcgccgcggcgggcggcgtccaggcggcatggagaaggacggcctgtgccgcgctgaccagcagtacgaatgcgtggcggagatcggggagggcgcctatgggaaggtgttcaaggcccgcgacttgaagaacggaggccgtttcgtggcgttgaagcgcgtgcgggtgcagaccggcgaggagggcatgccgctctccaccatccgcgaggtggcggtgctgaggcacctggagaccttcgagcaccccaacgtggtcaggtgagccagggagctgcg

SEQ ID NO: 6571 - DNA, 4056 bp, mus musculus; identical to SEQ ID NO: 6570

SEQ ID NO: 6572 - DNA, 4054 bp, mus musculus
tccgtccacgtcacacagtgaggatgccccccgcttcaccctgtcaaaaccccaactctgggcgaccctgggtttggaaactccgccgactcccgacgacacgtcccactctctcccactaatgccgcttattttagtcgcaggatccccctactacagtttcagcgaaagccggaaattttcatttaactctcccccccacccccacccccaccgcgcccttctagcccccgactcgtagaagggagctagggagcccggagctcggagcactgccgggactcggccgcctcatttctctccggaaggctttaatttgcacactttcttgccactgcgccacgagcccccagccccgccggggggtgggtctccggcagagttggcttcgcgggtccctgcccccaccccgcacggtcgccccagctgcctccccggctggggcccccagcgccggccggagcccagcggcccccgtccgcccccagcgagcggcgcgggcggcgccctccgccgtccctccgccctccgccgctgtgcccaccccctcgccggagagagtgctggtaactccttccccagagtctgattacctgctccgcgaggccgcggacacgtgcggagagccgactgacactcgcagccccctcgggaggcccgacgcgactgggcccctcaggtgaggagctgtgcgctcgggtgggtgggctgcggggtggggggtcccgggggagatctgggggattggccggggtccgaggcagaactgtgggtggggtaagtggagggtggcggggggtgggggggacctgtgtttccttggaatcggctttggttaaccccttacgaactgagacgggattggttatgggggccagttttggggagctagaggattctccttatctgatgagagggggagatcccagcctagggacacccgcgacaccgagatcctgcttccacgtatccgtacgcacacacacccacacggaacacgcctcatacagtttctccaaacggaactggaactctactcggacactcacataataattcacatttagggtttaaaatgcactgcctctagggactccatgctggagaatgtgcttgcatttccccctcgaaaactccctctccagctcgctgaggtgtgggtgtgggctccaccttcccctccacgagataaatgttaacgcaggcttcctgcgggcgtgttatacacagaaaagtgcacgcagccggccagtgcccaggcttggagccccgcgaagacgcacgtttgctgtagtttccaagtttacttttataatttaaaatattggagttaaacacacgccccgcagtgagcagccctggtccccgcagcgcgcccgtccgtgtgcatatgggcgcatctgcgtgtgcgcacacgcgggagtcgcggtccccggtgtggcctcttgtcgctgtgctggtggcgacccttgtggtgcttggcaggcttcgggagaggcgcatgaaggatttcattgagtgtgaagacagagagcagagacagaaagcagaaggaggcggctgcagcctttgtagtcgcggaggaatgcggaaatgttgaagcactatgtcaaactttttttgaaatggggtcaagtcacattcagccagcgtgggaaagcaacaacaacaacaaaaaaaagtggaggagagggggggaaaaggcattgctgctcccgtttctctccgccgaagccgaccgtctggggggcgagtggggggagagccagggcagtgcggggcccggcgggggcagcaggcgcagttccctgcgggggtgggacgtccccgacgcttccttcgctgcggagcccggggctagactcgagcgggagggggttggggggatgcaggacaggcgggttgggcggccggcggcggctccccggctacctgtgtggccctcgacctggctcagacccccgggcagtccctgggggctctttcctcggcttttaaggaaagttctgaatgtagtgagtgccagaagctctgctctcgccgcggtccgctccacccgctcatcgtgggggtcgcgccgtttgtttaattcctggcaaaaggcgagcgggccagcggttgcgaggcaggtaattccgaggtgccccgggaattccggacatgcggccgtcgtggtgaaagtcctgccgaggccgcggcggccctggaggagggaggccccctaggtcccagatagctgctgaatggggagggaaagttagggtaccctactctggcgctttgttgtgcagagggctccgggggcgtccggctgcagactggaccgggcctttagccggagggggaatggggcagccacctctgctacctacagcggggaggtcctgggaatgggaaaaggttcgcgagtccgggccccgaggacagagaccttctctctcacccctggaggcgcaggatttaaccccccaccccccaccctttgaaagggaggttgagttttgctcaggtcgaaatcagtttaaaacttaaggacgaggcgcgattatgctatccccttcctgaagttattctttaaggagacgacaagcgaaattgtggcgaacacccctttctcccacccttgggatcccgtgggggacggtgtctcccctcccccaggaccgctcgctcgcccacccccgataagccccaaccctccccgaccagatggctggtcttcccaaggtttccaccagggaggtcctcccagccggagagagaattccgtttccaaccgagactcctttaccccaaaaagaccatttgtgtatgcgagtcgtttttaaatgtctcctcgtagaaaaactgaaagtagaaagaaaggaagcaatttctgagcagatgtctgaccaccccttctcgcacactcccagcatcgggttacagggtcctgggagcccccacccacattctgcggccccacacggatggacccacagtccttccgctccagcttgtgcgcgacccctgaacgccctccggcacccctggaccccgtctccctgcacgtccgggcctcaggaggcggggagggtagcggcgcaacacaatgatatagggataaatattaagccgtgacattgacgtgcccggcgcctcccctcccccgcgctcccggcacactctgggctgctcggcacgccccctcccgttccactgcgtcccgcgccgctcgctcatccccgaggggcccctgcaacctctccgcgcgaagacggcttcagccctgcagggaaagaaaagtaacttcgcttttctcggaggaaccaggaaggattaagcggcttgggagagggcaggagcgcgcggagggtagcgatggaggcttcgtaaaggaggaggaggggagtctggaggaaccccgaggaaggcttctgggctgtctgattgcactttcttcttatcctcccgtctcctcctttaggtgcaatgattctggactgagacgcgcttgggcagaggctatgtaatcgtgtctgtgttgaggacttcgcttcgaggagggaagaggagggatcggctcgctcctccggcggcggcggcggcggcgactctgcaggcggagtttcgcggcggcggcaccagggttacgccagccccgcggggaggtctctccatccagcttctgcagcggcgaaagccccagcgcccgagcgcctgagccggcggggagcaagtaaagctagaccgatctccggggagccccggagtaggcgagcggcggccgccagctagttgagcgcaccccccgcccgccccagcggcgccgcggcgggcggcgtccaggcggcatggagaaggacggcctgtgccgcgctgaccagcagtacgaatgcgtggcggagatcggggagggcgcctatgggaaggtgttcaaggcccgcgacttgaagaacggaggccgtttcgtggcgttgaagcgcgtgcgggtgcagaccggcgaggagggcatgccgctctccaccatccgcgaggtggcggtgctgaggcacctggagaccttcgagcaccc

SEQ ID NO: 6573 - DNA, 4054 bp, mus musculus; identical to SEQ ID NO: 6572

SEQ ID NO: 6574 - DNA, 2378 bp, mus musculus
aagcaagtaaagggtcttcttaggcctagagaatggcaatattgacaacatatgtacctaaaagtatgaaaggaaaatatcagagtttgatatttttggtggtttgcttcaaaaataccaataaataaattgcaatgcagtgagagattattttttaatctgatgacagtgcatgacttcaattgggtcagagaaaactagatgttcagattggaggctgaggcttggatgagaggggataaagtcctgctccagggtggcaaaggtaacaaaagaaaggcatagatttcagagacatcatgaaagaagatgcaggctcaacaaagtatcctgagtatctaccatgggataggtgtcatgctaggagcctgtgtggttttctcattgatttgaaggtgacaaactgaggctctgagagactaagtgattttcttagcgtcacagaactaataacagatttaacgtggggttctaattccaaggccagctttgatttttaaatatacctcaactacctctcttggagtcaatgacaaattggacgtggaagaaagatgaggggggaagcaagataattgagagcataataataccatgagaagtcaagaagtgaacatgcactagcatgcatatatatacatgcacacacacacacatacacacacatacactgtcccatcctccctattatggtctgaatgttggcatctccctcaaattcatacgttggaacctagcacccagtatgatagtattaagaagtgagagtcttttgggaataaagttacgagggctctgtcttcatgaatgggattagtgcttcttataaaggaggttgaagggagccgccttgcccatactgccatgtgaagacgaagcaacaaggtgtcatctgtaaagcagagattcctcaccagacactgaatctgctggtgccttgatcttggacttcccaacctctgggactgtgagaaataaatgtgtatttttgtaagtctgtaagtcagccttcaatatgagcatccagttttctctgaccctattgaaattatgcactgtcatcacattaaaaaacaatctctcactgcattgcaatttatttactggtatttttgagcacccagtgtaaggtattttgttatagcagtctgaatggactaagacactcccaaatatataacaacatacagagattctctagttaatatccgtaatcacacagaatccataaatctcttatccgacagcaatgttttgaaataaacttgtgtagtatgcctcccaaaaagaaccaaatacaaatagatatagtaaaggtatatggccaatttttatggaacagttaccaaatcatagccctgtggttacatgcattatgtcatttaatcacaataaccctgtgagggtcttatgaggtaggtattctcattgaacccattttacaaaaaaatgggagatgttgcttctagctagtgttctctgttcctatctcctaggtacagtatacattttttagttgttcacctctttttctctgttatttattttacctttcttcctgcagatttacccttttagaatatgcccatcaatttttactaccagtcccaaaatagagcttctctttttagctccccccccagtcctgagcatcttctcactccacttgggaagctgaaaacctcacaggccatgttttatggatgcctggacacccccagtgtgggcaataaagctctttatacagaggatggaattatggctcaatatctatttgggctggctgttcctggaaccagagatagtttatttatgactaacgaaaacttactaatctgtcttcaagtgacaagtgacagaaacccagccgaaacttaagcaaaggaaaaagtcatttggttgactggaactaagaagaatcaaagaggagctggaatcagacactatcccaaatctctctctgtctttctctctcttcccatatctctctctcacttagaggattgtcaacaataagaaaaatacaacctatcttccactggcttaagaaataagtccttcatttccttcaagtgtttgttcaaatctcacttcttcagtgaagccaaattctcactttattcaacatcaaaacctgtccctttgatcctagcattcttgattctttttgccatgctcctcttatcaatttttttctgcttactatttcctaacatactatagaattttcttacttaacgtttttagtttattataatctctcttggctagaatgtgagttccacaagggtagggatcttgtgttttgttcactgagctacttcagacacctagaatagggtctgggacatggtagatgctcaacaaatatgattgca

SEQ ID NO: 6575 - DNA, 1519 bp, mus musculus
agttttatctagaaagtgtgctgtgggggattttggaatcctcctctggggcgagggcttggggagtagctttggcactcccaaggctctggggtcggggagcattccatgtaccgtggtgttcatgactcaggcaaaagggaaaccccagaattaccacaaagctatcccaatcctggcttggcatcaccaatcagctaaaagcaatgttttcatttagcatttaggagtgcacgtttgtgtctgtgtatgcgtatgcatatttttaagaatgaattctcccgattttcatctttgcaaatagattgggggttgggggtagacggccggtaatgcctattagaacttcaagggattggttttcacatgagagagcttcagagatgagaaatcgctgaaattatctggtagcagcttctgagggacatttaccgtggattcacttttacatttcagttcatttgaaagccagtatggttaaattaaccaaaatctaaattaaaaaaaaaattccacgattcttccaggcctacttcacatcatcaaaccaggccctgctggaggccccattaaaatggcagctcccactgagagagagacaaaagccccctctctgaatggggatgctgaaacagtgatggactctcagaactgcttttttttttttttaatccattaaaaaaaagttacctctgcattgactgtgagagagtatttatttcgctctccacactgtgggaaacagaggcgttctcccttataaggacacccagaccttcttgggagaggagagaaatatgaatccataacatggctgaacaaattcctcctcgcaactgaattcatggaatgtttcagacgtgaacagcttaattttggtgtggtctgggacaaattaatatgactcaaatcccacctcacagaggaagcatctcctgatgaagtgggtggggtgagtacactcacttccttcaaaattctgtctaacaatcatctctattaaatttcaatatgtctcaccctctcccccagcaagaaaaaaaaaacaaatagggaaatcaagaacaaactaaaaatatatctaaaaagcctaactgcaaagtgttcagcaaatgattatgtgaaattttaggctgtatgaatgataatgagtttgtatacaacagaataaaagcttctagagggtagtccagaaactgtattttgggagtgaatacattaaacaagatcactcttctaggttctcatgaaatcccagttatcgttattccaacccggaaggcttagggatgaacaaggacatatcattcttttcttccagaggatgaactggacttttcaccttagcatttaatcggacaccactcttttcccatagaggtgctcagtctctagcagggaaggccatttatacatgaaaatgaactgtaatgttatcctctccaggactaaatttatttacttttgtaaaatgggaataatttcttcacgctttcaaagtggaaaaatgattgctagc

SEQ ID NO: 6576 - DNA, 911 bp, mus musculus
atggtgtaagtgattagtgtaatgtcaagtatatacgtgtcttagctgctaatttaatttgtaaatgctatatagagacaggcactgagctaaacattttcagaaagtgataattatcttgctattgtggcttcactaggtatggttcagacctgtgctgtttaacataatatgttggtatttatgatctcatataatctgtaaattttttcttgatgttttagcatcaatatataatcagctaaggatattttaagtatgtgagttggagacaagcttttaatttagtcctctaataaaactgtcatttcctatgcattacttttgcaatatagtaaaaatacttagtttagtaaacatttgagagagtttttctctcaaggatgataagatattaactaataaaagtaaacatttctgtttactgtgttaatcagaatgggttctcaaagttgattatgatcatgacaataatcctataattatttgtattgtacattatttcctcaattcttgtgtgcggtgtacttttcttctcactttttggagtgttcattttctttttttaagaacacggctcgatgaactgagaatgttcttagagaatgagacttgggaactttgtcctgttaagtcaaatttcagcatcttgcaacttcatgtaagtgtttcttaagaacaaagaaatctgtcttttagtaatgtattttacccttttttttgaaaaaaaaaatccagaaatatatgaaaacatttataaaataaattaaggagcagtttcttatcttccttccttgaaagtcattagtagccagcctctttttaaaggaatgatccttttatggttgcgaaaaatcagtcttacaaaattcagtttacatactttaggaaatctcttttgcctaaaaaga

SEQ ID NO: 6577 - DNA, 197 bp, mus musculus
taaattatctctctattaaagggatgctctcaacatctttaagctcacaatattcctctcctgaggagagcatatagaagttgcaatgcatgagtgcagtgaagaagggactacatcctgagaaatgcttgctgcacagagactagccaccgattctgctgtgcagagatttcaggagtttacagctggttctatgt

SEQ ID NO: 6578 - DNA, 1384 bp, mus musculus
ggctttattgagaatcacaaaacattaaccaacgttagtagcggggatgattgtcataagcacattaagaaaaattttttttggctaggcttggtggctcatgcctgtaatcccagcactttgggaggccgagatgggcagatcatttgaggtcaggagttcgagaccagcctgaccaaaatggtgaaacccccgtctctattaaaatacaaaaattaaacgggtgtggtggcgggcgcctgcaatctctgctactcggcaggctcaggcaggacaaccatttgaacccaggagggggaggctgcagtgagcgaagatcacgccactgcactagagcttgggcgacagggtgagactccctctcaaaaaaaacgaatttttttggcacatcgacctagccaaacttgcgtaaatacaagtgagagtcagactcttttctcatcaacacctacactaagttaggctccttctgtaccttccattcggaactttggtgtactttcgcccaccagaactgggcaaactgaggacattaaaaaaacggtttaagagaaactggccagagcggtgagttaagtgttaagactggtttcactcctgggttggatgccagcaatccatcggccagcaccatcaactggatccatcaatccaatctggccagcacccaggggcagccagactgaccagccaggccacggatagccagacaataaacgaccttagggtgtccttcgcatcccgctgggcgggttctggcagtagaaggctgagaaaggggagtgttggggaaggaaggaatgggacgatgtgtacttttctcccggaactgtagttctattgccccaacctgggctcaggtagcggccagtaaactaggagacagccctaaggctcgcgtccgggccaggcgggtacccctagtactctctccccacacccccatggctctgccgcagccgccgccgcccgccggggcgcgtgacccggtgaccccggagcactgggcatccggacccccctcgcaggcgcagccgctattaaggcaggaggctaaagaggaggaggaaggggaggagacaggcgtccagggcgcctggggaaccggcacggcggagcagcggcggcggggctggggggaggccgccgagtcggccgcggccgaggaggggcaggcggaggtcgggggcgccgcggccgcggggtcaggttccccggcgggaggcgcaggtggcggcctggggagctggcggccgctcctcgcctggctgcagcggcggcagccccagtgctgcccctgtgcggcgcccctttcccgctccgccgcgcactgttgtcatggaggaaccaagatggcggctctggcctacaacctgggcaagcg

SEQ ID NO: 6579 - DNA, 1248 bp, mus musculus
tctttttgctcatctctttttttaaaaaaacatactagtaatcttttaatatgtgcaattttatatcttgcttttttcttcaccacttattcaccattatataatcaacttaagtatcttcttaatggcaacatattattgagtggatataatgtaattttatataattttccactttttaaagctttttatagttttctaatttaattttgcagttaaaaaatacattttaaattacttctttgtgtgaaaactttgctttttaaattatttccttagggtggaatctctaaaattcaaatattaggttaaagaacataaacatttaaaaattattaattatgctgcaaaattatttcaatttatactaattagcaatatattttggggcctaattttctgcaaactttctggcattgggtgatcatgctgtaaattaaaacagcagtgcaataagtttctgttattgattttgttaggaaatttctcgtttaaaaatataactttgaaaactaacaaggattaatttctttgtatatattaattaattagttcattattttttggtgaattatctcatcatatcttctgtttatacctttttaagtgatcccagattgtaatcattgtcttcaaataccatgtgattgggagaggggaatagcaaaggggggaaagtcgaacacaagaaagtttagaattgtgaggggagtagctcatgaatttatgaaaatctgcctatgttaaagagttgaaaacttaagagccttcacagctaagtagttattaacatagtgatgatgataccaggtcctaaatctttagcaactattccatgtgagaatgagaataatggaaacaaatgatacagtcaacttttcattttatttgctatctgtattttccatttgcatttatacatatgaaattgtagagaagactcagaactatttaacatgaaattattacaatttaaagtgaaaaattttaataaacttttatttttaataattaaaaaaatttttttaatagagacgaggtctcactatttcgcccaagctggtcttaaacttctgagctcaagcaattcttccatcttggcctcccaaagtgctggaattacaggcatgagccactgtgcccagcctttagtaaacttttaaaaagtagagagatttctgattactatgaaggttttaatatttcttggcttaaagttgcatgactttctaaaaattcgaataatgg

SEQ ID NO: 6580 - DNA, 217 bp, mus musculus
ttttttgtataataaattgtaaaatattgttaagctgttgctgtgacaataatgagatgtgactaaaatgcaataaaataaatacctaaccaatgcattgaaatgagtcttgtccccttccaagaatatgccttttcaaataatgccaaaaaaaaaaaatcctttggaacttctcttttgttataaatcagcctctgattcagtcattgcgctactt

SEQ ID NO: 6581 - DNA, 1085 bp, mus musculus
caactgaggtctaagtcctaccgacgttagagggatagacgaattgacctttccaggtcctctgctcgccaccagcctacggagcggcgccaccccctcctggcgagaccgggcgcggaagacgcggagcggaggccctccctcaggaggggcgcgggcgtggagggcgtgggcagggggcggggcgagccccgcagactgagtgctccggggagctgtcagtgtcaggctctgggagagaggaagtgatcgctcccggaggagcgcgagccgagcggccggcgcagcgtgagacagcacatcctgcccgcgccggccccgccaccttcgggagccgcctgcaccaacgctgccgccgcccaggagccgccgccggctcggggagcccagttccgccgctgccgagcgcgtccaggtaaactggagcgggatgtcgccgctccccggacggccgcctccgcacctctccccaaccctccccaccccggtgtcgtctgcgctgggaaccaggctggagccgaggcccctgcagccgcagccggacccttgtcctggccccctgcccaggctcctgcgtgctccgctgagcccgaaggcggccaaagccccccagtgacacccccctctcggcagagccgagagactagggcagagaaggaagggtcgtggtgtcaccacctggtcgcccaccttgtgggctgggaagggcgtcccagtgcgccccgcctcggtcttccccgggggagcagtgggcgagcggcgctgaaatctgcacccctctgggccaccggctgactgcccctggaggagggggaaagctgcagagggaggggaaaggatgctgtttgattacatttcgagctgtctgcaaagctcttagatgctgtcactaccctgcaagtcggagggagcgaattcacttccagcagggcattaattaaacacttcaaagcgagaagatgccagtttctctctgctgcgaaaaagtgtggctgggggatgttgttttggtaaacaccttcacggccgcctggctctccttcccccgctcccattcggaatcgctctggccttataaatccgtg

SEQ ID NO: 6582 - DNA, 141 bp, mus musculus
ggcaaggccattccctcattgtctaattccccaaaaggcaggcttttgtttttgttgtttttcccagatgtagagatttccaatgtaaaattaaacttccaatatagtagtcttgcctgcaattttcagaaggaaattagg

SEQ ID NO: 6583 - DNA, 1337 bp, mus musculus
gagcctctgtgactggctcattttctgccggcttttcacttcccttggcacctgtcccccaggaggcgggcctagacaataacctctgatctccaaattgcccaccctctgggcctctgagcatcttcgtttgtacaacagggagaattgtggggaccaaatagaatctgtgtgaaaaagcaccttgtcacctgcaaaatgctctttgaacatgaggcttttttttttttttttttgagatagagtctcgctgttgtcgcgaggctggagtgcaatggcgcgatctcagttcactgcaacctccgcctccccagttcaaatgattctcctgcctcagcctcctgagtagctgggattacaggcgcctgccaccacagtcagctaatttttgtatttttagtagagacggggtttcaccatgttggccaggctgatcgcaaactcctgacctcaagcgatccaccagccttagcctcccaaagtgctgggattacaggcgtgagccaccgcacccggccacgaagcattattaaggtgaccacaccactgccccctgccttcaggatgggaggccttgttctctgagtgtcagtctctggctaccttgccacgtccttgacaatgtctgctttcaaatatcactttctccttccttccttctttctttccaccgcctgaatgaatcttttgttctgcggcaagccaagagaaaatggtaggattgattcccaagtgtgaaagcgggggcggaagtggtgtcttccaagaggagtctgggtgccctgccgaagaggggaagatgcagcgagggagagacctagaaccgcgatcaaagctgcagcagctgctggggctggcggcacaaagggaggagggaggagcctgggcgctgagaaagttcttggggaaagttgagctgagccaagagtcgggcggtggctgggatgggcgggagggcccggcccgatttcccttgctgctccccttgtggcctggtgagtgggaagtgaaaccaaggataggaccagtggagggaccctctaatttatgggaggagacatgaggggttcatggaaccccagcgggggcaactgggcagtcaccaaagctggaggggacagagggctgggatctccaatcatgggaagggagagatggatggaaggaaatgaagaactctggataggggagacgcggctagaccccaggggctgtgatcagggagggaattggggagtgatgccagagagggcaggtctccgggagtaaaagtgtggcttctctctgcttggggttacccctggctcatcggagcagggagctgtcggggcttgttg

SEQ ID NO: 6584 - DNA, 481 bp, mus musculus
ctttccatcagcctgactgcaaggcttccttgcccgggagccccccagtagccgagcggggagccggcaggaagctggatggagctgtgtctccctgcacgtatgtgctccgggcctgagcccagcagaggtggtggcaggcagcctttcccatctggtttgttttggcagttccctcctgcagcctatttgtttgttgtttctactccatgttttctcactgcttgccagtggggcttccctcagtggcagttctgcagaaacagacctccacattgccactgaaggaagagtggggcctggggctcactcttttgtgtgtgggggggcgtgaaccaggctcctgcatctactagagtccatgcagggcaggtggggcagggaaccctgcctgcaggcccgaccgtagggaggctagctccagcctctgttctcctccctctactggctctccaaagtgacttccatcaaagcttgggag

SEQ ID NO: 6585 - DNA, 229 bp, mus musculus
atggcaatctttgccatagctttcagtctttcaacacttcctacacagatacaggattatggggactgtatatggtttgtgaatcatccactgttgcagacatgctacatgttgttcaaaaagaatggtgagaaaaatagctttaagtaatttaaattttgcctttaattcgttttaaactagttttttatttatactttatggtgatttatggtaattttacctttta

SEQ ID NO: 6586 - DNA, 747 bp, mus musculus
tataatagcatggttttgaaaaaatatgtatatttagaaataatgattattttgtagcacttagaagtttcaaaatgcatttcctcatatattatttgtgccactaacaacacctctagcaggtagatattattggttccattctacaacctgagaaaccgaggcgtagaggggttaaatggcttctacaaaaacatggagccattaaatagagaaaatatttcaacacgctttctaatcccaatcctgaaactccttgagggatttcagtccttatcatcttgattgtttttggtttccaatttttgttcttttccgatcttaatttattcacttcatgtaggtgctgaatttaattgagttagattctaggagaaagctcaagcaatgcctaaccaaggaagccgtggattcccattcagagccagaaatgcagatagaaagcaagcaaggaccggggacactatctcaatctgaatgcattcaggcataaatttgtagtttggagagcatctaggaagcaggctaattccaagacaccaagcccgctgtgcccaatcctaaaacagaattaacatgaaattctaacttgtcttgtaattgatttaggcgttctcagaatgagaaccctaatatggccccctacgctggctaaggctccaaaatacagggcctatgattatcaactccttagaaagaaatggagactcagtacacccgttgctctcaaatagctcaggaattcac

SEQ ID NO: 6587 - DNA, 906 bp, mus musculus
tagcatttgtgcttggtaatcgacaagacagcttgatggcagaggaactgaaggcagaaaacaaaggtaagattgctttaaggaactcttacctggatgcctcaagcacaaaaaaatggtgctctccattctttcccctcaaatactagtgcttcccctgaggttctaatttgctgcctcttttaataccgtgtagcttgcagactttaccccagactcaactcaagaagcttacacaataaaaatataatattatacttacttatctttctgaaactcccttagtccattattattattttgatgcttttttttttccggtttcttcttccctcttcctctgatttcaggtttgccatcagaacttaatggctaagatgtaactgtgggtggtgtctatttggttgaatggaaagtactttctctccatgtattcagctatgtttcaggttgaaataaatgcctggagaatctctaacatcatctatatatatctttattaaactatttgtgataattgaattcagacccaacttctcagagagaggtagtaacactggccccaaatagttagttagagatttcagtagttacctaattagctgaattttaaatgtgttgtctgcgtatcaaaagtcctcagatttcttttccaaaagaaattgccttctgaaacacaaagaaaaccaggatggaaaatagaacattgactattgaatgatacgtaaatatatcatagtgggcaaataagaggtagcaagttgttattgaagatgaatcttttaattttcttttcagatttctaaaccaattttttgggatagaattttggtgtctctgtttttttagtagacttagattcatttaacagttttatctttatgttatctttaactttaaaactgt

SEQ ID NO: 6588 - DNA, 790 bp, mus musculus
tcatgatctatgggcttctattcctcttgcctcagaatcaatatccatcagttttgctagtaattttcttctaaaatataccaacggaattttctggaaaaacaacagtttcaattttgtgagcataaggaatcttgtttgctcctttctgcattcctgactttcgttcttgctgtttcagatttactattggaagacccagagttcatctaaaagaaacagacgtcacattgagaaaaagatcctcaccttccaaggcagcaagactcatggcatgttgccggggctagagccctttagccactacacactgaatgtccgagtggtcaatgggaaaggggagggcccagccagccctgacagagtctttaatactccagaaggaggtatggaatggacgtgtctctaagatctcaggaacatatggcatggcctgagaggttttgcctgacagaagggctactgatcaaagtatattctggaagccaaatgtgattgaaatttctatagatgaatacagcacacacaaagctaccaaaatgtcagatcatatgtgggcctaagtgtacatagaaggcttcagaacccaaaatgctgctctgaaatgccctctcccgtgacttaaaatttttctccacacacactgtctgaaaccttgttactttgacatttatttggatcattaactttctgacctgaaagaggttccataacttctctgaatgtcagtagcctcatctgaaaagcatgagaaccaaattagataacctaacaaaaacacctggaaagg

SEQ ID NO: 6589 - DNA, 790 bp, mus musculus; identical to SEQ ID NO: 6588

SEQ ID NO: 6590 - DNA, 1155 bp, mus musculus
tgtattttccttcttttcccacaagaaccatttccagaatcttccctttgagtagtagcccttgccgctacctttctagagaacgaggaataatgcttgaatgcagccacctcctttctatttggtggagggaggtttcactcctattgtttttaagtaatcagggcctcaagggttaggtttgcctggtacgtggtgtctgattacaccagccatagctaaagctaaaaaaaaaaaaaaaaaaaaaaaaaaaagtacagtgccaaatattacacaaacaggagttaaaagtcagtgagcatttctttggttaatatggacataacagcatatgaaagcaggttgacaatttgtttcaaaaatggttttgtgcactgctattgggacttaattaacttgaaatacagatttgtagacgttattgaaagtggaagctgttggcctcatcccattcttctaaacctaatcctgctcctccttaccacccagcccccgactggacagggaggcttccatgtggccttcatccattctgtgatgcagagcctgttgaagaaaagcaggtgtctttacagagaacttcaatagaatcctgtcaagtcatttgtggttttggagcatagtttacttgctgatttgactacacccaaatttggcctgtttgaacccttttaaacagggttcaaatgcttatctgatgtgaagacaagcattattattgacagggaggaatcgggaaggaaaggctttaaaggaaaaaagtttgttagggaatgaagtaactcaaataagaaaccacagttagagaagaagggtgtgtttaataattgaaagctgtgaaactctacccatgtggcacccccaggatcatgccactaacctctgctctggactattgtaagagccttttatgtggtcttcctgtctcaatctcactccccttcagcctattctcaatacagcctattccacccttcaaaatggaagtcaggtcatgtcactcccctgctcaggactcctccagggcttcccatttcactcagtggaagccagaggtcttgccctagatcatgtggtgcccctttccatcccttacttcatctcccactgttctcctgcttgctgctcctctcagccacctggccgccttgctgt

SEQ ID NO: 6591 - DNA, 1046 bp, mus musculus
tgcacagcatgcaaataaatttagaatgatagcattgtgaaaggggactcattgaaggatttgtgacagggaaataacatcagatttgtatgaggctcatgctggtgaagaagaaaatgagcctaggtacagggaactgataagtctattgcagcagccctgggtacagatgaaaaacctgtcatccaatatgggagctactagtcacatgcgctatataaatgcaaattgaagctgaatgaaattgaaaatctagtctctcaatcatattaatcatatttcacctattgtataatgcaaatgtggaacatttctatcatcccaagcattctacctaactttggacaatagtcaccccttctggggaagaaagtgagattatccttagggaggaaagaagggtattttagggcaaaataactttagaatttaccctctgtatgtcactatgttttttattcttttacgacaaaaatgttttcaagtgccatttgaaaaaactgaaaaaaaaaatcaaagcctacagttggcatttatcatggggatgaaaaggagggaatatggtcaaagaagtagatcaaacctctcttcaagtgttgttgcccatgtttaatgctctctatttgaccttgactataaaatccagaatttaaagtataaactctgaatttgtgaaatacttactagcacttactgtagaaaagttatatttaatatgaaaaccatttatgtcatatgatattaaaccttctttattattactggtatttgaggaagaagtaaacactcagtggaatggaattacactgaccataaattatacatggagatttggacagaagacaaatgtatttacctaatcactatctagagagcaagcagataagcagacagagatgtggcatggccctcagccaatatggacacataccagcacaatcacctgtcagtgatgccatgtttcttgggcaggggtgccactcctgctgagtatttgggggattcccagtgagctcaaccagagtaggcaacagggagttcttgct

SEQ ID NO: 6592 - DNA, 150 bp, mus musculus
ctggtggttgctgagggtgaggaagaacaggtaggaggggcagaaggaagagggtgtggttataaaaggtgtttatgtaatcatcataatagaaatattaaattgatataatcaaaattaaaatatacctaactcaaaaggatggaggaa

SEQ ID NO: 6593 - DNA, 1048 bp, mus musculus
ggcttgtggaacctgatgggtgggatgcgtcaggagaaataagagttacatgtaaccaggcagagattactagattctataatatatgtgggaaatggacattttaagcaatttagtatctagtcatacctgttttgattttttcccctatataatgcttctttggttaaaaaaaaaacaaaagaaaaagaaaaaacaaaaaaaaacagtagattcttggagttgcaggaaggatgaaagaatgggactttttatattaagagcacttgacagctgggcatggtggctcatggctgtaatcccagcactttgggaagccgaggcgggtggatcacctgaggtcaggagttcgagaccagcctgaccaacatggtgaaatcctgtctctactaaaaacacaaaaatcagctgggtgtggtggcacatgcctgtaatctcagctactcgggaggctgaggcaggagaatcacttgaacctgggaggtggaggttgcagtgagctgagattgcaccattgcaccggagcctgggaaacaacagagaaactctgtcaagaaagaaagagagagagagagggagagagagagagagagagggagagaggaaggagggaaggaaggaaggaaggaaggaaggaaggaaggaaggaaggaaggaaggaaggcacttgacaaagagaggaattgggactgagttttgggaaatgtttaaagtagtcagagattttaaggacagagattcaggtcatagataataatgagtgcactgaacctgtgagccttctgaattcttttgccactatcactaagcattaaaacataacctgatgcctagaaggggcaggtaagagggtcaatagatgctaccagtactagggtctaatccccactctcaaggaaggatggaagggagggagacaatcagtccttcacaacacattgtagcaaatactctagatgggggtatgagagagcctcttcgagaagtagagcatttgtgtatgaaaacccatgaaatctcccaggaggatttggtagaacagagtgtt

SEQ ID NO: 6594 - DNA, 1048 bp, mus musculus; identical to SEQ ID NO: 6593

SEQ ID NO: 6595 - DNA, 1052 bp, mus musculus
ttatatcacatgatgttatacacaaatacctgcttaccaacctaccttcgtacatacatattgataatcctgttttatatagataagcaatatactcatgtaatgtcagtgaaaagtgtggctttttatgccagactgcttgaagaaactaaggctccagagactgtcacctgcccaaggtcacatattgttagtgacatattgtagtaaatggatttcgacctaagtgtggcagacaccaactttcactcttgcaagtatttttaaccacttttctctaccttacgttcctattgttctattggtgcataacggagtgaaatatttctcttaattttgtattttttgtgttttatatatacatatattttatgcaaaataaaaatagttttcccttcggacaaatctaaaagtatatttgataatagaggaagaagctctgtaatatacatttagcatgttggtaatgctagatttattttttaactaaagcctgaaggactagtagaatcagagaaaaccttgtttttgcttaggtgtcattgtttaccttgagaatgaaaaatagagcaagtagttagaaagcttagaggagttaaaaataataaccgtcatgctgccctagaaataaaaggaaatgataaagcatatacctactagctcagtgatcagtgattttagctattggtgagacatttaatttagtgtaaaaaatggtatgagatgatgctgtaaaatgtatatctgcagacaatttttgtttcattatttatttttatatactgtcaactggccatgttaatttccactgataatacaactgaaattatcatatcaacctgtatttcagggactttctccaaatacactcagagttgtcttataaacaaaaccttattatagtcacacagagtttgaaatgttaaggctaatttatgagagcagtttgtctgaataagcatttagtctaggaaaggaatctttcctcttaaagatatagtaagtcttctctttctactcctaagccctctatttcccatgcctggggtggg

SEQ ID NO: 6596 - DNA, 1052 bp, mus musculus; identical to SEQ ID NO: 6595

SEQ ID NO: 6597 - DNA, 964 bp, mus musculus
acagtatgagcctgagaacatcaacatttaaagaacaggtagagaatgagtttcattcaaagtgagtggaaacagagccccttgggagttaagaagaaagtaaaaaaaagtagtactacagaagccaagtgaagatatcattttcaggagtaggagagagtggacaaacctgtcaaggattaagcaacagaacaaaaatgcacacatgggatttaacaaggaaggggttattgatgactttaatgaaagtggtgaaggtagaaacagacccagtgagttgaggcatgaatgggagttgaagaaatacctgtggggatgtctacagctcttctaaaatatgtggttgtagttattttaagagtataattggattttttttttaacacaaagaggataaatgcttgaggggatgaatactgcatttaccctgatgtgattattaccccttgtatgcctgtatcaaaatatcttacataccttataaatatatacacctactatatacccacaacaatttaaaaatattttttaatgtgtctgtagaggagaggagtaaagcagagtcagttgggaagaaatgaaaatgagaaaattaagggtgagtttttacattttaagataggagaaacaaatatgaattctgatgagaaggtgcaagagaacaggagttgaagatgagggaaagaggagataattcatagaagtgggtcctgagataataggaacagaggaggaaaagggagtttagtcaggaaggacttctattctattgttggagtagggaaggctgagctgatggctggggaggaaaatttatagatctgtagtgggaaagtgaagacatttacatctgatggtgtggtgatctttgatgctatttactagctccttctggttttttcttcagggcattttgggattgcacttcccttccttcatggagtggctatgagacttactttgg

SEQ ID NO: 6598 - DNA, 505 bp, mus musculus
acaagaagagcattggttcagatagagtatgaagtaaagcagaaaacccctgatgaaacaaaaacttatttatcagtagtaagtccaaagaacataggcaaagcttagctacatggaaaatcatgcccttcgaaagacagaatattgaatctaagccatcataaagaatagaaaatacagaaagataaataaaaaattattacagcaaagataacaacatgaaaacacaaaattctagatgaaattccaaagtgtgttctgctgctgaaatgatgtgggaaataggggctgggaaacaggtctcagatgaaataagcatagactaaacaaaaccatagttgtgcctttcttgagactttctcaaagtctttaatatcctacactgctttggggcccatcaagggaagtacacggaatggattttttttcctaaatttatttgaccaggaaataatttttgcacaagacacgtagggattgatctgggaataattagtcttggtcc

SEQ ID NO: 6599 - DNA, 679 bp, mus musculus
tttagtcgacatgaactgtcacacaatttaaaagaaaagcagggtcctgttgtatgtaagacctcaggtatatttgcccattttcacctctctactcaaagttaatttagtttttaattctcgggtgaatgtgttggtgatttggaaaaacactttccatgtcctggaattcttttctaattctagcactggtttttgaatgaccttgaatgcagtgaagcatatcaaagtaaagcaggaccatcctttctttttttttttcttttttttcccctggcattcagagagaaatatctttcaacggctggcctttaggtattcagaaaacacgacatgacaggtgactgcccatctctttgccgtttttttggttaaattgctttagctacatggccgatcacttaacaagtctttcattaagatcaacccagtagtgttgggattgacaatgtgctgggaacgagttctcctaataattgctaaatgttgttctcatcccaaacagggtaccacataaaatgcaggagatgaaccagcgtgctagctagctagccaggcagaaacaatagcatgtcttcaacttaagcaaggaattccattttctttttcccaagtgattgttgatttcctggtgatcatgactcaagacaaagcttaatgcaaaaacttcacatttcca

SEQ ID NO: 6600 - DNA, 892 bp, mus musculus
agtttccaacattctttgttagctgagggtttttatcctgaatagtgttttattttgtcaaatcctttttctgtgtcaactgatgtgatcatatgaatttttctctttcatctattgatatgatgcattacatgattgattttctaatgctgaactagccttgaatacctggaataaaccccacttggtgtataagtattttgattggtaccttgttatcccaaggggattgattccaggactacttttggctaccaaaagccatgcatatccaagtccacagtcagacctgtggaactgctgatataaaaagttggcccttcgtatttgtgagttttgaatgcctcaaatactctattttccatccacctttgattgtggttgtggaacccatgaatacgtagggacaactgtatttactgcaaaaatcctcatgtaagtgaatccatgcagttcaaacccatgttgttcggtggtcaacaatactctttttgaagagtcattcttgaggtaattcaaaaaggtagaaatttattgttaagcacaggaaggaggcctattttagtgagtctctgctaatcttggaggggtgacatttatgaagcattggtgacagccatagctcttatggagctgacatggttccaccagatgatgtaaggtctctgctgctttctttagaaatctgaacttcaaatcactgtcaaattatacaatatgaaattatacaagtttcagagaaatttataatcctttacctcttagttacatatgacaatgtattccaaaaattattctcagggtaaaggagataatgttcaagaaaaacaaaatctcccagattttgggagttttacctgtaagaacatagtaaaacctagagagaagacat

SEQ ID NO: 6601 - DNA, 1174 bp, mus musculus
tctaacatccacaaggcatacactgttgcagttacaaagaattgtcagacagaatttagaattcttccatgagaaactaactttgtagttttggcggtaacaaaaaatgattattaatttctccccacagacggccaccaggtttacttaagtgatgatatcttagacaacagttctaatataaatatatttcttaacactgtagaaggattatttattatcacctttttccaaagtcttatctaagactaaacgctcctgattataacatgtctttaatgagttcttttattttattctaattttgaaagactgcgctccctgacttaacctagggctaaaattgagtatcaaaatcccactgtggtttctggttcatcagaaaacacacagagctcccccaaaaggcttatttctctactttataacagagaagtgagtcaatctgggataactaatgctttctggtctcttttaattattagaatgcagggctcgggtttgacaatgacattgcgaggctgatgcaattccagaggtctaagggtgacgatttgctgaacagggaagaagacaacatttgcaatgctcttcacacttttgattcactgctcttcttcctgcctcacttttcaagctcagacttttcttgttaatactccaccctttcctgacacagaggtgcactatttgtcttacggtagtctttttctctgttggatgcagagtagctctggtcatgtggcttagaagtcatgtgtcatggtctccatgtcctgaagctttcatctggtattttctgacaaaagatgccacaaagtagtcactgggtaactcagctaacttattatctccttcactggattcagcccattgtgttgcaaaaataatcttatacaatatatttctccaaatccagaagtatatgtttcttgcatatggggagctccttttgacatctgtaggagccttatatccataaaaagaataatgcttggaaccaccttggcactatttttttccctttatgggttattttaattatagaattattacctccaattgtaatcaggatgtgtattaatctttacaggagaactatataattgcttgttaaatgtttctaatagttattaatataataataattattaataaaactagggttcagaat

SEQ ID NO: 6602 - DNA, 3089 bp, mus musculus
tgtcggtatctggctccaccaatgtatttgcccatgaacttgcttcaggcaatttgtagaacagaattcttccctctagcatcattatctgctaaaaaaacagttactgcatgtacatgacaggaaactttggaaatacagataaacagtaggaaaaattgcctataatctcgccatgcagaaataaacactgctgatggagtagtcccctcttatccttagggcatatgttccaaaacctccagtggatgcctgaaaccatggagaatactgaaccctgtatacacaatattttttcatatacatatgtatttatgataaagtttaatttataaattaggcacagtaggccgggtgcagtggctcgcgcctgtaatcccagctctttgggaggccaaagtgggtggatcacgaggttggagttcaagaccagcctgaccaacatggtgaaaccctgtctctactaaaaatacaaaaattagctgggcatggtggcgcatgcctgtaatcccagctacttaggaggctgaggcaggagaatcgcttgaacccaagaggcggaggttgcagttagctgagatcgtgccattgcactctagcctgggcgacagagcgagactctgtctcaaaaaataaataaaataaaaataataaataaataaattaggcacagtaagagattaacaataactaatagaacagttataacaatatgtcataaagttatgtgaatgtggccactccttcttgtcattctacttactacacactgtggccataacttttgcagttttgaggtgcaacagtgaaactaacaaattgcttttccttcttcacaatatcacatgattcattcttgctgtagatcttagcagcctcggtgtatgatttttttctttttttattaagttgagaagtttcaccttttcatttaatggaagcaccttacatcttctctttggcatatccaaattgccagcatcactactcttgcactttgtggccattatgcaataaaataagggttacttgaacacaagcacagtgataactatgacagcaccgtgataactatgataacgcatatggccacaaagtaactgatgggcgggtagaatctacagtgcggatatgctggacgaagggatgattcacatcccgggttggatggagcagggcagtaacaagatctcatcacactactcagaatggcatgctgtttaaaacttataaattattcatttctggaattttccttttaatatcttcagactgcagttgactgtggacaactgaaaccacagaaagtgaaactactgataaggggagtctacaatatttggtgcatattattccaatctttgtgcatagaaatgcttttaaaaatgaatattaaagcatactttttataaacttattgatatgtgcacaatacatttcccccagatcattcagtacctttccaccgcataatttaatgactgcatggaattgtaccctgtgaatgaacttacagcatgttagccagtctatgattggacattgggccatttccaattttccattagaaacaatgttgtgatgaacaatctttgtgcacattgatgattatttcctaggataaagtcttagaagtggaattgctgggtagtcaaaatgtaaaagctttccatttatattgcctaagtgctctgcagaaaaatatgcatcattttcaaaaatgaaaattgtaaaccaaaacctatttgaacaacaagatgctctatgtgaagggaaatttaggatccgtttctttagagtgattcatccctccttagaggcaaattgctattaccaagtagatgtaatgtttttacagataaaagaataacattgaaaatatctaaataaaccagccatgcaagaatattttgctattttctatttctgttaatcagtgagaacaaaataacttactagcataaaaagataagtagaatgacatgccactaatggggaatggggtattttcatagagctacatttccctctttgatattgattaaaatatattttggttattttttttaagcatttttcttgtgcacatatactacttaataaaggagaaggagcaaacattttaaaaatggagaaaaggtactgtagtcgtcataatgttgctgaatgctgttgcatttttctagctgtgaatgtcctgtctatgctagtgggaacggaggtcaggattctagattaaagattacctttgattaggcatctctagtcatttgctggaacacctcgaatgtatctttttctgtatttctatctgggtgaaagtgtccatttgattgattagataaccatcaaacacaacttgatctttcttgttgggcagctaagtcattaaaaagaggctccttcttgtgctgccaccttcaaatagttatgatcattgttttcggaaacaaggcttgggtaattttaaaataaaaagtctgaacttttaagtaggccatgtgtcatctagttttttttattagcttcaaataacaatcaatgagtataccctagaaaacaacatatttcgttcctgtattgattccccacactggaaagctgttaaatgtttagatgctggaaaagcaacaagactaatccatgagtgtctggcatttttttcttcttaattgtaagtgcaccattttatatagtatgtatgtggtggtgacattttgcttgaatatagtttaagagattacgggtacaaagacctgttttcctttcaattctgtgctgatattttctatgattgtgttttatcaatgtcattgaaatttccctcaaagagaaattccttaggaatctccttggaattggcattaaatactctttattgaaagagagattggttttctttatgaaattgttttcttctgcctctgtctattggctaattatgggacttctatttttcatttctactttactgtaatcctttctaagttgaaaacagccttgcaaagaaactcgcagggcattccaggggcaaagagttcctctaacctagaatgaattttgcagcatctgggaatggcatattttta

SEQ ID NO: 6603 - DNA, 3089 bp, mus musculus; identical to SEQ ID NO: 6602

SEQ ID NO: 6604 - DNA, 3089 bp, mus musculus; identical to SEQ ID NO: 6602

SEQ ID NO: 6605 - DNA, 602 bp, mus musculus
ttcgaagcacatctttttatggtattatttttttctgctcttttgtcttagctgccagaagagtggaaaatcttctgacagggtctctccttgcagcgagtttgcgtcagtatatacacttcgttaatataacaaatctagtttccttggttattggatcaagatttgatttcccaggagaccctccttgtctctgcccctgatgatgagatttgctccctggtaattctgcagctagtgtgtcacctcacagtgtcatcagtctcacctcagactaaacatgaggctgaccccagggtcattatcagactgttctgtgtgtgagtatgtgaattgtggtctgtcctggatagttctgaagactcactcatgcattcattcattcattcacccattcccttgacacacatttattgaatactttgtgacaggagctaggaagtggggatagaggaaatgatttggggagggggacacacctgctcacaaggcactgccacttcagacagacatgcagtaactgttatgcggtaaggtaagcactgtatcttcataggtgctcagactctatcaggaagaggtggtaggagtgaggtggtgca

SEQ ID NO: 6606 - DNA, 667 bp, mus musculus
tctctttcttacctgttttttaaaaatttgcgtcttctttttttaagatttatttctatcattagttttaagttgtcttaatctaatgttcttgggatttttgtcatgtttcttgtgtttggtgtttattgaagtttttggttctgtgggtttagagtttttatcaaattttgaaaattattttttcagtctatcattgatgggcatttgggttgattccatgtcttggctattgtgaacagtgttgcaataaacatacatgttcatgtgcctttataagagaatgatttgtattcctttgggtatatacccaataatggaattgctgagttgaatggtatttcggtctttagacctaaagaccctttaggtctttgaggaatcaccacactatcttccacgatggctggaaacacagaagggaacaacacactctggggactttggagggtaaagagtgggaggagggggaggatcaggaaaactagtgggtactaggcttaatacctgagtgatgaactaatctgtacaaccacccccctccatgacacgtttacctatataacaaatctgcacttgtactcctgaacttaaaagtttaaaaataaagaaaagttaaaaaaaagaaaattatttgccatcatttgttattgtagatttccactgc

SEQ ID NO: 6607 - DNA, 561 bp, mus musculus
aagtgtaggggaagctgagattcaaatgcagtcagtctgaccccagaatccctgctgttaaacacccctctatctacagtcttaccatcttgggttgggacattccaaaattcagtcactattaattatttcccaaggaataattcacaaacaattggactggagtcccacaacaaaggtacatgggaatatttgaggtaaacactgaatactcaagtataatctacaaaaatgtgaacactttctaatgtatagtattacatatttaaatatgtttttcacatattgaaaagtttggcatatctctttctactgctgggaaacttatatatagtcattcagtctccttttggcagggtcaggatttcagttatgtgtgatatgtaaaaattttaagtgttgtatttcgggttgacatttcttccaactttggaaagctatgttttacatatcatgcttttccaactggagtgtttgaggttatacttctaattgtgacttttgtcctacaaaatttcacaaagtttctaagtactggatctcattaagtttaattcctag

SEQ ID NO: 6608 - DNA, 580 bp, mus musculus
agaaagtatatcaaggacaatggacttgatgttgataagccaagtatggtaagaattgaaaagatggccatttgatttggcaatccagagttcattggtgatcttgacaaggatgcttttgttgtaattatcagaggaaacacctgattggaaaggattacaaattgtaagaggatggaactagtgttactagcaatggtcaacactctctagctattttgttgtaaaagggagaagacaactggaattaaaactaatgggcaaaatgtggtttaaagcaggattatgtttcagattggagaagaataacatttttgttttgctggtggtgattactatgactacataaggaaaaaatagtgacgcaaagaaaaagaagtaattccaatgtgtagttttaaataggtgaaatgaattgtatttgtgcataagggaaggttttactgaggagagaatatttttatctcaagaaacttgatagagaacagagtatatgagtttggttgtgggtacatatatgaggctgtgagactttctgaagcttctccctggttacttcaattttatcagtggaaaaaga

SEQ ID NO: 6609 - DNA, 6953 bp, mus musculus
tcctgtctatcatatttagagttgccatataaccaaataagggtggaaagagctgtacacagtagaaaattttgaccctgggacctagactattaatcagtggttaaccacaaactgagctctaaactacaatccacagggattcctcactacaacctcctgatttcactggatttcttaagagttacctgatctgagggccagatcaagcaaagccaaaccttccatagctacaggaaaacatttctttggggttagcagagtataactggttttaaaacatattattgtttcattttttcttcaaatgtgaatagtttcaaaatttttatcattacataataatgcacattcattgtattatattaaagaaaaaaatcaagcccaaagttacaagaatacattaaaaatgtcctataattcctctaccaaaaggtcactattgttaatattttggtatagatctttacagatttcctattcaaataacttttcagaaatggttcaagctcatttgcaatgtaactaaaactacttctcttccaaatagatatcatgtgattttttaaaaaatactcaattttgtttatatggaactgttttcattgcactaccttatatgagatgaaaaaatatgtacctaaattgttatatagaactcaaaacaatttttaaaaaattatgtaagctagaattactttcattagtcattgataatagtttatatgtccaaatagtgacagaaaaagtattttataattgcattaaaatgatgaaattcataatttgttattcttttattattttatttatttttattatactttaagttctgggatacatatgcagaacatgcaggtttgttacataggtatacatgtgtcatggtggtttgctgcatccatcaacccatcatctacagtaggtatttctcctaatgctattcctctcctttcccccgaactcctgacaggccccagtgtgtgttgttcccctccctgtgcccatatgttctcatcgttcaactcccacttacgagtgagaccatgcggtgtttggttttctgttcctgtgttagtttgctgagaatgatggttgccagcttcatccatgtcactgcaaagcacatgaaactcatccttttttatggctgcatagtactccatggtatatacgtgccacattttcctcatccagtctaacattgatgggcattttggttggtcccaagtctttgctattgtgaatagtggtgcaataaacatatgtgtgcatgtgtctttttagtagaatgatttataatctttggatatatacccagtaatgggattgctaggtcaaatggtatttctagttctagatccttgaggaatcaccacactgtcttccacaatggttgaaataatttacactcccaccaacagtgtaaaagcgttcctatttctccacatcctctccagcatctgttgtttcctgactttttaatgatcgccattctaactggcatgagatggtatctcattgtggttttgatttgcatttctctaatgaccagtgatgatgagctttttttcatatgtttattggccacataaatgtcttcttttgagaagtgtctgttcatatccttcacccactttttgatggggttgttttgttcttgtaaacttgtttaagttccttgtagattctggatttagccctttgttagatggacagattgcaaaaatttactcccattctgtaggttgtctgttcactctgatggtagtttcttttgctgttcagaagctctttagtttaattagatcccatttgtcaattttggcttttggtgccattgcttttggtgttttattcatgaagtctttgcccatgcctatgtcctgaatggtattgcctaggttttcttctagggtttttatggttttaggtcttatgtttaaatatttaaactatcttgagttaattcttgtataaggtgtaaggaaggggtccagtttcagttttctgcatatggctagccagttttcccaacactatttatgaaatagggaatcctttccccattgcttgtttttgtcaggtttgtcaaagatcagatggttgtagatgtgtggtgtcatttctgaggcctctcctctgttccattggtctatgtatctgttttggtaccagtaccatgctgttttggttacagtagccttgtagtatggtttggagtcaggtagtgtgatgcctccagctttgttctttttgcttaggattgtcttggttatacgggcttcttttggtttcatatgaaatttaaagtagttttctaattctgtgaagaaagtcaatggttccttgatgggaatagcattgaatctataaattactttgggcaatatggccattttcacaatattgattcttcctatccataagcatggaatgtttttccatttgtttgtgtcctctcttatttccttgggcagtggtttgtagttctccttgaagaggttcttcatatcccttgtaagttggattcctaagtattttattctctttgtagcaattgtgaataggagttcactcatgatttagcactctgtttgtctataattggtgtataggaatgcttgtgatttttgcacattgatcttgtatcctgagattttgctgaagttgcttatcagctcgaggagtttttgggctgagatgatggggttttctaaagatacactcatgtcatcagcaaacagagacaatttgacttcctctcttcctatttgaatacgctttatttctttctcttgcctgattgccctggccagaacttccaatactatgttgaataagagcagtgagagagggcatctttgtcttgtgctggttttcaaagtgaatgcttctagcttttgcccattcagtatgatactggctgtgggtttgtcataaatagctcttattattttcagatacattccatcaatgcctagttggggttgctcttcttgaagagtttctctgtggtgttctctgtctttcttgaatttgaatgttggcctgccttgctaggttggggaagttctcctggataatatcctggagagtgttttccaagttggttccattctccccatcactttcaggtacaccaatcaaatgtaggcttggtcttttcacatagtcccatatttcttggaggctttgttcattccttttcttttcattcttttttctctaatcttgtcttcatgctttatttcattaagttgatcttcaatctctgatatgctttcttctgcttgattgattcggttattgatacctgtgtatgcttcatgaagttctcgtgctgtgtttttcagctccatcgggtcatttatgttctactctaaactcattattttagttagcagttcctgtaaccttttatcaaggttcttaacttctttgcattcggttagaacatgctcctttagcttggaggagtttgtctttacccaccttctgaagcctacttctgtcaatttgtcaaactgattctccatccagttttgttcccttgctggcgaggagttgcgatcgtttggaggagaagaggcattctggtttttggaattttcagcctttttgtgctggcttttcctcatcttcgtggatttacctacctttggtctttgatgttggtgaccttcggatggggtttttaggtgggtgtcctttttgttgatgttgatgctattgctttctgtttgttagttttccttctaacagtcaggccgctcttctgcaagtctgctggagtttgctagaggtccaccccaggccctgtttacctgagtatcaccaccagaggctgcagaacagcaaagattgctgcctgctcattcctctggaagcttcatcccagaggggcacctgccagatgccagccagagctctcctgtatgaggtgtctgtcgacccctgctggaaaatgtctcccagtcacgaggcacgggggtcaggaacccacttgaggaggcagtctgtcccttagcagagctctagtgctgtgttgggagatcctctgctctcttcggagccagcaagcaggaacgtttaagtctgctgaagctgcaaccacagctgccccttcccccaggtgctctgtcccagggagatgagagttttatctataagcccctgactagggctgctgcctttctttcagagatgccccgcccagagaggaggaatctagagaagcagactggcactgtggtgggttctgcatccagttcgaaattcccagcggttttgtttacactgtgaggggaaaactgcctactcaagcctcagtaatggtagacacccctacccccaccaagctcgagtgtcccaggtcgacttcagactgcagtgttggcagtgagaatttcaagccagtggatcttagcttgttggactccatggggtgggatccattgagcaagaccactcagctctctggcttcagccccgtttccaagggagtgaacagttctgtcttgctggtgttccaggcactactggggtatgaaaaaaaagcctcctgcagctagctcagtgtgtgcccaaatggctgccccattttgtgcttgaaacccagggccctggtggcgtcggcacccaagggaatctcctggtctgcgggttgcgaagactggggtaaaagcatagtatctgggctggatagcaccatccctcatggcacagtctctcatgccttcccttggctaggggagggagttccctaaccccttgtgcttccttggtgaggcaacgcctcaccctgcttctgcttgccctccatgggctgcacccactgtctaaccagtcccagtgagatggaccgggtacctcagttggaaatgcagaaatcacctgccttctgccttgttctcgctgtgagctgcagactggagctgttcctatttggcgatcttgccagccccccattcgttattcatttataaagacacccaaaacatccttaccagtactttttctccttcccttcctctctttttctacttcccaacctttcccccaatctctctcggtcctccttttgttctctagagctaacaacctgagtttgattaactcagtaattaaagctgataattatatgatttcactaggacaacgtttgtaaaatgtacaagtagactacaaatgtagcctctttgtttggatgtgtctgtatatatatattcataaagtaaccatgaatgaaatcacaagaaatgaaccatatatttggggaggaaatttagtagcttggggtgaggaacagaaataggaaataaactttttgttatatacccttttataacttatgcatgatgcttcttaaaaccgctgttctctgtggtgggaagatctatgcacacctacccccaaaagttcaggaagctgagaagctgaaggaagaggccaacaaatccgttttcttagaaagaaacatttaaaagggacttacaaacagatgccatgtctgtgtctcaggtggcagcaaaacaaaatggtggatccctgcaccattataaccccagacccagggcttatatgccattggaaaagggtgattcagagggatgtgtaggaagactgaagtatgataacatcaaggttgttttgacctaagggcaggatttatcataagtgtgctcttacacaaggaacaatagataaactggaaatcttacagaccttcctgggactggggttaatcagaagtcaacatggcagattagcatccaagatggagttactttagccttctaagcaaaaaaaaaaaaaaaagtctaaaactaaatctacatatatatctccaaatatacgaagttattagtttaatagtgcataggcagctccccagattccataacttactaagtgcccagagcaacaaaaccactaaaagtaacagttagcttataagtctgcaatggaaaaaaattttttcttttctctgaaaatagttttagttgccattttatagaagagtgccatgacatgtttagggtaccatgtttgaatcagtggcctggcaaaggcacaccagtgcctttcctattgtagtactatgtcaaactgtatgtcagtgtgcctggcctgaaaacacacacacacacacacacacacacacacacacaaagactagaagataaatcatctgagactgttccttagttgcattggagacagctgcaatgaggtaagaaaagtgacaaagttgaattttaaccttggtctttttcgaaacataagttatagccattcctggttatgtaagtcatagtcatgcccttttagcaacatctgtgtggcagagatgcatgttcaagtttgagagttagttatgcagggattggatattcttgattttgcctcacagttttcttgctcttcatttacaggtagtgaaatcaaagttatccaaagaatataactttattaaaatgaaaagatcaagaaatcatatcatgggaagatatttcagcaatcaaagcaaactacaacaaggcactgtaacaaattttcgatcgccatatcatgtcagaggtccaataaatcaggtttgttctgaaatccttctcagcaggatgtgtgcaaataaaaggactatgtaggctccctgcaggagagctgaatctggagctggagacgagctagtcacccggacaatggtctaggagccaagcgctgcacatcgcacacatttgggatcgaccacacacacttgtgcacaccagcacatgcatgcacaccagtacacacacagttaaataatgataacacttcttacagctttatgaattcaagatgtgaccttgaacaccagtccatttcacagtgaaagatatacctagagaaacgttacttgaagcataattattaaccagaaccactgtgggccaggtatggcattgtga

SEQ ID NO: 6610 - DNA, 103 bp, mus musculus
gaaagagcagacttgatagcttatctcaaaaaagctactaatgaataataattggccactgccttatttattacaaaacagaaatgtcttatgacttttttat

SEQ ID NO: 6611 - DNA, 514 bp, mus musculus
gtccttaattaattttcagtctatttaacaagatccccactgataacagaatctcagtgaatttgttgtaagaattcagggagtcaccttggacttcctgataagtggtaaatctaaacttaccacctcttggccaaaaatttattggttttgtgacatatacttgtggctgctgtatatgaggcagtttggttttaggttaaacaaataatttggaattcatacaaagcttttactttttagcacaaatgtttcataggaaagactgatgacaaattgtgaaggtattatgggtcttcaccagtgaaagtatttctgtggaatttttgagtctgctgcattcattccttctcccattctcttctccatgtttctgatatttatatagtcagaaaccaactatatgaatatctagtactaatcatgctttaatatcaaatctttatcagaattgctgggggtcatcaaatttggtagggaacatcaaagccttggtgctcttttcttatgcagc

SEQ ID NO: 6612 - DNA, 785 bp, mus musculus
aacactatcattaagaaccttccgctacactttccctctgacaaaacaagcactgtcaaaccattccctgtgtctgttaaagcttttcaggaagcagaaactgggacagaattacaagtgtcagaaatgtactgggacaaatccttgggaagaggaatcaggagcaggcagggagagtcttcagatgcaatgcatgcctgccacttgtgaaaagagaggaaagcaagatttggtaagaagctcagacttcttttagctcttagaaagtctcagccaggccaagggggattcctagagcaatagttccattagaggtgtcctgtcttagacagaaatggccactatgcttagtcaacggctggagacatcctggggagagcagggtctcagcacccaaactgcagcagatcctgatggtgcagctggtggatgccgttagctaactgcactcctcacagcgggttctctcttccagagaaatatgaacagcgcacctccctggcagtagtaatcccgtgctatctcacgggcttgccctgctccttctctgcatcattttactggggtattttaggtggtttctactccaaatacctcatatgtaaaattcactcaaaaaatcctcccttctctgtgtatccttacccctaagtgcccattgcattatacaccgcagccatttgcaactgcaaaatcatttttattagcatacaaggaactctggatttaacctatattcttactaggaaatgaagaattgcgtatgtgctattactcaattacca

SEQ ID NO: 6613 - DNA, 375 bp, mus musculus
ttaaccagaatcaggaaaggagtgtatagtttgaaaacattctcaatattataattttttatttgtaaaatgaaacaattatttctatgcttttcatgatttcagctgaaggtaacgtaaaacaaatatttttttgattagtgcagatatgcagaagatatttttaactagaagcggtcttctcctgaagggaagatgaagagtaaaatttaattttaacaaaagaggatatgatttgaatattttaacactaaaatagatgtcttctaatatttcttccaacattaagattctgtgagctttcaaacatttaaaatatcttgttttaaaatatgttattgtaattattttccttcctcctacatgatggttgtg

SEQ ID NO: 6614 - DNA, 1196 bp, mus musculus
atatattcaactattttaggatatatacaaccttaagttatctgtgaaagccagatgagttctggagacattggtatgcaagatcatgcccctgagactatttgttttccaaagctccttcatagcatccagtcctcaaacaacaaacattcttttgctattgaaactggttcagaacagaacagaaagaacaaggcttgctggttgaagcattggaggtaagccgaccatttgcttcacaaagcaaagcttcaccctacctcttcaaggcgctttcatctgaaaactggatttggaaccaagtagaaacaagctctctccagtgggattcatcacttcctgatttcagatgggcacaaacaatagactcttgtattttcctgctattcacgtttttagtcaggtctgaaactgaaggtgtgcttaaataatgatggcttatacacatttctttttctccaacctgggattcagagtcatactttcccagataaaggtgatactgtttttcaggtcagttcactcaaagatggtgcaaaataatatgaggaaaaagtccttcataatgagacagataattggaagcatacagtctctgctgatcctttcaatgccctgtaatttttttttcttgatttttaaaagatgtggatttcttttctgagggcagggtatagggaggagagctctttggttgtccaaatgctattaaaatcagataatttcatctatgtgactttcaggaagccatttgtttcccatattctcatttgtgtttaattaacaaagactgcaattgtttacacctatacacactagaagtttgaaagtagtgctgctaatcatcaatgtgacactttcatctccattgctttttaaggatggtcagtctcttttgaaatggaaataaaaaaatacgaactaaaactaaagctacacacaagtgctgtttttgcctccaaatcttcataaatgtaaaaccccattattgatctgacttatcatttcaacaaatcctgggatgctgcaaccacaaatgtacattgctcttgctcacaagagagtctgttcaactctcccttccttagccacctactcatatgtgaaagatatctgtggacaaaacactaaaagcatcgaactgataatgttttgggccagctcatgccagaacactcttaaagaccaattttatt

SEQ ID NO: 6615 - DNA, 1353 bp, mus musculus
gggaagggagacttcatatcataatacaggtctgacacctgtgaaaggagaggggaactgggcccaagagcctcaggctgcatgcagcatagttctcagaaagtttcaaccagccggctcaggtgtttccaagccaaacttgctcatcagaggagtcctacatcttccatgaacgtgccaccaccaacaccccgtgctgtgcccgctcactgactgggagtagtgccagagaagcatggcttcagtgcaaacccagcagtgtatgccttgggaaggcagggggacctgtcagtcacttccgctccgtggagcaggagatctgagaggccatggtcaccacagacaagactgtagagaggatgcggattctaatgatgacatggtctagaactgtggtagcaaggactgattctgaaggggagaaataattactggagatgaagttacaggaaggaggggactggatgttggagttcaagttcaaccacagttgtgcataacacaactccaagttgtgtcaagcaccccacagtcactgaggatttggacagttattaaaacaatcttctggcagatggcaatatttggggttgtggcgggggggtggggaggtgggcggggggaaactagtttgtcgatgccaggatttgaggtgaaggttcaagtaggagctagtctttgaagaactaatcatgacaaaactcactaggaataggaaatctataaattacaggctgaaaggaaaaggatggtattgtccagtgacaagattctcaaagaagccgggattttggcaggcagaggacgtgctgctctgcgaacaaccacgactcgcacggaggccgcccccagcctgtccctaaggcacgtggtcctctagagggcttcgcgggagagttctggctcaaaccagggacggcgagggcaaggggtgaaaggggtttgaggcgaggcagaggactcaggggtctgcggacggctggtcggcccgtggagacggccgcggcgaggcgcctgaggtacggcggtgcggagcgagggcgaggtcccgccggcggccaggcggcggcgctcacggagccgcgggcttccccaggccccgggcagcgtgctggagctctcgggcggcgccgccgcggagcttggcgcggcagctggcagcggcctgacgcgtggtgacggcgcccgcgggcaggcagcggctcccgggggcggccgggcgcagggcggcggcgctgcgggacgacggcttcgcgaggcttcggcccgcacgggtggcagcggtccccagggaggaaagacaaagatatgcgggttagaaaccaaggaaagagcgccgacgcctctcagccc

SEQ ID NO: 6616 - DNA, 965 bp, mus musculus
tttttcagggaatcctaaaaaagttctaagatacctgggaccttcacatagtctgaaagtcctgcaagtcttccctgagtgattctgctttcaagatcatgtgattgtgaagccttaacaaatagtgattctctcttcaacaatcaccctgttttttaggaattaattgtacagggccccgctaaaagcctcaaaagcctgcaaagggtaacctatggcctctaactggatgcctctggggctctacagttgatttctggaactgaggcaaagctgtaggtcagagtgccaagaggcttattaagcctgagaaatgtgaaacttgacaaagtattctctgatacatgtggcctattgagagactggttccctttgtctgcttaagcagttttacttcttgaggaatgaaatgcaaaggaagggctctccttgtctttccaggttagcagagaagcatgttcacttcacagcgattagctgagcttgcccgagacttttgtgcccgtcgtggcctgccagttccctccctgccttccctgtggcgttttagctgatctgtgctgtttgtagccatatggtcccctgagcacgtggcttggcttccctgttcctgctgctggatccttgggcattgcagatttcacagacctgaataacattgttgtggggggtgggggagggatggagtggaatcatgtcctcaagaggtgtctccttaccaccctacctggttagaggcttcttgcttggtcctctgtacctatatatagattaagcagagccctgaactaggtgctttgaaaagatgtaaaataactagaagtggttcctgccttcaaggagcttacctgctagggctttgtctgggagcagtaagtggttaactggcattggtggccaagtccagttttggagatcaggatataaactgtccatgggtacagtagattttaaaatgtatttgg

SEQ ID NO: 6617 - DNA, 2245 bp, mus musculus
ggataataacatgctttggatacctcagctgaaaaagaatttattattagattattcagggaattaaggcaccttctcagcatttgaacggtgaaactggatggagaattgtttaggatactggaacaattctagtagccaggtgctactgtagcttttccttgtacctctgtctgcttctttctccatctgcttgtcctgtcctactgactactgctgactttctcccaaccttgtggcctagatagatagatagattgattagatagatgcatagatagataggtagatagatagatagaggcatagaaagatagatggatggatggatggatggatggccggccggccagacggacggacggacagacagaatctgccatctcatggcttctgtttactgccttctctatttctgtctgctctttacatgtccttatgtgtctcacattcagattatcaaagagaaagaatcttcttagaaagcatttcctggggagagtgtccctattaggaagaattctgccaaactactttataaactgctaatcaaagcgtgggtgccaaaaccttggtctaatctaatctgttgtggacaagatggtaaagtaacatggtctttacctaaaggactctcatctgaaggctgtaagcctggctgtcactcttagggtactgcctggtacaagagagctgtaatattttgctagtctttgtccctgcgtgaagtacagaaaccctgtcaccaaggatgccatcaacctgaacaccatcgtgaaaggctcttcatcatctttcctactcaaagaaaattcatcttttccttgtctgtatattttgaaaagtataccaacgtattagaaataaacctgtatgtaattatggtataacagagacgttatctttttcaaatagatatatagatatagatacttatagatttttgttgttgtttaggagaactcatccagattcattctctgcacctcagttttgcttttttttttttgagacaggatctcgttctgtcatccaggctggagtgcagtggtacaatcatggctcactacacccttgacctcccaggctcaagcagtcctcccaccttagactctcgagtagctgggactgtaggcatgtgccaccgcacctggctaatttttgtagagatggggttttgccatgttggccaagctggtttcaaactcctggactcaagcagtccacccaccttgacttcccaaagtgttgggattacaggcatgagccacagcaccctgtttttttgttttttttgtgtgataaacgatgataaaatagatcatcatcattgcattattgtgagaatagatgaagtgatacatgtaaaatacttgatacaatgtctagcatattacaaatgcttgataagtggttgctgcagttgtttttactgactgagacatggacataatctcattaaaagtaatcagtgttaatgatattcatttaaaaataccctgcttatttcagtttccaaggtatctgttaagcatctccattagaaaatacacaaatctaagcaagtgtttttatttttatgtctacttgttttggatgaaacacattgggattttctgaagttctgttttataaaatacgtagtatattcactttgtttggtagttggtttagtgctaccttgtagttttaagagaagataggaaatgctcctacccagtctctagcaccacagctgcctgtgaccacctggcattaccattacatttccaagaactccacaactacactatctacctggcagtattgttaattctggattcctaaactgacattttctaaatatccagaacaactcctcatactcagtataacagtgtattttattccaggtctgaaagacatttctgatattttctcataactccagataattatccttgtgtacattttctaggtttgaagaaaaggcccaagtggatccccttagtgctctgaaatatttacaaaatgatctttatataactgtggatcattcagacccagaagagacaaaagaggtaaagaaaggtggtaataaatttcagaaattaagtatttttaaatgtcttcctaacttatatttaatgattttgctcttgagtgtgtaaaggaaaacgaagaaaatatgatgacatcagtaatctttaaaatgtcacagagcaggtgaaataaaaattgaataggcatgttttcgtgtgataag

SEQ ID NO: 6618 - DNA, 2245 bp, mus musculus; identical to SEQ ID NO: 6617

SEQ ID NO: 6619 - DNA, 977 bp, mus musculus
cccaaggagacatgaccatgctctacccagtctttttggataggggcatggaggtaggtggactctcattctcataatttccgggcatgactcagccagggttgttgagtatggccgcccaggctgtgcactgcacagctctaaggggaattgtgcatcatggtggaagacctgccctggagcccagaatcagtcaccaactgtcattgcctagttggccaggccatgtggtttattcattcagatgctcctgagatgtgctacaattctttatcagcaagcagtgcccttgcagttgctaagctagagggctgtctctccactggcaccttctccttctagtcctagcaagccccatggtcacttcagtggaggagactcccttgggcccagccagaggacttagtgtccagagctgagttcattgcatccctctccctaccctaaatatgaggaaagcagaatgctggctccttttttttgttgtgccccaaagctgttcctccacccctatgtagcctctgacttaaccaggtgccactcaccatgcaagtgggggaggctcactgccgtatactccccaacccagactggtgtccaccagcatccaactgcacagcacatcagctgtctggccagcttggagagattcctcttcctttgctccaaccactcaaaagtgcatgcatgcatacctccataaaataaaaaacaaaacaaaaaaactgaagaaaaaaacaacacaataacaagcaaaaacgctagtgaccagatacctcagtgaggcattttcccctttgcctattagtctaaccaccccagaccataatcaccatgagcaatcccagctgtgacatccacaggactaagggatggatggtccccagagacttcttgctccagtgaacaagcatgtagtccctatgctttcattcctttgaccacctgacatgatgctaagctgtaaatcaggcagc

SEQ ID NO: 6620 - DNA, 203 bp, mus musculus
ttcatttttgactggttatttacccttctgggtgggaagttatagattatatttttgttcttttagattttaaccttaatttttagcacctactttgctacagagctattttaaagttatcaaatgtctatttttctttaatatttcaagtgcagtacacattccaaggtatgattattattcttgcctatagcaattatcag

SEQ ID NO: 6621 - DNA, 203 bp, mus musculus; identical to SEQ ID NO: 6620

SEQ ID NO: 6622 - DNA, 644 bp, mus musculus
ttttgctggtcaaacagcaatacttttgcctttttttttttttttttaacttggtcgcagttgaagatgatgaaaaatccatttactcgtgaaagggtaaatgcaacttcctgatgtgaaataggggcatttaaagcactcacattaaggaaagtttgcattttaaatataaagtagtcttaaaatttttctctacccacatataaacaccattccaatatgtgtgaagagctgttgttcatcttgtaggatcactaatcacaggattaaagcgatgaggaagtatatacagtgaagaatgatgcccttttctttaaaacaaaaatctggaggcagccagaagagcttgggaaaattcttgtattttatatctattatgctcttgattttatatctactgtatctccctgatctgtggccagctgggatgcaaatacggcacaagaagttcacagtatcaaaggagcaagtgaataggaccccagaatgtgattgttatgaaagtactgagattattacatttaggccctatgtgattctggaggaagtgagttttactgctcagtagaaaattatatatatatacactgtatatataaaacacacacacacactgtatttagaaagaaaaagaccatctgttc

SEQ ID NO: 6623 - DNA, 644 bp, mus musculus; identical to SEQ ID NO: 6622

SEQ ID NO: 6624 - DNA, 190 bp, mus musculus
ctggagttttagtttctgaaaatggtaaaatagagattccttggactgagggacataagtcatagctgagtgtgagggctgttattctgaaatcaggcaaagtttacattaatgactgctgacacttctgttctttttcctattggctggcatccaggaatataacttcagacaaaagactagaaagtct

SEQ ID NO: 6625 - DNA, 2227 bp, mus musculus
cctatagagattttctcatgtccagtttgggactgtaatgtagcctgaacccttccacccacctccccctgcccatccccaccccttttcaaactcctaagtctgtcctgtctagtcccagttgggcaaattgcagaacctcacgtttggtggaatggtctctgatatggtttggatgtttgtcctctgcaaatctcatgtcgaaatgtaactcccagtgttggcggtggggcctggtgggagctgtttgggtcatggagtcagatccctcatgaatagcttggtggtgtccttgtgataatgagcaggttctcactctgagttcatgtgtgatcttgttgattaaaagagtgtagcacctacccttctcttgctgccgctttcactatatgcatgcctgatctgccttcaccttccaccatgagtacaagctccctgaggcctcaccagaagccaagcagatgccagcgccatgcttcttgtacagcctgcagaactatgagccaattaaacctttttttgttttgttttgttttgttttgagacagagtctcactttgtcacccaggctagagtgcagtggcacaatctcagcttactgcaacctctgccttctgagttcaagcaattctcgtgcttcagcctcctcggtagctggacttacaggcatatgccaccatgcccagctaatgttttatatttttagttcagatgaagtttcaatatgttggccaggctggtctctaactcctgacctcaagtgatccacctgcctcagcctaccaaagtgctgggattataggcgtgagccactgtgcctggccagaaacctcttttctttataaattacccagcctcatgtatttctttatagcaatgcaagaatagactaacacagtcttcattatagccactgccccattttcatccatcaggtggtagtatctctgctctgttaaaggtgatttgtgatctacttggaggttatcacttcaaggccacccaattccatgggttcggatggaaagatgcagctagtgtgcaatgtcctttgccttttatctgcctcattgggctgcgatgccatgattcatctgcagtagcgtattccatactaccacatcatcagaaagatctccacttacttattggcattccatgggagccttagtgacaatgctgagctgatggaagggtcgtatgcatcatgaatatgaatatcattattcaaattaccctggtacatgttgaagataaaaggcaatgttttattttgtgttcattaagcactagagggtattttcccgtggctgccgactcattatgcctgttatggttaatgggagttaaattccagcatcacgttaaggggaagaaacgatccctcaagtatttggaaactctttcctccaaattgcagatcaaagctaggttaggaacttgtatgctgtcttgctaatggattagacaaactgcattatttgaatttttctctcaaaatgctaactttccctaagtagaaatgattacagacattttgtaagcatgagtgattgtgtgatctactacagccagccactattatggcttttccctccaggggagaaaaattaacattgtctaggctggttgcggtggctctcacacctgtaatctcagcactttgggaggccgaggtgggcagatcgtgaggtctggagatcaagaccatcctggccaacgtggtgaaacccgtctctattaaaaatacaaaaattagccgggcgtggtggtgcatgcctgtaatcccagctactcaggaggctgaggcaggagaattgcttgaacgaaggagttggaggttacagtgagccaagattgcaccactgcactccagcctgggcaacagagtgagacagcaagactccgtctcaaaaaaaaaaaaaagaaaaaaaaaataacattatctaaatgcgtgttatgtatcaggggctctgcttatgccttctcactcacagtgaacaaaaaccccaatgagacatcatatatatgaggaaactgaggcccagaatggttaaattacccaccccaaatcacccagtcgatgggagcgccagacaacaagcccagggctttctggcttaaaaacatgagaatctactgtttggggccatctcccaagtgtctgtcagatgcctgctctaggagaatgttatgttcgaggatggagtaggcatacgagaagagc

SEQ ID NO: 6626 - DNA, 1021 bp, mus musculus
aaattctgatatatcagggcctttatgtctcccatggtgcttaaaatagaggagatgcttggtcaatgctgagaaagtaggaaggttttttcttccccaaaaggaagaataaaacaagcagtgacctgcacagagccctacacatgtgcttccgttgagatccatggctgctgtacacctcagcacacagtgtgcctcaggcctatactcctgagtacccacactcgcacccctactcacacacagagatacgcacgctctttctttctttgcagggcagtgtgatggtctaaagtagaacactgcctgtgatcaggtaggccattggaaggcttgtccccaaatggcctccgctgcatctggaaatctgacctgaccagctcaaagggagtaatctaatcctggtcacattttcagtgagttctcaagtatcagccgctttcctgatgcaaacccagggctgaatttccccatgaactagcccaggccggccaactatttccaaacgagaacacagctcctgccagtgcagacttaacaagaacttaagtttctggggcaactcagccctgctggagattcattatcccactgttagttaaggggcaagcaagccttggctggcaagcctgctaggaggccaagaagtggactctgtggcattttataatgatgggtaaacagcagaaagaagactccagcttctccccgcccactggaactccagagctttgggtcatgtctggtggtaggtcaaagaccaccgtgggtggtggggcccaggaatctaagttcttaacaagatctctagatgattctggcatactaaagttggaggaatcctgactgtattaaagctatccatgctgttggcccttcttatatggcccaagttcagaatttctcccctcccttggtgaaggaccctgtgatggctcagggccacccagctaggcctgggcatagagccgtggcccattaacctccttccaccgccgaaccatttcttgtttgctgttgc

SEQ ID NO: 6627 - DNA, 658 bp, mus musculus
tttagggaacctctgttgtctatgaagccatactctctgaattcacaaaactcgtgcttgtgtaaaataatagctactacattaccatgtcttgctttcagttcttttctgcaatttagtaatttgctgcatgtatagttggcaaaatttaatttgtttatgatgattccttttactttctttgcagttgagttttgccatttttccatcttggaaactgatatgaaacataaaaatgtttagagttgtctgacaactccctaggaaacttttaacaaccattaatttagaaacaattttgcttctgtaattcatttctcaattggttgtgatggaagtaattgtcatatccagagggagaatcttgacttcaggcaatacataaatatctacactcttcagaaacagcattgttttagtggtaaatgccctcagttataaagaaaaatggaattaaatcagggaagcataataccatggcagaaccctttctcaataacaatcaaaattaccagccctgtgcatcatacacttcagtaagagagaaagactgattttattcttgaaatctttatttctcaaatgtttgattaggtgagtccatacctatgtataatccacacattcattatacatgcaacaaaagtatttttattac

SEQ ID NO: 6628 - DNA, 1147 bp, mus musculus
ccaatttcctttgatatgcctcccaagatacagggtgatggtttattttgggcaaggctgacagctgctttccactgctcttttgcaaggaactgcatgaggatagccactgagtttatttttacatctcaccacaggacaaaatccacattttcaatcaagtgttggacactccaatttaacaaattgtgaaaaatctgttggcccagataaacgtatgctaagagtattcctttctctaaattaagattttgttcccggaagcccaagaattcattaaggccataattagccatgatcactgatgatttaaaatacaataataaagaggaagtttatactgagcttcataggcaccattggatctgtcctgcggttgactttttatagctgtagtttaaaaataacttttccatttcatctgctggctgtcttttctccacccagcccttcatgcaagtagggtgggggctgtcatccaagctcccattgctgcaggcagtgacatctgtctcagtgacatcagagaaagtgccacatcatctcaaaccaacatatcagttacgaggtcacaggctttcccataaaaaggactggcctcatctgtcatcagtgaaaagagacagcaagcactcttcaaagatgtatttgcttcagcaaacgcagagttaccctgggagggggcattttctcattattccatgagctgatgtggtcaagggaattcatctgagtagctgcctaaactcagaacttaacttgattaaaggcacatagcagtcatcctctgattgaaactcaggtgtctttgcctttagagccaatcctcctgatatatatatgcatcagcttagcaattctaaagccatctcatcagcttttttggtgtttcacagagagacaggttttatattttccatttttctaaataaagcccaggcttgacttcctgaaccttaactaggcaagaagtacccttgattcttttatctattatctgcattttatctttgatgtatccagagaaaataccacacaatatttatttgccctgatggtttttgtgtcattgttactgaaattttgttagtatgcatctccttgccgtcagaatgggttttattgtggctcttccgtctatggctta

SEQ ID NO: 6629 - DNA, 811 bp, mus musculus
cagcatagtgatggcagtatacacaggctactacaggaacaaagaaaaaggatacccaagtcagctctgaggagcgagagacagatcctaaaatcagatgttcaggggttagccaggctgaattggggaaagtgacagaatagacagctttgaaggcagaggattgagcctgaggcagggcacaaaggggagaagcaggatatggggtatttgtgaaatggtagtcagttttgttgcctaagcatagtgtaatgcaggatagggaagagcccaggctgaagagcaggcagaccagactgtgggaagccttgtgagtcttgtgagggcctagtgtgatgaggtggaagggttttaaacagcggaagttcagaagtatgactctgtccatgcagaacacctaagggcttacttcccataaagaaagctctccccgtagtcttccaggtgctctcttaagtgtacttttcatcattacttacactcccttttggtgttttataggtaaacgtccaaaaaaaggaatggcaacagccaaacaacgtcttgggaagatccttaagttgaacagaaatggccatgcacgtttctttgtgtgacagagctgctgttgcagccattcttccctttggagaccagtctaggggtgcaggagcctggagcttccgctgtccccctgcctggagcagtttgtgtgtatagtaagaacactgcccgaagaacagaatgaacctgatgctgcattttcactgtgccacacccactcagcaataaccattttggacctggtgggggagaggaagaaggagggtag

SEQ ID NO: 6630 - DNA, 347 bp, mus musculus
aaagacaatgaaaggaacccaagtgatttaaatacattgataaattttccagaaatgtggtttgtcacaatatatcccacagtgggttttctgatgtagttgtaattatcttttgtaataaatatacaaacaattttcaccagcccatatgtctactcaaatgtaggactgtcattccttggaaaagtatccaatctagtaattttgaaatcataacttactgtttcaggttgcaatattctgattgtaagtaaggttgcgaagttattctcatgtttagtggtaacttatgttcactcttgtgtgaattgcctactcagcctcagtattgctatttttattgagct

SEQ ID NO: 6631 - DNA, 48 bp, mus musculus
caatgcccactgttttcagagtgaggccttcttgttactcaaaccact

SEQ ID NO: 6632 - DNA, 893 bp, mus musculus
agataaccagacttgggtgagtgaatttattctcctcggcctgtccagtgactgggacactcgggtctccctgtttgtcctgttcttggtcatgtatgtggtgaccgtgctggggaactgtctcattgtccttctgatcagactggacagccgactccacactcccatgtatttctttctcaccaacctctcccttgtcgatgtctcctatgccacaagtgtagtccctcagctgctggcacattttcttgcagaacataaagccatcccattccagagctgtgcagcccagttatttttctccctggccttgggtgggattgagtttgttctcctggcggtgatggcctatgaccgctatgtggctgtgtgtgatgccctgcgatactcggccatcatgcatggagggctgtgtgctaggttggccatcacatcctgggtcagtggcttcatcagctctcctgtgcagactgctatcacctttcagctgcccatgtgcagaaacaagtttattgatcacatatcctgtgaactcctagctgtggtcaggctggcttgtgtggacacctcctccaatgaggtcaccatcatggtgtctagcattgttcttctgatgacacccttctgcctggttcttttgtcctacatccagatcatctccaccatcctaaagatccagtccagagaaggaagaaagaaagctttccacacgtgtgcctctcacctcacagtggttgccctgtgctatggtgtggccattttcacttacatccagccccactccagtccctctgtccttcaggagaagttgttctctgtcttttatgccattttaacaccaatgctgaaccccatgatttacagcctaaggaataaagaggtgaagggggcct

SEQ ID NO: 6633 - DNA, 687 bp, mus musculus
ttactatttaaggcattgataccaaacctgagataaacttatgaaacagaaaatcacaatctaatcctactcatgaacatagatgcaaacctcttaaagaaaatattaatgaaacaagtccatcagaatgaagtaaggatgtattataatgaaactatgtatacccttaaaatgcagcaataatttaacattaaaacaaacaacaaaaataacttccccacattaacaaattaaagaatacatttcatatgaacatctcagtagatccaagaaagtgtttgacaagatttaagatcaattctttataagctaatatcgcagtaagactttctaaacagaatctaccaaaaacaaaacaaaaataaaaacaaagcagacgtcatggttaatggtgaaatgttagcatctgtccttttcgggtaaagaatcagacacaaaaaaaatcacttgtttttcttgatttcactttttactagagatcctaaccaatacagttagacaaaaagaacaaatacacccatgcatgcgcacacacgcacacacgcacacacacacacactcacacgtgcacacacatttgagaaagaagaaacaaactgtaattacatacaaatgacattactgtatatgtaggaaattcaaaagaattataagaaattttaaagtagcttgatacaaaatcaatat

SEQ ID NO: 6634 - DNA, 1048 bp, mus musculus
ggttgtaaatattcaatactaaaatgttaatatcagcatagatttttaaagtagaaattcaatgcctcttttaaaaattaattacaaaattgcatccaattgggtcaagatcctaaggagacaacctgtagctcttgaatcatagctttcttattactgatgtatatgattgaggcagatgtgatcatagggggaaaacataaagtgttatgcttactctaggtttttcctagatgtcctttattaagtgataaaatttccctctcttcctagttcggtgaagttttcattgagaatggattttggcaaattctttttttattggttgaaatgatcatgtgatcatttggtgtacctgatcatatgatcatatgattttccttttagtttcttactggggttaattacaatgattaacagtgtaactgagaatttttaaattatacaatttgggctgggcgtggtggctcacgcctgtaatcccagcactttgggaggccaaggcaggcagaccacgaggtcaagagattaagaccatcctggccaacatggtgaaaccctgtctactgaaaatacaaaaattagctgggtgtggtggtgcatgcctgtagtcccagattcttgggaggttaaggcaggagaatcgcttgaacctgggaggcataggttgcagtgagccgagatcacgccactgcactccagcctggagaaagagtgagacagtctcaaaaaaaaaaaaaattatacagttcatccattgaaaatgtacagttgaaatgttttaaagtatacaattcaatagttcttggtacacttcaaccattactataatcaattatggatcatttttatcactccaaaaccctatacccattggcagtcactccctatttctccccacttccctcttccttgagtctctaggcaactactaatctactttctgtctgtatggctttgcccattctagacatttcatataaatggaatcttacaatatgtggtcctctgtgactgagttcttttacttaacataatactttcaatt

SEQ ID NO: 6635 - DNA, 499 bp, mus musculus
aaataaaataaaattataagatgagctacaaagtaagataaaatacattcaaaatgagcaagcgagccatagactgagagaaaaatattcaatgtgcatatatctgacaggggcttatgtccagaataaaaatataactcctacagtgaatgctaagaggacaaacaaaacaaatacaaataggcaaagacttgaacacacttcacaaaataatacaaatgatcaacaagcatatggaaaagggcttagtaagttgtcaaaaaacatccataagaaggactaaagttactgaaaacacctagtgttgctgaggctgtggcatcgttttggtggaaatgggaaacggtactttggaaaacttagcaataaaaaggaacaaactactgacacatgcaataatgtaaagaaataatacaattatgctgagcaagagaaactaaaagcaaaggagttccaaatacatgatttaatttatatgaagttctagggcaggtaaaat

SEQ ID NO: 6636 - DNA, 671 bp, mus musculus
ttttctttcgacataaattctttgataaaatattgtttgggtttgggatttttgttttgttttgttttgcttctatgagcacttttagagtctaatgaagtttcacacgcttattttcctaataactctctgtaatcataattccctctttaaaaatatggaaatgtatataacaagttatttttacttttttccttggcctgccctaaagttcagtcacgttggcattattagaacagagcaatttctccatgggcactgttccttctagtttttatcttcatttcaaaatagcggaatctgttttattataagtttgaaagtatgagttttaggtaattgcatattctccttaaagatctacaattttcattctttctctcagaacatctgcttgtcaagaggattttttaaattccattaattctacctagattaatgtttcaaatgctgtaatgtcagtttgtcttaatatataatattattatttgtatacataatttcacttacacataatctgtacttctggcattagataaatgttatgaattcatacttctctgtattaccaaaccagttattctttgagtgtgtccataacgtaaggttatcagtggcacatggaaatgtctcagatagggttgccagataaaatactggatgtgcacata

SEQ ID NO: 6637 - DNA, 133 bp, mus musculus
agtttatgaaactgaaaataactttttaacaacatcatgtatttttcttattaggcaaggttgtttagttgggaattaaaatttttcttggatggtttaaaggtattgccaaattggctgtaatatgttcaaa

SEQ ID NO: 6638 - DNA, 213 bp, mus musculus
actatgggggcataaatcctctaaaccagattttctatagatataaaaattaaaaagagctatgatacaaagagtccccatttgctctatatcccatgatttattcatttgatcaataaacatatgtgcagggatctaggtataacaacatgagaaagcaacaatcctcgtggaaatggtggaagcaagagaaattagaatttataaatgtgt

SEQ ID NO: 6639 - DNA, 474 bp, mus musculus
tggtgccaaagcacagaagaggaagataataattttgaggtatttgaactggactttgaagaatagaaagtttttttttttccctaaagcagtgaaaacagttgaaaggccagaatgatttatttcaagtgttacctttaaaagaatattaatacttgacagtctcttcacatatatgcctgtttcttttctttcaaaaaaactaaccccatgactagaattttgatctacttttgcctttttttttcttttttagtttaagataaaataaatagtctaacatctgtaacatatcatggctgaatttggttatacacaacatgcttcattttcatatcatatcttacttgagtttaaacctgcttttcatattttactcctttctgttactcaattcaaaagtatttgccatgaatgacttcataaccatacattttagatggtctgcttgggatttttttttgccttatattt

SEQ ID NO: 6640 - DNA, 318 bp, mus musculus
aaatctgaccatattacatctgggctgactacacgttaatgatgctacattgcctataaagtccaagctgtttgtttgaaatttaatttctgcccacccactgactacctctgtagtcttaaatccagtcatattgtgttttatgctccaaatatgaatacaagctatatttcctaatacatgagtgacctgcttgtttaacaggcagtcattggagatactttctctaaccaaaatagcctctccatcatcctttacctgaccaatcttttttatctttcaagattcagttgaaatgcagtctttaatgagaatcat

SEQ ID NO: 6641 - DNA, 1863 bp, mus musculus
ttagagactgcaattattggcatgaaatgtaataaaagtggctgtgcttacctttatattgctacacttttctcttaatggaaagggactccctttgcttatttgtttagaaaaaacctcagggactgggccaggcatggtggctcacgcctgtaatcctagcactttgggaggccaaggcgggtggttcacctgtgctcaggagtttaagaccagcctggccaatgtggtgaaacccccgtctccactaaaaatacaaaaattagccaggcatggtggcaggcatctgtaatcccagctacttgggaggctgaggcaggagaatcacttgaactcaggaggcagaggtttcagtgagccaaaatcatgccattgcactccagcttgggcaaaaagagtgaaattccatctcaaaaacaaaacaaaaaacaaacaaacacctcacggactgtattagagtcagtctctagttttgttgtacttatctccttgatatatccacacactaactatactcaaacctcacagactgcatgaaaattagcttcaaacctaaaataatacaaattatacaacattcattcctgaactatttaaaggctttggcctaaaggaagagaaagctcgtcttgttatcttcacaaaacctgaagatgcaatgtcctgcttccccaagattatactgcctcaatcaattcttccagagtacactaaggacaaaggcattgaggcccaaaggtggaggtatgctggtaaatgcttaacaaccagctctctccagggaggaatggtcaggaatgccctgatatatagcatttgttaattttcatggtgcgaatttcccaccatggttgatttcatgctaccatatatggaactgagcagggagttgcaaagaggtgcctaatagcactatatgacggtatttccatcatatagttgcaataaatataaatgacctcaagaacatatacgaaagtaaagtgtagagataaattctgaataggtatgaattttgtgtttcatgtaatttacttaatttatagcttatgtagtggaagttttaataatagctctgcttagcagtcggttcttgtgaaccagtatgagtgggattcagcacagcactgctagcgtaaattaaatatacttaccacaatttctggagatgaacatcatgaaagaagtgatggaatacaagttcactcctttgatgtaactctatgtggacatttcctttttttcctttttttttttttttttttttttgagatgaagtcttgctctatcactaggctggagtgcagtggcgcgattttggctcactgcaacctccgcctcccgggttcaagtgattctcctggctcagcctcctgagtagctgggactacaggcacctgccactatgcccggctatttttttgtatttttagtagagatggggtttcactgtgttagccaggatggtctcgatctcctgacctcatgatccacccacctcggcctcccaaagtgctgggattacaggtgtaagccaccccacccagccctaatttttgtatttttagtatagatggggtttcaccatgtcgaccaggatggtctcgatctcttggcctcgtgatctgcccgcctcagcctcccaaaatgctgggattacagacataagtcaccgctcccggcatatatggacattttttgtgacctagtcctaagagtttgtctcatcccctcctcttgtagctgcctacactgcaaagtgggccaatcaccacctgcaatgaggctgctagctacagggtggcttgagactgtgtggtgatatatacgtgcacttcacttcatttttcctcagcgtagtca

SEQ ID NO: 6642 - DNA, 628 bp, mus musculus
aactcagtaaacaatggagtctaggccagacaaggagggagagaaatataggaaaactccagtggttttgggaaagaggatagattcaaaacaaaaactttaaagggttacaatgatagttatatgggtactagagtaagtgatcttgaggacaagaggcatttttgagaagaaaatgtttgaaatgaagatgcaagatgtgcccctgccccaggttgtgacaaaagtgaattgagtccataggaacaggtgtcagggatagaggatgcggttgtttgagggagggtatcaggacctgagaagccaaacttgatgagtcattttacgaagggtgacctgttaaagaatacccaggaacaggcctggagtagtcctgaaagagggaggcaggtgccatggactaagggaccaggaaggtgcacacaatctcacaagactccagctgccatcacccatgttcatttccttgaagaaatcatcttattccttaatttttccccaatatatagtttgagactttctgattctctttctataaatacaaagccctagagatttttattatctggtgatccaaccctttttggagtgactaatcaaaaaagcacatgacagtatgcatatttta

SEQ ID NO: 6643 - DNA, 1104 bp, mus musculus
taataggaataatatttatccaaaagatttttaaaaatagggctgtgtttaaaaaaaaaaacaaaacaagaaaagcagcagtgattatagagaggtcacactctaagtggggtcgcggcgtggccacgcttcacggtcacgctcgtccgtcctgcagtggcgtgtttacatggtcacacgtgtgtgtatcaccagtgggtcaactgcttgtcattcctcccgtggcagtttgtgtagacaatcttactgagcaaaaggcaatgaaaagtcttggttcccacactgcgatatattggaattttcacctcagtttatgaagtttatttcgaaatccatagtcatctaagaatgaatacctgtctgccatgtatttcaatcttagtgagccaaaattgtttgtttgttactacagaatagagatgactgttttttgccacagccctatggaatttgcaatctgtgattgccttgtaaaaaggagagtgcatatggcactgcattaaacgtgtggtgtttctagtcaatgatattggtgagcacaatgtattcatttaatggcatagaccataccagacctaatttgcaagtattgggtcttaaacttcaagtgcaatgtatatgaaaaccaatctgagccttgtatctcttaaatatttattttttttaacgtgtgagatgttcgagagaaggttctccattcatttcagtgctgcctggaggaaactcggcaatgatttctttcagttgtgaagttcctttcgtgttacaccctccactgaaccctcaaccttcgaaatactccagttttgtgggtttggtcatttttacttataaatttacctttttgtattttgcaatttacatgtgtttggtttgttttaaattctgtgaaagtggcttgattaaaagactccttttaaatggaagccaccagtcagcagaatggaagcttagaggaacttgcctgtgagcgctggtctttgtgtttggttttgtgatgtaacgatctttgctggggttttttgctttgttttgagggaaatgtcttggagtaaattttaagttcctggagttaatttgttttacaggaattttgttttttaa

SEQ ID NO: 6644 - DNA, 965 bp, mus musculus
tgtctacaggccgggtcggaacgtcagccccaggagccgacggtggctctctgctcgccccggggaaggtgttgctctcctatcggccccaattccccgcccggcgcctggggcttggctgcggggctcggctcccagccgagggcgcagggctggccaggcctgctttggctgaggtggagatctcgctctcagggattgttgggcgtctctgccccgcgagtaacgagaccgccgcgagcgaacggctttcattgagtccatttttccaagtgtcaccacgtcaagctagagaagcgaggcgagtggaggggacgcagaggggccggaaaagtcacccttctctggcctcgttttcagataaaaacgggagcctggctcggcatccgggcgcccggtgtctccggggcgcttcactgaggttttgtttgcaaaactagcgtccgtgtcctgaagcgcacggcgtctggaagctgctttcctgctcgccctctccgaggcccctctttgtgcagcgagcctgagaaatatggaggaccgtcctccgcaagcgggtggtcgcgggcgctctccgattcctgggtgaagctagagggaaaacggggttcccgggtcagtgccccactttccatcccgggagaaactaatgtccggagagggctcgtctgatccgcacagaaaggccgaccttgagggcggcggtcgttcgggggagaaagcggaggctctgggctcgcgggagcgcggcagccggggctggcatcgcagaggagagacacgccactgccccgcatccccagaaagcgcgaggcgccgtcccagctggggcaggcggccgaggccggtcctcatgcgcgcttctcgaagcttcctgaaacaccttgcggagttccgtgtgtatagaactcagcaccgcccagcccctgggcagctcaactttctgcagccccatcccagcttccccg

SEQ ID NO: 6645 - DNA, 214 bp, mus musculus
gcaagtgctgggatgtgcaggggctcaggtgtgcaggtgctggtgtgtgcaggtgctggtgtgtccaggtgctcgggtgtgcaggtgctggagtgtgcaggggctcgggtgtgcaggtgctggggtgtgcagggggtgtgcaggtgctggggtgtgcaggtgctggggtgtgcaggggctcgggtgtgcaggtgctggggtgtgcaggggctgc

SEQ ID NO: 6646 - DNA, 519 bp, mus musculus
atatattactgaactgttacagagaagaggaaattacccagtcagaatagatatgtctctgtagccttgtatccgcattctaatagccacagagtttatcttagtctgaatgtagctctaagttattaattgttttaatgatttcattgatttctgttaatctgggtaatgtgtcttactaaacgcggtagtttattttgcttttcaattaaccttttacttttgttatatcattttttattaaaaacaaaggttttatctacattttaatgatatgcctatcttagtgcattatgaattatatttggctatctgtacagcagttttcatgaatacttcagggtaatggcatccataatggcttagtatttttattacaagttatcattgatacaaaggatttaaaaaatatatttgaataaatgcttgaattatttatgtaaaaccaacaacttttcaaagattttgaagaacgtaactgttttaaaaaatgtgttaacctatgctttaattcctgaa

SEQ ID NO: 6647 - DNA, 572 bp, mus musculus
agacttaataatgcagcaactggggacccaacaagaaacagatgatatattcaaaaggaacaatatataaggatagaaattaggaaaaaggaaacttataagaggcagtgtaacatgaaaagaaaatacaataatgtcaaccagaatgtgcaaccacagggagccacttccacatgtaggcccaaaggagaaaggggagagatggatgttactagagccacaggaaggtttgagagaagaaacagcatcttaaagaaggctgcagaaggatgcagccactgatagaaccaacagagaataagaaagtctactgaaggagcaaataacctcacctctcttctccctctcctcccatcctccaatctcctgcagatgcctccactaaccaatgctccccagtgacagcaggcaagggagtccagttgttgatgcacaatggaaatgtagtacaaagagaggacagagggtgagggagttcagaggagcaaacagagaaaagcgagtccaaataacttgcccaaattctcacagctagtaagagacagtgccaacaaactctgtgaactgtttcc

SEQ ID NO: 6648 - DNA, 1291 bp, mus musculus
agatgggacaagtaattggtttgactgcctcgagagacttctggttttacattctttgaaatatctactgagcatctactgtacacttcataccttttaaaaaaagaaattattcagcaaattggttcatagaagagtgaagaaatatgcttgtaaattgtcctttgactgacattgtcaacccatggtatgcaaagacctttgaaagttcagtgacaaaaatcaaagatgtgtggtcactgttaaacagagagaaattatgcagagaaaaatgcatttcatttattccaaaattttttgtgcagagaacgaaataagtgagagagaaaagaggaaagagactctgggaagttctgtatcagtcattttcaattaaggtaagtagtaggggattcacagatagtttaaaaaatgtgcatcagtttgcaagaagcatgttaggatctgctgattgtggttccacagtagctttgaatgttctgggtcaaaagcagcccagtgaagggagttgccattatttcagcagattttgaggccctgggctctgtattgtttcttcctttagtcgtcatggatgcctgctgcagcaggaatctcataaacagcttcctgtctgaatcaggtcttagccaagttcaaggttgctatgtttctgaaaccatgagtctgcacctgttttcttgactggacaccttgctttcattcactgcaagttcccttcacttttgactttggagccctttctcatctctggctgggtgcttgattttttgttctctgctctctttcagctgcgattttgcattttctctagtttgtggcagcttaacttttaacttttactttctcagcttctttctaaccatgatcagtgttaaccgtagttataccatcttttgttacacccttgtttccctaagccactgaagagcctggttgcagctcttcctagaaatgatcagatgttatgggtattaatttaaaggttttaatgttttaaattaaaggttgagaacagcttctcaccccaaaatgcactgccatcccctggtaacttggaatagttaaggttttaaggaaaacctaatgtgaagatgtgcattaggattttaggaaagtgcacacttaacttattcaggaagtattttctgaatgaacaatgtgctaaaccctatattaattactaagaatagtgcattgggtagggaaaactctctgttcttgaggaacatcttacattaggcttattatagtatgtaagtgtattatttctctctgtccaacttactag

SEQ ID NO: 6649 - DNA, 1108 bp, mus musculus
tgtgtatgcgtgtgcatgtgcttgtgggaaggcgtgtccttgcatttatgcatttatttgcatacacatgtgtacgcatgtattgtatgtgcatatgcatgcatgtgtgtgcatgtgtgcatatatgtgtgtaggtgcatgcctctcatatgcctgtgcatgtgtgtgtttgtgtgtgctctgcatataccagtggtttggggtgtgtagagagaaagtgatgtgtgtcaggataaatttccatactgtgcctgagcatgcatctcctaatcgtgtccatgttcctgaaggcgagcttccacccaggcatcttcccagaagtccttgagtcagcggtcgtcttcacagagagcctccagccagacgtccctgggaggaaccatctgcagggtctgtgcgaagcgagtgagcacgcaggaagatgaggagcaggagaacagaagcaggtgagcacatggcttccctgactccacttgtgccctgcgtggggtcacagtggagggacagtggggtgaggagggaagagcgaccttagctgagagggaagatcaaggaacacaggccatgcctggggtgagagggagaatgctgctgtttcccaatcacctgcttctctttaccatcattatctcaattaatctgaacaagaaaactactgggcaccagcttcccaccattttgcagaagagagcgttgctgttcagagcgctcacgccactgcccaggattccatgtctcacgcatgtcccagctgggcttagagctccagggtccgtggcttccaagccaagctcagtccctttccagacagagcaggataagcacacatgaaaacatcaagacctagcagtgtgagagtaattctgaatttccacttgcaacctctgtagctatgcaggaacagccgtggaggggtgcacattcaagcaaggtcatcttcctaagcgggagccagggttttaaacagttgtcgtgtggaaactaaagagttgggaagggattctataaattgtcatgctttacatttcaacagaggcagctcgtggggtgaaatgtcatgggaatgggatggattaataaaaatgccagtcttaaaattatttccaga

SEQ ID NO: 6650 - DNA, 724 bp, mus musculus
caacactattaatcattgcatgattctgaagttatttgacgttgggatggaagtgttcatgtttttggaatgacttttgaaaatagaaaaaaatgtttattatccagtatttcaactctcctttaaggcatcaaaaatgttttaatagaaataatttatatttcaaacaccaagatgcttttcaatatttataacttttaaataccttgcaaaaatataaaataagagtgggatcaggaaaagagttaaagcatttctaactttgaatcattttaaaatatgtttacttggagatcaatgagctccagagaaattctctctcaagatgttcaaagctttgaagatattattggctatgaggcacggtgaaagtatgcagtacctgttcaattacgaacctggctccctaacaggtccttattgaagaatgttgatttcattttctaacccgcacattcgtctcataccatcaaaaggtagcaccttctgcagctgctttcagaaaaaatgccaacaaacgccaagcaaatcactgttttgatgagattttatgcagaaattcttagggccccaagaagacctagagtaattgtgggtggcatttagctttgaaagtatttcttaaagtgtatgataatttttgcaaagtaagtgaaacatttagtcttccgtcattatgataaattatataatatgggcataaaatggaacacatttaatctca

SEQ ID NO: 6651 - DNA, 1135 bp, mus musculus
agcgtcagagtcatatgcccaatgtcagagtcctctgacatagtaagaaaaaaagtcaggattctaacgagagaaatcttgagcccagacactttctaccacccaccatatcagttctctctttgtctaagctcctatgaaaagtgcttttcaaaccctaaattgctgcataaatgatagttatatttgttcatctccctgctcgctctttctcactagacactgatatcctatttattaatgtattatctatctatgaatgatacaactgaaatttatataattatatacattatatgaatgctttataagcttgttctgttttcttcttttttaatacatgtaattaatactcaagtatttttattccttttttcttcttctttttctttcagcatttggtcagaatgagtgccatgatcctggcattcctataaacggacgacgttttggtgacaggtttctactcgggagctcggtttctttccactgtgatgatggctttgtcaagacccagggatccgagtccattacctgcatactgcaagacgggaacgtggtctggagctccaccgtgccccgctgtgaaggtgcagtccctgccaccccccgctcttctcctttgaaatcacacatctatcttcaggcacacacacaaaccaacaaactgtgttagcttgctagggctgccctaacaaaataccacacacagtcacttaaccaacaggagtgtacagtctcccagttctggaggctggaagtctgagatccaggtgtcatcggcagggtggggtccttctggaactctgagggaggatctgcctcaggctggtcctccagctcctggcggtgtttggcaatctctggcattccatggctggagaagcctcaccctcatctctgcctccagactcaaaaggagctctccctgtgtgtgtgtctgtccctgtgtctaaattctccttgttaaaaggacacaatcatattggattgggggtccccttcttccagcaacaccttatcctaactaaattcatctgcaagtacccaatcttcaaatacagtcaccatctgaggcgctgagggttaggacctcaatgtatgattttttggggggacagaattcaacctataa

SEQ ID NO: 6652 - DNA, 1084 bp, mus musculus
atcaagagtgacacttggtggacacactcgtgtatgaaaaccatcctgaaatgtgatgctttctttctgcttttgcccctgcagctgagggagcctgcggaggaaccttacgcgggaccagcagctccatctccagcccgcacttcccttcagagtacgagaacaacgcggactgcacctggaccattctggctgagcccggggacaccattgcgctggtcttcactgactttcagctagaagaaggatatgatttcttagagatcagtggcacggaagctccatccatatggtaagtcccgggaagagatgccacaaaggatacaggtgtgttttccccgttttttcccccaacgagcttcaagaattgcttgtctctggacgttcatgggcaagcatgtgtgttccttttttcgccttgctcttttggctctggaaaagttacctttactgtgagtaatttcaaagtttctaagatgtctttgtgctggtgtttggagctcgggaagtcatctgtgtgcttgaacttgtagtgctgtcatttttggactgttttaaagcaaccaagtaaggtgagttagttttgggtttggtctgaagctgtttcactgtgagcagagatttttagattgtgtattttcttttatctcacgttagcgagaattgacagactgctgcagatatatgattgtgctttcctttttcttcgtgaagactgtgtaccacattctgtagccacctgtggggaagtgcccgtggctacaagatcctcaaaggcaaaataacttaacacacatcttagtccactatatgtataaaattaaccgcagggtggtcagttctctggtgtgtaccccagtagagacaaaggaaaacaagatctaatgaagtaccgcctatttaggagtgatggtcgtgattgcaagaatagtatcgtttgtgtccataagtgccatttgagagacttaaaaacatagcatagatgtttaaggccttaatttctatcttgaattaagtcatttgttgcatgtaaaattgtgttattgtttttattattttaaacctgaacactttaaaactgctt

SEQ ID NO: 6653 - DNA, 1169 bp, mus musculus
ctcaagaatattatattctgtaccatgataaccaccctaaaatttagaaagactgtaaatacagagagtcacagctcagctgcttcatgatccagatacctttattgttcatgattgtgtcttattgtcctgttactgataaaagaagaaatatcagaccaaaattgttgaattaattgtttgtcttttttgattctccctcatgtattttgtggatccattgctaggttagcatgcacttatttttatgtctgtctaatatactgacccaagactctgtgttagtctgttctcatgttactaataaaaacatacacaagactgggtaatttaaagaaaaagaggtttaatggcctcacagttccatatggcctgggatgcctcacaatcatggcagaaggcaaaagtcacgtcttacattgcagtaggcaagagagagcgtgataaggcaaactcccctttaggaaaccatcagatcacgtgaaacttattcactattatgagaaaaacatgagaaaatccaacccccttgattcaattacctttcatccggtccccccacccatgacatatggaaattattacaattcaaggtgagatgtgggtggggacacagaggcaaccatatcactctctaatatactaagtctggtggcttcaccattttatgctcccctgcctgttctctgaagtcagataaattccagagggttgcttttcagtgtatggccctggtccaggaacattcacataacttgggaatagagcgaccaagttcagcaaataaacacaagacaacaggataattttaaatttcagatatacatggaagaaggttgtatagttttcattgagtatctgaaattcaaattcaccagggtgtcctgtgttttttctgtcagctccacctgggtacatttcagagatgcagactctgaggccccacctcagacctattgaattagactctgcattttaatgagaacgtctagtgatttgtatgcatattaaggttcaagaagtcctcttccagtggtccagtttatgttagggcaggatgttcaagtgaagccttacagtgcatgtctgcaggaaatggaagctcttgaagagaagctgaccatggtcactggtcactactcatttctgcaaccctccaattacaccag

SEQ ID NO: 6654 - DNA, 1199 bp, mus musculus
gtgctgctcacctgcccacagaaacttagcaatgtgctgttagcttggaaatgtccattcgtccatgtggccatcacacataggagggtgtgtgtgatgattgttgcaggagatgaggctggagaggtagtctgtgaccttgaatagattctaaacaaacattagttttgtgtgtgtgtgcgcatatgtataataaatattttttaaagttaagttttatctggtttcatgattagcatctaagtgcctgtcatactctcccactttaaccttggatttcatctgtggaaagaacactatgattgttcctttctcttagattgaccttttgtgaaaccacacacattatctcttcattctttgagggctctttccttcccacccatgcagccctctctcaatcttctccccctgccctaggccttcttggagcttctctgtatctagcctgactgcctcagcaagatcatatacccacatttttagggtctacttctctttttcttcctcagaatgtacctatcttatgtctattcctcataaaactctgtattctgaaaactaatcatgaaacaaattaatcagacacgaagatcttcaataatttaatttgtcctgtctcaatattggtctcattttcttttcttcttctcaggatcccagagcactctagtcaccaaagctttggcaaggatgtggttgaaattgtagggctacctgggtaaataataacaaatatgttgttatgcatcttgcctcacaccatccttcaacactcatcactaaagccgttgtcttttctatatgtagaatgttgccccagctattcaccaaggaagatcactaccaatactattatgatttggaattatttttagacatcccatctatttttggtctggtggtagatttcaataaaattaatcttctatatgaaactgggaatgtgttatgtgccatttattattacagtcaggaactccagacagtgtgaataggttgattaacgaccagagtggaactcatgtcctgggctctcctactgacttcatgtagcagagacacatcattcatcaggaatgaccacacagtctgccatattttatttcttaattacatttcagcttttgcaaacttagattgtaagtcaagagaaatttgaaattataaacttttagagcatataaaaactactttga

SEQ ID NO: 6655 - DNA, 463 bp, mus musculus
aatacaagtgttctttttccaatttctccatgcttttccctaaattatttcccataaataccatttaagattttatattttaacttttttttttttttttttttgagacggagtctcgctctgtcgcccaggctggagtgcagtggcgggatctcggctcactgcaagctccgcctcccgggttcacgccattctcctgcctcagcctcccgagtagctgggactacaggcgcccgctaccacgcccggctaattttttgtattttcagtagagacggggtttcaccgtgttagccaggatggtctcgatctcctgaccttgtgatccgcccgcctcggcctcccaaagtgctgggattacaggcgtgagccaccgcgcccagccaactttttcatttaatctgacacatacacataagtagatttaagttaaaaaatacttaattcaataaaaaagtctgca

SEQ ID NO: 6656 - DNA, 2113 bp, mus musculus
gtattttttctttaattttttttttctttttgtgtgtgtgtgtgtgtgtgtgtgtgtgtgtgtgtgtgtgtttgtgaaatagagatagggcctttttatgttgcccaagctggtcttgatctcctggcctcaaatggtcctccccactcagcctcccaaaatgttgggattagaggcgtgagccaccatacccaaccagtattttttatttagtggatattttatgtcatactctgaggttattcccctttgtccgtgaagaggtgaggggctttaactctgtattataggaggggaatgagtggggaaaggaggaattggacatttctgtttttcttctcatctacctattaacttgcttctatccatgggagccctttcttttttttttttttttttttttttgagactgagtctcgctctgttgcccaggctggagtgtagtggcgctgtctgagctcattgcaacctccacctcctgggttcaagtgattctcctgcctcagcctcccgagtagctgggattacaggcatgcaccaccacgcccagctaatttttgtaattttagtagaaacgaggtttcaccatgttggccaggctcgtcttgaactcctgacctcacgtgatccacccaccttggctgcccaaagtgctgggattacaggcatgagccactgcgcctggcccatgggagccctttttgattaaggacacctgaccatccatccattagggcatcagaatgcctgctgattttgttttgttttgttttgaaaaccagcgggtgggtgcaggcccagtactgccctctcttgtctctggcagccttggcgtccctgttccctggggatggaggtctgctttgtgtttccagtctttgtggaaagcacatcaggtaggctcaggtctcagtcctctctggttcagcttttcttttcttttctttttgtttttgttttgagacggagtcttgctctggcgcccaggctggagtgcagtggcacagtcatggctcactgcaacctccacctcctgggtccaagtgatcctcctgctccagcctcctgaatagctgggactacaggggtgcaccaccatgcctggctaatttttgtatttttagtagacacagggtttcaccatgttggccaggctggtctcaaactcctgacctcagatgatcctccctcctcggcctcccaaagtgctgggattacaggcatgagccaccgcacccagcctggttcagcttttctgattgcaacattaattgctggggggtggttgtcaggtttaccttcttctgggggctggcagccttcacttcagcagggagggattaggaacccctgtttggcctgccttctccaaggctgctctagcatgaatgaagctgtgcaatgcctggcacagggcagatcaggtagaaggggtcagagcaggttggttattttgaaagaactcaaactctcatttttattttattttatttatttttttgagatggagtctcactctgtcgcccagggtggagtgcaatggcgcgatctcagctcactgcaacgtctgcttcccgggttcaagtgattcttctgcctcagcctcctgagtagctgggattacaggcgtgtgccaccacgcacggctatttcttaattgatgcctggcaagtgcttttttggttgtttatgatattttgtttgtttgtttgtttgtttgttttgagactgagtctcgctctgtctccaggctggagtgcagtgccactatctgagctcactgcaacctccacctcctgggttcaagtgattctcctgccccagcctcccacgtagctgggattacaggcacataccaccacccccagctaatttttgtgtgtgtttttttttagtagagatgggggtttcactatgttagtgaggctggtctcgaactcctgacctcaggtggtctgcccgctttggcctcccagagtgctgggattacaggtgtgagccaccatgctcggcctgtgatgttctttatctttatgcattttaaaggaagccattgtcattgtcccatgtggtttttctggtatacatattcctgccttccatatctaccgcc

SEQ ID NO: 6657 - DNA, 1314 bp, mus musculus
ctcatggcattgcagtgccttggcctcgagcaattaaatcaagggaaagaggaccaactccctcttgaccccgttctctggctggctcgcatcttcatccacagctgagatggagagagacgcagcacagacctacctgcctcctcccgctagaacatgggcttggtctctcctacttccccagggatagcctttctctagctctgtgtttctcctctcattttgaggagatgccatttggaatctgcttggcgtctatagcaagtcctgctctagctccaaacggcttcttgttaagcaatacattaaaccattaccctgttaaatggagtttgcaagaatttttaacagacttgaacgctcgcactgcaccactctggcttgaacctgcatgccattttgaggccctgcactgaggtcgccctaccgaccaatggcgagagggagggttcttaaagcagcagaaaaaaaaaaagaaacaggagaaaggcaaactcaatgggtttcatgacagtgaatgcagatgaagtagcaactcgggacttggaaatgtttgcacatgaaatgctggaacagagagacatgagcgcaggcttcctcagccagtgaaagtgagcgaggtagcttcatgggggctctgacaacggcaagtttagaagcctgagcatttactgcaggtggaacgttgattcacttattcaataacttccctaatcacctactatgtgcctagcacggttccaggagctggggacagatacagcaatgaaaaaacagaaaaccctgcccttgtggagcttctgctttgtgtagagagatgggcaataaacaaagcaaatattttctcttttagaaaatggagtgcacagagagcaagaaagctgggaagagagaagggaagggaggcagagccatgtgcagcgaatagctattatgcagctctctattggtcttcaacagggagaccacgaaggcgccactgaggtgagggtggggccgagatgtgcaggaggggaggcggccaggctgacagacacctggaggacagtgtcctgagaaagaggagtggcccagacaaaggccttgagcaaagggagggctcccagtgtctgagggcagccagggaggagagaggagggggacctctgtactggacgccaggggctacccaggaggccagcagggagccctctgcttccacagcctggcctgccccagggtcttaccagggagctgtgagatttcccccactttcccacatggggaattgggttaaggagcccccctcacaagtcagctgagctaggatgctgc

SEQ ID NO: 6658 - DNA, 1177 bp, mus musculus
tcctaactaggcctcctgggtcagaggaagaggaaggaattttaacatggaaagaatcttctaattctgcctcgacaatgaggaaggaataccaaactgaatcataggaaatgcatgtgtgcaggggaaggggtgagaaaatggagtttgaaatggagtccagagcaagtagcaaggcacagcggagtgggtctcacttggagtaagcagttccgtcttgttggaggatacatggatgcaggaaggcaggaagtgagaccaaggggaaattatccagatttggcaggactgacatgatcagatttttgcatttggaagtctcccttgctggtgttgtattgaattagtttagcaaaatgaagcctggagacttgggatggaggctctggaaatgacacaggaaaaaatgaagatggtgtaaaccgcaactgatgtcaagtagacatagtaatgaaaattggcaccaaagagccaaccgaaacgccaggggtttggtctagatcctgctctctctacacagaaagccagtaactgagactatgagtattgccaaggaagaaggatttaatcgggccctgcaggagatgggagctcagtttcaaatctatctcactgatccccccaaactaggggtttatagagcagggaagaaatgtaacaatgtgtgagaacagcaactagggagggacaaagaagcaattatgaggaatgagaggtccagcatcttgattgtctgaatgtggtgatctggtgagtttcagttctttggctgaaacttcagttcttccactgaaactcagacttttttttttttttttttttttttttgagaggcctggaggtttgttcttgaggaaggaactcagataaaataaatacaaggttgaagctctaagtccagaaggtttaatttctttgtttgtctagaaaactacctatgggactactggatcgatttcagttgtgtataatatatgtgcggggataggagagggaaaatgttagagtagataaattgtagggttgagtgacaaaaaatgatgatgtcattcatagtgatatggcatgctagagacctagggtggtaagtgatgaattctgcttcatatgtttgtggctttgtgcttctgagaaatatagatagttatgtcccggaagtattcagatgcaagagttt

SEQ ID NO: 6659 - DNA, 465 bp, mus musculus
ctcagaattttctattgtgtgaaattatcctcaacaagttttagaggacttcagaagaatgtataaagcagtaagattagtctagatttttatagttactcattgttaatgactttcatggttgagtcaactgaatttgactcaccctcatctattgtatcagagatacttcactgatcttagaattgacatatcttatattctgtccttgatatattcagtgtatagttagtattaaaacaattacagaggaatgcattaatttgtggtttatttcaagtttttaaagcaagttatttaagtgttctcatttaccttaattaccgataatttcattttatgtactagctgacttcttgcagaccacttctcattttgattacttcagggcgttattcaattaccaagcattacacttgggatctctgatatttctcttgatacatacataggttcttgatgcta

SEQ ID NO: 6660 - DNA, 935 bp, mus musculus
ccgagggtcctagaatcccagactctacatcctacaagagttggaaattactctttctgctgaatttactctgcaacctagttgcaccacactttcagcctgaaggacacaagggaattcagggagaatgcaagagaaaagaatacatgccagcaatataaccagatctgacaggttagtttaaaaaacaaaatgcaattctgtctggatcagagtgtgtgaatatggcagggtctagaggctgggggctcaggcctggcagaggccagttaggcaggatgccttttccttccttaatcaccactccctcacccacaaacagggcagccaaaaattttaggcaagaatcagactagaggcagaattagaaagtgtcagtaaaatagcagtaggtggtgttgggatgccgacagaccctcactggctcctccagaccacctcacgggaagaaccgaggggggctgaagtctctgtaccctctcctcttctcaagcccccctttcccaggttggggagggtgaaattatttatttggggggtgggttcttttttcttttttccctgcccctcatttgatctcttttggtgcagtgctgctgttaacaaaaaatacagcatgtttgagacaaagtatgcacaattcctcttccagaaaggaggcctttgaagaaaaggcgagtgatcagaataaagagagggagcgggggtggggagggggcgggaggtgagtggggagcccaggctaggagggcaggctttgatctccccacacaggcctgtgccttttgcgttttatttcactgttgggatgaggggagctttttgcaagggcgtgatgtaaatgcttaaggaaaggaggcagggtgcaagctctcaaaactacagatgcagacacaggtgccagggatgcctcctgtctgctcccatggggcatc

SEQ ID NO: 6661 - DNA, 1574 bp, mus musculus
ggagccttcaagaggcccttctgggtggatcaatcacttgctgtgacattgccctgtccccttttgagggcagctgtttccttacatatgaatttgcccctgagcatcctggtggcatagaaaccctccaaggaggcccggcgtggtggctcacgtctgtaatcccagcactttgggaggccgaggcaggtggatcacctgaaggcaggagttccagcccagcccggccaacatggtaaaatcccgtctctactaaaaatacaaaaaattagccaggtgtggtggcgggtgcctgtaatcccagctacccaggaggcagaggcaggagaattgcttgaacctgggatgtggaggttgcagtgagccgagatcttactgttgcactccagcttgggctacaagagcgaaactccatctcaaaaaaaaagaaaagaaagaaagaaaagaaccctccaaggaggccctcaccaccgtgtgtctgtttgagaagggtgatccctcaagcaagctccttcattcctgtgttcagtgaacatctgcctgcccactccacactgtaggcccctcgagggtgggatgggtctgtgctgctccccagctcctaggcgggactggtccatgacagatgctccagggcatttgcttttttgttgtttttgtttttgagatagggtctcactctgtcccccaggctgctgtgcagtggctcaatcacagctcactacagcctcaacctcctgggctcaagcagtattcccacctcagcctcccaagtagctggggctacaaacaagcaccaccatactcagctaatttttaatttttctgtagagatagagtttccctatgttgtccagactggtctcaaactgctgggctcaggcaatcctcccacctcggcctcccaaagcactgaaattacaggcatgagccaccatgcctggcccatgacatttgttgaatgaaggaaggtacacattacagatgaccatggcgcagctgaggctggctgtagtggcactgacaccattctctggagggtggcacaccccttggatcaaatcttctgagagcgaccctgatggcatgatcagcattttctcaacaactgtcttaaggactttcattacccctcccaacttccccaaaagctacttcccctgtccctccagccctcaccccacctttcccaagggccctaatcaaccacttccccttgcatggcacagaaagcattagtatggaagaacccaagtccctagatctggaaagtggcgagaggggacgaaagggcaatgtccagcttaggaccccaaacttcttgaaggcagggtccacacatctgggagtgggattctgaggctctgaagggacaagctctgacatgcagattcctcagattatccccaagcccttcgggtagtaaatgccttccttcagggccaagcccccaaggctggtggtggcaaagccccccagtggccttttccacaggctaacaccgccccctgccgggctaagccaggacagccacttcaaatgccaccttaggaaatcggaaacgtggctacctt

SEQ ID NO: 6662 - DNA, 1100 bp, mus musculus
tcagatcttgggggaaagggggtgaggcagaaagaatggcgctcggccaaggggtgagggtgggctccgggtgccacttttattccagagctcaggagaggcaggatgggtgggaattgtcagatgctatggtgagctatttctgcataaaaatgttttgttgcttaaggagaaaggttttgtgctgagtctggctgcccctgcagctggctgtgacctgaagatccctttcaagtgggaagctctcctgtgtttttaccttttcttcctcagacacagcttttcttgtctcccattcccattttgatcacacatcttttccttcggctctatgcacgggttacttttttctcttggttctaaggatgcaatgagatcatcacctcctcttggccccgccccaccctgaggtcagcctaatcctacctggccagaggtggctggctccaaagctgaaaactgcagacacccagaactgccacgccctggtccttgactggggccctggccagtccccctccttattcagcccaccacacttgccaggagtttaggcatcattcatttctcatcctgggacccagggttttgatgtccagcagtcagctgtccccacgtggcggtgctgtctttgttttatttctcccaggaagacacaatcaggtgtggtggagtcttgttgtcctgaacatgagcaggtctccagaatgctgtgtgtgtgtgtgtgtgtgtgtgtgtgtgtgtgtgtgtgtgtttgtatgggggtcggagggagaggtcaggaatgttcaggcacccttatctgaatgccctgggaagggataccccctgtcttaagaccaagagaatacaaggtgggatggccagaggtggcctgctgaggctcgagggatgggtgggaggttgagagggaatatgagggaatctgtctccacctgaggctgagcccccgcctcccagggggaggaaacctctcccacaggcgggtgctaggggaatgagatcatccttcagatgaggaaataatcatagtgctggagcagtgagaaggcagaggggaaaaggtctgatctgcagctccacagaaggaagccagagtc

SEQ ID NO: 6663 - DNA, 904 bp, mus musculus
taggcctatgactagtctgaagaattgtgttgagacgtgtcagtttctagaaagttcagtcgagtctgtgaagtgtcatttacagatctcacagatgtgcagtctgcccagcccacctctttcttttcttctggagcagcatggcttcagtgatattaaggtggaggacacagccaagggccatatcgtcctgctccaggaggctgagacgctcatccagattgaagaagactcgacccatatcatctgcgacaatgacgagatgctcagagtgcgactgcgggaccttgtcctcaaattcttacagaagttctgagtgggccatctgagctacttccctgaaatcctgcagtccctcactggctgccctcacaagccacctgaggagtggcatgagaggccattaactgtgtctttgtggtgtcctctggcttaaggagtgaagaggtggctcttgagggaaatggtctggacttattcccagcactgtttcaggcaagaactttccctttcaacttcaggctcattttcttctcaactctggctctctcaaggagctggagggtggcagaagtgggacaggagaagttttccaagaggttcatgggaggcggaggtgactggctggctgtcttgcatcagtcccaggcctcggccaggggagccagcctttggtttcgtttacttgcctacagtgctgtacgcaataagatgatgatcccaaaatatggtaaagtgaacccatctgtctgcattttctactctgagcccatttgttaataaacacttatttttatataattagctgtcctctgttgaacctaccatctatatattgatttagtagctgaaaaaatatgaaaatatacagaacagcatgaacttagaaaacaccacaggaaat

SEQ ID NO: 6664 - DNA, 904 bp, mus musculus; identical to SEQ ID NO: 6663

SEQ ID NO: 6665 - DNA, 922 bp, mus musculus
atcatatcagatttgtctgcattttttcttcccaagctgtttgctagcctgccctgtgtttaggattggttgggcaagttgcaggacagatagaagggggcttctgaaggcttctgtgaccctatcagcaaatgcctacatcagaaagagtgttttctcatttctggttatgcttctgtaaaagtgggtgttttatggccgggcgcagtggttcacgcctgtaatcccagcactttgggaggctgaggcaggcgggtcatgaggtaaagagattaagaccatcctggccaacatggtgaaaccccatctctaccaaaaatacaaaaattagctgggcatggtggtgggcacctgtagtcccagctacttgggaagctgaggcaagagaatagtttgagcccaggaggtggaggttgcagtgagcagagatcgtggcactgcactccagcctggcaacagagtgagactctctctcaaaaaaaaaaaaaaaaaaagtgggtgttttactatctatcatgtcatgacaaccacctcaaaccttaggggctttaatttgatggtttttcatgttctgcgggtggactgttgagctgggcggttcttctggtctctctcgaggtctctcatgcagtttcaggcagatggcagctgcagctggttggttctctcactctccacatagcttcagggcttctcctttccacaaggcctctccaggtggtctgtttgtgtggtctctccagcaggatagccaaacatcttgcttgacagcataactccaaaaatgcaaggaaggaagctgccaggcatcgttaaggcccagcacattgtcacttctgccaagttctatagtttcgagtgagtcacaggctcagctcagatcccatgtgggaggaactgcagtgaggtgtgaatactggga

SEQ ID NO: 6666 - DNA, 3135 bp, mus musculus
tatttaatttaatgaattttctggaatttttggaccattccattggggacatttagataatttctggccaagataaagtgtgactgctttgaaaagtctacaaaagcaacctttacaaaagcttctcttggcaaagcacagcctagaaccaagccaatagcatttttcagcttcactgcattcgtggcttttgaggccatgaggtgtcagtatcctttctgtagatgtttcagaagaatgcctcaattcatatttcacttgtgggattttgtagtttggcataaatgaacactacaaataggttctagtttggtgaccatatattacaaaaatggttggattcatatttatgtatattcgtgaatttcaggttttttgaaattgatatccagcctgtgaaatcaggtgtaatgttttcaaaagtaaaatttagtattactaacacgtttcaaatactattttataatacacttgtttattagtctgttctcatattgctatataggactgcctgagactgggcaatttataaagtaaaaaggtttaattgactaataattccacatggctagggaggcctcagaaaacttacagttatggcagaatgggaagaaaacacatccttcttcacatgatgacaggaaagagaagaatgagagccaagcgaaggggaaagccccttacaaaaccatcagatcttgtgaaagcttcctatcatgagaatagcatggggaaaaacacacccatgattaaattacctccacctggtccctcccatgacatgtggggattatggaaaccacaattcaagataagatttgggtggaggcaaaaacaaatcatatcattccatccctggcccctcccaaatctcatgtcctcacaattcaaaacacaatcatgcctttccaatagtcccccaaagtgttaacaaattccagcataactcaaaagccaagtccaaagtctcatctgagacaaggtaagttccttctacctatgaacctgtaaaatcaaatgcaagttagttacttcctagattcaatgagggtacaggcattgggtaaatatacccattccaaatgggagaagttggtcaaaacaaaggggctgcaggccccaataggacagtcattaaatcttaaatttccaaaatcatctcctttgactccatgtctcacatccagggcactctgatgcaagaggtggtggccttgggcagctccacccctgtggctttgcagggtacagcccccttcctggctgctttcatgggctggccttgagtgtggcattgccaggtgcatggtccaagctgtcagtggcagtaccattctggggtttggaggatggtggccctcctctcacatctccactaggcagtgccccagtgggactctgtgtgtggactctgactccacatttctcttccacactgctctagcagaggttcttcatgaaggctccacccctgcagcaaacttctgcctggacatccaggcatttacatatatcctctgaaatcaagatggaggttttccaacctcaattcttgacttctttgcactagcaggctcaacaccacatggaagctgtcaaagcttggggcttgtaccctccgaagccaaaacctgagctgtaccttgaccccttttagttactgctggagtggctgggatgcagcgcaccaagtcaataggctgcacacagcaggggggtcctggacctgctatcaggaagccattttttcctcctaggccttcaggcctgtgatgggaggggccaccgtaaaggtctctgacatgccctggagacatattctccattgtcttggtgattaatatgtagcttcttgttacttatgtaaacttctgcagcaggcttgaatttctccccagaagatggggtttccttttctattgcatcatcaggctgcaaattttccaaacttttatgctctgcttcttcttgaatgctttgctgcttagaaatttcttccacaagataccctaaatcatctctctcaagttcaaagctccacagatctctagggcaggggcaaaatgccaccagtgtctttgctaaagcataacaagagtcactgttactccagttcccgacaaattcctcatctcagtctgaaaccatctcagcatgaacttcattgcccttattactatcagcattttggtcaaagccattcaatacatgtctaggaagttccaaactttcccacatctttctgtcttctgagccctccaagtctctaggaagttccaaactttcccacattttcctgtcttctgagccctccaaagtgttctaaactctgcctgttacccagttccgaactcactcccacatttttgggtatacttatagcactccactcctggtaccaatttactgtattagtccattctcacactgctataaagtactgactgagatggtaatttataaaggctaaagatctaatttaatcacagttcagcatggctggagaggcctcaggatacttacaatcatggtggaaggggaagcaaacatgtctttcttgacatgatggcagaaaggagaagaatgagagctgagccaaggaggaaggccattagaaaaccatcagatatcatgagaacttattcactatcatgagaatgccatgtggggaaccacccccatgattcaattacctccacctggtccctaccgtgacatatgggcattatggaaactacaattcaagatgagatttgggtggggacacagccacaccatataagcttgatcaaataaacttttttcaaaaaaaaaaggaagaacagaagatcattttgaaaataacaaaaatgtgccacacatttaatactttttcttctaaaagctttagatgcttccttagatatcatcaaattatatgtcactgcagtcctggaagaaagatcagtgataggaattgtaggcatttatgggcttcatggttttgtccaagataaaaagaggaacccctatttgttgctcacatcctttagaaaagtaacttaccatacattgtctcttgttagcctcagaacatcaacgtaagggaggtattattagccctgaggttcaatgacattaagagtttaaacaaag

SEQ ID NO: 6667 - DNA, 220 bp, mus musculus
gtaattgtgtcttaattttcttaattgctgggttttctgtgtacttatcagtaattcagccccaaactctttgaccagtcagaaataattactcctttctcccaccatggccatttgcatttttgttagtctagattgaatattggctaatggtttaacatttacattcataatcataatatcccttggggcttattttgtttatctttgaagtcccaga

SEQ ID NO: 6668 - DNA, 1738 bp, mus musculus
tacaatatgcaatagtgcttaccagtgcattgcattccccgtggtacatcaggcaggactgtgtaagcaataattctcaatctctattgttagaaggttttcttcaagttagtgaggaggtttttttgtttagtttagttttgtttcaccaggcacttgattgcataatgtgcttttcacacggatgacctcacttgagataagtggtcatggtcatttgcttgcacatggggtgtcatactcagtcatgtgatgctgttatttctaaccccagttttttggatgaggagatctagggtatactgaaaagttcaatcagttatctatgagacaatgtggccagataatttcaaccaatagtactgaatagtgactacttgattcaattcggtctctcttttttcttttacagaattttgaatacaagtaacagacagagaaaaatggtacaaagggttaaaagcagtcttagtaacattggagatgtggagagaaaattagaagagagaagcagaaataaggaggccctgagtcacaagtaaggagaacctctggaatgaaagtaatgaaaaccagcatttgaatgggcaagatgaaaaacagagggattctcagtccttagcgtgatggttgggttttggacagtaatgacagacattccagttctccatgaggtttgcccagatgttcccattatactctattttctcctatttttgtagttcatggatttgtttctcactaggttacctaaatgccttaggctttttcaggtttctttgtgaaatgtgattctgtcaatgagctttcagttcaacaacaacaacaaaattaaagttaataattattctgttaattaagagctcgccttctagttgaagactttgcatatgagctgaatttgagtttaaacagttcagtatgttttgttagtgtttatgaatcaggtaactaacactgaagatgtgggtagagatcctcatttctatgtcttgtctccttatatcctatgtgttgccatttctcttaaggtcaaataatacagtttgtagttagggaccaaagaatgtccaaggggattaaagtcaattaatatattcattgtaaaaagtgttaacagagttgggaagtttcagtattcaatctcaaaaagcaaaatctattatgtgacttcggtgtgataaaggaggcatgaaatatttttttcagttccaacaaagaaatagatatattcttagacatatgtataacttgctcttacttactcagcttatagcaaaagttcttgacaaaatggtgatcaagtgccaaaacagtccatttaaggtgttatgcagagtccatgccttatgattttttaagtgagaattacaaccatatgtctttgatggtttgaatatgtaactatttaaggcagtggactggataaaattacttttttggagatcctcttcaaagctataattctgtgatcatttatacattttgtatagcagatattataatgtgaatacatgcagcttgaacaatgaaaatattttatcaattgccctgtagatttgtgttttaatagctttgtaacatgtaggaagcactttagagtattagcaaaaaaatgatacagtatcattagaaagtatagtaatcatagatgtgattaagaaagccctgtgtcatggttgacaataatcatctgaataagttactattgctgtaaattctccgttctgtgcaatta

SEQ ID NO: 6669 - DNA, 1047 bp, mus musculus
gtttaggcttaggtcagaatttcagttttacttttttttttttttgaacataaatattagcatagaaatttgctacatccctaccccctgaaacaaaaaggagaaaataaaattttgctgatttcagaaacctggcaaatatattttttaaagttagggtgaaacttggtttttacttgtaagtctgagcattctttaacttggtttaccctaaaataaaacgggcaatgactctaggttggatgaggccagattcatgaagacctgggccttcccaagggatgacatttttacttcctacaactgggaaaatcaacagaaatttgaaattgcttctctgggccataaaataacaagggatctgagtttatctaccttgattaccacagaattaaataaactaaaaatagcttggttaggagactgatagaaaaataccctgggaaggtctttttttatgggaatcttttgggcatgaatgacaagactgtcattgatttatgactctttgttactgagatgagcatggccaggccagttctatcagcaagaaggcaaactacttaatcatattcatatcctcttgatttattttcaattgccatcactgctttttttttttttttttgcatttggtttggtttggtttgaatgtcagccatccctcatgacctaggttacaaaggaaaaacaaaaagagaggctttataggaacttgaacatggaatagctctttccctgtactccagtggtgagtaaagtcaaaataaatcaggaataaattctgacagccaatgagcaggcctcaaattggccctgagccattccatagttgttttataattacatcttcacatacagcagatttacatgtgttaagattcatttagaaatggcacatgggcacctgcaatttggcattccagttagagccctagtgtatcacacacttgattaataaactctgaagtgctgaaatgattctgtgtcattaatcatattctcttctacctctgtattacctgaaatcattagaggagaaagcct

SEQ ID NO: 6670 - DNA, 807 bp, mus musculus
aaaatatatgttctgctaggaggaggtaattggtatatattcatgaggtctattacttttattatgtagtgtaggtcttctatattcttacctattttttgttcacttaaaccatcttaaaccaagatttatatattttctcctattatcagtgtgatgttgtcaatttctccctgcctatcctatattgtatgctttatgaagctctttgatttgatatttgatgcatagattttcatacctgttatatcgttattgtgagcaatgctcttcgacatccacaaaatgtccttctttctcctttaatatttttgtggctgaattatattttgtcaatgatcaagattgtagtatatggtgtttttttttttttttttttttttttgagacggtatctcactctgttgcccaggctggagtgcagtggcacaatctcagctcgctgcaggctctgtcccccgggttcaagcaattatcctgcttcagcctatggagtagctgggattacaggcaggccccaccatgtccggctagttttgtatttttaatagagacagggtttccccatgttggccaggctggtctccaactcctgagctcaggtaatccacccgcctcagcctcccaaagtgctgggattaccggcgtgagccaccacacctggcagtagtgtttgctttttatgtttgcatttaccttgtctactttgcctatcttttattttcagactttccgaatctcttcggtttacatatgttttacattaggtgttccttgtgaatatatcttataatgttgttctaccta

SEQ ID NO: 6671 - DNA, 595 bp, mus musculus
acatgaagtaaaaggatgacacatttagttctatgtctgcacaagaaactggatttgctgctctccataaagtgaagggaccaactatacaacatacagaaataattaaatgccttctcattagaatataactagagcttgctaaagtttcttatttcatgagggcagctaaaatgccagtccatggaacaggcgcttctcctcctatccatttatgccgtagttttcatgaatttctggctggatgccgcaaaggccaagaggttatccacaccctcttccctgttccgctgaaagtaggtctggaggatggtcattttatcctgggtctcctccacttccgtgctgcagctgccttggggtcccagtgccacagcttccttggccttgaactctttctccctctgcaggtggcactattcaatttcagcctgaactgccactttggcctgcttcagcctctggttcttttggctgcaggcctctgacaccttctcaacggcctgcttctcaacctgcagcagctgctggatgccctgtgactgactggctatgacagtggtgattctgagaccaaggcaagtggcctaaatca

SEQ ID NO: 6672 - DNA, 662 bp, mus musculus
ctgcaccttaatttcttgcctataacatggacatagtaaagtacctgcctcatttggtggctgtgagggttaaatgagaaaacgcttgtgatttagttataattcttgcttgccaacattgtagatgaccactggctttccaaagcagggatgagcttatgagaaggcaaccatcgcatgactgaggaagtaggtttaacaatgagcaagagccaaagcagctggaccttgaccatttctcatccctcatgggtagtccactgctgctgcaggggagactggccaactgtttctgaaatgaaaccatttcttcacgagtcaatggcccatctgaatggtaggatgcaagccaccagagggtgtgctgagggaaagtgggactcattccttacctccactcctcaataggatggggatttagatgctgcactactagttaatggaaaatgtgccctaagacacataaagtgtgtaggataatgcttggtgcggggccagcactccctacaagccagttgtgacaatgattcatttttacatttcatgagtagttatgacaatatctgcctggaaaggcataattatagcaaagacctagtccagtacctggcaaataatacacgcccaacatgtgctagctgatgttgttacaatatagtata

SEQ ID NO: 6673 - DNA, 661 bp, mus musculus
cttaaccatggtgtagagcagagatgaatagtgaatgacaggagactcaccaaatccaagacagtcccccaaatcacatcatttatcatctttgcctcatttcctgggattagggccaaaatagcccctggtcatgatgtctgttcagcaaagtgtaagaaaaatattgtgtgaactctggaaacacttcacccattttaaaagtctttgcaaatgatttatttatgtgagttttctctttctcttccctctttagccgtcagtgtcagcagctgagcatcagcacggcatatcatcctcacctccaatcccaggacattcagagtgttggccaacaggcttgttggttttgcttgggccattttgaaaccatccttcctcttttgctctgtcttttctttttgttgtgttaaatgccaactattcagtcatgaagacacttatttcaaacacatttacaaaactaattgtggaagctgcagagaatcctttgtttgagacattgtggtctactatgtcaaatcacagctagaaggcaacttggaacttaaattatctgtccaggaaatgtggggttttttctaagcggaatcattataagccttacttgcctttctgtaaagaggggaataaactagtttaagacaaatcaatctaaata

SEQ ID NO: 6674 - DNA, 132 bp, mus musculus
gcacctaattttagaatagaattgctgattaatgggatgtatgtaaatttagttttagtggatcttgcctgttttttcagtttgtgtgcccttcaacaaagcatgaaaattccatttgtttcagttctttac

SEQ ID NO: 6675 - DNA, 132 bp, mus musculus; identical to SEQ ID NO: 6674

SEQ ID NO: 6676 - DNA, 1054 bp, mus musculus
tatactttcaaaatgcagcagtaagagtggctgcaacagtaggcaaattacccaactatttacatatagatacaactattgttacccattggtaattagatcataacagtcagtaccaagctctgaccacatttagtagttaacaaaattatttttaaaaggatcatgaactaaagattatcatatgaaatacagtgctgatgtgaaagataaacattttataaaacgaactgaagttagagacaacatatttggtccagaattttcttaccacgagaactatccaaaaattgaacaagctgcatcacaaaaaagtgaggtggtcacttaagtatccaaaagcagaaagcgaaggactgcttaacaggacagaaggaattcctatattcggaaaagtcagaagtcaatgttgaaataaaggagaaaaactacttggataactgacttatgacactaatttaaaaaacccagtgaatactacattaaagaaaaagaccgggcacagtggctcacgcctataatcccagcactttgggaggctgaagcgagtggatcacctgaggtcaggagttggagaccagcttggccaacgtggcaaaaccctgtctctactaaaaatacaaaaattagctgggcatggtggtgggctcctgtaatcccagctacttaggaggctgaggcaggagaatcacttgaacctgggaggcagaggttgcagtgagccgagatcgcaccactgcaccccagcctgggtgacagaatgggactctgtctcaaaaataaaataaaataaaataaaatttaaaaagagttaagaaaaagacaaaagataaacaccaaataaaacttcttaaataggtagaaacattgaaaaccaaatttgggaaatttttttttagccaattaaaactgaataacatgagattatttcttatgcctggttccattctaagtcaaccacaccatcatcaaaatttctctctctgaatatatattcttttaagtacattgttattttcctccattgcattatagacattcattccaaatgtta

SEQ ID NO: 6677 - DNA, 251 bp, mus musculus
tttaatgaaaagtctctaacttggaaatataaaggcaaataaggtggaatttcaatctaagaaactgaggattttgtgagataaaatatgtggcttaggatgtagcccaaatatttaggattattctccttgccttcatttccaacatcgccatcagggtcaccaccttctcttgcccagactcatgtactagtctcttacatagtctctcctggcttttactattacttccttgccatccttcttttgca

SEQ ID NO: 6678 - DNA, 158 bp, mus musculus
gtgagactggtgaagtgataaatacacacatcaatagaacagaatagaaaagccagaaatgaacaagcggtcctaaaacaaatgaccatccatttgcaaaaaaaaaaaaaaaaaaaaaacccaaatcacacgaacctcaaacctaatatactttacat

SEQ ID NO: 6679 - DNA, 893 bp, mus musculus
cagcaccttcgtcttggacttccagtctccagaactgtgaaaaataagtttccgtttaagccacccaggctgtagagtttgttatggaactctggcagactgagattgttggagaaccacagtcctggtggttgagtgcctgcctcaggcattattgtttttaggccagtggtttgtgcatcaaaatgcttggtaaagcagactgccagggcttactccaagaatttcagatttaggattgacatgagaagtcacatttctaaccagttccccagcggtgctgatgctgccgatgctgccaatgctgccaatgctggtccatgttcggagaaccactggtttagatggtgtgtcggagaggcttcaggcaagcgctgggagacttgaggtagggatagtggctctcccgcccaactaggaagttgtttaaactcagagcctcagttgcattatctgtataagggtgataatatttattctgcttatttcatgggattattgaagtcagatgcatgaatgaaactttttaggtcctcctgctcttcatacaaagtagttgggttggggtcggggatgttgcattctttttgcaaaaagagaaggacaaatgaaatgctgaagtattctaatagtaaattataaagcaaaagtaaggtatttccttccttttcttcaccagatacggcctggtcatctgatttgctggctgcttggacattggtctttacccacttcttttctctgcaatccccacagcaacttctcttaaaagccaggcagtttagctaagaagcctttattacagtatctgtggctcctttttctggccctgccctgtcaaggatgcctgtggcttttttggtgattgagacagtggaaattactgagtttct

SEQ ID NO: 6680 - DNA, 1083 bp, mus musculus
tctcgatcttcttcacaaccacggccctggaggaactggtgcggctgagggagctggagcctgcgccagagccaaagctggagcccaggccgtagctgaggccggggcttgtgaggcccccataggccgagctcagaccacctgcatagccgctggtggtcttcgtatgaatactcatgttctgcatcccagacttcagccggctctctttgccctccagcagcttcctgtaggtggcgatctcgatgtccagggccagcttgacgttcatcagctcctggtactcacgcagctgccgtgccatgtcctgcttggcccgctgcagggcagcctccagctcggacaacttggcgttggcatccttaatggccagctctccacgctgctcggcatctgcaatggcggcctccagggaagccctctggcctttgaggccctcaatctcagcctggagctggctgatgttccagttcatctcagagatctcagtctttgtgcgccacaggtcatccccgtgcttcccagccagactctgcagctcctcatacttgatctggtacatgctctcagcctcagcccgtctttggttggcaatatcctcgtactgtgccttgacctcagcaatgatgctgtccatgtccagggagcggctgttgtccatggacagcaccacagatgtgtccgagatctgggactgcagctcccggatctccttttcgtacagctgcctgaggaagttgatctcgtcagtcagcccttccaggcgagactccagctctaccttgttcatgtaagcttcatccacatccttcttgatgaggacaaattcattctccatctctgtatgcttattgatctcatcctcatacttgttcttgaagtcctccaccagcctctgcatgttgccaagctccgcctccagcttcagcttctcctggcccagagtctccagctgccgcctaaggttgttgatgtagctctcgaacatgttgtccatgttgctccgagccatcttctgctgctgcaggaggctccacttggtctccagcatcttgttctgctgctccaggaaccgtaccttgt

SEQ ID NO: 6681 - DNA, 1083 bp, mus musculus; identical to SEQ ID NO: 6680

SEQ ID NO: 6682 - DNA, 8004 bp, mus musculus
ttttttggaaacttttcttcaattatttgttgataatcttttcccttccatattttgtgtcctttgcctttcgatgggaatttatgtcacttaaatattgggtattctggactgttcttctatttcttgacttttctactttctatttgttaatttttttactctactttcagagaggtttcttaaaattttgtcttctaatctttctattgaatttttcgcttgtgcacttatgtttctgatattgaatatattttgttgttgtttgagttttctgcattaaagcaacctgttcatggtttctgcatgttacaaatagctttgttttgatttttctccctgcatagtgtttcctccaagttgctttagatattttgttgtttgtttgttttgatctttatggcaggagcctttccacaggtttttctcatctttgactttctatgcattcctgtaagtaagggatttaaagcctgattgctcctgataaacacatgatgggacttctccactctgagctacattgtaagttgacctgtgtgagtattttattggggaatcccaatagtttttgtctttatcttttctgctgtagagtggatcaaattacccaggaaagacttctaatttctatctacaggaaggggtctagaagccagctccaagtagaagaaagagctgggggtgtttgcattcagtattcagtatgcatctgatgatgaatccccatgttgtcagtatggtacatacacacaactgtgtgtagcattccccagctgaagatcttattttccctttctagtgaatacatctccagatttttaggggaggagggacatgcagcagtgaaacatcagatatatatttggttctcagacatattctacctaagctgccagagttcagaaccactcccttcgtcttccttctaaaagtaatggatactttcaatgattctgcaagtgtaaattgggtttgtccctacccttccctactgatggcagtttccattcattcgtttatagtttccgaaactgtgccctttactgctcctgatttccccatccttgtggtttatatttttaagaatatacacccctttgctatcatttttgtaagtatgtcccagtaatctatcttaatgaaagactaaaatggcatatttttaatatttacttatttattatttttatttttccataagttattgggatacaggtggtatttggttatatgagtaagttctttagtggtgatttgtgagattttagtgcactcgtcacccaagcagtatacacttcaccatatttgtagtctttcatcccttgctcccctcccactcttcctcccaagtccccaaagttcattgtatcattcatatgcctttgcatcctcatagcttagctcccacatatcagtgagaacgtacgacatttgagtgtccattcctgagttacttcacttagaataatagtctccaatctcatccaggtcactgcaaatgctgttaattcatccctttttatggctgcatagtattccatcatacatacatacacacacacacacacacacacacacacacgcacatatatataaaacacagtctccttatccactcattgattgatgagcattttggttggatccacaattttgcaattgtgaattgtgctgctataaataggtgtgtgcaagtatctttttcaaataatgacttgttttcctctgtgtacatacccagtagtgggattgttgaataaaatggtagttctacttttagttatttaaggaatctccacactgttttccatagaggctgtactagtttactttcccaccatcagtgtagcagtgtttcctgttcgccacactcacaccaacatctactgttttttgattttttgattatggccattcttgcaggagtaaggtagtatcatattgtggttttgatttgcatttcctgatcattagtgatgttgagcattttttcatatgtttgttggccacttgtatatcttttgagaattgtctatccatgtccttagcccactttttgatgggattctttgtttttttcttactgatttgtttgagttcattgtagattctggatgttggtcctttctcagatgtatagattgtgaagattttctcccactctttgggttttctattaactctgccgactgttccttttgctatgcaaaagatctttagtttaattaagtcccagctatttatctttgtttttgatgcatttgcttttgggtcctccatcatgaaatcctcgccaaagccaatgtctagaaagattcttccagtgttatctcctagaatttttatagtttcaggtcttaggtttaagtccctaatccagcttgagttgatttttgtataagctgagaaatgaggattcagatttatttgcctatatgtggctagccagttaccgagcaccatttgttgaaaagggtgtcctttccccacttcatgtttttgtttgttttgtcaaagaccagttggctgtacatatttgggtttatttatgggttctctattctgttccattggtctatgtgcctatttttatactggtaccatactgttttggtaactatggccttacagtatagtttgaaatcaggtagtgtgatgcctccagatttgttctttttgcttagtcttgctttggctatgcgggctcttttttgataccatatgaagtttagaactgttttatctaattctgtgaggaatgatgtggtattttgatgggaattgcattgaatttgtatattgcttttgtcagtatggccactttcacagcattgattctacccttccatgagcatgggatgtgtttccatttgtttatgttgtctatgatttctttcagcagtgttttgtaattttcttcatagaagtccatcaaccccttagttaggtatattcctaattattttattttttgcagctattgtaaaagggttgacttcttgatttgagtctccagttggtcactattgatgtatagaagagctactgatttgtgtacatgaatcttgtatccggaaactatgctgaattcttttatcagttctaggagcttgctggaggagtccttagggttttcaaggtaaatgatcatatcctcagcaaacaatgacagtttgacttcctctttaccaatttggatgccttttatttctttctcttctctgattgctctggctaggacttccagtactatgttgaagaggagtggtgagagtggacatccttgtcttgttccagttcccagagggaatgctttcaactttttcccattcagtattatgttggctgtgggtttgccatagatggcttttattacattaaggtatgtcccttgtatgcagattttgatgagagttataatcataaagggatgctggattatgtcaaatgcttcttctgcatctattgagatgatcgtttgatttttatttttaattctgtttacatggtgtatcctgtttgtcaacttgcatgtgttaaaccatccctgcatccctggtgtgaaacccacttgatcatggtggattatctttttgatatattgttggattcagttagctagtattttattaaggattttagcatcatgttcatcaaggatatcaatctgtagttttcttttctggctatgtcctttcctagattcagtataagggtgatgctggcttcatagaatgaattaggcaggattccttcttcctccatcttgtggaatagtgtcgaaaggattggtccaattcttctttgaatggctggtataattcagctgtgaatccatctggtcctggactttcctttgctggtaatttttaaattaccatttcaatctcgctacttgttatttgtctcttcagggtatccaattcttcctgatttaagctagaagggttgtatttttccaggaatttatccatctcgtctacgttttctagtttatgtgtgtaaaggtgttcatagtagccttgaattaccttttgtatttcagtggtgtcagttgtaatatccaccgttttgtttcttagtgaggttatttggattttctctcttcttttcttggtttatcttgttaatggtctctcaattttatttatcctttcaaagaaccaacattttgtttcatttatcttttgtatttattttttgtttcaatttcatttagttctgctctgatctttgttatttcctttcttctgctgggtttggatttggtttgctcttgtttctctagttccttgatttgtgaccttggaacgttagtttttgctctttcattctttttgatgtaggcatttagggctatgaactttcctcttagcaccgcctttgctgtattccagagtttttgataggttgtgtcattgttgttgttcagttggaagaatttttacatttctatcttgattttatttttgacccaaagctcattcaggatcagattactaaatttccatgtatttgcattgttttgaaggttccttttagagttgatttccagtttcattccactgtggtctgagagagtgcttgttataatttccattttcttaaatttactgaagctcgttttatggcctatgatatggtctgtcttggagattgttccatgtgctgttgaatggaatgtgtattctgtggttgttggatggaatcttctgtatatatctgttaagtccatttgttccaaggtgtagtttaaatcattatttctttgttgactttctgtcttgatgacctgtctagtgctgtcatggagtatgggaatcctccactattatttgttgctgtctatctcatttcttaggtctattagtaattgttttacaaatttgggaactccagtgttaggtgcatatatgtttagggttttgatattttcctgttggacaaggcctttcaccattatataatgtccctctttttctctcttaaccactattgctttaaagtttgttttacctaatataagaatagctacccctgctcacttttagtgtccatttgcatgaaatgcctttttctacccctttattttaagttcatgtgagtccttatgtgttacttgagtctccctaaggcaccaaatggttggtgagttcttatccattctgtggttctgtatcttttaagtggagcatttaggacatttacattcaatgttagtattaaagtatgaggtattgttgtattcatcatgctcttcattgcctgtgtactttgtttctttttcttttttgtttttgtttttaacttgtatttttgtttgataggtcctgtgtgatttatgctttaaagaggttctgttttgatgtgtttcctagattggtttcaagatttgttcctttcagcagttcttgtagtggtggcttggtaatggtaaattctttcagcatttgtttgtttgaaaagactgtatctttccttcatataggatgcttagttttgctggataaaaaattcttggctgataattgttttgtttgagaaggctgaagataggcccccaacctcttctagcttgtagggttcctaccgagaaatctgcagttaatctgacaggttttcctttataggttacctggtacttctgtctcacagctgtaaagattctttctttcatctcaactttggataacctgatgacaatgtgctaggcaaagatctttttgcaatgaatttcccagttgttctttgtgcttcttgtatttggatgtctaggtctctagaaaggctggggaggttttcctcgattattcccccaaatatgttttccacggttttagaattctctttttcctcaggaacaccgattattcttaggtttggtcatttaacataatcccagacttcttggaggctttgtttgtatattcttatttttctttctttgtctttgttggattgggttaattggaagaccttgtctttgagctctgaatttctttcttctatttgttcagttctattgctaagactttccagagcattttgcaattctaaaagtgcatccaaagtttcctgaattgtttattgtttttttctttaagctatctatttctttgaatatttctcccttcacttcttgtaacattttttggatttccttgcattggacttcacctttctctggtccctccctgattagcttaataactaacctcctgaattctttttcaggtaaatcatgcatttcttcttggtttggatccattgctggtgaactagtgtgattttttgggagcgttaaatagccttgtttttcatattaccagggttggttttctggtctcttccatttgggtagcctctgtaagagggaatgtctagggctgaaggctgttgttcagattattttgtcccacggggtgttcccttgatgaagtactcttccccttttcctatggatgtggcttcctgtgagctgaaatgcagtgattgttgtctctcttctgggcctagctacccagtaagtctacccagctctgggctggtactgggggttgtctgcacaaagtcctgtgatgtgaaccatctatgggtttctcagccatggataccagtgcttgttctggtagaggtggtgggaggttcagtggactctgtgagggttcttagttttggtggtttaatgctctatttttgtgcggttggcctcctgcgaggaggtggcactttccagagaatatcagctatggtagtatgggtaggaactggcagtgggcagggccctagaactcccaagattatatgccctttgtcttctgctaccagggtgggtagggaaggaccatcaggtgggggttggggtaggtgtgtctgagttcagactgtccttgggcaggtcttgctgtggctgctgtggaggatgggggtaagattcacaggtcactgaagttgtgtacctaggaggattatggctgcctctgctgagtcatgcaggttatcagggaagtgggggaaagccagcaatcacaggcctcacccagctcccacacaaaccaaagagctggtctcactcccagcgtgcaccaccctgccaacagccctgagtgtgtttccaggcagagggcttgaaaacttgccccagactacccgcctctcagccttgaaagaaaagggcttggttcttccctgtgaagtctgcacactgggtttgtgccctcccctgagttctggccaggaggtttctcaccccattcaaattattacaaagctcaactagagatttccttctccctgtgggattttactccctgcttccctggccactctcctgacagatccctgtggtgccaggcaggaatggcctgctagggaacccagccagttcccagggcctttctgctgctccctctaccactgtatttcacttggctctctaaactgactcggctccaagtaaagtcggaaacttctcccacaaacagaacctcagcttctccagtgggagtgtgtgttcggtagaggagagtttccctttcctgtctccagagtgggggcactcacagtatttggggtgtctcctgggtcatgcaggagcagtctgcttccttcagagggtctatgggtccttttgggattgcttgcacctgaggtctgagtaaggagcagggagaccttgggtagtgcagggctgccaccagggtgcacacacacttggggtccgctgtcagcttcttggtttttatttttgactctcatagcatatgacaaaagcttgcacgtagtagacacttacctggtatttgtaggattgaataaatgaatattttaaacacatccaaaacgtagaactacagcatttgcacatgctacagatttatgcctttaacaaattaatgaaattaaatgtctctttcctcctccagtaatgcaacatatagataacttcatcagtttaaaaaatctatattgcaaaaagttaacaataatttgagtgagcat

SEQ ID NO: 6683 - DNA, 3040 bp, mus musculus
tggagaaaaaacttgttttaatagaacacataatggagagcacacaaccattgctcaatataattacagtgctccagttgtcagagtggacattgtctttgctattaagatttgtcttctggactagagtgtaagaattcatacccaagtcctagagaatgaaattctgcaaatgaaaatactaaaaggaatcacacactttattagtcccttttcatgctgccgataaagacattctcaagactgggcaacttacaaaagaaagaggtttatttgacttacaattccacatggctggggaggcttcacaatcatggtagaaggtgaaaagcatgtctcacattgtggcagacaagggaagagaccttgcacagggaaacaccctttcttaaaaccatcagatcttgtgagacttactcacaatcatgagaacagcatgggaaagacataccccatgattcaattatctaccaccaggtccctcatacaacatgtgggaattcaacatgagatttgggtggggacacaaccaaaccatattattctgcccctggctcctcccaaatcccatatcctcacatttcaaaatcaatcatgcctttccaacagtcccccaaagtcttaactcatttaagcattaactcaaaagttcacagtccaaagtctcatccaaggcaagacaagtcccttccgcctatgagcctgtaaaatcaaaaccaagttagttacttcctaaatacagtgggggtacagggattgggtaaatacaccccttccaaatgggagaaattggccaaaacaaacgggctatgggccccgtgcaagtccaaaatccagtggggcagtcaaatcttagagctccaaaatgatctcctttgactccatgtctcatatccaggtcacactgatgcataaggtgagcttccatggccttgggtagctccatccctgtggctttgccaggtacagcccacctcccagctgctttcacaggtgggcatgagtgtctatggcttttccagtcacaaaatttaaactgtcagtggatctaccattctggggtctggaggactgtggccctcttctcacagctccactaggcagtgccccagtagggattctgtgtgggggctgtgatccaaaatttcccttttgcactgccctagtagaggttctccatgagggccccacccctgcagcaaacttctgccagggcatccaggcatttacatatatcttctgacatctagctggaggtgcccaaaccccaattctggacttctgtgcactcataggctcaataccacatggaagctgccaaggattggggcttgcaccctccaaagccatggcccaagctctacgttggcccctttcagccacagctagagcagctgggatgcagggcaagtccctgggctgcacacagcgtggggaccctggagcagacccacgaaacaattattattattattttttctaaacctccaggcctatggtggaaggggttgctgcaaaggtctctgacatgccctggagacatttttcccattgtcctggtgattaacatttagctcctcattacttatgcaagtttctgcagcaggcttgaacttttcctcataaaatgggattttcttttctattgcattgtcaggctgcacattttccaaacttttatattctatttcccttataaaactgactgcctttaacatcacccaaattacttcttgaatgctttcctacttagaaatttcttctgtcagataccctaaataacctctctcaagttcaaagttccacaaatctctagggcaggggcaaaatgctgccagtctctttgctaaaacataacaagagtcacctttgctccagctcccatcaagttcctcatttccatctgaaagtacctcagcctggatttcattgtccatatcattatcagcattttggtcaaagtcattcaagtctctaggaagtttcaaatgttcccacattatcctgtcttcttctgagccctccagactgttccaacctttgcctgttacccagttgcacagctgcttccaggtatattttcagattttcagaaaatcttttcagaaaagattctcatgtatcttttcagcagtgccctattctactggtaccagtttactgtagtaatccatttgcacgctactaataaagacatactcgagactgggcaatttacaaaagaagggtttattggacttatggttctacatggctggggaggcctcacaatcatggcagaagttgaaaggcacatctcacatggcagcagacaagagaagagagattgtgcagggaaactcccctttttaaaaccatcaaatctcgtgagactgactaacaatcatgagaacaacatgggaaaaacctgcccccatgattcaattacctccccccaggtccctcccacaacacgcaggaattcaagatgaaatttgggtgaggacacagccaaaccatatcacacacacacacacacacacacacattaagcattagtattcagagaactattctgggaccaatgtcctaggttacaatccaaggctagggaaggagatcctctactctctgaaagggcatagtaaggcacagaaccaatgactgctgcagagcctgccatatggctgaacttcagggctctctgcagtgacaaccaagcttcacggacacttgcagcaaccctctctgtacactctggaagcttaatagctctgtgcctttagtggtttcccagggtattctctgctatataaaacaattattacagttttgacacaactggagagcaagctcttgatggaaaacaccagtagtaaaggcagtggtggagagatttcccagagattctcaagcacatattgctcaatacggtccattagtggagagctggataagtagacaacggaaaccacagatgctgcctaaaatttgaacccaaatgtcacaccacggccatgaattagttctttataaagttcttacttgcctcctgaaaatg

SEQ ID NO: 6684 - DNA, 1034 bp, mus musculus
taagagtcgcagctccatttatgtggattaaaatacctaccaaggcaaggacatttaatagagtggtattcaagagtttggaaaatactatgttcataaaactatcatcatacggtggcattttcacttaaaatacatgcatatccctaatttattttttgatacagaatactgatttgttccaaataggtcatgtttctatttattgttgagtgccacaataaatagctggctcgttttgcactcctgtccctctctatggcattgttcgagtagctgtggacacagctgtggggtgttttcaagtggtcagtgaagtaagtctgctcttgtaaaatacagacaagtacagtatcaaaatagcgcgaacgcgcaaaaattgctttcctggccttttaaccctgagaaagattaatggttgtttggattagaaactgtaccctaatgagggggctgttgcctctggggagtaggtatgagaaaggggactgttcacctccaggtcatcgttgcacaggctgcgagtctctgacgacccgcaacaccactccagacagctgcccgggctctgccagtaagtgcctggtcctccgggagctgttgaggggaccaggccatcaccatcacaatggcctgggggaggcagtctccaggaccaagcgcactttgaatggacagaaattggttcttaaagccctaggttgaattactggcagctgggggtgggagggtctagtttctcgtgctattattctactgtttttccaaccactccaatcactctcagaataaatgcaatcgcctaacaaattgcaataactgttttgagatttcgtcccctctgaaatgcctcatgaagctatgcgcacaacagctaacttcaaagtaaccccacttcattctttctggctttaagtttttgtctttttcagttgggtgctttaaattgattttccaatttataaaattggaaactgattaaaataatcatgagagaaaaggaagaaaaaaacaactaatcatcctattaccca

SEQ ID NO: 6685 - DNA, 1320 bp, mus musculus
ctgtgaaagtatctctaactgaatccacttcttaaacaaactactctattttaaataaggaaagaatggagaatctagacattttacaggtgtatctgagcaaaatatatatttgggttagtttttatcacattatcacgtttgtctttatattttatcttcatcctaaattttctccctatcaaaacagcaggaaatttttaaacttttatattgtacactatttttgcataaaataagagctgtagctaccaaatactatttactacttagtaaaggtggcttctgtgtattaaactacgaattacaaatatcacttcactaaccactataattatttttggctttttcagccactggaactttttttggggggatttaaatacaggaaaactgtttaagcaaaaaatgcactgctttcatgtaaaatgatataatcttctttaacaaatattttcttcattgataactgacagatatctcatagcattaacataaaataccagaaacaaactttatctccctattcttacatttagtgcaaattggaatgcgtatgtgaatgttagaagatggacttaatctctgacaactttattaatttctctagctacagcaatgctatttaaaagccagttaggtatgaatagtacagtaatagtttgggttctcccttgataaatgaataaaaggctcaattctgataagtgatcaaatttcttgaaattctttcaaatcagctgaaaatttggttggggtgaattgatggtttttgagaagtaggccaggtatcctcacaaagaagttttagaatagggtttcttttaagtttttaaatatcatcctttgtctttccatatggttttcataaccaaatacatgactatagcatggttatttttctagtactgccatttgtgatatagccacatcttggcgtgcaagctagacatctcaggtaaatttgtttttttttttttttttagccctagaggtaacattataactaaaatgcattcctgcaattctgtttgcagtgcttcactaaacattgaaataaagttgtaaattttttcttcagtaatccattttatagttaatcataccaaatttaagttgatgacctaaagtccaggtagtgttgaagatagtatgtatctagaatactggtaatgagaaattgttgtaaattgaagaaaacaagatgctgccatatattaagatagaatataattaactccatgagaatggttactcaggaactagttaaagagcaaacccatttctcccgcttcactctgtttcagatatttttattgg

SEQ ID NO: 6686 - DNA, 645 bp, mus musculus
ttagttcacacttcgctgctgagcttggagatgggaattctaattcttcttggataattctactggaatacctcaccatcaattcttacttaacatattcacaattcctccccaaaaacaatccccatctaccactttactattgtacctgtttcaccagttatcttaatttacagaatctgaaacccaaggagtatgagtgagtttttaaagccacatagccagcttagtgcaatcccaactctgaaaggttgtagtcatctttcactcacttccttcatccaggatctcccgttagtcactaaattgtgttgatttttccttcaaatggtctttgtatccatctgcacccttccatccccactgccaacccccctgttcaggttttcaacacctcgcgcctcagtgcctgtgacagctcctggcaggcctctaaatccatcctgcacacaggcctcggtagcttgcctgaaactacagcatgtttgcacagaaaggatttgggagatcatcaaatctgttgcactaaacagagaaaatgccagagccaacacaaacctctacatgatgcctgggtccatgctgattccccaactactaagataggggaaaagaaggaataaaggatacatttcaagatagtca

SEQ ID NO: 6687 - DNA, 722 bp, mus musculus
ccagactcaacatagaagacatataaatgctggaaatgctatggtttggaacaaaagtctctctagtccaaacacacacagtagaagcaaagaaatataagatagcatgccaggcacttttcctgttcttagcctggaactcgaactactgttatacaaacactcttaaactccctgagggtatgtcttatgcctatgatggtagcagagggggatattgaagagaaatcagagataaacttggatatctagtcctgagctataaataggtataacagtaagattatttcaaacattacaatgattcttatcagattttgagataaattttgaaaagttataatttagaaaacatgtctctcagctttgtctaaggaagaggtccacagagtttctgatcatttcaatttgaggtgcatacacaggtgctggctctgtgaggaacaagtcctggtcctgggacagaaaagttgcgatcgcactcaccactctagcacgtactatgtatttacttgtttatatgtgtatttcccgtttccacgctccaaaatagaaacactatggcaaagactttatctgctttgttcactgctagagaataccttctggcacatagtaggtgcttcacgattatttcttaaaacaataagtaaactgatttgccacttagtagctcaagctctttgcttcttcaccccccttccattgtctaggtttattta

SEQ ID NO: 6688 - DNA, 355 bp, mus musculus
ttattttcctttactgcagaatcagttgaacaaaacatttaaaacatacatatttatattataggtataagttcaatattatgttgagctgctgagaaagactaattagatattgttagcaatacattttgaaaacgtttccacaaagagtcttgttcagtcaaaagtatttcttataaatactttttcaataaagttatcatatctatgctatggataattgccatcaatattctttggatcaaatgagctataatgtaaattgttgacctaatgacatatagaactattaaaaatatttttgaccttgaatatattttttatttaaagaatctttccccttctaattagtaag

SEQ ID NO: 6689 - DNA, 387 bp, mus musculus
tccttttttccttctctttaggatgtgcttgtctgaagatagcaagcactttggtctgtaaatgtgaatagcttcttatagagtttgaagttcacaatctgcccaacgagacacagcgactctgggttcagaagttggggaaaggggtgtcaaattctggacacatccaaaactcagcattggtttggaacaactaaaagaccatgctttgtaaagcaaagatgttcctcaaaatttagtctaagaaaaagttctaaaacataatgtgactagctctaacattagatcttatttctaaaattcaaagacattaggtctgtcaaattataaactctttcttctatacctttgtattgaaatttagtaatgaaatcatatcttctacta

SEQ ID NO: 6690 - DNA, 1262 bp, mus musculus
atagaattatcatatgaaccagaaactcaactactaggtatgtcaaaggaattttattagtctattttcatacacatataaagaaatacctgagactgggtaatttataaagaaaaataagtttaatggactgacagtttcacatggctggggaggcctcataaacatgatgaaaagtaaagaaggaacaatggcaagtcttacatgacagcagaaaaaagagcatgtacagaactgctctttataaaaccatcagaactcgtgagacttactcattatcatgagaacaggatggcataaacctgcccgcatgattcaattatttcccaccagttccctctcaaaacatgtggggattatgggagctacaattcaagatgagatttgggtggaggcacagccaaaccatatcaggaattgaaattagtatgttgatgagatagctacattcttatgttcattgtagcatttttcaaaatattcaagatattgaatgaaactaattgtctattaacagattaatggataaagaaaatgtggggctgggcatagtaactcacacctgtaattccagcattttgagaggctgaagtgagaggataaattgaggccagaagttcaagatcagcctagtcaatatagtgagactcagtctctacaaaaaaataagaaaaacttagccaggcatggtggtacatgcctgtagtcccagctactcaagaggctgaggtaggaggatcacttgagcctcagaatttgggactgcagttagctatgatcagtctactgcactccaacctaggtaacagagcgagatcctctctctctaaaataaataaataaataaataaataaaataaactgtctatatacacaatggacaactactcttaaatttcctcttaaaaaggaggaaattatgtcatttgcaaaaatattgattcacctagaagacattatgctaactgaaataaggtgggtacagatagacaaatactgcatgatcttacttacatgcagaatctgaaaaagtcaaaatcctagaagtagagagtcgaatggtagttaccagaggctaacggtcaggggtatgagaaaagagtagatgttattcagagagtacaaattttcagttagacagaaggaatacgttttagtgatctattgcacagcatggtgatgatagttttttataatgtatatcttaaaatactaaatgagtacattttaaatgctctcatcattcaaatattaacaaatgt

SEQ ID NO: 6691 - DNA, 1097 bp, mus musculus
taactggttttactctcccaatataagcttatataaggtgtatataaaaggatcaaagggttgtattagataggttttataaagtaggcttcttttgagagaacctactgtctaattctaacccctgaagatatgtgttagggagtgctacttctaaaccccaaacttagggagtggggctttggtagaacccactttaagggctgatatgtatctctatttcccagggacctagtgcctgatgcacacagagaacaaagctaactgcagtggtagcttaggagggccatcttagaagtgatctttcaagcatctcccagccagtcaaaggtgaggaaccctcacagcactgtaaactcaggttgtcttaaaagtgatacatccgaagacactgtccagcccaagcaggaaaaggccagagcttagatgttctggagagtaccctggtatagagctgagaaaggttctaatgctttccagaaagccagacaacacaactcataagtgtgagggatttagtgccccacagggcaaacattgctcagcaaaagaggggagtgaggaatgagccagtaaaaaaattcccttcctttcttgctctcagctcattgttccaagtatctgtggtttaaggaaatctgttagaaaggtgtccatcatgcaaaatctttgttagattatcatgcaaagcttggaccaagttagcaagacacccaccatcgttactggctttccttccttccctgaatcatttcccttgttttcctcattcttgctgtccttagattgactctaccagtagagccttagctagaagttttgcctcaacctattttctatggaaggcaggctacaccagcattgctttgagcctttccgaggatggcgttgtttgtgagcagtaggtacaacaggcatggaatattcagaagctcatttacctgcagctttaaagctacatcttccaggttgatctatcagtagtaaagctgacgttttgatctccttttgccatcttctgtgtttctctgttaactggtctcaaactcagtaggaaaagtcatataattgatatctcaagccccaacagcataggc

SEQ ID NO: 6692 - DNA, 2689 bp, mus musculus
gagaagttcccctttcagatgcttttccttctccaccccaccccaccccatagtgttccctcattctcagcctccccaacactcatccccaccctaccctgattccctattctccgatcacaaaccctcaactctcaagataacataccgttgagatgaaaatggttgatatggctgggagttgtaaaatgagagcactggattcaactctggagagaacacgtagtgtgacactttcattttacagagaggcagcaaggggctgatgcatgacttctgccagtgttttacatttttaaaagacaaggaagaattcgatgtgaaggtgtaattagagtttgggatttgggtgttctaggctggagagagtggctggggtgtggggtcctgtgccctcccttctccccacctctccaccaagctgagatcttatctatccaggagactctttggaaatggaattcttcagggcttttatctctgtccttctacctccctttaaaacatacagcattgctttcatgtttgaacaataagataattcagttaaaatagagctacaattcttgtctcactcaactgcccccataaaaagcaactaaaatatccaagactttgctcaaatagaatctgtctttggagacttcccccactatttcctgacagacggtggtcatagctcctatatctgcttccacacttacctgtggtatctccccttctagacttgggcccaaagcctcttggcataagaggctcattgcatgtacctggcacatcctgaactctcaatatggtaggatgaatccatcaaagaagtggatcagtaacaattagcaatcctgagtttaatcttgagatgctgcatatggaaagctcttttcttgagacagagtctcaaaatgtggagatgatgtttttcttccatatcagggtgaggaaacatctatgttgcctactttagtttctaaagagctttccaggctgggtgcggtggctcacgcctgtaatctcagcactttgggaagctgatgtgtgcccaggacggagtgcagtggcgtgatcttggctcactgcaacctccgcctcctgggttcaagtgattttcctgcctcagtctcccaggtagctgggactacaggcgtgtgccaccatgctcagctaatttttgcatttttaatagagatggggtttcaccatgttggccaggctggtctcaaactcttgacctcaagtgatccgtctgcctcagcctcccaaaatgctgggattacaggtgtaagccactgcgcccagcctggaaagctctttagaaactaaagtaggtggaccaggcgcggtggctcatgcctgtaatcccagcactttgggaggccgaggtgtgcggatcacgaggtcaggagatggagaccatcctagctaacacggcgaaaccctgtctctactaaaaatacaaaaaattagccgggcgcggtggcacgcacctgtagtctcagctatctgggaggctgaggcaggagaatcacctgaacctgggaggcagaggctgcagtgagccgagattgcaccactacactccagcctgggtgacagagtgagacttcgtctcaaaaaaaaaaaaagaaaaaaagaaactaaagtaggcaacataaatgtttcttcaccctgatatagaaggaaaacacctatctccaaccaacaaagatttccctcccaaagatccagctgtttcactcaacatgtatttcaggctgcctgcgaggtacaggaataagtcatcactaagaggcacaggaataagtcatccctaagaaagctgccttcttcagctggatgtggtggcttatgcctgtaatcccaacatcttcggacgccgaggcgggtggatcactttagttcaggatttcgagtccagcctggccgacatggtgcaaccccacctctactaaaaatacaaaaaattagccgggcgtggtagtgcacgcctgtaatcccagctactcgggaggctgaggcaggagaatcgcttgaacctgggaggtagaggttgcattgggccgagattgtgccactgcactccagactgagcaagagagtgaaactctgtctaaaaaaaaaaagaaaaaaaagaaaagaaaaaagaaagctgccttcttcaaggccttctcttccctcattcttggtcaccctcagaacatcttctcttccagttctcctgttcttgagtgatgaatacagtgtctcatttattagcctagagaccaatagaaaactatactctctaccttttcagaaagactggggaaactagtcttttttttgccctgctcggagaccgggcatctgaggtttgcctactgtttgggagaggaacacagggatactgaggaggcagaggagagaatggctaagcccctcagctctgccctgcagtggcctctggccccaggtgctgctggccctaccaccccttcaccaagtcactccactcttgacgctgcaccctcacccagcagtctgcaaaccagtttagttaagagtgcccaaagtggaaagaaggaagccaaatgccaaaatcatcccttttcctagtattatttggttcgggtgaggtcaggtgtagcaagtagtcagttgtgaggcaagatttagggagcacaggaaggctcaggctcaaaaataaattcca

SEQ ID NO: 6693 - DNA, 374 bp, mus musculus
aattctccacctaacttcttcaaaatcctcaactattcatccaatctggagttaataagaaacatttgtgtataagtaggagcaaataatattttacttttttatttataagatagcaaatgcacatcaggaattgcaaagctgtttttgagaaaacgaggatccagtttacctgaagagttgtgaagaatatatgaagatggggtgccatcagaggtgaggtaaccctggttttgaggggaaaaccttaaaactagcaaaggaaagccagtaagaaggggaagtagaatttggaaaatagaagtaattgagccacaaactttacaaaaaagcgtgatacagaacaaaaatagattatgaataaaaaatagatt

SEQ ID NO: 6694 - DNA, 196 bp, mus musculus
cccacatattttacgtgttatgtttttattatcactcaagacataagttacatttagtcttgaagtgtattttatctgacattaacataacattactccagactctttatgctgctaacatggtgttatgttttttcatctatttatttttgatctatccgttctttatttttaaagtacatgtctacaaaagcca

SEQ ID NO: 6695 - DNA, 2612 bp, mus musculus
tcgatgggtataatgtattaggcgtattcaacatgactataccataatattcatattctcactatatccaacatttatatgtactaacttcattataaaaatttttaaatggggcttaaagagccttccttttcaagaaatcactctttataataacatattctctaaatttaaaagtaatcatataaaaatgagataaaaataaataggtactttatataaagtgtttgatatgaaaaagaaaatttgcactggacaagttaaacagtcaaggaagattgctcaagattgctgcaatacagaagagaaattgaactcaactccactgaatcagagggcaggagagcttttaagtactggaatgagccagtggaaaagtactagatgatattggagaggagattagtcaatgtgactatgccatctgtatttgctaatctgcatttatctatcaaacttagactcttaaactcccacagagactgggagatgaggatgttattgtccttgatgattatatatttcaaagtgttgtctcccagttccttgagaaagacattactggactgtaaaattgtcaagcaactagaaggagatttatattttagaggggcagagaaagaaattacaatagaaacttttctaaagcaaatgctctaagaaaagggtggcaagggacatatatttgtgaaaattttctgaaacttagtcaagctgaggggagcatttagtctgtcctggtcagttgtatgatactgtggctaggatcccaggtacttgtcaccacaattatgtctgtctgtctctccttttctcttttttcttatagtagcaaatatttgcaattcagagaaaaccattcctttgctgtggcccgttcaacagctgaaaacgtgaatatgtaacctcagtgcaggagttatattcaaggcagttttaattttttcatagtgttcagtgttacacatgagagatacagcacatggacatgcctggttagaatcctcaaaaacaaaaatcttaaagggttccataatgccacatattaccaacataggaaactccattatttatggtggaaatttaaagtacatatatgtatgtgtgtgtgtatatatgtgtgtgtgtatatatatatatacacacacataattatatatacacacatgattaaaatgtgtatgtatatatatgcacaattatatatgtgttaagtatatataattacctatatgtataatttgttagacatcaacattctttttgctatctcaaaataatttggaaatgttaaaatagccaacgtaaggactatatccaaagaatttgcttacctggtattcagagttggattttagaaataacttgccatatgtggttcaactggacaaaaacaagcaaatatgtgatataatagtacaatatagtacatggccaagtaagaaaatgaattatatctttctatgcaattgtatatgtataaatatctacctatctatataattacgtgctattcattataaatatgtataattatatataacatatattttcttttaaatagttacattacttaaggaggaatgtataaacatataatttccaaatattaacattttgtttgccttttgtaagtaacttgcaaatattatataatcaatgtaggtatctactatgaaaatgagattttaattaaaagtttgcctacttatagaaggaaacatgcatattttatttcctacttttgctttggttgttcagaaattcaattagttcaatttaatgtttaatcattactcttaggagttgatatatttgcttgttttgcatcactgattctaaacagtcaaggaaaggcaagccacccttggaaggtcttagagtctctgtgttcatgaaatttgtcatcaaattattgcatcagtaaaaagcttgagaaacttttttttctgttttgttatctaaacatttaacagccttgttacgtatatgacttgtactgatttatcttattttcagaagatcaatttatgttgtgtattctttcttcaataatatatactttccctttgaaatgttcaacttaatttaaaaataatataatttaaaaagtggagcatggtttagctaacgaaatatatttattgaacattataacgtataatgtgatgtagataaaaatattagtgactggatttttcccctggtgaatcacagtggggagataagtatttgaaggaatcatttcagtacagtgttgtatgtatcaagtagtatccacagagatgtaaaagctaatggaactctggagtcagaccaactgaatttgaattctcagctttggaactgactagttgtgcagtctttggcaagtgaattaacctttcagtatttccatttcattaagcacaaaggcataaagatacgaacaattttatatggtagctgtctggattacatgattaatgcatataacttgcttaacctagagatagaattatattgttaactaaatataatttatgactgtgactgagagcctggattggtgaggagggttgaggatgatttcctgaaaagctgctttcagagatgattctggctctcagaag

SEQ ID NO: 6696 - DNA, 499 bp, mus musculus
tggtaatccaaattcctgaattcagcccatgtccaacttgagtgagaatcactcttatttggggtgtcaacaccattctggtgccccagtcttgcagttctgggtgaaatcatgaagggaatcatgtcagccagtggtggtgatggtaatgttgcatgtggggtctgtgggcagggttggtacagtattagagaacctcctgcagaggagatcaaaatcagctccttacaggtatctatccaggtttgaggtgccctgcctacatggcactgcaagctctagtttttgaataataacaaataaagtggatttaactgtggttaatttaaataggatattggatttttgttcctaatcacgaacttggctagctcataatttaatatttacttgatgtctaattaggcaagtgtcttgttaactgttaaattaaagttagaaatggaatatatttgaatagtcccctttgttataaggatgatatcttattcagatcact

SEQ ID NO: 6697 - DNA, 352 bp, mus musculus
gggcctcttttcttgaagatttacattttcaataacacataggatacagaaaaagtgggaggatgtcatttatcagaaagacagagagcagatgtatggtgtatagccagaaaaattagctggagacacattaacattaaatatcttaaaaggaagtactcaacaagagcctcagaattcagtgttttgtatcctattaaagtaatattttgtactttgcagcaattttatacttggatttccaaatctttacaggcagaagatgatcattatctttattctatctgtgtgaaattgactatggctaatttgggaagaacctttaaagtaatacctatataaattcaagttg

SEQ ID NO: 6698 - DNA, 134 bp, mus musculus
gtcttttacttaattttattttgacaagaacatgagaaataaaaaagttttagattatttagatatcaagccagggaaaacttatccagtctggcttccatgtgtctggtagagcaaataacataacatcagaa

SEQ ID NO: 6699 - DNA, 629 bp, mus musculus
tggcattcgccttcgcatctagttaaaaaacatttcatacatctactctttcaggaagctctcttttaacattcaatgttaggtactttctcatcccaaaagtctctcccacaatagagtcacaacttctatggaaacaaacaatgtctcactcatttctgaatccctgttcccaacacagtgcaaggcatgtgggaggaggtactcaggaaatctttattttatgaatgaataaaagctaacaattgtgtatagcaggttttgctatgtactagaaattagaagtagagaatactcttcacactgcagaaagactatatcaatgcgtaaaagattcacataatctgaagcaagttattttatatggaatgaattggggtaactatacatagtataatataaaattctttgccatgcaaaggggaataaaaatgagccaggcgctgcacagaatttgggaacattgattggggaacagttctgaagtagaggcctattgtgtaagtaaatctctggctgagttcatcggtctcctttgattgttcagctaatgtcacttcaaaacagactatgctttcttcatgttaacccttttttaaaaaaattgaaactgttcagggcttcaagac

SEQ ID NO: 6700 - DNA, 629 bp, mus musculus; identical to SEQ ID NO: 6699

SEQ ID NO: 6701 - DNA, 629 bp, mus musculus; identical to SEQ ID NO: 6699

SEQ ID NO: 6702 - DNA, 802 bp, mus musculus
atgcaatcttcataaagttttgcaaaaaggtagagtacaagttgctaaataaaacttgaaatctctttagtgtatgaattatatttctatgtatgcttgagagtaatctgcatttcctgtttctacttataggatacaaacttctgaagacaaagtctatgcattttctctcatagttttgtaccaagcatatcatgagtgggcaaagaatgttgttgtttatcataataaaaagattcataatctttgaaacatatctttttttttaacatagaaagtgcagaagatagatgtttgtatgttgcaaggttttttgtttgtttgtttgtttttttgacggagtttcactcttgttgtccaggctggagtgcaatggtgcgatctcggctcactgcaacctctgcctcccaggttcaagtgattctcctgcctcagtctcctgagtagctaggattacaagcgcatggcaatatgctcgctaatttttcgtatgtttagtagagacagggtttcaccatgttggccaggctggtctcgaactcctgacctcaggtgatccacccaccttgacctctcaaagtgctggggttacaggtgtgagccaccgtgcctggcctgtatgttgcaaggttttgaaaggaaaaatggaaaactgtattttattttcattaacttagattacaagaagaaggtattagggttgatgtagcagtcttttgatggagatttgttagctcaaagggcatctgagagtctaaagttccaaccattcatgatcaccgaatgggctaatgcacttaaa

SEQ ID NO: 6703 - DNA, 507 bp, mus musculus
atccttggaaatgaagattcaggaagcttcctggttggtgaacacaccaaagtttaggagggtggttcccccagaaataacacagaaacactacaccctacccccataccttgttctatgaatctttttcattttgctattcttcagttgtatcctttcctgaggtctgtcagccattctaatgaagcatcagacctgaggagggagttatgggaacccctgatttagagccagttggtcagaagtacatgtggcccaagacttggaactgctgtttgaaggagaggcagccttgtgagactgagtcctttaacttgtgtctgacactaaatccaggtagatagtatcagcattgaattgaatttgtagacacccagttggtgtcagagaattggagaactgattgatgttagaaaacaccatactacagatttttttaaaattagcagatgattagataactacctgtgataattatatccttgcttattaataaggcattcaaaa

SEQ ID NO: 6704 - DNA, 838 bp, mus musculus
taccatatgtgtggactctttagacaatggcttttgttggttctatatgaaagtaatagaacagcagtttgtatcattgtcttaagcagaaaaagtctgtaacagtttgaagaattagacaatcctgtttttttcaataagatactccccctttttatattttagtaataacatggtttgaataataagggaactggctaaggtttttgttgttgttatgttgtttgaaagccgttgaagatcccgtcagccaaacttggaatttggtccttggtataccacagagccaaccaacagcagcaagcagcagtgaatgtgaataacaagttctctttttttcttccccgtgtaagttaacaaatcactgttgtctccagtatacagaacctcagcattgacattctagaggtaaaatgtatttcacattttgaaaaggaccaaccctaagacagttggtaaagttaaaaaaaaatactgtctctgaagtccttcattgactttctgagtttattttacttcagccatagtccagggaatcagtcctttaagatggacacttctccaattctttccaccagatgagaatatatgacaattaagtgaaaattgatgctagagtgaattgattcaatgataattttccacattcctcacagtcattctctaggaatcttggtaaaacttacatgtgtcatacaagagggagcatggaatacgagagatgtgagttaaaattttacctttcatttttattgggcaatatttacatattacttaattttatgcatattctcaatatcttacttgaagactttctgtctttattatgaaaattaag

SEQ ID NO: 6705 - DNA, 986 bp, mus musculus
actcacgactggagccacaatagaggaaggagaaaaggaaggtgtgcccctttataatcatgactgagaaatggtttaaatgttttcctttcatagacatgattggccaagaattagtaacaaagccagaactggctacatgggaccccgggaaatgtagttgttgctaggaagtcatatgctcaccctggaattctattactaaagaagaagagaagaatttgatttggagggactatgtccatatccttcacaagttcctttgtattttaagaacccctcatttcggaagagttagttttgtttcctttagttaaaaaagctactacatacttggaggatccatgacatttagaaatggagtttctgaaaatagaaaaataaaattgagaaaagttccagatgatagtcttctttcttttgcttaagatttctttttctttttcttttttttttggatggagtctcgctctgttgctcaggctggagtgcagtgatgagatcttggttcaccgcaacctccgcctcctgggttcaagcaattctgctgcatcagcctgccaagtagctggaattacaggtgcccacccccacatctagctattttttttttttttttttttttaatacagacagtgtttcaccacgttggccaggctggtctcaaactcctgacctcaggtgatccaccccccttggcctcccaaagtgctggaattacaggggtgagccacagcgcccagccttaggatttcttaataggtatttattagaagcttaagttatgtgaattatcctttgaagctgatcctcctttttattgctttctaatattgatatatttttaattcttgctatcaaatttttatttaatcccttaacttaatggaagatgaaggtttgttgtgttttcaaaacacacataaagctattattatatgttgactttttctaaaacttgctgggtatacaaattatagcaacta

SEQ ID NO: 6706 - DNA, 496 bp, mus musculus
tctgtggatagagcttcctgttgtctcaatccaactgaaagtcaaatggcaagggatcctgggtagtacagtccatagaggttaacctctctagcctctgcagagctgaggaggacaaacaaatcttagaaggacaaatggaaaataaatagcattaaaaaatgctcttagattcagttgctactttttttttttttagacagagtctcactctgtcacccaggctggagtgcgatctcagctcactgcaacctccgcctcctgggttcaagcaattctgctgcctcagcctcctgagtagctgggattacaggtgcccaccaccacgcccagctaatttttttgtgtgtgtttttagtaaagatggggtttcaccatgttggtcaggctgctcttgaacccctgacctcgtgatccaccttggcctcccaaagtgctgggattacaggcgtgagccacagcgcccagcctcagttgccacttcttaatttaaatt

SEQ ID NO: 6707 - DNA, 667 bp, mus musculus
ttctttaaaccatcatattcttacttgaatttatattcttagtcattttatttctagcaagatagataaatgcaaagtcttgaatgtggacaatgtttatttaagatgatgttctataagaaactttgaaaaataaaatccaaaaagaacaaattaaataatatgagcttattgaattagtgatatataacatggtgagaaaacacaataaatatcctcaaagatcaaatgccacctgctgtgattctcttggcagaagacccattggatagtcattgatctcttccatgtggtgtaaaagaaattctaaccaagggccatttccccagtggctatacagcttttccaataaagctttttctttatagccacagagagataatgcatttccattgggaagtgagtgtatgagaatataaatcacctgggaatctttgagcgaaggatttttctttaaattcactacagccatcttcacttttgtcactttctaaagcctgggttctcctacgaattttaactaactttttccaatagaaggtggatatattgtaatctaagtaatcttcccaactagctttttggaagagatgtcttaagagatacaagaaaaattcttagcaaaaatcactatttttatcaagcggtcaatatttttcacttctgt

SEQ ID NO: 6708 - DNA, 408 bp, mus musculus
gagagagggtcaccaaggacaagctgtaaaaggtgcaaaatttctaccaacctccatatgactcttagaatcaaaacattgtcatattagtgaaaataattactgacatagattcagacacttttcacaagctaagaaaaaatagtaatttttctctctgccatatacctcctgtcttctctccataatctacctgtatttttatgtactgcaatataatagggccaagctcttcactaagaaatgagctgtatttacatggtgacactgattttcataattttatatttaaatatataaaacatattcgaagtttacacccaataatagaattctcagtccaggaaatggactatagccagaataatttaaatggcaattagaaaaatcatttagtacattttaatg

SEQ ID NO: 6709 - DNA, 373 bp, mus musculus
agttcatttaaggcaaatgccatcttcatccatagacattctatctactctctaagcctgcaaatgatatattctgctcagatcaaaacacagtcttaaggccaaacatggtggctcacgcctctaatacctgcactttgggaggctgaggcaggaggatcacttgagctcaggagtttgaggctagactgggcaaaatagtgtgaccccacctctacaaatagtaacaataaaaaataaaaataacatattcttctccatttctgctacaaatgccttagagaaggacctgttacctctcacctaacttacctctccacctacagattcttctttccacgtcacctgctccacatcctcctgttttgctaaa

SEQ ID NO: 6710 - DNA, 918 bp, mus musculus
aggggaaagcaagatatgagcttgtcctgacagagaggtttggtgagctggcagattaattatggctttgcctaaatacatggaacttgaaaacaaaaagtgataaatacagggcacaataaagagtacctacctgagcaaaagctaactgttgagaagctataggagatgtggctagatcttaaaatgggccagtttgtaaatgtccataaaaactaagtgatgaattctgaaattaataaaaacaaccttttctttttggtgattttttttaacattttattttctctacagatatgatacttattccctttggcttcatagcaattctcaggtatgcctcaaatttcaattgaactgctttctcctccaggatgtcttctccagtatcttcaggcagagttaagcacaccatcttcttttctcccttggtgcttaacagggagagtgcagcaagtttcccattaatctaatgatttctcaactatttgtgttctccagtgagttgtggaaacactggaggacaggaaatatgttatatgtggttttttgtatcctaacattcatcttaatgtctagcacacagcaggcacttaatagatgcttgctgcttgaatgaataatcaaatgaatggttctgtagaagagaaatgatactgaaagcgctatctgataaaaacacaaagaatggactggaacaggagacatttacaggcagtcaaattgttcacgtcataaatgcatcaggagtatgatttggatgatatgtaggaagtgctctgttacatgctgatgctgaatcactgatcatacaagaatagcttaatcctgtgaccctgactctccaaagttaccctataaaaatcactaatgtgaaaaattactttagtttaaatagatttgacaaatgaggcaaat

SEQ ID NO: 6711 - DNA, 354 bp, mus musculus
aaagacacaagaaggaagaaatccctgggtaggttcctcaaacaacattgtgcaatatagttaaaggttttgaccataggtaatcatcatttgcaatatgttttcaaatagtgattactaaataaacgtgaactcaaaagaaatggttttccaaacagtgcacctcagttcaaatttcaataaaggtcttatcactcatcagtatgcaccattttgtgtgaattcaacgtctaaggaagataattttcctcatttttaatgtctaagttcttaaggtaaaaccatatattttggaacaacatcttaagaccacgctcaattatttataatatgagaccaccatatcttaagaaa

SEQ ID NO: 6712 - DNA, 3349 bp, mus musculus
agccctgcatattatcctgatacgatttctaaaaataatttaacatgaagtttcttttttaattttcaatgtttgtgggtatatagtaggtgtatatatttggggtacatgagatattttgatacaggcatgctaagcaaaataatcacatcatggagaaaggggtatccagcccctcaagcatttatctattgatttgcaaacaatcaaattacactccttattttaaaatgtacaacttattattgattatagttaccctgttgtgctatcaaatagcaggtcttattcatcctatttttttgtacccattaactatctccacctccttcccagcccccaactacccctcttagcctatagtaaccaacctgctactctctatatcattgagttcaattgttttgatttttagatcctacaaatgagtgaaaacatgtaatgtttgtctttctgtccctggcttatttcacttaacataatgatctccagttccatccatgttgttgcaaatgactggatctcattcttctttgtggctgaatagtactcaattgtgtatacgtaccacattttctttgttcattcacctgttgaatgaacacaggttgcttccaatttttagctattgttaacagtgctgcaacaaacatgggagtgcagagatctctttgaggtactgatttcctttcttctgagtatatacccagcagtggaattgctggatcatatggtagctcaatttttagtttctgaagaacctacaagctgttcttcatagtggctatactaatttacgttctcaccaacagtatacagggttcccttttctccacatccttgccaacatttgttattactgtcttttggatataagccacttaactggggtaagatgataactcattgttttgatttgcatttctccgatgatcaataatgttgagcaccttctcatatacttgtttgctatttgtgtgtcttcttttcaggtgtctattcaagtctgttgccccccttttttgatcagatcattacattttttttctgtggagttgtttgagctccttatatagtgtggttattaatcccttgtcagatgggtagtttgcaaatattttccaccattctgtaggttgtctcttcactttgttgattatatcctttgctgtgcagaagcttttcaacttgatgtgatcccatttatccatttttgctttggttgcctgtgcttgtaggatattgtttaagaaatctttgtgaggacaacgttctggagagtttccccaaagttttcttgtagtagtttcatagtttaaagccttggatttaagcctttaatccattttgatttgatttttgtatatggtgagagataggggtctagtttcattctcctgcatatgactgtccagttttcccagcaccacttattgaagagactgtcttttccctcagtgtatgttattggcagctttgttgaaaatgagttaactgtaggtatgtggatttgtttctgagttctctatctgttccattggtccatgtgtctttttttatgagagtaccacgctgttttgattattatagctctgtagtataattagaagtcaggtaatgtgactcctccagttttgttcttttgcttaggacagctttggctattctggatcttttctggttctatataaattttagaattgttttttctgtttctgtgaagaatgacattggtattttgatagggattgcattgaatctgtagattgctttgggcagtatgaacattttgacaatattgattatttcaatccatgaacatggactatttttccattttaggtgtcctcttcagtttctttcatcagtgttttattgctttcctttcacttctgttaaaccaagttcagtctaaagctgcctccttacatatgttaggtttggcctagaggtttctctgtacatcatgaactataacaagtggaggtgtaagtagaccatagcatacacttgtgcgaatcaccgaatttgggcccatcaaacgttgtaaccaatccagctgtttctgtacctcacttccattttctgtacatcactttcctttttctgtccataaatcatctttcaccacatggctgcgctggagtctcagagcctactctgacttcagaggctgcctgattcatgaattgttcactgctcaattaaactcctttaaatttaatttggttataacacttctttggtgaagttaattaataggtatataattttatgtgtggctattgtaaatggaattcctttttaaatttctttttcacattgttaactgttggcatatagaaatgctactgatttttgtatgttgattttgtatccagcaactttactgaatttgattatcagttttaatagttttcttgtggagtctttatcatattatctgcaaacaaggataatttaacgtcttcctttctaatttggatgcccttcatatatttctcttgtctgattgctctagctaggactgtcagtactatgttgaataacagttgtcatagtgggcatccttgtcatgttccagatctcagaggaaaggctttcagtttttccccattcggtatgatactagctgcggatctgtcatttatggcttttattatgttgaggtatgtgccttctgtctccagttttttgaggatttttatcatgaagggatgctgaatgttatcaaatgcatgaagtttcttatacaagtcacatctatacagctatacataaaaataggaaagtatttaaattctttaaaaattttattcacacaagtgaatgagtattcttgttgtttaataagaacaacaaatacatgctggaaccctatgtgtgttatattgaacattttctgaatgaaggaataaatgaataaaagagatagtagtagtagcaataataacaacgtcacttagtattttccaagtgcttactatgaaccaagcattgttctgaaagaattagaagtaacttaattcttataataagacaattaacagaaaaattttcccaaaaaaacacccatactttgcctacttgtgtttatctacttatttatctaagtatatatgtatctatctctctagaaaagaatttttcatatattaagggcttgtttccttgccatcgaggacaaaatccaaacttataagaccatatttcatgcctcagtgggcatatccaatggtgggtgaataattccatgattgaaagattatattccatgcatggaatctgactattcatgctaaggaagcaaggttccatgtctaggaaaaccaacttccatgaccaaaat

SEQ ID NO: 6713 - DNA, 1378 bp, mus musculus
gttgtacaattatgttttaatacagtgtgctgaactgagtatttctaccaagtgttgggttgttctaaatgctactgaaaaacacaactaccttatatcagttttatggcaaagctactaacaggtgtttttagaaatatgtcagagataaactttaaccagtgtcttcttagtggaattttaaaaatttgttaagttcattgtagagaacaccattcatagaccaagatggtcccctattagctgatattttcatttatgtaagatcctggacattctgttttgtgttggaacaaattttcaatgtttttaattctcccttttctgcctgttcctaaaaactttcaaaataaccatttcaatgtaatttgtcttgaagaagtttacccaatatctttgtcattgcaataatgtagtatggtgatggtcaatttaattattgcttataaaatgaacttgattgcagtaaccatggtatcgatgagactaatgcagtgaagctttattactaatatatatagccttatcaaagcaagctaagaagcttgctttaataattaataatttaaaaatatttatttagatgggattcagttgtttaaagaagtgagataaattcaaaggtaaataggtattctctgtcaaatttaaatctctaaagaattagagattagttttttatttgtgtataatttaaaaaagacctaataggttactgtctttttaatgcatttgttattctttcgtattttttaagcatcggactggagttagtaccatcatctcttgagtctttcataactacacatttttatatttccttttgtgttttctactttgctttccttgaaggaacaagcattttgtggcctttaccttgtgcaattttagggagtagcagtgtaaaaggtccaagaccacatttacttgaaattcttcctcttttctgatttgtcttaccagatatttcccttcttgcctcattctctaggatttgaataaaacctttgccacttattttattagccttattaatgtcacctttccttcaactcaaatatttgagaaattttatgttacatatatgaatgaagttgaaagctactgtttggaagctaagacttgtatagagtagttttgtatatgaatggttgttctagctcagatttcaggttactcacaacagtattctttctaagaggatatatacaaatgtctctcataatttatgtaaggaaatattatgaaaatgagacttttttagtttgatgtgtgtttcccaaactagagataaaactagtaagatttagtatcgtttataacatttgaatttttgctccatgagtacaactaatttttataagtaaatattgggttt

SEQ ID NO: 6714 - DNA, 469 bp, mus musculus
aggaacttgacctttcagagtcaagaactctccatgttaaagatttatcttttggtaggaggatttttttaaaagtataataatgtatacaagtagaatgttacaataatattttgagtctttagacattttaagagaggataattcatcttttctcatttgtgttgcaaggtaggttcccatgttttttaatacttgaaatggttgaattctttttatatcttgaacttcttctggactcttttgtttgtaactgttaaattgtggaaatgacaaagaagctgctactagaagatggtggtttagcttgaagtggtatggtaggtgacacttaaggttaggtaacctttttttcccaggcagggcaaatcatttaaccctctcagtaggcactggaatttaggaaacaagtggaaaacagaaggtaaaatgatgatggtctatacaaggcctcaagattacttggcat

SEQ ID NO: 6715 - DNA, 469 bp, mus musculus; identical to SEQ ID NO: 6714

SEQ ID NO: 6716 - DNA, 225 bp, mus musculus
aatataagattgaaaagatgttaagcaatcaaggctggagtgtagatttaggaattgtttgactagtggtagtagttggagcataacaaactgacgatttctttaggagtaagaataaaagtacaaaacattttatagaatgaaatttcaggaagtgggaaaaatatgtggaatgatgaaaaacaagaacttgaaatcaagtagggggtaactaccagtgccaaa

SEQ ID NO: 6717 - DNA, 116 bp, mus musculus
ataccgtctcatcctttttttttttttttctgtttgatgaaacaatcaccatctctcaagattacatcataagaacaggagtatgttgtgtttttgtttttaaggttcactgattt

SEQ ID NO: 6718 - DNA, 391 bp, mus musculus
ccactcttttttatcccgactgcctcagccttcattcagactcccatccctggatcaattcatctctgtttccaggttaagtcctccagtccttcccacaccattgcttgagtgatctttttaagaacatcagattcatcatgtcattgccctgtgatggcttctcatggtctttggtcatggtcaatacatccattaccccagtagggagatcctttctctacaccctcccaggcaaccgagagtctgtttgtgcacacgctcccctctcttcacctgagatttggcctgtgtacccataggccagcctgatcatccttttctttgctgacttagctcacttgccacccaggaagttctctgaatagttttaagttgcataccccactat

SEQ ID NO: 6719 - DNA, 349 bp, mus musculus
tctcattttcatctcataatcaggtggatccatttggactcagtgtcttcatatgcaccagtaacagaggggcttgtcctcaggctgctgtctgcacatctttgatttcgtccatctccactctcagacctacagctggcctgcaggtggatgtatgccgttgtcattctggttccttctcctagcaggctttcatccagtgcatttctgttcgactgcggtgtattcttcccctattcccaaggccctcattcccaaggtagtcagggctaatttagtctgcctcgcaaataacaaaccctacatttcaaagaactagagttcccattctgcctttctagttgttttg

SEQ ID NO: 6720 - DNA, 923 bp, mus musculus
caaaaacatcatccttgtgtttatattaggaagtattttaaaacatgcaatatgtattttaaacacttttcttttgaatcttgcgttgcacccaaagaatgctaatggtaaccaaattgttctttggcagagtagcctgacccttaaaaaaaggaacagaagtgttacagcatgtgattgtagcacaagacaattatgaatcctcaaccctgagcagatattaactaatcctatgatctgaccataagaggttaccttggagcattcctctacattgcattatgtatattacatggtaatgaatgacagttttcatggctcctaataatgagcagcttctctttatttagagaacaaaatagggggtttacagataatatctgagtttatcattgagctgctcagcctcctcttctatgtgcctcagcttgtctcaatcagtgctggttatctcagcaataaagcattcagcctctagaagttggtttcttcctacaccctataaacaagaggatgaatatcttgttacatgtgctaaaatgagttgggtgaaatgagcattactctgctccctgtcactagctataatcagcttttcaaatctatactgagtgtgtccccacacatagcacactaaggaataaggatgttcgtgacaatatattcctgagaagcagcagttctaacatcccagtgacagctattcattccagtttctttgtgcagagacattgtcccaactccttcaccatgtgctaacaattagataatgactccataaatgtagagaaaaagcagtgtcatggacggtgggtagtttgttttcttagttctttattgaaaacatatggagatgtttatatataaatagaaaacaataaaacgctgccatcatgtaagcagcaacttaaaaagttctacac

SEQ ID NO: 6721 - DNA, 975 bp, mus musculus
agacctgcttgctgctctgaaagagcatgcaatatggtacagttagggagataagatctagctgtgagaagcagtcacacatcctgcttctttttaaaatgaatgtgattacttgagttgtttgtttgttttgaaaataaaaatgcactcaaactgaaaaaaaggaaaacggatgtatttcttcctgggtttgcaaagccacttctgatttcaaagaaagctgctcgataatttcttacgggctcaactctgaaagaagctcttagaaaccaaagtacctaattactaagtcacccccatccaaccatcactactgtttgagttaaactgcctttttccagaagtagagagaggaataggggagaggttctgtgatgggaaaagaatgaggaccagagtgattgtatatgttgctgtttctcgctattcaacaggcaattgaaggcggctgctttacaacattggcaatagtgccttttcacttaccttcttttactcgcagtttcaaggattcagatttggtgttttgattaggaacatggtccaaaaggcctgagttcaggtatcagctgtgcgatttcagccaagttcttaacctatctacatgtcagtaaaatgacattactgacatttttcatctgtaaaatgagattaaaaacagtgtcactgagggaattatggtgcactaaaccacccagcactacacccagactttgcatgggctgaaaaaatcttgtctagtattatcactggtgatgcttagttgactatattagtttccttttgccactgtaagaaatcaccacaaagttaagatgacttaaaacaacaacaacaaaaaagtgtctttttttacgttctagaggtcaaaagtcagaaatctgcttcactgggctaaagttagggtgttagtagagatggttctttacagagtgtctgaggggagaatctatttccttgccttctagtgccttg

SEQ ID NO: 6722 - DNA, 931 bp, mus musculus
gtctgagatctgggagatcttgttttacataagccaagctacaccacttccttaagcccccaaaggaattcagtgctaaggacgtcagtgagctcatgttctctctcaatttggtgaaaatacttgaatgataaattctcattattttatttctcctttaaggtgcccacagaatggtaaaaaatatcctccccactccctagtccttcaaattaccatgtttgtcctagtccttcaaattaccatgtttgtcctcctcctgcttttttctttttgtgttttaaaactaactttttggtaaaaattttcaaacacgtacagaagtacagagaatagtgtaataaaccccccaaatacccatcccattctccagttcagcaatgataaatttttgccactgcttaatatctgcttgatactgaccttttctctctttccttttcttttttttttcagattgcaatagtatttaaatccctgtcatgtcatcatattagttaacctctaactaattctgatttgtgtgtctaaaaaataaaaaaggacattttattacataagctcaaaatcattatcacccctaactgaattaacaatacttttttttttttttttttgagacagagtctcgctctgtcccccaggttggattgcagtggtgtgatctcgactcactgcaacctctgcctcctgggttcaagtgattctcccacctcagcctcccgagtagctgggactacaggcgcatgccactgtgcctggctaattttgtgtttttagtagagatggggtttcaccattttggccaggctggtctggaactcctgaccacaggtgattcgcctgccttgggctcccaaagttctgggattacaggcgtgagtcaccgcacctgacaacaatacttccttaatatcgccaaatcccagtc

SEQ ID NO: 6723 - DNA, 1436 bp, mus musculus
actactaaaaccattgttacgctatgcctttaaaatgaaattttaaaaaggcaaaaggactacttagttatccatcaacctgccagcaaatcaatgaaatgtaaaattgataaacttttgctcttctcattgttcttttcctttggttacttaggaaaagaagcccatctgtgtccagagatcagaatagaagatacgaccaaagggaagaaagagaggaatattcacagtatgctacttcggataccgcaatgcctagatctccatcagattatgctgataggcgatctcaacatgaacctcagttttatgaagactctgatcatttaagttatagggactccaacaggagaagtcataggcattccaaagaatatattgtagatgatgaggatgtggaaagcagagatgaatacgaaaggcaaaggagagaggaagagtaccagtcacgctaccgaagtgatccgaatttggcccgttatccagtaaagccacaaccctatgaagaacaaatgcggatccatgctgaagtgtcccgagcacggcatgagagaaggcatagtgatgtttctttggcaaatgctgatctggaagattccaggatttctatgctaaggatggatcgaccatcaaggcaaagatctatatcagaacgtagagctgccatggaaaatcagcgatcttattcaatggaaagaactcgagaggctcagggaccaagttcttatgcacaaaggaccacaaaccatagtcctcctacccccaggaggagtccactacccatagatagaccagacttgaggcgtactgactcactacggaaacagcaccacttagatcctagctctgctgtaagaaaaacaaaacgggaaaaaatggaaacaatgttaaggaatgattctctcagttcagaccagtcagagtcagtgagacctccaccaccaaagcctcataaatcaaagaaaggcggtaaaatgcgccagatttcgttgagcagttcagaggaggaattggcttccacgcctgaatatacaagttgtgatgatgttgagattgaaagtgagagtgtaagtgaaaaaggtaagctttctaatcatacattttgctgtaattgattagataagcgttttttttaatagattgcatttctgagtgaaaatttaataggtattactagtagctttattttaaaagtcttttaatggcatcgaacgtgtgaagaaaatttcgtgttataaaaagtatcttctgttgttcatgtataagaacgacagaatgatgttctattgatttttaaaaattgccttcttgctttgtttctgaaagttttcttgtatcatttgacagcatatttcaaaaatatccattaactgtagtttttaaaataacatttattttttgtctccttataaaagtaacaatatattcactataaa

SEQ ID NO: 6724 - DNA, 1436 bp, mus musculus; identical to SEQ ID NO: 6723

SEQ ID NO: 6725 - DNA, 630 bp, mus musculus
actagactggaatgtagaaaccttaagtcatttaaattcctttattttctcccttatctcataatggacttgtcttaaatattttctttatatatgttgaaaaccacatcagacaatgtatgttctgcactttaaatatcagaaacataatttagaaaactcaagaggagaagaaaacccatatttttgtttagtatctttatttcttcttgatactttcagattccttctttttttgtttctcttttgtttcaagaacttcctttagttatttttttaggatagatctgctggtgacagattgtctttgttttcttttgcctgagaatgtatttctcattcatttctgagagataatttcatcatatttagaattcaggttgacatttctcttattttagcaattgaaaaatattgtgccacttccttttggcctctgtttctgatgaggggttggctatcatttgaattgtttttcccctttaggtaaggtgttgcttttttcttggagcttttaagatatttcgtttttagttttagtttgattatggtgtatcttgtaacagatatctttgggtattgtttgtatagggttttacatagtttttcaatctgtaggcttatatcttt

SEQ ID NO: 6726 - DNA, 630 bp, mus musculus; identical to SEQ ID NO: 6725

SEQ ID NO: 6727 - DNA, 682 bp, mus musculus
actttttaggtgataaacaagaataatagttggtcatttattatttataaaaaggcaacatgattctatacaaataacacaggtcttgtaataaaaatccctaagttaaattcctcctgtctctttgggacgggtttggggtatcggtttcattttttgctgcttgtttgtttatttgcttgcttttgaaagatggagatactataatatgtcaaaaatattttgtgagcgtctactaagttaacaaacgagaatgattctaacatagttctggcccatggtagatagtaaacaaatgttaattttttgattactttatattagatggtaggtatgggtgctattctctagcagaaatctgattttttttccctaaatttaggcaaggtggaaacacagcacatccccctcttcttgaagcaaggggaggccttatgacttcttttggcaatgaaatgtgggtagatgtgatggttggtggaaatgccatatatcacttctggatagaagcattaaattgctaatattccacactctagtttatgcttcactctgtgaatatgatagtgaaatgtgtgttgataagaggtgttggaaatttaaagccacctaaaatgctgaaccaacccatgtgtatgtctgctgttgaatactacctggactagaaatagtctttgggtaa

SEQ ID NO: 6728 - DNA, 3658 bp, mus musculus
accagcttgcagctccctatcaatctgtctgtatcctacactggtctatatgtgatagatgagagtagtcatttgttttgtattctcagtgcccaacacagtgcctgggcctgaaaaagctgtgttttaatgaactaataaagaacactttgtatcacttctgtttaacagaggtgaacatttatcaattgaactggatcattttctttaagttctaatttttgtggtaactctgattactcggcaatgtattcttccagacacactcctttctattttttctcattattttttcttccaaaaatatgtaatttgcttaataaaatattttggggtagacttaaccatggtctcacaaaaattgggagagagaatgtctgagacatgagtgttgttatggaatgaataagggagaactcaaaagacccgaagtctgatacggtatgttcataggaacttagtcaatataggttgattactgtatttgtatcacagggtcatatcagtccccccactgaaatacctccagtgcatctcattgcagtcaacatgaaggtagaactccaaaattcattatatggcttcttcatggtcagtctctttttgtgcttctggtctctgaatttctatactttatgtcttaccacttggaattattcatgaactatctttattgtaggtttttatcagtggctactgctctcatgcatattgcctatttccccaactagattatatggtcctcaacagaaagcactgttttttttatttttcatatttctcattgtattttcaaaaatgtgtgagtaatgttaatgattgattgaattttgcatagcaccatatatttccaactgaaatgtaacagtaagatgcaggaaggcttactcctttgtgtgaatgtaaggacaatacagttaatacctgaatataaaataacttctctaagtggttctgcttagattttattctctgttatctgggcacctggctatataatttttaacagtgtggcctcatggttgtttgttaatgggttgctctggggttattattcaggtgttcatggttctctcctcaactggaggagagatgtaaagagaaaggatgttttggaaagaatgccagactagcaattaggagactcaaatttaatttataatcttgtacaaactgctgtttttggtggcctttatgatgccatagccctactatcctgcttgttggggaaaggagatttacataaaactgcttcaatctgccacccctgtgatgtgtgggaagcacttattgctggaacatgatatttgaggaagttccttatgcagaaactaatatggtagctgtaagaccatggataagttattgaccctatctgtgcatcaatttcctgaatagtaaattgatctaatttgggctacatgttttccaaagtcccctctggtgctcaaatccctgtgtttcaagattcataaggaataagaaaagtgcttggaaggagtggatattatttaaaaactgtagggtatattctctattctttaccattggggagaacaactccttttgtatacatccctgaattagctcccagagtgatactccatttagtctgtgaaaatgtaatcaaaaggtcactcacctaagtggtaaataattgtgtagattctagcttccatgaaaaattaagtattggaaaggtcaacgtttccccaaattgggtcaggtatccctagtggcactcaagaagattaagatggtaaactgatattttattaaatagccttgaatcaatggtaaaaaagttctcaagtttcttatattctttgtatatcagtgagaatgtctcaatttcatattaccatttatcacttaaatactcctctagtacttgctaccctttctaatacaaagcaatgagatagaaactcagagtctaaatagagatggtagctagcatttaatagtattatctgtatttttgttgaatctattttgtgattactttctatttttggcatgtgatactgattttccctttgtagtagtgataaagtttttgtttttcatatatgttgtttgtttttaaaatacatttttggttttttttttagtttatgaaatcagttattaaaaagtgagtcaatttaaataaagtagcacccaaaatattacatacatggtgactggccccaaatcataaaagtagcataagaagttgggaagaaatggggtgtatcagtaagagtccatcaggaaactgatgatgtggtcactgggtttaactaaaggcattttggtgaagggatagtgcacaaggtgtgggtgggactagggaaacgaaccagggatgggaagcatctatgggctcaccacagtaggaagctgttagcacttctggtctcaaaagacacgagagaagatgcaggagcaggagggcaccatagaacaggagctctaattctgcgatacagtcactgctagcaactgaagaccatcaagaaggaagggaataagggatgaatacctgacctctctctcctcctacctctgatcctctgctatgctatcagtgcctccggtggctgaactcaaatcagaggccaagggacgggagcggtggctcacgcctgtaatcccagcaccatgggaggctgaggcgggtggatcacgaggtcaagagatcgcgaccatcctggccaacatggtgaaaccccgtctctactaaaaatacaaaaaaaaaattagccaggcatggtggcgcctgcctgtaatcccagctacttgggaggctgaggcagaagaatcacttgaacccgggaggcagaggttgcagtgagccgagatcgcaccactgcactccagcctgggtgacagagtgagactccatctcaaaacaaaaacaaacaaacaaacaaacaaaaaccaaaaaaaccccttggaccttaccttgcattttcatttgtcaacttactctccttaattgtgtttttattttcaaaaagggactgtcattttctgtaactatcatactgtacctaccacagttccttaaacatagtagatgctcaataaatattttatggagggaatttcattggtattcattctgataatccgaacaggcaaaaggagtgaaaactctgtctcaacaaaaaaaaagaaagaaagaaagagagagagagagagagagaaagaaagaaagaaagaaagaaagaaagaaagaaagaaagaaagaaatcaaagcccaggggcgccccggtgttggagtctataggagttcaggatcccttggtcacaaagcagggccaagaaggaagagagcggattggggccagcaagaagggacaagcagagaatgtccaggagacattagggttctccaccacagctaacattgtgattccagttatgccagtttgctaattacatgacattagttcagtacttacatgtatgtaggggtgatattcaaagactactggtatggcctgggatctgaccaatccaaacggataccataaacctcctgctcaccaggctttcatcacatagtttctggattgagagaagcaggaggaggctcagtagagaagggccagagcaggtacagtcaggcagaagggaacttggttagttcagggctagcgtctatgta

SEQ ID NO: 6729 - DNA, 1228 bp, mus musculus
ttaaaaatctgtaatggaattctacttcagaccagtcttctgaacatttctattagggaatgagagtacctcacagtgtagtatgagctccctgggttagactgaaaggtttcaaagtaatgcttttatttttcccttgtcatttattcatctgtcaaatcattctgccatcctttggttttataattttgtgacctaaaaatcacctctccactcccagctggaacctcctgaagatctttacttccaggcaaaactcattctaatcacaactgaagtctaacaatatttacctgtcaaagcttatcagtatatttcctttcatctccaactatacaatctcatcatgttacaatacatgaccatatcttggtttgttatagatatcaagctaacacaggatctagcacgtctacaaacaaacaagtatatgtgattgttaaatatcagcaatgacttgtgataagttctaagtgaattatcttcttctaaattaacgacagcagcctatgaaaagcaggcagttttaacagactacgtgttgactaaataaataaataaatgatgttgattgactaaatttagtgccataaatatcaatgagttctattgatgttctttaaaaattatttcttcctatcttgtcatcggacaggatcaatagttgatttttatcttgtttcttctttggagtttttcctcctggagaaaaacacaccttctctgacctgtactcttcatggacggacctttctgtggccctccagctggtagactgacttttagctgctgcacattccactgctgtttcctgtgcttgctagccaagtcctcttacttccaagatgatacccccactaactggagctcccaaaacataaccttcctctgtttcttcacatttggatcaggaagtagtatcaggtcagctgtgacacgggatgttgtctagaaggtcagggaaggtttctggcagcaaagaagcacactgtgccaggcttcttgagcaaaagagtggtgacctgctccctcccactcaacttccagcagctgaaaagtctccaacgaccacagctccaccttctaatgacttttccgaacatttgcaagagctagtcacactccaggtgaatattttcagacacctgggatgggctgtttcttcctgtttctttgttcatataaaaagactttagagcaaagggcagaatatggcaatttctttctc

SEQ ID NO: 6730 - DNA, 376 bp, mus musculus
gcggtcaaaatccagtccctaaactatccttgattttataaagaccataattaaaagtctttcttcttgccaaattcctaatctttaacactgcatgaataatcctttagggtaatggtatttaatactgttagaaagaggtataaaatgctataatttcagaaagattatttaggcaatatcaaacaggaaaaaataagcacactttgggtccctaaacttagaattgccaggtaatgtgaaaagaagttcatatggtcaagttccctggctctggattttagcaaactgaagtagtgttctataggcccctgacgaaatttagatgatcaaaggcagcatttctcatctgcactttctggattgggtctctcaa

SEQ ID NO: 6731 - DNA, 364 bp, mus musculus
ataccacgttttcaaatatgatttttctgagttctgtgcttgcaggcgatgccatcagtgctctcccagatctttaggggcagtgtacccagcccccaaatgttctcagtgttggcaaataacaacccatggcttttcagaactttgctcttagccaaatagaactagccgtaggagtccaaagtgctccctcccaccagcctgcagtccctgtaaaatgactgactgattcaggagtacaagactggctgctttgtcttaaggtggcaaaaactctgctgtgcggttcatatgccagaggttttcatgggatcagattatagctagtggataaaccacttctcttctcccccttttgagagga

SEQ ID NO: 6732 - DNA, 770 bp, mus musculus
attaacataattccttggtatgacagagaatgatgaaatatcccagattttctcaaaagtgcctatttgcttccctggtatcatttaacccagaaatcaacaaactttttctataaagcgccagatagcaaatattttttatttcattggctagatggccactgatgcaattactcaactctctgccattgtagccttgaaagccaccatagacaatatataaaggattgggcatggctgtgttccaataacaatttatttacaaaaaacagtggaccaaatttgccctgcaggctgcagtttgccaatctctaatttaactcattattctattttctatatatttcataaggtgaacattagctttaaagccttgattggatttgggggcaattgtgtgtttgtgtgtggcaagaattcttcatagggagtgctgcatgcctcatatcacatcccatcagaggggttttcccactgttggcgatgggaagaagactcgatgggtgcatttgggtaaggcctgatccctccactgtaaactctccattagactttgtctagtggttttatctattacatttgctgcctaaatcaattatttcattcgaggttgcaaaatagcaattttctatttctgttattccatctgttttcattaaccagaatgcttttgtaaggacaaactttccaataacaatgagggatttcagttacactgagatacagtttatataggaacactttttacaataaaaatatatgctaattct

SEQ ID NO: 6733 - DNA, 770 bp, mus musculus; identical to SEQ ID NO: 6732

SEQ ID NO: 6734 - DNA, 770 bp, mus musculus; identical to SEQ ID NO: 6732

SEQ ID NO: 6735 - DNA, 770 bp, mus musculus; identical to SEQ ID NO: 6732

SEQ ID NO: 6736 - DNA, 770 bp, mus musculus; identical to SEQ ID NO: 6732

SEQ ID NO: 6737 - DNA, 770 bp, mus musculus; identical to SEQ ID NO: 6732

SEQ ID NO: 6738 - DNA, 1604 bp, mus musculus
gtatggtagtatgtcccgaattggtgggttcttggtctcgctgacttcaagaatgaagccgcggatcctcgcagtgagtgttacagctcttaaggtggtacgtctggagtttgttccttctgatgttcggatgtgttctgagtttcttctttctggtgggtttgtggtctcgctggctcaggagtgaagctgtggattttcgtggtgagtgttacagctcttaaggcgccacgtctggaattgtttgttcctcccggtgggttcgtggtctcgctggcttcaggagtgaagctgcagaccttcacggtgagtgttacagctcataaaggcagtgtggacccacacggtgagcagcagcagaatttattgcaaagagggaaagaacaaagcttccacggtgcataaggggaccagacgggattgccactgctggctgggcagtctgcttttattctcttatctggcaccacccacatcctgctgattggtagagctgagtggtctattttgacagggtgctgattggtgtgtttataatccctgagctagacacaaaggttccccacgtccctaccagattagctagatacagagtatcgattggtgtattcacaaaccctgagctagacacagggtgctgattggtgtgaatacaaaccttgagctagatacagagtgctgattggtgtatttacaatcccttggctagacatgaaggttcaccacgtccccaccagactcaggagccccgctggcttcacccagtggatcccgcaccgggccgcaggtggagctgcctgccagtcccgcgccatgcgcccgcactcctcagcccttgggtggtcgatgggagtgggcgctatggagcagggggcggtgctcgtccgggaggctggggccgcacaggagcccacggagcgggggaggctcaggcatggcgggctgcaggtccccagccctgccctgcggggaggcagctaaggcccgagaaatcgagcgcagcgacggtgagccggcactgctggggcacccagtacaccctccgcagccgctggcccaggtgctaagcccctcattgcccgaggccggcagggcctgccggctgctccgagtgcggggcccgccaagcctacgcccacccggaactccagctggcccacaagcgccgcgcgcagcccgggttcccgctcgcgcctctccctacacacttccccgcaagctgaaggagccggctccggccttggccagcccagaaaggggcttccacagtgcagcggcgggctgaagggctccttaagtgccgccaaagtgggagcccaggcagaggaggcgccgagagcgagcatgggctgtgaggactgccagcacgccgtcacctctcggtaggatcccatttaacaagacacaatcaatgagggttgaggtcattatggcattatggagagtttatgagaggcagggggatggaaatacattttataagtacacaaaagcttctggtggctagatgtggcagattcatagggtgcctttaatacttaaaatctcacctggccacttgcaaagttgatggccatggcaggatagattgctgccaataaact

SEQ ID NO: 6739 - DNA, 188 bp, mus musculus
tctattggagtatgggaagccacatggtacagaaccaagaagcaccacctcagccacgtgaattgctggacatatgagtaaggacacctggaccttcctgaatgcagcattatgaatgaatccatgaaaaatcattagaagtaccacccaccgaacccaacaagttgtgagaaataataaatcatttt

SEQ ID NO: 6740 - DNA, 325 bp, mus musculus
tgacagtaataaggatggagaagagaaggtggatttgagagttagaggacactgaccaaaacaaaacagttgatgatgaagtgttctgcattactacaatacaaaaatgtaaatacaatacagagagctaagaggtgagaatcaaaattaactaatggaaactcactttggtggttttacagtaggcattttaaagcataattttcaaaattttcttttgtttataaatttgctgtaatttttcttatagggaccaaaacaacaaatcaggttgaattcctgcacattaccctccctagacataccatatcactattattataaa

SEQ ID NO: 6741 - DNA, 257 bp, mus musculus
tcttcatgactaaaggaaaataaaatcactagtatttaatttaaacttacctgttatttgtgcaatttatattgtattaatagtgcaaactcagtctcttgaattttagaaatatatttatgcaggatctatttttaaagacacatttctgcaataatttagactcccgttttgtaacatagtaccatctggaaataaaatataatgcagataatttcccttttatcaccatagcacttttgtgctaggcaaacagc

SEQ ID NO: 6742 - DNA, 468 bp, mus musculus
gttatggttcataaataatatcatcaacaactaatacttattaagaagtatctgcatttaaagctgttagatacattaaataggcatcctaaacaggatgaaaatgccttatacaaatagaaaaattcaaacaacacaagctataaaatagagtataaaatacaaccaatatttatttacattaaacatactacttttctttccgtggtttgtgttctgtgaaattatgtgggagaaaaatttcatattgcttttacttaaatgaaagaaccagacaaagcctggaaagtttgctgaattttatcaataacacgtatttgtaaatatattgtgtgcttattatttttgcttgtctttcatttttgggcacagcatctccaaattttggtcacaaatgatgcataaccctccagaaatacagcttaaaagaagaaaatgaagatggaaaaataacatactaaaaaatgt

SEQ ID NO: 6743 - DNA, 468 bp, mus musculus; identical to SEQ ID NO: 6742

SEQ ID NO: 6744 - DNA, 2294 bp, mus musculus
taaaatttatctttaataagacaagatatatttttaaaatagtaccagtagagaacaaatagtaattatcaatgtgtacaagacatgatatttctccttaccctcaaaatcaacattgtcactcctaaagtctaattaaaataatacttcctgatgctagattattaaataatactattaggaattactggctatgtcagtgatttttttttattttattgtattttccagcaccatacagttatctgactggtaaatcattatttaaatgccaccaacgactatctgaatatgcagaaaattaagttcccaaacttacaggctgaattatacaaatggtcccggagtgctattgctgatagtattgagcaattgatgtttcatagcatttaataaaaatagaactgtaaaactggcatatacataaaagtcattggcaacaaaaggaaacattgttattttggaacatattagtaaaatacagattttattaaattgtcattccagattctgaaataataagctggctgtgaaaccatgacatgtttccctgtccccataaatttaatttatttctaaaattcaaatttatatcatttccttacatcttgcactatggcaatattattatttaaatcattgatttttgcataagttacatttctattttgattagctaattgagaagattataatcatcgttttaacttggaatttgaagtgcatttgtttataagaaagatcctggacagaaactcccagagacaaagccatttaaacatcacattgctttgagaatcccacagagctgaacttgataggagttgctggtaatgcaaaccctggggacatccttattagtctgcccactgagtggactctgtgtgtgtggtgtgctccccgggctagcaatagctaataatttaaagctggtagaagagtcactccagacatttaaaatgcaatcacctacctttgctgacatttaaaataaaatgaaccagtgtagttcctgaagttaacttgagatcctccaaagggatccatgaagttgtcatgtggttttgtattcccaactttaagttccatatgaacctttaggccatgaggtggcggacaggagaatgtactataccatcaaatgtttattaagtacttggtctctagatgtagaaagttaaaggatttcctgcctaaactgaatcatttctgaagataagtcatcctctaataaaataactaccaaatgcctgctgctgctgatgatgatgatgataaaatatttaaaatgtaaataccaaaaaaatacaaatagcagaagagatctattaagataggatatagttgtcagagttcaaaacaggtggactctgaagactcctgctcttatttatgacctcaaatttgtttttctcctctcttcatctgagttagggtgtgttaatagtgctttaatgaaatcacttctactaacttccactaactaaaaagagagcaaggccaaattgagctttctttcaatctgttcctatttgttctatagatagcagagtttctaaatttaaaaagtcacatagaatttaaatttgtagtgctttagagatcaaccccaaattactcactatttttattctctcagttgtttcattggagatcttggaaagcataagtaaacctaagttttccaggttactatatttcttgaaaacctatgcattaaagttccccatcctccacaatggaagattactataacatattgtaagtctaggaatctcataagatatgaattacataggatcttccagtccaatttgcacaaaattcacatctcttaatcaagaacaattaagaaaagtctgacagtggtgcctatattagtctgctctcatgctacttataaagacatacccaacactgggtaatttataaagaaaaagatgtttaatggactcacagttccaaataactgggaggcctcaaaatcatggtggaaggtgaaggaggagcaaagtcatgtcttacatgacaacaggcaagagagagagtgcagggtaactgccctttgtaaaaccatcagatctcatgagacttattcactatcatgagaacagcacaggaaaaacccacccgcatgattcaattacctcccaccagctcccttccatgacatgtgggagctatgattcaagaagagatttgggtggggacatctccaaaccatatcagtgccattagaagaagcataaggcaaaaactcattcacatcccaggtttgtttacaagatataggc

SEQ ID NO: 6745 - DNA, 469 bp, mus musculus
ttgaattagagaaaataaattgttatgaaaagccaatcagataggaaaagacatatttatgtttcattggacagatatgtatgggaacaaaacatcatccaacctaataacaaatacgcactattttattggcataatggtgaatttagcttaaactaattcaaaatgatattattataacttctgccacattttatagtcaacttgaaacttaaatttgtactcattgtagttattccatcctcaccacactttttttctcccattctttatgatactgctgtaaggttattattattattttgggtttccacaacattttcagaaaattatgtttttcaaagtcctgtgaaaaaggcaaatggaatcattttgcaggaaacttaaataaaaacattgaagcatcaaataacaataaagtttcatagctgtgactcttgataaattgtttagattctaggtgactttt

SEQ ID NO: 6746 - DNA, 437 bp, mus musculus
tcgatcattttctgtgcagtattgggtctccaggacattatgatcatctatgtgggctttttctgttttttgtttctttaactgcttatgaaagatttggctggctctgcactgcttgcagattatattctgcacacagggacataccattaattcctgttttatttgtctatattaaagccaacacctgcatcttgtttagcaattaacctgcagagtaggataaattgaagtgattaaaaggatgtgtgagattcagtccacattgtctttatattttcatctccctaatatctcaaatcaatcaattttttcttagtatcactggtatttgagtgtaatgcatgcacaaaactttactattttggtgatttgtgatactgttctgttcaacaatatctattcagtttctgctatatgttagacgatttctatgt

SEQ ID NO: 6747 - DNA, 12137 bp, mus musculus
tttcaaatttgaaaaaattctttatgttaaaatagtggcaatttaagcaaatattagtttatggaaatttacattttatttatttcccttctctttgttagaaaacaattacccattttacttatttaaataattaacaggatagcagtacatttgactgcctctttgagtaatttgagcctctttaattttatgttttttcaattcatattagaatcagaaactacattgacccagagaataactggaaaattaacaatgctctctttcactgcctttgtgagttaatcagtcattatagaatgaagaaaagaatacatgaaatttttgacaaagtatcacaagatgccttatgataactggcataagatgtattgagctttcatggcaatatatcagtcaaatacattatgccaccagatagataggttgatagatagatagagagacagacagatagatagatggcttaaaaggagaaatgtatatatacgtagcatatatacatatagtgtgtgtgtatacatatatatgccttaaatggagaaaaccctccatatttcctatctgaaacacagtgagtgacataacatagattctcaaaatgcctactgaatatagttattgaataaaatctatttgaaactgtatgttcaaaataattttatctatatatctatatattaaatattatctatagttagatatggtggtataatgtatttgactgatagcttggcatgaaagctcaatatatatatatatttatatatatgtttctgagtaatataaaggatctagtaatgtgattatatattacatgaagaaactgttctattttgaaactgcttcttttacaaacttagctgtttttacaagtatgcctatttaatttcatgggataacaagaaaacatgtatataggtcataggaggataatgcttaatgaaataacagatatagtggaattaagatttgtatatagaaataataattctattataaactaattggtgatttgaaactattaaatatcattatgtgtgtatgtgttcattttattatttctatctcatgatcatttattcactaaatcttagtatttggcatactgagtgtccttatcctctcaggagcatcttccatttcaaaggcatgaatcatagtggaaagatatcagcatcattgaggcaaaatattgaattggcagtctggaatgaaggtctgaattgggaccaagaaaaaaaatgtccaggactatgttccataatgaaatatattattaactaaaactcgttacctaagatgtttccttggtccatttaaaagtatttggaaataatttttctcttgtactatcttgtaagccttgttgtttcctaagtccatgtttaaggatgttcataaatgatataatacatatttatgactaacaatttcaattgatttatatttaaacagggataaaggatctatttctacttgtttatttttgaagttacactggaaatagtcacattttattttaggtaaatcttatgctttgctgagcattaatgtttccactaagccatacaagtgcaaaacaaacagatctatgtgcatagttacacttgtctgattttagaattaaagatgaacagagtcagcctaaggcaaatttgtgatgaaagagataaagttgaacatcagctcacctacttccttctgtttactttcagaatgtaacatcttttctaagctttgagaactctctattcttttctgtgctccctgtcatgaagtatgctgaaatatttatggcttattgggtaatttagtatttgaaatgaaagaacataagtagaataatgaatagagaatctctgtcaatttattcctgtctcctacattgtacactactaacacaagtaatcaaactgataaataccatgtcaaagtctgtcttgggaatgagaggtcatgagagtggactctagattgttataaagtttgtatgtgtgtgtgagaaatatttgttaaggatgtcaaagacctaaatttttccttctcttatcttcttacaaattgccctgtggtaaaaagcatgataacaccaggtctttatgactgttactgcccaaactaagtccctgttacagcatatttcttcaccgaagtgggtcttaaactgtggtctccctacaattgatggtcctagaaaccttttcaagatatctagaatctcaaccctatttctataataatactaatgattatttgccttttccactgtgctgacatttgcaccgacagagaaaaaacaatggtgtataaaaatgctggcagcttaataaaattaagtgagtgcctgaaaccgcactcattaccataatgttcttcactggcaggcaattgtggttaaaatgaggaagaagagtcaggggtaagatggccaactagatgcacgtggaaacggtcactcccacacagaaagactgggatttcgactaaatcaacaaaatttgaacagctgttgggagagaaaatgctgaatgtggatggagaaaagatataaatgaggcttaaatgggaggcacctgggaatgtctcacggagtgcctgaatctcagggctggttcctagcccttaatagtccttgaagaaagggtgaatgaaagggctgggggactacttactcttgccatggacctttgatattctagctgcaggcgaccccacatccccatgggcgtttgagctggcagggggattttcccagaaattaaatggaaatggagctgtaggaagcatggagccaggaaacttttagtatgggatagctctggcggagcctagctataagtgcccacccccgcctcttcagggctgcccatctccctctgagaggttctggccccaactagtcactgtgcttgcctccttgcaggactggggaatgcctgtcctgcaggcccccctatccatcagtcccattccgggcttctgcctggccacccgcaggagaatgtacacagtgcagcctctactgctaacgtgggcgcttcgtttctacagagtgcattccattagcctagaagtgtttggggtcacccagtgcacctggaaccccaccctgagggcctggaggaaatagccatgagcagatcttggagcttgagggctgtagcctgtggttcaggagtgccatgacaggatctgtgcctggctctcgatgcggggaagagcagacactcttacaaaatgagagggttaagtggcacaggtccatgggttggtatgggacctgggcgtacctccctccacagggtttgtccagtaagtgtgtgactcatcttcttactggacctctccccaggacagccctctggtcagaaagacctaacaacaacaacaactttgggggcacaatgccagtgtttaaagatggctcccccaaaacccaggagtgggagtattgaggggatcacgtctctcccggtcacagggcagtatatagctacaaaagtgagaatacacaaaaagccatggctgagcaagagcttatttactgcccattgctttcaagtgccatctgcgggatagcagcctaaactacaacaccaaaaagcactcattctcacccctgtgtaggcaagggtaagaattcaataacaaagaccctgtacatagccttagccctctaaaaatttccaaaacaaagccacctgactaaactcaatttacaccacagttaaaggaataccaaacctcccagatgagaaagaatcagggcaagaactctggaaattcaaaaagccagtgtccccttacctccaaaaaagcgcactagctccccagcaatgatctataaccagtctgaaatgtcttaaatggcagacatggaattcagaatctggataacaagaatcctcatcaagatccaggagaaaatagaaagtcaatccaaggaagccaagcagtccagtaaagtgagtcaagagctgaaaaaggaaaaagccattttaagaaaggctcaaactgaactttttgagctgaaaaatttactataagaatgttgtaatacagccaggcatggtggctcatgcctgtaatcccagcattttgggaggctgaggagggtggatcacctgaggtcaggagttcgagaccatcctggccaacatggtgaaaccccatctctactaaaaatacaaaagttagccgggcatggtggtgggcacttgtaatctcagctatttgggaggctgaggcaggagaattgcttgaacccagggggcagatgttgctgtgagccgagatcgagccactgaactccagcctgggcgacagagggagactctgtctaaaagaaataattaaaaataaaaataaaaagaatgttgtaatacaattggaagtatcaacagccaaacagactaagatgaagaaagaaattcagagctcaaagaccagttctttaaatcaactcaatatttttttaattagagaaacgaacgaaacctacaagagatattaatgtggtgtcattgtctggggtaaatacctggggcttgttgtctcgcaccaagaagattaaagacacgaacacgcatgaggagtgggtttaggagaggaggtttaataggcaaaagaaagagaaaggagaattcagctgtctcccttgtgagagagaggggcttccaaaaggaaaacccagcccatggcagactgcattagaatttataggcaggcttcaggaggtggtgtctgatttaagtagggcacaacagattggttccatcaggtgtgttgtttatatagctcatggggtaggctggtcaccccacactaatcttattatgcaaatgggctttccacttggctggtgccatattatctgctctttactgtacacatggttggcaatgagaaggaaacatggagctgtcatttcaaacatgcctttgaacatcccaggtagcctttcctattggcacaactgccagcattcatctgtgcaagcttccagcttgcttgtctatgtctgcagcttgtttttacaggcttctctttgttagaaaagaaaatgatttgggggctgcttttcattaaaatgcgaacctttctgaggactcctgtaccctcactgtctacctaagtaatttcttcttaactcatatatcaatatgggattatatatatagagatcaaatctacaactcactggcattcctgagagaaataaaataagaacaaaataaaataaaaatgttattttcctaagaaaataagcaatttcaaaaatatattttgaggatatagtctgtgaaaatttctctaatcttgctagagtggttagcgtacaaattcaagaaatgcagagaactctgaccagatactatacaagataaccataccaaaggcacatagatatcatattcactagatcaaatagtgatcaaagtcaatgcagaagaaaaaatcttaaaggtagctacagagaaggagcaggtcacttgcactgggaaccccatcaggctaataacagacctcttagcggaaatattacaagccagaagacatagaagagattgagaacctattttcagaatccctaaagaaaagaaattacaacaaaaaattttatcctgccaaactatgcttcacaaataaatgagaaataacatccttttcagacaagcaaatgctaaaggaatagatttcaactagaccagccttataagtccttaagggagtgctaaacatagaatcaaaaggatgacacctgctacaacaaaaacacccttaagcacatagcccacaagcactataaagcaactacataatcaagtctacataatgaccagataacacaacatgatgacaggatcaaaatcacatataccaatactaaccttgaatgtaaataggctaaatgtcccacttaaagacacaaagtagcaggctgaataaaaagataagttactgttatcttcaatagatccatctctcatgtaatgacatccacaggctcaaatttaaagagtggagtaagatctaccatgcaaatagaaaacaaacaaaacaaaataagagtcactaatattatatcaaataaaacagactttaagccaataaaaattaagaaggatactgaagatcattgcataatattaaaggatataatccaacaagaagccttaactctcctaaatatatatgcagtcaacattgcagcactcagattcataaaacaaattcttcttagcctatgaaaagacttagacaaccacacaataatagtgggagactttaacaccacactgaaagtgatagctctttgaggaagaaaactaaaaaagaatctctagagttaaatttgacacttgatcagctagacctaatagacatctacagaatattccacctaacaaccacaggatatgcattcttctaatctgcacacaggacatattctaagattgaccacatgctcagtaacaaagcaaatatcaatgaattttttaaattgagatcacataaaggatacacttggaccacagtgcaaaaaaaatagaaatcaatatcaaaaaaagtcactcaaaactacacaaatacatgaaaactaaacaacttacacctgaaaaactcttgtgtgaacattgaaattaaggcaaaatttttttaaaaaatctttgaaattaatacaaattaggacacaacttatcaaaatttctggatgcagctaaagcagcgtcaagaagaaagtttatagaaataaacaccttcatcaagaagttagaaagatctcaatttaaatatctaactttgcacctagcggaactagaaaaaaaagcttgcagaagaaaataataactaaaattagagaagaacctaatgaaattgagatgcaaacatccatacgaaagatcaatgaaaacaagagtttttaaaaataagattgatagaccacttgctagcttaacaaagaaaaataaaaagatccaaataagcacaatcagagatgacaaagggatattacaactgatcttgcagaaatgcaaaagctcctcagagaggactgtgtaaaactctatgcacaaaaattagaaaatctagaggaagtggataaatttctggaagcacacaatctcccaaggttgaaccaggaagagattaaaccagaaaacagaaagataacaacttctgaaattgaatcagtaataaagagcctaccaaccaaaaaaaaaaaaaaaaaaaaagccctggaccagatggattcacagccaaatgctaccaaatctagaaagaagaactaataccaatcctactgaaaatattgagcaggaggagcaggaggggctcctccctaactcattctgtgaagccagcatcagcctgatatcaaaatgtggcagagatacaaagaaaagcaaacaaaaaaatataaaacaccccaggccaatatccctgatgaacatagacacaaaatcctcaacaaaatattagcaaaccgaatccatcagcacattataaagttaatataccgcaataaagtaggctttattcctgggaggtaaatctggttaaatatatgcaaatcagtatatgtgattcaccatgtaaacagaatttaaagcaaaaaccacaagaccatttcaatagacacagaaaatgcttttgataaaatctaacatcccttaatgaaaaaagtctttaacagattagaaatggaaggaacatacctcaaaataaaataaaaagccatctatgataaacccaaagccaacatcatactgaatgggaaaaagctcaaaacattccccttgagaactggaacaagaaaaagatgactgctctctctcaccactcctgttaaacatagaactgaaaatactatctacagcagtcaggcaagagagaaaaaaaaaaaaaaaagcatccgaataggaagtcaaactatctctcttctctgacaatatgattctatacctagaacatcctaaaatctctgtataaaaagcctcctagaactgataaatgactaataaagtgttaaggtaaaaaataaatatacaaaaatgagtagtatttctatacatcaaaaatatccaggctgaaaatgaaatcaagaacacaaccagatttacaatggccacaaagaaaatgaaatacctaggaatacagctaactaaggaggtaaaaggtctctacaatgagaagtaaaaactgctgctgaaagaaatcagagatgacacaaatgaatggaaaaatattccatgctcatggattggaagaatcagtatcataaaaatggccatactgcccagagcaatttacagattcaacactattcctgtcacactatcaatgtcattcttcaaagaattagaaaaaaaaaacctattttgtaattcatataacagcaaaaagtagcctgaatgccaaagcaaccctaaacaaaaaacaaagcatcacctaacctgatttcaaacaatactctaaacccacagtagccaaaacagattttaaaggtacaaaatcagacacatagaccaatggaacagaatagaaaactcaaaaataaagctgcatgcttaccaccatctgatctttgaccagacaataaaaaacaagcaatggaaaaaggattccctatttaataaatagtgctgggataactggctagccatatgtagaagattgaagctggatccctacctttcaccacaaataaaaattaactcaaaatgtatcaaatatttaaatgtaagtcctcaatttatacaaatttgtaaatttttataacatttataaaaatcctggaagacaacttaggaaatactcttctcaacattggccttggcaaacaatttttggctaactccccaagagcaaatatgacaaaaaccaaaaatagacaagtgggacctaattaaactaaagaacttccgcatagcataagaaactattaacagattaaacagacaaactagagaatgagaaaatatattcacaaactatccatccaccaaaagactaatatccagaatattcaaggaacttaaactaatctgcaagcaaaaaacaaataacctaattaaaaatgggcaaaagacatgaacagacacttctcaaaagaagacatacaaacagtaaacaaaaaaaatgtgctccatgtcactcatcatcagagaaatgcaaatcaaaaccacaatgagataccatctcacaccagtcagaatgactattactaaaaagtcgacaaacaacagatgctggtgagactgtcgagaaaaaagaatgcttatacactatgactgtgggatggaatgtaaagtagttcagccactgcaaaaagcagtttggagatttctcaaagaacttagaaacagaattactatttgacccagcattctcattactgggtatatatccaaaagaaaacaaatatttctaccaaaaggacatatgcaattgcatgttcattactgcactattcacaatagcaaagacatggaatcaacctgggtgcccatcaatggtagatcggatgaagaaaatagatacatctacaccatggaatactatgaagccaaaaaaaaaaaaagagaaataatgttctttacagcaatatagttggagctggaggtcatacactaaagtgaatttatgcaggaacagaaaaccaaataccccatgttctcacttataagtgggagtgaaagattgaacacacatggacataaatatgggaacaatggacactgtggactactagagaggggaaggtaggggtttggaaaactacctgttgggtactatgttcactatctgggtggtagagttcattattcaaatctcagcattatgtaatatttccatgtaacaaagccccatatacaccctatatctaaaataaaagttgaaattttaaaaaatgaagaaggataagtaggagaaagaacaagccaatttaacttaggattgttctcatggaaaaaaaacctaataattaacctcaatccttgaataaatgtgttttcaatattctgtgttacaaaaagacatgtatacctgaagtactgttgatgcatatgtaaaaataatgactcttcagaaaaaaaaaaaaacaaaaaaaacacttgttagagttgtgagctgaatttgccatattttagtggaagaccattttcatttgagaaagtttggaagaacaaactttgattattcacatttgggcatttgacaaacagctgaaaaaaaatgaaatgagactgacgctagagaaaaattgcaatatgtatggccaataataaggttcaagctttcaagagaaaataaatttgggggaaacttatttcaccatgagattgatagtttcctagatagagtctaggaagagtctattgatgagatcggaggtgatattaatgattgcgattttcctatcttgtataatgaattttgtgaaactatggcagatctgaataacttaatgaaccaatatttttcctatgagcaaatcatgatattgcattgcatgaagttaagagaatcaaatggcaaggcaaaatattataaaattgcacatgagcatactatattatgctgagtgaaataactagacacagaaaaatattgcatgatttcacttatatgtggaatgtgcaaaaatattcaaacatacaaagagaacaaaacagtgtttatcaggagcagttggggggtgggatggggagacatagttcagatgatacaaagtagtagatatgaataatctatagatcttacgcacaatatgaagactttggtaaattgcattgtatttgggattcatgctaaatgagtagattttagctgctctttcaccaaaacaaagagagaatggatagctatgtgagatgatgaatatgtgagttcacttgactatagtaacctttctgctatttatatgtaatcccataacaccatgttgtaaaccttaaatatgcacaataaaaacatattttaaaaataagattaaaaatataggcaataaaatatattttaaaaatgatatttaaaaaatgatctgttcattcattcatacatactagaatgtaatgagaatgtaacagaatataaaatattccataatatagtctgagattctaaattgcaaaaaacctttaagaaatttctactagttaagttttggttagtgtcaaagaggatatttgataattatctttaaaagatattaaaatatgtctccttttccaactacatatctatgtgaagccagcttatcctcatatatttcaaccaaaaaacacattaccacatattgccatgcagacacagatatgagaaaccaactaccttccattaagccatatgtttctaaaaattgcaaaaatgttaaacaatgcttttctgaccactactttattttaatttagaaaatagttacttttcataaaaatgattatttattttaccttacaatggatttattcatatatatagtaagttataaatcaatattttaaaataagtattttgtttctaatacaataaatattgatagattgaatcttctgatacaaaagttctgtgtggttctcaaaaaatttcaacagcatgaagaatgccccagaataaaaatcgtgaggaccacagctttagtacatcctcaccacgatagaacctatgaaatttctctatatttggcctgccactgagccagtttccaccagaaaaaaaatctaatgaaacactgcttaattgtcattcttcatgtataaattttgtatcactaaacatgatactttaaatgcaggaaaagtgatatttgaaaagtttatcttctgagttcagtagatactaatatttgatggtaaatgtttatgtctttgatgcagttttgtaagttttttttttaactctgaataagtcatttaatcttgttgtattttagtttccaattataaaaacagcctctactattttttattaaattattatgtcaggagaattaattaacaaataattgttaaatcctttttcatctgtaggttccaaaacaagcctaaaggataacagtaacaaaattctataccaggaaaacatgtgaaaaatgaataatgaaactactaacaggatatggaaaa

SEQ ID NO: 6748 - DNA, 749 bp, mus musculus
gctttaaaaataacaacggtgagttttaaaatgtcacattcaccataaagaactttaaggaagagttagtatgaatgattcttacatcatttaggaaaaaatttaccactgtgaaagtgaggtaagataacatataactaagacaaaggaatatgtcatgaataaattgttcctaatttttctaaaaatattctgtcaccagctgattgcaaacacttttgaggagagccaaagtttcaggaaacaccaagtaaagttagaagaaagtaaatgtactaacagatattacatttcattatcttaatcatactggatggtgcccaagaaagtatgttttctttataatttgttaaagtgaaagtcgtgttcactgaaaattgctcatgatttagctcatcctgagataaatattcttaaaagcaggaaaatattttacacttcccagaggtaagttatagccatatgcattggacacatgtaagaaatgtaaatattatgtaataaaatgtatttcaaaaatgtaggaaactatttctatttctattaaattatgtttaaatattctcgccaatcctatgtcctcctctaaccacaattgtttcttcacatcttcagagctaaactcttgaaaagatgactttcattaccattttcatatcctcacctattatttcttatttccagctttccagtctcatatcttttttaccaatgcactaaattgtctctcacaaatttacctttagtta

SEQ ID NO: 6749 - DNA, 269 bp, mus musculus
gagaagatttatagtggttttatatgaaaataaaatatagcttcagaccagaaagaatcatgggaaatcactagccattcagaaagtcttctgaaggcggtatgttccaatatattacagctttacgggaggttatgccaggacaaagttcacgccatactgtcccatcagagttctaatattgacaagttataaatgtcaatctttgaaaatgtcctgctgatgtacacagatgctcattctctctactttgttgtttacagattttt

SEQ ID NO: 6750 - DNA, 1025 bp, mus musculus
attccagttttggggtgttaagaatattgcatttctttctacctactatattgcatgagtaggtagaaaattcaggtgcttaaaggctattaaaaataaaacaacccttcagaacgctgtctttgcagtaactgttttcttcttctccaggagagcacacagctgctacaaatgccgtcagtgcagttttacagctgccgatactcagtcactactggagcacttcaacactgttcactgccaggaacaggacatcactacagccaacggcgaagaggacggtcatgccatatccaccatcaaagaggagcccaaaattgacttcagggtctacaatctgctaactccagactctaaaatgggagagccagtttctgagagtgtggtgaagagagagaagctggaagagaaggacgggctcaaagagaaagtttggaccgagagttccagtgatgaccttcgcaatgtgacttggagaggggcagacatcctgcgggggagtccgtcatacacccaagcaagcctggggctgctgacgcctgtgtctggcacccaagagcagacaaagactctaagggatagtcccaatgtggaggccgcccatctggcgcgacctatttatggcttggctgtggaaaccaagggattcctgcagggggcgccagctggcggagagaagtctggggccctcccccagcagtatcctgcatcgggagaaaacaagtccaaggatgaatcccagtccctgttacgggtaggatggtttcatttttaaataattcatttgttttgaagggcaaaaggaggaacacacattctttctctacaggattgtgttgtgtgtgaagtgaaacttaatgatctgtctcaatctggggatttatactcctaaggccaaagtggcagcaagtaactcatgtgtgtttgtgtgtgctgtgcacttacttgatacagtgttaggcagtcacttgtttgtctttgctcttagctcagattgaatgttggttaatcattcctggtgacta

SEQ ID NO: 6751 - DNA, 1404 bp, mus musculus
aattgggcaaaaatatattttcaggaaagaataagtaatagggagggtaaacctagtaataaaaataaatccttcattattcctaaaaccaccttaaaataataaatgagccagtcttggttacaaaagtaattctaaatgtaaattgtttgttttagtctcaactttttgctgtttttagaatgggtttttttttttttcctagaggaagcatttgattatgcaccttaaaaaactcacataagtaaaatattccagattcaactgtatctctgtaactttcagataacactgtatctgccttttccctttatctttgcagatatggtccggaaaaagaacccccctctgagaaacgttgcaagtgaaggcgagggccagatcctggagcctataggtacagaaagcaaggtatctggaaagaacaaagaattttctgcagatcagatgtcagaaaatacggatcagagtgatgctgcagaactaaatcataaggaggaacatagcttgcatgttcaagatccatcttctagcagtaagaaggacttgaaaagcgcagttctgagtgagaaggctggcttcaattatgaaagccccagtaagggaggaaactttccctcctttccgcatgatgaggtgacagacagaaatatgttggctttctcatctccagctgctgggggagtctgtgagcccttgaagtctccgcaaagagcagaggcagatgaccctcaagatatggcctgcaccccctcaggggactcactggagacaaaggaagatcagaagatgtcaccaaaggctacagaggaaacagggcaagcacagagtggtcaagccaattgtcaaggtttgagcccagtttcagtggcctcaaaaaacccacaagtgccttcagatgggggtgtaagactgaataaatccaaaactgacttactggtgaatgacaacccagacccggcacctctgtctccagagcttcaggactttaaatgcaatatctgtggatatggttactacggcaacgaccccacagatctgattaagcacttccgaaagtatcacttaggactgcataaccgcaccaggcaagatgctgagctggacagcaaaatcttggcccttcataacatggtgcagttcagccattccaaagacttccagaaggtcaaccgttctgtgttttctggtgtgctgcaggacatcaattcttcaaggcctgttttactaaatgggacctatgatgtgcaggtttgtactttgtattgtctctttgtacagaaaaagttattagaaatgaaatgtgaattcttatattcatgttaaaaccaaggtcccagtaccagacaggtagcctgctagatctagcagaagagatggacacactccatagctacttcatac

SEQ ID NO: 6752 - DNA, 1242 bp, mus musculus
aggttttgtcttccagtatgctttccttcattctcttgactccactttgcctttattctccccataatttccagaatctttgttaggctcctacttagcactccaaacataaaggggatatgtttggccttaaataggaaaaattctgtgatctcagaggcattttccatatggactcttacagaggcagacactggaatgctttcttagaagactccagaatgtttccagagagacacaggcatgcaaattaaaacttcggcaagtgcagggctgatttactgtaggcatttgccagtggctttaccagaatattttgcagtataaattgtaaacttttttttaatagcaagaacacaagtaggacattatgaaccttgttgttatatagacaaggaagtgagaagagaggcagatggataagttttaacgtatgttcatttatgtccaatatgtctgctttcatttcttttattttaaaaactggttagcaaaagtaagagaagagaaaaggttttcaacacaagaagaacacaattctgatgaagaggagaagagtgttatttgaatgacgttttttggagggggcagttctgtagaacgctgtaactggcatcaccagtgtaaagagaggcacttctgcagtcttctcacattgcttattttgaggttggcatgtttaccgtgtttacaatgcaccgtaaaaagacagcacagcatcaccgaatgcaagaaagcattgctcgcatttcccactggtaaaaagtctgcagaaagagattaagagaacaagaccagcaaagaacctagagaagttcaagcaggtgctgacgttttaatgaaacttaaatttccagagctacaagtctcagagaagttagcaaattgtgttatacaaaaagatataaatataaatcatcacctgtcagttccaagaatacaaatgaacaaagagttgatcagcaaggaattctttccccgctatcctccagcctatctcctaataacccacaaacgttaattctttatactcaaattggttgcctaaataactgttttcaaacagctatttgaaattttactacataatttgtttattatgcaaatgtgaataaccccccagtgatactttttgactagcaacaatatagagagtgcacaactttgcatattgtaaattcacataaacatttatatttttaagaatccaatgaattagagaacctgtgggtagatgacatt

SEQ ID NO: 6753 - DNA, 391 bp, mus musculus
tggacatctttgggtaagggtgaggggtgcttattattctgcctatcacaatgtctcctgtgataacttggacatcagaacccatgctaactgaacccactttaggaatgcgttgatttttttcagaatatcagtgcaggatattgttgactgcttcttgtcatttttagcaaagtcctgtaagaacgggctgaatcctagctaaagtcagcctatttaaaagtagaggtagaaggtaattcagttccatttgggtcatttttttctttttcttttttttgggggggggtggggtggggaagggtctagatagttggaaccctacagggttggaaagttaatggcttctctattctggtgactccgaagaagcagccttagctggagacaa

SEQ ID NO: 6754 - DNA, 1216 bp, mus musculus
ctaatcacttgtaaaaattcccgttaatcagattaatgtacccagatccaagcagatgctcagagagcacataacaggagaaaggatgtacgaagtatcacttttcgttgcatgaccctacatgattcttttttattttctgattattgacagtagatgtgagataatatttatactctgcatattgcaagaattttaaaaaatattttactttttatgttttcatccttctgcttttactaagaagttaagttcctgtttatcccaccactcagtccctcttacaaatacagttttgtgtgctggcctattcataaattattaatgtcacactgaaaaataccttttggaaatggaccccctgacataaaactattggtgattgaggagcttcagggcacgtgaagcactcccaacccgactggtgaagaaagctgctgaagctcttcttcctctggtgaaacaattaactttatgttccatttgctgatgacgccgcatgcctaaattgatcatgttttttaaacccatgccagtcttttcagcctgctcagctcaggggaaagtcaggatgtacagtcaggctccagtgcttttgggtagaagtgaaaagatttgcactcattgagcaagaaaatggcattcctggctgtcagtgtggaaggaagggcttttctctccagtgctgcatggcagactctctgctcttgtccctgaatgtcagctcatgcctcattgctaagtaagtgttttccccacctaacctgacaggtaggtgtctgacatgacagcaggctgccatcacactggggagcaaggataccccaaacttggagccagttctgctaagctaagtcagttttgctaaatgttactttgatttcagtgtattattagctttgagatatgccttgagtgccttagagatccagtgtgagaatggttcgctagagctggcttctgtctgatgactggtaaggggtaccacatttttcccactggcattccaaccccttcatctcttcctgccacatcttatccatcaatgggaatcaggttttgccaacagactggttatgaaaggagttgggattccttgaagaagtgagctttgagccccgagagtaggggatatcactttgagaactatgacctgcctgtacattgggggtattggcattttgcatcttcagctggcttctagcaacatacatct

SEQ ID NO: 6755 - DNA, 1769 bp, mus musculus
ttatgtactccctgtttttataaataagattttaaaaacatgaaattcatgatacattaaaaagcttatattaaaaaccaaagatgaaagactagataaaccatactttatgtatcaaaaatagctctctcttccaatatatattttgccatctctaagaaatggccaatcagattatgttgtcaaattagatggaatgtctgtggtggaagataaaatgatgataaataatgattttcattaacaatcataaagcacaaaaatggtttgaacagagaggctttagggtaagaattgaccaaggatcaaagagttgtttttgttttactttaaaatagacatgagagcttagtttaagcttcatgacaatactagggtttgggtaaaacaaagagaacagatttcagttgagcaaggcattacttcctaaatggactaattctgataaatcaccaagacatgtggctgctagattccagacaatgaatttatacaaaaggaaacaaagccccatagacatttttattgtggatgttctcactatgtcagtaccaaactataaaacaaggaaagaagtgagtataattacagcctctctcaacagagcgaggagaattggtttgagaaaagcccattgtaactcgttgcactggggtgttctctcagcaggaccataaatcaggttccagcacaggaaccatatctatgctatgtgtagctttggatctgactcacagatgttaagctggcttatcccatggacaggcaatagaagaatagttgtaagttctgagactagtgttttgggaatttgtcttaactctctacataattctggattgctttggggaacttaattggcttctctgagctgggtttctcattcataaaatatggcggtgtgactgcatgaactgtaaggacctttctaacttgagcatgctttatttctgtttcctctaaaatgctaacttgtatgattttctccaacttcagggaagtattataaaatttaatttcgtttcttttttttttttttttttttttttttgagaccgagtctcactctgtcacccaggctggagtgcagtagcacgatctcagctcactgcaacctctgcctcctgggttcaagagattctcctgcctcagcctcccaagtagctgggactacagacacccgccaccatgcctggctaaatttttgtattttttagtagagacagggtttcaccatgttagccaggatggtctcgatctcctgacctcatgatccgcctcggcctcccaaagtgctaggaatacaggcatgggccactgcgcccggccataaaatttaatttctaacaaatgcaaagggaaaccccaaatgtgcagaacagaagtttgtagcctgttgatttctgatgtgatgaatcatattactgtttctcaaaaattcactttccttccttgaagaacctctttttgtgggggaattatatgtctttgccctgttgtactcaggagtgaactcgctcatatgaacctactttattcagtggaatgtagatggaaatgatgttacttcaaagatgaacgaatattttagatttgtcatgtctcttctgtttgttttgatggccaaagatcatatctgagatagaagatattccatcagcctaagtcctggaatgacaaatatttggaacagttaatggtcatgtattatggacaagaaataaacctttgctttaagcctctgcaattttgggaatcatttgtttctg

SEQ ID NO: 6756 - DNA, 227 bp, mus musculus
cagattgtggaaaataaatgtttgttgtttaagcaacccagtatctgatattctgttacagcagcccaaactaagacagcagttaacgacctctctgtctttgtggagcttatatttaccgttagtaatataatatataaataacaggtcttgtaagtcaaatgatagtaactactgttagaatatttcaaggcagaagcaggacagggaataatgagtttaaaaaa

SEQ ID NO: 6757 - DNA, 147 bp, mus musculus
tgtcttttattccatcccagttcccttctttcttggtccatcagtcaactgttctgtttcataaaccatcatcatctctctcacccttaaggattcttcttatatctataattacattcagaaaatctttatttgaaaaaccttttt

SEQ ID NO: 6758 - DNA, 1134 bp, mus musculus
tgaagtttagcaatttggacttggctcagttcagtggtacttctggtctcatgaaggctcactcatgcatctgcttttagccaccaggtcaatgggtaggtaactaggctggatggctacatctgggaaaattcatctctattctacatatctttcatgtagcagctgtctggcttggaccacgttgatatggcagaattccaagagaaaaagcaaaggtgagcaaagccacttgaggcctaggcttagaagtggtaaacctttacttccttcactttgtgttggtcacagaaagtcactaactagctgggccggatccaaggagtggagaaatagattccactgcttaaagaaaggaagtccaaaatctcattgcaaagggtgtagtacaggaagatgtggacaattgaggttgtttttataatcaatctaccacaaaaaaagggacaataatgaagaaccccgcttcatagccagtggggacatagtgaaacaatgcccagaaataaggtcaagagtgactttgggtgatttattgtccttaatagatctatttctgattatgctgtacacacttgagcaatggttctgaacacaagaatttatctaacattcaagtttagtggggtcatcccaaatcaaatgaacaaggatccattaggcctgggaactaatgggcacagccaggtgccagcaagccaggcgttcagggagccgggcaatccgttagaagagggaggggatggctttgtacaagtcaggaggagcagggatgggaaatggaatgacctaagtggaccaacagtccaacctctctccatagctatgacttaatgatttgataaatgaaaaaatgtacgctagctggcaggtcactaacatcaccattgtgtgtttacctttaaaccacaagagtcagagaggagattccttatgctgtttgcaaatggaaactaatgatttttgttctcacacatgaacttgcaagcagggactgcatcattgctttgcaaattttaagctgactgatcaagtagctcagcaggagttcctggcatagcatatgcctgtttccagcctctcccttgtatgtttctgctatggtgatttgaggtcatttatattattaaaaat

SEQ ID NO: 6759 - DNA, 1000 bp, mus musculus
aagcaggatcctgactgatgtgagcatctgtgccggtgcccgggagatcccctgccaccgcaacgtgctggcctccagcagcccctacttcagggctatgttctgcagcagcttccgggagaagagtgaagccaaagtgcagctgaaaggcattgaccccccaaccctggaccagatcgtctcctacgtgtatacgggggaggcacatattgccactgacaatgtcctccccgtgatggaggccgcctccatgctacagttccccaagctgtttgaggcctgctcctcgtacttgcagagccagttggcccccagcaactgcctgggtatgatcagactctcagaaatcttaagctgcgagaccctcaagaagaaagccagggaggtggcactgacgtccttcccagaggtggccgcatcggccgacctgaaggagctctgtgccttggagttgagggactatctcggagatgatgggctctgtggggaggaggaaaaggtgtttgaggccctcatggtttggatcaagcatgacctccaggcccggaagcgatacatgcaggaactgttcaagcaggtcaggctgcagtacatccacccagccttctttcaccacttcatcgccaacgatgccctcctgcagtcctcgcctgcatgccagatcatcttggagaccgccaagagacagatgttctctttgtgtggcaccaccgtcccagactgcaaactcctgttgcatgtccctccaagaaactcttaccaagatttcctcatcctcttgggcggaaggaaggacagccagcagaccaccagggacgtcctactgtacagcaaacagaccggccaatggcagagccttgccaaactcccgacacggctgtacaaggcctctgccatcaccttgcaccgcagcatctatgtgctggggggcatggctgtcagctcagggaggagtctggtcagtcacaatgtctacatcttctccctgaaactcaatcag

SEQ ID NO: 6760 - DNA, 3176 bp, mus musculus
gctcttgacccaaaggcagtgtcttattcatcattgccctggatttcccacaggacaaccacagtgctaggcatctaataggcactcattaaatgtttgttaaattacgataacaactgttgtgagttctccaaggaaacactctgtgactaaggctgtaggtgggataacaattgtagacactgaaatgcattccctctggcaggaggcagagcatgggggagggtggtggtggatttgtattgatataatctgcccttgtatctggatcctgtgtagcagttcatggtaagggcattattcctggaagagggacgagggctaggggaagagttacagaacttttttttttgagacagcgtcacccaggttggagtgcaatggtgcgatctcagcttactgcaacctccgcctcccaagttcaaacagttttcctgcctcagccttctgagtagctgggactacaggcacgtgccaccaagcctggctaatttttgtatttttagtagagacggggttttgccatgttggccaggctggtcttgacctcctggcctcaagcaaaccacctaccttggcttcccaaagtgctgggattacaggtgtgagccactgcacctgctcagagtttcacatctttttgctttgtaatatgatctgtcttttgcatctctaaaataattctgatgttaattgaattgtaaagaaaattcccaaactttatcctagataattgtagggcatcaccccctactcctgaagcttatttcccagagctgttggcattgaatgctttaagttttaccaaatcatcctttctctgctttgggaacatcctagtcagggctaaatgtttaaggaacaagcacagggaaagaggggaaggaaaggcatggaggagatttgtaatggggtaatttctcaaaaggttgactgtagcttttctgtttggctctaatctcctgatgggtggcagttttgtctgtttctttttgtatatttatttataccagctcagtattttgttcaataaacgtttgtggtgtgaacctaggaatgaattacacatgtctactacatgctgggtgctggggtgataagggtaaaccaactcaagccctaatgaaactttttgtctaataatgaaagtgaacagtaatggaaaaaaatcacataaataaaattacaaactatgatgagtgatgaaaggaaaaagctctgggaacctggagagcttagatagaaccagggtacctggttagtctggtggggaaagcacagaggtcagggaagacttttctgagaatgtgatgttaagtggcccatgaaggatgggacagtgttaaccagagaaagaggtatgtgaggggcatttggattccagcagagaggagcacgtgcaaagatctggagggagggagcatgttccagtcgagtcactgaaggaaggtggtgtggccagagcaaaccacagggatgcagtaggagaggaagcagagagatttgagtacagggtggtccatttggtattttcctgtgctgtgccatcaataatccttattactggatgtctactgtgtagccagatgacttctgttgatatgtgtactgtatctggatcacacacagcaggatcatggtaaggatacaattctgcagaaaaataaaaggagaaataaacttaaattctgggaagaggggtttgaactttagaaagctttggactccgtggagttattgaactctgataagagttgccatgagatcttgtttttgtgaagaatttaaagaacagagcagacgagggaaggaggcttggctaccttgaaagggtactggattaggggttccagctcttgcagtgccatgatcagctgtgtaccctcggaccacctcatcttttaaataatcacttcccccagtggtaacatgtgaggttggaattcaacaactctgaccatctttgattccgagtggaatcaactctatcatgatggaaaattgagggagggatgcgctagggaacccactctgtctgtgaacccctgagcccaggccccttcctttgcatgtctttttatgatacatagggagtggaggattgcagctcagttggggatgtttacgaggctgccttgggagctactatttaactgcttagtctgtacctgcagaaccttctccccaacccctccccacacttcatgctgcctccttcctcagtgctctgcactttagaggctcctacaccattgccagcccacaggggtggcctctcagccctcaccgccaggtcctcttcttgtcccagcaccatacctaaaacacaaaggtgcacaatggagagggcccagcatttccttttccatgacaccataaagacgtgctagaggaatggacaaggggcagtgtattcctttcctgggactgccttggccatgtgccacaaacatggctgcttcaaacagcatcatcctctcacagttctggaggccagaagtctgaagtcaaaaatgttggcaggatcatgaagacgatgggggagaatccttccttggctcttccagcttctggtggctcctttgttccttgtcttgtgactgcatcactctaatctctgcctccatctccacagtgtcttcctctctgtgtcttctccttttatgtatcttaaaaggtcacttgtcattggatttagggtccactgggtaatccaggagagtgtcttctcaagatccttaattatatctgcaaagattctttttgtaaataatgggacactcacaggtttcaacatgtggatatatctttaggggaaccactattcaattcactacaggtggtttcagaggtatttgacccatccaaatgacttattttattcatttttctccctgacaaacttgacctttttgaaatagcctcagaatacaggtcccaaagatatgccatagagtggaggcagcaggctggagggctggagagcacaggcttctgggccaggtggcctcagttcaaatcccagcacgtaccaatctctctgtggctcagttttgccatctgtacattgagtacaataacaatactgcctttgaagactgttgtggagcttgtataggataacacttgtaaaggtagctagaacttaccaaaagtaaagtgctcaataaatgtta

SEQ ID NO: 6761 - DNA, 1431 bp, mus musculus
cctcacgcgcttgttgagatgacagatgagtcacctctgggaaactgcctgagagctggatgacaccactctgtgggattgcatttcatccacagagacatctggaaaaggaggcagagcagagcctgacttttgattatttggggagggagcctggagctggtggaagtgagggcatagagcacattcctttcaggccaggcagtgcttggctgctgaggcaccggtggagacctcatgatctggtggtccgcctccctcttgtgctgtgtgtgcctggagctctctggcttccttggctttccactgtctttcccaaagcctccatgtattctagaatctgctatggagtttcagggggatctctgtatagtgtgaatatctagctctgaaacacaaaagagaaagctacaaagggcaacgtaacaaaagccgtattcccacccaaggattagcacatgctcatgaggtggcatgctttgctttggatcattgtctttattttattttattttgtttatttatttatttattatttattttttgagatgcagtctcgctctgttgcccaggctggaatgcagtggtgcaatctcagctcactgcagcctctgcctcccaggttcaagcgattctcctgcctcagcctcctgagtagctgggactgcaggcgcgtaccaccacacctggctaattttttatatatttagtagagatggggtttcactgtgttagccaggatggtcttgatcttctgacctcatgatccccccacctcggcctcccaaagtgctgggattacaggcatgagccaccacacccagcctggatcattgtctttaaagaaatttaaaaaaaaaaatagataaatgggaagtctatgagccttgtctcccattccccatccttctcttcatacaagtacctctcctgaacttggggtataacaggtcatgctcttacaatttcattacaaatctatttgaagatcactggtagcaccattttgtgtgtttttaaattcttaggtaggtgacataacgtataagatgtctgcactttcctcttttctcccggcgctatgctgggcagatgatgctactatgcttgttcattcattccctgggccacagagtcttgggttgtttccagaattttgcttttgtaaacaatgctgtcatgagcatcctagcacagggctgcaggtgcatgtctgggtgtgtcccaggagtacagggcacagagcatgcacatttgcagcctgactggaggttgccacatcactctccagttggcactatttcctaggttccttccctgagagcctgggaacttctggaaggcaggagtgggtggtgttcaccactatatacctctgccagtcagcatgccccacaccatgtaccagctcatgacacgcctgaatggggt

SEQ ID NO: 6762 - DNA, 693 bp, mus musculus
taaaaatcaaatgttatgccctctatgaagctttctctgaatgtcccaggtaaaaacaaactctatctctgtatgaaatctttttatactttatacctctaccatgaaatattttataatgtggttgtttgaatagagccagacacatagttggcccttaccaagtatcttttcttttgaaaggaagaataaagaaatgaaggaaagattcagaggtatcttttcttctccctgaataattttgtgaaacggcaaccagataacacatgcatggtctgtgaccatcagaatcctgagcataaattgcagtttacctccacgaggcttgtgtgttctgtgccatttttcccccttcctttttggagaatgatgaatcagactcatcatggtattcaattaatttcacacagctgactcctgagggagtttgtatccaatgccctctaaccgatgatcaatcatgctcttgtggttggcacccaaggcagcgggaagcaggcccatgacgtgatccaggttgtcgaagagaatgtgtcctcatccaagcaggaaaggttttggtgacctttgatggcatttgagataagtcatttgctctggcttttctgaggccatattgatcttgcccaggattcaattttagacaaacaggcgacataatttatgtaaactgggcaggtaattaaactcttc

SEQ ID NO: 6763 - DNA, 328 bp, mus musculus
cagcttgaaaaaaaaagttctgggggtatcctttgagcccttgactgagccatgtctgaggcccctgaattctacactggacttgagtgcaagttaataaatcccctttctggttccagcctggcggagctgagttttctttcacttgcaagtataagagtttaaagtgatcaaactgtcttaaagggttgtattgaggatgaaattaataatgatcaacagcactaatccagaggaggtgctcactaaatagaagcaattattgcaatttcattttcagcttcctttaaatactatactctttccatgataacgattgcagtggtct

SEQ ID NO: 6764 - DNA, 370 bp, mus musculus
cataaatagacctttacacaatccttcacatactggccctaccaacatctctaacctcttctaagtaacatttatgaaacaatcccacattctcaggcacactcctgagaatattataaaatctagctcaggaaccatatgagcacaagggtggtccccagaacttgttataaaacttgtccaaccctcctggaaaaagattattggagtacttactcaaattgatctaataatagtgctttttttaaaaagaaattggattggaatccattattcttgcctcatcctgtctcttaaagagagacaatgtaagctagggagtcatttgtagtcctgacgactgagaagcaggtaaatcagcctgcagtga

SEQ ID NO: 6765 - DNA, 1102 bp, mus musculus
cgctttatcaccagaaaaagatcctgtaaagtattgctgactttaaaagcaaggcaggaggagacactagatgtgcttgcattgcaatagaaacccaatatccagtaactacagaattcaagaaccacgcctttgtggaaacctaaggtctggaaattttcatgtcacctttttttgttcctatttcttgacacccatcaaggaaagcccagctcttgttgatttcacagtcatcatccagcctcagcagggtcccttcaagatgtgtactctcccttcaccatgcacagggccagaagctgcctgtggtcccacctgtggacctgcctgtggatggctacttgctcccaggagaagctccgatggggtgctgccttcctagaggatggaggtgcgagagggcaccttgagagaagggctgagtgcctcgaaggacctgagcaggactcagcttgaacatgaaaggccctgaggaagtggagggttcagagaggctggggaaagccaggtatgcaacgtggtccaaatctcctgttccctgagtctggaagcagctccacctgacacttgtgccctgagagcacggtcagtttcattccaacaaactaaacccaggttgtggtgactgaaatgggggacagaaacaaaatacatctaacagaggtggttttggaaattgcctttgagccccaaagcctctcctccaaatgctgttcctctgatcttgtcctatacctgacctcagcctctcgcacccaccatcatcctgtagaacttcactcccccatgatcttaatgtcatgcattctggcatctgaccaccgtccggttcattcctacctgtgccccaaccgcagcggtgctctggcaataggaactcttgtgtttaaagccattccccacccgattaatgtcctctcctccctcctttccccagggaaattccacaatcactataatcccttttgcataattttaagtctccttttctctctctctctctctctctctctctctctctccccccccccccccaattgtattcacttggaaaaactctaactctagtaaaattcagctgccattctattcctccccagca

SEQ ID NO: 6766 - DNA, 952 bp, mus musculus
gttacatgttgagagaggatggatggaaaagggagatttttcactgtacccatttttatacactttgattctgaaccatgttaatatattacttattcaaaattaattagactatatgattaaggttaaaatgcagcactcaatttatatcttctattataattattaatattaaaattgatattaatattagatatcctgagctctagccagactctgacacaagctagcagttttgattctggcaaattctaattactctctactttcctaattcataaaatgttcatttatgaggatgcttcctcctttaacatcatagtgacaaagaacaaacggtcatttgaagaacagtatggcataagctgggacttttaaaattatctccatttctctcatataatgtatattctctcatatcacaatagtaatgtgaagtatttctttttctccatttcagagatgagaaatttgcaatgtagagcacttcagcagtttgctcatagtcacaagtcccagtggtgttacgaccgggacatgcacctgtgtcccctgtgattccaaagcttgcggtattaccactatctgagaaatgctttctatcttaaaagtatctgatgaataagaggccggcactgagttgaagataagggccacagttgtaggctttgttcttttgttagtcctgctcaaattagaagactgaaaatggtcaggataagtgagacctgctaggtctctgtgccactttattggttatgccaatttgttgaccagggcaatagagctcacatttgccgttgaatagcatatggatttagtttttctttcttgaatcaagtagctcctactgctgtattccttgggtctggaagtcatttcatattggtccaatgtttgccattacattcttggaatcttgtttatagggctacaatggattagctagaaa

SEQ ID NO: 6767 - DNA, 1299 bp, mus musculus
tgttcatcatgggttcaagttcctgccaactatctgatggctcttggaccctgcattctgtttcttcatctgtaaaatttaggttcttgtgaggattaactttaaaagaaacacataagcaattaactcctgaaatgaaccagctgtggggccttaaataagttacgtaaggttcccaggtcttcgctttgtaaagtagtgtggaatcattaggtgtgcagctctatcaatctcctatcattacaggattgcagtgtgactaggaggttagttgttgtgtacttgggtaaattacttagtttctctgtctctttgttttcttatctaaataggaggatgataagaccttatagagttgtgagaattaaataagattttcaagtaaaggatttactacaatgcctggcatacagtgagcactgaatacatgcttgcaatgatgatgatgatgatgtgatgatagaatcaacaggaacgtaaaaggaatccaattccatttattcctgttgcctcttcaatacaaacatgatacagcacccacttgcaggtgcaactgtgaaggccaagaactgtggcagctgccaagaaaaggagatggcctcttgccaggtgcagagctgctagcatggctgtcaggaagtgacagagcatttgctgagaagtcaacatttgctgacagctcacacatcaaagcatttttccacagctttcagtactgttaccatatgcgagtgttcatgggaacagccatgcctggataaaccagataaactgaggaatcaaaaggcatattcagaccaagactaaagagaaccttcttcacctcctccatacttcttcaataagaccactcaggacaccttaactgccttgctgcctttctgggtaagtcactgagaaccttgttcaaccttatctgtccatgtctatagctgctatgctgactcaggccacttgccaaacacttatcatgccaatacaatgtcaatgaccatttcaacaccctcagcagcttcccattgctcaggaatggtgacaaatgagattgggaacaccgaagtaaaaaagctaaaatatcataatgatgaaattttgaccaaaagacacagagatatttttgtaagtgtctatatgatctgctattcctcttcccatatctgctaacattccaaatgcatttactatcctgctccccattaatgaatctgttccaaccaccctggcctccttaccctttccctagcaagccaagcatattcctgcctcacaaacttttcacctggtcttattgcctaaaat

SEQ ID NO: 6768 - DNA, 554 bp, mus musculus
tgttttgacctcactctaggaggaaacttttttttttttttttttttttgacggaatattgctctgtcgcccaggctggagtacagtagcatgatctgggctccctacaacttccgcctcccaggttcaagtgattctccccactcagccgcctcagtatctgggattacaggcactcaccaacacacccggctaatttttgtatttttagtagagatagggtttcgccatgttggccaggctggtctcgaactcctgacctcaagtgatctgcccgcctcagcctcccaaagtgttggaattacaggagtgagccactgcgcctagccgggagaaagtttttaagtgaagatccaagatattccaaaagcaaagcagcatattagtaattttcatggcaataaatatgatacactagctcatcaaaatatataaagagggagaaaacataagtgcacactatgagaggttggtgtttcaactgtaacacaaaaaatgtctatacctaaaatgtataaataatggcttcaattccacaaaatgtcaaccacgca

SEQ ID NO: 6769 - DNA, 1179 bp, mus musculus
gatacaattaaaattgtgataaatgctaaaactaagatgagcccttaagaatgttaaggatgaaagtagttaaccaagtttaagcaacaaatccacggtgccataaattttattggaccttagatttaaaggatacttaggagagaatgtgataaaagagaagtagagggaaaatagttgggggatgtagccacatcctaggtggtatgtttaagaaaatacaagtaatcagctaaccaaagctggcctctgtgaaagggatgtgaggaataacagtgctgagaaattatactgcaaaacatgctggaggctcaggcacagaggtgatattaccacaaaatgtgaccaatgtggattttaaactgattcaggaggcactaaaatttttgagtgagagagttgagttggcatcaaatataaggcctgtagcccaaaagaagatgtgcattaataaaaaacaaggcagtcttaacatagtacattagatatcttaacacactcaagtatgcttattgtaaagtaggtattttgttgtaattggcatgactccctaaaatctggtgcctttatctggtgtctctagggagttaactggctactaaattgattcttcagatatctgttcaggtgtgccagtaatgaggtcattatagtaaaatggttaatgccagtgataattaatttttttttgcttgaattatctcctaagaataccagagaaagcaaagaaatttagagtaaaagctctctgccttatattgaaagtcacaaatgtaattttgtggtcttacctcaatgaatgcctgttgcagaaagttatccaagtagctgttagctaagaaaaaaacaaaatgtcattctgttatgattagtggatttattcaatagcctttataaaaagatgcaattgtcactattctaccacacacaaaggtattgcaactctgagattactcctcccaccaacactttatgggattatttcattctcttatggtagttatcatttccactgtaatttagcaccaaattgatgcaacttctctcactaagctgtagggttggaagaacacaatcatgcctctacaacttcttgagaaggagtactgctgggatgggtcgtctgcagaaaaagatgctgacaggcattaaggtggcagattctagaaggaggattgt

SEQ ID NO: 6770 - DNA, 1510 bp, mus musculus
tctcctgttttcttgatttgtctcttttcctacttcctcccactcacatggaagtgccacgcaggcaggggcttggcctgtgtccaccacccatccctagcacacagatcagtgtatggcatacagtaggtgctcaagaaatatgtgtgaccagatatgcgttggttctgtttattttgtatatttctaacgtccctctagacatgcagcctttagtggtgttgggaaggccaggggtccaatctcatggtggctcagggttgacagatatctgtgagttcctgtccctgagtgaggccctctggggtgagcctttggccatctcctggtgggccaagagtggtgacacccgggacgtttgttgcagggcacagaggggcatctgatcctgcctgggcaggaagtacagaggggaagccatgggggagctgtgactgtcccttctaggcagccatgagtgacccgtcaagaggcagcctgacctggaagcctttggtgacctagaagggggagtgccctcactgcagtggcaggacaggaatgagctggcctgggtgaagtgtgcatagtccaagtcgaggcccatgtgagtccatgtgtggaggtgaatccactcttccagtcttccagcgatgtatttttttttttttttttttaagacagagtttcgctcctgttgcctaggctagagtgcagcggcactatctcggctcactacaacctccacctcccaggttcaagcgattctcctggctcagcctcccgagtagctgggattacaggtgcctgccaccatgcctggctaatttttgtatttttagtagagaatgggtttcaccatgttggccaggctggtcttgaactccctgacctcaggtgatccacccacctcggcctcccaaagtgctgggattacaggcgtgagccaccgcgtccagccccagtgatgtactttaatgaccacccgcccctcaaattattgatcggtatttgtgtctgtgaagtgttcatttacctggtgggctgtgtgctggtgagcggccgtggccagtgctgctggggctgagctagcttcggtctgcctccttccagggtgcagagcctccagctccaccatgagctgcacgccgcccacctcctctccagcacagacctgaaggagggccgagcccaccggcggtcctggcagcagaaactcaactgccagatacagcagaccaccctgcagctgctcgtgagcatcttcaggtacgtgagagaacattcccagtgtccatgaggaggtaaccagccagccatccattctatggggatcgtgcaccccgccccagagggcaggccattagtaccatttgcctggcaaacatgagtggtccccgccccctgccaaagcttttcttgtgactgtaacaatcagcagttacagggagtttgttcttttgattctgaccttgcctgtgccttcctaacaccctctcctgctggtgactgccttcctaacagcttctcc

SEQ ID NO: 6771 - DNA, 3397 bp, mus musculus
gcggactcgggagatggaggaaaaggagatattacggcggcagatccgcctactgcagggtaggtccggccggggccgggacgcgagtccccttctttccccctcacctcgcggcgggtcccctgcccccttgtcgaaggggtcgctcaccgcccgcgtgttctgggtggcggctggggtgggggacggtagggtccgccaggacttgtgggccggctcagggcccgggtcagtccccggctccagctttgtcgagggagtggtgccggccctgctggggctgcagagggtggaggcagggccgtcgcttagtaacccgcggggggcggcggccctccccaccaccgcgggctgtcgcgtcccccggcgcccactctctccccgcgccccactgcggggctgggactagttcatggctcatttcggcagagcaggctaagggcgcacgcgggttccttccttgacgcccggttttttttgagacagagtcttgctctgtcacccaggctggggtgcggtgacgcgatcacggctcactgcaatctcctcatcctgggttcgagtgattctcctgcctcagcctccggagtacgtgggattacaggtaggcgccagaacgcctggctaatttttgtattttgagtagagacggggtttcaccatgttggccaggatggtctctaactcccgacctcaggtgattcacccgcctcggcctcccaaagtgctgggattacaggcatgagccaccgctcccagcctcgacgcccggttttgatgccccttttctccgaacagtcacactccccttgccattccaggcgcagactgaacaggcttcagcttccacacttaaacattaaaaaacccaaattggtctttctaaacttaaaaagaaaatccatgttcggacgcagtggcccacacctgtaatcccagcactttgggaggctatggcaggaggatggcttgagcccgggagtttgagaccatcctgggcaacatgacgagagcccgtctctacagaaaaattttaaaaagtgagatgggcgtggtggcttgcgcctgtagtcccagctactcagaggtggaaggtttgcttgtgccctggaggtcccggctgcagtgagccgtgattgggccactgcactccagcctgggcaacagagaaaaaccacatctcaaataaaaagccaaaaccaaccaaacaaaaaaaagctttaaaaattaaaaatcctttttgcttttactctcacaaagggaagacttaaggattgggaaagtgtgtatggataagaggccaggtgggctgcctcccacttggggacacttcttgagctcccatcacacctgctctggggcgtcaacacgtctggacgtggctttctgtgcccccgggggcagggcctgtggtgggggaatgctgataactgggaggctggctgctgccgcccttgcctgtgttcctggccctcctgcaccggggtagctatccagggacttatttggaaagtcctgtggttgtgtcagttcactgcagtaggactctagcccattgatgtttcctcttctgcagggaagactatgaatctggcagagcaatggcctctgctcctagtattcttttttcctgttgtcaggcatggggtcctcgagagtgtcagttctgttacactcagtggagtgactcctttccatctgtaggcaagccagagggcctgtgcggccacttgtcccctctgattcaaacagtgcagaggggatcattgcgattctcttcagactgagtgacacgtctcagcaaatgactgtggactcagtagaccagcaaataaggcttgttacaccacacggttcatttctgtgtgaagcaggcagaagtaggactgaagtggagctgatggagaaaaggctcatagaagcgacaggcccaggtgacgcgggctgagttgtcagtgagtcccaggctctgggggctgcccctcctgaaactggcaggggctcagaagtgagatgggatctgggggtatcttgccagctgatgcccttccagggtagtcatgattatcgcggttaccctctggctaactgggcctgtggttctgtcttctcaggtctgattgatgactacaaaaccctccacggcaatgccccggcccctggtaccccagcagcttctgggtggcagccacccacttaccacagtggcagagcctttagtgcccgctaccctcgtccaagccggaggggctactcttcccaccatgggccttcgtggcgcaagaaatactccctcgtgaatcggcccccgggaccctcagaccctcctgccgaccatgctgtgcggccgttgcacggggcccgggggggccagcctcctgtcccgcagcagcatgtccttgagagacaggtccagctcagtcagggtcagaacgtggtcatcaaagttaaaccgccatcaaagtctggctctgccagtgcctcaggggcccagcggggctctttggaagaatttgaggaaaccccctggagtgaccaaaggccccgggaaggtgaaggtgagccccctcggggacagctgcagccctcgaggccaacaagagccagggggacctgcagtgtggaagatcctcttctggtctgccagaaggagcctggtaagcccaggatggtgaagtcagtgggcagtgtgggcgacagcccccgggagccccgccggacagtcagtgagagtgtgattgccgtcaaggcgagcttcccatcctccgctctgcccccacgcactggcgtggccctgggccggaagctgggttctcattccgtggccagctgtgctccacagctccttggggacaggagagtagatgctggccacacagatcagccagttccgtctggctcagtggggggccccgccagaccggcctcaggacccaggcaggcccgggaggcctcgctggttgtgacctgtcgaactaacaagttccggaaaaacaactacaaatgggtggctgcctcctcgaagagtccccgggttgctcggagggccctcagtcccagagtggctgcagagaatgtgtgcaaggcctctgctggcatggcaaacaaggtggagaagccgcagctcatagctgacccagagcccaagcccaggaagccagccacgtcctccaagccagggtctgcccccagcaagtacaagtggaaggcctccagcccctctgcctcctcctcttcctccttccgttggcagtcggaggccagcagcaaggaccatgcctcccagctctccccagtcctgtctaggtccccgtcgggggacagaccagcagtaggacacagtggcttgaagcccctctctggggagaccccgctctcggcttacaaagtgaagagc

SEQ ID NO: 6772 - DNA, 743 bp, mus musculus
aagtgtacaaaagcctttggttgtagttcacggcttattcgccatcagagaactcacactggagaaaaaccatttaaatgtgatgagtgtggcaaaggctttgttcagggctcacaccttattcagcatcagcgaatccacactggagagaaaccctatgtgtgtaatgactgtggaaaagccttcagtcagagttccagccttatttaccatcagagaatccataaaggagagaagccctacgaatgcctccaatgcggaaaagccttcagtatgagcacacagcttacaatacatcaaagggttcacactggagagaggccctataaatgtaatgaatgtgggaaagccttcagtcaaaactcaacccttttccaacaccagataattcatgcaggggtgaagccctatgagtgcagtgagtgtggaaaagccttcagccggagctcatatcttattgaacaccagagaatacacactagggcccagtggttttacgaatatgggaatgccctggaagggtccacctttgtgagccgtaaaaaggttaatactataaagaaactgcatcagtgtgaagactgtgagaagatatttaggtggcgttcacacctaattatacaccagagaattcacaccggggagaagccttataaatgcaatgactgtggcaaagcttttaatcgtagctcaaggcttacccagcatcaaaaaattcacatgggatagaccacttacatata

SEQ ID NO: 6773 - DNA, 1096 bp, mus musculus
gttttaactccagaatctctaccaggctttcaaagtgaagatcagggaaagatcccctgctgattctggcagtgggagcagaaaagtaactagtttgaaatactccggagcattctgttcttatgagcatgggctgccttcaggagaagctattttatcagagccttatatattggggttttatcaggtcccaactgatataagagaagaaaaatacctgattccagcttcctctagctattctgtcccaaggagacagattgtggacacttgtgaagagacacttgtgaagtccacagtccaggggcacaaactcactaaaagacagagattatagaattataattataggactgttatttgtcttcccctaacatcttaccaccacatgctaaaggcctatttactataatttcttttacctagtacattatatctgtctatcaagaaaaggttacaaggtggccgggcatggtgtcttgcacctgtaatcccagcactttgggaggctgagacgggtggattgcttgagctcaagagttcgagaccaacctgggcaacatggagaaactcaaactctacaaaaaaatacaaaaaattagccaggcatggtggtgcttacctgtaatcccagatacaggaggctgaggtgggaggatcacctgagcctaggaggcagagattgcagtgatctgagattgagccactgtatgagaaaaagttacaaccaaaaggcaggaaaacacagattgaagcaattgaataacatcagatccagagtcaaatgtggcacgaatttggaattattagaccaggaattttttaaaactttgaataacatgctaagggccctaaagaacaacattaagacaatatgcaagaacagttaggtgatgtaagcagagagattgaaattctaagaaagaatcaaaacatcattgtagagctcaaaaacactgtatcagacatgaaaatgcatttgattcactcactagtagactgagaatggttgaagaatctctcagcttgaagatgtgccaatagaaacttccaaaactgaaaggactgaaaaactgaaagactgaaaaaaaaatac

SEQ ID NO: 6774 - DNA, 1096 bp, mus musculus; identical to SEQ ID NO: 6773

SEQ ID NO: 6775 - DNA, 473 bp, mus musculus
ctgaggggaaagcagagggaatagaaggtactaaagccctagagttgatagcatgtttggcgtttagtggagatgcaaagaggcaagtgtaaccagagcagagcgagtgaagagaaatgtggtaacaggcaagagtcagagaggtaaggaggaaggaagccagatcatgtagatctttaagaattggagtttttacactgagttaggtgagaagccattgaagggttttaagcagggaagggacatgatttgatttatgttttaaagcaatcactctgttgggtggagataaatgtaataggacaaagatgaaagcagggaaaccagtatactatagcagtaatccaggagaaaaatggtagaggcttggactaggatagtagcagtgcagataccaaggagtggctggattctggatataccttgaaagtaggattggtagaatttgcttaaggattggatatgtggagtat

SEQ ID NO: 6776 - DNA, 577 bp, mus musculus
ggaaataaatgcaatcagattaatagacgttgtcattggtaggacttcgggtgagttttttcttcttcctacttttctgtattttccagttttctattctaaagttatattaatgtaataatttggagaaaagctctagttttcttttcttttcttttttttgagacagagttttgctcttgtcacccaggctgcagtgcaatggcacaatctcggctcactgcaacttctgcctcccaaattcaaggaattctcctgcctcagcctcctgagtaactagaattacaggtgtgcaccaccacgtctggctaatttttgtatttgtagtagagatggggtttcaccatattggtcaggctggccttgaactcctgacctcaggtgatccactcacctcagcctcccaaagtgctgggattacaggcgtgagccaccatgcctggccgaaattgcaagaacctttaaggtgatcccccacaaactggagctaggattaaggtggttcctcaggcctttgttctgcctacaatgttcatgagagttgctttctaggtttgattgctgctcaaacattcaa

SEQ ID NO: 6777 - DNA, 797 bp, mus musculus
tcatgtgtgtatttgagtccccagctggatctgaatccttggagagaaatgtctccgagagggctgggtcttttttgtctctgttttctcagtgctgagctcagtccctggcccagaggacacactcagagggaaggagaaggcaggaatgcagagaatctcttaccagtgggttagaactgctgctcttgtgcccacattgccttcctggtccctcccctgcaggcccttttgggtgtggtcaaccccgcagtgtcaaccctgtttctagttattggcgtttgttatgcttcctcacttcaaaggaaccagaaaaataatttccaaaaacagctgcctttgtactttctaggccttttaaggtttttgcatgccagaatctcacctatttctaatatcataaagatgtggctgctttggaaaatatacctctgaggcttaatgctataataacttccagaataataaaacaacctccgtctctgggacctcagtaccttaaccaagcatcgtgtccactttgggctcatcattggagggaaagtacgtactaacaaagcagcggaccaggcactgtggctcacacctgtaatcccagcactttgggaggctgaagcaggaggaccttttgagggcaggagttcaagaccagccttgccaacatagtgagaccttgtctctataaaaagcaacaaccacaaaaaactagatggccttcaggaattcaccaaataagttttagtgcttttatttttgtgaaaataacagacctatcttttagaaaataggtatagctg

SEQ ID NO: 6778 - DNA, 797 bp, mus musculus; identical to SEQ ID NO: 6777

SEQ ID NO: 6779 - DNA, 689 bp, mus musculus
aaaagagactttgcacatgtgattaaggttgaggactttcagataaggacattatcctgaattatgcagatgggcctaatttaatcacttaagtcattaaaggaaaagaacgtttccctgctatggccagagatgtgatgaagaaagaaaggccagagagaggcaacgttgttggctttgaagatggaagaaaggggccatgagccaaggaacatgggcagacccaacaagctgagaatggtaaagcagaattctcaagagcctccagttcagagtgcagccttgccaacagtttgatttcagtccatcaagacttctgtcagacatctgacctacagaactgtaagataatacatttatattgttttaagccaccaagtttgtgctaatttgtttcagtagcaacagaaaactaaaacaacaagtaagagaggctacctataagagctgtgggcccacataaggaaatgccgccactgcccagctatattccagcagttagggagggaaataaatgctctgacctctcttttttcccctgccctggcagtgtttcccattagctgaacccattagccaaaagctatagggcaaaacagcctagatgatgcaattcctaaagtttagtcctctagagtacagagcagggtagaaaagggcagagatggatttataggggcaaataaaaa

SEQ ID NO: 6780 - DNA, 215 bp, mus musculus
ctttcaagtgtggactattccattctgatccaaggtgtacctctctttcatcttggggtaaatcccagtgaattgaaaagaaagacagccacatcagatctaggccaggctccctcaagaagcagtcattcaaagctcactttcaggtccaaggttgtgactttcctggcttttgccctgtagtgttgcctttctgtgtcttgcaaaatggctta

SEQ ID NO: 6781 - DNA, 604 bp, mus musculus
agatgaccataacatggattcaaaatatggtatattagagtgacttcctaaaattctgatgaatttttcacaggattcctttaaataataagcatccttaatgcattcaaaacatgatctacaattccaacagactttccagaacttaattctctgcatgatggaagtaaaggcaactccaaggtcaacaagccacatcccctcctcagccttttctgtctttcctctcctatttcctccttctcctacccctgctagatactgggattacaaagaaaagctccttgctcctgctcaatgtcccagtcacttactttagtttacccttcatgatcccttcctactccttccatcctgctctataactccctcttctccccaccccggcaccacccactgtacccaaccaccttccttaccagggagaagacaagaagggtttaatgccagaatcaaactatgtacaatgaacctctgaggaggaagacaggggtgattgctgggctgagcctgctgtttccttgccattctttctccaggtcctcagatgccatatcatcgtgggtgtgctgccgggtgggcatcccacctccagcccacagtg

SEQ ID NO: 6782 - DNA, 1209 bp, mus musculus
tagagagatgttctttgatagtaacagaatccataaaatacttttaaaaaaaataatgaaggcatttgttaggcataggctgtttcatcagaatatacctagtttattttacaatggtaaaattgccaagacttagagagcattctgattgaatcatgaatattccaaaggggtagattaatctgtgtgaactagagaactctgctgaaactgctgtttaacattctaaagtgtggaattcatcttcttacagcacaaaagagcttcctataataaagattttttataacagcaataaggcagctcagtggggtgtggttttcatgaaataatcacacttctgagagattagacattgtgccttatgctgtacaatcccctcaagtattatgatgacatgttgatgccacctcccccacacagctctattcctcagttactcagtgggcccttccaaaaatatctgcccacttagagctatattataaacaagctggggatctataatactgtattagtgctttatcacatcacagttttctttatgtttctcataagtagaaattcttatacctttccattgtagttcagatttaaaacacacaaaccaaaaatatagttacagtaagaaaaagtcatagtttagtaatatggactgtatacttgttgcagtttagctaataattatgcaagtcatccattattaatctgcattgttttttaaatgaggcatccattaagagttctggcataaatttgaatattgtactgtaaaattaaccaagaatatatgttaacattaaaatatattccttcaaattttcaaaaattattacatggggaatatgtcacttttattcgcagttcacttcaaactgtaaacaacatctattgatattttcagtgatctcctaatgctaatagtttgaagactgataatagggtgtatctgttgtttctcattggcaaagataattgtattcttttgcatatttcatctgttttcgtgtttagacagaatattaagaaaatatatggtagggacctataaatgccagttataagtagggtttttgatttattaagcacttttctagaactatgccaaaatattaagctttgtgggcataactctacatttttgacattatggaataaattttttaaagttgctttgaaatgctacataattgaaaattccattataag

SEQ ID NO: 6783 - DNA, 406 bp, mus musculus
atggtaaaagccttagtgggctcacctttaaattttaagttggctcctcatgtccagtggcactcttgtcattgctaagtttgtgccctgttcaaaggtatctagcagaggatggaaggtgagaaactagccatactctacttacctgatactacatcctaggatgacactatattagcagtgaaaggactgtcatattgcaatttatgcttctgcaaattgggtgactttttgcattttatctgcttgaggaggcatttttaaaatttcacacctacatcaatttccacaccttcattccttactttcagcgagtcccatagtaaatctacttttacttgctttctaggctaacacctcctctgcttcttggggttcctctcagtcatgagccaagcagtttccc

SEQ ID NO: 6784 - DNA, 1041 bp, mus musculus
tagtctttcatctcagagctttgactctctaattgctgttagacagtaacatcaggtggccaaaattaaaacacagcaattgtttttcttagagatttgctccatcctcactctctttattcctcccagaaagcacagccagttttctgtgacctcctctgcagcccagcctccaacaaatgcaattctttttgttcttgttttgtgctgcttgacactagtatcaccttatacttcttttatcttgcatttgatggtagcttatagagctttagggatctattctttcctttcttttctgaatgttctgtgctcccagtctcctctattctaagaagtgctgaactactttgcacatttctttgtaaaggaaggtctgagagccttgtttcccaggtcacttcaatttccatttccagtgcctctgcctaacgtaaagtacaatttggctctgaggaaatgatcatatctgcacactatagttccagcttattttttttcagttttctctttagcataataccctttcttgttcagaagtgttattacttgtactatttctgtcattcagtaatgatttactagattagtttttacttataatcgctaaatactttcttctattttaaagtttgcaactgtatgctcagaagacagacctttgtgtttaatgcagttcagttctgccaatatttggttgatgactaagtgttatgccctgtatttggtaagatgaggtagacattgatatttgacctcaaaaaacccacagttaagtagaaaaaatattttcaataactatagatatggcatcattatcactctaaagagagggcaaatatgacataggttaatggggaaagatcaatgacaaagtgggctttgtactaaaatttggcacaatttttgatagaaggaacagaaaaaaatggtatgttattccacatagaatatctttgaaaacagtcatagatactgaggtaggaagctcacgtatttgtatggttgttgaataagctatctcaattggaatgtgaatat

SEQ ID NO: 6785 - DNA, 971 bp, mus musculus
tgcaatgtacagctgcaaggacccaaatcttgttctttcaaataggtatcaaagaatagacctgggttcttcaggagccctggaactaccagacagccctgacaggagaccttctcaaaaagtttggcattggtttgagttctagaaattcttgtcctgatgtaaatgactggaaaatgagtattcacttttttgtactttcttcctcaggaggtttggaaagtggaaaaaaaatagtttcaaatagcacttcttgtaaatctgaggttttgccactgaaatgcatttcttttccttcaaacttgtctaagaaatgttttaatatatatttaatttatgcaagagctctagattttgttatgtttctccaggaaacggtttccaaacccaatgatataatatagaatattctagagattggtgaaaaattggtagttatttttattaaatctttctggtacacacacacgtgagaccttacaataattcctttaattagcaattattgggaagtgatagataatagtatgtggaaacacatacattttatgatcaatttatctcaaatacttatgttagcccaacaaatgataaatgatctggtcgtttctattagataaatcaactgccatgagagtaagtattttatttagggttcgtattagctctaaataaaattgattgttttctttttcatttcctgctgaactgcaagatttacagaatagtatgctatcatatatatatatatatatatatatatacacacacatatatgtgcacaaatgcacacacatatatatctgtaatatatttatatatgtaatgtacatgatatatgtgcatgtttaatgtcttcagtgcctcttaattgtctagtagagaatcagttaatttatcaaacaaattaaacaaccacaaaaaaattacaagatcgtttgaacatagattgtcagatgtgcagatgtttc

SEQ ID NO: 6786 - DNA, 1135 bp, mus musculus
taccgtaaactttcttgttgataattgcagttcatgaccaattccaatattcattttactgctaaaattccatggtaatttaataaatataatgcaatatgatttagtggtattcaatttactgctttggggattaaaactctactaagaaaggatgcttccgcatgctaagaaagattttgtgtcaaatagatatactgaacacctgaacaccttgtgtttgtaatttactgtgtcatgagccatggaacccaaaggccatgatttctggcatggagctctggtatggtctagcagcaaagacaggcaacaaaccaattattaggattcattacagaactacaagtgtgaaagtgatgtgaaggaggttgtgagggaagagaaacaatgaagatctgacaaagccatggagcatcaagaaaggcttccctcttgtagggtcttttaatctgagaacagaaggatgggtatgagtcagtagatagagctggagggggatacctccatgcagaattaacagtaagtgctgaagtctagagagaggagagatcatgggatacgtaaaacattttttcaaagttctagtatgactagaaagaagatgatgaataatcattgcaccacttattggcatgtgaccataaactagtcattgaagctttctgaatgaagttttctcttcagagaaacctggggattgccctagagtttgttgaaccacataaatagccctttatgtggataatgaaggtcaaataccagtaaacttacatggcttatcccaatgtaaatttaagagaggtgctgccagttttatattcatgtaaaggtattaaattcctgtaattaaaccacatcaaaagctgtccaaaaagtgtttaatacaaaagtgtttaatacaaccttcttttgaactgaatgttttaaaaatcacacttttaagcttttggcagtgcttagctttaacatcattgcaaaacagaccttgcccctcaaagacacttgtctgatgatgtgtgtatttaaagctgctggtaactgactgttgctgtttttagcactgctttggctgtctaaatctagtcaagacaaattatacctgggcggtgttggcaatagttggagcacttgagtg

SEQ ID NO: 6787 - DNA, 298 bp, mus musculus
taaagctactttaaaaatacctcattaatccttacttatcaacttctgtgcttaattgtatggagggagggaacaatggcaaattcacctatgaaaacaaaattcattatatgaggtgcaggtgcaagcaaactaaggaaaaccaggactcttaaaaaatcaatgaagatatttaagactatatttcctagaactcatgataaaaaagcatcagaatcggtacaccgctgtccagttaagttttaattaaaagcataggaatggattttctatatataaaagctgcctacaccattgc

SEQ ID NO: 6788 - DNA, 244 bp, mus musculus
gcaccacaaacgttcttaaagcagttttacccacactaaaatgaaaaacaaaaggaacatgggctctagtcccaagagagccatgttttctaatgtttccattagaaataaactctgcatttgactccctaaagcaacattattatgaacatgattttatgtggataaattactactgtatttcagctgcactgtgggttaaataggcttttgtgggctacactatagatattataacctcata

SEQ ID NO: 6789 - DNA, 270 bp, mus musculus
tttacatttcctgggttcctttgatcagttgtggtaatttgacggtttccacctcactctgagaataagtaagtctcattcttaaacctggcctaagaaaacctcaaaccatgcagtcatgttctttccttttattggctggattacatagagataaccgtcagacttaccatgaaatttgtgtgaataacagtagagtgattatcagcattggttgctgagtaacttcatagatcagaaccctctcctgtctgcgcagaatttgtcttt

SEQ ID NO: 6790 - DNA, 267 bp, mus musculus
gaactcagctctgtgacaaatagaaaaggataaagctttgtcagccatgcctattatcttacatagccccaaggtagccatcaataaattcagggagcgagagagagacaccagggaagggagcaaggaaataaaacagggttaagaactagcctcagaaagaactttgagagttctagagatggctgaaatcaaatgaaccagatatctgaaatgtttttgggaaagttcactggaaaaataaaggctagaacatcacttgattgt

SEQ ID NO: 6791 - DNA, 1183 bp, mus musculus
gctcctcaacgtggagccatgggaggccttgggaagaagaattatgaacgaggctcagccaccaactacatcacccagaataaagcccagaagaagctccagctgagcctggctgactttaggcagttgtgcattctgaagcgcatttatccccatgaacccaaacacaagaagaaggttaacaaacgttctacagcagcccaaactttttaccttatcgaagacatcaggtttctcctccatgaacccattgtcaacaagttctgggaatacaaggtgttaatccggaagctcctgaaggcctataggaagagcaagtggaaacactgtagagtatctaaaggacaataagcccaactacaaacttgaccgcatcatcaaggaatggtaccctacgttcactgatgccctgcgagacctggacaacgccctctccatgtgcttcctcttttccaccttcccacggactggcaagggccatgtgcagaccattcaccatggagttcatgcactacatcatcgctgctagtgccctgccacaaggtcttcctgtccatcaaaggcatttactaccaggtcaaggtcctgggacagcccatcacgtgaatcaccacttatgccttctcccatgaccacccaacagacatggactacagggtcatggccaccttcaccgagttctacagcaccctgctgggcttcatcaacttccacctctaccagtggctcaacctccactacccactgaagctcgagggtcaggcccaagaagaggcaaaggccagtgagggcacccatgcattggactctgagagctccatggagaaaatggctgccctcactgccagcctggcccgcgtggtggtgcctgccacagaggaggagcccgaggtggatgagtttcctgccaatggggagatgtcagcacaggaggaagaacgcaggaaggagctggaggggcaggagaagcacaagaagttttctgagggcctaaagttcttcctgaaccaaggggtgccccgtgaagccctggccttcgtcatcagtttttggggggaagtgtcctgggacaagtctttgtgcatcggggccacctatgacatcacggactcccgcatcacccacaagattgtcaactggcctgggcagcagacctccatcattggcaggtgctacatgcagc

SEQ ID NO: 6792 - DNA, 1094 bp, mus musculus
acaatcttgaatacttttcaagtctagaactagtctgtctttgggattattggtttagttattgcattcgctattggcatgggggaaatcttaaaatcagaacttcagttggagcttcattcttctttaacttttctattggaagatggttttggtggcttgaagaactcatgggtcctgctttggcaaactgaactgattagtctctgctgagaaatgtctttttatggtttggaacattttcagaaatgtggaacacccccccgccccgacttaacttcatagaagttcagtaaaatgcagtatatccttttctctctcatactttataattcacgaacacattgtgcaaattcgttatgataggcaatgaaggaaccacgtttcccaaattttatctccctgagaaaatgggaactatcaatcagagtgttggatgttgcttaggaaatatagaaattattttataattcagtctaacaattttagcatggatgaataataagagacaacttacttgaattagcaccagtttcttatctggtctacctcatagtgagttgctaatttcaggcctctttcctttgctatcatagaaagtttggtagtattaatacaagagaatctggctaatttgattatcaccattacatttgagtctaaggtcataataagagcctaaattcttactattgtacatcaacatatatttaaaaatctcattgtaagttggaaataaaaagtttgcagctaagaagcttcttgtttagaaataaaagttcaccattcaaacaagccattgaagtacatattaacctttgatgtatatttgagatttcaactgaataaattaggagctcacttttgccttccctaagtgagacaataaagtcaagtaaagtctagtttataagaaatcggtcttattttcataatctcaaaattataatctcctgactatatatatattacctataataagagctaatgaatcagtggcctgatcaattcaggtctttgcattacttctcacagttgcatggattttattggtgcttgggcttcagcatgttacatctcttgcatgactatat

SEQ ID NO: 6793 - DNA, 1094 bp, mus musculus; identical to SEQ ID NO: 6792

SEQ ID NO: 6794 - DNA, 880 bp, mus musculus
ctgcaaggccgccaacatggccacagactctcacttcacatattaaaaatgtacagaaataacggggtagaaatgctgaaaattagagcaaggctgacaagagataaagcaatgcaattagaagtgaagttgtgagtcagtagggccacccatgaaggtgggcatggaggcaatgcaagtcgccatcagccagaagccacacaggcctggcctgccagcacagaggtcagttcctattttgaatctgtaaaaatacaattgacagggactcctgatgcccgtgcagcagccaagctaagggtttctctttttcccaatgaatattttcattctactgttattatttgaggtcccttcagataaatcatgtatgagccaacactatgtcttccttataccaacatcatttctctttgaccaactgttcatgaactaattcacatttacacacaatagcaggcctgaacactgaggaaaaagaactgggcttagaatcaaaagaacctaaattcaagccccggctttgccattcactaactttgacaacagcacattatcattcagcctctgtacactgcagggtcctcgcctgcacctgctcctgctgtgtggtgctggcgggaggtctggatgaagacgctgtggagggctgcacaaatggaagggatttcccaggaggatggcatttgaacaaggtttctgacaggctgtgcttcagctttcaaagtcccagtaagctgtaggaagcacaggtgtcctccttcactcccatctccctgcatcaccaaggtactcagcctcaaacgccaccaccgctgccctgttcttgctgccttctagggatctctgtagccttggaaaagtacaagggatgcttatc

SEQ ID NO: 6795 - DNA, 999 bp, mus musculus
tggtgcattgtctgaggcctgtgctaggcaagctaccccagtcttacagtaggggttttccagccatggtagttttcacactaaaatgctgatcattcttgtgccttgtctaactaaagtaagttaaattatttgtcctgaaagtacatcaaaagagatttgctactgtgttgttgacacacattctgttaatcctgagattttcctctgcttcaaaagttgcgctcggttgattgacgacacagatacaatatctgctatccagagttaaaactcagctgcatgccataatgaaagaaaagctgtatttatgatgctgggacacaattcatcagagtccagtaatggatccccagccaatctgtattgttttagctgactgaagtgcaccatgggagtgctgtctttcactaataatgctgtcttctgtagatcgaggccccgaaagccatggcagcagaccttctcagaagtttttggcactcgttggaagatcctgtggttcattcctttcaggcagaggcaaccactgcgagttccctaccactttgccaatcatgtctaaacagatggatggtgggcacagatgggtcctccatgctggcaatgcgttacaggttttatgataatagaactatgacagtcttcaagtcaattaaaatccacccaccagtcttaggcatcataatgtgccccaggctttattttaatagtgatcttgatcctgttgtgggactaatacaagatctatatttaagttttaaagcatgtttactttcaaattagctttccacagggatttcttgaaatgcttttgttattaaactcaaaaggcagtgattaggatgaaataattgtacataatttattttagtactgacagtgttacagattctaatttatggtaaatttcagatgtttatttaaaattttcacttttaaacagtaaccaaatctaaatttaattattcaggttttacaaaagttgatacaccttct

SEQ ID NO: 6796 - DNA, 1622 bp, mus musculus
gatagttagctgcattgtttacatgtagatctttttacattatatggtaatgtacactgctgatacatatagttcacaaaataagatcctttggaacaattatgcacaagacatacgatattggatttacacactggatcccaggatgtgactgactgggaaaaaacgttggactaggcatgttcagtgaaggagccaggaagttatataacacacggtaaacatccacctggctcaaggggcaaatgcagcatgtacagcattggcagtggtgcatcagaggtggcagaactacttcacactaaccagtttaggactacacaagattaataccatccagcatcaggatatagctgtggattttacaaatcattcctatttctaacttgaggagttgatgtttttcccagtccatcttaaaatattactgctttaatcacagatcagataaaaaggacagcatgtacaacctccaactagaatcctgttgtagcctagacagtaaaatgatatgacatcagaagactttaaaattgcagctctttttggatcccccaaagtgtatctgcactcttcttcaaacaggcctcttcctcaggagtcagagtcactttcacaaggtctgagattccattctgtcccaaaatgcaaggaaccctaaggacgacatcatcctttattccatagagacccttaatcatggtgaaaactgggtgcacctgcctaagattcttcactgtacctctgccaaatctgctacagagagtccaatggcccaggatgtgtagcctttgagtttgatcacctcataagcactctcaaccaccagtttgtgaacctctttccactgttccttatgtttatcagtctctaaatctgggtgcggagtcttcagggagacaccagcaacattctttccactccatacaggtgcactggaatctccatgttccccaaggacccacccatgacagcttaatgggtgaactcccagcctttcccccatcaggtaacggaattgggctgaatccagattgcaaccacttccaataacatggtttttgggaaaaccacttatcttccaagccacgtaggtcaagatatccactggatttgaaacaataagcaacttgcagttcgggctgtattttacaacattaagaatgatgaacttaaagatgttcacgttacgctggaccaaattgagacggctttcttcctcttgctgacatgtcccagccatgataattaccagtttggagtttgcagttccattatagtctttgccagagacaatctttggtgttctaaggaaaaggctgccatgttggagatccatcatctctcccttcaatttgtcttcgatgacatcaacaagatcaagttcatctgccaagtccttcattaagatattgatggcacaggccatgccaacagcaccaaccccaacaactgtaatcttattctgggcggtctgttcttcctttagaagattatgaagcagctgatccttgagagttgccacattggacttggaaccaaaaggaatcaggaatgcacatcaggcagtcgtcggggcgtgtggcaatgagatctggaatcagcggcagtggctgcagcac

SEQ ID NO: 6797 - DNA, 1475 bp, mus musculus
acatatagttcacaaaataagatcctttggaacaattatgcacaagacatacgatattggatttacacactggatcccaggatgtgactgactgggaaaaaacgttggactaggcatgttcagtgaaggagccaggaagttatataacacacggtaaacatccacctggctcaaggggcaaatgcagcatgtacagcattggcagtggtgcatcagaggtggcagaactacttcacactaaccagtttaggactacacaagattaataccatccagcatcaggatatagctgtggattttacaaatcattcctatttctaacttgaggagttgatgtttttcccagtccatcttaaaatattactgctttaatcacagatcagataaaaaggacagcatgtacaacctccaactagaatcctgttgtagcctagacagtaaaatgatatgacatcagaagactttaaaattgcagctctttttggatcccccaaagtgtatctgcactcttcttcaaacaggcctcttcctcaggagtcagagtcactttcacaaggtctgagattccattctgtcccaaaatgcaaggaaccctaaggacgacatcatcctttattccatagagacccttaatcatggtgaaaactgggtgcacctgcctaagattcttcactgtacctctgccaaatctgctacagagagtccaatggcccaggatgtgtagcctttgagtttgatcacctcataagcactctcaaccaccagtttgtgaacctctttccactgttccttatgtttatcagtctctaaatctgggtgcggagtcttcagggagacaccagcaacattctttccactccatacaggtgcactggaatctccatgttccccaaggacccacccatgacagcttaatgggtgaactcccagcctttcccccatcaggtaacggaattgggctgaatccagattgcaaccacttccaataacatggtttttgggaaaaccacttatcttccaagccacgtaggtcaagatatccactggatttgaaacaataagcaacttgcagttcgggctgtattttacaacattaagaatgatgaacttaaagatgttcacgttacgctggaccaaattgagacggctttcttcctcttgctgacatgtcccagccatgataattaccagtttggagtttgcagttccattatagtctttgccagagacaatctttggtgttctaaggaaaaggctgccatgttggagatccatcatctctcccttcaatttgtcttcgatgacatcaacaagatcaagttcatctgccaagtccttcattaagatattgatggcacaggccatgccaacagcaccaaccccaacaactgtaatcttattctgggcggtctgttcttcctttagaagattatgaagcagctgatccttgagagttgccacattggacttggaac

SEQ ID NO: 6798 - DNA, 125 bp, mus musculus
taatacctgggcatatattctgttataatgtcatggttgatattcttgggtgttgctcatttggtttttttttttttaataactatttcaaagcacctgctacgtactgaattgtgtccccccaa

SEQ ID NO: 6799 - DNA, 1805 bp, mus musculus
aaaacaagtggaattacctctgaaattgcagctaactattgctacctctataccagaaatattttttcatcttttcataccacatgtgaaaactttgttgttgttgttgttttttgttttgagacggtcttactctgtctgccaggctggagtgcagtggcacaatcatggctcactgcaaccttaacctcccaggctcaagtgagcttcctgccttagcctcccaagtagctgggaccacaggcatgtgccaccactcccagctaatttttgtatttttttttttgtagagacggggccgctctgtgttttacaggctggtcttgaactcttgggctcaaacaatcctcctgccttagcctcccaaagagctgggattacaggtgtgagccattgcacctggccctgaaaattcttaagtggggataagggataacagaacttcttggttcattgttacctacttttcttttttctttctttttttaaagaaatgctgcagcactcattattttttcccctgtttccctctcctccccaaatttcctgtcagcaactttgttttctgttcattagaattcaaacacaatttaaattaatttcccttgccaccttctctgtggttagatacacctttggtgagttcacaaatgactcattggactatgatgatttttgttgatttcttacatggtccaactgggttatccttagagatgccttagaaccagtggaggtgttggctgtaggattagatggacttaacgcagattactggggatctcctggtattcatatccctgtagttgctaaccaggcttggatttatcctggattggacctttttttcactatcagggcctaaggagcctttttaggcattttatccaacctcctcccagccaggccctcattacatcctaagaataagattttgtctggcagggttgaactttaaaggaccataaaccgttgtaatatctaaattttttcacccctattgaaaatgcatgatttagacccaatatgtggatgcacaaattattaaatgacttagctatttatattccacccaatagtgtgggtacatttttctgagagttgctgaacagcagtggtattttgaaaaatactactcaccttgaggaggttacattgaatttgtcttttttggcttagttttaaaatgaagctgattacttggtggtatacttagatggtctttgataggaccctctcctgtcctgccttcccccatggaagtatcattatagctatttcctatacattctcactgcaaataaaattcagaaaatacttagctcgtaagagtttctgtctctggccccgcgcggtggctcacgcctgtaatcccagcactttgggaggccgaggtgggcggatcacgaggtcaggaaatccagaccgtcctggctaatgcggtgaaaccccgtctctactgaaaatacaaaaaattagccgggcgtggtggcaggtgcctgtagtcccagctactcgggaggctgaggcaagagaatggtgtgaacccgggaggcggagcaggcagtgagccgggatggtgccactacactctagtcagggcgacagagcgagactctgtgtcaaaaaaaaaaaaaaaatagtttatgtctccaaaaattgaggtattctatgatatttatgtgacttctaccttcagttgtgattgtagaatgccttcacagatttaaaatagataccaataaaatggaattatatataaatggcatggttaagaatgattgttctcttgatttgttttcaag

SEQ ID NO: 6800 - DNA, 6771 bp, mus musculus
gaaagaaaagactggccaacttagagtattttcatatccctattcctagtaggttttatttatgcaatatgcatttattgagcagcttattgcaagcactgtatgaaacatatactttaaaagtagatcatttctgcttgctgcaattcctattttaactttatatataatatacacaggaactatctaaccagagaaataaacgatataaggaatacttcaaaaaaaatgtgctgaagacattaagagtgtgatgagtgaccatggagtcaatgtattagatctagatttccttttccaggtttttttggttgggctaaataaataaataaagctgctcttgtttgggtttcccattcctctcagaactcatccccagcagattcaaataactttcaagattgtattcaaactcaagaatcactacaggtgtgtcaagtcactataagattcaaatcgttttgaaaagatgaccctgggagtggtgagatcaacatagaatgcaagttgactaggaatggggaagaatcatatagaaattatgtttatggcagccacagtgggaggacatgataacatggaatatgcaggggaagaggaggaatcgggaacagttacagtaggatccatggtgcctctgctagcaatggagctgttcagaaaagctcctttgccttggaagaagcctttctctcctcttctggctctctctctcttcctctggttctctccctccccactctttttcctttatctattaaatttcagagattgctttgatgtccaaatccagatgtgaggacatgaaaggaagagaggaaaatagaataaaagagataatggggaaatggaaggaaaaatagaactacaatttgtcacactcatcaaaagggaaaggacaggccgtctgtttggacagcctactcccatagccacataattttcctttcactgggtccctgtatggactttgagaagcagatctctctatgccataaacctagggttttttggggcaaagactgactgcccttttctttatcctcccagtcccttattatttgaatccctgtattaaaattgtttgcacacactcatgttttatcagattttcttgtaaggatgggcaaaatgcattacaattctccactgtatacatatactaatttagtgctatttagtagcttctttttgttgtaggtaataataacaaccatgatgatagcagaaaagagctattgaatttggcggggagaaatgtgactgataaacctactgaagaggacagttggagtgatagtgaaactgtaactggaaaaaaaatagggttctgagaagtaggatgtgtaggaagaaaaaaagaagagcatttgtttgaactcagtgctaaagtgatgaccttagtctcctcctttgaccgtggggggagaaaaaagcatattaaaccctgagaataaaaaagtggctaagtcaagttatttttttaaataagagatttgaacatatttacaggcagaaaggaagacaccagtagagaagacattgagaaagttgacaggggaacacatgattattatagcagaaaatgaagaggacagaaatttaacaaaagcaacatgcaccctccaagggcactgctgtctctctctgacccctgtatctcatggtcccctgcgctggtcctcctagttgtgccagtaacaatgttaacccgtcttgctttcccattccagcttgatgaagtcatagaaagcattctcttcagggagaatgagttgagattcctaagagcaagaatcttgctttcttgctgcagaggtcaccctccagcatctttttcttcttgctttttcaacagtcccagcagtgtatatgcctcgtggcccagggtctaggactgtacaaattgatatttgtagaaccccagtgctggaaccaaaatggcagaggagaagcagtgctcccctgtcctgcttctcttctttttcctcctccttccctcaagcctgcctagactttctgtacacccacattctccaagttgtcccgcctttattcctggccaagtctgcatttgctgtgactatcctttgattaaggtacttgacaccaaggagtgggtgacacacaagatacatcttttcagaagttattagcttctccaaaaaatggcattgctacctcttcataatgcccagtttaagaatgcatgaaagactagtaatcagtccttgtttcataatagttcctataagatgaaaggcttaaattaaatgatatatgggaacccttaatatggtacctgtcatacagtaagcactcaataaatgttggctgttattatttatattgtttgttttgaggaatgaggggtcacagccaccagtgtccatcaaacagtaaaattcgtagtcagttcactagttcttcaatggaagtggttctacccttgcgcagcctgtgtgtagtcctttctgtgggaacagactatccaattgctctagtggtgtatcctccaatgcttttggtggcaaggatcaaaactgcctccgggaaggccatctgtgtgccaggctacatgttaggcacttttatgattttattttatcctcctaacatcctaaaagacaggttattgtagtcttatctttcttatgaggagctagggtcaaggctaagttccatgcttgtaagcagcaggactgggaacaaacacaagttgtctgactccacgtctcatgctgtttccagggacatagtcaaaagttttttaaaaattattctctttgaagaagtaatgatacatttgcaaggagacatttcttctagtggtgttttctttggccttataatctgaaaagagctggtactggttgacctttgatagttaaatccatcactgtaaagcaatttgtttacaagcaaatgccatcagccataagccctattggtaatggacataagacattagtgtcacacttgaaaacttgtttatctcatggcccttttaagtgacttctgtttactttgctaaaattgtagtcatatgttcatttggtaagatgtttagcagatttttaattagatggccatagtgagtgatttcgtccacacatttttctctttttttggaaattattttagctgattcacgtcctgtgaaaagttaaaaactgtatttttgaaacttaaaagaaaaaaaacaattcatacatcacttcctattttctgttaggactggtcaaataagtttgtatattttagaacattgtgccattccacgggtggacgttttgtaacacagcttcattccagggacgttgccattcatctactacatagagcttcagtttgtggtaccttatatgaagttagagaggtctccagatttgcattcccctttcttcctacccactcctaaacaaactgctaagataaatccatttggctgggaattagatgagctactgatgtgaataatttataaaataacatgagtttatttgcattttaaggcatacgtgtatgtgtgtgtgtgtgtgtttattccttacctcatcgtaaaagaggagtccatgaaagttgtagttctggaaaacttagctcagagatcttaatggaataaatatattcaggcttaattgtaaaaatgtggctgttgcagccaaccaaccagagtagatgggcctcctccgggattccttgatgaaatttgggaaaaactacctggtacggcagggatgcagagagcctgagcttggcctaatctctgctggccttttcagcttttgatagtctcagtagatgaggatggctttatttgggggtgctcttcaaacccgatcatctatactcaacttttcaagttcttattttcttccaaatcctgatcacagcctccagtctccatgaatctgattccgtgaatctctccattctcatctcacacctctcactccttgcttactaaccctagtccttcagttcctcacaccaaactcctttgcaccttagggactttgcccaagctgttccctcagcctgaattgctctctattcctgccctcaacctgaccagcttcttcatgccctcaggcttcagcacaagtgtcccctcctcaaagaagccttccagaactgtactacctagagtaggcccctatagcttcactccctcacacacatgctaattctctatctttgtctcatgttcgtttccttcaaagtgcttttaacacatctggcaactgcatttatctgattgtatacttttgttttcctctttttcttctaccagtgaaagctaggaaagtagagattgtgactgtcttattcagagtaatgactgagtaagcaaatgaatgagtgaaggaagaaaatgcctttaaaagtacggcttctttaaagtagttttttccaattctgtgaagaaaggcattggtagcttgatggggatggcattgaatctgtaaattaccttgggcagtatggccattttcacaagactgattcttccaacccatgagcatggaatgttcttccatttgtttgtatcctcttttatttccttgagcagtggtttgtagttctccttgaagaggtccttcacatcccttgtaagttggattcctaggtattttattctctttgaagcaattgtgagtgggagttcactcatgatttggctctctgtttgtgtgttgttggtgtataagaatgcttgtgatttttgtacattgattttgtatcctgagactttgctgaagttgcttatcagcttaaggagattttgggctgagacaatgcggttttctagatatacaatcatgtcgtctgcaaacagggacaatttgacttcctcttttcctaattgaataccctttatttccttctcctgcctaattgccctggccagaacttccaacactatgttgaataggagtggtgagagagggcatccctgtcttgtgccagttttcaaagggaaataccaaaaaagagcccgcatcgccaagtcaatcctaaggcaaaagaacaaagctggaggcatcacactacctgacttcaaactatactacaaggctacagtaacgaagacagcatggtactggtaccaaaacagagatatagatcaatggaacagaacagagccctcagaaataatgccgcatatctacaacgatctgatctttgacaaacctgagaaaaacaagcaatggggaaaggattccctatttaatgaatggtgctgggaaaactggctagccatatgtagaaagctgaaattggatcccttccttacaccttatacaaaaatcaattcaagatggattgaaggcttaaacgttagacctaaaaccataaaaaccctagaagaaaacctaggcattaccattcaggacataggcatgggcaaggacttcatgtctaaaacaccaaaagcaatggcaacaaaagccaaaattgacaaatgggatctcattaaactaaagagcttctgcacagcaaaagaaactaccatcagagtgaacaggcaacctacaaaatgggagaaaattttcgcaacctactcatctgacaaagggctaatatccagaatctacaatgaactccaacaaatttacaagaaaaaaacaaacaaccccatcaaaaagtgggcgaaggacatgaacagacacttctcaaaaggagacatttatgcagccaaaaaacacatgaaaaaatgctcatcatcactggccatcagagaaatgcaaatcaaaaccacaatgagataccatctcacaccagttagaatggcagtcattaaaaagtcaggaaacaacaggtgctggagaggatgtggagaaataggaacacttttacactgttggtgggactgtaaactagttcaaccattgtggaagtcagtgtggcgattcctcagggatctagaactggaaataccatttgacccagccatcccattactgggtatatacccaaaggactataaatcatgctgctataaagacacatgcacacgtatgtttattgcggcattattcacaacagcaaagacttggaaccaacccaaatgtccaacaatgatagactggattaagaaaatgtggcacatatacaccatggaatactatgcagccataaaaaatgatgagttcatgtcctttgcagggacatggatgacattggaaatcatcattctcagtaaactatcgcaagaacaaaaaaccaaacaccgcatattctcactcataggtgggaattgaacaatgagaacacatggacacaggaaggggaacatcacactctggggactgttgtggggtcgggggaggcgggagggatagcattggaagatatacctaatgctagatgacgagttagtgggtgcagtgcaccagcatggcacatgtatacatatgtaactaacctgcacaatgtgcacatgtaccctaaaacttaaagtgtaataataataaaaaaagaaaaaaagtacggcttctctgttaggatagtctcactttccctaggaattgaaatatgcaggtcagtgtgtattttgaaaataaaaataaaaaatgaatatattattgaaataatgaacccatcaaatataagacaattgatcactaaatggagcaatgcattttccttccatatttattcagaagtgttagcattttcacaagtaatatagggcaatgaaagaaaaaacaatctttttgaagtgacctaagattatgaagttatttgtattttgacagtttt

SEQ ID NO: 6801 - DNA, 686 bp, mus musculus
atagaggattacacagaaaatctttgtataatatcttaatttggctgtagattatacattcagaaaacattcttctttggggattgtaaaaatctaccatagttcctggttatttgatttgtattttatttgtttcttgagacagagtcttgctctgtcactgcccaggatggagtgtggtggtgtgatcacagctcactgaagcctcaagctcccaagctcaagtgatcttcccaccttggcctcccgagtagctgggaccgcagacatgtgccattatgcccagctaatttatatattttgtagagacaggttctccctattgttgcctaggctagtcttgagctcctgagcttaagtgatcctctagcctcagactcccgaagtgctggtatttgggagccactgtgcccagcctgtttttttggtttgtttatttttaaaagaatttttttgcttcattttctttaagtcatagattacaatgacagagagtgcaaatgaaggaacaaattagctttgtagggaataatgaggtaaaagttctaattcctttactattagatttaattattatttttatttttattttttttcgtggggggtgcgcgagaaggataaagaagcccaaaatagtatagtaggcttttgtgttaagatccatttcagtatatatatgttttctt

SEQ ID NO: 6802 - DNA, 686 bp, mus musculus; identical to SEQ ID NO: 6801

SEQ ID NO: 6803 - DNA, 686 bp, mus musculus; identical to SEQ ID NO: 6801

SEQ ID NO: 6804 - DNA, 1048 bp, mus musculus
ttcctatgatgtattaaggcaaaaatgttggaagcttttgaaatatccaaaagtcttcatgtttttgtttaatgactgattataattctattaccaaaaatatcacacataactaattatgtccttccagatataacatttatcatcaggtaagagtgaaatgagcaatacataatcacttcctatttctaaatatttttcctaatctttgacaaaaggcccatttcaatttggttcagcatcctttgagtgcctagcatgtgccagaataacaaaattagattagagacaataaatgcttgaaggaaatcagattatattttacgaaatgatagtaaatggaaaacttgaggggtttaaataactcagttaatatgttgcataatacatattcacaatgtgtctggtttatgttgttgttattgtttatccttataaatttttgtacaatatcactttttaaaataatataacttgtcaaaaaattactcctttatataggaacatcatagaagggatattatccttctaggagctacagttttgcaaattgttaatggcttgggttttgacttcagacacatggatttgaacctgatttcacgggtccttggacaagttactttattgcttctaaaccttgattttctaatctataaaattgtgataataatgcctaatttagaatcactgtgaggttagatgtaatcataagtataaaatactcaaaacttcctgacatggaggaagcagtcaatagatggtaactacaattatgagaacaaaaatggtaacctatcacatttatttgatggagccagaattagaattcctgcctttgcatactgtctcttaaatattttcattagctctcattaatgtcccaactgacatatttcatgataaatattctctcacatttctaattgcaaccaagtttaaaaggcgccaaaaggcataaaatcatctatctgccctgttatgtgacttcaatatatttcccaatacaatttcatgattcacccataaaaagttgtgggtcttcaaa

SEQ ID NO: 6805 - DNA, 946 bp, mus musculus
agcactatatttttcattgggaaaagctgcctcaggctcctgtggggctgcaactgggtagcatcttctaatctcttctccagagttgaacagatggcagctccctgattggaaacttgattcaatgctgcatttagtgtgattaaaacaaatggtgagcctggagctgggtgtatacaccccacagaacaggtggcaaaatggaaagtgaaggtaacctgtttatttgtctacacaacactaaagaaatggcttgatgagtattctccttactagtgtgaatctttttttttttccttcatcaaatgaattgaattgaccagctgtattggtgtcctgtagacacagcctgaaaagtctcctgctctaacaggcttcaagctagtaggggtctgtagtgacgcagcaggtgcagagagatctaagcccttgaatgtaatgtatacacagagctctgcagacagccccatggagctaccacataagatggtttttcatgtgtaaatgagaaggtcttttcatttttcaagctattgcattatatccccttctgctgaaagacaaatacaggaaatcaaccaacactgagttaattacagagtgaccagttctataatcaggattgcagatttcagtcttgaggtttaagtgcacaagcatattttgcactttggtactcatagttcaagccatcttgggaagtcatggttttcatgattttgctccctaggacatcagtgctgggagcctattggctttgaatgaaatgactaccagaatgggggttgaaaacaggaaatacttttagggtgaagaattacgaagagctcaatggctgatttacaatgtgagaaattacttggagtggtgttttaatagaaatttatttccttgaaagttgctgctagaaagcgatgttgaagtcttctagaatgaatagaagaaa

SEQ ID NO: 6806 - DNA, 188 bp, mus musculus
atatacataaaatatatgtttcaatcatatatgtttggaaatttgatctatatatacaaatatattttaaaaatttatattttgtttaagtttttcttctgaatttaaaaaaagtagcaccataatttcttgcctttctcacattaaccacagaataaaattttgtttatcagatggcgggtttcttg

SEQ ID NO: 6807 - DNA, 291 bp, mus musculus
gagcagggggatatagaataaatgctttgtggaatacagaatgatgtaataattatgtttcccagaaagggattgtactatgaattcttcagtttggcgccttcctcagttaacaggtgttagaacctttatatgtcactttatgtggattcataatgttcctttgaaaagcttcataaaactctgttgtataaatacactatacaattttatctaattcctttttgatggatattaagactacatccatattttcactattatagttatctcaaaaataagatattctta

SEQ ID NO: 6808 - DNA, 806 bp, mus musculus
atcttgttatatccttccctgaggagttctataacatgtccaaaagagcaaagaactcaaaagatgaaaataaggaagaacaaatcaggatattagaatgacagagaagtcctctatgacattagatgtaacaggctgcgttgcccaagtctgagtttttccacactctcacagcatgttcaagtcattttattcattttataagggtccattttacgtagagtagaatggtatggctaccatgccttctttctggctcacgttgttgcatgcaatgacaaaaactacatttcagatacagttttcaaataaacaataaaatgttgctctcctcaaaaaaatgtttttctgtattgctacataagtaaagatttagaaacatatcaaatgcagatttgattaattaagaattaggaaattctgctcaaagaccccagatgaaaaatagtaataactgactgttgagaacctcaaagaattaataaatacaagagattattatttaggttataagaaataacggggaatcaaaaagaatttggctgtggatataaagaagcaattaacacagatgggcaacaaaatgccagtagttatatgaagaggtacttctttcactggttatcagaaaagtcacaaataaagcaacaataggatatcttttttgcccatctttgtgaagaagtctcaaaggctacagcccttacttccaaattctcagagatatctatgtggctagtctcatttgcagaacaagtatgatgccccccacccagttgtcagagattcttattgttgcagtcttc

SEQ ID NO: 6809 - DNA, 516 bp, mus musculus
gctcctctaataagaagaaaaaatcattttccaaatagcagttgggtgtcttggaaaagtaagtggatctccaggatgacaacaaaggaaaagattttcttttcttatattagaggaaagaatatacttctttttaattttataataactttttgaggtaggtattacctttttacacctaaagaaattgaagaactagggtgggagtgggggatcataaagcaagcaaatggcagatccaggatttgaactcatcactgtcagatttcaaaatccctgttctctttattacagtagtatgcattgtgtagacaataactatgggctgtaggttctgcttcttgctttgaaatgcattggtgtcatattacttgtggtttcataattactagaagaaaagaaggacatggtaggaaatgcaagaacttctaactgaatgaaaagatggcagcagatttgagaaagaattcatagagaatttccagaacttagactaaattaatagagaaaggaagc

SEQ ID NO: 6810 - DNA, 1266 bp, mus musculus
tccatccatccaatggaataaaaggtttacttactcatattggctgacttgctttgcaaacagtatcagataatatgaaatttattttgaggtttaacttacataaagtacatatatcttaaatgtacagctcagaggatctttacatatgtgcgcacacatataaagccaccaagataaagatataaaacattttcagcatctcaaaagacatcctcatgttccccaccattaatattccccaggactaaatattattctgacttctatcactttaggttagctgtgcctactttggggtcttttatacatctttcatgtctctacttatgttcagtattccctctgtcttcttaagtacatggaatatggttataatcactgtttttatatctttttatactaattctataatctgtgtcatttctgagttttaattgattgatttttctcctcattatgggttatactttccagcttctttacatgcatgataatttttattagataccagatattttaacctttagggtactggctatttttttctataaatattcttgagctttattctgggacatggttcagttacatggaaacagttgaattattttgggtcttgctttgagctttattaggtggaaccagagctagggctaatattttgcaactactgagttagtactctacccaattctctgtaaattatgaggtttttatattcggggtgatgggaaaaggagccagtctggtcacacagtgatctccaaggattattctcactaatctttttggatggttctttcccttacatgcaagcaccaataagtatttggctgaagtctcaaaggagtccttctcaagaatctttggatttctctcatctccagtacttggccctgagaactctaactaccttgacttcctagactggcagcttcatctcctgtactagagaagctgcagaccttcagcagaccttcatctacattcttcctctgagcactgcaatctagaaactctctccaggcttcacctactttctttctcatctctcaaagatcactgtctgttgcctgctgtctagtatcttgaaaaccactgtttcatatattttgtctgaaattgtttgtttcaggaagaataaatctggtcccaggtcatcgcccttggtcagaagtagaagtcgttgttttgcctgtttttgaactttatttaaatgcaatcatattgtatgttctcttttgcatcagacttcatcaactc

SEQ ID NO: 6811 - DNA, 339 bp, mus musculus
attttaccaaatgagtttgtggtaccatttattttgtctttactgttgtatctgtaattacatgaatgtttcctttacttctccatgtaaataaccatactagtaaatttataggaggccaaaatccaagggtagagtgcactgcaattgccatttgtctcgttctaattcttcaccaaactcctgtttctgttttctacatggcagtagttcttcatattctggattatagtttctataaactgcccaagtactaatagccttcatttttattctttatgctccttagtaaatctttgaataccttgcagtctgtgtgtatgtgtggtagtagttgtg

SEQ ID NO: 6812 - DNA, 914 bp, mus musculus
ggatataagtcatcgatgttgtgttatgtgcaaggcttccaatattaaagtctaacttagttggaaagaagatttcatgcttgttgatattcctctcaaaggcaattatctgctgctatcatgtctgagttcccagaaggcccagaactgtagtattttattaatgatggtctgtaagaagatatatattgaattgtgttatttcattaaaaataaattccacacagtttccaaggatataccagcttccctaataaatccaaaatgccatccctcctttctctctgggtccattttcttttgccttctctgaatctgtgcctaagcctagatgtagttatctggaaaggtatgctaatgaaggacatgcacatatatttttccattatcatttcctggtttttatggaaagaaacacaattcatagagtatttagtacatttgagacttccagggcaagtttatgttttgaatatttatcttttgttcgctccatttccttctgcttcataattttccctaagctgcatataccttctttccagccacaaagcctaattttatttgcccagaaagaagaaaataggattatgaagcataacagtatccgtgccttttctatatttcttaattcagagcagagtcatgaagttgaatacagcaatccctccccactgacacacctgattgtgagttctccttatataaaatcaacctgtatgtgaatttgcttttcaacagctgtgagaaaatggaatctagtctaggtaagcccagtgaattttaaatcacttcaggtgaggttaattatattacagaaggagcagagctggaagtagcaacttaggtaaggttaaatgctacaggaatagagattataaacactgaatctttaaaagaatgaaaggaaggta

SEQ ID NO: 6813 - DNA, 914 bp, mus musculus; identical to SEQ ID NO: 6812

SEQ ID NO: 6814 - DNA, 395 bp, mus musculus
atgagagaggtaaatgcacagtgagcttctgactatgtcttatgatagaacaaaactcatgatccagtgttttgtcattatttctgatggttggtgtgtgtgtgtgcctgcgtgtgtgtgtgtgtttgatacagcattattttctaggattttgtcattataactctaaacgtcattagagggatattgtacctccagtgggctaatttaattagagaacaccaatgggacattgtctctgaacttaataagatcctatatacagacaaaagttggcacatagatacattaaaatttattgttttcagtattaataaatccttatctaaaacattttatttttttataccaattgaaagattttttaaagaattaagagaaattatctatttatt

SEQ ID NO: 6815 - DNA, 2210 bp, mus musculus
taacaatatatcaatggaatgtacagaatctggaatatggaacaaataaactaatttgttttggcagtaacctgtgggacaaaataggaaagggagaaggaaactatagattaaaagagatttaagagtacataaactaatgataatgtatagatcttgtttggatcttaatttaagcaaaccaaatattagaaaaatgttttaaagactgggaaggaaatttagacttaaagtaaatatttgattgtcttattgttaactttttaaaagtgtgtgatggttaatattgagtatcaacttgattggattgaaggatgcaaagtattgctcctgggtgtgtctgtgagggtgttgccaaaggagattagcatttgagtcagtagactgggagaggcagacccaacctcaatctcggtgtgcatcatctaatcacctttcagcattaaaagcaggcatgaaaagagcagactacctgagtcttccagactccatcttcctctcatgcaggatgcttcctgccctcaaacgtcagactccaagattttcagcttttggactcttggacttacaccagtgtttaccaggggctcttaggccttcagccacagactgaaggctgcactgtcagctttcctactgttgaggttttgggacttggactggtttcctggttcctcagcttgcagataacctattgtgggacttcactgtgtgatcatgtgagtcaattctcctaataactcccctttgtatattcatctatcctattagctctgtccctttggagaaccctgactaatacaaagtgtaatggtaaaaattaattatgtatttttttaaattttcctttcagttccgggatacatgtgcagaacatgcaggtttgttacataggtatgtatacatgtgccatggtggtttgctgcacctatcaacccgtcatctaggtttaagccctgcatgcattagttatttgtcctaatgctctccttccccttggcccccaccccctgacaggccctggtgtgtgacatacccctccctgtgtccacgtgttctcattgtttaactcccgcttgtgagtgagaacatgcggtgtttggttttctgttcctgtgttagtttgctgagaatgatggcctccagcttcatccatatccctgtaaaggacatgacttcattcttttttatggctgcatagtattccatggacccagcaatctcattagtgggtatatacccaaagattataaatcattctactataaagacacatgcacatgtatgtttattgcagcactatttacaatagcaaagaaatggaaccaacccaaatgcccatcaatgatagactggtaattatgtttttaaaaatattacttatctttagagatatataataaaatatttacagatgaaatgatatgatgccttggatttgcttcaaaataatccagcgagtaaagggaaagcaggtgggtttagaaatgaaataagattaaccaggagttaataattgttgaagcttggtaatgggtacatgaagcttcattatattatttgctgcacttttgtatatgtgtgagagttctacaataaaaataaaatgttaaaggaaaataaatatatttgtaaattgcatgtgataccaagaatataattaaaaactacaccagaaacataaagaaaaattttagtcagtaatatggaagataaatttgagatactttcagagggacacattaagaagattaaaacaaataaaagtaagttagtgccttaataaaccacccccaaacaaagtggcttataatagcaataatttacttttgttcatggaactgtaagtcatctgaaagttggcttagactgacttgagtggcttggcaaaaagtccaggtctgctgaaatgtctgccttcctctgtggactaacaggctctctggggtatgatcgtattgttggtggcagaaacacaagatggcaagcccaaccatgccagaacatttcatgcctctgcttttgtcacatctactaacctcccttccattggacaatgtaaactatacatctggactgaatgacaagcagcgaggtgtactcttcttttactggaaagaacaagttcacatggaaaagcgggtggttacagggtagcataaggaagtggggtagatagttatatatgtttgccaccttcatcacatgtt

SEQ ID NO: 6816 - DNA, 697 bp, mus musculus
gatttttacctgaatgattcttagcctctgctgattgaagtgtccaggacctatcatgactcctgggatagaaatagagtgccagggcttgtcattagacttgcctaccctaggtggagggtcctaatcacacatactgaaagcaggaatttagtattcagcaaggcctgatttagaaatcggcaagacctgatttctgcaaaatattgcaaacaccagtccctacatttcagaaagctaaataacatgattattaggagaagcagtgtatcattcaaaatgagaaataacatagaagacagaagactgtcaatgagcagtaaaaatcaagttatcatttacagtttcataaatagagttttatggagagattaagtggtagtgaagaaagactacctttacttttaggttactgaagtacaaatgatggggtgtaacaaacagaaacccagaacttgaactgggcacacaatgatgacccatactgaagtgtcagacagtaaagggatgttttgatagaggggtgagcccagcagaaggactagaaggctgtgtcttggagaacaaattcagtctagtgacaagcgcaatacctgagcaatgattcagtgttacaagttataagagtatatctcaaacaagcataatcatataggaaagctgagattccatggatgcttggctggttttcctcata

SEQ ID NO: 6817 - DNA, 287 bp, mus musculus
gttatttttgttgttgttgttgaagattttctaggcttttctttatttgtttgcatttactctctgtaaaacaatatgctgttattggactttactatcttaccttaaaattccatacatcgtcttttgcctttcaattacttttgcaatcaaactggcatttccatcatatattgattccccaattatttttaaaaaagatttatatgttcaatcaccaacttttctaattatggctctagtattaaatttgtaacatgaaactttcaactgctgagttatttcat

SEQ ID NO: 6818 - DNA, 349 bp, mus musculus
atataatattggtattaatgcttgatgttaaatcaaatgtttttgatttttttaaatattcataccagttttactcatgcatacaatttctaaattaactaatgttttttaaaaaaattcttgaaataagaattctaatacatgtagtaaggttgaatgacttgtgtagtaaagtaaatcatacttaaatacaaaaaataaaaactaagtagctttaattttgctcatgtcatgtactatgctcttttacatatttcgttttgttattttagattaaaactctggaatttagatattcaaactcataaataataaaactgaagctcagagaatataaactaagtgtaga

SEQ ID NO: 6819 - DNA, 337 bp, mus musculus
gtctagtgactgatacttagattatgtttatatttaacaaatttttatatttctctttattaagctactgttaggttagttcttttttcattgttgagtttttaagaactaagttgtgaaaatttacctatatattttctatggatagtatatatatatatatatataacacttggcttaacttggccaaaagaatgccccccaacccactccccctaaaatttgtcttatatatttaataaagggaatatatttaaaaactaatgataaaataattttaatgtttaaaattagccaaaatacagaataatttgtttactaattcatctcatttatg

SEQ ID NO: 6820 - DNA, 1045 bp, mus musculus
caggctgctaaattccgccagttctggggatcccgctcggagcttcggcgtttccaggacggagccattcgggaagctgtggtctgggaggcagcctctatgtcccagaagcgccttattccccaccaggtggtcacccacctcttggcactgtgagtgttggcatctggattccagaaggcagtgtgggctggggagccttttcaggggtctggcccaggcagttgagcgagaacatagccccaaattttctcactgtgtctctgcctctttttcagccatgctgacatcccagaaacctgtgtccactatgtggggggccccctggatgcacttatccaaggcctgaaagaggtaagggtcttggggtcaaggctagtgattgtagagtaatcaatctgcggggagagagtcctctcagccttggccagcttgcacttcctggcatgtccagcaggcggcggtgctggctctgctgcagcctgagctggggcagaatccaggtgaagctggccttctgtagggtccagcctcctgaccgtcttctccctctcagacctccagcacaggtgaggaggccctggtagcggcggtacgttgctacgacgacctcagtcgcctactgtgggggctagagggtctcccactgaccgtgtctgctgttcagggagctcacccagtgctgcgctacacagaggtgaggtgcaacggtgcaggtgacctttctgcttagtggccccacctctgctccagtcacccagtattccccacttccaactcctgactctgggcactccctcccagtcctaggcccattcctcagcccctcttcttccacaggtgttcccaccaactccagtccgtccagccttctccttctatgagactctgcgggagcggtcctcactgctgccccggctcgataagccctgtccggcctacgtggagcccatgaccggtaagagggcccttgggagggagtgggagggatagttccagctccaggccacagtatgagacctctgactcttcttcctcagtggtt

SEQ ID NO: 6821 - DNA, 301 bp, mus musculus
cacactcccttcaccctcagggcctgtttgctctcgcctggtagagtttccagggcaggagatgctcccagcttggcaggtaagagccacagaggggtacggtgggaatttcagctcaagggctgggctagttctgcaacagaatttggagtgggctgggccctataggcctgtatatccgacaagggtcacagagtctgggggcatggctgttcctgggttcccaggtgagcattgagtcttcccaaacaagatgccccatggactgtgcagctgttattgaaagatctcctgagctcct

SEQ ID NO: 6822 - DNA, 195 bp, mus musculus
cacactcccttcaccctcagggcctgtttgctctcgcctggtagagtttccagggcaggagatgctcccagcttggcaggtaagagccacagaggggtacggtgggaatttcagctcaagggctgggctagttctgcaacagaatttggagtgggctgggccctataggcctgtatatccgacaagggtcacaga

SEQ ID NO: 6823 - DNA, 1838 bp, mus musculus
ccctgagaggcggtaagtgtttggtttttttagactctaatctttagtatatgtaaccagatttcctttttcatgtattaatagacctgattaaggtaaatcatcacatagattctgttggagagtaggaatatctgtttatgtgtggatgacctgtggccattcctggacctgtagccactgccttcctcatggggtagaatcatgaaactgatcagcagtaggacggcaccttaagtacaacaggctgggaagacagtggtcctcaccccagccaactagttacctctctgaggcccatcttacccttctcttctgccagtaaaatacagatatcctctaacagattgtagtcctcccaaatcgtaaagatactgttgtttcaaagaaaatcctctgtatgaaaagttctgcagcataggtaactcttcaagttgctattcttttatagcaatttcttaaaggcattgtctattttcaagacaattggagaattagaatgtggacagggtattagatgatattatggaattattattaatttattgatgaagaaactgaggagatcaggaataaaatgatttatcaaagctatatagtacaaagctggagccagaacccaggtcttctcattcctaatcttatggtttttctcccacagtctggaagtgctggagaactacctagaaagccaactaacaccacagtagtttctattgaaaaatgcattcaggttccaaaatatttacataactgaccatttttagaacattatccgttagtatttggtaactgcttagcttctcaataatgtgtatatatgtggttgaactagtttccttaattttatttaacatttttcagtgcaatggtactatggtttttttaaatctcagtgtcagtgcttgaaatacttaactatctccaaccagaaaaatttcagaacaaaaggataaaatatgcctaataaacagccatatgtaacgtaaacttctcagcacactttatggtgttgtctttatggaagacaacatccttattcattggagatgtatactgaagtgtttcagagtaaagtgtcatgatatgttcagatgagttactttcagatggcttagcaaataagtaaatttaatgtattatctacatacattaaatttatgtgtatatatagatatatacattgatgtatatatatcagtgtatatctatatacatatgtacattaatatattatctatatccaaatagaaagcaaatgtggcaaaatatgaacaattgttgaatctaggaggatataccggtgttcattgtactcttctttgaacttttctatatatatgaaaaaaggatatatatatccttttttaaaaaggaaggggataaatagttttgctgagtggcagttgcctggtagaagtgtgacagctcctgtccagggggagatggctttggtgcttcctgaggaagagagaggtgatctggccctggcatacctgagtgaggcatcctaatgtgtatgaagggacaaaagttcacccttgtggaccccacaggccggaggcccagctctacttgtgccttgttttatgttttgtttcaggtgccgctcagtggaattggatctcaaccaagcacatatggaggagactccaaaaagaaagggagccaaagtgtttgggagccttgaaagggggttggataaggttatcactgtgctcaccaggagcaaaaggaagggttctgccagagacgggcccagaagactaaaggtaagcaggctggaattctttcatatggagcagaagctgactgctaatggactgcctttttttttt

SEQ ID NO: 6824 - DNA, 477 bp, mus musculus
ttcttttttaatttgaagaaaaaagttgggaaattattatgcttttacttttatgttacaaaagggtgttacttgcaactagcatctatgtatctaaataacgtttagtgacttaattctctgcaacagtaaaaagtactcaatttagattttagtaagttgactgttagatggttgctctttggcagaagtttaaatatatatattcatagatatttttacatctagcaatcagtaaatatttatctctttttcttgcactttgcatttaataatttaaaaggaaaaatttaacagatgataaatatcaaaccaaaaaagtcaacaaatcttaataatctcaaaatatacaagggcaaagtgatacataaaccaatacagaatacatttgtctgcacatttttgcataaattttaaaaagcatataattctgtaattttaattttatagagctttccctaaaatattttttatttt

SEQ ID NO: 6825 - DNA, 828 bp, mus musculus
tgtctgaacaaaatgctggaagccaggcatctcactgttctgctttgaaaaagtgagagtcccatggaatggattaagtatgaaacttcccccatgtgtgataaagtcccactgggaggtggtaacacacgctttccacgttttcaaagtgttccatcccagaacgtcaggaggattagggggtctgtgtcaccacagacagcagtcacatttgttgatggatcttcagtcttggccaatgttatcctgcctgctgatggcagaacaccctccaagacagtttctttgtaaagcctgaatagatgccttccctggccacttctctcagttcctagaaaaaatgcccaccttttttttttttttttttgagacggagtctagctgtgtcgcccaggctggagtgcagaggtgcaatctcggctcacagcaacctctgcctcccaggttaaagcgattctcccacctcagcctcctgagtagctgggattacaggcatgcaccaccatacccagctaatttttctatttttagtagagacggggtttctccatgttggtcaggctggtctcgaactcccgacttcaggtgatccacccgccttggcccttcaaagagctgggattataggcgtgagccaccgtgcctggccaaaaatgcccaccttttatgtcatctgagacaagcagccctaccaggtctagctaaaatgctgcaacagcttcaccatgccaagaggcaaagatgattccttgggaccatctgatacagagatggaaactgtccttcatcactaggcaaaggatcaaatggacataactaatcttagag

SEQ ID NO: 6826 - DNA, 487 bp, mus musculus
agtgaaacaaatttagattctggaaacatggtggacaaagtccatgcagagtctcctttaacctcaaatagaaaaattggttaaaatatactttttaaaaagtcataataaagatcaaaagaaagaaagagaaatcaccaaagtatgaaaaaagaagtggcagttcaaaagaaccagagaagaaagctgaaggcatggccttggcagctgtttgatttggagagtcccttgtgttaatgtccacgcatgcaggggcagttgatgtgactaaacctgggcaagcagggagctaaaacttaatccccatatattgctgacctcctcaagggctgcccctttcgcaagaaggggacttgagaaactccacccatcaagctctttccatgtcctggtatactggtgtgggggccaaaactactctagtgatgcagatgcttgggggagattgtctcaatggaaagatgtatgttggattgatgaagcacat

SEQ ID NO: 6827 - DNA, 153 bp, mus musculus
tctaaaatcagagcaaaatgtgtttctaaaatcagagcaaaatgtcttacaaatgtggtatgatcagagaccctgctagggtgaacaaaatcatgtgattttgttctctgcttactcaaacatttaacaagaacttgctatctgccaagcagg

SEQ ID NO: 6828 - DNA, 153 bp, mus musculus; identical to SEQ ID NO: 6827

SEQ ID NO: 6829 - DNA, 515 bp, mus musculus
gttctgaatatcactacaagacagagttacaaaccatttctattgttttatatattttctgagttttctctttttttaataagcatagagcatttttataaaaaggaacaaacaaacattataaagcaacccatcctagagtctttctgacagcaaaccatgaaagctgccagagtcgggaaggacataggaaaccgctagtgttgcctgggcgctggccaaataggtcacaggaattggtttcttcccccaccttcttctctgaagcaccagcaattttgagccagggtgatacatgtgatcaatgaaatgactgccatgggatgatcagatagactccagcagctgttctagaggtaaattctgattatttttgaattctgaatttttatgttcttgcaaatagtgccaaatagtctgttcccattcactcacagaagcttcagaaacataaatttacttgaccaccactgttaagtggatgtggaagttaatgtttaattatgaaggactgt

SEQ ID NO: 6830 - DNA, 732 bp, mus musculus
ttaagttccttatgcagcttattaaatttattgctcatagtatttgcaagaggaaatcatttggatgagaggtggaacaatacagtaataagactggtttttaaaaaccttctttgaaaatggtgacacatattggcatgtaagtgaatgtatttgctaaatagctattgcttttctgtcccatctgattatatacatcaagtcaaccaaattaataggcttctgattccagtttcactaactttatttccaatacctccttatcctgtcacttgttttcaaacatctgttctcaagagttgttcaagcctatgttaattgcttacactcctccatgatagacagcttagagctattcataagcctattataagtgttgagcagcaagggaaaatacccttaaaattaacaccagcaatatctattgtatgtttacattttcctttctaatatccagccattagctgagtcattagactactgtcatcacctcacctaaccagtgactattctttctctcacctcttttcctctcatattttaagttcaagcaacccactcaattaaaattcagaactatcactgtcattatcaatgacatcacattctgatatccctttgaggatgaataacctatcttgccactgagtgtcaactagtttgttggcttgtttcctctctggctggataaagataacaggtgtctgtctccagttccaacaccaggagcag

SEQ ID NO: 6831 - DNA, 762 bp, mus musculus
ctctaaagatcacccttctgtatgcatagcttatttttgagccaaagattggtcagaggttgtgtccaaatatttcaagccagaaagtcttcctctatctgctgattgatcagtgtgtgggccagagagcacattcaagcttcaggctatttgtaagttcacatctcatttcactttcagctggactctctggcgtctcctctgggtattgcaggctccttcttccaaggatgtgcaggtggttggcacatgcacacagtgtctgcagcacatacacagcatctggtcaacctggaatatgtgactcctggccaccctgttctttattagtcttttggtctcttactttcatcaagcaggcccataatctcagaataagtgccattaacccttcttgctcctttgtcataaatgttgccacttcagatgtcacaatccaaatcaaatctgcctctttggtttatatttaaaccaaagtttaaattaagttaaacttgtgcctcaaagtttatattcgcagcatgcctaccctggttgaactactatatgggctgagttgagggacacaggagattctctgggcaaaaatgctacagactatgttgttcttacctgaaattcagtggttttcatgaataaatgcttctcatttgactgtatacctttgattgattccagagcatcaaaataattataatttatagttttgtccaactttacaatggtcaaccaccttattcaatcatgctggatttcaaaatt

SEQ ID NO: 6832 - DNA, 1950 bp, mus musculus
ctttcttttttttattttgaaaacttattgaacttgcatctacactttaaaatgaagcagaacttaaagaactcaaagattatgaagaagactcagtacctgggaataaaattgagaatagggctgggtgtggtggctcacgtctgtcatctcagcactttcggaggctgaggcaggcagatcacttgaggtcaggagtttgagaacagtgtggccaacatggtgaaaccccgtctctactaaaatacaaaaattagccaagcatggtggtggtcacctgtaatcccagctactcaggaggctgaggcaggagaatcacttgaacccaagaggtagaggctgcagtgagctgagactgtgccactgcactccagcctccagcgagacttcctttcaaagaataaataaattaattaagaatagtaataaatatgaaaataactaaattttagcttccttttatgactatataaccaatctcaaccattattttttgcttccccaaattaggagagtttaaaatgcagattctccccactctcctcttcccattcaatagaaactgagaaagaaggatcttattcaggtcttcactccatttgtgattcatattcagtggctgaaaggttagaaagcattcactccaccaataatgatcaagcacccataaagtaccaggagctcttacaaactctagggaaatcctggctcctgttgtcatgaattttgcattctcaggtaggaaatgtggctctgatgcctgctggggcagtggtagcaacctttagtccatgtgaatgcaggcatcccttggtatgcacgggggattggttccaggacctcccaccgataccaaaacccacagatattcaagtttctgctataaaatggtgtgtagtatttgcatgtaacctatgcacatcttcctatatactttgcatcatctctagattacttataatgccaatgtcaacactatataaataattattatactgtattgtttagggaacaatgacaagaaaaatatctgtacatgttcagtacagacacaatttatttttgctctgctcttggttgaatccacagttgtggaacccatggacataaaggccaactgtacacttagagctacagaggatcttggaggtaatctagacaatttctaccctagtatagaaatctgtatactagagcatctctaacagaacctttcattcaacccttttttggatgccttcagcaacagggaactcagtacttcccttcccacttgtaaaaggtttgaatgttaaaagttcttacatttttctggcttttctaatatttaatagcagctttatatctctttcccaattttcacagccacacagctccctaaatagagttaaacataaccaatctttcagtcattcctaaaagtaacattgttatcagtattgctaatgtccattcaagagtcttaattatttaaaatattccctgaccagtgaatattctgacttatcagctcagaataacatgaactatgacttcctgtttaagccttttaggattgaaataatcctaaatgccatggtcaccctacctggttggcttatattaaaactttgcctctttcaggatatttgttgtcattcctattctgtggtacagctcaacctgaggggtgctaatgtgtcagaaaaacaggtaagcaggcaagcctaagtggaatctgatgtcaattcttgagattgaggacagtgctatgtgactgattgtcatttaaattaatcaacatgcaactgtcaacttagaaaatccttcaggcccagagtgaaaagcagagtttcaagcttataggaaaccagacataatcattcaaataaaattactgataccgtacttcatatgagctaggacattacagtaatgtattattattatgccacttgaaatatgattatt

SEQ ID NO: 6833 - DNA, 7013 bp, mus musculus
gggtgtatttcatctttcctgcaaagtcaataggcagaaagggtaggtgtcagttcttcccccaggctgtcagctggtgtgtccctggtgtgcctttgggagagagagcatggggaaagaggatgctttttcttctgttaacgtgctaataaatactattttcattaatgagtgaaatgcaagggttatttaaatgacattttgtctcaaagtagtataatgattacaagaaaaaaattctgtagaacttttcatgtcattaattcaggcatggagaactgatattttttcttctgtatgtaaactacacagatgaaacctaattttatttaatttcatctaacttagaggcatcaaatttcattatgtattttaacattttttatataattataaaatatgttttaatataggattactcagaaaaaaaaaatagctgggcgtggtgtctcacgcctgtaatcccagcactttgggaggccaaggtgggaggattgcttgaggccaggagttcgaaaccagcctggctaacatggtgaaaccccatgtctactaaaaatacaaaaattagccagattggtggcgtgtgcctgtaatcccagctactcaggaggctgaggttgcagtaagctgggattgtgcgactgcactccagcctgggcaacagagcaagactccgtctcaaaataaataaatacatatatatatatgggattaaatggtgagtggaattgtaaaaagaaaataggaatggagaaaaggaaattcctgtaccccttctgcttgatcaagactttaggacaagcttgtccaactcactgccaaggatggctttgaattctgcctgatatacatttgtaaactttaatacatgagattttttttgtgatttttttttttttaagctcatcagctattgttagtgttagtgaattttatgtgtggccaaaaacacttcttctttttccagggaataaggcccagggaatccaaaagattgaacacccctgctttagaacattgatttgtatcagttatatataaaagctgattagccatctttataggtcttaattttatcactacctgtaaggctttttaaaaatgtagttcttattttaattagagttataaatgcacgtgatttaaaaaagaagatatttccacaagcgtgtcaagaactacgaagggtctgagattttaccctacttgaaagttaacaagcctgttaacaattttcatggatcctggcaaaagacacagactcctgggccagagatgaagtgccatttatgacctatattaagcagtagcagaggatcagcatttttcttttaggttgctagagccttaattcccacagggcagtatgaagagggccaagtgataactacaaacagtgggttgcattatgggaaagaaaccctgagcttagagaagccaaatcttttatagtgggcagtaagcatgctgtgctttgccccaggtaacattgtctttattatattgtcagtaagaaggtttgccctttgctagggagggaaacaccatctctgtctttctaggctgtttgctataaaaatagccttgaaaaaattatctggaacaaaaagacagtgcctcacttgcaagatgtacagaaatgcaagccacccatggcgaattgcctcccaacaaagagttgtacttacgaaaaacagcatgcttctcccaatggccccccaaatctcctactccctaaaactccattgtccattagaaatataatgtgagaaataaaattttctagtagcagcattaaaaaaaaaagaatcagggctgggcgtggtggctccatgcctgtgatcccagcactttgggaggctgaggcgggcggatcacgaggtcaggagatcgagaccatcctggctaacacggtgaaaccctgtctctactaaaaatacaaaaaaaaattagccgggcgtggtggcaggcgcctgtagtcccagctactcaggaggctgaggcaggagaatggcgtgaacccaggaggcagagcttgcagtgagccaagattgcaccactgcacttcagcctgggcaacagagggagactccatctcaaaaaaaaaagaactggtaaaatctttttttatccttttgagacagggtcttgctctcttacccaggctggagtgcagtggtgtgatcatggctcattgcagcctcaatctcctgggttcaggtgatcctcccacctcagcctcctgggtagctgagactacaggcatgcgccaccacaccgggctaatttttttttttttttttttggtagagatgggagtctcactgtgttgcccaggctggtctcaaactcctggactcaagtgatcctcctgcctcagcttcccaaggtgctgggattataggtgtgagccactgcatctggccaaattaacagtatattatctttaatctagtatatcaaaattttataatgttaatatgtaaacagtataaaaaagtgaaatattgaaatgatacatgtgtctaatatttgtattacaatgtaataatagtatcttacatgatgtcattaaagtgaaatatagtcctaccgaaacagtaatgtgtttaagggaaagacatttaatactgcttcaagttttaaaatgtaaataattaaaattttaaaaaagtatttgttgagactagcctcatttcaagtgctcagtagttgcatgtgactactagctaacattctctactgcatagccctgaagttaaccattttcaactttttacagatttctttaggtgtgtattttcatatctctaaataataatgcttatatggtttctaaattattcagctttaagttctttctactattaaggaggggttttttttttattgttttttgttttaatagagacagggtctttctctatcacccagtctagagtgcagtggtgcaatcatagctcaccgcagcctcgaactcctgggctcaagtgatcctcccatctcagccttctgagtagctgggtctacaggcgtgcaccaccacacccagctaatttttaaatttttcttgtttttgtagagatggtatctcaccattttacttaggctagtctcaaactcttgggctcaagtgatcttccaacctcagcctcccaaagtgctacgataacaggcacaagccaccacacctgaccattaaggagggtttaattctctttcaaccaaaaccctccaccacacttgcactcatttcctggctgtctctcatccccaaagtcaatgattctgaaaaactttttgtcgtgtgtgtgtatttttaaatatgagatggggtcttgctatgttgattcaggttgttccaggctgatctggaactcttgggctcaagtgttcttcccgcctcaaccttccaagtagctgggatcgtaagtgtgtgccaccatgcctggcctgaaaacttttttatttcagcactgtttatactttaaaaaaatcactgaggatcacaaagagcttttgtttatgtgggttatatctattggtatatattctatcagaaagtaaaactgaggctggacatggtggctcacgcctgtaatcctagcactttgggaggccaaggcaggaggcttgcttgaggccaggaattcaagatcaagtttaagtccagcttgggcatcatagtgagaccctatctctacaaaaataagcagccaggtgcacctgtggttgcagctacttgagaggctaaggtggaaggatccccaggagtttgagcctgcagtgagccaagataatgacattgtactacagactgggtgatggattgagaccctgtcttaaaaaaaaaaaaaagagagagaaagcaaaaaacttaagtattacttctgtgaaaataacaatgataagccctttattttaacataagtaatttcttgtgaaaatcttttcagaaaaattggaagaataacagtgtttttgtatttttgcaaatctcttttactgtttgacttaatagaaaatacctgaattctgatacttctgcacttattctgttgaaaacaaacacatcatgtagaccctggaaaactgcgccgtatataacacagagggagtgaaaagggtgcagaatggcctagtattattatgaaaatagttttgagaccctctgtatattgtcatgctttttgtttgaccacaactcaatgtttatattactatagccatgtataaactgagcatagcataccatgattgcttttttttttttttttttctgagatggaatctcactctgttacccaggctggagtgcagtggcaccattttgggtcactgcaacctccgcctcccagattcaagtgattctcctgcctcagcctccagagtagctgggactacagactcgtgccaccacacccagctaatttttgtatttttagtaaacacggggtttcaccatgttggccaggcttgtctcaaactccagacctcatgatccgcccaccttggcctcccaaagtgctgggattactggcgtgagccgccgcgcccgaccatgatttcttttattgtacatacttgttggcatattttactcacttgtactcaatggcattttttcatattgtttgtttattatatgtacttttatgttttttggagatggagtctcactccgtcacccaggctggagtgcagtggtgctatctcggctcacttcaacctccacctcccaggttcaagtgattatcctgccttagcctcccaagcacctgggattatgggcgcatgccaccacacccggctaattttttgtgtttttagtagagacagggttttgccgagttggccagcctggtcttgaactcctgacctcaagtgatcagcttgcctcggcctcccaaagtgctgggaggcctgcattttacttatttaattctggcctgcacctggcctgcattttacttatttaattctgaactctaccttagttatcaaaatctcttctaaatccattaatttacagcaggggttctctgtttctctcaaatattttctggagctgtttacttgctttaattaaggactggtttcttcctagtactcccacacaaccatcatcttgggatctgtctttgtaatcctaggatttctgttgcctctcatttatattgggtcccttgattactggatcctgtctcttccttttttttttttgagacaaggtctcactctgctgtcacccaggctgaagtgcagtggctcagtctcactcattgcaacctccgcctcccaggttcaagtgattctcctgcctcagcctcccaagtagctgggattacaggtgtgcgccaccacatctggttaatttttgtattttcagtagagatgaggtttcgccatatcggccaggctggcctgaactccagacctcaagtgatctgcctgcctcggcctcccaaagtgctgggattataggcgtgagccactgtgcctggccagatcctgtctttttcttaatgggcagtagagcgcaaacttgggggccagattatgtgagtttgaagcctagctcttctgcttactagccatatgacgttcgaagagctatttaacctctttatgcctcagtttccttatctggaaaataatactttctatgtagcattctcctgaagattctatgtgttaatacgggtaagccatttagaagagttccagagcatattaagcactccaggttagtgatgttgttaatgctcttacagttgctggtgaatttcatcttttagtggcatacttctcatagtaacctgctgagaaaggtgcatgtgactttgctgtataaaaatgcctttctgttacatcacatttgaccaatagcttggctggttatttagaattccaagttgaaaacagttttccttcagaatttggaaagcattgctctattttagtctacctttcagcagaaggtgggctgtaaattgcacggtctcagctttccccatagcctgctttaggattcagcttcctgagatctccaagtcagttatcattcactacctctaattttcaaatttttgatgctactacttcagttatattctttgtgtttgagggacttagccttttttgaaaaattgcttattatcattttatcttaaacagagtatgcttttagatatcttcagttcctgcaagtttgtggggaactagaaacagaactcttttctggcagtcaaaagagaagaaagaatagggctgggtgcagtggctcatgcctacaatcctagcacttcgggaggcagaggtgggtggatcacttgaggtcaggagttcgagaccagcctggccacaatggtgagaccctcatctctacttaaaacaaacaaacaaacaaacaaacaaaactagatctaaatttttagcagaagagcttggccggttcctcatggccagccacagttagggtctcagcagtttgttcagtgtgagaccacagaggagctaagcagctcactgcagggagtcacagacaggtatcagagactaccctccaagcagggcaaggttgtggtggggacagagaccaaataccctaagatgagatgaggctatgaaagtgcaattggccagaaagaactccaccctgaatggcaaggccttcgccttgtgatcttacctgtttcctgctccttcccttgacctaccttgggtggcgtttgggctccctcacttgggtcacagtcctccgagatactggcatggctttgacatcaaacacagtagttggtattttgctccagtcacagcagcctctgggacactgaacagtagtccttggagagtcagtgaaattgataagtattcactgggactagaagccaactgaacttagaccatgcttcctgctgccgaagggcaataggttggtgacccaggtttatccatcagcggtttgtttatgcatagatgtgtgcatatgcttacgtgcatatgta

SEQ ID NO: 6834 - DNA, 7013 bp, mus musculus; identical to SEQ ID NO: 6833

SEQ ID NO: 6835 - DNA, 7013 bp, mus musculus; identical to SEQ ID NO: 6833

SEQ ID NO: 6836 - DNA, 1059 bp, mus musculus
gtctgtctggatgtctgagtatctctctgccctacttttttctttatctttttcaaagttgtgcatgcttggccgcaaagtgcggtgggaagttgggtaagccggggatgaggagagaaacaaggttgcgcttttgtgtggagatgtgtgaagatgtgtgaaaaattggtaccctgatgtgcttttcgtctttcatttatatccgtaatcctgcttgaaatgtggattatttattcacactgggctggtctcctcctggaacgccagggagccgctgccatgaattttcatttggtggctgcaccagctgaggcagaggtggtcttgtttctccaggagtattctttctaaccttctctgatgttttaaacagaggaaagttgaacatgaaagaaaggaggatgtttttcatcttatagtggacaactgactctaaggagggaagcgtggtgcaaagagagactgctgatccctcaaatgtggttgagataaattatcaccatgccttctggctatctaattcctccttctcacccaacagcctggggattttagaagagtaaaaataacaacatttaaaacgtgtgtggcatttttccttctaagcactcagaatgtttcctatgtattttaacaacagtagttgccacctattgaagattgactccatggcagacactggctttgcatgcatgatctgacagcatcctgacctaggtgctgttatgcttcccattttgtggatgaggaaactgaggtttacagaagtcaaatgaccttcttcaaggctataaagacgatgagtgccccagatagtaactaaatccctcaaagtcatggtgaggcaagaatattctgccccatttaacagcaatctttgtgaatgaatggagagttaaaggacttgccctagttcttatcttaagtggcaaagcagccttctctgaaccctccaactagctcaactggctcttgtcttatctcatgcctttcttcatagcacttactaggggtcgttatttctatgtgttcttattattgtctacactaggcattaag

SEQ ID NO: 6837 - DNA, 142 bp, mus musculus
caatatccaatttgtaatgcttatgagtcaggtcaaatggaaacattgcacaaagatcatgactataaccacagccacttggaaattaataactttttttaaaaaaagaaatttctggaaaggaaaacctttagaaaagatg

SEQ ID NO: 6838 - DNA, 1025 bp, mus musculus
aagtggagaacttctcaggtaagaatgcttgggaagtccccacctgcccttgtgacagggatcaatgaaccctgtcaatgaaacccgccctttcccccctaactttcagctcttacagagatgtgcctgacatgcaaagctatcgtccttagatcttcttttagactttcctgacaaacaaccataacttcctgatattcaaccctgtgctttgtttctgtatgagtatctaactcctgtcttccccaccctccccacccacattagcttgatctggttatagagtatttgatatctccaaacttatttctgctcaaaccaaagtttcagtccttgtcaacaaagtctattgttcccaaatgtctgtattaattcccatatcaaagccaaacaaactaggctccaggtgaatttcattagcattcgcatcctcctcaaagagagtcagttgggagaagagcgaaaagaactttcagtagaagcagaaaccctttcacttaccagttgtctaattttgagcaagccacattacttctccagagatgagattcctctctgcagaaatggaagataattaaattaaatgactgccaaaccttgctttgactttcaacgcttattaaactttgattcttctgtgtttggcagactctgctatccctgcctctggccagtcttactatgaagtaacagaactgactttactgaatttgttcttttccttccctgttaagctattatcaacctgctctttcatgctagctattggtccttccttcattggcctctccctcagattaagtgaagattgtttgcacacgcactcaatacgggtttatagtagatgaaattgtgcatatgtttttcccaagccagaagcttgagcaataatgcttatttgtttcaggcttacacttgagaattggtcaaaagagtcatttatctggtaaaaccataactcaataggcaaccacattcatttaatgttttccaaaaacatttcttgcctcttggctcttaatagc

SEQ ID NO: 6839 - DNA, 891 bp, mus musculus
caaaaaccaacactggactcagtggcaaggaccgggtcaggagaggggtgaggtctctgtgggaggagaggccccagccctggctcatcacccccttcctggggcaggtgcctgggggcccagcctcctctgtatgatctgggtgtgatctgggagctgtgctgagctcctgagagcctcccagtagagcctggattcgcctgtggctgcaccccggccacatgtgctttttcctccttcaccacagccccatggtaccctggcctcctctccattctcatccaaagcagaatcctactggcagctcagaggcgcctgtgggcctgagcctaggtgttccttgagcggaggagcagggactggggacagccaggttggagtcacacagacaacccttccttgcatttccctaagaaggaaaacagaaaacatttcattcacggtaaacatgagtaaaaagcacacacagagctccctgagctagaggctgagagccgtgtccctcatgagcactgcgtgtgtgcagctggtctggggagaggagactgagaactggtcccagcccctcatcctttcttgcctctcagcctcaaagggagagaagcgggaggtccaggagcaggaagatctcagctctgaaaggtgaggctctgctgccccccgggactccccagaggtaactgagctttgcctgtccctgaggaagtcatttgcagaggcctgagagggaagctcctgggagagaaatcagaacctgcggcctcctcagattccctgcgggaatgaagccacgggcctgggaccggtattgcccataagggggcggtgtggggaagggaccaaggcctgcctggatatggggggaggtcagggaggctccaggtccatgtg

SEQ ID NO: 6840 - DNA, 821 bp, mus musculus
agaatggaagggcagaagttgcctaacgttgcctagtgcaagcctggcctgcgagtctgctcagagcacaattgcagtttgtagaaggcagccccaggggactcctgggcagagagagctaataccagctaggtgatcacaactccccaggaatgctgaccacggagggaggctgtccaagggtctacgagatggcatccctctgtagacggcctccctctgtggatggcattctatgggtgaattgatacaattcattcgtcttattcagatttccctattatcacattacgagtcctccatggggactcatcaggattcctttgtggtctgaaatgcaggaaattgagctctttgggtcagaagccaagttaaacaagacagactccagatgctctgcaagatggatgcagatgccagcggcaccaaggttaaggtgggaggcatccactccacttcctcccatgggagtctggtccttccagggccggtgggcaccgttcttccccatgctgcaatggtgttgaacaattcctggggtaaaataaagttagtaaagacaacaactttcttatgtgataaaaattagcaccaagaacagagaacaaataagagcagcttcatgggcaagcaacccaggcaggtacacaggtctccactgtcagaagggccctgtgcttggcttaatgctctcctgtcaccatcttcaaattctaaataattgtgaacgaaggctctttccttttgcatcatgaagcgggtcctaattagcagtataggagaaagtagaatctttaattgcagtcaactggcttggagtc

SEQ ID NO: 6841 - DNA, 4090 bp, mus musculus
atgtcaaaaaacatttttctacaactaagtgcacatttaacttgtgtcacaaaaaaggtctcaaaagagcaagggatttgcagtgttttcaggagctcaccagacacctgaaaaccctccttgctgaaccactacctgcccaggtgttcactgaggtgccagacccagcaggctgaggggtacaggtggagttaaggaggagctaagtggcctggtttgtttctcagtttcgtgctttggaatgaagtagtgtcacacatggaaaaaaataactgggaatgttgaattaagaaaaaatagggagcaagttctaaacactatttggaagaaaatgatccctgggaatgctaaagagaatttgagccatgagctgttcctgtagtcagagttaagcattgtgagttggcaaaagcatcaggcgggaaggactgagtctgtgtgtgcaggaggaatgcctgcaggggaaagtcacgggctccgtccctgtctcagttggtgggggtggcagagatgccacagccgtggccaagactacgctgggtgaaaagtgagactctctggatttgccatactgactgaaagctgatatctgaaaagtggagctgagaacagcagcctgggccactgtgggcagtgactggaatggagatggccatttcctgccaaggtggcctgagaaagaggaggttggagaccaggacaaggccccgggtgggtgccggtgggtgccagtcctgagaaggtatgcacaggaacaccatggacattgtttattcccccaattaagtagcccaaaaatgtgccataagctgtccttgcagtgaaccagtgattctgcccaaaccatcaccaccaacatacccaggtcaactccggcacaggaagtcacatggccagaaaagggccatcagccacatcggtgctgacactgagtgcagcacattcttctgccacctgcttgcgaacatatctgcaatgcaccatcaaagccacacagagtgtccctggcgtgtgcctggaggttgctccgggtctgcagatgctccccaagacccgaccacagcctgtctcacttcctttccattcacttcaatatgggattcatgcccaagtgccagcaccgatgtaatgattagtgacaagccaatgaatttttaaaatagtagctatgttaagatttatatgaattaaaaagtatttgctctcattttatttaaaattttgttcctacaaagttactgtctcagtttgagctgatggtgcagtctgctgttctgcaactacataaaaagtaacctgggccctgcagaggggacacaagcatcggggccaggtacacagtgacaggggtatttgagctgggtctgtaaggatgactgagatggctgggaggaagagctgcacgcctcagcagaaagcacacgtggtgagaacaagaagggaaagccacagcatcccggtgcagtccagtgtggtctgtggactgggcatgttggaataggcaggaagggctgatgtgcgctttgagggaggaccgggcagctggagagggaggcgtcaggaagcaggagggcagaaggtgaggagtgaagggcagcagtggaaaggacagggttacgccaagcagtggtcatggatatgggcagtaaggaacatgcaccaagggcgcctggaaaacgaaccttagagaacgcaagtcctgcggaggactcctgggttcctggctgggacaccgcctgggcagggaaggcagagaagatggagaacctggtctcaggtggcatcagaacccagcatccgcatcaccaggattgcaggagcagcagcgtctcaggccctgggtgtgtcagagcccccaggccacgtggaagtatgagacgtgctgggctgcaggggaaacaatggaaatgaggttggaggcccgagaagacccactgcaggaaaagggtggagtgggggaaaagcaggctgggggcagtggctggcctgcaacaaaagcattgtagaatgcaggcgtgagccaccgcgcccggccaaggcgggcagatcatgaggtcaggagatcgcgaccatcctggctaatgcggtgaaaccccgtctcttctaaaaaaaaaaaaaaaaaaaaaactgtagaaaggggaaagcagtccaaagagaagtatttcttccaagagactcatcagcacactgtgtttccagagatgtctttctgttaacagcattcttagactcaaaagtaaatgtagatatactttaaaaaacaaaaacaccttgctaagagatgaatttttagaaacttgttggacaaagaaaagtcattgatagtcaactgctgtgagaggcaagccaggaaatgatgattaataccctcaaattataataaaacccatgcctcattaggggctcgcccaggagtactgacttgtggatagacaccgtctggggaaaactctgtcgcctgtgtcaggctgatgctcttacattttatagccccttgtaggatagtgcatgttgagaagaagccgcttcacatcatcgtggtgcaggatctgtggtgtggtgtgcttcatgtgtgtgttttgtgtgtgtagtgtgtatgtagtgtagtgttagttgtgtgtactatggtgtgtgtgtggcatgtatgtagtttgtgtgtggtgtgtgtgcagtgtgtgtgatgtgtgtagtgtgcatgtagtgatgtggtgtggtttgtgtgtgtttttatgtgtagtgtgtagtatgtgtgttgcatgtagtgtgttgtgtgtcgtgtgtatgtagtttgtgtgtgtggtgtgtttgcagtgtgtgtgggtgtgtactgtgttatgtgtgtaatgtgtatgtagtttgtgtgctgcacgtagtgtgttgtgtgtactgtgtatgtagtttgtgtatactgtgtgtagtatgtgtgcagtgtgtgtgtagtttgtgtatgacgtgtgcagtgtgtgtaagatgtgtgtagtgtgttgtgtgtgtagtgtgtatgtagtttgtgtgtgtgtggtgtgcgtttagtgcatgtgtggtatgtgtccatatgtgtggcatgcatgtagtgggcatgtagtatgggggtgtatgtgtgtggtgtagtgtgtgtgatgtgtgtagtgtgcatgtagttgtgtggtgtgtttcgtgtgtgttttgtgtgtgtagtgtgtatgtagtgtagcatgtgtttagtatggtgtgtggtgtgtatgtagtttgtgtgtgatatgtgtgtagtatgtgtgatgtgtgtagtgtgtactgtgtgtggtgtgtatgtattttgtgtgtgtggtgtatgtgatgtgtgtagtacatggtgtgtgtagtgtgttatgtgtgtagtgtgttgtatgtggtgtgtatgtagtttgtgtgttgtgtgtgcagtgtgttatgtgtgttgtgtgtgtagtgtgtatgtagtctgtggtgtgtgtgatgtgggtagtgtccgtgtagtacatggtgtgtgtagtgtgtgtggtgtgtgtagtgtgttgtatgtggagtgtatgtagtttttgtgtgttgtgtgtgcagtgtgtgatatgtgtagtgtgttgtgtgtgtggtgtacgtgtagttggtgtgtgtgatgtgtgtagtgtccatgtagtacatggtgtgtgtagtgtgtgtagtgtgttgtatgtggtatgtatgtaatttgtgttgtgtgtgcagtgtgtgttgtttgtagtgtgttgtgtgtgtggtgtgtatgtagtttgtgtgtgtggtgtgtgtgtgatgtgcatagtgtgcgtgtagtgcatggtgtgtgtgtagtgcagctgtggcatgtgttcgtagtgtgtgtggcatgcatgtagtgtccatgtggtatggagtgtgtgtgtgtggtgtagtgtatgtgatgtgtgtggtgtgtggtgtaccgtatgtgatgtgtgtagtgcgcatgtagtcatgtggtgtgtttcatgtgtgttttgtgtgtatgtaacgtagaatttggtgtgtgcggtgtgtttcatgtgtgtggtgtgtatgtagtttgtgtgtatgtgtatgtgtgtggggtagtgtgtgtgatgtgtgttgtgtgcatgca

SEQ ID NO: 6842 - DNA, 4090 bp, mus musculus; identical to SEQ ID NO: 6841

SEQ ID NO: 6843 - DNA, 4090 bp, mus musculus; identical to SEQ ID NO: 6841

SEQ ID NO: 6844 - DNA, 885 bp, mus musculus
aaaaggtacggagggagttttttatttgttctttcctgggagcaaataggactaagagttgacctactggaaagctgttggccacaaagaggcctggctcaggtgtctgcagctgcttctctggagcaaggacagtcccatctgcacaatttccctatgtcactggtgggtcactagccattctgtggtgagcttgacaatctcagcagccacctgactgagatctcaaaacacatcacccatctacctgtgtataactcttgtgcttggcagactttgtatctgagctttatcagaaactgtggtccccacttacaatgaagttcctgtgaggtcagagctagggagtggcagccttattcatagcagtttttcaataaattggaaaggcttttacaatgacccatagatactcatttttcttatagtgaactaaatatatgacataggctctagtaaatctcagatgtgtaatatcatagcttatgatgagagtttaaattggcctagattttcagtatcaaagttttaactgttcatacatttgctccagcttttcttttcctaggatgccccaggtatcctccagaaacacttacaataagggtacacagatgcatcaaggacattcatcatgccagtgttcatagtagtgaaaatttgaaagcaatttaagtgtctgtcaacttgttagaaataattcgtacctctataaaatagcgtcccatagagctctttaaaaggatgagaaaagtctgtatgtgctaatacatggaagtatgttgacagtatattaagtgaaaagctacaaaatcagatagaatattacctcaattagaaaaataaaaagaacttacacatttacctatatgtttgtttgtatat

SEQ ID NO: 6845 - DNA, 183 bp, mus musculus
ggagtaggtacaggtgtagatgcaggtatgggtataggagtaggtacaggtgtagatgcaggtatgggtataggagtaggtacaggtgtagatgcatgtatgggtgtaggtgtaggaacaggtgtagatgcaggtgcaggggtggaggtaggtacaggtgtagatgcaggtgtggttggaggt

SEQ ID NO: 6846 - DNA, 181 bp, mus musculus
cactgttaatttgggttggaactgaaaatatactttctgtgtgtgcctactgctactgtagtgaagttcttgagccaggtctgttcagtcatattgttgaaaaactgtatgaatatttatgaaggagaaagagctgataggtaccatgaacattcactgttgtatatgcatatggtttata

SEQ ID NO: 6847 - DNA, 1038 bp, mus musculus
attatgttaggcagtgggaaaaatacaaagacaaagaacttgaggtttctgccttggaggagatgaaaatttagctggagggacaagcaaggcacacccaaaggttccaaagcattcaataataaagagcagcatgaactaataagatttgcatttatccagtttacaaaaaggataagtaatctgattggcattccaactgttgtttttggaatttctgaggtatcatagtaatatgaaatggttctgttttttagaaacaataaactcagcatctgtgaatatgaatgaacatgccagacacggttggaggaaagaacatgtttagagtcagaatatctgagcttctggtgcactcacttggctgattcactctggggaacttatttaacctcaagtcttgattttctcatctgtaaaaataacaaaactaatagcacaaactgtggtagattgattgtatcaatgaccataattaatggtgtttctatagcaacatctttttctgtgtactgtaactctgggttggccatgttatttgctttggcaagtgggacagtagcaaatttgatgcagtctgacacatgaaaaagtatacctgctcattcctttcctcctctgcctttatcataagaaattcccaaacaaggggaggggccatgtggaacagagtcaagatagcccatgttgtccagttaatgcccaagacatgtgagagagtcctgttaaggtaatcaaaactacctagatgacctgaaactgatcaaagatgtgtgaataaaccctgttgagctcagctgaactgtgcagccaatgatatcaatttgtaacgaaagataggtgattactgttttatgccattgaggttttctgctagtttgttatgcagcagtagctaactaataaaatacttcattgctactgtggagattaagacaatgcatatgaatgagttttgcaaactgtgaggtaatatacacatgagtttaaaaggtcttaagatcaatagattatttgttggagatgaggacatagaac

SEQ ID NO: 6848 - DNA, 639 bp, mus musculus
aacagtaataaaatccatcaaatgacaattttgtctttgtttcagtatttatacagtttatttcaatatctagtgttagtagtcatccacttacaaaccatcataaatatcaatggtggtagtgagtaaatatttcgtgatctcactttaatgagaattaaacttgtgtttcatttttcactttgatgctagctgttagtttgatatatagacaaaatcatttttaaaggtacaaggggactctctgtcctattgttgctgtatttccttagttcagctaaagatggggtccttatcacatggccattaaagattaggctcgcagacaatttgaaaagtgaatgaggcagggttttattgggagaaaaggacagaaagaggaaacagagaccttctgcaaagccagagtccctgctggtgtgcttccagcctcacagttggaatcccaggttccacacaggaaaaggcggggccaggctcctccctgctgcaaatggggacaaacttctgtggctccaccccagtgcgcactgcacccagtgtgcaggctggttggagttttgccagggagtgcttcccacctgactgtctcactatctttgcaacttcctgtaaatctataattactaccaaataaaa

SEQ ID NO: 6849 - DNA, 1468 bp, mus musculus
tttaaatcacttaaaatctgaaacttaaatagcaatagatgtccacttagcaagttagcatggacctatgctagaaaacagtttctgttttttcttaaaaatgagaggatgtttcatttgacccagccatcccattactgggtatataccaaaaggactataaatcatgctgctataaagacacatgcacacgtatgtttattgtggcattattcacaataccaaagacttggaaacaacccaaatgtccaacaatgatagactggattaagaaaatgtggcacatatacaccatggaatactatgcagccataaaaaatgatgagttcacgtcctttgtagggacatggatgaaattggaaatcatcattctcagtaaactatcgcaagaacaaaaaaccaaacaccgcatattctcactcataggtgggaactgaacaatgagaacacatggagacaggaagggaaacatcacactctggggactattttggggtggggggaggggggagggatagcattgggagatatacctaatgctagatgaagagttagtgggtgcagcgcaccagcatttcacatgtataaatatgtaactaacctgcacattgtgcacatgtaccctaaaacttaaagtataataataataaattaaaaaaaataaaaaataaaaaaataataaaataaaatatttacctgtaaaaataaataaaataaaattaaattttaaaaaatgagaggatgtaagcataccatttctcttcttgacaaccataagagtggaattgctgattggtttgtgtagagaacagagaaagtgattggaagggaagggaggtgatttatgagacgtgttattattattttcttggtatttttaaaacaacttaatttacaaatagtagttgtgtctatttatgggatacaaggtgctgttttgatatatgtaaatattgtagaaagatgattgttttagtgacaggattctatctacctcacactctgattatatttctgagagttgtccatcccttcctcccagctcttggtcttagtttatatagagaaaaataagaaggaaaaaataggaggaaaggaatgaccaaggctatttatatttaatgtgatcacaagtgtcatttgggtggccttagcttccatttcttcatatataagattaaaaaatataaaaataataataatagtgatatatgcctacttagattttataagaattcaataaataattaatgtaaaatgtatttgtaatttgtaggtgctgtttaagcatcaggttttaagttattaaatgtgttaacatggaattttgcacattacacacttttctaaggcagatcattttcttctcaagatatgtaatattctatttctaagcaatatcgtttttatatatttctatcattaattatgctgaaaaatacgaaagtaaattttcttcaatagatag

SEQ ID NO: 6850 - DNA, 194 bp, mus musculus
atttcttagtttcacttttcattacctgttttctcatatttatttattacctatcaattaccatagagcaggcacttgtatttcttactactatgccatacttaaaagattgagggcacgtatacactcattaaatacttgtgttaggaaaaaattgataatactcaataagctctgaagacaaatggtctgtg

SEQ ID NO: 6851 - DNA, 1386 bp, mus musculus
acttgaacccagaggatgaccagagaaaagcagggtaccaaccacagtcaggccaccatgcatatttccccaatcctgtgacaaacaggactgagcctgctctgtgccaggctctgtcctggatgctgcagggacagagatgagacagactcagcctcgaggggcggcagccatgagtaaacaggctatgcttagtagagtctggattaagacccacacagcacccatgggggctccgtggagaaagcagctccaatcccaagggagctgcacctataagctcgaagccaggtgccagggagggatgtggagcatggcctgatcagcatcacttggatgaaattcccttcagaataggtgacaaaaagaaagggctccatagacaagtcaagggaccactggagagcccaataaacatcaatatgcagaagagagaagcaacagtataaatcccaaagtaaatgctaagtctaaagccagataaaaggccaagcaggtgttagcaatggcatggcgggcatctgggaaggccagatcagtagcagaggccagagccaagcaagcagaaatggaacagagtgacccagacatgtttgtctgggtctttatgctacaccgccttccctacctcacagctttattcttgatttatctcccacagctgactctctgccagccttgtgcatcaggaacttattaacactggtgccttctagaactggggaagatccatccagagttaggcttttttttttcgagagaatcttgctctgtcacccaggctggagtgtagtggcatgatctcagcttactgcaacctccacctcccagattcaagtgattctcctgcctcagcctcccaaggaggtgggactacaggtgccgccaccatgctggctagttttttttatttttagtagacacagggtccatgttggccaggccagtctcaaactcctgacctcaggtgatctgcctgcctcagcttcccaaagtgctgggattacaggcgtgagccaccgtgtacagcaagagttaggtattttctgctaacgttcctcctacctcctcttccccgccagccagctgactttcccaagatgagctaatggccttcctttaaaagaaatagtgtcaggctccttttctaactcacatttttccctagcatcattccatccagagcttaaggttgctggtgacctggtggtgttggtgacttcaccattctccctctgggaaatgaagtgactcaacagtcacaaacgcaaagataacagtgccatcagcggttccttgcagagcaaagaaatgccagggttattaggtgtctgaataaagctgaaggtcctgaggttaacatagcaagaaaaaatgacagtgtag

SEQ ID NO: 6852 - DNA, 1192 bp, mus musculus
aagaaaatagcccagaattatgtgatcctaacaagtccagtatttttcacttgttaattattttctgttctcatgattatgtgtaatcttttatgcagagatatcacattagatatacttttccccttatattattacattataagcatttccatatattagtactcatggttactgttttaaatagctgcctattatgctgtttgttgatgtctcagcatgactttgtttatatgagaggtattaagcttatgctgtaaacacctttattaatctgagattttgtatgctgttttgttagaggaaacattctattaatggtggcatatttcaagtaaaagcatgtgctttttatttttaaatcgcttatggcaaaaattcattttcagttcaataaagtatgtgtttgtaagctttgtcatctgccccttgactggtagatgtgcaggctaaggagttttaagtgtttggttttgcttttggtagttgtgtgtgtgtatgtgtgtgtgtgtgtgtgcgtttcttttcagaaggggcgggtaatgtcttctgttggaacatgcactccaccctctttgataaggcttgtggtaagatttgcatcactacccatgacagtcatcctcatagcattaagcacacagctcttagctcccataatgatgtgtggagggtggagtgtattgcagccatattcacctttcatttgtgtgtttgatgtggcatttatattaagtaggagtaattttttttctgatttttttttcttgtgtcaccagtgcacctattccattcttccatcgctgtgctcctgtgaacatttcctgctatgccaagtttgcagaggccctgatcacctttgtcagtgacaatagtgtcttacacaggctgattagtggagtaatgaccagcaaagaaattatattgggactttgcttgttatcactaggtaattgtttttctcattattagctattgcatagtattgcagaagaagactgttttgtcttttagccaaaatatgaatacaactggggatacttgtaaaatgtttaacttcccatagccaaaatcattgtttcagattatatatagttaagaatatgtacatataagtatgtatatatatctgaaactcattcccttctttttttctttcattggagaaaactagtgttttcccaaacgttgt

SEQ ID NO: 6853 - DNA, 1094 bp, mus musculus
atttatacaactcaacctccatttgtgaataacaacatcgactctccagagggcagtattttcctaggaagtaaatccacttagtctgaaaggatattgtagcagtcagtacaggttaggttacatagtccatcgtgacaaataggacccaaatctctgtgacttaaaacttcatgatttatttatcccttacactaaatatccagtagaaatcagcggggacctctgctcactgtatgtccttggggactcaggctgaagaagcaacaacttttggatattactagtcaccatgtcagaggaaagaggactctggagagtctcaaatgggcaagtaatgctctgatctagaagtgagacacatttttctgcttactacttattggctggaattagtaatatggtcttgggtaattagggtaggctaggaagtttacccaatcatgtaccgagagaatggataattttttcttttttctttctttttttttgacggtgtctctctctgtcgccaggctggagtgtagtggcacgatctcggctcactgcaacctccgcctcctgggttcaagttattctcctgactcagcctcccgactagctgggactacaggcgcacaccactacactcagataatttttgtattttcagtagagatggggtttcaccatgttggccaggatggtctcaatctcttgacctcgtgatcccccaccctcagccttccaaagtgatgggattacaggcatgagccaccgcacctggccaagaatggataattctttacatttagactcactaactataaacaactcacacaggactcacaagaactcactaaggacccacatagccagctaccaaaactgtatagctaccttcatgcttagtggcaaaatgttaaaacctttttccataaatccaagaaccagacagggtttaacattataatagagatcctaaccagctcatcaaggcaaaattaatgaattaattaattacactaataactaatatatattctttatgtatgaaatccaaaacaaataaattaacaaataaaattaataacaaagtagaacaagcttgctta

SEQ ID NO: 6854 - DNA, 196 bp, mus musculus
cagttatgttagactgagttgcttttcagcctcagtttgctgaaaggttatctccttccacatgcagtgtagagtcaataatttactaattaactccatgagcataacccacattcctaaataaatacaggattcatgcagcctatcgcatggataagaaatccctcaatcttcactgtactcaagattcttaaaa

SEQ ID NO: 6855 - DNA, 1146 bp, mus musculus
cagatggaagagcataaagcaagaaaatcatgaagatggaaatgaaaggtgtctggagaagtatagaatgagcaagactggaattcatggtcaagcggatgaaagccttgaaggctaggttatgatatctgaagttgattctttgggcacttgagagtgatgaaagttgtttatggggctaagttgtgattagaatacacttctcattctcagttaagaatggctagatgcaggtgaactatcacaggtggttgtagtatagagtaggctctgccagacttggcttgcataggatcttggcagcagaacagaggatataatttggacaagtgaaatgaaggtaaagataaaaagcaggttacctcccttcagacattctcttcctttaacatacatgtggagaatggcattagcattctactccaccaactgggacagtttgataatttttattaatgtgtggcctactgagttacctcagccttcatccatcaagccctgtatcatgccttcggcccacgcccagtgcctcagaagcccatatatcatcccttcaggcagggaagcagattcccttttatttcccttgcaaaagcacagatgttaccgcacccagccttgtctggggttcaggcactgcttctccctaaatgacctccttggaatcttcattcccattgcattccagacagacaggcttttcttttgttccttcactcaagagctgcctccaccccactcttccaattcatgtgtcatgggcaacatatttgtgttgccacatctgccttgtcccagctgctgagtccatttgcaaggcagatattaatgttaatcattgcctgaaaaattttagaccatgacattctgatgcacagctcattgttagacttcatccacatctcacctttatcactgggagaaggaaggcaacattatgaagggaaaagatccatgaatgggttgtaggagacttgcttctaatgctgaatccctttgtgatcttgagattcccatctatgggcctcagtttctgtatctgtgaagtgaagtggttgaattcagtcatctttgagagctttctatctctaaggttgtatgactttcagcctttagggatattaaatgcatatagtcacccctctg

SEQ ID NO: 6856 - DNA, 1146 bp, mus musculus; identical to SEQ ID NO: 6855

SEQ ID NO: 6857 - DNA, 1146 bp, mus musculus; identical to SEQ ID NO: 6855

SEQ ID NO: 6858 - DNA, 1346 bp, mus musculus
atcagaggaatgcaggaccaagtcaatttcagtacttctgacatgggcgatagggatgatattggatgaggcaatgggaggtctttaatattcttaattgttatcaactattttgctttccactcaagacaggacttttgcttaaactggccatctattgaagataagcttattttcttaggggagataaaaaaaatacatgtaataaattagtaaattttttaataggctacaaggtcacatgtactattattaaaataaaaaagggagtccaggcgtggtagctcacgcctgtaatcccggtactttgggaggccaaggtgggtggatcacgaggtcaggagtttgagaccagcctgaccaacatggtgagaccccgcctttactaaaaatacaaaaattagctgggcgtggtggcatgtgcctgtaatcccagctactcgggagactgaggcaggagaatcgcttgaacccaggaggtggaggttgcattgagccaagatggcaccactgcactctagcctaggtgacagagcaagactctgtctcaaaaaaaaaaataaataaaaataaaaataaataaagaagaggaataaagtagagcagggtaagtgggattagaagggcagggagtaggaaagccacaaggtaacattaaataaaatggtcattgtaggtcagagtagcctagatatcattctgaatctcaggagcctcccatctaaacatcttgttgagcactattctctggacagtctatttctcaagaatttgtgtgaaatatgtgattatacatgaatgcatataaacatatatgaatgtatacatggctagaaaaaggaccttaagataatatatttagtcccctagccagaatttgaatctcctttatagcagcattataagcttagatcaaaacataggtgagaacaattagaaagttcatgagtcaatgatttgttgacacatttcttatgaaggctaattgcttgttagctgaaacatgcacctcagttttagttagagacaccagcataacaaaggattggctaagaatttggaactcttctgtcatatagagctgtcaagaaactattcacaaaggttgaaattctaactttttacatattgccatataaggctttaacagaagcaaattcttactgaaaaattttcatctctccctctctctctctctcacacacacatacacacatatatacacacatgagttaatcagttctttatacaataccgaggtttttttttaattttaactaccaacccctgccatatttgatagtttctgatttctaacactgaaccagattggtctttagagttac

SEQ ID NO: 6859 - DNA, 918 bp, mus musculus
aaaaagatcaaacccatcagtatcattatgaacaatcaacaaggaaatattgagaaggaagatgtaaataagttagtattaaacaaaactgagcattgacattttatgctgcttttatagagacaaacagatcaccagtcgagggctttggttacataggttaacccctgaaatgtgccacatcagctccactaattgaagatcagggaatttcattgaacccattgatgacatggactgttgaaataatgccctttttaggctgttaaatgagcgagaccttggttagcagtcattacccttttggaatgaattacttgcttctttttcatactgcacccttaggaagtcttaatgggcgtatgtgttttatttttctagatttagcaatcacacaagataatgattcaacaaggtctccattgtcttaccttggagacccctgcctgctcaatatgttcaacagttatgtttgggaggtcccagtctcatcaagaaatttcaacctctaacaaaccaaacaaaactattatgtaattttgttgtgttatcctcaaagcaaactttttaagcatctgaaacatcctcagaaatctcccactctactaatcagccttgctaacaaataatgtttatggcactatttaaaatagaactgtaacaacaaagaatttcccctttttaaaaaatttaattgaatttaattttttaagttctgtggtacacgtgcaggatgtgcaggtttgtgacataggtaaatgtgtaccatggtggtttgctgtacctgttaaaccatcagctaggtattaagtctatttgccagtaatacacatgcattatttcatttcctctttacagtatccatgtaggtcattattattatcactatttcaaagatgatgaaatggagactcagag

SEQ ID NO: 6860 - DNA, 686 bp, mus musculus
attaagatttctgtatattagttgataaatatataactacctaaatccagttcttaggttatatctttacttttctttacttcacttatacaaggaagacaatgataatacatgatattatgtgctgaattttagtctaccggatgtgctttgaaattaaagcaggctgggtgcagtggctcacgcctgtaatcccagcactttgggaggccgaggcgggtagatcacctgaggtcaggagtttgagacgagcctgaccaacatggtgaaacctcatctctactaaaaaatacaaaaattagctgagtgtggtggcaggtgcctgtaaacctagctactagggaggctgaggcaggagaattgcttgaacccaggagggtggggatcgcagtgagctgagatcatgcccactgaaatctagcctgggagacaaagtgagactttgtctcaaaaaaaaaaaaaagaaagaaaataaagcaaaaacagatttgttctggcagaagtaatcagaactttgcataacagaggagaataacataaaattacctgtgaagaaatatagactctgagtaggaaagtgagaaagtgttagagaagtttgagaagttagagaagaaagacattcttcaatctaaactttggagaacccttaggttatccacccattgttgatcttcaggtttagg

SEQ ID NO: 6861 - DNA, 220 bp, mus musculus
tagaagaaaatatcttatgccataacgccttgttttcctcatactggaattcttccatggggttttgtttttgcaggccaaccatctatccttattaaaggctgcatttagggatccagcccattgacccagcctgaggagacttgctttgctccctcgttcatcattccctacccactttccaaactttgtgttaattacaaaaaaaaaaaaaaattga

SEQ ID NO: 6862 - DNA, 818 bp, mus musculus
aagggtaatgacaaaaaaaaaaaaaaaaatagctgcgttagcatggacacaaattctgcttatattttagatggcaaatctacattttctgttgagttatgtaagagaaggcattgtgtttgtgttcaaagggcaagattggggaaaatctcaggacactgcctgcattctaagtggcccgactgatggagggaatgggccctgttccaaattgattagttctgctaccttctcattaccgttctgcctgaagtttggcacacaagcaaggtcattccatgcatgggtctgcgtgacttaactgattttgctacaaatttcctccccttccacactgccacccccaccacagcatgccacctgcactcgagaaaattaaaaatcagcctatacattttacatgagttcccaagaccagtgagaaattaatattatgttgtcttttgataaagatacagctgtttttaaagatgttaatccaattcagtaataggaaatcttgtttaaattcctctatgaagcctatacagcaagatggaaaaaagaaatgcatatagactcagaagaatatatttgagcaagttttcatcttgcagttcaccttacaaagaaatttcagggttacatattaggttactgtcctccccaaactcttaggtgcctcattaattctctatgtctatgtttcttttaggttgttcccttagcctagaattatgtcttctcatattcttatgttcaaatacttccagttgttcagggttgacctctaatgtctcattttccatgaagatacctcattttctgaaagtaggatg

SEQ ID NO: 6863 - DNA, 1000 bp, mus musculus
tattcagccagaattattattccatggtcccagatagacaaaggtgcgacagctgacccaagtagggcctagcacacattgtctttcccaggaattgtggctgggagaaaggttcaaatgaatcttacctgaacctgcatagttgcattttcctgcaccaatcatttcaagtctctgaaccccaactataaaataaagagattggactagactgttctcagtgatcacctgcagctccgacactctgtaatcccacgttgagtgctctattgtgcagtgatacaatatggaaattgccagtgtgggtaagtgaaacctcaacatgaactgtgcagatagctggtgattacacaatgggaaatgtcgagaaaataaccttatggagtggaaagtattggattgtctgatgatgacttactctccaatatgaagatataactatgcttggccgctcaaggatgaaaatgtagtaatgtgttaaaatgctaatgaaattggaagcctataatagatgtttagaacagtttaggttaccaagacacaggaagttagagagcatagctcataaatcctgatgataaggccaaactcctcagaacattcaaagccttttatagtctgattccaacttgccttcgcaagttcatctcccctctcaaaccctcatagaccctgttttcaatccataatgagccatttgacattccccatacacagcaggctcttctgtgccatatgcatacaaattctgttgcttccacctccatatttcacgttgctccatctcactctcatcatctattccaattcctcatcactcacctcataggattactcagagggtttcttgactggtcaacccacccctagtctctgttcactctgatccattgtccttacaaccagagtatttttcttaatcacgtatcttcgatcatatctgtctgcttaaaattctttaatgatttttaattgcctttaacacaaaatccaaattatt

SEQ ID NO: 6864 - DNA, 1394 bp, mus musculus
ggcagccaactgacaggccatcagtctctacccagacaccctcttcacagttctagccccagcccggatgccaccccacccgctagtcacccccagcaccgggccaggaagggaggcggcccgggaaggggctgtgggggaaggcacggagtccggaagcccagaggaacagtcttcaacctgtgaatccggccgcgcctggccctgcagcctccccggcccggcagcctccctgctcctgcgtgtcccaatgcatgatgcacagctgacccctgcctgtgagggacccaggccatctgtgaggcagttgccatgagtgactcctggtgaacagcccattggcatctccaagtgctgggcagaggccagaggcaatggctttggacgaggagaccgaggtttaaaacccagctctgccactttctggctggttgacctcaggcaagtcaccagacttctctgtgcctcagtttcctcatctggaaagaagagctatttaactcactgggcacccagtcggtacttggtgcttagtaaacaataggatgaaggaaaggaaggcacagagaccctcccacctgcaggccagacttaaacccagaccctagaccccagaaacgttccagagctttcacgcatgaggaacccttgccaggcccccacctgctggaggcagccgagtcagggtttctaagcgaaactcacacgagtttgtcattcttgaaaaacagtccctttccaagccctatttgacctttccttaatggaccacttgctttcagggccctcatcctgggaggtaggttactccgcccatgtaatggagacagaactgaccccagagggtcaaagcctcttccccaaggttcttcctcaactgggaagaaaaagagtcaggacttgaatccactctttcaagtactcctgtttctgctcccattcttctgctgccttggtggggatgggccttccagttggggacacctgggctgctccgagtccagcctccagagctgccaggtcagcagtgtaaccagtcactccacctcctgcagggttgctggactgtcatctaggaagaagatggtctaaattcaagttccttaggaagtcttggttctgaggcccccggggagcatcaaagctcaagcggagagaaaactgagtgggagggggaggaaccaggtctctaaggaggtgtagagacctagagacatgagtttccttggggacatccctctgtagatcttacctcatccccaacctcctccctcttggaggctttacttatatctcagttatctatgcaacatggagcaggagaaagagctcagagggttaccagctacgtgacctccagaaagtcagaacttctctgagcctaagctttctca

SEQ ID NO: 6865 - DNA, 3058 bp, mus musculus
ctcagaataatctttacaaaaggaaatgagaagaactcaaacaaattaggccacatagaagttcctatgagcacatggaaaacctttagtttctaatttagaagacagcttggcatcctttaacttttcttttgttgaattttactatctgtttctatgtagtttcagaattaaatgttctttcgaagtataatagcagtaagatttttaaaatagatttgaggtggggaagaagctgtcttggtcaaactgtcctttacatctctcccattgcttctctaaaccctatccaggaagtccagagacatggagacaaagaattatagcagcagcacctcaggcttcatcctcctgggcctctcttccaaccctaagctgcagaaacctctctttgccatcttcctcatcatgtacctactcactgcggtggggaatgtgctcatcatcctggccatctactctgaccccaggctccacacccctatgtacttttttctcagcaacttgtctttcatggatatctgcttcacaacagtcatagtgcctaagatgctggtgaattttctatcagagacaaagattatctcttatgtgggctgcctgatccagatgtacttcttcatggcatttgggaacactgacagctacctgctggcctctatggccatcgaccggctggtggccatctgcaaccccttacactatgatgtggttatgaaaccatggcattgcctactcatgctattgggttcttgcagcatctcccacctacattccctgttccgcgtgctacttatgtctcgcttgtctttctgtgcctctcacatcattaagcactttttctgtgacacccagcctgtgctaaagctctcctgctctgacacatcctccagccagatggtggtgatgactgagaccttagctgtcattgtgacccccttcctgtgtaccatcttctcctacctgcaaatcatcgtcactgtgctcagaatcccctctgcagccgggaagtggaaggccttctctacctgtggctcccacctcactgtagtggtcctgttctatgggagtgtcatctatgtctattttaggcctctgtccatgtactcagtgatgaagggccgggtagccacagttatgtacacagtagtgacacccatgctgaaccctttcatctacagcctgaggaacaaagatatgaaaaggggtttgaagaaattaagacacagaatttactcatagaaagaacaaaatgttggcatgtcaaaatcaggacatgacctaaaagattattatcagtttatcctcccttcctaacccttttccacatggcattcaaagaggtcatgaaaagtggtgttggatatcagtaagagaattaacctgggagcaaaacactcagtttctttatatatatatatatatatatgtatacacacacacacatatatatatacacacatactttaagttctgggatacatgtgcagaacgtgcaggttcattacataggtatacacgtgccatggtggtttgctgcacccatcaacctgtcatctacattaggtatttctcctaatgcaatccttctcctagctccccaccccctggcaggccccagtgtgtgatgttcccctccctttgtccgtgtgttctcattgttcaactcccacttatgagtgagaacatgtggtgtttggttttctgttcttgagttagtttgctgagaatgatggcttccaggttcatccatgtccctgcaaagcacatgaactcatcctttttttaatggctggatagtattacatggtgtatatgtgccagattttctttatccagtctatcattgatgggcatttgggttggttccaagtctttgctattgtgaatagtgccacaataaacatacgtgtgcatgtgtctttatagcagaatgacttataatcctttgggtatatacccagtaatgggattgctgggtcaaatggtatttctggttctagatccctgaggaatcgccacactgtcttccacaatggttgaactaatttacatccccatcaacagtgtaaaagccttcctatttccccacatcctctccagcatctgttgtttcctgacttgttaatgatccccattctaactggcatgagatggtatctcaatgtggttttgatttgcatttctctaatgaccagtgatgatgagcttttcttcatatgttgctggccgcataaatgtcttcttttgagaagtgtccattcatatccttcgcccactttttgatgcggttgttttttttcttgtaaatttgtttaagatccttatagattctggatattagccctttgtcagatggatagattgcaaaaattttttcccgttttgggccaggcactgtggcttacacctgtaatcccagcactttgggaggctgaggcgggcagatcatgaggtcaggagatcaagtccatcctggctaacacagtgaaaccccatctctactaaaaatacaaaaacaaaaattagccgggcatggtggtgtgcacctgtagtcccagctactcgggaggctgaggcaggagaattgcttgaacttgggaggcagacattgcagtgagccgagatcgtgccactgcactccagcttgggcaacagagcgagacaccatcacaaaaaaaaaaattctcccattctgtaggttgcctgttcactctgatgatagtttcttttgctgtgcaaaagctctttagtttaattagatcccatttgtcaattttggcttttgttgccactgcttttgaaaaacactcagattctatccatgactttgaccaaatacatatttaatctcaggctaggtactgataggaatccatattttaggaaaaccacttcagctatcctcaatagactagcttccatatggtaaaataaagcttttctacaaatacgtcttctatatgcctgacaatgggtcccagtcaaggagttataaatcctgttagtcttcagaagtggaaaccacatggatttggtaggaaattggaaagaactt

SEQ ID NO: 6866 - DNA, 1210 bp, mus musculus
acctgtttctccatggtttcttaaagtaaatattttttaaaactgtaacacagtgaaaccccgtctctactaaaaatacaaaaaaattagccgggcgtggtggcggatgcctgtagtcccagctactcgggaggctgaggcaggaaaatggcatgaacccgagaggcggagcttgcagtgagctgagatcacgccactgcactccagtctgggcgacagaccgagactccgtctcaaagaaaaaaaaaacaaccgtaacaaagggctatgagctatttttacaggcttaagcttatgaaagaagctgtcttggtcaaactgccctttacatctctcccactgcttctccaaaccctatccaggaagtccagagacatggagataaagaactacagcagcagcacctcaggcttcatcctcctgggcctctcttccaaccctcagctgcagaaacctctctttgccatcttcctcatcatgtacctgctcgctgcggtggggaatgtgctcatcatcccggccatctactctgaccccaggctccacacccctatgtacttttttctcagcaacttgtctttcatggatatctgcttcacaacagtcatagtgcctaagatgctggtgaattttctatcagagacaaaggttatctcctatgtgggctgcctggcccagatgtacttctttatggcatttgggaacactgacagctacctgctggcctctatggccatcgaccggctggtggccatctgcaaccccttacactatgatgtggttatgaaaccacggcattgcctgctcatgctattgggttcttgcagcatctcccacctacattccctgttccgcgtgctacttatgtctcgcttgtctttctgtgcctctcacatcattaagcactttttctgtgacacccagcctgtgctaaagctctcctgctctgacacatcctccagccagatggtggtgatgactgagaccttagctgtcattgtgacccccttcctgtgtatcatcttctcctacctgcgaatcatggtcactgtgctcagaatcccctctgcagccgggaagtggaaggccttctctacctgtggctcccacctcactgcagtagcccttttctatgggagtattatttatgtctattttaggcccctgtccatgtactcagtggttagggaccgggtagccacagttatgt

SEQ ID NO: 6867 - DNA, 2072 bp, mus musculus
ttcaggaagaattctgggacagtgtatgtctgtttgaaactatcttggtatccttttacttttcggaaagcagcttcatttcatgggactcactcccatacaagagtgtagcgtattcattcattcgacacacgtgtgttcagtgtgccattgtgtgccaggctgtatgcttggtaaggtcatgaagacagttccctccctatctgtagagagttcacatcctcaagggggaggctggcggataagcaggtgacttttatttaataggatagaggtaagcttagagtgctatgggaccccagaggaagaccccaagagggatggctatgggggcagggacagcttcctggaactatggcacctgagcatggcttgtaagatgagatgttagcctaacaaagaatggaggaagaggcattctattctaagcagagggaataccgtgagcaaaagcaaagaggtttgaaagcacagcgtatgggaagctccaggcctgtagcaatgattgagacttctggtttgcagggctaatgtcaagaggtgtggctggaggggccttggggggctggcacgctaagctaagaagagccttgaagcctctcacaagggcagtgccgggcttccgcaggtgtggcgtgagcacatgtccagagtggtgccttgaggaggtctctcgggagtgtcgagacacagggttgggtggagagagtctggaagcaggggccctgggaggaggcaattgccgctgtccaggcagaagatggggaggcctgggaaccctcacagagtcagatggagggctcaggggataagaacatttagaaagtaaaatagcccattggcagaaggtctgttattttgtatttctcccaaaacaaccttgttcatgagtacctcagattatcagctcctacttcggtaggggagtctgccctgacactagggaatatgttgctagttaaatgaattcagctgacatttgccttccccattcatcatgactaaatgaaagctcttttctgagtttcttggaatggtcttttgacagtcccctggccagaaccacaaatcaccctgcagttagcgtctaaaggaagcaagaagcaagaggctcccaatgtgtaataccaccaaagcaagtggaagattcgtttgatccttgtagggggtttttgccaaaaggcgtttggggtcctgcaggggcagacaggccaagtgggcagacagggaaaggcatggcactatctagtcaaaactctggcatccagatgctctcttggggccacttctctttccgcccaactaaccagtccctacgtgtttcagtagccgtgggacagaggggagcagagggctgggcaaacaacctgtcacttcagacctcacaggtcaaacgggctgaaaactacaggaattccaggctatctttcagggctgtgtgcaggttaaatgaggtagtgattgggaagccacctgaaaagccgaaaggtttcccaaatgaaaagaatttcaacagcagccatccatttcccagctttctaagacagtctgatgagaagcagggctgaaaagcatggctataatggagttcaggagtgatcctgggatgtcagtttccttgtagctcctctcatcaagagcaaatgagaggcgatcatgttggtgaccttttgaaaggtggcaggtgacagaggaaagaacccagactttagactcagacatgtctcacgtgaacctggccccaactgcttgtcatgaggacttgggcaagttgcctggcttttcagagcattatttccagatctgtgaaaagatggtagatgccttaccatgcctgtcacatatttatttccttgtttatgtgacctccccaccctctctgagaggagagaccttggctggtttattcattaccattctggtgcttaagcagtgcctagcctgtaataggtgtacaataaatagtttggttttcatttatcactcacttttaatacctccctgtcactgcatcagcagtaaactggattaacacgaagtctcatttggtgtcagttgtggaataacacagt

SEQ ID NO: 6868 - DNA, 2072 bp, mus musculus; identical to SEQ ID NO: 6867

SEQ ID NO: 6869 - DNA, 1517 bp, mus musculus
gctaggcactgcctggcaccgagacagtttaagaaaccaaatgaaacgtgtatcttcccctttaggaatttatccataagtcaactgaaacacgaacataaatctcctatatcacaaagtaaaagctctgaatatcaaaagataggccataaaggacaatatggttatatgcttcaattttaaaacagtggcatgaaaaagaaataactgggtgtggtggctcatgcctgtaatcacagcactttgggaggccaaggcgggtggatcacgaggtcaggagttcaagaccagcctgaacaacatggtgaaaccccgtttctactaaaaaatataaaaattagccgggcgtggtggcgtgtgcctgtaatcccagctactcaggaggctgaggcaggagaattgcttgaacctgggaggtggaggctgcagtaagcagagatcacgccattgcactccagcctgggtgacagagtaagactccatctcaaaaaaaaaaaaaaaaagaaataaccaaaataacaaacatctgttgagagtctactacaggccaggcactctgttaggccctgggaggtatccagggacatgggagccatggtcccacctgcaaaaagaaaagactgtggctggggagaagaggcccgagcaatgaaatagtaattcaagagtctagacagtggcccaagagatgtcacaaagccaaggatgggcaacggaggctccgggagtcagagaggtaggaaatgggatttgacttgcatggctgggaggggctttccagggaggcccgcgtgaaggctttgttcctggaattttcactcctgtaattatttaggactatggcagttactactcactgggcacttgcaccattcctcatgttcatacacatctctaatgtaaacaacccagcaagggaagtagtaccctatatgtgggggaaaagtggttcagagaggttaagtaactcacccaaagtcacacagctgaagaaaatggctgggctaggatgtgcgttcatgctctttccaccatgccatgttgctttactgagatgacacagggcacaaagtaagtgcaaacacagacctgttcattttccattcaggaagcccatttgccacgaccaatgcaactccaacctaccaggctgactgtagaatgggttttcctcatgggcaacacatacacacatgcatgcatgcgcgtgcatgcgtgcacacacacacacacacacacacacacacacaaaaccaaatcactgtgcattggacaaggggaaaaaaaagctgccactggaagatgaaggaaatcacaattccaaactccccaagttcctaaatgcataaagtacgtgcagcttgacggcatatggcaaatcaattactagtttaaatcttaaaacaaaaacatggcaagtgtggtgcagaaataatcaagaacaacggttaggtttagattacagtgggccactagagttttgaatacaattaatcatcattccaggcaatgggaag

SEQ ID NO: 6870 - DNA, 1517 bp, mus musculus
cttcccattgcctggaatgatgattaattgtattcaaaactctagtggcccactgtaatctaaacctaaccgttgttcttgattatttctgcaccacacttgccatgtttttgttttaagatttaaactagtaattgatttgccatatgccgtcaagctgcacgtactttatgcatttaggaacttggggagtttggaattgtgatttccttcatcttccagtggcagcttttttttccccttgtccaatgcacagtgatttggttttgtgtgtgtgtgtgtgtgtgtgtgtgtgtgtgcacgcatgcacgcgcatgcatgcatgtgtgtatgtgttgcccatgaggaaaacccattctacagtcagcctggtaggttggagttgcattggtcgtggcaaatgggcttcctgaatggaaaatgaacaggtctgtgtttgcacttactttgtgccctgtgtcatctcagtaaagcaacatggcatggtggaaagagcatgaacgcacatcctagcccagccattttcttcagctgtgtgactttgggtgagttacttaacctctctgaaccacttttcccccacatatagggtactacttcccttgctgggttgtttacattagagatgtgtatgaacatgaggaatggtgcaagtgcccagtgagtagtaactgccatagtcctaaataattacaggagtgaaaattccaggaacaaagccttcacgcgggcctccctggaaagcccctcccagccatgcaagtcaaatcccatttcctacctctctgactcccggagcctccgttgcccatccttggctttgtgacatctcttgggccactgtctagactcttgaattactatttcattgctcgggcctcttctccccagccacagtcttttctttttgcaggtgggaccatggctcccatgtccctggatacctcccagggcctaacagagtgcctggcctgtagtagactctcaacagatgtttgttattttggttatttctttttttttttttttttgagatggagtcttactctgtcacccaggctggagtgcaatggcgtgatctctgcttactgcagcctccacctcccaggttcaagcaattctcctgcctcagcctcctgagtagctgggattacaggcacacgccaccacgcccggctaatttttatattttttagtagaaacggggtttcaccatgttgttcaggctggtcttgaactcctgacctcgtgatccacccgccttggcctcccaaagtgctgtgattacaggcatgagccaccacacccagttatttctttttcatgccactgttttaaaattgaagcatataaccatattgtcctttatggcctatcttttgatattcagagcttttactttgtgatataggagatttatgttcgtgtttcagttgacttatggataaattcctaaaggggaagatacacgtttcatttggtttcttaaactgtctcggtgccaggcagtgcctagc

SEQ ID NO: 6871 - DNA, 7053 bp, mus musculus
tacagaacttgaggaagaggcccaacggggtgaggtgggtaccacgcggggaggaggaggaggcggcggggacgacagacacatccgcgtccgggtcgctgtcacaaatatctcctcagacgtagatttttctcttgacacactgtacaccttccactgcccaacttggagaacagcgttctttgcaaatgtttaaccaggacatgccctgagctgtgtcgtctcggggtgtgctccagagatacagaaacagatcactaactcgcgttttttattaaaaccaattaattgtgaaatgcatatcgatcgttaagagtttgtataatttagaaaagtatagtcaagacgataaaaagcacccataattctcccatccggaaatgatcagtgttaacattttttttccttgcagagccacccaagaatgcactggtattaatattgaatactctttccaatctgttttttttcgtctctctctctcagattgtgaacaactttctatgtacttttattccctgttcttttcaactcattatgacattgtgggcattcacccatattgtggaatatttttcagaaagccttaatggctgcataatattccaccagatgtgtgtattgtaatttgttaacaaatcccctattttgggacatgtaggtgattttgtaaatttttactatcaaataaggctgcagtggatattctcttaaatttatctttagctgcactttccatgatgagaatatcttagaaatgagatttccaggccaagataatgccaaatggctttacaggaaagtggcaaagtgtaccacttcaccaccagcgcacccttcttccagcatctgcggtgctcgttgagccctgtcttatgcttataggcttttccagccggcttgcctacccacccctcaaatcccacccttgcactaatgttgcaatccgcatacctgagagggttcctccttatctctgaattatgccatttctctctctccccctctcttttttttttggttttgctcagtgctgtggccttgctggtgggagagaaggtacaagaggagaccactctagtggtaagttatggggtcttccctgagtagttatggcagccctccctgcagtgctcttcagtgagtgagcgtgcttcacaaaaaaaaaaattccactaccatgtatttagatgcttcctcttaactgtgtttgctttctgcaggatgatccctttcagatgaagacaggtggtatggtggatatgaagaaactgaaggaaaggggcaaagataagtaagttcaggacaagcttagatgcaaattcacctttagcggctgcctgggtctaggttccctcagagagctggggcctgtagcagcagcattagtaggacatcttgaagcaggttttgtgctttgcaaagggtgtgttatttaaaaacaaagaaagcaaaaagtctttaaaagttaacttagagccaagttggtagactccttttgtaagagtgtattgtaggcgtgatgactcatgcctataatcccaacactttgggaggctgaggttagcttgagtccaggagtttaagaccagcctgggcaacatagtgagacccctgtctctacaaaaaaaaaaaaaagtgtgtatgtatacacacacacacacacacacacatatgtacacacatatacacatatgtatatacacacatgtatatacacatatacacacacacacacacacatatatatatatacacacacgcatatatatatgtgtgtgtatatatctgggtgtggtggcatgtgcctgtagtcccagctattcaggaaattaaagtgggagaatcacttgagtcagggaggttgaggctagagtgagccgcgatcacaccactgcactccagcctgggtgacagagaaagaccctgtctcaaaaaaataaaataagtgaacctatggggaagtttcatataaaaacaattaacaaaaataataaattcaggccagctgcggtggctcatgcctgtaatgccagcacttcaggaggctgaggcaggcggattacctgaggtcaggagttcgagaccagcctgaccaacatggtgaaacactgtcgctattaaaaatacaaaagttagccgggcattgtggtgggcacccgtaatcccagctactcaggagggtgaggcaggagaattgcttgaactcgggaggcagaggttgcagtgagctgagattgcgccactgcacttcagcctgggtgacagagtgagactccgtctcaataaattaataaatcaaacattcaaataattcaaaaattaaaaaaataaaagtttactgtgtacttttgtgacaactatatagcatttacattgtatttggtattataagtaatctagagatgatttaaagcagatggtagtgtgtgtgtaggttagatgcagatattatactattttatgtaagggacttcactatctgcagattttggtatccttgagggacactagaaccaatcccccatggatacctaaggataagtgtatccactcaatccttggaggtatcactagcagccaacagtttgcttgcatatatttctagagtttcttttctttacatatactacggcatttttttttttttgccaactgtaaataggatattataaatgcttatgtctttgttttcttcttagaacataaaactcagcctcattgagttgtgacttgaaagctctgcctcattgttctctccctccaggatcagtgaggaggaggacctgcacctggggacatcgttttctgcagaaaccaaccgaagggatgaggatgcagacatgtaagtgtcagtctgtttggctgtgagcagttggggctggactccagtcagagtccaagatatttagtcaacagatgacatttctagaattttctagaagatgtcaaagttggcccctctctttctacttcccagcttaagaactttgaaaacctcttaaaaggtcttttcaggccgggcacggtagctctcacctgtagtcccagcactttgggaggccgaggcaggtggatcatctgaggtggggagttcgagaccagactgaccaacatggagaaaccccgtccctactgaaaatacaaaattagctgggtgtggtagtgggcacctgtaatcccagctactcgggaggctgaggcaggagaattgcttgaacctgggaggcagagcttgcggcgagccaagatctcgccattgcactccagcctgggcaacaagagtgaaactccgtctccaaaatataaaaaataaaaacttgttttcaaaggtggtttcatgactagtaatatttccccaaaacattgcagggataaaacatgggcttgcccactttttattttgccaacaaagctattggcaaactatcatctttctgtcttcaaagaaccttgtacatcataacaccaatagattagtgggacataacctcataggttggtgcttctttagaaaatttctaacttgatgaaaaaactcaagttattttttttctcgtttctccatggactgtcactggtctgcgggccagtgttggggaccactgatttagaggacacctggtgtgtgtttcccacccctccctgaggcctctgggtttctcacttcaggatgaagtacattgagacagagctaaagaagaggaaagggatcgtggaacatgaggaacagaaagttaagccaaagaatgcagaggactgtctttatgaacttccagaaaacatccgtgtttcctcagcaaagaagaccgaggagatgctttccaaccagatgctgagtggcattcctgaggtggacctgggcatcgagtatgtttgagacccctaggcagaagacacagtgctttccagttaaaagttatgggggacaggccaggcacggtggctcatgcctgtaatcctagcactttgggaggctgaggcgggtggatcacgaggtcaggagttcaagaccagcccggccaagatggtcgaaccccgtctctactaaaaatacaaaaattagctgggcatggtggcaggcacctgtagtccagctacttgggaggctgaggcaggaaattgcttgaaccctgaaggtggaggttgcagtgaggcgagatcatgccactgcactccagtctggcgacagagcaagactccatctcaaaaaaaaaggaaaaaaaaatttatgggggacaggtatggtggctgatgcctataagcctataatcccagtacttgggaggccaaggcaggaggatcacgtgaggccaggagatcagcctgagaaatatagtcagactcctgtctctcaaaaaaatttaaaaaattagctgggctgtcacttgagctcaggagttgaggctacagtgagccatgattgcaccactgcacaccagtctgggtgacagagtaagaccctttaaaaaaaaaaaaaaaaggccagacatggtgacttgtgcctgttatcctagctctttgggaggccaaggtgggaggatcacttgagcccaggagttcaagaccagcctgggcaatgtaatgagaccccatgttcttatctgtgtccttagaatcctacaaatacaaatgagattgtccctggcaggttgttgctagaagtttcgctgaaggcttgatcagagtagtaagggcccctgactgctggaagcaaaagtggttctttagcgtgttacagctgttcagctgtatcaggccctttattcttctgttttcttctagcaggagccatgttaaaggctcactcaccccttctccccatgatccttcttaaaatatccactttaaaagggaattgttatggaagaggtacaattgttagaataatcttctggtacagtagaaagctgggaggcttctgggctcttttctggcctttacaaactttgagccttaagcattttacttctctgaagctcaatttgctcttgatcagaagagcagagtaactgtggttctccgacagccgtgagagtcccgtgagaatgtgactacaagtgtgcttgataaagtggagagctgtgccccaggacacatgattttcttatgtactgctgggctgccagcctcaccactcatgtctgagtagtaaggtgctatcatcttctaagtggtgtggtttctttctctccatagtgctaaaataaaaaatatcatttccacggaggatgccaaggcccgtctgctggcagagcagcagaacaagaagaaagacagcgagacctccttcgtgcctaccaacatggctgtgaattatgtgcagcacaacagatgtaagcccctcggagagcagtcttgcccccattcccctatttgggctgagatccctaggaacctcatgttctaacgtgtcccctggtctctttgggtccagtttatcatgaggagctcaacgcgcccatacggagaaacaaagaagagcccaaggcccggcccttgagagtaggtgacacggagaagccagagcctgagcgtgagtgcaacaaaggcctcggggctgcctggagtgctcagcaatgtgggaacccatggaggcaggatgcagcgggggacagggtggagcctggcattggagccggggcatatgggttccagtccatgctctggaccatgactatgtgccttcccctttctaagcctcagtttcctcattggaatcctaatagaacctacctgttaggattactctgagaattcatactctctcatattctcacgcacagtagagactcaagaagttagaaaatttcagtaaggacaaataaaagctactcataaggttagctgggtgcagtgcctcacacttgtagtctcagctgctggggaagctgggacaggaggattgcttgagactaagagttcaaggctgcagtgagctatgattggaccactgcactctagcctgcgtgacagagtgagaccacatcttttttttaaagaaaagaaaaaggtattggccatgctcggtggcccatgcctgtaatcccagcactttgggaggcagaggcaggcagatcacctaaggtcaggagttcaagacgagcctggccaacatggtgaaccccgtctctactaaaaatacaaaaattagccaggtgaggtggcaggtgcctgtaatcccagctactcaggaggctgaggcaggagaatcacttgaactcgggagttggaggttgcagtgagctgagatcatgccattacactctagcctgggcaacagggtgagactccatctcaaaaaaaagaaaagaaaagaaaaaaaaaaagacaaatacgtatctactgaggccctactgtgttcactgggttaggcgctggggctcctgtggggaaggaaacaggcagttgtctttgcctgcatggagtaaagtctagcagtgggttccagcatggcaaaccacctttcctgttcttttccttctcagggtcccctcctaaccgcaagcgtcctgctaacgagaaggcaactgatgactatcattatgagaagttcaagaaaatgaataggcggtactgagttgtgcagagtgggatgtaaatatcgccttcctctccctatatccctcccatgaaaaatggcttcctggccgggcgtggtggctcctgcctgtaatcccagcactttgggaggccgaggtgggcggatcacctgaggtcgggagtttgagaccagcctgaccaacatggagaaacccagtctctactgaaaatacagaaaagttagccaggcgtggtggcacatgcctgtaatcccagctgctcaggaggctgaggcaggagaattgcttgaacccaagaggcggaggttgtggtgagccgagattgcacctttgtactccagcctgggcaacgagcaaaaaactctgtctcaaaaaaaaaaaaaaaaaaaaaaaagaaaaagaaaaatggcttccaggacagagcatgctcatttgctggcggacagttccagaaacagaccctgttagtccttctacttacctgctggat

SEQ ID NO: 6872 - DNA, 745 bp, mus musculus
tgagcacctttgcttatcaacaggtttgtgcccccgagggtccttctctttgattttttttacactagactttgattttgaaagtgtgccttgtctttctccggtatgaaaatgatgctttgccaggaggcagccccgtcaccaaaagatcaaaaagcctttgctcaatggctagtccagtggggaaactgaggcagtaagtgatgccagattcattcatgcatccattcgacaacattgtctccccaagaagaatgggcgctgccggaggggggtaggtctggcctgcttagcgctgttccttgtcactggctggagccaccataggggcacagccagattttcctgttgggctgaatgtcaagtgttgctgtgtatcaggcatccagattaaaaaagaaacccaacccaaccctgacatttctgggaagtccaaggagagccggagtgcacagagtcatccttgctctgaccagagcttctagaagcgtttccctctccgtgggcagccccagcggcttcagagaagagcaaaccgccagtgcgctcagctgtgaaattgtctctgacaggcctgaccctggaggccccgggccttcttctccagtcgggaggtctctcagtgtagctgtctgggcagcccttggcatggctagagctgtgctcctgcccctcacagaccccccaacggcaggtgcagcttgaagcctctttccctctgggaacatcctcgcctgacgggagc

SEQ ID NO: 6873 - DNA, 988 bp, mus musculus
ggggccgctgtcctgacacctctgtccccttgggtccacccagtggtgggctgctcgcggggtgcctcccgaggcgctcctggcccgggaaggaggccgccgtctgtttccacttagcggcctcccaggccaacatgatgtcattgcagcttggcctggtgggcgctggcgccgggccaccagtgacagctcagctgggagccccaagctaatgagaagggggccgtggctgctgcggccatggtggggctgctgcctctcatcccagaaccacggcctcatccgcagaatcccggcctgaccccaacaggcagagtaggcggcagccaggctgcaggaatgtggggtggggtggttcactaaggaactgcacctggtgggggcgggcgcagctggagccagggcctcgagctgtggtcctcccgttctaggagggtgcttcgccaaggagctctgggcctggcctgcgggcggctgtgctgctgagctgttgctcactgcagagtccatggaattggcaggcctgggcaccgtccgctgaggccaggtctccaggcctggacagggaagccatttctccccagccactgcggctcacctctcccagggctcagctttccctgcttgatatgggctggctctgtgtccctacccaaatctcatctggaattgtaatccccacgcgtctagggagggaagtggttggatgctgggggcagcttcccccatgctgttctcatgatagtgaatgaattctcacgagatctgatggttttattaatggtagtttttctctctctcctgccgccatgtaagactggctgcttccctttctaccatgactgtaagttccctgaggcctccccagacatgcaggactgtgagtcagttaaacctcttttctttataaattacccagtcttgggcagctctttatagcagtgtgagaatggactaatacactgtggcccacctgtagctgtggaca

SEQ ID NO: 6874 - DNA, 480 bp, mus musculus
ggatctgatgatggggagcaggtgtcgtgtgcccttgagcaggagcccagcagagagaccctttttcctcctgtagcagcagaagagaaggcagcagggtgcaggactgaaggagggctgggctgggctgggatgggagcctggctggttttcccctggtggccctatgactggttaagggcagggcagaggcacggcaggttggaggcacagaaggcccaagatagttatctgggctggatgtggggcggtattctcgcctctctggggacatcccttaagtggacaggaagactgggtggttcaggtgtatgtccactcaccaagaacacaggatgaaggtggggcctagacagtggctgttttgaccagggcagaacagttgagggcatgtgagagggcccatgctgacgccagacctcagtggggagaggggagagtccagggaccagaggtccccctaggcttaaaggacaaacc

SEQ ID NO: 6875 - DNA, 996 bp, mus musculus
cagggctgatgagggtgtgactgcaccagctcctcacatccactgggggccaattctggcagagtgggcccacgcgggggtggccgaacccttcccaaagcagtggcggggggctttactctctgcctggctgaggcctaggcctacgaccactctcctagccagagtaggtgtcgatgctcagtgtctgctgggcaaggagggcacctcagaggagctgcagggacccttggagggaatcccaaaggcagataagatcccaggtccctggagagccacgaccagacacgcagcatcagctcccgtatagaagctcaaggtggaaaccttgggcgccagtgcagggctgaccttgaaaggtgatagggtggccggtccccaaggctcggtgacactcatgttcctttctagggctcctcaactcttccgaaatttgccatctcctaaagttctttaatctctagccacgggggttccggatttcctccgggtctacggggactcagggactgcagaggcagctgtggggggtggcatggaggacacagccctggacagaatggggacacaacagggcctggagccctgggggaggctgcaaggctgagcgcatccggggacagactcccggctgactcctgtgggaggccggcgagcagcccggtgccaggccaggcagcttgtgcgaccgactgcgcagcaagctgtcggtgctggtggcacttggcaggcggcggcgggaaggggatgtttgcagactgccggcgacagcttcccggctgaaacctccccggttagactacgcagaagtgagcagtgcccgcgggcgggtcttggaggagcgagaggcagcagaggggctgctggggctgttgggcccttctgggggcctcccaccgggcctgcccccccgccccccgctgtgggcctggcctggggcctggatccaagccagcacccccacaccctgcaggctcctggattccggtctctggg

SEQ ID NO: 6876 - DNA, 1085 bp, mus musculus
gctcctcctggggtgtcagtggggttggaccccagccgtgggtggtgtgccatgcctggcccaggggccgtgcccactgaccgccgctgcctgcccaggtctgctgtgccacctcaacgacgcatgcatcagcaacccctgtaacgagggctccaactgcgacaccaaccctgtcaatggcaaggccatctgcacctgcccctcggggtacacgggcccggcctgcagccaggacgtggatgagtgctcgctgggtaggtgccagcacagggggtgcggccaggtgggggtggcagcctggccccagaaccgatgagaagtcgattctggcttcagggggtgcccagttagatgggggatgggaccctgccagtccgatgggggtggtgtgcagtgaggtgttgcaggggccagggtgcctggagcagcctctcacccgtgtgccctcgccaggtgccaacccctgcgagcatgcgggcaagtgcatcaacacgctgggctccttcgagtgccagtgtctgcagggctacacgggcccccgatgcgagatcgacgtcaacgagtgcgtctcgaacccgtgccagaacgacgccacctgcctggaccagattggggagttccagtgcatctgcatgcccggtgcgtcggccggggccagggcgggaaaccgagtcgaggctgggcagccttggaggggcagccccgggaacatctgtgggttgcttccgctttccccagcctccatgccttctgggcccacagcctgcacagggcatggggaaactgaggccaggccacagggccagcagagcacgggggcagtgctaggcagatgagggtgccgggccaggggccacgggctgcaggggagcgggtgcgcagggggcccgtggtggctgggacactgggctggaggcagggttcgtttctgtcccaagtccacagctgtgcccagtggggcactggggccgcgcgtgcccccctcactgttgccccaccccacaggctacgagggtgtgcactgcgaggtcaacacagacgagtgtgccagcagcccctgcctgcacaatggccgctgcctggac

SEQ ID NO: 6877 - DNA, 559 bp, mus musculus
ctgggaccctcccaggctagtcagggctcccagcaggagccccctgcaccgagacggccgtgtcccctgctccatgggaccacagcacccactgtcacacacacacagccaccgtcccatcaggcacccacatccccgtggggcccggctcagccaggggttgccagcctcccagggtatccttgacagctgggggaggctggccttggccccatctctctctaccccactgctgggggtctgaggccctcccacttcctctcctcttcccctaaggtcctgtcacaatgaggagctcccaggggccggcgctgcagccaccctccccgggcaggctggagccggccttccttccacctcgccctccgcttcccacgggtaagctgctcgcaaggcagccggcacgctcgggtcacgaggtcaagggcagcaggagcgaccagggagttgcagtcaccctgccccgtgccacaacctcgttcacaggagggaaatcaggcaggcccagagacggcaagcaacctgtataagatcacacagccagcgcagggtgaggcct

SEQ ID NO: 6878 - DNA, 1193 bp, mus musculus
ggtcagagtagaccacaagctggccgatttgtccctgtaggccctgaggctcctcagagggcacgtaggcccagtgtgggctggggacgggaaacctgatttgctgagccagacaatccttaccctcagtgccctggaaggggctcagaccttcagtggttccgaagggcctgtgcccaccttccctggccccagggagcacgtggtcctgtctgggctgggccagccctatgggaggctggggagggcctaggcgagcacaggtctgtcctatccctcactgggcccaccctttccagtgggtcctggccttcgagatcttcatccccctggtgctgttctttatcctgctggggctgcgacagaagaagcccaccatctccgtgaaggaaggtgagtgcggcaggaggccccaggcacagccgggggagcgcggcacctcgcacgcctgcgctgtgtgtgcacatctgcacacgggtgtcctgctcccggagtccctgaggtgcggtgcctgctcccctgtgtggtcctgggccgtgcctcctggctgggctgtggaggtcggggctggcctgtggccgcgaatgatgatgccaacgcctcttcctggtgatgtgggcactcactggtctcctctgttctgttttgatccccctccctccccgcatggtctcttgtcctcggctggcatgcagtctgtaagtgagcggccacctcctcctggctggcctgggcagcagctgcggggggcccatgggccgtcctggcttgagcgccctccccgcttgcattaacagccctcccgggccccctgccggcctcaggaacagctggctccagatggggggtggcaggcagtgaagtgggaggtggtagggagtgaaaggcccggccacctaaaggcacagctggtgcctgggtcaagctgaggcggcatctctctgcctggccttgccttctagggctggggtgcctcggcttctgggctgagtctgggctgaggctgggctggcctgggctggggctggagcggcctggctactctcccttcatactccttcaggctcttgcactcactctgctaaccagctggccagaggtcagaggtcactgcccagagggggtcctttgtcctcccctgggctctgtaggcagtgccacacctgaaacgttttcggggggagagtgccagg

SEQ ID NO: 6879 - DNA, 1193 bp, mus musculus; identical to SEQ ID NO: 6878

SEQ ID NO: 6880 - DNA, 526 bp, mus musculus
agactctcttccttccaacacatgtgtattactgggttgtaaatttgattaatactgtagacacagggtcagcaaactacagcccagcggccaaatccagcagccatctgcttgtgtaaataaagtttattggaacacagccatgcccattaatttatgtactaaatatgactactttcatgccaccatggcagagttgaatggctagctgtgacagagactggcccacaaagcctaaaatatctgaccccttacatgaaaagattgtggatccctagcatagacaaaaaatttgacgatgaggggaaaaaacactattatacaagaccttcttcaggattatgccagtccgtttattagcagttgattggtttagttgtattatccttttactggaatggccatttaattcattatttttcatctttgtacaaagataaatgtgattaccaaggggttgctttgaagccagcagcctttccctgatcttgtccagcatctcacctctatagcacaaggtaacttt

SEQ ID NO: 6881 - DNA, 1471 bp, mus musculus
attcttcccggcacacacacacacgtgtcttttatgtgtggcttgtgtgaatgtgagtgcgtgtctctaggctctacatgtaggatgaggtcccctggtccttatctgctctcctcatccccaccttgttctaccagaaccagaggaagagatcattgccgaggactatgacgatgatcctgtggactacgaggccaccaggttggagggcctaccaccaagctggtacaaggtgttcgacccttcctggtgagcctgggtgagggggagctaacttctggcttcacccttcctgtgctgaccttggttgtgaggtttagggggacacaagggagggagcctcgggtggagggtgttggcattaggtatctgcaggactcaagttgctgcctgctggggcctggctcctctggggttggaagactgtcttttctctcttttttgaaacggagtttcactcttgtagcccgggctggagtgcaatggtgtgatctcggcttatggcaacctccgcctcgtgggttcaagcgattctcctgtctcagcctcccaggtagctgggattacaggtgcacaccaccacacccagctaatttttgtattttttgtagagatggggtttcatcatattggtcaggctggtcccgaactcctgacctcaggtgatccgcctgcctcggcctcccaaagtgctgggattacaggcatgagccaccacgcccagctgacagtgttttctcttcaggagaagagattctggggatcctgcctgtggggtcctgacatggggcaggtataggcagagactggggagacaagagttgaggatccaaggcaaggacatctgtgctgacacttctttcctgcggccccacagcgggctcccttactactggaatgcagacacagaccttgtatcctggctctccccacatgaccccaactccgtggttaccaaatcggccaagaagctcagaagcagtaatgcaggtgagttggcaggtacaagcgtgccttgagtgatcttagcagttctcacggagaggccaagtagaatgatagtggatcagaggggcaggtgagaccaggcgggcccagcctcaggcaagggaggttgttgaaggcagaggctgctgggtcctggggtggcaagaggtcacttcaagacttgtgtccccagatgctgaagaaaagttggaccggagccatgacaagtcggacaggggccatgacaagtcggaccgcagccatgagaaactagacaggggccacgacaagtcagaccggggccacgacaagtctgacagggatcgagagcgtggctatgacaaggtagacagagagagagagcgagacagggaacgggatcgggaccgcgggtatgacaaggcagaccgggaagagggcaaagaacggcgccaccatcgccgggaggagctggctccctatcccaagagcaagaagggtaagc

SEQ ID NO: 6882 - DNA, 1471 bp, mus musculus; identical to SEQ ID NO: 6881

SEQ ID NO: 6883 - DNA, 1471 bp, mus musculus; identical to SEQ ID NO: 6881

SEQ ID NO: 6884 - DNA, 1471 bp, mus musculus; identical to SEQ ID NO: 6881

SEQ ID NO: 6885 - DNA, 1471 bp, mus musculus; identical to SEQ ID NO: 6881

SEQ ID NO: 6886 - DNA, 807 bp, mus musculus
ccgctcttgcaagcattcactcggccggtcgcctgctgaccctccttcgccacaggctcgtagcggaggcagcagcgaggtgtccgatttgggcacgtgaggcccgcgatccccggcggtggacgccaggcagggcaaggccattagtgggcgccagaatggagagggggatgggaaggaatccagcaggagacatggggtggagttgggcgccaggcaagggtggggtgggggagtgcggtgagcaacatgaaaagggggtaggaacgggagccagacaaggatttgaaggtgagcgccgggaagcaagggcggtgggtaccagagaagtggttagggtaggcagggggtgttgtggacagcagctgggacgctcagggaaggagggcagtgggtgccggtcaaggcctctttgcaaggggattggaagtggacgccagtggtagcaaggggttccgggagggcagtgggctctgagctaggaggaggtggcccagccacttctgcagagttcctaaccccagacagctctactgcaccaccccagcccttccccacagcccaaaggaacttaagagggagagcactgcgggcatgcagccaggatttccagcattgcttccaggctcctaggggaaacttaggcactagcgcagactacatccagacatggctatagggaaaagtttgccttgtggcacactgggtgtgtctctctatcctctctcctcccccagcaggcatgaagacccccaacgcacaggaagccgaagggcaacaaaccagggcagctgcaggacgggccac

SEQ ID NO: 6887 - DNA, 2385 bp, mus musculus
gaaacgtgccatgtgaaaagagccacacaaaactcttataccttgtatgattccatttgtattgtcaatgttggcgtatagctccatcgcgtggacatagcataaattccttcaccaagccctgttgttggacttgacgttgttccccggtttccaatattacaagcaatgctgtgaggaccatctttgtggctacatatttgtggccgaccttattcatgtctttgcaccaatgcccagaagtggaactgccagtctgaaggtgtgtgcattttaaagctttcgggaaatatcgcggagcggccctgcacaaagtttgctcagactgcactcccaccagcagatctagagggtctagtgtctcctttctccaatacaacacctccctcttggcgctactcacccatgggaggctgtcccaggtcccagggtccccccgctcaccatgctctgtatttgtttgtagtttcctgggtgcgctgccaccatggtctggttctgcaacagtgccgactgccaattttcagtcttcgcccttaccaccataggatggatcctctcctctacgtccacgggcctcgtggagtggcgaatatggtacatgaaagacacctcgctctacccccctggaatcgcctgcgtgggaatatttagagtctgcatttaccggcgtcgcaccaacagcaccacaaccaaattttgttaccgatacagctaccaggacacctttctcccttttgaaatttccatggctcaacgcttcctactgactgccagcattttcggattcttcgggagagcctttaacatgtttgcacttagaaacatgtccatgagaatgtttgaggaggacacctacaattcattcgttgtttcaggaattctcaacattgctgctggtgtctttaacttaattgctgtgctccagaactacgatgccgtcataaactcacaggggatcaccttcctgccatctctccaaatgcccttcaagccagatgtgcaggaagttggcactgccattcaagtggcagggataggtgtcttgccgatgctgttaactgggatgttttctctgttttacaaatgtcccccgtacggccaagtgcatcctggtatttcagaaatgtgaatttcctggttgcattggctttgcaaatctaagatttctgggagtttatggaaaatgttattagcatgctctaccaaatatttccaacgactcaagaccgtggcatgggtagtttgggacagaaggtggccaactgcctccttctgttatcttgtgtatctgaatgtggctcactgatttgttggttgaattgagaacttttatttaaaagtcttcccacctgccagttggtcttattgcatctgaattttaattattgttggctacagcaaataatcaaccctgtaaactaagagtagggaaataagagtttctgagtacattaacttctcacatttccctcttaaacttttgctacaaacaatcataggccaggcatggtgacttacgcctgtaatcccagcactttgggaggccgaagtgggaggatcacttgaggccaggagttcaagaccagcctgggcagcatagcaagacctggtctctacaagaaaaaaaaaaaatagctgggtgtggtggtgcgtggctgtgattctagttacttgggaggctgaagtgcgaggatcacttgagcccaggagttggaagctccagtgagacgtgatggcaccactgcactccagcctgggccatataacaagaccctgactctttaaaaaaactccaataaacaaaaaaccaagaatggaccttattttctatgtcatggtaataacatctccctaccatataaagttttctaaaatgtgcaaaagtagagaggatagcataaggaatctccacacacccattgccagactccacagttactgagattagggcacttctgctttctctttccattcttttacctttctaatctatgtttctttttcccaagtttttttttttttttgagacagagtcttgctctgtcgcctggacttgagtgcggtggcgtgattttagctcactgcaacctctgcctcccaggttcaagcgattctcctgcctcagcctcccgaacagctgggattacaggcacctgccaccatgcctggctaatttttgtatttttaaaaatattggggttttaccatgttggccaggctggtctcaaactcctggcctcaagtgatccgcctgcgtcggcctcccaaagtgctgagattacaggtgtgagccactgcacccggcctctttttcctaagtattttaaagcaaaccccagacaccatgtcccagacaccatgtcccttcatccccatatactc

SEQ ID NO: 6888 - DNA, 348 bp, mus musculus
tgggtatgcactgtatgcacacatgcatacacacgcacacggccttttaaaattttgttttacctcctttctggttcttgttcccattccctccctgaggtccaacttaatttctccccttggttctatgagacaccctgcaaataccccttctgcctaaaccagctcagttgatttttgctgcatgcgaccttgctgcatgcaaccaaaaactattaacaaatatactatcacaataattcattttccttccttagacatttcaacatttgtaagatttaaaaatcaccccagtaaatacttgtgttaatttgaattgatttctatttccttggacttcagctattt

SEQ ID NO: 6889 - DNA, 2409 bp, mus musculus
aacagaaatgtgggtaaatacgacgcttctttccacccactactttccacccactttccatgtttgggagggaaggagatgaggaacacagatgttggggttcttgccaagctttcacttaaagaaaatgaacagggacaacaaatgatcatgtttttataacccctgaggaccacagaacggatttaacgtgcatgtgcaacatggctcattgtttttgttgttgctgttttgtttccgcaggtatgccattggtcttgcttacaaatcagccccgaagcatgaatggattgggaagaactctgcttcctgggcgctctgccgctgcaacaataactgggtggtgagacacaatagcaaggaaatccccattgagcctgccccccacctccggcgcgtgggcatcctgctggactatgataacggctctatcgccttttatgatgctttgaactccatccacctctacaccttcgacgtcgcatttgcgcagcctgtttgccccaccttcaccgtgtggaacaagtgtctgacgattatcactgggctccctatcccagaccatttggactgcacagagcagctgccgtgagcgtctggccacatggagctgctttctggggaacagtaaggttcaggccactatttaggggactgagaaagcacaggcttcatgagtgtaatgaaatctcaccagaagtgtcccgaaatcggctcagatagggctcaaaacaagagattcctctccttttactgtgtcttgtattaagtacgggctttaataatttctttaatttttttgtatttagaggaaaatctatagattatttataagagaaacataatcaggattacaacttttaggaattacttggttttgcacattaagaggcccataagtttatcagctatttacaaccttcatttcatcacaatctgtgggcttacaaaaaaacaaaaacttttgtagttttgtatgttactcatcttcttacctgatatcccatgatgatcccatggtaggtcttctcacctcgatggtgcataacaggatgtgtttgaacctagtaggggaggaaacaggctttcttactctggtttaatttgaagtgttttaattgtgatgtcaaaaagttgtatcagatcaactaaaatggagagcaagacagagaatgaaaagagttgattttggacctcggaccttgccgtggctaaatctttaccttctcatagctgatgggataatgttggaaagaaaggttctgaatcctttggccacattttgccctgcttctctcagggttaagggttctggaagaacattaagaatgagattgcaattgaaaatagtcattttgaatcctattgattattcaaaaattcaggctgatttgtcttttatcagaggtaggattctgttttatagtatagaatctactttatccttccttttaatagttcctttagacctgtgaaatttcttcactacatttaatagttctcctatttcccgctcccccatatcaattttccttttgtctccggggctgagtaaataaacatgttctgtcacaaatagcagcaccactttggattgattttgctctccaggacatcagcacatggccctgatcagcactaccacatccaaacataagtcactgaaaaacacttaatatttatgagttggtaatgacaagggacattgtataaagtactatttgctagattcatgcctcaaaagttattataaacagacctttattaaacacatcttgaaagatgtagaagtccctctatagtctagtatagtttacaatagagttgtaagaccaaaaaaaaaaaaaaaaaattcaaactcgttattcaggaacctgcttataaaatgtcagctgggattctttgcatgccaatctgatgcgttggaatggtccatgaattaaggctttcttgagcagttcttggcccagaactctggcattggttctagtttgatgaagggcatgacctctataaatggtttcaattgctaaaatatttacctgggatactgggtcagccattttgactgagcagactagtggatttagacattgtttttagttattttgtttttaaccaaatcaaccaactgcctccctgaaataagtcaatgaactcattgtttcagcatcacgtggccaaaggtcatgtgattgcaaatctggatttcaagggaggccaagccagcttcctgggtccttccatcctcttccctagcagacactctcctttttcttaacagatagattctatatatttactatattatttatacccagatgaatattttgatagatacctaagacaatttcacatctaaaagatggacgcctcaatggaaaaaaaacaatctttctctggaaacct

SEQ ID NO: 6890 - DNA, 2409 bp, mus musculus; identical to SEQ ID NO: 6889

SEQ ID NO: 6891 - DNA, 2409 bp, mus musculus; identical to SEQ ID NO: 6889

SEQ ID NO: 6892 - DNA, 2409 bp, mus musculus; identical to SEQ ID NO: 6889

SEQ ID NO: 6893 - DNA, 146 bp, mus musculus
aaatgaagaaaagagaacttttcagaaatgtctgtgcttctaaacattaggctgaaattcagacagttctcctaataaattctgacagtgtttatacatgtttttaatctaatcatttatgtattcttttttcttctaaaataatt

SEQ ID NO: 6894 - DNA, 132 bp, mus musculus
cagaacaaatcattgaaattccagctgttctgataaccaggaaataaacaaatggatgtcctttcttcatcttagggcctcatctcccctgtggtggagttgggacaaggtgggattcagaggtgggatgag

SEQ ID NO: 6895 - DNA, 297 bp, mus musculus
gaaataattttggatacagaaaagttataaaaatagtacaaagtttctgttaaaccgttcaccaagcttcccctaaccttaacaacttacataatcttagtacaactgtcaaaactgggaaattgacactgataaaatgccagtaactatagcatttacttggatttccccagtttttctctttgctgtggcaggatccaattcaggatctcacatggcattgagttgtcccatctccttagtttcctccaacttgtgatagttcctaagtttttccttgtctttcgactttgactc

SEQ ID NO: 6896 - DNA, 248 bp, mus musculus
gctgcattgagtggtcatgtggaggagcactgatgcatcctatacaaaagccccagctgaatgccccagccaacagtcagcatcaactgccagctatatgagggagccattttgaatgttttatttctagtaaatctttcaaataactgcggcccagctcatacttgcatggaacaaaagaattgcccagctgagttcagtcaacctacagatgcatgacagctgataagtggttgtttttgttttaa

SEQ ID NO: 6897 - DNA, 265 bp, mus musculus
accatcctactacaagccctgcaggcattgacacacaatccttagctaaacaaaacaacaaaaaatgagaaggaaatacccatctacttccacaactttcagattcctgtgtttggccttctaagcatcgtttttactagcaataactcacggtggtactatagacctgattttcatcaggttccctggaataaatctctctgggtatctcaagcagaaagaaatgtaacgcagataattagttatttaccaaactattggaaaa

SEQ ID NO: 6898 - DNA, 489 bp, mus musculus
aaacatacattttgaatttcctgtaaacatttagaatgctagggataattaagaagggttaaagttacagtttacaaaatcctttcatagtaaagccacagtttacaaaattttttcaaaatactttcaaagtttcatagttgagcttcatgacaaatccatgttgtggaaattattgtcctcatataaaactaaactaataaaatatatatgtggatttgattatcaaagaatacagctattacccatagtgaagacacactttctaaataggcaaaagctttccctgagtcatgaaagagttggagacgatctggaggtctttatttcaggagtcattactaatctaggatgacaagtgtgcctgcagtcaaaagcagaagttggaatctgagtgagttgcttatggaaacaagatttttctttagggagtgagaatgctgcttgtaaagcagaagtgattatatatatatacacacacacacacac

SEQ ID NO: 6899 - DNA, 495 bp, mus musculus
cctatcaaaaggaattgatatcagtgtgctgaagaggtatctgcattcccatgttcatagcattattcacaatagccaagatgtgaaatcaacctaggcattcctcatcaaatgaatggataaagaaaatgtggtaaaaatgcacaatggaatactgttcagccttaaaaaggggaacaatactgttatttgcaacaacatggatgaatctagaggacattatgctaaatgaaataaaccaggcacagaaagacaaatcccttataatctcacttacatgtggaatctaaaaaagttgaactcacagagctagactccgtctcaaacaaaaaaaagaaagaaatagaaagtagaatgatggttacagaggctggaggggtcaggaagaagggaaagggcagctgtgtaatcaaaggtgcaaagtttcagaaagacaggaggaataagttttgagatctattgcatggcagggtgatcatagccaataataatata

SEQ ID NO: 6900 - DNA, 3206 bp, mus musculus
tgtgttcacctctttttcagatgatgctcatattcttgtgttctggttttgttttgtttttttgaaatgctttatgtaggtataatttacataccacaaaatgtacctagtttaagcacacacaattcaatgatttttaataaatgacataattgtgcagccagttgtgggttgtgtaccacagtctagttttagagcatttccctgaccccaaaatgcttatttgcagacaatctctcttcccacacccagccccaggcaagaactaatctgctttttgtcttatagacttgccttttcaagacttctcatgtgaaaggaaccatacaatatgtgatcttttgcatctggcttctatcacttaggatgatgttttcgaagatcatccttaatgcactaggatcatggatgcatggatcagtagttctttcctttttattactgaatggtattctactgtatagatattccacattttatccattccctagtagatggatttttggatcgtttctactttctggctattatgaataataccactgtgaatattcgagtgcaaatctttgtgtgggcacattttttttttcctcttggatacatacctaggaatggaattgccaagtcatatggtaaatataggctttttttttttttttttgagctggaatctcactctgtcgcccaggctggagtgcaatggcgcgatttcggctcacggcaacttctgtctcccgggttcaagtgattctcctgcctcagcctcctgagtagctgggattataggcgcccaccaccacgcctggctaattttttttgtatttttagtagagatgcgatttcatcatattggacaggctgatctcgaactcctgacctcaagtgatccacctgcctcagcctcccaaagtgctgggattacaggtgtgagccaccgtgcctggctggtaaatatacctttaatttcttaagaaactgtcaaaacaattccaaagtggctgtaccattttacatttccaccagcagtgagaggtccagtatcttcacatccttgccaatacttgatatcatctgtctttttattatagccattctagtgagtatgaactgatacctgagtgtacttttagtttgcatttccctagtggctaataatgttgagcatcttttcatgtgctgattggtcattcatagtcttctttggtgaaatgtctgttcaaatcttttgcccgtttaaaattgggctgtgttcttattacgaagctgtgtaagagttctctatacattttggaagcaaggcccttattagaggttttatcaattatttcttttatggatcgtgcttttggtatatctgtgaactcttagcccaaaccaaggtcatgaagtatgactcctatgttttcttttagaagttttatagttttagctcttacatttaggtctctgatccattttgagttaatttttttgtctggtgtgaggtagatgtccaacttcattctttctcatttggatccctagttgtcccagcactgtttcttaaaaaaaagaaaaaaaaaaactgtcttgtcatctttgaatcatctttccaccctcgtcaaaatcaattgactgtatacgtaagggtttatttttggactctcaattatactccattgacatatgtgtctactcttatgctaataccacactggtttaaaacttttttttttttttttttttgagacaagttctcgctctgtcacccaggctggagtgcagtggtgcgatcatggctcactacagccttgacttcccctggttcaggtactccttccacctcaacctcccgagtgcctggaattataggtgtgcaccaccacgcccagctaatttttttattttttgtagagatggggttttgccatgttgcccaggctggtctcaaactcctgggctcgagcagtctgcccacctcagcctcccaaagtgctgggattacaggcatgagccaccatacccagcccttttttttttttttgagacagagtttcactccagcccaggctggagtgcacaggctccgctcactgcaacctctgcctcccgggttcaagcaattctcctgcctcagcctcctgagtagctgggatcacaggtgcccgctaccacgcacggctaatttttttttttttttttttttttaagtagagaccgggttttgcagtgttggccaggctgatctcgaactcctgacctcaggtgatccacctgccttggcctccaaaagtgctggaattacaggcacaagccaccgtgcctggcccgcacccggccctttttaaaaaatttatttttctttgttttttgttttgttttgagacagggtcttactctgtcaccgcagctgtggtgcagtagtgcaatcacagctcactgcagtctgcactattttgattactatagctttgtagtaatttttgaaatttggaagtgcgaatcctctaactttgttctttttcaacattgttttggccatttggggcctctcaaagttccatatgaatttgaggatcagcttttccatttctggagaaaaaaaaagccattgaatattgataaggattgcatcgtatctgtagattgcttggctggtattgacatcttaatagttttaagtctactaatctgtgaatgtgggatgtctttccatttatttaggtcttctttaatttatttcagcaatattttgtagttttccatgtacaggtctttcactttcttggttacacttactcctgtgtattttattcttttggatactcttgcgaatggaattgttttcttaatttctttttcaaggttgactttaaaaaaacacctgtcacaaaaatcttcaacactacatttcacttcatatttcagtatttgattgagttgaaaatgtaattgactttttggtcagagttctatacaaatggcttctggtttttcctgtattttcatccattttaattcttacactattttatactgctttggagatgacagagatagccactttctgcagtttatcactttagagaaaacatgtttatatggtgacagatcaaggctgtctttatgaaagtaaaagagtgaaaatacagccaaccccaaggctactttatctgtttaaccttggaacttcctagtactttgccactagtgtacatagtccatag

SEQ ID NO: 6901 - DNA, 1202 bp, mus musculus
actttacatgagcgtttctcaacaatgcaagatatacacaaggcagatgtaaatgaaattccattgaattcagatccagaaatacacaggtaatgattgattaccatattatacccatttaactaatggggatatacctcagaaaagatttgggaaggggctgctttccgaacctgctcacttgggcttgctgtagactgtaggattgcatttcctgcacaaaaataataggataatccaagcattatctggccactgcactttgatggaatgaataggatgcgctgaaaacattgactagcgttgtttaaatgtgtaggactttgaagatgcttacatacctaacttcacttctgctgtcaatagtaattgcttcctgaggtcctcagtagaagaatgaaagacagttttcaagccatcgaaatcatatgttgcttcgtgtggtcacaaataggtgttctgagggcagccagatgaaaccacgtgtcttctgctggcacttgttggagcaggtggtgtaccctgtcttgtgagctgatttgaatacatgtgagaatgcagtatatcaccagagcaaagtttgagattacacagactactgatttgagaaccactaaagcttccctatagtgtgttccacaggatatgtatatcctgggagactgccatataggtgaaaaactatctggtagcaagtttcttttgctagctccaaaacatactagctttatttcaaattctgttctgtaatagtagaatcagggtatcagtgtataacataattatttagttgtactatgcctttattattttaggagaatagatatgtctttggccgagcttcagagtaaacaagctgtgatctatgaatcggaacaggttagtgaatacaatttttgatgagaaattatcttattgtttgtatattaacggcaaggggcttggtggttgggagagaaaagggagttaaagtacatgaagaaggaggattgaaacccaggaatctgaaattaaaaaagtcttcaggtgattctgactatcagccaggttggagtgagaatactgacaaaagacaaaaatattccctaagagggacaatccctaaggataacagctttgtaaaattgacacgcaattacagcatttgatattcatccccaaaatccgcactgtaaagcttatggaaagtatgttaggtacct

SEQ ID NO: 6902 - DNA, 593 bp, mus musculus
tgcagtaaactggcaggccagctgggggatgcatagtctatgagagcctagcagaaaacacttatttctgcttcccgtgcttgttcatcctccagcagcctagagaagcaaaagaagaagtgcataaggcttcttgagacctaagcttgaaactgacccactgtcactcccaatgcatcctattggccaaagcaagtcacaaggccaacccatatttaatgggaaaggatataggctccacctcttaatggaaggagcagcaaagtaattgtagaaaagctgtggatgcaaggagagatagaagattggagacatgtttgcatagtaccacatgcacagtaagacaacagatctaacctagagggaatcaagaaaggcaaaatacagtctttaaatattagtatattagtatctataataatatgcattaaaaggcaaatcaatacttacattgacagtataaaataaggaatccaaaacatataattgagtgatagccttgagtcagttgttctcttgttacatttgtcacttagctaaacctctgaaaagtaaagtaagacatttttttgtgaactttagctaaatataaa

SEQ ID NO: 6903 - DNA, 294 bp, mus musculus
gtctttttcttagggtatgtatattaaatctacatatgatggcctccatgtaattactggaaccacagaaaatgtaagtattctaacctttcaaatttttaagtgtgtttttcccttttattgctaacaacttatatatctcacatgattgaggttaacatctaaggataaggacatgaacagatagtagatacaatttaaaagagatactgagttagtagcattcattctgttcaaatttccctttttttttgtttagaatagctgtttacttaaagtaaatcaggtgttttc

SEQ ID NO: 6904 - DNA, 294 bp, mus musculus; identical to SEQ ID NO: 6903

SEQ ID NO: 6905 - DNA, 1207 bp, mus musculus
cattagattttgtgagactcaaatgagatactgtctggcaaaccacaatatacccgtgaaaaggtacaaagtagtgtgtatgtgtaaaagcctttagttttaccaaatgctttgtgccctgatttctctgcctacaaaatacgggtaaatataatatcctttcctgcttcacaggagattagaaagttaagtgacatgatgtatatgaatttgttttgaggctttgtggggaaaaagttcttcccctaacagtgtttagagtcatcatttagctcttgagagttctgtgtagcgtgctggtgctctggatcacaccctgagtatcagataacattctttttatctttgatttcagacatttcagcagtcctcactgcagcacaaatcaaagaagaaaaacaaaggtaagaaaaggaaatgaaacctttacctgcttattttgctctttgataatccccaacacacttcatccatgccctctttcttgcctgagcccagtgtggtttagaagagcacaacccccttgtgcgaaagctgccagcttcttcttcagtgcaattataatacaaggtaccttttacaacaaatgatctcaataagttttgagagtggtgttacatatttctgattaagatgtgtgtcacttatgtgagggaaaatattaaagatttttatatttttctagtctaatacaatataaaaatttttaagattttcaagaactcatacttctttttggtatctatagattaatcctctactttcatacctttgacaaaattgaaagagcatttccaccctttaggtcctatagcaggcaagagcaaaagacgaatttcttgcaaagatcttggccgtggtgactgtgagggctggctttggaaaaagaaagatgcgaagagttacttttcacagaaatggaaaaaatattggtttgtcctaaaggatgcatccctttattggtatattaatgaggaggtaagataaagcaccttttgttttctcatccattctctatctttaatcaaaagaatcattttgagacttatattttaaaatcgtataatcaccttaaggccaattcagtagacttctgctaggtatttttcaatccaccctcttaaaatgattgcatgttggggttctagaaagatagctgtctcaattatgctaatgtagcaacatatctgaaacacagataaagtgt

SEQ ID NO: 6906 - DNA, 1207 bp, mus musculus; identical to SEQ ID NO: 6905

SEQ ID NO: 6907 - DNA, 1106 bp, mus musculus
gaagacatgaaaatcaactaaaatgaaatacataaaaaatcagtaaagagcctgcttacgaaagtggaaaaacaacagctgggcggggtcgcagggtggcaaacgtacgcgggcacgtgcacgtgcttttggggccgacagacgcgccagttgcctaggcgcatgcgtctggctatcccagaagcacctgcgccttccggctcgtgctttcctcagtctcgcgcctttctctgcagctcgcgcctttctctgcagctcgcgcctttctctgcagctcgcgcctttctctgcagctcgcgcctttctctgcagctcgccccttcctctgcagctcgccccttcctctgcagctcccacctcactcccctcagcgttctttttcccacggtcttcccgttgccgctaacctaactaactctcagccatggcctccaacgaagatttctccatcacacaagacctggagatcccggcagatattgtggagctccacgacatcaatgtggagccccttcctatggaggacattccgacggaaagcgtccagtacgaggatgtggatggcaattggatctacggtggccacaaccatccgccattgatggtgttgcagccgctcttcacgaacacgggctatggcgaccacgaccaggaaatgcttatgttgcagacacaagaggaagtggtgggctattgcgactcagacaaccagctaggcaacgacttggaggaccagttggccctcccggatagcattgaagacgagcacttccagatgaccctggcctctctgtcggcctcggcggcatcaacatcaacatcaacccagagccgcagcaaaaagcccagcaaaaagcccagcggcaagagtgccaccagcactgaggccaacccggcaggcagcagctccagcctgggcacgaggaagtgggagcagaagcaaatgcaggtcaaaacgctggagggtgagttttccgtgactatgtggtcccctaacgataacaatgaccaaggggcagtgggtgaaggccaggctgaaaacccacctgattattccgagtacttgaaagggaagaaacttcctcctggggggttaccaggcattg

SEQ ID NO: 6908 - DNA, 1106 bp, mus musculus; identical to SEQ ID NO: 6907

SEQ ID NO: 6909 - DNA, 551 bp, mus musculus
ttctgaggaggtgtctgccagcagaccctatcctggacattttatggaatctgagattactaatgctgaaaacaacttagcatttctgagagacatcttgattcaggctccagcctatcctgttgttcccctcttccctctgcgtgcaagacctgcaagcacattgtgcttaatcttggactttgcgcttggcaaaattgttcagaggctttgaggacagcaaagcactatcaatgaatggagtgtctctgccccccacaacatttagaaatgatttttacagacatgctgtagatggatataactatttaaagcaggagtctgcaaacattgggccaaatctggcctcctgcttgcatgtttgtaaagttttcttggcatgcagacacgcccatttattacatagtgtctgtggctgcttttgtactgagtagttgtggtagatactgtatgatctgcacagcctaaaatattttctatcagaccctttacagagaaagtttgctgatccctgtcttataggaaaccagtgaaacctgctcaaatgaagc

SEQ ID NO: 6910 - DNA, 298 bp, mus musculus
atctgtcaattgtcaagctgctctgttcttacaatatttttaactttttattttgatataattttgaagaactgcaagaatagtataaagaatttccatatgtcctaatctaggttcttcaattgttaatatttttatcatatttgctgtatcaatattcctctcaatagatagatagatagaagatggatacatctataattttgtaactacatctataatttttcttctaaatcagttgagagtaagtttccagcgtgatgccccattatctctaaatacttcagggtttatttct

SEQ ID NO: 6911 - DNA, 1308 bp, mus musculus
atgatgttttaaataattttaatttctattatcaccagtggaaaccatatttattatagaagtttccggtgattaaagagaagaaaaatttttaaattacctgaaatcctaccactcaggaaagactgctatttattattttattgtaaatccttcaggacctttagaacatttaaaatctctattcctcaatattaaactatcctgtagatcttacttggtgttagtcatatctctgggagcagaatcggagtgtctgcaccctgtgcttgagggactgaggtatgaccaagggaacctgaggcatatgcccgctttgcttttatggcttaggcgtctgtgtccagcaaatgcccaacttatgacctaaccagtgaattggtctagactttgcagaaacctctataactcattttatatcctcctcctacccctactcctctctgagactctgggcagggccagacctgagccaacatcttttcctgagaactgcctcctggtcttgcttggcctgccaaggtcaggctggatatcccccttacaaacagaaggcacccatagtttttgtctctccacactaatcccaccaaagggaagggatctagcagctgcagcagcagcaggagagagagagaaaggtacctcttgtggttccattcttggaagccgctatcaccagagctctggcctattggggcctcaagatgacttccctcaatgcctgccagagctctcccacttgaggttagagggaggagaagagggttgtagccacctttcctgaagacgggtaggatgacctgcaggtgatgtgaactccattcctggcctgtgaggtatataacctaccccccttgccagcctctggaaaggtccaggagagagggggtgcattcccatcttgtcactgctgtattctcagagatgtgcagcaatgactgtggcctcagcaagcccttcttctcccactccaaaaagcagattgaaatataaaactgacatcattacagggatggccttaaattgcctctagttcataaaaataaccaaattgatctccaacttgttgctagtattggtaagaaaaaaaaaacatagggctcattctacgattgattcaggtgtatcagtatatctcagttttgtcacatcataagccttgccatctcttagaactgcataatttctgcattcctgagctctgatgccctagtccatcaacttagttacgatcatctttttcttactgatcttgcgcacctccttcctggccctcttgtcaattcatttaccctatgactgaga

SEQ ID NO: 6912 - DNA, 1394 bp, mus musculus
caggatttttgctccttactggaatatctgctcacagctgtcaagggatgtttagtttcattctactttaggtacattattgttaatttttttttaggtgttctttttttcttggtgaaagtgggctgttttaaatgtgtgctttgagtattcaaataaaacagaattttcatctcctaaaagttagggtaaagagaaagcaagaaatatttcttttttgacttgcatgcttttctcctgaaactccatgcagtaaataaagaacattggaacaaaaaaaaaaaaaaaaaaaaaaaaaaaaggcaccactgcatcatgtcttgtcacgttctgctcacccctacacctgatttcaaatgtaaattgcatggcatttagcgctaatgaaaatactctagtgaaggaaattgttaagattttctggtgctcccctaggggtaatattaaaaaccccgttactaacatctcactctgagaagacaaaaatgtgcactgagaatacaaaagccctgttggcatctaaatgtgggccaattaatttgctgttattgacgtgtggatttatgaggagatgtaaaagtaggacccaggaaagctattgagatcctcgtactgcgggacttcttgaccctggattttcaatgcttgcctaatcatggcattctgctttctatttatttatacagttgcttcaatgaacaaattaataattatacagcacattgacaaacatgccgggtaatatttgccagattttaaattaatttaattcaagggccacttcatttacaggattcatctgcacatcaggcatcagccttacctcgttgctattcatgctataccaagatttttcatcgttttctcccttcttttcttctctacagacaaagacagcacaacttgccatgccaaataaatagacactaacaggcaggtggaagacagatagatgacagacaaataggaatatagataaatgcacagatgacataaatttagaaggaaggataatagctgttactatgatatgtggaagacaattagattccactaaaatcttgtatttattttctctttagctccaatttgcaatttatcttctcttgttttgcacccacaagccttcttcacaatttacagactggaaattcaaatggatagcttatagttccagaaatgatcactcttcttggaaacagaaaaaaaaaacatgtaaaaatggaacttcatgggcttaggaagccaggcaaaattctgggttgctttatatatcagtgaggtttgagtgaaagtgaatgacaagattggattgcagagaaggggtcagttacttttaggaaaatcgcaattgaaacgtcggacataattgtacttgggtttgtaagaaagaa

SEQ ID NO: 6913 - DNA, 205 bp, mus musculus
gccttttccttgttctatatccccatcactaatgatttagttcaaatacacatcttctctagcatttactatggcacaaaactctgttttgttctctctgcttctacttttgccttacctctccatccatgttccatatcgccaccagattgattttttcttaaaaacaaatctgatcatgttatttctttgtataaaacaattc

SEQ ID NO: 6914 - DNA, 274 bp, mus musculus
atcaaatgaattaaaatatgcaaagtacttagaatggcgcttggtgcttagtaaacactataagtaattgttatttttattgtttgtttaatgtgatatatttatgtcatacagaatcttaaatttgcatatgttcaaatctattaatcttttcatctgtggtttctgcctgcgggtcatgcttaggaagatcttaacctaaagattatttttgaaaagcttcacctatatttcctatcggtacgtttttaaacattcaaatcttaaatccatc

SEQ ID NO: 6915 - DNA, 274 bp, mus musculus
ttttggcccggaaaataatggtgacatcctttggaagcaaagacaactaagtctctttctgtttttctaccttcccttactcttcctcacttcacactggcagagcccagctagggaaggggaaaagatttaacactaaatatagtccagagttttgatgatttcaagggcttaatatttcagttatagaattgagacatttgtatgtgtgttatatgcatgtgcatgagacttaaagaaactttcagattgatttcctccctctcaactttta

SEQ ID NO: 6916 - DNA, 224 bp, mus musculus
ctaaggtcagcaaaggaaggagtaccatgcctttcagggaatcaacagcagaagcctgcgtgatttctgagggaccactgatctcagaagagtaccgtagcacaaagcctgctcctgccatcaaacttaggaagccctgggccaggctgacttcttcaagggggtctcagagatgtgagggccttggtctaagggaagagtactcaagtcagcaaagaaaagca

SEQ ID NO: 6917 - DNA, 388 bp, mus musculus
agagaagaaaagcaactcaagttagattaagtaaggaatgaattttttataggaaactcaatgcctcacagtatttgggggaggtttgtaaaaacagaatacaatctgagtggagtatattgttttattgctgccaactctttgctccctccaagttataggattgtatatctaagctctatgtctgtgatattgaagtgtctcccagtagaacaggcacataatatgtctccaactcttttactttgaccaaatgaaggtgacactatgccagttttgaatagttgctttaagacgaatcttgcattttgactcattctcttgtgttcctgccatccttcaggaggagaacatgccctagggtgttgctgctgcttcagcctggatc

SEQ ID NO: 6918 - DNA, 341 bp, mus musculus
ttagccatgttttaatgaaaggtctgaaaaaaatgtctttttgtatctatagatggaaggaaaggaaaaggtagtaataagagaagattagaatcacatttttgttatccctcgactaaagttagaagatattcatgatctagacattcttggagttgttacactttatgtcattctgatgtttttggtttaaggacttggctgcatctatggccccattattgactgattatgctaatcttatggagagtgtcattagatattgaacaaagttgcaactcctcatgtgaatactaaggatgttctcaaacacattttcaaaacccaagagggaaataaac

SEQ ID NO: 6919 - DNA, 415 bp, mus musculus
tataaaatcaaagaaggaaggaatgctattctattcactcattgtacagtcagccataaggcagtgcttggctctccctaagtatctgttgaaagtgttgaagaatagttacatagaaaataataaaggaatatttaaaaacatagatatgatatgtcctttttgaccttgaaattattcactggttccacctaaacgcaaaaataaaaatgaaaagtttagaatcaggccttacctccttcattggtttctcctctcaccacactcttaaaaacaccttttgttcaaactataataaagcatttacaatataaatcatatgtttcagtcacatattgttttcttcacttattggcttctgagcctgaagtgactatcctcccttctattcttagctaaattatgattatccttt

SEQ ID NO: 6920 - DNA, 685 bp, mus musculus
gaaaacactcaagccttcaccaaaattaccagggaggcctccaaaactaatccaagcattttcaaaatctcttatgtcagtaactacaagaattctgagactcctggttaatttttcatcaccaggctacccattcatatgttttggggattctctaatattatgccattatcacccatctccatctcccaacacccttttaccctgtctcctggaaaatcccaccttacctgaatgtttttgttctaactgaaagcatacattccactgaaaacactgctccccacatagtttctcgagtgtttgctctcttaccactaggcctggaagtagcatcagtgtcttccttgtttctcattgccacctctgggcaattatactgttactttctgtccttggaaacttaattattagtggtaaataccactgatgtatcacctgctatttctccttgctgtaagcatccatgtaccctctgggttcctcttcctcattatttaacaaatgtagtctctctctctctctctttctctctctctctgtccgtctgtctgtctgtcttcaatgctacttctttcataattcctggcgatttctgtatccatataaatgcacatgtacttgtctttcttgttactgtggataaattagctgtggtctggttacagctaatactttccctagt

SEQ ID NO: 6921 - DNA, 163 bp, mus musculus
tacatacttttaagcctactgatgtaattactgaaagaataaaatttatacttaaaattaatctatactttgtctcactggagaaaagtcagtaaaattattttttccatctttcttcaggagaaatgaccaaagagagtatttagcatttagaaggtgcctc

SEQ ID NO: 6922 - DNA, 576 bp, mus musculus
tggactctaccagctagaagccagtagcaccctcacagctagttgaggcaactaaaaatgtcttcagatattgctaaatgtctcttgaggagaaaaattgtcctggttgagaatcactgaatttgagtcaacataagtaacaatgaccaaatatatttttttctactgtacgtccatcatttgcatggcctataaagaataaattctttgattctattcttttgtctcgctacatatcagttcggacttgagtctagtgggaagaacttcatgacagatggtttcactggtcccaagatgatatttttgtagtcactctgtctgtgctctctggtagatgttttctctagctgtgaccacgattcagagttcagcagtggccattagagtgcattaggctagacttgttaaatgcatatttattcaggagtaagtgtttttgtaggtcatggaagctgtgacagaaaatgttctgagcagagccagaactcttctctccacaaagcaatgtagtcaccccctaataccttggaaagctcagaggcaaaatctggaccaacaaactgaatacttaaa

SEQ ID NO: 6923 - DNA, 266 bp, mus musculus
atgtgtggtgaatcctattacagtagatggaaccatgtatcatgaatgtatgtcaaaagtggctaaaagtcaatttcatatgactccgcttaatataatgttctacatggtaggacatctttgatgtgaactaaatatatacaattgtataggccatcaagtccaagctatccatctacatagatatgagctcttacatatgatcctgcagacttgtttttagcattttagtgacccaatgctcactcactcatgatattactgat

SEQ ID NO: 6924 - DNA, 655 bp, mus musculus
tgcccatcagaatgtcccactctgtctgaaatggcagggcctttacacccatgcctgattcagtcaccagatacaggctgctctgagaagagaatggtcctctgacaaggcagctcccagcagctaaggctgaccctgaaggagccgccagatggaggcagcctgctgaccacacgccccacagctggagagcaagaccttcctatgcttaccatgtaagttcagcattctgagtacttgtgagttttgactcattttgtccacaaagcaaccgtattcaactattcaacaagaaccactagtaagtggcagagttgagattcacaccgagtaagtttggcctcagagttcacactcttcatcactctgctattctgtctccctccattgttcagtagagaacttcatgcacaatatgaacaaattgactacctttctctctctctctctgtctctctgtctctctctctctcactaatgcatatatacatgagagaatgtgcagtttgagcttgtatggtaaactaaaattatgttaatcctcaaaagtatcatttttgtctttgcctagatccattttctttgattgaccatgcaatcaacttgttctcttactcaagtggtctcctctattccaagccagtctattctaacc

SEQ ID NO: 6925 - DNA, 312 bp, mus musculus
gtaaattgcaaaatattgatgactgttgagagagcttatttctttgaaccataatgcatgaaaatcatctataactcttggcttgcaaaaaggaatccacaatctttctccatattacaaattatataatgtcaagtaagaaagtgcaaaataattatgaacagaattttgtctctttacattcattcaacatcaccaccaagaaattacttgtctagaatttggctgacactttggaaatgtacataacttatttatattaaagagtttaactgtatttctagtgtatataaatatgctcttatgatgcat

SEQ ID NO: 6926 - DNA, 210 bp, mus musculus
tcatgttttccctatgcacacacacacacaatcctgttttaagttaatgtaaagacctactttgttggagagaagaaagagagatgtcacaaatggcaacctactagtgcaaagaaaggtcaacactgtggtctgggacccaggcagccctggccctggtcccacaagacttgctttatgttttgttttgttttcagcccttcagtccac

SEQ ID NO: 6927 - DNA, 725 bp, mus musculus
aggaaattttagaactaggtactttgagaattaagagattaagaagggattattttctatctgcacagttctcagggaatagatatgatgagtgatcctaactatttgagtaaatgtcaactgccagcagacaccaccagcttatatcgaagaaaagtcacaaaaaatatgaagagattcatcacactgggaatggaaaacatcgaataagtcagcaagtccagcaaaagaagaaagtattacaagtataatttaaaaatagttttggcaagaggaggttggggagaaagcagagtaggctataataataattataactcaaagatgggccagacctaaatgtacaccttggcctctttccatcctaaaatgttctatattagcaaaagaggtgttatgatttatactcagctccaagtctagactggtttaggtttcctgtgtttaattctgcttctttcttaacaaaaaaatctagtcatctagatctcaagtgaaatgtgcaattgaaggtataaaaataaaattcaattgaggaaggcaagtttgtccttaaaataaaatttaaaataccagcatttatttttaaaaaactacctaattacatctagtcccatacatatgttcaagattaatatgcaactgatgcatgaaaataaaattcagctgagggtaactactgtctcattaaaaagaaaatagaaaactagcatttctatgaaaac

SEQ ID NO: 6928 - DNA, 366 bp, mus musculus
aatacaatgtggtaagattgacatcatgccatttctaggtttagaccttaggagaccttgaatgcttccatttattctcttggaaccctgctatcaacagatgatgaaagacttaacgttttactcaccccattcgacaggtggccaatcatcagacatgagcgaggccattgtagaacaagaaatcccctaatcttggctaggtttcctcataggtctgggttagctgttgtgggtactcatgtcttactttaaaatatggttatttaatacctctgtattgttattcctctaagaagatgtaataagtcctctggaagatatgacattaatggacttcgctgaagttttctgtgactctttatg

SEQ ID NO: 6929 - DNA, 232 bp, mus musculus
gctgcctatttccacacatctataggttaaataaaccaatattgaataccattggcattacattttttcaagatttgaaagtgactcatgaatcattaaggagaggttgaattacgtcaagtgtagtttcactactacatttaactgatacttttaaaaatgtactcactttcatatggtgcataaagctctgttaactcaaatattttcattgtccttgatatttaatacc

SEQ ID NO: 6930 - DNA, 1009 bp, mus musculus
tcatattgtttgaaagtttattttgaattctgtagaaaaatgagtactgttaattaggtgatgtggtttcagcattctcaggcgtctgctccccacagtatcaaaacctttgcccaagtccactcactttattgtgacccctgtagatgctctatcattatggtccctttaccaaaaaaaaaaaaaaaaaaaaaaaaaaaaaaaccttgttgtctctcaggcaaccagcgctttttgtcagcctatttcatctccccatcccttcctacaatcgtttatactactgaaaacttgaaagcccacatcccattctctcctggatctctaggcctaccaaagtttctttctaaaaccatgaaatgaccacaagttaatttgatgaagtgattcataataaattgttaataagaagtgacctacaactaggtcaggtcattcttcaaccacctattttattagtgatcccccacaggcaatacatgtgactgaagctggaatttgaactttctgtgatgagggccctgtagcgtatatgtgagacctctggtagcaggagtctctgagagcctctaactcatggtagtctgaaatagacataggcaaagccccagggacatttttaagagagctgttgtaagtaatccagtattataagttaagtctgtcctgtattcatcagaaaaaaacagaatctgctgctacaagatattaggatttctggtcttaagcaacagacttgaatttcactacctggattcttctctttggcttcatgtttgcagataggatggttgaggaggatggagctattgagagggtggctgctctgtgcagttgcttttgtttatattcttactgacctggcacagtgtaggtggaggtgatgcatgttttctgacattgggccagtgatgtatggcctgaccttcaaaatgagaaacatcatctctgtgggtgagactatagccgtgcaaatgcttttatcccatattgctcagcagtttgcaac

SEQ ID NO: 6931 - DNA, 583 bp, mus musculus
aataatttaaggagatacattatgccatttatttcaatatattttaaaaccagtttattttcatgctatctaaactgctaactggttcatcttaaatttggtgatcctctatagtttaataattgtcagaataaagtgtttgagtaatcaagaatagagctaacaccaatccattagtttatatggtttgtactgattaacatcatcccattctgccatgggccttctcacaaaaatcttaatgagaaagagagacagagacactaaaacagtttagtgagaagtcaccaaaaaatttcttactagttacttggcacgcaataaggttgtccttgccaatgacgctaaccatgatgacatattaatcaatcaagaaatggtcatttatatcaataaatattcagttcttctattatttctcctttgacagtcgtgatttttctgtcagtctacatcaccattgcttccagatgagcctcttttagtccctctctatggtatgcccaagttctattcttcctcactctaggtggctgcaaacagttcttccccctcttggccatgtgtgaaggaggatggaaat

SEQ ID NO: 6932 - DNA, 550 bp, mus musculus
aaaatatcttacatctcaatgtagtctaaaataggttaaatgagatggttcttcctgagcaagcacagcaggtctgcaatacatcttctttctccacatacattatgtcaagtattcctttagcatttatataagttgtatatgtcacacagatatggatctataaatgcaaacagagcacagatgctggcacgatacacacttaaaattgttttatagcttttggattttatttgtgtcgacttaaaagcaaatttataaatattttttatttaagtaaaagatgtgagctgctattaacactgaaagtgattttagagatcatatattctacctcccacattcgtcacattagggagtacaattcagatgtgtcaagtggcttatcagaggttggactgtgagttagtagaagacctggaaatgaactccagctctcctgactacccagttggctttttccatcctattgccatatctcctaggcctctgccaggacagagtgccacagaactgtcagatggggaaatgagacacaattgtttcctgg

SEQ ID NO: 6933 - DNA, 197 bp, mus musculus
cactcacctaactgcaggaatttggtagacacacatttctcaaaaatgctcaaggatactaaaaatgatacctgatctcatgattgacgagagtagtagtctacccatttaatacctaattccagttcattctattcattcgagacaaaccctatttttattccctttcaccttattttctccatggaatatgtgat

SEQ ID NO: 6934 - DNA, 999 bp, mus musculus
tgttttgtggaaatcataattagtatttgcttctggtcaccaatgaatatgtgtacaatctaagaggaaaatggagtccttaaaattcagctccctaaactgcacattagacttatgtttttaaaaaataacaaaaaggaaaataaactaagataaaccagcaagatgggaagcatatgcaaactgacaatgaatagtacagatgacaaagctttcttcatcattttttttttttttagtgaggtggagtttcactcttgttgcccaagctggagtgcaatggcgcgatctcagctcactgcaacctccgcctcccgggttcaagcgatcctcctgcttcaacctcccgagtagctgggattacaggcgcccgtcatcacacccagctaattttttgtatttttaatagagacagggtttcaccatgttggtcaggctggtcttgaacccctgacctcaggtgatccccccatctcggcctcccaaagtgctgggattacaggcacgagctactgcacccggtctcatcatatttatatactgtttttttttcagtgattttcagttttgcagtaaatggtaccaaggaaaatgaggcaattgcctatgttgccacgtttccagggtcctctggaataataaatccacaagcaaaactagttttgcaggtttgtaaagagaagtggtttattcagaatgcctaacactcctcttggtttacccttctctccttcccattagggtgaagcctgagctgcagcaaaaccctttctttttcttaagtttttaattgctgatttgcctatttgtttctaactttcttgcctattgatgcaaattattattattactattgctgctgttttaaagaaatataaggactttgccattgtcggaactactgttgaatgagcaccaagcatagtgctaggcattcttagagtcattcttgctaaccctcacaaacatcctgaggtcaatattgtaatctccatttta

SEQ ID NO: 6935 - DNA, 272 bp, mus musculus
tttattgatgaatccaatgacattcaacctcatcagctagtttggtgagccaaatccatgaggataatggcattacataatagtgattagatctcagggcaattagagcaattatatgattagagggataacatcctttatgtaaggcaatatgaactcccagatctgctagacttttgtatcacttcatattttcatagtgttttagaaagatatatatccaagacacaaaatattagaatatatatttcatagctttaaggacaatatat

SEQ ID NO: 6936 - DNA, 211 bp, mus musculus
ttttcctaactttgtatcatgagtgtctccggttttatcagattctcaagaggatccaccagccccaaaagttttaaaagcattgttttgccagtttgaaaaacattacctaatttatgcttcttggattcaaacatattgcactccctctaaatcttgattcctcttttctttctccccaattcatcttcttttaaaaaaaattgtttat

SEQ ID NO: 6937 - DNA, 1048 bp, mus musculus
gtactggaatgacatccactggagttgtgcctcttataatgagcaggtggctggggaaaaggaagaggagacaaattctgttgctaccctttcctattcctctgtggatgaaacacaagtcagaagtctctacgtgagctgcaaatcatctggcaagtttatctcttcagtgcattcaagagagagccaacatagcagaagtcagagagtcacagtgctgcagacaaaccccaatcctgtgtttgaaagcccaaacttggctgcagttgaaatatgtagagatgccagcagagagacctacttggttccatcttcttgcaaaagtatttgcaagaattataatgacttacagattgcagggggccaggtgatggccattaattcagtgacaacagattttccctctgagagcagttttgaatatggccctttgctgaagtcatctgagattcctttacccatggaggattccatttctactcagcccagtgactttccccaaaaacctatccagcggtactcatcctattggagaataacaagcatcaaagagaaaagcagcttgcaaatgcagaatcctatttctaatgcagttctgaatgagtacctggagcagaaggttgtggagttatataaacagtacattatggacaccgtgtttcatgacagttctcctacccagattctggcgtctgaactcatcatgacaagtgtagaccaaatcagtcttcaagtgtctagagagaagaatctggagacctcaaaagccagagatatagtctttagccgcctattgcaattgatgtcaactgaaattactgaaattagcactcctagtctccatatttctcagtatagcaatgtaaatccatagagaggatgcttccattactgtctcgcatttacttaaacatgaagcaacactttatccatttattctgagaatgtgcaggaggggttagtgaaggggaattaagggctagagaagtaaagatcagctggaagtcatgtgtgaatcatggagaaatctcataatattacacttgat

SEQ ID NO: 6938 - DNA, 277 bp, mus musculus
ggtacacacttttaaaactgtgtgtatttcctactcttcatccagattttcccctagatttagcatccattgatgatacttgcttgaagtagtctatactatgatggctgcaaaatgatttttcttccagctccagcactcctgcatgtttaccaattggattttactgtaagcagggacttcccttctcccctatttttgtaggtatgtatttagctatcttcattgatacggacacacggctccctcttttctacaggtttataactcattactg

SEQ ID NO: 6939 - DNA, 199 bp, mus musculus
tatttatctgacaacttaaaatattaggactaacctcaggtaattatagtctggatatacatttttgctgctcctgtttatacttttgacttctgtgtatttgagtgtctaatcaaaggattgtcttttacatgtgttggagatgtacagactagtggaccccaatgatctattagctgtgtaaccttagccaagttaa

SEQ ID NO: 6940 - DNA, 199 bp, mus musculus; identical to SEQ ID NO: 6939

SEQ ID NO: 6941 - DNA, 199 bp, mus musculus; identical to SEQ ID NO: 6939

SEQ ID NO: 6942 - DNA, 199 bp, mus musculus; identical to SEQ ID NO: 6939

SEQ ID NO: 6943 - DNA, 199 bp, mus musculus; identical to SEQ ID NO: 6939

SEQ ID NO: 6944 - DNA, 199 bp, mus musculus; identical to SEQ ID NO: 6939

SEQ ID NO: 6945 - DNA, 199 bp, mus musculus; identical to SEQ ID NO: 6939

SEQ ID NO: 6946 - DNA, 1026 bp, mus musculus
tagaaattaaaggattttttttttccagtttactctgttaagattgtgtttagctatgcgtgacagcattctcactacagtggcttatccagatagtttctttttctcatagagcaagacttccagaattatgtgttccagggtcagtgcagcacctccaaaaccgtatgtcccaactttttcctccaaccccagtcatctccaacatgagactttctttttgttttgttttgttgtttttgtttttgtttttgttttgagatggagtctctgtcgccaggctggagtgcagtggcgcgatctcgactcactgcaacctctgactccctggttcaagggattctcctgcctcagcctcctgagtagctgggattacgggaacgcaccaccacgcccagctaatttttgtatttttagtagagacggggtttcaccatgttggccaggatggtctcgatctcctgacctcatgatctgcctgcctcagcctcccaaagtggtgggattacaggcgtgagccaccgtgcccagcaagactttttttcctgtggtctcaacatggctactctgcctccaggcactatgtctgtactttaaaatggaagaagggaaaatggggaaagtaaaagcatattccagctgtgtcagctcctgtttgtaaggaaaaccagtgcttttctggcagccccacacagaagagtttctacttgaacagtgcattaaccagaaatgtgtcacgtgaccattcctaacttctaaggatcttgggaggattgagtgttttaactgaataggtgtgtttctttcttcataattcaaaatgtgaaaattggtaacttagttataaaaccttgctagtctgaacagaatttggatttttttagctaagaaggaaagaaagggtatcggataggcagctggctatgctagccaagatactcttaataatgcacatttttcttctttggacataagcagttttaacttagctaaatatgatgtgattgttttcctgtcttcttagtt

SEQ ID NO: 6947 - DNA, 1026 bp, mus musculus; identical to SEQ ID NO: 6946

SEQ ID NO: 6948 - DNA, 1026 bp, mus musculus; identical to SEQ ID NO: 6946

SEQ ID NO: 6949 - DNA, 1026 bp, mus musculus; identical to SEQ ID NO: 6946

SEQ ID NO: 6950 - DNA, 1026 bp, mus musculus; identical to SEQ ID NO: 6946

SEQ ID NO: 6951 - DNA, 1026 bp, mus musculus; identical to SEQ ID NO: 6946

SEQ ID NO: 6952 - DNA, 1026 bp, mus musculus; identical to SEQ ID NO: 6946

SEQ ID NO: 6953 - DNA, 1257 bp, mus musculus
tatatgtcagaaagaatctgccactccaaattccttaatatatttatctaccagtgtttatttgcctgtcacatgtactcttcagtaatccattgacttgaaaactttctactctgtctttcttactatagtttgcttcttgagttcaaattattaatatattaggtcaagtaattctatttttatgcacattttacctaacattcttggtaaatataattgttttttaaattgcatcacatggtgagtattaatttaagacgtaattagtattaatctactggacaagattttatttattaactgttttgccctttgctagggttctgtaatctcaccctcagtgcctttaaatagtcttacccaaggatcacctatccctcttcaatttaaattctctattgtgttagtttctgagattgcacattctctggtttggtttggtttttcagtgatctctgtggtcacttccaaccatttctacttagtttacttttttccctgttagccctcttcagtgttaatatcacctggaagttaacccattcctagtctgcattgctctatggccagcatcttggctgattggccatcacctatcctgtacttattgtcaatttttttaaattttttattgtggcaaacagcacataacggaaaatttaccatctgtctttgttcatgtatgttgctataaaggaatgccagagactgggcaatttataaagaatggaaggtttatttggctcatggttctgcaggctgtacaaaaaagcatggcaccactaccaacttctcatgagggcctcaggcttcttccattcatggtgaagggcaaaggggagctggtgtgtagagatcacatggttagagagcataaacaagagagagaggggaagtgccaggctgttatttggcaactagctcttgcagaacctaacagaatgagcagtcactcaacctgcccccaggaagggcattaagccattcaagaaggatccacccccatgaccccacacttcccgttaagccccacctccaatattgaggatcaaatttcaacatgagatttggaggggacaacatctgaactatagcattatcttaattcaaataattttactaccaattccatttattagagaatctaagattaagactactgaaactatgccaatgattatctctagttcaggcttctctcttcaattccaaactcatattttcacctgctgacaagctaccacgtagatgttc

SEQ ID NO: 6954 - DNA, 1257 bp, mus musculus; identical to SEQ ID NO: 6953

SEQ ID NO: 6955 - DNA, 1257 bp, mus musculus; identical to SEQ ID NO: 6953

SEQ ID NO: 6956 - DNA, 1257 bp, mus musculus; identical to SEQ ID NO: 6953

SEQ ID NO: 6957 - DNA, 1257 bp, mus musculus; identical to SEQ ID NO: 6953

SEQ ID NO: 6958 - DNA, 1257 bp, mus musculus; identical to SEQ ID NO: 6953

SEQ ID NO: 6959 - DNA, 1257 bp, mus musculus; identical to SEQ ID NO: 6953

SEQ ID NO: 6960 - DNA, 472 bp, mus musculus
tttcatactgttttcagaacgatgaatggcctgctcagtagtttcttgtcatcgtactgagacactttaatttcttaccagctgagatgaggaatacgagcccagtgtgcaggtgaaattggttaacaggagccattaaaatttggaagagtcagaatagcatcaatcaaaatgctttcagtgtaggaagtaaacatgtactagcctgacccacctgtcttttcttttaggtatgttggtaatattacaatcattttgaggtatccataaacaactgcttagatctgaagaattgtatatctttctttactctgccctggcctggggttatggttctcattgagctctaacctttcagaaaaaaaatgtagagaagtggttcaagaagaatgctttatcttgcttcataaaaatgatagtgatagttttattgaaggcttactatgtgccaggccaaagtgcgttttattat

SEQ ID NO: 6961 - DNA, 472 bp, mus musculus; identical to SEQ ID NO: 6960

SEQ ID NO: 6962 - DNA, 472 bp, mus musculus; identical to SEQ ID NO: 6960

SEQ ID NO: 6963 - DNA, 472 bp, mus musculus; identical to SEQ ID NO: 6960

SEQ ID NO: 6964 - DNA, 472 bp, mus musculus; identical to SEQ ID NO: 6960

SEQ ID NO: 6965 - DNA, 472 bp, mus musculus; identical to SEQ ID NO: 6960

SEQ ID NO: 6966 - DNA, 472 bp, mus musculus; identical to SEQ ID NO: 6960

SEQ ID NO: 6967 - DNA, 213 bp, mus musculus
tcttttgtacgacatagtgactataattaataataatatgttttcgaaaattactaagagagtcgattttaagtgttctcaccgcaaaaaaatagtatgtgaggtaatgcatatgttaattagctcattttagctagtccacatttttcaatacaatgtgttgtataatacgtgatatatacaacttatattttccaattccaataagtaaaa

SEQ ID NO: 6968 - DNA, 213 bp, mus musculus; identical to SEQ ID NO: 6967

SEQ ID NO: 6969 - DNA, 213 bp, mus musculus; identical to SEQ ID NO: 6967

SEQ ID NO: 6970 - DNA, 213 bp, mus musculus; identical to SEQ ID NO: 6967

SEQ ID NO: 6971 - DNA, 213 bp, mus musculus; identical to SEQ ID NO: 6967

SEQ ID NO: 6972 - DNA, 213 bp, mus musculus; identical to SEQ ID NO: 6967

SEQ ID NO: 6973 - DNA, 978 bp, mus musculus
atttcgagaatttattttttcatgcactttcttctaggaattttgtagtttcaggtcttacatttaattctttaatcaatttttagctgacttttgttgtgtgatgtaagggtccaattttattctttagcatgtgtatatccagtttttcaaacaccatttattaaagagaatatcctttcctcatagtgtactcttgttgcccttctcaaaatttagttgaccatatatgaatgggtttatttatgggccctccattctgttgcattggtctatatgtctgcttttatgccagtactatattattttgattactaaagctttgtcatataattcaaaatcaggaagtgtgatacctccaatgttgcttatccttctcaagattgctttggctattctctttcttttgttgtttcatttgaattttagattttttttaaatctatgaaaaatgctattggcattttgatagaggttgtgctgaatctgtaaattgctttgagtagcatggacattttaacaatattaatccttctagtccatgaacacagaacatacacccatttatttgcgtcttttaaaatttcttaaatcaggccacgcacggtggctcatgcctgtaatcccagcactttgtgaggccgaggcaggtgaatcaccttaggtgaggagtttgagaccagcctgactaacatggtgaaaccccgtctctactaaaaatacagaaattagccggacgtagtggcgggcgcctgtaatcccagctactcgggaggctgaggcaggagaatcgcttgaacccggaagatggaggttgcagtgagcagagatcccgtcattgcactccagcctgggcgacagagccagactccgtctcaaaaaaaaaaaaaaaaaaaaaatctttaatcaatgctttgtagttttcactgtataaatatttcaccattttagttaaatttattcctcttttattcttcc

SEQ ID NO: 6974 - DNA, 318 bp, mus musculus
ggaaggattttacctaaaagcaataatttttctcttttgaaaatgtaaggaaatcaagcataaaagtaaagaaagggatggaacaaaagaggaaaatgaggtagtaggactgtactaataatcagagtagctaacaaaaggtcaaagggtcatggccaagagaaataatttctaagacaacgataaagtgataacattaacatctatacgaatagagatgtgttctcctaaatagagtcctttatcagaaacaaaggaagcaatgtgataacgaaacagaacagccaagcaacagaatgacattaaattccaattgag

SEQ ID NO: 6975 - DNA, 352 bp, mus musculus
tctgactgatgacaaatatgtccaggtactgataaatctatttctactttgaagtttcttgtttatatattaacgtaatccttaagtatttttaaacacttttttcttttttggaagagtaggtgtatgaggggcataataaccagaagtcagtatcagccatctgttatacagtaataattttaattttaatgtattcagtgatgcctagcttaatggtttttaaatttagttgtctgtttcaggaagaagctttattactatcagagatatatcatcatgaggaaaaaaatggagaaggcgatactttgcttgagaatgccttcacaggcaagtgatgtgtaacaatatc

SEQ ID NO: 6976 - DNA, 427 bp, mus musculus
ggggactctaacgaagatgcatcatataaaacttggcttaaaacttaaaacagtaagataaaattttatctgaggcccaagcctctagaatttattttaaaaagtattatactagttagtttcaaggagtacaggttttgtattagacacccttctcatggcatgactcagaatcttaatgggttactgtattaatttaatttcaggactcatcttttaataagaatgtacacaactgagtccatgctaaaaacgaaaatgataatgataataatgttatatttgtggaaatgcttattctttcattgcagaaagctaaagatgttacagttggattagaactccaaagtgtaaatgttcttaaatcagtgcaggggaaatgtaggtcaaagcacataaggtgtttcccaagcccttgttccctaga

SEQ ID NO: 6977 - DNA, 1160 bp, mus musculus
aatggatggatagaaacacacacagatacacacacccgcacacacacacacacagacacatagaaagagaaaaagagagaggtgattacataaatatacaagggtaggacataaattgtaagcatttgtaaaggtacacagattacttcaaaagagtaaacagtactgcattaggccccaaagagaacttctatatatgttagattgctctggtagtgcaatcagctttataatgactaatgaagttaagtcaaaaaattatctgtaaaccataggaaccattaacagttctgctatttgcatccttacatctttaatggttaattccaaagaattctcagtggaggcaatagtcattaaatatattatctgaatcattatctgcaacctgctgataaccaaaagctaaaaatcccacagtgatgacatgaacccatataaacacagcaatctcattttcattaagccattccttagaaatgtgtaatgtacttattttagaagagagccaagaactagctaaaacataaacgaagtaatttttatgggttatttttattttatctcttaaataatttcagcatgttttttagtgggcattttttcaaaaagaagaagaggtagttatgcattgaagtacctataattaatctatttgaatgcaaggttttttaaataaatatattgtaatacagactaaagttagagctgaccgtacaagttattaaaggaggctatcaacattgtgtcataatggaattctctttgatagaatcgttattaaaaatgtatttttctcaatcatctggccaaatctctgaactctcaccatgaaatgttctttttgattagagcaatgacaaagcagaatttttttgttgactataaatcactagcttggaagctaaataccgatgcctgagccagggaaatgttatccactgggccacaataaaatcaccacaggaacttgggaagcaacaagttggtcaggcatcactttcctagggaatatggttgcagaaggtgaggtcagctgcaaactcctagtaatagaagagtgacttagaagagaagacaaaaagaaaattaatcagaaactgtgttataccaagtacagccaaaaacatctttagcttatttaatatttcaaagttaca

SEQ ID NO: 6978 - DNA, 999 bp, mus musculus
gaatgcatttttttcagaaagttagttttactctgaaaatataataaatattaactgtgagcaaaagaaggaggcttacatacttaagtcaatcctgattgtatgcatataatggaaatcaaacaactttgtgacagcatcattaaacctatggaacttgcaatcgttgtgttattcttgtagaattctttttggcacagctcccagtagtgttgacattaacatgggtcatttgtgttatgacattttatgatgtgaggatgcaggtatggaagaataattttgacattaaagccacgccattcagatttatttgctctttatctgcaaatacatgcctatcaggatatgttgactgtgataaaatgacttaacatttagaaagtgacagtatggttaataaaattgggtcattaattcaagatatgtgcatatgtttcatcatggaaatatatgtattcaaatacaaaataatcataaatgttatcagcttccccatttaaatttgataatacaataggtaagaacttttatacacgtgaaatatctactctgcataaatgagcaacttatgtttagggattaagctaggattttttaagaaacaaattttttgaagattaagtttagcatttaataactaattgcacctaattatgttttgatccacccaatgcgaacttggaaaaaatattcaaataaaaaaactactatgtaaaagtttaatgaaatcaattaggaaagtcaactctttataaaactactgacaagacgtaaaatctactgataagacataaaggtaaatattgtcttgtgcactgatgaagttaggccttgaggtagattcaaaatgaaaagcataaaacaagtcttcataacagtctcagcctttaaaatgaaaaaaatgcatttttcttgtcctcaattttacctagggtttactctctggtggacactttggaatactcaaataaataacatgtaggctccctcctcaag

SEQ ID NO: 6979 - DNA, 203 bp, mus musculus
acatttcaataaagtaacatattttactattttttaggtaatccataagaagtgaattgatttaaagaaatttaagttttagttttcattttaattgtcattgacagtcctagtagttggtatattttccttaattttagagttttaactcgtcttttgtaaaaggcagcaagtcattcagaattggtataattagttttgat

SEQ ID NO: 6980 - DNA, 159 bp, mus musculus
gcccgccctgggcccgctgtcgccggtgcgacggtaccaccatcccagctgtgaggctgccatcaacacccacatcagcctggagctccacgcatcctatgtgtacctgtccatggccttctacttcgaccaggacgacgcggccctggagcactttga

SEQ ID NO: 6981 - DNA, 761 bp, mus musculus
cgctgtcgccggtgcgacggtaccaccatcccagctgtgaggctgccatcaacacccacatcagcctggagctccacgcatcctatgtgtacctgtccatggccttctacttcgaccaggacgacgcggccctggagcactttgaccgctacttcctgcgccagtcgcaggagaaaagggagcacgcccaggagctgatgagcctgcagaacctgcgcggtggccgcatctgccttcatgacatcaggaagccagagggccaaggctgggagagcgggctcaaggccatggagtgcaccttccacctggagaagaacatcaaccagagcctcctggagctgcaccagctggccagggagaacggcgacccccagctctgcgacttcctggagaacgacttcctgaaccagcaggccaagaccatcaaagagctgggtggctacctgagcaacctgcacaagatgggggccccggaagcaggcctggcagagtacctctttaacaagctcaccctgggccgcagccagaaacacaccagagcccagacaggccccacagccacggggtgccttcccctgctcgcgccaccaggcgggacgtccatgttcccttttcagaacattctcttcatttttctcctctcagttttaccgttgttggcaataaagttatctgttctcaaagcaataaaggtgtccagctgatgcgtatctgcagcactctcaccttttaggaatcagggcacatccccatgcaggttt

SEQ ID NO: 6982 - DNA, 1312 bp, mus musculus
aagatttttctctctcttttttttttttttggctgagcacagggtactttattgatggtatatgacaaggtggggctccctaggcccctcccctcttcaaggggtctacatggaaactgtgaggaggggagattcagtgtggtgggggactgagtgtggcagggactccccagcagtgagggtctctctcttcctcttgtgctcttactggggctggtggtccaggggtcttactccttggaggccatgtgggccatgaggtccaccatcctgttgctgtagccaaattcattgtcataccaggaaatgagcttgaaaaagtggttgttgagggcaatgacagccccagcattgaaggtggaagagtgggtgttgctgttgaagtcggaggagaccacctggtgctcagtgtagcccaggatgcccttgagggggccctccgatgcctgcttcaccaccttcttggtgtcatcatatttggcaggtttttccagacggcaggtcaggtccaccactgacacggcagtggggacacagaaggccatgccagtgagcttcccgttcagctcagggatgaccttgcccatagccttcgcagtgccagtagaggcagggatgatgttctggagagccccgtggccatcacgccacagtttcccggaggggccatccacagtcttctgggtggcagtgatggcgtggactatggtcatgagtccttccacgataccaaagttgtcatggatgaccttggccaggggtgctaagcagttggtggtgcagaaggcactgccgacaatcttgaggttgttgtcatacttctcatggttcacacccatgacaaacattggggcatcagcagagggggcagagatgatgacccttttggctcccccctgcaaatgaggcccagccttctacatggtggtgaagacgccagtggactccatgacgtactcagcgccagcatcgccccacttgattttggagggatctcgctcctggaagatggtgatgggatttccattgatgacaagcttcccattctcagccttgacggtgccatggaatttgctatgggtggagtcatattggaacatgtaaaccatgtagttcaggtcaatgaaggggtcattgatggcaacaatatccactttaccagagttaaaagcagccctggtgaccaggcgcccagtacgaccaaatctgttgactccgaccttcaccttccccatggtgtctcagggatgtggtttggctgacgatgcaaaagaagatgcggctgactgtagaacaggaggagcagagagcc

SEQ ID NO: 6983 - DNA, 694 bp, mus musculus
tttctctctcttttttttttttttggctgagcacagggtactttattgatggtatatgacaaggtggggctccctaggcccctcccctcttcaaggggtctacatggaaactgtgaggaggggagattcagtgtggtgggggactgagtgtggcagggactccccagcagtgagggtctctctcttcctcttgtgctcttactggggctggtggtccaggggtcttactccttggaggccatgtgggccatgaggtccaccatcctgttgctgtagccaaattcattgtcataccaggaaatgagcttgaaaaagtggttgttgagggcaatgacagccccagcattgaaggtggaagagtgggtgttgctgttgaagtcggaggagaccacctggtgctcagtgtagcccaggatgcccttgagggggccctccgatgcctgcttcaccaccttcttggtgtcatcatatttggcaggtttttccagacggcaggtcaggtccaccactgacacggcagtggggacacagaaggccatgccagtgagcttcccgttcagctcagggatgaccttgcccatagccttcgcagtgccagtagaggcagggatgatgttctggagagccccgtggccatcacgccacagtttcccggaggggccatccacagtcttctgggtggcagtgatggcgt

SEQ ID NO: 6984 - DNA, 1279 bp, mus musculus
tgagcacagggtactttattgatggtatatgacaaggtggggctccctaggcccctcccctcttcaaggggtctacatggaaactgtgaggaggggagattcagtgtggtgggggactgagtgtggcagggactccccagcagtgagggtctctctcttcctcttgtgctcttactggggctggtggtccaggggtcttactccttggaggccatgtgggccatgaggtccaccatcctgttgctgtagccaaattcattgtcataccaggaaatgagcttgaaaaagtggttgttgagggcaatgacagccccagcattgaaggtggaagagtgggtgttgctgttgaagtcggaggagaccacctggtgctcagtgtagcccaggatgcccttgagggggccctccgatgcctgcttcaccaccttcttggtgtcatcatatttggcaggtttttccagacggcaggtcaggtccaccactgacacggcagtggggacacagaaggccatgccagtgagcttcccgttcagctcagggatgaccttgcccatagccttcgcagtgccagtagaggcagggatgatgttctggagagccccgtggccatcacgccacagtttcccggaggggccatccacagtcttctgggtggcagtgatggcgtggactatggtcatgagtccttccacgataccaaagttgtcatggatgaccttggccaggggtgctaagcagttggtggtgcagaaggcactgccgacaatcttgaggttgttgtcatacttctcatggttcacacccatgacaaacattggggcatcagcagagggggcagagatgatgacccttttggctcccccctgcaaatgaggcccagccttctacatggtggtgaagacgccagtggactccatgacgtactcagcgccagcatcgccccacttgattttggagggatctcgctcctggaagatggtgatgggatttccattgatgacaagcttcccattctcagccttgacggtgccatggaatttgctatgggtggagtcatattggaacatgtaaaccatgtagttcaggtcaatgaaggggtcattgatggcaacaatatccactttaccagagttaaaagcagccctggtgaccaggcgcccagtacgaccaaatctgttgactccgaccttcaccttccccatggtgtctcagggatgtggtttggctgacgatgcaaaagaagatgcggctgactgtagaacaggaggagcagagagcc

SEQ ID NO: 6985 - DNA, 907 bp, mus musculus
gagcacagggtactttattgatggtatatgacaaggtggggctccctaggcccctcccctcttcaaggggtctacatggaaactgtgaggaggggagattcagtgtggtgggggactgagtgtggcagggactccccagcagtgagggtctctctcttcctcttgtgctcttactggggctggtggtccaggggtcttactccttggaggccatgtgggccatgaggtccaccatcctgttgctgtagccaaattcattgtcataccaggaaatgagcttgaaaaagtggttgttgagggcaatgacagccccagcattgaaggtggaagagtgggtgttgctgttgaagtcggaggagaccacctggtgctcagtgtagcccaggatgcccttgagggggccctccgatgcctgcttcaccaccttcttggtgtcatcatatttggcaggtttttccagacggcaggtcaggtccaccactgacacggcagtggggacacagaaggccatgccagtgagcttcccgttcagctcagggatgaccttgcccatagccttcgcagtgccagtagaggcagggatgatgttctggagagccccgtggccatcacgccacagtttcccggaggggccatccacagtcttctgggtggcagtgatggcgtggactatggtcatgagtccttccacgataccaaagttgtcatggatgaccttggccaggggtgctaagcagttggtggtgcagaaggcactgccgacaatcttgaggttgttgtcatacttctcatggttcacacccatgacaaacattggggcatcagcagagggggcagagatgatgacccttttggctcccccctgcaaatgaggcccagccttctacatggtggtgaagacgccagt

SEQ ID NO: 6986 - DNA, 1095 bp, mus musculus
cagggtactttattgatggtatatgacaaggtggggctccctaggcccctcccctcttcaaggggtctacatggaaactgtgaggaggggagattcagtgtggtgggggactgagtgtggcagggactccccagcagtgagggtctctctcttcctcttgtgctcttactggggctggtggtccaggggtcttactccttggaggccatgtgggccatgaggtccaccatcctgttgctgtagccaaattcattgtcataccaggaaatgagcttgaaaaagtggttgttgagggcaatgacagccccagcattgaaggtggaagagtgggtgttgctgttgaagtcggaggagaccacctggtgctcagtgtagcccaggatgcccttgagggggccctccgatgcctgcttcaccaccttcttggtgtcatcatatttggcaggtttttccagacggcaggtcaggtccaccactgacacggcagtggggacacagaaggccatgccagtgagcttcccgttcagctcagggatgaccttgcccatagccttcgcagtgccagtagaggcagggatgatgttctggagagccccgtggccatcacgccacagtttcccggaggggccatccacagtcttctgggtggcagtgatggcgtggactatggtcatgagtccttccacgataccaaagttgtcatggatgaccttggccaggggtgctaagcagttggtggtgcagaaggcactgccgacaatcttgaggttgttgtcatacttctcatggttcacacccatgacaaacattggggcatcagcagagggggcagagatgatgacccttttggctcccccctgcaaatgaggcccagccttctacatggtggtgaagacgccagtggactccatgacgtactcagcgccagcatcgccccacttgattttggagggatctcgctcctggaagatggtgatgggatttccattgatgacaagcttcccattctcagccttgacggtgccatggaatttgctatgggtggagtcatattggaacatgtaaaccatgtagttcaggtcaatgaaggggtca

SEQ ID NO: 6987 - DNA, 998 bp, mus musculus
acatggaaactgtgaggaggggagattcagtgtggtgggggactgagtgtggcagggactccccagcagtgagggtctctctcttcctcttgtgctcttactggggctggtggtccaggggtcttactccttggaggccatgtgggccatgaggtccaccatcctgttgctgtagccaaattcattgtcataccaggaaatgagcttgaaaaagtggttgttgagggcaatgacagccccagcattgaaggtggaagagtgggtgttgctgttgaagtcggaggagaccacctggtgctcagtgtagcccaggatgcccttgagggggccctccgatgcctgcttcaccaccttcttggtgtcatcatatttggcaggtttttccagacggcaggtcaggtccaccactgacacggcagtggggacacagaaggccatgccagtgagcttcccgttcagctcagggatgaccttgcccatagccttcgcagtgccagtagaggcagggatgatgttctggagagccccgtggccatcacgccacagtttcccggaggggccatccacagtcttctgggtggcagtgatggcgtggactatggtcatgagtccttccacgataccaaagttgtcatggatgaccttggccaggggtgctaagcagttggtggtgcagaaggcactgccgacaatcttgaggttgttgtcatacttctcatggttcacacccatgacaaacattggggcatcagcagagggggcagagatgatgacccttttggctcccccctgcaaatgaggcccagccttctacatggtggtgaagacgccagtggactccatgacgtactcagcgccagcatcgccccacttgattttggagggatctcgctcctggaagatggtgatgggatttccattgatgacaagcttcccattctcagccttgacggtgccatggaatttgctatgggtggagtcatattggaacatgtaaa

SEQ ID NO: 6988 - DNA, 991 bp, mus musculus
ctgagtgtggcagggactccccagcagtgagggtctctctcttcctcttgtgctcttactggggctggtggtccaggggtcttactccttggaggccatgtgggccatgaggtccaccatcctgttgctgtagccaaattcattgtcataccaggaaatgagcttgaaaaagtggttgttgagggcaatgacagccccagcattgaaggtggaagagtgggtgttgctgttgaagtcggaggagaccacctggtgctcagtgtagcccaggatgcccttgagggggccctccgatgcctgcttcaccaccttcttggtgtcatcatatttggcaggtttttccagacggcaggtcaggtccaccactgacacggcagtggggacacagaaggccatgccagtgagcttcccgttcagctcagggatgaccttgcccatagccttcgcagtgccagtagaggcagggatgatgttctggagagccccgtggccatcacgccacagtttcccggaggggccatccacagtcttctgggtggcagtgatggcgtggactatggtcatgagtccttccacgataccaaagttgtcatggatgaccttggccaggggtgctaagcagttggtggtgcagaaggcactgccgacaatcttgaggttgttgtcatacttctcatggttcacacccatgacaaacattggggcatcagcagagggggcagagatgatgacccttttggctcccccctgcaaatgaggcccagccttctacatggtggtgaagacgccagtggactccatgacgtactcagcgccagcatcgccccacttgattttggagggatctcgctcctggaagatggtgatgggatttccattgatgacaagcttcccattctcagccttgacggtgccatggaatttgctatgggtggagtcatattggaacatgtaaaccatgtagttcaggtcaatgaaggggtcattgatg

SEQ ID NO: 6989 - DNA, 1003 bp, mus musculus
gcagggactccccagcagtgagggtctctctcttcctcttgtgctcttactggggctggtggtccaggggtcttactccttggaggccatgtgggccatgaggtccaccatcctgttgctgtagccaaattcattgtcataccaggaaatgagcttgaaaaagtggttgttgagggcaatgacagccccagcattgaaggtggaagagtgggtgttgctgttgaagtcggaggagaccacctggtgctcagtgtagcccaggatgcccttgagggggccctccgatgcctgcttcaccaccttcttggtgtcatcatatttggcaggtttttccagacggcaggtcaggtccaccactgacacggcagtggggacacagaaggccatgccagtgagcttcccgttcagctcagggatgaccttgcccatagccttcgcagtgccagtagaggcagggatgatgttctggagagccccgtggccatcacgccacagtttcccggaggggccatccacagtcttctgggtggcagtgatggcgtggactatggtcatgagtccttccacgataccaaagttgtcatggatgaccttggccaggggtgctaagcagttggtggtgcagaaggcactgccgacaatcttgaggttgttgtcatacttctcatggttcacacccatgacaaacattggggcatcagcagagggggcagagatgatgacccttttggctcccccctgcaaatgaggcccagccttctacatggtggtgaagacgccagtggactccatgacgtactcagcgccagcatcgccccacttgattttggagggatctcgctcctggaagatggtgatgggatttccattgatgacaagcttcccattctcagccttgacggtgccatggaatttgctatgggtggagtcatattggaacatgtaaaccatgtagttcaggtcaatgaaggggtcattgatggcaacaatatccactttacca

SEQ ID NO: 6990 - DNA, 206 bp, mus musculus
catgtagttcaggtcaatgaaggggtcattgatggcaacaatatccactttaccagagttaaaagcagccctggtgaccaggcgcccagtacgaccaaatctgttgactccgaccttcaccttccccatggtgtctcagggatgtggtttggctgacgatgcaaaagaagatgcggctgactgtagaacaggaggagcagagagcc

SEQ ID NO: 6991 - DNA, 784 bp, mus musculus
gttggggaaccacggtgcagaagctgctgtccaagcagcttgtagagccccagtggccacagtttagtgtttatgggttcagggtagactgaacagccagctgtctgcagcaggaaagtcccttggccaaaaaatatatcccctactggtctgtggtaaatgcctgaaattccaccattagcaatgcattcctttggttatgccccaccatttgagccacaattttaaagtgaaaatgctcctcaggggactaacacatggagaccctgacactttcaatgaataagtgtttcagatcggtttctgagagaggaggtgagcccttggctgcctccctggtaggagtgtggctgcaggcaggggggaaggagtagagaaaggaaggggtgggggcctggagggctgtgggcaaacttgggcagctgagccattatgacgcctttaaaacaaggcctcaattctctgacactccttccaattggaggtggggtctatatcctctcccttgaatctgggtgggcttgtgactgcttcaactaatagaggatggccaaagtgcctcaatgtaacctccaaggctgaatcataaacgccaatgcagcttcctcctggttggctggagccccaggtcatggtgtgagaattccagctactctgagaactatatgctggaaagatcactctggtagacgacactagattagcctagcctgccagccatccctgcctaggttctagatatgtaagtgaagcctccagaacaagccattcactagctgaatac

SEQ ID NO: 6992 - DNA, 330 bp, mus musculus
tgatttatggcaactctataatcccacaaagcccaagcaatgtcttctgtattccttgtggaactgggcccccaatatagattataaagagcagaaattatatcaatttgtcagactgtacccattgcagctttctatgacaaggctccaaattatatttatccctggggtcaactgagatgaactctttttaacttcattaaagactgtataattcaatgtataattttcaaaaagttagaagcatgactctcgtatgcacatagtatgagcacatgctcaaaatttattaactcattaatgaagaaatctgtaacatggtaaaactgg

SEQ ID NO: 6993 - DNA, 518 bp, mus musculus
cattgtcaaagaggtcaggccattagcaaggcaattaatgtaccctatgatgcctctcattgagagtcaagtctccttaatagctaatgtggggaaaataatcttcaagcatccattacagctcccagataaatgcccaagggaattagttcactggctacctctagttgggaacactgttctcccctgacctgaggccttcgtactcagtcacagctctagcctctcttaggtgactcacctggctcagatccacatccaaagcactgcttagctttgccctcttctcactcttcctgccatctggggggcctcctattcacacactcccaggatttccaatggactctttctgacttccttcccaaacccagaatcatgcaatcaaccttaattgtcactattttatgttaccacttctcaagcttcttattgagtgccatttcctctgcaattttttttgcctctttggtttttcttcagttgtactttctatccttcagcactttactatggta

SEQ ID NO: 6994 - DNA, 1657 bp, mus musculus
tatagattgtgattgagtaggtttgaggtggggcctgtgtatttgtatttttcaacaagcttttcaggtgattatgataagcaaccagatttagaaaccagtgaataagttcaacgagatgatttgcacagtggcctcttttattcatcacttaggttctgttatttttagagccaaattaatcaatcagtgcattgttttaacatccttgccttacatatcttttccaaaaatttttaattttaaagggaagaagggaaagggaaagataatttcctatgtttgtgtgaacacatccttggctcttctaataatatgaaatacagtaaataatgacttgtaactattataattgtttttaacattcatgaatgaaaactaactacaatgtgggttgattggatttcaggtttcactctgctttaataaaaattttattacacatccagaaagtaagttaagcaggcctggcgcattggctcacacctgtaatcccaacactttgggaggctgaggcaggcagactgcttgagtgcagaggttgaagaccagcttgggcaacatagagaaaccgtctccacaaaaaaataaaaaaattagccaggcctggtgacatgtatctgtagtcccagcaacttgggaggctgaggcgagaggatcacctgagtccagggaggttaaggctgcagtgagccataatcgtgccactgcattccagcttgggtgacagagtgagaccctatctcagaaataataataacagtaataagttaagtactgttgagcttttttagaataatcattgccgatactttcattttctaattaacttgaaatgtctgaattattgcttgtaacacccttgtgaagtaggtgttagaatcagtcatctcttcatagactaggcaaagagtaggctgaggatgggttttgactgaacaaatatttattgagtacctactatgggcagattactcagaagggtaatagccttaccctgctattaattagctgagcaaaatcaaacagatctctgcagctccctgagcctcggtttcctcatctctgaaatgaggggcttgaatcaggctgagagagacagacagacagacagtagtcttgagacttcttcccattcttcttttcctttatgactttttatgtataatgtgagcagctctttgaaggaagccaaacttcctctgactatcctgaaatttaactatccacctaaatatccatctaatgttgcatgacatcatctcaggagtggcatttgtctctcccttaaaccttccatggaaaatggtaacaataagcaaagtttataatctgcctcctcctcctgattttatacatatgaggtgaatgttctggaagttataaaaatggtttaagtgtgaggatttagataaatttataaggttacactttgtcccatgttattcagagaaattgggggcatgtctttaaaatattttctaatgtaattggcaacataaaattgtatatttctaaatctctatttctttattaccagtaagcttgagctccccccgccctgcataattttgtctcttcagcttttaatacttgtcttacagatttgactcaaaccttttgccacatttttaagcaaatatttttccagttgctt

SEQ ID NO: 6995 - DNA, 238 bp, mus musculus
cttgacattttttgtggtgatacatttgaaatttactctgttattttgaaatgcacaatacattattattactacagttactgtgcaatggatttcaaaacttattcttcctgtctagctaaaattttgtacccttcctgtctagctaaaattttgtactcctcattccctcagttctcaccccccagcccctgataatattcattttgctctctacttctatgaattcaacgtgttt

SEQ ID NO: 6996 - DNA, 172 bp, mus musculus
tttaatcagagacgttcccccatgacaacaacaattttgaaattctcaagattctgtggatcgactgggtgtttttctgatctataggatgtcaactacatttagctcatgggtgagctgcagtgttgactcatattaattctctaatcctgctataacaagttatcacaaa

SEQ ID NO: 6997 - DNA, 1176 bp, mus musculus
ttgaggaaactgcaacccagtttattttctttgatttaaatcttccttttcctttcagtcattgacagtagaactcagtttcacctgagtgtaacatcactgttccttttggcagaggatggtcattgctgtttattttgttttctactttttctcacttgtagaaaataatcatcctttctctgttcttttctctttgtactactcgtcagcttgtactttaccaatttcctagataatagtttctgatacgaggcaacctcctaattaatttatctggccacttaataatgctttctctatttcactctgcctgcccaactttggttttctgtttgatattatttctgccctgagttctataacgtgccttcaagtgtgaattagtaaaagtggccgaaatacttcaatacctgcaaaatgcatgtttgaaaagtacatggctgctcatatatgtgcagtaacaccattctttctctttgaaactgaggagttagggtgattctaggttccctgtgttacagtttctctcttctagtatattttaactacagaagtcatttctaaagtgatttctggtgctaacttacaacaacttaagggcgttatagatatttggtcttcaaaggcagctttataaagcagtcactgtattgtcacatttagaaaaaggttgtgtggctgggcgcagtggctcacacctgtaatcccagcactttgggaggctgaggcgggtggattgcctgaggtcaggagtttgagagttgcttggccaacatgatgaaaccctatccctactaaaaatacaaaaaataagccggcatggtggcaggtgtctgtaatcccagctactcgggaggctgaggcaggagaatcgcttgacctgggaggcggaggttgaagtgagcagagatcaagccattgccctcagcctgggcaacaagagcgaaaccccatctaataaataaatacatacatacatacaaaatttagtcgagggtgctggtgtgtgccagtaatcccagctactccagaggcggaggcccaagaatcgcttgaactggggaggtggaggttgcagtgagccgagattgcaccactgcactccagcctgggtgacagagtgagattgtctcaaaaaaaaaaaaaaagttatattttaaaaggatattctac

SEQ ID NO: 6998 - DNA, 979 bp, mus musculus
cacgacaaggtggggctccctaggtccctccctcttcaagtggtctgcatggaaactgtgaggaggggagtgtggtgggggactgagtgtggcaggaactccccagcagtgagggtctctctcttcctcttgtgctctcgctggagttggtggtccaggagtcccactccttggaggccatgtgggccatgaggtccaccaccctgttgctgtagccaaattcattgtcataccaggaaatgagcttgacaaagtggtcgttgagggcaatgccagccccagcattgaaggtggaggagggggtgtcactgttgaaatcggaggagaccacctggtgctcagtttagcccaggatgcccttgaggggggccttcaacgcctgcttcaccaccttcttgatgttgtcatatttggcagggttttccagacagcaggtcaggtccaccactgacacattggcagtgggggcatggaaggccatgccagtgagcttcccgttcagctcagggatgacctttcccacagccttggcagcgtcagtagaggcaggaatgatgttctggagagccccgtggccgtcatgccacagtttcccagaggggccatccgcagtcttctgggtggcagtgatggcgtggactgtggtcatgagtccttccacgataccaaagttgtcatggatgaccttggccaggggcgctaagtagttggtggtgcaggaggcattgctgacgatcttgaggttgttgtcatacttctcatggttcatgcccatcacaaacatgggggcatcagcagagggggcagagatgatgacccttttggctcccccctgcaaatgagccccagccttctacatggtggtgaagacgccagtggactccacgacgtactcagcaccagcatcgccccacttgattttagagggatcttgctcctgaaagatggtgatgggatttccatttgatgacaaatttcc

SEQ ID NO: 6999 - DNA, 608 bp, mus musculus
gaccctctggaatcaagaactctacatccagcaggacaactcagagaggaagcggaaacaccttccagaccggtgggactctgagcatgcgggaggggtcaagaaggcagggctgtgggtaggctcgagcagccagggaaggcttccaaggcaaggcgggctcatagaaggaacggggaactgcattgtgggtgggtttcatagcataggcaaagggagggcaactggaaagtgcatctgatgaagagctaagcctggtgctggcaccttctccacagacaggatgggcctgcagccaagagtgagaaagcagcccccagaagtcagcactggttgcacagggacctgcgtgtgcggtttgtggacaacatgtacaaaggaggccaatattacaacaccaaggtgggaaccctgcagcctgagtccccctccctctcctagggactgggcccccctacctctctaaaatctcacatccccctgacctgtatccccagatgataattgaagatgtcctaagcccagatacctgtgtatgtcggacagatgaaggccgagtcctggaaggtgagtttgagcgatggcagctggaggttgatcaagaagag

SEQ ID NO: 7000 - DNA, 1019 bp, mus musculus
aggaccaggaacagagtcacggtgggaggactttggctctttaaagaatgacccatatagcaaggggggatgtgggccagtaccatacacacagttggtaatttgattaaaatcctaaaggtggcaaatcccactgactgtttcagaatcccccctaaagagtctgtttttgtgggtagggaagatgaagtgagttacggttgcaggagaaaggcacattactcaaacagagggccactgaggctcgggatgatgtaactggagagggagtcctctgcttggtgccagttttctaaattgatttctgagccagtcttctcattgcctttagtgtatccacaccaacatgaagacactgaccttgtcccgctacatctgcgagatgaccctgcaggaataccactatgtccaggagaaggcttccaagctagctgctgcctccttactcctggccctctacatgaagaagctcggatactgggtaaacacttgcgagataggggtataggggtagagatttaaaaagcagaaggtcagctcatggggaaggtgtaaattaaggccacgggaaactcttggggacaaaactgacacatattcaccactgtgaactctaacacctggacaacttggggcaagggcttctacagcaatggttttgaattatgccatttttcataatcaaagtaccctttgttccaaagaaagctcacctgaaagcccaatattacataccagactactgtgaaggtattctggttgtcatatggggtagtgtgaccctacttcttatccccagccctgttcccctcttgcctcttgcaatcccctcagcaagactggcccctgaggcagcttgttggaacagggtttgaaaagcactgagccagagaagagtagtgaaagcaactgtctgtgtctacaaaagtggcactcaggggcatgactatagtgttcttctctgaagaaggctctcaaagcctcctgctccaatacaaataaaactcatatttgatgct

SEQ ID NO: 7001 - DNA, 1047 bp, mus musculus
atttgctgtctactccacacctgtggtaggatgcatctactctttgctcatactgcctgtccctctggttaaccacttcctcctattcttgcctcagaattttgcttcttctgaaaatcctctcttatagttgtattattgcccaaagtggcaagaatgtcccctttgcctcaactgtagcatggaactacagccttattctactccacaagctcttcataggagaaatggaggcttggagtggagatgagaactttgcccaatcttcaaatttatgtggaatttcaggaataaaacgcataaggatggaaatgtcttgaattgttcacatgaacgtagcctagaagagggcaaaaaagcggaacaggaagaagtaattttaatgcaatttgagactttccccaagtttcttgagaaatggaagagttggggggactgggaacagacggtacaaattacattaacttattatgaattacttggagtttttacccctaggagaaatcctggaaggatgtcttagtcagcccgggttgccataacacaataccattagactggggaatttaaacaacagaaatttatttcttacagttctggaggttggaagtctgagatcagggtgcccccatggttgggctctaggaagggccctctttctggcttgcagatagctgccttctcactgtgtcctcacatggtggagagagagaaagagagcaagttctctggtgtctcttctaataaggacactaatcctattgaattaaggccccacccttatggattcatttaaccttaattaccaccttataagctctatcttcaagtcatgttgggggttagggctttaacatacaaatatggggggacacaattcagtctatagcagagattatgctctgctttgccaagtcctcttgggttcttcccccctagtgttaatcaatacaattgagaacagaggacactgacaatcaagtcaatcagcaaacataggtgagatttgcctagacccctgtgtttccgttgtaacattagctctgg

SEQ ID NO: 7002 - DNA, 953 bp, mus musculus
tgttattagtatatcaacaggatgtttctgaaggatgtgaaatctgagttgacaccaaaggacacgctggaattggctaaatagggaactcagggagtggggtggtggattttcaggtagagggaccagcctttttgagtgtatagagggatgagactgcatgacacatttgcagaaccagctagagctaaggatgagtgtgagaaggtgttaggggtcatagctggagaagcacacaggagacagaacatgaagggccttatatgcaagaatcaggacttcatcctctgggcagccaggtcaattagagggagctgggccagtgtgcaatttggaggcaaaatttggagcatggtgttatgcagctaggcagggtgtttgttcttcagtttaatagccaccaaaatatcctcttcacaaaactgataaaagagcacgaggtcacagagtgagaagggcagaactgcgtccaggtctaagggttttgagtgccattccagcgagctcccaaagatacatggtttttctcactcagagattgcttcaataacagacttggtttgggttatcttttgtcaaaactggatttttttttataaaagattttagtaacggtctgagttttatgacaggcttatctgatagaacaaaatatctaccagcctgtgagaaagtgtccaaaattatgttctaaatgcataatattatctaatttatccacaatctcattactcttttctatctgcctctcctcactcttaccactgcccacttttctaaaagaaaactaaagcttccatatttgtaaaaggtgcttaaatatatagtcatttatgagacttctaaacagtagctgtttaagtttagcccaaataagagttttctctcaattataagttatcatttattgtatctgctgagtttggtctgctttttcatctttatcaaattta

SEQ ID NO: 7003 - DNA, 723 bp, mus musculus
ttcattccaagcatcagtttcgtatttagaagttctagtcttcccagttggactgctcattcctccagtcagggattgcattatttccatgttgcctccttcctcaaaggtttgcccaagctttgccttcagtaaataatgacctgtgatcagctcctgagctactcccaggagctgcctggagccattccccagtactacttgtggctccagggttggaagaaacaagtagaattttggggagaaagtcatctcactacctgctttctgttttgttctctgcaacacagattgaagatggaggcaaggcagctttgtcccagaagatgaggactggtgatgagctggtgaatatcaatggcactccattatatggctcccgccaagaggccctcattctcatcaaaggctccttccggattctcaagctgattgtcaggaggtaaggtacagggagattctccgtaaggtgcagaggccactgaaacttggttggtaataaagctcaatagagtcatgtctctatcaatattataaaggaaagaggtgtttcacttgaatagaattttgcagacaactgaagcagaatagcacaggagaaagagcctttggttcaaatcctggcactgccacatagacacataatcttggatatatttattagtcctctgcaagactgtttccttatttgctataaagaggactaaattactcattatatac

SEQ ID NO: 7004 - DNA, 796 bp, mus musculus
ggcaattgttattgagctatcgaactggcaaatgctttcttatatcttaacgttgtgcttgctgctttctcctgcaaaatgcaagggaccttgatagtctgataaaacagagaccatagtactggtacattaaattgatgccattatgctaactggatcttgtgagcagaaaacacaagcacaccttagatgcctcagacatatttgtgccagagagtcagaaacaaaccttgtggaagcttgagggccttttcacattaggaaagtttctagtggccccagggtttgggaaatattgggatatcccttctaaagtgagagggaagttgctgtaccttgtaccacacactgtgaagaaagaggaacaatgtgtgatgcgtttggattttggagccaacatattggttggtcacatttaggcatgctattttgacctatttactggataacctctaacacatttagtggggaaccactaaagtgttagtaaggtttggatctagaaaagactctgcaaaaggtccaggctatgatacaagttgccctatcacttggacattatgacctagtagacccaggtgactgacttaggtgtcagctaaagatgccatgttgtgcttttggcaagccccaatagaattacaagtaagacccctagattcttggctgtgctgtcctctgccaccagctattctacattcacaaaagcagcttctggcttgctactgggccttggtaaagactgaatgcctggttatgggacataccaaattattacaggatccaaatgttcatc

SEQ ID NO: 7005 - DNA, 793 bp, mus musculus
ggtttgaaggagaatggggctcccatcagattataaagagatgtcccttgggttgcaggctgaaggggggaaatttcagctggggagctgggcctgacttcttacagattcctggtaagggctcgcagtggaatagttgcttaatgaatgtgggagctaggaatgcaaggcctgtgttgacatgtattataagaaatttctgtgtcccaagcatggcacagaagccacagagagcctaccaatctaaaaataccaagtgaacaatgtccctcagtgataacctgtggggataaacaatcctcctcaacaccttgccaaggtttggcattacataagaccccagaaccagttagggaagccccaagaatttaaccaagattgattccccactcctgccccagcagaagtagctgtatctacttctttttttttttttttttttttttgagatggagtcttactctgtcacccaggctggagtacaatggtgtgatctcagctcactgcaacctccacctcctgggttcaagcgattctcctgcctcagcctccttagtagctgggattacaggcgcccgccaccacgcccagctaatttttgtatttttagtagagacagggtttcactatgttggccaggctggtctcgatctcctgacctcaggtgatccgccggcctcggcctcccaaagtgctgggattacaggcgtgagccaccgtgaccagcctgtatctacttctttatgtggcagtttctggcgtttgagattgaattgagaaaggggatcattaa

SEQ ID NO: 7006 - DNA, 1483 bp, mus musculus
tgggatcaggcgcaaatcctaccaccttttctccaagagctaagcactgcatgaactaggtcccctgctggggagcactagtgacaagtgcccaacctagccctgtggggctcatggtagcagctataacacacaaaagagtggtcaggctaccttcttccttcttgacatccaggctcacgctgcttccagctgtgtgcaaagtaacgtcactaggtgcagggtaggctagcaaatgaccttctggagaaggcccagggacccactctcctcagcttgcaggccaaggaggcttcaaacaaaagtagtaactatgaccccatcagcagctccaaattcattcagcaagccagaaaatggtgagcgccttctgggattcagacagtgtgttagaaactggagctgcagaaaatcaaaaggcctgttctttgccctgggaggagctgtatttatcaataccacctccagaggtaaacaaggtgggaatctgaggtccaggttcctcggtgactttctcttctagagccacagaagtggcaagagagagatcctagacaagaccctatgtccattccctgcaaacccacagtgctttcctctaggccaccctgctgccggtctctgcctgctagtgcactctcaaggtctctgtcctcaaaagaaacaccacgtgaaggcaggggaagaggtgtgagtaaccctggccgcggcatccaatccttctggggaccaggccggattacattcctcccccgacccgcccttttacccaagggggcttacagcagtcagtcagccccaggtcagtcagctagtaagtgggagagctgcagagtaaaaagatttgttgagcacctgcctgtcccagaggcatgccacatattatctctgccaggccggtgtgattactgcccatttaacaggatgctcctccggctagctcaggggaagaggtaatgtcttccccaaccctgtctgaatccatgctttcttcggctctggtggcaagttatcatccaatggtctaaaatggttctttgcaagtacgggccaagaagcttaattcagtcagagaaccagcagtataagaggagaaagactgggagaatacctccagctgccctgtcagagagatgactgctggaatcctgaaggcctcaggcaggaggctctgcaggggattgggaaacaagggattgggtgacaggtgacctgccctagcgcaagaaggaagcgatcaatgggccaggcttattctcttgtggcctgggggttcagtctccctaacacactacaggagtactgcaaagagttaaacttcctttgattagataaaggctgaagaagggcgggacttccggtggctgtgaaatgaaagacaggggtgagggagaggcagggaaaggggcttctggaaggtggagagaaaaagaaaacattcaccgtgccatttacaaaaattctttgagctttgcggggcatc

SEQ ID NO: 7007 - DNA, 1067 bp, mus musculus
agacaatgctcggtcttcccagtcaaaaaccattaccggtaaccagcagtaaaaaagagaagctcagaggcactgaaattgcaaccggctcctttaattctccatagcggatgggtggggccaggcccacccacattagagaggctgaaggctcccagcgccctaccccgcccgaggggcggagcctgagccaaggccacgtgatgatgacagacggcactctggctttcctggagctgtctctatggtattcttcccagcccacccgtccctttggtagcggcagtcacgtgacagactccggggtaaggcagatgcccacgtgatcctggcctgcagttgggtggctgcggtgagatacctgggttcctgaagggcgggtggttaggtcgtaactactgcccccgccggctgactctccgagcggccgggctcggaagccacgagccagctgaggcgttctccgcttagtgcctacggcatgggtcagctctttctgccacctccgccttcgcggtcctcacctctttgcgggtgaagttacctttgggtttccagaccttgggggcctgaggcccaaactcgggacgaacccctaacccacctctcttttcctgtcattctccaactcttactttgtaccacggaatcacttggccttaaagctagccagctcggccgtgccttgaggccaggttcgagagataaaggtaaccgtggggaaagcggccccccagtggacaaaggcggaggcaagaatagagcaggcctgagggccataggcgatgagaataggcagttgaggggtgaaaaagaaaacaaacaaacaacaacaacaaaccctgaagagtactgaagatttagaagggactggaaaggacttgttgcgcaatggaagaatctgactctgagaaaacgacggagaaagaaaatctggggccgagaatggatccaccactaggggaaccggaaggatcgcttgggtgggtgaagggtatttgtgaaacctggaagtgggggtgttcaaattgaagagagtattgtgaattagaacacttctccccacc

SEQ ID NO: 7008 - DNA, 301 bp, mus musculus
ttacttttctggacacgggtcaaattatggtttataatttgcaccatattccatgtctaggttacctgtttacagaaatgctcagcatgaagaggagtttctatatctgttctgccatcacattttcctacttcagagcatttacttagtccggttggttgtctgtctgtgtattcacaaactttcacaatcaactcaatagggaataaagttttttttttcagcagcttcatgtgcagtctccttaagtactttttcctatgacttggtcacttttctccctctcattgtataaagactt

SEQ ID NO: 7009 - DNA, 995 bp, mus musculus
aaagagctgaccagaattccatcacaggtctctgtgagctggggtaggcaagactggccaacaggtgcctgtgaggggtctgcagacaccagctttgtggggaaggtctaaccagaatgtggattcttgggacagcaggcctcttttagtggattatttgtcggaaccacctgtggtttcaggcagctgctgaaagaagtgtggacagtcaggaactccccataacctggagagaaacactaggctcaatcttctgatgcccctcgtctctagatagaaaacaaacattccagcagaaggaaccggtgtgatgagactgctgtacctgagttcagtaaggttccatttttttctgggtaaagtactttccaaatgcaagatggcacatctcttaagttctgacccactaacccatcctctaccaatattgtttatctagcgcaggacaaatgtgaggaggcagcccgcagcccagcacatgtggggaaccgtgttagtgtgttcaggctgagggttggggttctgctgggtaggagcgtcctgaactccctgaaacaggaaaagccttacgggtataaactttcctcctgattaaccttactgagtcatccttgtcagaatgcccttctagggaacctccaatgtatctggcatctttgacagatgccacttcctttgtgcatagagccaggaagagcaatgtggacactaccagaagtccaacattttcctgggccttccgatctctcatgggccccacaccccacaactcttttcctgtattcccaatccctctgtcagtctttcttctttgaactccttcttcctcagtggccctcttcttctaacctctctaacactctaacccacatagcctcttccattgagtatcctttatcctctccacagaccctgtcaggttgatccttctcctctttactctggacctcttctaaggttctttgtgttcctctctactcaatttattctgtgta

SEQ ID NO: 7010 - DNA, 338 bp, mus musculus
aagagctgaccagaattccatcacaggtctctgtgagctggggtaggcaagactggccaacaggtgcctgtgaggggtctgcagacaccagctttgtggggaaggtctaaccagaatgtggcttcttgggacagcaggtttcttttagtggatcgttggtcggagccacctatggtttcaggcagctgctaaaagaagcatggacaggcaagtactccccataccctcgagagaaacactaggctcagtcctctgatgcccctcatctctagatagaaaacaaacattccagcagaaggaataggagtgatgagactgctgtacctgagttcagtaag

SEQ ID NO: 7011 - DNA, 533 bp, mus musculus
ggtccggtgagaatgtgtggttcagatctggctttccaggtttgtatgtattatattatgtatggtaaggcacaattcaaacctttctgagatcgagataaattacattcatacattctgcctagcttatcctgcttttgtacttagattagcctgatagggcccactttttatacatgtgtctcaaaaagtgttcctgagaattgtggaactcagtgtatgggaatcactctatccttttggccaggattgagcttgtgcacactgaacatggtaaaaggaacccaggttctgaaataggcttggggcaacattggccctctctgtatagctgaactcttcctctcctgtgaacttgatcctggggacaaccaatagatcagaatccatctatattcttttcttatttatatgaacaatcattatgggaggaaaaaagtaacatgattgttattttttcaaaagcaattcaacgacatctgtattttccagcctgggcctttgaggttgacagagctatgctgggaaacctt

SEQ ID NO: 7012 - DNA, 533 bp, mus musculus; identical to SEQ ID NO: 7011

SEQ ID NO: 7013 - DNA, 1011 bp, mus musculus
ccaccatgagaggacaaagtttctctctggcttttcatctgattagagctggaagcttttcaagcactttctccagccagccaatatcaatttaatttgagccactatcgtcttggaatatgaaattgcctccatagacaggatctccagtgaagtcatcagccccccagccctgcccccactgaccagtcaccctgcatatgtgaccagtctgcatgtgcccagagagaaaacagcctgctgagctcatggcccgtctgtgaaccatccgcatccatctgtgactgggtgcctgttaggtgccaggctctatgagaggctctgtgaggggtgctcaccctcctctcccctcgagctccccttcccagcagctctgtatctgttggtggttttgctgttggcgccgtcttttgtgtgcacagtgtcatcatctttaactctgcctgacccctgccatcagtcaccaagccctgctctctgtctgtctgtgtgtccttcacagcttcactccctcccatctccactgccagtgccccaggtcagccctccccgactctggcctcaactgtcggaacaggctcctccctggtctccctgcctccaggctgcctgtccaggccagcctccacatggtcacttggtgatcttcagaaacatagccttcatgtgtactcagaattggcaggtgaaccctcacacacacaccaatgcacacacttaccttcccagccctctcttcctcccacggctcctcagcacaggccgtgccctctagctgggctactcactgcacgcagcagcaccgtgtgcttgctcttgtctctgggcttcccgggccctacctcctgcacaaagccctcccttggtctttcctgccctcctcgtgctctctgtctccctcagccccgcagtgcctgcagtaggttcgcagtgctcatctggcctccctcccacatcctgctttgtcttgtcagccgctgctttttttttcttttcctccattccaggctg

SEQ ID NO: 7014 - DNA, 1349 bp, mus musculus
gaaactgaacataatacaagttgataggcctgcaaggctggaaatgagcagatccctctcttctctggcctagctgagcaacctgtcatgagctccaaggttatgcctagaagtgttctggactccttctgcatggaacaaaaactgtgatccctttatgggagcaactacagcccagcctggaatggaaaattaaaattaaaaaaagcagctgctgacaagacaaagcaggatgtgggagggaggccaaatgagcactgtgaacctactgcaggcactgcggggctgagggagacagagagcacgaggagggcaggaaagaccaagggagggctttgtgcaggaggtagggcccgggaagcccagagacaagagcaagcacacggtgctgctgcgtgcagtgagtagcccagctagagggcacggcctgtgctgaggagccgtgggaggaagagagggctgggaaggtaagtgtgtgcattggtgtgtgtgtgagggttcacctgccaattctgagcacacatgaaggctatgtttctgaagatcaccatgaagatcaccaaatgaccatgtggaggctggcctggacaggcagcctggaggcagggagacgagggaggagcctgttccaacagttgaggccagagtcggggagggctgacctggggcactggcagtggagatgggatggagtgaagctgtgaaggacacacagacagacagagagcagagcttggtgactgatggcaggggtcaggcagagttaaagatgatgaaactgtgcacacaaaagacgacgccaacagcaaaaccaccaacagatacagagctgctgggaaggggagctcgaggggagaggagggtgagcacccctcacagagcctctcatagagcctggcacctaacaggcacccagtcacagatggatgcggatggttcacagacgggccatgagctcagcaggctgttttctctctgggcacatgcagactggtcacatatgcagggtgactggtcagtgggggcagggctgggggggctgatgacttcactgggagatcctgtctatggagccaatttcatattccaagaggatagtgacttaaattaaattgatattggctggctggggaaagtgcttgaaaagcttccagctctatcaggtgaaaaaccagagagaaactttgtcctctcatggtggtccattagtgtgattaataataaatattcccagacacttgatactggcaaaacgccttatcagccctgcttatgattactcacctgctatctcgaaccattagtctgaccaccaaggtgcgggggtgatgcgaatcttaaaatacacc

SEQ ID NO: 7015 - DNA, 159 bp, mus musculus
ttacagttactggagttttggtagattattgcaacactcttggtagattagtagttgaagtgatagaccttggagtctcacttggtcaggaatggaagaaaagacaggatgaagctactaggttgaggaaaaaaactgaaggttttgaaagctagaggt

SEQ ID NO: 7016 - DNA, 159 bp, mus musculus; identical to SEQ ID NO: 7015

SEQ ID NO: 7017 - DNA, 159 bp, mus musculus; identical to SEQ ID NO: 7015

SEQ ID NO: 7018 - DNA, 1154 bp, mus musculus
aactacaacagaatcttaggggagggacccaggtgtcactattttttggcactcccaaggtgcaaccaagactgagaaccactggtctaagagattagccaaaccaactccctcgtggtatgaatggagaacttgattccagcattgggaagggatattctcctgatggcagagctgggactaggaccattcactatgctgagctaaaacaggaaatgcaaactttacaaatagtggggcagaaggaagatatgatgtttgatagtttggaaggaggttataaacaagataaaccttggatagaagtggccttgggtcagttcagaaaagggaaaggctgagtgccaacaccaaaaggtaaagcaacatttgaattacaggccaggcatctggaaatgatggcactgtacagtttagaagcttgattttcaagaaagcagtgttctcaaggctacgttgagcaacttctttgattctgtcttgtgcatgtgggtggatagatgggctcgcagtagaggaatgggcaaggcatggagaccatctgctgtcttcttcatcgtttttaatcccacacctcctgcactgtccaggcaaagcaaatatcctgaagtactgagttcttaatttagacttgtccttctttcctgcctacccatactacatagagagagcatgtttcaccccacaggcatgtgtgcaagttgagaagagcagcagccacaagctgcagcaaggagcagctgcacccccagcagcctgggtacctcacatccagcagaaacttggccaacatcaattattcagggcatgatgagctaatttggggattactattgatgtcagctgtattgtttctcctcttccctgtctgcttgcattcttaatcgtctacattattttttgaggaatcaggacagggagatgggtgggaagagcagccacatgacagacaggcaaaataagggaataattctagtcatattgccacttgttggcccttgtaaacacaatcaaggtatatacaacacatacttggataagtttgggtgagaagttggatgaatcaaattatatttggaggcctgtgtaaaaatattcatagcagctttaacattttttggggggctaacttaagcaatatcctattggaataa

SEQ ID NO: 7019 - DNA, 1154 bp, mus musculus; identical to SEQ ID NO: 7018

SEQ ID NO: 7020 - DNA, 1012 bp, mus musculus
agaagcgccatcgtaaccgtagcttcctcaagcaccttgaatctctgaggcggaaggaaaagagtggcagccagcaagcagagcccaagcatagtccagccacctcagagaaggtctccaaagcctcatctttccgcagttgtcgtggcttcctctcagctggattttacagggccaagaactgggccgccacctcagccggtggcagtggtgccaatactcggaaggcctgggaggcctggcctgtggcctcgttccggcatcctcagtggacacaccggggtgattgcctggtgcacgttcctggggaccacaaaccaggcacattccctcgctccctgtccattgagagcctgtgtcctgaggatggacaccgcctggcagactggcagccaggtaggcggtggggctgtgaggggcgccggggctcctgtggctcaacgggcagccatgccagcacgtatgacaacttgcctgagctgtacccagctgagcctgtaatggttggggctgaggctgaagatgaagatgatgaggagagtgggggcagctatgctcacctagacgacatcctccagcacgtgtgggggctacagcaacgagtagagctgtggtctcgggccatgtacccagacctggggcctggagatgaggaagaggaggaggccacttcatcagtagaaatagccacagttgaggtcaaatgccaagctgaggctctcagccagatggaggttccggcccatggagagtccccagcctgggcccaggctgaagtccagccagcagtcctggctccggctcaggctccagctgaggctgaaccagtggcacaggaagaggctgaggccccggccccagccccggccccggccccagcccaggacagtgagcaggaggcacattcaggcggggaacccacctttgcctctagcctgtctgtggaagaaggacactccatttctgacactgtggcctcctccagcgaacttgacagtagtgggaactccat

SEQ ID NO: 7021 - DNA, 1012 bp, mus musculus; identical to SEQ ID NO: 7020

SEQ ID NO: 7022 - DNA, 1194 bp, mus musculus
tttttagttagacatcagatttgaaatattaatgtttacctttcaatgtgtggtatcagctggactcagtaacacccctttcttcagctggggatggggaatggattattggaaaatggaaagaagaaagtaactaaaagccttcctttcacagtttctggcatcactaccactactgattaaacaagaataagagaacattttatcatcatctgctttattcacataaatgaagttgtgatgaataaatctgcttttatgcagacacaaggaattaagtggcttcgtcattgtccttctacctcaaagataatttattccaaaagctaagataaatggaagactcttgaacttgtgaactgatgtgaaatgcagaatctcttttgagtctttgctgtttggaagattgaaaaatattgttcagcatgggtgaccaccagaaagtaatcttaagccatctagatgtcacaattgaaacaaactggggagttggttgctattgtaaaataaaatatactgttttgaaaactttgtattttgatgtgacaatttctaactcactgtccctaaccacactaattaccgtaagttcttcatttcttttttctttttctttttaaattaataaattaatttattttttggagatggagtctcgctttgttgcccaggctggagtgcagtggtgccatcttggctcactgtaacctctgcctcctgggttcaagcgattctcctgcctcagcctcaccagtagctgggattacagtcatgagccaccatgcctggctaatggttgtatttttagtagagacggggttttgccatgttggccaggctggtcacgaactcctgacttaaagtgaaacacctgcctcggcctcccaaagttctgggattacaggcgggagccaccgtgcctggcctcatttctttttttaaactaccttaatcacccagtgtgggtaaatggtttgaagtctcatttcttacagcatcagttgctttggtcaaggatactgagaagcacaaacccagtaaaaaatgtgagaagcaaaaaacttgaggatcaaaagtgggagaggagaagggtataaactgtaaggctgtgggaattaagcattcatgaaagaggcccagaccctgagtaggtgaagggatcttcagtgtttctagaattctgaatgatcaaat

SEQ ID NO: 7023 - DNA, 1194 bp, mus musculus
atttgatcattcagaattctagaaacactgaagatcccttcacctactcagggtctgggcctctttcatgaatgcttaattcccacagccttacagtttatacccttctcctctcccacttttgatcctcaagttttttgcttctcacattttttactgggtttgtgcttctcagtatccttgaccaaagcaactgatgctgtaagaaatgagacttcaaaccatttacccacactgggtgattaaggtagtttaaaaaaagaaatgaggccaggcacggtggctcccgcctgtaatcccagaactttgggaggccgaggcaggtgtttcactttaagtcaggagttcgtgaccagcctggccaacatggcaaaaccccgtctctactaaaaatacaaccattagccaggcatggtggctcatgactgtaatcccagctactggtgaggctgaggcaggagaatcgcttgaacccaggaggcagaggttacagtgagccaagatggcaccactgcactccagcctgggcaacaaagcgagactccatctccaaaaaataaattaatttattaatttaaaaagaaaaagaaaaaagaaatgaagaacttacggtaattagtgtggttagggacagtgagttagaaattgtcacatcaaaatacaaagttttcaaaacagtatattttattttacaatagcaaccaactccccagtttgtttcaattgtgacatctagatggcttaagattactttctggtggtcacccatgctgaacaatatttttcaatcttccaaacagcaaagactcaaaagagattctgcatttcacatcagttcacaagttcaagagtcttccatttatcttagcttttggaataaattatctttgaggtagaaggacaatgacgaagccacttaattccttgtgtctgcataaaagcagatttattcatcacaacttcatttatgtgaataaagcagatgatgataaaatgttctcttattcttgtttaatcagtagtggtagtgatgccagaaactgtgaaaggaaggcttttagttactttcttctttccattttccaataatccattccccatccccagctgaagaaaggggtgttactgagtccagctgataccacacattgaaaggtaaacattaatatttcaaatctgatgtctaactaaaaa

SEQ ID NO: 7024 - DNA, 1244 bp, mus musculus
aacccctgcctgataggtgcagaacgtcggctatcagagcaagcattgtggagcggttccttatgccaggctgccatgtgagatgatccaagaccaaaacaaggccctagactgcagtaaaacccagaactcaagtagggcagaaggtggaaggctcatatggatagaaggcccaaagtataagacagatggtttgagacttgagacccgaggactaagatggaaagcccatgttccaagatagatagaagcctcaggcctgaaaccaacaaaagcctcaagagccaagaaaacagagggtggcctgaattggaccgaaggcctgagttggatggaagtctcaaggcttgagttagaagtcttaagacctgggacaggacacatggaaggcctaagaactgagacttgtgacacaaggccaacgacctaagattagcccagggttgtagctggaagacctacaacccaaggatggaaggcccctgtcacaaagcctacctagatggatagaggacccaagcgaaaaaggtatctcaagactaacggccggaatctggaggcccatgacccagaacccaggaaggatagaagcttgaagacctggggaaatcccaagatgagaaccctaaaccctacctcttttctattgtttacacttcttactcttagatatttccagttctcctgtttatctttaagcctgattcttttgagatgtactttttgatgttgccggttacctttagattgacagtattatgcctgggccagtcttgagccagctttaaatcacagcttttacctatttgttaggctatagtgttttgtaaacttctgtttctattcacatcttctccacttgagagagacaccaaaatccagtcagtatctaatctggcttttgttaacttccctcaggagcagacattcatataggtgatactgtatttcagtcctttcttttgaccccagaagccctagactgagaagataaaatggtcaggttgttggggaaaaaaaagtgccaggctctctagagaaaaatgtgaagagatgctccaggccaatgagaagaattagacaagaaatacacagatgtgccagacttctgagaagcacctgccagcaacagcttccttctttgagcttaggtgagcaggattctggggtttgggatttctagtgatggttatggaaagggtgactgtgcctgggacaaagcgaggtcccaaggggacagcctg

SEQ ID NO: 7025 - DNA, 1244 bp, mus musculus
caggctgtccccttgggacctcgctttgtcccaggcacagtcaccctttccataaccatcactagaaatcccaaaccccagaatcctgctcacctaagctcaaagaaggaagctgttgctggcaggtgcttctcagaagtctggcacatctgtgtatttcttgtctaattcttctcattggcctggagcatctcttcacatttttctctagagagcctggcacttttttttccccaacaacctgaccattttatcttctcagtctagggcttctggggtcaaaagaaaggactgaaatacagtatcacctatatgaatgtctgctcctgagggaagttaacaaaagccagattagatactgactggattttggtgtctctctcaagtggagaagatgtgaatagaaacagaagtttacaaaacactatagcctaacaaataggtaaaagctgtgatttaaagctggctcaagactggcccaggcataatactgtcaatctaaaggtaaccggcaacatcaaaaagtacatctcaaaagaatcaggcttaaagataaacaggagaactggaaatatctaagagtaagaagtgtaaacaatagaaaagaggtagggtttagggttctcatcttgggatttccccaggtcttcaagcttctatccttcctgggttctgggtcatgggcctccagattccggccgttagtcttgagatacctttttcgcttgggtcctctatccatctaggtaggctttgtgacaggggccttccatccttgggttgtaggtcttccagctacaaccctgggctaatcttaggtcgttggccttgtgtcacaagtctcagttcttaggccttccatgtgtcctgtcccaggtcttaagacttctaactcaagccttgagacttccatccaactcaggccttcggtccaattcaggccaccctctgttttcttggctcttgaggcttttgttggtttcaggcctgaggcttctatctatcttggaacatgggctttccatcttagtcctcgggtctcaagtctcaaaccatctgtcttatactttgggccttctatccatatgagccttccaccttctgccctacttgagttctgggttttactgcagtctagggccttgttttggtcttggatcatctcacatggcagcctggcataaggaaccgctccacaatgcttgctctgatagccgacgttctgcacctatcaggcaggggtt

SEQ ID NO: 7026 - DNA, 3945 bp, mus musculus
tgttataactggagttctatgtgcttgtgaccattcttggtttctccgaatatcctagaactttggtggcgccctattatacaggttgttgaagaaatgttaccatgtggattgagtaggaaacaattctctttatcttggcaatattatggcatggcactacttaaagtacaaattaaaagagggggatgctacagaactagctgacaggcactttgatagaggtggatttctcagttcttaaaatagctctttataaaggaagccagaggcattgtggaggagaattcttacataactcatagggttagaccacatccgaccttttctgtgtggcttcatggctctcttggttgagaaagcattagtttctccttccattagtttcaacctcttgatttcttgacccccctactatattttgtgctgagaacacaagggtattaacaacccacattgtagaggatcgctcagtaataaagactggagaataaaatgcagcatgggaatattggcaattactcagttctaaatttctcttggaaatgagggaaagcatacagaatagagctggaatgaataggataattttttttttttttgctaagttggtagccagaatataacagctccgcacaactgtaaatgtccactcttcaatccacatgaagaaaagggtaaaaatatggttgaactcaaccactagttgcccattagaacagactttcccagtgtactgcatttcaatactttttcttttatctcttttcagatcttcctcagaagaataggcttgttgttttacagtgttagtgatccattccctttgacgatccctaggtggagatggggcatgaggatcctccaggggaaaagctcactaccactgggcaacaaccctaggtcaggaggttctgtcaagatactttcctggtcccagataggaagataaagtctcaaaaacaaccaccacacgtcaaggtgcgtaagctgtccctaaaagcataataagtagtcttaattttgattttgttttccagtatacattgcacttagtgtttcactgaggtcgtattcatcattattctgcatatgatttggtaaaaacagcttcctaactaacctgggaagcaactgggtgtgagattaactggttaaagtgatgatgtaaagagggtagcgggttgcatgtgttcgggtgtttggagtgggactatagcacgtggcagaggcttacagctaagttgttcttttaggagaacatggacaactgtcacatcagtgacattgatcacatgggcaaatcattctgttccatgtggtccccaaagtctctcttaaagccttacagaagaactttgccaatcatttacatacttcaggatggcttgggatgccatggtgtataatacaacaagtgagaggtgtgtctttttatgctatggttgctgattgatggaagccgcataaatacaaatggaaacctgactaaaaatggcacaaagttatctgtcatcaggcaggagctaaagaaccaggaccctacattctctaggtcagtgttgggagaggctgattagcgagtgagaattggcagataaaggtgaccattcggtgcaataaatcctgaacgtataggctttgcccagcattcttcgtaaatagtgggtagctataaatttcatgaaatattttcatgggtaagaactcttgaaatgttataattgactagaaatctctgtagatttagaaatagagagttactaacaaattgttagaaagtctaggaactagaaagctaagttgagagttatctaggaagatctatctattgtactcataatctttagataaattctcctagggccagtagtctatgtgaattttctttttcttcttcttcttcttctttttttttgtattttagctgcaatgttaaacaacctatgtgaattttcttattgtgagaatatttgccttccagagtgactcacctttatctcaaagagcaatattgtgagttttgaaaatgctgctctaaggctgtgttttgttagtcctgagccaggagacttaaagcaaacttgaggggtcttaaaacatcgaagtgagccttaaacattgggaagaccttatgtttttccctctcatatctattatttttgtgatctcagttattaatcatttaaagggactctttcctagctgattggcacttaaaacaggatggaagtctttttttttttttttttttttgagatggagttttgctcttgttgcccaggctggagtgcaatggtgcaatctcagctcactgcaacctctgcctcccgggttcaagcgattctcctgcctcagcctcccaagtagctgggattacagtcatgcaccaccacgcccggctaattttgtatttttaatagagacggtgtttctccatgttggtcaggctggtctcaaactcctgacctcaggtgatccgcccacctcaacctcccaaagtgctgggattatgggcgtgagccaccgcgcccggcagttctggtctttaactaaggtataaggctatgactggtagtggtgtctctagtgactcatcaagtgatatttggcaagacattttcccatttatgccagtttcctattctgttgaatgaggaaattttctctctaaagacctaaaagttttgactttataggtttcaaagttctgtggaaacattttctattgcttattaatttgaatcttatgtaactctagcacagtactcaatatttatggcatttacatggtttatctcatgtttttttatagctcttcattgttcctatctgccaaatcattatacttcctacaagcagtgcagagagctgagtcttcagcaggtccaagaaatttgaacacactgaaggaagtcagccttcccacctgaagatcaacatgcctggcactctagcacttgaggatagctgaatgaagtaagttgttgatgttgcagtcctgtgaggatcacttcagaactgttataacagctgttttttgggagctggtgttggatggggtgtgttggtctaatgtgaagtggggctaaatgtgagatggaaagatgaccagtcttccatattactgactgggttcactgaagcaactcaaagacattatggtcttcttaccagttgtatcacagaagaatttagcctttgcttgtgtgttctatgtcttcactgtataggccctctgtcattcttagagccttaaacgttgagaagcttaaaacaccatttctgctttctgctgaaagggtaaccctttctcatctccgtttgtgagagactctgtcgtcagttaagattagtgtaaaaagaaaactaaactctgaagtagccattataaaagtgtgagaatgaagtcagttttctaaagagttggggaaaggtgatgctaaaggaggggattgagcaagtcctatcaaagagccttttatgaaaatacttagtcatctgtgacatcccatttggctcttccagaaatcctagtaaatagttgtaacaggatgttaagaggcatacattgtgtgttttaaatcctctgctactcattaggtatatgacctttgacaacttaaagtctctagacttctctgtttgtgagggttaaatgaaatcatgtatgtaaagtgctcacctattgcagtgcctggcacatgtcaagtaaaaggtaacccaagaagactcataagttcatttcccacaatataagtgaccactagcactatcaggtagcaggcagagttggcatgctttggttctatgtaagaaatccctaaggtaaaagtttataaatagaagagcatctgtgttggtattggtggttgttattattgtagtactataagtagtattcgtagtaacaatagtttattataattactaatgacacttttt

SEQ ID NO: 7027 - DNA, 3945 bp, mus musculus
aaaaagtgtcattagtaattataataaactattgttactacgaatactacttatagtactacaataataacaaccaccaataccaacacagatgctcttctatttataaacttttaccttagggatttcttacatagaaccaaagcatgccaactctgcctgctacctgatagtgctagtggtcacttatattgtgggaaatgaacttatgagtcttcttgggttaccttttacttgacatgtgccaggcactgcaataggtgagcactttacatacatgatttcatttaaccctcacaaacagagaagtctagagactttaagttgtcaaaggtcatatacctaatgagtagcagaggatttaaaacacacaatgtatgcctcttaacatcctgttacaactatttactaggatttctggaagagccaaatgggatgtcacagatgactaagtattttcataaaaggctctttgataggacttgctcaatcccctcctttagcatcacctttccccaactctttagaaaactgacttcattctcacacttttataatggctacttcagagtttagttttctttttacactaatcttaactgacgacagagtctctcacaaacggagatgagaaagggttaccctttcagcagaaagcagaaatggtgttttaagcttctcaacgtttaaggctctaagaatgacagagggcctatacagtgaagacatagaacacacaagcaaaggctaaattcttctgtgatacaactggtaagaagaccataatgtctttgagttgcttcagtgaacccagtcagtaatatggaagactggtcatctttccatctcacatttagccccacttcacattagaccaacacaccccatccaacaccagctcccaaaaaacagctgttataacagttctgaagtgatcctcacaggactgcaacatcaacaacttacttcattcagctatcctcaagtgctagagtgccaggcatgttgatcttcaggtgggaaggctgacttccttcagtgtgttcaaatttcttggacctgctgaagactcagctctctgcactgcttgtaggaagtataatgatttggcagataggaacaatgaagagctataaaaaaacatgagataaaccatgtaaatgccataaatattgagtactgtgctagagttacataagattcaaattaataagcaatagaaaatgtttccacagaactttgaaacctataaagtcaaaacttttaggtctttagagagaaaatttcctcattcaacagaataggaaactggcataaatgggaaaatgtcttgccaaatatcacttgatgagtcactagagacaccactaccagtcatagccttataccttagttaaagaccagaactgccgggcgcggtggctcacgcccataatcccagcactttgggaggttgaggtgggcggatcacctgaggtcaggagtttgagaccagcctgaccaacatggagaaacaccgtctctattaaaaatacaaaattagccgggcgtggtggtgcatgactgtaatcccagctacttgggaggctgaggcaggagaatcgcttgaacccgggaggcagaggttgcagtgagctgagattgcaccattgcactccagcctgggcaacaagagcaaaactccatctcaaaaaaaaaaaaaaaaaaaaagacttccatcctgttttaagtgccaatcagctaggaaagagtccctttaaatgattaataactgagatcacaaaaataatagatatgagagggaaaaacataaggtcttcccaatgtttaaggctcacttcgatgttttaagacccctcaagtttgctttaagtctcctggctcaggactaacaaaacacagccttagagcagcattttcaaaactcacaatattgctctttgagataaaggtgagtcactctggaaggcaaatattctcacaataagaaaattcacataggttgtttaacattgcagctaaaatacaaaaaaaaagaagaagaagaagaagaaaaagaaaattcacatagactactggccctaggagaatttatctaaagattatgagtacaatagatagatcttcctagataactctcaacttagctttctagttcctagactttctaacaatttgttagtaactctctatttctaaatctacagagatttctagtcaattataacatttcaagagttcttacccatgaaaatatttcatgaaatttatagctacccactatttacgaagaatgctgggcaaagcctatacgttcaggatttattgcaccgaatggtcacctttatctgccaattctcactcgctaatcagcctctcccaacactgacctagagaatgtagggtcctggttctttagctcctgcctgatgacagataactttgtgccatttttagtcaggtttccatttgtatttatgcggcttccatcaatcagcaaccatagcataaaaagacacacctctcacttgttgtattatacaccatggcatcccaagccatcctgaagtatgtaaatgattggcaaagttcttctgtaaggctttaagagagactttggggaccacatggaacagaatgatttgcccatgtgatcaatgtcactgatgtgacagttgtccatgttctcctaaaagaacaacttagctgtaagcctctgccacgtgctatagtcccactccaaacacccgaacacatgcaacccgctaccctctttacatcatcactttaaccagttaatctcacacccagttgcttcccaggttagttaggaagctgtttttaccaaatcatatgcagaataatgatgaatacgacctcagtgaaacactaagtgcaatgtatactggaaaacaaaatcaaaattaagactacttattatgcttttagggacagcttacgcaccttgacgtgtggtggttgtttttgagactttatcttcctatctgggaccaggaaagtatcttgacagaacctcctgacctagggttgttgcccagtggtagtgagcttttcccctggaggatcctcatgccccatctccacctagggatcgtcaaagggaatggatcactaacactgtaaaacaacaagcctattcttctgaggaagatctgaaaagagataaaagaaaaagtattgaaatgcagtacactgggaaagtctgttctaatgggcaactagtggttgagttcaaccatatttttacccttttcttcatgtggattgaagagtggacatttacagttgtgcggagctgttatattctggctaccaacttagcaaaaaaaaaaaaaattatcctattcattccagctctattctgtatgctttccctcatttccaagagaaatttagaactgagtaattgccaatattcccatgctgcattttattctccagtctttattactgagcgatcctctacaatgtgggttgttaatacccttgtgttctcagcacaaaatatagtaggggggtcaagaaatcaagaggttgaaactaatggaaggagaaactaatgctttctcaaccaagagagccatgaagccacacagaaaaggtcggatgtggtctaaccctatgagttatgtaagaattctcctccacaatgcctctggcttcctttataaagagctattttaagaactgagaaatccacctctatcaaagtgcctgtcagctagttctgtagcatccccctcttttaatttgtactttaagtagtgccatgccataatattgccaagataaagagaattgtttcctactcaatccacatggtaacatttcttcaacaacctgtataatagggcgccaccaaagttctaggatattcggagaaaccaagaatggtcacaagcacatagaactccagttataaca

SEQ ID NO: 7028 - DNA, 7665 bp, mus musculus
gtcaattgagagctttctatcagagcattattgcccacaatttgagttacttatcattttctcgatcccctgcccttaaaggagaaaccatttctctgtcattgcttctgtagtcacagtcccaattttgagtagtgatcttttcttgtgtactgtgttggccacctaaaactctttgcattgagtaaaattctaattgccaataatcctacccattggattagacagcactctgaaccccatttgcattcagcagggggtcgcagacaacccgtcttttgttggacagttaaaatgctcagtcccaattgtcatagctttgcctattaaacaaaggcaccctactgcgctttttgctgtgcttctggagaatcctgctgttcttggacaattaaagaacaaagtagtaattgctaattgtctcacccattaatcatgaagactaccagtcgcccttgcatttgccttgaggcagcgctgactacctgagatttaagagtttcttaaattattgagtaaaatcccaattatccatagttctgttagttacactatggcctttgcaaacatctttgcataacagcagtgggactgactcattcttagagccccttcccttggaatattaatggatacaatagtaattattcatggttctgcgtaacagagaagacccacttatgtgtatgcctttatcattgctcctagatagtgtgaactacctaccaccttgcattaatatgtaaaacactaattgcccatagtcccactcattagtctaggatgtcctctttgccattgctgctgagttctgactacccaagtttccttctcttaaacagttgatatgcataattgcatatattcatggttctgtgcaataaaaatggattctcaccccatcccaccttctgtgggatgttgctaacgagtgcagattattcaataacagctcttgaacagttaatttgcacagttgcaattgtccagagtcctgtccattagaaagggactctgtatcctatttgcacgctacaatgtgggctgatcacccaaggactcttcttgtgcattgatgttcataattgtatttgtccacgatcttgtgcactaacccttccactccctttgtattccagcaggggacccttactactcaagacctctgtactaggacagtttatgtgcacaatcctaattgattagaactgagtcttttatatcaaggtccctgcatcatctttgctttacatcaagagggtgctggttacctaatgcccctcctccagaaattattgatgtgcaaaatgcaatttccctatctgctgttagtctggggtctcatcccctcatattccttttgtcttacagcagggggtacttgggactgttaatgcgcataattgcaattatggtcttttccattaaattaagatcccaactgctcacaccctcttagcattacagtagagggtgctaatcacaaggacatttcttttgtactgttaatgtgctacttgcatttgtccctcttcctgtgcactaaagaccccactcacttccctagtgttcagcagtggatgacctctagtcaagacctttgcactaggatagttaatgtgaaccatggcaactgatcacaacaatgtctttcagatcagatccattttatcctccttgttttacagcaagggatattaattacctatgttacctttccctgggactatgaatgtgcaaaattccaatgttcatggtctctccctttaaacctatattctaccccttttacattatagaaagggatgctggaaacccagagtccttctcttgggactcttaatgtgtatttctaattatccatgactcttaatgtgcatattttcaattgcctaattgatttcaattgtctaagacatttcaaatgtctaattgattagaactgagtcttttatatcaagctaatatctagcttttatatcaagctaatatcttgacttctcagcatcatagaagggggtactgatttcctaaagtctttcttgaatttctattatgcaaaattgccctgaggccgggtgtggtggctcacacctgtaatcccagcactttgggaggctgaggtgggaagatcccttactgccaggagtttgagaccagcctggccaacattaaaaaaaaaaaaaagtaagacaattgccctggaatcccatccccctcacacctccttggcaaagcagcaggagtgctaactagctagtgcttcttctcttatactgcttaaatgcgcataattagcagtagttgatgtgcccctatgttagagtagaatcccgcttccttgctccatttgcattactgcaggagcttctaactagcctgaattcactctcttggactgttaatgtgcatacttatatttgctgctgtacttttttaccatgtaaggaccccacccactgtatttacatcccagctggaagtacctactacttaagacccttagactagtaaagttagcgtgcataatcttaggtgttatatacacattttcagttgcatacagttgtgccttttatcaggactcctgtacttatcaaagcagagagtgctaatcaatattaagcccttctcttcgaactgtagatggcatgtaattgcagttgtcaatggtccttcaattagacttgggtttctgacctatcacaccctctttgctttattgcatggggtactattcacttaaggcccctttctcaaactgttaatgtgcctaatgacaattacatcagtatccttccttttgaaggacagcatggttggtgacacctaaggccccatttcttggcctcccaatatgtgtgattgtatttgtcgaggttgctatgcactagagaaggaaagtgctcccctcatccccacttttcccttccagcaggaagtgcccaccccataagacccttttatttggagagtctaggtgcacaattgtaagtgaccacaagcatgcatcttggacatttatgtgcgtaatcgcacactgctcattccatgtgaataaggtcctactctccgaccccttttgcaatacagaagggttgctgataacgcagtccccttttcttggcatgttgtgtgtgattataatcgtctgggatcctatgcactagaaaaggagggtcctctccacatacctcagtctcacctttcccttccagcagggagtgcccactccataagactctcacatttggacagtcaaggtgcgtaattgttaagtgaacacaaccatgcaccttagacatggatttgcataactacacacagctcaacctatctgaataaaatcctactctcagaccccttttgcagtacagcaggggtgctgatcaccaaggccctttttcctggcctggtatgcgtgtgattatgtttgtcccggttcctgtgtattagacatggaagcctcccctgccacactccacccccaatcttcctttcccttccggcagggagtgccctctccataagacgcttacgtttggacaatcaaggtgcacagttgtaagtgaccacaggcatacaccttggacattaatgtgcataaccactttgcccattccatctgaataaggtcctactctcagaccccttttgcagtacagcaggggtgctgatcaccaaggccccttttcttggcctgttatgtgcgtgattatatttgtctgggttcctgtgtattagacaaggaagccttccccccgcccccacccccactcccagtcttcctttcccttccagcagggagtgccccctccataagatcattacatttggacaatcaaggtgcacaattataagtgaccacagccatgcaccttggacattattggacattaatgtgcgtaactgcacatggcccatcccatctgaataaggtcctactctcagatgccctttgcagtacagcaggggtactgaatcaccaaggccctttttcttggcctgttatgtgtgtgattatatttatcccagtttctgtgtaatagacatgaaagcctcccctgccacaccccacctccaatcttcctttcccttccaccagggagtgtccactccatatacccttacatttggacaatcaaggtgcacaattgtaagtgagcataggcactcaccttggacatgaatgtgcataactgcacatggcccatcccatctgaataaggtcctactctcagaccctttttgcagtacagcaggggtgctgatcaccaaggccccttttcctggcctgttatgtgtgtgattatatttgttccagttcctgtgtaatagacatggaagcctcccctgccacactccacccccaatcttcctttcccttctggcaggaagtacccgctccataagacccttacatttggacagtcaaggtgcacaattgtatgtgaccacaaccatgcaccttggacataaatgtgtgtaactgcacatggcccatcccatctgaataaggtcctactctcagaccccttttgcagtacagtaggtgtgctgataaccaaggcccctcttcctggcctgttaacgtatgtgattatatttgtctgggttccagtgtataagacatggaagcctcccctgccccaccccaccctcaatcttcctttcccttctggcagggagtgccagctccataagaaccttacatttggacagtcaaggtgcacaattctaagtgaccgcagccatgcaccttggtcaataatgtgtgtaactgcacacggcctatctcatctgaataaggccttactctcagaccccttttgcagtacagcaggggtgctgataaccaaggcccattttcctggcctgttatgtgtgtgattatatttgtccaggtttctgtgtactagacaaggaagcctcctctgccccatcccatctacgcataatctttcttttcctcccagcagggagtgctcactccataagacccttacatttggacaatcaaggtgcacaattgtaagtgaccacaaccatgcatcttggaaatttatgtgcataactgcacatggcttatcctatttgaataaagtcctactctcagaccccctttgcagtatagctggggtgctgatcactgaggcctctttgcttggcttgtctatattcttgtgtactagataagggcaccttctcatggactccctttgcttttcaacaaggagtacccactactttttaagattcttatatttgtccaaagtacatggttttaattgaccacaacaatgtcccttggacattaatgtatgtaatcaccacatggttcatcctaattaaacaaagttctaccttctcaccctccatttgcagtataccagggttgctgaccccctaagtccccttttcttggcttgttgacatgcataattgcatttatgttggttcttgtgccctagacaaggatgccccacctcttttcaatagtgggtgcccactccttatgatctttacatttgaacagttaatgtgaataattgcagttgtccacaaccctatcacttctaggaccattatacctcttttgcattactgtggggtatactgtttccctccaaggccccttctggtggactatcaacatataattgaaattttcttttgtctttgtcagtagattaaggtcataccccatcacctttcctttgtagtacaacagggtgtcctgatcaaccaaagtcctgttgttttggactgttaatatgtgcaattacatttgctcctgatctgtgcactagataaggatcctacctactttcttagtgtttttagcaggtagtgcccactactcaagactgtcacttggaatgttcatgtgcacaaactcaattctctaagcatgttcctgtaccacctttgctttagagcagggggatgatattcactaagtgccccttcttttggacttaatatgcattaatgcaattgtccacctcttcttttagactaagagttgatctccacatattccccttgcatcaggggcatgttaattatgaatgaacccttttcttttaatattaatgtcataattgtatttgtggacctgtgtaggagaaaaagaccctatgttcctcccattaccctttggattgctgctgagaagtgttaactactcataatctcagctcttggacaattaatagcattaataacaattatcaagggcactgatcattagataagactcctgcttcctcgttgcttacatcgggggtactgacccactaaggccccttgtactgttaatgtgaatatttgcaattatatatgtctccttctggtagagtgggatattatgccctagtatcccctttgcattactgcaggggctgctgactactcaaaacttctcctgggactgttaataggcacaatggcagttatcaatggttttctccctccctgaccttgttaagcaagcgccccaccccacccttagtttcccatggcataataaagtataagcattggagtattccatgcacttgtctatcaaacagtggtccatactcccaacccttttgcattgcgccagtgtgtaaaatcacaggtagccatggtgtcatgctttatatacgaagtcttccctctctctgccccttgtgtgcccttggcccctttttacagactattgctcacaatctcaggtgtccatatttgcagctattaggtaagattgtgctgtctccctcttcccttccctctgccctgccccttttgcctctttgctgggtaatgttgaccagacaaggccctttctcttggacttaaacaattctcagttgcactttccttggtcccacccattatacatgaacccctctacttcctttcgcattgcttctgagtatgctgactacccaaagccccttctgtgttattaataaacacagtactgattgtcccatttttcagcccatcagtccaagatctccctaccactttggtgtgttggtgcagtgttgactatgaaaagcaggcctgaactaggtggataagccttcactcattttctttcatttattaatgatcctagtttcaattattgtcagattctggggacaagaaccattcttgcccacctgtgttactgctttactgtgcaaaatactgaaggcaagtcagacccagggagctggattgccatcctttattttgtgtttccagtgtacactataaaattgtctccccaggaaggaaggttggcactttctctgcattcttctttccagagcagattgcctggttaagaatctcttgttgtcccctttgtatattgttattgtaaagtgccaaatgccaggatacagccagaaaaattgcttattattattaaaaaaatttttttaagaaagacatctggattgtagggtggactcgataacctggtcattatttttttgaagccaaaatatccatttatactatgtacctggtgaccagtgtctctcattttaactgagggtggtgggtctgtggatagaacactgactcttgctattttaatatcaaagatattctagagtggaactcttaagaccagtatctttgtgtgggctttaccagcattcacttttagaaaaactacct

SEQ ID NO: 7029 - DNA, 524 bp, mus musculus
ccctttgtgcttccataatccattgctttgataaatagagtaaatctatttaaataaacctattgtaaaactctttgaaacaaattcttaaatgttactagcttagagtatggtcatatatgtaaaaacagtaaaatcaaactgtattctgtttctagagtttatcaccacctaatacagctctatgtttacaaaaagaacatgctaccagtcttttaacaaacacttattgggcacccgccatttggcagacattctactaggcaccggggctatagccgtgaataagaaacagccttgccctccaggaattcacagtttgaaggagaaaacaggtaggcaaaccaatactttaaggtgtggtaaatgcttttgtagagcgacgtgcaggattttatatgagcccggagatggggaaccaccttcagtccaaggaggtcaagaaatactttgcaggtgaacaatttatagatgaatattgaagtcttgtgggtagatgttggactggtggatgaatggggaaa

SEQ ID NO: 7030 - DNA, 1595 bp, mus musculus
taggagaaagctctcatgtggccaagttttgcctcctgccataagcagggggaacaaacagtgagtggcctgtgtgacctttgttagagtcagctacaggcagttgacggcctcatgtggctttaaggacatgggggctgacagggcacaaaacaagttcagcctagaggacagcaaggtaatgctgcgtgctctaaggaagagggaggttacagggaaagatacagaaacctgtccttcttgcatttagaaaacttcccgtttcttgaatttgagagcaatagcaccttgcaattatggagcttttgtagccaaagccttctcatggtctcttcctcataatatgcctaagagtgttgagtagaagcagagatggtgtcccccgttttacatatggaaaaactgaggcccaaagagactaagtaccttctctgaggttccattcttgccgcaaaagatggtttcatcaggcattttatcaaaggcacacagggctggcctccagttggggacaaatgactggtagctcatgtcacctgaacagctttctcttagtttgatgctggtaatgggaatagtgttcactttttgccctaggaatcctggagtttatcagcctggctgtggggctgatcagcatccggggagtggactctggcctgtacctaggaatgaatgagcgaggagaactctatgggtcggtaagtttaaggttttttttttttttttttttttttttttttggtcagaggttattacaaccagtgtttggacaatgtaaagcaaaagtataaaaatatttatctggggaccaggcatggtggctcacgcctgtaatcccagcactttgggaggctgaggtgggcggatcacaaggtgaggagttcaagaccagcctggccaacatggtgaaactccatctctactaaaaataaaaaataaaaaattagccgggcatgctggcatgcacctgtaatcccagctactcaggaggctgaggcaggagaatcacttgaacctgggaggcagaggttgcagtgagccgagattgcgccactgcactccagcctgggcaacagagtgagactccatctcaaaaaaaaaagaaatttatctagcacttgaaagcccttttttagctgtaaaggagtagtgtcttctagttacttcttggctgctcagggtcttgctacataacaccttcactcatttggcccccaccaaaacaagctttttttttttttttttttgctttgagatggagtcttacactgttgcccaggctggagtgcagtggcgcaacctcagctcactgcaacctccacctcccctgttcaagtgattctcttgcctcagcctcccgagtagctgggactacaggcatgcaccaccatgccaggctaattttttgtattttttggtaaagactgggtttcaccatgttggccaggctggtctcgaactcctgacctcaagtgatccacccgccttggcctcccaaagtgctgggattacaggcatgagccactgcacccggccccaaaacataagcttttctctgatacatgtgattttgcctttttcattagaaggcc

SEQ ID NO: 7031 - DNA, 1454 bp, mus musculus
taaaagctaagccaattagtatagtagtaatagcagacaaaaaaaatgagagaagtaaaggaagttttgggggaacagaaagaagaaagagctagtgtggagatactaaaccgaagcttgtggaacttgaacgccattttgaagctagttccttagacgattcggtcgaagatctgtctctcggctgccctctatagagctctaaacctggcttcaaggagttctttcattcttcattagataccacccaccatacgtcattttataaagccggaaactacatttcccaaaaggcctttatttttcctcgcgggaaaagggattgcaattactataggttttacaggtatcgcgagatttcgtcaaatctcattacggatcccggctgaaagccattttgtttttcagctcacttcaagggtacctgaagcgaattggcaccaaagcagcagctgtattgccgcagttctagcttcaccttcacgatgtttcccttggtcaaaagcgcactaaatcgtctccaaggtgagcaaaaattatgacaaatcatttacaacaaccttatatcaatgtgtcctcgcggcctctcgtgtgctttccttttacgaacatctcggccttctaatcttgaatgctgtctgtctcccatctcgtcccaagtcattgggatgatgtccttagcattggctttatcacccagtatttctgtttcggtttccagctctctttctgttatcggagtgatagtctagccctgctttttaattcttcagtaacctttgatttcagggaaggacattcttggtagacacctcgttccttaagtgatgtcctacattttagctttggggatatgtttactcctaaccctgtatagaaaaatatcttctccaattcctattactgtaatagacggaaactgtaaatctagctcttcacctggtttaattgcagggaaacaacccaaatggtatcgatgcagctttgaagttatttgtggattaacaatgttagctggccaggcgcggtggctcacacttgtaatcccagcactttgggaggccaaggcgggcggatcccctgaggtcaggagttcgagaccagcctggccaacatagtgaaacgccgtccctactaaaaatacaaaaattagccgggcgtggtggtgggcgcctgtaatcccagctacttgggaggctgaggcaagagaatcgcttgtacccgggaggcggaggttgcagtgagccaagactgctactgcactccagcctgggcaacaagagcgggactccgtctcgaaaacaaaaacaaaacaatgttagctgtcctgaaggcaatcgtggtcatttttttcttatccaaaggttgggcaggtacagggagttttgagaccagcattatgtagagaaaatgcaatagattgaggagaacaaattaattttcatacttgattt

SEQ ID NO: 7032 - DNA, 1076 bp, mus musculus
atatgagaatggattggaatttacaagctcaagctcagccaacacagaccaccaaagtgacgggcagtctggaaaccaagtacagatggactgagtacggcctcacgtttacagagaaatggaacaccgacaatacactaggcaccaagattactgtggaagatcagcttgcacgtggactgaagctgaccttcgattcatccttttcacctaacactgggaaaaaaaatgctaaaatcaagacagggtacaagcgggagcacattaacctgggctgcgacatggttttcgacattgttgggccttccatccggggtgctctggtgctgggttacgagggctggctggccggctatcagatgaattttgagactacaaaatcccgagtgacccagagcaactttgcaattggctacaagactgatgaattccagcttcacacaaatgtgaatgacgggacagagtttggcggctccatttaccagaaagtgaacaagaagttggagaccaccgtcaatcttgcctggacagcaggaaacagtaacacgcgcttcggaatagcagccaagtatcagattgaccctgacgcctgcttctcggctaaagtgaacaactccagcctgataggtttaggatacactcagactctaaagccaggtatcaaactgacactgtcagctcttctggatggcaagaacgtcaatgctggtggccacaagcttggtctaggactggaatttcaagcataaatgaatactgtacaattgtttaattttaaactattttgcagcatagctaccttcagaatttagtgttatcttttaatgttgtatgtctgggatgcaagtattgctaaatatgttacccctccaggttaaagatgattcagctttaagatgttacccttccagaggtacagaagaaacgcatttccaaaaaaggttctttcagtggtagactcggggagaacttggtggcccctttgaggtgccaggtttctttttcatctagagatggctgcgagtggaagctgataatatgtaggcactttgtaaattcatattgagtaaatgaat

SEQ ID NO: 7033 - DNA, 1500 bp, mus musculus
tctaatgggactggccaatcatctttgaactcatcttgagttctgtgactttctcttccctaaggacaaattatttaacaaaggttatttggcccgttaggtagctaggatcttggcattgttttttcaagcagttctccaagtatgctcagacatgttaaaagcctaagtggaacagtggttgaggatatgctgatatcccctacaacttttattatactcttccatgtataaaaaaactttatagtacatgttacagtctatatcttcactcatgaattggctcttccaagaatcagataataagcagccctttatctgggcactgtaagcttggttaataggctcagattctcacataccaaatcacatcctcccccaggataaccagagtgatagaacaaaactgggctattatccaggtttcaaattactcctagtgtgaattagcactctttttcaagatgagcattttcccttcagttccttgttctcttaccttagagacacaggcctccaggttttgtttcttctagaaattcctgaggcctctctagaaaagcctatgttcaaagaccactgtccattacaaagtctatgggtatgggtaggcagactcccttacttatgatgacaaccactccaatctcatttctaactctctctctagcttagtgtctctgtttcccatggaaatgagacatagtcaactgtaaacttttcctaggcaaaagacagcctcatccaccagtcttagttcccaagcactgggatcacagacatagaaagtcttctccccaattaatttatagttaataaatcctacttgtagacccgctgtattagatccatcctatttcctgccaactgtttttatacaggctgtggccacaaactttagccccactatataggatgtaagtgtacccctgacattcatttcatactgaaaggggagacgcaaagtctacaatagtactcatcacccatcttgaagttactggtaccaaacttgagcactgacagtactgttgtgactcacagcggtatttcatctgggaatttccaggtgtagtttctcacttcacttacccacatgctagatcaagcttattgaatctccattctcaatagccaatccaaattaggggtctgtggacagtcagccccccaccaaataccccaaagtaaaaggtaaacaaagtgggcattttttagaaccttcatagccacatgataagaatgttatgtgctggttccattaacccttttctctgcccccactgcctgcttcctagtatgtacagcaaagtccaatgaaatattttaagttgtgaatcataaagaggatgttctggatttttgtgtatccactacctctagagtactttgcataatagtccatatatagaggtcacctggaatacttcgcataatagcctatagagagagaagcatttcttccataaaatctaggcaactgtgattagagccctttaa

SEQ ID NO: 7034 - DNA, 242 bp, mus musculus
tgtcatataccatcatgaagaattattttggcggtgttggttctttggagatgatctacaatcttcagtttgaatatactagtttagagagcatgaaatgttattatataatgttttaaagatgtggacttggcttcaaaaataataacttatacaagaattcaagggaaaacatatcaacaatgtatattagatatgaaaatctcaagattagaggacaatactttctcttgtaatttttt

SEQ ID NO: 7035 - DNA, 656 bp, mus musculus
ttgttgtggttgtgttgcttttttaatggggaagggagggtacaggaaggtgacagaaatgttatttatatcaaaaaaattaaatctaatgaaattcaaaacaatttcaaatggtaagtgtgttttctaaccaactattgaaaaaatattattcatctcaatgaagtatttaatgatcaataagccatttaatttctaacctctctactttataaatacagaatacttgacttttataagaagctttggaataatcgagaatatataatcaaataattatttcattcagaagaatagtaaggcaaacaatgattcattcttctgttattctcaccatcatcgtttcctgggctcattttcatcaataatattatattttctgaaggataatccccaaatgggataaattgagatagagctgcctggagatatttatttttagatttgggatactttcatatggccatggttcccagagagggcaatcaagacttactgtgggtgagtgtttgctgagaacttgatacctttggtagtatttgctttttaacttagtctgactgctacttccaggcctcttgaaacttgctagtagaaaataacttcaaatttatgagtgatatgtttcaagagttcagtcaatgtaattggcctta

SEQ ID NO: 7036 - DNA, 943 bp, mus musculus
acatttttatctagagaggtttgatgtatatataataatgattaaaggtttactttttctttttcagtcatacattatttatgcaaagagaatatttcattaaacaaatgggcttattaaaatatacaattcaccattttgcaagaaagagtatagggcatagtgaatagacttctattgaggccactatttggagaaacattgtttcagtcatttatactgtaggtctaagatttgtattaagaaaacacatgtagcaataaatccattagtcagtgctgagtttacaaagtaaatagaggtaatgtgtttaagtagtttatagtgcacatcattcattatgaagtcatctcttgctttgtggtaaagccctatttaaaatatgactacagtagtcctcccttatctatggttttctttttcatggttacagtaacttgcagtgcagtacaataagatatttcgagaaaggccacattcacataacttttattacagtactttgtcataactgttttattttattattatgttcatttcttaactaatttataattcaactttttcataagcatgtatgtataagaataaatgtagtatatatagagttcagtactctctgcagtttcagacatccactgggtgtctcagagtatattatctgtggatacgggggcctactctattctatacttcttgtaacttcttcacttcaaaaagcattgaatttttattataacaaatgtattatctatagattttaaaacttgcaacagagtcccaacaatcgtagggcccccaacaatgccttagaacctttcttttgaattcccagaagtctgccccacttttcaatttttttcaccaaaaaagaccccttaaaatctgttgagttcaataaggaaacaacattttatacgtggggaatatgttctgaatgcag

SEQ ID NO: 7037 - DNA, 207 bp, mus musculus
gtttttggtgtttgactttaataccctcaaaataaataggcagataaaaataaaaatcagctaccattttattgtgaatgaattatgacagttaaatagatggagcaatagtgtaatttcactcaacaattcatgttcaggatttctggacacctacactaaatattttgtctcatcttcgagagattttagtttctagcatgccga

SEQ ID NO: 7038 - DNA, 1234 bp, mus musculus
agacaaatgtggattcattcctggctccaccacttaccagctgaatgactttggtcaagttagttaacctctccaaattaaaattttcttatctgtaaaataaggacaatgtaaaaatagtatctgcttcatggtgggattatgagataatgcatgaaaataacttagctacttgctggggacacaggaagcttgtcaagatcaccagtgatccacacattgccaaatccaggagttgattctcaatctccatcttatgcaatccatcagtaacctttgacacaggttaaattccttcctccttcaatctcttcacttggcctgtgggatatctcttgctcttggttctcttacctcattcactggctttccaccttaatcttctttcctacattctcctaaccctcttaacatcttctaatcttaacccaaaagactcatttgtactcagatgtttagtaagcaattcaaatttaacacatccaacacttaatgattcgtttgttttcccctaaacctgcttctcccacattttcccctatctcaataaatgtcacctccattcttccagtttctcaagttgaagagtctctctcacaagacatagtcagtccatttaggaaatcttgtctattctaccttcaacattatccagaatctggtaccttttcaccacttctacttccaccatcctaactaaagccctcagcatgtcttctggagtattgtaattgctttctaactggtctccctgcttctatcccttgtttccctatagtttcttttccccatagccaagagtgatttttttttttttgagacggagtctcgctgtgtctcccaggttggagtgcagtggcgcgatctcggctcactgcaagctccgcttcccgggttcacgccattctcctgcctcagcctcccaagtagctgggactacaggcgcccgccaacacgcccggctaattttttgtatttttagtagaaacggggtttcaccgtgttagccaagatggtcttgatctcctgacctcgtgatccgcccgtctcggcctcccaaagtgctaggattacaggcgtgagccaccgcgcccggccgagtgatctttttaaaaacatagcatcattcactcctctactcaaaattgtccagtagcttctcatctcacttaaagccaaaatctttaccatggccctgtgtgacctagctttccattgtctttttgatcacatc

SEQ ID NO: 7039 - DNA, 509 bp, mus musculus
acactgaataataatccgattttctaaatgtggcagtgataatcacaaacttaccatattattgactttattatattttcaaatggaataaattgaaagtaggaggagacaagctaagctttaaattatcaagtttttaaatccaggaaattatccttcctagataataatacaaaaataatatctaattatttaaagtattctttacatacctgagagtattattataacttaataatttgtcatttgaagttgttcataccatcatcaaatagttaaatattatcaagcactccacaacagacaacactgtacaaattgtgataatctccagcccttcactataatttcaatatgtaatatcactggataagtataagattaactccaccctataagtacctggttagttacagctttatgactgtgcatatttgcatggttaaatcactatgtcatatcacttatgtaattcatgaaatgaatatttttagacaacgagttatata

SEQ ID NO: 7040 - DNA, 851 bp, mus musculus
aaattctactgagaaagtataagccgactatagactttttcatagttgaattaaaaaattaaattgtgtgtcatatatcatcaaactcagttccttacttgctaccatagagaaagtgtgtctctgaggttctctgttttattgatacagtcatatcctcatttgtgctatattacataaagtacatgtggcctttatagttatatgaaagatatgttaccagccacattgatctctatgtaaattaattacatatttctagttaggttacacaacaaagcctacttgctgactagcctataaataaagattctttaaatgcatttggaacaattttgcctgcttgtatagagtgaatgactgctgtatgtggtaacctcagaagcttgaggaatagatttcctaccttttacagcaagcatttacttaggttttacattcacatttgtaatgccatccgttttgatttaaaatctgtcatcattgaaagaattgtagctggtgagtaaggaattagcttcgtaaatttgagaccggaagaggtcttaaagatggactaattgcaccccttcattttaattatgaggacactgaagccagagagaaaaactgacttggccaagtagatatagagagctgacgtaataccagacccacgtaatcatcctatagtatgtcactctgctactgtacattggacttgttacttttaaatgtgctcattattgtgcacattctgagcagaaatcctacttctcatgtgtttcaaaacaactcgtaagagcgatcagcattccaaaggcagttttggagaactgaaagtgtgttgttatttctagttttgtgttgtt

SEQ ID NO: 7041 - DNA, 1018 bp, mus musculus
tattaaagatcatcctacagagatgtaacagtgtcactttaatattcttatgcctacttcatagtaaggcaaataaaatcttcagaattgttgctggctgcctaaacatgggttactgtttattaatattttctttttcttgtttgttacctttctagaaacttgagattttcatgtgatgctctctttctctttttttgtatgcccttaagtattttgtgtaaagcaattaaaacagtaatttcagtaactagtttatgtcatgtaccaaattcaaaaatgacagctaagaatgaaatttagctctagcaaggaggctttaattaaaggatccttgcatctatttcagtgacttcctgttagtaattcaaccatctcctggttcactatttctgcagtgctctgaaaatgaagcttgtctacttattttttttttgtgtgtttcgtaagaattgaagaagcactcataagaaagggaaagggaaagagggaaagcaaatggacctaggatatcatgccaagtgtgtggggtgttattcaaataaataaatatatatatatatatatatatatatagagagagagagagagagagagagagagagaaggtttataaaacaaaaattgcagaaagtacatttttactatttgtttaaagaagaacccataaaagaagttttctgagataaagttgaaaaatgcacatagaggcaggtggtgccattagccctgctgttgggactgacagatcagtactgaagtggcatcagggtaggaaggtatcagcttcagtaatggagagatgtccaaaggaaagattgctctatcacagtgatgggatcctagcatgttataaatcgaagattgttctttcctgccactgagatgagcagctctttctcctttcgagaatgaaatgttggacacagacaaggaaaagatgaaaacaaaaaagtaggaaaaagttttttctctttaatgtaaatctcccgggagaacagacagtgtagtgccaatc

SEQ ID NO: 7042 - DNA, 909 bp, mus musculus
gctatatatgcattcattctttcatttaacatttatttattgaacatctgctctgtaccaagcaatataagaatacattataacactaaaatagcattcattttgtgagttagagttttcccagattccacctagcctttctctagatgttccaaaatgaagttagactgcttgttgcctttatatatttgaactactgatattcccatcttatgtatttctgtctttgtttccatcatacaatcaatagcttaattccccaatagctcattctgatataagtatcccattttctagtattttctgtaaaacatttagggatacacagggagaaaaggagagggaatattatatacatccttctctgtatctctgcagaagtgctaatatctctggatcacactgatgggatggatttgttgtttgtgcctttgagtttcccaaaagatgatggcttccctttcctcagcttatgaagcatttctaatagacagatgtgaaatttggcctgagaaagatttaaacggacagcttacaaggaagaaataaagtgcttcagatgaaaattctgtggtgttcattccttaaaaggttcttaagctggtttgtttattctagctatatcatggcaaaattgttttttaagaatgtcagatgccattcatgtcttcaggtaactaagcccatgaagattcaattcagcaatagtacctacagcactcaactcgggattagcaaaaccaaaagtagaattacatctagtgttgacagtgtgaattcaatctcataatataaggccaattaacttcattgcatcattggtatcagtatccctcttttcatgatgcatttcaaattttcactcacttagattggatgctaagaagtggtcataaagagatgtcctag

SEQ ID NO: 7043 - DNA, 909 bp, mus musculus; identical to SEQ ID NO: 7042

SEQ ID NO: 7044 - DNA, 346 bp, mus musculus
aaatcaactttgtcatgctgtattatttcttaatatggagtgattaggtttcctaaaggttaatacattttgcataactatttatgagtgatatttttctgtaattttcttgtaatatctttgtgtagtttcggtatcactcacctcttagaatgctggcctcctagaatgagttggaatatattatatcatctttaactctattgagtaattcacatatatttgcatgacttctttgttaagtgtttgatagaattcatgagtaaagccatctgtgcttgtgattttctttgtgggaacttttgcaactaaaaattcaatttatttaatatacaaaagtttattc

SEQ ID NO: 7045 - DNA, 547 bp, mus musculus
aatccttgtttcctaagaaacagttaacagaaattattttttcaaattcccctgtaagtactaagaagtttatatacccaaagttatttaaatgatatttttttcaaaatttattagaagcttattttttcttcacgtgcaccatgggaattttaaaatttggtatagagatgtctgtgtgcttacttatggctaacaatgtttagtagtaaaattatgggtagtgttttggatattctggactggcaaataatgtcctagatatcactttctttttcctagatgacacactatctggattgtatctcttcttgattcctcacagaagtcagctaatttggaaacctaagacaggatttttcagaagagaagagggagaagaataaaaatggagaagaaaagaagaggaactatacataaatagatgatggttgtaacctgaagactcataggtaggtagatagatagatagatagatagatagatagatagatagatagatagatataacctaagcattacctcccattccatagttaaaaatgga

SEQ ID NO: 7046 - DNA, 396 bp, mus musculus
tccaaattatattgacatttcatggttattgtgatagatctctgtcatgatgtaaaataagcttcattttgaaaaagtatatatcataatcttaaatattttcttatacaaaacaaacaggcaagagtaaaatctgacattaaaaccaatttatagtaaacagaatgtctaatatggtttgtagcaagtgttttaagaatgaggtttagaggagatttttttctaacttgctgtgtaaagaattaacttaggaatcacttcctcaggatcaatgtcaatgggttagtttaataaagttaattcttacacaatcttttaaaaagacaatcttctaaatttatatgtagttgggggaacatggcatcaatgatgtatacaatctaaaatattctattt

SEQ ID NO: 7047 - DNA, 370 bp, mus musculus
atatccagaaaaagacccagttatcaaaagccatgcatgagctacgtgaacatttcctatgctctggtcactttttctgtcacgaatcttaggttttctattttgctgtgatcaacctctttatccattttttttcatgttcagggtctcatattgacagccaatgctgtaacattttaaattaaatcttgcaaatgaaggtgaaagaaaatgataagatactgaccctactatagtcttcctcaagaaacgaaaacaaatctgacacataaaagagcaaaataaaaggtttttatagaataaattgatatatttattttaaattttgtcgtattattctggactatttgttttgacactctcaatacta

SEQ ID NO: 7048 - DNA, 361 bp, mus musculus
acaatagcttcatttatgggtgttgaaaattcagaataaaattcttctcattctggctggcatgcaagttttgaggggagagggagtgttggtgaggccacagcctgacatccagcttcccactttctcatagttaattaaaatataagaccttatatactatactcattaaataagctaccagtttgatgtcatgctcatatgaaaaatcagacttaaaaaagaatagagggaaaccataccagctacctagaattttcttctaaatataaacagacaatcacagatcactaggaataaaaaacaaaccttctgcatgaaaataaaagttgaaataattaaaaagtatactcaggcgaaa

SEQ ID NO: 7049 - DNA, 596 bp, mus musculus
ttcaatccagattgtgcattatgtatgatttaaaatactctcacaatttttgtgtattttattaatgagttaatatttgtgaattgaaggtcaaatttacagcaataactacaaaccaaatgtattgcatttaataaaatcacttgtctttcctcagattctgtagtttcagaagaagccattattgagcataatattttccacggaagaagtcctcctaaaagataacatcgttttaatgaaatagaactttagcagcaccaaaccaggttagcataatgcacccccataaacacacacacacatcctcaacatacacatgtccaacctactgacataaagcaacaatcacagctgaagccaattatgttttctttctacagaaatttgggtggcatattttaaagtcattcaaatctaatagctgcaatttaactttcatacaatacatactggcacaaattaaaatgaactaatgttgagattcagagaacaagcactgttttctatagaacatcattctttccttcttcaaagagttaaataacatcctagggttttggccatcatatatgaatgcaaggcccacctattta

SEQ ID NO: 7050 - DNA, 2010 bp, mus musculus
atgagagtaaaaagatttttagttacatttaaaataacacataaatgcaaaaagtaaatgaatgattactaaaataaatgtataatttccacagggaaatacattaaaaaaaaagtagagttgtcaaggtaaaacttgagtaagaatttttaaaccaaaggggtacctgaacaacattcagaaatattgaaacaaaagtttcaatctccatctgaattttgattactagtggaacaaccaactaatccccaaaaagagaagaagaattgctgaggatttggaagtggattggatctctctcatctagctatgtgtgttacatctcctattccacaatgttttcatacaaaggagttggagaaatattttattactttgcacccagagtcaacctttcttatatgagtaagaaccagcttcatccaaatagtgaacatgatttccaatgtgatgttcactactctttagtaaaatgtacccacatacataagcacctcccttgaattcctgttgaatcactaaatcctgagatcaagaagtaaaaatttcttttttttctcttagtttaggaagtttttctgggcaactacccggccctacagatgactactgattaaccaatgctacttataaaataaaaaattaagaggcattataattattcatctgtatgttcaaagagaggaaatgaagtctgtttaattctactccagctgaacaagaagctttattatggcatttcctccctccttctacttttccctaccttcctccctccattccttccttctttcttttcctccctccccccttattttcatacctatttgagtgcctccttcatatcaggcactgtgacaggagaagaaaaaacaaacaatgtagggccaaaataggtaaagttcgtttcatgtggctgaccatcttcttaggagaaatgacattaataaaattaccaattaattattaatcattactaataaatatataattagaactgtaaaaattgcaatgaagtggaggaaaatggtactatggcaacataaaatagagattttacctagtcaaaagccaaaggaaagttttcacaatggactctcacttaagagctaaaggagtagtatgagataactgagtaaacagggaaaaactattgcagtggaatgcaaaatcagtgaaagagagagcctgactagaagaccaaggtaaaataaactgctaaatatgatacctaacttattggagaatatctggtagaatatatacagagggagaaatatattaaagtcaaaactgaatagaaaacagatgtgaaacacaatgatttaaaaatcaatttaaaaaatcaatcttagcaattatttgtgcaataatttaacatttggatttcattgcttttgaatcattttggtgattatgcatgattattcaataagtactgtctagacagtgtgaaccatttgcttaatattaaaagttaaatagatattcctcacttatcaactaaatgtttcatttccatacacacacattcacacacacacacaaacacacacacacacagatgtaaatatgtcaatataggagataaacagtagattttaatatttccccatggtactatttgttaattaattatctatccaacattctttgctcttatactatttctactgaaactttggataagtaaacaaaacgtgtattgttagcttaaacttttcatggttggcatgaaaaaatgcagttgtttataggttttgaataaaaagttaattaattggagttaaaatatttgatagacttcaaatgtacaattccctgtacaattcaaaaacttaaataaaaatttataatttgatttttaatctcactctccaactgtcctattgagagtttggaaaagcatgtgctacaaaagctagaaaagcctctgaggacactaccaatactccctctacaggccgatatgaaaaaggactggagagtgggatagtcatcagtatgcac

SEQ ID NO: 7051 - DNA, 804 bp, mus musculus
ttagcatagtccctaataaaaataattgaattaaatttaagtatctagtcaatagaattaatagcaattgctataaacctaaataattatggtgataataaaaatcaagttaaatacaagatgtggtatagagttcagttagcttaataatctaatgttttactagtccacattcaattttagagtaatgatgttgaaaatgcaaattacttattattaggttccttaactttactatttacttactttttagtttttttaaagttttattttaggtttaggagtacatgtgcaggtttgttatataggtaaactcctgtcttgggggtttattgtacagattaattcatcacccaggtactaagacaggtaagtacccaatagttatttttttctgctcttctctctcctctcaccctccaccctaaagtaggcccaatatctgttgttcccttctttgtgtccatgagttatctttatattaattatttttatttcactacttggcagtttgccaaatcagaaacttgattttgataagagaaaaatgtctatttcagaagttaaaaatccgtatttaccaaatgtttaccagtctactatcattgatagggttcactatatttcaatatatatatcccagtgttgtcaaatttttgaggtattgtgattttattagtgtttgataatgaaaacataacttcaaagtctattacctgagcattgctttaatatccaggattctttgtacatgccattatgttcctgaaagtacatttagcataatatgtatagctaatttat

SEQ ID NO: 7052 - DNA, 804 bp, mus musculus; identical to SEQ ID NO: 7051

SEQ ID NO: 7053 - DNA, 804 bp, mus musculus; identical to SEQ ID NO: 7051

SEQ ID NO: 7054 - DNA, 804 bp, mus musculus; identical to SEQ ID NO: 7051

SEQ ID NO: 7055 - DNA, 323 bp, mus musculus
tgagaatgctctctagtcttctggttatgttatactgcctgacctaattttcaagactgtagtattacctataatctttatgagatttattgttttacctgtcttcagcttctattttagagatggaatggatccttaaagatcatgtagtatcctagtctgcctctattatttgacaaatgatggaaccaaggcccagagaaagaactgacctttaatgagcagctattttatgtcaggtaatgtgctaggtaccatacctatgttagttctttatctcagagaggttataacattagtaagtggcagagagacagtctata

SEQ ID NO: 7056 - DNA, 323 bp, mus musculus; identical to SEQ ID NO: 7055

SEQ ID NO: 7057 - DNA, 1534 bp, mus musculus
aactgaaacgataattttcttcatcattatcatgactttctcctttatacaataaaaagttttaatattgaagatgcagtatcttatatttgtactccatctactgatcttggattctaaatggattggagcttttgccttgagtaaatgtattcctacaaaaaccatagaattttagagagaaaaatgatattagaaagacattatatacccaaccctctcttttgattgatgagaaaactgatgccaacttagttatgaattacctggatttacatgaacaagaagtgaaactggagcttaggtctcttgattcattttctggagcttttcctactccacaaactccttttattatgaattctgtactccaaatattactataaatgaagaattcaatgtaggatttttttttcatcactaaggcaagtgttagttaacaaatacagtcaaggagaaaatgaaatatttgaaattagctgaagttatactaaaggcacaaagaaaaattctcagacattagtaggtactcagtaaaagagagaaattcagcatcataaagctgtaaacgccttgataaatgtgaggtcaatcaataaaataatggcagtgaactcgtgtggctcatagcatagcacagaagataaatctgaaagagaaacagcaaaatgttgtgaacaatagcagcatcgttgaaataaatagtccccatttatactagtctgtagttagagttctaatgaattaataatttttattgatttcagtttctaaaagaaattgctattcttgtcatctttatctgccttggaatctgataaaatctaagttgactacttctcattaaaagaaattattaggccgggcgcggtggttcacgcctgtaatcccagcactttgggatgccgaggcgggcggatcatgaggtcaggagatcgagaccatcccggctaaaacggtgaaaccccgtctctactaaaaatacaaaaaattagccgggcgtagtggcgggcgcctgtagtcccagctactgaggcaggagaatggcgtgaacccgggaggcagagcttgcagtgagccgagatcccgccactgcactccagcctgggcgacagggcgagactccgtctcaaaaaaaaaaaaaaaaaaaaaaaaaaaaaaagaaattgttgaagcagaatctccgttattaaaagtaacgcaaaaccaaaacaaaactctttaatacatctgaaggttacaaataaaacatacatttatcagttttattacaaagatatattattaaagcatgaatggttttaacatgaattgtttcttcatttattcacggtagtttatactgccattgtaaattttagagtttccctgcattttttttgcaaatatcataggagctattatagatatttcatgttctatatctgacttacagttacccaattttgatcatgaccaagcaataggatcctaagggtccatttgaaaggatttggaggaaatatagcttcatgttgcaatatagttttgcaca

SEQ ID NO: 7058 - DNA, 1534 bp, mus musculus; identical to SEQ ID NO: 7057

SEQ ID NO: 7059 - DNA, 145 bp, mus musculus
aagacacactccctgttggcttaaactgtaaactatagcaaggatttgcatacagtttaatgggaattctataatttgaccgttatttcagatatccacaattaatcataccctgtgacttttccttttctctcttttaaggtga

SEQ ID NO: 7060 - DNA, 145 bp, mus musculus; identical to SEQ ID NO: 7059

SEQ ID NO: 7061 - DNA, 1121 bp, mus musculus
catccacccactccaagtcatttatacttccctaagaattactgacaaattaaaaataccaactctataaataatggaagtctttaatgcatttgtatataggttgttaccttttttgtcacaatgatatttaagtggctaataaaaatatgcctttgaaatataaattttattatttttttcctcaccccaacagctgcagaaataactgttcaaccaactgtggaagaggcctctgacaactgcactcaagaatgtctcatctatggccattctgatgcctgctggatgccggcatctctggatcattccagctcttcgcaagcacaggcctctgctctatgccacagcccaccactgtcacaggcctctactcagcaccacagcccacgagtgacacagaccattgctctctgccacagccctccagtgacacagaccatcgcattgtgccacagcccaccaccgatacaggtgtctgctctccaccacagtcctcctctagtgcaggctactgcacttcaccacagcccaccatcagcacaggcctcagccctctgctacagccctcctttagcacaggctgctgcaatcagccacagctctcctctgccacaggttattgccctccatcgtagtcaggcccaatcatcagtcagtttgcagcaaggttgggtgcaaggtgctgatgggctatgctctgttgatcagggagtgcaaggtagtgcaacatctcagttttacaccatgtctgaaagacttcatcccagtgatgattcaattaaagtcattcctttgacaaccttcactccacgccaacaggccagaccgtccagaggtgattcccccattatggaagaacatcccttgtaaagctaaaatagttacttcaaattttcagaaaagatgtatatagtcaaaatttaagatacaattccaatgagtattctgattatcagatttgtaaataactatgtaaatagaaacagataccagaataaatctacagctagacccttagtcaatagttaaccaaaaaattgcaatttgtttaattcagaatgtgtatttaaaaagaaaaggaatttaacaatttgcatccccttgtacagtaaggctta

SEQ ID NO: 7062 - DNA, 1121 bp, mus musculus; identical to SEQ ID NO: 7061

SEQ ID NO: 7063 - DNA, 206 bp, mus musculus
tttgttaccttaagagcctcacaacggtgttatgttcaagctcgttgtgcctgggcaggaacacatatctctgcctaatttcactcaatattccttgttctgtgttccagatcttatcagatctactttccaatgcttatcaattcttccacttctttctgtccaaagcacaattatcttagtttggtcttccatcgttcaatggt

SEQ ID NO: 7064 - DNA, 720 bp, mus musculus
atatatgtatttttctctacataatgaaagctctatgcaatactgtaaagagaaaattgtcattaagaaaagataatgttcaaggttacacagtttaatcaataactgttgaagatatacaatgggctaggccttctagaaagtacaaagcaattagaaggtattgtcttttcttttaaaaaactgataatttgattcatggagcaggtctaaaacaaaataaaataagtaatacaagataataagtgatcaaggacttaaatcatgtaataaaggctaggtgttacagaagtttcgaaaaggagcactgaattactcaaaggaaactccacagaggaagagggtgttgctatggtctgaattctggtgtctccctcaaatccatatgttggaacctaatacccaatatgaaagaatgaatagatggagactttgataaacgattgagccataagggctccatcctcatgaacgggattagtgcctttataaaagaggctcaagcatgccctctttcacttctgtcacatggaggcacagctagaaggcactctccatgaaagagagaccaagtcccaaccagacatcaaatttgttaatgccttgatatttgactttccagcttgaagaactatgagcaataaatttctgttgtttataaattaccaagtttatggtattttattatagcagaatggactaaggcagtttgttagctag

SEQ ID NO: 7065 - DNA, 432 bp, mus musculus
aaaatgtacacttaaattaggcagattttattgtttatataatatatctcaatacactattaaaaataatgcgcaagaaattatcttaggacaaattcatatagtgtgaaaaacttctatgaaaatagaaaagtagatatatttagatgtcatatctacaacagaaatgctcatttttttttttggtttgtcaaccactcttgtgggaaaaaaggccctcatgccctactccattcaatcctaatttactatggtaaggaaagctacaccaagatccctccctgaagactggggaactttcagctataggaaacagctgcttgattctttcacaggagacttaacttaaaacttttagcagtaaagtgtctcagaagttctttttttttttctcttttctactcctgaacttgccctagattcaaatacctc

SEQ ID NO: 7066 - DNA, 194 bp, mus musculus
gctttgttgcaatcagttttgttactgagtgttaataaataagaaatacattcccaacgttgattttacaggatgagcttcagtacataaaaagtgttcaggaaagattgaaaggttccttgctagtactagcagtggatacattaggcagattaaaatccagatgccattaaacagcagagatagtttgattt

SEQ ID NO: 7067 - DNA, 334 bp, mus musculus
cattaaatatcaagaacacacacacaaacacaagtggcttaaatttatataaggtttgagtcatagggctcaatttacggaggaaattgtagaaatatcctacatagtttctgaaaaatattgcattgaaaagatagttcaggacatatttttcattgtggttcttaaatctaaaactgtaaaaccattaaaatagtttagattactttaaaataagaagacaaaaacataagaaagttagcaaatgtggcaaaatttgtcaaagtatatataaataaatatacatttcaggaaatggaatgcatttaaaagaacttagtaagttaaattattt

SEQ ID NO: 7068 - DNA, 1586 bp, mus musculus
taattatttttttcttatttaacaaacatggcaataaatgacttataatacaactgatgatgaagtgcatctatatttcattataattttttttaatatactttaagttctagggtacatgtgcacaacatgcaggtttgttacatatgtatacatgcgccatgttggtgtgctgcacccattaactagtcatttacattaggtatatctcctaatgctatccctccccctcccccaaccccacaacaggcccccgtgtgtgatgttccccaccctgtgtccaagtgttctcattgttcaattcccacctatgagtgagaacatgcggtgtttggttttttgtccttgtgatagtttgctgagaatgatggtttccagcttcatccatgtccctgcaaaggacatgaactcatcatttttatggctgcatagtattccatggtgtatatgtgccacattttcttaatccagtctatcattgatggacatttggcttggttccaagtctttgctattgtgaatagtgccgcaataaacatatgtgtgcatgtgtctttatagcagcatgatttataatcctttgggtatatacccagtaatgggatcgctgggtcaaatggtatttctagttctagatccctgaggaatcgccacactgtcttccacaatggttgtactagtttacagtcccaccaacagtgtaaaagtgttcctatttctccacatcctctccagcacctgttgtttcctgactttttaatgatcgccattctaactggtgtgaaatggtatctcattgtggttttgatttgcatttctctgatggccagtgatgatgagcattttttcatgtgtcttttggctgcataaatgtcttcttttgagaagtgtctgttcatatccttcacccactttttgatgggtttgtctttttcttgtaaatttgtttgagttctttgtcgattctgcatatcagccctttgtcagatgagtagattgcaaaatttttcttccattctgtaggttgcctgttcactctgatggtagtttcttttgctgtgcagaagctctttagtttaattagatcccatttgtcaattttggcttttgttgccattgctcttggtgttttagacatgaagtccttgcccatgcctatgtcctgaatggtattgcctaggttttcttctagggtttttatggttttaggtctaacatttaagtctttaatccatcttgaattaatttttgtataaggtgtaaggaagggatccagtttgagctttctccatatggctagccagttttcccagcaccatttattaaatagggactcctttccccatttcttgtttttgtcaggtttgtcaaagatcagatggttgtagatgtgtggtactatttctgagggttctgttttgttcatttcattataatttttataattgttagttttctatagtcaataaccactgaacatacatcataaatgacattgttgtctcccaactatttaaaacatccaatgttgccaatgctgtagaatcatttctattaaattgagaaatacttttggttaacaaatc

SEQ ID NO: 7069 - DNA, 435 bp, mus musculus
acatttttaagccattcatcctttaatgaacacttaggttgattctctgtcggctattgtgaataatgttgttatgaatatgggaatgcagatatctctttgacattcttattttatttccttttaatcatttcttattgatgtgtagtcaggttgtttccaatctatcactattacaaacaatattagaaaaacactcatttacatatatatataatagtgaatgtttgcaagcttttctgtagaacagattcctaaaagtactgtgtgaggtcaaatggtaagcataaattattttgaaagaacctcacctaatatctagtgcacccagacaaatattaaccttgtgattacagaatctataaggcacagttcttacccttgtttgtccatcttgggaatcagaatcttgtttgcagtagtcaggaggtcaac

SEQ ID NO: 7070 - DNA, 1279 bp, mus musculus
gccttctgagaaaaaattatgctaaaaactcctgtcttgaataaatttaatgatttcaactgatgaattcacagcttgagaaaggagattacatcattatgtggagaatataaatcaataacatcattctattttttatttcaaatgaggaccatgcaaattaattataaaaaatagaagatcttcagttagctctgaaaacggtgctgtagcaatcacaaatttcctaaaaaacctgtctttattaaattttcagattaagtttcaaatgccaaccttaaagatgccatccaaatccctgcttgaataatgctagtaatgttgcataaacactcctaagctttataaagtaggctatattcactaatacttatttaaacagataattccttttctttttttctatgtattatctaaagagctagtatgctccacttctaagatattcttgtatatcctaaatctaatgatttcaaggagagtgactagcattgccacagatgtttgtagaattttaaatgttgctaattaatgaagagaataagaccagtgctgtgaacaaaaacacaaagcaaaacaaaacgcccactgtgattgcttcaccattcattagcccaggacatcaacatctttttcacaagttgtattccagcacagtggagatactgattaaagggtcatccatatgttagcaatatggataacctgctgagcaacaagagtgaattctacaggtcaaatgacaaatttattttgtgattgtgaataacttcacatttcgacgttttctacacagttgcattagtgaagtcatgtacaatttttcttagaaagaagcacagtcaagagtttttattattttaagaataaatgtgaaaaacaaatcgatttgtacattgaagtcattctaatctttaagactccagtaataaatttctaattaaaaacctcaagttagcccctgactgggcagctctccatcccaattggtttatatatacattatctgcatcatcacctaaacaaaatctaaagcagaatacattttcatgttctaaaaagtttacagactattttggaaacaaacatcatgaaattaaatgagataaatcaatatatccacaggagcaaagaagccactgaaaacttaatttgagtactaagggaatgtagagtaattactgagtttatcctctcaaggccctctttcccataggaccccaaaatctccatttctagtcctggcttatcatcctctttctgttcctttatgtcccat

SEQ ID NO: 7071 - DNA, 799 bp, mus musculus
ttcatttttgcagaaatgatattatgaaactataaatcactcgctgtattaaaaggatgtaggttttgagaacgcacaaatgtcatataatgtgcctagtttcttcatatataaaattaagtcttcattaagcacacattttagaacacaagacttttcacaggaagcctaaaagccattaaaatgcataccattatcttgaagaaggtgataagtgttcaaaaatatatatatactaaaataaagtcactttgcttctcttttagaggtgatatttaattttaaatttcacatgacattaaaagagcatgagatttgatgtttactaaatggaaattgcatttaaaaaatgttgaatcattgctgtagaaagttttctaggataagatagtagaaattactgcaaaatactttgaaaattgttaacactgagtgggcttgtagagttaatgcccttccacatggtgatttgattataagccaaaggcatcccttctccagtgtggtgaggtggaaagagttctgaacttagaattagtagatctgacatctagtctttgatctgcaactaacaagcccttagaccacaggcaagtgactttttctccctggcctttgtttcttcagttttgaaaaggagcattttcataagatttctaaggtcccttccagctataatattctatgaccgtatcttcctcactgagtctactaaaatttctatattatttacttccttgggttaaaaaactgagtgctctttttaaaggcaaatattgtctgagaaatgtcccacatt

SEQ ID NO: 7072 - DNA, 1274 bp, mus musculus
atattctcataagatctggattgacagtagaaatgcatatgtagtaataattatatgccccaatagcccaccgaaatttaaacagccaaatttaatttgctgacatttgaaatggctcttctagtaagacttgttactagtcaactttatacctctcagacttctcctgctattggtatctacatcttcatatttgggttattttagagaaaaaaaatgccaagttaaatataatccttaaacatcatgaatacctgataaaaaaagaaagcaaggctggatgtcattgtttctaaggtgaatcaaggtagggcctataatcttgtgttgctggaaaaatacatttaaaattatgtcatggcagagtaactagtctctaatacacattatgtatggacctgctgaaatccccacttttgaatatacttagagataaaaactctcccacatttggtcggctttggtctacagccatcctcaaacctggcttgtcatatgaatcccttgaaaggcactgggaaaaaagtcctgtactccaacactcctggaaaatttgattcagtaggtctagtttgggaccaggcatctgttttttaaaactcatcagggcgactctactggtgaggcagctatgagaaccacggagataactaaatgggaaccttttaatctgcagattcttaattctgtaaccagtgttacagggagagctcatgaaaccctatggttttatgattattgtaaagagtatatgtacatgaaccagtcagtttttacttcataatatcccaaagatcatcaagatagtatataagatagtatctgtaaagatatttttaagatagtataagatagtatatataaaggtatttttatagttttctttaaagcacatttttattgaatttaagttatatgaaagaagatcaaacacttgttttcaaagaagcacaggagacacccccactgtatagaccagcagtgttcctgctagttaatacactatgacacattagtatagtaggggatgtaacattgttttcaatggtggacttcgagatgaaattgaaattagaaaatagtaaaactcctaatttatggaataaattacattttctctaaattactttttttattttcctcaaatccattagatttctcacttgctaatcccacaatctgtattcttaccaataatgtggcaaatcttaccaatcgtctgttgcgaaactagccctgaagggctggtagaattttataatttatattaatga

SEQ ID NO: 7073 - DNA, 977 bp, mus musculus
atgttaaaggattggtaagactttgttaattttagctttgagataaaagactggcattgatttggcaggcattaatttgttgcttcatagagattccaaagttgatgtactgatgtcaggagctctttttaagatttgcaaagtattattaaagcacttgatctattctcatcacagaaagggcttcatgtaacttactcgttcctctgggcaatagacatagctcaaattataaatgaaaacttatagttttgagtctgacttattttctgtcatgaccagtattttccagttatcatgcaaaaatgtctacaggatcaatgatccccttgaaaaaaaatgttacctcatcagatgtcatggatagtgatagaatgagattctgtgaattccagcccctaaatgtgtgatagcagtttcaaaacaaacttcctatggaatgctctgccataatgggttagaaaacatgagcctatatcttctaacaagaaagtatattcattctttgacatctgaactatatcataacatactcaaagcatgcacattacccaatcaactttgtattttattttttaagtatctaccacatgcccagcatactttcttttgacttttaggtaacaaattacctcctttagacaggatgttcttcttactcttttgtacactctcaaagcaaactgcggtataacaaatattaacaaatgatgggcatatgcatcactgaagatgaccagagaaatgttaacatcctgacaatgtcacatttacttggccataaaataataactaaagttaggcagtgtgatagactcatagagtcatgacactgaaaagaataaatgctcatcaagtctttttcacagaccataagctgaaacaaatgtaaaattcctaatgtatcgatgctgactccttcctttcccccttaacaacccttctcctcctgcctcctaattatgaacagcaagaga

SEQ ID NO: 7074 - DNA, 2288 bp, mus musculus
ttttattatgaaaattatcaaaataaggctgggagcggtagctcacacctgtaatcccagcactttgggaggcggatggatcacgaggtcaagagactgagaccatcctggccaacatggtgaaaccgtgtctctactaaaaatacaaaaattagctgggcatggtggcgcgcgcctgtagccccagctactcagggggctgaggcaagagaatcgtttgaactcaggaggcggaggttgcagtgagctgagatcgctctattgcactccagcctggtgacagaacaagactctgtctcaaaaaaaaactattaaaatatatagaaaactagaaagaactataaaccacaagtacttttatccactgtccagaactaataaatatcaacactatcatactttacaatttgtctcttttctttaaaataaataaaatattacaggtagagttcaagttcctttgtagtcttcctcaaaccaattcccctccatccctacccagagccatcaatgatcatgaaattggtgtgtatactccccatcatgttcttatacattacaagtattcattcagtattgtttaggctgccttaaaaataagttaaatgcccatcaacggatgattggataaagaaaatgtggtatagatatacatgtataccactgaatactattaagccaaaaaaagaatgaaatgtctcttttgcagcaacatgaatggagctggaggccattatcttaagtgaaataattcagaaagtcaaatgctgcacattctcattataaacagaaactaaataatgtgtacatatagacataaagtgtggaataatagacactggatacatggaagagtagtggggtgggagagaagtgagggatgagaaaatgcctaatggataccatgtacactattcgggtgatgattacactaaaagcccagacttcgccactacacaattcatccatgtgccaaaactgcacttgctcctcctaaatgtatacaaaaagttaaatagcataggcatcatcctttgacttacattttggctcaacattatgtttttgaaatctatgttaatatataaaggtaactcattaatttataccaatctatccatgttaattatataaagatctagtttatatcattttaattgctatataatactccatctcgtcaacatatcatcatttatcaattcactatgataaacatttaaatttcttcctattcttagtattgtaaagcttgattaggcaaccaaccatgtgtagatgtgcatgaatttctctatgttatatacctaaacatgaagtattgagtcacatgatatcagcactttcaaccttattatatattgtcaaatttctctcaattttctaatgctttatttagaaattttgtatttatgtccagaaaagagacttactataactttcttttgttatgctttctttgtctatttttcagaaactattcattaatagtttcataaagtaagctgggagcatacccttattttctagactgaaagagatttatgtaatagagattattcctcaaaagtgtaataaaaatcacatccacttgggcctgatactttagaatggagtaggaattagggcaatatttttaaatttcagttcaatttctttaatgataatcagtctacttagattttctacttcttccggtatcactctgatcatgtatatttgtctggaaaactgaccatttgtttaagcatgaaattatttcctatatggtaaaagcctgagacaaggacttctaggcagataatatatttgagtggtattatcccagggaatgggtgtgtgagattggagaggagtgaaagaaggaaggaaaaatagcctttccaaggttgcattattgagttgatcatgactgtggccaagtgggtctagattccactagggatctgatggaaagccatatagaatacactttagaatggtttaccattcacccaatagctcctttacctcatcagacaaggatgaccccatgggctattaaatccctcttacttccagatggcatatgcatatgagtgctatggcttcctgcacattggaaagaaaaatgaggtgaccacagctattaggtcacacccatgcaaagctgtttggcacaacaatgactacagtaaaatgtgggttgactgcatggaagatggagaaaggtgtccaatacatcatttcatggaggagtcaggaagagatctacattattttaagcttctatagggcacaaactatat

SEQ ID NO: 7075 - DNA, 448 bp, mus musculus
gagataaacagaagtatttatccagcaagtagtaagatactccccatcacctgcagtaacctaggcctgtcccaactcctcccagagaaatcataactccttaaagtctgcattaaagggagttgtccttgcccccaaagacactcatagagataagtaccaagaccctctctctgtcattccatattagatcattgttttcaggtagcatttttcagcatgcaatttacgctatcacctataggctatgtgctgtagataactgttaattagacaaagaccctaatcttccacttgtccaaagatggagtaagtatccaggccaacaggcttgttttctctgaaaagtactaattaagttgggccagaaagcttctcaacatacgagagaacccagtgacccctcaaacacaacttgacaaaatgttcagggcgtgattgtagctta

SEQ ID NO: 7076 - DNA, 225 bp, mus musculus
gggttcttcttgattatatcagaaactgtcaatacaaggttttaaataaacagtcaggattcatattcttttcttccgtaattttgttgagtgaaacatgtagagattataattggccagccatgcttccggtagcaacaaccatgttcatgcatgtgcagcaggggaaatcatggtatgactgttactcagccttcagtgattgtagaatgccatcaattctaa

SEQ ID NO: 7077 - DNA, 548 bp, mus musculus
tccaaaaagttacctaaagaggcagaatatttcacagacctgcaagccttcttgattataacctgattgcaaatattgtattaacagtgtctcaagcaacagagaggttggtttgatcagttattttctagatgagagctactcaaagtgtgatccttggactggtgcccatatcagaactgtttggtatgggcctatgatgagatatgtacttaaactaagaataatcagctgggcgcagtggctcacgcctataatcccagcactttgggaggccgaggcgggtggatcacctgaggtcaggagttcaagacaagcctggccaacatggtgaaaccacatctgtactaaaaatacaaaaattagctgggtgcggtggctcacgcctgtagttccaactactcaggaggctgaggcacaagaatagcttgaacccaggaggcagaggttgcagtgagccaagatcacgccactgcaccccagcctggacagcagaaaaccaaaaaactaaaaataatcaattagaacttttattgcaatttgacaaa

SEQ ID NO: 7078 - DNA, 275 bp, mus musculus
acctaccatatactttaaaggcttctatcaataaaaaggctttatcaggtgtcacttctgtagaatctgttgtaagacctttgattaatcaatgtaaagtgatttttttaaaatatttttgtctgaaacttcagataggcaactatattcatttggcagtgctgctataacaaactacaacaaactgagtcccgtaaacaacagaaatatattgtctcacagttttggaaactggaaatcagagatcaaggtatcagcagagttggcgcctcctg

SEQ ID NO: 7079 - DNA, 987 bp, mus musculus
agctcgaagccttctgtggagagctcgaagccttctgtggagaactcaaagccgtccgtggagccccagacgagccaaagcccaccttctcctcagcctgagctgtcttgaagatgagtaagagtgggtttgggagctatggcagcatttctgctgctgatggagcgagtggaggcagtgaccaactgtgtgagagagatgcaactcctgctattaagacccaaagacctaaggtccgaattcaggacgttgtaccgtgtaatgtgaaccagcttctcagctctactgtgtttgaccctgtgttcaaggttaggggaattatagtttcccaggtctccatcgtgggggtaatcagaggggcagagaaggcttcaaatcacatttgttacaaaattgatgatatgaccgcgaaaccaatcgaggcccgacagtggtttggtagagagaaagtcaagcaggtgactccattgtcagtcggagtatatgtcaaagtgtttggtatcctcaaatgtcccacgggaacaaagagccttgaggtattgaaaattcatgtcctagaggacatgaacgagttcaccgtgcatattctggaaacggtcaatgcacacatgatgctggataaagcccgtcgtgataccactgtagaaagtgtgcctgtgtctccatcagaagtgaatgatgctggggataacgatgagagtcaccgcaatttcatccaggacgaagtgctgcgtttgattcatgagtgtcctcatcaggaagggaagagcatccatgagctccgggctcagctctgcgaccttagcgtcaaggccatcaaggaagcgattgattatctgaccgttgagggccacatctatcccactgtggatcgggagcattttaagtctgctgattgaggcagggaaaacatcctttcatttttcgaagacccttgcatccagctgtgagtaattttgacctgttgactttttaggaagtaggact

SEQ ID NO: 7080 - DNA, 987 bp, mus musculus; identical to SEQ ID NO: 7079

SEQ ID NO: 7081 - DNA, 987 bp, mus musculus; identical to SEQ ID NO: 7079

SEQ ID NO: 7082 - DNA, 935 bp, mus musculus
aacaagaattttcatatgctaaccatgacatgtacttcatatcatgaatgtagatggctaattttcacacattaccatgcatttcagcattccctagagttatctgaagcatctggggggaagggggagagaacctttaagttttctgcttctgagactattttgttgttattggatatcgctttgacccccttcttttagtgcttatcactaggcatctgccgtatttaatgatgtgtgtcatttcatttagtatcactgacttggatcaattcctcttccaggtttctgtactgtcttgatacatgtatttgttttgctttgaaagaaaaatcaacaattgaattgccagtgatagacatatgagtaggaccattcttaatggatatgtagagataatttctcttcctttaatgtctgtgaattatcatccactgtgatgcatttaaaaatgcaactcaacaacagtagtctactgacaaacaggtgactgctgcctgtgatgtgttttcagttgttggcttttctaagtagttacttgtcagagagaaaggaaaaaggatgaaaatatccattttgacacctcttgaaatgtgtttgttgactgtctctcttttaaatcgccctgtacctatttggcatcactaatcacaatgctaagtgactttttactttactaggcattaaacttgtgctgcttaacctttgagcatcaaacaggcctttccccagcaccctgctgtatctttagtacaaaactcctgaatcattatccatcttgaggatctgccttgccttagaggtactctgacatttgctaagacttcccattggaccttgcagacatttccagatcatgacagtgtcatttgatattttggttttaaacatcatcagagtggcttgtgctgaagaaccagaactagaaagaaaat

SEQ ID NO: 7083 - DNA, 924 bp, mus musculus
aaaaataaaagtctaatattttagttcatgtattcataattccatatggtggccaacaggtccaacatactgtgacttccacctccctgactgtccttaacttggattactctctcgcttgcccattacgcttaagtcacactgtctttctgtttctggaacacaccaagctcatttcctctccagggcctttgctcattacacttgttcccttttcctggaatggtctcctcttcttcctcaaattaccccctatgccccattatcaatttaacacctacttatcctacagctcttagcccaaacgtcattttctctggaaggactttcctgactttccagatcaagttctcctcttacatttttatgaactggaagaaagccagtgtagcttcagcatatgatacaagagtggcagtggtgcaaatacctgacactgggtgatttataaagaaaagaggcttaactgactcacagttcagcatggctggggaggcatcaggaagcttacaatcatggtggaaggcacctcttcacggggtggcaggagagagaatgagaattgagtgaagggggaaaccttttataaaaccatcagatctcatgacaactcactcactatcatgagaactcactcagtatcatgagaacagtttgggggaaactgcctccttgattcaattatctccacctggtcctgcacttgacacgtggggattattacagttaaaggtgaaaatgggtggggacacagagacaaaccatatcagagagataggcaggagacagaccaagcagggccttgtagaactaggtgacactttagttagtaatagtgtaggaacagtggaaagccattcaagagagtgatcatatttgtgttttgaaaaggtcactgtgtctactctatggagaatctgctta

SEQ ID NO: 7084 - DNA, 230 bp, mus musculus
tatatacttagaaaaaagagaataacaatgtgttaacaaaatgttaacagggttgtctctggatggttgtattacatgtgatatttattttattttgtgctgtgtctgtgctttcctatattatactttctattgtttatgcttttttacattatgttttctctgttttacttacataataataaaaaagtgttattttatgaaataaaattataagaaattaaaatgta

SEQ ID NO: 7085 - DNA, 460 bp, mus musculus
aaatggtcttctatatttttatttttttcctttaagtccccttcaaaatgatcagatatgtctatttgacgagctgtatgtgtagataatagcaagagaggacttcttacatgcttttaaaacaatgatttttctataaagtaggtcttttataaataacaaagatgtgaaatttagttaataaatctaaagcaatgacccattaaatcaaggagtaaagaaatacaaagataattaagtagctttcattctaaattataaaaagcacattttaaacaaatcacaattaggttttcaaatgacaataagcagcaatttcacaacaggaagttagaggcctggcaggtagcagaaaaaatggagaaaaagtattgaggaaggggatccttctttattacaattttcacagctactggcctggtaattgctttaatttatttagcatttaattttggagaaa

SEQ ID NO: 7086 - DNA, 689 bp, mus musculus
aaatgtttccccaatttgtctttttatgttgcttttatatttttggcatatggaagttttaaaaatctatggtcaaatctattggtcttctcattgatttttttccattgcctttatactttaaaagtcctttcccattcaaagatttaaaaaaaaacaaaaactctatttatgtctttttgttatttcatatttttacacctcatttcccttttaaatagagtaattaggctggaagctcatagatgcactttagacacagtttacctggatttccagaagacatttgtgaaaatcttcaatatctgccatctcgctggctattttcctatgcttacaatgatgttcaatttgtccctattctgaatgcaaaaatatttttttaaaaaaaactttcttaaaatgctcttcttacttgaccttcatggcaaaattgtcctctctggattctcctgattcctcttttgaccattccttctgtttttgttttaccccttttttggcaccttaaaggctggtgttcccttaaattctgcctttagttagctacacagtctctctggtgatttcatccactatcataccttcaactatcatctacatgtggatgttcacagctcaaatttctcccatgagttctacatctttatatacaagtgtcctctggacatacccatctggttgtccta

SEQ ID NO: 7087 - DNA, 519 bp, mus musculus
tgaataacctgcatctgggcagtcagctagaggtgatgatgaaagggccttctgtttaaaatctgtatttgtaaggtccacttatggaactgctactaagatatacttctaggtattacttcccagcacatataaaagccatacttgcagtatatcgtagtggttagaggcccaagctttggcaataagtttgaattttaatcctggctccaccatttgttgactgtgaccttggtcaactcattttaccttgctaacctcagtttcctcatctataaatacagatagtaatagtatctacctcataaattcacctgcactttaaatgagatgttttatgcaaactaatcatccaatgtttggctgtttggcacacagtaagcaactaataaacagtagttatcagttatcatacagtctcccaattctgtcaaattattctaccttgtacattcagtaaaaggggcatagatggggcagagagcaagttgcagcccatcagcagcttcacagaaaatc

SEQ ID NO: 7088 - DNA, 1204 bp, mus musculus
cagaagtgacagaaaaatcattttagcagcatggaagttatgtaccttttttcgaatgagaagaaaacaatgacttgccagctgggaaaacatcctgttttggggtccaagagtttgcatattggtgcactggatttgggggaaagcctattaatttgtgtctgttgtctccgggctgaagccagaatggccatagaggaccaatgacctttcttccaaaagctgggagttgagagggttagggagagtgtcctgtgtcacaggagataccagctgggctgagcttggctgatctcttttagcaaagatcacaaaatgcagtgacatcagtagcaggccatatccacccagagacagcaacctaggcagcagtgatcaaattaagtcttgtacctactgatgggttagtaagaaaactaatagtcatagaggacagtgaggccagtttgaggcctgtgcagctctgcgtgttctctgcccggggaaatggtggaacttgagaaagcctcgctgtctggctgtgcagtttcatttgggagaacaggcaatcagttctggaagcctgactgaagagagtggacagaatgatagctcaaaatgagatccatcaatgactttgttgcagccccagccaaacaatcaaaagcaaatagtcagcttctaaaatcaatgcttcatgagatgatgagccagtggagttcacgtgggggtggggtgggaaggaggttatggagggaggatagaaaaattccctctttcaagccacccaccaaagcaagcagctgcatttccttgaaacagcagatttggttcctagcaaaatcagaactgcagtctcctagcagagcaaaacaaaggagcagggggcgagacaattttgaaaacaggaaggcgttttggcaacaatcacagaagggctggtaagccattgtgctcttgggatccatctgctgagctccagaacatcctccccccactccacccccattcagagctcagattgcatgcttagggtcaagaacagggtcattcaggaagaaacggtaaagtggaaaagacagactcagcctcaagatgtgaagcaagaaaagccaggcctgatttcttccatccatggaggatgcagtgaaagacacaggcaagcccttctcattcttggtgccgttgcaggggagcaaaagttggcttgattaaattaatggaa

SEQ ID NO: 7089 - DNA, 1876 bp, mus musculus
acttctcttcagctgatgggcgccatgcagttgttgaagtagaagatgtcccactagctgctaagctggttgacttgccttgtgttattgaaagcctgagaacgcttgataaaaaaaccttttataaaacagcagacatttctcaggtatggactagttttctttactagcctcacatccttcaaggaattcttttctcttcctatttttctttctttcagtactcctttccacttggtgaatggctgcttggcatttctaatttccagattgactgcacaggaatgaaatgtcatgttctcgtttggtgtttgatccttagctttcagtattgtattttgaccaaatagcctatagagagtcccatttgccacttatagtgacttttcattaattgaaacatatgagctgctgggatcttctgaactttgtattaaaacagtatgttgttaactctggaggtttaaattggttcttattcatcatctctgctgttgatttcttatttcctctctaaatcaaaatgctgagataggccagacacaatggctcatgcctataatccctacactttgggaggctgaggtgggaggatcacctgagcccaggagtttgagaccaacctgggcaacatagtgagacctcatctctacaaaaacaagattagccaggtgtggtggcacacacctgtagtcccagctattctagagattgaggtgggaggatcacttgagcccaggaggtcgagggtgcagtgagccatgatcacgtaccactgcactccagcctgtatgacagagcaagactttgtctaaaaacaaaacaaaaaacctaagctaagttccaagatctgtttccaatatattccctctgtagtggtaaacactctcgtggaaaaaaaaaaacaaaacaaagcaccttcagagttcatatgtagtgctgctggtggctggtggtggggaggagagggagagagagagactgcaaaaatgagagaatataaatgtacattacaaaatacttggttttctggaaatggcaagtatcagtctcttctgtgcatttctagtggtaagaatgattatgattgctaacccaaaattcgtggtcatagtcaacttctttgtctttgttaaatgtagatgcttgtgtgcactgctgatggtgatatccacctttctccagaagaaccagctgcctctactgatcctaatatagtcaggaaaaaagaaagggggagagaagaaaaatgtgtctggaagcatggcagtaagtcaccagccccttgctcattcctgctgactaaaatttatttgctgaatcctaattccttgtgaaacagggacgtcttaccacacttaggtgtttggttcattaggttctcagatactctttaagaggagtcacgtcagctgggcgcggtggctcacgcttgtaatcccagcactttgggaggccgaggcgggtggatcacctgaggtcaggagttcgagaccagcttggccaacatggtgaaactctgtctttactaaaaatacaaaaattagttgggtgtggtggcgggcacctgtaatcccagctactcgggaggctgaggcaggagaatcgcttgaacctaggaggaggtggttgcagtaagctgagctcgcaccactgcactccagcctgggcaacagagtgggactcgatctcaaaaaaaaaaaaaaaaaaggagtgatgtcatgaccctttggtttatagcatgatctttgtctttatcaaattcagctatgtgactaccatcagtcatataacgtttcactgtgttgtatttattttagttacgccaccacttaagaatgtcagaaagaaaaggttccggaaaacacaaaaaaag

SEQ ID NO: 7090 - DNA, 1876 bp, mus musculus; identical to SEQ ID NO: 7089

SEQ ID NO: 7091 - DNA, 894 bp, mus musculus
cactccagaccccactgttagagaggctttgtgtgccccggataacttaaatgcgagtattgaaagtcagggccagattaagatgtacatcaatgaagtgtgtcgggagactgtgtcacgttgctgcaactcatttctgcagcaggccggattaaatttgttaataagcatgacagttattaataacatgcttgccaagtccgcttcagacttgaagtttcctttgatatcagagggaagtggatgtgctaaggttcaggttttgaaaccgctgatgggtttgtctgaaaagccagtcttggcgggggagttagtcggtgcccagatgctcttctcattcatgtccctctttatcagaaatggaaacagagagattctcctggaaacccctgccccataaacggccctctcgaacacaatgggacggaatccacccacaacgcgcttggtttgcagatgtcaaagaatctgcagagggtgctactgaagatccagccttagccaatcaccacctcattgggtgaaagttccagggctcaatccaggaccacactcttattggccaggcaggggctcccacagagctttgagtaacttcttggttgtgcagtctgcaggcaatgttggcattgtaaattcctcccttgcagcctccttcatgtggtgaggggatcacttcagctgcctgctgtggacaaagaacatcaaattacagcatcacgagtgctattgttgcctgtggtggtctccctgtccaagcgggaccgctttgcagagaccagaggcatatcgcggcttgagctgaaaatgcatttgttgcagcttaggttgaattatttttcgtttgctctttcttctacacgcgcctgatggatagtgaacctattcatcaaa

SEQ ID NO: 7092 - DNA, 295 bp, mus musculus
agttttgtttatggttaattttgatatggcgggctttaaattgtaaatattggattgtatagatatttttctttctattgtatttcattccttttatgcttaaaaatgctttcctcatctgaagagtaaatacatattcacctgtgtgttgaagatgactgggctttcatctcttataatctttttaatgaatcatgtggtatgagcatgtatccctctttgtatgcatccttctaactatgtttcaattggttattgttaagcagtgtggtttataggttgccagccctttagc

SEQ ID NO: 7093 - DNA, 295 bp, mus musculus; identical to SEQ ID NO: 7092

SEQ ID NO: 7094 - DNA, 1090 bp, mus musculus
ttaaagagtacctgaagtgaagactaagctgtgactgtgttggagcacagcagggaaggccaaaatagaatgagttatgtgctctgagcttgtctggattctgggaaatgcagcagcagccacagtctgcaggtggtccccattcaggccaaatggtgttcatccctcctcagcatggtgggcacgatggaatcatagcttcctagagctagaagggacctcattcatggttctaccacagccctcgcccccaccatttagggagaaaaatgatgcaaatagaggcaaggagaggggtaggaggctgccacacctccagagcctccagggagtgaatgacagcataagtcttgcccagacccaagcctggtactgtctcccttcagcccaggtctggacccaccttccctgtccttgtacgtttccaacagcttgagttgctacctggcctttcctcagagccccttccttgttactctgagcatatacagtgtgtgtgtgtgtgtgtgtgtgtgtgtgtgtttgggccccagttaggatgaggccacaggcagaaacagaaaagaggaggctcctgtcattgcttttcctacttgggaatttcccctggggcaggggtaggggaggagcccatgagagtcacaggctggacagggcctgctgcagtcaacaggtccaggtctgagagcaggtactgccattagtgccattaggaaagaatgcagaggcagcagccacagagggaacgtctgggctggagagggcagaactcctcaagtccaggcagacagggcctgcaaagtgaaaccaaggggactcgcaaagaaggagggttctgttcctgccacagaagtgcagcctccccagcaacaggaatccctggagaagaaacccaccctgggctttctcagatcccccagagaaaggccacaccccctggatactgttgtcatggcagcagctgcccagtgctaactcccttctccctttcctgcatggctgtcctgcctgcgttctgatactttcagctcctgcttcctgaaaagatctgtgctgcccaccctggcagtatgcaaacgtggctggagcc

SEQ ID NO: 7095 - DNA, 1158 bp, mus musculus
tggtattccctctttttcttttatctgaaagtgtttgtataaaattgagattatctctttctagaaagcttggtagaactcaactataagacagtcttgacttagtatttcctcagcaggaagattttaaccactgcgttgaattttaagatagttataggatgattcaagattttaaaatttctttttatgttcttgtaagttacatttttctagccatttgtccatttctccaaagttttcaaaaacgtcggtttttggtgttgatggcattgttttattatctttttttaaatttatttattattattatactttaagttttagggtacatgtgcacaatgtgcaggttagttacatatgtatacatgtgccatgctggtgcgctgcacccactaactcgtcatctagcattaggtatatctcccaatgctatccctcccctctccccccaccccacaacagtccccagagtgtgatgttccccttcctgtgtccatgtgttctcattgttcagttcccacctatgagtgagaatatgcggtgtttggttttttgttcttgcgatagtttactgagaatgatgatttccaatttcatccatgtccctacaaaggacatgaactcatcatttttgatggctgcatggtattccatggtgtatatgtgccacattttcttaatccagtctatcaatgttggacatttgggttggttccaagtctttgctattgtgaataatgccacaataaacatacgtgtgcatgtgtctttatagcagcatgatttatagtcctttgggtattatattttaaaacactgttctgcttagttataccttcctttccattaaaacattatttgcatcttctctcttttctctctttattaatcttgccaaatatttgtcactttttttcccaaagaaacacctattgtttttatatctttgttttctatttcattagttttcagtcttatatttattatctttttctttctactttctttgggcttattctcttggggtcgttgttttaataactccttaaaatagacacataacttcttgggcttgcttcctctttattttgggtatttaaggctataaatttccttcaaaatactgcttttattacatcttagaagttttgttac

SEQ ID NO: 7096 - DNA, 480 bp, mus musculus
ttcaaccctcaaaataaccctatgtggtaggtactattacactcattttccagatgaagccaagactccaagaggttaatttactagaagtcacacagctagaaactgttgaaacagagactctagttcaaatctttttgaacctagaggcctttgctcttaatagccacactagtcattctcaaccctggctgcatatgagaatcaccagggagtttttaaaaaatagtgatagccaggcccaactctgcagagattctggttcaattgatctgggatgaggactaaacattggcagcttttaaaagctccccaggagattctaatatgccaccaggtttgagaactatttcattacatttttcagcctttgagagtacacctgggccttgtaaaagtttgcagtttagatggacaagagaaagaaggacattctgggtgggaattctgtttaagctttaaggtgatacacaactatct

SEQ ID NO: 7097 - DNA, 277 bp, mus musculus
agaaaaccttatttttctaatgatttttgagaaatagaacttatcaaagggcttgagatcttgtttgtttattcatttgttttccttccttgaatttgctacagtatcagttgctagttcttatgttttaacgtcagtcttattcaatgactgtagatcgattaattgatgttatatgtagcaaatcaattcaccttataaaatttcagacagtaaagcttgttttagtttccttatcattagatggtctctgaaatttacaaggaaagtattttga

SEQ ID NO: 7098 - DNA, 849 bp, mus musculus
actcaaaaagggtagctaggaggtagtatgtcaggtattgttctttcctttcaacagaaagtcaaaactggggctctgagattctgaatcatttattagaatccagtattctttctattacaagagtgactcctaacctgagttttctgcccacaccctatccctggggggcatctgtgaaggtaataatgagaatctatgagttattttcaatatttgaaagaagcctaacagagagcattaatttactcgtgataaattacacaacctgactaatatgtcaagtttctttgcttttgcctgaaattatatcaactcattttggtaatactggctatctcatgctgatgggaaactgattggcagctatatatgcctttgatgaatagaaatgaggaaaacgaattttatatcataaatgcagttgatctgggagatattcttttcagcttgggagaacatagagaaaaataaaatgctcctttgttgctgaaactattgagaagcactgtattttacaccatgctttctgattcaagggaaaagggggtttaaggggcttagaaagataggcagttgtggtcagagagaatttcagactttgagagcttatgggtaaattgttttcatataacatacctgattgaaaggaggatatgacgtgtttttcttctgtgagaaagagatgaggcaactgaggcctaaagagggataatgaatcagccaagttaaaaaagcagcttgtaacagaaccaatatttcaacccagtcttgtgactctgttccatagctctctctactctgaatcaaagaaatatagtcatcttgtcttgattttgccacaatgtc

SEQ ID NO: 7099 - DNA, 388 bp, mus musculus
catttccctgaattctaatgtggctgagcacttttgtatatatttattttattattttttttaatttagagacagagtatcaccatgttgcccaggctggtcttgaactcctgggctcaaggaactttcctcctgcctcagcctcccaagtgctgggattacaggcatgagccaccacgcctggcccacatatatttattagctatgtgtatttcctcttttgtaaggtatctcttcagtattttgcccattttcctaatggttgttcatctttttcttattgatttgtaggagttattcatgtattttagttttaagttctctgataattctttgtgtagcaaatatcttttcctatcctgtggggttttttttttttggtccatct

SEQ ID NO: 7100 - DNA, 388 bp, mus musculus; identical to SEQ ID NO: 7099

SEQ ID NO: 7101 - DNA, 317 bp, mus musculus
aaattgtacaatttaataagtttaggcaagtatgtacaagcatgaaagcatcaccacaatgaagataatgaacatgtccattatctgcaaaagttccctcatattcctttgtaataccttctctcactcttctctgccaccccccatccttggacaataacaaatctgttttctgtcactatagataaattttaatttgctagaattccatggaaatggaaacataaaatacatgtgcttttctacataattaaaaaataattatgctttttactcagcataattattttgatactcattcatgatgctgcctgtac

SEQ ID NO: 7102 - DNA, 317 bp, mus musculus; identical to SEQ ID NO: 7101

SEQ ID NO: 7103 - DNA, 271 bp, mus musculus
atattgagcagtttcatcaccccaaaaagttccgtttgtttttcttcccagtaaatctttccctatccctgtaccctgaaagccactgacctgctgtcactatgaatatttgtgtacaagtcattttgtacacataattttcatttctcttgggtgagtgcaaaggaatagaattgctgggctgcataaatatgtaatgtattgaaccttacaagaaacaaatatgtttgcaaaataataggaatattttacattctcaccagcagtttat

SEQ ID NO: 7104 - DNA, 164 bp, mus musculus
aggataaattgtatgaatgggatatggaatctgttatctttggaaagatatgctttctcttctctccccaaggattgctggcatttctcaaagtgcttattttccttgaggagtaatgttttcttttgcatgatgttcaacatataagtctttgtatcttacct

SEQ ID NO: 7105 - DNA, 1226 bp, mus musculus
tgtcaggatgggggaaagaaacttttagtttgggcactgccattttttttttttttttgccattctttcacaaccgatgatttccagaagcttcagaaataatgtgagtaacaaaccttttcctctgattgacaggcatttggaaacaccaccgtctgtgtcgggaaagcagaataactctccagtatctcgtcattagcttgctggaagcaggagggctatgttcctgggactcgggcgcttttctcgccttgttctctggtttgcggctttcaggaaactgctgggacaccatggccttgcatctgccaagttcctgtggtgcttgtgccttctgtctgtcatgtcccttccgcagcaggtgtggacactcccctacaagataggggtggtgggcccttgggcttgtgattcgctgttttcaaaggccctgcctgaggttgctgcgcgattagccattgagcgaatcaaccgggacccatcttttgacctgagttattcttttgaatacgtgattctcaatgaagactgccagacttcgagggctctctccagtttcatttcccaccaccagatggcctcaggatttattggacctaccaaccctggctactgcgaggcagcctcgctcctgggaaacagctgggacaaaggaattttctcttgggcttgtgtgaattatgaattagacaataaaattagctacccgaccttttctcggacactcccttctcccatccgggtgcttgtaactgtcatgaaatatttccagtgggctcatgctggagtcatttcctcagatgaagacatttgggtgcatacagccaatcgagtcgcaagtgctcttcggagccacggcttacctgtaggggtcgtcctgaccacaggacaagacagccaaagcatgcggaaagccctccagaggattcaccaggcagacagaattcgcagtgagtgctttctcccgctgaaatttaaacgtgacttcagggaaagagattacaatctccaaaaggtttcctaccctcacaccctagggtagcacatcccttcccatttctttacacatttgccctttttcactcacacacaggtcccaagactgccctgcttcaacagagcctattttatgaactgaataacagtacaaagaactctgtgcttcatatgcctgtgaatgctagtgcctgctcttagcgcctgagtgaagaatggtgtcaagagca

SEQ ID NO: 7106 - DNA, 10520 bp, mus musculus
agaaattatgtatcctggctgggcgtggtggtgggtgcctgtaatcccagcactttgggaggctgaggtggtcagaccacctgaggtcaggagttcaagaccagccttaccaacatggtgaaaccccttctctactaaaaatgcaaaaattagctgggtgtggtggcaggtgcctgtaatcccagctactcgagaggctgagggaggagaatcacttgaacttgggaggcggaggttgcagtgagatgagatcgcaccactgcacaccagcctgggcgacagagactccatctcaaaaaaaaaaaaaaaaaaaaagaaattatgtatcttttaaaggtaagataatctgtgaagccatctggtcttggtgccatttttcaatgggtaaacccttaatcacctttctgatgtgttctgtggtaatctattcaaatctttttgggtcaattttggtcgtttgtgttttgctgggaaattatccatttcttctaaattttcaaatttgttgccaaatatttagttgagcatgtagtatcctcttattttataatttaaaaatatctccttatctgtagtcatgtattttttcttggacttgatcttgtctgtttttgtgttctctcctctgtatattaatcaggttagtaagcacttatctgtttttggttgctacatagaaccatgttttcaatttatttattctttctaccttatttattttttctacttaattttcagcttttatcttcattaattccctcttctgtttttttcttaatctctcaagcacaaggacaagtatttattcctttatttattttttgtctttttttttttccaatttttcttctagatccaagggttacatgtgcaggtttgttacaagggtatgttgcacgatgctgaggtttgggacatgattgaacctgtcactcaggtagtgatgagcatagtactcaataggtagtttttcagcccttgtcatcctccttccctcccctctcttgtagtccccattgtttgttgtttttattttatttttattttttgacaggttctcactctggtgcccaggctggagtgcagtgttgagaacgtggctcactatagcctcgacctcttgggctcaagtgatcctcctgcctcagcctcccaagtagctgggactacaggcactagctgtgacacctagctaggtaattattttagtttttgtagagatggggtctttctgtgttgcccaggctggtctcaaactcctgggctcaagaaattctcccacttcagcgtcccaaagagctgggattacaggcatgagctactatgcctggcttgttttaactatctttatgtctatgtgtatctaatgtttagcttctactcacaagtgagaacatgtggtatttgattttctgtttctgtgttcgttagcttaggataatggcctcagctgcatccatgctgctgcaaagggcatgacttcattctttttatggctgcatactattccatggtatacatgtactatattttctttatccagtccaccattgatgggcatctagattgattccttgtctttactattgtgaatagtgctgcgatgaatatacgggtacttgtatctttttggtagaatgatttattttcctttgagtatatacccagtaatgggattgctgggttgagtggtagttctgcttttaattctttgagaactctccaacctgctttccacagtggatatgaactaatttacattcccatcaacagtatatatgcattcctttttctctacagcctcaccagcatctgttatttttcaaatttttaataatagccgttctgattggtgtgagatgatatgtcattttgttgttgttgttgttctttgagacagaatctcgctttgttgcccaggctggagtacagtggcctgatctcggctcactgtaaactcatcctcccgggtccaagtgattctcctgcgtcagcctcccaagtagctgggactacaggcacatgtccccatgcctggctcatttttgtatttttagtagagatggggttttaccatgttggccaggctggtcttgaactcctgacctcaggtgaactgcccacctcagcctcccaaagtggggggattacaggagtgagccaccacgcttgacctgattgtggtttgatttgcatttctctgttagtgataagagattttttcatgtgcttgttggctgcttgtatgccttcttttgcgaagtgtctgttcacgtcctttgcccactttttagtcaggttatttgttttttgcttgttgatttgtttaagtttcttatagatttgggttattagatctttgtcagatgcgtagtttgtgaatattttttcccattctgtatgttgtctgtttactctgctgataagtttcttttgctgtgcagaagctctttagtttaattaggtcccacttgtcaatttttgtttttgttttagttgcttttgaggacttagctataaattccttgccatggccaatgtcaagaaggtattttctgggttttcttctaggatttttacagtttgagagcttacatttaaatgtttaagtcatcttgagttaatttttgtatatcatgataggaaggagtgcagtttcattcttgtgcacgtgtatagccagttttctcagcaccatttatttaatagggagttctttccccattgtttacttctgttgactttgctgaacatcacatagttgtaggtgtatggctttatatctgtgttctctatcctattcctttagtctttgtatctgtttttgtaccactaccatgctgttttggttactgtagccttgtagtatagtttgaagtcaggtaatgcggtacctctgggtttgttctttttactcaggattgctttggctatttgggctgttttttggttatctatggattttagaatagttttttctaattctgtgaagaatgactttggtagtttgataggagtagcattgaatctgtagattgcttcgggtagtatggccatttgaacaatgttgattattctaatccatgagaatctaatacttttccatttgtttgtgttagctatgatttcttttagcagggttttttagttctcctcgtaaagatctttcatctccttggctggatgtattcctaggcattttatgtttttgtagctattgtaaaatgggattacattcttgatttgattctcagcttgaatgttattggtgtatagaaatgctactgatttttttatatgattttgtatcctgaaacttcactgaagttgtttatcagttctaggagccttttgttggagtctttagggttttctaggtatagaattatatcgtcagtgaagagaagatagtttgaattcttctttcctatttggatgccttttatttattcctcttgcctgatttctctggctaagccttccagtactatgttgaataggaatggtgagagcgggcatccttgtcttgttccagttctcaaggggaatgcttccagcttttgctcattcagtatgatgttggctgtggggttttcttagattactcttattattttgaggtatattctttcaatgtttagcttgttgaaggtttttatcatgaagggaagttggattatataaaaaacctttttatttgactattgagatgatcatatggtccttgttttaaattctgtttatgtgtcgaatcacatttattgatttgcatatgttgaaccaactttgcatcccagaaatgaagcctacttgattttggtgaattaactatttgatgtgctgctggattcagtttgctagtattttgttgaggatttttgcttctatgttcatcagggatattggcctgtagttttcttttttcactgtgtctttgacagattttgttatcaaggtgatgctggctttgtagcatgatttagggaggagtctctcctccttgatttttttttttttttttttgtaatagtaagattggtgccagctctttcttttttatccatctgatagaatttagctctgaatctatctggtccatggctttttttggttggtaggttttctttttttacaattactgattcaatttcagaacttgttatttgcccaaggttttagtttcttcctgattcattcttgggaggttgtgtgtttccaggaatctatccattttctctagattttctaatttgtgggcatagaagtgttcatagtagtctctgaggttctttcatatttctttgggatcagttgtaatgtcacatttgtcatctctgattgtggttatttgggtcttctctcttttttctttgttgatctagctatcaatttatagatcttgtttatcctttcaaataaccaacctttttttattgatccttggtatggatttttttgggtttcagtttcattcatttctgctctggttttagttatatcttttcttcttgctttggagttggttcttgttttctagttcctctagacacaacttcagcttgttaatttgagttctttctaacttcttgatgtaggcatttagcactataaattttcctcttgatactgtttttgctgcatcctatagattttcatatgttgtttctatgttttcattaatgtcgaagaattttttgatttctgccttaattgtatggtttatcccaaaatcgttcaggaacaagttgtttaatttccatgtaattgggtcttcttggtattgatttctatttttattccactgtggaacaagagtatgcttggaatgatttctagctttttgaatttattgagacttaactttatggccaaacatatgtttgatcttagagtatgttccgtgtgcagatgagaagagtgtttattctgtgattgttgggtggagtgttctgtagatgtctattaggtccaattggttaactgtcaaatttaagtccagaatttctttgttcattttctgacttgatgatctgtctaacaccatagtggagtattgaaatccccattattattgtgtggctatctaagtctttttgtaggtttcaaagtatgtgttttatgaatttgggtgctccaatgttgggtgcatatatattcaggatagttaagtctccttgttgaattgaagcctttaccattatgtaatactcttatttgtccttttttactgtttttggtttgtagtctttttatctggtataagaattatcgacccctgttcttttttgtttttcatttgcatgatagatttctctctatcccattactttgagcctgtgggtgtcatcacatgtgagatgcttctcttgaagacagcaggcagttaggtcttggttgtttttatccatcttgccactctgtgccctttcagtggacatttagactgtttacattcaacattaatattgatatatgaggttttgttcctttcatgatgttgttaattggttgctttgtagtctcgattgtgtagttgctttttggagtctatgggctgtgtactaaaatgtgtttttgtggtagcagatattattcttttgttcccatgtttagaactcccttaaggagctcttgtaaggctggtttagtggtaacgagttcccttagcatttgcttgtctagaaaagattttatttctccttctcttatgaagcttagtttggtgggatatgaaattcttgtttggaatttattttttctaaggatgctgaaaataggcccccagtctcttctggcttgaaaggattctgctgagaagtctgctgttagcctgacgggattccctttgtaagtgatctgacccttttgtctagctgcctttaagattttttctttttcattgtccttggaaagtctgatggctatgtgtcttgtggatggtcatcttgtatagtatcttgcaggagttctctgaatttctgtaatttgcatgttgtcttctctaacaagattggagaaattttcatgaactgtatcctcaaatatgttttccaagttgcccactgtgtttccttctctctcaggaatgccagtgagtcttaggtttggtcttattacataatcccatatatcttgaaacttttgctcatttttaaaaattcttttttctttattcttgtctgactgggttaatttgtaggaccattctttgaggtctgaatttctttcctcagcttggtctagtctgttgttaatgcttccagttgtatttgaaaacttgtgtagtgaagtttttcaattccaccagttctgtttggctctttcttaaaatgtctatgttgtcttttaactcttggatcattttactggctttcttcgattgagtttcaactttctctggagtctcattgagcttcttgccatccagattctgaattctgtgtatgtcctttcagacatttcaatctggttaggatccattgctgtggagctagtgtgatccctcggatcatcacattttaaaattaaactttaggttgggcgcagtggctcacaccttaatcccagcactttgggaggccgaggcaggtggatcacctgaggtcaggagttccagaccagcctggccaacatggtgaaaccccatctctactaaaaatacaaaaaattagctgggcatggtgatgggcacctgtaattccagctactcaggaggctgaggcaggagaattgcttgaacccaggaggcggaggttgcagtgagccgagattgtgccattgcactccaacctaggcaacaatagtgaaactttgtctcaaaaaataaaattaaattaaactttatactttgagataagtatataatatgaggagatttcaaaaagttcacagaaaatggaattaaagataaagataaaaattataaacttcatttctcaacagaagctccgtgaacgtcaatttaattcatccctaaagaatgcaatttaattcatccctgaagaactgagggtactgggaatgtaactgtcaatgtattcttttttacattattaactaaagataaatgagggcctttaagatatatatttttttaagtttaagaaacaaaaagaagtcagaaagagccatgtcaggactttgagatgattgcctaatgatttcccgtcgaaactctcagagaattgcccttgtttgatgagaggaatgagcaggagcattttcctggtcaagaagtattccccggtgaagctttcctgggcagtttttcactaaagctttggctgactttatcaaaacactgtcataataagtaggtgttattgtcctttgactctcgaaaaaatcaacaagcaaaatgtgttgagcatccccaaaacctgctgccatgacctttgctcttgaccagtccacttttgctttgaccggaccactttcattgcttggtagacattgctatgattgtactttgtcttcaggatcgtgttccatctcctgttataattctttgaagacatgcttcaggatctttatcccacctgtttaaaatttccattgaaagctctgtcctcatcttcagctgatctgggtgcaattttgaaacccatcatggggaaagtttgctcatctttaatttttcagtcagaattgtgtaagctgagccaattgagatgtctgtggtgttggctatcgtttctgctattaatcattggtcttcttcaattaagaaatgaacaagatacgaattgatgtaggtagtctgccactgcaggcttcatcatcaacatctcaccctttcttaaaatgatgacactctggggactgctgtggggtagggggaggggggagggatagcattaggagatatacctaatgctaaatgacgagttaatggttgcagcacaccagcatggcacatgcatacatatgtaactaacctacacattgtgtacatgtaccctaaaacttaaagtataataataattaaaaaaaatgagttatcctgtaaactgctgatttcttctgggcattgtctctgtaaactttttataaagcataaatgatttcaccatccttccacccaagcttcactataaatttgatgtttgttcttgcttcaattttagcagaattattgttgttctggtaggggctcttttcaaactggtgtcttatccttcttagtgcctcaaactagatcctgttcagacatgttagaataagttagcacgagtttattttggtgctgaaaatttgaaatccatgcatagttttttgtaataatatgtatttcccattaacttattgaagacctgttgtctattaagtataataatgtagaaaaaataatataggaaaaaacacaaagaaatcccatgtaccttttacctaatttcctccactggtaacctctggcaaaactatagtacagtatcactgccaggatattttcattgatacggtctgataaagcagaacagtcctgtcaccatgcagatctcttctgtcattcttttatagccatacccaccatctacatatctaaaccccatccctgatccctggcaaccatgaatctattcttcatatctataattttgctattttaggaatcttgtgtaaatatagttataccttatattacctttgaggctgactttttaaaaatcacctagcataattccctggagagttatccaactttttataatacacaacatttttttctgttttcgagaccacgttttgctctgttgcccaggctggagtgcagtggtgcattcacggctcactgcagccttggcctgcttgacttaagtgatccttccacatcagcctctcaagtagctgggaccacaggtgtgcaccactatgcctagctaataattttttttttttttttttttttttttttgtagagacggagtctcattatgttgttcacactggtctgaaacttctggcctcaagtgatgctcctgcctcggcctcctaaagtgctgagattacaggaatgagccaacacggtggctgatacacaccatctttaatgggtgcatattattccattgtgtggaaataccatgttgagttaaaaatcagtattttaaaaagtagagagcccttaaaatactttaactttacattagtattgttctttactgtttaaaagttctttgctttaaattttctcatctaatctttaaaatagtattgggggatagcgaatacattatccatactataaatagagcagtaggggaccaagaaatattatataacttggctaagattacttcgtggcagagtcaggattcctattctttcttctcttgccagtgatcataacataatcaggtttactgtgtgcctaggcatggtgggaaacacttaacattgattattttatttaatccttctaacaaaactgtgtgggaagtactaatagtagtactggtactattaatagtagtttggtcaagagaactggggctcagaaagtttacatgactggatgtggcttgcatgtggtacatgcaggatttgatccaaagtttctctcactccagagcccatgctgctaatcatgaccttgtgttgctgaagtgaatattttctactatcccattgttgtttaaattgttaaaagtatgaaagcatcttatttaaaattccctatgtctcagtatacatggatgagctctgttgtgatctttatgcccgtgtgttctttgggtttgttgactagcatcatatacctatctctcttgctttctctatgggccctttgctgtgccagccacacatgagtttaccagcttcccagctaaccaggggccagcatgttcttcctggaggcatgcccagccactataggaaaggggtatgacgtgtgcagcaggctgcatgtcctgtgcttggcaaaggctggcaactcccactggggtggagaagggacaggattctccacatggttcccatggtacacttgacaagagggaatgatagtaccacagtgttatgtctgggtcctggaatgcttcatttatatgtacctcagttgacatgtgacttgctcagtcctgctgctatagcctgctgctggaagggctgcctcagtggaaagcatgcatccagggtgtggagccaaaattagaagggccaaaattctacctggcccactaccacagcaaccttgggcatcgttttcttttgatctctagtatctccaactcctagaattccagcctggcagtcttctgcctctgaaggcctcttatccttcctgttcttggctcctcttctctgtgaatgcttacatagcagcgtcagagttgtttgttgtattgtgtctgtacatgcagtgctgttctgtatctctttgaatctgagccattttcttttgactcatttggctgatgtgaatggtactttcctgaagagctatctaccagtgccgttgacatccaagccacagaattcttttcctcacttcggtttgaataaaaccaacatatcct

SEQ ID NO: 7107 - DNA, 10520 bp, mus musculus; identical to SEQ ID NO: 7106

SEQ ID NO: 7108 - DNA, 10520 bp, mus musculus; identical to SEQ ID NO: 7106

SEQ ID NO: 7109 - DNA, 973 bp, mus musculus
taccctaacagcacactccaactctgttgaaactgccagatctatgggatggtttctcggttaattatcataaaaacaggagagtgcattttgtgactgaggtacacacatgtaagaaataaacaccaaggacatctcgatgttaaagcagctaacaagtcattgttatgggccattaaaaatcaacagccaaacctgtgtcaattccaaactctgaggaggctgatcacctgaccactacaatcatcaggatagaattttaaaataagattgtaaattgttcactaaaacactgttagtggggaggagaaaatagagtttcaatgtgggaaaagcaaagggacttacatatttttataatatttgaaaagccattaattactgccttcactttccttttttgaaaattgcatcagggtttttgggaggtaacttccttccctccagaagagaaacccctaaaaacgatcctcacacaaaacctgagaaaacatgagagcaatgcttttgtttctaagatgttagaatccacatatttattaggtttttagacctcttctccctcaactccttttttttccctccttttctttaggagctgtgaaattagttgtaactgaaaatgtctgacggtctggataatgaagagaaacccccggctcctccactgaggatgaatagtaacaaccgggattcttcagcactcaaccacagctccaaaccacttcccatggcccctgaagagaagaataagaaagccaggcttcgctctatcttcccaggaggaggggataaaagtaaagtatcagtggccgggcattgaaaatgggctagtttattctttcattttcactttctttcttaggtagttgtttcttgaggattgactgttcagggcctgccggccctttacatctacgtcttcagaggttgcattttgtcagagaataatgtttgattgatttactgtggg

SEQ ID NO: 7110 - DNA, 973 bp, mus musculus; identical to SEQ ID NO: 7109

SEQ ID NO: 7111 - DNA, 973 bp, mus musculus; identical to SEQ ID NO: 7109

SEQ ID NO: 7112 - DNA, 431 bp, mus musculus
tcagcccagacatctatatttaccagttacctggagggacagaaattttccctgtgacctctttcccaagtgttcacttgaatcacagggacttggatgggaaggggaaatagaaggtccctattaggtctgtagcctcctagatgtgctgtgtgaatcatagaggaagtcaataaggaggcaaatgaagaatattaacttgagcaggatggtgagaggaaggcagagtgcctgcaacagtcgctgaacctgttcactgtttactgggatagaagttggggggtgatgtggggcaagatgaaagtcagagctgagacaacatgcaagtgcttccagtacctatgttccagctaccttaaatcatggttttttttgatctgttgaaatggggtggtcggggatggggtgaaagagatttgcaaaatttgggc

SEQ ID NO: 7113 - DNA, 377 bp, mus musculus
tgctatccttcttgtattttataacaatgattccctttccctctgcttctctctctttcattctctttctctgatctctctccttttcttcctattcttctcagttttgttgctaatgggtctggatttggctatccaggctaatccatcggatattccctctttctaggaaaaagaggggtgaggtggtttgtgtgaaatttggctcattacctctggccagtgaaataccataaacacaagacctataaactatgcacctttaattaactcttggctattttcatgatttcccttatttggcgggttctaggttgctttgaatagctgaggttactagacatctgaatctgaaaaatcatagctctatgttattt

SEQ ID NO: 7114 - DNA, 193 bp, mus musculus
aatgtgtgacaatccaggattcaaatacaagtaggatttggaatggaatcatttataaaaggtgacaaaagtgccaaaattaatcagggaccctttggatattccagtgaatatggcacactgactagcccccaggattgttccagtctcttttgcaagagtgtcaatatagtgaggagaggtttccatagct

SEQ ID NO: 7115 - DNA, 466 bp, mus musculus
aattatttgaatcaccttttctttaatacttgggacacatttttaatgactatttaaaatctttctctacttaatccaacatatggaccactttacaattgtttattactgattgctttttgcttcacgatgggtcatatttttctgttccattgtctagtatttttaatagtatattgaccttttgactcacatgttgtaatgattttggattcttctatcttcctctgaagagtgttgatttttttttttttaatccagtaagcagttcaattactgtctaattaccaggaatttggataggcttggtattttcattgtgttaagacagatttgtgaaaaatctgaagtgttctcaaagcccccaaaacatgaaaaaattcaacctccaaactcttctcacctaggattttctaaggccgtggttgtaggcttacttaatgtgactctgtgttaagtcttactc

SEQ ID NO: 7116 - DNA, 612 bp, mus musculus
ttgccagggagtgctttgtatatacttacttgtctatcgatcctcataacaaccttgtaaagtaggtactattattcttccattttatagatgagggaaaatagtacatacctactatatgattgttgtaggaataaataaagtcatacatgtaaagtggcaggcacatacctgacattcatttattcatttaataagcatttaaggagcaattactctgtgccagaaactctccatgccagtaatactatagcattgggcactcaataagtgttaatctctttactacacctctactccttcaaaaactaaaataataaagaacattcaaaatgtaggacgccaaggaaaaaattagtaaatgtcctgataactgtgggtaaagacattatctgacatattgcatgaattttttgattcagtctatactagaggatattttacattgattaccactgcaatgcagtccctgaaatgacacattggtaactggttgaattacagccagcagtcagaattatccaagccaaacttatgaaatgtatgttggtaagtcaccaactatatgacatataccaaagattatacaaggagaacagagggaaagtaggg

SEQ ID NO: 7117 - DNA, 251 bp, mus musculus
agaagtctcattcaaagcattttcatcaggcttagttttttagtttttttgcaaacttctaaactagcttcctaaattaatattacactaataggcatataacactgatgctgagcccccagtcccacaatggaaagttttccatttcctcaacagatttgcatctcctttctgtgattattgaggattgtaaatacacacaactttttacctctgccataatttgctctttattattcaccattgtttct

SEQ ID NO: 7118 - DNA, 238 bp, mus musculus
aattaatattacactaataggcatataacactgatgctgagcccccagtcccacaatggaaagttttccatttcctcaacagatttgcatctcctttctgtgattattgaggattgtaaatacacacaactttttacctctgccataatttgctctttattattcaccattgtttctaccataggagtcaacattctataaaatactgattatttctcaccaatttcaatgttttaat

SEQ ID NO: 7119 - DNA, 171 bp, mus musculus
ccaggattagtttgaggataaagtcttgagcatgaaaaggattgagtggggcacaactggaaactactagtgctgttattaaatacaaacctcataaagcaatacgacagcttatattgctaaaccaaattgcaaatcaacaagaaaagatagccatcggatatgctaaca

SEQ ID NO: 7120 - DNA, 1320 bp, mus musculus
aaggccttgagtgactgaactgctcatcacattagtcccaatggaagtgaatgggcagtggcaaatattaggaaagtgcaggcagggcttttctgattgcctactgatttcctcccttgagagggacaggcattttgttttcttttctttttcttttcttttttttttttttttgagatggagtctcgctctgtcgcccaggctggagtgcagtggcaagatctcggctcactgcaagctccgcctcctgaattcacgccattctcctgtctcagcctcccaagtagctgggaattcaggtgcccaccaccacgcctggctatttttttgtgtgtttttagttgagagatggggtttcactgtgttagccaggatggtctcgatctcctgacctcatgatctgcccgcatcggcctcccaaagtgctgggattacaggcgtgagccaccgcgccgggacaggcattttcttggttgcccacaagcctgactgaaagaccactgggctgtcttgaagaaagacagtgcttgagggcagggggtgttggttacacactctagccctcagccttgggctgcccccatcccaagtccctttccagtcaacagtggatgaagaacaaaatggattccaaggacagacctcaggggcaccaagctctggatggtgcatctcttgggaggaataagtgggttaaaaatagaactggactggggcgagcactcttgggaatgcctctgggcccctcctctccctcttggtgtgttcactacaggctctctgctccccaaggcagctgctgcaaggcaagaagggagccaggggtggttagttagatctacctcaatctgagctaaaggtgtcctcgggttaccccacgagatcccgcccagctcaccacgatcaacctttgtcaagggttttctgatcctaactagtactaaagagtgtgcccttgactgctgtgtcttctgtgtagtgtgtatgtcagggcggtttgctcagaggtggcagcttaaatctgtatcttccctccatcccactgaagttcaatctcattcattactggagggcccttcctcttccgaccagttacccaaggattaggggcacctctgtggggtcttcagtacatcgtgattgttcctgctaccctcactgtccacatggtttcttgaagatgggactgctccagggcaggctgctccagggatggtggggcatgagaggtcaggtgaggaagatgcttcttctacctaggcttggcgctctgatgtctgggatccagcctcctgtgtaccactaagccatttccctgag

SEQ ID NO: 7121 - DNA, 205 bp, mus musculus
acataaattgagcaagctcctgaggtttccaacttattgtacataatatccagagttgttttttttaagataaagcattgttcttggttttattatttgtataaaaatttcccatttattttatacctaaatagtagataaggttactacaggattaaagagtttgactctgaattaatggggcatacactttggggtaaggatt

SEQ ID NO: 7122 - DNA, 205 bp, mus musculus; identical to SEQ ID NO: 7121

SEQ ID NO: 7123 - DNA, 110 bp, mus musculus
aagtggagtggtacaatgagaagttcattgcttcagaaagactgaaaagtagactttgatggtcaagctccttcccttatatccacgaaatggtcaacagctccccaaga

SEQ ID NO: 7124 - DNA, 178 bp, mus musculus
tcccagtaatttttgttttaacaagctctctaggagattctgatcatgctgaagtttgaaaaccactgctctagaagttcaggaaatgagggattattgtttattgaagagtagtgaaagacttcatggagaaggtgagatgagctaaacactagagtaagatggacttttgaaaagg

SEQ ID NO: 7125 - DNA, 764 bp, mus musculus
ttaatgcaaaagcatccatgaacaaacatatcagaagagttgctcttaatctttgatttaaaagtgttttcgctttaagatgagaaagactatcagtttcaaaggttctctagattttgagcatttgaagtcaaatctatggataaaagtggaatttgtgatttgaattgtatttttttcacctctatgaatgacatcatacagatatagcctttatattatttctggaagtatgattcatattctggagtcttatagtgaaatacatttgtaacaaacattgtaacaaaatgcatttttggtaaaacaaaaatataagaaaactcttttgggcattacagacttaatatgatacttggtattgaatacctgctaggaaatagagtaccttttcaattctcaaagaaatgtcacatgctatttagtctacatttagtgcttctcatttctggcagaagtttatcatccttaaatccagggagttacataacaaaatttaaaaactgtacttcacagattcctagtgaatccttatgagtatctcattcacttatttatttattcaaaaatatatcttgaatgtctactatgtaccagacactatgctaagtgctttgtagaaatgaacaagaggaggaggagagaacgttggatcataaggagaaaaggttggctctctgccactgcttcaacctgaggtcttctttcactgttgtgtattttgaacttttgtaaaagattttcatgggtaaaacatgcaaaat

SEQ ID NO: 7126 - DNA, 285 bp, mus musculus
ttaaaaaaataagtaaaattaaaaaaaatcttgttttaacaacaaaaaaaaaacaccaaatacattcaaatatccttaaaagaataaataaaatgaaaaacaagcgagattactagaagagtacttagtgactcattggacatagaaggattggactgagtcaatgataaatgggataatgatagtgacactagcaaaaaaagtgaagtcaaaaagaaatgacccttaaatatatgaagatatatttatcacatataattaaagaaatgcaaattaataatacac

SEQ ID NO: 7127 - DNA, 290 bp, mus musculus
taagactttgctgggtacaagaattgttcagttgaggtattcaacattggacagtgactaatgaatcagtcaaatactcaaatactttgttttgtgtagcttgcatatgagtcatataccttagaacttcctaccattcactggcatgtctgtgtgcctcttctcatcatccccttaacttggaataccttttaatcttcctccccattggtaaatttttaaacctttaaggcttatttcaaaatgttatctcctctgtgaaggctttcctgaactttcaggtagatttg

SEQ ID NO: 7128 - DNA, 785 bp, mus musculus
tcaaagaaataattcctcttcctgcccaagaggatcactccacaatcttcctcccatttccaaccctgagtacatgtctggactccagatctgtatgactaaaacaagttcgtgttcttttcattagagtggtgtctttcaaacttttttgaccacagccttcagtaagaaatatatttgacatcattatccaatgcaaacacaacacacactctacatagacagatatagatgataaataggcagataagtagatggatgatagatagatagataatttatatgtctatatgtggacctataaaatatgaccacataactgacataaaagttttataaggtaatactaccattaatgtgggcactgtactctagtattttctactgtaccctgtttcactttaaaaataagaaaaacaagagaaaaaagaggtaggtcttttcctactaaattattttacatctcatcattgggctaggacccacagtttgaaaaacagttcactatagtatagtccaccattctcccttccagatacagttggacagaacgtaggatgaaaaagagatgtcagcctgagtttaagcattagccattggaattttcaaagtagaaaactacaggattgcatttgcacactctgcctctgaattgtttttctctatattatactctaaatggctttttaaacactaccccaaatacttggaaaaaaaacttgctgattttgttttgttatacctacagtattcaacttgtattctgacaccattctggactgcag

SEQ ID NO: 7129 - DNA, 953 bp, mus musculus
acacatatttgcactccatgctgtcaacatttgatattgctgaattttgttttattccaaagaaaaaaacatggggatacatttgataatttcaataaatgctgcatcaccagataaacattaaacttggagtacttctacatgaaataatataaatgtaataataatattagagatttatttctgtaaccagctaaggagatgaagtttgaaatattgagaaaggaactgtgagtagcaatagcatcctagacacaccgtaatttaaatctcctttcccaaagacagtttctccctgaggctgggaaaaaatgaagatggtggcatggatagcaatcaagtcactgtagccttatgacccctttcaaaataaagcaaagtggaatggggaagaaggagattcaggggagaaaatatttgtggtctttgactatatgagtctgaaataacttaatctggctacctaaacatatgtctagttcctcccttgaatattcaataggtacttgaaacctcagtgtctaaagtggatgccaccataaggggtcaactgaatatataggtgtggtgttgctccagatgttagtgatacctgattttctgccaggagaaaccagcagaactttaagaattcacctagctacaaaaagcacagtttctttcaatgtagtttacagcaaataatttatttaacctcacagttggagataaccattttatctatacagcacgtgtagtagttgatttgcctgaaccttcctaagctccttctcagagcttgttctcacagtccctgatgaggctgattgctctcccaaccaccataattgattaaacctagcatggaaaattgaccaataaccaattgacaaataacaggttcaagaccaagctgtgccttttatttgctgtatgacattgagcaagctgcttaagcttctctgaacttcact

SEQ ID NO: 7130 - DNA, 1306 bp, mus musculus
ccagagccggcaacaactgggtgaaggggcactacacggagggcacagagctggtaggcactgtcctggacgtggtccagaaggaggcctagaactgcgactgccttcaaggcttccagctgacgcacttgctggggggtggcacggggtccgggatgggcacactgctcatcagtaagatccgtgaggagttcccagaccgcatcatgaacaccttcagcatggtgccctcgcccaaagtgtcagatacggtgtggagccctacaatgccacactgtctgtgcaccagctggtggagaatacgaatgagacctactgcatcaacaatggggcactctatgacatctgcttccgcaccctcaagctgaccacctccacctacggggacctcaaccacctggtgtcagccaccatgagcagagtcaccacctgcctgtgcttcctgggccagctgaacaccaacctgcacaagctggccgtcaacatggtcccctttccttgcccgcacttcttcatgcctggcttcgcacccctgaccagccggggcagccagcagtaccaggccctgagggtgcctgagctcacacagcagatgttcgatgccaagaacatgatggccatgtgcaacccgcgacatggccgctacctgaccatggccaccgtgttccgggccgcatgtccatgaaggaggtggacaagcagatgctgagcctgcagagcaagaacagcagctacttcgtgcagtggatccccaacaacatgaagacggccgtgtgcgacatctcgccccacggcctgaagatagccgcaactttcatcagcaacaacacagacttccaggagctgttcaagtgcatctctgcgcagttcacggccatgttgtggtgcaaggcgttcctgcactggtacacaggcgagggcatggacgagatggagttcaccgagactgacagcaacatgaatgacctggtatctgagtaccagcagtaccaggatgccacagccgaggagggcgagttcaagcaggaggccgaggaggaggtggcctaggctgctcccatcgcttcctgtctgtcccctcgaggcttctgacctttgaccccctaggccctccatctctgacccctagacccccgctttccctccaagcctgactcatccctgaccctaagacttcaccctgaccctaacaataccttcggagctcgctttacctctggctacttcatctccgaccctggctccccattgacccttgagccctaatttatctttgacccccttgagctcttccaaccttgacatt

SEQ ID NO: 7131 - DNA, 1080 bp, mus musculus
ataacagttgttttctgccagaattgccaaaatacactgaagtttgatattaaatatgtttaagtatttattaatgttaacatcagaaacaggcagagtttgtgttggcacagaaaagaaagtgtcactactctcattctcttgtgttgagattctcttattagaattatttatagtataaaattggtaaagaagggctccatgtaatggagctaatttaatgttctagtaagagaatctacttataacctagtctgtacaaaacaaaaagaatctcaagtgtttgggtgctttctagtcaggcactctgtttggaaagaacttgagttcgtcttcatcccatactcaatactaaattgctaattaagattttgtactttcattcatcatcagaccttttctaccgagattcatagagtgttatggtaagaattggcctttaaacattatctcggtctttttggtggaaacgttctaaccacccaaactctgacttgaaccaaaaaaggagaaccctgaagcatgcgggaaggggagaggacaagggattagtagtgtggtagttactgtgaatggacaggtaagaaattgggtgcacgagtcctctttgttttcattacttgggattccaaacactacttgataattcattataaagaggctgcaatcagatacttgtttctggatctgcaaatacacagtttcttcagctcaaaacaatacatgagttctatgacttttgttcatagaacttataagagatttaacttacaagtaagagctctttgtaatatttcagctcattacatctggctttgatatcagttcttaatagcttattatagtattctaaaatattacttaatgggcataagtgctagaattttaattgaacaacctaacttttagtatatatactaagagtcacatgccattcttgtttagtgaacaagggagagttgctccattcatcatctgcttttacttttagacaagtaattattagattttacctaacattcctttctcagttggagtatatagaaagcatcaatgtaagtcattttgcccagattttac

SEQ ID NO: 7132 - DNA, 1080 bp, mus musculus; identical to SEQ ID NO: 7131

SEQ ID NO: 7133 - DNA, 719 bp, mus musculus
ccatggcgatgaattttggggaccatgccagcggcttccgccacaatgatgtgatcaggttcattaacaatgaagtcctcatggacggcagcggcccagccttttacgtggccttccgctcgcggccgtggaacgaggtagaggacagccttcaggccattgtggccgactctcaggtgccgcgcgccatcaagagggcctgtacctggagcgctttggctttgagcgtgcgagtggccacgaggcagcgggaggagctgctgcaccacgttcggcggctgcaaaggcatgcggaggagcgccaggcgacctcctgggctctaacgtcccagctgcagcagctgcgcctggagcatgaggtggcggcaacacagctgcacctcgcgcaggctgccctgcagcaggcgctgaatgagcgtgatgggctgtacgggaggctgctccagatcgagaggtttccccaggccgctccactggcccatgaaataatgtctgggccgcaagcagagcagaatggggctgcggcatgtcccctggctacagagcagcagagcgatatggtggccatggggacacatgctaatgcccagatgccaaccccgacagatgttctttatgtgccaggacctctgagtccctgggcccagggcatgcaaccccctctgccagtgccacatccattcccacacccaccaccattcccaatgaaattcccatcc

SEQ ID NO: 7134 - DNA, 352 bp, mus musculus
cccactactggtaatgttaactttgatcatttaattaatatggtatcttccaggcttctccactgtactcatcccatatgcacttgtaattaagaagtgttttgtgaggaggtactttgaagctatgtattgctcatcaaactttcaatttattaattcatttattcatacctgtgataactcaggatttttcatattattcaatgaattatagtttcttgctatttctgtttattttgatgctcaaattgttttgtaaacagtgactgactgccacttcaaggtggactttgcatgtttttgacatgtcctcatctttctctgagcactttttgtcttaataggatattcc

SEQ ID NO: 7135 - DNA, 470 bp, mus musculus
agatcccaattgttttatcctttggggcacagtgccatttcagttaggcatcatcacgtgacttgctctggcctatgaaatgtgagcagatggtatgtgtagcatttctgagtggaagcttttaagagccattgcacaaatctccattttcttttagcctgccttggaaggccctaaaagcttcatgctgagatgacagtgtcctaagttgtgttcagagcaccaccttctgaactgcattgcacatgtagcatgaatgaaaaataagcatctgttgtttccacccactattatcttgtggggaggtgggtcatctgcaacctaatctaacctatactgactagtccaagtgtcccatcaagccactgctgtagtggaaagagtctgaagctaagagtcaagagtcctagatctagttccagcactgctactgagtaacccgtgactttagtcaaatccctcatttcttt

SEQ ID NO: 7136 - DNA, 140 bp, mus musculus
gtgaagcatgaaacccagaacccataaaggaaaaaaaaatgacagatttgataatgtaaaaattgaatgcccataaacaacagtaaggggggatgggaaaacaataggttgggagataatatctggtacatacaaaatgc

SEQ ID NO: 7137 - DNA, 357 bp, mus musculus
cactgcatcctctaagacaggaagtaaattacaaaatatagtggtgagaagttaaagtagtttatgacttgatggtctcacccaagaaaaatgagagacagggttatgtgctgaaagtgtgaatcaagtcaaaggcttcagatgagtagtgaggtaagtttttgacgaggccaaaacagaattgcacatgcctatctagagctcaggtgaggtggaactgtagatggagatgtgggaacattaatgacaataaatattgttgaccactatgtgccaagtactctgctaactgagcttgcatatattttttatttagtccttatttgcaaccctgtgatgtaaagataattatcatgg

SEQ ID NO: 7138 - DNA, 1300 bp, mus musculus
acaccacagggcctttgtacatgcttctctttttcctagaacactgtccctcctcctttgcttagtttactaatcataatttcctcagggaagtaggttctgaccttcctaactatgtcaaatcctcatattatatgcttttatatagcgctgtatcttcccttccatgtacgtaccacaggtataataatacagtttatatgtgtaattattttaatactgtctgtctttaccactagactgtaagttccatcatggcaggaatcttgtctattgtattctactgcctcaatacccagcccagtgccttgttcttagttcaataaatattaatttaataaatgaatgcatgaatttccagaagttcacacagttagaatccaagtttcctgagtcctagcatagaatttttcaaggcacaatgctgctcctatttaggccaacaacacaggattgggacatttagcatttttctatttgttggctacaaactaagcccctaacttctgccagatgctacacgtatgcatcgaatttttcaccaaggggagtatatgaatgcatcagcaattcagtcccactactacaataataaatcatatgccttgaagaaggtgagtacagattgttgttattatcatcaaagtagtatgtatgttaattttaaaaggaaatatttgagcactaaccatagaaggaaaacatgtagtgctgttataagcatatttaagttccttttgaaaaaaagtttcccaatactttcaatttgctgacctgggtttctgaattttatttttctttaaaatacctacagttttcatagaaacatcacaaataacctttcatagactaagttgttactcatttggaaggaaaaaaaaccaaagagaacactattctttcttgaaaaaatccaagttgaaatatgtgcactttatactttttaagctaagtgaaataataaagaaaatttatgaaatgctcttctggaaaatctacttatggaaggtttttattttaaaccaataagtggacttttaatagtgaaatctgagaattgtgcatattctttagaaaatccaagttataatcctgaagtactataatcatctaataggtgcctgatctttcaaattctttaatccttcttcacattaactttctgacctagctttttgcaaacactcctaagtccctgaaaatattttcatgacacaaaaccgtaattaattgaggttgccctatgttagcaactaacttacagatgtagttgggttctgagtggttcataggaaaacgt

SEQ ID NO: 7139 - DNA, 302 bp, mus musculus
tgatggtacctaccgatttagattactatgaagattaaatgagtatgctagttactgctaatgctacactaataactgtattgcccttttctcctcctcctgaacacacaggttgactgcatttctcagctattaggtatagccatgtgactaaattcttgctaatgaaaaacggtcacgtggcactgctaagcatggcccatgaaaacctcccatgtgctatccttattttcttttcccattcaccggctaaatagaaagaacttctagaactcagaggaggccacagccacaagacggaa

SEQ ID NO: 7140 - DNA, 283 bp, mus musculus
aagtttatgagtatgcacaaatacactgcactcgacactgaaaaaatgagattgacagcaatcattagtcacatatactcacagcccagggaaggaggacactgcacaccacagagtcacacaggggttgtgctcaagaatagagtgaacaaccatgggttgtggaaatcaggttttgcagtattaagagggaggatcctcccacaggatgatgttcttggcttatttgaaaaactgcaggctgacagagaaccaaaacacactactcagggatcagaggaac

SEQ ID NO: 7141 - DNA, 223 bp, mus musculus
aaagtgttttgaaagcactttgagaactaaacaaactaaatgtgaaatacaattcttttatattatcccttgcccactactctctcttacttttaataaacaaacattaatatttctgttaattcttcagaagtattaaagatagagaaaaataaatcccttgaactctaaattcctgtggcatttccacctcaatctcactttcattctgatcttagataaa

SEQ ID NO: 7142 - DNA, 653 bp, mus musculus
acacagagccttcctttgtgaacataacacatgattttgaaccagcttgatagtttgaagggtgaagtttgtaatactggaactggaatttcttttaatgtgaaagcaaaccagctcacacagagaacaagtgcagaatcttggtttatttgacactatgctggagaaagttgagttaactgtttcagaccatgatgatcagggaccaaaaaatcatcttgtaggcttttgtttatgtgtttgtattttaaaaaataaactgtttttctaggtatgccttaccaatattctatagctttttttgcattttaatattttaaatgacatgacatcttttataaattataaaatacttatatgtgcctttctaattattaaatcagtctttcacacttcacacaatcatgcaacttcagaattatcaattgaatttcaatgataaaccgtgtttaagatacgcaataatacacttactcacaaacaaaacccagtgtcttagtttttttacctggtaaaattggctagtggagaactaatataatttcctcacaagtgttctaatgcatccaactctagccaaatgttttgtccgcattgtgacctattgtgcttaaaggggtaataaatatgaaataatacagtgcccaaagttg

SEQ ID NO: 7143 - DNA, 1738 bp, mus musculus
tgccttattaggactgtgtgtttgctgatcttggcactagggctctgaacagaaaaaacttttaaggccaactttttttaaaaaacacgcactcattgcatgtactagtggcctcaatcagggtagatgatctttttaaatcaagttagatttgaaaacagaaatctaggaaaaaaccatggacttgttctttgttcttgtattattgcaactattaattagtttcagtcttaagctgttaaacaaccaagtaacacagcatctgtggccagagggagattacaatgaactttgtgtttagagaagctttgtttgttggttctcacttttgggccacaagctccttgagtctaggggctatgtcttctttgcctttgtatcatccacagcctcttacagagtacctagcttggtctcatgaactgcaggcattaaagttgtcatgttaatcaataaagaagtacttgcattgtcaggaataaaagctagtaaaaatttggctattacatactgtgtgagattttagtgaatacataagaactgtttgtaattaacatgttagatgttcaaaagcatactgacatacctaagaacctttggaaatcttcttgactattttaaacaaactcgaataatccagtttatataatttacttaggaaatatttttctacacaggtagttaaaaaggtaatcttctctctaacctatgtgtgggttattaataactcagaggtgtagagctagtgagactctacacatatttgataccaaaacatccatgctaagagaaggtagtgatgatgagataatactgacgcaaacaaaaatggttactatgaggatttcaaaagtcaaatatcactatctgtatggaaatcctcctatggcaaaataaatataaattaatttcttaaggattcatgtaagtgaactaaaaacagtatggatagttaaaagctttagttaaaatgtgtttaataattgattataaaaggtttgaacaacaatttgtaagtaatgctcttagaagtccaaaaattttaaaggacctgagaagccactagattagaacaaatctccctttgccaaacccaaacacctactcaggatttctgaacatgtagtaaatatttctttctttagaaaaattccatgaggctgccgggcgtggtggctcacgcctgtaatcccagcactttgggaggccgaggcaggccgatcacgaggtcaggagatcgagaccatcctgactaacacggtgaaacctcgtctctactaaaaatacaaaaaattaaccgggtgtggtggcgggcgcctgtagtcccagccactcgggaagctgaggcaggagaatggcgtgaacccaggaggtggagcttgcagtgagtggagattgcgccactgcactccagcctgggcaacagagagagactctgtctagaaaaaaaaaaaattccatgaggtaactgtaagaccccgttgattagtgagttcatactctatttcctgtttgctattatttaagttcattagacaatttttgattgagaaagtttgacttctttgcaatgctatctttgtcccttgtcctttgtaaaatgtatcatcttggaccctaaattaataaaactaccaataacggtatgctaagtttaactttcagtgaaaagtcacacagtgaaatgcttttttaggacattcaagcaataacaagtatataagttcttgtagtaata

SEQ ID NO: 7144 - DNA, 880 bp, mus musculus
gatccagcagtgaggcacatgttgttagttgcttttgccaatactggtggtgatatagccacactctcacctgtttgttctcatcaattaccacacagagtttgcaggacagctggtggcagagaagacaggactactgcctatagctgtgtaatagaataatgctgcctggcccattttgggaaagtatcatgctttcacgattctcatgctttaatacatggaataaatgactacagactcctcaaaaacctggtatatcttccagaagcactttttggacatcataaacttagagagtttttcacatgcatagccaaattacatttggaaagtgagcaaatgggtaggattttctgatgactgtctccccagaggtcaacatgacaatttccttataagctagatggaaacagagaaaaatcatctttatgtctttatatcctgaattcttatttgaagcaaaagagaaagggtgtattttaaatgatactttgccttcatttacacatctgcaaaatttctttaaaaaaaaccccacagcaacacaattttggtagatcaaccacacttttttaaaagtttcagatggggtttcattatatttcccaggctggtctccaaccactgggctcaatccatcctcctgcctcagcctcctgagtagctgggattacatgtgcatgccaccattcccagaaatcatatttatattaaagtcataattgctgtgcaaaagtaaatatatctttctacagaccttacttagcatttcaatactgtcatcaaaattttttgagaggtaaataaatgatatctggaactgtgtcatgaataaagaggctatgggtaatgaaaggcatttataccttagctactt

SEQ ID NO: 7145 - DNA, 1142 bp, mus musculus
aacttagggatttagataagtttgataacaattttatgtaattttgtctagtctggttatgactctggagttaactcaaacaaaatgactacacacataaacatcagcactaaccagggttgtaaactgaaatatgatttcaaattacaagtagattatttttcaaacctctttttcacttttcaactccactttatcagagtgccctgaacattctctaattttatttttttcttttgagacagagtcttgctcagtcgcccaggctggagtgcagtggcacgatctcggctcactgcaacctccgcctcccgagttcatgccattctcctgcctcagcctccctagtagctaggactacagacgcccgccacgatgcctggctaattttttttttttttttgcatttttagtagagacggggtttcaccatgttagccaggatggtctcgatctcctgacctcgtgatccacccacctcggcctcccaaagtgctgggattacaggagtgagccactgcgcccagttctaatttaatttttaattaaatgtttaaaatcttgacatacaaaattgtatgtatttatcaagtacaacatgaggttttgcagtatgtatacttgtgaaatcactaaatctagctaattaacatatgcattacttcacatagtcatcatttttgaaactcaaacaactcaatagcaagaaaacaaaaacctgattaaaaaacaggcaaaagacatgaatagatatttctcaaaagacatacatatggccaacaggtacataaaaaaactgttcaacatcactgatcatcaggaaaattcatataaaagctacattatcataacttcaggtttcctatgtgagctgcattgtccatttgtggctatgcccaactcatgaaatttttgtaaaagtgattctaataacataagtttaaaaattagtaaactgtgacgtgctaaataaatggtaataattatttttccaaatacaaacatgaggaacacgaggacttttcaagggtctagtatgtgtagtatgatcaagagaataggtagttaatttttttgagcaattataatgggataaggacagctaaattctttatacacattgtttcatttaatctttacaa

SEQ ID NO: 7146 - DNA, 281 bp, mus musculus
gaaagaaattatatacagatttttgggctttagctctgaagattaagatgtattgagtttagaatgtggcctcaaaattcactcattaaaaaaaagctctaagaagattcctatatgtgcaaagatttaggaagccctgcatcacggtaagtaaataaatatgcaactttgaaatccataagatgaaagatatgagtatgttgaataaaagcaaatattaccatgcaactaatgttagtttctgctatatttatttttttctttttggttgtaattaatga

SEQ ID NO: 7147 - DNA, 153 bp, mus musculus
agcttggatgtaaagttaatggcttcgggctttgagttgaagtccagcaattcctcagtcttgcctgcacttcagaatgacctaggagcttcaaaaataaataatccagtactctaacccagactcataattctgaatagccgaggtggcgat

SEQ ID NO: 7148 - DNA, 174 bp, mus musculus
ataagcaaagagggctgccagttttaaacatatggaaaactaaagaaggattgagaagactgcagatgtgaaggagaaaaaaattcaacttcatctgaactgaattgtttcattctttacattacagccatcaacattatcaactttatcctacaacatgcttacctttttttc

SEQ ID NO: 7149 - DNA, 43 bp, mus musculus
tttgggaataagtaagtccttccaattgtcagtgttcttccat

SEQ ID NO: 7150 - DNA, 974 bp, mus musculus
agtgcccccttagcattcagattctggtctctgatactattctttcactgaaaggaaccatgactccttcaaacatgagtgattccatgtctggggcagaaaggtacaaggggagcggggaaaatatgattgtaccagaaagcaacaaaactttcaatgagtagtgggtcatgttataaggaatggagcaaaagtttttaaagtcttccacattaaaaagaaaataattactataggtgactgaaatatagtaagtctatgaaaaaccatgctcccataatgatacacaaaaagaaaccataagaaatgatttcaaaagtaggtgaatagaacagaatggccgggcacggtggctcatgcctacataatcccagcactttgggaggccgaggcaggcagatcacccaaggtcaggagttcaagaccagcctggccaacatggtgaaaccccatctctactaaaaacataaaaactagctgggcgtggtggtaaacgcctgtaatcccagctactcgggaggctgaggcaggagaattgcttgaacccaggagacggaggttgcagagagtcgacacagtgccactgcactccagcctcggtgacagagtgagactctgtctcaaaacaaaaacaaacaaacaaaaacagaacagaatgcatttctatggagttttatttctcattcatgaggcattattgattaatttattgtatcaatagagaatatagaaactagtaaatacatcagttgaagggcaatttctgatgccaggggaatatcagaatggccaataaactgcgatctcaagtcagacaaagcaaaatgaaatatctggaattcaattgtatataaatgtaagtattcttaagatatgtatggccctaagaatatgaatcaatgggaaaagtattaacatatctcaagaacccatcaacttccaagttctttagagtgtggagaaatacaatacaa

SEQ ID NO: 7151 - DNA, 997 bp, mus musculus
gaggattcgttctgcacgcatctgcgaggggagctcaggctcactgttgggggcgtgtgggaaaggagattttcagggggccgcgagttgtgggttcccgcctccacccctgtccgcgccccacactcaggcaacagttggtcgtgcggggccggcccgggctctgggtggggaaggggagtctcgcgatcgttgagggggggggggtggaggaaggggggagagtgacggggggaggccatgacgtagggtgggtggacggaagtggggcagggttgagggttatttaaagaagggggggcctgagcgaaggggttggaagcggagtgattccccacccctgctccatctagctctttccagtgcagccactgccgccgcccaggagccctcgtcccctgccttgtccccctactcgttcccgctcccacggcatggagcaggacactgccgcagtggcagccaccgtggcagccgcggatgcgaccgccactatcgtggtcatagaggacgagcagcccgggccgtccacctctcaggaggagggagcggccgccgcggccaccgaagccaccgcggccacggagaagggcgagaagaagaaggaggtaaataggaagggggtgtgtgtgtggtggacaaatcctgtgcctggcccctctgaggggcccaaaccctgacctttcggcgccgacaggtacccgcggagctttgcggggctaggggcggcgggtgcgggggtcggcggcggaaccgcctggcgttcgctcccctccccctttccttctcgccgcctggaggacgggggcggggctgggcgcgggcgggagcggcgcggggtggaggggtgcccgctctcccggggcctgggggctcgggagcccctcgacagcccccgaccccctccaccttcccggaactcgggtaacggggtgggggatggggctgtgcaggaaaaagcctccgcctctccctctcctctcgctcgctccctctc

SEQ ID NO: 7152 - DNA, 1037 bp, mus musculus
ctaaatgtacagttcagtggcatcacattgttgtgcaaccattgccaccatccatttccagaacttttttattatcccatgctgcatgtgtttcttcaacattattattattatttttcttttttgtgtctgtttttaattttattattattatttgttcattttaacattatttttaatgtcagccttggtttttatcttgcagatcaaaggatcatggacagggaagaatcgcgtccagaatccctacagccatggcaatattgtgaagaactgctgtgaagtgctgtgtggccccttgccccccaggtgctcagggcactcaaaagtcctgggactgttgggatgagcagctcaacctgatcctgttaccttgtctgatgtgtttttctgagtgtggcctcttggtgtcaaataggtctttccagggcttgccacttggtaccatgtctacatggaccatagaccatgggctggttgttttggagggatgatctttcattcttaatttcatttgtttgttccctggttaatgtgacatttcctggtttgtggaagaaaaagtgaatgggagataagaggcatgtgctgtgttcaggctagattgccaaaggacaggtttatattttccagtctatgcagcaaaattccgtaggccaggtgggtggaggggtgaatgcccagttctttgttaactctcttatctccttcagtgtgctggatcgaaggggtattttgccactggaggaaagtggaagtcgacctcccagtactcaagagaccagtagcagcctcttgccacagagcccagtaagtgttcctgacttaaggctgggtcgatatagagagggcggaggctaatttacagcttggaaatataattaggcaatattgtattctaatcaccccagcttccctgcctctacacctgccctgatgttgccttcagatctttgtgtccttgatgtagattaagatttagtcatttctttggtgtatattgagtgactctgtgccagccactgtactagctgcca

SEQ ID NO: 7153 - DNA, 1037 bp, mus musculus; identical to SEQ ID NO: 7152

SEQ ID NO: 7154 - DNA, 809 bp, mus musculus
agaagaatgttttcaaaataaggagcttcccagacctgtgttagaagggcagcagtcagagaggaccccaaataatcgccctgatgcccctaaggagaagaaaaagaaggagcaaatgatcgacctacagaacctcctaaccacacaatctccctccgtgaagtctttggcagttcccacaatagaggagctggtgagcagagccagggtggtgggccattgttcagaaagtgtcgttcttgcgcaaggagtaatgaagctttgttttgctgggggcacatttcagtagtttagaggtccagaatagtatagggccaggctagtcccagtgacgttttaatagatgcagatatatgggtgctgccaagacccctatttccgaaagcctgatccacaaaaactcctctggggtgactctaaaactgctctcagaggtaagagggagtaactcagagttctgaccagatcccaggcaggacaacttgaaggtgagtcattgaactgttgcgaaagttttattcagtgggatctcagatggtctaagactccccagttaatctgaaacttaaagtgaagcgtcctggcacctgtcttttcagggatataagctggaggaagcctacagtctggccacttagagctcctgctgctaacacgggccattccttcctccaccctgcagcttccttactgaaaagtttaaaattgtgtcatatgataatgagctagggatatttaccctagagggaagaaaatttgagcatgattggctgtgcactggtttgtatcgcaagaccatcattgttcag

SEQ ID NO: 7155 - DNA, 176 bp, mus musculus
tatggatatgccacattttatttatctattcatcagtttatggacatctgggttgttttcacttctttgttattatgaataatgctgatataagcatttatgtacaagttgtttgcatgaataatacttcagttctattgggtatatatcaaggggtggaattgctaagtcatatg

SEQ ID NO: 7156 - DNA, 131 bp, mus musculus
attcctttatataaatttattgatcaattctacacaaatatttgtgtagtttgaagctattataaagagtactactatgaatattcttgtacatttctgttggtgcacatatatacatatttctatttggt

SEQ ID NO: 7157 - DNA, 231 bp, mus musculus
cactgattaataatagataggctggtaccatgctaagtgtgttatatatatattatttcatttaatctctgtgaactttgcaggtggatattatttctatcacgtaggtaagaattcacttgactacattagtgaatgatcattaagtttcaagcccaattctaacttcagagcctgcttccttaaccactaccatatactgtaattactcaggagataggataacacaaa

SEQ ID NO: 7158 - DNA, 946 bp, mus musculus
ttgtgtcaacaaacccctcaccccgaagttgttgccttcagtagtgtgacccttcaaccactgagtggcatctggaactaagatgtgataccagatgggttattttccctctctctctgacacaactaggctgacagaaggtttagaataaaatgttggaaccattttgcgaggtttgaagggtgtgaggagtagggacaagctcatttctgaagaaggggaaggtaaatgaaatctcatgttttctttgtcttcaggaggtctccaggaggggatgagtcactggaaaatcttttgacagagcctttaatgaaaagtactcaggaacttctaatgctccctaccaggtcttcccttattaagtcccctaatgtgtgaccagtgtgtaaagcaaagggatttgccccaagttgactctctgatgttgtaaaatggtcagtagtgtaataatggtgaccctattaacagacaaagtggcccttttccatgttgtcccaaaggattgtcaggcctggcgccagcaagaattgctactgagggaggaatcttgcctagaacttttttgagacctgccaccatccagtctgctctttgttcccctttgagcctggcctcatttggctgttctccctctggtatgcccctagctagcgtgccagccaagctgttgcccttcacacaccccgcccgcagaccgatatgcttgctccctttgcttggctgccagggagaggatttatatcaagattgctcaactaggaaatgccgagttccatacaattccaatgcttgctttctgtcacatttttgttatttcatagtcttgacctttaacctttatgtcgagaaatccttgtggatgagtctacctttgaatgatttgtcttgcagcctcaggtttaatattctgtgtctcgaattattttagatgcctgggctagtctgc

SEQ ID NO: 7159 - DNA, 1401 bp, mus musculus
tagagtataaggtactactatgaacaaatttatgtcaaaaattaaaatctagacagacaaatttctggtcacatgtaaattaccaaaacgtattagaatatacagtcttagtaattgtatgagtccactctcatgctactatgaagaacttcccaagactgagtaatttataaaggaaagaggattaattgactcatggttctgcagggctggggaggcctcaggaatcatggcagaaggcatctcttcatagggcggcaggagagaaaatgagtgcccagcaaagggggaagcccttataaaaccatcagatctcgtgagaactaactcactatcaggagaacaggatgggctaaaccacccccatgattcaattatctccaactggtccctcccacaacatgtggggattatgggatgtacaattcaagatgagatttggttgaggacacagccaaaccatatcagtaatccaataactattagcaaaattgaagcagtgattaagaactttcccaaaaaagaaatacaagaccaaaatgattttgctagtgttttctctcaacatatcaaagaccagattatttccatattaaataaccgttctaaaaaataaaataggaaatactagctaaatcattctatgaaattattaaaagcaatggcaaaaagcaattacttttgcaccaacctaatattgtaatcttgctatccaatccagaaaaagacaatatgagaggagaaaccatagtttattctcactcgtgacccagatgtaaaaaattctaaaactaaaaaaataaataattgaattcaacaatatataaaaataaatagacagtgaccaggctggatttatccctagaagtcaagcatgattgaccttagaaaatgagtaaatattattatattaatgttttactaacaagaaaaaatgtaatagccttactagacacaaaaaaacacatttggtaaaattcaatgccaatgtataatataaatttttagcaaattaggattagaaggaaaattccataatccaataaaatgtatctagcaaaaccctgatcaaacattatatttaacaggaggacattaaaattattccttttactatcaaaaattttaaaatgatgctatcactaactttattcaacactttcctagaagtcttggtattttcagtaggacaagaaaaagaaattaaaggcatatgaatgcaaaatgaaaaaaacaaaaatgttattattcacagattatatgattgcccatataggaaattgaaacaactatacataaaaattcttagaagtaataatttagcaaactgaatagctataatatgagctttaatatatctattgcatttctatacacccagcaacatgtaaaaaatataat

SEQ ID NO: 7160 - DNA, 1080 bp, mus musculus
atgaagtgtcatcaaggactcaattttccatcttaaatcaaaagagtgtccaatggatttatatattttctaaacaatttagttgattgacctatatgtggagacacagatagatattatttaataggcagggaaggtacattgatataacatgaatacttggctgtgtacaacttctcagagaagtaatgcatttacttttaaccacgaagttggtttctctattgtcagaaagaaagaacatcaaaacagccaagacacctgctgtggaaatgtctctttcattgatctctgaaatctctattttatgctgactttcataagaagtatctaatcttccatactcgttcacctgggaagctgggatgttaactgccaaaaacctgcattgcaaaaacaaacaaacaaacaaaaacaaagaaactgaagaacaagaagaagctccatgtggatcagcaagcaagggcagtgtgagtccctttctaggtgtacctcatgaatttgcaagaggaaatacaagccttgcagatggcatttcctttggccattagttttcagaaggctccctgcaaattctcagcagaggaaatagcaggaatgataagtctatttccaaagccctttccaacaaccttcagatttcccgcattcagattgcacttaaaaatatcaaacgacttgccagtcttttcagcagccttctaaatacgtttctgttcaaagaaataatgggagtgacaggctgagaagtcaggaggcactcgataaatgtttctatgaatgagcgagtgaagtgaatgaaagtatatgggcatgaacgaaaagcctacaaatgtgagtctaaatctgtaaatgatcaaaaaagtatttttcctgagagaattatctcatctcaatttggaaacactaatttctggcctcggagagtgcatataatctattttctcatccagtcgattcacatttataaaagtaggtttttcttccagacaaagcacactataggaaaaagaaaaaaaaactgataactgtgttatgccctctgtctgagccttcaaatctctttggttcaaatgggaa

SEQ ID NO: 7161 - DNA, 331 bp, mus musculus
gtgtaactgtaatcccaaaataataaaagacagaaaatgggagagaaaaatagttgaagataaagtggctgaaatttcccaaattgaaacaaaagcataaattttacaaatttaagatgtccaaatcatcaagtaaagtaagcatgaaaaaggccattccaaggcaaatcatagtcaaattattgtcatccaaggataaagaccaaatctcaagagcagtaagagacaagcaatattatatgtatgtgtgtatatatgtatatatatatatatgaaataattatattaattctcatcagaaaatatagaggcaaaaattgagtagaagaat

SEQ ID NO: 7162 - DNA, 1161 bp, mus musculus
cctcttgaaatacacaccgtcttcagtcttttcaaacaaacattaaaatgaatccaattccatatctcagcagatgagcaaatccctgttatggccagcaatggcagagtttaaaacctcccacccagttgagaaagtaaacttttaatacaagaattctgtaaattcagatttaaaatgttgtatatatacaatttatagtgttgccatattacctgaccattgaccctgcaggtaactcacgtagtgctccacctacacgagggcccccgccatcttatggtggaagcagtcgctatgatgattacagcagctcacgtgacggatatggtggaagtcgagacagttactcaagcagccgaagtgatctctactcaagtggtcgtgatcgggttggcagacaagaaagagggcttcccccttctatggaaagggggtaccctcctccacgtgattcctacagcagttcaagccgcggagcaccaagaggtggtggccgtggaggaagccgatctgatagagggggaggcagaagcagatactagaaacaaacaaaactttggaccaaaatcccagttcaaagaaacaaaaagtggaaactattctatcataactacccaaggactactaaaaggaaaaattgtgttactttttttaaattccctgttaagttcccctccataatttttatgttcttgtgaggaaaaaagtaaaacatgtttaattttatttgactttcgcattgcttttcaacaagcaaatgttaaatgtgttaagacttgtactagtgttgtaactttccaagtaaaagtatcccctaaaggccacttcctatctgatttttcccagcaaatgaggcaggcaattctaagatcttccacaaaacatctagccatctaaaatggagagatgaatcattctacctatacaaacaagctagctattagagggtggttggggtatgctactcataagatttcagggtgtcttccaactgaaatctcaatgttctcagtacgaaaaacctgaaatcacatgcctatgtaaggaaagtgctattcacccagtaaacccaaaaaagcaaatggataatgctggccattttgcctttctgacatttccttgggaatctgcaagaacctcccctttcccttcccccaa

SEQ ID NO: 7163 - DNA, 1161 bp, mus musculus; identical to SEQ ID NO: 7162

SEQ ID NO: 7164 - DNA, 575 bp, mus musculus
cttccttctccctatcatcagtgttctggaaagaggtattttgtccatttgtactctctcttttcatttataaatgggaacccagtgtgggttctagacttgaagtattttggaatgtgagagtaatcttttgaactgaaggctgaagacaagttatttctcctggcagcagattaaacaactaactcaaacccatcagcttgccatttgccaaatggagagttcctcataagagaacacatatgttttggaggaaaccaacaacctacattagaaaacatgacccaaagttcatgcactgatgggaatcagtagcaccatcagaagcaatgatcatgatgagcagttatcacatgaaaagcaccacactagctggcactacacaggcagaggacactggaatgaatgagacaactgccctcaaaggggttaacaacaatatatacaggaagacatctttcagacttttatgatggagtgagctgagtttgaggagggaagagaagtatgaatttattgtggaactaaccttctgacatccaaagtgaaatattggtggggtggtgtgctctaag

SEQ ID NO: 7165 - DNA, 8269 bp, mus musculus
agggtttacaataaagtagaagtatgatatatggcagtaatagcacaaaggccaggaggtaagaaatgaaggtatatgattgtgtagttcttatactgtgtgtgaaatgggataacaattggaagtaggctctgagaagatgaagatgtatccaataaaccctaaagcaatcactaaaacaataaaacaaagagatatagctaatgacttaacagaggaaataaaatgaaataataaataaataatcccaaataaggcagaaagagatgagaaactactaatgagatgatacaattaaatgtaactatatcagtaattacattaaatgtacatggtctaaacacttcagttaaaggcacagattgtcatattggataaaaaagcaacactcagcaaccttctgtctataagaaaccaactttggatataaagacaaataggttaaaaataaaaggatggccagattggtcaaagggtacaaacttgcagttgtaacataaataagttctggagacataatgtacagtatggtgactgtgagagttttcagaatcaaaatgaagtcacttatgccaaaccctaacgaaatggagtcaggaggccataatggaggggctctaacacacacatgcctgtgataaaaagtattccaagtactctccgaaaaccataactttgcacaaggacgaccgcaatcttgcacaaaaaatacttatgcagactgggtgcagtggctcacatctgtaataccagcactttgggaggccaagacaggcggattgcttgagctcaggagttcaagaccagcctgggcaacatggagaaatcccatctctacaaaaaatacaaaaattagccaggtgtagtggtgcacaactgtagtcccagacactcgggaggctaaggtgggaggatcaattgagccagggaagtggaggctgcactgagccaccattgcaccactgcactccagctggggtgacagagtgagaccctgtctcaaaaaaaaaaaaaaaaaacacttaggcgaggatgtctgctcagcaactgcctattcagcctttgactgacgccacccttgttattaattcttgtagccaagaataatcgtttcaaaataatttctgtaacagtcttcattttgcctttgtaagtttccccttgcctcagcctccctggatatgcctatgatccatcatagcacatgtcttggattataatcctgctaagtcctgaataaacccattatctttgcagagtctctctccattgttattttaggttggcatgataatagttcataataaggtattctatacttgagatttaccaatagaatagatcttaggtattttcaccatacacaagaagaagtagctatgtgaaatgatggatatgttaattagcttgattgtggtaatcatttcacaatgtatatcaaaacatcacattgtacactttaaatatatataatttttatttgtcaattataactcagtagagttggggcaaagtgaaaggatggaaaagtatatactgtggtaacactagttagatgaaagctggagtggttacataaatatcaaagtaaattcaaaagcaaagattactgtcacagataaaggaagttgtttcataatgacaaaagggtcaattcactgagtggaaataataattctaagtgtttatgcacccaagaacagaactccaaaatgtatgaggcaaaattgaagaagcagcaaggataaataacaattatagtcagaaatctcaatacttcttcctcaattattgctacaagtaggtagaaaattgtgaaggatatagaaaagttgaacatgcagccataaaaaggatgagttcaggccaggcgcggtggctcacgcctgtaatcccagcactttgggaggctgaggcgggtggatcaccatgtcaggagtttgagaccagcctggccaacataatgaaaccccatctctactaaaaatacaaaaaattagctgaatgtggtggcaggtgcctgtagtcctagctacttgggaggctgaggcaggagaattgcttgaacccgggaggtggaggttgcagtgagccgagattgtgccactgcactccggcctaggcaatagagcaagactgtgtttcaaaaaaaaaaaaaaaaaaaaaaaaaggatgagttcatgtcttttgcagggacatggatgaagttggaagccatcatcctcagcaaactaacacaggaacagaaaaccaaacaccgcatgttctcactcataagtgggagttgaacaatgagaacacatggacacagggaggggaacatcacacaccagggcctgttggaaggttggggggtgaggggagggaacatagaggacaggtcaataggtgaagcaaaccaccatggcacatatatacctatgtaaactgcctgcacattctgcacatgtatcctggaacttaaagttaaaaaaaaaaaaaaaagcccaaccagttgggggaaaaaaaaatgttgaacagtactatcaaccaacttgacataattggcatttatagaagactctacccaacaaaagtagaataacacgttttttttccaagtgtctgtggaacatttaccatagtgcatacactgtgtcagaaaattaggattgaataatttaaaaggattcaaaccatacagagtaggctgtttgacaactagggaattaaattagaaatcaataaaaaacgttctcttgaaaatcccccacatattggaaactaaacaacacatttcttaataacatacgggcccaaaaagatatcagaagggaaattagcaagtattttgaaatgaataaaaatgaaaatacagtataacagaatttgtagagtgctactaaagcagtgcttggggggaatttatagcactaaatgcctatgttagaaaaggagaggccaggcgtggtggctcacgcctgtaatcccagcactttgggaggctgggggtgggggtggatcacctgaggtcaggagttcgagaccagcctggctaacatggtgaaaccccatctctactaaaaatacaaaaaaattaggcaggctggcggtgggcgcctgtaatcccagctacttgggaggctgaggcaggagaatcgcttgaacctgggaggtggaggttgcagtgttgcagtgacccgagatcgtgccattgcaatccagcctggacaacaagagcaaaactctgtctcaaaaaaaaaaaaaaaaaaaaaaaggaaaaagaagaaagaaaaaagaaaaggagaaaggttttaagtcagtgacctcagttttcactttaagaaactagaaaaaggagagtaaattaaactcaacataagcagaggaaaggaaataattaagatcagagcacacgtaaatgaaatgtgaaacaacaataaaaaccaaaacaatgcagaaaaatccaatgaaatcaaatgctgcttctttgagaagatcaatgaaatcgataaatctccagccatacttaccaggaaaaaaaaaaaagagaagagagacaaatcactataaattctacagatattaaaaggataacaaaaaactattataaataaatgtatgcccataaacatgacaacttagaaagacacaaatttccaaagttccaccagttattaaatgtgaatccttcaacaagttattttaagtgtctagacctcagtttctttgtattaaaatggtcgagtttgtgaagagcaaatgtacctgaagttattagccattattattattactattgttatcttggattcagacttacagagcaaatgaggatttggatgggactgaggaaaaaaacatgtgattcacaaatagttactgcaggagctagttgatttggtaaaatgctcttgattggacctctgattttgttcaatctcattgtttttgttttaaaagttttcctgctcactaaagagtacttattgatgccttgtgtattaaaaacctgattgatcactatcattaaattgtgctgataaaaagatttctttttttttaaattatatatatattttttttctctctctctctctctgttttttaaacttctccttctggaacagagctaccctataggcagtgtgcccagagtatcctttttttttgaaacaggatcttgctctgtcacccaggctggaattcagtgacatgatcacagttcactgcagcctcgatctcctgggctcaaccaatcctcccacctcagcctcctgagtagctgggactacgggtatgcaccaccacatccggctaatttttttgatttttagtagagacgaggttttgctatattccccagactggtcttgaactcctgacctcaagcaatcttcccacctcagcctcccaaagtgctaggattacaggtgtgagtcacggcacctggctagatttcttaattaaatagctggaaatttcaataatctttactatctagggaaaaaaataatctttaaaacatttagttttcattcctagagcctacagcaataaataaagttaattcaaacaattttactaacctatgactcaaagtgaaatttaaggaactactcatcaagtgatcaagtaggtgaattttttttttgcctggtgtgtagtctttttcaactaaattcctcatatgaactgctgaaaagagaaaattatttgagtgactatttcctcaatttccttcatttctttaaggagaaatgactggtaccactctagatgcataggaaagaagttaattcattacacagggtggatgccttagggcatcagggcttaatcgctttacagaacctcagttgaaaatgctgatctacagaaacaagacaccatccacccatctcacagggttgctccagggatgatcaaaatcaaatcctttaaaatctcatgtgcaacaaacttaatgctgcactctaagataatgcagagttactcattcattataattaggatgaaacttttaaaaatgtttatttttttaaataaagaacttatgccactatcttaaaaacaggaaatacaaacaaaaaatatctttcataaacaccacctagagaaagtcaaattaatatttaaagtgcatatccatcctgattaaaaaaagtatatatatacatatatatatatatatatgtatatatatatattttttttttagatggagtctccctctgtcaccaggctggaatgcagtggcacgatctcagctcattgcaacctctgcctcctgggttcaagcgattctcctgcctcagcctcccgagtagctgggaccacaggcgcctgccaccacgcccaactaatttttgtatttttaatagagatagggtttcaccctgttggccaggatggtctcgatctcttgaccttgtgatctgcccgcctcggcctcccaaaatgctgggattacaggcatgagccactgcgcctggcctatttatgtataatttttaatacaagtgacgtggaagtttgaaacctaaagaatagcttttccttcaacaccagtgggtacatagacttaaaaattgatacataatgattgtacatattctgaagtacatgtggtattttgatacatgcatacaatgtataatgaaatcaggacaactggggtatccatcatttcaaacatttatttttttgtgtgtgctgggaatattccaaatctaagacttttgaagttgagaaggatttggaagagaaaactgaggcccagagactggaaatgatttgaccaacacagggaagaacttgggctggggctgcagacttctgctgcatagccagagatctttactctctcttcactgtgctgcctgtcatggagatcagtgatattctggcttttatcaagtatcttttccctaaaatatcttttccttttcctggtaagtatgcttaagaggaatctgctagagaatagaggaagaaggaacttggttaacatttttttttttctcttgagacagagccttgctctgtcacccaggctggcgtacagtggtgagatcttggctcactgtgacctcctcccgggcccaagtgattctcatccctcagcctcccaagcagctgggactacaggcgtgcgccatcatgcccggctaatttttgtatatatgtatgtattttttttagtagagatagggtttcaccatgttggccaggctggtcttgaactcctggcctcaagtgatccacccacctcggtcttccaaaatggtgagattacaggcatgagccactgcgctcggcaataaacagcttttgataacttggttagttagatttttgtctggctcaacttttcgttgttgttgttgttagaaaattggattggcaggtcagacatagtgctagtgagtgaaatagacctaattactttataatgcgtttttaatttaatgttcaacaaaggccagttactctacacacaaatcaataaacaaacaaccaaagctgattgttgggccgcaaaaaaacattgcaagctgattgctggttgcctggtttcctaagcacggcctaatgcaatttgagataaccttgaagctttacacaagccttactgaaagagctattttgaaatagttaagagtggcctgtaaacaatttcaggtagcctgtaaattgtgtacaacatctcaaagcacctttccaaattctgaccatgttgagcaggagttgaaaatgaagctcagagatggatgtatgacagcaaagaaagtgggaagaactagaatggtgtggtttaaggggcacctggaaggctttttgtccaaaaagctctttcccattacacgtcaaatgcctgaaattctttcattatagactggaaccaaatgactaaacaactgccttagtggggattagttttgggagccgaggtgagaggaccacaaggagagcaattgctgtgaagggcaggtggcttcaccaggtcctttccaactctgtggaaatgaaagtgtggaggcttttgtcgaaagtttcttccctccctccctcccttccttcctttctttttttcgagtctcactctgtcgcccagcctggagtacagtggagtgatctcagctcactgcaacctccacctcccaggttcaagcgattctcctgactcagcctcccgagtagccgggattataggtgtgcaccaccatgcctggctaatttttgcatttttagtagaaacagagtttcgccatgttggacggctggtcttgaattcctgaccttagatgattcgcctgcctcagcctcccaaagtgctgggattacaggcatgagccaccgcgcccggctgaaggtttatttctttctaaatgcgattgacttctaaaacaagtcactttatttttttttcgccaatagagcatcacttggtttaacatgcagttctcatgaactatgtaaaactgttctgctttgcaactcaaattgttcaaatgtactgttttgcaagttcaatttttgatttgttttcttaaagtgaaaactatcttaatatttcaaaacaaatgcatttaagtaaaataagaatatttcattcctatcataacatatatctcaaaagtcttaaattactctactgaatcattaaaatatcagaacaaaatttatccttatagcaatgataagagctgtgtcccaagcctcacctaggatagggagaagggagatcaacatcactgtctaaagggttagaattttaccagtgtcctttataatagtgttttaaaaatacatgtcctatcagtcttcacccagctttaatgttttcttaaaatgtgaaggcatggattttaaatgactcattaaaaatataaagtataggccgggtgtggtggctcatacctgtaatctcagtactttgggaggccgaggccggcagatcacttgcagtcaggagttcgagaccaggctggccaacatggtgaaacctcgtctctactaaaaatacaaaaattagctgggtgtgatggcatgcgcctgtatacaggctcctgagaagcctgtagtcccagcttctcaggaggctgaggcaggagaatcatttgaacccgggaggtggaggttgcggtgagccgagatcgtgccactgaactccagcctaggagacagagcaagactccctctcaaaaaaaaaaaaaaattagagatgttaaaaatgtgtgacagtatggatttaatcaggaaatgaagacaggcagaatgaaccatt

SEQ ID NO: 7166 - DNA, 542 bp, mus musculus
aaaacctcatctaacaaccctgtccttctggctttttatggaggcttcaatacttaggcatgattggctacatctttggccactgaggatcaattcaacatttagcccctctccctccccggagctgggggtcaggtagagctgaaagtcccaactctctaatcatgccttgatgatctttctggtgacgctctagccatctgtcatttcattagcatacaaaagatattcttatcacttcagagattctaagagtcttgggaactatgttccagaaatcaagggcagagacgaattatatatgtcttattacgtcacaatattttaagggcccttgtctatcttatatactgtagcatctctagtgactaggccacagtgcctggcacatagtaggtgctcaataaatgatcagtgactggacaaatgaatgatcaagtgcattgcttaaaatggcaacttgtttgattgtttatttcacttccttttcttgagaaggatcaggagggtacagtcaccttggaccccaacaattacctaca

SEQ ID NO: 7167 - DNA, 383 bp, mus musculus
gggttttcaaattcctagagaaaggcaaatgactatcagtaagaattcctaccaggcagaaggttcaatagtataaggcagatgtgaaagagtggagaaaagggaacgaggttcatattttgttagatgttggctaagtctgttaacctatattatcctatgataaacacctcttagagtggcaccccaacttacaattctcaatctgagaatggcctcaatatgcataggtgaataggcaacaagtggtcatgtttatagtatgggatcttggtctcttggccatgtttgttgatccaggggtgggcacaggatcctaaccaggtaaatgagattctttgtctcatgaatttaaaatctagaacaaaaaggcacagtgcatt

SEQ ID NO: 7168 - DNA, 265 bp, mus musculus
atgttttcttgtgaatattaaactttaacttgtttcacactgaaaagtgttttggaataaaaggaaaagggtgggaaagaagtcaattaacgttcccttgatctccttcaacatcctgattgtaacccaacaatataggtatttctgtcccagtagatgtgaagacaatgcagctatgatatctatttccactttagaaatttttacaatgagaacaaaaggatattaaggatatttctcactaccactcaatagtggaagagtg

SEQ ID NO: 7169 - DNA, 164 bp, mus musculus
attcaggaataaaataattgatgtagttgttgaggggctttgtgtttcattctaacgttgatttttctttcatgaagctgtaagtttgaggtttgagcactccacactcaacacctgtagtgaatgccagtgaaaccctacagtcagaatgttaattagtattc

SEQ ID NO: 7170 - DNA, 673 bp, mus musculus
ttcattctcctatacctccttctacatctctgatagtgtcttctcaggattcatccgtgacttctctagtcctcaaaacgtaagcatttcctaaagttctgtctttgcattttctttctttctttctttttttgagacgaaatttcgcgcttatcacccaggctggagtgcggtgctctctgatcccggctcactgcaacctctgcctccaggttcaagcgattctcctgcctcaacctcacaagtagctgggactacaggtgcccaccaccacacccagctaatttttgtatttttggtagaggcggggtttcaccatgttggccaggctggtctcgaactcctgaccttgggtgatccgcccgcctcagcctcccaaagtgctgggattacaggcgtgagccgccgcggccagcctgcattttctttcttatccctatgggcatgtacctgtttatcacatgagagcgagtataggttttatgtaaatgtccctcaaatccatctctagagtaatttccttgacaaagcaaaatgagtatagttgtgaatgaagagtgagattatttgagcttaaggttagagaaataaagccgtttcaggtgttataggctcatgagctataatttgctgaccccttaaataagggagtgaccaataattagttggtaga

SEQ ID NO: 7171 - DNA, 163 bp, mus musculus
tataattaaaaaacaaaatgagacactgtcaattaattcttgacattttacaaaacatttcaaatatattttatcattggggcctctcagtgagcctataaaataagtcgtagtatatttatccccattttctcctactttttactacaaaactccttcagtt

SEQ ID NO: 7172 - DNA, 314 bp, mus musculus
tggagaaatctactttatgcccatggaaaattaattattagtattggctataaatgctgagaacaaaatggatatttcaggagagaagcactgctagaggtcacaggaaagtgaattcgttaacaagacaatgtgtggtagtaaaattgaatgagaatcttgagtctagagatctgggattaagttagggctccattgcttcgaaatatgagaagacctcacttcccttagcataggtacccaaggctgtttgtcctttgaatgtatccttctataataatattctgctggacacttttcagatcattttactt

SEQ ID NO: 7173 - DNA, 283 bp, mus musculus
aggtctaggtattaggtgaaagatcagacaaggctcttcatggcatggattaagcttcgtctactctggctccaaacttgtatacctcccagatccaagcaaaagtcatacagttaattgggtcaattctacttaaaaggaagttttgtggccatgttttagtatcggagcatgatctttggggggctcaccattctagatccaacctaattgccacagtgaaatatctatttcctcaaaattgcactcttcctgaaagatacttagataaatattatgtcct

SEQ ID NO: 7174 - DNA, 689 bp, mus musculus
cagccaccatattgcgagacactcaactggctctatggagaggtcctcctaataagaaacagagaccttctgcctagatcaagcaaggaactgaggccttctgctaacagccatttgagtaagccatcaatcatgccttcagaggattgcattccataggacagcttgattgccagaactactcagctaaggcatttgcaaattctgtacccacagaaactgtgagaaaataaatatttgttgtgtctaagatgttaagttttggggtaatttgttacatagtaacaaataactaacacaatcttttagctcaccattttgacatagtcaatttgatgtcaataatttttttttgcaatctactatttctcataggcatttttatgtaggttcattttgacaagtctgttttgtttcacattctaaaaaaataaccaaataatacatgaactacacaattcaaacactcctattgccagctcttatctaaatggtcagggttggatgagataaggggtaggctgatgacaagagttgatgtgaggctcaggaataactagagagtagagtgaggcttagggatggacaagggatgagatataggtcagagattgataagaaactgggataagtctatgtacattctctaataagttttaagaatgtgagaacaatttggctatgacatc

SEQ ID NO: 7175 - DNA, 290 bp, mus musculus
atcattattttaaaaaatgaatttgattccagaacctcctctgctgttgcctgctcaaacaaaataccaaaattaaattttattgtcatgtctgccacattacctttccatttcttcctactacttagcaattccttccaggccgagtctctgtcgttatacactagacttgagcttacacatagatacacacatattaagctcatgttgggcccagagcacatttccctatcttgttagtaagcataacaaacttcctgggtaaaggagtccaaacttttgatctatag

SEQ ID NO: 7176 - DNA, 974 bp, mus musculus
agacgtggatctgaggctcggggcagtggcccgcgggttggtcggagattgctagcgctcggcaagactaggaataccagaggaagagccggtgggtaactctaaaagctctgcaaagccaggcgagcgctgccagcgcgactttgcaaggggcctaaatgttgagctgatttctggcatggtgagagcaggatttttgtagctggccagggagggagaacaggcaagggggagcctgggccgccgctcgcagccacaaaaccacagggtcactctgcccgtggcaagcaggtcagtgactccctagtgccaacgtcttcgaggcggcctgatctggcctctcttcctcctcacccaccgcacgcctgggtctagagaggtccactgaaactccggcagctgccccttgtgggacgggagcgcgcggagaaatgtgtgagcggcgggactgaaggcccccgcgacatcccgcgcggtaccccgcctccgctacacggaccgccaggctgctgcttgggcccctgacgcggagggggctgagcggccggctccgggaacagggatgcggcaaaacattgcggtacgcgccagcagcccctccagcctcctcgccgcccgcccgaggtagcgcacccgggcggcaatggccgggtctctccgcgaacctcttccacctccatccgagccttaggcgggccagcggggtttcccgagggagctctcggggagccacctcggcccaccgccctgaagcccatcagtgttctgcccccctcaggccgcttctctcctcccagtcgcggagtgccaggcgctgcactccggtggatgcaggatttgtttttggtcgggctaggtttgttcagtcctggctggtcgtgagagccaagggtctttcagggcaccgagaggaagacggacagctcccagcagccacagagaaggctcttggtacccagctggtactttgtggg

SEQ ID NO: 7177 - DNA, 974 bp, mus musculus; identical to SEQ ID NO: 7176

SEQ ID NO: 7178 - DNA, 974 bp, mus musculus; identical to SEQ ID NO: 7176

SEQ ID NO: 7179 - DNA, 1163 bp, mus musculus
aaactacttgaatataacagaacaatcaatgaatagttaactaaggtaaatttttagataatatggactaagatgctatttccactgctcgtgggttggttgcataagccacaaaaaattgaactttctaaacctcttgatcgcatttgtaagtcatttcattaccacttttagtgaatgcatcctcttaggtaacctcaagtcatttactattgaagataacagaataataaggcttagtcagcctttgcatcttgctgccggcagatgtagcacagacttcactgagtcctgaggaaaggtccaaagtttcttaagttcagctgactataaatgtaaagattgcactgtgcagctcagtgactctctcagtcactatatttggtggggcatactttgtgacagtctcagggaaggaaagtatctggtgtcctggggctggggataagatgatgagcttaagacccatgcaggaagctgcagcaggttagtggttggttagctaattagtgaaagattagtgcttggctaagggcctagaagataatgcacaaggcaagcccaaggaggaagagacagctggctaaacagaataaaagtcacaaacaaaataaagtgggacaaggattgtagggtgtaattcacagcagggagattcaatggctaaaaatggatgatttggtaagttcctataataggctcaggatggtatgaataatgaatggtggagatattttgaaaatgagaggtgaatctgctctgatcatcatggaagagtaggtgaagaataaatgttcttataggagtgaagggaagttgaatcattagatacagtggccagcttttcgtgctagagtgaaccaagaggttaagaaaacactgactgctacactttacaacctaaatatttagttaaattattctaagcccttttcagaaacaggaaaaaaattctaaaatttgtatagaatctcaagggtccctgaattaccaaaacaatcttgataaacaagaatgaattggagacctcattcttgctgatttctatacatattacaacactatagtaatcaaaacagtatggtgctagcataaagacaggcatatagaccaatagaacagaatagagagccccaaaataaattctcatgtatatggtcaaa

SEQ ID NO: 7180 - DNA, 422 bp, mus musculus
tctcaagaaaaaaatcacattctatataggcaatgcattaaaaagagctaaatatacttttctggatgggtaccaaaagaaataaattatatattttaaaacatttcctgagaggaaatgaaattttaaaaaggcttgtgtaactcacatttaagtgagcaaggaacagcaaaatggcaatttctcacttcatccaggaagagaagacatgctgaacaggaagaaagcaaccgtaatgtaagtgacttttgagtggtgcagggagagactcctaacagcattcaaaatagaatttgtccattcagggaatcacataaaactacctctaggacagctgcattgggctttaatttgagtgtacaggcagctgcaaagacatttgcagagctggaggagtcacatatcttgcatttacacagatt

SEQ ID NO: 7181 - DNA, 575 bp, mus musculus
ctagtaaactaatacacctggtaactctaccattaaaacacattcatgatttaataacctttcatcatctgcattgctaagtcctttatctaatgggtttcatataagcttttttgataaatataatatactcctggaaaccatgcatctacatgaaaaaccattgaatttctaaaatagtattaatttaaatagtaaaataattatgcattctacgccagccaaaaatatctcaacatttatcacagaataaataaaagctgagcaatgaaattcaagttcatgtaagtaatgcatacaaatttcaatttaaatgaagattttatacgttaagtgtgatgcagtgaggatttactatactcaccaagggaagaagaaaagacgtgatagtgggtggtgattggttgagaaggagaggcacaatatgtctttagaaagtggtgagaactcagatgactgaccttcaggtaggcatttaatatcttcttatacccagtagggtgagctaatcccaaagagaggtaaatattttctttccacatcttttcaagcctcttcatcacaaccatatttta

SEQ ID NO: 7182 - DNA, 1483 bp, mus musculus
gaaggtagagctccttggcttggtgtggcgacttctgtgaattagtttgggttggtagcacttgttgcagctttcttttttgattggtttctgcagtgtttgacgctaccgaggaggattaattccacccaaaggggatgagatagggatacaggagagtcaatgatgtccctaaaattctttgtgtcaaatatttcaacaagcatttgggcaatttttgctgcttagattcatagtatcgctcatggcattctcttttcaattacttttatttttaagatgtatacctttcagaacaactcagtttaggaaggttctaggcgagactgtttttttcatacttttacagcttcactgacaagcaccaaaaagtttagtgacaaagtcaggcagtgagtcagagagcagcaagggtcctgggtaccatcatatattgttggcgtaaccgcttctcttgtaaatcacagtgttttgtactgaaaaagacttgcaatagtgacttaaggagagattttgaaatgggctttttcttaaacaatgcattctcaaggatgtttttgtaataccctatcagtatctcttaacctctgagctatttaaatgccattcatgcatcattctcacagaaaagtcacgtaggcatttttgggggtctgtggaagaggctagttggctgtttgaaaatatagcatgtgtcacacgttgaaatttatccaaaaattacttctaggttacttttaatactcatccaatataaattgttaaatacaataatatacttctttaagcaaagcatgcttcagactggattgattaatattaatttattgaactctgtctcagataagctaggcaagaatcaattagaaattgataaggcatggcccctggcctcagggagtttacagtctggcaagattgatatggaaggaagcaaacacagatctgaaagtactactaggacaaggtgggtgcagtgtctgccttagcttttctccttccgacactaagcagtacaggaaagatttcacagggatttgtgcgttacagaatggttagtttgatatgtagcagccattactggaaattgcatatgacactcaacgtaaacacattatagaagaaagtatgatatgtagatttcatggcattcatcaaattcctttaacatttgtcaatttccttcaatgtttgacaacattgaattgtccttcaatgtttgacaacatttcttttaaacatgaaagaaaacacttgaacatgattatctctaaagatttattcagcattgtttttgtaatctgtaagatttgtagagttacaatgtgagaattcctagtgatccaaaataactagatgcctgggcttaatagttgagattggccaatagtatatcgaattgtttgaaagtaaaaaaaaaaaaaaaaaaaaatctattgaaatggctaacacatttgagaactttacattataatgaaaagcc

SEQ ID NO: 7183 - DNA, 509 bp, mus musculus
taaagctcttatagagtaaacctctaaacttcttcaggacttagtgaatctgtttcgcaagggtaagccacaagggggcagaagaacagtatggtttacaatatcccatcctagaacatgttatacagtttaattttaccaataacataattattaactattaatactcaaactctaacatcacaatgtattcctatgaccttttcagatggaattaaaatgtttttcctacactattgatacaaatgcgaaaacaataaatgacacaatagtggagtagaccatgttgtatgctttttctaagacttttcagagacacagtttcaatatgcctgtatttttcttgcagttttgctttattttaattattttttcatttaatagacttgggggatgggtccttcacccatgtacctcagataggtaccatgaaagtagatgaaatcatctagaatcatagaagctcagtatgtctgacctatgaggcggctttagagatcacctggtct

SEQ ID NO: 7184 - DNA, 523 bp, mus musculus
caggatattttccatccactgaacaatgtatatttacaaaaataagtagacctcctacatgtattaatttcctaaagttgctatattaaattatcacaactgggcgcttaaaacaatagaaatgtattatttcaagtcctgtaggctagaagtctgaaataaagatgtaggcagggccacattccctctgaaggctctagaaacaactcctttcttgcctcttccagcttctggtggtttccagcaattcttgacattcttcgtcttggagtcaaatcactccaatctctgcctccgtctttgcatggccttcttctttgtgtctctgtcaaaatttccgtctcctttctcttataaagatgccagtcattaaatgtagggcccactttaaatccaggatgattttaacacaagatccttaactaattagatttttacctcaagattctttattaattacatctccaaagaccctatttccaaataggattaaattctgaggttctgggtagtaatgaatttt

SEQ ID NO: 7185 - DNA, 598 bp, mus musculus
ttttggattttttgttgttgctgttgtgagagaagataacctttatttggtcaggccacctgtagactgggtaatgtataaagaaaaagaggtttaatggacccacatttccacatggctggggaggcctcacaatcatggtggaaggcgaaggaggagcaaaggcatgtcttacatggctgcaggcaagagagtgtgtgcaggaaactgccctttatacaaccatcagatatcatgagacttattcactatgatgagaacagcatgagaaaacctgcccccatgattcaattaccccccaccagttacctcctataacacatgaggattatgggagctacaactcacgatgagattttggtggggacacagccaaaccatatcaccattattcaggtactttgttatgtggctatacattcttagctaatggagttgggattcatcatcatttaatagatgaggaaaatgaaacctaagtgaattaaacatgcctattaatataataacaatagggtgatgcttctttagcattgtgtaggtttcaatatgctaatatatattaagtgaaattttaataagactatgaaaatcatga

SEQ ID NO: 7186 - DNA, 256 bp, mus musculus
gcttgcacagagtaggagttcaaaagtgatacttgaatctaaatcaaacttaagcagtttcgtatatggacttattctattactttagtgccttaaaaaacttagcattttcagcaatgtcaaacctgcataaaagtggcaaaaatgttgcaaagaactcctgtgtatgcttcttccagagaccccattcaagtttcatcaaccgtctcaataatacctgtgatggtaaaagaatccaatccaaaaccacaggtac

SEQ ID NO: 7187 - DNA, 171 bp, mus musculus
agaatctattttctttttaagggtgaataatattctcttatgtgtatataccacattttgttcatttattcatcggttgatggacatatgagttgcttccactttctggatattgtgaataatattgctatgaatattggtgttcaagtgtttgttaagtccctgctttca

SEQ ID NO: 7188 - DNA, 6009 bp, mus musculus
ctattattgtatagaaagttatttaagttaaaaaataaaattaattttaagtaactctggctaaagaagttattttattagacataagaggtatagtttttggtttaataatgaatatttgtatttatttatttatgtatttttaacttttgtgggtacatagtaggcatatatatttatgggttacatgagataattcaatacagacatacgatgcataaaaatcacatcacagtaaatggagtatctatcacctcaagtatttatttgtgttccaaacaattcatttatactcctttaggtatttttaaatgtacaattaaatgatttttgactatagtcatcctgttgtgttagcaaatactaggtcttattcattctttctaactatgttttgcaccaattaatcatccccacttccccccaccatcctccactacacttcccagcctctggtaaccattcttctactctctatttccatgagttcatttgctttaatttgtagcgatgtttgactttctgtgcctggtttatttcatcaacttaacctaatgacctccagttccacctatgttgttgcaaatgacagaatctcattcctttttatggctgaaaagtaatccctggcctgtatgtaccacattttctttatccattcatcttcatctgttgatggacacttaggttgtttccaaaccttatctattgtagaaagtgctgccacaaacatgggagtgcagatatcttttcaacacactgattccctttcttttgatgtatacctagcaatgggatttctggatcatatggtagctgtatttgttgctttttgaggaaccactagagtattctccatggtggtgatgctaatttacagtcccaccaacagcgtacgagggtttccttttctctatattcttcccagcatttgttattgcctgactttgggataaaagcaattttaaatgcttgagatggtacctcattgtagttttgatttgcatttctctgatgactaatgatgttgaacactttttcatatgcccgtttgccatgtgtatgtcttcttttgagaaatatctattcaggtgttttgccaaatttttattgatttatagagtggtttgagctccttacatattctatagagtggtttgagcttcttacatattctgattattaatcccttgtcagatggtcagtttgcaaatactgtctcccagtctgcgaattatctctttgctttatttactgtttccttgctaggcagcagcatttaactttgtgtgatcctatttgtccacttttgctttggttccctatgattgtgagctactactcaaaaaatctttattgagactaaggtcttggagagtttccccaaagtttatttgcagtagtttcacagtttgaggttttaggtttaagtctttaatctatttttatttgatttttatatatgatgacagataagggtagagtttcattcttctgcatatggatatccagttttctcagcacaattaattgaagggactgcccttttcacaatgtatgttcttggtacctttgtcaaaaatgagttcactgtagacgtatgaatttatctttgggacctctagtctgttcctctgatttatgtgtctgtttttatgccaataccatgctactttggttactatagctctgtagtataagttgaagtcaggtaatgtgattcttccagttttgttctttttgcttaggatagctttggctattctgggtctttcattattccataaatatattaggattaatttttctatttctgtgaagtatgttattggtattatgtactgaatctgtagattgctttgggtactatggacatttcagcaatattgatacttccaatccatgaacatggactatctttccttttttttttttctgtcttcttaagttctttcatcaatgttttatagtgtttattgtagggatctttcacttctttgggtaagttaattcctaggtatttaattttatttgttgctattgtaaatggggtaactttattcatttctctttcagattgtttcctggtaggatatagaactaattgtttcagattatttcctggtaggatatagctactaatttttgtgtgttggtttgtgtcctgcaactttactgagtttgtttataagtttgaatcgttttttggtggagtctttaagtttttccaaatatacgatcgtatcatctgcaaagataatttaagttattcctttccaatttggatggtgccctttatttttttctcttgtctggtttctctaccttggaatttcaatactgtgttgaataatggtggtaaaaggaggtatccttgtgttcctgaccttacaagaaagatttaaaatatttccccgttctgtatgacattaattaattaattatgggtctgtcatatatggcttttattatgtggaggtatgtttcttctatacccagctttttgaggttttatcatgagggaatattgagttttatcaaatgcttttacagcatcaattcaaatgatcatatgaattttgctcttcattctgttgacataatttatcacattaattgattttaatatattgaacaatccatgcatcctaaggttaaataccacttgctcatgatgaatgatctttttaggatattattgaattttgtttgctagtatgtttttttgaagatttccacatcaatattcatcagtgatattggcctatggttttctttttttggtgtgtctttgtctggttttgttatcagggtattactggcctcatagaatgagtatataagtatttcctccttttctatttttcagaatagtttgagtagcattggtattattccttctttaaatgtttggtagaattcagcagtgaagccatctggttccatatttttctttgctgggagacttatagctttgatcttatttattttttttttgtacacgttttgaatttcttcatagttcaatcttggcagattttacggatcttaaaatttatttgtttctttgaggttttccaatttatttgcatgtagttgctcatagtagccactaatgtgcccttgaatttctgcaatataagttataatgtcttatttttcatctctgattttatttatttggatcttatttttctttttcttagtctggctaaagttttctgaattttgttttctcttttgcaaggaaacaactttttgttttgttgatgttttgtattattttcttcatgtcaaattcatttatttctgctctaatgtttatttttttctactaattttgaggttggtttgctcttgcttttctagttctttaacatgcatcattaggttgtttatttgaaggctttctttgtttttgatgtacacacgtataaacttccctcttaaaactgcattcattgtatcccactatattgtgtttctgtgaccattcgtttcaagaaatttttcaattttcttcctaatttctttatttatccactggtaattcaggagcatattgtttagttttcattgtttatatagtttccagaattattcttgtttttgatttctagttttatttttttgagcagagaaaatgcatgatgttattttgattttttgaaatgttttaagacttgtttgtgatctatcatatggtctatccttgagaatgatccatgtgctgataaaaataacttatattctctagccattggataaagtgttctgtaaatatctaattggtaccatatagtgcagattaagtctgatgtttctctgttgattttctatctggaagatctgtccaatgctgagagtggggtgttaaagtctccaactattattgtattggggtctacctctcccttcttctctaataatatctgctttatatatctgggtgctccagtattgggtatatttatatttacagtttttatgtcctcttattaatttaccactacatcattatatagtggtctttttctctccttatgattttgaaatctattttgtctgctataagtatagctattcttgctctttttttgtttccgttggcatgcaacatctttttttatccctttattttcaatctatgtgtctctctacaggtgaagtgtatttcttaaaggcagcagatcattacatcttgtttttctcatctattcagtcaatccaggtcttttgattggagattttaatccattgacatttaatattattattgataggttaggacttactcctgacattctgttaatttgtgttctggttgttttttggccttctgttccatcttttcttccatcctgtcttcctcttaataaatgtgattgtctttggtggtatgatttaatttgttgctttttattttttgtgcaaccattatatgatttttgatttgaggctaccatgaggcttacaaatactgtcttataactaattgttttaagctgataacagcactgcttgcacacacaaaaaaaatgaacaaaaagaaaactaaattaaatctctacaccttaattttttccctctgctttttagctttttgtcatttctctttatatcttattgtaccatctatgtcttgaaaagttgtattcatacaactataatagttactattttcaatcagttcataatttaatttttctacttaagagtagtttacacagcacagttacagtgtcaaaatattctgtgtcttttgtgtacttattattgtcagttttgtaccttgagatgatttcttattgctcattaatgtcattttcattctgactgaagtactccatttagcatttattataaaataagtctgatgttgatgaattctctcagtttttgtttgtctggaaaagtctttatttctccttcatgtgtgaaggttatctttgctggatatactattctagagtaatgatttctttttccttcagcgctttaaatatgtcacgccactctctcctggcctgtaaggcttctactgaaaagtctatttccaggcatattgaatctccattgtatgttatttgtttcttttatcttgctgcttttaggatcccttctttgtttttgacctttgagagtttgcttattaaaggccttgaggtagtcttctttgggttaaatgtgcttggtattctaccttcttgtacatggatgttgacatctttccctaggtttgggattttctctgttactatccttttgaattaactttctacccccatctctttctctacctcttctttaaggacaataactcttagatgtgcccttttgatgctattttctagatcccatatgtgtgcttcattgttttatactgtttttcctttgtctcctctgactttgtcctttcaaatagcctgtcttcaaactcactaattttttctttcacatgatcatctctgctattaagagactctgatacattcttcagaatgtcgattgcattaagtacagaatttctgcttgattatttttaattgttgcaatctctttgttacatttatctgacagaattctgaattccttctctgtggattgtctttcatttcttaaaatttcctcagaagagctatttcaaattttctgtctgcaaagtcatgtatctccctttctccaagattggtccctggtgtcttctttagttcctttcgtgaggtgatgttttccttaatgatcttgatgcttttggatgtttgtctttgtctgaacattgaagagttaagtattcattgtagtccttgcagtctggctttttgtacttgtccttcttgggaaggcttttcaggtttttgaaaagacttgggtgttgtgatatacttaagttaatttctgatacatggataaacaaatgtgtatatgggcaaggaaataatatgaagataatttaaacaaaactataaaaagaaagaatgttaacagcactatcaatttgtacaacat

SEQ ID NO: 7189 - DNA, 333 bp, mus musculus
gtccagaagcggcgttaaggtgagatgatcccgaccaaaccccttctctttgccccactgattccgccaccccaagactcctatcctttccttgcctcactcaaaccccctcctcaactcacacccttctcatgaagcctattcctatgcatttcccaccttctttcccaaaaccaacgccctctggcctgactgtgatctccctgtagggcctaaagaccaccaggaaggcgaaaagaccccttcgagggagctcgagccaaaaagccggtgaaactaacacccctgcaggaaaacctaagaaagctagaggaccaatactgcgtggtcgtt

SEQ ID NO: 7190 - DNA, 333 bp, mus musculus; identical to SEQ ID NO: 7189

SEQ ID NO: 7191 - DNA, 1677 bp, mus musculus
ttgtcctaaggggatcacagtacctacttgtgagagggattgtgagaaataaagaaagaaatgcatgccaaatgcctggtgctgtcctggcacagaaggaagccctagcaaacatgagctctcattgttattaatataccaaagaccctataaattagacatgattatttctaaactacaattcatgaatccaaggcttggggaggtgaaacaactggccaaattagcagaaaaaaaggatttgaactcaagtcttcttattcacttattcaagtttagagcgtactccagtccccataccacaactggttaactagtgtatctgtttcctatgacttctgtaaccaattactacaaacttggtagcttaaaacaacataaatttattctctcacagttcttgaggccagaaatacaaaatcagtttcactgggctgaaattaaggtgtcagcaggacccaattcttccagaggctctacaggaaaatccattccttgcctcttcagcctctggtggctgcttaccttcctttgcttgtggctgcatcactcagatctctatctctgtggacacattgccttatccttttctgtgggtgtcaaatctccactgcttcacttttataaggctacatgcgattacatttagggcccacctggataatctagtgtaaattcaccatcctgagatctttaacttcatcacatctgcaaagtcctttttgaccatataaggtaacagagacacattacagggattaagacatggatatcttttgagagccagttattgagtctaccacagctagtatggaaaaacttgtctgggcgacctgcacctagcttggtttctaccccatgccagtttattcaaatgcaaatccatctctattctcctgctggcttagacaactggagccttgccagccaatctgctcccttagcctgcttttgcatgagcctagaacttcaaaagtctgattccagcttcatcctcaagatccacaattgcctttctgcttgggtctgacccttactggtttttcatgcctctccccaacgtatgacctgtacgcccagggaatgcccccaaaagtcaggttaattccatctcattcaacaagggttgatctacattctacagttagagaaggggatagtggtggaaggctctgatgcactcagattgactaggatgtgagtcaaggatttcagggcttacaaccctgggcatcttctctaggataatggtgctttgaggaagttctggagaaggctactgctccacggccggtgctggctgctctgtaggcccctgtataataattttactgatgcttattgaaatacacacatacacatacacacacacaacatacatgtatatatgcacacgtgtatatgtgtgtatatataatatatatacacacataggatgaagtattttgatgaaaagtataggatatatccgtaagtatatgcatatatcctatacttttcatcaaaatactttattggtatattctaattcacatgacaactcaaataataccactcagtggttctcatgcattcatttactgagaacctcctccatgccaggcccctttgcttggggttagggatacagaggtgaatctcctgtggtctacactcttacatggatcacagtttagg

SEQ ID NO: 7192 - DNA, 365 bp, mus musculus
gcaaggcagaataggcctgttgttccgaggaaaaaggtcagaagaaggtcatgggtgggtgaccttggagccatttggtcatatctcttttgcagctgggaggagtgaggaaggttaacagcaaaagctctaagaaaaaaaaaaacaaaaaaacctaaggtctccatttggcattagagtaaaaagagaaaaagaaactagcattttgaagggcaggcagtaccctgggaggattctctcttagactggggacttggaccctgggctcactgtgtgtgagcataaaagcagtgatgggctgaattatataccccgaaacttatatgttgaaatcctaactccaagtacatcagaatgtgactgta

SEQ ID NO: 7193 - DNA, 3665 bp, mus musculus
ctccccaccacactttttcactgtaatattttctgagattgaacaaaattagagaatggtgcactacaggggccagtccgccaagcctgtgtcctctctttgtgttcagtggctgagctctggctgcgggttcctgaagggctccccacatcctccactgtgtcgtggtttggattcagtcctgccccgcacccccagtctccacatgggtggccagggcatggttggttctgggtggtgaagaagacagatagaggcagcctgtacctccatggacagataactgtctgctgagacttttttcttttttatttatttattttttgagacggagtcttgctcgtcacccaggctggagtgcagtggcatgagcttggctcactgcaacccctgcctcccaggctcaagtgattctcctgctctggcctcccaagtagctgggattacaggtgtacagcaccatgcctggctaatttttgtatttttagtagagacgggatttcaccatgttggcctggctggtctcaaactcctgacctcaagtgatccgcccgcctcggcctcccaaagtgctgggattatgggtgtgcaccactgcgccaggcctgagatttttcttttgacttgaatactctcagagtttaactgcagtccatcaggagcgtgtacccagggcattgtttaatagcattgctctgtcagccaatgatacagaaatctgccttcctctccatcctcctgctccctcatccctctcacctagggtcttcatgatctctagatcgtctccacactccactagccatggggcagtctgaactgctcatgttccttttcagctgcctggccctggaacctcaaggatacgtcactatagtaccccggcctgccagctggaaagctccctcactggtggccttagctccatgctccatctgctgggtgcgccccgctgccccaggccgctgcttggccactcctcactggatcctttgccctctaccacagaccaggctagtcatcacttgcctcttctttcctagatggctttctattttgttccacaaagcttccactgcaaatgcttttctcctctggaccctctgagttggccctgccacccttacgacctcaggagtgttttccagaacactgtgatgggtgctcattcagcctagtacttgtacgctgggcctggggagttgggaaggagtcctggctgcaggggtgctcctgcatcctagggtgcccttagccacatctcccctgtacacgccctgcccctgcttgaagcagatcccccgtgtgaatgagccgccctttgtgtcttcacatgtatgaaaacaactagtgtttgatcacctctttcagctcttcccagagtcttccttggataggagagacttgcatctgtgtccctctcccactagccagggagctgctgggacttgtgctgccctggagcctttcccgttgagcgccctcttccctgctcacctagtgctctggcggccctatgttgattgcccaaactagcgtactttgagaaagagagtggaggcgctgctaataatcagtctgtagaattccccaagacactcgatactgcaccggcctgtttgcctgcctgctgcccctacacaccacaggctttgaaaccacagggccctcaggatctagcatggtgtttggcaactaacggagactcgacagatgtgactgaatgaacgcatgagtgaatgaagaggtgcgcccctctgctgcaggccagttccccctgcacatctgctctctccagccccttgaacctgcatttattccttctccctgtggtggctcttgcccctcagcctacagaggactcacacctgcccaccctaaacctgtcctgtccccactggcctctccctcaggtctcccctccacacccagtcctctgggatattgggacagctttctacctactctccccgcctcagtctgccttgtgtccacgctccaccttcctccagagaggccttttgctcctgcctaacagcccagacatcaccttctgtggctgcccgatggctccagctccccacgccctctgccacttggccaccacctgagctcctggcatcaacttagcttccttcttcctctttttaaaaaaatttacatttctggccgggcacagtaacttacgcctgtaatcctagcactttgggaggccgaggtgggcagatcacgaggcagaagtttgagaccagcctgaccaacatggcaaaaccctgtctctactaaaaatacaaaaattagccaggtgtggtggtgcacgcctataatcccagctactcaggaggccgaggcagaagaatcgcttgaacctgggaggcggaggttgtagtgagctgagatgagattgcaccactgcattccagcctgggcgacagagtgagactccgtctcaaaaaaaaaaaaaaaaattacatttatctctccctttagactttgtgctctgcaagacatgtccctgcttgttattaattgatctttaagttattaatctaataactgcttgtcactagattgaatccttccccagatgagaactgagtttgaaggcgagctgtctttgaaatggtccatgtgcccaggaactatgagtgagcgtgagaggttgctggtcccattagcatcttctttcctggctttcagcccaagaagtctatgtgcagggtgacctgctgccctgtcactggagtccaggtccagcactgtcctcctttctgacttcaggtgcattatttgagatgctaaacacaggggcccatcaagcacttctttccagtcagtggtcaacttgggaaccaaagcctacatcccccttccagcaccttcctcttcactgatgtgtatttctacttaggcatcttgctgagttattctgtcctgggtggcttctatttcatctattttggcaacagggaagatgggctacagagtgtcagaagtcactatgttactgaaatcacatagggttaccaggtgatattcttggtgactcaaaggcccgggtggttggtggagtgtcatgaacattagcagaaaatccaacagaaccatgcctgatctggagtgcctttggctaaacagagcctctcgattactgcaggagacccccgtacccctgccacgctcccccttgtgcagcaggttgcagaggtgaagaaatgctgaaccagcagagagggttagagtggtgtcccacaggggtgcacccaggctcagattcttgcccgccgcgtgaggcaggtaacagacctttcctaaaacctacaaactgcgcgacagatctgttcccagatgtggtcaggttctcactcatgtaggcgaagccacctgcaacatcatgatgatgatggaaaccacagcgacagcgcctataacctgcagtcctcttgtgtgccagtgggttctgtacacacatgatcccagttaacgctcccagcaattccacgacgtagagaatgagggaagggtcagagaagcagtgacttggttgaaatcttgctgcccagtgcgtgtagttgtggaaggatgcccccgacagggccagatcccgtctctggcagtgactcaccgcctgatctgcagcagggtcctgagcctcacggggacct

SEQ ID NO: 7194 - DNA, 516 bp, mus musculus
tgctgcgactacagccatgagtatgctcaggcttcagaagaggctcgcctctagtgtccttcgctgtggcaagaagaaggtgtggttggaccccaataagaccaatgaaatcgccaatgccaattcccatcagcagatctggaagctgatcaaagatgggctgatcatccgcaagcctgtgacggtccattcccgggctcgatgccagaaaaacaccttggcccactggaagggcaggcacataggcatagataagtgaaagggtacagccaatgcccgaatgccagagaaggtcacgtggatgaagagaatgaggattctgcacctgctgctcagaagatactgtgaatctaagaagattgatcgccacatgtatcacagcctgtacctgaaggtgcaggggaatgtgttcacaaacaagccgattctcatggaacacagccacaagctgaaggcagacaaggctcacaagaagctcctggctgaccaggctgaggcccgcaggcctaagaccaa

SEQ ID NO: 7195 - DNA, 1629 bp, mus musculus
agaggaaagcagggagccactgcatccagcacatggggtgcctgggcctcagatggggaccccaaagaagcagaagctgaagaaggtacggctgggggttctgtcctgctcatccaaccacccctaaatacccaccctgtggactttgagctgaacatgcccactggcccccaggccacatgggacctggaggagcctacctggggcctgcccctgccagcaggtgccagggctggtgaggaagagctggggggcagaggtaaagccctgcaggggaggccacagggtccatcccgtcttcaggatcatctacactgcactaggggagccccaggaaggcagcaccctggaggccctgtgccagtgaggacaggagaccctaaggccccgggagcccagtgccagccagaggttgtgcaggcaaggagaccaaagattgatgagaagacccccagcaggggtactgggtacccggcaggccagtgccctcacagttgacttggaccagggtggctgtgaagggaagtctttgttgcaaaggaggaggaggaaaagggaggacttggtagggttttgtttcttctgcttgtttctgtacagggccaccagactcctggagagatcaagcaaggagaacctggggctgccatggccaaagcaactcaacagatgccaatgccaattccaaggccagccacaaccctgccaccttggggaatccagcctggaggcatcccctaagcagccagccatggcctgggtggaggcacctgaagacgtctgtcccaaactcccccagccctgagctgggagatgacagggggaaagaggccctctcaagggtgccagatgcctgggtctcccaagaggggtcccccaactcaccgttcccgggacaggctgccccctgttccaggaagctcatcctcacctgtgtaggcccctgtagtgacccacgcgtccagcagacgcccacccaccgctagccgttgttcctgtgcaaagtagtgtgctatgcacccacccaggtggccgcctctgggcccaaggcacatgctgtgagcttcctgtgagcccaggctctgctcactgctgtcccgcgtcatgagcaccacctctgctttccctgtgtagatctaggccagtggctgcttgttcttgtggagctgtgtgtgttcttctctgagcagctcctccccggagtcccccagcacagtcccaggagatgacaggaaggaagcaccagggcaaggcggacgctcaccctgtgaccacgatggtgaccgtgactgtgggaggaagaactggacccaggacggagcggggctgccctgcctgaggctcccgaggagctttgtgctttggtgttccacccctgttgttactcatgactcagtttccttgacctggtagggtgttccctgctgtgttttccagtgtcctgtgactgtcctgtgcgggccatagggcagggccctgtcccagcagatgggcttgggagggggctccctaaagccagtggacactgccagagtctaccttcctggcaagaggcagaccccggggccctcaggaaggagggagttggcagcgggggctgcagcaggagtaggagcagatgaggcgtct

SEQ ID NO: 7196 - DNA, 5071 bp, mus musculus
tttgaaccagaccatcgttcccctttcgatgggatgtggctcctgtggaaaagcaaggctggggggctgcccatcctgtttaccgccagccctttgaatggtggtgacaggattagcaagcttagcgtcaccaggcgtctgaggtccttgaggtctcctctgaaaatctggacctggacgcttcctttttctattggcaagccggagtgaagaaggcagcctgtgctgacgggacccagaggatgcagccatacctgcccagcctggcttccaggcaccctctccggggtcctgaatgttccccgagaagggagaactttccggggatgcagccagggccttcttcgggcggctgtcctgtgtctcttccttcagagcggggggtgcagggctggtgagacctggaggcagagatgcaccctcctccgttactgtgggaggcagggacataagagttgaggcgtttgcccttttcttcccctttttctcacaaacatgccgcgaaagcgtcagggaatcctggcaggctcgggggctttgcaacacatgtgcttgcattccaactggagtaggagcaatggccatgagcgcctgtgacctgtccctgcccagggcacctggagtaggatcaatggccatgcacgctggtgagctgtcactgcgcaggacacttggagtaggatcgatggccgtatgtgtctgtgacctgtcactgtgcagggcgcctggagtaggagcaatggccatgcgttctcctgagctgtcaccacacagggtgcctggagtctgagaaatggcttcgcgtttccatgacctggtaccatgcagggcccctggcataggtgcaatggctgtgtgaaatggtgagctgtcaccgcgcagagggcctggagtagaagcaatagccttgtgtgcctgagagccgacacggtgcagggcgcctagaataggagcaacggccctgctttctcttgagctgtcacagtgcagggcgcctgaagtaagagtaatgtcctggtgcgctggtgacctgtcagcatgcagggcgcctggagtaggagcaaaggcggtgcacgttcgtgagctgtcacagtgcagggtgcctggagtgggagcaatggccttgcgtttccatgacttgtcatcgcgcagggcgcctggagttggagcaatggtcgtgtgcacctgggagctgtcaccatgcagggctcctggagtagaagcaatggccgtgtgtgctggtgacctgtcaccatgcagggcacctggagaaggagcgatggccttgtgcgctgatgagctgccaccgcccaggtcacctggagtaggagcaatggccttgtgtgtctgagaggtgtcaccgtgcagggcgcctggagtagaagcaatggccgtgtttgctggcgaactgtcacctcgcggggtccctggagtaggggcaatggccgttgagctgtcatcacccagggcgcctggagtaggagcaatggccctgcatgctggtgacctgtcaatgcgcggggcacctggagtaggagcaatggccttgcgtttccgtgacctgtcagacctgttaccgagcagggcacctggagtagaagcaatggctttgcgtttccgtgacctgtcagacctgttaccacgcagggcacctggagtagaagcaatggccttgcgtttccatgacctgtcacctctcagggcccctgcagatggggcaatggccatgcgagctgttgagctgtcaccgcgcatggtgcctggagtaggagcaatggccgtgtgtgcctgagagctgtcaccgtgcagggcgcctggagtagaagcaatgtccaggtgtgctggtgacctgtcaccatgcagggcgcctggagaaggaataatggacgtgcgccctggtgagctgtcacggcccagggtgcctggagttggaacaatggccctgagtgctggtgacctctcaacgtgcagggtgcctggagtagaagcaatggccttgcatttccgtgacctgtcagacctgttaccatgcagggcacctggagtagaagcaatggccttgcgtttccatgacctgtcacctcgcagggcccctggagatggggcagtggccgtgcgcgctgttgagctgtcaccgcgcatcgtgcctggagtaggagcaatggccatgtgtgcgtgagaggcatcaccatgcagggtgcctggagtagaaggaaaggccatgtgcgctggtggcccgtcaccatgcagggcgcctggagagggaataatggacgtgtgggctggtgagctgtcaccgtgcagggcacctggagtaggagcaatggccatataagtccatgacccgtcaccgtgcagggcctctggagtaggagcaacgaccctgcgtttctgtgacctgccaccacgcagggcgccgggagtaatagcaatggccctgcatttccttgatttgccaccaagcagggcgcctggagtaggtgcaatgcccatacccacccatgacctgtccccgcacagtaaacatggagtaggggcaatgctcctgcgtgcgcgggacctttcactgcacaaggcgcctggagcaggggcagtggccttgctcacccctgacctgtcgccgggcagggctcctggagtagaaccagtggccgtgcattttcgtgacccgtcacagtgcagggtgcctggagtgggagcaacggccctgcgcaccggtgacctgtcacggtgcagggcacctgcaggaagggcaatgcctgtgcccacccgtgacccaaccctgaacagtgcggatggagtaggtgcaatggccctgcctgcctgtgacctgtccctgcgcagtgcacctggagtaggggcaacgcccatgcccacctgtgaccccttcccgcacagtgcgcatggagtaggggcaatggccctgcgcacccgggacctttcactgcacaaagtgcctggagtgggggcaatggccctgcttgcccctgacctgtcactgcacagagctcctggagtaggatcaatggctgtgagctctcgtgacctgtcacagcgcagggcgcctggagtaggagcaatggccctgcgcactggtggcctgtcacggcgcagggcatctgcaataggggcaatgcctatgcccacccgtgaccatatctcgcacaatgggcatgtagtagggacaatggccctgcgtgctcgtgaaccgtcaccgcgcaaagcacctggggcgggggcaaggctggtgtgcgcccgtgacttttcaccacgcagggtggctggagtagaggcaatggccctgcgggaccgtggcctgtaacctcgcagggcgcctggagtaggggcaatgtccgtgcgtgccgctgacctgttgccgcccagggcgcccagattaggtgcaatggcggtgcctgtcgttgacctgtaaccgcgccaggcacctgggttaggtgcaatggccctgcgcgcccatgacttgtaacctcgcagggcacctggagtaggggcaatggccttgcacgcagatgacgtgtttccccgcagggtccctggagtagaagcaatggcgctgcgggcccgtgacctgtccctgtgaagggcgcctggagtagggacaaaggccgtgcgcgctgctgacctgtctccacgcagggcacctggagcaggggcaatggccttggacacagatgacctgtttccctgcagggtccctggagtagaagcaatggcgctgcgtgcccgtgacctgtccctgccaagggcacctggagtacggacaatggccgtgcgtgctgctgacctgtctccgcgcagggcacctggagtaggggcaatggccctgcacacccatgacttgtaacctcgcagggcgcctggagtaggggtaatgtcctttggcacccgtgacctgacaccgcacaggacacctggagtaagggcaatggctccgcaagcccgtgacctgttgccgcacagggagcctggagtaggggcaatggctctgtgggcccgtgacctgccaccgcgcctggcgcctaaggtagggtcaatggccctgctcgcctgtgacctgtccccgcacagggagcctggtttgggggcaatggacctgcatgcccatgacctgccaccatgcttggtgcctcgagcaggggcaatggccctgtgcgcccgtgacctgtcactgtacaggcagcctggggtaggggcaatggccctgtgcgcccaagacctgtaacctcgcagggcgcttggtgtaggggcaatggccctgcgtgcccgtgacctgccactgagcatggctcctggagtaggggcaatggccctgggcgcccctgacctgtccccgggcagggcgcctggagtaggggcaatggctgtgggctcctgcgacctgtcatcccgcagggcacgcttactctctgaagggaccgtcggtgagcttgggttttccctcttcccaagactcctccttaggtcgcctttgcatctccagtcatcttcacgagggacagaactggctggcttttcgggcaccttttgagaaagctgagagggtgtggtgctctctagttcatgtggtttccttcctccacccagatttgttctctctttcagaatctccagggccacccgaagggttcctctgtaccccatcttctctctgagtggggcaccgagcttcgtctgtgctgctgcagaggcggcaatgtcttccatctcaaacttagttggggtcttcacgtctgtgcttttcaccttgattttttcatctactgcgaggatttgaacttctagagaaatcgccttttcaggcttcgtttttggtgaagtcccacgtgtgcacaaaacctttgctggccatagtcggcctttccaagagcataggacgtactccgagtccatgatgagctgggaaaaggtagctaagggaggccgaggggtctgcctgccacaccctctgctaccgtaggtctctcctaaaccaagctactcttcagagcatcctttgccttcagactgcaaagggggtgcagtgtgggtgggctgtgttcctcctcctgaatct

SEQ ID NO: 7197 - DNA, 4610 bp, mus musculus
aaccagaccatcgttcccctttcgatgggatgtggctcctgtggaaaagcaaggctggggggctgcccatcctgtttaccgccagccctttgaatggtggtgacaggattagcaagcttagcgtcaccaggcgtctgaggtccttgaggtctcctctgaaaatctggacctggacgcttcctttttctattggcaagccggagtgaagaaggcagcctgtgctgacgggacccagaggatgcagccatacctgcccagcctggcttccaggcaccctctccggggtcctgaatgttccccgagaagggagaactttccggggatgcagccagggccttcttcgggcggctgtcctgtgtctcttccttcagagcggggggtgcagggctggtgagacctggaggcagagatgcaccctcctccgttactgtgggaggcagggacataagagttgaggcgtttgcccttttcttcccctttttctcacaaacatgccgcgaaagcgtcagggaatcctggcaggctcgggggctttgcaacacatgtgcttgcattccaactggagtaggagcaatggccatgagcgcctgtgacctgtccctgcccagggcacctggagtaggatcaatggccatgcacgctggtgagctgtcactgcgcaggacacttggagtaggatcgatggccgtatgtgtctgtgacctgtcactgtgcagggcgcctggagtaggagcaatggccatgcgttctcctgagctgtcaccacacagggtgcctggagtctgagaaatggcttcgcgtttccatgacctggtaccatgcagggcccctggcataggtgcaatggctgtgtgaaatggtgagctgtcaccgcgcagagggcctggagtagaagcaatagccttgtgtgcctgagagccgacacggtgcagggcgcctagaataggagcaacggccctgctttctcttgagctgtcacagtgcagggcgcctgaagtaagagtaatgtcctggtgcgctggtgacctgtcagcatgcagggcgcctggagtaggagcaaaggcggtgcacgttcgtgagctgtcacagtgcagggtgcctggagtgggagcaatggccttgcgtttccatgacttgtcatcgcgcagggcgcctggagttggagcaatggtcgtgtgcacctgggagctgtcaccatgcagggctcctggagtagaagcaatggccgtgtgtgctggtgacctgtcaccatgcagggcacctggagaaggagcgatggccttgtgcgctgatgagctgccaccgcccaggtcacctggagtaggagcaatggccttgtgtgtctgagaggtgtcaccgtgcagggcgcctggagtagaagcaatggccgtgtttgctggcgaactgtcacctcgcggggtccctggagtaggggcaatggccgttgagctgtcatcacccagggcgcctggagtaggagcaatggccctgcatgctggtgacctgtcaatgcgcggggcacctggagtaggagcaatggccttgcgtttccgtgacctgtcagacctgttaccgagcagggcacctggagtagaagcaatggctttgcgtttccgtgacctgtcagacctgttaccacgcagggcacctggagtagaagcaatggccttgcgtttccatgacctgtcacctctcagggcccctgcagatggggcaatggccatgcgagctgttgagctgtcaccgcgcatggtgcctggagtaggagcaatggccgtgtgtgcctgagagctgtcaccgtgcagggcgcctggagtagaagcaatgtccaggtgtgctggtgacctgtcaccatgcagggcgcctggagaaggaataatggacgtgcgccctggtgagctgtcacggcccagggtgcctggagttggaacaatggccctgagtgctggtgacctctcaacgtgcagggtgcctggagtagaagcaatggccttgcatttccgtgacctgtcagacctgttaccatgcagggcacctggagtagaagcaatggccttgcgtttccatgacctgtcacctcgcagggcccctggagatggggcagtggccgtgcgcgctgttgagctgtcaccgcgcatcgtgcctggagtaggagcaatggccatgtgtgcgtgagaggcatcaccatgcagggtgcctggagtagaaggaaaggccatgtgcgctggtggcccgtcaccatgcagggcgcctggagagggaataatggacgtgtgggctggtgagctgtcaccgtgcagggcacctggagtaggagcaatggccatataagtccatgacccgtcaccgtgcagggcctctggagtaggagcaacgaccctgcgtttctgtgacctgccaccacgcagggcgccgggagtaatagcaatggccctgcatttccttgatttgccaccaagcagggcgcctggagtaggtgcaatgcccatacccacccatgacctgtccccgcacagtaaacatggagtaggggcaatgctcctgcgtgcgcgggacctttcactgcacaaggcgcctggagcaggggcagtggccttgctcacccctgacctgtcgccgggcagggctcctggagtagaaccagtggccgtgcattttcgtgacccgtcacagtgcagggtgcctggagtgggagcaacggccctgcgcaccggtgacctgtcacggtgcagggcacctgcaggaagggcaatgcctgtgcccacccgtgacccaaccctgaacagtgcggatggagtaggtgcaatggccctgcctgcctgtgacctgtccctgcgcagtgcacctggagtaggggcaacgcccatgcccacctgtgaccccttcccgcacagtgcgcatggagtaggggcaatggccctgcgcacccgggacctttcactgcacaaagtgcctggagtgggggcaatggccctgcttgcccctgacctgtcactgcacagagctcctggagtaggatcaatggctgtgagctctcgtgacctgtcacagcgcagggcgcctggagtaggagcaatggccctgcgcactggtggcctgtcacggcgcagggcatctgcaataggggcaatgcctatgcccacccgtgaccatatctcgcacaatgggcatgtagtagggacaatggccctgcgtgctcgtgaaccgtcaccgcgcaaagcacctggggcgggggcaaggctggtgtgcgcccgtgacttttcaccacgcagggtggctggagtagaggcaatggccctgcgggaccgtggcctgtaacctcgcagggcgcctggagtaggggcaatgtccgtgcgtgccgctgacctgttgccgcccagggcgcccagattaggtgcaatggcggtgcctgtcgttgacctgtaaccgcgccaggcacctgggttaggtgcaatggccctgcgcgcccatgacttgtaacctcgcagggcacctggagtaggggcaatggccttgcacgcagatgacgtgtttccccgcagggtccctggagtagaagcaatggcgctgcgggcccgtgacctgtccctgtgaagggcgcctggagtagggacaaaggccgtgcgcgctgctgacctgtctccacgcagggcacctggagcaggggcaatggccttggacacagatgacctgtttccctgcagggtccctggagtagaagcaatggcgctgcgtgcccgtgacctgtccctgccaagggcacctggagtacggacaatggccgtgcgtgctgctgacctgtctccgcgcagggcacctggagtaggggcaatggccctgcacacccatgacttgtaacctcgcagggcgcctggagtaggggtaatgtcctttggcacccgtgacctgacaccgcacaggacacctggagtaagggcaatggctccgcaagcccgtgacctgttgccgcacagggagcctggagtaggggcaatggctctgtgggcccgtgacctgccaccgcgcctggcgcctaaggtagggtcaatggccctgctcgcctgtgacctgtccccgcacagggagcctggtttgggggcaatggacctgcatgcccatgacctgccaccatgcttggtgcctcgagcaggggcaatggccctgtgcgcccgtgacctgtcactgtacaggcagcctggggtaggggcaatggccctgtgcgcccaagacctgtaacctcgcagggcgcttggtgtaggggcaatggccctgcgtgcccgtgacctgccactgagcatggctcctggagtaggggcaatggccctgggcgcccctgacctgtccccgggcagggcgcctggagtaggggcaatggctgtgggctcctgcgacctgtcatcccgcagggcacgcttactctctgaagggaccgtcggtgagcttgggttttccctcttcccaagactcctccttaggtcgcctttgcatctccagtcatcttcacgagggacagaactggctggcttttcgggcaccttttgagaaagctgagagggtgtggtgctctctagttcatgtggtttccttcctccacccagatttgttctctc

SEQ ID NO: 7198 - DNA, 4845 bp, mus musculus
aaagcaaggctggggggctgcccatcctgtttaccgccagccctttgaatggtggtgacaggattagcaagcttagcgtcaccaggcgtctgaggtccttgaggtctcctctgaaaatctggacctggacgcttcctttttctattggcaagccggagtgaagaaggcagcctgtgctgacgggacccagaggatgcagccatacctgcccagcctggcttccaggcaccctctccggggtcctgaatgttccccgagaagggagaactttccggggatgcagccagggccttcttcgggcggctgtcctgtgtctcttccttcagagcggggggtgcagggctggtgagacctggaggcagagatgcaccctcctccgttactgtgggaggcagggacataagagttgaggcgtttgcccttttcttcccctttttctcacaaacatgccgcgaaagcgtcagggaatcctggcaggctcgggggctttgcaacacatgtgcttgcattccaactggagtaggagcaatggccatgagcgcctgtgacctgtccctgcccagggcacctggagtaggatcaatggccatgcacgctggtgagctgtcactgcgcaggacacttggagtaggatcgatggccgtatgtgtctgtgacctgtcactgtgcagggcgcctggagtaggagcaatggccatgcgttctcctgagctgtcaccacacagggtgcctggagtctgagaaatggcttcgcgtttccatgacctggtaccatgcagggcccctggcataggtgcaatggctgtgtgaaatggtgagctgtcaccgcgcagagggcctggagtagaagcaatagccttgtgtgcctgagagccgacacggtgcagggcgcctagaataggagcaacggccctgctttctcttgagctgtcacagtgcagggcgcctgaagtaagagtaatgtcctggtgcgctggtgacctgtcagcatgcagggcgcctggagtaggagcaaaggcggtgcacgttcgtgagctgtcacagtgcagggtgcctggagtgggagcaatggccttgcgtttccatgacttgtcatcgcgcagggcgcctggagttggagcaatggtcgtgtgcacctgggagctgtcaccatgcagggctcctggagtagaagcaatggccgtgtgtgctggtgacctgtcaccatgcagggcacctggagaaggagcgatggccttgtgcgctgatgagctgccaccgcccaggtcacctggagtaggagcaatggccttgtgtgtctgagaggtgtcaccgtgcagggcgcctggagtagaagcaatggccgtgtttgctggcgaactgtcacctcgcggggtccctggagtaggggcaatggccgttgagctgtcatcacccagggcgcctggagtaggagcaatggccctgcatgctggtgacctgtcaatgcgcggggcacctggagtaggagcaatggccttgcgtttccgtgacctgtcagacctgttaccgagcagggcacctggagtagaagcaatggctttgcgtttccgtgacctgtcagacctgttaccacgcagggcacctggagtagaagcaatggccttgcgtttccatgacctgtcacctctcagggcccctgcagatggggcaatggccatgcgagctgttgagctgtcaccgcgcatggtgcctggagtaggagcaatggccgtgtgtgcctgagagctgtcaccgtgcagggcgcctggagtagaagcaatgtccaggtgtgctggtgacctgtcaccatgcagggcgcctggagaaggaataatggacgtgcgccctggtgagctgtcacggcccagggtgcctggagttggaacaatggccctgagtgctggtgacctctcaacgtgcagggtgcctggagtagaagcaatggccttgcatttccgtgacctgtcagacctgttaccatgcagggcacctggagtagaagcaatggccttgcgtttccatgacctgtcacctcgcagggcccctggagatggggcagtggccgtgcgcgctgttgagctgtcaccgcgcatcgtgcctggagtaggagcaatggccatgtgtgcgtgagaggcatcaccatgcagggtgcctggagtagaaggaaaggccatgtgcgctggtggcccgtcaccatgcagggcgcctggagagggaataatggacgtgtgggctggtgagctgtcaccgtgcagggcacctggagtaggagcaatggccatataagtccatgacccgtcaccgtgcagggcctctggagtaggagcaacgaccctgcgtttctgtgacctgccaccacgcagggcgccgggagtaatagcaatggccctgcatttccttgatttgccaccaagcagggcgcctggagtaggtgcaatgcccatacccacccatgacctgtccccgcacagtaaacatggagtaggggcaatgctcctgcgtgcgcgggacctttcactgcacaaggcgcctggagcaggggcagtggccttgctcacccctgacctgtcgccgggcagggctcctggagtagaaccagtggccgtgcattttcgtgacccgtcacagtgcagggtgcctggagtgggagcaacggccctgcgcaccggtgacctgtcacggtgcagggcacctgcaggaagggcaatgcctgtgcccacccgtgacccaaccctgaacagtgcggatggagtaggtgcaatggccctgcctgcctgtgacctgtccctgcgcagtgcacctggagtaggggcaacgcccatgcccacctgtgaccccttcccgcacagtgcgcatggagtaggggcaatggccctgcgcacccgggacctttcactgcacaaagtgcctggagtgggggcaatggccctgcttgcccctgacctgtcactgcacagagctcctggagtaggatcaatggctgtgagctctcgtgacctgtcacagcgcagggcgcctggagtaggagcaatggccctgcgcactggtggcctgtcacggcgcagggcatctgcaataggggcaatgcctatgcccacccgtgaccatatctcgcacaatgggcatgtagtagggacaatggccctgcgtgctcgtgaaccgtcaccgcgcaaagcacctggggcgggggcaaggctggtgtgcgcccgtgacttttcaccacgcagggtggctggagtagaggcaatggccctgcgggaccgtggcctgtaacctcgcagggcgcctggagtaggggcaatgtccgtgcgtgccgctgacctgttgccgcccagggcgcccagattaggtgcaatggcggtgcctgtcgttgacctgtaaccgcgccaggcacctgggttaggtgcaatggccctgcgcgcccatgacttgtaacctcgcagggcacctggagtaggggcaatggccttgcacgcagatgacgtgtttccccgcagggtccctggagtagaagcaatggcgctgcgggcccgtgacctgtccctgtgaagggcgcctggagtagggacaaaggccgtgcgcgctgctgacctgtctccacgcagggcacctggagcaggggcaatggccttggacacagatgacctgtttccctgcagggtccctggagtagaagcaatggcgctgcgtgcccgtgacctgtccctgccaagggcacctggagtacggacaatggccgtgcgtgctgctgacctgtctccgcgcagggcacctggagtaggggcaatggccctgcacacccatgacttgtaacctcgcagggcgcctggagtaggggtaatgtcctttggcacccgtgacctgacaccgcacaggacacctggagtaagggcaatggctccgcaagcccgtgacctgttgccgcacagggagcctggagtaggggcaatggctctgtgggcccgtgacctgccaccgcgcctggcgcctaaggtagggtcaatggccctgctcgcctgtgacctgtccccgcacagggagcctggtttgggggcaatggacctgcatgcccatgacctgccaccatgcttggtgcctcgagcaggggcaatggccctgtgcgcccgtgacctgtcactgtacaggcagcctggggtaggggcaatggccctgtgcgcccaagacctgtaacctcgcagggcgcttggtgtaggggcaatggccctgcgtgcccgtgacctgccactgagcatggctcctggagtaggggcaatggccctgggcgcccctgacctgtccccgggcagggcgcctggagtaggggcaatggctgtgggctcctgcgacctgtcatcccgcagggcacgcttactctctgaagggaccgtcggtgagcttgggttttccctcttcccaagactcctccttaggtcgcctttgcatctccagtcatcttcacgagggacagaactggctggcttttcgggcaccttttgagaaagctgagagggtgtggtgctctctagttcatgtggtttccttcctccacccagatttgttctctctttcagaatctccagggccacccgaagggttcctctgtaccccatcttctctctgagtggggcaccgagcttcgtctgtgctgctgcagaggcggcaatgtcttccatctcaaacttagttggggtcttcacgtctgtgcttttcaccttgattttttcatctactgcgaggatttgaacttctagagaaatcgccttttcaggcttcgtttttggtgaagtcccacgtgtgcacaaaacctttgctggccatagtcggcctttccaagagcataggacg

SEQ ID NO: 7199 - DNA, 1322 bp, mus musculus
cctgctagttccaaactttatttaatgaaatgtcccatattatagaaacgtgcaccgaagatgcaactcttttgtcaatccttcacttcccaccttccacatcgaaatactctgctagcctgttgttgttttctatagccattgtacaatatttggtactgtgcaacattgggtatcatagctcacttacatattttagctcatgcattgtggacttcaaattacaggtttcataggccaataattattttcttaataaatgcatgtatgtgtgtctttgttcacgggcactggtagatgtaatatgaaatgtataatgatgatgagatatacatactttagggaaaagttgtacaaaacctttcttagacgagggtatatgaacgtacaggtttaatgccctcttctttagagaactcagagtactgggttgtcaagcacaagtgtcaactgaggaccccgaacaaaagtgagaaggaatcaccaatgaccctggcacttcaatctccccttaactggacctgccagcccatgtcacaaaacaggtgtgactgggcaccctcaagcccaagtcaatgcctacccacatccccaaatgcagagtctctcctctcttcctctctctctttctctctctctctctccacacacacacacacacacacacacacacacacacacacacacacacacgttggaaactcaaggagcctggcattgatgcatagaatccatgctcactgcctctacacattcctgcaaatgtttctgcttccagtacaaatgctgttttcttctccatttagtttcttattttaaacatagacagggaaacatctaaagggatgtctaaaatttctaaataggaaatatagtaagcatcagcaatcccatcacccagaaatgcttattgcaagtatatgagtccacacactccagaatttttgtcctgtttatacatgtatatttctacaagatatttaaaagcttaaagtttgcacagccatttgaatattcttcagtattggcatctggcaacatctttacaggtgtgaaacagtttaagggactgcctcctacagaccaccaaaatatccattgcagctaagttcggatggccaaagccatgcctccttaagagagatcatcagaagggaagtgtgtgaaatcaaaatatgaaatgttctctcaccacatgcgttggcccatcgcccaaataccttctatcaagggtttgcatatagtcttgctggtgactttctccccatattttgtactaagggaaacacaattgttttccctccctctagagagagagagag

SEQ ID NO: 7200 - DNA, 1290 bp, mus musculus
tcccatattatagaaacgtgcaccgaagatgcaactcttttgtcaatccttcacttcccaccttccacatcgaaatactctgctagcctgttgttgttttctatagccattgtacaatatttggtactgtgcaacattgggtatcatagctcacttacatattttagctcatgcattgtggacttcaaattacaggtttcataggccaataattattttcttaataaatgcatgtatgtgtgtctttgttcacgggcactggtagatgtaatatgaaatgtataatgatgatgagatatacatactttagggaaaagttgtacaaaacctttcttagacgagggtatatgaacgtacaggtttaatgccctcttctttagagaactcagagtactgggttgtcaagcacaagtgtcaactgaggaccccgaacaaaagtgagaaggaatcaccaatgaccctggcacttcaatctccccttaactggacctgccagcccatgtcacaaaacaggtgtgactgggcaccctcaagcccaagtcaatgcctacccacatccccaaatgcagagtctctcctctcttcctctctctctttctctctctctctctccacacacacacacacacacacacacacacacacacacacacacacacacgttggaaactcaaggagcctggcattgatgcatagaatccatgctcactgcctctacacattcctgcaaatgtttctgcttccagtacaaatgctgttttcttctccatttagtttcttattttaaacatagacagggaaacatctaaagggatgtctaaaatttctaaataggaaatatagtaagcatcagcaatcccatcacccagaaatgcttattgcaagtatatgagtccacacactccagaatttttgtcctgtttatacatgtatatttctacaagatatttaaaagcttaaagtttgcacagccatttgaatattcttcagtattggcatctggcaacatctttacaggtgtgaaacagtttaagggactgcctcctacagaccaccaaaatatccattgcagctaagttcggatggccaaagccatgcctccttaagagagatcatcagaagggaagtgtgtgaaatcaaaatatgaaatgttctctcaccacatgcgttggcccatcgcccaaataccttctatcaagggtttgcatatagtcttgctggtgactttctccccatattttgtactaagggaaacacaattgttttccctccctctagagagagagagag

SEQ ID NO: 7201 - DNA, 247 bp, mus musculus
atgaagacgtcagttctgtttcaaaagggcatgcattcaagagttggggaggggaacaggataaatcacttgattggcttaatttcctatctgtgtttgtgtttccaggttgacattaggagtgcataggtcctgagcatctacacgcggtgccactgggtcgccagaagaacagcgcacttcaggggcacagagtggggttgaagggtctgcacaccagcgcttgcagtgtgagcagcaagagatc

SEQ ID NO: 7202 - DNA, 673 bp, mus musculus
ggtgcagcgccaaggctggacccaggcttttgttacatttgtccctcctgcttcacccacagctcctgcctcacctgcagctcctgcctcacccacagctcctgcctcacctgctgctcctgcctcacccacagctcctgcctcacctgctgctcctgcctcacctgctgctcttccctcacctgcgcctcctgcctcacctgctgctcctgcctcacctgcgcctcctgcctcacctgctgctcctgcctcacctacacctcctgcctcacctgcgcctcctgcctcacctgctgctcctgcctcacctacacctcctgcctcacctgcgcctcctgcctcacctgctgctcctccctcacctgctgctcctgcctcacctgcgcctcctgcctcacctgctgctcctgcctcacctacacctcctgcctcacctgcgcctcctgcctcacctgctgctcctgcctcacctgttgctcctgcctcacctgtgcctcctgcctcacctgctgctcctacctcacctacacctcctgcctcacctgcgcctcctccctcacctgcagcttttgctactgcttgaccctggggctgtgcaggaaaactgggcatatcctgaaactcaataacaggtacttggggcaggaagatcactttccagggccccccattg

SEQ ID NO: 7203 - DNA, 423 bp, mus musculus
tgccagttgggaggacgggaggtccccctgaggctgcgacttgtccgctcagcccactgtgtgcccaggattctgaacctctggggcactccctcctgtcccgagtcacccagggtctcctgccccctccctgtgtctgctccatcacatcccctctcaagccccatgcctggcagggccaccgccctagggctgggctaggtgaaccaagggcaccggtcccccaaacctgccgatcgtccccaggctgcagggagggacacatgtggggcggcaagggcagaagataaactagggggatccgggcccctgaggacagccctggcgggaggccacaggcctcacagggtggtgagctggaggccacccaggcaggcaggcaggcagcagggaaagagactggcacggtcctggccagggccc

SEQ ID NO: 7204 - DNA, 176 bp, mus musculus
aaatgagtagattctcacgggcaaagacgagaggatggataaacaaggatttgccaaggagaagaggccaatgtcatattttctccctcagtgtgtccggatgggattggaaagtctccctggcccacataggtaagaattctgttgctcatcttctgcacaccccacctctattc

SEQ ID NO: 7205 - DNA, 1188 bp, mus musculus
tggctcttttctcaaagttaaatgtgctgtgcacccccattgaacatgggaagaattaggattgcccagagtcaaaccttcctcattctgtcaaggatggagatgagaggagccagtcttccttcctgcttcccacatgtgtactgcaggctgaaatgttcctgtcaccaaagcttgcctgggtatgcaaaggtaatagtcaactcacttactcaagggaggactggtggagaaacaggcttccatggttgcagaagaaattctgagaagcctttgataatttatctagtccttcattcataaatataagcaaacaaccaaggatcaccagataagaagaaaacactagtacctgccccctaaaatggcaagaatgaggaaataatacaaaatattaaaggaacagaaaagattttaaatggtttccaattagtatcctgagagaaatttaagaaagtaattcttctataaaataagagcagactatcactaaaaaggaatttaaaagttctaaaataattctggaaagattttaaaatgtgaaagttcatatttaaaaaatgtttaacttaccatgattgatttttctgatacttgttgtaattaaaggctttttctgaagcagttttaaatttacataaatactgagcaatagtatagagtgttttaatataaaccttcatcccaataacagaaagcatatttgaaaaaacctagtttacctggagattaaaaacatgcttctgacagagcgcgttggcttacgcctgtaatcccagcattttgggaggccgaggcgggtggatcacgaggtcaggagatcgagaccatcctggctatggtgaaaccccatctccactaaaaaaaaaaatacaaaaaattagctgggcgtggtggcgggcgcctatagtcccagctactcgggaggctgaggcaggagaatggcgtgaacccaggaggcagagcttgcagtgagcggagatcgtgccactgcactccagcctgggcgacagagtgagaatctgtctcaaaaaaaaaaaaaaaaaaaaaaaaaaaaagtcttctatataacacatactctgcagttgttatccatcttatctataggtgaaagaagtctctcaagaactaataaaataaagacacgactgctctcaatttgtgggatgcagttaaagcagtactcgg

SEQ ID NO: 7206 - DNA, 239 bp, mus musculus
gctgccagctgagggccccagctgagcacccaggccatggaagaaagctgccttgcccaagctcatgtcccctcccggcgcagtccacgcctgatgtcggcttgatgtggagaacgtgacccaggctctgtctgaattcaggacatcccaggaggcatctccacgcatcggagctcccgtggcctaggctggagcctcctcggaggcctctgtgccactccctcccagggtgggttatc

SEQ ID NO: 7207 - DNA, 5381 bp, mus musculus
ggagccactggaggccacaaggaaagggagaccttatcttaagcaattaatcaagaaactcatattttgggacaattattcagagttaattctaaaatagctttagagccccaggtcttgagatatttttttccagaattttgtcaaggtcatttagagcactaggataatcttacattagaataaagatttggttaaaggtatatatattagtctctacctagaaatatgggcagcatgaaaacatagcatcggactacataactgtagttgtaattttttactctattttcattttttttggtagtaaactgcacaaaataggataaggctttgtcccagagatgggcagcctttcccgatgcacagtctgaagtgcactggcctctggcacccgtggcattagaggactggattgcagtttttggagttaggtcagtttgtctcaccttatgaaatgtgaacagagggatgctaatcctgtttgcctagtgagtttttgtttgtgtgccatttcacagaataactgatttcctattgggtgtggttgttttaaatctgaccagtcatcttatttacttattactgtggcattttttcccattagtggattaaaaaaactgttattttccaggtcttttgtttgtttgacttacctaatttatcttgtttacctgcatagtgagcattttaagacctttcctcagctttctctacctgccttccttggtatcttcccttcttctagttaagtggattccctttggccgcagacactctctagatgccgcagggaggccaggcctgccctcgcactgcagccccctacctcctcccacccctacagtaactacccacccggctacatcctgagaaggctgtcccagcagcaagggtgtgcccttgctcctctgcccctgaaatgcttgttcatgacatcatcacacagctggtcttcctcctgaatcagctctcagctgaaacatctcttctccatctttagacagtgactgtcctgtctaaagtcgccctttttctctccacacacattatcccattttactgtctccctagcacttactgtgaattttccttttgtatttgttgttgcctatctgccctgctagtaaaatctatgaatagagaaaccttgtcttttgtttgttaacctccgcattgccaggcggacacagatcttaacaaatatttgttgaatgaatggatggatgagattgccttgaccttgttatgcacacctgaccctgactgtcctcctgccttggcctcctctgtggggctgaagccaccctctcgggtcatccataacgtcactgcatcctctacacagctgctagagtcatctttctcgaaactagatcaaactattttaaaactaccggtgacttcctatacccttcaaataaaattcacactctttcccatgatccatgaagctctcttgacctacccaacccacctcctttcctcttgccttcacctgctccttcccatgcctcagacacaaaactcgttacgcagtatggctgtccacatgctgtccctgcacctggagtactttccctggcttgtctctgactggctgttttggttattcccatctcagtttcattaatcagtattcacatagttgcttcattctatttaagaaggtggtgggccaggcaccatggctcatgcctgtaatcccagcacattgggaggccgaggcaggcagattatttgagctcagaagtttgagaccagcctgggcgacgtggccaaacctcgtctgtatgaaaatacaaaaattatccaggcgtagtagcacatgtccttggtcccagctacttggaatgctgaggtgggaggatcacttggacccaggaggtggaggctgcagtgagccatgattgtgccactgcactccatcctgggtgacagagtaagaccctggtctcaaacgaaaaaaaaagaaggaaagtggcactctacatcactaccaccttcccagttgttattttccattcctttatcctgtttatttcaaagcatgtatcacaatgattataacaactttttttgtatatttgatgcttttctaatattggacacaatggaatacttaccctactcgttaaaacttttctttttttaaaaaaataattatttgtttgtttttggaggcggattctcgctacactgcccaggctggtctggaactcctggccttaagagatcctctcacctcagcctcccaaagtgctggcattacaggcatgagccacctcgcctggccacaacttttctttcttatacttgcttatactttctcttcattgttgttgttttaatcttttctgattttcctccaactcattggctgtcccatctccttctccggcccctcttctgctgttattgaaatgtcggcagccctagaatcctgcccttggttctctgctctgctgtgcaatctgcaggtcacctttcctgcatgcacggcccctccagcccccaccgcaggccggatagtgcggttaagagctttccatcagcagctgtgagggccttctctgggttaggcgctgtttagactctgggaatagtctaaaaggtgtagttccttccagcatgaagcttattgcattttggtgagggagacaaaaaatagctaagcaaacattctgtggtgttaggtaagggagtgcagtggcaatgaggccaggtaagaaagctactgggaggcgagttgattgcaatgtgcagtgatcagagacggcttcactgaggggtgacattagagagccaaataatacgagagaagcagccgtgagccgacctggaggaacagcactggggctgctgcgagagcgttggggagaagcttggtgagtttgagaagcatcgaagatgccagcatggcttgatgaaggcagctaagaaggaggatggggccagaccttccaagacctcagaggccatggcaaggagctggggctttattccagtggtgacaggaagcactggaggcttttgagcagggaaatgatctgatttgggattcggagttggagagtcaattccagcctcatccatcacatggctttatgtgaagaagcagcggtcatatttagcattttcttagccaacagtctaactgaaatcacccatgtacagacaggaaatgacgttcacaattctatgttgacgcactataacttcctgacataccttttattaaagaaagtttaaattgtctcaagtggttttattgttaaatatagtactttatgactctgattttttttttttttggagacagggtctcactctgttgccccggctggaacgcagtggtacgaacatagttcactgcgacctcgaactcttaggttcaagcaatcctctggccccagcctcccgagtagctgggtccacaggtgggcaccactgggccctactaattttttttttcttttcttttctttctttcttttttttttttttagagacaagatctttcttgttgcccaggctggtcttgaactcccagcttcaagcagtcctcctgcctcagcctcttaaagtgttgggattacaggcatgaaccagtgcgcccagccttcgtctgattttaagaatgtttattctgtatatgatggatgtgataactttctattattactcatagatggatgaactgttctgctgctctccctggttcctcatccaggccaggaaagagttgattgtaatttcatagcatttttctcataataatctttaaatcctgaattgcttgttttgtggcttttgcatatggatggtctcctagtgtgttgggtgttttgactcaccaaattttgagagactagcagcagattttacaggctgcctcctaaataggaagatgtttggagttgttggaatgagacagggatagatacataacaaccaaaagcttaaatactgatctttttccctatcaaatttatcactgggtactgaactaatgtttatcttaccagttcaaacttgagtcaccctaaatttgtttttctttcgaatcttgcttcctaacagtcattgtgtcattatactgagctttctttattaaatggttttgttaaaatctccaggattatacatgcatagttggggaaaagagggaaaaaagcaagtgtaggaacagcttcctcagagggactgacgcgcagaggtgctgggcgggtggggagcaagagctgtgcccggctgctgccgccgctgctgacagccgctctcgggtcaacagtgtcaggatgatttcccattacttttttatcgactgctcttgatgatcctgtgaagtaagtgggctcagcattattgtgtgagtgtctgtgcgtgcacagatgaagaaccttgtgctcaccatcacagagaaagaggaaggggctggttctgtaaatcagagtccacttgccctttgctgtttccactgtaacgaaatgctgccttaataataaagcacagccggaaataaagagtgggctgcttagcactgtccccaggacagaggccatgtggcaggcaagtcagcctcttcgacaggattgtgtaccaggcctactcatggatgcctgggtgtcttatatataagtggacacaagaagggagagaatggagcacttagggcaacagccaagcaggcccccacctgtcctagcctttccctttgcatcgcattatgtaagtcctcccttctttgacacttggattttagaatgtccactttcatgttgctttaataactagaacaatgtcttcattttacatagaaggaacacagtaagaatttaatagtaacttgaaacaactgtaaaattccgttgatcctgagatatcagttgtaagacacaccattcatttatgtaccactaaggtaaaaacaaacaaacaaaaccaaaacattgccaattagactgtgaagcaattctttcttctataaaacatttttttaactgcatagaccaaatacttcaaatttcttaaatggtttgttgactgaaacatagaagggttgcagtggccagtcattctaccaggagtaacagtcaagttcacccatcggcaggcagtgactgcgcatcaccactgcctgtccaataaagataggaagatactactggttagaaaagatggcccaatttcagagatgcacatttttgttttcacattttaataaattagagtcaatgatacatggtgaaatcgtttctctcatttttctaataatagcactgctggagaaagtacttattattagcctgtaatggtggtttagcagcagaaggcagatgtggttcccgtatcagtgaagctttgttggggaaacagac

SEQ ID NO: 7208 - DNA, 159 bp, mus musculus
ctactacatttaccaagaagagcgttttgtagcaagacatctaatatccctgcaattgtttttgcgcttatactgatataattcacaaagttcatcatcatatcattgattcattgctctgaattcctcaaataacatggtactatcaatataatgaat

SEQ ID NO: 7209 - DNA, 358 bp, mus musculus
tatgtatgtacttatagtacttacgtttttcactagctgtttatataactgctttttcactttgggatatttttcacggtgtaggttgtgattttatctgtttgcttttccctttttgggtacaatgggttatttagcatcattttcaaaaaatcagttgaggttgctcatttaaacagccttttctagttgcagtatttgttcaacttgttctctataatagctcttcctgtaaagcaaagaaaggaaataatttggggtttgggtataggaaagggaatcttgtgatatgaatgggtatggaacaaaccaagtgaaatttaaatatattagatgggtttccccagagactcttgct

SEQ ID NO: 7210 - DNA, 968 bp, mus musculus
gaaattgcttgcccttggcttcctctcttccttcctccctgtggactggaacttgaaagtgatagtacacataaccttcaaaccaggcaaagaccacagcctagagaatgccatagcaaggagagagaaggaacctggcttcctgttcatccctggaatgtcacatgagaaagaaacaagaccttatctcatttgagccactgtattttgaggcctcttcatcacagcagcttagcctgaacactaactgataaaccagagatccccaggactgtagatggcatttgccatggagaaggagctagaagtccagaggtttaaatcctcacctttctccattgctaacgtcctttgtaattttggacaagtcactgaccctctcaacctcagttttctgccctgaaaatgaggacaataagttgtcttggctcacagagcagctgtgagccttacataaaacaatcactgtgaaggctcgttgaaaaatatagaaatgttacaaaggcagagttaacagtcaccgggaacttagcgcactaagatcacagggtggatttctatgaaatctttgttctctgccccagagctttgtgttcctgactttgagccaagggcaaagggctgctcaggagaaactgcccaaaaatgcaaaccagcagacgggtcttctgtctgtccctcagttccactttaggggaaatcattctgaagttagggcgtttaagtccccttccccatctgtctcaaaacactcgccagagaccagagaaccttggagctactcagctaagtgcatgctgggtaaatctctcacaaaatcactgctcccctctatgccactgtgggccacttttcccaagggagtggcgcagtgcaggcacctccatgtaggatttactgtcactctgccttggcttcaaaccccactcccactggctctgtgctctgggaaggtcacgtatgttcac

SEQ ID NO: 7211 - DNA, 3208 bp, mus musculus
tgctcttttgctcacaagacaccctgttcctgattacataccaaaattgtcatcatggtttgccagaaatctataatgatgtcgtatcgtttgaaaagtgtctcaatatgtttttacagctttagagaatttctcctgcctgctcaacttacagttgccattctacaaccatccatttggccatctcttagacgccatgccatttatttattttttgttaagtctcatcaagcagagttgtaataaaaaatattataagatactaaaaaaatgaagtagaatttcacggcatttttgtctctgttttagaggcataaaactcttgcctctgtatatgtgacctttgaattaacctttaaacccttgttctcataagtctttataaattgtgtggcaacagttttcacagatggcctcccagtgaactgtgccatccaatattcaccctcctcttgagtctgggccggctctgtgactcacttttcacaagattgtgggggaagcgatgctgagtgatttctaaggctagatcctaagttttgcagcttccacctgggcctctgaaatacttagcgcactccctccggacactcaggtgccatactgataggagcccaagtcacatggagaggccacatgtagctggtctggatgacaacctcagctgagtcctcagacatcagccagcattcactgctgttgggcatcctgaatgtccagcacagttaaatcttcagatgcctcaggccccagcagtgtgaccccatgagaaatcccaagtgaggatgtctcaggtgagcccagtcaaccccgtagaaccatgaatgtcataataaattgtgtgttaagcttttgagcttagggtggtttgttatacacctgcagacaactggaatgcattgattaaaaatacagcgctaaggcctttagcatggtttagctaaaactttaataaatagtttcatcaaaattaacagaagggatgtatgaaaatgtcaagttatagaagaatggagtgaactgtagcagatcccagggtattcaaggacattttttttttcactaaattgctacttttgtctaagtcttttctttgaggtagggtcgttactttgtgaaacaacataaggacttccatctctcggagtctgtaaagtaaatatagttgcaattgcacttgacttcgatatgaaataagtccttggccacatactttggctaaaaaagggaaagaagtggtggtcacaagtagccaggctaaagaatcaatgaaaatgggacaatagatgagaaaatatatatatatatatatatacacatatatatatatgtatatatatatatgcatatgtatatgctcagcttctattttctgtttgtttatacttcatgaaaattacaggtccacaattcctcatccacaaagctctgaaaaccaaaagtgtttttcataagttgggcacctaaattcttttggtagcaatagaactttcctttggctattaagggtctttatcttatttaatattaacactcattttgttacagaagtctttgtttcatgacaaggtgctggtacagatcccacttatgacacctttaaacagtacaccatacatgtgttgtgtcacccttctaaaaatcaaaccttctgatatctgagacacttctggtttcagacctaaagaagactctatcatagacctgaagtgaactttattgtacagggaggacagtagagtgtagagtaatcaagcagtctttggagttagaccacctgagttcaaatcctggatctgctgcttgccagctctgacacttggattgattgcaaaaccctctgcttcagtttattcttctacaaaatacagagagtaaaagaaatgacctcagaagggttcttatgagaaccaaatgagattatgcatgtaaaatgcttagcccaataactagtagttggtaaacactcaccaaacattaactattattgtattattattaaaatgtcagttgtttgttttggtttttgtttttgcttttagagacatggtctcactctgtggccccaactggagtacactgaagctcactgtcacctcaaactcctgggctcaaacaatcctcccacctcagcctctcaagtagctgggagtagaggtgtgtgccaccatgcctggctatttttttattttttattttattttattttattttatttttatttatttatttattttttagagattgggtattgctttattgctcaggctagtctcaaattcctggcctcaagcaatcctcccactttggcctcccaaagtactaggattacaagaatgagccactggacccagaaaaaatgtcagtattttataaattcaatgaaacaaataatatttaaatgagagttcagccaggaaaaaagaaactactcaaggtatcaccaacaggaagatattcaatatagggaatcagatgcatacaaagtctttggaaggagtgaatgggcaaaagttgagaaggtagcactactaatttcaggttattccatatcacctgtggacccagtgtcaggaagctgctgtactcagagatcagaaattgcaataaatgacaggtaatcaatcactgtccatgtcacagctgctctccttgcagctcagaagctggggatagccagggatggtctttggggtctaacttcactgccaacgtttatatttgttggccaggctcggtggttcgtgcctgtaatcccaacactttgggaggctaaggtgggtggattgcctgagctcagaagttcgcgaccagcctgggcaacatgatgaaaccctgtctctactaaaatacaaaaaattagccaggcgtggcagcatgtgcctatagtcccagctactcaggaggctgaggcaggagaattgcttgaacgcggtaggcagaggttgcagtgagccaagattgcgccactgcactccagcctgtgcaacaaagcaagactctgtctcaaaaaaaaaaaaaaaagtttatatttgtcaaaccccttgtgtcagctgccactgtcacagaaagaatgacatgctccttgcgtctttcaaatccttgagtgcacctcattggcacaacctaaaccttatcagaactgtgctggcaggagactctgggaaatgcagctccaggcctcccagcctctgtgatacacataaca

SEQ ID NO: 7212 - DNA, 1222 bp, mus musculus
ctctcggtcttggttcgttacagctcagctaccgacccatcgaatcatttttccttcctgtaacctggttgccttattcttaaaataagaccaacaatagctttcctgtgagaagaaagtggaatttgtacagttgcacaaatatttttgaaaagtcaaagatttactgtagtaatgaattggacgatggtattacttatgccaaatatatttcctaccttgtaaaaatagtatctgaggtaggaaccgagtagttcctgtgtgctgtttcatcccgtcatctgggatattatttctccaccttccttctgtgaatctttctgtctgtgctcagctttttcctggggcctcacctctgctctccgtttatgcagccctccctgacacccctggtgtagctgcgtggaaaggcacccagaggccaccccatgaaggaaatgcacagagcttgttttgtaaataaatgactgtttcgtggaggtgccacatcaagggagagagacaagatcagaaaccgggagatgggccaggcacagtggctcacgcctgtaatcccagcactttgggaggtggaggcaggcgaatcacctgagggcaggagtttgagaccagcctgggcaacatggcgaaacctcatctctactaaaaataaaaaatcagccagacgtggtggcaagtgcctgtagtcccagctactcgggaggctgagacaggagaactgtttgaacctgggaggtggagattacagtgaactgagatcatgccactgcgctccagcctgggtaacagagggagactccatctcaaaagaaaaaaaaagaaaagaaactgggagatggagctggaaaggcaggtaggatggactgatgaggctagagaagctgagagtttgaacaagacacaaatagctgagccgaggcagttcaagattttgggaggcagtgcctcttttggagagatctctgttttgtttttgttttttttgcataggacaacacattccatagtactgggtactgagttgaacctagcataacaaaagcggtcactcacatccctttggttgaggactttttagtgcaccaccaatattcatctcatgtgccagtgggagttaataatcatgagctagccagaagttttgaatgagatttggaatttccttaagcaaggcaatttcagataattggtggttcctggactgcctaaaggaaggggattt

SEQ ID NO: 7213 - DNA, 1222 bp, mus musculus; identical to SEQ ID NO: 7212

SEQ ID NO: 7214 - DNA, 1141 bp, mus musculus
agggggtacatagctggcaaagaataaagctgcaattcggacccattaactcattcattaaatcaacccaaactcattcgcagctgtatatcagacactggaaagattctggagatagaaacagacgtgacacaatttcttccctccaggaactgcccatcccgatgaacccccaacttgggccactccatctgtgcctatcattgctcttcagtaggagagcctaggttcggtgaaagaggggatggttaataggtacaaaaactagttagaaagaataaaaaagatacagtattttctagcaaaacagggtgactgtagtaaaaaaataattgaattgttcatttaagaataactaagagtataactggattattcaaaacacaaaggataaatgcttgagggaatgaataccctatatatcctgatgtgagtattacacactgcatgcctatatcaaaatatctcatgtaatccataaatatatacacctactatgtacccacaaaaagttaaacattaaaaaaattttaataaaacaatagtagagcttatctgctactgtttacctatggtccaaagtcagatacttctcccagtggcaaccgagttacctcctctcaaaattcccctcccatagagttaacaaatgaataaacaaataaaaaccccagcacccatgatgcagttatcccacctgagttgagctcaagattttctttttcccctttgctgacttttttggtaaagcgaaaaaaaaaaaaaaaaaacacaactttcttttacatttgaatactgtatacagggaatgggcccaggaaacctaaacggagacaagcaactcaaaaataaaagacattcttcctatgatatcatatttcctacttgttcagggccttccttggaggctcctaatgtacaacgtaaatgttaactcattcttccttctggtatccttgggaggcaggaagccgatgttatttcatagataaaaaagctgcagtcccggaggttgaatcccttcccccggggtcacataactacaggcagtgtgaagggctgggaatggaacttggggttaggactccctgcctgtggtcccctggctctcaagtggggcctccttcctaagagataactt

SEQ ID NO: 7215 - DNA, 715 bp, mus musculus
tatttttgttttctgtgaattgcctattcaggcttcttgcctgtttttctattggaatatttcttgtcatattcattatttggttagctgtaatacgccttatttttagaaagagcacaggtgtgtttcctctatgaaccctcacatatttcagaatagctttctatttttatcatgaacgattaacaactttattgatatatcttgggtctcatagcaaagcagaaaaagttcatccagacttgggtttcctcctatgtcaggcagatgtgcactccctgaattccctcacaatccaccaatttgaagttacaatcttcctgcagggcttaaaccaccaggctgattagtaaaattttcagttcagttatcgctcagcctgtgtaactgtagataaagcctggaatatggggagccccgagcagaggaatcctatctctgagcagtttttcctttgtaattgttaccaagcaaaactgttgggctggtgcttccaggcctccatacctcacttagcccacctggtactttggctaagtcgtgagaccctcacgtacaactgactctctgtgggccattaccatggaaacccaggaatctccatgctacttctgtagaatgcagcttattccaagtgggggaaggggtttcacatcttacactctctgcctcatattagcttccacttcctcccctattgttagtgagtattagt

SEQ ID NO: 7216 - DNA, 806 bp, mus musculus
ccaccaacaaggaatgaagtattaatacatgctatgacatgaatgaatgtttaaaacatgtttagtgaaagaaaccagacacaaaagacaacatattttatggctccatttatatgaaatataatccagtagacactcctagaaacagaaagtagattaatggttgggggccgggaggtagtagggagtgactgctaataggtacgaaatttttttttgaagaaatgaaaatattctggaattagataatggagatatttgaaaaactcagtgactatactaacaacctcttaattgtacactttaaatgggtgatttttatgctatgcaaattatatccataaaaggattattaaatcaaagaaagaactgtgaaataatagcagccacagcttttttaaaaagtgcactaatacatgcatttctctgagttctgtggatattatatgtgtacatgtgtgtgtgctgagcataacacataatgtgatgtgttactatctcactgtgtaggcaatataatgttatagaatatttttggctccaaattctcttttgttaataaaacttcatggagaccttagtgatttacttatgaaatgaccgctgtgcccttactaaaggatacatcctttcatctctggaaattgtgattacaaatgatttctttaaattgttctttgtctttttaggatttcctgagaagataacagtgaaacagcgttatcgcctacttggaaatagtctcaacgtgcatgtagtagctaaactaatcaaaatcttatatgaataattttgaaataactctg

SEQ ID NO: 7217 - DNA, 816 bp, mus musculus
tgtaggaattcagagaactagactttaatccaggtatatcttttgtcaaaagaatatcttggtagatatgtgatttggggcagctccatgtatctttctgggtcgtctacttatttatgcattgtaaggctaatgtaacatgatcttttgtagcttgtataaattttctgtttcatatcatctacctctgcctaccttaactatccctgccattcagcctgaatagttcacctatgtcactgaatggacctgggtaccatggtactgaaacttgggtgcatgatttctagcatgtagttatagcagtgtactttctgaacgtaacctgggggtactttatctccattcgtatctggtgagccttttgttctgagtgattttatcaggaacatctgcattccaagtagaagcgcttcagccatagtactttaactttcattggtgttgatttgaaaacagaaaaataaatagttgtaactctgggacagatactgtatttgtatactgcttcaaactaaaggaggtaagtagcatcagactacatgaaattttattcttgatgttcttgtatgcaaagtggcatcttggtcttggtgaactgaaaatgttaatgtcaccagtatactacacttgccgttctttagctgttgtattgctgagatgctagagtactatggaaactagtagtttccatcttttgtgctggctaaaattgtctaccaagtaaggtgcaaaaccagcagtgattttttttttttttgcatcacaaatatttggcctagaaaaatgccattatatactgcttagttacaagtt

SEQ ID NO: 7218 - DNA, 478 bp, mus musculus
taatgctctttgataagaccagtagtctcctcagatgctccaccatcagccacgtgcttctgcgcctggctttgagtaacaggctggccagctgcaagagaggcacagccaggcattgccctgacagctgacaggtggtgtgggcctggagtgagggaaataatctgcactctggaaatttgccatactgcaacctggcccatggaagaacccaaggatgcatgagctccagctcctcacctttcatcttagagagaaatatgggctgtgagagttggccagaggaggtgcatatgtccaggaagcacacctgggagctcaggctggacgtgccaccacttcctctttggctgcaatgcacacatctggctattcccatcagtggttagcaagaggcaaagagatgcttggctcagcatccaagagaactcagtcacccaagagaatgttaacactgatgcattgacctgcctcctat

SEQ ID NO: 7219 - DNA, 682 bp, mus musculus
aaattcagtaatgactggaactcttacttagaacatggctagtttcacaaaaagctggatatattaaaatgtatttacttttgtaaaaactttaaaagtaataagctaggatattcatataattgttttataattatgatactaataattttctcacaactctgtattttattattttaatatatacgacattaaaaataaggacattattcaagaaatatttcaaaagtgttcaaaagtgactttctgcaggatctctcatttgttttttaacttctctttgaaggtgaccgaattataaaagtcaatggagaaagtgttattggcaaaacctattcccaagtaattgctttaattcaaaacaggtaagagtcttaaaacattaaaacccaaagatgggttttatagatcaatagagcacatagatttaatacaatcttctattcttacaaggaattgtggtgacaaggagatgtggaactttcccttagatataatgcatttgagagttgccaaggaccagctatctgaggatagcttagttggtggctttggtttgacagatgtatcagatttatgattaaaatcccatagaggctgtaaggcacacactttagatttactgtgtttaccccttttatttgaagtgacaaatgtataatttgtttttaatatataaata

SEQ ID NO: 7220 - DNA, 243 bp, mus musculus
cacaaagctgccagcgcgggtaatgtggcgaaagtgcagcagatccttttgctcaggaagaatggcttgaacgatagagacaagatgaacaggtaataggcgtcgcaagcccggactgagtgccactggagtaggcgggcaggaagaggggccccttttgtgggagccacccagggcctggatcagcctcccgcgggctccgtagcccctgggacggtgacaccttgcagggctccagcgccc

SEQ ID NO: 7221 - DNA, 1705 bp, mus musculus
gtaaaaaggggtttctaaggaatattttctgcttcctttctgctccattttaagttttctgctaacttgccgccgaccccgcaactgctcacgacctctgtcaaagtcaacctttcccaccgcgtggagtgagttagggtgcacactcgggagttgcataaaagtgtttgagaaagggagatgcaaagttgaataaaagtgtttcccgggaggggccgagcggaaagcagcaggtggccggggcgggtggaacccagcgcgggcgcagagcgtctctggcgcgggcatacggtgcaacgggtccgcgggaatcttggatgcgcggaggtcccgagaccagggtaacggactgggctgcggtcgcggccgggtgaggctgggagcggaaggcggcggcggcggcgcccgggggagggcacgggccctgtaggcctcccacaagggcgccggcgtgcgcggccgcagggcgcgcagtgttgacccgcgtcctagcaacaggcgggcgccgactgcggggggcagggtgctgcaggtgagtgcggctgggggtctccacgctcacccccgcaggggttctgcagccgcccgcgtggatcgggaaacagaggcggctctctggccccgccgctgccgctctcgcctgctcccctttccctcccggggaccaagacccgcccccttcccttctctctcccagccccatctcactccttcctccccgcgagaccctgcctcggccctaggttggggaccgtctgctcctcagtccctgcgcccctctctgcactacctcggccccatcacctcccggatccgctctccacttctcccgccgcttccctgcctctccttcccccagcccgtctttctcctccgccctttgcagctctgcctcccgctcccagcgtggttttcgccgtcccttccctcctcgtccccttaccgaatccattcctggaaacttagggtctcagctctgacgcccccttcttgtaacgagtctggtgggggccgtcatcccacactaggcttagctttggttttacttagggccctgttcatgtcatgtctaaaagttcgattttctgtcggtcttactgagtaacttctgcattctcagaaagcagtgtatgcgcggactccccgtggatgttaccaaccacatttcatagatctcagagctgatggctgcctttccgtagccccctaaagaattcggttgtgcttctgtttaagtgttaacgatgtgattaccgaatgggtttcatttcactaatgatgctggaagcttgaaattgacctttagaaagaaaaacaatctgtggtatctattggataaagagaaaaatgagtgctaagtgattcccagtttatgtaaacatcccagtttatgtaaacacgtaaccaaaacttttttccttttaatctttaaacttactttctttacttcaaaggtgtgtgctgtgtatttacatggattcattttaactatggttcttaagccaaaagagcttggcaatgggcagaaaccggggagcaactggtcttgattttaaaatcttagttttgagttatgccgaccatttttgaacaccatttatttatttatttattttctaataacattgatcttgccttctggattgtcataggccaccctgaggttttcttaaactcaccaaccttcttgaataaaacttgtgca

SEQ ID NO: 7222 - DNA, 1240 bp, mus musculus
ctgtctattaatctatccaatgaaaccacagtgctggacatcaataaaggaatcacagagcgtgaaatacatgctggtagaaagaaagcagatggacaaatatgaaaagcaaacaaaagtaaaaacagaggaggagattctagagataagagagggctggagaagctccaagctcagagtcatccaacacaaaggacagggatgggtcagagggcacccatcagagtgtttatttaaagttctgaattcaggactttggaacccccttcttcaactagagcttttccttctcctctctttcttctctagtccaccgtgcaatttcaaagcaaacatgggcaaattatggcaagtggataaaaccaaatcatctctaaagaaccctaaccctttagagtaaggggatataggtgctgggcctaaagaaaaaagctggaggtaaccctgggcctgaggaacaaaggctaagtaagacagctttgctcaggtgtgaactacaccaaagttctttattccctaacaatcttggggatctctaggttgcctggtctatacaatagggaaggctgcctgacagcactcccactcacttacccagtgtatgcacagaactccctcacttaagaaagagtcccgagaaacccatgctatctgtgctaatcagctttgtccttgagccataggtattgacatggtttggctctgtttggctctcccaaatctcatgttgaattgtaatccctggggattataggggagggacctggtgggaggtgactggatcatggaggcagatttcccccttgctgttcttgtgatagttaatgagttctcatgagatctggtggttttaaaagtgtgtggcactttccccttcacgctgtctctcttctgctgtgtgtgaagaaggtgctggcttcccctttgccgtctgccacgactgtaagtttcctgaggcctcccagtcatgcttcctgtacagaccgcagaactgtgagtcaaacctcttttcttcataaattacccagtctcaggtagctctttatagcagtgtgagaatggactgatacagatataacactagatatttgattatgccaatttcagaaaagggaaggattaatatgaacaaacagaacaacagattctgaagaaaatagatataactcagggaactaaaaataactaaaaaaaaaaaaaacccctttttttagtgttctcggaacaatttaggatgata

SEQ ID NO: 7223 - DNA, 630 bp, mus musculus
tttgatcgaggagagttggagggatagggagttaaacattccaagaactgtgtattgtgcaagagaaaggcagaaagaacaactgagtaaagtcggtggctcacaactgtaatcccagcactttgggaggctgaggtggtggatcaactgaggtcaggagttcgagaccagcctaaccaacatggcgaaaccccatctctactaaaaatacaaaaattagccaggtgtcatggtacacacctgtaatccccattactcaagaggctgaggcatgggaatcgcttcacccctgggaggtggaggttgcagtgagctgagattgtgccactgcactccagcctgggcaacagagcgagactctgtctcaaaaaaaaaaaaaaaaaaaaaaaaaaacaagtaaagaatttgttaattcaggaacaaagttaaaaattgaaaagtagccacagagccacagaagaatagaagtagaataacagaatatataccttcccaagaagcagtcaagtaagtaagaaaaggaagaagaaaacataatcattccagtagaaagcagaaaagaacaaaataagaaaaaaagaaaatgtatatatatagtaaacagaaaacacaaaataatatggtagaaat

SEQ ID NO: 7224 - DNA, 247 bp, mus musculus
actttacatgtataatctttgattttcataactactttatgagaaaggtactattataccccaattttaatgagaataaactgaagccaatagaggttaagtaatatacctggctgaggtcatataattagtaaatggatgaaacaggttttgacccaaaggtcaggtagtctcactccggaacttatgtccttcatcattatacgattgataataatacttcgacaaaaagatacctcatgtttct

SEQ ID NO: 7225 - DNA, 875 bp, mus musculus
acattaataatgggctcagccaattttccaaagcaagacttccactctgtcgttcaggatcattacaggtgtccaactaccattacatgctctgctaaaaccaactttgacacaaaaaacttcaggtttaataaaccaggtttaccagttctaattatctgtttttcaatatgaaattctctttagtagattttttagtttttccatcattatacctagatactagtttctaaatccaacaaaatgtataaatcacataaaactcaaatgaaaaggaatacaatcctaaggctagtaccactacaaatattcccgttttcttcttcccagctgtaaagtccgcctgctaaaagaaccagagagaagagacttttttcacattacatgcgttatttattattcttttttatcactgatgcctatttgaattatagttacaccacctaaaatagactattaaaatatttctggatgagtcaaggaacttctgttttattatattttgtgagttgtgatgaccattgtgtgcagataggtcaactatgaaaaaaaattgatgttccacctcaccagatatacccctacaacatatatatgttcttaatatatacttgaaagttatgttattaccacaaactatctagtgtgatttaaatttgcatatgagattgcattatatggaaaaaatagttaagaaataaggtagcataagtctgtgcctcagttttgttattacttgctatatggtcttggtcaaatcactaaatataactaagcctcaatataatgaggcttatatgattgttaattgttaattttcctttcaatttgaattcctatgttgctgcaatctggacactttattataattctac

SEQ ID NO: 7226 - DNA, 422 bp, mus musculus
ccataattgttatgacccctctctcaaaacacgcacacactcaaagattaaagaaagaatccacttcaagtctgattttggccagagttttacacagttggggtatactcctaccatctgaggttattaaaaacaaaccaatcattactcaatttgtccctcttggagtctctttcctggtagcagcatttaggatcaactgggatcctgagttcccaaactggcctgttaacacgaacacgtttatcagtatttggctcaaggacaaagcactaaaacaacagatggaatcaatattacattttacaaagcgattacatcgcaaaatcaacagttctttgtaatgactgatggtgattgtgtaaatttcttctgctctcagcattttcttcttataagaatgtctaagtaagtgccatagg

SEQ ID NO: 7227 - DNA, 1495 bp, mus musculus
gtggggctggagcccggctggtcctggtatcctgggcttggggggaccctgctcctttccctgggagccctgaggcctcaactggatgacaggaggtggatatgctggtccctgaggcacaggcagtatgaacctctgcatggagctgggtctcagcagaagcccacccaagcctggagtttcccagccagggatgcacctttttcatcccagcagcctctgtccctcagtcctgagccctcaggggccctcagggcatgaaagcaggaatcccaaatccaccttccagaattacacgggctgttcttggtggtcaggtggcctctcggggccagggtcctttttaagactggaacctctccaagctcaccagcactctcagtgcacgcacgcacgcacacacacacacacacacacaccaggattttaaactcagtccaacaaatctcagcatgcaccagaactatttcagcattttaagagcctgtattgattttggaaggagccaggcagcgtgtgaaggccattctgtctgggatcctatgctgagtctggggtctctgtatgagggattatccatgtgtggggagccttcccccttcagagctttccagcttccctctgatcacatgtcctgagcacactatcccaaacctaaccccagctgggctctagcaagagacgaggtcctgtcttgctgggaaagggtcatccttcccacccggaggcccctgctctgccccagtttcctgccacaaagcccagacagtcctgggaacctgggctggtgagtccctccatcaccttcagaaacagccatgaggagctggcagtgggatggcctgggggtaggagcgtggcttctggagctagaccacatgggttcagatcccagcggtgcctctaactggccacaggaccttgggcagtcagctgaccctgcccagtcccagcatcctcatctggtcttagctaacagggacacacctgaggaggtggtcttcatgtcacttccactgggaccagttttcagagcagctgcaggggtcatcagttaaggcagtacagcccacttacagaggaggcgggtggcttggggtgtgaaggacgtgcccaggtgacatgctgctgagtggccccaaccccatccaggcaccaagccagagcctgtccccagggaccccagggcacatcagcagaagctggaggatgtgggtctcctgggcctggaatctcagagcccacattggttaatttcacacgtccgcttgactggcacacagggggcctggatgtttggccagacattatgctgggtgtgtgtcaggggggctctgggtgagatgaacacttgaatccatggactgcaaagcagacagcctcccagtgtgggtagacccatccaacctgtcgcagacctaagctgaacacaaaggccaagtaggagataattcattctgcctggctgccttaagctgggagcttggtcttttcc

SEQ ID NO: 7228 - DNA, 825 bp, mus musculus
ttgatctcgagttggaagaggtgagtcctgtctcaaaatggaggtaaaaccgccgcctggttgcccccagcccgactccggcagtcgccgtcgccactggggggaggagggccatgatccaaaggaaccagagcagctgagaaaactgtttattggtggtctgagctttgaaactacagatgatagtttaagagaacattttgagaaatggggcacactcacagattgtctggtaatgagagacccccaaacaaaacgttccaggggctttggttttgtgacttattcttgtgttacagaggtggatgcagcaatgcgtgctcgaccattcaaggttgatgggcgtgtagtggaaccaaagagagctgtttctagagaggattctgtgaagcctggtgcccatctaacagtgaagaaaatttttgttggcagtattaaagaagatacagaagaatataatttgagagactactttgaaaagtacggcaagattgaaaccatagaagttatggaagacaggcagagtggaaaaaagagaggatttgcttctgtaacttttgatgatcatgatacagttgataaaattgttgttcagaaataccacactattaatgggcataactgtgaagtgaaaaaggcccttgctaaacaagtgatgcagccggctggatcacagaggggtcgtggaggtggatctggcaattgtatgggtcacagaggaaactttggaggtggtggaggtaattttggccgtgatggaaactttggtggaagaggaggctatggtggtggaggtggtggcagcagaggtagttatggaggagg

SEQ ID NO: 7229 - DNA, 523 bp, mus musculus
caaaaccatgtttctttcaatactaggtgctgtgttcagccaactacagctagttagcaacctccctctaagttttctttctgcccaaaactctctacttcaatccccagcagccagatgtcttgcctgtgtgtcctgggtgagaatgttccaaaatgcaacagctcacttgtggttcttatttggtgacgtagctacgtcatttcttatagagagcagttcagttattatttaggagcaggagttctaacgtgaacatattgcttaagggggctgatatcaaaatgtatgcactaccaggcacatacattagccagtcaagcattctccttcacattgtcttttacttcttcattgttccttacacagaagcctagtatgcattactcgaactctcagtgtattgccactaagacttttatttcaaaaaaaaaaaagggggagttgagagctatttttagaagcttgtttcctatgtatttctgtgctatcatttctttctgtgattaaagcccaaaaagaa

SEQ ID NO: 7230 - DNA, 1271 bp, mus musculus
tggaagatttatatttcacctgatcacttttaatttgtcttgtcccaatagacagaaactccagtggtaaactcagtcaaaatttggtgatatttgttaagcttaaactctggaattgttagaattactttgcaagtatttcccccaaatttccccccatattatctttgtttgcatttatactttttaaatttaaacatgaatgcaattttggtgggttgaagagatattaaaattgaatagttaacagatatctgtaattttttttctgatcatctctaaattttttttccttctacacacagaaaattctgagctgtacacctctaggaaatgaaacactagttcagaagaagcctgtaaactctcttacaaatacatttggttattcaccatgaggttagcaaagcctaaagcgggtatttctcggagctcaagccaaggaaaggcctatgagaacaagcgcaaaacaggccggcagcggcagaagtggggcatgactattcgatttgactcaagcttcagtagactcagaagaagcttggatgacaaaccctataaatgtactgaatgtgaaaagagtttcagtcagagttcaactctttttcaacaccagaagatccatactggaaagaaatcccataaatgtgctgattgtgggaaaagtttctttcagagttctaatctcattcagcatcgacggatccatacgggggaaaagccctacaaatgtgatgagtgtggagaaagcttcaaacagagctcaaatctcattcagcaccagagaattcatactggagaaaaaccctatcagtgtgatgagtgtggccggtgtttcagccagagctcccaccttattcaacatcagagaacccacactggggagaaaccctaccagtgcagtgaatgtggcaaatgtttcagtcagagctctcatctgaggcagcacatgaaggtgcataaagaagagaagcctcgtaaaacccggggcaaaaatatcagggtgaagactcacttaccctcttggaaagctggtacaggaaggaagtctgtggctggtctccgttaagtatagggctttttgacagctttttgagacctcttaagaaaaaataaaaagtaaaaaatgaaaggaatcttttttagaaatagagatgctttatagtagatcacttaaatactggatcttttgctagtgtgaaaacattgggaatttaatgacattattgagctgaaagaaattacatgagtccagctaccctcatttcttt

SEQ ID NO: 7231 - DNA, 708 bp, mus musculus
ctaaattttgcaaatattttttatttaaaaataaggctcacatttatggagagcttccaaagccaaggtgcctgagtgtgttgcccagtgtccagccgggagcatgtggaggagctgggatgctatggtgatagacagacctcaaagcccatcttgtaactactctgatctataatcacatgggggaaaaaagctttgtatttttaaaaaaacaatgtgcatcccgcagccagtaatcagtagcatttcttttaatagacacctgaactctcagctgacaaagaattcaccagggcaacatgtactgactcatgtaccagccccatcctggatcaagaggacagctggagggacagtgcctccccagatgcaggggaaggcctgggtctcaggccagagtcttcccaaaaggccatcagagaggcacaatggggccaaaacagagagagaccttgggccagttccttgacacattctcctgagtcccaccctcatttatgcaaacttcaccaagaaagggatgaatcaacattggcgacctctttggaaaaggatgtgaggcaaaactgctattcagtttgtgatatcatgagacttggaaggtaagaatcaccacatttgcagacattttgtaaactgtgtgcatctcattgctaggaaattgtaatcaagccatcaataactatgcttggatgattttgtgcccag

SEQ ID NO: 7232 - DNA, 708 bp, mus musculus; identical to SEQ ID NO: 7231

SEQ ID NO: 7233 - DNA, 708 bp, mus musculus; identical to SEQ ID NO: 7231

SEQ ID NO: 7234 - DNA, 1295 bp, mus musculus
aacagcacaggccaagattaaatatatttccccctcaatttaacaagttgctgaccacaaatataaatatgtgcgtatgtgtttgcggccccgtgtgcagatgcacactgtatgtgcgaagccgatctggcgttctaactcttctctcacatgctccacacaggccacaagtgggagaagaacctggccttgagtcgagagctggacgttagcattgctttgacagggaagcccagcaaaaccagccccgcagtgactgctctggccgtgtccaggtaagcgcggccttgtttctctgggtctccagcagagggcactgcagccacctttaggaaagccccagtggctctgagtccaggccacctggccgaggaggccacttcactccaggacatggccccaccaagcacaggaagcagcccgtgtggccatatagagccccaggaaacgtttttcagggttttgttgttgtttgttttgcttttaactcacacatgcccttgctctcttgctcttgaatatccaaacattcattaagaaatccaagaggtataagtatattgttttgtaattttatcctaaagagagccttttcccctgagttccactgcagactgtaacatttggtgtgatgattatccttcattaacagaaagtgccttctgagggctcttagctgctgtagcatagccaagcatcagtcccgacacttcatacccgttatttgactcgcagtaacccatggaggtggttactgtcattaacatccttgtacacactgcgaggtgcagccttaggggccgctgaccttgcagagccggacttccttcctccctcactggcgtggcgtgggctgttccggggtccttggtggaggcactacacagtgttttagatgctgggtggggcggagtggagtggggtgggcatgatggtagggccagagccgcactttttgcagagaacttgccatttgttctgccctggtcctggctatttctctggtgggacaggagactcacctggaggcactggagagaggcacggcctcgtcctgttccctggggcctgagcttccccacagtgctgtgggagccaccaccctcacagctcaatgctttcccctcccccaggtggaaaccttctccattcctcccactgcctcccctgcctcaagggagacaagaccaggggcaagctccgctgggccccagatagagccccagagttgcaatatcccatgtgctggcggggacaagtggtactgtccctctaacgttcttgtcttttctttc

SEQ ID NO: 7235 - DNA, 4160 bp, mus musculus
agcttttcggagactgggaagcccaactgcgaagaataatgaagctcattgctggaggtggcttgtctatcactggctctcacaacatgtgtggggactatctgtacagcggccacacggtcatgctaacacttacctacttatttatcaaagagtgtaagtctaaaagacttccattgtaatttcctcacctgccatttctcatgaactctggtcctctggtaaagctcattttctggaaaatctgctgaagcaagactggaggcttcaggaggcttgcagcttcatctcatcgccatgcaactggcacccagggaaatatgtggaaggacagaactggtcttcctgaggacgaggtgtcctggagtgtcatctgtagtactggggtggaggcagttccaagcacagcctgcagggtgtgttatgagccagttatacagctgctgtaaggagccagatggaaatctcaaagggacacagaaatccagtatcaagcctgattgggtgatggtagattatgtgttgatgcagcaactattttttcagcacttggcactatgctacatgcctgagggtacagtgatgggtcagactcatccctgtcctcaacaaggccatgggctcagggctgaggcagatactaaatgggaaatttcccttaagaaacgtacttaaaatattttattgtgaaatcacaaaataatattataaataccgcatacatggctcagatttaatatatattagcattttgtcatatttaattcagataacccttttagaaaggaaatgaaatgttaatatatgattaaaaccttttcattcctttcctatatcatttccatccatttttttggacttgtgtattattgttttgtggttttttaaatttatatacataaatggcatactgccatttatattcttctgccactatttaccctcaaattatgtttttgagatatgagattttggtccattcactttaattgctattaatattacagtgctagaaatgaactacacatatttattcatttctctacttatggaaaattttattatgctcaatatcacattgttagaaacagtctgataagcattatacaggggggtttccatgaagagcaatgagtagaaccaggctgctgtggtatcacagaggagggagatgctttgccttctggaggtgtcttgggagcatgtggtactctctggaagtttaagtgggtggaattcagagtaggggtaataataagaatggacaggtaagtgggaaccagatcacagggggtgcttaagccacaagaagagggtctgaactctcagctgatgtagatcgggtgcccattgaggggttgtaaccagtggggcagtgtcatttgtctttgaagagagaaaaatcactcttgcagcagcttgcaggatggactggatgggggaccaaactggagaccgggagaaaagttaggagattgctgcagtaacaaaggaaactagcctgatggcatcagggatggagagaagtgacagacactttaagacattaataaagagagtcagcagataacaggatggattatggggtagagaaaacaggtagtggactgggtcgaaacctagttttgttcttgaaaaactaagataaggaaatacaggaagggaagagagatgcacttcagggcactgagatagaaaagggagaatagatgttccagtgcttatacttagtacgtgagcagatatagtgagttctagcaagatctgttcagaattgtcagggcataatctagcctttggactggaatgtaactggatgtggacagtaggaatcacataggccagatgtcagcacccctgggggagggattcctggctcctgctgcctgatacctgaaattctttaacggggtcaaggcttatccatcttgacaataaggcaatgtgtcatattgagaggcagaggcgttggtactatcacttactagctctatgaccctgggaagaaactttaacctaagtcttagtttcctcatgtttagaatgagatattcacatctgcttcatcgggtgggaaaaagtttatgaacattaaaattagatggcatatatggatactaatagagtcacacagagactgaatggtagctgtttcttgtttttgtattgtcaaggtatcaaatacaaatattactagaatattcctaccctaactgctccatttaaaattgcaaactgcccttcactccctatacttctgatcccccttatccagctcaactttattatttttccacagcctttaacacctaacataatgtgtaaattatttattataagtattgtctcttatctctcttccccactaggaagggatcttcccacaaaggcagcctccttgccttttttattcattgatccaggtatctagagcattgcctgtccctggcatgtaagaggctcaatgaatattggttgaatgaatgactggttcttggacccattgagaatccaataaaagtctgaacctgtcatgctggtgtagagagtatagatcatattcaaacaacattttgcctaacactgcagagcctctgaatcccacaattgagaatccaaggtagaaaggcctgcactaatagaaattttgatgtttttctcaggtaatttcccaaatggggatacagacaagtatttatctgacaccattcgacctttgagaaggcacttgaactagaattcccaggcgtctggatgcttttctgcttgtatttgagaaatgaaaatctcaaagactttcagattagtgtatggttgcagaacttggaaagcagtacagttaaatcagttatgactgcttagtccttgtattaggctctgtgggccaaaaggtattgatttttgtgtagagcatcaaccccaaattagctagaggtaaatttaaatgtcaatggacagtttttaaaaacgaaacatgatgcattaacctgtccttatttgattagcctcatcttttaaactctatttatgattgtatgaatcaagtaagaaccaaatatgaattactatcactagtataatcacatcataaaaagctgtttctgttctaaccttggttacagataaatgacagcccttagattcactagatctgttttcagaagggaagactcaaggtaattggattcagaagcattagtagaggcatagttgggtgcccttaatgtcatttgaataatgggactattgcaaatctctccccctttcagattcccctcggcgactctggtggtatcactggatttgctggcttctcagcgtagttggaatcttctgtattctcttagcgcatgaccactacactgtggacgtggtggtggcatattacatcaccacgagactcttctggtggtatcacactatggccaatcagcaagtgagtttccccgcttttgattttagcttctgttgtttctggcttgatgttgctggcttggacagggtgcaaagaacctgtggatgtctgaagtttctctttcttaagtagtaatcaactaagattgtattgtttttttgtgacattgattctcttcagaattaagaataaaaagtttattaatataatgatgtgaggaattacttccttctagaataaggaacgcactttcattgtccttgaaaaatgaaaaatattttctaagcttgtgtccctccttgcttgatttgctttcctatcctcttctccctacccggggcacatcacaagcttaatatttaacatttaattaagtgttaacatttttagcatagaagaggaatacctaaaaagctaactgaggtgtttatttataagcaagagatgagtgagccataagttctccttgccctcccagaattggcgttgtttttctactgggatgtggctcagtttgtagatgaatgtggagtgtagaatggtgatgagagagagaagctgggatatgtgggtggacacgcagggcaggtatggagtcctttgggaattttagcgtggcaagtatttgaacttaaagtgaaagattgtaagaaatgtgtttatgtttctttgttatcctaggtgctaaaggaagcttcccagatgaacctcctggccagggtgtggtggtacaggccatttcagt

SEQ ID NO: 7236 - DNA, 465 bp, mus musculus
atgggcagcggctcctggacatgatagaaaccctgaaaatggagcaccatttggaagcacacaagaacggccatgccaatgggcacctcaacattggcgtagacatccccacccccgacggcagcttcagcatcaagattaaacccaacgggatgccaaatgggtataggaaagagatgataaagatccccatgccagaactggagcgctctcagtaccccatggagtggggcaagacttttctggcctttctttatgcactttcctgtttcgttctcaccacagtgatgatctcggtcgtccacgaacgagtacctcctaaggaggtgcagcctccactaccggacacattttttgaccattttaaccgggtgcagtgggccttttctatttgtgaaattaatggcatgatccttgtaggactctggttaattcagtggctgctcttaaaatacaagtaagtca

SEQ ID NO: 7237 - DNA, 1485 bp, mus musculus
ttgaatttaatgctgttcagtagtcaactcagttgagcaagcacttaccaataatcattaactagatgccacatctgtgatgaggtgctgagtttacacaggcaaatgagccccaagccctgtttttaaggaaattaccatccatcagggtggaccaaaccatgtacagccagctaaacttcagcaacaggggagatctctaaggaggaagctattacataggagatgacatttgaattcagccttaatgtgttagcagaatttggtctagtgtggaagacagaaagcccaaggttttatggcagaggcttaagaacttcaccgacaacttcttatattctccttaggtcagagcctggtccaaaaggtatagagaattggcagttacccacaagtctgccccaaagaggttctttccaaccacctgccacagtgagtcaaacaaactccgctgttggagatcctttacttaaagaggtctccctgcggtctagactagtcacagtgaaatcccatcagaaagggggccatagtaatctattgctggcttttggctaatgactgacatgacttcctttttgtcacttgatatttcactgtcataccaagagagatgttaaccgcagttaactgatgagaaacgtgagctgaagcagcttgtgtcacttgccctaggatgcagctctaggattcagtcaatgtctgactgtgctggttttccactacagcccatgtggcctactatgaggacatggagaccccataaacttatggcccctgagtctcagccctcaagtgtggttagcatgccaaaatggtaaatctttgaatactcttggattgtttagctctttaaatgtttgaggtgctcttatatacattatcatttgatttttactttaaaaacaactcacagaataaacgactgtagttttaaatagagcattgttgtcacacagcacctttggggagcccatacattgcttgaggtggtcaaagactggctgagttgctggggccagtagtagggagtgggtacatctttagcagatcccatgaattgtccctcatgggatctgttgtgggggattaaatggttctcttcctgtctccaactaagctgaggcttactgtaaccagaggagccactggcttggaacccctggttggaacataagttctcttgggcattgccattccagggtattagggtattggggcctgaggcccctgaggatagcatgaagccatctggggacttctccatgagaacttcttgtcactaagtgcgtgtaattgctgatttagtctagcctggcaggcccagtggttctggtaagtggtgttattataccaggctattggctggtagttggctaatttgaggaaaaaaagaggtggttggattctatggtaaattcagttggatgcaagtgataggatttgccacagggatcataaaaatcagggtgctgttcagggtgc

SEQ ID NO: 7238 - DNA, 1414 bp, mus musculus
aaatatactgtaaccaaaaaggtcgagaaatgccaccttaaaaaaaagtcatcatgcaaatcaagaaattggacacgtgcatatccttattctaatgtggctacttctcttatatttaatccacatgattgtttacattcaagcctttgtggattattactctctgtaaggcttctgtgcatcttcctttcaaaaagaattttcaaaaatatacctttatcctttgttagtttgtgttgtaggaattcagatttccaaagtactgagaaatcttctaattttaagctccacacatatttatgtccctggaaagtatgctttttaatctcattcttcgagaaaattatctctgctttccttattacttggcttctgcatgccttgttttatgcatactttttgatatggtttggctgtgtccccacccaactctcatcttgaattgtagctgccataatccctatgtcttatgggagggacccggtgggagataattgaattgtggacggttcccccccataccgttctcatgacactgaaaaaaatctcacaagatctgatgaacttataaagggaaacccttttgacttggttctcattctctcttgtctgcttccatgtaagatgtgccttttgccttctgccatgatggtgaggcctcccaagccacgtgtaactgtgagctcattaaacctctttttctttgtaaattacccagtctcgagcatgtcttcatcagcagtgtaaaaatggaccaatacacttctttaaccactcatcaatcaaaaactaaagaaaataatttcaaggaggaacacaactcagactgtgtctttctgaatagcaatgtctgcctgattctcccttggagatggcagaagacacttaaaagcatttttttttcctgctagcttcacagcatctgcaaatcacacagttgttactttttaccacccaagtcttctccataaattttagaatcaattggcgagaagaaggatcataggtaataagttcttttatatgaatatttgaccagatgccttgggattcataatacttgatatttagtgctttgtgactgcaagttaagccaaaatttaatacaatcaaatagatcattcaatttaggcaaaaaaatttcagattttttttgtgaatttgatcacatgggctgtgtatttcaaaactgctcctctgtaattttatatcagctaatggagactttatataaactgctaccaactataaaggctcaaatttaaaatgacactaaaaagttaatgattttctccaaaatgagtacagaacagaaaaacaaatcctgtgaatagaaatgacacttataaagaaatataggaataaagctaaattaactcactaaagaactactaagggtatttgaaaaagataa

SEQ ID NO: 7239 - DNA, 652 bp, mus musculus
acacattttgaggtccttttgaacttagacattttgctgggaaaagccagcaagacatgaaggcaacttcattttgctctcccacatgcttcctcttagataacgaattagagaacaatctatgaatttaaatgtgtggataaaataagtaattaaatattgttaataagcatacatattttaaatcttgaattttttcttattagcccactaaattttactgaagatacagaaataggataaagacaaaaattaattgtgagaaaaaagcatacaaacttaccaatgctttaaatccaggtgtggagacaaccttttgatagcttctggtgaacttcctgagaaacgatgtttcatctggggtaaagagactggactgaagagatgtgaaggtagtttctcactccaaactctgattattccaaatattaaatattattgcaccatctgaattatcaaagctctccaaatccaaaacattctagtagattcaattgcttcttctgagagtatatgtattggttttataaaaggttaagaggaaaaaaagaatcagagtagatttaagctaatgctgtcatgtagaatagaatgctgaggttcaaaaagggtgaatgacaaaactgagtctaaaatattagcatcaacggta

SEQ ID NO: 7240 - DNA, 1348 bp, mus musculus
cttcagaatgaccacttacccatctggcctcactcttctttcacataatcctatgatcgttatcccagatgcttcttaccaaacatatcattgaatacgtctcagaaattaaaaaaaaaaggagaaaaacaagtgagagtgccactaggatggatttaaatcacattattttagtgaaataatcctggcacagaatagtatacactacatgatttcaaaagtagtttatggtggcaaaataagaaaactgactgtctttgggaaggacgaggtacactgaaaagtggcacactgaaacattttggagtgagagaaatgttttcaatcttgtttggcctggtggctattccagttcatacatttgtcataactgctgactcaaactgtatttttaaaaactttgcaaaaatttattctatgtaaattatacttcaataactaaaaataaacaaatattggagaagaaagtgacatgagaaaaaaatcataacaaatttgttgatctaggatttctggatttacaacaggatctatggatagtcttcaactctttaaacaatgtaaatacatcttggggagaaaaaaatgtgccttttcctaaatatgtgagttatcatcagattatccaaaaggtctgtcaatctccaacaactctaaaagccttggttaaccccctaaatttacaaataagaagctgttttctcaaggacacataatttattaccttgtgttctatcatattttcctaattagtgccatctcctgcagtaccaaactaatctcatgtgcaaacctctgaaaaatggtagccatgagttttcaactttatgtgtcagaaaaataatttacatgttacaaattggttttaaacacaaacaatggttgcctaaattaaaatccatattgtgaaaaataaagtggaatagataaaacctgctttgctggccgggcacagtggctcaagcctgtaatctcagcactttgggtggccgaggcgggtggatcaaggggtcaggagatcgagaccatcctggctaacacggtgaaaccccgtctctactaaaaaaaatacaaaaaattagccgggtgtggtggcaggcgcctgtagtcccatctactcgggaggctgaggcaggagaatggcgtgaacccgggaaggcggagcttgcagtgagccgagattgcgccactgcactccagcttgggcgacagagcaagactccgttaaaaaaaaaaaaaaaaaaaacctgtattgctaacacggtaaagtttaaaagctagagtttatttttagtatacacaactattttttgtatgttaattttatttcctgaaattttactggata

SEQ ID NO: 7241 - DNA, 723 bp, mus musculus
ttgaaggaataagcactaatgcagaaaataggctgctgcctgcataaataattcagaaagcagtgaaaaaaatcttctagaaaatactcagttttcaacattcgctctctgtctctctcacacacacacagaggcacacatacacacacacgcattttctttatttttgaatatcattaaattatgatagacatttctaaggtaacctggcaacttggtgtttttagttacaattacataggatcaaatttcagttggttgctgaacagcactgtcgaatcagtgcaaatgtctaactgatttgaatgggttttggttaatactctgtcctaggacttttgaactgaatttatcagagccaacacaagataacctaaaagtctcaaattaacaaatttcacaccaagtattctaaatgattgtgctattaaaatattactaaaagcaattacatttggtgtttgtaaaaagctaaaatacccagcagatgagtaaagtttctgctctttatgttcgagcattattaatcaacttatttttctgtccaaggtgttcttgacaatccccattaaattataagtcttaatcaattcacaaattatagttctattcatgtcattaaaccaatattttatgctgctttttgttagtatcatggagatatttacaagtccaggcagatgaatgaggatacaggacacaatgaattataatgtgtccttg

SEQ ID NO: 7242 - DNA, 6816 bp, mus musculus
ttttggtctatgaaggttcatgttacttctattatgaattggccttttgtaaccttctagattatctctggcagataatttttctataccattttgtaactaaattcaaaataactatgtaggatgatcttacatttttttggctttggtttccatagttctttaaagcctgggtaccttttgtttgtttgtttttagtatttaattttcaattatctctaggtgttttcgctagtatctttgagcagtttccttaagggaacttgggtttttgacctgagtctttgatatctaagaacaactttatgttgctttcgtataaatatcaatttggcccaagtcagaaatgtattattatgtcctttttctttcaagaatctgtttttttaatttttcattttcaattattatggatgcatgttagttgtacatatttatggggtacatgtgatattttgctacaaacataaaatgtgtaataatcaaatcatggtaattgggtgatatggtttagttctgtgtccccacccaaatctcatatccaattataatccccacatgttgaaggaggggcctggtgggaggtgattgaatcatgggggcaaacttcccccttgctattctcatattggagttctcaggagatctgattgtttaaaagtgtatagcacttacccctttggtatctctctcctgctgccatgtgaagacatgcttgcttccccttcaccctccaccatgattttaagattcctgaggcctcccaagccatgcttcctgtactgcctgtagaactgtgagtcagctacacctcttttctttataaattacccattctcaattctttatagcaatgtgagaacagactactacattggggtttccataacctcaagcatttatcatttttttgtgttagaaacattccaatttcactcttagttatttttaactatacaataaattattgttaatttactatagttgccccattgtgctaccaaacactagatcttactccttctatgtaactgtattttttacccactaaccatcccctttctactcccctttccactaccctttccagcctctgctaaccaccattctattatattctctacttccatgagctcaaattttttggagctcctgtatatgagtgagaacatgaaatatttgtcttttagtgcctggtttattttatttaacataatatcctccagttccatccatgttgtttcaaacaacaggatttcttatccattcatctgctgatggacacaggtttattccatatcttggttattgtaagtagtgctgcagtaaacatgggaatgcagatatcgctttgatatactgattttctttttttttttgttttggatatatacccatcagtgggattactggctcataagatagtttgatttttagtttttgaggaacatccatatagttttccaaaatggccgtgctaatttgcattctcagcaacagcttgcaagggttcccctttctgtacatcctcaccagcaatcattattgcctttttcataaaagccattttaactgcggtgagattatatcttattgtagttttcacttgcatttctctgatgacgaatgatgttgagcattttttcatatgtgttggctatttgtacatccttttctgagaaatatctatgcagttcctttgccatttttaaattggattttttttctgttgagttgtttgagctgctcatatattctggttattaatcccttgtcagatgggtaatttgcaaatattttctcccattccgtggattgtctctttactttattgaccgtttcctttgctgtgcttgatgtaatcccatttgtccatttttgctgtgagatctcaggaaatctttgtccagcccaatgtcctagagtgtttcctcaatattttcttataatcgtttcatcgtttgaggtcttagatataagtatttaatctattttgatttaatttttgtatacagcatgagacaggtgtctagtttcattcttctgcttatggatagccagttttcccagcatcatttattgaagagactgccttttccccagtgtatgttctcagcacctttgtcaaaaataagttggctgtaaatgtgggaatttttttctgggttctctattctcttccattggtcagtgtgtctgtttttatgactgtcccatgcttttttggttactatagctttgtagtatgatttgaagtcagataatgtgatgcctccagctctattctttttgctcaggttagctgttatggttaatactgagtgtcaacttgactggattgaaggatgcaaagtgttgatcctgggtgtgtctgtaagggtgttgccaaaggagattaacacttgagtcagttgaatctgtagattgcattgggtggtatgggcattgtaacaatatcgatcttcccatctatgaacatggagtatctttccattttttgtgtccttaatgtcttatagctttcattgtaggtaactttcacttctttggttaagtttattcctaggcattttgttttatttgtagctatgataaattggattactttcttgatttctttttcatattgttcattgttggcatatagcaatgctacttattttagtatactgatttcatatcctgaaactttactatttatcagttctgatagttttttgtgggatctttagtgtctcctaaatataagatatcatctgcaaccaaggataatttgacttcttccattacaatttgaatgtcctttatttctttctcatgtccaattgctctgactagaatttctagtattatgttgaataaaagtggtaaaagtgggcatgctagtcttcttccagatcttagaaaaaaggctttcactttttcctcattcagtatgatactagctgccagtctgttgtatattgcttttattgtgttgagatatgttccttccatacccaggtttttgggaatttttatcatgaaggatgttgaattttattgaatgctgctttggcatctattgaaatgatcatattgtttttttccttcattctgttcagatgatgtgtcacatttattgatttgcatatgttgaaccatccttacatccctgggatgaatttcacttgatcatgatgaataatctttttagtgtgttgttgaatttgatttgctagcattatattgaggaattttgcatctatgtgtattagatatattggcctatagctttctttctttgttgtgtctttgtctgcttgtggtatcaggataacactggtctcatagaataagtttggaagtattccttccttcttgattttttgaaatagcttgagtaggattgctattaattcttctttaagtgtttggtagagtttagcagtgaagccatcaggtcttgtccatatttatttatttatttattttggacagagtgttgctctgttgccctggctggagtgcagttgtgcgatctcagcttactgcaacccttgcctcccaggttcaagtgagtctcctgcctcagcctcccgagtagctgagattagtagcatgtgccaccacacctggctaatatttgtatttttagtagagacgggggacggggtgcaccatgttggtccggctggtcttgagctcctgacctcaagtgatctgcccgcctcggccccacaaagtgctaggattacgggtgtgagacaccacgcccaactatgtcctggccatttatttgatgggagactttttattactgcttcaatctggttacttgctattggtctattcagattttgtatttcttcatggctctatctttgtaggctgtatatgtctaggaatttgtccatttcttctaggttttccagtttattgacatatagttatacataatggtctctaatgattctttgaatttcagcagtatcagttgtaacatctcttttttatatgtgattttatttattcgggtcttcttttttttcttagtctggctaaagatttgtccattttacttatcttgtcaaaaaaattcattttgttgattttttctatttttatctcaatttcatttatttctgctccgatctttattaattcttctactaattttgggtttagtttgctcttgcttttctagttctttacgatatattataaggttgtttatttgaggtttttctactttttcgatataggcatttattgcaataaactttcctctgagtaccatttgtgcagtgttccataggttttggaatgttgtgtttgtattttcatttatttcaataaatttttaaggtttctttttactttcttcaatgactcaacattcattcaggagcatattagtcttttcttgcattgctataaagaaatacctgagactgaataatttataaagaaaagagatttaattggctcatggttttgcagtctttacatgaagcatggtgctggcatctcctcagcttctggagagacctcaggaagcttataatcatggtggaaggtaagaggagagcaggaatgtcacatggccagaggaggagcaatagggagagagagcatggggtagggaaggagccacacagttttaaatgaccagatcttgtgtgaactgagagcaagagttcacttatcaccaagaggatggctcaagccattcatgagtgatctatccccgtcatctaaacacttgccaccaagccccaactctaacattggggattacaatttaacatgagattgggtcagggaaaagtacccaaactatatctaagagcatattgtttgatttccatgtgttcataaagtttccaaagttcctcttgttattgatttctagttttattccgttgtggtcagaaaagatactggatataattttttaaaaatttttgagacttgttttgtggcctaacatatggtctatccttgggaatgtttcatgagctaaggagaagaatatgtattctgcaactgttggatgaaatgttctgtaaatgtctgttaggtccatttggtctatagtgcagactaagtctgatgtttttttcttggttttctgtctagatgatctttccaatgctgaaggtgggatactgaagtccctggctcttactatatcagggtctctctctctctctctttagctctaataatatttgccttatatatctggatgctcgagtgttgactgctatatcctcttgcttaattgacccctttgtcattatataatgaccttctttgtctctttttacagtttttgtcttgaaatctatcttatctgatataaatataactaattctgctcttttttggcgggttttatttgcatggaatacctttttccatccttaagtctctgttacatgtttttaaaatcgtcttcaaatagtgtcttggtgaaatttatagtcattcgtatcattatttctttatggagagggtttgtgtccattagttttggaagacattttgataagatacaatgggattcttgtacaatttgtttgtcattgatatgtaaacattttactgaaaaaaaatacacagatttggagtcttccattgtttttctcctccttcttctcctccttgcttttccctgctccttcctcttttttgtagtgggaacattttgttctattaaatcacactccgctcctcagttcttcaggaacacatactatattaatccattttcacatggctgataaagatatacccaagactgggtaatttatagagaaaatgaggtttcatggactcgtgttccatgtggctgaggaggcctcacaatcatggtggaaggtgagaggcagacaaggaaaaaaatgagatccaagtgaaagcagaaactctttacaaaaacatcagatcttgatcttgtgagacttagtcactatcccgagaacagtatggagtaaaccacccccatgattcaattatttcccactgggtccctctcacaacacatgggaattaggggagctacaattcaggatgagatttggatggagacacaaccaaaccatatcgcatactattcaagagattgcattttgacagtcagtctctttattgtctttggtcaatcatgagtaaagacaaagaaagattgtctttacttctgtatttagagagaacttcttaggcttgacctgtacctcactaattaattttacaacattttcaagtctactatgtactgttgccagcacggctttcaatttggtgaccttatatttcatttgtacttggtctttatcttgtctcattaactacttataatttcatctgctattagtttataaatgtacattatcttcttttacatggttaagtacatgaatcagatgtttgaagtttttttctgctgttttatatagcatgtttatctaagtggaacacctgttttctgtgcctttaggtaattgcttgtacatgtctatgcttcaaggtttttaataggtcatatgttgaatggtctctgtttacactatccatacacaaaaggattcacaaaggccaaggattgaagtatattccaaatacttggataaccataggctctgtgaaagatcaaggtagggctctatgatagcatcccaggaagtcacccagttccagagcagacaagcaaagctactcaatataatgtgagttgagagaacctttgagggtgaattaaggacaacagtgaggaatgtgaccatggaagttatactaatgttcagtcttaagaggcagcaccccctcacc

SEQ ID NO: 7243 - DNA, 6816 bp, mus musculus; identical to SEQ ID NO: 7242

SEQ ID NO: 7244 - DNA, 6816 bp, mus musculus; identical to SEQ ID NO: 7242

SEQ ID NO: 7245 - DNA, 431 bp, mus musculus
gactgtgggtagccatagattcaatctgcttagggcatagacacagatgatgctttcaaactgttttcaaggattcattgcatgaattggcaatggtgttgaattccagggtaatcttttaatcattccaagttcaggtgttatttttcttcctcatagttaccaacaaaaagaaaaagcaagatgtaagacatgaacacactggtctcacctcttcactctttgtacactcaatgttcatactctggcacttcctagatatgtaaacaggacttttggaatgtgatctaagaatcagcaaagagtcttccatttcccagtatgtaccctgcctagatgcacccaaaggcttcatcatcaaactcattcaagttggttaactcagtgtccatctgggatactttgttaaactgcagaggtcaacggggttg

SEQ ID NO: 7246 - DNA, 1031 bp, mus musculus
taattatggaatatgttagtagaaggaaggcaaagtgttttatcaatgcctgtaagcatcatttacattagcatctgttacagaattggttttaaattttatttctagacgcttaaaacctgtgggttacacacatcagtatttttagatataatttcaaaggactaaacccatttttgaacctttgtttcaacatgcttttgaaagcatacaaagacatgggtgttttatctttctgattttttgtatctttctttctgatttctttagcttcttttagatctgtaagtcttcttgtgcattgttggtttttctatttttttgtttgttttcccttaaatatataaagttagttcttacctatgtttatgtacaaggcctttaacacttgacatgtcagttctgcgacatttggtaataaaatacctttcctgaagtatggaattgtggagacagagctgccagcattacagttggcctgtcagtctttgcaaagcagcaccaaatatcacccagcccctgcagatctctgggcaaaaacatatcagtcctcataagtgaattcaatagaattcttcttgacaactacaaagaaataataatttgtattatctcttcacatttatatcttccttaaaagtgaaaaatgtattgaacccttgagattaagaggaattactagtttttaaaatacacatatataagcaatttgtttcaattaatattaaatagatcccaaaggattacttcagaatttgaattttcagaaattttgaccaagctaagcttctgccagcacaaccagaaggagactagcgagatggagcttatccatccacgagccacctttgagtcaacacaactggcagcagtgtaggggactactatagccagagccaagattcctaagcctttccttcttcctcctttcttcatcccatttctattctccttcttgaagtcatggctggggcactggagagaggggaatgccagcgcatgtctacagtcaagattttcatagcacagct

SEQ ID NO: 7247 - DNA, 729 bp, mus musculus
ctaatagtaactatcaatgaagtcaaatcagtgagaatctgtctggttgtttggcattctgctaatcaaacaaatactctagggctccattgatatgaaatacagatagttgcactgatgcaacaatacaatgactaggtttgcttctccaagtgttaccgtttttcaagaaaaatatttaaactgacttgtagctggtctaacaaactaggcagccctgaagatttttagatgaatggatagatactctgatgaaatactcaacatccaatgaatgccccccgtgtataaaggcctgagctaggggtccttaagatgaatatgacgtgccccacgtcctcgagttgtttccacacaatggcgagaaatcactctacctggctgtcactcaaggccaatgtgacaaatactatgaagttgaataagcaagatactctgcgagcacaagggcgatgacgagaaacttcacagagttgattgagctgggtggaaagtccaggtggatgagatggcctggcaggatgcagggaaaagctcccccagcagagggagcagcacaggcaatacagggctgagaccacagcttcctccaccccttgctttgcttcgctctgctttgctttgccttgctctttttttttttttttttttttttcatataacaattatggagcacccactctgctgcaagcactgggcaagcagggaaagagtgagtggtctagtaca

SEQ ID NO: 7248 - DNA, 146 bp, mus musculus
ttcccttttaaatttccttattgtgtgaatgatttaaaaaatgctttaatacacagtaaaaatattttatcaaaaatgtcatcaattccttattttatcaggcagaactttcctgaacactaagctttttattccatttttagaaa

SEQ ID NO: 7249 - DNA, 973 bp, mus musculus
gagtcctgctgggccccggcacccagttgtgatgtggagaatgaaggctcctgcaaaaaaacccttgattaaaagagagaagccagaggaaacgtgtgcagctgtcagacgaggctcagcaaagaaaaaaatccatccattgcaagtcatgagtgaatttagaggaagacaaatctactgaaaccactattctacatatagtgcctatatgacaaaatcctgcctaaccacactgctttattttacacttaagaagttctgtaatttcactaagttttggtgtttaactcacaaataacataaaatattgggcgctaaatcaacaaaagcaatatatatttgggatcatatcactgtcatttctgtatggtcagcacctaatagttaaggaatatttgcttgttgaatgaatgaaattatcacgtgtcattcagcgtttcccatcatagagattatctactattcgttaccaaataaacacaggagaggccagagagtcctgtttatctgtaatacttcatgtacacttatcatccttatcttgaattaaaacactaacatgagctcctaacttggttttttaatagaaacaaaagacttttataaaatattttcccatttaatctccatgctttctttatctgatctaacctggcacctaaccaggcagaaatgtatgattcctgccatagcaaaaaaaccaccttttaatctctagatagctgtactcattgtcaacttattaggctaatatccattataaactaatcaaatttgaatagttaggctacttgctggattttgaaggtcaaccttgtttattaataaaatgctttcttaacattataaaggttacaatgagttctgatgccacatactcaccttttgggtttccaatgtgttagagagttctgtacttttgagtgttaggcctatccgaatacatatgtgaaagaagagttatcacccattg

SEQ ID NO: 7250 - DNA, 973 bp, mus musculus; identical to SEQ ID NO: 7249

SEQ ID NO: 7251 - DNA, 1435 bp, mus musculus
gtggtaacagagatggtgctaacacaaatccttaggttcagggtgcaagggagggacaggtgtgagttaatgcctatgaggagggctcctggaagagggagggcagggtctgaagcctggtcctggggagacaggtgggagggcaaggaggctggaagggggcatggaggtggggtctgtgtgagtctgggacaagttctcgggcagctgtggctgataactctggtttgtttttgttctttggctgcagacctggccgagtgcaagctggtctcctttcccattggcatctacaaggtcctgcggaatgtctctggccagatccacctcatcaccctggctaacaacgagcttaagtccctcaccagcaagttcatgaccacattcagtcagctccgaggtaggccctggtcagctccagccaggagggcatggccagctctcatcgttcaggctctgaccctgtctggggagtgccaccagagctggtccctggtcagcgacacccatgaaatcattcccatgggttgactttgaaaatggacctgtgttctccctgcagcttggaactctctaggtcacttctgcctctagctggctgtgaagcagattgaacaaggatcaagggtgtggttcctggagtgattctcttgttctgaacagaccagcagggtgtttgggtcctgaggccctgggagttgttatttcccagtagtcttgaatgagcccccttctcaccttccaatctagtgttgttctcctgtgttgctctctcagttcaggagtgacagatgccagggatgttggcattttcttttctttttttttttttgagatggaatcttgctgtatcgcccaggctggagtgcagcggtgtgatctcggctcactgcagcctccacctcccaggttcaagcgattctcctgcctcagcctcccaagtagctgggattacaggtgtgtgccaccacacctgggtcattttaatatttttaatagaggtggggttttaccatgttggccaagctggtctcaaactcctgacctcaggtgatctgcccgcctcagtctcccaaagcgctgggattacaggtatgagccaccatgcctggccgatgttggcattttctctgctgggcatattcagagcatgtggttgtaggtgcttgccatcaaggtggcaggagtccagcaggtgagcctcgtagatgctctagaaatggttcctctggatggacaagcagtgtggcctgactgctgcagtgcctgccctcttctccagagagcagtctctccatccttctacgagaggtcactgctgctcagtgacccatgtgacagagctgtggcatgggcgcctgttgtacgtttgtgaacgagtggagtgggagaattgcggagggcacaggaagcctaggggggcagatcctgcttc

SEQ ID NO: 7252 - DNA, 1435 bp, mus musculus; identical to SEQ ID NO: 7251

SEQ ID NO: 7253 - DNA, 314 bp, mus musculus
aagcgagtgttgagaagcactctattttcatgatcaaaggggatgatgcctatggttagacccttccctttcccctccttccttgcatgagcttggacataatatctacagctgtagtagccatcttgtgactatgagggaaagtcctagaaaacagaagaaagaaacttaatcctgatgtcattgggacactgagccatcaccaacaatcctccttctccaaaacttttattttgttagaaaaatccctattcgtttaagccagtgaaattggggatttttataattacagacagacatattcttcaccttct

SEQ ID NO: 7254 - DNA, 1233 bp, mus musculus
gtgctttatattataaggaaagtatttgtcactcggactctcagaattgaatttgcctgaattaattatgatttgcactccatccccctgggcggtattgtgggggagaggtaatcctttctgatgtcgtatagaaaatcaattctggcctgcggcactggctagttgcttgagtgggggaacttgtcacccactgtatggtctttatttcccatttttcttggccctttgttatgtattactttctctgggctggtttaagaagccgccagggccagggagcagtgcttggagtgatggacaaggatactctcccataaagaaaatcacaagggccccaagttgggtaataaaaggccttgtcagtggcttttcttgtgtagtcagcattgtttatagagtgttttccactgagaaacatagacactttctctttcgcctaggggataagacaagttgaatggcacttggtcagatgtagggatttggtcttgactggtttgagaatgtgctgtcttctcctctgtcttctctgaggcctccctttgttccttggaatatgttcctctttcttaatttcaagatgggaaactccttcatcttataaaactccgtgagcaaatgtaagaggcaaaacaattgataaatatttgtaacaactatgacaagcatagggttgatatccttactatataaacagctgttacaaaaaataaccaccatggaaagggctatggtcaagttttaaatgccttgggaacagtgccctcaagataaagctgagcaaaatagcaggacacagaactgagcagatgtagatgttaatgtagatacactcagagaaagggctgaaatgtcccctttttcttacatccgtcaggagagcctacgagtaatttctgccttggcatgtgaccatggtgccttggctttgccattccagccaactgacccttttgctgaaagtttaataggggatgaattcacatgtgaattcataatccccttatctgtgctaagagcattctgtaatgagcctgcaacagaaagaatcttacatcttgcggttttgctctgaccccacctcttggcctccttcctaacctctctatacctcctggtttgacgctttaggtatctgccccttgtggagtcattgcctgcctgcagtatgttaaatgaagttttaaataaattgattcacatttcctgctagtcgtcacattgaggcat

SEQ ID NO: 7255 - DNA, 1787 bp, mus musculus
agttcccaggtgatactgtgctgcaggtctgggaaccccactctgagatcactgctcatggccagtgttcttaaccttggttgcacattggaataccctggggagtttttaaaaaatcctcacgtttgggttttatcctcagatatgctaatgtaattgacctgggcattggtattttaatgtgtacccaagattgagagtcattgttctaaagagaggagaaatttcttttctttaatattttacttttatttatttatttatttatttagtaattatttttgagacaggatcctctctgttgcccaggctggagtgcagtggtgtgatctcggctcactgcatcctcgacctcctgggctcaagtgatcctcccacgttagcctcctgagtagctgggactacaggcacatgccaccacaccaggctaatttttgtatttttttttgtggaggcggggtttcaccatgttgctcaggctggtctcaaacccctggcttcaagtgatccacctgcctcagcctcccaaagtgctgggattacaggcacgagctgtcacgccgagcctacagagaagagacatttcatcacaggtttctggtggactcagacctgttgtacagactcctggaagctcctgcagaacaagttggcaccttcttagctctccaggcccatgcagggagctcaggcaaccacggctccctccatcctagggattctgattctgtgggtctgagtgaggccaggatatctgagtttaacaaacacccaggtgtgtgtggtgcatagaagaccagtactggggaaccactgggctggcctaatccaggacctggttcctctatccgtgtgaatcctggggcctgtgttcatggggccattcgctctctgggccaggccctaccacaggctgaatcctgactatgagaggctgaagatccagtgcgtgcgagccatgtcggacctgcagagcctgcagaaccagcacaccaacgccttgaagaggtgtgaggaggtggccaaggagactgacttctaccagtgagtgaggcctgcttggccagggcctccaacacccacagacagctgcctttgcccttcttttctctggacttagtagccaggggttctggttctagtcctgtccctgtgcaagagcaagcagtctgcctacagcaggtggatttgtgcctttgggcctcagttttcctaagtgtaaaacaaggctattaatccttcacatcttattgccagcttcagagacctggcaggcatgaaagtgattcagaacatgcagcagggctcaggcaggcctctgggtctctgtccaggggccctactgcagcttcttcctgtagggtaggcccaaggggtgtttccctttggtctcccagcatccctctgagggtctttgcctgcccacctgctgatatctgtccaggccccagtatttggaggcactaggtctgtaccagaggggcctgtctcccttccctggagatacatgtgccctttttggtgtcaggtttgtaagtggtgatttggatgtttctggaattgggctgttagcaggttttggcttgcctctgagtgctacagacctacctgccattggctcctgtccgctgtatctacgggaagtgttgggacctgaggctggtgatgccctggggtggggcggggtgtgaggggctggctggggctcactgagcatgtaccgggtgtttcagcacactccacagccggctcctgagtgaccagactcggctgaaggatgacgtgga

SEQ ID NO: 7256 - DNA, 941 bp, mus musculus
actgtgatgaccttttaatcgattctatattgaagggtctggaggaaggaggggaagggaaagggcagaatcgggccttgtgccttgcttgggcatcttgcccccttgacctgcagaggggtgacagggctgtgcctgggtcctgtggccgcatggaggctccctgcatctttggagggtctcctgagttactccaccctgcagagtaatgaggtttctctcctcctactcctgcatcttgcaaattctgttgtcatctgctgactgtcagtggctttcctcagcccattttctgctggctctgcagagggaggcttgattccactctgaggggtgaggctggagagtgctggggagcagggagtacagaggctcacactttaggctggggctgatttctcctgaaccatcagcaatcaaatctgcctcaccactgtgagaattaattccttctcaagctccccttcagataggtgagaaatccgtgtgcctcctattaacataattgtgaccccgtttcttgtgaaatgacagccctggtctgattatgctcagggagcatccacagtctgtgtcctgggctgcgtgacgaaagcttcctcacattaactggcaaatgaacagtcccacagtccacatggtctctggaatctgcagacaatggccacgttttatctcagccataggatggggtcaagaagaagttccagtgtagcccaccacagctagttaagtacacgcccagcagcattttaaatgagcgggggaggagctctgcaaaggcgtggctggaaggacagtaggcttggagctggggggcctaggcccagcctgccatttgctaactgtgctgttggggtcaaatcccttcctcgcaaagagagcagagggctggtccgttagacctgatacttgctgattctaggctatcactgagtaca

SEQ ID NO: 7257 - DNA, 512 bp, mus musculus
atagctatttataaaaagttatgaagtacaggtattcatggagatacgctcaatgtaatatcaaatagaagcattgggtatgattattgcgtgtatagagtccatcatgctggtgtgtcatggtggtttactttttttctgcaataatttctatgaagaaagatgcttaccttttttatagaactggaaggagacatggcttgcaccagcagcaacagagatgggccccacagttgccactgccttcgccaggtccttctcctgtgaagggatgtccacaaagccagtgtcattagcagcagaatacttgggattgtacctacaggttttaaccttttaaaggtgaagagggaggcgacttgattactaccatccttctcctggggaatgtgagtcagaaccacaacactcagcagtttgcagcatagaatttccaagtcaacactgttacacatcacccaaggaagtgaaatgttattattaatagttaatttgaaactgaaaattagctc

SEQ ID NO: 7258 - DNA, 596 bp, mus musculus
ttggatacttcatttacttttgcttgtcacctaaagggcattgccaacacaagactgcttcacatgcggttttgaggcacaaacagttagttttcatgggactttgaaccctataaagagatgacttctaaattttcttggtagattttccgcattcacttatcgataatttttgcttctaccttttgcaatgtatcttacttctcattcatccttacattttgggttttcccttttacactattggattagctctttgggatttcaacattaaattaggtatctcctgtttcatttctcaagttggtgggtgttagctttttatcttttattctctggcttccatgcagttattgagaaagtagtcacaattacccagggaccaagagaaaccctgagagagaaaaatcatctttgctaccaaatgtttctcacccttgtgttatatttgctataggttaaaaacacttaagaatatatattttgtatcatgttaatatttttcaagaaaagtcagtgaaggcatttaatctgctctattctgggacatggaactaacttcaagttttgaagaatggggtaaaatgactgagaca

SEQ ID NO: 7259 - DNA, 388 bp, mus musculus
ttgatgtccacaacattttgattatctctaatagggccaaattatttaatttgcaaagaagttttagtaaataacaagtctttgtctgtataactaatataaaaaacttatctcctgttttaaaaatgagccaacagatttagaaaggttcatagttatagaatcattaagtctgtccttccatttcttccaagtatccattactcttactcttcttctatagataagggcttagaagccagaaggtatattaagaaagctgttgaaataatttaagttaaaaataaaaggaacctaaagcatttggcagcaatgagactgtagaagaggggaaagaataagaatgtttccggagtagaatcaatagaattccataagagaatacagg

SEQ ID NO: 7260 - DNA, 411 bp, mus musculus
cttattgatctgtaagtactctataagctttctttttactaatactgggttggtcatgtatgttgcagataccatccaaactgtagcctatttttaaacttagttcatgtaacatattttaacatataaaagtgtttaaatttaatgccaacatatcaatattttccttttctatttttttgttatttctttttcaataaaccttttcctactttgatcaattttcctgtattttactggacagattctaaagatttatttttcttatttagaatgctggcccttgtggaattattctatgtgcagggtgagaaggtaatcttctctcatagttttctaaatcaaattatcaaatatctgaaagcaatttattaaacagagcagagaatggcaaactggggcccatgggtc

SEQ ID NO: 7261 - DNA, 3430 bp, mus musculus
tgactgaactttgaggcacatcatctttaaaagtcgggaaaaggaagatttaacaatgttgccaatgaaggagcagggaaagaagccacaggcagggagagaaatcagaaaatgaggacatcctaatggccaaggcgggaaaatatttcaagaatggagggatcaatcatgacaagtgccactgagaggtcaggtaaaatgagaactgagaattgcctgttggacacttaaggagaatgactttgagctttgtgaaataaaagcctgcctggaatgggtacaaaagagagaagggagggaagtgagccagtgagtacaaacaagtcttgcctttcacttgatcaggaggcaagatagcatattctgctacagatgaagtgaagtgggttgacttggtggtagaaggctaaggaagttctctcagcaagttaactaggtgagaatgaggggtgtgtgtgtatgtagtgccagagatgtggggagagaataaaaggtgtgagaaagtcacccttgataataagatagtaaattaaccaccaaaattggggccgccagtgccaagaactcacttgagggctctaattataaatttatagtaagaccagtcagcagagtcattcgtttttatctgcatcatgatacatgtaaggaggtgacagagatctgctgaaacccaacttgggattttgacaatggaaggacagaagtgtggggatgttcaactggatttatgtaaggtattataatgatgggaaatgaaatctaaatcagctaagaaagaaaatgagagcacgaggaaggttatggacgatggcactgtaatgtattatagtcaatggattggagatcccaagaggtcaagaaacaactaaagtgacagtgaatatactagggtaagaaagcttgaaagttacaaggtagtaaagtgtctgaaattgttatttttggatgtggcgtaataatagataacgatgagttctgaagtatgattaattaaggtaaaatataggacatgaacattggagaatggctggttaacaaactgagaaaccattttcatggttggaccatctacatgcttactgacatcaccaacaattatggcagtagccttatgttaaaatcaatgccagatgccaatatcatcagaggatggtggtggggaggctatcagaagactgtaaatgatggaaaccagaagcattcattgatagtgaagttttgcattttagggtatgaagaagaaaagaaggaaaatgtcttggaagtaacaattcggagcatgaattgtccctatacaaactccaagacttgtggcatgtggagaattaaaggaatagagaacaaaattcatcctttaatagggcttcagagaaaagttcttaggcgccaattgattttctcttcaagaagggaaggacatattcagagatgagattttcatgatggcatgccttgagtgccagagggtttggggagtatagaagatgtaggagcttgagtcccactaagggatcttcaaaatagtgtatgcttatgggaccaatgaatacagttcatctggaacacttgtgttccctgccgggattgataaaatacagggtctaatgggattgagcctattggtctcagttatggtggttcaaggggcagtcggggagggtgtgttctattataatcccattggagtaatggtcttagtccattttgaaaggtaaagcggagttggagaatgcgggtggttagtgatcacctggacatgtggagctcgtaagtaatatgggggctacagcgtgcagagtccagtgggcctacatttgaccttcctgtgagcagtactgaaggctggggaagacaagcctcaataacttgtcagactgagtcaggactgagattctcaacagtaatcagctaagaggtattgctctcctatcctaagagatgccttctttggcaagactgttcaactatgtctcattactaaaggtagacagaatcacttgggagaatccaggatgtggtactgttttgacacggtccaagctggatgatgtaagcaggagagaatgttctaccaaaaaccttgcaacatcagatcttcagctgtgcagccagtcagcacacagaagctaagctaaagagatgtggcatccccacagggaaagagaaagaagcattaggtaagcaactgcctcatttcccagcagtcatgaaggcagttttgctaagccatctcatagcaggttatggatcctgaatttctatgtattcccttagcccagaatcctgctttgcttttatgaacttaccacaaatgatgctcctgttctagagtctaggggagtgattccaaagtctggctgcagagtagaatcacctggaatgtccaaaataaaaatccagattctacccctgaacaattaagtcagaatctgtggggtcctggcttcagtgtttttcaaaagtttcctagatgattcttatatagagccgtggttaagagctatattctagggctcagattctgtccaactcctttggtttgacaagcaggttggctgctgctagaggactaacacttagctcctttctaggactttgcattttttttcaatgattcatagtcctcagactgactatcacatgcatacacgcatacacaaaactgtcctgctgtggtacaaaatgtgtgccttattgagtctcaatccagggacaattgcagcaagtgaagtttccagaggcctgggtatccataacacacacaggcatcccatccttgcagacagttcacacatggatgtgtgatccagtggcaggtctcaagaaaggaaagcttccaaagccaggagcttgactgagacagagccttgaggtcttggactggatctcccttccaggtacacactagaggcaggcagcttccttgtttcttcctctgctctggctgctgtttcattctaagcctctgcagacacattcttcatagctgagaaaactcacagatggaatgactattattggtgcttgtcaatccagaaataaaccacaatttgctcggcatttcaatctttaccactgatgtgttagtttcatttaattagttctgtgctggatgaggtcattagatttgcgtcctaatggaaacctattactcagctctgcatggtgaggagtgtgtaggactgatttgcattatctctggaaagaaggtgaattctctcactacatttgtggtgggcagcaggtcttccagcagaaacccatttgagataacactaattgaagggacacctgtcttttgagaattcttttaaaattttcatagcagattggctgtatgccctgagaaaagggtaaaaagtgtgctacttataaaacgcaattttggagaaaagatgtagtatgatagctaaaactgttacatgaa

SEQ ID NO: 7262 - DNA, 3430 bp, mus musculus; identical to SEQ ID NO: 7261

SEQ ID NO: 7263 - DNA, 1012 bp, mus musculus
taaagacaaagttaggtttcaacagcaagcatttcttagctatctgctactaggcatagtcttatcatttcacctttactgcttttgtctttaaatgacaaccagttcagatcctcaattcttatagcccaatgtatttatacctagatagaaagatagatagttgtagtccttcttcaatgaggattccatacaattagccttgaggcttaatgacacccttgtaaaatcgttctaattagcaaagatgcattatcacagaagcagttcttacccttcggaaatgtctcgggaaatgtctcacgcagtcattattttgatctggctaaagatgcagtgtagcaagagtggctaggttctactcctagacgctgtcatggccttgttattttcaaagggtgtttgtaagctcctactaccgtgctgcattcatctgtgtgtccctcatgcccagctcagagattaggatagagcaagctcttaaatgttgctggacaattggattttcataagtcacttttaatgattttacatacccaagcatcagctccgattacgctgaaagtgtgatgctcctcttacctagatgacatttaaactcccttcatattgaaaaacagaattatctaaacaaaaaatatggttgaaagagtttatggcaaatagaatttggctgtgaattatgttttccaatccctgctgtatagagcaaattgttagaatcagcatttataattgagtttcaactaaatgctttgttttataatttgctgtgaggtaattagaaaaatgtgcatgaaagcatgacacgtataaatcacaggtatattcatctgaagtattttgtgcagtttatatttatagctcattctgtgaagctaaatccactgtattgaaacagacaattaaaggaaggtaaagggactattttcccagcaattgcaatgtgctaggcatgatgccaggcactgcacaagctctatctccattaatcttctctaatgtaaatatt

SEQ ID NO: 7264 - DNA, 1012 bp, mus musculus; identical to SEQ ID NO: 7263

SEQ ID NO: 7265 - DNA, 394 bp, mus musculus
gatatagaaatgattattaagcacatgaaaagatgctcaatattactaatcattacagaaatgcaaatcaaaaccattattagaatgcctattataaaacaaaacaaatgttggtgagattgtagagaaatcgaaggcctgcatagtattggtggaaatgtaaaattgatcagcttctgtggaaaatagtgtggaagttattcacaaaattaagtgtaaaattaccatatgatcttgcaatcccatacctgaatgtaacccaaaagcattgtaagaatggtctggaacagatatttatacactcttattcatagcagcattattcataatggcccaaaggtagaattaaccttagtgtctatcactaaggttgaatgatggattaattgataaa

SEQ ID NO: 7266 - DNA, 995 bp, mus musculus
ttctccagggaggctggggtctgtgggctgtgggagggcatatgcctcctcgaaactaatgggccaggatcccccaggtaagaccaggtgggatggccaagagaatggcatccccctcagatcctcaacagcatggcctctgggcacctccctctcgctggccaggcttgctcacccacctcctcctctctgtgtgcccaatcaccccttctgagcctcagtttcctcatctgcccacccctgaagctcaactaagttcctcatatttctgaagtgtgtggtgtgggaaacattggaaaccagcaggtgcccaccaaagcttcttcccccacaaagagcgcaaaaccctagcagcccctctaggcccagcactttcttttgcaggcaagcccctgctggtcacagcctggcttacaggccatcccactgcagcctgtaccaggaggcccgagtcagcctcgcctgcccatagctgcacgggctgggctggttgcacatctccattatgatgctcagtgcggggcccaagtcctgctgttgtgggtccctgacactcagcacaggccaagcacagagtagatcctcaggaggtgcttgaggcttggtttctggctgggagggggaatttagctctgaatgccccctctcctgccactcatctgatatgatttctctgaagagagaactaaccccacttgcaaaggaatggtggcactttaacattcccaacactcctgtgagagaagaattatctccgggtgacacagaagcaaacagaaacttggagaggacagctggcctcacagccataggtggcagaagccaggttttcacggattctgtccaattccacatctcaacttgtcttcactctcctgtggcctccgattcttctgcaggatggcggtgggaggcttcatggggctgatgtggtgttctcagccaccaccacggtcacggtcaatgtggaggatgttcaggacatggcccctgtc

SEQ ID NO: 7267 - DNA, 995 bp, mus musculus; identical to SEQ ID NO: 7266

SEQ ID NO: 7268 - DNA, 1909 bp, mus musculus
attttcttattagtcatcagttccgtctacaccatcccaaataggagtgccctaaacaaaatctttatagactgacaagtcctttccagcgtcctgctgcatgagggctgtttgctgtgggatgtcaactcttagtatattaactggaccttagtgcgtagtgtgacggaatgcaaattgcattgaacacatttttatagcatggcttgtggtgctggaaaccagaaaagacagatcccagggctttgccccacacactagttacaggattgaggattcctctggtttgttcagccactgctctgctgcctcctgcctcccaggctgggatgagctaaagaacaggccatctaattctgctcactggtttcgagccacggaaggagaccttaacctttaattataacgtttacttatggtttccttaaagctaagccagtgctactctggtttggggtgagtggggaaagcctactagagtccagttgcccagctctcagcagcacaaggcctggtcagagcttccttccttaaggagcaaacacacaagactgcatgaaagaaataggacaggaaaaggaatcctaaagcaagcaactgtgttaaaatccaagcaggtattgacttcttttgtacaaagaagtaaaatttttcccacaacaactacttttctctttttatcaatatttaattttctgtaaccacacttcaccaccacttttctaataacttttaactgcaaagttatgtgaccatttttctctgcctgagaaaatgggatttttttttcttttcttctgaatactgccctccccgcagcccctcccaaccccccgccctgtgacaacctcagaacatcaaaggcaagtgttttatgcaccgtgtacattcactgtctggctctctgccaggctggaggggagagcagagacttgtgctggccaggtcaggctctgtgcacagggatttgggctgcgggggaagctgctctttatcctcttctgccttagagcaggcaagatgggaacactcttcttagcatcttttaatccatgttgtctgtgctctgtcactcccgcttctgagtattcccaatagtcaaaagaattttgcccagtttccctcagtcctttgcattacacattataaattacatttgaagacacatctttgcataaggcatcaggccctgtaagccaccccatccccatccccactcaacactcactggtgagatgataagccattttttaaatgtttattttattttatttttttgagatggagtctcactctatcacccaggcttgagtgcagtggtgcgatcttggctcactgcaacctccacatcccgggttcaagggattctcctgcctcagcctcctgagtagctgggattacaggcgcccgccaccactcctggctaattttttttttttttttttttttgtagagactggggttttaccatgttggccaggctggctttgtactcctgacctcaggtgatccacccactttggcctcccaaaatgctgagattacagcatgagccactgtgcttgccaaaccattttttttcaagtaggttagttttcaaaagctgtgtggtctcattttactgttttttgtttgtttgtttgtttgaagagtcattactttattgaagcacattttacatatataatttattccaagtatacaattaagagattttttataataaaaaaattagctgagcctggggtgacatgcacctgtggtctcagctacttgacagcctgaggtgggaggatcacttgagcccaggaggtcaaggctgcagtgagctgtgattacaccactgcactccagcctgggtgacaaagtgagaccctgtctcaaaaaaaaaaaaaaaagattttttagt

SEQ ID NO: 7269 - DNA, 958 bp, mus musculus
attcctgtcatacatgtttgcctgagcgtggcactgacacctcgtggagtttgacctttctagaaatgaataatttgatttctcaggaaagtagtgaacgtaaggtaagctttagcaatatcaaagcagcacatcgattaaatatctgcctgagaattctctctgggtttctgtattccaaaaggcttacaataaaattaactccaaagttactgaactgagaaatgtacaattactgtcttgttgatgcaataaaatagaaaggactgtttaggcatttaattggcacccaacaacatacgatggtatgttagttagacatcaattatgacagaatgctaattgacatttgataagcattctcactgataaccaatgtttgctctgccaaattaaatgcctcagtgggctgtgtctgacagctgggagggggtttactaaacggctgcaagtgcctggcatcctccagatggctggggctttctctagaacatcctgctactccttgggaaatacttccagggtcaagtgattgacttctcctcgttgcttctgggaaaagaagtcacccttctcagggagcctggcctcgcttaccttcaatgcccaataccttcatcttcccatcacctgtcttctcttctcagtctgtgcagccccacatttcagcccactttctgtagcctttacagtcaagcctatttgaatgctaaacctggctccaccattttctagctgtgggccctgactctgggcttcggtttcccctttctgcaacaggaatcttgcctaagtattaggactaatgggaagaaagtggtgacctcaatttttagcacagagctggagctcagtaactttgattttctgttctctcccctcgttttcccttctggcctcctattcctactcctgggctatggctttgtgccacactgttagactgtgaccctgatgc

SEQ ID NO: 7270 - DNA, 1507 bp, mus musculus
tctgtgtgaagggtaggggacacaaagtacaatgaagccacctctgcccctgaggatcagacagattaatcaatgattgggtctcagggtgacacctgcaacaatagaggaaaatgcagggtattgggagagtagtggggagtggggtggggtcacttaaatccagcaggaggtggaagtcagaagaggaggcaacacttgagctgagttgtgagggatgagtaggaataagatgaataattggagatggagggggcatgccagatattcatttctattcagcaggtcttctgtttttgagctggaatttaatgcgggtctctgtgttaggtacaggggatttggtggtgacaaacctgatgattacccactttcatggagttttcagctagaggtgaggtaggcattacacaaaaaatggctcagtcacactgaagagtcacaaattatgatgtctatgaagaaaaaggtgaggatgtgaagatgtgaaatggtgttgctgggggaccccattcagatgcaaggtataggaaggcccctgaggaagcactactcaaacttggggcaaaaggtgagaatgtgggaaaagggcactggcatgggaggagcatcctggattctggaaagaaggaagtggaggtgccaaggaccagagggacgaagggatatgttggagtagagcagggtaaggctgcaggggaagtaagggtaggagcaggtaaggcaggtaaggctgtaggggaggtgaggctggggagaggtaaggctggcagggaaaggggtaattaggttggggggaaggtatagctagggggaaggtaaggctgggggcgtgattaggttagggggaaggtaaggcttggggagagataaggctggggggcaggtaaagctggggggtaattaggttggggggaagatatagctagggggaaggtaaggcttggaggaggtaaggctgggagggtgattaggttggctatgggaagaagtgagagtgggaggtgggaggtgagactgggggaggggaggtaaggcctcttgtgagggaggcatctcagccaaggtgaggaccagccggtcgatcctggcagtccaggctgttcaaggtggggaccgtgactcaatccagggtaggctttgaagatacccctgaggctactgggctgggtggctggcaagctggggcaactctgagccctgggcatggagaggctgccctggggtctgctaggtgcccgtggtgtccccttcagccttcagtctggtcctagatggggaggagctggttagggtggggcaggaaagtcctgactcatctgcagcttagactgggatcctcacttaggagtcagtgcctgaggctgggagctgtagtggttgtgatggagctgctgcttctgagagtgctgaatggggccatctgtggaatgaacagagcagaacagactctggttctttataacactccacttgggtttcataagagaaggaagctctatctgtg

SEQ ID NO: 7271 - DNA, 1391 bp, mus musculus
caccagagtgtctgccttggataaaaagaatggtggtacctagaatagagataaaaaatacacgaggaaaagcaaacttggaagcaaagatggagagctcaagtttagattgttgagtggcatgtgtctatgggacagccacctatgtaaatctagaaggaatttgttcagtaagacctgaaaccaagggagggctggaagtggtgattcgtgagtcagtggcacaaatgggagtacaaacagtaatgttccagtcagatgaaggaacatcaattaaggagactgagaaagtataatcagaaggataagataagagagaatggagagtctgatgtaacaggaagtacaggaaaagagtttccaaaaagcaaagagttttccataaagtgaaagaaaatttttaaaaatccactaagataatgactgaagagtatcctctcatttttttaaaaaagggaaaccaatagattgtaatagtttgaaggaagactgggaacacaaatgaaatcaaaatatgtaagaaaaggtaagaaaagtggtggccacagtggaactcaaaatgaaaagatttttaaaaattattaaactgcagcctgctgcatatctcaagttaaatgttctgcaggcacagcaagatcagcatcttcaaacttcatctcatttccactcaatattttttatgagacttcagtgtatttataggaggagagaaaggaagcagtagagatgataatggtgaaaacataggaaagataagggataactagtagagaacaatcctagaagagatgagagggactggtatcatgatcacactgaggaggctttgttcagctataagtagagacaattcccgtcctctgaatctggaggtaagaaggtggtttaggcaatggatgaagtcttgctgtagagcaaggtgagtttgaaatatatcagtgaggtcatactgtcatctttcaagagtgaaaagggttaggttggatgaagatttttgaggacagtggtgaaagtttaaaattatttttgaggggatcagaggtaggagaagactaagaaaaaaataaggaaaatattgagtgggctctgcctgagtgtgcaaattccctcagtagcctgagtgggatagagatgtactgcaatgctgatctcaaaaagctgagggttgtactaaatgggtgcagtagcacaagggtactctgtagtttagggtgtgggtgagagagttgttggatggaatatccatgaggctctgacagagtagagaagtaagtaagaccagatgagacctacaaaaataagtaaaagagaaaggataaaaaataaatgtggaggtctctctgatgtaaaacaacagagaatcatgggatcaggagtaaaaaagaaatgga

SEQ ID NO: 7272 - DNA, 633 bp, mus musculus
attcctttttcagagaacatgtagacaaaacaagtctaaagggtgatccaattaaataaatttctgtctctgggggctaggacctctgagttggttctcaaagtctgcatgtttcacattcagtacctaacaagatattcctcactgtaagcttaaagtaagcaatgacatcacaatatgcattactctgagttgttttcaaaacgtgctgaccctctgaaagtttccaaatggcttctttgtgtgctgttacagaccatctggctagctgtagataaacaagtttcaacatatgggccatagcacatacatggctctgctccactagcgcagaaaattaagaaagggatgctctcatgatatgagtagctaactcatgcaagagaagcaggaccatgtagtggagggcctgacctaagtggcacacagaatagcttaattccagtttcttctcttccactcactgggcatgtcgctggatcacagcaagtcttctttgtttcctcatataaacatttttaaaaagtgccagtgaactcttgcctctctctccttccctccctccttctcattaaaacatacccattgttggcctaccatatatatgttcccagcatggtgctaggtaatggg

SEQ ID NO: 7273 - DNA, 839 bp, mus musculus
ggagatgaaaattctcatctctcataccagaaaatcattaaatattgtctaaaaattgttaagtaaaaaatagaaagaaatagtggttatttagaaatacaaatataaatttcagaagaaactgctagcatgctcaaagtggccacaattggaaatggaagaatgaagacagtaccattgctaattgcatcactgcccctgctccaccaccgcacacacaaatatatttataaaaccattacaatttaacattataccccatatattattttgataatacatatttgattgtttttctgtttgcaagcactgtaatttattgacttattatgttctgtttattttttaaataatgtattacttaaatttgtattgtcatatatgctaatttatagaaatgtacttatgcactgtaatgactagtttgtaggagagtggtatgtatctatattatggtaattctttttatatggctggttgtacttctggacatgtaactcatgtttgtaatgttgctgggatttttatatcatgttaatgtggccatgaattgctatgacaaatgttccatatatcttcgtttccatcagttctttcttgtgtcttgtcagctaaagtccaggaagagattgatcatgtaattggcagacacaggagcccctgcatgcaggataggagccacatgccttacactgatgctgtagtgcacgagatccagagatacagtgaccttgtccccaccggtgtgccccatgcagtgaccactgatactaagttcagaaactacctcatccccaaggtaagcttgtttctcttacactatatttctgtacttctga

SEQ ID NO: 7274 - DNA, 260 bp, mus musculus
gttggttttattatgaaaagtccactttgaacagtaggttcatttctcattttaaaaattccatgctctaatgctgtggtggggagatgaaaacaatctttattgaagcataagtggaaattctagaattgtactgaggcatcctgacataaattccagtctgggaagtaatctaaaagttagtctcttacaaaggtgtttctatttaagcagaggccatacctaaaggaattttattattctaggagtgtgtttcataa

SEQ ID NO: 7275 - DNA, 1252 bp, mus musculus
gagcagtggtgagttccacagactaggaagggaaggaagggtgggtctagtgtttacatgcttccctgagttgtggaggaagttagtgcacaaggtctttaatgcaggcatgagggtggttagggcctcaacggatggtggccttgggattagaaagcaagagatacgtgtacgagatttaggagggaaattcaatgggaaaaatagagaaagcgggacaagaagataagattttgagcgtgggtgactggaagaatgatgtcactgacagaaatgatagtctacaggggcagctaattttggaggagggttgggcattcactctcaggagtgctgatctggtaatgattacacaacccaaaatcactgcagagtggacatttggaagtgtgagattggcactcacggggtgggcctggacaaatggatgtttttcttaattcactatttatcaaacacccaccatggaccaggctctgtgctagggatgcaaaatcaaagaaggctccaattcatccttgaaaggaggagatcttttttcttttttttttttttttttttttttttttttgagatggagtatcgctcttttgcccaggccggactgcggtggcgctgtctcggctcactgcaagctcctcctcccgggttcacactattctcctgcctcagcctcccgagtagctgggactacaggcgcccgccaccgcacccggctaattttttgtatttttagtagagacggggtttcaccgtattagccaggatggtctcgatctcctgactttgtgatccacccgcctcggtctgaaaggaggagatcttaatcagagtcatctaacagagatcaagagatcagtttctaaaacacagagggaaaaaggagcgttcaaggcagtggctttcaaaggcacggcctgggcacacccacctccatccatcctgcccttcacagggcagagtgggccattgtgggatccatgttgaaattttatgtattttttctgtaaatgttaacgaaccaagttggtttggatttgcattctagatgttgagtggaagagatatgacgcacagctgcacacgcagtctgcaggaacctgactgtgctgtctctgtatttaacagaggatggtcggggcataaagtagtcctagtcaagcagccgcacaatgctgagggctgactgggtgaatatcatgaaagctacgggtgctcttgtggatactgtgaaatgctgttatgttcttaa

SEQ ID NO: 7276 - DNA, 559 bp, mus musculus
ttatttttatagactcgactcttggttacacatagcatgcactttcttcctcaagtggatgagattgtagttctggggaatggaacaattgtagagaaaggatcctacagtgctctcctggccaaaaaaggagagtttgctaagaatctgaagacatttctaagacatacaggccctgaagaggaagccacaggtatgtaagaaggattgggacaagatagaacttgggccatgggtggaatggtaaatcaatatctaattcctgaactgctcagtatccagtgaactagatttggaagcaaactacccagagattcaaactctgctttctgggttctgtgtctctttgaggaaacatagaaattgaaactctatgcctgggccaaactggtgacttatcctgctcatctgatgtctgacacacaatcaaaggacactctttagaagggtacaactgaaagtctgagtgagtaacccttgtggaagaaacaccagtggcacaacggtccctcttttagggatgccatgttcctattgactctagtcacacatgtcatcc

SEQ ID NO: 7277 - DNA, 1516 bp, mus musculus
caagaacaaaccagcacttcacccagcccagtccacccctccaccaggccccccagaggggttcaggctcaaagagggctgggaaatgctgtgaattaattaccatcagacctccggccactgttcatctctgtaaacaaacattttaatatgcagtaattaattacatctgccacagcgaccctcctctcgctcatccttcttcagcttttcttctgctcacactagaccaacctcctcctcccagttggagcctgaaagccaggcagagccccctctgtccatcgccccagccttctccccccaccatcagatgcaggtgctcgcatctgccatgctgctctgcagctttttgttcttttttctgtgtctctaatgcccgtctgtctttctgacagtcctttgtctccagttctctctgcctggatttctctccccaacaaagttccatgccagggacacattctgggaggaaggggcaaatgaggaagccagtggatctacccaaggtgcctgagcatgtttcaactcctcagtgggccaggaccacgctaatttacagggattatccaaagaccagaacaggccctgttccaggactctcctgccacaaccactgggttgtgagctcctgggagtccttctgacgctgtttcttctcctactccaccccctgcctccacagcagctctgcgtgaaaaacgcagaggggaaacaattgcccagttgagcccacctggctatgccacagttacttttcgccatagccggaaataccactgttggatccaccttctgcgccccaggcctccccagcctccgtacccaggaggcagccagcttagcagggtaggcatgtgggtggcccaccagctcctggaatggagcgtactccgtttctggggaggttccccgcgtcctgcctggagtctagaagggagcggggaagtgaccagcactagattagaggcgggaactccggatgagaaagagacgagggggccaggatcccagggctggcagcgacaggaaggatgggaagaggtccgcaggcccgacgggtgcgggccagcctggccgcgcagggggagctgggagctgggtgggcggggtggggcggacgccaccaggcgtggcgcggggaacagagcagaatgaaatgcagatgcaaaacgtgctcataagagtttcctctctctccccatctgccaaagccgagattttaatctttaatccatgagcaatcagcgagcagcggcgaatggcacattacagatgttttactgtcgcgggcgctcgcagctttcgcgctcggcacaggcgcgccgggcgcccccgctccgcccgccccctcttctccccctctggttcttcttcctctcccctccccaggtccccgtttaacactatccccctcacctgcacgctcctggcccgcagcggaggtgggactggggagcagggcctgggactccgctggtgggggtacacgcaggggcactggcgggggcggggg

SEQ ID NO: 7278 - DNA, 1126 bp, mus musculus
aacttatgtacttaattttccttatctttaaaatggtataataatacgaatttttagctcacaagtttggtaggatttaatgaaatattacatctaagatacttagcacagtgcccagttctaaatcacttaatgatgctagttaatgaaaataataacaattttaccaagctcacattctataagatttatacttacaggaacacttaacaattatatatctaatcttcgtcagatagagaaagagacatatttgctatcctggtttctcggggttatcagagaggtaactggcaacctaatttcactacgttttgcttctttgggattctggtgtctgtctttttatttcatctttaacagctgctcgcattagccttttgggaatccagctaaagagtttttcatttttaggaagccacacgttctctatctttaaatcaaaggtgaaatgcagcatgccatggcaataatccaacatttgaaggccacatgcaccttccagtttaaactcattttctatgaagtcaaaactcatccttcgcttttgaaagtatccaaagcgattagctgagacagcagagaacaggcatgagaaggaggcccctggtggccaaaatgaggcttctccctctccgtttttaatggcatgcgaaaggcattaatccacactttcattttctcttagccaaatagaaatgtcttgagataatgtgaatgccttatggcataagtgactttctaaagtatcttattagaactccttatctgtgtaaattaggccgcattggggcttgatagccagaaacatatttcttaaaagctgacaaatgggagaagctcacaaaaagttaaccaaatgccacaggggaaacttccagaggacgcagcagctctagtgtgtttgcaaggctggtgcctttctgccatgtcacatgcaagtgacttccttgggggctgctttattcagaaatgaagtcagatttcccaaatgcttctcaagaaccatgaagaaaaactacatggtcacagatggatgttgggatattactgcagaaaacagacaaaaactttatccttgtagggtgttcaacacgcttttgagaatgataccctagatttcaag

SEQ ID NO: 7279 - DNA, 490 bp, mus musculus
cagagacaaaaagagtctcgttactctgagaaggagacagacttgtgctaagaagcacacacttaggaacatggaattgaagttggtcttgaaatcccaagcaactttttttttcccccaaaggcaagtctagtaatggcctcaggtactaggtggttctctcatcatgtaccatgtaaacacttttattaaatacttacttgcagttttataatatattcatttgtaatagcaagcatgatgttttgtcaatgctcttaagacattctgcaaatctcaaatgactgcaaaaataatgaaactgagtttttaaacatatatgccagaatttatgcatatatggtataaattttgttgttttcatatgtaaaataagagtataatacttactctttagaggctgcattttatgcaaagcctttagttttaggtttatataacaaatctcttagttaaccatagttttaaagattactgtctttataaagta

SEQ ID NO: 7280 - DNA, 412 bp, mus musculus
ccagatgtgggcagggtctgggtcagacttgaacccaggcccttctcatgggcacagtgcagagcatgcagtaggcacctggtaaatgcatcaagactggagacccaaactctctggggagcccttgtgctctcctccaagcttctttcttctcaaagtccctgcatttctagattccttatatatggaagcccgtggtgggtctgggtcctctctggggaagcaggggttgagctgagaggtctcaattctggaacatactgcctcactgcctaggtaagggccccgctccacactcagccttgcctctgtgcctattctcttttcttgtttctctttttgtgttggtggaggtgatgggggagaagaaatgattgcttttgagccagggttgatgcagccctggttgaat

SEQ ID NO: 7281 - DNA, 1587 bp, mus musculus
tctgacagctacaacagaggtggaaactacttataggcctataagagaggaagaaacagattcaagtggggagaactggtaggacttgtggcgggggccagtttttaactagaaattttgaactggctgggcgcggtggctcacgtctgtaatcccaaaactttgggaggccgaggcgggtggatgacctgaagtcaggagttcgagaccagcctgaccaacaaggtgaaaccccgtctctactaaaatacaaaaataagctgggcatggtggtgggcgcctgtaatctcagctacttgggaggctgaggcaggagaatcgcttgaacccaggaggcagaggttgcagtgaactgagatcatgccattgcactccagcctgggcaataagaccgaaactccatctcaaaaaaaaaaaaagaaaagaaaagaaaaaagaaattttgaaccatggccaagagataggagaattcagagatacttagcaaaagtgagtgtccagaggcatgaagtgccttagaattggtgttaggtgagcaatgcggcattccagaccgggactattggcagagcctttgattataggctaggacttgattttacatagggcattttggattttctctgttctatagatggagaattccatccatatgaaatctgttgaaaaattgcctgttcttttccatcttcttgttttggtagttttcaataattgccatctgttccaatattaacttgtaaactctaagcagatagctacatgtaaggacttacagcgttgtttcctaaagtgtgtttcgctgcagaaggaggcgttccaccaaaagatgacttcatggccaagtgtctgtgtgcaaggctgcgtactgcactcctgtcttgtagagattacacattagcatattaatggttctaagaagtaacattccttttttactttttataccaaagagtttctcaatgtatttggtcacagaccctgtacatcttatcatcccacgaaacaagatggggggaaatgttggacttaggtacacttcatagtttttatatatgctttatgtaagtttttcatagtccccataccatccttatcaggtacacattattgtccccattactcaaatgagaacttaaggttaagtgactcttccaagttcacaagccaagaaaagagcaaaaatttgtacctaaattctcctaatctgggaaccattccaccacactgtactacctcttagattcatgtgtatcatttcagtgagcaccagcgtgtcccatccttctctggaccctgtctctagaagtcctttataaatgtacttctaccttggcttttccagtcatagcatgtagcacgaaatccttaattgtccactgtgtaacacctttcatgacatgtgctgttccatgtggcactgactactccagagtccctgggaacattatgctttttttgcacactcgtctccattttccacgctatacgctccttatatgcaaggtactcttagtagttgcagcatctgtccaccgtccttggctccgtagtatcaccgggtgcttctttactaaatgagagtat

SEQ ID NO: 7282 - DNA, 805 bp, mus musculus
tagtatttttaagtagcttttctgaatgtagtctctagaatctgtctccgctgcagtctactcagttgttgcttttttcttttcctcaagtcttatctttattttatgaggctggtttcctaggggttgcccctttgtgtgcatagcttagtggtcagccaatgactgggcagagattgtattcaaaaacctccaacccataaggcttacatcctctgcagtgatctgtgtgtgggttgcagagcacattcaaagttcagccagttcccaagcttgccttggctttggcttctcactggtgtctctcaggtcttcccagcacatatatatactttcccactccataagagatgcatagagagcttatctagcacttctgtggctctttcatttccaggatctccccatcacatttttggttggcctgttacccgccccaactaggactgtaactttaggctagcagaggtgtgggttttcaccattcattacctaccgagtttgctacttttattgacaatgctgctaggcctgggttttgccctctgctccaaatcaagtcagcctcttctggcagccccaccctggtaaaaccatcattctagccaactaagctaaggggtgaggtggggttgttcttacccaaaattctgccagttttctatgaataagcacttctcaacttgttttttgcctttggtcgtcatccagatcactaaaagacgttttttttttttttggtgcattctccagttttatacttgttttgtgaatttgccgacctcttcgctcatagctggaagtc

SEQ ID NO: 7283 - DNA, 642 bp, mus musculus
ttttctatatgccaccaccatattagtcttcctaaaattctgctttcactaatcacctcacttcaatggcatttggttattcttaggttaaaatgagaggattaagctgggtaactctaagatggcttcttttaaattttatccttctgggtcactaaactagctcagaaaccatcatgagttcagtatttcagccatgttaaagtcaaacatgtcagtctgcttctaagacaccctgtgttcagttgataaacctactgttctcatccttgtatctgagagtttgtgcaattattttcttttttagaacatgcttctcttctctctgttgtgttccctatacatccttcaaaggcctaatacaaactccgaaatgcttgaatgaagcattctccggcctctttagccgtttaggatgctcccacctttgccctgctttggcagcggttctctctctgttcatttgacacttaatcatatactatcatattgttatttagcattattcactcattaggcaacatttcttgagcactgtgatttttctgtattttattttcctgatgagattataagctgtttcagagttaggaaatgtgtcacaggtttctttgtttttccattggaagtattcctcttggg

SEQ ID NO: 7284 - DNA, 1098 bp, mus musculus
tatcagtgttatgcttgcttcaggaaaagaaattcactgttttccttatatcttcataatttagatcaatttatatagtttttggattatctggtgtctcaaagtatttttgctttttgttcataatacagtttttaaaaaacttcatcagcaaaacaaaacaaaaactttcttcatttcagctatggttactgggtgagaaatagacaaatttgcagggactataacatttaaagacaagaaggaatcaagaaatggaaatgaaaagcactggaaagacaaaaagaacatcattaaatcaaaacactgcaactgtctctccccaaaagataagagagccattgatttaaacaaatttcttccaccatacagaagccattactttcaactgtgaggcctcagaccttctctcagtgtttccctacacggggaaagactttcactttctgagggtcatttaatctgtatttcatcacccttaggcaccctttttcctttcttctatctaccattgagtggttacttaactctttctgcattggtgtgggcttcagagctgaagttagatgtttatttccctatttacatgtaatttcaagttttgcaaaatcctctgtttccttcttagcttgtatacataacttataggtagttttatttggttttcgtattgagaggtcttttttacattatttttccttttggaaacttaaacatttttaattaaaaaattttgaattaaaaaaatttaattgttattttgtaggaactttggctactgtcattgccttttttaaaacttacatagagaaaatttaccttttagtatacagtgaattggcaaaaatattcagttatgtaaccaccactgcaatcaagatatagaatactttgatgatcccagaatgtaccctcctgcctatttatactcagtgcctgcgttccagccccagcccctgatctgttttcctaattttgctttttccaatatgtcgtacaaatggaataatatgctatgtatcctcttcggtctggctttttagatttaccatagtgcatttgagattatatttgttcatttgtcagtaataatggtag

SEQ ID NO: 7285 - DNA, 997 bp, mus musculus
atgcatgtgtgtttctttcaacctcagttaacacactatcaacagagctgaatatctgttcatgttacctggaggtcacttcttcctgccaagaaactcagagtgggtcatgaggggaagggcaataagagtgctcctgatggcagggagaaaccggagcagatacacagccccactcagcttcagattagtctaaattaagtagtgtggcctatggaggggtctcagcttggagggcaacctgatagtgaagctagaatctcagtctatcgatgtactaaattgatggcaatgaaaagaattcttcccagacacaaaagtacacttgtttccagattaatgtatcctcaatgtaagcttttcagcccctgctctgaaggagttaacgcgtgcttgcttcagggcagaggcacagccacggttgtattattttttgaagtatttgcttgcagaggtgacctgaccacttgctcatgaatacactgaagcactattctttcctaacatctcatgatgccaattcacaaggacactaaagagtttgtttaaagtggtggcgacagagggacaacccagaatgcctgctggagggacattacaagtttccctctggcagaatcgaaagtcatctttagacacctgcccccactgctttccccgccatttcctccttccacttgctatggagcatctcaattacttgctgttaagcatcttggccttatctttgtgtaaccaatgcctgtttttctactcaaaaatgactaacaggaattcagggtattgtgttgaattttaatgggttattttgtttctcatatgctgattttctaaaggcctcacagtggcttcctctctcctccttccttaaaaagaagattgagaatcctcatctctgatgatgttgagagtcagcatctttctaacagctagaaagggtcagtggtataagactgtggaggaaaaaaatcgtaggggaaccatttattttatattt

SEQ ID NO: 7286 - DNA, 933 bp, mus musculus
ttaattgcagctaaaagcatcccactggacgcagcaccctctccctcccagcagcttggcattagggagcccagcatcctgaaaatcccactgagctcccaggaaatagtaatatctgcctcaccagccccacattgccccatcttccccaatggctgtttgccaactttattgcatcaaatctattgaagtttttgttgttgttgttttaacttcgcagggaaggctgttctatggtgctgtgagtcatcctgggaagcagcagccctagtgctaaggcaggatgcagatcagtctgttccagtacccacctcccctctctcctcccccgcaaagggcagtttcctctggaatccatgcacatgcaatttatttctaactgctccagcaggttccaatcctgttgcttgctgcgtctagttattcacttggaatcagagctgctggaaagtcaaaattagcctcattctaccagcatgaaatagaaacacagaggcagtcccttggctttagggaggcaagaatctagaatttttcttatctctctgtgaataccagagctgagggttacatgggtctgtgattacacagtcatttggaaattgtgcaagttggaagcagcactgtcattgacttcctgttaagaggaggcagcaggagaagccttccagagagggacacagggcagccatctggttggaagtcattgtgcttacataagttgtctgttcacttaaggaggcaagggttaagcaggctgcaaggcaaggagtgtgaatgaccctaagccatgcttgacaccatgcattaatgatgttttttatcttctgtagtttataaagctttgacatcctgaggccttgctaatcctggagagactccccttccagggctagctaatttctagagatagtaaacaatttgcctgccaac

SEQ ID NO: 7287 - DNA, 1406 bp, mus musculus
tgctgtcaacaaccacatagaatcaccagggacaccaatatagacctgtgaaggggccgtactgatcaggttaaggaatagtaatggctcatttctacctcacgcgaggctgcacaggcccgggtctgggaagccagggctctggtttttgttctgttagagacagtctgggagggctctggggcgtgggttcgtcccaaggaaaagctggggtttgagatgcccccactggtgaggctgagttgcatctgaggcctcggctggccccagagacccagtttggactttctgggctccatcatttggctcctggtctctcctgccagaggacgaacagagagagaagtcagtctcccaccagacggtgcagcagctggttctggagaaggagcaagccctggccgacctgaactccgtggagaagtctctggccgacctcttcagaagatatgagaagatgaaggaggtcctagaaggcttccgcaaggtagggctgagtttgggggccacggaggaggaggatctgattgggagagattgtgggagcactgggagggggtaggattccagaagttggtcttgagccacctgcgaggagggggtccatgcaggctggggaggcagacttggccgcctggggttacacctgcatccgagagttcctggggttcccaccagtgctgggcatttgttctcgtgggcttgacgcctgtcctctgccctgctgtgtcagaatgaagaggtgttgaagagatgtgcgcaggagtacctgtcccgggtgaagaaggaggagcagaggtaccaggccctgaaggtgcacgcggaggagaaactggacaggtaacatttagccactgggggtggctcccaggggcctcccagcagcccttttacccaggcaggctgggacctctggcagcgcctgtgacattggcttggaaagggggcatcatccaagtgtgtgtttcaataagactcgagagaaggcacacagttagcatcatttaatcagtggaggatgcgtgttgcaatgtccagggtgccccggcaccttggtctcatggcaatggaattgggtttggtgttctcatgggctcctgtgctccagctccagttggtggcagctggggccagaccaggccactctccctgcctggacctgggaagcaggaggtgtctctagtgatccacaaaagagtgataattctgagctccctgtctccgcagggccaatgctgagattgctcaggttcgaggcaaggcccagcaggagcaagccgcccaccaggccagcctgcggaaggagcagctgcgagtggacgccctggaaaggacgctggagcagaaggtaataggggaggggtgtggcctccaggtgggccgggctgctgctctctgtgctgctg

SEQ ID NO: 7288 - DNA, 1406 bp, mus musculus; identical to SEQ ID NO: 7287

SEQ ID NO: 7289 - DNA, 1769 bp, mus musculus
gatgttaattactgtggtagatgatgataacgatggctccggtgaatcacacctccctgtgtccacaccccttggctttgcggtgccacccatcaacagatggagtctatttctacatcctcttgagtctgggttggccctggagcttgctttggccaacagagtgtggcagaagtaacatggtagcattcagtagtttggagctcaatgtgccttgcagcttctgctctggcctcttggagtcttgggaccgtgtagtgcaggggcctctactaacctgctggagggaacgcggccatgtggaggagaacctcagcccgaccaccagccccaattgccagacatgtgagtaaggccatctggaaccttctagcccagtcgaccctcctgtggaatgcagcctcatgagtgactccagaagaaaccctgcaaaggatttcttcagccaaccctcagaatcataagaagtaattaattgttgttttaaatcactaagtttgggggtggtttattaccctgcaagagctaactgaaatacataccttttgaattaagcaaatccactttagtagtttatacttagaaaataaaaatccagaaaatagcccatgatttaggtacaaaggcattccttatagcattgttgtaatacaaagcatcagcgtgattttaggtgcctaacagcaggaattaaacagaatagggtagatctgtacactagacaatcattacaaagtttttgttgaagcaacctagtggcaagatttccagaatatactgttaactggaaaactaaaacaattttttaaagtatgcaaatatgatctattaaaatatgcatattctaaatatattttaatgaaattgatgggtccaaaagcatatgcaactttgatctgatagtataaactcgctctctaatgtggatgtgataattcgtcttcctcccaacactgaggaaccttgctgctgctttctgtcgctgttgctggtggtaaagggcccttgactgacacatttgagaggctggtcaatccatgcacagagctgatatgagttaaggcaaaggaagcttcaacctttatttcacttagcaggattccctggtttcttggccacccagagacaccttcttgggactcatttctcatccaaccgaaggggcctgatgtgctcctggactcctttaaggagagagaaactttgggtgcagcatcacgaattgtaagcaggaagccaggcttctgagagtcagatggaactgcagctgggagcaggggggttgtcatttgtctgccctgagccaccagaaagggttcagtgagtcttgaacacagtgattaacttctctttaatctacgcatcactgcacagcacagccaattgcttggcttccccaataagagtcatgagtcactcaatgtcttaatgtggactgagcacgttttattccaagcaggtgcgactgttcctgtatgtgcctttgagatacctaggaaatgaataatgcttgttgtccccctccaacaccaactgaacattgaatcaatggtttactattttaataacaagtgaatattgctctaagactcctttttttttttttttttttgcttgttcagtgccagagggataggttcccatttcttttcctggctgttgggtcacggctgagggtccctgggatgtggggcatctccgtaagtaacaggaagtatattaactcgtgggttaattaagaaaatcattgacgaaaccacatgagtgtg

SEQ ID NO: 7290 - DNA, 1001 bp, mus musculus
gggtatggaaacacatgagagaatgtgatagtgaagtcatatttacaaaactgagaacatgtccaaaatggattcttgtctcctcttcagaattagccatttaaaatattttctgtgacttcaaattgtaattcttatttgcagttttaccagtcttcatgtacagtgacgaaactgtgtagaaactaaatcatcgctttagtaagaaaggataaaaaggtgtggaagtgaatataaaatgcatctaaacatgacatttaatttgtttataaaaataagacttactaaatatagagtaattcattttgaataggaggctattgtttttatattgtgtaataactcacgtactctgaagagagcttggtcaaacaataaaatacattgttactaacttggtttcttttctgtgtactttgcaaaaattctatttttaattttgttcatatgttgaatgtgcccctaattggcatcttaaagagaatagtaagcatctattaaccaaaaaagaactctaatagtaaaggaaagggaaatattggtggtatgtacccacaaaacccccaagtgccaagttaatggaatctctgctttccctttcagatgctagaaagccactgtaatgagttcttgcagtttagcatccagtctaagctactgcattgtttaaagagcagcatcaaggacactttctccaaactggaactctcttctttgtcaaatcttgtactttaaaattctacaattctgttacattgttgtttaaatcacagactgctcagatccattttactgcagtagtttccaagtgtgtaacttggctttagtatttatcagttgccagaaagaaacaggttgtcatttggaagtttttgtggttattttttcccatttttattcttcagataaaagcagtaccccaaaatagaaaatgaaaattttcatgaaacaaagagaactcccttgttaaaaccagcttattaactctgtattctgtcaaa

SEQ ID NO: 7291 - DNA, 1001 bp, mus musculus; identical to SEQ ID NO: 7290

SEQ ID NO: 7292 - DNA, 1184 bp, mus musculus
agggaagtgattctctgctccctagcttttgccccagtccacttatttgcctttttagttcaatgtgaaggtgtttcaggctataaagaactatcctatggttcatgggcattaccaatccacatttctatgttcttggccatgcatcttcaataagaaagatcctatcgccaaatgctttcaaaagaagcaatctcagtaaatgaattatgctctaataaaaaattgatgggatataatatctgaattaggagatctgaagaagcacatgagaagaagaataaagttctaatggttgctattgttcaggcagtgcccttcccagatcttccatcagccgacacagagctggagggccctttatttaaatgttctgagtcaccgacacggcctccactatgtttgtaggtagatgaaaaatgccttctattaatgagtgttcttggacttaattaaaattgataccactttcctcttaataagaacagaaaatggtcccaaatttgaatctgttctcgtgaagaagatagcatcaagaactgggaatgaaacaaatgcaatttttttctcattacaacattcacattttgacctcaaggactttcttagggccctattcttcgttccctcctcccagccactgcttttactgtgcaaagcaatggtacaatttttccctcttgaaaaagaagtcgttgccccgacgtcttgagttgtctgtggggctccagggcatcctctaagtccctaaataggttgagttgaacaactctgcagtaggtgagaaaatattctgccattcacgggatgtgattttgcataaaatggctactgaagaatcctatatagaagcaagaataggatgcatttctacctgctggtggccacattggcagttgctgcattgggctcacctggaattttgggttatgatgatactgcatccgttggctttaagtaaaagagggaggggtgaggcgaaacccaccaaaatccctaaaaccttttcgacatctgtaatgtcccatttgtgccaaccagaacctaacgcccgtgatctgctcaacaggcaggtgatgacatgctttttgggtacgatatatacaccaggccattagtctgcaagcagcagttgtcagctttgttcccatttagagtaattttctcactaatatagcatattc

SEQ ID NO: 7293 - DNA, 531 bp, mus musculus
acacatgcagagtgtttggatcagggcctcgacgtcagggggccaaattatattattcccatcatcactgtcagcttcctaagtgttttattactgagctatgaccgtgtctagcacaatgcttggcatggggcgagggttcagtaaaggttgccatagagctctcccaaaccctggtctgaacgtgtgtctccaaactccctgtcacttctgctattcatgaatctccttttctggccaagttcagtatcacactcttgtgcattcacacatccagcactcctaccttctcatcaggcattcccctctgccagcacccatctaccacttccttctagttatgtcagcccctccctcatttccccaacctctgtgacctccccatcccacccacccacctggagggcccgagctctgcatcacacctgcatcctagtgagggatcagcctcctgtgctctgtgaagcacaagtccgtgaggttcaccctgtgacaggagctgggtcaggcaggtggcaggtagcaggtgtg

SEQ ID NO: 7294 - DNA, 252 bp, mus musculus
aaagctataaaagtgtatgcccagcgatccgacaaatcattttcaaatttcatatgaatggtttcttgatgaaagaaaataattataacatatctggcattttggcagaattatactgagtaaggcaggggaacctgtgttcatgttaagtatcagccaagccagagatttgtgcggctctgctgttagagatggtaatcaggaaaaccataacaacgtgtttatgcagcactcaaatctggctaaacttct

SEQ ID NO: 7295 - DNA, 1014 bp, mus musculus
tgagtccactgggagcattgccaagcggctgcagtcccttaacgccgagaacaccaaagagaactggcgcttctactgtcagctgctgctgacagctgacgactgcgtgaacccctgcatcggggacgtcatcctcttccaccagacactctaccagaagaaggatgatgggcgtcctttcccccaagttgtcatgtccaagggtggtgttgggggcagcaaggtagacaagggcgtggtctcccttgcagggacaaatggcgagaccaccacccaagggttgtatgggctgtctgagtgctgtgcccagtacaagaaggatggagctgacttcaccaagtggcattgtgttctgaagattggggaacacaccccctcagcccttgccgtcatggaaaataccaacgtcctggcctgtcatgccagcatctgctagcagagtggcattgtgcccattgcggagcctgagatcccccctaatggggaccatgacttgaagcactgccagtgtgtgaccaagaaggtgctgactgctgtctacaaggctctgagtgatcaacacatctatcttggagggcatcttgctgaaccccagcatggtcaccccaggccatccctgcatccagaagttttctcacgaggagattgccatggtgactgtcacaacgctgcaccgcacagtgccccccgctgtccctgggatcacattcctgtctggaggccagaatgaggaggaggcatccatcaacctcaacgccattaacaagtgctccctgtgaccttctcctatggccgagccctgcaggcctctgccctgaaggcctggggcaggaagaaggagaacctgaaggctgcccaggaggagtcaagtgagccgtggccaacagcctggcctgtcaaggaaagtacaccccaagcagtgagactggggctgctgctagagagtccctcttcatctctaaccatacctactaagtggaggtgttccccggctgttcccaacactccaggccc

SEQ ID NO: 7296 - DNA, 521 bp, mus musculus
aatagaaaagaaaacaactctaaagtcaataattgaagcctctaccttggaaaatgaaataacaaagacaatgtaagcctaaaacaggcagaagaaaagatgtaataagaattataactgaaatcaatacaattaaaacaagaaatcaacagagaaaatatatttaaaaaatcaaaagccagctctttgaagacaacattaaaattggtaaacctccggccagcccaaataacacaaaaacaaagaagacaaaaattacaaacatcagaaatgaaaaaggagtcattactactgatcccagtgatgttaaaaaagaaaaaagaaatgttattaacaattctatgctcataatttggataagttacatgacatggaccaatcccttgagagacacaaactgccaaaactcaaacaaggaaaaattgacaattggaataggcctaaaattattgaagacattgaatcaacaattaataactttccaaaaataaaccaccaggcccagatggttccatgggtaa

SEQ ID NO: 7297 - DNA, 2369 bp, mus musculus
cagtgcatctcaatgcatgcttctccaaaggtcagaacagactccttcctatcttgtttccaaaaaaaaaaaaacatttatttttgtatgtttgccttagctcatttccagattaaagaagagagcagtggcctcagctcagtgattaattacatgaactccttacgtggtattcgaccaatataagcccattaagagaaaggctgggttcttgttgtggcctactgaagactctctactctcatctcctgaagagcagtaagagagaccaatgacatggagtggcggaaccatagtgggagagtgagtgagtttgtgttgctgggcttccctgctcctgcgccactacaggtactattgtttgcccttttgctgctggcctatgtgttggtgctgactgagaacacactcatcattatggcaattaggaaccattctaccctccacaaacccatgtacttttttctagctaatatgtcctttctggagatctggtatgtcactgtcactattcccaagatgcttgctggctttgttggatccaaacaggatcatggacagctaatctcctttgagggatgcatgacacagctctactttttccttggcttgggctgcactgagtgtgtccttctcgctgttatggcctatgatcgctatatggccatctgctatcctctccactacccagtcattgtcagtggccggctgtgtgtgcagatggctgctggctcttgggctggaggttttggcatctccatggtcaaagtttttcttatttctggcctctcttactgtggccccaacatcatcaaccactttttctgtgatgtctctccattgctcaacctctcatgcactgatatgtccacagcagagcttacagatttcatcctggccatttttattcttctagggccactctctgtcactggggcctcctatgtggccattactggtgctgtgatgcacattccttcggctgctggacgctataaggccttttccacctgtgcctctcatctcactgttgtgataatcttctatgcagccagtatcttcatctatgctcggccaaaggcactctcagcttttgacaccaacaagttggtctctgtactgtatgctgtcattgtaccattgctcaatcccatcatttactgcctgcgcaatcaagaggtcaagagagccctatgctgtactctgcacctgtaccagcaccaggatcctgaccccaagaaagctagcagaaatgtatagaagggatgtgtgaaatctgataaaatgctattaaacttgggatcaatgtgttctatgaagtccagtggagttcttagggcctaaattgggggccagagtttcaaaggcatcactatggaactaggaatactttctttaactagtccaagaggagagagaggaataggttgcaagctagaaaatggatttctgcaggacagggccataaaatacaggatagagctgggtccactattgtctgtccctttgtaatttgcatagacaaggttccaatcaaggaagcacaggcttcattacggaaaagcaacacaagactttttgataagatctctattaggtagcagaggcccaggagatatcattctagcgtgtgttacaaggcaaggagataagaaactaggaatttttgttttgggaacatatcacctatcaaaacataatggtttctaggtttattttcaaatttactgtggtcagtgtccacattgaactagtggctgagtgcagttgtttcatcaatactctgtctccctgattagactataagcaccatggtgacaggatcagattttcttttacatccttttattaccatgggcaggaacagtatctagtgcatgatggctatgaatatgtataatgaatgaatatagtttggaaccatgtaggcaaggcatgtgtgtcatgcctatatgtggggttggcaggtgcaggaagtaaacccctcatactttactagtatgcagagagatacaaattggctcagccttgccagaaaaaaattttgaaaatatgtattacaaatcctaaaaatattgcaaccattctgattcggaaagatttgtgcagatagacacttttacttataaatacagaaacaaggaaaggaaataagcaaaatatgctcaactttcgcaaacagggcactggtcaaataaattgtagctcatatgttacatggaaaactatgcagaaattgaaataaagtgatctaaatagagttaatgaaagaaaaaatatttctaacttaataaaaatattatgttatataacagtatcaaaaatatcagccatatttgcttgtttaaacaagactagaaggaatatga

SEQ ID NO: 7298 - DNA, 2321 bp, mus musculus
ggagggagcaggcagaacaaagacgcccttgatgggggattcagggaggcccgggctgcttctcagggctcagacggggctgcctgcacgcgccggaccagccgccagccctgagggcttttctgttctcctaggtcagtttcattgacacggagaactcaggaaatgtttttttggggggttttgtgtgcgtgtgtgcgtgtgtgcgtgcgtgcgtgtgtgtgtgtgtgtgtgtgtctttttttcttcctttctttctctctctctctgtctctctcttttcttttctttctttcattttgagacagggtctagctctgtcacccaggtgcccaggctggagtgcagtggtgcgatcttggctcactacagcctccgcctcctggactcaagtgatcccctcacctcagcctccccagtagctgggcctacaggctggccccaccatgcccatctaattattttatttttttgtggagatggaagtctccctatgttgcccaggctggtctcaaactcctaggctcaagcaatcctcccccctcctagccaggcctggtagtgtgagctcgtagtccagctacttgggaggctcaggcaggaggatcccaccacggccctccagcagcctgggcaacagagtcttaggccaggcgcggtggctcacgcctgtaatcccagcactttgggaggctgaggtgagtggatcatctgaggttaggagtttgagaccagcctgaccaacatggcaaaacctcatgtctactgaaaatacaaaattagccaggcgtcgtggtgcatacctataatcccagctactcgggaggctgaggcaggagaatcactggaacccaggaggcggaggttgcagtgagccgagatcacaccactgcactccagcatgggcaacagagcgagactccatctcaaaaaagagaaaaaaaaaagggaccaggcgcggttgttcatacctgtaatcccagcactttgggaggccgaggcgggtggatcacctgacgtcaggagttcgagaccagcctgaccaacatggtgaaaccccatctctactaaaactacaaaacttagctggacgtggtggtgggagcctgtagtcccagctacttgggaagctgagacaggagaatcactagaacccgggaaatggaggttgcagtgagccgggattgcgccactgcactccagcctgggggacagggcgagactccatctcaaaaggaaaaaaaaaaaggcccctgcgcctgggtacgagctgggctcccggttgtggtccaagcctgggtgcgagctgggctcccggttgtggtccaagcctgggtgcgagctgggctcccggttgtcgtccaagcctgggtgcgagctgggctcccggttgtcgtccaagcctgggtgcgagctgggctcccggttgtcgtccaagcctgggtgcgagctgggcttccggttgtggtccaagcctacaggactaggaaaaggagggagggtgagggagcctggagctgggtcctcctgcaggaccagtcctttctgccacaaacagccctggctgggggcccaaaatgccccctggttcccccttgctgtcctccacacctgcagaggtgagacaggtcactactctttgagcctcagtttcctcgtctgtacaatgggtccaaagagccatcaggagtccctgagctcttgaatcgggctgttttgggtgaccagggccctcccagcagcctgggcagctagaccctgcatacagccaggctggtgacttcggccagctcagtgtccaggggaaggcacagagcagtggccgagttcactttagtcccctcttcctgggcagctccaccacctttctcagggactctgccctcttcgggaggagcctggggcctctcagcctggctcctggactttggccccagctggcctggcctggcccccagccagcaggagcctcgtctgcccagaggccaacagagtgaggagtggagggtgggtggggctttcctgcctctccccgatgaggacactggggaccagagagagggtgagagtctggtgggaagtctctccagccaggtgggggccggatcagattggccctgacagtgggtggggggcacctgagcccgggtccatggtttgcttttttctaagttatcacacagtaaaagccatgtgtacgtgggggtgtggttctgttgccaccatagtcgacccatcagccccatcactccaaacctgtgaatccccgaccttggtggctacccccaacctctggcaacacctgcctgccttcatcacca

SEQ ID NO: 7299 - DNA, 1547 bp, mus musculus
tgcaacatctttccatgccaccactacctatccaaccccatcacaccctgagaccacacttcccactcacgttccacctttctccacctccttggtgactccaagtactcacacagtcatcacccctacccacgcacagatggccacatctgcctccaaccactcagcgccaacaggtaccattcctccaccaacaacgctcaaggccacagggtccacccacacagccccaccaataacgccgaccaccagtgggaccagccaagcccacagctcattcagcacaaacaaaacacctacctcgctacattcacacacttcctccacacaccatcctgaagtcaccccaacttctactaccacgattactcccaaccccactagtacacgcaccagaacccctgtggcccacaccaactcagccaccagcagcaggccaccaccacccttcaccacacactccccacctacagggagcagtcccttctcttccacaggtcccatgacggcaacatccttcaagaccaccactacctatccaaccccatcacaccctcagaccacacttcccactcacgttccacctttctccacctctttggtgactccaagtactcacacagtcatcacccctacccatgcacagatggccacttctgcctccatccactcaatgccaacaggcacgattcctccaccgacaacgctcaaggccacagggtccacccacacagcgccaacaatgacgctgaccaccagcgggaccagccaagccctgagctcattaaacacagccaaaacctctacatccctacattcacacacttcctccacacaccatgctgaagccacctcaacttctaccaccaacatcacccccaaccccaccagtacaggaaccccaccaatgacagtgaccaccagtgggaccagccaatcccgaagctcatttagcacggccaaaacctctacatccctacattcacacacttcctccacacaccatcctgaagtcacctcaacttctaccaccagcatcacccccaaccacaccagtacaggcaccagaacccctgtggcccacaccacgtcggccaccagcagcaggctacccacacccttcaccacacactccccacctacagggaccactcccatctcttccacaggtcctgtcactgcaacatccttccagaccaccactacctatccaaccccatcacaccctcacaccacacttcccactcacgttccatctttctccacctccttggtgactccaagtactcacacggtcatcatccctacccacacacagatggccacttctgcctccatccactcaatgccaacaggcaccattcctccaccgaccacgatcaaggccacagggtccacccacacagccccaccaatgacaccgaccaccagtgggaccagccaatccccaagctcatttagcacggccaaaacttctacatccctaccttaccacacttcctcaacacaccatcctgaagtcaccccaacttctaccaccaacatca

SEQ ID NO: 7300 - DNA, 1465 bp, mus musculus
gcacgtacgtgctggtgcagcagattgtgcccgtgtatggccacttccgcgtgctcgtcgacaactacttctgcggtgcggaggacgggctctcctgcccgaggtccatcatcctggagtaccaccaggaccgcgtggtgctgacccgcaagccagtccacggggtgatgacaaacgaggtgggggcgcgcccggtgtgccgcggagggggtgggggacgcggctttcccggcaagagcctgagcagcggctgaccgcccgcccgcctgccttctgacttcccgtcgaccacgccctgcgtccagatcatcttcaacaacaaggtggtcagccccggcttccggaaaaacggcatcgtggtctcgcgcatcggcgtcaagatgtacgcgaccatcccggagctgggagtccaggtcatgttctccggcctcatcttctccgtggaggtgcccttcagcaagtttgccaacaacaccgagggccagtgcggtgaggccacagggctcccgggcatcgtctggcattcgcgggggcgggggtgccgggcaggggcgaggccaccacgtgccgcgtgtgccggtgtctctgctttctggctgctctgctgagtgcaggccacaggcatgaggcttacgcctgccggtacctgcagctccccagtaccatagggactgtcccagggttgttctcgggggacagtgaggcacaggcagggcccgctgcagttcaccaagttgtgaccctgagacaccagggtcctgtcccccagctgggggtggggccagccggctctgctgtccagcagcctgacccccaccgcgtctgcccaggcacttgcaccaacgacaggaaggatgagtgccgcacgcctagggggacggtggtcgcttcctgctccgagatgtccggctctggaacgtgagcataccctgaccagccagcctgccaccggcctcacccgacgcccaccacggtcgggcccaccacagttgggtctaccacggtcgggcccaccacagttgggtctaccacggtcgggcccaccacaccgcctgctccgtgcctgccatcacccatctgccagctgattctgagcaagtgagacttgggtgcaagggagggagggtcagtgtggccgccccacctcccacccttccaagggctggaggggaagaagcgcattttcagggggctcctgagaggaaacgagagctgctggtaccacagaccaaggaggggtgggtgttggggagaagtgggtgccggggaggggtgggcagtggggaggggcgggtgccgggaaggggtggttgtggctggaatgctgccaaggggtcaccagggttggccggctgggccgtctctgaggctctctgctggctcaggtgtatggacgggggcatcggtcaccacccccaggcagcttccaggtttgcagggcaggggctgggggggccaggaagaa

SEQ ID NO: 7301 - DNA, 994 bp, mus musculus
tgctgcccaggtggctccgccttgttccctgcctccgcagccccgcctcactccaggccctgcccctgcactgccccttataagccccgccccctctggctctggcccccccagtattccccacccatgcctctggggccctacccactcctggctccaccccctccccatcgaggctgtgggcgtccagccagaaggcccaggacagcctttcactcactccctccctcctctctccattctgtactccagacaccactaactgtatggaaatgatgacggggcggctttccaaatgtggtaagaatcccccacgctcacctggcacctccacctgccacttcaccgctcaccctcagcccgctgtggccgccacctgccgcccgggttgtcccggcctccctgtgtagatgtaggcacccagcagcccagatgtccccggccccatcctctaccaggagcagcccaggtcgctcccctaccacagcaagcccaggcggggttcctggccagactcacctctgccaggccctaggatcagggcaggcccaagaaggggctcccaaggcctgaagccagtgagggtcccgctggtcccactggtgcaggctgtggcctaggggaggggccggtgcccatccctctgtccactggaggctgtgcctggcagggagcggaggggcccacagctcagggctcaggtgggggttaggcttaggaagtgggattgaggggcctccatcgacacacctgggcagtgagcacagggccccaagaagggtgggctccccatttccgcccctcttctcaggactgcccccatcccagggacccgggacatgactctagctgcttgcccccagccccccagcctgcctcccacatccacccctccatgcttgtccacccatctgttcatctgtctgtctgctgctaaactgtgtccaagctggccaggggtcgggcttcaggcctctctggggaggtgtggtgg

SEQ ID NO: 7302 - DNA, 994 bp, mus musculus; identical to SEQ ID NO: 7301

SEQ ID NO: 7303 - DNA, 994 bp, mus musculus; identical to SEQ ID NO: 7301

SEQ ID NO: 7304 - DNA, 1178 bp, mus musculus
cccggctcttccgggcagggcctgactgcagcctgtctgctgcagctgggcgaggcgtcccaggtggagacagtgtcagaggagaacaagagtctgatgtggaccctgctgaagcagctacggccaggcatggacctgtcccgcgtggtgctacccacgttcgtactggagccgcgctccttcctgaacaagctctccgactactactaccacgcagacctgctctccaggtgcgcgccatgccgggaggggcaccccacacctcgtcctgcatctgcatgagaccctgcagcacccccagcccctacctgccctgtgggggcttccagagaatcccatggctgatctcagcccactgtttctgcagctgtagcctcccagggggccctgtctccaagatgggcctgggaggagccagccatccgtggtgagaggggggtcagtcccaagcacttgccatgcaccctgagccctgcaccctcgagctggatgggatgggctgcagaggcaggaagggggctgcagaggcaggaatggggctacagaggcaggaagggggctgcgcagactggaaaggggctgcagaggctggaagggggctgcgcaggcaggaagagggctgcagaggcaggaagggactgcagaggctggaagggggctgcagagctggaagagggttgcagaggcaggaaggggcagcagagcctggaagggggtacgcaggctggaagggggctgcagagactggaagggggcaacagaggcaggaagggggctgcaggctcaggagccaggcagagggagcaggtgggaacaagagcatgggcagggaggcttcctggagacaggggcaccctggcagcccaggtcagcagtgtcctctctgccccagcgtgggagcagccctggcactttctgattagaagaacccacttccccagagaaaattatcctgcttgggggtgaccagagcgcctgggccaagtggcctgtttccagctgagtggttggaggtcgggatggtaggagggaagggtcagggaaagggagggtggcccacggcccccggagctggggtcagcgttctcctgccccatggcagggctgcggtggaggaggatgcctacagccgcatgaagctggtgctgcggtggtacctgtctggcttctacaagaag

SEQ ID NO: 7305 - DNA, 865 bp, mus musculus
ttctcttctttgtggaagcttgccacactttcccaggaatgttctgtcaatgaccaatttgtagtctctagcaatcttttgagaggaacgttattatggcacttattggtttatagtctggctgtgtctttacttgcctttctcctggcacaagtttgtgagctttcagagacaaaggaacacatttcatttatttctcagtctttcatcctcatcactactttcttacaaagtaaatctgaacgtaaatttgtaacataaataagccttatgggcttcccactatcttagcacagattagggattttcagtgctagctgggtctaacaggtttctgtaaggctatagcagtctctttaatgttacccagaccctataatattttgtaatttcatcagccttggcttctccccatcagcatcctgaggatggcctccctgatgggcttggacttcatactgtaaatgatggggtggagcacagaaggcatcaccaggtacacataggtaacaagagcatgtacaatgtggggcaggtgcctcccaaaatggtggatcatggacacggtgatacctggaataaagaagacaaagacagccggaatgtgggaaacgcaggtgttgagggcccagatgcgctccctgggagcagccagacccatgactgtgtgcaggatgaaggtataggacagaaagatgagcagcgagtctaagccccctgtagaaacaaccacgtagaccccatagcatatattgatcgtgatgtccgcacaggcccgcctcattacatcagggtggaaacagaacgagtgggatgggatgttatcaccagggcagaaatttagactcttaaccggaaatggcac

SEQ ID NO: 7306 - DNA, 543 bp, mus musculus
aggaagaggcacaaggtaacttgagccacaatggccagcccaatcctgatgatgacactatttgtgaggacagctgcatagtgcagggggttggagatggccacaaagtggtcaaaggatatggccaggagcactgaggactccaccacagaggagtgcaggaagaacatctggaccaggcaggcattgaagcccatgagccggtggtcaaaccagagcacagccaaggtgatgggcagtgtggacaaggtgaggcccgctttggggagcgccagcatggacaggaagtagcacatgggctggtgcaggctggggttcctcttcacagccaggaggatcaggcagttcccagggagggccacagtgtacatggaggagaaggggatggcgagccagccatgaaccgcctccagccctgggatgccaatcatgagaagagcaggcggttggaagaaggagatgttgacataggtctgggaagggagcatcctagggaggcagccgaaggctctggagagatgtgagttcttcaatctgagtaga

SEQ ID NO: 7307 - DNA, 542 bp, mus musculus
aagaggcacaaggtaacttgagccacaatggccagcccaatcctgatgatgacactatttgtgaggacagctgcatagtgcagggggttggagatggccacaaagtggtcaaaggatatggccaggagcactgaggactccaccacagaggagtgcaggaagaacatctggaccaggcaggcattgaagcccatgagccggtggtcaaaccagagcacagccaaggtgatgggcagtgtggacaaggtgaggcccgctttggggagcgccagcatggacaggaagtagcacatgggctggtgcaggctggggttcctcttcacagccaggaggatcaggcagttcccagggagggccacagtgtacatggaggagaaggggatggcgagccagccatgaaccgcctccagccctgggatgccaatcatgagaagagcaggcggttggaagaaggagatgttgacataggtctgggaagggagcatcctagggaggcagccgaaggctctggagagatgtgagttcttcaatctgagtagata

SEQ ID NO: 7308 - DNA, 1229 bp, mus musculus
ggagagtttccagttgtggattgcctttccgttctgtgccacgtatgctgtggctgttgttggaaatatcactctcctccatgtaatcagaattgaccacaccctgcatgagcccatgtacctctttctggccatgctggccatcactgacctggtcctctcctcctccactcaacctaagatgttggccatattctggtttcatgctcatgagattcagtaccatgcctgcctcatccaggtgttcttcatccatgccttttcttctgtggagtctggggtgctcatggctatggccctggactgctacgtggctatctgcttcccactccgacactctagcatcctgaccccatcggtcgtgatcaaactggggaccatcgtgatgctgagagggctgctgtgggtgagccccttctgcttcatggtgtctaggatgcccttctgccaacaccaagccattccccagtcatactgtgagcacatggctgtgctgaagttggtgtgtgctgatacaagcataagtcgtgggaatgggctctttgtggccttctctgtggctggctttgatatgattgtcattggtatgtcatacgtgatgattttgagagctgtgcttcagttgccctcaggtgaagcccgcctcaaagcttttagcacacgttcctcccatatctgtgtcatcttggctctttatatcccagcccttttttctttcctcacctaccgctttggccatgatgtgccccgagttgtacacatcctgtttgctaatctctatctactgatacctcccatgctcaaccccatcatttatggagttagaaccaaacagatcggggacagggttatccaaggatgttgtggaaacatcccctgagcaaagggtcagtgtatccccatcacttacattgccccactaatgtggggacattaatgaacatttgacaggctattacttattatcactaagtcagctctgtaaataactggctcagaggtaagcaaccctctagaggcaagagaaacaattttcagggtacctagaaaagagatacctgagagatgtgatggataagaacaactttgttgactacatattcatcatcacatggaaacaataaaagtagttttacctattaaatcagtgaatattttaaaagaatgtcatctcccacagatgattaaggtaaaaaagttgtttttacactgtcagtagaagtaggtac

SEQ ID NO: 7309 - DNA, 1221 bp, mus musculus
tctaccccattttgaatgacataagtacgaaaaacaacagtaacatcatgtcatgttgtaacatattatttattaaaacagttgaaattattctagtttataatcaaacccaatcaccctggtatccaatagtcccatccaaaagccttgtatataataataacacttgttttgattgttatcatctgcagagagtagattgcgttcccagcagagaccatattaaccagtccatggtgctggcttcagggaacagctcttctcatcctgtgtccttcatcctgcttggaatcccaggcctggagagtttccagttgtggattgcctttccgttctgtgccacgtatgctgtggctgttgttggaaatatcactctcctccatgtaatcagaattgaccacaccctgcatgagcccatgtacctctttctggccatgctggccatcactgacctggtcctctcctcctccactcaacctaagatgttggccatattctggtttcatgctcatgagattcagtaccatgcctgcctcatccaggtgttcttcatccatgccttttcttctgtggagtctggggtgctcatggctatggccctggactgctacgtggctatctgcttcccactccgacactctagcatcctgaccccatcggtcgtgatcaaactggggaccatcgtgatgctgagagggctgctgtgggtgagccccttctgcttcatggtgtctaggatgcccttctgccaacaccaagccattccccagtcatactgtgagcacatggctgtgctgaagttggtgtgtgctgatacaagcataagtcgtgggaatgggctctttgtggccttctctgtggctggctttgatatgattgtcattggtatgtcatacgtgatgattttgagagctgtgcttcagttgccctcaggtgaagcccgcctcaaagcttttagcacacgttcctcccatatctgtgtcatcttggctctttatatcccagcccttttttctttcctcacctaccgctttggccatgatgtgccccgagttgtacacatcctgtttgctaatctctatctactgatacctcccatgctcaaccccatcatttatggagttagaaccaaacagatcggggacagggttatccaaggatgttgtggaaacatcccctgagcaaagggtcagtgtatccccatcacttacattgccccac

SEQ ID NO: 7310 - DNA, 900 bp, mus musculus
tttcttctcactggattttctggcatggagcagcaatacccctggctttccatccccttctcctcaatctatgccatggtgcttttgggcaattgcatggttctccatgtgatatggactgagccaagcctgcaccagcctatgttttacttcctgtccatgctggccctcactgacctgtgcatggggctgtccactgtgtacacagtgctggggatcctgtgggggatcattcgagagatcagcttggattcctgcattgcccagtcctatttcatccatggtctgtccttcatggagtcctctgtcctcctcactatggcctttgaccggtacattgcaatttgcaatccactacgttattcctccatcctgactaattccagaattatcaaaattgggctcactataataggtaggagttttttctttattacaccccccatcatctgtctgaaattttttaattactgtcatttccacatcctttctcactctttctgcctgcaccaggatcttctccgcttagcctgttcagacatccgattcaatagttactatgccctgatgctggttatttgcatactgttgttggatgctatactcatccttttctcctacatcctgattcttaagtcagtcctggcagttgcctctcaggaagagaggcataaattatttcagacctgcatctcccacatctgtgctgtccttgtgttctacatccctatcattagcctcacaatggtgcaccgttttggcaagcacctttcccccgtggcccacgttctcattggcaacatctacatccttttcccacctttaatgaatcccatcatctacagtgtcaagacccaacagattcataccagaatgcttagactcttttctctgaaaaga

SEQ ID NO: 7311 - DNA, 1003 bp, mus musculus
tttggaggtcatcacccctaaaaaatatcttctccacctgcaaaacctaccatgtggtataacaacagtgctggccccttcttgctgactggcttcttgggctcagaggcagttcactaccggatctctatgtccttctttgtcatctacttctccgtcctttttggaaatggcactcttcttgtcctcatttggaatgatcacagcctccatgagcccatgtactacttcctggctatgctggcagacacggaccttgggatgacattcactacaatgcccacagtcctgggtgtcctgctgctagaccagagggagattgcccatgctgcctgtttcacccaatccttcattcattcactggccattgtagaatcaggtatcttgcttgttttggcctatgactgtttcattgccatccgcacaccactgaggtacaactgcattcttaccaattcccgagtgatgaacataggactgggggtactgatgagaggttttatgtccattttgcccataattctttcactctactgctacccatattgtggttcccgtgccctcttgcacacattttgcctccatcaagatgtcataaaactcgcctgtgctgatatcacgtttaatcacatatatccaattattcagacttctttgactgtctttttagatgctctaatcatcatcttttcttatatactaatcctcaagacagtgatgggcattgcgtctggacaagaggaagctaaatctctcaacacttgtgtctcccatattagctgtgtcctagtatttcacatcactgtgatgggactgtcattcattcacaggtttgggaaacatgcacctcatgtggtccccattaccatgagctatgtccattttctctttcctccattcgtgaatcctatcatttatagcatcaagaccaagcagattcaaagaagcattattcgcctattttctgggcagagtagggcttgagcccttatttcagaatctc

SEQ ID NO: 7312 - DNA, 989 bp, mus musculus
gagtgaagatcctgaatctgaagacacattcatcagtcatgtcccaggtgactaacaccacacaagaaggcatctacttcatcctcacggacatccctggatttgaggcctcccacatctggatctccatccccgtctgctgtctctacaccatctccatcatgggcaataccaccatcctcactgtcattcgcacagagccatctgtccaccagcgcatgtatctgtttctctccatgctggccctgacggacctgggtctcaccctcaccaccctacccacagtcatgcagcttctctggttcaacgttcgtagaatcagctctgaggcctgttttgctcagtttttcttccttcatggattctcctttatggagtcttctgtcctcctggctatgtccgttgactgctatgtggccatctgctgtcccctccattatgcctccatcctcaccaatgaagtcattggtagaactgggttagccatcatttgctgctgtgttctggcggttcttccctcccttttcttactcaagcgactgcctttctgccactcccaccttctctctcgctcctattgcctccaccaggatatgatccgcctggtctgtgctgacatcaggctcaacagctggtatggatttgctcttgccttgctcattattatcgtggatcctctgctcattgtgatctcctatacacttattctgaaaaatatcttgggcacagccacctgggctgagcgactccgtgccctcaataactgcctgtcccacattctagctgtcctggtcctctacattcccatggttggtgtatctatgactcatcgctttgccaagcatgcctctccactggtccatgttatcatggccaatatctacctgctggcacccccggtgatgaaccccatcatttacagtgtaaagaacaagcagatccaatggggaatgttaaatttcctttccctcaaaaatatgcattcaaga

SEQ ID NO: 7313 - DNA, 989 bp, mus musculus
tcttgaatgcatatttttgagggaaaggaaatttaacattccccattggatctgcttgttctttacactgtaaatgatggggttcatcaccgggggtgccagcaggtagatattggccatgataacatggaccagtggagaggcatgcttggcaaagcgatgagtcatagatacaccaaccatgggaatgtagaggaccaggacagctagaatgtgggacaggcagttattgagggcacggagtcgctcagcccaggtggctgtgcccaagatatttttcagaataagtgtataggagatcacaatgagcagaggatccacgataataatgagcaaggcaagagcaaatccataccagctgttgagcctgatgtcagcacagaccaggcggatcatatcctggtggaggcaataggagcgagagagaaggtgggagtggcagaaaggcagtcgcttgagtaagaaaagggagggaagaaccgccagaacacagcagcaaatgatggctaacccagttctaccaatgacttcattggtgaggatggaggcataatggaggggacagcagatggccacatagcagtcaacggacatagccaggaggacagaagactccataaaggagaatccatgaaggaagaaaaactgagcaaaacaggcctcagagctgattctacgaacgttgaaccagagaagctgcatgactgtgggtagggtggtgagggtgagacccaggtccgtcagggccagcatggagagaaacagatacatgcgctggtggacagatggctctgtgcgaatgacagtgaggatggtggtattgcccatgatggagatggtgtagagacagcagacggggatggagatccagatgtgggaggcctcaaatccagggatgtccgtgaggatgaagtagatgccttcttgtgtggtgttagtcacctgggacatgactgatgaatgtgtcttcagattcaggatcttcactc

SEQ ID NO: 7314 - DNA, 989 bp, mus musculus; identical to SEQ ID NO: 7313

SEQ ID NO: 7315 - DNA, 961 bp, mus musculus
attacccagcaacaactccacttccccagtctttgaattcttcctcatttgtttccccagtttccagagctggcagcactggctgtctctgcccctcagcctcctcttcctcctggccatgggggccaatgccacccttctgatcaccatctatctggaagcctctctgcaccagcccctgtactacctgctcagcctcctctccctgctggacatcgtactctgcctcaccgtcatccccaaggtcctggccatcttctggtttgacctcagatcaatcagcttccctgcctgcttccttcaggtgttcatcatgaacagttttctgactatggagtcctgcacattcatgatcatggcctatgaccgctatgtggccatctgcaagcccctacagtactcatccatcatcactgatcaatttgtcgctagggctgccatctttgttgtggccaggaatggccttcttactatgcctatccccatactttcttctcgactcagatactgtgcaggacacatcatcaagaactgcatctgtactaacgtgtctgtgtctaaactctcttgtgatgacatcaccttgaatcagagctaccagtttgttataggttggaccctgctgggctctgacctcatccttattgttctctcttacttttttatcttgaaaactgtgctaaggattaagggtgagggagatatggccaaagctctaggtacttgtggttcccacttcatcctcatcctcttcttcaccacagtcctgctggttctggtcatcactaacctggccaggaagagaattcctccggatgtccccatcctgctcaacatcctgcaccaccttattcccccagctctgaaccccattgtttatggtgtgagaaccaaggagatcaagcagggaatccagaacctgctgaggaggttgtaaaaaataaaatgaatgcaacctgac

SEQ ID NO: 7316 - DNA, 1225 bp, mus musculus
agaaagtgttcaccttcgtgttaactgagataatagatatgtatgaaaggaggttaattggggtcacccaacattcattgctcccttccttcttccctccctgccttcctcctttccacagtgtggccacattagccaccaacagggcccaggaggagacctgagccatgtcccctactggtggccccacatgtggtgactccagactataggctctaggcagaagcaggaactgtgttgtggtatagctcttccaccaccccttctcaaccatggggtctcagaggggaccgggcataggcaccagctgtctgctctttgggtaggctgaccctcaccaagcctcccacctggcagattccttctggaaccccaacgccttcgagacggattccgacctgccggctggatggatgagggtccaggacacctcagggacctattactggcacatcccaacagggaccacccagtgggaaccccccggccgggcctccccctcacaggggagcagcccccaagaggagtcccaggtgaggctcacaggcctgttgattttgggccaggggtggagggagtgtgtgctgctggagtaggataggacactcactcactactcccatccctcctcctagctcacctggacaggttttgctcatggagaaggctttgaggatggagaattttggaaggtgggtaaggggacctgctttaccacgggatagctggaggaggggcatcattttgatactgattcctcaatccccttcccaaggatgaacccagtgatgaggccccaatggagctgggactgaaggaacctgaggaggggacgttgaccttcccagctcagagcctcaggtgagctgccagatgcagtgagctggcagtgggatggatctgtctggaaggggccttgggacagctccatttatgggagccctgtgccaagtattaccatctgccttcagcccagagccgttgccccaagaggaggagaagcttcccccacggaataccaacccagggatcaaggtttgttcaagactgacacccattctgagtctggggccctcttatttgtcagacagcccctaatgttgtgctctgaggggtctcagcgcagttccccaggtcctgagttaggagttcttccagtctcagcacagagccctgtgtctgagctggaggcacttcagtttttaaatcaaccagcccaacagcc

SEQ ID NO: 7317 - DNA, 1225 bp, mus musculus; identical to SEQ ID NO: 7316

SEQ ID NO: 7318 - DNA, 1225 bp, mus musculus; identical to SEQ ID NO: 7316

SEQ ID NO: 7319 - DNA, 1225 bp, mus musculus; identical to SEQ ID NO: 7316

SEQ ID NO: 7320 - DNA, 1225 bp, mus musculus; identical to SEQ ID NO: 7316

SEQ ID NO: 7321 - DNA, 1225 bp, mus musculus; identical to SEQ ID NO: 7316

SEQ ID NO: 7322 - DNA, 1225 bp, mus musculus; identical to SEQ ID NO: 7316

SEQ ID NO: 7323 - DNA, 1233 bp, mus musculus
tgtcacaataaagtttattatgaaaacaggctggtgtggggacatggggacagataagtacatttaggttgggtggctcaggtgaagtagtgcggcttcttcacattgatgccatactcgctgagggcaggggtcaagtcctccatggttagagtgtacttgcggtcctgagggaagagggaagagcaccaactgagcacaggaatcccggacttcaatcccagatgggtgaccctgagtaagtcttacacctcccctacgattcagtttccccaaaggggtggcaggataagcctccactgttgtggaaggtaattactgattcattaagcctcccctcacaccttgctcttgctccgggagctgccggaggccgtgcccttcattttgcagtgctgtagggcatcattggcaatatctgagatgaatttctgggcagctaaggagatgagccgaattctagagagaaaaaacttagatgagaaggagatggacaacatactgcacaagcacccaaaactaacctgccctgggtttactcacatgcgtgggtctgaggcctcaaagccagcacggttcaggtagtaaccagtcactgcatctgggatctgagaaatcaattaagagaactgtcagcagagcgggaggagggtgagggaaatggataggcctgattatcaggaagctcacagtttgggtgagcagagggcaaacacagaagagcgactaggggagcaaatggaagagaacgctgaaaagcacgatgtggctgaaagttttgacagcaggctaggtggccttgttcgggcggaagcccaccgtaggcgtgtaatcttccagctgcatcaagaagtccaccaaaggcgtgctggacaccacgggcttcacgtctccgttggccgcgctcggcagtacgtaaaccccgttagatatggccccctccgggggcgccgcgccacccgccgacaccggagctggaggagaaccagcaaaatgagacacagaggtgggaggcgcagggccccagctaggtctgtctataccctctgccctcacccgccgctggacccagcccaagacgcttccctcgccctcacccgtcccggccctcacccgccccacgccgctcagctggctccccggcccgcgccgccaagggtcccgtgcccccagcagctgctccagccccaggtccccccgctgtccccgcggggctggccttgttctccgcgg

SEQ ID NO: 7324 - DNA, 1233 bp, mus musculus; identical to SEQ ID NO: 7323

SEQ ID NO: 7325 - DNA, 1233 bp, mus musculus
ccgcggagaacaaggccagccccgcggggacagcggggggacctggggctggagcagctgctgggggcacgggacccttggcggcgcgggccggggagccagctgagcggcgtggggcgggtgagggccgggacgggtgagggcgagggaagcgtcttgggctgggtccagcggcgggtgagggcagagggtatagacagacctagctggggccctgcgcctcccacctctgtgtctcattttgctggttctcctccagctccggtgtcggcgggtggcgcggcgcccccggagggggccatatctaacggggtttacgtactgccgagcgcggccaacggagacgtgaagcccgtggtgtccagcacgcctttggtggacttcttgatgcagctggaagattacacgcctacggtgggcttccgcccgaacaaggccacctagcctgctgtcaaaactttcagccacatcgtgcttttcagcgttctcttccatttgctcccctagtcgctcttctgtgtttgccctctgctcacccaaactgtgagcttcctgataatcaggcctatccatttccctcaccctcctcccgctctgctgacagttctcttaattgatttctcagatcccagatgcagtgactggttactacctgaaccgtgctggctttgaggcctcagacccacgcatgtgagtaaacccagggcaggttagttttgggtgcttgtgcagtatgttgtccatctccttctcatctaagttttttctctctagaattcggctcatctccttagctgcccagaaattcatctcagatattgccaatgatgccctacagcactgcaaaatgaagggcacggcctccggcagctcccggagcaagagcaaggtgtgaggggaggcttaatgaatcagtaattaccttccacaacagtggaggcttatcctgccacccctttggggaaactgaatcgtaggggaggtgtaagacttactcagggtcacccatctgggattgaagtccgggattcctgtgctcagttggtgctcttccctcttccctcaggaccgcaagtacactctaaccatggaggacttgacccctgccctcagcgagtatggcatcaatgtgaagaagccgcactacttcacctgagccacccaacctaaatgtacttatctgtccccatgtccccacaccagcctgttttcataataaactttattgtgaca

SEQ ID NO: 7326 - DNA, 984 bp, mus musculus
taaaacagattttaaaatatagaaagactgattacacataaatacataaacaatgaaaccctaaggtaaaaaaaaaaaagtctgaactttccttgaatgatacatctgttcatattaaccttcatgtatatattaatgaagatgaagccatcaaatttataacattttaatgtgctgttctcattagggttcatttagtcagcagctacttcgtctcatgaattccctgaaggacgggaatcacaccgctctgacggggttcatcctattgggcttaacagatgatccaatccttcgagtcatcctcttcatgatcatcctatctggtaatctcagcataattattcttatcagaatttcttctcagctccatcatcctatgtatttctttctgagccacttggcttttgctgacatggcctattcatcttctgtcacacccaacatgcttgtaaacttcctggtggagagaaatacagtctcctaccttggatgtgccatccagcttggttcagcggctttctttgcaacagtcgaatgcgtccttctggctgccatggcctatgaccgctttgtggcaatttgcagtccactgctttattcaaccaaaatgtccacacaagtcagtgtccagctactcttagtagtttacatagctggttttctcattgctgtctcctatactacttccttctattttttactcttctgtggaccaaatcaagtcaatcattttttctgtgatttcgctcccttacttgaactctcctgttctgatatcagtgtctccacagttgttctctcattttcttctggatccatcattgtggtcactgtgtgtgtcatagccgtctgctacatctatatcctcatcaccatcctgaagatgcgctccactgaggggcaccacaaggccttctccacctgcacttcccacctcactgtggttaccctgttctatgggaccattaccttcatttatgt

SEQ ID NO: 7327 - DNA, 1501 bp, mus musculus
cctcctgtgaactcctacagcactctgcagctccaaaaatacttggctcacttccccttaggaatgttttacgaaccctccactagactccataagaacaaagacaatgtcattgtcatacccatctccagcccagcaccaagcatgctatctggccccacacaaagcccagaagtatctgttgagttgaactgaaaacaccaacactgttaacataaaaataggttctgtcctaggaaaatcgttctcctggttccaaaaagaaatgagttcagtcttgccaagtctgttttagcagaataaagtcccatagctaatgacagcctttaactattggaaatgtaaagccacattttttttttcgtatggtaatgcaacaaagaggtaagaagcgtttgtttttaagtatctaatcatttcttattttttgcagcaggcgagagaacatgacaaaaggcaatcgtaccacagtgaccgaatttgtcctcatgggattcacagaccgtcctgagctgcagctccccctctttgtggtgttccttgtcatttatctcatcaccctggtgggaaaccttggcatgatcctgctgatcagagcagactcgcggctccacacccccatgtactacttcctcagtcacctggcattcattgatctgtgttactcatcttctattgggcccaagatgctgcaaaatgtattggtgaagaaaaaaaccatctccttttcaggctgttttgctcagctgtacttctccggtgcttttgccactacagaatgattcctcttggccacaatgccctacgaccgctacgtggccatctgcaaccccctgatttacacagctattatgacgcagcgggtctgcagggagttagtgataggggtctatacctatggcttccgaaactctgtgatacagacagctctgacgtttcagctgtctttctgcaactccgacgtcatccaccacttctactgtgctgacccccctctcctggccctctcctgctctgacacccacaacaaagaaaagcagctcatgatcttctctgcagtaaatctcactgggtccctccttaccatcttcatctcctacatttgcatcctcttttccattataaaaatccagtcttccgagggcaagtgcagagcattttccacccgtgcctcccacctcactgtcgtcaccatcttttatggcacactatttttcatgtacctgcagcaaccaaaagcggggaattcatggaagccaaacaaagtagtctctgtgttttatagtcttgtaattcccatgcttaaccctcttatctatcgcctgagaaacacagaagtaaaggatgccctgaaaaaaatgctagagggcaaagagttatagtgagtgagttaatggaacgcagcatactgaaagtttgatatattgacaaggtaatgtctctaattaagtttacatttagcaggccaactgctgtccaatcaggaagcaaacagtaatcc

SEQ ID NO: 7328 - DNA, 632 bp, mus musculus
tcatttgatcccagtgagctgacagctggagccctcctctgggagttaccaagagagggaggcctcaagtcagaggccggcgaggctgcacagacctggctcttcccttctgtgaaggtgacccatcaggacaccagcacctcctgctggccgccctgggggctgcaagccaccccttgggtatttgggagacattccttccagtttcttattttgcaaagaggactggggctcagagacaggaagagaactgctcaagttcacccagtcacactaagggggccagaccatgccctgttctcctctgtccccagggaagagccaggtgagtgtctgatcagggatccgggaagccaacagtcatacttggctcagaggactaatggtatccctctcagagcctgattctctggaagagacacctactggcctactggccaccccagtcaggctgcctgaagtcctgcaatccttccatggccaagtcctgggagtcagtattgcttaaaccccatcccctgcctcttggatcttcctaactcaatatactcaagactctcaacaggaatcttttcatcagacaagacaacccaggctccagcaagcaaatttctgtccatctgggaatgcca

SEQ ID NO: 7329 - DNA, 682 bp, mus musculus
tggggatctggtccctacccagatgggatcaggagcccagaatctgcatctatcttgggactctggaacctgtgccccttcctttatatgaagtctttatcctggcctaaatgtttctctgcaaagatcagaaagcaaagcttgaaggtgtacaagactaggagagtgtctgaaggggagtgaagaatatggtgtcccattcttcaaagcactgctggtgttgagggtcaccagagacaaactcagtgatggaaggcagagtctattcctgcttggcccagggatcacattgggaaggccttggggtccccaacaaaatagatcatgccacttttttgctctatattacccctttgacaaagcttggctgtgagctaaacattggggtccatctactgcacaccaccaatctacagccccctaccaaaggcggggttgggaagaaagcatgcagaaacagtccacaccaaatgtcccatggaatgggactcacagtttccaagaatgtgggagagggatgaacctcaaagattacgttgcacagccccatgctgcatagagagagagcagagctaaatggagtccagagcctaggttagaggccctatgctaaagaaaaaagatgagagcatccaaccccctatgggatttaaaataaaaatatctaaactgcaaaataaag

SEQ ID NO: 7330 - DNA, 5835 bp, mus musculus
ctccaggcatcataccatttcctccataaatgcttcagaatgtatctccaaaaggcctttcagaagtgtattggatgtgtggtatctgactagcaatttttaggtgtgcttacaaaggaatggagaataccatagttagagctttttaggtaggtacagtggaaagagaaaggagctgtggatttgagatggatccatttgtgatgaatcatggatttcagcctggattggcagaaggaaaggccaagaggtggctgatatactctaggaaaaaggcctaagggaacagaggcctggccaagttcagagagcagctgtcaggtagtgaatggtcaaaagatagacaggaagggaaattgtggtcagacagtagagggcaaggttttgagatgggtacgccaggttcagggtttgtgcaaaagtgtgggtgactcaagtggaagtggaattgatgtcagggaatcagttgtgagctaagagttttgagtggatccatccacatagctattgaagttgccagggtggagagagcgccctcagggagagcctggtgtgtgtgagggcaggagatggtgcacaattctgtgaagagtttgaagatgtggggtagttgctttactgcagagctggggcactgtggaatcggttgaaagcttagccagtggtggaagaagacaaggtgagaaaagtgcaagacaaccattctaaacagttttaaatgtattgtgctctgttggacattgctgcccactggttggagtggaggaaattaatgaggtagggggttaatactgaagaggaaaagaattgtgatacataggtggggttgaagcaggagcccttgagaggaaatgcagtgagcccctcttcctgttttatccctgagggatccctttgcatagtaaccccaatgcttttctggttggggtttgttttggtaggtagtctttgtgaagatctgtgttgcattctttacacttcacttacagggtttggatgggttgagtagagaaggggtggccgtccctgagtgaagcagtggtccagagaacccaccccagcattttcttgctgctggcgaccacttccctcttaaacatctagaaagcccttgatgcccaggactaaaggtagagtgaccccttttctgagcacatcatattccaaactttgtctctaaactaccagggaaggcatgcatgtctcctaggtaatagccatcaaacttagaggaaagaagcacattgtaggtgtcagagttttggagagctttgatttcaaaaagtcgtggatttgtagatgagctagaaattaaaacttgaaataattcttcttctcaaagatagtgtctcttgaaataattctttgagaatgatcatcactgaaggagatgagattaaaagggagttgagagaaaagaaggcctacctggccaaatgccagcatctcctggattctgaagcaaacaggagtctgtgcccatggacgttagacgtgggatgatttctcactatcttgccagacacctgtgtttaagggagtgactgaccgacacacttgcttacgtgtttttatgagttttagtgttgagagaaaagttctcctcttaggctatgtttagagttcacttcctgctgagtttactggtgtgtgtgcagcagaaatgccagttctggcctggcatgatggcatgtgcctgtagtcccagctactcagcaggctgaggcgggaggatcgcttggcccaggagttcaagtccagcctaggctgggaaacgtgtccctgtctcttaaaaaaaaaaatgaaaaagaaaactgtcagctctgctttatgcatcttctccttgaggatgatgatacttacttacatataaatcttgccttatagcatagagcatattttcatatacattgtttcttcagatttatatcctgtcctctcagaggagaaaattgatgtgtctggctgcagttgacataaaaacaccctactgtactttccatggcatagtggaaggaatgcgaattttgaaatcagtcctggtttgaattgtggctcctccttttactagctgtatgacttgggccttggttttcctgtttggtaaaatagaattggtaacatttacctcataggattgtgttacagtattaaatgaattaacataattaacacctgggaacaatgcttggcacacagtagataactggtaaagagaggccatagtcatgttaataacatagaaacagaaataacatcagcaccgaagaaaaggagagcatgcagctgttctaatcttgtttttttttgttgtttgtttgtttgttttctttgagacattgtcttggtctgtcgcccaggctggagtgcagtggcgcagtcaagatcactgcagccttgaagcctcgacctcctgggctcaagtgatccttccgcctcagcctcctgagtagctaggactccagaggtgcaccaccatgcccagctaatttttaaactttttgtagagatgggttcttgccatgttgcccagcctgatgtcaaagtcctggtttcaagagacctcccgccttggcctcccaaagtgctgggattacaggcatgagccaccatgcctggccttcctaatcctgttcattaacgtgattgctgtgaatggccttctccttggcagtcaacataccactttctcaaaggacaaagttatttaaatgagtttcatgttttaatgaaatttatatggatatgtaaggcaatattgaatgatataatagtaatttttactttttttaaaccaagaagtatgttttatttatttatttttttcttgtttttaccactacagcgacagtttccttgctatttttataaccagtgcttatgcagtcttggttttctatagctctcacagagactgcagacaaaatgcagatgttttacatgaaattgcaacttagtgaaaaccactctgtgaggagctgagctaatgacatctgtgtagctttcaggtgatctgctagaaaatggagcctaaaatatgcaggggcatggatttatatcataccccttagacagtcttccttaaatatcacttctttcagatggaattttgtgaagagttggacagtaattcaagaccccgagttctgtaatagcttctatattctgtatttccaactaaaggcagacccatagactttggaaaacaggtaaaaggattgacttcctaccagctagaaattggagccaagttagagccatgtaacttgtattcttgcttctattagaacattattttgtttaatccttatactagcctgggagggaagggggctgacctaacagttaattctttcttaagtatcaggtattggcctttccttccatgtacaaatgggaggctggctcagtgctgagggaccaggtgaaggagtgcattcctcccttctcttctctgtcatctcttgggtcacacatgctaggcaggagttgccctttgccttatctgtgcgactgctcatgatctggaaatgactgccatcactcctagataacaccagccctgggcttttgcggaatgaagcccacattacaaatcatgggattatagtgaccagggagaggtcctacttgggagggagtgattcttcctgaaggtgaaaaacagcagggcagggaggcgactaccttcatgaagtgctccttggtctgtatcctccttttcggttagaggcaggaagagtgaggggaatttcagccacagaagagtttgcgtgtgtgtcattttatcctctggtgacttttcctcttcgcagcagtgatcccagaaaacaggaaaaactgctatgatcacaatcagtttttaatgtaaagaaaagctgatgatggtttttcattgacacggcaaattcaggatttggggcctggggatgaagctgacggtctgtgaaagtgcaggcagccagctccttggatgaggtccaagtccaaaagcctaggggtaaaagtaaaaggatggcttaatttcaatggacacccgtggcatcttagatgttgtaccttcctgtggcttcttagcaactactctaccatgtggcggctgtgttagagggggtactacatccagaaagaagacacgtgccagtagaacttccatgctgcatcataggtggccacagagccattacttccctgtttagtttcaagttgtagatgtttcgtatttgcctaaacacaagatcggcttatgattacccgctggcttaccagcccactttttttctcactctgtttcttttctttttttttttttgagaaggagtcttactttgtcacccaggctgaagtgcagtggcacaatctcggctcactgcagcctccacctcccaggttcaagccattctcctgcctcagtctcccaagtagctgggattacaggcgtgcgccaccacgcccagctaatttttgtatttttagtagaaacagggtttcaccatgttggccaggctggtctcgaactcctgacctcaggtgacccacccgcctcggcctccgtaagtgctgggattacaggcatgagccactgcacctacccatctgtttcttcagcttctcattatctcaccaattctagagaaacagagttgctggttgtgtaggctaaactaaggccactgtgatgtcattgcttttgtctcctttgacaccctttttttttttttttgttactgggtcttgttctattgccaaggctggagtacagtggcacagtcaccactcactgcagcctcgacctcttgggctcaagtgatcctcctacctcagactcccaaatagcagggaccacaggcatgcacctccctgtccatgcctggctaatgtttttttttttttttttcggtagagatggggtctccctgtgttgtccaggctattggttaccttctttatcatagttcaatcctgagggtgtttccttggccttctgaatgtgtatgagggatgggatctgaaaagtctcctcctctggggctgatcttatgacagactttatgaagttctacccaagaatctttccttcgctcacacacttcgctcaccaaaggagctggtcctgtggcaggttcagaatctgtgaagtgaaaaacgtattaaaattttgtatggaatttgagaactgtgtagttctgtctgtactctctgctcttcagtcacaaacagctctcccagctgtcctcctcactcttgccttctttgttcttgttgctgaaaatgcccaacctggatgaaaacctctaagccttgctcttcctcctggctcttcgtttcggtagagcttttgttatacttctgtctatgatatctccctctttttctgcttaccttttccgttatttcaagtaaaactcatctgctattaccagattgtccttattttctttttgcgtgaaattaactagctttattgatttttctaataaaagaaatacatgctcattgaggaatatttggacaataacaaaaaatattaggaagaaagtaaaagtcacataatcccctatagcataattattgttaatttgtggtgtatcttgtcctttgggatcttcttcatatgtgttaacatatattgctttttcccccaaagtgccatcatttttcacttatattttgtaacctacttttctgactaatattacttggatatattccacagacagtacatacagagctactctataatgtttaatgctgcatagaattacattgtatggatgaattgttatttagttaacctgacgatggacttttgggttgtttctgttattaatagct

SEQ ID NO: 7331 - DNA, 5835 bp, mus musculus; identical to SEQ ID NO: 7330

SEQ ID NO: 7332 - DNA, 5835 bp, mus musculus; identical to SEQ ID NO: 7330

SEQ ID NO: 7333 - DNA, 986 bp, mus musculus
aaatgctcattgggcacctttagtgtgccagacatcatgtgggacaatgggatgtggcaggaacacttcagacccatccctcccttgtgtcaggtagaccagtgaaggcgatccctttactccactgggaatagcgtcatggaggcctgggatccagcaacgcacaaggagtgctgaccacagttctaaaaaaggaactgtgtcccttgctatcatggagcttcacagcttgcccaaaagctgacttttaatccttaaaagagcatgagcaattactctggctatatttatccttgttcctggagccacacagggatttggcctcgctctcccaaaatcttcagcttctcactcattcccatcagagacagtcatgtgtcctccgcctaaaagcaggggcccagcagaggcagactggcacatagctcggggaggctctcccaacaggccatttaatccaaggccagggaagaagttttagagtctcaggcaaaagacatatccttgcaccaaggggagccaagcaaggaaaaacagcttcttgccaagaatgctgccagctctgcgatcacttgctcggttgacttcactgggtgttttgacttccctaccccttttagacttaggaactctgtgatatgctcagcactcagccctggatgagtgagtgagcaaataagagaccacatctctaggaactgcacccaggcaacaatgacaggtatcatttactgaacatggtgtcaggcactgtcacccactttacatactgaacatggtgcccagcactgtcagccactttacatatacggtagagttcatcctcaccaaatccatgtggtgtggagcttctcaccctcacatcctagatggggaaacagatgcagggcagtcaagatgcctgccgatgtcttgcagggcataaacccagatctctctgactttagaattcccgggtgtcaggtttgagactacaaactgggaac

SEQ ID NO: 7334 - DNA, 381 bp, mus musculus
gcttggtggggagagaggacagaagagacccattgggtataatagatgttattcaaggccatgggattagatgaaatcccctaggaagagagtacagacagaagagagatgttctgaggctttggatggtcaaagcagtgtttagaggggtgagaggtgaagccagcaaggagactgagaaggactgagaaggtaggagaaaccccaggagaatgcatggtcacagaagccttaaaggacaaaatctgactggagtaggtggaagataaaacacggggtgaagacagggagtcagttaggcaaatcttccaggtagttttgttgcaaagtggagttgagacattagccggtaattggagaggatgtgggtttgagggaggg

SEQ ID NO: 7335 - DNA, 912 bp, mus musculus
tcctttctctccctacccacctgcaggcagagcgaacaccgctacaaaggatgggtgtgatcatgggctatattaacaaagatgcagtgtctaggaaggggagggtaaaatgagatgagcagagtgggaagctcaaggagacagggttacatggggaaatctctgaggcaactacaactgtccagccatcagaaaaggaaagtcccccagggatttgggcactattgcagaaacacctggccttgaaggaggatgaactagtagttttttgtggcccaaagggtagaaccaggacactaagtggaacagaggcaggctttggtttcacatatgcaagagtcagttctaataacaataaccagagatgagccacatctgtggggtacccaaatcaagtcggtgggccatgagggatgttatacagggattttgggccaggatgaccttgggcatccctgcaacacctcactgtgggcccagccctgcccctgctacttcccttcaatctgttgaggtggggtggctttggagcagtggtaggcttgtggagtcctctttcagttccccggctctgctcttgggagatctcacagtggaggaagctgctgggcccctggggaaatctcagagctggaaaggctgggttctgcctcctggtgcagccttgaggccttacctccctccctgctgctcacccttctgagaggctgagtctcccacctgaaaggctcagcctccccttttgctccatcctgcacttgcttatagtcatctccaccaaatactgaacttgtcaagtcgctttcttgctcaaaacccttctccctttttgtccatgggcatagcccacactccttgctctggcattcagggctctctgatatgatgccctccccactgctgtaatctctc

SEQ ID NO: 7336 - DNA, 1680 bp, mus musculus
ctgtgtgatgcatcttttcttctttctcttataaagaagagagattgcactcattccaaggtctttaacttggttacatctgcagagagtctgtgggctctaggggagaatctgttctttgacccttccagcttctggtggctgctgccattccttgacttgtggccacatcactccagtccctgcctccatggtcacactgcctcctcctcttttgtctgtgtgtcagatttccctctgcttttctcttgtgatgacatttaggctcactcagataatctaggacaagcttcttatttcaaaatccttaacttaattatatgtgcaaagaccctttttccataaaaggtcacattcacaagttctgggggttaaggcattgactaacatcttttggaggaccattgttcaacccactatacagtccaagattgtaaggtctttgtatattcaccttatgaggtaggttttatcatcctcatttttcagatgaagacactgagactcagagaaattaagtgatttgcccaaggtaattcaaaaaggaagtagcagaaccagtgattgcaacctggctttgtccgactttgaagcccattctcttcctcccatggcacactgaccagaattgtttagaagtctgtcctttggcttaatacacaagtgtccagttgagggggttgcagggagccacacctagctattaccaggcagtatgaccttagtgggagctagtttgagagaactgttagaggatcgagagcaggctgcagtggatatgggcaggaagtttgggggagggagggcagtggggatgggggtgacaatgaagagaaggggcttggagttcaggacaagggcaggaatacccaccaaatgagggaaatagcacttaaaggaaaagtagggccaggtgcagtggctcatgcctataatcccagcactttgggaggctgaggcaggaggatcatttgagcccaggagctcgagagcagccaggacaacatagtgaaaccccgcctctacaaaaaaaaatttttttttaattagccaagtgtggtggtgtgcacttttagtcccagctcccctggaggctgtcggggaggatcgcttgagcctgggaggttgaggctgcattgagctttgatagtgccactgcactccagcctgggcaatagagtgagaccctatctcaacaacaacaacaacaaaaaagcaaaagtgggccatgctttaccatcgtagagttttgcccagcacctctggttctttgatgtgtgaggggctcctatgcttgcctacaactgggaaggtctctgactggggtggatataagctggagggcctgagatgtgtagagaaggactctctgggtttgtattattcattcctcctgagcattgccatgagtgagcactggaaattcagagatgaacatgttttggtcctgcaccggaggcagagtggcagagtagaaaaagatcaagaaccaaatccctgctctgcctctcattcaccgtgtgacctcagatgaggcactttagctttccaagcctctgttttgttatctgaagaatacagatttttttgagctttgaaggagataaaaatgaaaagtgagtggcacacccctggaatataatagggtcaatgaatgttactttcatttaatcaaaaaac

SEQ ID NO: 7337 - DNA, 1237 bp, mus musculus
tcctttttgacactgttaggtaaataaaaattatgaagcagaattttgcagttttgtgcaggaattctttccattctaatgaaaattgcaaaaaaaaatgttttcagtaaaaaaaattcagtggaagaaaacaggataaattgattgctaatgtgaagaagaatttaaacattgtaccttaaaattaatgctttctctgagtaaaactagaaatgtgagattaaaaataaaactatttgaagatactggggtgtcactggggcatttcagaggcacaaagatgagaaaaacgcatataattgtcaagagtggcagggtagtgttgctctcaaagtcccatctgactaacagggcagaggctcttcctcatggccccaatctgcttcccgacagcttcagggtttcctcaggaagctgccctccaccttcatccacctcaagcatgtcctgcagagccctctggagaaccagcttgagggtcttcctgttttgaagctgcctaaaggagcccatgaagaagtaaatgatggggttggcactgctgttaagagcagacaggaaaatggaaattaaacgaacaacacaaggtaagtcatccaaatccttctcgatccagtataataggaatcactgaatgctgaggggcaggctgcagaagaggaagaccagccctgtgagcaggatggtcacatacagcctggtcagcggcatcttctgggatccacatatgatcctgacaagcaggaccagggtgaacccacagagaaccacagattaaaaaaatcagccacacagcagtgaggaaatctaatatttgacaccaattatcagagtcaacatcactaaacaggaagctacagaacatccactccaggatgctctgcaacagggacagggcccagagcaggacacacatgaccgctgacaggtgtgtggggcagtggcagcagtaccagatgggccacaggacggacaggcggtgctcggtgctgatggtgctcagcatgctcaggcctgtaatacaggcggagaacaacaccgtggtgacaaatctagagaaatggatggagagagaactaacaaagtcactgaagaaattaatgaatgttataatctggaagcaggtgcagaggaagtcagccctggccaggttgaggatgtagagagagaaggtgttactgtgcatgcagaagcccaggagccagagcatgactgcatttcctgccagcccgaccag

SEQ ID NO: 7338 - DNA, 191 bp, mus musculus
agcttaaatttcctatcataaagttcaatttatgaagttaatttaaacgtcacattacaacgtctatactgtcttcctttgatttttatctttcgtcaatttggtgtctgtgtaacacacttgttttgttgtgtcataggtttatgtttgctgagtcttccaactcataatttcttcctcaacatctcctc

SEQ ID NO: 7339 - DNA, 289 bp, mus musculus
aaagaagggccccattcactgagaccctgtagtaggagggagtttctggattccaccacagtatatacaccagtgaagcatatgcagttccctgtaagggaccttgacacctgttagaagaggaaatggatgctggatggccaaaaaatggcaaatgtcagtgacagtgagtatatgtgtgttcatattctctctatctacttgtttttacccagactcagaatccattagttctcagtctttatattggtaaacttataggtcttgactgattttagtttgttcgtct

SEQ ID NO: 7340 - DNA, 651 bp, mus musculus
ttttcaaaaaacatgttgactttttgttaaacttaaaaatgttcctatttttattttttctgctctgcaagcaaaatcagggaaagaaagggtgtgtttgtgtgaacacacatgtgtgcttcagttttgaacagaatgagaggtggccagggggtgaccaaacatccaagaagttcatttctcttagtgtagctgtccatcatgtcctaaatgatgaaacctccttaacttcatttctaaacaggatggcaagatattctgccgacggacagcttgtgattgccagaatccaagtgctgacctattctgttgcccagaatgtgacaccagagtcacaagtcaatgtttagaccaaaatggtcacaagctgtatcgaagtggagacaattggacccatagctgtcagcagtgtcggtgtctggtatgttggcttcctttataaggtgttgagcctttactctgaaagaggttacaaattcagttgtctgtgggacctagttcccagtttttcataatactatacagggagctctgtggggcctgtggctaagggtcatgttctcttcctaaagatattcaggttgtatttgaaatactgtacaaagtaaaaagcacatatttatgggacagatttgacccaaacaatgacag

SEQ ID NO: 7341 - DNA, 210 bp, mus musculus
gtaggacacagtgaaaactactgtaaatggtggccatgataaaaccagtcctccgttggatgggctctacattaaaacaaagcctaaatttaggaatgcaaatatgtatgcaaaggatacaccaatgcatggcttataagaagggttcagctcatggattcctactcttgagtttttgttgcaaagtgtcaggctcttggggatggggta

SEQ ID NO: 7342 - DNA, 245 bp, mus musculus
atgtattcttttctcacagtgtcagttcctcccagcacctagcaacttaatggcaaaggtagacaaacaccgcgcccacagctccattcctgtgaattttccactgactacaccatgtagactttctatctgaaaaatatttaataattcatgaatacaattaaaatactgttctactttagtagaattttatggtgcataatattctttttccttctgatcccctgagttggttctaattagaa

SEQ ID NO: 7343 - DNA, 367 bp, mus musculus
tttgatggtgctgtacactttggtgaacaccatgaaaatctggaatatttaacttaatgacttagaatgagatttagcataaaagtgaatatttgtctgtttgtatacctaattaaaatgtaattgctataaattttgatatgaaatcaaagctgtgagtacaagtgtcaaggaataaaagtggaagttttcaaactatataggtagggtagacttgaaagtttttatgactttattttctacttcttcattgatttcatcatttaccagcaacatttaaaaggtacaaatgtttagaaaaattaaaggaataaaagatagtattgacatttttttttactacggagaacaaattaagaatcactga

SEQ ID NO: 7344 - DNA, 178 bp, mus musculus
cagtcttgctgagcaagcagtttgttttgaaaagtaagctgttctagttggtttgcagtcatatattctaggaacaagtatttcccagagcaaacaacttagggattattttttggtttcagtattactaaatatacatttaggaaaataatgcctggattgagtactatgtaacaca

SEQ ID NO: 7345 - DNA, 132 bp, mus musculus
tgaggaccaggaaccacctctgatgctaataccctataagctccttcagaaacacagacacaaccactgaactggctgatttaccctaaattgatcaaaattaagtttcctgtcacaaaggggaatgaagag

SEQ ID NO: 7346 - DNA, 183 bp, mus musculus
gaaacacttattgaatgaataaatacatgtacaatgtgattgtctgcaaagttgtgccaaaagatacagtatgttgcttgtatttttgtttggggatttcattagtcccttatatccaattaatacatttctacttaagatgttctatcacacctgtatgaagtcttagtaaaagaaaagtta

SEQ ID NO: 7347 - DNA, 278 bp, mus musculus
gaccttagaggtgagtgaagagagggaggaaaggaaagcagaggaaactgcataacaagggcaccaaaagctttatttaaataacgtcacttatttatttacacttctcattctacaaagaatttaaagtagttcacataagtataaaataagtatgaagtgtttggagaaaactagtctggtgtggctagacaattagatgcatgctgggaaatcatggtttgaagaggctagtttgtgatgtattcatgaggatttatacactgtgccagaaggtt

SEQ ID NO: 7348 - DNA, 1381 bp, mus musculus
aaacaaagattcacttactttttatctacttaacattgccaatactgcatttatcagttctatttcaccatggaaagcaactgttacaagagactggtttaactgaaatttagaagaattgtagttcctgtagttttttctttctttctttgttttttttggcaagacaccagaatatcttattttagctttaggaatggctgttaacttactcaaatttaatcatttgacacgctaacttttttttttatagtccctgaaataagaatgaacaaaacagctcttctttccataattgccttgtaattactttgttagctttaggcatttacatttcatcaactacagaagtaattacataatcctccttgtcccttaaattctatacatttcatcaactacagaagtaattacataatcctgcatgtcccttaaattctatttgttttgtttggcttcttttgttacaacttaatctcaaagccattgcacatacagacagtgagtgagagagagagagggagagagagagacagaggaccatccaatgccatttttccacttaatgaatcatttcctctgtcagctttttggtattaattttcaaacagttttctttcccatcagttggtccataaaactagttcacagtggcaagattaggacaattttatctttctgagtttttttttgggggggctaggttagtataatgatatagtccagatagatttatagtataaatcctctagcttagtttagtatggatactcttgttgcattggtcatgatcatcattgtctcaaactagggctagattcttaggtgtgctacctgcataatctcacagggttctgtgcttgcattaatgctctactattgacattttgaaattcttaataatttttgagcacagtctatattttcatttttgtacggggcctcaaaaattatgtagccagttctgtcatagacacacacacacataactaaatgttatgctattttgtttatgtcattaagctaagcattatttaaattggattttttaaaaactcaagctgtgttgctcttaaacctatactgtggattgataaataaatatttcaaacaaacaaatggcttgcaacctacaatctcacccttgcttgataaatcagtattataggtctagtaggaaggatgaaagggagagaggaagggagaaagggaagagagaaggagaggatggaagaaaggaaggaagaaaggaaagctggttgcctttattttgtctaacatactcatagataagtgaaaagagtcaacaatataaatgaacatgttaggcttttacacatagctttaatgctcacatcaagtaagtggcctgagatatttt

SEQ ID NO: 7349 - DNA, 928 bp, mus musculus
gatatgggattaaaaccaagacagtctgatcccagagcatgcacttttaatcactgtgaattcagtctccaaatgataataactaccagtttttcagtgcactgagtattttatatgcattatcttatttaatcctaacaagaaccctatgagaacattagcttaaggagatcaagtaacttttccagggtcacacaataaataagtagcacagccaggattcagtcctaatctttctaattcctaaatcatgctcataatgactagtaaatgataactatttcttcttatataggaggaaactgatgatcctgaaaattaagtggctgacctacgttcacatagtaacaggaatgggactaataaatacaccatctcttgacttctcattcaacaagcttttgattatttctctgacggttttctcatttagttgctttcagttgatgctcattagttatcaaatttagagagactctttctctaagtggcactttctccaaatcatgacttctaatagaagtcatgatttctgccataatcctctctccagcaggcatggcctttagggactctgctgaccttgccagcttgcaaaattacaacttaagggcttcaaaggggccaagtgcacagttacagagtgcatgtatagcctgaaatcatgattttaaatacgttgtcttcctgttgctggtgataaaatttggatgttgtgtcctcagaagttagacatagatatcaaaaatcttcaatttccacttatgattctgtctcactggaaaatttgcttaaatgagaatttccaaaagttatgccacagaatattagttattctgctaaaaagggaattcacagccaaatgcatttgaaaaatataagatagtataaccatttgtgtagactgatgataatatcagaaagctaa

SEQ ID NO: 7350 - DNA, 1219 bp, mus musculus
ttatgagtgaaatgttcagagaacttatggaatttcagctgcagatttaattaaaatgtgaagctaaagttgaaatttcatctctggaatttaaaaacctatgctttttccactaggccagtacagtgctataaaatcatgtctctgagcctacacaaaattgaatttacaaaacatttatcttttagttatttaataaggatctttccaacacatagtgggtgaacaaaaatcacacacttctcaacagatgaaataagaaaaaaactattgaatagtaatattttaatgcatcgcttatttcagcataatttagaatgctccagccacatctgaagatcttaaattaattatttgggtcctgaggggagagagtttctgaaagagcagggtagaattaactttcatcaagcacctgatatatgtgaggtggtatcatttatttaactcttttttataggccggaaccatgagaaatgctaagcattctacacttaatacatcctttaatattgttaataaccctgtgtggcatgacacattaatattaacctcattttacccagtaacaaattgaagttggtcagtagtaaaggtgaaatttgaacccaggtcctgttttttgaacctatgtactttctcaaataattgctggaagacacatacagagccagtagtacctccaaataagttctgcttagagtaactgcatagttgcttcttacaccagcacatgagcagataatttttatcaaagattcattacttgggatttccattcatttatttaatgaagtaattcctcagctagtgttagtatttggccaggctcctgcagtctctcagcctttttgtgtttatggacaggtcaaccagtggaataattttcatttgacaagccccagttgaacttgtttcctggatcattaagcacattggcatgtacattaacaaccattttctgccttgttggtttccatctatttcattcacgaattaataggtacataaagagaactcaattaatgcctctttgcataccaccaccagccttcttggtgggtggcaggtattgaagctgtgatgttgaaagagactgaaaacaagcagaactgagactcaaatcaagattcatttatcttttttggaccagaaaactatgccaatagaaatgaatcacagattcgtaaaatcaaatttgcttttgatgttatcaaga

SEQ ID NO: 7351 - DNA, 577 bp, mus musculus
tttgcctccagacttgtcagacacagtgagccgctcaagcaaaatggatctggcagaatccgccaagcggctgggcccaggctgtggcatgatggccggaggcaagaagcacctggacttctagggattcctccttagtcgctgcatgcagaattctatgacactctaattatgattgctaatagcttatgtaaatatttttcttaacaatttgaccctccactccttgaaaaacacaggattataaaatggtgccgccatttctcattttttaactttttacagaactagcacagcagaaatacttttaaatttttccttcatgctctagagaaaataattttatttttaaataaacgccaaaaaatgtcaaaatctcaagattcctgacagtggtcattcgtgtgtgtactaaggcatttagtgtcatggtaaagtgcatgtcacagcaggtagcatacaaaacatgatgaaattcaagattgtatgtgaaaacatactttctctttattacagaaacagtcacttgccaccaaaaatgctgttttttaaatgaaaatgtgtttactaatatata

SEQ ID NO: 7352 - DNA, 1580 bp, mus musculus
gattctggaaagggcaagggagggggaagctctggagccgagcagtggtctgggggccaagagagctgggttctcacctaccacagtggtctgagagatttcagacgtagatgacctcaacccagctactccagggtgaaaggcgagaggtgtctttcccaatgggcacagctagattgatttttggggtgttgctgttgttgttgttgttgttgttgtttttccttggaattgcagtccaggcttgactgtccatgctaatggaacgaggccatgttgtacagtaatgggatttttcaggtttttttaaattttaatttaattttatttcaagtgccaggacacatatgcaggctgtgcaggtttgttacacagataaacatgtgccatggtggtttgctgcacctatcaacccatcatctaagtattaagcaccacagcattagctacttatcctgatgctctccctcccgctgctcccctcgacaggccccagtgtgtgttgttcccctccctgtgtgcatgtgttctcatgcttcagctcccacttataagtgggaacatgtggtgtttggttttctgtttctgtataagtttgctgaggatgatggcttccagctccatccatgttcctgcaaagaacatgacctcgttcctttttatggctgcatagtattccatggtgaatatgtaccacattttctttatccagtctatcactcatgggcatttgggttgattccatgtctctgctattgtgaatagtgctgcagtgaacatacgcatgcatgtgtctttacaatagaatgatttatattcctttggttatatacccattaatgggattgctgagtcaaatggcatttctggttctaggtctttgaggaattgccacagtatcttccacaatggttgaactaatttgtattcccaccacagtgtaaaagtgttcctatatctccacagcctcgccagcatctcttgtttcttggctttttgataattgccattctgactggcatgagatggtatcttattgcagtttttatttgcatttctctaatctctaatgatcagtgatgttgagcttttttttatgtttgttggccgcatagatgtctttttttgagacttgtctgttcatatcctttgcccactttttaatgggattgtttggttttcttttttcttgtaaatgtatttaagttccttatagattctggatattagacctttgtcagatggatagattgcaaaaatattctcccattctgtaggttgtctgtgcgcactgatgatagttgcttttgctgtgcagaatctctttactttaattaggtcccatttgtcagtttttgcttttgttgcaattgcttttgacgttttcgagctagactggtttttaagtttccttaaataatctcacatctggaccatgacaacagccttctaactggcctccttgcctgctgtctctgcccccaccccattcccttctccactgagctacaatgatctttccttctcgactgcagggcagcttaatcctctgttcaaaagccttccaggcctcctattgt

SEQ ID NO: 7353 - DNA, 1753 bp, mus musculus
gtttccattatcaattgcatccacaacaatagtgaaaacacgtctgtttatgtgtatgtgcaatatatattcctttaggttgtcgacaaaaagaagacatagagagaattgaaatgtctaaatgattatatgacagtttatattatgccccattgctgtctcaggagaactgtccaaatatcagttacagggagaaaatgacttcaccagaatgtaaatgcaaaaccagccaatgctttccagaattttgtcaacatattttaaacatcctaattattggacatattacagttagtccataaggatggcaaagaccattttccttgtgcatcctatttcatcatttatattggtagaatgtgtaccttcacttttagaataacgtcccagttttgtccttcctgaacttttcccttcttgtcactggttatttctctgtatccttcaggtggtttttgctaagttcttgaggtattacttaatcgtgcctttctgtcttccacgttctgaagcaattgagaagtatacaaaggaatcagaggtcctaataatagtggtaatactggctacctggtctggtgaatggaaactgtccctgtgatctgaatgagttttctattccatactgagttatacttagccaccttttcatggccacagcagctaaacaactggaagcctttcctcttgagggcagagcttgccttggcagactcaccacatgaaagaggcaggaacagaaggaagaacctataccagcttcaggccatctaacctaagaaagggagccacagagagtataacacttaaaaaaccattgctggccaggcacggtggctcacgcctgtaatcccagcactttgggaggccaaggcaggtggatcatgaggtcaggagtttgagaccagcctgaccaacatggtgaaaccccatttctactaaaaatacaaaaattagctgggcatggtgatgcatgcctgtaatcccagctactcaggagcctgaggcaggaaaatcgcttgaaccggggggacagaggttgcagtgagccaagatcgcaccactgcactcccgccagggtgacagagcaagactccatctcaaaacaacaacagcaccaacagcaaaaaaaaaaaaaaatatatatatatatgtaatatatatatataaatatttatatttatatatttagataaaaaatatttatattttatatatatatatatatatatatatatatatatatatatatatatagctacaaatgcctcccatccctgtatatatgcccccggcaatgtggggttgctactgttcccatcacttgccttggccaatggaaagaagcagaatgatgttaagcaatttctgagccaaggtctaagtcaagcaacctctgcattctttctcaaaattcacctaccaagtgaagaagcccaggctagctaaaccagtggaatggccatgtggataaaaaccaaagtgccccagctgacacttcagccaactgctaggcctgtaaattacatcatccaggatcaggcaacaccaatcaacatgccaagtgaccacaaatatgtgagtgaacccaacaaacaccacagagaatggaaatgaacaatctcagctgaaccctgcccaaatcaccaggccacaccagtcagataagtccctctggtataaggctagacaagcaatgtagctttaatattgttttctacagaatatgaggcatggggtaatatccccactc

SEQ ID NO: 7354 - DNA, 892 bp, mus musculus
agccattccccctcaactcttaaatgctctccaagagaatgctgggcttctgccagctgaatttgttttacaattacctagccagtactcttagttggtcctgtaccagacttagaatataagaccacttagcaactattacattattgccaagatttggagcctctgccagaattttcattttatcagctgtccccactgcatcaatgtgtgtccttcttctagtctcccttaaacttctaacttctgagttctggatttatgtgatctaaaaaaccgagtaaccaaacttattataatatataaggctctagaaagggctgttagtcctttgcaagaatgtcaatgcataaacacttgaagacttttttaaaaaaataaatttcttcttggcccctgcctggagacctaagactgccacaattcctagcctgtggaaaaggctttatttgcaatatcagagatcaatgaagatgtatgaagtgattctttgaaaaagagtataagaaatagaagaataatagaagtgagattaaaaaatacctccacctagcaaatctgcgaagtatgcaaatttagacaaatggccagttccattcagtcatgggcaaattatgccaaatcattcataagttggcaaaaatccatccttcaactataaaccacaaagaattcactttacataacccagttcagtatgcttaatcatgtattcattataatgtataaccaaatacattttaggctgtctatgcacatatgccagcttgaggaaaagagatgaaatcatctaaatgaacatttcttgtttgaatgtaaatgatgtatttcttgcaaatctgatttattgagaggtgtgcatgagaaatcaactaagttaggctacatagga

SEQ ID NO: 7355 - DNA, 180 bp, mus musculus
taaacaattatgtgacttatagacaaatgttattaagaaaaacagagtcacgtattctatctaaatttctagctattaaataataaaattagattttgattcatgaaatcaatatttggaccatttttctagagtactttcacccaaattataattgctataaatttatacaaattataa

SEQ ID NO: 7356 - DNA, 220 bp, mus musculus
ggaccagccaagattaacctactggataatgataaacatatggcccagacaccagcattatcccatgcaacaaccggctaaccactagatattgagggaagtcatcctggactaactagccagctctccatccaactcaccagctgatgcagaaaaaatcctagccaagatcagctaagcctgcctagcccagatgatagagtgatttgtgtgacccatg

SEQ ID NO: 7357 - DNA, 695 bp, mus musculus
gcccttagtagaagtatatgggggaagatgacaccaaatatgaatgttgccttcttgacgcactcctccagattgtcattcttatagcatttgccatgacttgggagccttttctatcccacatcactagtaacttttacagtacttttttttttttttgagacggagtcttgctctgttgcccaggctggagtgcagtggtgtgatctcagctcactgcaagatccacctcctgggttcacgccattctcctgcctcagcctcctgagtagctgggactacaggtgtccaccaccacacctggctaatttttttgtatttttagtagagacggggtttcaccttgttagccagaatggtctcaatctcctgacctcgtgatctgcccgcctcggcctcccaaagtgctgggatttcaggtgtgagccaccgcgcctggcccttttacagtacttttaaccatatatatgtatataaagaaataatagattcagtatactaaaacttctcataataaggtaatattaatgggaacaataaaaaaatcaataatgcattgttgttttagaaaaaatagtataggaaaagtaatttaacaatttccaaactgctatgtattcattttttaagttatatttttagccttcctcaattgtgatttttctatttttctgaattgcccggaatgttactac

SEQ ID NO: 7358 - DNA, 486 bp, mus musculus
tgcaatagctctttcaggagaaactgctttttacataatccttttttatcttgtttgctgatcataagtgaaagatacatgcagacttggacaaatagagataaaaagagggtgtgtcagagtgttcataggacaaataatggtgtgttttgatggctcatttctaatatcaggtgcttgataagtggatgaatcatcctggcttaaagatataagtctgatgtgggcattacctttgtatggtagtttgctcctgatgacaaatgcaggctggtctgtgataatgcttttggctgtatggtgagtgagtgaaccaatgaaccattgagccagataatgaatcagtgttgggcctgattacattttaaatgcatgttaaccatttagcgcaaattggaaatactataaagagtctaaaatgatttacaagtttgatttaaataaactgaaatctttaaaatctaagcaaaaggagatagcttgtag

SEQ ID NO: 7359 - DNA, 1471 bp, mus musculus
tatacacgttcctctgttaaggaggaaatgggcttatttacctcaacttataggacataacaggcctaagacactgagttaattccccaataaggcagccaagagagatctcaaaatttctgaggaaagtgtctaataaacctcatctatggggatccgtaggtgatcatccaaattcttcagctatcatgggcctcaaactgtatcatcagctatacctcgactttcaagatacatatataaaactcatgttaagagaaacgtaaataaaatatttccagtattattttatggaacattgtttaagcctttacaactacaaacaaattctaaataattttaaaatatgcaagatttcaagttactttctcaccagttaatgttcaaattacagttgcgatagaaaatatataaagtaatatttacatattatataaagttaacagtttgaatccacctgaagttaaataagactagaaaatgtaggctagagaaatatttcaccatatttgttgatactctgagtcatgtaagtgtttaaatttgaattataatgcaaaaatttggagataaattatcgtgtacgattgataaaccacagaatattagctctaggccactccagttcctttcaaagagttggcttctaattatctgctgatgtctgtactaaatttaatagccaagagatttggatcttacacatttagtgagatacaatagccgtatgcacttgtcaatgactcatatttatcagttatcacctatattaacggagataaggaacagatcttaaaagttaagctgtaggatcttgattccagacataaaattagaatttgtactttagtagaaatgcacagtaagagaactgcataattgcttggagaactttattaataaccaaatgctcaaatgagcagagcaactttgttattacaatgtactatgccaaaatgagtctgttcatatatttgccaatttcattttgcccaacagttcactgagttcaattactgagttgtttcattttactggaatctttagaacattgccaaaataacaaaaataactaatgaatgaagtcaaacgaagaccatttggggacaatcagattattttcccccttgatttcttcttaccttctggaacaccttggtttaataaaattctgtgtggtgtgtattcttctcccctagagttaatgtctttattcatttgattaataaattcttagtgagaatttactatgtgcttattctagtgaaacatttagaatataattgtgagtaaaccaggcaaagttcttaccttcatgtagctaatattctaaaggagacagataattaaacaataataataatgcggcttaatgtgagtacagttttaaattcatgactggtttcaaatcttttgagttggtgatggattccagaataagatctaaattgctttactttccttattagac

SEQ ID NO: 7360 - DNA, 1245 bp, mus musculus
ccctttgccctcaacttctgtctctcttccccattactcttctttaaacatgtcaggcgtgctcctgcctcggaatctttgtatttgccttcctgctacctagaacagttatttccaatatacccacaaagtgcattctctctcacctccttctggggggaacttctagagaagataatcttccacatggtttacatttttgtatcagtttctgggagtgtccatgtctgaccttgtgccctgattctgaaatcccctttaagtccagattgactccatttattattcaggcacaaactagcatccatttagaaagcttgctgaataagcagactggaggaatgtaaatacatgcagaattattccatatctcagatccagaaaggcctatgggcacggatgggtgcctatgctaaataagagctggcataaatcttaacctagaattggaatttaaaatggaactttatttgagcttcaaaatggactttctggaactctctcaaaggaataaataaataaatatagaaacggattacatgctatggtgcatcttgacatgtagattgggaatatttgcattgatattataagagagaatatttgtagcaggtatctggatatctcataacaattgttaatcgaggagggaaagtaaatgaatcgttggacttagatttccactaattcaagtgtgtagtggaattgtggtggatctcagctgaaaataggtggctgtagatttatgagttagaatcagacttcactattttacggtacataagtgggtacacagttgtagtacatgggtgtgtgtctgtatgtatttgtctacatgaaaccaaagttcaggaatgtgtcattgcaaacatttaacacttgtccgtccctttcgccttccttttctctcttcctgcttcatttatataatcaatgatgcctgctctaaaatcccttcctggctctcaccccatctccactgctgccatatctgctggcacgtgaacttttccccatcttcccacttatcctactttattaaaaaggctgataattttctcattcttattaaatgtaagttttataagatcaatgatcatgtctagcttgttttctattatattctgaaataataatatagtatttggcacataataggtgcttaataatactgacttcgtgaatgggtgaattgatctagggctgactagatatgaagtactgtgctagatcctgaaaggcatt

SEQ ID NO: 7361 - DNA, 1245 bp, mus musculus; identical to SEQ ID NO: 7360

SEQ ID NO: 7362 - DNA, 341 bp, mus musculus
aggagagaagtttagcaggcagaaatgactcctcaagcagaaataccttttgaagccagcaagtagtaatcttgatgcttgaatggctggtatgaggtgaagactgctgggtgagaattcactgctgcatctttgtgggacctttttattcagtgccttcttgtctatgtaaaataaaataaaccaactttttgttattttttatatttccatgaagaagtccattgggtccaacaaaatcatgcagttttaagttcagtctgtttcatatgggcttcccaacatgcattcccattcaaaggtcaattacttgcttgcttactttttgtggcacatttgaa

SEQ ID NO: 7363 - DNA, 1502 bp, mus musculus
tgggtgcaaagaagacaaagaagttggtttgttagtctgtgctgtttattgatgtatctattttgagtccaaattattaagaatgtacacccactgagtagagactgggtctttgatatggacctgtgaattgtgtatttgtgtgtttatgcttgactcatggctgcaattatataattgagactataagctatctgtatctgtccatatgtttatatgtctataattcaaaaaagtctttcacttcaactatgtgaatatacaataaatttcttacctctggatagtactaattaattagtactattactactatttgaaattccttacattaaagaagttctatcatgattggcttagggatgaagaagcctctatacaattggccaatcctaatattaccagaaattaagaaaacaatctcaaagaatttcaaggtgaaaaaaagagatattcttagagaaactaattcaaaaatatttcaagaatattcacataatttaggtaaaatgtcagcaaataagactagtttaataattttggtttaatacaaataattatgttttctctaaattgtcattattatcagtataatgcaagtatacggtattcgtccattttcatactactataaagaactgtccaagactgggtaatttataaaggaaagaggcttaattgactcacagttcagcatgaatggtgaggcctcaggaaacttagaatcatgcccgaaggcaaaggggaagcaaggcgtcttcttcataaggcagcaggaaggagaagtgctgagcaaagagagaagagctccttataaaaaccattagatcttgtgagaactcactcactatcaagagaacagcatgagggaaactgcccccatgatacagttacctccacctagtctctctctcaacacatgggaattatggggattataatttaagatgagatattggccaggaacacaaagcctaaccatatcatatacttttttttttttttttttttttttttgagacggagtctcgctttgtcgcccaggctggagtgcagtggcgcgatctcggctcactgcaagctccgcctcccgggttcatgccattctcctgcctcagcctcccgagtagctgggactacaggtgcctgccaccatgcccagctaatttgtttttgtatttttagtagagatggggtttcaccgtgttagccaagatggtctcgatctcctgaactcgtgatccgcctgcttcagcctcccaaagtgctgggattacaggcatgagccaccgcgcctggcccatgtacatttttattctacttcggtatgttatttttaagcttataggtttactgatcatataagctagtattatttctacttaaggtataatattacaaaaaattactttgggtttaacaaaattgagtaattattctaacaaactgtatttcaacagtaattatattttctggtaagtaagtttgaagagaatttccaa

SEQ ID NO: 7364 - DNA, 1604 bp, mus musculus
ggcccctgtatcttgatcactcaaaaataggtggtttaatagaaccagaaaaagatagtatctgttcaggttgggggtccagctctgggaaaagggtgggtggtcctcaggaattgaagggtggttggaccaagccttgaaagccctttccaataccccaaatacaggacttcatgataggggacttgccaagaaatccagcagacaagtatgtggactccataggcaaagctgctatggcatttctttgggagaagcagccgagtacccaggcctgcggtagttaacagaaagaccactggacatggtgtcagaggtcccactgaccttgggattttgggtaaacaacttccctctcagagccttagtttctctacttataaaatagatctcttatagagacccctccagcactgagaatctctgattcatttctggagtttttgcctcatgtttcataatctgaagatctgccaatgagcaagtatttatagagccctgtcaggtgaggtgggagaaacaagtcactttgaaaccagcctctgccctcctagagctcatcaaggacattcagatacacacaggcacacatatggaagcagccacccaatacccaatggaaaggacttgtctatgggggtccagaggaagggacagcaaggtggcctgggctgttccaggatggcttccaggaggaggtagaatttgagccaggccttgcaagatgagcagagttcactaggttagaagaagggagcaggatgtcccatgcaaggcctggtgaaaagtcagggctcacacatacagctgtgtaggttgtgcactgcacaactccaggggcaccaggggcattcacattgtgatctctgtgactatactccctgtgtacaacctgcaaggccttatgcaaaagccctgaaaaaagtgctggcatagaggaatgatgtctgccaggtctgcaggaacaggcaagagtagcccctgggtggcccatttgtccacctggcctatgggggttagtgttctcccaggcttgggggcaatcagctctgttcatttcctgaatggctcaagtgttcatgagaagagtgcagccagacatcaggttcagatgtttcctccagtgctttctgggatcctgggcaactgacataacctctctatgcctcggtttactccttgaaagtgggcatcataagagctcctgctgtacagggttttggaggacattcaggtggatcatacatgtaaagtaattgtgtaaccctgggcttgatcattgatccatgttatgatgactgaccctgggagagagagagagagagaaaggctgggtggagtggttcctggaagctactgggcactgggaagagaggggtggaagtaagcagcttgtcattgggctggagatgagccattgccaagcagtaatgatttttccataaatcataaatttggatggctcccaggaaaccagcagcgtctcctgggagaactgttttaggaaaaatgctttgtgaagtacacaggagccagggatccaggggactggagttcttttcctcacccatcagggaccttgagccactccctgtatttgggcg

SEQ ID NO: 7365 - DNA, 790 bp, mus musculus
ccctgggagacctcactccttcctttcttcctctttctccctagccctctgccctctgcctaccccagccttcatgtccatcttgagcatgccccacccttctaagggactttgcaaatactgtgccctcactctcttccaagtctttgtacaatcaccttgtctaaagagccaaggaaggggccgggagcggtgactcacacctgtaatcctagtactttgggaggccgagaagggtggatcacgtgaggtcgggagttcaagactagtctggtcaacatggtgaaaccctgtttctattaaaaatataaaaaaaaattagctgggtgtggtggtggccacctgtaatcctgattacttgggaggctgaggcaggagaattgcttgaacccaggagatgaaggttgcaatgagccaatacggtgccactgcgctccagcctgggcgacagagtgagacacttgagccaatacggtgccactgcgctccagcctgggcgacagagtgagacactctgtcaaaaaaaaaaaaaaaaaaaagccaaggaaacactgatgaggaggaagaggatagagaagggaaggcagaaaaggaccctgatggaggctgaccagcctgtgcccagctcacagcctctgaggggagagagctgctcaccagagatttgaagttttaaagtgcagaaccagactctcaccccagttcttctgtagggacttgtgtaacctcagataagtctctggtatggtgatgcaggctttggcttgcccatctgtaaaatggatcaaca

SEQ ID NO: 7366 - DNA, 1088 bp, mus musculus
aacccaactagaaggtctgattccatctctgatgccagttttcaatagccagtctcccttgtgaggttttagtgatggcagatggcatgatctgagtcttcttataaaaatgcaattttgttctagaccaaatgtgaggagtattggccctccaagcaggctcaggactatggagacataactgtggcaatgacatcagaaattgttcttccggaatggaccatcagagatttcacagtgaaaaatgtaagtaagaagtcaggatcagttgagctcatgtaattaccatatgttaatttgggggtgatatgttttaggttgatattaactaatatgttttcctatgcagtgagaaatgttttgctgctttcctttcagaacagaacaatccatatgcatgtatactccaaggcaaccccttgacttttctgggaaatttactttcttgggaataacctaagttatttctgaataaaatgaatcttaagagcatggctctacatcaggaactctttcctttctttccacttccaggtgacttgctcatagattttacagaacaaactgtagccttttggattatttggttagaaatatggcatcaggagcggccacttgctgttaggagtaattgataacagttacattaataggattccagggcatatgcacatggccttccttcccctcaaaatttacaaaagcaaatccaattaaattgtgcaggcattctaggaagtcaagtttatgtgctttttttctttttcaaggatgctttgaaaatagaggcagtgccatgaagcagcattggtatctgttgatgggtgtgtgcattggcataactctctgctgtttatatcacaggcctaaacattaggcatgtgctggcttgaagtctgagactatcctaaggaaataatctgaaatgcaaccaaaggcttattcagaaagacgagtctcagcattatttataatagaggaaaactttggaaaccatgcagacatggttttgtagcttttgtagcttttgcagaatggataacttaactatgactcgtctgcttataatatcattattcagctattag

SEQ ID NO: 7367 - DNA, 1818 bp, mus musculus
agagttgtcctcagttgttttctctctttccttgaaccatttctatacccctcaatgcagaatctgtgaatcatatggtgaatgttttcttcatccaatcaatttgtcccactgcaattatccaaaatgtccttttgactttttcttttttttttaaaattatactttaagttttagggtacatgtgcacaacgtgcaggtcagttacatatgtatacatgtgctatgttggtgtgctgcacccattaacttgtcatttaacattaggtatatctcctaatgctatccctcccccctccccccaccccacaacatgccccggtgtgtgatgttccccttcctgtgtccatgtgttctcattgttcaattcccagctatgagtgagaacatgaggtgtttggtttcttgttcttgcgatagtttgctgagaatgatggtttccggcttcatccatgtccctacaaaggacatgactaaattgaatcaatgttgagctctagttacatttatttgttacctgaaatgtcctttctactacacaatttcctgatggcatttttcatctgggcattcctcaaggtatagattaaggggtttaacataggagttatcatagtgtagaatatagcaactgctttatcaataggtaaagtagctgcaggtctcatgtacacaaatatgcagggcacaaagaataagatgacaactgtgatgtgggagacacaggtggagagggctttgtgccttgcctccaagctgtgagtccttagggagcgcaagatgaccacataggagaccagcaggaggacaaagtttaacaagcagatgaatccactgttggcagcaatgaagagtcccagcatatgggtgtcagtgcaggcgaggttgagcaaagggttcagatcacacataaagtgatctatgacattaggaccacagaaaggtaattggaagatgaagaggatctgtatggttgcatgaagaaagcctcccatccacaccactcccattagcagggcatacacacactggttcatgatagtcatatagtgcaagggcttgcagatggccacatagcggtcataggccatcacagtaagtaggataccctctgcacctccgaagaaatgttctccaaagacttgagtcatgcatccattgaataggatggtgttctttccatagagtgaatctgtgatcagcttaggggtattgacagaagaatagcaggcatctataaaggagagataggccaggaaaaggtacatgggggaccccagtgatgggctggcagtgatggtgaccacaatgagcgcatttcccaccacagtgatgatatagatgacaaaaaaacacaacaaatatgattttctgcatctttggattctctgtaagccctagtaaaacaaactctgtcacgttattcctattctccatgtatttcatgtgatgattaattgcattacctgaaaacattttttattaatacaactttgaatttattacacatctccattttaataataaatgcttgaattttattaaactgtaaattcttataagatttttcttgagatgttaataaagtttctcagttcttgaagattacttggtgaagactctgtgaagagtataaatattaggatctcttgtgaacaaagtcaggatgtcatgtgtgtttactcaaccatctgggaggcctaagagctcaatttgaagtagtagattggatacacagtagcagctaaacctgaaaagggagatggacaatgaatttaaagaccatggtgtaaagctaaggaatttgccatttattct

SEQ ID NO: 7368 - DNA, 924 bp, mus musculus
aaagactctaagtttttcaatagtgctgaagcttatgaaagattgttactttctatatagagtaatcggtatttttcagcacttttcaaatagagtaatagagtcttgcattctcactccaattattcaaaaggtagttggtaaatatcattaacctaatttgacagttgaaatatttgaggcttatagagattaagcaatttgtagaacccatctctctgatatcgggtaccatgttttgccatgagacacctccttagtgaatgagacaagttatgaggactaaaacaaaatttaaatacacttcacacacacaaaagacataaatatgaatattaaatggcaaatcatcagctgattagtccaagcacaaacatggagaagctttactgggatcacttgctatgaataatataaagccctgtaaaaggaaaattggagacctttctttatgagcttaatgtgtggtcaaatgtttctctgtattatattgatcacattgtcaatttatcctgtctcctaggcttatacagccataaaaataaatgaaagtcctgtatatgtccctaacagtagggtagatatattcatatagttctcccaattaattcgcataacagtatgtgaggtgaatattatcattttatggatgataagattaagatgtaaggtgccaagaaatataccccaggtaaaagaagttataggtggaaaaacgaggattctaatctggtctttctgattctcaaactaacacacttaactattgtgataatgttttttaacactttgcagaagtttctggctagggtcccatgctttgcaaggggatcaaggaggaatgcatagggctgagggagaggctaagcaaaaacagcccttcaatgaatgtaataccacatttttcttaatatttaggagttt

SEQ ID NO: 7369 - DNA, 1650 bp, mus musculus
gatattatctacagggtggtggtggcataggacttcatattgtaaaactcaaagagcagctaaatatatcttaaatgttgagtgatacacaacataaaaaatggccctcagtatttattgaaaattataaaatgaaatttaatattaaaatggatcattacctcttacatttaccttccttgaattggaaaaattaatcagaatgatgccaaagctaaccaaggcttgtacttgaagaatgctatagcaaggtatcatgttcataagcatatttgagaatcataataaccctatgaagtggtcattaaaatttggaagaaagtgttgaagtggcttattaagaaaccgccaccagaatgtatccaataagaaatatttaattttgcataaaatattccataacatcacatagcacagcataaattaattccttttttttttgcaggtagaccatttcacacttgccccttcacctcactcacgaaaaccatgcaactgaataataatgtgactgagttcattctgcttggattgacacaggatcctttttggaagaaaatagtgtttgttatttttttgcgtctctacttgggaacactgttgggtaatttgctaatcattattagtgtcaagaccagccaggcacttaagaacccaatgttcttcttccttttctacttatccttatctgatacttgcctctctacttccataacccctagaatgattgtggatgcccttttgaagaagacaactatctccttcagcgagtgcatgatccaagtcttttcatcccatgtctttggctgcctggagatcttcatcctcatcctcacggctgttgaccgctatgtggacatctgtaagcccctgcactacatgaccatcataagccagtgggtctgtggtgttttgatggctgtggcctgggtgggatcctgtgtgcattctttagttcagatttttcttgccctgagtttgccattctgtggccccaatgtgatcaatcactgtttctgtgacttgcagcccttgttgaaacaagcctgttcagaaacctatgtggttaacctactcctggtttccaatagtggggccatttgtgcagtgagttatgtcatgctaatattctcctatgtcatcttcttgcattctctgagaaaccacagtgctgaagtgataaagaaagcactttccacatgtgtctcccacatcattgtggtcatcttgttctttggaccttgcatatttatgtacacatgccttgcaaccgtattccccatggataagatgatagctgtattttatacagttggaacatcttttctcaaccctgtgatttacacgctgaagaatacagaagtgaaaagtgccatgaggaagctttggagcaagaaattgatcacagatgacaaaagataaatgaaggtttcaaatccttctttatagtttggagtgacctagaagaaatcaatgagaatattatatttttattgttgatttaatgtaatcctgccttggtacatgaggattagttcctttgggaaaagagacagtgtaaacaaataacaatggttaatgttgagtcagttttatgtggcagaaaagacagcatgcaatacaaactagtatgtaaagctcattgccttc

SEQ ID NO: 7370 - DNA, 816 bp, mus musculus
ataacatcacatagcacagcataaattaattccttttttttttgcaggtagaccatttcacacttgccccttcacctcactcacgaaaaccatgcaactgaataataatgtgactgagttcattctgcttggattgacacaggatcctttttggaagaaaatagtgtttgttatttttttgcgtctctacttgggaacactgttgggtaatttgctaatcattattagtgtcaagaccagccaggcacttaagaacccaatgttcttcttccttttctacttatccttatctgatacttgcctctctacttccataacccctagaatgattgtggatgcccttttgaagaagacaactatctccttcagcgagtgcatgatccaagtcttttcatcccatgtctttggctgcctggagatcttcatcctcatcctcacggctgttgaccgctatgtggacatctgtaagcccctgcactacatgaccatcataagccagtgggtctgtggtgttttgatggctgtggcctgggtgggatcctgtgtgcattctttagttcagatttttcttgccctgagtttgccattctgtggccccaatgtgatcaatcactgtttctgtgacttgcagcccttgttgaaacaagcctgttcagaaacctatgtggttaacctactcctggtttccaatagtggggccatttgtgcagtgagttatgtcatgctaatattctcctatgtcatcttcttgcattctctgagaaaccacagtgctgaagtgataaagaaagcactttccacatgtgtctcccacat

SEQ ID NO: 7371 - DNA, 1206 bp, mus musculus
tcagtttaggcaaattttttagatgtaaatgcattccttgatcatgtgtctgcacacggttcagggaagtgttacattctatgctgggagaagggaaaattacctaaaatgaaaaccctgttatgaataaggaacagaattaaaaattataaatgaaatttccatgtgcatttaattaatttttgttgattctaaatgttacaaataagaatagtgatatatattgttctgaagaactagtatttttttaaatcattatattttcaaacaataaagtatattcttacgttactaatgtgacacagtatttggaaaaatgtttcaaaaactattagagaaatcagttatgatttctaagaacaaatatagttaatatattgattctgaattaacttcagtgatttgtgtaactagattccacgatctgttgatagttttacatgattgtgattacattgtaaatgttttaatccaaattcatttttccctagatactttatttttgcatagcacacaacatatggaaagtcaaaggaacatataaaaattcatactcatgagcctttcctctatccagaacatacaaatatttgtttttgtgttcttattttgtaatgttgccatcttggtgggaaactttctgatccttatctctatttgatgtagtcctctttttaaccaaccaatgcactatttcttcaggctatatgaatatctactatacctcctgtgtcacacccaaaataattggtgatctagtagtgggaagaataaacatctcctatgataggagtctttcccatgcacttctttggaatcattgaaatcttcatccttacagtcatggcttttgatcactatgttgccatctgcaaacctccccgctacctaattatcatgaataggacaaaatacaatactctaatctcggttgcttggctgttggggctttccattctttgtttcagttttctatgaaaatctggttgcctttctgtggctccaacaaaattgatgactaatattaagatatttttcctttactgaaagtcgcttgtactgatacctgcatcactggtgtcctcgtggttgccaattctggaatgtttgccttggtaaccttgttctgtcgtttggctcttatgtcattatactattccccttaaaaaatcattcagtagagggaagatgcaaagccctctctac

SEQ ID NO: 7372 - DNA, 752 bp, mus musculus
tattccttagactatatgtcatggaattaataatggagtcacaatagtacgaaaaagagaaagcattttgtcagttcctgctgaatgacgggtttggggtcttaagtatgtaatgaagccttatccaaatgacaatgccacaattatgagatgagataaacagatggagaaaactttgacacaactcgtagttgtagctgatggccatttatagattgtgcagacaattttgccgccagggataaatatcaacagacatggagccaggacatgaaacacagtacctatacagagattcatctcattcaaaaacatgttcccacaggacagtgtaagtgttggggtaatgtcacagaacaggtgcttgatttgtttggaaccataaaatggcaaagagaaaacctggaatgtctgcactatccagacaggagttccagtgatccaggagccagccaccatctgggtacagacctcatggtttatgaagagaagatagtgcagagggttacaaatggccacatagcggtcttaggccatcacagccagaaagaagcactctgtggctcccagtataagaaagtggcacatttgtgtagcccaggcaactaaagaggttattccactctgggtcccaagattaatgagcattcttgggagagtaactgacagataacaaatttctaagaaggaaaaattgccaaaaaaaaataggtgtttggagactaaggtccagctttgttattagaacaatg

SEQ ID NO: 7373 - DNA, 826 bp, mus musculus
ttgatgatcctgatgtgcaatggcatcataatactactaataaaaattcaccccgctctccagactcccatgtatttttttcttagcaatttttcccttttggaaatctgttatgtaacaatcattatcccaagaatgctcatggacatttggactcagaaaggaaatatttctttgtttgcttgtgctacacaaatgtgtttttttcttatgcttggaggcacggagtgtctccttctgacagtgatggcctatgaccgctacgtggctatttgtaagcctttgcagtatcctctagtgatgaaccacaaagtctgcattcagctgataatagcttcctggaccatcacaattcctgtagtaattggggaaacatgccaaattttccttttgcccttttgcggaactaacacaattaatcatttcttttgtgacatcccgccaatactcaagcttgcttgtggaaacatatttgtgaatgagataacagtccatgtagtagcggtggtgtttatcacggtgccatttctgttgattgttgtctcttatggcaaaattatctccaacattttgaaattgtcatcagccagaggaaaggctaaagccttctccacctgctcatctcacctaatagttgtaatcttattctttggagcaggtactatcacttatttacagcccaaaccacatcagtttcaaaggatggggaaactgatttctcttttctacaccattctgattccaactttgaatcctattatatataccctgaggaacaaagatatcatggtggcattgagaaaattactagctaagttattaacat

SEQ ID NO: 7374 - DNA, 1139 bp, mus musculus
tatatttcatttctgaatcaaatgtagaaataatgtttctattatctattgtgaataacaatctattctgtctacaaatattataatttgtttaaatagcactacatggaacagctaataacccaactgtttcttcctagaagagataactggactaaatgggccaacacaatctaacagtgctaactgaattcattctgatggaactcacaaggcggcctgagctgcagattcccctttttggagtcttcctcgtcatctacctaatcacagtggtgggcaacctaactatgatcattttgaccaaactggactcccacttacatacacctatgtacttttctatcagacatttggcttttgttgatcttggtaattctactgtcatttgtcccaaggtgctggcaaattttgttgtggatcgaaatactatttcctattatgcatgtgctgcacagctggcattcttccttatgttcattatcagtgaatttttcatcctgtcagccatggcctatgaccgctatgtggccatttgtaaccctctgctctattatgttattatgtctcagcgactgtgtcatgtactggtgggcattcaatatctctacagcacatttcaggctctgatgttcactattaagatttttacattgaccttctgtggctctaatgtcatcagtcatttttactgtgatgatgttcctttgctacctatgctttgctcaaatgcacaggaaatagaattgttgagcatactattttctgtatttaatttgatctcctcctttctgatagtcttagtgtcctacatgttgattttgttagctatatgtcaaatgcattctgcagagggcaggaaaaaggctttctccacatgtggttcccatttgacagtggtggttgtgttctatgggtctctactcttcatgtacatgcagcccaattccactcacttctttgatactgataaaatggcttctgtgttttacactttagtaatccccatgcttaaccctttgatttacagcttaagaaacgaagaggtgaaaaatgccttctataagctctttgagaattgatgtcaactttgtgtttaataatcaatttgtaatattgttataataaatatataatat

SEQ ID NO: 7375 - DNA, 1006 bp, mus musculus
ttgctttatatttcatttctgaatcaaatgtagaaataatgtttctattatctattgtgaataacaatctattctgtctacaaatattataatttgtttaaatagcactacatggaacagctaataacccaactgtttcttcctagaagagataactggactaaatgggccaacacaatctaacagtgctaactgaattcattctgatggaactcacaaggcggcctgagctgcagattcccctttttggagtcttcctcgtcatctacctaatcacagtggtgggcaacctaactatgatcattttgaccaaactggactcccacttacatacacctatgtacttttctatcagacatttggcttttgttgatcttggtaattctactgtcatttgtcccaaggtgctggcaaattttgttgtggatcgaaatactatttcctattatgcatgtgctgcacagctggcattcttccttatgttcattatcagtgaatttttcatcctgtcagccatggcctatgaccgctatgtggccatttgtaaccctctgctctattatgttattatgtctcagcgactgtgtcatgtactggtgggcattcaatatctctacagcacatttcaggctctgatgttcactattaagatttttacattgaccttctgtggctctaatgtcatcagtcatttttactgtgatgatgttcctttgctacctatgctttgctcaaatgcacaggaaatagaattgttgagcatactattttctgtatttaatttgatctcctcctttctgatagtcttagtgtcctacatgttgattttgttagctatatgtcaaatgcattctgcagagggcaggaaaaaggctttctccacatgtggttcccatttgacagtggtggttgtgttctatgggtctctactcttcatgtacatgcagcccaattccactcacttctttgatactgataaaatggcttctgtgttttacactttagt

SEQ ID NO: 7376 - DNA, 218 bp, mus musculus
acctccaaattgtgataaataaaatgtctctagacattagaaaatgtttttgggtgagtaaaatcaaaagcaactgaaaactgctgatctgccttatctctttcttaaattatttaaacatgtttttatttgtgagaggtatgttttcaaatgtcgcaaattgtgaaatttaggtatatcttctgttagctttgcatactaaaaaatttctcaggtga

SEQ ID NO: 7377 - DNA, 49 bp, mus musculus
aatctaacaacggtgaatgaattcattcttacgggaatcacagatatcg

SEQ ID NO: 7378 - DNA, 917 bp, mus musculus
aacattttacttaaagaagctttgacttccttgtttctcaaactatagatgaaaggattcaacatggggatgactactgtgtaagacagacaccactttgtcttgatccattgagtagctggagctgggacgcagagatacatgaacaggattgtcccaaagaagatagtgaccaccgccaagtgggaagcacaggtggagaaggccttgtgcctcccttctgcagagtggatcttcaagatggcagcaaggatgtagagacaggaaacaagaatcagtaggagacagctcaattcattaaaactggcaaaggcaaaaatgacaacctcattgatgtgtgtatcagaacaagagtttcaggaggggtggaatatcacaaaaaaaatagttaatgatattggagtggcagaatgacagctggaaggtgaagccagtgtgaatggcagcatttacaaagcccaaaagatatgtggctaacaccaggagggcactgaggtggggtgacatcaggactgtataaagcagaggcttgcagatggccacataacagtcataggccatgacagccaacagaaaaccctcaatgccagcaaaggagccaaaaaagaagaattgagtggcacattcattaaatgaaatgactgggttctccacccagaaatttatcagcatattaggggcaatgacagaagaataacagaagtcaacaaggcacaagttactgaggaaaaagtacattggagtatggagatgtgagtcaatcttgattaatagaatcatgccaagatttccaacaacggtgaacatatagatgagaagaaacaacacaaaaagaagacactgtaattctgggtgatccgtgaatcccaggataataaatccagacagtggtgtaaagtttctcatatcttagtctc

SEQ ID NO: 7379 - DNA, 1297 bp, mus musculus
attttaattattcaataaagagttaactgtaggaatgaccatagttaatacacactaaatcacttgcttcagtcattagtagacagcacatctagtactacaagtcttttgatttggcatcaaatccaacataccttttattatgcttttcactttttgctcttctgttagaagttgtttcactaaaaatatattatagctccatcatgtattcatctgactaaattccactgtgcatcttctttcttattgcagctcaaatgatgagacttatgaaagaggttcgaggcagaaatcaaacagaagtaacagaatttctcctcttaggactttccgacaatccagatctacaaggagtcctctttgcattgtttctgttgatctatatggcaaacatggtgggcaatttggggatgattgtattgattaagattgatctctgtctccacacccccatgtatttctttctcagtagcctctcttttgtagatgcctcttactcttcttccgtcactcccaagatgctggtgaacctcatggctgagaataaggccatttcttttcatggatgtgctgcccagttctacttctttggctccttcctggggactgagtgcttcctgttggccatgatggcatatgaccgctatgcagccatttggaaccccctgctctacccagttctcgtgtctgggagaatttgctttttgctaatagctacctccttcttagcaggttgtggaaatgcagccatacatacagggatgacttttaggttgtccttttgtggttctaataggatcaaccatttctactgtgacaccccgccactgctcaaactctcttgctctgatacccacttcaatggcattgtgatcatggcattctcaagttttattgtcatcagctgtgttatgattgtcctcatttcctacctgtgtatcttcattgccgtcttgaagatgccttcgttagagggcaggcacaaagccttctccacctgtgcctcttacctcatggctgtcaccatattctttggaacaatcctcttcatgtacttgcgccctacatctagctactcaatggagcaagacaaggttgtctctgtcttttatacagtaataatccctgtgctaaatcccctcatctatagtttaaaaaataaggatgtaaaaaaggccctaaagaagatcttatggaaacacatcttgtagagccatgttacccatcatttgttacgtagaagaaaatacattttcatgttaactgtattctctgattgtttaagctgtttctc

SEQ ID NO: 7380 - DNA, 1297 bp, mus musculus
gagaaacagcttaaacaatcagagaatacagttaacatgaaaatgtattttcttctacgtaacaaatgatgggtaacatggctctacaagatgtgtttccataagatcttctttagggccttttttacatccttattttttaaactatagatgaggggatttagcacagggattattactgtataaaagacagagacaaccttgtcttgctccattgagtagctagatgtagggcgcaagtacatgaagaggattgttccaaagaatatggtgacagccatgaggtaagaggcacaggtggagaaggctttgtgcctgccctctaacgaaggcatcttcaagacggcaatgaagatacacaggtaggaaatgaggacaatcataacacagctgatgacaataaaacttgagaatgccatgatcacaatgccattgaagtgggtatcagagcaagagagtttgagcagtggcggggtgtcacagtagaaatggttgatcctattagaaccacaaaaggacaacctaaaagtcatccctgtatgtatggctgcatttccacaacctgctaagaaggaggtagctattagcaaaaagcaaattctcccagacacgagaactgggtagagcagggggttccaaatggctgcatagcggtcatatgccatcatggccaacaggaagcactcagtccccaggaaggagccaaagaagtagaactgggcagcacatccatgaaaagaaatggccttattctcagccatgaggttcaccagcatcttgggagtgacggaagaagagtaagaggcatctacaaaagagaggctactgagaaagaaatacatgggggtgtggagacagagatcaatcttaatcaatacaatcatccccaaattgcccaccatgtttgccatatagatcaacagaaacaatgcaaagaggactccttgtagatctggattgtcggaaagtcctaagaggagaaattctgttacttctgtttgatttctgcctcgaacctctttcataagtctcatcatttgagctgcaataagaaagaagatgcacagtggaatttagtcagatgaatacatgatggagctataatatatttttagtgaaacaacttctaacagaagagcaaaaagtgaaaagcataataaaaggtatgttggatttgatgccaaatcaaaagacttgtagtactagatgtgctgtctactaatgactgaagcaagtgatttagtgtgtattaactatggtcattcctacagttaactctttattgaataattaaaat

SEQ ID NO: 7381 - DNA, 1244 bp, mus musculus
tttatcacaagtaattatgacagtcacatcttaagaataagttattttaattattcaataaagagttaactgtaggaatgaccatagttaatacacactaaatcacttgcttcagtcattagtagacagcacatctagtactacaagtcttttgatttggcatcaaatccaacataccttttattatgcttttcactttttgctcttctgttagaagttgtttcactaaaaatatattatagctccatcatgtattcatctgactaaattccactgtgcatcttctttcttattgcagctcaaatgatgagacttatgaaagaggttcgaggcagaaatcaaacagaagtaacagaatttctcctcttaggactttccgacaatccagatctacaaggagtcctctttgcattgtttctgttgatctatatggcaaacatggtgggcaatttggggatgattgtattgattaagattgatctctgtctccacacccccatgtatttctttctcagtagcctctcttttgtagatgcctcttactcttcttccgtcactcccaagatgctggtgaacctcatggctgagaataaggccatttcttttcatggatgtgctgcccagttctacttctttggctccttcctggggactgagtgcttcctgttggccatgatggcatatgaccgctatgcagccatttggaaccccctgctctacccagttctcgtgtctgggagaatttgctttttgctaatagctacctccttcttagcaggttgtggaaatgcagccatacatacagggatgacttttaggttgtccttttgtggttctaataggatcaaccatttctactgtgacaccccgccactgctcaaactctcttgctctgatacccacttcaatggcattgtgatcatggcattctcaagttttattgtcatcagctgtgttatgattgtcctcatttcctacctgtgtatcttcattgccgtcttgaagatgccttcgttagagggcaggcacaaagccttctccacctgtgcctcttacctcatggctgtcaccatattctttggaacaatcctcttcatgtacttgcgccctacatctagctactcaatggagcaagacaaggttgtctctgtcttttatacagtaataatccctgtgctaaatcccctcatctatagtttaaaaaataaggatgtaaaaaaggccctaaagaagatcttatggaa

SEQ ID NO: 7382 - DNA, 1244 bp, mus musculus
ttccataagatcttctttagggccttttttacatccttattttttaaactatagatgaggggatttagcacagggattattactgtataaaagacagagacaaccttgtcttgctccattgagtagctagatgtagggcgcaagtacatgaagaggattgttccaaagaatatggtgacagccatgaggtaagaggcacaggtggagaaggctttgtgcctgccctctaacgaaggcatcttcaagacggcaatgaagatacacaggtaggaaatgaggacaatcataacacagctgatgacaataaaacttgagaatgccatgatcacaatgccattgaagtgggtatcagagcaagagagtttgagcagtggcggggtgtcacagtagaaatggttgatcctattagaaccacaaaaggacaacctaaaagtcatccctgtatgtatggctgcatttccacaacctgctaagaaggaggtagctattagcaaaaagcaaattctcccagacacgagaactgggtagagcagggggttccaaatggctgcatagcggtcatatgccatcatggccaacaggaagcactcagtccccaggaaggagccaaagaagtagaactgggcagcacatccatgaaaagaaatggccttattctcagccatgaggttcaccagcatcttgggagtgacggaagaagagtaagaggcatctacaaaagagaggctactgagaaagaaatacatgggggtgtggagacagagatcaatcttaatcaatacaatcatccccaaattgcccaccatgtttgccatatagatcaacagaaacaatgcaaagaggactccttgtagatctggattgtcggaaagtcctaagaggagaaattctgttacttctgtttgatttctgcctcgaacctctttcataagtctcatcatttgagctgcaataagaaagaagatgcacagtggaatttagtcagatgaatacatgatggagctataatatatttttagtgaaacaacttctaacagaagagcaaaaagtgaaaagcataataaaaggtatgttggatttgatgccaaatcaaaagacttgtagtactagatgtgctgtctactaatgactgaagcaagtgatttagtgtgtattaactatggtcattcctacagttaactctttattgaataattaaaataacttattcttaagatgtgactgtcataattacttgtgataaa

SEQ ID NO: 7383 - DNA, 1703 bp, mus musculus
ttttaacttatttacctacaaaatgacttaggttaatgagaagttagtctgtcaagaattgtctttacagtgtaagacagatgtatgctagatatattttgctctacccatttcaatagaacatttgtagttctatatgaagagaatcctgaagagagtgggtagattttcaagtcatcataagaaatactgtagtatacataaattacatttaaaactggtgtttcaattattgttattattgtgtttattatagaatatgtgtaaaatatagtaaatactgtgtacttcgtaatttcatcattgtatatcattcttctgtacacattttccccaaaacattgtatctattctcttttccctttatacttttcttagtattttcttaggcctatatataatattatgagatatgaatttataatgctttcataatgtttcaatgcatagaaactagaggaaaaatactttattctttttaaactatatttaaaagagggatgcccagtattttaaagacaaacaagtgatacttaaaaatagaaatgtacacatttagcaaaagagaaaattgacaaaaggaagaggatcaaagtataagaaaaatagcaattataagtacatcttttcttcacttgaacagtcattcctaaaggaaaaacataattaaacaacttaagaaatttagaattgaatacataattgcaaagcctgattgttgcaaaatgaagactttctaaaacaaacaattagattgttggttctagacttcacgaaacactgcaaatgtgatcttatgtaacataattctacatattcatgacagtaatgcaaactgagctcattttctttccccataggtgagattccttacagccatgcagaggagcaatcatacagtgactgagtttatactgctgggcttcaccacagacccaggaatgcagctgggcctcttcgtggtgttcctgggcgtgtactctctcactgtggtaggaaatagcaccctcatcgtgttgatctgtaatgactcctgcctccacacacccatgtattttttcactggaaatctgtcgtttctggatctctggtattcttctgtctacaccccaaagatcctagtgacctgcatctctgaagacaaaagcatctcctttgctggctgcctgtgtcagttcttcttctctgcagggctggcctatagtgagtgctacctgctggctgccgtggcttatgaccgctacgtggccatctccaagcccctgctttatgcccaggccatgtccataaagctgtgtgcattgctggtagcagtctcatattgtggtggctttattaactcttcaatcatcaccaagaaaacgttttcctttaacttctgccgtgaaaacatcattgatgactttttctgtgatttgcttcccttggtggagctggcctgtggcgagaagggcggctataaaattatgatgtacttcctgctggcctccaatgtcatctgccccgcagtgctcatcctggcctcctacctctttatcatcaccagtgtcttgaggatctcctcctccaagggctacctcaaagccttctccacatgctcctcccacctgacctctgtcactttatactatggctccattctctacatctacgctctccccagatctagctattcttttgatatggacaaaatagtttctaca

SEQ ID NO: 7384 - DNA, 1703 bp, mus musculus; identical to SEQ ID NO: 7383

SEQ ID NO: 7385 - DNA, 1703 bp, mus musculus; identical to SEQ ID NO: 7383

SEQ ID NO: 7386 - DNA, 1123 bp, mus musculus
ttatgtaacataattctacatattcatgacagtaatgcaaactgagctcattttctttccccataggtgagattccttacagccatgcagaggagcaatcatacagtgactgagtttatactgctgggcttcaccacagacccaggaatgcagctgggcctcttcgtggtgttcctgggcgtgtactctctcactgtggtaggaaatagcaccctcatcgtgttgatctgtaatgactcctgcctccacacacccatgtattttttcactggaaatctgtcgtttctggatctctggtattcttctgtctacaccccaaagatcctagtgacctgcatctctgaagacaaaagcatctcctttgctggctgcctgtgtcagttcttcttctctgcagggctggcctatagtgagtgctacctgctggctgccgtggcttatgaccgctacgtggccatctccaagcccctgctttatgcccaggccatgtccataaagctgtgtgcattgctggtagcagtctcatattgtggtggctttattaactcttcaatcatcaccaagaaaacgttttcctttaacttctgccgtgaaaacatcattgatgactttttctgtgatttgcttcccttggtggagctggcctgtggcgagaagggcggctataaaattatgatgtacttcctgctggcctccaatgtcatctgccccgcagtgctcatcctggcctcctacctctttatcatcaccagtgtcttgaggatctcctcctccaagggctacctcaaagccttctccacatgctcctcccacctgacctctgtcactttatactatggctccattctctacatctacgctctccccagatctagctattcttttgatatggacaaaatagtttctacattttacactgtggtattccccatgttgaatctcatgatctacagcctaaggaataaggatgtgaaagaggctctgaaaaaacttctcccataaatcaagattatctccaccagaggagaaacaaagacgaccttagatggagtgttgtgtatttcaaacagagttaccattgtgctttatcgtgatcagtccccttcttgacacgtgagagtta

SEQ ID NO: 7387 - DNA, 1123 bp, mus musculus; identical to SEQ ID NO: 7386

SEQ ID NO: 7388 - DNA, 1123 bp, mus musculus; identical to SEQ ID NO: 7386

SEQ ID NO: 7389 - DNA, 134 bp, mus musculus
aacaagaagctgcaacaagactggcacataactctgtagacgtggcttgggattaaagcaggggcttggagattgcctcatagcagtcataacccatggcagccaggaggtagcgctcactacaggccagccca

SEQ ID NO: 7390 - DNA, 1037 bp, mus musculus
gggtttcaaacccaaacctagcaccaaagccttttctgtggaagttcctggggcctctctactatcttttttagtggttagaaggcatttcctcacaatggcactgttacctgaaaactggaggactctgacactgaaaatttggcaacaatatctttcttctctcttctcagtagctgcacacctcaacagaataaaaccatttgtctctagatcagtaattggtggagggaatgccaaaggagacatgacaaaaaggacaaggatgttgtggcatatgccaggacttaattgtagccataatttcatgttgagcctaggctggcagaaggtgcacctgtgaagttggtagaacatctgattgcagtctctttgcagaagggctgcagagaatgctagagagagatatttaaaaggtaagaaggagcctgttctgaagaactcaactaagaaaaaagtcttatccattagcatgaagtcacatttctaagtttagcatagtagttattactcaaatccatccccaccccaaccttctaggtgacaagaagagacaagactggatatcaagtttgaaaaaacattttatcatttttttcctccttttgacactcatagcttctctctcaattcctgccttagaaccagtaagagcatcttattacccctgtttatgtccatcaccccatgaagcccaagactcccagctcatctccattcacgaattcactagctctggtgtctgtatggctccatcccattttatgaactcttcttccacttttctccctctcctgaaatcatttcactgtaactctggagcttaaggtctctcagtacatttccctgtgtcctcaagctcttccagtaacatttccttcaccttcttgaactagctgaaaaccctggctcttcctcgaggacgctatagccctctaaagtggttctatgttctctttcactcctccttccactggacctggacgtggggtagagaccttccttactactttaataatgctgtaagaccatccttc

SEQ ID NO: 7391 - DNA, 1241 bp, mus musculus
ttagaacagtcccagcacagagtacacattcaatgtgaagtatattaaatatttttaccatttcaaatcaattagaaaggatcaatttcctaatatggcattaggacaatgagggaatcattttggaagttaaccctaatgcatagacattatggatccttacagaaaatgtataaagattaaatgtttcgccgggcatggtggctcatgcctgtaatcccagcactttgggaggccgaggcgggcggatcacaaggtcaagagatcgagaccatccaggccaacatggtgaaaccccgtctctactaaaaatacaaaaattagctgggtgtggtggcacgcgcctgtaatcccagctactcaggagtctgaggcaggagaatcacttgaacctgggaggtggaggttgcagtgagccgagatctggccactgcactccagcctggtgacagagcagactccgtctcaaaaaaaaaaaaaaaaaaaaagtttcaaaatttatttctaatggacttaggtttcaaatatttttaaaagtaaaagaaaactagaagagagtgtagattaactgtttttcagatttcagggtagataaacatttataaccaaatgaggaaagggcagagtacaaaaaaatgttgatattgcaacagaataaaaatgttaaagttttgtaggcaaaaacacaataagcaaattgaatagcaagtgacaattcagataaaaaacctatcagaaaaacaaataatggaaattcaaaaaagaaacatgcaaaagcaaacaaatatatacaaattgttttgtatatattcaaataaatatacaattaaagaaaatggaatcctcttttctgtttatcaactaatagcaatggaaaaatgataattccttgtgttattaaagttgcaaggagagatgtattcccaaatatgctggtgaaagtataaattgctgtaaaaatttgtgaaatacaatttggtaatatagtgaaagacttgaagaaatgcatgcactttgattcagcaatattgctttacaaatttattcttataaactaaacatgctcataaaatcattgacaagaatgtttgtcatcgttttcattataatagtaaaaaatcatatcaacctaaatatcaatttagaatgcttaaattaattgtagtctattaattttgtggaacaatgtgtaattgtctaaaaatgacattgtggaaaaataagcagattgggaaggttca

SEQ ID NO: 7392 - DNA, 690 bp, mus musculus
aatgtttcttagatatagaagcttaccttacagctggatgagcagaaacagtcaatacagaatagttgttctgcaatcagaaaatcagccatggaacattgcattaatatgtttggagaagcttgctttcagatagtggtcaacaggtttcaaggtctcttaggcatggagaaataaagggaagagcattaacacggaaaaagtcctgaatctactattaattctttctgtgaacttaaaggaattacttatcttcccctttcttgagaaaataaacatgttaagattacctctctcacataattcacagaattgcatctgtaaagaacaagtaagggaggcctgtaaaacatcttgctaaggggccatcatgcaaaaatcagtcaatgtaatttttaactcgggatgttttccctgagcagggttgaagcttcatagcaaagcctcaggtcagaaggcatgcatgaactaaaaacaattatcctttagatgaataaattatgatctgcagagctttgtacacagtgtggtctctctaaaactacatcatgttgggagtcatgttgggattttagatgctaatatatggagacatgaggagaattataagggcatggagatctctggagatgtcccctgtgagaggatctacagctcctcattctactttcctggtgaagaagcaattaa

SEQ ID NO: 7393 - DNA, 1138 bp, mus musculus
aattaattagtctgatgatcttgtatgaatcttccttttctgtaccttagttcggtaatctatgaaattaggagttcgggatgaattatctccaaaatcattttattaagaatgctctatgaattattgtaatttaaagttgcattttgcggtcatgggcatgttttagatccgggactcctggaaacaagtaattacaatactggaataaagcaaaaaaatggcatgctgattgatctcagtagtcctccctccatttatcattctgattctgccttttcatttctacagggcagctacataattcccaatggagaacaacacagaggtgactgaattcatccttgtggggttaactgatgacccagaactgcagatcccactcttcatagtcttccttttcatctacctcatcactctggttgggaacctggggatgattgaattgattctactggactcctgtctccacacccccatgtacttcttcctcagtaacctctccctggtggactttggttattcctcagctgtcactcccaaggtgatggtggggtttctcacaggagacaaattcatattatataatgcttgtgccacacaattcttcttctttgtagcctttatcactgcagaaagtttcctcctggcatcaatggcctatgaccgctatgcagcattgtgtaaacccctgcattacaccaccaccatgacaacaaatgtatgtgcttgcctggccataggctcctacatctgtggtttcctgaatgcatccattcatactgggaacactttcaggctctccttctgtagatccaatgtagttgaacactttttctgtgatgctcctcctctcttgactctctcatgttcagacaactacatcagtgagatggttattttttttgtggtgggattcaatgacctcttttctatcctggtaatcttgatctcctacttatttatatttatcaccatcatgaagatgcgctcacctgaaggacgccagaaggccttttctacttgtgcttcccaccttactgcagtttccatcttttatgggacaggaatctttatgtacttacgacctaactccagccatttcatgggcacagacaaaatggcatctgtgttctat

SEQ ID NO: 7394 - DNA, 1021 bp, mus musculus
tatctccaaaatcattttattaagaatgctctatgaattattgtaatttaaagttgcattttgcggtcatgggcatgttttagatccgggactcctggaaacaagtaattacaatactggaataaagcaaaaaaatggcatgctgattgatctcagtagtcctccctccatttatcattctgattctgccttttcatttctacagggcagctacataattcccaatggagaacaacacagaggtgactgaattcatccttgtggggttaactgatgacccagaactgcagatcccactcttcatagtcttccttttcatctacctcatcactctggttgggaacctggggatgattgaattgattctactggactcctgtctccacacccccatgtacttcttcctcagtaacctctccctggtggactttggttattcctcagctgtcactcccaaggtgatggtggggtttctcacaggagacaaattcatattatataatgcttgtgccacacaattcttcttctttgtagcctttatcactgcagaaagtttcctcctggcatcaatggcctatgaccgctatgcagcattgtgtaaacccctgcattacaccaccaccatgacaacaaatgtatgtgcttgcctggccataggctcctacatctgtggtttcctgaatgcatccattcatactgggaacactttcaggctctccttctgtagatccaatgtagttgaacactttttctgtgatgctcctcctctcttgactctctcatgttcagacaactacatcagtgagatggttattttttttgtggtgggattcaatgacctcttttctatcctggtaatcttgatctcctacttatttatatttatcaccatcatgaagatgcgctcacctgaaggacgccagaaggccttttctacttgtgcttcccaccttactgcagtttccatcttttatgggacaggaatctttatgtacttacgacctaactccagccatttcat

SEQ ID NO: 7395 - DNA, 1161 bp, mus musculus
ttttcctcttaatgtcgaattaaaatacttgctcgtagttgacttaccattcctacaaagaggcagaaactttgagcaatctaggtgttttttttttctttcttcctctcctgaatacactccccaaaacactcctttccagttataattagcatcgtgatctaagtggatgctacatggaagaggaatcgccatttactcagaaaaaatgtcccttacaggaaccggcagcagctaggcgaagtcgccggcccacctccatccaaaatcatgctcgcgtgcttcggaagcatccgggtcactcctttcccgctttttcttgcagatcggcctaggccggtgtcagttctgtttctcctcttggctgcctgtacacccacagccttctggctgcaacattatagaatcagctgtgtcccccctggtgggggattggggatctgtgtttagccacttatatctactttagctgttaaagaagtccaaatgaaaatcaggtgattatggaaccatggggacttgggggtggagcaaaggtgggaacatttgtatcagttgagtcagcttcatggctccctgcggagccagggctgagccttgtcacacgcactcgccaattagagattgatcagccagcagtcaaatgcattctccagtccttgcaagaaggatcagccctttctgtaccagcctcgatcgccttgtactttggtctccttttctcccctgcctggatcctgcctcgtgcgggccatcctgttgctgagactcggggtaccgttctgctgacccagctccctttagtcacgtttgcttggctctagtaccaaatagttgggattaccaaagagtccccttcctcacatgtcagcacggatgccgtgactgccacccgtgtccccgtcaagtgcccgtgcccaagctagccgctgtgtgcactgcactgagtgagttatgaggtgcctttcccggaaccctcctcttgcctggacccaagagaggcaacagctggggctggggctcttggtttccagagggtctggactggtttgggtgctttaaaatagatatttagttcagtggtgcttatgggggagatgggactagaaacttaagtgtgagatttgggtggatgggaaagttaaatattggtctcttcaa

SEQ ID NO: 7396 - DNA, 222 bp, mus musculus
tcatctgtgggttgaccagtgcgcctacagtgcctactcttttctgacaactgtacagtttattgtttctgctattgttgaagattttgaaatccaccatgaaaaaagaactggaggcagcacaaaaaaaaaaaccttctctgtgtgaaatgctccacatgcccaacatatgtaaaaggatctccctcctgtcctttacgaggtaagcttcatgcagtgttt

SEQ ID NO: 7397 - DNA, 222 bp, mus musculus
aaacactgcatgaagcttacctcgtaaaggacaggagggagatccttttacatatgttgggcatgtggagcatttcacacagagaaggtttttttttttgtgctgcctccagttcttttttcatggtggatttcaaaatcttcaacaatagcagaaacaataaactgtacagttgtcagaaaagagtaggcactgtaggcgcactggtcaacccacagatga

SEQ ID NO: 7398 - DNA, 222 bp, mus musculus; identical to SEQ ID NO: 7397

SEQ ID NO: 7399 - DNA, 3377 bp, mus musculus
cagtcgggtcccggcagcggctgcagcgctctcgtcttctgcggctctcggtgccctctccttttcgtttccggaaacatggtgagcggcaggccacggcgcctgagggaggcggctgcgggtcggtcgcctgcgcgcgggaagcgactggggagcgacgtccgcaccccctcccccagcgccccgggcgggatgagggtctcgcacgaaggggcgggcggtgccggaatgcgcgtgcgcgcccgtgggcgccggggagggccggtctggacgtcgctcgcgctccgcctgggctcccctcccccacccgctggtgcgcccgcgcggacaccggccgcggggggaggggttcggggcgcgcgctggggcgcccctcgcggaacggccggcgtcgcgcctttcttcttaggggcgcgctctcgactggagcatgcggcgtccaaacccggcccgggggcggcgaggaaaaagcgcgcgagaggtctcggcgcgcgcgccccacccaaggctgttcctgtctgcgcgtcaccctccctcggcagccgggtccgtctcgggagcaggtggcagggatgcctgcgcccgggaggggcgggtgctggcgcggcgaggggtgatgctgggaagacggggtcccggttggggcgtgggtgcctgcgattaaggccttgcaccgcaaggcttggagggggcatcgcagagaccgcggcccgttcgggagcgcatctaacgagctgcgttctcacccgtgcatcgggcgagggctggaacggcgctgtctgtcggcgcgtgcgcgcacgctcaggcccggccgccggtgccgaagccctgggccagcgaggccttcccggatgggcctgagtgagggtggagccgagtttagggaagtgacccaggcgggcaccgcccggaaaccaccccgccccctgtatacggcccgagggctgagaaaaccgaaggttatgtagcttgcccaggctcctgcctgcaggagatgggtctgatacacccgttgttttagggcgattccacagggttagggacctggagatgctgctgcctctcggatacgcgtttctgcattggtgagggggccgggcccagccgatctcctgtccccgcccactccggatgcggccgagtcacgtggccggcttcttctgcagttccggggagtttgggggaccagatttaccttggattgcccctccctctcctggctcgggcaccccgaagcacgacgcagagtaggaagagtttaaagacctcgaggcctctgggcacttgagtttggcatgttaatttttatcagcgacttctggggcctagcaccattcccggaagaagggagttgtcgggcagggtccttaatgggggttgcaattcttgtcttggttgggaaagagcctagctgggaacaggggtcgtttgtgtagtaactgtattaagcagttctggtgggtttgttgtaactgttcggtgtccttggggtcccatctagcattgtggggtcttggctctttctgaagaggagtcttggctcaggtgtttgggtcctccatatccgaagttctaaatcaccagttttatccaaaggctgagagcaagtactgtgagtagcaaatgagtcagtagccggtggatcttttaattctgggttcacattttggtcaaggttctgcttttcacgagttttgcatttctatcctgtaaaatgagggaaggggttgttgaactaggtgatcagaggccatggctgccattctgaggttgtgtcccatctggttctttgacagtgacttgggtgggaaaactagtgacttgccttgggaagggcactagtgaccactcgggacgtggactgagatcttctgaaaaaacaaggggcagttccctagaatccttttcttgacgtatacgtggcatgtctcctaggcctccggtgtggctgtctctgatggtgtcatcaaggtgttcaacgacatgaaggtgcgtaagtcttcaacgccagaggaggtgaagaagcgcaagaaggcggtgctcttctgcctgagtgaggacaagaagaacatcatcctggaggagggcaaggagatcctggtgggcgatgtgggccagactgtcgacgacccctacgccacctttgtcaagatgctgccagataaggactgccgctatgccctctatgatgcaacctatgagaccaaggagagcaagaaggaggatctggtgtttatcttctggtgagctcattctggcacttcttcctgtcacctgccccctttctcatgatgggaacttctgtggctcctggtcaacccagatgtgtgggtttggagggggagggggttgtaacaaaagactcctcactgccagcccaagggtttctcaaagtcacctgtggctttgctgttgctgggagttgcctgacgcgtgtttctgtccagggcccccgagtctgcgccccttaagagcaaaatgatttatgccagctccaaggacgccatcaagaagaagctgacaggtaagggccagcattggtgctgagtgcccttctgctctggccttggctgcagggcagggtgaatggcacgcagagggggtctgcccccttgtcttcgctgcctgcttgttccttccatctgctttgattggctccttcccagccacagaaactacccccaccccagtgcttcctgctcacagatgctcccctttcttctttatagggatcaagcatgaattgcaagcaaactgctacgaggaggtcaaggaccgctgcaccctggcagagaagctggggggcagtgccgtcatctccctggagggcaagcctttgtgagccccttctggccccctgcctggagcatctggcagccccacacctgcccttgggggttgcaggctgcccccttcctgccagaccggaggggctggggggatcccagcagggggagggcaatcccttcaccccagttgccaaacagaccccccaccccctggattttccttctccctccatcccttgacggttctggccttcccaaactgcttttgatcttttgattcctcttgggctgaagcagaccaagttccccccaggcaccccagttgtgggggagcctgtattttttttaacaacatccccattccccacctggtcctcccccttcccatgctgccaacttctaaccgcaatagtgactctgtgcttgtctgtttagttctgtgtataaatggaatgttgtggagatgacccctccctgtgccggctggttcctctcccttttcccctggtcacggctactcatggaagcaggaccagtaagggaccttcgattaaaaaaaaaaaagacaataataaaaaggctcattaa

SEQ ID NO: 7400 - DNA, 1120 bp, mus musculus
ccccattctttggaattcgtggttgaatcggtgacacaggtgtaaatggttcatcacaatgcagcagagtgacccttgtaacagagtgaagaacaaggtgcgggaaggctgaggggccaaaaaaaaaactgcctggagagctgggaagacccccacgaggggtggtggccactctgcctcggtttctgcttgtctctctctgcgtatgttcgcctgcccaattctctcgcttgctatgcttaaaaaagagaaggaacttcaggcccctccttctctggtgccaactccaaaggctttgtccaggattacccaaacctcccagagatttagggggtggatcataaagccatccgtcttctccacatgaggttttcagtctcacaccccctcccagtcacctgtcctcatgtttcattcctttcttgaccacaaggctcaggcccagagttaaaaggaccaagccctagagttaaaatagtgcagtcaaagcatcaagatcaatgtcaaacaactctaggcttacatgtctttctctgggaaggggacagtgtttaagcaagtccatgaccagaactgacctccttcagggtaggggaggcacatggatatgtgggccaagtgagatccccttggtgggcaggaatggggaggaaccgggcacacttaattgttttcagtccaatcacaggcttacgacaagttcagacttctgcagttggggtgggagttttgggaaaggacaggtacaggtggaagacgatggttctttgaaccagggctgacccttgtgtccccttcagggcgcccatgtgagttgttaccgcctccactgtccgcctgtccactgcccccagcctgtgacggagccacagcaatgctgtcccaagtgtgtgggtaagtagccatgctcctccccatcgtccatggacctttctcctactcccagtgtagccctctagctgagggagacccctgcaaggagaggggcagtctctacccatcagaggtgtagacacacaaaggtgctcaagggaggaaatatcccagatccccaggcagtgctggggtagcagagacttcatgtccttaagtaggtgtgcatggcaggggagggaggaca

SEQ ID NO: 7401 - DNA, 1152 bp, mus musculus
aaatggggcagaggatgaacagaaagagagcaggaaagggtctccctttgctctgagatcccaaaagatggaaactagaacagtttatccaaccagttgtccccattgattgagcacttaatgagtacaaacaactctcctggggagaaggaggacaggcaggggatggagtgaattaggcggcctggtgcagtgggagaaagtgagctttggagttaggcctacctaggctcaacgcgtgctcccagtgacactgggctggccgtagtccctctcagggactttgtctcctctttgaatgccccggaagctgctgtcttcctcctgggcccgaggattggacaggacagtgctgctagtgccaggcctatgggcagagttcagtctgagcaatctcacctgccttcctctcagacccctgtccctgacagctccttcttccctccccagccgagatctgcactgtgggcttcatagccctcctgtttacaagattctggctcctcactgtcctgtatgcggcctggtggtatctggaccgagacaagccacggcaggggggccggcacatccaggccatcaggtgctggactatatggaagtacatgaaggactatttccccatctcggtgagtattgaggctggttggggttggggagggagttggctggggtgtggtcagggccagagtgccgacgtctccatgggagaatatggccctgcatgcactgaggagggtactgggctgggaggcaggagctagggcttccgctactatgtgacctagagaagagtccagcttctctccgatcatggtttcgcatctgcagggatgcggggccaatatgtggattgatggatgtccagcatttgaaggagttctgtgggttatatggtgtgaggcatgcctatgtatcttaaaggcacaaacccatcagcagcccaggcttgggagtgaaggtaataaacttacaggttctaaggaccatctagcctcacacttaacattcatcagaagaggaggctgacacccagagatggaggaaatgtcaccaaggtcacacagcaagttcttttacagatttccaagtgtgtacactgactgtgggcaaagggacagaggagagagccctgaattgttctcagatcct

SEQ ID NO: 7402 - DNA, 1656 bp, mus musculus
atgtttacttgatcccctgactctcatagaccctcctagcagaatgcagtgggttcaaccagtcttgatcccatctgcagcttagcacctggtggcctcgggtgggtcccttcacatgcccctgggcctcagtcttttcatctgtaataggggacaaccagagatgcagcacataaagcatttggcacagttccttccacatggcgggcccacagcccagcgtcaccaccttcagcatcatggtggatgcccaggggaagggtgttgactaaccagaagcctctgccctgtccctgcagtgggagagcccatcaccatccccaagctggagcacccaacccagcaagacatcgacctgtaccacaccatgtacatggaggccctggtgaagctcttcgacaagcacaagaccaagttcggcctcccggagactgaggtcctggaggtgaactgagccagccttcggggccaattccctggaggaaccagctgcaaatcacttttttgctctgtaaatttggaagtgtcatgggtgtctgtgggttatttaaaagaaattataacaattttgctaaaccattacaatgttaggtcttttttaagaaggaaaaagtcagtatttcaagttctttcacttccagcttgccctgttctaggtggtggctaaatctgggcctaatctgggtggctcagctaacctctcttcttcccttcctgaagtgacaaaggaaactcagtcttcttggggaagaaggattgccattagtgacttggaccagttagatgattcactttttgcccctagggatgagaggcgaaagccacttctcatacaagcccctttattgccactaccccacgctcgtctagtcctgaaactgcaggaccagtttctctgccaaggggaggagttggagagcacagttgccccgttgtgtgagggcagtagtaggcatctggaatgctccagtttgatctcccttctgccacccctacctcacccctagtcactcatatcggagcctggactggcctccaggatgaggatgggggtggcaatgacaccctgcaggggaaaggactgccccccatgcaccattgcagggaggatgccgccaccatgagctaggtggagtaactggtttttcttgggtggctgatgacatggatgcagcacagactcagccttggcctggagcacatgcttactggtggcctcagtttaccttccccagatcctagattctggatgtgaggaagagatccctcttcagaaggggcctggccttctgagcagcagattagttccaaagcaggtggcccccgaacccaagcctcacttttctgtgccttcctgagggggttgggccggggaggaaacccaaccctctcctgtgtgttctgttatctcttgatgagatcattgcaccatgtcagacttttgtatatgccttgaaaataaatgaaagtgagaatcctctatgagttattgctggggctgcatctgcatctgctgctgacacctggggaagactgggtccccagctggctgccctctgagccctctagccccttgcacctttggcccacatgaccctgccatggtgtgtaagttacctgtcactgtgtaacaaactacttcagagctcagtggct

SEQ ID NO: 7403 - DNA, 1317 bp, mus musculus
tccagccactcctggagttgcccgagacagaggaatccagcctcccaccctcaggacagcagtagaagcctggctctatccccagagtgcaggaatggcaaatgacccattttccctggaaaccacagggaaagaaacctgcctttccctgagctctgtgcccagagaggcagctagtgtggtgagcgacctagccagccccgccctgccagctggatggccttgggcaacctctgagcttgttcctcatctgtgagttggggccagcaatggcacctctctcgaggctgttgtgagggtgaaatgggcgagtgtccaccaagtgctcgagcttcccggagcctgcacacagtcaccctccctccctgagtttgcccatggttactgccccatcaccatagacacacggtctcctctctcagttatccgtgggtgggggtacaggagaacctgtggagagctgaagtgagttgcctgaggcatcctaggccagtgccgatggcagcaggcgcagggcggaggggtgggcaggaacctggcctggctctgtggtccgagagagcggccatgggggagtgtgtcctcctccgtcaccatcgccacctcagagcggcccagcagagaccattagccttcacatgattgctggggagctggaggcccgggggaagggggactcccccaaggctgggggtccctgcccggtctcagccaccccatgaacaggacctgccgtggccactctgtggtgcatcgacaccctggtctccggtggagagcagcagggctctgctctcccaagaaggcagggggtgcccaccactttcctgccctcctgcagtcatggcatctgaaacggggagtttgagagtcttggaatcagaagctgagagctgaggaatctcagatactcaggaccagggacccactagttttgaggactcacaaaggcccgtggcttaccttacccagcttgggttatacaggaaacctccctgtagcccccattccacagccctggcggcgtggctcagaaacgctccgcactggccctctggggtcccaggcagaaatgtgaaaagctccctgcctgtgccccacatctgcacacaccacctccacacacgcacacacttgcaggcagatcctgagcagcttccctccctgggctgccgaccccctccttctccactctgtcgcacagctgggcagagagtcctgtctgccactacccggggaagatttaagagcagccacttgggtctaggtgggagtctccagggacaatccaggagccagggatgctgtggtgcaccc

SEQ ID NO: 7404 - DNA, 512 bp, mus musculus
acctcttaacattctgaagaactgatgctccaaagaacttactttggaaaacatcatcatagacccaagagaagacatgtttatggggcctgaagagtagttcatatctttagtgagaagggggctagacgaagcaaatttccacctctcatcatggagaaagaatcactttgagctctctgagcacctaaggagacaacagaggtaattctaacagatccaacaattttctgtgaagttaaattggctcaacctagagcacaaatagaaaagggcccggaatcagccattcaattcactgaaatagcaaagggagatttttatttaaatggaaatgagtcactacagatttttttatatggaaacatgctatttatgccatcaatgtatagaggtccctgtgattaacattttggttctagacactaatttccagcacaacatggtgcagcatcaaatcattgtcaagcagataatgccaggcttccgtttaaggcattcacttcagctgc

SEQ ID NO: 7405 - DNA, 512 bp, mus musculus; identical to SEQ ID NO: 7404

SEQ ID NO: 7406 - DNA, 380 bp, mus musculus
agatgcacgtgaagaaggaactggaagataggttattagaaaatatgaggaatgaagcattaagagataaaatggtaaaacaaaacacagtaaagattataagatgcctagggtatataatattttagaattctaccatacatgtgattggagttctagagtatgacctcagatgtgaaagacaagaagaaaaagggcaaggaggaggagaggaagagaaaagaaaagaaaggagggaagaagaggggagaggaaaagagaagagaaaaagagaatagaggaaagagaatagaagggaacaaagcagaatcagtatttgaagagataatgggtgagaatgtttttagaaggatgaaagatatcaagctatagattcaaag

SEQ ID NO: 7407 - DNA, 1016 bp, mus musculus
ctgaagaaatagaaataagacatagaacttcacaaagagtttaagggaggagacagacttgtaacaaagaattagcaaaagtctacaagattattatttatttcaatgttatagacaagaaaagtggagtttgagaggtcacacaacaggagagtaaacattcagatttgtcttacttcagaatcttttttttttaacctgttctttagaagtgcaggagttttatgataaaatgtttgagaaaaaaagacagagagagagaacatgtagggtgtgtgtgtgtgtgtgtgtgtgtgtgtgtggtgtgtgtctgatgagcagcagtgggagggaattacagaattacagcattttaaaccagcttttcataatcccactatagtgagctttccaataacctctattagaaagtaaataccggaagcaagcatttgctccaccaacactgacctctaaccagaaccatttgcaaaggtacaaataaaatcatataagtcagtgctcattaccttgagcatgattgtgtgtatgtgtgtgtgagggggtgtgtgtgtgagggggtgtgcgtgtgtatgtacgtgcctgagcatgcatgtgtatgagaagtttttattgatcctatataggctacaaacaggcaaagaactcatctgttaaaagcttttaaaagcttgttctatctcatctcacctagctgttcatcctaagaactacaattttgacaggagaatataagcagccattagcagcacagcctatccttttataatttggggtatgtaccattctgggatggtcagagacattctgcagtttcaactgatgttgtagaatgaactctgttcatgagtagagagatgtcatttttataaacccagaatggtgggaagagtgtggtgggctaaccagagaattggatatgtaatgggatggatatttagtaagggtaggacttgtccctacagagacagtccaaattatatttctttatccaaagtagggagctattcataatc

SEQ ID NO: 7408 - DNA, 195 bp, mus musculus
agtttctctgtgagattttgtttgataaaagtgtttccctgttggtaatgcaatcacaaccaaacaaaaacaaaaatgaacacaaaacccttacaaagtctgagaagtgctgtcctaatgataggaatataggctatggatttggattcagtccctgactccagcaatcattgcttaagcaaattaggctttctg

SEQ ID NO: 7409 - DNA, 824 bp, mus musculus
tccgttaatacctttaagtgattgattggatgaggcccattcacattatggaggaaaatctgctttactcaaggtctgctgatttaaatgttaatctcatgtaaaaataccatcatggaaacatctagcatattgttactccaaatatctgggtagtgtggcctcaccaagttgaaaaataaaaatcaccccaggaggcaagactgtgatgcacaaatatttaaagcaaatattaagtaattgactaaaattgtggttacaatgtaatgctaaaggttaggaacacagacagaaaggaaatagtacttagaattgattagaaatacatatacagagaaatatactccaaattggaccttgggacacaggtgggattgtaacataaaagctaagtatattccatgtgtaatagagtgttagcaatgtgaaaccgatggattactaatctgggctaggtactacctgggacttcaaaaagggtatcatctgattgattaaaccagagaatcagtggtatgtttcagaaaggatctatgagttataaaatatatgattaaggcgaaacattaaccatggactgaacgatcagattcactatcttattagcttcctgcaaaatagattgggtgcttattatttcatttaatagaggagagctccttgtgtgatagatctgcatctactagtagtatgaacagttaacagtaaccttctttatagcaagagactccattaactcatctataaactaggaatacttgcttcatggctattataaagctaaattttaaatcatgttattttgttcataatattgatggagg

SEQ ID NO: 7410 - DNA, 412 bp, mus musculus
catatgtaagtaaatgtagatacacatatacacatagtatatgtacatatgtatatgtatatacacatatacacatagtgtatgtacatatctatatgtatatacacatatacacatagtatatgtacatgtctatatgtatatatacatatttatcttttagtatgttttctcatatatgactatctgatgttgttacatgtgtatatatctagtcatatatatattaatccaatataatatattttatactcctagagacaaagaaatacattttttcaatcaataatgtaatttttggtagtttggtatattctaaacaaaaattgttgatttttaaaaattatatgtgtagaactcctcgcagtttatacactatgcccatgtacattttttcatatggtgcttacag

SEQ ID NO: 7411 - DNA, 412 bp, mus musculus; identical to SEQ ID NO: 7410

SEQ ID NO: 7412 - DNA, 1434 bp, mus musculus
attttaatattctcaggtcatctcaaatggaagatcacattactgggagatcagagtgtatacattgctattaatagttacctacttaatatcctttctctctcttcactggcaaattttattcacttagatgggcaccaatacactcaactaaaatatgtgatttttcctttcttattgtctctgatgtttgaaatattcttgtcaccttttatgtattcaatctactccaaattatgaccattctactttgatcatcatccctgtagagcttctacctccttttccagagcagcttttaatctttcagacccattttttatctcctgacatatgcttctcaaatgttcaaggacatttctcgacaagtgttgatcattgtaaaatatttatttttatattttacctggctatgaatgatttcatggaactagactttgaaatgaatgtgttttctcatcattaaatttggtaacacttagcaagactatgaatgggatagctctttttctacagtcatcttggcttaacatctaatgtgtttgcatatgcatgattatagtctcctcgtgaacttacattactaagtacttttaaaatacaaatgcttctctaataatcatattgataatattcctttttttaaattgtataaagacattctgctacatctgaagttattaaaaatgaactctgaatatttttaatacctccagaacactgtccttcttatttaaaattataacccccccaaaataaaataaacttaggacccttatatactgaatgcttattgagcgcttgccactttatttagttcatgtaaccctcacaaaattgaagaagaaattggtgttgtccttgtttaaaagtagaagatatggaagcttgcatagagacattttgtaaatagcagaaattgaatgcaaatacttgtgcttgtaattttaaaggagctgattatgattattctgtttgattactatttatattcatatatgaccagaaaaaaagccacacacctccaggaattcttaaaggtcccacaaaattgagtaaacacaagtactcaccaaagtgatttaaggctactagaaattttctgtgggcagcctcatcagagttctctgcaggtaacatagacagaggtggtgtttcatttttcattctacatttactacagaaagaggtatttacattattcctttgttagagctgaagatcaggtagggaagaagtgcattacttttctagcaactggcaatttattttatgtaagatataatgagactacatttccaaaatgattaccaagtatattcccaatcaatggaattgaaaggtacatcatcagtaagctttcagagtccatcttttgtatactacgaagattcttgttatatttcatatttaatttccatgtttaactgcttc

SEQ ID NO: 7413 - DNA, 1434 bp, mus musculus; identical to SEQ ID NO: 7412

SEQ ID NO: 7414 - DNA, 4102 bp, mus musculus
tagtcagaggtccaatttcagagttgaaaaatgtctgctattttcagcacatctatttctaacttcacatttgttttctctgcaagataatattaaatttaaaaataaaataaagtaaatcattttgactaaatgaacagcacaaagcctttggcatcagatacatcggaaccttggctcaaacatttattttccttgaagctattcactacttaattaacttcccttggtctcagtttttcaatgtatataaaaatgtaagatttgggaggccaaggccggcggatcacgaggtcaggagatcaagaccatcctggctaacacggtaaaaccccgtctctacaaaaatacaaaaaaaattagccaggcatggtggcaggtgcctgtagtcccagctactccagaggctgaggcaggagaatggcgtgaacccaggaggcggagcttacagcgagtccagatcgcgtcactgcactccagcctgggcgacagagtgagactcagtctcaaaaaataaaaaaaataaaaagtaagataatatggaacttaatgtctggtcggtgaggtaaaaaggaaatgagtgtaaaagagatatcatttgtgacctccagacttagatcatcatgtaaatattggtgccaccaaatgcaatagaaaactctgaaagaatgaagaaggccaaatgaatgtgttgatacacggtgaaggttttgatgggcaaatggccatggaacatccacgatactagcaggaaaatggttctggtgctcaacttttgttttcaggctggaaaagtaaagaagaggaatcaaaaggaaactagatctgaagaaaatggagagctaggccgggcgtgatggttcacgcctgtaatcccagccctttgggatgccaaggcgggtggatcacttgaggtcaggaattctagaccagcctggccaacatggtgaaactctgtctctactaaaaacacaaaaagtagctgggtgtggtagtacgtgcctgtgatcccagctactcgggaggctgaggcacgagaattgcttgaatccaggaggcaaaggttgcaatgaatgtagatcacgccacagcactccagcctgggtgacagagtgggagtctgtctcaaaaaaaaaaaaaaaaaaaaaaaaggagaaataaagtgatgaaagtataatagaaaatggaagaattaacagttacagcaggaggagtgaaatatttgatgtgaaattatcagggatagaagagtctagataataacaagttagagagtatagtcaggagctagtattgaggaatgaagcttaatgagatggagtttattaaagaacaataaatcaaagttcttggatgatatttttgttaatctattgttttgcaacaaatatccctaaatatagtgacttaaaaatacaacagtgatttacaaaattacaaatttacaaaattacaaaaatataagagtgacttcccatgtatctggaattctggaatttggggttggcttttgtctgagaaaccctgttttctccctccagtagtctatactagcttccttacactgcagttttagggcaatgttccatgttggtgaagtcagaagctgcaagacttcttgaggtctcaatcctagaaagcacacatagtcacttccaccatattctgttggtcacagtcaaaaggccagtttaaattaaaaagctgaattacttaataaaaaatattttaaaaattataaccatatttaatctaccacaaatggaatatcgacttggatcataaaattacctggattgcaactggatttgagttggaaaaaaataacaatgacccatttaccaaagatataatgaatatatcaaaagcaccaaaaaacttgcggatgatgcaaggaaaaagagatagtttcagcgaggtaggatgactcacaaaggaacaaatattattgtacgattataaaagttataatttggatattgcatatgaagaatattgacctcatgttccagtctcagtgtaccttttgttccagggacccaatgtatcaatgaccttctgctgacagaatcaacaatcccaaaatataaggggcttaaaacaatagacatgtatttcttgtttatgttaactgaggaccacaattcactgaggttctgctccaaaacatgatgaaggtgagatctgttccatgcatcttcttcttctaagaccaggttgaagggacactcctgtcagtgacgtggtattctcttggtagtgggaggtaaaagtgtttaaaactgaacattgaagttcagttttataaaattatacaggccaattataaaattgtccttgtagtttacttttgaaagcaagttatctcagatgtctaacaatgacaaagtctagtcaaggtatccttgacccactttatcagggattatctgcccatgttgtggtcagaatcctgtacttatgccaaatggcaggaagtgatttccagcacagtaaatagactttaccccagtcgcttacccctaatgtgagtacaaaggaggaagtaacataggtactgaactgagattgatgcccttattcgatgaatgttataaaaatagcacctggaatatggtaattaattcctacatttccaaatcagaacagaggcttccaacagttaaaaatcctttctattctcatgatgcacaatgacagcttgttttacatgatttagctagtagtgaacagaattcgatttattaactttttgcaggaagagagacaatacaccattgtgatctgtgcgctgtcttactaagaaagagttgaaatgtacttaacatggtgtttgggcttttgctgagtgatataaggaagggcttaagaaaggttgggagggtctgttttggattaaattctgtcaggaagcgggtcaattatccttttgaatatttatacttcttaattggaaactttaaaatgtttttggtctaggaggtgtgaggaatgaaacagagctagaattgtccttggtaaaaaagaaaaaaaagcagtagtctctcatattttgggggagtggagattttctaatagtattatagtatctttatatttttcttatattcgtatatctttatagagtggtcttgtttttgcttagtgtcatcatgtcacagaatgttttgccttattattgttaaaagtctatgaaattgtttatgtctggtagagaatgctgctgctgttttgttatttcttttgtatttatctttctcaaaggctttagttttttttaaatattgtttgtattgtcctatagtcgttattcttaacaagtcctaattggctttcttaattgtaactttttctatgaattagaaggcctcactttctatgatagacttattaattggtttcatcatttagacttcctttaaaacaatcgctgatattgacatatcgtaacttcatcgctactctcacaacctccatttacaaatatgagactacttggcagtaataactgtagtgctacatattatttcctctttaaaaaagtgtctggaggtacatctttggttcttctgaaaggcactgtgagagcagagatgtacagattagttcctcacttagtcttagagaagaccttgcaattttgccttttctctggctagctaatgaaaactaagttcttcacccaagtcctttacaccctttatgcagcacaactttaacactttaattttaacaagtcccatttcctcatttggtctcttgaaaatatctatgagaaaggaaaccttgctttgttcacatcacagttcatattgcaagatagtgagttcctagatggtttaaagataattttagggtgtataatcaacctaattatattatcttttggatacaaatctaagaacaaacattacatataacatgtctttggttttggaaattacataattttgtttcttactttacccttaaaatttgtgggaacactactcttaacaatgctttggactcgtggtcttctgaaatcttttgtcccactctaggctctgtttccagctgaacttccttgttaactcatttctattttcgtaaagctgtttca

SEQ ID NO: 7415 - DNA, 4102 bp, mus musculus; identical to SEQ ID NO: 7414

SEQ ID NO: 7416 - DNA, 1418 bp, mus musculus
catcatgatttggtggaatggcaagaattttgaggtcattggaaattgagatgaggtggacactagaaagatgacgctggagagaagtctggatggtgaaagatttcctttgccaagttatcagttaacagtgagaaattaataaggaggcaatcctacccagaaaccaaagcaaatgcaccccctgctccaaaccccaggcttcagaaagtcccctctggttcttgttcagttgttcctctcaccacagcacaagaagtctgtggggccaattgaacatgcccacctggagccttccccccaacctttcccccttcctcttgccttcctaactcccataaacccctatcagcccactgttctaaactatactccaggtaattactcctaaccccagaattacccagatgccctcaaatccacttccagagtttgagacagtttcttcctcaactccattctcccaagcacaggcctcactgctggtgtgtgtcctctaaggatggggagaaggccaggggctgctgttggccagaggtagggttatagataaagcctggatatctgagtgggagcagagctggttgcaaagagaagcagaaacagggtaagggagaaccataggttacaggtagcagcttctatttgtacctttacctatgcaaatgtcaggggtgagtttgtagggagttctcaacttttaaccatttcacacaattttcttaactgtaagaaataccagattcttgtatatgttatcatagatattcatactaaaattaaagtcttattatttcttactagctctcatgctgaattgtattaattgcctctcctgcaccttcaagaaagcggtcttcaatctttaaaattttgtaagaaccctagacctccaatacagtaggaagtctactcacccatgggctttcagaagatgccttatcataacggcatgagtgaatgaatttgaatgaaatgaacattttccgacctgcttgagagatttattttggcattgttttaggactcaaatccttggctttggcactgctacagtgaattgataccttgctgtagctgcctctgaattctgctttaactttgaatacgaagctttggagtgctacgcgggctcttatgtccttttcatttatacccagcattcaataccaatgccacaatcttttttcagttttattatttccctatcattgctattgatgcttcacctccctaggtacctcagttccctaggagtcctgacatagcaaacaaccaataataggaataactatgtttttgcaaaatgcagtatctttggcaaattctccatgatgaactacactcctttcacttagtttcccaacagcaaagaaaggtcttaattttctccttaatttttagagggctaagctgca

SEQ ID NO: 7417 - DNA, 677 bp, mus musculus
aaagacaatgtgatctgaaaagaaaaagtaaataggtgagccagattagaatgcttatggggataaggaatgatggtagcaagaaaatgagcctgtcacatgttactgcctgtggtgatcagtgccctaaactgccacatgaggttgcttacttccatttgttctgacctagcctctttgattttccctagcatgaggtacatatgaagatgtagaaagaaaagggagatctaaaagtttcaaaagtcacttgtcatggtattcaataagcctgcccatctgccactgcctaactttgcagcttctatcttccaagcttgtccaggaccatcattgccccactccctacccttctgtctcttagaattgtgtaaggtttctgatgagcacgggtttgtccattcttcatcatttgcataaaatttctctttctggaatgcccaacacctgcttgctgatctgatgaactccaccttattgtataggatgtggtgccacctcttctctgaatcttttccacgcttgtctcacttccaaagtacagtaggttgctgcttgatgagccatgctacagtcttttcataccctttattacgtttgtcatattctatctatgggtatgtgtttgtacatgagtgtcttttacctatttgttccttgactgttgagattgtttt

SEQ ID NO: 7418 - DNA, 186 bp, mus musculus
actaaatgactgtcatttttgtatggctctatgacatgaaatttatattttactttaatatagaggcaatctgggtactttgcaattcttaaaaacttatgataacagagaaaggaagactttttttgaaatctccagtttaaaggtggaggcatacagatttcagaggataaaaaagaacatgtt

SEQ ID NO: 7419 - DNA, 1418 bp, mus musculus
ttcgtaaggtaggctattggacaaatttaggtagtttaattaaagctttttaaatttggggcttaatttggctaacaaagttatagaaacagattcattaccattataaaattatataaagtatatttcagttgtttaatgttttcacatttgttgaaaatagatactataatctgaaatcagaatttaatggcaatctattgcctttctttaccttatccccaatcatttagaaacaacatgacagagttgaaagcacaaagttttggagtctgacaaatttcggtttgagtaatcctctgctgagccccttactaagtatgagtccctgggaaagctaactcttatcttctctgagccttagtttcctcttttgtgaattaggaataacaactaccttgtaggtttgttgtgtataaggaggaatattcttcttaaagcttcctaaactcaatagatgatagtttcagggtgagatctattaattttaactgaatttgaatgcctcaaagtgatctaaatttttcattttctttttttctcaataattcacttgctagtcacctaattggaaaagtttatagaataggttaacagatgtcaagtacgaaaaaaaaaaaaaaagtaataagaagcactgtattttgtcggcatagcccagacaatccattaaaaaaattaaaactggagtccctttttggcccctgggtatgactcatgtgtgtacacagacatataaaaattgcagatccaaacatttccatcagattactgactgctgtgtggcaatatgaaaactactttataaattctataaaaatacaaggacatatatatttggtagaatgtagatatttcatgacaagttaattttaaattagaaaaattgtaggtgaaagagaagttatttatttcagttgcctaagaattccaagcattcttcatctactgcattcaaactaatctgtatgtgtgttcaaaggccttgatagtgagatgcaacaattacatagctaatgctgtttatattttatggtgctgccttcttgtttggctattggttcaattgctaggctttcttttgtctttttctttttctttttttttttgaaatagggtcttgctcctgcctcagccttctgaagagtagaactttcactttaaagttacattttgtcaatgagaaatgacatcagtgattattaggtttgtaagtagaagtcagacactctgactatatattatagtattatatattatatactcctttttatatatattaaagatatatatttatatattataaatatatatgtgtatatattataaatatatttatatatttaatatattaaaaatatattttatatatattatatagtcctgattatatattcctttttagtgtatagtttatt

SEQ ID NO: 7420 - DNA, 1298 bp, mus musculus
taaacttgtcctttttattaagcgtttaagaaactgtatcacagcttctccactgaagtcatgcatctgatgtttaggctctgctgataacctcactgcattgcctttacaatgtgtgggataaaaggatgcaacccatgggtgtctgtgaccagttctgttaataattgttttccttttctcattatactttgacattttagaagccaaatgctgttccacactctattagcctcttgcactggattgggactgaagtttggaacaaagagaaagtaaaaatgtaaaaacatgtaagactgaaatggcaaaactaggataataactttagcacaaatcacctgctgacacctggaaattaaggagcaatcacttacacagacagatcaaaggaaaggtgtgaagagccagggacagagcagcctgccccagatgctggtcagttcctttctcatgggtgttaccagagtatcagacagccattgttgcaaaatatacaaccacaaaatttcagtgtcatacaacattgaggtgttgatttcattcacatctggctgatttaggctgggcttggctgggcagctgtaagctgctgattgcacctaagtctgcctgaggcttcatccttcttcaattaaatgctttccaggggaaaattaactcatggcaacgtgagagaaacgagaggctgcacaaccaggcaagccctgaccacatagccaagcccaaactcaaggaggtagtgaagcatgttttttccacggaagtgtcagagaaggaagtaaatattttggaatgactaatgtccataggcagaggcctagtctgaagcatttctataataatggagataattgtgctaaagaagtcaagggtaggtgattcttgtatttttaagtcccggatatttttactgggaaatgttgctgataggacaatgagttgatactatctttctagggcatatttgcaatatatattagcaatttcttacctattgacttctaagaatttgtctgagatgtatagaaagatttttatataaagtcatccacctcacttttatattagtgaaatactggggaaaattacaggtgtttggttgaataaaatatgtgacatccagataatggaatatttatgccacatttcagtgatgttataccagaatatttaatgacatgggacagtattgccaatattcttgcttaatgaaaaaaagcacgttacaaaacagcagatattttgtttttaaatcatgtatatatgggtattcatactaagattctgtagggata

SEQ ID NO: 7421 - DNA, 753 bp, mus musculus
ataaataaaatccactagacctttaattgtgaaatctttgtagagtcttctggtataaaaattgggctggggaggagtcggtactgtcagttccacagtaataattaggcctgggcagaagatggaggaggcatcgtagaagatgctggagattgctggcagtagaggagaaagacagaaaaacttttagagcagatatgtcaaaaggtgaaggggctgtgtcagccacaatgacatagactgggctctctccctgcctggggcagaggcaggaggcagagccactccagctgataaataaatggctaacatgctgagggcaaatagggtgctgatgctgatgctcatcggattgggcatgtgtgctgtgtctcacaggggccttgatcctggccccagccttggccagagcagtttaagggaagcaggcaggaagagaaggtgggagaagaacaatgggacatctccctgggcggcacccaggacagctaccaccccctggcacatcctacttaacctggaaggaggctgaggctgaagccagaagacatatgtgttggcacagatcttcaaggaaagacccagccacaccacagagctgaaaatgggagggtaacactggataacatgggcgcctgctacatgggaatatgtgcccaaatacaagtgcatctgtgatttaatcactgcccctttccttctcatagaaatattaagggacctacttctgaccattacatgcccgagagttcc

SEQ ID NO: 7422 - DNA, 796 bp, mus musculus
tgtttagctgtatatgtaaccatctgttttccctccacagaaaatctgcagctgtgcctaggggagtttctacccagacttctagatccttctgcagaaatcatcgtcttgaaagagcctccaacaattcgacccaattctccctatgacctatgtagccgatttgcagctgtcatggagtcaattcagggagtttcaactgtgacagtgaaataagctcccacatgttcaaggcccattctggttcctggctgcctgcctcttgcacagaagttcgttgtcatagtgctcaccttgggaaaaggattaggtgggcacataagattccgatcagaccccaaccatgctgcatgtgtaaagaaggattgaaaataaaattgcactttttaggtacaaaatcataaaagctgtttcactagaaaaggcagaaagcagtgtattaaggtgttgaattacgccagaagacctgaaatgccttgtacctacaacaatgcttaggcttttctaagcctcttgccacttttaaaattatccttcaggcataaatatttttgacagcagaatagaagaatgattcatgagaacctgaaccagatgaacagctactagttattttatcaaatacagatgacatttaaaaattcttaactacaagagattagaaatataaaccttgcctggctcttgccaggagataacaaaatgggttgctgatgaactgcacccttttacatgtgggtagaatataagctcacatggcagtgagatgttgaaaagtcaaaagagacctgtctct

SEQ ID NO: 7423 - DNA, 984 bp, mus musculus
gcagtgaagactagaaaattagactgtgattcagaaaatgttctgtttgctgtggaactacattactgtacagggttatctgcaagtgaggtgtgtcacaatgagattgaatttcactgtctttaattctgtatctgtagacggctcagtatagataccctacgctgtccagaaaggtttggggcagaaaggactcctcctttttccatgccctaaacagacctgacaggtgaggtctgttccttttatataagtggacaaattttgagttgccacaggaggggaagtagggaggggggaaatacagttctgctctggttgtttctgttccaaatgattccatccacctttcccaatcggccttacttctcactaatttgtaggaaaaagcaagttcgtctgttgtgcgaatgactgaatgggacagagttgatttttttttttttttcctttgtgcttagttaggaaggcagtaggatgtggcctgcatgtactgtatattacagatatttgtcatgctgggatttccaactcgaatctgtgtgaaactttcattccttcagatttggcttgacaaaggcaggaggtacaaaagaagggctggtattgttctcacactggtctgctgtcgctctcagttctcgataggtcagagcagaggtggaaaaacagcatgtacggattttcagttacttaatcaaaactcaaatgtgagtgtttttatctttttacctttcatacactagccttggcctctttcctcagccttaagaaccatctgccaaaaattactgatcctcgcatgatggcagccatagtgcatagctactaaaatcagtgaccttgaacatatcttagatggggagcctcgggaaaaggtagaggagtcacgttaccatttacatgttttaaagaaagaagtgtggggattttcactgaaacgtctaggaaatctagaagtagtcctgaaggacagaaactaaa

SEQ ID NO: 7424 - DNA, 1140 bp, mus musculus
tagttaatgctgaattctttaatagctgagttgcagtaacattaggtattcactgtgggtgcctctgacttccttcagaggtcaatatatagggatcagggtggataactataaaatccaggttgtattcctctgtacagatagtgtagctgtattagtctgcttgggctgccatattaagataccatagtgtgggtggcttaaacaacggaaatgtatttctcaaagtctggaggctggaacttccaagatcaaggcattggaaagattggtttgattctgagactcttctcttggcttatagacagccagcatctctctgtgtgtttgcatgacctcttctttggacatgaacatgtgatgggggaagacacagcaagctctctgatggctctttttttaagggcactaatgccatcatgagggcctcacccttataaccttgtctaaccccaatttcctgcaaagggactgactccaaataccccctcgtcagggcttaggacttcaacatgaattttgggcggatacaaacatttggtgtatatcagcagccacaagttatagtgttctgtgaacctgaagctttctccttataacttgtgtagtttgtggttaaggaccagagccatacatctgctctgatctctttcttacccctctaggcatctctgtggtaatataaggaacactttacccatcaatagattagaaccttacctgtacttgtctggagagagaatttttgttcccgtaattctttttgaagtgtcaagaacttatttagtttcactggattaaagagagcaaaattatcagcttgaatcaggagcaacttgaaggagagatcagggctatgaagcctgttgggagatctgcatttataaggagatggcttcagcaaggataagtcatatcttaacatcttagtcttaaaggacagatttgttgcaaagaaaatggaaatggtaggaaaaagtgctaagtcttttttccgtggcagcatttcagaattgtgtattgtagctcaatttttgctgttgcctctcccttctgttaatattagagtcagaagcctgatcagacacagtgctgttttttctgcctaaccaaagctgtggacccgtgaaacctgtaaag

SEQ ID NO: 7425 - DNA, 1300 bp, mus musculus
aaggagaaagaggagagaccagcagagggagaaggggcaggagacaggaagccagcactaaccacatgccaggtgctgggctggtgcttggcatatgtggccttagttagcgcctgtggaacaaaaggagactaagttcagatggcaggaatagaaatgggagcagaaacagggaaggaagccagccaaaggagcagacattcacaagcaggaggtgtcaccagcagtgatggatgctgcaggaaggccaagaaagatgtggcccaaaggctgttagactcagggatgggagcttgtcaagagaaggctttctgctgtgcatggggccaggagccagactgcacaagattgaggataggtgggtggtaaggaagcggaggcaggagtgtgttactatttcctgtgaaggaagggatgggagagaacaggagctggagggctgagcaggcccagagccaggcagggctggtcctttaccaaggaggaaatgtcagaaatgggcctgtggctggataagggccatgggtgccttgcctattccgcttggaccctcttcctgccaactcgatagaaaccccctcattgcatggagtccagattacgtattatatctaggaagcctttcctgaccccaccttactaggagtgattcccaccctcctctgaacccctgcattatccagcatctgtttttccatgtgacatcaatccaggagtgtaatgatataataacagtgccacgttatgtgccacacactgtgctgaataccttaaatgtgttctttcatttaatactcatgacaacctgtgatgcgtaggtggtctcatggggttcctagccatgcctttagtagctatttacatagctgtgtgtctgtattttcctcactgtgagattgtagtttcctaagagaagggtctctgacttctctctgaatcccagtgtctaggactcattccttcagtattgggtacctactgtgtgccaggcacatagttgtttgtgttgggggaggtagaccatggaatggataaaggaggattcagattcagcataagttctatacagaggagcatctgtgctttgggaacacaggagagcacaactgtgcactgtcgtggtgacattttgcaatgggtcttgaagatcatttaggagtttgctaaggaaatgggctggaggagatagttccagcatacagggtgtattattaagggaacagtgagaagctcagataggacttgggactcatgcaggggaaggttatgatacaaggctggagggacatgttggcagcag

SEQ ID NO: 7426 - DNA, 1300 bp, mus musculus; identical to SEQ ID NO: 7425

SEQ ID NO: 7427 - DNA, 2168 bp, mus musculus
tgtagttggggcttttagaaatattgttaataaactttgagctaatagttgcgaactcaacatgctgaaagtttgtaattaagaacagtattggctgggtgtggtggctcacgcctgtaatcccagcacttcgggaggccgaggcaaggcagatcacctgaggtcaggagttcaagaccagcctcgctaacatggtaaaaccctgtctctactaaaaatacaaaaattagctgggtgtggtgacatgtgcctgtagtcccagctactcaaggaggctgaggcaggagaattgcttgaacctgggaggtggaggttgcagtcagccaagatcatgtcactgcactccagcctgggtaacagagcgagatctgtctcaaaacgaagaagcagcagcagcagaaggccaggtgcagtgactcacacctgtaatcccagcactttgggaggccaaggcaggaggattgcttgaggtcaggggtttgagaccagctgggccaacatgatgaatccccgtctctactaaaaatacaaaaaattagctgggtgtggtggcggttactcagtaggctgaggcaggagaattgcttgaacctgggaggcagaggttgcagtgggccgagatggcagccactgcacttcagcctggacaacagagcaagactccatctcaaaaaaaagaagaggaagagtttaatatttatataatagtattgctgagggagagtctaaatctgggacactataataggttctcttttcataaagagatttgtacatttgagttttcataatgtcctgtgtaatgattcaactttttatttttatttcttaatttttttggcgggggagacagagtcttgctgtgtcacccattctggagtgtggtgtcatgatcatagcttaatgcagtcttaatctcccaggctgatgtgatcctcctgcctcagcctccccagaagctgagactataggcacatgccaccattcccagctaatttttttcatttttttttttagtagagatggggtcttgctatgttgcccaggctggtcttaaactcctgagctcaaacgatcctcctgcctcagcctccaaaagtgctgggattctaggcatgagttactcactgtgctgcccagcccaattttttaatacatctcggtatctagattataaggggcagtgtttcttttctttttttttatttgagacggagtttcgctcttgttgcctggactggagtgcagtggcacaatctcggctcaccacaatctctgcctctcgggttcaagcgattcttctgcctcagcctcccaagtagctgggattacaggcatgtgccacccacgcccagctaattttgtatttttagtagagatagggtcaggctggtctcaaactcccggcctcaggtgatccacccaccttggcctcccaaagtgctgggcttataggtaggtgtgagccaccgtgcctaggctattttttttttctttctttcttttgagactgagtctcactctgtcgcccaggctggagtgcagtggcgcgatcttgcctcactgcagcctctgcctccgggttcaagtgattctcctgcctcagcctcctgagtaggtgggactacaggtgcgtgccaccacgcctggataatttttgtatttttagtacagatggggtttcaccatgttggtcaggctgctctcgaactcctgacctcaggtgatctgcccaccttggcctcccagagtgctgggattacaggcgtgagccactgcatcataaggtgcagttacaggtgtgagccactgcatcataaggcgcagtatttctatagcttcttaaattttgtaaataatgatgtatagcatgttctcccacctcaccccatattttcttatatattccttgatactgtttcagcaatggtgattgttcccactagagaacttgctctacaggtcagtcaaatttgcatccaggtcagcaaacacatgggaggggccaaagtgatggcaaccacaggaggaaccaatttacgagatgacataatgaggcttgatgatacaggtaagaaatgattactaaaaggtagtgtagctctctgttattttagtcacaagtatttcagtaaattattaaaaattgtttttaagaattaaggaac

SEQ ID NO: 7428 - DNA, 2168 bp, mus musculus; identical to SEQ ID NO: 7427

SEQ ID NO: 7429 - DNA, 1827 bp, mus musculus
ccttcgtccccctcctcctggctccccatatcagatttgaacagaaattgggccactccatctttgacattagcctcctcctcaaatgtcccagcaggctggggagagcctcagagatgggagccggcttgggcctacaaatctcgccttcctgcccaaaccggggttcagcccactaggccattttcatccagcgggtcaaaaagggcattgccaaggcttctcttcccccgatctcctgcttctaggtgtcctgtttctcagtggacagtgttgatccaaccaactacagaagtctgtcctccatttcccagggacaggggttctggtcccttccaggggcaatgagagtgacctctaggtcttagtgtgaaggatcctggaggtcacacagaacacagcaatgacatgtgtgggctcttgagtcaagtcaatgtttgtatgtactgggacctcactttcctcacctgtaaaatggggagttggggggatttaatgtgtacaatgcagtggctaaaataggttaaataatggctactacagtggctagacccaaaattaaaatttgcctttcctgtttggatcatctggaaaattcacttttttttttttttcttgagacagagtctcactttgtcatccaggcaggagtgcagcagtggcacgatctcagctcactacaacctccacttcctaggttcacgtgattctcctgcctcagcctcctatggagctgtgattacaggtgcccaccaccacacctggctaagttctatattttgagtagagatggggatttcaccatgttggccgggctggtctcaaactcctgacctcaagtgattcacccacctcggcctcccaaagtgctgggattacaggcataagccactgcacctagtctcacatttctactcaaagcagtcgtaaggttcagtgaatcaatgtgagggctttgtctctcagcttgatctacaagtttttgacaaaccagaggtgagcggaaaggagaaagaagctgaggtgagcaggcaggtgtgggtagggatggccaagaggaccatgaagccaagccggttatttgtctccaggtgagcctggggagcccagagctcattagaagcccttgatcagctagcagtggacgcagcctggttagacaactaggccctctctaacggggcctccagggggctgcaccaccctgagtggagggtatcctctggtcacgggtactccgtctcgtcctatgtggcagtctgcagagtgtcagcactggtccttcccagccccaccccgacccttgtggggtagggtgatggtggagagccctcaggcactacagagagaactgggctgtctgtaacctccaggcaccatggaccatgcttcagaatccccaggacctgaaaacctgccctctccatgggacgcacaggaccacgtcatcagtgggtgacagatgctcccaaagagatcctgcaccccttctatgaccagatagggctccactagcccttacctggtgctctgcccccagagctgggcaccagccccttttctaccgtaagggtcctcaatgtagccccttcaccctggcaaaactccagcatgggtctgatagactctctcctgaaagtatttcctgaccaggacagacactgggagcccacctgtcgatgagccagccagccctggtgaacttccaagggtcactgagggccctccagaccgtacgaagtgtccattctctatgaaaggggcctttcagccccacagacaagaaggtccctgcacatgtggaaagcactgtggacccaacgaagg

SEQ ID NO: 7430 - DNA, 304 bp, mus musculus
gcaagcctgtttaactttaggcaaagcaaatagtcttcctttctgaatttcaatgcttaaggtctgtaaaatgggggtgacaataattctcgctttggcccacttcaaagggttgctgtgcgatggaatgagatagataatgctgttataatgttatgcaaatgtaaatcactgctatgcaaaataacttactgctatttccagaaactcctctttggatttaatttaatcaagagtgagaatataagttacttattctatgctctgggtgcatttgtattttaaacctcatcaattatcttgg

SEQ ID NO: 7431 - DNA, 6662 bp, mus musculus
aaaaaaaaaccttcaatccatgctttgcagaaactcaaaatggatggtaggcctaaatgtaaaacataaaactacaaaacttcgactggatgccgtagcttatgtctgtaatcccagcactttgggaggctgaggtgggaggatcacttgagcccagaagtttgagaccagcctggtcaacatagcaagagctcgtctacaaaaaaataaaatattagccagatgtggtggtacacacctgcagttccagcttctcaggaggctaatgtggatctcttgagctggggaagtcaaggctacagtgagccatgattatgccactgcactccagcctgggcaacagagtgagacctggtcttaaaatatttttttttttcaaaagaaaagcatataagaaaatctttgtgaccttggattaagcaaagacttcttacatttgactaaaagcatgatctataaaagaaaaacattggtaaattgaacttcatcaaaattaaaacacctggtcttctaaagacactgttaagagaatggaaagacaaaccctagactgggagaaaatatctgcaaagcatatatctgataaaggactttatatatatatatgtagctgtatccatcttagtcttctaaggctgccatataaaatactcttgactgggtgggttaaataatagaaacttattttctcccaattctggagtctggaagtctgaggtcagggtaccagtatgattgggttctggtgaaggctgtcttcctggtttgtagacagctgccttctcattttgtgctcacgttgcctttccttggttgcaatgcatggagagagataaaaatctctctctttatattattaagggagagagaaaaatctctctctctttcacttcttatatggcttctaattctatcagattagaaccccactcttagttctcattgaaccttaattacctcctaaaagcttctttttaaaatacaatcagattagaagataagtcttcaacatatacactttggaagggcacaattcagtccatagcaataagatttgaacagacacttcatcaaagaatatacctgacaaatgaaacataaaaaaaagccccagaccagacgccacgacacagggcggtaatcctggcattttgagaggctgaggcaggtctatagcttgagctcagaagttccaaaccagcctgggcaacatagtgagacggtctctacaaacaatgcaaaaattagctgggcatgctggtgcgtgcctgtagtcccagctattcaggaggctgaggtggaaggatcacttgagcctggaaggtggaggttgcagtgagacaagatggtaacactgcacttcagcctggatgacagagcgagatgctgtctcaagaaaaaaaaaatgccccaaaacatgagtcattaggaaaatgcaaatcaaaaccacaataagaaattactacctatctttaaggatagctaaaattaaaaagacttataccaagtactgataaagatatgaagaaactaggattctcaccattttggaaaacagttttgaaaaataatttagcagtgtctgaagaagttaacaaacactcatcatgcctcaggcaggcattcattcctaagtatttacctaggagaaactggaaaatttctctaagacagtttgtatgactattcatagtagctttattttaatagctccaaactggaaataatcccaaatgtctatcaataggtgaatattaggtaataaagtatgatatatttatacaatgagataccacttagcaatagaaatattgagctatgagtacacacaaaacatggctgaatctcaaaacaattacgctaaatgaaagaagtcggccgataaacagacaattctcaaaagaaggcatacaagtgaccaacaaacatacgaacaaatgctccacaccagtattcatcagagatacgcaaatcgaaaccaccatgagataccatctcacaccagtcagaatggctattactaaaaagtcagaaaacaacagatgcttacaaggctatggaggaaagggaacctttatacactgttggtgggaatgcaaattagttcaccccttctgggaagcagtttggagatttctcaaggaacttaaaacagaactactatttgacccagcaatctgattactagataaatatccaaaagaaaacaaattattccaccaaaaagacacatgcatgttaatcacagcactatttacaatagcaaagacatggaattaacccaggtacctatcaattgttgatttgataaagaaaatgtggtacatatacaccatggaatactatgcacctatgaaaaagaacaaaatcatgctctttgcatcaacatggatgcagctgaaggtcattaccctaagcaaattaactcaagaacagaaaaccaaatattgcatgttttcgtttataagtgggagctaaacattgggtattcacggcgtaaaagtggtaacaatagaaactgggaactactagagggaggagggaggagggtaaagtttgaaaaactagctattgggtactacgctcaatacccacatgatgagatcatttgtaccccaaatttcagcattatgcaatatacctaggtaacaaacctgcatgtgtatccccgattctaaaataagttgtaaaaaaagaaacgtaaagacatttttttgtcagaccaaaaaaaaaaaaaagaagccagaccaaaataacagtgaatactatactatgctattatttttatacaaatttctagaaaatgaaagttaacctatagcaacataagcagatcagtggatgcctgaggatggttttggagggagagtggagaagggtggggagaaaagattacaaaaagtctcaagaaaacttttgacgatgatagatacattcactttttttgtgtgtgctttgcccttgctagatgtgatgcctgccttgttttgttgctgtgacttttctatcacaaatctggccttccctgcttcctgctgagctttgtttggattttactgcttccaagaactcctccccaaaggtcagacgtgtcaaggacatgttggatagggcattgctcacctgtctggagaccagctctctatctctgatgtcaaagtgagccattactcacttgaggatctccatagcgatgaatggcagcccacgcttgtcacagtcctctctgttgccgatgaagatatggggaagtagtctgacaactggatggaaaaggatgcaacataggacattgacaatctatacatttttatttccagcgatgaatctcatgccatctagcagtcaaagatcattgttttctgtacccaagaggtaagaaaatgcctactacaatatcctgggctttaaagacagagcattcacatttgctatttctgccaaattctaaggccaggctaaacttgccaatacacttaagcactttggcagccatgttagtttgctggacctcatctcttggcccatttgtacctgccttcatgctgacttctgcatggatcccccagctccattcattctctggatgatgctaagaacttccttttgtctttgatattctgcatggactttaaaatatttacccactggggatatgctattcttcctggacctgtgatccatatttttcataagttggaaaaatttgcagccaatatcactttaagtgttacttctccatttcctctactctctctttctgatactctgaataggtgtatattagaccttccaaatctattaatgtttgtttcatattttccattcttttctcagtattgcacttttggtcatttcttcagggatgtctgccaaatcattaattctgtcttcagctgtgtctaacctgttaattaactcaatatttttatatcaataattaaaatttttagttcttattgttccattttttcccacaaatttatcttttcactccccaaagtcatttatggattagataatcctgtgttggcacagctgttctatattctatatctgacagatctcatatctgtaatccacaggattctaaattcattgtccattatttttgccagttctcagtaatagtagctttcattttatgtttagtgatgttgtgagctcattgtttgccatagcaggtgaaaaatctgagcgtttaaattaaggattggagaagttttcctgcagagatttgctcctgcttttgatagtaaggaggaggtgccaccaatctaggactatgtcaatgcatcattgaccttgtccccacctttatattctccctgctctcctttgagggtctcagttcatggtggaatcccaaatctctcttaccttgagattggccccaaactcagtgttctggcggcactgctgcaaccaacattcatcctctggtagatcaggattgacctctcattttctctttatctttttcttttttgtttaattttgcagcatatctctttcctcttgtaagactgatgacatctcaaataatgtattctaccaggctttgctgtctgtagctggatcaccttggagcacaccctcagacattgccagaagaggaagaggttcaccttgtctccctttcccctgcttttttcatctttgacgctacagacacaaggcactgcctataggtatgcaggcctagtgcttgctcagggcagacaaaatatcagtagctcagccttagcatctggcgagacttggcattaagatatattgctgtgccaagcacggtggcttgcatctgtaattccagtattttgggaggccaaggcaaaaggatcacttgagtccagaagtttgataccaacctgggcaacatagtgagaccccgactctaaaaaaagaaattagctgggtgtggtgacatgtgcctgtaatcctagctactcagaaggctgaggtggtaggattgcttgaggccaggaggttgaggctgcagtgagccattatcgcaccactgcactccagccttgtcaacagagcaagactgtttcagaaaaaaaaagatatattgctagacagaaatgactatcatgactatctgatttgttgttttgcttttgagttagggtcttgctctgttgcccaggctggagtacagtggcatgatcatagctcactacagcctcaaatccttaggcttaagcaatccttgtgcctaaacttcctaattagctgggaatacaggtgcacaccaccacatctggctattttttgtatttttgtacagatggagtctcactctgttgtccaggtttgatctcaaactcttgacctcaagctatcctcccaccttagcttccctaaatgtttggatttacaggcatgagcccccatgcccagcttgagtatctgatgtcatttagctgagtttggaaggggtgtgctgtggtttgaatatttgtcccctctgaaactcatgttgaaactaaatccccactgtaacagtattaagaggatgggaaatccaactatggtatttgagaggtgggacattgggaggtaattaggattagatgggatcatgagagtggggcattagtagctttataagaaaagaaagagacacctgagctagcgtgctgattgggtttggctctgtgtctaaatctcatgttgaattgtaatctccagtgttggaggagggacctagtggggaggttattgggtcatgggggtggattttctgcttgctgttctcacggtagtgagtgagttctcatgagatctggttatttaaaagtgtgtagcacttccccctttgctctctctcctgctggccatgtaaagatatgcttgcttcccctttgccttctgccataattgtaagtttcctgaggcctcccagccatgcttcttgtatagcctgcagaactgtgagccaattaaacctcttttctttataaattacccagtctctggtagctcttcacagcaatgtgagaacggactaatatacatgcttagcttgcctgacctgtgatgacttgtactacctcaggactctgcagaaagtctctgccagcaagaaggctctcaccagatgtggcccctagacgttggacttcctagcctccagaactgtaagaaatacatttctttcctttataaataatcccatttcaggtattcagttatagcaacagaaaacaaactaagtcaggtgaggccaggcatggtgacttatgcatgtaatcccagtattttgggaggccaaggtgggaggattgcttgaggccaagagtttaagactagcctgagcaacatagcaaaaccttatctcttaaaaataaaaataaataaataaaaaagacagggtcatatctctgaggcatagccctttggactcttcactttgtttcaggctccagaatgggactcttaccttaggccttacagttttccagtctgtctggtaccctgcataatgcctcataattacctcaggattagagtgtcggtcccaaatctcgcctacctggcagagattcttatcgcggttagtgctggccaactccctcccctgctagatgggattctaatccctataagccctggaaatgaacagatctcttggaatcacaacacggctttctttt

SEQ ID NO: 7432 - DNA, 1473 bp, mus musculus
tgttcttcttttcaaaatttggctgattttatgttaatttcctcctcttttgtatatggcttattctggtactggaataagaaagtgctattcctcttcaaagacctatactgaagcaaaaggaagttataaaatataaaaaataatttaaccctattgttcttaatcagaaaaatatagttgccatatttcatataaaacatgctcacagtaaatgctatctcccttcctttctgtaagaacagagccccatatatgagaagaaatgtccaacgccaccctactgacagcgttcatcctcacgggccttccccatgccccagggctggacgcccccctctttggaatcttcctggtggtttacgtgctcactgtgctggggaacctcctcatcctgctggtgatcagggtggattctcacctccacacccccatgtactacttcctcaccaacctgtccttcattgacatgtggttctccactgtcacggtgcccaaaatgctgatgaccttggtgtccccaagcggcaggactatctccttccacagctgcgtggctcagctctattttttccacttcctggggagcaccgagtgtttcctctacacagtcatgtcctatgatcgctacctggccatcagttacccgctcaggtacaccaacatgatgactgggcgctcgtgtgccctcctggccaccggcacttggctcagtggctctctgcactctgctgtccagaccatattgactttccatttgccctactgtggacccaaccagatccagcactacttctgtgacgcaccgcccatcctgaaactggcctgtgcagacacctcagccaacgagatggtcatctttgtgaatattgggctagtggcctcgggctgctttgtcctgatagtgctgtcctatgtgtccatcgtctgttccatcctgcggatccgcacctcagaggggaggcacagagcctttcagacctgtgcctcccactgtatcgtggtcctttgcttctttggccctggtcttttcatttacctgaggccaggctccagggacgccttgcatggggttgtggccgttttctacaccacgctgactcctcttttcaaccctgttgtgtacaccctgagaaacaaggaggtaaagaaagctctgttgaagctgaaaaatgggtcagtatttgctcagggtgaatagttaagaaaggccatatatggctaacttttctttttttatttgtaattaaattaaaccttcaacataagcattatacttgaatggagcatttcaattattcagtcttaatttttaattggacagttaattaatttttcatttttttctgcagagtgtttgttagaatcctagttaaagcagccatttcacggtgataatctaagagaaaggataatagtctattcttttcacgttccattaagtaatcagaaaagtaatttattttcttatat

SEQ ID NO: 7433 - DNA, 993 bp, mus musculus
ggctgatctgattttacatccttattcctaaggctatagattagtggattcaacattggggttaccagattattcaatatctgaattatggaaccaagcaaggcactgggattgggttgtagatagataacgatgactggcccataagcacaaaggattgcagtgaggtgagcgctgcaggtggagaaggcccgctgcctgccctctgctgagcggatttttgatatggaaatcccaatgcaagtataggaaacaaggatgagaaaaaagcaaatgagagacaaaagaccaacatttgtaaaacctaccctctgggctaaggatgtgtccttacaggctagaggtaacactgcaggaatatcacagaagtaatagcccaccttgttagggccacagtaaggtaactggaaggtgaggggagttaggatcatggcatggacacagccaatcatccaggtccccgtggccaacataaagcacaccctgtggttcatgatgaccgtgtatctcaaaggaaaacatatggcaacaaagcggtcacaggccatcactgtgtagaggaaacactcagtacagcctaggaaatggtagaagaaaagctgggacacgcagcctgcatacgagatagcatggctgttccccgaaaggtagaacaacatcttgggaacagtcgttgaagagaaacccaggtcaaagatggagaggtttcccaagaaaaaatacataggagtgtgaagtcgagtggaggagatgatagctgtaaggataagcacgtttcccaagagggtgcataaataaaatgaggagaacaggaataaaagggctgtctctaggccctctgtctcagggattcccagaaggatgaattcagtcaccattgtgtgatttctcattcctggggaggaatcaactcttgggtgtccgtgaaaagaaataagtggttaaatttaatatgcatgtaaattacctgtgtttagatgaatgaaatggaaa

SEQ ID NO: 7434 - DNA, 991 bp, mus musculus
tgatctgattttacatccttattcctaaggctatagattagtggattcaacattggggttaccagattattcaatatctgaattatggaaccaagcaaggcactgggattgggttgtagatagataacgatgactggcccataagcacaaaggattgcagtgaggtgagcgctgcaggtggagaaggcccgctgcctgccctctgctgagcggatttttgatatggaaatcccaatgcaagtataggaaacaaggatgagaaaaaagcaaatgagagacaaaagaccaacatttgtaaaacctaccctctgggctaaggatgtgtccttacaggctagaggtaacactgcaggaatatcacagaagtaatagcccaccttgttagggccacagtaaggtaactggaaggtgaggggagttaggatcatggcatggacacagccaatcatccaggtccccgtggccaacataaagcacaccctgtggttcatgatgaccgtgtatctcaaaggaaaacatatggcaacaaagcggtcacaggccatcactgtgtagaggaaacactcagtacagcctaggaaatggtagaagaaaagctgggacacgcagcctgcatacgagatagcatggctgttccccgaaaggtagaacaacatcttgggaacagtcgttgaagagaaacccaggtcaaagatggagaggtttcccaagaaaaaatacataggagtgtgaagtcgagtggaggagatgatagctgtaaggataagcacgtttcccaagagggtgcataaataaaatgaggagaacaggaataaaagggctgtctctaggccctctgtctcagggattcccagaaggatgaattcagtcaccattgtgtgatttctcattcctggggaggaatcaactcttgggtgtccgtgaaaagaaataagtggttaaatttaatatgcatgtaaattacctgtgtttagatgaatgaaatggaaaa

SEQ ID NO: 7435 - DNA, 1007 bp, mus musculus
tattcacaaacagtaagtaaaacatttcagaatactcttttcagggaccttttcacttccttgttccttaaggaatagattaacgagttcagcatgggtgagacaacattatttaatatttgcacctggcaccaagcaaggggttgggtgtggacttcagatagatgatgattacaggtccataggcacagaggattgcaacaaggtgagcactgcaggtggagaaggctttctgcctgccctctgatgagcggattctcaagatggcaatcccaatgctagtgtagcagacacagacactgatcaaaagtgttaaagccagaaagccaacatttatggaacccaccctctgggccagggcactgtcagtacaagccaggggtaaaacagcaggaatgtcacagaagaagtagtccacctgattggggccacagtaggacaactgaaaggtaaaggaggtcagaatggtggcgtgaagacaacccaccaacccggcaccacgaccaagccgacacagactccaggcttcatgatgagcatatatctcagtgtgtgatgtatggcaacaaagcgatcataagacatcacagaatagaggcagccttcagcagaacccagcaactgatagaagaagagctgtgaagcacatcccttaaaagaaatgactgggctctggccagagagatacaatagcatcttgggacatgttacagatgggaacaatatgtcaaaagtagacaggcgtcccaagaagaaatacataggagtgtgaagaaacaatcgctataaggatgagtaaatttccaagtagggtgaagaggtagatgaatgagaagacagcacagagtacagcctccagtccctctgtctgaggtattccccgtagaatgaattcattcagcaatgtgtgattcctcatgttcatggaagggtagtctgggttttcacaaaatgtgtgaaaatatgaatgtggaggctaattgggataaacacaataccaatacatt

SEQ ID NO: 7436 - DNA, 1082 bp, mus musculus
aaggtatagaatatgcaatgatttacaaataatttctctctcacacacaaacacattcaatttctctttttaaaacttagagactgttgacaagatcgtggaccctggaaaccattcctcagtgactgagtccattctggctgggctctcagaacagccagagctccagctgcgcctcttcctcctgttcttaggaatctgtgtggtcacagtggtgggcaacttgggcatgatcacactgattgggctcagttctcacctgcacacacctatgtactatttcctcagcagtctgtccttcattgacttctgccattccactgtcattacccctaagatgctggtgaactttgcgacagagaagaacatcatctcctaccctgaatgcatggctcagctctatttattcagtatttttgctattgcagagtgtcacatgttggctgcaatggcgtatgactgttatgttgccatctgcagccccttgctgtacaatgtcatcatgtcctatcaccactgcttctggctcacagtgggagtttacattttaggcatccttggatctacaattcataccagttttatgttgagactctttttgtgcaagactaatgtgattaaccattatttttgtgatcttttccctctcttggggctctcctgctccagcacctacatcaatgaattactggttctggtcttgagtgcatttaacatcctgatgcctgccttaaccatccttgcttcttacatctttatcattgccagcatcctccgcattcactccactgagggcaggtccaaagcctttagcacttgcagctcccacatcttggctgttgctgttttctttggatctgcagcattcatgtacctgcagccatcatctgtcagctccatggaccagaggaaagtgtcgtctgtgttttatactactattgtgcccatgctgaaccccctgatctacagcctgaggaataaagatgtcaaacttgccgtgaagaaaattctgcatcagacagcatgttaatgaatagaatcaatgttatgttgttacgtcaagataggtctttggtttgatt

SEQ ID NO: 7437 - DNA, 822 bp, mus musculus
cagagctccagctgcgcctcttcctcctgttcttaggaatctatgtggtcacagtggtgggcaacttgagcatgatcacactgattgggctcagttctcacctgcatacccccatgtactatttcctcagtggtctgtccttcattgatatctgccattccactatcattacccccaaaatgctggtgaactttgtgacagagaagaacatcatctcctaccctgaatgcatgactcagctttacttcttcctcatttttgctattgcagagtgtcacatgttggctgtaacggcatatgaccgctatgttgccatctgcagccccttgctgtacaatgtcatcatgtcctatcaccactgcttctggctcacagtgggagtttacattttaggcatccttggatctacaattcacaccggctttatgttgagactctttttgtgcaagactaatgtgattaaccattatttttgtgatctcttccctctcttggggctctcctgctccagcacctacatcaatgaattactggttctggtcttgagtgcatttaacatcctgacgcctgccttaaccatccttgcttcttacatctttatcattgccagcatcctccgcattcgctccactgagggcaggtccaaagccttcagcacttgcagctcccacatcttggctgttgctgttttctttgggtctgcagcattcatgtacctgcagccatcatctgtcagctccatggaccaggggaaagtgtcctctgtgttttatactattgttgtgcccatgctgaacccccaatctatagcctaagaaataa

SEQ ID NO: 7438 - DNA, 145 bp, mus musculus
aatattctttgtaatttaactctaagccatttggaattttactttggcacatgcaatgagtaatttgcctgatcatagtttaacagaataaataactatattttaaattccatatattctaaatgtatgcctgttttttgtactt

SEQ ID NO: 7439 - DNA, 538 bp, mus musculus
tgaatatctgggaaccttttctaaatgaagaataataaagtccctcccacaaccatggggtttttttgttttgttttttctcttcctgcagaaactgactggaggagatgtcaggagaaaataattcctcagtgactgagttcattctggctgggctctcagaacagccagagctccagctgcccctcttcctcctgttcttaggaatctatgtggtcacagtggtgggcaacctgggcatgaccacactgatttggctcagttctcacctgcacacccctatgtactatttcctcagcagtctgtccttcattgacttctgccattccactgtcattacccctaagatgctggtgaactttgtgacagagaagaacatcatctcctaccctgaatgcatgactcagctctacttcttcctcgtttttgctattgcagagtgtcacatgttggctgcaatggcgtatgaccgttacatggccatctgtagccccttgctgtacagtgtcatcatatccaataaggcttgcttttctct

SEQ ID NO: 7440 - DNA, 538 bp, mus musculus; identical to SEQ ID NO: 7439

SEQ ID NO: 7441 - DNA, 1298 bp, mus musculus
tttgtaacttaaattctggaccaacttggagaaggcccagggaactttagggagacaaagcagaggtatcaagtttagagacaatgaaaactatgactcagtctgttagctgctgtcaacctcccttatgcaatttggttttgtttggaagagcagtgagggtccatgttaaggtaattcatactttctattttcacagaaatgcctaaagaagaatgaccatggaaaattattctatggcagctcagtttgtcttagatggtttaacacagcaagcagagctccagctgcccctcttcctcctgttcctgggaatctatgtggtcacagtagtgggcaacctgggcatgattctcctgattgcagtcagccctctacttcacacccccatgtactatttcctcagcagcttgtccttcgtcgatttctgctattcctctgtcattactcccaaaatgctggtgaacttcctaggaaagaagaatacaatcctttactctgagtgcatggtccagctctttttctttgtggtctttgtggtggctgagggttacctcctgactgccatggcatatgatcgctatgttgccatctgtagcccactgctttataatgcgatcatgtcctcatgggtctgctcactgctagtgctggctgccttcttcttgggctttctctctgccttgactcatacaagtgccatgatgaaactgtccttttgcaaatcccacattatcaaccattacttctgtgatgttcttcccctcctcaatctctcctgctccaacacacacctcaatgagcttctactttttatcattgcggggtttaacaccttggtgcccaccctagctgttgctgtctcctatgccttcatcctctacagcatccttcacatccgctcctcagagggccggtccaaagcttttggaacatgcagctctcatctcatggctgtggtgatcttctttgggtccattaccttcatgtatttcaagcccccttcaagtaactccctggaccaggagaaggtgtcctctgtgttctacaccacggtgatccccatgctgaaccctttaatatacagtctgaggaataaggatgtgaagaaagcattaaggaaggtcttagtaggaaaatgagtcctgatttgggggatttatagatgggaaaaatgaatagttccaatgaacatatattccttttttctattttcatgttcttctgttgtaacatacataatatctagattttaaaaatactttcccatctatgattgattcaactttctcaacaaa

SEQ ID NO: 7442 - DNA, 1223 bp, mus musculus
aagcagaggtatcaagtttagagacaatgaaaactatgactcagtctgttagctgctgtcaacctcccttatgcaatttggttttgtttggaagagcagtgagggtccatgttaaggtaattcatactttctattttcacagaaatgcctaaagaagaatgaccatggaaaattattctatggcagctcagtttgtcttagatggtttaacacagcaagcagagctccagctgcccctcttcctcctgttcctgggaatctatgtggtcacagtagtgggcaacctgggcatgattctcctgattgcagtcagccctctacttcacacccccatgtactatttcctcagcagcttgtccttcgtcgatttctgctattcctctgtcattactcccaaaatgctggtgaacttcctaggaaagaagaatacaatcctttactctgagtgcatggtccagctctttttctttgtggtctttgtggtggctgagggttacctcctgactgccatggcatatgatcgctatgttgccatctgtagcccactgctttataatgcgatcatgtcctcatgggtctgctcactgctagtgctggctgccttcttcttgggctttctctctgccttgactcatacaagtgccatgatgaaactgtccttttgcaaatcccacattatcaaccattacttctgtgatgttcttcccctcctcaatctctcctgctccaacacacacctcaatgagcttctactttttatcattgcggggtttaacaccttggtgcccaccctagctgttgctgtctcctatgccttcatcctctacagcatccttcacatccgctcctcagagggccggtccaaagcttttggaacatgcagctctcatctcatggctgtggtgatcttctttgggtccattaccttcatgtatttcaagcccccttcaagtaactccctggaccaggagaaggtgtcctctgtgttctacaccacggtgatccccatgctgaaccctttaatatacagtctgaggaataaggatgtgaagaaagcattaaggaaggtcttagtaggaaaatgagtcctgatttgggggatttatagatgggaaaaatgaatagttccaatgaacatatattccttttttctattttcatgttcttctgttgtaacatacataatatctagattttaaaaatactttcccatctatgattga

SEQ ID NO: 7443 - DNA, 309 bp, mus musculus
ctcatagcgttttgtgggaattacatgagttaattcacataaagtgttagaaatgtgcctgacacataataagaacctgataggtgttggcacccctgcccctgttactcatccatatatataaaaatcaggatttattgatcttggtactttttacattttggataagttttggttgtggggctgtcctgtgtagcacaggactcacagcacagcatccctgacctcacccattagatgccagtgatattccccctaccatacagacacaccaatcactaaatcaaaatattctccattgtcagacat

SEQ ID NO: 7444 - DNA, 1045 bp, mus musculus
attgcctagtgtgggcataaccacagtgtttacagggagacttggcgcaaacagagcctcttgctggtctcagaaatggggaaagtgagaactaaccaccaaccccaatgagaccagtgcaggaaggattttgaagtttggactagaaggcaggaaagcatctgtcaaaaatctattacttgatgcactaacaagattgttggaggtccctcccctcccatgggttatggagatccaccctttccaaaggggcctctggctctctgtgaacagcccagcagtcgctcactgggatctgggctccatctgcagcatctaaggacatcggtacatttctgagcatttcagaaggaagctcctccccactagacacctacttttcatataatggagagaggatccttccctaactgccacttgaagttgcagaattgacacgttcctgacctgagaaagagtggaagttgaggatgtgcacatgtaagcaaggggactgtggtgggaacctcagtgagtattacgtggttttagatggaattggatttactctgagttctcacatatgctataaattcatatataatggtgtatttacatagcataataaatgctatgcaaatatgctggagcctctgggtacaaagagagaaggagaaagacttgtgttatgtaataggggtatggagtcagctgcaagggtgcagtgggacatgatgcagccactatccccataagaagccaggaggctggtgttgtaaatgtctgcgacctgtaaatggattggtgagacatatcccactggccagaatgttatttgctcacagtctaggtggtaatagcaattttctcccttcctgttgttgctaatgtcaaaggtatccttttacctcaggtatttgtagccagaatctgtaaaactcatgacaccctgcaccctgatctgatgagagtggcaagtagctttgtgaccaccaagaggctcttcagagacaaggcctggagtagagaccctgctaaacccagaaccatgactgtaacaaccatc

SEQ ID NO: 7445 - DNA, 1045 bp, mus musculus; identical to SEQ ID NO: 7444

SEQ ID NO: 7446 - DNA, 694 bp, mus musculus
atctatttgaagttgcccatgccactaccaccaaatgacgtggaagagaatgaagtgaggcccccgtgacctagtgacccaaatgaagtaaatcctgtatcaaaagaagaaaatccacttctaaaagacggaaatccactgaacacggagaaaaacgaccccgtccctcggcttctgcttcctcggggaccccttcgattcccaaagaagtcctcaaaagggtcttcaaagaagtcaaatgaaaatgggtcccttccaccaaaaaattccctgaagacatcatctgggttacggaatgtgaagccaaattcaaatggactgtcaaaatgacttccacctcctcctccaccatttaatccttctttgccatatttgtcatagatgtcctgtttcttagcatccgacagcacttcatatgcctccgctacttgcttgaattttctctctgcttcttctttattctcaggatttttatctggatgccacttcagtgccagtttccgatatgcctttttaatatcctcgggtgaggcatgtctctgcacgcctagaacttcatagtaatccaccatgttttacgagattgttggaatgggtccgaggacagaagcggccggtggcgggacgcaggggaggcagggtgacggcccgaatctcctcacagctccaggactgctgcgctggtggtggcggc

SEQ ID NO: 7447 - DNA, 1082 bp, mus musculus
attataaccccattgtacagatgaggacagtgaggcacagggaggttaagtaacttgttcaagccctcagagctagtaagtgtagagctagaattcaaacctaggtgcgctagtcctcaaactggaacttccgctcctgatattttgtttaaggatggaggcgtggagggaccaggagacccagtggagtaaccctgacccgcacctgcacgatgcccgcggagtgcaaagcactttctcctagcgcgcagagcatatatctgaaagcttctcgcccgtcctccgcccaacacccccgcaggactggcagggtcctcctttttttctccttgtgtaccccccaggttccttgctctaactccttcacttatcagcctgaggattgggcccaggctgcattctgagggagatgccgtcttccgcctgtcccccggacgaaaggaggttgctagccccagaatgttcacagtgacccacccctaaggtggtcttgccggcgggtctcgaagctgagtttcaagaccacggatctgttcttagaatgaatgctgtttggggcggctgggaggagggggtgtgatggagattggagaagctgaacccaccttggccccatcccaacggccccatcttggatccgccactgggcgagggtctggacacctggctggtctccacctcttgtcagcctgctctctctggtcaggattggactccctcggggtttcctcagcgacgccgcgtggtctgggggctcggagaccctcctcctccccaacccgcccgcccccggccctcccgccgccgcggcctcccacgtagcgttctgaacccgctcagcgctaaggcaagaaccagcgtggggagcgggccaggcgagcagaggctctaaatcttccttcactctgtgagtagatgaagtctgagaaacaaattcaaagcaggcgcgcctgcagagccttcctgcagaaatattccccggcattcaagcgcatccaggggcggcttgagctgccttgtttggctaaggtcagacgagactcgagttctccaataaaaataaatctcaaattaattatggc

SEQ ID NO: 7448 - DNA, 1298 bp, mus musculus
gggttggcacacacaaggcaaagaagcgtgtctcgccgggtatgtggaggaaactgcaagtagccaggacatctccagcttaaggtgtgaacaggcaaatggtggacctcgtatgcctggctgaaatgtgaacttggttgtttaagcagttggcactgcctttatgagctggaggtgacatgatcagacttacattttagaactgtctctctggtggcaccataaatgatggatgagagaggccagagacggagcagggaccagttaggagagaatccagtgatcatcacgaagacttgaattaaagggtggcagtgggaacagagaggcaggaatagagaggaggacaattttttttttattattatacttcaagttctgggatacatgtgcagaacgtgcaggtttgttacataggtatacacgtgccatggtggtttactgcacccatcaacccatcatctacattaggtatttctcctaatgccatccctcccctatcctccccacccccaaacaggccctggtgtgtgaggttcccctccctgtgtccatgtgtgagaagaggacaatcttgaagagagaattggcagaatcaacattgcggaaggaagcaagaagggagttgagaattctgtggtttctggactgggccagcaggtggatagggacgccatgaactgaagtaggaagacagaggacagagtagacttaggtggggaaaggttgagttctgttctagacctgtgcatttggagtgtctttgggcagatgatggagacaggtctgtgaaccggaggttagtagatgggctctccaggtatgacatggctgtttccacttccctagcatataattgagagcctcatgaacttgtgcacccagtggagtgggcacctttgtctatggtagcacggtggtatgtcagacgggcttcagcgtgcatgactaacatattaggctgatttttcagaagtcagagaattttttttttcagaaatattagttcttcttaaacctcctggggctccctgatacctgcccaggcatctctcaggtcacctacacaggattgattcacttatctgggaggacaccattggctggcatggaagctgccatcttcacctgccctctcagatgttcctcgcctccctacgtgaccagggccatgagcactccctcctcccacagctctcaccctcctcctctgtgtttgtttctccagtttcctaggtgaccccatttaagcgaatatgcagggaagtgagaatttgtaacggtggcaggtaatgaga

SEQ ID NO: 7449 - DNA, 3309 bp, mus musculus
gagacaccagatgacttactctctccaccatgtggggcacagagagaaggtggccacacgcaagccaggaagctcgccctcaccaggaaccaaatctgtgcaatcttggacttccagtctccaggactgtgggaaataaatgttggttgttcaagccacccagtctgtggtattttgttatggcagcctgagctgactaagaaacagaactactgcaattaattctgggaagaatgaaaatggaataatttccaaacatcacagcccaacaaagctacagagaagacaaagtgacaaagaagagataagtgttctagttgtaactctccgactaacataacatgtgactttaggcgaggcttcccttttctggctcttaactgtattcagctataatataagctggttggactgaaatgtgttgagcccccctctagttccttcagactcttcccttctttttattgttggtggagttgttatgaactataactttacctagcctaaataggtgaattatatttgttcaaagagactgaacaattaaacatttaaaaaatttatttttctaattgatccataattatacatatttatggggtacacagtggtgttttgatacatacaatgtatagtgcgaccagaccaaggtatttagcacatccattatctcaaatatttatcatttctttgtgttagaaacatttaataccctccttctagatatttaaaaccatatattattgtgaactataatcatcctacagtgggatagaacactataacttacttctcctatctagctgtaactttgtatcctgtaacaaatatcttcctatccttattcctctacttttcccagcctctactatcctctgttctacttttgacaggaaagtaagttctttcttgaaagtatgttctttctaagaaatgttatgagattaacattttcttggcttccacatatgagtgagagcatgtggtgcttaattttgttcttgcacttaacgtaatgtcctctaattccatccacgttgctgtgaatgacagatttccttcctttttatggctgaatagtattccattgtatatttcacgtattctttatccattaatctgttgttggatacctaggttggcttggctactgtgaacactgctgcaataaacatgggggtgcaaatgtttcctcaaaatactgatttcccttcctttggctagattcccagtaatgggattgctggattatctggtagttctatttgtagtttttgaggaacttccatattgttctccatagtggctgttctagtttacattcccatcagtaatgtataagagttctcttttctccatattctcaccagcatttgttattttttgtctttttgataatagccatcctaactggggtgagatgttacctcattgtggttttggtttgcatttccctgatgattagtgatgttgaacgttttttcatgtatttattggccatctgtatgtcttcttttgagaaatgtttgttcagatcatttgcccattttataatcacattgttttttgctgttgaggtgtttgagttccttgtacattctggatattaatcccctgctggataaatagtgtgcaagtatcttctcccattctgtaggttgatcttttcactttgttgattgtttcctttgttatgtagaagctttatagcttgatataaacacatttctttatttttttggttttgttgcctgtgcttttgatatcttatttgtaaaactttttctcaggccaatctatgttttcgtccagtaattttgtagttttggatcttacattcagatctttaatccattttgagttgatttttgtatagatgacaagtgggagtctagtttcattcttctgtgtatggatatccagtttccccagcaccatttattgaagagattctcctttccccagtgagtattcttggcacctctgtcaaaaattagttgactataggatatgtggattaatttctgggttctctattctgttccattggtctatatgtctatttttatcctagtaccatgctgttttagattctctatttcttttttcttttctttttttttttgagacagagtcttgctctgtcgcccaggctggagtgcaatggtgcgatctcggctcactgcaagctccgcctcctgggttcacgccactctcctgcctcagcctcctgagtagctgggactacagtgcccgccaccatgcccggctaattttgtgtatttttagtagagatggggtttcaccgtattagccaggatggtctcgatctcttgacctcatgatccgcccaccttggcctcccaaagtgctggggttacaggcgtgagccaccgcacctggcctggattctgtatttctaaacagttctcatttatctgcaagttatgcaatttcttaatttcaataacaaattttcctaaacctggggctgactgctagaggtttctggggctttggcacaatcatgaatggttaatacattaagtgcctgagggcaggtttggttgccagacggctagttttaagtttttaaagaactaaaacactagggctggttcagcagtacctgtacctcttctgtcactgagagctgcttgtggtgagctcgtgccagcaacaggtgttcagcctcaactgtcatcacaggtaggtgggcaagaccaattaggcagtgcaaaatcattagtgtgtgtaattattccagcttccctttgaaaggctggccatgggagagatagatggacagtagaggggtctggctgtctgggtgggtggaggaaggtgggagtgtttcatggaatttcacggtccccttggcaaacataacttgagccattagactgatctcatccatcttgatgttatttccctcagcaagcaataacctcagctttccacggcctgtggtttctgtgagttgggaatgaattccctcactctgagtgaaggtgtccaactggaaacagaaaaagaagaagtatttagcccataaaggctttttgtcatcagggagtggccataatttggaggagtcccatggataaaggtcactttggacaccagtataagctggaggggcgatgaatcagtcagtcaggcattcttagaacttattaagcatccgctgtgtaccaggccctatactaactgtttcatatactggagatgaacaactgtggttcttatgttccaggaatttatatattaacaagaaggatgaaagcagaaactattagacttaataac

SEQ ID NO: 7450 - DNA, 1088 bp, mus musculus
gtccccacaccaccttctgcacctgccccgccccctgcgctcagggttagagcaaggccacactcaccccaccatgccgtggtcctatcccggctctcagactactgtgtttctcagatattaacgaatatgacaccttgcgtagccagagtataattgacgttgaccttcacgcgtctcctagattgtgacctttcatgacattgtgtgtggttggtgacaacacagttcacaacacagtttataaaaaaagaaaaaaaaacagatttctccttgtatcaggccttttctcccactgttgtgaagatacatgtggggctttgttctgctttgctttgcaactaagacacacacagacaccacgtacacatacacacactcacagacatactcacgcactcacacatacacacactcttacacgcacacagttttcatgggttttgtctgtttcttctgtactccacacacacgctcacacagtttttatagggtttatggctatttcctccgtggcctctggaattccatcccattacccacaaatatgtaggctaagcctctgtctaggagacgagagggggaaggacacactccatttctcctcggacacttatagtctatttaattataaaaataggaggagtcggtattttctaaggtgagtgagaccaaaaaaaaatgtgactctggatgaatacattgtcagaacaaatcacgggtggaccctggcaagaggcagcacttccgcttgagagtcctggctgggaaaaaggcagagaaactccttgatatgatccaagaagaggctgccagtcctggcacctggtttgatgatgatttttacagtagccagaaaaaattagctgggcatggtggcgtgcgcccgtagtcccagctactcaggaggctgaagcagggaggcggaggttgcagtgagccaagatcacacccctgcactccagcctgggtgacagagcaagactctgtctgaaaaaaaaaaaaaaaagacagagagaagtgtcagggcctggggctgtcatctgccttatttgcaatagaattaaataaacggaacagtcgtaatg

SEQ ID NO: 7451 - DNA, 1088 bp, mus musculus; identical to SEQ ID NO: 7450

SEQ ID NO: 7452 - DNA, 1381 bp, mus musculus
atctcttatcctcatagagcctagagtgtagtggtaaagaaggcaagccagcaattgccatatagtcacagaaagaacatggttaagaagacttccagtaggaatcctaatttaagattttcctggattcatattccagaccagtttgggcagaagttagaggagaaaatcagcacttgggctgatttatcattacatctcctaccttggtttggccttggcgacttgggtccagtggcttagaggtgctttcatggcttagagtttctgcagatgcgggcagggcagaaaccatacggtcagtctagtcagcagttttcagttatgagtcaaagaaggagcagaagcctgagctgtgtggggacaacctcttccagctcatcctaggttctggctgctttctgtcttggtctggccatattgttcgacccaggagattgggtacttttataactccaggaaaggtacatgtttatgataaatgggaaaatatttcttggtcctttcaaagagatgctgatccaaggtgagaaactgtgtgattatgagagactgatcatcctgatcatctatatggtacagctagctgccttgcttctctagatttctctagaaatctaggttgttaaaatccttgtaatgcactgtgctatggcttgaatgtcttccccaaagtttatgttttggaaactaaatccccgatgcaacaatgttgagaggtaggacctttaagagttgacttggtcatgatggccctgccttcatgaatgaactcatattgttatcttgggtgggcttgttattgccagaagggtttttttttataaaatcaggttcaggaaactcttgctttcactatcccccaccctgtgatgccttccagcatgggacaatgcagacagaagaccctcaccaaatgcatgcccccaaccttggacttccagcctccaggatagttagaaataaatatctgttctttataaattacccagccccagatattctgttgcagcagcacaaaatggactaagatacactgtctaagaaatctttttatatcttcatggagactatgcagtttgacttgctcgcggcccagttgattttcaagattgacaatcagcactaactctattatagaatttgcctggctgctgcactgagaactcactgctgtgagtattgtctccagcttcagtggacttcccagaggttgcctttgaaaattttacactcaaccatttccccactcactgaaagcttaaaagagaacaagtctaaaagagaatggttatttttagtaggaagttagttgtgagattttgagtgggagagtcagcctcagagaaactagacatcttctcagctattcttgagtcct

SEQ ID NO: 7453 - DNA, 940 bp, mus musculus
aactgaaataatttgaacaacaaaatgaataatgatagtattggattgtagcccaaagaacaaagttcactaataagttcatgctgatacaaataaccaacaagttaataagtgggataaaaggactagtcttccttacagttgaattccaattaatacatatagaaggatgccgagcatggtggcatgcacctgtaatctcagttactcagggaggctgaggtgggaggattacttaagctcaggagtttgaggcaacacagcaagaccccatctcaaagaaaaagaagtcttaataaatgtagaaggaaagagaaaaacagaaaatcaccattagacaaacaccactataataattgttgcagacaagatctaccaatgaatgctaaaactagtgggtgaaagttccaggaggaacagaatttttacaattccaaagtgtctcccccaagatatttattaactacaaagggaaaaatagtgattttgaagtagagaagccaggcagaaaccaccttaaccaaatgaccaaggtcaacatcaccagtaataagatagtaataagacatcaatatctctctatatcatgaaccatggatatgatgtactaagagtgacacaacatttctgtggtattcttgccaaacatgcggttcaatcacaagaaacataagacgaacccaaagtgaggggcatttgacaaaattaccgatcactactcttcaaaagtgtcatgaaagacaagacagacaagacaacaaagactgagcaagtgttttaggctgcaggagactaagggaaaatcacaactaaatgcaatgtggggtcctgaatgggatcctagataggatcctggaatagaaaaggacatgaatgtaaaaactggtgaaagttgcataaggtctttagtttaatagttctctaccaatgttaatttcct

SEQ ID NO: 7454 - DNA, 670 bp, mus musculus
ccattactgattttatgttataaaaacatagcttggtgtattatttgtacccagttttagataaaattttacatgaattaaactgataaaatggaatcaatggtatatgttcatgtaaagcttgcagatatgcaaatacatatcccagtatattacatagcaatatattctcttttttgtttgtttgtttgtttagtagagacagggttttgccatgttggccaggctagtctcgaactcctgacctcaggtgatccaccggccttggcctcccaaagtgctgagattacaggcacgagccacagcgcccggccgtaacaatatattcttatggcaactgggactgtgaggatgctgttagctgaagacatttaacttgctcacttctggaaggataaaaaaattcaggtgccaaaaaaactaaatgcatttgcttactatcattgtttaacagctgttaccaatcaacgtggaaactttgtttaggtaggaagcactaatttccaagggtcagtgaaacaactttgatttgtcatgctgatttttgactctaggtttctctgttttagtatcacacaaatggggtttatgtaggagtcaatgaatggcaaatgccccacctctacctgccctaccttctacttctgaaaagactggttattaccaagat

SEQ ID NO: 7455 - DNA, 674 bp, mus musculus
ctgccaaaccctcgctccaattccgtccttttgtggacttcatttacttttctggccttatgatatgcccactttcttgcctccccgccgcccccgaaccacaacttcactgagcttaatgaagtggttgaagcattttccctgaaagctcttctattaaaatacacaacattattatgtggatttagtagttcacatatccttggtactgaggaaggaagatctgacagcatccttaagttcctggtcctccaaaggtggtgtacaacataagatttcaaaattctgcattctaatttatcaaatgacttaggttccaagttcatgcgtccgagagcaggtgatgggctttagagtgagccaggctgccacctgctgtcctttagtggttctgctaaaagtagaagaggaatcgttctgaccttcaaaggcaaagcttatgagaatattttgttctccaaggtagagaaggttagtttatcagaaatggtttttccttccaatggtcttgaaagggattcccctcggccatgcagagatatggggcccagaggaagcagacaaaaccaggccagaagctgctccagcttcctaagcttggctttttaagagttgataaatttgcctgaaagtgctctacctgtttgggtggggatgataacccttccaaaaga

SEQ ID NO: 7456 - DNA, 409 bp, mus musculus
ttcagtcctgtgtctgacaggttcctgctggagtggagtgtctggggctcctggtacgacagaggggccgagggtgagtgcacggagctgcagggccatgtgctgaagagcagtggcattttggtccactaacgtgagaccattccctgtggggtgggtgacagtggggataggtgaccctgaagcatcgttgttcacatctcaccctgcgtggccttctctcatcacatccctcactcctggctctgtgtgtgacatcatcttgggacaccgccactccatgtgccatcatcaccaccccatgacatcctgccctcatgtgccaccatgttttcctgtgccgtgtccaccctgtgctgggcttatgttccggccagccaaaagtgtcttccatcactgtaagtagccc

SEQ ID NO: 7457 - DNA, 964 bp, mus musculus
tcatacaatttatcatccaaattgggatacatttgagaaggaaaggcggcagattatgtgggaacaaagactggcccatgccagctgggacatgtggtcaccttacttatgatctatgagatgtataatcaccccatttgttgataccaggtgcagtgagatgcatgctctatgtgcagtgtgtgttttcaccctgtatccccatcttctgctgggagcgggactccctttctccccgcctgagcctgttctcctcagtagcaggatccagctcaagccctacccccacctgctccaccacaactgccccactgccaccaccactaggcttgctccttaacctttctgtgcctcagttccctgatcagtaaaacggggctaactatagtacctactactagaactgtgcctgactcaaagtaggcaccagatgtgtcctgctatgatgatggggagccctgtgatttggtaacttccccaatctctctgcacttttgtttcctcatgtgggaatcagggacaatattacctaccttttaagggcctggaatttaagaaaaattagcccccttcccccttagaatcagcagcagacatcaaagggcgagttttaatacttcccacacaagttcacagatttattacataatatgtttagttgtggttaaagaacatctaaggggcgaaggagctgcccaaggggaaggaggcagacgagagggacatgtgtggctttgcatggaaaagggaagtggtatcccagataaatggtggccagccttcgagggctctcaggcaagagagaaaactctagacatcaccagtgcctgggctttgttgcaggcagaggtgctttctctagaagggaaagcaagtccctatagtcataaaatgagcagctcttcagctgctagtacttgacctccaaccagaattgatggggtgctcagaactattctaggta

SEQ ID NO: 7458 - DNA, 1290 bp, mus musculus
agtgtattggaaagaaagcggccagctaccttaggtgctctgttatgaatgtatttccttagacccacacagggttctctaactgtcttttcctgaaaattcttccaataagcatttattgaacttttactatgctcaaggcacagggcttggtcctgctggcatgcagaagggggggacgtggccacagctgccctgggaagaggggggcatgtggaggggatccccatttcctatacacagggccctggctccgtcacagatgaggcctggttggtcttgggtccataacttgtactttcagagtcaggaagcagatgctggcaggcttggaaacctcgtccaggttggacggtggtggtagcagagggatgagcagcaagtgcttcctgggcatttatcagcacacgtctccaggcgtaagaccttctgtctgccaggctaatgggccacccctggcaccccatggcactgcatctggatggatttacaggggtcttggctctcagcctcatctctgttccttaaacccggctgcctctctggatgctgcccagaggtgacgctgatcagattgtgtggggaagcctgtgtgatggatggctcattttgtgtcctgggtctgcagcccacattcctgccaagagcatacctgatgcagggccctttctgcagtggtcctcaagaaatattaactggtaatgaggaccagagactgaggttcacccgtgctggcttcttcaggtccttgttctaccatgactaatagccctctccttaaaccaccccccaggtcccaccctgggatgaaagaccagctgaccctgatcctcacagcaggtttgtcctatggcggagatcccgagggggccctaagtcacagctttggccatccagacccggggagccatcactggaaagtgcctatcaggctaaggcagaggggtggggtgtgggcgggctgtgccagcccaccgggcaggtgagggacctgcaggagccgagtgcctgagctgtcctcccctgtctattaactccccattagcatgcatcagtgccgttgcctctatcagtttgatttatgccactgcggttttgcttacaaattagaagccgctattgtgctaggtcggctttaaaatcgatgcagagtaattgcagtacatgggtagttggatgacattaacatgagaaatgtgctgtagtcgtcatccttggaacaaacacgtccaattacagtgaaattctgtgccccttacccggctaatttgaacacagctcaccgccaag

SEQ ID NO: 7459 - DNA, 4443 bp, mus musculus
taccatggggcgcaagttggaccctacgaaggagaagcgggggccaggccgaaaggcccggaagcagaagggtgccgagacagaactcgtcagattcttgcctgcaggtaaggattagttgtggcctcctgatccctcagcttttgcagtattctgtattataacctcttctcttttttagtttctgttcattttatatttaagtggaatcttctctgtatgagttactaggaggtatgaatgaaacagccgtttagattgtagggaactgtttaggtcgtagagatgtgaagacacggacacaactattattcatgcaagggaaaagtgtgatttaaaacaattgtgagttcagaggaagggggagcccatgcagaactgtaaaagtttttgttaagctgggttttgaaaaatgggtaacattgtagcaagaggaagtagtgaaggggaggggtcagtcactgatttgccttttggaaggggtggaaatggaaaagcacggatctggctgcttcatgccgagtagtagtatactgtgtggaagactggtgggaggtaacactggaccgggagtttgtgttgggcattggataaaggatgcagtttattgagatagtaggaagtcctgggcactgtattaaacttgttggtcatgttatatcgcttaatcatcttagagtcctgtgagagaggcactattaaggaaacactttgggaggccgaggcaggtggatcacctgaggtccagtgttcgagaccagcctggccaacatggtgaaaccctgtctttactaaaaatacaacaattagctgggtgtggtgatgggaggctgaggcaatagaatcgcttgaatctgggagaaggaggttgcagtgagttgagatcacgccattgcactccagcctggaagacaagagtgaaactccatttcaaaaaaaaaaaagaaacttgtatacagttattaaataataacagggctgagatttaaatggactccttttaattagtgtactaattctcttaccatgtttatttccgttcccatttatttttaatgtcccctgtaacttgttctgcctcgtttttcttttttaaacagtaagtgacgaaaattccaagaggctgtctagtcgtgctcgaaagaggtaagtgtgggtgtcaaaacttaagtaggttaaattggtactgctcatctttgaccacagagttaattctagactctcacatttccctatggtggaaatggcagagcctggaagtatcttcccatttcttcactccttgaatctcttgtgtcttttcagggcagccaagaggagattgggctctgttgaagcccctaagacaaataagtctcctgaggccaaaccattgcctggaaagctaccaaaaggtccgtgaaactaagagctggatgctacatgaggagtccctttgggtcctgggtagggaagaactcgctaaacatttccggagtgaaaggaacagccaaaggacattctgaggggtagaaagtacaggctcccagggtgtggggccagggaatgtgtggctgccattagtccaggactcttcaaacccttagggatctctgcaggagctgtccagacagctggtaagaagggaccccagtccctatttaatgctcctcgaggcaagaagcgcccagcacctggcagtgatgaggaagaggaggaggaagactctgaagaagatggtatggtgaaccacggggacctctggggctccgaggacgatgctgatacggtagatgactatggagctgactccaactctgaggatgaggaggaaggtgaagcggtgagattcatctttttgggcattcatagaaggatccttgctatttagtttctttcccagattcttgagactgtttcttagtggcaaggataagcctgactagaggaaaggggtttttgtgctccatcactgtttccctactgccttatatcctcccagtgcactacaagtttgaaagagctgtaggatagagcatttaaaaaaatctagaaggctgtcttggtgtaggtatgggaaggtggacaatggtgtgctccactgatgggcacagaaatgcactttttataaagcagttatctcagaactttgaaaaatttgttccttttggctgggtatggtgcctcacatctgtaatcccagcactttgggaggctgaggcaggaggattgcttgagcccaggaattggagaccagcttgggcaacatagggagatcccgtatctacaaaaaattaaaaaattggcctggcacagtggctcatgcctataatcctagcactttgggaggccaaggtgggcggatcacctgagctccggagttcgagaccagcctggacaatatggcgaaaccccatccctactaaaaatatgaaaattagctggtgtggtggtatatgcctgtaatcccagctacctgggaggctgaggcaggaaaattgcttgaacctgtgaggcggagatggcagtgagccgagatcatgccattgcactccagcctgggcaacaaagtgagactctgtctcaaaaaaaaaaaaagttaagttaaaaaatggtttaaaaattagctgggtgtggtggcgtacgcctgtagtcccagcttctcaggatgctgaagcgggaagatgactggagcttgggaggttgaggctgcagtgagctgtgatcttaccactgcactccagcttgggtgacagagtgagactgtctcaaaaaaaaaaaaaaaaaataactgcttccttttgacatagtaattccctattaaggaagatgatccaaaatgtcagcaaatagttctttactgaggtgcaggaagttattatacaattagtgtgtggatgtattattagaatcgtatagaataaaaagagaaggtccccatgtgcacccccttcctacatccccttgtatctacagggtcattattaggtttgcaggcaccatgtggatcataatgccaaaaactcaggaaacttccaaaatacacaatatgcttaagtaagttatggttcatgcatatgatgcagttacactggtcattatgtctatgaaaatgcctgtgatgtaactgaagtctaaaaagcaagaaacaaacttgaaaatggattatgtgaaaaatacagagtaagtaaaaaaaaaaaaaaaacgacaaaatgggccaggcacggtggctcacacctgtaatcccagcactttgggaggccgaggtgggcggatcacctgaggtcaggagttcaaaaccagcttggccatcatggtgaaaccccatctctgctaaaaatacaaaaaattagctgggcatggtggtgcgcgcctataatcccagctacttgggaggctgaggcaggagaatcatttgaacctgggaggcggaggttgcagtgagccaagacgcgccattgcactccagcctgggggacaagagcgagacttctctcaaaaaaaatatggcagaatggtagtcaagggccatttttgtccttctttatacatccaggtatttttcaagttttttttttttcttaatggaaaagtgaaaaacataatagtagaaagaaaaatgtaatgaaccctttaatttattacttaggttttttttttttttttttgagatgaagtctttctctgttgcccaggctggagtgcagtggctcggtcttggctcactgcaacctccacctcccgggttcaagcaattctcctgcctcagcttcccaagtagctgggatttacaggtgtgtgccaccatgccctcattacttagtttcaacagtgagcaatgctgcgcccatcttattttcatttctttgctcctctatttccttctgagagcaagtgttggatttttatttagcgaaaaaataagatatagagatagaactgctacaagggctgatggaagggcaggcctgtattaatagcccttgtctctcttcagttgctgcccattgaaagagctgctcggaagcagaaggcccgggaagctgctgctgggtgagttttggaagctattgggatggagcataggaagccactggggtggggaagctgtgaggaaggaggaggtatctgttttggtctgtgaatcactctgttcctggacctgtttctaggatccagtggagtgaagaggagaccgaggacgaggaggaagagaaagaagtgacccctgagtcaggccccccaaaggtggaagaggcagatgggggcctgcagatcaatgtggatgaggaaccatttgtgctgccccctgctggggagatggagcaggatatccttgcagggcagagtgaagagttaggaggaaggtggttgggagagggatttccaggccttaggacatcatgacacagttccttaacaggcccacatgcccaggctccagacctgcaacgagttcacaag

SEQ ID NO: 7460 - DNA, 619 bp, mus musculus
gaacagaggtttctcaaatgcctcagtccctgagagccatttcttcccctacatcgtctcactttgcttcctattgactgctggtagaaggagatttggggtaggggctagacctccttttatttgaagggggcaagggctgagatgtggtccccaaggggccagaaattcccaagttggtcacaggtggcttagaagtgtgtgttatggttttacggatttccttgaagcctctctccttctctgcctacaaagaccctatactctcagtctccccaacccacccccaaggagctgtgggaggctttgtgttatctgtgaaactccaaaacaggggtgttgcggagaagggagagttcaaggcaaacgcaaggactggacttagctccctaggtgccacagtcagatgccggacacggatttatatataaatatatatatataaatatattatactcactcatcacggccatctttgttgtaaccatttctgtgtttataaatgcattatctctgagaattttcatatttgatgttttgtttatttttgtcctttttttccctctctccacccctgtcctctagccacagcatttttctttttgtctttttttttttt

SEQ ID NO: 7461 - DNA, 619 bp, mus musculus; identical to SEQ ID NO: 7460

SEQ ID NO: 7462 - DNA, 1115 bp, mus musculus
aatttcctgtcttgtttcttttgccaggtggtgtggggatgatgtgctcattgagtgaacaagggaagcagctagctatccaggtgtctaatatcctggggatggatgtgtgtggcattgatctgctgatgaaagatgacggctccttctgcgtctgtgaggccaatgcaaatgtaggtttcatcgcctttgataaggcttgtaatctagatgtagctggtatcatagcagactatgccgcctcccttctaccctctggccggctcacccggcgtatgtccctgctctccgtggtgtccactgccagtgagactagtgagccggagctgggtcccccagccagcactgctgttgacaacatgagtgcaagttccagctctgttgacagcgaccctgaaagcacggagcgagagctgctcaccaagctcccagggggcctgttcaacatgaaccagctgctagccaatgaaatcaaactactggtggactgactccactggtaattaaccaacaaaacccttgtaaaactttctttcttcttttctatttttaaaaccaacttgcaatgctgttcatggaggatgctcaggaagatgagagaaaattagtaggattagttggagagagtgggagatagatgagacctctgctagtaagatgttactttcatttacaaatcctacaaatagagaggcagaataggtggggtatagaaaaatgtcaggctctcatagttacccttttaaattgctaaaaaatgtgtatgctcataggccatgaggaacaaatactttttttttttcatggtcccttgcttttgtttttgtacaaaaaaaaatggttttgctacaaatatccaagtagcataacttcacattgtgttggaagatttgtcatcagtgaggaaaacatctgcataaattacaggaatttttgtattatacagctctgaaaattctgccatttccttattaactagcagctttagtttgtagtttatgaaatcttgaggggctcttttactgggatttcttatttttttgttttttcccgcttaatttggtgggaggtcaaattgaatataacccaataaaggcttcttaatgacaaaattg

SEQ ID NO: 7463 - DNA, 444 bp, mus musculus
tctaatttatttaatgtacaatgaaaatccaataaagaatttgtaccaggggaatgagaaggtaagatttgcatttatagagagatagaactgtgctgtgaaggatgcagtggtgaatgcaaggcagattcaggaaagtccagctgtgaagatcctaaactgatctcagtaagtacacagggatgattgtggccttgctctacctagtggatcagcattgatgatggagataaacacacattagagatactgcagagacagaactggataaaacacttgcctgtgtctaactacagatatagaaatatcagattcaatcattgtgatttttctttcccctacacacagtatttcaatgtgctgggagtggtataggtaagattgtattgaaacaattacttctggttaccgaaattgagaaagcttgtgaatataagcaatgta

SEQ ID NO: 7464 - DNA, 282 bp, mus musculus
cccagtgtggagctcaaaggtgccattgttcttctcctctttataaagggagttgccacgttcctcccagcacagagttgggagtgactccagagcctcctgcaagatgctgttgattctgctgtcagtggccttgctggccctgagctcagctcagaacttaaatgaaggtaaaacagaagggggagaagatgtggtgactctgcttggggcttaggaggtgataatggtaattacggggaagagaggagaatgaaaacacagatggggctgcagagtttt

SEQ ID NO: 7465 - DNA, 1129 bp, mus musculus
attggagacattcaaagctcagttcaatccaaggcatgatttaggagtaattatctttgctggagtgctgacaaagaacaaaataatccaccagaagtccaaactaggtgaaatgattgtaaagtctatttaagaattttgtgctatggcttaagattggtcgtcctgcaagacataccccagatgatttacacttggtgctaagtgacccacacagcatacagtgtcaaccatgtctgacaatgacaaggattaattagaattccaagttcataagtgagagctgaaaataaatgtttgcagtgctcataaacccttaacactggagagtaatataacaggaatatgttttaaaatgatgtatgaagaaccagacccagaactttgagatggtttccaaagccctattaatgcatccagctagtatgtcgctgcaggtaccattctcgttataaatctaagcagtccatttaaccatgagggctggtcttctagaataagatcagctgatgagagccatagcttttagctcctggaaaataccatcccagggagattcctgaggcttctgtacgcttggactttcttgccctcccagacttggagaagcagggaagggccatcccatcctctcagcagcagagccctgaaggttttaagtggttcaggttatcagcccccggcagtggcctaaccaacaggaagtttccccagagtttccatcacaggaaatttcctgtaaggaagtccttactgcacaaacaaagagttcctcgctctgctcccctccaccaaaacttcagtgccccaccgaaggaatgtgggcaggagggcgtgagtatcaacagggcttgaaggtagcaggggttgagggctggatggcataggaagaaatggaggggaacaaagatgttatcttacttctgctggccttgggtttgtcagataattgcttattcactggctcatgctggctttcatctcctggcctgcctgaacttgcagtgagaagaatgcatgcgggtgcaggttctcctggtctacctccacccttagcctatctgagtttgattcgtcatatctgagtttgattcctcatctgtacaccaaggaacactgtaatgattaa

SEQ ID NO: 7466 - DNA, 1129 bp, mus musculus
ttaatcattacagtgttccttggtgtacagatgaggaatcaaactcagatatgacgaatcaaactcagataggctaagggtggaggtagaccaggagaacctgcacccgcatgcattcttctcactgcaagttcaggcaggccaggagatgaaagccagcatgagccagtgaataagcaattatctgacaaacccaaggccagcagaagtaagataacatctttgttcccctccatttcttcctatgccatccagccctcaacccctgctaccttcaagccctgttgatactcacgccctcctgcccacattccttcggtggggcactgaagttttggtggaggggagcagagcgaggaactctttgtttgtgcagtaaggacttccttacaggaaatttcctgtgatggaaactctggggaaacttcctgttggttaggccactgccgggggctgataacctgaaccacttaaaaccttcagggctctgctgctgagaggatgggatggcccttccctgcttctccaagtctgggagggcaagaaagtccaagcgtacagaagcctcaggaatctccctgggatggtattttccaggagctaaaagctatggctctcatcagctgatcttattctagaagaccagccctcatggttaaatggactgcttagatttataacgagaatggtacctgcagcgacatactagctggatgcattaatagggctttggaaaccatctcaaagttctgggtctggttcttcatacatcattttaaaacatattcctgttatattactctccagtgttaagggtttatgagcactgcaaacatttattttcagctctcacttatgaacttggaattctaattaatccttgtcattgtcagacatggttgacactgtatgctgtgtgggtcacttagcaccaagtgtaaatcatctggggtatgtcttgcaggacgaccaatcttaagccatagcacaaaattcttaaatagactttacaatcatttcacctagtttggacttctggtggattattttgttctttgtcagcactccagcaaagataattactcctaaatcatgccttggattgaactgagctttgaatgtctccaat

SEQ ID NO: 7467 - DNA, 1169 bp, mus musculus
tgtagtgtaagtggggggaaaagtttactggatttagaaatttcagacattctggtttatcacatattctctagaaaatttttcactcatcatatttctttttttttctttctgtaagaagcaagccagtttagaaaagcagaatacatccacttgagcataaaaaagtccttcttccctgcaagactgctctcatatacaaaggaatatttttccctcttgtttaaactaggttcgtttggaattactacctgtcactactgtattaatatattattcacattatgagaaatataaaatgtagacattttggaagaatgagattaacataatagaaatagaagtttgaatattttcttcttctatatctttggagactagtggtgtagacgaggatatggacataaagacattaagtgattgatttcttcccttatctgatttgcgttcaccatcacattctgactcatgagtgtcactgggtttgatgtgtcctggagagtgacagggatgtagaatgcatttccataaattcgcatcacacgttttacttttagaaagattatctggcttcctgcaaaactttgataggcaaacagagatattaagtgtttgtttataggctcctcattctactctttatggaagatgaagagatacatagttctgatgagactggggactactcccagctgggttcgtgacaggttaaccctgaaacaagtaagtttagggtaaatctggatgaccctttgctttccacactattcatgggtctgtgtaaaagctgtgctttttctggatttgggacaaactacaataaaattatttttctaaaataatatatggggatcatttatttaaagaaaatatcctaatagctttctaatatctcagaatgacagatagtaaaataacatgttgtaagcataaaactttacataacttgagggaaaatattcgtcctgggttaaaaattgtatacctgaactagaaacttcgattgaatactgtatttcatgtctccattgattttctttcactaaaaattgagataaatgccttttttatctaaaaaagagatactttattaatatatatttcaggaagattacaaagttttgaatttatatacaaaattattttaattttgcatttactttttaaaa

SEQ ID NO: 7468 - DNA, 1974 bp, mus musculus
cttgtatgaatcaggatcttatctctcaatagcattctttaattctttagaatttctactcagcttaagttgctaaagaaaagtgactcattccaacttaattatcaataggaaagtaaatttcctatgaggtctattaattctgccttctttcagagaaagagagacaaaaagatagattttgcttttaacagaactttgtgtttgtgggctatcacaggcaagagtaaggaagtgacagttgggtgcaaaagtaggtccacaccaggctgaccaaccctcccagttcccagctggggagtctgaggggtttgtgaagatgtggaactttcagtgctaattactgggaaagtctcaggccaaccaagaacagttagtcagaatttcttttttggatttggagcttcagtacgttggttcaggagaaaaaagttcagagtgcacttctgttctccaagacattacgtaaactgagatacgttggaatcattaactctgtagcttcaacaaaaaatagccaaaagacagacataaggaaaggaagaacagtagttgggtgttaggtaaagaggagtagagaagctagggagggagacagaaaagtgacgttaggagtcagtgctgattctttttcttccacatgaagaatttcaaaccagtttccatggaagagctgtctaggttgccattcagaaccagttgtcacgattcaaggaaggtactttgccccttttaatgtcagaggttggaaacatggggcaggaggagaggactaaggaaagaggaaaatatgcaagtaaatataatttatggcatacattttcatatgggtttctttaatcaaatatgtattttaaacctattattttggtaggtcatactgataaagttgcattatgtaacaatggcatgaatgaaataaagcacagaacatttggtgagtttgttttcaggcttgattgtgacagtaacacagtttattcactttctcacaatagtatttgatgaatagcaaaagcaaaaattatgaatcatatggaaagcagggctcatggcatttttgtttgtttaggctttaaaaacaataattgaaactatgatgcttttgaaacactaatgtgagaattcatttgcccttcatgaaattacgtgcagaggacattcttgtcaagggaacattgcatatacattaatcagatgactttggtgtgtgctaagtattacattctggtgatgtttgctgtattttgactgctttaagtattttattggcccaaatataggaagattgtttgtggggaataataataacaattcattctttcattctaatacagtattgaatacattaaaaatatttctaagccttgaatgctaaggggattagcaactcagtttctgtcccacctaactccttctcttactctgagaatcttaccctttactccctccttccctcctgtcctgcctctctcctccttgccctccttcttccctcagcatctaccagcattataaacactcctttcagatatacttccatcctttcataatacgcttcccacttccttgaccccatcccactggtcagtgagtagtagagcgagctgaaaagaatgagggctccttcccacaccggtttccacaggtgttagtcatttgccgtgaagtggactgatgaaggttgatgtgttgtttttgagtaatagtttaattaaaaagtgatgtgtctgtgtgtggtgtgtatttttgtttttgatctctgtggaaattgggaggactctgttaaaatcaatactacctgatatttgggccattttagaatttaaaagtaaatactgttctaatcaaaggaccagattaccaaaaggtctttttgcatgtaatatgctaatcctaaattagaataattaaaattgtgccagtgcagtatctaaactttgccttaattacaaataattgtcctgtatcttt

SEQ ID NO: 7469 - DNA, 639 bp, mus musculus
aaggtaggaaccctgtctgttttgctaaccatgcactcaatatgtagagctaccctgtctagtgtggtagctgttagtctatatgtggttattaacatttaaatgtaaactaatttatatgtaataaaacttaaaattcagtttcttagtggcactagccacatttcaagtgctcaacacttgtgctcagctactgtattgagcagtgctaatatagtgcatttctattattctaggaagttgtatgggactgtgcgagagcactgatgggcacattctggttacgtagtaattatttgttaaatgagcgaatgaatgaagtagtactcagattggcaggtgccaattaatgttgaatgaatcttgtttgaataatcatgtttaaaagttattttagtttttaattaatccatgttgacatttccccagccaacttcaaaatactggatttatcattagtaaaaggaaagtatataatagtggttaaaagcacaacttgttgctgatgtcatggccaaattacctttacttataactctaatttaaagtctcagattctcattaaaatgagaataagaagttctttttacctcttaataagaagtaagataatgcatgtaaagtgcttgcacagtggct

SEQ ID NO: 7470 - DNA, 866 bp, mus musculus
ttgatttaagggtgttttaaaatgcgataggctagcttccagaccatgattagtgtcactcctgagaagcagaggtttaatatttcataactgatttcattgcagatttatgtcttccatattctctttaaaaaaaaaaaagataaacttatgttagaacctctctggaaacagacttgctgacacaaactgaactgtataggaaatctgtaagaagcactgcctaattgacaaaaatggtcctatgattaacatgtatgctaatatcaactaattgatttttttggcttattctcaacaaataacctcatcctacttaaccccctactaccttacagcttgggctccagagtaatagcagatatggttggaatccgtgcactgctactgcttagttgtgtgacgttgtgtaattgaggcagggaaaccagttaaaagacttttactgatatttcctgtgagaattgataagggtctaaactgaaacaagtgagagtgcagtggaaagagtgcatgtgagggggtaaggaaggtaaggaggtagaattgtcaggacttaaatattgattgggtgtggtgtggccagggaatggtggagtttggattaaactataaggtttcctgcttgggttgataatagaatatattcatttaatgtctcccttctctagcattctgttagcagtcatctgctggtgcaaccagtcatagccctgagtgataaaacgtgagagatttagtactcaggctctgaggtgttgttttgaccactaccatctacagattcccaactctactggatagtcaggttcctgaaacatgtaaatccagataatcagagttttattgtatatggaacatatctt

SEQ ID NO: 7471 - DNA, 549 bp, mus musculus
agtaagtagtcctttatcctcaccaaaatgtaggtggtgattacaaccttcaatacattcacatttagatatgctctacatcaagttggaatgcatccctgacaatcaagatattaaaataaactatgaggttaactaatttttatgatagcctgatattaaagcttcctcagctatctttgcatatatttaaaacttaggtaaggctaggcacggtggctcacacctgtaatcccagcactttgggaggctgagtcgggcagagcacaaagtcaggagattgagaccaccctggctaacacggtgaaaccccgtctctactacaaatacaaaaattagccaggcatcactaatcccagctactcgagaggctgaggcaggagaatcgcttgaactcaggaggcagaggttgcagtgagctgagattgtgccactgtactccagcctgggcaacagagcaaaactccatctcgaaaacaaaacaaaacaaaaaacctaggtaatttcattacttatttggtaagcttgtagatcttccctagtcttccc

SEQ ID NO: 7472 - DNA, 1483 bp, mus musculus
ctgtgaattaaaccacaattggccttaactattactccttaaagtgtagcattttgtcattctctttgatactaaaagatgttcacatacttgtaattggcagataggcttaatttgtgctggttatagtgcaatgagcgaggcaattaaataggttctgatttttttaattggacaaaacactttgcttagtcacaaatatagggacttttagagggtataaaattccttctgatagaagataattatttctttgatctcaattaaatttcttacagtatttattgaggagaaatcattcttcatttgaatatagcaatctttctaaacaaataacacattcatttatctcacactcaacagtaaaaattaccaagactatgttattataaaaagaatcttttttttgtttgtttttatttttctttccaccaaatttacaactgaaatttagggattaacaacaaagtgtaatttctggaacactgctttgtgtataaaccttaatgggtgatttgaaatgtatctttgaaaagcaggggtccttcctttactctcatcaagcttgagtgaaaaaggtcaaggctcagtaaagttactagtcttatcctgggtattaaagttgctaaggctgtagtttttaactgcaggaaagaatgtagtctagtggaaaaagcatttgaatactcagagataagagggtccaggtatctctgggaagacattccctagccatgtgacgtttgtttagttaatcaaactcaattccagtttccttatctgttagataacatgttagataacagggtgagtcctgtccaacttctaaacatcctctgattctttaacacaatacattaaaataaaatcgaaatgttacatgtttaattgtctatgttcaatgattaaaatgcaatacttcccatataggattagcagtgttctttttctgtccagtattatccctcccccacttttttttcattcttgagctgccaggagacagttacagaagagatcagattggataaattctaaaatcaagtattataattattatatttataacatttacttttataattttgtaaatttataaaataatttaatcaatatattttataaatataataattataattataattataataaagtataaataatttatacatttaagtaatttcagaaatactcatcaaactaaggcctgaaaatatatgaaaacattaaaattccaaaataaatttgatatttcacccgaaagttggcaaaggagttagcctttgagtttgaagaccttctgtgcatcactagattacaaagaaagcatatgttgtaacacagtactaagactatagcaatatctcttattacaaattgatgggaagctagaaataaattcataagaaatgccctaaagtacattccgtatgtaactctagtagaagaagaatcacataatgaactgtactgaaaaaat

SEQ ID NO: 7473 - DNA, 530 bp, mus musculus
tccctcattgaaaaaaaaaaaaaaaaactacattagtaaaagtttgggggccaggggatatgctttagtaatctgtaatgagttattgattctatagaccatcatcatgaattgaaataattctcatttgaaaaactctagaacctgtggtttggggtaagctatatcttctattgttcatcatcttaacactgtaggatcattctttacagagatacaaacacggttgatttacctattaggcattgtaggtactgtagatcatcaaagaaaatgttatgatgtaacattaatatattattattgcaactgtatggtaaaatataatttcgaatatgcttttaatagaagaaggggcatacaaagtcaaaagtgggtggtctcacagaagtgctaatgcagccctagacggtgaatcaaatgacataaaccaacccctatatttattttattttcagaagatggtgaaagtgtctccctcctttgctagaagtaaagttaagcccctttgccttgaattcccaaggaaa

SEQ ID NO: 7474 - DNA, 1333 bp, mus musculus
tatcccaacattagaagtagttaatgtatccataggcaattgttagatacatatgtaagaaagtgaaaaaccgacagacagacaaaacccacctaagtcaataatattggcaataggatttagaatgctgttatggcacatgagatgctccacatcctacctacatggaatatggggtatgtgtaaagaatattgtttagccctattttttcgtttgtttcttttgaactactccgttttccttaactctccttatctttttctgaatgaccttaaactcaaggtagtcgttgagtgggagggatgatttttagccatctttttcctccaactcaggtagataggatttaccagcttggccttaatttcctcctttctgttaacattgaaaaccatcatactaactgtaaaaatcaaatactgtaataagagtgagggagtgcatgttttaaagtctgtcgctatattagctcataccacatatgtggcaagaagcagatactgtacaaatcagttcaataatgaggcattgaaacacaagttacatactgtgctaggaataaaatgataaacagagtaacactattctgtccttttggatttttatagtttagtaggaatgtattaagtaatgacaagtacatgaatatgattaaagggatgtaaaatactgaatagcaaagggattttactttgtctatgggaccagtgaaaacctttgagaaagtgttctttaaacaaagacttgaaagttgagcaggaggtagccaggcataaaggaacccagagagttttccaagtggagttttccaaaaagcatgtgtgaagacttgcaagcttgtgcaacccaccattttttttgttgttgctgttctgttttgttttgctttaggattttagcagcctgaagccatggatctttgtttctgtctctagttttaagtggaaaagtgggctgaggaaggggcttcactggcccagcaagaaacagaaatttggaacccatgactgtatttctcctgtggacaccccctgcctaggacaagagagagctgtgctgtagaatgctggggaaatggaaaggcagcattggtggaacagagagcatggagaaatcgtcagtgctgggaaattgtgggagctgagcaacaagtgtgagatgagacaggtgggggccaaatgatgcagggcctagctctacttgtcaaggattttgaaatgaaccttaaaggaagctatttaaaggcttagtcaagggcctattatggtgtgatttgtgttttaaagtagccattcacctgcattatggagaatgaaatgaaaggaagccagg

SEQ ID NO: 7475 - DNA, 798 bp, mus musculus
ggactgattattcaatgtttttgaaccaaaggaagagaaactgcttggcttgtttttctttggcctccagaataagttatgctccaaacccagggtattggatgaaaactgtcgtatgtcttttcctggaagaatctattcaagtggccagagatcaattaaggatttgccaaatgcaaataattctgaataactgtgtactcttgctctacttctgcagttgcaaatgaagagagagagcctgcaggccccaaggatctttccgttcatgtcattgagcttccttccctctctttttacaggggatgaactgtagcctccttggaacatactacacttgcaataatttgcgcattaaccatcaagacacttcagtaaagctatgcagtgccaatagtttaagctggatcctattttgccctaacacaaagtgaactgagatgactatatttatatttcattatacttttgaattttagttacagtgatttttgtgtcaacacctccatatattagataacttaaaatgtgctatagtatctcaagtttttcagtagtgtttttaacataattattttttctctttgacattagcattctagatgtaacactttggatcttttaaagataaatttaggataaatgatagcagattttattattaaacaatttatttgtattttctggtcactgactttaatattatgactgatgagaaataatatgatatctgaatccccaaaaacagaaggccaatttgaattatataatttaatcctttgaagaatattgcaattt

SEQ ID NO: 7476 - DNA, 798 bp, mus musculus; identical to SEQ ID NO: 7475

SEQ ID NO: 7477 - DNA, 880 bp, mus musculus
aaatgagttgatgggtgtgaagagcttagtaccatgcctggcacttgataaatactttatacatgttagctgttattttcctgaaatttgagggccaaagttaaatgcatggaaaatttgcttagagaaactgagcatcttgtcatgatcccgccaaagttgatttgggaataaattgcctattgctaaattattgttaggaaaatactgacttttaaacatgtatctacttttgcctatactttagccacttcatctgtatactaggaggaaagtcaacaatggcctctccaaggaaggtaactgagaagcggcataacccagtggaaagcatctgtagaaagatcagagccatccacaagagagaagcaatttcaaatccaattcagcagattatcaaataccaatctagcagttttgatagcccacagacgaacaccaagaaatattttgaagaggtactgaggaaaatgactgctgcttgtgttcctacgcccggctctcattggtcaagttctgaggaagtcgatgccttcatttcatcgcctcaaataatatctccaagaaccccatccacctctcacctcagctcccctgagactgcaacatactctgttattctcacaagttctgaaaacgtctcaaagccgaagtcacagagcaacaagaattatacatctttgatgtcacagatcagaaaagcagagtttttctctaacaaggatttgaataactattgtagtgaaaataattttagtaccttaacacttgactttgattccacctttgttcaaagcttgaagtgttttgatcctcaggattcagtggtaaaaaaattatctctgaatgaagatggtaaatattcatcttttaatgtttg

SEQ ID NO: 7478 - DNA, 591 bp, mus musculus
cttatctaaagtagagtttctgcagtaaggagataggagaaagtaagaaatattggtgacctgggccactctgtgagaaaccgtaactctactatcgtttagaagaaaaatgaactcatgttcttggccatacccagtagaacctccatcacactgaacttggaggtggagagcaagttatggctcgaatcccagagagtcgcttttcctaataagatttagttaattttctttaataaacatttctacatcttcagtatgttattaggataccttccagacactttaaatggttgttgtttttacaattttcattatttatagttgttttgctgggaagagtgtccacagagcttctcataccacctttgggaagtgcttctccttaacatgatgaattagcctcctatggctgctttaacaaattaccaaaaacttgatggcttaaaacaatacaggtttattctcccacagttctggagtccagaagcccagaatcagtttcactaggctaaagtcaaggtgttggcagggctggttccttctggtgatacgaggggaattcatcccttgcctcttttagcttctaga

SEQ ID NO: 7479 - DNA, 10734 bp, mus musculus
acatcttttaaaatgttttgtttcttttttactctatgtcattaggtacattatctttgattccagataacaaaagtgaagcagtacgacagtgagggaatcattttctgatatttccaggatcatcacaatcaactcggggaactcagtgtgcagaagccctgcaggagggaaggggctgtcactcatcagtggtgtcattcagacctttgccccggacttcaccggcaaaatccctgtcaggtctttttccctccttctggattccagttaaagtttgtggccaaaatatgcagtgacagatggctcatgtcattgctgtaatgtcagcctttgggtctccgaggggatgactccaggaatagaaagtggagcacatacaggagtggatgtaaaacagaatctaagacaagcagggtcctccagttctcagaggaatcaggaacttcccttctaaactcatctaacaacagggagcagccccttctctctctcaatgtgcatagactgagacttgtgcatagacttgtgcatagactgagacttgggttcggtacctcctctgagccttagcagcttgattttgaacctgctcctcaattttctcataagtaaaatgggcatcatcattgtacttatcttctgagattcttgtggggtctaaataacatctgaaatgaatttagctaagtgctctgccctagctaagcactcaataaatggtaatgctactttcctcccactattaacttggttttatatgaaaaaacaatgcataatttaacataaaacaagaggcaaaacatagaaaccctactaattgaaatgttgttttgttaaaattcccaattcagatgggacttagactaaattagactaaagccagcatttcattgtgttattatagaaccagagggttttcccactgaaacaggcctggagagacaattagtttttcatttcacagttgaggtctctaaagctaagagagattgtggtctgcccatagttagatctaagaagcttccctgataaaatttcccatgttgaccattggaattggctctaattttccatttttgtttgcttccttttttgagaaaacatgtaaagttttctatcacatgcatttacaaagctataagttatgaaggatcctgtttttctctaatttggtatatcctgatcttttccctagaggtctgtgttggtgctgctgttttccagtttgtcagtttgtcttggcatcagtgcctcaccatttggcacctgactcaacatagttttaccaccattatctaaacagtaccaccccatctgaatgtatttcacaactggtcgtctccgtgccatgcctctgcctgggtctgctttccattacgttacccaaccatctgctccaaaagaatgtcaggaggaagtgatgctgctttgtgcagtgtgttaaaatcttgacctttacttgggtttagtcactgtgcatcactggattcctaactttttttcttcaagattctttccacactgagagccacgcaaagttcatcagattcatattttctgaaatatcctcataagcctcctcacctatgattaatttgagtgtaataccaattatagttaattactgggtgccagaatctttacatacatgacttttaattcttataatagccctatgtgttccgaagtgctattatccctgttttatggatatagaaactgagaatcgggggatttaactgacttccccaagaacccacagtaagtggctgcctttcccactaagccaagatgcccaggaggtgcctttgaagggcacaacagttgttctcaaatgttggcatgcataaagttgcctggcattattaaaagtacaccccatagaagctgggtgcaggggctcacacctgtaacccccactactcagaggactgaagcagaagaatcacttgagcccaggagttcaagtccaacctgggcaacataaggagagcccctttctttaaaaagtgtagctcatagagtctatcgcttaaattccaggctcttttccccaattctgattccatgggtggacccaggctctgttttttctgcacactttcctggagattctgatgcagaccatctgtgcagcacatcagctcaggtgagccacagcttggctctgcatccccagctatgcaccagctccaactgaagcaccacatttcctcccttccttctgcttaaagccataaattaaccaagtgctgagattcgcttttataataaaacgtaagctcaatgaggttttccggaattcaggttttgttggaggcagacatctagcctggggattaatagaactggtttctttgtctcttccccttactgactttttgtatgtcatttgataaaataacctcattgtgtttttattcttctcctctgtaaatggaatgtgaaaatccatgtctactacacaccataaaagactctaaggaggaaaaacgtatccgtgagagttgcacgcaaatctccatgcagagatcatggtgtgagtcctcaggatcaaattactctcttatacgtgttggacatgttgatttaatcatggttgctatttacttcacaaaatacaagggataacacatttggttggaatttgtgagacttgaacgcactatcttgcaatgcacgggttttgtactcttgggagagttatttattgtctatgtacctcatcgtcttagtgtgtgaaatgaaaatagtaatactattatcaacttcatggggttgtgtcacttagtgctttgcataactgaactataacaaattgcttagtccaaatattttcattctcaatagcctggcttcaaattattgacaatatcagcatattcattcttaagtacgtgctatacttgctgcaatattaggtgctacagaaaacaaatatgccattgtccttgctcttaggagagttacattgaagtagatggatgctcttacctgatacctaaagcaactgacttgggggggatttttgccatgtgtagttaaggatgaaaagccagatgcagaaaaatatatataatataatgttagtttttaaaatcatgaccaagtctccctttttttttcttttagagacaaggagtctctctgttactcaggctgtggagtgcagcggtacaatcatagctcactccagctttgaactccttgggcttaggtggtcctcctgctgtagtctcctgagtggctggaagtacaggtgcatgccaccatacctggataattttttatttttgtagaaacagcgtctcactatgttgcccaggctggtcttaaactcctaagctcaagtgatcctcctgccccagcctcccaaggtgctgggattatagacatgagccactgtgcccagtccccatatttttatatgtatatataatatatacagatataaaatatgtataatttatattatatataatgtactaaatatatgtggatatattatacatatgtatcattaatatatgttgtttaggacagagaataaaggaataaagaaaaggagagacacaaggaaaaatcacaagtaaacaacagttaaaaaattacaggactgttcatggtaaaaaaaaaagaacatatatgacatgattacattcaaataaattagtatctgtctgtgtgtgtgtacataaagcaaagcacaaaaacatagccaaatgctaacagtgtctaaatcaaggtagtgagatttaagtgatatcaactctttttctgtattgttagactctataacaacaaatgtgatttgtaataactaaaaaccttttagggaagacagactgtgccaaatatatttattattgtacataatacattgttttatctttttaaaattgtctctaacaggtatgaattacttttgaatgggaaaatatgttattctttaaacaaatattctcagtaatcataaaatgcagtggaacagagttattctaaatggaaggtcaaatctccttcagttacccaaataaagtaaagtgcacaatgaatttgctctgcaagaaaaaaaattgttactgaactctttttttccttcctttttttccttctgtagacgtttcaattatgtaattcctagatttgttgaaataatttcatttttaagacaactttacaatatgatttgacttctgtttttccaactcattattattttctacaactccacatgtcccaaacagagctcattagcttctcttccaccttaacctacttctcttcccatctccctttcaagaggaatgtcaccaccatcctccagtcacccaaactggatatctgggagccaccatggatatcttgctctagttctaggccctctgcaggcaatgagtcaatcatttctgtagatgctacatcctaatatgaggtctctccttatcacaccacttcttctccatagctattgtcctcattggtcctacctaaattgtagcaattatctttaaatcagccccccgtctccactttgaaattttgatcaagtaacaccacagaagaatattcaaacttcttcacttactatgcaaacagttatgagttgtctgcctagattcacatccttcaaagaaccaaccttctccaaaatctgtcatcctgggggctgtcagtcacggtaccctcactccccatcatattataagccagacaatgagagtgctctctccccataggctcagtgattgcttcagagttcagagatgggcatatgtaaaagaagcatcaagcattctgccccaaatcttttctgctagagttagagggacaaccctctcttgtttttggtgggttactgattaatttagcaaactcctttgtaagacttatttccttgaactttctgggaaagctctagtgtggaaacacagagcaagagaattattttagtcgccctataaataggacatggattttcatccagtttaggaaccaatctcaattctagaaaggtagccatgttatgtggtgctttatggtgatttctacattattataaatgtggtggctccaaaaaagggaagctattaattccaactatattttcaactaggatataaatgtctttaggtttttacaacgtatattatacaactgccataaaattatctacttttctgttctttttgttgattaataataggcataaaattacacatagctgaagtatacaattcaatgcattttcacaactgaatgcaactttgctactgtatctttttcatgtacataactaaattttaagatagctaaggtcaggactatgttttcactttccaaaacacctagctcagtcctaggtccagcaataatgctgcccaatattgatgttgctgtcttttacttaccagacaggtattgtgtaccagaaagtcactgggtgtaaaggtagaaagactacttcaacataaattcatgtaaaacaataattatattaatctctaacaattatcaaggatttagaggttttattattatttctgttttacagattaggaaactgtaatagacagagattaaaaaattgaccaagattaattagccagaaatagaagagcaagaccccaagataaaacttaatttccaaaaaataatttaagccatgcagtctctccactatgataattatcttttctttgagactgagaaaaaacttagccatctttcttaagaccaaggaatagaacacactttctttagtaaacattagtgatgattcagcgttggaggaggaaagaagttgaagaaactgtagtagcgtttaaaattctgcaaagaagatgggcaagaccacatgttagaaatgacagacttactttttgattgaaggcatcttccctttcttcctggatccagatcacctctgcagcactggcttcttttccatgctgttgttgtgtgtaattgctatgatccttaatttgggagctctgcctgatgggtggaattgtacttttgagtgggcagcagcctgcctcttgtctcttgaaatgcctgtcattttatcacaaagagatggatgtgaaagtgagattgtccttgagtccactgagaagatatcaaccaaacaactcacaaaatcacatttatttaaattgtttaaggtaagaacatttttcagattcttgaattatatgtttaaagtaatccaagatttttcttggagataggcagtctggaaagctgtatattctactaagaattttggataacatctttatgttctgactcagagtgtattgtcaatatttctgttaaaaaatgaaaaacaagcaacaggcattaaggatttggtaactaactttctttggctatatttttacttaatatagctaagacaaagaaaattttagcgacactttaaacaaaattatttaaagtgaagacaataatatatatgctaatttgatgtcactgccatgtaatgctctaaatagtacaatagaattgacatatttgattctgaactagtggagactacacatgaagaatatgtagattatgaatctgtagacaaggaagataaggtagaattaaagaatgattttggaattctcttataattaaagttatgcatcactttagttttgagagcaaaaagaagtctaagtatttaaaaaattatctttttaaagtaagatttccattttttcattactaaaaaaagtatgacagttgtgaaagacaatgttaattcacactagggagaaacatggccttaacctttcacaaatatgttggtctttctacctctgttaatgaatgtctttcaaaccaaacagtagaagcacagcagccataccagtgtgtgattgttttaataatttgatgacctgaagaacaatgaaagggtgataactccactaagctatcaacccaaactgccctgcatatagccctataaattaccaggaaagttctatttttccccataacatatttttgtaacaaatgttcttggtggattgggtggagaagaaggcagaatgagtctgcaattctatttaagacttgcatggtgatagaattttagagcttggagggactttagaagtcatttcatctaagtctctcattctacaaatgaaggaaatgaggcttagagaaggtccacaacttacccagaataattaagtaaattcatagtagaatcataaccccaaccttcctctattgattcttaacaatattaactaacagttttaagcatagactatatacaagcacggtgcttaagtgctttacatgaatgtttattgctctatgaaattggtggtatcattatctccatttaaccccaaggctctagccaaaaggagtaaatgagaagtagaccattcttggcagaaacaaaagcctaacttcaaatcatctctgaagtggaattaatgtgatcctttatctcaatcctttatctctactgcttctggccacttgtcagtagccaaggttaatcctccctgagagaagataacatcttagacttcaaattttcaaatcaatggctagcatgtactcataaataaccagatgtatcaggagccaagatgacatgaccacaaatccaaagaaacaatagatgataaaaacagagttcaggagaatcaggctaatgttcaaggaagtaagatacaggattggagacttcggcagagagctggaaactacaaaagtaaatgaaaattctggaactgaaaaatatcaccttaatggagattacacagcttataagaaacttagaaagctaattagaacataagtccaaagaaaatatccagatgaaggacagacacataaaaggatggaaaattgagtaaataagagacatagacgataccatgagaagctccaattgttgttacggaagtcctagagagaagagagaaaatagagtagaagcaatatttaaagataaaatgattgagaatttccaaaattgatgaaagacataaagattgaagaaactctaaaaaattccaagaaaaaaataaaaaggacaaccctaaaggtacacaacaataaaaccactgaaactcaaagacaaagagaaaatcttaaactcagccagagaaataaaaagacaaattgcctttgaaatagcaactgcaacaatggaatctacaaggcaacagaatatcattcaaatactgaaataaaatagctgtcaacctataaccagcaacatgtactttaaaaatgaaaaaaagacattttcagacaaaccaaaaaagaaaaatcactataagcagactgcactaaataataaatatttttaaatattgtttaaatagaatcggaataaattaaggctacgttttaatttctagattaatcaccaaataaaagaatagtaaaagagtgtatagccatcaagctaataacggaatagataataaagagaagaaagaagaggaaaaagaacatgaacaggctgggcacagtagctcccacctgtatgtaatcccaacactctgggaagctgaggcaggtgaatcacttgtgcccaggagttcaagaccaccaggggcaacacagtgacacctcgtttctgaaaagaaaaaaaagagaaaaaaaaaacataaacaaagtgagacaagaataaactaaatattaaaatggtggttttaaacctaaggatagtgtcaattacattaaacataaatgtacaaaatcttctaattaaaatagaaaaattattaagagaaatattttaaaatactactaaaaatagcaatattctgtttccaacatatacaaaatacagaacggttgaaagtaaaggaatttaaaataatatactatgcaagaatatttatcagaatgccaactacagtatggtacctggtaagtactcagaagtcacaaaatcagcttccattcaattgggagtagtagaagagtgagagatcacaaatgacctcaaatcatagttaaacaaaactaatataaataaatctggtcccagcatagaaaaacattctctattaagttaacatagcattaagcaaaaccaaggtaggtaaagacatccacaaattaaaattgacacccacaatttagcacacttctgctattatgcacaaatcaggatcacactacataatacttttttaaagtttagaattaacaaatatcacataactttctttatgaaaaactattaaagaagtaattactatagatgtcacaacagtatttaaggcaggaaaaggaattgttgttgaggaggacacatgaacagtttctggagtgctggcattgttctatttctttgtccggatagtggtttcatgagtttttccattataataattaatcaagttgtatatatatttaatattttataaatatttaatatttatgtaaatatatggtcatatatgtatattaatatatacatagtaaaagtcattatttttttaaatcacaagagccattttcttgattatgctcctgttttcaattagagcaggatcaagttaggccaagaagagtcccagaggtatattcaccaccctagcctgccctgcctcactgcatcctccatcttcatgaccacatgatgtctcaaacttcatcttgctaaagtctcaaggtcacattgattggtttctatgcatttctaaaaaataggtttctttgatatgcctttttctctgatacatagtaatttttacattatcacaaataggcactaaatttctttatctttgtaaaccaacaaaatcaggtgaaagtccccatcatgcccagaataaatttgacgcttgtttaggcagagcgagctttccatcagtacaatgctaagccattaagcaaagtattaataacaggtaggtaaagactatattgatggttataagattgttcatattaaagaaataacatcagctgttgaacattcactgttccatgcattatgcttatctgatatctcacaacaacctatgcgttaagtacagttgttttcccaattttacaggtaaagaaactgaagcctataggacttctcagtgacactgctagtagcttgaagaagaaggatttaagcccaggacttcttaggagttgagttaagacgtcctcacacagaaggctgtgcatgacaatagtccaccacaaagctatgctatagagaaagggaaatagtgggcttttctaaaacttgtgtctatgaagatgttacacagggaatttatctaaattccattatggagtaaagtaaaataaaagctaaagagcatagaaagcaatcttccttcgagaacaatactcatgaggtaacaccctgagaaaccccactaaaggtcttgcctttctttttctttttagtttcccatctgtgctcccgcaagcgtgaaattgaacggagaggagatgtatgtatatttccaaacactcccattcccaacagactcaaattccttatctaaattccctagaatatctccttctccaacctccttattttttattttattctttatttggttccactgctttctatagcaaagcgataaatagttccaagcctccctttcaagtctctaaatcttcttgtctttattgaatttctcctcactctattctgatgttttcattttcatggtccatcttactctgtattttcttctgtgacggtgaacattataaatactcctgcctctg

SEQ ID NO: 7480 - DNA, 1091 bp, mus musculus
cctacatcaatttcaagaacaggaacaataaatgtaaatacatcagaagtattcaacttggggactttcaggagaatacaaaaatagaaataaggagacattcttttcatcctattctggttcaattactttgttctctgtacaagctggagagcacatattctcccatcatgagagaaagggtggcggtcattcaacccaaaccaatcacatgtgctttgggcagaaactgtcaatattaaggcaaatcacatccagtttatcacagactcagttaaaatagaaggaaaatattccctgaaatatggtctctgatgcttggtaacagtgctttggagcttgacagatgtagagacagccaatcacctttacatctgccaaaatatctattctccaaagccagaaagataaaacgcctaaaaccacaatgtgaagagttgaatattgaaaattccatatgttttgcaggttgatgctaaatcctatgagaaaaaccagcacatcggggctcttgtaaccaactttcaggaaaggaatcctaatctccgagaggcaggtataagaaagattactgtttataaaggagtatggccatgctgaccttcaaagtgggcagagccacagcaagccacctcatcaggtctgataaccatgtcctggaaatgggtgatttggagatggctggtagggccaactatataagagttggccttattggtgaagtagccaaacaaatgaggatgcttcaaaactaccattcgagtgaacggagttgggcagtgggggacaggatttagggctgagcacctaatttctcaatcagataaagggcaaggtggttctcctcctcccagcttgggtaggaagtgcaatcagtccgatttcacaacagagaaggcaaatcctcctatgctgatgtcttctcctaaaatctattccttgctcactctatcataggcacactggcctcctgactgtcccttggttgtgctgtgcatgctcctagcaagggcctttgcacttgctgttctctgtgcctggcacactcttccccctgatttcctcatggccccctttctcacctccttcaa

SEQ ID NO: 7481 - DNA, 411 bp, mus musculus
agagaacagggcagaaactcagaaaggaccacaatgagcaaggtactgccaagtcagtcaaggagaaccactgggctccatcaaactgagaaagtgacccagacataggttaaacctctggtggacctcagccaggagtgccaacagaacgggcagcaacctgacaagagacattgcgccagagaggcctgagcacagaacgaggacatcacgtggacctcggaaccccagccccccacagccacaaggtcacaaaaccacataccgccaggtgaaatctgaaagatcacacattttcttcaaaagagagtagacatttacctcaagagattgtttacattttttgtcactggatcaaattttaaagaagtgactgaagtggccgtttcctggccatccagcaggtggagc

SEQ ID NO: 7482 - DNA, 132 bp, mus musculus
cctacaaagtatttattacaatgcctggcacagaacaagctctccttaattgtaaaaatgctaactcttattcttcataataaataaaagtaattaatgttatagaaaacaaaatcaaggatactgatttat

SEQ ID NO: 7483 - DNA, 579 bp, mus musculus
ttgatttatattttgtcagtctataactggtcttaactaaggtaagtattaagatctcatttttaacagcgagtattcttttgattttagttcattggaaatcctgggattcagaaatgtggattaaaagtaatttcttctattgtacattttcctgatgcattagagatgttatccctggaaggtgctatggattcagtgcttcacacactgcagatgtatccagatgaccaaggtcagtacaatttgaattcaggatttagaatagatttttgtagggcattagctggtgactggatgtctttaaatatttttcttcagttttgagatttaaaacaattctttttttttattttcctagaaattcagtgtctgggtttaagtcttataggatacttgattacaaagaagaatgtgttcataggaactggacatctgctggcaaaaattctggtttccagcttataccgatttaaggatgttgctgaaatacagactaaagtatgtgcattatcttggaaagaatttgggaacttgtgcgaatttcacttttggagcagtttgtgtaattcccacttt

SEQ ID NO: 7484 - DNA, 914 bp, mus musculus
ggattttcttgtgcttcgtagattttcacacatctgatgctcattaaggtcacttctttgtgtaacatgtaaatagctgctgtgttttctccttagcatcagcttagccagtgtactcccagttccacagtaaacataaactgctgtctccatggtaaacaaacagaaggtgtagaagtggtgccttgagaacagggtgcccagaggaatcaagcattatatttaagctcagctctttttgtaggcagaagcttacagcgtcagtgaaaatgggtggctcccattgtataggcaggcaaatgccaggacaaaatcaggtaagttgattcaagccacattttaaaatcagaaatgagtgtcacagtacaaacctgagagcagaaagaacccaaaggcaaagcaaaattgaagaaagaagactgaaaagaggaataaaaggaggtgaaaaatcaatattctgtttttctccatctggcattttggaaggtccaactgcagtttgtggagttgaaccgaaataaagcaaagcctagttcatgtttactcgggccttatcctcaaatagttcagattttagaaggatcaagagcctagtgtttttatacaatggggtgtatttatagagtttggctaacagggaaactaaaatgcttatcattattagttcatttccttcagaatttctgtttttctttcctttgaaacgagacctaagagaacattgccagttgaatagtcttggccgctggcatcataagcacattcaagttttccttcacagctgaggtgtctctaatgtgactagttaggtaaagccagcactgctgtatagtgtgcatatatcacagtgaaataaatgctgctgtgaacctcccaagtggcctggagaccacagcctaccttgctcttggcag

SEQ ID NO: 7485 - DNA, 914 bp, mus musculus; identical to SEQ ID NO: 7484

SEQ ID NO: 7486 - DNA, 914 bp, mus musculus; identical to SEQ ID NO: 7484

SEQ ID NO: 7487 - DNA, 569 bp, mus musculus
ccctccctgctcagctgtccagctcctactcatcctccggccccagggcaaattcactcttccacaaagcctgacctctcttcagcccacaggatctctcctgcctaggagcttggttgtgcatatttgtcctgtgtgcctttgacacagcacagtcatctctgactgccaacatctgttgctgccaacatggtatcagttaacccctgcactgccatttaacttttcctctgaagttctttgagaaggggaccctgcctcatgggccctttgtattgccatccaatgtgtgttagaatctaaacagttagataattatcaacctgtgcctgagacctgcaatgaatcaatatgtaaatgaatcagggcactggtcagtcttccagccccacttgatattaaagactcagtgaagatggttagcaaagcagaggacagcaaatgggtctccggcagctgtgaagcaccagagtttatccaaaggggggacgtggggtctagagactcatctcaaagttgcattttcataacaaatacactgggttttttttttttttagctatattgtg

SEQ ID NO: 7488 - DNA, 1057 bp, mus musculus
ccctgccgctggaggagtcacccctgttgccactacctgaggagccgcaactctgcccccggtccgaggggccgcacctgtcaccccggcctgaggagccgcacctgtccccccggcctgaggagccacacctatctccgcaggctgaggagccacacctgtccccccagcctgaggagccatgcctatgcgctgtgcctgaggagccacacttgtccccccaggctgagggaccacatctgtcccctcagcctgaggaattgcacctgtccccccagactgaggagccgcacctgtctcctgtgcctgaggagccatgcttgtccccccaacctgaggaatcacacctgtccccccagtctgaggagccatgcctgtccccccggcctgaggaatcgcatctgtcccctgagcttgagaagccacccctgtcccctcggcctgaaaagccccctgaggagccaggccaatgccctgcacctgaggagctgcccttgttccctccccctggggaaccatccttatctcccttgcttggagagccagccctgtctgagcctggggaaccacctctgtcccctctgcccgaggagctgccgttgtccccatctggggagccatccttgtcgcctcagctgatgccaccaggtaaggggatgttagtactctgttattctggaacagctgtaactcttcatggcacatctaatctaagagcccttcttttttctctttccttccagatccccttcctcctccactctcacccatcatcacagctgcggccccaccggccctgtctcctttgggggagttagagtacccctttggtgccaaaggggacagtgaccctgagtcaccgttggctgcccccatcctggagacacccatcagccctccaccagaagctaactgcactgaccctgagcctgtcccccctatgatccttcccccatctccaggctccccagtggggccggcttctcccatcctgatggagccccttcctcctcagtgttcgccactccttcagcattccctggttccccaaaactcc

SEQ ID NO: 7489 - DNA, 1395 bp, mus musculus
agtggaagaagagaaagggtgtctgaaacctaaaccaggtctcagtgaatgatgtcagttctcttaggctggtcctgaaagacacactcctctaccaaagtagcttcaattccacagagaacagaattggagatgacaagggagaaaactagaaagcaggtaaagcatagtcacaacagtagccatagtccagacaatacttctttgagttagatgtcatcagaaagcagaccagactgggaacacagtgcccacacctgggtctctgagcttaggtgtcttacagttctttcctcacttttctgtctttggtctcatcccacccaggtatcgaaggatgatcgcagtgatgtggagagcagctcagaggaagaagatgtgaccacctgcacaaaaagtccctgtgacagtagctccagcaatggtgccaatcgggtgaatggtcacatgggaggcagctactgggctgaagagtaaggtggttgctatagggacttcagcacacatggacttgtagggccactggcaacatactcctcttggcccttcccatatctactcttctgtgattgggagactgcaaggcactgaggagtatcaaagaagcaaatattttcactttgaaagaaaactgccattttgtatttaatagcctccaggttctttcagtaatgttatttgctctgtgtgtttttgtgtgtttgttgatgtgcgtttgtgcatatgcgtgagtttcattgccggggttggggcacaattgtggactggggccatgaggccttccctggtccccactgaacccaccttagttccacatttggctgcatcttgaattatgccaactccagacttctccttcttttttgcccttggctcttgacactctaaacccctggaccatctgaatggagcagccaagttcagtcccacatttctgtactgttcctctttcacagctggaatatgtcacatgatgaagttgtatagaaacagaaccatggatggatggccaggattgccgtggtccctagctagatccccttcctatcaatcacctgatagcaacagggacagctgccaataccctgctctttactcaatggtacccagggagggagcatgggaagagggtgagctgagggctggaggagggcaacagccactgggtgagctgttcacggtcttatactattgtttgtttgtgattaaaagtgcttcaacccacctctactgtctcaacctcttcagtgactctatccgcagtttcctgaatccataagctaattaagagcttttccaggtctgattcagaaggccctggacaccaaatttttcctttctgtgcatggtaggaagagtcagccagggtgcttacattttagagctttatgtttt

SEQ ID NO: 7490 - DNA, 1382 bp, mus musculus
tgtacttctattgccattttccagaatagtgtgtaaaggaatataatttggggaaagtggtgtagacctctttttttttttttttttttttaatatttaagatggaggtttaggagcttggagaagagaaaggactaggcagagaaacgaaggagcatccagtaaagtttagactgaaagcttctggaatgaggtccagacttgagcctagcttctggcacagtgcgcagcacagcacttggtgttggtggtgcatagcaaagaagggagaaatgccacagggaactgctgttttggatattgtctgagcagattattgccacaatcatatccttcctcttggcctctcacagggtgttgtgctgggatgttactttgggcctgctgcactctacatttgggcagtggggatcctggctgcaggacagagctccaccatgacaggaacctattctggccagtttgtcatggaggtacgtgctggtataggatagagggagataacacaacccttttgttacttcttcttcttcttcttttttttttttttttgagatggagtctcactcgtcgcccaagttggagtgtaatggcatgatctcggctcactgcaacctccacctcccgggttcaagtgattctcctgactcagcctcccgagtagctaggattacaggctctggccaccatactcggctaattttttgtatttttagtagagatggcgtttcaccatgttggccaggcaggtcttgaactcctgacctcaagtgatctacccgccttggcctctcaaagtgctgggattacaggcgtgagccactgcgcctggccccttttgtcacttcttaatcccattcttctgaggtctctcctgaacctccccaaaacttttttttgtttcctgttgcagacagtcatctgctcctatgttttcttccagggattcctgaacctaaagtggtcacgctttgcccgagtggttctgactcgctctattgccatcatccccactctgcttgttgctgtcttccaagatgtagagcatctaacagggatgaatgactttctgaatgttctacagagcttacaggtgaggaggaagctgaggaaacacatcctagttattcaggtagcattatgtactgcccttgggtaccaagcctagctgagtgctggggggatattgagaggaagacagaggcatggttgtggtctgcagtaaatgtatatgaaatccttggcatctaaaaggattttagaaatggttggttttttaaacctgttgaatgggaactatgaactttacttacatatgggacacaaaattgtagttcattaatgcaagcaaacattaaatgaacatataggacactgtgcta

SEQ ID NO: 7491 - DNA, 1382 bp, mus musculus; identical to SEQ ID NO: 7490

SEQ ID NO: 7492 - DNA, 1382 bp, mus musculus; identical to SEQ ID NO: 7490

SEQ ID NO: 7493 - DNA, 1382 bp, mus musculus; identical to SEQ ID NO: 7490

SEQ ID NO: 7494 - DNA, 1382 bp, mus musculus; identical to SEQ ID NO: 7490

SEQ ID NO: 7495 - DNA, 1114 bp, mus musculus
tgacctcaatggcaacctccccattccaggctccagttccagctctctgtgtcatccccaccgcttagcaagacccgtgctgccactggctccaccgcccactgcccacatgtgccacgccaccctgcactgggccaacacccctgtgtgcggatggcattggctcatggggggcctcagtgcagcagtgccaagctattttccctgatctaggagtgaagagcctttccccccccacattgaggcaccctctgccaacggattcccacagctaagttgtcaagatttctccaatgggtcaaagggagacagttcattgcaaggtggccattgcctggaaggcccaggtcccacaaagaggatggagtagattgacccttactgctaattctccacccaggtccaatcagatgtggccagtgtcagagtcaggcagatggcagaggctgtgagtgagggctgcttttagatggagatgtgggtaggactggcaatgagtgtcatctctaatacgctttgagtgctcaagatgtgccaaacgctgtacttcaagtgcgtaattcatctaactctcgcaacagtaggcattgtgattccttctttacaggtgtggaaactgaggttaagaacagttaagtatttgtatgatgtacagccagtagatggcagagctaagattccaacctaggtctttctgagtccaaagcacatgtgtgctcatacatcactgttataaccacactggttcagctggtctagttttctaggcccagaagaccactttgagagctgagtatttggtttggccatatctacactgactcgtctattgaatcaacaaataatgatggagcacgtgctctgtgccagcccccgtccctgatgctcaggccacagtggtgaacaactcaggagtttccagcccagaaaggagcaacagaaataagtacattacagtgaggaggaggctggtctcaccaatacacagtgcagaaaacctttgtaaggaaaccctaggctgatggttgtcacatggccctggccggggcaagtcaagagacacggttctggttctggtcctcactcttctcattactagcttcagtttccttct

SEQ ID NO: 7496 - DNA, 1141 bp, mus musculus
catgccatttcatatgtattatattcagcaaatgacaacaaatacacagccacatcaaaattaataataagattcctgagagctgaatagtttgctttcttcctttgccgttattccagctaagattaaccagcttttcagaagtctattatcatggtttctttccctttggttcccagcccttgcccaccacctcctacttccccacatttctttttgagcccgagattcactcaaccttctttgacaaatctttataggtgtatgattatctttgtcacactttcctaccccaaaactgggcataaaccacagaaaatagtctttttattcctttgtttccccatttgggaggacccctttccacagggacctgtgaggggagaagaaagggaaggctgattcttggttcacacaagcatgctcatgaatgcccaggccctagggtgagtccgctgtctacccacacactcagagctctccaggaacttacttgagtctctcctacccccacaaataaatgtacccacctgtgtgctcagcaataggtgcacataacgtgcacacagggcatcagtcaggattgcgtgtgtgactatgcctgccccactggacctgctctggcgccaggtagtgtcgcgggcgcttcctagtgcgggcactcatcctgccgctctccggtcggccatttattgtcttgtggggaagggctttcgccaagaaacttggtctgggttagtgaaataaaatactaaacaattactatatgtaaaattttaaaaccagcatattaaaataaactaaggaactctctgtcgtgggagaaatccacaggaaaaggaagagaaggagttagatgctggcgccgagttcctggcggagccaggcggcggtgactcctcaggctgagcggaatcgccatccaggcgccggaaacgacccgaatcccaaaatccgtggaagaaaattgcgctgaaagaacagagccaacgcccccgtcctgccaagtttggcgagacggcaagttggcttcaggagcacaatgccgctaaatgatgcctaagagaaaaattctcccagagaattgtctgggagcaacagcaaagacatggtgtttttattctcttagacatggtgtttt

SEQ ID NO: 7497 - DNA, 1810 bp, mus musculus
agggttgagctttgaaacaactgatgagagcctgaggagccattttgagcaatggggaacgctcacggactgtgtggtaagatttggaagggacaaagcagtaaaacagccgatttccttggcttatcttggtgcagtcttctccgaatgcttatgaaagtagttaatagcattatagttagagctttgttggcaaaggaacgtcctgctttgattttaaaagctacctcttaaatctagggtagtgggaaactggacgactttttataaaaggctggtgtaaagtttcctattgccctattcaaagttaaaatgacaaaagcttttgcggtcagactttgtgttacataaattaacactgttctcaggtaatgagagatccaaacaccaagcgctccaggggctttgggtttgtcacatatgccactgtggaggaggtggatgcagctatgaatgcaaggccacacaaggtggatggaagagttgtggaaccaaagagagctgtctccagagaagtgagtgggttttttttcttcttcttcttaaacttacttggatatgtgctgctatggacttaagattcgggagttttctaaacttaccaaaattttttattcgagtataggctttgctaatctaaacctatggtttttctcctattaggattctcaaagaccaggtgcccacttaactgtgaaaaagatatttgttggtggcattaaagaagacactgaagaacatcacctaagagattattttgaacagtatggaaaaattgaagtgattgaaatcatgactgaccgaggcagtggcaagaaaaggggctttgcctttgtaacctttgacgaccatgactccgtggataagattgtcagtaagtatcagatagtggcatttagtaagggttccacaatctgtatggcattctaaaccctgataccatgttgtatctatgttttttttttagttcagaaataccatactgtgaatggccacaactgtgaagttagaaaagccctgtcaaagcaagagatggctagtgcttcatccagccaaagaggtatgcttgttgcttaattaaaccttaaaggtaactttgagttactccagtatgaatgatttaatgcttaaacttcatgtcttaaggtcgaagtggttctggaaactttggtggtggtcgtggaggtggtttcggtgggaatgacaacttcggtcgtggaggaaacttcagtggtcgtggtatgtatggtttatctacatgtagttctgacttctcaccatctttgctatgaagattttacagtacgggaactgcattcagaatgtcactttaagtccaagtcatacttaaaacttgaaactttttcttacaggtggctttggtggcagccgtggtggtggtggatatggtggcagtggggatggctataatggatttggtaatgatggtaagttttttaggaataagtagagaaaaattcctggcaacctggatctttagaataggttagtagagactaaaattctggtgcatgtcaaactcaactttgcccataacacgcatgctgtgagcaggccttcagccgttacacttgcacaagttttcattgtcaaatacttttgtcttattgagaagaattgtattcttgtaggtggttatggaggaggcggccctggttactctggaggaagcagaggctatggaagtggtggacagggttatggaaaccagggcagtggctatggcgggagtggcagctatgacagctataacaacggaggcggaggcggctttggcggtggtagtggt

SEQ ID NO: 7498 - DNA, 1810 bp, mus musculus; identical to SEQ ID NO: 7497

SEQ ID NO: 7499 - DNA, 1037 bp, mus musculus
actctgggcaagtaaactagaacttcaaaatctttatctgcaaaatgatgagaatgatatcttgcagggtttttaaacactaaatataactggcataatacatgtggcatgaggcctggcaccttattggtgtttaataatcggtagtcattccttttttcttcttcattatcgtcatcaccatcattccctcctatgtgggtgagatctccatcacactgctctggtggaaacagagactaatgcagaggtggactattgagaaaaggtgacccatgggagtagaagcagtattgagtaatgattaaaaccatcagaaggaattactgggttgcagtctggagtgtgtgactcagctggagtctgagtacaaaggtccccaagcagaagcatcagggacagacagggggcagctgatactgtgcccacagttggcacagtccaacaagatattcaaggataaatggggaaaaaaaaatcagtcctgagagagagcactgctgaaccatgttgccctgtttctgagcagcagctgcaagcagagctagcagctgcagctgttcttaggagcctggattcccagggaaagtgggcatcaggcaaagcaaaagggaaggagaggcaagcacagggtaataccttgcgttctcaggatgggagattccaccgcacagaaataagggaactgggcaaagagggaggtgtgagggatgacaacgactgggcgttctgtatgtgaaatgatgccgattattgaaagcaagctgatggatccatagaaagagctagactggggatcaggatctttctagtcacttatatctttagagtgctacataaacatggaccaataattactaacatgaagtgagtgctaagcaagtacaggaaacgttcttaatcttttacaaacgtgaaactgtgtaattcttactacaatgttacgacgtctgaggcacacaggggtaaagcaactctaccaggctgtataaccagcaagtgtcagagctgagatataaccccagaagtgtggcttc

SEQ ID NO: 7500 - DNA, 1075 bp, mus musculus
cttattttgattttactgtggttgcttctaaatgtaaaactattctatcagatgcactgccaagaaaactccaatttgtatcagcgtttttttgtctgttttttcccgttggcaacttcagggaccaaaagttgaccaggcttcattataatccactcatttttctcagataggtcttggctatgaagagcgaactgaacaggaattactcagaggtgacagagtttattctgctgggattcagaacatcgccagaagcacagattctcttattcttcctgttcttgcttatctacatggtcattgtgttgagaaatctcagcatgttagttgtcattgaaatagactccagacttcacacacctgtgtatttctttctcagaaatttgtcctatttggatctccgctactccacagttattgcttccaaaactgactactttattttccaaggaaaagaaaatttcttacaatggttgagcaacacagttgtttttctttgctctctttgttgggactgaaggtttttttctggatatgatggcatatgatcgcttctcagctatttgttcacctttcttctatactgtatgtatgtctcagcaagcttgtgtttgtttggtggttggctcctctatctgtggatgcatcaactccatgatacaaacaggttttaccttcagtttgcatttctgtggagaaaacagattagagcactttttctgtgatgtctcagtcatgatcaagatctcatgtattgacatccttgtgaatgaggtagtactgtttattctctctgctctcatcaccaccaccacaactgtcattctggcttcctatgtgcatatcctctccactgtcctgaagattctctcaacccacggcagaaggaagactttctccacttgcagctctcacatcactgtggtgagtttattctatggaactgtattcttcatgtatgcccaacctggggccatctccaaagagcaaggttatagttgtattctaaactcttgtcatccctatgttaaatatctgatttatagtctaagaaataggtgcaaaatgcttt

SEQ ID NO: 7501 - DNA, 1228 bp, mus musculus
ggcttctgtttaaatgttagcatcataattttttatttatggcctgtaataatgtattttcagtgaagaaagactgatatttaacttctaataatatttgttacttgaatgaaaggcagattggaaactacagagggttgctaatggggaactcttaaaattttatagattattcattaattatgtatattttaaaaatattatgcctatcttcaacagttttattttttttttaacattctataggaggaacatacattttctcttctaaaggggaaaataaagatcagcaatgaaaaactacacagtactcacagaattcattcttctagggctatcagatgacccagaatttcagattgtgatttttctctttttaattatcatgtacatattaagtgtcactggaaatttgaccatcatcactctcaccttggtggactcccatctgcagacccccatgtacttcttcctcaggaacttttctgtattagaaataacctttacaactctctgtttccctatatttctggccaccattatcaccagacacaaaactatttcatacaatagttgtacagctcagttgtttttcttcatctttatgggtataactgaattttaccttctaacagccaagtcctatgatcgttatgtggccatctgtaaaccccttcattatatgaccatcatgaacaagagagtctgcatattgcttgtcttttgtgcttggttggcaggttcttaaatatcttccccccagttattctttttctccggttagattactgtggctccaatgtcattgatcactttgcttgtgactatttctccctattgcaattatcctgcatagggaggcacatggctcctagaagtgattggtttttactctgcaatagtaattctgcttttcactttggcattaatcattctatcctacatgtttatcattaggacaattttgaaactcccctctgctagtcagcgaaaaaaggcattttctacgtgttcctctcacatgattgtcatttccatttcctatggaagctgcatattcatgtacgctaatcactctgcaaaagaaagagcgtcgttgaccaaaggagtagctattctcaatacctccgttgctcctatgatgaatccatttatatacaccctgaggaaccagcaagtgaagcaagcctttaaggacaccatccaaaaggttatgtttttctctggt

SEQ ID NO: 7502 - DNA, 1009 bp, mus musculus
atttttaaaggaggattgggtagatatcaaagaacagtgatgaaaaaccacacagtaataagaacttttatcctgctgggactgacaggtgacccacacctgcaagttctgctttttatctttctatttctcacctacatgttgagtgtaacagggaacctgactattatcaccctcacattggtggaccaccaccttaaaactcctatgtacttctttctcagaaatttttccttcttagaagtctcatttactacagtctgcattcccagattcttgtacaatatatcaatgggggacaataccattacctacaatgcttgtgccagtcaaatattctttgttattctctttggagcaacagaattttttctcttggcagccatgtcctatgaccgctatgtggccatctgtaaaccccttcattatgtggtcatcatgaacaacagggtgtgtaccttattagttctctgctgttgggtggctggcttgatgatcattgttccaccacttagcttaggcctccagctcgaattctgtgactccaatgccattgatcattttagctgtgatgcaggtcctctcctaaagatctcatgctcagatacatgggtaatagaacagatggttatacttatggctgtatttgcactcattatcaccctagtttgtgtgattctgtcctacttgtacatagtcagaacaattctgaagttcccttctgttcagcaaaggaaaaaggccttttctacctgttcatcccacatgattgtggtttccattgcctatggaagctgcatcttcatctatatcaagccctctgcaaaagatgaggtggccataaataaaggagtttcagttcttactacttctgtcgcacccttgttgaaccccttcatttacaccttgaggaacaagcaagtgaaacaagctttcagtgactctataaagaggattgcatttctctcaaagaagtagaagctgtgatgaattggcataaagtgaatga

SEQ ID NO: 7503 - DNA, 1601 bp, mus musculus
tagatacaaaattccaaagaagtttgtgtaaattgattttattttttaataatgtctacatttgctgcatatagctatgacttttgcaaatgtgtacaaaacagtcatgatgaaaaataaaattctcttgtagtgagattaaattatgatatatttatatttttaataaaattcagttactcttaatagtattttatcaaaggaaatgattaaatcgttatgtttttttaatctctatttttttaataagagtgaaaacaactactaatgaattcagaaattgattatatattttagagtcatattttcaactaagaaaatggtgatgcacttcatttattttttcagggatagagtctcactctgttgcccaggctgggttgcagtggcccaatcatagctcactgtaacttcaaaccctagttcctggactcaggtgatccacctccagaagtagctagaactacagatgcacatcaccagacctggctaattgttttgaattttttttgtagagattgttgggacgggtgtaggggatgtctcattatgttgcataggctggtctcaaatccctggtctcaagcaatccttccacctcagcctcccaaagcactgggatcctcccaaagcactgggattataggtatgagccaccacacccagatttgttttactcttgagcaaacctttgttgttaatttgtaaagcagctaaattatttccaaataaacttaaaacataagaactgaaagagaaaaaagtaaactatattatgtaatatacaatattttttcttctctcaaaacatttaattaaatttcttctgaattaaattttgtcaatcaatatttttgcctgttctgaagtgttatttttattgttgaatatgtaatgtttttcttctacatgacttagcatattatctcaatgtaaattcaagagcccccacattcatctgtcaatgttaatcctttggcaaattttttctctatcatccttcttagtatatttcttctcctcttgtagtaatttttcagtcaattatttccaggcttttaatggaaatggtaggtgttagagaaccacagaaaacctgcttccttgatctcatcttattttgctacttttcattttgccaatgagtctgtgttctaacatatatattttctgtaaaatacattaagcatttctgtaaattcaatgtgattatcagggtacataaagcagacttttattcttcaaccagagcaaatatggcaatcaataagttttcattgctcacacatgttggtcaaaataagcagttccaaaagaaatattttttctatttttaaaaatgcatgaacacaatgaagtcaattctccaagaaaaatacctttaaccttgttatgtttgattgacttctaaaattgttcaggttttctttatctagatggaagtagaacaaacttcattccttccaaaattctacagtgcagtgttggtttaaattattaaagcattagaaatgcaggtgcaagtgagtgcataaatgaaagttcacattcttgcatttagggattcataacatggaaaatgaggaattattaatgtttta

SEQ ID NO: 7504 - DNA, 1045 bp, mus musculus
aatcctgagagaatgtacagctgtggaaattgggtgaaattctaacaaggagacgggataataacttcccctcttttttccacttctgctttcctactcccaaccaagagctgggatgtttgtgtctaagttctttgggggctatgtgcctgagatggtgctcacccctgatgatcagcgcctgctggcccatgtcaccctggagctccagcactatcaccagctacttgagaaggttcggtaagtaactgacacctctgtcttttctgctggcatgttgagagcctccttgtattggtctctgtaggacattacaccttggcctgcttcctcccttcccaggatccgggatgccttgcgcagtatcctcaccatatctcgacatggcaaccaatatattcaggtgaatgagccctggaagcggattaaaggcagtgaggctgacaggtaggtaagcggggagggttggctaaaggcataaagtggcttgtaagctgtatcctcctggaggtcttgactaatgtctcctcttcctcaggcaacgggcaggaacagtgactggcttggcagtgaatatagctgccttgctctctgtcatgcttcagccttacatgcccacggttagtgccacaatccaggcccagctgcagctcccacctccagcctgcagtatcctgctgacaaacttcctgtgtaccttaccagcaggacaccagattggcacagtaggtggaagagccagcctctcttaaaattgatactcttgccatgcagcttttggagtgggtgagagaagacctaacatctctccagtgttactttggtcatgggactcctaagtttctgatataaagtccttggtagtcgttcacaagtccggaattatctgtacatcttcattgttcttcatgccagaaaccagaacctggcacacaaaactaactggtaaacagatatttgaagaaacactgtgatcacctagtctccataatgctagcagatagtgggcagggaaaatacaggaaagccatttcctctttgacac

SEQ ID NO: 7505 - DNA, 908 bp, mus musculus
gccccatgtaatctggacgttgacctcccgtgcccccttttgctttccgttaggctacagtggtaaccacagtactgtctttttgccactaggggtcactgtcacatgtccaaagaagtgagcttggccgctgtagattagaaccacaggggtggtagactgcagatctatcaggagaccctagggggccatctcaaccccacctcttcctccaccctgaaataattttggatggataggtgtttttggaactaagacatctccagttaaggcgatgtttgcttcacgcctgcacctgtgtcccatcctcttcccatctgtatatgccaccagtaagctttaggaaacgccccacgaaatcagtcagcgctcccctcccatcttgctcagtggaggtggcaaagcccctctttttcctcctctgtccccaggtgctctcctctagcagcacaggaaccttctttgttcttgtgtgtcactgggtttctcaccaaggttgctttagggcccagaagtggcacagagaacatggccagtctcttactgggctgcatctaagctgagccctctccaggggtttcccagaatagtaaaccaggcacacacaggcagaaaagtctgagaagcagagaagtaggaatgcagaagaggagttggggagacctaggggtggaggtgcaagcctgggtcacggggggcggtggtaggggggtctgcttgttggtattaaaggaacaggacagtaaaccaaagtgtgtgcagatgccacctgttcctgttctgtgactgagctacaagctgggccctcacaccctctttctctttctttcccagtttctaagagggactgaggcctcttctcagcatgctgcaaacctgtggtctctgatactaactccctccccaac

SEQ ID NO: 7506 - DNA, 1457 bp, mus musculus
aaagagctaggaatggtccagtaactatgccagcaatgtggcagactaagtgggagagaaatggcgtagagtggggaagaaagtgggtataaataaggcatgggaatgttcagctcacaggggtgggtgaggagttggggaagggggtatagatttagctgcttgtgttgactgacatttagctttacccatcccaacacaagatccaaaggctaaagcctggcaggaaggccacctcaaactcaagtaactgataagtatcccacagggaggtggagcacagagaaggaggacctgtcagatgtggtgtttgggagttgaggcaggcaatgtccaatcattctcttgtagatggacgatgtagacagggggctaatctgtatggctagggctgacaatgactagggtagagcgagacagtagtaagtcagataagagagtccaaattgtctacaagtaaaagtgcttgatgccgatattgggaacctgaatgtgaaaccagaggaatcatagcaccaaatatatggaagcaagaaaccatgggtccagacaggaggctgaccctggtgtgtccctgagacacagagtatgtgacccagctggattctttgttttttttttgtttgtttgtttttgttttgttttttttgaaatggagtcttgctctgttgccaggctggagtgcagtggtatgatcttggctcacgacaacctccgactccatgattcaagcgattttcctgcctcagcctcccgagtagctaggattacaggcatgcactaccatgctcacccagctggattttatgtgctctctttggagtgacatctggggttttcagccacacttaaagggcaggggatatggacaggcaagtgattaattgtctccagcaaaatctgttttcaggttccagggcactatctagagcatccaaatgctgctgcctaaactgaagtcccaggtgcccagaaggtacgttctctgggtggattttttctggttggcctggagaggtcatggactacttcctaaaatgggccactaaagaatttagccttcgtgaacccgggaggcggaggttgcagtgagccgagatagtgccactgcactccggcctgggcgaaagagcaagactctgtctcaaaaaaaaaaaaaaaaaaaaaaaaaaaaagtagccttcaatagtttttgacacttgaaacaataattactgcatttcttgtatggaattttataccacctttatgtttactaaatgaagctcagtcctgaaatattttctgcccactttctgaggagaaaataatagagttgtatcctttataagtctatttcaaaaaggaggctgcaagttgctcctggggaggcatggcaaagacaggttctgtacctttgtggccacagggcctaaatattagtgagatccatttccagagaatgccaacattaatac

SEQ ID NO: 7507 - DNA, 2657 bp, mus musculus
tagtgcttatgatttacttagcatgtgtgtgctgagaggtcaaccaaatattttacaaatgtgaagtcagctttagctctattttacagatgaggcaaactgaggtttacagaagagcttagtgcagttgcaggggatttaactctggtctgtcttatacaagcccactggctaccttatactacagtttcttttcttttttttttttttttttagtatttattgatcattcttgggtgtttctcagagagggggatgtggcagggtcataggataatagtggagagaaggtcagcagataaacacatgaacataggtctctggttttcctaggcagaggtccctgcggccttccacagtgtttgtgtccctgggtacttgagattagggagtggtgatgactcttaactagcatgctgccttcaagcatctgtttaacaaagcacatcttgcaccgcccttaatccatttaaccctgagttgacacagcacatgtttcagagagcatggggttgggggtaaggttatagattaacagcatcccaaggcagaagaatttttcttagtacagaacaaaattgtgtctcctatgtctacttctttctacacagacacagtaacaatctgatctctctttcttttccccacatttcccccttttcctttcaacaaaaccgccatcgtcatcatggcccgctctcgatggtcactgtctcttctgagctgctgggtacacttcccagacagggcggcctggcagaggtgctcctcacttcccagacggggcagccgggcagaggcactcctcatttcccagacggggcggccgggcagaggcgctcctcacatcccagacgatgggtggccgggcagaggcgctccccacctcccagacggggcggctgggcagagacgccccccacctcccagatggggtggccgggcagaggcgccccccacttcccagacggggtggccgggcagaggcgccccccacctcccagacgaagggcggccgggcagaggcgctccccacctcccagacgaagggcggccgggcagaggcgctccccacctcccagacgaagggcggccgggcagaggcgctccccacctcccagacgaagggctgctgggcagaggcgctccccacctcccagatgaagggtggccgggcagaggcgcccctcacctcccagacgggggggccgggcagagacgcccctcacctcccagacggggcggccgggcagaggcgcccacttcccagacggggcagctgggcagaggcgctccccacctcccagagtaagggcggccgggcagaggcgctcctcacctcccagacagggcagccaggcagagacgctctccacttcccagacggggtggcggctgggcagagactgtaatcttagcactttgggaggccaaggcaggcggctggaaggtgcaggttgcagcgagctgagatcacgccactgcactccagcctgggcaacactgagcattgagtgagcgagactccgtctgcaatcccagcaccctgggaggctgaggtgggcagaccactcgaggtcaggagccggagaccagcccggtcaacagggcaaaaccctgtctcctccaaaaatacaaaaaccagtcaggcatggcggcgcgctggcaaacccaggccaaggcaggagaaccacgggagcccggggcagggaggctgcagcgagccgagaccacggcagtacaatccagcctcggtaacagagggagaccaaataaagaaatgggggagagggagggggagggggagggggagagggagagggagagggactacagtttcaaattagtgtttttgtgtagatattttgaatgttggaaaagtaaacctatagtacaaaaatgtaaaagctaatggagaatggtgtgtttcttaggcacatttaaatatgttatgagactacctcaattgaccagtctcctttattcttttctggcaggggagtagctatttgggggcagttttcaaagaatgttgaattatttaaacacacagtactttgtcaccaaggcattcctatcagtgtctgaagacggaaagggaaggaagatgagtttattccatatggttggataattattatcatggaagaaaacatggactaggagttcatatctaagaactgctcattttttgactttgtatgtgtcacaagttttcagaatattggtttcctcatctgcaaaacaaggaatagaattctctgattactttctgtgagtaataaatggatggaatgacgtaatgtgtcactttggatgtcttagtcacttgaaataatattagactttcacataattatatattttttatatctgataaagccaaattagtgtttctgaattgctcgtgtctaaatgcctagtgtccttttgacttttctttgagagcgtttcatagtggtaatgttaaacacaaatcggaaatcatctgtgccatgttatatcttctgtccgctctaaagaggttgggattatgtataatcttcaaattcccagcagctattggttcctgctacatagtagacacttaagaaatgctttttaaatgaataaatgaatacatctaagaaagttgagctttctctgctgttactgga

SEQ ID NO: 7508 - DNA, 856 bp, mus musculus
actcctcaaaggtaacatgcaacttagttctgttatatgagagtctttttctttaatgtactggaaaaagcctatgtgaatctgttgatagaatttaaaattccaggccgggcgtggtggctcacgactgtaatcccagaactttgggaggccaaggcaggtggatcacttgaggtcaggagttcgagactagcctggccaacatggtgaaaccccatctctactaaaaatacaacagccaggtgtgatggtgcacgctcgtaatcccggctactcaggaggctgaggcaggagaatcgcttgaacccggaaggcagaggttgcagtgagctgagattgtgccactgcacgccagcctgggcaagagagtaagactctctctcaaaaaaaaaaaaaaagaatttaaaatcccaatttattttctaactcttttattggatgtatttagaacacagtatacctatagtatacctatgtgtttattatgtttgtaaatggtaactgacatttaattattagaagtacttacccctgccttcctccatttttattcatggctacttgagaaagcaaaaggaaaaaataatagttatcagtagtgtcactggaaagaagagaggagggacaaaactgagcagcagaattcgtatagacatttacgtttaaattctaaaagcccaattgagatgttcagggagggtttgttttgccctttggcctcatgaatgggtttcatgaatgggcttcagtggcttataaactctgtaaaattctattctaaattttgtacatttattttgttccggttaattccagaagacatttcaaacatttttcttacaccatataataaaaa

SEQ ID NO: 7509 - DNA, 695 bp, mus musculus
aatggctgactcatgaacacggaagtccagtctgcttcaaatcatgataagtctgctgtactacttatgctccagagtcccctattgatcaggccaaggctagacttcattagaggatatcctcgtttggtaatttgcactttcctatgtcacttccctttttctgatataggtttggcctgaagaacacttcctcaataagtcccttgtcctcagtttctgacttaggctctgcttctggataacccaacataaaatgaagaaaatttgagttcctggccatacttctggttatcacacctaatgatttctgatcttcacaatgactcttcgaggtagggattactaatcccattttatgaattattaccttaataataattcaggtacactgagccagattcagcgaaaaaggtagggtgcagaaagatagttcagatagatactgaactgcttcagtggttcctatggaggaactgatcaaggctgccttcagcaggaaggtacttggcgacccaactccagggccctaggctctaacttctcacaaaccagttccttcagagggaaggcagaggtgagaggacagaagctgtatcttttctcaatccatgttacatggtcactcttctaaacctttgaaaattaatcttagtcatttccgatgtctggcaggtggaatatgttaaatatgt

SEQ ID NO: 7510 - DNA, 939 bp, mus musculus
tgcctaatttatctgtcatcagcagcatcctagccatgcaagaatgtggctggttttcaagataataataaggtatcttggttactgaactaattactaaaaatcccaagaaatattgattgacaagtttggtagatatttagaagggagaataatgtgtttcattgattcccattaatattcaattatggcattaacctatcattaagtgtgtttctgtattccttctctagggttctctaaatgccatgtggtatgctgaggttggttgcttttgagtttttaaaaactataatcatagattacttgtgtaatttcagttggaataaaaagtaggtgtcaatatttttcttagctgctatgaatttctccctgcctgctggtctgaaataaaataactgcatcatgctttagcttgattgttttagtttttgcttaaatgcacagtctgatgactgtatgtggctaattttgccttcctttgtctttggtccctggctgtatttgtgcaatgtctttgatatgctacttggtgctgtttgtaaagaagcatttacaatagtatatgatgtctgaactctcctgaataggttaaagaactccgagaaaaggctgagttttataggaagcgagttcaggggacgcatttttctcgggaccatctgaatcagattttatctgatagcaactgctgttgggatgtctcctcaaccacaagctcagaaggaaccgttagtagcaacatcagagcattagatcttgctgggtgagatattctttgtggatggcaaaaaaagtttgttgaagcttatgtagatcatagaatgatataggaaaatgacctgactactcaaaatgtgtctcctagtcgaatggaattgtggcagccatttatttcatttttattctcagtgaaaaataaagcaatgtagattgctt

SEQ ID NO: 7511 - DNA, 556 bp, mus musculus
aaaaggcaaaaaatgtaaaaacatgaaataatgctatgctactcactaagtttctcttgtttggaaaaataaatacattatttataaaaatatgttatttacgttacatgcaatgggtttattattgttattttaaaatgaatgaataaataattatttttaaaatgtttatagcatgtttggttgggcgcgatggctcatgcctgtaatcccagcactttgggaggccaaggtgggcagatcatgaggtcaggagtttgagaccagcctgaccaacatggtgaaaccctgtcttttctaaaaatataaaaattagccaggtgtggtgacgggcacctgtaatcccagctactcaggagactgaggcaggagaatcacttgaacccagaaggcgggggttgcagtgagccgagattgtgccactgcactccagcctgggtaacagagcaagactctgtctcaaaaaaaaaaaaaagaaagaaaaatgtttatagcatagttaatatccacagatataacccaaataaacaaaagatttttgagatcctcaattatt

SEQ ID NO: 7512 - DNA, 942 bp, mus musculus
ccttatttttaatatggagccagagaagcccaaaaagcttaagtgatttcaacattcattaaccaacagttttggagctttcactatgtagcagatatttactagttggtgagtaggcaaatgttataagttgggaagtagtggagctgataagtgaacacaaaccctctagtttctattctattatggtaagtgtgagtgtatgtctccacactcactgctgctcttgatctgcaattgttctttggtatttccaacagttccaagggcagcattgcctttaactccattgactctagtagccatcaaactttatcttcttttcccatttgtcccaggaggatcctgggagtgtggaacgaaagataaagaaccttaagctgagccctaagtgccctagactggctaaagaggtaggtctggaggtcaggagtgctcttaaaccccagggcttgctgatgctcttcccaggtctgagtttccaaccccacccagagattgttggtttgagaatcagcatagtttacctggctgaacttcgcgttattggcatttctgtcccccagaacagtaaggaatttggttaccctgggccatggctggggcactggttagcagctgcccctcctgctcattttgcggctctatttcaacaagacttgaaaacctttgtcttcagagaactctccggctctaagcttttgtgcttttgtttggagcagcctgttcttgtacttgtagtttcaggtaaggcatctgatgtgtaattaaaggataaacacagagagaaataaaagtattttattacttatatgaagtgaagtaggtgcaaataataaaaagtgcaaatgaatttgagagaggaattgtgcaagcccttaaggggctattacccatctttaaaaaccaagagttgcttaacatgttactactttgtatttt

SEQ ID NO: 7513 - DNA, 1058 bp, mus musculus
tcatcttacagttttgctaattcccatggaaaaaaaaaatccccatgaatttcaattctagtaaactgttgaaacagcaagcacctgggatatctcttgggaaagcacaggctgctgcagtagacctgggatccgcagtgtctctagaaacagtaccaggcggttacctccaggtgactaaatgaggcttcatctcagcacacaagcttagaaagctttacgattagtcctgcttgctatggtaaggaaataacacaaagaagagtgcaaatggaagtcgacttcatcacaacatgcagtcaatttccaaacaggtgagataatctctcatgataggcagagggtcctcggtgtaatgttaagagcttaggagggtaaatattaagatttatgtctatatctgttcatgtaaatgtagaaaaatgagtcagcatagaacttatgtgatatctagggaaatatctttagcctaaaagtctgaaattaaaagaaaatgctatgcagtcattcaaaatatcttaacagtaaatatctaccataatcataaggagtttcttgtaaagttcataatcatcctaaggagagtagaattataaatatgttcacttgaacagaactcaaaagttcttaaaagacattgagtggagcagatattttctttgttttgtttagtgtggttcccacactgacatcagggaaaagatgactacaactagaaacgaaaattgagagagggttacagtgggttaattcactaaatctagacatttttataataatgacatctcggataccctgtgtttgtgtgcagacttcactaaaagactagtcagtatcttctgttataattgcatgtagggtccagtgagtgaaagtcagtgctatgagacatcatcagctaaattcccagctggggaactcagctttgttgttttttatcagtaaaccaagaaccttactctttaatgttggcttaaatatggctcttatttaaaatgatgtataaatttattaatctgtatagaaagtgctatcctgaggtgaaaaacctcgcccaa

SEQ ID NO: 7514 - DNA, 1058 bp, mus musculus; identical to SEQ ID NO: 7513

SEQ ID NO: 7515 - DNA, 1174 bp, mus musculus
actattattctgctgtctgaaatttctctgtattgatgacctaattcttcaacatatttccaatcaatttgtgtgtttagtactaactgcccatgtggataacagggcaaaatgcaaatgatgggatcagaatattcttgggaagtcagccagagaaagataaacatcacatattctcgctcatatcagagaactaaaaaaaaaaaaaaaaaaaaactggaaagttggggacctaattctaataaatttcagcatttggctattaaagaatgtatatacttggtgtcaaatgttcctgattcaagatatgctaggcattaaaataatccagtgttacaaaattaatctggtcaatatgttctacacccgactaattgttagaattaactgaggtacttcttttaaacatacacgttcctaatttacccctttccatatctgtctgtccctggctagcaatctgtcactttatagtctcccagcatctctaatatttttaaagttccttcagtaattttaatgtctatccacaaaggtttgggagcctcctggactaagccatactagtaggaggctgttcacatggatcatgcatatgaccgaatcatcaggtaatctgatggagtaggtatgaatgtcagtctataattcaacacaggaaagaaatggaactttattttctgtaattcaacttattttctacttttgagatgcccatctaccacagagaggagaataagtccaagttagcccaaggtgtccttgttttgtcccaggatgggtctgaagtagagagatagagaggcagttttagtgacaaggcatttcaagtggaaggctgttgtgtcacctgcagaagcagatgacataacccacccaaacgcatgcagtttggatgtcaatactgatgatgccacacacatacatcaaaagagtataaaaatgtttattaatcacataattgaagtatctggggacaacagggcaggcctctcaagaaagtctgaaatgaaagagcaaagaaaggagactggccttggtttttatgatagctaaggagtggggcaggggacaagagttcctacagggcaggcgattgtggtttggctggtaccaaaattgaaagcatgaggctttcttatcagctcgtccagatgtggggcagaaggggagg

SEQ ID NO: 7516 - DNA, 742 bp, mus musculus
tctactctgttggcatcctgtaggcaccagctttgcctattcacattttcctttcacgtagcttgtgtacccattttaaacacagcaaaagatactttgagaataccttctgcactacttttatcttttattttctttccttttcttcttaccttccttcctactctcctttatttttggaagctgcattcaccctactggaagaacctattctgaacataaagtaatttgcctcatcctgcttatccccatgacaaatagtttaagtagcatctggtgagacaagagaaaagagtaactatacatttacccttctgcaccctcatcttctacccagctgtctctcctcccttttcctctttatcaatattttccccttctttggaccaactatttaaactgttcttaaaatttattaaatagaagtggacctccagcaatttttcttgctcctataatctaaagtattcaaactcctcacttgaaacatgaaagaaaatcaggatgtaaacgttcccctttttaaacttttttattttctaaaccatcttcctctgcataaagtcagtctgccactctaaacagcacttgtcaggaatgtgtgaagttattaaaagagaaggaactttagaagatctaaattcaaattaccttgactaccattctttagtaataaaaggggagatagaaagaagacagaaaccaccagattttctaaaatctccagcaatattcatccatc

SEQ ID NO: 7517 - DNA, 473 bp, mus musculus
agcaatatcagaaagctgccaaagagagggcagcaaagttcagtgacatgagttttgtcctgtctgtgctgatctgcaggccaaaattcttcagtgttatcaccagagcacacaccagaccctcagtggctttgcactagccagcgtgtaagtgtgctgtgttcattatgccaaacagaacatgcttgagaagagatcataatatcaacttctggaacaagcaaatctccttcaacattaattccagaggtagaactttttttattttttcctagcaagaaaataacccatttaaagagaataccattaaagagaagcaccagagggtgaattctgaacaaattatatcacattttgatcagtaatgatttgaaaagacagccctcttgacctttttgcactttcaacttctactggccataaaaactttctcttctaaccaagctccttcatttcatgaaccttcactctaa

SEQ ID NO: 7518 - DNA, 370 bp, mus musculus
gggattagaaagagatttatgtttgttcatagggcacttcagggaacagttaagactcctaatggaaagtaaagtagaaatgttttggaggcatgcactcacctgaagacctaggagagccacctgagaatgcaaaggaagtgggaggctaggcgaggttgattgtactttgcagagctgggacaggaggactgggctgcccaagaccttgcataatttgaaaagagtagggcagcctgactgagcaacagaaatgctatactggcgagcagagtttgcctaagggggtgttaagcagctgagcaaggaaatctgctgtgactggagactgcaatgtgggcaatccacctgtgcataatcaatttttggt

SEQ ID NO: 7519 - DNA, 1537 bp, mus musculus
ttatttgcttccctgtgatcattaattttgttgccaaaacaagaattttaggtttgcataacatataatttctaaatagtgtgcacacattactttacctctccctcacaacatccatgtacagtaggcagagtagagcttattttctaatttatttactgatcatgaaaatgagacttagtcaatctggtcaaaatccttggctacaaagtggaacatttagaaccaaccacaggccttttaatttcataacataggctcttccccaacacattctataaacaatttctagcttctaaagttgtaaagccatatttttgttttatcttcaccttggtgaggtattcgtaatttcaggatggtactaataaagtgaaagtagaaaacgtgaaatcagaatttttcaaattcttgttgtaaaatatcaattttgctccacttctcaacttcattagtctcactacaaccataaaatcaagacacatctacaatatataaaatacttggtaatataatacattatgagtatacaatacttagatatcaaaaagagtattttatctttcaatctaaaactcctaactttatgtaccagttgtagtcattttttccttagaaatatgttgcccaaacatcataaaattttagaaatgtaagcaaatcatacattataaaacatttagagttgtaagaaaagcagattgaaaaaataaaatgtaatttgtctttctagaaataacagtgactaatattttaaatgctattttaatatttaaaattattatcaaattagtatttcacattcatattttattgcatttttgtgtgttcatattatttataaatatttataatattttacatgtgcctatgcagccatgtacatataacaatgtttacataattagaaacattgttttattttatttatttatttattttgagacaaaaatctcactgtgtcacccaggctggagtgcagtggcatgattttggctcactgcatcctctgcctcctgggttcaagtgattattttgcctcagcctcccgagtagctgggactaaaagtgcaccacacctatcaaatttttgtatttttagtagagatgaggtttgaccatgttggccaggctggtctcaaactcctgacctcagttgatccgcccgccttggcctcccaaagtgctgggattacaggcatgagctaccacaccaggccagaaacactgatttaaatatggtctctcttacatagtatggcattgtaaaaatgtttctgttatccaattttttcaaatattattaagaattatttttagagtatacaaaaataccggagacttgacacagcaagactgacacagccgttccacagtggctgaaccttaaattgctttttggtatagaaatatctgatatactaaatccccatttttcctctcccatatctggtcatctagcatccatccagttttctcccctccaatgcatttcataaaaatagagtgctttttacattcatttttgataatacta

SEQ ID NO: 7520 - DNA, 1366 bp, mus musculus
ttttttactaatataacaccaactttatttgcatgtcaacatactactttaaaatattcatataatcatactactttgttgatacagatatcacatttatagctgatgatatgttagcagatatctagtggatagaattcccggattgtttcctcataaaaagaatagattcagctgattttgcctttagtctttttcctttactttttcccacctagaggtcacatggcttattagaagttggactagctgacttgcaaccagggatataacatgcacatgcttaacgatgctggattacaaagaaatgtaatatctacttgatcagttgcagtttggactgcttagctctgggcctctttgttataataaaaatataatcttattagggaaaccactgcagctagctttcttttttatgcagctacatttatttttaactaatatagtcatactagtatagtggcattgatagaacttgcacttagcactaataagtcaatacaatactgtttccactaaactatactgtctataagcattcatgttttagtggtcacacatttacataccattgatagtaaaaactaaaaggatgaaagaagaaatctttacaaagcaaaatttaattataattatgatatcataacataattataatcgtgatctcttatatccttctttttttttttgagacagagtctcattctgctgcccagggtgcagtggctgctcactgcaaccttgaagttctgggctcaagtgttcctccagcttcagtctccagagtagctgggattataccacatccagctaatttatttttattttttatagagacagggtcctgctatgttgcccaggctgatcttgaactcctggcttcaaacaatcctcctgctttggcctctcaaagcactaggattaaagtcatgaatcaccccacccagccttatatatgttttgaagaaaacagaagagaagaagttgagttttagaatagcttttctgtgaactattatacaaattcttactcccctgagtaaataatcattattttctatcagatgatgctttcctctttcttcccatttatctccttcccctagatcaagaacgctgaagtcactccagccttttcctgctccttaacttctctgatgatttaattatttttcaacccttttacttatttccctcagcatttttcaaatgtatggtatcctcttgaccatgcatagtcaggtcttcattgctaataaactaaatcattgcaattttattatctcttgtcttcttgctttccatattttcctgatctaatatattctgcataattttgcaaatcaaaaacctttctgaatgc

SEQ ID NO: 7521 - DNA, 1974 bp, mus musculus
gtacagttcctgaccacacaggccaaagaggcttataagtgtttgctaaagaatgctttcctgtactctacagtcacatttaatctggcatacaaatatgtccttatgtacagcagcataaatgaagaagtaatggaagatatttataattaatgttctttgctttgcttagttaatcttacaatgaatccattgtcaattataactgactgcagaaagaattacagtcagggaactttaaaaaaaaaagaaacaaagtgagcatttacttttctttatcccttttctccttattacatgtacttttaatcagtttctctgtaatgagaacatttaaaggttgaattagagtttatgaacctatgagaaagagggttttgaaagggataaaaattcaaaatatatttggtaggaagaatcaaatgatacaaagttcagtgacagggtaagacagatgaaaaaatccagataagaacttttaggctgggtgcgatggctcatgcggataatcccagaactttgggaggccaaggtgggtggatcacctgagatcaagagttcgagaccagcctgatcaatatggtgaaaccccatctctgctaaaaacacaaaattagctgggtgtggtggcacatgcctgtaatcctagctgtttggaggctaaggcaggagaatcgcttgaacctgggagacagaggttgcagtaagctccagcctgggcaacaagagtgaaactccatctcaataaaaaaacttttttagaaaagtataagtgcaaaatataaaaagaatcattttaagtaataaccagtaaaaggagataaatttgaagatgaaaacaacattttgtggaattttttcgtcctccaattttcatctctttcatgaattcaaaacaacatgatcaaaaccattgtctacatctgtcacaccaggcacactactgtctcttcagatgcaggttctttattcctcactaaatgatcttcatacattcttgttgctaagaaatcacaaagaaactcacatgctttctctctaggccaaacagctctttgctgtttctctaaatcctgcatttcaaattccaagccatgcaatcctaaaatattatactccttttgattatgccatttaattaggccttgcatagataattttatattttatgagaactttctaggctttggttttttcattggtaaaatgaaaataagacaaaggattttaatgaaaacatagtacttatatagtatataaatatagtaagttctatatcaatgttatttttaacataatattaatcttgtatagccatttatattttaagtatatgtcctccttcagcaaatatgttattgaattttgttgtgtttccagcatatttctcatgaaatatgttcaataataatttactgtcattttccatgtccaattatatgttccctatttttaagggatctatttggttctattttgagctttgtctctcttatctctctgtattataccaaggaactatgatacaaaagatcatcaagctgaatctcaaagttgcactccagctatataataaccaacaaagcaatttccttcgcatctaattttgtctccgtgtctacaatcatgtcttattgttcagacttttacatgctcaattctagaataagcaaaatctcacaaattaatgttagctccacagaattctagtttaatcatttgtagctaaattcagactataagcatgtattacctttttcttcttagaaggagaactggtaattgatgtggggccaaacagcacagtacagcagaaaggatctaaatttgggaattatactgaggtatgttattttttcatatatagcttttttgtcatgtaacctcaggagaagtactcagactctttgagtcttatttaacacattattgtaataaaatatttcaaatttgatcattattgtgaatactact

SEQ ID NO: 7522 - DNA, 318 bp, mus musculus
tacagaattcaggatcatcagtggtcttagtgtgtacaccagagaaaatagcaatgctgcctaagttctttaaagacaaaattagcctcacatatgtatcattttccagttaatttgaataacaccaattttgttactaactccttttttaagctgccaccttgttacatgctttgaaggaaaagagttaatagccctaatgcaaggttttgattttctttcatggatgctgctgaagaaagataattaataataatgagaggcttattaaattcaggaggaagtggtggcatacaaattattcctacctagtaaaaa

SEQ ID NO: 7523 - DNA, 595 bp, mus musculus
tttgagagaaagtcttctccagcagagtgctatgtggttagggattatctgtcttacttgcctttttatctgtgtctcaagcacagtaggaaggggcttaataagtatttattatatagaatttactgagaaaaattataattagctttattgcattgacttattgtgtatctcttaaagtataaagggtatattcatatttatactgattcaaaaagttttttttttaattaaagcaaaggtggacttctgagtcatggacaaaccagaattcttgcccaccagtgtaagttacgtttcttcacatttggactgtttaatgggcacatatataacatacattgactagttaaaaaacaaagcaaaattataaatgtagctatgattgtgaaccacagaaaaatctatatgcatatggatagcctgaaaattactataccaaaattaaaatagctgttgtgataagatggtagaattataggtaatacttctttggttttttattttccttaatatgttttacattttcctgaaaaagtgaaaatatttgtttatttggaaaattcagctatatgcattcattaaagagatgtgt

SEQ ID NO: 7524 - DNA, 862 bp, mus musculus
ttatagctagattattttataggtaacacaaaatattttccaagatgaagttctttgaagcaaagtcattaattttgttatataattgaatttagctcctactttttaatctaagttacttttagaaatataaattagaaagtcatatgaatagatagactccttattgaaagtaaagtagcattatcttgtaattgtacagtaagaccaaacgcaaatgtgacaaaccaggttaatcaaataaatggtcattgaaaattgctattaaatgtgtaagtggtgactaagagaggctgaggtaatgataattatatttccatagttttctgataaagtagatgttttggatggaaaaaatactgaggtgatgtttatttacttattattttattctttcatttaacaaatattgatttaaattgacgctttgccaggcactcttctattactaatactaaatttgtgaacaagccagataacaaaactgctctcagggaacttaaatctgggaggagaaggcagatgttaatacattataactatggtgaaatcaggtggatttaattgtgagaagaaaataagaaagaccagaaaatgatgtggggagacagggccaatttagattgaatagtcaaggaagtctcctttgaactgagatccaatgacaagatgccagccattacaagattgtgagtcctattctctaggcaaaagaaagagccaaatgttccaagggagagagctgatctcggtgtgtctgaaaaatggagagaaggcacattagagtggagcatggagaactggaggaaggaagtggagaagaggctagagcacatgcaaagtacaccacatagggccttgt

SEQ ID NO: 7525 - DNA, 862 bp, mus musculus; identical to SEQ ID NO: 7524

SEQ ID NO: 7526 - DNA, 982 bp, mus musculus
ttcacttacagggaaagaaaaggaacagtgccttctttacctatgccctgcatagcaggtaacaattacctaaaattcattgtggaggattggaatatccaagagttttagaaacagttatgctcagacacctctgtgtgaccctaggcaaagtgactaagctctccaacgtattgtcctttatacacaataattaaaaagagtcctcaaaacattatctctaagataagatatgaaggtagttatggtttttcccaaactattttgacttgttctttgtcagtagcatgaggctatattaagatacaactttaaatagtgcttcataaacagtggatggccatggaatcgaattagtggcttgtgattggcatttgaataaaatagaatagaaaaaaataaaggatgtaagttacatcaaatgcagcaaggattagtattgctttgtgaaactttgtatatttgtactgtgtatatgaaattgtgctgtaaaatgtatttcttaccgtgtgtaaaagttttccaaaaatgtttaaaagatgtcagcctacagaattggaccatctagtacaacatgaaaaccccctaaaaaataccactcaaagatagagagcacagactggcattcagcaccactagaaagaagcagtgcagtgatgatcttcagggtctgtgattgctttgggcagtcttcttgctgtcatgttgcagtaagtaaggtatctgagctgcagtcatcatgtgggtgtaataagtaaaaactcacacatgcccattcagttgggcacttgtgggaaaaaagcaaatagaatagtgtatccttatttagtatatgtaagagctgtgtttaggtatctttcctcagaattcatggtactatgatgactgcagagaaaattctctatatgtttcctctacaaacttttacacttgctctttggcatttttttgtcagcaacaagatggcaactgtatgctaata

SEQ ID NO: 7527 - DNA, 982 bp, mus musculus; identical to SEQ ID NO: 7526

SEQ ID NO: 7528 - DNA, 130 bp, mus musculus
tcattctttattttaaaattaaggcccaaagaagttagattgcctgcctaaggtcacacagctagctattttgagaaagtttctcatatcctagctacatttctgaaataaaaggaaatagtaatatcaa

SEQ ID NO: 7529 - DNA, 1073 bp, mus musculus
taaaggaatctatacagaagacaaaattgcataaaagtataacaaaacatggaaaggggtgaaattgggataaagtctgtagcattaacagtattgtaccaatatcagtttcctggtttcatataaactccagttacataagatattaccaatggggaaaactgggagaaagttaaatggtatgtcctgtttttgccacttcttttgactctaaattgtcatgccattgcactccagtcagggtgacaaagggagaccctgtctcgaaaacaaacaaaagattaaaatgtcatagaaacacattctgtgtaaaaataagtgcatataaaacaaacaaactggatcaccattatggttgctgtgaattacagatgtcaatgattctataatgcgtcagtcattttgctagtttttgcagtttatatggtttaatttgtggaatactctttaaaaacagaagttcaaagcaaataaatttatgtggagataaaaaggaatacaatatttttaaaaattaattgttaaatattttattttagccccaaaggacccacctaacaacatgacatttcagaagataccagatgaagttacaaaatttcaattaacgttccttcctccttctcaacctaatggaaatatccaagtatatcaagctctggtttaccgagaagatgatcctactgctgtccagattcacaacctcagtattatacagaaaaccaacacattcgtcattgcaatgctagaaggactaaaaggtggacatacatacaatatcagtgtaagaatccgtagcttcagttaattacccaaatgacaatgtcagtttatgaacttggcatttaaaaatattgcagtttgtgtacacatgacatttcccatatctttttgtgagattgtttgacatctcaacaaaaataaattttgagaactgaaattacctattttctgctataatacaagtactattaaattaaaatatgtaaataaccaagaagtttgcacaataatagtagaaactcagacataaaagagaaagaaaatgcacattaaaagtaaaagaacagtga

SEQ ID NO: 7530 - DNA, 998 bp, mus musculus
tacaattggaagagatttttaaatcccaggggccaaagttaccccctcattcttccgaattgaaatgtgcaaccttaaagaaatatctatgcttctctcactgtgcctttccaaacggattgaacattttaagactagttcttgaaaatagctaatacagaataattatttgttttgtacagaataaatattatgcattttaaatgcttaagaaaagacatcccatatgtttttgaagtcctccatattttggaataagccaaatagaaaattattattatattagcattaatgtttcaatgtgaattttccctatgtattggatttaattttgagcaaaagttgtaaatgttgattcagtagtgttgttttggcttacagggtattgatgtttcttgtggataatttccaggactgtcataatgatctgtacttccatgtacacccctgtgttttgaatcctctgttttatgagtgctgagatatcatctcatgatcccgaacagctgaacagtaaccccctgacactgcagggattacttggcctttatacaacacacagtagctcttcagggacacttagggctatttaatttgcattgtgatcttcagtttgagaaccttaaaagaaaaattaaaagtgcaattgcacacatgaaattacagagtaccattctagcaaacctacatttgtaaactttaaaacacaagttttaccccctgtattgtatattcaaatatatagtaaatgtatcagagtatttgcccattagatatagtcaacctaatattaacaattctgaagagtttcttcagcaaaaatgtatcaaaagagtaataaaaacactgtgcgtgtttcaagcttgtaaaccaatgatgtgctgctgtggtgccaacagagacttccaaatggattatgttaaatggccgtcatttcatttcccaaggttgattttgagcagtatacttggtggaactgaaaacaaagaaattaacca

SEQ ID NO: 7531 - DNA, 532 bp, mus musculus
tttcaatagccactggataaaaaaaaaatattacaacaccagcctctgcatctttaagaaaacattttttttctctttcaattacattatgtttactgtttaaggagacagaaatgggtttgacatattatttaaaagatctcatcaaaacttattagactgaaaaggtagggtaaggcagtttcagaagaaagctggaacaagatatcccacagggctgaagcaggtggtagagatgcagaggcagatctggattcagttgccaatgtgcacatgcatggaggcagacagcaggtccagagagtacagtaatgagcaacagatggtgaacccagctaggacacatgagagtagactagcaagaggtagcatatcataacaggcaggtgaagcaaggctaaagagaatccaggaactggcactaggcaggtccaagtggcagggaagcaggtcagcagggagcaagattctactcgccagctagactcagtggtggctcacttcctcagggtgatatgcaaagtagagaccc

SEQ ID NO: 7532 - DNA, 630 bp, mus musculus
tctatcatcctcattttcctcctaatgtaccatcctgagacaatctatttcaataaatttgagagggcttgaattgtgtggagatttctgcatcacagtgaatttgactcaatataatgtatttgtattgagtgctcaacagatacaactatgagtaaagtacagtccttctagtctagtgagattgaactaggtatgaacataggtgatgcaagatagaaggtgatcctttagttgggaagataggtgactacacacaatggagacaaagaaattagttttcaggctgtttaattagtttgggactttacataggacagcatgcttaacagggaggaatcagatttggttcaaagttaggagtctaagactttgagaacatatgagggtgcttttgaatattcactgaaatagaatcagaaggatggttggaggctagggaaactaaaagtctttgacatactcatcatgatgtgtcttcaggacatttaacatgaagatgcccagtcaagagttggtgatgagagtctgagcccaagagttacacatatggggttggagatagacccttgtaggtcactggggtacaggactggtgattaaattgtgtgcgtgagtgggctttgcaaa

SEQ ID NO: 7533 - DNA, 2421 bp, mus musculus
tgtatatatgcttttctttgtcccagccataacaatttaacctttagaaataatggactttcagctagtaggagagtaaactctatgtgaattaaaggctagtagtgttaaaaccataaatgatgaaatagccatctttaaaaaggaaagaaaactttttgatgaccagattcagcttagtaaacaggatggtttgggggaaaaaaaaaaaaaagaaataagagattggtacctctcagtcatcatagaagaaaagaacctctggaataataggtaatgagaaggagtacacagtctttgaaagagatggggttgataaattatcttcaggatggggtgtacttgttcctggaactatcagaaaaaaacgtaaaatgtgtattcatattatattttattaatgttaattgtgatttttatatgtgataaaattacattcattttggatgcatttctcaaaatattttattgataagggcaaacaaacaaaaagtttggtggctactattataaaagcatggcttaatatgaacgtgatagaatttctgtttgtcataaacaaaggtgtgatgagaccacttggctaaagtaagctgaaataaaagtgtcccataggccaggtgtggtggttcacacctgtaatcccagcactttgggaggccgaggcgggtggatcatgaggtctgcagatcaagcgagaccatcctggctaacacggtgaaaccctgtctctattaaaaatacaaaaaattagctgggcttggtggcgggtgcctgtagtcccagctacttgggaggctgaggcaggagaatggcgtgaaccctggaggcagagcttgcagtgagccgagatcgcgccactgcactccagcctaggcaacacagccagactctgtctcaaagtgaggctctgaaaatttgctccaggaatagcaactaagtagttacttcaattatacataaaattgaacagcagcccttgagaacaaaagtggaggaaagatttacgactgttttctggaatagagttttatccctcgagtattattataatctcctataggcagtgtggtacatttgattgattttacatagataaaataaatttttactttttagcactcctgtgtatctactgcagacttttctgaatgccatttgttttgcttaaaatcatttgtacaaataagagtcacttgcataagtaaaaatcacgtctgttagtaattatcgtgctcattattaacttccattttggttttgttgttgattttaactattgtccatgtggcttaactcgaatccctatttagaaattcacaagcccagtgataaagaaaatttactttagttttctaataataaatcacttatcaatagtgattcttttaagagagtaattagaaaagagtcaactttaacttcttaataaaattgatatttcaaaatgaaattacgaaaaaatcagaagacacttgcagtttgagttgttgattctctatagtaagagcaattggtataagaaatcactgtaagtaaagcatcatgtattgatgataagaagatatatttagaaacctgataaaatacatttagaaaaattcatactattagcagctttaggataagaactaggtgacttttgaatgttggaggcaataactgaagaagatagtttttaaaaaaagagcaaattttcatgaaaaagtttaaaaaattattaagagccgaataatcaggaaccagagcaaaagtcctgcgtatgactaaatgagcaaggagctggagaaacgtttatctgatgcatcagatttaacttttttttttttttttttttttttttttttttttttttttttttttttttagacagggtctcactctgttgcccaggctggagtgcagtggcacgatcaaggcttactgcaccctccacctcttagcctcaggtgatcctcaagcctcagccttacgagtagctgggactacagttgcatgccaccatgcccagccaattttttttgtattctttatagagatggagttttgccatgttgcccaggctggtctttaactccaggggtcaaacagtctgcccaactcggcctcccaaagcactgagatttcaggcatgagccacctcacccagcaacgtttcagattttaaattaaatttaaaatgtatttacaagtgtcccttaacattcaaatctatttgttttctgagttcatattgccatcttgaagagtaagggtgctatattatgataatctgcttggttcttgagtttctccttgttacagtgacagtttagatataaaatcttatccaaacatttttttctgaattaattcaattcccaaattcagaacggataattaagagaagagatttagattgtgaatgatatcttgatatat

SEQ ID NO: 7534 - DNA, 2421 bp, mus musculus; identical to SEQ ID NO: 7533

SEQ ID NO: 7535 - DNA, 2421 bp, mus musculus; identical to SEQ ID NO: 7533

SEQ ID NO: 7536 - DNA, 2421 bp, mus musculus; identical to SEQ ID NO: 7533

SEQ ID NO: 7537 - DNA, 2421 bp, mus musculus; identical to SEQ ID NO: 7533

SEQ ID NO: 7538 - DNA, 671 bp, mus musculus
gaagccttgaattgaatccttcacttcttaaacatccaaaattctctcccccaacaatactctcagctgatatcctggcttcttgattttccaaaaatgtgcacagactcccatcaccacaattaccagcatgtaaacccacatgctctgcctttccatctgttattaaagatagtaccattcttcaccaaatccagtctcttctcttgtagattctttctcttctcatctactcaaggacatggctctagtgattatccacttttcatcctacatcatcagtttttcatcctctcctggagcctctccctcagcacaacatgctcttattcctattcctcctttctttgccaggggctgcccatttctttgcttccctttgaaacaatgtgctaaaaaagtgttgcataagaatatggattccaatttctctcctcccatttatttttaaatttagttcaatcaggctttttttcttaaccctccaataaagccagattacattgttgaatctgatggtcagttctcagtcctcatcttagttgacctctgagaaatattcaggttaattactggattaacgtgagcaatttagttcacactgctcttttggtcttcctccaatgttagcaattgctcctacagatttttctttgctggtctcccagggc

SEQ ID NO: 7539 - DNA, 671 bp, mus musculus; identical to SEQ ID NO: 7538

SEQ ID NO: 7540 - DNA, 671 bp, mus musculus; identical to SEQ ID NO: 7538

SEQ ID NO: 7541 - DNA, 384 bp, mus musculus
aaaatactatgtgaatgccttgaagccctagatgaatatgttattatcactaatttatggtgctgtgagttttcccccaaataatagaagggaagagtatatacatgttttcatcttccatggctcattatctcatccatataccatgttaaaaatataccaatttgagcttagaagtatgtttactggaaaagagattgaattgacatttaccacaaaatttctataaaagaagtggaacaacagcaatgaaaattaatcttgacaacttaggaactggtaagagctattcaaactatatatgcaaaaattttcaaatatttgttgctggcaaaaaagcccattcttcaaaacaatgtaatacagtaatacacatgaaaggca

SEQ ID NO: 7542 - DNA, 314 bp, mus musculus
atatattaagcctaaatttgacgagttaatgaaaattataatggacctgggcatgagtatggtcaaaccccactttgctgctagagagttccaagaacctcattccaaacactttaccttctatatttaattttcctaatctataaaatgagcatttctacctagctgatttcttttattccctctagttttcagattatttgattcttatcaagggaacataaaatgtctattttcaaattatatatttgaatcctagagaattagcattttgagtttaaaatcaaccaagtatgaataacaactagcaaact

SEQ ID NO: 7543 - DNA, 155 bp, mus musculus
ggtttaaaaattgttcctttgctttaaatttagaggtacttcatctgaaaaggtgtctagaggttgaagaaaaacgtgttgagcacatcgtttgaacatataacatactgtttaagcttacttaaacaaatattctatatatgatattccgtcat

SEQ ID NO: 7544 - DNA, 720 bp, mus musculus
ccatattctgctctgtgctttcctctatcccaagatgtattgttccatagctaacttttcatttcattctatttttctatacatgttttactaagggaggagaccacccctcatattgtcttatgcccaatttctgcctccaaagaaagaagaagtaaaaactaaaaggcagaaatgaaatccgcaggcagacagcccggtgccacaccctgggcctagtagttaaagatcgacccctgacctaattggctatgttatctatagattacagacatggtatagaaaagcactgtgaaaacccctgtcctgttctgttccattttaattactggtgcatgcagcccgcagtcacgtaccccctgcttgttcaatcaatcatgaccctctcacacggaccccttagagttgtgggcccttaaaagggacaggaattgctcactcagggagctcggtttttgagccgtgagtcttgccgatgctcccggctgaataaagcccttccttctttaactctgtgtctgaggggttttgtctgcagctcatcctgctacattacctcttcacagaatgcttctatttcacagagggcttctgaatcccttctcatgtttgacttagtttcctttgtcctttcatggtacttgctctagtagtcatttcaaatgctgtttattcttctacatggcctggttcgtagatttaatatagatcaattaagca

SEQ ID NO: 7545 - DNA, 200 bp, mus musculus
ttttctttaagattttcagtttatccttgagtcttcactatcaaaagatgaatttttggtctcgatcagataacattggcttgctcaaatttcttcttatcttctccacactaaactatacttttacaaatttttacttttattattcctgtcaaagaaaatggtctcttcatccacatcagttttttatgtctttgccc

SEQ ID NO: 7546 - DNA, 412 bp, mus musculus
atgttggatacttctctaaatacaaaaaaagtattgtatatgtagctataatcattaatttttgcaaattattatttagtaaaattaagtaacaccaataaataatgttttgttctaaaatcttgatttctgcctaattattctgattgttcagaaaattttaaatggtaagtttagggcagtatgaaaaactaaggtgtacaatagcatattttaataaattcatccatgtaagtctgaatatatctcagtattgatggtaagtattgtagaattgcttcttttggaagatgtttaaggataatctaaataattcactaataatgcaattaatttattctcaaaagccactaaattgtgggctaaagaaccctcaatgatggtcgtaatcttttacaattctaagatcagg

SEQ ID NO: 7547 - DNA, 1954 bp, mus musculus
ctgtacaatcagggtggggggcgacaggctgcacatgtaaggggaagcacatgggttgaaacgtgccgccatcctttcttcccgtcgtggaaattgcccacagcatccccagagacctactcgtttccaagccaagtcggggttggttgaagggtggggtccaacacgggaaagtccaagaggaaagttgggagggttggggcagagagagacgcgaggtgaattggaagctaaacctcgtgcaggtgggcgatggggcggggagagcagagagctttattcctcattcgcttccgttcgctttagcaaaggcagaaggcgactaccgaggacagagtgttttcacgtgaccacagttcccctttgcttgaggtatcctgtgataaatggcccgaaagggggcctttcgccgtacgaaaggcacgtggctgctggagaaatcacggctcctgtgtttctgcgcatcctggaatttgagagtgtggcggtgagggtggtgctgctgggactgtaagaagatgggaagcagttagaaacccagatcgtttctacctttctttcactaggctggtctgtgtgtgactgggaagaagacggtattgagtacagggaaatccttgcactctaacgtagcgcaccaactggatacataagaatgaatcaagacgcccgaggcgttcgggaacaggcatgacccacccagtggcacaggctgcgggaacgggaattatttttcctgagctgagaagcagcctttgatgtgcgttttaggaagcaaagcccccaggctcgcgctctccagcgtcccgctttccctttccatcctcctccctagctgggaaaggctggagtaagacggggcggggtccggactccggcgcagtgacgtaagcagtgtttgggtgcttatgcaaataagtctgcgacggtttcttctggtcttgccgttttcccctccagatcttataggtagacccaatcttagtctgcaccatccttgcggttcactacttaagacgtatgggagaaatgaaggatttgctttatatgctgctttggggctcctcatcgcccatgctgtaaaagctattttctacctgtcaatgcctgattgcttttctgctgtgccagcaacaaagtgtttgttttgaggaattattatgtgcagacacagccccaacaagcccctcacccacccaacctcatttctgcaagatcattgctgaaacacagacctatttatgtcttaggcgcccagtactgggcttgacttgtacgttcttaataaatacttaatgatggactaaatcttctttgaacagtgttaggttttgaagggaaggcgagggttaaagacacacacacacacacacacacacacggaaagagggcggctcaacagcaaattcaggctttctgtccagcataaatcctacagaagtggaggaccagcctaatgccggagcccgctgccgcttacaggctggggccatttataggtacgggcagaaggggtctgagcagtatggcttgctgctccgcgggatattaataagatgcttccatgaagaggcggttctggctcttgttccggcgcgatgtcgttctgttgttcagggtgttccttggacctttgtccagcaagatatgatagggatgtctctttagttaggcctttgtccaactcgtggtcagttggttagacgggatgtttctcacagctcgaacccctgtgaaatgtttcgctttcaccaaggtctgcaaaatagcagggagcttacaacatggtgcagtttggactaacaaacagtatgtatttttttctctcatattaaattcaagatatttgaccatcaaaatcaggcgattttatttttatgtgttgttgccttttctatggaatcatcaatgatccatgtgtatttgttgtggtaaaacatatcccaacaaattt

SEQ ID NO: 7548 - DNA, 1954 bp, mus musculus; identical to SEQ ID NO: 7547

SEQ ID NO: 7549 - DNA, 341 bp, mus musculus
ccaagatgatttgctttctggaatgattgtttaacagataaaatgaatgtaaaacactaaagttaaggttattaatataaaagattaatcaccagagctaaagctaaaatttaagatggatttaaaaaatgggacaggcaacacagaaacatactcaaaaagacctaagttggagtatgggtccttctattggtaagacatcctcaggtaatatacataatttttaaagcctcagtttttttttagtaatgactatttcataatattgctgtgaaattatacatgtaggtaaagagttcctagtccaatgtttaacatatattaaatacaactatctttga

SEQ ID NO: 7550 - DNA, 209 bp, mus musculus
tatttgtactcacaagctggtgaggatttcctgattattgtaactagagtgcagatacttgtgaggaaatgacaggaaatgaggaaaggacagtagagaggggcagacagatcatacagaaccctgcggacagtactataaaactgaatcttatcctgaaggaatagtaagccatcaaacacttttaagccaaatagtggcatgatcat

SEQ ID NO: 7551 - DNA, 988 bp, mus musculus
gttctgtttaatacttatgagtagctatatatgatgtttaatgaacaaaaccttcatttgagtagctatatatgctgtttaatgaacaaacctttctcttcaatggaaaaaaaaggtatatagctttgtttctgtttcaaagatatttttattatataaaaatataatgggatatgggaaaaatttgtcccttgagcaattaccaattagcaagtactaaataatgatctaaataatttatataatatatttctctttttaataactttaagaagcctttgagaaagatcacaagttagacaacattgttcagggaaggtaaataacttgctccttgtcatggtgcataaaatatacagtcaataattgaacagaagaatctctgacttacactctatgctctgatccaattctaatagtggagctattctagagaaagtaagtgcagataataactaactctgcttcatttcctatggaaacacaccttactatgaaaataatttgatttggaggtttctttctattaggaaattggcacattgtaaattattcaatgttaactttgataaatttaaaaataaaaggtagtaggcttctggctatttctgcctatcagggtatggctgtgcctgcatcatattctaattttaaaaggccctaagtaaccacatagctattaaacagggtacattgagaaacgagtttagaattaagacagtactttaagggacagatgtgcttactttcagtgggagcaaggggttgaaacaataaaaggtgggtgggagccagctgtggacaacaagcgtttttacaagggcatgtttctcttttgtctctgtgtttttaattctcttaccacctaattctctgcaaacatattaataagtatttgatataaatttttatttgatactccaacttgtccttccattttttgagcagatttaattttaatataccctaatgcaataaagcctattta

SEQ ID NO: 7552 - DNA, 1309 bp, mus musculus
attttatgttaaatgacaataataataatattgcttcatagatgtcaaaatatttaatatttaatagtgttttatttaatgcaccctgtctgtatgatgtgaaatatgtgaaatccataaagttttgatacaaatagaaactttttttagtcttaaaacattcattaactaagtaatataataaaattaagaataatttacattcaagcaaacagtacaggcaaagaaagagttgcaaaacaaatctcagaaaacagctgattttctaattctacttgcatctcttttgtgtctgtgctcaaaaagcccatattattctgatgttcgtgcagattactttctgcccattctacatctttcttcctccactatacaacaaaatgaataggtgatggctctcagcacttgacactggtgggaaagattagcaggaatgttgactatgacatatcagatatattaagcccttgctggagggatgcagtgcagaaaaaaacttgtttgtcacagtaacccagatactctatgttttttttccaaaataaaatacaacaatttcagaagagtatattgaaatggaaactaattgccagtacaattgaattttaaattattccacaatatctttattgaattgtgtcacattagccagaatattgacccatgttatgttataaaaaggaaatagaaattttatgattctttttaaattgagagttagcataggcatgaaaattgattttaaaatgtcatttatttgacacagaagttgcatgttggccataagatttagtctacagcacattcttacaaccagagattttggtttgcttgtgtttttataagctgtagcaagctttaagatgtcaagggttgaaaaatgatatttttccaaatgcatgactgtttcagtgatactgatgttcttttaactgatctgtgagtaaattttgaaaataaattggtttctcataagttatatttttaataattaaggcaacaatccaggacttcttatagttccaaggttttgaacagcggctatatatctgctgacagaattttgtacttcagttaatcttgtgtttaagctagggtgagagaaggagtaaagaaggataggaatggttgaagggcagatttgagtaaaaaggttttgggatggttgaatatttcatattaatgctatctccatttttttagagttgtgggtcccccttgattttcatcattctgtcaatctgtatcattctgtcttatctttggataaaactccatttctaagcctcaattcaaggaaaacatattt

SEQ ID NO: 7553 - DNA, 518 bp, mus musculus
ccaccttattaattttcaatgtctaaataaacaaataagccttacaagttaaaggtacataatcaaatatgtgaaaataatgttgtttaaatacaatacagaaaacaattttgtaaactgttttgcttgtttacttttaaatatgtagtctaaaactatggaggagttaaataaattctactgttcatgatagttctttattatatttagtattctaaagggagatcctattcaaaagtaccatctcaggattagaagagtccttagatgacatgaaaatctcaggcagttgggtaggaataagaggaagatgaatcattgtgcacaagcaaaactattcttgcatgaaatttctgaaatctttgggggtgctttctatgagtagtgtcagagactgattctgcgtagtcattttgtattctgagttaaaagtaaattttattttgcttcttgacaattatataaaacaattttcaagcattacttacacttcagataactaaaatgccaccaaacaa

SEQ ID NO: 7554 - DNA, 1085 bp, mus musculus
agcactttcttttgtgtctctgtaaatgcattaattaatccattcaaaatgcattaattaatccattccacaatagctatcagatactgttctaggaactgaaaacactatagtaatcaaaacaaagtctctcatggaatgcacattttatcagaaagaacttaagcatcaagtaaatgaatatataaacatatcatatgtcaggtaatataagtgctatgaaaacgagtaaagtgagttagggtgttttgttgttagagtgagtagtggaagctctttcttttaggtcaagagatcagggaaagtgcttgtgataaggtattaatatttggtcagagagctgatgatgggaagagtcaagccatatgactatttctgggaggatattttagcaaagggaagagtatttgtaaagaccctgagataagtgtgtgattaattgattccagaaagagccagggccactttgtctgggatttactcgtaaatgaagggtgggaaaagctcaaagcaggacataatgataaacctgtgtccttatgcattggattctctccataaaagtgagatttaagttggctataggtgctcattgacaggtctggcttcgagagttagctggctatctcttcaagggaaagaaagaaatgtagctgatagtcttctctccacatcttacaaatcaattgccaatgattatgggttgtaataggaatttttttacaagaacaatacaatggaaatacaagatctgccatttaatcaaatccattttgtaatgcaacttactttctagttcttgttcaagtgtttattaaaatttaatacaactttcacttaacattatacaatatttattttttcttttttttttcctccatgtttcccagctcctctccaacctgaatctcaacatcaggtaacctatagcttagtgtaaatctttacatatgtttctccatgttacacaaatacaaacatacatataaaaaagtattaattttctgttttaagtcatttatttgtagaaagatagcattacagggcatctaatattttggtaagaatttttcttcattgacatt

SEQ ID NO: 7555 - DNA, 492 bp, mus musculus
actttcaattgtttttgaagagtagtagcttaatgttatcaaaaacctacgcatgaaaaaccagaacttaagcttccaaaatgtgtgaatacttggtgagattcttatcatcacacataggataaatgcttgaggggatggataccacattttttgtaatgtgattattactcactgcatgcctgtatcaaaacatttcaagtaccccataaatatatgtacctactatgtacccataaaacattaaaaatgaaaagattattaaaaatttaactatttaaaaagacgaaggaacgagaaaaagttccactgtaaaaacaatatagaaaaaattgtttgtgactcttagtatctaataccatgcagtatgcaaaatcgatacttcacacttaattattctcaggtctggagagatttgaaataatttagtctaattgccataaaaggtaactattgcatttgagtagtaagtctgaagattcagacaataac

SEQ ID NO: 7556 - DNA, 150 bp, mus musculus
tgggcaaaccacttgcttatcaaaataatttactcatcaaatgctcacttcgttgtgtccaccaatcctaaatatctctatcatggactccagccaatcctaaccaaatctctctatcaatcaacttcggcctaataccagatcccaaaa

SEQ ID NO: 7557 - DNA, 407 bp, mus musculus
ttttgcagtgttgtaatattataggatgcatgtctgaattattctaataataaacagaaatggatgacctgcttgcctttcaaacagtccttcataaatatcacttctctgaagtagatgtttcataaagttttgatagtttgaactctagcaagagtctgaggtacacataacatttgtctgtgtcttctgtttaataagatgatatataaaatgtttattgtttagtgttttacttatgtaaataattctgtactttaaaagttttatttgtaatcttttttttaatcctttatacaggtttgataacccagctgctgtaagcccaactcctacaaggcaactaacttttaactacctccttcctgtgaatgcttggttgttattaaatccttcagagctctgct

SEQ ID NO: 7558 - DNA, 269 bp, mus musculus
atctttagtgtcttgatctgtaaaatggtactaataagacccattttcaggattcttgtgaagtttaagtgaaaaaatgtacataaagtgcttagcatagtaccttgtaaattataagcacttaatagctaatatttatttttgtttgttattattatacattaaatattaatttgctggatttaaaacaccacaaaatataccctaggataatgctgaatataatttgatttttaaagagttcagaactacttcagactctgcctatt

SEQ ID NO: 7559 - DNA, 940 bp, mus musculus
acagattcgagtggtgaatgcatttcgtagttctttatatgaagggttagaaaaaccggaatcaagaagttcgattcacaactttatgacacatcctgagtttaggatagaagattcagagcctcatatcccccttattgatgacactgatgccgaagatgatgctcctacaaaacgtaactccagtcctccaccctctcccaacaaaaataacaatgctgttgacagtggaattcaccttacaatagaaatgaacaagtctgctacctcttcatccccaggaagcccactacatagtttggaaacatcactctgattgtaagctgaatgttaacacactagctgcattgtaaagaaacaaattgaaactgggtcttttcacatattgtgatggacaagctagtattcttgtctttggacttcaacagaagacacacttgtacgaatgtagatttatttttttaaaaaaaaaaaagcaaagctttctgccagactgagggtgctttttggggggtgggagaaatgaactgacagataaacagtaactcagcgtaagtgacctgtggatcatcagtagtacccaagcatggtcctgaacagtgtattagcagagctttagtttatctcagtcctggatgggagagagagggaggagtaaaactgggcaagacaaagagccctggatcgttgaattgatagtttaatttctgctgttggctgttaataatttggattatttatgtttataaatgatacagatctgtttacaaggtttgtagatactttttttgttcctgttcatagatgggaagcttccttataactgatgcagagaaaaattagtccttcaaatactgctgtattttcaggaaaaaaaaaaaaaggggtgtttctattgaaactgtactaaatttttgcctacaatttaccttgttaaata

SEQ ID NO: 7560 - DNA, 1174 bp, mus musculus
ttttttttttttcaattgttacgcattctgactttttgtagttgttgttgttttggtttgtttttttcaacttttattttagattcagtgagtacatgtgcaggcttattacctgggtatactgccagatgctgaggtttggagtatgaaagatcccgtcgtgcaagtattgaacagagtatccaacaggcattctgactttgatctatcagcattacactgaaattctagtataacagaagaaatctaccaatcctggtactaatccacaatatccttaccaaagctgtgacggttttaaaattaatgcttatgtcctagaatataataaacagaatgtatactgagcagcaaactttggcttaacaatcaaaaaaattaataataaatgcaaaacgtaaactatcagttaaggaagtacaagtaatcattcgcctggttaatgctggtctgatctaaatgtaaagagaaaaggaaaaatgatacactatacaaaagacacatgcccacatacaacagaagaaccttcttggaacctgatcacagggaaagaagtataacagttcaggccttatacattaaaaaaaaaaaaaaggggtgggggggctcagacctcatcaactgacttggaataggaactgctaggatcatctgaaaggaattaaaatttaaaatcattatacattatatcaggttaaaccatatgacactgccatttttgtggatgaaaaccaggagaatatcagcaatttcatagagctcaacctaataaaatggattgagcagaacattcaaaatgggcaacctaaaaagagcaaaatggagcccaggactcaagatctgacattaggtagactgaatgagtcagtttaactcaatgggagaaaaaaagcatttaacagtcagaaatgggttggtcaaacatcgtcttctaaggacgatcattagaagaggaaaagaaaatctggcctttctcattcaagcagtatttagaaggaagagttttctacgttcacaatgaggttacagtagtatttgtatcctaactgagggattaaaatgttgactacttaccagagttaagaggaggacacctgtgccagacactgtgtttagcaatttgcagtatacactctacatggatcctttcgcctaatcttcccaatgccctatg

SEQ ID NO: 7561 - DNA, 753 bp, mus musculus
aagcaatggagatgctagtatgagtagtgggtccagaaattaagctaaaggctggtcttaatacatgcatacaatatatgtgactcttggatttcaggtgctcactaccattgtgagtggaaatagtggctacagttaaaggcccagggccacagttggcagagtacaagtatgagatcatggatattattagaaattaaaactagagggttgagtaaatagggttccctaggtggatggcctcagactattcctatcaagtttttgcactgttcttggtagaactagccagggtaaacaagattgaacttatagtcattctctctcttcaaaaatatttagccatttgcccaactagctttctcccttccctttagaagaccatctcttattcctctgagatattcaaaaattttatttcctattaactttagtgtgacagttttcttgtgtagcatgtttagttttccacatctgtctaacttatatttgtaggcactaaacctcctttaattctttgaattgaatctagaactctcagttctcagcagataataagagcaagcaagcccactgagctctacaagatgaaaatttgaccattgagcaagaaatctctgtcattttttccagccaaataacttgatagcacttgatacactggtactagaaatatttctgttggtttagcaaatgcagaatgagaaaggaacaataatagtaccaagatttatggtttaccttcttgtgaac

SEQ ID NO: 7562 - DNA, 1549 bp, mus musculus
aatcctcttttaatcaatagaatatggcaaaagtgaaaggattttccagatatgattaaatctctaatctattgtctttaagttaatcaaatggagattatcctgcataggtctaacctatttggatgaatgaccttgaagaagcaagcaaccatgaattctacagttgcaaggaaataaattctgtcagaagcatcttggaagaatacctgagctccttaaatcagtgaagcttagccttaatttagccctgtgtaaccctcaacagagaaccctcttaagctgtgtctgaaatcttgattcatgaaaaacataagataataaatatatgctgttttatgccatttaacgtgtggtaatttattaaatagcagtaaaaaactaatacagggtctttcctgaagttgtagtcaaggcatcagctcagaccaaagacatctgaaatcttgaccaggttgatggactctcttccaaaacagcctacttaatgtgactattggctcaaggcctcagttccgtgccatgtgaacctctcccttgggcttcttgagtgtcctcagtacataaaagtaagtttctacctttccataactgcctcatttacactgtgacatggtagcatggtatcctccaaagtgagtgatgagggttggggaggagaaagaaaggttgaatatgtgcaacatagaactcacaattgctttataaactatcttggaagtaatgtcttatccttctaaagttaaatttgccagaaatgaatcactaagtctatcctacactaagggagggggtacaaagctccaattgtcaaggagaaatatcaaagaatccatggatatatcttaaaaactattgtaggaaaggttgatatttgagtctgtaaaataaaatgactatagacagattaaaagagaaaaggcatacgaatttattgcatgcacatgtgtgcacacaggagtcacaaaaaatatgaaactcaaagaagagccagatgactgaaattttagtttcatagagaaaggaaaagagggttgaagcatggtgacaggttatggaaaggggaggggaggaaaggcatggtgagcaaaggctttgttgtgatgcagatgaagcttcatgggtagcagtcctgaggaagaatagatgggagcccatagtaaaatgttctctgtcaaacttccaaaagtttcagacttttagtctccttttctgttaatcacttcctagattcatataaggcaaataagggtggggggtggggtcagataaagcctatttgcgtctgctgtttatttcactaatgtagatttcctttacagatgcaaatctcttccacaaaaggacagcttttcatagctattcctgtgtctgcaacccctctaaatagccatctcaaaatataccaaagaaacatattttgctgtggcatattttggtttccttcaccactaaactaatatttagattttggctctttaaatttcatacaggtcttggagtagtagccattttagcactatattttaattctaaaattagtaagatt

SEQ ID NO: 7563 - DNA, 406 bp, mus musculus
gactttgtccaggctcagagaggttggagaaagcactccaagaactgggaagagtaagtgcaaaaacaaaaaatgtcctttcctatagacttgattaactacacaatgcttgtaagaaaggcatccatgtgtggtgtttgctttcatttctgctttctgttgcaggttgggattgagtttcaacagcatctctgctgttgacaatggctctctggccaacacgcctcatctgagggagcttcacttggacaacaacaagcttaccagagtacctggtgggctggcagagcataagtacatccaggtaatgcaaagccactgcttatgtgaggaatatccaaaaagcaagacccccaccctgcttatgggatgctgggaagcaggaagctcttcttagaagtttttt

SEQ ID NO: 7564 - DNA, 406 bp, mus musculus; identical to SEQ ID NO: 7563

SEQ ID NO: 7565 - DNA, 406 bp, mus musculus; identical to SEQ ID NO: 7563

SEQ ID NO: 7566 - DNA, 254 bp, mus musculus
ggatggattgcattagccttatgcaattagtatgaatgtactagaagatgatggcatcactcgaactgaaatccaatttgtgaacataccgtctgactcctgatacttctgcgaaataatattaagtgaagaaagataaaatgctaagaggggagttctaaaattgtttggattagtggcattagatttctcttccagatcccttattcctatatctgtcctacaaattctaacacagggtgaaaggttggaga

SEQ ID NO: 7567 - DNA, 7665 bp, mus musculus
gagagtcaagactctttagagaagtatgcaaatcaaaaatttacctcctctttaaacctttttaattcttcaattaatctcaacaatgacccagtttttagaacactgaatatgcgtggccacctaatcacattatctcacttctcttcagcaaactttgaagtgggaaagatacatgtataaatgaaaacattgataaagcacagctgcctgtcacatttccagtcttctcgggaaaacaagtgatttacagcatgatgagatcaaatcttcctctacggcatgccattgcctatattttaaaactcagttaggggaactcatgcaatagcccaggctgatgacattaacgtcagatctttgagcaaatctagttaacgtaaaagcaagagagaaagatgatctcattttggaaacaacaataaaaatgatgctgttcagtaagaattgagaccatgagggtttaatgctgtatctttgagcttgtcttttattagccaactttccactataaaatacattaaaaattcatttatggagaatatagctcagaactgttataaagtggatgttttgttaaagaaaaaagatctgggtggggtggctggcaagatggccaaataggaacaactcccgtctgcagctcccagcaagatcaacacagaaggtgggtgatttctgcatttccaacttaggtacatggctcatctcattgggactggttagatagtggatgcagcccacggagggcgagccaaagcacagtggggcatcacctcacctaggaagcacaaggggtcagagaactgcctcccctaaccaaggaaagttgtgagggactgtgccatgaggaacggtgtgttccatccccagaaactaggtttttccatggtctttgcaacccacagaccaggagattccctcggtgcctgtatcactagggccctgggtttcaagcacaaaattgggtggcagtttgggcagacacgaagctgctccaggagttttttttgtaccccagtggcgcctggaatgccagtgagacagaaccgttctctcccatggaaaggggagtgaagccagagaaccaagtggtttagctcagtggatcacacccccatagagcccagcaagctaagatccagtggcttgaaatgctcgctgccagcacagcagtctgaagttgatctgggactgtccagcttgctgggaggaggggcatccgccattactgaagcttgagtaggcaatattcccctcacagtgtaaacaaagctcctgggaagtttgaactgggcagagcctgctacagcttggcaaagccgctgtagccagactgcctctctggattcttcctctctggacagggcatttctgaaagaaaggcagaagccccagtcaggggcttatagataatactcccatctccctgggacagagcacctgggggaaggggcggttgtgggcacagcttcagcagacttaaacgttcctgcctgccacccctgaagagagcagtggatctcccagcacagcattcaagctctgctaagggacagatggcctcctcaagtaggtccctgacccccatgcctcctgactgggagacacctcccaacaggtgtgaacagacaccttacacaagagagctctggctggcatctggcaggtgcccctctgggacaaagcttccagtggaaggaacacacagcaatctttgctgttctgcagcctccgctggtgatacccaggcaaacagggcctggagtggacctctaacagactccagcagacctgcagcagaggggcctgactcttagaaggaaaactaacaaacagaaaggaacagcaacaacatcaacaaaaaggatgtccacacaaaaaccccatactaaggtcaccagcttcaaagaccaaaggtagataaatccacaaagataaggaaaaaccagcgcaaaaaggctgaaaattccaaaaactagaacatctcttctcctccaaaagatcacaacttcttgccacctagggaacaaaactggacagagaatgagttcgatgaattgacagaagtaggcttcaaaaggtgggtaataacaaactcctccgagctaaaggagcatgttctaacccaatgcaaggaagctaagaatcttgaaaaaaggttagaggaattgttaactagaataacctgtttagagaagaacataaatgacctgatggagctgaataacacaacacaagaacttcatgaagcatacgcaagtatcgatagccaaattgatcaagcacaagaaaggatatcagagattgaagatcaacttaatgaaataaagcatgaagacaagattagagaaaaaagaatgaaaaggaatgaaaaaagcctccaagaaatattggactatgtgaaaagaccaaacctacatttgattagtgtacctgaaagtgacagggagaatagaaccaagttggaaaacactcttcaggatattatacaggagaacttcccccaacctagcaagacaggccaacattcaaattcaggaaatacagagatgaccacaaagatacttctcaaggagagcaaccccaagacacataattgtcaggttcaccaaggttgaaatgaaggaaaaaatgttaagggcagccagagaaaaaggtggagttacccacaaagggaagcccatcagactaacagtagatctctctggagaaaccctacaagccagaagagagtgggggccaatattcaacattcttaaagaaaagagtttttaacccagagtttcctatcagccacactaagcttcataagctaaggaggaataaaattctttatagaaaagcgaatgctgggagatttgtcaccaccagacctgccttacaagagctcctgaaggatgctctaaatatggaaaggaaaaaccagtaccagccactgcaaaaacataacaaattgtaaagacaatcaacactatgaagaaactgcatcaactaacaggcaaaataaccagctagcattataatgacctgatcaaattcacagataacaatattaaccttgaatgtaaatgggctaaatgccccaattaaaagacacagactagcaaattggataaagagtcaagacccatcagtgtgctgtattcaggagacccatctcacgtgcaaagacacatataggctcaaaaataaagggatggaggaatattcaccgagaaaatggaaagcaaaaaaaagcaggcgttgcaatcttagtctctgataaaacagactttaaaccaacaaggataaaaaaagacaaagaagaacattacataatggtaaagggatcaatgcaacaagtggtaactatcctaaatatatatgcacccaatagaggagcatccagattcataaagcaagttcttagagatatacaaagagatttagactcccctacaataatagtgggagtctttaacactccactgtcattagacagatcaacaagacagaaaattaacaaggatatccagggcttgaactcagctttggaccaagcagacctaatagacatctacagaactctccaccccaaatcaacagaatatacatttttctcagcagcacatctcacttattctaaaattgaccacataattggaagtaaaacactccttagcaaatgcaaaagaatggaaatcataacaaacagtctctcagacaacagtgcaatcaaattagaactcaagattaagaaacccactcaaaaccatgcaactatgtggatactgaactacctgcttctgaatgactactgagtaaataaagaaattaaggcagaaataaataagctctttgaaaccagtgagaacaaagacacaaataccagaatctctgggaaacagcaaaagcagcatttagagggaaatttatagcactaaaatgcccacaggagaaagcaggaaagatctaaaattgacaacctaacatcacaattaaaagaactagagaagcaagagcaaacaaattcaagagctggcagaagagaagaaataattaagatcagagcagaactgaaggagacagagacatgaaaaacctttcaaaaaatcaatgaatccaggagctggtttttttaaaagattaacaaaatagaccactagccaaactaataaagaagaaaagtgagacgaatcaaataggcacaataaaaaatgataaatggactatcaccactgatcccacagaaatactaattaccatcagagaatactataaacacctctatggaaataaaatctagaaaatctagaagaaatggagaaattcctggacacatgcaccctcccaagactaaaccaggaaaacagtcaaatccctgaatagaacaataacaagttctgaaattgaggcagtagtagcctaccaaccagaaaaacaaaacaaaacaaaaaaaaacaaaaaacccaagaccagacagattcacagctgaattctaccagaggtataaagagaagctggtaacgtgccttctgaaactattccaaacaatagaaaaagagggactcctccctaactcatttaatgaggccagcatcatcctgatagcaaaacctggcagagacacaacaaaaaaagaaaattgcaggccaatatccctgatgaacattgatgcgaaaatcctcaataaaagaatggcaaaccaaatccagcagcacatcaaaaagcttatccaccatgatcaagttggcttcatctctggaatgcaagactggttcgacatacagaaagaaataaatgtaatccatcaaataaacagaagcaatgacaagaaccacatgattatctcaatagatgcagaaaaggcctttgataaaattcaacaacccttcatgctaaaaccgcttaataaactacgtattgatggaacgtatctcaaaataataagagctatttatgacaaacccatagtcaatatcatactcacaaggggtttattgggaggtcacccatcataagttgtggagcatctgtattgttcagtgccagagactgctccaagctttcctcccttaaactataaaattattataattctatgtaaaaggtgaaaaactaaaaatcaaaaacatttggcaatttgcctagagtagtaagtggcagaatggaaattaactgaatttgggactccctaaatccttaagtaaccattcatatagaaagcatgaaggtctaaaacagaagaataaaaagtaaaaatcaattcatctctctcagtatgacaatcatcatttttagtaaacattttaagcatcagaatcaccactcattgtccatctgtacatttttttcttcttcaaaaatatttttggtttgtgttgtagctgctgcctcactaagtacagtatatttatttcagatcttagaaaactctttttttttctggaataatcaacaacgtgaaaattcttatttaaaatagaattaaagcactctagaagcaagggacacaacaattagtctctatagcaactggatattatacaaggaaaacggtgagcatgaaggagaatttgggaagaggtaagaacaattcatgtgaattgtgaagagtcctacaagaaagccagattgttccctggggtctctttgagggcagggagagagaatgaaaatacagataatgaggatgactcttggcaggtaaatgtttgtaaaagtaatgtcattgtttataaaagtaatgtcataatggaaaggctgcagaggtgaggggttaaatccaggaagggaggtgaatggaaacttgaaatttggaaattttgaatagtttgatcttagcacaaaccatttacaataactttcaatataaaaattgaaacatgatatataagtatatgactatttttcagcatatgctatgcattataatttggaagaaggcctagatctctatgtaatagtagaatctcgcctataactatgtctaacatgagaggcagaaggtttaataaaatatttttaaattgccattagtcctgccttcactcatttagtttcaatgaatgacatttctagtttaaaaaaatagcatatgaaaatttcctccaatgaaataccatatttagtccataatataagataaaatttaaaagatttatgaaacccaattttggcaatgatgcagggaaatgagtactcacatacatcataaattgtcggtaggagtatctttcagcttagcaacacttaaatggtgtatggtttttaactcagcactttcataccagagaaatatttgcacttatgtagtacaaggatccttaaaagaggaaagagagaggcagaagagtgagagtctgagaagaatatgtgactgtgcaagtagatgatgggatcaccgttcactttgaagtatggggcaaggaatgcaggcattctctagaagctggaaaagacaaggaaaggaaaactcccctagagcctccagagggcacagctcattctttattatttcagcccagtgagatctatgttcaatttctgacctcaatattctaagaaaataaatttgtgctgttttaagccttacatttgtggtaatttgttatagcagaaataggaatgttgtgatttttagtgtgcaagagatgtgatgtaatctaattgccaatatatggttggctgctttcctcaaagcatgttaccccatttggggttcagtttcactttctgttcctggaagatcagacctgcactggaagcaatagttaggccagtgctggtgagagggagcccaagctgttgagtcaacgaatagcctctgtctctaccataatgagaacaatattcatgaacctattttgctagcattaagatggctgaggacagaatccagctgacatcagctagtgaagtcattctctccacttggttgcttagtgcctcttctacaatggcattaagaagtagtatagtgatgctaatactttctgttcatttccataagtccatacacatttttcccctccttgaacttctgatttcactcattataggctcttcaacagggagctaagttatttattgctcatgagtttatgtatacccttacttaaggctgcttctctctccacattaagtgaatgaccagatgtactttccaatactctcccagttgataggattttcctccatcactatcttccaggaccatccttgcctggaactttgttgcagaaaaacaaaattccatcttacaaacatattttaagttggccctttcatgagctcagtttgggccttttcttcctctcgcagctgatagctcatgaagccacaggaatgagtcgaaagagtggtgtcatacagttggcataaatacgtgggtcatctttttgtgaagattactgtaatctctagcatgttcaattccaatccttcatgtataatagccatcttatgataaattgctgattagcctacctcaccttgtatcttggttggtcttatagtagtcagtacatgaaggttacttgagtttccatagtcagacatttttttttttatcatggcattgtagcatgtcatgagctgcttttcaaatgatacataagttcttttctgcagatggcaaggcctagttccataatctcagaggtctgtgctgtgattctccta

SEQ ID NO: 7568 - DNA, 356 bp, mus musculus
aaatatttgtctatccatttaagtgacatactgttttgtttaaagtgaggttgatttaaggactcttcaaagtaaaaagggacatttgttgataaaagagaatgactgtcacacaactttgtgtagacattcttgggagatcgcatttatcacacatgatgttcaaatgtactggaaggctgagcctttcacctctactgagaaataggcatttgggaacttagtctctctggctgccatccattgcctgctcacgctaacaaaggcagaaccaatcacatgaaaatacagcagagtgcacctagctgccagcctactaacaggaggtgcctctctttgagtcattgcttccagcc

SEQ ID NO: 7569 - DNA, 1015 bp, mus musculus
aatccaggaatggctaactctaaaacaagtataaaatgggatatagtgaaaaaatcattagattggaggttaggattttgattccagtcttaactctgtcaccaacctattgattgacacttggcaaatcacttcaagttctcagagcctcagtttcgtctaattggactagcccattgattgctaaggacgtttctgacactcagatcctttgacttcaagtcctgagggcaaaaagaaaaaaaggctaggattccacatgtattgaagaatttttaaaatttatttttagccccagtctttattttcaatttggttttctatcttgtttctcattcctcagttacagttctgtcatttcccttttccctgaagatatttacgaagctgcctttgcatcactttaaaactgtaaatatgcccttgaaacatgcaaagaggcttttgtgtacttacaaattgaggttattatcgtacaagtaagtcacttgagtgcactgcattcttcagcttgctccattgagagctttattaggttatattgtcctatctcagaagataagactttcccactttaaagggtgggctatctgatgaaacagggtgccgaatgctccagagtataagcaaaaggattttggtgctgcccaaaagacagacacacttctctaatacaagtaggtacttcacttaaaggggcacagtcaaggacaaatgttctaaaattaaaccaaccagctgcagacgcccacatgtcaattatgctatcttctagtccagccttctctttccatgaaaccagaactcccactcgctgcaaccctggaaacttcacatactttccaagtggccacctatccatggaagcagaaagcccgtttcagaacatactaggatacatgtcctcatctgacagaatgtatgctctttgggtttttcaactctggtaccaaaatgtcaacttaggcgatgccagaaattggtttcacgagtcaattgaagtataaccttcctc

SEQ ID NO: 7570 - DNA, 1154 bp, mus musculus
taatatacattataggtaatatggagagactatagatagacagatagatagatagatagatagatagatagatagatagatagacacctatatatagtatatgtatttgtggaatatcttattcattcagtactggatagcacaggtctagacctcacagggggtaataccacaaggggaataatgtgtgcaaagtgcagagtaagtgcatgtaaatagcttgcactagcagaaaaaagcactgcaaggagccaaaagaagaatataaatcaatcgtgatcctggtagaataaagttgagatgctctggcatatttgcaagtaatgatactagtgaaagagctaaacagaaggcaaaaatagagaccacaggttataagaaaaagttatgcacagtcaagagttggaaagcaacttaacttaaaaaaaataaaaaccatctaccctggcagtgtataaggcatactaggcttgctgctaatacgaagtagccagggatatttgtctttctatcactggtgccaggcacagggtaagttctcaatatatatttgttcacaatggaggaagagtgatcggttagatagctatgtggcctacttaaaaataccacactttgccaacgtcacatgtggttcaagaaaatctgtttctgagttgtttttgtgggtgtggttcacagacaatattggtgacacatcaggaaagatggcaagcagaacgagaactagtgctacaaaaagtgatctcactgtaacagcatgggtgggcctggaagtcagttctcatgcaaccccattagttctagaaagttctcatatgactaagaaaaagctgacaggaatcaaacagatttcatcattaagcaaacagaaaacatcaagtaagtaagggaaaatgtcgaatgaggttaggaggaaacaattttagatacttttatagcctccggcctctttcattccctttctcaatcagctctcctcctatcccaacccatgaccctctcctacccttaccccaggaacactaacagagcagggatgtttctgtataatccattcaagaaattgcacaagatcacctaagaagaggctgctatagtctgaatgtttgtgttcctccaaaattcatgtgttgaaacctaacccccaaggt

SEQ ID NO: 7571 - DNA, 1020 bp, mus musculus
tacatatcctttaagctggttatttacctctttttaaaaggaaactgtaaggtcttccagggcagggagtatgtctgtaaagccttctagagctgggctccttgcttcctgatctcactctctcactgtctgtaggctcttgggcaggttatttaatttcttagtgtctcaatttcctcctctataaaacagagataatagtatttagcccagagggttgtggtgaagtgtgaatcatttctccatgtaaaacacataggacaggctgggcatggtggctcacgcctgtaatcccagcactttaggaggcctaggcgggtggatcacctgaggtcaggagttcaagaccagcctgggcaacatggagaaaccccatctctactgaaaatacaaaaattagctgtgcgtgatggcgcacacctgtaatcccagttactcgggagactgaggcaggagaatcacttgaacccgggagcggaggttgcggtgagccgagatcgtgccattgcacttaagcctgggttacaagagcgaaactctgtctcaaaacaaaacacacataggacagagctcagcacagagtagacattaaggattatatcctttgcttggcacaataccttgcacagggcaggcacgcaacagatgtctctggaatgaaggaatgaatgagtgaatgactgggttaagcatgttgccaccaggtggcagaagagcctcactatcaaggcagaacccaaacacgagactcatgagaactccctcctgaagtccagatacacattgaaaaaaaataaaaaaagcactgaaccccatttaggccttgaagtgaagttcctcttctctcttgcccttcctttctctcccatctctgctcactctctgctgtaatgaaccatttctttctttcccacttaatacatattagtcagtttgggctgccacagcaaaatactacagactcagtagtttaaacaacagatatttaatgcatcacagttctggaggttggaagtccat

SEQ ID NO: 7572 - DNA, 1485 bp, mus musculus
agttaatgatgatagagagcttcttacacccagttggacactggacttaaaagctctctaaagtctcttccaaatctaagattttattgttctgggtggatcattgaatgtggcaaatacatgtcagagtttttttactttgtgttcaaagtagatttctgaaactctttgtgacacccgtgttctcttctttatgagactgctaatttttgagattaacttttaatatctgccttccaagcatgagtcttacaagaacttatgcttattgcctttccttgaaactatgtagttttgtagatcaagttttgaaatgttacttagttcactggcctgcctgcccgcccgccctccctccctctctctctctctctctctctttctttcttgacacagtctcactctatagtctaagctggagtgcagtgatgcaatcttgcctcaccgtagcctccacctcctcagttcaagtgattcttctgcctcagcctctgagtagctaggattataggtgtatgacaccacacctggctaatttttgtatttttagtagagatggggtttcaccatgttggccaggctggtcctgaactcctgacctcaggtgatcctcccaccttggcctcccaaagttctgggattacaggtgtgagccacagtgcctggccagttcattgggtttctgagggcactagaaattacttgaagtcccttccatggcttgggtgggagtagagactctcatccctgactctgtctaagttagagtagctccatttctatctctgtgatatcttgaatttccaagtaagcatttgtttgccaaaaaaacttttaaaaatcaccactgttttactggatgactttttaagctataatacttttttttttcctagttggaaggatgttttgtctagagggatttttgattaagctggaagcaatatgagggttttgtttgtttgtttgtttgtttttgtgccatgcagtgtctactctcagagtctatcagcccctttatgtcacccaggctttgactcagggccttccacatcatggtaggacaggcctcatgcctctcttcttgaagctttcagtccagcagaaggttgtgattcttccatccaagattgtagagattgttaatttataggagtcagaaattattagagctactcaaggttcctttaagcctaaaggggcttggaagtttttttttttgaacaagagacattaacaggtcagttctcaggctcagacagagaaaacatggtagtgagcctgagtgggcagacaggctgattcttaatccactaattgctgatccccttaagtttcaatgaaaggcaaagtaacaaaggcaattagcttagttgtaaagaagctccttctgggaaaaagaaagggaaaaaagaataaagggatacatttctgagggcaggctgggaattgtcttttcaagatttttagagacatagcctcagc

SEQ ID NO: 7573 - DNA, 830 bp, mus musculus
atcctaattactttattataataaaacttttgttttaaggcagttagtgaaattttaagcatataaatgccttacacacaataaaaataggttaggcttgctaccaataatttcaacctgaaaaccaaacatttcacttagccctcattgtacagtatgttcatttagtgaggctgcttggaagttatttttaaactcagccatttaaatcatcatgtctagcatactgtctagaagacgcaatgtttcattatcaaaaagaaacattatgtactgtggcatatgagtcattaaaggaacagcagatatgttgtcacttccaaataataaggcttgttaccattattgattatatgtctttatagaacctcttatctgagaatctcaaataacatgataattgaactatataaaattccaataatgcagggattctaacggatttttgtattcacagttcatgcttttatttacttaacaaaaatgtagtgagcatctactatgtgctagatagagtcctcagccctgggaattcaaaaataaagaagaccacgacaaagccttatgcaaatcaactagtatttacacaaatctaattagaaactgttttaatgtctggtttactttaacctccagagtaatctctgtacactaaaaaccctccctctcttgtagaattaaaaatagaagctgttgggatgcggatttcaaaataaaaaagcaaagatgatttctgaaagccacgtcatttgtaagaaaccaagagaccattcaaaatcttgctatattctgcttaaatatatttttggtttaaggtaaaaatgggagaa

SEQ ID NO: 7574 - DNA, 7385 bp, mus musculus
ggagtaaataatataacttttaataaagtattgaatagtactgaacatgtatttcagatagtacaaatttgttaatcagaagaaatcatgaataattaatgtgcttccaacagttcaatggcctagagaaacaaatagattctccctagataatccatatgtctcattgatttattgaaccctgaaatatttcaaagtattgaactgaaaatacttcaaagatagtagggaaatcaagcaagacaattttcaattttcaaatcatttttaacaataaaatttgtatcaaagccaatggatgcttctcagaataagagtaccagctcaaacacctacctctgttatgatcacaatatgtgactttttttttttttttttttttttttgagatggagtcttgctctgtcactcaggctggagtgcagtggcacaatctcggctcactgcagcctccacctctcggattcaagcgattctcctgccttagcctcctgagtagctggggttacagttgcctgccaccacgcccagctaatttttgtatttttagtagagatggggtttcaccatgttggtaaggctggtctcaaactcctgacctcgtgatctgcccgccttggcctcccaaagtgctgggattacaggcatgagccaccgcacccagccaattcttttattatactttaagttccgaaatacatgtggagaacatgcaggtttgttacataggtatacacgtgccacggtggtttgctgcacccatcaacccgtcatctacattaggtatttctcctaatgctatccctcccctagttccctactccctgacaggcccagtgtgtgatgttcccctccctgtgtccatgtgttctcattgttcagttcccacttatgagtgagagtatatggtgtttggttttctgttcttgtgttagtttgctgagaatgatggtttcctgcttcatccatgtccctgcaaaggacatgaactcatcctttttatggctgcatagtattacatggtgtatatgtgccacattttctttatccagtctatcattgatgggcatttgggttggttccaagtctttgctattgtgaacagtgtcgcagtaaacacacgtgtgcatgtgtctttatagtagaatgatttatactcctttgggtatgtacccagtaatgggattgttgggtcaaatggtatttctggttctagatccttgaggaatcaccatactgtcttccacaatggttgaactcatttcactcccaccaacagtataaaagcattcctatttctccgtatcctctccagcatctgttgttccctgactttttaatgatcaccattctaactggcatgagataatatctcactgtggttttgatttgcatttctctagtgaccagtgattatagctttttttcatgtttgttggctgcatacatgtcttatttagggaagtgtctgttcatatccttcacctactttttgatgagattatttgtttttttttttcttgaaaatttgtttatgttctttgtagtttctggatattagctgtttgtcagatggagagattgcaaaaattttctcccattctgtaggttgcctgttcactctcatgatagtttattttgctgtgcagaagctctttagtttaattagatcccatttgtcaattttggcttttgttgctgttgcttttggtgttttagtcatgaagtctttgcccatgcctgtgtcctgaatggtattgcctaggttttcttctagggtttttatggttttaggtcttacatttaagtttttaatccatcttcagttaatttttgtataaggtgtaaggaagggggtgcagtttcagttttctgcatatggctagccagttttcccagcagtatttattaaatagggaatcctttccccattgcttgtttttgtcaggcttgtcagagatcagatggttgtagatgtgtggtatgatttctgaggactctgttctgttccattgctctgtatatctgtttttgtaacaatatcatgctgttttggttactatagccttgtagtatagtttgaagtcaggtagcatgatgtccccagttttgatctttttgcttaggattatcttggatatatgggctcttttttggttccatatgaaatttaaagcactgttttttctaattctgtgaagaaagtcaatgataccttgatggggatagcattgtatctataaattgctttgggtagtatggacgttttcactatattgattcttcctatccatgagcatggaatgtttttccatttgtttgtgttctctcttatttccttgagcagtggtttgtagttctccttgaagaggtccttcacatcccttgtaagttgtattcctaggtattttattctctttgtagcaattgtgaatgggagttcacttatgatttgcctctctgtttgtctattattgatgtataggaatgcttgtgattttcgcacattgattttgtatcctgagactttgctgaagttgcttatcagcttaagaagattttgaactgagacgatggggttttctaaatatacagtcatatcatctgcaaacagaggcatttgacttcctctcttcctatttgaataccctttatttctttgtcttgcctgattgccctggccagaacttccaatactatgttgaataggagtggtgagagagggcatccttctcttgtgcccattttctaagggaatgcttccagtttttgcccattcagtatgatatgggctgtgggtttgtcataaatagctcttattattttgagataagttccgtcaatacctagcttattgagtttttagatgaagggctgttgaattttgttgaaggccttttctgcatctattaagacaattgtggtttttgtcattggttctgtttatgtcatggataatgtttattgatttgtatatatattgaaccaaccttgcatcccagggatgaagccaacttgatcgtggtagataagctttttgatgtgttgctggattcggtttgccagtgttttattgaggatttttgcattgatgttcatcagggatattggcctgaaattttctttttttgttgtttctctgccaggttttggtatcaggatgatgctggtctcataaaatgagttagggtggagtccctctttttctattgtttggaatagtttcagaaggaatggtaccagctcctctttgcaccactggtagaattcggctgcgaatccgtttggtcctggacttttttttggttggtaggctattcattcctgcctcaatttcagaacttgttgttggtctattcagggattcgacttcttcctggtttaggcttgggaggaagtatgtgtccagcaatttatccatttcttctagattttctagtttatttatgtagaggtgtttatagtatgctctgatggtagtttgtatttccttgggatcagtggtgatatctcctttatcattttttattgcgtctatttgattattctctcttttcttctttattagtctggctagtggtctattttgttgatcttttcagaaaaccagctcctggattcattgatttttcgaagggtatttcgtgtctctgtctccttcagttctgctctgattttagttatttcttgtcctctgctacctttttaatttgtttgctcttgcttctctagttcttttaattgtgatgttagggtattgattttagatctttcccgttttctgctgtgggcatttagtgctataaatgtccctctaaacagtgctttagctatgtcccagagattctggtacattgtgtctttgttctcaatggtttcaaataacttatttatttctgccttcatttcattatttacccagtagtcattcaggagcaggttgttcagtttccatgtagttgtgtggttttgagtgagtttcttaatcctgagttccaatttgattgcactgtggtctgagagactgtttgttatgatttccgttcttttgcatttgctgaggagtgttttacttccaattatatggtcaattttagaataagtgtgatgtggtgctgagaagaatttatattctgttgatttgggatggacagttttgtagatgtctattaggtctgcttgttctacagctgagtgcaagtcccgaatatccttgttaattttccgtctcattgatctgtctaatattgacagtggggtgttaaagtctcccactattattgtgtgggagtctaagtctctttgtaggtctctaagaacttgctttatgaatctgggtgctcctctattgagtgcatatatatttagaatagttagctctttttgttgcattgatccttttaccattatgtaatgcccgtctttgtctctcttgatctttgttggtttaaagtctgttttatcagagactaggattgcaacccctgcttttttttttgctttccatttgcttggtaaatattcccccatccctttattttgagcctatgtgtgtctttgcacatgagatgggtctcctgaatacagcacaccaatgggtcttgactctttttccaatttgtcagtctgtatcttttaattgggtcatttagcccatttacatttaaggttaatattgttatgtgtgaatttgatcctgtcattatgatgctagctggttattttgcccattagttgatgtagtttcttcatagtgtcaatggtctttacaatttggtatgtttttgcagtggctggaccggttgttcctttccatgtttagtgcttccttcaggagctcttataaggcagaactggtggtgacaaaatctctcagcatttgcttatctgtaaaggattttatttctccttcacttttaaagctcagtttggctggatatgaaattctgggttgaaaattattctctttaagaatgttgaatattggctcccctactctctcctggcttgcaaggtttctgcagacagatacgttgttagtcttatcagattccctttgtgggtaacctaacctttctctctggctgcccttaacattttttccttcatttcaaccttggtgaatcggacaattatgtgtcttggggttgttcttctcatgaaggagtaccttcatggtgttctcagtatttcctgaatttgaatgttggcctgtcttgctaggttggggaagttctcctggataatatcctgaagagtattttccagcttggttccactctccccgtcacttccaggtacaccaaccaaacgtaggtttggtcttttcacatagtcccatgtttcttggtggctttgtttgttccttttcattatttgttctctaatcttgtcttcatgcttgatttcattaagttgatcttcaatctctgatatcctttcttctgcttgatcaatttggctattgatacttgtgtatgcttcacaaagttcttgtgctgtgtttttcagctccatcaggtcgtttatgttcttctctaaactggttattctagttagcaattcatttagaacatgctcctttagctcggaggaatttgttattacccaccttctgaagcctacttctgtcaattcgtcaaactcattctccatccagttttgttcccttgctggcgaggagttatgatcctttggagaagaagaggcattctgatttttggaattttcagcctttttgcagtggtatctccccatcttcatggatttatctacctttggacttctgatagggttttggtgtggatgtcatttctgttgatgttgatactattcctttctgtttgttagttttccttctaacagtcaggcccctctgctgcaggtctactggagtttgctggaggtccactccagaccctgtttgcctgggtatcagcggcagaggctgcagaacagcaaagactgctgcctgatccttcctctggaagcttcatctcagaggggcaccctccagatgccagtcagagctctcctgtgtgaggtgtctgtcgactcctgctgggaggtatctctcagtcaggaggcatgggtgtcagggacccacttaaggaggcagtctgtcccttagcagagctcaatcaatgtgccgggagatctgctgctctcttcagcgctggcaggcaggaacatttatgtctgctgaagctgtgcccacagctgccccttcctccaggtgctctgtcccaggaagatgaagttttatctataaggccctgactggggctgctgcctttctttcagagatgccctgccagagaggaggaatctagagagacagtgtggctacagcagctttaccaatctgcagtaggctgtgcacagttggaacttcctgtagctttgttttgctgtgaggggaaaaccgcctattcaagcctcagtcatagcggacgccccttccccaaccaagctggagcatcccaggttgacttcagactgctgtgctggcagtgagaatttcaagccagtggatcttagcttgctgggctctgtgggggtgggatccactgagctagaccacttggctccctggcttcagccccctttccaggggagtgaacagttctgtctcgctggtgttccagggccactggggtatgaaagaaaactcctgcagctaactcggtgtctgcccaaatggccgcccaattttatgcttgaaacccagggcccttgtggcataggcactggaggaatctcctggtctgcaggttgcgaagaccatgggaaaagcgtagtatctgggccagaatgcaccgttcctcactgcacagttcctcatggcttcccttggctaggggagggagtcccccgaccccttgcacttccaggtgaggtgacacctcacactgcttctactcgccctccatgggctgcacccactgtctaaccgtcccaatgagacaaaccgggtacctcagttagaaatgcagaaatcacccaccttctgcattgatcttactgggagctgcagaccagagctattcctattcgtccatcttgccagccaccttcatgacatcttctttggttcccagtagaacacaaaccaatttaaaatctataaaatgattaacattatcaatactctttccagagattatcacctctgagctataccaatcgttgtgagtaaatgtctaaatttcagtttattttattcctttgaggctcaacgtacactggaaagcctctcatacataatttttgagctctgcttttcttacacatatttttaaatggcatggtaatctaggatccttctgaagaatcagtcaatgatctgatactttttaaactcacattcttggtgatgttatggt

SEQ ID NO: 7575 - DNA, 900 bp, mus musculus
tttctttctctttttttttaatcatgccacattatttttaattacatacaaagatctaacatgtcgcccagggaccatttcacccactgctctgtttggccgccagtcttttgtctctctcttcaacaatggtgaggtgggtaccctttcctcaggaaaaagaaattcacagtttgttgcccttgccaataacaaaaatgttggaaagacgagtggcaaacctgttgctgttggcatctttcatgtgaaccacgtcaaaagatccacggtgcctctctctgtggtgatcacaccaattcttcccaggttagcacttccagtcaccatacacaggttaccagtgtcaaacttggtgaaatcagtaatcttgccagtctccaaatcaatctgaatgatatcattcaccttgataaggggatcaggatagtggatggtgcgagcatcatgagtcacaagacgagagattccttttgtgcccacaaagatttttctcactttgcacaacttgtacttggcctcctcaggtgtaatatgatgtacagcaaagcgacccttggtgtcacagatcagatggaaattctctcccgtcttgtcaatgctgatgacatccatgaacccagcagggtaggttatatcagtttggaccttgccatcgatcttaatgaactgctgaatgcaaatcttctttacttcatctcctgtcagggcatacttaagtctgttccttaggaagatgatgagggagagacacactctcaacttgtgggaccggtggatggacgaggatcaaacacactggtcaacttatccagcatccaatgctttggagctgctacccacttcagatgcttcttgggatcacaagtcatggctgcattaagcaaggaaagaggaccccca

SEQ ID NO: 7576 - DNA, 378 bp, mus musculus
cattgagaaacgtaggaagaaaaggtcttctgcaggagtagttgaagatatggggtaacgtgttcaaaataatttttgtttcttagataaagcacttcaagaaaagttgctaacaaataatatatgtaaaatacttggcatctggtatttcttccaaaacaagcatggtatgttgtggatcttctaaagtgtttaaaatgtaatttctttccaggggtgaagtgcagaatatgctggaaggagttggaggtaggttttaggagatacttgtatttaaagaaaattgttttaagccatataatttgtataataacaaatgttaataatggactataagactgttatttaatgccttgttctcacatagaagattctgca

SEQ ID NO: 7577 - DNA, 193 bp, mus musculus
ggtatgttgtggatcttctaaagtgtttaaaatgtaatttctttccaggggtgaagtgcagaatatgctggaaggagttggaggtaggttttaggagatacttgtatttaaagaaaattgttttaagccatataatttgtataataacaaatgttaataatggactataagactgttatttaatgccttgttc

SEQ ID NO: 7578 - DNA, 413 bp, mus musculus
taacatctttcaccttcacatccagcagaaaagcacaagccttttctccaacagcacctacattttaaagcccagagatgcagtacaattggtatagcttcgaactgcacccatcctgaataaaccaaccatcatggccactgggatgcaaaatgttgctaacccagggaaaggaaagggaaacaatgaatgtccagtgctcttgttcatgaaatattgttcaagagttcccccaaaggacagagggagaggataaaagcaaattaaactgatcttcaagaaatgttaggtgagaaagagttcactattcctgtagatgttgacttatagcagtcacgtgacttcaacagaaagttttattttctatctttcttgttttctccaatgccactttttcttggttcccttgttct

SEQ ID NO: 7579 - DNA, 1000 bp, mus musculus
tagctgacagaccacctccacagtacatccaccctaactctataaatgttgatggtaatacagcattatctatcaccaataacccttcagcactagatccctatcagtccaatggaaatgttggattagaaccaggcattgtttcaatagactctcgctctgtgaacacacatggtgcccaaagtcttcatcccagtgatggccatgaggtggccttggacacagcaatcactatggagaacgtttctagggttaccagcccaatttcgacagatggaatggcagaggagcttacgatggacggtgttgcaggcgagcattcccaaatcccaaatggctccagaagtcatgaacctctgtctgtggattctgtgagcaacaaccttgcagcagacgctgtaggacatggtggtgtgatacccatgcatgggaatggcctggagctccctgtggtcatggagacagaccacattgcaagtcgggtcaatggcatgtctgacagtgccctcagtgactccattcacactgtggccatgagcaccaactctgtaagcgtggcactctctacctcacacaaccttgcctccctagaatctgtttccctccatgaagttggcctcagcctagaacctgtggctgtctcctccatcacccaggaggttgctatggggacaggtcatgtagatgtatcttcagacagtctttcttttgtatcaccttcactgcaaatggaagactccaattcaaacaaggagaacatggcaaccttgtttacaatttgtgagtgtgtttagcctttcttttttggaaatatttgtaaaaagggccaccatccctaacaagttaagtcgtaaagtttggcattaagggagtatagaaagcaactagaccttggaacttttctttgccttggtattgtcctttatattaatgtggtgccttttcttcaagtaagccaaatgatatacatacatttagttggttcttagagcatcctcct

SEQ ID NO: 7580 - DNA, 5401 bp, mus musculus
aggatgaatgaaatgaacctgagtccagtggggatggagcagctgacttcatcctctgtgagcaatgccttgccagtctcaggaagtcacctgggattggctgcctcacccactcacagtgccatccctgccccaggtgagtggtaagggagacctactgcatttcaacacttaactctgttatcaattctaaatggagtctagaagagatcagagcccctttaagggtagaaggtagaagggagaaggtaagcaggcctgaatggtggttcaacatgtgataggtaatggaaaataaggtttttgtagaggtagagtattagaattctagtggatagtagcagcaattttttctgatagtcctcttctgagttggtagctttttgtccagagctgtaattaacttggcattttatttagggctgcccattcatctggttcacacttcagtacccgttccctgggttaatagaagagaatcagttaaaattactctaataactattcccagagagcatggggaattgggctttatattccaccaggtttgaaattaaatggcaataactgcaagtgtaccaggtctagaattaatgtggaaagaagtgtggtacttttacctggggcttttacatggaacgcctcatgagcctccatacacagcaaaatcgtataggaaaaattcattcttcctatccttttttttttgaaatggagtctcactctgtcatccaggctggagtgcaggggcacgatctcggctcactgcaacctccgcctcccgggttcaagtgattctcctgcttcagcctcctgagtagctaggattataggcatgcacccctacacctggctcattttcttttttttcttttttgagatggagtttcgctcttgtcgaccaaggtggagtgcaatggcacgatctcggctcactgcaacctccgcccgcctcccgggttcaagcaattctcctgcctcagcatcccgagtagctgagactacaggcacacgccaccatgctcaactaattttttgtatttttagtagaaacggggtttcaccatattagccaggctggtctcgaactcctgccctcaggtgatccgccctcctcggcctcccagagtgctgggattttaggtgtgagccaccgcgccagccgtcactgtacttttaaaaccttttttctgcctagcttcattttcttattctattgaaatagaatataaatggaataaatattctattgattattacaatgataagctgtcagttctttaggatcaatgacattgttatgtattggactttctttgtcacagtaggagttagtataaataaatctatatattgtttaaatagttctctaaagagaattacttgcttaattaataaaatgcagcagttaaataagattcattgaaactagggtctcttcacatttgtttaagtgtccacaaaagaaatcttaaaaaattattagtggttaacccacttgattgtttgtaggcattccctttagtggacactcttgttaaggtggaaaagcctgttaaaaaatattgccagccaggcacagtggctcacgcctataatcccagcattttgagaggccaaggcaggaggatcacttgagcccaggagttcaagatcagcctaggtaacataaggagaccccatctctacaaagaaaaaaaaaaaaattagcagcgcatggtggcacacacccgtagtcccagctacgtaggagctacataggaggctgagaagggatggccacttgagccaggaaagctcaggttgcctgagccatggtcatgctactacgctccaacctgggcaacatagcaaaaccttgtctcaaaaaaaaaaaatattgcccctggcaaaaatatgcaaatcagcactgaccaagttggtgggtatttattatgatacttagcccagtaaaagtcacttcactttgcaagtacatataactcaaagtagatataatctcacgtttaaagcttttattaatcactaagtgtagcatatatacaaaagattgtatgaaggtgtacatgtacagttttacatctaactaaactacgttgttttccaggtagaaatgaaatattctcaccatataaaatggtaaatacaataaagtttaaaaataccaaaaaaatttcatactatcactacctagggactactcctatgaacattttatgtttccattgtttttttctctatataatttgttttcttgtatttaaactcggtttttaattctaaattaaatattttggctgggcatggtggcaatccccgcactttgggaggctgaggtgggcagatcacttgaggccaggagttcgagaccagcctggccaacatggtgaaaccctgtctctagcaaaaatacaaaaattagctgggtgtggtggtgtgtgcctgtaatcccagctactcaggaggctgaggtaggagaattgcttgaacccaggaggccgagattgcagtgagctgagatcacaccactgcactccagcctgggcaacaaagcaagactccgtctcaaatcaatcgataaattaattaattaaatatttttgtatttaagcgcaatacagacaattggagtatcaacttgccggtttagaactaacttaaaaactatctttgggactaagactactttctttaggcttatttgtggatatttgcacattatctaaggatgaaaagggctagtaggtgagatttttgcccatgtgtaaaaacctttctaagagtttagccagtggttgtagtgagaatttttaattacctattttcttttaactgagaaaaaaaattttgttttgtaggcctcccagtggcaattccaaacctgggtccctccctgagctctctgccttctgctctgtctttaatgctaccaatgggtattggggatcgaggggtgatgtgtgggttacctgaaagaaactacaccctacctccaccaccttaccctcacctggagagcagttatttcagaaccattctacctggtaagtgttacagttacttgagatgttagagaaaaagaacggcgccagcttttaaacttttatcctgaagatatgaataacacttttttctgtttgtcactattagatattaatctctaggcaggaaaagtatctttgtttatatttatgtacttttcctcttagaatgtggcacataacacattagtaatacagtttgactaagctgaatttcttaattgcacataatttttcttctttctcctccagtatctctttcatttggtgtttataattctacagctataatttcagtcaagcactatagtgtcttgttatagtgtcatgttttttaagttcattgaatttttattctgttataggagtattatatgcttattgcggaaaatttagcaaataagggaaggaaccactcagtcccatcatccatctttttggtgtacttccttcctgccatttgttttggtgtataggtttttaccaattttcataattaagaccacggtttcttctcttgctctcttttttcttttcttttttttttttttcttttaatggagacggagtctcaactattttgcccaggctggactggaactcctggactccagtgattctctcacctcagactcttgagtagcttggaatacaggcacatgcctgccttgagaccataccatatttcatttcttttttataaataacttttttaaaaaaagagatggggttttggcatgttgccgaggctggtctcgaactcctgcgctgaagccatccgcccacgtcagcatcccaaagtgccgggattacaggcatgagccactgtgccctgcccaagaccatactttctatacgattgtctgtctttacttttttcactttatctttttctctgctgttacatgggtattttcctttgctgctacgtggttttcataattatcctttttaatgatgcattactttctactgaatgggtatttgatggtttattatctttattgttggacagtttggtttttccagtttttattaccattgtaactaatgctcttatgaacgtctttatgtataatatttacaaaatggatttagagaagagtaccttaagtggaatttcttgtgcaagagggtattaacatttttgaggctcctaatatatatgcttcacaaagaagttttagcagtttacattccctctggcagtttagtaagtatcatttcaccatatcctcccaagcacaagtgttaatttttttttgttttaataaaacaggtacaattgtgacttgtattaaatagtttgtgttatgatagtttaattatattaaattatatttaattaagttttatttttcacatggaagatctgtttttaaatcattttaccttttaataattaggagagcaaattttacaccttaggactcaggaattgcaaccatatgtatattaaaagcagtgttttcgttagtgattcccagttagcttcaaaggaacatagttaacttttttaggattttcgagttttacaggaaaaactcaattacggtatatgtatgttgctatttataaaatagtgtgtatcgattaaattaaagaagcaggagattatttgaacttagttatgtttgtaaggaaatagcgtctagtgcttggaattctttaataatgtactaaaagtctctgatatctcatcttttccttttctcaggcattttatcttatttagctgacagaccacctccacagtacatccaccctaactctataaatgttgatggtaatacagcattatctatcaccaataacccttcagcactagatccctatcagtccaatggaaatgttggattagaaccaggcattgtttcaatagactctcgctctgtgaacacacatggtgcccaaagtcttcatcccagtgatggccatgaggtggccttggacacagcaatcactatggagaacgtttctagggttaccagcccaatttcgacagatggaatggcagaggagcttacgatggacggtgttgcaggcgagcattcccaaatcccaaatggctccagaagtcatgaacctctgtctgtggattctgtgagcaacaaccttgcagcagacgctgtaggacatggtggtgtgatacccatgcatgggaatggcctggagctccctgtggtcatggagacagaccacattgcaagtcgggtcaatggcatgtctgacagtgccctcagtgactccattcacactgtggccatgagcaccaactctgtaagcgtggcactctctacctcacacaaccttgcctccctagaatctgtttccctccatgaagttggcctcagcctaga

SEQ ID NO: 7581 - DNA, 1268 bp, mus musculus
ccactgctaattttcattgactcgggcctttttctcttgcagttctgaatcagccaggggcccccaaaacacagatttttatgaatggcgcctgctccccatctttattgccaacgctgtcagcgccgatgcccttccctctcccagttgttcccgactacaggtgagccaccctttacaagccccatcttagagctaccactgctcttagcttctaaaattagcttttcacagaaatgaattaaggaaaatatagatgtttatttttcattttaaggtgaagtttcacgattacacattcctatttatttttgtccaaaatggaaataacttttaaattaaaaatttttaaagtacataaaatttacatatgcatatgtatgtgtgtatatatgtgtgtatgtataaaatataaagaaaatttaaaatttcttgggataccatctagagatagccaattaaacacttagggtcatgcactctataaagttgtacatcacacatacatatagtgtacataaacacatacactcattgatacaaacatccacatatacacaatatacatatactcatagaatgtacatcttgccatgccagtaaatacagatctgtattttaatagttgtgtagcatttggtggtatggacttaccattgtattcatcccctatttaacattagcattcttttgtttttgcctataaagtctttttgttaaaattgtaaacccctgacatgtgttcgtatcattcagctcctccacatacctcttccggctgatggcagttgtcgtccaccatggagacatgcactctggacactttgtcacttaccgacggtccccaccttctgccaggaaccctctctcaactagcaatcagtggctgtgggtctccgatgacactgtccgcaaggccagcctgcaggaggtcctgtcctccagcgcctacctgctgttctacgagcgcgtcctttccaggatgcagcaccagagccaggagtgcaagtctgaagaatgactgtgccctcctgcaaggctagagctgatggcactgtctgcactgtccaggaaaaaagtaaaactgtactgttgcgtgtgcaagcggccccactagagccttccagccttctggtgtgttctaagagcaggctccacctgggagccagccccagttcacaccaaaccaggctccctgaacagtcctgttcatgtgtgtaggtggttctgttgtgttaagaaagcattcattatgtccggagtgtctt

SEQ ID NO: 7582 - DNA, 408 bp, mus musculus
tgcctttcttgggccaggaccacgtgtgtagagatttgatggccctggtgtcagatgatggggtctgtctctctcctttcctggcaggcatcctggatcctcgttgccaactctgtgtgtttatgggaaaaacagacccacatgcaccaagacaccggcagcagtctgtgctcttggttcccatggataccccagggataaaaatcatccggcctctgacggtgtatggactggaagatgcaccaggtgagacctccaggggcgggtcacccctgggtgtgggtctggtccccaggaaacaccactgaggggcccctgctcttgttcaggacttgccacatcccacgtctgagggtatgatgacatttggagtcacatgctcctgcatttcatttccatacatgaata

SEQ ID NO: 7583 - DNA, 702 bp, mus musculus
ctcagagctcatgtgagtttgtactatgtcatctaaagccacagatgtgatggactggggacctcaaggagagaacacccagagaaacctgcctgttgatttgggatgatttgaaggaagtcgctttcctctgcaaaagcagccacatcttcccagcagcaggcaggattccccagggaaacagagacctaatttatacatctggcagacaagatgttagtggaagtacttaaccttgattcccttgcctcccttccctggaacgtcaggagtgatggaagctgccctcccaagatccagagctcatacccccaaatgatgtgggtctcacagccatccggggccactgctcagggagaatcactcagcctgacactctgctccagtcacagatgaaccctcattccgagagtcagaaacagagacccagcaaaccagggacctggtccctgccctcagcaagtctaggatctatttgaggacacagttcacatctgcacatgaaaaccaatttggaatatttataaggctgcccagtatgctgtgtaatcaaacagtgcatgctgagtactgataaagacaccccagtcttagagcaggaagaagtcttataaatttgctagtccagggtctctgaacagtggctcatgggccgaatttgacctgtagatgtgtgtgtttgagttataccatgtttttttt

SEQ ID NO: 7584 - DNA, 268 bp, mus musculus
ttagctccataagcaaacaggtcatcttgctcaaagaagtttcccagtgtatactgagcaggtcacctgtcctacaaaatgcaccatgaagaaaagtgttctgtagtcacagatgtttaagaaatgctgtgaactgcacccccatcccagagactcttagtgcacagtgatattttcaagctcagtaaagtccaatagcaaagaagcctacttaaatataggtagtccagcatttcctagtcattaaggcatgacctccatttctggc

SEQ ID NO: 7585 - DNA, 607 bp, mus musculus
tggagttgtttgttactgcaacacaactgagccgatactgactgatacatctccgtttcacaggtgaggaaacaaagtgtggaagagatcaccaaggttacccaaagtcaaacacagagtagaggcacagacaagactcaaagacaggtctgccctttgctgcaaccctccattctgaacaaacccagccaagccccttactgctaaccacttcaattaaagccaatgtcaaggcctcctggtttctaaatgaacagccctgatcatgttcgttaaaggccctgtctgcacagactgctcattttatccgaagccgccaacaagataaatggccctgtaacttattgttctgctgcaaagcacctcacggcaagcggcggcacagatgccaggaataaatcacatctgatcttccgagagccaggcagagcgcccacgaggagtgtcggaggcaggggaggttggcacagccctggaccttgggggttggagcagccctggaccttggggggattcactaaggagcagagagctgcaggggtctttattagggccccggagctctggagtatacattgttcttttttatcggcccagcacctatttc

SEQ ID NO: 7586 - DNA, 679 bp, mus musculus
tcattctagaaaggagacactgataagagatggtatctgtatgcttacgtcataatgggctcaaacaaatgattcagtctgtagtttcctaagccttttgttctgacctaagagcctgctatgaagccccatggggtggaatcctccttctcttgccctgaagagctctactctagaggggcaggtccaagttcacagatcccgttattgccatatacctggttttctccactccacacaaatgtactaaaagtatcctctgctcatcctcatagacgttgttttggaagatgatacctttttgctcagctgtcacctatatagcctcaggaggatggggattcgtctaacaaattattgcccagtcttcagaggaacaaagtgaaacctgcagatcgcaagctcagagctgtattcacactttttaaggggattccaggactgttgcaagtttgggggcttgtgtcaattgaggcgatttaattaaatggctgtgatgcatttactatggcttcagtgtcaatgtttgtagtaaattttactataactccaagttgaatggagttgtccacagagctatgaccttggcatcatcccagggacatcctcaaatacatggcacattcattagcaccctttggagagatcctctgagtctgtggagttgtcacacagtcat

SEQ ID NO: 7587 - DNA, 561 bp, mus musculus
aagcgtctatttctcagatacagacccatcttagacccttcacccatgtttttattactgagtatgtggtgattaatcctttcagagccagttctaacttccgtgtacaaccggagcttccaaatgggttttggccatggtgagaagcccttactgaacatttctgtgaatggaataattgaatagacataattacaagactctgtgccgtgtgaaattgtaaatagcactgacaatgtaatttgcattcatttatgatacagtaactcattacggctccgattttcatccccttcattaacaagctcatctgtttccctgatggaagccccttttgtgttagatacagctctttgcccagagagatgcccacggtgtggactggcgctgagaagtgcacttggtgttgctgacagcaggacacatggcagagtggtgtcccccagagcatatgtacaccccagccaaagaaatgtgtgtgtgacttctgggctgtttagcttttttaaaaaatatgtacattttgcttgcttggattgcagggaattattatattaaata

SEQ ID NO: 7588 - DNA, 907 bp, mus musculus
ggaaaaagaggagaacccaagtctcctggatcaagccacacctgaaaggaaccctacccctaaacatttcagttatttcagacagtacatgaccttcacgcttaagctagcttgaattggatttttatgacttatatccaagagaactttgatgaatctttttgccttgcttccctccctctcaacacttgtgctgtaacttttgtgtacaaccaatattacagcaaagaatgctgccaacaacagcaactcaggtatcagttctaattgtgtgtgggcccatttgctcacttgggtcagccacgtgtcagtgataagcaactccaggccattagttgttctaatattaatgaaatatctgatgccacccactccatacatcatgggccacaccagcttgtaaagcacccagtggcagagggtgtttctctttgttctgcagaattgaccaccatcttcctgaaagtccccaatgggaaagaaaatttctctaaggtataaagaaatcataataatagccatgatctggagttcaaacaaacttcataagaagataattgttgggaagtgaaggcaggagattcgcttgagcccaggagtttgagaccagtctggccaacatagtgagaccccatctctacaaagatggtttttaaaagatgattaaattatgagaataaccttgagaaactggttatgaataggtatagtttgacctgtatctggaagaaagtttgtttctgccccaagaatatgttgtaatctttcccctgatgaaaggaagtatagcagtgtggtgaagagctgagatcggaaatcagaagagacctgggttggcctgccacttactagcagtgagttcttgaaaaagtcactcagccccaagctacttaacctcttagagact

SEQ ID NO: 7589 - DNA, 665 bp, mus musculus
attccaaggcctcatcaacacagacacaggttactgctcattgttgaatattcttggcccatatccttaacttgtgggtgcttctctgtcccagatgccagtcctcactttgtaggtggttccatgccccaggatcccccaccaaaaccctggagccatccctgagatgtgtttctttgtctttatcttctgcgtactattatgaggagagaagggtcctttgaacaaagttggcttaaagccagtttcttttctctcttccaggagcagcagtttattcaatgaggttgtgcagatgaactttgaaatagccagtttcagcagcctttcagggactcagcccatcacgtggcaggtggagtacccacggaaggggaccacagacatcgccgtgtccgagatctttgtcagccagaaggacctggtgggcatcgttcccttggctatggtgagtcctgagttaccttggatgctcctgcattcagccacctgactgcatcctgtgtccttcctatctgtcatgggatgtttgctacaatgattttatggagtgtttactttcaaagtttctcgtctttcctcaccctggaagttgttacttttcatgagcctggcctttctcaactttagtcatgaagtttagtccagcaagtcacaatcattgc

SEQ ID NO: 7590 - DNA, 105 bp, mus musculus
ccttcagtgtatgtggggtgtggcttcttcgccaaggaagagctgcctgagtctgtctcagacccacaaagtgttccatagagtgggtgtgggcagcagccctgc

SEQ ID NO: 7591 - DNA, 33 bp, mus musculus
ctgagtctgtctcagacccacaaagtgttccat

SEQ ID NO: 7592 - DNA, 666 bp, mus musculus
ccctgctgtctgggtgtggacggcagccccaccctgctgtctgggtgtgagtgacaggccggccctgctgtctgggtgtgagtgacagccccgccctgctgtctgggtgtgagtgacaggccggccctcctgtctgggtgtgagtggcagccccgccctgctgtctggtgtgagtgacaggcccgccctgctgtctggtgtgagtgacaggccggccctgctgtctgggtgtgagtgacagccccgccctgctgtctgggtgtgagtgacaggccggccctgctgtctgggtgtgagtgacaggcccgccctgctgtctgagtgtgagtgacaggcccgccctgctgtctggtgtgagtgacagccccgccctgctgtctgggtgtgagtgacaggcccgccctgctgtctgggtgtgagtgacaggccggccctcctgtctgggtgtgagtggcagccccgccctgctgtctgggtgtgagtgacaggcctgccctcctgtctgggtgtgagtgacaggctggccctcctgtctgggtgtgagtgacaggcccgccctgctgtctgggtgtgagtgacaggcccgccctgctgtctgggtgtgacaggcccgccctgctgtctgggtgtgagtgacagccccgccctgctgtctgggtgtgagtg

SEQ ID NO: 7593 - DNA, 690 bp, mus musculus
ctgctgtctgggtgtggacggcagccccaccctgctgtctgggtgtgagtgacaggccggccctgctgtctgggtgtgagtgacagccccgccctgctgtctgggtgtgagtgacaggccggccctcctgtctgggtgtgagtggcagccccgccctgctgtctggtgtgagtgacaggcccgccctgctgtctggtgtgagtgacaggccggccctgctgtctgggtgtgagtgacagccccgccctgctgtctgggtgtgagtgacaggccggccctgctgtctgggtgtgagtgacaggcccgccctgctgtctgagtgtgagtgacaggcccgccctgctgtctggtgtgagtgacagccccgccctgctgtctgggtgtgagtgacaggcccgccctgctgtctgggtgtgagtgacaggccggccctcctgtctgggtgtgagtggcagccccgccctgctgtctgggtgtgagtgacaggcctgccctcctgtctgggtgtgagtgacaggctggccctcctgtctgggtgtgagtgacaggcccgccctgctgtctgggtgtgagtgacaggcccgccctgctgtctgggtgtgacaggcccgccctgctgtctgggtgtgagtgacagccccgccctgctgtctgggtgtgagtgacagccccgccctgctgtctcggtgt

SEQ ID NO: 7594 - DNA, 596 bp, mus musculus
gctgtctgggtgtgagtgacaggccggccctcctgtctgggtgtgagtggcagccccgccctgctgtctggtgtgagtgacaggcccgccctgctgtctggtgtgagtgacaggccggccctgctgtctgggtgtgagtgacagccccgccctgctgtctgggtgtgagtgacaggccggccctgctgtctgggtgtgagtgacaggcccgccctgctgtctgagtgtgagtgacaggcccgccctgctgtctggtgtgagtgacagccccgccctgctgtctgggtgtgagtgacaggcccgccctgctgtctgggtgtgagtgacaggccggccctcctgtctgggtgtgagtggcagccccgccctgctgtctgggtgtgagtgacaggcctgccctcctgtctgggtgtgagtgacaggctggccctcctgtctgggtgtgagtgacaggcccgccctgctgtctgggtgtgagtgacaggcccgccctgctgtctgggtgtgacaggcccgccctgctgtctgggtgtgagtgacagccccgccctgctgtctgggtgtgagtgacagccccgccctgctgtctcggtgtg

SEQ ID NO: 7595 - DNA, 264 bp, mus musculus
cgttacaaaggcagaaaggaaagaaagttctagaaagctcctgggaggttcaaatggtttcacagaacagggagagatgaacacttgctcagagaatgtgacatgttccagagagcaagtgctgcgtgaactgaacccctggcctgtggctgctctggtaggagagggagatggaactggctgctgaggggtctcgtgagggcgcctgcctgcctgcaagtggggggatatgcagccacagcagctctttccattttcttctaa

SEQ ID NO: 7596 - DNA, 261 bp, mus musculus
tggatgaatccagaggacattatgctaagtgaaataagctattcacaaaaagacaaatattgtaaggattttacttatatgaggtactcagagtagtcaaaatcataaaggcaaagtagaatggtggtttcctgggcctgaggggaagggacatgcagcgttattacttaatgaatatagagtttcagttttacaagatgaaaagagctatgaatatggatggtggtgttggttgtgcaatattattaatgtatttaatag

SEQ ID NO: 7597 - DNA, 4598 bp, mus musculus
taatatacttatttcactaattatgttttgtaaagggtttataagaagaccacaaagtgctgtgtgttattccaatgcaatttcttgctgacatgaataccactaatgcagttgcctgacctccaagtgctgaagcattgatattcttctcaagcctaatttgagtaaatacctaaaggaagctggttaaaccagatagcctctgaaagtctctcctggcaaaaatttaatatagtgtctaataaaaatgaaagccacttgtgagttgtgagaaatataaacaaatcaactttttagagaaatatttaaattgagtgtttcacctagtgatttaactcatgcttatctagagtaaaaggacttttttatgcaatgcagtgaacactggtagatggcactttcaaaacattaaagaaggctgtcataaaacgatataaaaagaattacagctggcaaacttaaaaaaaacaaagattggtaaatacagctcaaatatgggaggactagaaagcaggtcaccagcttccgaaaagcagtgtgtggtcagtattttcttccagggatgtggggtccagcttcttactcaagctgtcagcagggcaggtgggcagatgtggggggactcaagagccaaagacagcacattccccaggctccccatttttgggcaagcctcaccagactgaaggagatcttgctgagtcttcttctgagtcctaaacaactaatcacactaaacgtactctgtttatgcacaggcttcaaattaactcattataaaaagttgaggaaattctgaagtaacactcaacctattttattgcttgttgtacgcttaaataaaaaatgtctgggttggccgggcgtggtggtgcatgcctgtaatcccagcactttgggaggccgaagcgagtggattacctgaggtcaggagttcaagaccagcctggccaacatggtgaaaccccgtctctactaaaaatacaaaaattagctgggcgtggtggcatgtgcctgtaatcccagctgcttgggagaccgaggcaggagactcacttgaaaccctggaggcggaggttgcagtgagctgagatcacgccactgcagtccagcctggcaacagagcaagaatctgtttcaaaaaacaaacaaacaaacaaaaaaactgggaatttttcctttcaacatttgtatgtagttaattcagcaaatgtttattaagcacatactacatgctggctgctgctctaggggccgagggtaaaacaaaataacaaaatagttgaaaacctcaccctctcagggcttataggtggagggtgagcatttacaataaaatatgtaggtaaaatatgtagtatgcctggggagttaagtgctacagaagaaaaaatgtcagaggagcatggggagctctgtggtggtgttggtggggcctgttactgaaataggaatgatcaggaagatcgttgataagcgatctttgcacagagagttgaggggagccatgcaggcatcgggagaccttccaggtagtgggaattataactgtggagtccctgaggtggggtcacacttgggggactcctggccgagtaagaccactgttcctggagcaggaggagtcagggcgagagggactggatgaaggcagagaaccatgtccgtcggggtgagaagtttggtttttactctgagtgaaatgggaagccacgggaaggtttgttgcagaggtggggcatgagccgatgcatgttttgaaaggaccactccagcctcgatgttagaaatggactgtaggagatttagagccacaggcagggggatagtcaggtggctgttgcagtgacccaggtgaaagacgatggcagaggtgctgattaggggacctaagagctggcctcataacaggattgctgtcagctctccagcaaaccacgataaaattgtcttaaatggatactgaagttttctcagtgttatgtaagggtgaacaaaagcattatctagtagacagaataatggcccccacagacattcgtgttctaataacccctggaacctgtgaagaggtcaccttacgtggaagaggaggctctgcaggtgtggttatgcccaggctctcgaaagggaaagaccatcctgggtaatccgggcaagcccagtgttatcacgggggtccctgtgaggggcagacagaggcatcggagccagaggagggtgtgtgatgatggaagcagaggctcgagcaaggaacgtgggcagcttctagaagctggaaaaggcaagcaacgtctcccctccaccctccagaaaaacacagccttgcccacgctttcattaagacctattttttgacctccacaactataagataaaattgtgttaagccactaggtttctgataatttgctacagcaacaataggaaactatatatataggactgggaatatgtagaaatagaaatatactcacatgtgttcttagaaaactttgctagttgtattcacctgtagcaatattgtaagtctgtgcttgcttttggttcagactccctggccacccttccccatccaattgcactctcctagtctgtcctttataggaattctggagccattatttcaaatgataagcactttggaatcaatataatagagggaagaggttgagagtgactgcgtgtccagagagggaggctgctttgaggagatggcatgtgtgctgctactgaaagatgagcaggaccagcaggggcagaccaagtccaggacaaaggtcctggggtgagaattagcctggtctgttgaagagtatctactctttgcttcagtcttgtgagcaaaggacacagtggtagtagatgaagccaaagacatcagcgaagtccggctcatatagggtcttgtgggtgatagaggcgtttggacattgtcactgtggcgaaaagccatcagaaggtttggaaaaatagagtgacaggagcttactgacattttacacattgactgctgggtggggaatggttttcaagaagggaaagaatgaaagtggacttttcagcagtgtagttacgagcattcagagtaacctaaactagtgtggtagcaatggaaatgtagagatgtagacagatttcagatatatatggaaggtagaattgataggacttgctgatatggggcttgagggaagagagaaccatcaggaatacatctggtagtttggttcgagccactggctctaatataaggaagactggaggagttcaaagaaatgagtcaatgaataatgtgcttacgaaatcattaaacatttaggggttgaataatgttggctgtcagtcctggatatttgaaaatactgtgtgatgaatagcctcattgtagataatcagaatatgtgaaaacgcctattgttaaattggaaggagatttaaagatttgttttagaccataacttatttttaataaggacaactccaaatcacccctaaaaataaatgtgtgacttttgcacaaaaaatcccagagaagagtatttatattctgattcatctttttactacatttacaatcaggaaagtcataatctccaattttagcttcatagctaaaaagtacttctgttatttgtataaagggaaaaatgaataattttttaagttttctttttttctttttcttttttttgagatggagtctcactctgtcttccagactggagtgcagtggcgcgatctctgctcactgcaacctccatctactgggttcaagcgattctcctgcctcagtctcctgaatagttgggactacaggcgcctgccaccatgcctggctaattttttgtatttttagtagagacggggtgtcaccatgttagccaggatggtctcgatctcctgacctcgtgatccgcccacctcagcctcccaaagtgctggaattacaggcgtgagccactgcgcctggctgcggattcctttttaaatttacacataccagtttgattttcctcccaattaacctttgtagaactcggtaacttgattattttaggttaatgtttcaattccaagtttaaccctgaagaattctgatagatagatacagagaatttattaacatctgaatttattaacatttgaaaatatggtcactagatttcaaacgtttatcatatataaaatattttaaatggcagattaaatatctccctgtgattgaaacacagtgacatgtttcaaaataatatttaattatctttttaaaaatcattaattttggaaatctatgactgggatgaaaaatatgttttcaggctcatagtaaatcagtattaaacaagttgcctccctcattccctctctgtctctttctctctcctctcgtgaacacactccgtggcagatggtgcgtgagcagtacactacagccacagaaggcatctgcatagagaggccagagaatcagtatgtctacaaaattggcatttatggctggagaaagcgctgtctctacttgtttgttcttcttttactcatcatcctcgttgtgaatttagctcttacaatttggattcttaaagtgatgtggt

SEQ ID NO: 7598 - DNA, 281 bp, mus musculus
ggtccaaatgtgtcttttctggctttacacagaatattctaggatatatattataatctttgcttttgttgctctcagcccttctattatatttacccataatagtctattatgacctggaaatgttaaacaattttgcaagtttactaagattctgtaccaatgagtcttcaactcaagtagataaaaataatttacactatgttgaggaaaaagactcataaatctaagagtagcatgtcaagcactgtgatagaagtatatgggaatggagaagggtg

SEQ ID NO: 7599 - DNA, 588 bp, mus musculus
gcaggcactggtggggaggatggggaaagggagctaggtttcttgtttgtctctccagaatgcagaacaacgatccatgggtgagagttacagggaatgagtttcagctcaagagaaagaagaactttgaaagttacaatggccagtggaatgggtgttctcatgaagcagtgggttcctccacactagatgtgctcacacacctggctgtccacttgccagaggacatcatagtagatcggcatccagttacatgccctttaaagtcttttttgcctccaaaagtaattgactggttgattgattaaccgcagaagatgtcccgaagaagggtaacttagatttagaatgaaataaaccccaggatttagtacagtggagaggggcagggccagccctcagctgaagaacagtgttgggatgtgatggagaagatgtgttaggggcaacgactggaagagagcaaatgtttatgtccagagcaaaattctgttgtcagaaatggggctttgtatgatgatggatgtgttcacttatccattcactccacaaatattaattttctggtatatttatataatggagtac

SEQ ID NO: 7600 - DNA, 638 bp, mus musculus
ggatgaagtgtcctcttgctagcaccaataaaagatttctaattaacacaattaaaaacacattgccctctcataaagagcaagaccatgaacaaaaagagggcgataaggaaccagcgaagagccaggcccagaaagaagaaaacccgaagaaacacagaagccatccttacaagcacagcttccgcgctcgaggttccgccagttactccccgccacgaaagcggagcagccaggacaagtacgaaaagcggtccaaccggcggtgaggctggaaccagggccagccagccctgcgggcctccgtgctccttcggggtgcggtgtgcggagaaggcctgagctggcagggcaaacacctgagagtgactttgacattaggtcctttgttgtttttaaagaggctgctggccacaggcaaaaaaaatgacctagcaactcttgaggaaacaagtgcaaaggaggatgtcttggcaagtttaagctacttctgcagtgtagtagacttacatattgttgtttatcttgtttggaagtgtgtttcaaaataaacatgtctagaatttaaagttttcagagattgttaaaactggttccaattttttggtcatttctcagaaaaataaaatacttataaa

SEQ ID NO: 7601 - DNA, 638 bp, mus musculus; identical to SEQ ID NO: 7600

SEQ ID NO: 7602 - DNA, 1105 bp, mus musculus
cccactttcttaattgaccgagtggggttgcacaagtgaatccatacaaaaatggttaatatctttatactccctcttagaattgatcatatgcaaaataattcatacagaactctgtgtttcaaagctggtggaaaagatttgcactctgttcatttcgggtgggaagataaggcacctcattcagaatggatgctccactagcaggtagctcatgtcttggaaatcacgctgcaggctcggccctccaacaagccacatagaattatttaccctaaggtacttggagttttaaaataaattgatccaattaagtcacacaaatagaatttctcaaatccatctagcctgcagccacatttctctggctctctgtgccaaataggatcctggcattactgcttcctatttctctccttcccttttgctccctacagcagtaattttgtgggaagtggcctagtatctttagcatctgagggccgctgccacttctcagagcaagagagatcctctcagggtattcctctgggctgctcatggtggaggtcatgtcgccccgaaggagagaccatggaggatgttccccagaagcaacagcgggaggtggtgttcccggtctctcctcgtctatctacaatgcagcatttgactatatccttcccattttataccttgtgtcccgggcagctcactttggaggcttattgagaacttgagttggtgcacgtcattttgcttgaagcagatgtggcggtcacgcaatgcctttcttcccaggtaccagccagagcagcctaacctggtataccagatggccagtacttccgacgagttagatccagcagaccaaaatgaattggcaagcaccaatgattcccagctgggctttttaccagaggcagagatgttctctttgaaaaccatactctcacccaaaaacatggagccttccaaaatctctgggctaattgtgaacatttcaaccagcctcataggtaagagctagcccttccctggggccttgcttgttggcattgcatggtttctaggcagtggagctggagttgggggaaggtgccagagaagatgagcatctgtcttg

SEQ ID NO: 7603 - DNA, 583 bp, mus musculus
ccctatttctctcctactatcttggtttgatgggctccatgtgagctactcatggaaattcttgaaactagaaagaaaactgattactaagatttataaggttgaaatgatttattcatccctgaaggaaagagacaattcatcacatttcaaaagactggacaatcaagctctgactatatttatatgacatcataaagctgttttcttgaagaatgactaagccgcctgcttaaaaatgagacgacttattctgggcagacattttgaacacgagtattttagaagccagtgtatttttttggccactgaagaccttttcagtggaaaagaaaactcaagagtgtaataattttgactgaatgttgcatatcttttaataaatttatgtggaaaaatgtttattaaacatctagtataggttaagtgttgagctagatgcatcatgttccctgccaactaggggctcacagaggttcacagttgggtagggaaagaaataagtaaataaataattataacaaagtgttaattgctcaaaataaagtcaacccctacctaaaacaagaagttcaaaaatctt

SEQ ID NO: 7604 - DNA, 181 bp, mus musculus
atttaggtattaaaaactataatcaaaggcaaagtgattatcataaaaatcagaataatggtttgttataagtagggagagggttagaatgggaaacatggagtactcctgggatacgtggtaataatttatttctttagctatttagtggttgcaaggatgttcacttcataatagttta

SEQ ID NO: 7605 - DNA, 807 bp, mus musculus
caaaaacagttctatgaggtaggtagtacaattatcatgctaatttttcagatgaggaaaatgaagtacaatgaggtgatatgacttgagcaagttccccagctagtaaaaggcacagagacacttgactctaaggagtccaccattgtcctctacgggatgcaccgtactgcttacacagagaagcctacatgcaataggccttcctttcctctttccattctatttacttgcttcttctttttttttttttttttttttttttttagatggagtctcactctgttgcccaggctggactgcagtggtgtgatcttggctcactacagcctccgcctcccggattcaagcgattctcctgcctcagcctcctgggtagctgggactacaggcacgcgccaccatgcccagctaatttttgtatttttagtagagaccggttttcaccatgttggccaggatggtttcgatctcctgatgggtttgaaagttatgcatgttagaattatgcctaagataagcattaacaagattctgagatggcattctttgagtaaagcataaactttagaacatgtcttctcctttagcaggactggggccttgtttctttttgccctggtttttgtctacctaggttgggctctggacactgaggggtcatggtagtcctcagtcttccctgactcaccgctgggtggcagtacaccacacttcctttattcctgctcttttatgcgtgcgtgtagaagtgggagctctgctttagggaccactctccaattctcaatctcctcttttgctttt

SEQ ID NO: 7606 - DNA, 1449 bp, mus musculus
gaaaggcaacctgggagcggtagttctcctgggcgcctagcattgtcgcccacgctgcagtagcggcttctgcggctccaagccagcgggtcctgtgaaggcgagcagacgcggagaaaggacgcgggagtgagagagggtgagtcagccactgtctaaacgataacgggaggcggttctgcggggtagggttgaattcagtaaatgggctcgtgctgctgtctcttcggagacgctgctatcttagcgtcagcgagggaaggttgaggaggagccagagccgggtcctgcagcgtttctcgccatcagcgcccgtcgccatctccaccatgcagtcccgggaagacgccccgcgctctcgccgcctagccagtccccgtggtgggaagcggcccaagaagattcacaaacccacagtttcggcctttttcacgggtccagaggaattaaaggacacggcccattctgcagccctgctggcacagctcaagtccttctacgatgcgcggctgctgtgtgatgtgaccatcgaggtggtgacgcctggcagcgggcctggcacgggtcgcctgttcccctgcaaccgcaatgtgctggccgcggcatgtccctacttcaagagcatgttcacaggtggcatgtacgagagccagcaggccagcgtgaccatgcacgatgtggacgccgagtccttcgaggtgttggtcgactactgctacacgggtcgtgtgtctctcagtgaggccaacgtggagcgcctgtacgcggcctccgacatgctacagctggaatatgtgcgggaagcctgtgcctccttcttagcccgacgtcttgacctgaccaactgcaccgccatcctcaagtttgcagatgcctttggccatcgcaagctgcgatcccaggcccagtcctatatagctcagaacttcaagcaactcagccacatgggttcaattcgggaggagactctagcagatctgaccctggcccagctgctggctgtcctgcgcttggatagtctggacgtggagagtgagcagacagtgtgccatgtggcagtgcagtggctggaggctgctcccaaagagcggggtcccagtgctgcagaagtcttcaagtgcgtgcgctggatgcacttcactgaagaagatcaggactacttagaagggctgctgaccaagcccatcgtgaagaagtactgcctggacgttattgaaggggccctgcagatgcgctatggtgacctgttgtacaagtctctggtgccagtgccaaacagcagcagcagcagtagcagcagcaactctcttgtatctgcagcagaaaatccaccccagagactgggtatgtgtgccaaggagatggtgatcttctttggacaccccagagatccctttctctgctgtgatccatactcgggggacctttacaaagtgccgtcacctttga

SEQ ID NO: 7607 - DNA, 1170 bp, mus musculus
ctggaactagatgaaaatcgcttacaatgccaagatgatccgaaacgctttttcaaagggcaggaggagacttgctgtttactgagtgctcactgagagccagcccatgtcctaatttgagtctagggataaaactggaagacagatcgactccttagccggttctttccatgaaaacgttgataatgaatttaaaaagcacgccctcaagtttaacctctcctgtagttggtaacccatctgcattcttttgaacgtcacaaggaagaaacggtgcccggcgcagcttgccctggagcgtagctggagtgcggctgagttttcgctccgctgaagccggttactgtccagtgggatttcgctcaagcctcagcacccccaggaggggaggcgcctgcagcgcgggccgccagcgtttggagggaggcgggtgcgggctgcaccgggagacggcgagagcgagagacaggggcgctgggaggcgtctcccgggacccgcgtctgctcccgtcgccagcgcggtggccagcctagcccagcccagcccgggctttcctcgccgctctccgcgcgcccggccccgggggaggccgctcctttccgcgcggccgcccggtgcccgtgaccacccggcggccgctttcggttccgcgccttataaggcctgacaggggggtcacgtgtgtcccgggccacccgccgggaggaggggcggcgggggggaggggcgggtagcggggaggaaaaggggagggcgccgggggcggaggaaggagcgaggggcggattctgcgcccgtgggaggctgcggcggtggcggggagcggaccgctcggagccgcgcaggggagcgggaccgtggagaaggaggaggcggcggaggaggaagggaccggcgcgggggcgggagagcgcggcggaagccggagacggcgggtgggccggtggctggccccgggcggggagccggggcggcggcggcggcggccgagagggaccgcggcgagggaagcgcatccaggagccccggcgcagcggcggcggcggggacccgggtctgcgcgcccgggcggccggcgggcgcgggctggcgcgatggagcctcagcacgtgcgccccgcgcccggcgcccgcagcccagcgtgggaggaaccggtgggtaccgcgccc

SEQ ID NO: 7608 - DNA, 1438 bp, mus musculus
gagagccagcccatgtcctaatttgagtctagggataaaactggaagacagatcgactccttagccggttctttccatgaaaacgttgataatgaatttaaaaagcacgccctcaagtttaacctctcctgtagttggtaacccatctgcattcttttgaacgtcacaaggaagaaacggtgcccggcgcagcttgccctggagcgtagctggagtgcggctgagttttcgctccgctgaagccggttactgtccagtgggatttcgctcaagcctcagcacccccaggaggggaggcgcctgcagcgcgggccgccagcgtttggagggaggcgggtgcgggctgcaccgggagacggcgagagcgagagacaggggcgctgggaggcgtctcccgggacccgcgtctgctcccgtcgccagcgcggtggccagcctagcccagcccagcccgggctttcctcgccgctctccgcgcgcccggccccgggggaggccgctcctttccgcgcggccgcccggtgcccgtgaccacccggcggccgctttcggttccgcgccttataaggcctgacaggggggtcacgtgtgtcccgggccacccgccgggaggaggggcggcgggggggaggggcgggtagcggggaggaaaaggggagggcgccgggggcggaggaaggagcgaggggcggattctgcgcccgtgggaggctgcggcggtggcggggagcggaccgctcggagccgcgcaggggagcgggaccgtggagaaggaggaggcggcggaggaggaagggaccggcgcgggggcgggagagcgcggcggaagccggagacggcgggtgggccggtggctggccccgggcggggagccggggcggcggcggcggcggccgagagggaccgcggcgagggaagcgcatccaggagccccggcgcagcggcggcggcggggacccgggtctgcgcgcccgggcggccggcgggcgcgggctggcgcgatggagcctcagcacgtgcgccccgcgcccggcgcccgcagcccagcgtgggaggaaccggtgggtaccgcgcccgcgcccaccccctcccgcttctcctttgctccccccgcccgggccgggttccgttcaggaaatggcccgggatgaggtccccagctgcttcccagccgggttagcgcttcctccgccgcccgggctcctcctcgcgcgccgcctggagcgcctttgtccggctgatcgaggctctccccgaggaaccgctggcaaaccgctggcgacggccctgcgaggaccgtttcccggcttcaccgactcctcaacttttcacttgctttgagaccgtggaatgtaggcgggggagaggagaagccaggctgcgcggtcagcgtggggagtctgaggagcccggttttccctgtcgagaccgcgccctg

SEQ ID NO: 7609 - DNA, 1441 bp, mus musculus
tgcattcttttgaacgtcacaaggaagaaacggtgcccggcgcagcttgccctggagcgtagctggagtgcggctgagttttcgctccgctgaagccggttactgtccagtgggatttcgctcaagcctcagcacccccaggaggggaggcgcctgcagcgcgggccgccagcgtttggagggaggcgggtgcgggctgcaccgggagacggcgagagcgagagacaggggcgctgggaggcgtctcccgggacccgcgtctgctcccgtcgccagcgcggtggccagcctagcccagcccagcccgggctttcctcgccgctctccgcgcgcccggccccgggggaggccgctcctttccgcgcggccgcccggtgcccgtgaccacccggcggccgctttcggttccgcgccttataaggcctgacaggggggtcacgtgtgtcccgggccacccgccgggaggaggggcggcgggggggaggggcgggtagcggggaggaaaaggggagggcgccgggggcggaggaaggagcgaggggcggattctgcgcccgtgggaggctgcggcggtggcggggagcggaccgctcggagccgcgcaggggagcgggaccgtggagaaggaggaggcggcggaggaggaagggaccggcgcgggggcgggagagcgcggcggaagccggagacggcgggtgggccggtggctggccccgggcggggagccggggcggcggcggcggcggccgagagggaccgcggcgagggaagcgcatccaggagccccggcgcagcggcggcggcggggacccgggtctgcgcgcccgggcggccggcgggcgcgggctggcgcgatggagcctcagcacgtgcgccccgcgcccggcgcccgcagcccagcgtgggaggaaccggtgggtaccgcgcccgcgcccaccccctcccgcttctcctttgctccccccgcccgggccgggttccgttcaggaaatggcccgggatgaggtccccagctgcttcccagccgggttagcgcttcctccgccgcccgggctcctcctcgcgcgccgcctggagcgcctttgtccggctgatcgaggctctccccgaggaaccgctggcaaaccgctggcgacggccctgcgaggaccgtttcccggcttcaccgactcctcaacttttcacttgctttgagaccgtggaatgtaggcgggggagaggagaagccaggctgcgcggtcagcgtggggagtctgaggagcccggttttccctgtcgagaccgcgccctggtcgtcacctgggcgcgcaggttcccggggacacgcgcctggagaggctgagcgcggcgcggagcccagaaccacgcctccgactcctgccagccgctaaagcttgggcgtctggagggtgcaacgggttttgccggggacgaagcagaa

SEQ ID NO: 7610 - DNA, 1378 bp, mus musculus
acaggggcgctgggaggcgtctcccgggacccgcgtctgctcccgtcgccagcgcggtggccagcctagcccagcccagcccgggctttcctcgccgctctccgcgcgcccggccccgggggaggccgctcctttccgcgcggccgcccggtgcccgtgaccacccggcggccgctttcggttccgcgccttataaggcctgacaggggggtcacgtgtgtcccgggccacccgccgggaggaggggcggcgggggggaggggcgggtagcggggaggaaaaggggagggcgccgggggcggaggaaggagcgaggggcggattctgcgcccgtgggaggctgcggcggtggcggggagcggaccgctcggagccgcgcaggggagcgggaccgtggagaaggaggaggcggcggaggaggaagggaccggcgcgggggcgggagagcgcggcggaagccggagacggcgggtgggccggtggctggccccgggcggggagccggggcggcggcggcggcggccgagagggaccgcggcgagggaagcgcatccaggagccccggcgcagcggcggcggcggggacccgggtctgcgcgcccgggcggccggcgggcgcgggctggcgcgatggagcctcagcacgtgcgccccgcgcccggcgcccgcagcccagcgtgggaggaaccggtgggtaccgcgcccgcgcccaccccctcccgcttctcctttgctccccccgcccgggccgggttccgttcaggaaatggcccgggatgaggtccccagctgcttcccagccgggttagcgcttcctccgccgcccgggctcctcctcgcgcgccgcctggagcgcctttgtccggctgatcgaggctctccccgaggaaccgctggcaaaccgctggcgacggccctgcgaggaccgtttcccggcttcaccgactcctcaacttttcacttgctttgagaccgtggaatgtaggcgggggagaggagaagccaggctgcgcggtcagcgtggggagtctgaggagcccggttttccctgtcgagaccgcgccctggtcgtcacctgggcgcgcaggttcccggggacacgcgcctggagaggctgagcgcggcgcggagcccagaaccacgcctccgactcctgccagccgctaaagcttgggcgtctggagggtgcaacgggttttgccggggacgaagcagaaagctgacttcgctttcgcctgggatttcgctgcacacgcaacgcggaggttgagtaattttaggaaccaagagtagtgtgtgtgcgtgtcttaagtgtgcgaggataaggaggaagagaccagggggctttggatttgttccctcaaactccctcaacttc

SEQ ID NO: 7611 - DNA, 1112 bp, mus musculus
ggggatcgctctttctgaacgaaaagttctcagagcggagctgaacctcccggaaaatgctcttctcttccgtgtgcgccggatgggggtgggggtgggccagaaactgaacgccgccgtcaggagagctgaggggacccgacggccctggcggaggcgggagaggtacggtcctcggagtggggctgggggtggggaaaccgacgaggggcagcccccgactgtcttggtggcagaggggacttttattcagctggaaccgcgcggcgaggcccaagtgtctctggagagattcggggttcaggaggtggcgggtgcacccaagggtgctgggaggaagctccaggttcccattcttccccagggatcggcgttgcccctgctgtccagaagtgagagggggtgtgcgggcatcgccactacggggtgggctgcagaggtttcctgcctcccccaccctcctgtccatcctagggacccagaccgtaagggagtggaagagatgttgctccaaaccctgtcaccccatcctctctacccgcgctggtcctatccgaggctgggtgcgcaggggtccgaggcgggcgggggtccgttacctctgcgtcccaccgtggccgccgctccggcgggaaccgagcggaggagccgggtggacccctgcctggagggcgcctgccccgggcgacccttacctcgcgggggtagctagggaaacggaagatggcggcggcggccgggcacggggttccgggctccgctcgggcagagcccacccgctgaccaacgccgccgcccccgccgggcggtgctgtgtccccgcaggagtcggagaggatggcaggggccggaggccagcaccaccctccgggcgccgctggaggagcggccgccggagccggcgccgcggtcacctccgccgctgcctcggcggggccgggagaggattcgtctgacagcgaagcggagcaagagggaccccagaaactgatccgcaaagtgtctacctcggggcagatccggaccaaggtagggcggaggaggcgggcctgagggccgcgtggaaagcgggaggtggagagggcgcgggggcgctggaacgcgccgggcga

SEQ ID NO: 7612 - DNA, 1112 bp, mus musculus; identical to SEQ ID NO: 7611

SEQ ID NO: 7613 - DNA, 1111 bp, mus musculus
ggtcctcggagtggggctgggggtggggaaaccgacgaggggcagcccccgactgtcttggtggcagaggggacttttattcagctggaaccgcgcggcgaggcccaagtgtctctggagagattcggggttcaggaggtggcgggtgcacccaagggtgctgggaggaagctccaggttcccattcttccccagggatcggcgttgcccctgctgtccagaagtgagagggggtgtgcgggcatcgccactacggggtgggctgcagaggtttcctgcctcccccaccctcctgtccatcctagggacccagaccgtaagggagtggaagagatgttgctccaaaccctgtcaccccatcctctctacccgcgctggtcctatccgaggctgggtgcgcaggggtccgaggcgggcgggggtccgttacctctgcgtcccaccgtggccgccgctccggcgggaaccgagcggaggagccgggtggacccctgcctggagggcgcctgccccgggcgacccttacctcgcgggggtagctagggaaacggaagatggcggcggcggccgggcacggggttccgggctccgctcgggcagagcccacccgctgaccaacgccgccgcccccgccgggcggtgctgtgtccccgcaggagtcggagaggatggcaggggccggaggccagcaccaccctccgggcgccgctggaggagcggccgccggagccggcgccgcggtcacctccgccgctgcctcggcggggccgggagaggattcgtctgacagcgaagcggagcaagagggaccccagaaactgatccgcaaagtgtctacctcggggcagatccggaccaaggtagggcggaggaggcgggcctgagggccgcgtggaaagcgggaggtggagagggcgcgggggcgctggaacgcgccgggcgatcccgggaaggcggggaaggcggggaaggcggggaaggcggggaaggcggggaaggcggggaaggcggggaaggcggggaaggcggggatggtgagacggtgaggcggggcggggcctggggcgcgggcggggcggggaggggtggggcggggcccgggggcgctgga

SEQ ID NO: 7614 - DNA, 1111 bp, mus musculus; identical to SEQ ID NO: 7613

SEQ ID NO: 7615 - DNA, 830 bp, mus musculus
tcagtaggtcaaaactggtcaaatatggaatgcttcatatggttcaatctaatatgtcatcatttaaccagttttttgcagaagtaaatatgggttgttttaggacaatgcactaatctcagctttttcatagtggatttgatggtttttaagtaaagaatggaactggtatgcttttgaaatcagtgtggcttaataaaatcctcatgtgtattttagcaccctcatcataactccatacagtatactttttgttccccttttcattttccatttattcctggtttctttgtatgtctatgctgtcctctctactattttcctcttcctctgttttgaactttttcctttctctgaataacctaagtggaatttcaggtggtctcatctagccactcaggtgctaaacactaaatgattttatgcctgcctttatttcccaaagacaaaaagtcacttatgtacaaaagtgaaagtggtgctgatgcaggaaagccaaaatggagtcctaacacttgtcatatctcttccccctctttaccttcttgagtttttggatttgcattcagacatactgttgtagagaatttcacaggtatttactgagaataagatatttttgaaacaacgctaatacagattcagacaaattgggttttgaggatgaatgtgaaagaagctttgtgtgttttttgttggcccatgaatactgcaacctttcattttatgggaatggctggaagaaacttggtcaggcttacagcctaggattgttcaacaatcataaaccaaacagtataaacaaatgggaaccatctcaatgacttttt

SEQ ID NO: 7616 - DNA, 830 bp, mus musculus; identical to SEQ ID NO: 7615

SEQ ID NO: 7617 - DNA, 680 bp, mus musculus
tatgcttttgaaatcagtgtggcttaataaaatcctcatgtgtattttagcaccctcatcataactccatacagtatactttttgttccccttttcattttccatttattcctggtttctttgtatgtctatgctgtcctctctactattttcctcttcctctgttttgaactttttcctttctctgaataacctaagtggaatttcaggtggtctcatctagccactcaggtgctaaacactaaatgattttatgcctgcctttatttcccaaagacaaaaagtcacttatgtacaaaagtgaaagtggtgctgatgcaggaaagccaaaatggagtcctaacacttgtcatatctcttccccctctttaccttcttgagtttttggatttgcattcagacatactgttgtagagaatttcacaggtatttactgagaataagatatttttgaaacaacgctaatacagattcagacaaattgggttttgaggatgaatgtgaaagaagctttgtgtgttttttgttggcccatgaatactgcaacctttcattttatgggaatggctggaagaaacttggtcaggcttacagcctaggattgttcaacaatcataaaccaaacagtataaacaaatgggaaccatctcaatgactttttctgcctttgggtcatctcg

SEQ ID NO: 7618 - DNA, 680 bp, mus musculus; identical to SEQ ID NO: 7617

SEQ ID NO: 7619 - DNA, 115 bp, mus musculus
tcaaatcaacaaagtttctaatagagaagtagaagaaatatcttttgagatgtaagtagcttggtctgtcttctaaagtaatacatacctgttaaacttgaggtatttttttcat

SEQ ID NO: 7620 - DNA, 814 bp, mus musculus
agcatggaaattaggttttatttattatataaagaagcagtttgcttaaggaagatgattcctgtttggatgtaatttatagatttgttagaaatagaactgcttgaactaacagtggtttttcccatagatttttgtgcttggcacaaactgctgtggctgtttggggttaggtgacgtccagagcaccattgaacctcggagactggattctttaaatggcaaaaaaatagcctgcctcagctatgggagtggtccacatattgtccttgcaacaacaggtaacctaggaaccccatgtagaatttcagctttattcgcagctgcccttgagaacattgtttaattggttgagagttgctagctcttcctgtgaaattgactatgttttggataccataaaacatgaatgtatctgaatgccagcataaggtgatgtggcagatggaatctaggaatcattggcattttagatgtatgaatgacaacgctgtaagcccagtaaacactgacgaactgattgtggactttggcaagtctgtctgaactttggattcttgatctatgaattgaaagactaaaccttgtgtccaacatccccccgccaactcttagcattctgtgattcttacactaaagagtgactgatggctgtagttggcattagtagtagggattagccacttcataagggattgactagaaaaattccttgctctgagtgaagcaaggaggaaaaaaggaagaaaataaataaaacttctccccaaaaggttgtaaccatggatttgtagtttaattcacatcaagactg

SEQ ID NO: 7621 - DNA, 629 bp, mus musculus
acccctcaaaaatgaaaacaaagaaaatatttactgaattacgaatcaattttaaaggttgtgatagtgacctcataacttctaccagttcaacctcataactttaatcagttctttgtttttaaaaagtaaattgagtcacagtgaaatattggaggttaaaagccaaaagcagttttagcataactagagaaatgcagggaatctatcaagaaatgagaactagcaagagacatttaaattatgcaacttgctttttaaaaagttgaagtaatctgttcataaacaaggtaatttggtttcaattttagcagcctaaatatttactagaatgtgctaaccagattttgctattttcttcctctgaatcttccttgttctttattcatgtatttcttcattcagcaactatgagctgagaatatgatgtgcgaacagccttgtgctgtgagcagaagaggtacaataaaataaaagcctgagaatcctgctcctattccctgagttggatttatctaatttctaacattataagaaactaataccaatatatgaaggacttaaataagtactaagaaaataaaaaccttttaggatctcagatttctcttgtttcatttataaatgta

SEQ ID NO: 7622 - DNA, 782 bp, mus musculus
tcaatcgtcatatattttaatttaattttcttattctgtgatcatatttagcagacccagagtgcttctcgttttcatttctgaaggatgtgtatgttttctaggaaatttttatctcctgtttattgcctgttttaacttatctcaaatatttatagtctttattaggattttttattactaatattttaaaacaacccaaataatgtttgagtcactctttgcttatgagcctatatatagattaacctcatgactaagtcaacatggatggtttccagaactaagtggctctttcttaccctgggaatcttccagctgattactgatcctctgtgttgtctttaacagaacttcatccatgataagttgtccaatgtcagactttttgtttgctgcaaattaagaataaggggacaggttatatttacccaggagagaaggagtaaaactccactggatatcttttgaggaactggccctatttccatttttgtttagtgatatctcagtgctgtgccttaaactttgttaatttggattaactggggagaatataagtttgaactccaaaacatattaaaacaaatgctttttttttgcatttaagagcatctagactgaaacttgggatattttgctaaatgttgtccaaggaattttcagttggctagataagaatagtggtatataaatgttgccactaagggtttttagtatttaaaaataccatttgctttcgttgtgtgccacaacctctcccactttccacccccaggcct

SEQ ID NO: 7623 - DNA, 601 bp, mus musculus
tctttatatcatcttccctgtctatgtgtctgtgtttaaatttccttttattataagaacactcatcatattgaattagggcccactctaatgacctcatcttaacttcattagctctataaagacctaatctgcaaataaggtcacatttcaacctaaaacaattaccaggaagggaaaatacattggtaagcatttcacaatatttctgttatcccatcacattaaatctgtacattaggatggagcaagaatgctgttagtactctggggatgattgcctttgatggctttaaatgtaattgaaagttgtcttagcattttcttatactgtcactgacactctaaggtaataactctattagtgaagatttggactggggtgtaactggaaggggcaaaccctttgctacatgaggttcctgatcttttaaaaagtaagaaaagggggccaagagatgaagccgatgttatatttttcccaggtaaacttgacactacgtcaacccctgctacatcttagtaggagagctgaagggagagtatttgagccaatgaataggcagcagtgagtagagctgatggtggaggattaggcaag

SEQ ID NO: 7624 - DNA, 233 bp, mus musculus
atttcattatccttgttggttttcctccaaggtcttatagcattcttttcttttttttcctatttactttcacaaagagaggatttttgtttagggaatcctgtgtattgtcatgattgtgaggcttgtacatttagagggcgattgttacatcctctggaatcagatactcctctgaaagaacttcattatagattttaacatttcatattattgaacatccatcttcacca

SEQ ID NO: 7625 - DNA, 698 bp, mus musculus
catcagacgggcttttggttaaacaaagagaaaattttttaattaaaaaattgtaattagaggatctactgaggaacattctgtggaactcatatacatgttttaagtgaagcagccagatgcaaaacagctatatgctgtatgattccacttatattctgttctggaaaaaagtccagagaagataaccatagggttcagggatttggggtgagatgagggaaatcccacaaaggagcagcaaaagggaatttttagggagtgatggagctgttctgtatcatgattatagtaatggttgtaaagctctatcagatttcagaacacatggaaatataaattgctaacaacatttttctgtatgaaaatatacaaataatttataaaatttctaattagcattctcacaaagactagggaaggtagcacttttttaaagaagaaaccagaagcttctgggaagaagaaacattcagaaaacaggagccaaatataaatttctctaaatattactgttgaattgtttttttaaaaaacaactaagaagccctccgtttccctctgtgtgtgtgcgtgcatgtgtgcatgcatgtgtatatgtatgttggtgggagaaggacattttgagaaagaagtcttttaggtgacttattatagtggttgtgggagaagtttaaaatgtacataggaaaataaag

SEQ ID NO: 7626 - DNA, 745 bp, mus musculus
cactctgagtgatatcagtagtgctaagtactagggtttgtagtttgtagtgtagtttatataagatgaagtatgaactttggaactttaattttctgattttatggatgatgttttttctctctgcagcatgctaagaagggaattgtatatcatcaccattatgatactattactgtggagttggtttacttctcttgattcaaatctctctttaagaatgtgtaaaatacttatggccatcacagggctatttgtgctcttaaattaccaaataatatatgtttcaaaaatcatggctcatgtaacaatacctttgttttcactaaggaaaatgtatgttttatggaaccctccttaatttcaaaattagaatgcccataacattctattacattatatacagaatagagcctagtaaaaaatactgtgagaagcttgtacttctccaaaacagagacttcttgaatccgcatattttgtgatctaatctttaggatacgaatatatttcttgcgcactaaatcttcattcattctatcaatgaatgttcactttctttctcattttgagagctaaatgtaaggtgtaaaggaaataaataagttggggaattattataggagagaataagattggcagaataagtcacttattgcattagtggcatctgcctaaaatcattcaccacttcaaataccacaaaccacaaaccatagtacctagcactgctgatatcactcag

SEQ ID NO: 7627 - DNA, 13653 bp, mus musculus
caatatgatattaaattcgaatatgagatacaataaaaccatttttagttttttaagattgttacattaggtgtcaaaacaataccagcaaaattttaaaataaagagcaatgtagatcaaacatgataaattgccttccaaaagagaatgctaaaaaaatagaaaataaattcactatgaaaataaaatgcacatttaaacagaaaagattgtctgcatagcccaactttatgagatctctgtaatttcacatatcatgacttatagatggcatatgatatttgacataggaagaatttgaaatgaagaatccaatctagaatgtaatattgtaagaaaacataagcaaactgcttgctgagccaaggtattttatttcctaataattaaaataaaaattatactacgattttgtattttcaaaaaatttgcatggatacatagtaggtatatatgtttatgggtttcatgagtttatttgatacaggaatacaatgtataataatcaaatcagagtaaatggggaatacagcacctcaagcatttatcctttgtgttacaaacaatctaattatactcctttagttatttttaaatgtacaataaattattgttgaccatagataccctattttgctatcaaacactagatcttagtcattctatctaattataattttgtacctgttaaccattctccccaccttcaccaactacccttcccagcctctagtaaccatcattctactctttatctccatgagtgtaattgttttaatttttagattctatacataagtgagaacatgcaaaatttgtcttcctgtgcctagcttatttcacttaacataatgacctccagttccatccatgtggtttcaaatgacagaatctgttttttatggatggatagtattcatcacgcatgtgcaccacatgttctttgtccatatgtctgttgatggatatttacattgcttccaaatcagctattgtgaatagtgctgcaataaacatgggagtgcagatatctctttgatatactgattccctttcttttgggtatgttacccaccagtgagattgctggatcatgtgatagttctatttttagtttttgaggaacctccaaattgttctccatagttgttgtactagtttacattcccaccaacactgtatgatggttctcattttccacatcctcacccacatttgttactgcctatcttttggataaaagccattttaactagggtgagatgatatctcattgtggttttgatttgcatttctctaatgattaatgatattcagcaccttttcacatgcatctttgccatttatatgcttctttgagaaatatctgttcatatcttttgccaatttaaataattataaattattatatttttacatactgagcttttaaagcttcttatatactctggctattaatcccttgtcagataggtactttgcaaatatttcctttcattctgtgtttgctttgttgttgtttcctttgctgtgcagaagctttttaacttgatgtgatcctatttgtccatatttgcttttgttgccggtgcttgtgaggtattactcaagaaaactttgcccagtccaaggttctggagagtttctccagttttattttagtagtgtcatagtttgaggtcttaaatgtaagtattcaatccatttaatttgatttttgaaaaaggcgagacacagtctattttcatccttttgcatatggataaacagctttcccagcaagattaattgaagagactgtcctttccccaatgtacgttcatggcatcttcactgaaaattagtttactgtagatttatggatttatttctgggttctcaattctgtttcaatggtctatgtgtctctttttatgccaataccatgatgttttcgttattatagctctgtagtataacttgaagtcaggtaacgtgatgtctacagctttgttctttttgcttaggatcgatttggctattctatcttttgtgcttctatgtaaatattaagatttttttatattactgtgaagaatgtaattggtatttttacagggattgcattgaatctgcagactgcttttggtggaatgaacttattaacaacactgattcttccaattcatgaacatggaatatctttccaattttttgtccccttcaattttttgtttcaatgttttctagttttcattgtagagctctttcacttcattgcttaagtttattcctagtattttagtttatttgtagctatataaatgaaaaaaattgatttatttttcagattgtttgctgttggcatatagaaatgttattcattttggtaaattgatttttcatcctgcagctttactgaatgtttatcagttctaatagtttttttacggcatgcttaggttttcccaaatataaggataacttgacttctccttttccaatttggaagccatttatttctttctcttgtctgactgctctagctagaactttcattactacgttgaataacagtggcaaaagtgggcattcttgccaagttccaagtcttagaggaaaggctttcagttttcccctttcaatatgacactacctgtgggtctgttgtatatggtttttattgtgttatgttccttctctattcgtttttttgaggatttttatcatgaacttctgttaaattttatcaaacgatttttcagcaccaattgaaatgatcacatggtttttttagtccttcattctgttgacataatgtatcacattgatttgcatatgtgagccatccttgcatctgtggaataaatcctacttggttaagatgaatgatctttttattgtgtttttgaattcaagttggtagtgttttgttagagatttttgcatcaatgttcatcaaggacattggcctgtagttttcttgtcctgatgtgtctttgtttggtttcattatcagggtaatagtggtttcatagaataagtttgaaagtattccctcctcctctattttcagaatagttttgagtaggattggtttcaattatttaaatatctggtaaaatttagcagtgaagtaattggattcctggctttactttgctggaaaactttttattatgactttaatcaatttggtgtttctgaaagaagaaggattggtggaggcttctatttggccatctttgtctcttcttcctgtgacttagtattttaattagcaaatgtagataaattagaataaagtaaaatttactttttggtcaaatgtttaaaaaggtcaatttaaattagtggacaatttaaatcataaagcttttgaaggcatgtaatttatataaaatataaaaacaaataatttcttttgatcagtaaattgttatttacttaaattctaagaatatttattttatatttatttatttaactaatattcattgataacttataatagctaaatatattgaatgaatgattaagtagatgtttgaaatatgaaaatgcttgcattttgttgagtagttgatgaggattaacctctgtgattagttaaatatgtttgtattttttgatcggtatcaccatttacttctaggcaggttgttttattccttagatactctttttgattacataagataaagaatagcaatatatatttcaaaaggctgataaaaatatcaaataaaagatgtaatgtttctaggcaagtgcgtggcttatggtagtagattaattaatgcaattatctttaacattactatttattcaaaactgtgtgagaatccttgaaaacactaccatcctaatctttaaatatggcaaatataaaataatttgtcttgaatattgtatatagtgtttagttaaacatgaattaaatgaacacacaaatacattatagacaatatattaagccataaaaaatgccagtcaacataagaatctatatgtagcatttgcacactggaattatgtttcttcaaatatgtttatgagttagtagagttactttatcaaaaatgggtttaaaaaacatgagattatgtcatatgatttaatatcaatgtttgcatttcaatagtgacatggttaagctaaaatatcttagcttatgaatacaaatgacagaacatctagtattaaacattcccatttgttgtcaagatattgtattattatcattttcaaaacctccgataatttatttcccagctatttcatgtttctttgttcttcacctctgatttatgattacagtaaactatgcttatctttctatctttgatactatagtacataataatttgaaaataatatttttcacagattcacttgtatagagacaaggttcaatagggctcatttatataaaatgcacatttgcttctgttgattaataaccaagtgtagactatatttttcatcataccactttcatttgcatttgtaactgagatttcataagatagtcaataaatacaatttacttaaaataatacttcaaagcagattcttagatgtgagtataatagttcatattatatttcttctgtctagataagtagtcttatctctcgtcttaaatttaaaaaaaaaaaaaaccatattgacatgcacaggaaaattattccaaatacattcatcatctaaaatgttttaaaacctaattgtaagatatttgaagatctcagatgcagttttcttagtcaatttttcacttacattaacttttaaaatgggaatttgataggtttcttaaagcatactgctgctttgctgatgtcaagaagttctaaatcttctactctttgagaaaaataatgttaaacacaatttttattcaaccaacttctttaaaattgtgctctgcaagaaagagctccagaaatattacatacaatttctctttctttttaattcacatatgtagataactttcaattttattatatgttaaatttttaaaaaacattttcaaatgtgagaacttgacacattaaaaatagaatcaatgtgataaataaaactacctgctttatctcacattccataatgaaaacttttggtttcatgtattaagcactgtgacaaattctgccagacagagtatgtaaagagaaaagaggagttgaaggagcaagttagtttttcatcttagtgtgtcttctcatgcacattacatttactacatatgaggattagtcttctgcttcataaactgggaattataatgattgtctctactcattcatagggataccataaagatgcattaatgcataccaaaacgttttgtaagtcgagagttaacgtaaatacaagatgttattgtttctaaggtattgctcagaaaagaaatagtacaaagtggattctactataaacctaattatattggtgatttctaatggcttaatatgatgacattttaaaaaatctatttgatatcagtgttttctatcaccaggatcttaatgaccaagaaaggagaggtttattaatccaaacttgttgatctttctgttttcaatgacctacgaataagcagaattttatcctgcatcctattatgttctaagccctttgggtctaatgttataattgtgtttgtaaaccagctggtcacaatgattaaaatgatgttgaaatgaagtctggccttaggaacattttcacactaattccggctgtcaaagcacaatctttggtaccaagcaggacatgcccctgttcctatggtgaataattataaaccatattagaatagcatagaaaataatataattttagaatataaattgaaatatgatagtaaatagactacttaatagcaaattaaccatttatattagaagtaaaataggtgctaaagatattttattacttaatttatttaaaatatattcattgataatttataatagctcaatggactattaaattaagtgtcatgtaggcattctcctctaatttaatgaagaaaccgaatatcatattgacaatgagacaaaacatcagataatggtacttttaatatatataggagcaaataggagaaacttctacataaagagataaaagtcaaaaaagtcatctcagaaaaaaaattacttgacttttaaaaataaggagcaattaacacaatgaagggaaaggtcagagggaaaatatactagaaggaacaagggtctgaaacagttggcatatttaaagaaatgttacttcatatgtttaatttttataatcatttcatcccgttctgttaaattaaagtaaattagacttagtgcttctagacataatatacataaggccaccattcatactttcaaaacaggtaaacattctttattttataatttgtctgagctcacagaaagtgtattttgttgagagtagtcaaaacaaaaagtatgtaatcacataatgagttaaagtggttacttttatgtcaactcaatctatttttttcttttagtggtaaatacacggtccttttaaattcccctactgtttcatacaaaacaaaattatactaaataaaggaaattattttagtggtatagtttacagtcatcaatctttttcttctgtattatttcatatgtatgtttttcctttttgcttttatttgttttgcaccttgagattttattagcaggttatttttagaatattatgtgctgttgaatgatgtcatgtattatctttactttttttttttctttgtttttgagaaggagtcttgctctgtcacccaggctggagtgcagtggtgcgatctcgactcactgcaagctccgcctcctgggttcacgccattctcctacatcagcctcccgagtagctgggactacgggtgcccaccaccactcccggctaatttttttttttttttttttttggtatttttagtagacacggggtttcaccatgttagccaggatggtctcaatctcccaactttgggatccaccctcctcagcctcccaaagttctgggattacaggcatgagcaccgtgccgggccttatgtttacttttttttttttaacttgagaagaatttttttctttctaaagttcagaaacaattagattcaataataactcatttcagtttgtgtgtatcaacacagacaagaatttaggattttatggctctttgaaatatacctttctggtaacagacttttagagaacattctatttagtgaccatagaggcatttgtcagctctttgttacttccatataatacattgaatttttatttgaatataataaataaagagatggacttgcatttattgtttttattcatcaaaaatggaattcattttgttcttaaagtatctatagacattttggagacatgaaggatttagaaatttggaagctttgaagtagatagctatagtaaagttcccactatcaatcattttgtcataaattatcccaatcgaaggttagaggagagaatatacaagccagagtttgtggcagaaaatttaagtttgtggttatagacatagttataagatatttatatcagaatccttttgctttaccacaattttatttaggcaaatcttactgaattacattttacatatattacaataggtaatttaaaaattgtatgggttcattgatgtcacagagatgatgaataaggcagctccaaaatttgtttcctacactgaagcaactttctacatggcataaaatgaccaaatcaatttttggaactatagaaagtaatcagatacttataggaaacagggtagtacctattaacaatgaggttactaaacgttaataagaaagcattgatatgcatatgcactaaacaacacagcccaaaatatattacgcaaatattgacagaattgaagggagaaataggcaggtatataatagtagttaaaaatggtaacacatatctttcattaatgaatagaacatctaggtggaaaataaataaagcaaaatcgagagcttgaaaactattgtaaataaactagacctaacaataacatataaaacactttagccaacaacagaagaatacacatttttaaagtgcatatggaattacagctgtgtaggccagatattaagttacaataaaagttgtcaataaatttaaaaattgatattatactaagtataatctcagaccacaatggaagaaatctggaagttaaaaacaaaaagaaaacaggaaaatgcacaaatgttgtgtaaaccacacactactaaataatcaatgggtaaaaacatttataaaaataagtagaaaatacacaaagacaaaaaacatagcataccaaaacttatgggatgcaatgaaaccaatgttcaatgagaaatttagagctgtcaatgcctacattagaaaaaaaatctaaaatcaataacataattttacattttgtagaactagacaatgtatagcaaactaaaatcattgctgagaaataataaggatcaaagaagagagaaaagaaatagattatttttaaaaaataagtttgggagaattaatacaactaggagttgttctttaaaaagattaataaaattggcaaagctttagctaaatattaagaaaatagaaaaaagatagaaataactaaaagcagacatgaaagtggagatactacttccaagcttacaaaaaggattacaaaagtactataaacaattatatgtcaacaaattaaataactaagatcaatttgataaatttagaaacacaattgttacctatcagaatcaagaaaaaattaaaaaaactcaacaccttaaaaaagtaaaggagttgaatctgcaattgtacacatccgaacaaacgaaatgtccagggacagatggcttcactttaaatgctaccaaatatttaaagataaattaacaatacctctcaaaatcttcaaaagttctataaaaatggaccactttccaactcattttatgatgtcagcattaccctgattccaaagccagaaaactaaatcacaagataaaataattacagaccaatatcccttatgaatataaatttttaaaatctcaataaaacatgaaaaaataaacctaacagaatatcttttaaaagtatagagcatgacaaaagtagaatttagcccaggaatgcatgggcagttcaatataagaaaataatcactgagatgcatcccatcagtaaaaaaatattaaaaaacacacatgaaaatctaaataagcagaataggcacctgtcaatattcaaccctcttccatgataaaaacacttagaaaactagaaatagaagagaacttcaacataatgaagggcttttactaaaaagcggagctaacatcatgctcaatggtcaagggctgatagcttcttcctaaatataggaaaaagacaaaaataatcccttacaactttgctaatcagccttgtattggaagttgtaaccagaaccatttattaaaaaaaaaaaagctatccaaactgcaaaaggaaatgtaaaactatattcacaggtgacttgctcttatatataggatatcccacagaatccacaaagaaagatgtcagagctgataaaacaaattcatcagtgttgcaaagcatgatattaacatgcaaaaagtggttgcatttgaacgtgtccacaaagaatataattgaaaaggaaattcagcgaacatttctatttacaaaagcattcaaaagtttaaaacaactagcattaaatgtcgccaagatttgtaagacttaaaattaaatgaacaaacaaaaaacctggccaggggtggtgggtcacgcctgtaatcccagcactttgggagattgaggcgggtggatcacctgaggtcaggaattcgagaccagcctggccaacatggtaaaaccccatctctactaaaaatacaaaattagcctggtgtggtagaatgcacttgtagtcccagctactcaggaggcggaggcaggagaatctcttgaatctgggaagcagaggttgcattgaacaaagatcatggcactgcaccagaacaagaatccttttcaaaaaagaaaacctattaacttgtcatttagcattaggtatatctcctaaagctatccctcaccagcatggcacatgtatacatatgtaactaacctgcacattgtgcacatgtaccctaaaacttaaagtataataataataaaatttaaaaaaaaactataagacattgctagaataaattaacaaacagaacaaatggaatgtatcccaattttatggattagaagttgtaatattgttatgatagcaagaaatccagagcaaccaacaaatttaacataattcctaccaacattcaaatactaatttttttgcagaaatagaaaagccgactttcaaatttatatggaattataatgggcaaaagcagtgttggaaaataaaaggcaacattagagatctcacttttcccagtttcagaacttactacaaatgctctgaaaacaacattatgaggctgacataaggataggcataaaaactaatgggagagaattcaaaattcaaaaataaacctatatgtccatagccaattgacttctttttaaagagtcccaagaaaacttaataggggagaatattctgttcaatgaataatgtttagataactgaattttcacatatagaagaataaagatttaaccatatttcacacaatatacaaaaatcaatgcaaaatgtatcaatgacctaaatataagagatgaaagtataaaaccattggaagaaaatatatgacatacatggataaattttcatgacctagatttaggcaactagattttagatatgacaccagaagcatgagaaacaacaacaaaaaatggataaaataaaacatttacaaacaatatatgtgataaggttagattttcagaatataaacagagttagtacaaattaacaacaaaaagtactccaaacaactcaaataatgggaggagaaattagctatttctccaaagaatatatcaatttcccaaaaacacatgaaaaatgctccatcaatgtcatttgtcaacaggaaaactcacatcaaagccacaatgaaatacaactgttcattaactagaatgtctagaattttttccaaaatagaaaataacaaatggtgagagtgtgcaaaaattgtaagcctcacctatcgctggtgggaatgtaaaatgaagcagctacagcagaaaaaagttaagtctaagaagataaacatagcattagcatttgtctcagcaaattcacacatagataaatacatgaaagaacaaaaaataggccaggtccagtggctcacaccagtaattccagctttgggaggccaaggcgggaggctctcatgggcacaggagttcaagaccagactgggcaatatggcaggactccatctctataaaataaaataaaagttagccaggcttggtggtactcatctgtagtcccagctactcaggaggctgaggtgggagaatcacataagcttgggaaattgaggctgcaatgagccatgaacatgacactacactccagcctaggtaacagaccaagacccagtctcaaaaaaattatatatatatgtatatacacataatgtttatatatatatatgtatatataaacattaaaccaaaaagtatacttgtaggtgaatgttcatcgcagcattagttaccatagtcagaagatagaaacaacttaagtgtccatcaaaagctgaatggttaagtgaatttttatgtatatacaataaaacatgaagaagtcataaaaagaatgaagttttaatacatgctacataatgaatgaaccttgaataaaacagtctctattcacaaataacataatcctatagagaaatctcaaatgattcacaccaaaattgctagagctaataaatgaatgaagcagagttgcaggatgcaacaccaaacaccaaaatcatttatgcttttaaacaccagcagtaaacaatctggaaaggaactcagaaagcaattccatttacaacagtatctaaacatctaaaattactaaatttaaatttaacaaagcaggtgaaagacttgtgcgttgaaagcaacaaaatattgccaaaagaaattaaagaaaacctaaataaacaaaaagacaactcatgttcatggatttaatgactcattgttaagatggcaatgatataccaagccaccttgagatagaaattgttgcataattagcaacagatgatggttacacagcattacgaatgtataaaacggtactaaatattcactttaaaatgggtaatgatatgtattaatatgtaaatttcaactcagtttaaaagaagatgaaataaaaaatttgcattggatcattcagttacatatctcctaaaatttatgaagtttaagagtgttgcagaagcacaaaattaactaaagcactgatatatagaatgcataactcatggtaaaatgtaaggtattctgacatagcccctcttcatttttaacattttcagggctatgtgtgatgcttgataacccttgtttgatcttttctttcttataaatgcttttctctaagtgaaagcttttagagcattaaaaatgtatgctctatttataattaatattttgttgatacagatgaaaagagttacatatcatcttacatagtatttatgaattgtacaattttatgtctgataatcacatactgaacaatattgggtaaaaattttggatttcaatgtatcatattaatttcacaaatgcagagatttattagaggaagataaatgtttatatctgaactagtaatgagtgatgagatgctatgaacttctgggaaaaaatatacttgaatacagttattccataaggcacagtcacctacaggtaactgttttggttgtttgtttgtttgtttgtttctaatggtttgcttctgttcttacattgatggttgatagcaaattggtagccactatgttctgtgtcccccccaaatttatatgttgaaacctagttaccaaagtgatggtattagaagatgaggcctttgggaggtcattcaattatgaaggctcattagcagccttatgaaagatgcctcagagagtaaccttacctctcccaccatgtgaaaacacaaggaaaagagatcatctacaaatcacaaagcgagtcctcatcaggtattaaatctgccagtgacttcatcttggaatttctagccttgagaattgtgagaaatacttttctgttgcttataattctcttcatttgtggtattttattatagtagcctaaatgaactctgttaagaaaaagctagaaagacataataataatatggtttcaatgatacaaagactataaaattatgctcccctactccagtttgatataagatataaactggtccgatcatgacaacagaagagaaattattaataaaaatgttcaaaaaaacttggtccagatttttcattgcctcagttaatcttgagatgccaaacttttgactaccttttcagtaaattaccataaaaatgtact

SEQ ID NO: 7628 - DNA, 938 bp, mus musculus
gtaaaaatatttattattataataaacccaaggtatggggaaatgaatataccatgggtgatagatatgatctagcctaccacgttttgatccaaaccccacttacaacctcattccataatgttcactgtgatccatggacaataggtacattctggaatatcaacgagttggtattattttagaatcagtgtccaaagattacaatgtcattgaatctaatgtaatatataactctgaaagagttgataaaagcagcagtattacctatggatggtcagagaatttctattcttccatctgctctatgtgactaagagtcccaccagtggataattttattgtccatattatgctttatgtggaaatacaatgaaatgatgacactattatttaaattttttccacataataatccaagtaaatatatctactttacatagggactacatttttatagtttgcaatcaatgagtaggttttcaaaattttagtattaaaatataattctggttagatgagttatttactgctaaaaaaacctaaatttaagaagcatactggtcaatagagatgagcataatccttctccaaaaagcagataaattatacaaatgaaaatatttttatttcaaaataatcatgttgttttatttttagtggctacaaaattcagaaacaagtttggtaaatctagaaaagaccaaaacttgttactaaaatggcccaggagaatttattcaaaagtatttttgcctactaaatatattttatgatattagtactgttattttaaataattttgctactcagacacattttctctagtagaacacaagtataaatatattgaggattctctagagtaattgcaattagtgctcaataggggtttaattaacaacaaagaaaacatatattaatgatgcaggctgttt

SEQ ID NO: 7629 - DNA, 212 bp, mus musculus
attagtataagtagctttagagaaagctttgaactataggaaacatttgttctctccttatgaagttcagcaggcatccttttggccctgaagtcaggtgggaatgtctgccccgcttcaggagaagtgcagctggaattcatgtggtggttaatgttgggcaccaccaatttaattagtttaaccacttgagtcctgctgaatgaacctag

SEQ ID NO: 7630 - DNA, 866 bp, mus musculus
atattaaagtatcccttatgctgaagtgatacatataagagtaaattagaatattttgtgatctgcacagattatctcctgttgatagaaaatacagttcaaataaatttattttacataatcaaagatatacatacttattaccattaaaaatcttttagttaagcggaactccttctactcagaatagcacaatatctcattttctattctgttgagcagatcttggatttagaaattaaattttaaagtgtgcctaatgcatcagagtcccaattctgcctgtttctcagacacacttatcatcagggtgcttcagattttttatgtctaaatatagctttaaatacattattatctgcagaaacacttatttttatttagtagaaattattgaaaaataaagataaataataatgcttttctgactactgatcttaaaattatttttgtgggcactattgtaaggaattctttcatgatatacagttaatgtgatgattttaaacagagaaaagtatttcacatcattcttcccatcttttcacaaacaagagacagccaaacttaagggaagtgtctttgatgttgttgttcacatgctttcctccaggttcttaggaatgtcacttaacttttagtgttcagtgtcataccatccctggaacttgctgagcttggcagccttggcaagaatccttgacagcttgtcaagcccaaggcaaatgcatgtgatcttccctcccagtaattaataattaattaatgttcactaatctttaatgaatggtggttttgaataatctagtctggaaaaaaaaagaaaaacaaagaatttttattgcaaaaggaacttttgctcagga

SEQ ID NO: 7631 - DNA, 4865 bp, mus musculus
actatacctccagtggacataaatggaccataaaatactataactgggcatgtatctccaaagagacatttggtatgtaaggcaagaatagctcctggtgatggtaggtgtatttaaatctcagtgtttccaactgaaaggagcctatttttctgagagaatgtggccaggtcccagaatctcaaaagaccatacaccaccactaagagaaagcagaatgatgtataattgcatatcgctttcagcattttattcaaaattaatgtatattctttttttttgttttgttttctaagtaggcttttatcctttattttattttattttattattattatactttaagttttagggtacatgtgcacaacgtgcaggtttgttacatatgtatacatgtgacatgttggtgtgctgcacccattaactcgtcacagcattagctatatctcctaatgctatccctccccccctccccccacccacaacagtccctggtgtgtgatgttccccttcctgtgtccatgtgttctcattgttcaattcccacctatgagtgagaacatgcagtgtttggttttttgtccttctgatagtttgctgagaatgatggtttccagtttcattcatgtccctacaaaggacatgaacgcatcctttttcatggctgcatagtattccatggtgtatatgtgccacattttcttaatccagtctatcattgttggacatttaggttggttccaagtctttcctattgtgaatagtgctgctataaacatacatgtgcatgtgtctttatagcagcatgatttataatcctttgggtatatacccagtaatgggatggctgggtcaaatggtatttctagttctagatccctgaggaatcaccacactgacttcctcaatggttgaactagtttacagtcccaccaacagtgtaaaagtgttcctatttctccacatcctctccagcacctgttgtttcctgactttttaatgattgccattctaactggtgtgagatggtatctcattgtggttttgatttgcatttctctgatggccagtgatggtgagcattttttcatgtgtttttttggctgcataaatgtcttcttttgagaagtgtctgttgatatccttcgcccactttttgatggggttgtttgattttttcttgtcaatttgtttaaattctttgtagattctggatattagccctttgtcagatgagtaggttgcaaaaattttctcccattctgtaggttgcccattcactctgatggtagtttcttttgctgtgcagaagctcttcagtttaattagattccatttgtcaattttggcttttgttgccattgcttttggtgttttagacatgaagtccttgcccatgcctatgtcctgaatggtattgcctaggttttcttctagggtttttatggttttaggtctaacatttaagtctttaatccatcttgagttaatttttgtataaggtgtaagggagggatccagtttcagctttctacatatggctaggcagttttcccagcaccatttattaaatagggaatcccttccccattgcttgtttttgtcaggtttgtcaaagatcagatagttgtagataagtggcattatttctgaggactccgttctgttccattggtctatatctgtgttttggtaccagtaccatgctgttttcattactgtagccttgtagtatagtttgaagtcaggtagcgtgatgcctccagctttgttcttttggcttaggattgacttggcgatgtggactcttttttggttccatatgaacttgaaagtagttttttccaattctgtgaagaaagtcattggcagcttgatggggatggcattgaatctataaattaccttgggcagtatggccattttcacaatattgattcttcctacccatgagcatggaatgttcttccatttgtttgtatcctcttttatttcattgagcagtggtttgtagttctccttgaagaggtccttcacatcccttgtaagttggattcctacatattttattctctttgaagcaaatgtgaatgggagtcctctcatgatttggctctctgtttgttattggtgtataagaatgcttgtgatttttgcacattggttttgtatcctgagactttgctgaagttgcttatcagcttgaggagattttgggctgagatgacggggttttctagatatacaatcatgtcatctgcaaacagggacaatttgacttcctcttttcccacaaagggaagcccatcagactaacagctgatctctcagctgaaactctacaagccagaagagagtggggaccaatattcaacattcttaaagaaaagaattttcaaaccagaacttcatatccagccaaactaagcttcataagtgaagaagaactaaaatactttacagacaagcaaatgctgagagattttgtcaccaccaggcctgccctaaaagagctcctgaaggaagcactaaacatggaaaggaacaactggtaccagccactgcaaaaacatgccaaattgtaaagaccatcaaggctaggaagaaactgcatcaactgaggagaaaaataacccgctaacatcataatgacaggatcaaattcacacataacaatattaactttaaatgtaaatgggctaaatgctccaactaaaagacacagactggcaaattggataaacagtcaagacccatcagtgtgctgtattcaggaaacccatctcaagtgcagagacacacagaggctcaaaataaagggatggaggaagatctaccaagcaaatggaaaacaaaaaaaggcaggggttgcaatcctagtctctgataaaacagactttaagccaacaaagatcaaaagagacaaagaaggccattacataatggtaaagggatcaattcaacaagaagagctaactaccctaaatatatatgcacccagtacaggagcacccagattcataaagcaagtccttagtgacctacaaagagacttagactcccacacaataataatgggagactttaacaccccaatgtcaacattagacagatcaacgagacggaaagttaacaaggatacccaggaattgaactcagctctgcaccaagcggacctaatagacatctacagaactctccaccccaaaccaacagaatatacattattttcagcaccacaccacacctactccaaaattgaccacgtagttggaagtaaagcactcctcagcaaatgtaaaagaacagaaattataacaaactgtctctcagaccacagtgtaatcaaactagaactcaggattaagaaactcactcaaaaccactcaactacatggaaactgaacaacctgttcctgaatgactactgggtaaataatgaaatgaaggcagaaataaagatgttctttgaaaccaacgagaacaaagacacaacacaccagaatctctgggacacatttaaagcaatgtgtagagggaaatttatagcactaaatgcccacaggaaaaagcaggaaatatctaaaattgacaccctaacaacacaattaagagaactagaaaagcaagatcaaacacattcaaaagctagcagaagacaagaaataactaagatcagagaagaactgaaggaaatagagacacaaagaacccttcaaaaaattaatgaatccaggagctggttttttgaaaagatcaacaaaattgatagactgctagcaagactaataaagaagaaaagagagaagaatcaaatagacacaataaaaaatgataaagaggatatcaccaccgatcccacagaaatacaaactactgtcagagaatactataaacacctctacgcaaataaactagaacatctagaagaagtggataaattcctcgacacatacatcctcccaagactaaaccaggaagaagttgaatctctgaatagaccaataacaggctctgaaattggggcaataaacaatagcttaccaaccaaaaaaagtccaggaccagatggattcacagccgaattctaccagaggtacaaaaaggagctagtaccaatccttctgaaactattccaatcaatagaaaaagaaggaatcctccctaactcattatatgagaccagcatcatcctgataccaaagcctggcagagatacaaccaaaaaagagaattttagaccaataaccttgatgaacatcaatgcaaaaatcctcaataaaatactggcaaaccgaatccagcagcacatcaaaaagcttatccaccaggatcaagcgggcttcatccctgggatgcaaggctggttcaatatatgcaaatcaataaatgtaatccagcatataaacagaaccaaagacgaaaaccacatgattatctcaatagatgcagaaaaggcctttgacaaaattcaacaacacttcatgctaaaaactctcaataaattaggtattgatgggacgtatctcaaaataataagagctatctatgacaaacccacagccaatatcatactgaatgggcaaaaactggaagcactccctttgaaaacgggcacaagacagggatgccctctctcaccactcctattcaacatagtgttggaaattctggctagggcaatcaggcaggagaaggaaataaagggtattcaattaggaaaaatgtatattctttgaaacggaaactgtcaggacaatttcctctctggatggtatgaaattcaaataccaagaggcctaataccgattcctacttaggaagttatttgacccaagaattttgcttaaagatgatcctgactt

SEQ ID NO: 7632 - DNA, 2837 bp, mus musculus
ggtccagctttggaaatacagattctatattatgtcttttcttggtctaagtatgtctttcagaaagagaaagaaagatccaaagaaggaagaatagaatgaaatggaacaaggaaaaagaaagattagaatacatgtgaaacctctacaatttttaccatatagagcaggaaagaaacataatctaaaccatatttttccatcatactcttaataaacacacctctgcatgttattttgaagttctatgtctttactctccagattttttaaaaaagtaaaccactttggccatgtaccagataaaatgtattttaaaaactttacggaactatggcctcaagaaaaaaaaaatatgttagctactgaagtacataattttgaaaaattgcaaaatgtgcgtaatggacacagaatagagtgatgtcaccaaaaattggtgtctgctactttttagtcagaagacaaagtttaaggggaagaatatatccgaaattcattgaagtaacagggcaaggataacatcatgaaccatttccaaagaattaaaagaccaattttcattttttgttatgaaaatattgcatgttatgcttcataattaagtcacatgtgaggccataccaggagtcaaagataattcaggaagttgattagaaaatgtacctttcagccatcttgctttcagcttatctgaacctgacacttgcagccgtttgccacgcatattgaggcagtgaaatgatttttattaaaaggcagttagtgttgtcagtttgtttccaaaacttggtcttggctaaaagaaacattccttccaaatatccactacccaattccatagggtttgtgtttgctctgtttgagtattcagttgccagttttcttttttttttttttttttttattatactctaagttttagggtacatgtgcacattgtgcaggttagttacatatgtatacatgtgccatgctggtgcgctgcacccactaatgtgtcatctagcattaggtatatctcccaatgctatccctcccccgtcccccgaccccaccacagtccccagagtgtgatattccccttcctgtgtccatgtgatctcattgttcaattcccacctatgagtgagaatatgcggtgcttggttttttgttcttgcgatagtttactgagaatgatggtttccaatttaatccatgtccctacaaaggatatgaactcatcattttttatggctgcatagtattccatggtgtatatgtgccacattttcttaatccagtctatcattgttggacatttgggttggttccaagtctttgctattgtgaatagtgccgcaataaacatacgtgtgcatgtgtctttatagcagcatgatttatactcatttgggtatatacccagtaatgggatggctgggtcaaatggtatttctagttctagatccctgaggaatcgccacactgacttccacaatggttgaactagtttacagtcccaccaacagtgtaaaagtgttcctatttctccgcattccttacaccttatacaaaaatcaattcaagatggattaaagatttaaatgttaaacctaaaaccataaaaaccctagaagaaaacctaggcattaccattcaggacataggcgtgggcaaggacttcatgtccaaaacaccaaaagcaatggcaacaaaagacaaaattgacaaatgggatctaattaaactaaagagcttctgcacagcaaaagaaactaccatcagagtgaccaggcaacctacaacatgggagaaaattttcgcaacctactcatctgacaaagggctaatatccagaatctacaatgaactcaaacaaatttacaagaaaaaaacaaacaaccccatcaaaaagtgggcgaaggacatgaacagacacttctcaaaagaagacatttatgcagccaaaaaacacatgaagaaatgctcatcatcactggccatcagagaaatgcaaatcaaaaccactatgagatatcatctcacaccagttagaatggcaatcattaaaaagtcaggaaacaacagttgccagttttcaatggtaaaattcttatggaagagttgttgtttttttttttttttctacagaaggcaaagaaaatatcacacaaatagaattctagtaaaatctgcagaaatcctgctaaattgcagcattattttctcgattaaaatatcttctaaaagtttttaaatgtttaaacaatttttagtcataagtactgctgtttaggatggcaaattcaattcatgactgcactcccagagcgtctttgtttttctagaaattcccttattctttccactttttcctctaacttgaatatacatatgatgtttcctggtttgcaaacattttgaaggatgtagtttcctcattcgcataacaattacatagaattaatagaaaacggaatctgtttttcagcaaagaggaatgtagggtatgcattggtctttccttatccactaacgcaatcctattatattcaaattcagtatagatttgagtaactaattcataaaatataatttcttatccactacctcctattgaattatcaaacaatggtttttaaaagatatctaataaattaatgttctttcaagcaaatttggaaaataaatgttaatattttgtatatatgatttcttagtaatcattgctgtcattcagaaattctttgtgttacttgtcaatcagtcagaaaattgaaaaaatgccgtgatgttgaagcaagacgtgaataaaaattgcttttcactttaaccaaaacaataaagcaact

SEQ ID NO: 7633 - DNA, 691 bp, mus musculus
gagagtaaaaagtaaaaactactttgagaaataaattttttagtaactatatacagatatttaaaaactggcattggtgggaaacaaattggtgtgatatgcagcatcaagacaatctttgcaagaagttccctgaaaaaagaagtgagcccaaatagcatggatctcagactagggtatcagctgaagagaaatgctatctagaccaaaattataacaatttccttagataaatttggctacagtcagatcaatttctagtgatgagctattactagtctcgaagggaaccctacctgtaaatttgtattgtttgttagatatatccttccataaatgtgtaagctcttatttcctttatttttcaaataatccttctattgtcttaccaaaatctccaattaattatttagtgaataactgagtaaatgaatgaataacaagtactcagctagctttatttttttttcattctcttttctcattaacaatagaacctggtgatgcagcctatacaagaagttaaaaaaatttgaatttgacagtgggatagcttcaattttatgtctttttttcttttgtaaataaaaagcttttttcatggagaaaaactttctcttaaataataccacacaaaagaataattgactccttcctctttataacactgtatgtcaaatttatcacaaca

SEQ ID NO: 7634 - DNA, 420 bp, mus musculus
gaattaatgaagatttaaggaatgatctgaaatattgctcaatagtgctaagtgaaataaagtgaatacagagatcctcttttaggttttgctctgcaaaaacatcttttccttttgaccgtatgactcctgcatcctctgaactaccaaccaaatggtctcaataagttcaacttagacatgaatatgagctcagtgttagccatcaaaaccttttccatagataaatggttgatcataggtaagcacattatcaaaggaggaccaaagttcagttggagtgatttctaccaacatttagagttacgatcttcctccttttgagattgtgactactctttcttaagctttaggtggtcatactttctgttaagcagagacagtctacctaaaaataaagcaaatattaagaatagcaga

SEQ ID NO: 7635 - DNA, 1522 bp, mus musculus
aaatatgaagtatgaatgtttgtgacatgaaaaaaataggtcatgaaatgatcccatagattatttcccaaaatgatgtttgatatcaataggacctaaataaactttcaagagttattatttaaggataagataaaataagtcttgaagataatatgagaaaaactttatttttataatggatgaaaaaattctagtctaaatattataaagatatgactatttattattattaagagcaaacaataaatcactttttataaaagtcccaggttcaataatcaataatattacatgcctatctagtaggttagttctatatctgcaaataaaagtgaagaaaagatcaagtaggtgaaataattggagaaaaagtcatatactcaaaacctcgatgtcagatcttctgaaactttgccttacattacatgtaataccatgtgactatagagaaaataaagccacaaaactggatttgtttcagttaatttattataggtatttttagatgtaatggtaagagatattagagtcttactgaattaaaataaagcttccttttgttaaaccattgataaatcattaatcagggtttaagaagtgaaagaaagctggtttgcttgtccagttctaaatagtgaagaagacaaatgcaagagagtttatttaaaatttaaaactttatcaatacccttctttgattagaagtaatacatataaaacctgaaactcatggtcatagtggatcacacttgtgatagttattccctagccaggactttagccatgttatttgcatttagcctttgctaacagctctgcttatattcttgtcagagttattatactgccttctgcaaagaaaggcaatatctatattcccaaccctctaaacataataaaggagcaaacacttctgcacaaagcctctctgagctatttaatttactttttgacaaaaagagaatgacactgagtactgtacaaagaacaaaagcaatttttataccatgaaatgcaaatgttaatttaacattactaaaaataacattactataaattcaagaaaattatcctatatatttttatagacctagtgtggtctaaacacttgacatcttaataagagtactttgaatttcttaagaaaaacattaacttttttttattttaaatggaaaatagtcaaagagaaaatcaatcaaaattaaaccaggagtaaaggttactcttcaatctccctgataacttttttatcattatatattcccatttattcttctaattttaggaaagacatgaacatctttattaaaaggagatttttaaaaataatactacaaactaaaaggtaaaaaatagttataggaagttcctgaaatcactgcattgccaggtggtttggaatgatcactccaatattacatgtactatattagttgctaaactgaaaattgttaatggtgacaataatatattttaataacatatttaaaatacataccagcagaaagcaaagcta

SEQ ID NO: 7636 - DNA, 185 bp, mus musculus
atttacaataatttacttatacattcatcagtgagaaacttgaatacccaagaggcaaaacctctcacagtcccacattcctatctttattataaaatatatcattttatactaaagttaagatttatgtatctgtctccctagctcagcacttaagctcgtttaaggcagaggttttaggaccc

SEQ ID NO: 7637 - DNA, 601 bp, mus musculus
gattacagggttagcatctcaaagttgtgttggaaaacctgcttatttgggagatagacattaagtaaaatgttgccacataaaagagaagtgtacaattaaaagcaagacagtatggtctaggatgaaatgagaaattacattaggaatagacttccttacaaagacaaaagagaagaaaactggctaaaaactcaaaatgaataaactgagagaaggatgctcaagaaaagaaaaattctgattgtcaaaaatttacagtgtgaaagtccaaaagaaactgtcctatttgctgtcataagtggctactggaagggcagttgcaacctcacagtagaactggtgaaactgttgtctacttttgatgggaaacagggagcaaactatatatactatggcagggactatggagcacactgctgagagctatctgtgtcccacacctcagattaaagcagcaacagaggagtcctgaaggctaacaatgatacaacccaagtctccaaggaaagacctcactgggaataaattggccattcatctttgtttttcagtgcctaggataatgccagacacaatactgactcagcaattttattca

SEQ ID NO: 7638 - DNA, 258 bp, mus musculus
actattcttacaaagacctgttggatttctgttgtcagcaaatgtccaactcattaatattgcacttctgtcttcaggaggcagctgcttcttcatgaacttccttggaatttggctgcaacacagcactctattctaggactcaactgtctccactgaaaacattttcttttgcagtgtggctccctgatgggtctccttgtgtttcatttctgctttgtatgacatctactgcaaatagctgtttatgctctattt

SEQ ID NO: 7639 - DNA, 955 bp, mus musculus
ttttggtaaaattataattgttatggaaaatacttgtaaattaaccttgagtcatgaaggaaacaggacagaaatactcacctgtacctcttgaccctggttctcatgtcaatattcctctgtggaagagggcctccctatttcctagcccagcagctttgtgcttaaggactatttcttctcagagctctgtgattcctattgtattaagtgcttaagtcttagtgctagtgtggctttttttttttttctgtcagcaagtgaaattggatatacaagtcatattccctcaaggctagctgctacttagtactatgcctaggattgcagctatctgctatcagtaagcagggctctcgttttggttactgggtccatcatggcaaatcatgcagccagctgaacagttattcagccaagcagcaaataacattggatgcctctcccatgaaaggtactgtcctagctcctgggatacagtgctgagcagataacttcttgctttcctatagtatataatctaatggagaagacagaaaataaataggccaacaaaaatgactgtagtttttgaatgtgctatgaaagtaaatgagcaaggtatgatgaggggtgtgtttagagaggatagtcatggaaggtcctcagattggaaagaatctgtgatctaggatccatcagaagtttagtgtgactggagacaagggcaggagatgagatttgaggtgtggattttttggaaaatcttcaaagaaacatttgagttgttttgaagcatgagtatatgatttttgaaagcagggaggaaggtgagggccaatccagcagtaggagtggtaggggcaaaggaagcattggtacaatattgaaatacccctagcttagggcatagttatgtagatgttgatgatggtgttgctggcccgcaagagggagtggtggtgttacaagttag

SEQ ID NO: 7640 - DNA, 955 bp, mus musculus; identical to SEQ ID NO: 7639

SEQ ID NO: 7641 - DNA, 955 bp, mus musculus; identical to SEQ ID NO: 7639

SEQ ID NO: 7642 - DNA, 955 bp, mus musculus; identical to SEQ ID NO: 7639

SEQ ID NO: 7643 - DNA, 955 bp, mus musculus; identical to SEQ ID NO: 7639

SEQ ID NO: 7644 - DNA, 472 bp, mus musculus
aagtcgcttaagataaattcatggttcttctactatatctcctaacatgcctaaaaataaggaaattttgggggatgaatttaaattcagtggcttttaaacatgtcctcaagaagcagaacaggtccagcgtacagtactctgcaaagagtcttgagattattcaaccagtatgtctaggtgtcatatttattttaatttccacatcattttacctctcgtagggtgctaacttgctctgtaatgtattttagtgatttggattcctctttgtagattgcaaacttttttttggagggaaattgtcttcatttttaaaactaatttaatgaatagtacactgctctaaatataagtgcttagtaaatattggttaaaataaatgaatataacttttaacaatttatgttttagaaaaaatcatttgcaaaaatctaaaaggaaagtgtatattgttggtgtacatctgaag

SEQ ID NO: 7645 - DNA, 369 bp, mus musculus
aaagattttgtgtaggagctggatagtgccaataataaagcacaaaatatgcatctcttaattccattactaaatttagattaagaaatttgcaaaagttaaaatgtaactgcaatattggcatttgaagttcttttttcaaactactgaggttgaataacactttgacggacattttcatagggcttaaagcaaaactactaataaaatttaaatgcagtattgagatcaaatgcctactgtctggctttcaacaccttactgagaattagtaaccaacaaaaaaatatgttaggcctaatcaaagaattgagtgtatgtgcagccactcgtttaattcctacaacaacccttatgaaaattggaatt

SEQ ID NO: 7646 - DNA, 538 bp, mus musculus
aatattaacagaaaatgttagaaaacatgtaggatcattccaaatattgatgacaacatctgcagcatgatatgcaattgccatgcatgccaggtgagttggtgctgtgtccatgtggggtccaatatcactgctgagtctacagcagctggtacacagggtgagcaaaaagtcttcttctctgaaacacttgcacaacctcatttgggccttgatctgactgggatctttaaagccagttctctagtcttgcaaaaggattctgtaagcacaaagatttcctttccacaatgttcacttctgttctaatcatccagagtcagcttctgttgcctgaaacttttaataccgactgatatcctttagttcttaaatttctttagttcttaaattaggttaaattctttagttcttaaattaggttttctactacctttcatatacaccaaatcttcttctagtcttattttcctttggaacaattattagagttgatatgtactagtaattataaacttatttctttaaaatgtgtctc

SEQ ID NO: 7647 - DNA, 384 bp, mus musculus
tgaatgtgcttcagggcacaggaatgaagacccttaacccaggaaaggagaaagctgccaagccctacatgagaactaccctaagtaagatggcaaaatacctcccagatgtgaaggagacaataaggacaatttactgaatatgaggaggaataattttcagtgttctcctggtaatattgcactgattattgtttatgagagtggaagggacgtagtgagaagagggaaggtagctttttgtttgttttgtttttgtttgcttaagaatatataaacactaataggggaaattattctcagtgacatgtcaaaccatgtcaccaaatatgtcagccacaaaattgctaggtgggaagtaacccagttggaagtttcatccat

SEQ ID NO: 7648 - DNA, 1170 bp, mus musculus
gtgatttctgtactaaatatatatatgtagttttaatgcatgtagtatgcctgatagattactaagagctggataaacagaggttaatgaaatagacttaatttatgattcatggaacttatagtctaatgtgagaaatatacacagaagtaaataattaagcacaggaataaatatgtaaatgtaacagatggtaccatactctgatgctatgaaagaaacagtgcagagatttacaaatgtgggggggaggagattatttaggtaggatggtcagaaaaggatttctttggagaagaaatcgaagatgagcattagaagacaggagaaaccaatgatgggacagaaaaagaaaaatatatttaaagaagatggcatggaatataaaatactacaggcagaagggagaatgctatatagaaaaactgagtggcacttagtgtgataaaatcttagtaaggagtattatagaagacaaagaaaggagggaagtgaaataggccagcttaaccatgtaagaatttctgtctgcagtaagatagtttgcattttatttattacaaactcggaatttttgaagcatcacatacctggatataatattgtttcatttattttttaaaaaatggctccttttcctttgtgagaactagctcagagaagttaatacaggaagctgaagacatgaggtaaagcaatggcctagtattcggaagataataaaataacccatgtgatgacaaaggagaaagaaaataaagaaatacacataaaattttatgaaataatggacttagaaataaaagatgaggaagagatcacaaataatagcaagagctcacaactgagcaagtggcagcatgtaatttaaagacatgctgtgaaaatgaagatgaggtaactgagagaatagtgagacagaagaaaagggacaataataaaccatagatagagaaggaggatgagtgaaaggctttgagcaggctgttgctcctgaagtcaagagaagagggtatcttcagaaatatggatggcccttctgtagcagtcacatcagaggttaaataaggtaagtgcagtaaggctccaccacacctgacaacatgaaaatgattggcatccatgtaaataagaattactgtggcagtatggagtagactgcaaactgtc

SEQ ID NO: 7649 - DNA, 546 bp, mus musculus
ctcattttgaactgggactctctgttcttctctttctgccaatctgtttccatgtcgttcttttagctgtatatctgtttacgtgtaatttatttgtttacggtgtaatattacaaatatgcaatataaaaatagaaagaaagttataataaacctgtaaaggctcatcacccagaataattaactatcagtaatgtggagctctagctttttccaccctttttatgtgtttgttaggtttttgtggctgaaatattttagagcaaatccctttcatcctgccattaacccttctcaatcagtttacatttttgaaaaaaacaactgttttatcacatagcagcaatactatcatcacccataacaaaattcaaaatattttattggtgtcacttaatatccatttcattttatttccaaattgttggaaaatattctttcacatgttcatttgtttgcaccagcatttacattgttcactcctttgtgatgttaatttaaaattctactcataatattcctatgaataggaattaaatgttactt

SEQ ID NO: 7650 - DNA, 1070 bp, mus musculus
tctaaacattatatttttgcctttaaaatcggcattcctttaattgccttgtagctattttctatgcgaaatctggtgggatagagcatttccactgaggagatcagattttaccagaagcaccatttcccagcactcttttctggtagaagctgggttcctggtggaaatgatgctgcttttaggatgatctgaagtactctggagagataccttctgctcagttaccattcaagctggaacctgctatgacagttgtcaacagtgccctttctgatgtcgcccagttgtgttccatttagaataagtacttaaagagacacctgctcggaaagccagaatagagaagctgcatgattctggcaaacatatgtagacaataatatccctttcctaccttgggcaataacttaataaagcctttaagacaacagaatcttaagtagtcatcctttttgttgttgatgagaaggagggatatggataccagcatcaaaactttctttatgtgcctacagctgtgatctgggcactaccacgttatcctgctgctatgactctccagccatatgctgccgtttatagtacagcctatgattcaggctgcaatgcttgtgaaattggcataaaggctgtcatcaccgtactctaaacaccctgcaagccagatttttcttcttcctttgaaaattagacgagatcccccaaatgtcaagcatatagatggtatatattctaaacatataaaggtgtaccattcaaaaagagcaaaatattatttattaattatcacagagggagaagtataaagataatctattaacagaatgagaaataaaatgacccaacccaaacctattaaaggtctctggtaagtaaggaaaagcatttaaagatgacagactaagtctttggatcactggggtgcagagcagtggtctgcttttcaacattagtgtttaaatggaaaacaaaaatctaaaattagtttcaaatttcagaagcctgattttatgattttatctttaccctcaggaattatacaatgaaaaaatgataataaaggtggt

SEQ ID NO: 7651 - DNA, 1070 bp, mus musculus
accacctttattatcattttttcattgtataattcctgagggtaaagataaaatcataaaatcaggcttctgaaatttgaaactaattttagatttttgttttccatttaaacactaatgttgaaaagcagaccactgctctgcaccccagtgatccaaagacttagtctgtcatctttaaatgcttttccttacttaccagagacctttaataggtttgggttgggtcattttatttctcattctgttaatagattatctttatacttctccctctgtgataattaataaataatattttgctctttttgaatggtacacctttatatgtttagaatatataccatctatatgcttgacatttgggggatctcgtctaattttcaaaggaagaagaaaaatctggcttgcagggtgtttagagtacggtgatgacagcctttatgccaatttcacaagcattgcagcctgaatcataggctgtactataaacggcagcatatggctggagagtcatagcagcaggataacgtggtagtgcccagatcacagctgtaggcacataaagaaagttttgatgctggtatccatatccctccttctcatcaacaacaaaaaggatgactacttaagattctgttgtcttaaaggctttattaagttattgcccaaggtaggaaagggatattattgtctacatatgtttgccagaatcatgcagcttctctattctggctttccgagcaggtgtctctttaagtacttattctaaatggaacacaactgggcgacatcagaaagggcactgttgacaactgtcatagcaggttccagcttgaatggtaactgagcagaaggtatctctccagagtacttcagatcatcctaaaagcagcatcatttccaccaggaacccagcttctaccagaaaagagtgctgggaaatggtgcttctggtaaaatctgatctcctcagtggaaatgctctatcccaccagatttcgcatagaaaatagctacaaggcaattaaaggaatgccgattttaaaggcaaaaatataatgtttaga

SEQ ID NO: 7652 - DNA, 1792 bp, mus musculus
tgctttcctttctttttaaatctttattccagcccctgtgcctgaatggttcagaagcaaccaccaggcatctctgcacaaatttgccagctaagatcagtataggccctcctccaacttatctgcaatgcactgggagaatatatcttcatatctatttagaaacatgcatataagttattttaatactatttatacaattttagcattttcctagagtaggttttccactttcatcacccacagctacaaaattattcagttattttctacagttttacaaatataccatattacgggctgcttaatatcttccttgtttaagactttaacagtatcagccgggcgtggtggctcacgcttgtaatcccagctctttgggaggcgggcagatcatgagctcaggagttcgagaccagcctggccaatatggtgaaaccctgtctctactaaaaatacaaaaattagttgggcgtggtggtgcgcgcctgtagtcccagctactcgggagactgaggcagaagaatcgcttgaatccaggaggcagagcttgcagtgagccgagatcatgccactgcactccagcctgggcaacagagtgagactctgtctcaaaacaagcaaacaaaaaaaaaaactttaacagtattttgtaaatgccagtgtggtggcttacacctttaatcccagcactttgtgaggccgaggcggatggatcacttgagttcaggagtttgagagctgcctagacaacatagcgagaccccatctctacaaaaaatacaaaaaatatccaggcgtggtgacgccttggcactagagcaagaccctgtctaaaacataaataagtacataaataaaaataaaattcatcaaccgcgtgttgaattctcaagattccccttaaacctgagaactggagagagccatttcagttatatagtaaaattaaatttgtttatcatggattattataatggacgtatattgataaaatgtctaggtgagaattttacagttgtaattggaggtccatttaaaggttaaaatgaaatagagagttatggatgcacagctttccatattgtgtttggcaaaggaaattgattctcggaatgatatgctaccctttttgtccactatgtgtagtgcatatggatgatggaatcactttcatgagtacagttcttatttagaacacacattccgtaatatccctagaaaataaaaaagatttatgtgttcaaaaggagtttcttgatatgagacaagcagactgactttcaattacaaacacttagaattctgaaccttgcatttttattgcgagaactcagttattttccaaagcttggtttgagagctattttcaggcagcagctttttcttgaagtcccttactgataagtatagtaagcagaaatatttcaattactctaattaaaaagcagtattcaacatgttgactgaaggtggagtttatgttgttcaccagacaatgagaaattgggaagggactattttagatagatcattgatgtgagaaagttaaattcacctgttaatttgtcaataaactagaacagcagggtttcctttgttaaaatataagataatatattggaaacgcataattcttagacatgaactcaaagacatgcaggcaggtttacttttagctcatggcatatgcaaagataggcatcaatttgtggtgaggatatgaggaagtttttatctgtacatttgtttaaagagtcatgtttagagaagcattttttaatagatactc

SEQ ID NO: 7653 - DNA, 131 bp, mus musculus
agaggtaaaattataacctacctattattcctagaaatttaaagcaatatttttgtgagagttaaataattttcagggtgatttttgtatacatatttttattataatattgacctaatgggaaacaaaac

SEQ ID NO: 7654 - DNA, 871 bp, mus musculus
ggaacataatttggatattgtagtgaagaaggaatctttgaagaggtgacattttagcagagactttaatgatgagagacatttgagctgagaactgaatattgggaaggaataagtcacctaaaaatttcgttcaataaagttgtaagtagaggtcaaggtcaagggcaagatcaaatatgctgaaactaagaaaaggttagtgtactttaagaacaagcagatgcccagtacacacaaaagacaatgaaagagaggaaatataatatgatgtgatgtctgagaggaaggagaaggtaggtcatgtatatgttcttgtagacaccctagcagcatggagtttggagtgaaaaacactggcgatgatggtttctcaatggctccactttcctcagccactaggtattatgataaaactcatcaatcagaagtaacacagggagaagagcagattagatccatgatgatatttgtaggttaacaacaaagaaaatgagttgttttgaatatattgaattttaagtgcaactgaggcaattagctggagatcttctaaggagaaattacatactttgtaggtctgtatcacaaggaatgaagtatgaaattttggaattgtaagcaaatacccaaggaatgaggtctgagggtgacactttcagggatccaattgtaaggaatatcaaaagaaatgaagtgttaactgtcgaaggaggtaaaaaaaaataactagagtgtgcagagtgaagaaatactgaaaacaaatacattttaaaaaatataaaaggtgttaaaagctaaagaaattttaaattagataaggcaaatattatttgccaattttggtaatggaaagaggatcaggagtgag

SEQ ID NO: 7655 - DNA, 484 bp, mus musculus
ttatattgtttttcctaattttacgtggccaagtgacttctaaagtctgaaagcaggcatactttcatatataaatcattataaacaaaacaaaagaaaatctgttatttcactcaaaatttataattactattctattaaagactgttttctagactgttttctatgtacgcaccaaaaaacacaaaaaagatactattatgtatatattgatgtatgtattttatttacttaacaagaaatctctgtatctttccatataaacatattagctatattgttcatcattatgtggacagatcataatttatattacaaaatttctcaaggagacctacggtgttttctagattttgctattacgaataacactgcatttaacaagcataaagacatatatttgtcaagttgtgtgattatttttctgaataaaaaaggattagaggaattcataggtaattagtttatacattccaaatattgc

SEQ ID NO: 7656 - DNA, 1084 bp, mus musculus
ttttgttataaaagatatatacatatacacatacacatatatatggaaaaagttaatgcagcagtcttgttttattctattcttgcctataggtaatcgtgattacatgcaaactctgagaacaaaacaacttgaatttttttttgtagctactgagtgatgatgttctttctatacatcccaagcgttctgtacatctatgcatcccaagtgcatcaagatggaccaggttgtcagcatgttcagagtaaacatgaagatttatgatgtgcatctaatgcctggtttggggtctgcaccatgttggagtccaagactcaagtgggctttcctgggtaaagattgctcccacataatctacaatttgcaggtggagaaaatgatgcatctattatgtgatacccataaagtgaaggcaagaaagtctgtgtttgtgaccattcccctttgcctattgcgtgtctttttcctgtaatccttcactatatgctttgctgcaataactgttaactattgtatataactttatgtttagttacatgagtccttccagtgaattagtgagcttgtgcagtcattgctctacaaaatagcacatttcataataattttatgaattggtttatgataatcagtgatgtactttcaaaaaagatatactttatagaattataattttgcttcttttaatacaattaaaaactcatatgaggtatttagtctagtcaaattcatagagacaggaagtagaataatgattgccagggactggaggaggttggaatgagtagctgtgtaatgggtacatagtttcagttttgcaagatgaaaaatattctgtggatggatggtggtgttggtagcacaactatgtgactatacctaatgccactgaactatacacttaaaaatggtgaaaatggtaaatttcatatatattttcccataacatttaatgtaatttattaaaacaataaataataatgttttactagcataatgtttaaaatcagttgcaatcactcagtaaatgtctttatatctttgtgtttcattttattatcaaagacagactagctaaggt

SEQ ID NO: 7657 - DNA, 572 bp, mus musculus
gcaacatttaccagctgtgtgatacttgtcaagttctttaacttatctttgacacagtttcctcatctacaaaattaagataatctcccaggattgttgcaagaattaaacaagttattaggcatgagtttctaaacaaggtctaccacatataagtcaggatagcagggcttatgcaaaagacaatagttttaatttcaaaattctcattccatcaaattctgtttaaaagtcctctttaaaggacttttaaaatgcttagtttcctaaatcctttaatcattaatttagtgttggtaaatggaagtggacattaagttaaggataagggttgaagaaaagggaaagaaacaggaactaagaatatgaattgtcgagtagaaaatctctgttaaatgtagtacttttaatttgcaaacactatccctgggttgctatgagttgctaaatatcaattgagaaatgagatactcaagtgtatgttcccactttaaaaggaaaagcttctaagggaatggaaagagagtaatcaatcagtcaatcaatcaattaaaaacacattacttagaatc

SEQ ID NO: 7658 - DNA, 1149 bp, mus musculus
atagggggcatcagagtaactcaagggcttttcaaattgtacccactctcatccagattttgctaaattccctcaaggcaagaaatatctgctcacatttagttgaaggagtacactggaatatccagaggaatcacattgcaccctaccccaacagaaatggttaaatgccatcttggaaaagtgtgtatccttctggtgttgagaataatttccccgaagtgagtcactcctgatgcaatttgttggcatcctgctggtgtgctggtggggaaagctggcttggtagcaactttggttcttaagccatcttaaattttttaaattgccgacaaaatcattatgagtgtaagggaaaaaaaagtgtccccttaagatccagagagtaatatgtaacataattccattacagacctatgtattacaaatatataaatgcaattttctaagcaccaagtagtgattaaaaaaaaacccacacacaatgtaacagagattaaatttcaacaacatcctggagccacatgaaagctattgtacattagatttattagttttactccaccttgatgagagagtatcacctactacttttgaaataacaagattgactaatttgcctagttcatagagctttagataaggtggcagagagtagacattggttctaagaagatgtactttattatattgtcttttagaagttaaattgaagacatccaggagaatctggggtgtataaagtgctagggaacaggctccaggagaaacctccaccatcaaatagcagtttccaaagagaatgaagagcaatcatgggtggacatctgtgcaaatctagcaaggggtgagtgaagcagcaaatgggcacagaaaaagacaaactggaaggatcatcacacggaaatccagggacgttgaagtcagctcgaaggagatggtccagttctggagcagactgccagatttcaaccccaatgcaacagcagcttggccaactcgctccctctaggactcccttccttgtgttctttgtgcacaaaacaatgataatcaggcacccacatcacagaagaaataacttaatacgtgcctggcacatactaaacatgtagtaaatagcatttcttgctgctattaagtcagtct

SEQ ID NO: 7659 - DNA, 2613 bp, mus musculus
atctctaatggttgacatttttaaaattttaaatttgttgttaatattgatggcagcagcggcccatctggagcagctgttgtaaagatgccagctgcagtgggggaggcgcgtccagggctgcatgctccactgagccagcaggagccggaaacaggcagaaacccagaccccttccgagttggaggggcgggagccctcccaggcgcagctgcagtggcccagtcgcagctgcggacccaggcattccctcactatcttcggcctagggagcccccttcccccacgggttcagaaatgcctgttcccgctgcctgacctctccctactcccagcacccactctgatttcagagcaaagttgaggccaagcctgggcactgttgcaggtgtgcccgctcttggggcattgctgacaccccagccccctgccacctcggcctcctctggactttggacactgacaagcacggaagggaggctggccaaagtgggggatgagggtgtcttggtgcaggcctgcaggtgccctttggcactccaggctgggcgccaggttacagctggttgatggcggcaggaggcaggctggcttctgggcggaaaggggtgggtccctggtgaagccccaccctcaagccagggatagcctggagcatgggagctgcgccaccagtttcacagaacggagtgagaacttacagtacttttttcctctggcccacccattgccacctatggaccaatcagcatatacttcctccccactgaagcccacaaaaaccccagactctggcagacctctggacgatctgcctgcagagaggagctaccaactgtgggtctcctctcagctgagagctgagcagatgtagagacaacctgcctgcagagagaatctacccactgtgggtctcctctcagccaagagctgagcagacagtgggatggcctgcctgcagttaggagctacccattccagatctcttgagagctgtactgctgctcagggaagcacctctttgtcttattcatgctccggttgtctgtgtacttcattcttcctggacacaggatgagaacttgggacctgcttaatggtgggactgaaagagctgtaacacaaaaagagctgaaacatgcccctcactcgccacattgcaacaaggagagaattgctgcagccctttggggagcccagacctaggagctccctgagcaagggctctgacacctgtttggggctctgcagttcctggcatctccaagcttccggacaccactgcattccccggtgccagcagtggaagctgctttcagtatgcctgtccagtcgcagcctcacaggaagcctggagccgcctaccccacggcagccggtgtgccctgctgtgtgcagtggttgaaccctgtactcactgacttgctcacgcaccccttgctcacacaccccttgctgctctgcacttggcttgccctcagcaggtgtgagatcccggccagtatagcttgagccgagtacagcctgtgaggccgagtgggtggaacaagcccagtgggcctgagcataactcgggcaaaggcgccactggccacaaaggtttccagctgacaaagtgacgccccaaggatcctgtgacagcaccaccatgcaaaagactagattgagtactggtacagcaaatatgactactaagcatttctatccaatattcaatagataggtttattcaaactttatggctttcatgactccctactcatattctgtatgaataataaaaaataataatttccaacccagtttttcatgagagatagtgtggcatgatgtaaaaagccctggctttggagtaagaaataactggattcaacttatggtcctcttaggctgtgtgacttgaggctaggtatatgagctctctaaacttcagtttactcagctaaaaagtaggttataacataaagggctttgtagggattaagtgagcaaaatcatttatattacattctttttatttatgttgtaactgctagagaaggagatttaaaaaaaaaaataggtgactatctgaaagaaacttactgttggtattttttttttattcaaagtttcatcttgattaaaaggcaaaagttttgatctttggaagctcatggctagttgtgtaatctcccagttagtcattgttgttatcttccagctccccttaactgacactaaatgtattctttctatcaatttcagttccttcctactgtcctcacaactgttaagtagatgacttttccagtaccctaacttcatacttctttgagccctacatgaatattgaccttcatctcagatctacttaatttagtcatactaattttcatacccgatcttgttagccaccaaaattctgccactgaaaagtgctgttctacctccaaatcaccattctccagtcttccatcttgcttgtacaactattacactttgacttaatctgtcatatcttatcaggacctctaattctttgtcccttctactttctcctgtctgtcaacctgtgtttccttcccattccttcctatataactgagacttcaaggttcttcatttcaatga

SEQ ID NO: 7660 - DNA, 521 bp, mus musculus
ctttattttgaattcttccaaacccagtatattcaagaacaaaaaagaaaaatacgattgtgataccggttaaaaggctgtaacaaaaaacaaaataaggatattttgccaaatatatcacacagcgtgatgtaggggcatacacatgaaattctgattctgtctggaattcctagaccttctcttactgtactggtgaaaatgcagctatagcagcatcacattgtggttcttgagccaacctaggctttgccttgaagatgaaatatttgtcctgaataatcttaccttacagtgttaagatttacatgtgtgtttactttttattaggcatgtactgatctgacttgtttgagttttattggcacttaaaaccgtgagaagataactgattcatgacagcagaatttcaggtgattcatcggattcattaatcaaaatgattagttcagcaataatttatattggatcagtaaatagcatatcttcttttatttaaaggtacctgaattacctggtat

SEQ ID NO: 7661 - DNA, 1171 bp, mus musculus
ccggtcagatcatttggccctgcaccgccggaggcatatgttggtgtgaggaatgctacctgtccagctgagcgtaagagctggatctcttagcggcacccaattcagcagggctgaatccccttcacagtgttaacacaaaagggcatcaccatcccacgatgtctgaaaccagagcaggaaaaagaaggcacacttcttttggtctgaaggtaacccccatcatgactagacgagaaccgtctttacccgggcctgggagctcagtgacataaatgctgaagagacaggcattgttttccgtgctgtgtcctctgccatttaaagatgtttgtagcttgtacattttctgagctgtcagacattttgttattgataccttaaaggtcacctaccacaaattgatggctagagcaagaccttttaaatttggatgaatctcccatcatcccatcccttaacccctttttacagaaattttagttacaatctgagtaagctagaacacacatccaatctgttaccagcaagcagcatgaaagtagaaacgaagaagcagatggagaggtcccattacctgcaaagaaagggcactcaggcagccctttgcaatcgcgatggcagccactagatatcactctcaacttgtcattctgccatgccctgaagaaaaccaacattgaatctttcatttgtttgtcgttgattgtttttgttttgtttcgattctgttttgttcatctgttcgagcagaggggcagttgaagtctcgtcctggtctctgccctggcatggactggcacagaggtgttctgtagttgaataggaagagcctgtctaaaaaactactgccccacttcaaattgcagtgttctgtcacctaggcatcatctcttcctgcccctagtatttgattacaaggaaccaggggaaaaaaactttcttagacacactggcaccaaggtaagaggtggggctgcccaggcaaagtcagtgaacatgaaaactcagacaaagcagagatggaaataatgcgcctcttgaggagaaaagcaataatgaataaaaggactttcctacaataacttcactgaggactcacgttaccaattttcatacttactaaagggattgtaaaaaacaccccagcattttaggtgtcttggttcca

SEQ ID NO: 7662 - DNA, 563 bp, mus musculus
atttctttggttaattgctgtttcaactaaaaactgagacataggatgaatggttctttgtcttagctgggttggctgtggatggagttttgcagagtcagttaaaatatccagacagggacagcaatggcattggcagaatcagttaaaacagtagcagtgaaggacagagaggcacatgtggtgtccattgccatttgcattgggaatagaccctgatgtaagattagcagcagcatcaatagcctcagaaaaatagctgtcaactatagaaggagcatcaggatctactccgaaggcagagagggattacttcacctgacagtacatctgcacttaaaaggtcaaaaacaacctctgttgttgagagtactagtggttctagggggaatgaagtctcagtaacacacactgtggggtgtgtgtggatgggtggagggggccttagggaggacgaggagagaggaagggagtaaggaggaacaatgcaaatatctgtgctgataacccaagaccttgaattatccccgctcaatttaactggaggatgggaagagattata

SEQ ID NO: 7663 - DNA, 606 bp, mus musculus
aaggtgcttgacaacaaactcatgatggtggttatctgaatgaagacacacttttttttttttttttttttttttttttttttttgagaaggggtctcactctgtcaccagtctggagtgcagtggcacaatcttggctcactgcaaactccgcctcctgggttcaggtgattctcctgcctcagcgtccagagtagctgggattacaagcacacaccaccatgcccagctagtttttgtatttttagtacagacagggtttcaccatgttgtccaggcatgtcttgaactcctgacctcaggtgatctgccttcctttgcctcccaaagtgctgggattataggcatgagccaccacacccggcccacttacttctcttatactgtatctttctgttattttttatatcttgaatttaattttatattctttatgcaattaaaacacataaaagcaaataaaggaaaaagactgaaaaactatgggacaaaatagtaatcgctgatggttcagtaaaataatctttgtttatctgtatttttaagatttacaacaattaatatgtatgacttttacaataaaaaatgctccaagtaattttaagt

SEQ ID NO: 7664 - DNA, 878 bp, mus musculus
taaggtagagtgcctgctatgggaacatcttgatgctcatgcccatgtcttgatagaagatatcctctacattagccttcacaaacaagtagaccacagttggttctgtacctgctaatcaacatctatgtaggtatatgtatttaaatagctgcactaggaaaaaatggcatgccaaaaaaggtgtaaactctatcctcaaccttacctctccagaatacatgttctcattttgttttcctagtccttcatggtttccatggctttactctgagccttctgctagttttccacagctatgataaatcgatgtctcaaaactgaaatccataaatagaaacaaccagtggactctagaaaaatagtggtttatcatgggaagcagattcccaaccagaagatttcacattaagctgtgtttgaatggaaaagaaaaataaatataaaactgaaagagtcaacataacagatatcaactcacaatcgggagaaacacttcgtatcattgttactagggatgactaatccaataaatgtcttagctaacaccagctgcccataatctaaatataccagcaaccattcccaggcctacaatgtgcgtacatgctattgagaagtatcattctatcaaagcctaaggagcctcaaagctcattcaggtctgagcctgaacaagctgcaaaacatttcaaacctctccaaggtgaattaaagctccagagaaggcaaattagaggggtgactgagatcctctcatttaatgcaagaatccctctacaacagtacatatccactgatccagcagcagggagctgggcaaggctgctccaacaatgcttgtcaagttttaaatactgggaagccactcctcatac

SEQ ID NO: 7665 - DNA, 740 bp, mus musculus
catgggcccatggggtcaatccagtgtactcttcccatcacaagatctgtaccgttaatcgcatctgcagagtccatttgccatgtaaggcaacatcttcacatcccaagggctaagacgtggacagatttggggggatggttattctgcctgccatgactgtgcagggccacggtaagccctcaataaatgctttgtctaatggttataaaacctggattaaggtccttaataacattgaattatttgcaggattctgtatttgtgttccatggctgtctcatcctaccacctggcagagcgcgccacacatcttgacagactctcatgcagttcattcatcaagcgccttctctgtagaagtcgtggttactaaacaccctcatgagagtgtactgtcaagtgtggacctagaccaggtgttcaaatatttattaaattaacgaagcaaaacagcttacctggtgcttctgaggaacacgttaatgcctcagttctcaccatcatctctccctggaatgccctttcccacttttgcttgtcaaaactgatctatcctgaaagactatctgcgttggctttttttttttaaattaacagatgaacattgtatgttttaaatgaagatatctctgaccttgcttgttactggagaaacttactgtaaaattgatggccttttcttgagcaatttgataacattgtatggttacagcgagacactaatctttaaccttggc

SEQ ID NO: 7666 - DNA, 148 bp, mus musculus
aaaatttcaaatgaaagtaattaaataatgtgttcatcacataagaagctgtaactcaatttcaggaaaagtcactatcagtatcatcattaaaaatagtgcctggatctacgtaagtgcaccgatgaatttttttcaggtgatttaa

SEQ ID NO: 7667 - DNA, 186 bp, mus musculus
cttccttccaggagtgaccaccccaagtttctgtcccccagctggattctgccaaggataataaagaagctcttcatgcttttataccttcaaaaacatttgattataacctactatgtgccaactattgttctagatgctggagatactacagctcttaaagttatttggaagaggttagatcat

SEQ ID NO: 7668 - DNA, 1240 bp, mus musculus
tagtgatacacaatgtaaacacatatcaaaacatcacattgtgccccacaaatatatgcaattattacctgtaatttaaaaataaataaatagattatttctgttgtttaagccactcagtttgttatgccagcgctagcaaataaatagttttctagctaggaagtcttactaccagtggctagatcctcagcacccctctcccaaccttccagattgcccgggaatgccttcaggagactccttaagatggacctcagggatgcagatgccttgccttctgcactgcagcctctgaattgcttgctactttcttacttgtgcacagcaagggggcataattacccattggcaagtgcttctggcctctggacttcagggacctagacgttcaaagcctgctggaataaaagaacttcctaaggttcagaacacaacctaacaccagcattcagggaaacaacacaaagacttgtccatgatggttacagccacccaaaaaagccatcttcatatatgtgtagtttcaatagtttccattggtcttctggtgacagtgcattcacccaaacacactagcacactaggtgtaccatccatctccatagaagagtgggacatagccgctgatggattctttgtgaggccaatccaagacccccatatgctattactatatgatctgaatgccaaggaagcagtcagtcccaccttaccccagagccagctgcttccttactaatgtactctctactataatttcagggaaggacctaaaaaacatacttcttggcttggcagtgatcttagaggcacttgtatcctagatgtcccagagacactgatcataggtcatgtccttcctgtcctccctgagagacaatgtagtttggtgaaaaaggcatgacaaagatgtgtgaccttgagactgtcagcctcatcatccaaaaaatgaggggcaaatgtactagaaaatctctagatcctttctctgatcgttatattcctgacactttgaggggttcctgtttcctaaatgctccaggttttgcaggcttggagtgattcccaaagccatcctttatcagcgctatctggcttcatcaacagttttctccaaggtgaatactcagatagccccctctaagtctcttttacaagtaaagagaatgaacactccacaatccgtatgaaaccctagcacatcagtggtttaagtggatttctttcaccaccagaa

SEQ ID NO: 7669 - DNA, 289 bp, mus musculus
attttgagaaatatttaaaagttagagctatgaagtatttatctttaatttgattcaagaatgataaccttggtttctagtttggccaaatggtggatgtttctattactgaaataaggaaggaagaaaagaagcagagggaagtattagataccttagcaataaatagtaaaataatttactttaatacaaggagggatttttttgggggaaaagtggtttatttctctaaaataaataaggctttttaaaattcaaattctggaaatgtgttactaataccaattga

SEQ ID NO: 7670 - DNA, 195 bp, mus musculus
atgaatgttcttcatgtgctggaaggtatcattgatctgcaacgaccctcaacatattgatacagtgctttgacaggatcgatctaggttccaagaggccagatctttttcacgtatctgcatattctaataagtaatgcagacttacgaaatcgcaggcaaactgtaatagcatgatgaatgacatgaactgtg

SEQ ID NO: 7671 - DNA, 1242 bp, mus musculus
tgactgtgttacattcttcaagaattttctcagatatcatcttcacagtgatgtcaatcataaccacctctgtgttaggccgtccttgcattgcagcgtacggtggctcacgcctgtaatcccagcactttgggaggccaaggtgggtggatcacgaggtcaggagatcaagaccatcatggctaactcagtgaaaccccgtccctactaaaaatacaaaaaattagccgggtgtggtggcaggcgcctgtagtcccagctactcgggaggctgaggcaggagaatggcgtgaacctgggaggcggaggttgcagtgagtcgagatcgcaccactgcacttcagcctaggtgacagagcaagactccatctcaaaaaaaaaaaaaaaaaaaaaaagaaaaaagaaacacttcagactgcataatttatagagaaatgtggtttaattggctgattttgcaggctgtacaggaagcatagtgctggcatctactcagcttctgggagcttttattccctggggaaggtaagcaggaacaggcatgtcacagagccacagcaggagcaacagtaaaaaagtgaggaagggaggtaccacatgcttaaacaacttaatctcataagaactcattcactattgcaaggacagcaccaagccatgagggatatgctcccatgacccaaatacctcccaccaggccccagttccaacactggggattgcaatttaacatgagagttggcaggggcatatattcaaagtcatcaaccttttttaaaggtataatcacattcctcccaattttcattaacttgttataatttattttctgttggaacttattattttgtagcattgctatggttttcttagttatttgattttttaaaaattgtcttttgacctctgctagaatgttagcccaaagatgtcaagtgattttactggttttgtttgcttgtatttggacagggtctgaccaatggaaagtgatcaagaaatatttattgaaggaacaaagtaatatattaacttcctatatttttatcacttttcagtaatatagtggatattaactcatttttgaggacagtataataaatagtaaaagagcatctaatattaatcacatttaaccagaagtaagtcatctggtagacatatgctccaaactgactacttcttacgtgtctttcacaaaagttaaacatttctgtaaacagaacttactttaaaataaat

SEQ ID NO: 7672 - DNA, 635 bp, mus musculus
ttttaaataaaatcttttgattcctgaatttaaaacaaattccagaagagggagatgtttactctcaaatgaaaaatgtgttgctcagtgtgaataaactggtttctataaaacaaagaataagatttatatatcatcctaaaatgtatggaaatcatagattctaacactatattgtggttaaaatttcatctttatgatgtattataggtacttttcctatttgtaggcatgttttatgtcaattgattttcttaattaaaatgtttcctgaaaatttcttaattattcaaaaatataaagatttttgttttcacagtcattttaaatagaaattaatatttaacatttgagaaaatatatttatcacgatacgtttttcagcaattgtcaataactgttttgttaaaattctttaagaataatatagaggcaatatatcataatctggaaatacttttaaattaacatgtattatttctaaatatgcatttatgtactgatatagagatagctagctgttcaatcagctcttttgtattttaaagaaaaaattatttaataagtaaaggcaaaatattttgttttttttttatgagaaagaaggaatgacaataaatataatgaaatgtagt

SEQ ID NO: 7673 - DNA, 1027 bp, mus musculus
gctgctccggagcgggtgcagggcccagtccagtgcacttgtttattgtcgcgcctctggtgcgagccaagctgcagcagacatgatgggcccggggcgaagcgggcgctcggtggccgatagatggcagccgagggcgaaggcgtccctgggctagggcggcgcaaccggggcccccttggatgtcacattcgtaggaagagagagaagtcttggaccatgtgtgtaattcgagcgtgggactgtgcaattctcggattgggaaagggaggagtggaaataaccccggcagtgccaggcttgctggtggtcaggaacagatgattccagccctgtgctgatcgcctgccttcctcctgccattcagaatgctgctgtctcgtgtacttactgttaaggatcctggaaaagggagtggttcctcctagctgcaaacaagggcgctacttttcttttctctttaatagaattacgttttataggtgtgtctaggcaacacaagggaatgtgaaagactttcagagggaatgtttgtgaatacatctggtgtgtactaaaaagctggaaaacccctaagtaaatgcaatatcgatagaaagcgagtttcttgaagagtcatctgctaaactccactagagtcatctctacagtaagtattcttgggtctttccatgaaaccagacacttccatccccaaaaaggggtctttactttcataagacatgttttcaatatttgtaatattagacctgccgttcatcccgggtataagagaaaagttgataatagtaagtgacccagtgcaggctgagtgcacatgtgcctgttcctttgataactatgtagttagtttctccatgtaaatatattttacccactttattttgcaattaattacgtcttaattattattgatattgttttattcttagtaatatttgggataatactgtgttataatctggttaatcatatgtttaatattgatatagagtctgataatatgtctatgttctgagatgtatat

SEQ ID NO: 7674 - DNA, 206 bp, mus musculus
aatcctatgtgaattttaacattatcttatttctgtcaagtgtaatatgttcttttaaaggaaatatagtatatggaaaataagaacatataaattcaatttaaaaatcatctgaactaaggctaccaaaggagaaacacttcaaaattttgctagttaatattttgtacattgttaaatatgtacctttgtaaaagcattgctct

SEQ ID NO: 7675 - DNA, 788 bp, mus musculus
atgctgcagcaaacctttagtagaaatatgaccaaattctctattctagcccatgtttcatttttgggggttttgagaactgatctacttatctgacaagcccagacagaagaagcaagcaacatacttaaacaatgaactgcaaacaacagaatatctctatgtacttttaagtgaagtgattaaaaaaaaaactgggcctcttataatcattaggaaggtgaaggattaggcttgcagaagtggcagttcccagagggacactggaggattgagtagcagaagctacagcaaaggtcacagagataaacaaactagtcaacacattgcagttgtcactgtaatgaacacatttcctggcccttggactttgtttcaatcacttaagttccaatgtactgaagatataattggctatgcctacataatttctccattcattgtgtcctttgattaccataccaagaagtatacactaaatttcacgaggaagatacattttgaggataatttttctaaagtgagattgaagataaattacaaagtggaaggaagaattagatatcagaaaaatggtttgcattttcacataatgtttgtatatacaggtatagtaatagaacagatatctacaaggcttcgcagggatacagctgtatacctcccgtcccgcagctactgcaagcaggcaaagacacatattcacaggcatttcaatctttgagtaagtcttcgatgtctggagtacatgcaatggattttttgatagtaacaaaattattaatagc

SEQ ID NO: 7676 - DNA, 203 bp, mus musculus
tataatatgcaattatattttaaaaatttaagtaataaatgaaaatcttcaaatctatcaaattaattaattaaattttatttgacaacatgaaatagcctcccaaaacaaagtgtcagttatatcaaaggaaatttgcagcacagcttgggatgggctgcatgaaagaggccttgaaatttagctttgctcagcttctttct

SEQ ID NO: 7677 - DNA, 3755 bp, mus musculus
ctctgtgggatcacaagtaaaactgagaggtgacagcgtgcaggcagtcctcacagccctccctcgctctcggcgcctcctctgcctgggctcccactttggcggcacttgaggagcccttcagcccaccgctgcactgtgggagcccctttctgtgctggccaaggccagagccggctccctcagcttgcagggaggtgtggagggagaggcgccagcgggaaccggggctgcacgtggcgcttgcgggccagctggagttccgggtaggcatgggcggccccgggaaatgaggggcttagcacccgggccagcggctgcggagggtgtactgggtcccccagcagtgccagtccgccggcgctgcactggttttctcaccgggccttagctgccctcccgcggggcagggcttgggacctgcagcccgccatgcctgagcctcccacaccctccatgggcttctgtgcagccggagcctccccgacgagcaccaccccctgctccacggcgcccagtcccatcgacggctgaggagtgcaggcgcatggcgcgggactggcaggcagctccacctgcagccccagtggggtatcgactgggtgaagccagctgggctcctgagtctggtggagacgtggagaacctttatgtctagctcagggattgtaaatacaccaatcagcaccctgtgtctagctcagggtctgtgaatgcaccaatccacactctgtatctagctactctggtggggccttggagaaccttcatgtctagctcagggattgtaaatacaccaatcagcactctgtatctagctcaaggtttgtaaacacaccagtcagcaccctatgtctagctcagggtttgtgaatgcaccaattgacactctgtgtctggctactctggtggggccttggagaacctttgtgtggacactctgtatcaagttaatctgatggggaagtggagagcctttgtgtctagctcagagattgtaaacgcaccaatcagcgccctgtcaaaacagaccactcggctctaccaatcagcaggatgtgagtggggccagataagagaataaaagcaggctgcccaagccagcagtggcaaccggctcgggtcccagtccacactgtggaaggtttgttctttcactctttgcaataaatcttgctgctgctcactctttgggtccacactgtttttatgagctgtaacactcaccgcgaaagtctgcagcttcactcctgagccagcgagaccacgagcccaccaggaggaacgaacaactccagacccgctgccttaagagctgttaacagtcaccgcgaaggtctgcagcttcactcctgagccagcgagaccacgagcccacctggaggaacgaacaactccagacccgctgccttaagagctgtagcagtcaccacgaaagtctgcagcttcactcctgagccagcgagaccgcgaacccaccagaaggaagaaattccgaacatatccgaacatcagaaggaacaaactccagacgcgccaccttaagagctgtaacactcaccgcgagggtccgcggcttcattcttgatgtcagcaagaccaagaacccaccaattctggacacaaaacctcaagtagtccctccaccgaaagcacattataaggatcattttgcctcaaagccctcctacaggcaagaggagcttactgtgacttccaagaagaaaatgatgttgtggcatgaagcacttctctgatcatatcactgctgtactaaaggtacgttctacatgtactttttgggaagaaattgatggttatttcactagtgtttatttttgatacaaaggaccaagtaaatctgtgaagattaaggtctattttcttataaagaaaagaatatcaactattcagactgatgcaaagttactttcttagcataaattctaggtttatagttaataccttgcctggaatacttgggccaaagtccagccatctttgtcgggcttcttattctgtaaaactagttttctgctccatgtcattccaccatattttgctggtcattgtgagaatgaaattaaagtaagcatgaaaagcattttacacagcacgtaatacttactaaatgttcaataaataattagaatttaaatttttgtgcagctcacttttataaataaaatcctaacattttttactagtaattaagcaaacgtcttcacatatcaggcctctgttaatatctcagcttttactctcatggcgtgaagtaacttaagtacttacattgttataccatcattttgctatttttggaatcacctttctgaactgtatattgataattgcaataaaaaactagacaacacagcacaagggatctcagaccataaatttaaaagaaaaaattgtatataatttaacccaacagctgaacataaattatcctagaacaataagggcaaaaaaaaaaatggttaaagaatagaagtaaaattgtgggctaatctccataactttactagacaacaaacagtgctttcataatcttaatcaaagatttttcttctcaacttattttggatgctgttgcttaaatatgtatgatttacttaggctagaagaaggaaatatatcaatttggtgcctactaaagcaatatttacttgaattagatttagcaaagtatttcaatgttataagatgggtaaaatgttcagacatagattctttctgggggaaaatgtatttataattattgcttttagaaattattaaaatatagttagttgtgaagcagtgttagtaaagctggactgtgcttcagatctgatgcatatctgaaagacaacgtttaagagctttattttctacattcttccaattgaaataaagcattttttctaatgtattaaaacactataaaaataatggtaatattctttgaaaaaatttagctctgtattttaatacaacagacttgaattatgagaattcatggagaagggatttattacgagctgaaatgactataaaatactatcattactgggttaattctgactagaattctctctgaatgtttatggcagtcctatttttgatcaatgagttagagacttgaaccaaattatctgtcttctgcttctctttcttcttctctctttgtcttggctttctctgtcttgcaaatggaaaacatcattatgtgtacacacaatatagtttgaagcttcaaagtttttatgtgatcagaaaatcatgcccatttctagtcatatatgtgtgtaatcaatattcataagaatgtctactgccacacattttgtagtgtgttatatataatattgtccttattgatataacagaaatgccgattattcattaaaggaaatgtatgacacagagaaattttagacttacatctcttatgttttttacaagtgaaatgtttttctgaccttgtaatgaaaaataataggttactgaaatataaatgatattcaaattaattttataaaataagcaattatacaacttctaatattattctatgattatttatcttacaacacacaattgtgccctaggtatggaatgtattcggtgttgaggagtttggacagtacagcagcagctgctctaggtaagataatcagggcagtccattctgagaagattgcataatatacacacacagaaatatataaataatttaaaggcacagtcttatttttgtatgacatgct

SEQ ID NO: 7678 - DNA, 900 bp, mus musculus
aaattcagcttttataaagacatgaatattagggactactaaacccactctctataataagcactatataatgttagtatatagaatatgataaagtgctaggatgtattcaaaaccagaagataatattccacaacttggaattttgctattaatccaaagtccacaatttagagcacaattacattaaagttgcaaaattaaatgaaatgttgctttctcttgtttcaatttggcttaactgaaactccctttgccacatttgtcttccatatatctttccaagtgagaattggccacgaataaaatttgtaaatgattttttaaatgacaggggagcaacaccctgtttgtcctagaaaggtgagtgtgagttcaggatctattgcagcttatgcatgttgttgctgaattgctggtttatcttgttgttggagtagcagtcaggccccaaactcctctagctcctgccagatctcctctttcagcttctcctgcaaactggtccaggtaagtatgcagcttcatgatcaagagcaccgacttaccctgtaggcacctgcatctgtgaagataaagataataaaagacatgattccaatttaccattgttttccccttttcgtatccatccgacttttctacctacctcttctgccaacctcagacctgaccctaggagcagaaacaacagccttcaatagactgtttaacaaatacaatgcatttggtcaatcaatccctttaacaaatgcctttttaatatcattcactgtggttctgcttctctgcttccctgacacattaatgtttaaaataaaacaaattactgataaattccaaactcctttgtttctttggtagaattcctgagaggatgcgttaattctcttatgcttt

SEQ ID NO: 7679 - DNA, 1121 bp, mus musculus
ggtctgcttcagagcagccccaatcgaagtcaggaatcatatgacatacatttgaaaatagtttttttaacataaaatgatagcaaaaataaaaaatctcttataaccgttgcaaaagactagacatgtctaaaagtaatccatgtcagataaatttagttttttgatcaattgtgatttaatataattaattttgggcctggtatcaattttctaaaaagcactgctctgggaaaaagtgaaagcaaatccctttctctgacatatttttaatgttgagatattagattctaagacacagactctatggactctaatgagatcacattacccattgctagtgggtgtggcactgacagggataaggaggtagcatcctgctggcctttcagagacctgtgaagaaagtagtaggtgctcagtgaactagttacactttgagaggtcttctgataatcatttgtccacttccagggggctttcaaacctgattcatcttcaacctcaccaggggaatacaggcctctttgtaaaatcagagtaatggatggaaaagagaccaaaaagacacggttcattatcttcctatttcagcctttactttgacaaatgaggtgaccaagcccaagcgtgtaggaggtttacacaaaaccattcagctggttagtggaagggcagggacttagatccatgggtccaacgttctagctaagtgagtttcttcggctgatactactgattccgcttttgaattattcaaatatccttcaagattctgagagaaatgcaaatttaatctttcaccacttttttttctcagataattattgccattatatcagaaagttaagtgatgattttatcaattaccaaagttgattgaggttggttatttgtgaagtcattagaaagcttaccttatccgttatgaacctgactttaagatgagggatgggggatgtggatcacccttgtttttctcgcagaagggctgaggtgtcaccatcctacttctagaaagggagccacgtgtcaccaacaaatcaacagtattaaggagaacgtttgacataaaaagtcatgttttataacaaaaatgtagaacatttattcaagtcaac

SEQ ID NO: 7680 - DNA, 1473 bp, mus musculus
cagtctgaaaattgtttctgtaaatggcaagatagtaaacattccaggctttgcaagtcatctagtctttattgcaactactcagctctgcacttgtagtgagaaagcagccatagacaatatataacaaatgggcatcgctgatttccaataaaactttatttacacactgacatttgaatttcatatgtcacaaaatattctcctccttcttctatttttgctccagccactgaaaaatgtaaaaatcactcttagcttgtgggttgtacataaacaggaaggctagatttggcccatggactgtagtttgtcaaaccctgttctagaggttcaggttaatggaggcattagacacagacattagaagggtgaatcaaaagcagtttacatgtttaaatgatttagaaagtagtccatgcaaccagcttatacaatagagagattctctaataatgcaggagaggcatgggagttcaagttcttggacattaatttctaagtgagtgaaggtcacattagattttctttatatacaattgcccccttttatgtccaggcttatatttatatgacatttctgtatataggctagtctggctgtgtcttgggaccagtttagctgagccagttccccatcatcaatattggtgttacataatattcaatgtgatttcaggctctgcttgggatagtcctctcaggcatgatcactactctctctcagcccactcatgtgtacacagcccggttcatgtgctttgctcagataaggactgcggaattagaaccagtgttagttacccagaggtttttgagagtaagctattgggcctttagaccagtggcaagatcttgattacgcattttaataacacatatttttttttttatcagctcacagtatttttgggcttcattgtttaagtttggaagttgttgttgcctggagtctaagcccagttctactgttggttgctgtgtggcactgggcaaatgattgaagctttttcagccttagcttcctaatttttaaaatgggaatcatacccataacctaacttacagagtttttgtattaaatgaaataatctttgtatcctttcaaggcctatatttaaagcatctggtatatagcaaaacaaacaaataaaaatgcactatttttactacttatacactatttatactactactatagcactactattactattattataattgtagaaaataagaggaaatttggcattcttttcctagtagagtttttgttactctttttaaattggatgaatattagaaagaggagagaattaacttacttcagaaaagacttgcccccaaatcctaggaatattacagatcgcttaatacaagaggaaatcgaatatgagctgtatcattttgaaagaacagctgttaaacatttcaaaaaatttaatttagaaaaggttaattacctttactatg

SEQ ID NO: 7681 - DNA, 1699 bp, mus musculus
taccaattacagtaaataggagacaaacttgttaaaaaccaacaatatcagattaacataagacagaagataaccttgcagatcagaaaacctcaggtgttcttatcagtgaaaacaattttaagaatttctaagcaaaattatctgtgttccatttaggttgtttaacttttatcaaaaaccgcatataaatgcaaagacatacataaatgaccatgttgacttatgatttcaagcctttgctaaatcttcctttaagaccaaaatgttacttttaaaaaaaaaaaagcacacagatgctttcaaatttgttgtcattgcaagaaaagtctgagatgtgtattgagcattggcataagcttagttggctggcatcagagttagtaacaggtggcagagtaagcagtaaaattgcaaaggcagaactgtttgcatttcctgcaatatcatatcaatctttttctagtaagtataattctggtcattagaatcattattttgttttgttttttaatggaagcccagagacacaagaatatttatgtcttattgttaataacttatagagaaggtttttaatctattatatcagaaatagtaatggtcacatttgtgtatcctatggtggcatacaattcacttcctaggcatcattttattttttcccactctaagatgtgaatctgacatccttaaagaataaaatactatattatactagggttgggaacaggcccccaaatctggccataaactggcccccaactggccataaacaaaatctctgtggcactgcgacatgctcgtgatggccatgatgcccatgctggaaggttgtgggtttaccagaatgagggcaaggaatacctggcccacccagggcggaaaaccacttaaggcgttcctaaaccacaaacaatagcataagcaatctgtgccttaaggacatgctcctgatgcagataactagccagagcccgtccctttatttcggcccatccctttgtttcctgtaaggaatacttttagttaattgataatctatagaaacaatgcttatcactggcttgctgtcaataaatatgcaggtaaatctctgtttgaggctctcagttctgaaggcttaaacccctgatttcctactccatacctctatatttctgtgtgtgtgtctttaattcctctagtgccactgggttagggtctccacgactgagctggtcttggcatactagcaacttctatcatcaactaaccttctcattgctgtgtgcttgatttttaaaaatattgcatcattttcccaattttatggattgattgattgattgacacagggtctctttcttccaggctggagtacggtggcacaatcatggttcgctgtaacctcaaactcctgggcccaagccatcctcccacctcagcctcctgagtagctaggactacaggtgtgtgtcaccacatccagttaatttttgtatttttgtatgaacagggtcttgtcacataccccatctgttctgaattcctggcctcaagcaatcctcaccttttagcctcccagctcactgagattatagcatgagccaccacatcaagcttattgaaattctattagtccaaattattgctgttacaaacacgtagaaaatatcttctacataatatatttgaaattttatttggaacaataata

SEQ ID NO: 7682 - DNA, 602 bp, mus musculus
tgaaatctaataccaacatataccagccatgtgactttaaggaagttacttctctggcactcagattccttcattatcaattaaatatttaaatttctatttaattgagctggtatgagaatgaaaaaaaaatgctgtatataccatcagtacatttaataaatgtaaatgattcacacacttccctctccctctctcccaccctctctctctctcttctgaactgtaagttcttgttaattatatgaagaacacagagatatgttcagctatcatgaagataattaatatatgtgggtttttaaaatagatgctatggtgacaacttttgtggagctaaggctaattttggctactcaaaataacaaggaaaatttcgagctctctataacctaacaaaagccacctagaacgacaatgtgtttttttaatagaagccagatttgaagcttgtttttaccattcatgtgacaaatctgcctgataaggcccaggctgctctctacattgaagatgaggtgagcaggcagactaggcctccactgtcgcagacctcaagttcacatgcagaaaaccaattctaatttttaaataagtatgat

SEQ ID NO: 7683 - DNA, 607 bp, mus musculus
ctgactgtgctaggctcaataaggacccctgctgatatccacagctgaatccctggactctgcaggggtgttaccttacctggccaaagggtctttgcagggttgattaagttaaggactctgagatggggggattatcctggattatctcagtaaacccaacatcatctcaagggttctttatgaaaaaattaggagagtcagagttagggatgatgtgaccgcagaagaagtctgggttctgtgagaccgagtcagggaatgcgggtggtctctagaagctgaagaggtcgggagacagactcttccctagaaccttcagaaggaatgctgccctgccaacactttgacttcagcttagagagtcaaactttggacttccagcctccagaatggtaaactaatacacttgtgcagttctaatccatcatgtttgtggcagtttgttacagcagcaataagaaacttatatgctgaccacagctgagcctcaggttctgggctggaagttgagcaagcaccggctgcccttgattcactcaacaactcaatgaggttaaaggtgtgattctcatttcacagatgaaaatgacgagactcagagaag

SEQ ID NO: 7684 - DNA, 1994 bp, mus musculus
aggaagttgccctgaagagtggggtttctcattcctcttctctctgccttatggaaatcccagaatggcttggcagagagttcccaccgcattagaaaacactgcatcaccttgagcaagattggcttttgtcttcacatctctaacatgaggagtttggtctacaaagtgctgtgaacatttctgttgcctgcagaaacctttcttcagaggcaatctctatgtgaaggtcccaatggatgtaaggccctatgtttgagaggggaagggcagagaagggaggagatgaggtgtctggggttgggtgtgcttggcctcctcttcatcctctgtctcattctttaagattcttcaaggcagtctcagaatcttcataagacaaggtttgaggctgggcgctgtgactcatgcctgtattcccagcactttgggaggcagaggtgagcagattgcttgagcctcaagagtttgagaccaacctgggcaacatggcaaaacctcatctctacaaaaaaatttaaaaattagccaggcatggtggtgcaccagaggtcccagctacttgggaggctgaggcaggaggatcagttgagcccagggaggtcaaggctccagtgagccttgacctgggcaacagagtgagaccttttctcaaaaaaaaaaaaacaaaaaaaaaccccataaagtttgaatgttatcagccctggggatccttcgcacccatttaagctctataatcctacaataataatacaaagaatgtctcacccatgtgagctactctagaatttagaagatcccttcataatcatgatctctttgatcctcatgatctttggccctgtgaagtagtccaggcaaatatcatcagctccattttataggtcaggaatttgagtgtcagtataggttgggtgagttgccctgtattgttgagtcctgttgctactgagcctccgaggaggataagtacctcatgtcttgtccctgcctcattttctctttcatgccttctgtgagcctctgccatgttgatggcctgttctgatgagatatactgaaatactggacttctagatctcctgtttggttctcattttggtctaagctgagtgatacaggatgtccaggctggcccatcccctcaaatggcttcctcccctcccagatcacagtgtcatagatgctgtcatccttttcagcccagcaactgtctccaggctccacccaacagcctgtactctggaccagtctgtgccccgccatgtggcaccacattgtacctggagtgcacaggtcaattctctcgacaccatttgatagactctgctctttgggacagactgcttgcatttacattctacttctcacatctcaagatagtggttcccccatcctacctttgccctttgcacactccacctaccatcaactatgggtacctgagggtccaccctctctctgtacttctggcttccaattctctgcaggaatatctaaggccaattctttttttttttttttttttttgacggagtctcgttctgtcgcccagcctggagtgcagtagcatccatcatcttggctcatggcaacctccgcctcccgagctcaagcaattctctgcctcagcttcccatgtacctgggattaaaggcgcccaccaccacgcccacctaagtattttgtagttttagtagagacagggtttcaccatcttggccaggccggtcttgaactcctgacctcgtgacccacctgcctcagcctcccaaagtgctgggattataggcatgagccaccgcgcctggctcaaaggccaattcttatcaaaagtattagttttcagaaccatcagtgaagctataagtgtggatacctataaagaagtttacaaaattgaagagttcactaaacacatctacttttaccttcaaggtcagatgtggcacctaagaccatttttgtggtacagaatgggcttaccaggaagg

SEQ ID NO: 7685 - DNA, 1994 bp, mus musculus; identical to SEQ ID NO: 7684

SEQ ID NO: 7686 - DNA, 627 bp, mus musculus
ttgtattccccacaaaattcatatttcaacacatgaaataggtctcagtgaactttaagccctaactcccaatgtgactctctctggagatagggctttaaggggatcattaaggttaaatgaggttatatgggtgagaccctgatccaataggattggtggccttaaaagatgaacagagggagacttcacaaagaagaggttatttgagcacacagtgacatgttagccccgtgcaaactagaaagagagctctctccagaaaccaaatcagctggcatcttgatcttggaattcccagcctccagaactatgagaaaataaatttctattgtttaaaccactccatctgtggtgttttgttatattagcctgagaagactaatacaggtgtctttcatatgttgtgaagtgtggcttttggagaagctgaagcttaagcttaattggataaaacttaaagtgtaataaataataaataatgttagccaaacaagtgaagccgaggaaaggggaaacatggagtttgtattctataggtttggccgctataacaaaggccaaaataacactactttcaagactgaagtttctttctttcatctcctggtctaagtgtaggctgcc

SEQ ID NO: 7687 - DNA, 1041 bp, mus musculus
taatagcatctttaatgcaatagaaaagcaaactcttggtggttagatctctatgtttagtcactttggaatctttgatgcttttataagtcattggaaatgaaacactaaatttgccttcaagtgataatggagagttgtgtatttcaagcaaatttggggtcagggagtggtgaatatactgataataaaattttagttatgaattaataagaaaactttttaacttgccaactattcgtttatgtagcacttacagcatttcaggttcagtactaggcatacaaaagcaagataagatcctagcagtataaatttgatagtcacaaagtgaaatgagacattagacaggttgctccagtgacatattatgtgtgctgtgattgagaaattaaaagcatcaaaggttaggggaggggagtggatggggaaagtaagatgttgatcaaagggtaccaagtttcagttagacaagagaaataagctttagtactctattgctaagaatggtggctataatacataataatgtattgtatatattttttaaaaagttccacaggaacattcatttgctaagttagggatgagggaagtcttcctggaggaaataaagttaaactaagccttttatttaagtaggaattgggtaaagaggataaaggaaagagcctgtatgtaggttctggagcctttgaaaaatggaaaaacatccagactggtgagagattggagtgtagagaaaagtggcagagatgggtccaggagatgaactaagaagacattggcagtgcccatgagccatgataaaggaacttgtactttatcctaaacctgggatgctattggaaattttaaggagagtcaggacatgatccagttttattttatccttttaacctttctagctacagtgtggttatgcattccaggcaaggtagtatggaggctttttcttaggcaaggccaggggcaggaatagaggcaagtggacagattcagaaagtgtttacgagttagaatgaccaataggttaagtag

SEQ ID NO: 7688 - DNA, 656 bp, mus musculus
taagacttttttgaggccatgatgaaatacacattctcggatcctgtgcaggaaggtttgcataatatgtctcgatagcagtcaccttcacaggtgattctaagattcaaatgcccagccttgattcagagtgactttggctgcctcatgaattaattccctcacaaaattctgataaatgtttacctaaacatttaaacatttcccttggatgtaccacctcctatatgtgtaataaaattctttagtgttacaagagaacatatgtgctttgattttctaagttgttagtcctgaattagtgtttctagagatctttttctccctccaacccccactgatattagatacagtttgggggaatcttctttttcctttagcccttagtgactatttctaggacgacatcctcaagttttgcaacatgaaatatattctactgaggttgagagatgactccctcatacagcagcgaataatttttccaaactattgaatcttgacgaacctctattacattgggaagcttctatttgctgtgctaattttcaccatcctctaagttctgacccttggatcttttagtgtttgcatgctaattttccgttcttcatggtcaatattaaacgattaatataagtacctattaggtatag

SEQ ID NO: 7689 - DNA, 519 bp, mus musculus
gcaaatggaagatttggagacatcccatctgccctagataaacttttgcataacaaatggtgccaagatactggggccatgaaaggtctgtaaaacaggatcagtctgagcattcaaggaaaggggattcttaggaactaccatgagttcacctagctcccttcatcaacttctttttccagatctatttggaaattagtgattgagagtgaagcccgccacctctgggcccatgcagttgtgtgttgtggatccattggctgtgtgtgagcaggaacagatggggtcaaccagtgccatgaagcaaataagaacaaaggagaaacttacagagtaagaaattgaggaagctctgggacatgaaatagcttgcccacaattctcatggctagttggtgcatagcagagattacatccataggtatgactctcaagcaattataaatatctaatatggcataatatgatgactaactctccctgccatctcagagtgacaacatcttattgccacacttc

SEQ ID NO: 7690 - DNA, 995 bp, mus musculus
attgcatggtttctagttgttaaacaatatagtgcttacaatgtgtcaggcactattccaagtactttatgaataataatttgtttaatcctcataaggtatgtgctattattattcccactttgcagatggagactccggcatagaacatttaacagcttgctcaagatcgtccatctcctaatgggcagagctaggttctggattcagacagcctggctccacgatccaagttttaagtaggttcttccacctctcattgacttattctatttatttcatttatttctaatcatttactttatttctaatcatttatgttgtgtccctccactgtttctgctcatcactgcaaagtctttgttttcattacccccttgtgactacctctctgcgccaacaaagatgccatcccctaagtggtcaccatcattggagctgcccacaggtgtgtctctccatagggtaggggaaccagtaggaaattcgactccagtcactaattcacaagatggcctgcagctcagattaagggcagggtagctaccgctggaagaggcttggcaaagaggccacagccacgagcccattttgtgcctttcacagtgatcatcttctcaggtctctgtgctgagtcctttctccctgtgacactctcaactctcaaatttgttcaatgtataaatgaatatgggaatctgtcactactgctcctggccagcacagggcccttgggtgaattagaagttatcctcgggcacctggctagtgacagtgtatggatgtggtctgtgggcaaagaggatactcactttgggtcaaaaataacttcagagatcacctagtggtccaagcccaatcactagttcctttaagtgtaatagttcaatccaacaaaacactgcctgagcatcttctgaagaccaggaagtatgctaagtacaggggagatgaagagaattgtggaaggccacctataataaatcaatgacaga

SEQ ID NO: 7691 - DNA, 201 bp, mus musculus
cagagacaagtttaagatttgctttgttcttttacttaaataattcttagaacaacaaataaaaacaagggagggtgcattagagaatctcagccacatcaacaattatgaggcttctttgttgggtggaccattttgcaatcctggatcaaggtagtttatgccattgtgggcaacgatgcaaaggtttagcgattgggg

SEQ ID NO: 7692 - DNA, 193 bp, mus musculus
cagtaagcacttaactactattattaatatcactactttttatttggaggctatgacttgaattatgagcctcacagagcaaacatatatatagctgttcagttgtcttaataggcaagaaagtaatttttgatccctttattctcttgaattccaggttaaattaaaaataccttttggaaataaattacta

SEQ ID NO: 7693 - DNA, 213 bp, mus musculus
ttaaagtagtgggccaagtagaaactaatttaatcctatgtaatagtgagcttcatggcttttccagactatacttgtagcaagcagaaacatcgatctaatacaagacagatgcacatcaacaccaagttctacctctgagatgtatcttttatccgatctcttctcgtggtctccaccactactgtctgcgttaacttgggctattgtaac

SEQ ID NO: 7694 - DNA, 213 bp, mus musculus; identical to SEQ ID NO: 7693

SEQ ID NO: 7695 - DNA, 1051 bp, mus musculus
gtctaaaaaaccacttcttattttcaatgctgacttgtatgtaattttggtaaaggattcactgtttgcgtttatatggatttctagttttgattagaaaacaagttattgaatttctacttatgattacaaaatgactgaatttgccccaaacactggaaagtaaaaatgtggatggaattcttgttaccacctcaatatcgttcagttaaggagtgggttgtcctcactaaatattcactccaaagatgaaagagctaaagctatccaatcggggtgaataatttccccaagacctcactggagcaacggcaacacaactgtaatattgatatctaagacatcttcctttgccatctcttcgttcattctttgagcaatatttataaagcatgaaatttctatggccctggtgttacattatatactcaggattcagtaataaatgatgattaaaaagacagaattcccgctcttaaggagcttttaagatagagggagatggtatataaaagtaagccccctttgcaataaattctttaaggagcacacaggattcacagtgccctgctggagatacagtcacaagttttctacggtcacaggttttctgcaagaactgacttctacaagaaactgagaaagaactgaagcaggggaaggagtcgaagctccaggcatagggaaaatgacaagagggtaaagaaatcatggctggtgcagggacctgtgagtagccgaatactggggctcaaggttagctaaggaagtgacaaatgaggctggagaggtttgctaggacaagccatgaagggtttgttcattattccatgtcatttggattttatgcagagtctttgtaaaagtgacgtgaagagattttcatgttggaaagatgactaactgcatcgtagaattaatgtgaaagggtggcccaaggaagcaagtttcttcacagctattgcaataaacaggtgaggaatgactgaggtctgaattggatggtgttggcacatgaaaaagatggacagatacaagatatatggaagaa

SEQ ID NO: 7696 - DNA, 311 bp, mus musculus
ttggtgatttgcagagttttaaaaaatatatttacttgctataggactctaaaactaatgttatctatgattttgtgttgtgtttaatttgtgaacaatcttattgctaatatacaaatggaagggaaattaattcctcctacctgtattaggaagttgcatttgcgttaatatcaccaagagagtatagccacaaaacacaagtaaatgcctcttttttacattaaaaattccttttaatgccagtttaccattaagttatataacttcattcacttgttctagcaagcaagatttttcatttgtgaaaa

SEQ ID NO: 7697 - DNA, 882 bp, mus musculus
agacaaatctgtatccagagtgtctattcccatgtgaacaaagtcttgcacttctcttgatgaaaatgatccaatgcaatcaacaagaccaatgcaatcaacctagctgcatatttcctcagagaatggtgctgtagcatagggtactccccagaatttttcgtcaccagttttccaattgtgtttcttctaagcacatattcatataaattgatagccactgcccatgtattgaagtagatctgttcttaaatgatgtctctttctctttccaggcaaaacaataggttcactgctgcaagtaatgccaactgggaggatttcctttcagcagtgttctttagggcctcccatgagtaggactatcatgctgaaacagtcctcttctgagtagtgcccatatatcatgcagaaccacctgtgcaccaggtctaattcttcattctcaaagtcttcattgggactacacaactaacacgttgctaatataattagcatgtgtgtgccttctgggcctactcacatcatattctttttctatggagtactaccgttcacacctaaattgactctgcaattgtgtcatttaaaaaaacaaaaacaaaaacaaacaaaagtgagtcttcagacatattttctggagacttcttgaccagcatttccttctgtactcctcatttaggtttctctactatttgattaaatttgcttcatcgaagaacagtctcaaattttgagtaaaaatttagttctgccagtgatagacttgctcatggcaaaaatgttgtggttttcgttacattgcatctaatcacttcttttcatggtcactgtctaaaccaggtggaagaatggcttcaattttccttctaagaggaaggt

SEQ ID NO: 7698 - DNA, 199 bp, mus musculus
tggtcataatgcatgtgtgactgtcagtgatggagcccatgcttatttctgaagcctcgtggcatttattcaagaaactttagtttgaaaactggcattttactaatttgtctgaacttaaaatgtgtataatgaacaaatgatgtttacttgctttatataagtaagcgtttataaataaaaagtagattttctgtct

SEQ ID NO: 7699 - DNA, 1028 bp, mus musculus
cttagaagaaactctggtcctgaataacttcatcaagctgttgctcaagccttgtactaccatctacatgagtttctttctacctaaatgaaaatcagtcttcatgtgtgcaaatcactctggactaatttcctttgcatataacgaaattcagtcttaactgacacaaaggagaagaaaatcattaatttacactctactctgaattgtaaatgatgatggatagaatgaatctagtaaacatttgaattgggggaactaaaagatgaaaagatacagaaaacattttcggagtagggaatttttcttacatctttactgtatttgaaaatgtggggcaccaaggaatacctgatgggggtgtgttagtgtgatttctatctcaacttcagaacactggggaatagttactacctcagtttcccttgatagccaactggctactgttatgtgattagatatgttgatctcttagtagaaaagattaaaataataattcttatatagttgaacattttatgtaaaaagatttcaatggccacattacatatgatcaaatagaattctcacatttaaaaataggatgataaataaaatacttttaaaaggaaagataattttgaccattgaacacgaatcagccctggaaaaaccaagagcacataatgttcatgcttttggcctttcttaagacttcatctacctgtatacaggattcttaccctacgttatttcaaaggtaatccctgttccaaaatcctcatcttttttccttctttgctagagtatgaaaatgctttccacattgtccacagctagtagccccttctagacatgggttaaaatcacccagcactagaagctgtgccattacaacacgtgcatttttcttaatgacggccaatgaaccataacaaaattgaaacttccctctctggtagtgatcagacaggttcaaaaagaatatttgatgagatgccaagccagcacattgctgccattataaaagcaacgcccacacccaaatc

SEQ ID NO: 7700 - DNA, 166 bp, mus musculus
cttcccactgatgtaccgtttgtcatctgcagcggactctgacaagcgtcatgccagtgacttcgccctgtggaaggcggccaaaccccaggaggtgttctgggcctctccctggggacccgggaggccgggctggcacatcgagtgctctgccatcgctaggtaa

SEQ ID NO: 7701 - DNA, 769 bp, mus musculus
ctgtgctcagccctcccctaacccggctagtcctcagctgccccaggggcacctgggccctcaccaagcagctggcctggaaagagactcacggtgggccatgggtgacttggtttaaaggacaaaaggactctgggtgcatttctcctgccatacaggccatgagggaagagaagaagcagacatgtctctgtcccttcactaagtgtcaggagaaaggaggagacgactgcccatggctgcacttgctgctctttctggcatttctgagttactggggcagccaaaacatcccttctgtgaaatgtgtgtggctggtatcagctggcagccaggacaaactttgtgcagcacaagtgtggcattggagaccctctgtttcttgcatctgccctaggtgagctgtgaaagagcaaggaggccaggggagaggaggaggaggagggctcagtgcagcctccaggcagcaagcacctgcccaaggggctgccgagggtgagcatgggcctcaccgccagccccccgctcataggccacgcctcaccagagaaggtcctggaagtggagaaggtcctggaagttggccacgtgcaacagttagggctgagcaaccgggggtgctcaaggcatcagtcacaacaggaagaaagtgaaataccagggctgctccccgctggggaaaacctgtgtgcctcctgtacagaagggcctttttattgttaatctgagaaagaatgttccgtgaggcttgcttccagctacaaagggc

SEQ ID NO: 7702 - DNA, 314 bp, mus musculus
cacacacaacaccgtgcgtgtagacgccatgcacacacaacaccgtgcgtgtagacgccatgcacacacaacaccgtgagtgtagacgccatgcacatacaacttgcatgtagacaccatgcacacacaacaccgtgactgtagacaccatgcacacacaccatgcatgtagacaccatgcacacacaacaccgtgcatgtagacaccatacacacacaacaccgtgcatgtagacaccatgcacacacaacaccgtgcatgtagacaccatgcacacacaacaccgtgagtgtagacaccatgcacatacaac

SEQ ID NO: 7703 - DNA, 314 bp, mus musculus; identical to SEQ ID NO: 7702

SEQ ID NO: 7704 - DNA, 901 bp, mus musculus
gaactattccttggtgtcagaatttgtgttgcatggactctgcacttcacgacatcttcaaaattttttctttatatttttctttggggtctatgtggccattatgctgggtaaccttctcattttggtcactgtaatttctgatccctgcctgcactcctcccctatgtacttcctgctggggaacctagctttcctggacatgtggctggcctcatttgccactcccaagatgatcagggatttccttagtgatcaaaaactcatctcctttggaggatgtatggctcaaatcttcttcttgcactttactggtggggctgagatggtgctcctggtttccatggcctatgacagatatgtggccatatgcaaacccttgcattacatgactttgatgagttggcagacttgcatcaggctggtgctggcttcatgggtcgttggatttgtgcactccatcagtcaagtggctttcactgtaaatttgccttactgtggccccaatgaggtagacagcttcttctgtgacctccctctggtgatcaaacttgcctgcatggacacctatgtcttgggtataattatgatctcagacagtgggttgctttccttgagctgttttctgctcctcctgatctcctacaccgtgatcctcctcgctatcagacagcgtgctgccggtagcacatccaaagcactctccacttgctctgcacatatcatggtagtgacgctgttctttggcccttgcatttttgtttatgtgcggcctttcagtaggttctctgtggacaagctgctgtctgtgttttataccatttttactccactcctgaaccccattatctacacattgagaaatgaggagatgaaagcagctatgaagaaactgcaaaac

SEQ ID NO: 7705 - DNA, 1326 bp, mus musculus
atgtgctgtggctgctgctttgttgcttgggacctcctctgacctaggatcagacacagagtctgagttctggggcctggaacctcaatgtgcacttgaacaatgaagttggtgacaagcattactgtactcctatctttgggtaagtgttctgggcctaagaaagcatagttttgtggctaatgacaaaagagagttatctgctgtctccatgttttctaccatgatttaccaattgcgggaaaaaatttgtttctatgtgtttcttgagggtgtctgagcgtcagtgtgaggggttggtcatatccactactcagagaagattctccaggtctcacagctctcaagctgtaaggagttttaggttcattgagctcaagggtcatggaagatgggaaatttatttttggccttgtggctctgcatagctcaggaacaaataaataccagtaatatttatcttgtcctgtgcaacacacataaaaacactcaaatatggagtagggcagggaggacagttctggagcagtggtgaacctgaccttcagatgcaccaagagctgatgatccagagctaatctgctgtttttcaaccccataggtattatgggtgatgctaagaccacacagccaaattcaatggagagtaacgaagaagagcctgttcacttgccttgtaaccactccacaatcagtggaactgattacatacattggtatcgacagcttccctcccagggtccagagtacgtgattcatggtcttacaagcaatgtgaacaacagaatggcctctctggcaatcgctgaagacagaaagtccagtaccttgatcctgcaccgtgctaccttgagagatgctgctgtgtactactgcatcctgagagaccacagtgggacagatggggctgcagctgtgcaatatctccctggtgatgaaagggaaggcatctaacgaggccactgcacaagaaggagcagaagtttaatagaggaagaagaaaatttaaagaagaaaagggaaaagaagtaaagaggaggtggtaaggaaatcaatgagaggatgagaggattaaaggaatgaagaaactgagaaagaatagctaagaagtcctgaagaaaggactgagaagcttggcgaagagatgaagaatcacaattggaattctgcagtcaggaagaaaggaaataagaattttcccggacgctttcttttaatcaactcttgctttccatgtagacctcactataaaagatgagaaccatcatctggtagtcccaaagcatttcttcatctagccccaggcaagtgcctgggctttgaata

SEQ ID NO: 7706 - DNA, 1109 bp, mus musculus
tttattgctgaattgcatagggtattatacagtcataacatcaactgtggataaaggacaaattaatttgggaacaatataataacaattgcatcactatgttaaaatttttaaactagattattccaatagttgcaaaattgttgttttctttgaattttggctgatatatagagtgtaagttaggtaatatttgtcagtagttcagatatactgaagatgaacttaaatactgaatttcttatatatttcattttcatctgtcagaatgttttctatcagttatcctttgtcatctgaaaccttgttgtgatatttaagtaatcattaatcagcttttccaacttgttttaaccatgttgcacatgtagaaaattgctggaagataccatttggctattgactagcagagccatctattcactcctttagcttgcaaacacattgtttatacatgaacgaatagagtcctcctccttctccttttcagtatctttatctttgtccctacaccaatcccaagtgctcattcaaagaacaactaacaaaaagatctaggataaaatctaatgaacaaaccaaccttattctttttttggatgtgcttattattattattatactttaagttatagggtacatgtgcacaacgtgcaggtttgttacataggtatacatgtgccatgttgcaaaccaaccttgttcttattcaaatggtagcatgttaggttctataggaacttgagtgaaatatatgcgtaatcttttactgctgtaatgtatccaaaaaaataaaagtagttagataatagaactcttaacaaatgaactggaggcagcaatgcaagatgaagctactatgccagctgtgtgacataaatgaagtacaggttcaagctgctcagaaggtcactgcattatgacttggggactgcaaggccaggggcagcctctcagaggaataagggcttagtctagattgtgaaggaagagtgagatttgcatgagaattattttcatttaatttaggcaaaagattaagttatgatttatgcttgtagatgagtccgtctaaatacaatttccagtcctttaaatgttcatatgca

SEQ ID NO: 7707 - DNA, 1226 bp, mus musculus
tagacaatgttttcacacatatgtagctagagtatcataagagataagaaagagaatggcagagaggcaatatgtgaaaagataatagttaagaactttccaaaataggtacaagacatcaacccacagatccaagaatcacagtaaacatgccagcaggatacatggaaagaaaactgctgaaaacttcataatcaaactgctgcaaaccaaaaataaatagaaattctcaaaaacagagaaaaaagtcacattatcttcacaaagcagtaataaaacttacatttttcccccacacagtatgaaagccaaaaaatgacagaataacatctttatggtgatgaaaaggaattaaactaggtatccacaacagaaaaaaacattcaaaaatgtttagaaacatggtagatggttgatgatctagaaaagcagagggcatttaggacttgcctaccacttgaaattctggagaaggcttcctgttaggtatagaacatgaaaacatactgtggtagccgaagtgcagtagaaatgcagtagtgttgtcatcaggcagagagattgcctgggatagcactcattttttcctacagcttgtgtttaggagggtggacatccagaagttctggtgtttcttcagaatgaggggcatggagatttatgcagtggaccagagaaacctagggttaagctatagtaaggtacaaatagggttgccacagaaatctccacaataacacacacctgaggaaggaacaataaatcattgatgaacacaccacatcacaccacacataacgaaaagaacactgaagattagtgtgcacgtcaaaacctccctttggtatattacaccaatgaagccctctttttgttgcaacccatgacacctttctctttgtatacatcattctatttcctctcatgtacattttatcatggtggaccattttacatcttttaatctttttcttcaaatagctcataatgctccttcaatatttatgatacacagtctttcccttctatctcaatctatgttattcattttacatactggtttacataaatatttatctgtatgaatgtgttagctacaaaagactagatagtctaagttccattgcaaatagcctccacatgtcagttactttgaaaatcaagtctgtttctcagttatagaaaatctgtatcagatctaagttactcctagggcttgtgccccc

SEQ ID NO: 7708 - DNA, 1224 bp, mus musculus
tcttttccaaaatgatttgcatatacttggatcaggttcttgccttatagggttgttggaagttaaaaagctccactcctgtgagctaatatcaaatattggagatgggtatgtacttattattttttagtctgtagctaaagagtaggacattatgtaagtctcaatggtctgtcagtgaataattattgaacacttagtgtataacctaaatttcccaatttataaagaatgtcagagccatgacacaattgacttaaactctttttttttttttttgatacagatacatctgtgtctttaatcatttcggttggtcttctataggtgcttccaatgcaaatgtaggtagaacatttcttgcttggcttaccctctgagaccctggctttaattgtgtcccatcaattaatcttctactccaattcttgatgaaactgacaattcaaaatgctaagactttccccctctttcctctctgtactttggtggcagtagttgttccgcctctccaccatgccatgttatgctcctatcttttcttgataacattctaaccatccttataggcccatcttaaataatatcgcccccaagaaagctgttcctgtcccctcagctaaatgttctccatcccttgcttgaagctccaaaaatgtttcattacacacttacagctcacatgcatgggcctgtggtacagtcatggtaggtgtttgatcttttcaacattaattgtcaatgttatcttttacatatttgtctatatctacacagacagggaagtgaaaggtggcttatgatgtaattcttatgcctgttgatgcacattttctatgtgtttactgatacccacaaaacctaaacttttgcttttattaaaatgatcttacaatagttttatttttctcttctgacctttctcaagacagaaaatctgtttagttcatcttgatttatttatttatttatttattttttctggagcaggtagcacagagtcttatatagatctgagattctataaagatttaagtttaaataaattgaatataatttatgtagaaagcataaggtggaacagagaagacattagtgttttatttacacattatttaccaagcacccactatagtggttaaagatacagaaatacatggaatatagccttttctctccagaaacttactgtctcatagaagaaagcagactgataattatagg

SEQ ID NO: 7709 - DNA, 165 bp, mus musculus
ccacagagggtttctaagaactatattacaaccagctctcctaaatatcccgttctatggcttttcagatgtcaagcaagtgatttaatactaatatatttaagaaccactggcagaaaaatttactctttattgcatctcacatagagcagctgttcaggcaca

SEQ ID NO: 7710 - DNA, 1045 bp, mus musculus
aaataagcctcctctgaggatgagatttggagtctgggaaggttaaatgacatatttcaaagggccacttgcaagccttccttggagcaccaggtcccattcctgagttctggactccgagtctgcccagaaagtatccttaaagcccaatttttcccatctgtgcctgagagctggagcactcaggagaggttccagattgacatctggcgatttaaagttcccctagagttatatagaatgagaatctggcttatattttcttttccctacatagcagctcataatgactcgtctgtcgctggctgttaaagtggttggcaggcctggtgtatgcaagaagccggggtaacagagccaggatgtctcagttggttaagggcgagagtggagggcccaagcatagtctctgattccagcttttgctttgggcagtcacttaacatctctctgcccagtcctcccatctgtaaaatggaaagaggaatactgatgaacctctcaaagaagctgtgaggcagaacccatccatgattaacacagtcttttggatacagaaagggcagtggaaaagtttaaaatcacttcagtatgggatcatttgatataaatgtgtttaaaattactatttggaaatccttgtgcaacaaacctttaatttggcattggctgttagatgtagccagtcttttaggaactactgcagcaataactgccctgtggaaattgtgtaggaaaataatagaaatacatcaagcaagaatgtgcattagatactccattccccagcccctcagcaggcttctggaggtcatactctatgtgttcttcatgtgttcttcatgtttcacttgccccgtagtacctacttcagggccttgcaccaaggaaaccatcggctgagagtcattcttcatggcatggttcaaggccacgagaagctatactgaatggtcctgggactttaatttttagacagaatggctaatggccttgatttgccttgtgtcactttgatagattttctaagtgccaaattgttaag

SEQ ID NO: 7711 - DNA, 618 bp, mus musculus
aggaaagggggaaaacaggatggtgttaggggcacagacaacgttagttaaatctaaatctcaatagtctccttatgaaagcgaaacactaaaacaccaaaaatataaggaaacgcaaagtattttagctgtagaatgagcgttaaatatttgaaaagaatataaccatttacgtgtgggctaggcccctctgatgatggtaacagatgtccataaacagattagtctctagattgcctggagtctcgtagagtttctgagatactgtgtcttttcttcgagtgggcagtggcaaagcctcttctccagtttatattgaacagacacataaatgtgtctatcttttacatggctgaataagttgggagtcactgttggtaaatttcattgtaaaagatcatctgtgaacaaggcagctaaggctaaaggaagggatttggttacgtttacttgaccaaactaagaaaagataaaatacaaagtacagaaatggatgtttataaaatggacatgaactacattaaggtaattaacacctatgtataaatgggacaggttcttagtatttattcatgcaaacaacataaccttaataactttccatacactatttcttct

SEQ ID NO: 7712 - DNA, 1618 bp, mus musculus
atgtccattatttttcattgttttctgttaatactttatgtcttttctaatataaccatgcagtttcctggacttagcatctggaaataaatttcaaaattttgaagtgattttccaccgttttttaaagcaaaatattaaagttgacttttaagtagagtttaatttctttctgtgacagaagaccacttaaattatcctaagacaatggatgtgaacaggcacttttcaaaagaagacatacatgcagccaacaatcaaatgaaaaaaagctctacattactgatcattagagaaatgcaaatcaaaaccacagtgagtaccatccacaccagtcagaatggctactattaaaaagtcaaagagattgcaaagaaaaaggaatgcttatacactgttggtcagagtgtaaattaattaaccactgtggaagacattgtgatgattcttcaaagacctaaaaacagaaataccattcaacccagcaatcccattactgggtatctaccaaaatcaatataaatttttctattataaagacacctgcatatgtatgttcattgtagtactatttgcaatagcaaagacatacaatcaacctaaatgcccatcagtgataaactggataaagaaaatatggtacatataccatggaatactatgcagccataaaaaatgaatacgattatgtcttttgcaggaacatgggtggagctagaggccattattcttagcaaaataatgcaggaaaagaaaaccaaatgcaccatattctcacatataagtgggagctaaattatgattacacatggacacatagaggggaacaacactcactgaggcctattgaagggttgagggtaggaggaaggagaggatcaggaaaaataactaatgggtactaggcttaatacctgggtgacgaaataatctgcataacaaagccccatgacgcaagtttacctgtgtaacaagcctgcacatgtgcccctgaacataaaagtttaaaaaatgtcctgagaatatatcattaaaaatgttatttgaatatcacatcttcttgtataatgattatggatgaaaaagcaggcaagactttttaccactagctttggatgacttagaggagaaagtgagagttgaactgtcttgttgattccctaaagtgagataagttctttctatatgaagttcctgaacatcatgactgatgttagctttcctaatggactttgatgagattttcatgaaagtttttatgttcctaagtttcatatgatttcatatgaaagcatgattgtttaaatataaactaatttccatagatatatgataatagataagttattttccaaagcctattttgtttattcctttgctggaacaaacacccaggcaatgagtcaacacaaccaataagaatgttctctttttccttataatttttaatgaaaatatttataataaggaataatttggaaaaattcagctcataagctaatagaagttgacatatccatcacttgccttatatgaaaccagtttttcaaaagtctatgaagttttggcaaatatttgacaatcgggatgcatggttgatgatctcattccacattaa

SEQ ID NO: 7713 - DNA, 376 bp, mus musculus
tgttgtgaaaatgtattctgggtacatgaccacaaagtgagttgtaggatgcagtcatcagaagaccaaataactgctacttcctagaacatcccttcccttaccctccattccccacttaggaatgttgaccagattgtgggaaacccaaacaatccctttaagtagaaagtacatagattaagaaagtaaccctatgacttatgatcatcagtgactttttttttaaattttgtccctttctcttttcttttcatggtataaaagattagacaagtatgcattgcaagcacacagatttacctagacatcacccaatcccacctcatatgtaagttcccaactaaataaatctttgactacttaacaatctgaa

SEQ ID NO: 7714 - DNA, 514 bp, mus musculus
cagttgtactgccattgtataggtatatttttaaagctacataactgagcacaaactgttccctgttgctgaaccttgttttcatcctacgatattagggatggaaaagtaaagaactagacaaacgtaaatagtcagggactgttgactgcttcaattcacctgcagctaacccaccaagtgggacaccctgtttgttgagaaatgctgtgccaaggatatagcatttaatggctttggcaagaagaatgattttcatcagctgtaacaaacaagttcctcatctccaaccctaccatctgtcctcctggttcccacccagaacgctatctatggtctcaattgaacaggtttcagactgcctaaggtcactatacaatcaaccttaacagatggcatcacagcaaacatctaaactgtagcagtggccaaatgcagaggatgatcctcatcactgaggaagaatgccctctgtgcacactgccctgatgttctggttctgctcaacattgca

SEQ ID NO: 7715 - DNA, 332 bp, mus musculus
ttactattgattcatagaaagcattgaaatattcttggtagtgatcttttgtcatctctatacactgtctctatacactacaaatatcttcatctagtctgttcttatgatttttctctttttcacaatgcctcttaatgaacagaggtgtttaattttactataattcattttattaacaatgccttagactgttctagacttttgtgcttcaagaaattctttattatcgaagtaatatctttctttgttttcttcataaagccggaaagttttggattttttagatcttctattcaaaagagcatttttgacattattgtttataatta

SEQ ID NO: 7716 - DNA, 696 bp, mus musculus
tcctgcaacactttgtgaaataaagaattgaagaaattaattggattaattcagtcaaggtagttgccaatttttatttaaattgtttccaaaggttttctaccgggtgagagggtgggtgggtgaaaagacattatttgtcctcctaccctgagagtatatcagaacctcagctataatgttgagacgatagctttgtatgggtatggggagatggggcatgcatatattttgtaaaagatccccaggggattcagattcttctgtccttatcataatcctggttaggaccaatgtgggcttgacttttactttacagtagccgtttttctcagcttttcagttgccttatatcaacctagtaccgctactccccccacttcttcatttttggaagggcaagtgattgtgatgaaatgagacattttgtagtaaaaaggatacagttttaaatacctttaaaacatttcaaaaagcaatacaattagctaagcacttatgttttattagtaatagcaagcaaaattaataagtaaattcaactaaaaatgattatgtgtcaaagtgtatagtttttacattgacatttcacataatctgactttgcttagaagagaaatcactcggctgttaaaattacttttaaagagctgtcaaaattggaaaacctgctgtcaaaaatatgatgagaaaagt

SEQ ID NO: 7717 - DNA, 292 bp, mus musculus
caggactgaggtaattattagaagtagttttgttacttagcaaacatctaccgaaaaagtagctaataaattaaattacatcaaacttcttggttgctggtctaacataaataacaatttgtctatgcaagtggtcatttacaaaataacaataattaccaaaaagatgacttacaatgagaaatcattcttaaaactggaagcttaatgatatttttgaaaaatattgttaagaaaacaccagaagaaagtattcacctaattaatttgctgtgtctttgtctttgtgagg

SEQ ID NO: 7718 - DNA, 1390 bp, mus musculus
tttcttcagaaagaagaaaaatgacttgtgataatatactgcttctctagttatataatcacaatgttataggccctttctaattactagtaaagctactatgagatttcatgattaagtatttgtgttggtctttttttttaattttacgtgaaagggtagagactgagtaaggctttctagactgcagtagttacttctctttagatgttcacattattctacattagtgcttttgctgaatgttactaaccacagggaagatttttttgtcaaaagagaaagatttgcaatgagacccccccaatttttttttgtgaactcaatgtgaaaaatatatattaatttaagattgaacataatgttttgccatgtatgcagattttaaagcctaaaagaaaacagaattaggtatataagatttctgccaataaagctttaaaaaaaagtccctttgtgtcttgatggcaccttgttatatgaaaaccagggaaccttctccatacacttctctttttcacattgctgctaggttatcaatcttctcatggcatcactctgcttatatcaacccctgctcacaaactatcttggtttcccactgtctccagaagaaactccacactctgacttgatattcaaagccctccaaagtccttctctaagcctcccaccatcacttttctgagttaattatataccaggcttattaacacacccaacctagattccctctaaactgtattcttagccagacttataagtatcactatggcttggggctttcatagcatcactcatactgttctagctccctgtctatcttttcagtttttgctttgtctattttgcctttcacctgctgttaccttaggagagtaaatatttgctggtctgtttctgatagatacccctgcgctggtccacaatacaaagacatcctaatgtaatgccccttgcctgcatggaaagttttaagtcatttttagaaggctttgttatttggcaaagcaataaacttaccatgttttcaggtttcggcatgctcagtgacactggaatgtctttaatatttctcctgatttccacttattccttctagttctaaataaaaataaaagtgccaatgttttacaaatataactgacataaaaaagttttaagtgtgcattagttatacaaaaacaaacatctggatgtttgcaaacactcagatcttgaactaaatgttttttactattttcttcctgatgttcaaggtcataaaaatagatacctgaggtctgatggtattataaaactaaaactaaaactaattctatccatatcttacatttttatggatgtctgaagcatatccatgcatctaatttaaattacattttctcct

SEQ ID NO: 7719 - DNA, 173 bp, mus musculus
agttgtcaaaggggtgcaaattaaaattacagtgagatatcactatatatccaccaaaatggataaaattgaagagaatgacaacaccaaaccctggtgaggatatagagcaacatcagacgttgctggtacaagcattaaaaagtacaactgcttcagaaaattatttgatc

SEQ ID NO: 7720 - DNA, 1814 bp, mus musculus
agtcatagattgctaactataacacttatttaaatgaacctatcctctatggaaagccctgattccaaaggattagctgttgacttccacaaaatggcacaaattaggacaattttcctaggccctctctgtacaatttcatgctcttgtaatgatggccagcaactcagggcaccagctgatgaaaagaggtgtacctcctccaactggggttttttaaacacctgtggctgcaaagatttttaaaatcttaatacccagctagtgatgttatggagaaattagcattttcataacattttgatgagttttggtagaccaaaaaaataactagtttggagagccacgccaagaatatatatcaaggcctttttttttttttttttttttgagatggagtctcgctctgtcgcccaggccggagtgtagtggtgcgatctcgactcactgcaagctccacctcccgggttcatgccattctcctgcctcagcctcccgagtagctgggactacaggtgcccgccaccacgcctggctaattttttgtatttttagtggagacagggtttcaccgtgttagccaggatggtctcgatctcctgacctcgtgattcggccgcctcggcctcccaaagtgctgggattacaggcatgagccaccgtgcccggcctatatcaaggactttttaaatgttcagatgctttctactgaattttatccctaaaactctcccataaagatctcaatgatgccagacgcagtggctcatgcctgtaatcccagcattttggaaggctgaggcaagaggattgcttgaggccagaagttttagaccagcctggtcaacataatgagacctcgtctctacaaaaaaaaaaaaaatttaattagccaagcatgatggcacgcacctgtagtcccagctactcagtaggctgaggtgagaggattacttgagatcagaaatttgaggctacagtgagctatgatcacaccactgcactccagcctgggtaacagattgagaccctatctataaagagagaaaaataaaaaatgaaaggatctcaatggtgatgtttccaggtgctctctgagtccttgctgcatgtaacacttatttctttgtgccatttgttttctgagagcaagttcatcttccatttacccaaaagatctcaaagcagtgcctattatttatgcggttgtcatggctgcttttctgctggagtcagtttttctctcacttgaatggttatgcaagaatattagtcattatttgaataacttggtcatattttcttgcatttatagaataacatattctgctctgtatcatttgtagcagcaaacataaaaccaggtttgatttcagaacaaatccaattgagttgttcagctgatggcatttgggggaaaagaaaaaaactagacttggaaactgtccctctgtttttaaattgtttaaccctttatcaaaggaaatcttacacatatgtgaaaacaaatacttgtcttaaaaagcagggcatatgtgatgggagaagaagtcaagagcactagataccatgatggtcccacctcattccctcccctgctgcctggcctcctctgaacacaatatgaaaaacactgtcccattgtctgtaagttcttttttttttttttttttttgtgacagagtctcactctgttgcccaggctggagtgcagtggtgcaatcttggctcactgcaatgtccacctcccgggttcaaatgattctcctgcctcatgtctgcaagttcttgattgagagttgaaacattctggt

SEQ ID NO: 7721 - DNA, 115 bp, mus musculus
gagtcatgattgaatcccctcctagctccttacctagaggttggggggacaatcttctcaacaatgtttcaggaatgcattaactttgtaaattttaatgttctttattggtata

SEQ ID NO: 7722 - DNA, 115 bp, mus musculus; identical to SEQ ID NO: 7721

SEQ ID NO: 7723 - DNA, 115 bp, mus musculus; identical to SEQ ID NO: 7721

SEQ ID NO: 7724 - DNA, 274 bp, mus musculus
tgagaaacttcacttaccttgtaatcagcataccttcaataattttttttttttggtccatgtctggggttttactggaacccttcctttgctttccatactctatgtagcacatactacctagtggagtactcacacattgttggcactcagtaaatatttgttgaacaaataaatgaatgaatatttgcccctggtaccatggaggatataggaaaaaattggagctgttgttcagccctttcatgaactgggtattacctgaagaaagtga

SEQ ID NO: 7725 - DNA, 1264 bp, mus musculus
aggctaagaattattaactgtataatacaggacaaagagaacagtaatgtgaacaaagatatcgctgaataaaaataaatttgatattctaagtgttcttccttgttattatttttgtattttttccaattgtgtggtggttttcagttgaagtcctgcttcagacctttggcaaatagcatcttttatcattatctacagatactttttgtctcagttgtacacaaaaagcttaatgactatgctccattggctaatacacaaaagggaaatcaggtagaagagtttgaagatgaaatctctggaaagcctgcattttaagcagactttctctcataacagtcttgtgcaatgccttgaaatagaagctcttgttttgtgtaattttccaaggcaatcaatagttctttcttctcataagtggtaaaatttgatattaggaagtacagatatacttctcatcataaaagggagtgtgttggggatgttgcactaatgatacaatcagcaacagcagtatcaaataatgtttattaagctttatttggcaggcattgtggactgcctaaccaatagccattttcctcctttgtcctaacagcatcacctgttttgtccacatactactttctttcatggtgtgtggtccaggtgaagtggaccctattccccagcccagccagtgaatcacagttagtccatgaggcaaccataagggctccctttgcacagctaattgatgcacttctggccagtgagatatgaagagagtctatggggctttgggaaaggttttctttctcaaaaagagataaacaaggctgggtgcggtggctcacacctgttatcccagcactttgggaggccaaggcgggcagatcatgaggtcaagagatcgagaccatcctggccaacatggtgaaaccccgtctctactaaaaatacaaaaattagctgggcgtggtggtgcacacctgtagtcctagctacttgggaggctgaggcaggagaatcacttaaatccaggcagcagaggttgcagtgagccgagatggtgccgctgcacttcagcctggcaacagagcaagactctgtctcaaaaaaaaaaaaaaaaaaagataaacaagaagaaaaggttccctttcaagctctggatgctttcacaagggtaacaagctgaggtgctatagccattttgtcactataaatggagctaggtcaaggataatgcttaatatgccaaggatggcagaggggaaaaatg

SEQ ID NO: 7726 - DNA, 426 bp, mus musculus
ttaagattatccatctagaaatatataaacatagttgtgatttatacactattagtgaagtcaaatactgcctgcttagcaaattatgccagagaacaaccaaaaaaactagctatataagttttcaaaaaataatttttattgtggtaaagatacataacataaaattagccatttaacctttttatgtatacagtggcaataactacattcacagtgttgtgcagccatcaccactattttcaaaagttttcatgactcccaaacaaactctgtacccattaaacaatagcccctccctgcttatccctcctttccctaccctctggtaacttctaatctactttttctctctatgaatgtgcctgttctagttatttcacataagtgggctcataaaatatttgtccttttgtatttggcatg

SEQ ID NO: 7727 - DNA, 327 bp, mus musculus
gggagcgagaaggagacggatgttgagagaacgaggaggaaggagagaaaatggcgtcaacggattacagtatctatagccaagctgcagtgcagcagggctacagtgcttacgctgcccagcctgctcaaggatatgcacagaccacccaggcatatgggcaacaaagctatggaacctatggacagcccactgatgtcagctatacccaggctcagaccactgcaacctatgggctatgcaacttcttatggacagcctcccactggttatgctactccaactgccccccaggcatacagccagcctgtccaggggtgtggcact

SEQ ID NO: 7728 - DNA, 1358 bp, mus musculus
tgattgatgcaaatagattgtttccttttctcaaaaggaattccttcctcacatgtcacagcactaacttttactcttcaattgaagtcaatagaatttgcacatggaaaggggatgtgtatattcaatgagtgactttacctaaccacaaattcagtgacatttttcaagaataaggacttcataattaggcctctagttaataacaacatagagataaaagcaagggaaaggggaaagaaaagtactattttcataaataaaccatttgtctttcttaggaggaagagatagattaataaattattattgttagcaagatcccaagtaaaattttaaagatctccgtttctgtctgttaactgtcaaatatttttagcagaaaacagttgtctctttacatggtgttctacctcccaccctacctgcacccaagcctgtttggatcgagaaatagtgatactctgtgacattttaaatatcatgtcacctgacctgagatctagaagaagaaacagtatgcaagctttaataaagctatttgcaggccaactcccaaatttctagtatttaccgctcctttgcagttcctcttacatttgtaacagttgacctactaacaggttcccagaaacacagattcaaattttggcaggcttacctcacctctttgtccttccaaagtacataaatgctaaactgggttcacagtgagaatgagagtcattctaacaagacttttaaaaccaagaccctttctgctccctaccaagttactgccatcttctccgaagaaataaagttttgtcagtgtgcccttggcataatttcttcagcctggattaaacacaggtgactgagagtccgccttatctccacagggcattagtcactctataaaagttaaatttattatgaaatgctttgtttgtgttaacatatatcttctctgggaagctggaaacaaaggcatgtcctttaagactccatatggggaaaacacatcctcctttggaatttaaccttaatttgaaccaagatctgtgaaagaaaagtactttagtgtattgttcccttgctccacccttctatccccttatctaaatggagttactgttgcttcgtgtttttttaacccttccaattccagtccttgctttcctgagtttaaaatttatcctgggaaagaaatatattaaaataattgtggcaaacaattatactttgcttttaagaatgaattttttttgtaatatattaattctgatatcctttaagttaagtaaatgcacagccagtttatacatcttcattgttcattttgttgttttaagatacattgtaaagaatattttatt

SEQ ID NO: 7729 - DNA, 491 bp, mus musculus
ttatgtcattgatatttttggaggcaccgggccaatgtcctcataaagtatcttacatgagcattttctcatggtgctgactaacctgttgctccatttcctgcattctcaagatactataatttttattcccaggcaagtggaaatagatctgacagagtcagcttgcctatcttggttttgcgttacctctttgtttaggtttttgagagtctttcattcttcagcccaggtacccatgatgtttttgaatatgtaaaccagcatttctggttggtagcaaggatatgaggcagagggctggattgtcacttcattctgacccaaaatttttttcataaaatgtcttcttaatctctgttctcaattaaaatttgtattttctttaaggatataattcttcctggaacttgaatgggaacctcgttgtgaataaaaagagttagaggtcagtattctctttcttctccactgcacatctctttcatcat

SEQ ID NO: 7730 - DNA, 556 bp, mus musculus
ctaaatctggcccactgcctgtttttttaacagctggaaaaaaaatagactattttgtggcatataaaagttttgttactttttcagtgttcaaatttcagtctacaaaaataaagttttattggtacatactacacccattcatttatgtattttatgtggctattttcatactccagaggcagagtagaatagttgtaacaaagactatatggcctgcaaagcttaaaatattatcttatctttacaaaaaaagtttgctgaccgctccctggtgactatgatgacatcatgacatgttctgtgggtttcattgaatattgtgcattcctcataggaacagagaattattctgggtttggctatgttctctccaactccccaatctttgcaattgctgtgatcatagtcattttgcatcctgggggctgtcaatgtcctgtgctctgtggcagcagcagcagtgccttcggctctgggtctagttgaatagcctcttaatttttctgagtggtcccagaggtatactgctatcccagagtttctagaaactacc

SEQ ID NO: 7731 - DNA, 222 bp, mus musculus
ttctcaatagtctatttttccctgaaagccagatgacatattttgaaatttgatgttattataatttgaactaggaaatgagtagaaaatgatcttccactatctagggaaaaacctcctattattagagggataactcatgtaaaatatggtgagggtttttctcctttatcaattaagaaaggatgatttttacaagatcccatcaacaataaagtacta

SEQ ID NO: 7732 - DNA, 280 bp, mus musculus
aatttattttctaatatgagatttctttgaaaatagaatgtctatttgtctactttacaaagtcatgaaaagaaattaatattatcaaggcattttatagtttaaaaagaaattaagttctcaatatcgtaatcatctaagatgagaatatggacttatcttcctaaagtttaaatataatgtcaattgcaaactaataattatctttaatctaaaagtgaagggcaacacactaatattttcctctttaaaatattttaccccattcctaacaatttgt

SEQ ID NO: 7733 - DNA, 816 bp, mus musculus
ctataaggttgtcagtttttcttaggggaatttttttctaccaagataaattacaattttgtctcttttgaggttgcaaaatgaaggttgcaaaggcagcaaatagctggtgcctagaaaagcaataaacttgctctgccttagttataactatataaaaaatgctcaaaacttttgcagtgcttatcataagaaaaatgtgtgtaatttgggactaagtaaggctgtgtagactgatggctatctgaggctctgacttctacaaattagtagctgtgtaatcttggacaagctattaagcctctctgtgcctgttttcttctcaggtaaatgaggctaataataaaacctacttcatagtgtttgggtgaggattaaattacattagtcatgcaaagcttttaggccactacctgaaaaatcataagtgttcaattagtactagttagtattagtcttcatattatttgattcaactacgtaacaatttatggtagaaaattcattaatcattgttggctaagttggctagagcactaattttcaaatctgttgagaatttggagcagtgattatcagttgccaatctagagatacatattagtgtccgctccctctatcttccctagaaataggacccaattttatttggggtaggaaggcatccaagaatgaggcaatgtatcttgggtgaagtatcttatataaactctgggttaggagatgtttgcataagtattttctgggatgctgagaaggctgcttcaagggcaatccctcaacttgagagtgcttcatttttttcttcatctaatt

SEQ ID NO: 7734 - DNA, 521 bp, mus musculus
aagtttatggaattgtttttctatatttgaaagagtaagaagccatactaacctttttaaaaaaaactttttttttgagacagagtctcactctgtcgaccaggctggagtgcagtggtgtgattttggctcactgcaagctctgcctcctgggttcatgccattctcctgcctcagcctcccaagtagctgggactacaggtgcccgccaccacgcctggctaattttttgtattttttagtagagacggggtttcaccatgttagccaggatggtcttgatctcctgacctcgtgatccgcccacctcggcctcccaaagtgctgggattacaggtgagagccactgcacccagccaatactagccctttaacaatttttttttaattctagaattttactctaataaaaatggctctccagaaattgtgctatcacctaaagagtaaaatttatgtctttattctgtctatagaaaagaaaattaacatctaatgatttgcttagaataataaccaca

SEQ ID NO: 7735 - DNA, 923 bp, mus musculus
cctcaggactctatggttcccgcgagggacgaggggcaacgtatataaatgcgcgcaggcgtagttaagagagcgcattttgacttcgaggcaccgccgacgttactgtgtcgccatggggcgccgtccagctcgctgttaccggtattgtaagaacaagccgtacccaaaatctcgtttctgccgaggggttcctgatgccaagatccgcatctttgacctgggtagaaagaaggcaaaagtggatgagttcccactcggtggccacatggtgtctgatgaatatgagcagctgtcttctgaagccctggaggccgcccgtatttgtgccaacaaatacatggtgaaaagttgtggcagagatggctttcacatgcgagtgcggctccatcccttccatgtcatccgcatcaacaagatgttgtcctgtgctggggctgacaggctccagacaggtatgcgaggtgcctttggaaaaccccagggtactgtagcccgggtccacattggtcaagtcatcatgtccatccgcaccaagcttcagaacgaggagcatgtgattgaagccttgcgcagggccaagttcaagttccctggacgccagaagattcatatctccaagaagtggggcttcacgaagtttaatgctgacgaatttgaagacatggtggccaagaagtgcctcatccctgatggttgtggagtcaagtacgttcccagtcatggccccttggacaagtggcgggttctgcactcatgaaggttttggcagtactgtctccttgggccatgctggtctgacttatgcttactaataaattctgtttactggcaaaaaataactccttattaagttttaatattttttaaatatccaatgttttagaatatagactactagagaatttttttctatttattca

SEQ ID NO: 7736 - DNA, 1021 bp, mus musculus
atcatataaatttttaaatgtctaattatttaatagatatgttctgtattagaagtggttatgtttttttctataaacatatttaatgctgaacttatgacacagtctttcaaaattcaatttcatttccaccagtaatgaggtttcttttgggccaaaatgtaagttgtcttccttcattcattaattcattatagtaaggtttgtttactgaaggtcttcttcctgataggtactgtcccaagatctgaaggaacactaatgaatgaaatatagtttttgccttcatggagttaacatgtgtaggtcggttggtagacacaacacaaaccaataaaaataagaaaactgtggattacaatatctgccataataaagttgagacagggcaacagaatagagaacaacaacttgtagaggtaaggctgtttttgccaagatacttaatgaggcctgtaccaaagaaaaaacatttgagctgagatccacactatgggagcaaagcactcccattctgggctgagtaaatgacaactgcaaagtctctcaggcaggcatatgttggagcagggcagaaagaatcactattgatgggaggttaactgtgatgagatcagagagacaggagccagctcctgtaaggatttattgacaaccacaagcagtttggattttattgtaatcacaatggaaaatcactggaaggcttcccatttatccttatatcacctaggtgatatcagtcttccatttcaggaagaaaagggaggggaggaataactaaaaacagcaacatgactattcaaggatgttctgattacctcagattttttttaagacattgagttaaacaatcacaataaataaaattaggcagaactctcaagctaatatccaaaggctaaaggccaagataagttaaggtttgtagaattgcttaaaagggcttttcatgtcttatttagaaaatgttaaacaaggagaactctctttagttctcactgtatatttctgtcttagt

SEQ ID NO: 7737 - DNA, 1328 bp, mus musculus
tagtccttgcctttcaaggcaaattatcaggcagtggggtatcatctgccttctgctgttcacgattggagcagctgggtagtggctttgagcagtgcaggtaaatatgtatgctatctcccaggaggtcatgctgtggtttctcacagaatccatgatacttggcattcagcttgatttttttccccttctataataaaataccatatcaagtccacttctgtcaaatgtcctcattggtttcacatctttaagtctacctgtagattactaaggcagtttcaaaattaatcacgggattctcatatgaaactcacagtcattgttttgtcactttttattataaaatagtgcagtgtctcttatcatttaaaagttaatggtaactccgtgcagttttaacaatatatctcacttggcttccagaacacttgttcaggttactaaattccttggcttgttgctgacagagtttacagaaaaaggaataagtttttagttgagctgatctattttaggacaaaagggagtggatcttacatacactaatgtttacttaaaattatatctctagccaggtgtgtggtggcatgtgcctgtaatcccagctacttgggcagctgaggcgggaggactgcttgagtacaggagttcaaggctgcagtgagctatgatcacatcattgtactccagcctgggagacagagagaccctgcctcaaaaaaaaaaatcatatatatatatatatatacgtatatatatatatatatgtatatatatatatatatatgtatgtgtatatatatatatatatatatatatatatgatagtctcatctcaatctaaattctaattattcactaaaagtacaaagtacatcactcttttgggataaaacccattcctatgccaacgccagagtgagtgtgactggagctggattgtcaattctataattaaaacgtcaattttttgttctttaaaaatgtggttctatttctattcttctattattctctttgattctcagaaagcaagaagaaaaataaacttaaagtttgtacccttgatgaagaattgacccaaacacttctttctgttgttgaagatgaaatgtgccttttgtattttagttattgaaatgtcagccttggaagtattccattttttagaaattaaaggtctcagaagttgctcaattaggatccttttatttgtgactgatttattaatcaattacaaatgtgatttaaaagacatacttttgagatttattaatttgttatttatcaatataattcatatttacttttcattttgagatgtt

SEQ ID NO: 7738 - DNA, 613 bp, mus musculus
atgaattgaaggatgcttagtaacacccctggcctctactcactatatagcaatgcacccctttccagttgtgacaaccaaaaatgtctccagacattgccagatgtcccacagggggacaaaacggccaccaccacctgccgttaagaaccactgccctggtaggagatttaggcctccattcaggcctctagatggttagagctctgcgaggagctccagactgagctcctcactgctttggtcacctctgtctactcagcacttagcacagtgcccggcacatcatggagcctaaataatacttgtcgaatgttagatgaataaatacacatatcacaatgcagaataggccaatagcgaggtataaatagaacactagaagagtccagaaaaggaatacactgatactggagggataggggcccaggaagaagaattcctggaggagagattgtggaaaaatgaggttgaggaaggcatcttaagcagaaatgctctgagagtggatgaggatgagctgggagatcagtcgacctggagtgtagggtgggcagaagatcggttgaagatagggcaaaaagaacttgaactcagttcatggaaggtctgg

SEQ ID NO: 7739 - DNA, 376 bp, mus musculus
tgaatatgacctataaagcatgaagaaaagtgaaattagagaatttattgaatcttaatgcctacagcttttttctgttgagtggtaggggatttagtgatacgagatcacagtttcctttctttgagtctaaacatgcttcttatttttatagaaaataatatctaagtcatgataatacaataattctgtttattgccataaattttagaaccatcctgtggataaagtagagaagtcctaattataacttttgaaaaatatgtaaattgtataaatcttggcagtaaaagtaatgtgaaaaatcagtaactggaaaggatataaatgatagtgaaaatgcactgaagtttttaaattttatataacaggaact

SEQ ID NO: 7740 - DNA, 9340 bp, mus musculus
aagttcatttcttcacacaagatcacaaaccaagtaatccgctggagaaagaacgaattcagaatgcaggtggctctgtaatgattcagcgtgtgaatggctctctggctgtatcgagggcccttggggattttgattacaaatgtgtccatggaaaaggtcctactgagcagcttgtctcaccagagcctgaagtccatgatattgaaagatctgaagaagatgatcagttcattatccttgcatgtgatggtatctgggatgttatgggaaatgaagagctctgtgattttgtaagatccagacttgaagtcactgatgaccttgagaaagtttgcaatgaagtagtcgacacctgtttgtataaggtagctagactttttttaaaaacataaaatgattttatgccatattaatcactactctagtatttaatcatcttagaatctgtaattctgaaaccagtttttggcacaactgtaggatactgttcaccaattatgaaaatatatcataggaccactatgtagaaataaattacccaattaccatctctgcaagagttataagctgaatgtttagtcttactacttgagctttgtaataatgtggaagattatcaaaggtaaaaagattttatcagagtgcatgttttgaaagaaagagggtggggagggttaggcctcagtgtctataaatgaaaagcattttagagttttaatatttgaccatgtgatatctcagtacatttatgatatcctaatcctttgaaactaaggtttaatggtctgtagcacttgaaagaggaatgtagtgatcattagacgtgatgtaatagaaatagccttgtacatggagtcagaagaacttgctctgagactgtgtatggttttaggtaagctatttaaactctaatcagtttttttcatcataaaaaggataagacattattatcttgtctcatggcgttgtcaggaggatcaaatgggataatatacacaggtgagctagctcagcccctttattttacagatgaggaagctgaagccagagaaggttctacaaacttaagagtcagacagacctgagaccaaggcttacctctattagttttgtactctacattcctgaacgaattgttcaacctctctcagctttaaaatggagataatagtatcttataagactgttgccgggcgcggtggctcacgcctgtaatcccagcactttgggaggccgaggtgggcggatcacgaggtcaggagatcgagaccatcctggctaacacagtgaaaccccgtctctactaaaaaacacaaaaaattagccgggtgtggtggcgggcgcctgtagtcccagctacgcgggaggctgaggcaggagaatggcgtgaacccgggaggcggagcttgcagtgagccgagatcgcgccactgcactccagcctgggcgacagagcgagactccgtctcaaaaaaaaaaaaaaagactgttgaggaattaatgagcgtatgtatatatatatatatgtgtgtgtgtatatatatatatacatatatatatatataatgcctagtttagcatataatacatgctacaccctttcctacagatattataaatgacgtgtacagggttttatacattgctaacagcattaagactagaaaatcaaggcccttgacttgggttcagtgttctttctgccacactctgttctgttttgtcaataatgcttattaacttattctttgatgtttttttaaacaaatgttgactttttaaaattcttctgagggtatatatttgatactcaaatatttaattatagcatttgaatacttagatgtctttaaaaatgaatgtagttcctaaaagttgtcagtttttaaaattaatacaagttaaaagctggtttataaaccttaggtagttttacctcttatttcatatttctacttatgaagcgaatgtattagccccacaatttataatttattttaaaggtaattttatcaggtacatataactacaggtcaaatcctattgtaaacaatgccactaaaattttctgtcatgttgtatggaaggagtgtgtgtacacatgtatatttgtattaggtatcacttcaaattaagtcaccagtaaatgtttagaaatagtattgttttatagaattataaaaaattattattacagtgagattaacctgtaatgtttctctcctgtcttttggagtattggttatactgtattctctctatactgttcgggggagggggagtcattgcacacacacacgcacgcatgcgtgcacatatgtatttttttctccctgaaagtaacattttcactagaacaagtataactgtaattggcacagctgtaaaggttctcaaggctttgaagagcaaaaagaaaactaaaatattctcaaatttttttcttcccagggaagtcgagacaacatgagtgtgattttgatctgttttccaaatgcacccaaagtatcgccagaagcagtgaagaaggaggcagagttggacaagtacctggaatgcagagtagaaggtggatcatttaacaaaaaataagtagctttattaaagaaaaatcttcaacacaatcaaactttaacattttagcttttagatttttatgtgtctttgacagctagtgtctagtgtatgaaagtggaaaaggacatttctgtagtagctgttaagatgtatgcagttgtcctatcacagttatattagaaataacaactagtgtggaaagtaacccacattctgttcaggatacttttgttttaaaaggctaaaatgtttgtgtgctttaaaattcttaatgaattcactggcatgagtaattttatgccgggaaaatctgatttgtggtctatttaattacaaagagattgtgatggtgataatttgaataccatctttctatgaaaagctgtgtatattaattttaatctctagggccttttttcaataacttgaaaatcacagcctcatcattagcaactttatatacacagctttaaaaaatttgctttaaactgtttcagagcttcttccctaagccataaactgtctcacctaaacaagatagacctcaataaaagacataatatttctccacctggcagaaaagtaactgccaagtaagattaagaaataagttgagcatttctggagtatatttctcataattctgcagagacttccagtttattgcatatatgcagtaaagtgtatatattatgcagtttctctaagtggaaaaacttgacatgactttaatagtgttaaaacatgaaaatgctggtgagctgaggtagaaaaaaaacaagaaaaaaattttaaaaatagcgttaaaatgcattttaggctcctaatgtcgttaatttgcacgttaaagacctctaatcgcatgcaagcattgacctaccacacctacatcccactgtgcctgcattattgaaattactactcactttaattttttttcccctttttactgtttgataccaatcataatcagtctgatactagaatcatgattggttttgttctttagtactgtctagagctactattttgtttttattgctgtccgccacttgatagtcatacatctagtatgtgtttgtactatttagtattgcattcattggacgtactattcaacgaatttgtctccttactgttaccaagggtcttggaatttttatattttaaattaatcattcaatataagttatttataggtatagtacaattttaaaatatttagaatgctacaatcattggttcaaactattgattcatgggaaaatttaaattcataagaataatatgtatagggataagttgatatttaatgtattggcactttaacttgggcagacatgttttcttattggtttaaagaagtaataagtattttaatatttttactatgaaatgggatccaattttagaaatgaattgctacttttctctttagtgtgtacactttaagttttagatggaattatgaaatattcactttacgttattttgttacaataataagttttatatttcttattatcaagcaagagttgccacctggacagagtttacattgatactcaatatttttgatatgttaaagtgttattatacttgtaccattcaattggagattgtcataaattaaatatggtattttttactcagatttgatgagactgcaactagagaataaatattacattaaaattgctgctattttaaaacatagaatgtaactgtttgtattgtaaaagttgtgtgtcctcagtgaaaaatactgccttcagcttccaaagcaggcacctgaatgcctttttcttttctctctctcttctttctttaaatacatgccttcactagattgctgtgacctactaaacctcattttatttgcttggaacatttttggcttctctgtccacaccatagaaaaggacaaaggccttccagctctccttttctcttatttgttcccttctaaatacttgactctctgggggtgtgaaaagattcagctcataatttatactactattaattttgtggtccttctaagccaatttaaaattatacttttgtgtatatattttcaaaatctttgctactgactaccttagctttaaagttgctaatttggagatgactgatagaatccctgaaacttggtggaggggagtggaaaggagcagaatgtgtttgtgtatatgtatgtgaaacatggatcttctatatataaatattctttagaaaaagcgttcagtctttttacaattctaagtaaaacgtataggtcaacagaaattaaaggaatatttcttaaaattcatttatttttcttttttgaaagcagacagaagcaaggctagtatagtatgaatggtcaggtagtttaaatgcgttgtcccacgtggaacaggagatattaactgtttttaaagctttacattatttttttacaagaatttgttttcctgtaattttcttcacagttaaaatatcctaatttatattttaacaaaagagatgtaagatacatcaaatatagatgattcaaggtaatgttttttagacctgaaactattgattcaatttatcatcagtgtttatttctattgtatctagttatctatccaaataattgtattggcttagcggagactgtatgttaagtgtattagttttagattgtgaaattgtgcagtttaggtaaacatcaaatccctttatttttgtacagcagatttccagcattagaaccatgtagaacaaatatactagatgttaaagattacacaataaaggaacttggcaaaccaaatctgagatccttgctttttgttcagatttaagactgtttttttttttaaggcaaaaaataatagatggtaaaaatttggcctttattctaaaaggacagtttgaaccatttaaagaaatattatgggtagccatgtctttaaaaattttgaggcctgatcaaaggacgaatctttatacacattgttattttcaaaggtatttacaaattgagaagcagaatgatgatttcttgccccactaatgacaaataaaataccatttcttaccataaacattgaaaaacaaactgaacaaaacttgaccatataacttacaaatacttttgacttgaatttgcatgtggagtatgtgtgctaaaactgcaagtgaagactttttatacttagaggaatagttgtagagttctttgtaaggttctttgttcataattttttatattttgtgatgtgaataatagtatgcatctgcatgacaacactgcagatcatattgctgtgcccttttaataactggatattttaaaattattttaaatgcagttgtatggtttatcaaatggttctctttttaaacattttataaggaaatttagaccttttctattcaaggctttgttgaagtaatcagtgaaggaaatggtattatatatctatacagtatattgtttaaaggtactttagagaagaattaaactgagacagtgatgttcaagtacataatctgtgcatgctatttaagtatcattttgcaaatataaatatatacataaaaataattgagttagtatataatctataaattcccctataattaagggttgttattttcaaatcttgaaattgtttattttttaaaattccacgcagtgtattatatagggcaaagttcaggaaacatgtttccagtctaaagagaggagtgatgtaagaagaaactagttgacatcttaagaaagggtattctcacttgtgcacacatatccttgattatataatatgctgatttaacatgaaatattttttcacattttaattttgatttgaagttaatcttatatgtcattttgtgcattttttgtcataaatcttcaaaggtcaacctgattttttttttttttaaatgataccagattagaaaaatctcagatgtggtaaatgccatctttaaaaagctaggttatctttgtttcggttttcttttcaattaaatttggataacacttacaaaaaaagtacttctgattcccagaaatcataaagaagcagggggaaggcgtccccgacttagtccatgtgatgcgcacattagcgagtgagaacatccccagcctcccaccagggggtgaattggcaagcaagtaagttacattctgtacactcttatgctttatgtcagtgtatgaaaatgttaggtattcattgataaaatgtttgtttgcctaatttctgaactgatgcagttatctgtgttttaacctgtgatttcaatttttttttagtattagaatatctagagtttgtttagacataggtatcagtatcattgtaactaattgcagtgagggttgtctttattggaagcttggttggcattgatttcctcatagagcataaacgagataatatactgaaagaactttttaaactaaattacatagcactacataaaaatttacaaaattctaagtgtcgttgttagtagtagtataatttgatttggtcaatccctgagtaacttaacaccctgaaaattccccttcctcatatggaccatgtttctatgcctgattttcccagtatttttggttgttgattgctggttagttggttttaggtgtcagggaagaagatagaatatatttcttgtcttttccctttccactttagttcatagaattggactactttgtgttaaatattaagcttacacctttacataataaagtggaaaattcaagcaattccaagggttaaaacatttttacctcaaatatccatataattgacttacaaacataaaacttgcaaatacctttagcttgaatttggatatagagtaaatgtgctaaaactacaagtgaagacttcttgtacttacagtgaagatatattattgactaattttctcgattctctactgtgttttgcaagtgtgaccatgttctttgtaatcactaaatagtgattgtaaaagctcctgtttgaagcttttattttttggaaactttttttttccatatgactttctatgaaacgatctataaaattgcttcaagtcaattttggaagtagggagactataacttataaatatactacagatttttaataaagtgttactcaaaactaattcctagacttgtcatggaaatgtcttatttgacatttcagttttaatagaacttttgaaaagggcattaagaaaagtagaagcttaaatataaagtataatctgagacttcaaaactacgatgcaactcaactagcttatgttagtattatatcttaagaatggcattgccattgatgactcataaccatttaaaccaattcaaatggaagtagactatatagactttttttttaatctgtaatttttagccttctattaactgggttggtagagtgttataacacattttagagtagactcacctctgctttaacataggagcccaaatatcttaaaagtgaggctcactattgacagcaagaaatagaactaaaataatatctgagtataagattatcttagaaattttaataaacacctggctatgagttactaagcaatgttttgctttctgaagaattaattttctgcatttttttacacttaggaggaatgttattgaagccgtttacaatagactgaatccttacaaaaatgacgacactgtaagtagcattttagctccctctgctttcccttcccctccactctaaatgcatatccttcctacctgtttttgcagagctgttcactgtacccattctcttacacacacccctgattgattgctctgaactctgcttgctctgatctctgcctgcaccacagttctagtgattgaggacataatcatggtgagtggccacctctctcaaaaaagaagaaagtccttttgaattattctagattttttaagtctttacaaacaatcaacttcagaaggtttgcctccactacatggttttttttttttttttttcccgaagttgggactatctctactcagaatattgtcttattctgagttttgtaagcagctgcagcagaacttcggaatgtctgtctcaactaaatagttcttatggttggaaatacctttgtcaggaatcctgaagtatatacttcacttaaatattagagaattgtttgcataaatagacattagaatgccatactctccagttaagtgttctgttgcaattctgttgtatgatgtttatagaaaagtgataacttaaagatcatgtgggcacagctctgaaatattttatgtattgcattatgaagcttcctcacatattgagttcttaatcttttctgatgcattaaaggtttataaaagtggtattctaaaactgtattggatttcattaaaaaattctttttagtagatttattgattgagtaatacatttggacagcctcatcataaaaccgcatttcaaatattttccaaaacaaaacaaaggattaacaattctttgaacagattaaacattgctatttcatatgtacacatatatacttatatactttaaaaaacatttatattctaaaagtcatctttacagaacattatctttctccattatccagaaagtatggtgtattttggcaccgctaaattttaacgttgttccttattttgcttccttttacaaaggactctacatcaacagatgatatgtggtaaaactgctcatctagccatggagtttac

SEQ ID NO: 7741 - DNA, 9340 bp, mus musculus; identical to SEQ ID NO: 7740

SEQ ID NO: 7742 - DNA, 9340 bp, mus musculus; identical to SEQ ID NO: 7740

SEQ ID NO: 7743 - DNA, 377 bp, mus musculus
agctgaatatattgctgataatgtacggacctgttacagaggaagaaacagaagacagaataggcaactagaaagctttacaacataagtctcactattcatagttatgtatttgtgtgataacaatgtttgttttccacttcacagtacagctcatggagggggcctctatcctggcatctaactcataggagagaataaatatttgttgaatgaatgaatgaatttgcctatctattacataatattttcctcagtatcaactctcacttgttcttgtaatttgagtcatataaagccacttgttggatggttctgaaaactggacaacatggattgtgtgagatttagccaatacagatataactacatcttcc

SEQ ID NO: 7744 - DNA, 966 bp, mus musculus
aagagttatctacccagcaatctgtttccctgtctgggggagggggttgcatgcaggctgggggacaagacgggcagctggaggtgccaagatcaatggcctcaaggggtgctcccaactgggtgctttttcccatacaacctagcgctatgcaggtgctgaaggtgacacctctgctcttgagatctggctctgagtaggcctgaggtgcacgcccctctgctctctcctcccctctcccttccctccccagagagaaaacactcacttgccaggtttatccagaagcccccccgcagggcactggcagcacatcaggatgtactcctgcagggcctgctgatggaacatccagtggctcatgctaagggcagggtcacctgttgaagggcaaagggtcagtaagggcccggcagatccagccaagtatcaatgacctaattccactttctcacctgggggaatagtcaaggtttcctgctccccttcctcttccattcattcttggtacaactgctatcttccccatgtcctacgcacagcatgtcccttctcctgaactttgacatgtgtcaaagagcagcaattcaaagtggcactttcactttcttgaaatgcaccctgttaacgtggatggtgatcctcaaccacatctctggcaggcagtgaaccagcctagctgtttagcttaccttcccagactgacctcggtagctgctcccaacttggtccataactctaccctggacttcaagagacattccctctagcatatctctataacttgttaaccagactgattagctcagagaactcttaatgggtaataaagtctgtttcttctacttttctaagcctaaatttaattgatctccaaagggaattctctaacttgtctctcagctcaaagaatttacctaagaaacattactagtaactgccctcctgcatcatatgataccctag

SEQ ID NO: 7745 - DNA, 966 bp, mus musculus
ctagggtatcatatgatgcaggagggcagttactagtaatgtttcttaggtaaattctttgagctgagagacaagttagagaattccctttggagatcaattaaatttaggcttagaaaagtagaagaaacagactttattacccattaagagttctctgagctaatcagtctggttaacaagttatagagatatgctagagggaatgtctcttgaagtccagggtagagttatggaccaagttgggagcagctaccgaggtcagtctgggaaggtaagctaaacagctaggctggttcactgcctgccagagatgtggttgaggatcaccatccacgttaacagggtgcatttcaagaaagtgaaagtgccactttgaattgctgctctttgacacatgtcaaagttcaggagaagggacatgctgtgcgtaggacatggggaagatagcagttgtaccaagaatgaatggaagaggaaggggagcaggaaaccttgactattcccccaggtgagaaagtggaattaggtcattgatacttggctggatctgccgggcccttactgaccctttgcccttcaacaggtgaccctgcccttagcatgagccactggatgttccatcagcaggccctgcaggagtacatcctgatgtgctgccagtgccctgcgggggggcttctggataaacctggcaagtgagtgttttctctctggggagggaagggagaggggaggagagagcagaggggcgtgcacctcaggcctactcagagccagatctcaagagcagaggtgtcaccttcagcacctgcatagcgctaggttgtatgggaaaaagcacccagttgggagcaccccttgaggccattgatcttggcacctccagctgcccgtcttgtcccccagcctgcatgcaaccccctcccccagacagggaaacagattgctgggtagataactctt

SEQ ID NO: 7746 - DNA, 966 bp, mus musculus; identical to SEQ ID NO: 7745

SEQ ID NO: 7747 - DNA, 1805 bp, mus musculus
ctgttcacaggttatcttgacgaatcagattacaacccatctgagtggagccctggcttctcaggcagacctggtgtctccagctgatgatttgtccctgtctgaaggtaaggaatctgtcctggagaggctgaaacttgacactgacatagagccccactgcctctccacctcctgttgagagctgggagatatggctaataggccctggccagtgaacccagccggagcctgttgatttaggtttggccacctttcctggcatctgatctcttatattggggagtcttttgccctgcctctataagggagctccatttggaggccagtcactcctctgtgtgttatttcaagtccttagtatgagggctgatgaattgttaaatgactttgtttttgagactgatactcaaaggttggctttcccagtggtcccctagcaatttagccttttgcttgtgctgagttcttttggactaaaaagcgtacatcagtttcatgtgccagagatatgacattcctgatcagctttacagaagattaagaaaaaaatctccacgctggtaaatctgcaaaattttctccaccctcccctgctagcaaaggtcaggctggctatggtttcgatggcaataagctttacgtagctggggaaataacaccaataaaccagagggtggtttctagttttattgaaagtgcttacttgacatttctgagttgttatccttgtagtctagtatctttcatgcagaatgctgtgggtctgggtagacatgcatagctcttccaggcccctcctccctttccactttctgagaattgctcatgaaggaatacaggagacttttaggcctagcaaggctcctggatggctgcccaggtgatcttctgcagatcagctttgctttatggtcttagaaattgcaagaaccacacctctgcttcttagtggtggctttaggagggaaaactagtggctaatttatgaaaactgtacaatgctttgtgtacgctccttccaagttcagggatacatcatcataacccctatcagcgaggctgaaaacctgaatcatcgagcattcctccctcctgaaacttttgtcatcaagtctgcttagtacttctttccgcatgtatctttcctttgtcccctcttttttgtaatgtgtgttgtgatcagcagatttactaaactcccaattgaattattttaataacatccagattggccttcccagctctagcctctacagtttccattctgccactaccaaattgaacttccccgtctggccttgttctgctctgttgctctcctactcagaaatcttagaatagttttttttgtttgtttcttttttgttgtttgttttgtttttgtttttgttttttctgagaatgagctaaaatcagtaagctgattttaacatatttagggatttgggatttgttagcttgaaatcagccatggtgaaagtatttataccatggaaatcagcaaatgctgaaaatcaggtggcttgtttttttatttcctccctttgcgtagactggttttcaaaacaccactagataaagtgaatgatttcaacccttcataatctgtcatttcctttctattcaaatttagttcctgccgatatcttaggtgaagctcctatgccaagtgtgccactcttggcctgcccctccccactcccagctccaggcctgtgcagagacagctcacctagaacagtgcttccccctttcacttcttctgcttctcgtcccacatccactccttcgaggcttattta

SEQ ID NO: 7748 - DNA, 1805 bp, mus musculus; identical to SEQ ID NO: 7747

SEQ ID NO: 7749 - DNA, 1805 bp, mus musculus; identical to SEQ ID NO: 7747

SEQ ID NO: 7750 - DNA, 908 bp, mus musculus
ttcgaacaacttctttttttttttttttaaggaaaatttgtattattttaattatttttatgtacagaaaactcaacagtgtacatttaacccagtttagtggcaagttctttagcctttgcctttttgcgcttggcgatacgagccacagacttaggacccaggacattgccaccccagtgacggcggatctcatcgtatctgtcattgtaattggtcctgatagcttccaccagcttagccaaagcgcctttgtcttctgagttcacctgtgtgaaggcgacagtggtgcaggtcttcctgtggactagacgtcccagtcttgccttccccttgataatgcagtaagggacccccattttacgacatagggcaggcaagaagacaaccagctcgatgggatccatgtcgtgtgaaatcaccaccagctgagctttcttgttctccaccaaggtggtgacagtgttaactcctgctcgaaggacaggtggtctcttcttcgggacgtcccctttgccagcagctttcttctcggcccgggccaacagtctctgcttcttctcttgctttgtctctggcctgtacttgtgggccagcttaagcagctgagtagctgtttggcggtccagggcctgggtgaactggttaatcgcaggaggcactttcagccgcttatagaggatggctctctgccgctgcaacctgatatagcggggccatttcacaaagcgggtgaggtctcttttgggctggatgtcctgtccaatgccaaaattcttaggccttttctcaaacaggggattcaccactttcttagcctcctgcttcttcacgacagctggggccggagccaccttctttcccttggccttctttcctttcggcatcttgggcagcgggaggagaga

SEQ ID NO: 7751 - DNA, 883 bp, mus musculus
ttaaggaaaatttgtattattttaattatttttatgtacagaaaactcaacagtgtacatttaacccagtttagtggcaagttctttagcctttgcctttttgcgcttggcgatacgagccacagacttaggacccaggacattgccaccccagtgacggcggatctcatcgtatctgtcattgtaattggtcctgatagcttccaccagcttagccaaagcgcctttgtcttctgagttcacctgtgtgaaggcgacagtggtgcaggtcttcctgtggactagacgtcccagtcttgccttccccttgataatgcagtaagggacccccattttacgacatagggcaggcaagaagacaaccagctcgatgggatccatgtcgtgtgaaatcaccaccagctgagctttcttgttctccaccaaggtggtgacagtgttaactcctgctcgaaggacaggtggtctcttcttcgggacgtcccctttgccagcagctttcttctcggcccgggccaacagtctctgcttcttctcttgctttgtctctggcctgtacttgtgggccagcttaagcagctgagtagctgtttggcggtccagggcctgggtgaactggttaatcgcaggaggcactttcagccgcttatagaggatggctctctgccgctgcaacctgatatagcggggccatttcacaaagcgggtgaggtctcttttgggctggatgtcctgtccaatgccaaaattcttaggccttttctcaaacaggggattcaccactttcttagcctcctgcttcttcacgacagctggggccggagccaccttctttcccttggccttctttcctttcggcatcttgggcagcgggaggagagag

SEQ ID NO: 7752 - DNA, 825 bp, mus musculus
tttaacccagtttagtggcaagttctttagcctttgcctttttgcgcttggcgatacgagccacagacttaggacccaggacattgccaccccagtgacggcggatctcatcgtatctgtcattgtaattggtcctgatagcttccaccagcttagccaaagcgcctttgtcttctgagttcacctgtgtgaaggcgacagtggtgcaggtcttcctgtggactagacgtcccagtcttgccttccccttgataatgcagtaagggacccccattttacgacatagggcaggcaagaagacaaccagctcgatgggatccatgtcgtgtgaaatcaccaccagctgagctttcttgttctccaccaaggtggtgacagtgttaactcctgctcgaaggacaggtggtctcttcttcgggacgtcccctttgccagcagctttcttctcggcccgggccaacagtctctgcttcttctcttgctttgtctctggcctgtacttgtgggccagcttaagcagctgagtagctgtttggcggtccagggcctgggtgaactggttaatcgcaggaggcactttcagccgcttatagaggatggctctctgccgctgcaacctgatatagcggggccatttcacaaagcgggtgaggtctcttttgggctggatgtcctgtccaatgccaaaattcttaggccttttctcaaacaggggattcaccactttcttagcctcctgcttcttcacgacagctggggccggagccaccttctttcccttggccttctttcctttcggcatcttgggcagcgggaggagagagc

SEQ ID NO: 7753 - DNA, 935 bp, mus musculus
ctctgaagacctgagcaggacaacagtgtgagcagctggaagacctcctccctgtaattcctcccagtgagaccaaggggacttcatatgctctgctggaggtggagagagttacccagatggggagagctcatgtacctggattattctttcaaaatccccaggaagaaaaccctgtgggctgggggattgtgcaggcctatctaggcttctagaatggctgtgcaggaatttgaggacaaaaaaggacaagaagcagcttcccttggctgtcgctggcatcttccagcctgtgcccaccttggctttgagctgggtcatagtaacactcctcacaccctgagggatgagggatgcaggggcagagaggaaggtctacagtagggtctttcctaaaacaagctctccccagggaggcctgcaagccagctccctctcactctccattgtcaagacaaagagaggaagaggatgccttctgccatcatcccctgagtccattttccctggatcatccatggagagtgggggctcaatgatgtttgccctggtgcccccaataccctctctagggccccagtccctcaggaacagacccagacctggcaaatccccaggaaagggcacagacaccaggctgagggggcaggcgaggtgcagcagatcccagtgggccccggctagtcctagtctgaatgactcattccttgtttccgtccactgtggtctgagtgccttggcccaggggcccccaagaggttgtaacacaggctggcctctcgcccatcagggctcagcagacaaaaattaaagatctcactcctcaggaactcacacagacagcacaggcatgctctgtactctgcctcaccagaccagacctcaggccagaggaggctgatggccaagagaggaaggaaagtcgtctccagctg

SEQ ID NO: 7754 - DNA, 1067 bp, mus musculus
aggagggcgtgcccggcgccgacatgctgccccagccctacctggacgccagctgtcccatgctgcccactgctctggtgagtctgagccgcgcccccagcgcacccccggggaccggggccttgccgcccgccgcgccgtcgggccggggcgcagccgccagcctgcgcaagagaaaggcctctccggagcccccggactcagccgagggcgcgctgaagctgggcgaggaacagcagaggcagcagtggatggcgaaccagagcgaggcgctgaagctcaccatgtccgccgggggcttcgcggcgccggggcacgcggcggggggtccgcctccgccgcccccacctctgggaccccattccaaccggaccaccccacctgagtcagccccccagaacggtccgtcccctatggccgctctcatgtcggtggcagatactctgggcacagcgcactcgcccaaggatggcagttccgtgcactctaccactgcgtcggcgcggcgaaacagcagcagcccagtctcgccggcctccgtgccggggcagcgccgcttggcatcacgtaacggggacctgaatttacaggtggcgcccccgccgcctagcgcccacccgggcatggaccaagtgcacccccaaaacattccggattcccccatggccaacagcggacccctctgctgcaccatttgccacgaacgtttggaggatacgcatttcgttcagtgcccttccgtccccagccacaaattttgcttcccttgctctagagagagtatcaaggcccagggggccaccggcgaggtgtattgccccagcggagagaaatgccccctagtcgggtcgaatgtaccttgggccttcatgcagggcgaaatcgcgactatcttagctggggatgttaaagtgaaaaaggagagagacccttgaaccactgggcagccacctcctttgccctagaccagctcctctccaatcctgagggcccctcccccaacccaactcgaccctccctcccctcacccccaaggtgtagaattgtgaatataacgaaactgcaaa

SEQ ID NO: 7755 - DNA, 206 bp, mus musculus
agggcagagccaagagaatcactaagaacagagtcagacaatgtctgggtccttcttacctcctaagtgctgcagttatatcggtttaacttggggtttctgttatttgcaaaccactgaaagcatcctaacttatccataagctatcttaaatactggcttggctgcagaagcaagtaaaaagacctcttcgtgaaaaggaaaat

SEQ ID NO: 7756 - DNA, 1560 bp, mus musculus
gaaatcaaaagccagtaagagactccttcttgttcccccatccccagccttctgcagcctcacctcttcctgaagaaaatgcaaagaaaggcctggttgctgctggataatgggggacgagaagaaggaggtgaaaaaggaaaagtgggaggagggggtctcatcactgagttgtgaaaaaaagtctgaatctgtcataattatgtcaagtcttccatttgctaaagaatctctagtgaggtattcctgatgtttcggttcttttttggcttgtgggagggtccaattgccaaagggtgtgtctctcttcctttttgccctttttatccaccagaagatatgccatgctctattctagtgggacaccctttattggtttgcattttcatgctcttttgacagcagttttaggtcagccttaggttggtcgctggctccccccttcctgtcccccagtttttccaggccagcccatgcccacaggaaagccttgtggtgaggcaggatgggcaagattgctcactgggtccttctttcttttcttttcttcctttcctccctccctccctccctccctccctgcctgcctgccttccttccttctcttacgttattttgaagcttaggcattccctatcttcacgttatgctgagggtgtgttttttgtgttgctttattctttcatcttgttcttggttggttttggaggaaacattgagagatgacgtgacatggcaggtgccatcgtctccatgagatggaaaggagaggtgtcccctggaacttggggatgaaggggacgagaaacaaaaagggaccatttaagattctacaagacaaaaaataaccccccaaatcagatggcatataaccctcccttcagctccaaaaagaatccactaaaaccctggacattgttatactggtagaaaaggtgccattgaactagacatctggtaaaccactcccagatcactgaaatgaacagggggaaaatgaataaatctatacggagtcattatataaatcagaaaactagattcaacatgcctgaactcataaaaattactccctgggccgggcatggtggttcacacctgtaatctcagcactttgggaggccaaggaaggtggatcacttgaagtcaggagttggagaccagcttggccaacatggcgaaaccccatctctactaaaaatacaaacattggccaggcgtggtggcgggcatctgtagtcccagctactcaggaggccgaggctggagaatcacttgaacctgggaggcggaggttgcagtgagttgagatcgcgccattgcactccatgctgggcgacagagtgagactctgtctcaaaaaaacaaaaaacaaaaacaaacaaaattactccctgaaaaatcaccatgaggccgaagaaaactgtaagacattcctccaaactatttaaacagactaaagccagcatttggggatatgaaaaaccactatgaaccagaaattcaaaaactaagaacaaaaatggacaaaagcagaaactttctgtatagctttgactt

SEQ ID NO: 7757 - DNA, 1040 bp, mus musculus
atttaggtttcttgaatcaggtcaccgatttttaagtctgcatccattttagagaactctccctccccactccccttcaacatatcccatcctctttcacctatccattcagattctttcatttaattatttcagaccctgggaattagcagtcccttcttgaaagcattggaatggggcagttttaatttttattagtatcagctttctcctcctcactgccatatttacttctttgggaggaaaaggaagtgcatatgtagctataaaagaagacatagcccaggtttctaggatttgcacctccgcattggcaaattttcccagtctgtgtctccaaacagggttttaatcacctgggctcttgtccttggcattgaaagctttaagagtactgcagaaatggtaaattaaccacatttaacaaaatagaaagttttcattgtgtcataaaaagccctattgatcttgttcaggcattgactccaggtccttttaacaagccactctgtctagacttgcaggctagagcccacagtgctaacaaaggaggagctgggctgccctccctccccctgcaggggaaggctaagaggatgggcacagattcaggcttctcaatggggattttcttaaagaactagcatgattttattctgctgtggaaaggaaaagcattaggagacttgtggcagatgtacctgtcacttactccagactccagccttgtttgactctctgtgtctgctgtggaactaccccatcataacagattaacgtgtcttccatatccctcagcttccagcaacatttcctcctgttgcccttaggaaggtaggctgaactctgatgccaacgcacggagcagtgggtctccagaaagagcgtggaaagcaacgatggggcaggaggaggaattggcaactttagaatcactgtgaccaactcaacttcatttcaattcaattccacaggtctttacttaacaaattctgggtaaacaggagattttgaaaaggcaagaaaaattgctgctcaca

SEQ ID NO: 7758 - DNA, 1040 bp, mus musculus; identical to SEQ ID NO: 7757

SEQ ID NO: 7759 - DNA, 993 bp, mus musculus
aggtatccgtaatttattctggtcatcacctgatttgagtgtttctttctgtcatcctcaattatatacccaagaagaccataatacttcttatcattgaaccaagatttcttcttcctcactatgaaggaatagagacttgattgttcaagttatcaaagattttcagctagacagtggaagagataaccataatgaaatgttacttgctaacgtcagtactgaggttttgttgtctattttttcctccccttcaattgctcaaggaagcctgttatgatgcctggtccattcagaccaggtaaggcaaacaaggaaaacgtatgagaataataatgtttcctccacccaacccactaggccggcagttaaccatcttcaacactcaggcgcaaatagccattggtggaaaggacaaaggacgcctcttccaaggccaactctctgggctctattatgatggtttgaaagtactgaacatggcggctgagaacaaccccaatattaaaatcaatggaagtgttcggctggttggagaagtcccatcaattttgggaacaacacagacgacctccatgccaccagaaatgtctactactgtcatggaaaccactactacaatggcgactaccacaacccgtaagaatcgctctacagccagcattcaggtaggcctttttccaagtattaattgcgtctgtatttttatctttgcaacattgttatcatggtcattgctttatgtagctaaagagtttgaattactatgtaagaaggatgctggcagatactcatagtaatgagacccaggagaagagaaaggtgaagtcattgctaaagaagtcataaaagtctgtggcactcctgggttgttattcttattgtatttatcactgaaatggtaaagctgttattcaaaacgagcaatggactacactttcagtatgaaatactctctcctttaattttattaccttttcaaataacagaaag

SEQ ID NO: 7760 - DNA, 993 bp, mus musculus; identical to SEQ ID NO: 7759

SEQ ID NO: 7761 - DNA, 993 bp, mus musculus; identical to SEQ ID NO: 7759

SEQ ID NO: 7762 - DNA, 511 bp, mus musculus
ttttccagaaacaaaagcactaataagagagagagagattataagacattggcttacacaattgtgatggctgaaaagtcacagtgtccgtagttggcaagctagaggcccaggagagctgatgtgtagttccggcccaagtccaaagtcctgagaaccagggaagcagttggtgtaagtttcagtttgaaaaccagcagcctcaagacccaagaagagccagtgtttcagtgttaagtccaaaggccagagaagagcaatgtcccagctgaaacagtcaggcagaagacatttcctcttacttggtctttttattccattcaggtcttcaaatgattagatgaggcccatctgcattatagagggcaatctgttttgtttcctatcaattcaaatgttaatcttatgcagatgcaccctcatagacacacccagaataatgtttgacaaatatctgggcccccatggcccagtcaggctgacccatgaaattgaccttcacagagtgttc

SEQ ID NO: 7763 - DNA, 1879 bp, mus musculus
gcctgtggaaaacagtctgagtgagccagtgcaatgtgatcctgtcttcagatccatcagcaaccaaaaaagtaggttaagttttggaacacgtgggtgatgttaattttcctcctgggaactggcctagtaagagaaatgttgccagtagaaactagctattttgtggagtaataaagctgtgatagaaaaagggtgaaatctgattagtattgggctagacaaggaagaaccatcactcctgtgtttgttatgtaaggaaaacctacggtgactataaatagttctagatgggagtgattcacttcaccaccactagtttgccatcagtttcctatttatcagatgaggagttaggagaagataatgacaaaaggccctttcacttctaatatttgtttgcgtctagatggtaggctgtagcgttgtataagggaaagcccactatcaggatctcaggaggctggtggtagttgtgactctgacactaaagtattgccactagttttgggtattaagaagtatttttggttttgcacaatattttacatgaatcttttttttttggaatgaattcctaatgctagatcaaaagtactcatttataaaatgtttattctattaccagaacaaacccaccacattacactcatactagttatataattttgcctacttcactacaaattctccccaaatgaatattataatgaaaataaatcaagatcaatatgagagttttgaaaatgacttaggaacacaaaagatatgaatgccttcagaaacatttagatggcttaaagtattgttttgtagctttttaatttatctgtggctaatattttacccaagattagtgtgtgtgtatatacacacacatatatgcgtatatatgtatatgtacatgtatataatttgtttttcttttctctttttctttgatgctcaattccttggtgtaatttaaataatcttgccctatttacaaaagctttcagattttggtagcccctttgcaatgcttcagtgacagatcccaattgtgtttgagtacaataagaatgtttgttgtattcttaagactgacatcacaatgaaaacctactgatatagggaaaaaaaaagtctctccatcaatgtctaagctctcggagtcatctatatatatatatatggatgatatatattcacattctctctctatatatatttcaatctcttttctttaacaagtattaccaaaccccactctaatccctctgttgcccagagtgtatgcagaagggatcttaaagtcatctaggccatgttccttattagaatcaaaatcagaggggttaaatggcttgtccatcattgcgcagctcttcataaattaaggtagagaattctggagtgatgaatgtttgtgaagagttttcatggtggtaaatacaataaagtgatatgtgtggcatgcaaagaagcaagatattgagtaattctccacccttctcattaaaaaaaatacacattagacttgttgtaagtcccaggcctgttgtttataagacttatggtacccttatgcaaatcacttcatctcttaggaactcaattttcttaattataaaataaacaatcttagatcaaatgacacctcaattctcttctaaagttaatattcaagcattttctctgggtcacaccaaaggcctgctccacaggctgttgtattagcacagcattatggtgagtccatgaagcatcaagattttcatctttgtgcattttcattgtctacaagcaaaagatgacagattgaaggcctgaattttattttcaaagtcacataaccaggccagagcttaaatgtaatgttgaaaaataaagtagtaat

SEQ ID NO: 7764 - DNA, 7036 bp, mus musculus
gcctctaaaagtctcatttgattagggatttctgttagttaaattctgctttataaaactgctttgcttatgtgtttctcattttctaggactttgtttctgcaaagccaaaatataactgcttaaagcaaaagttatttaataatgtttagatatctaatgatttataattactattatcgttgccagtaaatatttattgtgtttcaatgggttatattccactgtactaaatattttcttgacttcaaggtgtattcttttgcatttaatgttgtatatgtagtcaacataagggagaataacatatgcagatgcaaagtgtattgggcgttagaaaccgatatggtcttggtctgtgtctatacccaaatctcacgttgaattgtaattcccaatgttggaagagggaactgatgggaggtgattggatcacgggggcagatttcccctacgctcttcttgtgatagtgagtgagttctcaccagagctgatggtttaaaagtgtatggcacttccccccttgctctccctctctctctctctcctgctgccttctgaagaaggagcttgctgcttcttttccttctgccatgattgtcagtttcctgagatctccagtcatgctttctgttaagctcgtgaaactgtaagtcaattaaaactcttttcttcatgaattactcagtctcaggtagttctttatagaagtatgagaatggactaataaagaaacttattttatgcacacatacacatgcaaaaattaccatactattttaataaatgtatcttattctctatttatatatatctagagaaaagccaaggatttcttacttaaaattttgtgctcttcatgtcaggggaggagccaagatggccgaataggaacagctccggtctacagctcccagcgtgagcgactcagaagatgggtgatttctgcatttccatctgaggtaccgggttcatctcactagggaatgccagacagtgggcgcaggtcagtgggtgcacgcaccatgcacgagccgaagcagggcgaggcattgcctcactcgggaagcgcaaggggtcaggcagttccctttcctagtcaaagaaaggggtgacggtcggcacctggaaaatcgggtcactcccacccgaatactgcgcttttccgacgggcttaaaaaacggtgcaccacaagattatatcccacacctggctcgggggtggggagcgggggtcctacgcccacggagtctcgctgattgctagcacagcagtctgagatcaaactgcaaagcggcagtgaggctgggggaggggcgcccgccattgcccaggcgtgctgaggtaaacagagcagccgggaagctggaactgggtggagcccaccacagctcaaggaggcctgcctgcctctgtaggctccacctctgggggcagggcacagacaaaggaaaagacagcagtaacctctgcagacttaaatgtccctgtctgacagctttgaagagagcagtggttctcccagtaagcagctggagatctgagaacgggcagactgcctcctcaagtgggtccctgacccctgacccccaagcagcctaactgggaggcaccccccagcaggggcacactgacacctcacatggcagggtactccaacagacctgcagctgagggtcctgtctgttagaaggaaaactaacaaagagaaaggacatccacaccaaaaacccatctgtacatcaccatcatcaaagaccaaaagtaaaaccacaaagatggggaaaaaacagaacagaaaaactggaaactctaaaaagcagagtgcctctcctcctccaaaggaatgcagttcctcaccagcaacggaacaaagctggacggagaatgactttgacgagctgagagaagaaggcttcagacgatcaaattactctgagctacgggaggacattcaaaccaaaggcaaagaagttgaaaactttgaaaaaaatttagaagaatgtataactagaataaccaatacagagaagtgcttaaaggagctgatggagctgaaaaccaaggctcaagaactacgtgaagaatgccaaagcctcaggagctgatgcaatcaactggaagaaagtgtatcagcaatggaagatgaaatgaatgaaatgaagcgagaagggaagtttacagaaaaaagaataaaaagaaacgagcaaggcctccaagaaatatgggactatgtgaaaagaccaaatctacgtctgattggtgtacctgaaagtgatggggagaatggaaccaagttggaaaacactctgcaggatattatccaggagaacttccccaatctagcaaggaaggccaacgttcagattcaggaaatacagagaacaccacaaagatactcctcgagaagagcaactccaagacacataattgttagattcaccaaagttgaaatgaaggaaaaaatgttaagggcagccagagagaaaggtcgggttaccctcaaagggaagcccatcagactaacagtggatctctcggcagaaaccctacaagccagaagagagtgggggccaatattcaacattcttcaagaaaagaattttcaacccagaatttcatgtccagccaaactaagcttcataagtgaaggagaaataaaatactttacagataagcaaatgctgagagattttgtcaccaccaggcctgccctaaaagagctcctgaaggaagcgctaaacatggaaaggaacaactggtaccagctgctgcaaactcatgccaaaatgtaaagaccatcgagactaggaagaaactgcatcaactaacgagcaaaatcaccagctaacatcatcatgacaggatcaaattcacacataacaatattaactttaaatgtaaatggactaaatgctccaattaaaagacacagactggcaaattggataaagagtcaagacccatcagtgtgctgtattcaggaaacccatctcacgtgcagagacacacataggctcaaaataaaaggatggaggaagatctaccaagccaatggaaaacaaaaaaggcaggggttgcaatcctagtctctgataaaacagactttaaaccaacaaagatcaaaacagacaaagaaggccattacataatggtaaagggatcaattcaacaagaagagctaactatcctaaatatatatgcacccaatacaggagcacccagattcataaagcaagtcctgagtgacctacaaagagacttagactcccacacattaataatgggagactttaacacccactgtcaacattagacagatcaatgagacagaaagtcaacaaggatacccaggaattgaactcagctctgcatcaagccgacctaatagacatctacagaactctccacgccaaatcaacagaatatacatttttttcagcaccacaccacacctattccaaaattgaccacatagtgggaagtaaagctctcctcagcaaatgtaaaagaacagaaattataacaaactatctctcagaccacagtgcaatcaaactagaactcaggattaagaatctcactcaaaaccgctcaactacatggaaactgaacaacctgctcctgaatgactactgggtacataacgaaatcaaggcagaaataaagatgttctttgcaaccaacaagaacaaagacacaacataccagaatctctgggacacattcaaagcagtgtgtagaaggaaatttacagcactaaatgcccacaagagaaagcaggaaagatccaaaattgacaccctaacatcacaattaaaagaactagaaaagcaagagcaaacacattcaaaagctagcagaaggcaagaaataactaaaatcagagcagaactgaaggaaatagagacacaaaaaacacttcaaaaaattaatgaatccaggaactgcttttttgaaaggatcaacaaaatagatagaccgctagcaagacgaataaagaaaaaaagagagaagaatcaaatagacacaataaaaaatgataaaggggatatcaccatcgatcccacagaaatacaaactaccatcagagaatactacaaacaactctatgcaaataaaccagaaaatctagaagaaatggataaattccttgacacatacactctcccaagactaaaccaggaagaagttgaatctctgagtagaccaataacaggatctgaaattgtggcaataatcaatagcttaccaaccaaaaagagtccaggaccagatggattcacagccgaattctaccagaggtacaaggaggaactggtaccattccttctgaaactattccaatcaatagaaaaagagggaatcctccctaactcattttatgaggccagtatcattctgataccaaagccgggcagagacacaaccaaaaaagagaattttagaccaatatccttgatgaacattgatgcaaaaatcctcaataaaatactggcaaaacgaatccagcagcacatcaaaaagcttatccaccatgatcaagtgggcttcatccctgggatgcaaggctggttcaatatatgcaaatcaataaatgtaatccagcatataaacagagccaaagacaaaaaccacacgattatctcaatagatgcagaaaaggcctttgacaaaattcaaccacccttcatgctaaaaactctcaataaattaggtattgatgggatgtatttcaaaataataagagctatctatgacaaacccacagccaatatcatactgaatgggcaaaaactggtagcattccctttgaaaactggcacaagacagggatgccctctctcatcactcctattcaacatagtgttggaagttctggccagggcaatcaggcaggagaaggaaataaagggtattcaattaggaaaagaggaagtcaaattgtccctgtttgcagatgacatgattgtatatctagaaaaccccattgtctcagcccaaaatctgcttaagctgataagcaacttcagcaaagtctcaggatacaaaatcaatgtacaaaaatcacaagcattcttatacaccaacaacagacaaacagagagccaaatcatgagtgaactcccattcacaattgcttcaaagagaaaaaaatacctaggaatcctacttacaagggacgcatgaaggacctcttcaaggagaactacaaaccactgctcaaggaaataaaagaggatacaaacaaatggaagaacattccatgctcatgggtaggaaaaatcaatatcgtgaaaatggccatactgcccaaggtaatttacagattcaatgccatccccatcaagctaccaatgcctttcttcacagaattagaaaaaactactttaaagttcatatggaaccaaaacagagcccgcatcaccaagtcaatcataagccaaaagaacaaagctggaggcatcacactaccagacttcaaactatactacaaggctacagtaaccaaaacagcatggtacttgtaccaaaacagagatatagatcaatggaacagaacagagccctcagaaataatgctgcatatctacaactatctgatctttgacaaacctgagaaaaacaagcaatgggaaaaggataccctatttaataaatggtgctgggaaaactggctagccatatgtagaaagctgaaactggatcctttccttacaccttatacaaaaatcaattcgagatggattaaagacttaaacgttagacctaaaaccataaaaccctagaagaaaacctaggcattaccattcaggacataggcatgggcaaggacttcatgtctaaaacaccaaaagcaatggcaacaaaagacaaaattgacaaatgggatctaattaaactaaagagcttctgcacagcaaaagaaactaccatcagagtgaacaggcaacctacaaaatgggagaaaatttttgcaacctactcatctgacaaagggctaatatccagaatctacaatgaactcaaacaaatttacaagaaaaaaacaaccccatcaaaaagtgggcgaaggacatgaacagacacttttcaaaagaagacatttatgcagccaaaaaacatgaaaaaatgctcatcatcactggccatcagagaaatgcaaatcaaaaccacaatgagataccatctcacaccagttagaatggcaatcattaaaaagtcaggaaacaacaggtgctggagaggatgtggagaaataggaagacttttacactgttggtgggactgtaaactagttcaaccattgtggaagtcagtgtggcgattcctcagggatctagaactagaaataccatttgacccagccatcccattactgggtatatacccaaaggactataaatcatgctgctataaagacacatgcacacgtatgtttattgcggcattattcacaatagcaaagacttggaaccaacccaaatgtccaacaatgatagactggattaagaaaatgtggcacatatacaccatggaatactatgcagccataaaaaaggatgagttcatgtcctttgcagggacatggatgaaattggaaatcatcattctcagtaaactatcgcaagaacaaaaaactaaacaccgcatattctcactcataggtgggaattgaacaatgagatcacatggacacaggaaggggaacatcacactctggggactgttgtggggtggggggatgggggaggaatagcattgggagatatacctaatgctagatgacgagttagtgggtgcagcgcaccagcatggcacatgtatacgtatgtaactaacctgcacaatgtgcacatgtaccctaaaactcaaagtataataataaaaaaaaagaaaattaaaaaaaaaattttgtgatcgattttggtctttacaatgatttctgtgtaattatacgtttacataacattactgttgtatacatttggtttttattctatatgttttactttatatcattttttgtgtaa

SEQ ID NO: 7765 - DNA, 1696 bp, mus musculus
caaaggtcctgaacttccatggctttttgcctgttgtcttatagttagtatcaatttggcttacatattcacacagtattttttttcacacattggaattaaggtttttatgggaacactaatcaaccaagtcagcagccaaatgcagtctttaaaattattattcatgttccataagggtcttttcaagtacaaagaccacatcattatttctatgtgagctgtttaaatgaacattttaaaaatcaactctgttggcttaaatactaaaactccattctcagctgtcaagacataaatttatcatgaactgagttggaaagactttggcctctccttgaagaaacatactacatggattatcctctcaaacaaacatgttcactgaacaaccatcttgtaaatgtttagggctactaactactcaactcctgggtacaggctgctttgagaaaatagtgaaaacaaataaccagcaaacaaacaaacatgccaatgggttagttatagctctgctggcaaggctgaacagtagttcagattcacaaatttccaattatatcctgatattatttttcaagaagtggagtgaaaacagataagcagagaaacacaacaagaaaactactttaaaactgagaatttggccagacatactggttcacacctgtaatcccaatgaagcaggaagatcacttgagaccaggaatttgagaccagcctggacaacataaagagaccccacgtctacaaaaaattgctgaacatggcaatgtgcacctttagtcctcgctacttgagagactgagctaggacaatcacttgagcccaggtgtttgaagttgcaggcagctataatcacaccactgcattccagcctgagttacagacagaatgagaccctgtctctaaaaaaaataatagtaatacggagagagaaagagagaatttagggaaaagatgatatatgatgatgataagtggataagtaattgggctaatttaacagaaaaatctttctgttggtctgctctgaaatctagctttactatgaaataacttttacaacagaggtattcaaaaaatcaaaagaaaggattatgaattaacaataataatgaaaaaaggaaacaagatagacaatggggacataaaaaatgacagggagagataggaacaggaaaagagacaaacaggggaggggggaactaatatcctctctttttatgtttttctcttgttctttcagtgactcagataagattccccatttggccaaacaattgtgttgatcagcagctgatgatggtgacctagaaatgaccgaactcctaggtagatacagattattgtccagaagaattatgggcgatcaatctaaacagatacacatcttttttgttttttttttgtaaccaaatagattcataattttaaaattcaacaagcaaaaggaaaacaaggacatttaaaaagtaaagcaaataagcataaaacctcattttagctggtattctttgagaagacaagagattatgctgataaggccaagaaagaactaaaagggaaaagctaaccttgtgaagtggaatctcaactatgacaataggcttgcagtttgtttcaacaaaataatatgaaaatgtaactctggtgcagaattattttggatcccctcctccaaatagacaccaga

SEQ ID NO: 7766 - DNA, 850 bp, mus musculus
atatctcagtatgtgtacatacatgaaataacctaagaatttcaaaaatgtatctgcatgtgcagatagcaggcagttaagattggagtgaatcgtgtgtatagtacccttgcctcttagcttattttataatttaaaagcataagaaatgttaacattaagtggtaagattttttttttctacaatgtctccctgacattcctggccatcccttttttctcatccaaggctaattattttaagatctggcctttgctaaagaaaacaagcaaatgtgggtgaggctacgtggaaagggatttcatataaaacagacgtcctgtttttagggaaaggaatctcagcatctttggagccgccctgaagaggtaatagtctttaaacaatgaaaacaagggagctcatagagagaagaaaggtaaaaatagacagaagttaatgccatttacaaaaaaacctgatgggcctgagctggacctcagtagtaactaacagaacgaaaccccccaaactacacatgtggttcagctcattacccagggcctacttcaggaaggcctcctgagttctcttatcaacttgggagtccttttgctctaatccacaaaggggattacagctgataaattatgacaagcacccactggaaacccagtgagccaagaagggcatcaccccttttggcatgtgcattcacattactttggcacttactattatcatttaaatgtaatctcaccttagaagaaaaaaaaaattcccctctttgctgcggacttaaaccttacaaggtaattgaaatcacttattaaggcttctaaatgagaagctccagatattagaactgcc

SEQ ID NO: 7767 - DNA, 212 bp, mus musculus
gtgactttgacagtagaaatcaagaaataaaagcagagtggatccttaatgctgaagaaaggctgctaggagataggaatagaggaatggccagatatactgtggacaatggagggaggaagtaatgaagtccagtggtttttattcagaggtggaacctgctttccacacaatggaagatacagaagcatggatggaagtggcatgtggaa

SEQ ID NO: 7768 - DNA, 500 bp, mus musculus
tatagcaactttattttaaaatattagagatgacagaaaccatgtagtatttgcacatttaatatcataatgaaaaattggagaggtcaactcatatatatgagagaaggtacgtcaattttctaattcctttaaggggtattaggaagatcatcaattgagagtcctggttacatggtgagatggattcttcactatctactgttggcctcattagcccttctctagagaaaaggaccctatgatgtctgcgtccattaattcctagtctgggaggatccacaatgaccagaaagatggcatgaccacccaccccttcactttaggctcttttgctgaatccttactcccagagtcacagtatgatggatataatcctaaaccagtcatgcatcaaattctgtttaattcacagtaaagaaagaattgtcttctacataaatttaaaacatgtatgagattctgtcactaccctgtgtaagtgcattcaatgctctttt

SEQ ID NO: 7769 - DNA, 1216 bp, mus musculus
aaggtcatgcagtcattagatatcattcatgtgaccatcctctcaacccccaggtttctgtggaggtttaagggaacaccctcactgctatttcagtctcactgtgtgtcatagcttcaagtaaccagtgtcatttgcagacctggatgtaaacccttgggggtttgtatcagtttgcttttgctacagtaatcctgcataacaaaaaagtctcaaaacctcaatggcatacaacaatgagcactggttcggctcacgtggcccagctcttggccaggtgtctctcatcctcctaatgagtctgcaggctgcctggagcattcttctcatggtgatggcagaggcacaagagggcaggtagagacgcaaaagatcaagcataaatgattaaccatcacttccatctgattgcattaaccaacaccagtcacatggccaacccaaagtcaagggcaggaaaacatattccacccatggaaatgagggggctgcgaggtcacatggttaccagaaaggggtcccaatccagaccccaagagagggttctaggatctgacacaagacagacggggccagtccataatgtgaaaagcaagtttattaggaaaataaaggaataaagaatgcctattccataggaagagcagggctgctggctgcccatttttatgaatatttcttgattatatgctaaacaaggggtggattattcttgagttttctgggaaaaaggtgggcaattgccggaactgagggttcctcccctttttagaccatatagggtaacttcctgacgttgccatggcatttgtaaactgtcatggtgttggtgggagtgtcttttagcctgctaatgcattatggttagtatataatgagcagcgaggatggctggaggtcactcttgttgccttcttggctttggtgggtttcagctggcttctttactgcaacttgttttatcagcatggtctttatgacctgtatcttgtgctgaccccctatctcaatgcgtaacgtcctaggagggcagccagtaggtctcagcctcattttacccaacccctattcaagatagagttgctatgattcaaatgcctctgacaacatggcaaaaggtgtggattcagggaaaaggggagatttgtggtcattctctctccctcttcctttgtacctggcagcatttggggatacaaatgagacatgggaagat

SEQ ID NO: 7770 - DNA, 480 bp, mus musculus
ctcccctatgattccaatgccagtgggttttagaccacattttgagaaacagtgctgtaaactgttttccatttgcagtgaaggaaaatgtagggtttgtgtcgtgaaactatgcagagaaattgaatagtattttagtctaatcttgcttttaaataacacggaaattttgaaagtcggctttagggagttccagaacctgtccatgaacagcaacaagaaagatccctgtgtgaaaatgaacactggttggtaaaacccttaaataggacctaaatatgaatctgacccggggagcccatccttgttttcttttgctcatttatttaatgttcactgccagcactgctagaaaatttaatctctatatctgtgatttataagggctcatctttgttccaaatgcccagttatgtgctgaacaaaagctcttaaggggaactgctgccagaaagaaccactatctctaatgtgcatatc

SEQ ID NO: 7771 - DNA, 328 bp, mus musculus
aagctcatgctaactgcatataataaggtttaaaaggaggcaatctctcaaaggggaggagcttcataactgggtctttaaggaagactgggacttaaaaaaaatagagaaggccttattgacaggtaaacaagacaagcaaatacacaaagcacaaagttagaaatgagctgtggacgcatggaaacagtgagaccaaatggcatgccagtttgtcctccgtattcatgttgtgtgactgtccttgatgtggttgtatgtgctcactaaggctgcctttgactgagtaccgagtgagctgagcttgaacctttctgtcttacccagc

SEQ ID NO: 7772 - DNA, 214 bp, mus musculus
acttgaaggtaaacaataaaatagcagtatttaaaaatcgatatgtagcatttaagtgctattattttacttttatatttttaatacaaaattcatataaaatttttttattttactttttatattttgctctttctgtagaagaacttaatgtacagtagttttgaaaggtcccattttgaaatctgatcataatacaataatttgtatgtag

SEQ ID NO: 7773 - DNA, 214 bp, mus musculus; identical to SEQ ID NO: 7772

SEQ ID NO: 7774 - DNA, 1111 bp, mus musculus
gaggcagcacagctcttctttacagatgtgcttccccacctctaccctgtctcacggccccccatgccagcctgacggttgtgtctgcctcagtcatgctccatttttccatcgggaccatcaagagggtgtttgtgtctaaggctgactgggtaactttggatgagcggtctctccgctctgagcctgtttcctcatctgtcaaatgggctctaacccactctgatctcccagggcggcagtaagtcttcagcatcaggcattttggggtgactcagtaaatggtagatcttgctaccagtggaacagccactaaggattctgcagtgagagcagagggccagctaagtggtactctcccagagactgtctgactcacgccaccccctccaccttggacacaggacgctgtggtttctgagccaggtacaatgactcctttcggtaagtgcagtggaagctgtacactgcccaggcaaagcgtccgggcagcgtaggcgggcgactcagatcccagccagtggacttagcccctgtttgctcctccgataactggggtgaccttggttaatattcaccagcagcctcccccgttgcccctctggatccactgcttaaatacggacgaggacagggccctgtctcctcagcttcaggcaccaccactgacctgggacagtgaatcgtaagtatgcctttcactgcgagaggttctggagaggcttctgagctccccatggcccaggcaggcagcaggtctggggcaggaggggggttgtggagtgggtatccgcctgctgaggtgcagggcagatggagaggctgcagctgagctcctattttcataataacagcagccatgagggttgtgtcctgtttcccagtcctgcccggtcccccctcggtacctcctggtggatacactggttcctgtaagcagaagtggatgagggtgtctaggtctgcagtcctggcaccccaggatgggggacaccagccaagatacagcaacagcaacaaagcgcagccatttctttctgtttgcacagctcctctgtctgtcgggggctcctgtctgttgtctcctataagcctcaccacctctcctact

SEQ ID NO: 7775 - DNA, 1111 bp, mus musculus; identical to SEQ ID NO: 7774

SEQ ID NO: 7776 - DNA, 901 bp, mus musculus
tagtggcttgagctggtaatagaacccactggggaatgtgtggaacattcttggagaatagatgtgtgggcttgcgtatttcttcactacgtcttctctgtgacttggccctttccttggtcttaagtagacaaccactctgttttcccaaatttctgaaagctcagaaatgagcttttcccatccttaactatataatagcacacaaaatagtcagtagttagatgtgaacagataaccctatttgggtaactactgactacccatccaaattcctcctgaatttcaaggatctcagccatccttaacatttgatttttgctgtctgatccattcttgataacacatgtttcatttgagaggcaagaattgtcctcctgggctccagcagtgttaggcacacaacaccctcactcttgatgctggaggatgagaatggtgagcagagtgtgacttggatgaacagaatcagctccctgtcatcatgtttatcattagtaatgcccattaatagtaattaattactattttattaacaactattataactattgctatgattactactaattagttttaattgatcctctccacatgggcctttgcatttgatagcactgctaacaatctgatgaaatgaacaaagcaggtacttcagtagtcccattgggcagatggaaatactgaggcacagagaagtgaggtgacctgggtgaggtggcccagcttgctgtggctgtaggacctgtgctccgcctcaatgtcacaatgccccctgagaggggacacgtgagtgggtgggggatggagctgcggctttttttgtttggaggccttgatttgattcaatatctgcctctcgtgggtgcaagtggtgttgaactcacccctccacagaact

SEQ ID NO: 7777 - DNA, 862 bp, mus musculus
cgtcgttctggattcccgtcgtaacttaaagggaaactttcacaatgtctggagcgcttgatgtcctgcaaatgaaggaggaggatgtccttaagttccttgtagcaggaacccacttaggtggcaccaatcttgacttccagatggaacagtacatctataaaaggaaaagtgatggcatctatatcataaatctgaagaggacctgggagaagcttctgctggcagctcgtgctattattgctattgaaaaccctgctgatgtcagtgttatatcctccaggaatactggccagagggctgtgctgaagtttgctgctgccactgaagccactccaattgctggtcacttcactcctggaaccttcactaaccagatccaggcagacttctgggagccaaggcttcttgtggttactgaccccagggctgaccaccagcctctcacggaggcatcttatgttaacctacctaccattgctctgtgtaacacagattctcctctgcgctatgtggacattgccattccatgcaacaaccagggagctcgctcagtgggtttgatgtggtggacgctggctcgggaagttctgcgcatgcgtggcaccatttctcgtgaacacctatgggaggtcatgcctgatctctacttctacagagatcctgaagagattgaaaaagaagagcaggctgctactgaaaaggcagtgaccaaggaggaatttcagggtgaatggactgctccagctcctgagttcactgctactaagcctgaggttgcagactggtctgaaggtgtacaggtgccctctgtgcctattcagtagttccctactgaagacaggagtgctcagcctgccat

SEQ ID NO: 7778 - DNA, 662 bp, mus musculus
caggtgttagttattaatttatacttttatgttctcgttataaaagtcatcaattcttgtggtaaagaattcagatacgcagaagtgtcttcattagggtttgtgagttcctctgctcttcctcactccctgtaggaagtgctctgctggtccgtaactcttcagactttcttctaattcatttcttccttttgacaaaatgatccaggcagctgcagagactgcttatgatatggtgtctcctggtaccctttctatcgagcccaagaagaccaaaaggtttcctcatcaccggttagcccaccagccagtagacctgagggaaggtgtggccaaggcctacagtgttgtgaaagaggtaactgaatacttgggtggacacatcagaacccttctgtgcgctttcccaactttcacctaaagagcatttaatggcttaaatgtattctgtagaaatccctgggagcagaatggcaactgccactaataacatgtgcccatatctgtgtgaggtgatggaaaagggccagtctgggaccaataggctgacaggaatactagtgattgcgtgggtggatggattctctctcttcacctgcagaagcactcagggagtgatagaaacaaatgccgtgtgatcgctgtctaggtttaacacattt

SEQ ID NO: 7779 - DNA, 813 bp, mus musculus
gggcaaatgtttatcattctctacttaccctagacattctggaagggaatggggaggcagagattcctgaagaatatctgggttctgacatcctctggtttggaatgttttgctgccaactcctttcctccccaccccttcccctcttcttagaggacctaagctttctggatatcctagtccctggcccacagcagtgaacaagacagtcaaaatctttgccctggtacggcagtgagaaagacaatacacaagtaatgaatgaacaaatattacaaatagagatacatgctaggaggagaaagggtggggcccctgatgcagaagaatcggggaggtggtgatggtgatggtgcttcatttggagaagggtccaggaaaacctctcaaagaggagacctgcaagaggagaaggagctggtcacgggaaaagcgaaggaagagtgttaccagcagagggaaggggatgtgggaatgcccagaggcagggaagagcttggtgtgttccagcaactgacaggaagctaggaggccggcatggtgggtaaggggaagggaggcacgggaggaggctggggccagggccgattgcactggacttaaaagccacagcaaagacttggatttggacagtgctgaagctccgagaactgggaagcacatctggtaattgaaaagatgaaaaaagtaataataaagtgctcactcacaggcagccgtgatgaaggaaatggatggtggccaggcaggccatatgcacttggctaacagaattaatcatgttcggtacggcacaaaacaagaatgacaagc

SEQ ID NO: 7780 - DNA, 1509 bp, mus musculus
ttctcctacaggtttttatgagaacatagatttgcattttatttggataaatacttaggaattggctcagtcagtggtatggtaaatgtacatttaactttatttccttttacaggaagctgtcaaattgttttccagagtgactgttttccagactaccattttgcaggcccccgagaaacacaggagaattccacttgctccacatccttgccaacacttgctattatcatttccctgcttatttttagccattaagacaggcacatagtggtatttccttacggttttgatttgcatttccctagtgaccaatgatatggagtatcttttcttgtgtctgtttttatttatttattttttttggtgaaatatctgatcacattctatatccatttttttactgtactatactttttagaacagttttatgttcacagcaatattgagtggaaggtgcagagctggctttcccatatcatccctgcttccacatgtgcatagcctcccctagtatcgacatcctccaccggtggtatacctgttgcaattgatgaatgggcactggctgtcataatcacccaaagtccatagtttacattgggccacgtttggagttgtgcattctaagggtttggacaaatgcatgatgacatgcatccacacatataacatcttacagtgtagtttcactgcttgaaaacccccgtgctctgctggttcatctttccctccctgcgtacccctagaagccactgatctttttcctgactccttatttttgtcttttccagagtgtcatatagttgcaatcatacagtatatagccttttcatattggcttctttcacttagcaatatgcatctaagattcctccatgtcttttcatgacttgatagcttatttctttttaacactgaataatattacattttctgaatgtatcacattttattttattttatttcattttatttttttttgagacagagtctcgctctgttgcccaggctggagtgcagtggcatgatcttggctcactgcaagctccacctctcgggttcatgccattctcttgcctcagcctccccagtagctgggattacaggcacccgccaccacgcccagctaattttttgtatttttttatagtagagactgggtttcatcatgttagccaggatggtctccatctcctgacctcatgatccgcccgcctcagccttccaaagtgctgggattacaggcatgagtcaccgcgcctggtgtaacacattttattgacccagtcatttactgaaggacatcttggttgcttccatgttttggaaattaagagtaaaggtgctaacatctgtgtacaggtttttctgtggacataaattttcaatgcctttgggtaaatatcaaagagcgtgatttctggatcgtatggttagagtatgtttagtttcgtgagaaacttccaaactgtcatccaaaggggctgtactattttctattctcaa

SEQ ID NO: 7781 - DNA, 142 bp, mus musculus
cttctagaagcattatagttttaagttttacatttagacctatgaaccattttgagttagttttgtataggggacaagcatcatgaattattgataccctcttacaccaattgccaggtcaccgtggagaggccagagcaca

SEQ ID NO: 7782 - DNA, 924 bp, mus musculus
attttttgaaaaaagttcaaatccccagaccacaaatgcactatagacatttctgaatgtggaagaaagttttttaagctcactaccaacagagatacagctttcttttcaccgacgtgcagcaagaatttcctctaacattctatacactattgcatctgattctcaccacaaccctatgtggaagatactggtattattctgatttttgtagctggggaagccaaaaaacaaacacagtaataatttgtttggggtgcagagctggtaaaccttggggtatgcactgggaccctggatttcatagctcattcctcattgtctatgccaggcagcattccagcaatgagggatagagggatcaagaggtggatcagaaatagtccttgctctggtggaaagttcagagcaagaaagaagagatgctcaagatctcagcaaaaaaggttgttgtagactgaatgtttgtgtgacccccaaattcatgttgaaacctaatcctcagtgggatgctatttggagatgggggcctttgagaagtggttaggtcatgagagtggagtcctcataaatgggatgagtgcccttataaaagaagatccagaaatgtccctcaccccatccaccatgtaaggacacagtaagaagacatctatgaactaggaagcaggttcatacaagacaccaaatctcctggtgcctcgatcttggacttctcaggcttcacaactgcaagcaatacatttctgtgatttatagatcacccaatgtacgccaatatagaatcagccagaatgcactaagatagaattagtcctgggaatattgtactgttgaaacaaatacctaaaattgtggaagtagctttgaaactaggtgacaactagaggctagaatagttttgaggtgcatactagaaaaagt

SEQ ID NO: 7783 - DNA, 1021 bp, mus musculus
attattttttaattttttttttggtttttgtttttggggtggggggtgtggatgtacagcggataacaatctttcaagtcgtagcactttgtttcagaactggaatggagatgtagcactcatgtcgtcccgagtcaagcggccttttctgtgttgatttcggctttcatattacataagggaaaccttgagtggtggtgctgggggaggcaccccacagactcagcgccgccagagatagggtttttggagggctcctctgggaaatggcccgacagcattctgaggttgtgcatgaccagcagatactatcctgttggtgtgccctggggtgccatggctgctattcgctgtagattaggctacataaaatgggctgagggtacctttttggggagatggggtggcctgcagtgacacagaaaggaagaaactagcggtgttcttttaggcgttttctggcttgacggcttctctctttttttaaatcacccccaccacataaatctcaaatcctatgttgctacaaggggtcatccatcatttcccaagcagacgaatgccctaattaattgaagttagtgttctctcatttaatgcacactgatgatattgtagggatgggtggggtggggatcttgcaaatttctattctcttttactgaaaaagcaggggatgagttccatcagaaggtgcccagcgctacttcccaggtttttattttttttttcctatctcattaggttggaaggtactaaatattgaactgttaagattagacatttgaattctgttgacccgcactttaaagcttttgtttgcatttaaattaaatggcttctaaacaagaaattgcagcatattcttctctttggcccagaggtgggttaaactgtaagggacagctgagattgagtgtcagtattgctaagcgtggcattcacaatactggcactataaagaacaaaataaaataataatttataggacagtttttctactgccattcaatttgatgtg

SEQ ID NO: 7784 - DNA, 1967 bp, mus musculus
ctgcatgatgtcatttcggatgcattaagctggaacagctcaaaattgaataattaattacactcagcttcaatcgcagtgactaattgatcaggggctgccagcagacacctggacaggattaactgtgcacaatgagggctgcgggcaggtggtggcccctctggacccccagtccctgtgtgtgacttaattaaggctgacttgatttctctatcctcactggagatctcaggcaggccccatccaggcccaggggctacgtgcgggctaggcaccgagtgtggacacgtgcaaacggctgcgatctggaaggatgctagcccctgaccactgggccatcctgttctaggcccagatcccaatgctgcctccaactatgattatttctgtggccttgggcaagtgtttaatctcatggagccttagtctccttgtctgtcaaatgggggttgtcattgttgtgtccagagctgtgttcggccctgggtgtaaactgcttttgtcactgggatttttggttccctctggggaggctgtccttgttctcacctcccttgcttgtctctggctggagcagctggcattcccagacctgtccaccagccctgacgctccttatttattccctggagccacctttctgtgtacacagcagcatttgggggcctgacttacaatcctgctctctcaacgcacagccatcatgctgggggattcacaagcacatggatggcacatccagctcctgaaagggccagcaagtacagttgcgcatgttgtgcactgcacaattcagactttgctgtgagtggtataatgtgcaactacacaatggggcataccagccttattgtcacattgcagagtctcttttctgtctgcctcctcactgtttcctggtcttctggagttcagtaacctctgtctccatgtctcctcaaccccactcctggagtcatatcacagggggaactgtcatgtggaaatggcaaaccccaacgccttctgccctgccggctcccagcacatctgccagtgggtgtggagagcacttgtctctttgtttctgctctccccattccctgcccatctggtggctcctcttccttggtctgcagacacacttgagactctcccctgctggcatgcaagcaccctggggtgactcgggctgcccctcccagcctcgtctctcaagtgggtctccactgacccaactctacttcatatcaaatgcacttcgccccctgccttctgctcccctgcagaatcccacggcacggcattctccccgtgaccaatccaaggggcactctctgtcctcatcacactgcagagtctgcagccttgatcgctgcggcctctctggcccctccgcatccttggagctccctccttcctgactctgcccagcagtctccttgctgtccctctgcttcatgtccctgggcactgtgccctgtacccctttaactgttgcaatcacccgggtctccagccttggcctttggctcttcccagctgagcagccacacagacaaccatgatgagcccattttgtttcttgcctgttctttgtctttttcctctagaaaatgaggcagtcatcttttgctctcctaagtggagcagactaaaatgagccaacaggccccccattggcatgtgggtgaggggcctcagccatgatggaggaggactgtgtggtgactgagcagtgagggcttgagctcccagatgcatggccccaggaccttcctcaacctcctcctgagccttccttggagcacggcgagtccctggcgctcctgggcctgccattcccttgttcttccctgttcttgcctttgcatctggcacatttgccagccttatgatcccagcactggcgtgtcctgtccattggagcacagggctgtgccaagtccccgcagatgaagtcactcagaactcaggtcccttct

SEQ ID NO: 7785 - DNA, 851 bp, mus musculus
tttgtcaatccaaatggctgtatttctggaggagaggggaggaaaaagaaaaggcaaataacgaaaatgtgcaccagaaaaataccaagtgttgaccaaaatgtatggccaagatgtacccaagcaggactctccctcctggccgttgcaaactgtcatggccttggttgcatctgtctgttaaagattaacgagcccttggccttagcatgtcattcccaggtatgccctccagtagacacgctcacagacatgcaacaaaaagtgtaaactacaatattcccagcagcactgtttgtaatagccccaaactggaagctaactacgtgttcctcatcagtagagtagataaactgtagtacattcatgcattggattaccatataacaaccagaatgaaggattgaaaaccacaggcaagactgtggctaaatctgactaaatgactaaatgttgcaacaaaagaaacaggcgcgaagaaggcacatactgtgtagctccgtttatgtaaagtacaagaacaggcaaaactgctctgtatcattggagggcaggctagtgatttaccgtggtggggagcaggggagtggggcaatttcagaggttatgggatattctgtctcttgatctggatgccagttacacaggtgtgttccgtcaatgaaaaggcatcaagctgtacactcctatgcacttttctgcctatgtattatatttcaaagaaacgtttagaaaagagagagaacaggaaaggtagtacttctctggaagaaaatagctaaagaccttcacagtaagaataaaatcagccccatttttgcaaacaggggtgcaacacgcctgcctgctcc

SEQ ID NO: 7786 - DNA, 987 bp, mus musculus
agagcagccagacagcgtggaaataatccaaacagagaaagcattcaagaacttggcctctggttgacttaacacactacttcaagtatatggcaggtctgtataataaactcctgcctgtctagtcttcagcctcatagaaagcaagaaagcaggtggcgtatgttgcagaacaattcttgggtagaacaaggggacatttgatggtttgggtttttcagtaagaaagatgaagtcctggagtatagggtagagtggtacagtggaaaatatttcagcttgggggttagaaaataaacatgccgattcttgctttgccataaatgatgtcacctaacttgtgtgaccctgttttctcatccctaaaatgatttgataagtttaagattaggctatttttaaatgtatggaagaaattgggtgttacccttcttgaaagacattttccctgcaagtatggcaggctgtatctttcagtgtaacaaagttctattaaaggtcataactgctgccctgtaacttttgccttattctagaaacttctactccttgaatgacatgtgttggtacatgtttcttctctttcagatagaatggttaattttgacttgttgcttctgcacacgtgtcctggaaataaaagtttcttcccactacttattgctgatttatttcataggaagtcttaaggaaagaggcaaaaaacgggctcatgggtcacttgaagttggaaaattctgtggagattgacaaaggagactcacttttgagcatctgttctcagtgtaaccttcaaatctgtggaaacataactaggcacattttatgattatttagaatgttaataaattgctctgagtttcctcaagtccattttgtaagatcagaccataggtgggtgttgtttcttttaagtgtgtgtactgtgtccaatgttacatttttagaagtgttcatgctttttgtaaagtgattcgttttaagcac

SEQ ID NO: 7787 - DNA, 1530 bp, mus musculus
ggggaatgacattctccctcagttacctgaagctaaacccctttgtctgccccattgtcagccttgctgagacggcatcatacccagggcgtcgtggctagacaccaggcctgtgaggtgcacggccagctccacccacgggcttactgcagtgtgtcccggctccatcccgatggccacaccacagcagacatgtgtgggcagtggggctgggccgtgggcctgcggtgaggtgcaggaaggggccagtcccgctgcctcagcaccccttgtcctggactcttaccccccaacaccctgtcctcttcataggcagccagcacagggtttaaaaccacacaggatttacatttttgcaaagcgtaacgttgaagagggcccaggtcacttagtgcaatgtatttataatcttggccacacgtgtctggcgtagacacctgaagttcctcggttctccgccttggtgggtcttctctcctgcgggcacagtgcagatgcagatgagtttcagagctggtcaaaagtaattccatcacctgtaggatgcagaactgctcattctgcaccctttgctagtgccctgtgtgggtggcctcccctgcccctccccatcccttagggcaggtgttatcagccctgttggagaggaggcagctgaaggccacaggggccgcgtgctctgtatcagtcacatgtcacatctgtcaggctccagagcccatgttcttttcactagaatctgtttcactagaatcttttcactgggcatctgtttatcactgagtcagcaaactagacttcttcctgcttccttgcaagcgaatccccacatactcggcaggcaagggccttcccagaagcccgtgtggagagtggttccctgaagggcagtgtctggggctgcttttgacttggttctcagaggcctcacaggtgcatctgaaatgctccttctgagacagtttggtgaccaggccagtatcttttgtctttcttgcaaaccctgtttgatttccctttttgtattcagaagaaaagtcctgatcttgtagcctgtttggagtctgtgatagaaacagagcagaaggcttttaaaatgcatcttcagacagtgaggtgtgtcctgatgcaggattaaccttgaactccggaggcagaagagccaggaaggagcactgagctggagctctcttgcatttggggcttgccgcctcccagctctgcgtttctgcaagctgatggccaggagccaagctacgctgaggggctgtgggggcagtgagcgtgccacccacacagagggactgagcggaagacgcacaccgctcccttgtcgtgtggcacagctgtgtcactgctcttctaaacgtggagaaagccccttaaactccaaatggccaaaggctttgcagtccttggtttcacatccgtggcaccttgggtggagttgcttctgtaagccaacagatgagcaggtgaggagcacagcgcggaccccagagctccctgcaggacgcccttagcctcgct

SEQ ID NO: 7788 - DNA, 829 bp, mus musculus
tctaaacagtcttaaactgaataacccctgtcattttctcagctcagcacagctgactcctccctcagggtttctgacactctgaggatgtggtttctcacactgtgtctctcgcacagtaatacacggccgtgtcctcagatctcaggctgctcagctccatgtagactgtgctcgtggacgtgtccctggtcatggtgactctgccctggaacttctgtgcgtagcttgtgctaccaccactagggttgattattcccatccactcaagcccttgtccaggggcctgtcgcacccagtgcatatagtagctggtgaaggtgtatccagatgccttgcaggaaaccttcactgaggccccaggcttcttcacctcagccccagactgcaccagctgcacctgggagtgagcacctgcggagaggacacagtagagaatgacagtcctctaaactggaaaaaatcccttcctcagccctggaaccagttggccctttacctggagctacagccagcaagcagaagaccctccaggtccagtccatggtgaagaactttcctctcagaggcttctgtagagaagggatgtggttgttggatgatgctttcagggcccagatgtatccatatttacctcagtagatctaaggttatttgcatattcatgagacagattatttcatacctcaaagcctgatcgaggttgagaaagaagatagatgtcccatctgccacacaggagtgggatgctgatggtccaagccctaatcctgcttgaagaaatgcatgtcctgctccatttctgtttgcggacaggatcctttcactg

SEQ ID NO: 7789 - DNA, 784 bp, mus musculus
taacccctgtcattttctcagctcagcacagctgactcctccctcagggtttctgacactctgaggatgtggtttctcacactgtgtctctcgcacagtaatacacggccgtgtcctcagatctcaggctgctcagctccatgtagactgtgctcgtggacgtgtccctggtcatggtgactctgccctggaacttctgtgcgtagcttgtgctaccaccactagggttgattattcccatccactcaagcccttgtccaggggcctgtcgcacccagtgcatatagtagctggtgaaggtgtatccagatgccttgcaggaaaccttcactgaggccccaggcttcttcacctcagccccagactgcaccagctgcacctgggagtgagcacctgcggagaggacacagtagagaatgacagtcctctaaactggaaaaaatcccttcctcagccctggaaccagttggccctttacctggagctacagccagcaagcagaagaccctccaggtccagtccatggtgaagaactttcctctcagaggcttctgtagagaagggatgtggttgttggatgatgctttcagggcccagatgtatccatatttacctcagtagatctaaggttatttgcatattcatgagacagattatttcatacctcaaagcctgatcgaggttgagaaagaagatagatgtcccatctgccacacaggagtgggatgctgatggtccaagccctaatcctgcttgaagaaatgcatgtcctgctccatttctg

SEQ ID NO: 7790 - DNA, 672 bp, mus musculus
gcgccccctggtggtcctggggacccctgcagggaggtttgtgtccgggctcacactgacttcccctcactgtgtctctcgcacagtaatacacggccgtgtcctcggctctcaggctgttcatttgcagataggtgatgcttttggaatcatctcttgagattgtgaatctgcctttcacagacgtggtctattctgttgtcccaccattagctttgtttctaatgaaacctacccactccagccccttcccgggagcctggcggacccagctcatgtagtagtcactgaaggtgaatccagaggctgcacaggagagtctcagggaccccccaggctggaccaagcctcccccggactccaccagctgcacctcacactggacacctgcaaacaaaaagaaaccctggtcagaaactgccacacaaatccactgtttctctcactcttatccactcacactcaatttcaatagttctcaatgaattaccttttaaaatagcggcaagaaaaacccagctcagccatgactccatggtgagtcctctgtgttcagtcctgatcaccaaatgaaaacacctgaaaatcccagggctggggctcctcttccagtgctgcagggtcagggctgggctggttttcataagccgagggagggctctatttgcatgt

SEQ ID NO: 7791 - DNA, 738 bp, mus musculus
ctgtaatctcctcaaattcactgcagctgcctcctccctggggtttctgacaccctcaggatgtgggttttcacactgtgtctctcgcacagtaatacacggccatgtcgtcagatctcaggctgctcagctccatgtaggctgtgctcgtggatgtgtctctggtcatggtgactctgccctggagcttctgtgggtagtttgtgttaccattgtaagtgttgatccatcccatccactcaagcccttgttcaggggcctgtcacacccagtgcatatagtagctggtaaaggtgtaaccagaagccttgcaggagaccttcactgaggctctaggcttcttcacctcagctccagactgcaccagctgcacctgggagtgggcacctgtggagaagacacaggagtgggtgaagtctcacatgactggcctggtttctccctcagccctgggactggggagtcccttacctgttgctgctgccaccaagaaaaggatgctccaggtccagtccatggtgaggagctgtgatctaggggattctcccaaggaggggtgtggttgttgtgtgatgctctcagggcacagagatatctatattcacctcagttatttgcatattcatgaaggatgctatttaatagcccaattcctgccccaggatgagaaagagcaaatacatgacacatggacgacacaattgtagaagctgagggttcaagccgtaatcctgttag

SEQ ID NO: 7792 - DNA, 154 bp, mus musculus
acagttctggaggctggaaggccacgatcgggggccagctggcttgggttccggtgagggccctcttccggctgcagatggttgccttctgattgtatcctcacgaggtggaaagagagccagagagctctcttggtctctgtcacaagggcat

SEQ ID NO: 7793 - DNA, 478 bp, mus musculus
attgggagtagtcacaagttggtcaatccaagtgagtggcacaatgattgtttcaaacaatagaactttcaaaggatgcccctgcctgttctggaagcggttggctctccactactcacacaggcttacattatggttaagagtatccaggcctaagcacggaaagaaatattttaatcccatttgggaaatggcttagaagctaagaaagtttcaagaactttctacctctgaaaatgtgcatttgctaagagtattgacctcaacttagccacatgtgtgattctatccagaggctgatcccgtgcctcagtttccccaacttctgtgaaagctgacttggtgaatgggatctggtttctgtccttgccctctacgtccctgtgcaaacctctactgaagctatatttctacttgcagacctctcacttctttatatcccagccctagtgactcctgcttcaggaagcgcctcccc

SEQ ID NO: 7794 - DNA, 708 bp, mus musculus
taaacaacatctttacacagtattcaggattagctactgctgacatttccaaagacttctttttctgttattgttgttgttgatggtttgaagccacaaattgcagacgattgtaaatttaaaattggctaagaaatcaccttactgcatgatcttcactatttgactgaaaattttgtagagacttgagatattaaaaagtttgaaaccctcatgagggaattgtcttgcttaaaagaaagcattttgtttaacatgggagctatcgctaccttcgttttcatctttttcgtgactaagtctgacctttttgatcggttggcttgataaaaattttaatgatccccattgtgtggaaaccagctagatgacactcttttgagtgtgaatatgtccaaatctttctttcatacatataaactttctttcctctctttactaaaacaagatagttagcttggtctgaagagcacttccttttttcattctgtcacactcttatctcgtgagaaactttacccattaactgataaaaaaaattcagttgttgtatgcatatactctagaaagatttaactcagataaacagtcaaaattgtctaaaagagacagaaacaagttatcaggctatgtttctctttgtggctactgagaagttcatttacaagatagcctttgtcacaacagctataagataacaataagagg

SEQ ID NO: 7795 - DNA, 749 bp, mus musculus
actctgcaagttggcccaggccaggtgtgtcaccattgcccaggccttcagtggctttccagtgctccctccacatccacgttactcggctggattttctcaagttcccccacttgctcccaagaatggcccctccaggctgccctggctccaggcagacaggcttactgcccagatctgccctgggttgtccccaccccatccccacctgtcatcttggcgcatgtccatcctggagatcccaactgaatgtgggctctttccctcttattccttggtcctcagatttgtcaggccactcttgcctcagggcctttgcacctgctgttcccacccccttggcatgagccacccccagatgctcacatggctggcccctcacttattgcccactccctgaaagccctacataaattggctttgttaaccttgctttgtgtttctcttgttaaccttgctttgtgtttctccttagtactcaccattcagtgtgttatttatttacttgtttgtttattgtcagtctcttaccactcaattgtaaaagactttgttcacctctggatccccagtagctagaaaagtgcctggcacacagcagagccttagcgctgttgttggatgagtgagtgaacgaaacacgggagcagtagtctccttgcagcacatgtcctgctccctgtgcctccttttcccgcgtcccagagctggaacctagctgtgttcacatttggatcctcctggcatgt

SEQ ID NO: 7796 - DNA, 313 bp, mus musculus
tcctctaacttttttctttttcagtgttgttttggctaatctagtttctttgtctttctatataaatttagaatcagcttgtctgtgcctacaaagaaacctgctggagtgttgactgggattgcattgaatttatagatcagtgtgactatacttgacatcttaactgtggtatatcttaaaatccataaaaacaatacatctctctatttatttaggtcaattttggtctctcttgtctgaattttgtgaattgcttagttagaatttttgactgtgtcctggctctgttgttctccaggtctacatggac

SEQ ID NO: 7797 - DNA, 313 bp, mus musculus; identical to SEQ ID NO: 7796

SEQ ID NO: 7798 - DNA, 1256 bp, mus musculus
tgacacagagcagagcctcactcaaggctagtttacttcccccttttcagttcctttcactctttcattgctccattcttacactcagctgccattaactgggccattgctctgtgttatgtgctagggatacaacctaaaattaggcagggtctctaccttctaagagtatttgggctgctggcctaaaaagcaaattaatgaggcagttatatgatgcttagagctatgagagacaagatggtgtcaggcacaagggaagggcacccatgctagactggagtggaggagagagtgagagaggctctgaggaagtgacatctcatctgaaaaccacagaggactggggattttgcaaagtggagggctgagctccatgtaattggggaagaggtatggacagtggtgcaaagctagaaaaagggaacagggtccatgtagacctggagaacaacagagccaggacacagtcaaaaattctaactaaggaattcacaaaattcagacaaaagagaccaaaattgacctaaatagagagatgtattgtttttatggattgtaagatataccacagttaagatgtcaagtatagtcacactgatctataaattcagtgcaatcccagtcaacattccagcaggtttctttgtaggcacagacaagctgattctaaatctatatagaaagataaactagattagccaaaacaacgttgaaaaagaaaaaagttagaggactcgcacacttgattttaagatgcattataaacctcctgtggccaagacagtatagtattgggatagtaaaggatagacacgtttactactaaaacaaaagacaactgatttttgacaaaggcacaaagacaatccaatggagaaaagatagacttttccaaaaaatgatgctggagcaaatggacttcagtaaagtaaactcaatctacatcttacaccatatataaaaattaactctgaatggatcatagactaggtgtgcctgtatgtttaggtgtccatgtgtgagcatgtgcatgcatgtgctgtgtgtgtgcatgtccatgtgagtgtgcatgtgtttaatagtgtgtatgtgtatttgtgacttctgtgtgcatgtttatgttgagtgtgtgtgaatatatgtgcatgtttgcatgcgcatgtgtgtatgaatgtatgtgcacattcgcataactgtgtgtgactgtgcgtgttaaaaagggacacagggaagggtgtctaagggacatttgg

SEQ ID NO: 7799 - DNA, 870 bp, mus musculus
gccattgacttgtatgcagaagcaatggctcttcccctctatcgccgaaccataagaggaaggagcttggatacaagacaagtgtacaccaaatgtgaaggtgatgaggttgaagatctctatgagcttttgaaacttgttaaggtatgcagagtaaccaattaagtatattggatttagtgtgtaatttaacaaattacatttgccgaattatttagtaatccgtaatttgcaattgttagtagcccaactattctttaaaaggattttgtctttttttggttagaaaaaaactgcaaatgattagtatgcctttatattaaatgatatttaaaaataagacgttttgtatagtttggcatccaggattatcaaatgatattaaaataagttttctgttcctaaggaaaagaaagattagagctgatggccatttaatctctttattaacaaatattttttgaatgcctactatatgcctggcatatagtgctagacactggggatagaatggtggacgcatacgttaaaggcttattctaatggagctcactttctagtggaagaggacagacaataaacaataaataacatgcttgatagtgaagagtaatatgaggaaaaatgaagcagaatcagattgcacatgatggcagggcatagctgtggaggtggtgctacgtatggttgtcaagcaagacatttctgataaggtaacaagtagatgtaaagaaaatgagagactgagccttgcttaaatctgttggaacaggtatgaatttaatgcataagtcacagaatgtaagagtttggcagccattttgcactgattaatttctaggagcgtatatttgggctcatttatctaat

SEQ ID NO: 7800 - DNA, 870 bp, mus musculus; identical to SEQ ID NO: 7799

SEQ ID NO: 7801 - DNA, 923 bp, mus musculus
atttattactttttgcatttttcttatgacacagaccacagagctataagaaactgaccattgcatttcacgtgacttgggcttaaaatatgataaaggaaaagagtaaaagttgtcatggtatcttatattaaaaaaggtattctatgtaacaaagcttattaaattcaatgagcttctctgtaaaataatgacctttttatcaaattttatataatgaatatttttctgcaatgaaattctacttgtttctctcttataatcactatcactaagcaacagacttatttgctgcttgcaataatgagatacagatgaattcattataattgtttcatcccaccatccaacaacagttacaaataaactctcctaaagtttttgctctttaattaccaaaaaaagttcagccagaaaaaagactcaaatacctaaagtttgatttcactgaccccgaacaattacagtaactaaaactaaaaatggcagatactacgcaacatcttccacttttcctggcagaaaaccttcttttcctcacaagctaattcaaagtatgaatcctataagattcttttcatctttaccacttgctgatggcaaactgaattttaagtaagactcccttatgaagcaattgtgatgcctcatgcagtttgttatacttttgaactatagcaacctggtaacataggtgaaagcccataatgattgtgagcatgtgtgtgtgtgtgtgcgattttatgatgcatgggtttttattgttcctatctttgtgtcactgtgtacccaaagatactgtcactgttcttctccccaccagaagtcagaagcataacacctctttgtaatcttaaaaacagtcatactttctataaatattcaaaatacaatcgcttacctggattaatagaaaatatttt

SEQ ID NO: 7802 - DNA, 825 bp, mus musculus
ctccataatgtcctgctactttcagaacaactagctgtcgaacagcaaagcacatgtgacctaagggatttaggatttaggaaactctcaaatgagggggacacagaaggggtaacagaagagttccataagaaaaacatagcagatggaaatgagagaaaaacaaaataaaaagttcagatttcatacatcctgtgtgtgaaaaaggagaaaatgaggcttggagaagctaaataatttggctaaggtgctacaaattggcaatgggccaaaccgatatttgaacttggcttaaataacaccagacaggtttttaatataattcctgaaccagtccaaaaattaatctccattctgttactaaaaaaaaggatctacttgagaattgacttacagtttattttaaagtcctcagtttgaattaccaggggatgagaaaaagctccatttcctctgccagcaagggacaggcacaaacggcaggcgccacagtccttagtgagcactggctggtctcctcactaagtcttgagcagcctgcagtgacctgcccttgaagtggtggtttaacagcctttgcccaagcactctctggctctttgtacatctttaatagtttccttgacggactatgaagaactgccagatgacagttctatttcatttttgtcactgcctggtgctcctttttactctcaggctttttctcaagggcatgattctataagtcaatgtggcaatgttcacgatgggtattgctctttcaaccactgtatattgatgcagtgtgagcaagtcacggacatgtcaagatttcaggccttc

SEQ ID NO: 7803 - DNA, 318 bp, mus musculus
ttcttttaaaatgacaacattactgaattgtattttacatatcataaaaatcactcctttccagtgcaataaaataaattttggtaaccttactgcatggtctagccaaaatcctaaattagttttagagcatttcatccctacaaataagatcccttattgccatttacagttatttccagtttccatcgctagtctcgtgtaacaactaatcgactttctgtctctataaatttgccttttccaggcatttcatataactcaaatcatatattattagatctctcgtgtctagctctttcaatgaatgtaatgttt

SEQ ID NO: 7804 - DNA, 941 bp, mus musculus
ttaagaaagagaattttcagagtcaaaagaacagaaatcagtaatctgttctcttccagggtggggagaaaacctccttccccataggttcgagactatggctagatggtgaagaagggagctcagtacccaaccttggggagacacagaaagggcccatgccaggcacttagctagaggcaagcgtagcttttgggccacaagacctgatggccactggggtactggcctggaaacaagtcctcatcttcccagaaatgtcttatttttgtctgcagcagctggctggagaaagattttggaaaggtgtgtacctggagcacccaaaggcatacccttcctttttccttggcataggctttataacactgaggaaaggtcatggtttggcaatggagtcttcaatagtcttcatccctgtagagttcagtggcttttagggtgacaggagaggagacgacttgaaagaccaagagtctttcagcttctcccccactgaaacgctatatgctggggccacagttcatggcagaacacacactcacacacacatctcgggaacccaacaactcgggagcaggtagttctgggtattgttggtctggcatttgcctacttggcatctaagctgtcctaaagctccttacaatcacttctcactatttccaggcccatgtggtgaggccctccagctttcactctgtccgtcaggtgatcctaaaggcacagcataggaaagacccttactgggatgaccactgcttggaagcagggaaggctaagaggcctgcccctacccaaggctggtatagatgtcctctgctctgcttctcaaagactgggaacaggttcagcaactcagtatctgccatgtcatcaaaccaggactgcacaggcactgcattctctgggtggaagatgtaagaagcagacaagttgtc

SEQ ID NO: 7805 - DNA, 941 bp, mus musculus; identical to SEQ ID NO: 7804

SEQ ID NO: 7806 - DNA, 2282 bp, mus musculus
cagttcctgacggagctgaccagacttttccagaagtgccggacgtcgggcagcgtctatatcaccttgaagaagtgtaagcagcgggaggggagccgggcgatgctccctgggttcccggtgtctgggagccaccggagtctgtctgccgcggaccgccgccttcctctacctttccccaccctgtactgagcacattcggggcttcgggcccggaaaatagtagggattgtagctggctcagtccccagcactgagccgcctaggttgcttctggtaacaatgggccccaagcagcccagggctctttgtcagggatcccagacgccgccactttgagtggaatttaacgtgcttcgatattacatgtttccgtcgtggaaataatagtttctccagggtttcgccagaccgtgatagcagatgaggtgtttaacaaaactagagcagcggggctgggttaggtcatcacttaccccactcctctgttttaactgtttgtctgccgctcagccacgtacgcggccgtgttcaccaggatgcattttttccttcagatgacggtcgaaccaaacccattccaaagaagggtactgtggagggctttgagcccgcagacaacaagtgtctgttaagagctaccgatgggaagaagaagatcagcactgtggtgagcttaatttctaaggctgtcttttgaaatgtaaagacttgaacttaacagaggatggggcgtttctgaaccaggcttttatttgtttttcccttttgccctgtgtggctatttttgagaccaggaccttcctatactttagtagtggaaacctcaagaataaaataagaaggtagaggtcagacagtcgttagttctgctaaagctcttgtggaaatgaaagtagcatattggtccttattcgtagtactgtaaggagcagctggcataaatatttgattccttagccccttactgtgctgggccttcaataagcagtttcttggtaccaggtgatgctattatttccttatctttgtggttcacatggcgaatgtgcagctagatgttaggtttgacacttgagaaaatatacatttagtcaagagccctagtctttcagtggaggttgaataaggcaaaggaagaggctccttgaattgagtgaatactactttattctgctgtggcagaaatcacattagtgtaggatactgactgcatgaaaatgtagactatacttagttggaagtcttgagttatcttgagaggacttctacagtaaaacaagcttatgtggttttacagattaagttagatatcatgaaataacaaaaacctaaggacaagttatcttgagaggacttctacagtaaaacaagcttatgtggttttacagattaagttagatatcatgaaataacaaaaacctaaggagtgttcttcagaggtagaatttattttgtggtagctcgcattgtgcttaaatatgcttgaattaatggaaggcaggtttaaaaataagatggggagggagtagtttaaatatatcttctattaatgtataaaaaattaatactgagaagtcctctgacttttctcagaacccagggagaaaacccaatgccacctttctaagggatttcaagaggtgagaaacaaagctttttttttttttttccccaaaaggagcctactgcctttcacctcttggtgcaattctcatgtggaaaaagatgcagagctccttttcttgttctctaggcagaggaaagtagagtagaaaaataaccattcgtgtattatgaaccctgaagttggggagaagtattttaaagataaggatattgtcttccggaggcttttgagatactatctggggtggagaagaggatgcttatatggataataggtatgacctcttttttccttctttttcaggtgagctccaaggaagtgaataagtttcagatggtgagttttgggtgttccttatgtttcccttctcagggcaagagtcagtatgatagtgaacactgggtaagattgatacttgggttcactgctctccggagataagttttaccagtatgtttcaagtaaaagctgccagggtgtgaatttcaatgctaataccgtcttcctttctagtttttttaagttagattttgtcttaggctgtagatatatgctacctatactatagttgaacaagaagttgcctgcaattttcccttggaaaaaaacgtaaaaaatgtgtgcaactgtctgtgggtgttgcagaagctgc

SEQ ID NO: 7807 - DNA, 2182 bp, mus musculus
ctcccctgccccagcctctgaccccggcttcccccgcagtccctagagcgtgaagtgggccgcctctgccaaagaagccccgaggcagcccacggcctcaggcacaggcagcaggaggtggctgagagctggtggcagctccggagcagggcccagaagcggtatgaacccgcaggccttgccctcgccgacccatcctccagcatctcagtccccacacctcccctcagcccctgtgttcccctaggattccttctccacccttcaaataactgtactgtcctcccagtaactcccagcccatgggccctcctgtggttgaggggattaagggacagaagacaccagtgggcatgggggagaggggtttgaaggcctgacgactagctgatgagcgctgtgggcaggagggaggcgctggatgccttgcaccaagctcagaaactccaggcaatgctgcaggaattgctggtcagcgcccagaggctgcgggctcagatggacacgagccccgctcctcgcagccctgtggaagcccggcgtatgttagaagagcatcaggagtgcaaggtgaatgggcagctggcccaagcctttcccaggctctcagctccgccctgccctccccttcctctcatctccttgctcttgggcctcctgagtgtcccgccctgcctatctcctccagcctcccgctcctcagctgcttccccacctctctcctgcctgctgggctgcttccagcccccagtgatctgagcccagtcctgttccaggccgagctggactcctggacagacagcatcagcctggcccgaagcactgggcagcaactgctcacagcggggcaccccttcagctccgacattcgccaggtgctggctggcttagaacaggagctgagcagcctggaaggggcctggcaggagcatcagctacagctgcagcaggccctggagctacaggcaggcacagtcccatccccagcctgcatcttgcccccccgaacagggcctgcgctgaccccacagcctctggtcaaggctaagactggaggggctgctgtgccagggacttccccaccactcagcactcctgccttccaggaccctggttccctaacctgtgccactggaacagtcactccaactgcagtggctggaccctccaccgactgtctcttgccttttcctttgttctcagctgtttctgagctcagtggagaagatggaacgttggctttgcagcaaggaagactccctagccagtgagggtctatgggtaggtgcccagcaggaatgggcaggaggggggaattaccagagcagcattaggggtcaaaccagccagtgctgcctgagctccctaggccagggatcctccccttcggggccatctccccaccctgggccacatccgtcactgggcagttacttacccgtcatctagagcagttcccatgcagctgtgggcaggccccaccgcgaacaccaaggagcttctagagtgcctgtgtgggcctgacccattcttgccacctcacccctgccctcctcgcttcccaaatgcctagaggttggcttttcccgccactgccccaaccctgaagcagacgagtgtaacttataggagacctcagaggataactggggactaacatggtcctccagggagtgcagaggagggagctttcaccttaaatgaaaaagctctgcttgcctcagagattctggctcttgatccctaatccaaatgcctcccctggctgggaatcactgtcctaaagctggaaacagccttgagggatgtgagggatgtgtttgggcggagcagccgctctgtggatgagcatttggtaggatggttctaggtgggaaggcaggtagcctgggatgggagggggaggctcatggacagtattgggttccccactcccaccaggaccccttggcccccatggagccccttctgtggaagcacaagatgctggagtgggacctggaggtgcaggcgggaaagatcagtgctctggaggccacggcccgcggcctgcaccagggtgggcaccccgaggcccagagtgccctgggcaggtgccaggccatgcttctgaggtagtggtggctctggggtgaggggtgctgtgggcaggctggcacaggcatctggcatcccggttctt

SEQ ID NO: 7808 - DNA, 656 bp, mus musculus
aaattaactgggtgaagacaaaatacattttagctatctcttcctcctggatgggtgcattcacactttttttttttttttaagacggagtcttgttctgtcgctcaggctggagtgcaatggtgcgatctcagctcactgcaacctctgcctcccgggttcaagtgattttcctgcctcagaccacgcccacccccctgccccaccccctgagtagctgggattacaggcccacgccaccatgctcggttaatttttgtatttttagtagagacagggttttaccatgttgcccaggctggtctcgaactcctgacctcaggtgatccgcccgcctcagcctccctaagtgctgggattaaaagtgtgagccactgcacccagcccgtgcagtcacactttaataaattttgtaaggttacatgaagtttctttgaggatccaagaattctgttttctgagcccaagggaggaatgatgcagacagaaaagattggtaaccaacactggggagcgaggggcataaaggagatagtgctgacccttctccctctctcccaaccctaacctgttgcagacaaccggttccttgtttaaccctttagccagttaatgaaagtgtattatgctggcaacaacatgtctacttgacatct

SEQ ID NO: 7809 - DNA, 318 bp, mus musculus
tttttttggtaagtttcccctttaaagcctggagatacccatgaaagatctagaaaactagagagaaagggtcaagcttgagagaaacctcgagcttgagagatttggtgattagactctgtctactcattggggactacagatcttaaatcttgctacatttagaccagtgatcattggattgaagactgaaagcagatcaagatttcagcactaatatggcaatacttttttaatagcctttcccactttataaaaatcctttaattctattctccctcttctcttccatagccaatctccttgaaggatatcttg

SEQ ID NO: 7810 - DNA, 1108 bp, mus musculus
ccaggaattcattcctaccaccaccacaaccaactaagtgctcaatcaatattgattgactcagtgaatcagtcccggaaccaagaatgtgaattccccacaagctccccgaccttgggaggcccagcagcctctgtgtgctctgtcaccagtgcctggcacttgattcacgctttcagtcaacactgaggtccccacccagtcagctccacgagtgctagggagtgaagacgtgtcagggcggagagctgggaaggaccccacaggcaacctggaagcagcggactgctccatggaccctaaaggagaaagaggacatgttggctcctctaattccctcttgcagcccacctctggctacagcagatgctggtgtgaagtcacctctgcactcagtcactggttctctgacatcttccccacccagtctcccttgtgtagcacagtcctgcctcctccctcctgactcctattgtgtgtgcaggaggcctgttggggagttggtggagccagaggttaggagaaagagaggcaaataggatttatgggatatttgcctttcctaagaactgtcctctgctcatgatgtcaacctaggttcaaggtacagaggccaaataacagggaagcaatgctcagaaattagcagccagctgggacagaggctgggtctggctacaggcggtggggcctggtcagggtcatctctgggtggcctcctccacacactgacttctacctagggctcagggaggaggaggatgaaggggcagcagtgaaatggcttcacgaggcatgcataggctgcaggaagtgcctccaagacaccagcagacattctctggtagagcctctgcccctcactcccagcttccttctctcttaaagccctggctgaagcagacactgagctccttctctgggcacctgaaagggggcacagggcgtgaggatgatgtttccaccaagactgcttagtgcatcttctcatcagtaggagctgcttggtgggggtggtggcatggggagcatcatttgtcctctaggactggacacctcaggcctatgagaggcagcatgttgtaaaggatttgatgtcaggattcct

SEQ ID NO: 7811 - DNA, 925 bp, mus musculus
ttaattttacctttaaaaatgacatatgaaagaatcccagggtgaaagtataatctatgtgagtccaaattacattggtttattctgttccttttccctataccattgtttttgagcaaatacttcctgcctagctttggaaagttaattaaatgtcaaatcacagatgtggagcaaatgaaacacttgggggataaaatgttacatatgtatgaaatgaacagcttgaaggaaaaagggaaaaaaagaatgaagaaaattgcattttgggatgttctagtctttgattgcattcttcaatttggcacactttgacagttaaatgttcctcaatctctgcatttatatatattcttctgaagtagtgtcattcttgtacttatttaactatttttgacagaaatacaaaaaattcccctgcaaacttttttgcactaaagaagaacaggcacagattttcccactacataatataaaagtagaaatttgcttgccttggttattcatagataagaaacaccaattctccctattaagtacctgcttatggtagacatgaggggtgattactagaaaagatggaaagagtatacaggagaagtatatacttagatgacttctttgtcccagaaattaggtactgtagtggcctcacgcttctgactttctgtgtctcacactatagtcatacataatctcagagagccctactcatttgctttgtctgatgtaaaggcatgtgatttttacctcatgacctctttggttttggcttcagtttaattattgagttcatcctccatagccataaattttcggagctctaggcactcttgaggccattttacctagctccttacttttatgactgagaaagccagtgcccagaaatctatccaagcccagaggaggaattgttggtaat

SEQ ID NO: 7812 - DNA, 1110 bp, mus musculus
atcttcaaactctatcagcgggcaaagcatgtgtacagcgaggctgcgcgagtgctccagtttaagaagatatgtgaagaagcacctgaaaacatggtccagctgctgggagagttgatgaaccagagccacatgagctgccgggacatgtatgagtgcagctgccccgagctggatcagctggtggacatctgtcggtgaggcagcctggtgggggccaagggatgccatcaaataatattgtttaaattaatggaaaaaaatgcaacatttcataatctacgggaatgaagatcattccccacttcctatatgaggagtctctgatgatacagagctacacttgttcccttctaaatacctgtaggatgaaagatttgctacctggctccatgattttatgaggctctgggtttggagtcagtttggagtcagctctttacatcatgagaaagacctttccgtctttggatgattaggcctttcaggatggtaactttgctcagagctgggccctgttaactttcttatgatatgttttattatactgctgctctgccagaaactcctgtccagtgtcctaattaagtttagtagttctactcagaagaagggagaaaactgacagaggatctcaagcttgatgggagcatgtggggagatttgctgaaggaatcacccagaaagccagcatttcctgccttctaggtttagtttaggcagtttgaggaaataaaggctgaagaaagcccaggtgatacatggttaatagaggcagaaatgtaaagaggacaactctttcacaaagcctaaaatcagctttcctaaaattgtgaaagaatggagataacagagttagtcctcttacccaggaaggagctcagtgaccctgggagaactgaaactgggaaagttctcaaacgctagatgttacttcactgtgagaacacaatgctacactacaattagtaatggaaatgtaattaaccacttggcacttgtggcttgcctcagtcattgccacactcccagcctgaaaagtttaaaccaagtaactccagtgatcacaaatggcctgggtaatccagcttgtcaaaagacttgaacaca

SEQ ID NO: 7813 - DNA, 1110 bp, mus musculus; identical to SEQ ID NO: 7812

SEQ ID NO: 7814 - DNA, 2300 bp, mus musculus
tatgaaaaattatataatttagtctttttatttcaagtatgactaacttggcatctatcagtcagtgaataacttattttgaaataatagttttaattattatattatgattataaattactaggggagagccaaaaactttaccatacatattaaagaaccatatacaatagaaccaacctaatgcttatttctcagatattcaacatatctttcttaaaattttaagtcaatcaaaatttatatattttgaagatcatagtagcacactgctaacccaattttctttgttttaggttgcactcatttttcctggacctcagtctatctcaataaaagatatttcttttcatctgcaaaaaaggattcaaaataatgttagaggcaaaaatgatgaccctgacaagccatcttttaaacgcaaaagaactgaagaacaagagttctgtgatttgaatgacagcaagtgcaaaggcacaacactgaaaaaaattatatttatagatagcacctggaaccaaacaaacaaaatattcactgatgagcgacttcaaggtaaaaaaaaaatgtttttttggactgctcctccctcagacttattttgaaaaaacttcaaacttacagataatttgaaagaggagttacactgaatacctatacattttgccatatttactttatttctctctttttattatatatgtgagtgtgtatttatatattatatattttttggttgatcaattgaaagtaagtttcaggctttgtaacacttcacccttaaatattaagtgtacattttccttttttttcttgagacagtcccactctgttgcccaggctggagtgcaatggcacaatcttggctcactgcaacctcctcctcctgggttcaagtgatcctcccacctcagcctcccaggtagctgggattacaggcgcccaccaccacacctgcctaaattttgtattattagtagagacggggattcatcatgttggccaggctggtctcaaactcctgacctcaggtgatcctcctgccttggcctcccaaagtgctgggattataggcatgagctaccacgtccagcctaagtgtacattttctaagaataagaatattctcctatattaataaagaatgacatctcttttataaacaccctaatggtgaatacatttactaagaagttagatcttctattttgttttttttgttttttgccttacaggttttttgttgttcttgttgttgtttgtttgtttgtttttgagagggagtcttgctctgttacccaggctagcagtggtgcaatctcagctcactgcaacctctgcctcctggggtcaggcgattctcctgcctcagcctcgctagtagctgggattacaggcacaccatcaccacgcctggctaatttttttgtattttcatagagacgggtttcaccatattggccaggctggtctctaactcctgacctcaggtgatctgcctgccctggcctcccaaagtgctgggattacaggtgtgagccaccacgcgcagccttccttacagtttttaaaaataacttttttgagtaagaattaacatgtagtaaactacatgtttccagagtattaaagttttctcatatgtgtacagctgtgagaccatcactacaagttaggaaatgaacctgtccatcccctgccaaagtttctgcctgaccttttataatctttctcatccagctttccccacagcacacttccacactctccaaccccatctctaatcaatgatctatatctaatcattatagattagatgcattttctgggatattatagaaattgaatcatatagtatgtactcttttcctttttttggtttggctttctcacacaaaataaataacttgacactcatttttgttgtagcatgtatcaataggtcatacatttattgccaagtagtatttcgttgtatggatatgctacaattagtgttatctatttatctgttgatggacatttacactggttgtttcccattttctactatttcaaataaagttgctatgacacttgtgtaaaaaaaaaaaaaaaggatgttctcctgtataataaatacagtaccattatcactcctaagaaaattaatgaaaattacataatatcatctaatatactgtccatattcaaatttccctaactgacccaaaaataccttttgtagcttccccccatatagcatttaaactcgtcacggtttatttcattattatgtatctttagtctcttttaatcta

SEQ ID NO: 7815 - DNA, 879 bp, mus musculus
aaacccacagcaaacattgcatactcagggaaattttagagacaatcctgttaaagttaggaacaagaccaggatgccatgtaatgctattcaacactgtgctggatgttttctaccggtgttataaagcaggaaaaagaaatagggggtcaaagaaaacaatcattttgtgtaggcaatgttgtctacattaaaaagtccaagagatgctatataaattagaactcataacagagctcggcaaaatgtctcaattggagataagtatacagggatcagttgggttcctatgcatcattaataaccatttagaaactgtaatagaaaaaaattaacagcagcaaccaaaactgtaaggtagctagaagtaaatctaatgaaagatatgcaagagatttatggagatgactgtaaacataattgaaggacacagaagaagatatgactaaatggagagacatgtcatgttaatggagaggaagattcagtatcataaagataccagtttaggctgggcgtggtggctcacgcctatagtcccagcactttgggaggccaaggcaggcagatcacctgaggtcgggagtttgagaccagcctgaccaacatggaggaaccccatctctactaaaaatacaaaattagccaggcatggtggcgcatgcctgtaatcccagctactcaggaggctgaggcagaagaatcgcttgaaaccgggaggtggaggttgcagtgagccgagattgcaccattgcactccagcctgggcaacaagagcaaaactctgtctcaaaaaaaaaaaaaaaaaaaaaaaggatcccagtttacttcagatcaacatagagtgctcatggcatttgatcatattatcctaaaatt

SEQ ID NO: 7816 - DNA, 512 bp, mus musculus
cttcactgcctgactgccgccatcatgggtcgcatgcatgctcctgggaagggcccgtcccggttggctttgccctatcgccacagcatccccacttggctgaagttgacatctgatgacgtgaaggagcagatttactaagtggccaagaagggcctgactccttcacaaattggtgtgatcctgagagactgacatagtgttgcacaagtacgttttgtgacaggcaataaaatcttaagaaatcttaagtctaagggacttgctcctgatctccctgaagatctctaccatttaattaagaaagcagttgctgttcaaaagcatcttgagaggaacagaaaggataagaatgctaaattccatctgattctgatagagagctggattcaccacttggctcgatattacaagaccaagcgagtcctccctcccaattggaaatatgaatcatctacagcctctgccctggtagcataaatttgtctatgtactcaagcaataaaatgatt

SEQ ID NO: 7817 - DNA, 270 bp, mus musculus
gtttcatttttgttgtttattagtgtcaacagaatttgaaataattttcaagctgattttattcattgtttacctccttaattatataatagaaataagtagcttgtgtttcttatgaaaatttacctgctacttgatgtatcttttttcagtgcacggtagtaaaatcagttgtatatatcctgtctaacatcagtatgcatattatactatactgtacatttaattaggagtttattagctgttggcttaaatgagtttaaaactact

SEQ ID NO: 7818 - DNA, 1026 bp, mus musculus
gcaaagaaagcataaccccaattttttgatatcagtttttaacaatacaaccaatttaggaaatatcaagaactgattatagcaatgacaggaatattagtccccctgcctttgtactttgccccttagcaacaagtgaattcattactgtattttcttatttgtgcttctctcctttaaaaaatactcagtttgctatttttaaaaattacccaagaatgggtgggcatggtggctcatgcctgtaatcccagcactttggaaggccgaggcgggcggatcacgaggtcaggagatcgagaccatcctggctaacatggtgaaaccctgtctgtactaaaaatacagaacattagctgggcatggtggcgggtgcctgtagtcccagctactggggaggctgaggcaggagaatggtgtgaacccgggaggtggaggttgcagtcagccgagatcacgccactgcactccagcctgcgcaacagagcgagactccgtctcaaaaaaaaaaaaaaattaagactgattttatgtggtggctcctttcaccattaaaaagttagtttatacatttttttgctttgctccttgttttagtttctttcttttatatgtgtatttatcagcatattgtggtatgtgtgttagctgtgccagtattcagctcttagaaacacagccacgtgttactatgccaccttcttgaagtttggagtgtaacagtgtagactttgatctagtttttgtttttctgtgagacatttacatgaaaacaacatctttgattttaataacttacctgtttctcctgtttatttcccctgaaattgtcttaatgctccataagggacatagcagctggttgcgatggaattgactgacactaagtaaaagattatgacttcgggtagaaattaagtagaaagaactgctgatttcttaaagagatgggatgcactcagattgtcaaatattgacatagaccttctgttaatttaagagtaacaattctggttttggtgaaaa

SEQ ID NO: 7819 - DNA, 1026 bp, mus musculus; identical to SEQ ID NO: 7818

SEQ ID NO: 7820 - DNA, 1998 bp, mus musculus
acccttgcatcatttctggtgaggctgacaagactttggggtgagagttccttaggtgagtacatgggaatcaaagggccagtcattgtccccaccagggcaggaagcttgcttctccccaagcccattttgttcctgattttccatctcctctcactaaaagatgtggccagatgcagtttgtttgatctgattaaagttttatctccttttcttcttttgttgtgtcagaaggggttgtaactagtaaaatgcttagagaacagatttccaaaaaggaggaaaaggagaggccagggaatcggagtcaccagcatcctgactgccatgtccacctccccagccccgcttaatgaagtagaggtggctgtgtagcaagttttggggttgcaggaaaaatggccctgggccttcttttgctaccactcaggtttcttaataacattttattcacctctgtcccatcctcttgggcctaggggtacagagctgaaaaacacccctctgggggacatttcctagaaaatagttcatgacagatcattaacaagatttggaacattctcagtccttaactaacagagtctgctggaggtgggaatccctctctgctcctgctcaatcttcctaactctgctcctgctcaatagtagaggtggccaggccggttcattcctaggacacatttattgaatatttcttctgagataggtcctgggggtgaaacactgaattttttatttttctagagatgggatctcactgtgttgcccaggctggtctcaaaactcctgggttcaagcactcctcctgccttggcctcccaaagtgctgggattacaggtgtgagccaccatgcccagcctttttattttattttttttaaaccaaaagagaaaccttatttaactcttatgctgcattagtttgctagggctgccataacaaagtatcacagactgttgtggcctaaacaactgaaatttattttctcacaattctggaggctggaaatctgagatcaaagcgttggcaagtaggcttctccggaggcctctctctttggcttgtcgatggccgttctttccaactgtcttcacatgatctttttcttgtatacgtgcatgtctgtgtcctaatctccttttctttcttttttttttttttgagacggagtctcgctctgtcgcctaggctggagtgcagtggcatgatcttggctcgctgcaagctctgcctcccgagttcacgccattctcctgcctcagcctccagagtagctgggattacaggcacgtgtcaccatgcccggctaatttttgtatttttagtagagacggggtttcatcatgttagccaaaatggtctctatctcctgacctcgtgatccacccgcctcagcctcccaaagtgctgggattacaggcgtgaaccaccgcgcctggcctaaactcctttccttataaggacaccagtcatagtggattaggcccatcttagagacttcatttttatttaattatttctctaaagatcctatctgcaaatatggtctcattctggggcttaagacttcagcacatgtatttttcagggacatcattcagcccataacacatgtggtcgcctccttactcctggggtctgagggttgtcccccaaagctgcccccgaccctaggcattggatttgttttctcaccaaccacccagcacgtccctgtccctgtcactcccactaccctctactgggctcccagcctctgtgaagggcaccatgtgagctgggtccagcatggcattggggaggaagagtcctggtcatatctgtgactaactggcagtagggagaggtccacttggttagtggccaacagaaaattcagccagcttctccctcagcactgaagtgagactctgagctgatcagtgctggctctcaagagatgaactttggtgcctaattttttcatctgaaaaatgagactggtggataagt

SEQ ID NO: 7821 - DNA, 1998 bp, mus musculus; identical to SEQ ID NO: 7820

SEQ ID NO: 7822 - DNA, 1174 bp, mus musculus
ggccattgctgagaaagaggttcaacttgctgttctattttgcctcagagggtggaaatagaagcaatgagttgaaattagaaggaggcagaatcaaattggtacgaggaagtcttttctaatagtaagaaccatccatcattaacacaaggttagacactgaaggaaagaggtccacattgcaagagacggtgaatgtctgtctctatggcaaaggacaccaagaaggtgcttcctgcagcaggaaggcagctaggaaagattccctccaatgactctctgtgaagtaagtactaggattctagtaacttgaagtgcataggccctgtctggggcctcagaacagggcctgtcagatggtcgcctctatgtggaaatagatattccaactctattcatgtgcatgatataattttagaagggcgaggatgtcgtcacttcccaaaatatacttcttgacggtcttgtttctgcattaattcaccattaaaacttttcttctttagcttaatactttattctgtgttcaaatgcacattctcatgggaaaaaagagtggttcaatagaagctactgtgggcccatcatatccctgtggtgtagtgaggttctccgtccctcccagagagcaggtcttgtctggagaggtagagctggaggggagggggttgaggcaggggtattgggtgtctggggtgggggctagagagcaggaaagactgtaagccaggagggagtgggagtgccaaagccagtcttggctgcctttatgaatgtgtttggggctgggcctgtcctagagatatcccaaaactattttaggaggcagtaaatttagctggtggctggtttgcaaatcatccagatatgttggtatttctgatgagacaatctgtctcgagaggagacatttagagcctttacaaccaaaagggatgtgcctttttgaacacggccatggaaaaagcacaaccaccgccgcctattttgttggccaaacccagcagtgggtaaaatgtgcatgatcacgggagttgcatttgtacagagcctttcaggtgaaaacctgcttctagatttattatctacagaattctcagaacagcctaaaaaagcaagtgggccaatacccatcttgtagatgagtagactgaggtgcttacctaaagttacc

SEQ ID NO: 7823 - DNA, 702 bp, mus musculus
tcccatttcttttttcttttgttgccttgccttttcttttctattgtctcttctgtcttccctctctctcccttttttttttccttttaattacatttattttaatgctgaatttactcccgtgccataagtttttgtttcttcagtttcttctgggatatctttttcttctgggcaacctcctcttctggtttaggaacaatctgttccttttccgtaaggatcatctcaatgtggcagggagagctcatgtatgggttaatccgaccatgagctctgtaggtccggcggtgcatcttaggtgctttgttcacttggatatgctcaatgaccagagaatctacatctaaacccttaagttcagcattactctctgcgtttttaagcatgtgcagcaagaattcagcactctttttgggccaccgaccttgtgtccagccccactgcttggcctgcgcacacctgccaactccaccgttgtaatgtcggaatggtacacactgtttctgtaaagtgacatctttcagatacttcgtggcttttcgtatatgcatacccttgatggcctgagcagtttcacgagtgttcttaaagtgaacacgaagattggaacctcttgatttgcctgatttcgtggggttctccgggtcaagtgaatagcgaaccattttcacagattacctcaggctgcttaggaaaaga

SEQ ID NO: 7824 - DNA, 1212 bp, mus musculus
ctcctccccaccccccggggcctgtggctccccctcggctcccacaccatcagctggcgtagccgccaccaccatagccgggtttggccacttccacaaggcgctgggtggctccctgtcctcctccgactctcccctgctcaccccgctgcagccaggcgcccgctccccgcaggctgcccagccatctcccgcgccacccggggcccggggaggcctgggactcccggagcacttcctgccacccccaccctcatccagatccccgtcatctagccccgggcagctgggccagcctcccggggagttgtccctaggtctggccactggcccactgagcacgccagagacacccccacggcagcctgagccgccgtcccttgtggcaggggcctctgggggggcttcccctgtaggctttactccccgaggaggtctcagcccccctggccacagcccaggccccccaagaaccttcccgagtgccccgccccgggcctctggctcccacggatccttgctcctgccacctgcatccagccccccaccaccccaggtcccccagcgccggggcacacccccgctcacccccggccgcctcacccaggacctcaagctcatctccgcgtctcagccagccctgcctcaggacggggcgcagactctccgcagagcctccccgcactcctcaggggagtccatggctgccttcccgctcttccccagggctgggggtggcagcgggggcagtgggagcagcgggggcctcggtccccctgggaggccctatggtgccatccccggccagcacgtcactctgcctcggaagacatcctcaggttctttgccaccccctctgtctttgtttggggcaagagccacctcttctggggggccccctctgactgctggaccccagagggaacctggggccaggcctgagccagtgcgctccaaactgccatccaatctatgagctgggcccttccttccctcttctttcttcttttctctcccttccttcttccttcaggtttaactgtgattaggagatataccaataacagtaataattatttaaaaaaccacacacaccagaaaaacaaaagacagcagaaaataaccaggtattcttagagctatagatttttggtcacttgcttttatagactattttaatactcagcactagagggagggagggggagggag

SEQ ID NO: 7825 - DNA, 1452 bp, mus musculus
tactaagggaatttataatagtctaaagggtgtaactgtctcttaaagagactaaaagttctttaaaatgttgcaaacaaaaagtcagtggtagactgggcgtggtggctcacgcctgtaatctcaacagtttgggaggctgaggcagatggatcacctgagatcaggagatggagaccagcctggccaacatggcaaaaccccgtctctgctaaaaatacaaaaaaaaaaaaaaaatagccagtcattgtggcgggcacctgtaatcccagttactcgggaggctgaggcatgagaattgcttgaacccaggaggcggaggttgcagtaagctgaggcactgcactccagcctgggcaacagagtgggacaacatatcaaaaaaaaaaaaaaaatcagtggtagaatttagcaatttgaaagccaaaggatatcacccctcatccttaaataccaaatccactgcagtcatagagtactaactgtatgttattttagtttgctcaagttgtgtaacaacacaccatattctatatgacttaaacaacagaaatttattttccctatttctggaggctaaaaaattcaagttcatggttccaacttatttgctttctggggagggctttcttcctggcttacagccagccaccttctctttgtgtcctcacatggcaaggagtgagggagagaggaaggaagagagtgcaagggagaggctatgcactggtatctcttataaggacaccagttctattgtatcagggccctatgcttatgacctcatttagccttaattacctctttgtaggtactgtctcacattgggggttaaggattcaacatatgagttggtggtggggaacacataatttagcccatagcactctacctctaacccatcctgcctcagaatatctgtccttatagcatgcaaaacacattccaacagctccaaaagtcttatttatgacagcatcaactctaaagtctaaagtccaaagtctcatctaaatatcatctaaatcagatatgggtgagattcaaggtatgatttgtcctgaggctctccagttgtgaacctgtgaaaccacaagttacatgcttacaaaatacaactgtgaacaggcataggatagacattcccattccaagagaaagaaatcagaaggaagaaaggagtgataaatcctgagcaattccaaaacctggcaagtcaagttctattaaatcttcggcccaagaataatcctctttggtttgatactctcccctgcaagcccactggggtggcaccatcaccaccatggctctgcatagtggcgcaatactgaggcactggtcatggttatcctagcctaccagatctcaagaggcagcttcaccctttgaaactgaggatggaacagccttgcctactggtcctttggtgggaaaagcagccctgatgtt

SEQ ID NO: 7826 - DNA, 5358 bp, mus musculus
aggaaaagcaagtgactattcaaaattaggactaagaatagatatctagctacagatgaggaagaaaataaagaataacactttaaactctattctaatagatctgaatatctgtattaaaaatcctttaagattgtatgccatggacacccaactcctgctactgcaggagaagaaagaagctctgccagatattaaaagatattatcatgctatagtaaataaaaatgtatggtactgaggcatgaatccacagacaggtcaaaggaaatgaatagagtacataaattgacacaaatttattcaaaaatttagcatataataaaagcagtgtttagaagaagtgcagaaaagacagattatttgccaagcagatcaaatataaatatatagtataattattaaacaccacaaaaatgagagtttaaaaataatttcagaaagcagatatctttctaactgtaacacaaaacctaaaacttatcaaaggaaaatatgggatcaatgtaataaattagatataaaaagttttctgcatgacaagaacattaaaaaagacaagcaataaactatgaagaaatattttcaatttatatcacaactgggtaaattcaccaatataggtaaagagctatacaaatcaataagaagtggaatgctttaataggaaaatggacaaagtatatgaagacgtattttcccaaaacagaaaaagaaatggattttcttcacatgaaaaaaaagtcaaccttttttataacaagaacagtgtaattagaacttatgctgagttttaaaaatttacatatcaggttgataagaatcaaaaagtttgatgaaattcaactttggaaacactgtagagaaagagatactcttaaacacttctgataagaacagatactacacttgatcttagccaaaaggccaagaagcgatactcttaaacacttctgtagggagtgtaagttcatatcacctccataaaaggtaatcttatcatatctatcaaactttaacttaattatttcacttccagattatatattccacagataaacccatgtattataaatatattcattgcagccgtgttgtgatagaaaatattagaaacaatttaaatgttcatcgatatttgatggttaaatatagtccaaacataggatggaaaagtatacagtcattataaataataaagcagctctataaaaatttatataaaatggtctgctagatattaagtgaaaaagctagatgtaaacaaatttatataaattaccatatatataaatatggtaatatatagactcctacatatatatgtatattcttacaatctgtatatgcatgcaatatatcaggcaggatacacaagattctgatattaagtacaagcataccttgttttgctgctttttattgtgcttctcaaatactgcatctttacagattgaaagtttgtgtcaaccctgtgtcaagcaagtctatcagcattatttttcctacagcatgtgctcactcatgtctctgtgtcatattttggtaattctcataatatttcaaacttttttattattattatatctgctatggtgactggtgacctgtaatcttttaaatgttactattgtaattgttttctggcaccacaagccatgcccatctaagagagcaaacttaatcaataaatgttgtgtgtgtgttcttacagctccaccaacaacctgtttgttctctgtctctttccctttcccgggacctcaccgttctctgagacatgacaatattgaaattagtccacttaacagctctacagtggcctctaagtgttcaagtaaaaaggaagagttgcacatctcccacactaaatcaaaagctagaaatgattaagcttagtgaggaaggcatgtcaaaagccaagacaggccataaactacacctcttgtgtctaacagttaatcaaattgtgaatgcaaaggaaaaggttttaaaggaaattaaaagtgctactccagtgaacacttacacaataagaaagtgaaacagccttattgctgctatggagaagcttctaatagtttagatagataaaactggccacaatattccctcaagtcaaagcctaatccagagtaaagcactaactctcttcaattctgtggaggctgagataggtaaggaagctgcagaagaaaagttggaagctaccagaggttagcccgtgaggtttaaggaaagaagctgtcttcataaaagtacaagatgaagcagcaagtgctgatgtagaagctacagaaagttatccagaaaatctagccaatatcattgatgaaggtggccacactaaacagcagattttcaatgtatatgaaatagccttatattggaagaagatgccatctaggatgacattcatagctagaaggagaacgcaatgcctagttttaaagcttcaaaggacaggctgcctttcttgttaggggtatgcagctggtgactgtaagttgaagtcaatgctcatttaccatcctgaaaatcccagggccctttagaatcaggctgaacctgctctgtctgtgctatataaatggaagaacacagcctggctgatggcacagctgtttacagcatggttgactgaatatttttagcccactgttgagacctactgcctacaaaaaaaaaaaatttctttcaaaatattactgctcattgacaatgcacttggtcacccaagagctctgatggagatgtgcaaggagagcaatgttgttttcatgcctgctaacacgatatccattctacaatccatgggtcaaaaagtaatttcaagtcctactatttaagaaacatattttgtaaggctatatagctgccactgatagattaattaatgccatagatgccattaagaacatttgtaattcaagggaggagaccaaaatatcaatattaacaggagttttgaaaaagtttattccagtcctcatgaatgactttgaagggttcaagacttcagtggaggtaataactgcacatgtggtagaaatagcaagaaaactagaattaaaagtaaagcccaaagatgtaactgaattgctaaaatctcatgatacaacttaaatgaatgaagagtttcctcttatgaatgaatgaatgagcaaagaaagtggtttcttgagatggaacctattcctggtgaagatgctgtgaacattgttgaaatgacagcaaaggatttagttgataaagctgcagcaggggttgagaggaatgagtctaattttgaaagttctactttgggtaaaatgctgtcaaacagcattgcatgctacagagagctctttcataaaagaagagccaattgatgtagcaaacatccatgttatctttttttttttttttttttaaggtagagtctcactcttgttgcccaggctggagttcaatggcgcaatcttggctcactgcaacctctgcctccatcgttcaaacttcccaagtagctcggattacaggcacctgccaccatgcccagctaatttttgtgttttcagtagagaccgggtttcatcatgctggccaggttggtctcgaactctcaacctcaggcaatccacccgcctcggcctcccaaagggctgggattacaggcgtgagccaccacacctggccagtgttatcttattttaagatattgccacagacacctcaaacttcagcaaccaccaacctgatcagtcagtagtcatcaatgtcaaggcaaaaccctctgccaacaagagattacgacttgccaaaggctcagatgatcattagcatattttagtaataaggtatttcttaagtaatatatgtacatttttagatataatgttattgcacacttgatagactacattatagtgtaaacataacttttacatgcactaggaaaccacaaaattcatgtgacttgctttattatgacattcactttattgcggtgttgggaagcaaatctgtaatatctgtgaggtgtgcctgtagcagcttctggaaagggacaatgggtgatggggccaggggatggagagagccttttatctcactatgaagccttttgaatattttgcattttgtacatgtttgtattgcccatttaaaagcaaacagggacaagttttgaaaaacatgccagaaaatattcttactaaaacaactacaaaatgattaccaagaaaaaactaacatcctaaatagcaagtcaattgggcaaaagacaagaccaaagaattcaccaaagaagcatggtcagtcaatcatcaattgttcagtctcaaaaagaaacagtaaaaaaaaaaaaaaagcaatgtttctcaactgaacatgcacaatgggtcagtgatttgcctacattctctgtaacagatacctgaaagggagatggtgtaggagaaagggaaaagaggaaggagggagagggagaagtggggaggaagggaggatgcctaatctctaggtccctgggtggggcagaggggaaggtgcagccaacaggaaactgtgacacttctccttcctgagcaggaaacaggagcccaggctacatgttcactttaaaaacttgtccaaggcttattatcccttatagtatttataatcacagccccacgcaaatgtatgtgggtttccctccctcctccctgttgcaaagtaaaagcctaaagtcacagaacagggcgcctcaggaagatactggtaatgagatcaactgcctccttcaaaagttaactattcctagaacagtaataatgacaataccagcaattgcaagctactgttgccctacttttaatatctcacctcatttaatccccccaatagtcctatgagttaggatttatctccgcttcatagatgaagatgtggtggtttggtaacttgccaaacataccatgtgccaaaggtcggatggcaaggatttaaaaccaaactgcactgccctcttagatgatgtctagatagagactattttctctctactctgcagaaccacacatagtatagaagagatggctaacttcacagtcagggatggccaggttcccccaatagctgcatcctaatccatatggatcagggctagagtgaggagacagggtgagaaccggtcacttgctgacattagcacggagagaaatgattaacaaatcaaagagattagtttccatggaaaccgttcacctaaagcgatatcagtgtgttcctggatggatggaggagcttctgaaatcttaataacgggcctgaaggaagataagctgtcaggctggaaatggtaagatctcagtgttcaatctttgttgaaacatc

SEQ ID NO: 7827 - DNA, 393 bp, mus musculus
gtttttactatctttggagcattgctttttccataaattctaatcttagctatgaacattgtggtctcttgactttttgtttctgggagaattataatcatgttagcaaatctgggcatatctaaatagcaagagtagattcggtaattggaacagcaaaatgtaaaccagaagttcaaagagacagtgtttaaaatatactgaccatctgcagtctgcatccctggtaatacagaggaaagaccagcatttatcttttcattgaaaccatgtgctgtgtgtgtaggaaggaaatgcatgctggtcagaggtcagaagcaggatggatgaggtttgaaagggaatatttactatggggttttcctaaacccttagcctctagggagatgttat

SEQ ID NO: 7828 - DNA, 4567 bp, mus musculus
ccattgttattctagcttgactgcctctgggatagcctgtatggggtgagcttaagagccatatcctatactctggccagcctctttccactgcctttcaaggagacttggggtgtggtgactgacctaggggcataggcctgcagtgaagtagcagcaagatttaaagtgaatccagtttctgaatggatgtagtcattgctttgtcctcccaggattctggtaattgagagatgaccagggttggctttctggggtcacgtgatccatcctgatccagctcccagccacacaccttccttaggtctgtcttggttccaccatatccaccctgcttggggctgagccagaatccccccaccctccaaggtcccatagctttcccctacacttgccagtagtttagatctccattttccacgccctgcttccctgcccccatctcttgatagtgtccagtgacagtagacagatctcttgacttctcatgttgcattcagttttccagatggaaaacatttggtaaaatgtcctgactcagatggacattggcattatggaagggttattataaagaaaggaaaagtcagctggaccgtagcacatgaacatcagtacttcatagatggggaaaagaagaggggcagtaatgtttccttcatcgtgtataaaatgagaagcaacatgatatggaagtttataggacaagtcttggagtcagacaactgggtttttatctctagagtctcctactggccagctttaatgtgttaccttaagcaagttagtttaacctttcccaaatctcagccaggtgcggtggttcacgactgtaatcccacactttgggaggccaaggcgggcggatcacctgaggtcaggagtttgagaccagcctggccaacatgatgaagccccttctctactaaaaatacaaaaatttgtcgggtgtggtggcggtcacctgtaattccagctactcaggagactgaggcaggagaatcgcttgaacctaggaggtggaggttgcagtgagccttgatcatgccattgtactccagcctgggtgacagagcaagactctgtctcaaaaaaatcaaacaaacaaacaaaaaaactttcccaaatctcagttacttctgtgaaatgaaggaatagtcgtatgcataggctcgttgtaaggtttaagtgaactaatataaatgaggcactcaataagtgttcaacaaatagtaattgctgttgttagtattctaaaaattattttaccagctaagctaaggttttctcttgagccagtggcttatcagcaaactcaatagtctgatagatagataaatgtagatctagcaagagcaatgatacttctgttactactgacagctgtcacttactgtctagatccctttagttaaggcaacggtttgtatctggaaggtctgtcctttagcaaaagagtagactcaggttcctaccacagaaagcaagccctatgccattcaaactttttttgtcttctctgttttatcagttacaaggaaagtgttctgagttgaccattgagaataaacaaccttagtaagtaaaattgctggtaggttcactctttagaatacttacttagattgctcttattccctgttcagatcatctgatggggaagcagccagtggttattgctaccctgcccttacatagacacccagtaatcctttatttccaagagtatttttcctgagtgtttcttagagtcctagggcttgcaatgatttctactgaataagccattgttgatattttataacccttatcaattgtttgatgtctttgccctcttcctgactacttgccattgaaagaccaggaaccttgactcattcatctttgtatctttgattagcagaatgtctggtgtatagtaaatgttcaataaatgtttgaatgaataaaagtaccatgtgctagatattatcttcttacccttccacctcagattcatcctctacccttcttgacactgctctggtccctgaggggctaacttgcagacatcagtgggctcccaagccctctggcttctagctgggtttatccaatggcaagtggaaatcaaagggagagaggcgagggtgtttgctcccccagttccccactcctgtgaggttgccatgtgctgactgtgtcccccaacaggtagcttgctctacgtgacccctccccctcccagggtctgtagcctctccatcccctcattcttttaggccaaggagtggtgacagctagcaccaggctgctgcaccatccttacagattccctgtaccccactcacacccgtataattagtttctttgtcaattaaccctccacaaattatcctaattggactgtacctgctccttcctgttgggaagcagcaggcctcaattgcttatagagattttcaattgtttgagttggacactggggctccaggtgactcataaagcgacatagtgcagttcttccaagaatgtgggacatggctagccattaagggcactctgatgcgtggcagctttggggaaataaatagcagtttgggaaactattctttgtttaggagagactttctcccacggataacgtgtaggatcttattttagactgactgttaagtctctgaagttgccccttttcatggttgtgtatctgactcagcatgggttgttcatctgactcagcatgggttgttccaggagaacgcgggaccaaatttaacagggcagaggatacaggcttgaagcactggctttgccaatagaagactttctaaggaatgactttgtctcattcaacatttaaattttcactctttgggctgtttttctgcaggtgatcataaacagcacaatcacaccgaatatgaccttcaccaaaacgtcacagaagtttgggcagtgggccgacagcagagccaacacagtgtttggtttggggttttcctctgagcagcagctgacaaaggtaacttggtcctatccacagtgcagtaaatcccgcatcagatgccattctcatcagtgattgcccgccgagggatgtgcccttggtgagcaggattcctttctggtctttggtttcactcctcctggcatcacggggctgccaaagcagaggcccttttgaaataccaggttcacggaagtcatctggggaagggaaattcgtatctaacaaatgctgctttggggcctgaagttgcagtgtggccagtccatcctcccctccaggtgtcagccactgctccctgtgcccggtggtatcagcgcacagactgagcgctggcttgtgtgccaaaaccagatccattgggttttcaggactctgaggattaggtgaccttcctgtgtgagggcacagttatcggagggttgttactatagaacttccaaggaagagactgtgttcctgctgccaagaatgcatcttgatgaaataagcatgttaccccttttgaagtaaggcacactttgtctctgacagccatcaacgtcagtgactctgtttttggagctcttggggagtaaggtgatgcataatggaagcgcttagcttggactccccacgtgccttaaaatgccacacagtggtgtgtgtatgttactttttttctagggagaggattcatagctccaagtcacttctccaagggccctgggacaaactccttggatggttagaaaggtgttgaggagcaaatcatggctgaccacagacttggagaacctcaagaactgagggaataaactgatcgcctctgagaggccttactcagcagtttaaaggggctgagagcctgttttagagactacatttccttttagggtggtagaagagccctttgtaagtatttagaatattttggtttaaggtaagactgactagtttacaagtcaaagaaatttattggaagaatgttggagtctctcaaggagtgcaggagagagctgcaaacccagggaagggccagagccagacttgcttctggcagcttggctctaagaattgtttttctctagacccttgctgtgaacatctgactgactggctggacaagtgctgacccagcctctgctctgctgacaccatcctcagcactgaggatgcagagatgtggcccttgttccagggcttcacaaatttccagattcttggggaattgacagagttgcctagaacagacttgactgcttgggttacttgtgtgtattgaagacagttttcaaagagggggaaattagggtgagtcaggaagcctcccacagcagaggcctgctaactggtccccttcctttgtccagtgtgtgtgcatgtgtgtgtatactcacatatatgtgtgcacgcacacacacttctaaggaggtccccagcgcacagatccggccatcccatacccagtcacaaatgagcaccccagtggggataccccacagactgtcctctgcatcccaaggaacttccacgaagactctgtttccttagaagcctgagaagtccaaaatggcctgatggcactctgagcatcca

SEQ ID NO: 7829 - DNA, 179 bp, mus musculus
atgggttcttttcttgaattttagtgatgataacctcacacatagttaagtgaacttcgtgcctgaagatgggggtcctgcctagacaaatgagcaaaaatgtgtcttttttcctgaactggaaaagctagtttacagagtgatgacttctttgtgattaaagttaccagtttctgtaa

SEQ ID NO: 7830 - DNA, 1249 bp, mus musculus
ttgcaatgcacagaacggtccccataacaaataattttatgacccaaatgtcaatagtgctgatgtagagaatccttgttatagaccctaacaaatgcgttttatccatgagaatgtatattcattttattttcacgaaagattagttcacccatcaaccagttgggatattgccgagtagccttcttgcaccgtccttccataacctcctcaaatgcaaaccaaaatgagttatgtcagcacaaacatcccaggggatcctgatacacaaataagaaatagttagccctggcttgccaagctccctccacaccaagtcaatagtctcatcttaaattagagtccatacactgtgtccttcagtgcctgctcctttcccttctccctgccacccggagtacaagatgcagacttttccctaaatcctataataccacaaagcccctgctctttgtattattctcaagccctagcaggactttttgcactcaggcaaataaacacgccaccaataatccaataaaaccttcacagacatcggatataaaccacagtgatgagcagcgcacaatctatagctgcttggttcttttttataaaccgtgcacttgagccctgaaggcaacacaaatcaaagctaataaaagcaccaaggccttccccttattgttcctaatgggttgattcaccctacctatgccatccccctagtgaccacaggctgtctccactcccaaatggaagacatacaagccagcatatcaagtatgaggaaggaaagagctcatttcaaatatgcctttcatcatgatggctttccacttggtgctcaatagctgcagagaaataaacacgatcaccttgggctggaactagccaatgtctcatactcccagagaccaaatacagcacaacactcaatcctagagctcatttttttttaagtgtgttttccaactctcaactttgtgaaggagctgcaattagtctatgcagtaaatgaaagcagattagagcagaagaatgtgagtagtttgataaaaagcttgccccaaagcagaggtaacaggaaaccacagttagaatgttctttcttcacaggaaaacctctgtctttggtagaatgactgcagagtttcactgataatcaaaatgcgaagattttattctgagccacaaactcagatgtctctatgggccaagcagatcatgtacctgagtgaaaaaggggtagaaaaagggaaaagca

SEQ ID NO: 7831 - DNA, 1124 bp, mus musculus
tctccactcgctttctccgctcgccttcaggatgacgtcatgaacatccgtggccctgacaggccacccgtgggttggtctcagctttaaagcagctgttctcctctggcccggcagccgcggcgactgtgtttgcacccggcggaccatgccaggactacggacccggacaggactgatggcctcagagaggcaagtattcaaggggcacttcacaaacagcttcctcaaaccccaccccctcccccgcactgcgctgctacttgcactgcggctcctggggggaagcaaagtaccggcagctgggtggtgaggggctttcttccagaaagaaacggagagcaagtggtcttcctccctagccgcggcgacccatgccaggtaaaaatcccagccgaggtccccggtcccgtcccctcctccaggtcaagggctcgggactggagaagcagccaactggagctgatattcgggaagctaagcctgaggctgctctggagggccggagaagcgagcggccaggcttggcacccgccaaatgtgccttgccaaaatgaagaggaaggaaggcgactccggagcccagcaggtgagcgctcctacgggatgctgggcaggctagaggtgtgggggcgtctggttccagtacctgcccggggcgacgcggaaacccagcttgcagtttgtttcgctcggtcccgcgcccagtaggagaaagacggccccacagcctcgcgggagccggctctcgcaacccagccgccccaagcccgccgtcgcccctcctcccgcgcttctcgcccctgattctagatgcagctgacttgttgcatgcagaagagcagctgggttcggcgttccaagcctctcctctttgctttgcctgccaccagatctgagcgccaggctggccagcacccagagagcccagagccgcaggaaaaaatgtgaaaagtaccaggagaccactgggtaatcgccccagtgcaaagggcctttcttcctacccaccgcaattgcagcaaataactccagggaggggaatcagaggcgccggggattgcgccctgggagagccctatctgctgaaagagagcgcctaatgccgttacttcccagtgtag

SEQ ID NO: 7832 - DNA, 243 bp, mus musculus
tgtttaaatatgactttgttcctgagagatgaagccactctcagtgttccaacaagttctacatgatagctagatttgggactgtggtgagttcaccttgcatgttctgtctgagccactgtctggcttgcattaggtgatatttgatctgattttattcacctgtgatctatgtcaaagcacaggacactgctagaaaaaaattgagtggccaggcaagtttgtcttctatacttctaacat

SEQ ID NO: 7833 - DNA, 552 bp, mus musculus
tttaaggtaccagattaaaaaatacatgtgtaaatgaaggtaataattgaacaatattatctcagaagccttcttactgtatgaaccagactcgtactgcagtttaatgaataacattactgctagtttgtacctacttcataagttgctgtgaggatttaatgaattaatacatctagagtactgggaacagtacttggcacatagtagaggttacaatatgttagctattgttatcatcattgttatggcaagggagttgatggataaatgggactgctatgtgtgtctccatactccttgatacaattgcctaaaattttcctggcacaatcctacccttatgcccatcccctcttcctttctaggctaatcttcctttagacgcttgactctctgtcccttttattagtgatgaccactaatatttattacacactcactatgtgctggacgctgagctaaatatataacatgcttctcgtttaatctccccaaaaacttgtaaggtaggcaccattgtttttctcgttttacatgtgaggaaattga

SEQ ID NO: 7834 - DNA, 134 bp, mus musculus
tctcaactgggacatgtcataggcatctcaaagttaatatgtccaatatttgaatttttattcttctgtaggacacttttccgtcccaggcttagtcatatccataaagggtgccagtatccccagctgcttaa

SEQ ID NO: 7835 - DNA, 440 bp, mus musculus
aggtacaggccaatgaggagggagaatggtaggggtcacccagcatagatgtgtcccactctcatttcagcattgcctcctggccagatctctagttgccctgaattcctcttaacagtacggcatagatgttggcctaacgagatgaatctgactaattactttcattttgtgggtgtacacacactaccaaactgtcacaagaaaatcaaaactacacaggattttcagactggtatccactctcccagaagttctgaatctttcaagtcagtttctgtcactaagtcttgtcagataatgtgggagaaaaaaagtgacagggaatttaaaaaatcaaagaagcagtagcccaataatagcattatgttcttcctactcagtatcgatcatatgtcattaactgttggattgctttccaccttttcacttcaaaatta

SEQ ID NO: 7836 - DNA, 765 bp, mus musculus
acacttttagaaaaagtttaccaactccttagttcagaagaaagaaggaaaaataatttcatagcatattataaaggaactactggagagatgctatctctgggaaagttgcgtatcaggagaagtttcaagaacaagtggtttcagaaagtttaccaggaacagaacgaaactgaagatgtgttctgcaaatctgagtagtaattcactggaatatagatataattggagataaaactcaactgagcagcctgtaaggaagttggtgggagagatgagggttgcccatagactgaattaaagaggaggccctggtttcaactcatgaagattgttcaacaaagacataaggcccacacagtatgattcattatgaaggttggtacaatagggaagattggtaaactatccatgctattattccaaaggaatcattccaagcaaggctgcaaattatcttcccttcacaatctgaggattatgaagtgtagaggaggcatagggacctgcttcatggatatatgcagtataaatataaaatagggtttattggggaataacatacaagcaaagaactggaggacacataaaattttcgagcccttattattccatagatagtcgtgtttaaattggacatagctaaactggacctacctatggaagggattcacatttgtagagagaaagagcagctaggaatgtgtaggtgacggtaatggaactttctgagttgaggaaatgaccttgttgaaaagatagata

SEQ ID NO: 7837 - DNA, 765 bp, mus musculus; identical to SEQ ID NO: 7836

SEQ ID NO: 7838 - DNA, 578 bp, mus musculus
tggcaccaccccatggccccatcactgctgaggggcagaatggacactcagcctgatcccaaagcccagccacattatatgcccccagtgtgagaggagagaccaacaggcatggtcaaagacaaggagaaagacggggagctgagggtgagaaggactggagtgctgtacctctgtgatagctgactgggcaagtggaggcaaatcccccccgccctcaacctcctcacccatctgcccgcccacccacccatctatccatctacccatgtacacatacattaatttacccatccactcatccatttatctatccaccatctaccctttcacccactcatctgcctatccacctatctacccatccacccaaccatctatctacccccacacccatccacccatccacatccatatactcacacacccaatcacccatccacctacccatctacccatccactcacacatctatccatccacccagccatctatctactcacacacccatccacccatctacccatctatccacttatctacctacccacccaaccacctgtccaccccaccattca

SEQ ID NO: 7839 - DNA, 9003 bp, mus musculus
agctatggggcctaccccacccagcccgggcagggctattcccagcagagcagtcagccctacggacagcagagttacagtggttatagccagtccacggacacttcaggctatggccagagcagctattcttcttatggccagagccagaacagtgagtctttctcagcgggtcacctcttcctactctttctgaatattgcttttctttttcttgttttttggagacggagtctggtcctgttgcccaggctggagtgcagtggtgctgtctcagctcactgcaacatcagcctaccgggttcaaacgattctcctgcctcagcctcctgagtagctgggattacaggtacctgctaccacgcctggctaattttgtgtttttagtagagatggggtttcaccgtgttggacaggctggtctggaactcctgacctcctgcctgccttgacctgccaaagtgctgggattacaggcgtcagccacaatgccctgaatgttgcttttcttaaacctgagcagcactgagatgttgaaactgttccatatttcttttccgtgaaacagtgtataagtcttaaaactttttgggatctgagtcctttacagggcattgtggcacacctgtagtcccagctactgaggaggctgaggcgggaggatcccttgaattcaggagtttggggctgcagtgagctatgatggtgcctgtgaacagccactgcattccagcctgggcagtgtgttgaggccccatctcaaaaacataaaaaaaaaaacaaaaaacaaaaatgtttattggtttgtgattctgtttccatttattttctttggcttttaatttttttgactcttcttattttccatcagcatgaaagagagcatattttctaaaggaagaaccagttttaggccaattctgaaatggagaaaatggttttgtttgaaaatgtatgaaatcatgtgatacataaggaggtgggatttgccccaaggtcctgaagtgtaactaagaaaggtggttgtcctgtagatactgcacgcacagctgcatattacagtgctgttaacagggatccttgggcctgggtttagagggtggtgctggagatggtgttgggattggcggggtgaaattggaactgtactaaagagttggtagaagttgaagcattaaatttaggctttgaaaggagggtaactatctttgcctatgagttgcaacatcactaacagcttctgagaggctggctttatgagtataggtattatgttttctttaacccattccttacattttctctttcctggtggcttttgtgactccctttttcttatcctggtagcaggctatggaactcagtcaactccccagggatatggctcgactggcggctatggcagtagccagagctcccaatcgtcttacgggcagcagtcctcctaccctggctatggccagcagccagctcccagcagcacctcgggaaggtacggtggtgttgatgtcggggaaggcttgaaaagaggggtgaattgatgaggaatgataaagggaccagcagtaggagcagttcagaggtgtaattggggtaggggagcctgtgttgggtacagagaatggactccactaaaagtgaaaggaaattgggggctatgctgggattgtgattgtgttttttgtttgttttccctagttacggtagcagttctcagagcagcagctatgggcagccccagagtgggagctacagccagcagcctagctatggtggacagcagcaaagctatggacagcagcaaagctataatccccctcagggctatggacagcagaaccagtacaacagcagcagtggtggtggaggtggaggtggaggtggaggtgagatgtcttcagctttgtctgcagcccattttctttttctttttttttttttttttgagacggagtcttgctctgtctctgttgctgaggctggagtgcagtggcacaatctcggctcactgcaagctccgccttccgggttcgcgccagtctcctgcctcagcctcccgagtagctgggactacaggcatccgccaccacgcccggctaattttttgtatttttagtagagacggggtttcaccatgttagccaggatggtttcgatctcctgaccttgtgatccgcccgccttggcctcccaaagtgctgggattacaggcgtgagccactgtgcctggtgtctgcagcccattttctataaggatttgtattctcctgttttagcttaaaagagggttcctgtcttgtttcctagctgtctttttactttcttttgtccttcattgcctggcacttgtcaaaccttttcaaaccttttagtgctactttacaatctttttgttttttttttttaatcattctttcttttctcacaggtaactatggccaagatcaatcctccatgagtagtggtggtggcagtggtggcggttatggcaatcaagaccagagtggtggaggtggcagcggtggctatggacagcaggaccgtggaggccgcggcaggggtggcagtggtggcggcggcggcggcggcggtggtggttacaaccgcagcagtggtggctatgaacccagaggtcgtggaggtggccgtggaggcagaggtggcatggggtaggtgtctcatgagccagggagtatctttggtggggagtgtggaggattgcatgaatctccctgaagccagtccctagtgcatggtttagtattcttgttgtctagggatctgtgagggctttgatttgggggcagtgactttctttttacatccccattttatttttgtgagaacttgggagcctgaactcccatccataccactgaatagagattttgagtaatgatacttgtttccaaaaaaaaagaaaccatacatagatacgtatggattggagtcattaatatcctaggcaagaaacatggaagtgaagacttctttctctgcaagggaaaccgatgatcccactcctgggaaatagtagggaaacttggtatgtgtattcccatgtgtcctctagggagttggtaatggttaacctgacttcagcttccaggaattggctactcttcccgttttctatagtcatttgaatccacgagcttgatttgcactaatttgaccgacattgattttgtgtgtgacttggtttatggggccagctgactgaagtaagcagaccttttgggcaaaaatatgctttgacagtggtctcccacctatttgttccactgtctgccttcccctggttacttaaaattcatcagcttgtccaactggaccttctttccttcctgctgaagttgatttgaagtaaaaccttagatttgatgttaaaacagttgtcaaatctgttggtaaataagatttgaaggaccctactctgtctcccttgaaaaaggggaggaatgtcagtgttactgtttttggaaaaagtagatttttaaaccgagtttggaaatggtaagtatgcagaggtgggtgggggcaatctcaaaaacgtgcaaaaatgaggaaaacaaaaatgaggaaatgtgtgcgtgtgtttaatgcaaaactttaaaaagaaaaacaactgttatgtgactgttaacttgctctgcattttatgtgccacaggtatgaaaggtgacattgcaaaatactccgctcttctcgcagtgtagaaggggtgaccccgggggttgggggagatcaaaaacagctcagtagttaggacagagcttagctaagtttgtcttgctttaaggggaagttgcctttggttttgactttttatggaatggggttgggtctgcttgctgctttcaaagcaaaaaccacaaaaatgtgttcaaggctaccccagcctggtgtgaaatgtcttctgggtaaattggggtagggtttttaaaccaactacttggttgtcaaccacttgcgacaagaggaaaaaaaaacatctgctccatcggaagaacgaccaaggaaaatgggttattttttttccagaggaaatagataacgtaaccttttaaagcaaaatctttataaactgtgtctgagaaattgcacacgtgtgtgtgacatgctcaaaggtcagacaaggggtggtcaggaagggatgtattttagtagccacttgtatctttttccaaaaacacctacccatgtttggggaatgttaaacaaaatcaaaaaacaaccttttgtagccgttggaagcttcatgtcctttcttctaacttgtcttctccagcggaagtgaccgtggtggcttcaataaatttggtggtaagtgaacagagtttccaaaattcccaactcccagcaatgctttgtctgattgttcatttgcagatgtcttagcgtgttaatttaaatgtcaaaggttttgaggtgtccagaaccacctccagaaaggggtagggtagaatgccacctgttgcctggtgtgtgctaacctggagcaggtaggggtaagactcaatagtcatcttttaccaaatgggtttgccccaggttaataagaggggtctagtaggccttggactgggccgttgccacacctggcacttagtgaccatcatcatgagaaactggagagtgcgtgctggaacacgtggtgccatcttggctttaggatccttttgatcgttgtgtccaaggcttgtgtgtgtgtgagtgtgtgggagacaactccgaatgtttaattctggaagagggatgtaacattgccctgaggatggtgaagttggtatacatttataaagtacggaatggtgtcaatgaatgcaattctatgtatatggacttaactgagatgggcaaatagaaactagctctgggaaggaacatgtgcactacttcaagaaagattggaagcatgtgtggctcatgggaaataaccaggtcttaaacagcacaaactgaattcgtggaccaggaaggtcttaaacagcacaaactgaattcatggaaaaatgacaaatttgagaagtctcccagtaagctggaacttttctggtttggttaacaaaaggtttcttgatttgtttcaagatttaaagccaaaggtgtgggttcatgacttaggtgtcattgcgtgtgggtacaatatttatatatggcgaattcagataaacattggtcaaagatggtctctggaaaaacaaaatagaggctgcattacggaaataagatttctggtctgttccctgggacatgcttaaaaaatacaatagctattatgtatggtttttattttcatgtggtttcggggaaacaacacggttttaaggatggtttctaaagatgaaattaaaaattgttccacaagggttaagtgtctggtggtaaagttgggagaaactggatggatgcacatcgcatggctggtggcgagcccatctctcttctctcgggtgagagaaccgggccaagctgagttggtttgttcactttaatgggtctccgtttcccctgccacctgtgctgaggacatttcccagcctgagctgggggaggcagcatttgctgaagtgtggagttgtctctgtggagactcaagttacagatcttaaggggcctgcctagaattttctcctctgggcaggcgacccaggaaagggtttggagtgaggctgtgagcacttacttgatattttacaagtttggatttggtgttaatttttttccttgtccgttttttcctgttgactaacggctcatcttttccttgtttttgttttttttttgttctttttttccatgtcactaaaggccctcgggaccaaggatcacgtcatgactccggtgagttcacacgtggtggcatgaaaagagtggctaaagtggtatcaagactgcctggatgttctttgaaactattataaaaaggaaactgaaaaaaatggggatagagaaggaagggagttaggtgtgtccttagttagcagtgagaagtatttgttacgaagtatttctcagaaatacctggcttgtgggttccacccccagtgatttaggtctgagaggaccctgaaaatctacctttctaacaagtccccagtgatgctgatgcgtctggaccacactcagatggtttacagcagtggttctttcaaaatgtggatcatgtccaagttggtgaacaaaactagtgaaagacctgaccacatgaagtaaagcattgaactcctgtttaggttgtattgatgtttgtgtactagatttgaatgtaaaatgggtttcttatttaattcggggaccttcaactgaaagttgataaatactgatggacttttctgtgtggtcttgttgggcatttcactcctgagccctggtttccatactgtatactgggtgttaacatgtttcaaaggataattgtcaaactgaatctgaaatttatcagcatggctggcatatagggactcaaaagggatgtggatttctttttagttgtcttccataaaccaaatgataccagttgcttgatggatactaggtgctttaggttttttcctgtgttttttattttaccttttcacatttgcattttctctgttcaacaagcagaacaggataattcagacaacaacaccatctttgtgcaaggcctgggtgagaatgttacaattgagtctgtggctgattacttcaagcagattggtattattaaggtacttgtggagaggagtgggagctttctgtcagtgttgtaggcttgtggatttcacacattagtaaaagcaagtctttaatggttgccagcagtaaaaacaagtcttagtggttgttgccagcttaatttgttgaggaaagagccttagttactgttttctaaaagagaagttctatcttaacacaaaaagtataacttatcagagtaccctaaactcttgagatttgtactctatagtaacttttagttttatctttcaatattggagtgagagacagttttctttaatggaggtttacatgtgaggtaggaagaagtaactgggaagaggggagctgaagtttgggaattataaacctcatgttctagaggaagaagatggaaagggagtactgtagcctttaaaattgatgttacctcattttgctttcttcagacaaacaagaaaacgggacagcccatgattaatttgtacacagacagggaaactggcaagctgaagggagaggcaacggtctcttttgatgacccaccttcagctaaagcagctattgactggtttgatggtatgtatgagaaggctggcagaggtggggctggggatatagggcagcaagccttaggaaacaagccatagtttgagggttcttttgagtcttccaacacttactttagctgcggtttcaggtagtctcatttttgcttatgtgtcagcagattataaaccatttgagaaaggcacgcttctcttgtattttcggattaatgtgtcttgcatttaaagtctgttgatgattttttgtttctctaggtaaagaattctccggaaatcctatcaaggtctcatttgctactcgccgggcagactttaatcggggtggtggcaatggtcgtggaggccgagggcgaggaggtgaggagctacctgctagtggtgcagaggggtaatggggagagtgcagaagatggtaaaggcttgcatggaatgggttagatttaccaaacttggagagggagcagacccatacttggtctatctgcattaggacccatgggccgtggaggctatggaggtggtggcagtggtggtggtggccgaggaggatttcccagtggaggtggtggcggtggaggacagcagcgagctggtgactggaagtgtcctaatccgtgagtgaaacttaatttttttcttagttctcttgcatgcgtgctctttgatatattggtactgaggtatgtgcgtgttttccaaagaagtaaatgtcaaggccacactgttggggtcagatttagccaaaagcttacctaggtaaggttgatgtaatgggaaaggtaatggattgggttcagtaatactgatttttgttcctgactctgagaagcaagccgttttgtctttctgaagcttcagtttcctcactgtatctctaaagtcaccgtagtttcttcctagttctaggtcttgcctattccccatcgctccagactgattgtcttcctttctccttagcacctgtgagaatatgaacttctcttggaggaatgaatgcaaccagtgtaaggcccctaaaccagatggcccaggagggggaccaggtggctctcacatgggtaagaaaggcagacctggtgctagggagctgggaccaaagaatccttaatttttcagcggggaggctcggggaacataggggaatgggaatatgatagatcttgtttcttttgtcctagggggtaactacggggatgatcgtcgtggtggcagaggaggctatgatcgaggcggctaccggggccgcggcggggaccgtggaggcttccgagggggccggggtggtggggacagaggtggctttggccctggcaagatggattccaggtaagactttaaatcagaataaaaaagtagagcagttgaacagaggccataggataacagggttttgttgagaaagtggtttcattttgagggctaggtggaaagacctgaggttgtaaccagtagtggagagggaaggaaaattaactcagggggagtgaatctgtagacccacttgagataagatactcgctgggttaggtaggaggggcagataggatatctaggcttggagaggctggtaactcaaatataatggatacttaatttttttttttttttttgcaggggtgagcacagacaggatcgcagggagaggccgtattaattagcctggctccccaggttctggaacagctttttgtcctgtacccagtgttaccctcgttattttgtaaccttc

SEQ ID NO: 7840 - DNA, 674 bp, mus musculus
agcagcagcgcatgcagcagcatctccccctccagggcagctccatgggccagatggcggctcagatgggacagcttggccagatggggcagccggggctgggggcagacagcacccccaacatccagcaagccctgcagcagcggattctgcagcaacagcagatgaagcagcagattgggtccccaggccagccgaaccccatgagcccccagcaacacatgctctcaggacagccacaggcctcgcatctccctggccagcagatcgccacgtcccttagtaaccaggtgcggtctccagcccctgtccagtctccacggccccagtcccagcctccacattccagcccgtcaccacggatacagccccagccttcgccacaccacgtctcaccccagactggttccccccaccccggactcgcagtcaccatggccagctccatagatcagggacacttggggaaccccgaacagagtgcaatgctcccccagctgaacacccccagcaggagtgcgctgtccagcgaactgtccctggtcggggacaccacgggggacacgctagagaagtttgtggagggcttgtagcattgtgagagcatcaccttttccctttcatgttcttggaccttttgtactgaaaatccaggcatctaggttctttttatt

SEQ ID NO: 7841 - DNA, 638 bp, mus musculus
ttcaaatctgatggggaacctaacagaaactagatacctatagagtaattaaggattaaactgaaagaattccccttgggtagcagctttggaaggttttgttttccaaatgactttcttcgggtgttggtgccattgttggggcaggagggattgagtgaggagagtggctgagggtggggggaaacagctcgtctacttgcgggatggggtttagggtgaggagagagtggctgctaggagctgcttcatgagccttctgcttggagcatgtgaacctgataatgaaccttgaatttatcattgcaatgagtatttcataggaaactgtgtgagcatttcccaggcccttccttttatattgactgcgtcaccacagctgatgttacctcttttttgtttcagatgggaataactgggaacacaagtccatttggacagccctttagtcaagctggagggcagccaatgggagccactggagtgaacccccagttagccagcaaacagagcatggtcaacagtttgcccaccttccctacagatatcaagaatacttcagtcaccaacgtgccaaatatggtaagttacccttggccctcagtgttatggctctccggtgggtgctgtggtctgtg

SEQ ID NO: 7842 - DNA, 951 bp, mus musculus
tagaggggaggaaagaaataaaaaccgagcaatttctagaaaacatgatgattaaaaaaaaaccatccacgcttttggaatggacggattctttaacacctgtggatttccttattctgtgactagcaagctcccaagcccacaggtaggaagcttcagccagtgtgtgtggaaaaaacgccggttttgggatacgacggacaagtcagaagcctgcttgaaccgccgtcacccctttgcagccatccaacaccacgaacagcaaaaacatcaggttctggcaacctgtggggacaaagtgaccatcagcacggggaggtcgctgtcagagccgcgtcacagctcttacgcctcccagaatggtttttggtgtgaggattgctgcatggattgagaaggtggaatttgattggaataactggatcatctcacggatggctgaatcctaaaatgcctacaaagcgtgaaactgactcaggatttcacagaggatggtaaggctctgatttttccacttggcactcatctgggtgttatcattagcactttggtttaatgctgcagggtgaggaggatgtacccagaggccccactgacgcaccccgtccagtggcttctgacatgcagagctgcaggacgggcgtcgctgagctggccggggcaggctgggagctgagctttgcagacactgggtcctggtgaacgacgatgcttcgacatccactcttctgggcattcccagcctgtcctctgctctgtccctgccctcccctaattccaattggtgggattgggtggggctctctgggccccacactggtctgagagcctggcgtgctgctgctgggccagcccaggagcgaatggatgaagttcctctttctgagccgggatcaggcccagaactcccagctcgcagctcgggcagctgcctggtgctgaaaccagaag

SEQ ID NO: 7843 - DNA, 1758 bp, mus musculus
tccatccaggccttgtctcacatccaggggccaataataaagataaatttgaggagtaatgaataaagacccattccttctggagcaataaaatttatcgtggcttaactaatctggcaccatttatgcctgctgcctgcctttccagccatcgaatgactaattgataactaatttcctcaatttgtacttcattacttatcacagcagaaaggcttatacctaattctttgagccaaagagaccccatgaaatcaatggagatgttacttgccagggatcttggcaaattggccagcttcgtgggaaaggtggacttctcaataatacagctaacaggtactgagtgtttattgcatgcagaaactgggctaagcacgttacatttgtataaaaaatataagggttctacaagatgatgtaaaggataaagcccttaactgtattatcttaacacaatagaaatttaccaatgatttaatgttattcttaacacaatagaaatttactaatgatttaattcagatgtttctggttggcaaaggatgggggagttctgtattgcattcttcagattcattgagacctaaaattaagaaccaagttgactgagactctgccatcattactgcatagctgccaagcttgcccttggtcgatattcagccagcagagggagaaagagcatgaagagcgtggcggggaaggttttttttgttttggtttttgtgttttttttttttttttttggagatggagtgtcactctgttgccaggctggagtgcagtggtgcaatcttggttcactgcaacgcttgcctcctgggttcaagtgattctcctgcctcagcctcccgagtagctggggctacatgcccatgccaccacacccagctaatttttgtatttttagtagagacggggtttcaccattttggccgggatggtctcgatctcttgaccttgtgatctgccctcctcagcctccaaaagtgctgggattacaggcatgagtcaccacacccagccgggtgggaagcttttaataggccagcctagaagaacacatcatttcaactgatagggtgttggttataactcagccacagagagaccaggaaatgtggtgtagacgtgacccaggaggaaatgagttttgttggacagattgccacatgcttgtgattttatttaattcttacaacagtgctatgaagttggtcctcatccccacttcacagatgtggaaagtgaggcttgaaaaggttaagtagacttgctagtaagtggaggagcagattcttcagcttgtcatctgtctgatttctgggctcatgcttctactactgtgctagactacttctcttgggtctcaagcaatgagaagctctgacaataaatctttccccttcactactctcgctggtcatcaccactgtagctgaccctgactcactgtgaagttctgtactggtcagccatcacctctgcctgtggcactgagcttcccagaaaaacatctctggaacttgcagcaacctggggttggaagcctgacgggacccaagttgggtgatacagaattctgaggctgaccacccatatgtgtgggggcacagagcaaatgttaaattgagccaggaaagactccactaattagcgtttcttctgaactctgccatccattggctttttaacaaatgatgctattaatcctacatgttctcgattcttcactttcttcatggggggaaaaag

SEQ ID NO: 7844 - DNA, 2620 bp, mus musculus
gacaaacattcatgttatatttgtaagagaatcatgattttactgtttttaaacattgcaacctcaaaactcaaaattttactatttttaaacattgcaacctcaaaactcagcaacacaaacaaaatgggcttcatggaggttacagcttgaatacacacattaaccacattatctcatgcaactacacatgggcaggctctttgggagtcccgagaatctataccagggggaactgatattgtctatttgatcactgcagactcccctgtgaaagtgacatctgagttgaccaagcatggggtttataaggtatgtagcatgtgtaggaggagagaggaatttaggagcaagtcagcttgtcacagaagctgcccgaaatcatttcttccaggaggagatttgtggtcctgcgaagggtgggctttggacaatacttcagagaagctggaagatttggcagctgccattgtctgtgctttgtgataagagagtctgccagtgagtgatcttcagatgggctgaggccagaggtttggggagatgagagctgagaacctgggggttggctgtcgctcacctccctttcctgggatgagtgttccaagcacttgctttgatgatcaaacagtctcctttttgaaacacattcactctaggctttgacgacaacactgcatttcaaaaagtggtggcatcattaggaaagaaggatcctggctttgtgaccagcataggacatgacacctatttccaccaaatttcattgtgtttttttttttttttaatttttattttttttattgatcattcttgggtgtttctcgcagagggggatttgacagggtcataggacaatagtggagggaaggtcggcagataaacaagtgaacaaaggtctctggttttcctaggcagaggaccctgcggccttccgcagtgtttgtgtccctgggtacttgagattagggagtggtgatgattcttaacgagcatgctgccttcaagcatctgtttaacaaagcacatcttgcaccgcccttaatccatttaaccctgagtggacacagcacatgtttcagagagcacagggttgggggtaaggtcaccgatcaacaggatcccaaggcagaagaatttatcttagtacagaacaaaatgaaaagtctcccatgtctacttctttctacacagacacggcaaccatccgatttctcaatcttttcctcacctttcccccctttctattccacaaaaccgccattgtcatcccggcccgttctcaatgagctgttgggtacacctcccagacggggtggtggccgggcagaggggctcctcacttcccagtaggggcggccgggcagaggcgccccaaatttcattgttatttaataaggatcatgtcatagttttctgaccacttttattctggaagctggctacaggagatttttttgtgagcagacctctctacctgggatgctctttctcagagcatctctcttccctgtacttcatttacttttctaccccaggttcatttcctctgaatggcctttccagattgccccatctaaaatgcatctttccctcaatctctaccattatatcctgctgcagcatagcgtgaaacagaaattacgggagatcttttggactgagctcctgcactaggccccagtagacgggaccaaaccaagtggagtcgcgcatgctaaatgctatatcgtcaaactaaaacttaaaggaagcagatagatccccaaacaggccagtttttcctgaaaacaggaggttccagtctacttgagtcagcataataagaaagtctgctctgctttcactcttacagaaaagttaacttgaagtaactcgatgttaaacaatcaggttttctttccccctattgctctgtttccttgcttccacgtaaaaaaaacaaaaaaaaaaacaaaaaaaaaacaaaaaaaaaacactcttctgctacttctgctattgcccagtggggccattcattctcttttgtagaatggaggctgcctgattcataaataattaataaaggtcagtgatatggtttggctctctgtccccacgcagatctcaccttgaatggtaataatctccatgtatcctgggggggacctggtgagatgtaattgaatcatgggggcaagtttttcctgtgctgttctcttgatagtgaataagtctcacaagatcaggtgattttataatggggagttcccctgcagaaattccctcttgcctgccaccatgtagggcatggctttgctcctccttgccttctgccatgattgtgaggcctccccagccatgtggaactgtgagtgaattaaacctctttcctttataaattatgcagtcttgggtatgtctttattagcggcatgagaacagactaatacagtcagttaaatctataattaaattgcctgtaattttgtcttttgataataagctggcggctctcctccactagccattctcccctcttccacagaaaattttagcttagaccaaggggatgatgggggaaagtgaaacaccaattaaaatgcctctttatatccgatttaaaagaaaaataaagaaa

SEQ ID NO: 7845 - DNA, 3145 bp, mus musculus
cagtgcactcagagaaattaatcattccatcttggtccagcacagtctggctttcatgtccatcatttcagtagaagcactcccaccaagccaccaatgccttccttgttgaaaagagcatgggtactgtcattctccttctttttaaaaaaaaaaaatattttagtagtttttggggaacaggtggtttttggttatatggaaaagttctttagtggtgatttctgagattttggttcacctctcacccaagcagtgtacacgatatccagtgtgtagtcttttattccccaccctactccctgccttccccctgagtccccaaagtccatcgtatcattcttatgcctttgcatcctcatagtttagctctcacttatgagaacgtatgatacttgattttccattcctgaattgcttcacttagaataacaatctccaacttcatccaaggtactgcaagtgtcaatatttcgtttatttttatggttgagtagtattccatggtgtatatataccgcattttttttatccattcattggttgatgtgcatttaggttggttccatatttttgcaattgcaaatcgtgctgctataaacatgcgtgtgcaagtgtcttttttcatatgacttattttcttttgggtagatacccagtagtgggattgctggattaaatggtagtccttcctctttgcagaattttccagatttgaccattctttccttcctgaagaactccccatcatcttgacttctgtatagcagtaaattagagtggttgaggccatttgatatggagtcagaaagtctgagagcaacgccttgcacccctcctactgagtgtgcaatcctgagcaaattactccagcagtgtaagcctcagtttctccaactgtaaggagaagacaggagttacacccacttcaaataatataaaaataatctttgcaagtctcattgcatagtgaccagcacaaagagcattccgtgaaagcgccattatcagcacattctcctggtgtttgactgacaggcttatgtttctcagcctgttttcctggcttccactcttctgctctttacttaaaaactgtttcttggctaggtgtggtgacttttgcctgtaatcttagcactttgagaggcggaggtgggaggattgcttgagaacaggagttcgagaccagcctaggcaacatagagaggcctcatctctactaaaaatcacaaaaattagccaggtgtggtggcatgcacctgtggtgccagctactcaggaggctaaggtgggaggattgcttgagcctgggaggtcaaggctgcagtaagccataattgtgccactgcactccagcctgggtgacagagcaagaccttgtctcagaaacacaaaagactgtgtttctccagggctctttcacataccctctttcgttttcgagctatgcattctgactaggaagactccatagcctcaggtattatttttgagctggagagtttcctccttttgtacctccagtctcaatttttcttttgagtgccacactcaaatgatgccgtatctcctctgggatatctcccagggaactcagactcactctgcctcacgttgagtgcacagccttctcctgaaacccaaacttcatttggcatccactatctcatgatccattaggtgctcaagccagagtcttcctcaccttcccagccagttattcattgtgtcctgctgttttaaactatccacttcgtctgtttccactgcatccccatccttctggttgagatgtctccaatagcctcctaattggtctccctgctgccatgtttgctcacccccacttcatcacccagcgggagtgatgctttcacagtgttggtcagaccatgcaactcccctgcctaaatcactgcaataaattccccttattccgagaataaaatctcaattccttcctttggcgcagtggatgttgtggtgtgctgccctgaccttcctacaagactaagacatttatttccccagtgcctgggagtgtaggtgaagccgtccctgtgaactttatagaattaatcagggaagaaagaaagggagaaacatagtagatgaagtttgcagcacactcagctttaatcatgaggttagtttgccctctgacctgcttcctcatagtttggtgcttattgtcctggaatcatgtagaccctgttacaagattatagctctccttaactactctgcaggtaacaacttgaacattataaaatgttatgttttccctttgagatattctttcaggtcctacataccagtgaaactactgttttcagctggtctggaggaacccatgagaagctgattcaccaaggaatgcagttgccatgtcctgatgatttccttctatttgccccaaccaatcaatgaccccaaatttccagcccctcagcctccataatccccttaaaacctccagcccagaattccttggggagatggatttgagagtctccttccatctcctttcttggcaccctgtgatcattgaactctttctctgctgcaaaccctggtgtctcagtgcgttggtctgttactatgcagcaggcatatataccttttggtccattgactgctgataactcatagctgactgcctccctagaaagagtgttgccccatccaaggtcatgtctcttcattctgtgcaacaactggtcagagttgaggcacacaagactgcctcccttgcttccatttggaacatctttgagggtccaccccagttccagtgcccccacataagaccacctgcagcttctattgtcactgcagttttccctacttcctccctttgtccagcttgcttccttcccatccttatatctgttgttctcaaaaccactccccaacaaaatccctgcatgtgaatctctgctcagaatcttttcccctgggagcctgactcacaacataagtcttacaaggttctccatgacctggctccagctcaatgcccagtacaaagtggatgctcagtgagtaccttggattgattggctcattggctggttgcttggttggttggggtaaaatgcatagaacatgagaattcaggtgaagaatatctctttcacgt

SEQ ID NO: 7846 - DNA, 746 bp, mus musculus
aattactttggagagggaatgagagcaaattttatttaattgtgatttctttggtttgataccaaacctcaggttttcagtattatgaatgctattgatgagtttgtttttatcatgccttgtctctttcactgcagcaagggatacgtagctacaagacacctaactttataagactttctaaaagtaacccaaagaaaaatgttcaatgttagaggaacatgttcttcaaaaactagaaaatactaggctaacttaaagttaggacagtatttcattcacacagtgccacatttcatcttggtacactgtagcaccttacctgatcttgaagatgattgtctgagcaaaccacttgagttgtcctggactttcctcttcatgagagagagggtctggagagcatctagaggcacttcacacgtgcgttagcagacagggacacttggagcatctacaggtagtaagctctctacctggatggaggaaatgtggagggaaccttttgcccagagaagcagggcagatggactgtagagtccccgtgtaaatgaggcctctctctgaactgcaagaaggagttgaagaagaggtagatgtatttttcaccacctacagtaccttgcagttttgtaaaacttacacaagtaacacagccagccttttcaaggcgttggtaggtttgtgttttatccaaagtggttttagactcagattttattaatgggttatgtaggagggggaaa

SEQ ID NO: 7847 - DNA, 456 bp, mus musculus
atatccacattctcatttgcggtgattaaagaaccactctgctgaagtttctcatgacttgcctgacctcgttagtttctttgataccaaagacaggtgtcttcctttcccccttgcctactgtctcctttacacatgtggtgacattcaggtgaatttgaatggcttttggctaggcaagccagtatcagtaaacacactggcttggacatttggcccataactttttatacccgaggccaggtgttggccgatgtgggaagagggctggaaagaggcagaatggtatttgtgtgagtgccagacccctgtggactgttttgctgagatgctgtcttatggagtttgtagaggtgaatcaacaactgtctttgtgaaaggcaaatgtcaccttcaggttttaattctgagtggccagcagcccttacattgccactgtatatcatcagagccact

SEQ ID NO: 7848 - DNA, 2185 bp, mus musculus
tcatctcagacagtgtctgaacttaacaacaagactttttgtaggaagacaccttaatttcaaggtgtgcctctgacagcaggaatatcaacccatgtggtatgtcagtggaggagatatttttagaccaagccctgctattcacttgtagtgcagtggcactaacaccagcttaagatgacacccgtttgttatgtcacagttctggaggtcagaagcccatggatagcatgtggctcagctgtgtcctctgttagagtctcacaaggataagatcaatctgttggcaggaccagctctgggggtgaattaagttgttggctgaattcagttcttcgtggttgtaggactgaggtgactcttttctgctgggggctggtctttgatcgtagaggcagcctgcattctttcttatgcttcccatgtggctcgctcctacagcagcaggacaaatccctctcatgctttgaatctctatgacttcttattttaaaaaatatatttccataagtttttggggaacaggtggtgtttggttacatgagtaagttctttagtggtgatttgtgagattttggtgtgcccatcaaccaagcagtatacactgcacccaatttgtagtgttttatccctcatccccttcccaccctttccctctgagtccccaaagtccattgtatcattctcatgcttttgcatcctcatagcttagctcccacttataagtgagaacatacaatgtttggttttccattcctgagttactttacctggaataatagtctccaatcccatccaggttgctgcaaatgccgttaattcattcctttttatagctgagtagtattccatcgtatataccacagtttctttatccactcattgattgatgggtatttgggctggttccatatttttgcagttgcgaatcgtgctgctatagacatgtgtgtgcaagtatctttttcgtataatgacttatttcccgccgggtagatacccagtagtgggactgctggatcaaatggtagattccttaaagaactaaaagtagaactctctgacttcttctgccacatacctctgactccagccagagaaagttctctgcctttaagggctcctaggattatgttgggcccaccaaaaaaaatccaggataatctccctattttaaaggctatacttttaatcacacctgcaaaatctcttttgccatgtaacatcacttacaggttccagaggctagtagagtctacatgtgtttggagagccagtctgcctaccacactagagaaggaggtggaataacaggatttttaccctggctccaacacttactgtaattgtgagcaaatccctgagttctaattcctatctctgcagaggagataggagccaggacttaacaactctatcataatcccatttgagagtttcagcttaaataaaattgtatatgcaaaaagcatttctttttttttgagacagtcttgctctgtcaccaggctagagtacagtggcgcgatctccactcactgcaacttccgcctcctgggttcaagtgattctcctgcctcagcctcctgagcagctgggactacaggcgtatgccaccacacccagctaatttttgtatttttagtaaagacagggtttcaccatgttggccaggatgatcaagatggtctcaatctcttgaccttgtgatccacccaaagtgctgggattacaggcatgagccaccatgcccggccataaaaaacatttcgtcagttcagcacatacatagaagtcattgctaatactgttctttttttttttttttttttttgagacaaggtctcactctgttgcccagactgaagtgcagtggcctcagcctcccgagtggctgggattacaggcgcctgcaaccacgcctggctactttttgtatttttagtagaagtgaggtttcgccatgttgaccaggctggtctcaaactcccgacctcaagtgaccaccggcctcggcctcccaaagtgctgagattataggcgtgagccactgtgcccagcctaatgctgttcttataccacatggtgctatctctattttttaattttatatttttatttgctcttatgttgtgtggtttcccctctgccaccctcagtaattctctagtgaaagggagcagct

SEQ ID NO: 7849 - DNA, 565 bp, mus musculus
aagggccatgcagtggccaccttcacagtcacaccacagaagatccagaacctctggcatctgcctccgtgcggggcattaggtagagagccacttttctgcaggcaatggaggctgagacctttcttctttactagcccaggggtattgatggccctgcagagacgggttttgattacctctcactggatcccccagcagcctgttaccagaaagaagggcagacgcagggagcctgggtctgtgctcagtccccgctgggttttctccttttatggtcagcctacagtgctctggcttcccagacagaatccaccagcttgtgtttgggcttgggccgaaatagctggtctgtggggagctgggtacctcctgggagtcctcaggcccacagcgggggaggaaccgctgaagccctttatcttctcaggaaacgtgcctggggccttacacatccgaggctgggtggggagtctggggaggaggaagggagagaggcatgtttaaggatggggtgtgaggtgacatgagccccagggatctgggctgggaagctcagccccag

SEQ ID NO: 7850 - DNA, 437 bp, mus musculus
taatctttcttaccttggtgggttctaaatattctttctttcccacgtgtttttacctctttccactaaataaactctttgccagttagaaccactttgttatgtcttcccacagtacactgtgttttcatgacttggcatttctgattcttttaaaaccattaatctttctccacagttataaaacatgctaaataataatggaatttgattgttgaattcagcttttgtgactctctactcaggctcaagttgatgaaggagtccctctgaagatttgcttatctcagttctgtaaatggattcataagattcagcaacagaagaacattatttttgctactgggatttcagagccttctgcttctgaagtaaaattatgtgcatttgttacttggtcaggtaaagaataagttatacctattaatcacagatgg

SEQ ID NO: 7851 - DNA, 437 bp, mus musculus; identical to SEQ ID NO: 7850

SEQ ID NO: 7852 - DNA, 1791 bp, mus musculus
cctttgatctggaagtgacttcagaagacaccttgttcacagtccttgaagacatagtctggccggcagaattcccaactcatgttgtccatagcagatatcaccaatagatgactgcattttccctccatggagccctcacagagctcatcacatggtgctcaggaagtcaaaccaaaggatcagaatcagtcagcagaggagatgagttctctatgccatctcacatttatccccaaagcccagggaggctgtgtaatttgttcaaggtgacacagcaagtatgtggcagagcaggggctcgaattcaggcctctgatctttaaggcctgtgtttccccctccacatcagtgtttcaggaggtggaagacttgaagcactgggaagctgtcttgcattgcattaaacaacattgccacatagggaggaaatcatgcttcccttttcaactctccattagtacttctaaatacctcaagaaggaagtgtcaatttaaccctgtataatacattttatattctctctctctctcttttttttcaagaggccaggggttcagatattgttggcggacaaatctagctaggattcaacaatattgttttatttttattttgcggctcctatttaatgcttgcttatggcaagtctgccggctttccatttttggaaacttccattttaaattttctatttttaaatgcatttactttggtagtgcaagagtgatctaattttaaggaaatatcttaaagaggaccacacatgatacacacaaggggatggcaaagttgtgtgcatcctgcgcggacgcccgagatgtgggaaatccggggaggggccccgtgtgagggtgctgcccctttgcctcctgcaggagctgtccgcggagcagatcgcctccctgggtccggagaacgccgcggcggtgacccacgcccagcgccggcggctcagtccactgcagctgcagagcctccagcaggcgctagatggcgccaagactcactcctggcaggacgcgcccgctagcgccggtcccactagaacctcatcctcgcgttctcccgcaggtgagcagagccgccctctgccccgcgtcccagccccactctccttccttgtcctccctgtcaggcctggggtggggaggttcttaagattcagagcgaggtctctgacagtcactggggattctgccctcagtgaaaaacccaaagtccctatcaagcttccctaccaagcttcagaattagtgattctcaactatggctgcccttgggtggggggcattaaacatcttccagttctcccacccctacccagaacgcataacatcagaaactcaggactaatttcattttagccgctcctttgcaaactccctcctcactatccaataataatgaactattattattattattattttgactcagagtctcgccctgtcgcccaggctggagtgcagtgccgcgatctcggctcactgcaacctccacctcccaggctcaagcgatcctcccacctcagcctcccagtagctaggatcataggtgtgtgccaccacacctggttaatttttgtatttttagtagagatggggcttcaccatgttggccaagctggtcttgaactcctgacctcaggtcatctgcctacctcagcctcccaaagtgttgggattacaggcgcgagccaccaagcctggcctgtccaatattaattaattcaacccatgtttactgggcacctactatgttccaagtctgcagtaggggctgggaat

SEQ ID NO: 7853 - DNA, 1309 bp, mus musculus
tcttctatgtatgttttttaaactgtgggtcatcactcattagaagttcatgaagtcaatataataggtcaagaataccatgaagaaagcagaacagaaaatatcacagtgcatcactctcaggaagggtagatattgtttcacgaaactttttttttttttgagacagggtctttgtctgtcgcacaggctggagtgcagtggtacaatcatagctgactgtatcctcaacctcccaggcccaagagatcctcccacctcattctcatgagtagctgggacttgaggcacatgccatcatgcctggctaatttctaaaactttttgtagagatagggtctccctatgttgctcgggctggtctcaaactcctgagctcaaacagtcctcctaccttggcttcccaaagtactgggattataggcatgagccactactcctggcctcatacaatttttatttgatataaacatatatagccatgagtgaactgggtcaaaatgtaaaatgtgtctcttactgcaggtaactgtcaatgtagttcgaatatcactgtgaaatatatagagaagaggctctgggggctcatgaacttggcccatggactgttgaggctttttttttaatctttagagatgatataaatgtagtgctttgaattctttataattagaagttttattcttaccccatcaccatgtcccaagataatttttattatcatctttcagctttaacatatcacagacaaaagttatttttccaaatagaattttaagtatggtataagaggtttttagaaatggaatgattggttttggcggaactgcctggcctgacctgtcactcgggtgaagtgtcagagagctgtgtcgaatgctggcggagaactgtccctctcctgcagagagaaggagctgcttatcctgggggataatgtgggttgagaaagaagtgttttatgagcagaatcagcacagagggagggaggaggaggtgtttaggggctgcagagagccgccagaagatgtgggaacagtatgccagcacggaggtgggtcagatccccatggtgggactctgctgagggttgcctccagccgagacttccaagggctgggattcagtgtgtgtttatgttctctggtgtgcctgataggtgggggcccacatgacagctggcctctctgtgtttcccttctggccgtctctgatttggggcccaagggccataggggggccagggcactccagatgggacgaaaagtcaagtccaagaaaaaaatgaaatccgggctaggcttgtccc

SEQ ID NO: 7854 - DNA, 316 bp, mus musculus
agggaaagaggagtaaatgttcagatgatgctaatttgtgcctctcgccgccggcaccagggtgtttgtgctgctgctggtcctggtctccatcctctggatccctgtggtccaggccagccagggcggccagctcttcatctatatccagtccatcagctcctacctgcagccgcctgtggcggtggtcttcatcatgggatgtttctggaagaggaccaatgaaaaggtagctctggatggctcccactatgccagaaccaagtgctgccccttgaggactgggataggatgggaggggagggtgttggaggga

SEQ ID NO: 7855 - DNA, 316 bp, mus musculus; identical to SEQ ID NO: 7854

SEQ ID NO: 7856 - DNA, 1019 bp, mus musculus
tgatgctctgaacagggaaagtttagagtgagggttgacatttcacatttagcatggtgtttaacaacttttcacaagccatctctgactttcaggaagtgaaatgaaaatggcagaatttatctgaagatccacaatctagaaatggaaccactgctcttttgacaggtgccatctcagtggcatcactggaaagtccagattgcctgacacactggtaaccaatgactaggggtcaggtcccaacagatgtctgggcttaagggagttaagtctatgctgaaagatggaaagggagaagaggacataaaaacaaatttgtctttctataccacaaggcttttgtgccaaggtggccatgtgtgtcaaagtcagggaatccctcctcctgggagccaagaggaagtctctcaaaactagaagggaaaggtgttttctccacatcaatccagctttggagacattctattagtgacatatgccccttcccccaaaaacaacaatgaagtgttctgtgtgctaacaacatagctttaaaaaaaaaaaaaagtaaaacaaaattccacatttttataaaacttgataaaaaatagtattccaaactgtacagtcaccagaagtacacagttatcaaaaatgcacacacttcacttggcatctccagcaccttcagctttctgtgcctggtctgttttggcatctccattttctgcagggttattcccctccttgccagcatcagcttttccctttttccctttgggtaccttctctcccttctttgcaggggcctttttagtcttgggctctggctttggaggagcaggtttagcagacaacctcgcggatcttctctgtggttcgtccttcaccttggctttatctcccttagcatccccttcagcctttctcttgggcatggtggtggcggcgacggcagcaggacgtaggtgctggacgcgggatgcagtggcgcgcgggctttggtcggtctgggggtcgttctcgcctcttcttca

SEQ ID NO: 7857 - DNA, 716 bp, mus musculus
ggggtgtggggggctgagctgggcacatgagtgagggctctggcttactgggaaacagcgattgacctgtgcttctgacagcccccgagacaccttgaggaggccgctccttcccagacacacccccacgcccccactggacggcattggaggaagggacagctgcttgggttctaatgctcctgctctcttctctttcccctccaaccagttcaatctcatccctcccagcagctccccttccaccccccggggaactgaagattgtcctggccgcgacctgagacctccatgagtggagggaagagtgatctatgtctcttcccccagcagctcggaccactcccagccccccatccccccgttccccaggggagctggggaattcctgccaagcaccttgaatgggaggggcctcacagagggcagggccagggtccagcaggggtggggggttcctgctctgcccctgcccgtccccacccagtcttgccctcccatcctctcatctattcccccgctggagacggaagatcttttattttctattatttataacttcagacttgggccccctgttctttctttcccattaacttgagtgacctgtgtgagagacagacagatgccccacgaggatggctggacaaggacttttactttttattacataaaaatattaaaaaataaataaaaaaaataaaattttaaactaa

SEQ ID NO: 7858 - DNA, 509 bp, mus musculus
taacatgtgtttcaatagaagaatcttaactaaaagcagaaagttggctaaattcaaagtgcttgacttcaaaatattctagagtgattagctactagattctgaatcagacatcacatctgactagagaccagtttctttcgaatgattcttttacatatacagatctattcttctgaggcagcggttggccaactatggcccgaaggccaaatttggacttgttcttataaatgcagattgtctatggctgctttcccactacaccagccaaaggtaaacagctgcaatagaaaccaaatgagattcacaaagcccaaaatgtttattatctggccctttacacaaaatcacacaaaaagtttcctgatctctgttctaagaaaaggaatgtgccttgcatttaaaggaaaatgttggtttctagggaagggaggaggctaaataattgataaggaattttcctcttttgtccttttttttctttctcattgaagaatctgatactg

SEQ ID NO: 7859 - DNA, 520 bp, mus musculus
ggctatctgcatttttatcgagccttccccagggaatatgaggatgaggaaggtctggaaacactgggttatgttaacctgcccccagagaaactgatgttggatggaaggaagaaatacaattcagtgaacgctgagagtgggaacagcttcacatacagatcagactcaggcatggcaccaggaacctcaggttgaacaaactccttgcatgactatgaagttcaagaagttgtgagaatcatcaattttggaaacatctgccacaagagagaaaatctcagcccaactctggctggtcacgttcctaaaattccccgaaatgttgagtaagccgtaagttaggggagagaatgcaccagcaagtccacagtcctctttgtgcaggtttggtgctggctgttgcaaggcggtgtcttttgcttcctcttgggccctcctaaggcctagaacttacagtacaaattacccaagactgggtgagggagacaatttacccctcatgctttcactgcccaca

SEQ ID NO: 7860 - DNA, 308 bp, mus musculus
agaagagctactcatctgttgtgtccctagggggaagcactgagctggcagtggaaggaggtgtccaccaggcctatcacctcacaaacgggacttgacaggagctgaaggagggacccaggaaggatttcctgccaggagttggaagaagtggaggcagcttgcccacaatgggggggattcctgccttgaaatgaggaatgctcactgctggctgaaggatccagcatctccaagcctggaaaaaggaagaaaacaaacggttagcagaagtctgcagtccaagccagcaagccacacaaagaaca

SEQ ID NO: 7861 - DNA, 729 bp, mus musculus
tgccagtgagagtatcacagctgccaggaccaatgattggttcagaggtgggcctgtgactggaatctggttaatgagaatatcatagcccctggcttggtgattggtacagaggtgggcagggactgaggcttggctttggtgggacctttccatgaaaagcttgctgagccagtggtatgtcagtctggtgcttttggggcttgagaggaggccctgcctgagaataaagctaatggtggagaaagcagagccaagagctagtggcctggtgacagtaattgagtctctggatccagctgagcctgaagttcatcaacctcttacacttttcaatccaagggttgaataaattccccctctgagttttgtgtactttgaactggatttctagcccttgcaactgaaagaacataggctgacttgtgtgtgcatggacacacacacacacacacacacacacacacacacacacacacacttcattcagtgcctactgaggagtccctctgcttagggaactgagcactgcctgttcccagagcatacagaggtgaccaggacagttcctgacctcaggagtcccaggaatggggcaacaagtccgacttcttgctcagatacttttaagtgtggcgggcccattctcaccagggccagctacgtcatttgtagggctgagtgcaaaatgaacacgtggggtcctttgttcaaaattattaagaattt

SEQ ID NO: 7862 - DNA, 629 bp, mus musculus
tttctcagctgaaatatagagctaatatcactacctgctgcttaaggttattaaataacaggcacatagtagtcctctatgaatagaagttgttattgttgttagtctgccattcaagttccttctggatctgactccagatccaaacaccacttttcaaggttgcaagacaacaggcttgtgtggcagatattcctgcaccgagttgcattctcactggtcacattctcttccccgccgatccagcattctctcccacctctgcctctcagtcacacagtacttcagctaaacacagggcccgctaaagtgccctctaccaagccacacatctgcatatcctcattctctcaaacccaccttaagcaccacttcctctgtgacaccacccaagagagccaggcaagaagtcctctctcctcctgggaactgccacagcacccactccactgtattccctcatattctgcagccctcatcacttttaacccattgtcaaagcaaggtgcactgtcctctccctgaacaattctcgtctttgttcatctttctctcccacctgcacacactgggctcagtgcaagcttgcggtcttgtttatacctgcggtaagttttgacaagacaaag

SEQ ID NO: 7863 - DNA, 1010 bp, mus musculus
gggatttcttccagaaagcatgtatgaacgtattctcactggtcccgttgtgagagaggaagtaagcaggcgggggagacggcctaaaagtggaattgcaaaggccacagcagcagcagctgctgcatctgccaccagtgtttcaggcaatcctttgttagccaatggactacttccaggtgtggatctcacaactcttcaggccttacaacaaaacctacaaaacttgcagtcactgcaagtaactgctgggttgatgggaatgcctaccggccttccttctggaggagaagctaaaaacatggctgctatgttccccatgctgctgtcaggaatggctggattaccaaatctgttgggcatgggaggactcctgacaaagcctacggaatctgggacagaagacaaaaagggaagtgactctaaggagtcagaaggaaaaacagaaaggacagagagccaaagttcagagaatggtggagaaaactctgtgtcaagttctccttccacatcctctactgctgcattaaatacagctgcagctgccaacccattagctcttaacccactattactatctaatatactttatccagggatgcttctcactccaggccttaatcttcatattccaactttgtcccagtccaatacttttgatgtacaaaacaaaaacagtgacttaggctcgtctaagtctgtagaagtaaaagaagaagattccagaattaaagatcaggaagacaaaggaggaactgaaccaagtcctctcaatgaaaacagcacagatgagggttcagagaaagctgatgcttcatctggatctgatagtacatcgtcgtcatctgaggattcagattctagtaatgaagactgattcccagactctgcacttaaaatatgaactgattttggattttttctttaataattaattgtaaataccccagtgttgagtgcatcaataacttactgaccgaacatttcagttatttgtttagaagtgcaaa

SEQ ID NO: 7864 - DNA, 917 bp, mus musculus
ttttttttttttttcaaagcaacctaatttaagtgtaaaaatcaacttttctctaaacaatgcgtcaacaacctgagagctgtgaatgatggtgctaaagctgggcaacatgtgaggaaaagcttttatcaaaagcccagggggaagctggctccatgcttgcagaggacattcctgaactggatggttcacccaccatgctatgccttacattcttccagatcttcattgtcccatctgcagtccctgaacaggagccacgtgccttcagccagtgtcacagactctggctcattgtgcctgaccccgtgctccccagcttccattcttcctccttctagtaatggggctgccagttccctctggcaatttcccattcttggttcacgtgtgttttgggagacgttgattctcaggtggggatttgacgcacgcctggccaatcagagcttgtggtctcagctgtccttgcagggaggggcgaatgatgcaattcaggctaataagagtcaagaatctttgacctaaactgtctttgacccaaactatcagggacaagagccctcccttccactatgccagtatggtgaatgtggaggtctggagcatggaggtctggaggtctgattatcttgccaccctaggatccaacagacagaagcaaagtggagacaatgggactgagtcctgaggacagtattgggccccagatcaagccatgtctgaggcccatggtggactttttagtgatgtgggtcaatcaactccctattttggcaaaagcccttttgagttgttttctgctgttatcgtggaaggagtcacgattaacacaatctattccaaatgttagatctctgccttgaacagatgaattgtggatatccaaatccagccagggttccaggcttcacagc

SEQ ID NO: 7865 - DNA, 1094 bp, mus musculus
gaggaattctgtatcgaacatgttcttgcgtagatcgacagtaatgtacaagtctattgatgataacattgatggaagaaatattaacatgtgtttccaggtacattgtatacctcacttaatgggatttttacaatattcctgtagggtggcttagactattgtagtgggttgaatggtggacccccaaaatatacccatattctaagccctggaacctgtgaatatcaccttatatggcattaagtgtgaaccttatttaatttggaaaaaagggtcttcatagggctaacgaacttacagatcttcagatgaggaaattaccctgcactgattcaacccaggcagaagggaagaagacatagacaagaaggacatacgaagaaagaggacaaaattggagttctgtagccgcaatccaaggaacatctgcagtcaccaggagctaacatcagagccactagaagctggaagaggcaagaaggattctcctccagagccattggagggaatgaggctctgttgagattttggttttaaacttctggcctccagaactgcaaaaaaatagatttcaatcgttttaagctaccaactttctatcaattggttagggcagccacaagaaactaatgcaagtaacaattccattcaacagataagaaaactggcagttggagaggtaaaattaatcacccgaagtcatgaagttagagagaggcaaagctggggctgaaacctgggcctgtcagaatccaaagaccttgttcttagccatattgccggtaaatacgtaccatgttggtcattcatttctgtttctctgcctaatatggttaaggcttacataatcatataagttgttggtttacctaaaagctattgagggcttgttctgtgactttagactctgaacagcaaaatttcaggaaaaagagtacttttgttatctattgctatgtaacaaactaccccacaatgtagtggcttgaagaaactgttttggtttgcctcactattttatggctcgggaatttaggagacaattgattgagcagtttttctgcctaataggggcactgacctggattcac

SEQ ID NO: 7866 - DNA, 948 bp, mus musculus
cactaaaacagtaataaagcaaggattgaatgaagtcagtgcgacctacatttcatgtgacctgtatattttgggatacttgtgtcccaactaattggaatttaaggtctgtcaaaacattgcattatttcagcacaacccccactgctgtctgccagtcacttcagcaaacatccttctggttctctttcccagtgtttcctcctgctgctctggtactcacaggaggctttaatggacactaaatcctccctgccctatagtcactaaatcaggctcttaatagcatcctattaattgtataaaataaggatttgaagcaaaccagaaaggttttttttttttgcattttaattaaattcacattggtttgaaaaatcagatttattgagaccttaacaaccacacaacacacataactgggttgttaagtctcaataaatatttttgagaaatcaattgacttttgattaacaacaatatctgttttaataaatctcagtgaaataagatgttgagtatagatagacagacattttaattaagctgggcttctttactcttacccctaaatgccttgacccagaattgcttatctcagacttttttatttgggaaaagaaaaaatatatcttttcatctgttttaccaaaatgggtgaataaagacaatgtcgtttctgaaactgcatggagactgaatagaagcttcttatgactttagcttctcagaatctgcaccttctcaaagaagccttccatgaccaccctgtataagatgttttatctttccaaaccatgtgtgttttcttcacatactttacgtaattttaaatcatgtcatttaattatgcacttacttgttggctaccagacattgcttccaattgtaaattccctaacaacagcaagcataactgatgtgtccatctttgtattcctaaaacaa

SEQ ID NO: 7867 - DNA, 307 bp, mus musculus
tgatgagtggatatttatatatttaaattaagattgttctttaatttttgaatactcattttgatcctcagcctaccatgtttttagttttgctaatcatatcagtcagggttcctgcaggaaatgaatagaacaacaaggatgttttaattaatgagaatttaatgaaaggctgtttgcaaaggtatgagccaatttaaggaaaccaacaatggatacatctaacttgtggcagcagcaggatgcttttctcatccttagacctaaagggaaaaggaaataaaataaagttatagagctaggcaag

SEQ ID NO: 7868 - DNA, 821 bp, mus musculus
tcttcccctctcttgagagagccacttcttggttaatagaaaggctataacttataagctttgttcattagacactaaagccccaatttgattaaagttctaatttaattataaactactctagatatgactgggatttcaaggagtgaaataaagtgactactctttatactctggcttgctggaaatttcacaatcttatcctcaaaaattattgaaattctggtggtcaactcctccttctgtgtacaacacaacgcagacattttttgataagtatttgatggtgtcaaaagtctgcatttgaaccacagcaagaatacagttgccataacagagaaaggggaatgcataaaaacaatactgtaaagataaaaactatcaaaaatatccccagaagcatggctaccctcttggtgtccgttggttaattacattctaacttgttcctcagctatctaataatctatggatttgataaatcatcactaatgatttagaaattaatatgccatttatgggcaaaatgtgtctcaaaaagtttcgtctttagtcattgagagcttaaccccactattgacattatttccaatatcttctttcaaattcccatcaattttattttaagcttactaagttgctgtatttccatgatatattcaattcacatcttcttatttttataaaattccactgctcctcttattacctattcaattataaattctcttattctgcattccccaattgactataatttagtgctcatagcttctacccttctacttgtagaaagctcaagaattatttattgtgcccca

SEQ ID NO: 7869 - DNA, 152 bp, mus musculus
ctagccacagtcctactctatcagagaccaaccaatgtcttctcatttggttaaacctaccagccctaaagtaccacagagtaatgcttgttatgtttctatgtcatgggaggaggagaggatgggaggggaaaaaatcaagtaattacata

SEQ ID NO: 7870 - DNA, 1762 bp, mus musculus
gaaatattattgaattcatgtttctggtctcataacagagttgaaacagagctaaattatcagtagattgaccattcatttacagatgataacactgaagttcataaagtaaaataatttgcctgaagtcacttggctcatatattagtcattacttaaacttcatgctggtattgtgtttttgtttgtgtgtttgactgtgggtaattatgtctgtatgcccactacatataattattctttgtattttcaattcatgccaatttctagaaaaatattctcttgaattgatctgatgtttaagatgtacaaaattattcttagatggaattgaagattttatttaaaaaggccatattctgaaccaaaattgtggattgcacagtcttcccattggcgtgaggctttacaggaattatctcaatctttgctcccaataactctaccaaccacagaaagttagttttaacctcttttttttttttttttttttatctttgttgctaataaggaaactatggcttagagagtttaagtaagttacccaaagctacagttctggcatgcagtacagacagtttgaaacgctgacctctgttttaaaccatagatcttccacatagtaaaaccaattatagtataatcatcagttattatcctatagtataaccaattactgattatagtaaccaataggaacaacacagtgtggaggcgccataattaaggaggctgtgggattgtacatgaaagtcaaattgaccaagcctgggatcccaggcaggcttgctagaggagagggtgcccaagcaaccaaaagaagaattttttttgctttgttttgtttttggagggaggtgtgtgcaaggatatagagaagcaagtgaaaaaaagtgaatttcaggaatttaaaactaatccttatggtaagagtaaagtttgtgggaaattcatagaagtgtagcaaaaaatgaaatgaaaggcaggtagaggccagactatgaagagctgtgtgattcttattttattccaaagtctatgaaagttattgaataactttatacaggtatgttgcctcttcctgtgttttaggaagatcatactagcagcagcgtagaaggtagaatgggggcataaggatgaacataatcattataaataatcaccacacagcagggcttgtcagctctgcttgtggggaatgaggtggagaactgctgaaagtcctaagttcagatcagcttgtagaatccctgagccacagggtgtcctggtatcttgagaaaatcatttcagccagaactgtggtgccatcgtccatttattttacattttttagacattcccaggagactgtcttaacacgagggaaatctgactcaacgcaaaatataccgtcaatttatttttcacttgggtttataagaaattgggttagttatcaacatgccatgtattgcaatttgaatttgaacaataaatagattttcttttaatgttacttatctctgcaatggaatgtatcaaatttcaaataaataatattttgttgcagtttctctctttggcagtgttgtggtctatatatttttcgtcactataattagtctttcatcttaaacagagtgataattcattgcatgacattcagtcagaagttttgttgttgttgataaggcaaagcttatcattaggaaaaaggaggaaaagtctaatttgctagaagagaacagagtataaaaataatattatccattcagtt

SEQ ID NO: 7871 - DNA, 647 bp, mus musculus
tttaaggtctctctagattgagagaagagaggtgctaaattacaagagaaacaactcactttccaggcctctgaccttcctccttctacctccctcacgttctaacctgtttctctaatacctgaagctccaattttaccatatgctcaaataaacaccacacaatctttgaattttcaatctatgtatgatccaaaataacataacaagcatatacaatatttaagatgaaatttccaattttacaccagattgagaggaaatttactgatacctagttggatgtggctaagcagagctcgtgaagatttcttgattatccagtttttttcaatcgatgcagacggccaaatcaaagtttcaggccaaataaaatttatcttgaagcctcattgcttcactgaaattaacaggattaaccagataattggcaaaactttgtttccgttcgtgggatgtgaaatggattcaggtgacactgctctcccaggtgtatattagacacagctgggatgccatctatggtcctcattaccgtgttatgtgggttacggaagcagaatctttcttttctgaggaagcatggcatcgttttaaagaacatatttgtatcagactgtttgaggttccaccatttattgtaagtc

SEQ ID NO: 7872 - DNA, 753 bp, mus musculus
actctcatttttttttcttctatttcatacttctgagaggtaaccattgttacagtgattgttcatgattagaagctagtgatcagtaaccaaaatccagcacattctctttttgggcctcatatgtgtcaaacacgttaatagcactggagacgcagcaatgaatggaaaaaaaattcctgccattaccaagctttcattccatgaggagataaaaaatgtacctactggattgataagtaattgtattcatctgttctcatactcctataaagaactatctgagacctggtaatttataaagaaaagaggtttaattaactcacagttccacacactcaacaggaagcataactgtgaggcctcaggaaacttacagtcatggcagaaggtgaaggaaagcaagcaccttctttacatgatgagaaagagatagagagagagagatagaggagagagaagggggaagcactatacactttcaaataaccacatctcttgatacatcactattataataacagcaaaggggacatctgatgccatggtccaatcacctcccaccaggctccttcaacatgagatcacaattcgacatgacatttgggaggggacacagagctaaaccatatcagtaatataacaaattatgattaatgatttagagaaaaaaaagtcatgcaacttgtttattgaatagcagatatgattttgtctctctctgtgtctgtgtgtattgggggagaatttagg

SEQ ID NO: 7873 - DNA, 603 bp, mus musculus
taataagtgaagctattaagtgaagatgtataagtcaggaatatctggaatcaatgcatttatttttcttttccatagttactgcatatcctttcagtcatgggaataaagtaaatccatagcatttaaaatatatatttagttctgatcctcagcttctgttgctaatctataaaaatgggcgctttcaaccatgagactaaaacaccctggaacttactaagcattatttaataaactcttagccttttgcatttctttttgttttagtacgtatttttcacttttagtttatctgaaatctggcattcggatagccaaaaaaaaaaaaaaagcataattttcttccttttacattgaaaaacaaaacaactcaaatgcatttctattgttggttctgctacaataatgaaacaaaagtgttttaaaaataaaatagtatagcaggaaatgggctttataccagatgtgtctcacaaatttcagctttcccattctttagtcaaaggccttagataattacttttttgcaacatcataataatatctttattatattttacaataatttagcttgggatgtttgtcttttctgacatgtta

SEQ ID NO: 7874 - DNA, 873 bp, mus musculus
taaagcagaaaagaaaaatggtgcaacagttaagctttttaatgatgggcactaaagcaatgctgctgattagattctttgctaattaccttctgttacttagattggatgtatttcagcagaatagaaacatctattcataaatagttgttttcttggtagcaatatgaaaacatttgactctaaagttgaaaactacctctcaggattgtatcatccggtcctcagcttgctgacaaataaaatcacgtgccatctgaaacatggctagaatggcttgtattccactgggtggtatccgccttacataaggaagtgaaaggctgcagcagtaatatttatgctgagacttgaaaaccaaaaggtctgggtgaagagctttggagatggggaccagactggaaaagcaccgaggcaaagatgagctaagtctgtgaacaaaggagaaagtagtccaggatgaatttagagagttaggaagaagtgacatgggctttctaggccagcccaagatattagtgttttagtctaagggttattggaaagcctggagggcctaatcaaaaactaatatcatctaattaagtcttaagaaaatcacctgtatgcccaatgaacaatgggctgtgtgagttaaagatgaaaatagggatccatattacaaggctatagggaatgaattgtgacacctgtaccccctgccaaattgatatactgaagccctaaatggcaaggtcactatatttggagataagaccttaaagaagataactaaggttaaacaagggtaaaagtgtagaattctaatccaacaggaaaggtgtccatatgagaggaggaagacacaccagaagccaggaatatacacacaca

SEQ ID NO: 7875 - DNA, 966 bp, mus musculus
cttttttttatgtgttttgtttttgtctttctcaattattttaagctacctagggagtagaaaatgttaattatatcccccactctgaggttaggcaaactcaaagtagacactcaatgaacagttgttaaatttaaaattgaatattgatatacatagccaagcacagacataaccacttgtcaaatatatcttggaaattgattcagcgatggtgtggaaatttggaagatgttaccaaaccctaacatttttcttcagtgcaacatagaatcaccctcctgaatcctagcaccacagaatgtgtgagcaagaacatgctgaaatgtgtgttatgcaattcagccaactccaatgctgcccccagtacatttcccttttgccaattacagaactcatctgttctctttgccatgtagttattgagcttttcttggcctggcgtgccactcagggccagcccaggcattaagttgactgtctggccttcattagctgcatctaattcattccccagaaaacacccccaggccataaaatgcatctgtgtgttgtttttattaggtcatctgattgagcagatgctgatggctctaaaaaaggagtatttcccctgccaaccttaatttgttctgtttccattgcaggcaggacccatcaatagtgctatttctgtgttttcatgtactatttcagaccacatagttatttctgtattagaatatctaaagtgcagagctatttttgagagtcacctgatgactcttctttaacatgccactgattcagagattccataagcattttgctaacgtcctcagtcccatgtcatactacactgtctccactagacttttccaaacagggattgctgcccacatgttatcaatgtcaccaacgggccttctcccttaaaagattctccaactatgaaacaagttggcttaggatttctatagcaagcga

SEQ ID NO: 7876 - DNA, 1105 bp, mus musculus
taaacagaagattttgtcttctgggggtctttataaaacttcctttcctctatgtggtggctacagagagtccaaccacacttacggtaagacttcccattaagttagtataggaccaatactctttctcagacattggcagaagctagccatcaccccctataagatggtaggccctaagggctctgcatgtcctcatttttaaaccttggaaaaacagctaccttcctttgcaaagagaaattggcattagccacttctaagagactacagaccaacatatttagaatcttcctagttcttaggaagatgactcctaaatggtgtctggattcatttgttaaaagttcaaaattgtcccaacctgccaagttgttgggtgtaatgttttcatggcagcatttgtagaggaagagccaggcaggggtcaattttacacatccttagggattccaggcaaagctctcatttcctatactgtttcctgttctgagcatttatacctcatggtttatggtaatcagagttcctctggcagaagaacccaggaatactggacttaacgaatgcttaccttctttttctttccctccagtcattgtagtattgtttgtgaccctgagaaggcaaaagaaagaaccactcattgtctttgaggaagaagatgtccgtgagaacatcattacttatgatgatgaagggggtggggaagaagacacagaagcctttgatattgccaccctccagaatcctgatggtatcaatggatttatcccccgcaaagacatcaaacctgagtatcagtacatgcctagacctgggctccggccagcgcccaacagcgtggatgtcgatgacttcatcaacacgagaatacaggaggcagacaatgaccccacggctcctccttatgactccattcaaatctacggttatgaaggcaggggctcagtggccgggtccctgagctccctagagtcggccaccacagattcagacttggactatgattatctacagaactggggacctcgttttaagaaactagcagatttgtatggttccaaagacacttttgatgacgattcttaacaataacgataca

SEQ ID NO: 7877 - DNA, 468 bp, mus musculus
ggttctccatcattacctgatgggaaatgtaacagagcattgtttttctcccttacatgtggcaggtgaccccagcatttcacctggacccagatattgttttatcacccttcgtagaacacattcttttgacaagcaggccatgtgggatcctcctccccacatccactcacttctttcatgttttcagtcaatagaaagttcaatttcaaatcctttgagaaatttattgggattcaatgaaatctatagtcttacagctgccaaataaaagagaaaataaaaatagatgtcttcttcttctaggcgtataccagatgtctgtgtcagaagcagccgtccctggggaggaagtaggaagagtgaaagctaaagatccagacattggagaaaatggcttagtcacatacaatattgttgatggagatggtatggaatcgtttgaaatcacaacggactatgaaacac

SEQ ID NO: 7878 - DNA, 333 bp, mus musculus
gcaggccatgtgggatcctcctccccacatccactcacttctttcatgttttcagtcaatagaaagttcaatttcaaatcctttgagaaatttattgggattcaatgaaatctatagtcttacagctgccaaataaaagagaaaataaaaatagatgtcttcttcttctaggcgtataccagatgtctgtgtcagaagcagccgtccctggggaggaagtaggaagagtgaaagctaaagatccagacattggagaaaatggcttagtcacatacaatattgttgatggagatggtatggaatcgtttgaaatcacaacggactatgaaacac

SEQ ID NO: 7879 - DNA, 265 bp, mus musculus
caatttcaaatcctttgagaaatttattgggattcaatgaaatctatagtcttacagctgccaaataaaagagaaaataaaaatagatgtcttcttcttctaggcgtataccagatgtctgtgtcagaagcagccgtccctggggaggaagtaggaagagtgaaagctaaagatccagacattggagaaaatggcttagtcacatacaatattgttgatggagatggtatggaatcgtttgaaatcacaacggactatgaaacac

SEQ ID NO: 7880 - DNA, 1601 bp, mus musculus
agaccttaatccattatttctcctgtaaatatttcagtaaccatcaatggtttcttgggatcttcccctacatcccttccctaacaggatccattgcctgcccgccttcttcgttactacctccaggcatgctgaacatcttggagcacactgtgcttttggatgtgatgttccttctgcatggaatcccacactctcctttcttattacagcaacctcactaaaggattgagtccagccatctgtcctctccctaaactgaaccccagtgtggattatatgttcctcatctggactcctttaattccccgttttcttattacaaaatcatatctaagcacaattttgatcaattataacagataaatatggagtgcttactatgtaccaggcattgtgctaagagacttatatgcattactcagtgaatcccagtgacagctttgtactgggtacactcttatccccacttcataaatgagcaagctgagctcaaagcagtcagtgagcttccccaaagcccgtagctcccacgtgataaactcatgcccagtcctgaaggcttactgaaaggaatggaaatgaagtggggatttggcctgcagttaatccaacctctctctgcttgcagaagctaactggggacgtgggcagccctgacgtgatgagctcaaccagcagagacattccatcccaagagaggtctgcgtgacgcgtccgggaggccaccctcagcaagaccaccgtacagttggtggaaggggtgacagctgcattctcctgtgcctaccacgtaaccaaaaatgaaggagaactactgtttacaagccgccctggtgtgcctgggcatgctgtgccacagccatgcctttgccccagagcggcgggggcacctgcggccctccttccatgggcaccatgagaagggcaaggaggggcaggtgctacagcgctccaagcgtggctgggtctggaaccagttcttcgtgatagaggagtacaccgggcctgaccccgtgcttgtgggcagggtaaggctgccttccctcaatcctgagctttccaacccaccattggaatagtcgtctgtggccagaaagaagcaaaaggcccacaggcatctaagagagaaaacaccaatggcttgaagagccagtaaaaccacccaaatattgtacataatatgttattccagacttttaaaaaaaataatagacttatccatgttgagaatacttcttaggtttttccatttagttttagggagttatatcataaaactcatttaccatattatttagatatggggtctctctctgttgcccagactggcatgcagtagtgtgatcatagctcactgtaatctcaaactcctgggctcaagggatcctcctgctttagcctcctgagtagctgggactacaggttcatgccaccatgcctggctaatctgtattttatttcatttttttagagaaaaggtcttgctgtgttgcccaggttggcttcaaacctctgacctaagtgatcctccctcatcagcctcccaaagtgctgggactgcaggcctgagccactacgccaggctcaaactccatttt

SEQ ID NO: 7881 - DNA, 1173 bp, mus musculus
ggtttcttgggatcttcccctacatcccttccctaacaggatccattgcctgcccgccttcttcgttactacctccaggcatgctgaacatcttggagcacactgtgcttttggatgtgatgttccttctgcatggaatcccacactctcctttcttattacagcaacctcactaaaggattgagtccagccatctgtcctctccctaaactgaaccccagtgtggattatatgttcctcatctggactcctttaattccccgttttcttattacaaaatcatatctaagcacaattttgatcaattataacagataaatatggagtgcttactatgtaccaggcattgtgctaagagacttatatgcattactcagtgaatcccagtgacagctttgtactgggtacactcttatccccacttcataaatgagcaagctgagctcaaagcagtcagtgagcttccccaaagcccgtagctcccacgtgataaactcatgcccagtcctgaaggcttactgaaaggaatggaaatgaagtggggatttggcctgcagttaatccaacctctctctgcttgcagaagctaactggggacgtgggcagccctgacgtgatgagctcaaccagcagagacattccatcccaagagaggtctgcgtgacgcgtccgggaggccaccctcagcaagaccaccgtacagttggtggaaggggtgacagctgcattctcctgtgcctaccacgtaaccaaaaatgaaggagaactactgtttacaagccgccctggtgtgcctgggcatgctgtgccacagccatgcctttgccccagagcggcgggggcacctgcggccctccttccatgggcaccatgagaagggcaaggaggggcaggtgctacagcgctccaagcgtggctgggtctggaaccagttcttcgtgatagaggagtacaccgggcctgaccccgtgcttgtgggcagggtaaggctgccttccctcaatcctgagctttccaacccaccattggaatagtcgtctgtggccagaaagaagcaaaaggcccacaggcatctaagagagaaaacaccaatggcttgaagagccagtaaaaccacccaaatattgtacataatatgttattccagacttttaaaaaaaataatagacttat

SEQ ID NO: 7882 - DNA, 554 bp, mus musculus
ctccaccaaatcttgagtttcatgacttctgctcagaaatctttctgttgtttcatacagcctcattttagcatctaacccgtcctctggggccttctttgtgctctttccaaacagtcggtttggctttctagaaacagcatctgatgtattattaaagtgcctgaatgtaaggatgaagttgttaaatgatgacgctgccttttccatctttctctctctcccacgtagccttttacatatcccaaagtgtctgtttacaaccaatattaagagtttcaagtcccctattccttgaataaagactaacataataccatcccaaagtgttattgagaaaagtgacagtcaccaggctttaactgcacatctgtggcctcccagataccactttgccagattacaaaggaaacagaaagacttgggatggcaaagtcaaagttcatcaaaatggaatggatctgtatctacaaattataatttcaccaattcttttattttctaggttgctgaggtcagatggctatggtatcccaagtaacttatttgttctc

SEQ ID NO: 7883 - DNA, 1558 bp, mus musculus
tttacttctctccgtgccctgccatggtgagaaccccaagcacatcagtcctgagacatcctctggcgcctcttgtctggccccacaagagccagcagggtggggagcagccattggatttgagtcatacctatgggctcctatttagaccctgggcacaggctccaagaagctgtccccctcccccacagccacctcagttcccccagttggaggcaagaccctctcctcgccccatcagcctccacaggagcttctgcccatggccaagaacagaccagcttggatcacgaaggactgagcacctggaatattctgtgcttctcccctgatgtctgaaggcgagtgcagcctcgggcctggcccacagtggctgatggtggaatgagtcagtgcccaagcaaaggtgagccagcccctgcaggaaggtcaagctctcctgcccaggtgaatccccctcatcccggatccctctgtgcctccccctgcctggggaccacacctcatgcttctcctggggttcatgagtgaactcccaatagctcttaaacacgaaacccatcttcattccactgtccttctgaaaggacaccttttgggaaaatgaacccaagtgtcccaaaagcatctgcctgagcaactatgaatgatggcctttcctcttcccacgtgtgtcctccaggagccccgtcttgccaagtccagaagaggctcatctgttctcatcgctagccactagatggcgacatcaggaattgtttaattttccaaagaaagttgcttgggaaaccacacagttctaaataaagcaaaaagcaatgaatgggaggaaggaggggaagtggaaaggcagggatttagaattccccatccctttacatggctatataacttgggcacgccctttaatctcccagaacctatgcacctgcaaaatggagctaagagaggtagctacctcctaaggtaatgctggaagacctgggagcatattaacctcctggggagctttacaaaatagtgaagtcagccaggtacagtggctcacgcctgtaatcccagcactttgggaggccaaggtgggtgggatcacttgaggtcaggagttcgagaccagcctggccagcatagtgagacccccgtctctactaaaaatacaaaaaattagcagggtgtggtggtgcacacctgtaagcccagctactcgggaggctgaggcaggagaatcgcttgaacctgggaggcagaggttgcagtgagccgagatcgtgccactgcactccagcctgggcgacagagcaagactctgtctcaaaaaaaataaaatagtgaagtccagcccccaccaggccaattaaatcagaatctctacatgtgccttccccagatactacttggatgtggggaggggagctggccaggcagttccagggcacagcctgaagtgaggatctctgctccagggcagcagttctcaagcttgggcatgcatcagaatcactggaatctcttagtaacacagattgctgggtcccacccccagatcttctgattcggc

SEQ ID NO: 7884 - DNA, 1571 bp, mus musculus
atcagtcctgagacatcctctggcgcctcttgtctggccccacaagagccagcagggtggggagcagccattggatttgagtcatacctatgggctcctatttagaccctgggcacaggctccaagaagctgtccccctcccccacagccacctcagttcccccagttggaggcaagaccctctcctcgccccatcagcctccacaggagcttctgcccatggccaagaacagaccagcttggatcacgaaggactgagcacctggaatattctgtgcttctcccctgatgtctgaaggcgagtgcagcctcgggcctggcccacagtggctgatggtggaatgagtcagtgcccaagcaaaggtgagccagcccctgcaggaaggtcaagctctcctgcccaggtgaatccccctcatcccggatccctctgtgcctccccctgcctggggaccacacctcatgcttctcctggggttcatgagtgaactcccaatagctcttaaacacgaaacccatcttcattccactgtccttctgaaaggacaccttttgggaaaatgaacccaagtgtcccaaaagcatctgcctgagcaactatgaatgatggcctttcctcttcccacgtgtgtcctccaggagccccgtcttgccaagtccagaagaggctcatctgttctcatcgctagccactagatggcgacatcaggaattgtttaattttccaaagaaagttgcttgggaaaccacacagttctaaataaagcaaaaagcaatgaatgggaggaaggaggggaagtggaaaggcagggatttagaattccccatccctttacatggctatataacttgggcacgccctttaatctcccagaacctatgcacctgcaaaatggagctaagagaggtagctacctcctaaggtaatgctggaagacctgggagcatattaacctcctggggagctttacaaaatagtgaagtcagccaggtacagtggctcacgcctgtaatcccagcactttgggaggccaaggtgggtgggatcacttgaggtcaggagttcgagaccagcctggccagcatagtgagacccccgtctctactaaaaatacaaaaaattagcagggtgtggtggtgcacacctgtaagcccagctactcgggaggctgaggcaggagaatcgcttgaacctgggaggcagaggttgcagtgagccgagatcgtgccactgcactccagcctgggcgacagagcaagactctgtctcaaaaaaaataaaatagtgaagtccagcccccaccaggccaattaaatcagaatctctacatgtgccttccccagatactacttggatgtggggaggggagctggccaggcagttccagggcacagcctgaagtgaggatctctgctccagggcagcagttctcaagcttgggcatgcatcagaatcactggaatctcttagtaacacagattgctgggtcccacccccagatcttctgattcggcaggtctggggtggtaccccaggatttgctgatgctgctggttgaggccacactttg

SEQ ID NO: 7885 - DNA, 1181 bp, mus musculus
ctacacgtacacacagacatacacgatattttatatgaactgccttccttggcatttgagtttgcccctcagcttacgctgtagttgtgtaacctagcatgaaggcctgtcatgataattttatgtattgtataataatatttgctttaatcattttcttttcagttttgatgaagcaagaacacagagaagagattgatttgtcttcagttccatctttgcctgtgcctcatcctgctcagacccagaggccttcctctgattcagggtgttcacatgacagtgtactgtcaggacagagaagtttgatttgctccatcccacaaacatatgcatccatggtgacctcatcccatctgccacagttgcagtgtagagatgagagtgttagtaaagaacagcatatgattccttctccaattgtacaccagccttttcaagtcacaccaacacctcctgtggggtcttcctatcagcctatgcaaactaatgttgtgtacaatggaccaacttgtcttcctattaatgctgcctctagtcaagaatttgattcagttttgtttcagcaggatgcaactctttctggtttagtgaatcttggctgtcaaccactgtcatccataccatttcattcttcaaattcaggctcaacaggacatctcttagcccatacacctcattctgtgcataccctgcctcatctgcaatcaatgggatatcattgttcaaatacaggacaaagatctctttcttctccagtggctgaccagattacaggtcagccttcgtctcagttacaacctattacatatggtccttcacattcagggtctgctacaacagcttccccagcagcttctcatcccttggctagttcaccgctttctgggccaccatctcctcagcttcagcctatgccttaccaatctcctagctcaggaactgcctcatcaccgtctccagccaccagaatgcattctggacagcactcaactcaagcacaaagtacgggccaggggggtctttctgcaccttcatccttaatatgtcacagtttgtgtgatccagcgtcatttccacctgatggggcaactgtgagcattaaacctgaaccagaagatcgagagcctaactttgcaaccattggtctgcaggacatcactttagatgatggtaagttc

SEQ ID NO: 7886 - DNA, 957 bp, mus musculus
tgggagtgcaaagtgactcacagttttggtatctcctacgtaagagctttggggggattccttggcttgctgacaggcaaggaagacagcggcagcagtgaggtaaaacacgattacttccaactgccttgcggaggaggcgcagtcgtgcggtgtgacttggacagcttgctgctctctgatggcacgcggagggagaataattaaaaaggccagcatcacttactaagtgagtaaacacagagccgttccaatcgtgctctccagctaatgagaagctgtaatttcttatacttcaaggcaagatgagacagtgatgggttcagtggagggtgtgtttgcgtggatatgggggtggggggtagtggtggtggtagagttagatcgactaattgttggcaatgtttaagaaagggattactggaaaagacagtgaaatgatgacaggaaaacatcttggaccagagccaaaaaaaaaaaaaaaaaaaatcgaggcaaatcaagtctgcagctcggagaaaacacccgtcgctccggtgggaagctccgacgggaattgctcgatgttccttagccaaggacggaatatcgtgtgagcacaaggggacagaattagggaccaccagagtccagaggaaagagctacggtatgccagggtatacagtgatgtcatacattgagaaaaaaaatgaaaaccccaaaaccagaacagatcaaaccaaaacaataaaaaccaacctgtgtcctttcctttttatgggaggcttctgcttcagtttattaaaagcaaccctcaaatgtaccttctgatagcaggagctgctgattctctgtttgtctgcagaagctgctgcagggttactgaaagacgctggaaaaaggaggttgaggaaattaagttttccattggttgggtttctggcaaacgtgccaggcgatcgtctgccatttggaca

SEQ ID NO: 7887 - DNA, 1057 bp, mus musculus
gagctccaatttaacgccatcattatttctgacattaaaggcccgagaatagtgtcacatgcccagaagctatttttttttttttaaaccagctaatcccagaaataagaaactgccatgagggacagtgagtcagggcctgtaaaagtgctttaggagaggactgtggcaatagactgacctgagcgtgggaggcacagcctgcacaaggcccttagccaccttgggcggacaggcccagcttgtgcagtgactgtccagtgagtcattaagaccctaggttttggccagacgcggtggctcatgcctgtaattccagcactttgggaggccaaggcatgcagatgagttcaagactagcctggccaacatggtgaaaccccgtgtctactaaaaattagccagccatggtgatggacacctgtaatcccagctactcaggaggctcaggcagaactgcttgaacccaggaggcagaggttgcagtgagccaaggtcatgccactgcactccagtctggttgacagagtaaaactctgtctcaaaaaaaaaaaataagtctaggctttgtgttagattctaagtttgaggcttagctgtgctgcttgtgccaaaaccttatgactttagggaattttacttaagttcctcatgccttggtttggctcatctgtaaaatggaacccataatagtacctactaccaggtggaggcaaaattaaataggatgcagaacacagactctaacatatcaaagagaagaaaggaacctacaggatgatggacagggagggacatctggaagcaacagctgggctccaggcttagagatcaaccagtgccaaggggggcagatcagaaggctctagaagaactttcataagaagacaaaattagtagaatgcccaatatatctggatacattgagagatgatgcacacaaccggggaagacttcaggtatatgtcaatgacagaagactaagaaaagcaaaaacagaaccactgaaaacagagtcatttgggaaaagaagagtaaacagaatatactacatggc

SEQ ID NO: 7888 - DNA, 1295 bp, mus musculus
aaaaaaatgtaacatattcaacttttaaaaaaattgaattaaagttgtatctttcttggagtctatatttgaccatgaattgtgtttccaaaattatatttgctcatccattttttttgccgttctctgtaaggcctcagttttgtttggtctttaaaccctgaataaaacacctaggaacatgtttccatttgcagtatttcccttttaggtggaacggccaccagacagagaggctttctgggctgcattcggtctctgcagttgaatgggatgaccctggatttggaagaaagagcccaggtgactccagaagtgcagccaggttgtaggggacattgcagcagctatgggaagttatgccgcaatggagggaaatgcagagaaagacccattgggttcttttgtgactgcactttctctgcatacacagggccattctgctcaaatggtaagtgtggcatggaagactgtaagaggaaaatttattcaatgtggattaaatgtctggcagttcttttctatgcagctatttgaaacaaaaaaaattcaatttctgaattgctttggcaaagtatctgttgaatgtaaagaatgagtacaagatcctggtgatgagacagcatcatatattcaaagatggagcgcatcatatttcattacttaaatatttgactcatttatgaaaaactagtgtttgttgatggtaaatccattaatagtcacctttatgtattataaagtgttagttgctcaatctgcttttttctacctagtgttgatgctcttaaataatatggctgtcagcaacctgccccatggggcaattctttattttaaaatcatttaaagcattacttttttttttatttgagactgagtcttactctgtcactctgtcacccaggctggagtgcagtggcgcaatctcggctcactgcaacctccacctcccaggttcaagcgattctcctgcctccgcctcccgagtagctgggcttacaggagcccaccactatgcccagctaattgttgtatttttagtagagatagtgtttcaccatgttgcccaggctggtctcaagttcccgacctcaagtaatccacccacctgagcctcccaaagtgctgggattacagacgtgagtccccatgcccggccctgttactattgtatttgttgaagatattcaacaatgcaaggatatttaagatgcattgttttttatttgagtttttcagacatagtttttccagaaatataaacaatataccattaaatatcgatgcattac

SEQ ID NO: 7889 - DNA, 1295 bp, mus musculus; identical to SEQ ID NO: 7888

SEQ ID NO: 7890 - DNA, 743 bp, mus musculus
acatatagttggttaataaaaacctaggaaataaagattagaccaaattaaaattttgtttggagctcgagcagagtccataaatctaagttggcaaaaacaaatgaaagtattttatatttcacttggaattttaggaaagagcactaggagaaaatgcatatttttttttcatcacttgcagggaataaccagagaaggaaaactctgcaatcccattgatatcttggtacccttgccaattgactgggctacacacaccttatataatgagtcttagagacaatcagaaaagtattcccacataaatcaagaaaatggatagcatcaaagcataatgttgttgtcattactggaagtccagggccaaagttacatgtaaattggcaaacaagacaaaatcaatgcaagtgacttgcaggtttgagtctgaaaacctggctgagagagaaagctgaatatcccacgtggatgagggtggcctcagatggaaatgagtggttttaatttaagcagcttgctgttgacagaagggactatctgccatgctcatcacttattagcagtgctgatggcttcacacttgaagaaagtagagagttaaatttattcaggtcatctgtaggcaacaaatatggagacaaagtggcaagggctgtttttcccaaatgttaatgtgcataaaaatattaaaacaagcaggaattttacactatcccacatacaaggctctgttttgagta

SEQ ID NO: 7891 - DNA, 930 bp, mus musculus
cagtataagaagtgtccagatgatcaatatcagaatagtcagagaatttactgtcttccaaaggatgtgaacttcttggcttttgaaggccctttggggatgtctctggcctgcacagccctgcctctctgtccttactgcagtggtccttggggtatttgtgaagcagcaggaaatcccctcggttaaagccagtacatgggctttcagctgcaccctgctgaaagtctggcctccgtcacactgtgcttcctctgctctgccctatgcattggccacccccacacagctacgtggtgactccaacaaatagcatttggagttgtgtttactatggctatttctatcattctgaccaaaaccatcactgtagttctggctctgaaggccagaatgccagggagaataagatggtgattggtatcaggatctcctaattttgccctttttatattctccctaatccaagtggaatctgtctcctgatctgtcagctcgggctgagaaactttcctcccttcattgacacagacacactctctaagcttggatctgtagttctcacacgcagtgaggtttcagcactgtcttctaccatgtcctaggatacctgggctccttgaccctggggagctttaccttggctttcctggccatgggtttgcctgacaccttcaataagtcaagttcttgatgttcagcatgctggtgttctgcagtcacctccctccttgccgaccacagcatcaaggggaaggtcctggaagccatggggttcttcttcatcttagctttcagtgctgagctacttggctgcatctttgcccccatatattacgttactcttatgagatatgaataccttccaaggtctgaagattaaaataggttctggaagcagtaagaattccagagttttatttcaaaaaa

SEQ ID NO: 7892 - DNA, 757 bp, mus musculus
cagccaagctctccgccagacctgagcaagcgaaacttctgggattcataaacttgtggtttctgggtagagtggcgtttaaaccaggactcagtggggaaagggcaacatggccagctcttctccccagcgaatcctcggaaccaaggttggggtccaccatcatcgaaggggtgctgcggaaaaggcacggcccagaaagccccctgaggattgttctgggggtccttgatcctagtccatgtgaaatggagtctccttgtggcatgtaattgagcccagcttagaaaggccagtgctctgcttctccgagacagtgcctttgattgcagagtgtgtgatctgagtaatttaatttatcgctcatcttttgccaagtgatctttttacaatgctgcatttaatgactccacagctggggtagaggctctcctcgccctcccagctctctggctgctgtcttcctgtgactcactttaacaggaggcgggtcaggaggtgcaggaggagagggcggtgcgggagtcaggcatacctagattcctatcttgcttgtgccatgtggccggtgggcacggcctgggaagagttccatccttgagcccgttttctcctctgcagagtgacaatcacacaaatattgattggataaggaagacacagggattgaatgagatcatgaatagcagagaggaaaggaaattgctaacttagaaaacaaaatggcccctgtgagattccaataggctttggggag

SEQ ID NO: 7893 - DNA, 814 bp, mus musculus
cccagctcacctccaggacaaggccattgcctgaccctggccagttcccaccagctccatgttggcggcaacccttcccacccagcccgtgagcccaggcatggctgttgtggctggggaggtggagtgaggggctcagactccagcccacccgaatccccagccccacagagcctgcaccggggactcacaaggcccatgatggggcagaggctccaagaggccggggacacacaaggcccatgatggggcagaggctccaagaggccggggacacacaaggcccatgatggggcagaggctccaagaggcctgcagggctcatggagggtggttggctgaggtgggacacctgcggggggaacagtttagggaggccccaccagggtcacttaatgaccaaacaggagaggctcagcctagactatacagtgactccggggagcaccagaaaagaccctgcccaggccccacccagaccacaacatccacctctctggtggggccagtgtgtggtgggggcctcccgttagaggtagatgtgtgcatgcctggtgcagggggctggtgcagagcattggcaggagtggcgcaggaggccggcggcacctggagctccgcagcatccacccaggcctctcagccacaccgagttccccttcccgcatgcccctaggtctgcacccgctgccccgggccggctacctgcgctccccttcctggacgaggacaagggctgagcagagccacgagaagcagcccctaggcgaccccgagcggcaggccacagtcctggacacgtttctcactgtgg

SEQ ID NO: 7894 - DNA, 814 bp, mus musculus; identical to SEQ ID NO: 7893

SEQ ID NO: 7895 - DNA, 1079 bp, mus musculus
tccagtggctgctcttcttgagccagacgaggtgctgaaggaatttgtcctgcctttcttgaggttagatgttgaagaggtagacctcagtctgaggatcttcatccagactctagaggcaaacgcgtgccgagaggaatactggctccagacctgctccccgtttccactcctcttcagcttgtgccagctcttggaccgcttcagcaaatactggcagcttcccaaggagaagcggtgcctctctttggataggaaggatctagcgatccatatcctggagctcctgtgtgagattgtatcagccaatgctgagaccttctccccggatgtctggatcaagtccctgtcctggctccaccgcaagttagaacagctagactggactgtgggcctgaggctgaagagcttcttcgaggggcacttcaagtgtgaagtgccagccacactttttgagatctgtaagctttcagaagacgagtggacctcccaggcccacccagggtacggggctggcacggggctcctggcctggatggagtgctgctgcgtctccagcggcatctcggagaggatgctgtctctcttggtggtggacgtgggcaatcctgaggaggtcagactgttcagcaaaggctttctggtggccctggtgcaagtcatgccttggtgcagccctcaggagtggcagcgccttcaccagctgaccaggagactgctggagaagcagctcctccatgtcccttatagcctggaatatattcagtttgttcccctgctcaacctgaagccctttgcccaggagttgcaactctccgtcctcttcctgaggactttccagtttctctgcagccatagctgtcgtgattggcttcctctggaaggctggaaccacgtggtcaaactcctctgtggcagtctgacccgcctcctggactcagtcagggcgatacaggcagctggcccttgggttcaaggaccagagcaggacctgacccaggaagccctgtttgtttacacccaggtgttctgccatgctctgcacatcatggccatgctccacccggaggtctgtgagc

SEQ ID NO: 7896 - DNA, 1408 bp, mus musculus
gattggaaacctgctcatcgtcctagccatttgctctgatgttcgccttcacaaccccatgtattttctccttgccaacctctccttggttgacatcttcttctcatcggtaaccatccctaagatgctggccaaccatctcttgggcagcaaatccatctcttttgggggatgcctaacgcagatgtatttcatgatagccttgggtaacacagacagctatattttggctgcaatggcatatgatcgagctgtggccatcagccgcccacttcactacacaacaattatgagtccacggtcttgtatctggcttattgctgggtcttgggtgattggaaatgccaatgccctcccccacactctgctcacagctagtctgtccttctgtggcaaccaggaagtggccaacttctactgtgacattacccccttgctgaagttatcctgttctgacatccactttcatgtgaagatgatgtacctaggggttggcattttctctgtgccattactatgcatcattgtctcctatattcgagtcttctccacagtcttccaggttccttccaccaagggcgtgctcaaggccttctccacctgtggttcccacctcacggttgtctctttgtattatggtacagtcatgggcacgtatttccgccctttgaccaattatagcctaaaagacgcagtgatcactgtaatgtacacggcagtgaccccaatgttaaatcctttcatctacagtctgagaaatcgggacatgaaggctgccctgcggaaactcttcaacaagagaatctcctcgtaaccaatgtgagggcctacattggataccgtagtcaccagttacggtatattggaaatccagttctgatgtcatcctcctacgagaggcagtctctgatctttctagcctgaaattcctaatctcagaactcttataacattttaataagttaataataagtgattattgaaattaccactttcaactcattgctgctctttttggcagagtggcagcacagggatatagggcatatgtcctgatgagcagagtcaagttgggaagatctgagcctcagctttcacatctacatgttaggaataataagtgccctacatgggtcacatggtgtgttgattacaatagctcatgcttccaagattataaatcactattcatgtgtccatttttatttgactgttaagtttaatcacccttattaggcttgcaagcctctgagggcaggagttgtttttacacatcactgtaccttcccaatcttggtcagataaagtgcatccaataaatactggtggaagtggaatgaataagatattaatatctgaaacgtaatattataattagggataatcaaaccagacattattttctcat

SEQ ID NO: 7897 - DNA, 610 bp, mus musculus
ccccacgaatgagacggcagcgttctgcccctgacctcaaggagagtggggcagctgtgtgagtcccacatcctgggcagagggcctggtggggccccttgctaggagaagggaagacgcccgagacgctgcttccccagaagtgctggggcagggaggcccaggagatgagagagaaggtccgagtaggtgatagaagacaagggggagaccgagccggaggctgaggaaaggaagagggcacggagttgccaggagcaaaccaaagtgaagagagagataggaagctgcctcggggccaccccttgcaaagggggtgtgtcccacaaacgctgctatgggtggggtggggggctggggtgctgcgtagccagtgtttgactttcttttcaagtgggggaaagtgggagaggactgagagtgaggcaagttctccccagcccctgtccgtctgtctgtctgtctgtggtggtttctgtttcttgggaggcatggtaggatcataagtcattcccctccccttccaggcctcctgctatatttgggggacctgactggtttggctggagtcccatgaggatgtgggccctttaataaaggatagcaaaca

SEQ ID NO: 7898 - DNA, 125 bp, mus musculus
aacaaactaggcattggacatatttttagtacagataacaactttcataatgatgcaagcactaagaaagcaaggaacccagaagtggttacggttgaaatgaaagaagaccaagagtttgattt

SEQ ID NO: 7899 - DNA, 3582 bp, mus musculus
aaagtttacaaactgcttagttccaactaagcataagaggtgagaacgtacactgcagggccaccagcagcagctgtgcactgatgttaaaactggctcccccagacttgtagtgctgtcttcagggggctgcattccttacacgccacctcttgtgacataggtcattggtcaagccgctggaatgctacagaggtttttttggttttgagaggcttttttttgttttgccttcctactataaaagcgaaattttcagttcatttctgaaaaataaattggtcaataaattcattttgttctgcttctactttacacaaagcttcatattcaacccgatacctgaaaaacaaaattgttagaggccctgaaaaaaagatgaagtaaaccacagacctaattcttctagagaaggatatagaggtttaaatgatttcaagaaatggtgtgagttcagaatgaagaaagaaagaggcaaagccctacccagagccacccatgagaaatctccagccctaggaaagtcttctttcagagagccagccaacttcgtggaccctttcatgctcaaactactagaggtggtttgatattaacaagttttctatttccttcccatcaaatgtaattttattttttaaaatcttcaaatcaggatgacaagtgagatgctattcctgggaaaacaatgatgaagaataaggacaagaagtgatcattccagaaggaagagtggaaattcagctgtgtaaagaacttgctttacatcatgacttcttacctttctagctgcattttcttttctgctattagggcttgaagttgctgctgttgagcttctctctgctttgctatagatttgagcaagttccgagcaccgatggcctacagtattgccagagaaggccatggcttcattaaaaccatctacagcatcaagtcctcaaagtggggaggggttatctgggagctgtgtcagtcttcagagaggaaaagaaagtggagccccaaagcttttgggttaagtcagaaggattaacctactgatcacaaagtgcctcaagaactagacggcagctttgaggcaggtctaggagtattcctagagccagggacacaggcacaatagcacatttggtggtgccattcagccttgtgcctttcaccaatcatactatgtaagccttcatttcttcatttataaaatgaggataagaccatctacatcagtgctgatatgaagatgaaacgaggccaggtgtggtggctcacacctgcaatcccagcactttgggaggccaaggtaggcagttcacttgaggccaggagtttgcaaccagcctggccaacatggtgaaaccccatctttactaaaaatacaaaaaaatggccgggcgcagtcactcacgccttaatcccagcactttgggaggctgaggcgggcggatcacctaaggttgggagtttgagaccagcctgaccaacatggagaaaccctgtctctactaaaaatacaaaattagccaggcatggtggcacatgcctgtaatcccagctactcgggaggctgaggcaggagaatcgcttgaacccaggaggcggaggttgcagtgagccaagatcgcaccattgcactccagcctgggcaacgagagaaaactccgtctcaaaaaaaaaaaaaaaaatacaaaaacctcagctgggtgtggtggcacacacctgtagtcccacctactcgggagggtgaggtgggagaatcgcttgaatctgagaggcagagcttgcagtgagccgagattgcaccagtgcactccagcctgggtgacacagcaagactctgtctcaaaaaaaaaaaaaaaataaagattaaaggaaataaagattggcaaaagttcagtaggttaagtggaccagaagttattaaaatcttaaataaaaattcacccacccagccctctacccctctaaataaatcaagagggaagagggatgagagggtagtgaactagggtcccaggccaagatgtaggcggaagacatgctgatcttaccttcatcttttcattttctgcttcttttgcaagttgatcaacaagctcaattaaaccaccaactattttctgaaactggccaatttcttttaggaaaagaacaaaaaataaaatatttccttagtatcatcactccccttcggtagagtgctaaggcagtgagagggcagagcggactgccccttctaatttgtgttaaaatagttcggtgtgggccaggcgtggtggagagcaactgtagtcccagctactcagggggctgaggtgggaggatcacttgaacccaggagttagaggatgtgtgatcatgcctgtgaactgccactgcattccagcctggggaacatagcaagaccctgtcgcttaaacactttggtgcctgttggcctgtctcctacccttggtctgaacctagagaagggtggccagctggaccagggcatactcggaccttgcatccccactgagccagccagccgctatgacctccggctatgaaagcactaggcccttgctgggctcattctccagacagaccccaaccctgcttccccaggagtgacaggaagcactgttgttcacaaaagggcagcctcaggacacaagcgctgcctctggactagctacaggtatgacaccagatttcaattaacagtggggatgggggcttcccacttgtaaccacaaaaaagcaagctcacagcattaagtgcctaatctcccactcactttctccaatgtcctggatgtgacaatttactgaggggaaactaaggcccagagaggtgtgtgcatggcacagcaatcacaggttagtgacagaacccaagctacctttcactaaccaagctctctccacaacctaggaaaccccccagaaagctcagaagtcccttgttctagctagatctggctctgtacgggcattgggcttgcttggctgctgggacaggaggcttcctgaagatttccagccaaaagatgacttcagtaagtctgttgagctgcttctagaaacttcacctatcacttctaactccaaataacagagaacctgcccctgagaagactttctctgaagaaatcaaatcatgagtacataattctatttcccacacccaagccatggttgtgttcccagaaagtttaaggtttctaagagcaagaaatgaaagatggcatatctaaagacaccctcccctccccatcccggtgtttggtttgactggtgccctgttggggacacatgagagcacaagagggcagacagaaaagggtggcacgtgggaactcacagacgccagattcaacctccagggagccagcagctccactgtggcagggccaagatgagcctggggtacagttgaaatggcagctcaaagctgagtggcactgtatctccccaatactcactgtccacaaagtctttgcactcttccttcagctctatggtctgctgggtaacctctgggtccaacaccctcagcttgttcagttcatcaaagtgtagccctgcttcacccaggat

SEQ ID NO: 7900 - DNA, 3582 bp, mus musculus
atcctgggtgaagcagggctacactttgatgaactgaacaagctgagggtgttggacccagaggttacccagcagaccatagagctgaaggaagagtgcaaagactttgtggacagtgagtattggggagatacagtgccactcagctttgagctgccatttcaactgtaccccaggctcatcttggccctgccacagtggagctgctggctccctggaggttgaatctggcgtctgtgagttcccacgtgccacccttttctgtctgccctcttgtgctctcatgtgtccccaacagggcaccagtcaaaccaaacaccgggatggggaggggagggtgtctttagatatgccatctttcatttcttgctcttagaaaccttaaactttctgggaacacaaccatggcttgggtgtgggaaatagaattatgtactcatgatttgatttcttcagagaaagtcttctcaggggcaggttctctgttatttggagttagaagtgataggtgaagtttctagaagcagctcaacagacttactgaagtcatcttttggctggaaatcttcaggaagcctcctgtcccagcagccaagcaagcccaatgcccgtacagagccagatctagctagaacaagggacttctgagctttctggggggtttcctaggttgtggagagagcttggttagtgaaaggtagcttgggttctgtcactaacctgtgattgctgtgccatgcacacacctctctgggccttagtttcccctcagtaaattgtcacatccaggacattggagaaagtgagtgggagattaggcacttaatgctgtgagcttgcttttttgtggttacaagtgggaagcccccatccccactgttaattgaaatctggtgtcatacctgtagctagtccagaggcagcgcttgtgtcctgaggctgcccttttgtgaacaacagtgcttcctgtcactcctggggaagcagggttggggtctgtctggagaatgagcccagcaagggcctagtgctttcatagccggaggtcatagcggctggctggctcagtggggatgcaaggtccgagtatgccctggtccagctggccacccttctctaggttcagaccaagggtaggagacaggccaacaggcaccaaagtgtttaagcgacagggtcttgctatgttccccaggctggaatgcagtggcagttcacaggcatgatcacacatcctctaactcctgggttcaagtgatcctcccacctcagccccctgagtagctgggactacagttgctctccaccacgcctggcccacaccgaactattttaacacaaattagaaggggcagtccgctctgccctctcactgccttagcactctaccgaaggggagtgatgatactaaggaaatattttattttttgttcttttcctaaaagaaattggccagtttcagaaaatagttggtggtttaattgagcttgttgatcaacttgcaaaagaagcagaaaatgaaaagatgaaggtaagatcagcatgtcttccgcctacatcttggcctgggaccctagttcactaccctctcatccctcttccctcttgatttatttagaggggtagagggctgggtgggtgaatttttatttaagattttaataacttctggtccacttaacctactgaacttttgccaatctttatttcctttaatctttattttttttttttttttgagacagagtcttgctgtgtcacccaggctggagtgcactggtgcaatctcggctcactgcaagctctgcctctcagattcaagcgattctcccacctcaccctcccgagtaggtgggactacaggtgtgtgccaccacacccagctgaggtttttgtatttttttttttttttttgagacggagttttctctcgttgcccaggctggagtgcaatggtgcgatcttggctcactgcaacctccgcctcctgggttcaagcgattctcctgcctcagcctcccgagtagctgggattacaggcatgtgccaccatgcctggctaattttgtatttttagtagagacagggtttctccatgttggtcaggctggtctcaaactcccaaccttaggtgatccgcccgcctcagcctcccaaagtgctgggattaaggcgtgagtgactgcgcccggccatttttttgtatttttagtaaagatggggtttcaccatgttggccaggctggttgcaaactcctggcctcaagtgaactgcctaccttggcctcccaaagtgctgggattgcaggtgtgagccaccacacctggcctcgtttcatcttcatatcagcactgatgtagatggtcttatcctcattttataaatgaagaaatgaaggcttacatagtatgattggtgaaaggcacaaggctgaatggcaccaccaaatgtgctattgtgcctgtgtccctggctctaggaatactcctagacctgcctcaaagctgccgtctagttcttgaggcactttgtgatcagtaggttaatccttctgacttaacccaaaagctttggggctccactttcttttcctctctgaagactgacacagctcccagataacccctccccactttgaggacttgatgctgtagatggttttaatgaagccatggccttctctggcaatactgtaggccatcggtgctcggaacttgctcaaatctatagcaaagcagagagaagctcaacagcagcaacttcaagccctaatagcagaaaagaaaatgcagctagaaaggtaagaagtcatgatgtaaagcaagttctttacacagctgaatttccactcttccttctggaatgatcacttcttgtccttattcttcatcattgttttcccaggaatagcatctcacttgtcatcctgatttgaagattttaaaaaataaaattacatttgatgggaaggaaatagaaaacttgttaatatcaaaccacctctagtagtttgagcatgaaagggtccacgaagttggctggctctctgaaagaagactttcctagggctggagatttctcatgggtggctctgggtagggctttgcctctttctttcttcattctgaactcacaccatttcttgaaatcatttaaacctctatatccttctctagaagaattaggtctgtggtttacttcatctttttttcagggcctctaacaattttgtttttcaggtatcgggttgaatatgaagctttgtgtaaagtagaagcagaacaaaatgaatttattgaccaatttatttttcagaaatgaactgaaaatttcgcttttatagtaggaaggcaaaacaaaaaaaagcctctcaaaaccaaaaaaacctctgtagcattccagcggcttgaccaatgacctatgtcacaagaggtggcgtgtaaggaatgcagccccctgaagacagcactacaagtctgggggagccagttttaacatcagtgcacagctgctgctggtggccctgcagtgtacgttctcacctcttatgcttagttggaactaagcagtttgtaaacttt

SEQ ID NO: 7901 - DNA, 992 bp, mus musculus
tagctctgcaggcctgtggtcctcagccaggagagtctgcgtggagaagtttccctgattaagccctggctccccacttctccacccattccctgcgcccggacccatgtcctgaggctgagtcactgtgccttcctcaaggctcatgaagcagaatggttacctcccttctacccggtttcccctccccgtcaagctctgccacagccgtgacttgttggagccctttcacttgcgcaggtcctgtgtcaccctccagaggaggccaagagtgggcaaggtcggtgcctgttcaggcacagcccgcaccagagcaaggggtgaaagggcatctcctgaggacttactgagcttagggatctgtgaccccattttttctggaaaaatctctctttgctgggtgtggtggtgggagtgcttgggcaccacccctgtgcagtccctccttctgccctaggggcaagacgtgctgtccctctgagtttcatctccctcaatttttctgtaggttggcaaggccacaggcttcctcaagaactttctgatcgagcccttcgtcccccacagtcaggtatgtgtgaggcggctccaggctgggtcttctccctcctggaaccttgggtttgtccaccgtaacctgaggaaagaagtcaagctgatgaggacagtcagagggaccagggtccctgaagctgcactgaggatctgagggtgctgcggactcgggagtccagaggggaaggaaagggcttggtctacagcagagaggagttaggactggtaacaaaggggacttccaagtgcagggatgagaacgacctgcaggcaggccccacccctcagctggggttggtcatactgattcagtctggaccaccagccagtggggtagaggcttcttcctcttgtcctcggggaaaagatggtggacaagtctctggatgaatggttttcactgggttttagaaaatgagaccgtggggattggtttc

SEQ ID NO: 7902 - DNA, 1235 bp, mus musculus
ccctcagcagttgccaagatttgtccccaaagctcagggctggtggtcaggtgggttagggatgagttgttaagggttgggagaatacatctcctaatgcaatgaggaacagatccagctgggttggagggaagggaggagggcctgcgccccctcagcccccttcactccccacctctgcacccctgcctagcttcttaaccaggaagttgagctaccttcactaaagaagagtggagacaggagacccggcccttctctctgggacaggactctcctggtggggctcctcagaggtgagatcctgcctctgggcccctgggagaccctggaccttaaagttattgtgcccacacattctggatggggcctgcgaggatggtcagggtcatagtgccacctgctggggctcccaggaacagcagctggagagacgctgacgtgtgtgtgtgtgtgtgtgtgtgtgtgtgtgtgtgtgtgtctcggttgtggtggtggcggggcaattaataacacctcaccacagatcttaaaattcgcctgatattgaacccttaccccctttccaaggaagcagccaaaagagtgcggaggaagtgatattggaattcaactggggctcccagggaaatccagggctgcagggacataattgcattccttggaactgctgttttttgaacttcattcatgaagcctggtttctagggatgctttctcttttcatggacccagaaggaaagtggagatggttcttcatgcttctatgtgaaatggggtttcaagggcaaaaaacaagtaagcactttgaatatctttgtgtttttttacactgataagaggaagaaaagtatgtcacattgtaaatgtcgatgattagaaacagtccaaggtgatcattgtaatgtcaatttctgaagcagttgggagaaataagtaggataatgaaatgaatcagcacagtgcctctcacttgctaaatatgccgcatgttgggaaattcattgataaaatgaaacccactgtggagaaagtgactggccttcctggcaagccaggctggaggtgagcagggttggccagggtcatggggtgatgtcttggttggaagccaccaggtgacctgtgtcctgttgacacacaagtatgctgcttagtaactccctggaattatttttaaaaagctagatgtgtgaataaagaatttgggggattacaattttggtttgtaaatg

SEQ ID NO: 7903 - DNA, 1594 bp, mus musculus
ttttttttttaaagacaattcactgtacacattttatttacagttttgtacactgttttaatatgaatgggactgcttttctacttgagccatttttaaccaaagcaaaataacctaagtaatacaaagtgttaaaatacagcataaagatacaaaaacagacatactaattctagttaggaatgtaattatgatgttacattttttataatccacaattatgtttaggaaatcacacaaacatagatcactgatttgaatgaaatgcataaatttgtagcaaagctttgtagttacaaaaaacaaaaaaaattaccaaagaatgcacaaaattaatgtttattccacctttgtgtcatattcctggatccttcaccaatgttacatgaggaaaaaaacaaaagcaaaacaaatgaaaaactgaaatcagaatcactaatattatcaagtagggaaacaaataaattaaaatctagcagccatcagcaagagtacagcaaagacaatgctgtaaaaagaaacaaagaaaattgctagaaaactgtatgcatcataatctttcaaaccagcaaaatatgcttctgcataaaatggaacaacagaattttttttcctgtaaagtatagaaatgccaagttgttttctgactattgtggataggtaaaatctgtatgtaattaatggtaattctactgaactattacagagtgggccaggaacacatttatggattctggagatgtgtactgtaattctttgattgggatagtgtaaactctagccaaaaaaaaaaaaaaaaaaaaaaaaaaaagaacacagaagtacaagacaaaggcgaatgagacttctcttatatctgagtaacatttagatggaaatcaaatttaaatgcagtccactctgctttttgaagaggctttggttcagctcccaaatctcgattgcttgacgcagtctcctatgagaatactcagaaggtgtcttcttaaacaacaaacctatttttagtggtggagccgctcttagtagctgtgtctgcgtgggactgataaccaatcactatctttggaggaagtcctaacctttccttgtataccctccctatatgtgtaacagcttctctgttttcacattcagtagtccatattgctatcttatcacctttagctctaacattaacaacagcgccacatacatcatcactgtagtcatcaaaagattctccaataaggcacagaagtgtctctagccaaaagcgatcgaggtcacttcgtctctgctgtttgttcaatgtaattagccatcgtcctccccgtttgtttttctcatcttcccacataggctcaataccatccttaaaaagtgagtagtcacagccaggcattaaattactagacaactggatatggttgtacagagcccaaaagtcttcaacagtatcaaacttggagatcagccacaagtttgcttgccaagttttgcttttatcatttttaaaaaaccagagtgcccatctgttctgtaggggatgtttaatatagtgttctgggttagcaacctcctgattagattccgttttctccttttctgtagt

SEQ ID NO: 7904 - DNA, 1294 bp, mus musculus
ggggttgataggagactgccaggcgccgcttaataggattttaattatacagctccagcaagaattttttcccccctgggcttgagccctcacagatacctccatctccacctcagcatcttcccagccctggcagctagctctcccaggcccccgctgcctgccctccacccaccgtgggggacgctggcccatctcctgggggctcaggaagggcctggcatctgcccccagcaatgatgcagagggcgcctgctcctgggggggggtcctggctccaggagctcctctgagctctgcatccaggactggggacggtcagagctgactctggtgcagggcagagatggtgcccctgccattcaactcactatggactcgatgctcatttttccagagtgattctgccccatgccaaaccctttcgcgatgattgtctcatgtgacgcttacaattctgggagccaggcaggacagatagagtgatcatctccattttatggatgaggaaattgatccccaagagttgaagtgacttgcccaaggacatggtgagtaaggagtctggacttcccgcaggtttgcttgactctgaactccaggttctgtccatggccctgagctgccattcccctgagctccacaccccacacccctcacccctccagaaggagctaagggcagattctcctcccttatcctccaagaagtcaggggcttcttgctctgtttgaaataaaaagcaactgcgtctgcgcaccagtggcagagacggactttgtacaagcatcggggtgaaatgaacattcttcaggcatgagatgttacctctccccatgtctgggttagggtccccgcttcatgctctcacaactcctgaattttggcaccataaccccatcacactgtactggattggctagcaggctggcttaccaatagcctagaatttccttgacacgtcaagaaaaatctccctggtgcccactggtcaagcatttagactgtccccacccacctgcgttctgcaacaagaccccctctcctgcaggtggcctgctccccctgtacctacccatcaggtgatgccagccaccaatgtgtcaggataaccacacgggctttcttggaggcagcagtttcagtgaggcatttttttggtgtgtttattatacaattttaacacctatattttaattttagaatagttttagatgtacagaaaagttgcaaatagagaattcccatacaccccttacccaagtttcttctattgttaacatcctatatcacc

SEQ ID NO: 7905 - DNA, 504 bp, mus musculus
gataataaactagagagcaaacttccctacctataaaatgagatacttgagcagatattttggtcatctcttccagttctactactttttatagttgaaaattttatcaatcttctcccaccttacatttctcatatgccaaaagcagagaagttttgttatagaggatgtctcttgggtttactcagccctacacttttctcaagtcacttctattcaagtacttgactctgttgctgggacactggttcattagaggacactgtcgtctgtccctggtcctgtcccatgtggcaatggcagcactgaagtgtgtcaatcagacaagaaagatatttcaccaaatttgctttggtctgcacttggtcactgaatgtcagcttcatttcttccttctgcagccttagcttttgttttgagatccatcaaactttctttcccaggctgaattaaatgttcttattcctaccaccagcctctgtagcctgcaactcagcaaagctt

SEQ ID NO: 7906 - DNA, 360 bp, mus musculus
ctatcaatcaaatatgttacataagcttaacccacgcaccagaagatggaaaaacaacaacaaaaacacagggctgttgagatttattgaacatagatcacatcaaagacatatagctgcaaagaatctaattaaaatttgttatttcagctggtcagccatattctttctgtacaattaggggttgtgattttatttaaaccaagttccaatactccctcccactcccaggtcactgacagagcagcacttggcaattgggaggagaatatagacaacacttccctcagcattctttctgggatggctgtttgggctaaaatagcagcctctgcttcacatatgttatatctgtctata

SEQ ID NO: 7907 - DNA, 1233 bp, mus musculus
cactctctgtatctgtatctttattattctttctctagacaaataggtgtttaaatagatgatataaagtatatttgtatatagtgattgtactaaacttgttaaatcagtatacaagttgttttcttttttcctaccatttccttcacatatgaactgttgaatttatttatcctctctctctcaacattttgggaggatctcattactctagtccctttcgaatgtagtaatagtctcaattttaggttttaaagtacaatctaaactacatgaaatcgccactctatttttcatctattatagtgatttttacatccctgaactcagacctgatccttagcttgggtgcctgcagtaagaaaatgagctaagatttattgttaactcttagtccactagttctcacctcctgcttaggttccagtagagttggagagataagcagaggcaactgaaaaaagagaatcaaacccacttcttagttggcagatgttacttggccatcacaccttctgttagtctcactgttgacgcttcataagggcttggaggatcctttagagaccgcatgcccgttcataccgcatccttccttgatgagaggtgcactctccacttgatcccttttatccctcatctcaacaccctctgctctcacacactgggcctccccatctcttgcttctctatgctagtgttcttttaccctggcaagcaactctctttatgtactcttgaagggatctcacacatttactttctcagtgtctcctcagtctgtgggaaacattgtatatctctgccctgacaataggtcttggttgcttccttccactgctgtcctctctccttgccttactctgccatgtgtctactccagctagtcatctggcctcaggcttctcttggggagaagcagccacctaacctacctctctgaccccatattgctccacatctggaagacacatattactttgtcctaggatgttgctcactaagctgtgcttcattcccttagtgtcacaggggcaaacagtggtatgggtgtggaataagatgatgacttttgtttcctataaatactctcatctctgtgaatatttatttgggaaccctgtcagctggctaaaggtggtagtgggaaacaccttgcttcccatgggtactggagggaaaataagaaactctcacctcctagaaattctcctgctttaatgaattatccct

SEQ ID NO: 7908 - DNA, 4024 bp, mus musculus
atttatatgtatttggttcaggtgtactataaagattctttatataatatggaaaatttcagcttaaatttgacattcaaatttaaaacaaaaaagaaaagaaggaagaaatctattgcccatcagaagtttgattttctaacttagaaaacaaacaaatcaaccaaagcataaaaaccaaaatcatgtaacttcctgacactagacattgaacttagaaaacactaagttaaaagaccattgttggaaaccttgcatttgtatactcttggagaattacttatcctctctgagacccagatttttaatctgtaaattgagatctttctagttgcaggaaatgactaacaataagaagtaaaaggaatagtaaaatgcttcttgctgagtagaaccacaatgtagtttgatgatttctaatacaatataaaagggatttgttagactgagttacttttacttccttgaaggtttgcaggagtacaaagagtgactagttaagagtgagctctgagaattgtgcccccagtttgtttcaggcagctctttcttcaacctgatcattacactcatgtactgatcagcactcaaatatttgaggaggcggatattcaaagctcttctgtgttgctctctcctgtctggttttcttccatgaaaattttagctacccctgcacactcccagctccttttgctcaactgtgtgagaccactaggcccctcttgagttccctctttctgaactgcaactcaaactctttccagacaggaatttgggtaaataattgggcttactttgtttattttctctatctgagctatcactgtcccatgctgcctcacttccaatatctgaaaacttttatgtattttgtcccattcttttacttgtttcaaataattgtgcaaatccagttcccgttattccttcttaacttaaaaaggtagtcccatataacagataatgggatttatgtcaccttggattcctgagtgactttatgaatcatggtccttcctagccttaccctgctaacttgtttggatctgttctccaagcaaagaatgaaactgctttgttttgtcaaagaaacaatgagtttaatttattaaacagcataaattactctgtttttcttaacatgaatagtatgagaaaatgatagtagttgtaggtgcattgcttctctcacaccatgtagatattgggaaagtgaagggaagaaacatgagtttcttcttcattctctaaatgcaaatgctctccaagtactgtcaattattttttcttatatttttaaaacatcacattactttttatagtggtaaaatatcccccactgttttctgtgtctttattatcatcctttcgctcctaaaatattttaaaaacatgtactcaactcccagaaatatcttcagactcaatactactgcaaccttacatttacaaaggttaatactaagtcttgggaggatcaagtggattcacaagtgacttaagtgctttccaacacaaaggttaattcactttattgaaagacaacaaagtccagaatcttagtaacatagcatacataacgcccagcttacaataaaacatactacatgtaagaatcagaatattgacccataatctggaggaaagagtcaagacaaacttagccagaagtgataagggtaatgaaactcatgggccaagaggttaactcaactattttaaatactttcaaagatttaagtaaaaaattgacataatgagtgagtatatggagaaatgaggcaggataaagcaaattatttatacttaattacatattttatatatatatatatataattaaaaataagtgcttagaatagtgcctaacatttacttaggcacttagtaccaaaatatttgttaagtaaaaatatccaaatggtttttctgccactcatcaaaataatcaaacccaatacttatactcaataaatgcttatactcataaattatatgttatgcctcagtttattttcccttgttgtgtggcactctgtatgataaattaattttatttcttttcaaaaccaaatttaagggctctacccttaataaaggaccccacagttaatcttataaaaaacaatattctaggtcatcacacattttctggaatttatttgctcattacttcatttattcagcaaatgtttgttgattacctactaagtactgagcacagtgttagaaaataaaaatgctctcatgcagcttacattttatcgagggagagaaaaacaaatgtgtacataaattaatgcattaattttagaaattcaaaaagacaataagaataaaacaaagtaatgtgagttcgactggcaaggagtgaggaataatttaaattggatcatcagggaagtatttgcttaggcagagatattccagtgacacctaaattctatgaaaaaccagaatgtgaagacctggggaaaacatttccaataaagggatgaggttggttcatgttacaaaagaggacaaataccattggtgtttgtcactattatcagtcaggtctagtcaggaaaataggaagaataccaattattttaataagtacaaattaattttgaaatattctaatgacgtggtagaagactacacaggcaaaaaggaattgctgtattaacacagaggaagctactgcaggaggcagttgctacttttagggcagtgagaaccaaaggagtagggttcatacaagttcaaggtctggaagaggggccctagctggggctataggttttgagggtcccatgtggctgtattggactctctgaggggtataataaagttagttctgggaatatgaataaaccctgaaaactagaaccaacccgccactgccatggggaggtggtgttgctggggtgacactgctaagaactgtcagtaaacaaaaaggatcttctctgtctccctctttaagctttccactgtctttcttgtacatcatgttggcaaaacttaactgggagccagatagtaaggcagaagtaccttagcatagtttcagtccaaggtgagacatggcatcttaataaccatgacagggctaaagtagagttatcacaaggaaatagaatgctattgtgagcatcatacccatactgctactatgaaatacagtcatcccatggtgtctgtgggggattggttccaggaaccctgtagttactgaaatccaggaatactcaagcttcttatataaaatggcaaaatattttcatataacttatgcacactctctcatatgctttaagtcatctctagattactttattacctaacataatgcctacacatcacttcatttgcatggattcaacatagtatttagtgcacgccaaattcaagttttgcttttcttttggaacgttatgaaacttgtttttgaaatatttttatctgtggctggtggaattcagggaagcagaatacagggatacagaaggctgcatgcagatgctattgtgggcaatttgcaaagagtatagatgctatactataaataaagatatgataggaagatcaccaagagtcttaagtatatttgatttatatgtggagaaaatattagattgctacatgagaagtagattggaaagtattaagatgggaagcaatggaatctagtttagatggaattgcaataatccatgtgacaagtgtgacttcaacctgattgttttcagaggagatagagagaagtgaataaattgggttatagtgcagaagtttctgtggaattagattaggaagatgaggaaaaaagatgaagcaaggatgatcctcttggtttttaatttgagcagttattggaatgggggtgatatatgatggaatgtagaaggttggtaggagagttctctttcgtatgtgttaatttttaagtgcctgtttcacatttaaggaaaaatgttgattgacagctgaatatattattttggaggttgaagaaaatatctagctagag

SEQ ID NO: 7909 - DNA, 501 bp, mus musculus
aaaatttcaatagccttcaatgctgagaactaaaaagcccttgttatctcatggacacccacacatgccacaacagaggacccctgcagtctttgtgaatgctaaacccagctgacagctgttccagagcccatgatgatatgtcccccaaccagccagacctttcattgtaccacctaccagagccagagccaccactataatctttatcctcggatggagccctggcactgcctgccaacatgtatatctaaaccctggaccagatgttgctatacacctctcttagccagcacccctgcatctacctataggcaagatattttctcaccaaagccagtccatgaagtcaggaagaagtgactcccctttcaagtgcacagacaagtgcacaagggtataagaaatataaaagcataataacaccaaaggaaaaaaaagtctctagaaaagaagttccaaagaaatagagatctttgaaatgcctgacaaagaattcaa

SEQ ID NO: 7910 - DNA, 915 bp, mus musculus
gattcacgagtatactccaatcaaagatagtttggttttatattttatgcataagtataacaccatgctatatattcagcaaagacatattactttttctgtcacatgcagggatataaaacacaaaaaatacttactccagcaatgatgtctttcagttctctctgaaaggtagcatatgtatgaattcacgaacagattgcaagttaaaaatcttacattctgtcattttcagtgtcaaatgcatccaatgccaaacacatcaaagatagtcaaatcattatgaaattattggtaaggctctctgttgcttttctatcggtaccataacaaattatcacaatcttagtggcttaaaacaagattcatttgttacctcatatttccattggttagaagtctaagtacagttggaacctctgtgcaacgtcttgcagaactaaatcaaggtgttggatgggctggccccctttctggaggtcgtagggaagactctgttttcatgaccactcaggttattgaaaaaatccaattgcttgaaattgtgggaatgaagctcctttcattttcaagcaaacaaacatagggataaaatttgaatctctatccttcaaatgtccaatttcccttatgctaccagccaagaaaaatcttttaaggactcatgtttatattaagcccatatgaataatccaggataatatttgaatttttaaagtcaagtaattagttaattatatctgcaaagtacccttttctgtgtattcacgggagtaacaccaggaggtcaagattatgggtgccagaattcttcttacaacaggctcttaacttgaaatgagtataagaaattatattgagcataaaattctccttccattattttaaaaaagtattgccctagtagtgagttga

SEQ ID NO: 7911 - DNA, 1344 bp, mus musculus
gatggaaaggaaggaatggtttctgaattagaaatttaaagggtactacttttagctttttctaaatcctttacaattattttagctttttttttttttcttttttttgagacgaagtctcgctctgtcacccaggctggagtgcagtgacacagtctcggctcagtgcaacctccacctcccaggttcaagtgattctgccacctcagcttcccgagtagctgggattacaggcaccagccatcacacctggctaatttttgtatttttagtagaggcggggccatgttggctagactggtcttgaaatcctgacctcaggtgatctgcccgcctcagcctcccaaagtgctgggattacaggcgtgagcaagcacctagcttattttggcttttagtggacactgtctaacaccctccttctaaagatctcattaatttgggggctttgattcattttctgtgaatgaggaaatgtctactgacaaattagtaagatctaaggctcactggatgaggtgtcagggcaatttctatgcaacttcagactagataaggagaatatgtgtaggctcctcactctcttttacatgtataagaattctgggcattttattcttaatgaggctacaatgaagaaaccaacagaggacttaaaagatgaaatatggacctttttaaatattttgcccccaaatacttcttagctatgaatgagttgtaaggtattgaaattactagattgcactttaaagctgtaaccatccatgtgacaactggtttggaatattcattacctagcacagggcctggtatttgtagggatgataaatatttatcgaatgaatattgttgttggcagtctgcggaagcaattgatggggaaaaaaataagggctttagtatcagacagagctagcttctaatgtttatgcaaccacttttaagtgtgaccttggtagtggtaagttatttcaatactctctaccctctattcttgtacaaaaacaaggataataatttctatctatctccccagattgttttgagaattgaatgaaatttggggtaaaaagcacctagcaaaataccttgcacataatgagtgcttaacagctgttagttacccctccccttccttattttatactattgctatttgccaatggaggagtttaaaatgacagtatttacacaactgcagatggaaaccagtagccaaaacctacacctgtgccactctctggccagtcaaaagccctgtgataggagcagagacattgcattgatcatgagcctgagacagcttgctcaggattttctgtaaatacctacaaagatatg

SEQ ID NO: 7912 - DNA, 347 bp, mus musculus
atatataggattttgtggtttatatttttacacattttaagaggcagaagtttctagcctaaatattataggaaatgtttaattttaaaattgtattagtaggcacttgttttcatctagatgatataatgcatttctgattccacttacagaatttcacattcactttttttctttctgttttttttctctctctaattttaggatccttgtcgtagtcttgcaggagaaaattgctgcctttgatagctgtactttcacgaagaaattctttgttacaagtatgtaccaattttttttcccttcttatgcctttgggtttatactacttacttgacacaatcagc

SEQ ID NO: 7913 - DNA, 369 bp, mus musculus
atgctactgattttttgtgtgttgattttgtatcctgcaagtttactgtatttattcatttattagttctaacagttttttgttgtagtctttaggggtttctatatataagattatgtcttcagcaaacaggggcagtttcacttttttcttttctatttggatgctttttatttctttctctttctaaatttttctggcaaggacttcagtactgtgttaagtggacatagtgaaagtgggcatccttgtcttgttccagatcttagaggtaaggctttcaattttttcaccattgaatataatgttaagtgtggtcttatcatatttggcctttattggccaaatatgcagtacatttcttctata

SEQ ID NO: 7914 - DNA, 989 bp, mus musculus
gcattaagccaagtggttttccctgtctgtctccatgtcttgcatccaacccagcctccctaccttccccatcctagctccaacaggaaggggatctaatcacagccaaatctcccaggtgtagattttgtcagagggcaataccccataaatgctacaagacttccggggactctgttctttgcccccaagcaatggtgaatagtggcttccaaaggcccccttggagtctcaggtcatcccgcaggcagggagcccagttgtgatgggtgcagtcccttgagaggccaggaggagggtgtcttgtccttcagaagtcctgttatgggccgcggtccccctagcacggaaggctctgtcctgatgaatgtgtggaattggctccacgactcagcctgcagatctgcttgtcacaataatcaatgacgcctcaggctgtgccacccagctccgttttacttagaagtcggtggaacagtgggattcctcatgatggcttcattcagcactccagcaggcctgtgggcacaggacgggggtaggtttacacagatgctagcctctctggcaccctagcaggtgtctgctaacctccctcagaccaccctcacagtaaagagcccctctcgggtttgagatatgagagaccagtctctggagtggccttgggggaagggatctgcttcctgcctattgtccacggtttggctggtgggtgaggacttgtgtccacgtgggaggatgataacacagggtccagctttggcagagcacgtgggtgcttcatgcaacactgcattgattagtcctggccgccccaagtggtattatatgcccatttagccacgaggaaacaggctccgatcaatggcgtgccctgccagaggtcacaaaaccagtaggtcacagacccgggtcctgatcagcagccttttgcccatgcttggactgctgcaccacctgtaaaaacagatcggccccttggaggc

SEQ ID NO: 7915 - DNA, 1055 bp, mus musculus
aaatgtaccctaatttatacttttcaataattcagatggggcaatgggaattactaaaaatgcctatcttaaaatttaatagaattttacattttaacaaattaatgctaagaactgaaataccagcatactggaaagttaaagtcacgtaaggtatgcaggcagcactctggatatgtgctttagactcggagcaacagtcaacgtacccctcaacccaaaacagagtcactacagggaaggactagggagggtgagcaaaggcccatcctcccagcccttaggagcactgtattctgtaagataagaatgagggtgggggtaggaaagagacccaacctccctgatagagaccactgaaaggagctgctgttaattagcaggcaccctggttggtgacaaaagcaagagtccatgtttattgaggatcccctctagtttgactttgtgctaaagaatttacactgggctatcttaggtgattcaaacaacagcttatgatctacttatggtcctcattttggagatgaaaaaatggcgatctattgaggtgtagggtacatctaaggtttcacagtcaggagggggcagagccaggacagaagcccagatttatcgttttcaaggccagagttctaaaccacggtgccttactgcttctaaccttacatgaagtcaccactgcccacatttctggccgtctcagagaggcccaagcacctacagacaagcccatgggctttgaagcaggcactgagttccgagcataaatattaacataactgtgtgggggccacttagtgacaggaactttcaatggaaaaggtggttgctcttttccaagcatgatatcttatagctggggtgctgtaagatgtgagagagggagagtcaacaagattgtgtgcccagcacaaggaaggcactcagttatgtcgtagaggtgagaaaagagaagcaactttggcaggaggggaggaggtaagaaagattcctggctactgagcttgagatagcaggtttcttctttctacaaacatgtatgcagttcctaa

SEQ ID NO: 7916 - DNA, 1763 bp, mus musculus
cattcaaacaaatttgaaggagtcgagtgaggcatgttgatattcggaggaagaaattgctgatagaaggaagagctagtgcagagaccctaatgcaagagcatggctggcattgctagaggacttaaggaagccagtgtgacgagaacatagtggacatgggggagttggaaaagacattagaggcattccaaggcctggtcatgtagggcctttgaggctgttccaatgactttgactttaactctgagtaatgagagagtaagagggtattatgccatgaagggacatgatctgacttaggctttaaaagatcattctagctgcatgagaacaaaggtgggaaaccaatgagaaggcaactttggtaatccagatgagaggaaatgatggtggcttagaccagagtggtagctggggaggtgatcatattctggatatatttttaaaatatactttaagtaagagtaaatatgattttctgatggatttgataggggtcatgagagccagaaagtaagccatagataagcttcgtgtgttagtcagggttctctagagggacagaactaataggatagatgtatatatgaaggggagtttattaaggagtattgactcacaaggtgaagtcccacaatgggcctgtggcaagctgaggagcagggaagccagtccaagtcctaaaacctcaaaagtagggaagccaacagtgcagccttcagtctgtggctgaagacctgagagcccctggcaagccagtggtttaagtccaagactctaaaagctgaagaacttggagtctgatgttcaagggcaggaagcatccagcatggcagaaagatgaaggccagaagactcagcaggtctgctctttccaccttcttctgcctgctttattctgtccatgcaggcagctgattagatggtgcccacccagattgagggttggtctgcctctcccagtccactgactcaaatgttaatctcctttgccaacaccctcacagacacacccagggacaatactttgcatccttcattccagtcaagttgacactcagtattaatcatcatagttacacacaggaaaacatggaaaaaatatgctagttcatttctctgtgagatgggatatgtgaattttgaattgtatttttctgtatttcgaaatgttctctattatgcactttgtaagctgaacagtgatgcacagaagtcaacctttcgtcatactgttgccttgtccctaagtcctagggcatctttagcctgcttcctattttctgcccctgggagaccagaatcacaaagaaggtgtgctggccctttagccctggcatcacattagctgacatcaggaactgagccaggcagtgtggttgtgatgtcactatctcacctcacccccacctaagagattgtggtggggaatctcagacactctaaccctctgggcccaagtcacctttctatcaggggagggaggctgtgctctcactggcttcttgttagaagttctgcctgccctacagcctgcactgagggctctcatcactgcttctgagatcttaatgggggtcaacgaagatgtgggcttctctgagtttagaccatccatctgccaaggaaaaccaagccctgagactgatagagatgagagaagagaatggtaatgtccccaagacagagcaggcaggaagtttgaagcctctgagggatacaggaaaatctaacctcaaagagaagaaggtaagaacaag

SEQ ID NO: 7917 - DNA, 1763 bp, mus musculus; identical to SEQ ID NO: 7916

SEQ ID NO: 7918 - DNA, 1763 bp, mus musculus; identical to SEQ ID NO: 7916

SEQ ID NO: 7919 - DNA, 1180 bp, mus musculus
aaatgctgtttaactgcctctcctccttccaccgctatcaccccatttctgaaggagaatgtggaaaggtagagggcagtttcttgactcaagcccagctccagacagagcctgggaaaaaccaaatgagtaaaaatcatcagtctccctggctcacctgccactagcatctgtcacctcctgggcccagggacacaggaaggggctggatcttcattccagctccccctttcctccccaccatgagtccacatggaagcagcagcatcagacggtcagcattgaagccacatggccccgggtttgagtccagactcccacttgtcagctgtgtgtcttcagacaaattgcctaacctctctgaactttgttgttcagagagcaatttttccttcattgttaagttaggagcatcatagaatcaaccctggggttgtgaagttatatgagaaaaaacatggaaaataccccttctcgtgcctggcaccttatagatattcaaaacatatcatcgctttctctctatttccatgtttcctgaaccatggaatttttcccagaagacataagttgcccaaattttgtaagctgccccaggtcagctcaccagcctgcagggtccaggaatggaagaagctgagcaccccccagtggaggccacggtgttatttcctcacctctcagaggcagggcgttctgaatggctcctgtgaactgcaaaatcagagactgaggctctcagctgggagctgaaagagggcctagcacccaggctgtggctgggctggggatggcagccacccaggtgtgtgttcccaacatcacattttctggcacagtgactttgccaagtgccctagcctggccccaaggaggcagagaggaactggggaacttccagtagcctcaggggtgggaactgagtgcccagattgatactcaggaacagagacagcgctcgtgggggttgtgactgaccctcgcatctccctgtcacttaccgacacctgccgagagccctgccgcgtcaggtgacctcccagtgtctcagggccagggccagggtagaggaggacaaggcaccggagtgaaaaccatcaggattggagtcaggggacctgtggcctggtcctgactccgccactcaccatctggacagtctttggcttgtcactcaacc

SEQ ID NO: 7920 - DNA, 1163 bp, mus musculus
tatatattttacttaacttcatagtattttacttattctaaaataggaagtcacagtggaattaattggaaacatttgctccagattctttgcaggtgtttttggcctcatttttccccctcgtttctctctgccctccaatccactttgccttctaaatgaaggtgatttaacttgtaaggtcattttaagaagaagctatgtgtgtttctggcaaaagtttctatacctctccttgcagaagttgactgatacctgcttctagaatttttgctgcattctggccacaggcatttcttttaattaacaggcgcttaagtggagagctagagtctcttgatcataataaatggagtgttgcttcagatggcaggaataagcataattggatgaaaaccctacacacagagagccaggacactggctgattcagggaaccaactgaaggctgaccctcatgggaaggtgactagatttagctttggttcattggttctgaaatattgccacagctgccttaactcttctccacttcagggggactgcttacatttagcaaatcacttctttgtaacaatgcaattaggtgctctttgggaggttttgtgtgcattggagtgaggtgtggtggctcacgcctgtaataccagcactttgggaggctgaggcaggtggatcacctgaggtcaggagttcgagaccagtctggctaacatgatgaaaccctgtctgtactaaaaatacaaaacttagcagagtgtggtggtacatgcctgtaatcccagctactcgggaggctgaggcaggagaatcacttgaacttgggagggggaggttgcagtgagctgagatcatgccactgcactctagtgtgggcaacagagcgagactttgtcaaaaaaaaaaaaaaatcaactttctgatacttcttcaccctgagagtctcatttaggagaactggagtggaacccaggaatctttacttttatcaggtgtctaggagattctgatgtaggtaatccatggacctccctttaagaaacatgatatagtggctttttacaacagtgttcattctaaaactggacatattgtcatatctagtactgtattttcccttcagaaaagcatataggcagaatagtgactattaacccatgata

SEQ ID NO: 7921 - DNA, 1239 bp, mus musculus
aggcagccttccatcccaggaaccctgctgggtggccagtcctttcctgccccgcctgggcccccacagaaaacattaacactcggccagaacgaacagtcttctcacttccccccacctcttcctgccccaatgaaaatagctcagcaaggcccaatttccttttcctgtctattgtaacatataggcaaactttaaaaccaagtaattaaaatacaaaagtggatcccagggtaagttcgcaaaacaaggaacatctttcatgtccctccctgtccgggagccacagtggcagtgactgtacctagcccagggggcaggagcaggctctgcacctgtcagcacctgcttctctccgttctcacacacgagtgctgtggctcgcaccgtcatcggagtctcaggtgacacgcatcctgctccttccgtgccggctcctgggctgccctgctggagacaccatctggatttggccaaaggtctggctcctgtaatgttcattttctcttccccaggtgcctggcaggctgatgacaatgccgtcagtcggaatgcccagcgccggcgcttgtcatccagcagcctggaggactctgagacgaggccctgtgtgtggggccctttggctgtctgagccccagcctctgcacttgggctcccctcctgccctgcattccatccatcctcactcagctgctgcctactgggcatcctcagcaagatgctggagactttttaccctcctgtgacagctgttacaacctgtaaccacaatccctcacctctcagagggaactggaaccctcctttctccgtgtgacctaaagccactcaatgaactgcagctcacgagaccttttgcagggactctggaatgtcctcacggtatattgatgttcaggtggagctggggtccatgggctaatttcttacacatcttttttctccttagggggtagaacaagaaggcttagagtttggcagctttgttacaaacatccctctggcatttcctggtctctggcacatcataaccaattggaaacctgcagtttggggtagggctggaggatcgctcctgtggaaagggagagccatactgcacggacgtagcgtttccctctacaagcactaggagcacctttctcaaggacaagaaatggtagcaaccaaaaggttggttgaaggaaacaatccttccttctggtggcagagccagtcttctgggcctcacatgcc

SEQ ID NO: 7922 - DNA, 1239 bp, mus musculus
ggcatgtgaggcccagaagactggctctgccaccagaaggaaggattgtttccttcaaccaaccttttggttgctaccatttcttgtccttgagaaaggtgctcctagtgcttgtagagggaaacgctacgtccgtgcagtatggctctccctttccacaggagcgatcctccagccctaccccaaactgcaggtttccaattggttatgatgtgccagagaccaggaaatgccagagggatgtttgtaacaaagctgccaaactctaagccttcttgttctaccccctaaggagaaaaaagatgtgtaagaaattagcccatggaccccagctccacctgaacatcaatataccgtgaggacattccagagtccctgcaaaaggtctcgtgagctgcagttcattgagtggctttaggtcacacggagaaaggagggttccagttccctctgagaggtgagggattgtggttacaggttgtaacagctgtcacaggagggtaaaaagtctccagcatcttgctgaggatgcccagtaggcagcagctgagtgaggatggatggaatgcagggcaggaggggagcccaagtgcagaggctggggctcagacagccaaagggccccacacacagggcctcgtctcagagtcctccaggctgctggatgacaagcgccggcgctgggcattccgactgacggcattgtcatcagcctgccaggcacctggggaagagaaaatgaacattacaggagccagacctttggccaaatccagatggtgtctccagcagggcagcccaggagccggcacggaaggagcaggatgcgtgtcacctgagactccgatgacggtgcgagccacagcactcgtgtgtgagaacggagagaagcaggtgctgacaggtgcagagcctgctcctgccccctgggctaggtacagtcactgccactgtggctcccggacagggagggacatgaaagatgttccttgttttgcgaacttaccctgggatccacttttgtattttaattacttggttttaaagtttgcctatatgttacaatagacaggaaaaggaaattgggccttgctgagctattttcattggggcaggaagaggtggggggaagtgagaagactgttcgttctggccgagtgttaatgttttctgtgggggcccaggcggggcaggaaaggactggccacccagcagggttcctgggatggaaggctgcct

SEQ ID NO: 7923 - DNA, 1000 bp, mus musculus
ctggagtgcacggaagtcacaactggtctatcagtccagacgggggcctttggtcaaatattcttctgattacttccaagccccctctgactacagatactacccctaccagtccttccagactccacaacaccccagcttcctcttccaggacaagagggtgtcctggtccctggtctacctccccaccatccagagctgctggaactacggcttctcctgctcctcggacgagctccctgtcctgggcctcaccaagtctggcggctcagatcgcaccattgcctacgaaaacaaagccctgatgctctgcgaagggctcttcgtggcagacgtcaccgatttcgagggctggaaggctgcgattcccagtgccctggacaccaacagctcgaagagcacctcctccttcccctgcccggcagggcacttcaacggcttccgcacggtcatccgccccttctacctgaccaactcctcaggtgtggactagacggcgtggcccaagggtggtgagaaccggagaaccccaggacgccctcactgcaggctcccctcctcggcttccttcctctctgcaatgaccttcaacaaccggccaccagatgtcgccctactcacctgagcgctcagcttcaagaaattactggaaggcttccactagggtccaccaggagttctcccaccacctcaccagtttccaggtggtaagcaccaggacgccctcgaggttgctctgggatccccccacagcccctggtcagtctgcccttgtcactggtctgaggtcattaaaattacattgaggttcctacatttgtttgtacagaaagtgttgttgggtccacaccgtgtttagacatcaggtgtgccaggctctgggggacaggtcatgaggcagagtccctgtccttgtgaagctacaggctaacggggaagacagggaacaggaagcacacctcccagcccggagcaatgacacagtgggacacgagcagga

SEQ ID NO: 7924 - DNA, 624 bp, mus musculus
tgcttgctatgtttcatgaagttaaggtgcatggaggtcggaaagagaaaaggcaaacacccagtcataaggacactgaataccaacatgaaaaaaaaaataaagaaacatcaatgacctaggccgggcatgggagctcacgcctgtaattccagcactttgagaggccaaggcaggagtattgcttgagccctggagttcgagatcagcctgggcaacagagccagaccccctgtctacaaataatacaaaaattaaccaggcatggtggcgtgcacctgtagtccttgctgctcaggaggctgaggtgggaggatcacttgagcccaagagtttgaggctgtagtgagctttgatcaccactgcactccaccctgagcaacagagtgagaccctatctcaaaaaaaaaaaatgacccaaattacgaagtgcaggagatagtcaaacctggcagagccaccaagaggcccctgcagagccagccctccctggagccccatcctatggtcctgccttagtcggggtggagaggtgggtgattttctcttctcttccaaggagtgtctgctaaattgttcaaatgtgattggcctgtctgggtgcagagattaggagccagcggg

SEQ ID NO: 7925 - DNA, 897 bp, mus musculus
cagaaggagatcaccgccctggcgcccagcaccatgaagatcaaggtgagtcgaggggttggtggccctctgcctggctcgggagagctgactggggggcgctctgtgagctgaagccgtgcctggctgtctttgcagatcatcgcacccccagagcgcaagtactcggtgtggatcggtggctccatcctggcctcactgtccaccttccagcagatgtggattagcaagcaggagtacgacgagtcgggcccctccatcgtccaccgcaaatgcttctaaacggactcagcagatgcgtagcatttgctgcatgggttaattgagaatagaaatttgcccctggcaaatgcacacacctcatgctagcctcacgaaactggaataagccttcgaaaagaaattgtccttgaagcttgtatctgatatcagcactggattgtagaacttgttgctgattttgaccttgtattgaagttaactgttccccttggtatttgtttaataccctgtacatatctttgagttcaacctttagtacgtgtggcttggtcacttcgtggctaaggtaagaacgtgcttgtggaagacaagtctgtggcttggtgagtctgtgtggccagcagcctctgatctgtgcagggtattaacgtgtcagggctgagtgttctgggatttctctagaggctggcaagaaccagttgttttgtcttgcgggtctgtcagggttggaaagtccaagccgtaggacccagtttcctttcttagctgatgtctttggccagaacaccgtgggctgttacttgctttgagttggaagcggtttgcatttacgcctgtaaatgtattcattcttaatttatgtaaggttttttttgtacgcaattctcgattctt

SEQ ID NO: 7926 - DNA, 1793 bp, mus musculus
ggtcgcaatggaagaagagatcgccgcgctggtcattgacaatggctccggcatgtgcaaagctggttttgctggggacgacgctccccgagccgtgtttccttccatcgtcgggcgccccagacaccaggtgagtggatggcgccgcggggctcctgggttctgcgttgcggggtgggttcggtgtcgccggcgaggctgacgggtcgtcccctgcagggcgtcatggtgggcatgggccagaaggactcctacgtgggcgacgaggcccagagcaagcgtggcatcctgaccctgaagtaccccattgagcatggcatcgtcaccaactgggacgacatggagaagatctggcaccacaccttctacaacgagctgcgcgtggccccggaggagcacccagtgctgctgaccgaggcccccctgaaccccaaggccaacagagagaagatgactcaggtgaggctcggccgacgcccgtgctcctcccgtcctttccccagtcattttctgcccggcttgatttctgacatttaagtgtttctttcgctgttccaggctctgttcctctcccggcatttcctccctgaagcctccaggtttctcatttggtttctgcctgcgttcttttcttttctccacacatcacactggcatgcagcatgttgtggcgtgtgagcatggggtggccgtgggtctctgtccctgactaagccgccccttgtcccttctcagattatgtttgagaccttcaacaccccggccatgtacgtggccatccaggccgtgctgtccctctacgcctctgggcgcaccactggcattgtcatggactctggagacggggtcacccacacggtgcccatctacgagggctacgccctcccccacgccatcctgcgtctggacctggctggccgggacctgaccgactacctcatgaagatcctcactgagcgaggctacagcttcaccaccacggccgagcgggaaatcgtgcgcgacatcaaggagaagctgtgctacgtcgccctggacttcgagcaggagatggccaccgccgcatcctcctcttctctggagaagagctacgagctgcccgatggccaggtcatcaccattggcaatgagcggttccggtgtccggaggcgctgttccagccttccttcctgggtaggtgttgtgagctaaaggtttctactcttacatcctcggtgacacagcatcactaagggagggctctgtcccctaggtatggaatcttgcggcatccacgagaccaccttcaactccatcatgaagtgtgacgtggacatccgcaaagacctgtacgccaacacggtgctgtcgggcggcaccaccatgtacccgggcattgccgacaggatgcagaaggagatcaccgccctggcgcccagcaccatgaagatcaaggtgagtcgaggggttggtggccctctgcctggctcgggagagctgactggggggcgctctgtgagctgaagccgtgcctggctgtctttgcagatcatcgcacccccagagcgcaagtactcggtgtggatcggtggctccatcctggcctcactgtccaccttccagcagatgtggattagcaagcaggagtacgacgagtcgggcccctccatcgtccaccgcaaatgcttctaaacggactcagcagatgcgtagcatttgctgcatgggttaattgagaatagaaatttgcccctggcaaatgcacacacctcatgctagcctcacgaaactggaataagccttcgaaaagaaa

SEQ ID NO: 7927 - DNA, 3629 bp, mus musculus
cggctcccagggcggccgcggcggtggggcgcaggccgccgcgcgagtgaatcgaggcggcgggcccatccggaaccggccggccatcgcccgcggcgcggccggcggaggcggcaggaaccgaccggcgccctacagcagggtgagtgcggaggccggccgcgccggagagtgggagggggccagccggggctggggccggggccgctcgcggcggagacccgggccggcgggtggataaggctggtggagcggccgcccggaggtccggagggtgcgtgtgggcgcggagggggtggtgggcgggagcgaggtcgttctttcggggtccggtcccggaggctgagacccttcccagctctttgtttgttccggacgttggggcctcgtggcaggagaggaggggacgctgggcgcggcacaggcggcgggaagttagtctaagggaactgaagttgtgcggccgcggtgggaccgtgcggcctcgggctggggcagctgcagcgccggagggagcgctggcggccccgtttcggccggatcctctcaggccgggaagaggaagggtccggagtagccgtgagggtcaggaaagccctggactgagactcacagatctgctcttgttgcggtttttttttcagccaaaacaacttcccgacaagtggcagcacgatcttttcgacagtggcttcggcggtggtgccggcgtggagacaggtgggaaactgctggtgtccaatctggattttggagtctcagacgccgatattcaggtaagagacgagggcttctcggtgagccgttcgccctgcacaggacggatcgtgattttggggatgtggccctgagtccccttcccgccttagcgaagggagccctcccagctctgaagggctgcaggacagacccagtgctagtaaagccggggtcagtgcgcaggcaggtgcgagcctagctgagcctgaggaactgctgctgttagtctgaagatgggttctgtgagtgaaaatcccctgccagggcttccagtttctaacagggacaaagactgaccaaatgtgagtggtttttggctgttagacccagcccagttgctttttaaattttgtgcctgtcttagtgggttaatgtgagaaaaagaatcttctttatgtatcttgtgaagcacagggagtctgtttttctggctctgtttgccttgagtactgtcttataaagaccttgtacgctgtggttttatcactccccaccgccgtgtcccgtcagtgacatgactctcaaatccatctttggttgaagcttttcttttttaaaaaaagaaaaattgaatcccaatggcatttcaacttgttttctggttaagaaatgactttttgggaatcagttttggagatggctgggcagggttcagttgcccacagcccagccatttgccttgggaggacagagtagggccagtgagcactcacagtgtctcaacactttttttaaggtggtttctagcatccactggaaaccgcttttggtgaactccagttcccgctgtgtgcctgcggccggagtatccccacactctgggttccctctccaactcccagcctgcctgaggtcagggcagtttccatgacagcgcttgacttcagactttgccgcaggcttgagtaggaggagagggaaaggtgagccagaatctgcctttgggggaggggctggggtcagggctcccgaatctacaggcccttcaagctggtctgatatcggactgcttcccttgctcttgattttggcctttaccgtttcttggaacagcccttgggtgtgttgtacattttcctttgttgaagaggatagtggcttaattttgtgcccgttgctagtgggctttgcagcttcctctacctgcatcgtggtacacgtgtcaggtccccacaatggcaggagccctcagacccaggtgctcttggaagttgctgtccctcctgccccgcccttccctcatttcccgttaaccactgtcctgcctcccagagaaccacccccaaagcaactcacgcttccagggcctgtccctgggccaccagaaggaacgcagttttgttgcttttctgacaactgctctctgcaactcccaggaactctttgctgaatttggaacgctgaagaaggcggctgtgcactatgatcgctctggtcgcagcttaggaacagcagacgtgcactttgagcggaaggcagatgccctgaaggccatgaagcagtacaacggcgtccctctggatggtgagtctgggggtggacccacgctgactgtggggcttgtggagtttggggctggcacctgtccaggtaggaatatggggtacccctgtggctgaggacactttgcatttgcccctttgtctctctcttccatctgccacctctcatgctgccccacacatctggaccaacctcttgtgaacccccatccagcaagctacatccctcccctccttcagctccttccggaagattcacttctgtgaagccttctcagaaccgccatagtacacctctgagtgcggggctgtagtcgtaaagacaaaggtaccggttcttcttcgtcaggtcacccacacctctccacccacgagcaccccgatacctcagcgagcagcccacctagtctggactgagaaggagtgaggaggtgttggtggggttgcttccttgccattttgttctcccaccagtatctccaggccatttcccttgtcgggggcatttgagacgcacagaggccctttccagtgtttgcatggagaccagggtgtggcgccagctgggtgggtttcagagcctctcaatagaacgtgccttctcgtattctttgccgcaggccgccccatgaacattcagcttgtcacgtcacagattgacgcacagcggaggcctgcacagaggtgacttccggggcctctggggaaggggattggccgagggtgaggctgcgtcgctcttagggtccttccgggtgtgtgaacggtttcgtcttccttgctagcgtaaacagaggtggcatgactagaaaccgtggcgctggaggttttggtggtggtggaggcacccggagaggcacccgcggaggcgcccgtggaagaggcagaggtgccggcaggaattcaaagcagcagctttcggcagaggagctggatgcccagctggacgcctataatgcgagagtgagtcccgggggagccagctgggggcctggtcaaagccgcagtggggagcaggccgcctgtgaatgcaagcctctttctcctctgtgtttcagatggacaccagttaaacagaccagcaaatccgcgtgcggaacaggacccaggcgtctcctcttgctccctggttggggggcggtggctggggctgtgcggccaatgatggatttgtttcttttatgttttaaaataggatttaaaaactcatgtaaaggttttttttttttctttttttttttttttaattctgaaacagacctgttttgtaccgagttatttttgggataaattttactggttgctgttgtggagaaggtggcgtttccaccttttccataataaaatagaaatgtgtgtagaactgga

SEQ ID NO: 7928 - DNA, 493 bp, mus musculus
gtgtaaagcacagcgcttctccggagagactttgatctgaaaaggccaaaaagaacagtgagaagacctggagccagaggaagtctaaaatcactaaagtttttcaattaaatttcagttttaatttagttcatagccttagggttgtcaggttaggtagctgatgtcctaatatggacggctccaagggatgactgggagaaaatggcgaccacagtaaatgccgctagggaaaaaatgagtcttcagaaatatttttctttcctattaatccatttcactactgaaattcaagaatgttcaatttttatcattaaaaagatagccatattcacttgtgccttattaattgcatttgttcacttccccccaaattggctgtaaaacaaatttcaggttatgaaattattttcaccacgattggcacattgggagggcaatattatctctgggaaattgtttggcctcaatattcaatgcaaaacaaagcaaa

SEQ ID NO: 7929 - DNA, 742 bp, mus musculus
accattatctgcttgacttagcctcttagcagaaaagcttagaaatgaaatattagaagacaatcaattttccactggaaatggaattgaaggatctctaaaattaaaataaatatattggaaaagattatgtgatggacacaaaatttactgctttttagtgtaataaatgtcatatagggcaagatatgtttgcacttgatttaatagaggggttgctgtttgatttggctgatttaatttctacctataattctaaacataaacataaatgctcatgaaatgcaatattagcaccttatattactttctagcagttcttagagtatgctgagacttcagattcttttgatttaaagtgaattgggcctggtgcggtggcttacgtctgaaatcccagcactttgggaggctgaggcgggcagatcacctgaggtcaggagtttgagaccagcctggccaacatggcaaaatcctgtctctactaaaaaaatacaaaaatagctgggcgtggtggtgcacgcctgcaatcccacctacttaggaggctgaagcatgagaattgcttgaaccctggaggcggaggttgcagtgagccaagattgcaccactgcactctagcctgggcaacacagcgagagtctgtcccaaaaaaaaaaaaaaaaaaaagtaaaaagaataacctatttttttattgtcagtaatctaaaaacaggaagtgatggaagtatctgtatttctc

SEQ ID NO: 7930 - DNA, 280 bp, mus musculus
cttcagtcctagcaatcagtcttttgttgtatgacgaagctcgcagtttatattgcagttctggtaaaaagatcagtgtcttactcctcaatgtttgatgctgtcatttggccgcttgaatatattccagtgcttccaaaaataggccctaaaatattggcacaagttcttccggggctaattctattccgaattttagcagttttggtgtgtagattctattgctattcctttctgatgctgagtccccttctacttggttttactgctgcctatgctt

SEQ ID NO: 7931 - DNA, 199 bp, mus musculus
tgggccgtggaaccttgggcccctgacctttcaggctgggttgtctcttgtggccctaatgtttgcagcaaaccggtggcttggttgtaaatttcatctttctatgggcttcagtcattcagagggcaagcacggacttctaaggattagagggagcctccttgttcaaatgtttatgtgatttcctcttccagccaca

SEQ ID NO: 7932 - DNA, 1011 bp, mus musculus
agctatttaattaggttcttaagacatttagaacaccaatttgtgaggataaattccattcgtcagagcaaacacagatcgcaggtagccctggagctgaggaatagctttgatttttggtaaaatttgtgagtccacagctttctgatcaatcttgcgctgctccgtaatctcatatttctctttttctgtgtcgaagatctcaccttcctggtgtctgggcttccgcagcttcttcttcttgaagtaagcatcagtaagatgttttgggatttttacattgctgatatcgattttggttgaggtggcaatgacaaatttctggtgtgttcttcgtagaggaactcgattgaggaccagaggtccagtcacaagtaataagccactagccagctgcttcaggaaaaccaccctcttgcccctgtggcgtccagtgaggatgatcagaatggtcccgggggtaatgctggctcgcagttttctcacgtgctgactgaagggttttttgccgtggctcaacagctttcgaggcacatcttcagtaggatactatctaggcattttgcgaagtttaaccacccgggtaccgccgttcttgtcaccaccaactggttttgtaacagctgcaagaaccttctccttctttttcttttcaaccttggatttagcggctgagtacttcctcttctacatggcctttctggaatacatggcagatcgggaatacctgccaattcctctgacaaggacagggttgcggctgcaatggggcttccccttcttgggctttttagctttgaggttaccctttttcaccttgccaccagcatcaaccttcttggcttcgggtttcttctctttagtatctggcttctcaactttttcacctgccatcttgcaagatgggaaagagcagtgtcttttttagactcttttctgtgtgacatatatgtttacaattgttatatcttcttgatgaaaggaccctttaccaatattagtgttcttctc

SEQ ID NO: 7933 - DNA, 1921 bp, mus musculus
acagttctaatatagacaaaaagttatgcacagacatacatttaccttgttattaaaaacactccccaaagcctgggcaacatagtaaaacctcatcgctacaaaaaaaaatctttttttaattggttgggcatggtggtgtgcacctgtaatcctatctactcaggaggctgaggcaggctgatccctcgagccgaggagttcgaggctccagtgagctatgatcgcagcacagcactccagcctgggcaacagagcaagacttcttctcctaacaacaacaaaaaacctcccaaaagagaagcaaatatgtaagctaggattgcttcttagtccttgctattatacataacagcagtgcaagtctttgtgcaaaaatttatctagttttttttttttttttttttttttgagacagagtctcactttgtcactcaggctggagggtagtggcgtgatctcggctcactgcaacctccgcctcccgggttcaagcaattctcctgcctcagactcccgagtagctgggatttcaggcgtgtgccaccatgcctggctcatgtttgtatttttagtagagatggggtttcaccatgttggccaggctggtctcgaactcctgacctcaggtgatccacccacctcgacctcccaaagtgctgggattacagatgtgaaccactgcacctagcctagatttagaattattactttaggatgcagtcccagaagtaaaatgattgcatcgaagggtatccatgtattcacaggcctctatcaccatcctgctttccacaggaggtacccacaagcacttccacaaaaaatatctgagaatacttaccttacctatatctgtcgcatgaaatgcatgatgttaagaaaggattcagaattaacccctcccgccatggaccagatcatcatcaccctgtcttcagtgaatgaaccctctgccagggtatggtggtggagcaggtgtcctgagcttgaacatgacacctttcatgataagtacttatggcccccaaaacaaataagcatgtggacattgtttctggctttctgtttgtactctgtccctcttcttaggtcaaccaggcaccgcccaagcttcccaagctgtgcttagctccccttttctgtcatccaggccctgccaggggttaacacagcagtccttgctgtgttgctctcgtgcctgctggaatgacttttttctctctttctttcctccaggtgtccaacgtcctcctattcttctgctcgtggtttgcaagacactgtgtaacctcagattataaggttcccacatatattccccttttacccactgcagagcctaatacttttcttttcttttttcttttttcttttcttttcttttttttttttttttttttttttgagacagggtctcattctcacctaggctgaagtgcagtggcacaatcatggctcactcgaggtcactatcctggacatcccaggctcaggtgatccttccacctcagcctcccaagtagttgggactataggcatgcactaccacacccagctattagtaatttttgtattttttgtagagatggggtttcaccatgttggcgaggctggtctcaaactcctggcctcaagtgatctgcccgtcttggcctcccaaagtactgggattacaggcgtgagccatggcacccggccctgattcatttctttggtttaaagtgtaaatggtgtttcttgtcaccttttaaaatgtgagtgctcttgggaaaggaaattcattaaactgcttcagaccataattatcttaatatgaggtaatctgtcaggcccgtcccttctcccccttttttctcctctcccccattgcctcctttttctttcttcctttcctccctttcatgcagttttatgtata

SEQ ID NO: 7934 - DNA, 175 bp, mus musculus
ggtaatgaattcttaagtgtggcctaagcacaacaatgttagccccagacacaaggagcgggcatccgtactcacacgcgagctcttttccaaggcctccgtggggggctcctgagaagactgggaggcaggacggaagagcagagaagccccgtcccccaccacgagcctaaca

SEQ ID NO: 7935 - DNA, 1099 bp, mus musculus
cattttagccagtgggtacatgtcctgtcaaatcatttctgagagctactgaagaagagaacaaaatggccatcatgagttttgtttcatctccctgctcttgccacgacctcttctgagaatgatgtaatgcgatgactcggacaaagggtgagccgttggaggggaaaataagaaagggaaagagactggaatccctagagtacagccgctcattcctaagcattggctacaaaattacatttggagagtattgaaatgccatcaaacctttaggtaatacgagtcaagaattaataacgtaagcattttgctcagtcccacaatcataaggtactaggtaacaactaactttgtttcaaaaagccctctaaggtactgagacacacctgtcattaggaatcaaattcccctggggacacacatcgatgaccatcaagccgctcatcaagtgcgcaatgagaagcactgtgtcttccgtttatagcatcgtctctttcctccaggagcttggcagcgacactgatgagcaatgagattacttgaagggatcaaaggcgagtctgtgttccactctacagcacagaaatgctgcaaaattatggtaaattatgtcagtacgtcttcgtgctgttccaagctctcatctgtaaaatgttaacagtaatctgtgaaatgcaaaccacatattttcttgtgttcttacagcatagagaggattcatgagctcatggccaccaaaaagcccactgttattgtggagctacttgggggggacccaccatcccagccagtcataaccaggcctgtggctctctggaagctcccactgctaccctctgccattgctgctgaagaccaggtaacccactacctggacatcatgctctctcacacacctcttacatgacacacacacacacctcacacctgacaacatacacctcacaccacacacatgatcacacacacttcacaccacacacatgctcacacacacttcacacttcacaccactcacctcacactacacatatacacacctcacacatctcacaccacacacatgctcacacacttcacacctcatatatggtta

SEQ ID NO: 7936 - DNA, 313 bp, mus musculus
cggttgcaaaataaaaatgaaatagctagaataggaggcaagcataataggagatgctatcaggtgcctgcaataggtcaagtgtctcccgtgcccagaagccagcctaaagcacaatgagttagcataattctatttttctgacaaaaaaaaaaaaaaacaatatgtgccaacaatacatctgtagaacatgtctttggctataagttggctgaaccaagaatgcctcactcagtgctgtatacagaagatatggtcactttggtagcttggtaccttggaaaaaaaatattgattaatgtgacgcctgagg

SEQ ID NO: 7937 - DNA, 1654 bp, mus musculus
ttgtatttttatcatgctttcattttttacttgttttctaaaaagttactttttccttttattgttcctccatttgaagtcttagtgatataactgaaactaagactcttgcatggttttaatgtatttcagattttcattcactagcttctgcctgccttagagtctgacatgtagccactaagggtcttcattaatccgttcccttttttgtcctctctgtatattcctaacagctgaattattttctttttattgtttgttttctttttttcagcaatgcggccacttagcatgtcttacagttttgacttgtcaggtaaaaaaaacaaaaacacttttacacctgacgtgggttttgtggtttctgtgaaatacatttcattcatctgcttgttcaaacatgttaaaaaagaaaattgaaaggcttctgctaagccgtggtcagtaaaataaaacattctgcttgtttgaaaacaatatatgtaaaaaagatacaagactacagtaaatctgttttctcctaagcaattttggaagaaccatcacaccacactcatggttctagaagatggtgcccatcttaatggcggctgtcactgtccaggctcttctagagcaatgaggttaaagcctacagcagacctttgccctaagagaatagaaaaaaacttcatagaaacaaaattctgacacatctacttcctgttctctaaagcattcagttatttaagtaactaaacttaaaatggttatctacttcagatgacagcacctcagttgatgggcaagaactcttttgtatctttgtgctcagtggatagagcctagtcatgaatgactttgaatgctgattaagagtataaaaatacaggccgggcgcggtggctcacgcctgtaatcccagcactttgggaagctgaggtgggcggatcttaaggtcaggagatggagaccatcctggctaacacggtgaaaccccgtctctactaaaaatacaaaaaaattagccaggcgtggtggcacacacctgtagtcccagctgcttgggaggctgaggcaggagaattgcttgaagccaggaggcggaggttgcagtgagccgagatcgcgccactgaacatcagcctgggcaacagagcgagactcagtctcaaaaaaaaaaaaaaaagagtataaaaatacaagagcattgtaatggctttggttgtaatatataattatgtgcctcagatttgtagtacaagtttagacccttctgttaaacagagattaatagtgaaataactaaatttgagctataaaatcaaccctttataaattaaaactttaaatatatatgagtgaattttcttttatttatttatttatttattttaggaaatagagacagggtttcaccatgttgcccaggctgctctcaaactcctgggctcaagcaattcaccaaccttggcctcccaaagtgctaggaatacaggcgtaagccacctcacccagccaggtgaattttcaaagccaacttaatcccaataaaatattttgcaagttagagtttttaattttggaagctactgttttaaatataaaatgagatgagatgttggcacaaatattttcttttgggattttcttttaaatgccatagaatgcc

SEQ ID NO: 7938 - DNA, 1654 bp, mus musculus; identical to SEQ ID NO: 7937

SEQ ID NO: 7939 - DNA, 488 bp, mus musculus
aaaagtctttattaacaaactgcatatattttcaaagtataatacaataattggagaataaaatgtaaattatttacttatatagttaacatttgcagagctttatcttgagaaatgtactttgatgatgtttcaatttgaggaagagattagtgtctcaagtatagcatttctttcactgccaatgagagcgaatcaaactttctgagaaactttcacatttcttgctgtgttccgggatctccagtcttctttaaatttggagaaattgcccatgaaggagccgactgctgtgtccagcatgtgatgggggaggaactccagcccaggaaggggctcccctggaccctcagatggagtcgaagtgagtgaatgcacctggcagcttgggaggcctgagtggaggggaggggcagcactctttaagacccaggcccactcctggggaagggaccagcagggcttgcttggctcttggcctcctggga

SEQ ID NO: 7940 - DNA, 214 bp, mus musculus
cttcccaactaatttcctccactgtgcaggtgcttgtccccagaacttctaatggtgtaggagaattggaagctttactgattctttcccttctctagacagacaaagctcctagctccccagcatagcctcaagccacagaaaacttacccctaagagctctcatgtaccaccttcaaaaaagaatggatcctttcctgtttagctttcccca

SEQ ID NO: 7941 - DNA, 1035 bp, mus musculus
tccaaaagtaaaacaaagaaaaacatgtttaccatgattgaccaggaaattgcacctgcattctatttcacctatggataggtcttccaaggaccaaattctaagatagaaatctctgaatattctaaggtcataatgactttcctggccccaaacctaatgtcacatttcttctgacaggctacagaaacaagagaaaacaaaaaaaaaaaaaggtccacaggatggcttgggttgaattatgtgtgtttatgaaggaaagtgtcaactagaccacatgtgtcaaggggaaaaatatcataaagaatttcccaaagaaatccttgagccaaaaccctttcttaagtaaaaatatcatcatttcagggcacattcctctcctgtcatgcatgcatgagcagactgcttcctgctgaaagctcattctgaaaatgaaatgcagtccctatggtaagcctagctttccataaaggcaggacagagtaaacaaaataatcctcactttcagttccatttctttactttaggtaggatctagaatgttcagggaacaggaattcttcgggaaattctagctctttgaaatatagccacacagtcaaacttggcaaaaggttttaaaattgtattcttaaaaaaactatatgaagaagcttttataactcagtatattttttaaaaaccaattgtttctttataagtttcccaacccaacataccatgcaaatcattatttttaccttatgattcaaatgtatccttgaccacatgtaatgggtaaagccacagagacatgatccctctcctacaactcagaagctaactgatttggtgtttaatttttactttacatgatatttcttttgttcttatcattctcaggaagagtcctatagcctgatatgcaatgtacactttggtggtttttggatgcaaccaaaaaaattgtaaattttgtaccatttttgacatatagaaaccacagtttcacatgattcagctcaggaaaggactcatctctctagacctgtttct

SEQ ID NO: 7942 - DNA, 457 bp, mus musculus
actttacaaatggggaaaccaaaggtcacagtcaaataacttgcctgtcgtcttacagctggtaggtaataggactgtcactcagacccatattttttctgaaaagcctcttttctttccattatccaacactgtctcaaaagaagaatatttttctagatatgatctgactaatgcagagcagagcagagatatgactaacttttagttcccatttatataaagcttatatactatttttgaaaacttaggattcaggataatcctaatggcgttatagcgttcctaaagatcctgttgcgtttaagtagacatctacaaaaacttcagtaaaactatgtagatgtaacattattttggcttagaatagttatttttgtatgaacacatctcacaagtagaattatcattcttactggtatacttttaggataatggatatccaatagaattctga

SEQ ID NO: 7943 - DNA, 457 bp, mus musculus; identical to SEQ ID NO: 7942

SEQ ID NO: 7944 - DNA, 1037 bp, mus musculus
aagttattctagatataaaacccttaagaatcttctccaaaagacaatttaatactgagttacaactatgattatttttaaaattgtttccatttttaaattcctttctttggtttatcctcctactttttttttttttttttttttttttgagtcgggattttactcctgtcgcccaggctggagagcgatagcatgatcttggctcactgcaacctctgcctcccaggttcaagtgattcttctgcctcagcctcccaagtagctgggtctacaggcacaaaccactgcacccggctaatttttgtattttttgtagagacggggtttcaccatgttgaccaggctggtctattttgttgttgtttgtttgtttttgagacagagtcttgctcagtcgcctaggctggagtgcagtggcgcgatctcagctcactgcaagctccgcctgctgggttcacgccattctcctgcctcagcctcccaagtagctgggactacaggcgcccgccaccacgcccggctaatttctttttttttgaatttttagtagagacggggtttcaccatattagccaggatggtctcgatctcctgacctcgtgatccactcgcctaggcctcccaaagtgctaggattacaggcgtgagccaccgtgccccgcccaggctcgtcttgaactcctgagctcaagtgatccacctgccttggcctcccaaaattctgggattgggattataggcgtaagccactgcccctggacaacacttttgatgtatttaatttatatagtaactttgtgaaaagaggttgcatataatgattttctaaagaatatgtaacatattgtcaaaatatattcttaattccctttacagtttacataaactattatgctaacttttctatactactgaaataatttatcataataacatcatatttaatgaaaccacctgtagtaaaatatataggctaattcctcctgaaatataacccttagcatagatcctgtaacatagtaagccttcagtaa

SEQ ID NO: 7945 - DNA, 231 bp, mus musculus
gttgctcttcatattttcttcttttctaaactatttataatttcactgcaataggtgtaggtcttacttgatatttattgattctattggaactcacggttttttaatatttaggactttcaacatttctgggagattctcagcaattttctcattaaataataattatttctatttatttctttttattcttcctgggccacatatttaacccatgtgttaacttctcat

SEQ ID NO: 7946 - DNA, 135 bp, mus musculus
agtagttacatttgttgttttacactattgtttttgttatagattattaatagccagtggaaaacattaagttttctgtggatatgtaaaacgtgaaggtatacaattctcgaattatatatcatagttttaaat

SEQ ID NO: 7947 - DNA, 324 bp, mus musculus
gacttatagaaaatactaattcagcattattataacaaccaataatagaattatctcatatccaatgatagaattatataaattactagtatattgatatttctgaatctttatgtattagaaagtttacttatagagattacataattagaataattacaattcttaataatgtgtgcttgcttaggcaagagagcaaaaacagacttccaaattatacataaaattgtataaattctgtatatacacatcatgatatcaatgatttaaaaatatgtatggaaaatggaataaatactatgcttatcagttattttagactat

SEQ ID NO: 7948 - DNA, 758 bp, mus musculus
ttggtaaaaattccaaaataaattgtgaaatacagagacatagatgattaaaatggtagggaagaggacacattacttgactgttttgagagtgaaattttccgggaaaaggcactcatcttttctgtgattttattttctgaccttgtagactatttctgatttttacattactacaaaataaaaccaggatttatgtttattatttacatagctgctttatgtagttttgatagttatctttttgttgttgttgttagcctatgggaaggaagagtttggaaggcccggaggaattcttgtgggtgctaagtgactcttctgtttatatatgttctcattctatgattttgcttgaaaacctaatgtcttggaacttacatataaattttaataacatagttagacaagagcttaatagtatttacacagcagtctgcttcattttttaaatctaaaattataatgcaattcagcagaaaaaaatgtctatttgaagtcaggaataaattccttgactactcagtgtaacaaatgttaaaaaaaaaagtcacatttgtccttaagtccttcaactttatcctgtgagatttttatttaaatcatcagtaatcttcatcacatttacttttccaacttttatattgttaaagaggttaggtaggcttttatctcttcgttttaaatgaatcttgaaaaatgcaaccataaatagctttgtaaagttcatatagttttagaacacctattagaaacta

SEQ ID NO: 7949 - DNA, 1029 bp, mus musculus
tcaacccaagaaaacaccacacaattagcataggctggattattacatttgttatgttcaacgaagtgatatcatagtctttgtgttttttatgatgatcagacccacttttgaattcattctgtattcagtactacatactatattctatagactgagttggctgaaatccaggacataataagtaggtaggggaacttgggcaagatttgctaggcagggcatgctgtgactttaactatttgaataattcacgtgtatagaagacatggagttattctgggtgaaggtgcagatgccaaaaccaaggccattgcgtagaaagtgtctagagtgagatgggggcccagtcaccgtccagagaggaaagcaggccacagttcttccattgctcagacgtgcctggagtggtgagcagagactgagtgaacacctgctgtggaggtgggcactgcagtggcaaaaatggggactcagtggcacctttcaatggcagacccaggctcttggccaagttgtgatgaaagaaattcagcagcaggtgggcgaatcagaggtgacaaaaccctgtttggggctgtttatcaccattttgagaaaattaaaaccaaagcaatgttttctgagactatttttgaacccattatgagtatgatttctagagtaggaagtacaggattggaggatgatgtgctcattaaagtccccaagaatggacagcagtgatgattcagaacaggcaagtcctggaagaggcctggttccgatgtggcaataggggagtagcttgaggaaacacactgcacatcccttgaagccttggactcaacaaagagaggccctgaagaattaagtgggctctctgctgcctctggcttcatgtcgcctgtatttaaatcatgatccctttcatcatgttgttccaacaagcatattttccagagatcaaagcagattcctcgatgacacacataagaaatgcaggcgtggggtggaggtgacatgagatattagacaggtttgtagggc

SEQ ID NO: 7950 - DNA, 983 bp, mus musculus
agtattcatttttctttctctctttaagccccagatgcagtgaagagaagcaaaagagagcagcactaaaggaaaatataagtgacccaccatttatggagtatctcctgtgtgcaaggcattttagacaatttaatgttttaaacttgatacctagaccctaacccctaccctgatactgaatatctatatgaccttgtgacttagttctccctgagcttgcatattctcccttgaaaaccaagagggctgccctagagtatcccaggaatcttttcttgcacaatcattcaggaacaagtgccagccatatctcattttaagtatctaacatcctttggatactcctgttatcttgtttctccaagctgggggagtggtcccattgctctgtagcagttttgctatgtgttcttgaatttaaccacggttagaaatgcttgaaatagttctttatctttcttcctgaaactgctgagatggacagtcaggaggaagaacatataccatcccagatattgagcacagtgtgggggtgggtggtcagagctggggccagcacagtggcagcagctctcattcattcccatggcttgccctggctgtgtgggcaaaggtctctccagcaatccagcagcctgtttccatattatcagtgctttctcctctctggctttattaaacatgttaagtaagatgttttgccatgttcttacagagtctgttgcattgattattcacaatgccatcacccctcctcccaccctgcttagtactcccccactcccaggcttgatttattacccactatattgttccaagcacagacctttttatcactgtcacatatgtgggcctggtgatgagatatgcttggtagtggctggaggggcaggatggagctgtaggaaccaagcaagaaggaagtttgcaactgattttatcttgttctaaaactcatttctgcttatattttggaaaat

SEQ ID NO: 7951 - DNA, 1032 bp, mus musculus
cttcctttagagttcaactctaaatttgtattttattcataattatttcatagcatttttcaggtcattttattactgtgtgttccttagattctaacaccctatgttgttgtactgactgcgtcattgattctgtttcttgatgtgaattgcatttgttccctgtgactaatttcctgtaattgcagccagagagggttctgttttcatcagctcagtccaaggtgatcagtattttcttaacataatgtttaccttgaatatattatgattttaattgtgaaatgctattcaattttttaaggattccctcagaagtaatgtgctctgtaaagtttaggagacacaatattttatagattttgctagtaaaaccagaattagaaacttgtactttttgacattgacacatgccattattgctatataggaaatctccataacatcaacatcaatttcaagtaaaaaatagggcactatttatctcaaaaccaagttagccccaagtcatgatcacattattgtcatttactctttgtaaatactgttacatgtgacacctgtctttgccaataaaatccataatcctggagagcagataatgtattttcaattttctttggcctcacccacgttatttgggacaaagcccaaaaatatatgggtatttagtccttatggaggcacagaatgatgtagaaatgagagagggagaatgccagcatgagtggttgccaggttcattggcaagcatcttggcaacgtcttacctgaagaggcagcatgacgtggtggaaagaggtggattttgaatcagacgaacttcggttttcatcccagctctgctgtgcactaactgtgtaaccttgggcaagtacttaaagtttctcaatcttgttttttcttttttttccacctgagaaatgtagttaataatacctaactcacaggtgttttgtgagtatcaaatgaatataaatcatcttgcaacatcttgacaaaattagtaattgcaaaaaaaaaaaaacaaaa

SEQ ID NO: 7952 - DNA, 1196 bp, mus musculus
ataaatagcagaaataatttagttttaatttagtttcatggctaatttgaagcagtactaaataaaactcataacataatattccttgagtttgaattttgctttcttttttcaaaagcactgtcttatgtgctacttttgttgatccttatagaactcccatgcgttgactagtgttactattatcgccatcttacaaataaggtttcatggccaaccaataacagatatttagtgatagatttgaggctttaatataggtctttagtgatttcttcttatgcaattctgctgaagagggacagtggagaagatatatcctgagaagcaatgatctcaaattaaacattagtactttgagataaattttaaggtagtggatgcctccaagaatgcagtcctagtgtgcttttctgcgcaaatgatacagcaggcagctgctaccatttctgcctgataaagctttgtatacatttggcctcatgcttgagaagataaatgagttcacttcaggattgggtctataggcagatgattgaaattcagggaagtgtttatatgcattcaagagagtatttctgacagtgtatttctgcatgggtggtctcaaagggagtgaatgaatggaaacagaaagattgtttatggggaggaaatgaaaaggattagtttctatggaggccaggcaggtgacctagattccccacaatgaaatgtgtactctgatagacactttttaaaagagagaaaaaaaaaaagccgtggataaaaggtctggctttagtttctagccaattctcatcaagtccctttgaagggattttctgatcccaagagaagcttttatttgatatacgtttcatgtgctgggcttatctagagctcagataatcacacagaggagttctcacctagattactcagcgtgcccctggcctcagcaggctcttctttggggctttgagtttaaataaacaaacacgaaatctgaaagattcacttataatccttgggtcacagagcccttttcagagtaactattcttatttccctgtgaaattgaaaaacaaccccatgcatcttcaaataaattgcaagtgattccacaagatttctcttttgggagaggaatatcagtgaatgtacaaagagcagtggaatagaaaatagaaaaattgtatggttggccatatgct

SEQ ID NO: 7953 - DNA, 262 bp, mus musculus
atcacttctgcctcattctacttgtcagtgcaagtcagaagcccagtgcaaattctaggagtgagcaaacaactgtcccttctttatgaagaggaacaaactcatgtggcaaatgacatgaatactggaaaggaagaagaatcagggtcattgacacaatcaatcagccacaggtctcaacaccaatcactctttgcttaaatctacccactgatttatagtgtcttcactataaatcaccaactctactctcctcagatac

SEQ ID NO: 7954 - DNA, 1608 bp, mus musculus
tctgtatgttgacccagactcttgggaattttacctggatattttcagattcttaaacataatttttaatgtcatttgaatggatgcagaggagagctgtataagtaattgagtatgaactttaaaaatacattaggattcaaaactgcatgctacaaaatcaccatctttttaaccttttcaaaaaggtgtaacatatgtacagaaaagtgctcaaatcataacatacagctctccataaattatcacagagtgaagacacccatgtcattaccactaagaaaaaaagagagaaaccatcacaccccagaacccaccctgtgctcctcccagcctcatgtgcccatccggaatgttttccttttctctgcttttctcctcaagtctgtcttagccccctcttctcttctggccacctcacttcccaggcctccccgataccccgggcagtggggggcttttttgaggctggtttgccttttggcacagtggaaatagcatgtgctctggagccagctctccaagatctagatctcagcccacctactcactagctttgtgaatccaagcaagagacctaatccctctcagctccccaggcactatcctggggtcacaggtgctgattgggtacttcccagagtggctaccgagtgcctgctgctcagcatggggctcaaatacacccactgcattttcatttctatgcttttgcttgggtctctgaaagctcccgagggatgttcattgtttccatttcacagattgccacaatgatgcctgcagaggtgaaatgacttgcccagcatcacacagtggggcaagggcagagtgaagcctggaccctaggctctgaggccacagcagcacaggacccggagctgtgccctccggccccagacctgccatggtcctgtggctgtttagacgactgtttggcccaggggtgcctggctctctaaaagattcactgttgccctcaccaatatttatttcagccttcccagaatgtttcctaaacagacacacgaatgccaactttatgacacttgctaataaaaataaaccccctcagtaggactgggttcccgtggtgcctaataatagctacaggcgtgaatgagtaaatagctggccacacaaagtgtgtgggaccctccagggccagacagaatgtgtagcagttagtgccaaaggcagcgtctgcacccagggcctggggccagtgatgggacacctggcaggacaaggagagcaggccccatcctggccacaaaggcaaagctgaggcagtccatgccatcaaccaacaagtactacaggacagtgaccctagtgcaggtgctgggtaatatgtgggcatgtggagtttggaggttcagaggaaaactcctcacctttcccaagatgttcagacatttatttagaagggaccgagcctttccttacattggaaacacaagactaccatgcaaataatcctaggagaggaggccaagggcctgtccagagtaacgtacagaagtcagagccttccttgacagggactttggctacgggaagagaggcacagcctgtggtctctcctggtccactctgagcctcccc

SEQ ID NO: 7955 - DNA, 377 bp, mus musculus
cagcggctgcgagtagtgaccacgaaaatccgatccgcacgtgaaaacaaacccagcggccgacagacaaagatgatctgtttcaactctgtggccaagacgccttatgatgcttccaggaggcaagagaagtctgcaggagccgctgaccccggaaatggagagatggagccagcccccaagcccgcaggaagcagccaggctccctccggcctcggggacggcgacggcggcagcgtgagcggcggcggcagcagcaaccggcacgcggcgcccgcggacaaaacccgaaaacaggctgccaagaaagtggccccgctgatggccaaggcaattcgagactacaagggaagattctcccgacgataaactcagga

SEQ ID NO: 7956 - DNA, 377 bp, mus musculus; identical to SEQ ID NO: 7955

SEQ ID NO: 7957 - DNA, 377 bp, mus musculus
tcctgagtttatcgtcgggagaatcttcccttgtagtctcgaattgccttggccatcagcggggccactttcttggcagcctgttttcgggttttgtccgcgggcgccgcgtgccggttgctgctgccgccgccgctcacgctgccgccgtcgccgtccccgaggccggagggagcctggctgcttcctgcgggcttgggggctggctccatctctccatttccggggtcagcggctcctgcagacttctcttgcctcctggaagcatcataaggcgtcttggccacagagttgaaacagatcatctttgtctgtcggccgctgggtttgttttcacgtgcggatcggattttcgtggtcactactcgcagccgctg

SEQ ID NO: 7958 - DNA, 1007 bp, mus musculus
gaataataagggaaaaatattaacgttctgagtaagaggccatcccagtccctgcctgcggtctctcccaatcttagcttacctaaatcatctaatgaggagtcttatttttgagtctactttgtttagcagtagtctgcggtcacccctgcatactaattacctcgtacacttttttcacctctggtgggtcagtgaaagcagccatttctcggactgcattgggaattgctaaggtctctgttcagcttaaaccatgtcagttttttatagttgaagtggaaagggcagggattggaaatgaggaaactgagaccaggagaggcaaaacaactcgcctaataccacagagagctggaacttgaactcagacccactgacttacaatgttctttccatcacaacatcctgccccttgttgatgacagagaaaaatggagtgagagagtgcagcactggtgcattcattaaggtaaagttttagaaaagtctgaattttattttatcttggatttctctgtttccattgcccattgttaagtgagagtagtagttaaggaaaacaaacaaacaaacaagcaaacaaacttgctgtttaatgtttctgtttttgaacaatgtggatcattttgcccagaaatttctgacttctcagaatgttagagatggcccattggtttggccctttaactggaggaaaatgagggaggagcccagagtctttatcccagtatatcagcccctttttgatgagtttcttacctcattttgggggaaagataatgttattaatgccctttctagcaatttgaaaaaaaagacaaacatggcttagagtgaaatcctcggtgattgaaaatatcattagaaataagctcctggtgttcactctgtcatttccaagtgttctgatgagtttcatttgaatgctgcactatacggagttggctgaagcccacaactatgtgcgcgtgttggcgacgaggcctcttccttgttgaggaagg

SEQ ID NO: 7959 - DNA, 1645 bp, mus musculus
gtagttgaaaatggttattttcagctgataaacacagcagggcataagggagccaatcaggtgcttcctcaacacatggtcaagacaaacaagtacaggtacgattcagccagtctcacagtggaatctcatatgttaggattcacagaaggattatcatgcattgggcatctttatcttgacagcgtgcagcgtggccgagtcacaccacctcagtgaggctggttgccatctgtgtctggcatttgactgtcatcttgggatcttgcttcctgcctttctggggattcccttggcttgctcctgaggccatcctcccactcataattccagggctttgcttaacttctaagctttatattatgttacatttcttgttacctttttattatacaaataatacatgttgctagaaagtgtttgttgtcagaaaataaaactcatctgtaatttaccattcagataagatagggtatagctttccagattttacttaactacacataataacaggtataagaaatattacaggtatttcttatacttgttattatgtgtagttatagcagccccctactgtttcttatatctggtgtcgtctttcctatgtcttgacttgctgctggcaacatccctggcagttaaggaacctagaagctatagtgtgtttctagactttgttgctagtgggacaggagctatattagtcggcttctcactcgctgtaaaaattgggcagattgaatccaggggtgacccatgatcattgctggcaactaaaatgactccgcaatacacagggactgacatgagcaaccatcaggataaattagaataaatagaagtctaagataactgatgtttccagattcagagttagggacgtcaggaagacaagctgttaaggggttagaacaatgagatcacatggacacaggaaggggaatatcacactctggggactgtggtggggtcgggggaggggggagggatagcattgggagatatacctaatgctagatgacacgttagtgggtgcagcgcaccagcatggcacatgtatacatatgtaactaacctgcacaatgtgcacatgtaccctaaaacttagagtataataaaaaaaaaaaaattaaaaaaaaaaaaaaaaaaaggaaaaaaaaaaaaaagagaagctattaagccgtaaagctgttaacttactgactttgaggagctggtgggacaactgatgaagatatcatgttacacgtaaataaatgtagctatattactgaagatttgggaacttaatttttcaacatttccttcaccgtttaatgttcatgaacaatagacatagggatagaaaaaaatgttggcaataagattataacaggatgagttacgtatttaatattattttcagttgggaaaactgtcagtatgctgcttatttctgaaaattgcctgtatgtatgtacatctgtattctgtagtgttaagggatcagatcttgatcctgaagaaccaatcaaagttgaagaacctgaacccgtaaagaagcctcccaaagagcaaagaagtattaaggaaatgccatttataacttgtgatgagttcaatggtgttccttcgtaagtatttaagataaataatgttcaac

SEQ ID NO: 7960 - DNA, 1034 bp, mus musculus
aggagctggtggactgggactatgaggagggagggagaagggaagaaggcaaagtagaagggcaggaaactgggctcagacaagatgatcgcagagttttctattttgcagaaatagaagttctggcgggataagatattcattctgtagtgaggctgtgtgaatgggttgctgaaggagacgtgaggtccttgggcactgaatttacccagggtgagggcagagggtgaggcagactggaaacagagccatgtggaaaatccttgctacttgttatggattgaattgtttccaccaaaacataggttgaagtcctaatccccagtaccccagaatgtgagcttatgtggagatagagtcactaaagctgcaattaggtaagttaaggtgaagttatcccagggaaggtggccccaatccaatatgactggtgtccttgtaagagggaagtccacgtgatgacccagagatacacaagaagatggtcatatgaggacagaggcagagactggggtgatgcaaggaaggattcacccctgcaagtttcagaggcagcaccgccctgctgacaccaggatactagatttgagcctcctgaaggcgagaggataaacttctgttatgttaggccggttagtctgtggtactttgttacagcagtcctaggaaattaacacacccctgttcccccttgattcagctccactcatcctttaaggcccactcagcctcagcttctccagcaagcctttccgatcccactggtcacactgacctcctctgtctgccttctcagaattccaatgatgcttgaagcctggcacaattatgcataattttggcaggtaatttcaatctgttttatgatttttcttcagctcgattcaagatttgtctttacctaaggtgtaagtacctgaacttcttgaatttctcgcaccgcttaaggcagtgctcagcatcgattagctccttgctcgctacttgtgaacatcttgctggcagttatgtgatacagtttcaacttgatcctc

SEQ ID NO: 7961 - DNA, 1407 bp, mus musculus
tgggatgtttagtgaaaataccttactgaggggagggggttggcaacccctactttcttggagtcaaagaacacgtcattgttcaggactacaaagaaagaattctcaatgggattactggagtcagtgagacttcctctcagtctgatgcttaatctggggtttgagttattcctccatttcataaagtaaaaactgaactgcagaaattttaaacaagtgttcaaatacttttagaagtcaaggatacaaacagttgtaggaccatggtctagcattattttgttcttgcatcccttataattttgtctccttgtgtgttcaaatgcctggggagtgcctgatagggctacctggccctgtgtcttggcagaagttctgcattgaggtttcagagcagcagaagtcccttgactccccattcatgctgccaggtgaatggcaaacagctagaattctactggctgaaatactttttagcttaaggtttcagtttttgttgttgttgttgttgttgttgttgttgtttgagacagcatcttgctctgttgcccagcctggagtgcagtggcatgatctcagctcactgcaacctctgcctcctgggttccagcgattctcccaccttagcctcccatgtagctgggactacagatgtgcaccaccatgcgtggctaatttttgtattttttagtacagaccgtgtttcaccatattggtcaggctggtctcgaactcctgacctcatgatccacccaccttggcctcccaaagtgttgggattacaggcatgagccactgtgcctggcaaggtttcagtttttgataaagaggaaatgcctctaggagaagccaaatctcagaataaattaaacagaaatgtatttctgacagttctggaggctgggaagtccaagatcatggtgcaagtagattaagtgtaatgagggcccatttcgcggtctatagatggtgtcttttgctgtgaccttacatggcagaagaagggagggatcgctttggagtccttttttctaaggacctaattttgtttgtgagggttctgcactcatggtctaataacttcccaaaggccccacttcctaatatcatcaacctgagggttgggatctaaatatatgagtttatgggtgcacaaacgttcaggcttatctcataaaaacctcccacactcacttacctgtgattcttctctttctggctggctagaaggagatggccccaaggtgactttcacagccacagggtgaagatggctgagcttctgtcagcctggttccctgaatgactgcatggaggagggcaacctcactgagttactgggccatgcagtactagtactgttgtgtggagcaagatgtaaagttctatgcttgagctattatg

SEQ ID NO: 7962 - DNA, 244 bp, mus musculus
ctgcaatgtacaggctgtcagtggtagcttcttagcctaatggagctgaacataatcttgaggtcatgacaattccagggtaggattagtataggtcttcataattattaactgtaaagcctaatagagtagtttcaacaattgctaacatcagcaattgttaacattttgtcattcttcattctttctctttctcccttcctctccccacctaccaactatttattttttttgctgaactatt

SEQ ID NO: 7963 - DNA, 189 bp, mus musculus
tcccatcccaatcaaatgttcccttaattcttggtcagcaatacatctgcataggtttgggaagaaaaagaaagaagcactttaaaaggaaagaaacaaaatgatgttttgtgtttattcttggttggttcgttccaccactgttttgttttcccagaattattcctcattttttgcagactcttcttt

SEQ ID NO: 7964 - DNA, 3931 bp, mus musculus
atgttcttaatagcaactgtatttctttaaaggcaaatagttatctacattaagtagcaaatacaactctaacagtccatgaggccagtacattctctcactttctgatagtgaaaaatatcttttctgggtgctagaggttgtctcaatactatgggctatgcagaaaaatgtggaagaactagcattttgaggggtgacataaagaatgtattggtggctcacgcctgtaattccagcactttgggaggccgaggcgggcggatcacgaggtcaggagattgagaccatcctggctaacaaggtgaaattccgtctctactaacgatacaaaaaaattagccaggtgtggtggcgggcacctgtggtcccagccactcggcaggctgaggcaggagaatggcatgaacccgggaggcagagcttgcagtgagccgagatcacaccactgcactccagcctgggtgacagagcgaaactccgtcccccaacaaaaaaaaaaaaaaaaaaaaaaaaaaaaaaaaaaaagaatgtatcgtgtttcttgatgctaaaactatcctaagcagttcaattgagttacaaagcttaataatttttcaaagttcaactagaatgtcttaggacgtaggacaatttgggggaagtatttccaccttaaaggaggaaatggtggtggcatggtctacagttattttatacccttgttctatagaagcatgtgtcctggggttcctgagtgtctccatactgttaacagctcctctggcaactacattgtaacagagtgtcaggagttggtgcagaattccagcatcagttccaaatgctgaaccagtaatcgatttcccaaggaaatcaatcccagcaaaagttgagccccaactctctatagcatgtgaataaaacagaaaacggctatcttagagaatacatggtaagctgaagaacgtaaattagacttccaataaatttgatgctttgtgtacttagaactcatataggcattatagatccaagcagtttcagctagcttttcatctctctcaaaccctgggcgaatgataaacatcaaagagaataacatgaaaagaaatatttactttgaccgttctaccaaatatatatatatataaatatatgaaaatatatatactaatatatataaatatatatgtaaattatatataaatatatatgtatatatacacacacacacgcacaattcaagcataataatatgctttagactgagtggcttatgcacaacataaatttatttctcatggttctggtgaccggctgagtttccctagtctgagattagggtgccagcatgatggttgggtttctggtgaggacccttttctgggctgcagactgatggcttcttgtatcctcgtacggtgcaaagagagagagataattccctgggatctcttttataagagcacaaattctatttataagggctccatcttcatgatctaataacctcccaaaagcctcacctcctaatatgatcactttggaggttaggatttcaacatctgaattttggggaatatgaatgttacgttcagtccattgcatacactgtacatatatctatctatctatctatctatctatctatctatctatcaatctatctatatatatatatatatctacataaatatgtctttaaatttgatatatttatctttaaaatattgaattctgaataccattggctagcaaaactatgggactgaaaataatctgctgatttctcatcttggcctttgagatcattaagaaccctgtgaactatctttatatgacaattatttttaattctaggaaattcaatacagtagtagaatgctatagaataacatgttcattttttgtgttcattttcgtcacataaattgacttcttaggcttcaaaatttggagagttttaatgttaatcctaacatcaaaggtaccttaaattttttaaatattatccattattagagtagctggtaggtttataaagaatttagtgtgctctgagatctgtatttttaacaagcaactcaggtgactcttaagcagatttgggaaccgaagtcgtaagcaagtgaactatgtaaatattgtaccctcttgtctttctttctattttgcctgtcactctctcctgcagagataataatgcataataaattaatagaggaatcaatgactagtctatggttagacatggactttataaagcaagcactccatcatttattaaagcatataaaatatatatcataacatatgttttaactttattgcaacaatccattttatgaataaaaatctcctaggtagatattttgacacagtcaagaaggaaactgaatctatgactgttctatgagcctgttagaattgatgaaattcaagatctaacatgcatgaaagcattttagatgtggagttagctgatattatttgggtggcttttctctcacatgtttattttgctattttgcttatagtcatcagtctacttgtccatctacccttgctgtaagaggtcttatttttccttccatataccaatccagtccccatcacagaccctgatgtatcatagaccccgaaacaacttgttaaggaaatgaatttctattcaaacatgtacacacacacacacaatctaggcaattttaatgctagcaactgaatcacaagaatggaataaaagatacattctatctctgatatgaacaactgcattactatttaaaaaaaagtgggccaggtgtaatgacttatgcttataatcccagcactttgggaggccaaggcaggcagatcacaggcagatgacttgagaccaggagtttgaggccagcctggccaacatggtgaaaccccatctctactgaaaatataaaaattagctgggcgtgggggtgcatgcctgtaatcccagtgggtggctgaggcaggagaatcacttgaactctggaggcggaggttgcagtgagctaagatcacaccactgcactccagcctgggcgacagagcgagactctgtctcaaaaaactaatattaatataaaataaataataaaatgtgcttacatagacttaatattgatgataaaaattttgaataacacgttactattgcatagcacatcttattgctcgaaatgagacctaggtatatgacatttgtcaacatacatcaaaagattgttgatttgggaaaatgatcataaggctgataagttttctcagttcaatacatttgagctcatgacatgttttgaactctgaccccctaaaaaggaagcgttaggcatgctaatgggataaatcagccaaatcccatctatctgaccttattaatgtaactctaggatttagattctgaccttccataattattgacacctatttaatttatcttctcatcaatagtgaagcctagtgcagctgctatggcacatgtaaatacatcactgttgccagcacaggctgattggcattcatgcttgagtgtcttttttattttctccttggctgctgggagtagcctgagcagcgcagacactaaagagcttcatctattaggcatgacagatttgtattcagcgataaacgcctgaccttgctctactctctcatccattcccatcatcccctcgccagatgaaagagtctgcttaactcctgtttcctggctgtttccttggcaacaataactgagtcagtctgacagaataactaatagaataccttggtagtgagattaaagtgctttaaaaaaagtcgtcacccacagaattataaatgagaaatgtttaaaatcggaattttaagatgataccaatcagtgacattatgatttccttattaacccatttcattttgtggtaatatttacagacttttc

SEQ ID NO: 7965 - DNA, 1250 bp, mus musculus
tggtcagaaagttatttccttatagtgacttattttgtccattcacttgtacctagaggttttaaaagacagacacattaaacctgtggctagaggtggggcttacagaagcaagagtgacagtcttcaccatcaaatgcagttgacgtttgcaaatgacaggagacaaactggaaattgtattccctcaattcctagcagctgattccgactcattcataccaatattgtaactgttgtcactcttcagagtccctctgggacattagtactaggttgtcagttgtcctgtagttaggcatctatgacgtgaacaccaataggaacctataattgctagaaactcttattcatttgttttagtgtgttgaaatccattatatttgtaatggattttccaagtctcactatttgccagacaccctctctgcacccttgcttctcagcttattggaacagactgacgggaaaactatgccgctctcttggtttctagggtggaatttcaggggagaatgatgggagaggccaggtaataaaaaagcctccttccagagatgatataacttggcagccttaagctcaagagatggaggtgggatcaggatgaaataagagcatgggaaatcaggattcatcacacaaataaattttccattaatgtttgtggattaaggataataagggaaagaatgccagcaaaaaacatgtatattttatgcaggaaaggcaataaaatttgatattttgatttttacactccttatcccacatctgaatataattgtctaggattgcaggaattattttctgcaagtgttgctggtaattcttcatccagtcttcttccagtgtgggtacagttacgaatattgccacctagggctgacagctgctttcaactggacaaggttttatggtttctttgtctttcccccaacccacaaatgttctcaaacctcttgcatttatttatgttattttactttgcatgaatgggggaagaaacagtgttcagcaattcaatgatggctgaatggaataacagaatttcatttcctaagggaacatttgagagtgattgaatcaccctcaatctacaagccacatttttgcactatttttctacttgactaattgattatgacaggtgtcacccaagctttgcagcttaggctgtccccatgctaagacagagccatagcaagcaacttctattgatgaaatagaaaagctatgcatggttattt

SEQ ID NO: 7966 - DNA, 1042 bp, mus musculus
ataggctttttttttctttttgttaaaagttaccctttagaatagtaatttttggaaaactagcccttgatgctatatgtgtatgtttttttgaaaaatacccttaggtgaacttgcttttctaggccgccattcttttatttatagaattgaaagtttggttgcatgattgttacaatcttcccaggtctccaaatgcatatttacctctgtctcagtgctatctaggaaggaaacctcttcctggaatagtgggtagagattcacaaaatagtgtgaataattgtggtagtagatctctagttgtttggaactggccacaaagagttgtatttgttgagtaggttagaaacatgtcagataatagctacaggcacacagcagcagcagcgatatttaaaagatatcagatatgtaaattagtctgttattcttgtgttctagaaaatgaaagacactcatatggaagattttcccaaagacaaagaaacaaaccgggatttcctaccaagtggaagaattgaaagtacaagaactagggagtctccactagataccacaaatttttctaaagaaaaagacattaatgaattcccactctgttcacttcctgaaggtgttgaccaagaagtcttcaagcagcttccagtagatattcaagaagaaatcctttctggaaaatctagggaaaaatttcaagggaaaggaagtgtgagttgtccattacatgcctctagaggagtattatctttcttttctaaaaaacaaatgcaagatattcccataaatcctagagatcatttatccagtagcaaacaggtatcctctgtatctccttgtgaaccgggaacatcaggctttaatagcagtagttcttcttacatgtctagccaaaaggattattcatattatttagataatagattaaaagatgaacgaataagtcaaggacctaaagaacctcaaggattccactttacaaattcaaaccctgctgtgtctgcttttcattcatttccaaacttgcagagtgagcaacttt

SEQ ID NO: 7967 - DNA, 740 bp, mus musculus
agattgagctggtgaattggcagatgctgtggtaattctgcagactaaagtattagtaactgatcaactagcctgagcatttttccatcgagaatggtgacattattttctaagccaaatttagccaactaccaggataagaggtgggcttataaataactgtaggttcagcaaacaggtccaccgttgtaaactaaatggccaaagtcaaagatatatgatagcaaaagatcttttggttgattgcaccttaataattttagagtaatcattaatgctatattgcctcctgagtcattgccttcagaaataagacaccaatatactattcagtccaatttccagtcctccagcctacaaaaatagactcagtacatagaataaaatggctcacaattaaggatttagacaattcacagggatcacagacaacagcttgactccttaaaaacatcttattgattaagctaaatggagtccagtatttgccacatgaacatgtgtgtgtgactgtgaaggaacaagttaggtcaaatgtctaatggcagaagacggctatgtgaggaatagctctaaactaaactaattcgttcatcacagggaaatttagttctggttttctatctgtacttggcttatctccaaatgataatttcaagtcagagaaatttagaaaacgaatgtggaattggttttcccacttgtttgtaagaaaagatatgtaaacagtttcttgctta

SEQ ID NO: 7968 - DNA, 1565 bp, mus musculus
ctatagagatttttatgttaggtcttggtcctttatatcattaaaatattaaataggaaaaatcatggaatttattcataaatagatgtacatctatttccccagactacaggtaaagaactatttgggtaagaatgggctgctgacctgcaaggagaaaaatgagagcttcagtttaaaactgtcatagtttataaaagatataaaccattcagttcctttagtttttaatatttagaagagtaaacaaaaatttgattcaattaaatgtaacaaatacaattaaatggagatgcaatttgatttattgaaaataacatgattttaatgcagattaactgtaggcagtaccttaccagaatataatgcattctggaaaatatctactgactcaaacatgtaaaaccataaaaagatttcatggtatggcggggagaggggataggaggggtgtctgttcccagggagctaaaagtaatgtaaactctttaattacttgctgcttttagacataatctttgatgacatagatctagcatgttatacatattctttcattttgttctttcaaaaaaagtatcactttgattagaaataaataagaaatagaatattcaaataatggctcaaacactgcaatagaaagacaatgatatggacaaatggagccatcaccaggccagcagaacgtctgggatttcattttagatgttgagtcctgagctgatttttcaaagcatggatttggcattgtaatgctgccagctcagaaacgtcgatgtaatgggagaaaatgtatggggaattcagggcctgcctgaacctccatgggcccagccttggtacactcgggctagagagatctgtgaagggctgtttcacctcctggtgaccactcccacaccgacattggttggagatcctgccaactatccagggagcctgtggatctctttccaatgggatgctagcttttagtcaactgtttaaaaaattattatctttaacagctcttgaaagattagctttctattgccatttccaaatcttctttcctcccactctgcaccagcacctgcactataaagaaggtaaattggccaggagcggtggctcatgcctgtaatcccagcgctttgggaggccgagggagcgtggatcacttgaggtgaggagttcgagaccagcctgcccaacttcgtgaaaccactgtctctactaaaaaatataaaaattagccagacgtggtggcatgcttctgtaattccagctactcagaaggctgaggcaggaaaatctcttgaacccaggaggtggaggttgcagtgagctgagatagttccactgcactccagcctgggcgacagagccagactctgtctcaaaacaaacaaacaaaaagaaggtaaatcactaggggatatatagaaattatatgataaaatagactttagaaaaaacctttttgaaaccatttacaaaaggaaactgaatagacctctgacactcttgtctccaataagctgtgaaaatagtactggttccatcacttaagaggcattcag

SEQ ID NO: 7969 - DNA, 632 bp, mus musculus
agcaatgtgtattgctggcttcccacttctttaaatagcacttgcagtgagtgataatacaacaacacagggcacagtgtgaacaaccaacaagagaatcatttaaacaagtggatttgtaaaacatgattgttttaagcccgtccatgtcaggactgcaatttgaattaaacataaggtgacttctttcactgaatcaataagtgcaaataatatcgctcgcaaccatgttttatttcacagacaaaaattgttcttaacagctttctgaaggctatgcttcagccacctgctgttaaagttgtttgctttttcttacaaaaattgttctcttgcaacattgaaacagacaagcttgcagtcagttagttcacttgaggctagagtctagggaggtttgaaaggcacttttcttaatgaacaccataacttcctgcacccttcctgctggcaagtcagaacaatagacagatcagaggggtgtgcctgaagccagttacttctaaaagtcttactagtattagctgacttgaatcaggggcaatttctaccactttcacaaagggagacttctagtggtccacctgtttttgacttctaaaaacattggttttactggcagataatagatt

SEQ ID NO: 7970 - DNA, 388 bp, mus musculus
atacatcctaataaaatctacattctatagtctcatgagtaatttattaaatgtttttaactcctattctatactgggtctttgctaggaaatacagattctgtaggacctcaaaaacattgcttggggaaggagacatccatcaatccacaaatgcaacaatgaagttacatacaaggcacagtaaaagcacaatcctgaaggagaggagagccacggagcagcaaagcttcttgttagacacacagactgtggttctacagccaggtcccatccttcattcttcatttactaattgtgtgaccctggctaaatgtctttacttctaggtacctgagttccctcattgataagatgaggatcatacttacgtcattgggtatcatga

SEQ ID NO: 7971 - DNA, 388 bp, mus musculus
tcatgatacccaatgacgtaagtatgatcctcatcttatcaatgagggaactcaggtacctagaagtaaagacatttagccagggtcacacaattagtaaatgaagaatgaaggatgggacctggctgtagaaccacagtctgtgtgtctaacaagaagctttgctgctccgtggctctcctctccttcaggattgtgcttttactgtgccttgtatgtaacttcattgttgcatttgtggattgatggatgtctccttccccaagcaatgtttttgaggtcctacagaatctgtatttcctagcaaagacccagtatagaataggagttaaaaacatttaataaattactcatgagactatagaatgtagattttattaggatgtat

SEQ ID NO: 7972 - DNA, 508 bp, mus musculus
atctgtggggcttggttgcagaaggtgtaaaaaccactgacatcaactccattgggggtagtcctttaagtttagaggattttggccttggctaattcctcatcatgcaagctcctgctgttgaaactgaccgtaagttttgtcaattctgctggaagaataatctctcctctgttttggagcaaatctctcattcaacgtttttggtggagatttgacattggaaatgtgatcgttctaatttgcttttgttaccaagcactgtctgtcattgaggacggagatgggaaaaattagcaccctcaccttgttgcccccatttctgccttgcttagaatcgaggctattgctatgcaccaaaaatctgacttttgtcaagttatcatgtttgcttcgataagtcaaagacataggcttggcttcctgaaaatatcactaatcatatgttagcaactccagaacaattcaaggctcatcttgttctctaaccatgcattcaagaatcttc

SEQ ID NO: 7973 - DNA, 261 bp, mus musculus
aaacagcaggtgtaaccagttgtccttgcctatgcatgtgagaatttggtcaaacttgttagattttcatcactacaatcaagttgtatggattgttgtcactttgtgtgttggtttaattgccaataaaatctttcaaagatttcaaaatgtctcatcactgaaacgaaaagttattgtgttcacagaaaggaaaagaaagggagcagtggggcataacatgatattagtaaaacaaatagtcttcatagagagaatgac

SEQ ID NO: 7974 - DNA, 2675 bp, mus musculus
aatgaagaatggatccacttcatataattatagtaaaaaataaagaaataaggaataaaaattaataaataaaccttgactcaaggaaactaccaaataaatagttaactattattattttaggttatataattatttttatttgttattttctgctgctaattttattattttggaaatgtatatattttaaaattccccatgctaaaatccacttcttctttttttaggcttagatgagatcctttaaagaccttttccccacctctgttttataaatgtctttcacttgtatgcactaacgagctatttcaaatttaagtagtgtctatctgaaatttagtgtaaggtcatgttgtgagacagggatagagtttcttttttccttccaagaattctttggtttttcccacgttttttgtttaccaattcttaaacgtgctatgtttaatttgaagaaaattattgtaggcacagatgagtttatggattctcttcttcgtgccattgttacctctctctctcatttcttctgaacttttattaatttaatgtaaacttctagtcaagttttggggttgattcagtgatgtacactctgctccccactgctgggcactgccccttctgatgctgagagctgctttgcccaagtttgctttttctcagctgtgtaaatataaaaagcttgattatccacatccaacttgggacaaccctgaagggttcttcaggttccagcagacttcctttaaggttctttgattttctgtggggctatattgcaactgcacttctccttgagtccgctcccacctcctttctctccctttcacagatgtggctcccaaaggcaatgaaatcatctcagagctggcttctgaaaggacccaacttgctacacagttaatatttgataaggcaagcctccatttttcctccttcaccttccaatgctatttgattaatttattgcaggtttgttttaatttaattttataacatggatataagaaagcaaaagggagagatgaatgcaggaacaaaaggcagaagaatgaaatgtgatccgtgatcttagttttcatggacaatgaggaggttcccaggatcatgccttttagtgctaaaatcttaaagtactgagcaaaccaagagacaagctatggaatgcattggcggccatttaatactgattcttttagtcacagagaatataatttccatacgtattcaactatttattcacacagtttaatagtgtataatggtttttattcataatgattcaatgtaattattacatttattcctgagaactttatattgttaattacaattttttaaccatttgtatttttgacttggtattgctgatatagaggaaaatgatttttggtggttgactgtgttacttgataatatactctactttttcattcagtagtatcctttaaaaactgagtgtcttagattgcccaggtagacagttattatctcttttgtagtcaccataaaaataaaaaaatagctacaatttattggtagtgcaagggcaaatacaaaatttttaagttttaactctctctgttgaaactatggataagacttttctttcctcctttttctgaaagccctcactttagaaaatttgtaattataaatactgtctccttcctttgaaatgtgtatacattaatttaaaaactagataggccatttatgagctctatgacacagaaatgtctttcttaaggacctgagtgccatctttgaaatgtaaatatcaaggggtatagcacccctatttttcagtatctattggagtttataaacataacttcagtgatgccttgatccaagttgcaaaaccacttcttgtcataatgatatgaaaagtttttagtttcctctggataaagtcaattagctaacatagatggtcatatctcatagaatgtcaataagttaaaagaaaaaatagcttgatgaacaaataactttggtaaatactgtataagataaagttaacaagtcactatattgaaaactgtatgagtagtatttaaaatgattatctgaaaaatcagtctccaaaaaggtatagtatgtaggctccccaaatatttgacaatggaagaaaatattttttcctacatttcctcattgaaatcatgacacttaaaacaggccatgggaaatgctgatttgcactgtttacttattgagtcattccacaagatgaattgattatttaatttttatgtatcatctgaataactgatgtgtcttaggaagtgtccatttcttaaagcaatatattaaattttaatttatttcccttgattatattcctaattttgcatattgaaaatatgttaaagatttaaggattttaattatatttatgtatttcactagcttctggagtaaggtgcttactaaaagtagaaataggaagggaatataaaggtaatatttaagagcaaaaattttctgtggacttctgtaccgatcttccatgattccatagcctttggagcagtataatgaaagttgtgtctgaatgactcgcttatatctaagttgaagattctatgcgtcaaaattatctctcaagaagagaatggttaaatacagcagaaatcttaaagactaagctcttcaagataaat

SEQ ID NO: 7975 - DNA, 1159 bp, mus musculus
aagaggtcattagaattgtgttaatcactttacagactcacaagtcttcttaagtctacttttattgatttaatagcacagagctttttcctttcttataaaaggataattgtaaagcatctatattactgcaatttacccttgaattgactctagtgtttagtgtccaatgaagaagagagggtggagagcacgcggagttggccactgttcagccttccttggcctaaaaatcaaatgactgtctctcctgggcactagtgtctttactggtttccctgttattcagcattttgcttttttgatggcaaagctgatataaactcctcagagtgtatactgatataaggaagtgaatatatttttgtgttgagcaaatacttttttgtcagatctttcagaaataatttataaaatactaaactcacaaattgttctgtgctgtggatatttattgctgaatggttacaatcttcctggatttcataaggttttacatttattgcattaatagcttgtatcacatcacagttctctctctcttacacacacacaaatgtcttttacttgattggaagtcttcaaagccttagcttaaattggaagtttcaggaacttctaaaataactaacatgcattagttgattgcaaagggtttgagatggaagctttttcttccttggatgaaggaatcagatgctacttggtggggtgataaaggggagctgaggacaaggaaagaagacatgtgatcagagtcttgtgtgtgaccatctccccagcgtctgacaagcagagcagatctagctgtaaccagcaatacacgagtgcctcctctggggatttgctggttctgcagaaagatacccctgcaagcacttcccccttgtttttctgcaagtctcacagataaaattaccagttcaaatgaatatgcagacatctgtccatatcttcatttcagattatagtatagattttcattctggtagaatctcttttctgctattttgcaaagtgtttattgaaacctgctgacttttattgaagtcacataaatcacacgtggcccaaggtaaatacaagggcaaattaaaaattatagttgatacagctaagatttcttgtaagaataaattataaaaaactctctgaatat

SEQ ID NO: 7976 - DNA, 1159 bp, mus musculus; identical to SEQ ID NO: 7975

SEQ ID NO: 7977 - DNA, 566 bp, mus musculus
gaatactcatatatcaaccttaatttgtatctacattgtctaatatgattctgagataccaattaatttaattatgtactattttatcaactaattctttagtttgtgaaatacagttgcatttagtaatgaaagaaaaggcaaattcttcagaaggtgtttatacagcagcattctttttctgaatcagcaaataatgcacaatatcagtgaatggattattctccccagagagtagtcctcattatcctgctgcgtgtataattgggattgtattgcatcacattattatttaatgactattgaaaactaattgtaatctcaaatccatagtgaatatagaatgtatcttttatcatggcatgtgtataatctaatgtattcttcttttctgcttgagtattcagtattgtggagtcacaaaagtgaaaacctgcaagcactcaaaataatcatttcaaattatcaagaacaactagcgttttttcacagcacagtggcctatttgatgactctacaaacccagaagcacaggaataggtctgtagaactagtggccaattggt

SEQ ID NO: 7978 - DNA, 874 bp, mus musculus
gcactagaaacaacgttgccaggagagaatttaattcaccttggtagtgacatatggcaatgagacttgtacaagatgaccctgtattatatgaatcagatatatatatatatcatttttaaatatatatatatgatttcatataatagtatttatatatatatagtaacaataagataacaaaaaagataaaattctccccttaggaagagaaaaaacatgtcacatgttaatctcttttccccaattataaatttttctaaggcaaaaaacatgttactttttgtgactaatttctaattgttcaataaatattaattaaatgtcaagtaaaccaatgttactaaaaagtatgtatgttcctttttgtgggggttgaaagagatgttcatttgcgttatggtaagatgttcttttatttgatttagcagaatgttttcttgagatttcagtgagtatcacacaagagcaataaaaccatgtatatagaaagcattatgcctaggtgcaactcagcaactatggtacatgcgatatccctgaaggatcgattttaaagtcttgttatatttaaacacctgtgtaaaatgatcttggtttgcagttacagagggctcatttacattttaatgtggacagtaccattttggatgccattgggccctgtttagagaagttcaaggacattcctcaggagtcttttgacatattacaagtgaggtttgtagtgaatgtagcagcacataaaatgaaggcactgtggtttacatcctaaaatgtaaatgtgaagaaatccgtggatcttattactttatcataatatctaaatctctgtgtaaaaggcagcagggtatgagcctgaatacagattggt

SEQ ID NO: 7979 - DNA, 491 bp, mus musculus
atttccaattacagcagctcttgcccagaagatatcaaaactgacatcatgtttcttcgcaacaggtctaataaactgaagctgataaggaccacagactttcagtgaccttgggatgccatactgttactgagcttaatgaaggcactttcctatccagtgaacaacaggacttatttgtcctgtgtatacactggactcattctgtcttatcccaagtgctattattcaatgcttaattagcctagccatcatgaatttctcctttctagtacttaaaatctcctaaatttcccctgtagtaattactcaattaattcattatcgttcttgttttcttaaagctttgatttcaaaaaaaaaaattttcttatttgaagataaattttaaaagttgtctgtagaccattacttttttttttctttttgatggagtcttaagcatggtaaagaaattgcctaccttagggaatggaatttatagcagtaga

SEQ ID NO: 7980 - DNA, 1112 bp, mus musculus
aaatggctccaaaggttaaatgaagcaggaaaaatacatagatgcagccttgcagcctctccagatgtttggggataatattccagatagaaatattgatcccttggattaggtaactagtcataatgaagaaaattagtcttaaaaccttacggaaatcttttaacttgaataaaagtaaagaagaaactgatttcatggtagtacaacaaccatcgctagccagtgactttggaaaagatgattccttatttggtagctgctatggtaaagatatggccagctgcgatatcaacggtgaagatgaaaaaggcggaaaaaacagatcaaaaagcgagagcctgatgggtacgctaaaaaggcggctttctgcaaaacagaagtcaaaaggcaaggcgggcacaccctctgggagctctgccgacgaggacaccttctcctcctcctcagcacccatagtctttaaagacgtgagagctcagaggccgataaggtccacgtcgctccgcagccatcactacagtcccgcgccgtggcctctgcggcccacaaactccgaggagacctgcatcaagatggaggtgagagtcaaggccttggttcactcttccagcccgagtccagccctgaatggcgtccggaaggatttccacgacctccagtctgagaccacgtgccaggagcaagccaattcactgaagagctcggcttctcataatggagacctgcatcttcacctggatgaacatgtgcctgtcgttattggacttatgcctcaggactacattcagtatactgtgcctttagatgaggggatgtatcctttggaaggatcacggagctattgtctggacagctcttctcccatggaagtctctgcggttcctcctcaagtgggagggcgcgctttccccgaggatgagagtcaggtagaccaggacctagttgtcgccccagagatcttcgtggatcagtccgtgaatggcttgttgattggcaccacgggagtcatgttgcagagcccgagagcgggtcacgatgatgtccctccactctcaccattgctacctccaatgcagaataatcaaatccaaaggaacttcagtggactc

SEQ ID NO: 7981 - DNA, 209 bp, mus musculus
aattaatttaccttttttgctaaaacagttttaatggtgtataatgctgaaactgacaagatctctcaattactgttatatttcactttccgtacagcaagaattgcttaattatattagtttccctttaatttaatggatttgtaaaagaaaagcacctctaatgaatacacaatcaattttgtgattcttctttttacaatttgcat

SEQ ID NO: 7982 - DNA, 285 bp, mus musculus
catggcccaaagtccttatgacatttcaggtccagtgctcaccaccagctcatgaaattgatgttagtaacctttggttgagtctctgcttggctccagtggctcctcagttcatttttgatataatcagctatgacaggaggccatattcaccaggtacatgcaggattatcaggactttgcagaaggggtgagtgatatttcaggatcttgtaagatattgtggagaagcagttaatgaggacattatatttgtttgttaaactttatgttaagataggatta

SEQ ID NO: 7983 - DNA, 203 bp, mus musculus
ggaggcctagaatgtgacaaggattatgctgaatttggagaaaaacaaactcatgactttaattgatgatgtttaatactaaatagcatttggtaggataaaaatgtgtggatgatacagaatattgcatgagttacttaaaactcatacaatataatttaaattaggtaatgttaaggatattgtcacctgtattaaaaaga

SEQ ID NO: 7984 - DNA, 388 bp, mus musculus
ctgaaaactctatttgtgagcatctatgtagctactgtactagttaatgaggaaatgatgtttatccaaaatattctccactctctaattataagctgtccagcctgatactccattcctttcactgctttgcctttgatactcctgcatgcacacgatatgctcatttattccttacaacagagtgctgactttttcagcgaatagctgagctacattaaaatcttctcagactcagtatacctcagactgtttggaatgtggatgagcttttgcatcactgataatgcaccgcttttctagcttcagcaattctactcattcatttctacattagttctgaagagcattttatgtaacttttcaattatgttaaatgttactttga

SEQ ID NO: 7985 - DNA, 1207 bp, mus musculus
tgtgtgtgtgtgtgtgtgtgtgtgtgtgtgtgtgtgtgtattttaagctgagatgctgggcaatggggagggagggctatttttaaggctgctcagtggatttttttggtgaaaaacgagaccttgtatttatttttaaatattttcttaagttattataagcctgtaaaaattctgtgctcagcctgctttactttaagtttttaatacacattttgactataatattaatgtttgctgcgttgcttcttcttttgtccgtttgttgttttcactctctccaacctatagagaagaggaaaaccagcctgctggaccagctgaccaacaccagtgggactgtcattggcgtgacttcctgcatcgtgatcatcctcattatcatctctgtcatcgtacagatcaaacagcctcgtaaaaagtatgtccaaaggaaatcagactttgaccagacagttttccaggaggtatttgaacctcctcattatgagttatgcactctcagagggacaggagctacagctgactttgcagatgtggcagatgactttgaaaattaccataaactgcggaggtcatcttccaaatgcattcatgaccatcactgtggatcacagctgtccagcactaaaggcagccgcagtaacctcagcacaagagatgcttctatcttgacagagatgcccacacagccaggaaaacccctcatcccacccatgaacagaagaaatatccttgtcatgaaacacagctactcgcaagatgctgcagatgcctgtgacatagatgaaatcgaagaggtgccgaccaccagtcacaggctgtccagacacgataaagccgtccagcggtcagtatcaatagattttttgatgacaactataacctgaagactgaaatacttccagagtattgtcttctattttgtcttcatatttcagtttccctttaattaatgatttaaaccctagttttccaatagtttccctcttctttttccttttcactgctatccatattcttcctaaacctcatacatgtgcacgatatgtatgtgtgtgaacacacatgcacacagagaccaaagatactttatttatttctaaacatatacacatatttattttataaaatgatggcttttaatttataatacagatttataatgcaaacttacttccatgtgaccattgctcccatcaatatt

SEQ ID NO: 7986 - DNA, 1207 bp, mus musculus; identical to SEQ ID NO: 7985

SEQ ID NO: 7987 - DNA, 770 bp, mus musculus
attattgagatttggaagggaacatactactagagatagtaaaacagcaaaactaatctaaaatgtcagtacagacagtccctgatttatgatttgacttacaatttttcaactttatgataatatgaaagtgatacacattcagtagaactcatacttcaaatacccatacaacctttcagtttttcactttcagtagagtattcaataaattacttgacatagtcaacacattgttataaaataagttttgtggtggatgattttgcccaactgtaagctaatgtaagtgttctgagcgcgtctaaggtcgggctgagataagctgtgatgtttggtgggttgagagtattaaatgtattttgactgatggtattttcaacttgtggtggttttactggaacataacatcattgtaagttgaggagcatttgtatttattttattcggggaaagcttaagacagtttattcacaatggtaaactacattcttggtggtactagaaagaaaaacaatccttttctgatggcatttgcaactggaaataacgaatcctttaagcttcagagactggtgtaagaggaaatgggttttatgccccgaggtccaaagcctgagttaatctaatgaccacacattccatttttatgtagaatgtttcagagtgcaatgtatttttcttttttccatcttctaaaatctctagaatgggaattaataagttagtcttgaattacaactgaattacttttcagaatatttgcatgt

SEQ ID NO: 7988 - DNA, 1118 bp, mus musculus
atttccagataattctggtctgatgtcattctatgacaggaagagtgagtcttaatggcaagaataaaggacaggaatgtgggccaggaattgatccatcataagaggaagggctaaggaagaggtcgggcccccagagaaaggagtggaaggaagggaagtcatttccaggctgctcgggtgtttgccctctgcaaagaccaaggccctgccttcagtcttccaccaaaacagcagctcagagagggctcggacgggcaacactgccaggtgctctgtgtcacagggcacagtgcagggtcagcctcgccatggtcacccccgtcaccatcgccatccctgccaccatcaaacccttcccagacactgacgtgcaaaatgaaagaaaatctttttaaacctctgacttaaatgtttatcttctaggaagatagaactaaaatggtgcacgtgtctgtagcattgccttgaaaatcatgttttgtggtctctccagcagatggcaagcctgtggttgatacactatatccaatttattttgaaatcctcacagaaaccagccagccttgtttgtagcacaaatgtgttcagacataagaagtggagtgaatctaagatgaaaagctgatgatctgtgggttgggatgaccgtgggtcattgattactgtatggacatggagggagggtggtaggcttctgatgggaaagaaaattgtcttacaaaggtggacatgaagtcgtttttgaatccaaataaataaacaacaaagacctcaaaaagcaagggtgggttgggggatatggaaataatcttgagcatccccaagcttgtcatgaactttttacaagttatttggaaaaaaattaagcatattaatttgaaactagaaaccaacttctcacttttccataatctgagtaaactgtttgaactttgagagttgatttagccttttgatgtcaaaaataaacgtcatactataaaacatgatatctatccatacaacactctcaactattgctttcagcgtctctgcagctaccgacccatctgcccattgattcctccctccatcatgcatttgttctcatccaaagaacactttgccttctgctc

SEQ ID NO: 7989 - DNA, 1054 bp, mus musculus
ttaaaataccaagtgaatacacctagtcttgccgtctctatttttttccttggggagatgtcagagaagcccagacaatggctgatcatctaaaatgaagtgtggggtaaagagaggaataatggtagacccttagagaacgctcattttcagacatgagaagaaagaaggagagttcggaaacggactgccgaatgtctgggggtgacaagaaacaccaggacaatggaatgtcactacaccgccaaaaagtgtggagccatttgtgttccctatccttctcaggagaagatctgggctggaagtgctggtttatggtttgttagtgtattagtccgttttcacgctactgataaaagacctaccggagactgggcaatttacaaaagaaagacgcttaattgtactcacagtttcacgtggctggggaggcctcacaatcatggcagaaggcaaggaggggcaaatcataccttacgtggatggcggcaggcaaaaagagcctatgcagcgaaactcccgtttttataaccatcagatctcgtgagacccattcactatcacgagaacagcacgggaaagacccgcccccataacgcaatcacctcccaccgggtccctcccaccacacgtgggaattcaagatgagatctgagtggagacacagccaaaccgcatcagttcggcaataggtactggtcagagccagagaccaggatgaccctgccccttccgctgaggtctagagtgaccagagaagggaactccagggtaaaacagagcggcaacccctaagaacctgggggcacaaacagcacaaagaccatttaatgaagcattttcagagtttaggatatttccaacaaaatattttccccaaaaggtatctttaataatattggatgcgttgatttctaagagggtcctacagagacacattccagtcactggtctccctttctcccatgtattggtattttcaatacataatgtctggagcagagcatggaaatggcctgaaaatatcctctcctttgcatacgggaacacacag

SEQ ID NO: 7990 - DNA, 3839 bp, mus musculus
gtgaagatcctgttcaataagaaggagaacgccctagtgcagatggcggacggcaaccaggcccagctgggtaagaggccggggcggccccggggtggagggggcaggggcgggggctgcgttccctctcgggcgcctggtcacgcgggtgctgctcccccagccatgagccacctgaacgggcacaagctgcacgggaagcccatccgcatcacgctctcgaagcaccagaacgtgcagctgccccgcgagggccaggaggaccagggcctgaccaaggactacggcaactcacccctgcaccgcttcaagaagccgggctccaagaacttccagaacatattcccgccctcggccacgctgcacctctccaacatcccgtgagtgctgggccggggggctcatggggccgggggcgggcaagggctctgcttggctgtcctaccgcgtcggtgtgtggacttctggcgtttccagagtgcaggtcgggcacctcttaccccaaacctgaagtactgcaaggcctggagcttgagccgagggctgctcaagggagggggtcgttggacactttggaggttttggctcaggggatgctccctgtgagaatgtataatgcacacatttatttatttatattttttgaggcgaagtcttgctttgtcacccaggctggagtacagtggaacgatctcggttcactgcaacctccgcctcttgggttcaagtgattgtgccacctcagcttcccgagtagctgggactgtaggcacccacaaccacacctggctaatttttgtatttttagtagagacggggtttcaccatattggccaggctgatcttgatctcctgaccttgtgatccgcctgcttcggcctcccaaagtgctgggatacaggcgtgagccaccgcgcctagccacatttatttatttatttatttattttacttattttgagatggagtcacgctctgtcgcccaggctggagtgcagtggcgggatctctgcaagttctgcctcctgggttcatgccactctgctgcctcagcctcccgagtagctgggagggactataggtgcccgccagcacgcccggctaattttttgtatttttagtggaaacggggtttcactgtgttagccaggatggtgtcgatctcctgactttgtgatcaacccgcctcggcctcccaaagtgctgggataacaggtgggagccaccacgcctggcctaatgcacacctttataatcccagtactgtggggggccgggcaggggattgcttgaacccaagagttaagaccagcctgagcaataaagtgagacctctgtctctacaggaacaattggttaaaattagctaggagtggtggtgtgcacgtcaggtcccagctcttccggattgggaggttgaggtgggaggttcacttcgcgctcaggaggttgaggttgcagtgagctgtgattgcactgccagactccaggctgggcggcagagtaagaccctgtctgtaaaaattacataatgcaagtatttggaaatgcaggtacatctggccccaagcatgtcaaccagtagtaagccctttgatatttaacacgttacttgtgaaatgttatcagaaaatcaacaaggggcctggcagagtggctcacgcctatcatcccagcactttaggaggccgaggcaggcagatcacctgaggtcaggagttcaagaccaacctggccaacctggtgaaaccccgtctctactaaaaataaaaaaattagcctggcatggtgttgcgtgcctgtaatcccagctacttgggagactgaggcaggagaatcacttgaacctgcaggcggaggttgtggtgagctgagatcacgccactgtgctcccgcctgggcgacagagcaagattccatctggaaaaaaaaaagtggaggagcgtggtactctgtttctgcaaacttgtagatgcctggtttcgttagaagctgcttcagaccattgtggacatgatttgataccccatttctgggctcctaaaaggccctacgccttccccggctactctgaaaactagtctggggaaagcctcgcggacctgactgggcgcccccacccccacgcggccccaggctcacgcctttctcctcccacaggccctcagtctccgaggaggatctcaaggtcctgttttccagcaatgggggcgtcgtcaaaggattcaagttcttccagtgagtatgaggcgggctgtccctggctctccccaggctgccctgcggccggccctgaccccctgtcttgcaggaaggaccgcaagatggcactgatccagatgggctccgtggaggaggcggtccaggccctcattgacctgcacaaccacgacctcggggagaaccaccacctgcgggtctccttctccaagtccaccatctaggggcacaggcccccacggccgggccccctggcgacaacttccatcattccagagaaaagccactttaaaaacagctgaagtgaccttagcagaccagagattttatttttttaaagagaaatcagtttacctgtttttaaaaaaattaaatctagttcaccttgctcaccctgcggtgacagggacagctcaggctcttggtgactgtggcagcgggagttcccggccctccacacccggggccagaccctcggggccatgccttggtggggcctgtgtcgggcgtggggcctgcaggtgggcgccccgaccacgacttggcttccttgtgccttaaaaaacctgccttcctgcagccacacacccacccggggtgtcctggggacccaaggggtgggggggtcacaccagagagaggcagggggcctggccggctcctgcaggatcatgcagctggggcgcggcggccgcggctgcgacaccccaaccccagccctctaatcaagtcacgtgattctcccttcaccccgcccccagggccttcccttctgcccccaggcgggctccccgctgctccagctgcggagctggtcgacataatctctgtattatatactttgcagttgcagacgtctgtgcctagcaatatttccagttgaccaaatattctaatcttttttcatttatatgcaaaagaaatagttttaagtaactttttatagcaagatgatacaatggtatgagtgtaatctaaacttccttgtggtattaccttgtatgctgttacttttattttattccttgtaattaagtcacaggcaggacccagtttccagagagcaggcggggccgcccagtgggtcaggcacagggagccccggtcctatcttagagcccctgagcttcagggaaggggcgggcgtgtcgccgcctctggcatcgcctccggttgccttacaccacgccttcacctgcagtcgcctagaaaacttgctctcaaacttcagggttttttcttccttcaaattttggaccaaagtctcatttctgtgttttgcctgcctctgatgctgggacccggaaggcgggcgctcctcctgtcttctctgtgctctttctaccgcccccgcgtcctgtcccgggggctctcctaggatcccctttccgtaaaagcgtgtaacaagggtgtaaatatttataattttttatacctgttgtgagacccgaggggcggcggcgcggttttttatggtgacacaaatgtatattttgctaacagcaattccaggctcagtattgtgaccgcggagccacaggggaccccacgcacattccgttgccttacccgatggcttgtgacgcggagagaaccgattaaaaccgtttgagaaactc

SEQ ID NO: 7991 - DNA, 606 bp, mus musculus
gttacgggcaggacttgagtggcttcggacagggcttctcagaccccagccagcagcctccttcctacgggggtccctccgtgccagggtcggggggcccccccgccggcggcagcggctttggacgagggcagaaccacaacgtgcaagggttccacccctaccgacgctagcccgcggcgccgcgacgtctgcacggcccagacccaggattccaaacttgtgaactcgtgacaatcacaaacttggcggcaaagtggcgactcaaccttgggggggggggcggggggagggcgcgaggcttttggagcggctgtgggtgtcgtctggactgaggtttttaaatatttctttctctaacccatcagcacaataaaaaaaagtcactggttcaacaacagggtttaaaaaaaatgtcttcagctttaattcaaaacttcaggtttctttttcttccttttttttggaaattattttcctgagccttttgttttacggtatattgtaaacttttatgttaaagaaaaaatatacatttacaaattgtgagatttttaagagaaattttctacgatgtatactggcttattttttaatttaaaacgg

SEQ ID NO: 7992 - DNA, 1841 bp, mus musculus
tggccgagaagtacgagtgggacgtggctgaggcccgcaagatctggtgctttgggcccgacggcaccggccccaacatcctcaccgacatcaccaagggtgtgcagtacctcaacgagatcaaggacagtgtggtggccggcttccagtgggccaccaaggaggtgaggcacggctcagcatgtgcagaccacacccgtttccaggctctagagggacctcatggtcctgcctcccgagacagagaccctaatggggccaaggcgggcaaggccccaggtccccctggtggagacctgcaggacttggcaggtggagggcaagcagccgaggtgtgtccggcccttgacggtggctctccccctcccccagggcgcactgtgtgaggagaacatgcggggtgtgcgcttcgacgtccacgacgtcaccctgcacgccgacgccatccaccgcggagggggccagatcatccccacagcacggcgctgcctctatgccagtgtgctgaccgcccagccacgcctcatggagcccatctaccttgtggagatccaggtgaggtctacccgcccaccgctgaccctgccaccgtcctgcccagcggccactgacaggttttctttcccttctggcagtgtccagagcaggtggtcggtggcatctacggggttttgaacaggaagcggggccacgtgttcgaggagtcccaggtggccggcacccccatgtttgtggtcaaggcctatctgcccgtcaacgagtcctttggtgagtgcctgcccggtgtggcctgcagagcctggcaggctggtttgggggacagaagcccagttaagcttagcaaggtgttaaaggaggcgtcctgatgggagcaggtgatggatggagcaggtggtccagtttctgacagcttgtggaccccctaaatcactgaattcccaggggaggggctctcctatccccagtgtgagaagggctctgggcctggagctctgaaggcctacgccctgggccggtagagcagccgagctgtagcacagggttgtcccaaacgagcagcggcatgaggcccatgagtggcctgctaggcccttcgtgaagtgctgggcaccaggccgagtgtctggtctgcagggtgactcaggctgaggaactagcctgagctcctgacaggactttccttctgccctgccaccttctcgatggcccagtgagcctctcgcttccctctgcaggcttcaccgctgacctgaggtccaacacgggcggccaggcgttcccccagtgtgtgtttgaccactggcagatcctgcccggagaccccttcgacaacagcagccgccccagccaggtggtggcggagacccgcaagcgcaagggcctgaaagaaggcatccctgccctggacaacttcctggacaaattgtaggcggcccttcctgcagcgcctgccgccccggggactcgcagcacccacagcaccacgtcctcgaattctcagacgacacctggagactgtcccgacacagcgacgctcccctgagaggtttctggggcccgctgcgtgccatcactcaaccataacacttgatgccgtttctttcaatatttatttccagagtccggaggcagcagacacgccctcttagtagggacttaatgggccggtcggggagggggaggcgggatgggacacccaacactttttccatttcttcagagggaaactcagatgtccaaactaattttaacaaacgcattaagaggtttatttgggtacatggcccgcagtggcttttgccccagaaaggggaaaggaacacgcgggtagatgatttcta

SEQ ID NO: 7993 - DNA, 2217 bp, mus musculus
gcgttgcatcaccatcaagtcaacgtgagctccctgtgccctctgtacccaggcagggaggtgctggcctggcagctggaggccactgggccagggtgcgcggggagagacttggcaacgtctctttcccctggtttcttaattcatgggagaatgagtgaggttcagtccagcgagacaggatggagaggcacagggattcggggtactgcgagctggaaggttttcttgaggagggggcttaactccgtggttctccctccctgggggacttgcccccactcctacaatatctggagaggtttggctgtcacacctgggaggggagggtgttctagtgcttgggacgctgggaagctcctgtgttgcactggatgatgttcattccatgtcagtttctggccccgatatgagtagggggagcgcagagtacggtgaccccaactgctttttgtcctgggttggtacattggtgagggactctggctaaggctcttcatttcccctggagcaggggcagaagtgaggaggggagggtcggagtctctggaggcttttgccgtcctgctgggtcttttagttgctactttgagtcaggtgtgatgaatcttgggaccaagtcggtggggcaggatgtctggtcaggagggctctgaggatctggctatggggctggtaccaggagttccctgtcatgggggtggcatgtctcggacagaggcaaaggacaagggtgggttggctcttgtgggagcctctccagggatgagtcatggagggaggagcagcctggcttctgacagcatcccagactccctgggccaggtgtgtggctcctgtccccctgacgagtccctccctccatcagtgccatctccctcttctacgagctctcggagaatgacttgaacttcatcaagcagagcaaggacggtgccggcttcctcatcaacctcattgactcccccgggcatgtcgacttctcctcggaggtgactgctgccctccgagtcaccgatggcgcattggtggtggtggactgcgtgtcaggtaagcagtgggtccccctgaggcacggcctggaaccgggggccatccttgcttgaggatgacagcgccgccctgtcccccgtgtccccaggcgtgtgcgtgcagacggagacagtgctgcggcaggccattgccgagcgcatcaagcctgtgctgatgatgaacaagatggaccgcgccctgctggagctgcagctggagcccgaggagctctaccagactttccagcgcatcgtggagaacgtgaacgtcatcatctccacctacggcgagggcgagagcggccccatgggcaacatcatggtacggccctccctagctgggtggtgggcttgccgcagcgggatctgcaggagccggtggggagtggagttgagctgagggggactggaagtgtgtttttgccaggaatgttgggtgacagagaagggggctggaatgttttcatccgacttgacccagcccttgatctttgggcagctggaagagacgagctcagggaacgctgccctgggtggtggaggggctggcccccctattcgtgatgactgatcatttcttcactttgaccagatgtctactgaagaaagcctgcgtctgaggcccatgcccaaggcgcccagcccgtagcttcaggctctgcgcaggggccctcacggctgcttctcgtttctcacacttccagatcgatcctgtcctcggtaccgtgggctttgggtctggcctccacgggtgggccttcaccctgaagcagtttgccgagatgtatgtggccaagttcgccgccaagggggagggccagttggggcctgccgagcgggccaagaaagtagaggacatgatgaagaagctgtggggtgacaggtgagccccgcgggatatggtgggggattcctgacacctgggggtagtggcagcgacgtaggggcgtggtgtgctattcacagcgtggctcaagcccaccaggtcttgcccaagcatgtccccttggcgaccaccctccccaagtcatcccctggagaccctaacttgatttggcttggcctctccttgccaggtactttgacccagccaacggcaagttcagcaagtcagccaccagccccgaagggaagaagctgccacgcaccttctgccagctgatcctggaccccatcttcaaggtga

SEQ ID NO: 7994 - DNA, 2217 bp, mus musculus; identical to SEQ ID NO: 7993

SEQ ID NO: 7995 - DNA, 963 bp, mus musculus
acagaatgaagactgtcaagaatcagccagaaggttttgggggttaaatctctgggatgcttttctcttccgtgtagcgtagaggcttacctagaggcggtcgcggcgcaggtagtgtaaccagtataactttgtgtacccgcgggttttccaatctctgtgtagctagcagttctcttcgtgttagtgtggcagccgtgccagttccacatttgtgattgctttatttccctggtaattaaaccttgtgccattctattcctgttaaatccgtagaaaatgagaaaatactcgacattttgggggaaacttgtaaatctgagccagtaaaagaagaaagttccgagctggagcagccatttgcacaggacacaagtagcgtggggccagacagaaagcttgcggaggaagaggacctatttgacagcgcccatccggaagagggtgatttagatttggccagcgagtcaacagcacacgctcagtcgagcaaggcagacagcctgttagcggtagtgaaaagggagcccgcggagcagccaggcgatggcgagaggacggactgtgagcctgtagggctagagccggcagttgagcagagtagtgcggcctccgagctcgcggaggcctctagcgaggagctcgcagaagcacccacggaagccccaagcccagaagccagagatagcaaagaagacgggaggaagtttgattttgacgcttgtaatgaagtccctccggctcctaaagagtcctcaaccagtgagggcgctgatcagaaaatgaggtttgttttttctcagttttagaccagacgctatctccttttcattggtcatgtaatgacacacataagctgtttttttctgcaattggccagccagactgacgaaattgtagttttgcttctaaagaatgtttcgtttctctttgtgtgtttttaatgggtgattcaattccttt

SEQ ID NO: 7996 - DNA, 1013 bp, mus musculus
aggagcaaatgctatggaaacatgaagaaagggaggaaaggagggttggacaggggtgtatttgagcaaagacttagaggacatgaggagctgggccctgtggatgtggcagggaacagagagccaggcagagggaatgattaaaatacaaaggcctggctgggtgcagtggctataatcccagcactttgggaggctgaggcaggcggatcaccagaggtcaggagttcaagaccagcctgaccaacatggagaaatcctgtctctactaaaaatacaaaaattagccgggtgtggaggcgggcacctgtaaccccagctactcgggagactgaggcaggagaattgcttgaacccgggaggcaaaggttgcagtgagccgagatcacgccactgcactctagcctgggtaacagcaagattccgtctcgaaaattaaaaaaaaaaaaatacaaaggcctatctgtctgctgtccgggcaggtatgtctgctctcctagaccagggctgagcacgctgcatccaggccacagggtgctgtgtgtgacatagacaccagggagggaggagaaccctggtgagtcgaatcacggaccctcctccaagaaccctggttgcttgctctgcaggtgcgcctcctgggagtggtgtccaagggccagcccacgctggtggtgatggagctgatggctcacggagacctgaagagctacctccgttctctgcggccagaggctgaggtaagctgcttcgggggacccagcggggtactcggtggagcacccgctcctggcctcctcggatcccagtgctgctgaaacaccaaccccgtgtttctgttttagaataatcctggccgccctccccctacccttcaagagatgattcagatggcggcagagattgctgacgggatggcctacctgaacgccaagaagtttgtgcatcgggacctggcagcgagaaactgcatggtcgcccatgattttactgtcaaaattggaggttcgtct

SEQ ID NO: 7997 - DNA, 3103 bp, mus musculus
aaatcctaagtaatgcactgaagagaggagagatcattgcaaagcagggaggaggtaggaaccgcttagtttgatgttttgtttttttagaacaggctgttatcgctggggactgtagagcttagtggtgagaagtgcgggttctgacacagactgcccggggtgggagcagctctgcctttttctagctgtgtgacgtttggcaagtcactgaacctctctgtttctcatagcactcatttgtaaaatgggggtgtaatagtacctgcctcagggatgctgtggagagtgaatgcatgtgaaagagtgcttccgcacgtgctgtgcacaggccgaccatcttcattgttagagtacctctcttttgggggttttgttttccacattataaattcctaaaagtaaatatattttccttagacttgatgataagactgaaagcacaccacccaacaagtaataaatgcttgtaaaatagataaatgtactcattaggaaaatatgaagaaagtatggtctgaaaccccatcgcccagtgatgactgccggaaacattttgttctgaatctttcattcatacacagctttatggatactgagaacaaaatgtactttttgagcatttttggagacagtctcgctctgtctcccaggctggagtgccgtggtgcagtctctgctcactgcggcctcaacttcccaggcctaagcgattctcccactttagcctcccaagtagctgggactacaggcgtgtgccacctggtttggctaattttttgattttttttgtagagatggcattttgacatgttacccaggcttatctcaaactcctggcctcaagtgacctgcatacctccagagtgctgggatgacagatgtgagccaccacacctggcccaaatgtactttttcagcctgattttccctctgagtatcttggcatctcacctcctgacttctgtgttgggctggctctggagctccacgctggtaccatttcctcccatttctttttttttttttttttttgagagacggagtctcactctgtcgcccaggctagagtgcagtggcacgatctcggctcactgtgacctccgtctcctgggttcaagcgattctcctgcctcagcctcccaagtagctgggactacgggcgcacgccaccatacccagctaatttttgcaattttagtagagatggggtttcaccatgttggccaggctggtcgcgaactcctgaccttgttccgcccgccttggcctcccaaagtactgggattacaggcatgagccaccacacccagctgccccacctcatttctgatgcctttgggcaaagtgcccattctcgctaggttccttatactgtggggaagttctgagacgtctcccctctgaaagtcacacattcttagagtcgggcctgctttggccgctcactgtgtgctgtgcagctagagaagcaggcgcggtgtggccagttacagagccagttagagaaactgcccagtttcctcttgaattggtatctttgactaggctgcttgggtcggtcacaggctggctctgggctgatggccactctcagaggcaagcgacagggtttcggggaggagccccaaactcggcatgtggaaaggggtggccttgctgacggagccagaccctgctttccagagttgcaagcaccacgggtgggggcgtcccttcgttctgctgactgacccccagccgctaccagagcccactctgcagtgccatcaacatcttctttccaaagccagcaagtcatttggtttccctgacaatagggtccccaaaagtggccagctgtgtgcatttgtacacagaggatctctcggtgtgtgtttttttgacctctgcttgatggtgtggccgaaaatcctttctctgtgccctgggagcgctgaggaaatgcagccagagtggcccccagcagagcatcctagagggacaggctgggaggggaaggtgggagtgactccgacttgtctccacataactcctgttcattaccctgggtggccccccgagtggggggtgtccatgcctccccctggagcatttctcagtgtctgctgatggagaaacctcagatgtctcaggaattgacgtccatggttcacaaagcttgtcacagacactagcacctcacagacacacatacaggggtgttctttagaagttgtgttatggaaatctcagctgtggcatagagcagagagaatgctgggaggcccccatgtgcccaccacacagctgtagctgttgtcaacatttgaggggtgtcttaatggtaaattatggtgggcctttacccctgatccatgcccatgagctgaagtggtctggcgtgttgtgcacacgcacactcaagttcttgacacccacctgtgttttgtgtccctgtttcaggtggaggtggaggaagcgtccctgggatcgagaggatgggtcctggcattgaccgcctcgggggtgccggcatggagcgcatgggcgcgggcctgggccacggcatggatcgcgtgggctccgagatcgagcgcatgggcctggtcatggaccgcatgggctccgtggagcgcatgggctccggcattgagcgcatgggcccgctgggcctcgaccacatggcctccagcattgagcgcatgggccagaccatggagcgcattggctctggcgtggagcgcatgggtgccggcatgggcttcggccttgagcgcatggccgctcccatcgaccgtgtgggccagaccattgagcgcatgggctctggcgtggagcgcatgggccctgccatcgagcgcatgggcctgagcatggagcgcatggtgcccgcaggtatgggagctggcctggagcgcatgggccccgtgatggatcgcatggccaccggcctggagcgcatgggcgccaacaatctggagcggatgggcctggagcgcatgggcgccaacagcctcgagcgcatgggcctggagcgcatgggtgccaacagcctcgagcgcatgggccctgccatgggcccggccctgggcgctggcattgagcgcatgggcctggccat

SEQ ID NO: 7998 - DNA, 1018 bp, mus musculus
ttgcttgtatccaaaatatagacacagtgctgggtgctgattttgtcctttccttttttccaattctctttttctcaattgtgtccaagatacacagagccagagaatctcacaggtgtcttagaattcctgctcctgggactcccagatgatccagaactgcagcccgtcctctttgggctgttcctgtccatgtacctggtcatggtgctggggaacctgctcatcattctggccgtcagctctgactcccatctccacagccccatgtacttcttcctctccaacctgtccttggctgacatcggttttgcctctactactgtccccaagatgattgtggacatccaggctcatagtagactcatctcttacgtgggctgcctgactcagatgtcttttttgatctttttcgcatgtatggaaagtctgctcctgattgtgatggcctatgaccggttcgtggccatctgtcaccccctgcactaccaagtcatcatgagcccacgactctgtggcttcttagttttggtgtctttttttcttagccttttggactctcagctgcacaatttgattgtgttacaacttacctgcttcaacgatgtggaaatctctaatttttttctgtgacccttcttaacttctcaagctggcctgttctgacacctccattaataacatggttgtatattttattggtgccatatttggttttctccctctcttagggatccttttctcttactataaaattgtttcctccattctgagagttctctcttcaggtgggaagtataaagccttctccacctgcagctctcacctgtcagttgtttgcttactttatggaacagcccttggagggtacctcagttcagctgtgtccctttcctccaggaagggtgcagtggcctcagtaatgtacatggtggtcacccccatgctgaaccccttcatctacagcctgagaaacagggacattcaaagtgccctgcagaggctgcacggcagaata

SEQ ID NO: 7999 - DNA, 656 bp, mus musculus
gcagttctcctaccactctggcccccaaggaagcggatggggcacttctcaagcatatcttggaggcttggctgggaagtaagaaacacccccaactccgccccattggatttatagggattcttgccccacacctgtttagatattaactcagccactacaagtcaaggcaaacaggccagggccagggcagacaagaggacagacaagaggacagacatctgcagcctgtggcctcctgtcaccctcccacccaccatggaaatgccctggcccctagggtggattctgcttcttttgggaagccccctcatccacgctgagcctctgtgagtctggggaatggagggggctcagccggcttcctgcacatctgatgtctgcgtgattccagcttatgactcgtgttcggtgtcattttccctactcaagtcccttaatgcccttgtgttagtctactggcaggtacatcctggtgaccccccgagttctgagggttggcagtccggagagcattcacattcaggcccactcagactccagacagcccctcacaaggaccctcaaggtgaacctcacagtgtgggacttccccatgaggaagacagtgttggcaaggagccagctcattctctcaccaggaaacaactttatgg

SEQ ID NO: 8000 - DNA, 1031 bp, mus musculus
ctgggatcctcccccgccctccagcctcacagctattctctgtcctcccaccagcttcatgtactggactgactggggaactcccgccaagatcaagaaagggggcctgaatggtgtggacatctactcgctggtgactgaaaacattcagtggcccaatggcatcaccctaggtatgttcgcaggacagccgtcccagccagggccgggcacaggctggaggacagacgggggttgccaggtggctctgggacaagcccaagctgctccctgaaggtttccctctttcttttctttgttttttctttttttgagatgaggtcttggtctgtcacccaggctggagtgcactggcgcaatcgtagctcactgcagcctccacctcccaggctcaagtgatcctcctgcctcaccctcctgagtagctgagattacagacacgtgccaccacggcagactaattttattttatttttgggaagagacaaagtcttgttatgttggcctggctggtctcaaactcagggtgcaagcgatcctcccgcctcagccttccaaactgctgggattacaggcgtgggccaccgtacccagcctccttgaagtttttctgacctgcaactcccctacctgcccattggagagggcgtcacaggggaggggttcaggctcacatgtggttggagctgcctctccaggtgcttttctgctaggtccctggcagggggtcttcctgcccggagcagcgtggccaggccctcaggaccctctgggactggcatcagcacgtgacctctccttatccacttgtgtgtctagatctcctcagtggccgcctctactgggttgactccaaacttcactccatctcaagcatcgatgtcaacgggggcaaccggaagaccatcttggaggatgaaaagaggctggcccaccccttctccttggccgtctttgaggtgtggcttacgtacgagatgcaagcacttaggtggcggatagacacagactatagatcactcaagccaaga

SEQ ID NO: 8001 - DNA, 1140 bp, mus musculus
aaggaatgtgggaaggccttcatttatcacacaacctttcgaggacacatgagaatgcacacaggggagaaaccctataaatgtaaagaatgcgggaaaacgttcagtcatcccagttcttttcgaaatcatgaaagaactcactctggagagaaaccctatgaatgtaaacaatgtggaaaagctttcagatattaccaaacttttcaaatacatgaaaggactcacactggggaaaaaccctatcagtgtaagcaatgtggtaaagctcttagttgtcccacatcctttcgaagtcatgaaaggattcacactggagaaaaaccctataaatgtaaaaaatgtgggaaagccttcagttttcctagttcctttagaaaacatgaaagaattcatacaggagagaaaccctatgattgtaaggaatgtgggaaagcattcatttctcttccaagctatcgaagacatatgataatgcacactggaaatggaccttataaatgcaaggaatgtgggaaagcctttgattgtcctagttcttttcaaatccatgaacgaactcacactggagagaaaccctatgaatgtaaacagtgtggtaaagccttcagttgttccagttcctttcgaatgcatgaaagaactcacactggagagaaaccccatgaatgtaaacaatgtggtaaagccttcagttgttccagttctgttcgaatacatgaaaggactcacactggagagaaaccctatgaatgtaaacagtgtggtaaagccttcagttgttccagttcctttcgaatgcatgaaagaattcacactggagagaaaccctatgaatgtaaacagtgtggtaaagcctttagtttttctagttcctttcggatgcatgaaaggactcacactggagagaaaccctatgaatgtaaacaatgtggtaaagccttcagttgttccagttcctttcgaatgcatgaaaggactcacactggggagaaaccctatgaatgtaaacagtgtggtaaggcgtttagttgttccagttccattcgaatacatgaaaggactcacactggagagaaaccttatgagtgtaaacaatgtggtaaggccttcagttgttctagttctgttcgaatgcat

SEQ ID NO: 8002 - DNA, 134 bp, mus musculus
cggaggtgttcagctgcttcaagatgaagctgaacatctccttcccagccactggctgccagaaactcattgaagtggacgatgaacgcaaactttgtactttttatgagaagcgtatggccacagaagttgct

SEQ ID NO: 8003 - DNA, 1173 bp, mus musculus
ggagctcagtgatgtcatttataaagcccctggggtctcgggagccctcaaaaatgctggagagacaggccacagctctgaagagcagccccagccctgtggagctgaagcagggtctggaggccccctctggggccaggccaatcatgggaaggcccccaggagttcccagggagggagactcagcacagatgatgtcgaacagcctttaccgcagcccttcgaacaaccataactgtcccgggcactccgctgatgggcaactgtgcctctaacatgcacccggccagcctagggggccgggaaccaagccctctgttggcatctctgtcttgtgggtccccattctagaattatttccgcgatgcctggaacatcttcgactttgtgactgttctgggcagcatcaccgatatcctcgtgactgagtttggggtaagtctccctccagcttctctctgggtgactctgggctggacgaggcaggcggcagggggcgggggagcggtcccagaggcagtgtgtcccggaagccatagctgcttgagccagcacttggccatgaccagagagggagaactggggccccggggacaagggcagcccctcaggagggcattgtggggagatgggggtaaccaaagcttggctgtagggccagcactgaggggtgggctttcctgcatcctggcctaggaattaataatgcagatgagtacactgagggaactgagacactcaaaagctctgaaagctgagccggctcccaaacaccaccctatgtcaggagcccagaaagaatgggtttcaagtcaattctgtttgaaccaaccctctcctagttagtgggcaggagagagccacagccctcaggccagtgtggggacaccactcccagggccatagaggggtccccagggtgtcttccctcctctagccccgggcctgggagactctcaacatgggagtctctggacctctctgtggtggccccacaggccacattgcccttctccttttctggaagactcagggccccagaggtcctgtcctagaccctctccttggccatctgccaatgagcccaggcttggggtccctcaggagattggggggagggtagaagatccttgcagggggaagcaatggtcaaaaaagggtgtcaaagccaag

SEQ ID NO: 8004 - DNA, 1077 bp, mus musculus
aagatggcaaagccattgggagagctgagagggccaagaaaaaagactaaggcccaggctctggccaagttggaagaatggagagggagcagcggccccagggggcaggcgcccaggtcagacagccaagtggggctcaggtcgtggctggcactggctgaagatacccctgggagctggcccacaggggaaggggcagagctagtaaaagggagcccccgatccccaggacacaagcagatcctggcaaagagagaaaagcaccccccaagaagaccctagatgggaagaactagtgccgtgtaacatcctatggatgcctaagacggccaaacaccttctgtgccttggcagttgtatgggtgcccaagaggtcttatcaaggcagctctccccttagcgcaaccgcgtctacagaaactcggagggccctatctgtccctcctccacacccagtggcctctgggttgggtttctcttcctgctcccaccccacggctccctagctccccctgcaggcagggttctggggacagacagccgaacagacacggcaggtctcatgagccttcccagccaccgtagtgccggtgccctgagaacaggactgagtgatggcttccaactccagcgatggtgaggctgagtcctgttactatagcaacttcctaggcacactctgccccttaagtcagggaggggctgcagcggggtctggggcacaggcgaagagaagaaggatgtgaacccctggctggccctggaaacgcctcctgtacagccccgggctgtgcggcctggggaagagagaggggatcggtggcccagttcagacaagggaggatggtccacccggcagggggccagctcagagaggggtggtggagtggtccatcccagtgttggggttcagctcagactgtaggatgagccatcccagtgttggggtccagctcagaatgggggtcgttccagccagtgttggggtccagctcagagttgtgtcatttaggtaagcccagagcagggaatccaggctccactggaggaatcagccagcctcgagtagggggccca

SEQ ID NO: 8005 - DNA, 1077 bp, mus musculus; identical to SEQ ID NO: 8004

SEQ ID NO: 8006 - DNA, 3633 bp, mus musculus
gctggggggcccggctgaactcccgccttgatccctccttcccaccaggcatccggtcttgggatgtcgatcctggcgtctgcaaccttgatgaacagctcaaggtctttgtgtcccgacactctgccaccttctccagcattgtgaaaggtgaggctggggtccccctgactgctccctacctcttgttatttggggaagtgccagccgtgtgccaggcatggggggtgggatgcagctataaataacaacagtaataatacagttgagacctttcaaatgcaagccgtgacccagtgataaccccctcagtcctcagcaacccacagtgcaggaactggtgtttttgtccctgattgacagatgaggaaattggcattgaagggggaagaggcagggagatctctgaggagggggttttttgatgagaaactgctatgactggtgtgtccagtggaagggaagggccccagtcaagacccagcagtggacagaacatctagaatgaaccgggcgcggtggcttacgcctctgatctcagcactttgggaggccgcagcgggcggatcacttgaggtcaggagttggagactagcctggccaacgtggaggaaccctgtctctactaagaatacaaaaataacggcatggtggcaggcgcctctaatcccagctactcgggaggctgaggtgggaggatcacatgaacccaggaggcagaggttacagtggggctgagactgcgccactgcactcctgcctgagtgacagagtgggagggactctgtctcagaacaaacaaacaaacaaaaaacatctggaaggtggaggggcactgagcaggccctggaagatggagtgtgggccccttgcaggaagggactgatactggttcacagccacaggcctgggtatacagtaggcagggaactgaaaaggagtgagatcaagaagggcccaactcagcacgaggctcccttctagggtgacccagggtgagcagagcagcaggcgggcaggcagggcttgggtgttgcctgcagccgcccccggctcctgatggtctcttgagtcacctcccggctgctgctggagaggaaggaagtgtctgtagtctcattgtcccagttggtccttgtggcttcctgacacttcatggggcagaaagtggagctggaaatcctgtctgctgtgtgtgaacttcgtggccacttcccttctttatgccttgatttccccacctgaatggggcaatatccctgtgtggcaaaaagcgtgctaaggctgggtggggtggctctcgcctgtaatcccaacactttgggaggtcaaagtgggaggattttttgaggtcaggagttcaaaaccagctggggcaacatggtgaaaccctgtccctactgaaaatgcaaaaatgagctggacctggtggtgcacacctgtagtcccagctactcaggagcccgaggagggaggatcgcttttacccaggaggcagaggctgcagtgagctaagattgtgccactgcacttcagcctgggcaacagagcgagaccctgtctcaaaaaaataaacttaggcctgacatggtggctcacacctataatcccagcactttggaaggctgaggtgggtggatcacctgaggtcaggagttcgagaccagcctgaccagtatggtgacaccccatctctactaaaaatacaaaaattagctggttgtggtggcaagcgcctataaccccagctacttgggagactgaggttggagaattgcttgaactcaggaggcagaggttgcagtgagctgagatcgtgccactacacttcagcctgggcaatagagggagattccatctcaaaaaagagagagagagagagggagggagggagggagggggagagggagggagagagagagagaaaggaaagagaaagctaaatgtgataagggcgagagagagagaaagggaaaagaaggaaagaaaggaaagaaagttaaatgtgataagggctggcaacactggagggtctctgcctctcaagactcagccttgttcacagttcagtcctgcctcaggggccttggctggtgctgtaccctggtccgggttggccctcaccggcccccaccccggctctggctccttgccacccccctctcacagtactgatgtttaaaacacatacgggccctgggggacagagcagggtcaggatcccagaaacagccctacttcagccccggcccttatgctgccccacccctagctgagtcctgcctcaggacctttgctccggatgtaccctcgtccacgttcgccctcattggccctcctcgagctctggctctctgtctgaaaaataaatgtggccggatgggtgcagtgggtcaagtctgtaatcccagcactttgggaggccgaggcaggcggatcacctgaggtcaggagtttgagaccagcctgacccacatgttaaaaccccgtctctactaaaaattgaaaaaattaatggggcgtggtggcgtgtgcctgtaatcccagctactcgggaggctgaggcaggagaattgcttgaacccaggaggcggaggttgcagtgagcccaggttgcactgttgcacgccagcctgggcaacaagagcaaaactccgtctcaaaaaaaaagaaaagaaaaaggccgggcgcggtggctcacgcctgtaatcccagcactttgggaggccgaggcaggcggatcacgaggtcaggatatggagactatcctggcttacacggtgaaaccctgtctctactaaaaatacaaaaacttagccgggtgtggtggcgggcacctgtagtcctggctactcgggaggctgaggcaggagaatggcgtgaacccgggaggaggagcggagcttgcagtgagcagagattgcaccactgccctccagcctgggcgacagagcgagactccgtctcacaaaaaaaagaagaaaatggtggcatcactcccaggggtgacagctgcaaaccaggccctgcgcacgatggggccctctggttactgcctctcttaggccagctggggtggtttgagtttctctttcttgcctggtcctgacctgcagctctgccgtgcgcctgttaatctccatatgatccctgggtgggttcccagaggggttcatgttccctgagggtcacacggggaggcaggatttgactccgggacggcctgattcccccacaggccagcggagcctgcaccaccgtggagacaacctggagaccctggtcctcctgaacccatcagacaagtccctgtatgatgaggtagggaatggctgacgtcctggagggggcgggctgctgggacccgtgccttctctgtcttcctgtctcgtgtccttgtcttcatgctgccccagatcctctcaagacacccggcaccacacttcttcgcccacgaagccttccctgtggcttcagcctccgcttcttccctcctctggggtgggagcagaaaagcctggactttgggagggaggggagggtaagcactcccagctcagggcccaggacagcgtgggtctggaggtgggaaggccagagcagacaggttttcctcctgtgggttccctccgg

SEQ ID NO: 8007 - DNA, 1037 bp, mus musculus
ggttcactgcctcaacctcccaaccccacgcctgagcttccctgactgcccgtccttgctctcagtttgttccgatacaagcacccgtctgaggaggagcttcgggccctggcggggaagccgaggcccagaggcaggaaagagcggtgagtgacctgggccccagccccagccttgggagggtggctcctccccaggaacggcctcacccctgctcagggggctctgggctcagggacacaggaccggcccacccatacttccaggcgctgatctgggcacaggtgaaccgggagaccctagtccaaggagatggtcactgtcaagttagcatctgtttcctggcagtttgctctagccagtcctgtgggtgggtggggggatccccatatcccagtgtgcagaggagccaaggttgtggaaagagatggtctccaggccagctgctctgagctctgagggtggctggcctcagtggaatgcgtgctcaccgtccctcttgcttgtcaccatcctcccaggtgggccaatggccttagtgaggagaagccactgtctgtgccccgagatgccccgttccagctggagacctgccccctcacgaccgtggatgccctgggtaatagcccagtcccatccctaaactctactccctcagccctgaaggtctccacaccctcatgggggtggggaggatttgaaggaagaatgttctattaggaggggagcgagctgggccccagggctgagcagagtgccccccacagtcctgcgcttcttcctggagtaccagtggtttgtggactttgctgtgtactcgggcggcgtgtacctcttcacagaggcctactactacatgctgggaccagccaaggagactaacattgctgtgttctggtgcctgctcacggtgaccttctccatgtatccttcctctctgctccctgccagtggggcgggtgggagcaggacctgagcttccctggctcccctaaactggtgtggcagttttcacctgctgtgccacaaacttcccc

SEQ ID NO: 8008 - DNA, 395 bp, mus musculus
atgactgagccgcgcatgctacaatacgagctgctggagccagttctgcttcttggcaaggagcgatttgctggtgtggacatccgtgtccgtgtgaagggtggtgctcatgtggcccagatttatgctatccgtcagtccacctccaaagccctggtggcctattaccagaaatatgtggatgaggcttccaagaaggagatcaaagacatcctcatccagtatgaccggaccctgctggtagctgatccccgtcgctgcaagtccaaaaagtttggaggtcctggtgcccgtgcttgctaccagaaatcctaccgataagcccatcatgactatcaaaattcacctgtataataaacagtttttgagggattttaaagtttccaggaaaaaaa

SEQ ID NO: 8009 - DNA, 1491 bp, mus musculus
taaaataatacatgctggagagaaactctacaaatgtgaagaatgtggcaaagcttttaatcgatcttcaaatcttactatacataagtttattcatactggagagaaaccttacaagtgtgaagaatgtggcaaagcatttaactggtcctcaagccttactaaacataaaagatttcatactagagagaaacccttcaaatgtaaagaatgtggcaaagcatttatatggtcttcaaccctaactagacataagaggatacacactggagagaagccctacaaatgtgaagaatgtggcaaagcttttaggcaatcctcaacccttactaaacataagataattcatactggagagaaaccctacaaatttgaagaatgtggcaaagcttttagacaatccttaacccttaataaacataagataattcatagtagagagaaaccctacaaatgtaaagaatgtggcaaagcttttaagcaattctcaacccttactacacataaaataattcatgctggaaagaaactctacaaatgtgaagaatgtggcaaagcttttaatcattcctcaagtctttctacacataagataattcatactggagagaagtcttacaagtgtgaagaatgtggcaaagcatttctatggtcctcaaccctaagaagacataagaggatacacactggagagaaaccctacaaatgtgaagaatgtggcaaagcttttagccattcttcagcccttgctaaacataagagaattcatactggagagaaaccctacaaatgtaaagaatgtggcaaagcttttagcaattcctcaacccttgctaatcataagataactcatactgaagagaaaccctacaaatgtaaagaatgtgacaaaacttttaagcgactctcaacccttactaaacataaaataatacatgctggagagaaactctacaaatgtgaagaatgtggcaaagcttttaatcgatcttcaaatcttactatacataagtttattcatactggagagaaaccttacaagtgtgaagaatgtggcaaagcatttaactggtcctcaagccttactaaacataaaagaattcatactagagagaaacccttcaaatgtaaagaatgtggcaaagcatttatatggtcttcaaccctaactagacataagaggatacacactggagagaagccctacaaatgtgaagaatgtggcaaagcttttagccgttcctcaacccttactaagcataagacaattcatactggagagaaaccctacaaatgtaaagaatgtggcaaagcttttaagcactcctcagcccttgctaaacataaaataatacatgctggagagaaactctacaaatgtgaggaatgtggcaaagcttttaatcaatcttcaaatcttacgacacataagataattcatactaaagagaaaccttccaagagtgaagaatgtgacaaagcatttatctg

SEQ ID NO: 8010 - DNA, 1009 bp, mus musculus
actttgagatggacaattttctttaaagttccctggtgagtggtcagtcatgagactgagtggtttatttctagttcacaattacaaggaacattggccatttgagatataagctttcagtgtggggaaagggaaggggaaggaagagatttctactggactcctacctttggacagactctagacttactatgtgctctacagagccacaaaatccaaaactcaaggttactcaatttagcaaataccctcaaactgaaagctggtttaaatgctcttcttgcttctgggctcctggttttacttagtttttgacctctgactattcccaatgaatgcacggttcaatgatgcattttccaatgagttatatacccagcgttttaacagaaagatttaccggagtccctagtctattttttctatcagaattgaaattttcatctactctttatataaaattgtacttctaaggttcacatttgctatggtttgaattcttgtccccttcaaaactcatagtgaaatttagctgccactgtaacgtattaagaggtggaatatttaagaggtgttttcatgaacttaatgcctctctcatcctctctttgcctttccactatgtgatgttttctgccatgtgaggatgtagcaagaaggcccttaccagaggccagccccttgattttagacattccaaccttcactgtgatattctgttaacagcagcacaaaaaaattgactaaaaaacatttaattaagttattctgtttaaaatctgtgtgggctccacattgccctaagggaaacaccgcatcctttgcatggcttaaaagccgcctccgtcttgcctctgcagatctctcgaggctttgttcttatcagtcgtctcccatgaagcttttttgctgaagctggattaaactgcttgcaatcatcagagaaccccacatcctcttcctctctaggtattcaaatgctatttccaccccttctttttttctctct

SEQ ID NO: 8011 - DNA, 938 bp, mus musculus
aagaatgatgcgtagatgggtagatgggttgatggttgggagaatgaatgggtgagtagaaggaagatgagtggatgggtagataggtagatggatgggagaatgaatgggtgggtggagggatgatgagtggatggatagatgggtgaatggatgggagaatgaatggatggatggatggattgatggatgagtagattgggaatgagtggaaaaataaatagctgacgcataggtggaaagaagatataagtgggtggatgggtgaatggagagtagaaagtaggagaaatgggtaagtaggtaaaacatggatggaaagatgggtagatttgggatacaagttgaggcttgcaggatgggtgggattgggattgcaggcatgcctaaggttggagtttccagcaactgaatactgcacactcatgtcttccaggaaggaggccataggaaaaaagtctccaagtggtggtaggtcccagaattccatgccattccatgcttctgcctgcagtccctaggccactgaacctagacagaggggaagggcagagtgagtggacacagccaatcccagcctgcttccgactcccctaatccctcagcctttagggacaggagcagcggacctcctccctctgctgggcactgggtactctggtggatgcagcctggcccagatttgctgattcttgtccacgtacaaattaatgtagatatgttttttcaggcatttaagaaatcccatctccaggtgggcagataaataactctatttacattaaagactaatgtaacaaaaatacaccaggcaataattcataatgcattctattctacagagtcatattttaatgtgtgacatatcccaggcagctcctctgtgctaatttcatttaatgagcacatgttatagaattttcagagcactatccctg

SEQ ID NO: 8012 - DNA, 635 bp, mus musculus
tgtttaggttgggggctggttgtcaccatggcccatcctgatggaactcagtagtcaaggggagaatgtacgccaggcggggaaaccagagatgcccagcaccccccagaaagtcagatttccttaagcccagtctgggatgtgtcacctggctgctctggcaaggtaatgtggtttgatagctgttgagctattgttgtaatgtcgtaacgtatttcaatggccatttttctttttctttttcttttaagatggagactagctttgtcacccaggctggagtgcagtggcagaatctcagcaatagctgtttttctgttcttgagttgggagagacttagctctgtgaggctcaggagaagaggcctggttctaagaaaggttggccaggccttttcttccacagccattttgcttttaaattcagccttccgggcatgtaagaacaaccataagagcttcctaatctgtcagggaaggaaaggaccgctgcagtggctggaaagtggtgcacaccgccatgcgggtcatcggccttcgcatattgtttctgctgagtagtcctgagtacagagcccagaaacctggtttgagtcctcactgtccacaaactcattgagtggtctgggactgac

SEQ ID NO: 8013 - DNA, 1771 bp, mus musculus
ataatcagggaaggcttagaaagactgctcaggatggatagggtaggggagggttggctacaaagacgaggtaccaggcagtagtctgggcatgagagggtgaggcctcatcctgttacattacagagcatttgctttgctcttcattccatgggtgccattccaggtgtgtgctgaagacttttgggaaggtcttcaacaggtggtttctggggccacctgagggctggtacataaagcctacatgatttgcctttcctggcctgtgcaggccgtggaatcccgtgctgagcctggtccaggtgggatgctaagatacccgccctgccgtggcatgtagcataaagccctgtgaagcctggctgtggaccctgaggagcctagggacatggggagggggacacagcttgcaggacagcagagtatgggcactcaggtcaaagcgtgggcttggcaaggcctccctttgctcctgatagagagggggttagccctcattattcttaaggtgcccaaagctctgatagcctgtagttcaataacttaaaattgaaaatgtaggttaaaatactgttataaacacctacagccaccccacagtgaagacagccactacaccttgaacccagccctgtctggggtcctagctcccctctcccagaagacaggtgtaattatgctgtttttccacaagaaactgaggggcagggggcttactgtcttgtctgaggttacccagctgggtcctgtcagagcagggacatattcttagccacccatgatctcaagccaccccccaggcattaggagagccccttgcaggtgcctctgagttcagggcagacacatggtaggtgacatgtctctttaggtcttgcacctacaccctggttttacacctgttcccagatgtggagatggcctggctggaagtccagcggcccgaggagtgggtgcctctgttttctcaccccatccttccaggggtctgtgctccagaaggcgtaggccatgtgcgtttgaacccagccctcacggaggttgctggcaatgtgtcttgggcagaccatttgcgcctggctgctggagcggggctgggcattccttctggagggggagatgagtttcaatgacctctgaccattgtctttggagggtttaccttgtaatggagtgttgagtcaacattcagaattaagagcagaaaggtaacattttaaggcatttcatcaattcttctgagacgcccacacatcttgttttccctcttcaccacttaggcagcaatttcttttcttgtttctaacagctacctatagaaaacacttgaatgcagatcatatcttgatggtatttactaatataaatatttgctttctagaagcaatgttacgcaaaatgcctacgctgcaggctaagcgaccgagtgcttgaggtaagaaatgccacctctgtggactggagttggtgtctagccgtctccacagtggcacgcaggatactggcagaacggccaagtgtcggcacatccggcctgccctttccaaggtccttgtgatcacattttttaaaatgataaaaccatcttggccagtttcccccaggaccccttgagctgatggagccctctcccaacactgcatgaggttcagttgcatatttgcccagaactgtgctgtgcccagaactgtgtatgacagccttcaaggagcttacaatgcatgaagatggggtgatatcaaacctcatatcagttacatttatatttaac

SEQ ID NO: 8014 - DNA, 1612 bp, mus musculus
tcacttaaacaaatctactttatctattactctttaaattgacattccattatctcaactttgaggctctagtccacctattcattgtttccaaggatactcctttctaatctgtgctttctggtctgcttggtaatttttgattgagagttcattgccattgtcagtgtgtttttctttttttctcatgagaagcccaggtggacagtgttatgaagttattctcacagaggttttatgtccttggcttcttccattgtctagggccatcactagctcaaggcaaatcttatattaattttggagggcttagagttttctggatcctccagagattgaaaatttaaactccaaacagtcttaggctagggttttgaattctcaagcaagcatttagacccaaaccaatgagtaagctcctgtctcctttccccatgatggtccatagtttttgttttttttttttcacagagccttccttttaactgagagtgtagctttttaaggatcccgtcttcaagtagggattatggtccatctcctctccataccagcctaaggcctcatctttagtctctacatagcctttaaaactccagccctggggattgccccaaggaatactattatgggttgaattatgtccccttaaaattaaatatgtttcagtcctaaccccagtacctcaacaacataagatcaaaatgtgaccttatatggaaacagggtcttgccaaaggaaatcaagttgaaataagatcattagggtgggccttaatccaatatgactgatgtccttatagaaagaaaaaatttgggcacagagatagacatgcacagagggaggagaacttgaaaacacacagggagagtgtcatatgaagacagaggatggagtgatgtgtttacaagccgaagaatgccgaggctaggagaagctaggagacagttgaggcacggttctttccttgcaccttcagagggagcctggccctgcggactccttgtttcccacctcctgtcctctggacctgtgaggtgatacatttttgttgttttaagccccctggcatgtagtactttgctactgcagccctaagagatgaatacagaaaacaccctccccagttcctgcccctcactctgaaggcagccctgacatcagcacctcacaactcttacgtttagtttcctcttcacttccaacccacgaagattccttttttccaaccacagctttgcattgtcaatatttttggatagttgcatgctatgcagtgtttctctgcacttgtagtgggagaggtttcatgttatcttagccccccctcagctcacattatgaccttttgggcattaagaacccaagaaaaaatgagccaggcatttctagaataaaaaggcaatttcttcaagcacgccgccctctagggccatgctgagcctcgccaagggcagggcctggggcatgttgtgttgtgttggaagtgccatgaacacgaggctgacagaggccaggcaagtgacagaaatatgcaaagctggccaggtatataacaggccaactcttttgaacccctcaggcttcatgacatagcttttatttttctac

SEQ ID NO: 8015 - DNA, 883 bp, mus musculus
tttccaaaaatcccttaggggatgaggggtgaaatttaaaagctcctgaaaatgagtactgctgtgttgagcttttctttcctggggtatattaatttagttatatttagcagaagaggaatataaccaaatgtgactaaaatatagcagaaattcaggttgtttgtaaaaattttaataacaaatagcatttggcaagtctataggattcttcctatctggaaattctattttgttagagtgcgataggacatatggaaaaccaacacaaagtgctttagcattaaaactcaccatcaaatagatgtaatcttattaattacacattttgtattttaattatttcaaggagtgaagaaaacagggtgtttttgtttttgtagttctgattactcatttatgcattgttttgtttaagtaaattctgcctacaagtgaaaaggtcggtgcgctcttctgtgcaccatcctcacggtgctatttccgaatatctgaatattgatttctaacacctggatgaggctgtgaccgatcaacttggaacactgtaaaggttttcgaatgggatacgctgtaggcacgttttaagaagtattctgttcctaaagtccaggtatgattggattaatatttataaaattattattaggaattatttaagtggggccaggcatcttgcaacattttctgatttttttttctttctttctaatctcattttggtgatatttaaacaaacataaatgattgtaactttgcagcttttttatttaggtagctttaatttatttatgaaagttaatccatttctgatacgtggtttttaaaaatatgaaatggatttatatatactatattcctcaaatccactgtatgtggactt

SEQ ID NO: 8016 - DNA, 1004 bp, mus musculus
cccagtggggcaaaaaggagggcaaagcaaactggaagagacttctactctattgacagggctcttcagatccaacatcaagctagacatgcccttgctggccactctacaggttgctgtcccactgctgagtgacacaggccatgctacatttgcaaggaaaaaaatgagacaggaaacacaggtataggtcacttagggatgagcaggcatccacagcttcaaaactcttcatggaaggggtaatccttgtgggaggcacagctcaccaaggcacagactctccaattcctgttgtagctgagtaaggcggtcatatcctggctgttcagttcaaagtcaaaaaccttaaagttgtcagcaatgagttctggtgtcacagacttggggatcacacccaaattcctctgcatggggaaccggatcaggacctgggctgtagttttattgtgcttggctgcaatcgccttgatcctgggatccctcaggagggaagggtcctcggggttgacccagggcctgctgggagtgccaacggggctataggcggtcaccacgatgcctttggactggcagtactggattaacttctcctgagtgaggtaagggtggcactcaatctggttaaccacaggcttatactttaagccaggtttgtttaagagcctctccacttggaggtggttgaagttggagatgccaatagctttcatcagccattcatccaccagctcttccatggctgcccatgtgtccagaatgttggtgtcactgggaaccacattacccaactcattcaatggaaaaattccctcccaggcttaaagccagtcggccaatgaataaggtagaggtccaggtagtccagcttcaggctgctgagggtcttctggcaggctcccttcaccaggcccttcccatggtatgtgcaccacagcttactaacgatgaagagctcctcacgctttaccacctgctccctgagcttctcctgaatggccacc

SEQ ID NO: 8017 - DNA, 2210 bp, mus musculus
tggacacatcctttccccatgttgcaccttggtttccccatctagggtagggacggggaatggttgagagctgtaaagtctgtagctggatatgtgagtccctgtgagcctcagtttccccctctgcacaacaggaatgatagttctgcctgcacagggttttttgcaaagacccgtgaggtcacacgtgcagagcctggcatgtgtgtggtgctgctgcagtgaagtttgggtttttccattggtggtgccatagaagagctaggctctggggtcaagccctggggtcaagcccgggctggaaccctgtccctaattcttagacgttgaaatcttctgcaaagtccctgatgggggctaagaagagaatattgctttacagggctgctgttagatgctaaggaaaccatttgagtgacacacagagcacacccagcccatagtgaatagtcagagttcagtaaacattcagccaccatagagagtgttgtaagcatggcagggcatggtggctcacgcctgtaatcccagcactttgggaggccaaggcgggtggatcacctgaggtcaggagttcgagaccagcctggccaacctggtgaaaccccgtctctactaaaagtacaaaaattagctgggtgtggtggcatgtgcctgtagtcccagctactcaagaggctgaggcaggagaatcacttgaacccgggaggcggaggttgcagcgagctgagattgcaccactgcactccaacctgggtgtcagagtgacactccatctcaaaaaaaaaaagaaaaaaaaaaagagtgtgggagcaccctcctcttccagttgatcaggcacgtgctatttagactgaaagaggacactctgcagccagctgatctggttctcactccattatgtcctagcctgtgatggagccataggagaatgactcaacccctccatgcctcagtttccccatctgtaaagggtcttgtcccctcaaagggttattggaaggttaaataagttagcacatggaagccgtcagcacaatgcccagcgcataatgagcaccttatgtttgctcttcttgttgctgcagcggttcccaggggctccctgatctcagggcaggttgacatggggggatctgggcaggggaggggggggccagcccaggagggaatgcctgaggtgcccaggcctagaggtcaccccaaggagcctgtaatcagctgtggtcgggcggttctgctccaccccaccgccctccctgggtatatcaggactggtccgggcccaggctctgttgggtgggagcacaggcaccgggcaccatggggaaggccgtgagtggggcccaggggtccggggtgcagtggggacaggggttgcagtggaatctgagttctccctccctccatcctgtccattcccaggagaactatgagctctactcggtggagctgggtcctggccctggcggggacatggctgccaagatgagcaagaagaagaaggcgggtggcgggggtggcaagaggaaggagaagctggagaacatgaagaaggagatggagattgtgagctctgactggggaggggcgggagctggagggtaggctgggaaccaggcagtgggcggggagggggccaggagagcccagagcaagcaccctgccccaccccaccacacagaacgaccaccagctgtcagtggcggagctggaacagaaataccagaccagtgccaccaaggtgagctggagactgggagcgtacagaaaggggaggaggagagagggagggagagggagatggaaggagggagatggagagagggagagagagggagagatgaagagaggaagatatggagaaatagagagagggagggaggcagaaaaggaaagagggagggagggagagaggaaaggatggagggaggggaggagagagggagggagatggagagagggagagagagggagagggagagaagggagaaagcattagagagaaagggtgacacacagagacggagagaggagtagctgaaaagagacagcaagacagagaaggcagagacaaataaggagagagcagcaggagagagacacatagaaaggggagcgaggagagagagacaaagggagagatgaaggagggagggagagatggggtgggggcaggaaccaagagacaaagagatgagaaggagcag

SEQ ID NO: 8018 - DNA, 1003 bp, mus musculus
agagagcacagcaacccaagcccctcccaggacacagatggcacaaaggccaccaagatggcccattccatgaggagcatacagaacggacagccccccaccagcaccccggcttcctcagggtccaaagccttccaccgactctccaggagaaggtccaaagacgtggagttccaggacgggtggccccggtcccccggcagggccttcctcccccttcggcaccgcagcagcagcgagatcaccctcagcgagtgtgacgcggaggacgcgggggagccgcggggggcccggcacacgggggcgctgcccctcttccgcgagtacgggagcacctcgtccatcgacgtgcagggcatgcccgagcagagcttcttcgacatcctgaacgagttccgcagcgagcagcccgacgcccgagggtgccaggccctcaccgagctcctccgggcagatcctggcccacacctcatggggggcggcggcggagccaagggggactcccacaacgggcagcccgccaaggacagcctcctgccactgcagcccacgaaggagaaggagaaggcccggaagaaacctgcgcggggcctcggcggcggggacacggtggactcgtccatctttcggaagctaaggagcagcaaacccgagggggaggctgggcgttccccgggggaggccgacgagggccggagccccccggaagccagcaggccgtgggtgtgtcagaagagcttcgcccacttcgacgtgcagagcatgctgttcgacctcaacgaggcggccgccaacagggtgtcggtgtcgcagcggcggaacaccaccacgggtgcttcggccgcttccgccgcctcggccatggcctccctcacggcctcgcgggcccacagcctcggaggcctggacccggccttcaccagcacagaggacctaaactgcaaggagaacttggagcaggacctcggcgatgacaacagcaacgacctgctgctcagctgcc

SEQ ID NO: 8019 - DNA, 844 bp, mus musculus
tttccccatctctgtctttctcccggctcacttttctctctatgtctatagcctccgcccctaactccccccaccccacaatcagagaacaggaggaggcgcccaggtcagggactgggctggacaggggcagagggtgcccccgcactgttcccatgttctcagctcccccaccctgtctcaggacttcatccaggagctgctggcaaagcttcaaggcctccacaggcagcccggcctccgccagccaagcccctcccacgacggcagcctcagccccctccaggaccgggcccggactgctcacccctgaccctcttgcactctccctgccccccggacgccgcccagcttgcttgtgtataagttgtatttaatggttctgtaacaataacactgtgtggctgtttttcctccccccgggttaccatgggcttccccgagctccccccacaacctccctctctcctcctgtggcctctgctcatgtccctgtcccagcactgcagctgggcctgccagatggagaatcactcctcccgggccagaaagcatgagaacgggccctgctgagcccacgcccttgggatttatatcctagaccttgccttcccttgaactccccaccccacccccatccccagtcccagcaagcagggcccctatatgcaggctcctgcaggaatctgggtcaaggggcatgctcatgaccaaaggtgaccgatattgactcagtacaggtgatcacacagcaaacaaatcattcagccactccatgaaatctgcgctgtgcttataatggcccttggtactgaggctgcaaagatgagaggaagatggtctc

SEQ ID NO: 8020 - DNA, 1093 bp, mus musculus
gtgtgcctctcgatatgtaacttgacctctctgatctcgttttcttcacctacaaaatgtggctaatggtagtactagcatctaggtcaccgggttgatataaagattaaataagttggtttttgtaaaggtcttagtgctagtgatgtggtgagtgttacaaacagtttattattattggtcctataatttgggtccatttttaggtagctattcctccatggaggttaaaggtggccccttaaagcttcagactcaagtcacctactagtctgagtcacgccaagagaatgaagacagcatctttcccattaattctaacacaaatcccagagtaaactctgatcggcccaccgtgggtcacatggccagacctgaggcatgagacccacagtctcatgactgtgaccaaagacagacatgctctgataggccaggtgtgagtgacgaaaggccagagaatgagatcccaaggacggaggggctggtgggcataaggagggcaatcggagttggcttgatgggctgccagacaggagggagagggcctgaacatgaacccgaccttgctctgcagatggccaggtgtcctttgagatgctgcccaggcagtggtctgtgtgcgagcagataggaggtactcattaccccgatgggtctgcggtgggaggctgggggaactgaggatgcagaagagcaggggagggtggcaggggtcatgggaaagaatgggcagtgtcttagggaggggtgagttatggggaggggtacagctggcacaggaccaaggctattgagccctggggcggctctggactgcccctttccctctcagttaccacctgctccataatttggtctgaatacatcgcgggtgagtatactctactgctgctggtggagagtggatatggtaatgcaagtaaacgtttccaggtggtcagctacaacacaggtaatgagggtgatgcaaggggctgggcacaaaggggcaggatcccagactgtggactgcatgcccatcctgagggatctgtgcccagcagacagagggagggcaacattacctgtgtcactcctggttgaggagtag

SEQ ID NO: 8021 - DNA, 831 bp, mus musculus
ctagctatcttctcatgtatccattgctccaaatagtgcaaacatccaggtcttcatctctttcagcacctgcctctttgatttagctccatgaacttatcttgtttggggtctccatcctccatcctggtaacacccagctattctggggctgtggcctcacctctgtgtttgctgggcatcccccaccaggtgaatggtctccgagtggatctcccagctgagaagttagcatctgtgtccgtgagtcgtacacctgatggctccctgctagtccgccagaaggcaggggtccaggtgtggcttggagccaatgggaaggtggctgtgattgtcagcaatgaccatgctgggaaactgtgtggggcctgtggaaactttgacggggaccagaccaatgattggcatgactcccaggagaagccagcgatggagaaatggagagcgcaggacttctccccatggtgagggatgtagtatggaaaccaggcttcttggggcaaaggcacctggatcctcatgggatgagggcagtcagggtgggtgtttagtctgcaagcggaggtgctaaatgtctgtgtcttgcagttatggctgatcagtcatccaccaggaacgaagatttcctgaagaagacctggtccctctggaggttgcagtggctgaaggatgcatcatgtgctcctaccctgctctaccgcttttctgggtcacagaggccaaatgtgagagcattgaataaatatcttaagctaagctgcatgtcattgtgtctgtctcatgccttctcatccctgactttcctcctgcacagcaggtatcaggtgcctg

SEQ ID NO: 8022 - DNA, 300 bp, mus musculus
caggcgggtcatgggggacagtcagttagagacccaggttccttctggcttgtgattctgccctcctctaggctccttggagtcctctctgttcagccagtgtgaaggattatgagggagatgggtcaggctgcaagaggtgtttctcttccacctacatcccattggccagaattggtcacatggccccacctaactataaaggatgctgggaagtatagcctaattatgtattgtatcagttaactttagcagtagaacagatcacccacaacttaggagcttaaaacaaccaccacc

SEQ ID NO: 8023 - DNA, 250 bp, mus musculus
ttgtcacagaataatttttctgagcctcaagcatgaagctaagagacctttttgaagggccaggccagtgtcttacctgccccaggtccttgtcactttctgccatcctggtgtccccaccaggcaccccaggccttgctgtgcaaaggaggcacacagctgagaagaggcaggttctagctctgtcatttcctttctgagtgaccttggacatgtccttttctgaacctcagtttccccacctgtaaga

SEQ ID NO: 8024 - DNA, 1498 bp, mus musculus
ctcttagtttctgttacctttgtggcttgcctgggctcagccggacagttcttttgctggttgctgcttggcaggctctcatccaggtgcaggtggaggtggctgggctggagtcatctggaactggcactgggactggggagttggttccctctcagcgtagcctctgggcctctcttctccacgtggtctttcctgcagggtagctgaatatctcacatggctgctcaggactccccaacagccagattttcatgagggaagaagcagaagctgcaggttatttaagggcaaggcctggaatcttccagcgtcatttccaccacactattggtcaaagcagctccaggcacagaccacagtgggtgtgggaaagaactgcacagggtgtgatacgaaggggtccctgatggcacagtctgccacagagtaggcactcttggcttcggatcttggcactgctgcttattagccatgtgactttgagcaggcagcttgacctctatgagcctccatttccatatttatcaaatgggatactaatagaacttatctcccaggattcttgtgaggatgcagcaggatagtggataggcgagccctggcccgggacatgcccatctggttgctactacaggctacagggggtatacatggaatccgttttttttttcttttttttttttttttttgagacagagtcttgctctgtcgcccaggctggagtgcagtggcacgattttggctcattgcaagctccgcctcccgggttcacgccattctcctgcctctcagcctcccgagtagctgggactacaggcgcccgccaccacgcccagctaatattttttgtatttttagtagagacggggtttcaccatgttagccaggatggtctcgatctcctgacctcgtgatccgcccgcctcagcctcccaaagtgctgggattacaggcgtgagccactgcgcccagccccctttgttttttttgagatggagtctaactttgttgcccaggcttttgccttcctgagtagctgggattacaggcgcctgccaccacgcccagctaatttttgtatttttagtagagacggggtttcaccatgttggtcaggctggtctccaactcctgacctcaagtgatccgcccgctgtggcctcccaaagtgttgggattacaggcgtgagccaccgcacccagccggaatcccttcttgtcattactgcccaagtgccaaaacctctgcttctagataaagacttcgtgcactcagatccttgccctgctgtttacgtggtgtgtgtcctgcatgagtccctctgcctttctgtaccgaatagcacttaacctcatagttctgatgttccctcagcaccattcagtaaacagtgtttactgtttactgtttgcagcgcggcctcgaaccaggctgcctgcttatctgtccccgctctgccactttctgtgtgaccccagggagagttatttaacc

SEQ ID NO: 8025 - DNA, 1498 bp, mus musculus; identical to SEQ ID NO: 8024

SEQ ID NO: 8026 - DNA, 488 bp, mus musculus
gtactcagtaaatctttgaaatgacctgaactcaatccaggtgggaaccacaaggttggactctgatgaggcctcacaagttacatttccagcccaggcctctctcctaagctctaatctcctatattctcctgcacatctctccccgaatgacctgcaggctccatgcttttaatgcaccccaaactggactcatctttccttaagcctggttgtcttccaggtttgccatccagaggtgtgaggattcccatctgcagtcacggcacctggtactcaatgcctgggtgtcttagtttgtttgggttactatagccaactaccataaactgggtggcttataaacaatagaaatttatttctcacagttctagagtctagaaagtccaagatcaagggaccagcagattccatgtctgatgagggctcattttctgattcatagacaatgccttctcgctgtgtcctcacatggtagaaaggcaggg

SEQ ID NO: 8027 - DNA, 4276 bp, mus musculus
tcaccaccaagcacatgctacccacggttctgcgcatggctggggacccggttgccaatgtccgcttcaatgtggccaagtctctgcagaagatagggcccatcctggacaacaggtgaggtctggatactcccccacacactggcaggggcttcttgtgggcaccttaatctttgacctttgaaggtagagcccagggtcagaggcctggcagcgctccttgcttgctgtgtgaccttggctcccttcccttctcaaggtgtgttttctcaactgtaaaatgaacatcacagcatgaaatagaaagagggggtgatgggttggcagtcctgtatactagcaacaagtcattagaaaatgaaatcaccttatgttttatatgtaagtatgtgtataatttataattgcaccaaaaatatcaaatagccaggaataaattcaatgaaagatgtgtatgtaacacctctaatgtaaactgtaaaacactaatgtgagaaattaaagcagacctgaccaaggtgggcggatcagttgaggtcaggagttcacgaccagcctggccaacatggcgaaaccccgtctctagtaaaaatacaaaaaattagccggtgcggtagcactcacctgtaatcctagctatttgggaggctgaaggcaagagaattgcttgaatccaggaggtggaggttgcagtgagctgagatcatgccactgcactccagcctgggcgatagagcgagactgtctcaaaaaaaattaaagcagacctacataatattcacggatgggacagttccctgaactcatctttagattcagtataagcccaataatcttaacaggttctttagtggaaaattgacacttctaatgaacaaagttgtctgatttacactaccagagacgaagacttatgacaccacaataattaaaatagatgtgaacacaagcatatttaaatcgcccaatagaatggaatcaagggtacagaaacagtcccacatgtgtttaacagtaggcatctctgcagttcagtggagaaatgtatgttttttaaaaaacatagctgagtcaatttgatatccatttaggaataaaagaaggctcgcctcaatgcataaacaaattaatttgagatgacagaccagaaccagaaagattttaaaaataaaggacctagaagaaaatgtaggaaaatatcttcttgagttagcgtaggcacagatttgttaaacagcaaaccagaggaagtgatgggtaagttgaccttctgtaaaatgtaacgctgtttctcaaaagacagcattttgagagtaaaatgcaagccactgactggaggaagatgttttaatatatgtttctgagaaaggactcatccacaatacctgtctacaaatcaggcaagacaagaaagagatggggaaaaagacttgaataggcacttgaaaaaggatctccaaatagccagtaagcatatgacaagggtgttcagcatcattagccttcaggaaaatgcaaattaaatctcagtgacatatgactacacgcctcccagaacagccaacattaaaaaagactcagtggtgcaaatggtgaagacatagaagagctggaactctcatccattgcacgtggggctgtacatttagggtttgatcactctgaaaacgggagtggatctggagtggaatttggtgaagcttgttatacaaacagcctgtgaaacagcccttccactcctgggtctctatccaggagaaatgagtgctgtttctgtcagaagaatgttcatggtagctttattcatagtagccgtaaaaatggaaacaacctccatgtctgtccacagtagagtagataaattttagttcattcaaacagtggaaaactattcagcagtgacgaaacaaatgcctgctataagcagcaacaggtgactctcacagataccatgttgagtgaggagccaaaatcaagaaaacacaccatttatgtcaagttcagaaacaggcagaatgaaggaatcgagatgatggaagtaagaatagtggttatttggggagaacagggaactgtcaactgaaagtgtgggacccacaactgcagatttctctttctgtctgttccaggacacaacctcagctttagtttctctccgaagtccccctccgttttccaaaacaattgactcttggtgcaggcggatttccctgggccccatagatgagagtggatgcctcctctgggctcctggaggaccaggaacttccccttggggccacttaccactcccctcttacgtaccagtttggtctcttcctcctggcccgggtgcctcatggcagaaatcaagagtgatttagctctgtattcactcctaatacattgtaggcctcagtgaatatgtgtgaaatcaatgaaagatacccatttgctgggcctcagagacttgggggttctgagattctgttccactttcccagcctgctctgatctccctgtttggggccccagtccttgtttatcatacttctgacctttaagtaattggttggttggttggttttttgcagtttgtttggttttcctttgaggcagaatctcgctctgtcgcccagactggagtacagtggtgcgatctcggctcactgcaacctctgcctcctgggttcaggcagttcttgtgcctcagcctttcaagtagctgggattacaagtgtgcaccaccatgcttggctaatttttgtactttgagtagagatgggggttttcccatgttgtccaggctggtcttgaactcctggcctcaagtggtctgcccaccttggcgtcccaaagtgctaggattacaggcttgagcccccgtgctcggccttgagtttacctttttttttttttttttttttttgagacggagtttcgctcttgttgcccaggctggagtgcaatgatgcaatcttggctcaccacaacctccgcctcccaggttccagcaattctcctgcctcagcctcccaagtagctgggatcacaggcgtgcaccaccacgccctgctaattttgtgtttttagtagggacagggtttctccatgttggtttggccaggctggtctcaaactcccaacctcagatgatccacccaccttggcctcccaaaatgctgggattacagatgtgagccaccacgtccggcctgattttacttttaattgactcataattttatatatttatgggggtatagtagtgtttcaataatgtgtgcaaatgtgtaatgatcaaattaggataattagcatatctatcaccttaaatgtttactgtttctttgtgatgagaacattcaaaatcttctcttatagctgttttgaaatatgcaaaatgttattattaactatggtcacccgcctgtgcagtgatcagagatttctaattcctgtgtgtgccctggattcttgagactcctcccaccttgggtttggtgtatccgtgtctgtgtacactctcttgcccaagagccctgtgcccacctgttgccccagtccatcctggctcaccctctctctccctgtctcctttcgctttccagcaccttgcagagtgaagtcaagcccatcctagagaagctgacccaggaccaggatgtggacgtcaaatactttgcccaggaggctctgactggtaagacctagaaagcacggagccctagcaggagggtggactttgaggacaggcactgggcctgtgggcagcagcttctgggagggggaggtaccttggcattgtgggcagagagagggctctggttctgattcttgcctgttcctgttttcctagttctgtctctcgcctgatgctggaagaggagcaaacactggcctctggtgtccaccctccaacccccacaagtccctctttggggagacactggggggcctttggctgtcactccctgtgcatggtctgaccccaggccccttcccccagcacggttcctcctctccccagcctgggaagatgtctcactgtccacctcccaacgggctaggggagcacggggttggacaggacagtgaccttgggaggaaggggctactccgcccacgtcagggagagatgtgagcatcccgggtcactggatcctgctgctgtaatgggaacccctcccccatttacttctccacctcccgtcctccccatcattggtttttttttgtgtgtcaactgtgccgtttttattttattccttttattttcccccttttcacagagaaa

SEQ ID NO: 8028 - DNA, 683 bp, mus musculus
ttggatgcaaatttcttttgtatgcacacagggtaggcaggggtgtgtccattggaagcacctgcctcttgagtgtcttccaggtgatcaccatcaaccctaggaactccaggtgggcagagatgaaagtaaaagccccgacatacattggtctctccaatatcctgtgctgggccttccacatgctggtaaatgccatttttcctatttatacaactggcaaatggagcaacaacaacatcacaaagaaaggagatttgggatattgttctgccccacttagtgatgaagtcacaaagtcagtatatgcagcattgacatccttccatgatgttttgtgtctggggctcatgctctgggccagcagctccatcgttttggtcttgtacaggcacaaacagcaggtacaacacatctgtaggaacaatctctaccccaactcttctcctgggaacagagccatccaaagcatccttgcattggtgagcacctttgcattatgttacgccctttccttcatcacctacgtttatttagctctcttcgataattccagttggtggctagtgaacactgctgcactaatcattgcctgttttccaactattagcccttttgttctcatgtgccgtgaccccagcagatccaggctctgcagtatctgctgcagaagaaatagacga

SEQ ID NO: 8029 - DNA, 312 bp, mus musculus
gacccagacatggagctgcgggaagaagcctggtctccggggccgctggattctgaggaccagcagatggccagtcacgagaacccaggtgagcagccagaggccttcccagccgaccccgctgcctcccacctgaccctggcttcctttgcctctgggtgggaggaaaccccccttccctgttttcccctcttggggccctgggaccacccgaccctggcctcccctcccgccctgggccttgcactcctggctgtagagggagggctagtgttgtggctccaagtttcctttctgctggatgatcttggg

SEQ ID NO: 8030 - DNA, 6015 bp, mus musculus
ttatgtgtctaggactttgtgtttctaagcccgatgtgatctcctcgttggaacaaggaaaagagccttggacagtgaagcgaaagatgacaagagcctggtgcccaggtgagtgtgggagaaccaggtagggtgaggccactgctggtcatagttcagctgactcagacacgcaacatcttcagcagactcttcctaagcctcttgcttaggaatatctgttatttttactatttgggaatacagaaatttcaactacagtattatttccagaacagcaaattattaagacaaggaattagaattatagatttctttcagaggttttatcctaacaggaaatggttacagtttctaaagcattgggaatcttacaaggtttctttgttcaattcacacttcaaaggaaacgcttgcattgacaacaggacaagttactgacagttataaattaaagtgactcacatgggtcatcatatagcataagagaacaagaatgtgtgaaagtttccaatttaacatcatatgaaatcacatactttgagctagtttaatgagatagaactgttttttcttcctgcagatcattcatctcttcttgagactagttaattgtgaagacttacatttttaaggccaggatctggacttttattagttagcatcgtaataaaaaaaaaggaggtatgtagagatagagatgaaattttttctagatgaaatggacaaggagtgaaaaagagttgacttaaagctgaaataaggatcatatggcagttttcttctatagcctccactttctctttatattagacattttattttacatttaagtctttgtgagctcccttatctcttgatttttaattgctttttccagtcttctgctaaaaacataatgtgaactcttattcaacttttaggtgggaaaggtcttattgtggcctttaggactatggctacacaaatttaggaatgtagggttggttgaatattgctagtaatataagaaagctttcaaaatgatatgcttttcattttcttccataaaaataaatgactatatgcttttttgtggcttttaatttaacggttgcattttggaatttttcttcatactaacacatgataaaagataaatttaccttctttacgtctttcagacttgaaggctgtgtggaagatcaaggagttacctctcaagaaggacttctgcgaaggaaagctatcccaggcagtgataacagagagactcacaagctataatctggagtactctctgttaggggaacactgggattatgatgctctgtttgagacacagccggtaagtcacaagacaaatttcaggcaagaggaaggatccttcatgaggaaactcttcttgagggaagagaccatgactacaacaactataagagaagttttcatttgaatacaatgcttcttatagacagattatcccctcagaacagagagtgcctaatctccatacacataagaacagtggagggggaaattgagttgtaatgaattacaaacaaatctgtcaaggtcagaaatgtttgacttgtgatgaatgtaagaaagctttgagcagaggccaggcgcggtggctcacgcctgtaatcccagcactttgggaggccgaggcgggtggatcacaaggtcaggagatcgagaccatcctagctaacattgtgaaaccctgtctctactaaaaatacaaaaaattagccgggcgtgctggcgggcgcctgtagtcccagctactcaggaggctgaggcaggagaatggcatgaacccgggaggcggagcttgcagtgagccgagatcgcgccactgcactccagcctgggtgacagagcaagactccgtctcaaaaaaaaaaagctttgagcagaatatcaacccctccttttcatcaaagatttcatacaagagaaaaactctgtggacttgttgaataatttgtatgaatatgggaaagccttccgtctgttaaaaggttcatactgtgtgtaagttcatactgtgtgtaagtatgacaaactctccatagcagaaagtttctcctatttttctgtgtttttccccaaacatgtatgctataactaagccctgtcattatttgacctggtgtaccagaacttaagttgcagttcttggtatggagtgccttttttgcagtgtggacacagtccatcccactgagaccaggtgagttcacgaacatggtttgatttaaaaaacgtgcttttaccattgcagggcttggtgactatcaaaaacctggctgttgacttccgccagcagctacacccagctcagaagaatttctgtaagaatgggatatgggagaacaacagtgacctgggatcagcaggtaaggatgtccctctcccatatttgaatctatcgtcgggtacctccatttccaaacttcagttttgaattatggaggagggagggggtgtcttctgacatgctggcctgaattttgtggattcctaagataagaatttggcatttgtagaggtgaaagttggtgtctttgttaggcttgaagcgttatcttcttgtgtctttcagatcctactcacctgtttttctgtttctttcagcagtaacacttttctatcaacaaggaagtggttctcaattttaggatgccaagactattggccaaacctcatctcttttcactttttcaggacattgtgtggctaagccagatttagtctctttactagagcaagagaaggagccctggatggtgaagcgagagctgacaggaagcctgttctcaggtgagtgcaggagagcctggtgtggaaaatctactgcaagagagagcggagcttttaccaaaaaggctgcatcctcactaatatacagtaggaaactttacccagggtctctgggtctggaaagaaaattgaactctgggagttccaaataattctttcctcctcctttgcccccttctctccagtaactgccatttccctgaagttccttcttttcttggccactgggacgtgtatcatccacttgcttccttaaatgatcttttctggaccctgatgcacttttgagctgacttccaaaggttttctcttctgtggttaaatggcctattgttttcatcatgcatccattcctgtgagaaccacaaattgaaagttatgggattgagccactctgctgagtattggcaggcgattggaaaaagggagaattacacataaatgtaagccatcagtgaattactctaatggaaaggataagacatgtttatggatagcttgcatgaagtagagtttgcagaatttcaaatagggcattatagagacaaaggagatgttgttcccagtggtgtctatgttttagtaggacaggtgggtagaagttgaattgcaagaaggtggaagtaaaggatcttttcctcttgatgcacaagggaaagaaaggaaatttccatagaaaataatggtttgtagaaaatgtaattgtttactgtttggcaaaagaatataaaaccgtgacgttatcacaacatacaccttagatccatttaagtcaggataaacacacattttttcacatagtagaaattacagtgtatattcagttacgcatacacgtttttcatgtggattccacgttgtatataccattgctcacttaggttgctttacatttcttagtattaaagatacaattataatagatttttttcaagttaagtgaaaactacacattttggggattgctgtattcctggatatgagcacctgctaggctctgaaagtttttttgtttttggtgactagcaacaattagatgtatgagtttaattgcatcttgaaagtattggttatttacatgaaaacttttgctcattatttgttgaaagattatacactaaaattattctttttttatgaaagaagttgaacattttttcgtaaatttggtttttctcttatcttcttgtaaaatgtctgtcatttgtacccagttctctcttgtgtgttaaatattttcttaacagtctcagtgactgctatgtatataagcatactaattctgtgatatattgtctcaaactattttcacatatggcaataagagttttaattttaattaggtcttttaaaattatgacatgtaaaaattttcaatttttatatagtccagtatattatttctaatgtgatttctcctatttgtgtggctaacaacttgacacatatagttctatttcatttttaatgactatttagtattatatgaatatatataatttatttaaattatttactgttgagtatatttaaacatttaggaggtcttctccagttttcacctataatcaacagtggtccagtttgtacatatcttcttgcttacatgtcagaatatttcttgaagatatatgcttggaaatgaatttgcatggtcgaagtatatgtatttttaaagtgtcatggatattttgctgtaccgttggtaaagaatatatgagaatactgtttctagacatcatcaccaatatgggtattttgtagtttaaaaaaaattttgccaagctgctagatgaaaaatgttttatttaatttgcatttccccaactacttacgatgttgagaatatgtgctcttaaatctgtttagagtttgtattctattcatagtgtgtttatactcattagtcacatttctattgggttgtatattttcctgtatttatgcaacattgatatgaatgctattttttaataagtttgataaaatttttccccaattttgtgtggtctagaagtttgcatatggtatttcttactatatagtagcttaacttgggaattatcttcatttatagaagcacgtactttgttgattttttcatttgtttcactcctatctcttaaaaaatgaatagatgtatagtcccatttgaatcatataatacatttgtttgaccttctgtaacttaattatttctctctcctttatcaccttccttccttttctttctttccttctcatttttcccttctttccttacctttctcttctgtattttgctgtgtggcctgttttttgtttgttttatttacatatttttattatagaagagtacacataaaatttaaccattttgaagtgtacaattcagtgacagtatattatgtgaggtgatatggtaattagcttgattgtggcaaacatttcaccatgtataagcatatcaaaacattttataccttaaatatatacaatttttatttgtcaactatgcctcaataaagctggaaaaatattgccaaaaagagagaaattgcaaggcttcattatagaatggccagagaattgaggatgttttcaggcttgtggaagtaaccaggaaaatgtgaaaataattgttttttttttttgagtcagattctggctctgttccccaggctggagtgcagtggcttgatcatagtttactgccacatcaacctcctaggctcaagcaatccccctgcctttgcctcctgagtagctggaactacaggcacatactaccatgcctggctaattttaaaaagttttttagagatagggtcttgctatgttgtgcaggctatgttgtcctggcctcaagtgatccgcctcaagtgatctgcctcaggtgatccacctcagcctcccaaagcactgggattacaggtgtaagccactgtgcctggccctaaatgtaatagtttttagagctgtaaaatgtatgttgatgaattcaccaattagtgaattaattcactagttttccttttggcagattcctttttcctagcacacgaaaaaggaaatatgtgttttcttggtatctttcaggccagcgatctgtacatgagacccaggaattatttccaaagcaagattcatatgctgaaggggtaacagacagaacctcaaacactaaacttgattgttccagtttcagagaaaattgggattctg

SEQ ID NO: 8031 - DNA, 601 bp, mus musculus
cctcctcctcccctccctaccttaccttactctttcttcttccccttacctctccctccccctctccctgccttccccttccctctctttctctcctccccttcttcccctcacctctcgctccctattcccttctctactgttctcctctcctctctttctctccccttctccttccctcccctctcccttcctatctccctcctcctcctctctttcagtggctacagcaaaccaaacagcccagcagcccagcagcccagccatgtgagtcccttgggattggtatctggaaaaggaaggaaggtgggacgtggggatgaagaacagactgggtgtgtggggtgctggctcctgggaacgagaactactgatagggctgggtctgtgtgagaagggaaagcggcagaggaaggatacaatgaaagaggaaggggagcattggcatccctgactttccctccgcctaccctacctcccaagctgaggcttttttcttcctctcctgtcaggcggcgcctcacagtcgatgactttgaaatcgggcgtcccctgggcaaggggaaatttgggaatgtgtacctggctcggctcaaggaaa

SEQ ID NO: 8032 - DNA, 601 bp, mus musculus; identical to SEQ ID NO: 8031

SEQ ID NO: 8033 - DNA, 76 bp, mus musculus
atgctaattaataaaagctgaatcatttcataccagctcttcatagttgtgtgagttattatgtgactgggtagaa

SEQ ID NO: 8034 - DNA, 76 bp, mus musculus; identical to SEQ ID NO: 8033

SEQ ID NO: 8035 - DNA, 674 bp, mus musculus
atccggcaggaatgtttgacatgcagtggtgctggagggagggagtgtgtaattaatgatggttattaaataataatgccagcatcttgaagttctttcctctccacagcctcacaaattagacgccttcgaaatgttgtgcccgtcgccaagatgcacctccatctggggtggaagcaacatctgctaaacagctgcatcttgtttaagagctggtacttaattcaattattcagctctgataggggcaggcagagctgagcggaaggggcaggcccagtcatgggcatatgctgctccacgtcttcccaagttgacccaaactcctctcccacagcgtccccactcgcatctgttgattcaaccaacctagacatctgtacatttccagaaccggccatgctcactcatgctgcctccttgctttttactcaagctgtgtgcccctgccaggaacactcttctgctgcctgtccaactcccgtgtccttcgaaaggcccaactcaaacatcagtatctcctccaggacagagcatagggaattacctcccatgagctctctcggtgcttcatgcattccttaactggagcattcataacattacattgcaattttgtgtaccctgctgttttgtaagccccttaggctgggaaccatgtgtatttcattctt

SEQ ID NO: 8036 - DNA, 153 bp, mus musculus
tacatacaaagatctaacatgccatccagggaccattttacccactgctttgattggttgccaatctcttgtctctctcttcagcaatggtgaggcagataccttttccttggggaagagaaatccatggtatgttgcccttgcaaacaacaa

SEQ ID NO: 8037 - DNA, 284 bp, mus musculus
cgccttgatatggtctgtcatgaggtcccataattgtggcttgccagtgaaacatatcatccccaactggacctgcagaacattgtgctggagggtcacgggccaaatcactaagttccttattaatccgtttcagcgccatagtgtgtgcttgtcgtctggctcctcactctctcagtgtatgctcaaaggtccggccaaaactcttgattatcctggcggcggggcaggattgtctcgtctcacaccagctctgcccacggggctctcttgagggaagatat

SEQ ID NO: 8038 - DNA, 1029 bp, mus musculus
ctaccacctgaattctaatctgagagctgccgtgtgctctcccccagccttttccagtatcctgtttatgtctaaatccaatagtccagccatgccagcttgttaccacatggaaaactccactgctcagagaaagttatgaatccctatattctttatgctttaagattcactatgacatctcaaagtaattggccaggtaaacctaccagatggtttttgggggatgaggaatagactaataatttccattagcataatattgttattataaagatttaatgacttcactgatgtggtgtcctgtcctggtggaaagtttatgagccagaaataaaataatacttatgggtacccatgaggctatttgaaagaagtagtagagaggttaatgagatctcaggtccctaaggctcctaacagaatgttcctatttgagctgagctaagtgatatgagaagcacaaggcaggctgcacagggggcaagggaagctcaatgccagtcgtgcgtctgctgcaacattgcaaattggaatgagggctctgatctggctttggactgcctggatttcattcctggccccattgtgcactgatgtgaacaccttgggcttgttacttaagcaatttgtgctgcaggttttcatctacaaaatggatctaatagcagtatgtaatcagtggttgtcttgaggaatgaggcgatcctcacaaaagtcttagggcagtaccaaggacatagtaaacatgtactgcatattcaccgttattatttttactagttgcaaatcatcagcctgtgctgaaccttaatttcctaatcagtcaagtcaaagaggttggcctaattctgaaattctgtgattctataagccagaatcctgatataattaaaaactattctgttttgaaatttgaatgtgggctctgttctttgcgacccatcaccagactttggaaacaaagtgtattgtacaacaagtgttaactattagaatcagagttctggggaagggccgttgagtgag

SEQ ID NO: 8039 - DNA, 1719 bp, mus musculus
atataatgacgtgaaacaaacttcaccacaattttaagtggaaaaaaacaaaatgcactactacatatattgtattgttaatatgtgttttgtgaaatgaaaacatcatgcaggtatatttaaaaaaacagaacaaaattaaaaagttaggcaatctctgggtggtggaaatatggatggcttttattttgttacacttttccaaattttaaaaaatgtagtaggccgggcacggtggctcacacctgtaatctcaccactttgggaactcgaggtgggtggatcacttgagctcaggagtttgacaccaggctgagcaacatggcaaaaccccatcactacaaaaaatacaaaagttagctgagcgtggtggcgcacgcctctgatttcagctactcaggaggctgaggtggaaggaatgtctgagcccatgaagtggaggttgcagtgagccaagatcgcaccactgcactccagcctgggcgacagagtgaggccctgccttggaaaaaaaaattagtcaatgatgtgttgttttatgaatcagaattaaaaaatccactattttacaaataagcagtgatatacatttaggttgtaattattcatttatgtaacaaacattcattgattatctcttgtgtcaggggctctgccaagtgtatcagcagtgactcttagattgcatgcaaatgaaagaaactctgcctaactccagcaaaaggaatttactagaaggatattaggtagctaaaagaattgccaggaatgtggcgggggatggggaatcccaaacacacgcacgcgcgcacacacacacacaccccccaaaacagcttggaagcagatgaagctagtcagttccaggtctagatatcaggcactttggaaacagactccagccaagaatgacttgttcagagcttgaccacagtccactggctgctatgcttggggttcttcccccacacccagcccactgggcatgggataggagggggggtgccttgattagtaggcccactacccctttccaatgaaagaaacacaagagatgtgatgggtgctaaaaagccaaaaccaaaccaaaccaaaccaaaaaaagacaacagaaatgcccattaccctaggacttaggggtaaacagggttgaataccactcatccctctctttgcatcccataggaaacatttgctatgacatgggagtttaacttaaggttcatggtctaatgttcactgtgatgtgcatcattgaaggtgcaatgtgggtgccccacacagaaggtacattttcctcttggagccagtagtgacatgttgggaagagtgtggattttcagcctgatccttatataccggcaggaattttgaaagaaaggtcccattttctcaggtaagagaaaatcctagaaaggtataatctgaaagaaacaatgaagcagaagcaagaggtataatatggaaatagatcaggcaccaacacaggtctagccttcttttctgaatgatcttacattcagcaagcccaacagtcatgtttgagtttagttcaccatgaataccagcctcttggttcaattaactttggttgataaagttattattaactaaatattaaaagatcatacttagatcagtgcatattcttactgcagttctcatgataaataggaaatgtctgtggctgtccaggtaacttaacaatcatgttgttgc

SEQ ID NO: 8040 - DNA, 236 bp, mus musculus
atggtaaacaacattattttattttaaagttatccaaagaactgctcaacaatatgaacaacaatatgaaaatacatagtacaatggctgatttatggttacttcaaatttcttgtctacaatgtaaatgcctaagtagctttgataatacaaaccaaatgagttcaaggatacctataataaaagatattaatgtgatatagtttaaatatcttgtgtaaaatacttcacttaca

SEQ ID NO: 8041 - DNA, 1856 bp, mus musculus
ttaatttgttcccagcggcagttcattaccaacatcacaagcaaaacatgcgctctccctgggcattgaaggtccaccggaaattaagcagacggggctgcaaagcacctcagagtgaagccagccagcttcatctgctgcagcaggctggaggcaagcacaaggagcggcaggaatgaaaggcttcagcgccttccctggtgtctctgtgccttctgagttttcagctgacatggagcagtgattccctgaaaaggatgggatcttgctccctcaaagatcagccttctttgatgagcctgctccaggtggagtggagcaaccactttagctttttagtgcagagaagacttaggaagtttcattttccttgactggggttctgctttctgtactgacccttcctggtcagtggggagctcggagctctgagttggagcaccttaccaaaatcttctctgagtggggttaagtaagccagcagactctgcaagaacagagccttgctgaatttagctttccagaaagccctattttaagggaactcagtatttcagcaagatgctggattagggggagaaaacaagtagtctgttaattctttgttgttgtcagcagccttgcaggttcctggaccatgacacatcagcacagtcctaagtaacagaagactcaggtcctcaccatgacctcaaacagcatgatctctgtgaatctcagtaaatcattctgagcttcactttccttgttcacaccatatagctatttatatctgctccacatgatgggcaaggtcactgggaagtgtagattatataaggcatgggaatggcttcacaggttcatgtgggacatcacatggtgaggcacagagatcagaaggtttgggttcaaatcagctctgccgagctggagaaaccatgttagtacttgaccctggtgtttcaaactcaaaatcagaataagattagggataggaaaaagaccacacgagatacttctgagttttaaatgatttatttgaatgaggtcaactttcgttcacttctaaaggaagatagaagtgtgagttttgtaattagcctagagaaccgggggagcaagaccctactgaacaagcctcctccagagctcgccccaaagtctggagtgcaaaatgtccacctcgttatgattaatgaagcctctggatatagatcagaagactagaaatgtctgtgaaaggagctcttccaggggctcagccaaaaccaggagaattgccctcgactcctctctttccttgtttctaagccatcggcaattttgctcagctccatcgtcaggaagtcccaaatcagaccactgctccctgattccacagcttccgtcctggtccaggctccataatctccccctgaacctctgaaagagcctcttaagcagactcctgccgctccccacccttgcttctcttgtctgtttcttcaagcagccaaagggatccctgttaaaatgttaagtgcaatctcatcagcctctgttcaaaaccctcagatggctttaagcagagtaaaatccataattctcaccacagccagggggaccttggtgacctcattcctccatgagggtatctccctccactctcctcatcccgttttctgttccagatgcactgaccatctagtcctacctgggaacatgaacaccaggaatgctgctgcctgggaagactttcactttctgttctttctgcctgaaacactccttcctgggaatccacattaatccatattctttctttgctagagtctgactgaaatatcatctgtgcagagaggcctatcttaccaccctattttaaataatacatg

SEQ ID NO: 8042 - DNA, 351 bp, mus musculus
tttacataagtgtagtttgtacctctagaggcaacataaaaataagaacttccagcacccctgaacacagttgaacgtgtggacacgtacgagtcggacttctggtcccttcctttcatgttagagagccacccctaatttctagcctaccccttatcttcagccagaggaatagcagtggatcctttccacagcctacattctccagcagctgccttcattccggcttgaaaggaacactctggcagcccattggcccaagagtaaggaaatggttgcttagcaactgactcctgcccccaccacagtccctgagaagaggagctcttgggccaatcacctagtttctgc

SEQ ID NO: 8043 - DNA, 351 bp, mus musculus; identical to SEQ ID NO: 8042

SEQ ID NO: 8044 - DNA, 330 bp, mus musculus
cacataatgtttttaaaatgtataatttcattgttaacatttgagaaattcagtatattgcacataaatatctggattcccagcctttcttgaatagcctgaacgtctgctgacgcgagacacctatgcctgcatggcatcagttagctggagctgaatgtgggtgtgttgaccgcagtcgccatcacacccttttgtctttccctcaccgcactcctatgtatattttgccaatatggcactgtcagtgtttggtgtggtatccctgctgtaaatcaagctaatccataggcatcacttcatgtgctgctctttatttatttactgaaa

SEQ ID NO: 8045 - DNA, 401 bp, mus musculus
ctaaatattttcctttgaccaatatgagaaatattcccattgatatctctgtgcatttaaacaattgtgaaaatagagaactcagttatagttaaatgactgatgttctataagataactttatcacatagataaaataatgaagaaaagaaattaaataggcattcctctgagagtttctctgacaatcaaatcagaggttttgattgaaaaattccctcattaatgtagattgagtgaatgaactaattactttgtaatttgttctaatagaaactttccactgaggtgaggggcaaggggaaaccccaccgtcttcactgtcatggaaaagataaagaagtaatggatctttgaaatatttcccctaactttcaaaaccttagcttacagtgttggag

SEQ ID NO: 8046 - DNA, 1056 bp, mus musculus
ggagacacagacaataaataatacccatagtaaaaagcaaattatataatttgtaggaaaataaggactatggaaggaagaaaaatttgggtaaggaggaccaggagcctggggatagggaggtcagggagggcttggctgagaaggtgacatgtgatgcaactgagggatgtgagggaattagccatgcaggtaggggaaagagcatcctgggaagtggggacagagcacagacatgctggagaaacagcaaggaagtcagggaggcggaaacagagcaagtgaggagaagatagtgggaggtctcaccagagagggagccagaccctgttcaataatgcctcgacttgagcccagcatgctggctcacacctgtgatttcagcactttgggagcgaggcagtaggattgcttaaggccaggagttcaagaccagtctgggcacaatatcaaaaccccatctctacaaataaaaaataaataaattagctgggcatggtagactggacttggtggctcacacctgtgatcccagcactttgggagctgaggcaggaggattgtttaaggccaggagttcaagaccagcctgggcaaaatagcaagacctcatctctacaaataaataaataaattagctgggcatggtagcacatacttgtagtctaagcaactcaggaggctaagatgggaggatcttttgagcctgggagtttgaagctgcagtgagctatgactgcactccaacccgggcaacagagtgacaccctatctctaaaaataataataataataaattcattgaataatgccaggagtttttctctgagaggagtggataggtattacagggttctttgatggcaaagaaccgaggaatcttattatccccacctataggaaaagcacctagggaggctggctttccatgcagaggaggaaccaccagggggcggtgcaccgcaaagtcgggctgtggtggccctgcagatggcggtgaacgggaggagcaggctggcttttccaggctcccgctatctaataagtgaatagcat

SEQ ID NO: 8047 - DNA, 1056 bp, mus musculus; identical to SEQ ID NO: 8046

SEQ ID NO: 8048 - DNA, 1098 bp, mus musculus
aacactgagttaggctggtgctagagtctgtgctcttaactgctattctatggcatttttaggcaagtcaggtccagtccacctgtaaccctacacatttcacatacatacaaacacactaataaatatgagaagtagaatctgaactgcagaaacgttgtgtattttatttttattatctgtatttttgccttatttcctcacttgaattcaacttctttcaccttgacacactggagagccagagatagaaagacccctcacatatgccagccattgagatcattaggatgatgaacaggacacaatttttatggagagttgtgtggtcaggaggagagttgcaagaaccaagaattatgtgctaggaaatgtgtgttaaagtagagatgtatacagagtgctgtagaaacatggagaaagattacttaactctgatctgggcaagggagagggggcaggaatatcagacaaattttacagagggtgttttgaaggaggaataggagtttgacatgtgagaaagtaggatacggatgtcagtaccctatgcaaaggcactaagacctgggcgaggttagcattctgagtcagtgaagagggtgcatttgaagcatgacgccagagagaagaacagggtggaaggtccagatttcatgcagagtcagcaaataggagtaccttaggtcttgacgtcataaacccaaggatcagacaattttccagtgtcaacaaaagccaccataactgatggaagttaacaagacagggtgcagagaggtatgtaaaggaactgagaagacaagacattggtacaagccagtctccagtttcctctattttcccttggcccaaagcactgtcactagaagatttcatgtgataataataaattttctgtgaaatagtagaagcattatggaggagagcagattctgtgcgaggtatccacctaagacatgcatagccacagcactttgttccctgaaactagagtgaataaataggatgcctccagaaaacaaaaatcatcttcaacaagatgccttttacctatttcttgtcccttttatataatttctggcatatgtgtctata

SEQ ID NO: 8049 - DNA, 1098 bp, mus musculus; identical to SEQ ID NO: 8048

SEQ ID NO: 8050 - DNA, 614 bp, mus musculus
gccaaataatatgttgcattttaattttttttgcagtcctcagtgaatttttatgtgtctctctgcgtgtgtggcatgtgaaggaacacaaagttagaaataagagagggagacaacctgtggggtggccacattccagggtctgatcctctttggggatactgtgatatgctgcccagatcctcccatcagtgctaaagaagacagccaagtgggagacagtgaggcaacctaaatgttctcaatggcaggaaaccattaccagccctggaatggaaaaaatacagggggtggtgctgtcacctgcccagaagccaaggtcattagacaggagctgagaccatgaagggatgaactgtcccatgtagactggaacttcagaaaaagtacagccattgccacaggtgcccctgaaacagaaagagagaggaaaaaacacccatacatattcccgtttataaattgccaggcttctgtcagttattcatgttgtaacaggaagctacggggccatgtcaccagggacatgtgcatccctggcacacaaagccgaacagggcatggagccgagggtgaagagacaagtgacaggcaaatggcacctgctcagtcaa

SEQ ID NO: 8051 - DNA, 614 bp, mus musculus; identical to SEQ ID NO: 8050

SEQ ID NO: 8052 - DNA, 706 bp, mus musculus
gcaggtgagcagaggtctcaggaatctgcaaggcaagaaagagagactccaggatttggcatgatctggacctgtgtttaagtctcagctctgccacgaactgtgtgacttcagggaagtgactttgatctcccacagccttgatttcttcatctgcaaaaatggagataaagtcgaatacgacggtatgacgttcatggttatgtgtgtgaggtgtgtgagcgtgtaaaggcctggtgcaaaggagacatctgtaggaagcggcagctatgactcctgctaggtggagactattcactgcacacctttttatctgcactaaaagatgcacatgaggctcttcattaaaacaatgaggcagccaacatggaaacttttctaagagtaagctattaaaatagatcaatcagctaatgacacctccagacaaaatttgtaaaggtttggaactaacattccctccctcctttccttccttctttcctttcttcctaaagccattaagcaggactgagaaaaataggtgtttgcattggagagaggatggtgctgaggggtcacagggtttggacagagtcggaagggcttctctgtcccagactactgtgaactaaagagacacaacaactgaatgctgtatgatcctagattgctattaggttattcttgaaaagtggcgaaacacagatgtgatctgtagcttaga

SEQ ID NO: 8053 - DNA, 706 bp, mus musculus; identical to SEQ ID NO: 8052

SEQ ID NO: 8054 - DNA, 2586 bp, mus musculus
gtctatctttcagaacccatgaccatggctggaatttttagtgagcaccttttatgatacagtcactacgctgacactacaatcatggcagcagtgattctcggtctactgttggtggaattgacagaattacggaattgttaagagcttagcagtaggccaccaaaaaatcgctacaggaaaaactcagtgttcttttgaaaatggaatacgcttgccaccaaatttagctcccttcatctcctacagaaggtatcagcattattatttgaggaggcaatacagaaagccaacccctttgtcaaacaaagccagatacttaatagtttaaggataataaggttttccaaactgctgtaccactgaagtgtttttcccataataaacaaggttggatgagacaaaaattatagataggacagtcttatgctgcaatgggcaaccgcaacacaaatgcttcagaatagcagtgaagataacgtgaaatggccaggtgcagtagctcacgcctgtaatcccagcactttggggggccgaggcaggcggatcacctgaggtcaggagtttgagaccagcctagccaacatggtgaaaccccatctctactaaaaatacaaaaatcagccaggcatggtggcaggtgcctgtaatcccagctactcgggagaatcgcttgaacccaggagatgaaggttgcagtgagctgagatcatgccactgcactccagcctgggtgacagagagagactccatctcaaaaaccaaaccaaacaaaaaaaaaaaaaaaagaaaaaaaaacataatgtgacatgaatctagccctgctagatgcagtttttcatctctaaccaattttcatatcttggcctggccctcttgtgtttctcccccaacattcccaacatttctgcccctgtgccttgcattgaccaaaggtgccaacaaagattgcttaagtgtactggtggttctcggggctgaaaggggtaatggtatcaatttaagttgttctcgccaagactggcccagctgtggggttttgagaacgaaactgcctcagtttctttgtttagaagatgtaaatactaatacgtgcctgaactctcttacaaatgtaaacatgaataaaatgccaaaatatgatactttaacgtttggaaaagcacttggtaaattattagcatcagattatgctatttggtgctgttggcaaatggtcctttctctagctgaggctgctccaccaaaagaagaaatgatttttacaattagtaaatatgaaattttattctactgaagttgatttaaactttgccctcaaattaaggacccgtgaggttaagagaaattgttttgctataatttagagaagtgggaaatttgaggtcttaaaattaaaacatctacacactgacaaaaatactgatggcgtgaatttttaaagtcatcttttctctgataataaccagcgtatctgtaaagaaaaaaggcagtacacttctctctacttcttggttcacatgtatagaaggacatagatttgcaaggagataactataccaatatgcacttcccttccccagggaggattatacttcctcatcttactgaaattggatatggctgtgtaatttcctttgttcaatatataggcagaaatggcatgtgtcacatcaggcagaagcatgaagactcacgctctattctttccccatggtaataaccagcaatatcccagacaggctgacctgtcaccatagatccgggagtgaagacatagtggagtttcaggcaaccccagtgagaaggtgtcatgactgagaaatcaaactgtgttttgaaatttgggggtcatttgttaccctatggtaacctgtcctatactaactgatacataggccatcaacatttaagtaaaaacggtaagaatctaaattatcctcttttccaacctcttctttggtgactctcaacttggtttaagatgctgccagcatattggccttctgtccactgctacaacacgccaggttccttccatccttaaggcctctaaacttgaaagctctttcttcccattctcatgggtctggtaccttgtcatccctgagatctcagctgtaatgtcactttctagacatgccgtccctaatggcccagttgaaaatagatcccttttccctacttgtgtttgcctatctaactcctgtttgctacttcagaacacctacaataattttgtaattgtttatttgtttatagggcagagataaaaattatatgtcacaactcagatgtataaaataacgtagctgctctccaacccctgacacccccaccaaaaaacaaacaaacaaacaaacaaaaaaaaacccaagcttatcttgtttccaagctctattcaaatggtcacaggggattgtggtaaaataatttaaatttgtcaagtaaagttatctagtcatttccagtataaaatgctttggaataaagatttggtcagattcaaggtttaaactccacactaatgctatttcttgccacctaaattttgtgcccttctcatagataaaggcctttctttct

SEQ ID NO: 8055 - DNA, 1553 bp, mus musculus
ataaacacaggactaagtctcaacaattagcaccaaatattggcactcttagttcagggaatgaatcactataagataataattttaaaaagcaacaaataaaagcaagcagaattgtggcaaacacgctttgttgcagcgaaagtgtttagaatttaccctagactcgccataacgtgcaaccaaagaaacagcatgccaacattaaaccatgacatctccctggcacatagacaggccattggccagatggttgcagaggtgaaggcactatcccagtctagtcctaagccaaaagatgacttagtgagagccagtctcatgtctgagaggatgaagatctgatctgaggaagaaaccttcctcttctggcccaaccacagatgtctggcattcttattcctgtctggctattaaaggcagaagttttcagtgtgattgtattcaacgtgtgttcactaactacaggctaggggagtcctaatctctctgctttgaataacttgctcaaagctcaaaatcccatgggtaacatccagctggctggaggccctaggccacatgctcaattctggcggctaagatgaggagagagcaagcatcagactgtatctcctttcttagtgaaaagtgggctctgcctcttgtcaatggaacattctccaaaactaggagatgggctcagtacagggcagccaaccaatgacctgtatccaccataccatctttctcctccctgcaaatgccagctttgtctccttttcaggatctttgttcttgcagttcccactgctagcttctgtcccccatgttaatgtggctggctctgtcccatccctcggttctcagctcctcagaccacatagaatacctgttctccctgaagcctctctgaaccacctctccctttctccctttctttcctaactcatcagtccctgacaattaccttgaacattgctttttcctcatgcattgtacatcttgatcattccaccagtatggaaactccataaggacagagagcctggctgtcctgttgctcagctctttccccagtgtcctgtctgccatgatcacagctcagtaaatgtttgggaagcatgaatgaacttaatggcttcaagactctgccccaacattcttttgggtcatttattgcagacgcatctgcttccatttctcaggcaccaggattctagtttaatgccctgacttaacatttgcctttagccaccaactggatattccagcttttatctaggtcttctccatccctcattcttttgagtgagtaaacctccactccagccattagcccggagatgccagcctcaaccctttgagcacctattttatccagttccacctcagtgttgggggattgggaggggtgtggggaaagtgaggaagaaggcaagaggagacacttggatatgaagtatgactagcttcaagaagggacagatttgtgagtgggattaaggttaggggacagatacagaaaagcaatgtgcagtgtgcagggactggggcagggccctagaggaaga

SEQ ID NO: 8056 - DNA, 1271 bp, mus musculus
ctgaaggaccgcgaggcttcagcatttcttcacatggaggtgatcattcccctgccagcctcccctggtcattctgaggacctggcagctctggaggaagcttctccaagcccaacctcccatgggtcaggggagccttcggagctcagggagccctttcttagacatgtccatctttcgaaagccagcccagagcccaaggaccaagtagggtttgtggtgtcccctgccacaggaggtgagcgcaggcctcctcccatcaccagcagaaagcccagagtagtccctgaagaagctgaggggcgcatacctctggggtttgggttcccttcagggaagcgaagggagatgacctctttccaggctggggaccaagagggctccctagaagatattagcaagacctcagtggccaacaaaattcggatatttgagacccacggagctgaaactcgccgaatgagtgagggtgaagcaaggtcccttccaaatgacgtatcttcagaggcacccgtgggacaagcagagcagcagcggagtacgctctcagacctgggcttcgcccaactccagcccccaggggactttgccagccccaaagccacacattccacagtgatacctctggctaccagacacttcagggaggacacttctgcatcctaccaggaagcacacacggaactagagcccgtgtcccccaattcaggctgtgaaaccacgctggcagaagctactggaactggggtaactggccgcgtgagcccccgcccccaccgctgctccccgcccatgggggctggccgcatgctctgtagtttttagaagcatgtttcagtggcccctcgtcatttctgcaatcagaggctgcttatccatccctgtgagttttttccctaaacgggcctgggtgtagctcaggctgaatgatgggcttctctgcttggcccatgttagcttggccacaaagaccctcagcttttggtgtgacctggtgcccagagggtcacacaacccccatggagaaggtggcgccaccaccagcaaatgacacacctgctttgccttgccgctcatacccgctgggttcctgcctaccttgcttggcttgtccagcgatctttcttcatcctttcccatccctggttctcccgccttgggaaagttgacagtccagaggtttccatccttcacttctggttccctctcagtcccagtgccaagtttctttctgcctccttaagactaactgtcttctctaatccagaaca

SEQ ID NO: 8057 - DNA, 1271 bp, mus musculus; identical to SEQ ID NO: 8056

SEQ ID NO: 8058 - DNA, 1271 bp, mus musculus; identical to SEQ ID NO: 8056

SEQ ID NO: 8059 - DNA, 1262 bp, mus musculus
tccctgggagcccccccacccaccgcctctgccctccccacgtcgagagccgttgcccgtcaggggaagctgcactcccacggcccatacaagtgggaggcctctggggaagcggccctggacattccgtttgcctctctggaggggaaggggtggcccagagcgaacccccacaccccctctcccattgcctgctcaccccatcacctcccctccctacaaggccctctgtgcagcccgggctggcacagcaaggaaggggggctcaccccagagcgcccccgcctgccagcccgtgggtcgaggccaaataaggccggacggcagccgagggcccccgcaccccgcccgcggccccgccccgcgcacattcttctgccttgtaaggcccggccgccacgccccgcccccgcctggagtccagacccgacggccggcccagttccacgcacccagcgagcccaagcgccttctccgcaccaggtgggatccggggccccgggggtcttgaggacaggcctaacggcccagggctggagatgagaggtggcccgggcccgacccggctgtcacggggggcaaaggcgggccccacggactgggacgtggtagggtctgttgggcacggactgaggggtgagctggggcagcgagtttgctgggggccgacagggactctggccaggggccgggcagcaggaaggctgttctggcctctgagaagcagtggtcctgcggcaagggaaggccatcgtccaggccctgcccctttgctgaggagctggagatgccaagcccagagctccggggggggctggggagcccgggtacaagggtgctggggagagggttgcagtcgtcagttccccctggcccagtaaaggcatgtgtgtcacagatggagaaacagccctgtgggactccacgcccccacagcatctgtgtcccctccccatctcccatccctacaccctgggccaggggaaagggaccgagaccagggggcccttccgacacagccagtgctgtatgcagggacccgggccttcccctctctgggtcatctcgcctgtgggtggggaaggtctgcggagggccctgatggactcacccctagggggcaggacgaggactagtggctgggagaacctgatccctgctcttcccagccctccagctgctctaaggaggagactcagatgaggtgcactgagaaggaggcatctggcctgcccagctccaggggctggaggtcatggggg

SEQ ID NO: 8060 - DNA, 1433 bp, mus musculus
ccagcacctcctacttgggagaaaagtgagccatctgctggtcaggaagtcctccagagaggcagcttttcccacaatggtggcaggaaactttggggaaagcaggaatggtgtccactgctgcggaggaactgccttcagagaaggtggggctggaaaagggttagaagcctcctagctgggattgtctttgtttcacctttctttaaattagaattacagaagcccctgcccagtgaacagataacgattggtcttatgctcctccctttcccccattttttcttttgctgttttgttttttgttttttgtttgtttgtttgtttttttgagacagagtcatgctctgtcacccgggctggagtgcagtggtgcgatctcagctcactgtaacctccgcctcccgggttcaagcaattatttgcctcagcctcccgagtagctgggattataggcacccgccaccatgtctggcttttagtagagacggggtttcaccatcttggccaggctggtcttggaactcctgacctcgtgagccaccacgcccagcctcttttgctgtttcattgctgacagtgttcaacaatatgccccatctttatatatcctaagaaacactaatcctaggttattgctagccaaaatatttttgtcctgagtagtgtcactgggccaaaagatagatcaggacgacagcctttagttttcctgaaatcaccaggtcaggcacaaggagaaaaggttcctggatactgactaacttgggtgggtggatctagccaggagaaagacagtaacatgtgttctgtactttctgggaagatccctgaagccatcacagaggctccccaacttctgagtcgcccatctgttgctgtgggagtgtgaacggatcgctgaaggagagggagctttgctctctctaggtgggcaagtttcctgggctctctgtgttgcctccctctggcttcttcctcccgtgccctctccccgtgtgccccagggggatcagggatcctcaccctcctgaggcccagtggggaagaatgaacatggcttcatccaggttaactgatgctgccatttgcccagcctcttccatcccagccctgtcagtgagcccaggtctggtgcaactgctgcaggatgcctgtagtagggaactctggaagtgtattgggctgaggtgggattttccctccccacagtgcactgagcaatggagggtggtgagggagccatgctgctgaattctggttggcatttccccattatgtaaaatggggtgttgggtagggcagactctgcttgggtttggttgtaagataaacctggaggagaagcacagttgtcccattgaattatttgagcaaaaactactgtaaataacttttttgtcttttgtcaaataaaatttttttttgttttt

SEQ ID NO: 8061 - DNA, 1433 bp, mus musculus; identical to SEQ ID NO: 8060

SEQ ID NO: 8062 - DNA, 1433 bp, mus musculus; identical to SEQ ID NO: 8060

SEQ ID NO: 8063 - DNA, 1433 bp, mus musculus; identical to SEQ ID NO: 8060

SEQ ID NO: 8064 - DNA, 2497 bp, mus musculus
tccttgtgattttcttagtccaaattcctaatgtcacacagagagggtctggagagtgggtcagtccactatgctgttgttctttccactaccacatggtgtggctgttgacccgtcattctgcacagcccattgtcctgtgtagtcacctgtccactaggactgttgctcccgtcactaccacacggtgtcgctgttgaaaagctagcctgcacagcccaccttccctgccccacacttgggctccccgtttcatccatgttctcctgcccagccattgtccccaaaagcagaacaatgggccaggtgacagagtccattggggttttctgcttcagtcacatctttgggtgcaattagcacttccccatgactctcccagctctagtgtggaagccagatcaccaacccagactgtctttggaattctggggagtttccttgggggctttgggccatttcctgccatgggacatcagagggggctatctcagcccatgagatggggttttatggattgtacttcagattgattgaggagtcctggaaggcctttctacactgctgacatgtgctctgagaccataaggatgagcaacaacacactggaggagttcgatgcagacggtggagtgggggaccacatgaccagatttagtttttaaaatgttttattgtgacttctgaaagcatcagaaggacaagagggcaagggatgagcacaaattaggaatgtgttgttattcaagcttcaaccagattggtgatggtaaaattgaagagaagcatttgtagcgagcaaaagcagataaaaggtatttattttatttataaagaaaaatgtacacacttctgctgacatcattgattctctgtcaaatggagttaaaggctctagggccacacaagaagggagggccattgatcaaacactctcaggagtcaagcaaagggcatgaatgatctaatttaatcctgatagcattcttcatcccccaagatggcaattgctcaaacttttttggttgtttgtttttgagacagagtcttgctctgtcacccaggctggagtgcagtggcacgatctcagctcactgcaacctctgactcccaagttcaagcgattctcctgcctcagcctcctgagtagctgggactacaggcatgtgccatcatgcctggctaatttttgtatttttagtagagatgaggtttcatcatgttggccgggcaggtctcaaactcctgacctcaggtcatctacctgcctgggtctcccaaagcgctgggattacaggggtgagccaccgagcccagctgttcaaacattttaaattgagttacccttccctgatcacatagccagcaggtggcagagttggaattcccaccttatctattcccacatgtcagagcccatgctttttttgctcctccccgatgtcaaaatgttgtctgttctgggggacttggcacgtttaaagcagaacttctttgttctgtggcataggttgtacactgtaaaacataggttgtaccaggttgaggaaacaaaagtctttctctaatttgtccaccagtagtatgcatctttttctccactagccaggggctatggaggccctgaatagaacagaagagcagctagcaagggcggaaggaagagagagaagggaagcacagcgtgggatagactgggaggccatgaggactgttaagggctctaggttttgttccaaaagataaggcaagccactggagagttttgagcagaagaatgttacaatccaattcacatttgtaaaagagccctctggctgctggggagactagctggtagatatggacacacacctgccatcccccaccctcattctctttggagttaacccccttctacacctgccctctactttctgtaacatataggcaccccctgctccacactctatagaaaaaaaaaaaaaaatgcaattattaggttggtgcaaaagtaattgcggtttttgccattacttttaatgcaaaaaccgcaattactttttttttttggagacagagtctcgctctgtcacccaggctggaatgcagtggtgtgatcttggctcactgcaacctctgcctcccggattcaaaccgttctcctgcctcagcctcccaagtatctgggattacagtctcacaccagtacgcgcggctaatattttgtgtacatatatttttaaatatagacagggtttctccatgttggccagagtggtctccaactcctgacctcaagtgatccacccaccttggccttccaaagtgctgggattacaagtgtgagccactgaatccagtcttggccgttacttttaatgccaaaaaaaataattacttttccatcaacctaaatctttcttggacctgaagattggtgcatgaaacacattgtgcctgcgaacttctctctaatggctgaggaaaggcagttgcttgggggttagggtttgag

SEQ ID NO: 8065 - DNA, 969 bp, mus musculus
ttacgctccagactatactaagcattttgcctgtattatttcattatagcctcaaaatcacactgtggagaaggtactattagcatccccattttatagggcagtggagacatagaaaagaaaagcaacttgcccaaggcccaatgtgagtaaaaggtgaaatgagaattttattccaggcacttggaatctagagctccacactccactgaacgaatgtattctgtattctcgattatctcattttacttttaaatttctggtaataaactatactatagttttatgctcctgtaaggtatcaactaaagtgttaaatagaagcaaggtatcaagattgaggccttccatcatgagacattattgaaggtgcatcttcaaaagtttttgctttggggaaaactttagtaattacagtacaagacaaataatttaaaaccccaaaagctgtggatatgtaagtgttgagctttatttcttgtatttaggatggagcttcattccagtgtgagaatttatgccttggtgcgctgaccactccataaatctaaataaagcctcacaatgttccatgtactatgacaggtgggggatgcagagaatagtgagtaggagcataaaatctggagcagaaatggctgcatctgaatcctggtactactactgggtaagactgggaaacacactttcatgttccttgctgtcaaatggaggtaagatggcacttgtagggttgtagtgaaggagaattaagaacaatgttatcttccacaattattagacatagtttaattaccaggacatagtgcctgctattaaactggacatgaatgtgaacaggtggatacccagatataggtgtgaaaagagaacagggctttgacacagccagtggccagatttaaggaaaggtgtcagagacagtggggtgtaaagctgaattctcaaagatccacaggtgtgtccctg

SEQ ID NO: 8066 - DNA, 1323 bp, mus musculus
acgtggctaattaagagtttgactcatatatttttgataagaaaatattggggaaaagtctaaattatttataaactaggattatgtattaaaagcgaattcaatatacatgtgtatataacaaatatttattgagcaactactgtgcagcaggatgaagataaaatggtataagaagagattcctatttttcatgtaccttatggtttagttattagaaagttgttttactgccaataaatataagggagaaaaaaattcaaaattatcaaagtttttaatagggactaactcaccaatgacttcgatgtttaatgaggccaaaactcagtatttggatccctttgatgctagtatcaaggatgttgattttcttaccctcctggtaaagggaaactggatatgctgaaagctccttggcattaaaagccaagaccaaagacggtaatgaaatcatggtgcactcaagtcatcaccaacagggcagcagaggttagaggcatccaattatagggagcccctgactcatgcttcctcctggttccctgtctcagaggcagctgagaggctggtcttggaagtatatctgtacagatggttgatgtctaattaacaagggacccaataacatctttctgaaagtcccaatttgatcatattctcttccaaccagttgtatcgcttcagtggcttctcattgctattggggagaagactgaaatccttaagcagtcctacaaattcttccataatctggatgctgcctgcttggctcctgcgtcttctcctcattctctggagaattcaattgcacataccatataccttcttacattgggcatttgaacatgcatgccatctacctgaaataatctctcacttctttccttgactttgtttcatccagttaatgcactcatcttccagacagaagcctagggatcattgccttagacaagccttcctttaccttcctggactgagtcaattccccttattatttactttaatgccaccacatataacttctccatagcactttaacttaattgtaatgttatatctttgattaatatctgcctgagggtaggaataatgtgttttctattccctttcattattttctttctttcattgatgcctttgggtcctagagctgtgcctggcattgagtagattctcaatagcaggttgttgaataaatgcacgaataataatgggagtgtattgctaacatctggaacagcatagcctagcaggataggctgcctaaaatttcatttggggaggaaaactaaagacgacttcaggataagtgtctag

SEQ ID NO: 8067 - DNA, 1124 bp, mus musculus
aaagagcctgaagttactgatgcaaacctgcatttcttcaggcaactgcaaaagcaatgtccacagtagagaggcaaaagctatgtttatgcactttcctgtgtatttatttatcctggcacaggaattttcaaacttgtcattttaaacccaaggaatttttcatccattttggaatttcaatcaccatgttactgaataaaggagatgatgtagggacagccaagctcttctgagtggcacaaatctagtccctggtgacctgctgccaaaaagcattcaaccaaaggaagctagaccctggccatgaagtggcattcttgtgcaagatgcttatctgaatggcggcatgcttcttgcccttgaattgtgattaaatcttgatagaatagactcttctctcggggtctctaatttctagagtggtaaacagcacctaaaagtccatctggtccagacacctgactctaggctgagaaataaataaatgctccaggacaacttgtataccagtcatttgcccatttgttctcagatctcagacccttcctctgctcagctctatattgtatatggctgagttcttaaaattacattccccaaatctctcaaaactggcttatgattagggatggcccaccctaatcagaggtactggtggaagactgaagaagaggaggaagggagaagccagagtatcttccccatcattctttgacttaggccagtgactggaactctcctggctcccattggtgcaggatggatttagctcccaggctcccaggctctgttagctccacctcctcccctctgcacacacatcccaagtttaagctattgatttcttactcctgatgttctggtgccaataatcatgtttctaccactgatttcttagcttcttctactccagattaaatgtttccaattccatcccatactttaaagctgctgaggtatcttacaggataaagaaatcctcatcagtctaccctccttcaacctggtacaattatggatccttcttatccatgagcccagctcgtccagaatctcatgaggtcatcagggcttggatctgagttctttcagttagtatgtacttagctctcaaaatgctc

SEQ ID NO: 8068 - DNA, 267 bp, mus musculus
tgggtgagcaatggggtatttggaggctgggatcatctggaaagtggacagcaacaggcagcttagcagaatctgctggccaagttcacatgcctgccccttcccccgcctccctaaggttcctctaaaggagctccatccagcttcctgagtgaggcatttatttgtttgtttgtttgctggcttgtcctacagatcaactacaaggctgtcggctcgctggacccaagtgctgacctctcgagccagagggggaaagtgttcaag

SEQ ID NO: 8069 - DNA, 3928 bp, mus musculus
taaaataacctaacctaagaacccgctgtgaccttgggtcatgaccctgcagtctttttttggcagctgtgctcacaaatgtgtacgtgcagacatgtcttttgtttttcttttacaaaattggtacccctacaacacctactattttgaaacttggttttttgcttgatattgtatcacatgtatgttcctgttttggtttatataggttttatatagtttttggttgtgtaattttccactttatatatgtaccaacatttatcaattcatttattgattcattagtcaaattgtactgggcatctactatattccaggccctgtgctcagtgctgaggattcaatagttgaacaggaagtatttgccctcctggagctgatgttctagttggagatagaaaataaaaactaataaatacgtgataaggcatcagtgctacaaagtaaaatataaagtagacaaaatgtatagggaatgagcaggactggtatcagagtgactaaccatcctggttggcccaggactatagcggttttagcactgaaacccatcagtcccagacaaaccaagatgacttgtcacccgtaatcagtacaagcctctccaagaggtgactttaagcagaagcctctatgacgttagtggaaaacagccatgcaggtgcctgggggaagagtgttgtaggcagagggaaaactaagtgcaaggggctggaggccagagagcacttagtgtgtctgagggacagcaagagaaaggagagaggctgagggcagtcaggaaggaggggagtggaagccaaggaggagatggagacagcaagctaggtcatatggatctcataaaccatggtagaggctttggattttttttttttttttttttttgagacagagtcttgctctgtcaccaggctggagtgcagtggcgtgatctcagctcactgcaacctctgcctcctgggttcaagctattctcctgcctcagcctcctgagtagctgggactacaggcacatatcaccacgcccagctaatttttgtatttttagtagagacggggtttcaccatgttggccaggatggtttcgatctctgacctcatgatccacccgcctcggcctcccaaagcactgggattacaggtgtgagccaccgcgcccagctgaggctttggattttaattctaggtgtgttgagaaaccactggagtttttgagcaactaaggcacatgatctgatttacattttaagactcaccgtggcttttcatagagaaagattgtagtgggtaaatggagaagcaggggtcagtggagaagccattgcaataatccattcaagtgacaatgggggctcaggcagggcggttgcagcaatgatggtgagcagcaatggtttctggatatattttgaatggaatttcatgatggagtggaggcggagtgagggtgcaagctttctagaatgaactcaaagttgctggcttgaacttttgagtaggcggtagtgccattattgaggctgaagactgagggaggagcagactggggcagagtggaaggaatatgagtcaagacctttgttttggacatgttaacttcgagataccagccaggcgcagtgggtcacgcctgtaatcccagcaatttgggaggccgaggcaggaggattgcttaagctcatgagctcaagaccagcctgggcaacatagtgaaaccctgtctctacaaaaagtacaaaaaaaaattagccaagcctggtggtgtgtgtctatagtcccagctactcaggaggctgaggtgggagaatagcttgagccagggaggtaaagattgcagagagcctagatcactccactacactctaacctgggctgcagagctaaaccatgtctcaaaaaaaaaaaaaaaaaaaaaaaaaaagattgagatgctttggctgggcacggtggctcacacctgtaatcccagcactttgggaggcaggggtgggtggatcacatgaggtcaggagttcgagaccagcctggccaacatggtgaaacccagtctctactaaaaatacaaaaattagccaggcgcagtggcgggtgcctgtaatcccagctactcgggaggctgaggcaggagaatcgcttgaaccagaaagcggagcttgcagttagccaagattgtgccattgcactccagcctaggcaacagagtgagactctttcttaaaaaataaataaataaataaagattgagatgcctctagacatctgactagtgaattgtcaaggaagcagttaaatatttaaatccagagttcaggagagaatcagaactaggctgggcgcagtggctcacgcctgtaatcccaacactttgggaggccgaggcaggcagatcacttgaggtcaggagttcgagaccagcctggccaacatggcgaaaccccatctctacttaaaaaaatacaaaaattagccgggtatggtggcgggcacctgtagtcccgggtactcaggaggctgaggtgggagtatcacttgaacctgggaggcagaggttgcaatgagttgagatagcaccactgcactccagcctgggtgacagagcaagactctgtctcaaaaaaaaaaaaaagaaagaaagaaaaaaaaagatttgggaactgacaagtatagttggttaaaccactaaaatggtagtgatcaactaaagaacaagtacgtgtagacagaagcccaaagactaagccctgggataggcctgtgtttaaggataaaaagaggaggaaaatccagcacaagagatggaggaagagcagtcagtgagctagaaggaaaaccaagagttcctaaagccaaatggggaacatgagcacaccaaattcttcagagaagttgaataagatgaggatgaggaactcatcactggctttggcacatagaggtcactggtccacggtttcattgaagtgttgggatgagagcccatttggaacgggctcaaaagagaacaggaagaggactggagacaaggagtccagacaactctttcaaagagtttagctgaaaaggggtacaaagaaatgggaccatatctggacacggtatatggtcaagagagggagctcttgcagctggcaagtgttctgaagtgctctgtggtgggacacttaggttactattagcacaattattttgctgttataaatagtgctgctgaatgaaggccacatcaggatcttgtttttgaaaataaatgtccttgttctgggtatgtgttttgtcaacatgacatcctgctgatcatgaattggttccacatttctattttgttcaagatggaaggctttgatactgtgcactcaggttttctctggtcaacacttccagatcctccgcatttcagaacccacagagaacccctgaggcccctgggctcagttccctccctgaccaactttctgggccctagccccatgtgtccctcccctgtagtatactgtagccacacagaaagtttgagaagggcaggggctgtgggcccatcaactcctttattcttgagaacatctgcctacccctcgggatcctggggagaggaagggaccctgtgagaacctaatgaccgccccaggcagcaaggccttcatgagccagggtgctctctgggaccgtttcttacgcagcaggagagtcgtgggccaaccaggcctgccctgaggactgggccagagcccttgaggggcccgcagggaaaggccaaaaggaccaagtgctcattaaagaccaaggcaggctggactgagctagacacccaggctccaggttccttcctctgaaacatctgcaggtttttgggaggcgaagggctctcagctgccatggctgatgtctggggactttttcttcagctccagatggtctacacagg

SEQ ID NO: 8070 - DNA, 691 bp, mus musculus
atcactgttattctcataattagtcaaggaaggcttcccagaagaaatgacttggagctgagctgtagcagtagcaaggcaacaatggaggcataagcattccaggcagaaggaacagcatgtacgaaagtcgtatggtgggaacagaccgtggtacatttggggagccgaacagggctagtggggctggagcagagtgatcaaggaggagtgggaggagacctgaggctggagagatcagctgggggcctgaggaggtagggcctgggggcttttttttagggctgttagtctttatgctggaagcaataaatgccaacaaggggtttgtaagcagtggggaggcaaggtctccctgttgatttgcaaagctccctctagtggttttggggagggctgaggatggtggatgagggcttttggtggggtggggctgggagggatggagagatgattgcagagaggagtctaagatgcgcgcccgcaggagttggtgatgcatgtggtggttgtgaagggtgaggaagagaaaggggacaaggacaacgcccctctcttttggtttgtgtagccactgggtgggtagtggtgcctgagaatgatggtgtggggggtgagattacttctctgagcctcagcttccttatttgtgctcccagcctgtggtggggattattaagtgagagaatgc

SEQ ID NO: 8071 - DNA, 1527 bp, mus musculus
gagggttatagctgctgagaaacttgggaagctggagggcaaccccggccctggagctgacctctaccctctgtctctgccattgtgggggctatggcagtccaagttgggtggcccctcagccatcaggctgggcacatattttccagatggggcaatagaagcctattaattcacaaatatttatgtccctattctgtgacaggtcccatggaggccatagatgagtaagacatgggcctgtggccctagggggcactactagtgaggaagatactgtagtctcagtggggcatggaagctctgctgcagggtgctgcgccccctcccctgccgctgcaggatcgctcatgccggggccaccataccatgcccctctctggcctgtccctgtgtgagcataatgctgctgctgcaaagctgcctttatattgcattgacatgcgccaacatgcaagactggtgggcaagactccaggccttggaagtggttattttggaagagtacactgatgtcatttaattgtacataatcaactgaagtctcatctcagcagaccagagttagccctgacatctcatctgagccttttcacaatgtttaaatagtatttttgttaacatattgagccctggttttcagaactatattatggtgaattctgttctggaacctactggaaagcattggcaatgtccttccaccaagaaggaaaagtgggactcagtggggctctgtgtctgctctaggcctcggcagaggagagcacagtcgtttggagaggagacttggtacaaataaatgtcaccctccccaaaccattaacagtcatatcctcaacaattcccccaacactttgcagcttgcaaagcctttttctcaatggttatttcagctaatcttcacaacagcctcgagaatgagtagacgttattgttcagtcaattttatagatgatgcaactgaagatcaaggatgttggctgattcaatcaaggtgactcagccagggagcactagagctggcattcaaacttgtgaagctcagactcggagctccacaagcctcccttgccttgtccactgacttgcctcagcctaaatgtcacttctgcagagagctctttgtgactgccaaacccacgttaggtcccctttccatgattctcattaaaatggcaccaggtctttttaattcatagtgacaaaaattcataatttttgtcacagtggtcatctacttaccttgtgatgacttagttaatgcctgatttccaccctaaactgtgaccaccatggggaaaggatctggtctctctggtccaatgctgtgtatcccagtggggcatagtgtctggaacaccgagagcactcagaaaatatttgtgtaatgagtgatggtagcccctgctcttctctgaacttcaatgtccctaacagtggaacaaggtggttggacttcctgagggtccttctaaatcttttatgctgtgacccagagggtctccctaacttaggactttatga

SEQ ID NO: 8072 - DNA, 1527 bp, mus musculus; identical to SEQ ID NO: 8071

SEQ ID NO: 8073 - DNA, 1527 bp, mus musculus; identical to SEQ ID NO: 8071

SEQ ID NO: 8074 - DNA, 131 bp, mus musculus
ctcgcttccggaagtggcttctgcgacaacatgcttgcggacctcggcttaatcggaaccataggcgaggatgacgaggtgccggtggagcccgagtctgactccggggacgaggaagaggaggtatgagc

SEQ ID NO: 8075 - DNA, 230 bp, mus musculus
tctctggtgtttgcagggagcaccatcatgtacggggcgctgctgctgtttgagtcggagttcgtgcacatcgtggccatctccttcacctcgctgatcctcaccgagctgctcatggtggcgctgaccatccagacctggcactggctcatgacagtggcggagctgctcagcctggcctgctacatcgcctccctggtgttcttacacgagttcatcggtaagacccc

SEQ ID NO: 8076 - DNA, 773 bp, mus musculus
taatgactcaaaacagtgacaaacatttatcctgtgcacaagtctgtaatttgaatagggctccgtggagaagacttgaatccactccacatagcattggttgtggggattgacttagggctggaggatctaaatcctctatgctcactcccatggctggtgaattgatgttggcaatcagctaggagtccagggggctttggctcctctttacgtggcctgggcttccttacaacatgatggttggattccaggggcaaatgttctaaactagctgaaagccatgttgccgtgtatgacttagctttagaaggcacatagcattacttatgctgtattctattatttgatgcagacaaaaagccccatccaggttcaagcgactccacatcttaacgggggagtgagaagttctggaagagcatgtaggacaggaaatactattgtgaccctttttagaaattataatctgtcacagctagaaaggaagagaacgcctcccaaaacactgcatgtccctggtgtcttgtgttttgtgcaagaaatcagcaggacatattccacgactagtccagaatgacaagtggtaagaattgagaaatgggggtcaactgaggtgaaggggaaatatgttgtttttactaacagaaatgtctaaagagttaatgatacttcaggtcatttttcaatagactgtaggtatgtgaaacagtggaagtgttccattatgaaaagcttaatcgagatagccaatggaagtattgaaaggtcat

SEQ ID NO: 8077 - DNA, 876 bp, mus musculus
tccctacagataattactatgttataaccagcttgcaaaatcaggactgacccccacctaaagttcagatggcaaggttgatgaaatcacaagcacacaaagagggtatggaaaggatgcttacttacataattgaggtctctgggagaaccgggcagacctctcaagcaggtcagaaatggtttgtgagggccaggaaaggtgactggcttgggtctctattatgattcaccgtgggaccagggtgagcattccatatgggcagaggtttccatggtttggatgtctcgctggtgccaaaggagaaagcacccaggctttttcttttcttttttttttgagcttgtacagatgtggctacaagggaaagcagaggggtgaggcttaaaatctatcaacagtcagacatcaaaaaatagaatcagactcctaattacagagcatttgttgacagttcttcatagctgtcattttgcttccatcatgttaaatattttgtagtccactcggtaaatgcttctagattaactgtttgtttggatcacaaatcttattttttgtctaatgtcaagaggaaactctaaaagtgtaagatctttgtaagggcattaagctcaatcacaaaagtgcaatgcttttagaaaactaagccgacactggttgagtccatctagctctagcctgctagagctgccagcactctcccccagttgtctgaaatatgccttcttctgtaattggccttgcacctctgctccaaaggaaggttcagttctgtctactcattgccttctaagtcttacttcctttggcaatatctaaggttaggtcagcagcgtgttttctattgtattaggtgatctcatcccctaggac

SEQ ID NO: 8078 - DNA, 1461 bp, mus musculus
gtggaagcttgcggcttttcattttctgcctctttttgggtattgttgctttccttttcactttgctctaataaggaatgttctctctagagcaaaataaatgccaatcttatgcgtttctgaagggagagctattgtggttggaaactactgaataattctcagagtattattttgtcattattactcaacctttactatcatattcctgatgttggctgggacctcctggtcctctgaggcacatagacaaggtcagggccagctcccatcacgtcccatactcggaaaggaaaaacctgcactgaaacttctcctctcctccagtgggcagcagggtgagcggtgactcagaaggtgggagctcattctcatggcttctttgcatcccaggggacacctgccttgcctgtgggctattttgccccatgttgaaccagatggaaaaaatctttttctttacaaatcataaatttgccctgttcacatacaatgtatgtgaatacagaaaccttaaaaaaaaaaaaaaaggctgggtgtggtggctcacgcctgtaatcccagcactttgggaggctgaggtgggcggatcatgaggtcaggagatcgagaccatcctggctaacacagtaaaaccccatctctacaaaaatacggaaaaaaaaaaaaaaattagccgggcgtggtggcgggcgcctgtagtcccagctacttgggaggctgaggcaggagaatggcgtgaacccgaggggcggagcttgcagtgagctgagattgcaccactgcactctggcctgggtgacagagtgagactccatctcaaaaaaaaaaaaaaaaatagagataagaatgatgaggatgaggggggaaaacttgtactggaataaagagagaaaaaaagaagttcatgtagaatagtcaggtaatgctgttaaaatgccctttgaccaccccactccttcgccagggagtttctctgattcactcgatatttcttgctcctccgtcagattgttcctaaaactccaaactctcagggtatttgcaacctctgcaaggtccacgctctaacctaacaacaaatccatgaagacacagcaggcagcaaggcatcccttcaatggggcgtgcaccccttcaagagcagttgaagttacaagaggaatcttttatttctgttatgttttcaacaatcacatttactggttaattagtgaggtgagcgtatgtcctggcttatgccagttgttctagtgtgattattaagaatgcctgtgggcactgtccaattgtcccactttcgatcatgaattaaatggtcactccatatacttgctttactcattgcttatctggagtggcactatacaatagatatataatagaagccaaatgtgtaatttaaatttttctggtagtcctattaaaacaaaaggaaaaaggtaaaattacttttaataa

SEQ ID NO: 8079 - DNA, 1276 bp, mus musculus
tggatatgggtactttgagagattcctgtgagcaaacccccgggacgtgcttcctgcacagaaacctcgaaacccctcctttgagctgttggtttaggatgaggagtgtgctgtctgccttcctctccctcagccgacccactgtgtgctgagtggggtcatggtcctgcctccttatttcccgaggcaccaagccttgtgccctgcacacagcacccacatcagtcaggctatgcccgcaggcctgacactgacctccacgaggggctcagggtccggcatggccatttctttgccatatccccaatgcctagtagagggcctggggcagagcgaacatttcataaatattggttgaatgaaagctgaataaactataagcttcccatcacctccctcctaattatttttgatgtctaaatgaggacaatttaaatatcagcattattctgctaattagtaaaacctaaaatccagtcccttgtaaagagatatccccgtattttacacagagagggtcaaatgcacggcccttccctggttttctattgcaaacctcacatttgtcttgcgaacacatttgcctgtttttgaaggctgggtgctggaagcttcaggcaacagtgatcccggccagggtctcagacagtaattcccacccagggaacagtcgctttaatgcgggggggaaggagaggagacctgcatgagccacggaaaccgttccctctacagggagccgtcatgcggcatgctcaccgtcagtttcagcccagggtgacgggggggtttactccgtgattcaccggcttttgggttccagagcacctcagatagaacaggggtctctaatcacagtgtgccacagcattcacgtccttatgcttgtcagagggtcaggttgggaagccggaatgtggagagagccaggcagagtttcccagaatcagccagcaaagacacatgcccgcatttcactccctggcagcctgagttcgttaactcatgggaagtttcggtgtcagtgacttctcatcttggctttcttttaataaataaacaatgaactcacacatcaccacagaaagcccctcttaaacctggcgaggtatttattctgtgtcgttggctcacttccctaggagtttgggggtggggggtggactacgaggtcactcatttgtcagctacgccgaccccgaattctgtggccatgcgcctgtgtgcgtgctctccaccttccctgtcccgggagaacctatggtgagaggccaca

SEQ ID NO: 8080 - DNA, 3329 bp, mus musculus
cagctaaaacatgaaatcaactaactctcaggacagtacttttaactcatgactgaagccactctgcctataaaaaaatctgttcccaccaggaacaaacattttcttcaccaactacatttcccagtgattgtttgcaatggtataagaacaaaatacagttgtatgagtggcagaattattgccttctttcatttccattttgacactgacaagagtatctgtgatgtaccctaaatcataaagctctgctatacatacattcatataaaatgaaacagattgggtattatcaagacattgataaaatgtatattaaaattgaaagcatgtgctgttttgctactggaacactgaaaaacaaacattggacctgtgtgagtttataaaaaataagcaaaaattgcacagagttcaattatttttaaaaataagaatactgaaagataaggtttcctcaaagattagtgttatttacatgtatccaatatttggaatgcacagtgtaatacatttggcatggctatagttagaaacgtggagaaaatatttgctgtccataaactctcatttggttaaatggagaaatacaatatccttctttatttgttgtccgtgggtaattcttcagtgcatacagttacataaaaatcctaagtttttaaaattggttttgtctgaaattatacataggcaatcctcactttgcatggttctgatatttacaaaatttacttactactgttagttcattaaaatcagtccccacaaaacatggttgaaatttgtcatcaaggtgtattaatccatttttatactgctataaaaaaactgcctgaaacttggaaatttataaagaaaaaagctttaattgactcatagttctgcatggctagggaagcctcaggaaacttacaatcatggtggaagtcacctcttcacaaggcagcaagagtgagaatgagtgccaagcgaagggggaagccccttataaaaccatcagattttctgagaattcactcactatcatgagaacagtatgtgggaaatgacccccttgattcaattatctctacctggccttgcccttgacacacaggtattattacaactcaggatgaaatttgggtggacacacagccaatcacatcattccacccctggctcctcccaaatctcatgtcctcacatttcaaaacacaattatgccttcccgacagtcccctaaagtcttaactcattccagccttaaaccaaaagcccaagtccaaagtttcatctgagacaaggcaagtcccttctgcctatgagcctgtaaaatcagaagaaagttagtttcttcctagatacaatagctatacaggcattaggtaaatatagacttccaaatgagataaattggccaaaacaaaggggctacaggccccatccaagtccgaaatccaatagggcagtcattaaaccttaaatttataaaatgatctcctttgacgccatatctcacatccaggaaacacttatgcaagaggtaggctcccacaaccttgggcagctctgcctttgtggctttgcagggtacagctcccttcccagctgctttcatggctggcattgagtgtttgcagctcttccagggcacagtgcaagctatctgtggatctaccattctggggtctggaaaaaggttgccctcttctcatagctcctctagccaatgctccagtagggactctgtgagggagctgtcaccccacatttcccttccacactgccttagcagaggatctccatgagggttccacccctgcagcacacccctgcctggacatccaggtgtttaccatacatcctctgaaatctaggcagaggttcccaaacctcaattctcgtcttctacacacaccagaccaacaacacatggaagttgccaaggcttggggcttgcaccctctgaagccacagcctgagctgtaggttggccccttttagccatggctggaatggctgggatgcaggacaccaagtcccaaggctgcacacagtaatggggccctggggctggcccagaaaaccgattttctcttctacatctcagggtctgggatggaggtctctgatatgccctggagactttttccccattgtcttagtgattagcatttggctccttgttacttctgccaatttctccagccagcttgaatttcttcccacaaaacgggtttttcttttctactgcattgtcagcctgcaaatttttcaaacttttattctctgtcacctcttgaatgcttttctgcttagaaatttcttccaccagataccctaaatcatctttcccaaattcaaagttccacagatctctaggagaggggcaaaataccaccagtctctttgcatagcaagagtgacctttactccagttcccaacaagttcctcatctccctctgagaccaactcatcctggatttcattgtccatatcactaacagcattttggtcaaagccattcaacaagtctctaggaagttccaaacttttccacattttcctgtcttcttctgagccctcaaaactgttccaacctctgcctgttaacccagctctaaagttgcttccatatttttgggtatctttatagaagcaccccactctctgtggtaccaatttacggtattagttcattttcatattgctataaagaactgcctgagtataggtaatttataaagaaaagaggtttaattgactcacagttctgcatggctggggggcctcaggaaacttacaatcatggcagaaggaacctctttacagggcgtcaggagagagaatgagtgccgaaggaaggggcaattctcttataaaaccatcagatctcgtgagaactcactcactatcatgagagcaatatacgggaaaggactcgggtgattcaattatcttcacgtggtcccacccttgacagctgggggttgttacaattccagatgagatttgggtggagacacagccaaaccatatcacaaggtgtattaactgtagttaattgtataaagtaaaaacttcactgctagcgcttctgtccacaagtcactccataaataacctattcctcatgatcactgatgatcagacacttcatagtctgatggtgacaggccactgaggatcttttattcagttcattcaaacagcaagcatgtagttgtgttgcctttatgtctcccactgatacatccaagtgacatttcacaaaaatgcataattggaagagggaaatggccaaagataagagttctgcaaagtaaaataaaaatgataaccc

SEQ ID NO: 8081 - DNA, 808 bp, mus musculus
atatatgctgatgaggtatgctttacatacttagaaaacatgatttgtatagatatttggcacataatggaaagggttgaggaaaaggacaccatgccgtaccacacagcacaaactggagcatcttgctctgtgaggtgggtccagatacactgtctagcaatggaaggggacaagcgcaaggggttgtactttataaaactggaatcacacagtctttcatacttaccttcggttggaaataagaccaggcagtgaatgctataggttaatacatatgttcctcactgatcctcttcctttgagggatgaggttgacaacagcctgtattatgatgacatgactcacctacaactagattctgttatgagggatggcaagggagttttgctttatgtgaggtgaaaaagaatttttttctcctactagggagaacggcaagcattggaacattccggtagtaaaagggcattgatagttttctttctatatatttttcacatgagataatactgcccagcaccctgccacacctccccagtgtttcttcagcttctctctgaatgtggataagctcttaaaggagtgatctttccagtggttctttctgtgggaggtaaaatggcaggtgaacatgggccttgttatatgtagggcagagcaaatagctacaactaaggaaaccacccagcaccttccccagaagagtattagccagagtaacacagtgatctctcttgagatcttctccactggcagctggaaagtttttgcaaggattcctgtttctggtctgattcctatgtt

SEQ ID NO: 8082 - DNA, 2520 bp, mus musculus
ttttaaaaaccaatttcctggtaagatctgaaaagctcattctgactaaagtgataccccacaatgggtacaactttgaaggatatctgcgttttaatcaggtttcaattctcccagcagtagcatctataggcgctggatcctatcagggtcctgcagtcactcgttgttaaatattttgaatatcagccctaatttgaatagtgcacagtcttaaataaaaggaagcaaggcaacattttatttttcatctagatccattctcagtctattctgcatgcacatacagtacaaccaatatttctatcctaacacagttcttgatgatcaactgccttttctataatcaaaacatatgagcaaatagtgactttagaaacaacacagcatgctgagtttgtcttcatgctatgcataggttgcattattcaacatttgtgttatcaatgcatgatacaacatgtagaatgatttatctgtagtaagtaatttagaagggactccaattttccatttggtgcaattcatttcttcacatgtccaggccctgctttagatgttgggaggacaaagctgagcaaatcatttatattccattcaaggatcttagagtttcttgaaactatcacagcccaatgttctttctacacaattagtttgttagaaatgatggagaatctagagggtaaggatagtttaaccttttcaggatgcataaaaacaattgactatgaccctgtctctacaaaaaaaaaaaaatgtgcctatcctggtggcacatgactgtagtttcagctacttgggaaattgaggcaggaggatagctatggcccaggaatttgaggccacaatgagctatgatcacaccactgtactccaacctgggcaacagagtaagacgctgtctcagaaaagtaataataattggttatgaattcaagaaaactacaaagaataatgcaatcataagctatcaagagacgttaaagtaacagcattctatcatatatggtgaagtgcctatgtagttcatgggaataagtgggtagcccacaggatacctgttgttgtccatgaaggactagaactccctgatatgggggaacccgccaccgataattcaacgtgtgttattttctatttgtctaagtgtcagccagtctgacaaataaagggaaagagtacacaagagagaaattttaaagctgggtatctgtgggagacatcacacgtcagcaggttttgtgatgcccccgagccacaaacccagcaggtttttattagcaattttcaaagaggagggagtgcacgaatagggtgtgggtcacagagatcacatgcttcaagggcgacaaaagatcacaaggcagaagttaagggtgaaactagaatcactaatgaacttccatgtcctgatgtgcatgcattgtcacggttcaagagcagagaaccagtctgactagaattcaccaggctggaatttcctaatcctagcaagcctgggggcactgcaggagactagggcatgtttcatccctatccatagctacataaggcagacactcctagggtggccattttagaggccccgccctgggaatgcgttcttttcccagggctgttaattattaatattccttactggggaaagaattcagcgatatttctcttatccatttttggtaataagagaaatatggctccatcatgcccggcccacaggcagccagactttaaggttatctcccttgttcccagaaaattgctgttatcctgttcttaaggtgcccagatttgatattgttcaaacacacatgctctacaaacaatttgtgcagttaacacaatcatcacagggttctgaggcgacatacatcctcaccttatgaagatgacaggattaagagattaaagtaaagacaggcataggaaatcacaagaatattgattggggaagtgataagtgtctatgaaatcttcacaatttatgttcagagattgcagtaaagacaggccaggtgtaagaaattataaaagtattaatttggggaactaataaatgtccatgaaatcttcacaatttatgttcttctgccatggcttcagccggtccctccgttcggggtccctgacttcctgcatcacctagaactagagctctcttaagataccacttaccaagttgcaaatcctgtgctgaacttgttttgatttcaaatgtcttatacttactggacaaatgttactatgaattctgctaaccaattatctgcttcactttagaaggaaaaactgtgaatgacaaaatctggcaggaacacagcaagcataagaatgattcccacatcagaaggccctgtcagctaaaaggtaattgctaaatttagttcagctgactttgcattttcccaaagtagtttaaagggcaggtaagaaaaattcacatcttccaccatgaaaataagcagaccattatggtctacttaaaaaggaaaaccaaataagatagaatagaatatg

SEQ ID NO: 8083 - DNA, 340 bp, mus musculus
aagggattagtgttcactccctggaaaacaaaagccaatagtctaagcagccaggtccattctttaggtggacctgggttgggaaagtaggttggagacgagctgacctcaccagtgtgcaaactgtcctgacagttccttgtgagtactccgaggcatagatagctctcattacatgcagtgttgtagaaagccacatcaatcctgaattggatactgaacacagaaattagagtgaagtccacagaatatataaatgcagtctgcaacctgcagagtgattgctacccttgcattcattctgaaagccatccttgagactgcatataaacatattctg

SEQ ID NO: 8084 - DNA, 589 bp, mus musculus
aatatttttctcattagagaccatcaagtcatgcaaagtaagtactttccaagtttaaatgacaatggtcaatctatttactcctttgacattatgaagaagatcatgatcgtcactaacacctatgtaatagatacccatagggccccatctcacactcttacaacccatctttttactgcagacattgctataaaatcaggtccatgcatttgtaaactgacagcagctgcttcagctgcctcctgtatctctcattttcatccctgaggcttttttgccaccacctcatgggactcctttaagaacctgctaagccattctgactcacgcacaaatcaaaggagtgaggaagctaacactacaaggacaatccttgaccaatggaaaaagaaggagagtagtgaataaacactaccctcagtcatctctaagctggacagttctgagtttcatttgacacaggaccccaagggtatctggtaggactgagctccagttgtccacagtagtgattagatgaataaagcaccctgggattggttttctcccttcccctgcttcactttccagtccctagtactgtttc

SEQ ID NO: 8085 - DNA, 266 bp, mus musculus
gaaaaaagagaaacagaatatgatctacatctactgcttgccatatgtctccacatttcccctgatttttggatagtaagctaaatctaataagaagagcacaaagaggtaaatgacaaaggtgagctaaagcatttggcagcatttaaacaacataatacaggctgtacttacatctgcctttgtgaagataaaaggatgttgtactggaaaaccattctaattttagtaactacctctataaaactgcaagcaaataatttgca

SEQ ID NO: 8086 - DNA, 193 bp, mus musculus
gtctacttttaaacagcaattctcttttatgtaaattaactaagagttcatttagaaatgatatttccccttataagtattcattttgtcagcttaagtaagagccaaatgatctcagatcagattcaatagggaaactgctgaagggaaaataagagaatcatgaaagagaatagaaaatcaatacatagca

SEQ ID NO: 8087 - DNA, 626 bp, mus musculus
tttgttattcctggaaatttgacattttttgatgacagaataaggggaaataacatttttaaatatatatagcacgtttgttgctagaatatggaaatacaaataactggtttacttatgtagttttccaggtttctggtgactttattaaactcttcttaattataagtgtttgtcattaaaattctagattttctacaataaattggtgtcatccacaattaattgctatattaactttttctttctaattgtttgcctttgttttcttcatattttatagtatgaattccagtaaaaccttgaacagaagtggtgatggcaggtatgttttttcctcatttctaatttccaaagaatacatgcaatttaaaaaaaatgaattatgtattgtttttctttatttatatgtgtgtgcatatgtgcatgtgtgttttttcacaacttaagagagtttccttctatcccagtttgctaagagtttatgtcataaatatatgttgaatttcatctttaatatttctgtatctatataaaattatacatttttcactattttgttaatgaagggggattgatttttcaaatattaagacatttttataactgaaataagccctagttga

SEQ ID NO: 8088 - DNA, 1039 bp, mus musculus
cgtttggtccagcagggggtggtagaactccattttaagcccagaagttggtttctgctcttccacagagtccttctatcattcttcagcagggcttgacattttggatgtgaagccttcctttttctgcccttctcctccccacagctatagtgttagtggcggatgaaacacgattggatgcagatttaatgttcagaaatcagtatgcaaatgttggatattcctatagtttgtaaagtgtcttgataagattctgctcattttcccttcctaacatagagtatgaaatatttcagtcttagcaaaattgcagatatgtccatctgaagctaatactagcccaattcgttaattcagtggttcttaagcaaagatcagcatgcacatatgtcctacagatatgcttctttaattttcagatagctgctgattgtgtttaactgttcatttatagcatagacaggtatttttgagcaccaagaaacaatccctgaaaattgcagttaaaatacaactgcaattaaataagtgtaggtagtgtggggcagaatgggagcataataggaaacaagtttatgcagacttaggattacattgtgagtggtttggagaagaaaaatgtctcagttgtggaatctgaatttatcattgtagaggctaagtgtgttggaatttggagacataggaaattagaaatgtttagatatataggtttaaatagtacacagagacataaaatttggatgtgtacatgtaacatagatgtgaaattgtgattcagctaatttgtaagtcaggatacgaggtggttatgaagaggcactctgagacaagcatctctgaaggggagcccatattcactgtaatgaaacagggtagaaggagaccatcattgtaaagatctctctatctagtacaatttcacaatgtgtggcactcatagagacacagatatatatcagagagacgtagcttttgtgaaagggaacatatagtacttctatgccatgtgtcctgatgaagtcagagatgcttg

SEQ ID NO: 8089 - DNA, 4238 bp, mus musculus
gctgtttttacttggctttgtggaagaaacttgtcttcagcaactcaaagcatcacatacttatgcacttacctgaagttgggaaataaagaaatataggcgcagtttattttattgtgtttccttttattgcatttcacagatactgcattttttttacaactcgaatgtctgtggcccccctgtgtcaagcaaatctatcggcctcatttttctgatagcatatgctctccttgggtctctgtgtcacatttaggtaactggcaatatttcaaacattttattattattatgtctttatggtgatctgttatcattgatcgttgatgttacaattgtaattatcttagggtacctcaaagcatacccacataatgacaaacttaatcaatttataagtgtcgtgtatactctgactgctccactgactggctgtttcctggtatttgtccctctcttcagaccttccattccctgagacacaacaatattgaaattaggccaataaattaaccctacaatggcccctaaatattcaagtcaaaagacgggtcacaggtctctcccttaaaatcaaaagttagaaataattaagtttagtgaggaaggcatattgaaagccaaaataggccaaaagctaggcctcctgtgccggttaaccaaattatgaatgcagaaaacacaattactgaaggaaattaaaaaagccactccagtgaatacacaaataagaaagcaaagcaaccttattgcttatatggagaaagttttactggtttggatagaagagcaaactagccacaatattctcttaaaccaaagcgtaatccagagaaaggtcctaatactccagttctgtggaggctgaattggagaggtgaggcgagacaggtgaggaagctacagaagaaaagttggaagcaagcataaattagttcacgagggccggacgtggtggctcacacctgtaatttcagcacttttggaggctgaagtgggcagatcatttgaggtcaggagttcgagaccagcctgaccaacatggtgaaaccccgcctctactaaaaatacaaaattagtggagcatggtggtgcatgcctgtaatcccagctacttgggaggctgaggcaggagaattgcttgaaacctggaggcggaggttgcagtgagctgggattgtgccattgcactctagtctgggcaaaaagagtgaaactgcatctcaaaaaaaaaaaaagaaaataaaaaagaaattggttcatgaggtttaaagaaagaagccatctccataacataaaagtgcaaggtgaagcagcagatgctgatggagaagctacagcaagttattcagaaattctagttaacatagttgatgaaggcaggactacactaaacaacagaattttaatatagaagaaacagccttctattgtcagatgatactatctagaagtttcttagctagagaagagaagtcaatgcttggcttcaaagttgcaaaggacaggctggctttcttcttagggaataatacagctggtgactaagctgaaggcaatgcccatttgctattcttatagtcctagcgtccttaagaattacgctaagtcgtaatcccagcactttgggaggccgaggaaggcagatcatgaggtcaagagatcgagaccatcctggccaacatgatgaaaccccatctctactaaaaatacaaaaattagctggacgtggtggtgcacacctgtagttccagctactctggaggctgaggcagaagaatagcttgaacctgggaggcggaggttgcagtaggccgagatcgtgctattgcactccagcctgggcaatggagtgagactccatctcaaaaaaaaaaaaaaaaaattatgccaaatctattctgactgtgctctacaaatgaaacaaaaagctgggatgacagcacatctgtttacaacatgatttactgaatattgtaagctcactgtagggacctacttctcagaaaagaaaaaagttcccttcaaaatattactgctaattgacaatgcctctgctcaatcaagagctgtcgtggagatttacaaaaagatcaacattgtttttatgcctactaacacaacattcattctgtagctcagggatcaaggagtaattttgactcttgctcttattctttaagaaatatatttcataaggctatagctgccatcggtaatgattcctctaatggatctgggcaaagtcaattgaaaaccttctggaaattcaccattctagatgccattaagaacatttgtggttcatgggaggaggtcacatgtcaacattaataggagtttggaagttattcctcgtatttctccatcctcatggatggccgaggttcaagacttcggcagaagtagtaactgcagatctgatggaaagaggaagagaaatagattagaagtggagcttgcagatgggactgaaattctgcaatctcatgacaaaacttgaatggatgagaagttattagcttcttatgggtaagcaaggaaagtgatttcttgagatggaatctaattctggtgaagatgttctgaaccttattgaaatataaacattatttagaatattacatacacttagttaataaaacagtcagagggtttgagaagactgacttcaattttgaaaagcattctattgtaggtcaaacacgatcaaacaatattgcatgctacagagaagtacgttaggaaaggaagagccgattgaaaacaccggacatcattgttgtgttattttgagaaattgccacagtcacttcaaccttgagcaaacccctaccctgatcaggaagtaaccatttacatggaggcaagaccctctaccagctaaaggattaggacccactgaaggcttagatgatccttcactcttttttagcaataaaacatttttaaattaatgtatggacatttttagacatcattctgttgcacacttaatagactagtataaatacaacttttacatgccctggaaaaccaaaaaaaattgtgttacttagtttattgtgatatatgctttattgtattctggactcaaactggcgatatctccaaggtatgcctgtatttctgttttgtttgtttgtttgtttttggttttttttgagacaaagtctcgctcttgtcccccaggctggagcgcaatggcacgatctcggctcactgcaacctccgcctctcgcgttcaagcaattctcctgccgtagcctcctgagtagctgggattacaggcgcctgccaccatgcctggctaattttttttttgtatttttagtagagacagggtttcaccatgttggccagctggtcttgaactcctgacctcaggtaatccgcccacttcggcctcccaaaatgctggcattacagacgtgagccacaatgcccagtcgcctgtatttctttagttgattttctttggaggaaaaatccccttaccctgtgttgtctagccaacttccctcaatactcattggctataatcatttcatatgatcactcctaaattaattggtggtgaggagaatgacattaacatgatttcctttcccgaatcaactcccttttgctgatgggaagatctgcctccctcgaagtacatgactggccaatcaaatgacgtgtccatcttgcaaggaagaatgaaggatcgagaatattgtagtcaaatatgtctgccgcaggaatgttgaaaagaccatttttgacaaagaatgcaaacaatatcaaagccaacgtttataaagttcttacagtgtaccatatttatgcgcttcgtatgtgtgatctcatatgattctccaaacttttgagattaattatcttttataaatgaggtaatgagattttaaagagtttagatgacttgcctaactgacaacactgtcagtggcaaagttgggatttgaactcagtctgatgggcaaaaagagttgtcttctaccagccaagttgccataaaagaaaactatgcattgtgcatagttttactcttgttaagtgtaagaatgataaggtaaggctattaacttgctttgtgaacaggctatgttctgggcactttccaaaaaaaaagctgttatgcttgagcttctttaatacctatatctgcttatatattattattatttaaaaaggttttacaaataaggaaattatgggacagagtgataagtaat

SEQ ID NO: 8090 - DNA, 653 bp, mus musculus
ttggagaatgaggatcaaacatcagatccatttagtatttgttaaatttgaaatatcaaatcgttggttagatatgtgggcgtatggaaatgagaagataaccatggcttggaaacatacaccatgatgctgtcagtgttaacaggtgaatggtatgtgagtgagggtaaacccgtctaagcaatgcctaaaatatctgaagaggggttgatgtctgtagtactcatttgtgtttgccagtaactagaagggcgactggcacagcagtgatttccagagaatatttcttgaattactgaagagtagaaagaagttaagaactgagttccaaggaactatcatattatactagaagaagaaaccagatcactccacccctcatcatgagactaacactttacaaacttactggaaaaacaggagcgtagtatcttggaagttaacaaagggtcatatttcaagaagaatagatgtaaagtgtcaaatgctgctgaaaggtcaatggaactgaaccagaacagatgtgaagtatccctatcacgtgcagctttgctgacgtcattgagagataaattaggtacaagtgggcagagaattgtatgtgaggttagggagtttagactccatatttatttaatgctttcaggaagttt

SEQ ID NO: 8091 - DNA, 605 bp, mus musculus
tctcatgtcttatgatgtagattaatctttctctttatatatacctgatacatgtttcctgagtaaacttacagagattatttacgctctggtgtatgttgccacacacgggtgtaggaaaatattcttgatcactctattattttgttaatgattataatataaatggtcattaactttggtaccgaacactaggttaatgatgttcagatattccttttatagttccagttcaaagtctagtttataagaaaagagttttaacataaacaaggtcattgaagtcagtgcttcttggtgatgaaattgagattaaatcatgctatttacacatcaaaagcctgattaacataaaatgcctgtaacaattacacagcccaggcacacagatcaactcatgaatcaacataaactacttttatcagaaccactaacattttaggagttgtgaatttatcactgatttacttttttaagaaatttcaagtatgacagtcaaaaacccttaaatttctaatttacaaggcagttgaacatagtcactagaaattaagagcaaatgcatcaaacttctctgtctaccacaaatacattcttcttccttt

SEQ ID NO: 8092 - DNA, 692 bp, mus musculus
taatatatataattattaaaataaaaaatccaattttaaaatatgatttataattttttaactgtacttcaaaatatcacagaatggagcgacaggcaaaggaaagagggggaagagaaagagacagaggaagaaacagattaagaaaaaaaatctaaggatcaatattctagttccaagaaaaataatgtaactgtacaatatgcatttaaagttgaaggcacaaaagcttgattcacagctttcctactattcttctttttggagccattccaaatgtcattattaaagtggctatttacatatagtgtcataacatggtaagctaaaggctaaagttgatagtagaaagaacttcattaaaaaggctatattttaaaaataagaaagtctttttacaagtaatgttaaatgggaaattaaggcaatgacccaaataattaaagtaaaacaaatcctaagcatctgagggaaaaatggaagtttgaggtttaaatcatcacaaattactgtctacattcatcaaattaatggggcaattactcagcatgcactttaaataggttacgtatcttcaaattgaagtcatttctatatggaaagactgatttactgactttgcttttttctttttctcaaagtgtcagtgattgatttcttttaataaaatgaactaattctaatattgacag

SEQ ID NO: 8093 - DNA, 1073 bp, mus musculus
taaaatatgttatttctagatatatttgaaagttaaaggaaaatggtcctcttattaaagttaaactttggttgttaaagaagtagataaaagtaaaagaaagtaaaattctagcttcttgaattttagtctaagtggaatagaagtacccaaagttctcatcttgataaaatagagttcctctgttacattttcacggtcaacaaatttacaatgttgaagtggaatatcaaaatgcttttagcaatacccacagatgtgagacattataatagagctttgcttaggatagcaatgccaacagatatgtaaatgtataatttttggccttggcacaggaaaaatgactgacgaaatttttgaaatattttccattacagcatatctgttggggtagaatggtttgggtttacttaatttcacagccttttcatagtaagaagaatggccataatttttagaactgtagggcctcaaacatgagtcagatgattttaggtaacaatttttaccatagtggaataaatttattttattaaaaatatggtaatcttataaattatgatacaagatattttgatatccagaatttgtacttcccaaatcatctttgaaagtaattgtgcaaagaaaacttatttcaggccaggcgtggtggctcacgcctgaaatcccagcggaggccgaggtgggtggatcgcgaggtcaagagatcaagaacatcctggccaacatggggaaaccccgtctctactaaaaacacaaaaattagctgggtgtggtggcatgcctgcagtcccagctacttgggaggctgaggcaggagaatcgtttgaacccaggaggcagaggttgcagtgagctgagatcatgccactgtactccagcctgggcgacagggtgagactccatctcaaaaaaaaataaaaataaaaacctatttcagagagcatacttaagttactagagtttcaattcaagaaataacatagggttttaaaaacatcttttaatagagaatataaaaatcattttgattgaaaatttaacctattagatttttcaaatagata

SEQ ID NO: 8094 - DNA, 1612 bp, mus musculus
ttaaaatttactttacatcaatgtttgtataccatttaaaattgcacattttaaaacatctgtttcaattaggctgtctcttattaccatatttgctgcagctgtttctatcattgactgactgatactagaagtttatttggcttaattttccaattttttttttgtattttaggatgaaatgcatttttaaacatttagattagggcaaacattttcccattattttctttgtatctttgttagtttattctttgcttgaaaggaagtaagtagtgttgagacaagtttataaggaaacactaattatgagtggagacatatggaaagggtttttacatgctcagttgaaggcagaggactcggctgtgtcttccagcactggacaatgtcactactgtcaggaatctgaaagcagagtacttcacgcacgaagccgaaaaatggaagctatgttcttcctcattagacaatactcactgccccatgcctcccccacatcttttctaaaagttttattttctatatgcttgtttagaaatacttcagaaagacctagacacagacgttgtcatataagctacagatttttttactttggataattgtgtcactttagacctaaaggagaagcaaatgaatcaatgtgttattcacagacttctaaatattctggtagttcattacattactcacatctttccaaaccataaaaaggattttgggatttttagccctttgttgcttgtatctattgaatatattatgacatgatttatttctttctatctatccatctatctatctatcatctatctacctagtgtcttgttattgaaccattacttaggccacataaaataaaaacatttggaataagtgagacatttagtagttttttcatatttgtaactttctactagaaacatccacaataagaaaatgtgtgtggcacttaaatgatgttgcttaataggctagagaactttaaatcaattttacatctaatatagttaagctcttcacatgaatactaagtgaattcttatgctctccactttgtgaaggaaaaaggctgaaattcagaaaattttacatgatctatattcccaaagtcacatacatactaaatgatggaagccaaacaggaaccttggtctttagacttaaaacatagcttcctttcctttcatgtgcaagtaatgaatatatcacatgtctatttttgtgtaattcactttatgtttctaattgtagcttgatcaatatgtatttttagttggtataagcatacaatgtcatagaacaaataagccccaatcttgaatagcagaatagggtgactatagtagtaacattgtataatttatttccaagtagttagaagagagggcttgaaatgttaccaacacatggtcatggttaccccaaatgacctgacttgatcattacatattctatgcttataacaaataccacgtgtaacccgtaaatatgtaaaatattttgcatcagtaaaaaaactgtatttgtcaataggcaaataatttttactctctagtgttcattcttttattcagatacaaaaaaatttggatcaatgattctctag

SEQ ID NO: 8095 - DNA, 303 bp, mus musculus
aaactgagtatgatagctttatattagcgaggcattggcataaaccagctttgcaaaaagaatgtcatcattaacggacagaataattaggcatctataaaatatattattagtgtcaaagtttactaatatccataaaattaaacttcattttactcaatatatttcactttagttattaaaagtgtattctaaaatacgtttaattaaatttattaaaattatgcttttaaaattaattcgaactttgaattaagatgtaatggatgtcttcagaaaaactgatcaagttttgaggtatta

SEQ ID NO: 8096 - DNA, 672 bp, mus musculus
tgctcccttggcatcaaataaaaataaaaacagattttaacttcaactttaatgtacttggcaaaaaactggaaaacaactgaatttaattaagcacaaatgcagtgattcgaagacattttagacatggagcatgaataaatccagcgattttgtaattttcagctcatgtgaacaatagctattataattcccatttaatagctgtaaacttagggatataaataattcaaattactttcttcaaacacagtctgtagaaaggagtaaaattgaaatgtagcagttgggattttagcaacgtctgatgtttgcttgatgtttatgaaagaagagaacaatacagggatcagtaatctcacagaggaaattaaggagaaaatagtaattaaaaaaaaacaatagtgtttctccattttacagtttacaaaatatttaacaagcaatgtatctacttgtaaataggaattaaaatttctgctattcactgactcagatactaaatagggtagttgttaaacatccccagagagaaacactaagttgtcagaaaaataaagacagatgtagagggaggcagtaatggtttttgatggtgcttacacactgagggcttcctgatatggaatgaaggacaacttacattgtggatggagtcctgggacctctctt

SEQ ID NO: 8097 - DNA, 49 bp, mus musculus
tgataagttgacagttaaataaaattctctaaaattgcttctaattgaa

SEQ ID NO: 8098 - DNA, 49 bp, mus musculus; identical to SEQ ID NO: 8097

SEQ ID NO: 8099 - DNA, 49 bp, mus musculus; identical to SEQ ID NO: 8097

SEQ ID NO: 8100 - DNA, 2343 bp, mus musculus
ggaaatgttcttacttgaagattcatgaggcacgtttgtatagtaaaggctttttgaaattctgcagcaaaacaaacaaacaaacactctgtttcttttgtctaacccagtgtctttcacattttaattattggaagacccttatttgaatcgtagctattaatgtcccactcaactcatgctccccagagcacacttgaggcaacatgggccagtaacaccactgcaatttcagcacacacatccaaagtcacatgaccatacatcctgcagctgcttcattctaagccagagtctgccattcccaatttcagaacattttcttaaaggtttaagattaccatgacacacggttacctatgtaaaaacctgcacatactgcccatgtacccggaacttaacataaaaatacaaattaataaaaaaaaacacttagtatggtggcagatattttgcatgcttaataaatattttttctttaaaaaaggtatacttagatgtttaatacttattgccctcttttatttagaaaatattcttaaaaccacataatctattctaaaggtttaccattttattagcataaaatttgatctggagccattttacttttctttttctcgtttttttttttacactagacttgctttttaacattgttttaaattgaaaattcatattagacttaaaatatcttttccaggaatgtaatttgtggtaaattaaaggtctatatttacaatttaacctattctttattttaaaatgcttatctgattttttaaatgacaaattttcatggcaacacaaaagcatccaaattaaaaggaatgtattccaactaaatcaactgtattaatttgttatcttgatttactactgagatcaagttgtatcaaattggaaactccctacttattatacagcactgtcactatttttccaagtaatttatttaaaataattaaattaattgtttgaaataataaagtaattagaaaaatagttaatcttggagaggaaaatttttaaaaaggaaagaagtaaaaatatttaatttataatctcagttatgaactactgaaaacattaaactctttagaataactttcccaagttacttggacaatattttacttttttcttattaaaaacttaggaatcttctaaagtacataatgaaatctaaggtaagattagtcacaaattgaaattaacaagcaatgatattgactaaataataagtaaactactggccacaaattaatctcatagaaacaccttccacagcttgaaaagattttcttttagcttttaaaaatattatttggcacatttgtcaagtagagcagttaaatttgaaagattaggccatgttgtgtcttttgattagttgccagtttactagtatcctggcaaagcaaacatacaaaataaagcaatcatacaacagcctatcaactgtattgaaaatttctacttattaatgtttcaagagaagtgtgataatgcagatttttatattagaattatgcctgtgtgttttcatttaacaaaaatccaatggttaattgttattattaccatcagttatcatcaatttggagactaagagttcactacaacttactatttccctttaaaaattcaaaaaaatattaaaacatattattttttacaccaaacgagtcaaagagcacagacaatcttaaggcaaaacacctattttatctaatgattgattaaaactcaacctatacatgggttggtacacacacacatgtatttccttgctctgtctgctgagagggcttaggaacaatgataccccagtaacaatgaacactcctggcacctagagctcctcagaaaaaatatatattattctggtgctgggaagggagatacataagatgattctggaggatcttatagtgctggaaagtaaagaaatgctcccatgagtgcatactgatatagataaatgattaaataaataagtagggagaataggcaaatctgctcagcagaagagccaggggatccaggttagcatcagcagtggtagattatgctgctagtattcacgcttgataacaggtgatgcaaagggtatgttacctatctggtcttcctccccaaagcctagagccctactctactaatgagaaaatatcagacaaattccaacagagtagcattctgcaaaatagctgaccaatattgaccaaaaccaccaaagtcatgaaaaacaaggaaaatctgaaaaactgtcacaaccaagataagcctaagaagattagtgagaaaaatgtaatgtgctatcctgaatgcaatcccgaa

SEQ ID NO: 8101 - DNA, 2343 bp, mus musculus; identical to SEQ ID NO: 8100

SEQ ID NO: 8102 - DNA, 1130 bp, mus musculus
acaatcagtccaaactataatgacaaacatgaaacatacctagttcacagcaggcacttcctgttgtttgctaaacattcagaaggtgtgagccctgccattctgtctttttgtgtttcacagggttttcactttcttctgtggaagaagatggtattcgaaggctgtacgtgaatagtgtgaaggaaaccggtttagcttccaagaaaggtaagtcagtgaaggagggctggtctgtctgtcttaaatgccctttggggcttctctagtttttgaaggagaaagatatgcccaaaggattcatttgtggaaagtatttgaacattttctcattgaaaacccttccagggaatatgcattttattccattaacttaagtgtaccagaaaggtcatattcttgaactttttttttctttttttaatttttagagacaaggtcttgctctatcacccaggctggagtccagtggcgcaatcataggtcactgtagcatcgaaatcctgggctcaagccaccctctcacctcagccccccaggtcgctaggggagtacaggtgcatgccaccacacctgactaatttatttacttatttatttttcagagtcaggggtcttgctgtgttgccccggctgttcttgagctcctgggctcaagcgatcctcctgtctcagcctctcaagtcactcatttttggattttaaactgattgagcccattaccctggggctggtgggaaattccattctaatcatgtggtcgtccttctccatcttctaggatggtgtggggatcctgggggggttcttcctggagcagagcatgggggaagacccctctgtactttggtccacactggtcaaagctgacattggctattgcctgagcctgcagagctctttcaaaccagttgttctgttgcttccgttcatagaagaatctgcgaaagttgagaacctagggatttgagatccagcctccctccccttctttagagagcgcttccccgctacatcctgcctgtttcattttagcccttaaatggcctataatgcatttgggctacttggggaaccccaactcttcatcctttttctacccctggaaagtctttgcaacctagatgatt

SEQ ID NO: 8103 - DNA, 2546 bp, mus musculus
ttggacaattctgttctctccagtcttagttgcctcatttgacatttgagtttaatgttgcctaggttatttctaagcagtatggcacagtggagaaagcaaggactctaattttgatcttggatcagccacctaccagctgagtgatcttggataacttagtttaaccactgtgtgctacaggttcttattagcaaaatgaggatgtttggtgatcattttatgcaaagcccttagaacagtgcctggaatataagcacctctcgatgttagctgttttgtttgttatctctaagattccttcgtgtgcaaagactcctcgagtctgtgttaaaacatgaaggaaggtgacttaatgacagctaatctagcttgcttgcaccctgtgtcagacttgcaatttctagaaattaccatcagagataatttaactatcaggaccctatttgtactcccttgatgatgtcaccagagggaaagatttcaatgccttccaggccatgccagtgctcatacccactagggtggtactagctgggggaagtggtccatcagccaatgctgtgctcagagttgtttttatagttgctggtagaacttgcagaagggaaccgtgactctctcccccatctcccatgccttcagttcaacagaaaggacctggaagtcaatatcccttgcactggcattaagagatacaactctggctttgccacctgctctctacttccgcctgagcactgctccagctgcacagagcttgctccgagctccaggctcctgctaagctagcaccaccgtcgactccctccagctgccttcatgattacctaccgagatctcatcagccacaaagaggtatcctctgacttttacaaagatcctggagatcagggacaggctgtgccttgagatggaggggaaaaaggtcagtaggacagagggtaacatcaaagacttgcccattagtgagaatgcctccactgaagacccctagggtaaaggtacagaaagcacagtatttgatgctgttgttatcatcatgaaacatcactcgccagaaaccagctccgcaaaagaagcctacaggaaatacatcaaaaattacgtgagaagagtcaaaggcaaacgtgaagaacagagaccgtaaaaagtaaaatcttttatgacagactgcagaacaaatcaagcacatccttgctaatttcaaaaactaccagttcattatttgtgaggacatgaatccagatggcatgctggctctattggactaccaggaagatgacgtgaccccatatatgattttctttaaggatgatttagaaatggaaaaatgttaacagatttggcaattgctttgatctatcacctgtcattataactggctgccacttgtcatccacacaacaccattgaagacaaatgggactgatgtcactttgagcactttattttgaccatgatttatctggagtagaggcattgtttttgaggaaaaaaaaaaccatagcatatataggttgtctaaaaataaaatacatttaaagttaaaaaaatacaactctgtgacctagactggagctgtcaactacccctccccaacccacatatatactcacatggagctccgcgaaagagagaagcaaaatttctttagaattttttagaggtttatttatttatttatttatttacctttcactggaattttttttttttttttttttgatggagtcttgctctgttgccaggctggagtgcagtggcacgatctgggctcattgcaacctctgcctcctgggttcaagtgattctcctgcctcagcctcccaagtagctgggactacaggcacatgcctccatgcccagctaatttttgtatttttggtagagacagggtttcaccatattggccaggatggtctcgatctcttgacttcatgatctgtgccccatatttaaccagtcacggatagggaagacccagtgatcgggtgcaagtggttttacaatccatttctttttcatttttgtggtgtagccagttgtttgggattacaacagtattaaaatccttaaaaataaagctcttctcatgcctgtaatcccagcactttgggaggctgaggcgggcagatcacttgaggccaggagtttgagaccagcctggccaacatgcaaaaccctatctctactaaaaataaaaaaattaaccaggcgtgatggtgcatgcctataatcccagctacttgggaggctgaggcacgagaatcacttgactccaggaactgaaggttgtggtgacctgagaccacgccactgcgctacagcctgggtgacagagcgagactgtctcaaaagaaaaaaaaaaggctctaaaagatgtccatgatggacatcactgtttggcaatcaggaccccttgtttttctaaaggtaccttgatgtacttcttattgttttaatgtaatggcagatcaagttgctctgcccttccctacccaagacttgcgaactggttcccaattaggcaactcggcttctac

SEQ ID NO: 8104 - DNA, 848 bp, mus musculus
ttgagtcagtgctaattacgatgtccaagaaggcacaatgatcagattatcaaataattttttagcttgggaagtgatgaggagggagcttcaagtggggaggggtctctatttgcatctatcaggctacactaatgtgaaaagtctgatgacagacctgcagccctttcacttggtacagtgttcaggtgctcacacaagccagtccagactttggaaagctgatggttcatgaaagaaagtggggtttgcgatggaggaaggtgttctgtgtgttacgttgagcagggtggtactatttttccaggcttcagtggagaacctaagtgttatctcagaggggtggagggtggcgtgtggcctgtggccatgcctggcatggctttccaggatggtgaggaatattttaatctcttttgcccataaggcaggggttttcaggaccctaaaacaaacttcaaagagctctaaggacttctcaaagtcctttttggatagtaatgcaatgtctgtgacgtccaaaggaagaaaattcgtcagcggagatttgaactaaaattacttgtgctcatcagcagtttttgaagatgcagagcgctcggttatgaaaatagaacaaaaatgcacatctagtttgtccttagcacttctggttcatcatactttgaaaaagcctggcctgttgcccaagtcttttgaggcaaccctgggttgttgcccaagtcctttgagggtaagcaacagcaatgtctcagaaaacattaactcaacagcccacccgctccaattcattaagccctcatcttttttatctgaccaatagatgcccccagttaagatctaaatga

SEQ ID NO: 8105 - DNA, 1198 bp, mus musculus
aaatatttgtgtcccaacagcttttgtagctgttcaaaaaaaaaaatgcagaaaaaatagaacatttattttcttcataagtaaccacaatttactaatgagatgtgtgtgcttgttgagcactgagcactaaatagcttttctttttctttctttttttttttttttaagatggagttttactcttgtcacccaggttggagtgcaatggcacggtctcggctcactgcaacctctgcctacgggttcaagcaattctcctgcctcagcctctcaagtagctgggattgcaggcacccgctaccacacctggctaatgtttgtatttttagtagagacggggtttcaccatgttggccaggctggtctcgaactcctgacctcaggtgatctgcccaccatggccttccaaagtgctgggattacgggcgtgagccactgctcccagcctgcatagcttttcaaaccttggaacagagtacactgccgtcctcatttcctgttccacattgattttcaagtgacacttgcttttatcacagcaaccagcaaaaacccggtttcactaatatatatcatccaaggaatgcactgcaatctaatatgacaactcaagcacctcaggttaatagtttggctggtttccagcatgtgttgagaatctcagtgtttccttctgtttaaaatatgcagcttccctgggagtttgctgtagtgccgtggggcatctgagcacacagttcaggagatgtggcatttgacacactttatttcattcagttcagattgtgcttttatccacatttcagagatttggaaactgaggattggaaagataactgccccaatgacatagtcctaccatttaatttttttttactgtaattattgtttgtgctgttgtgaggctattgtattaccatatattgtgtggctattattttcaggggtggggaatgaagtgtaaaaataagggaaggcgttaaggttaagagtgtaattggtagcattttctaatgagggaactgtacacttgtgtttttccctacaaactattaacatattaatatattagaggagaaagtatggtttaatttacagtaaagtcattaaaaacaaagtttctttcctgggccaagttaaatgtcaggttctagacttttggataaatatagtaggtggtaatgccaaacagtgt

SEQ ID NO: 8106 - DNA, 1198 bp, mus musculus; identical to SEQ ID NO: 8105

SEQ ID NO: 8107 - DNA, 893 bp, mus musculus
cacaagcttttcagtgagaaaattgtcctttttttcctctttctctgttcttacctccccccttccttctctccttcccttttccactctttcctcaaacatatattgaacacatagcaggtgctaggtcttatgctaagtttggaaaatacacctcctgcatgaatggaatgtatattgtgtgtgtgtgtgtatgtgtgtgtgtgtgtgtgtgtatttatgtgtgtacatgcacacaagagcatacaccctgagaaagcaaggaggctcacagagctatgtgtgctgccttttcttagcaactttaactctaaagagtcctggaaaacccagactattgactagattggagaacgatgataagctccttcttcaactactcttgccgggcaccctcatgactgccgttggcttctcggcccacgagtctaatcacttgtgttcattcctggcttgtgagtcacagaggagtcatccctgaccctgacccataagaagaatggtcatttatttaccctttgaaacgtgaccaggtggctcattaattttgcagcattaattctaaggggaaatgagattccaaccagcgtcattaatcttgtaaaaatacagccacgagaagagagcatcgataatcagaatgtaattttctgagttaggaagtggtcaggacattggtgtcagggatccggcacatctaaggttttcatggcattctcgccaatggcccaaccaggtcaaggcaatggttttaagcctggaagaaaaagaccacttcaaaggttgttgattcctaagatagagcttagacccttctctggcaataataagaatgacatctattgaatcattaatatctggttgttaatcattctaactaaatacttttttta

SEQ ID NO: 8108 - DNA, 1067 bp, mus musculus
ttctctattgctatacacaaaccatatatatgacagttttgcatatttgcaaatgcaaatatatacacaaccaaatgggagaatgatctgcatattgtcattgtgctgacaaacctgtcttgatcactgctacggtgactccaaatcactgagtgcttcgaaaaggacaagaggaattccatacggaataggcaattaggttttggaacaatgtgcacaggctggtgttaactggttcccgtgagtcagggccattccattttggggattaaacacatcagcagaatgcccctttctctgcagctgacaagggggagttccaccccatacactgagggagagggtccccagaatcttccggggagtgaggaaacaaattccaacccccaaacaacctgattggaaagggagtgtttttatatacacatgtctccgaaatccggccagcaaatgataaacatcagctggtgtttagctaaatgttaaaaatcttattgaggcaaaagcaatgctagaaaggaacaacaacgaaaaaagccagctcagcctctgccccacggcctcgatttctctcccaaatcccaggtagctgagaggtggaaagtctagaaacagaatcgaacacgtctaatctcttttacaacaatgttcttattttaacccatgtcatcaggggaaatggctgaaaatagtgacaaatacaacatcaataaacataataataattgatttcccagagatgaaaaatttgaaattattggccatttccccctagagcattggttgattaatttaatgttcatcttagtctttcaaagacatcctcttatgttgatctgctttgccagactttgtgatgggttttgcggtttagggcccagtggttaaagtatattgcacagttctgcagttttaaagagaattctgatagtttaaggatgactgcagccaacaacagcaacaacaaaagttaagacacatcaagcaattaaatttccagagattggaactggagtttttcatacaggatataagttcagtggctgtactactcagtttttctagct

SEQ ID NO: 8109 - DNA, 843 bp, mus musculus
aaaggaagaggaagagacagacttcctcccacctcccaccatgtgaggacacagtgaggagatggctgtctgcaagccaggaagagagctgaaactgctggcaccttgattgcggactcccaacctacagaactgggagaagtaaatttctgttgtttaagccgcccactctgtggtattttgttatggcagcctgggccaactaatacagaaggaactaagttaaacttgtatttttcagaaaaaaagcaactgtttgaacaggaataccaacattcaagcttgtatttgagtcacatacaggcattcccatttacctatcttttaaaaatagtcttttccttttaaatttctttccaactttattgggcatacaataaactgcaagcatttagaagtgtataatttaaagagttttgacataacgtttatccctgtgaaaccatcaccacaatcaagacaatgagcatggatctgtcacccccagaagtttcctcctgtccttttgtcgtctccctccctcccttgtccccagacaaccactgatctgttttctgtcaccatagatttgtttgcattttctgaaagtttatataaatggaatcccacagtatgtgccgtctctctccttttctggtctggcttctttcactcagcaaagctacttcgagagtcattcaggctgttgtgtacatcaaagtttccttcttttttactgctgagtaagagtccatggatatatacaatttctttatccatttcccattagtggacatttgggttgcttccagtaggtatatgtttaattttttaagaagctgccaaactgtttgccaaagtggt

SEQ ID NO: 8110 - DNA, 958 bp, mus musculus
cagactgcactcaaaacagcagaaattctctccaagaaaatgtgtaaatagctagtttctacaggagaggaaacctctctgagtttgtcaccttcagctttggttcacactccacctgacccatttaattatacaagggcatcagtcattgaaagctaaaattaacagttcatgacttttgccagagagctctgatatctccagtggaaattttccatactgctcttgtgacagactgacatccactgatgttgccacagagaaacaaaaaataagaaatgaggtttttgccttggtttttcagtaattgccacatggacagcctgcctggtcttggtgacaaccccactttggtcacattcacataacacatagtttttagtcattgactgtgggcctggtgctgagagtaaagaagtgcacaagacaaagagcctgtgcccagagccaggagagctggcctcctacaccagccccagcactcactggccacatgggttcaggccaagtcttgaaaatcacatagattcgaggcattggaagagttcccagggaaagaggcactccacaccaagtcaggaagagccagattaaattcccagctccctcccttaccatctgtgtggcatgagcctgaggtcacttagaaatggtcagaaaggaagaagcagatgaaatgggagagtgcaaggaagatccaggggaaaccacatagctatcgtttcttctttaatcagggtgtaacattcatatagtaaaatgtaataacatgcaccaatcttaagcacacaacataaggaactcttcacatgaatcccatataaccaccacccagatcaagatatagaacatttccagcacccacagtagacagacattttaatgtgaaaataccaaaagttgaatcccacaacttctattatgttaccacaatcagtcctgcctcactccagtgcca

SEQ ID NO: 8111 - DNA, 909 bp, mus musculus
agatgttcatcaatgcgggaatgaacaagtgcaacattgtatatgtatacatgaactattacacagcctttaacaaattcgcgctgacaaacttcactagacacgtgtgtatcaacagggattaattgaaaagacatggtagaggaaaaatgccagttgtagaataatttgaataacagcttatgatttatgtaaaacaagtgctatctataagtccgttacttaaatttctgggagaaggcaaagcagcttcaccctctgggtgaaccctggaaagggggagggtgggaaccacgatggagaggagtggcaacttcttctgtgatttttattgaagagaatatggtcttgcgtaagttctgtttcctctagtgattgaatactactttctaaattgaaaattatatcacaggcactttgctgagtaattagaaattcttccaaaccatgatttctaatgaatgcacggtaaatagatttgctatcagttatggagtttttcttctttcttctaaataaccctaaataaccttctaactttcttctaaatagccctaaatagatggttcatgtgcaaagttttgcctatacagtactttgtgctctttcctcgggagaaatttctggaagtagaattattaatgcaaagagtgtgggcattttaagactctcaatacctattggcaaattgcttcacataaaagttgaaaggtctgtccttaagtcctgctgcatcttttacacattgagcagaacttttatcctttttattgaaaaaatctttgtgaacttgacagatgagaaaaatgccgtctcggagctattttatttccatttttattgttagtgacaatgaactcctatgttgggtcatccgtcgtttttcctttaatttaaaataactgtctg

SEQ ID NO: 8112 - DNA, 1575 bp, mus musculus
tcagagcctcagaaaagttaagaaatcttccctgggtcaagctggtaggaggagggactggaactgaactcacatctccacctcctctcttcctactcctctgcctttcttgcacctagagcagtgtacaacatcaacaactgaccagggcgatcctagaggtaagagacagccgaatggcacggacccagccaagcccaggcctgcccaggtggaacagagccagctaggagcattcggtagcagaggtcagtccgctgattgactgttctcacttccaggcccacagcctcctccaccctgatggtctatgagtctagtgcggccctttgcacaattttagcaactgaacccttttcctcacagaattgtgataccgtcctaacatatgaagcatatataaacagttgggcaaatcataatagtttccattatttcataaatttgcatttgtggcaccaaggagagaattaatgggaacaagagggttcttgtgtgagttccgcatttggatttgggggttcgaggtggcagctataggctcacattagtgtctgcatcactttgcttcagtttgtcacggtggccccccaaatccagaaccgccctcctcgctgtgtgaggagggtcctgcctgcaccgctttgcagacatgggccagcctggatgcctgggcgacgctgccctgcgactcgctggcctgcaggacatctgcaaaacattcaggtctcacggcagtggccatgaacggcctcacagacactgagtggacctgaccccaaagagaatgcgtcgtccttgaacgtgtcgatatttaggttattacacaatgagtgtgttgctttgcaattagtgtctgaaagagttagagcagatgtacatatagaaacgaagaaacgaaatctgaatccatgctgacagattccccctccccaaaccttgctcaaggtaacacaggcgaccaggagcaagtcccggccggccccctgctagcgtggtctgagtggcccaagcaggacccctgcccaggctcactggactctcctggagcccccagacacgacacccttcctcatcactgaaaatccacttccacagtgtaggagatgcatggatctgagggccagtaggaagtgctggagctttaggctttagacattctttttttttttttttttgagacagggtctccatttgtggcccaggctggggtacagtggcgtgagaaattctttaacactctgccgagtcctggcccttggggagtgaggcctggctatgaggcttcttgtcagaactccgtgtgactctcaggatggaagaacagggtgggggctgctcctcccctccctccctccagcccctggcctttgtaaaacggctccgcctacgcgcctgtagccagtgcagaaccagggaggcctctccccttcccttcccaggaggggccccgccttgtcctccatgccggattctgttcgtcctcccccaggtcctctctgctgcctcccactgccccatttcctccaggaaccttcctctctcctaccaccagcctctctcctacccccagac

SEQ ID NO: 8113 - DNA, 798 bp, mus musculus
ttgctgtgtttctctgctacctaatctcagtgactgtgaaaggacattgtgtctgagccatggccagccgctggctggccccctgatctgccccccttctattgtttggatggccatctcctgctgggcctccctgactgtaaaatctctgtactgtttgttaggtttttggtgggaggctgtgataagttccaatgagctgccacttccctggatatgtcaagaagctgatggcaacttggccaattctggcagatatcaggcccccagttcagccccagtcaccctcttttacacatgtgggtcaaccactgtgtgctcagagggtcagtcccttcctctgctgtgtttttcttgagtccttgcactcacttcccctgccccagtcacgatgacccctaaagcttcctttgcccttgctttctagggcatccctagtgaaggggcaaacctgagatttctccgtggacctgacagccaaggcagggcactgtctcctgaggccagtgccagcacgtgcatggttcacagaaaaggatcctgggctcagaatctcgagaaccgcctgctcctaacaattcagcaagtcaggggcttcctctctgttagtccccaaatccttacttattttaaaaagactagaccctctctaaagactgttccattttaacatgtcctgattctgcatccgtgggttttgtgaaagagagctagctggcggttagagcctggaagaaggagggaagtggcacctcactagcatttatcacttttttccttctctttttaaaaataaaa

SEQ ID NO: 8114 - DNA, 798 bp, mus musculus; identical to SEQ ID NO: 8113

SEQ ID NO: 8115 - DNA, 485 bp, mus musculus
atgacatttcagaatcaaacattccccaaagtgttgcagagtgtctgttacatgaaaatggcccagtagaaacttaacaaacggctgtgatccaacagcagtggtcatagacacgtagtgggtgcactgggaagagagtgatgtgtgggacatgctgatcccaactctggggcatgagcatggggtgggaaggccaaccctgggccccctcacccatactcacttccccccatcctctgccaataggacagccaagagcacaagatcatcctctatgaaaaccccaacttcaccgggaagaagatggaaatcatagatgacgatgtacccagcttccacgcccatggctaccaggagaaggtgtcatctgtgcgggtgcagagtggcacgtaagtgcgttgccagccctggctcaccctgccccaggaactgagactctggggtcctaagtcctgctctgccctgtacacgctggtgatcttgca

SEQ ID NO: 8116 - DNA, 557 bp, mus musculus
tccaatccatgaatagcattcatgccccaaatggccaatcttatattcgtggcagacatcacaaatcaatcccagcatgcttctccgtggagcattgattcggcttctaaattctcaagtcaacgttccaagtagtcaccttctattgagatcagcacataagaagaaatgcaaactagttcaacccttctattttgtagatgaggaaatggaggcaaaataaggtgtcatggggggtctgggtggaccagctggtgccctctggctgcctgtttcatccagcctgtccagaagctccagagaagccctcgtccagctgggcaggcagggggtgccagagagaagcacagctgggcagctggcatgggctcatcccagcgcctccctgcccagccacactgcgatcggctctggcggtgtcccttctgtcccccacccgcctgctccccacagctgctcttttgaaagccctgcatgggaagctgttgatgcgtctctctgttcccttttcagaccattgtcccctcgctggcgccagccgtgttcttctcttggct

SEQ ID NO: 8117 - DNA, 820 bp, mus musculus
ttgccacaagtatattttactttcagaattaaaagaaagtagatgaagttactacactattttttctagcctatggcattttcactaaggacaacacacattgctactaaatattggtacagctaaaaatttcattaagtacttttaataacaactttcatttgtatagtctgccttttacaaagaactttcatgtatgctcttgcctgggtctcaaaacagttctttatagttgggatgactttcttttcgtttttgagacagagccttgctctgtcgcccaggctgaagtacagtggtgccttctcggctcactgcaacttccagctccgcctcctgcattcaagtgattctcctgccttagcctccagagtaactgggatcacaggcatgcaccaccacacccggctaatttttgtatttttagtagagacaaggtttcaccatgttggccaggctggtcttgaactcctgacctcaagtgatctgcctgccttggcctcccaaagtgctgggattacaggcatgagtcactgcacctggctgggatgactctttattggatatatctgtatatgtgagtctgcatgtgtctaattcttaggtaaaacacattcacagaattcaaaaaagaaaaatgtccattgagtttactgagcacctagcaggtgccaggttctatgtgataggtgctatatacactgacattatttcattaatcctattattatctctattttacccatgaagaagaaaggtttgcttcccctgagtgccataggtgatgtccagaaggaatgtatcctagactccaggcctt

SEQ ID NO: 8118 - DNA, 1255 bp, mus musculus
catcctgctttactggctgagttttctgctccttgaagccaggggctgtgattctccacttttgttgtagccctcacaggcctgggtccatggtggatgctccataggtatttgggtaattgttgtgggtagatgaaaggatggatggatgtttggtgattggctagttggttgatcagttggttgcttgattggttgttcagctgactggccagttggttgcttggctagttgactaactggtggttcgttggagaattggctggctgcttggttggctagttcttagcttggttgactgattgagtggctggttggcattttggttggtaggttgttttgatggctagttagttggttgcctggttagcaggttggttagttggttgcctggtttgttgtttggctgaatcttagatgattatttggatggtggctggctggttatttggatggttggctggctggttatttgactgactggctggctagttatttggatggttggctggctggttatttgactgactggctggctggttatttggatggttggatgactggttatttggatggttggctggctggttatttggatggttggctggctagagaacacagttagttgagtggttatctggctgttccattggctgattgctttgctgtttggctgatttgttagatggttgactatttggtaggttggctggttagaagttaaattgtttgactatttgttgtcagttggttggtttgttgcatagttggttggctgtttggtaggttggctggtttattggttgactgaataggtggctgattagaagtttgaatgactggctggtttgttggctgaatggttggttgatggttgcattgcatgattgatgcatgattggttagttggctgtttgttggctggttgactggttggttggatggtttgttgggtgcaggacagacactggaattgaccagggttagtcatgactcctctgtatcattggctataaccattatggagggggttgcccaatgtaattcttttcttcccattatccttacttctatctctccagctaccaaactgttccctgtgggctacaacctcatgaagccattcctgagtgaggacactcgcaggaaaattattgtgttgggaagtaagtagtgccagctcaatttcctgacctctatacatgacctttggagtgaggttgtcccattaccccatctagaactccacacatta

SEQ ID NO: 8119 - DNA, 1014 bp, mus musculus
acgaagacacccattccagtggaccactgtgacccaggaggcattcagccatcatgatgtggcctttacctccactcctgtcttgttctacccagattcagcacagccctttatagtgaagtcagagtcctcaagccaaatagctaaagctgttttatcacaacaaaggcctagtttgttccatgagtgtgcatttcatttcttcagttaaagccttcagagacacacaataaatttggaccaggggattttttagttattaatgctctctgaagaaaggcaacatctttttgagagcagcattggaccacaccccacaatctcaaatgattgaaattcatgaacatctaggatcccgtgaaggtcactggaccctgttttttctacttcaaatcctgtagtagcctactgaatgagaaaacatattctgacccattgggatcaaatcaaaggcacagtgaactcctcatagcatcttctttggaattactcaggaaccagaactttttacacaaatgtaagaaattctaccaaggagtccccttacctaacagcatctcacaaggctgcaccagattccagaaaaggcttctcttgatacatcaaggtagaacctctatggtaaatccctctgtttataatgcactttacagtttcaaagcacttgtacgtacatttatctcaattatcaaaataacagtgaattataatccctttttggaaatgagggaatgtaaattttaaaagttaagcaattatccaaggtgacacagctgtgaaagtggtagaggccaggctttctgacacccagtccagtactctccttggaattagcctccattttacccacagtgttaaaatggctgggtattgggaacctcaggaaattttccagcttcctgatctggtgcccctagtcacataggatgtgtgatcacgtgatagctacatctggaccagaatcccatggcaatatcccacggtttaagggcataatatctccgtggtggtaga

SEQ ID NO: 8120 - DNA, 1959 bp, mus musculus
gtaagacaaagctgcaggagcctttctgggcgtttggtggagcctagcgagtagccagccccagaatccagtgtctcccagggaagacggctcagcggaaaaacccggttcatgctgacccgtggcttatcagtgctgggggacctacagagtgagtcctctaggcggcactccctgcctatgcaggagacccctggcaccatccaggactcctagcaatgggaggacattcagctgggcagaggctgggttagatcaggacccaccccaggctgtctaggctgggtcaggacgccactctctgtgcacttgctctcccccagctcctgcacaggcagagcacccaactgctggcacagagactcagccggacctgcttccgccagtggagacaacaggtgggaacccaggagatgtcccctctgcacttccttctccatcctctggcctgtgaggcctgggcagtgaatgaccttcagcctacacctctagttcagtatttttactatcaccctccccagggccacctcctctaccaccttcctgtcatttccaggcacatcagcttccttccgtctgcagtctgcataagaacagttacttcaaggccagtttctctctctacagtgttgtattaaaaaatacatcagtggaggccgggcgcagtggctcacgcctgtaatcccagcactttgggaggccgaggcaggcggatcatgaggtcaggagatcgagaccatcctggctaacacggtgaaaccccgtctctactaaaaatacaaaaaaaatcagccaggcgtggtggtgggcgcctgtagtcccagctactcgggaggctgaggcaggagaatggcgtgaacctgggaggcagagcttgcagtgagctgagatagcaccactgcactccagcccgggcaacagagcgagactctgtctaaaaaaaaaaaaaaaaaaaaatatatatatatatatatatatatatataatcagtgggccgggcatgatggctcacgcctataatcccaggattttgggaggccgaggcaggaggatcacttgagcccagaagttcaagaccagcctgggcaacatagtgagaccccatctctacaaaaacaaaacagaaaaattagctgggtgtaggcagtgcacacctgtggtcccaactactcgggaggctgaggcgggaggattgcttgagcccgggaggtcaaggttgcagtgagctgtgatcatgccactgcacttcagcctggatgagagtgagattccatctcaaaaagaaaaatcagcataatatcttaaaaattaacatgaaatgtgttttaaggctttgctgggatcttgctttttaaaaagccaagagggatcacacagagcagcatccacacgtccccagctccctcttcccgttctgttgtcctgttttcaccattccccggacctcaggccgctgcctccacgcatccccctgcaggagccctttgccaccttctttcatgaaggtcattcctcaggccacagatggagcgtgtgttgagcatctcaccgccaggcacaaggctggcccttcctagtggaggaagtgggagcctcgactagagagggagccaagagggacgagctgggcagggccccgtgatcaccacggcctccttgaaggggctatagggaaatgatctggtctttctggccctagctggcagccaggaggcaggagcagcgggcgacagtgcgggccctgtggttctgggccttctcgctgcaggcaaaggtaattggggctctgcatcctaccatccctgcctctccctcaggccttagccctgccttgggtggagggagggcacctggtctgtgggggagctctaagcagggagacctgggcctcacctcctgccctccctggaggtgtgggccacgtggctggcctttgtactggaaaggaggagaaagaag

SEQ ID NO: 8121 - DNA, 1410 bp, mus musculus
ttgttctgcaggtcaaaagagacaatgtgggtgaagcagtcccctggcgtcaggtaccttttgtcggaactgctgggagctctatggcccaggcccaccccagcttacttgctgaccttggcctcgcctttcctgactttcagtctccctataaaattggagatcccacagagatctcagacccccctgcagcccctggtcagcccaggggaacagaccccatgtttctttccagcaacactgcccactcagcgaggaagcagccgcgacgcccacacttcctgttggagcctgcgcagagccagaggtccctggggtgcagcaccgtgggcaggcagggggagatggtcaggggtccccaaaggcagcgggcacctccatgtggggcctgtgttttggcagccctggggtgggtggccccctttccttcttgttctttggtcccagaggagggtcctgtggcctgaccaggctcttgccttccctgtgctcaggcctcagaagccacaggaacatggcctaggcatggctcagccagcagccccctccctgacgcggcccttcctggcagaggccccgacagcactggtcccacacagccccctgcctggggccctgtcaagcgcccctggcccgaagcagcccccgacggcaagcacaggcccggagctgctgctgctgcctctttcctccttcatgccctgcggggcggctgcaccagccagggtacgtcctccaccaccaggcctgggcactggggctctcactctggtctgacttctggtgctttctcatgccacagctgtactagtttctggaaaaccttggcacagggaggccactcatccatttgacaagcataggtagccactgcacaccaggtccaagggccacagcagtgaacagccagccaagggccctgccatcctgaagcttatattctagtcagagacaagcaaagaaaaacccctgcctgcaggccagtaaagtggctgcagatcacgtagggtcctgcaggccacagtgagaagtagcctgggatttgagaagagtaggaagtcggggaagggttttggcagggagcaccatgtcaggtttctgtgcaggctgtggtcaccatgaccacgtggtccaggcaagtagtactggtggcctgggctcagcggttgccacagaggggacaggtactctcttggaggcagatgaggcaggatatgctgctctgagggagttgctgaatgaggggaaagaaggaatccaggctgatgtgggctgctggcttgaataacttgggaaacagagttctttgactggaagaaggaactgggggtggggactggtttggggtgaagtgtcaagagtgttttgaaccaggctcttgatgtcaaatttgagagaaagcaaacgttg

SEQ ID NO: 8122 - DNA, 1415 bp, mus musculus
accgggagggaggggaatgctggggaaggaactgaggctggcatgtggggcctccctgagaatccatgtgcagaccacactcgggctccgtgctgggtgctcactgtgttggtggcccccacgtctgctcctactccacagccgcgtcgtgtgactccttcaagaaccagctggtcacccgggaagggaatgagctctatcactgtgtcatctacctggcccctggggactaccactgcttccactcccccaccgactggactgtgtcccaccggcgccacttcccaggtcagcccggggccagcgtggggggagctgcctctgtgggcttcatatagaggctctcagcttcttggtgttgggggaccaggctccagatcagggtcattgaggccaggagttgactgctttatgcaggctggttgtgggcaggggaccgtggggcccagtcagctcagcatttggagtgacatcggggcaacaggccatgagtccctttgggtcttggctgccatggggtggacacaccgggctctggacggggagtagcggcattccctgcctctgcaggctccctgatgtcagtgaaccctggcatggctcgctggatcaaagagctcttctgccataacgagcgggtggtcctgacgggggactggaaacatggcttcttctcactgacagctgtgggggccaccaacgtgggctccattcgcatctactttgaccgggtaagcaggatctaggccctgccaaagcccaagggccagacctcttgggtctacctgccttgtctgctgtgcggcggatgcgttgggactgaattctagggaggccacagctctggtcaggcctggctctgctgagcagctgtcctgagaatggccgctccacctgccagccagctgaggcttccctccctccttgcactgctggctggaagtggctggaagagatggagggaattaacctccttgcctggcacctggcttctgctaggaaccatggtcaaaggtgagagtgaggagggaacagaaagggagtgttgagctcggggtggctcatgttggttacagcatgaggggtcagcactcgcaggtctgctgcccaccctgcccccaggggctgcctttttgggtgtcagtttgtgaccaacggccttggctcccacgggtgctgctctcccagcaccatgcatggagaccactgggccccactgttccctgtcctccctgggcccagttcacagcaggtgtcaaggctgtgtgtgagatctggctagagcaggcccacctggccctgagatgccatccccacctcccttttggagctgggttgggtggtggtggggacaagcaacagagggagtgggactccaaacacatgtgggggtgacactgtgcacttggtggcct
